United States Patent Application Publication US 2021/0260219 A1 - sequence listing, part 2

SEQ ID NO: 31454 - DNA, 22 bp, Artificial Sequence
  chemically synthesized
ttccctaaacaatacagcataa

SEQ ID NO: 31455 - DNA, 22 bp, Artificial Sequence
  chemically synthesized
cctaaacaatacagcataacaa

SEQ ID NO: 31456 - DNA, 22 bp, Artificial Sequence
  chemically synthesized
aacaatacagcataacaactat

SEQ ID NO: 31457 - DNA, 22 bp, Artificial Sequence
  chemically synthesized
tttacatagcatttacattgta

SEQ ID NO: 31458 - DNA, 22 bp, Artificial Sequence
  chemically synthesized
acatagcatttacattgtatta

SEQ ID NO: 31459 - DNA, 22 bp, Artificial Sequence
  chemically synthesized
catagcatttacattgtattag

SEQ ID NO: 31460 - DNA, 22 bp, Artificial Sequence
  chemically synthesized
acattgtattagctattaagag

SEQ ID NO: 31461 - DNA, 22 bp, Artificial Sequence
  chemically synthesized
cattgtattagctattaagaga

SEQ ID NO: 31462 - DNA, 22 bp, Artificial Sequence
  chemically synthesized
tattagctattaagagaaacct

SEQ ID NO: 31463 - DNA, 22 bp, Artificial Sequence
  chemically synthesized
gctattaagagaaacctagaga

SEQ ID NO: 31464 - DNA, 22 bp, Artificial Sequence
  chemically synthesized
ttaagagaaacctagagatgat

SEQ ID NO: 31465 - DNA, 22 bp, Artificial Sequence
  chemically synthesized
agagaaacctagagatgattta

SEQ ID NO: 31466 - DNA, 22 bp, Artificial Sequence
  chemically synthesized
gagatgatttaaagtacaaagg

SEQ ID NO: 31467 - DNA, 22 bp, Artificial Sequence
  chemically synthesized
aaagtacaaaggaggatgtgtt

SEQ ID NO: 31468 - DNA, 22 bp, Artificial Sequence
  chemically synthesized
aagtacaaaggaggatgtgttt

SEQ ID NO: 31469 - DNA, 22 bp, Artificial Sequence
  chemically synthesized
aggttatatgcaaatagtaagc

SEQ ID NO: 31470 - DNA, 22 bp, Artificial Sequence
  chemically synthesized
ggttatatgcaaatagtaagcc

SEQ ID NO: 31471 - DNA, 22 bp, Artificial Sequence
  chemically synthesized
tatgcaaatagtaagccatttt

SEQ ID NO: 31472 - DNA, 22 bp, Artificial Sequence
  chemically synthesized
ttatatcggagacttgagcatc

SEQ ID NO: 31473 - DNA, 22 bp, Artificial Sequence
  chemically synthesized
tatatcggagacttgagcatcc

SEQ ID NO: 31474 - DNA, 22 bp, Artificial Sequence
  chemically synthesized
atatcggagacttgagcatcca

SEQ ID NO: 31475 - DNA, 22 bp, Artificial Sequence
  chemically synthesized
tatcggagacttgagcatccac

SEQ ID NO: 31476 - DNA, 22 bp, Artificial Sequence
  chemically synthesized
gagcatccacagatcttgatat

SEQ ID NO: 31477 - DNA, 22 bp, Artificial Sequence
  chemically synthesized
agcatccacagatcttgatatt

SEQ ID NO: 31478 - DNA, 22 bp, Artificial Sequence
  chemically synthesized
gatatttgcagggggtcttgcc

SEQ ID NO: 31479 - DNA, 22 bp, Artificial Sequence
  chemically synthesized
atatttgcagggggtcttgcca

SEQ ID NO: 31480 - DNA, 22 bp, Artificial Sequence
  chemically synthesized
gcagggggtcttgccaccaatt

SEQ ID NO: 31481 - DNA, 22 bp, Artificial Sequence
  chemically synthesized
cagggggtcttgccaccaattt

SEQ ID NO: 31482 - DNA, 22 bp, Artificial Sequence
  chemically synthesized
gccaccaattttccatggatac

SEQ ID NO: 31483 - DNA, 22 bp, Artificial Sequence
  chemically synthesized
ccaccaattttccatggatact

SEQ ID NO: 31484 - DNA, 22 bp, Artificial Sequence
  chemically synthesized
tccatggatactgaggaacgac

SEQ ID NO: 31485 - DNA, 22 bp, Artificial Sequence
  chemically synthesized
ccatggatactgaggaacgact

SEQ ID NO: 31486 - DNA, 22 bp, Artificial Sequence
  chemically synthesized
catggatactgaggaacgactg

SEQ ID NO: 31487 - DNA, 22 bp, Artificial Sequence
  chemically synthesized
aggaacgactgtaaatggatgc

SEQ ID NO: 31488 - DNA, 22 bp, Artificial Sequence
  chemically synthesized
taaatggatgcaggcatggatg

SEQ ID NO: 31489 - DNA, 22 bp, Artificial Sequence
  chemically synthesized
tttaggagtgtccagggccaag

SEQ ID NO: 31490 - DNA, 22 bp, Artificial Sequence
  chemically synthesized
aggagtgtccagggccaagtaa

SEQ ID NO: 31491 - DNA, 22 bp, Artificial Sequence
  chemically synthesized
ggagtgtccagggccaagtaaa

SEQ ID NO: 31492 - DNA, 22 bp, Artificial Sequence
  chemically synthesized
ctgagcagagaggtgggtggag

SEQ ID NO: 31493 - DNA, 22 bp, Artificial Sequence
  chemically synthesized
agcagagaggtgggtggaggct

SEQ ID NO: 31494 - DNA, 22 bp, Artificial Sequence
  chemically synthesized
tgaggcatcaatatgtggtggc

SEQ ID NO: 31495 - DNA, 22 bp, Artificial Sequence
  chemically synthesized
cattttggtgatttttttcctt

SEQ ID NO: 31496 - DNA, 22 bp, Artificial Sequence
  chemically synthesized
tggtgatttttttccttcacag

SEQ ID NO: 31497 - DNA, 22 bp, Artificial Sequence
  chemically synthesized
ggtgatttttttccttcacagt

SEQ ID NO: 31498 - DNA, 22 bp, Artificial Sequence
  chemically synthesized
gtgatttttttccttcacagtc

SEQ ID NO: 31499 - DNA, 22 bp, Artificial Sequence
  chemically synthesized
ttttccttcacagtcctcggct

SEQ ID NO: 31500 - DNA, 22 bp, Artificial Sequence
  chemically synthesized
tttccttcacagtcctcggctg

SEQ ID NO: 31501 - DNA, 22 bp, Artificial Sequence
  chemically synthesized
ttccttcacagtcctcggctgt

SEQ ID NO: 31502 - DNA, 22 bp, Artificial Sequence
  chemically synthesized
tccttcacagtcctcggctgtc

SEQ ID NO: 31503 - DNA, 22 bp, Artificial Sequence
  chemically synthesized
ccttcacagtcctcggctgtct

SEQ ID NO: 31504 - DNA, 22 bp, Artificial Sequence
  chemically synthesized
cttcacagtcctcggctgtctg

SEQ ID NO: 31505 - DNA, 22 bp, Artificial Sequence
  chemically synthesized
cacagtcctcggctgtctggga

SEQ ID NO: 31506 - DNA, 22 bp, Artificial Sequence
  chemically synthesized
acagtcctcggctgtctgggaa

SEQ ID NO: 31507 - DNA, 22 bp, Artificial Sequence
  chemically synthesized
ggctgtctgggaagagaaggat

SEQ ID NO: 31508 - DNA, 22 bp, Artificial Sequence
  chemically synthesized
tctgggaagagaaggatgaagg

SEQ ID NO: 31509 - DNA, 22 bp, Artificial Sequence
  chemically synthesized
ggaagagaaggatgaaggcaga

SEQ ID NO: 31510 - DNA, 22 bp, Artificial Sequence
  chemically synthesized
ctccaatttaggggctaggatt

SEQ ID NO: 31511 - DNA, 22 bp, Artificial Sequence
  chemically synthesized
caatttaggggctaggattgca

SEQ ID NO: 31512 - DNA, 22 bp, Artificial Sequence
  chemically synthesized
aggggctaggattgcagggtgg

SEQ ID NO: 31513 - DNA, 22 bp, Artificial Sequence
  chemically synthesized
ggggctaggattgcagggtggg

SEQ ID NO: 31514 - DNA, 22 bp, Artificial Sequence
  chemically synthesized
ggattgcagggtgggcacagca

SEQ ID NO: 31515 - DNA, 22 bp, Artificial Sequence
  chemically synthesized
cagggtgggcacagcattgcaa

SEQ ID NO: 31516 - DNA, 22 bp, Artificial Sequence
  chemically synthesized
caaacgagtgaaggaaattgag

SEQ ID NO: 31517 - DNA, 22 bp, Artificial Sequence
  chemically synthesized
agaaatatggccaatgaagagt

SEQ ID NO: 31518 - DNA, 22 bp, Artificial Sequence
  chemically synthesized
aagagaggcctggcatggtggc

SEQ ID NO: 31519 - DNA, 22 bp, Artificial Sequence
  chemically synthesized
gcatggtggctcacacctataa

SEQ ID NO: 31520 - DNA, 22 bp, Artificial Sequence
  chemically synthesized
acacctataatcccagcacttt

SEQ ID NO: 31521 - DNA, 22 bp, Artificial Sequence
  chemically synthesized
taatcccagcactttcagaggc

SEQ ID NO: 31522 - DNA, 22 bp, Artificial Sequence
  chemically synthesized
tcagaggcccaggcaggcagat

SEQ ID NO: 31523 - DNA, 22 bp, Artificial Sequence
  chemically synthesized
cagaggcccaggcaggcagatc

SEQ ID NO: 31524 - DNA, 22 bp, Artificial Sequence
  chemically synthesized
agaggcccaggcaggcagatca

SEQ ID NO: 31525 - DNA, 22 bp, Artificial Sequence
  chemically synthesized
gaggtcaggagttcgacaccag

SEQ ID NO: 31526 - DNA, 22 bp, Artificial Sequence
  chemically synthesized
aggtcaggagttcgacaccagc

SEQ ID NO: 31527 - DNA, 22 bp, Artificial Sequence
  chemically synthesized
gacaccagcctggccaacaagg

SEQ ID NO: 31528 - DNA, 22 bp, Artificial Sequence
  chemically synthesized
gccaacaaggtgaaatggtgaa

SEQ ID NO: 31529 - DNA, 22 bp, Artificial Sequence
  chemically synthesized
tactaaaaatacaaaaattagc

SEQ ID NO: 31530 - DNA, 22 bp, Artificial Sequence
  chemically synthesized
actaaaaatacaaaaattagct

SEQ ID NO: 31531 - DNA, 22 bp, Artificial Sequence
  chemically synthesized
ctaaaaatacaaaaattagctg

SEQ ID NO: 31532 - DNA, 22 bp, Artificial Sequence
  chemically synthesized
aaaatacaaaaattagctgggc

SEQ ID NO: 31533 - DNA, 22 bp, Artificial Sequence
  chemically synthesized
gctgggcatggtggcgggtgcc

SEQ ID NO: 31534 - DNA, 22 bp, Artificial Sequence
  chemically synthesized
ggcatggtggcgggtgcctgta

SEQ ID NO: 31535 - DNA, 22 bp, Artificial Sequence
  chemically synthesized
taatcccagctacttgggaggc

SEQ ID NO: 31536 - DNA, 22 bp, Artificial Sequence
  chemically synthesized
cttgggaggctgaggcaggaga

SEQ ID NO: 31537 - DNA, 22 bp, Artificial Sequence
  chemically synthesized
gggaggctgaggcaggagaata

SEQ ID NO: 31538 - DNA, 22 bp, Artificial Sequence
  chemically synthesized
ggaggctgaggcaggagaatag

SEQ ID NO: 31539 - DNA, 22 bp, Artificial Sequence
  chemically synthesized
aggcaggagaatagcttgaacc

SEQ ID NO: 31540 - DNA, 22 bp, Artificial Sequence
  chemically synthesized
gaacctgggagatggaggttgc

SEQ ID NO: 31541 - DNA, 22 bp, Artificial Sequence
  chemically synthesized
aacctgggagatggaggttgca

SEQ ID NO: 31542 - DNA, 22 bp, Artificial Sequence
  chemically synthesized
ggagatggaggttgcagtgagc

SEQ ID NO: 31543 - DNA, 22 bp, Artificial Sequence
  chemically synthesized
cagtgagctgagatcgcaccac

SEQ ID NO: 31544 - DNA, 22 bp, Artificial Sequence
  chemically synthesized
agatcgcaccactgcactccag

SEQ ID NO: 31545 - DNA, 22 bp, Artificial Sequence
  chemically synthesized
cactccagcctgggcgacagag

SEQ ID NO: 31546 - DNA, 22 bp, Artificial Sequence
  chemically synthesized
cagcctgggcgacagagcaaga

SEQ ID NO: 31547 - DNA, 22 bp, Artificial Sequence
  chemically synthesized
ggcgacagagcaagactctgtc

SEQ ID NO: 31548 - DNA, 22 bp, Artificial Sequence
  chemically synthesized
tgtcaaaaaaaaaagagttgaa

SEQ ID NO: 31549 - DNA, 22 bp, Artificial Sequence
  chemically synthesized
tcaaaaaaaaaagagttgaaga

SEQ ID NO: 31550 - DNA, 22 bp, Artificial Sequence
  chemically synthesized
aagagaaaaagtctaggctaaa

SEQ ID NO: 31551 - DNA, 22 bp, Artificial Sequence
  chemically synthesized
ggctaaattcaaagaaaaaaag

SEQ ID NO: 31552 - DNA, 22 bp, Artificial Sequence
  chemically synthesized
aattcaaagaaaaaaagtgagc

SEQ ID NO: 31553 - DNA, 22 bp, Artificial Sequence
  chemically synthesized
aaagaaaaaaagtgagcccaaa

SEQ ID NO: 31554 - DNA, 22 bp, Artificial Sequence
  chemically synthesized
gcagagcaagggaaaagcaggg

SEQ ID NO: 31555 - DNA, 22 bp, Artificial Sequence
  chemically synthesized
cagagcaagggaaaagcaggga

SEQ ID NO: 31556 - DNA, 22 bp, Artificial Sequence
  chemically synthesized
gaacactccataaagtgaacag

SEQ ID NO: 31557 - DNA, 22 bp, Artificial Sequence
  chemically synthesized
cataaagtgaacagctgcaatg

SEQ ID NO: 31558 - DNA, 22 bp, Artificial Sequence
  chemically synthesized
caatgaaaataagggaagaaag

SEQ ID NO: 31559 - DNA, 22 bp, Artificial Sequence
  chemically synthesized
agttcatctccgtttctttcct

SEQ ID NO: 31560 - DNA, 22 bp, Artificial Sequence
  chemically synthesized
gttcatctccgtttctttcctt

SEQ ID NO: 31561 - DNA, 22 bp, Artificial Sequence
  chemically synthesized
atctccgtttctttcctttcct

SEQ ID NO: 31562 - DNA, 22 bp, Artificial Sequence
  chemically synthesized
cgtttctttcctttccttttta

SEQ ID NO: 31563 - DNA, 22 bp, Artificial Sequence
  chemically synthesized
ctttcctttcctttttactttc

SEQ ID NO: 31564 - DNA, 22 bp, Artificial Sequence
  chemically synthesized
tttcctttcctttttactttcc

SEQ ID NO: 31565 - DNA, 22 bp, Artificial Sequence
  chemically synthesized
tcctttcctttttactttcctt

SEQ ID NO: 31566 - DNA, 22 bp, Artificial Sequence
  chemically synthesized
cctttcctttttactttccttt

SEQ ID NO: 31567 - DNA, 22 bp, Artificial Sequence
  chemically synthesized
ctttcctttttactttcctttc

SEQ ID NO: 31568 - DNA, 22 bp, Artificial Sequence
  chemically synthesized
tcctttttactttcctttctct

SEQ ID NO: 31569 - DNA, 22 bp, Artificial Sequence
  chemically synthesized
cctttttactttcctttctctt

SEQ ID NO: 31570 - DNA, 22 bp, Artificial Sequence
  chemically synthesized
ctttttactttcctttctcttc

SEQ ID NO: 31571 - DNA, 22 bp, Artificial Sequence
  chemically synthesized
tttactttcctttctcttcctt

SEQ ID NO: 31572 - DNA, 22 bp, Artificial Sequence
  chemically synthesized
ttactttcctttctcttccttt

SEQ ID NO: 31573 - DNA, 22 bp, Artificial Sequence
  chemically synthesized
tactttcctttctcttcctttt

SEQ ID NO: 31574 - DNA, 22 bp, Artificial Sequence
  chemically synthesized
actttcctttctcttccttttt

SEQ ID NO: 31575 - DNA, 22 bp, Artificial Sequence
  chemically synthesized
ctttcctttctcttcctttttg

SEQ ID NO: 31576 - DNA, 22 bp, Artificial Sequence
  chemically synthesized
tcctttctcttcctttttggag

SEQ ID NO: 31577 - DNA, 22 bp, Artificial Sequence
  chemically synthesized
cctttctcttcctttttggagt

SEQ ID NO: 31578 - DNA, 22 bp, Artificial Sequence
  chemically synthesized
ctttctcttcctttttggagtt

SEQ ID NO: 31579 - DNA, 22 bp, Artificial Sequence
  chemically synthesized
tctcttcctttttggagttaat

SEQ ID NO: 31580 - DNA, 22 bp, Artificial Sequence
  chemically synthesized
ctcttcctttttggagttaatc

SEQ ID NO: 31581 - DNA, 22 bp, Artificial Sequence
  chemically synthesized
tcttcctttttggagttaatca

SEQ ID NO: 31582 - DNA, 22 bp, Artificial Sequence
  chemically synthesized
ttcctttttggagttaatcagg

SEQ ID NO: 31583 - DNA, 22 bp, Artificial Sequence
  chemically synthesized
cctttttggagttaatcaggaa

SEQ ID NO: 31584 - DNA, 22 bp, Artificial Sequence
  chemically synthesized
ctttttggagttaatcaggaag

SEQ ID NO: 31585 - DNA, 22 bp, Artificial Sequence
  chemically synthesized
tttggagttaatcaggaagtag

SEQ ID NO: 31586 - DNA, 22 bp, Artificial Sequence
  chemically synthesized
ttggagttaatcaggaagtagt

SEQ ID NO: 31587 - DNA, 22 bp, Artificial Sequence
  chemically synthesized
tggagttaatcaggaagtagtc

SEQ ID NO: 31588 - DNA, 22 bp, Artificial Sequence
  chemically synthesized
ggagttaatcaggaagtagtcc

SEQ ID NO: 31589 - DNA, 22 bp, Artificial Sequence
  chemically synthesized
gagttaatcaggaagtagtccc

SEQ ID NO: 31590 - DNA, 22 bp, Artificial Sequence
  chemically synthesized
atcaggaagtagtcccaaatac

SEQ ID NO: 31591 - DNA, 22 bp, Artificial Sequence
  chemically synthesized
atcttataagcccttggtcctc

SEQ ID NO: 31592 - DNA, 22 bp, Artificial Sequence
  chemically synthesized
ataagcccttggtcctcttgag

SEQ ID NO: 31593 - DNA, 22 bp, Artificial Sequence
  chemically synthesized
taagcccttggtcctcttgaga

SEQ ID NO: 31594 - DNA, 22 bp, Artificial Sequence
  chemically synthesized
ggtcctcttgagatggtatcag

SEQ ID NO: 31595 - DNA, 22 bp, Artificial Sequence
  chemically synthesized
gtcctcttgagatggtatcaga

SEQ ID NO: 31596 - DNA, 22 bp, Artificial Sequence
  chemically synthesized
ttgagatggtatcagatatatt

SEQ ID NO: 31597 - DNA, 22 bp, Artificial Sequence
  chemically synthesized
gagatggtatcagatatattgc

SEQ ID NO: 31598 - DNA, 22 bp, Artificial Sequence
  chemically synthesized
agatggtatcagatatattgct

SEQ ID NO: 31599 - DNA, 22 bp, Artificial Sequence
  chemically synthesized
ctagacccttgaagaaaggaac

SEQ ID NO: 31600 - DNA, 22 bp, Artificial Sequence
  chemically synthesized
gacccttgaagaaaggaacaac

SEQ ID NO: 31601 - DNA, 22 bp, Artificial Sequence
  chemically synthesized
gaagaaaggaacaactccaggc

SEQ ID NO: 31602 - DNA, 22 bp, Artificial Sequence
  chemically synthesized
aagaaaggaacaactccaggca

SEQ ID NO: 31603 - DNA, 22 bp, Artificial Sequence
  chemically synthesized
caggcaacttcttgagtccctg

SEQ ID NO: 31604 - DNA, 22 bp, Artificial Sequence
  chemically synthesized
cttgagtccctgttattaattt

SEQ ID NO: 31605 - DNA, 22 bp, Artificial Sequence
  chemically synthesized
ttgagtccctgttattaatttt

SEQ ID NO: 31606 - DNA, 22 bp, Artificial Sequence
  chemically synthesized
gagtccctgttattaattttat

SEQ ID NO: 31607 - DNA, 22 bp, Artificial Sequence
  chemically synthesized
agtccctgttattaattttata

SEQ ID NO: 31608 - DNA, 22 bp, Artificial Sequence
  chemically synthesized
ttattaattttatacatacaca

SEQ ID NO: 31609 - DNA, 22 bp, Artificial Sequence
  chemically synthesized
ttaattttatacatacacacac

SEQ ID NO: 31610 - DNA, 22 bp, Artificial Sequence
  chemically synthesized
attttatacatacacacacata

SEQ ID NO: 31611 - DNA, 22 bp, Artificial Sequence
  chemically synthesized
tatacatacacacacatatatg

SEQ ID NO: 31612 - DNA, 22 bp, Artificial Sequence
  chemically synthesized
atacatacacacacatatatgt

SEQ ID NO: 31613 - DNA, 22 bp, Artificial Sequence
  chemically synthesized
tacatacacacacatatatgta

SEQ ID NO: 31614 - DNA, 22 bp, Artificial Sequence
  chemically synthesized
cttaacaatggggatatattct

SEQ ID NO: 31615 - DNA, 22 bp, Artificial Sequence
  chemically synthesized
aacaatggggatatattctgag

SEQ ID NO: 31616 - DNA, 22 bp, Artificial Sequence
  chemically synthesized
acaatggggatatattctgaga

SEQ ID NO: 31617 - DNA, 22 bp, Artificial Sequence
  chemically synthesized
tgagaaatgtgtcattaagcaa

SEQ ID NO: 31618 - DNA, 22 bp, Artificial Sequence
  chemically synthesized
agaaatgtgtcattaagcaatt

SEQ ID NO: 31619 - DNA, 22 bp, Artificial Sequence
  chemically synthesized
agcaatttcatcattgtgcgaa

SEQ ID NO: 31620 - DNA, 22 bp, Artificial Sequence
  chemically synthesized
catcattgtgcgaacataatag

SEQ ID NO: 31621 - DNA, 22 bp, Artificial Sequence
  chemically synthesized
atcattgtgcgaacataataga

SEQ ID NO: 31622 - DNA, 22 bp, Artificial Sequence
  chemically synthesized
tgcgaacataatagagtgtact

SEQ ID NO: 31623 - DNA, 22 bp, Artificial Sequence
  chemically synthesized
acctaaacctaaatggtatagc

SEQ ID NO: 31624 - DNA, 22 bp, Artificial Sequence
  chemically synthesized
cctaaacctaaatggtatagct

SEQ ID NO: 31625 - DNA, 22 bp, Artificial Sequence
  chemically synthesized
aacctaaatggtatagcttact

SEQ ID NO: 31626 - DNA, 22 bp, Artificial Sequence
  chemically synthesized
aatggtatagcttactacatac

SEQ ID NO: 31627 - DNA, 22 bp, Artificial Sequence
  chemically synthesized
actacatacctaggttgtattg

SEQ ID NO: 31628 - DNA, 22 bp, Artificial Sequence
  chemically synthesized
ctacatacctaggttgtattga

SEQ ID NO: 31629 - DNA, 22 bp, Artificial Sequence
  chemically synthesized
catacctaggttgtattgatgt

SEQ ID NO: 31630 - DNA, 22 bp, Artificial Sequence
  chemically synthesized
ggttgtattgatgtggcctatt

SEQ ID NO: 31631 - DNA, 22 bp, Artificial Sequence
  chemically synthesized
tattgatgtggcctattgctcc

SEQ ID NO: 31632 - DNA, 22 bp, Artificial Sequence
  chemically synthesized
atgtggcctattgctcctaggc

SEQ ID NO: 31633 - DNA, 22 bp, Artificial Sequence
  chemically synthesized
ttgctcctaggctcctgggctg

SEQ ID NO: 31634 - DNA, 22 bp, Artificial Sequence
  chemically synthesized
ctcctaggctcctgggctgcaa

SEQ ID NO: 31635 - DNA, 22 bp, Artificial Sequence
  chemically synthesized
ctaggctcctgggctgcaaacc

SEQ ID NO: 31636 - DNA, 22 bp, Artificial Sequence
  chemically synthesized
ggctcctgggctgcaaacctgt

SEQ ID NO: 31637 - DNA, 22 bp, Artificial Sequence
  chemically synthesized
ctgggctgcaaacctgtacagc

SEQ ID NO: 31638 - DNA, 22 bp, Artificial Sequence
  chemically synthesized
ggctgcaaacctgtacagcatg

SEQ ID NO: 31639 - DNA, 22 bp, Artificial Sequence
  chemically synthesized
caaacctgtacagcatgtgact

SEQ ID NO: 31640 - DNA, 22 bp, Artificial Sequence
  chemically synthesized
tacagcatgtgactgtactgaa

SEQ ID NO: 31641 - DNA, 22 bp, Artificial Sequence
  chemically synthesized
tactgaacactgtaggcaatgg

SEQ ID NO: 31642 - DNA, 22 bp, Artificial Sequence
  chemically synthesized
aacactgtaggcaatggtaaca

SEQ ID NO: 31643 - DNA, 22 bp, Artificial Sequence
  chemically synthesized
taggcaatggtaacagtggtat

SEQ ID NO: 31644 - DNA, 22 bp, Artificial Sequence
  chemically synthesized
gtgtatctaaacatagaaaagg

SEQ ID NO: 31645 - DNA, 22 bp, Artificial Sequence
  chemically synthesized
tgtatctaaacatagaaaaggt

SEQ ID NO: 31646 - DNA, 22 bp, Artificial Sequence
  chemically synthesized
aacatagaaaaggtacagtgaa

SEQ ID NO: 31647 - DNA, 22 bp, Artificial Sequence
  chemically synthesized
taaccttatgggaccactgtcg

SEQ ID NO: 31648 - DNA, 22 bp, Artificial Sequence
  chemically synthesized
atgggaccactgtcgtataatg

SEQ ID NO: 31649 - DNA, 22 bp, Artificial Sequence
  chemically synthesized
tgggaccactgtcgtataatgt

SEQ ID NO: 31650 - DNA, 22 bp, Artificial Sequence
  chemically synthesized
tcgtataatgtggtccatcatt

SEQ ID NO: 31651 - DNA, 22 bp, Artificial Sequence
  chemically synthesized
accaaaatgtcattgtgcagca

SEQ ID NO: 31652 - DNA, 22 bp, Artificial Sequence
  chemically synthesized
tgcagcaaatgattatctcata

SEQ ID NO: 31653 - DNA, 22 bp, Artificial Sequence
  chemically synthesized
tctcatatatatatatatatga

SEQ ID NO: 31654 - DNA, 22 bp, Artificial Sequence
  chemically synthesized
atatatatatatatatgatatg

SEQ ID NO: 31655 - DNA, 22 bp, Artificial Sequence
  chemically synthesized
agatagagacatctatcctcca

SEQ ID NO: 31656 - DNA, 22 bp, Artificial Sequence
  chemically synthesized
tcctccagagttcaggagtgtc

SEQ ID NO: 31657 - DNA, 22 bp, Artificial Sequence
  chemically synthesized
cagagttcaggagtgtctcttc

SEQ ID NO: 31658 - DNA, 22 bp, Artificial Sequence
  chemically synthesized
aggagtgtctcttcagactagg

SEQ ID NO: 31659 - DNA, 22 bp, Artificial Sequence
  chemically synthesized
ttcagactaggtagatgtagct

SEQ ID NO: 31660 - DNA, 22 bp, Artificial Sequence
  chemically synthesized
cagactaggtagatgtagctta

SEQ ID NO: 31661 - DNA, 22 bp, Artificial Sequence
  chemically synthesized
agactaggtagatgtagcttaa

SEQ ID NO: 31662 - DNA, 22 bp, Artificial Sequence
  chemically synthesized
ggtagatgtagcttaaaaaaaa

SEQ ID NO: 31663 - DNA, 22 bp, Artificial Sequence
  chemically synthesized
aaaaaaaacatatcctgaattc

SEQ ID NO: 31664 - DNA, 22 bp, Artificial Sequence
  chemically synthesized
aaaaaaacatatcctgaattct

SEQ ID NO: 31665 - DNA, 22 bp, Artificial Sequence
  chemically synthesized
aattctagagagatgcttaaat

SEQ ID NO: 31666 - DNA, 22 bp, Artificial Sequence
  chemically synthesized
tagagagatgcttaaatcactg

SEQ ID NO: 31667 - DNA, 22 bp, Artificial Sequence
  chemically synthesized
gagagatgcttaaatcactgca

SEQ ID NO: 31668 - DNA, 22 bp, Artificial Sequence
  chemically synthesized
aaatcactgcaattcctataac

SEQ ID NO: 31669 - DNA, 22 bp, Artificial Sequence
  chemically synthesized
aatcactgcaattcctataaca

SEQ ID NO: 31670 - DNA, 22 bp, Artificial Sequence
  chemically synthesized
caattcctataacacttgccaa

SEQ ID NO: 31671 - DNA, 22 bp, Artificial Sequence
  chemically synthesized
ctataacacttgccaaccaaag

SEQ ID NO: 31672 - DNA, 22 bp, Artificial Sequence
  chemically synthesized
taacacttgccaaccaaaggtg

SEQ ID NO: 31673 - DNA, 22 bp, Artificial Sequence
  chemically synthesized
gccaaccaaaggtgctgttgat

SEQ ID NO: 31674 - DNA, 22 bp, Artificial Sequence
  chemically synthesized
ccaaccaaaggtgctgttgatc

SEQ ID NO: 31675 - DNA, 22 bp, Artificial Sequence
  chemically synthesized
ttgatctgaaattgctttttta

SEQ ID NO: 31676 - DNA, 22 bp, Artificial Sequence
  chemically synthesized
atctgaaattgcttttttaaat

SEQ ID NO: 31677 - DNA, 22 bp, Artificial Sequence
  chemically synthesized
aaattgcttttttaaattaatg

SEQ ID NO: 31678 - DNA, 22 bp, Artificial Sequence
  chemically synthesized
cttttttaaattaatgcagtga

SEQ ID NO: 31679 - DNA, 22 bp, Artificial Sequence
  chemically synthesized
ttttaaattaatgcagtgattt

SEQ ID NO: 31680 - DNA, 22 bp, Artificial Sequence
  chemically synthesized
tttaaattaatgcagtgatttt

SEQ ID NO: 31681 - DNA, 22 bp, Artificial Sequence
  chemically synthesized
ttaaattaatgcagtgattttt

SEQ ID NO: 31682 - DNA, 22 bp, Artificial Sequence
  chemically synthesized
taaattaatgcagtgatttttc

SEQ ID NO: 31683 - DNA, 22 bp, Artificial Sequence
  chemically synthesized
aaattaatgcagtgatttttct

SEQ ID NO: 31684 - DNA, 22 bp, Artificial Sequence
  chemically synthesized
aattaatgcagtgatttttctt

SEQ ID NO: 31685 - DNA, 22 bp, Artificial Sequence
  chemically synthesized
atgcagtgatttttctttaaca

SEQ ID NO: 31686 - DNA, 22 bp, Artificial Sequence
  chemically synthesized
ttctttaacatctagtgacaga

SEQ ID NO: 31687 - DNA, 22 bp, Artificial Sequence
  chemically synthesized
tctttaacatctagtgacagac

SEQ ID NO: 31688 - DNA, 22 bp, Artificial Sequence
  chemically synthesized
ctttaacatctagtgacagaca

SEQ ID NO: 31689 - DNA, 22 bp, Artificial Sequence
  chemically synthesized
tttaacatctagtgacagacac

SEQ ID NO: 31690 - DNA, 22 bp, Artificial Sequence
  chemically synthesized
taacatctagtgacagacactg

SEQ ID NO: 31691 - DNA, 22 bp, Artificial Sequence
  chemically synthesized
aacatctagtgacagacactgg

SEQ ID NO: 31692 - DNA, 22 bp, Artificial Sequence
  chemically synthesized
acatctagtgacagacactggg

SEQ ID NO: 31693 - DNA, 22 bp, Artificial Sequence
  chemically synthesized
gtgacagacactggggtcacat

SEQ ID NO: 31694 - DNA, 22 bp, Artificial Sequence
  chemically synthesized
gggtcacatttgcagctggacc

SEQ ID NO: 31695 - DNA, 22 bp, Artificial Sequence
  chemically synthesized
gcagctggaccataattaggct

SEQ ID NO: 31696 - DNA, 22 bp, Artificial Sequence
  chemically synthesized
cagctggaccataattaggctt

SEQ ID NO: 31697 - DNA, 22 bp, Artificial Sequence
  chemically synthesized
gaccataattaggcttctgttc

SEQ ID NO: 31698 - DNA, 22 bp, Artificial Sequence
  chemically synthesized
ggcttctgttcttcaggagaca

SEQ ID NO: 31699 - DNA, 22 bp, Artificial Sequence
  chemically synthesized
ctgttcttcaggagacatttgt

SEQ ID NO: 31700 - DNA, 22 bp, Artificial Sequence
  chemically synthesized
tgttcttcaggagacatttgtt

SEQ ID NO: 31701 - DNA, 22 bp, Artificial Sequence
  chemically synthesized
ttcttcaggagacatttgttca

SEQ ID NO: 31702 - DNA, 22 bp, Artificial Sequence
  chemically synthesized
ttcaggagacatttgttcaaag

SEQ ID NO: 31703 - DNA, 22 bp, Artificial Sequence
  chemically synthesized
caggagacatttgttcaaagtc

SEQ ID NO: 31704 - DNA, 22 bp, Artificial Sequence
  chemically synthesized
aggagacatttgttcaaagtca

SEQ ID NO: 31705 - DNA, 22 bp, Artificial Sequence
  chemically synthesized
gttcaaagtcatttgggcaacc

SEQ ID NO: 31706 - DNA, 22 bp, Artificial Sequence
  chemically synthesized
ttcaaagtcatttgggcaacca

SEQ ID NO: 31707 - DNA, 22 bp, Artificial Sequence
  chemically synthesized
aaagtcatttgggcaaccatat

SEQ ID NO: 31708 - DNA, 22 bp, Artificial Sequence
  chemically synthesized
gggcaaccatattctgaaaaca

SEQ ID NO: 31709 - DNA, 22 bp, Artificial Sequence
  chemically synthesized
ggcaaccatattctgaaaacag

SEQ ID NO: 31710 - DNA, 22 bp, Artificial Sequence
  chemically synthesized
tgaaaacagcccagccagggtg

SEQ ID NO: 31711 - DNA, 22 bp, Artificial Sequence
  chemically synthesized
aaaacagcccagccagggtgat

SEQ ID NO: 31712 - DNA, 22 bp, Artificial Sequence
  chemically synthesized
tgcaaagatcctcaatgagcta

SEQ ID NO: 31713 - DNA, 22 bp, Artificial Sequence
  chemically synthesized
gcaaagatcctcaatgagctat

SEQ ID NO: 31714 - DNA, 22 bp, Artificial Sequence
  chemically synthesized
caaagatcctcaatgagctatt

SEQ ID NO: 31715 - DNA, 22 bp, Artificial Sequence
  chemically synthesized
aatgagctattttcaagtgatg

SEQ ID NO: 31716 - DNA, 22 bp, Artificial Sequence
  chemically synthesized
ttttcaagtgatgacaaagtgt

SEQ ID NO: 31717 - DNA, 22 bp, Artificial Sequence
  chemically synthesized
tcaagtgatgacaaagtgtgaa

SEQ ID NO: 31718 - DNA, 22 bp, Artificial Sequence
  chemically synthesized
caagtgatgacaaagtgtgaag

SEQ ID NO: 31719 - DNA, 22 bp, Artificial Sequence
  chemically synthesized
aagtgatgacaaagtgtgaagt

SEQ ID NO: 31720 - DNA, 22 bp, Artificial Sequence
  chemically synthesized
accgctcatttgagaactttct

SEQ ID NO: 31721 - DNA, 22 bp, Artificial Sequence
  chemically synthesized
atttgagaactttctttttcat

SEQ ID NO: 31722 - DNA, 22 bp, Artificial Sequence
  chemically synthesized
gagaactttctttttcatccaa

SEQ ID NO: 31723 - DNA, 22 bp, Artificial Sequence
  chemically synthesized
agaactttctttttcatccaaa

SEQ ID NO: 31724 - DNA, 22 bp, Artificial Sequence
  chemically synthesized
tctttttcatccaaagtaaatt

SEQ ID NO: 31725 - DNA, 22 bp, Artificial Sequence
  chemically synthesized
ctttttcatccaaagtaaattc

SEQ ID NO: 31726 - DNA, 22 bp, Artificial Sequence
  chemically synthesized
tttttcatccaaagtaaattca

SEQ ID NO: 31727 - DNA, 22 bp, Artificial Sequence
  chemically synthesized
tttcatccaaagtaaattcaaa

SEQ ID NO: 31728 - DNA, 22 bp, Artificial Sequence
  chemically synthesized
ttcatccaaagtaaattcaaat

SEQ ID NO: 31729 - DNA, 22 bp, Artificial Sequence
  chemically synthesized
tcatccaaagtaaattcaaata

SEQ ID NO: 31730 - DNA, 22 bp, Artificial Sequence
  chemically synthesized
catccaaagtaaattcaaatat

SEQ ID NO: 31731 - DNA, 22 bp, Artificial Sequence
  chemically synthesized
atccaaagtaaattcaaatatg

SEQ ID NO: 31732 - DNA, 22 bp, Artificial Sequence
  chemically synthesized
aaatatgattagaaatctgacc

SEQ ID NO: 31733 - DNA, 22 bp, Artificial Sequence
  chemically synthesized
gaaatctgaccttttattactg

SEQ ID NO: 31734 - DNA, 22 bp, Artificial Sequence
  chemically synthesized
accttttattactggaattctc

SEQ ID NO: 31735 - DNA, 22 bp, Artificial Sequence
  chemically synthesized
ttattactggaattctcttgac

SEQ ID NO: 31736 - DNA, 22 bp, Artificial Sequence
  chemically synthesized
tattactggaattctcttgact

SEQ ID NO: 31737 - DNA, 22 bp, Artificial Sequence
  chemically synthesized
attactggaattctcttgacta

SEQ ID NO: 31738 - DNA, 22 bp, Artificial Sequence
  chemically synthesized
ttactggaattctcttgactaa

SEQ ID NO: 31739 - DNA, 22 bp, Artificial Sequence
  chemically synthesized
ctggaattctcttgactaaaag

SEQ ID NO: 31740 - DNA, 22 bp, Artificial Sequence
  chemically synthesized
gaattctcttgactaaaagtaa

SEQ ID NO: 31741 - DNA, 22 bp, Artificial Sequence
  chemically synthesized
tcttgactaaaagtaaaattga

SEQ ID NO: 31742 - DNA, 22 bp, Artificial Sequence
  chemically synthesized
ttgactaaaagtaaaattgaat

SEQ ID NO: 31743 - DNA, 22 bp, Artificial Sequence
  chemically synthesized
gactaaaagtaaaattgaattt

SEQ ID NO: 31744 - DNA, 22 bp, Artificial Sequence
  chemically synthesized
actaaaagtaaaattgaatttt

SEQ ID NO: 31745 - DNA, 22 bp, Artificial Sequence
  chemically synthesized
aaagtaaaattgaattttaatt

SEQ ID NO: 31746 - DNA, 22 bp, Artificial Sequence
  chemically synthesized
aattttaattcctaaatctcca

SEQ ID NO: 31747 - DNA, 22 bp, Artificial Sequence
  chemically synthesized
taattcctaaatctccatgtgt

SEQ ID NO: 31748 - DNA, 22 bp, Artificial Sequence
  chemically synthesized
aattcctaaatctccatgtgta

SEQ ID NO: 31749 - DNA, 22 bp, Artificial Sequence
  chemically synthesized
attcctaaatctccatgtgtat

SEQ ID NO: 31750 - DNA, 22 bp, Artificial Sequence
  chemically synthesized
ctaaatctccatgtgtatacag

SEQ ID NO: 31751 - DNA, 22 bp, Artificial Sequence
  chemically synthesized
aatctccatgtgtatacagtac

SEQ ID NO: 31752 - DNA, 22 bp, Artificial Sequence
  chemically synthesized
catgtgtatacagtactgtggg

SEQ ID NO: 31753 - DNA, 22 bp, Artificial Sequence
  chemically synthesized
tgggaacatcacagattttggc

SEQ ID NO: 31754 - DNA, 22 bp, Artificial Sequence
  chemically synthesized
tggctccatgccctaaagagaa

SEQ ID NO: 31755 - DNA, 22 bp, Artificial Sequence
  chemically synthesized
ggctccatgccctaaagagaaa

SEQ ID NO: 31756 - DNA, 22 bp, Artificial Sequence
  chemically synthesized
gctccatgccctaaagagaaat

SEQ ID NO: 31757 - DNA, 22 bp, Artificial Sequence
  chemically synthesized
catgccctaaagagaaattggc

SEQ ID NO: 31758 - DNA, 22 bp, Artificial Sequence
  chemically synthesized
aagagaaattggctttcagatt

SEQ ID NO: 31759 - DNA, 22 bp, Artificial Sequence
  chemically synthesized
gctttcagattatttggattaa

SEQ ID NO: 31760 - DNA, 22 bp, Artificial Sequence
  chemically synthesized
tcagattatttggattaaaaac

SEQ ID NO: 31761 - DNA, 22 bp, Artificial Sequence
  chemically synthesized
cagattatttggattaaaaaca

SEQ ID NO: 31762 - DNA, 22 bp, Artificial Sequence
  chemically synthesized
agattatttggattaaaaacaa

SEQ ID NO: 31763 - DNA, 22 bp, Artificial Sequence
  chemically synthesized
tttggattaaaaacaaagactt

SEQ ID NO: 31764 - DNA, 22 bp, Artificial Sequence
  chemically synthesized
ggattaaaaacaaagactttct

SEQ ID NO: 31765 - DNA, 22 bp, Artificial Sequence
  chemically synthesized
gattaaaaacaaagactttctt

SEQ ID NO: 31766 - DNA, 22 bp, Artificial Sequence
  chemically synthesized
aaaacaaagactttcttaagag

SEQ ID NO: 31767 - DNA, 22 bp, Artificial Sequence
  chemically synthesized
tcttaagagatgtaaaattttc

SEQ ID NO: 31768 - DNA, 22 bp, Artificial Sequence
  chemically synthesized
cttaagagatgtaaaattttca

SEQ ID NO: 31769 - DNA, 22 bp, Artificial Sequence
  chemically synthesized
ttaagagatgtaaaattttcat

SEQ ID NO: 31770 - DNA, 22 bp, Artificial Sequence
  chemically synthesized
aagagatgtaaaattttcatga

SEQ ID NO: 31771 - DNA, 22 bp, Artificial Sequence
  chemically synthesized
agagatgtaaaattttcatgat

SEQ ID NO: 31772 - DNA, 22 bp, Artificial Sequence
  chemically synthesized
tcatgatgttttcttttttgct

SEQ ID NO: 31773 - DNA, 22 bp, Artificial Sequence
  chemically synthesized
catgatgttttcttttttgcta

SEQ ID NO: 31774 - DNA, 22 bp, Artificial Sequence
  chemically synthesized
atgatgttttcttttttgctaa

SEQ ID NO: 31775 - DNA, 22 bp, Artificial Sequence
  chemically synthesized
tcttttttgctaaaactaaaga

SEQ ID NO: 31776 - DNA, 22 bp, Artificial Sequence
  chemically synthesized
cttttttgctaaaactaaagaa

SEQ ID NO: 31777 - DNA, 22 bp, Artificial Sequence
  chemically synthesized
ttttttgctaaaactaaagaat

SEQ ID NO: 31778 - DNA, 22 bp, Artificial Sequence
  chemically synthesized
ttttgctaaaactaaagaatta

SEQ ID NO: 31779 - DNA, 22 bp, Artificial Sequence
  chemically synthesized
tttgctaaaactaaagaattat

SEQ ID NO: 31780 - DNA, 22 bp, Artificial Sequence
  chemically synthesized
ttgctaaaactaaagaattatt

SEQ ID NO: 31781 - DNA, 22 bp, Artificial Sequence
  chemically synthesized
tgctaaaactaaagaattattc

SEQ ID NO: 31782 - DNA, 22 bp, Artificial Sequence
  chemically synthesized
gctaaaactaaagaattattct

SEQ ID NO: 31783 - DNA, 22 bp, Artificial Sequence
  chemically synthesized
ctaaaactaaagaattattctt

SEQ ID NO: 31784 - DNA, 22 bp, Artificial Sequence
  chemically synthesized
aaactaaagaattattctttta

SEQ ID NO: 31785 - DNA, 22 bp, Artificial Sequence
  chemically synthesized
aagaattattcttttacatttc

SEQ ID NO: 31786 - DNA, 22 bp, Artificial Sequence
  chemically synthesized
ttcttttacatttcagtttttc

SEQ ID NO: 31787 - DNA, 22 bp, Artificial Sequence
  chemically synthesized
ttttacatttcagtttttcttg

SEQ ID NO: 31788 - DNA, 22 bp, Artificial Sequence
  chemically synthesized
ttacatttcagtttttcttgat

SEQ ID NO: 31789 - DNA, 22 bp, Artificial Sequence
  chemically synthesized
tacatttcagtttttcttgatc

SEQ ID NO: 31790 - DNA, 22 bp, Artificial Sequence
  chemically synthesized
acatttcagtttttcttgatca

SEQ ID NO: 31791 - DNA, 22 bp, Artificial Sequence
  chemically synthesized
catttcagtttttcttgatcat

SEQ ID NO: 31792 - DNA, 22 bp, Artificial Sequence
  chemically synthesized
cagtttttcttgatcatgaaaa

SEQ ID NO: 31793 - DNA, 22 bp, Artificial Sequence
  chemically synthesized
agtttttcttgatcatgaaaac

SEQ ID NO: 31794 - DNA, 22 bp, Artificial Sequence
  chemically synthesized
ttcttgatcatgaaaacgccaa

SEQ ID NO: 31795 - DNA, 22 bp, Artificial Sequence
  chemically synthesized
tcttgatcatgaaaacgccaac

SEQ ID NO: 31796 - DNA, 22 bp, Artificial Sequence
  chemically synthesized
cttgatcatgaaaacgccaaca

SEQ ID NO: 31797 - DNA, 22 bp, Artificial Sequence
  chemically synthesized
ttgatcatgaaaacgccaacaa

SEQ ID NO: 31798 - DNA, 22 bp, Artificial Sequence
  chemically synthesized
gatcatgaaaacgccaacaaaa

SEQ ID NO: 31799 - DNA, 22 bp, Artificial Sequence
  chemically synthesized
atcatgaaaacgccaacaaaat

SEQ ID NO: 31800 - DNA, 22 bp, Artificial Sequence
  chemically synthesized
tgaatcggccaaagaggtataa

SEQ ID NO: 31801 - DNA, 22 bp, Artificial Sequence
  chemically synthesized
aatcggccaaagaggtataatt

SEQ ID NO: 31802 - DNA, 22 bp, Artificial Sequence
  chemically synthesized
aggtaaattggaagagtttgtt

SEQ ID NO: 31803 - DNA, 22 bp, Artificial Sequence
  chemically synthesized
gaagagtttgttcaagggaacc

SEQ ID NO: 31804 - DNA, 22 bp, Artificial Sequence
  chemically synthesized
gttcaagggaaccttgagagag

SEQ ID NO: 31805 - DNA, 22 bp, Artificial Sequence
  chemically synthesized
ttcaagggaaccttgagagaga

SEQ ID NO: 31806 - DNA, 22 bp, Artificial Sequence
  chemically synthesized
aagggaaccttgagagagaatg

SEQ ID NO: 31807 - DNA, 22 bp, Artificial Sequence
  chemically synthesized
gagagagaatgtatggaagaaa

SEQ ID NO: 31808 - DNA, 22 bp, Artificial Sequence
  chemically synthesized
agagagaatgtatggaagaaaa

SEQ ID NO: 31809 - DNA, 22 bp, Artificial Sequence
  chemically synthesized
tgaagaagcacgagaagttttt

SEQ ID NO: 31810 - DNA, 22 bp, Artificial Sequence
  chemically synthesized
gaagaagcacgagaagtttttg

SEQ ID NO: 31811 - DNA, 22 bp, Artificial Sequence
  chemically synthesized
aagaagcacgagaagtttttga

SEQ ID NO: 31812 - DNA, 22 bp, Artificial Sequence
  chemically synthesized
tttcagtgttttcaaaaacttc

SEQ ID NO: 31813 - DNA, 22 bp, Artificial Sequence
  chemically synthesized
tcagtgttttcaaaaacttctc

SEQ ID NO: 31814 - DNA, 22 bp, Artificial Sequence
  chemically synthesized
cagtgttttcaaaaacttctcg

SEQ ID NO: 31815 - DNA, 22 bp, Artificial Sequence
  chemically synthesized
agtgttttcaaaaacttctcgt

SEQ ID NO: 31816 - DNA, 22 bp, Artificial Sequence
  chemically synthesized
tcaaaaacttctcgtgcttctt

SEQ ID NO: 31817 - DNA, 22 bp, Artificial Sequence
  chemically synthesized
caaaaacttctcgtgcttcttc

SEQ ID NO: 31818 - DNA, 22 bp, Artificial Sequence
  chemically synthesized
aaaaacttctcgtgcttcttca

SEQ ID NO: 31819 - DNA, 22 bp, Artificial Sequence
  chemically synthesized
ctcgtgcttcttcaaaactaca

SEQ ID NO: 31820 - DNA, 22 bp, Artificial Sequence
  chemically synthesized
tcgtgcttcttcaaaactacac

SEQ ID NO: 31821 - DNA, 22 bp, Artificial Sequence
  chemically synthesized
gtgcttcttcaaaactacactt

SEQ ID NO: 31822 - DNA, 22 bp, Artificial Sequence
  chemically synthesized
cttcaaaactacacttttcttc

SEQ ID NO: 31823 - DNA, 22 bp, Artificial Sequence
  chemically synthesized
ttcaaaactacacttttcttcc

SEQ ID NO: 31824 - DNA, 22 bp, Artificial Sequence
  chemically synthesized
caaaactacacttttcttccat

SEQ ID NO: 31825 - DNA, 22 bp, Artificial Sequence
  chemically synthesized
aaaactacacttttcttccata

SEQ ID NO: 31826 - DNA, 22 bp, Artificial Sequence
  chemically synthesized
cacttttcttccatacattctc

SEQ ID NO: 31827 - DNA, 22 bp, Artificial Sequence
  chemically synthesized
ttcttccatacattctctctca

SEQ ID NO: 31828 - DNA, 22 bp, Artificial Sequence
  chemically synthesized
tcttccatacattctctctcaa

SEQ ID NO: 31829 - DNA, 22 bp, Artificial Sequence
  chemically synthesized
cttccatacattctctctcaag

SEQ ID NO: 31830 - DNA, 22 bp, Artificial Sequence
  chemically synthesized
ttccatacattctctctcaagg

SEQ ID NO: 31831 - DNA, 22 bp, Artificial Sequence
  chemically synthesized
ccatacattctctctcaaggtt

SEQ ID NO: 31832 - DNA, 22 bp, Artificial Sequence
  chemically synthesized
catacattctctctcaaggttc

SEQ ID NO: 31833 - DNA, 22 bp, Artificial Sequence
  chemically synthesized
tctctcaaggttcccttgaaca

SEQ ID NO: 31834 - DNA, 22 bp, Artificial Sequence
  chemically synthesized
tctcaaggttcccttgaacaaa

SEQ ID NO: 31835 - DNA, 22 bp, Artificial Sequence
  chemically synthesized
tcaaggttcccttgaacaaact

SEQ ID NO: 31836 - DNA, 22 bp, Artificial Sequence
  chemically synthesized
aaggttcccttgaacaaactct

SEQ ID NO: 31837 - DNA, 22 bp, Artificial Sequence
  chemically synthesized
ccttgaacaaactcttccaatt

SEQ ID NO: 31838 - DNA, 22 bp, Artificial Sequence
  chemically synthesized
gaacaaactcttccaatttacc

SEQ ID NO: 31839 - DNA, 22 bp, Artificial Sequence
  chemically synthesized
aacaaactcttccaatttacct

SEQ ID NO: 31840 - DNA, 22 bp, Artificial Sequence
  chemically synthesized
ttccaatttacctgaattatac

SEQ ID NO: 31841 - DNA, 22 bp, Artificial Sequence
  chemically synthesized
ccaatttacctgaattatacct

SEQ ID NO: 31842 - DNA, 22 bp, Artificial Sequence
  chemically synthesized
caatttacctgaattatacctc

SEQ ID NO: 31843 - DNA, 22 bp, Artificial Sequence
  chemically synthesized
acctgaattatacctctttggc

SEQ ID NO: 31844 - DNA, 22 bp, Artificial Sequence
  chemically synthesized
cctgaattatacctctttggcc

SEQ ID NO: 31845 - DNA, 22 bp, Artificial Sequence
  chemically synthesized
aattatacctctttggccgatt

SEQ ID NO: 31846 - DNA, 22 bp, Artificial Sequence
  chemically synthesized
tacctctttggccgattcagaa

SEQ ID NO: 31847 - DNA, 22 bp, Artificial Sequence
  chemically synthesized
tttggccgattcagaattttgt

SEQ ID NO: 31848 - DNA, 22 bp, Artificial Sequence
  chemically synthesized
tggccgattcagaattttgttg

SEQ ID NO: 31849 - DNA, 22 bp, Artificial Sequence
  chemically synthesized
ggccgattcagaattttgttgg

SEQ ID NO: 31850 - DNA, 22 bp, Artificial Sequence
  chemically synthesized
gccgattcagaattttgttggc

SEQ ID NO: 31851 - DNA, 22 bp, Artificial Sequence
  chemically synthesized
agaattttgttggcgttttcat

SEQ ID NO: 31852 - DNA, 22 bp, Artificial Sequence
  chemically synthesized
tgttggcgttttcatgatcaag

SEQ ID NO: 31853 - DNA, 22 bp, Artificial Sequence
  chemically synthesized
gttggcgttttcatgatcaaga

SEQ ID NO: 31854 - DNA, 22 bp, Artificial Sequence
  chemically synthesized
ttggcgttttcatgatcaagaa

SEQ ID NO: 31855 - DNA, 22 bp, Artificial Sequence
  chemically synthesized
gcgttttcatgatcaagaaaaa

SEQ ID NO: 31856 - DNA, 22 bp, Artificial Sequence
  chemically synthesized
tcatgatcaagaaaaactgaaa

SEQ ID NO: 31857 - DNA, 22 bp, Artificial Sequence
  chemically synthesized
catgatcaagaaaaactgaaat

SEQ ID NO: 31858 - DNA, 22 bp, Artificial Sequence
  chemically synthesized
atgatcaagaaaaactgaaatg

SEQ ID NO: 31859 - DNA, 22 bp, Artificial Sequence
  chemically synthesized
aaatgtaaaagaataattcttt

SEQ ID NO: 31860 - DNA, 22 bp, Artificial Sequence
  chemically synthesized
tttagttttagcaaaaaagaaa

SEQ ID NO: 31861 - DNA, 22 bp, Artificial Sequence
  chemically synthesized
tagttttagcaaaaaagaaaac

SEQ ID NO: 31862 - DNA, 22 bp, Artificial Sequence
  chemically synthesized
agttttagcaaaaaagaaaaca

SEQ ID NO: 31863 - DNA, 22 bp, Artificial Sequence
  chemically synthesized
gttttagcaaaaaagaaaacat

SEQ ID NO: 31864 - DNA, 22 bp, Artificial Sequence
  chemically synthesized
tagcaaaaaagaaaacatcatg

SEQ ID NO: 31865 - DNA, 22 bp, Artificial Sequence
  chemically synthesized
agcaaaaaagaaaacatcatga

SEQ ID NO: 31866 - DNA, 22 bp, Artificial Sequence
  chemically synthesized
gcaaaaaagaaaacatcatgaa

SEQ ID NO: 31867 - DNA, 22 bp, Artificial Sequence
  chemically synthesized
tacatctcttaagaaagtcttt

SEQ ID NO: 31868 - DNA, 22 bp, Artificial Sequence
  chemically synthesized
acatctcttaagaaagtctttg

SEQ ID NO: 31869 - DNA, 22 bp, Artificial Sequence
  chemically synthesized
catctcttaagaaagtctttgt

SEQ ID NO: 31870 - DNA, 22 bp, Artificial Sequence
  chemically synthesized
ttaagaaagtctttgtttttaa

SEQ ID NO: 31871 - DNA, 22 bp, Artificial Sequence
  chemically synthesized
aagaaagtctttgtttttaatc

SEQ ID NO: 31872 - DNA, 22 bp, Artificial Sequence
  chemically synthesized
agaaagtctttgtttttaatcc

SEQ ID NO: 31873 - DNA, 22 bp, Artificial Sequence
  chemically synthesized
tgtttttaatccaaataatctg

SEQ ID NO: 31874 - DNA, 22 bp, Artificial Sequence
  chemically synthesized
gtttttaatccaaataatctga

SEQ ID NO: 31875 - DNA, 22 bp, Artificial Sequence
  chemically synthesized
tttttaatccaaataatctgaa

SEQ ID NO: 31876 - DNA, 22 bp, Artificial Sequence
  chemically synthesized
ttaatccaaataatctgaaagc

SEQ ID NO: 31877 - DNA, 22 bp, Artificial Sequence
  chemically synthesized
taatccaaataatctgaaagcc

SEQ ID NO: 31878 - DNA, 22 bp, Artificial Sequence
  chemically synthesized
aatccaaataatctgaaagcca

SEQ ID NO: 31879 - DNA, 22 bp, Artificial Sequence
  chemically synthesized
atccaaataatctgaaagccaa

SEQ ID NO: 31880 - DNA, 22 bp, Artificial Sequence
  chemically synthesized
aaagccaatttctctttagggc

SEQ ID NO: 31881 - DNA, 22 bp, Artificial Sequence
  chemically synthesized
ctctttagggcatggagccaaa

SEQ ID NO: 31882 - DNA, 22 bp, Artificial Sequence
  chemically synthesized
tctttagggcatggagccaaaa

SEQ ID NO: 31883 - DNA, 22 bp, Artificial Sequence
  chemically synthesized
tttagggcatggagccaaaatc

SEQ ID NO: 31884 - DNA, 22 bp, Artificial Sequence
  chemically synthesized
tagggcatggagccaaaatctg

SEQ ID NO: 31885 - DNA, 22 bp, Artificial Sequence
  chemically synthesized
agggcatggagccaaaatctgt

SEQ ID NO: 31886 - DNA, 22 bp, Artificial Sequence
  chemically synthesized
gggcatggagccaaaatctgtg

SEQ ID NO: 31887 - DNA, 22 bp, Artificial Sequence
  chemically synthesized
tgatgttcccacagtactgtat

SEQ ID NO: 31888 - DNA, 22 bp, Artificial Sequence
  chemically synthesized
ccacagtactgtatacacatgg

SEQ ID NO: 31889 - DNA, 22 bp, Artificial Sequence
  chemically synthesized
tatacacatggagatttaggaa

SEQ ID NO: 31890 - DNA, 22 bp, Artificial Sequence
  chemically synthesized
aggaattaaaattcaattttac

SEQ ID NO: 31891 - DNA, 22 bp, Artificial Sequence
  chemically synthesized
ggaattaaaattcaattttact

SEQ ID NO: 31892 - DNA, 22 bp, Artificial Sequence
  chemically synthesized
aaattcaattttacttttagtc

SEQ ID NO: 31893 - DNA, 22 bp, Artificial Sequence
  chemically synthesized
aattttacttttagtcaagaga

SEQ ID NO: 31894 - DNA, 22 bp, Artificial Sequence
  chemically synthesized
tacttttagtcaagagaattcc

SEQ ID NO: 31895 - DNA, 22 bp, Artificial Sequence
  chemically synthesized
acttttagtcaagagaattcca

SEQ ID NO: 31896 - DNA, 22 bp, Artificial Sequence
  chemically synthesized
cttttagtcaagagaattccag

SEQ ID NO: 31897 - DNA, 22 bp, Artificial Sequence
  chemically synthesized
ttagtcaagagaattccagtaa

SEQ ID NO: 31898 - DNA, 22 bp, Artificial Sequence
  chemically synthesized
tagtcaagagaattccagtaat

SEQ ID NO: 31899 - DNA, 22 bp, Artificial Sequence
  chemically synthesized
agtcaagagaattccagtaata

SEQ ID NO: 31900 - DNA, 22 bp, Artificial Sequence
  chemically synthesized
gtcaagagaattccagtaataa

SEQ ID NO: 31901 - DNA, 22 bp, Artificial Sequence
  chemically synthesized
cagtaataaaaggtcagatttc

SEQ ID NO: 31902 - DNA, 22 bp, Artificial Sequence
  chemically synthesized
ctaatcatatttgaatttactt

SEQ ID NO: 31903 - DNA, 22 bp, Artificial Sequence
  chemically synthesized
taatcatatttgaatttacttt

SEQ ID NO: 31904 - DNA, 22 bp, Artificial Sequence
  chemically synthesized
atcatatttgaatttactttgg

SEQ ID NO: 31905 - DNA, 22 bp, Artificial Sequence
  chemically synthesized
gaatttactttggatgaaaaag

SEQ ID NO: 31906 - DNA, 22 bp, Artificial Sequence
  chemically synthesized
aatttactttggatgaaaaaga

SEQ ID NO: 31907 - DNA, 22 bp, Artificial Sequence
  chemically synthesized
actttggatgaaaaagaaagtt

SEQ ID NO: 31908 - DNA, 22 bp, Artificial Sequence
  chemically synthesized
ctttggatgaaaaagaaagttc

SEQ ID NO: 31909 - DNA, 22 bp, Artificial Sequence
  chemically synthesized
tggatgaaaaagaaagttctca

SEQ ID NO: 31910 - DNA, 22 bp, Artificial Sequence
  chemically synthesized
ggatgaaaaagaaagttctcaa

SEQ ID NO: 31911 - DNA, 22 bp, Artificial Sequence
  chemically synthesized
gatgaaaaagaaagttctcaaa

SEQ ID NO: 31912 - DNA, 22 bp, Artificial Sequence
  chemically synthesized
tcaaatgagcggttaacttcac

SEQ ID NO: 31913 - DNA, 22 bp, Artificial Sequence
  chemically synthesized
aaatgagcggttaacttcacac

SEQ ID NO: 31914 - DNA, 22 bp, Artificial Sequence
  chemically synthesized
acttcacactttgtcatcactt

SEQ ID NO: 31915 - DNA, 22 bp, Artificial Sequence
  chemically synthesized
cacactttgtcatcacttgaaa

SEQ ID NO: 31916 - DNA, 22 bp, Artificial Sequence
  chemically synthesized
acactttgtcatcacttgaaaa

SEQ ID NO: 31917 - DNA, 22 bp, Artificial Sequence
  chemically synthesized
tgtcatcacttgaaaatagctc

SEQ ID NO: 31918 - DNA, 22 bp, Artificial Sequence
  chemically synthesized
gtcatcacttgaaaatagctca

SEQ ID NO: 31919 - DNA, 22 bp, Artificial Sequence
  chemically synthesized
tcatcacttgaaaatagctcat

SEQ ID NO: 31920 - DNA, 22 bp, Artificial Sequence
  chemically synthesized
gaaaatagctcattgaggatct

SEQ ID NO: 31921 - DNA, 22 bp, Artificial Sequence
  chemically synthesized
aaaatagctcattgaggatctt

SEQ ID NO: 31922 - DNA, 22 bp, Artificial Sequence
  chemically synthesized
attgaggatctttgcaaagtga

SEQ ID NO: 31923 - DNA, 22 bp, Artificial Sequence
  chemically synthesized
aggatctttgcaaagtgatcca

SEQ ID NO: 31924 - DNA, 22 bp, Artificial Sequence
  chemically synthesized
tgcaaagtgatccatcaccctg

SEQ ID NO: 31925 - DNA, 22 bp, Artificial Sequence
  chemically synthesized
gcaaagtgatccatcaccctgg

SEQ ID NO: 31926 - DNA, 22 bp, Artificial Sequence
  chemically synthesized
caaagtgatccatcaccctggc

SEQ ID NO: 31927 - DNA, 22 bp, Artificial Sequence
  chemically synthesized
gctgggctgttttcagaatatg

SEQ ID NO: 31928 - DNA, 22 bp, Artificial Sequence
  chemically synthesized
ggctgttttcagaatatggttg

SEQ ID NO: 31929 - DNA, 22 bp, Artificial Sequence
  chemically synthesized
ttttcagaatatggttgcccaa

SEQ ID NO: 31930 - DNA, 22 bp, Artificial Sequence
  chemically synthesized
tcagaatatggttgcccaaatg

SEQ ID NO: 31931 - DNA, 22 bp, Artificial Sequence
  chemically synthesized
cagaatatggttgcccaaatga

SEQ ID NO: 31932 - DNA, 22 bp, Artificial Sequence
  chemically synthesized
agaatatggttgcccaaatgac

SEQ ID NO: 31933 - DNA, 22 bp, Artificial Sequence
  chemically synthesized
cccaaatgactttgaacaaatg

SEQ ID NO: 31934 - DNA, 22 bp, Artificial Sequence
  chemically synthesized
tgaacaaatgtctcctgaagaa

SEQ ID NO: 31935 - DNA, 22 bp, Artificial Sequence
  chemically synthesized
gaacaaatgtctcctgaagaac

SEQ ID NO: 31936 - DNA, 22 bp, Artificial Sequence
  chemically synthesized
aacaaatgtctcctgaagaaca

SEQ ID NO: 31937 - DNA, 22 bp, Artificial Sequence
  chemically synthesized
ctgaagaacagaagcctaatta

SEQ ID NO: 31938 - DNA, 22 bp, Artificial Sequence
  chemically synthesized
aagaacagaagcctaattatgg

SEQ ID NO: 31939 - DNA, 22 bp, Artificial Sequence
  chemically synthesized
attatggtccagctgcaaatgt

SEQ ID NO: 31940 - DNA, 22 bp, Artificial Sequence
  chemically synthesized
tggtccagctgcaaatgtgacc

SEQ ID NO: 31941 - DNA, 22 bp, Artificial Sequence
  chemically synthesized
caaatgtgaccccagtgtctgt

SEQ ID NO: 31942 - DNA, 22 bp, Artificial Sequence
  chemically synthesized
tcactagatgttaaagaaaaat

SEQ ID NO: 31943 - DNA, 22 bp, Artificial Sequence
  chemically synthesized
gatgttaaagaaaaatcactgc

SEQ ID NO: 31944 - DNA, 22 bp, Artificial Sequence
  chemically synthesized
aagaaaaatcactgcattaatt

SEQ ID NO: 31945 - DNA, 22 bp, Artificial Sequence
  chemically synthesized
cattaatttaaaaaagcaattt

SEQ ID NO: 31946 - DNA, 22 bp, Artificial Sequence
  chemically synthesized
atttaaaaaagcaatttcagat

SEQ ID NO: 31947 - DNA, 22 bp, Artificial Sequence
  chemically synthesized
aaaaaagcaatttcagatcaac

SEQ ID NO: 31948 - DNA, 22 bp, Artificial Sequence
  chemically synthesized
aaaaagcaatttcagatcaaca

SEQ ID NO: 31949 - DNA, 22 bp, Artificial Sequence
  chemically synthesized
cagatcaacagcacctttggtt

SEQ ID NO: 31950 - DNA, 22 bp, Artificial Sequence
  chemically synthesized
agatcaacagcacctttggttg

SEQ ID NO: 31951 - DNA, 22 bp, Artificial Sequence
  chemically synthesized
tggttggcaagtgttataggaa

SEQ ID NO: 31952 - DNA, 22 bp, Artificial Sequence
  chemically synthesized
ggttggcaagtgttataggaat

SEQ ID NO: 31953 - DNA, 22 bp, Artificial Sequence
  chemically synthesized
gttggcaagtgttataggaatt

SEQ ID NO: 31954 - DNA, 22 bp, Artificial Sequence
  chemically synthesized
gcaagtgttataggaattgcag

SEQ ID NO: 31955 - DNA, 22 bp, Artificial Sequence
  chemically synthesized
taggaattgcagtgatttaagc

SEQ ID NO: 31956 - DNA, 22 bp, Artificial Sequence
  chemically synthesized
cagtgatttaagcatctctcta

SEQ ID NO: 31957 - DNA, 22 bp, Artificial Sequence
  chemically synthesized
aagcatctctctagaattcagg

SEQ ID NO: 31958 - DNA, 22 bp, Artificial Sequence
  chemically synthesized
agcatctctctagaattcagga

SEQ ID NO: 31959 - DNA, 22 bp, Artificial Sequence
  chemically synthesized
tctagaattcaggatatgtttt

SEQ ID NO: 31960 - DNA, 22 bp, Artificial Sequence
  chemically synthesized
tagaattcaggatatgtttttt

SEQ ID NO: 31961 - DNA, 22 bp, Artificial Sequence
  chemically synthesized
gaattcaggatatgtttttttt

SEQ ID NO: 31962 - DNA, 22 bp, Artificial Sequence
  chemically synthesized
aggatatgttttttttaagcta

SEQ ID NO: 31963 - DNA, 22 bp, Artificial Sequence
  chemically synthesized
tttttaagctacatctacctag

SEQ ID NO: 31964 - DNA, 22 bp, Artificial Sequence
  chemically synthesized
ttttaagctacatctacctagt

SEQ ID NO: 31965 - DNA, 22 bp, Artificial Sequence
  chemically synthesized
tttaagctacatctacctagtc

SEQ ID NO: 31966 - DNA, 22 bp, Artificial Sequence
  chemically synthesized
ttaagctacatctacctagtct

SEQ ID NO: 31967 - DNA, 22 bp, Artificial Sequence
  chemically synthesized
taagctacatctacctagtctg

SEQ ID NO: 31968 - DNA, 22 bp, Artificial Sequence
  chemically synthesized
aagctacatctacctagtctga

SEQ ID NO: 31969 - DNA, 22 bp, Artificial Sequence
  chemically synthesized
agctacatctacctagtctgaa

SEQ ID NO: 31970 - DNA, 22 bp, Artificial Sequence
  chemically synthesized
catctacctagtctgaagagac

SEQ ID NO: 31971 - DNA, 22 bp, Artificial Sequence
  chemically synthesized
cctagtctgaagagacactcct

SEQ ID NO: 31972 - DNA, 22 bp, Artificial Sequence
  chemically synthesized
gtctgaagagacactcctgaac

SEQ ID NO: 31973 - DNA, 22 bp, Artificial Sequence
  chemically synthesized
aagagacactcctgaactctgg

SEQ ID NO: 31974 - DNA, 22 bp, Artificial Sequence
  chemically synthesized
ctgaactctggaggatagatgt

SEQ ID NO: 31975 - DNA, 22 bp, Artificial Sequence
  chemically synthesized
aactctggaggatagatgtctc

SEQ ID NO: 31976 - DNA, 22 bp, Artificial Sequence
  chemically synthesized
tggaggatagatgtctctatct

SEQ ID NO: 31977 - DNA, 22 bp, Artificial Sequence
  chemically synthesized
gaggatagatgtctctatctga

SEQ ID NO: 31978 - DNA, 22 bp, Artificial Sequence
  chemically synthesized
tatctgaatcatatttctcctt

SEQ ID NO: 31979 - DNA, 22 bp, Artificial Sequence
  chemically synthesized
tctgaatcatatttctccttcc

SEQ ID NO: 31980 - DNA, 22 bp, Artificial Sequence
  chemically synthesized
aatcatatttctccttccctcc

SEQ ID NO: 31981 - DNA, 22 bp, Artificial Sequence
  chemically synthesized
ctccttccctccctccttcctc

SEQ ID NO: 31982 - DNA, 22 bp, Artificial Sequence
  chemically synthesized
tccttccctccctccttcctct

SEQ ID NO: 31983 - DNA, 22 bp, Artificial Sequence
  chemically synthesized
cttccctccctccttcctctcc

SEQ ID NO: 31984 - DNA, 22 bp, Artificial Sequence
  chemically synthesized
ccctccctccttcctctcctct

SEQ ID NO: 31985 - DNA, 22 bp, Artificial Sequence
  chemically synthesized
cctccctccttcctctcctctc

SEQ ID NO: 31986 - DNA, 22 bp, Artificial Sequence
  chemically synthesized
cctccttcctctcctctcctct

SEQ ID NO: 31987 - DNA, 22 bp, Artificial Sequence
  chemically synthesized
cttcctctcctctcctctctct

SEQ ID NO: 31988 - DNA, 22 bp, Artificial Sequence
  chemically synthesized
cctctcctctcctctctctctc

SEQ ID NO: 31989 - DNA, 22 bp, Artificial Sequence
  chemically synthesized
ctctcctctcctctctctctct

SEQ ID NO: 31990 - DNA, 22 bp, Artificial Sequence
  chemically synthesized
tcctctcctctctctctctctc

SEQ ID NO: 31991 - DNA, 22 bp, Artificial Sequence
  chemically synthesized
ctctcctctctctctctctcta

SEQ ID NO: 31992 - DNA, 22 bp, Artificial Sequence
  chemically synthesized
tcctctctctctctctctatgt

SEQ ID NO: 31993 - DNA, 22 bp, Artificial Sequence
  chemically synthesized
ctctctctctctctctatgtgt

SEQ ID NO: 31994 - DNA, 22 bp, Artificial Sequence
  chemically synthesized
tctctctctctctatgtgtgtg

SEQ ID NO: 31995 - DNA, 22 bp, Artificial Sequence
  chemically synthesized
tctctctctctatgtgtgtgtg

SEQ ID NO: 31996 - DNA, 22 bp, Artificial Sequence
  chemically synthesized
tctctctctatgtgtgtgtgtg

SEQ ID NO: 31997 - DNA, 22 bp, Artificial Sequence
  chemically synthesized
tctctctatgtgtgtgtgtgta

SEQ ID NO: 31998 - DNA, 22 bp, Artificial Sequence
  chemically synthesized
tctctatgtgtgtgtgtgtaca

SEQ ID NO: 31999 - DNA, 22 bp, Artificial Sequence
  chemically synthesized
tctatgtgtgtgtgtgtacata

SEQ ID NO: 32000 - DNA, 22 bp, Artificial Sequence
  chemically synthesized
tatgtgtgtgtgtgtacatata

SEQ ID NO: 32001 - DNA, 22 bp, Artificial Sequence
  chemically synthesized
tgtgtgtgtgtgtacatatata

SEQ ID NO: 32002 - DNA, 22 bp, Artificial Sequence
  chemically synthesized
gctgcacaatgacattttggtc

SEQ ID NO: 32003 - DNA, 22 bp, Artificial Sequence
  chemically synthesized
ctgcacaatgacattttggtca

SEQ ID NO: 32004 - DNA, 22 bp, Artificial Sequence
  chemically synthesized
cacaatgacattttggtcaatg

SEQ ID NO: 32005 - DNA, 22 bp, Artificial Sequence
  chemically synthesized
tggtcaatgatggaccacatta

SEQ ID NO: 32006 - DNA, 22 bp, Artificial Sequence
  chemically synthesized
ggtcaatgatggaccacattat

SEQ ID NO: 32007 - DNA, 22 bp, Artificial Sequence
  chemically synthesized
gtcaatgatggaccacattata

SEQ ID NO: 32008 - DNA, 22 bp, Artificial Sequence
  chemically synthesized
tacgacagtggtcccataaggt

SEQ ID NO: 32009 - DNA, 22 bp, Artificial Sequence
  chemically synthesized
taatactgtattttcactgtac

SEQ ID NO: 32010 - DNA, 22 bp, Artificial Sequence
  chemically synthesized
tattttcactgtaccttttcta

SEQ ID NO: 32011 - DNA, 22 bp, Artificial Sequence
  chemically synthesized
tcactgtaccttttctatgttt

SEQ ID NO: 32012 - DNA, 22 bp, Artificial Sequence
  chemically synthesized
cactgtaccttttctatgttta

SEQ ID NO: 32013 - DNA, 22 bp, Artificial Sequence
  chemically synthesized
actgtaccttttctatgtttag

SEQ ID NO: 32014 - DNA, 22 bp, Artificial Sequence
  chemically synthesized
taccttttctatgtttagatac

SEQ ID NO: 32015 - DNA, 22 bp, Artificial Sequence
  chemically synthesized
ttctatgtttagatacacaaat

SEQ ID NO: 32016 - DNA, 22 bp, Artificial Sequence
  chemically synthesized
tctatgtttagatacacaaata

SEQ ID NO: 32017 - DNA, 22 bp, Artificial Sequence
  chemically synthesized
ctatgtttagatacacaaatac

SEQ ID NO: 32018 - DNA, 22 bp, Artificial Sequence
  chemically synthesized
tatgtttagatacacaaatacc

SEQ ID NO: 32019 - DNA, 22 bp, Artificial Sequence
  chemically synthesized
tgtttagatacacaaataccac

SEQ ID NO: 32020 - DNA, 22 bp, Artificial Sequence
  chemically synthesized
agatacacaaataccactgtta

SEQ ID NO: 32021 - DNA, 22 bp, Artificial Sequence
  chemically synthesized
gatacacaaataccactgttac

SEQ ID NO: 32022 - DNA, 22 bp, Artificial Sequence
  chemically synthesized
ttaccattgcctacagtgttca

SEQ ID NO: 32023 - DNA, 22 bp, Artificial Sequence
  chemically synthesized
ccattgcctacagtgttcagta

SEQ ID NO: 32024 - DNA, 22 bp, Artificial Sequence
  chemically synthesized
cctacagtgttcagtacagtca

SEQ ID NO: 32025 - DNA, 22 bp, Artificial Sequence
  chemically synthesized
cagtgttcagtacagtcacatg

SEQ ID NO: 32026 - DNA, 22 bp, Artificial Sequence
  chemically synthesized
agtacagtcacatgctgtacag

SEQ ID NO: 32027 - DNA, 22 bp, Artificial Sequence
  chemically synthesized
tacaggtttgcagcccaggagc

SEQ ID NO: 32028 - DNA, 22 bp, Artificial Sequence
  chemically synthesized
gcagcccaggagcctaggagca

SEQ ID NO: 32029 - DNA, 22 bp, Artificial Sequence
  chemically synthesized
cagcccaggagcctaggagcaa

SEQ ID NO: 32030 - DNA, 22 bp, Artificial Sequence
  chemically synthesized
ggagcaataggccacatcaata

SEQ ID NO: 32031 - DNA, 22 bp, Artificial Sequence
  chemically synthesized
ggtatgtagtaagctataccat

SEQ ID NO: 32032 - DNA, 22 bp, Artificial Sequence
  chemically synthesized
taccatttaggtttaggtaagt

SEQ ID NO: 32033 - DNA, 22 bp, Artificial Sequence
  chemically synthesized
aggtttaggtaagtacactcta

SEQ ID NO: 32034 - DNA, 22 bp, Artificial Sequence
  chemically synthesized
ggtttaggtaagtacactctat

SEQ ID NO: 32035 - DNA, 22 bp, Artificial Sequence
  chemically synthesized
aggtaagtacactctattatgt

SEQ ID NO: 32036 - DNA, 22 bp, Artificial Sequence
  chemically synthesized
ggtaagtacactctattatgtt

SEQ ID NO: 32037 - DNA, 22 bp, Artificial Sequence
  chemically synthesized
tattatgttcgcacaatgatga

SEQ ID NO: 32038 - DNA, 22 bp, Artificial Sequence
  chemically synthesized
ttatgttcgcacaatgatgaaa

SEQ ID NO: 32039 - DNA, 22 bp, Artificial Sequence
  chemically synthesized
tgttcgcacaatgatgaaattg

SEQ ID NO: 32040 - DNA, 22 bp, Artificial Sequence
  chemically synthesized
gcacaatgatgaaattgcttaa

SEQ ID NO: 32041 - DNA, 22 bp, Artificial Sequence
  chemically synthesized
cttaatgacacatttctcagaa

SEQ ID NO: 32042 - DNA, 22 bp, Artificial Sequence
  chemically synthesized
aatgacacatttctcagaatat

SEQ ID NO: 32043 - DNA, 22 bp, Artificial Sequence
  chemically synthesized
atgacacatttctcagaatata

SEQ ID NO: 32044 - DNA, 22 bp, Artificial Sequence
  chemically synthesized
ctcagaatatatccccattgtt

SEQ ID NO: 32045 - DNA, 22 bp, Artificial Sequence
  chemically synthesized
tcagaatatatccccattgtta

SEQ ID NO: 32046 - DNA, 22 bp, Artificial Sequence
  chemically synthesized
agaatatatccccattgttaag

SEQ ID NO: 32047 - DNA, 22 bp, Artificial Sequence
  chemically synthesized
ttaaggaatgcatggctgtata

SEQ ID NO: 32048 - DNA, 22 bp, Artificial Sequence
  chemically synthesized
aggaatgcatggctgtatacac

SEQ ID NO: 32049 - DNA, 22 bp, Artificial Sequence
  chemically synthesized
tatacacacacatgtgtttgtg

SEQ ID NO: 32050 - DNA, 22 bp, Artificial Sequence
  chemically synthesized
gtgtgttttcatgtatatacat

SEQ ID NO: 32051 - DNA, 22 bp, Artificial Sequence
  chemically synthesized
tgtgttttcatgtatatacata

SEQ ID NO: 32052 - DNA, 22 bp, Artificial Sequence
  chemically synthesized
tcatgtatatacatatatgtgt

SEQ ID NO: 32053 - DNA, 22 bp, Artificial Sequence
  chemically synthesized
catgtatatacatatatgtgtg

SEQ ID NO: 32054 - DNA, 22 bp, Artificial Sequence
  chemically synthesized
atgtatatacatatatgtgtgt

SEQ ID NO: 32055 - DNA, 22 bp, Artificial Sequence
  chemically synthesized
ataacagggactcaagaagttg

SEQ ID NO: 32056 - DNA, 22 bp, Artificial Sequence
  chemically synthesized
aagaagttgcctggagttgttc

SEQ ID NO: 32057 - DNA, 22 bp, Artificial Sequence
  chemically synthesized
cctggagttgttcctttcttca

SEQ ID NO: 32058 - DNA, 22 bp, Artificial Sequence
  chemically synthesized
gagttgttcctttcttcaaggg

SEQ ID NO: 32059 - DNA, 22 bp, Artificial Sequence
  chemically synthesized
ttcctttcttcaagggtctagc

SEQ ID NO: 32060 - DNA, 22 bp, Artificial Sequence
  chemically synthesized
ctttcttcaagggtctagcaat

SEQ ID NO: 32061 - DNA, 22 bp, Artificial Sequence
  chemically synthesized
tcttcaagggtctagcaatata

SEQ ID NO: 32062 - DNA, 22 bp, Artificial Sequence
  chemically synthesized
cttcaagggtctagcaatatat

SEQ ID NO: 32063 - DNA, 22 bp, Artificial Sequence
  chemically synthesized
ttcaagggtctagcaatatatc

SEQ ID NO: 32064 - DNA, 22 bp, Artificial Sequence
  chemically synthesized
caagggtctagcaatatatctg

SEQ ID NO: 32065 - DNA, 22 bp, Artificial Sequence
  chemically synthesized
aagggtctagcaatatatctga

SEQ ID NO: 32066 - DNA, 22 bp, Artificial Sequence
  chemically synthesized
gcaatatatctgataccatctc

SEQ ID NO: 32067 - DNA, 22 bp, Artificial Sequence
  chemically synthesized
ataccatctcaagaggaccaag

SEQ ID NO: 32068 - DNA, 22 bp, Artificial Sequence
  chemically synthesized
aagaggaccaagggcttataag

SEQ ID NO: 32069 - DNA, 22 bp, Artificial Sequence
  chemically synthesized
ataagatgaactttctggggta

SEQ ID NO: 32070 - DNA, 22 bp, Artificial Sequence
  chemically synthesized
taagatgaactttctggggtat

SEQ ID NO: 32071 - DNA, 22 bp, Artificial Sequence
  chemically synthesized
tctggggtatttgggactactt

SEQ ID NO: 32072 - DNA, 22 bp, Artificial Sequence
  chemically synthesized
ctggggtatttgggactacttc

SEQ ID NO: 32073 - DNA, 22 bp, Artificial Sequence
  chemically synthesized
tggggtatttgggactacttcc

SEQ ID NO: 32074 - DNA, 22 bp, Artificial Sequence
  chemically synthesized
gggtatttgggactacttcctg

SEQ ID NO: 32075 - DNA, 22 bp, Artificial Sequence
  chemically synthesized
gggactacttcctgattaactc

SEQ ID NO: 32076 - DNA, 22 bp, Artificial Sequence
  chemically synthesized
ggactacttcctgattaactcc

SEQ ID NO: 32077 - DNA, 22 bp, Artificial Sequence
  chemically synthesized
cttcctgattaactccaaaaag

SEQ ID NO: 32078 - DNA, 22 bp, Artificial Sequence
  chemically synthesized
cctgattaactccaaaaaggaa

SEQ ID NO: 32079 - DNA, 22 bp, Artificial Sequence
  chemically synthesized
ctgattaactccaaaaaggaag

SEQ ID NO: 32080 - DNA, 22 bp, Artificial Sequence
  chemically synthesized
attaactccaaaaaggaagaga

SEQ ID NO: 32081 - DNA, 22 bp, Artificial Sequence
  chemically synthesized
actccaaaaaggaagagaaagg

SEQ ID NO: 32082 - DNA, 22 bp, Artificial Sequence
  chemically synthesized
caaaaaggaagagaaaggaaag

SEQ ID NO: 32083 - DNA, 22 bp, Artificial Sequence
  chemically synthesized
aactttcttcccttattttcat

SEQ ID NO: 32084 - DNA, 22 bp, Artificial Sequence
  chemically synthesized
tcttcccttattttcattgcag

SEQ ID NO: 32085 - DNA, 22 bp, Artificial Sequence
  chemically synthesized
cttcccttattttcattgcagc

SEQ ID NO: 32086 - DNA, 22 bp, Artificial Sequence
  chemically synthesized
ttcccttattttcattgcagct

SEQ ID NO: 32087 - DNA, 22 bp, Artificial Sequence
  chemically synthesized
cccttattttcattgcagctgt

SEQ ID NO: 32088 - DNA, 22 bp, Artificial Sequence
  chemically synthesized
ccttattttcattgcagctgtt

SEQ ID NO: 32089 - DNA, 22 bp, Artificial Sequence
  chemically synthesized
attttcattgcagctgttcact

SEQ ID NO: 32090 - DNA, 22 bp, Artificial Sequence
  chemically synthesized
ttttcattgcagctgttcactt

SEQ ID NO: 32091 - DNA, 22 bp, Artificial Sequence
  chemically synthesized
tcattgcagctgttcactttat

SEQ ID NO: 32092 - DNA, 22 bp, Artificial Sequence
  chemically synthesized
cattgcagctgttcactttatg

SEQ ID NO: 32093 - DNA, 22 bp, Artificial Sequence
  chemically synthesized
attgcagctgttcactttatgg

SEQ ID NO: 32094 - DNA, 22 bp, Artificial Sequence
  chemically synthesized
cagctgttcactttatggagtg

SEQ ID NO: 32095 - DNA, 22 bp, Artificial Sequence
  chemically synthesized
ttcactttatggagtgttctag

SEQ ID NO: 32096 - DNA, 22 bp, Artificial Sequence
  chemically synthesized
actttatggagtgttctagtcc

SEQ ID NO: 32097 - DNA, 22 bp, Artificial Sequence
  chemically synthesized
tatggagtgttctagtcccttg

SEQ ID NO: 32098 - DNA, 22 bp, Artificial Sequence
  chemically synthesized
atggagtgttctagtcccttga

SEQ ID NO: 32099 - DNA, 22 bp, Artificial Sequence
  chemically synthesized
tggagtgttctagtcccttgac

SEQ ID NO: 32100 - DNA, 22 bp, Artificial Sequence
  chemically synthesized
tagtcccttgacatccctgctt

SEQ ID NO: 32101 - DNA, 22 bp, Artificial Sequence
  chemically synthesized
gtcccttgacatccctgctttt

SEQ ID NO: 32102 - DNA, 22 bp, Artificial Sequence
  chemically synthesized
gacatccctgcttttcccttgc

SEQ ID NO: 32103 - DNA, 22 bp, Artificial Sequence
  chemically synthesized
acatccctgcttttcccttgct

SEQ ID NO: 32104 - DNA, 22 bp, Artificial Sequence
  chemically synthesized
cttttcccttgctctgcaagtt

SEQ ID NO: 32105 - DNA, 22 bp, Artificial Sequence
  chemically synthesized
ttcccttgctctgcaagttcct

SEQ ID NO: 32106 - DNA, 22 bp, Artificial Sequence
  chemically synthesized
tcccttgctctgcaagttcctt

SEQ ID NO: 32107 - DNA, 22 bp, Artificial Sequence
  chemically synthesized
cccttgctctgcaagttccttt

SEQ ID NO: 32108 - DNA, 22 bp, Artificial Sequence
  chemically synthesized
ccttgctctgcaagttcctttt

SEQ ID NO: 32109 - DNA, 22 bp, Artificial Sequence
  chemically synthesized
gctctgcaagttccttttgggc

SEQ ID NO: 32110 - DNA, 22 bp, Artificial Sequence
  chemically synthesized
ctctgcaagttccttttgggct

SEQ ID NO: 32111 - DNA, 22 bp, Artificial Sequence
  chemically synthesized
tgcaagttccttttgggctcac

SEQ ID NO: 32112 - DNA, 22 bp, Artificial Sequence
  chemically synthesized
caagttccttttgggctcactt

SEQ ID NO: 32113 - DNA, 22 bp, Artificial Sequence
  chemically synthesized
cttttgggctcactttttttct

SEQ ID NO: 32114 - DNA, 22 bp, Artificial Sequence
  chemically synthesized
ttgggctcactttttttctttg

SEQ ID NO: 32115 - DNA, 22 bp, Artificial Sequence
  chemically synthesized
tgggctcactttttttctttga

SEQ ID NO: 32116 - DNA, 22 bp, Artificial Sequence
  chemically synthesized
gggctcactttttttctttgaa

SEQ ID NO: 32117 - DNA, 22 bp, Artificial Sequence
  chemically synthesized
ggctcactttttttctttgaat

SEQ ID NO: 32118 - DNA, 22 bp, Artificial Sequence
  chemically synthesized
actttttttctttgaatttagc

SEQ ID NO: 32119 - DNA, 22 bp, Artificial Sequence
  chemically synthesized
tttttctttgaatttagcctag

SEQ ID NO: 32120 - DNA, 22 bp, Artificial Sequence
  chemically synthesized
ttttctttgaatttagcctaga

SEQ ID NO: 32121 - DNA, 22 bp, Artificial Sequence
  chemically synthesized
tttctttgaatttagcctagac

SEQ ID NO: 32122 - DNA, 22 bp, Artificial Sequence
  chemically synthesized
ttctttgaatttagcctagact

SEQ ID NO: 32123 - DNA, 22 bp, Artificial Sequence
  chemically synthesized
tctttgaatttagcctagactt

SEQ ID NO: 32124 - DNA, 22 bp, Artificial Sequence
  chemically synthesized
ctttgaatttagcctagacttt

SEQ ID NO: 32125 - DNA, 22 bp, Artificial Sequence
  chemically synthesized
tttgaatttagcctagactttt

SEQ ID NO: 32126 - DNA, 22 bp, Artificial Sequence
  chemically synthesized
tgaatttagcctagactttttc

SEQ ID NO: 32127 - DNA, 22 bp, Artificial Sequence
  chemically synthesized
gaatttagcctagactttttct

SEQ ID NO: 32128 - DNA, 22 bp, Artificial Sequence
  chemically synthesized
aatttagcctagactttttctc

SEQ ID NO: 32129 - DNA, 22 bp, Artificial Sequence
  chemically synthesized
agcctagactttttctcttcaa

SEQ ID NO: 32130 - DNA, 22 bp, Artificial Sequence
  chemically synthesized
gcctagactttttctcttcaac

SEQ ID NO: 32131 - DNA, 22 bp, Artificial Sequence
  chemically synthesized
gactttttctcttcaactcttt

SEQ ID NO: 32132 - DNA, 22 bp, Artificial Sequence
  chemically synthesized
tttctcttcaactctttttttt

SEQ ID NO: 32133 - DNA, 22 bp, Artificial Sequence
  chemically synthesized
ttctcttcaactcttttttttt

SEQ ID NO: 32134 - DNA, 22 bp, Artificial Sequence
  chemically synthesized
tctcttcaactctttttttttt

SEQ ID NO: 32135 - DNA, 22 bp, Artificial Sequence
  chemically synthesized
ctcttcaactcttttttttttg

SEQ ID NO: 32136 - DNA, 22 bp, Artificial Sequence
  chemically synthesized
tcttcaactcttttttttttga

SEQ ID NO: 32137 - DNA, 22 bp, Artificial Sequence
  chemically synthesized
ttcaactcttttttttttgaca

SEQ ID NO: 32138 - DNA, 22 bp, Artificial Sequence
  chemically synthesized
caactcttttttttttgacaga

SEQ ID NO: 32139 - DNA, 22 bp, Artificial Sequence
  chemically synthesized
aactcttttttttttgacagag

SEQ ID NO: 32140 - DNA, 22 bp, Artificial Sequence
  chemically synthesized
ttttttttttgacagagtcttg

SEQ ID NO: 32141 - DNA, 22 bp, Artificial Sequence
  chemically synthesized
ttttttttgacagagtcttgct

SEQ ID NO: 32142 - DNA, 22 bp, Artificial Sequence
  chemically synthesized
tttttttgacagagtcttgctc

SEQ ID NO: 32143 - DNA, 22 bp, Artificial Sequence
  chemically synthesized
ttttttgacagagtcttgctct

SEQ ID NO: 32144 - DNA, 22 bp, Artificial Sequence
  chemically synthesized
tttttgacagagtcttgctctg

SEQ ID NO: 32145 - DNA, 22 bp, Artificial Sequence
  chemically synthesized
ttttgacagagtcttgctctgt

SEQ ID NO: 32146 - DNA, 22 bp, Artificial Sequence
  chemically synthesized
tttgacagagtcttgctctgtc

SEQ ID NO: 32147 - DNA, 22 bp, Artificial Sequence
  chemically synthesized
ttgacagagtcttgctctgtcg

SEQ ID NO: 32148 - DNA, 22 bp, Artificial Sequence
  chemically synthesized
tgacagagtcttgctctgtcgc

SEQ ID NO: 32149 - DNA, 22 bp, Artificial Sequence
  chemically synthesized
gacagagtcttgctctgtcgcc

SEQ ID NO: 32150 - DNA, 22 bp, Artificial Sequence
  chemically synthesized
acagagtcttgctctgtcgccc

SEQ ID NO: 32151 - DNA, 22 bp, Artificial Sequence
  chemically synthesized
gctctgtcgcccaggctggagt

SEQ ID NO: 32152 - DNA, 22 bp, Artificial Sequence
  chemically synthesized
ctctgtcgcccaggctggagtg

SEQ ID NO: 32153 - DNA, 22 bp, Artificial Sequence
  chemically synthesized
tgtcgcccaggctggagtgcag

SEQ ID NO: 32154 - DNA, 22 bp, Artificial Sequence
  chemically synthesized
tcgcccaggctggagtgcagtg

SEQ ID NO: 32155 - DNA, 22 bp, Artificial Sequence
  chemically synthesized
gagtgcagtggtgcgatctcag

SEQ ID NO: 32156 - DNA, 22 bp, Artificial Sequence
  chemically synthesized
agctcactgcaacctccatctc

SEQ ID NO: 32157 - DNA, 22 bp, Artificial Sequence
  chemically synthesized
actgcaacctccatctcccagg

SEQ ID NO: 32158 - DNA, 22 bp, Artificial Sequence
  chemically synthesized
caacctccatctcccaggttca

SEQ ID NO: 32159 - DNA, 22 bp, Artificial Sequence
  chemically synthesized
catctcccaggttcaagctatt

SEQ ID NO: 32160 - DNA, 22 bp, Artificial Sequence
  chemically synthesized
ccaggttcaagctattctcctg

SEQ ID NO: 32161 - DNA, 22 bp, Artificial Sequence
  chemically synthesized
aagctattctcctgcctcagcc

SEQ ID NO: 32162 - DNA, 22 bp, Artificial Sequence
  chemically synthesized
ttctcctgcctcagcctcccaa

SEQ ID NO: 32163 - DNA, 22 bp, Artificial Sequence
  chemically synthesized
tcctgcctcagcctcccaagta

SEQ ID NO: 32164 - DNA, 22 bp, Artificial Sequence
  chemically synthesized
ctgcctcagcctcccaagtagc

SEQ ID NO: 32165 - DNA, 22 bp, Artificial Sequence
  chemically synthesized
cctcagcctcccaagtagctgg

SEQ ID NO: 32166 - DNA, 22 bp, Artificial Sequence
  chemically synthesized
agcctcccaagtagctgggatt

SEQ ID NO: 32167 - DNA, 22 bp, Artificial Sequence
  chemically synthesized
ccaagtagctgggattacaggc

SEQ ID NO: 32168 - DNA, 22 bp, Artificial Sequence
  chemically synthesized
ggattacaggcacccgccacca

SEQ ID NO: 32169 - DNA, 22 bp, Artificial Sequence
  chemically synthesized
caggcacccgccaccatgccca

SEQ ID NO: 32170 - DNA, 22 bp, Artificial Sequence
  chemically synthesized
atttttgtatttttagtaaagc

SEQ ID NO: 32171 - DNA, 22 bp, Artificial Sequence
  chemically synthesized
ttgtatttttagtaaagccggg

SEQ ID NO: 32172 - DNA, 22 bp, Artificial Sequence
  chemically synthesized
tgtatttttagtaaagccgggg

SEQ ID NO: 32173 - DNA, 22 bp, Artificial Sequence
  chemically synthesized
gtatttttagtaaagccggggt

SEQ ID NO: 32174 - DNA, 22 bp, Artificial Sequence
  chemically synthesized
tatttttagtaaagccggggtt

SEQ ID NO: 32175 - DNA, 22 bp, Artificial Sequence
  chemically synthesized
ttagtaaagccggggtttcacc

SEQ ID NO: 32176 - DNA, 22 bp, Artificial Sequence
  chemically synthesized
tagtaaagccggggtttcacca

SEQ ID NO: 32177 - DNA, 22 bp, Artificial Sequence
  chemically synthesized
agtaaagccggggtttcaccat

SEQ ID NO: 32178 - DNA, 22 bp, Artificial Sequence
  chemically synthesized
gtaaagccggggtttcaccatt

SEQ ID NO: 32179 - DNA, 22 bp, Artificial Sequence
  chemically synthesized
caccatttcaccttgttggcca

SEQ ID NO: 32180 - DNA, 22 bp, Artificial Sequence
  chemically synthesized
accatttcaccttgttggccag

SEQ ID NO: 32181 - DNA, 22 bp, Artificial Sequence
  chemically synthesized
caccttgttggccaggctggtg

SEQ ID NO: 32182 - DNA, 22 bp, Artificial Sequence
  chemically synthesized
accttgttggccaggctggtgt

SEQ ID NO: 32183 - DNA, 22 bp, Artificial Sequence
  chemically synthesized
gttggccaggctggtgtcgaac

SEQ ID NO: 32184 - DNA, 22 bp, Artificial Sequence
  chemically synthesized
ttggccaggctggtgtcgaact

SEQ ID NO: 32185 - DNA, 22 bp, Artificial Sequence
  chemically synthesized
gccaggctggtgtcgaactcct

SEQ ID NO: 32186 - DNA, 22 bp, Artificial Sequence
  chemically synthesized
gtgtcgaactcctgacctcaag

SEQ ID NO: 32187 - DNA, 22 bp, Artificial Sequence
  chemically synthesized
ctgacctcaagtgatctgcctg

SEQ ID NO: 32188 - DNA, 22 bp, Artificial Sequence
  chemically synthesized
acctcaagtgatctgcctgcct

SEQ ID NO: 32189 - DNA, 22 bp, Artificial Sequence
  chemically synthesized
aagtgatctgcctgcctgggcc

SEQ ID NO: 32190 - DNA, 22 bp, Artificial Sequence
  chemically synthesized
cctgcctgggcctctgaaagtg

SEQ ID NO: 32191 - DNA, 22 bp, Artificial Sequence
  chemically synthesized
cctgggcctctgaaagtgctgg

SEQ ID NO: 32192 - DNA, 22 bp, Artificial Sequence
  chemically synthesized
ggcctctgaaagtgctgggatt

SEQ ID NO: 32193 - DNA, 22 bp, Artificial Sequence
  chemically synthesized
tgaaagtgctgggattataggt

SEQ ID NO: 32194 - DNA, 22 bp, Artificial Sequence
  chemically synthesized
aaagtgctgggattataggtgt

SEQ ID NO: 32195 - DNA, 22 bp, Artificial Sequence
  chemically synthesized
ggattataggtgtgagccacca

SEQ ID NO: 32196 - DNA, 22 bp, Artificial Sequence
  chemically synthesized
taggtgtgagccaccatgccag

SEQ ID NO: 32197 - DNA, 22 bp, Artificial Sequence
  chemically synthesized
tcttcaactcttcattggccat

SEQ ID NO: 32198 - DNA, 22 bp, Artificial Sequence
  chemically synthesized
ttcaactcttcattggccatat

SEQ ID NO: 32199 - DNA, 22 bp, Artificial Sequence
  chemically synthesized
caactcttcattggccatattt

SEQ ID NO: 32200 - DNA, 22 bp, Artificial Sequence
  chemically synthesized
aactcttcattggccatatttc

SEQ ID NO: 32201 - DNA, 22 bp, Artificial Sequence
  chemically synthesized
ttcattggccatatttctcaat

SEQ ID NO: 32202 - DNA, 22 bp, Artificial Sequence
  chemically synthesized
cattggccatatttctcaattt

SEQ ID NO: 32203 - DNA, 22 bp, Artificial Sequence
  chemically synthesized
attggccatatttctcaatttc

SEQ ID NO: 32204 - DNA, 22 bp, Artificial Sequence
  chemically synthesized
gccatatttctcaatttccttc

SEQ ID NO: 32205 - DNA, 22 bp, Artificial Sequence
  chemically synthesized
ctcaatttccttcactcgtttg

SEQ ID NO: 32206 - DNA, 22 bp, Artificial Sequence
  chemically synthesized
tcaatttccttcactcgtttgc

SEQ ID NO: 32207 - DNA, 22 bp, Artificial Sequence
  chemically synthesized
aatttccttcactcgtttgcaa

SEQ ID NO: 32208 - DNA, 22 bp, Artificial Sequence
  chemically synthesized
ccttcactcgtttgcaatgctg

SEQ ID NO: 32209 - DNA, 22 bp, Artificial Sequence
  chemically synthesized
cttcactcgtttgcaatgctgt

SEQ ID NO: 32210 - DNA, 22 bp, Artificial Sequence
  chemically synthesized
cactcgtttgcaatgctgtgcc

SEQ ID NO: 32211 - DNA, 22 bp, Artificial Sequence
  chemically synthesized
actcgtttgcaatgctgtgccc

SEQ ID NO: 32212 - DNA, 22 bp, Artificial Sequence
  chemically synthesized
gtttgcaatgctgtgcccaccc

SEQ ID NO: 32213 - DNA, 22 bp, Artificial Sequence
  chemically synthesized
gcaatgctgtgcccaccctgca

SEQ ID NO: 32214 - DNA, 22 bp, Artificial Sequence
  chemically synthesized
caatgctgtgcccaccctgcaa

SEQ ID NO: 32215 - DNA, 22 bp, Artificial Sequence
  chemically synthesized
tgcccaccctgcaatcctagcc

SEQ ID NO: 32216 - DNA, 22 bp, Artificial Sequence
  chemically synthesized
caatcctagcccctaaattgga

SEQ ID NO: 32217 - DNA, 22 bp, Artificial Sequence
  chemically synthesized
gcccctaaattggagcagccat

SEQ ID NO: 32218 - DNA, 22 bp, Artificial Sequence
  chemically synthesized
aattggagcagccatctgcctt

SEQ ID NO: 32219 - DNA, 22 bp, Artificial Sequence
  chemically synthesized
gagcagccatctgccttcatcc

SEQ ID NO: 32220 - DNA, 22 bp, Artificial Sequence
  chemically synthesized
ccttcatccttctcttcccaga

SEQ ID NO: 32221 - DNA, 22 bp, Artificial Sequence
  chemically synthesized
catccttctcttcccagacagc

SEQ ID NO: 32222 - DNA, 22 bp, Artificial Sequence
  chemically synthesized
atccttctcttcccagacagcc

SEQ ID NO: 32223 - DNA, 22 bp, Artificial Sequence
  chemically synthesized
ctcttcccagacagccgaggac

SEQ ID NO: 32224 - DNA, 22 bp, Artificial Sequence
  chemically synthesized
tcttcccagacagccgaggact

SEQ ID NO: 32225 - DNA, 22 bp, Artificial Sequence
  chemically synthesized
ttcccagacagccgaggactgt

SEQ ID NO: 32226 - DNA, 22 bp, Artificial Sequence
  chemically synthesized
cccagacagccgaggactgtga

SEQ ID NO: 32227 - DNA, 22 bp, Artificial Sequence
  chemically synthesized
ccagacagccgaggactgtgaa

SEQ ID NO: 32228 - DNA, 22 bp, Artificial Sequence
  chemically synthesized
tgaaggaaaaaaatcaccaaaa

SEQ ID NO: 32229 - DNA, 22 bp, Artificial Sequence
  chemically synthesized
atgcctcacagcctccacccac

SEQ ID NO: 32230 - DNA, 22 bp, Artificial Sequence
  chemically synthesized
acagcctccacccacctctctg

SEQ ID NO: 32231 - DNA, 22 bp, Artificial Sequence
  chemically synthesized
cacccacctctctgctcagcaa

SEQ ID NO: 32232 - DNA, 22 bp, Artificial Sequence
  chemically synthesized
tctgctcagcaactcatttact

SEQ ID NO: 32233 - DNA, 22 bp, Artificial Sequence
  chemically synthesized
tgctcagcaactcatttacttg

SEQ ID NO: 32234 - DNA, 22 bp, Artificial Sequence
  chemically synthesized
ctcagcaactcatttacttggc

SEQ ID NO: 32235 - DNA, 22 bp, Artificial Sequence
  chemically synthesized
agcaactcatttacttggccct

SEQ ID NO: 32236 - DNA, 22 bp, Artificial Sequence
  chemically synthesized
atttacttggccctggacactc

SEQ ID NO: 32237 - DNA, 22 bp, Artificial Sequence
  chemically synthesized
acttggccctggacactcctaa

SEQ ID NO: 32238 - DNA, 22 bp, Artificial Sequence
  chemically synthesized
cttggccctggacactcctaaa

SEQ ID NO: 32239 - DNA, 22 bp, Artificial Sequence
  chemically synthesized
ggccctggacactcctaaatag

SEQ ID NO: 32240 - DNA, 22 bp, Artificial Sequence
  chemically synthesized
gccctggacactcctaaatagc

SEQ ID NO: 32241 - DNA, 22 bp, Artificial Sequence
  chemically synthesized
gacactcctaaatagcatccat

SEQ ID NO: 32242 - DNA, 22 bp, Artificial Sequence
  chemically synthesized
ctaaatagcatccatgcctgca

SEQ ID NO: 32243 - DNA, 22 bp, Artificial Sequence
  chemically synthesized
aatagcatccatgcctgcatcc

SEQ ID NO: 32244 - DNA, 22 bp, Artificial Sequence
  chemically synthesized
catccatttacagtcgttcctc

SEQ ID NO: 32245 - DNA, 22 bp, Artificial Sequence
  chemically synthesized
acagtcgttcctcagtatccat

SEQ ID NO: 32246 - DNA, 22 bp, Artificial Sequence
  chemically synthesized
cagtcgttcctcagtatccatg

SEQ ID NO: 32247 - DNA, 22 bp, Artificial Sequence
  chemically synthesized
ctcagtatccatggaaaattgg

SEQ ID NO: 32248 - DNA, 22 bp, Artificial Sequence
  chemically synthesized
agtatccatggaaaattggtgg

SEQ ID NO: 32249 - DNA, 22 bp, Artificial Sequence
  chemically synthesized
gtggcaagaccccctgcaaata

SEQ ID NO: 32250 - DNA, 22 bp, Artificial Sequence
  chemically synthesized
caaatatcaagatctgtggatg

SEQ ID NO: 32251 - DNA, 22 bp, Artificial Sequence
  chemically synthesized
tggatgctcaagtctccgatat

SEQ ID NO: 32252 - DNA, 22 bp, Artificial Sequence
  chemically synthesized
aagtctccgatataaaaatggc

SEQ ID NO: 32253 - DNA, 22 bp, Artificial Sequence
  chemically synthesized
cgatataaaaatggcttactat

SEQ ID NO: 32254 - DNA, 22 bp, Artificial Sequence
  chemically synthesized
actatttgcatataacctaaac

SEQ ID NO: 32255 - DNA, 22 bp, Artificial Sequence
  chemically synthesized
ctatttgcatataacctaaaca

SEQ ID NO: 32256 - DNA, 22 bp, Artificial Sequence
  chemically synthesized
tttgcatataacctaaacacat

SEQ ID NO: 32257 - DNA, 22 bp, Artificial Sequence
  chemically synthesized
gcatataacctaaacacatcct

SEQ ID NO: 32258 - DNA, 22 bp, Artificial Sequence
  chemically synthesized
catataacctaaacacatcctc

SEQ ID NO: 32259 - DNA, 22 bp, Artificial Sequence
  chemically synthesized
aacacatcctcctttgtacttt

SEQ ID NO: 32260 - DNA, 22 bp, Artificial Sequence
  chemically synthesized
ctttgtactttaaatcatctct

SEQ ID NO: 32261 - DNA, 22 bp, Artificial Sequence
  chemically synthesized
tgtactttaaatcatctctagg

SEQ ID NO: 32262 - DNA, 22 bp, Artificial Sequence
  chemically synthesized
gtactttaaatcatctctaggt

SEQ ID NO: 32263 - DNA, 22 bp, Artificial Sequence
  chemically synthesized
tactttaaatcatctctaggtt

SEQ ID NO: 32264 - DNA, 22 bp, Artificial Sequence
  chemically synthesized
taaatcatctctaggtttctct

SEQ ID NO: 32265 - DNA, 22 bp, Artificial Sequence
  chemically synthesized
aaatcatctctaggtttctctt

SEQ ID NO: 32266 - DNA, 22 bp, Artificial Sequence
  chemically synthesized
aatcatctctaggtttctctta

SEQ ID NO: 32267 - DNA, 22 bp, Artificial Sequence
  chemically synthesized
taggtttctcttaatagctaat

SEQ ID NO: 32268 - DNA, 22 bp, Artificial Sequence
  chemically synthesized
ggtttctcttaatagctaatac

SEQ ID NO: 32269 - DNA, 22 bp, Artificial Sequence
  chemically synthesized
ctcttaatagctaatacaatgt

SEQ ID NO: 32270 - DNA, 22 bp, Artificial Sequence
  chemically synthesized
tcttaatagctaatacaatgta

SEQ ID NO: 32271 - DNA, 22 bp, Artificial Sequence
  chemically synthesized
ttaatagctaatacaatgtaaa

SEQ ID NO: 32272 - DNA, 22 bp, Artificial Sequence
  chemically synthesized
aatagctaatacaatgtaaatg

SEQ ID NO: 32273 - DNA, 22 bp, Artificial Sequence
  chemically synthesized
atagctaatacaatgtaaatgc

SEQ ID NO: 32274 - DNA, 22 bp, Artificial Sequence
  chemically synthesized
atacaatgtaaatgctatgtaa

SEQ ID NO: 32275 - DNA, 22 bp, Artificial Sequence
  chemically synthesized
tgtaaatagttgttatgctgta

SEQ ID NO: 32276 - DNA, 22 bp, Artificial Sequence
  chemically synthesized
ttatgctgtattgtttagggaa

SEQ ID NO: 32277 - DNA, 22 bp, Artificial Sequence
  chemically synthesized
tgctgtattgtttagggaataa

SEQ ID NO: 32278 - DNA, 22 bp, Artificial Sequence
  chemically synthesized
tattgtttagggaataatgaaa

SEQ ID NO: 32279 - DNA, 22 bp, Artificial Sequence
  chemically synthesized
tttagggaataatgaaagataa

SEQ ID NO: 32280 - DNA, 22 bp, Artificial Sequence
  chemically synthesized
agggaataatgaaagataaaag

SEQ ID NO: 32281 - DNA, 22 bp, Artificial Sequence
  chemically synthesized
gggaataatgaaagataaaaga

SEQ ID NO: 32282 - DNA, 22 bp, Artificial Sequence
  chemically synthesized
tacatgttcagtagagatgcaa

SEQ ID NO: 32283 - DNA, 22 bp, Artificial Sequence
  chemically synthesized
agtagagatgcaaccatccatt

SEQ ID NO: 32284 - DNA, 22 bp, Artificial Sequence
  chemically synthesized
ttttcttgaatatttttgatct

SEQ ID NO: 32285 - DNA, 22 bp, Artificial Sequence
  chemically synthesized
tttcttgaatatttttgatctg

SEQ ID NO: 32286 - DNA, 22 bp, Artificial Sequence
  chemically synthesized
ttcttgaatatttttgatctgc

SEQ ID NO: 32287 - DNA, 22 bp, Artificial Sequence
  chemically synthesized
tcttgaatatttttgatctgca

SEQ ID NO: 32288 - DNA, 22 bp, Artificial Sequence
  chemically synthesized
cttgaatatttttgatctgcag

SEQ ID NO: 32289 - DNA, 22 bp, Artificial Sequence
  chemically synthesized
ttgaatatttttgatctgcagt

SEQ ID NO: 32290 - DNA, 22 bp, Artificial Sequence
  chemically synthesized
gaatatttttgatctgcagtta

SEQ ID NO: 32291 - DNA, 22 bp, Artificial Sequence
  chemically synthesized
aatatttttgatctgcagttaa

SEQ ID NO: 32292 - DNA, 22 bp, Artificial Sequence
  chemically synthesized
ttgatctgcagttaattgaatc

SEQ ID NO: 32293 - DNA, 22 bp, Artificial Sequence
  chemically synthesized
tgatctgcagttaattgaatct

SEQ ID NO: 32294 - DNA, 22 bp, Artificial Sequence
  chemically synthesized
gatctgcagttaattgaatctg

SEQ ID NO: 32295 - DNA, 22 bp, Artificial Sequence
  chemically synthesized
atctgcagttaattgaatctgt

SEQ ID NO: 32296 - DNA, 22 bp, Artificial Sequence
  chemically synthesized
cagttaattgaatctgtggctg

SEQ ID NO: 32297 - DNA, 22 bp, Artificial Sequence
  chemically synthesized
attgaatctgtggctgtggaac

SEQ ID NO: 32298 - DNA, 22 bp, Artificial Sequence
  chemically synthesized
aatctgtggctgtggaactcac

SEQ ID NO: 32299 - DNA, 22 bp, Artificial Sequence
  chemically synthesized
tggctgtggaactcacaaggag

SEQ ID NO: 32300 - DNA, 22 bp, Artificial Sequence
  chemically synthesized
tggaactcacaaggagagctga

SEQ ID NO: 32301 - DNA, 22 bp, Artificial Sequence
  chemically synthesized
acaaggagagctgactgtacag

SEQ ID NO: 32302 - DNA, 22 bp, Artificial Sequence
  chemically synthesized
actgtacagtgtggttgagtga

SEQ ID NO: 32303 - DNA, 22 bp, Artificial Sequence
  chemically synthesized
tacagtgtggttgagtgaaaaa

SEQ ID NO: 32304 - DNA, 22 bp, Artificial Sequence
  chemically synthesized
agtgaaaaaacagactttagaa

SEQ ID NO: 32305 - DNA, 22 bp, Artificial Sequence
  chemically synthesized
tagaatcagatcagacagaaat

SEQ ID NO: 32306 - DNA, 22 bp, Artificial Sequence
  chemically synthesized
agaatcagatcagacagaaata

SEQ ID NO: 32307 - DNA, 22 bp, Artificial Sequence
  chemically synthesized
gaatcagatcagacagaaatag

SEQ ID NO: 32308 - DNA, 22 bp, Artificial Sequence
  chemically synthesized
gaatcaagtatctgcctcctct

SEQ ID NO: 32309 - DNA, 22 bp, Artificial Sequence
  chemically synthesized
aatcaagtatctgcctcctcta

SEQ ID NO: 32310 - DNA, 22 bp, Artificial Sequence
  chemically synthesized
cctcctctagacctgtgacctt

SEQ ID NO: 32311 - DNA, 22 bp, Artificial Sequence
  chemically synthesized
ctctagacctgtgaccttggac

SEQ ID NO: 32312 - DNA, 22 bp, Artificial Sequence
  chemically synthesized
tagacctgtgaccttggacaag

SEQ ID NO: 32313 - DNA, 22 bp, Artificial Sequence
  chemically synthesized
gacctgtgaccttggacaagtc

SEQ ID NO: 32314 - DNA, 22 bp, Artificial Sequence
  chemically synthesized
tgaccttggacaagtcacacaa

SEQ ID NO: 32315 - DNA, 22 bp, Artificial Sequence
  chemically synthesized
ggacaagtcacacaagctctga

SEQ ID NO: 32316 - DNA, 22 bp, Artificial Sequence
  chemically synthesized
gacaagtcacacaagctctgaa

SEQ ID NO: 32317 - DNA, 22 bp, Artificial Sequence
  chemically synthesized
tgaaccttaactttgtcaaatg

SEQ ID NO: 32318 - DNA, 22 bp, Artificial Sequence
  chemically synthesized
aaccttaactttgtcaaatgta

SEQ ID NO: 32319 - DNA, 22 bp, Artificial Sequence
  chemically synthesized
aactttgtcaaatgtaaattag

SEQ ID NO: 32320 - DNA, 22 bp, Artificial Sequence
  chemically synthesized
actttgtcaaatgtaaattagg

SEQ ID NO: 32321 - DNA, 22 bp, Artificial Sequence
  chemically synthesized
tgtcaaatgtaaattaggttta

SEQ ID NO: 32322 - DNA, 22 bp, Artificial Sequence
  chemically synthesized
gtcaaatgtaaattaggtttaa

SEQ ID NO: 32323 - DNA, 22 bp, Artificial Sequence
  chemically synthesized
tcaaatgtaaattaggtttaac

SEQ ID NO: 32324 - DNA, 22 bp, Artificial Sequence
  chemically synthesized
ggtttaacagtagtataataag

SEQ ID NO: 32325 - DNA, 22 bp, Artificial Sequence
  chemically synthesized
aacagtagtataataagaatat

SEQ ID NO: 32326 - DNA, 22 bp, Artificial Sequence
  chemically synthesized
acagtagtataataagaatatc

SEQ ID NO: 32327 - DNA, 22 bp, Artificial Sequence
  chemically synthesized
tctcacaggtgttggcaggatc

SEQ ID NO: 32328 - DNA, 22 bp, Artificial Sequence
  chemically synthesized
acaggtgttggcaggatcagtg

SEQ ID NO: 32329 - DNA, 22 bp, Artificial Sequence
  chemically synthesized
gcaggatcagtgagacaatatg

SEQ ID NO: 32330 - DNA, 22 bp, Artificial Sequence
  chemically synthesized
gttatctctttttctccctact

SEQ ID NO: 32331 - DNA, 22 bp, Artificial Sequence
  chemically synthesized
tctctttttctccctactcctt

SEQ ID NO: 32332 - DNA, 22 bp, Artificial Sequence
  chemically synthesized
tttttctccctactcctttcat

SEQ ID NO: 32333 - DNA, 22 bp, Artificial Sequence
  chemically synthesized
tttctccctactcctttcatgt

SEQ ID NO: 32334 - DNA, 22 bp, Artificial Sequence
  chemically synthesized
ttctccctactcctttcatgtt

SEQ ID NO: 32335 - DNA, 22 bp, Artificial Sequence
  chemically synthesized
tctccctactcctttcatgttg

SEQ ID NO: 32336 - DNA, 22 bp, Artificial Sequence
  chemically synthesized
ctccctactcctttcatgttgg

SEQ ID NO: 32337 - DNA, 22 bp, Artificial Sequence
  chemically synthesized
tccctactcctttcatgttggc

SEQ ID NO: 32338 - DNA, 22 bp, Artificial Sequence
  chemically synthesized
cctactcctttcatgttggccc

SEQ ID NO: 32339 - DNA, 22 bp, Artificial Sequence
  chemically synthesized
ctcctttcatgttggccctact

SEQ ID NO: 32340 - DNA, 22 bp, Artificial Sequence
  chemically synthesized
ctttcatgttggccctactttc

SEQ ID NO: 32341 - DNA, 22 bp, Artificial Sequence
  chemically synthesized
tcatgttggccctactttcttc

SEQ ID NO: 32342 - DNA, 22 bp, Artificial Sequence
  chemically synthesized
catgttggccctactttcttct

SEQ ID NO: 32343 - DNA, 22 bp, Artificial Sequence
  chemically synthesized
atgttggccctactttcttctg

SEQ ID NO: 32344 - DNA, 22 bp, Artificial Sequence
  chemically synthesized
gccctactttcttctgttttaa

SEQ ID NO: 32345 - DNA, 22 bp, Artificial Sequence
  chemically synthesized
ctttcttctgttttaaatttct

SEQ ID NO: 32346 - DNA, 22 bp, Artificial Sequence
  chemically synthesized
tcttctgttttaaatttctcaa

SEQ ID NO: 32347 - DNA, 22 bp, Artificial Sequence
  chemically synthesized
cttctgttttaaatttctcaat

SEQ ID NO: 32348 - DNA, 22 bp, Artificial Sequence
  chemically synthesized
ttctgttttaaatttctcaatt

SEQ ID NO: 32349 - DNA, 22 bp, Artificial Sequence
  chemically synthesized
ctgttttaaatttctcaattct

SEQ ID NO: 32350 - DNA, 22 bp, Artificial Sequence
  chemically synthesized
tgttttaaatttctcaattctc

SEQ ID NO: 32351 - DNA, 22 bp, Artificial Sequence
  chemically synthesized
ttttaaatttctcaattctctt

SEQ ID NO: 32352 - DNA, 22 bp, Artificial Sequence
  chemically synthesized
taaatttctcaattctctttag

SEQ ID NO: 32353 - DNA, 22 bp, Artificial Sequence
  chemically synthesized
aaatttctcaattctctttagc

SEQ ID NO: 32354 - DNA, 22 bp, Artificial Sequence
  chemically synthesized
aatttctcaattctctttagct

SEQ ID NO: 32355 - DNA, 22 bp, Artificial Sequence
  chemically synthesized
ctcaattctctttagctcttta

SEQ ID NO: 32356 - DNA, 22 bp, Artificial Sequence
  chemically synthesized
tcaattctctttagctctttaa

SEQ ID NO: 32357 - DNA, 22 bp, Artificial Sequence
  chemically synthesized
aattctctttagctctttaata

SEQ ID NO: 32358 - DNA, 22 bp, Artificial Sequence
  chemically synthesized
tctttagctctttaataacttc

SEQ ID NO: 32359 - DNA, 22 bp, Artificial Sequence
  chemically synthesized
tttagctctttaataacttctg

SEQ ID NO: 32360 - DNA, 22 bp, Artificial Sequence
  chemically synthesized
tagctctttaataacttctgtg

SEQ ID NO: 32361 - DNA, 22 bp, Artificial Sequence
  chemically synthesized
agctctttaataacttctgtgt

SEQ ID NO: 32362 - DNA, 22 bp, Artificial Sequence
  chemically synthesized
gctctttaataacttctgtgta

SEQ ID NO: 32363 - DNA, 22 bp, Artificial Sequence
  chemically synthesized
tttaataacttctgtgtagctc

SEQ ID NO: 32364 - DNA, 22 bp, Artificial Sequence
  chemically synthesized
taataacttctgtgtagctctt

SEQ ID NO: 32365 - DNA, 22 bp, Artificial Sequence
  chemically synthesized
aataacttctgtgtagctcttt

SEQ ID NO: 32366 - DNA, 22 bp, Artificial Sequence
  chemically synthesized
ataacttctgtgtagctctttt

SEQ ID NO: 32367 - DNA, 22 bp, Artificial Sequence
  chemically synthesized
ctgtgtagctcttttccttcct

SEQ ID NO: 32368 - DNA, 22 bp, Artificial Sequence
  chemically synthesized
tgtgtagctcttttccttcctt

SEQ ID NO: 32369 - DNA, 22 bp, Artificial Sequence
  chemically synthesized
tgtagctcttttccttccttaa

SEQ ID NO: 32370 - DNA, 22 bp, Artificial Sequence
  chemically synthesized
ttttccttccttaatcacattt

SEQ ID NO: 32371 - DNA, 22 bp, Artificial Sequence
  chemically synthesized
ttccttccttaatcacatttat

SEQ ID NO: 32372 - DNA, 22 bp, Artificial Sequence
  chemically synthesized
tccttccttaatcacatttata

SEQ ID NO: 32373 - DNA, 22 bp, Artificial Sequence
  chemically synthesized
ccttccttaatcacatttatat

SEQ ID NO: 32374 - DNA, 22 bp, Artificial Sequence
  chemically synthesized
cttccttaatcacatttatata

SEQ ID NO: 32375 - DNA, 22 bp, Artificial Sequence
  chemically synthesized
ccttaatcacatttatataatg

SEQ ID NO: 32376 - DNA, 22 bp, Artificial Sequence
  chemically synthesized
cttaatcacatttatataatga

SEQ ID NO: 32377 - DNA, 22 bp, Artificial Sequence
  chemically synthesized
aatcacatttatataatgaaat

SEQ ID NO: 32378 - DNA, 22 bp, Artificial Sequence
  chemically synthesized
atcacatttatataatgaaatg

SEQ ID NO: 32379 - DNA, 22 bp, Artificial Sequence
  chemically synthesized
atataatgaaatgactattgtc

SEQ ID NO: 32380 - DNA, 22 bp, Artificial Sequence
  chemically synthesized
tataatgaaatgactattgtca

SEQ ID NO: 32381 - DNA, 22 bp, Artificial Sequence
  chemically synthesized
ttgtcacaatcaggaatgacct

SEQ ID NO: 32382 - DNA, 22 bp, Artificial Sequence
  chemically synthesized
tcacaatcaggaatgacctaaa

SEQ ID NO: 32383 - DNA, 22 bp, Artificial Sequence
  chemically synthesized
aagaataattttgagtttatgt

SEQ ID NO: 32384 - DNA, 22 bp, Artificial Sequence
  chemically synthesized
tgagtttatgtatttactggct

SEQ ID NO: 32385 - DNA, 22 bp, Artificial Sequence
  chemically synthesized
gagtttatgtatttactggctg

SEQ ID NO: 32386 - DNA, 22 bp, Artificial Sequence
  chemically synthesized
agtttatgtatttactggctgc

SEQ ID NO: 32387 - DNA, 22 bp, Artificial Sequence
  chemically synthesized
atgtatttactggctgctctaa

SEQ ID NO: 32388 - DNA, 22 bp, Artificial Sequence
  chemically synthesized
tgtatttactggctgctctaaa

SEQ ID NO: 32389 - DNA, 22 bp, Artificial Sequence
  chemically synthesized
actggctgctctaaataatttc

SEQ ID NO: 32390 - DNA, 22 bp, Artificial Sequence
  chemically synthesized
ctggctgctctaaataatttct

SEQ ID NO: 32391 - DNA, 22 bp, Artificial Sequence
  chemically synthesized
gctgctctaaataatttctaat

SEQ ID NO: 32392 - DNA, 22 bp, Artificial Sequence
  chemically synthesized
ctctaaataatttctaattgtt

SEQ ID NO: 32393 - DNA, 22 bp, Artificial Sequence
  chemically synthesized
taaataatttctaattgttgat

SEQ ID NO: 32394 - DNA, 22 bp, Artificial Sequence
  chemically synthesized
aataatttctaattgttgatct

SEQ ID NO: 32395 - DNA, 22 bp, Artificial Sequence
  chemically synthesized
ctaattgttgatctctcccttt

SEQ ID NO: 32396 - DNA, 22 bp, Artificial Sequence
  chemically synthesized
taattgttgatctctccctttt

SEQ ID NO: 32397 - DNA, 22 bp, Artificial Sequence
  chemically synthesized
attgttgatctctcccttttta

SEQ ID NO: 32398 - DNA, 22 bp, Artificial Sequence
  chemically synthesized
ttgatctctccctttttaggaa

SEQ ID NO: 32399 - DNA, 22 bp, Artificial Sequence
  chemically synthesized
atctctccctttttaggaaact

SEQ ID NO: 32400 - DNA, 22 bp, Artificial Sequence
  chemically synthesized
tccctttttaggaaactctttt

SEQ ID NO: 32401 - DNA, 22 bp, Artificial Sequence
  chemically synthesized
cctttttaggaaactcttttta

SEQ ID NO: 32402 - DNA, 22 bp, Artificial Sequence
  chemically synthesized
tttaggaaactctttttataat

SEQ ID NO: 32403 - DNA, 22 bp, Artificial Sequence
  chemically synthesized
ttaggaaactctttttataata

SEQ ID NO: 32404 - DNA, 22 bp, Artificial Sequence
  chemically synthesized
taggaaactctttttataataa

SEQ ID NO: 32405 - DNA, 22 bp, Artificial Sequence
  chemically synthesized
aggaaactctttttataataat

SEQ ID NO: 32406 - DNA, 22 bp, Artificial Sequence
  chemically synthesized
ggaaactctttttataataatc

SEQ ID NO: 32407 - DNA, 22 bp, Artificial Sequence
  chemically synthesized
tttttataataatcactctatt

SEQ ID NO: 32408 - DNA, 22 bp, Artificial Sequence
  chemically synthesized
tttataataatcactctattct

SEQ ID NO: 32409 - DNA, 22 bp, Artificial Sequence
  chemically synthesized
ttataataatcactctattctg

SEQ ID NO: 32410 - DNA, 22 bp, Artificial Sequence
  chemically synthesized
tataataatcactctattctgg

SEQ ID NO: 32411 - DNA, 22 bp, Artificial Sequence
  chemically synthesized
ataataatcactctattctggt

SEQ ID NO: 32412 - DNA, 22 bp, Artificial Sequence
  chemically synthesized
taataatcactctattctggtt

SEQ ID NO: 32413 - DNA, 22 bp, Artificial Sequence
  chemically synthesized
tattctggttccccgctttgct

SEQ ID NO: 32414 - DNA, 22 bp, Artificial Sequence
  chemically synthesized
ttctggttccccgctttgctct

SEQ ID NO: 32415 - DNA, 22 bp, Artificial Sequence
  chemically synthesized
tggttccccgctttgctctaac

SEQ ID NO: 32416 - DNA, 22 bp, Artificial Sequence
  chemically synthesized
gttccccgctttgctctaactc

SEQ ID NO: 32417 - DNA, 22 bp, Artificial Sequence
  chemically synthesized
cccgctttgctctaactcctgt

SEQ ID NO: 32418 - DNA, 22 bp, Artificial Sequence
  chemically synthesized
tgctctaactcctgttatccat

SEQ ID NO: 32419 - DNA, 22 bp, Artificial Sequence
  chemically synthesized
gctctaactcctgttatccatc

SEQ ID NO: 32420 - DNA, 22 bp, Artificial Sequence
  chemically synthesized
ctctaactcctgttatccatcc

SEQ ID NO: 32421 - DNA, 22 bp, Artificial Sequence
  chemically synthesized
taactcctgttatccatccagc

SEQ ID NO: 32422 - DNA, 22 bp, Artificial Sequence
  chemically synthesized
actcctgttatccatccagcac

SEQ ID NO: 32423 - DNA, 22 bp, Artificial Sequence
  chemically synthesized
ctgttatccatccagcacttga

SEQ ID NO: 32424 - DNA, 22 bp, Artificial Sequence
  chemically synthesized
ttatccatccagcacttgaatt

SEQ ID NO: 32425 - DNA, 22 bp, Artificial Sequence
  chemically synthesized
tccatccagcacttgaattgat

SEQ ID NO: 32426 - DNA, 22 bp, Artificial Sequence
  chemically synthesized
gaattgattaactcctgttcct

SEQ ID NO: 32427 - DNA, 22 bp, Artificial Sequence
  chemically synthesized
aattgattaactcctgttcctc

SEQ ID NO: 32428 - DNA, 22 bp, Artificial Sequence
  chemically synthesized
attaactcctgttcctctccat

SEQ ID NO: 32429 - DNA, 22 bp, Artificial Sequence
  chemically synthesized
actcctgttcctctccatggcc

SEQ ID NO: 32430 - DNA, 22 bp, Artificial Sequence
  chemically synthesized
ctgttcctctccatggccctta

SEQ ID NO: 32431 - DNA, 22 bp, Artificial Sequence
  chemically synthesized
ttcctctccatggcccttaaat

SEQ ID NO: 32432 - DNA, 22 bp, Artificial Sequence
  chemically synthesized
ctctccatggcccttaaatgtc

SEQ ID NO: 32433 - DNA, 22 bp, Artificial Sequence
  chemically synthesized
tccatggcccttaaatgtccag

SEQ ID NO: 32434 - DNA, 22 bp, Artificial Sequence
  chemically synthesized
catggcccttaaatgtccaggg

SEQ ID NO: 32435 - DNA, 22 bp, Artificial Sequence
  chemically synthesized
aaatgtccagggttctcccagg

SEQ ID NO: 32436 - DNA, 22 bp, Artificial Sequence
  chemically synthesized
aatgtccagggttctcccaggc

SEQ ID NO: 32437 - DNA, 22 bp, Artificial Sequence
  chemically synthesized
tcccaggctccagcctcagctt

SEQ ID NO: 32438 - DNA, 22 bp, Artificial Sequence
  chemically synthesized
ccaggctccagcctcagctttt

SEQ ID NO: 32439 - DNA, 22 bp, Artificial Sequence
  chemically synthesized
cagcctcagctttttccttttt

SEQ ID NO: 32440 - DNA, 22 bp, Artificial Sequence
  chemically synthesized
agctttttcctttttcacctta

SEQ ID NO: 32441 - DNA, 22 bp, Artificial Sequence
  chemically synthesized
tttcctttttcaccttatatat

SEQ ID NO: 32442 - DNA, 22 bp, Artificial Sequence
  chemically synthesized
ttcctttttcaccttatatata

SEQ ID NO: 32443 - DNA, 22 bp, Artificial Sequence
  chemically synthesized
tcctttttcaccttatatatac

SEQ ID NO: 32444 - DNA, 22 bp, Artificial Sequence
  chemically synthesized
cctttttcaccttatatatact

SEQ ID NO: 32445 - DNA, 22 bp, Artificial Sequence
  chemically synthesized
ctttttcaccttatatatactt

SEQ ID NO: 32446 - DNA, 22 bp, Artificial Sequence
  chemically synthesized
tttcaccttatatatacttgct

SEQ ID NO: 32447 - DNA, 22 bp, Artificial Sequence
  chemically synthesized
ttcaccttatatatacttgcta

SEQ ID NO: 32448 - DNA, 22 bp, Artificial Sequence
  chemically synthesized
tcaccttatatatacttgctag

SEQ ID NO: 32449 - DNA, 22 bp, Artificial Sequence
  chemically synthesized
caccttatatatacttgctagg

SEQ ID NO: 32450 - DNA, 22 bp, Artificial Sequence
  chemically synthesized
accttatatatacttgctaggg

SEQ ID NO: 32451 - DNA, 22 bp, Artificial Sequence
  chemically synthesized
atatatacttgctagggctggg

SEQ ID NO: 32452 - DNA, 22 bp, Artificial Sequence
  chemically synthesized
tatatacttgctagggctggga

SEQ ID NO: 32453 - DNA, 22 bp, Artificial Sequence
  chemically synthesized
gctagggctgggacaagagtga

SEQ ID NO: 32454 - DNA, 22 bp, Artificial Sequence
  chemically synthesized
ctagggctgggacaagagtgaa

SEQ ID NO: 32455 - DNA, 22 bp, Artificial Sequence
  chemically synthesized
gggctgggacaagagtgaacca

SEQ ID NO: 32456 - DNA, 22 bp, Artificial Sequence
  chemically synthesized
ggacaagagtgaaccaaacaag

SEQ ID NO: 32457 - DNA, 22 bp, Artificial Sequence
  chemically synthesized
aagaggtcctcacttctcgggg

SEQ ID NO: 32458 - DNA, 22 bp, Artificial Sequence
  chemically synthesized
agaggtcctcacttctcggggc

SEQ ID NO: 32459 - DNA, 22 bp, Artificial Sequence
  chemically synthesized
acttctcggggcatacaagtat

SEQ ID NO: 32460 - DNA, 22 bp, Artificial Sequence
  chemically synthesized
ctcggggcatacaagtatattt

SEQ ID NO: 32461 - DNA, 22 bp, Artificial Sequence
  chemically synthesized
tcggggcatacaagtatattta

SEQ ID NO: 32462 - DNA, 22 bp, Artificial Sequence
  chemically synthesized
ggggcatacaagtatatttatg

SEQ ID NO: 32463 - DNA, 22 bp, Artificial Sequence
  chemically synthesized
atgccctacaggccttgcttac

SEQ ID NO: 32464 - DNA, 22 bp, Artificial Sequence
  chemically synthesized
tgccctacaggccttgcttacc

SEQ ID NO: 32465 - DNA, 22 bp, Artificial Sequence
  chemically synthesized
caggccttgcttaccacagtct

SEQ ID NO: 32466 - DNA, 22 bp, Artificial Sequence
  chemically synthesized
gcttaccacagtctagtccggc

SEQ ID NO: 32467 - DNA, 22 bp, Artificial Sequence
  chemically synthesized
cttaccacagtctagtccggcc

SEQ ID NO: 32468 - DNA, 22 bp, Artificial Sequence
  chemically synthesized
accacagtctagtccggccctg

SEQ ID NO: 32469 - DNA, 22 bp, Artificial Sequence
  chemically synthesized
ccacagtctagtccggccctga

SEQ ID NO: 32470 - DNA, 22 bp, Artificial Sequence
  chemically synthesized
gtccggccctgaccctgtcaac

SEQ ID NO: 32471 - DNA, 22 bp, Artificial Sequence
  chemically synthesized
accctgtcaacaaaatttactg

SEQ ID NO: 32472 - DNA, 22 bp, Artificial Sequence
  chemically synthesized
tcaacaaaatttactgagcata

SEQ ID NO: 32473 - DNA, 22 bp, Artificial Sequence
  chemically synthesized
actgagcatacaaccactactg

SEQ ID NO: 32474 - DNA, 22 bp, Artificial Sequence
  chemically synthesized
ctgagcatacaaccactactgc

SEQ ID NO: 32475 - DNA, 22 bp, Artificial Sequence
  chemically synthesized
agcatacaaccactactgccag

SEQ ID NO: 32476 - DNA, 22 bp, Artificial Sequence
  chemically synthesized
ctgccaggcactgtactaggta

SEQ ID NO: 32477 - DNA, 22 bp, Artificial Sequence
  chemically synthesized
ccaggcactgtactaggtatca

SEQ ID NO: 32478 - DNA, 22 bp, Artificial Sequence
  chemically synthesized
tactaggtatcacaatatccat

SEQ ID NO: 32479 - DNA, 22 bp, Artificial Sequence
  chemically synthesized
ggtatcacaatatccatgctca

SEQ ID NO: 32480 - DNA, 22 bp, Artificial Sequence
  chemically synthesized
actctccagatgcccacacacg

SEQ ID NO: 32481 - DNA, 22 bp, Artificial Sequence
  chemically synthesized
tccagatgcccacacacgtggc

SEQ ID NO: 32482 - DNA, 22 bp, Artificial Sequence
  chemically synthesized
cagatgcccacacacgtggctg

SEQ ID NO: 32483 - DNA, 22 bp, Artificial Sequence
  chemically synthesized
taactactgtttacagaacaat

SEQ ID NO: 32484 - DNA, 22 bp, Artificial Sequence
  chemically synthesized
ctgtttacagaacaatgagttc

SEQ ID NO: 32485 - DNA, 22 bp, Artificial Sequence
  chemically synthesized
tttacagaacaatgagttccaa

SEQ ID NO: 32486 - DNA, 22 bp, Artificial Sequence
  chemically synthesized
acagaacaatgagttccaaata

SEQ ID NO: 32487 - DNA, 22 bp, Artificial Sequence
  chemically synthesized
cagaacaatgagttccaaatac

SEQ ID NO: 32488 - DNA, 22 bp, Artificial Sequence
  chemically synthesized
caaatactcacctatagtcaga

SEQ ID NO: 32489 - DNA, 22 bp, Artificial Sequence
  chemically synthesized
acctatagtcagatacgtctcc

SEQ ID NO: 32490 - DNA, 22 bp, Artificial Sequence
  chemically synthesized
tagtcagatacgtctcctgaat

SEQ ID NO: 32491 - DNA, 22 bp, Artificial Sequence
  chemically synthesized
ctgaatttcagattatctttcc

SEQ ID NO: 32492 - DNA, 22 bp, Artificial Sequence
  chemically synthesized
aatttcagattatctttccaac

SEQ ID NO: 32493 - DNA, 22 bp, Artificial Sequence
  chemically synthesized
cagattatctttccaactccct

SEQ ID NO: 32494 - DNA, 22 bp, Artificial Sequence
  chemically synthesized
agattatctttccaactcccta

SEQ ID NO: 32495 - DNA, 22 bp, Artificial Sequence
  chemically synthesized
tctttccaactccctaactgta

SEQ ID NO: 32496 - DNA, 22 bp, Artificial Sequence
  chemically synthesized
tccaactccctaactgtatatc

SEQ ID NO: 32497 - DNA, 22 bp, Artificial Sequence
  chemically synthesized
ccaactccctaactgtatatca

SEQ ID NO: 32498 - DNA, 22 bp, Artificial Sequence
  chemically synthesized
caactccctaactgtatatcat

SEQ ID NO: 32499 - DNA, 22 bp, Artificial Sequence
  chemically synthesized
cctaactgtatatcataatgta

SEQ ID NO: 32500 - DNA, 22 bp, Artificial Sequence
  chemically synthesized
actgtatatcataatgtagcca

SEQ ID NO: 32501 - DNA, 22 bp, Artificial Sequence
  chemically synthesized
tatatcataatgtagccagtaa

SEQ ID NO: 32502 - DNA, 22 bp, Artificial Sequence
  chemically synthesized
atgtatatgtaatgcttctgct

SEQ ID NO: 32503 - DNA, 22 bp, Artificial Sequence
  chemically synthesized
ctgctgtgttggacactgtgct

SEQ ID NO: 32504 - DNA, 22 bp, Artificial Sequence
  chemically synthesized
tgctgtgttggacactgtgctc

SEQ ID NO: 32505 - DNA, 22 bp, Artificial Sequence
  chemically synthesized
ctgtgttggacactgtgctcag

SEQ ID NO: 32506 - DNA, 22 bp, Artificial Sequence
  chemically synthesized
tgttggacactgtgctcagtaa

SEQ ID NO: 32507 - DNA, 22 bp, Artificial Sequence
  chemically synthesized
gacactgtgctcagtaactttg

SEQ ID NO: 32508 - DNA, 22 bp, Artificial Sequence
  chemically synthesized
tgctcagtaactttgcatccat

SEQ ID NO: 32509 - DNA, 22 bp, Artificial Sequence
  chemically synthesized
agtaactttgcatccattatct

SEQ ID NO: 32510 - DNA, 22 bp, Artificial Sequence
  chemically synthesized
tgcatccattatctcacttcat

SEQ ID NO: 32511 - DNA, 22 bp, Artificial Sequence
  chemically synthesized
gcatccattatctcacttcatc

SEQ ID NO: 32512 - DNA, 22 bp, Artificial Sequence
  chemically synthesized
catccattatctcacttcatcc

SEQ ID NO: 32513 - DNA, 22 bp, Artificial Sequence
  chemically synthesized
tctcacttcatcctcacaaaag

SEQ ID NO: 32514 - DNA, 22 bp, Artificial Sequence
  chemically synthesized
acttcatcctcacaaaagtccc

SEQ ID NO: 32515 - DNA, 22 bp, Artificial Sequence
  chemically synthesized
catcctcacaaaagtcccacga

SEQ ID NO: 32516 - DNA, 22 bp, Artificial Sequence
  chemically synthesized
atcctcacaaaagtcccacgag

SEQ ID NO: 32517 - DNA, 22 bp, Artificial Sequence
  chemically synthesized
acaaaagtcccacgagataggc

SEQ ID NO: 32518 - DNA, 22 bp, Artificial Sequence
  chemically synthesized
tcatcttatttttatgaatgag

SEQ ID NO: 32519 - DNA, 22 bp, Artificial Sequence
  chemically synthesized
atttttatgaatgaggaagata

SEQ ID NO: 32520 - DNA, 22 bp, Artificial Sequence
  chemically synthesized
tttttatgaatgaggaagatag

SEQ ID NO: 32521 - DNA, 22 bp, Artificial Sequence
  chemically synthesized
ttatgaatgaggaagatagatt

SEQ ID NO: 32522 - DNA, 22 bp, Artificial Sequence
  chemically synthesized
tatgaatgaggaagatagattc

SEQ ID NO: 32523 - DNA, 22 bp, Artificial Sequence
  chemically synthesized
atgaatgaggaagatagattca

SEQ ID NO: 32524 - DNA, 22 bp, Artificial Sequence
  chemically synthesized
tgaatgaggaagatagattcat

SEQ ID NO: 32525 - DNA, 22 bp, Artificial Sequence
  chemically synthesized
atagaggctaagggctttgccc

SEQ ID NO: 32526 - DNA, 22 bp, Artificial Sequence
  chemically synthesized
agggctttgcccaaggtaacat

SEQ ID NO: 32527 - DNA, 22 bp, Artificial Sequence
  chemically synthesized
tgcccaaggtaacatactaaaa

SEQ ID NO: 32528 - DNA, 22 bp, Artificial Sequence
  chemically synthesized
gcccaaggtaacatactaaaac

SEQ ID NO: 32529 - DNA, 22 bp, Artificial Sequence
  chemically synthesized
cccaaggtaacatactaaaaca

SEQ ID NO: 32530 - DNA, 22 bp, Artificial Sequence
  chemically synthesized
aaacattcaggattcagactct

SEQ ID NO: 32531 - DNA, 22 bp, Artificial Sequence
  chemically synthesized
aggattcagactctggcagtca

SEQ ID NO: 32532 - DNA, 22 bp, Artificial Sequence
  chemically synthesized
agactctggcagtcagactaaa

SEQ ID NO: 32533 - DNA, 22 bp, Artificial Sequence
  chemically synthesized
tggcagtcagactaaagagcca

SEQ ID NO: 32534 - DNA, 22 bp, Artificial Sequence
  chemically synthesized
gcagtcagactaaagagccagt

SEQ ID NO: 32535 - DNA, 22 bp, Artificial Sequence
  chemically synthesized
aagagccagttctcttagacat

SEQ ID NO: 32536 - DNA, 22 bp, Artificial Sequence
  chemically synthesized
tcttagacattattctgtggtc

SEQ ID NO: 32537 - DNA, 22 bp, Artificial Sequence
  chemically synthesized
ttagacattattctgtggtcca

SEQ ID NO: 32538 - DNA, 22 bp, Artificial Sequence
  chemically synthesized
agacattattctgtggtccata

SEQ ID NO: 32539 - DNA, 22 bp, Artificial Sequence
  chemically synthesized
gacattattctgtggtccataa

SEQ ID NO: 32540 - DNA, 22 bp, Artificial Sequence
  chemically synthesized
ttctgtggtccataatcacatc

SEQ ID NO: 32541 - DNA, 22 bp, Artificial Sequence
  chemically synthesized
tgtggtccataatcacatcaaa

SEQ ID NO: 32542 - DNA, 22 bp, Artificial Sequence
  chemically synthesized
tggtccataatcacatcaaaca

SEQ ID NO: 32543 - DNA, 22 bp, Artificial Sequence
  chemically synthesized
tagccatttccccttccatacc

SEQ ID NO: 32544 - DNA, 22 bp, Artificial Sequence
  chemically synthesized
gccatttccccttccataccca

SEQ ID NO: 32545 - DNA, 22 bp, Artificial Sequence
  chemically synthesized
ccccttccatacccagatggtt

SEQ ID NO: 32546 - DNA, 22 bp, Artificial Sequence
  chemically synthesized
cccttccatacccagatggtta

SEQ ID NO: 32547 - DNA, 22 bp, Artificial Sequence
  chemically synthesized
ccatacccagatggttaagtca

SEQ ID NO: 32548 - DNA, 22 bp, Artificial Sequence
  chemically synthesized
catacccagatggttaagtcat

SEQ ID NO: 32549 - DNA, 22 bp, Artificial Sequence
  chemically synthesized
agtcataccacttctacttcct

SEQ ID NO: 32550 - DNA, 22 bp, Artificial Sequence
  chemically synthesized
ctacttccttaatatcatttga

SEQ ID NO: 32551 - DNA, 22 bp, Artificial Sequence
  chemically synthesized
tacttccttaatatcatttgaa

SEQ ID NO: 32552 - DNA, 22 bp, Artificial Sequence
  chemically synthesized
cttccttaatatcatttgaact

SEQ ID NO: 32553 - DNA, 22 bp, Artificial Sequence
  chemically synthesized
ccttaatatcatttgaactccc

SEQ ID NO: 32554 - DNA, 22 bp, Artificial Sequence
  chemically synthesized
cttaatatcatttgaactcccc

SEQ ID NO: 32555 - DNA, 22 bp, Artificial Sequence
  chemically synthesized
aatatcatttgaactcccctct

SEQ ID NO: 32556 - DNA, 22 bp, Artificial Sequence
  chemically synthesized
atatcatttgaactcccctctt

SEQ ID NO: 32557 - DNA, 22 bp, Artificial Sequence
  chemically synthesized
gaactcccctctttttttgtac

SEQ ID NO: 32558 - DNA, 22 bp, Artificial Sequence
  chemically synthesized
aactcccctctttttttgtact

SEQ ID NO: 32559 - DNA, 22 bp, Artificial Sequence
  chemically synthesized
ccctctttttttgtactgctac

SEQ ID NO: 32560 - DNA, 22 bp, Artificial Sequence
  chemically synthesized
tttttttgtactgctactgttc

SEQ ID NO: 32561 - DNA, 22 bp, Artificial Sequence
  chemically synthesized
tttttgtactgctactgttcag

SEQ ID NO: 32562 - DNA, 22 bp, Artificial Sequence
  chemically synthesized
ttttgtactgctactgttcagg

SEQ ID NO: 32563 - DNA, 22 bp, Artificial Sequence
  chemically synthesized
tttgtactgctactgttcaggt

SEQ ID NO: 32564 - DNA, 22 bp, Artificial Sequence
  chemically synthesized
ttgtactgctactgttcaggtt

SEQ ID NO: 32565 - DNA, 22 bp, Artificial Sequence
  chemically synthesized
tgtactgctactgttcaggttc

SEQ ID NO: 32566 - DNA, 22 bp, Artificial Sequence
  chemically synthesized
gtactgctactgttcaggttct

SEQ ID NO: 32567 - DNA, 22 bp, Artificial Sequence
  chemically synthesized
tactgctactgttcaggttcta

SEQ ID NO: 32568 - DNA, 22 bp, Artificial Sequence
  chemically synthesized
ctactgttcaggttctagcctt

SEQ ID NO: 32569 - DNA, 22 bp, Artificial Sequence
  chemically synthesized
ctgttcaggttctagcctttat

SEQ ID NO: 32570 - DNA, 22 bp, Artificial Sequence
  chemically synthesized
ttcaggttctagcctttatgtc

SEQ ID NO: 32571 - DNA, 22 bp, Artificial Sequence
  chemically synthesized
aggttctagcctttatgtctcc

SEQ ID NO: 32572 - DNA, 22 bp, Artificial Sequence
  chemically synthesized
tagcctttatgtctcccgcaga

SEQ ID NO: 32573 - DNA, 22 bp, Artificial Sequence
  chemically synthesized
gcctttatgtctcccgcagata

SEQ ID NO: 32574 - DNA, 22 bp, Artificial Sequence
  chemically synthesized
tatgtctcccgcagataattgc

SEQ ID NO: 32575 - DNA, 22 bp, Artificial Sequence
  chemically synthesized
atgtctcccgcagataattgca

SEQ ID NO: 32576 - DNA, 22 bp, Artificial Sequence
  chemically synthesized
tgtctcccgcagataattgcaa

SEQ ID NO: 32577 - DNA, 22 bp, Artificial Sequence
  chemically synthesized
ccgcagataattgcaatagtct

SEQ ID NO: 32578 - DNA, 22 bp, Artificial Sequence
  chemically synthesized
caatagtctcaggactgctctc

SEQ ID NO: 32579 - DNA, 22 bp, Artificial Sequence
  chemically synthesized
aggactgctctctcctagtctt

SEQ ID NO: 32580 - DNA, 22 bp, Artificial Sequence
  chemically synthesized
ctctctcctagtcttggtacgg

SEQ ID NO: 32581 - DNA, 22 bp, Artificial Sequence
  chemically synthesized
tctcctagtcttggtacggccc

SEQ ID NO: 32582 - DNA, 22 bp, Artificial Sequence
  chemically synthesized
tcctagtcttggtacggccccc

SEQ ID NO: 32583 - DNA, 22 bp, Artificial Sequence
  chemically synthesized
ctagtcttggtacggccccctc

SEQ ID NO: 32584 - DNA, 22 bp, Artificial Sequence
  chemically synthesized
gtcttggtacggccccctcccc

SEQ ID NO: 32585 - DNA, 22 bp, Artificial Sequence
  chemically synthesized
ggtacggccccctcccccacta

SEQ ID NO: 32586 - DNA, 22 bp, Artificial Sequence
  chemically synthesized
gtacggccccctcccccactat

SEQ ID NO: 32587 - DNA, 22 bp, Artificial Sequence
  chemically synthesized
ccccactatcatttcattagcg

SEQ ID NO: 32588 - DNA, 22 bp, Artificial Sequence
  chemically synthesized
tcatttcattagcgtgttgcca

SEQ ID NO: 32589 - DNA, 22 bp, Artificial Sequence
  chemically synthesized
cattagcgtgttgccagactgg

SEQ ID NO: 32590 - DNA, 22 bp, Artificial Sequence
  chemically synthesized
attagcgtgttgccagactggg

SEQ ID NO: 32591 - DNA, 22 bp, Artificial Sequence
  chemically synthesized
gcgtgttgccagactgggcatc

SEQ ID NO: 32592 - DNA, 22 bp, Artificial Sequence
  chemically synthesized
ccagactgggcatcctaaatca

SEQ ID NO: 32593 - DNA, 22 bp, Artificial Sequence
  chemically synthesized
ggcatcctaaatcagccatcag

SEQ ID NO: 32594 - DNA, 22 bp, Artificial Sequence
  chemically synthesized
aatcagccatcagtggtactcc

SEQ ID NO: 32595 - DNA, 22 bp, Artificial Sequence
  chemically synthesized
cttatgtttatacttcgatacc

SEQ ID NO: 32596 - DNA, 22 bp, Artificial Sequence
  chemically synthesized
atgtttatacttcgatacctcc

SEQ ID NO: 32597 - DNA, 22 bp, Artificial Sequence
  chemically synthesized
tgtttatacttcgatacctcca

SEQ ID NO: 32598 - DNA, 22 bp, Artificial Sequence
  chemically synthesized
atacttcgatacctccatattg

SEQ ID NO: 32599 - DNA, 22 bp, Artificial Sequence
  chemically synthesized
tacttcgatacctccatattgc

SEQ ID NO: 32600 - DNA, 22 bp, Artificial Sequence
  chemically synthesized
cgatacctccatattgcatttt

SEQ ID NO: 32601 - DNA, 22 bp, Artificial Sequence
  chemically synthesized
gatacctccatattgcatttta

SEQ ID NO: 32602 - DNA, 22 bp, Artificial Sequence
  chemically synthesized
catattgcattttattgtccaa

SEQ ID NO: 32603 - DNA, 22 bp, Artificial Sequence
  chemically synthesized
cattttattgtccaatctcctt

SEQ ID NO: 32604 - DNA, 22 bp, Artificial Sequence
  chemically synthesized
tattgtccaatctccttaggtt

SEQ ID NO: 32605 - DNA, 22 bp, Artificial Sequence
  chemically synthesized
attgtccaatctccttaggtta

SEQ ID NO: 32606 - DNA, 22 bp, Artificial Sequence
  chemically synthesized
ttgtccaatctccttaggttaa

SEQ ID NO: 32607 - DNA, 22 bp, Artificial Sequence
  chemically synthesized
tccaatctccttaggttaatga

SEQ ID NO: 32608 - DNA, 22 bp, Artificial Sequence
  chemically synthesized
cttaggttaatgacttcattat

SEQ ID NO: 32609 - DNA, 22 bp, Artificial Sequence
  chemically synthesized
aggttaatgacttcattatctg

SEQ ID NO: 32610 - DNA, 22 bp, Artificial Sequence
  chemically synthesized
ggttaatgacttcattatctga

SEQ ID NO: 32611 - DNA, 22 bp, Artificial Sequence
  chemically synthesized
atgacttcattatctgatgacc

SEQ ID NO: 32612 - DNA, 22 bp, Artificial Sequence
  chemically synthesized
cattatctgatgaccagctctg

SEQ ID NO: 32613 - DNA, 22 bp, Artificial Sequence
  chemically synthesized
attatctgatgaccagctctgc

SEQ ID NO: 32614 - DNA, 22 bp, Artificial Sequence
  chemically synthesized
tctgatgaccagctctgcctag

SEQ ID NO: 32615 - DNA, 22 bp, Artificial Sequence
  chemically synthesized
atgaccagctctgcctagttta

SEQ ID NO: 32616 - DNA, 22 bp, Artificial Sequence
  chemically synthesized
tgcctagtttacctgtctcact

SEQ ID NO: 32617 - DNA, 22 bp, Artificial Sequence
  chemically synthesized
cctagtttacctgtctcacttg

SEQ ID NO: 32618 - DNA, 22 bp, Artificial Sequence
  chemically synthesized
gtttacctgtctcacttgtcat

SEQ ID NO: 32619 - DNA, 22 bp, Artificial Sequence
  chemically synthesized
acctgtctcacttgtcatagtc

SEQ ID NO: 32620 - DNA, 22 bp, Artificial Sequence
  chemically synthesized
cctgtctcacttgtcatagtcc

SEQ ID NO: 32621 - DNA, 22 bp, Artificial Sequence
  chemically synthesized
tctcacttgtcatagtccatat

SEQ ID NO: 32622 - DNA, 22 bp, Artificial Sequence
  chemically synthesized
acttgtcatagtccatatggaa

SEQ ID NO: 32623 - DNA, 22 bp, Artificial Sequence
  chemically synthesized
gtcatagtccatatggaaccat

SEQ ID NO: 32624 - DNA, 22 bp, Artificial Sequence
  chemically synthesized
tcatagtccatatggaaccata

SEQ ID NO: 32625 - DNA, 22 bp, Artificial Sequence
  chemically synthesized
ctgaaatacctcacgttcttgc

SEQ ID NO: 32626 - DNA, 22 bp, Artificial Sequence
  chemically synthesized
aaatacctcacgttcttgcaaa

SEQ ID NO: 32627 - DNA, 22 bp, Artificial Sequence
  chemically synthesized
acgttcttgcaaatctgagtct

SEQ ID NO: 32628 - DNA, 22 bp, Artificial Sequence
  chemically synthesized
ttgcaaatctgagtctttgcac

SEQ ID NO: 32629 - DNA, 22 bp, Artificial Sequence
  chemically synthesized
gcaaatctgagtctttgcacga

SEQ ID NO: 32630 - DNA, 22 bp, Artificial Sequence
  chemically synthesized
caaatctgagtctttgcacgag

SEQ ID NO: 32631 - DNA, 22 bp, Artificial Sequence
  chemically synthesized
agtctttgcacgagtgatcctc

SEQ ID NO: 32632 - DNA, 22 bp, Artificial Sequence
  chemically synthesized
tgcacgagtgatcctctttgca

SEQ ID NO: 32633 - DNA, 22 bp, Artificial Sequence
  chemically synthesized
gcacgagtgatcctctttgcat

SEQ ID NO: 32634 - DNA, 22 bp, Artificial Sequence
  chemically synthesized
cacgagtgatcctctttgcata

SEQ ID NO: 32635 - DNA, 22 bp, Artificial Sequence
  chemically synthesized
tttgcataaaatgcccttatat

SEQ ID NO: 32636 - DNA, 22 bp, Artificial Sequence
  chemically synthesized
tgcataaaatgcccttatatca

SEQ ID NO: 32637 - DNA, 22 bp, Artificial Sequence
  chemically synthesized
gcataaaatgcccttatatcag

SEQ ID NO: 32638 - DNA, 22 bp, Artificial Sequence
  chemically synthesized
cataaaatgcccttatatcaga

SEQ ID NO: 32639 - DNA, 22 bp, Artificial Sequence
  chemically synthesized
atatcagacatttaaagagaga

SEQ ID NO: 32640 - DNA, 22 bp, Artificial Sequence
  chemically synthesized
tatcagacatttaaagagagag

SEQ ID NO: 32641 - DNA, 22 bp, Artificial Sequence
  chemically synthesized
aaagagagagaacgcctactca

SEQ ID NO: 32642 - DNA, 22 bp, Artificial Sequence
  chemically synthesized
aagagagagaacgcctactcat

SEQ ID NO: 32643 - DNA, 22 bp, Artificial Sequence
  chemically synthesized
ctcatcttttaagacccagatg

SEQ ID NO: 32644 - DNA, 22 bp, Artificial Sequence
  chemically synthesized
atcttttaagacccagatgaaa

SEQ ID NO: 32645 - DNA, 22 bp, Artificial Sequence
  chemically synthesized
ttaagacccagatgaaaatatt

SEQ ID NO: 32646 - DNA, 22 bp, Artificial Sequence
  chemically synthesized
taagacccagatgaaaatattc

SEQ ID NO: 32647 - DNA, 22 bp, Artificial Sequence
  chemically synthesized
aagacccagatgaaaatattct

SEQ ID NO: 32648 - DNA, 22 bp, Artificial Sequence
  chemically synthesized
agacccagatgaaaatattctc

SEQ ID NO: 32649 - DNA, 22 bp, Artificial Sequence
  chemically synthesized
tctctctatcaattgtttcccc

SEQ ID NO: 32650 - DNA, 22 bp, Artificial Sequence
  chemically synthesized
tctctatcaattgtttccccat

SEQ ID NO: 32651 - DNA, 22 bp, Artificial Sequence
  chemically synthesized
tctatcaattgtttccccattt

SEQ ID NO: 32652 - DNA, 22 bp, Artificial Sequence
  chemically synthesized
tatcaattgtttccccatttaa

SEQ ID NO: 32653 - DNA, 22 bp, Artificial Sequence
  chemically synthesized
tcaattgtttccccatttaatg

SEQ ID NO: 32654 - DNA, 22 bp, Artificial Sequence
  chemically synthesized
tttccccatttaatgtgttcct

SEQ ID NO: 32655 - DNA, 22 bp, Artificial Sequence
  chemically synthesized
ccccatttaatgtgttcctttc

SEQ ID NO: 32656 - DNA, 22 bp, Artificial Sequence
  chemically synthesized
cccatttaatgtgttcctttct

SEQ ID NO: 32657 - DNA, 22 bp, Artificial Sequence
  chemically synthesized
aatgtgttcctttctctatgat

SEQ ID NO: 32658 - DNA, 22 bp, Artificial Sequence
  chemically synthesized
atgtgttcctttctctatgatc

SEQ ID NO: 32659 - DNA, 22 bp, Artificial Sequence
  chemically synthesized
ctttctctatgatcccttagta

SEQ ID NO: 32660 - DNA, 22 bp, Artificial Sequence
  chemically synthesized
tctctatgatcccttagtacct

SEQ ID NO: 32661 - DNA, 22 bp, Artificial Sequence
  chemically synthesized
ctctatgatcccttagtaccta

SEQ ID NO: 32662 - DNA, 22 bp, Artificial Sequence
  chemically synthesized
tctatgatcccttagtacctag

SEQ ID NO: 32663 - DNA, 22 bp, Artificial Sequence
  chemically synthesized
tatgatcccttagtacctagtg

SEQ ID NO: 32664 - DNA, 22 bp, Artificial Sequence
  chemically synthesized
tgatcccttagtacctagtgca

SEQ ID NO: 32665 - DNA, 22 bp, Artificial Sequence
  chemically synthesized
agtacctagtgcacattttatc

SEQ ID NO: 32666 - DNA, 22 bp, Artificial Sequence
  chemically synthesized
gtacctagtgcacattttatca

SEQ ID NO: 32667 - DNA, 22 bp, Artificial Sequence
  chemically synthesized
gtgcacattttatcacattata

SEQ ID NO: 32668 - DNA, 22 bp, Artificial Sequence
  chemically synthesized
tatcacattatattgaaacctc

SEQ ID NO: 32669 - DNA, 22 bp, Artificial Sequence
  chemically synthesized
atcacattatattgaaacctct

SEQ ID NO: 32670 - DNA, 22 bp, Artificial Sequence
  chemically synthesized
tcacattatattgaaacctctc

SEQ ID NO: 32671 - DNA, 22 bp, Artificial Sequence
  chemically synthesized
tattgaaacctctcacctggcc

SEQ ID NO: 32672 - DNA, 22 bp, Artificial Sequence
  chemically synthesized
aaacctctcacctggcctcatg

SEQ ID NO: 32673 - DNA, 22 bp, Artificial Sequence
  chemically synthesized
tcacctggcctcatgctgcttt

SEQ ID NO: 32674 - DNA, 22 bp, Artificial Sequence
  chemically synthesized
acctggcctcatgctgctttag

SEQ ID NO: 32675 - DNA, 22 bp, Artificial Sequence
  chemically synthesized
gcctcatgctgctttagatcaa

SEQ ID NO: 32676 - DNA, 22 bp, Artificial Sequence
  chemically synthesized
atgctgctttagatcaaagagg

SEQ ID NO: 32677 - DNA, 22 bp, Artificial Sequence
  chemically synthesized
ctttagatcaaagagggagtct

SEQ ID NO: 32678 - DNA, 22 bp, Artificial Sequence
  chemically synthesized
tagatcaaagagggagtctggt

SEQ ID NO: 32679 - DNA, 22 bp, Artificial Sequence
  chemically synthesized
agatcaaagagggagtctggtt

SEQ ID NO: 32680 - DNA, 22 bp, Artificial Sequence
  chemically synthesized
gatcaaagagggagtctggttt

SEQ ID NO: 32681 - DNA, 22 bp, Artificial Sequence
  chemically synthesized
gtttatccccatacccctagta

SEQ ID NO: 32682 - DNA, 22 bp, Artificial Sequence
  chemically synthesized
atccccatacccctagtaccct

SEQ ID NO: 32683 - DNA, 22 bp, Artificial Sequence
  chemically synthesized
tccccatacccctagtaccctg

SEQ ID NO: 32684 - DNA, 22 bp, Artificial Sequence
  chemically synthesized
gtaccctgacacagtacctggc

SEQ ID NO: 32685 - DNA, 22 bp, Artificial Sequence
  chemically synthesized
acacagtacctggcaccatagt

SEQ ID NO: 32686 - DNA, 22 bp, Artificial Sequence
  chemically synthesized
gcaccatagttgtaactcagta

SEQ ID NO: 32687 - DNA, 22 bp, Artificial Sequence
  chemically synthesized
taactcagtaatgtctgaatga

SEQ ID NO: 32688 - DNA, 22 bp, Artificial Sequence
  chemically synthesized
agtaatgtctgaatgaaggaca

SEQ ID NO: 32689 - DNA, 22 bp, Artificial Sequence
  chemically synthesized
aatgaaggacatctttgatgca

SEQ ID NO: 32690 - DNA, 22 bp, Artificial Sequence
  chemically synthesized
tgatgcatacactttacaaaac

SEQ ID NO: 32691 - DNA, 22 bp, Artificial Sequence
  chemically synthesized
gatgcatacactttacaaaact

SEQ ID NO: 32692 - DNA, 22 bp, Artificial Sequence
  chemically synthesized
atgcatacactttacaaaacta

SEQ ID NO: 32693 - DNA, 22 bp, Artificial Sequence
  chemically synthesized
tacaaaactaaactggttttac

SEQ ID NO: 32694 - DNA, 22 bp, Artificial Sequence
  chemically synthesized
acaaaactaaactggttttaca

SEQ ID NO: 32695 - DNA, 22 bp, Artificial Sequence
  chemically synthesized
caaaactaaactggttttacag

SEQ ID NO: 32696 - DNA, 22 bp, Artificial Sequence
  chemically synthesized
aactggttttacagaactgttt

SEQ ID NO: 32697 - DNA, 22 bp, Artificial Sequence
  chemically synthesized
gttttacagaactgttttaatt

SEQ ID NO: 32698 - DNA, 22 bp, Artificial Sequence
  chemically synthesized
tacagaactgttttaatttcaa

SEQ ID NO: 32699 - DNA, 22 bp, Artificial Sequence
  chemically synthesized
acagaactgttttaatttcaaa

SEQ ID NO: 32700 - DNA, 22 bp, Artificial Sequence
  chemically synthesized
cagaactgttttaatttcaaaa

SEQ ID NO: 32701 - DNA, 22 bp, Artificial Sequence
  chemically synthesized
ttttaatttcaaaattccaaac

SEQ ID NO: 32702 - DNA, 22 bp, Artificial Sequence
  chemically synthesized
taatttcaaaattccaaactgt

SEQ ID NO: 32703 - DNA, 22 bp, Artificial Sequence
  chemically synthesized
aatttcaaaattccaaactgtt

SEQ ID NO: 32704 - DNA, 22 bp, Artificial Sequence
  chemically synthesized
atttcaaaattccaaactgttg

SEQ ID NO: 32705 - DNA, 22 bp, Artificial Sequence
  chemically synthesized
caaaattccaaactgttgcaat

SEQ ID NO: 32706 - DNA, 22 bp, Artificial Sequence
  chemically synthesized
aaaattccaaactgttgcaata

SEQ ID NO: 32707 - DNA, 22 bp, Artificial Sequence
  chemically synthesized
caaactgttgcaataataccta

SEQ ID NO: 32708 - DNA, 22 bp, Artificial Sequence
  chemically synthesized
ttgcaataatacctaaaggcag

SEQ ID NO: 32709 - DNA, 22 bp, Artificial Sequence
  chemically synthesized
caataatacctaaaggcagcag

SEQ ID NO: 32710 - DNA, 22 bp, Artificial Sequence
  chemically synthesized
aaggcagcagccatgaaaatgc

SEQ ID NO: 32711 - DNA, 22 bp, Artificial Sequence
  chemically synthesized
agcaaatcactcaccgaaactc

SEQ ID NO: 32712 - DNA, 22 bp, Artificial Sequence
  chemically synthesized
accgaaactccttttagaagcc

SEQ ID NO: 32713 - DNA, 22 bp, Artificial Sequence
  chemically synthesized
cttttagaagccaatgagagtt

SEQ ID NO: 32714 - DNA, 22 bp, Artificial Sequence
  chemically synthesized
ttagaagccaatgagagtttaa

SEQ ID NO: 32715 - DNA, 22 bp, Artificial Sequence
  chemically synthesized
tagaagccaatgagagtttaat

SEQ ID NO: 32716 - DNA, 22 bp, Artificial Sequence
  chemically synthesized
agaagccaatgagagtttaata

SEQ ID NO: 32717 - DNA, 22 bp, Artificial Sequence
  chemically synthesized
gaagccaatgagagtttaatag

SEQ ID NO: 32718 - DNA, 22 bp, Artificial Sequence
  chemically synthesized
aatagcagaagagagtgctgca

SEQ ID NO: 32719 - DNA, 22 bp, Artificial Sequence
  chemically synthesized
atagcagaagagagtgctgcat

SEQ ID NO: 32720 - DNA, 22 bp, Artificial Sequence
  chemically synthesized
cattaatactgtctatccttag

SEQ ID NO: 32721 - DNA, 22 bp, Artificial Sequence
  chemically synthesized
atactgtctatccttagaaaaa

SEQ ID NO: 32722 - DNA, 22 bp, Artificial Sequence
  chemically synthesized
tctatccttagaaaaattcccc

SEQ ID NO: 32723 - DNA, 22 bp, Artificial Sequence
  chemically synthesized
tccttagaaaaattcccctggc

SEQ ID NO: 32724 - DNA, 22 bp, Artificial Sequence
  chemically synthesized
agaaaaattcccctggcccctt

SEQ ID NO: 32725 - DNA, 22 bp, Artificial Sequence
  chemically synthesized
gaaaaattcccctggccccttc

SEQ ID NO: 32726 - DNA, 22 bp, Artificial Sequence
  chemically synthesized
ccctggccccttcctcaagggc

SEQ ID NO: 32727 - DNA, 22 bp, Artificial Sequence
  chemically synthesized
gccccttcctcaagggcttatt

SEQ ID NO: 32728 - DNA, 22 bp, Artificial Sequence
  chemically synthesized
cctcaagggcttattatctctg

SEQ ID NO: 32729 - DNA, 22 bp, Artificial Sequence
  chemically synthesized
ctcaagggcttattatctctgg

SEQ ID NO: 32730 - DNA, 22 bp, Artificial Sequence
  chemically synthesized
aagggcttattatctctggcta

SEQ ID NO: 32731 - DNA, 22 bp, Artificial Sequence
  chemically synthesized
attatctctggctacaatggct

SEQ ID NO: 32732 - DNA, 22 bp, Artificial Sequence
  chemically synthesized
ttatctctggctacaatggctg

SEQ ID NO: 32733 - DNA, 22 bp, Artificial Sequence
  chemically synthesized
tctctggctacaatggctgcag

SEQ ID NO: 32734 - DNA, 22 bp, Artificial Sequence
  chemically synthesized
tggctacaatggctgcagaatc

SEQ ID NO: 32735 - DNA, 22 bp, Artificial Sequence
  chemically synthesized
gctacaatggctgcagaatcac

SEQ ID NO: 32736 - DNA, 22 bp, Artificial Sequence
  chemically synthesized
caatggctgcagaatcacattg

SEQ ID NO: 32737 - DNA, 22 bp, Artificial Sequence
  chemically synthesized
cagaatcacattgcctttctcc

SEQ ID NO: 32738 - DNA, 22 bp, Artificial Sequence
  chemically synthesized
cctttctccttagtattatctg

SEQ ID NO: 32739 - DNA, 22 bp, Artificial Sequence
  chemically synthesized
tctccttagtattatctgggga

SEQ ID NO: 32740 - DNA, 22 bp, Artificial Sequence
  chemically synthesized
ctccttagtattatctggggat

SEQ ID NO: 32741 - DNA, 22 bp, Artificial Sequence
  chemically synthesized
tccttagtattatctggggatc

SEQ ID NO: 32742 - DNA, 22 bp, Artificial Sequence
  chemically synthesized
cttagtattatctggggatcgt

SEQ ID NO: 32743 - DNA, 22 bp, Artificial Sequence
  chemically synthesized
agtattatctggggatcgtata

SEQ ID NO: 32744 - DNA, 22 bp, Artificial Sequence
  chemically synthesized
gtattatctggggatcgtatac

SEQ ID NO: 32745 - DNA, 22 bp, Artificial Sequence
  chemically synthesized
tctggggatcgtatacttaact

SEQ ID NO: 32746 - DNA, 22 bp, Artificial Sequence
  chemically synthesized
gggatcgtatacttaacttccc

SEQ ID NO: 32747 - DNA, 22 bp, Artificial Sequence
  chemically synthesized
aacttcccttcaggtttatcgc

SEQ ID NO: 32748 - DNA, 22 bp, Artificial Sequence
  chemically synthesized
acttcccttcaggtttatcgct

SEQ ID NO: 32749 - DNA, 22 bp, Artificial Sequence
  chemically synthesized
cccttcaggtttatcgctagtc

SEQ ID NO: 32750 - DNA, 22 bp, Artificial Sequence
  chemically synthesized
ccttcaggtttatcgctagtca

SEQ ID NO: 32751 - DNA, 22 bp, Artificial Sequence
  chemically synthesized
caggtttatcgctagtcattat

SEQ ID NO: 32752 - DNA, 22 bp, Artificial Sequence
  chemically synthesized
aggtttatcgctagtcattatt

SEQ ID NO: 32753 - DNA, 22 bp, Artificial Sequence
  chemically synthesized
atcgctagtcattatttcccag

SEQ ID NO: 32754 - DNA, 22 bp, Artificial Sequence
  chemically synthesized
tcgctagtcattatttcccagg

SEQ ID NO: 32755 - DNA, 22 bp, Artificial Sequence
  chemically synthesized
gtcattatttcccaggctccaa

SEQ ID NO: 32756 - DNA, 22 bp, Artificial Sequence
  chemically synthesized
tttcccaggctccaaaagcctg

SEQ ID NO: 32757 - DNA, 22 bp, Artificial Sequence
  chemically synthesized
cccaggctccaaaagcctggtt

SEQ ID NO: 32758 - DNA, 22 bp, Artificial Sequence
  chemically synthesized
ccaggctccaaaagcctggttc

SEQ ID NO: 32759 - DNA, 22 bp, Artificial Sequence
  chemically synthesized
caaaagcctggttcatccttat

SEQ ID NO: 32760 - DNA, 22 bp, Artificial Sequence
  chemically synthesized
gttcatccttattcttatctat

SEQ ID NO: 32761 - DNA, 22 bp, Artificial Sequence
  chemically synthesized
atccttattcttatctatcctt

SEQ ID NO: 32762 - DNA, 22 bp, Artificial Sequence
  chemically synthesized
attcttatctatcctttcccca

SEQ ID NO: 32763 - DNA, 22 bp, Artificial Sequence
  chemically synthesized
ttcttatctatcctttccccag

SEQ ID NO: 32764 - DNA, 22 bp, Artificial Sequence
  chemically synthesized
ttatctatcctttccccagcat

SEQ ID NO: 32765 - DNA, 22 bp, Artificial Sequence
  chemically synthesized
atctatcctttccccagcatct

SEQ ID NO: 32766 - DNA, 22 bp, Artificial Sequence
  chemically synthesized
tctatcctttccccagcatctg

SEQ ID NO: 32767 - DNA, 22 bp, Artificial Sequence
  chemically synthesized
tcctttccccagcatctgaagt

SEQ ID NO: 32768 - DNA, 22 bp, Artificial Sequence
  chemically synthesized
tccccagcatctgaagtcttca

SEQ ID NO: 32769 - DNA, 22 bp, Artificial Sequence
  chemically synthesized
ccccagcatctgaagtcttcaa

SEQ ID NO: 32770 - DNA, 22 bp, Artificial Sequence
  chemically synthesized
cccagcatctgaagtcttcaag

SEQ ID NO: 32771 - DNA, 22 bp, Artificial Sequence
  chemically synthesized
aagtcttcaagggggcagaagc

SEQ ID NO: 32772 - DNA, 22 bp, Artificial Sequence
  chemically synthesized
caagggggcagaagccctctta

SEQ ID NO: 32773 - DNA, 22 bp, Artificial Sequence
  chemically synthesized
aagggggcagaagccctcttac

SEQ ID NO: 32774 - DNA, 22 bp, Artificial Sequence
  chemically synthesized
ttacaaccttcatcatctcacc

SEQ ID NO: 32775 - DNA, 22 bp, Artificial Sequence
  chemically synthesized
acaaccttcatcatctcaccac

SEQ ID NO: 32776 - DNA, 22 bp, Artificial Sequence
  chemically synthesized
caaccttcatcatctcaccact

SEQ ID NO: 32777 - DNA, 22 bp, Artificial Sequence
  chemically synthesized
catcatctcaccacttatatag

SEQ ID NO: 32778 - DNA, 22 bp, Artificial Sequence
  chemically synthesized
atcatctcaccacttatataga

SEQ ID NO: 32779 - DNA, 22 bp, Artificial Sequence
  chemically synthesized
accacttatatagaagaaaggg

SEQ ID NO: 32780 - DNA, 22 bp, Artificial Sequence
  chemically synthesized
atatagaagaaagggtttggat

SEQ ID NO: 32781 - DNA, 22 bp, Artificial Sequence
  chemically synthesized
tatagaagaaagggtttggatg

SEQ ID NO: 32782 - DNA, 22 bp, Artificial Sequence
  chemically synthesized
ggatgctttgtcctcccagatg

SEQ ID NO: 32783 - DNA, 22 bp, Artificial Sequence
  chemically synthesized
gatgctttgtcctcccagatgt

SEQ ID NO: 32784 - DNA, 22 bp, Artificial Sequence
  chemically synthesized
tgtcctcccagatgtcacacta

SEQ ID NO: 32785 - DNA, 22 bp, Artificial Sequence
  chemically synthesized
gtcctcccagatgtcacactaa

SEQ ID NO: 32786 - DNA, 22 bp, Artificial Sequence
  chemically synthesized
tcctcccagatgtcacactaat

SEQ ID NO: 32787 - DNA, 22 bp, Artificial Sequence
  chemically synthesized
ccagatgtcacactaatgagat

SEQ ID NO: 32788 - DNA, 22 bp, Artificial Sequence
  chemically synthesized
atgagatatatctaatggcctt

SEQ ID NO: 32789 - DNA, 22 bp, Artificial Sequence
  chemically synthesized
atggccttgctttatgtcctgc

SEQ ID NO: 32790 - DNA, 22 bp, Artificial Sequence
  chemically synthesized
gctttatgtcctgctttgtgag

SEQ ID NO: 32791 - DNA, 22 bp, Artificial Sequence
  chemically synthesized
ctttatgtcctgctttgtgagt

SEQ ID NO: 32792 - DNA, 22 bp, Artificial Sequence
  chemically synthesized
tatgtcctgctttgtgagtttt

SEQ ID NO: 32793 - DNA, 22 bp, Artificial Sequence
  chemically synthesized
atgtcctgctttgtgagttttc

SEQ ID NO: 32794 - DNA, 22 bp, Artificial Sequence
  chemically synthesized
tgtcctgctttgtgagttttcc

SEQ ID NO: 32795 - DNA, 22 bp, Artificial Sequence
  chemically synthesized
ctttgtgagttttccaacaaat

SEQ ID NO: 32796 - DNA, 22 bp, Artificial Sequence
  chemically synthesized
tgtgagttttccaacaaatttt

SEQ ID NO: 32797 - DNA, 22 bp, Artificial Sequence
  chemically synthesized
gtgagttttccaacaaattttc

SEQ ID NO: 32798 - DNA, 22 bp, Artificial Sequence
  chemically synthesized
tgagttttccaacaaattttct

SEQ ID NO: 32799 - DNA, 22 bp, Artificial Sequence
  chemically synthesized
tccaacaaattttctttatccc

SEQ ID NO: 32800 - DNA, 22 bp, Artificial Sequence
  chemically synthesized
ccaacaaattttctttatccct

SEQ ID NO: 32801 - DNA, 22 bp, Artificial Sequence
  chemically synthesized
caacaaattttctttatccctt

SEQ ID NO: 32802 - DNA, 22 bp, Artificial Sequence
  chemically synthesized
tctttatcccttgactttactc

SEQ ID NO: 32803 - DNA, 22 bp, Artificial Sequence
  chemically synthesized
ctttatcccttgactttactca

SEQ ID NO: 32804 - DNA, 22 bp, Artificial Sequence
  chemically synthesized
tttatcccttgactttactcac

SEQ ID NO: 32805 - DNA, 22 bp, Artificial Sequence
  chemically synthesized
tatcccttgactttactcactt

SEQ ID NO: 32806 - DNA, 22 bp, Artificial Sequence
  chemically synthesized
atcccttgactttactcacttt

SEQ ID NO: 32807 - DNA, 22 bp, Artificial Sequence
  chemically synthesized
tcccttgactttactcactttg

SEQ ID NO: 32808 - DNA, 22 bp, Artificial Sequence
  chemically synthesized
gactttactcactttgctagtt

SEQ ID NO: 32809 - DNA, 22 bp, Artificial Sequence
  chemically synthesized
actttactcactttgctagttt

SEQ ID NO: 32810 - DNA, 22 bp, Artificial Sequence
  chemically synthesized
tactcactttgctagtttaacc

SEQ ID NO: 32811 - DNA, 22 bp, Artificial Sequence
  chemically synthesized
actcactttgctagtttaacct

SEQ ID NO: 32812 - DNA, 22 bp, Artificial Sequence
  chemically synthesized
ctcactttgctagtttaacctc

SEQ ID NO: 32813 - DNA, 22 bp, Artificial Sequence
  chemically synthesized
actttgctagtttaacctctgt

SEQ ID NO: 32814 - DNA, 22 bp, Artificial Sequence
  chemically synthesized
tgctagtttaacctctgtattt

SEQ ID NO: 32815 - DNA, 22 bp, Artificial Sequence
  chemically synthesized
gctagtttaacctctgtatttt

SEQ ID NO: 32816 - DNA, 22 bp, Artificial Sequence
  chemically synthesized
ctagtttaacctctgtattttt

SEQ ID NO: 32817 - DNA, 22 bp, Artificial Sequence
  chemically synthesized
gtttaacctctgtatttttttt

SEQ ID NO: 32818 - DNA, 22 bp, Artificial Sequence
  chemically synthesized
aacctctgtatttttttttatc

SEQ ID NO: 32819 - DNA, 22 bp, Artificial Sequence
  chemically synthesized
acctctgtatttttttttatcg

SEQ ID NO: 32820 - DNA, 22 bp, Artificial Sequence
  chemically synthesized
tgtatttttttttatcgttatt

SEQ ID NO: 32821 - DNA, 22 bp, Artificial Sequence
  chemically synthesized
tatttttttttatcgttatttc

SEQ ID NO: 32822 - DNA, 22 bp, Artificial Sequence
  chemically synthesized
ttttttatcgttatttcagcat

SEQ ID NO: 32823 - DNA, 22 bp, Artificial Sequence
  chemically synthesized
tttttatcgttatttcagcatt

SEQ ID NO: 32824 - DNA, 22 bp, Artificial Sequence
  chemically synthesized
ttttatcgttatttcagcattt

SEQ ID NO: 32825 - DNA, 22 bp, Artificial Sequence
  chemically synthesized
tttatcgttatttcagcatttc

SEQ ID NO: 32826 - DNA, 22 bp, Artificial Sequence
  chemically synthesized
ttatcgttatttcagcatttca

SEQ ID NO: 32827 - DNA, 22 bp, Artificial Sequence
  chemically synthesized
tatcgttatttcagcatttcag

SEQ ID NO: 32828 - DNA, 22 bp, Artificial Sequence
  chemically synthesized
atcgttatttcagcatttcagt

SEQ ID NO: 32829 - DNA, 22 bp, Artificial Sequence
  chemically synthesized
tcgttatttcagcatttcagtc

SEQ ID NO: 32830 - DNA, 22 bp, Artificial Sequence
  chemically synthesized
tttcagcatttcagtctgattt

SEQ ID NO: 32831 - DNA, 22 bp, Artificial Sequence
  chemically synthesized
cagcatttcagtctgatttcac

SEQ ID NO: 32832 - DNA, 22 bp, Artificial Sequence
  chemically synthesized
agcatttcagtctgatttcaca

SEQ ID NO: 32833 - DNA, 22 bp, Artificial Sequence
  chemically synthesized
cagtctgatttcacagctgaca

SEQ ID NO: 32834 - DNA, 22 bp, Artificial Sequence
  chemically synthesized
agtctgatttcacagctgacat

SEQ ID NO: 32835 - DNA, 22 bp, Artificial Sequence
  chemically synthesized
atttcacagctgacatcatgtc

SEQ ID NO: 32836 - DNA, 22 bp, Artificial Sequence
  chemically synthesized
cacagctgacatcatgtctgga

SEQ ID NO: 32837 - DNA, 22 bp, Artificial Sequence
  chemically synthesized
acagctgacatcatgtctggag

SEQ ID NO: 32838 - DNA, 22 bp, Artificial Sequence
  chemically synthesized
acatcatgtctggagtgggaac

SEQ ID NO: 32839 - DNA, 22 bp, Artificial Sequence
  chemically synthesized
gagtgggaaccacagggccagt

SEQ ID NO: 32840 - DNA, 22 bp, Artificial Sequence
  chemically synthesized
tctgggggtgcttagggttggc

SEQ ID NO: 32841 - DNA, 22 bp, Artificial Sequence
  chemically synthesized
ctgggggtgcttagggttggca

SEQ ID NO: 32842 - DNA, 22 bp, Artificial Sequence
  chemically synthesized
tgggggtgcttagggttggcac

SEQ ID NO: 32843 - DNA, 22 bp, Artificial Sequence
  chemically synthesized
ggggtgcttagggttggcaccc

SEQ ID NO: 32844 - DNA, 22 bp, Artificial Sequence
  chemically synthesized
agggttggcacccctgatcctg

SEQ ID NO: 32845 - DNA, 22 bp, Artificial Sequence
  chemically synthesized
gggttggcacccctgatcctgg

SEQ ID NO: 32846 - DNA, 22 bp, Artificial Sequence
  chemically synthesized
gcacccctgatcctggtactgt

SEQ ID NO: 32847 - DNA, 22 bp, Artificial Sequence
  chemically synthesized
atcctggtactgtcagctacta

SEQ ID NO: 32848 - DNA, 22 bp, Artificial Sequence
  chemically synthesized
gtactgtcagctactagatttg

SEQ ID NO: 32849 - DNA, 22 bp, Artificial Sequence
  chemically synthesized
tcagctactagatttgattcta

SEQ ID NO: 32850 - DNA, 22 bp, Artificial Sequence
  chemically synthesized
ctagatttgattctagaaagtt

SEQ ID NO: 32851 - DNA, 22 bp, Artificial Sequence
  chemically synthesized
gatttgattctagaaagttgac

SEQ ID NO: 32852 - DNA, 22 bp, Artificial Sequence
  chemically synthesized
gattctagaaagttgacaagta

SEQ ID NO: 32853 - DNA, 22 bp, Artificial Sequence
  chemically synthesized
attctagaaagttgacaagtaa

SEQ ID NO: 32854 - DNA, 22 bp, Artificial Sequence
  chemically synthesized
tagaaagttgacaagtaagtgt

SEQ ID NO: 32855 - DNA, 22 bp, Artificial Sequence
  chemically synthesized
gaaagttgacaagtaagtgtga

SEQ ID NO: 32856 - DNA, 22 bp, Artificial Sequence
  chemically synthesized
acaagtaagtgtgataaatgct

SEQ ID NO: 32857 - DNA, 22 bp, Artificial Sequence
  chemically synthesized
cctgtgagaacatgctgtttgt

SEQ ID NO: 32858 - DNA, 22 bp, Artificial Sequence
  chemically synthesized
ctgtgagaacatgctgtttgtc

SEQ ID NO: 32859 - DNA, 22 bp, Artificial Sequence
  chemically synthesized
tgagaacatgctgtttgtccaa

SEQ ID NO: 32860 - DNA, 22 bp, Artificial Sequence
  chemically synthesized
tttgtccaaatgggataatttc

SEQ ID NO: 32861 - DNA, 22 bp, Artificial Sequence
  chemically synthesized
gtccaaatgggataatttcttc

SEQ ID NO: 32862 - DNA, 22 bp, Artificial Sequence
  chemically synthesized
tccaaatgggataatttcttcc

SEQ ID NO: 32863 - DNA, 22 bp, Artificial Sequence
  chemically synthesized
cttccctgtatgccttcctctg

SEQ ID NO: 32864 - DNA, 22 bp, Artificial Sequence
  chemically synthesized
ttccctgtatgccttcctctgg

SEQ ID NO: 32865 - DNA, 22 bp, Artificial Sequence
  chemically synthesized
ccctgtatgccttcctctggga

SEQ ID NO: 32866 - DNA, 22 bp, Artificial Sequence
  chemically synthesized
cctgtatgccttcctctgggaa

SEQ ID NO: 32867 - DNA, 22 bp, Artificial Sequence
  chemically synthesized
tatgccttcctctgggaaatac

SEQ ID NO: 32868 - DNA, 22 bp, Artificial Sequence
  chemically synthesized
cctctgggaaatacataaagtc

SEQ ID NO: 32869 - DNA, 22 bp, Artificial Sequence
  chemically synthesized
ctctgggaaatacataaagtca

SEQ ID NO: 32870 - DNA, 22 bp, Artificial Sequence
  chemically synthesized
tgggaaatacataaagtcactg

SEQ ID NO: 32871 - DNA, 22 bp, Artificial Sequence
  chemically synthesized
ggaaatacataaagtcactgta

SEQ ID NO: 32872 - DNA, 22 bp, Artificial Sequence
  chemically synthesized
tagttgtgaaaaaacaaagtga

SEQ ID NO: 32873 - DNA, 22 bp, Artificial Sequence
  chemically synthesized
tgaaaaaacaaagtgatatatg

SEQ ID NO: 32874 - DNA, 22 bp, Artificial Sequence
  chemically synthesized
cattagctaacttcctactctt

SEQ ID NO: 32875 - DNA, 22 bp, Artificial Sequence
  chemically synthesized
gctaacttcctactctttatgt

SEQ ID NO: 32876 - DNA, 22 bp, Artificial Sequence
  chemically synthesized
acttcctactctttatgtcaat

SEQ ID NO: 32877 - DNA, 22 bp, Artificial Sequence
  chemically synthesized
cctactctttatgtcaattctt

SEQ ID NO: 32878 - DNA, 22 bp, Artificial Sequence
  chemically synthesized
ctactctttatgtcaattctta

SEQ ID NO: 32879 - DNA, 22 bp, Artificial Sequence
  chemically synthesized
ctctttatgtcaattcttaagc

SEQ ID NO: 32880 - DNA, 22 bp, Artificial Sequence
  chemically synthesized
tttatgtcaattcttaagcttg

SEQ ID NO: 32881 - DNA, 22 bp, Artificial Sequence
  chemically synthesized
tatgtcaattcttaagcttgct

SEQ ID NO: 32882 - DNA, 22 bp, Artificial Sequence
  chemically synthesized
atgtcaattcttaagcttgctt

SEQ ID NO: 32883 - DNA, 22 bp, Artificial Sequence
  chemically synthesized
tgtcaattcttaagcttgcttt

SEQ ID NO: 32884 - DNA, 22 bp, Artificial Sequence
  chemically synthesized
ttaagcttgcttttctccccta

SEQ ID NO: 32885 - DNA, 22 bp, Artificial Sequence
  chemically synthesized
aagcttgcttttctcccctagg

SEQ ID NO: 32886 - DNA, 22 bp, Artificial Sequence
  chemically synthesized
agcttgcttttctcccctaggg

SEQ ID NO: 32887 - DNA, 22 bp, Artificial Sequence
  chemically synthesized
gcttttctcccctagggaactc

SEQ ID NO: 32888 - DNA, 22 bp, Artificial Sequence
  chemically synthesized
cttttctcccctagggaactca

SEQ ID NO: 32889 - DNA, 22 bp, Artificial Sequence
  chemically synthesized
ttctcccctagggaactcaact

SEQ ID NO: 32890 - DNA, 22 bp, Artificial Sequence
  chemically synthesized
tctcccctagggaactcaactg

SEQ ID NO: 32891 - DNA, 22 bp, Artificial Sequence
  chemically synthesized
ctcccctagggaactcaactga

SEQ ID NO: 32892 - DNA, 22 bp, Artificial Sequence
  chemically synthesized
tcccctagggaactcaactgag

SEQ ID NO: 32893 - DNA, 22 bp, Artificial Sequence
  chemically synthesized
ccctagggaactcaactgagta

SEQ ID NO: 32894 - DNA, 22 bp, Artificial Sequence
  chemically synthesized
gggaactcaactgagtattgtg

SEQ ID NO: 32895 - DNA, 22 bp, Artificial Sequence
  chemically synthesized
aactgagtattgtgtttcccca

SEQ ID NO: 32896 - DNA, 22 bp, Artificial Sequence
  chemically synthesized
agtattgtgtttccccaaatat

SEQ ID NO: 32897 - DNA, 22 bp, Artificial Sequence
  chemically synthesized
tgtttccccaaatatcaactcc

SEQ ID NO: 32898 - DNA, 22 bp, Artificial Sequence
  chemically synthesized
ccccaaatatcaactccaagat

SEQ ID NO: 32899 - DNA, 22 bp, Artificial Sequence
  chemically synthesized
cccaaatatcaactccaagatg

SEQ ID NO: 32900 - DNA, 22 bp, Artificial Sequence
  chemically synthesized
caagatgtttgacatagagaca

SEQ ID NO: 32901 - DNA, 22 bp, Artificial Sequence
  chemically synthesized
gacatagagacaaaatgatttt

SEQ ID NO: 32902 - DNA, 22 bp, Artificial Sequence
  chemically synthesized
acatagagacaaaatgattttt

SEQ ID NO: 32903 - DNA, 22 bp, Artificial Sequence
  chemically synthesized
tttcctaatccatgaaaagctt

SEQ ID NO: 32904 - DNA, 22 bp, Artificial Sequence
  chemically synthesized
ttcctaatccatgaaaagcttt

SEQ ID NO: 32905 - DNA, 22 bp, Artificial Sequence
  chemically synthesized
tcctaatccatgaaaagctttg

SEQ ID NO: 32906 - DNA, 22 bp, Artificial Sequence
  chemically synthesized
cctaatccatgaaaagctttgg

SEQ ID NO: 32907 - DNA, 22 bp, Artificial Sequence
  chemically synthesized
ctaatccatgaaaagctttggt

SEQ ID NO: 32908 - DNA, 22 bp, Artificial Sequence
  chemically synthesized
atccatgaaaagctttggtgat

SEQ ID NO: 32909 - DNA, 22 bp, Artificial Sequence
  chemically synthesized
tggtgataactaacagcttgct

SEQ ID NO: 32910 - DNA, 22 bp, Artificial Sequence
  chemically synthesized
ggtgataactaacagcttgcta

SEQ ID NO: 32911 - DNA, 22 bp, Artificial Sequence
  chemically synthesized
gtgataactaacagcttgctaa

SEQ ID NO: 32912 - DNA, 22 bp, Artificial Sequence
  chemically synthesized
acagcttgctaatgaaaggtta

SEQ ID NO: 32913 - DNA, 22 bp, Artificial Sequence
  chemically synthesized
gctaatgaaaggttaatcttta

SEQ ID NO: 32914 - DNA, 22 bp, Artificial Sequence
  chemically synthesized
ctaatgaaaggttaatctttat

SEQ ID NO: 32915 - DNA, 22 bp, Artificial Sequence
  chemically synthesized
atgaaaggttaatctttatgtt

SEQ ID NO: 32916 - DNA, 22 bp, Artificial Sequence
  chemically synthesized
atctttatgttttaactaaaac

SEQ ID NO: 32917 - DNA, 22 bp, Artificial Sequence
  chemically synthesized
tatgttttaactaaaactttaa

SEQ ID NO: 32918 - DNA, 22 bp, Artificial Sequence
  chemically synthesized
atgttttaactaaaactttaaa

SEQ ID NO: 32919 - DNA, 22 bp, Artificial Sequence
  chemically synthesized
tgttttaactaaaactttaaat

SEQ ID NO: 32920 - DNA, 22 bp, Artificial Sequence
  chemically synthesized
taactaaaactttaaattgaag

SEQ ID NO: 32921 - DNA, 22 bp, Artificial Sequence
  chemically synthesized
aactaaaactttaaattgaaga

SEQ ID NO: 32922 - DNA, 22 bp, Artificial Sequence
  chemically synthesized
actaaaactttaaattgaagat

SEQ ID NO: 32923 - DNA, 22 bp, Artificial Sequence
  chemically synthesized
aaactttaaattgaagatatat

SEQ ID NO: 32924 - DNA, 22 bp, Artificial Sequence
  chemically synthesized
taaattgaagatatataattta

SEQ ID NO: 32925 - DNA, 22 bp, Artificial Sequence
  chemically synthesized
aaattgaagatatataatttaa

SEQ ID NO: 32926 - DNA, 22 bp, Artificial Sequence
  chemically synthesized
aattgaagatatataatttaaa

SEQ ID NO: 32927 - DNA, 22 bp, Artificial Sequence
  chemically synthesized
aagatatataatttaaaaaatt

SEQ ID NO: 32928 - DNA, 22 bp, Artificial Sequence
  chemically synthesized
aaaaaattagagacacacctca

SEQ ID NO: 32929 - DNA, 22 bp, Artificial Sequence
  chemically synthesized
aaaaattagagacacacctcat

SEQ ID NO: 32930 - DNA, 22 bp, Artificial Sequence
  chemically synthesized
gagacacacctcattacatact

SEQ ID NO: 32931 - DNA, 22 bp, Artificial Sequence
  chemically synthesized
attacatacttctgaaaccttg

SEQ ID NO: 32932 - DNA, 22 bp, Artificial Sequence
  chemically synthesized
catacttctgaaaccttgaaat

SEQ ID NO: 32933 - DNA, 22 bp, Artificial Sequence
  chemically synthesized
ctgaaaccttgaaatgtcatat

SEQ ID NO: 32934 - DNA, 22 bp, Artificial Sequence
  chemically synthesized
tgaaaccttgaaatgtcatata

SEQ ID NO: 32935 - DNA, 22 bp, Artificial Sequence
  chemically synthesized
aaaccttgaaatgtcatatatc

SEQ ID NO: 32936 - DNA, 22 bp, Artificial Sequence
  chemically synthesized
gaaatgtcatatatcttaaaat

SEQ ID NO: 32937 - DNA, 22 bp, Artificial Sequence
  chemically synthesized
aaatgtcatatatcttaaaatc

SEQ ID NO: 32938 - DNA, 22 bp, Artificial Sequence
  chemically synthesized
aaaatcagactttttgtgtaaa

SEQ ID NO: 32939 - DNA, 22 bp, Artificial Sequence
  chemically synthesized
aaatcagactttttgtgtaaat

SEQ ID NO: 32940 - DNA, 22 bp, Artificial Sequence
  chemically synthesized
tttgtgtaaataaggccattgt

SEQ ID NO: 32941 - DNA, 22 bp, Artificial Sequence
  chemically synthesized
ttgtgtaaataaggccattgtt

SEQ ID NO: 32942 - DNA, 22 bp, Artificial Sequence
  chemically synthesized
tgtgtaaataaggccattgttt

SEQ ID NO: 32943 - DNA, 22 bp, Artificial Sequence
  chemically synthesized
gtgtaaataaggccattgtttg

SEQ ID NO: 32944 - DNA, 22 bp, Artificial Sequence
  chemically synthesized
tgtaaataaggccattgtttgt

SEQ ID NO: 32945 - DNA, 22 bp, Artificial Sequence
  chemically synthesized
tttgtgcttttgtttcccattt

SEQ ID NO: 32946 - DNA, 22 bp, Artificial Sequence
  chemically synthesized
gtgcttttgtttcccattttga

SEQ ID NO: 32947 - DNA, 22 bp, Artificial Sequence
  chemically synthesized
tgcttttgtttcccattttgat

SEQ ID NO: 32948 - DNA, 22 bp, Artificial Sequence
  chemically synthesized
ttgtttcccattttgatttcaa

SEQ ID NO: 32949 - DNA, 22 bp, Artificial Sequence
  chemically synthesized
tgtttcccattttgatttcaaa

SEQ ID NO: 32950 - DNA, 22 bp, Artificial Sequence
  chemically synthesized
gtttcccattttgatttcaaag

SEQ ID NO: 32951 - DNA, 22 bp, Artificial Sequence
  chemically synthesized
tttcccattttgatttcaaagt

SEQ ID NO: 32952 - DNA, 22 bp, Artificial Sequence
  chemically synthesized
cccattttgatttcaaagtggt

SEQ ID NO: 32953 - DNA, 22 bp, Artificial Sequence
  chemically synthesized
ccattttgatttcaaagtggta

SEQ ID NO: 32954 - DNA, 22 bp, Artificial Sequence
  chemically synthesized
tgatttcaaagtggtaagtcca

SEQ ID NO: 32955 - DNA, 22 bp, Artificial Sequence
  chemically synthesized
gatttcaaagtggtaagtccaa

SEQ ID NO: 32956 - DNA, 22 bp, Artificial Sequence
  chemically synthesized
atttcaaagtggtaagtccaaa

SEQ ID NO: 32957 - DNA, 22 bp, Artificial Sequence
  chemically synthesized
caaagtggtaagtccaaacaaa

SEQ ID NO: 32958 - DNA, 22 bp, Artificial Sequence
  chemically synthesized
aaagtggtaagtccaaacaaaa

SEQ ID NO: 32959 - DNA, 22 bp, Artificial Sequence
  chemically synthesized
ttttttttcactatattctgct

SEQ ID NO: 32960 - DNA, 22 bp, Artificial Sequence
  chemically synthesized
tttttcactatattctgctatt

SEQ ID NO: 32961 - DNA, 22 bp, Artificial Sequence
  chemically synthesized
ttttcactatattctgctattt

SEQ ID NO: 32962 - DNA, 22 bp, Artificial Sequence
  chemically synthesized
tttcactatattctgctatttc

SEQ ID NO: 32963 - DNA, 22 bp, Artificial Sequence
  chemically synthesized
ttcactatattctgctatttct

SEQ ID NO: 32964 - DNA, 22 bp, Artificial Sequence
  chemically synthesized
tcactatattctgctatttctt

SEQ ID NO: 32965 - DNA, 22 bp, Artificial Sequence
  chemically synthesized
cactatattctgctatttcttt

SEQ ID NO: 32966 - DNA, 22 bp, Artificial Sequence
  chemically synthesized
actatattctgctatttctttg

SEQ ID NO: 32967 - DNA, 22 bp, Artificial Sequence
  chemically synthesized
tattctgctatttctttgtttt

SEQ ID NO: 32968 - DNA, 22 bp, Artificial Sequence
  chemically synthesized
tgctatttctttgttttcccac

SEQ ID NO: 32969 - DNA, 22 bp, Artificial Sequence
  chemically synthesized
ctatttctttgttttcccactt

SEQ ID NO: 32970 - DNA, 22 bp, Artificial Sequence
  chemically synthesized
tttctttgttttcccactttta

SEQ ID NO: 32971 - DNA, 22 bp, Artificial Sequence
  chemically synthesized
ctttgttttcccacttttaatt

SEQ ID NO: 32972 - DNA, 22 bp, Artificial Sequence
  chemically synthesized
tttgttttcccacttttaattt

SEQ ID NO: 32973 - DNA, 22 bp, Artificial Sequence
  chemically synthesized
tgttttcccacttttaattttt

SEQ ID NO: 32974 - DNA, 22 bp, Artificial Sequence
  chemically synthesized
gttttcccacttttaatttttt

SEQ ID NO: 32975 - DNA, 22 bp, Artificial Sequence
  chemically synthesized
ttttcccacttttaattttttt

SEQ ID NO: 32976 - DNA, 22 bp, Artificial Sequence
  chemically synthesized
tcccacttttaatttttttaaa

SEQ ID NO: 32977 - DNA, 22 bp, Artificial Sequence
  chemically synthesized
cccacttttaatttttttaaac

SEQ ID NO: 32978 - DNA, 22 bp, Artificial Sequence
  chemically synthesized
ccacttttaatttttttaaacc

SEQ ID NO: 32979 - DNA, 22 bp, Artificial Sequence
  chemically synthesized
ttaatttttttaaaccaaggag

SEQ ID NO: 32980 - DNA, 22 bp, Artificial Sequence
  chemically synthesized
taatttttttaaaccaaggaga

SEQ ID NO: 32981 - DNA, 22 bp, Artificial Sequence
  chemically synthesized
aatttttttaaaccaaggagat

SEQ ID NO: 32982 - DNA, 22 bp, Artificial Sequence
  chemically synthesized
atttttttaaaccaaggagatg

SEQ ID NO: 32983 - DNA, 22 bp, Artificial Sequence
  chemically synthesized
ttttaaaccaaggagatgaatg

SEQ ID NO: 32984 - DNA, 22 bp, Artificial Sequence
  chemically synthesized
tttaaaccaaggagatgaatgt

SEQ ID NO: 32985 - DNA, 22 bp, Artificial Sequence
  chemically synthesized
ttaaaccaaggagatgaatgtt

SEQ ID NO: 32986 - DNA, 22 bp, Artificial Sequence
  chemically synthesized
taaaccaaggagatgaatgttt

SEQ ID NO: 32987 - DNA, 22 bp, Artificial Sequence
  chemically synthesized
aaaccaaggagatgaatgtttt

SEQ ID NO: 32988 - DNA, 22 bp, Artificial Sequence
  chemically synthesized
aaccaaggagatgaatgttttc

SEQ ID NO: 32989 - DNA, 22 bp, Artificial Sequence
  chemically synthesized
tctaacaggaattacatgacca

SEQ ID NO: 32990 - DNA, 22 bp, Artificial Sequence
  chemically synthesized
ctaacaggaattacatgaccaa

SEQ ID NO: 32991 - DNA, 22 bp, Artificial Sequence
  chemically synthesized
taacaggaattacatgaccaaa

SEQ ID NO: 32992 - DNA, 22 bp, Artificial Sequence
  chemically synthesized
acaggaattacatgaccaaatc

SEQ ID NO: 32993 - DNA, 22 bp, Artificial Sequence
  chemically synthesized
catgaccaaatcatgaactgaa

SEQ ID NO: 32994 - DNA, 22 bp, Artificial Sequence
  chemically synthesized
aacagtgtttattaaacataaa

SEQ ID NO: 32995 - DNA, 22 bp, Artificial Sequence
  chemically synthesized
attaaacataaatgcatcataa

SEQ ID NO: 32996 - DNA, 22 bp, Artificial Sequence
  chemically synthesized
ttaaacataaatgcatcataag

SEQ ID NO: 32997 - DNA, 22 bp, Artificial Sequence
  chemically synthesized
aacataaatgcatcataagcat

SEQ ID NO: 32998 - DNA, 22 bp, Artificial Sequence
  chemically synthesized
tcgatctatttagttttaaaaa

SEQ ID NO: 32999 - DNA, 22 bp, Artificial Sequence
  chemically synthesized
tttagttttaaaaatgaagaag

SEQ ID NO: 33000 - DNA, 22 bp, Artificial Sequence
  chemically synthesized
agttttaaaaatgaagaagaag

SEQ ID NO: 33001 - DNA, 22 bp, Artificial Sequence
  chemically synthesized
gttttaaaaatgaagaagaaga

SEQ ID NO: 33002 - DNA, 22 bp, Artificial Sequence
  chemically synthesized
taaaaatgaagaagaagaaaac

SEQ ID NO: 33003 - DNA, 22 bp, Artificial Sequence
  chemically synthesized
aaaaatgaagaagaagaaaacc

SEQ ID NO: 33004 - DNA, 22 bp, Artificial Sequence
  chemically synthesized
aaaatgaagaagaagaaaacct

SEQ ID NO: 33005 - DNA, 22 bp, Artificial Sequence
  chemically synthesized
gctaacaaagaaccagtactta

SEQ ID NO: 33006 - DNA, 22 bp, Artificial Sequence
  chemically synthesized
acaaagaaccagtacttaccaa

SEQ ID NO: 33007 - DNA, 22 bp, Artificial Sequence
  chemically synthesized
accaacctgcgtgctggctgtt

SEQ ID NO: 33008 - DNA, 22 bp, Artificial Sequence
  chemically synthesized
ccaacctgcgtgctggctgtta

SEQ ID NO: 33009 - DNA, 22 bp, Artificial Sequence
  chemically synthesized
cgtgctggctgttagactcttc

SEQ ID NO: 33010 - DNA, 22 bp, Artificial Sequence
  chemically synthesized
gctgttagactcttcaatattg

SEQ ID NO: 33011 - DNA, 22 bp, Artificial Sequence
  chemically synthesized
ttagactcttcaatattgctgt

SEQ ID NO: 33012 - DNA, 22 bp, Artificial Sequence
  chemically synthesized
gactcttcaatattgctgtcaa

SEQ ID NO: 33013 - DNA, 22 bp, Artificial Sequence
  chemically synthesized
ttcaatattgctgtcaaatcat

SEQ ID NO: 33014 - DNA, 22 bp, Artificial Sequence
  chemically synthesized
caatattgctgtcaaatcatgt

SEQ ID NO: 33015 - DNA, 22 bp, Artificial Sequence
  chemically synthesized
aatattgctgtcaaatcatgta

SEQ ID NO: 33016 - DNA, 22 bp, Artificial Sequence
  chemically synthesized
ctgtcaaatcatgtaatcaaaa

SEQ ID NO: 33017 - DNA, 22 bp, Artificial Sequence
  chemically synthesized
tcaaatcatgtaatcaaaattt

SEQ ID NO: 33018 - DNA, 22 bp, Artificial Sequence
  chemically synthesized
agtgaagaagacagcatcagat

SEQ ID NO: 33019 - DNA, 22 bp, Artificial Sequence
  chemically synthesized
gtgaagaagacagcatcagata

SEQ ID NO: 33020 - DNA, 22 bp, Artificial Sequence
  chemically synthesized
ctatatctaaaaggcaagcata

SEQ ID NO: 33021 - DNA, 22 bp, Artificial Sequence
  chemically synthesized
tatatctaaaaggcaagcatac

SEQ ID NO: 33022 - DNA, 22 bp, Artificial Sequence
  chemically synthesized
tatctaaaaggcaagcatactc

SEQ ID NO: 33023 - DNA, 22 bp, Artificial Sequence
  chemically synthesized
aaaggcaagcatactcaatgta

SEQ ID NO: 33024 - DNA, 22 bp, Artificial Sequence
  chemically synthesized
aatgtattttaaaaaaggaaac

SEQ ID NO: 33025 - DNA, 22 bp, Artificial Sequence
  chemically synthesized
taaaaaaggaaacaaacctgta

SEQ ID NO: 33026 - DNA, 22 bp, Artificial Sequence
  chemically synthesized
aaaaaaggaaacaaacctgtac

SEQ ID NO: 33027 - DNA, 22 bp, Artificial Sequence
  chemically synthesized
aaaaaggaaacaaacctgtaca

SEQ ID NO: 33028 - DNA, 22 bp, Artificial Sequence
  chemically synthesized
tacattcagcactgagtagata

SEQ ID NO: 33029 - DNA, 22 bp, Artificial Sequence
  chemically synthesized
agcactgagtagatatcctaaa

SEQ ID NO: 33030 - DNA, 22 bp, Artificial Sequence
  chemically synthesized
agtagatatcctaaaaggcaga

SEQ ID NO: 33031 - DNA, 22 bp, Artificial Sequence
  chemically synthesized
aaaggcagatggtgatgaggcc

SEQ ID NO: 33032 - DNA, 22 bp, Artificial Sequence
  chemically synthesized
gtgattctgccatgatcatgtt

SEQ ID NO: 33033 - DNA, 22 bp, Artificial Sequence
  chemically synthesized
tgccatgatcatgttcacgcgc

SEQ ID NO: 33034 - DNA, 22 bp, Artificial Sequence
  chemically synthesized
ccatgatcatgttcacgcgctg

SEQ ID NO: 33035 - DNA, 22 bp, Artificial Sequence
  chemically synthesized
acgcgctgcataacctttgcta

SEQ ID NO: 33036 - DNA, 22 bp, Artificial Sequence
  chemically synthesized
cataacctttgctagcagattg

SEQ ID NO: 33037 - DNA, 22 bp, Artificial Sequence
  chemically synthesized
tgctagcagattgtgaaagtgg

SEQ ID NO: 33038 - DNA, 22 bp, Artificial Sequence
  chemically synthesized
gctagcagattgtgaaagtggt

SEQ ID NO: 33039 - DNA, 20 bp, Artificial Sequence
  chemically synthesized
tttagacaaacgtggttttt

SEQ ID NO: 33040 - DNA, 20 bp, Artificial Sequence
  chemically synthesized
aaacgtggtttttgagtcca

SEQ ID NO: 33041 - DNA, 20 bp, Artificial Sequence
  chemically synthesized
tggtttttgagtccaaagat

SEQ ID NO: 33042 - DNA, 20 bp, Artificial Sequence
  chemically synthesized
ggtttttgagtccaaagatc

SEQ ID NO: 33043 - DNA, 20 bp, Artificial Sequence
  chemically synthesized
gtttttgagtccaaagatca

SEQ ID NO: 33044 - DNA, 20 bp, Artificial Sequence
  chemically synthesized
ttgagtccaaagatcagggc

SEQ ID NO: 33045 - DNA, 20 bp, Artificial Sequence
  chemically synthesized
tgagtccaaagatcagggct

SEQ ID NO: 33046 - DNA, 20 bp, Artificial Sequence
  chemically synthesized
ggctgggttgacctgaatac

SEQ ID NO: 33047 - DNA, 20 bp, Artificial Sequence
  chemically synthesized
gttgacctgaatactggata

SEQ ID NO: 33048 - DNA, 20 bp, Artificial Sequence
  chemically synthesized
ttgacctgaatactggatac

SEQ ID NO: 33049 - DNA, 20 bp, Artificial Sequence
  chemically synthesized
tgacctgaatactggataca

SEQ ID NO: 33050 - DNA, 20 bp, Artificial Sequence
  chemically synthesized
tggatacagggcatataaaa

SEQ ID NO: 33051 - DNA, 20 bp, Artificial Sequence
  chemically synthesized
ggatacagggcatataaaac

SEQ ID NO: 33052 - DNA, 20 bp, Artificial Sequence
  chemically synthesized
gatacagggcatataaaaca

SEQ ID NO: 33053 - DNA, 20 bp, Artificial Sequence
  chemically synthesized
atacagggcatataaaacag

SEQ ID NO: 33054 - DNA, 20 bp, Artificial Sequence
  chemically synthesized
agggcatataaaacaggggc

SEQ ID NO: 33055 - DNA, 20 bp, Artificial Sequence
  chemically synthesized
gggcatataaaacaggggca

SEQ ID NO: 33056 - DNA, 20 bp, Artificial Sequence
  chemically synthesized
tataaaacaggggcaaggca

SEQ ID NO: 33057 - DNA, 20 bp, Artificial Sequence
  chemically synthesized
aggggcaaggcacagactca

SEQ ID NO: 33058 - DNA, 20 bp, Artificial Sequence
  chemically synthesized
ggcaaggcacagactcatag

SEQ ID NO: 33059 - DNA, 20 bp, Artificial Sequence
  chemically synthesized
caaggcacagactcatagca

SEQ ID NO: 33060 - DNA, 20 bp, Artificial Sequence
  chemically synthesized
atagcagagcaatcaccacc

SEQ ID NO: 33061 - DNA, 20 bp, Artificial Sequence
  chemically synthesized
agagcaatcaccaccaagcc

SEQ ID NO: 33062 - DNA, 20 bp, Artificial Sequence
  chemically synthesized
accaagcctggaataactgc

SEQ ID NO: 33063 - DNA, 20 bp, Artificial Sequence
  chemically synthesized
ccaagcctggaataactgca

SEQ ID NO: 33064 - DNA, 20 bp, Artificial Sequence
  chemically synthesized
caagcctggaataactgcaa

SEQ ID NO: 33065 - DNA, 20 bp, Artificial Sequence
  chemically synthesized
ggctctgctgacatcttcct

SEQ ID NO: 33066 - DNA, 20 bp, Artificial Sequence
  chemically synthesized
gctctgctgacatcttcctg

SEQ ID NO: 33067 - DNA, 20 bp, Artificial Sequence
  chemically synthesized
tgacatcttcctgaggtgcc

SEQ ID NO: 33068 - DNA, 20 bp, Artificial Sequence
  chemically synthesized
gacatcttcctgaggtgcca

SEQ ID NO: 33069 - DNA, 20 bp, Artificial Sequence
  chemically synthesized
tcctgaggtgccaaggaaat

SEQ ID NO: 33070 - DNA, 20 bp, Artificial Sequence
  chemically synthesized
cctgaggtgccaaggaaatg

SEQ ID NO: 33071 - DNA, 20 bp, Artificial Sequence
  chemically synthesized
aggtgccaaggaaatgagga

SEQ ID NO: 33072 - DNA, 20 bp, Artificial Sequence
  chemically synthesized
gtgccaaggaaatgaggatg

SEQ ID NO: 33073 - DNA, 20 bp, Artificial Sequence
  chemically synthesized
tgccaaggaaatgaggatgg

SEQ ID NO: 33074 - DNA, 20 bp, Artificial Sequence
  chemically synthesized
caaggaaatgaggatggagg

SEQ ID NO: 33075 - DNA, 20 bp, Artificial Sequence
  chemically synthesized
aaggaaatgaggatggagga

SEQ ID NO: 33076 - DNA, 20 bp, Artificial Sequence
  chemically synthesized
atgaatgttctccatgactt

SEQ ID NO: 33077 - DNA, 20 bp, Artificial Sequence
  chemically synthesized
tgaatgttctccatgacttt

SEQ ID NO: 33078 - DNA, 20 bp, Artificial Sequence
  chemically synthesized
ttctccatgactttgggatc

SEQ ID NO: 33079 - DNA, 20 bp, Artificial Sequence
  chemically synthesized
tccagtcaacacattacctc

SEQ ID NO: 33080 - DNA, 20 bp, Artificial Sequence
  chemically synthesized
ccagtcaacacattacctcc

SEQ ID NO: 33081 - DNA, 20 bp, Artificial Sequence
  chemically synthesized
ttacctccaggtgaattacc

SEQ ID NO: 33082 - DNA, 20 bp, Artificial Sequence
  chemically synthesized
aggtgaattaccaagactcc

SEQ ID NO: 33083 - DNA, 20 bp, Artificial Sequence
  chemically synthesized
ggtgaattaccaagactccc

SEQ ID NO: 33084 - DNA, 20 bp, Artificial Sequence
  chemically synthesized
attaccaagactcccaggac

SEQ ID NO: 33085 - DNA, 20 bp, Artificial Sequence
  chemically synthesized
ctcccaggactggttcatct

SEQ ID NO: 33086 - DNA, 20 bp, Artificial Sequence
  chemically synthesized
catcttggtgtccgtgatcg

SEQ ID NO: 33087 - DNA, 20 bp, Artificial Sequence
  chemically synthesized
gtgtccgtgatcgcagacct

SEQ ID NO: 33088 - DNA, 20 bp, Artificial Sequence
  chemically synthesized
tgtccgtgatcgcagacctc

SEQ ID NO: 33089 - DNA, 20 bp, Artificial Sequence
  chemically synthesized
tctacgtcctcttccccatc

SEQ ID NO: 33090 - DNA, 20 bp, Artificial Sequence
  chemically synthesized
tccccatctggttccatctt

SEQ ID NO: 33091 - DNA, 20 bp, Artificial Sequence
  chemically synthesized
ccccatctggttccatcttc

SEQ ID NO: 33092 - DNA, 20 bp, Artificial Sequence
  chemically synthesized
catctggttccatcttcagg

SEQ ID NO: 33093 - DNA, 20 bp, Artificial Sequence
  chemically synthesized
gttccatcttcaggaagctg

SEQ ID NO: 33094 - DNA, 20 bp, Artificial Sequence
  chemically synthesized
ttccatcttcaggaagctgt

SEQ ID NO: 33095 - DNA, 20 bp, Artificial Sequence
  chemically synthesized
ctgtgggcattaaactcctt

SEQ ID NO: 33096 - DNA, 20 bp, Artificial Sequence
  chemically synthesized
tgtgggcattaaactccttt

SEQ ID NO: 33097 - DNA, 20 bp, Artificial Sequence
  chemically synthesized
gggcattaaactcctttggg

SEQ ID NO: 33098 - DNA, 20 bp, Artificial Sequence
  chemically synthesized
ctcctttgggtagctgtgat

SEQ ID NO: 33099 - DNA, 20 bp, Artificial Sequence
  chemically synthesized
cctttgggtagctgtgattg

SEQ ID NO: 33100 - DNA, 20 bp, Artificial Sequence
  chemically synthesized
gggtagctgtgattggagac

SEQ ID NO: 33101 - DNA, 20 bp, Artificial Sequence
  chemically synthesized
actggctcaacctcgtcttt

SEQ ID NO: 33102 - DNA, 20 bp, Artificial Sequence
  chemically synthesized
ggctcaacctcgtctttaag

SEQ ID NO: 33103 - DNA, 20 bp, Artificial Sequence
  chemically synthesized
caacctcgtctttaagtggt

SEQ ID NO: 33104 - DNA, 20 bp, Artificial Sequence
  chemically synthesized
tttaagtggtaagaaccata

SEQ ID NO: 33105 - DNA, 20 bp, Artificial Sequence
  chemically synthesized
taagtggtaagaaccatata

SEQ ID NO: 33106 - DNA, 20 bp, Artificial Sequence
  chemically synthesized
agtggtaagaaccatataga

SEQ ID NO: 33107 - DNA, 20 bp, Artificial Sequence
  chemically synthesized
gtggtaagaaccatatagag

SEQ ID NO: 33108 - DNA, 20 bp, Artificial Sequence
  chemically synthesized
ggtaagaaccatatagagag

SEQ ID NO: 33109 - DNA, 20 bp, Artificial Sequence
  chemically synthesized
gaaccatatagagaggagat

SEQ ID NO: 33110 - DNA, 20 bp, Artificial Sequence
  chemically synthesized
catatagagaggagatcagc

SEQ ID NO: 33111 - DNA, 20 bp, Artificial Sequence
  chemically synthesized
agagaggagatcagcaagaa

SEQ ID NO: 33112 - DNA, 20 bp, Artificial Sequence
  chemically synthesized
agaggagatcagcaagaaaa

SEQ ID NO: 33113 - DNA, 20 bp, Artificial Sequence
  chemically synthesized
gaggagatcagcaagaaaag

SEQ ID NO: 33114 - DNA, 20 bp, Artificial Sequence
  chemically synthesized
agatcagcaagaaaagaggc

SEQ ID NO: 33115 - DNA, 20 bp, Artificial Sequence
  chemically synthesized
ctctcgcaatgtctgtccat

SEQ ID NO: 33116 - DNA, 20 bp, Artificial Sequence
  chemically synthesized
tcgcaatgtctgtccatcag

SEQ ID NO: 33117 - DNA, 20 bp, Artificial Sequence
  chemically synthesized
ccatcagaagttgctttccc

SEQ ID NO: 33118 - DNA, 20 bp, Artificial Sequence
  chemically synthesized
catcagaagttgctttcccc

SEQ ID NO: 33119 - DNA, 20 bp, Artificial Sequence
  chemically synthesized
gttgctttccccaggctatt

SEQ ID NO: 33120 - DNA, 20 bp, Artificial Sequence
  chemically synthesized
ttgctttccccaggctattc

SEQ ID NO: 33121 - DNA, 20 bp, Artificial Sequence
  chemically synthesized
ctttccccaggctattcagg

SEQ ID NO: 33122 - DNA, 20 bp, Artificial Sequence
  chemically synthesized
ccaggctattcaggaagcca

SEQ ID NO: 33123 - DNA, 20 bp, Artificial Sequence
  chemically synthesized
caggctattcaggaagccac

SEQ ID NO: 33124 - DNA, 20 bp, Artificial Sequence
  chemically synthesized
ccaacccctctctctgactt

SEQ ID NO: 33125 - DNA, 20 bp, Artificial Sequence
  chemically synthesized
gactttggatcatctacata

SEQ ID NO: 33126 - DNA, 20 bp, Artificial Sequence
  chemically synthesized
actttggatcatctacataa

SEQ ID NO: 33127 - DNA, 20 bp, Artificial Sequence
  chemically synthesized
ctttggatcatctacataaa

SEQ ID NO: 33128 - DNA, 20 bp, Artificial Sequence
  chemically synthesized
tttggatcatctacataaag

SEQ ID NO: 33129 - DNA, 20 bp, Artificial Sequence
  chemically synthesized
ttggatcatctacataaagg

SEQ ID NO: 33130 - DNA, 20 bp, Artificial Sequence
  chemically synthesized
gatcatctacataaaggggg

SEQ ID NO: 33131 - DNA, 20 bp, Artificial Sequence
  chemically synthesized
atctacataaagggggaaga

SEQ ID NO: 33132 - DNA, 20 bp, Artificial Sequence
  chemically synthesized
gaagacagaaaaaatcctac

SEQ ID NO: 33133 - DNA, 20 bp, Artificial Sequence
  chemically synthesized
acagaaaaaatcctaccagt

SEQ ID NO: 33134 - DNA, 20 bp, Artificial Sequence
  chemically synthesized
ctaccagtgagttgaaaata

SEQ ID NO: 33135 - DNA, 20 bp, Artificial Sequence
  chemically synthesized
taccagtgagttgaaaatac

SEQ ID NO: 33136 - DNA, 20 bp, Artificial Sequence
  chemically synthesized
agtgagttgaaaatacagga

SEQ ID NO: 33137 - DNA, 20 bp, Artificial Sequence
  chemically synthesized
acaggaaagcctatttcata

SEQ ID NO: 33138 - DNA, 20 bp, Artificial Sequence
  chemically synthesized
caggaaagcctatttcatat

SEQ ID NO: 33139 - DNA, 20 bp, Artificial Sequence
  chemically synthesized
agcctatttcatatgggtta

SEQ ID NO: 33140 - DNA, 20 bp, Artificial Sequence
  chemically synthesized
gcctatttcatatgggttaa

SEQ ID NO: 33141 - DNA, 20 bp, Artificial Sequence
  chemically synthesized
cctatttcatatgggttaaa

SEQ ID NO: 33142 - DNA, 20 bp, Artificial Sequence
  chemically synthesized
atttcatatgggttaaaggg

SEQ ID NO: 33143 - DNA, 20 bp, Artificial Sequence
  chemically synthesized
tttcatatgggttaaagggt

SEQ ID NO: 33144 - DNA, 20 bp, Artificial Sequence
  chemically synthesized
atatgggttaaagggtagga

SEQ ID NO: 33145 - DNA, 20 bp, Artificial Sequence
  chemically synthesized
ggacagttgaatttcgtgaa

SEQ ID NO: 33146 - DNA, 20 bp, Artificial Sequence
  chemically synthesized
ttgaatttcgtgaaaagtct

SEQ ID NO: 33147 - DNA, 20 bp, Artificial Sequence
  chemically synthesized
cgtgaaaagtctgagttata

SEQ ID NO: 33148 - DNA, 20 bp, Artificial Sequence
  chemically synthesized
gtgaaaagtctgagttatat

SEQ ID NO: 33149 - DNA, 20 bp, Artificial Sequence
  chemically synthesized
gtctgagttatataggcttt

SEQ ID NO: 33150 - DNA, 20 bp, Artificial Sequence
  chemically synthesized
agttatataggctttgagca

SEQ ID NO: 33151 - DNA, 20 bp, Artificial Sequence
  chemically synthesized
ttatataggctttgagcaaa

SEQ ID NO: 33152 - DNA, 20 bp, Artificial Sequence
  chemically synthesized
ctttgagcaaagagttttat

SEQ ID NO: 33153 - DNA, 20 bp, Artificial Sequence
  chemically synthesized
caaagagttttattagtatg

SEQ ID NO: 33154 - DNA, 20 bp, Artificial Sequence
  chemically synthesized
agagttttattagtatgaag

SEQ ID NO: 33155 - DNA, 20 bp, Artificial Sequence
  chemically synthesized
gttttattagtatgaagcag

SEQ ID NO: 33156 - DNA, 20 bp, Artificial Sequence
  chemically synthesized
tttattagtatgaagcagaa

SEQ ID NO: 33157 - DNA, 20 bp, Artificial Sequence
  chemically synthesized
ttattagtatgaagcagaag

SEQ ID NO: 33158 - DNA, 20 bp, Artificial Sequence
  chemically synthesized
gaagcagaagaggtaacata

SEQ ID NO: 33159 - DNA, 20 bp, Artificial Sequence
  chemically synthesized
cagaagaggtaacataaaga

SEQ ID NO: 33160 - DNA, 20 bp, Artificial Sequence
  chemically synthesized
gtaacataaagaaagatgta

SEQ ID NO: 33161 - DNA, 20 bp, Artificial Sequence
  chemically synthesized
taacataaagaaagatgtat

SEQ ID NO: 33162 - DNA, 20 bp, Artificial Sequence
  chemically synthesized
aacataaagaaagatgtatg

SEQ ID NO: 33163 - DNA, 20 bp, Artificial Sequence
  chemically synthesized
taaagaaagatgtatggggc

SEQ ID NO: 33164 - DNA, 20 bp, Artificial Sequence
  chemically synthesized
aaagaaagatgtatggggcc

SEQ ID NO: 33165 - DNA, 20 bp, Artificial Sequence
  chemically synthesized
aagatgtatggggccaggca

SEQ ID NO: 33166 - DNA, 20 bp, Artificial Sequence
  chemically synthesized
atgtatggggccaggcatgg

SEQ ID NO: 33167 - DNA, 20 bp, Artificial Sequence
  chemically synthesized
gtggctcacacctgtaatcc

SEQ ID NO: 33168 - DNA, 20 bp, Artificial Sequence
  chemically synthesized
cacctgtaatcccagcactt

SEQ ID NO: 33169 - DNA, 20 bp, Artificial Sequence
  chemically synthesized
acctgtaatcccagcacttt

SEQ ID NO: 33170 - DNA, 20 bp, Artificial Sequence
  chemically synthesized
ctgtaatcccagcactttgg

SEQ ID NO: 33171 - DNA, 20 bp, Artificial Sequence
  chemically synthesized
tgtaatcccagcactttggg

SEQ ID NO: 33172 - DNA, 20 bp, Artificial Sequence
  chemically synthesized
tcccagcactttgggaggcc

SEQ ID NO: 33173 - DNA, 20 bp, Artificial Sequence
  chemically synthesized
cccagcactttgggaggccg

SEQ ID NO: 33174 - DNA, 20 bp, Artificial Sequence
  chemically synthesized
agcactttgggaggccgagg

SEQ ID NO: 33175 - DNA, 20 bp, Artificial Sequence
  chemically synthesized
gcactttgggaggccgaggt

SEQ ID NO: 33176 - DNA, 20 bp, Artificial Sequence
  chemically synthesized
cgaggtgggcgaatcactcc

SEQ ID NO: 33177 - DNA, 20 bp, Artificial Sequence
  chemically synthesized
gaggtgggcgaatcactcct

SEQ ID NO: 33178 - DNA, 20 bp, Artificial Sequence
  chemically synthesized
gaatcactcctgggtgaact

SEQ ID NO: 33179 - DNA, 20 bp, Artificial Sequence
  chemically synthesized
aatcactcctgggtgaactc

SEQ ID NO: 33180 - DNA, 20 bp, Artificial Sequence
  chemically synthesized
tcactcctgggtgaactcag

SEQ ID NO: 33181 - DNA, 20 bp, Artificial Sequence
  chemically synthesized
ctgggtgaactcaggagttc

SEQ ID NO: 33182 - DNA, 20 bp, Artificial Sequence
  chemically synthesized
tgaactcaggagttcaagac

SEQ ID NO: 33183 - DNA, 20 bp, Artificial Sequence
  chemically synthesized
tcaggagttcaagaccagcc

SEQ ID NO: 33184 - DNA, 20 bp, Artificial Sequence
  chemically synthesized
caggagttcaagaccagcct

SEQ ID NO: 33185 - DNA, 20 bp, Artificial Sequence
  chemically synthesized
caagaccagcctgggcaaca

SEQ ID NO: 33186 - DNA, 20 bp, Artificial Sequence
  chemically synthesized
tacaaaaacattacgaaaat

SEQ ID NO: 33187 - DNA, 20 bp, Artificial Sequence
  chemically synthesized
aaaacattacgaaaattagc

SEQ ID NO: 33188 - DNA, 20 bp, Artificial Sequence
  chemically synthesized
aaacattacgaaaattagct

SEQ ID NO: 33189 - DNA, 20 bp, Artificial Sequence
  chemically synthesized
cgaaaattagctgggcgtgt

SEQ ID NO: 33190 - DNA, 20 bp, Artificial Sequence
  chemically synthesized
agctgggcgtgttggtgctg

SEQ ID NO: 33191 - DNA, 20 bp, Artificial Sequence
  chemically synthesized
gcgtgttggtgctgtagtcc

SEQ ID NO: 33192 - DNA, 20 bp, Artificial Sequence
  chemically synthesized
gtgctgtagtcccagctact

SEQ ID NO: 33193 - DNA, 20 bp, Artificial Sequence
  chemically synthesized
tgctgtagtcccagctactc

SEQ ID NO: 33194 - DNA, 20 bp, Artificial Sequence
  chemically synthesized
ctgtagtcccagctactcag

SEQ ID NO: 33195 - DNA, 20 bp, Artificial Sequence
  chemically synthesized
tgtagtcccagctactcagg

SEQ ID NO: 33196 - DNA, 20 bp, Artificial Sequence
  chemically synthesized
tcccagctactcaggaggct

SEQ ID NO: 33197 - DNA, 20 bp, Artificial Sequence
  chemically synthesized
cccagctactcaggaggctg

SEQ ID NO: 33198 - DNA, 20 bp, Artificial Sequence
  chemically synthesized
gctactcaggaggctgaggt

SEQ ID NO: 33199 - DNA, 20 bp, Artificial Sequence
  chemically synthesized
tactcaggaggctgaggtga

SEQ ID NO: 33200 - DNA, 20 bp, Artificial Sequence
  chemically synthesized
actcaggaggctgaggtgag

SEQ ID NO: 33201 - DNA, 20 bp, Artificial Sequence
  chemically synthesized
caggaggctgaggtgagagg

SEQ ID NO: 33202 - DNA, 20 bp, Artificial Sequence
  chemically synthesized
ggaggctgaggtgagaggcg

SEQ ID NO: 33203 - DNA, 20 bp, Artificial Sequence
  chemically synthesized
gaggctgaggtgagaggcgg

SEQ ID NO: 33204 - DNA, 20 bp, Artificial Sequence
  chemically synthesized
ggctgaggtgagaggcggag

SEQ ID NO: 33205 - DNA, 20 bp, Artificial Sequence
  chemically synthesized
gctgaggtgagaggcggagg

SEQ ID NO: 33206 - DNA, 20 bp, Artificial Sequence
  chemically synthesized
gtgagaggcggaggaggttg

SEQ ID NO: 33207 - DNA, 20 bp, Artificial Sequence
  chemically synthesized
gaggcggaggaggttgcagt

SEQ ID NO: 33208 - DNA, 20 bp, Artificial Sequence
  chemically synthesized
ggaggaggttgcagtgagtc

SEQ ID NO: 33209 - DNA, 20 bp, Artificial Sequence
  chemically synthesized
aagatcatgccactgcactc

SEQ ID NO: 33210 - DNA, 20 bp, Artificial Sequence
  chemically synthesized
catgccactgcactccagcc

SEQ ID NO: 33211 - DNA, 20 bp, Artificial Sequence
  chemically synthesized
atgccactgcactccagcct

SEQ ID NO: 33212 - DNA, 20 bp, Artificial Sequence
  chemically synthesized
ctgcactccagcctgggcaa

SEQ ID NO: 33213 - DNA, 20 bp, Artificial Sequence
  chemically synthesized
gcactccagcctgggcaaca

SEQ ID NO: 33214 - DNA, 20 bp, Artificial Sequence
  chemically synthesized
tccagcctgggcaacagagt

SEQ ID NO: 33215 - DNA, 20 bp, Artificial Sequence
  chemically synthesized
cctgtctcaaaaaaaaaaaa

SEQ ID NO: 33216 - DNA, 20 bp, Artificial Sequence
  chemically synthesized
tctcaaaaaaaaaaaaaaga

SEQ ID NO: 33217 - DNA, 20 bp, Artificial Sequence
  chemically synthesized
tgatgtatgctgtatgaaaa

SEQ ID NO: 33218 - DNA, 20 bp, Artificial Sequence
  chemically synthesized
gatgtatgctgtatgaaaaa

SEQ ID NO: 33219 - DNA, 20 bp, Artificial Sequence
  chemically synthesized
gtatgaaaaaaggaaacaca

SEQ ID NO: 33220 - DNA, 20 bp, Artificial Sequence
  chemically synthesized
gaaacacacagatgattcaa

SEQ ID NO: 33221 - DNA, 20 bp, Artificial Sequence
  chemically synthesized
tgattcaacagcctgttttg

SEQ ID NO: 33222 - DNA, 20 bp, Artificial Sequence
  chemically synthesized
gattcaacagcctgttttgt

SEQ ID NO: 33223 - DNA, 20 bp, Artificial Sequence
  chemically synthesized
attcaacagcctgttttgtg

SEQ ID NO: 33224 - DNA, 20 bp, Artificial Sequence
  chemically synthesized
ctgttttgtggggtaatgaa

SEQ ID NO: 33225 - DNA, 20 bp, Artificial Sequence
  chemically synthesized
ggggtaatgaaaagtcaccc

SEQ ID NO: 33226 - DNA, 20 bp, Artificial Sequence
  chemically synthesized
gggtaatgaaaagtcaccct

SEQ ID NO: 33227 - DNA, 20 bp, Artificial Sequence
  chemically synthesized
tgaaaagtcaccctgggaac

SEQ ID NO: 33228 - DNA, 20 bp, Artificial Sequence
  chemically synthesized
gaaaagtcaccctgggaact

SEQ ID NO: 33229 - DNA, 20 bp, Artificial Sequence
  chemically synthesized
tcaccctgggaactgggctc

SEQ ID NO: 33230 - DNA, 20 bp, Artificial Sequence
  chemically synthesized
acccaccaactacatgtcct

SEQ ID NO: 33231 - DNA, 20 bp, Artificial Sequence
  chemically synthesized
accaactacatgtccttggc

SEQ ID NO: 33232 - DNA, 20 bp, Artificial Sequence
  chemically synthesized
gcaagtcatatcaattatct

SEQ ID NO: 33233 - DNA, 20 bp, Artificial Sequence
  chemically synthesized
tctgttttataatctacaaa

SEQ ID NO: 33234 - DNA, 20 bp, Artificial Sequence
  chemically synthesized
ctgttttataatctacaaat

SEQ ID NO: 33235 - DNA, 20 bp, Artificial Sequence
  chemically synthesized
atctacaaataggttatctc

SEQ ID NO: 33236 - DNA, 20 bp, Artificial Sequence
  chemically synthesized
tacaaataggttatctctgg

SEQ ID NO: 33237 - DNA, 20 bp, Artificial Sequence
  chemically synthesized
tctggcagcttaataataat

SEQ ID NO: 33238 - DNA, 20 bp, Artificial Sequence
  chemically synthesized
ctggcagcttaataataatc

SEQ ID NO: 33239 - DNA, 20 bp, Artificial Sequence
  chemically synthesized
tggcagcttaataataatca

SEQ ID NO: 33240 - DNA, 20 bp, Artificial Sequence
  chemically synthesized
cagggttaacatttattaaa

SEQ ID NO: 33241 - DNA, 20 bp, Artificial Sequence
  chemically synthesized
atttattaaacagtgtgtgc

SEQ ID NO: 33242 - DNA, 20 bp, Artificial Sequence
  chemically synthesized
tgtgctatgtgcttttctgt

SEQ ID NO: 33243 - DNA, 20 bp, Artificial Sequence
  chemically synthesized
gtgctatgtgcttttctgtg

SEQ ID NO: 33244 - DNA, 20 bp, Artificial Sequence
  chemically synthesized
ctatgtgcttttctgtgagg

SEQ ID NO: 33245 - DNA, 20 bp, Artificial Sequence
  chemically synthesized
gaggtagttactgctattta

SEQ ID NO: 33246 - DNA, 20 bp, Artificial Sequence
  chemically synthesized
gttactgctatttacagaaa

SEQ ID NO: 33247 - DNA, 20 bp, Artificial Sequence
  chemically synthesized
actgctatttacagaaacag

SEQ ID NO: 33248 - DNA, 20 bp, Artificial Sequence
  chemically synthesized
atttacagaaacagtagatg

SEQ ID NO: 33249 - DNA, 20 bp, Artificial Sequence
  chemically synthesized
ttacagaaacagtagatgca

SEQ ID NO: 33250 - DNA, 20 bp, Artificial Sequence
  chemically synthesized
aaacagtagatgcagagacc

SEQ ID NO: 33251 - DNA, 20 bp, Artificial Sequence
  chemically synthesized
aacagtagatgcagagacca

SEQ ID NO: 33252 - DNA, 20 bp, Artificial Sequence
  chemically synthesized
gatgcagagaccaaggtgct

SEQ ID NO: 33253 - DNA, 20 bp, Artificial Sequence
  chemically synthesized
aaggtgctgagttaaatgat

SEQ ID NO: 33254 - DNA, 20 bp, Artificial Sequence
  chemically synthesized
aggtgctgagttaaatgatt

SEQ ID NO: 33255 - DNA, 20 bp, Artificial Sequence
  chemically synthesized
agttaaatgattaggccaac

SEQ ID NO: 33256 - DNA, 20 bp, Artificial Sequence
  chemically synthesized
gttaaatgattaggccaaca

SEQ ID NO: 33257 - DNA, 20 bp, Artificial Sequence
  chemically synthesized
aatgattaggccaacaaggt

SEQ ID NO: 33258 - DNA, 20 bp, Artificial Sequence
  chemically synthesized
caacaaggttagtacatgcc

SEQ ID NO: 33259 - DNA, 20 bp, Artificial Sequence
  chemically synthesized
aaggttagtacatgccgagc

SEQ ID NO: 33260 - DNA, 20 bp, Artificial Sequence
  chemically synthesized
aggttagtacatgccgagcc

SEQ ID NO: 33261 - DNA, 20 bp, Artificial Sequence
  chemically synthesized
tagtacatgccgagccagga

SEQ ID NO: 33262 - DNA, 20 bp, Artificial Sequence
  chemically synthesized
tacatgccgagccaggatgg

SEQ ID NO: 33263 - DNA, 20 bp, Artificial Sequence
  chemically synthesized
gccgagccaggatggaagcc

SEQ ID NO: 33264 - DNA, 20 bp, Artificial Sequence
  chemically synthesized
ccgagccaggatggaagccc

SEQ ID NO: 33265 - DNA, 20 bp, Artificial Sequence
  chemically synthesized
agccaggatggaagcccagg

SEQ ID NO: 33266 - DNA, 20 bp, Artificial Sequence
  chemically synthesized
gccaggatggaagcccaggt

SEQ ID NO: 33267 - DNA, 20 bp, Artificial Sequence
  chemically synthesized
aggatggaagcccaggtagg

SEQ ID NO: 33268 - DNA, 20 bp, Artificial Sequence
  chemically synthesized
ggatggaagcccaggtaggc

SEQ ID NO: 33269 - DNA, 20 bp, Artificial Sequence
  chemically synthesized
ggaagcccaggtaggcaggc

SEQ ID NO: 33270 - DNA, 20 bp, Artificial Sequence
  chemically synthesized
ggtaggcaggctggcttccg

SEQ ID NO: 33271 - DNA, 20 bp, Artificial Sequence
  chemically synthesized
cttatgaactatgttacgtc

SEQ ID NO: 33272 - DNA, 20 bp, Artificial Sequence
  chemically synthesized
gtgctgataaactgactctc

SEQ ID NO: 33273 - DNA, 20 bp, Artificial Sequence
  chemically synthesized
tgctgataaactgactctct

SEQ ID NO: 33274 - DNA, 20 bp, Artificial Sequence
  chemically synthesized
gctgataaactgactctctg

SEQ ID NO: 33275 - DNA, 20 bp, Artificial Sequence
  chemically synthesized
tgataaactgactctctggg

SEQ ID NO: 33276 - DNA, 20 bp, Artificial Sequence
  chemically synthesized
taaactgactctctggggag

SEQ ID NO: 33277 - DNA, 20 bp, Artificial Sequence
  chemically synthesized
aaactgactctctggggagc

SEQ ID NO: 33278 - DNA, 20 bp, Artificial Sequence
  chemically synthesized
aactgactctctggggagca

SEQ ID NO: 33279 - DNA, 20 bp, Artificial Sequence
  chemically synthesized
actgactctctggggagcag

SEQ ID NO: 33280 - DNA, 20 bp, Artificial Sequence
  chemically synthesized
actctctggggagcagggga

SEQ ID NO: 33281 - DNA, 20 bp, Artificial Sequence
  chemically synthesized
ggggagcaggggaaagccct

SEQ ID NO: 33282 - DNA, 20 bp, Artificial Sequence
  chemically synthesized
gcaggggaaagccctgagtt

SEQ ID NO: 33283 - DNA, 20 bp, Artificial Sequence
  chemically synthesized
tcacgtaaacattcccattc

SEQ ID NO: 33284 - DNA, 20 bp, Artificial Sequence
  chemically synthesized
tttcttttgtttgtttgttt

SEQ ID NO: 33285 - DNA, 20 bp, Artificial Sequence
  chemically synthesized
ttttgtttgtttgtttgaga

SEQ ID NO: 33286 - DNA, 20 bp, Artificial Sequence
  chemically synthesized
ttgtttgtttgtttgagatg

SEQ ID NO: 33287 - DNA, 20 bp, Artificial Sequence
  chemically synthesized
tggagtctcgcactgttgcc

SEQ ID NO: 33288 - DNA, 20 bp, Artificial Sequence
  chemically synthesized
gtctcgcactgttgcctggc

SEQ ID NO: 33289 - DNA, 20 bp, Artificial Sequence
  chemically synthesized
ctcgcactgttgcctggctg

SEQ ID NO: 33290 - DNA, 20 bp, Artificial Sequence
  chemically synthesized
gttgcctggctggagtgcaa

SEQ ID NO: 33291 - DNA, 20 bp, Artificial Sequence
  chemically synthesized
ggagtgcaatggtgcaatct

SEQ ID NO: 33292 - DNA, 20 bp, Artificial Sequence
  chemically synthesized
cactgcaacctctgcctctc

SEQ ID NO: 33293 - DNA, 20 bp, Artificial Sequence
  chemically synthesized
aacctctgcctctccggttc

SEQ ID NO: 33294 - DNA, 20 bp, Artificial Sequence
  chemically synthesized
ttcaagtgattctcctgcct

SEQ ID NO: 33295 - DNA, 20 bp, Artificial Sequence
  chemically synthesized
ttctcctgcctcagcctccc

SEQ ID NO: 33296 - DNA, 20 bp, Artificial Sequence
  chemically synthesized
tcctgcctcagcctcccaag

SEQ ID NO: 33297 - DNA, 20 bp, Artificial Sequence
  chemically synthesized
gcctcagcctcccaagtagc

SEQ ID NO: 33298 - DNA, 20 bp, Artificial Sequence
  chemically synthesized
cctcagcctcccaagtagct

SEQ ID NO: 33299 - DNA, 20 bp, Artificial Sequence
  chemically synthesized
ctcccaagtagctgggatta

SEQ ID NO: 33300 - DNA, 20 bp, Artificial Sequence
  chemically synthesized
tcccaagtagctgggattac

SEQ ID NO: 33301 - DNA, 20 bp, Artificial Sequence
  chemically synthesized
caggtgcccgccaccatgcc

SEQ ID NO: 33302 - DNA, 20 bp, Artificial Sequence
  chemically synthesized
gctaattttttttgtatttt

SEQ ID NO: 33303 - DNA, 20 bp, Artificial Sequence
  chemically synthesized
aattttttttgtatttttag

SEQ ID NO: 33304 - DNA, 20 bp, Artificial Sequence
  chemically synthesized
ttttttttgtatttttagta

SEQ ID NO: 33305 - DNA, 20 bp, Artificial Sequence
  chemically synthesized
ttgtatttttagtagagaca

SEQ ID NO: 33306 - DNA, 20 bp, Artificial Sequence
  chemically synthesized
catggtttcactatgttgac

SEQ ID NO: 33307 - DNA, 20 bp, Artificial Sequence
  chemically synthesized
atggtttcactatgttgact

SEQ ID NO: 33308 - DNA, 20 bp, Artificial Sequence
  chemically synthesized
tttcactatgttgactaggc

SEQ ID NO: 33309 - DNA, 20 bp, Artificial Sequence
  chemically synthesized
acctcatgatctgcctgcct

SEQ ID NO: 33310 - DNA, 20 bp, Artificial Sequence
  chemically synthesized
ctgcctgccttggcctccct

SEQ ID NO: 33311 - DNA, 20 bp, Artificial Sequence
  chemically synthesized
gccttggcctccctaagtgc

SEQ ID NO: 33312 - DNA, 20 bp, Artificial Sequence
  chemically synthesized
ccttggcctccctaagtgct

SEQ ID NO: 33313 - DNA, 20 bp, Artificial Sequence
  chemically synthesized
ctccctaagtgctaggatta

SEQ ID NO: 33314 - DNA, 20 bp, Artificial Sequence
  chemically synthesized
tccctaagtgctaggattac

SEQ ID NO: 33315 - DNA, 20 bp, Artificial Sequence
  chemically synthesized
agtgctaggattacaggcgt

SEQ ID NO: 33316 - DNA, 20 bp, Artificial Sequence
  chemically synthesized
caggcgtgagccactacacc

SEQ ID NO: 33317 - DNA, 20 bp, Artificial Sequence
  chemically synthesized
gcatgattctaaaaaataaa

SEQ ID NO: 33318 - DNA, 20 bp, Artificial Sequence
  chemically synthesized
ttctaaaaaataaaaagatg

SEQ ID NO: 33319 - DNA, 20 bp, Artificial Sequence
  chemically synthesized
caaacatctgatctccattg

SEQ ID NO: 33320 - DNA, 20 bp, Artificial Sequence
  chemically synthesized
gaagaaccatgcaatctctc

SEQ ID NO: 33321 - DNA, 20 bp, Artificial Sequence
  chemically synthesized
aagaaccatgcaatctctct

SEQ ID NO: 33322 - DNA, 20 bp, Artificial Sequence
  chemically synthesized
atgcaatctctctgggttga

SEQ ID NO: 33323 - DNA, 20 bp, Artificial Sequence
  chemically synthesized
gcaatctctctgggttgata

SEQ ID NO: 33324 - DNA, 20 bp, Artificial Sequence
  chemically synthesized
caatctctctgggttgatag

SEQ ID NO: 33325 - DNA, 20 bp, Artificial Sequence
  chemically synthesized
ctctctgggttgatagaggc

SEQ ID NO: 33326 - DNA, 20 bp, Artificial Sequence
  chemically synthesized
ctctgggttgatagaggcca

SEQ ID NO: 33327 - DNA, 20 bp, Artificial Sequence
  chemically synthesized
gggttgatagaggccagagt

SEQ ID NO: 33328 - DNA, 20 bp, Artificial Sequence
  chemically synthesized
ttgatagaggccagagttag

SEQ ID NO: 33329 - DNA, 20 bp, Artificial Sequence
  chemically synthesized
ttagtggctctccctgattt

SEQ ID NO: 33330 - DNA, 20 bp, Artificial Sequence
  chemically synthesized
tggctctccctgatttcggt

SEQ ID NO: 33331 - DNA, 20 bp, Artificial Sequence
  chemically synthesized
aaatcactattccaccatca

SEQ ID NO: 33332 - DNA, 20 bp, Artificial Sequence
  chemically synthesized
aatcactattccaccatcac

SEQ ID NO: 33333 - DNA, 20 bp, Artificial Sequence
  chemically synthesized
attccaccatcacgggataa

SEQ ID NO: 33334 - DNA, 20 bp, Artificial Sequence
  chemically synthesized
ttccaccatcacgggataaa

SEQ ID NO: 33335 - DNA, 20 bp, Artificial Sequence
  chemically synthesized
gggataaaaggcatcctgac

SEQ ID NO: 33336 - DNA, 20 bp, Artificial Sequence
  chemically synthesized
ataaaaggcatcctgactgg

SEQ ID NO: 33337 - DNA, 20 bp, Artificial Sequence
  chemically synthesized
gcggttgacacctatttcca

SEQ ID NO: 33338 - DNA, 20 bp, Artificial Sequence
  chemically synthesized
gacacctatttccacagtga

SEQ ID NO: 33339 - DNA, 20 bp, Artificial Sequence
  chemically synthesized
tccacagtgaaagatatatc

SEQ ID NO: 33340 - DNA, 20 bp, Artificial Sequence
  chemically synthesized
agatatatctagtactttta

SEQ ID NO: 33341 - DNA, 20 bp, Artificial Sequence
  chemically synthesized
gatatatctagtacttttaa

SEQ ID NO: 33342 - DNA, 20 bp, Artificial Sequence
  chemically synthesized
atatatctagtacttttaaa

SEQ ID NO: 33343 - DNA, 20 bp, Artificial Sequence
  chemically synthesized
tatatctagtacttttaaag

SEQ ID NO: 33344 - DNA, 20 bp, Artificial Sequence
  chemically synthesized
atctagtacttttaaagggg

SEQ ID NO: 33345 - DNA, 20 bp, Artificial Sequence
  chemically synthesized
tagtacttttaaaggggaag

SEQ ID NO: 33346 - DNA, 20 bp, Artificial Sequence
  chemically synthesized
aaaggggaagtggtttgtct

SEQ ID NO: 33347 - DNA, 20 bp, Artificial Sequence
  chemically synthesized
gtctgagatactctgtttca

SEQ ID NO: 33348 - DNA, 20 bp, Artificial Sequence
  chemically synthesized
tgagatactctgtttcaaag

SEQ ID NO: 33349 - DNA, 20 bp, Artificial Sequence
  chemically synthesized
agatactctgtttcaaagta

SEQ ID NO: 33350 - DNA, 20 bp, Artificial Sequence
  chemically synthesized
atactctgtttcaaagtaga

SEQ ID NO: 33351 - DNA, 20 bp, Artificial Sequence
  chemically synthesized
tactctgtttcaaagtagag

SEQ ID NO: 33352 - DNA, 20 bp, Artificial Sequence
  chemically synthesized
gtttcaaagtagagaggata

SEQ ID NO: 33353 - DNA, 20 bp, Artificial Sequence
  chemically synthesized
aagtagagaggatacagaac

SEQ ID NO: 33354 - DNA, 20 bp, Artificial Sequence
  chemically synthesized
ggatacagaacaagcatctg

SEQ ID NO: 33355 - DNA, 20 bp, Artificial Sequence
  chemically synthesized
tgaagctatatacatcctta

SEQ ID NO: 33356 - DNA, 20 bp, Artificial Sequence
  chemically synthesized
aagctatatacatccttaca

SEQ ID NO: 33357 - DNA, 20 bp, Artificial Sequence
  chemically synthesized
gctatatacatccttacaga

SEQ ID NO: 33358 - DNA, 20 bp, Artificial Sequence
  chemically synthesized
cttacagagagcaattctga

SEQ ID NO: 33359 - DNA, 20 bp, Artificial Sequence
  chemically synthesized
gagcaattctgatggaaatg

SEQ ID NO: 33360 - DNA, 20 bp, Artificial Sequence
  chemically synthesized
agcaattctgatggaaatgc

SEQ ID NO: 33361 - DNA, 20 bp, Artificial Sequence
  chemically synthesized
aaatgcaggccatgtttccc

SEQ ID NO: 33362 - DNA, 20 bp, Artificial Sequence
  chemically synthesized
aatgcaggccatgtttccct

SEQ ID NO: 33363 - DNA, 20 bp, Artificial Sequence
  chemically synthesized
atgcaggccatgtttccctg

SEQ ID NO: 33364 - DNA, 20 bp, Artificial Sequence
  chemically synthesized
tgcaggccatgtttccctgg

SEQ ID NO: 33365 - DNA, 20 bp, Artificial Sequence
  chemically synthesized
gcaggccatgtttccctggg

SEQ ID NO: 33366 - DNA, 20 bp, Artificial Sequence
  chemically synthesized
caggccatgtttccctgggg

SEQ ID NO: 33367 - DNA, 20 bp, Artificial Sequence
  chemically synthesized
aggccatgtttccctggggg

SEQ ID NO: 33368 - DNA, 20 bp, Artificial Sequence
  chemically synthesized
tccctggggggggctcgtcc

SEQ ID NO: 33369 - DNA, 20 bp, Artificial Sequence
  chemically synthesized
ccctggggggggctcgtcct

SEQ ID NO: 33370 - DNA, 20 bp, Artificial Sequence
  chemically synthesized
cctggggggggctcgtccta

SEQ ID NO: 33371 - DNA, 20 bp, Artificial Sequence
  chemically synthesized
ctggggggggctcgtcctag

SEQ ID NO: 33372 - DNA, 20 bp, Artificial Sequence
  chemically synthesized
ggggggctcgtcctaggggc

SEQ ID NO: 33373 - DNA, 20 bp, Artificial Sequence
  chemically synthesized
ggggctcgtcctaggggctg

SEQ ID NO: 33374 - DNA, 20 bp, Artificial Sequence
  chemically synthesized
tggagtgcattctctgatgt

SEQ ID NO: 33375 - DNA, 20 bp, Artificial Sequence
  chemically synthesized
gagtgcattctctgatgtca

SEQ ID NO: 33376 - DNA, 20 bp, Artificial Sequence
  chemically synthesized
agtgcattctctgatgtcag

SEQ ID NO: 33377 - DNA, 20 bp, Artificial Sequence
  chemically synthesized
tctgatgtcagaggaaatgc

SEQ ID NO: 33378 - DNA, 20 bp, Artificial Sequence
  chemically synthesized
gaggaaatgcaagattccct

SEQ ID NO: 33379 - DNA, 20 bp, Artificial Sequence
  chemically synthesized
aggaaatgcaagattccctg

SEQ ID NO: 33380 - DNA, 20 bp, Artificial Sequence
  chemically synthesized
tgcaagattccctgaggcct

SEQ ID NO: 33381 - DNA, 20 bp, Artificial Sequence
  chemically synthesized
gcaagattccctgaggcctg

SEQ ID NO: 33382 - DNA, 20 bp, Artificial Sequence
  chemically synthesized
caagattccctgaggcctga

SEQ ID NO: 33383 - DNA, 20 bp, Artificial Sequence
  chemically synthesized
ctgaggcctgagggaaccca

SEQ ID NO: 33384 - DNA, 20 bp, Artificial Sequence
  chemically synthesized
agggaacccatggtatatgc

SEQ ID NO: 33385 - DNA, 20 bp, Artificial Sequence
  chemically synthesized
cccatggtatatgcaagtcc

SEQ ID NO: 33386 - DNA, 20 bp, Artificial Sequence
  chemically synthesized
caagtccaagtttcaaactg

SEQ ID NO: 33387 - DNA, 20 bp, Artificial Sequence
  chemically synthesized
tagttccatatgcattcttc

SEQ ID NO: 33388 - DNA, 20 bp, Artificial Sequence
  chemically synthesized
agttccatatgcattcttcc

SEQ ID NO: 33389 - DNA, 20 bp, Artificial Sequence
  chemically synthesized
ttccaggacaaatacttctt

SEQ ID NO: 33390 - DNA, 20 bp, Artificial Sequence
  chemically synthesized
tccaggacaaatacttcttg

SEQ ID NO: 33391 - DNA, 20 bp, Artificial Sequence
  chemically synthesized
ttcttgaggttaaaaaaaaa

SEQ ID NO: 33392 - DNA, 20 bp, Artificial Sequence
  chemically synthesized
gttaaaaaaaaaaagtcaca

SEQ ID NO: 33393 - DNA, 20 bp, Artificial Sequence
  chemically synthesized
gtcacatagctgccatttta

SEQ ID NO: 33394 - DNA, 20 bp, Artificial Sequence
  chemically synthesized
agctgccattttatggattt

SEQ ID NO: 33395 - DNA, 20 bp, Artificial Sequence
  chemically synthesized
gctgccattttatggatttc

SEQ ID NO: 33396 - DNA, 20 bp, Artificial Sequence
  chemically synthesized
attttttttttttttttttt

SEQ ID NO: 33397 - DNA, 20 bp, Artificial Sequence
  chemically synthesized
ttttttttttttttttgaga

SEQ ID NO: 33398 - DNA, 20 bp, Artificial Sequence
  chemically synthesized
ttttttttttttttgagatg

SEQ ID NO: 33399 - DNA, 20 bp, Artificial Sequence
  chemically synthesized
tggagtcttgctctgtcacc

SEQ ID NO: 33400 - DNA, 20 bp, Artificial Sequence
  chemically synthesized
ttgctctgtcacccagcctg

SEQ ID NO: 33401 - DNA, 20 bp, Artificial Sequence
  chemically synthesized
ctgtcacccagcctgtagtg

SEQ ID NO: 33402 - DNA, 20 bp, Artificial Sequence
  chemically synthesized
tcacccagcctgtagtgcag

SEQ ID NO: 33403 - DNA, 20 bp, Artificial Sequence
  chemically synthesized
gtagtgcagtggcataatct

SEQ ID NO: 33404 - DNA, 20 bp, Artificial Sequence
  chemically synthesized
agtggcataatctcggctca

SEQ ID NO: 33405 - DNA, 20 bp, Artificial Sequence
  chemically synthesized
tcacggcaacctccgcctcc

SEQ ID NO: 33406 - DNA, 20 bp, Artificial Sequence
  chemically synthesized
cacggcaacctccgcctccc

SEQ ID NO: 33407 - DNA, 20 bp, Artificial Sequence
  chemically synthesized
aacctccgcctcccaggttc

SEQ ID NO: 33408 - DNA, 20 bp, Artificial Sequence
  chemically synthesized
ttcaagcgattctcttgcct

SEQ ID NO: 33409 - DNA, 20 bp, Artificial Sequence
  chemically synthesized
ttctcttgccttagcctccc

SEQ ID NO: 33410 - DNA, 20 bp, Artificial Sequence
  chemically synthesized
tcttgccttagcctcccgag

SEQ ID NO: 33411 - DNA, 20 bp, Artificial Sequence
  chemically synthesized
gccttagcctcccgagtagc

SEQ ID NO: 33412 - DNA, 20 bp, Artificial Sequence
  chemically synthesized
ccttagcctcccgagtagct

SEQ ID NO: 33413 - DNA, 20 bp, Artificial Sequence
  chemically synthesized
ctcccgagtagctgggatta

SEQ ID NO: 33414 - DNA, 20 bp, Artificial Sequence
  chemically synthesized
cagtcacgcaccaccacatc

SEQ ID NO: 33415 - DNA, 20 bp, Artificial Sequence
  chemically synthesized
ggctaattctttatattttt

SEQ ID NO: 33416 - DNA, 20 bp, Artificial Sequence
  chemically synthesized
taattctttatattttttgg

SEQ ID NO: 33417 - DNA, 20 bp, Artificial Sequence
  chemically synthesized
tttatattttttggtagaaa

SEQ ID NO: 33418 - DNA, 20 bp, Artificial Sequence
  chemically synthesized
gaaacggtgtttcaccatgt

SEQ ID NO: 33419 - DNA, 20 bp, Artificial Sequence
  chemically synthesized
cggtgtttcaccatgttggc

SEQ ID NO: 33420 - DNA, 20 bp, Artificial Sequence
  chemically synthesized
ggtgtttcaccatgttggcc

SEQ ID NO: 33421 - DNA, 20 bp, Artificial Sequence
  chemically synthesized
tttcaccatgttggccaggc

SEQ ID NO: 33422 - DNA, 20 bp, Artificial Sequence
  chemically synthesized
ctcatgtgatctgcctgcct

SEQ ID NO: 33423 - DNA, 20 bp, Artificial Sequence
  chemically synthesized
ctgcctgccttggcctccca

SEQ ID NO: 33424 - DNA, 20 bp, Artificial Sequence
  chemically synthesized
ccttggcctcccaaagtgct

SEQ ID NO: 33425 - DNA, 20 bp, Artificial Sequence
  chemically synthesized
ctcccaaagtgctgagatta

SEQ ID NO: 33426 - DNA, 20 bp, Artificial Sequence
  chemically synthesized
tcccaaagtgctgagattac

SEQ ID NO: 33427 - DNA, 20 bp, Artificial Sequence
  chemically synthesized
agtgctgagattacaggtgt

SEQ ID NO: 33428 - DNA, 20 bp, Artificial Sequence
  chemically synthesized
tgtgagccaccgcgcctgcc

SEQ ID NO: 33429 - DNA, 20 bp, Artificial Sequence
  chemically synthesized
tgagccaccgcgcctgcctg

SEQ ID NO: 33430 - DNA, 20 bp, Artificial Sequence
  chemically synthesized
caccgcgcctgcctggagtt

SEQ ID NO: 33431 - DNA, 20 bp, Artificial Sequence
  chemically synthesized
ctgcctggagttcagaatct

SEQ ID NO: 33432 - DNA, 20 bp, Artificial Sequence
  chemically synthesized
tgcctggagttcagaatctt

SEQ ID NO: 33433 - DNA, 20 bp, Artificial Sequence
  chemically synthesized
cttcattatttgtgtttaaa

SEQ ID NO: 33434 - DNA, 20 bp, Artificial Sequence
  chemically synthesized
ttgtgtttaaatagatcata

SEQ ID NO: 33435 - DNA, 20 bp, Artificial Sequence
  chemically synthesized
gtttaaatagatcatacagt

SEQ ID NO: 33436 - DNA, 20 bp, Artificial Sequence
  chemically synthesized
tttaaatagatcatacagtc

SEQ ID NO: 33437 - DNA, 20 bp, Artificial Sequence
  chemically synthesized
atagatcatacagtcaggca

SEQ ID NO: 33438 - DNA, 20 bp, Artificial Sequence
  chemically synthesized
gatcatacagtcaggcacgg

SEQ ID NO: 33439 - DNA, 20 bp, Artificial Sequence
  chemically synthesized
gtggctcatgcctgtaatcc

SEQ ID NO: 33440 - DNA, 20 bp, Artificial Sequence
  chemically synthesized
tgcctgtaatcccagcactt

SEQ ID NO: 33441 - DNA, 20 bp, Artificial Sequence
  chemically synthesized
gcctgtaatcccagcacttt

SEQ ID NO: 33442 - DNA, 20 bp, Artificial Sequence
  chemically synthesized
ctgtaatcccagcactttgg

SEQ ID NO: 33443 - DNA, 20 bp, Artificial Sequence
  chemically synthesized
tgtaatcccagcactttggg

SEQ ID NO: 33444 - DNA, 20 bp, Artificial Sequence
  chemically synthesized
tcccagcactttgggaggct

SEQ ID NO: 33445 - DNA, 20 bp, Artificial Sequence
  chemically synthesized
cccagcactttgggaggctg

SEQ ID NO: 33446 - DNA, 20 bp, Artificial Sequence
  chemically synthesized
agcactttgggaggctgagg

SEQ ID NO: 33447 - DNA, 20 bp, Artificial Sequence
  chemically synthesized
gcactttgggaggctgaggt

SEQ ID NO: 33448 - DNA, 20 bp, Artificial Sequence
  chemically synthesized
actttgggaggctgaggtgg

SEQ ID NO: 33449 - DNA, 20 bp, Artificial Sequence
  chemically synthesized
ctttgggaggctgaggtggg

SEQ ID NO: 33450 - DNA, 20 bp, Artificial Sequence
  chemically synthesized
ctgaggtgggaggattgcct

SEQ ID NO: 33451 - DNA, 20 bp, Artificial Sequence
  chemically synthesized
gtgggaggattgcctgagtt

SEQ ID NO: 33452 - DNA, 20 bp, Artificial Sequence
  chemically synthesized
tgggaggattgcctgagttc

SEQ ID NO: 33453 - DNA, 20 bp, Artificial Sequence
  chemically synthesized
ggaggattgcctgagttcag

SEQ ID NO: 33454 - DNA, 20 bp, Artificial Sequence
  chemically synthesized
gattgcctgagttcaggaga

SEQ ID NO: 33455 - DNA, 20 bp, Artificial Sequence
  chemically synthesized
ttgcctgagttcaggagatg

SEQ ID NO: 33456 - DNA, 20 bp, Artificial Sequence
  chemically synthesized
tgagttcaggagatggagac

SEQ ID NO: 33457 - DNA, 20 bp, Artificial Sequence
  chemically synthesized
tcaggagatggagaccagcc

SEQ ID NO: 33458 - DNA, 20 bp, Artificial Sequence
  chemically synthesized
caggagatggagaccagcct

SEQ ID NO: 33459 - DNA, 20 bp, Artificial Sequence
  chemically synthesized
ggagaccagcctgggcaaca

SEQ ID NO: 33460 - DNA, 20 bp, Artificial Sequence
  chemically synthesized
tctactaaaaatacaaaaac

SEQ ID NO: 33461 - DNA, 20 bp, Artificial Sequence
  chemically synthesized
ctaaaaatacaaaaactagc

SEQ ID NO: 33462 - DNA, 20 bp, Artificial Sequence
  chemically synthesized
atacaaaaactagctggatg

SEQ ID NO: 33463 - DNA, 20 bp, Artificial Sequence
  chemically synthesized
caaaaactagctggatgtgg

SEQ ID NO: 33464 - DNA, 20 bp, Artificial Sequence
  chemically synthesized
gatgtggtggcacacacctg

SEQ ID NO: 33465 - DNA, 20 bp, Artificial Sequence
  chemically synthesized
gtggcacacacctgtagtcc

SEQ ID NO: 33466 - DNA, 20 bp, Artificial Sequence
  chemically synthesized
cacctgtagtcccagctatt

SEQ ID NO: 33467 - DNA, 20 bp, Artificial Sequence
  chemically synthesized
acctgtagtcccagctattc

SEQ ID NO: 33468 - DNA, 20 bp, Artificial Sequence
  chemically synthesized
ctgtagtcccagctattcag

SEQ ID NO: 33469 - DNA, 20 bp, Artificial Sequence
  chemically synthesized
tgtagtcccagctattcagg

SEQ ID NO: 33470 - DNA, 20 bp, Artificial Sequence
  chemically synthesized
tcccagctattcaggaggct

SEQ ID NO: 33471 - DNA, 20 bp, Artificial Sequence
  chemically synthesized
cccagctattcaggaggctg

SEQ ID NO: 33472 - DNA, 20 bp, Artificial Sequence
  chemically synthesized
agctattcaggaggctgagg

SEQ ID NO: 33473 - DNA, 20 bp, Artificial Sequence
  chemically synthesized
gctattcaggaggctgaggt

SEQ ID NO: 33474 - DNA, 20 bp, Artificial Sequence
  chemically synthesized
tattcaggaggctgaggtgg

SEQ ID NO: 33475 - DNA, 20 bp, Artificial Sequence
  chemically synthesized
attcaggaggctgaggtggg

SEQ ID NO: 33476 - DNA, 20 bp, Artificial Sequence
  chemically synthesized
aggctgaggtgggaggatcc

SEQ ID NO: 33477 - DNA, 20 bp, Artificial Sequence
  chemically synthesized
ggctgaggtgggaggatccc

SEQ ID NO: 33478 - DNA, 20 bp, Artificial Sequence
  chemically synthesized
ctgaggtgggaggatcccag

SEQ ID NO: 33479 - DNA, 20 bp, Artificial Sequence
  chemically synthesized
tgaggtgggaggatcccagg

SEQ ID NO: 33480 - DNA, 20 bp, Artificial Sequence
  chemically synthesized
ggtgggaggatcccaggagg

SEQ ID NO: 33481 - DNA, 20 bp, Artificial Sequence
  chemically synthesized
tgggaggatcccaggaggta

SEQ ID NO: 33482 - DNA, 20 bp, Artificial Sequence
  chemically synthesized
gggaggatcccaggaggtag

SEQ ID NO: 33483 - DNA, 20 bp, Artificial Sequence
  chemically synthesized
caggaggtagaggtcacaat

SEQ ID NO: 33484 - DNA, 20 bp, Artificial Sequence
  chemically synthesized
ggtagaggtcacaatgagcc

SEQ ID NO: 33485 - DNA, 20 bp, Artificial Sequence
  chemically synthesized
gagattgcgccactgcactc

SEQ ID NO: 33486 - DNA, 20 bp, Artificial Sequence
  chemically synthesized
agattgcgccactgcactcc

SEQ ID NO: 33487 - DNA, 20 bp, Artificial Sequence
  chemically synthesized
tgcgccactgcactccaggc

SEQ ID NO: 33488 - DNA, 20 bp, Artificial Sequence
  chemically synthesized
gcgccactgcactccaggct

SEQ ID NO: 33489 - DNA, 20 bp, Artificial Sequence
  chemically synthesized
gcactccaggctgggttact

SEQ ID NO: 33490 - DNA, 20 bp, Artificial Sequence
  chemically synthesized
tccaggctgggttactgagc

SEQ ID NO: 33491 - DNA, 20 bp, Artificial Sequence
  chemically synthesized
atcctgtctcaaaaaaaaaa

SEQ ID NO: 33492 - DNA, 20 bp, Artificial Sequence
  chemically synthesized
aaaaagataatacattcaaa

SEQ ID NO: 33493 - DNA, 20 bp, Artificial Sequence
  chemically synthesized
tcaaacagttcaaaatgcaa

SEQ ID NO: 33494 - DNA, 20 bp, Artificial Sequence
  chemically synthesized
aatgcaaaagttacatacat

SEQ ID NO: 33495 - DNA, 20 bp, Artificial Sequence
  chemically synthesized
atgcaaaagttacatacata

SEQ ID NO: 33496 - DNA, 20 bp, Artificial Sequence
  chemically synthesized
caaaagttacatacataagg

SEQ ID NO: 33497 - DNA, 20 bp, Artificial Sequence
  chemically synthesized
ctccctctcacacttctccc

SEQ ID NO: 33498 - DNA, 20 bp, Artificial Sequence
  chemically synthesized
cacacttctccccagccacc

SEQ ID NO: 33499 - DNA, 20 bp, Artificial Sequence
  chemically synthesized
agccacccagttctcccttc

SEQ ID NO: 33500 - DNA, 20 bp, Artificial Sequence
  chemically synthesized
ccacccagttctcccttcta

SEQ ID NO: 33501 - DNA, 20 bp, Artificial Sequence
  chemically synthesized
cacccagttctcccttctag

SEQ ID NO: 33502 - DNA, 20 bp, Artificial Sequence
  chemically synthesized
gcaacatgtgaaatccttct

SEQ ID NO: 33503 - DNA, 20 bp, Artificial Sequence
  chemically synthesized
caacatgtgaaatccttctc

SEQ ID NO: 33504 - DNA, 20 bp, Artificial Sequence
  chemically synthesized
ctcaggctacactcttcttg

SEQ ID NO: 33505 - DNA, 20 bp, Artificial Sequence
  chemically synthesized
tcaggctacactcttcttga

SEQ ID NO: 33506 - DNA, 20 bp, Artificial Sequence
  chemically synthesized
ctacactcttcttgaaggtg

SEQ ID NO: 33507 - DNA, 20 bp, Artificial Sequence
  chemically synthesized
tacactcttcttgaaggtgt

SEQ ID NO: 33508 - DNA, 20 bp, Artificial Sequence
  chemically synthesized
cttcttgaaggtgtaggctt

SEQ ID NO: 33509 - DNA, 20 bp, Artificial Sequence
  chemically synthesized
ttcttgaaggtgtaggcttt

SEQ ID NO: 33510 - DNA, 20 bp, Artificial Sequence
  chemically synthesized
aaggtgtaggctttgggcaa

SEQ ID NO: 33511 - DNA, 20 bp, Artificial Sequence
  chemically synthesized
tttgggcaaaagcattcatt

SEQ ID NO: 33512 - DNA, 20 bp, Artificial Sequence
  chemically synthesized
aagcattcattcagtaaccc

SEQ ID NO: 33513 - DNA, 20 bp, Artificial Sequence
  chemically synthesized
aaacttgttctgtttttcca

SEQ ID NO: 33514 - DNA, 20 bp, Artificial Sequence
  chemically synthesized
aacttgttctgtttttccat

SEQ ID NO: 33515 - DNA, 20 bp, Artificial Sequence
  chemically synthesized
tttttccataggattctctt

SEQ ID NO: 33516 - DNA, 20 bp, Artificial Sequence
  chemically synthesized
tccataggattctctttgga

SEQ ID NO: 33517 - DNA, 20 bp, Artificial Sequence
  chemically synthesized
tctttggacagcgtccatac

SEQ ID NO: 33518 - DNA, 20 bp, Artificial Sequence
  chemically synthesized
ttggacagcgtccatactgg

SEQ ID NO: 33519 - DNA, 20 bp, Artificial Sequence
  chemically synthesized
tggacagcgtccatactggt

SEQ ID NO: 33520 - DNA, 20 bp, Artificial Sequence
  chemically synthesized
gcgtccatactggtgggttt

SEQ ID NO: 33521 - DNA, 20 bp, Artificial Sequence
  chemically synthesized
gttttggatactgactacta

SEQ ID NO: 33522 - DNA, 20 bp, Artificial Sequence
  chemically synthesized
acacttccgtgcccctgata

SEQ ID NO: 33523 - DNA, 20 bp, Artificial Sequence
  chemically synthesized
cttccgtgcccctgataaag

SEQ ID NO: 33524 - DNA, 20 bp, Artificial Sequence
  chemically synthesized
agcagttccctgtaacctgt

SEQ ID NO: 33525 - DNA, 20 bp, Artificial Sequence
  chemically synthesized
ttccctgtaacctgtgagac

SEQ ID NO: 33526 - DNA, 20 bp, Artificial Sequence
  chemically synthesized
tgtaacctgtgagactggac

SEQ ID NO: 33527 - DNA, 20 bp, Artificial Sequence
  chemically synthesized
gtaacctgtgagactggacc

SEQ ID NO: 33528 - DNA, 20 bp, Artificial Sequence
  chemically synthesized
cctgtgagactggaccaggt

SEQ ID NO: 33529 - DNA, 20 bp, Artificial Sequence
  chemically synthesized
actggaccaggtaagcgtcc

SEQ ID NO: 33530 - DNA, 20 bp, Artificial Sequence
  chemically synthesized
ggtaagcgtcccagcccctg

SEQ ID NO: 33531 - DNA, 20 bp, Artificial Sequence
  chemically synthesized
agcgtcccagcccctgcaga

SEQ ID NO: 33532 - DNA, 20 bp, Artificial Sequence
  chemically synthesized
gtcccagcccctgcagacag

SEQ ID NO: 33533 - DNA, 20 bp, Artificial Sequence
  chemically synthesized
agcccctgcagacagaagct

SEQ ID NO: 33534 - DNA, 20 bp, Artificial Sequence
  chemically synthesized
ccctgcagacagaagctgag

SEQ ID NO: 33535 - DNA, 20 bp, Artificial Sequence
  chemically synthesized
tggacctcgtttacctgtta

SEQ ID NO: 33536 - DNA, 20 bp, Artificial Sequence
  chemically synthesized
ttatggatgaaactgacctt

SEQ ID NO: 33537 - DNA, 20 bp, Artificial Sequence
  chemically synthesized
tatggatgaaactgaccttg

SEQ ID NO: 33538 - DNA, 20 bp, Artificial Sequence
  chemically synthesized
atggatgaaactgaccttga

SEQ ID NO: 33539 - DNA, 20 bp, Artificial Sequence
  chemically synthesized
tggatgaaactgaccttgag

SEQ ID NO: 33540 - DNA, 20 bp, Artificial Sequence
  chemically synthesized
aactgaccttgaggggacat

SEQ ID NO: 33541 - DNA, 20 bp, Artificial Sequence
  chemically synthesized
actgaccttgaggggacatg

SEQ ID NO: 33542 - DNA, 20 bp, Artificial Sequence
  chemically synthesized
tgaccttgaggggacatgag

SEQ ID NO: 33543 - DNA, 20 bp, Artificial Sequence
  chemically synthesized
accttgaggggacatgagga

SEQ ID NO: 33544 - DNA, 20 bp, Artificial Sequence
  chemically synthesized
cttttgtcatgctcttcaat

SEQ ID NO: 33545 - DNA, 20 bp, Artificial Sequence
  chemically synthesized
ttctgcaatactttcctgaa

SEQ ID NO: 33546 - DNA, 20 bp, Artificial Sequence
  chemically synthesized
caatactttcctgaatagca

SEQ ID NO: 33547 - DNA, 20 bp, Artificial Sequence
  chemically synthesized
tactttcctgaatagcacag

SEQ ID NO: 33548 - DNA, 20 bp, Artificial Sequence
  chemically synthesized
cctgaatagcacagtagtat

SEQ ID NO: 33549 - DNA, 20 bp, Artificial Sequence
  chemically synthesized
tattggaaatctgcctatta

SEQ ID NO: 33550 - DNA, 20 bp, Artificial Sequence
  chemically synthesized
aatctgcctattacagaacc

SEQ ID NO: 33551 - DNA, 20 bp, Artificial Sequence
  chemically synthesized
tgcctattacagaacctgga

SEQ ID NO: 33552 - DNA, 20 bp, Artificial Sequence
  chemically synthesized
cctattacagaacctggatg

SEQ ID NO: 33553 - DNA, 20 bp, Artificial Sequence
  chemically synthesized
tacagaacctggatggagtc

SEQ ID NO: 33554 - DNA, 20 bp, Artificial Sequence
  chemically synthesized
cagaacctggatggagtcca

SEQ ID NO: 33555 - DNA, 20 bp, Artificial Sequence
  chemically synthesized
gaacctggatggagtccaga

SEQ ID NO: 33556 - DNA, 20 bp, Artificial Sequence
  chemically synthesized
aacctggatggagtccagag

SEQ ID NO: 33557 - DNA, 20 bp, Artificial Sequence
  chemically synthesized
ggatggagtccagagaggca

SEQ ID NO: 33558 - DNA, 20 bp, Artificial Sequence
  chemically synthesized
gatggagtccagagaggcac

SEQ ID NO: 33559 - DNA, 20 bp, Artificial Sequence
  chemically synthesized
cagagaggcacgggcatcca

SEQ ID NO: 33560 - DNA, 20 bp, Artificial Sequence
  chemically synthesized
agagaggcacgggcatccat

SEQ ID NO: 33561 - DNA, 20 bp, Artificial Sequence
  chemically synthesized
ggcacgggcatccatgggca

SEQ ID NO: 33562 - DNA, 20 bp, Artificial Sequence
  chemically synthesized
gcacgggcatccatgggcaa

SEQ ID NO: 33563 - DNA, 20 bp, Artificial Sequence
  chemically synthesized
cacgggcatccatgggcaaa

SEQ ID NO: 33564 - DNA, 20 bp, Artificial Sequence
  chemically synthesized
tccatgggcaaagggctcgt

SEQ ID NO: 33565 - DNA, 20 bp, Artificial Sequence
  chemically synthesized
catgggcaaagggctcgtga

SEQ ID NO: 33566 - DNA, 20 bp, Artificial Sequence
  chemically synthesized
tcgtgagagtcaccgccctg

SEQ ID NO: 33567 - DNA, 20 bp, Artificial Sequence
  chemically synthesized
tgcagggcggtgactctcac

SEQ ID NO: 33568 - DNA, 20 bp, Artificial Sequence
  chemically synthesized
tctcacgagccctttgccca

SEQ ID NO: 33569 - DNA, 20 bp, Artificial Sequence
  chemically synthesized
catggatgcccgtgcctctc

SEQ ID NO: 33570 - DNA, 20 bp, Artificial Sequence
  chemically synthesized
gtgcctctctggactccatc

SEQ ID NO: 33571 - DNA, 20 bp, Artificial Sequence
  chemically synthesized
tgcctctctggactccatcc

SEQ ID NO: 33572 - DNA, 20 bp, Artificial Sequence
  chemically synthesized
actccatccaggttctgtaa

SEQ ID NO: 33573 - DNA, 20 bp, Artificial Sequence
  chemically synthesized
ctccatccaggttctgtaat

SEQ ID NO: 33574 - DNA, 20 bp, Artificial Sequence
  chemically synthesized
catccaggttctgtaatagg

SEQ ID NO: 33575 - DNA, 20 bp, Artificial Sequence
  chemically synthesized
tccaatactactgtgctatt

SEQ ID NO: 33576 - DNA, 20 bp, Artificial Sequence
  chemically synthesized
ccaatactactgtgctattc

SEQ ID NO: 33577 - DNA, 20 bp, Artificial Sequence
  chemically synthesized
tactactgtgctattcagga

SEQ ID NO: 33578 - DNA, 20 bp, Artificial Sequence
  chemically synthesized
tgctattcaggaaagtattg

SEQ ID NO: 33579 - DNA, 20 bp, Artificial Sequence
  chemically synthesized
tattcaggaaagtattgcag

SEQ ID NO: 33580 - DNA, 20 bp, Artificial Sequence
  chemically synthesized
gaattaatttgtgccaattg

SEQ ID NO: 33581 - DNA, 20 bp, Artificial Sequence
  chemically synthesized
attaatttgtgccaattgaa

SEQ ID NO: 33582 - DNA, 20 bp, Artificial Sequence
  chemically synthesized
ccaattgaagagcatgacaa

SEQ ID NO: 33583 - DNA, 20 bp, Artificial Sequence
  chemically synthesized
aagagcatgacaaaagtaca

SEQ ID NO: 33584 - DNA, 20 bp, Artificial Sequence
  chemically synthesized
agagcatgacaaaagtacaa

SEQ ID NO: 33585 - DNA, 20 bp, Artificial Sequence
  chemically synthesized
atgacaaaagtacaaaggaa

SEQ ID NO: 33586 - DNA, 20 bp, Artificial Sequence
  chemically synthesized
ggctctcctcatgtcccctc

SEQ ID NO: 33587 - DNA, 20 bp, Artificial Sequence
  chemically synthesized
gctctcctcatgtcccctca

SEQ ID NO: 33588 - DNA, 20 bp, Artificial Sequence
  chemically synthesized
tcctcatgtcccctcaaggt

SEQ ID NO: 33589 - DNA, 20 bp, Artificial Sequence
  chemically synthesized
aaggtcagtttcatccataa

SEQ ID NO: 33590 - DNA, 20 bp, Artificial Sequence
  chemically synthesized
aggtcagtttcatccataac

SEQ ID NO: 33591 - DNA, 20 bp, Artificial Sequence
  chemically synthesized
ttcatccataacaggtaaac

SEQ ID NO: 33592 - DNA, 20 bp, Artificial Sequence
  chemically synthesized
tcatccataacaggtaaacg

SEQ ID NO: 33593 - DNA, 20 bp, Artificial Sequence
  chemically synthesized
acaggtaaacgaggtccact

SEQ ID NO: 33594 - DNA, 20 bp, Artificial Sequence
  chemically synthesized
gtccactcagcttctgtctg

SEQ ID NO: 33595 - DNA, 20 bp, Artificial Sequence
  chemically synthesized
tccactcagcttctgtctgc

SEQ ID NO: 33596 - DNA, 20 bp, Artificial Sequence
  chemically synthesized
ccactcagcttctgtctgca

SEQ ID NO: 33597 - DNA, 20 bp, Artificial Sequence
  chemically synthesized
cactcagcttctgtctgcag

SEQ ID NO: 33598 - DNA, 20 bp, Artificial Sequence
  chemically synthesized
cagcttctgtctgcaggggc

SEQ ID NO: 33599 - DNA, 20 bp, Artificial Sequence
  chemically synthesized
agcttctgtctgcaggggct

SEQ ID NO: 33600 - DNA, 20 bp, Artificial Sequence
  chemically synthesized
caggggctgggacgcttacc

SEQ ID NO: 33601 - DNA, 20 bp, Artificial Sequence
  chemically synthesized
gctgggacgcttacctggtc

SEQ ID NO: 33602 - DNA, 20 bp, Artificial Sequence
  chemically synthesized
gcttacctggtccagtctca

SEQ ID NO: 33603 - DNA, 20 bp, Artificial Sequence
  chemically synthesized
cttacctggtccagtctcac

SEQ ID NO: 33604 - DNA, 20 bp, Artificial Sequence
  chemically synthesized
tggtccagtctcacaggtta

SEQ ID NO: 33605 - DNA, 20 bp, Artificial Sequence
  chemically synthesized
ggtccagtctcacaggttac

SEQ ID NO: 33606 - DNA, 20 bp, Artificial Sequence
  chemically synthesized
gtccagtctcacaggttaca

SEQ ID NO: 33607 - DNA, 20 bp, Artificial Sequence
  chemically synthesized
gttacagggaactgctttat

SEQ ID NO: 33608 - DNA, 20 bp, Artificial Sequence
  chemically synthesized
ttacagggaactgctttatc

SEQ ID NO: 33609 - DNA, 20 bp, Artificial Sequence
  chemically synthesized
tacagggaactgctttatca

SEQ ID NO: 33610 - DNA, 20 bp, Artificial Sequence
  chemically synthesized
acagggaactgctttatcag

SEQ ID NO: 33611 - DNA, 20 bp, Artificial Sequence
  chemically synthesized
gaactgctttatcaggggca

SEQ ID NO: 33612 - DNA, 20 bp, Artificial Sequence
  chemically synthesized
ctgctttatcaggggcacgg

SEQ ID NO: 33613 - DNA, 20 bp, Artificial Sequence
  chemically synthesized
ggggcacggaagtgttgctg

SEQ ID NO: 33614 - DNA, 20 bp, Artificial Sequence
  chemically synthesized
gcacggaagtgttgctgtag

SEQ ID NO: 33615 - DNA, 20 bp, Artificial Sequence
  chemically synthesized
ggaagtgttgctgtagtagt

SEQ ID NO: 33616 - DNA, 20 bp, Artificial Sequence
  chemically synthesized
agtcagtatccaaaacccac

SEQ ID NO: 33617 - DNA, 20 bp, Artificial Sequence
  chemically synthesized
gtatccaaaacccaccagta

SEQ ID NO: 33618 - DNA, 20 bp, Artificial Sequence
  chemically synthesized
accagtatggacgctgtcca

SEQ ID NO: 33619 - DNA, 20 bp, Artificial Sequence
  chemically synthesized
cagtatggacgctgtccaaa

SEQ ID NO: 33620 - DNA, 20 bp, Artificial Sequence
  chemically synthesized
gctgtccaaagagaatccta

SEQ ID NO: 33621 - DNA, 20 bp, Artificial Sequence
  chemically synthesized
aagagaatcctatggaaaaa

SEQ ID NO: 33622 - DNA, 20 bp, Artificial Sequence
  chemically synthesized
atcctatggaaaaacagaac

SEQ ID NO: 33623 - DNA, 20 bp, Artificial Sequence
  chemically synthesized
ggaaaaacagaacaagtttc

SEQ ID NO: 33624 - DNA, 20 bp, Artificial Sequence
  chemically synthesized
gaaaaacagaacaagtttct

SEQ ID NO: 33625 - DNA, 20 bp, Artificial Sequence
  chemically synthesized
aaaaacagaacaagtttctg

SEQ ID NO: 33626 - DNA, 20 bp, Artificial Sequence
  chemically synthesized
tgaatgaatgcttttgccca

SEQ ID NO: 33627 - DNA, 20 bp, Artificial Sequence
  chemically synthesized
tgcccaaagcctacaccttc

SEQ ID NO: 33628 - DNA, 20 bp, Artificial Sequence
  chemically synthesized
ccaaagcctacaccttcaag

SEQ ID NO: 33629 - DNA, 20 bp, Artificial Sequence
  chemically synthesized
aaagcctacaccttcaagaa

SEQ ID NO: 33630 - DNA, 20 bp, Artificial Sequence
  chemically synthesized
ctacaccttcaagaagagtg

SEQ ID NO: 33631 - DNA, 20 bp, Artificial Sequence
  chemically synthesized
cttcaagaagagtgtagcct

SEQ ID NO: 33632 - DNA, 20 bp, Artificial Sequence
  chemically synthesized
caagaagagtgtagcctgag

SEQ ID NO: 33633 - DNA, 20 bp, Artificial Sequence
  chemically synthesized
aagaagagtgtagcctgaga

SEQ ID NO: 33634 - DNA, 20 bp, Artificial Sequence
  chemically synthesized
aggatttcacatgttgcctc

SEQ ID NO: 33635 - DNA, 20 bp, Artificial Sequence
  chemically synthesized
atttcacatgttgcctctag

SEQ ID NO: 33636 - DNA, 20 bp, Artificial Sequence
  chemically synthesized
tttcacatgttgcctctaga

SEQ ID NO: 33637 - DNA, 20 bp, Artificial Sequence
  chemically synthesized
ttcacatgttgcctctagaa

SEQ ID NO: 33638 - DNA, 20 bp, Artificial Sequence
  chemically synthesized
cacatgttgcctctagaagg

SEQ ID NO: 33639 - DNA, 20 bp, Artificial Sequence
  chemically synthesized
ttgcctctagaagggagaac

SEQ ID NO: 33640 - DNA, 20 bp, Artificial Sequence
  chemically synthesized
tgcctctagaagggagaact

SEQ ID NO: 33641 - DNA, 20 bp, Artificial Sequence
  chemically synthesized
ctctagaagggagaactggg

SEQ ID NO: 33642 - DNA, 20 bp, Artificial Sequence
  chemically synthesized
agaagggagaactgggtggc

SEQ ID NO: 33643 - DNA, 20 bp, Artificial Sequence
  chemically synthesized
gaagggagaactgggtggct

SEQ ID NO: 33644 - DNA, 20 bp, Artificial Sequence
  chemically synthesized
aagggagaactgggtggctg

SEQ ID NO: 33645 - DNA, 20 bp, Artificial Sequence
  chemically synthesized
gggagaactgggtggctggg

SEQ ID NO: 33646 - DNA, 20 bp, Artificial Sequence
  chemically synthesized
agaactgggtggctggggag

SEQ ID NO: 33647 - DNA, 20 bp, Artificial Sequence
  chemically synthesized
gggtggctggggagaagtgt

SEQ ID NO: 33648 - DNA, 20 bp, Artificial Sequence
  chemically synthesized
gtggctggggagaagtgtga

SEQ ID NO: 33649 - DNA, 20 bp, Artificial Sequence
  chemically synthesized
tggctggggagaagtgtgag

SEQ ID NO: 33650 - DNA, 20 bp, Artificial Sequence
  chemically synthesized
ggctggggagaagtgtgaga

SEQ ID NO: 33651 - DNA, 20 bp, Artificial Sequence
  chemically synthesized
ctggggagaagtgtgagagg

SEQ ID NO: 33652 - DNA, 20 bp, Artificial Sequence
  chemically synthesized
gtattatctttttttttttt

SEQ ID NO: 33653 - DNA, 20 bp, Artificial Sequence
  chemically synthesized
tatcttttttttttttgaga

SEQ ID NO: 33654 - DNA, 20 bp, Artificial Sequence
  chemically synthesized
atcttttttttttttgagac

SEQ ID NO: 33655 - DNA, 20 bp, Artificial Sequence
  chemically synthesized
tttttttttgagacaggatc

SEQ ID NO: 33656 - DNA, 20 bp, Artificial Sequence
  chemically synthesized
ttttgagacaggatctggct

SEQ ID NO: 33657 - DNA, 20 bp, Artificial Sequence
  chemically synthesized
caggatctggctcagtaacc

SEQ ID NO: 33658 - DNA, 20 bp, Artificial Sequence
  chemically synthesized
tctggctcagtaacccagcc

SEQ ID NO: 33659 - DNA, 20 bp, Artificial Sequence
  chemically synthesized
tggctcagtaacccagcctg

SEQ ID NO: 33660 - DNA, 20 bp, Artificial Sequence
  chemically synthesized
cagtaacccagcctggagtg

SEQ ID NO: 33661 - DNA, 20 bp, Artificial Sequence
  chemically synthesized
taacccagcctggagtgcag

SEQ ID NO: 33662 - DNA, 20 bp, Artificial Sequence
  chemically synthesized
ggagtgcagtggcgcaatct

SEQ ID NO: 33663 - DNA, 20 bp, Artificial Sequence
  chemically synthesized
tcattgtgacctctacctcc

SEQ ID NO: 33664 - DNA, 20 bp, Artificial Sequence
  chemically synthesized
cattgtgacctctacctcct

SEQ ID NO: 33665 - DNA, 20 bp, Artificial Sequence
  chemically synthesized
ctcctgggatcctcccacct

SEQ ID NO: 33666 - DNA, 20 bp, Artificial Sequence
  chemically synthesized
tcccacctcagcctcctgaa

SEQ ID NO: 33667 - DNA, 20 bp, Artificial Sequence
  chemically synthesized
acctcagcctcctgaatagc

SEQ ID NO: 33668 - DNA, 20 bp, Artificial Sequence
  chemically synthesized
cctcagcctcctgaatagct

SEQ ID NO: 33669 - DNA, 20 bp, Artificial Sequence
  chemically synthesized
ctcctgaatagctgggacta

SEQ ID NO: 33670 - DNA, 20 bp, Artificial Sequence
  chemically synthesized
tcctgaatagctgggactac

SEQ ID NO: 33671 - DNA, 20 bp, Artificial Sequence
  chemically synthesized
caggtgtgtgccaccacatc

SEQ ID NO: 33672 - DNA, 20 bp, Artificial Sequence
  chemically synthesized
tgtgtgccaccacatccagc

SEQ ID NO: 33673 - DNA, 20 bp, Artificial Sequence
  chemically synthesized
ccagctagtttttgtatttt

SEQ ID NO: 33674 - DNA, 20 bp, Artificial Sequence
  chemically synthesized
gctagtttttgtatttttag

SEQ ID NO: 33675 - DNA, 20 bp, Artificial Sequence
  chemically synthesized
tagtttttgtatttttagta

SEQ ID NO: 33676 - DNA, 20 bp, Artificial Sequence
  chemically synthesized
ttttgtatttttagtagaga

SEQ ID NO: 33677 - DNA, 20 bp, Artificial Sequence
  chemically synthesized
tttgtatttttagtagagac

SEQ ID NO: 33678 - DNA, 20 bp, Artificial Sequence
  chemically synthesized
ttgtatttttagtagagacg

SEQ ID NO: 33679 - DNA, 20 bp, Artificial Sequence
  chemically synthesized
cggggtttcaccatgttgcc

SEQ ID NO: 33680 - DNA, 20 bp, Artificial Sequence
  chemically synthesized
ggggtttcaccatgttgccc

SEQ ID NO: 33681 - DNA, 20 bp, Artificial Sequence
  chemically synthesized
tttcaccatgttgcccaggc

SEQ ID NO: 33682 - DNA, 20 bp, Artificial Sequence
  chemically synthesized
tggtctccatctcctgaact

SEQ ID NO: 33683 - DNA, 20 bp, Artificial Sequence
  chemically synthesized
ggtctccatctcctgaactc

SEQ ID NO: 33684 - DNA, 20 bp, Artificial Sequence
  chemically synthesized
ctcaggcaatcctcccacct

SEQ ID NO: 33685 - DNA, 20 bp, Artificial Sequence
  chemically synthesized
cctcccacctcagcctccca

SEQ ID NO: 33686 - DNA, 20 bp, Artificial Sequence
  chemically synthesized
acctcagcctcccaaagtgc

SEQ ID NO: 33687 - DNA, 20 bp, Artificial Sequence
  chemically synthesized
cctcagcctcccaaagtgct

SEQ ID NO: 33688 - DNA, 20 bp, Artificial Sequence
  chemically synthesized
ctcccaaagtgctgggatta

SEQ ID NO: 33689 - DNA, 20 bp, Artificial Sequence
  chemically synthesized
tcccaaagtgctgggattac

SEQ ID NO: 33690 - DNA, 20 bp, Artificial Sequence
  chemically synthesized
agtgctgggattacaggcat

SEQ ID NO: 33691 - DNA, 20 bp, Artificial Sequence
  chemically synthesized
ctatttaaacacaaataatg

SEQ ID NO: 33692 - DNA, 20 bp, Artificial Sequence
  chemically synthesized
aaacacaaataatgaagccc

SEQ ID NO: 33693 - DNA, 20 bp, Artificial Sequence
  chemically synthesized
aagcccaagattctgaactc

SEQ ID NO: 33694 - DNA, 20 bp, Artificial Sequence
  chemically synthesized
agcccaagattctgaactcc

SEQ ID NO: 33695 - DNA, 20 bp, Artificial Sequence
  chemically synthesized
ccaagattctgaactccagg

SEQ ID NO: 33696 - DNA, 20 bp, Artificial Sequence
  chemically synthesized
caagattctgaactccaggc

SEQ ID NO: 33697 - DNA, 20 bp, Artificial Sequence
  chemically synthesized
ttctgaactccaggcaggcg

SEQ ID NO: 33698 - DNA, 20 bp, Artificial Sequence
  chemically synthesized
tgaactccaggcaggcgcgg

SEQ ID NO: 33699 - DNA, 20 bp, Artificial Sequence
  chemically synthesized
gtggctcacacctgtaatct

SEQ ID NO: 33700 - DNA, 20 bp, Artificial Sequence
  chemically synthesized
cacctgtaatctcagcactt

SEQ ID NO: 33701 - DNA, 20 bp, Artificial Sequence
  chemically synthesized
acctgtaatctcagcacttt

SEQ ID NO: 33702 - DNA, 20 bp, Artificial Sequence
  chemically synthesized
ctgtaatctcagcactttgg

SEQ ID NO: 33703 - DNA, 20 bp, Artificial Sequence
  chemically synthesized
tgtaatctcagcactttggg

SEQ ID NO: 33704 - DNA, 20 bp, Artificial Sequence
  chemically synthesized
tctcagcactttgggaggcc

SEQ ID NO: 33705 - DNA, 20 bp, Artificial Sequence
  chemically synthesized
ctcagcactttgggaggcca

SEQ ID NO: 33706 - DNA, 20 bp, Artificial Sequence
  chemically synthesized
agcactttgggaggccaagg

SEQ ID NO: 33707 - DNA, 20 bp, Artificial Sequence
  chemically synthesized
gcactttgggaggccaaggc

SEQ ID NO: 33708 - DNA, 20 bp, Artificial Sequence
  chemically synthesized
ctttgggaggccaaggcagg

SEQ ID NO: 33709 - DNA, 20 bp, Artificial Sequence
  chemically synthesized
ccaaggcaggcagatcacat

SEQ ID NO: 33710 - DNA, 20 bp, Artificial Sequence
  chemically synthesized
caaggcaggcagatcacatg

SEQ ID NO: 33711 - DNA, 20 bp, Artificial Sequence
  chemically synthesized
gcaggcagatcacatgaggt

SEQ ID NO: 33712 - DNA, 20 bp, Artificial Sequence
  chemically synthesized
caggcagatcacatgaggtc

SEQ ID NO: 33713 - DNA, 20 bp, Artificial Sequence
  chemically synthesized
ggcagatcacatgaggtcag

SEQ ID NO: 33714 - DNA, 20 bp, Artificial Sequence
  chemically synthesized
tcacatgaggtcaggagttt

SEQ ID NO: 33715 - DNA, 20 bp, Artificial Sequence
  chemically synthesized
tgaggtcaggagtttgagac

SEQ ID NO: 33716 - DNA, 20 bp, Artificial Sequence
  chemically synthesized
tcaggagtttgagaccagcc

SEQ ID NO: 33717 - DNA, 20 bp, Artificial Sequence
  chemically synthesized
tgagaccagcctggccaaca

SEQ ID NO: 33718 - DNA, 20 bp, Artificial Sequence
  chemically synthesized
cgtttctaccaaaaaatata

SEQ ID NO: 33719 - DNA, 20 bp, Artificial Sequence
  chemically synthesized
taccaaaaaatataaagaat

SEQ ID NO: 33720 - DNA, 20 bp, Artificial Sequence
  chemically synthesized
aaaaaatataaagaattagc

SEQ ID NO: 33721 - DNA, 20 bp, Artificial Sequence
  chemically synthesized
tataaagaattagccagatg

SEQ ID NO: 33722 - DNA, 20 bp, Artificial Sequence
  chemically synthesized
aaagaattagccagatgtgg

SEQ ID NO: 33723 - DNA, 20 bp, Artificial Sequence
  chemically synthesized
gtggtgcgtgactgtaatcc

SEQ ID NO: 33724 - DNA, 20 bp, Artificial Sequence
  chemically synthesized
tgactgtaatcccagctact

SEQ ID NO: 33725 - DNA, 20 bp, Artificial Sequence
  chemically synthesized
gactgtaatcccagctactc

SEQ ID NO: 33726 - DNA, 20 bp, Artificial Sequence
  chemically synthesized
ctgtaatcccagctactcgg

SEQ ID NO: 33727 - DNA, 20 bp, Artificial Sequence
  chemically synthesized
tgtaatcccagctactcggg

SEQ ID NO: 33728 - DNA, 20 bp, Artificial Sequence
  chemically synthesized
tcccagctactcgggaggct

SEQ ID NO: 33729 - DNA, 20 bp, Artificial Sequence
  chemically synthesized
cccagctactcgggaggcta

SEQ ID NO: 33730 - DNA, 20 bp, Artificial Sequence
  chemically synthesized
gctactcgggaggctaaggc

SEQ ID NO: 33731 - DNA, 20 bp, Artificial Sequence
  chemically synthesized
tactcgggaggctaaggcaa

SEQ ID NO: 33732 - DNA, 20 bp, Artificial Sequence
  chemically synthesized
gcaagagaatcgcttgaacc

SEQ ID NO: 33733 - DNA, 20 bp, Artificial Sequence
  chemically synthesized
caagagaatcgcttgaacct

SEQ ID NO: 33734 - DNA, 20 bp, Artificial Sequence
  chemically synthesized
agagaatcgcttgaacctgg

SEQ ID NO: 33735 - DNA, 20 bp, Artificial Sequence
  chemically synthesized
gagaatcgcttgaacctggg

SEQ ID NO: 33736 - DNA, 20 bp, Artificial Sequence
  chemically synthesized
aatcgcttgaacctgggagg

SEQ ID NO: 33737 - DNA, 20 bp, Artificial Sequence
  chemically synthesized
tcgcttgaacctgggaggcg

SEQ ID NO: 33738 - DNA, 20 bp, Artificial Sequence
  chemically synthesized
cgcttgaacctgggaggcgg

SEQ ID NO: 33739 - DNA, 20 bp, Artificial Sequence
  chemically synthesized
tgggaggcggaggttgccgt

SEQ ID NO: 33740 - DNA, 20 bp, Artificial Sequence
  chemically synthesized
ggcggaggttgccgtgagcc

SEQ ID NO: 33741 - DNA, 20 bp, Artificial Sequence
  chemically synthesized
gagattatgccactgcacta

SEQ ID NO: 33742 - DNA, 20 bp, Artificial Sequence
  chemically synthesized
agattatgccactgcactac

SEQ ID NO: 33743 - DNA, 20 bp, Artificial Sequence
  chemically synthesized
tatgccactgcactacaggc

SEQ ID NO: 33744 - DNA, 20 bp, Artificial Sequence
  chemically synthesized
atgccactgcactacaggct

SEQ ID NO: 33745 - DNA, 20 bp, Artificial Sequence
  chemically synthesized
ctgcactacaggctgggtga

SEQ ID NO: 33746 - DNA, 20 bp, Artificial Sequence
  chemically synthesized
gcactacaggctgggtgaca

SEQ ID NO: 33747 - DNA, 20 bp, Artificial Sequence
  chemically synthesized
tacaggctgggtgacagagc

SEQ ID NO: 33748 - DNA, 20 bp, Artificial Sequence
  chemically synthesized
aaatcctgaaatccataaaa

SEQ ID NO: 33749 - DNA, 20 bp, Artificial Sequence
  chemically synthesized
tcctgaaatccataaaatgg

SEQ ID NO: 33750 - DNA, 20 bp, Artificial Sequence
  chemically synthesized
gactttttttttttaacctc

SEQ ID NO: 33751 - DNA, 20 bp, Artificial Sequence
  chemically synthesized
tttttttttttaacctcaag

SEQ ID NO: 33752 - DNA, 20 bp, Artificial Sequence
  chemically synthesized
acctcaagaagtatttgtcc

SEQ ID NO: 33753 - DNA, 20 bp, Artificial Sequence
  chemically synthesized
tcaagaagtatttgtcctgg

SEQ ID NO: 33754 - DNA, 20 bp, Artificial Sequence
  chemically synthesized
ttgtcctggaagaatgcata

SEQ ID NO: 33755 - DNA, 20 bp, Artificial Sequence
  chemically synthesized
gaagaatgcatatggaacta

SEQ ID NO: 33756 - DNA, 20 bp, Artificial Sequence
  chemically synthesized
tggaactacagtttgaaact

SEQ ID NO: 33757 - DNA, 20 bp, Artificial Sequence
  chemically synthesized
acttggacttgcatatacca

SEQ ID NO: 33758 - DNA, 20 bp, Artificial Sequence
  chemically synthesized
cttggacttgcatataccat

SEQ ID NO: 33759 - DNA, 20 bp, Artificial Sequence
  chemically synthesized
gcatataccatgggttccct

SEQ ID NO: 33760 - DNA, 20 bp, Artificial Sequence
  chemically synthesized
catataccatgggttccctc

SEQ ID NO: 33761 - DNA, 20 bp, Artificial Sequence
  chemically synthesized
ccatgggttccctcaggcct

SEQ ID NO: 33762 - DNA, 20 bp, Artificial Sequence
  chemically synthesized
catgggttccctcaggcctc

SEQ ID NO: 33763 - DNA, 20 bp, Artificial Sequence
  chemically synthesized
atgggttccctcaggcctca

SEQ ID NO: 33764 - DNA, 20 bp, Artificial Sequence
  chemically synthesized
tcttgcatttcctctgacat

SEQ ID NO: 33765 - DNA, 20 bp, Artificial Sequence
  chemically synthesized
ttgcatttcctctgacatca

SEQ ID NO: 33766 - DNA, 20 bp, Artificial Sequence
  chemically synthesized
tgacatcagagaatgcactc

SEQ ID NO: 33767 - DNA, 20 bp, Artificial Sequence
  chemically synthesized
agagaatgcactccagcccc

SEQ ID NO: 33768 - DNA, 20 bp, Artificial Sequence
  chemically synthesized
gagaatgcactccagcccct

SEQ ID NO: 33769 - DNA, 20 bp, Artificial Sequence
  chemically synthesized
tgcactccagcccctaggac

SEQ ID NO: 33770 - DNA, 20 bp, Artificial Sequence
  chemically synthesized
cccctaggacgagccccccc

SEQ ID NO: 33771 - DNA, 20 bp, Artificial Sequence
  chemically synthesized
ccctaggacgagcccccccc

SEQ ID NO: 33772 - DNA, 20 bp, Artificial Sequence
  chemically synthesized
cctaggacgagcccccccca

SEQ ID NO: 33773 - DNA, 20 bp, Artificial Sequence
  chemically synthesized
gagccccccccagggaaaca

SEQ ID NO: 33774 - DNA, 20 bp, Artificial Sequence
  chemically synthesized
aacatggcctgcatttccat

SEQ ID NO: 33775 - DNA, 20 bp, Artificial Sequence
  chemically synthesized
ccatcagaattgctctctgt

SEQ ID NO: 33776 - DNA, 20 bp, Artificial Sequence
  chemically synthesized
catcagaattgctctctgta

SEQ ID NO: 33777 - DNA, 20 bp, Artificial Sequence
  chemically synthesized
gctctctgtaaggatgtata

SEQ ID NO: 33778 - DNA, 20 bp, Artificial Sequence
  chemically synthesized
tgtaaggatgtatatagctt

SEQ ID NO: 33779 - DNA, 20 bp, Artificial Sequence
  chemically synthesized
gtatcctctctactttgaaa

SEQ ID NO: 33780 - DNA, 20 bp, Artificial Sequence
  chemically synthesized
atcctctctactttgaaaca

SEQ ID NO: 33781 - DNA, 20 bp, Artificial Sequence
  chemically synthesized
tactttgaaacagagtatct

SEQ ID NO: 33782 - DNA, 20 bp, Artificial Sequence
  chemically synthesized
acaaaccacttcccctttaa

SEQ ID NO: 33783 - DNA, 20 bp, Artificial Sequence
  chemically synthesized
cacttcccctttaaaagtac

SEQ ID NO: 33784 - DNA, 20 bp, Artificial Sequence
  chemically synthesized
actagatatatctttcactg

SEQ ID NO: 33785 - DNA, 20 bp, Artificial Sequence
  chemically synthesized
tatatctttcactgtggaaa

SEQ ID NO: 33786 - DNA, 20 bp, Artificial Sequence
  chemically synthesized
atatctttcactgtggaaat

SEQ ID NO: 33787 - DNA, 20 bp, Artificial Sequence
  chemically synthesized
tggaaataggtgtcaaccgc

SEQ ID NO: 33788 - DNA, 20 bp, Artificial Sequence
  chemically synthesized
aataggtgtcaaccgccagt

SEQ ID NO: 33789 - DNA, 20 bp, Artificial Sequence
  chemically synthesized
ataggtgtcaaccgccagtc

SEQ ID NO: 33790 - DNA, 20 bp, Artificial Sequence
  chemically synthesized
ggatgccttttatcccgtga

SEQ ID NO: 33791 - DNA, 20 bp, Artificial Sequence
  chemically synthesized
tgccttttatcccgtgatgg

SEQ ID NO: 33792 - DNA, 20 bp, Artificial Sequence
  chemically synthesized
tttatcccgtgatggtggaa

SEQ ID NO: 33793 - DNA, 20 bp, Artificial Sequence
  chemically synthesized
tagtgatttctcaccgaaat

SEQ ID NO: 33794 - DNA, 20 bp, Artificial Sequence
  chemically synthesized
agtgatttctcaccgaaatc

SEQ ID NO: 33795 - DNA, 20 bp, Artificial Sequence
  chemically synthesized
gtgatttctcaccgaaatca

SEQ ID NO: 33796 - DNA, 20 bp, Artificial Sequence
  chemically synthesized
gatttctcaccgaaatcagg

SEQ ID NO: 33797 - DNA, 20 bp, Artificial Sequence
  chemically synthesized
tttctcaccgaaatcaggga

SEQ ID NO: 33798 - DNA, 20 bp, Artificial Sequence
  chemically synthesized
tcagggagagccactaactc

SEQ ID NO: 33799 - DNA, 20 bp, Artificial Sequence
  chemically synthesized
aactctggcctctatcaacc

SEQ ID NO: 33800 - DNA, 20 bp, Artificial Sequence
  chemically synthesized
ctctggcctctatcaaccca

SEQ ID NO: 33801 - DNA, 20 bp, Artificial Sequence
  chemically synthesized
ctggcctctatcaacccaga

SEQ ID NO: 33802 - DNA, 20 bp, Artificial Sequence
  chemically synthesized
atcaacccagagagattgca

SEQ ID NO: 33803 - DNA, 20 bp, Artificial Sequence
  chemically synthesized
gagattgcatggttcttcaa

SEQ ID NO: 33804 - DNA, 20 bp, Artificial Sequence
  chemically synthesized
gattgcatggttcttcaatg

SEQ ID NO: 33805 - DNA, 20 bp, Artificial Sequence
  chemically synthesized
catggttcttcaatggagat

SEQ ID NO: 33806 - DNA, 20 bp, Artificial Sequence
  chemically synthesized
ttcaatggagatcagatgtt

SEQ ID NO: 33807 - DNA, 20 bp, Artificial Sequence
  chemically synthesized
cacttcatctttttattttt

SEQ ID NO: 33808 - DNA, 20 bp, Artificial Sequence
  chemically synthesized
ttttattttttagaatcatg

SEQ ID NO: 33809 - DNA, 20 bp, Artificial Sequence
  chemically synthesized
attttttagaatcatgcggc

SEQ ID NO: 33810 - DNA, 20 bp, Artificial Sequence
  chemically synthesized
ttttttagaatcatgcggct

SEQ ID NO: 33811 - DNA, 20 bp, Artificial Sequence
  chemically synthesized
tagaatcatgcggctgggtg

SEQ ID NO: 33812 - DNA, 20 bp, Artificial Sequence
  chemically synthesized
aatcatgcggctgggtgtag

SEQ ID NO: 33813 - DNA, 20 bp, Artificial Sequence
  chemically synthesized
gtggctcacgcctgtaatcc

SEQ ID NO: 33814 - DNA, 20 bp, Artificial Sequence
  chemically synthesized
acgcctgtaatcctagcact

SEQ ID NO: 33815 - DNA, 20 bp, Artificial Sequence
  chemically synthesized
cgcctgtaatcctagcactt

SEQ ID NO: 33816 - DNA, 20 bp, Artificial Sequence
  chemically synthesized
gcctgtaatcctagcactta

SEQ ID NO: 33817 - DNA, 20 bp, Artificial Sequence
  chemically synthesized
ctgtaatcctagcacttagg

SEQ ID NO: 33818 - DNA, 20 bp, Artificial Sequence
  chemically synthesized
tgtaatcctagcacttaggg

SEQ ID NO: 33819 - DNA, 20 bp, Artificial Sequence
  chemically synthesized
tcctagcacttagggaggcc

SEQ ID NO: 33820 - DNA, 20 bp, Artificial Sequence
  chemically synthesized
cctagcacttagggaggcca

SEQ ID NO: 33821 - DNA, 20 bp, Artificial Sequence
  chemically synthesized
agcacttagggaggccaagg

SEQ ID NO: 33822 - DNA, 20 bp, Artificial Sequence
  chemically synthesized
gcacttagggaggccaaggc

SEQ ID NO: 33823 - DNA, 20 bp, Artificial Sequence
  chemically synthesized
cttagggaggccaaggcagg

SEQ ID NO: 33824 - DNA, 20 bp, Artificial Sequence
  chemically synthesized
ggccaaggcaggcagatcat

SEQ ID NO: 33825 - DNA, 20 bp, Artificial Sequence
  chemically synthesized
gccaaggcaggcagatcatg

SEQ ID NO: 33826 - DNA, 20 bp, Artificial Sequence
  chemically synthesized
aggcaggcagatcatgaggt

SEQ ID NO: 33827 - DNA, 20 bp, Artificial Sequence
  chemically synthesized
ggcaggcagatcatgaggtc

SEQ ID NO: 33828 - DNA, 20 bp, Artificial Sequence
  chemically synthesized
caggcagatcatgaggtcag

SEQ ID NO: 33829 - DNA, 20 bp, Artificial Sequence
  chemically synthesized
gatcatgaggtcaggagttc

SEQ ID NO: 33830 - DNA, 20 bp, Artificial Sequence
  chemically synthesized
tgaggtcaggagttcgagac

SEQ ID NO: 33831 - DNA, 20 bp, Artificial Sequence
  chemically synthesized
tcaggagttcgagaccagcc

SEQ ID NO: 33832 - DNA, 20 bp, Artificial Sequence
  chemically synthesized
cgagaccagcctagtcaaca

SEQ ID NO: 33833 - DNA, 20 bp, Artificial Sequence
  chemically synthesized
actaaaaatacaaaaaaaat

SEQ ID NO: 33834 - DNA, 20 bp, Artificial Sequence
  chemically synthesized
aaaatacaaaaaaaattagc

SEQ ID NO: 33835 - DNA, 20 bp, Artificial Sequence
  chemically synthesized
aaatacaaaaaaaattagct

SEQ ID NO: 33836 - DNA, 20 bp, Artificial Sequence
  chemically synthesized
caaaaaaaattagctgggca

SEQ ID NO: 33837 - DNA, 20 bp, Artificial Sequence
  chemically synthesized
aaaaaattagctgggcatgg

SEQ ID NO: 33838 - DNA, 20 bp, Artificial Sequence
  chemically synthesized
aaattagctgggcatggtgg

SEQ ID NO: 33839 - DNA, 20 bp, Artificial Sequence
  chemically synthesized
aattagctgggcatggtggc

SEQ ID NO: 33840 - DNA, 20 bp, Artificial Sequence
  chemically synthesized
gtggcgggcacctgtaatcc

SEQ ID NO: 33841 - DNA, 20 bp, Artificial Sequence
  chemically synthesized
cacctgtaatcccagctact

SEQ ID NO: 33842 - DNA, 20 bp, Artificial Sequence
  chemically synthesized
acctgtaatcccagctactt

SEQ ID NO: 33843 - DNA, 20 bp, Artificial Sequence
  chemically synthesized
ctgtaatcccagctacttgg

SEQ ID NO: 33844 - DNA, 20 bp, Artificial Sequence
  chemically synthesized
tgtaatcccagctacttggg

SEQ ID NO: 33845 - DNA, 20 bp, Artificial Sequence
  chemically synthesized
tcccagctacttgggaggct

SEQ ID NO: 33846 - DNA, 20 bp, Artificial Sequence
  chemically synthesized
cccagctacttgggaggctg

SEQ ID NO: 33847 - DNA, 20 bp, Artificial Sequence
  chemically synthesized
agctacttgggaggctgagg

SEQ ID NO: 33848 - DNA, 20 bp, Artificial Sequence
  chemically synthesized
gctacttgggaggctgaggc

SEQ ID NO: 33849 - DNA, 20 bp, Artificial Sequence
  chemically synthesized
tacttgggaggctgaggcag

SEQ ID NO: 33850 - DNA, 20 bp, Artificial Sequence
  chemically synthesized
ggcaggagaatcacttgaac

SEQ ID NO: 33851 - DNA, 20 bp, Artificial Sequence
  chemically synthesized
caggagaatcacttgaaccg

SEQ ID NO: 33852 - DNA, 20 bp, Artificial Sequence
  chemically synthesized
ggagaatcacttgaaccgga

SEQ ID NO: 33853 - DNA, 20 bp, Artificial Sequence
  chemically synthesized
gagaatcacttgaaccggag

SEQ ID NO: 33854 - DNA, 20 bp, Artificial Sequence
  chemically synthesized
aatcacttgaaccggagagg

SEQ ID NO: 33855 - DNA, 20 bp, Artificial Sequence
  chemically synthesized
tcacttgaaccggagaggca

SEQ ID NO: 33856 - DNA, 20 bp, Artificial Sequence
  chemically synthesized
cacttgaaccggagaggcag

SEQ ID NO: 33857 - DNA, 20 bp, Artificial Sequence
  chemically synthesized
aaccggagaggcagaggttg

SEQ ID NO: 33858 - DNA, 20 bp, Artificial Sequence
  chemically synthesized
ggagaggcagaggttgcagt

SEQ ID NO: 33859 - DNA, 20 bp, Artificial Sequence
  chemically synthesized
ggcagaggttgcagtgagct

SEQ ID NO: 33860 - DNA, 20 bp, Artificial Sequence
  chemically synthesized
gagattgcaccattgcactc

SEQ ID NO: 33861 - DNA, 20 bp, Artificial Sequence
  chemically synthesized
ttgcaccattgcactccagc

SEQ ID NO: 33862 - DNA, 20 bp, Artificial Sequence
  chemically synthesized
tgcaccattgcactccagcc

SEQ ID NO: 33863 - DNA, 20 bp, Artificial Sequence
  chemically synthesized
attgcactccagccaggcaa

SEQ ID NO: 33864 - DNA, 20 bp, Artificial Sequence
  chemically synthesized
ctccagccaggcaacagtgc

SEQ ID NO: 33865 - DNA, 20 bp, Artificial Sequence
  chemically synthesized
catctcaaacaaacaaacaa

SEQ ID NO: 33866 - DNA, 20 bp, Artificial Sequence
  chemically synthesized
tcaaacaaacaaacaaaaga

SEQ ID NO: 33867 - DNA, 20 bp, Artificial Sequence
  chemically synthesized
acaaacaaacaaaagaaaga

SEQ ID NO: 33868 - DNA, 20 bp, Artificial Sequence
  chemically synthesized
acaaacaaaagaaagaaaga

SEQ ID NO: 33869 - DNA, 20 bp, Artificial Sequence
  chemically synthesized
acaaaagaaagaaagaaaga

SEQ ID NO: 33870 - DNA, 20 bp, Artificial Sequence
  chemically synthesized
aaagaaagaaagaaagaaag

SEQ ID NO: 33871 - DNA, 20 bp, Artificial Sequence
  chemically synthesized
aaagaaagaaagaaagtggc

SEQ ID NO: 33872 - DNA, 20 bp, Artificial Sequence
  chemically synthesized
aagaaagaaagtggccagaa

SEQ ID NO: 33873 - DNA, 20 bp, Artificial Sequence
  chemically synthesized
agaaagaaagtggccagaat

SEQ ID NO: 33874 - DNA, 20 bp, Artificial Sequence
  chemically synthesized
gaatgggaatgtttacgtga

SEQ ID NO: 33875 - DNA, 20 bp, Artificial Sequence
  chemically synthesized
aatgtttacgtgatagaaat

SEQ ID NO: 33876 - DNA, 20 bp, Artificial Sequence
  chemically synthesized
aaattggcaaatgctaaact

SEQ ID NO: 33877 - DNA, 20 bp, Artificial Sequence
  chemically synthesized
aattggcaaatgctaaactc

SEQ ID NO: 33878 - DNA, 20 bp, Artificial Sequence
  chemically synthesized
attggcaaatgctaaactca

SEQ ID NO: 33879 - DNA, 20 bp, Artificial Sequence
  chemically synthesized
cagggctttcccctgctccc

SEQ ID NO: 33880 - DNA, 20 bp, Artificial Sequence
  chemically synthesized
gggctttcccctgctcccca

SEQ ID NO: 33881 - DNA, 20 bp, Artificial Sequence
  chemically synthesized
gctttcccctgctccccaga

SEQ ID NO: 33882 - DNA, 20 bp, Artificial Sequence
  chemically synthesized
tcccctgctccccagagagt

SEQ ID NO: 33883 - DNA, 20 bp, Artificial Sequence
  chemically synthesized
tccccagagagtcagtttat

SEQ ID NO: 33884 - DNA, 20 bp, Artificial Sequence
  chemically synthesized
gagagtcagtttatcagcac

SEQ ID NO: 33885 - DNA, 20 bp, Artificial Sequence
  chemically synthesized
tatcagcactggacgtaaca

SEQ ID NO: 33886 - DNA, 20 bp, Artificial Sequence
  chemically synthesized
ctggacgtaacatagttcat

SEQ ID NO: 33887 - DNA, 20 bp, Artificial Sequence
  chemically synthesized
ggacgtaacatagttcataa

SEQ ID NO: 33888 - DNA, 20 bp, Artificial Sequence
  chemically synthesized
agttcataagagcattgccg

SEQ ID NO: 33889 - DNA, 20 bp, Artificial Sequence
  chemically synthesized
tcataagagcattgccgcgg

SEQ ID NO: 33890 - DNA, 20 bp, Artificial Sequence
  chemically synthesized
aagagcattgccgcggaagc

SEQ ID NO: 33891 - DNA, 20 bp, Artificial Sequence
  chemically synthesized
cggaagccagcctgcctacc

SEQ ID NO: 33892 - DNA, 20 bp, Artificial Sequence
  chemically synthesized
ggaagccagcctgcctacct

SEQ ID NO: 33893 - DNA, 20 bp, Artificial Sequence
  chemically synthesized
gcctacctgggcttccatcc

SEQ ID NO: 33894 - DNA, 20 bp, Artificial Sequence
  chemically synthesized
cctgggcttccatcctggct

SEQ ID NO: 33895 - DNA, 20 bp, Artificial Sequence
  chemically synthesized
tcggcatgtactaaccttgt

SEQ ID NO: 33896 - DNA, 20 bp, Artificial Sequence
  chemically synthesized
gttggcctaatcatttaact

SEQ ID NO: 33897 - DNA, 20 bp, Artificial Sequence
  chemically synthesized
aatcatttaactcagcacct

SEQ ID NO: 33898 - DNA, 20 bp, Artificial Sequence
  chemically synthesized
gcatctactgtttctgtaaa

SEQ ID NO: 33899 - DNA, 20 bp, Artificial Sequence
  chemically synthesized
tctactgtttctgtaaatag

SEQ ID NO: 33900 - DNA, 20 bp, Artificial Sequence
  chemically synthesized
aaatagcagtaactacctca

SEQ ID NO: 33901 - DNA, 20 bp, Artificial Sequence
  chemically synthesized
gcagtaactacctcacagaa

SEQ ID NO: 33902 - DNA, 20 bp, Artificial Sequence
  chemically synthesized
ctacctcacagaaaagcaca

SEQ ID NO: 33903 - DNA, 20 bp, Artificial Sequence
  chemically synthesized
acagaaaagcacatagcaca

SEQ ID NO: 33904 - DNA, 20 bp, Artificial Sequence
  chemically synthesized
aaagcacatagcacatggac

SEQ ID NO: 33905 - DNA, 20 bp, Artificial Sequence
  chemically synthesized
tgttaaccctgattattatt

SEQ ID NO: 33906 - DNA, 20 bp, Artificial Sequence
  chemically synthesized
cctgattattattaagctgc

SEQ ID NO: 33907 - DNA, 20 bp, Artificial Sequence
  chemically synthesized
tgattattattaagctgcca

SEQ ID NO: 33908 - DNA, 20 bp, Artificial Sequence
  chemically synthesized
tgccagagataacctatttg

SEQ ID NO: 33909 - DNA, 20 bp, Artificial Sequence
  chemically synthesized
cctatttgtagattataaaa

SEQ ID NO: 33910 - DNA, 20 bp, Artificial Sequence
  chemically synthesized
tagattataaaacagaaact

SEQ ID NO: 33911 - DNA, 20 bp, Artificial Sequence
  chemically synthesized
gataattgatatgacttgcc

SEQ ID NO: 33912 - DNA, 20 bp, Artificial Sequence
  chemically synthesized
ataattgatatgacttgcca

SEQ ID NO: 33913 - DNA, 20 bp, Artificial Sequence
  chemically synthesized
tatgacttgccaaggacatg

SEQ ID NO: 33914 - DNA, 20 bp, Artificial Sequence
  chemically synthesized
acttgccaaggacatgtagt

SEQ ID NO: 33915 - DNA, 20 bp, Artificial Sequence
  chemically synthesized
tgccaaggacatgtagttgg

SEQ ID NO: 33916 - DNA, 20 bp, Artificial Sequence
  chemically synthesized
gccaaggacatgtagttggt

SEQ ID NO: 33917 - DNA, 20 bp, Artificial Sequence
  chemically synthesized
aaggacatgtagttggtggg

SEQ ID NO: 33918 - DNA, 20 bp, Artificial Sequence
  chemically synthesized
gacatgtagttggtgggtgg

SEQ ID NO: 33919 - DNA, 20 bp, Artificial Sequence
  chemically synthesized
tagttggtgggtggcagaac

SEQ ID NO: 33920 - DNA, 20 bp, Artificial Sequence
  chemically synthesized
agttggtgggtggcagaacg

SEQ ID NO: 33921 - DNA, 20 bp, Artificial Sequence
  chemically synthesized
gttggtgggtggcagaacga

SEQ ID NO: 33922 - DNA, 20 bp, Artificial Sequence
  chemically synthesized
gtgggtggcagaacgagggc

SEQ ID NO: 33923 - DNA, 20 bp, Artificial Sequence
  chemically synthesized
gggtggcagaacgagggctg

SEQ ID NO: 33924 - DNA, 20 bp, Artificial Sequence
  chemically synthesized
gcagaacgagggctggagcc

SEQ ID NO: 33925 - DNA, 20 bp, Artificial Sequence
  chemically synthesized
gagggctggagcccagttcc

SEQ ID NO: 33926 - DNA, 20 bp, Artificial Sequence
  chemically synthesized
agggctggagcccagttccc

SEQ ID NO: 33927 - DNA, 20 bp, Artificial Sequence
  chemically synthesized
gggctggagcccagttccca

SEQ ID NO: 33928 - DNA, 20 bp, Artificial Sequence
  chemically synthesized
cttttcattaccccacaaaa

SEQ ID NO: 33929 - DNA, 20 bp, Artificial Sequence
  chemically synthesized
ttttcattaccccacaaaac

SEQ ID NO: 33930 - DNA, 20 bp, Artificial Sequence
  chemically synthesized
gtgtgtttccttttttcata

SEQ ID NO: 33931 - DNA, 20 bp, Artificial Sequence
  chemically synthesized
tctatctttttttttttttt

SEQ ID NO: 33932 - DNA, 20 bp, Artificial Sequence
  chemically synthesized
tcttttttttttttttgaga

SEQ ID NO: 33933 - DNA, 20 bp, Artificial Sequence
  chemically synthesized
cttttttttttttttgagac

SEQ ID NO: 33934 - DNA, 20 bp, Artificial Sequence
  chemically synthesized
ttttttttttttttgagaca

SEQ ID NO: 33935 - DNA, 20 bp, Artificial Sequence
  chemically synthesized
cagggtcttactctgttgcc

SEQ ID NO: 33936 - DNA, 20 bp, Artificial Sequence
  chemically synthesized
agggtcttactctgttgccc

SEQ ID NO: 33937 - DNA, 20 bp, Artificial Sequence
  chemically synthesized
tcttactctgttgcccaggc

SEQ ID NO: 33938 - DNA, 20 bp, Artificial Sequence
  chemically synthesized
ttactctgttgcccaggctg

SEQ ID NO: 33939 - DNA, 20 bp, Artificial Sequence
  chemically synthesized
ctgttgcccaggctggagtg

SEQ ID NO: 33940 - DNA, 20 bp, Artificial Sequence
  chemically synthesized
ttgcccaggctggagtgcag

SEQ ID NO: 33941 - DNA, 20 bp, Artificial Sequence
  chemically synthesized
acctcctccgcctctcacct

SEQ ID NO: 33942 - DNA, 20 bp, Artificial Sequence
  chemically synthesized
gcctctcacctcagcctcct

SEQ ID NO: 33943 - DNA, 20 bp, Artificial Sequence
  chemically synthesized
tctcacctcagcctcctgag

SEQ ID NO: 33944 - DNA, 20 bp, Artificial Sequence
  chemically synthesized
acctcagcctcctgagtagc

SEQ ID NO: 33945 - DNA, 20 bp, Artificial Sequence
  chemically synthesized
cctcagcctcctgagtagct

SEQ ID NO: 33946 - DNA, 20 bp, Artificial Sequence
  chemically synthesized
ctcctgagtagctgggacta

SEQ ID NO: 33947 - DNA, 20 bp, Artificial Sequence
  chemically synthesized
gactacagcaccaacacgcc

SEQ ID NO: 33948 - DNA, 20 bp, Artificial Sequence
  chemically synthesized
taattttcgtaatgtttttg

SEQ ID NO: 33949 - DNA, 20 bp, Artificial Sequence
  chemically synthesized
attttcgtaatgtttttgta

SEQ ID NO: 33950 - DNA, 20 bp, Artificial Sequence
  chemically synthesized
tcgtaatgtttttgtagaga

SEQ ID NO: 33951 - DNA, 20 bp, Artificial Sequence
  chemically synthesized
gtaatgtttttgtagagatg

SEQ ID NO: 33952 - DNA, 20 bp, Artificial Sequence
  chemically synthesized
tggagtttcgccatgttgcc

SEQ ID NO: 33953 - DNA, 20 bp, Artificial Sequence
  chemically synthesized
ggagtttcgccatgttgccc

SEQ ID NO: 33954 - DNA, 20 bp, Artificial Sequence
  chemically synthesized
tttcgccatgttgcccaggc

SEQ ID NO: 33955 - DNA, 20 bp, Artificial Sequence
  chemically synthesized
caggctggtcttgaactcct

SEQ ID NO: 33956 - DNA, 20 bp, Artificial Sequence
  chemically synthesized
cttgaactcctgagttcacc

SEQ ID NO: 33957 - DNA, 20 bp, Artificial Sequence
  chemically synthesized
ttgaactcctgagttcaccc

SEQ ID NO: 33958 - DNA, 20 bp, Artificial Sequence
  chemically synthesized
gaactcctgagttcacccag

SEQ ID NO: 33959 - DNA, 20 bp, Artificial Sequence
  chemically synthesized
caggagtgattcgcccacct

SEQ ID NO: 33960 - DNA, 20 bp, Artificial Sequence
  chemically synthesized
tcgcccacctcggcctccca

SEQ ID NO: 33961 - DNA, 20 bp, Artificial Sequence
  chemically synthesized
acctcggcctcccaaagtgc

SEQ ID NO: 33962 - DNA, 20 bp, Artificial Sequence
  chemically synthesized
cctcggcctcccaaagtgct

SEQ ID NO: 33963 - DNA, 20 bp, Artificial Sequence
  chemically synthesized
ctcccaaagtgctgggatta

SEQ ID NO: 33964 - DNA, 20 bp, Artificial Sequence
  chemically synthesized
tcccaaagtgctgggattac

SEQ ID NO: 33965 - DNA, 20 bp, Artificial Sequence
  chemically synthesized
agtgctgggattacaggtgt

SEQ ID NO: 33966 - DNA, 20 bp, Artificial Sequence
  chemically synthesized
caggtgtgagccaccatgcc

SEQ ID NO: 33967 - DNA, 20 bp, Artificial Sequence
  chemically synthesized
ctaataaaactctttgctca

SEQ ID NO: 33968 - DNA, 20 bp, Artificial Sequence
  chemically synthesized
tgctcaaagcctatataact

SEQ ID NO: 33969 - DNA, 20 bp, Artificial Sequence
  chemically synthesized
accctttaacccatatgaaa

SEQ ID NO: 33970 - DNA, 20 bp, Artificial Sequence
  chemically synthesized
ccctttaacccatatgaaat

SEQ ID NO: 33971 - DNA, 20 bp, Artificial Sequence
  chemically synthesized
ttcctgtattttcaactcac

SEQ ID NO: 33972 - DNA, 20 bp, Artificial Sequence
  chemically synthesized
ctgtattttcaactcactgg

SEQ ID NO: 33973 - DNA, 20 bp, Artificial Sequence
  chemically synthesized
tgtattttcaactcactggt

SEQ ID NO: 33974 - DNA, 20 bp, Artificial Sequence
  chemically synthesized
ttctgtcttccccctttatg

SEQ ID NO: 33975 - DNA, 20 bp, Artificial Sequence
  chemically synthesized
ccctttatgtagatgatcca

SEQ ID NO: 33976 - DNA, 20 bp, Artificial Sequence
  chemically synthesized
ttatgtagatgatccaaagt

SEQ ID NO: 33977 - DNA, 20 bp, Artificial Sequence
  chemically synthesized
atgtagatgatccaaagtca

SEQ ID NO: 33978 - DNA, 20 bp, Artificial Sequence
  chemically synthesized
gtagatgatccaaagtcaga

SEQ ID NO: 33979 - DNA, 20 bp, Artificial Sequence
  chemically synthesized
agatgatccaaagtcagaga

SEQ ID NO: 33980 - DNA, 20 bp, Artificial Sequence
  chemically synthesized
gatgatccaaagtcagagag

SEQ ID NO: 33981 - DNA, 20 bp, Artificial Sequence
  chemically synthesized
atgatccaaagtcagagaga

SEQ ID NO: 33982 - DNA, 20 bp, Artificial Sequence
  chemically synthesized
tgatccaaagtcagagagag

SEQ ID NO: 33983 - DNA, 20 bp, Artificial Sequence
  chemically synthesized
ccaaagtcagagagaggggt

SEQ ID NO: 33984 - DNA, 20 bp, Artificial Sequence
  chemically synthesized
aagtcagagagaggggttgg

SEQ ID NO: 33985 - DNA, 20 bp, Artificial Sequence
  chemically synthesized
gagagaggggttggaagcat

SEQ ID NO: 33986 - DNA, 20 bp, Artificial Sequence
  chemically synthesized
agaggggttggaagcatgag

SEQ ID NO: 33987 - DNA, 20 bp, Artificial Sequence
  chemically synthesized
ttggaagcatgagtagcccg

SEQ ID NO: 33988 - DNA, 20 bp, Artificial Sequence
  chemically synthesized
gtagcccgtggcttcctgaa

SEQ ID NO: 33989 - DNA, 20 bp, Artificial Sequence
  chemically synthesized
ccgtggcttcctgaatagcc

SEQ ID NO: 33990 - DNA, 20 bp, Artificial Sequence
  chemically synthesized
cgtggcttcctgaatagcct

SEQ ID NO: 33991 - DNA, 20 bp, Artificial Sequence
  chemically synthesized
gtggcttcctgaatagcctg

SEQ ID NO: 33992 - DNA, 20 bp, Artificial Sequence
  chemically synthesized
cttcctgaatagcctgggga

SEQ ID NO: 33993 - DNA, 20 bp, Artificial Sequence
  chemically synthesized
ctggggaaagcaacttctga

SEQ ID NO: 33994 - DNA, 20 bp, Artificial Sequence
  chemically synthesized
ggaaagcaacttctgatgga

SEQ ID NO: 33995 - DNA, 20 bp, Artificial Sequence
  chemically synthesized
ttctgatggacagacattgc

SEQ ID NO: 33996 - DNA, 20 bp, Artificial Sequence
  chemically synthesized
ctgatggacagacattgcga

SEQ ID NO: 33997 - DNA, 20 bp, Artificial Sequence
  chemically synthesized
gacattgcgagagcgaatgc

SEQ ID NO: 33998 - DNA, 20 bp, Artificial Sequence
  chemically synthesized
ttgctgatctcctctctata

SEQ ID NO: 33999 - DNA, 20 bp, Artificial Sequence
  chemically synthesized
tatatggttcttaccactta

SEQ ID NO: 34000 - DNA, 20 bp, Artificial Sequence
  chemically synthesized
ggttcttaccacttaaagac

SEQ ID NO: 34001 - DNA, 20 bp, Artificial Sequence
  chemically synthesized
gttcttaccacttaaagacg

SEQ ID NO: 34002 - DNA, 20 bp, Artificial Sequence
  chemically synthesized
taccacttaaagacgaggtt

SEQ ID NO: 34003 - DNA, 20 bp, Artificial Sequence
  chemically synthesized
acttaaagacgaggttgagc

SEQ ID NO: 34004 - DNA, 20 bp, Artificial Sequence
  chemically synthesized
gttgagccagtctccaatca

SEQ ID NO: 34005 - DNA, 20 bp, Artificial Sequence
  chemically synthesized
tctccaatcacagctaccca

SEQ ID NO: 34006 - DNA, 20 bp, Artificial Sequence
  chemically synthesized
ctccaatcacagctacccaa

SEQ ID NO: 34007 - DNA, 20 bp, Artificial Sequence
  chemically synthesized
ccaatcacagctacccaaag

SEQ ID NO: 34008 - DNA, 20 bp, Artificial Sequence
  chemically synthesized
ccaaaggagtttaatgccca

SEQ ID NO: 34009 - DNA, 20 bp, Artificial Sequence
  chemically synthesized
ttaatgcccacagcttcctg

SEQ ID NO: 34010 - DNA, 20 bp, Artificial Sequence
  chemically synthesized
tgcccacagcttcctgaaga

SEQ ID NO: 34011 - DNA, 20 bp, Artificial Sequence
  chemically synthesized
cagcttcctgaagatggaac

SEQ ID NO: 34012 - DNA, 20 bp, Artificial Sequence
  chemically synthesized
ttcctgaagatggaaccaga

SEQ ID NO: 34013 - DNA, 20 bp, Artificial Sequence
  chemically synthesized
tcctgaagatggaaccagat

SEQ ID NO: 34014 - DNA, 20 bp, Artificial Sequence
  chemically synthesized
cctgaagatggaaccagatg

SEQ ID NO: 34015 - DNA, 20 bp, Artificial Sequence
  chemically synthesized
gaagatggaaccagatgggg

SEQ ID NO: 34016 - DNA, 20 bp, Artificial Sequence
  chemically synthesized
agatggaaccagatggggaa

SEQ ID NO: 34017 - DNA, 20 bp, Artificial Sequence
  chemically synthesized
gatggaaccagatggggaag

SEQ ID NO: 34018 - DNA, 20 bp, Artificial Sequence
  chemically synthesized
accagatggggaagaggacg

SEQ ID NO: 34019 - DNA, 20 bp, Artificial Sequence
  chemically synthesized
agatggggaagaggacgtag

SEQ ID NO: 34020 - DNA, 20 bp, Artificial Sequence
  chemically synthesized
gatggggaagaggacgtaga

SEQ ID NO: 34021 - DNA, 20 bp, Artificial Sequence
  chemically synthesized
aggacgtagaaggcattcct

SEQ ID NO: 34022 - DNA, 20 bp, Artificial Sequence
  chemically synthesized
ggacgtagaaggcattcctg

SEQ ID NO: 34023 - DNA, 20 bp, Artificial Sequence
  chemically synthesized
attcctgaggtctgcgatca

SEQ ID NO: 34024 - DNA, 20 bp, Artificial Sequence
  chemically synthesized
ggtctgcgatcacggacacc

SEQ ID NO: 34025 - DNA, 20 bp, Artificial Sequence
  chemically synthesized
tcacggacaccaagatgaac

SEQ ID NO: 34026 - DNA, 20 bp, Artificial Sequence
  chemically synthesized
acaccaagatgaaccagtcc

SEQ ID NO: 34027 - DNA, 20 bp, Artificial Sequence
  chemically synthesized
caccaagatgaaccagtcct

SEQ ID NO: 34028 - DNA, 20 bp, Artificial Sequence
  chemically synthesized
ccaagatgaaccagtcctgg

SEQ ID NO: 34029 - DNA, 20 bp, Artificial Sequence
  chemically synthesized
tgaaccagtcctgggagtct

SEQ ID NO: 34030 - DNA, 20 bp, Artificial Sequence
  chemically synthesized
gggagtcttggtaattcacc

SEQ ID NO: 34031 - DNA, 20 bp, Artificial Sequence
  chemically synthesized
gagtcttggtaattcacctg

SEQ ID NO: 34032 - DNA, 20 bp, Artificial Sequence
  chemically synthesized
agtcttggtaattcacctgg

SEQ ID NO: 34033 - DNA, 20 bp, Artificial Sequence
  chemically synthesized
cctggaggtaatgtgttgac

SEQ ID NO: 34034 - DNA, 20 bp, Artificial Sequence
  chemically synthesized
aatgtgttgactggatccca

SEQ ID NO: 34035 - DNA, 20 bp, Artificial Sequence
  chemically synthesized
ttgactggatcccaaagtca

SEQ ID NO: 34036 - DNA, 20 bp, Artificial Sequence
  chemically synthesized
gactggatcccaaagtcatg

SEQ ID NO: 34037 - DNA, 20 bp, Artificial Sequence
  chemically synthesized
ttcctccatcctcatttcct

SEQ ID NO: 34038 - DNA, 20 bp, Artificial Sequence
  chemically synthesized
tcctcatttccttggcacct

SEQ ID NO: 34039 - DNA, 20 bp, Artificial Sequence
  chemically synthesized
cctcatttccttggcacctc

SEQ ID NO: 34040 - DNA, 20 bp, Artificial Sequence
  chemically synthesized
catttccttggcacctcagg

SEQ ID NO: 34041 - DNA, 20 bp, Artificial Sequence
  chemically synthesized
ttggcacctcaggaagatgt

SEQ ID NO: 34042 - DNA, 20 bp, Artificial Sequence
  chemically synthesized
gcacctcaggaagatgtcag

SEQ ID NO: 34043 - DNA, 20 bp, Artificial Sequence
  chemically synthesized
acctcaggaagatgtcagca

SEQ ID NO: 34044 - DNA, 20 bp, Artificial Sequence
  chemically synthesized
agatgtcagcagagcccttg

SEQ ID NO: 34045 - DNA, 20 bp, Artificial Sequence
  chemically synthesized
cagagcccttgcagttattc

SEQ ID NO: 34046 - DNA, 20 bp, Artificial Sequence
  chemically synthesized
agagcccttgcagttattcc

SEQ ID NO: 34047 - DNA, 20 bp, Artificial Sequence
  chemically synthesized
ccttgcagttattccaggct

SEQ ID NO: 34048 - DNA, 20 bp, Artificial Sequence
  chemically synthesized
tgcagttattccaggcttgg

SEQ ID NO: 34049 - DNA, 20 bp, Artificial Sequence
  chemically synthesized
ggtggtgattgctctgctat

SEQ ID NO: 34050 - DNA, 20 bp, Artificial Sequence
  chemically synthesized
tgttttatatgccctgtatc

SEQ ID NO: 34051 - DNA, 20 bp, Artificial Sequence
  chemically synthesized
tatgccctgtatccagtatt

SEQ ID NO: 34052 - DNA, 20 bp, Artificial Sequence
  chemically synthesized
atgccctgtatccagtattc

SEQ ID NO: 34053 - DNA, 20 bp, Artificial Sequence
  chemically synthesized
atccagtattcaggtcaacc

SEQ ID NO: 34054 - DNA, 20 bp, Artificial Sequence
  chemically synthesized
gtcaacccagccctgatctt

SEQ ID NO: 34055 - DNA, 20 bp, Artificial Sequence
  chemically synthesized
attttagacaaacgtggttt

SEQ ID NO: 34056 - DNA, 20 bp, Artificial Sequence
  chemically synthesized
tttgagtccaaagatcaggg

SEQ ID NO: 34057 - DNA, 20 bp, Artificial Sequence
  chemically synthesized
aagatcagggctgggttgac

SEQ ID NO: 34058 - DNA, 20 bp, Artificial Sequence
  chemically synthesized
gggctgggttgacctgaata

SEQ ID NO: 34059 - DNA, 20 bp, Artificial Sequence
  chemically synthesized
agagcaatcaccaccaagcc

SEQ ID NO: 34060 - DNA, 20 bp, Artificial Sequence
  chemically synthesized
tcctgaggtgccaaggaaat

SEQ ID NO: 34061 - DNA, 20 bp, Artificial Sequence
  chemically synthesized
aaggaaatgaggatggagga

SEQ ID NO: 34062 - DNA, 20 bp, Artificial Sequence
  chemically synthesized
aaatgaggatggaggaagga

SEQ ID NO: 34063 - DNA, 20 bp, Artificial Sequence
  chemically synthesized
atgaatgttctccatgactt

SEQ ID NO: 34064 - DNA, 20 bp, Artificial Sequence
  chemically synthesized
agtcaacacattacctccag

SEQ ID NO: 34065 - DNA, 20 bp, Artificial Sequence
  chemically synthesized
tgtccgtgatcgcagacctc

SEQ ID NO: 34066 - DNA, 20 bp, Artificial Sequence
  chemically synthesized
gctgtgggcattaaactcct

SEQ ID NO: 34067 - DNA, 20 bp, Artificial Sequence
  chemically synthesized
tccaacccctctctctgact

SEQ ID NO: 34068 - DNA, 20 bp, Artificial Sequence
  chemically synthesized
agacagaaaaaatcctacca

SEQ ID NO: 34069 - DNA, 20 bp, Artificial Sequence
  chemically synthesized
tacaggaaagcctatttcat

SEQ ID NO: 34070 - DNA, 20 bp, Artificial Sequence
  chemically synthesized
agcctatttcatatgggtta

SEQ ID NO: 34071 - DNA, 20 bp, Artificial Sequence
  chemically synthesized
tgggttaaagggtaggacag

SEQ ID NO: 34072 - DNA, 20 bp, Artificial Sequence
  chemically synthesized
agttgaatttcgtgaaaagt

SEQ ID NO: 34073 - DNA, 20 bp, Artificial Sequence
  chemically synthesized
agttatataggctttgagca

SEQ ID NO: 34074 - DNA, 20 bp, Artificial Sequence
  chemically synthesized
actttgggaggccgaggtgg

SEQ ID NO: 34075 - DNA, 20 bp, Artificial Sequence
  chemically synthesized
ccgaggtgggcgaatcactc

SEQ ID NO: 34076 - DNA, 20 bp, Artificial Sequence
  chemically synthesized
aatcactcctgggtgaactc

SEQ ID NO: 34077 - DNA, 20 bp, Artificial Sequence
  chemically synthesized
gagaggcggaggaggttgca

SEQ ID NO: 34078 - DNA, 20 bp, Artificial Sequence
  chemically synthesized
ctgcactccagcctgggcaa

SEQ ID NO: 34079 - DNA, 20 bp, Artificial Sequence
  chemically synthesized
tgattcaacagcctgttttg

SEQ ID NO: 34080 - DNA, 20 bp, Artificial Sequence
  chemically synthesized
tggcaagtcatatcaattat

SEQ ID NO: 34081 - DNA, 20 bp, Artificial Sequence
  chemically synthesized
tctggcagcttaataataat

SEQ ID NO: 34082 - DNA, 20 bp, Artificial Sequence
  chemically synthesized
tagatgcagagaccaaggtg

SEQ ID NO: 34083 - DNA, 20 bp, Artificial Sequence
  chemically synthesized
aaggttagtacatgccgagc

SEQ ID NO: 34084 - DNA, 20 bp, Artificial Sequence
  chemically synthesized
ctggggagcaggggaaagcc

SEQ ID NO: 34085 - DNA, 20 bp, Artificial Sequence
  chemically synthesized
ttttgtttgtttgtttgaga

SEQ ID NO: 34086 - DNA, 20 bp, Artificial Sequence
  chemically synthesized
gtctcgcactgttgcctggc

SEQ ID NO: 34087 - DNA, 20 bp, Artificial Sequence
  chemically synthesized
gcctcagcctcccaagtagc

SEQ ID NO: 34088 - DNA, 20 bp, Artificial Sequence
  chemically synthesized
gccttggcctccctaagtgc

SEQ ID NO: 34089 - DNA, 20 bp, Artificial Sequence
  chemically synthesized
tgaagaaccatgcaatctct

SEQ ID NO: 34090 - DNA, 20 bp, Artificial Sequence
  chemically synthesized
ctctctgggttgatagaggc

SEQ ID NO: 34091 - DNA, 20 bp, Artificial Sequence
  chemically synthesized
aaatcactattccaccatca

SEQ ID NO: 34092 - DNA, 20 bp, Artificial Sequence
  chemically synthesized
atactctgtttcaaagtaga

SEQ ID NO: 34093 - DNA, 20 bp, Artificial Sequence
  chemically synthesized
ggggggctcgtcctaggggc

SEQ ID NO: 34094 - DNA, 20 bp, Artificial Sequence
  chemically synthesized
agtcacatagctgccatttt

SEQ ID NO: 34095 - DNA, 20 bp, Artificial Sequence
  chemically synthesized
agctgccattttatggattt

SEQ ID NO: 34096 - DNA, 20 bp, Artificial Sequence
  chemically synthesized
ttttttttttttttttgaga

SEQ ID NO: 34097 - DNA, 20 bp, Artificial Sequence
  chemically synthesized
gattctcttgccttagcctc

SEQ ID NO: 34098 - DNA, 20 bp, Artificial Sequence
  chemically synthesized
gccttagcctcccgagtagc

SEQ ID NO: 34099 - DNA, 20 bp, Artificial Sequence
  chemically synthesized
tgtgagccaccgcgcctgcc

SEQ ID NO: 34100 - DNA, 20 bp, Artificial Sequence
  chemically synthesized
caccgcgcctgcctggagtt

SEQ ID NO: 34101 - DNA, 20 bp, Artificial Sequence
  chemically synthesized
actttgggaggctgaggtgg

SEQ ID NO: 34102 - DNA, 20 bp, Artificial Sequence
  chemically synthesized
ggctgaggtgggaggattgc

SEQ ID NO: 34103 - DNA, 20 bp, Artificial Sequence
  chemically synthesized
actaaaaatacaaaaactag

SEQ ID NO: 34104 - DNA, 20 bp, Artificial Sequence
  chemically synthesized
tattcaggaggctgaggtgg

SEQ ID NO: 34105 - DNA, 20 bp, Artificial Sequence
  chemically synthesized
ttgcgccactgcactccagg

SEQ ID NO: 34106 - DNA, 20 bp, Artificial Sequence
  chemically synthesized
aaacttgttctgtttttcca

SEQ ID NO: 34107 - DNA, 20 bp, Artificial Sequence
  chemically synthesized
tttggacagcgtccatactg

SEQ ID NO: 34108 - DNA, 20 bp, Artificial Sequence
  chemically synthesized
agcgtccatactggtgggtt

SEQ ID NO: 34109 - DNA, 20 bp, Artificial Sequence
  chemically synthesized
ccagcccctgcagacagaag

SEQ ID NO: 34110 - DNA, 20 bp, Artificial Sequence
  chemically synthesized
gtggacctcgtttacctgtt

SEQ ID NO: 34111 - DNA, 20 bp, Artificial Sequence
  chemically synthesized
ttcacttctgcaatactttc

SEQ ID NO: 34112 - DNA, 20 bp, Artificial Sequence
  chemically synthesized
aaatctgcctattacagaac

SEQ ID NO: 34113 - DNA, 20 bp, Artificial Sequence
  chemically synthesized
tgcctattacagaacctgga

SEQ ID NO: 34114 - DNA, 20 bp, Artificial Sequence
  chemically synthesized
tccatgggcaaagggctcgt

SEQ ID NO: 34115 - DNA, 20 bp, Artificial Sequence
  chemically synthesized
ctctcacgagccctttgccc

SEQ ID NO: 34116 - DNA, 20 bp, Artificial Sequence
  chemically synthesized
ttcaggaaagtattgcagaa

SEQ ID NO: 34117 - DNA, 20 bp, Artificial Sequence
  chemically synthesized
agagcatgacaaaagtacaa

SEQ ID NO: 34118 - DNA, 20 bp, Artificial Sequence
  chemically synthesized
cagtatggacgctgtccaaa

SEQ ID NO: 34119 - DNA, 20 bp, Artificial Sequence
  chemically synthesized
ggaaaaacagaacaagtttc

SEQ ID NO: 34120 - DNA, 20 bp, Artificial Sequence
  chemically synthesized
agaacaagtttctggggtta

SEQ ID NO: 34121 - DNA, 20 bp, Artificial Sequence
  chemically synthesized
caagtttctggggttactga

SEQ ID NO: 34122 - DNA, 20 bp, Artificial Sequence
  chemically synthesized
ccaaagcctacaccttcaag

SEQ ID NO: 34123 - DNA, 20 bp, Artificial Sequence
  chemically synthesized
caagaagagtgtagcctgag

SEQ ID NO: 34124 - DNA, 20 bp, Artificial Sequence
  chemically synthesized
gttgcctctagaagggagaa

SEQ ID NO: 34125 - DNA, 20 bp, Artificial Sequence
  chemically synthesized
acttttgcattttgaactgt

SEQ ID NO: 34126 - DNA, 20 bp, Artificial Sequence
  chemically synthesized
tatcttttttttttttgaga

SEQ ID NO: 34127 - DNA, 20 bp, Artificial Sequence
  chemically synthesized
tctggctcagtaacccagcc

SEQ ID NO: 34128 - DNA, 20 bp, Artificial Sequence
  chemically synthesized
tcattgtgacctctacctcc

SEQ ID NO: 34129 - DNA, 20 bp, Artificial Sequence
  chemically synthesized
gatcctcccacctcagcctc

SEQ ID NO: 34130 - DNA, 20 bp, Artificial Sequence
  chemically synthesized
ttttgtatttttagtagaga

SEQ ID NO: 34131 - DNA, 20 bp, Artificial Sequence
  chemically synthesized
acctcagcctcccaaagtgc

SEQ ID NO: 34132 - DNA, 20 bp, Artificial Sequence
  chemically synthesized
caggcagatcacatgaggtc

SEQ ID NO: 34133 - DNA, 20 bp, Artificial Sequence
  chemically synthesized
cgtttctaccaaaaaatata

SEQ ID NO: 34134 - DNA, 20 bp, Artificial Sequence
  chemically synthesized
tactcgggaggctaaggcaa

SEQ ID NO: 34135 - DNA, 20 bp, Artificial Sequence
  chemically synthesized
ttatgccactgcactacagg

SEQ ID NO: 34136 - DNA, 20 bp, Artificial Sequence
  chemically synthesized
tcaagaagtatttgtcctgg

SEQ ID NO: 34137 - DNA, 20 bp, Artificial Sequence
  chemically synthesized
aacttggacttgcatatacc

SEQ ID NO: 34138 - DNA, 20 bp, Artificial Sequence
  chemically synthesized
atgggttccctcaggcctca

SEQ ID NO: 34139 - DNA, 20 bp, Artificial Sequence
  chemically synthesized
ttgcatttcctctgacatca

SEQ ID NO: 34140 - DNA, 20 bp, Artificial Sequence
  chemically synthesized
aacatggcctgcatttccat

SEQ ID NO: 34141 - DNA, 20 bp, Artificial Sequence
  chemically synthesized
ccatcagaattgctctctgt

SEQ ID NO: 34142 - DNA, 20 bp, Artificial Sequence
  chemically synthesized
gtatcctctctactttgaaa

SEQ ID NO: 34143 - DNA, 20 bp, Artificial Sequence
  chemically synthesized
aataggtgtcaaccgccagt

SEQ ID NO: 34144 - DNA, 20 bp, Artificial Sequence
  chemically synthesized
tgccttttatcccgtgatgg

SEQ ID NO: 34145 - DNA, 20 bp, Artificial Sequence
  chemically synthesized
ttcaatggagatcagatgtt

SEQ ID NO: 34146 - DNA, 20 bp, Artificial Sequence
  chemically synthesized
cacttcatctttttattttt

SEQ ID NO: 34147 - DNA, 20 bp, Artificial Sequence
  chemically synthesized
tattttttagaatcatgcgg

SEQ ID NO: 34148 - DNA, 20 bp, Artificial Sequence
  chemically synthesized
ggcaggcagatcatgaggtc

SEQ ID NO: 34149 - DNA, 20 bp, Artificial Sequence
  chemically synthesized
tacttgggaggctgaggcag

SEQ ID NO: 34150 - DNA, 20 bp, Artificial Sequence
  chemically synthesized
aaagaaagaaagaaagtggc

SEQ ID NO: 34151 - DNA, 20 bp, Artificial Sequence
  chemically synthesized
agaaagaaagtggccagaat

SEQ ID NO: 34152 - DNA, 20 bp, Artificial Sequence
  chemically synthesized
gggctttcccctgctcccca

SEQ ID NO: 34153 - DNA, 20 bp, Artificial Sequence
  chemically synthesized
ttgccaaggacatgtagttg

SEQ ID NO: 34154 - DNA, 20 bp, Artificial Sequence
  chemically synthesized
gagggctggagcccagttcc

SEQ ID NO: 34155 - DNA, 20 bp, Artificial Sequence
  chemically synthesized
ttaccccacaaaacaggctg

SEQ ID NO: 34156 - DNA, 20 bp, Artificial Sequence
  chemically synthesized
tcttttttttttttttgaga

SEQ ID NO: 34157 - DNA, 20 bp, Artificial Sequence
  chemically synthesized
tcttactctgttgcccaggc

SEQ ID NO: 34158 - DNA, 20 bp, Artificial Sequence
  chemically synthesized
ccgcctctcacctcagcctc

SEQ ID NO: 34159 - DNA, 20 bp, Artificial Sequence
  chemically synthesized
tcgtaatgtttttgtagaga

SEQ ID NO: 34160 - DNA, 20 bp, Artificial Sequence
  chemically synthesized
cccaggctggtcttgaactc

SEQ ID NO: 34161 - DNA, 20 bp, Artificial Sequence
  chemically synthesized
ttgaactcctgagttcaccc

SEQ ID NO: 34162 - DNA, 20 bp, Artificial Sequence
  chemically synthesized
acctcggcctcccaaagtgc

SEQ ID NO: 34163 - DNA, 20 bp, Artificial Sequence
  chemically synthesized
ctgtattttcaactcactgg

SEQ ID NO: 34164 - DNA, 20 bp, Artificial Sequence
  chemically synthesized
gatgatccaaagtcagagag

SEQ ID NO: 34165 - DNA, 20 bp, Artificial Sequence
  chemically synthesized
cagagagaggggttggaagc

SEQ ID NO: 34166 - DNA, 20 bp, Artificial Sequence
  chemically synthesized
catgagtagcccgtggcttc

SEQ ID NO: 34167 - DNA, 20 bp, Artificial Sequence
  chemically synthesized
gatggacagacattgcgaga

SEQ ID NO: 34168 - DNA, 20 bp, Artificial Sequence
  chemically synthesized
ctccaatcacagctacccaa

SEQ ID NO: 34169 - DNA, 20 bp, Artificial Sequence
  chemically synthesized
caccaagatgaaccagtcct

SEQ ID NO: 34170 - DNA, 20 bp, Artificial Sequence
  chemically synthesized
acctggaggtaatgtgttga

SEQ ID NO: 34171 - DNA, 20 bp, Artificial Sequence
  chemically synthesized
ttggtggtgattgctctgct

SEQ ID NO: 34172 - DNA, 20 bp, Artificial Sequence
  chemically synthesized
ccatatagagaggagatcag

SEQ ID NO: 34173 - DNA, 20 bp, Artificial Sequence
  chemically synthesized
catctacataaagggggaag

SEQ ID NO: 34174 - DNA, 20 bp, Artificial Sequence
  chemically synthesized
tgaagcagaagaggtaacat

SEQ ID NO: 34175 - DNA, 20 bp, Artificial Sequence
  chemically synthesized
tgaggtagttactgctattt

SEQ ID NO: 34176 - DNA, 20 bp, Artificial Sequence
  chemically synthesized
gtggctctccctgatttcgg

SEQ ID NO: 34177 - DNA, 20 bp, Artificial Sequence
  chemically synthesized
ctaattctttatattttttg

SEQ ID NO: 34178 - DNA, 20 bp, Artificial Sequence
  chemically synthesized
ccaccgcgcctgcctggagt

SEQ ID NO: 34179 - DNA, 20 bp, Artificial Sequence
  chemically synthesized
aaagcattcattcagtaacc

SEQ ID NO: 34180 - DNA, 20 bp, Artificial Sequence
  chemically synthesized
ccagtatggacgctgtccaa

SEQ ID NO: 34181 - DNA, 20 bp, Artificial Sequence
  chemically synthesized
ccgtttctaccaaaaaatat

SEQ ID NO: 34182 - DNA, 20 bp, Artificial Sequence
  chemically synthesized
ctactcgggaggctaaggca

SEQ ID NO: 34183 - DNA, 20 bp, Artificial Sequence
  chemically synthesized
ctcaagaagtatttgtcctg

SEQ ID NO: 34184 - DNA, 20 bp, Artificial Sequence
  chemically synthesized
cttgcatttcctctgacatc

SEQ ID NO: 34185 - DNA, 20 bp, Artificial Sequence
  chemically synthesized
aaacatggcctgcatttcca

SEQ ID NO: 34186 - DNA, 20 bp, Artificial Sequence
  chemically synthesized
acacttcatctttttatttt

SEQ ID NO: 34187 - DNA, 20 bp, Artificial Sequence
  chemically synthesized
ctacttgggaggctgaggca

SEQ ID NO: 34188 - DNA, 20 bp, Artificial Sequence
  chemically synthesized
ccatctcaaacaaacaaaca

SEQ ID NO: 34189 - DNA, 20 bp, Artificial Sequence
  chemically synthesized
ctcaaacaaacaaacaaaag

SEQ ID NO: 34190 - DNA, 20 bp, Artificial Sequence
  chemically synthesized
aacaaacaaacaaaagaaag

SEQ ID NO: 34191 - DNA, 20 bp, Artificial Sequence
  chemically synthesized
aacaaacaaaagaaagaaag

SEQ ID NO: 34192 - DNA, 20 bp, Artificial Sequence
  chemically synthesized
gaaagaaagaaagaaagtgg

SEQ ID NO: 34193 - DNA, 20 bp, Artificial Sequence
  chemically synthesized
agaatgggaatgtttacgtg

SEQ ID NO: 34194 - DNA, 20 bp, Artificial Sequence
  chemically synthesized
taaatagcagtaactacctc

SEQ ID NO: 34195 - DNA, 20 bp, Artificial Sequence
  chemically synthesized
acctatttgtagattataaa

SEQ ID NO: 34196 - DNA, 20 bp, Artificial Sequence
  chemically synthesized
aatactggatacagggcata

SEQ ID NO: 34197 - DNA, 20 bp, Artificial Sequence
  chemically synthesized
tggcgaaactccatctctac

SEQ ID NO: 34198 - DNA, 20 bp, Artificial Sequence
  chemically synthesized
cccgtctctactaaaaatac

SEQ ID NO: 34199 - DNA, 20 bp, Artificial Sequence
  chemically synthesized
ttgctgtagtagtcagtatc

SEQ ID NO: 34200 - DNA, 20 bp, Artificial Sequence
  chemically synthesized
gtccaaagagaatcctatgg

SEQ ID NO: 34201 - DNA, 20 bp, Artificial Sequence
  chemically synthesized
gataacctatttgtagatta

SEQ ID NO: 34202 - DNA, 20 bp, Artificial Sequence
  chemically synthesized
ggtgacttttcattacccca

SEQ ID NO: 34203 - DNA, 20 bp, Artificial Sequence
  chemically synthesized
cctcttctgcttcatactaa

SEQ ID NO: 34204 - DNA, 20 bp, Artificial Sequence
  chemically synthesized
cagccctgatctttggactc

SEQ ID NO: 34205 - DNA, 20 bp, Artificial Sequence
  chemically synthesized
cattaaactcctttgggtag

SEQ ID NO: 34206 - DNA, 20 bp, Artificial Sequence
  chemically synthesized
cgcaatgtctgtccatcaga

SEQ ID NO: 34207 - DNA, 20 bp, Artificial Sequence
  chemically synthesized
ttcaggaagccacgggctac

SEQ ID NO: 34208 - DNA, 20 bp, Artificial Sequence
  chemically synthesized
tcgtgaaaagtctgagttat

SEQ ID NO: 34209 - DNA, 20 bp, Artificial Sequence
  chemically synthesized
agttatataggctttgagca

SEQ ID NO: 34210 - DNA, 20 bp, Artificial Sequence
  chemically synthesized
tatgaaaaaaggaaacacac

SEQ ID NO: 34211 - DNA, 20 bp, Artificial Sequence
  chemically synthesized
aacacacagatgattcaaca

SEQ ID NO: 34212 - DNA, 20 bp, Artificial Sequence
  chemically synthesized
tggcaagtcatatcaattat

SEQ ID NO: 34213 - DNA, 20 bp, Artificial Sequence
  chemically synthesized
gtcatatcaattatctgagt

SEQ ID NO: 34214 - DNA, 20 bp, Artificial Sequence
  chemically synthesized
tctacaaataggttatctct

SEQ ID NO: 34215 - DNA, 20 bp, Artificial Sequence
  chemically synthesized
tgtgtgccagtccatgtgct

SEQ ID NO: 34216 - DNA, 20 bp, Artificial Sequence
  chemically synthesized
agagaccaaggtgctgagtt

SEQ ID NO: 34217 - DNA, 20 bp, Artificial Sequence
  chemically synthesized
atggaagcccaggtaggcag

SEQ ID NO: 34218 - DNA, 20 bp, Artificial Sequence
  chemically synthesized
ctggggagcaggggaaagcc

SEQ ID NO: 34219 - DNA, 20 bp, Artificial Sequence
  chemically synthesized
ccactttctttctttctttc

SEQ ID NO: 34220 - DNA, 20 bp, Artificial Sequence
  chemically synthesized
tttctttctttctttctttt

SEQ ID NO: 34221 - DNA, 20 bp, Artificial Sequence
  chemically synthesized
tttctttctttcttttgttt

SEQ ID NO: 34222 - DNA, 20 bp, Artificial Sequence
  chemically synthesized
aacctctgcctctccggttc

SEQ ID NO: 34223 - DNA, 20 bp, Artificial Sequence
  chemically synthesized
tgcctcagcctcccaagtag

SEQ ID NO: 34224 - DNA, 20 bp, Artificial Sequence
  chemically synthesized
ttttgtatttttagtagaga

SEQ ID NO: 34225 - DNA, 20 bp, Artificial Sequence
  chemically synthesized
tgccttggcctccctaagtg

SEQ ID NO: 34226 - DNA, 20 bp, Artificial Sequence
  chemically synthesized
gtgagccactacacccagcc

SEQ ID NO: 34227 - DNA, 20 bp, Artificial Sequence
  chemically synthesized
aggccagagttagtggctct

SEQ ID NO: 34228 - DNA, 20 bp, Artificial Sequence
  chemically synthesized
tctagtacttttaaagggga

SEQ ID NO: 34229 - DNA, 20 bp, Artificial Sequence
  chemically synthesized
gaagtggtttgtctgagata

SEQ ID NO: 34230 - DNA, 20 bp, Artificial Sequence
  chemically synthesized
aattctgatggaaatgcagg

SEQ ID NO: 34231 - DNA, 20 bp, Artificial Sequence
  chemically synthesized
tctctgatgtcagaggaaat

SEQ ID NO: 34232 - DNA, 20 bp, Artificial Sequence
  chemically synthesized
aacccatggtatatgcaagt

SEQ ID NO: 34233 - DNA, 20 bp, Artificial Sequence
  chemically synthesized
aagtcacatagctgccattt

SEQ ID NO: 34234 - DNA, 20 bp, Artificial Sequence
  chemically synthesized
tagctgccattttatggatt

SEQ ID NO: 34235 - DNA, 20 bp, Artificial Sequence
  chemically synthesized
aacctccgcctcccaggttc

SEQ ID NO: 34236 - DNA, 20 bp, Artificial Sequence
  chemically synthesized
tgccttagcctcccgagtag

SEQ ID NO: 34237 - DNA, 20 bp, Artificial Sequence
  chemically synthesized
tttatattttttggtagaaa

SEQ ID NO: 34238 - DNA, 20 bp, Artificial Sequence
  chemically synthesized
tgccttggcctcccaaagtg

SEQ ID NO: 34239 - DNA, 20 bp, Artificial Sequence
  chemically synthesized
cctgcctggagttcagaatc

SEQ ID NO: 34240 - DNA, 20 bp, Artificial Sequence
  chemically synthesized
agaatcttgggcttcattat

SEQ ID NO: 34241 - DNA, 20 bp, Artificial Sequence
  chemically synthesized
cactttgggaggctgaggtg

SEQ ID NO: 34242 - DNA, 20 bp, Artificial Sequence
  chemically synthesized
gaggtagaggtcacaatgag

SEQ ID NO: 34243 - DNA, 20 bp, Artificial Sequence
  chemically synthesized
gctacactcttcttgaaggt

SEQ ID NO: 34244 - DNA, 20 bp, Artificial Sequence
  chemically synthesized
tcagtaaccccagaaacttg

SEQ ID NO: 34245 - DNA, 20 bp, Artificial Sequence
  chemically synthesized
gaaacttgttctgtttttcc

SEQ ID NO: 34246 - DNA, 20 bp, Artificial Sequence
  chemically synthesized
tttggacagcgtccatactg

SEQ ID NO: 34247 - DNA, 20 bp, Artificial Sequence
  chemically synthesized
gcagacagaagctgagtgga

SEQ ID NO: 34248 - DNA, 20 bp, Artificial Sequence
  chemically synthesized
tccatccaggttctgtaata

SEQ ID NO: 34249 - DNA, 20 bp, Artificial Sequence
  chemically synthesized
tctcctcatgtcccctcaag

SEQ ID NO: 34250 - DNA, 20 bp, Artificial Sequence
  chemically synthesized
taacaggtaaacgaggtcca

SEQ ID NO: 34251 - DNA, 20 bp, Artificial Sequence
  chemically synthesized
gcttctgtctgcaggggctg

SEQ ID NO: 34252 - DNA, 20 bp, Artificial Sequence
  chemically synthesized
cagtctcacaggttacaggg

SEQ ID NO: 34253 - DNA, 20 bp, Artificial Sequence
  chemically synthesized
gaatcctatggaaaaacaga

SEQ ID NO: 34254 - DNA, 20 bp, Artificial Sequence
  chemically synthesized
agtttctggggttactgaat

SEQ ID NO: 34255 - DNA, 20 bp, Artificial Sequence
  chemically synthesized
tcaagaagagtgtagcctga

SEQ ID NO: 34256 - DNA, 20 bp, Artificial Sequence
  chemically synthesized
tatgtaacttttgcattttg

SEQ ID NO: 34257 - DNA, 20 bp, Artificial Sequence
  chemically synthesized
ggtgtgtgccaccacatcca

SEQ ID NO: 34258 - DNA, 20 bp, Artificial Sequence
  chemically synthesized
ttttgtatttttagtagaga

SEQ ID NO: 34259 - DNA, 20 bp, Artificial Sequence
  chemically synthesized
cacctcagcctcccaaagtg

SEQ ID NO: 34260 - DNA, 20 bp, Artificial Sequence
  chemically synthesized
ttaaacacaaataatgaagc

SEQ ID NO: 34261 - DNA, 20 bp, Artificial Sequence
  chemically synthesized
caggcagatcacatgaggtc

SEQ ID NO: 34262 - DNA, 20 bp, Artificial Sequence
  chemically synthesized
gcctggccaacatggtgaaa

SEQ ID NO: 34263 - DNA, 20 bp, Artificial Sequence
  chemically synthesized
tcgggaggctaaggcaagag

SEQ ID NO: 34264 - DNA, 20 bp, Artificial Sequence
  chemically synthesized
gaggcggaggttgccgtgag

SEQ ID NO: 34265 - DNA, 20 bp, Artificial Sequence
  chemically synthesized
tggaagaatgcatatggaac

SEQ ID NO: 34266 - DNA, 20 bp, Artificial Sequence
  chemically synthesized
ttgctctctgtaaggatgta

SEQ ID NO: 34267 - DNA, 20 bp, Artificial Sequence
  chemically synthesized
gtaaggatgtatatagcttc

SEQ ID NO: 34268 - DNA, 20 bp, Artificial Sequence
  chemically synthesized
tttatcccgtgatggtggaa

SEQ ID NO: 34269 - DNA, 20 bp, Artificial Sequence
  chemically synthesized
ctctggcctctatcaaccca

SEQ ID NO: 34270 - DNA, 20 bp, Artificial Sequence
  chemically synthesized
atggttcttcaatggagatc

SEQ ID NO: 34271 - DNA, 20 bp, Artificial Sequence
  chemically synthesized
gaggcagaggttgcagtgag

SEQ ID NO: 34272 - DNA, 20 bp, Artificial Sequence
  chemically synthesized
aaagaaagtggccagaatgg

SEQ ID NO: 34273 - DNA, 20 bp, Artificial Sequence
  chemically synthesized
aaattggcaaatgctaaact

SEQ ID NO: 34274 - DNA, 20 bp, Artificial Sequence
  chemically synthesized
tttcccctgctccccagaga

SEQ ID NO: 34275 - DNA, 20 bp, Artificial Sequence
  chemically synthesized
gcggaagccagcctgcctac

SEQ ID NO: 34276 - DNA, 20 bp, Artificial Sequence
  chemically synthesized
agcaccttggtctctgcatc

SEQ ID NO: 34277 - DNA, 20 bp, Artificial Sequence
  chemically synthesized
atagcacatggactggcaca

SEQ ID NO: 34278 - DNA, 20 bp, Artificial Sequence
  chemically synthesized
cactgtttaataaatgttaa

SEQ ID NO: 34279 - DNA, 20 bp, Artificial Sequence
  chemically synthesized
gctgccagagataacctatt

SEQ ID NO: 34280 - DNA, 20 bp, Artificial Sequence
  chemically synthesized
aacaggctgttgaatcatct

SEQ ID NO: 34281 - DNA, 20 bp, Artificial Sequence
  chemically synthesized
acacgcccagctaattttcg

SEQ ID NO: 34282 - DNA, 20 bp, Artificial Sequence
  chemically synthesized
tcgtaatgtttttgtagaga

SEQ ID NO: 34283 - DNA, 20 bp, Artificial Sequence
  chemically synthesized
gaactcctgagttcacccag

SEQ ID NO: 34284 - DNA, 20 bp, Artificial Sequence
  chemically synthesized
cacctcggcctcccaaagtg

SEQ ID NO: 34285 - DNA, 20 bp, Artificial Sequence
  chemically synthesized
atctttctttatgttacctc

SEQ ID NO: 34286 - DNA, 20 bp, Artificial Sequence
  chemically synthesized
taccctttaacccatatgaa

SEQ ID NO: 34287 - DNA, 20 bp, Artificial Sequence
  chemically synthesized
cctgtattttcaactcactg

SEQ ID NO: 34288 - DNA, 20 bp, Artificial Sequence
  chemically synthesized
ggttggaagcatgagtagcc

SEQ ID NO: 34289 - DNA, 20 bp, Artificial Sequence
  chemically synthesized
ctccaatcacagctacccaa

SEQ ID NO: 34290 - DNA, 20 bp, Artificial Sequence
  chemically synthesized
acccaaaggagtttaatgcc

SEQ ID NO: 34291 - DNA, 20 bp, Artificial Sequence
  chemically synthesized
gcagagcccttgcagttatt

SEQ ID NO: 34292 - DNA, 20 bp, Artificial Sequence
  chemically synthesized
tgcagttattccaggcttgg

SEQ ID NO: 34293 - DNA, 20 bp, Artificial Sequence
  chemically synthesized
gctatgagtctgtgccttgc

SEQ ID NO: 34294 - DNA, 20 bp, Artificial Sequence
  chemically synthesized
ctgatctttggactcaaaaa

SEQ ID NO: 34295 - DNA, 22 bp, Artificial Sequence
  chemically synthesized
tagacaaacgtggtttttgagt

SEQ ID NO: 34296 - DNA, 22 bp, Artificial Sequence
  chemically synthesized
agacaaacgtggtttttgagtc

SEQ ID NO: 34297 - DNA, 22 bp, Artificial Sequence
  chemically synthesized
gacaaacgtggtttttgagtcc

SEQ ID NO: 34298 - DNA, 22 bp, Artificial Sequence
  chemically synthesized
ttgagtccaaagatcagggctg

SEQ ID NO: 34299 - DNA, 22 bp, Artificial Sequence
  chemically synthesized
tgagtccaaagatcagggctgg

SEQ ID NO: 34300 - DNA, 22 bp, Artificial Sequence
  chemically synthesized
gagtccaaagatcagggctggg

SEQ ID NO: 34301 - DNA, 22 bp, Artificial Sequence
  chemically synthesized
agtccaaagatcagggctgggt

SEQ ID NO: 34302 - DNA, 22 bp, Artificial Sequence
  chemically synthesized
ggttgacctgaatactggatac

SEQ ID NO: 34303 - DNA, 22 bp, Artificial Sequence
  chemically synthesized
acctgaatactggatacagggc

SEQ ID NO: 34304 - DNA, 22 bp, Artificial Sequence
  chemically synthesized
aatactggatacagggcatata

SEQ ID NO: 34305 - DNA, 22 bp, Artificial Sequence
  chemically synthesized
gatacagggcatataaaacagg

SEQ ID NO: 34306 - DNA, 22 bp, Artificial Sequence
  chemically synthesized
atagcagagcaatcaccaccaa

SEQ ID NO: 34307 - DNA, 22 bp, Artificial Sequence
  chemically synthesized
gaataactgcaagggctctgct

SEQ ID NO: 34308 - DNA, 22 bp, Artificial Sequence
  chemically synthesized
caagggctctgctgacatcttc

SEQ ID NO: 34309 - DNA, 22 bp, Artificial Sequence
  chemically synthesized
tgctgacatcttcctgaggtgc

SEQ ID NO: 34310 - DNA, 22 bp, Artificial Sequence
  chemically synthesized
ctgacatcttcctgaggtgcca

SEQ ID NO: 34311 - DNA, 22 bp, Artificial Sequence
  chemically synthesized
acatcttcctgaggtgccaagg

SEQ ID NO: 34312 - DNA, 22 bp, Artificial Sequence
  chemically synthesized
cctgaggtgccaaggaaatgag

SEQ ID NO: 34313 - DNA, 22 bp, Artificial Sequence
  chemically synthesized
ctgaggtgccaaggaaatgagg

SEQ ID NO: 34314 - DNA, 22 bp, Artificial Sequence
  chemically synthesized
aggtgccaaggaaatgaggatg

SEQ ID NO: 34315 - DNA, 22 bp, Artificial Sequence
  chemically synthesized
tccatgactttgggatccagtc

SEQ ID NO: 34316 - DNA, 22 bp, Artificial Sequence
  chemically synthesized
catgactttgggatccagtcaa

SEQ ID NO: 34317 - DNA, 22 bp, Artificial Sequence
  chemically synthesized
tgggatccagtcaacacattac

SEQ ID NO: 34318 - DNA, 22 bp, Artificial Sequence
  chemically synthesized
gggatccagtcaacacattacc

SEQ ID NO: 34319 - DNA, 22 bp, Artificial Sequence
  chemically synthesized
ggatccagtcaacacattacct

SEQ ID NO: 34320 - DNA, 22 bp, Artificial Sequence
  chemically synthesized
cctccaggtgaattaccaagac

SEQ ID NO: 34321 - DNA, 22 bp, Artificial Sequence
  chemically synthesized
caggtgaattaccaagactccc

SEQ ID NO: 34322 - DNA, 22 bp, Artificial Sequence
  chemically synthesized
ccaagactcccaggactggttc

SEQ ID NO: 34323 - DNA, 22 bp, Artificial Sequence
  chemically synthesized
ccaggactggttcatcttggtg

SEQ ID NO: 34324 - DNA, 22 bp, Artificial Sequence
  chemically synthesized
gttcatcttggtgtccgtgatc

SEQ ID NO: 34325 - DNA, 22 bp, Artificial Sequence
  chemically synthesized
atcttggtgtccgtgatcgcag

SEQ ID NO: 34326 - DNA, 22 bp, Artificial Sequence
  chemically synthesized
ggtgtccgtgatcgcagacctc

SEQ ID NO: 34327 - DNA, 22 bp, Artificial Sequence
  chemically synthesized
gtgtccgtgatcgcagacctca

SEQ ID NO: 34328 - DNA, 22 bp, Artificial Sequence
  chemically synthesized
aggaatgccttctacgtcctct

SEQ ID NO: 34329 - DNA, 22 bp, Artificial Sequence
  chemically synthesized
ctacgtcctcttccccatctgg

SEQ ID NO: 34330 - DNA, 22 bp, Artificial Sequence
  chemically synthesized
tacgtcctcttccccatctggt

SEQ ID NO: 34331 - DNA, 22 bp, Artificial Sequence
  chemically synthesized
cgtcctcttccccatctggttc

SEQ ID NO: 34332 - DNA, 22 bp, Artificial Sequence
  chemically synthesized
ttccccatctggttccatcttc

SEQ ID NO: 34333 - DNA, 22 bp, Artificial Sequence
  chemically synthesized
ccccatctggttccatcttcag

SEQ ID NO: 34334 - DNA, 22 bp, Artificial Sequence
  chemically synthesized
cccatctggttccatcttcagg

SEQ ID NO: 34335 - DNA, 22 bp, Artificial Sequence
  chemically synthesized
gttccatcttcaggaagctgtg

SEQ ID NO: 34336 - DNA, 22 bp, Artificial Sequence
  chemically synthesized
catcttcaggaagctgtgggca

SEQ ID NO: 34337 - DNA, 22 bp, Artificial Sequence
  chemically synthesized
caggaagctgtgggcattaaac

SEQ ID NO: 34338 - DNA, 22 bp, Artificial Sequence
  chemically synthesized
aggaagctgtgggcattaaact

SEQ ID NO: 34339 - DNA, 22 bp, Artificial Sequence
  chemically synthesized
tgggcattaaactcctttgggt

SEQ ID NO: 34340 - DNA, 22 bp, Artificial Sequence
  chemically synthesized
aactcctttgggtagctgtgat

SEQ ID NO: 34341 - DNA, 22 bp, Artificial Sequence
  chemically synthesized
ctttgggtagctgtgattggag

SEQ ID NO: 34342 - DNA, 22 bp, Artificial Sequence
  chemically synthesized
tgggtagctgtgattggagact

SEQ ID NO: 34343 - DNA, 22 bp, Artificial Sequence
  chemically synthesized
gggtagctgtgattggagactg

SEQ ID NO: 34344 - DNA, 22 bp, Artificial Sequence
  chemically synthesized
ggtagctgtgattggagactgg

SEQ ID NO: 34345 - DNA, 22 bp, Artificial Sequence
  chemically synthesized
tgattggagactggctcaacct

SEQ ID NO: 34346 - DNA, 22 bp, Artificial Sequence
  chemically synthesized
gagactggctcaacctcgtctt

SEQ ID NO: 34347 - DNA, 22 bp, Artificial Sequence
  chemically synthesized
gctcaacctcgtctttaagtgg

SEQ ID NO: 34348 - DNA, 22 bp, Artificial Sequence
  chemically synthesized
aacctcgtctttaagtggtaag

SEQ ID NO: 34349 - DNA, 22 bp, Artificial Sequence
  chemically synthesized
gtctttaagtggtaagaaccat

SEQ ID NO: 34350 - DNA, 22 bp, Artificial Sequence
  chemically synthesized
taagtggtaagaaccatataga

SEQ ID NO: 34351 - DNA, 22 bp, Artificial Sequence
  chemically synthesized
aagtggtaagaaccatatagag

SEQ ID NO: 34352 - DNA, 22 bp, Artificial Sequence
  chemically synthesized
agtggtaagaaccatatagaga

SEQ ID NO: 34353 - DNA, 22 bp, Artificial Sequence
  chemically synthesized
gcattcgctctcgcaatgtctg

SEQ ID NO: 34354 - DNA, 22 bp, Artificial Sequence
  chemically synthesized
gctctcgcaatgtctgtccatc

SEQ ID NO: 34355 - DNA, 22 bp, Artificial Sequence
  chemically synthesized
tcgcaatgtctgtccatcagaa

SEQ ID NO: 34356 - DNA, 22 bp, Artificial Sequence
  chemically synthesized
gcaatgtctgtccatcagaagt

SEQ ID NO: 34357 - DNA, 22 bp, Artificial Sequence
  chemically synthesized
tccatcagaagttgctttcccc

SEQ ID NO: 34358 - DNA, 22 bp, Artificial Sequence
  chemically synthesized
ctttccccaggctattcaggaa

SEQ ID NO: 34359 - DNA, 22 bp, Artificial Sequence
  chemically synthesized
tccccaggctattcaggaagcc

SEQ ID NO: 34360 - DNA, 22 bp, Artificial Sequence
  chemically synthesized
ccccaggctattcaggaagcca

SEQ ID NO: 34361 - DNA, 22 bp, Artificial Sequence
  chemically synthesized
cccaggctattcaggaagccac

SEQ ID NO: 34362 - DNA, 22 bp, Artificial Sequence
  chemically synthesized
ttcaggaagccacgggctactc

SEQ ID NO: 34363 - DNA, 22 bp, Artificial Sequence
  chemically synthesized
aggaagccacgggctactcatg

SEQ ID NO: 34364 - DNA, 22 bp, Artificial Sequence
  chemically synthesized
ctcatgcttccaacccctctct

SEQ ID NO: 34365 - DNA, 22 bp, Artificial Sequence
  chemically synthesized
atgcttccaacccctctctctg

SEQ ID NO: 34366 - DNA, 22 bp, Artificial Sequence
  chemically synthesized
ccaacccctctctctgactttg

SEQ ID NO: 34367 - DNA, 22 bp, Artificial Sequence
  chemically synthesized
caacccctctctctgactttgg

SEQ ID NO: 34368 - DNA, 22 bp, Artificial Sequence
  chemically synthesized
tctctgactttggatcatctac

SEQ ID NO: 34369 - DNA, 22 bp, Artificial Sequence
  chemically synthesized
tctgactttggatcatctacat

SEQ ID NO: 34370 - DNA, 22 bp, Artificial Sequence
  chemically synthesized
tgactttggatcatctacataa

SEQ ID NO: 34371 - DNA, 22 bp, Artificial Sequence
  chemically synthesized
actttggatcatctacataaag

SEQ ID NO: 34372 - DNA, 22 bp, Artificial Sequence
  chemically synthesized
tggatcatctacataaaggggg

SEQ ID NO: 34373 - DNA, 22 bp, Artificial Sequence
  chemically synthesized
ggatcatctacataaaggggga

SEQ ID NO: 34374 - DNA, 22 bp, Artificial Sequence
  chemically synthesized
gatcatctacataaagggggaa

SEQ ID NO: 34375 - DNA, 22 bp, Artificial Sequence
  chemically synthesized
cataaagggggaagacagaaaa

SEQ ID NO: 34376 - DNA, 22 bp, Artificial Sequence
  chemically synthesized
ccagtgagttgaaaatacagga

SEQ ID NO: 34377 - DNA, 22 bp, Artificial Sequence
  chemically synthesized
aaaatacaggaaagcctatttc

SEQ ID NO: 34378 - DNA, 22 bp, Artificial Sequence
  chemically synthesized
tttcatatgggttaaagggtag

SEQ ID NO: 34379 - DNA, 22 bp, Artificial Sequence
  chemically synthesized
catatgggttaaagggtaggac

SEQ ID NO: 34380 - DNA, 22 bp, Artificial Sequence
  chemically synthesized
atatgggttaaagggtaggaca

SEQ ID NO: 34381 - DNA, 22 bp, Artificial Sequence
  chemically synthesized
aagggtaggacagttgaatttc

SEQ ID NO: 34382 - DNA, 22 bp, Artificial Sequence
  chemically synthesized
aatttcgtgaaaagtctgagtt

SEQ ID NO: 34383 - DNA, 22 bp, Artificial Sequence
  chemically synthesized
cgtgaaaagtctgagttatata

SEQ ID NO: 34384 - DNA, 22 bp, Artificial Sequence
  chemically synthesized
gtgaaaagtctgagttatatag

SEQ ID NO: 34385 - DNA, 22 bp, Artificial Sequence
  chemically synthesized
agttatataggctttgagcaaa

SEQ ID NO: 34386 - DNA, 22 bp, Artificial Sequence
  chemically synthesized
tataggctttgagcaaagagtt

SEQ ID NO: 34387 - DNA, 22 bp, Artificial Sequence
  chemically synthesized
tgagcaaagagttttattagta

SEQ ID NO: 34388 - DNA, 22 bp, Artificial Sequence
  chemically synthesized
gagcaaagagttttattagtat

SEQ ID NO: 34389 - DNA, 22 bp, Artificial Sequence
  chemically synthesized
agcaaagagttttattagtatg

SEQ ID NO: 34390 - DNA, 22 bp, Artificial Sequence
  chemically synthesized
tattagtatgaagcagaagagg

SEQ ID NO: 34391 - DNA, 22 bp, Artificial Sequence
  chemically synthesized
attagtatgaagcagaagaggt

SEQ ID NO: 34392 - DNA, 22 bp, Artificial Sequence
  chemically synthesized
ttagtatgaagcagaagaggta

SEQ ID NO: 34393 - DNA, 22 bp, Artificial Sequence
  chemically synthesized
gtatgaagcagaagaggtaaca

SEQ ID NO: 34394 - DNA, 22 bp, Artificial Sequence
  chemically synthesized
acacctgtaatcccagcacttt

SEQ ID NO: 34395 - DNA, 22 bp, Artificial Sequence
  chemically synthesized
taatcccagcactttgggaggc

SEQ ID NO: 34396 - DNA, 22 bp, Artificial Sequence
  chemically synthesized
tgggaggccgaggtgggcgaat

SEQ ID NO: 34397 - DNA, 22 bp, Artificial Sequence
  chemically synthesized
gggaggccgaggtgggcgaatc

SEQ ID NO: 34398 - DNA, 22 bp, Artificial Sequence
  chemically synthesized
ggaggccgaggtgggcgaatca

SEQ ID NO: 34399 - DNA, 22 bp, Artificial Sequence
  chemically synthesized
ctgggtgaactcaggagttcaa

SEQ ID NO: 34400 - DNA, 22 bp, Artificial Sequence
  chemically synthesized
ggtgaactcaggagttcaagac

SEQ ID NO: 34401 - DNA, 22 bp, Artificial Sequence
  chemically synthesized
aggagttcaagaccagcctggg

SEQ ID NO: 34402 - DNA, 22 bp, Artificial Sequence
  chemically synthesized
aagaccagcctgggcaacatgg

SEQ ID NO: 34403 - DNA, 22 bp, Artificial Sequence
  chemically synthesized
ggcaacatggcgaaactccatc

SEQ ID NO: 34404 - DNA, 22 bp, Artificial Sequence
  chemically synthesized
catctctacaaaaacattacga

SEQ ID NO: 34405 - DNA, 22 bp, Artificial Sequence
  chemically synthesized
tacaaaaacattacgaaaatta

SEQ ID NO: 34406 - DNA, 22 bp, Artificial Sequence
  chemically synthesized
caaaaacattacgaaaattagc

SEQ ID NO: 34407 - DNA, 22 bp, Artificial Sequence
  chemically synthesized
cgaaaattagctgggcgtgttg

SEQ ID NO: 34408 - DNA, 22 bp, Artificial Sequence
  chemically synthesized
gctgggcgtgttggtgctgtag

SEQ ID NO: 34409 - DNA, 22 bp, Artificial Sequence
  chemically synthesized
ggcgtgttggtgctgtagtccc

SEQ ID NO: 34410 - DNA, 22 bp, Artificial Sequence
  chemically synthesized
gtgctgtagtcccagctactca

SEQ ID NO: 34411 - DNA, 22 bp, Artificial Sequence
  chemically synthesized
tagtcccagctactcaggaggc

SEQ ID NO: 34412 - DNA, 22 bp, Artificial Sequence
  chemically synthesized
ctcaggaggctgaggtgagagg

SEQ ID NO: 34413 - DNA, 22 bp, Artificial Sequence
  chemically synthesized
aggaggctgaggtgagaggcgg

SEQ ID NO: 34414 - DNA, 22 bp, Artificial Sequence
  chemically synthesized
aggtgagaggcggaggaggttg

SEQ ID NO: 34415 - DNA, 22 bp, Artificial Sequence
  chemically synthesized
cagtgagtcaagatcatgccac

SEQ ID NO: 34416 - DNA, 22 bp, Artificial Sequence
  chemically synthesized
cactccagcctgggcaacagag

SEQ ID NO: 34417 - DNA, 22 bp, Artificial Sequence
  chemically synthesized
cagcctgggcaacagagtaaga

SEQ ID NO: 34418 - DNA, 22 bp, Artificial Sequence
  chemically synthesized
ggcaacagagtaagaccctgtc

SEQ ID NO: 34419 - DNA, 22 bp, Artificial Sequence
  chemically synthesized
tctcaaaaaaaaaaaaaagata

SEQ ID NO: 34420 - DNA, 22 bp, Artificial Sequence
  chemically synthesized
aaaaaaaaaaaaaagatagatg

SEQ ID NO: 34421 - DNA, 22 bp, Artificial Sequence
  chemically synthesized
tatgaaaaaaggaaacacacag

SEQ ID NO: 34422 - DNA, 22 bp, Artificial Sequence
  chemically synthesized
aacagcctgttttgtggggtaa

SEQ ID NO: 34423 - DNA, 22 bp, Artificial Sequence
  chemically synthesized
ttttgtggggtaatgaaaagtc

SEQ ID NO: 34424 - DNA, 22 bp, Artificial Sequence
  chemically synthesized
tgtggggtaatgaaaagtcacc

SEQ ID NO: 34425 - DNA, 22 bp, Artificial Sequence
  chemically synthesized
gtggggtaatgaaaagtcaccc

SEQ ID NO: 34426 - DNA, 22 bp, Artificial Sequence
  chemically synthesized
tggggtaatgaaaagtcaccct

SEQ ID NO: 34427 - DNA, 22 bp, Artificial Sequence
  chemically synthesized
ggaactgggctccagccctcgt

SEQ ID NO: 34428 - DNA, 22 bp, Artificial Sequence
  chemically synthesized
ggctccagccctcgttctgcca

SEQ ID NO: 34429 - DNA, 22 bp, Artificial Sequence
  chemically synthesized
cagccctcgttctgccacccac

SEQ ID NO: 34430 - DNA, 22 bp, Artificial Sequence
  chemically synthesized
gttctgccacccaccaactaca

SEQ ID NO: 34431 - DNA, 22 bp, Artificial Sequence
  chemically synthesized
tgccacccaccaactacatgtc

SEQ ID NO: 34432 - DNA, 22 bp, Artificial Sequence
  chemically synthesized
ccacccaccaactacatgtcct

SEQ ID NO: 34433 - DNA, 22 bp, Artificial Sequence
  chemically synthesized
catgtccttggcaagtcatatc

SEQ ID NO: 34434 - DNA, 22 bp, Artificial Sequence
  chemically synthesized
ggcaagtcatatcaattatctg

SEQ ID NO: 34435 - DNA, 22 bp, Artificial Sequence
  chemically synthesized
gcaagtcatatcaattatctga

SEQ ID NO: 34436 - DNA, 22 bp, Artificial Sequence
  chemically synthesized
tctgagtttctgttttataatc

SEQ ID NO: 34437 - DNA, 22 bp, Artificial Sequence
  chemically synthesized
agtttctgttttataatctaca

SEQ ID NO: 34438 - DNA, 22 bp, Artificial Sequence
  chemically synthesized
ctgttttataatctacaaatag

SEQ ID NO: 34439 - DNA, 22 bp, Artificial Sequence
  chemically synthesized
tgttttataatctacaaatagg

SEQ ID NO: 34440 - DNA, 22 bp, Artificial Sequence
  chemically synthesized
ttttataatctacaaataggtt

SEQ ID NO: 34441 - DNA, 22 bp, Artificial Sequence
  chemically synthesized
tataatctacaaataggttatc

SEQ ID NO: 34442 - DNA, 22 bp, Artificial Sequence
  chemically synthesized
ataatctacaaataggttatct

SEQ ID NO: 34443 - DNA, 22 bp, Artificial Sequence
  chemically synthesized
taatctacaaataggttatctc

SEQ ID NO: 34444 - DNA, 22 bp, Artificial Sequence
  chemically synthesized
caaataggttatctctggcagc

SEQ ID NO: 34445 - DNA, 22 bp, Artificial Sequence
  chemically synthesized
tctctggcagcttaataataat

SEQ ID NO: 34446 - DNA, 22 bp, Artificial Sequence
  chemically synthesized
tggcagcttaataataatcagg

SEQ ID NO: 34447 - DNA, 22 bp, Artificial Sequence
  chemically synthesized
gcagcttaataataatcagggt

SEQ ID NO: 34448 - DNA, 22 bp, Artificial Sequence
  chemically synthesized
aataataatcagggttaacatt

SEQ ID NO: 34449 - DNA, 22 bp, Artificial Sequence
  chemically synthesized
ataataatcagggttaacattt

SEQ ID NO: 34450 - DNA, 22 bp, Artificial Sequence
  chemically synthesized
acatttattaaacagtgtgtgc

SEQ ID NO: 34451 - DNA, 22 bp, Artificial Sequence
  chemically synthesized
attaaacagtgtgtgccagtcc

SEQ ID NO: 34452 - DNA, 22 bp, Artificial Sequence
  chemically synthesized
ttaaacagtgtgtgccagtcca

SEQ ID NO: 34453 - DNA, 22 bp, Artificial Sequence
  chemically synthesized
aacagtgtgtgccagtccatgt

SEQ ID NO: 34454 - DNA, 22 bp, Artificial Sequence
  chemically synthesized
tgtgcttttctgtgaggtagtt

SEQ ID NO: 34455 - DNA, 22 bp, Artificial Sequence
  chemically synthesized
ttctgtgaggtagttactgcta

SEQ ID NO: 34456 - DNA, 22 bp, Artificial Sequence
  chemically synthesized
tctgtgaggtagttactgctat

SEQ ID NO: 34457 - DNA, 22 bp, Artificial Sequence
  chemically synthesized
ctgtgaggtagttactgctatt

SEQ ID NO: 34458 - DNA, 22 bp, Artificial Sequence
  chemically synthesized
tgtgaggtagttactgctattt

SEQ ID NO: 34459 - DNA, 22 bp, Artificial Sequence
  chemically synthesized
tgaggtagttactgctatttac

SEQ ID NO: 34460 - DNA, 22 bp, Artificial Sequence
  chemically synthesized
ctgctatttacagaaacagtag

SEQ ID NO: 34461 - DNA, 22 bp, Artificial Sequence
  chemically synthesized
ctatttacagaaacagtagatg

SEQ ID NO: 34462 - DNA, 22 bp, Artificial Sequence
  chemically synthesized
tttacagaaacagtagatgcag

SEQ ID NO: 34463 - DNA, 22 bp, Artificial Sequence
  chemically synthesized
acagaaacagtagatgcagaga

SEQ ID NO: 34464 - DNA, 22 bp, Artificial Sequence
  chemically synthesized
cagaaacagtagatgcagagac

SEQ ID NO: 34465 - DNA, 22 bp, Artificial Sequence
  chemically synthesized
agttaaatgattaggccaacaa

SEQ ID NO: 34466 - DNA, 22 bp, Artificial Sequence
  chemically synthesized
aatgattaggccaacaaggtta

SEQ ID NO: 34467 - DNA, 22 bp, Artificial Sequence
  chemically synthesized
ggccaacaaggttagtacatgc

SEQ ID NO: 34468 - DNA, 22 bp, Artificial Sequence
  chemically synthesized
gtacatgccgagccaggatgga

SEQ ID NO: 34469 - DNA, 22 bp, Artificial Sequence
  chemically synthesized
gcttccgcggcaatgctcttat

SEQ ID NO: 34470 - DNA, 22 bp, Artificial Sequence
  chemically synthesized
ccgcggcaatgctcttatgaac

SEQ ID NO: 34471 - DNA, 22 bp, Artificial Sequence
  chemically synthesized
cgcggcaatgctcttatgaact

SEQ ID NO: 34472 - DNA, 22 bp, Artificial Sequence
  chemically synthesized
ttatgaactatgttacgtccag

SEQ ID NO: 34473 - DNA, 22 bp, Artificial Sequence
  chemically synthesized
atgaactatgttacgtccagtg

SEQ ID NO: 34474 - DNA, 22 bp, Artificial Sequence
  chemically synthesized
tgaactatgttacgtccagtgc

SEQ ID NO: 34475 - DNA, 22 bp, Artificial Sequence
  chemically synthesized
tgttacgtccagtgctgataaa

SEQ ID NO: 34476 - DNA, 22 bp, Artificial Sequence
  chemically synthesized
cgtccagtgctgataaactgac

SEQ ID NO: 34477 - DNA, 22 bp, Artificial Sequence
  chemically synthesized
ataaactgactctctggggagc

SEQ ID NO: 34478 - DNA, 22 bp, Artificial Sequence
  chemically synthesized
actctctggggagcaggggaaa

SEQ ID NO: 34479 - DNA, 22 bp, Artificial Sequence
  chemically synthesized
tctggggagcaggggaaagccc

SEQ ID NO: 34480 - DNA, 22 bp, Artificial Sequence
  chemically synthesized
tggggagcaggggaaagccctg

SEQ ID NO: 34481 - DNA, 22 bp, Artificial Sequence
  chemically synthesized
gggagcaggggaaagccctgag

SEQ ID NO: 34482 - DNA, 22 bp, Artificial Sequence
  chemically synthesized
agtttagcatttgccaatttct

SEQ ID NO: 34483 - DNA, 22 bp, Artificial Sequence
  chemically synthesized
agcatttgccaatttctatcac

SEQ ID NO: 34484 - DNA, 22 bp, Artificial Sequence
  chemically synthesized
gcatttgccaatttctatcacg

SEQ ID NO: 34485 - DNA, 22 bp, Artificial Sequence
  chemically synthesized
gccaatttctatcacgtaaaca

SEQ ID NO: 34486 - DNA, 22 bp, Artificial Sequence
  chemically synthesized
ccaatttctatcacgtaaacat

SEQ ID NO: 34487 - DNA, 22 bp, Artificial Sequence
  chemically synthesized
ctatcacgtaaacattcccatt

SEQ ID NO: 34488 - DNA, 22 bp, Artificial Sequence
  chemically synthesized
tatcacgtaaacattcccattc

SEQ ID NO: 34489 - DNA, 22 bp, Artificial Sequence
  chemically synthesized
tcacgtaaacattcccattctg

SEQ ID NO: 34490 - DNA, 22 bp, Artificial Sequence
  chemically synthesized
ccattctggccactttctttct

SEQ ID NO: 34491 - DNA, 22 bp, Artificial Sequence
  chemically synthesized
tggccactttctttctttcttt

SEQ ID NO: 34492 - DNA, 22 bp, Artificial Sequence
  chemically synthesized
gccactttctttctttctttct

SEQ ID NO: 34493 - DNA, 22 bp, Artificial Sequence
  chemically synthesized
tctttctttctttcttttgttt

SEQ ID NO: 34494 - DNA, 22 bp, Artificial Sequence
  chemically synthesized
ctttctttctttcttttgtttg

SEQ ID NO: 34495 - DNA, 22 bp, Artificial Sequence
  chemically synthesized
tttctttctttcttttgtttgt

SEQ ID NO: 34496 - DNA, 22 bp, Artificial Sequence
  chemically synthesized
tctttctttcttttgtttgttt

SEQ ID NO: 34497 - DNA, 22 bp, Artificial Sequence
  chemically synthesized
ctttctttcttttgtttgtttg

SEQ ID NO: 34498 - DNA, 22 bp, Artificial Sequence
  chemically synthesized
tttctttcttttgtttgtttgt

SEQ ID NO: 34499 - DNA, 22 bp, Artificial Sequence
  chemically synthesized
tctttcttttgtttgtttgttt

SEQ ID NO: 34500 - DNA, 22 bp, Artificial Sequence
  chemically synthesized
ctttcttttgtttgtttgtttg

SEQ ID NO: 34501 - DNA, 22 bp, Artificial Sequence
  chemically synthesized
tttcttttgtttgtttgtttga

SEQ ID NO: 34502 - DNA, 22 bp, Artificial Sequence
  chemically synthesized
tcttttgtttgtttgtttgaga

SEQ ID NO: 34503 - DNA, 22 bp, Artificial Sequence
  chemically synthesized
cttttgtttgtttgtttgagat

SEQ ID NO: 34504 - DNA, 22 bp, Artificial Sequence
  chemically synthesized
ttttgtttgtttgtttgagatg

SEQ ID NO: 34505 - DNA, 22 bp, Artificial Sequence
  chemically synthesized
ttgtttgtttgtttgagatgga

SEQ ID NO: 34506 - DNA, 22 bp, Artificial Sequence
  chemically synthesized
tgtttgtttgtttgagatggag

SEQ ID NO: 34507 - DNA, 22 bp, Artificial Sequence
  chemically synthesized
gtttgtttgtttgagatggagt

SEQ ID NO: 34508 - DNA, 22 bp, Artificial Sequence
  chemically synthesized
tttgtttgtttgagatggagtc

SEQ ID NO: 34509 - DNA, 22 bp, Artificial Sequence
  chemically synthesized
gtttgtttgagatggagtctcg

SEQ ID NO: 34510 - DNA, 22 bp, Artificial Sequence
  chemically synthesized
tttgtttgagatggagtctcgc

SEQ ID NO: 34511 - DNA, 22 bp, Artificial Sequence
  chemically synthesized
gtttgagatggagtctcgcact

SEQ ID NO: 34512 - DNA, 22 bp, Artificial Sequence
  chemically synthesized
tttgagatggagtctcgcactg

SEQ ID NO: 34513 - DNA, 22 bp, Artificial Sequence
  chemically synthesized
gagatggagtctcgcactgttg

SEQ ID NO: 34514 - DNA, 22 bp, Artificial Sequence
  chemically synthesized
agatggagtctcgcactgttgc

SEQ ID NO: 34515 - DNA, 22 bp, Artificial Sequence
  chemically synthesized
gcactgttgcctggctggagtg

SEQ ID NO: 34516 - DNA, 22 bp, Artificial Sequence
  chemically synthesized
ttgcctggctggagtgcaatgg

SEQ ID NO: 34517 - DNA, 22 bp, Artificial Sequence
  chemically synthesized
cctggctggagtgcaatggtgc

SEQ ID NO: 34518 - DNA, 22 bp, Artificial Sequence
  chemically synthesized
gctggagtgcaatggtgcaatc

SEQ ID NO: 34519 - DNA, 22 bp, Artificial Sequence
  chemically synthesized
gagtgcaatggtgcaatctcag

SEQ ID NO: 34520 - DNA, 22 bp, Artificial Sequence
  chemically synthesized
agctcactgcaacctctgcctc

SEQ ID NO: 34521 - DNA, 22 bp, Artificial Sequence
  chemically synthesized
actgcaacctctgcctctccgg

SEQ ID NO: 34522 - DNA, 22 bp, Artificial Sequence
  chemically synthesized
caacctctgcctctccggttca

SEQ ID NO: 34523 - DNA, 22 bp, Artificial Sequence
  chemically synthesized
tgcctctccggttcaagtgatt

SEQ ID NO: 34524 - DNA, 22 bp, Artificial Sequence
  chemically synthesized
cctctccggttcaagtgattct

SEQ ID NO: 34525 - DNA, 22 bp, Artificial Sequence
  chemically synthesized
tccggttcaagtgattctcctg

SEQ ID NO: 34526 - DNA, 22 bp, Artificial Sequence
  chemically synthesized
cggttcaagtgattctcctgcc

SEQ ID NO: 34527 - DNA, 22 bp, Artificial Sequence
  chemically synthesized
aagtgattctcctgcctcagcc

SEQ ID NO: 34528 - DNA, 22 bp, Artificial Sequence
  chemically synthesized
tcctgcctcagcctcccaagta

SEQ ID NO: 34529 - DNA, 22 bp, Artificial Sequence
  chemically synthesized
ctgcctcagcctcccaagtagc

SEQ ID NO: 34530 - DNA, 22 bp, Artificial Sequence
  chemically synthesized
cctcagcctcccaagtagctgg

SEQ ID NO: 34531 - DNA, 22 bp, Artificial Sequence
  chemically synthesized
agcctcccaagtagctgggatt

SEQ ID NO: 34532 - DNA, 22 bp, Artificial Sequence
  chemically synthesized
ccaagtagctgggattacaggt

SEQ ID NO: 34533 - DNA, 22 bp, Artificial Sequence
  chemically synthesized
ggattacaggtgcccgccacca

SEQ ID NO: 34534 - DNA, 22 bp, Artificial Sequence
  chemically synthesized
caggtgcccgccaccatgccca

SEQ ID NO: 34535 - DNA, 22 bp, Artificial Sequence
  chemically synthesized
attttttttgtatttttagtag

SEQ ID NO: 34536 - DNA, 22 bp, Artificial Sequence
  chemically synthesized
tttttgtatttttagtagagac

SEQ ID NO: 34537 - DNA, 22 bp, Artificial Sequence
  chemically synthesized
ttttgtatttttagtagagaca

SEQ ID NO: 34538 - DNA, 22 bp, Artificial Sequence
  chemically synthesized
tttgtatttttagtagagacat

SEQ ID NO: 34539 - DNA, 22 bp, Artificial Sequence
  chemically synthesized
ttgtatttttagtagagacatg

SEQ ID NO: 34540 - DNA, 22 bp, Artificial Sequence
  chemically synthesized
tgtatttttagtagagacatgg

SEQ ID NO: 34541 - DNA, 22 bp, Artificial Sequence
  chemically synthesized
gtatttttagtagagacatggt

SEQ ID NO: 34542 - DNA, 22 bp, Artificial Sequence
  chemically synthesized
tatttttagtagagacatggtt

SEQ ID NO: 34543 - DNA, 22 bp, Artificial Sequence
  chemically synthesized
ttagtagagacatggtttcact

SEQ ID NO: 34544 - DNA, 22 bp, Artificial Sequence
  chemically synthesized
tagtagagacatggtttcacta

SEQ ID NO: 34545 - DNA, 22 bp, Artificial Sequence
  chemically synthesized
agtagagacatggtttcactat

SEQ ID NO: 34546 - DNA, 22 bp, Artificial Sequence
  chemically synthesized
gtagagacatggtttcactatg

SEQ ID NO: 34547 - DNA, 22 bp, Artificial Sequence
  chemically synthesized
cactatgttgactaggctggtc

SEQ ID NO: 34548 - DNA, 22 bp, Artificial Sequence
  chemically synthesized
actatgttgactaggctggtct

SEQ ID NO: 34549 - DNA, 22 bp, Artificial Sequence
  chemically synthesized
tgttgactaggctggtctcgaa

SEQ ID NO: 34550 - DNA, 22 bp, Artificial Sequence
  chemically synthesized
actaggctggtctcgaactcct

SEQ ID NO: 34551 - DNA, 22 bp, Artificial Sequence
  chemically synthesized
ggctggtctcgaactcctgacc

SEQ ID NO: 34552 - DNA, 22 bp, Artificial Sequence
  chemically synthesized
gtctcgaactcctgacctcatg

SEQ ID NO: 34553 - DNA, 22 bp, Artificial Sequence
  chemically synthesized
gaactcctgacctcatgatctg

SEQ ID NO: 34554 - DNA, 22 bp, Artificial Sequence
  chemically synthesized
ctgacctcatgatctgcctgcc

SEQ ID NO: 34555 - DNA, 22 bp, Artificial Sequence
  chemically synthesized
acctcatgatctgcctgccttg

SEQ ID NO: 34556 - DNA, 22 bp, Artificial Sequence
  chemically synthesized
atgatctgcctgccttggcctc

SEQ ID NO: 34557 - DNA, 22 bp, Artificial Sequence
  chemically synthesized
cctgccttggcctccctaagtg

SEQ ID NO: 34558 - DNA, 22 bp, Artificial Sequence
  chemically synthesized
ccttggcctccctaagtgctag

SEQ ID NO: 34559 - DNA, 22 bp, Artificial Sequence
  chemically synthesized
ggcctccctaagtgctaggatt

SEQ ID NO: 34560 - DNA, 22 bp, Artificial Sequence
  chemically synthesized
gcctccctaagtgctaggatta

SEQ ID NO: 34561 - DNA, 22 bp, Artificial Sequence
  chemically synthesized
cctaagtgctaggattacaggc

SEQ ID NO: 34562 - DNA, 22 bp, Artificial Sequence
  chemically synthesized
agtgctaggattacaggcgtga

SEQ ID NO: 34563 - DNA, 22 bp, Artificial Sequence
  chemically synthesized
ggattacaggcgtgagccacta

SEQ ID NO: 34564 - DNA, 22 bp, Artificial Sequence
  chemically synthesized
caggcgtgagccactacaccca

SEQ ID NO: 34565 - DNA, 22 bp, Artificial Sequence
  chemically synthesized
cacccagccgcatgattctaaa

SEQ ID NO: 34566 - DNA, 22 bp, Artificial Sequence
  chemically synthesized
taaaaaataaaaagatgaagtg

SEQ ID NO: 34567 - DNA, 22 bp, Artificial Sequence
  chemically synthesized
aaaaataaaaagatgaagtgtt

SEQ ID NO: 34568 - DNA, 22 bp, Artificial Sequence
  chemically synthesized
ttccaaacatctgatctccatt

SEQ ID NO: 34569 - DNA, 22 bp, Artificial Sequence
  chemically synthesized
caaacatctgatctccattgaa

SEQ ID NO: 34570 - DNA, 22 bp, Artificial Sequence
  chemically synthesized
atctccattgaagaaccatgca

SEQ ID NO: 34571 - DNA, 22 bp, Artificial Sequence
  chemically synthesized
cattgaagaaccatgcaatctc

SEQ ID NO: 34572 - DNA, 22 bp, Artificial Sequence
  chemically synthesized
aagaaccatgcaatctctctgg

SEQ ID NO: 34573 - DNA, 22 bp, Artificial Sequence
  chemically synthesized
tctgggttgatagaggccagag

SEQ ID NO: 34574 - DNA, 22 bp, Artificial Sequence
  chemically synthesized
tgggttgatagaggccagagtt

SEQ ID NO: 34575 - DNA, 22 bp, Artificial Sequence
  chemically synthesized
ggttgatagaggccagagttag

SEQ ID NO: 34576 - DNA, 22 bp, Artificial Sequence
  chemically synthesized
atagaggccagagttagtggct

SEQ ID NO: 34577 - DNA, 22 bp, Artificial Sequence
  chemically synthesized
gtggctctccctgatttcggtg

SEQ ID NO: 34578 - DNA, 22 bp, Artificial Sequence
  chemically synthesized
tccctgatttcggtgagaaatc

SEQ ID NO: 34579 - DNA, 22 bp, Artificial Sequence
  chemically synthesized
cctgatttcggtgagaaatcac

SEQ ID NO: 34580 - DNA, 22 bp, Artificial Sequence
  chemically synthesized
atttcggtgagaaatcactatt

SEQ ID NO: 34581 - DNA, 22 bp, Artificial Sequence
  chemically synthesized
cggtgagaaatcactattccac

SEQ ID NO: 34582 - DNA, 22 bp, Artificial Sequence
  chemically synthesized
ggtgagaaatcactattccacc

SEQ ID NO: 34583 - DNA, 22 bp, Artificial Sequence
  chemically synthesized
ttccaccatcacgggataaaag

SEQ ID NO: 34584 - DNA, 22 bp, Artificial Sequence
  chemically synthesized
caccatcacgggataaaaggca

SEQ ID NO: 34585 - DNA, 22 bp, Artificial Sequence
  chemically synthesized
actggcggttgacacctatttc

SEQ ID NO: 34586 - DNA, 22 bp, Artificial Sequence
  chemically synthesized
gcggttgacacctatttccaca

SEQ ID NO: 34587 - DNA, 22 bp, Artificial Sequence
  chemically synthesized
acacctatttccacagtgaaag

SEQ ID NO: 34588 - DNA, 22 bp, Artificial Sequence
  chemically synthesized
tttccacagtgaaagatatatc

SEQ ID NO: 34589 - DNA, 22 bp, Artificial Sequence
  chemically synthesized
ccacagtgaaagatatatctag

SEQ ID NO: 34590 - DNA, 22 bp, Artificial Sequence
  chemically synthesized
cacagtgaaagatatatctagt

SEQ ID NO: 34591 - DNA, 22 bp, Artificial Sequence
  chemically synthesized
gtacttttaaaggggaagtggt

SEQ ID NO: 34592 - DNA, 22 bp, Artificial Sequence
  chemically synthesized
ttaaaggggaagtggtttgtct

SEQ ID NO: 34593 - DNA, 22 bp, Artificial Sequence
  chemically synthesized
taaaggggaagtggtttgtctg

SEQ ID NO: 34594 - DNA, 22 bp, Artificial Sequence
  chemically synthesized
aaaggggaagtggtttgtctga

SEQ ID NO: 34595 - DNA, 22 bp, Artificial Sequence
  chemically synthesized
aaggggaagtggtttgtctgag

SEQ ID NO: 34596 - DNA, 22 bp, Artificial Sequence
  chemically synthesized
gtctgagatactctgtttcaaa

SEQ ID NO: 34597 - DNA, 22 bp, Artificial Sequence
  chemically synthesized
tctgagatactctgtttcaaag

SEQ ID NO: 34598 - DNA, 22 bp, Artificial Sequence
  chemically synthesized
agatactctgtttcaaagtaga

SEQ ID NO: 34599 - DNA, 22 bp, Artificial Sequence
  chemically synthesized
tgtttcaaagtagagaggatac

SEQ ID NO: 34600 - DNA, 22 bp, Artificial Sequence
  chemically synthesized
tttcaaagtagagaggatacag

SEQ ID NO: 34601 - DNA, 22 bp, Artificial Sequence
  chemically synthesized
caaagtagagaggatacagaac

SEQ ID NO: 34602 - DNA, 22 bp, Artificial Sequence
  chemically synthesized
aaagtagagaggatacagaaca

SEQ ID NO: 34603 - DNA, 22 bp, Artificial Sequence
  chemically synthesized
aagctatatacatccttacaga

SEQ ID NO: 34604 - DNA, 22 bp, Artificial Sequence
  chemically synthesized
tatacatccttacagagagcaa

SEQ ID NO: 34605 - DNA, 22 bp, Artificial Sequence
  chemically synthesized
acagagagcaattctgatggaa

SEQ ID NO: 34606 - DNA, 22 bp, Artificial Sequence
  chemically synthesized
cagagagcaattctgatggaaa

SEQ ID NO: 34607 - DNA, 22 bp, Artificial Sequence
  chemically synthesized
tgatggaaatgcaggccatgtt

SEQ ID NO: 34608 - DNA, 22 bp, Artificial Sequence
  chemically synthesized
atggaaatgcaggccatgtttc

SEQ ID NO: 34609 - DNA, 22 bp, Artificial Sequence
  chemically synthesized
ccctggggggggctcgtcctag

SEQ ID NO: 34610 - DNA, 22 bp, Artificial Sequence
  chemically synthesized
cctggggggggctcgtcctagg

SEQ ID NO: 34611 - DNA, 22 bp, Artificial Sequence
  chemically synthesized
gggggggctcgtcctaggggct

SEQ ID NO: 34612 - DNA, 22 bp, Artificial Sequence
  chemically synthesized
gtcctaggggctggagtgcatt

SEQ ID NO: 34613 - DNA, 22 bp, Artificial Sequence
  chemically synthesized
ggggctggagtgcattctctga

SEQ ID NO: 34614 - DNA, 22 bp, Artificial Sequence
  chemically synthesized
gagtgcattctctgatgtcaga

SEQ ID NO: 34615 - DNA, 22 bp, Artificial Sequence
  chemically synthesized
tctgatgtcagaggaaatgcaa

SEQ ID NO: 34616 - DNA, 22 bp, Artificial Sequence
  chemically synthesized
tgatgtcagaggaaatgcaaga

SEQ ID NO: 34617 - DNA, 22 bp, Artificial Sequence
  chemically synthesized
atgtcagaggaaatgcaagatt

SEQ ID NO: 34618 - DNA, 22 bp, Artificial Sequence
  chemically synthesized
cctgaggcctgagggaacccat

SEQ ID NO: 34619 - DNA, 22 bp, Artificial Sequence
  chemically synthesized
aggcctgagggaacccatggta

SEQ ID NO: 34620 - DNA, 22 bp, Artificial Sequence
  chemically synthesized
agggaacccatggtatatgcaa

SEQ ID NO: 34621 - DNA, 22 bp, Artificial Sequence
  chemically synthesized
caaactgtagttccatatgcat

SEQ ID NO: 34622 - DNA, 22 bp, Artificial Sequence
  chemically synthesized
aaactgtagttccatatgcatt

SEQ ID NO: 34623 - DNA, 22 bp, Artificial Sequence
  chemically synthesized
tagttccatatgcattcttcca

SEQ ID NO: 34624 - DNA, 22 bp, Artificial Sequence
  chemically synthesized
catatgcattcttccaggacaa

SEQ ID NO: 34625 - DNA, 22 bp, Artificial Sequence
  chemically synthesized
ttccaggacaaatacttcttga

SEQ ID NO: 34626 - DNA, 22 bp, Artificial Sequence
  chemically synthesized
ccaggacaaatacttcttgagg

SEQ ID NO: 34627 - DNA, 22 bp, Artificial Sequence
  chemically synthesized
caggacaaatacttcttgaggt

SEQ ID NO: 34628 - DNA, 22 bp, Artificial Sequence
  chemically synthesized
cttgaggttaaaaaaaaaaagt

SEQ ID NO: 34629 - DNA, 22 bp, Artificial Sequence
  chemically synthesized
ttgaggttaaaaaaaaaaagtc

SEQ ID NO: 34630 - DNA, 22 bp, Artificial Sequence
  chemically synthesized
gaggttaaaaaaaaaaagtcac

SEQ ID NO: 34631 - DNA, 22 bp, Artificial Sequence
  chemically synthesized
aggttaaaaaaaaaaagtcaca

SEQ ID NO: 34632 - DNA, 22 bp, Artificial Sequence
  chemically synthesized
aaaaaaaaaagtcacatagctg

SEQ ID NO: 34633 - DNA, 22 bp, Artificial Sequence
  chemically synthesized
ccattttatggatttcaggatt

SEQ ID NO: 34634 - DNA, 22 bp, Artificial Sequence
  chemically synthesized
tatggatttcaggatttttttt

SEQ ID NO: 34635 - DNA, 22 bp, Artificial Sequence
  chemically synthesized
atggatttcaggattttttttt

SEQ ID NO: 34636 - DNA, 22 bp, Artificial Sequence
  chemically synthesized
tggatttcaggatttttttttt

SEQ ID NO: 34637 - DNA, 22 bp, Artificial Sequence
  chemically synthesized
caggattttttttttttttttt

SEQ ID NO: 34638 - DNA, 22 bp, Artificial Sequence
  chemically synthesized
aggatttttttttttttttttt

SEQ ID NO: 34639 - DNA, 22 bp, Artificial Sequence
  chemically synthesized
ttttttttttttttttgagatg

SEQ ID NO: 34640 - DNA, 22 bp, Artificial Sequence
  chemically synthesized
tttttttttttttttgagatgg

SEQ ID NO: 34641 - DNA, 22 bp, Artificial Sequence
  chemically synthesized
ttttttttttttttgagatgga

SEQ ID NO: 34642 - DNA, 22 bp, Artificial Sequence
  chemically synthesized
tttttttttttttgagatggag

SEQ ID NO: 34643 - DNA, 22 bp, Artificial Sequence
  chemically synthesized
ttttttttttttgagatggagt

SEQ ID NO: 34644 - DNA, 22 bp, Artificial Sequence
  chemically synthesized
tttttttttttgagatggagtc

SEQ ID NO: 34645 - DNA, 22 bp, Artificial Sequence
  chemically synthesized
ttttttttttgagatggagtct

SEQ ID NO: 34646 - DNA, 22 bp, Artificial Sequence
  chemically synthesized
tttttttttgagatggagtctt

SEQ ID NO: 34647 - DNA, 22 bp, Artificial Sequence
  chemically synthesized
ttttttttgagatggagtcttg

SEQ ID NO: 34648 - DNA, 22 bp, Artificial Sequence
  chemically synthesized
tttttttgagatggagtcttgc

SEQ ID NO: 34649 - DNA, 22 bp, Artificial Sequence
  chemically synthesized
ttttttgagatggagtcttgct

SEQ ID NO: 34650 - DNA, 22 bp, Artificial Sequence
  chemically synthesized
tttttgagatggagtcttgctc

SEQ ID NO: 34651 - DNA, 22 bp, Artificial Sequence
  chemically synthesized
ttttgagatggagtcttgctct

SEQ ID NO: 34652 - DNA, 22 bp, Artificial Sequence
  chemically synthesized
tttgagatggagtcttgctctg

SEQ ID NO: 34653 - DNA, 22 bp, Artificial Sequence
  chemically synthesized
ttgagatggagtcttgctctgt

SEQ ID NO: 34654 - DNA, 22 bp, Artificial Sequence
  chemically synthesized
tgagatggagtcttgctctgtc

SEQ ID NO: 34655 - DNA, 22 bp, Artificial Sequence
  chemically synthesized
gagatggagtcttgctctgtca

SEQ ID NO: 34656 - DNA, 22 bp, Artificial Sequence
  chemically synthesized
agatggagtcttgctctgtcac

SEQ ID NO: 34657 - DNA, 22 bp, Artificial Sequence
  chemically synthesized
gctctgtcacccagcctgtagt

SEQ ID NO: 34658 - DNA, 22 bp, Artificial Sequence
  chemically synthesized
ctctgtcacccagcctgtagtg

SEQ ID NO: 34659 - DNA, 22 bp, Artificial Sequence
  chemically synthesized
tgtcacccagcctgtagtgcag

SEQ ID NO: 34660 - DNA, 22 bp, Artificial Sequence
  chemically synthesized
tcacccagcctgtagtgcagtg

SEQ ID NO: 34661 - DNA, 22 bp, Artificial Sequence
  chemically synthesized
tagtgcagtggcataatctcgg

SEQ ID NO: 34662 - DNA, 22 bp, Artificial Sequence
  chemically synthesized
ggctcacggcaacctccgcctc

SEQ ID NO: 34663 - DNA, 22 bp, Artificial Sequence
  chemically synthesized
acggcaacctccgcctcccagg

SEQ ID NO: 34664 - DNA, 22 bp, Artificial Sequence
  chemically synthesized
cgcctcccaggttcaagcgatt

SEQ ID NO: 34665 - DNA, 22 bp, Artificial Sequence
  chemically synthesized
ccaggttcaagcgattctcttg

SEQ ID NO: 34666 - DNA, 22 bp, Artificial Sequence
  chemically synthesized
aagcgattctcttgccttagcc

SEQ ID NO: 34667 - DNA, 22 bp, Artificial Sequence
  chemically synthesized
tcttgccttagcctcccgagta

SEQ ID NO: 34668 - DNA, 22 bp, Artificial Sequence
  chemically synthesized
ttgccttagcctcccgagtagc

SEQ ID NO: 34669 - DNA, 22 bp, Artificial Sequence
  chemically synthesized
gccttagcctcccgagtagctg

SEQ ID NO: 34670 - DNA, 22 bp, Artificial Sequence
  chemically synthesized
ccttagcctcccgagtagctgg

SEQ ID NO: 34671 - DNA, 22 bp, Artificial Sequence
  chemically synthesized
agcctcccgagtagctgggatt

SEQ ID NO: 34672 - DNA, 22 bp, Artificial Sequence
  chemically synthesized
gcctcccgagtagctgggatta

SEQ ID NO: 34673 - DNA, 22 bp, Artificial Sequence
  chemically synthesized
ccgagtagctgggattacagtc

SEQ ID NO: 34674 - DNA, 22 bp, Artificial Sequence
  chemically synthesized
ggattacagtcacgcaccacca

SEQ ID NO: 34675 - DNA, 22 bp, Artificial Sequence
  chemically synthesized
cagtcacgcaccaccacatctg

SEQ ID NO: 34676 - DNA, 22 bp, Artificial Sequence
  chemically synthesized
gctaattctttatattttttgg

SEQ ID NO: 34677 - DNA, 22 bp, Artificial Sequence
  chemically synthesized
attctttatattttttggtaga

SEQ ID NO: 34678 - DNA, 22 bp, Artificial Sequence
  chemically synthesized
tttatattttttggtagaaacg

SEQ ID NO: 34679 - DNA, 22 bp, Artificial Sequence
  chemically synthesized
tatattttttggtagaaacggt

SEQ ID NO: 34680 - DNA, 22 bp, Artificial Sequence
  chemically synthesized
atattttttggtagaaacggtg

SEQ ID NO: 34681 - DNA, 22 bp, Artificial Sequence
  chemically synthesized
tattttttggtagaaacggtgt

SEQ ID NO: 34682 - DNA, 22 bp, Artificial Sequence
  chemically synthesized
tttggtagaaacggtgtttcac

SEQ ID NO: 34683 - DNA, 22 bp, Artificial Sequence
  chemically synthesized
ttggtagaaacggtgtttcacc

SEQ ID NO: 34684 - DNA, 22 bp, Artificial Sequence
  chemically synthesized
tggtagaaacggtgtttcacca

SEQ ID NO: 34685 - DNA, 22 bp, Artificial Sequence
  chemically synthesized
ggtagaaacggtgtttcaccat

SEQ ID NO: 34686 - DNA, 22 bp, Artificial Sequence
  chemically synthesized
gtagaaacggtgtttcaccatg

SEQ ID NO: 34687 - DNA, 22 bp, Artificial Sequence
  chemically synthesized
caccatgttggccaggctggtc

SEQ ID NO: 34688 - DNA, 22 bp, Artificial Sequence
  chemically synthesized
accatgttggccaggctggtct

SEQ ID NO: 34689 - DNA, 22 bp, Artificial Sequence
  chemically synthesized
gccaggctggtctcaaactcct

SEQ ID NO: 34690 - DNA, 22 bp, Artificial Sequence
  chemically synthesized
gtctcaaactcctgacctcatg

SEQ ID NO: 34691 - DNA, 22 bp, Artificial Sequence
  chemically synthesized
aaactcctgacctcatgtgatc

SEQ ID NO: 34692 - DNA, 22 bp, Artificial Sequence
  chemically synthesized
ctgacctcatgtgatctgcctg

SEQ ID NO: 34693 - DNA, 22 bp, Artificial Sequence
  chemically synthesized
acctcatgtgatctgcctgcct

SEQ ID NO: 34694 - DNA, 22 bp, Artificial Sequence
  chemically synthesized
atgtgatctgcctgccttggcc

SEQ ID NO: 34695 - DNA, 22 bp, Artificial Sequence
  chemically synthesized
cctgccttggcctcccaaagtg

SEQ ID NO: 34696 - DNA, 22 bp, Artificial Sequence
  chemically synthesized
ccttggcctcccaaagtgctga

SEQ ID NO: 34697 - DNA, 22 bp, Artificial Sequence
  chemically synthesized
ggcctcccaaagtgctgagatt

SEQ ID NO: 34698 - DNA, 22 bp, Artificial Sequence
  chemically synthesized
gcctcccaaagtgctgagatta

SEQ ID NO: 34699 - DNA, 22 bp, Artificial Sequence
  chemically synthesized
ccaaagtgctgagattacaggt

SEQ ID NO: 34700 - DNA, 22 bp, Artificial Sequence
  chemically synthesized
agattacaggtgtgagccaccg

SEQ ID NO: 34701 - DNA, 22 bp, Artificial Sequence
  chemically synthesized
caggtgtgagccaccgcgcctg

SEQ ID NO: 34702 - DNA, 22 bp, Artificial Sequence
  chemically synthesized
cctggagttcagaatcttgggc

SEQ ID NO: 34703 - DNA, 22 bp, Artificial Sequence
  chemically synthesized
gagttcagaatcttgggcttca

SEQ ID NO: 34704 - DNA, 22 bp, Artificial Sequence
  chemically synthesized
agaatcttgggcttcattattt

SEQ ID NO: 34705 - DNA, 22 bp, Artificial Sequence
  chemically synthesized
gggcttcattatttgtgtttaa

SEQ ID NO: 34706 - DNA, 22 bp, Artificial Sequence
  chemically synthesized
ggcttcattatttgtgtttaaa

SEQ ID NO: 34707 - DNA, 22 bp, Artificial Sequence
  chemically synthesized
cattatttgtgtttaaatagat

SEQ ID NO: 34708 - DNA, 22 bp, Artificial Sequence
  chemically synthesized
attatttgtgtttaaatagatc

SEQ ID NO: 34709 - DNA, 22 bp, Artificial Sequence
  chemically synthesized
tttgtgtttaaatagatcatac

SEQ ID NO: 34710 - DNA, 22 bp, Artificial Sequence
  chemically synthesized
gtgtttaaatagatcatacagt

SEQ ID NO: 34711 - DNA, 22 bp, Artificial Sequence
  chemically synthesized
tgtttaaatagatcatacagtc

SEQ ID NO: 34712 - DNA, 22 bp, Artificial Sequence
  chemically synthesized
aaatagatcatacagtcaggca

SEQ ID NO: 34713 - DNA, 22 bp, Artificial Sequence
  chemically synthesized
aatagatcatacagtcaggcac

SEQ ID NO: 34714 - DNA, 22 bp, Artificial Sequence
  chemically synthesized
atgcctgtaatcccagcacttt

SEQ ID NO: 34715 - DNA, 22 bp, Artificial Sequence
  chemically synthesized
taatcccagcactttgggaggc

SEQ ID NO: 34716 - DNA, 22 bp, Artificial Sequence
  chemically synthesized
tgggaggctgaggtgggaggat

SEQ ID NO: 34717 - DNA, 22 bp, Artificial Sequence
  chemically synthesized
gggaggctgaggtgggaggatt

SEQ ID NO: 34718 - DNA, 22 bp, Artificial Sequence
  chemically synthesized
ggaggctgaggtgggaggattg

SEQ ID NO: 34719 - DNA, 22 bp, Artificial Sequence
  chemically synthesized
aggtgggaggattgcctgagtt

SEQ ID NO: 34720 - DNA, 22 bp, Artificial Sequence
  chemically synthesized
cctgagttcaggagatggagac

SEQ ID NO: 34721 - DNA, 22 bp, Artificial Sequence
  chemically synthesized
agttcaggagatggagaccagc

SEQ ID NO: 34722 - DNA, 22 bp, Artificial Sequence
  chemically synthesized
aggagatggagaccagcctggg

SEQ ID NO: 34723 - DNA, 22 bp, Artificial Sequence
  chemically synthesized
ggcaacatggtgaaaccccgtc

SEQ ID NO: 34724 - DNA, 22 bp, Artificial Sequence
  chemically synthesized
tactaaaaatacaaaaactagc

SEQ ID NO: 34725 - DNA, 22 bp, Artificial Sequence
  chemically synthesized
ctaaaaatacaaaaactagctg

SEQ ID NO: 34726 - DNA, 22 bp, Artificial Sequence
  chemically synthesized
aaaatacaaaaactagctggat

SEQ ID NO: 34727 - DNA, 22 bp, Artificial Sequence
  chemically synthesized
gctggatgtggtggcacacacc

SEQ ID NO: 34728 - DNA, 22 bp, Artificial Sequence
  chemically synthesized
gatgtggtggcacacacctgta

SEQ ID NO: 34729 - DNA, 22 bp, Artificial Sequence
  chemically synthesized
tagtcccagctattcaggaggc

SEQ ID NO: 34730 - DNA, 22 bp, Artificial Sequence
  chemically synthesized
ttcaggaggctgaggtgggagg

SEQ ID NO: 34731 - DNA, 22 bp, Artificial Sequence
  chemically synthesized
aggaggctgaggtgggaggatc

SEQ ID NO: 34732 - DNA, 22 bp, Artificial Sequence
  chemically synthesized
aggtgggaggatcccaggaggt

SEQ ID NO: 34733 - DNA, 22 bp, Artificial Sequence
  chemically synthesized
cgccactgcactccaggctggg

SEQ ID NO: 34734 - DNA, 22 bp, Artificial Sequence
  chemically synthesized
cactccaggctgggttactgag

SEQ ID NO: 34735 - DNA, 22 bp, Artificial Sequence
  chemically synthesized
caggctgggttactgagccaga

SEQ ID NO: 34736 - DNA, 22 bp, Artificial Sequence
  chemically synthesized
ggttactgagccagatcctgtc

SEQ ID NO: 34737 - DNA, 22 bp, Artificial Sequence
  chemically synthesized
ctgagccagatcctgtctcaaa

SEQ ID NO: 34738 - DNA, 22 bp, Artificial Sequence
  chemically synthesized
agccagatcctgtctcaaaaaa

SEQ ID NO: 34739 - DNA, 22 bp, Artificial Sequence
  chemically synthesized
tctcaaaaaaaaaaaagataat

SEQ ID NO: 34740 - DNA, 22 bp, Artificial Sequence
  chemically synthesized
aaaaaaaaaaaagataatacat

SEQ ID NO: 34741 - DNA, 22 bp, Artificial Sequence
  chemically synthesized
aaacagttcaaaatgcaaaagt

SEQ ID NO: 34742 - DNA, 22 bp, Artificial Sequence
  chemically synthesized
aaaatgcaaaagttacatacat

SEQ ID NO: 34743 - DNA, 22 bp, Artificial Sequence
  chemically synthesized
catacataaggaagtgtcatga

SEQ ID NO: 34744 - DNA, 22 bp, Artificial Sequence
  chemically synthesized
cctctcacacttctccccagcc

SEQ ID NO: 34745 - DNA, 22 bp, Artificial Sequence
  chemically synthesized
tcacacttctccccagccaccc

SEQ ID NO: 34746 - DNA, 22 bp, Artificial Sequence
  chemically synthesized
acacttctccccagccacccag

SEQ ID NO: 34747 - DNA, 22 bp, Artificial Sequence
  chemically synthesized
ctccccagccacccagttctcc

SEQ ID NO: 34748 - DNA, 22 bp, Artificial Sequence
  chemically synthesized
tccccagccacccagttctccc

SEQ ID NO: 34749 - DNA, 22 bp, Artificial Sequence
  chemically synthesized
cccagccacccagttctccctt

SEQ ID NO: 34750 - DNA, 22 bp, Artificial Sequence
  chemically synthesized
tcccttctagaggcaacatgtg

SEQ ID NO: 34751 - DNA, 22 bp, Artificial Sequence
  chemically synthesized
ccttctagaggcaacatgtgaa

SEQ ID NO: 34752 - DNA, 22 bp, Artificial Sequence
  chemically synthesized
ctagaggcaacatgtgaaatcc

SEQ ID NO: 34753 - DNA, 22 bp, Artificial Sequence
  chemically synthesized
tagaggcaacatgtgaaatcct

SEQ ID NO: 34754 - DNA, 22 bp, Artificial Sequence
  chemically synthesized
gaggcaacatgtgaaatccttc

SEQ ID NO: 34755 - DNA, 22 bp, Artificial Sequence
  chemically synthesized
ctcaggctacactcttcttgaa

SEQ ID NO: 34756 - DNA, 22 bp, Artificial Sequence
  chemically synthesized
tcaggctacactcttcttgaag

SEQ ID NO: 34757 - DNA, 22 bp, Artificial Sequence
  chemically synthesized
aggctacactcttcttgaaggt

SEQ ID NO: 34758 - DNA, 22 bp, Artificial Sequence
  chemically synthesized
cactcttcttgaaggtgtaggc

SEQ ID NO: 34759 - DNA, 22 bp, Artificial Sequence
  chemically synthesized
ttcttgaaggtgtaggctttgg

SEQ ID NO: 34760 - DNA, 22 bp, Artificial Sequence
  chemically synthesized
cttgaaggtgtaggctttgggc

SEQ ID NO: 34761 - DNA, 22 bp, Artificial Sequence
  chemically synthesized
ttgaaggtgtaggctttgggca

SEQ ID NO: 34762 - DNA, 22 bp, Artificial Sequence
  chemically synthesized
gaaggtgtaggctttgggcaaa

SEQ ID NO: 34763 - DNA, 22 bp, Artificial Sequence
  chemically synthesized
aaggtgtaggctttgggcaaaa

SEQ ID NO: 34764 - DNA, 22 bp, Artificial Sequence
  chemically synthesized
tgggcaaaagcattcattcagt

SEQ ID NO: 34765 - DNA, 22 bp, Artificial Sequence
  chemically synthesized
gggcaaaagcattcattcagta

SEQ ID NO: 34766 - DNA, 22 bp, Artificial Sequence
  chemically synthesized
ggcaaaagcattcattcagtaa

SEQ ID NO: 34767 - DNA, 22 bp, Artificial Sequence
  chemically synthesized
attcagtaaccccagaaacttg

SEQ ID NO: 34768 - DNA, 22 bp, Artificial Sequence
  chemically synthesized
agtaaccccagaaacttgttct

SEQ ID NO: 34769 - DNA, 22 bp, Artificial Sequence
  chemically synthesized
gttctgtttttccataggattc

SEQ ID NO: 34770 - DNA, 22 bp, Artificial Sequence
  chemically synthesized
ttctgtttttccataggattct

SEQ ID NO: 34771 - DNA, 22 bp, Artificial Sequence
  chemically synthesized
tgtttttccataggattctctt

SEQ ID NO: 34772 - DNA, 22 bp, Artificial Sequence
  chemically synthesized
tttttccataggattctctttg

SEQ ID NO: 34773 - DNA, 22 bp, Artificial Sequence
  chemically synthesized
ttccataggattctctttggac

SEQ ID NO: 34774 - DNA, 22 bp, Artificial Sequence
  chemically synthesized
tccataggattctctttggaca

SEQ ID NO: 34775 - DNA, 22 bp, Artificial Sequence
  chemically synthesized
ccataggattctctttggacag

SEQ ID NO: 34776 - DNA, 22 bp, Artificial Sequence
  chemically synthesized
cataggattctctttggacagc

SEQ ID NO: 34777 - DNA, 22 bp, Artificial Sequence
  chemically synthesized
tctttggacagcgtccatactg

SEQ ID NO: 34778 - DNA, 22 bp, Artificial Sequence
  chemically synthesized
tttggacagcgtccatactggt

SEQ ID NO: 34779 - DNA, 22 bp, Artificial Sequence
  chemically synthesized
tggacagcgtccatactggtgg

SEQ ID NO: 34780 - DNA, 22 bp, Artificial Sequence
  chemically synthesized
ggacagcgtccatactggtggg

SEQ ID NO: 34781 - DNA, 22 bp, Artificial Sequence
  chemically synthesized
gacagcgtccatactggtgggt

SEQ ID NO: 34782 - DNA, 22 bp, Artificial Sequence
  chemically synthesized
gtgggttttggatactgactac

SEQ ID NO: 34783 - DNA, 22 bp, Artificial Sequence
  chemically synthesized
tggatactgactactacagcaa

SEQ ID NO: 34784 - DNA, 22 bp, Artificial Sequence
  chemically synthesized
ggatactgactactacagcaac

SEQ ID NO: 34785 - DNA, 22 bp, Artificial Sequence
  chemically synthesized
gatactgactactacagcaaca

SEQ ID NO: 34786 - DNA, 22 bp, Artificial Sequence
  chemically synthesized
actactacagcaacacttccgt

SEQ ID NO: 34787 - DNA, 22 bp, Artificial Sequence
  chemically synthesized
ctacagcaacacttccgtgccc

SEQ ID NO: 34788 - DNA, 22 bp, Artificial Sequence
  chemically synthesized
cagcaacacttccgtgcccctg

SEQ ID NO: 34789 - DNA, 22 bp, Artificial Sequence
  chemically synthesized
ccgtgcccctgataaagcagtt

SEQ ID NO: 34790 - DNA, 22 bp, Artificial Sequence
  chemically synthesized
cgtgcccctgataaagcagttc

SEQ ID NO: 34791 - DNA, 22 bp, Artificial Sequence
  chemically synthesized
ataaagcagttccctgtaacct

SEQ ID NO: 34792 - DNA, 22 bp, Artificial Sequence
  chemically synthesized
cctgtaacctgtgagactggac

SEQ ID NO: 34793 - DNA, 22 bp, Artificial Sequence
  chemically synthesized
taacctgtgagactggaccagg

SEQ ID NO: 34794 - DNA, 22 bp, Artificial Sequence
  chemically synthesized
tgagactggaccaggtaagcgt

SEQ ID NO: 34795 - DNA, 22 bp, Artificial Sequence
  chemically synthesized
gaccaggtaagcgtcccagccc

SEQ ID NO: 34796 - DNA, 22 bp, Artificial Sequence
  chemically synthesized
cagacagaagctgagtggacct

SEQ ID NO: 34797 - DNA, 22 bp, Artificial Sequence
  chemically synthesized
agtggacctcgtttacctgtta

SEQ ID NO: 34798 - DNA, 22 bp, Artificial Sequence
  chemically synthesized
gtttacctgttatggatgaaac

SEQ ID NO: 34799 - DNA, 22 bp, Artificial Sequence
  chemically synthesized
acctgttatggatgaaactgac

SEQ ID NO: 34800 - DNA, 22 bp, Artificial Sequence
  chemically synthesized
cctgttatggatgaaactgacc

SEQ ID NO: 34801 - DNA, 22 bp, Artificial Sequence
  chemically synthesized
ttatggatgaaactgaccttga

SEQ ID NO: 34802 - DNA, 22 bp, Artificial Sequence
  chemically synthesized
tggatgaaactgaccttgaggg

SEQ ID NO: 34803 - DNA, 22 bp, Artificial Sequence
  chemically synthesized
accttgaggggacatgaggaga

SEQ ID NO: 34804 - DNA, 22 bp, Artificial Sequence
  chemically synthesized
gaggggacatgaggagagccat

SEQ ID NO: 34805 - DNA, 22 bp, Artificial Sequence
  chemically synthesized
aggggacatgaggagagccatt

SEQ ID NO: 34806 - DNA, 22 bp, Artificial Sequence
  chemically synthesized
ctttgtacttttgtcatgctct

SEQ ID NO: 34807 - DNA, 22 bp, Artificial Sequence
  chemically synthesized
tgtacttttgtcatgctcttca

SEQ ID NO: 34808 - DNA, 22 bp, Artificial Sequence
  chemically synthesized
gtacttttgtcatgctcttcaa

SEQ ID NO: 34809 - DNA, 22 bp, Artificial Sequence
  chemically synthesized
tacttttgtcatgctcttcaat

SEQ ID NO: 34810 - DNA, 22 bp, Artificial Sequence
  chemically synthesized
ttgtcatgctcttcaattggca

SEQ ID NO: 34811 - DNA, 22 bp, Artificial Sequence
  chemically synthesized
tgtcatgctcttcaattggcac

SEQ ID NO: 34812 - DNA, 22 bp, Artificial Sequence
  chemically synthesized
gtcatgctcttcaattggcaca

SEQ ID NO: 34813 - DNA, 22 bp, Artificial Sequence
  chemically synthesized
tcatgctcttcaattggcacaa

SEQ ID NO: 34814 - DNA, 22 bp, Artificial Sequence
  chemically synthesized
ttcaattggcacaaattaattc

SEQ ID NO: 34815 - DNA, 22 bp, Artificial Sequence
  chemically synthesized
caattggcacaaattaattcac

SEQ ID NO: 34816 - DNA, 22 bp, Artificial Sequence
  chemically synthesized
aattggcacaaattaattcact

SEQ ID NO: 34817 - DNA, 22 bp, Artificial Sequence
  chemically synthesized
gcacaaattaattcacttctgc

SEQ ID NO: 34818 - DNA, 22 bp, Artificial Sequence
  chemically synthesized
attcacttctgcaatactttcc

SEQ ID NO: 34819 - DNA, 22 bp, Artificial Sequence
  chemically synthesized
acttctgcaatactttcctgaa

SEQ ID NO: 34820 - DNA, 22 bp, Artificial Sequence
  chemically synthesized
ctgcaatactttcctgaatagc

SEQ ID NO: 34821 - DNA, 22 bp, Artificial Sequence
  chemically synthesized
tgcaatactttcctgaatagca

SEQ ID NO: 34822 - DNA, 22 bp, Artificial Sequence
  chemically synthesized
caatactttcctgaatagcaca

SEQ ID NO: 34823 - DNA, 22 bp, Artificial Sequence
  chemically synthesized
tcctgaatagcacagtagtatt

SEQ ID NO: 34824 - DNA, 22 bp, Artificial Sequence
  chemically synthesized
cctgaatagcacagtagtattg

SEQ ID NO: 34825 - DNA, 22 bp, Artificial Sequence
  chemically synthesized
ctgaatagcacagtagtattgg

SEQ ID NO: 34826 - DNA, 22 bp, Artificial Sequence
  chemically synthesized
aatagcacagtagtattggaaa

SEQ ID NO: 34827 - DNA, 22 bp, Artificial Sequence
  chemically synthesized
gaaatctgcctattacagaacc

SEQ ID NO: 34828 - DNA, 22 bp, Artificial Sequence
  chemically synthesized
cctattacagaacctggatgga

SEQ ID NO: 34829 - DNA, 22 bp, Artificial Sequence
  chemically synthesized
ttacagaacctggatggagtcc

SEQ ID NO: 34830 - DNA, 22 bp, Artificial Sequence
  chemically synthesized
cagaacctggatggagtccaga

SEQ ID NO: 34831 - DNA, 22 bp, Artificial Sequence
  chemically synthesized
gatggagtccagagaggcacgg

SEQ ID NO: 34832 - DNA, 22 bp, Artificial Sequence
  chemically synthesized
gtgagagtcaccgccctgcagc

SEQ ID NO: 34833 - DNA, 22 bp, Artificial Sequence
  chemically synthesized
cagggcggtgactctcacgagc

SEQ ID NO: 34834 - DNA, 22 bp, Artificial Sequence
  chemically synthesized
tcacgagccctttgcccatgga

SEQ ID NO: 34835 - DNA, 22 bp, Artificial Sequence
  chemically synthesized
acgagccctttgcccatggatg

SEQ ID NO: 34836 - DNA, 22 bp, Artificial Sequence
  chemically synthesized
tgcccatggatgcccgtgcctc

SEQ ID NO: 34837 - DNA, 22 bp, Artificial Sequence
  chemically synthesized
gcccatggatgcccgtgcctct

SEQ ID NO: 34838 - DNA, 22 bp, Artificial Sequence
  chemically synthesized
cccatggatgcccgtgcctctc

SEQ ID NO: 34839 - DNA, 22 bp, Artificial Sequence
  chemically synthesized
tctggactccatccaggttctg

SEQ ID NO: 34840 - DNA, 22 bp, Artificial Sequence
  chemically synthesized
tggactccatccaggttctgta

SEQ ID NO: 34841 - DNA, 22 bp, Artificial Sequence
  chemically synthesized
gactccatccaggttctgtaat

SEQ ID NO: 34842 - DNA, 22 bp, Artificial Sequence
  chemically synthesized
catccaggttctgtaataggca

SEQ ID NO: 34843 - DNA, 22 bp, Artificial Sequence
  chemically synthesized
tgtaataggcagatttccaata

SEQ ID NO: 34844 - DNA, 22 bp, Artificial Sequence
  chemically synthesized
taataggcagatttccaatact

SEQ ID NO: 34845 - DNA, 22 bp, Artificial Sequence
  chemically synthesized
ccaatactactgtgctattcag

SEQ ID NO: 34846 - DNA, 22 bp, Artificial Sequence
  chemically synthesized
caatactactgtgctattcagg

SEQ ID NO: 34847 - DNA, 22 bp, Artificial Sequence
  chemically synthesized
ctgtgctattcaggaaagtatt

SEQ ID NO: 34848 - DNA, 22 bp, Artificial Sequence
  chemically synthesized
tgctattcaggaaagtattgca

SEQ ID NO: 34849 - DNA, 22 bp, Artificial Sequence
  chemically synthesized
ttcaggaaagtattgcagaagt

SEQ ID NO: 34850 - DNA, 22 bp, Artificial Sequence
  chemically synthesized
aggaaagtattgcagaagtgaa

SEQ ID NO: 34851 - DNA, 22 bp, Artificial Sequence
  chemically synthesized
cagaagtgaattaatttgtgcc

SEQ ID NO: 34852 - DNA, 22 bp, Artificial Sequence
  chemically synthesized
atttgtgccaattgaagagcat

SEQ ID NO: 34853 - DNA, 22 bp, Artificial Sequence
  chemically synthesized
gtgccaattgaagagcatgaca

SEQ ID NO: 34854 - DNA, 22 bp, Artificial Sequence
  chemically synthesized
tgccaattgaagagcatgacaa

SEQ ID NO: 34855 - DNA, 22 bp, Artificial Sequence
  chemically synthesized
aagagcatgacaaaagtacaaa

SEQ ID NO: 34856 - DNA, 22 bp, Artificial Sequence
  chemically synthesized
tcctcatgtcccctcaaggtca

SEQ ID NO: 34857 - DNA, 22 bp, Artificial Sequence
  chemically synthesized
ctcatgtcccctcaaggtcagt

SEQ ID NO: 34858 - DNA, 22 bp, Artificial Sequence
  chemically synthesized
atgtcccctcaaggtcagtttc

SEQ ID NO: 34859 - DNA, 22 bp, Artificial Sequence
  chemically synthesized
aaggtcagtttcatccataaca

SEQ ID NO: 34860 - DNA, 22 bp, Artificial Sequence
  chemically synthesized
catccataacaggtaaacgagg

SEQ ID NO: 34861 - DNA, 22 bp, Artificial Sequence
  chemically synthesized
atccataacaggtaaacgaggt

SEQ ID NO: 34862 - DNA, 22 bp, Artificial Sequence
  chemically synthesized
agcttctgtctgcaggggctgg

SEQ ID NO: 34863 - DNA, 22 bp, Artificial Sequence
  chemically synthesized
ctgtctgcaggggctgggacgc

SEQ ID NO: 34864 - DNA, 22 bp, Artificial Sequence
  chemically synthesized
tgtctgcaggggctgggacgct

SEQ ID NO: 34865 - DNA, 22 bp, Artificial Sequence
  chemically synthesized
tctgcaggggctgggacgctta

SEQ ID NO: 34866 - DNA, 22 bp, Artificial Sequence
  chemically synthesized
caggggctgggacgcttacctg

SEQ ID NO: 34867 - DNA, 22 bp, Artificial Sequence
  chemically synthesized
ggacgcttacctggtccagtct

SEQ ID NO: 34868 - DNA, 22 bp, Artificial Sequence
  chemically synthesized
acctggtccagtctcacaggtt

SEQ ID NO: 34869 - DNA, 22 bp, Artificial Sequence
  chemically synthesized
cctggtccagtctcacaggtta

SEQ ID NO: 34870 - DNA, 22 bp, Artificial Sequence
  chemically synthesized
gtccagtctcacaggttacagg

SEQ ID NO: 34871 - DNA, 22 bp, Artificial Sequence
  chemically synthesized
acaggttacagggaactgcttt

SEQ ID NO: 34872 - DNA, 22 bp, Artificial Sequence
  chemically synthesized
cagggaactgctttatcagggg

SEQ ID NO: 34873 - DNA, 22 bp, Artificial Sequence
  chemically synthesized
ctttatcaggggcacggaagtg

SEQ ID NO: 34874 - DNA, 22 bp, Artificial Sequence
  chemically synthesized
tatcaggggcacggaagtgttg

SEQ ID NO: 34875 - DNA, 22 bp, Artificial Sequence
  chemically synthesized
atcaggggcacggaagtgttgc

SEQ ID NO: 34876 - DNA, 22 bp, Artificial Sequence
  chemically synthesized
tcaggggcacggaagtgttgct

SEQ ID NO: 34877 - DNA, 22 bp, Artificial Sequence
  chemically synthesized
ctgtagtagtcagtatccaaaa

SEQ ID NO: 34878 - DNA, 22 bp, Artificial Sequence
  chemically synthesized
tagtagtcagtatccaaaaccc

SEQ ID NO: 34879 - DNA, 22 bp, Artificial Sequence
  chemically synthesized
tccaaagagaatcctatggaaa

SEQ ID NO: 34880 - DNA, 22 bp, Artificial Sequence
  chemically synthesized
tggaaaaacagaacaagtttct

SEQ ID NO: 34881 - DNA, 22 bp, Artificial Sequence
  chemically synthesized
ctggggttactgaatgaatgct

SEQ ID NO: 34882 - DNA, 22 bp, Artificial Sequence
  chemically synthesized
tggggttactgaatgaatgctt

SEQ ID NO: 34883 - DNA, 22 bp, Artificial Sequence
  chemically synthesized
gggttactgaatgaatgctttt

SEQ ID NO: 34884 - DNA, 22 bp, Artificial Sequence
  chemically synthesized
ctgaatgaatgcttttgcccaa

SEQ ID NO: 34885 - DNA, 22 bp, Artificial Sequence
  chemically synthesized
aatgaatgcttttgcccaaagc

SEQ ID NO: 34886 - DNA, 22 bp, Artificial Sequence
  chemically synthesized
ttgcccaaagcctacaccttca

SEQ ID NO: 34887 - DNA, 22 bp, Artificial Sequence
  chemically synthesized
tgcccaaagcctacaccttcaa

SEQ ID NO: 34888 - DNA, 22 bp, Artificial Sequence
  chemically synthesized
gcccaaagcctacaccttcaag

SEQ ID NO: 34889 - DNA, 22 bp, Artificial Sequence
  chemically synthesized
cccaaagcctacaccttcaaga

SEQ ID NO: 34890 - DNA, 22 bp, Artificial Sequence
  chemically synthesized
caccttcaagaagagtgtagcc

SEQ ID NO: 34891 - DNA, 22 bp, Artificial Sequence
  chemically synthesized
caagaagagtgtagcctgagaa

SEQ ID NO: 34892 - DNA, 22 bp, Artificial Sequence
  chemically synthesized
aagaagagtgtagcctgagaag

SEQ ID NO: 34893 - DNA, 22 bp, Artificial Sequence
  chemically synthesized
agaaggatttcacatgttgcct

SEQ ID NO: 34894 - DNA, 22 bp, Artificial Sequence
  chemically synthesized
cacatgttgcctctagaaggga

SEQ ID NO: 34895 - DNA, 22 bp, Artificial Sequence
  chemically synthesized
acatgttgcctctagaagggag

SEQ ID NO: 34896 - DNA, 22 bp, Artificial Sequence
  chemically synthesized
cctctagaagggagaactgggt

SEQ ID NO: 34897 - DNA, 22 bp, Artificial Sequence
  chemically synthesized
tagaagggagaactgggtggct

SEQ ID NO: 34898 - DNA, 22 bp, Artificial Sequence
  chemically synthesized
gaagggagaactgggtggctgg

SEQ ID NO: 34899 - DNA, 22 bp, Artificial Sequence
  chemically synthesized
ggtggctggggagaagtgtgag

SEQ ID NO: 34900 - DNA, 22 bp, Artificial Sequence
  chemically synthesized
gggagaagtgtgagagggagat

SEQ ID NO: 34901 - DNA, 22 bp, Artificial Sequence
  chemically synthesized
catgacacttccttatgtatgt

SEQ ID NO: 34902 - DNA, 22 bp, Artificial Sequence
  chemically synthesized
atgacacttccttatgtatgta

SEQ ID NO: 34903 - DNA, 22 bp, Artificial Sequence
  chemically synthesized
ccttatgtatgtaacttttgca

SEQ ID NO: 34904 - DNA, 22 bp, Artificial Sequence
  chemically synthesized
cttatgtatgtaacttttgcat

SEQ ID NO: 34905 - DNA, 22 bp, Artificial Sequence
  chemically synthesized
atgtatgtaacttttgcatttt

SEQ ID NO: 34906 - DNA, 22 bp, Artificial Sequence
  chemically synthesized
tgtatgtaacttttgcattttg

SEQ ID NO: 34907 - DNA, 22 bp, Artificial Sequence
  chemically synthesized
ttgcattttgaactgtttgaat

SEQ ID NO: 34908 - DNA, 22 bp, Artificial Sequence
  chemically synthesized
tgcattttgaactgtttgaatg

SEQ ID NO: 34909 - DNA, 22 bp, Artificial Sequence
  chemically synthesized
gcattttgaactgtttgaatgt

SEQ ID NO: 34910 - DNA, 22 bp, Artificial Sequence
  chemically synthesized
cattttgaactgtttgaatgta

SEQ ID NO: 34911 - DNA, 22 bp, Artificial Sequence
  chemically synthesized
tgaactgtttgaatgtattatc

SEQ ID NO: 34912 - DNA, 22 bp, Artificial Sequence
  chemically synthesized
gaactgtttgaatgtattatct

SEQ ID NO: 34913 - DNA, 22 bp, Artificial Sequence
  chemically synthesized
aactgtttgaatgtattatctt

SEQ ID NO: 34914 - DNA, 22 bp, Artificial Sequence
  chemically synthesized
tttgaatgtattatcttttttt

SEQ ID NO: 34915 - DNA, 22 bp, Artificial Sequence
  chemically synthesized
gaatgtattatctttttttttt

SEQ ID NO: 34916 - DNA, 22 bp, Artificial Sequence
  chemically synthesized
aatgtattatcttttttttttt

SEQ ID NO: 34917 - DNA, 22 bp, Artificial Sequence
  chemically synthesized
tcttttttttttttgagacagg

SEQ ID NO: 34918 - DNA, 22 bp, Artificial Sequence
  chemically synthesized
ttttttttttgagacaggatct

SEQ ID NO: 34919 - DNA, 22 bp, Artificial Sequence
  chemically synthesized
tttttttttgagacaggatctg

SEQ ID NO: 34920 - DNA, 22 bp, Artificial Sequence
  chemically synthesized
ttttttttgagacaggatctgg

SEQ ID NO: 34921 - DNA, 22 bp, Artificial Sequence
  chemically synthesized
tttttttgagacaggatctggc

SEQ ID NO: 34922 - DNA, 22 bp, Artificial Sequence
  chemically synthesized
ttttttgagacaggatctggct

SEQ ID NO: 34923 - DNA, 22 bp, Artificial Sequence
  chemically synthesized
tttttgagacaggatctggctc

SEQ ID NO: 34924 - DNA, 22 bp, Artificial Sequence
  chemically synthesized
ttttgagacaggatctggctca

SEQ ID NO: 34925 - DNA, 22 bp, Artificial Sequence
  chemically synthesized
tttgagacaggatctggctcag

SEQ ID NO: 34926 - DNA, 22 bp, Artificial Sequence
  chemically synthesized
ttgagacaggatctggctcagt

SEQ ID NO: 34927 - DNA, 22 bp, Artificial Sequence
  chemically synthesized
tgagacaggatctggctcagta

SEQ ID NO: 34928 - DNA, 22 bp, Artificial Sequence
  chemically synthesized
gagacaggatctggctcagtaa

SEQ ID NO: 34929 - DNA, 22 bp, Artificial Sequence
  chemically synthesized
agacaggatctggctcagtaac

SEQ ID NO: 34930 - DNA, 22 bp, Artificial Sequence
  chemically synthesized
gctcagtaacccagcctggagt

SEQ ID NO: 34931 - DNA, 22 bp, Artificial Sequence
  chemically synthesized
agtaacccagcctggagtgcag

SEQ ID NO: 34932 - DNA, 22 bp, Artificial Sequence
  chemically synthesized
gagtgcagtggcgcaatctcgg

SEQ ID NO: 34933 - DNA, 22 bp, Artificial Sequence
  chemically synthesized
ggctcattgtgacctctacctc

SEQ ID NO: 34934 - DNA, 22 bp, Artificial Sequence
  chemically synthesized
attgtgacctctacctcctggg

SEQ ID NO: 34935 - DNA, 22 bp, Artificial Sequence
  chemically synthesized
tgacctctacctcctgggatcc

SEQ ID NO: 34936 - DNA, 22 bp, Artificial Sequence
  chemically synthesized
tacctcctgggatcctcccacc

SEQ ID NO: 34937 - DNA, 22 bp, Artificial Sequence
  chemically synthesized
cctcctgggatcctcccacctc

SEQ ID NO: 34938 - DNA, 22 bp, Artificial Sequence
  chemically synthesized
ctgggatcctcccacctcagcc

SEQ ID NO: 34939 - DNA, 22 bp, Artificial Sequence
  chemically synthesized
ggatcctcccacctcagcctcc

SEQ ID NO: 34940 - DNA, 22 bp, Artificial Sequence
  chemically synthesized
ccacctcagcctcctgaatagc

SEQ ID NO: 34941 - DNA, 22 bp, Artificial Sequence
  chemically synthesized
agcctcctgaatagctgggact

SEQ ID NO: 34942 - DNA, 22 bp, Artificial Sequence
  chemically synthesized
ctgaatagctgggactacaggt

SEQ ID NO: 34943 - DNA, 22 bp, Artificial Sequence
  chemically synthesized
aatagctgggactacaggtgtg

SEQ ID NO: 34944 - DNA, 22 bp, Artificial Sequence
  chemically synthesized
ggactacaggtgtgtgccacca

SEQ ID NO: 34945 - DNA, 22 bp, Artificial Sequence
  chemically synthesized
caggtgtgtgccaccacatcca

SEQ ID NO: 34946 - DNA, 22 bp, Artificial Sequence
  chemically synthesized
gtttttgtatttttagtagaga

SEQ ID NO: 34947 - DNA, 22 bp, Artificial Sequence
  chemically synthesized
ttgtatttttagtagagacggg

SEQ ID NO: 34948 - DNA, 22 bp, Artificial Sequence
  chemically synthesized
tgtatttttagtagagacgggg

SEQ ID NO: 34949 - DNA, 22 bp, Artificial Sequence
  chemically synthesized
gtatttttagtagagacggggt

SEQ ID NO: 34950 - DNA, 22 bp, Artificial Sequence
  chemically synthesized
tatttttagtagagacggggtt

SEQ ID NO: 34951 - DNA, 22 bp, Artificial Sequence
  chemically synthesized
ttagtagagacggggtttcacc

SEQ ID NO: 34952 - DNA, 22 bp, Artificial Sequence
  chemically synthesized
tagtagagacggggtttcacca

SEQ ID NO: 34953 - DNA, 22 bp, Artificial Sequence
  chemically synthesized
agtagagacggggtttcaccat

SEQ ID NO: 34954 - DNA, 22 bp, Artificial Sequence
  chemically synthesized
gtagagacggggtttcaccatg

SEQ ID NO: 34955 - DNA, 22 bp, Artificial Sequence
  chemically synthesized
caccatgttgcccaggctggtc

SEQ ID NO: 34956 - DNA, 22 bp, Artificial Sequence
  chemically synthesized
accatgttgcccaggctggtct

SEQ ID NO: 34957 - DNA, 22 bp, Artificial Sequence
  chemically synthesized
cccaggctggtctccatctcct

SEQ ID NO: 34958 - DNA, 22 bp, Artificial Sequence
  chemically synthesized
gtctccatctcctgaactcagg

SEQ ID NO: 34959 - DNA, 22 bp, Artificial Sequence
  chemically synthesized
catctcctgaactcaggcaatc

SEQ ID NO: 34960 - DNA, 22 bp, Artificial Sequence
  chemically synthesized
ctgaactcaggcaatcctccca

SEQ ID NO: 34961 - DNA, 22 bp, Artificial Sequence
  chemically synthesized
aactcaggcaatcctcccacct

SEQ ID NO: 34962 - DNA, 22 bp, Artificial Sequence
  chemically synthesized
aggcaatcctcccacctcagcc

SEQ ID NO: 34963 - DNA, 22 bp, Artificial Sequence
  chemically synthesized
ccacctcagcctcccaaagtgc

SEQ ID NO: 34964 - DNA, 22 bp, Artificial Sequence
  chemically synthesized
agcctcccaaagtgctgggatt

SEQ ID NO: 34965 - DNA, 22 bp, Artificial Sequence
  chemically synthesized
ccaaagtgctgggattacaggc

SEQ ID NO: 34966 - DNA, 22 bp, Artificial Sequence
  chemically synthesized
ggattacaggcatgagccaccg

SEQ ID NO: 34967 - DNA, 22 bp, Artificial Sequence
  chemically synthesized
caggcatgagccaccgtgcctg

SEQ ID NO: 34968 - DNA, 22 bp, Artificial Sequence
  chemically synthesized
actgtatgatctatttaaacac

SEQ ID NO: 34969 - DNA, 22 bp, Artificial Sequence
  chemically synthesized
tatgatctatttaaacacaaat

SEQ ID NO: 34970 - DNA, 22 bp, Artificial Sequence
  chemically synthesized
tttaaacacaaataatgaagcc

SEQ ID NO: 34971 - DNA, 22 bp, Artificial Sequence
  chemically synthesized
aaacacaaataatgaagcccaa

SEQ ID NO: 34972 - DNA, 22 bp, Artificial Sequence
  chemically synthesized
aacacaaataatgaagcccaag

SEQ ID NO: 34973 - DNA, 22 bp, Artificial Sequence
  chemically synthesized
tgaactccaggcaggcgcggtg

SEQ ID NO: 34974 - DNA, 22 bp, Artificial Sequence
  chemically synthesized
aactccaggcaggcgcggtggc

SEQ ID NO: 34975 - DNA, 22 bp, Artificial Sequence
  chemically synthesized
caggcaggcgcggtggctcaca

SEQ ID NO: 34976 - DNA, 22 bp, Artificial Sequence
  chemically synthesized
acacctgtaatctcagcacttt

SEQ ID NO: 34977 - DNA, 22 bp, Artificial Sequence
  chemically synthesized
taatctcagcactttgggaggc

SEQ ID NO: 34978 - DNA, 22 bp, Artificial Sequence
  chemically synthesized
agcactttgggaggccaaggca

SEQ ID NO: 34979 - DNA, 22 bp, Artificial Sequence
  chemically synthesized
tgggaggccaaggcaggcagat

SEQ ID NO: 34980 - DNA, 22 bp, Artificial Sequence
  chemically synthesized
gggaggccaaggcaggcagatc

SEQ ID NO: 34981 - DNA, 22 bp, Artificial Sequence
  chemically synthesized
ggaggccaaggcaggcagatca

SEQ ID NO: 34982 - DNA, 22 bp, Artificial Sequence
  chemically synthesized
gagaccagcctggccaacatgg

SEQ ID NO: 34983 - DNA, 22 bp, Artificial Sequence
  chemically synthesized
agaccagcctggccaacatggt

SEQ ID NO: 34984 - DNA, 22 bp, Artificial Sequence
  chemically synthesized
gccaacatggtgaaacaccgtt

SEQ ID NO: 34985 - DNA, 22 bp, Artificial Sequence
  chemically synthesized
ctaccaaaaaatataaagaatt

SEQ ID NO: 34986 - DNA, 22 bp, Artificial Sequence
  chemically synthesized
taccaaaaaatataaagaatta

SEQ ID NO: 34987 - DNA, 22 bp, Artificial Sequence
  chemically synthesized
ccaaaaaatataaagaattagc

SEQ ID NO: 34988 - DNA, 22 bp, Artificial Sequence
  chemically synthesized
gccagatgtggtggtgcgtgac

SEQ ID NO: 34989 - DNA, 22 bp, Artificial Sequence
  chemically synthesized
taatcccagctactcgggaggc

SEQ ID NO: 34990 - DNA, 22 bp, Artificial Sequence
  chemically synthesized
ctcgggaggctaaggcaagaga

SEQ ID NO: 34991 - DNA, 22 bp, Artificial Sequence
  chemically synthesized
gggaggctaaggcaagagaatc

SEQ ID NO: 34992 - DNA, 22 bp, Artificial Sequence
  chemically synthesized
aggcaagagaatcgcttgaacc

SEQ ID NO: 34993 - DNA, 22 bp, Artificial Sequence
  chemically synthesized
gaacctgggaggcggaggttgc

SEQ ID NO: 34994 - DNA, 22 bp, Artificial Sequence
  chemically synthesized
aacctgggaggcggaggttgcc

SEQ ID NO: 34995 - DNA, 22 bp, Artificial Sequence
  chemically synthesized
ggaggcggaggttgccgtgagc

SEQ ID NO: 34996 - DNA, 22 bp, Artificial Sequence
  chemically synthesized
ccgtgagccgagattatgccac

SEQ ID NO: 34997 - DNA, 22 bp, Artificial Sequence
  chemically synthesized
tgccactgcactacaggctggg

SEQ ID NO: 34998 - DNA, 22 bp, Artificial Sequence
  chemically synthesized
cactacaggctgggtgacagag

SEQ ID NO: 34999 - DNA, 22 bp, Artificial Sequence
  chemically synthesized
caggctgggtgacagagcaaga

SEQ ID NO: 35000 - DNA, 22 bp, Artificial Sequence
  chemically synthesized
ggtgacagagcaagactccatc

SEQ ID NO: 35001 - DNA, 22 bp, Artificial Sequence
  chemically synthesized
catctcaaaaaaaaaaaaaaaa

SEQ ID NO: 35002 - DNA, 22 bp, Artificial Sequence
  chemically synthesized
aaaaaaaaaaaaaaaaaaatcc

SEQ ID NO: 35003 - DNA, 22 bp, Artificial Sequence
  chemically synthesized
aaatccataaaatggcagctat

SEQ ID NO: 35004 - DNA, 22 bp, Artificial Sequence
  chemically synthesized
tgtgactttttttttttaacct

SEQ ID NO: 35005 - DNA, 22 bp, Artificial Sequence
  chemically synthesized
tttttttttaacctcaagaagt

SEQ ID NO: 35006 - DNA, 22 bp, Artificial Sequence
  chemically synthesized
ttttttttaacctcaagaagta

SEQ ID NO: 35007 - DNA, 22 bp, Artificial Sequence
  chemically synthesized
tttttttaacctcaagaagtat

SEQ ID NO: 35008 - DNA, 22 bp, Artificial Sequence
  chemically synthesized
ttttttaacctcaagaagtatt

SEQ ID NO: 35009 - DNA, 22 bp, Artificial Sequence
  chemically synthesized
tttttaacctcaagaagtattt

SEQ ID NO: 35010 - DNA, 22 bp, Artificial Sequence
  chemically synthesized
ttttaacctcaagaagtatttg

SEQ ID NO: 35011 - DNA, 22 bp, Artificial Sequence
  chemically synthesized
tttaacctcaagaagtatttgt

SEQ ID NO: 35012 - DNA, 22 bp, Artificial Sequence
  chemically synthesized
ttaacctcaagaagtatttgtc

SEQ ID NO: 35013 - DNA, 22 bp, Artificial Sequence
  chemically synthesized
taacctcaagaagtatttgtcc

SEQ ID NO: 35014 - DNA, 22 bp, Artificial Sequence
  chemically synthesized
aacctcaagaagtatttgtcct

SEQ ID NO: 35015 - DNA, 22 bp, Artificial Sequence
  chemically synthesized
acctcaagaagtatttgtcctg

SEQ ID NO: 35016 - DNA, 22 bp, Artificial Sequence
  chemically synthesized
aagaagtatttgtcctggaaga

SEQ ID NO: 35017 - DNA, 22 bp, Artificial Sequence
  chemically synthesized
gtcctggaagaatgcatatgga

SEQ ID NO: 35018 - DNA, 22 bp, Artificial Sequence
  chemically synthesized
tcctggaagaatgcatatggaa

SEQ ID NO: 35019 - DNA, 22 bp, Artificial Sequence
  chemically synthesized
gaagaatgcatatggaactaca

SEQ ID NO: 35020 - DNA, 22 bp, Artificial Sequence
  chemically synthesized
cagtttgaaacttggacttgca

SEQ ID NO: 35021 - DNA, 22 bp, Artificial Sequence
  chemically synthesized
gaaacttggacttgcatatacc

SEQ ID NO: 35022 - DNA, 22 bp, Artificial Sequence
  chemically synthesized
aaacttggacttgcatatacca

SEQ ID NO: 35023 - DNA, 22 bp, Artificial Sequence
  chemically synthesized
ggacttgcatataccatgggtt

SEQ ID NO: 35024 - DNA, 22 bp, Artificial Sequence
  chemically synthesized
gacttgcatataccatgggttc

SEQ ID NO: 35025 - DNA, 22 bp, Artificial Sequence
  chemically synthesized
gcatataccatgggttccctca

SEQ ID NO: 35026 - DNA, 22 bp, Artificial Sequence
  chemically synthesized
catataccatgggttccctcag

SEQ ID NO: 35027 - DNA, 22 bp, Artificial Sequence
  chemically synthesized
cctcaggcctcagggaatcttg

SEQ ID NO: 35028 - DNA, 22 bp, Artificial Sequence
  chemically synthesized
aggcctcagggaatcttgcatt

SEQ ID NO: 35029 - DNA, 22 bp, Artificial Sequence
  chemically synthesized
agggaatcttgcatttcctctg

SEQ ID NO: 35030 - DNA, 22 bp, Artificial Sequence
  chemically synthesized
gcatttcctctgacatcagaga

SEQ ID NO: 35031 - DNA, 22 bp, Artificial Sequence
  chemically synthesized
catttcctctgacatcagagaa

SEQ ID NO: 35032 - DNA, 22 bp, Artificial Sequence
  chemically synthesized
cctctgacatcagagaatgcac

SEQ ID NO: 35033 - DNA, 22 bp, Artificial Sequence
  chemically synthesized
ctctgacatcagagaatgcact

SEQ ID NO: 35034 - DNA, 22 bp, Artificial Sequence
  chemically synthesized
tgacatcagagaatgcactcca

SEQ ID NO: 35035 - DNA, 22 bp, Artificial Sequence
  chemically synthesized
acatcagagaatgcactccagc

SEQ ID NO: 35036 - DNA, 22 bp, Artificial Sequence
  chemically synthesized
cagcccctaggacgagcccccc

SEQ ID NO: 35037 - DNA, 22 bp, Artificial Sequence
  chemically synthesized
ggacgagccccccccagggaaa

SEQ ID NO: 35038 - DNA, 22 bp, Artificial Sequence
  chemically synthesized
catttccatcagaattgctctc

SEQ ID NO: 35039 - DNA, 22 bp, Artificial Sequence
  chemically synthesized
ccatcagaattgctctctgtaa

SEQ ID NO: 35040 - DNA, 22 bp, Artificial Sequence
  chemically synthesized
catcagaattgctctctgtaag

SEQ ID NO: 35041 - DNA, 22 bp, Artificial Sequence
  chemically synthesized
ctctctgtaaggatgtatatag

SEQ ID NO: 35042 - DNA, 22 bp, Artificial Sequence
  chemically synthesized
tctgtaaggatgtatatagctt

SEQ ID NO: 35043 - DNA, 22 bp, Artificial Sequence
  chemically synthesized
tgtaaggatgtatatagcttca

SEQ ID NO: 35044 - DNA, 22 bp, Artificial Sequence
  chemically synthesized
taaggatgtatatagcttcaga

SEQ ID NO: 35045 - DNA, 22 bp, Artificial Sequence
  chemically synthesized
cagatgcttgttctgtatcctc

SEQ ID NO: 35046 - DNA, 22 bp, Artificial Sequence
  chemically synthesized
agatgcttgttctgtatcctct

SEQ ID NO: 35047 - DNA, 22 bp, Artificial Sequence
  chemically synthesized
gttctgtatcctctctactttg

SEQ ID NO: 35048 - DNA, 22 bp, Artificial Sequence
  chemically synthesized
ttctgtatcctctctactttga

SEQ ID NO: 35049 - DNA, 22 bp, Artificial Sequence
  chemically synthesized
tgtatcctctctactttgaaac

SEQ ID NO: 35050 - DNA, 22 bp, Artificial Sequence
  chemically synthesized
tatcctctctactttgaaacag

SEQ ID NO: 35051 - DNA, 22 bp, Artificial Sequence
  chemically synthesized
tctactttgaaacagagtatct

SEQ ID NO: 35052 - DNA, 22 bp, Artificial Sequence
  chemically synthesized
tactttgaaacagagtatctca

SEQ ID NO: 35053 - DNA, 22 bp, Artificial Sequence
  chemically synthesized
ctttgaaacagagtatctcaga

SEQ ID NO: 35054 - DNA, 22 bp, Artificial Sequence
  chemically synthesized
tgaaacagagtatctcagacaa

SEQ ID NO: 35055 - DNA, 22 bp, Artificial Sequence
  chemically synthesized
gaaacagagtatctcagacaaa

SEQ ID NO: 35056 - DNA, 22 bp, Artificial Sequence
  chemically synthesized
aaacagagtatctcagacaaac

SEQ ID NO: 35057 - DNA, 22 bp, Artificial Sequence
  chemically synthesized
agacaaaccacttcccctttaa

SEQ ID NO: 35058 - DNA, 22 bp, Artificial Sequence
  chemically synthesized
cccctttaaaagtactagatat

SEQ ID NO: 35059 - DNA, 22 bp, Artificial Sequence
  chemically synthesized
ccctttaaaagtactagatata

SEQ ID NO: 35060 - DNA, 22 bp, Artificial Sequence
  chemically synthesized
taaaagtactagatatatcttt

SEQ ID NO: 35061 - DNA, 22 bp, Artificial Sequence
  chemically synthesized
aaaagtactagatatatctttc

SEQ ID NO: 35062 - DNA, 22 bp, Artificial Sequence
  chemically synthesized
aaagtactagatatatctttca

SEQ ID NO: 35063 - DNA, 22 bp, Artificial Sequence
  chemically synthesized
gatatatctttcactgtggaaa

SEQ ID NO: 35064 - DNA, 22 bp, Artificial Sequence
  chemically synthesized
tcactgtggaaataggtgtcaa

SEQ ID NO: 35065 - DNA, 22 bp, Artificial Sequence
  chemically synthesized
cactgtggaaataggtgtcaac

SEQ ID NO: 35066 - DNA, 22 bp, Artificial Sequence
  chemically synthesized
actgtggaaataggtgtcaacc

SEQ ID NO: 35067 - DNA, 22 bp, Artificial Sequence
  chemically synthesized
tggaaataggtgtcaaccgcca

SEQ ID NO: 35068 - DNA, 22 bp, Artificial Sequence
  chemically synthesized
ttatcccgtgatggtggaatag

SEQ ID NO: 35069 - DNA, 22 bp, Artificial Sequence
  chemically synthesized
tatcccgtgatggtggaatagt

SEQ ID NO: 35070 - DNA, 22 bp, Artificial Sequence
  chemically synthesized
atcccgtgatggtggaatagtg

SEQ ID NO: 35071 - DNA, 22 bp, Artificial Sequence
  chemically synthesized
tcccgtgatggtggaatagtga

SEQ ID NO: 35072 - DNA, 22 bp, Artificial Sequence
  chemically synthesized
ctcaccgaaatcagggagagcc

SEQ ID NO: 35073 - DNA, 22 bp, Artificial Sequence
  chemically synthesized
tcaccgaaatcagggagagcca

SEQ ID NO: 35074 - DNA, 22 bp, Artificial Sequence
  chemically synthesized
accgaaatcagggagagccact

SEQ ID NO: 35075 - DNA, 22 bp, Artificial Sequence
  chemically synthesized
actctggcctctatcaacccag

SEQ ID NO: 35076 - DNA, 22 bp, Artificial Sequence
  chemically synthesized
tggcctctatcaacccagagag

SEQ ID NO: 35077 - DNA, 22 bp, Artificial Sequence
  chemically synthesized
gcctctatcaacccagagagat

SEQ ID NO: 35078 - DNA, 22 bp, Artificial Sequence
  chemically synthesized
tatcaacccagagagattgcat

SEQ ID NO: 35079 - DNA, 22 bp, Artificial Sequence
  chemically synthesized
tcaacccagagagattgcatgg

SEQ ID NO: 35080 - DNA, 22 bp, Artificial Sequence
  chemically synthesized
catggttcttcaatggagatca

SEQ ID NO: 35081 - DNA, 22 bp, Artificial Sequence
  chemically synthesized
ttcaatggagatcagatgtttg

SEQ ID NO: 35082 - DNA, 22 bp, Artificial Sequence
  chemically synthesized
caatggagatcagatgtttgga

SEQ ID NO: 35083 - DNA, 22 bp, Artificial Sequence
  chemically synthesized
aatggagatcagatgtttggaa

SEQ ID NO: 35084 - DNA, 22 bp, Artificial Sequence
  chemically synthesized
ggaataacacttcatcttttta

SEQ ID NO: 35085 - DNA, 22 bp, Artificial Sequence
  chemically synthesized
gaataacacttcatctttttat

SEQ ID NO: 35086 - DNA, 22 bp, Artificial Sequence
  chemically synthesized
catctttttattttttagaatc

SEQ ID NO: 35087 - DNA, 22 bp, Artificial Sequence
  chemically synthesized
atctttttattttttagaatca

SEQ ID NO: 35088 - DNA, 22 bp, Artificial Sequence
  chemically synthesized
tttattttttagaatcatgcgg

SEQ ID NO: 35089 - DNA, 22 bp, Artificial Sequence
  chemically synthesized
ttattttttagaatcatgcggc

SEQ ID NO: 35090 - DNA, 22 bp, Artificial Sequence
  chemically synthesized
tattttttagaatcatgcggct

SEQ ID NO: 35091 - DNA, 22 bp, Artificial Sequence
  chemically synthesized
attttttagaatcatgcggctg

SEQ ID NO: 35092 - DNA, 22 bp, Artificial Sequence
  chemically synthesized
ttttttagaatcatgcggctgg

SEQ ID NO: 35093 - DNA, 22 bp, Artificial Sequence
  chemically synthesized
tttagaatcatgcggctgggtg

SEQ ID NO: 35094 - DNA, 22 bp, Artificial Sequence
  chemically synthesized
ttagaatcatgcggctgggtgt

SEQ ID NO: 35095 - DNA, 22 bp, Artificial Sequence
  chemically synthesized
tagaatcatgcggctgggtgta

SEQ ID NO: 35096 - DNA, 22 bp, Artificial Sequence
  chemically synthesized
agaatcatgcggctgggtgtag

SEQ ID NO: 35097 - DNA, 22 bp, Artificial Sequence
  chemically synthesized
gaatcatgcggctgggtgtagt

SEQ ID NO: 35098 - DNA, 22 bp, Artificial Sequence
  chemically synthesized
ggtgtagtggctcacgcctgta

SEQ ID NO: 35099 - DNA, 22 bp, Artificial Sequence
  chemically synthesized
acgcctgtaatcctagcactta

SEQ ID NO: 35100 - DNA, 22 bp, Artificial Sequence
  chemically synthesized
taatcctagcacttagggaggc

SEQ ID NO: 35101 - DNA, 22 bp, Artificial Sequence
  chemically synthesized
gcacttagggaggccaaggcag

SEQ ID NO: 35102 - DNA, 22 bp, Artificial Sequence
  chemically synthesized
agggaggccaaggcaggcagat

SEQ ID NO: 35103 - DNA, 22 bp, Artificial Sequence
  chemically synthesized
gggaggccaaggcaggcagatc

SEQ ID NO: 35104 - DNA, 22 bp, Artificial Sequence
  chemically synthesized
gagaccagcctagtcaacatag

SEQ ID NO: 35105 - DNA, 22 bp, Artificial Sequence
  chemically synthesized
gtcaacatagtgaaaccatgtc

SEQ ID NO: 35106 - DNA, 22 bp, Artificial Sequence
  chemically synthesized
tactaaaaatacaaaaaaaatt

SEQ ID NO: 35107 - DNA, 22 bp, Artificial Sequence
  chemically synthesized
ctaaaaatacaaaaaaaattag

SEQ ID NO: 35108 - DNA, 22 bp, Artificial Sequence
  chemically synthesized
aaaatacaaaaaaaattagctg

SEQ ID NO: 35109 - DNA, 22 bp, Artificial Sequence
  chemically synthesized
gctgggcatggtggcgggcacc

SEQ ID NO: 35110 - DNA, 22 bp, Artificial Sequence
  chemically synthesized
ggcatggtggcgggcacctgta

SEQ ID NO: 35111 - DNA, 22 bp, Artificial Sequence
  chemically synthesized
taatcccagctacttgggaggc

SEQ ID NO: 35112 - DNA, 22 bp, Artificial Sequence
  chemically synthesized
cttgggaggctgaggcaggaga

SEQ ID NO: 35113 - DNA, 22 bp, Artificial Sequence
  chemically synthesized
gggaggctgaggcaggagaatc

SEQ ID NO: 35114 - DNA, 22 bp, Artificial Sequence
  chemically synthesized
ggaggctgaggcaggagaatca

SEQ ID NO: 35115 - DNA, 22 bp, Artificial Sequence
  chemically synthesized
aggcaggagaatcacttgaacc

SEQ ID NO: 35116 - DNA, 22 bp, Artificial Sequence
  chemically synthesized
gaaccggagaggcagaggttgc

SEQ ID NO: 35117 - DNA, 22 bp, Artificial Sequence
  chemically synthesized
aaccggagaggcagaggttgca

SEQ ID NO: 35118 - DNA, 22 bp, Artificial Sequence
  chemically synthesized
cagtgagctgagattgcaccat

SEQ ID NO: 35119 - DNA, 22 bp, Artificial Sequence
  chemically synthesized
agattgcaccattgcactccag

SEQ ID NO: 35120 - DNA, 22 bp, Artificial Sequence
  chemically synthesized
caccattgcactccagccaggc

SEQ ID NO: 35121 - DNA, 22 bp, Artificial Sequence
  chemically synthesized
cactccagccaggcaacagtgc

SEQ ID NO: 35122 - DNA, 22 bp, Artificial Sequence
  chemically synthesized
cagccaggcaacagtgcgagac

SEQ ID NO: 35123 - DNA, 22 bp, Artificial Sequence
  chemically synthesized
catctcaaacaaacaaacaaaa

SEQ ID NO: 35124 - DNA, 22 bp, Artificial Sequence
  chemically synthesized
aaacaaacaaacaaaagaaaga

SEQ ID NO: 35125 - DNA, 22 bp, Artificial Sequence
  chemically synthesized
acgtgatagaaattggcaaatg

SEQ ID NO: 35126 - DNA, 22 bp, Artificial Sequence
  chemically synthesized
cgtgatagaaattggcaaatgc

SEQ ID NO: 35127 - DNA, 22 bp, Artificial Sequence
  chemically synthesized
gcaaatgctaaactcagggctt

SEQ ID NO: 35128 - DNA, 22 bp, Artificial Sequence
  chemically synthesized
aactcagggctttcccctgctc

SEQ ID NO: 35129 - DNA, 22 bp, Artificial Sequence
  chemically synthesized
agggctttcccctgctccccag

SEQ ID NO: 35130 - DNA, 22 bp, Artificial Sequence
  chemically synthesized
tcccctgctccccagagagtca

SEQ ID NO: 35131 - DNA, 22 bp, Artificial Sequence
  chemically synthesized
cccctgctccccagagagtcag

SEQ ID NO: 35132 - DNA, 22 bp, Artificial Sequence
  chemically synthesized
ccctgctccccagagagtcagt

SEQ ID NO: 35133 - DNA, 22 bp, Artificial Sequence
  chemically synthesized
ctccccagagagtcagtttatc

SEQ ID NO: 35134 - DNA, 22 bp, Artificial Sequence
  chemically synthesized
cccagagagtcagtttatcagc

SEQ ID NO: 35135 - DNA, 22 bp, Artificial Sequence
  chemically synthesized
atcagcactggacgtaacatag

SEQ ID NO: 35136 - DNA, 22 bp, Artificial Sequence
  chemically synthesized
tcagcactggacgtaacatagt

SEQ ID NO: 35137 - DNA, 22 bp, Artificial Sequence
  chemically synthesized
gacgtaacatagttcataagag

SEQ ID NO: 35138 - DNA, 22 bp, Artificial Sequence
  chemically synthesized
ataagagcattgccgcggaagc

SEQ ID NO: 35139 - DNA, 22 bp, Artificial Sequence
  chemically synthesized
ccgcggaagccagcctgcctac

SEQ ID NO: 35140 - DNA, 22 bp, Artificial Sequence
  chemically synthesized
cctacctgggcttccatcctgg

SEQ ID NO: 35141 - DNA, 22 bp, Artificial Sequence
  chemically synthesized
cctgggcttccatcctggctcg

SEQ ID NO: 35142 - DNA, 22 bp, Artificial Sequence
  chemically synthesized
ggcttccatcctggctcggcat

SEQ ID NO: 35143 - DNA, 22 bp, Artificial Sequence
  chemically synthesized
ccatcctggctcggcatgtact

SEQ ID NO: 35144 - DNA, 22 bp, Artificial Sequence
  chemically synthesized
catcctggctcggcatgtacta

SEQ ID NO: 35145 - DNA, 22 bp, Artificial Sequence
  chemically synthesized
gctcggcatgtactaaccttgt

SEQ ID NO: 35146 - DNA, 22 bp, Artificial Sequence
  chemically synthesized
ggcatgtactaaccttgttggc

SEQ ID NO: 35147 - DNA, 22 bp, Artificial Sequence
  chemically synthesized
accttgttggcctaatcattta

SEQ ID NO: 35148 - DNA, 22 bp, Artificial Sequence
  chemically synthesized
gttggcctaatcatttaactca

SEQ ID NO: 35149 - DNA, 22 bp, Artificial Sequence
  chemically synthesized
ttggcctaatcatttaactcag

SEQ ID NO: 35150 - DNA, 22 bp, Artificial Sequence
  chemically synthesized
gcctaatcatttaactcagcac

SEQ ID NO: 35151 - DNA, 22 bp, Artificial Sequence
  chemically synthesized
atcatttaactcagcaccttgg

SEQ ID NO: 35152 - DNA, 22 bp, Artificial Sequence
  chemically synthesized
aactcagcaccttggtctctgc

SEQ ID NO: 35153 - DNA, 22 bp, Artificial Sequence
  chemically synthesized
actcagcaccttggtctctgca

SEQ ID NO: 35154 - DNA, 22 bp, Artificial Sequence
  chemically synthesized
agcaccttggtctctgcatcta

SEQ ID NO: 35155 - DNA, 22 bp, Artificial Sequence
  chemically synthesized
ggtctctgcatctactgtttct

SEQ ID NO: 35156 - DNA, 22 bp, Artificial Sequence
  chemically synthesized
gtctctgcatctactgtttctg

SEQ ID NO: 35157 - DNA, 22 bp, Artificial Sequence
  chemically synthesized
tgcatctactgtttctgtaaat

SEQ ID NO: 35158 - DNA, 22 bp, Artificial Sequence
  chemically synthesized
catctactgtttctgtaaatag

SEQ ID NO: 35159 - DNA, 22 bp, Artificial Sequence
  chemically synthesized
ctgtttctgtaaatagcagtaa

SEQ ID NO: 35160 - DNA, 22 bp, Artificial Sequence
  chemically synthesized
tttctgtaaatagcagtaacta

SEQ ID NO: 35161 - DNA, 22 bp, Artificial Sequence
  chemically synthesized
ctgtaaatagcagtaactacct

SEQ ID NO: 35162 - DNA, 22 bp, Artificial Sequence
  chemically synthesized
tgtaaatagcagtaactacctc

SEQ ID NO: 35163 - DNA, 22 bp, Artificial Sequence
  chemically synthesized
taaatagcagtaactacctcac

SEQ ID NO: 35164 - DNA, 22 bp, Artificial Sequence
  chemically synthesized
cctcacagaaaagcacatagca

SEQ ID NO: 35165 - DNA, 22 bp, Artificial Sequence
  chemically synthesized
acagaaaagcacatagcacatg

SEQ ID NO: 35166 - DNA, 22 bp, Artificial Sequence
  chemically synthesized
gcacacactgtttaataaatgt

SEQ ID NO: 35167 - DNA, 22 bp, Artificial Sequence
  chemically synthesized
tttaataaatgttaaccctgat

SEQ ID NO: 35168 - DNA, 22 bp, Artificial Sequence
  chemically synthesized
aataaatgttaaccctgattat

SEQ ID NO: 35169 - DNA, 22 bp, Artificial Sequence
  chemically synthesized
ataaatgttaaccctgattatt

SEQ ID NO: 35170 - DNA, 22 bp, Artificial Sequence
  chemically synthesized
accctgattattattaagctgc

SEQ ID NO: 35171 - DNA, 22 bp, Artificial Sequence
  chemically synthesized
attattattaagctgccagaga

SEQ ID NO: 35172 - DNA, 22 bp, Artificial Sequence
  chemically synthesized
ttattaagctgccagagataac

SEQ ID NO: 35173 - DNA, 22 bp, Artificial Sequence
  chemically synthesized
ttaagctgccagagataaccta

SEQ ID NO: 35174 - DNA, 22 bp, Artificial Sequence
  chemically synthesized
agctgccagagataacctattt

SEQ ID NO: 35175 - DNA, 22 bp, Artificial Sequence
  chemically synthesized
ccagagataacctatttgtaga

SEQ ID NO: 35176 - DNA, 22 bp, Artificial Sequence
  chemically synthesized
tttgtagattataaaacagaaa

SEQ ID NO: 35177 - DNA, 22 bp, Artificial Sequence
  chemically synthesized
gtagattataaaacagaaactc

SEQ ID NO: 35178 - DNA, 22 bp, Artificial Sequence
  chemically synthesized
tagattataaaacagaaactca

SEQ ID NO: 35179 - DNA, 22 bp, Artificial Sequence
  chemically synthesized
taaaacagaaactcagataatt

SEQ ID NO: 35180 - DNA, 22 bp, Artificial Sequence
  chemically synthesized
agataattgatatgacttgcca

SEQ ID NO: 35181 - DNA, 22 bp, Artificial Sequence
  chemically synthesized
atatgacttgccaaggacatgt

SEQ ID NO: 35182 - DNA, 22 bp, Artificial Sequence
  chemically synthesized
gccaaggacatgtagttggtgg

SEQ ID NO: 35183 - DNA, 22 bp, Artificial Sequence
  chemically synthesized
ccaaggacatgtagttggtggg

SEQ ID NO: 35184 - DNA, 22 bp, Artificial Sequence
  chemically synthesized
gtgggtggcagaacgagggctg

SEQ ID NO: 35185 - DNA, 22 bp, Artificial Sequence
  chemically synthesized
gagcccagttcccagggtgact

SEQ ID NO: 35186 - DNA, 22 bp, Artificial Sequence
  chemically synthesized
ccagggtgacttttcattaccc

SEQ ID NO: 35187 - DNA, 22 bp, Artificial Sequence
  chemically synthesized
ttcattaccccacaaaacaggc

SEQ ID NO: 35188 - DNA, 22 bp, Artificial Sequence
  chemically synthesized
tcattaccccacaaaacaggct

SEQ ID NO: 35189 - DNA, 22 bp, Artificial Sequence
  chemically synthesized
cattaccccacaaaacaggctg

SEQ ID NO: 35190 - DNA, 22 bp, Artificial Sequence
  chemically synthesized
attaccccacaaaacaggctgt

SEQ ID NO: 35191 - DNA, 22 bp, Artificial Sequence
  chemically synthesized
ccccacaaaacaggctgttgaa

SEQ ID NO: 35192 - DNA, 22 bp, Artificial Sequence
  chemically synthesized
ttgaatcatctgtgtgtttcct

SEQ ID NO: 35193 - DNA, 22 bp, Artificial Sequence
  chemically synthesized
aatcatctgtgtgtttcctttt

SEQ ID NO: 35194 - DNA, 22 bp, Artificial Sequence
  chemically synthesized
tgtgtttccttttttcatacag

SEQ ID NO: 35195 - DNA, 22 bp, Artificial Sequence
  chemically synthesized
ccttttttcatacagcatacat

SEQ ID NO: 35196 - DNA, 22 bp, Artificial Sequence
  chemically synthesized
cttttttcatacagcatacatc

SEQ ID NO: 35197 - DNA, 22 bp, Artificial Sequence
  chemically synthesized
ttttcatacagcatacatcatc

SEQ ID NO: 35198 - DNA, 22 bp, Artificial Sequence
  chemically synthesized
tttcatacagcatacatcatct

SEQ ID NO: 35199 - DNA, 22 bp, Artificial Sequence
  chemically synthesized
ttcatacagcatacatcatcta

SEQ ID NO: 35200 - DNA, 22 bp, Artificial Sequence
  chemically synthesized
tcatacagcatacatcatctat

SEQ ID NO: 35201 - DNA, 22 bp, Artificial Sequence
  chemically synthesized
catacagcatacatcatctatc

SEQ ID NO: 35202 - DNA, 22 bp, Artificial Sequence
  chemically synthesized
atacagcatacatcatctatct

SEQ ID NO: 35203 - DNA, 22 bp, Artificial Sequence
  chemically synthesized
tcttttttttttttttgagaca

SEQ ID NO: 35204 - DNA, 22 bp, Artificial Sequence
  chemically synthesized
ttttttttttttgagacagggt

SEQ ID NO: 35205 - DNA, 22 bp, Artificial Sequence
  chemically synthesized
tttttttttttgagacagggtc

SEQ ID NO: 35206 - DNA, 22 bp, Artificial Sequence
  chemically synthesized
ttttttttttgagacagggtct

SEQ ID NO: 35207 - DNA, 22 bp, Artificial Sequence
  chemically synthesized
tttttttttgagacagggtctt

SEQ ID NO: 35208 - DNA, 22 bp, Artificial Sequence
  chemically synthesized
ttttttttgagacagggtctta

SEQ ID NO: 35209 - DNA, 22 bp, Artificial Sequence
  chemically synthesized
tttttttgagacagggtcttac

SEQ ID NO: 35210 - DNA, 22 bp, Artificial Sequence
  chemically synthesized
ttttttgagacagggtcttact

SEQ ID NO: 35211 - DNA, 22 bp, Artificial Sequence
  chemically synthesized
tttttgagacagggtcttactc

SEQ ID NO: 35212 - DNA, 22 bp, Artificial Sequence
  chemically synthesized
ttttgagacagggtcttactct

SEQ ID NO: 35213 - DNA, 22 bp, Artificial Sequence
  chemically synthesized
tttgagacagggtcttactctg

SEQ ID NO: 35214 - DNA, 22 bp, Artificial Sequence
  chemically synthesized
ttgagacagggtcttactctgt

SEQ ID NO: 35215 - DNA, 22 bp, Artificial Sequence
  chemically synthesized
tgagacagggtcttactctgtt

SEQ ID NO: 35216 - DNA, 22 bp, Artificial Sequence
  chemically synthesized
gagacagggtcttactctgttg

SEQ ID NO: 35217 - DNA, 22 bp, Artificial Sequence
  chemically synthesized
agacagggtcttactctgttgc

SEQ ID NO: 35218 - DNA, 22 bp, Artificial Sequence
  chemically synthesized
actctgttgcccaggctggagt

SEQ ID NO: 35219 - DNA, 22 bp, Artificial Sequence
  chemically synthesized
ctctgttgcccaggctggagtg

SEQ ID NO: 35220 - DNA, 22 bp, Artificial Sequence
  chemically synthesized
tgttgcccaggctggagtgcag

SEQ ID NO: 35221 - DNA, 22 bp, Artificial Sequence
  chemically synthesized
ttgcccaggctggagtgcagtg

SEQ ID NO: 35222 - DNA, 22 bp, Artificial Sequence
  chemically synthesized
cccaggctggagtgcagtggca

SEQ ID NO: 35223 - DNA, 22 bp, Artificial Sequence
  chemically synthesized
gagtgcagtggcatgatcttga

SEQ ID NO: 35224 - DNA, 22 bp, Artificial Sequence
  chemically synthesized
gactcactgcaacctcctccgc

SEQ ID NO: 35225 - DNA, 22 bp, Artificial Sequence
  chemically synthesized
actcactgcaacctcctccgcc

SEQ ID NO: 35226 - DNA, 22 bp, Artificial Sequence
  chemically synthesized
actgcaacctcctccgcctctc

SEQ ID NO: 35227 - DNA, 22 bp, Artificial Sequence
  chemically synthesized
caacctcctccgcctctcacct

SEQ ID NO: 35228 - DNA, 22 bp, Artificial Sequence
  chemically synthesized
ctccgcctctcacctcagcctc

SEQ ID NO: 35229 - DNA, 22 bp, Artificial Sequence
  chemically synthesized
cgcctctcacctcagcctcctg

SEQ ID NO: 35230 - DNA, 22 bp, Artificial Sequence
  chemically synthesized
tcacctcagcctcctgagtagc

SEQ ID NO: 35231 - DNA, 22 bp, Artificial Sequence
  chemically synthesized
acctcagcctcctgagtagctg

SEQ ID NO: 35232 - DNA, 22 bp, Artificial Sequence
  chemically synthesized
agcctcctgagtagctgggact

SEQ ID NO: 35233 - DNA, 22 bp, Artificial Sequence
  chemically synthesized
ctgagtagctgggactacagca

SEQ ID NO: 35234 - DNA, 22 bp, Artificial Sequence
  chemically synthesized
agtagctgggactacagcacca

SEQ ID NO: 35235 - DNA, 22 bp, Artificial Sequence
  chemically synthesized
ggactacagcaccaacacgccc

SEQ ID NO: 35236 - DNA, 22 bp, Artificial Sequence
  chemically synthesized
cagcaccaacacgcccagctaa

SEQ ID NO: 35237 - DNA, 22 bp, Artificial Sequence
  chemically synthesized
attttcgtaatgtttttgtaga

SEQ ID NO: 35238 - DNA, 22 bp, Artificial Sequence
  chemically synthesized
tcgtaatgtttttgtagagatg

SEQ ID NO: 35239 - DNA, 22 bp, Artificial Sequence
  chemically synthesized
cgtaatgtttttgtagagatgg

SEQ ID NO: 35240 - DNA, 22 bp, Artificial Sequence
  chemically synthesized
gtaatgtttttgtagagatgga

SEQ ID NO: 35241 - DNA, 22 bp, Artificial Sequence
  chemically synthesized
ttgtagagatggagtttcgcca

SEQ ID NO: 35242 - DNA, 22 bp, Artificial Sequence
  chemically synthesized
tgtagagatggagtttcgccat

SEQ ID NO: 35243 - DNA, 22 bp, Artificial Sequence
  chemically synthesized
gtagagatggagtttcgccatg

SEQ ID NO: 35244 - DNA, 22 bp, Artificial Sequence
  chemically synthesized
tagagatggagtttcgccatgt

SEQ ID NO: 35245 - DNA, 22 bp, Artificial Sequence
  chemically synthesized
cgccatgttgcccaggctggtc

SEQ ID NO: 35246 - DNA, 22 bp, Artificial Sequence
  chemically synthesized
gccatgttgcccaggctggtct

SEQ ID NO: 35247 - DNA, 22 bp, Artificial Sequence
  chemically synthesized
cccaggctggtcttgaactcct

SEQ ID NO: 35248 - DNA, 22 bp, Artificial Sequence
  chemically synthesized
gtcttgaactcctgagttcacc

SEQ ID NO: 35249 - DNA, 22 bp, Artificial Sequence
  chemically synthesized
gaactcctgagttcacccagga

SEQ ID NO: 35250 - DNA, 22 bp, Artificial Sequence
  chemically synthesized
aactcctgagttcacccaggag

SEQ ID NO: 35251 - DNA, 22 bp, Artificial Sequence
  chemically synthesized
ctgagttcacccaggagtgatt

SEQ ID NO: 35252 - DNA, 22 bp, Artificial Sequence
  chemically synthesized
agttcacccaggagtgattcgc

SEQ ID NO: 35253 - DNA, 22 bp, Artificial Sequence
  chemically synthesized
acccaggagtgattcgcccacc

SEQ ID NO: 35254 - DNA, 22 bp, Artificial Sequence
  chemically synthesized
gcccacctcggcctcccaaagt

SEQ ID NO: 35255 - DNA, 22 bp, Artificial Sequence
  chemically synthesized
ggcctcccaaagtgctgggatt

SEQ ID NO: 35256 - DNA, 22 bp, Artificial Sequence
  chemically synthesized
ccaaagtgctgggattacaggt

SEQ ID NO: 35257 - DNA, 22 bp, Artificial Sequence
  chemically synthesized
ggattacaggtgtgagccacca

SEQ ID NO: 35258 - DNA, 22 bp, Artificial Sequence
  chemically synthesized
caggtgtgagccaccatgcctg

SEQ ID NO: 35259 - DNA, 22 bp, Artificial Sequence
  chemically synthesized
gccccatacatctttctttatg

SEQ ID NO: 35260 - DNA, 22 bp, Artificial Sequence
  chemically synthesized
tctttatgttacctcttctgct

SEQ ID NO: 35261 - DNA, 22 bp, Artificial Sequence
  chemically synthesized
ctttatgttacctcttctgctt

SEQ ID NO: 35262 - DNA, 22 bp, Artificial Sequence
  chemically synthesized
tttatgttacctcttctgcttc

SEQ ID NO: 35263 - DNA, 22 bp, Artificial Sequence
  chemically synthesized
tatgttacctcttctgcttcat

SEQ ID NO: 35264 - DNA, 22 bp, Artificial Sequence
  chemically synthesized
atgttacctcttctgcttcata

SEQ ID NO: 35265 - DNA, 22 bp, Artificial Sequence
  chemically synthesized
tgttacctcttctgcttcatac

SEQ ID NO: 35266 - DNA, 22 bp, Artificial Sequence
  chemically synthesized
cctcttctgcttcatactaata

SEQ ID NO: 35267 - DNA, 22 bp, Artificial Sequence
  chemically synthesized
ttctgcttcatactaataaaac

SEQ ID NO: 35268 - DNA, 22 bp, Artificial Sequence
  chemically synthesized
ctgcttcatactaataaaactc

SEQ ID NO: 35269 - DNA, 22 bp, Artificial Sequence
  chemically synthesized
tgcttcatactaataaaactct

SEQ ID NO: 35270 - DNA, 22 bp, Artificial Sequence
  chemically synthesized
cttcatactaataaaactcttt

SEQ ID NO: 35271 - DNA, 22 bp, Artificial Sequence
  chemically synthesized
catactaataaaactctttgct

SEQ ID NO: 35272 - DNA, 22 bp, Artificial Sequence
  chemically synthesized
atactaataaaactctttgctc

SEQ ID NO: 35273 - DNA, 22 bp, Artificial Sequence
  chemically synthesized
ataaaactctttgctcaaagcc

SEQ ID NO: 35274 - DNA, 22 bp, Artificial Sequence
  chemically synthesized
tttgctcaaagcctatataact

SEQ ID NO: 35275 - DNA, 22 bp, Artificial Sequence
  chemically synthesized
tgctcaaagcctatataactca

SEQ ID NO: 35276 - DNA, 22 bp, Artificial Sequence
  chemically synthesized
gctcaaagcctatataactcag

SEQ ID NO: 35277 - DNA, 22 bp, Artificial Sequence
  chemically synthesized
ctcaaagcctatataactcaga

SEQ ID NO: 35278 - DNA, 22 bp, Artificial Sequence
  chemically synthesized
aaagcctatataactcagactt

SEQ ID NO: 35279 - DNA, 22 bp, Artificial Sequence
  chemically synthesized
tataactcagacttttcacgaa

SEQ ID NO: 35280 - DNA, 22 bp, Artificial Sequence
  chemically synthesized
agacttttcacgaaattcaact

SEQ ID NO: 35281 - DNA, 22 bp, Artificial Sequence
  chemically synthesized
ttcacgaaattcaactgtccta

SEQ ID NO: 35282 - DNA, 22 bp, Artificial Sequence
  chemically synthesized
tcacgaaattcaactgtcctac

SEQ ID NO: 35283 - DNA, 22 bp, Artificial Sequence
  chemically synthesized
cacgaaattcaactgtcctacc

SEQ ID NO: 35284 - DNA, 22 bp, Artificial Sequence
  chemically synthesized
acgaaattcaactgtcctaccc

SEQ ID NO: 35285 - DNA, 22 bp, Artificial Sequence
  chemically synthesized
aactgtcctaccctttaaccca

SEQ ID NO: 35286 - DNA, 22 bp, Artificial Sequence
  chemically synthesized
tcctaccctttaacccatatga

SEQ ID NO: 35287 - DNA, 22 bp, Artificial Sequence
  chemically synthesized
ccctttaacccatatgaaatag

SEQ ID NO: 35288 - DNA, 22 bp, Artificial Sequence
  chemically synthesized
taacccatatgaaataggcttt

SEQ ID NO: 35289 - DNA, 22 bp, Artificial Sequence
  chemically synthesized
aacccatatgaaataggctttc

SEQ ID NO: 35290 - DNA, 22 bp, Artificial Sequence
  chemically synthesized
acccatatgaaataggctttcc

SEQ ID NO: 35291 - DNA, 22 bp, Artificial Sequence
  chemically synthesized
tcctgtattttcaactcactgg

SEQ ID NO: 35292 - DNA, 22 bp, Artificial Sequence
  chemically synthesized
cctgtattttcaactcactggt

SEQ ID NO: 35293 - DNA, 22 bp, Artificial Sequence
  chemically synthesized
ctgtattttcaactcactggta

SEQ ID NO: 35294 - DNA, 22 bp, Artificial Sequence
  chemically synthesized
tattttcaactcactggtagga

SEQ ID NO: 35295 - DNA, 22 bp, Artificial Sequence
  chemically synthesized
tcaactcactggtaggattttt

SEQ ID NO: 35296 - DNA, 22 bp, Artificial Sequence
  chemically synthesized
caactcactggtaggatttttt

SEQ ID NO: 35297 - DNA, 22 bp, Artificial Sequence
  chemically synthesized
aactcactggtaggattttttc

SEQ ID NO: 35298 - DNA, 22 bp, Artificial Sequence
  chemically synthesized
actggtaggattttttctgtct

SEQ ID NO: 35299 - DNA, 22 bp, Artificial Sequence
  chemically synthesized
gtaggattttttctgtcttccc

SEQ ID NO: 35300 - DNA, 22 bp, Artificial Sequence
  chemically synthesized
tttctgtcttccccctttatgt

SEQ ID NO: 35301 - DNA, 22 bp, Artificial Sequence
  chemically synthesized
ttctgtcttccccctttatgta

SEQ ID NO: 35302 - DNA, 22 bp, Artificial Sequence
  chemically synthesized
tctgtcttccccctttatgtag

SEQ ID NO: 35303 - DNA, 22 bp, Artificial Sequence
  chemically synthesized
ctgtcttccccctttatgtaga

SEQ ID NO: 35304 - DNA, 22 bp, Artificial Sequence
  chemically synthesized
tgtcttccccctttatgtagat

SEQ ID NO: 35305 - DNA, 22 bp, Artificial Sequence
  chemically synthesized
tcttccccctttatgtagatga

SEQ ID NO: 35306 - DNA, 22 bp, Artificial Sequence
  chemically synthesized
ccccctttatgtagatgatcca

SEQ ID NO: 35307 - DNA, 22 bp, Artificial Sequence
  chemically synthesized
cccctttatgtagatgatccaa

SEQ ID NO: 35308 - DNA, 22 bp, Artificial Sequence
  chemically synthesized
tatgtagatgatccaaagtcag

SEQ ID NO: 35309 - DNA, 22 bp, Artificial Sequence
  chemically synthesized
atgtagatgatccaaagtcaga

SEQ ID NO: 35310 - DNA, 22 bp, Artificial Sequence
  chemically synthesized
tgtagatgatccaaagtcagag

SEQ ID NO: 35311 - DNA, 22 bp, Artificial Sequence
  chemically synthesized
gaagcatgagtagcccgtggct

SEQ ID NO: 35312 - DNA, 22 bp, Artificial Sequence
  chemically synthesized
cctgaatagcctggggaaagca

SEQ ID NO: 35313 - DNA, 22 bp, Artificial Sequence
  chemically synthesized
ctgaatagcctggggaaagcaa

SEQ ID NO: 35314 - DNA, 22 bp, Artificial Sequence
  chemically synthesized
aatagcctggggaaagcaactt

SEQ ID NO: 35315 - DNA, 22 bp, Artificial Sequence
  chemically synthesized
gggaaagcaacttctgatggac

SEQ ID NO: 35316 - DNA, 22 bp, Artificial Sequence
  chemically synthesized
ctgatggacagacattgcgaga

SEQ ID NO: 35317 - DNA, 22 bp, Artificial Sequence
  chemically synthesized
tgatggacagacattgcgagag

SEQ ID NO: 35318 - DNA, 22 bp, Artificial Sequence
  chemically synthesized
atggacagacattgcgagagcg

SEQ ID NO: 35319 - DNA, 22 bp, Artificial Sequence
  chemically synthesized
cgagagcgaatgccagcctctt

SEQ ID NO: 35320 - DNA, 22 bp, Artificial Sequence
  chemically synthesized
ttttcttgctgatctcctctct

SEQ ID NO: 35321 - DNA, 22 bp, Artificial Sequence
  chemically synthesized
ttcttgctgatctcctctctat

SEQ ID NO: 35322 - DNA, 22 bp, Artificial Sequence
  chemically synthesized
tcttgctgatctcctctctata

SEQ ID NO: 35323 - DNA, 22 bp, Artificial Sequence
  chemically synthesized
cttgctgatctcctctctatat

SEQ ID NO: 35324 - DNA, 22 bp, Artificial Sequence
  chemically synthesized
ttgctgatctcctctctatatg

SEQ ID NO: 35325 - DNA, 22 bp, Artificial Sequence
  chemically synthesized
gctgatctcctctctatatggt

SEQ ID NO: 35326 - DNA, 22 bp, Artificial Sequence
  chemically synthesized
ctgatctcctctctatatggtt

SEQ ID NO: 35327 - DNA, 22 bp, Artificial Sequence
  chemically synthesized
atctcctctctatatggttctt

SEQ ID NO: 35328 - DNA, 22 bp, Artificial Sequence
  chemically synthesized
ctctctatatggttcttaccac

SEQ ID NO: 35329 - DNA, 22 bp, Artificial Sequence
  chemically synthesized
tctatatggttcttaccactta

SEQ ID NO: 35330 - DNA, 22 bp, Artificial Sequence
  chemically synthesized
tatatggttcttaccacttaaa

SEQ ID NO: 35331 - DNA, 22 bp, Artificial Sequence
  chemically synthesized
tatggttcttaccacttaaaga

SEQ ID NO: 35332 - DNA, 22 bp, Artificial Sequence
  chemically synthesized
ttaccacttaaagacgaggttg

SEQ ID NO: 35333 - DNA, 22 bp, Artificial Sequence
  chemically synthesized
accacttaaagacgaggttgag

SEQ ID NO: 35334 - DNA, 22 bp, Artificial Sequence
  chemically synthesized
ccacttaaagacgaggttgagc

SEQ ID NO: 35335 - DNA, 22 bp, Artificial Sequence
  chemically synthesized
aaagacgaggttgagccagtct

SEQ ID NO: 35336 - DNA, 22 bp, Artificial Sequence
  chemically synthesized
aagacgaggttgagccagtctc

SEQ ID NO: 35337 - DNA, 22 bp, Artificial Sequence
  chemically synthesized
agccagtctccaatcacagcta

SEQ ID NO: 35338 - DNA, 22 bp, Artificial Sequence
  chemically synthesized
caatcacagctacccaaaggag

SEQ ID NO: 35339 - DNA, 22 bp, Artificial Sequence
  chemically synthesized
cccaaaggagtttaatgcccac

SEQ ID NO: 35340 - DNA, 22 bp, Artificial Sequence
  chemically synthesized
aatgcccacagcttcctgaaga

SEQ ID NO: 35341 - DNA, 22 bp, Artificial Sequence
  chemically synthesized
atgcccacagcttcctgaagat

SEQ ID NO: 35342 - DNA, 22 bp, Artificial Sequence
  chemically synthesized
cctgaagatggaaccagatggg

SEQ ID NO: 35343 - DNA, 22 bp, Artificial Sequence
  chemically synthesized
ctgaagatggaaccagatgggg

SEQ ID NO: 35344 - DNA, 22 bp, Artificial Sequence
  chemically synthesized
aagatggaaccagatggggaag

SEQ ID NO: 35345 - DNA, 22 bp, Artificial Sequence
  chemically synthesized
ctgaggtctgcgatcacggaca

SEQ ID NO: 35346 - DNA, 22 bp, Artificial Sequence
  chemically synthesized
aggtctgcgatcacggacacca

SEQ ID NO: 35347 - DNA, 22 bp, Artificial Sequence
  chemically synthesized
cgatcacggacaccaagatgaa

SEQ ID NO: 35348 - DNA, 22 bp, Artificial Sequence
  chemically synthesized
ggagtcttggtaattcacctgg

SEQ ID NO: 35349 - DNA, 22 bp, Artificial Sequence
  chemically synthesized
ggtaattcacctggaggtaatg

SEQ ID NO: 35350 - DNA, 22 bp, Artificial Sequence
  chemically synthesized
gtaattcacctggaggtaatgt

SEQ ID NO: 35351 - DNA, 22 bp, Artificial Sequence
  chemically synthesized
acctggaggtaatgtgttgact

SEQ ID NO: 35352 - DNA, 22 bp, Artificial Sequence
  chemically synthesized
gaggtaatgtgttgactggatc

SEQ ID NO: 35353 - DNA, 22 bp, Artificial Sequence
  chemically synthesized
actggatcccaaagtcatggag

SEQ ID NO: 35354 - DNA, 22 bp, Artificial Sequence
  chemically synthesized
gatcccaaagtcatggagaaca

SEQ ID NO: 35355 - DNA, 22 bp, Artificial Sequence
  chemically synthesized
attccttcctccatcctcattt

SEQ ID NO: 35356 - DNA, 22 bp, Artificial Sequence
  chemically synthesized
cttcctccatcctcatttcctt

SEQ ID NO: 35357 - DNA, 22 bp, Artificial Sequence
  chemically synthesized
cctccatcctcatttccttggc

SEQ ID NO: 35358 - DNA, 22 bp, Artificial Sequence
  chemically synthesized
ctccatcctcatttccttggca

SEQ ID NO: 35359 - DNA, 22 bp, Artificial Sequence
  chemically synthesized
catcctcatttccttggcacct

SEQ ID NO: 35360 - DNA, 22 bp, Artificial Sequence
  chemically synthesized
atttccttggcacctcaggaag

SEQ ID NO: 35361 - DNA, 22 bp, Artificial Sequence
  chemically synthesized
ccttggcacctcaggaagatgt

SEQ ID NO: 35362 - DNA, 22 bp, Artificial Sequence
  chemically synthesized
cttggcacctcaggaagatgtc

SEQ ID NO: 35363 - DNA, 22 bp, Artificial Sequence
  chemically synthesized
ggcacctcaggaagatgtcagc

SEQ ID NO: 35364 - DNA, 22 bp, Artificial Sequence
  chemically synthesized
gcacctcaggaagatgtcagca

SEQ ID NO: 35365 - DNA, 22 bp, Artificial Sequence
  chemically synthesized
aggaagatgtcagcagagccct

SEQ ID NO: 35366 - DNA, 22 bp, Artificial Sequence
  chemically synthesized
gcagttattccaggcttggtgg

SEQ ID NO: 35367 - DNA, 22 bp, Artificial Sequence
  chemically synthesized
cagttattccaggcttggtggt

SEQ ID NO: 35368 - DNA, 22 bp, Artificial Sequence
  chemically synthesized
ttccaggcttggtggtgattgc

SEQ ID NO: 35369 - DNA, 22 bp, Artificial Sequence
  chemically synthesized
caggcttggtggtgattgctct

SEQ ID NO: 35370 - DNA, 22 bp, Artificial Sequence
  chemically synthesized
ggtggtgattgctctgctatga

SEQ ID NO: 35371 - DNA, 22 bp, Artificial Sequence
  chemically synthesized
gtggtgattgctctgctatgag

SEQ ID NO: 35372 - DNA, 22 bp, Artificial Sequence
  chemically synthesized
ctctgctatgagtctgtgcctt

SEQ ID NO: 35373 - DNA, 22 bp, Artificial Sequence
  chemically synthesized
tgctatgagtctgtgccttgcc

SEQ ID NO: 35374 - DNA, 22 bp, Artificial Sequence
  chemically synthesized
ctatgagtctgtgccttgcccc

SEQ ID NO: 35375 - DNA, 22 bp, Artificial Sequence
  chemically synthesized
tgagtctgtgccttgcccctgt

SEQ ID NO: 35376 - DNA, 22 bp, Artificial Sequence
  chemically synthesized
tgccttgcccctgttttatatg

SEQ ID NO: 35377 - DNA, 22 bp, Artificial Sequence
  chemically synthesized
gcccctgttttatatgccctgt

SEQ ID NO: 35378 - DNA, 22 bp, Artificial Sequence
  chemically synthesized
cccctgttttatatgccctgta

SEQ ID NO: 35379 - DNA, 22 bp, Artificial Sequence
  chemically synthesized
ttttatatgccctgtatccagt

SEQ ID NO: 35380 - DNA, 22 bp, Artificial Sequence
  chemically synthesized
tatatgccctgtatccagtatt

SEQ ID NO: 35381 - DNA, 22 bp, Artificial Sequence
  chemically synthesized
atatgccctgtatccagtattc

SEQ ID NO: 35382 - DNA, 22 bp, Artificial Sequence
  chemically synthesized
tatgccctgtatccagtattca

SEQ ID NO: 35383 - DNA, 22 bp, Artificial Sequence
  chemically synthesized
tatccagtattcaggtcaaccc

SEQ ID NO: 35384 - DNA, 22 bp, Artificial Sequence
  chemically synthesized
aggtcaacccagccctgatctt

SEQ ID NO: 35385 - DNA, 22 bp, Artificial Sequence
  chemically synthesized
atctttggactcaaaaaccacg

SEQ ID NO: 35386 - DNA, 22 bp, Artificial Sequence
  chemically synthesized
tggactcaaaaaccacgtttgt

SEQ ID NO: 35387 - DNA, 22 bp, Artificial Sequence
  chemically synthesized
ggactcaaaaaccacgtttgtc

SEQ ID NO: 35388 - DNA, 22 bp, Artificial Sequence
  chemically synthesized
gactcaaaaaccacgtttgtct

SEQ ID NO: 35389 - DNA, 22 bp, Artificial Sequence
  chemically synthesized
aaaaaccacgtttgtctaaaat

SEQ ID NO: 35390 - DNA, 20 bp, Artificial Sequence
  chemically synthesized
tgcgtccactgctcttctga

SEQ ID NO: 35391 - DNA, 20 bp, Artificial Sequence
  chemically synthesized
tcttctgacagcatcattta

SEQ ID NO: 35392 - DNA, 20 bp, Artificial Sequence
  chemically synthesized
cttctgacagcatcatttac

SEQ ID NO: 35393 - DNA, 20 bp, Artificial Sequence
  chemically synthesized
aggttcacactgttccacct

SEQ ID NO: 35394 - DNA, 20 bp, Artificial Sequence
  chemically synthesized
ttcatattatgctcaaaata

SEQ ID NO: 35395 - DNA, 20 bp, Artificial Sequence
  chemically synthesized
tgctcaaaatatggacctat

SEQ ID NO: 35396 - DNA, 20 bp, Artificial Sequence
  chemically synthesized
aatatggacctatcagaaaa

SEQ ID NO: 35397 - DNA, 20 bp, Artificial Sequence
  chemically synthesized
ccattcatctgctgttgttt

SEQ ID NO: 35398 - DNA, 20 bp, Artificial Sequence
  chemically synthesized
tttggcctttgtctgaatca

SEQ ID NO: 35399 - DNA, 20 bp, Artificial Sequence
  chemically synthesized
cctttgtctgaatcacagta

SEQ ID NO: 35400 - DNA, 20 bp, Artificial Sequence
  chemically synthesized
tagatgcctccaactgttaa

SEQ ID NO: 35401 - DNA, 20 bp, Artificial Sequence
  chemically synthesized
agatgcctccaactgttaaa

SEQ ID NO: 35402 - DNA, 20 bp, Artificial Sequence
  chemically synthesized
tccaactgttaaaaggaaaa

SEQ ID NO: 35403 - DNA, 20 bp, Artificial Sequence
  chemically synthesized
aaaaagtttctattatcatt

SEQ ID NO: 35404 - DNA, 20 bp, Artificial Sequence
  chemically synthesized
aaaagtttctattatcattc

SEQ ID NO: 35405 - DNA, 20 bp, Artificial Sequence
  chemically synthesized
gtttctattatcattcaggt

SEQ ID NO: 35406 - DNA, 20 bp, Artificial Sequence
  chemically synthesized
tcaggttagcaatttgttta

SEQ ID NO: 35407 - DNA, 20 bp, Artificial Sequence
  chemically synthesized
agcaatttgtttaaagtaat

SEQ ID NO: 35408 - DNA, 20 bp, Artificial Sequence
  chemically synthesized
gcaatttgtttaaagtaata

SEQ ID NO: 35409 - DNA, 20 bp, Artificial Sequence
  chemically synthesized
caatttgtttaaagtaataa

SEQ ID NO: 35410 - DNA, 20 bp, Artificial Sequence
  chemically synthesized
ttgtttaaagtaataaggga

SEQ ID NO: 35411 - DNA, 20 bp, Artificial Sequence
  chemically synthesized
aagtaataagggatggaaat

SEQ ID NO: 35412 - DNA, 20 bp, Artificial Sequence
  chemically synthesized
ataagggatggaaatgagtt

SEQ ID NO: 35413 - DNA, 20 bp, Artificial Sequence
  chemically synthesized
atgagttcagatttttaaat

SEQ ID NO: 35414 - DNA, 20 bp, Artificial Sequence
  chemically synthesized
cagatttttaaattagcatt

SEQ ID NO: 35415 - DNA, 20 bp, Artificial Sequence
  chemically synthesized
agatttttaaattagcattt

SEQ ID NO: 35416 - DNA, 20 bp, Artificial Sequence
  chemically synthesized
attagcatttaggatccact

SEQ ID NO: 35417 - DNA, 20 bp, Artificial Sequence
  chemically synthesized
atttaggatccactaagccc

SEQ ID NO: 35418 - DNA, 20 bp, Artificial Sequence
  chemically synthesized
tttaggatccactaagccca

SEQ ID NO: 35419 - DNA, 20 bp, Artificial Sequence
  chemically synthesized
tatttacctttcaaaaataa

SEQ ID NO: 35420 - DNA, 20 bp, Artificial Sequence
  chemically synthesized
atagtatttgacatattgtt

SEQ ID NO: 35421 - DNA, 20 bp, Artificial Sequence
  chemically synthesized
tagtatttgacatattgtta

SEQ ID NO: 35422 - DNA, 20 bp, Artificial Sequence
  chemically synthesized
agtatttgacatattgttaa

SEQ ID NO: 35423 - DNA, 20 bp, Artificial Sequence
  chemically synthesized
tgttaagggacaccaacgaa

SEQ ID NO: 35424 - DNA, 20 bp, Artificial Sequence
  chemically synthesized
tcaattctgtgcatgtttta

SEQ ID NO: 35425 - DNA, 20 bp, Artificial Sequence
  chemically synthesized
gcatgttttaaagtcccttc

SEQ ID NO: 35426 - DNA, 20 bp, Artificial Sequence
  chemically synthesized
catgttttaaagtcccttct

SEQ ID NO: 35427 - DNA, 20 bp, Artificial Sequence
  chemically synthesized
ccttctaggtgcatgtgaaa

SEQ ID NO: 35428 - DNA, 20 bp, Artificial Sequence
  chemically synthesized
tctaggtgcatgtgaaatag

SEQ ID NO: 35429 - DNA, 20 bp, Artificial Sequence
  chemically synthesized
aggtgcatgtgaaatagcag

SEQ ID NO: 35430 - DNA, 20 bp, Artificial Sequence
  chemically synthesized
ggtgcatgtgaaatagcagc

SEQ ID NO: 35431 - DNA, 20 bp, Artificial Sequence
  chemically synthesized
agcagcaggctgatgccgca

SEQ ID NO: 35432 - DNA, 20 bp, Artificial Sequence
  chemically synthesized
cagcaggctgatgccgcaaa

SEQ ID NO: 35433 - DNA, 20 bp, Artificial Sequence
  chemically synthesized
agcaggctgatgccgcaaag

SEQ ID NO: 35434 - DNA, 20 bp, Artificial Sequence
  chemically synthesized
aagaggtcaaatacctcaaa

SEQ ID NO: 35435 - DNA, 20 bp, Artificial Sequence
  chemically synthesized
ggtcaaatacctcaaaaaga

SEQ ID NO: 35436 - DNA, 20 bp, Artificial Sequence
  chemically synthesized
tcaaatacctcaaaaagaaa

SEQ ID NO: 35437 - DNA, 20 bp, Artificial Sequence
  chemically synthesized
tcaaaaagaaagagtctgaa

SEQ ID NO: 35438 - DNA, 20 bp, Artificial Sequence
  chemically synthesized
aaagagtctgaaaagacaat

SEQ ID NO: 35439 - DNA, 20 bp, Artificial Sequence
  chemically synthesized
agagtctgaaaagacaattg

SEQ ID NO: 35440 - DNA, 20 bp, Artificial Sequence
  chemically synthesized
ttggagtaactacttgccta

SEQ ID NO: 35441 - DNA, 20 bp, Artificial Sequence
  chemically synthesized
taactacttgcctaaagctc

SEQ ID NO: 35442 - DNA, 20 bp, Artificial Sequence
  chemically synthesized
ctaaagctccagtcactttg

SEQ ID NO: 35443 - DNA, 20 bp, Artificial Sequence
  chemically synthesized
ccagtcactttgtagtgtca

SEQ ID NO: 35444 - DNA, 20 bp, Artificial Sequence
  chemically synthesized
tcactttgtagtgtcaaagt

SEQ ID NO: 35445 - DNA, 20 bp, Artificial Sequence
  chemically synthesized
cactttgtagtgtcaaagtt

SEQ ID NO: 35446 - DNA, 20 bp, Artificial Sequence
  chemically synthesized
attgtcatcatacatgccct

SEQ ID NO: 35447 - DNA, 20 bp, Artificial Sequence
  chemically synthesized
gtcatcatacatgccctcag

SEQ ID NO: 35448 - DNA, 20 bp, Artificial Sequence
  chemically synthesized
atcatacatgccctcagcag

SEQ ID NO: 35449 - DNA, 20 bp, Artificial Sequence
  chemically synthesized
ctctcttcctccttctccta

SEQ ID NO: 35450 - DNA, 20 bp, Artificial Sequence
  chemically synthesized
tcttcctccttctcctacag

SEQ ID NO: 35451 - DNA, 20 bp, Artificial Sequence
  chemically synthesized
ctccttctcctacagtggtc

SEQ ID NO: 35452 - DNA, 20 bp, Artificial Sequence
  chemically synthesized
cttctcctacagtggtccag

SEQ ID NO: 35453 - DNA, 20 bp, Artificial Sequence
  chemically synthesized
ttctcctacagtggtccaga

SEQ ID NO: 35454 - DNA, 20 bp, Artificial Sequence
  chemically synthesized
tctcctacagtggtccagaa

SEQ ID NO: 35455 - DNA, 20 bp, Artificial Sequence
  chemically synthesized
ctcctacagtggtccagaag

SEQ ID NO: 35456 - DNA, 20 bp, Artificial Sequence
  chemically synthesized
acagtggtccagaaggggct

SEQ ID NO: 35457 - DNA, 20 bp, Artificial Sequence
  chemically synthesized
cagtggtccagaaggggctc

SEQ ID NO: 35458 - DNA, 20 bp, Artificial Sequence
  chemically synthesized
gctcaggtatgttcaaataa

SEQ ID NO: 35459 - DNA, 20 bp, Artificial Sequence
  chemically synthesized
tgttcaaataacagctgctg

SEQ ID NO: 35460 - DNA, 20 bp, Artificial Sequence
  chemically synthesized
tgctgtggttttcaattatg

SEQ ID NO: 35461 - DNA, 20 bp, Artificial Sequence
  chemically synthesized
caattatgaagaaatctcct

SEQ ID NO: 35462 - DNA, 20 bp, Artificial Sequence
  chemically synthesized
aagaaatctcctaagctaca

SEQ ID NO: 35463 - DNA, 20 bp, Artificial Sequence
  chemically synthesized
acatagtcatttatctttta

SEQ ID NO: 35464 - DNA, 20 bp, Artificial Sequence
  chemically synthesized
catttatcttttaaagcacc

SEQ ID NO: 35465 - DNA, 20 bp, Artificial Sequence
  chemically synthesized
atcttttaaagcaccaagca

SEQ ID NO: 35466 - DNA, 20 bp, Artificial Sequence
  chemically synthesized
caagcaaagtaccttttgat

SEQ ID NO: 35467 - DNA, 20 bp, Artificial Sequence
  chemically synthesized
aagcaaagtaccttttgata

SEQ ID NO: 35468 - DNA, 20 bp, Artificial Sequence
  chemically synthesized
gcaaagtaccttttgataag

SEQ ID NO: 35469 - DNA, 20 bp, Artificial Sequence
  chemically synthesized
tgataaggagaacgtgctta

SEQ ID NO: 35470 - DNA, 20 bp, Artificial Sequence
  chemically synthesized
aacgtgcttatagatgttca

SEQ ID NO: 35471 - DNA, 20 bp, Artificial Sequence
  chemically synthesized
gtgcttatagatgttcatag

SEQ ID NO: 35472 - DNA, 20 bp, Artificial Sequence
  chemically synthesized
agatgttcatagaagatgct

SEQ ID NO: 35473 - DNA, 20 bp, Artificial Sequence
  chemically synthesized
atacgtatttcattctcaca

SEQ ID NO: 35474 - DNA, 20 bp, Artificial Sequence
  chemically synthesized
acatggtatttctctcttcc

SEQ ID NO: 35475 - DNA, 20 bp, Artificial Sequence
  chemically synthesized
ggtatttctctcttcctagt

SEQ ID NO: 35476 - DNA, 20 bp, Artificial Sequence
  chemically synthesized
gtatttctctcttcctagta

SEQ ID NO: 35477 - DNA, 20 bp, Artificial Sequence
  chemically synthesized
tatttctctcttcctagtaa

SEQ ID NO: 35478 - DNA, 20 bp, Artificial Sequence
  chemically synthesized
tttctctcttcctagtaagg

SEQ ID NO: 35479 - DNA, 20 bp, Artificial Sequence
  chemically synthesized
ttctctcttcctagtaaggg

SEQ ID NO: 35480 - DNA, 20 bp, Artificial Sequence
  chemically synthesized
ctctcttcctagtaagggag

SEQ ID NO: 35481 - DNA, 20 bp, Artificial Sequence
  chemically synthesized
atgcccaatttctgcctcca

SEQ ID NO: 35482 - DNA, 20 bp, Artificial Sequence
  chemically synthesized
ccaatttctgcctccaaaga

SEQ ID NO: 35483 - DNA, 20 bp, Artificial Sequence
  chemically synthesized
atttctgcctccaaagaaag

SEQ ID NO: 35484 - DNA, 20 bp, Artificial Sequence
  chemically synthesized
tctgcctccaaagaaagaag

SEQ ID NO: 35485 - DNA, 20 bp, Artificial Sequence
  chemically synthesized
aaagaagaagtaaaaactaa

SEQ ID NO: 35486 - DNA, 20 bp, Artificial Sequence
  chemically synthesized
aagaagaagtaaaaactaaa

SEQ ID NO: 35487 - DNA, 20 bp, Artificial Sequence
  chemically synthesized
aagaagtaaaaactaaaagg

SEQ ID NO: 35488 - DNA, 20 bp, Artificial Sequence
  chemically synthesized
aaaggcagaaatgaaatcca

SEQ ID NO: 35489 - DNA, 20 bp, Artificial Sequence
  chemically synthesized
aaggcagaaatgaaatccac

SEQ ID NO: 35490 - DNA, 20 bp, Artificial Sequence
  chemically synthesized
aaatgaaatccacaggcaaa

SEQ ID NO: 35491 - DNA, 20 bp, Artificial Sequence
  chemically synthesized
aatccacaggcaaacagcct

SEQ ID NO: 35492 - DNA, 20 bp, Artificial Sequence
  chemically synthesized
aacagcctgagaccacatcc

SEQ ID NO: 35493 - DNA, 20 bp, Artificial Sequence
  chemically synthesized
acagcctgagaccacatcct

SEQ ID NO: 35494 - DNA, 20 bp, Artificial Sequence
  chemically synthesized
ctgagaccacatcctgggcc

SEQ ID NO: 35495 - DNA, 20 bp, Artificial Sequence
  chemically synthesized
ccacatcctgggcctggtta

SEQ ID NO: 35496 - DNA, 20 bp, Artificial Sequence
  chemically synthesized
atcctgggcctggttaaaga

SEQ ID NO: 35497 - DNA, 20 bp, Artificial Sequence
  chemically synthesized
ttaaagatagacccctgacc

SEQ ID NO: 35498 - DNA, 20 bp, Artificial Sequence
  chemically synthesized
agatagacccctgacctggc

SEQ ID NO: 35499 - DNA, 20 bp, Artificial Sequence
  chemically synthesized
ctggccagttatgttatcta

SEQ ID NO: 35500 - DNA, 20 bp, Artificial Sequence
  chemically synthesized
gttatgttatctatagattc

SEQ ID NO: 35501 - DNA, 20 bp, Artificial Sequence
  chemically synthesized
tatagattccagacactgta

SEQ ID NO: 35502 - DNA, 20 bp, Artificial Sequence
  chemically synthesized
attccagacactgtatggaa

SEQ ID NO: 35503 - DNA, 20 bp, Artificial Sequence
  chemically synthesized
ccagacactgtatggaaaag

SEQ ID NO: 35504 - DNA, 20 bp, Artificial Sequence
  chemically synthesized
ttctgttccattctgatgac

SEQ ID NO: 35505 - DNA, 20 bp, Artificial Sequence
  chemically synthesized
attctgatgaccagtgcatg

SEQ ID NO: 35506 - DNA, 20 bp, Artificial Sequence
  chemically synthesized
tgaccagtgcatgcagcccc

SEQ ID NO: 35507 - DNA, 20 bp, Artificial Sequence
  chemically synthesized
cccccagtcatgtaccccct

SEQ ID NO: 35508 - DNA, 20 bp, Artificial Sequence
  chemically synthesized
cccagtcatgtaccccctta

SEQ ID NO: 35509 - DNA, 20 bp, Artificial Sequence
  chemically synthesized
atgtacccccttagagttgt

SEQ ID NO: 35510 - DNA, 20 bp, Artificial Sequence
  chemically synthesized
ttagagttgtaagcccttaa

SEQ ID NO: 35511 - DNA, 20 bp, Artificial Sequence
  chemically synthesized
tagagttgtaagcccttaaa

SEQ ID NO: 35512 - DNA, 20 bp, Artificial Sequence
  chemically synthesized
agagttgtaagcccttaaaa

SEQ ID NO: 35513 - DNA, 20 bp, Artificial Sequence
  chemically synthesized
ttgtaagcccttaaaaggga

SEQ ID NO: 35514 - DNA, 20 bp, Artificial Sequence
  chemically synthesized
tgtaagcccttaaaagggac

SEQ ID NO: 35515 - DNA, 20 bp, Artificial Sequence
  chemically synthesized
ggacaggaattgctcactct

SEQ ID NO: 35516 - DNA, 20 bp, Artificial Sequence
  chemically synthesized
acaggaattgctcactctga

SEQ ID NO: 35517 - DNA, 20 bp, Artificial Sequence
  chemically synthesized
aattgctcactctgagagct

SEQ ID NO: 35518 - DNA, 20 bp, Artificial Sequence
  chemically synthesized
cactctgagagcttggttgt

SEQ ID NO: 35519 - DNA, 20 bp, Artificial Sequence
  chemically synthesized
ctctgagagcttggttgttg

SEQ ID NO: 35520 - DNA, 20 bp, Artificial Sequence
  chemically synthesized
agcttggttgttggagatgt

SEQ ID NO: 35521 - DNA, 20 bp, Artificial Sequence
  chemically synthesized
tggagatgtgagtcttgccc

SEQ ID NO: 35522 - DNA, 20 bp, Artificial Sequence
  chemically synthesized
gtgagtcttgcccaagctcc

SEQ ID NO: 35523 - DNA, 20 bp, Artificial Sequence
  chemically synthesized
cccaagctcccagccgaata

SEQ ID NO: 35524 - DNA, 20 bp, Artificial Sequence
  chemically synthesized
aagcccttccttctttaact

SEQ ID NO: 35525 - DNA, 20 bp, Artificial Sequence
  chemically synthesized
ccttctttaactcggtgtct

SEQ ID NO: 35526 - DNA, 20 bp, Artificial Sequence
  chemically synthesized
cttctttaactcggtgtctg

SEQ ID NO: 35527 - DNA, 20 bp, Artificial Sequence
  chemically synthesized
ttctttaactcggtgtctga

SEQ ID NO: 35528 - DNA, 20 bp, Artificial Sequence
  chemically synthesized
tctttaactcggtgtctgag

SEQ ID NO: 35529 - DNA, 20 bp, Artificial Sequence
  chemically synthesized
tgtctgaggggttttgtatg

SEQ ID NO: 35530 - DNA, 20 bp, Artificial Sequence
  chemically synthesized
tgcagcttgtcctgctacac

SEQ ID NO: 35531 - DNA, 20 bp, Artificial Sequence
  chemically synthesized
gctacctctattaaaacaca

SEQ ID NO: 35532 - DNA, 20 bp, Artificial Sequence
  chemically synthesized
aaacacaaagccacaatata

SEQ ID NO: 35533 - DNA, 20 bp, Artificial Sequence
  chemically synthesized
ccacaatatatggatacatt

SEQ ID NO: 35534 - DNA, 20 bp, Artificial Sequence
  chemically synthesized
tttggaaaatatgcacactt

SEQ ID NO: 35535 - DNA, 20 bp, Artificial Sequence
  chemically synthesized
aaatatgcacactttggatc

SEQ ID NO: 35536 - DNA, 20 bp, Artificial Sequence
  chemically synthesized
atgcacactttggatccagc

SEQ ID NO: 35537 - DNA, 20 bp, Artificial Sequence
  chemically synthesized
ggatccagcaagtccacatc

SEQ ID NO: 35538 - DNA, 20 bp, Artificial Sequence
  chemically synthesized
ccacatctagaaaaccatcc

SEQ ID NO: 35539 - DNA, 20 bp, Artificial Sequence
  chemically synthesized
cacatctagaaaaccatcct

SEQ ID NO: 35540 - DNA, 20 bp, Artificial Sequence
  chemically synthesized
acatctagaaaaccatcctg

SEQ ID NO: 35541 - DNA, 20 bp, Artificial Sequence
  chemically synthesized
catctagaaaaccatcctgg

SEQ ID NO: 35542 - DNA, 20 bp, Artificial Sequence
  chemically synthesized
aaccatcctgggggaaaatt

SEQ ID NO: 35543 - DNA, 20 bp, Artificial Sequence
  chemically synthesized
accatcctgggggaaaatta

SEQ ID NO: 35544 - DNA, 20 bp, Artificial Sequence
  chemically synthesized
catcctgggggaaaattaag

SEQ ID NO: 35545 - DNA, 20 bp, Artificial Sequence
  chemically synthesized
tcctgggggaaaattaagga

SEQ ID NO: 35546 - DNA, 20 bp, Artificial Sequence
  chemically synthesized
aaaattaaggagagtatgaa

SEQ ID NO: 35547 - DNA, 20 bp, Artificial Sequence
  chemically synthesized
aaattaaggagagtatgaaa

SEQ ID NO: 35548 - DNA, 20 bp, Artificial Sequence
  chemically synthesized
tatgaaaaggatgtttacta

SEQ ID NO: 35549 - DNA, 20 bp, Artificial Sequence
  chemically synthesized
tgtttactaaagcattatga

SEQ ID NO: 35550 - DNA, 20 bp, Artificial Sequence
  chemically synthesized
gcattatgatggcaaaaaat

SEQ ID NO: 35551 - DNA, 20 bp, Artificial Sequence
  chemically synthesized
agaaacaacttacactgaac

SEQ ID NO: 35552 - DNA, 20 bp, Artificial Sequence
  chemically synthesized
gaactagtcaacttacttaa

SEQ ID NO: 35553 - DNA, 20 bp, Artificial Sequence
  chemically synthesized
tagtcaacttacttaacaga

SEQ ID NO: 35554 - DNA, 20 bp, Artificial Sequence
  chemically synthesized
tcaacttacttaacagacag

SEQ ID NO: 35555 - DNA, 20 bp, Artificial Sequence
  chemically synthesized
caacttacttaacagacaga

SEQ ID NO: 35556 - DNA, 20 bp, Artificial Sequence
  chemically synthesized
taacagacagaaggctcaat

SEQ ID NO: 35557 - DNA, 20 bp, Artificial Sequence
  chemically synthesized
caattagctcatgtgtcaaa

SEQ ID NO: 35558 - DNA, 20 bp, Artificial Sequence
  chemically synthesized
aattagctcatgtgtcaaat

SEQ ID NO: 35559 - DNA, 20 bp, Artificial Sequence
  chemically synthesized
attagctcatgtgtcaaatg

SEQ ID NO: 35560 - DNA, 20 bp, Artificial Sequence
  chemically synthesized
ttagctcatgtgtcaaatgg

SEQ ID NO: 35561 - DNA, 20 bp, Artificial Sequence
  chemically synthesized
aatgggggtaaaataatatt

SEQ ID NO: 35562 - DNA, 20 bp, Artificial Sequence
  chemically synthesized
gggtaaaataatatttagtt

SEQ ID NO: 35563 - DNA, 20 bp, Artificial Sequence
  chemically synthesized
gtaaaataatatttagtttg

SEQ ID NO: 35564 - DNA, 20 bp, Artificial Sequence
  chemically synthesized
taaaataatatttagtttgg

SEQ ID NO: 35565 - DNA, 20 bp, Artificial Sequence
  chemically synthesized
aaaataatatttagtttgga

SEQ ID NO: 35566 - DNA, 20 bp, Artificial Sequence
  chemically synthesized
taatatttagtttggaggga

SEQ ID NO: 35567 - DNA, 20 bp, Artificial Sequence
  chemically synthesized
atttagtttggagggaaaga

SEQ ID NO: 35568 - DNA, 20 bp, Artificial Sequence
  chemically synthesized
tttagtttggagggaaagac

SEQ ID NO: 35569 - DNA, 20 bp, Artificial Sequence
  chemically synthesized
gagggaaagacaggctctaa

SEQ ID NO: 35570 - DNA, 20 bp, Artificial Sequence
  chemically synthesized
gggaaagacaggctctaaaa

SEQ ID NO: 35571 - DNA, 20 bp, Artificial Sequence
  chemically synthesized
ggaaagacaggctctaaaag

SEQ ID NO: 35572 - DNA, 20 bp, Artificial Sequence
  chemically synthesized
tctaaaagaggattaaaaat

SEQ ID NO: 35573 - DNA, 20 bp, Artificial Sequence
  chemically synthesized
agaggattaaaaattagatg

SEQ ID NO: 35574 - DNA, 20 bp, Artificial Sequence
  chemically synthesized
attaaaaattagatgtggcc

SEQ ID NO: 35575 - DNA, 20 bp, Artificial Sequence
  chemically synthesized
ttaaaaattagatgtggcct

SEQ ID NO: 35576 - DNA, 20 bp, Artificial Sequence
  chemically synthesized
aattagatgtggcctaggca

SEQ ID NO: 35577 - DNA, 20 bp, Artificial Sequence
  chemically synthesized
taggcaaagaatttatgacc

SEQ ID NO: 35578 - DNA, 20 bp, Artificial Sequence
  chemically synthesized
aaacacaacaaaaacaaaaa

SEQ ID NO: 35579 - DNA, 20 bp, Artificial Sequence
  chemically synthesized
caaaaacaaaaacagacaaa

SEQ ID NO: 35580 - DNA, 20 bp, Artificial Sequence
  chemically synthesized
aaaaacaaaaacagacaaat

SEQ ID NO: 35581 - DNA, 20 bp, Artificial Sequence
  chemically synthesized
aaaatgcttctgcaccgcaa

SEQ ID NO: 35582 - DNA, 20 bp, Artificial Sequence
  chemically synthesized
accgcaaaagaccgaatcaa

SEQ ID NO: 35583 - DNA, 20 bp, Artificial Sequence
  chemically synthesized
cgcaaaagaccgaatcaaca

SEQ ID NO: 35584 - DNA, 20 bp, Artificial Sequence
  chemically synthesized
gaccgaatcaacagagtaaa

SEQ ID NO: 35585 - DNA, 20 bp, Artificial Sequence
  chemically synthesized
cagagtaaacggataaccta

SEQ ID NO: 35586 - DNA, 20 bp, Artificial Sequence
  chemically synthesized
aaacggataacctacagaat

SEQ ID NO: 35587 - DNA, 20 bp, Artificial Sequence
  chemically synthesized
gcaaactatgaatgcaacaa

SEQ ID NO: 35588 - DNA, 20 bp, Artificial Sequence
  chemically synthesized
caaactatgaatgcaacaaa

SEQ ID NO: 35589 - DNA, 20 bp, Artificial Sequence
  chemically synthesized
tgcaacaaaaggctaatata

SEQ ID NO: 35590 - DNA, 20 bp, Artificial Sequence
  chemically synthesized
ggctaatatacagaatctac

SEQ ID NO: 35591 - DNA, 20 bp, Artificial Sequence
  chemically synthesized
gctaatatacagaatctaca

SEQ ID NO: 35592 - DNA, 20 bp, Artificial Sequence
  chemically synthesized
aacaaaaaaaccaacctcat

SEQ ID NO: 35593 - DNA, 20 bp, Artificial Sequence
  chemically synthesized
aaaaaaccaacctcattaga

SEQ ID NO: 35594 - DNA, 20 bp, Artificial Sequence
  chemically synthesized
tcattagaaagtgactgtga

SEQ ID NO: 35595 - DNA, 20 bp, Artificial Sequence
  chemically synthesized
tgactgtgatggttaatact

SEQ ID NO: 35596 - DNA, 20 bp, Artificial Sequence
  chemically synthesized
atactgagtgtcaacttgat

SEQ ID NO: 35597 - DNA, 20 bp, Artificial Sequence
  chemically synthesized
gtgtcaacttgattggactg

SEQ ID NO: 35598 - DNA, 20 bp, Artificial Sequence
  chemically synthesized
tgtcaacttgattggactga

SEQ ID NO: 35599 - DNA, 20 bp, Artificial Sequence
  chemically synthesized
tgattggactgaaggatgca

SEQ ID NO: 35600 - DNA, 20 bp, Artificial Sequence
  chemically synthesized
aggatgcaaagtaatgatct

SEQ ID NO: 35601 - DNA, 20 bp, Artificial Sequence
  chemically synthesized
ggatgcaaagtaatgatctt

SEQ ID NO: 35602 - DNA, 20 bp, Artificial Sequence
  chemically synthesized
atgatcttgggtgtgtctgt

SEQ ID NO: 35603 - DNA, 20 bp, Artificial Sequence
  chemically synthesized
tgatcttgggtgtgtctgtg

SEQ ID NO: 35604 - DNA, 20 bp, Artificial Sequence
  chemically synthesized
gatcttgggtgtgtctgtga

SEQ ID NO: 35605 - DNA, 20 bp, Artificial Sequence
  chemically synthesized
tgtctgtgagggtgttacca

SEQ ID NO: 35606 - DNA, 20 bp, Artificial Sequence
  chemically synthesized
gtctgtgagggtgttaccaa

SEQ ID NO: 35607 - DNA, 20 bp, Artificial Sequence
  chemically synthesized
ctgtgagggtgttaccaaag

SEQ ID NO: 35608 - DNA, 20 bp, Artificial Sequence
  chemically synthesized
accaaaggagattaatattt

SEQ ID NO: 35609 - DNA, 20 bp, Artificial Sequence
  chemically synthesized
aaggagattaatatttcagt

SEQ ID NO: 35610 - DNA, 20 bp, Artificial Sequence
  chemically synthesized
gagattaatatttcagtcag

SEQ ID NO: 35611 - DNA, 20 bp, Artificial Sequence
  chemically synthesized
agattaatatttcagtcagt

SEQ ID NO: 35612 - DNA, 20 bp, Artificial Sequence
  chemically synthesized
taatatttcagtcagtgggc

SEQ ID NO: 35613 - DNA, 20 bp, Artificial Sequence
  chemically synthesized
aatatttcagtcagtgggct

SEQ ID NO: 35614 - DNA, 20 bp, Artificial Sequence
  chemically synthesized
atatttcagtcagtgggctg

SEQ ID NO: 35615 - DNA, 20 bp, Artificial Sequence
  chemically synthesized
tttcagtcagtgggctgggg

SEQ ID NO: 35616 - DNA, 20 bp, Artificial Sequence
  chemically synthesized
ttcagtcagtgggctgggga

SEQ ID NO: 35617 - DNA, 20 bp, Artificial Sequence
  chemically synthesized
agtcagtgggctggggaagg

SEQ ID NO: 35618 - DNA, 20 bp, Artificial Sequence
  chemically synthesized
aggcagacccacccttaatc

SEQ ID NO: 35619 - DNA, 20 bp, Artificial Sequence
  chemically synthesized
ggcagacccacccttaatct

SEQ ID NO: 35620 - DNA, 20 bp, Artificial Sequence
  chemically synthesized
agacccacccttaatctggg

SEQ ID NO: 35621 - DNA, 20 bp, Artificial Sequence
  chemically synthesized
gacccacccttaatctgggt

SEQ ID NO: 35622 - DNA, 20 bp, Artificial Sequence
  chemically synthesized
ctgggtgggcaccatctaat

SEQ ID NO: 35623 - DNA, 20 bp, Artificial Sequence
  chemically synthesized
ggcaccatctaatcagttgc

SEQ ID NO: 35624 - DNA, 20 bp, Artificial Sequence
  chemically synthesized
catctaatcagttgccagca

SEQ ID NO: 35625 - DNA, 20 bp, Artificial Sequence
  chemically synthesized
taatcagttgccagcacagc

SEQ ID NO: 35626 - DNA, 20 bp, Artificial Sequence
  chemically synthesized
aatcagttgccagcacagcc

SEQ ID NO: 35627 - DNA, 20 bp, Artificial Sequence
  chemically synthesized
gccagcacagccaggatata

SEQ ID NO: 35628 - DNA, 20 bp, Artificial Sequence
  chemically synthesized
agcacagccaggatataaag

SEQ ID NO: 35629 - DNA, 20 bp, Artificial Sequence
  chemically synthesized
gcacagccaggatataaagc

SEQ ID NO: 35630 - DNA, 20 bp, Artificial Sequence
  chemically synthesized
cagccaggatataaagcagg

SEQ ID NO: 35631 - DNA, 20 bp, Artificial Sequence
  chemically synthesized
agcaggcagaaaaatgtgaa

SEQ ID NO: 35632 - DNA, 20 bp, Artificial Sequence
  chemically synthesized
gcaggcagaaaaatgtgaaa

SEQ ID NO: 35633 - DNA, 20 bp, Artificial Sequence
  chemically synthesized
gcagaaaaatgtgaaaaggc

SEQ ID NO: 35634 - DNA, 20 bp, Artificial Sequence
  chemically synthesized
aaaatgtgaaaaggctagat

SEQ ID NO: 35635 - DNA, 20 bp, Artificial Sequence
  chemically synthesized
gtgaaaaggctagattggct

SEQ ID NO: 35636 - DNA, 20 bp, Artificial Sequence
  chemically synthesized
gctagattggcttggcatcc

SEQ ID NO: 35637 - DNA, 20 bp, Artificial Sequence
  chemically synthesized
cctacatttttctcccatgc

SEQ ID NO: 35638 - DNA, 20 bp, Artificial Sequence
  chemically synthesized
atgctggattcttcctgccc

SEQ ID NO: 35639 - DNA, 20 bp, Artificial Sequence
  chemically synthesized
tgccctggaacattgaactc

SEQ ID NO: 35640 - DNA, 20 bp, Artificial Sequence
  chemically synthesized
gccctggaacattgaactcc

SEQ ID NO: 35641 - DNA, 20 bp, Artificial Sequence
  chemically synthesized
acattgaactccaggttctt

SEQ ID NO: 35642 - DNA, 20 bp, Artificial Sequence
  chemically synthesized
aactccaggttcttcagctt

SEQ ID NO: 35643 - DNA, 20 bp, Artificial Sequence
  chemically synthesized
actccaggttcttcagcttt

SEQ ID NO: 35644 - DNA, 20 bp, Artificial Sequence
  chemically synthesized
ttcagctttgggactccgac

SEQ ID NO: 35645 - DNA, 20 bp, Artificial Sequence
  chemically synthesized
cgactagcttccttgttcct

SEQ ID NO: 35646 - DNA, 20 bp, Artificial Sequence
  chemically synthesized
tagcttccttgttcctcagc

SEQ ID NO: 35647 - DNA, 20 bp, Artificial Sequence
  chemically synthesized
cttccttgttcctcagctgg

SEQ ID NO: 35648 - DNA, 20 bp, Artificial Sequence
  chemically synthesized
cttgttcctcagctggcaga

SEQ ID NO: 35649 - DNA, 20 bp, Artificial Sequence
  chemically synthesized
agctggcagatggcctgttt

SEQ ID NO: 35650 - DNA, 20 bp, Artificial Sequence
  chemically synthesized
gctggcagatggcctgtttt

SEQ ID NO: 35651 - DNA, 20 bp, Artificial Sequence
  chemically synthesized
ttgggaccttgtgaacatgt

SEQ ID NO: 35652 - DNA, 20 bp, Artificial Sequence
  chemically synthesized
ctacataataaactctcata

SEQ ID NO: 35653 - DNA, 20 bp, Artificial Sequence
  chemically synthesized
aataaactctcatatagata

SEQ ID NO: 35654 - DNA, 20 bp, Artificial Sequence
  chemically synthesized
ctctcatatagatatagata

SEQ ID NO: 35655 - DNA, 20 bp, Artificial Sequence
  chemically synthesized
ctcatatagatatagatata

SEQ ID NO: 35656 - DNA, 20 bp, Artificial Sequence
  chemically synthesized
tatagatatagatatagaga

SEQ ID NO: 35657 - DNA, 20 bp, Artificial Sequence
  chemically synthesized
tatagatatagagatagata

SEQ ID NO: 35658 - DNA, 20 bp, Artificial Sequence
  chemically synthesized
tagatatagagatagatata

SEQ ID NO: 35659 - DNA, 20 bp, Artificial Sequence
  chemically synthesized
tatagagatagatatagaga

SEQ ID NO: 35660 - DNA, 20 bp, Artificial Sequence
  chemically synthesized
gatagatatagagatagata

SEQ ID NO: 35661 - DNA, 20 bp, Artificial Sequence
  chemically synthesized
tatagagatagatatagata

SEQ ID NO: 35662 - DNA, 20 bp, Artificial Sequence
  chemically synthesized
gatagatatagatatagata

SEQ ID NO: 35663 - DNA, 20 bp, Artificial Sequence
  chemically synthesized
tatagatatagatatagata

SEQ ID NO: 35664 - DNA, 20 bp, Artificial Sequence
  chemically synthesized
tatagatatagatatagata

SEQ ID NO: 35665 - DNA, 20 bp, Artificial Sequence
  chemically synthesized
tatagatatagatatagata

SEQ ID NO: 35666 - DNA, 20 bp, Artificial Sequence
  chemically synthesized
ctattaattctgtttctctg

SEQ ID NO: 35667 - DNA, 20 bp, Artificial Sequence
  chemically synthesized
ttctctgtagaaccctaata

SEQ ID NO: 35668 - DNA, 20 bp, Artificial Sequence
  chemically synthesized
tagaaccctaatacagattt

SEQ ID NO: 35669 - DNA, 20 bp, Artificial Sequence
  chemically synthesized
cctaatacagattttggtac

SEQ ID NO: 35670 - DNA, 20 bp, Artificial Sequence
  chemically synthesized
ctaatacagattttggtacc

SEQ ID NO: 35671 - DNA, 20 bp, Artificial Sequence
  chemically synthesized
aatacagattttggtaccag

SEQ ID NO: 35672 - DNA, 20 bp, Artificial Sequence
  chemically synthesized
acagattttggtaccaggag

SEQ ID NO: 35673 - DNA, 20 bp, Artificial Sequence
  chemically synthesized
tttggtaccaggagtggttc

SEQ ID NO: 35674 - DNA, 20 bp, Artificial Sequence
  chemically synthesized
tggtaccaggagtggttcta

SEQ ID NO: 35675 - DNA, 20 bp, Artificial Sequence
  chemically synthesized
ggtaccaggagtggttctag

SEQ ID NO: 35676 - DNA, 20 bp, Artificial Sequence
  chemically synthesized
caggagtggttctagaggaa

SEQ ID NO: 35677 - DNA, 20 bp, Artificial Sequence
  chemically synthesized
ttctagaggaacagaatatt

SEQ ID NO: 35678 - DNA, 20 bp, Artificial Sequence
  chemically synthesized
tctagaggaacagaatatta

SEQ ID NO: 35679 - DNA, 20 bp, Artificial Sequence
  chemically synthesized
gaggaacagaatattaagga

SEQ ID NO: 35680 - DNA, 20 bp, Artificial Sequence
  chemically synthesized
ggaacagaatattaaggatg

SEQ ID NO: 35681 - DNA, 20 bp, Artificial Sequence
  chemically synthesized
taaggatggagttctttcat

SEQ ID NO: 35682 - DNA, 20 bp, Artificial Sequence
  chemically synthesized
tggagttctttcattggttt

SEQ ID NO: 35683 - DNA, 20 bp, Artificial Sequence
  chemically synthesized
ggagttctttcattggtttt

SEQ ID NO: 35684 - DNA, 20 bp, Artificial Sequence
  chemically synthesized
gagttctttcattggttttg

SEQ ID NO: 35685 - DNA, 20 bp, Artificial Sequence
  chemically synthesized
ttcattggttttggggtttc

SEQ ID NO: 35686 - DNA, 20 bp, Artificial Sequence
  chemically synthesized
cattggttttggggtttctg

SEQ ID NO: 35687 - DNA, 20 bp, Artificial Sequence
  chemically synthesized
ggttttggggtttctggagt

SEQ ID NO: 35688 - DNA, 20 bp, Artificial Sequence
  chemically synthesized
agttggctgcttaatatgat

SEQ ID NO: 35689 - DNA, 20 bp, Artificial Sequence
  chemically synthesized
tgattagacccaaatatgct

SEQ ID NO: 35690 - DNA, 20 bp, Artificial Sequence
  chemically synthesized
gattagacccaaatatgcta

SEQ ID NO: 35691 - DNA, 20 bp, Artificial Sequence
  chemically synthesized
gctaaggactcttcttctaa

SEQ ID NO: 35692 - DNA, 20 bp, Artificial Sequence
  chemically synthesized
ggactcttcttctaatggta

SEQ ID NO: 35693 - DNA, 20 bp, Artificial Sequence
  chemically synthesized
actcttcttctaatggtatg

SEQ ID NO: 35694 - DNA, 20 bp, Artificial Sequence
  chemically synthesized
tggagaacactgataatcct

SEQ ID NO: 35695 - DNA, 20 bp, Artificial Sequence
  chemically synthesized
aatccttggcatcaattgtt

SEQ ID NO: 35696 - DNA, 20 bp, Artificial Sequence
  chemically synthesized
tccttggcatcaattgttta

SEQ ID NO: 35697 - DNA, 20 bp, Artificial Sequence
  chemically synthesized
cttggcatcaattgtttaga

SEQ ID NO: 35698 - DNA, 20 bp, Artificial Sequence
  chemically synthesized
actcttgattcaacgcttgt

SEQ ID NO: 35699 - DNA, 20 bp, Artificial Sequence
  chemically synthesized
tcttgattcaacgcttgtga

SEQ ID NO: 35700 - DNA, 20 bp, Artificial Sequence
  chemically synthesized
cttgattcaacgcttgtgag

SEQ ID NO: 35701 - DNA, 20 bp, Artificial Sequence
  chemically synthesized
attcaacgcttgtgagaggc

SEQ ID NO: 35702 - DNA, 20 bp, Artificial Sequence
  chemically synthesized
ttcaacgcttgtgagaggca

SEQ ID NO: 35703 - DNA, 20 bp, Artificial Sequence
  chemically synthesized
cttgtgagaggcaaggaatt

SEQ ID NO: 35704 - DNA, 20 bp, Artificial Sequence
  chemically synthesized
ataatacttttgactatatg

SEQ ID NO: 35705 - DNA, 20 bp, Artificial Sequence
  chemically synthesized
aatacttttgactatatgtg

SEQ ID NO: 35706 - DNA, 20 bp, Artificial Sequence
  chemically synthesized
ttgactatatgtggagaatc

SEQ ID NO: 35707 - DNA, 20 bp, Artificial Sequence
  chemically synthesized
tgactatatgtggagaatca

SEQ ID NO: 35708 - DNA, 20 bp, Artificial Sequence
  chemically synthesized
atgtggagaatcaaggaaca

SEQ ID NO: 35709 - DNA, 20 bp, Artificial Sequence
  chemically synthesized
gagaatcaaggaacatagtg

SEQ ID NO: 35710 - DNA, 20 bp, Artificial Sequence
  chemically synthesized
atcaaggaacatagtgaagt

SEQ ID NO: 35711 - DNA, 20 bp, Artificial Sequence
  chemically synthesized
aggaacatagtgaagttggt

SEQ ID NO: 35712 - DNA, 20 bp, Artificial Sequence
  chemically synthesized
gaagttggttggttgcttgt

SEQ ID NO: 35713 - DNA, 20 bp, Artificial Sequence
  chemically synthesized
ttggttgcttgtaagttcgc

SEQ ID NO: 35714 - DNA, 20 bp, Artificial Sequence
  chemically synthesized
gcttgtaagttcgctggaca

SEQ ID NO: 35715 - DNA, 20 bp, Artificial Sequence
  chemically synthesized
ttcgctggacaaagtgatga

SEQ ID NO: 35716 - DNA, 20 bp, Artificial Sequence
  chemically synthesized
atgaaagaaaatgatgaact

SEQ ID NO: 35717 - DNA, 20 bp, Artificial Sequence
  chemically synthesized
tgaaagaaaatgatgaactc

SEQ ID NO: 35718 - DNA, 20 bp, Artificial Sequence
  chemically synthesized
aaagaaaatgatgaactcag

SEQ ID NO: 35719 - DNA, 20 bp, Artificial Sequence
  chemically synthesized
tcaggagtatatcaactctc

SEQ ID NO: 35720 - DNA, 20 bp, Artificial Sequence
  chemically synthesized
ctttgtgccataatcttatt

SEQ ID NO: 35721 - DNA, 20 bp, Artificial Sequence
  chemically synthesized
ttgtgccataatcttatttg

SEQ ID NO: 35722 - DNA, 20 bp, Artificial Sequence
  chemically synthesized
gtgccataatcttatttgga

SEQ ID NO: 35723 - DNA, 20 bp, Artificial Sequence
  chemically synthesized
tgctcacctttcacttccac

SEQ ID NO: 35724 - DNA, 20 bp, Artificial Sequence
  chemically synthesized
ttcacttccacaagatatca

SEQ ID NO: 35725 - DNA, 20 bp, Artificial Sequence
  chemically synthesized
acttccacaagatatcacag

SEQ ID NO: 35726 - DNA, 20 bp, Artificial Sequence
  chemically synthesized
tacattgatgacatgctgac

SEQ ID NO: 35727 - DNA, 20 bp, Artificial Sequence
  chemically synthesized
gatgacatgctgactggaac

SEQ ID NO: 35728 - DNA, 20 bp, Artificial Sequence
  chemically synthesized
acatgctgactggaactagt

SEQ ID NO: 35729 - DNA, 20 bp, Artificial Sequence
  chemically synthesized
gctgactggaactagtgagc

SEQ ID NO: 35730 - DNA, 20 bp, Artificial Sequence
  chemically synthesized
gactggaactagtgagcaag

SEQ ID NO: 35731 - DNA, 20 bp, Artificial Sequence
  chemically synthesized
tggaactagtgagcaagaag

SEQ ID NO: 35732 - DNA, 20 bp, Artificial Sequence
  chemically synthesized
gcaagaagtagcaaacacac

SEQ ID NO: 35733 - DNA, 20 bp, Artificial Sequence
  chemically synthesized
aacacactggatttattgat

SEQ ID NO: 35734 - DNA, 20 bp, Artificial Sequence
  chemically synthesized
atttattgatgagacatttg

SEQ ID NO: 35735 - DNA, 20 bp, Artificial Sequence
  chemically synthesized
tttattgatgagacatttgt

SEQ ID NO: 35736 - DNA, 20 bp, Artificial Sequence
  chemically synthesized
ttgatgagacatttgtggga

SEQ ID NO: 35737 - DNA, 20 bp, Artificial Sequence
  chemically synthesized
gatgagacatttgtgggaca

SEQ ID NO: 35738 - DNA, 20 bp, Artificial Sequence
  chemically synthesized
atgagacatttgtgggacag

SEQ ID NO: 35739 - DNA, 20 bp, Artificial Sequence
  chemically synthesized
gacatttgtgggacagagga

SEQ ID NO: 35740 - DNA, 20 bp, Artificial Sequence
  chemically synthesized
acatttgtgggacagaggat

SEQ ID NO: 35741 - DNA, 20 bp, Artificial Sequence
  chemically synthesized
gaaataaatctgattaaatt

SEQ ID NO: 35742 - DNA, 20 bp, Artificial Sequence
  chemically synthesized
aaataaatctgattaaattc

SEQ ID NO: 35743 - DNA, 20 bp, Artificial Sequence
  chemically synthesized
aataaatctgattaaattca

SEQ ID NO: 35744 - DNA, 20 bp, Artificial Sequence
  chemically synthesized
aattcagggaccttctacct

SEQ ID NO: 35745 - DNA, 20 bp, Artificial Sequence
  chemically synthesized
ttctacctcagtaaaattta

SEQ ID NO: 35746 - DNA, 20 bp, Artificial Sequence
  chemically synthesized
tctacctcagtaaaatttat

SEQ ID NO: 35747 - DNA, 20 bp, Artificial Sequence
  chemically synthesized
ctacctcagtaaaatttata

SEQ ID NO: 35748 - DNA, 20 bp, Artificial Sequence
  chemically synthesized
tacctcagtaaaatttatag

SEQ ID NO: 35749 - DNA, 20 bp, Artificial Sequence
  chemically synthesized
taaaatttataggggtccaa

SEQ ID NO: 35750 - DNA, 20 bp, Artificial Sequence
  chemically synthesized
tttataggggtccaatggtt

SEQ ID NO: 35751 - DNA, 20 bp, Artificial Sequence
  chemically synthesized
ttataggggtccaatggttt

SEQ ID NO: 35752 - DNA, 20 bp, Artificial Sequence
  chemically synthesized
tataggggtccaatggtttg

SEQ ID NO: 35753 - DNA, 20 bp, Artificial Sequence
  chemically synthesized
ccaatggtttggggctcttt

SEQ ID NO: 35754 - DNA, 20 bp, Artificial Sequence
  chemically synthesized
tctttgagatattccttcta

SEQ ID NO: 35755 - DNA, 20 bp, Artificial Sequence
  chemically synthesized
gagatattccttctaaagtg

SEQ ID NO: 35756 - DNA, 20 bp, Artificial Sequence
  chemically synthesized
agatattccttctaaagtga

SEQ ID NO: 35757 - DNA, 20 bp, Artificial Sequence
  chemically synthesized
gaaggataatttgctgcatt

SEQ ID NO: 35758 - DNA, 20 bp, Artificial Sequence
  chemically synthesized
atttggccactcttacaacc

SEQ ID NO: 35759 - DNA, 20 bp, Artificial Sequence
  chemically synthesized
ccactcttacaaccaagaaa

SEQ ID NO: 35760 - DNA, 20 bp, Artificial Sequence
  chemically synthesized
cactcttacaaccaagaaat

SEQ ID NO: 35761 - DNA, 20 bp, Artificial Sequence
  chemically synthesized
caagaaataggcacaacgcc

SEQ ID NO: 35762 - DNA, 20 bp, Artificial Sequence
  chemically synthesized
gaaataggcacaacgcctag

SEQ ID NO: 35763 - DNA, 20 bp, Artificial Sequence
  chemically synthesized
aaataggcacaacgcctagt

SEQ ID NO: 35764 - DNA, 20 bp, Artificial Sequence
  chemically synthesized
caacgcctagtgggcctatt

SEQ ID NO: 35765 - DNA, 20 bp, Artificial Sequence
  chemically synthesized
tagtgggcctatttggattt

SEQ ID NO: 35766 - DNA, 20 bp, Artificial Sequence
  chemically synthesized
gtgggcctatttggattttg

SEQ ID NO: 35767 - DNA, 20 bp, Artificial Sequence
  chemically synthesized
tgggcctatttggattttgg

SEQ ID NO: 35768 - DNA, 20 bp, Artificial Sequence
  chemically synthesized
gaggcaacatattcctgatt

SEQ ID NO: 35769 - DNA, 20 bp, Artificial Sequence
  chemically synthesized
aggcaacatattcctgattt

SEQ ID NO: 35770 - DNA, 20 bp, Artificial Sequence
  chemically synthesized
ctgatttgggtgtgttactc

SEQ ID NO: 35771 - DNA, 20 bp, Artificial Sequence
  chemically synthesized
gttactctggcccatttatc

SEQ ID NO: 35772 - DNA, 20 bp, Artificial Sequence
  chemically synthesized
ccatttatcgagtgatccaa

SEQ ID NO: 35773 - DNA, 20 bp, Artificial Sequence
  chemically synthesized
catttatcgagtgatccaaa

SEQ ID NO: 35774 - DNA, 20 bp, Artificial Sequence
  chemically synthesized
cgagtgatccaaaaggctgc

SEQ ID NO: 35775 - DNA, 20 bp, Artificial Sequence
  chemically synthesized
tccaaaaggctgccagtttt

SEQ ID NO: 35776 - DNA, 20 bp, Artificial Sequence
  chemically synthesized
aaaaggctgccagttttgag

SEQ ID NO: 35777 - DNA, 20 bp, Artificial Sequence
  chemically synthesized
aaggctgccagttttgagtg

SEQ ID NO: 35778 - DNA, 20 bp, Artificial Sequence
  chemically synthesized
tgccagttttgagtggagtc

SEQ ID NO: 35779 - DNA, 20 bp, Artificial Sequence
  chemically synthesized
gttttgagtggagtccagaa

SEQ ID NO: 35780 - DNA, 20 bp, Artificial Sequence
  chemically synthesized
ttgagtggagtccagaacag

SEQ ID NO: 35781 - DNA, 20 bp, Artificial Sequence
  chemically synthesized
tgagtggagtccagaacaga

SEQ ID NO: 35782 - DNA, 20 bp, Artificial Sequence
  chemically synthesized
cagaacagaaggctctgcca

SEQ ID NO: 35783 - DNA, 20 bp, Artificial Sequence
  chemically synthesized
agaacagaaggctctgccac

SEQ ID NO: 35784 - DNA, 20 bp, Artificial Sequence
  chemically synthesized
agaaggctctgccacaggtc

SEQ ID NO: 35785 - DNA, 20 bp, Artificial Sequence
  chemically synthesized
gaaggctctgccacaggtcc

SEQ ID NO: 35786 - DNA, 20 bp, Artificial Sequence
  chemically synthesized
acaggtccaggctgctgtgc

SEQ ID NO: 35787 - DNA, 20 bp, Artificial Sequence
  chemically synthesized
gtgcaagctgctatgccact

SEQ ID NO: 35788 - DNA, 20 bp, Artificial Sequence
  chemically synthesized
tgcaagctgctatgccactt

SEQ ID NO: 35789 - DNA, 20 bp, Artificial Sequence
  chemically synthesized
gccacttgggccatatgacc

SEQ ID NO: 35790 - DNA, 20 bp, Artificial Sequence
  chemically synthesized
acttgggccatatgacctag

SEQ ID NO: 35791 - DNA, 20 bp, Artificial Sequence
  chemically synthesized
tagcagatccaatgatgctt

SEQ ID NO: 35792 - DNA, 20 bp, Artificial Sequence
  chemically synthesized
agcagatccaatgatgcttg

SEQ ID NO: 35793 - DNA, 20 bp, Artificial Sequence
  chemically synthesized
tccaatgatgcttgaggtgt

SEQ ID NO: 35794 - DNA, 20 bp, Artificial Sequence
  chemically synthesized
gatgcttgaggtgtcagtgc

SEQ ID NO: 35795 - DNA, 20 bp, Artificial Sequence
  chemically synthesized
cttgaggtgtcagtgccaga

SEQ ID NO: 35796 - DNA, 20 bp, Artificial Sequence
  chemically synthesized
ttgaggtgtcagtgccagat

SEQ ID NO: 35797 - DNA, 20 bp, Artificial Sequence
  chemically synthesized
tgaggtgtcagtgccagata

SEQ ID NO: 35798 - DNA, 20 bp, Artificial Sequence
  chemically synthesized
tgccagatagggatgctgtt

SEQ ID NO: 35799 - DNA, 20 bp, Artificial Sequence
  chemically synthesized
ccagatagggatgctgtttg

SEQ ID NO: 35800 - DNA, 20 bp, Artificial Sequence
  chemically synthesized
gggatgctgtttggagcatt

SEQ ID NO: 35801 - DNA, 20 bp, Artificial Sequence
  chemically synthesized
atgctgtttggagcatttgg

SEQ ID NO: 35802 - DNA, 20 bp, Artificial Sequence
  chemically synthesized
tgctgtttggagcatttggc

SEQ ID NO: 35803 - DNA, 20 bp, Artificial Sequence
  chemically synthesized
gcatttggcaggctgaatca

SEQ ID NO: 35804 - DNA, 20 bp, Artificial Sequence
  chemically synthesized
tttggcaggctgaatcacag

SEQ ID NO: 35805 - DNA, 20 bp, Artificial Sequence
  chemically synthesized
tggcaggctgaatcacagcg

SEQ ID NO: 35806 - DNA, 20 bp, Artificial Sequence
  chemically synthesized
ggcaggctgaatcacagcgg

SEQ ID NO: 35807 - DNA, 20 bp, Artificial Sequence
  chemically synthesized
tgaatcacagcggaggcctc

SEQ ID NO: 35808 - DNA, 20 bp, Artificial Sequence
  chemically synthesized
gaatcacagcggaggcctct

SEQ ID NO: 35809 - DNA, 20 bp, Artificial Sequence
  chemically synthesized
agcggaggcctctaggattt

SEQ ID NO: 35810 - DNA, 20 bp, Artificial Sequence
  chemically synthesized
cggaggcctctaggattttg

SEQ ID NO: 35811 - DNA, 20 bp, Artificial Sequence
  chemically synthesized
ggcctctaggattttggagc

SEQ ID NO: 35812 - DNA, 20 bp, Artificial Sequence
  chemically synthesized
gcctctaggattttggagca

SEQ ID NO: 35813 - DNA, 20 bp, Artificial Sequence
  chemically synthesized
caaggccctgccatcttctg

SEQ ID NO: 35814 - DNA, 20 bp, Artificial Sequence
  chemically synthesized
tgcagataactactctcttt

SEQ ID NO: 35815 - DNA, 20 bp, Artificial Sequence
  chemically synthesized
gcagataactactctctttt

SEQ ID NO: 35816 - DNA, 20 bp, Artificial Sequence
  chemically synthesized
cagataactactctctttta

SEQ ID NO: 35817 - DNA, 20 bp, Artificial Sequence
  chemically synthesized
gataactactctcttttagg

SEQ ID NO: 35818 - DNA, 20 bp, Artificial Sequence
  chemically synthesized
actactctcttttagggaga

SEQ ID NO: 35819 - DNA, 20 bp, Artificial Sequence
  chemically synthesized
tcttttagggagaaagctct

SEQ ID NO: 35820 - DNA, 20 bp, Artificial Sequence
  chemically synthesized
gaaagctcttggcctgttac

SEQ ID NO: 35821 - DNA, 20 bp, Artificial Sequence
  chemically synthesized
aaagctcttggcctgttact

SEQ ID NO: 35822 - DNA, 20 bp, Artificial Sequence
  chemically synthesized
cttggcctgttactgggctt

SEQ ID NO: 35823 - DNA, 20 bp, Artificial Sequence
  chemically synthesized
ggcctgttactgggctttgg

SEQ ID NO: 35824 - DNA, 20 bp, Artificial Sequence
  chemically synthesized
gaaacgaaatatttgactat

SEQ ID NO: 35825 - DNA, 20 bp, Artificial Sequence
  chemically synthesized
atatttgactatgagtcatc

SEQ ID NO: 35826 - DNA, 20 bp, Artificial Sequence
  chemically synthesized
ctgaactgcctatcatgaac

SEQ ID NO: 35827 - DNA, 20 bp, Artificial Sequence
  chemically synthesized
tgaactgcctatcatgaact

SEQ ID NO: 35828 - DNA, 20 bp, Artificial Sequence
  chemically synthesized
tgggtgctttctgatccatc

SEQ ID NO: 35829 - DNA, 20 bp, Artificial Sequence
  chemically synthesized
ttctgatccatctagccata

SEQ ID NO: 35830 - DNA, 20 bp, Artificial Sequence
  chemically synthesized
tgatccatctagccataaag

SEQ ID NO: 35831 - DNA, 20 bp, Artificial Sequence
  chemically synthesized
gatccatctagccataaagt

SEQ ID NO: 35832 - DNA, 20 bp, Artificial Sequence
  chemically synthesized
gccataaagtgggctgtgca

SEQ ID NO: 35833 - DNA, 20 bp, Artificial Sequence
  chemically synthesized
ataaagtgggctgtgcacag

SEQ ID NO: 35834 - DNA, 20 bp, Artificial Sequence
  chemically synthesized
tgtgcacagcagcattgcat

SEQ ID NO: 35835 - DNA, 20 bp, Artificial Sequence
  chemically synthesized
agcagcattgcatcagcaaa

SEQ ID NO: 35836 - DNA, 20 bp, Artificial Sequence
  chemically synthesized
agcattgcatcagcaaatgg

SEQ ID NO: 35837 - DNA, 20 bp, Artificial Sequence
  chemically synthesized
attgcatcagcaaatggaag

SEQ ID NO: 35838 - DNA, 20 bp, Artificial Sequence
  chemically synthesized
ggaagtggtatatatgcgat

SEQ ID NO: 35839 - DNA, 20 bp, Artificial Sequence
  chemically synthesized
gaagtggtatatatgcgatt

SEQ ID NO: 35840 - DNA, 20 bp, Artificial Sequence
  chemically synthesized
gtatatatgcgattgggctt

SEQ ID NO: 35841 - DNA, 20 bp, Artificial Sequence
  chemically synthesized
tatatgcgattgggcttgag

SEQ ID NO: 35842 - DNA, 20 bp, Artificial Sequence
  chemically synthesized
ttgggcttgagcagatcctg

SEQ ID NO: 35843 - DNA, 20 bp, Artificial Sequence
  chemically synthesized
tgggcttgagcagatcctga

SEQ ID NO: 35844 - DNA, 20 bp, Artificial Sequence
  chemically synthesized
tgagcagatcctgaaggcac

SEQ ID NO: 35845 - DNA, 20 bp, Artificial Sequence
  chemically synthesized
cagatcctgaaggcactagt

SEQ ID NO: 35846 - DNA, 20 bp, Artificial Sequence
  chemically synthesized
aaggcactagtaagttacat

SEQ ID NO: 35847 - DNA, 20 bp, Artificial Sequence
  chemically synthesized
cactagtaagttacatgaga

SEQ ID NO: 35848 - DNA, 20 bp, Artificial Sequence
  chemically synthesized
actagtaagttacatgagaa

SEQ ID NO: 35849 - DNA, 20 bp, Artificial Sequence
  chemically synthesized
ctagtaagttacatgagaaa

SEQ ID NO: 35850 - DNA, 20 bp, Artificial Sequence
  chemically synthesized
tagtaagttacatgagaaag

SEQ ID NO: 35851 - DNA, 20 bp, Artificial Sequence
  chemically synthesized
gaaaggggctcaaatgccca

SEQ ID NO: 35852 - DNA, 20 bp, Artificial Sequence
  chemically synthesized
acacactgctttctctccct

SEQ ID NO: 35853 - DNA, 20 bp, Artificial Sequence
  chemically synthesized
tctccctgagactgcaccga

SEQ ID NO: 35854 - DNA, 20 bp, Artificial Sequence
  chemically synthesized
agactgcaccgatggtctca

SEQ ID NO: 35855 - DNA, 20 bp, Artificial Sequence
  chemically synthesized
gactgcaccgatggtctcat

SEQ ID NO: 35856 - DNA, 20 bp, Artificial Sequence
  chemically synthesized
actgcaccgatggtctcatg

SEQ ID NO: 35857 - DNA, 20 bp, Artificial Sequence
  chemically synthesized
tgcaccgatggtctcatggg

SEQ ID NO: 35858 - DNA, 20 bp, Artificial Sequence
  chemically synthesized
catggggagttccctatgat

SEQ ID NO: 35859 - DNA, 20 bp, Artificial Sequence
  chemically synthesized
agttccctatgatcagctga

SEQ ID NO: 35860 - DNA, 20 bp, Artificial Sequence
  chemically synthesized
ttccctatgatcagctgaca

SEQ ID NO: 35861 - DNA, 20 bp, Artificial Sequence
  chemically synthesized
tccctatgatcagctgacag

SEQ ID NO: 35862 - DNA, 20 bp, Artificial Sequence
  chemically synthesized
ctatgatcagctgacagagg

SEQ ID NO: 35863 - DNA, 20 bp, Artificial Sequence
  chemically synthesized
atgatcagctgacagaggaa

SEQ ID NO: 35864 - DNA, 20 bp, Artificial Sequence
  chemically synthesized
atcagctgacagaggaagag

SEQ ID NO: 35865 - DNA, 20 bp, Artificial Sequence
  chemically synthesized
ctgacagaggaagagaagac

SEQ ID NO: 35866 - DNA, 20 bp, Artificial Sequence
  chemically synthesized
tgacagaggaagagaagact

SEQ ID NO: 35867 - DNA, 20 bp, Artificial Sequence
  chemically synthesized
aggaagagaagactaggtcc

SEQ ID NO: 35868 - DNA, 20 bp, Artificial Sequence
  chemically synthesized
gaagactaggtcctggttca

SEQ ID NO: 35869 - DNA, 20 bp, Artificial Sequence
  chemically synthesized
actaggtcctggttcacaga

SEQ ID NO: 35870 - DNA, 20 bp, Artificial Sequence
  chemically synthesized
agatagttctgcacgatatg

SEQ ID NO: 35871 - DNA, 20 bp, Artificial Sequence
  chemically synthesized
gatagttctgcacgatatgc

SEQ ID NO: 35872 - DNA, 20 bp, Artificial Sequence
  chemically synthesized
gatatgcaggcaccacccaa

SEQ ID NO: 35873 - DNA, 20 bp, Artificial Sequence
  chemically synthesized
atgcaggcaccacccaaaag

SEQ ID NO: 35874 - DNA, 20 bp, Artificial Sequence
  chemically synthesized
aggcaccacccaaaagtgga

SEQ ID NO: 35875 - DNA, 20 bp, Artificial Sequence
  chemically synthesized
cacccaaaagtggacagccg

SEQ ID NO: 35876 - DNA, 20 bp, Artificial Sequence
  chemically synthesized
agtggacagccgcagcacta

SEQ ID NO: 35877 - DNA, 20 bp, Artificial Sequence
  chemically synthesized
gcagcactacagcccctttc

SEQ ID NO: 35878 - DNA, 20 bp, Artificial Sequence
  chemically synthesized
cagcactacagcccctttct

SEQ ID NO: 35879 - DNA, 20 bp, Artificial Sequence
  chemically synthesized
ccctttctaggacatccctg

SEQ ID NO: 35880 - DNA, 20 bp, Artificial Sequence
  chemically synthesized
cctttctaggacatccctga

SEQ ID NO: 35881 - DNA, 20 bp, Artificial Sequence
  chemically synthesized
aggacatccctgaaggacaa

SEQ ID NO: 35882 - DNA, 20 bp, Artificial Sequence
  chemically synthesized
atccctgaaggacaacggtg

SEQ ID NO: 35883 - DNA, 20 bp, Artificial Sequence
  chemically synthesized
tccctgaaggacaacggtga

SEQ ID NO: 35884 - DNA, 20 bp, Artificial Sequence
  chemically synthesized
ccctgaaggacaacggtgaa

SEQ ID NO: 35885 - DNA, 20 bp, Artificial Sequence
  chemically synthesized
acggtgaagggaaatcttcc

SEQ ID NO: 35886 - DNA, 20 bp, Artificial Sequence
  chemically synthesized
tgaagggaaatcttcctagt

SEQ ID NO: 35887 - DNA, 20 bp, Artificial Sequence
  chemically synthesized
agggaaatcttcctagttgg

SEQ ID NO: 35888 - DNA, 20 bp, Artificial Sequence
  chemically synthesized
ttcctagttggcagaacttt

SEQ ID NO: 35889 - DNA, 20 bp, Artificial Sequence
  chemically synthesized
ctagttggcagaactttgag

SEQ ID NO: 35890 - DNA, 20 bp, Artificial Sequence
  chemically synthesized
agaactttgagcagtgtgcc

SEQ ID NO: 35891 - DNA, 20 bp, Artificial Sequence
  chemically synthesized
gcctggttgtgcactttgca

SEQ ID NO: 35892 - DNA, 20 bp, Artificial Sequence
  chemically synthesized
tggttgtgcactttgcacag

SEQ ID NO: 35893 - DNA, 20 bp, Artificial Sequence
  chemically synthesized
ggttgtgcactttgcacaga

SEQ ID NO: 35894 - DNA, 20 bp, Artificial Sequence
  chemically synthesized
ttgtgcactttgcacagaag

SEQ ID NO: 35895 - DNA, 20 bp, Artificial Sequence
  chemically synthesized
actttgcacagaaggagaaa

SEQ ID NO: 35896 - DNA, 20 bp, Artificial Sequence
  chemically synthesized
tgcacagaaggagaaatggc

SEQ ID NO: 35897 - DNA, 20 bp, Artificial Sequence
  chemically synthesized
tgcgattatatacttattca

SEQ ID NO: 35898 - DNA, 20 bp, Artificial Sequence
  chemically synthesized
gcgattatatacttattcat

SEQ ID NO: 35899 - DNA, 20 bp, Artificial Sequence
  chemically synthesized
atatacttattcatgggctg

SEQ ID NO: 35900 - DNA, 20 bp, Artificial Sequence
  chemically synthesized
ttattcatgggctgtagcca

SEQ ID NO: 35901 - DNA, 20 bp, Artificial Sequence
  chemically synthesized
tattcatgggctgtagccaa

SEQ ID NO: 35902 - DNA, 20 bp, Artificial Sequence
  chemically synthesized
atgggctgtagccaaaggtt

SEQ ID NO: 35903 - DNA, 20 bp, Artificial Sequence
  chemically synthesized
gctgtagccaaaggtttggc

SEQ ID NO: 35904 - DNA, 20 bp, Artificial Sequence
  chemically synthesized
tagccaaaggtttggctaga

SEQ ID NO: 35905 - DNA, 20 bp, Artificial Sequence
  chemically synthesized
caaaggtttggctagatggt

SEQ ID NO: 35906 - DNA, 20 bp, Artificial Sequence
  chemically synthesized
aaaggtttggctagatggtc

SEQ ID NO: 35907 - DNA, 20 bp, Artificial Sequence
  chemically synthesized
aaggtttggctagatggtca

SEQ ID NO: 35908 - DNA, 20 bp, Artificial Sequence
  chemically synthesized
tggctagatggtcagggact

SEQ ID NO: 35909 - DNA, 20 bp, Artificial Sequence
  chemically synthesized
gatggtcagggacttggaaa

SEQ ID NO: 35910 - DNA, 20 bp, Artificial Sequence
  chemically synthesized
ggacttggaaaaagcatgac

SEQ ID NO: 35911 - DNA, 20 bp, Artificial Sequence
  chemically synthesized
tgactggaaaattgatgaca

SEQ ID NO: 35912 - DNA, 20 bp, Artificial Sequence
  chemically synthesized
aaattgatgacaaagaaatt

SEQ ID NO: 35913 - DNA, 20 bp, Artificial Sequence
  chemically synthesized
aattgatgacaaagaaattt

SEQ ID NO: 35914 - DNA, 20 bp, Artificial Sequence
  chemically synthesized
attgatgacaaagaaatttg

SEQ ID NO: 35915 - DNA, 20 bp, Artificial Sequence
  chemically synthesized
gatgacaaagaaatttgggg

SEQ ID NO: 35916 - DNA, 20 bp, Artificial Sequence
  chemically synthesized
tgacaaagaaatttggggaa

SEQ ID NO: 35917 - DNA, 20 bp, Artificial Sequence
  chemically synthesized
gacaaagaaatttggggaag

SEQ ID NO: 35918 - DNA, 20 bp, Artificial Sequence
  chemically synthesized
aaatttggggaagaggtatg

SEQ ID NO: 35919 - DNA, 20 bp, Artificial Sequence
  chemically synthesized
ttggggaagaggtatgtgga

SEQ ID NO: 35920 - DNA, 20 bp, Artificial Sequence
  chemically synthesized
tgtggatggacctctatgat

SEQ ID NO: 35921 - DNA, 20 bp, Artificial Sequence
  chemically synthesized
atgattagtcaaaaactaca

SEQ ID NO: 35922 - DNA, 20 bp, Artificial Sequence
  chemically synthesized
aagatattttcatcccatgt

SEQ ID NO: 35923 - DNA, 20 bp, Artificial Sequence
  chemically synthesized
cccatgtgagtgctcaccaa

SEQ ID NO: 35924 - DNA, 20 bp, Artificial Sequence
  chemically synthesized
ccatgtgagtgctcaccaat

SEQ ID NO: 35925 - DNA, 20 bp, Artificial Sequence
  chemically synthesized
tgctcaccaatgggtgacct

SEQ ID NO: 35926 - DNA, 20 bp, Artificial Sequence
  chemically synthesized
tcaccaatgggtgacctcag

SEQ ID NO: 35927 - DNA, 20 bp, Artificial Sequence
  chemically synthesized
ccaatgggtgacctcagcag

SEQ ID NO: 35928 - DNA, 20 bp, Artificial Sequence
  chemically synthesized
aatgggtgacctcagcagaa

SEQ ID NO: 35929 - DNA, 20 bp, Artificial Sequence
  chemically synthesized
atgggtgacctcagcagaag

SEQ ID NO: 35930 - DNA, 20 bp, Artificial Sequence
  chemically synthesized
agaagaggattttaataatc

SEQ ID NO: 35931 - DNA, 20 bp, Artificial Sequence
  chemically synthesized
agaggattttaataatcaag

SEQ ID NO: 35932 - DNA, 20 bp, Artificial Sequence
  chemically synthesized
gattttaataatcaagtgga

SEQ ID NO: 35933 - DNA, 20 bp, Artificial Sequence
  chemically synthesized
attttaataatcaagtggat

SEQ ID NO: 35934 - DNA, 20 bp, Artificial Sequence
  chemically synthesized
ggataggatgatcaattctg

SEQ ID NO: 35935 - DNA, 20 bp, Artificial Sequence
  chemically synthesized
tcaattctgtggacaccact

SEQ ID NO: 35936 - DNA, 20 bp, Artificial Sequence
  chemically synthesized
gacaccactcagccttttcc

SEQ ID NO: 35937 - DNA, 20 bp, Artificial Sequence
  chemically synthesized
acaccactcagccttttccc

SEQ ID NO: 35938 - DNA, 20 bp, Artificial Sequence
  chemically synthesized
ccactcatgtcatcgtccaa

SEQ ID NO: 35939 - DNA, 20 bp, Artificial Sequence
  chemically synthesized
gtccaatggacccatgaaca

SEQ ID NO: 35940 - DNA, 20 bp, Artificial Sequence
  chemically synthesized
caatggacccatgaacaaag

SEQ ID NO: 35941 - DNA, 20 bp, Artificial Sequence
  chemically synthesized
acccatgaacaaagtggcca

SEQ ID NO: 35942 - DNA, 20 bp, Artificial Sequence
  chemically synthesized
gaacaaagtggccacagttg

SEQ ID NO: 35943 - DNA, 20 bp, Artificial Sequence
  chemically synthesized
aacaaagtggccacagttgc

SEQ ID NO: 35944 - DNA, 20 bp, Artificial Sequence
  chemically synthesized
acaaagtggccacagttgca

SEQ ID NO: 35945 - DNA, 20 bp, Artificial Sequence
  chemically synthesized
agtggccacagttgcaggga

SEQ ID NO: 35946 - DNA, 20 bp, Artificial Sequence
  chemically synthesized
ggccacagttgcagggatgg

SEQ ID NO: 35947 - DNA, 20 bp, Artificial Sequence
  chemically synthesized
gcagggatggaagttatgct

SEQ ID NO: 35948 - DNA, 20 bp, Artificial Sequence
  chemically synthesized
cagggatggaagttatgctt

SEQ ID NO: 35949 - DNA, 20 bp, Artificial Sequence
  chemically synthesized
atggaagttatgcttgggct

SEQ ID NO: 35950 - DNA, 20 bp, Artificial Sequence
  chemically synthesized
tatgcttgggctcagcaaca

SEQ ID NO: 35951 - DNA, 20 bp, Artificial Sequence
  chemically synthesized
acatggacttccactcacca

SEQ ID NO: 35952 - DNA, 20 bp, Artificial Sequence
  chemically synthesized
tccactcaccaaagctgacc

SEQ ID NO: 35953 - DNA, 20 bp, Artificial Sequence
  chemically synthesized
caccaaagctgacctggcca

SEQ ID NO: 35954 - DNA, 20 bp, Artificial Sequence
  chemically synthesized
tggccacagccactgcttgc

SEQ ID NO: 35955 - DNA, 20 bp, Artificial Sequence
  chemically synthesized
cagccactgcttgccagcat

SEQ ID NO: 35956 - DNA, 20 bp, Artificial Sequence
  chemically synthesized
gccactgcttgccagcatca

SEQ ID NO: 35957 - DNA, 20 bp, Artificial Sequence
  chemically synthesized
cagcatcagagaccaacact

SEQ ID NO: 35958 - DNA, 20 bp, Artificial Sequence
  chemically synthesized
ccaacactaagcccttgata

SEQ ID NO: 35959 - DNA, 20 bp, Artificial Sequence
  chemically synthesized
cttgatatggcaccattcct

SEQ ID NO: 35960 - DNA, 20 bp, Artificial Sequence
  chemically synthesized
ttgatatggcaccattcctc

SEQ ID NO: 35961 - DNA, 20 bp, Artificial Sequence
  chemically synthesized
tgatatggcaccattcctcg

SEQ ID NO: 35962 - DNA, 20 bp, Artificial Sequence
  chemically synthesized
gcaccattcctcggggtgat

SEQ ID NO: 35963 - DNA, 20 bp, Artificial Sequence
  chemically synthesized
cattcctcggggtgatcagc

SEQ ID NO: 35964 - DNA, 20 bp, Artificial Sequence
  chemically synthesized
ggggtgatcagccagctacc

SEQ ID NO: 35965 - DNA, 20 bp, Artificial Sequence
  chemically synthesized
gtgatcagccagctacctgg

SEQ ID NO: 35966 - DNA, 20 bp, Artificial Sequence
  chemically synthesized
atcagccagctacctggtgg

SEQ ID NO: 35967 - DNA, 20 bp, Artificial Sequence
  chemically synthesized
tcagccagctacctggtggc

SEQ ID NO: 35968 - DNA, 20 bp, Artificial Sequence
  chemically synthesized
tggtggcaggttgattatat

SEQ ID NO: 35969 - DNA, 20 bp, Artificial Sequence
  chemically synthesized
atattggacctcttccatca

SEQ ID NO: 35970 - DNA, 20 bp, Artificial Sequence
  chemically synthesized
tggacctcttccatcatgga

SEQ ID NO: 35971 - DNA, 20 bp, Artificial Sequence
  chemically synthesized
ggacctcttccatcatggaa

SEQ ID NO: 35972 - DNA, 20 bp, Artificial Sequence
  chemically synthesized
gacctcttccatcatggaaa

SEQ ID NO: 35973 - DNA, 20 bp, Artificial Sequence
  chemically synthesized
ctcttccatcatggaaaggg

SEQ ID NO: 35974 - DNA, 20 bp, Artificial Sequence
  chemically synthesized
cttccatcatggaaagggca

SEQ ID NO: 35975 - DNA, 20 bp, Artificial Sequence
  chemically synthesized
ttccatcatggaaagggcag

SEQ ID NO: 35976 - DNA, 20 bp, Artificial Sequence
  chemically synthesized
gggcagaggcttgtcctcac

SEQ ID NO: 35977 - DNA, 20 bp, Artificial Sequence
  chemically synthesized
gaggcttgtcctcactggaa

SEQ ID NO: 35978 - DNA, 20 bp, Artificial Sequence
  chemically synthesized
actggaatagacacttactc

SEQ ID NO: 35979 - DNA, 20 bp, Artificial Sequence
  chemically synthesized
atagacacttactctggata

SEQ ID NO: 35980 - DNA, 20 bp, Artificial Sequence
  chemically synthesized
tagacacttactctggatat

SEQ ID NO: 35981 - DNA, 20 bp, Artificial Sequence
  chemically synthesized
ctgaactcaatgcttatgcc

SEQ ID NO: 35982 - DNA, 20 bp, Artificial Sequence
  chemically synthesized
tatgccaagactaccatcca

SEQ ID NO: 35983 - DNA, 20 bp, Artificial Sequence
  chemically synthesized
gactaccatccatggaatca

SEQ ID NO: 35984 - DNA, 20 bp, Artificial Sequence
  chemically synthesized
gaatgccgtatccactgtca

SEQ ID NO: 35985 - DNA, 20 bp, Artificial Sequence
  chemically synthesized
cactgtcatggtattccaca

SEQ ID NO: 35986 - DNA, 20 bp, Artificial Sequence
  chemically synthesized
acacagcattgcttctgacc

SEQ ID NO: 35987 - DNA, 20 bp, Artificial Sequence
  chemically synthesized
tgaccaagccactcacttta

SEQ ID NO: 35988 - DNA, 20 bp, Artificial Sequence
  chemically synthesized
agccactcactttatggcta

SEQ ID NO: 35989 - DNA, 20 bp, Artificial Sequence
  chemically synthesized
cactcactttatggctaaag

SEQ ID NO: 35990 - DNA, 20 bp, Artificial Sequence
  chemically synthesized
ttatggctaaagaagtgtga

SEQ ID NO: 35991 - DNA, 20 bp, Artificial Sequence
  chemically synthesized
tggctaaagaagtgtgacag

SEQ ID NO: 35992 - DNA, 20 bp, Artificial Sequence
  chemically synthesized
ggctaaagaagtgtgacagt

SEQ ID NO: 35993 - DNA, 20 bp, Artificial Sequence
  chemically synthesized
tgacagtgggctcatgctca

SEQ ID NO: 35994 - DNA, 20 bp, Artificial Sequence
  chemically synthesized
ctcatgctcatggaatttac

SEQ ID NO: 35995 - DNA, 20 bp, Artificial Sequence
  chemically synthesized
ccatgatccctatcatcctg

SEQ ID NO: 35996 - DNA, 20 bp, Artificial Sequence
  chemically synthesized
tgatccctatcatcctgaag

SEQ ID NO: 35997 - DNA, 20 bp, Artificial Sequence
  chemically synthesized
atcctgaagcagcttttgaa

SEQ ID NO: 35998 - DNA, 20 bp, Artificial Sequence
  chemically synthesized
agcttttgaatggccttttg

SEQ ID NO: 35999 - DNA, 20 bp, Artificial Sequence
  chemically synthesized
gtcacgattacaatgccaac

SEQ ID NO: 36000 - DNA, 20 bp, Artificial Sequence
  chemically synthesized
tcacgattacaatgccaact

SEQ ID NO: 36001 - DNA, 20 bp, Artificial Sequence
  chemically synthesized
aactaggtgacaatactttg

SEQ ID NO: 36002 - DNA, 20 bp, Artificial Sequence
  chemically synthesized
actaggtgacaatactttgc

SEQ ID NO: 36003 - DNA, 20 bp, Artificial Sequence
  chemically synthesized
gtgacaatactttgcaggcc

SEQ ID NO: 36004 - DNA, 20 bp, Artificial Sequence
  chemically synthesized
tgacaatactttgcaggcct

SEQ ID NO: 36005 - DNA, 20 bp, Artificial Sequence
  chemically synthesized
gacaatactttgcaggcctg

SEQ ID NO: 36006 - DNA, 20 bp, Artificial Sequence
  chemically synthesized
tactttgcaggcctggggca

SEQ ID NO: 36007 - DNA, 20 bp, Artificial Sequence
  chemically synthesized
aggcctggggcaaagttctc

SEQ ID NO: 36008 - DNA, 20 bp, Artificial Sequence
  chemically synthesized
cctggggcaaagttctccag

SEQ ID NO: 36009 - DNA, 20 bp, Artificial Sequence
  chemically synthesized
ctggggcaaagttctccaga

SEQ ID NO: 36010 - DNA, 20 bp, Artificial Sequence
  chemically synthesized
aggctgtgtatgctctgaat

SEQ ID NO: 36011 - DNA, 20 bp, Artificial Sequence
  chemically synthesized
ctgaatcagtgtccaatata

SEQ ID NO: 36012 - DNA, 20 bp, Artificial Sequence
  chemically synthesized
atatggtactgtttctccca

SEQ ID NO: 36013 - DNA, 20 bp, Artificial Sequence
  chemically synthesized
ggtactgtttctcccataga

SEQ ID NO: 36014 - DNA, 20 bp, Artificial Sequence
  chemically synthesized
gtactgtttctcccatagac

SEQ ID NO: 36015 - DNA, 20 bp, Artificial Sequence
  chemically synthesized
tctcccatagacaggattca

SEQ ID NO: 36016 - DNA, 20 bp, Artificial Sequence
  chemically synthesized
ctcccatagacaggattcac

SEQ ID NO: 36017 - DNA, 20 bp, Artificial Sequence
  chemically synthesized
atagacaggattcacgggtc

SEQ ID NO: 36018 - DNA, 20 bp, Artificial Sequence
  chemically synthesized
tagacaggattcacgggtcc

SEQ ID NO: 36019 - DNA, 20 bp, Artificial Sequence
  chemically synthesized
attcacgggtccaggaatca

SEQ ID NO: 36020 - DNA, 20 bp, Artificial Sequence
  chemically synthesized
ttcacgggtccaggaatcaa

SEQ ID NO: 36021 - DNA, 20 bp, Artificial Sequence
  chemically synthesized
tcacgggtccaggaatcaaa

SEQ ID NO: 36022 - DNA, 20 bp, Artificial Sequence
  chemically synthesized
cgggtccaggaatcaaaggg

SEQ ID NO: 36023 - DNA, 20 bp, Artificial Sequence
  chemically synthesized
gtccaggaatcaaagggtgg

SEQ ID NO: 36024 - DNA, 20 bp, Artificial Sequence
  chemically synthesized
caggaatcaaagggtggaag

SEQ ID NO: 36025 - DNA, 20 bp, Artificial Sequence
  chemically synthesized
gaatcaaagggtggaagtgg

SEQ ID NO: 36026 - DNA, 20 bp, Artificial Sequence
  chemically synthesized
tcaaagggtggaagtggaag

SEQ ID NO: 36027 - DNA, 20 bp, Artificial Sequence
  chemically synthesized
aagggtggaagtggaagtgg

SEQ ID NO: 36028 - DNA, 20 bp, Artificial Sequence
  chemically synthesized
ggtggaagtggaagtggaag

SEQ ID NO: 36029 - DNA, 20 bp, Artificial Sequence
  chemically synthesized
gcaccactcaccatcacccc

SEQ ID NO: 36030 - DNA, 20 bp, Artificial Sequence
  chemically synthesized
catcacccctagtgttccac

SEQ ID NO: 36031 - DNA, 20 bp, Artificial Sequence
  chemically synthesized
atttttgcttcctgttccca

SEQ ID NO: 36032 - DNA, 20 bp, Artificial Sequence
  chemically synthesized
cccatggcattatgttctgc

SEQ ID NO: 36033 - DNA, 20 bp, Artificial Sequence
  chemically synthesized
ggcattatgttctgctggct

SEQ ID NO: 36034 - DNA, 20 bp, Artificial Sequence
  chemically synthesized
cattatgttctgctggctta

SEQ ID NO: 36035 - DNA, 20 bp, Artificial Sequence
  chemically synthesized
attatgttctgctggcttag

SEQ ID NO: 36036 - DNA, 20 bp, Artificial Sequence
  chemically synthesized
ttctgctggcttagaggtct

SEQ ID NO: 36037 - DNA, 20 bp, Artificial Sequence
  chemically synthesized
tggcttagaggtcttagttc

SEQ ID NO: 36038 - DNA, 20 bp, Artificial Sequence
  chemically synthesized
gcttagaggtcttagttcca

SEQ ID NO: 36039 - DNA, 20 bp, Artificial Sequence
  chemically synthesized
cttagaggtcttagttccag

SEQ ID NO: 36040 - DNA, 20 bp, Artificial Sequence
  chemically synthesized
ttagaggtcttagttccaga

SEQ ID NO: 36041 - DNA, 20 bp, Artificial Sequence
  chemically synthesized
agaggtcttagttccagagg

SEQ ID NO: 36042 - DNA, 20 bp, Artificial Sequence
  chemically synthesized
gaggtcttagttccagaggg

SEQ ID NO: 36043 - DNA, 20 bp, Artificial Sequence
  chemically synthesized
agagggaggaacactgccgc

SEQ ID NO: 36044 - DNA, 20 bp, Artificial Sequence
  chemically synthesized
gagggaggaacactgccgcc

SEQ ID NO: 36045 - DNA, 20 bp, Artificial Sequence
  chemically synthesized
attccattaaactgcaaatt

SEQ ID NO: 36046 - DNA, 20 bp, Artificial Sequence
  chemically synthesized
tgcaaattaagattgccacc

SEQ ID NO: 36047 - DNA, 20 bp, Artificial Sequence
  chemically synthesized
agattgccacctggacactt

SEQ ID NO: 36048 - DNA, 20 bp, Artificial Sequence
  chemically synthesized
gattgccacctggacacttt

SEQ ID NO: 36049 - DNA, 20 bp, Artificial Sequence
  chemically synthesized
tttgggctcctcccaccttt

SEQ ID NO: 36050 - DNA, 20 bp, Artificial Sequence
  chemically synthesized
tcctcccacctttaagtcaa

SEQ ID NO: 36051 - DNA, 20 bp, Artificial Sequence
  chemically synthesized
cctcccacctttaagtcaac

SEQ ID NO: 36052 - DNA, 20 bp, Artificial Sequence
  chemically synthesized
cacctttaagtcaacaggct

SEQ ID NO: 36053 - DNA, 20 bp, Artificial Sequence
  chemically synthesized
ctttaagtcaacaggctaag

SEQ ID NO: 36054 - DNA, 20 bp, Artificial Sequence
  chemically synthesized
ttaagtcaacaggctaagaa

SEQ ID NO: 36055 - DNA, 20 bp, Artificial Sequence
  chemically synthesized
aagtcaacaggctaagaaga

SEQ ID NO: 36056 - DNA, 20 bp, Artificial Sequence
  chemically synthesized
acaggctaagaagagagtta

SEQ ID NO: 36057 - DNA, 20 bp, Artificial Sequence
  chemically synthesized
taagaagagagttacagtgt

SEQ ID NO: 36058 - DNA, 20 bp, Artificial Sequence
  chemically synthesized
gagagttacagtgttggctg

SEQ ID NO: 36059 - DNA, 20 bp, Artificial Sequence
  chemically synthesized
gttggctgcggtgattaacc

SEQ ID NO: 36060 - DNA, 20 bp, Artificial Sequence
  chemically synthesized
ggtgattaacccagactatc

SEQ ID NO: 36061 - DNA, 20 bp, Artificial Sequence
  chemically synthesized
ccagactatcaagatgaaat

SEQ ID NO: 36062 - DNA, 20 bp, Artificial Sequence
  chemically synthesized
atcagtctacaactccacaa

SEQ ID NO: 36063 - DNA, 20 bp, Artificial Sequence
  chemically synthesized
cagtctacaactccacaatg

SEQ ID NO: 36064 - DNA, 20 bp, Artificial Sequence
  chemically synthesized
agtctacaactccacaatgg

SEQ ID NO: 36065 - DNA, 20 bp, Artificial Sequence
  chemically synthesized
tacaactccacaatggaggt

SEQ ID NO: 36066 - DNA, 20 bp, Artificial Sequence
  chemically synthesized
acaactccacaatggaggta

SEQ ID NO: 36067 - DNA, 20 bp, Artificial Sequence
  chemically synthesized
actccacaatggaggtaagg

SEQ ID NO: 36068 - DNA, 20 bp, Artificial Sequence
  chemically synthesized
gaggtaaggaagcgtatgca

SEQ ID NO: 36069 - DNA, 20 bp, Artificial Sequence
  chemically synthesized
ggaagcgtatgcatggaata

SEQ ID NO: 36070 - DNA, 20 bp, Artificial Sequence
  chemically synthesized
gaagcgtatgcatggaatat

SEQ ID NO: 36071 - DNA, 20 bp, Artificial Sequence
  chemically synthesized
agcgtatgcatggaatatag

SEQ ID NO: 36072 - DNA, 20 bp, Artificial Sequence
  chemically synthesized
atggaatataggagatccat

SEQ ID NO: 36073 - DNA, 20 bp, Artificial Sequence
  chemically synthesized
tggaatataggagatccatt

SEQ ID NO: 36074 - DNA, 20 bp, Artificial Sequence
  chemically synthesized
ggaatataggagatccatta

SEQ ID NO: 36075 - DNA, 20 bp, Artificial Sequence
  chemically synthesized
agatccattagggtgtctct

SEQ ID NO: 36076 - DNA, 20 bp, Artificial Sequence
  chemically synthesized
ctcttagttttaccatgtcc

SEQ ID NO: 36077 - DNA, 20 bp, Artificial Sequence
  chemically synthesized
ttttaccatgtcctggaatt

SEQ ID NO: 36078 - DNA, 20 bp, Artificial Sequence
  chemically synthesized
tttaccatgtcctggaatta

SEQ ID NO: 36079 - DNA, 20 bp, Artificial Sequence
  chemically synthesized
ccatgtcctggaattaaggt

SEQ ID NO: 36080 - DNA, 20 bp, Artificial Sequence
  chemically synthesized
tgtcctggaattaaggtcag

SEQ ID NO: 36081 - DNA, 20 bp, Artificial Sequence
  chemically synthesized
gtcctggaattaaggtcagt

SEQ ID NO: 36082 - DNA, 20 bp, Artificial Sequence
  chemically synthesized
aggtcagtgggaaactacta

SEQ ID NO: 36083 - DNA, 20 bp, Artificial Sequence
  chemically synthesized
ggtcagtgggaaactactac

SEQ ID NO: 36084 - DNA, 20 bp, Artificial Sequence
  chemically synthesized
gaaactactacaggccattc

SEQ ID NO: 36085 - DNA, 20 bp, Artificial Sequence
  chemically synthesized
aaactactacaggccattcc

SEQ ID NO: 36086 - DNA, 20 bp, Artificial Sequence
  chemically synthesized
ctactacaggccattccagg

SEQ ID NO: 36087 - DNA, 20 bp, Artificial Sequence
  chemically synthesized
tactacaggccattccaggc

SEQ ID NO: 36088 - DNA, 20 bp, Artificial Sequence
  chemically synthesized
tccaggcaggactacaaata

SEQ ID NO: 36089 - DNA, 20 bp, Artificial Sequence
  chemically synthesized
ccaggcaggactacaaataa

SEQ ID NO: 36090 - DNA, 20 bp, Artificial Sequence
  chemically synthesized
caggactacaaataaaggtt

SEQ ID NO: 36091 - DNA, 20 bp, Artificial Sequence
  chemically synthesized
aggactacaaataaaggttt

SEQ ID NO: 36092 - DNA, 20 bp, Artificial Sequence
  chemically synthesized
aaaggtttgggtcactccac

SEQ ID NO: 36093 - DNA, 20 bp, Artificial Sequence
  chemically synthesized
aaggtttgggtcactccacc

SEQ ID NO: 36094 - DNA, 20 bp, Artificial Sequence
  chemically synthesized
caggaaaaaaaaaaaaaaaa

SEQ ID NO: 36095 - DNA, 20 bp, Artificial Sequence
  chemically synthesized
aaaaaaaaaaaaaaaaagac

SEQ ID NO: 36096 - DNA, 20 bp, Artificial Sequence
  chemically synthesized
aaaaaaagacaagacctgct

SEQ ID NO: 36097 - DNA, 20 bp, Artificial Sequence
  chemically synthesized
aaaaaagacaagacctgctg

SEQ ID NO: 36098 - DNA, 20 bp, Artificial Sequence
  chemically synthesized
gacctgctgaggtgcttgct

SEQ ID NO: 36099 - DNA, 20 bp, Artificial Sequence
  chemically synthesized
acctgctgaggtgcttgctg

SEQ ID NO: 36100 - DNA, 20 bp, Artificial Sequence
  chemically synthesized
cctgctgaggtgcttgctga

SEQ ID NO: 36101 - DNA, 20 bp, Artificial Sequence
  chemically synthesized
tgaggtgcttgctgagggca

SEQ ID NO: 36102 - DNA, 20 bp, Artificial Sequence
  chemically synthesized
gaggtgcttgctgagggcaa

SEQ ID NO: 36103 - DNA, 20 bp, Artificial Sequence
  chemically synthesized
aggtgcttgctgagggcaaa

SEQ ID NO: 36104 - DNA, 20 bp, Artificial Sequence
  chemically synthesized
tgctgagggcaaagggaata

SEQ ID NO: 36105 - DNA, 20 bp, Artificial Sequence
  chemically synthesized
caaagggaatacagaatatg

SEQ ID NO: 36106 - DNA, 20 bp, Artificial Sequence
  chemically synthesized
agggaatacagaatatgtag

SEQ ID NO: 36107 - DNA, 20 bp, Artificial Sequence
  chemically synthesized
gaatacagaatatgtagcag

SEQ ID NO: 36108 - DNA, 20 bp, Artificial Sequence
  chemically synthesized
tacagaatatgtagcagaag

SEQ ID NO: 36109 - DNA, 20 bp, Artificial Sequence
  chemically synthesized
acagaatatgtagcagaaga

SEQ ID NO: 36110 - DNA, 20 bp, Artificial Sequence
  chemically synthesized
gaatatgtagcagaagaagg

SEQ ID NO: 36111 - DNA, 20 bp, Artificial Sequence
  chemically synthesized
aagaaggtagtcatcaatac

SEQ ID NO: 36112 - DNA, 20 bp, Artificial Sequence
  chemically synthesized
tacgatcacgtgaccaattg

SEQ ID NO: 36113 - DNA, 20 bp, Artificial Sequence
  chemically synthesized
acgtgaccaattgcagatac

SEQ ID NO: 36114 - DNA, 20 bp, Artificial Sequence
  chemically synthesized
cgtgaccaattgcagataca

SEQ ID NO: 36115 - DNA, 20 bp, Artificial Sequence
  chemically synthesized
acaaggactgtaattgtcat

SEQ ID NO: 36116 - DNA, 20 bp, Artificial Sequence
  chemically synthesized
tgtctgtatacacttgtact

SEQ ID NO: 36117 - DNA, 20 bp, Artificial Sequence
  chemically synthesized
tttcctttatcatgtgacat

SEQ ID NO: 36118 - DNA, 20 bp, Artificial Sequence
  chemically synthesized
aagatttattgacttcatat

SEQ ID NO: 36119 - DNA, 20 bp, Artificial Sequence
  chemically synthesized
ttgacttcatatcagcattt

SEQ ID NO: 36120 - DNA, 20 bp, Artificial Sequence
  chemically synthesized
atcagcatttaagtattgtt

SEQ ID NO: 36121 - DNA, 20 bp, Artificial Sequence
  chemically synthesized
gtattgttaagtttatgtaa

SEQ ID NO: 36122 - DNA, 20 bp, Artificial Sequence
  chemically synthesized
ttatgtaatagcatttgcaa

SEQ ID NO: 36123 - DNA, 20 bp, Artificial Sequence
  chemically synthesized
tatgtaatagcatttgcaat

SEQ ID NO: 36124 - DNA, 20 bp, Artificial Sequence
  chemically synthesized
atgtaatagcatttgcaatg

SEQ ID NO: 36125 - DNA, 20 bp, Artificial Sequence
  chemically synthesized
atagcatttgcaatggggat

SEQ ID NO: 36126 - DNA, 20 bp, Artificial Sequence
  chemically synthesized
ggtgcattttcaattgcacg

SEQ ID NO: 36127 - DNA, 20 bp, Artificial Sequence
  chemically synthesized
gtgcattttcaattgcacga

SEQ ID NO: 36128 - DNA, 20 bp, Artificial Sequence
  chemically synthesized
attttcaattgcacgaagga

SEQ ID NO: 36129 - DNA, 20 bp, Artificial Sequence
  chemically synthesized
aattgcacgaaggatagttt

SEQ ID NO: 36130 - DNA, 20 bp, Artificial Sequence
  chemically synthesized
gaaggatagttttagtatgt

SEQ ID NO: 36131 - DNA, 20 bp, Artificial Sequence
  chemically synthesized
aaggatagttttagtatgtt

SEQ ID NO: 36132 - DNA, 20 bp, Artificial Sequence
  chemically synthesized
cttattgttgtctttatttg

SEQ ID NO: 36133 - DNA, 20 bp, Artificial Sequence
  chemically synthesized
ttgaagataatgtatgacct

SEQ ID NO: 36134 - DNA, 20 bp, Artificial Sequence
  chemically synthesized
tgaagataatgtatgacctc

SEQ ID NO: 36135 - DNA, 20 bp, Artificial Sequence
  chemically synthesized
gaagataatgtatgacctca

SEQ ID NO: 36136 - DNA, 20 bp, Artificial Sequence
  chemically synthesized
aagataatgtatgacctcag

SEQ ID NO: 36137 - DNA, 20 bp, Artificial Sequence
  chemically synthesized
atgacctcaggggatgtgta

SEQ ID NO: 36138 - DNA, 20 bp, Artificial Sequence
  chemically synthesized
tgacctcaggggatgtgtat

SEQ ID NO: 36139 - DNA, 20 bp, Artificial Sequence
  chemically synthesized
caggggatgtgtataggctc

SEQ ID NO: 36140 - DNA, 20 bp, Artificial Sequence
  chemically synthesized
gtgtataggctcaagttgac

SEQ ID NO: 36141 - DNA, 20 bp, Artificial Sequence
  chemically synthesized
aggctcaagttgacaagcga

SEQ ID NO: 36142 - DNA, 20 bp, Artificial Sequence
  chemically synthesized
gacaagcgatggacttgtga

SEQ ID NO: 36143 - DNA, 20 bp, Artificial Sequence
  chemically synthesized
gacttgtgatggttaatact

SEQ ID NO: 36144 - DNA, 20 bp, Artificial Sequence
  chemically synthesized
atactgagtgtcaacttgat

SEQ ID NO: 36145 - DNA, 20 bp, Artificial Sequence
  chemically synthesized
gtgtcaacttgattggattg

SEQ ID NO: 36146 - DNA, 20 bp, Artificial Sequence
  chemically synthesized
tgattggattgaagtgtgca

SEQ ID NO: 36147 - DNA, 20 bp, Artificial Sequence
  chemically synthesized
gtgtgcaaagtattgatcct

SEQ ID NO: 36148 - DNA, 20 bp, Artificial Sequence
  chemically synthesized
ttgatcctgagtgtgtctgt

SEQ ID NO: 36149 - DNA, 20 bp, Artificial Sequence
  chemically synthesized
tgatcctgagtgtgtctgtg

SEQ ID NO: 36150 - DNA, 20 bp, Artificial Sequence
  chemically synthesized
gatcctgagtgtgtctgtga

SEQ ID NO: 36151 - DNA, 20 bp, Artificial Sequence
  chemically synthesized
tgtctgtgagggtattgcca

SEQ ID NO: 36152 - DNA, 20 bp, Artificial Sequence
  chemically synthesized
gtctgtgagggtattgccaa

SEQ ID NO: 36153 - DNA, 20 bp, Artificial Sequence
  chemically synthesized
ctgtgagggtattgccaaag

SEQ ID NO: 36154 - DNA, 20 bp, Artificial Sequence
  chemically synthesized
gccaaaggagattaacattt

SEQ ID NO: 36155 - DNA, 20 bp, Artificial Sequence
  chemically synthesized
aaggagattaacattttagt

SEQ ID NO: 36156 - DNA, 20 bp, Artificial Sequence
  chemically synthesized
gagattaacattttagtcag

SEQ ID NO: 36157 - DNA, 20 bp, Artificial Sequence
  chemically synthesized
agattaacattttagtcagt

SEQ ID NO: 36158 - DNA, 20 bp, Artificial Sequence
  chemically synthesized
taacattttagtcagtgggc

SEQ ID NO: 36159 - DNA, 20 bp, Artificial Sequence
  chemically synthesized
aacattttagtcagtgggct

SEQ ID NO: 36160 - DNA, 20 bp, Artificial Sequence
  chemically synthesized
ttttagtcagtgggctggga

SEQ ID NO: 36161 - DNA, 20 bp, Artificial Sequence
  chemically synthesized
tttagtcagtgggctgggaa

SEQ ID NO: 36162 - DNA, 20 bp, Artificial Sequence
  chemically synthesized
agtcagtgggctgggaaagg

SEQ ID NO: 36163 - DNA, 20 bp, Artificial Sequence
  chemically synthesized
aggcagacccacccttaatc

SEQ ID NO: 36164 - DNA, 20 bp, Artificial Sequence
  chemically synthesized
ggcagacccacccttaatct

SEQ ID NO: 36165 - DNA, 20 bp, Artificial Sequence
  chemically synthesized
agacccacccttaatctggg

SEQ ID NO: 36166 - DNA, 20 bp, Artificial Sequence
  chemically synthesized
gacccacccttaatctgggt

SEQ ID NO: 36167 - DNA, 20 bp, Artificial Sequence
  chemically synthesized
ctgggtgggcaccatctaat

SEQ ID NO: 36168 - DNA, 20 bp, Artificial Sequence
  chemically synthesized
ggcaccatctaatcagttgc

SEQ ID NO: 36169 - DNA, 20 bp, Artificial Sequence
  chemically synthesized
catctaatcagttgccagtg

SEQ ID NO: 36170 - DNA, 20 bp, Artificial Sequence
  chemically synthesized
taatcagttgccagtgtggc

SEQ ID NO: 36171 - DNA, 20 bp, Artificial Sequence
  chemically synthesized
aatcagttgccagtgtggcc

SEQ ID NO: 36172 - DNA, 20 bp, Artificial Sequence
  chemically synthesized
gccagtgtggccaggatata

SEQ ID NO: 36173 - DNA, 20 bp, Artificial Sequence
  chemically synthesized
agtgtggccaggatataaag

SEQ ID NO: 36174 - DNA, 20 bp, Artificial Sequence
  chemically synthesized
gtgtggccaggatataaagc

SEQ ID NO: 36175 - DNA, 20 bp, Artificial Sequence
  chemically synthesized
tggccaggatataaagcagg

SEQ ID NO: 36176 - DNA, 20 bp, Artificial Sequence
  chemically synthesized
aaaaaaacatgtgaaaatcc

SEQ ID NO: 36177 - DNA, 20 bp, Artificial Sequence
  chemically synthesized
aacatgtgaaaatcctggac

SEQ ID NO: 36178 - DNA, 20 bp, Artificial Sequence
  chemically synthesized
gtgaaaatcctggactggct

SEQ ID NO: 36179 - DNA, 20 bp, Artificial Sequence
  chemically synthesized
cctggactggcttagcctcc

SEQ ID NO: 36180 - DNA, 20 bp, Artificial Sequence
  chemically synthesized
cctacatctttctcccatgc

SEQ ID NO: 36181 - DNA, 20 bp, Artificial Sequence
  chemically synthesized
tgcttcctgccctcaaacat

SEQ ID NO: 36182 - DNA, 20 bp, Artificial Sequence
  chemically synthesized
gccctcaaacattggactcc

SEQ ID NO: 36183 - DNA, 20 bp, Artificial Sequence
  chemically synthesized
acattggactccaagtcctt

SEQ ID NO: 36184 - DNA, 20 bp, Artificial Sequence
  chemically synthesized
gactccaagtccttcagctt

SEQ ID NO: 36185 - DNA, 20 bp, Artificial Sequence
  chemically synthesized
actccaagtccttcagcttt

SEQ ID NO: 36186 - DNA, 20 bp, Artificial Sequence
  chemically synthesized
agtccttcagctttgggact

SEQ ID NO: 36187 - DNA, 20 bp, Artificial Sequence
  chemically synthesized
ttcagctttgggacttggac

SEQ ID NO: 36188 - DNA, 20 bp, Artificial Sequence
  chemically synthesized
cttccttgctcctctgcttg

SEQ ID NO: 36189 - DNA, 20 bp, Artificial Sequence
  chemically synthesized
cttgctcctctgcttgcaga

SEQ ID NO: 36190 - DNA, 20 bp, Artificial Sequence
  chemically synthesized
tgcttgcagatggcctattg

SEQ ID NO: 36191 - DNA, 20 bp, Artificial Sequence
  chemically synthesized
gcttgcagatggcctattgt

SEQ ID NO: 36192 - DNA, 20 bp, Artificial Sequence
  chemically synthesized
gtgggaccttgtgattgtgt

SEQ ID NO: 36193 - DNA, 20 bp, Artificial Sequence
  chemically synthesized
tctatctatctatctcctat

SEQ ID NO: 36194 - DNA, 20 bp, Artificial Sequence
  chemically synthesized
tcctattagttctgtctctc

SEQ ID NO: 36195 - DNA, 20 bp, Artificial Sequence
  chemically synthesized
cctattagttctgtctctct

SEQ ID NO: 36196 - DNA, 20 bp, Artificial Sequence
  chemically synthesized
ctattagttctgtctctcta

SEQ ID NO: 36197 - DNA, 20 bp, Artificial Sequence
  chemically synthesized
ctagggaaccctgacaaata

SEQ ID NO: 36198 - DNA, 20 bp, Artificial Sequence
  chemically synthesized
ggaaccctgacaaatacagt

SEQ ID NO: 36199 - DNA, 20 bp, Artificial Sequence
  chemically synthesized
cctgacaaatacagtgagct

SEQ ID NO: 36200 - DNA, 20 bp, Artificial Sequence
  chemically synthesized
ctgacaaatacagtgagctc

SEQ ID NO: 36201 - DNA, 20 bp, Artificial Sequence
  chemically synthesized
atacagtgagctcaggtcct

SEQ ID NO: 36202 - DNA, 20 bp, Artificial Sequence
  chemically synthesized
cagtgagctcaggtcctgag

SEQ ID NO: 36203 - DNA, 20 bp, Artificial Sequence
  chemically synthesized
cctgagcagacattttccaa

SEQ ID NO: 36204 - DNA, 20 bp, Artificial Sequence
  chemically synthesized
gagcagacattttccaaaag

SEQ ID NO: 36205 - DNA, 20 bp, Artificial Sequence
  chemically synthesized
ttttccaaaagaagacatac

SEQ ID NO: 36206 - DNA, 20 bp, Artificial Sequence
  chemically synthesized
tccaaaagaagacatacaag

SEQ ID NO: 36207 - DNA, 20 bp, Artificial Sequence
  chemically synthesized
ggccaataaacgtcaaaaaa

SEQ ID NO: 36208 - DNA, 20 bp, Artificial Sequence
  chemically synthesized
agttcaacatcactaataat

SEQ ID NO: 36209 - DNA, 20 bp, Artificial Sequence
  chemically synthesized
ttcaacatcactaataatca

SEQ ID NO: 36210 - DNA, 20 bp, Artificial Sequence
  chemically synthesized
catatgatacctccttatgc

SEQ ID NO: 36211 - DNA, 20 bp, Artificial Sequence
  chemically synthesized
tgatacctccttatgccagt

SEQ ID NO: 36212 - DNA, 20 bp, Artificial Sequence
  chemically synthesized
cctccttatgccagtcagaa

SEQ ID NO: 36213 - DNA, 20 bp, Artificial Sequence
  chemically synthesized
tcagaatggctatcattata

SEQ ID NO: 36214 - DNA, 20 bp, Artificial Sequence
  chemically synthesized
atcattataaagttcaaaaa

SEQ ID NO: 36215 - DNA, 20 bp, Artificial Sequence
  chemically synthesized
attataaagttcaaaaacag

SEQ ID NO: 36216 - DNA, 20 bp, Artificial Sequence
  chemically synthesized
agttcaaaaacagcagatgt

SEQ ID NO: 36217 - DNA, 20 bp, Artificial Sequence
  chemically synthesized
caaaaacagcagatgttggt

SEQ ID NO: 36218 - DNA, 20 bp, Artificial Sequence
  chemically synthesized
aaaaacagcagatgttggtg

SEQ ID NO: 36219 - DNA, 20 bp, Artificial Sequence
  chemically synthesized
agcagatgttggtgaggatg

SEQ ID NO: 36220 - DNA, 20 bp, Artificial Sequence
  chemically synthesized
cagatgttggtgaggatgtg

SEQ ID NO: 36221 - DNA, 20 bp, Artificial Sequence
  chemically synthesized
gttggtgaggatgtggagac

SEQ ID NO: 36222 - DNA, 20 bp, Artificial Sequence
  chemically synthesized
agaaaatgcttatacactgt

SEQ ID NO: 36223 - DNA, 20 bp, Artificial Sequence
  chemically synthesized
aatgcttatacactgttggt

SEQ ID NO: 36224 - DNA, 20 bp, Artificial Sequence
  chemically synthesized
ctgttggtaagaatgtaaat

SEQ ID NO: 36225 - DNA, 20 bp, Artificial Sequence
  chemically synthesized
gtaaattagtacaaacttta

SEQ ID NO: 36226 - DNA, 20 bp, Artificial Sequence
  chemically synthesized
aattagtacaaactttatgg

SEQ ID NO: 36227 - DNA, 20 bp, Artificial Sequence
  chemically synthesized
agtacaaactttatggaaga

SEQ ID NO: 36228 - DNA, 20 bp, Artificial Sequence
  chemically synthesized
actttatggaagacagcatg

SEQ ID NO: 36229 - DNA, 20 bp, Artificial Sequence
  chemically synthesized
gacagcatgaagatttctta

SEQ ID NO: 36230 - DNA, 20 bp, Artificial Sequence
  chemically synthesized
atgaagatttcttaaagaac

SEQ ID NO: 36231 - DNA, 20 bp, Artificial Sequence
  chemically synthesized
atttcttaaagaactagaaa

SEQ ID NO: 36232 - DNA, 20 bp, Artificial Sequence
  chemically synthesized
caatcctgcaatcccactac

SEQ ID NO: 36233 - DNA, 20 bp, Artificial Sequence
  chemically synthesized
aatcctgcaatcccactact

SEQ ID NO: 36234 - DNA, 20 bp, Artificial Sequence
  chemically synthesized
tgcaatcccactactgggta

SEQ ID NO: 36235 - DNA, 20 bp, Artificial Sequence
  chemically synthesized
cactactgggtatggaccca

SEQ ID NO: 36236 - DNA, 20 bp, Artificial Sequence
  chemically synthesized
tgggtatggacccaaagtga

SEQ ID NO: 36237 - DNA, 20 bp, Artificial Sequence
  chemically synthesized
ggtatggacccaaagtgaaa

SEQ ID NO: 36238 - DNA, 20 bp, Artificial Sequence
  chemically synthesized
tgaaagagatcatattaaaa

SEQ ID NO: 36239 - DNA, 20 bp, Artificial Sequence
  chemically synthesized
attaaaaaagatatctgcat

SEQ ID NO: 36240 - DNA, 20 bp, Artificial Sequence
  chemically synthesized
tatctgcattagtatgttca

SEQ ID NO: 36241 - DNA, 20 bp, Artificial Sequence
  chemically synthesized
ctgcattagtatgttcaaag

SEQ ID NO: 36242 - DNA, 20 bp, Artificial Sequence
  chemically synthesized
caaagtagcactgttcccaa

SEQ ID NO: 36243 - DNA, 20 bp, Artificial Sequence
  chemically synthesized
tagcactgttcccaatagca

SEQ ID NO: 36244 - DNA, 20 bp, Artificial Sequence
  chemically synthesized
tgttcccaatagcaaagata

SEQ ID NO: 36245 - DNA, 20 bp, Artificial Sequence
  chemically synthesized
tcaacctaaatgtctaccaa

SEQ ID NO: 36246 - DNA, 20 bp, Artificial Sequence
  chemically synthesized
aatgtctaccaatggacgat

SEQ ID NO: 36247 - DNA, 20 bp, Artificial Sequence
  chemically synthesized
taccaatggacgattggata

SEQ ID NO: 36248 - DNA, 20 bp, Artificial Sequence
  chemically synthesized
acgattggataaagaaaatg

SEQ ID NO: 36249 - DNA, 20 bp, Artificial Sequence
  chemically synthesized
ttatatacatatatattact

SEQ ID NO: 36250 - DNA, 20 bp, Artificial Sequence
  chemically synthesized
tatattactcagccataaaa

SEQ ID NO: 36251 - DNA, 20 bp, Artificial Sequence
  chemically synthesized
gaatgaaatcatgtcttctc

SEQ ID NO: 36252 - DNA, 20 bp, Artificial Sequence
  chemically synthesized
tcatgtcttctctagaaaca

SEQ ID NO: 36253 - DNA, 20 bp, Artificial Sequence
  chemically synthesized
gtcttctctagaaacatggt

SEQ ID NO: 36254 - DNA, 20 bp, Artificial Sequence
  chemically synthesized
tctagaaacatggttagaac

SEQ ID NO: 36255 - DNA, 20 bp, Artificial Sequence
  chemically synthesized
tagaaacatggttagaactg

SEQ ID NO: 36256 - DNA, 20 bp, Artificial Sequence
  chemically synthesized
agaaacatggttagaactgg

SEQ ID NO: 36257 - DNA, 20 bp, Artificial Sequence
  chemically synthesized
gaactggaggacattatcct

SEQ ID NO: 36258 - DNA, 20 bp, Artificial Sequence
  chemically synthesized
ttatcctcagtgaaataact

SEQ ID NO: 36259 - DNA, 20 bp, Artificial Sequence
  chemically synthesized
tcagtgaaataactcagaaa

SEQ ID NO: 36260 - DNA, 20 bp, Artificial Sequence
  chemically synthesized
tgaaataactcagaaacaga

SEQ ID NO: 36261 - DNA, 20 bp, Artificial Sequence
  chemically synthesized
cagaaacagaaagtcaaaca

SEQ ID NO: 36262 - DNA, 20 bp, Artificial Sequence
  chemically synthesized
aaacacagtatgttctcatt

SEQ ID NO: 36263 - DNA, 20 bp, Artificial Sequence
  chemically synthesized
acagtatgttctcatttagt

SEQ ID NO: 36264 - DNA, 20 bp, Artificial Sequence
  chemically synthesized
agtatgttctcatttagtga

SEQ ID NO: 36265 - DNA, 20 bp, Artificial Sequence
  chemically synthesized
gttctcatttagtgagagcc

SEQ ID NO: 36266 - DNA, 20 bp, Artificial Sequence
  chemically synthesized
ctcatttagtgagagccaag

SEQ ID NO: 36267 - DNA, 20 bp, Artificial Sequence
  chemically synthesized
tcatttagtgagagccaagt

SEQ ID NO: 36268 - DNA, 20 bp, Artificial Sequence
  chemically synthesized
atttagtgagagccaagtgg

SEQ ID NO: 36269 - DNA, 20 bp, Artificial Sequence
  chemically synthesized
ccaagtgggagctaaacgat

SEQ ID NO: 36270 - DNA, 20 bp, Artificial Sequence
  chemically synthesized
gtgggagctaaacgatgagt

SEQ ID NO: 36271 - DNA, 20 bp, Artificial Sequence
  chemically synthesized
agctaaacgatgagtaagca

SEQ ID NO: 36272 - DNA, 20 bp, Artificial Sequence
  chemically synthesized
gatgagtaagcatagacata

SEQ ID NO: 36273 - DNA, 20 bp, Artificial Sequence
  chemically synthesized
agacatatagaatgaaataa

SEQ ID NO: 36274 - DNA, 20 bp, Artificial Sequence
  chemically synthesized
gaatgaaataatagacactt

SEQ ID NO: 36275 - DNA, 20 bp, Artificial Sequence
  chemically synthesized
aaataatagacacttgagac

SEQ ID NO: 36276 - DNA, 20 bp, Artificial Sequence
  chemically synthesized
ataatagacacttgagacta

SEQ ID NO: 36277 - DNA, 20 bp, Artificial Sequence
  chemically synthesized
tagacacttgagactagaga

SEQ ID NO: 36278 - DNA, 20 bp, Artificial Sequence
  chemically synthesized
agacacttgagactagagaa

SEQ ID NO: 36279 - DNA, 20 bp, Artificial Sequence
  chemically synthesized
cacttgagactagagaaagg

SEQ ID NO: 36280 - DNA, 20 bp, Artificial Sequence
  chemically synthesized
acttgagactagagaaaggt

SEQ ID NO: 36281 - DNA, 20 bp, Artificial Sequence
  chemically synthesized
ttgagactagagaaaggtgg

SEQ ID NO: 36282 - DNA, 20 bp, Artificial Sequence
  chemically synthesized
tgagactagagaaaggtggg

SEQ ID NO: 36283 - DNA, 20 bp, Artificial Sequence
  chemically synthesized
actagagaaaggtgggagga

SEQ ID NO: 36284 - DNA, 20 bp, Artificial Sequence
  chemically synthesized
ctagagaaaggtgggaggat

SEQ ID NO: 36285 - DNA, 20 bp, Artificial Sequence
  chemically synthesized
agagaaaggtgggaggatag

SEQ ID NO: 36286 - DNA, 20 bp, Artificial Sequence
  chemically synthesized
aaggtgggaggataggagta

SEQ ID NO: 36287 - DNA, 20 bp, Artificial Sequence
  chemically synthesized
tgggaggataggagtatggt

SEQ ID NO: 36288 - DNA, 20 bp, Artificial Sequence
  chemically synthesized
gggaggataggagtatggtg

SEQ ID NO: 36289 - DNA, 20 bp, Artificial Sequence
  chemically synthesized
tggtgaggactgaaaaacta

SEQ ID NO: 36290 - DNA, 20 bp, Artificial Sequence
  chemically synthesized
aggactgaaaaactacggat

SEQ ID NO: 36291 - DNA, 20 bp, Artificial Sequence
  chemically synthesized
tggatacaacattcactttt

SEQ ID NO: 36292 - DNA, 20 bp, Artificial Sequence
  chemically synthesized
ggatacaacattcacttttc

SEQ ID NO: 36293 - DNA, 20 bp, Artificial Sequence
  chemically synthesized
aacattcacttttcaggtga

SEQ ID NO: 36294 - DNA, 20 bp, Artificial Sequence
  chemically synthesized
ttcaggtgatggtccactaa

SEQ ID NO: 36295 - DNA, 20 bp, Artificial Sequence
  chemically synthesized
gtgatggtccactaaaagct

SEQ ID NO: 36296 - DNA, 20 bp, Artificial Sequence
  chemically synthesized
actatgcaacatacatatgt

SEQ ID NO: 36297 - DNA, 20 bp, Artificial Sequence
  chemically synthesized
ctatgcaacatacatatgta

SEQ ID NO: 36298 - DNA, 20 bp, Artificial Sequence
  chemically synthesized
catacatatgtaaggaaccc

SEQ ID NO: 36299 - DNA, 20 bp, Artificial Sequence
  chemically synthesized
cccgagcttgtaccctgata

SEQ ID NO: 36300 - DNA, 20 bp, Artificial Sequence
  chemically synthesized
ccaaatctcatcttgaattg

SEQ ID NO: 36301 - DNA, 20 bp, Artificial Sequence
  chemically synthesized
cccataatcctcacgtgttg

SEQ ID NO: 36302 - DNA, 20 bp, Artificial Sequence
  chemically synthesized
ccataatcctcacgtgttgt

SEQ ID NO: 36303 - DNA, 20 bp, Artificial Sequence
  chemically synthesized
ataatcctcacgtgttgtgg

SEQ ID NO: 36304 - DNA, 20 bp, Artificial Sequence
  chemically synthesized
taatcctcacgtgttgtggg

SEQ ID NO: 36305 - DNA, 20 bp, Artificial Sequence
  chemically synthesized
aatcctcacgtgttgtggga

SEQ ID NO: 36306 - DNA, 20 bp, Artificial Sequence
  chemically synthesized
cacgtgttgtgggagggatt

SEQ ID NO: 36307 - DNA, 20 bp, Artificial Sequence
  chemically synthesized
cgtgttgtgggagggatttg

SEQ ID NO: 36308 - DNA, 20 bp, Artificial Sequence
  chemically synthesized
gtgttgtgggagggatttgg

SEQ ID NO: 36309 - DNA, 20 bp, Artificial Sequence
  chemically synthesized
tgttgtgggagggatttgga

SEQ ID NO: 36310 - DNA, 20 bp, Artificial Sequence
  chemically synthesized
ttgtgggagggatttggagg

SEQ ID NO: 36311 - DNA, 20 bp, Artificial Sequence
  chemically synthesized
tgtgggagggatttggaggg

SEQ ID NO: 36312 - DNA, 20 bp, Artificial Sequence
  chemically synthesized
ggagggaggtaattgaatca

SEQ ID NO: 36313 - DNA, 20 bp, Artificial Sequence
  chemically synthesized
agggaggtaattgaatcata

SEQ ID NO: 36314 - DNA, 20 bp, Artificial Sequence
  chemically synthesized
gggaggtaattgaatcatag

SEQ ID NO: 36315 - DNA, 20 bp, Artificial Sequence
  chemically synthesized
gaggtaattgaatcatagag

SEQ ID NO: 36316 - DNA, 20 bp, Artificial Sequence
  chemically synthesized
aggtaattgaatcatagagg

SEQ ID NO: 36317 - DNA, 20 bp, Artificial Sequence
  chemically synthesized
ctctcatgctcttctcgtga

SEQ ID NO: 36318 - DNA, 20 bp, Artificial Sequence
  chemically synthesized
catgctcttctcgtgatagt

SEQ ID NO: 36319 - DNA, 20 bp, Artificial Sequence
  chemically synthesized
tcgtgatagtgagttcttac

SEQ ID NO: 36320 - DNA, 20 bp, Artificial Sequence
  chemically synthesized
tgagttcttacaagatctga

SEQ ID NO: 36321 - DNA, 20 bp, Artificial Sequence
  chemically synthesized
acaagatctgatggttttat

SEQ ID NO: 36322 - DNA, 20 bp, Artificial Sequence
  chemically synthesized
agatctgatggttttataag

SEQ ID NO: 36323 - DNA, 20 bp, Artificial Sequence
  chemically synthesized
cggcttttcccccttttgct

SEQ ID NO: 36324 - DNA, 20 bp, Artificial Sequence
  chemically synthesized
ctacttgctgctgccatgtg

SEQ ID NO: 36325 - DNA, 20 bp, Artificial Sequence
  chemically synthesized
cttgctgctgccatgtgaag

SEQ ID NO: 36326 - DNA, 20 bp, Artificial Sequence
  chemically synthesized
ttgctgctgccatgtgaaga

SEQ ID NO: 36327 - DNA, 20 bp, Artificial Sequence
  chemically synthesized
tcttcttctgccatgattgt

SEQ ID NO: 36328 - DNA, 20 bp, Artificial Sequence
  chemically synthesized
gccatgattgtaagtttccc

SEQ ID NO: 36329 - DNA, 20 bp, Artificial Sequence
  chemically synthesized
ccatgattgtaagtttcccg

SEQ ID NO: 36330 - DNA, 20 bp, Artificial Sequence
  chemically synthesized
taagtttcccgaggcctccc

SEQ ID NO: 36331 - DNA, 20 bp, Artificial Sequence
  chemically synthesized
ccgaggcctccccagccctg

SEQ ID NO: 36332 - DNA, 20 bp, Artificial Sequence
  chemically synthesized
ccccagccctgtggaactgt

SEQ ID NO: 36333 - DNA, 20 bp, Artificial Sequence
  chemically synthesized
ttttttccttataaattacc

SEQ ID NO: 36334 - DNA, 20 bp, Artificial Sequence
  chemically synthesized
ccttataaattacccagtct

SEQ ID NO: 36335 - DNA, 20 bp, Artificial Sequence
  chemically synthesized
cttataaattacccagtctc

SEQ ID NO: 36336 - DNA, 20 bp, Artificial Sequence
  chemically synthesized
agtctcaggtatgtctttat

SEQ ID NO: 36337 - DNA, 20 bp, Artificial Sequence
  chemically synthesized
ctcaggtatgtctttataag

SEQ ID NO: 36338 - DNA, 20 bp, Artificial Sequence
  chemically synthesized
taagcagcatgataacgaac

SEQ ID NO: 36339 - DNA, 20 bp, Artificial Sequence
  chemically synthesized
tttaaaaatataaaataaat

SEQ ID NO: 36340 - DNA, 20 bp, Artificial Sequence
  chemically synthesized
ataaattagatctgattgaa

SEQ ID NO: 36341 - DNA, 20 bp, Artificial Sequence
  chemically synthesized
taaattagatctgattgaaa

SEQ ID NO: 36342 - DNA, 20 bp, Artificial Sequence
  chemically synthesized
tgattgaaaaggcaaaaatt

SEQ ID NO: 36343 - DNA, 20 bp, Artificial Sequence
  chemically synthesized
tgaaaaggcaaaaattgagc

SEQ ID NO: 36344 - DNA, 20 bp, Artificial Sequence
  chemically synthesized
gcaagcaaaatatcacttaa

SEQ ID NO: 36345 - DNA, 20 bp, Artificial Sequence
  chemically synthesized
caagcaaaatatcacttaat

SEQ ID NO: 36346 - DNA, 20 bp, Artificial Sequence
  chemically synthesized
aagcaaaatatcacttaatg

SEQ ID NO: 36347 - DNA, 20 bp, Artificial Sequence
  chemically synthesized
tcacttaatggggtaattaa

SEQ ID NO: 36348 - DNA, 20 bp, Artificial Sequence
  chemically synthesized
cacttaatggggtaattaaa

SEQ ID NO: 36349 - DNA, 20 bp, Artificial Sequence
  chemically synthesized
acttaatggggtaattaaaa

SEQ ID NO: 36350 - DNA, 20 bp, Artificial Sequence
  chemically synthesized
atggggtaattaaaagggtg

SEQ ID NO: 36351 - DNA, 20 bp, Artificial Sequence
  chemically synthesized
aattaaaagggtgaagaaat

SEQ ID NO: 36352 - DNA, 20 bp, Artificial Sequence
  chemically synthesized
attaaaagggtgaagaaatt

SEQ ID NO: 36353 - DNA, 20 bp, Artificial Sequence
  chemically synthesized
gggtgaagaaattgggcaaa

SEQ ID NO: 36354 - DNA, 20 bp, Artificial Sequence
  chemically synthesized
attgggcaaatggatgtcat

SEQ ID NO: 36355 - DNA, 20 bp, Artificial Sequence
  chemically synthesized
ttgggcaaatggatgtcatg

SEQ ID NO: 36356 - DNA, 20 bp, Artificial Sequence
  chemically synthesized
gggcaaatggatgtcatgag

SEQ ID NO: 36357 - DNA, 20 bp, Artificial Sequence
  chemically synthesized
ggcaaatggatgtcatgagg

SEQ ID NO: 36358 - DNA, 20 bp, Artificial Sequence
  chemically synthesized
atgtcatgaggaggaatttt

SEQ ID NO: 36359 - DNA, 20 bp, Artificial Sequence
  chemically synthesized
tgtcatgaggaggaattttt

SEQ ID NO: 36360 - DNA, 20 bp, Artificial Sequence
  chemically synthesized
catgaggaggaatttttagg

SEQ ID NO: 36361 - DNA, 20 bp, Artificial Sequence
  chemically synthesized
tgaggaggaatttttaggca

SEQ ID NO: 36362 - DNA, 20 bp, Artificial Sequence
  chemically synthesized
gaggaggaatttttaggcag

SEQ ID NO: 36363 - DNA, 20 bp, Artificial Sequence
  chemically synthesized
gaatttttaggcagaggtaa

SEQ ID NO: 36364 - DNA, 20 bp, Artificial Sequence
  chemically synthesized
ttttaggcagaggtaatggt

SEQ ID NO: 36365 - DNA, 20 bp, Artificial Sequence
  chemically synthesized
ttaggcagaggtaatggtca

SEQ ID NO: 36366 - DNA, 20 bp, Artificial Sequence
  chemically synthesized
cagaggtaatggtcagagcc

SEQ ID NO: 36367 - DNA, 20 bp, Artificial Sequence
  chemically synthesized
agaggtaatggtcagagccc

SEQ ID NO: 36368 - DNA, 20 bp, Artificial Sequence
  chemically synthesized
atggtcagagcccaggccct

SEQ ID NO: 36369 - DNA, 20 bp, Artificial Sequence
  chemically synthesized
tcagagcccaggccctaagc

SEQ ID NO: 36370 - DNA, 20 bp, Artificial Sequence
  chemically synthesized
agagcccaggccctaagctg

SEQ ID NO: 36371 - DNA, 20 bp, Artificial Sequence
  chemically synthesized
gcccaggccctaagctggag

SEQ ID NO: 36372 - DNA, 20 bp, Artificial Sequence
  chemically synthesized
ccaggccctaagctggagta

SEQ ID NO: 36373 - DNA, 20 bp, Artificial Sequence
  chemically synthesized
taagctggagtagagtgtgc

SEQ ID NO: 36374 - DNA, 20 bp, Artificial Sequence
  chemically synthesized
aagctggagtagagtgtgca

SEQ ID NO: 36375 - DNA, 20 bp, Artificial Sequence
  chemically synthesized
tggagtagagtgtgcaagga

SEQ ID NO: 36376 - DNA, 20 bp, Artificial Sequence
  chemically synthesized
gagtagagtgtgcaaggaaa

SEQ ID NO: 36377 - DNA, 20 bp, Artificial Sequence
  chemically synthesized
agtgtgcaaggaaagagtaa

SEQ ID NO: 36378 - DNA, 20 bp, Artificial Sequence
  chemically synthesized
gtgtgcaaggaaagagtaat

SEQ ID NO: 36379 - DNA, 20 bp, Artificial Sequence
  chemically synthesized
gaaagagtaataggattgaa

SEQ ID NO: 36380 - DNA, 20 bp, Artificial Sequence
  chemically synthesized
aaagagtaataggattgaaa

SEQ ID NO: 36381 - DNA, 20 bp, Artificial Sequence
  chemically synthesized
ataggattgaaaaggataac

SEQ ID NO: 36382 - DNA, 20 bp, Artificial Sequence
  chemically synthesized
taggattgaaaaggataacc

SEQ ID NO: 36383 - DNA, 20 bp, Artificial Sequence
  chemically synthesized
gattgaaaaggataaccagg

SEQ ID NO: 36384 - DNA, 20 bp, Artificial Sequence
  chemically synthesized
attgaaaaggataaccaggt

SEQ ID NO: 36385 - DNA, 20 bp, Artificial Sequence
  chemically synthesized
tgaaaaggataaccaggtag

SEQ ID NO: 36386 - DNA, 20 bp, Artificial Sequence
  chemically synthesized
gaaaaggataaccaggtagg

SEQ ID NO: 36387 - DNA, 20 bp, Artificial Sequence
  chemically synthesized
gataaccaggtaggaggaca

SEQ ID NO: 36388 - DNA, 20 bp, Artificial Sequence
  chemically synthesized
ataaccaggtaggaggacat

SEQ ID NO: 36389 - DNA, 20 bp, Artificial Sequence
  chemically synthesized
taaccaggtaggaggacata

SEQ ID NO: 36390 - DNA, 20 bp, Artificial Sequence
  chemically synthesized
accaggtaggaggacatagg

SEQ ID NO: 36391 - DNA, 20 bp, Artificial Sequence
  chemically synthesized
ccaggtaggaggacataggg

SEQ ID NO: 36392 - DNA, 20 bp, Artificial Sequence
  chemically synthesized
caggtaggaggacataggga

SEQ ID NO: 36393 - DNA, 20 bp, Artificial Sequence
  chemically synthesized
aggtaggaggacatagggag

SEQ ID NO: 36394 - DNA, 20 bp, Artificial Sequence
  chemically synthesized
aggaggacatagggaggggt

SEQ ID NO: 36395 - DNA, 20 bp, Artificial Sequence
  chemically synthesized
ggaggacatagggaggggta

SEQ ID NO: 36396 - DNA, 20 bp, Artificial Sequence
  chemically synthesized
gaggacatagggaggggtaa

SEQ ID NO: 36397 - DNA, 20 bp, Artificial Sequence
  chemically synthesized
aggacatagggaggggtaag

SEQ ID NO: 36398 - DNA, 20 bp, Artificial Sequence
  chemically synthesized
gacatagggaggggtaaggg

SEQ ID NO: 36399 - DNA, 20 bp, Artificial Sequence
  chemically synthesized
acatagggaggggtaagggg

SEQ ID NO: 36400 - DNA, 20 bp, Artificial Sequence
  chemically synthesized
tagggaggggtaaggggagg

SEQ ID NO: 36401 - DNA, 20 bp, Artificial Sequence
  chemically synthesized
ggtaaggggaggaagacctc

SEQ ID NO: 36402 - DNA, 20 bp, Artificial Sequence
  chemically synthesized
aggaagacctccagtaaact

SEQ ID NO: 36403 - DNA, 20 bp, Artificial Sequence
  chemically synthesized
ggaagacctccagtaaactt

SEQ ID NO: 36404 - DNA, 20 bp, Artificial Sequence
  chemically synthesized
agacctccagtaaacttagg

SEQ ID NO: 36405 - DNA, 20 bp, Artificial Sequence
  chemically synthesized
gacctccagtaaacttaggc

SEQ ID NO: 36406 - DNA, 20 bp, Artificial Sequence
  chemically synthesized
aggcaggatatttcccgtga

SEQ ID NO: 36407 - DNA, 20 bp, Artificial Sequence
  chemically synthesized
actaaataataatcacatgt

SEQ ID NO: 36408 - DNA, 20 bp, Artificial Sequence
  chemically synthesized
aaataatctgtcgattactt

SEQ ID NO: 36409 - DNA, 20 bp, Artificial Sequence
  chemically synthesized
ttgagcaatactttgttcat

SEQ ID NO: 36410 - DNA, 20 bp, Artificial Sequence
  chemically synthesized
gcaatactttgttcatgagc

SEQ ID NO: 36411 - DNA, 20 bp, Artificial Sequence
  chemically synthesized
aatactttgttcatgagcta

SEQ ID NO: 36412 - DNA, 20 bp, Artificial Sequence
  chemically synthesized
ctttgttcatgagctagagc

SEQ ID NO: 36413 - DNA, 20 bp, Artificial Sequence
  chemically synthesized
tttgttcatgagctagagca

SEQ ID NO: 36414 - DNA, 20 bp, Artificial Sequence
  chemically synthesized
ttgttcatgagctagagcaa

SEQ ID NO: 36415 - DNA, 20 bp, Artificial Sequence
  chemically synthesized
tgttcatgagctagagcaag

SEQ ID NO: 36416 - DNA, 20 bp, Artificial Sequence
  chemically synthesized
ctagagcaaggggatgactc

SEQ ID NO: 36417 - DNA, 20 bp, Artificial Sequence
  chemically synthesized
agaaatcctttgtgaaatcc

SEQ ID NO: 36418 - DNA, 20 bp, Artificial Sequence
  chemically synthesized
aaatcctttgtgaaatcctg

SEQ ID NO: 36419 - DNA, 20 bp, Artificial Sequence
  chemically synthesized
aatcctttgtgaaatcctgg

SEQ ID NO: 36420 - DNA, 20 bp, Artificial Sequence
  chemically synthesized
tgtgaaatcctggaggtaat

SEQ ID NO: 36421 - DNA, 20 bp, Artificial Sequence
  chemically synthesized
tcctggaggtaataagatcc

SEQ ID NO: 36422 - DNA, 20 bp, Artificial Sequence
  chemically synthesized
atcttcaactcaattgcaaa

SEQ ID NO: 36423 - DNA, 20 bp, Artificial Sequence
  chemically synthesized
caaaacatattccatttcat

SEQ ID NO: 36424 - DNA, 20 bp, Artificial Sequence
  chemically synthesized
tattccatttcatcagacta

SEQ ID NO: 36425 - DNA, 20 bp, Artificial Sequence
  chemically synthesized
attccatttcatcagactac

SEQ ID NO: 36426 - DNA, 20 bp, Artificial Sequence
  chemically synthesized
catcagactacaggttttaa

SEQ ID NO: 36427 - DNA, 20 bp, Artificial Sequence
  chemically synthesized
atttcttaaatgtattattc

SEQ ID NO: 36428 - DNA, 20 bp, Artificial Sequence
  chemically synthesized
ccagtaacttatactttaca

SEQ ID NO: 36429 - DNA, 20 bp, Artificial Sequence
  chemically synthesized
tacatagtaaatcttatcaa

SEQ ID NO: 36430 - DNA, 20 bp, Artificial Sequence
  chemically synthesized
ttatcaatagtcacaatcaa

SEQ ID NO: 36431 - DNA, 20 bp, Artificial Sequence
  chemically synthesized
agtcacaatcaatggtcaca

SEQ ID NO: 36432 - DNA, 20 bp, Artificial Sequence
  chemically synthesized
cacaatcaatggtcacaaag

SEQ ID NO: 36433 - DNA, 20 bp, Artificial Sequence
  chemically synthesized
tcacaaagtagaacttcatc

SEQ ID NO: 36434 - DNA, 20 bp, Artificial Sequence
  chemically synthesized
acaaagtagaacttcatctg

SEQ ID NO: 36435 - DNA, 20 bp, Artificial Sequence
  chemically synthesized
tcatctggagacattacttt

SEQ ID NO: 36436 - DNA, 20 bp, Artificial Sequence
  chemically synthesized
ggagacattacttttagcct

SEQ ID NO: 36437 - DNA, 20 bp, Artificial Sequence
  chemically synthesized
gccatgcaaaatatactttt

SEQ ID NO: 36438 - DNA, 20 bp, Artificial Sequence
  chemically synthesized
tttggaaaattgccctttga

SEQ ID NO: 36439 - DNA, 20 bp, Artificial Sequence
  chemically synthesized
ttggaaaattgccctttgaa

SEQ ID NO: 36440 - DNA, 20 bp, Artificial Sequence
  chemically synthesized
aaaattgccctttgaaaggc

SEQ ID NO: 36441 - DNA, 20 bp, Artificial Sequence
  chemically synthesized
ctttgaaaggcgagacacaa

SEQ ID NO: 36442 - DNA, 20 bp, Artificial Sequence
  chemically synthesized
tttgaaaggcgagacacaaa

SEQ ID NO: 36443 - DNA, 20 bp, Artificial Sequence
  chemically synthesized
caaatgttgatgctattata

SEQ ID NO: 36444 - DNA, 20 bp, Artificial Sequence
  chemically synthesized
atgctattatatggtaccaa

SEQ ID NO: 36445 - DNA, 20 bp, Artificial Sequence
  chemically synthesized
tgctattatatggtaccaat

SEQ ID NO: 36446 - DNA, 20 bp, Artificial Sequence
  chemically synthesized
ataggattcattaatttata

SEQ ID NO: 36447 - DNA, 20 bp, Artificial Sequence
  chemically synthesized
taggattcattaatttataa

SEQ ID NO: 36448 - DNA, 20 bp, Artificial Sequence
  chemically synthesized
ggattcattaatttataaag

SEQ ID NO: 36449 - DNA, 20 bp, Artificial Sequence
  chemically synthesized
ttcattaatttataaaggag

SEQ ID NO: 36450 - DNA, 20 bp, Artificial Sequence
  chemically synthesized
cattaatttataaaggagaa

SEQ ID NO: 36451 - DNA, 20 bp, Artificial Sequence
  chemically synthesized
ctaatgtaactccaaaatgc

SEQ ID NO: 36452 - DNA, 20 bp, Artificial Sequence
  chemically synthesized
aatgcaagcaattttcatat

SEQ ID NO: 36453 - DNA, 20 bp, Artificial Sequence
  chemically synthesized
attttcatatgagtctacac

SEQ ID NO: 36454 - DNA, 20 bp, Artificial Sequence
  chemically synthesized
tacacaagctaattgtcctt

SEQ ID NO: 36455 - DNA, 20 bp, Artificial Sequence
  chemically synthesized
tccttaagaatttcatcttt

SEQ ID NO: 36456 - DNA, 20 bp, Artificial Sequence
  chemically synthesized
ccttaagaatttcatcttta

SEQ ID NO: 36457 - DNA, 20 bp, Artificial Sequence
  chemically synthesized
agaatttcatctttaaggaa

SEQ ID NO: 36458 - DNA, 20 bp, Artificial Sequence
  chemically synthesized
aagttttttactgtatcaaa

SEQ ID NO: 36459 - DNA, 20 bp, Artificial Sequence
  chemically synthesized
ttttttactgtatcaaaaag

SEQ ID NO: 36460 - DNA, 20 bp, Artificial Sequence
  chemically synthesized
aagaagtttaaactgtcatt

SEQ ID NO: 36461 - DNA, 20 bp, Artificial Sequence
  chemically synthesized
aagtttaaactgtcattgag

SEQ ID NO: 36462 - DNA, 20 bp, Artificial Sequence
  chemically synthesized
gtttaaactgtcattgagca

SEQ ID NO: 36463 - DNA, 20 bp, Artificial Sequence
  chemically synthesized
attgagcagagtctgataat

SEQ ID NO: 36464 - DNA, 20 bp, Artificial Sequence
  chemically synthesized
ttgagcagagtctgataata

SEQ ID NO: 36465 - DNA, 20 bp, Artificial Sequence
  chemically synthesized
ataaggacactgtcaaatca

SEQ ID NO: 36466 - DNA, 20 bp, Artificial Sequence
  chemically synthesized
gacactgtcaaatcacagtt

SEQ ID NO: 36467 - DNA, 20 bp, Artificial Sequence
  chemically synthesized
cagttcagatgttatgtgat

SEQ ID NO: 36468 - DNA, 20 bp, Artificial Sequence
  chemically synthesized
agttcagatgttatgtgatg

SEQ ID NO: 36469 - DNA, 20 bp, Artificial Sequence
  chemically synthesized
cagatgttatgtgatgagga

SEQ ID NO: 36470 - DNA, 20 bp, Artificial Sequence
  chemically synthesized
gttatgtgatgaggacagaa

SEQ ID NO: 36471 - DNA, 20 bp, Artificial Sequence
  chemically synthesized
gaggacagaatagaacacat

SEQ ID NO: 36472 - DNA, 20 bp, Artificial Sequence
  chemically synthesized
aggacagaatagaacacatg

SEQ ID NO: 36473 - DNA, 20 bp, Artificial Sequence
  chemically synthesized
gacagaatagaacacatgag

SEQ ID NO: 36474 - DNA, 20 bp, Artificial Sequence
  chemically synthesized
acagaatagaacacatgagg

SEQ ID NO: 36475 - DNA, 20 bp, Artificial Sequence
  chemically synthesized
gaatagaacacatgaggagg

SEQ ID NO: 36476 - DNA, 20 bp, Artificial Sequence
  chemically synthesized
tagaacacatgaggaggaag

SEQ ID NO: 36477 - DNA, 20 bp, Artificial Sequence
  chemically synthesized
gaggaggaagcagaaacttc

SEQ ID NO: 36478 - DNA, 20 bp, Artificial Sequence
  chemically synthesized
ggaagcagaaacttctagac

SEQ ID NO: 36479 - DNA, 20 bp, Artificial Sequence
  chemically synthesized
cagaaacttctagactggac

SEQ ID NO: 36480 - DNA, 20 bp, Artificial Sequence
  chemically synthesized
acttctagactggacaagaa

SEQ ID NO: 36481 - DNA, 20 bp, Artificial Sequence
  chemically synthesized
aaccatccaacaataaatct

SEQ ID NO: 36482 - DNA, 20 bp, Artificial Sequence
  chemically synthesized
tgatgtcatctactacatct

SEQ ID NO: 36483 - DNA, 20 bp, Artificial Sequence
  chemically synthesized
ctaagtatttcctcaaattc

SEQ ID NO: 36484 - DNA, 20 bp, Artificial Sequence
  chemically synthesized
cctcaaattctggacaattt

SEQ ID NO: 36485 - DNA, 20 bp, Artificial Sequence
  chemically synthesized
aaccatcaaaattatttgtt

SEQ ID NO: 36486 - DNA, 20 bp, Artificial Sequence
  chemically synthesized
accatcaaaattatttgttg

SEQ ID NO: 36487 - DNA, 20 bp, Artificial Sequence
  chemically synthesized
ttgttgaggaaaaataaact

SEQ ID NO: 36488 - DNA, 20 bp, Artificial Sequence
  chemically synthesized
aataaacttagccaatttgc

SEQ ID NO: 36489 - DNA, 20 bp, Artificial Sequence
  chemically synthesized
ataaacttagccaatttgca

SEQ ID NO: 36490 - DNA, 20 bp, Artificial Sequence
  chemically synthesized
taaacttagccaatttgcaa

SEQ ID NO: 36491 - DNA, 20 bp, Artificial Sequence
  chemically synthesized
ttgcaagggcaactaaaatg

SEQ ID NO: 36492 - DNA, 20 bp, Artificial Sequence
  chemically synthesized
aaatgaagaacttttcttta

SEQ ID NO: 36493 - DNA, 20 bp, Artificial Sequence
  chemically synthesized
aagaacttttctttaaagtg

SEQ ID NO: 36494 - DNA, 20 bp, Artificial Sequence
  chemically synthesized
agaacttttctttaaagtgt

SEQ ID NO: 36495 - DNA, 20 bp, Artificial Sequence
  chemically synthesized
aacttttctttaaagtgtgg

SEQ ID NO: 36496 - DNA, 20 bp, Artificial Sequence
  chemically synthesized
aaagtgtgggagtcacatct

SEQ ID NO: 36497 - DNA, 20 bp, Artificial Sequence
  chemically synthesized
caacatatttaaatatatct

SEQ ID NO: 36498 - DNA, 20 bp, Artificial Sequence
  chemically synthesized
acaaaaatgcaaaatttcca

SEQ ID NO: 36499 - DNA, 20 bp, Artificial Sequence
  chemically synthesized
aaagaatttctcctcttctg

SEQ ID NO: 36500 - DNA, 20 bp, Artificial Sequence
  chemically synthesized
ttcttcatcttcatcttttc

SEQ ID NO: 36501 - DNA, 20 bp, Artificial Sequence
  chemically synthesized
tcttcatcttcatcttttcc

SEQ ID NO: 36502 - DNA, 20 bp, Artificial Sequence
  chemically synthesized
ttcatcttcatcttttccag

SEQ ID NO: 36503 - DNA, 20 bp, Artificial Sequence
  chemically synthesized
tttccaggagaatataccat

SEQ ID NO: 36504 - DNA, 20 bp, Artificial Sequence
  chemically synthesized
aatataccataagtttctga

SEQ ID NO: 36505 - DNA, 20 bp, Artificial Sequence
  chemically synthesized
ttctgatggtacacatttat

SEQ ID NO: 36506 - DNA, 20 bp, Artificial Sequence
  chemically synthesized
ttgcaactatgcatcttact

SEQ ID NO: 36507 - DNA, 20 bp, Artificial Sequence
  chemically synthesized
gcaactatgcatcttactca

SEQ ID NO: 36508 - DNA, 20 bp, Artificial Sequence
  chemically synthesized
cttaaaacatccttgtttgt

SEQ ID NO: 36509 - DNA, 20 bp, Artificial Sequence
  chemically synthesized
tttcaaattcatatacactt

SEQ ID NO: 36510 - DNA, 20 bp, Artificial Sequence
  chemically synthesized
caaattcatatacactttgg

SEQ ID NO: 36511 - DNA, 20 bp, Artificial Sequence
  chemically synthesized
gcaaacatttttatttgctg

SEQ ID NO: 36512 - DNA, 20 bp, Artificial Sequence
  chemically synthesized
ttttatttgctgaagaacat

SEQ ID NO: 36513 - DNA, 20 bp, Artificial Sequence
  chemically synthesized
tttatttgctgaagaacata

SEQ ID NO: 36514 - DNA, 20 bp, Artificial Sequence
  chemically synthesized
ttatttgctgaagaacataa

SEQ ID NO: 36515 - DNA, 20 bp, Artificial Sequence
  chemically synthesized
tatttgctgaagaacataag

SEQ ID NO: 36516 - DNA, 20 bp, Artificial Sequence
  chemically synthesized
atttgctgaagaacataagg

SEQ ID NO: 36517 - DNA, 20 bp, Artificial Sequence
  chemically synthesized
tgaagaacataagggggaaa

SEQ ID NO: 36518 - DNA, 20 bp, Artificial Sequence
  chemically synthesized
aagaacataagggggaaata

SEQ ID NO: 36519 - DNA, 20 bp, Artificial Sequence
  chemically synthesized
aaatagagattctttatttg

SEQ ID NO: 36520 - DNA, 20 bp, Artificial Sequence
  chemically synthesized
aagaaacaaatgatttgatt

SEQ ID NO: 36521 - DNA, 20 bp, Artificial Sequence
  chemically synthesized
agaaacaaatgatttgattt

SEQ ID NO: 36522 - DNA, 20 bp, Artificial Sequence
  chemically synthesized
gatttgggaaatgaaatgaa

SEQ ID NO: 36523 - DNA, 20 bp, Artificial Sequence
  chemically synthesized
atgaaatgaaaagaaaaaca

SEQ ID NO: 36524 - DNA, 20 bp, Artificial Sequence
  chemically synthesized
gctacttcttttactcatct

SEQ ID NO: 36525 - DNA, 20 bp, Artificial Sequence
  chemically synthesized
ctacttcttttactcatctg

SEQ ID NO: 36526 - DNA, 20 bp, Artificial Sequence
  chemically synthesized
ttttactcatctgaggcctt

SEQ ID NO: 36527 - DNA, 20 bp, Artificial Sequence
  chemically synthesized
actcatctgaggccttcaga

SEQ ID NO: 36528 - DNA, 20 bp, Artificial Sequence
  chemically synthesized
ccttcagatagtcccccata

SEQ ID NO: 36529 - DNA, 20 bp, Artificial Sequence
  chemically synthesized
gatagtcccccatatagcct

SEQ ID NO: 36530 - DNA, 20 bp, Artificial Sequence
  chemically synthesized
tagtcccccatatagcctta

SEQ ID NO: 36531 - DNA, 20 bp, Artificial Sequence
  chemically synthesized
aaaatatgattatgctcttt

SEQ ID NO: 36532 - DNA, 20 bp, Artificial Sequence
  chemically synthesized
attatgctctttcagtctat

SEQ ID NO: 36533 - DNA, 20 bp, Artificial Sequence
  chemically synthesized
ctattagaaataaaaacata

SEQ ID NO: 36534 - DNA, 20 bp, Artificial Sequence
  chemically synthesized
cataaagcttaaaaaatttc

SEQ ID NO: 36535 - DNA, 20 bp, Artificial Sequence
  chemically synthesized
ataaagcttaaaaaatttca

SEQ ID NO: 36536 - DNA, 20 bp, Artificial Sequence
  chemically synthesized
taaagcttaaaaaatttcaa

SEQ ID NO: 36537 - DNA, 20 bp, Artificial Sequence
  chemically synthesized
agcttaaaaaatttcaaggg

SEQ ID NO: 36538 - DNA, 20 bp, Artificial Sequence
  chemically synthesized
gcttaaaaaatttcaaggga

SEQ ID NO: 36539 - DNA, 20 bp, Artificial Sequence
  chemically synthesized
cttaaaaaatttcaagggaa

SEQ ID NO: 36540 - DNA, 20 bp, Artificial Sequence
  chemically synthesized
ttaaaaaatttcaagggaag

SEQ ID NO: 36541 - DNA, 20 bp, Artificial Sequence
  chemically synthesized
atttcaagggaaggggcttg

SEQ ID NO: 36542 - DNA, 20 bp, Artificial Sequence
  chemically synthesized
gggcttgaagattactgact

SEQ ID NO: 36543 - DNA, 20 bp, Artificial Sequence
  chemically synthesized
ggcttgaagattactgacta

SEQ ID NO: 36544 - DNA, 20 bp, Artificial Sequence
  chemically synthesized
gcttgaagattactgactaa

SEQ ID NO: 36545 - DNA, 20 bp, Artificial Sequence
  chemically synthesized
tgaagattactgactaaggg

SEQ ID NO: 36546 - DNA, 20 bp, Artificial Sequence
  chemically synthesized
tgacactcacctcctccaca

SEQ ID NO: 36547 - DNA, 20 bp, Artificial Sequence
  chemically synthesized
tcctccacaaagaaccaaaa

SEQ ID NO: 36548 - DNA, 20 bp, Artificial Sequence
  chemically synthesized
ccacaaagaaccaaaatagt

SEQ ID NO: 36549 - DNA, 20 bp, Artificial Sequence
  chemically synthesized
caaagaaccaaaatagtaag

SEQ ID NO: 36550 - DNA, 20 bp, Artificial Sequence
  chemically synthesized
gtaagtagaaaatcccacat

SEQ ID NO: 36551 - DNA, 20 bp, Artificial Sequence
  chemically synthesized
aagtagaaaatcccacataa

SEQ ID NO: 36552 - DNA, 20 bp, Artificial Sequence
  chemically synthesized
gtagaaaatcccacataaga

SEQ ID NO: 36553 - DNA, 20 bp, Artificial Sequence
  chemically synthesized
tcccacataagagagaattc

SEQ ID NO: 36554 - DNA, 20 bp, Artificial Sequence
  chemically synthesized
gagagaattctggaattcaa

SEQ ID NO: 36555 - DNA, 20 bp, Artificial Sequence
  chemically synthesized
gagaattctggaattcaaca

SEQ ID NO: 36556 - DNA, 20 bp, Artificial Sequence
  chemically synthesized
aattctggaattcaacagag

SEQ ID NO: 36557 - DNA, 20 bp, Artificial Sequence
  chemically synthesized
ggaattcaacagagaagtga

SEQ ID NO: 36558 - DNA, 20 bp, Artificial Sequence
  chemically synthesized
gaattcaacagagaagtgac

SEQ ID NO: 36559 - DNA, 20 bp, Artificial Sequence
  chemically synthesized
ttcaacagagaagtgacagg

SEQ ID NO: 36560 - DNA, 20 bp, Artificial Sequence
  chemically synthesized
agaagtgacaggaagcatct

SEQ ID NO: 36561 - DNA, 20 bp, Artificial Sequence
  chemically synthesized
gaagtgacaggaagcatcta

SEQ ID NO: 36562 - DNA, 20 bp, Artificial Sequence
  chemically synthesized
aggaagcatctaaggcaatg

SEQ ID NO: 36563 - DNA, 20 bp, Artificial Sequence
  chemically synthesized
ggaagcatctaaggcaatga

SEQ ID NO: 36564 - DNA, 20 bp, Artificial Sequence
  chemically synthesized
gaagcatctaaggcaatgaa

SEQ ID NO: 36565 - DNA, 20 bp, Artificial Sequence
  chemically synthesized
aagcatctaaggcaatgaag

SEQ ID NO: 36566 - DNA, 20 bp, Artificial Sequence
  chemically synthesized
gcatctaaggcaatgaaggg

SEQ ID NO: 36567 - DNA, 20 bp, Artificial Sequence
  chemically synthesized
catctaaggcaatgaagggg

SEQ ID NO: 36568 - DNA, 20 bp, Artificial Sequence
  chemically synthesized
atctaaggcaatgaagggga

SEQ ID NO: 36569 - DNA, 20 bp, Artificial Sequence
  chemically synthesized
taaggcaatgaaggggaggg

SEQ ID NO: 36570 - DNA, 20 bp, Artificial Sequence
  chemically synthesized
gcaatgaaggggagggaagc

SEQ ID NO: 36571 - DNA, 20 bp, Artificial Sequence
  chemically synthesized
caatgaaggggagggaagca

SEQ ID NO: 36572 - DNA, 20 bp, Artificial Sequence
  chemically synthesized
tgaaggggagggaagcaagg

SEQ ID NO: 36573 - DNA, 20 bp, Artificial Sequence
  chemically synthesized
gggaagcaaggaagcctacc

SEQ ID NO: 36574 - DNA, 20 bp, Artificial Sequence
  chemically synthesized
aagcaaggaagcctacccag

SEQ ID NO: 36575 - DNA, 20 bp, Artificial Sequence
  chemically synthesized
agcaaggaagcctacccagt

SEQ ID NO: 36576 - DNA, 20 bp, Artificial Sequence
  chemically synthesized
gcaaggaagcctacccagta

SEQ ID NO: 36577 - DNA, 20 bp, Artificial Sequence
  chemically synthesized
acccagtagggatcctctgt

SEQ ID NO: 36578 - DNA, 20 bp, Artificial Sequence
  chemically synthesized
cccagtagggatcctctgtg

SEQ ID NO: 36579 - DNA, 20 bp, Artificial Sequence
  chemically synthesized
gtagggatcctctgtgaggc

SEQ ID NO: 36580 - DNA, 20 bp, Artificial Sequence
  chemically synthesized
agggatcctctgtgaggcca

SEQ ID NO: 36581 - DNA, 20 bp, Artificial Sequence
  chemically synthesized
ggatcctctgtgaggccaga

SEQ ID NO: 36582 - DNA, 20 bp, Artificial Sequence
  chemically synthesized
gatcctctgtgaggccagag

SEQ ID NO: 36583 - DNA, 20 bp, Artificial Sequence
  chemically synthesized
gtgaggccagagaggctccc

SEQ ID NO: 36584 - DNA, 20 bp, Artificial Sequence
  chemically synthesized
gaggctccccagtgcatcga

SEQ ID NO: 36585 - DNA, 20 bp, Artificial Sequence
  chemically synthesized
tccccagtgcatcgaaagtt

SEQ ID NO: 36586 - DNA, 20 bp, Artificial Sequence
  chemically synthesized
aaagttaagtgactgactcc

SEQ ID NO: 36587 - DNA, 20 bp, Artificial Sequence
  chemically synthesized
gttaagtgactgactcccag

SEQ ID NO: 36588 - DNA, 20 bp, Artificial Sequence
  chemically synthesized
agtggtccacatctgcatta

SEQ ID NO: 36589 - DNA, 20 bp, Artificial Sequence
  chemically synthesized
cacatctgcattatggactc

SEQ ID NO: 36590 - DNA, 20 bp, Artificial Sequence
  chemically synthesized
acatctgcattatggactcc

SEQ ID NO: 36591 - DNA, 20 bp, Artificial Sequence
  chemically synthesized
attatggactccaggaatcc

SEQ ID NO: 36592 - DNA, 20 bp, Artificial Sequence
  chemically synthesized
gactccaggaatcctagcca

SEQ ID NO: 36593 - DNA, 20 bp, Artificial Sequence
  chemically synthesized
actccaggaatcctagccac

SEQ ID NO: 36594 - DNA, 20 bp, Artificial Sequence
  chemically synthesized
tccaggaatcctagccacag

SEQ ID NO: 36595 - DNA, 20 bp, Artificial Sequence
  chemically synthesized
caggaatcctagccacagga

SEQ ID NO: 36596 - DNA, 20 bp, Artificial Sequence
  chemically synthesized
aggagagtcccttgaccatg

SEQ ID NO: 36597 - DNA, 20 bp, Artificial Sequence
  chemically synthesized
ggagagtcccttgaccatgc

SEQ ID NO: 36598 - DNA, 20 bp, Artificial Sequence
  chemically synthesized
cccttgaccatgcaggcctt

SEQ ID NO: 36599 - DNA, 20 bp, Artificial Sequence
  chemically synthesized
gcaggccttgagactatcat

SEQ ID NO: 36600 - DNA, 20 bp, Artificial Sequence
  chemically synthesized
caggccttgagactatcata

SEQ ID NO: 36601 - DNA, 20 bp, Artificial Sequence
  chemically synthesized
gactatcataaggaactgcc

SEQ ID NO: 36602 - DNA, 20 bp, Artificial Sequence
  chemically synthesized
aactgcccagcaatcgcaca

SEQ ID NO: 36603 - DNA, 20 bp, Artificial Sequence
  chemically synthesized
actgcccagcaatcgcacaa

SEQ ID NO: 36604 - DNA, 20 bp, Artificial Sequence
  chemically synthesized
atcgcacaaaggcattgctc

SEQ ID NO: 36605 - DNA, 20 bp, Artificial Sequence
  chemically synthesized
cgcacaaaggcattgctcca

SEQ ID NO: 36606 - DNA, 20 bp, Artificial Sequence
  chemically synthesized
acaaaggcattgctccagag

SEQ ID NO: 36607 - DNA, 20 bp, Artificial Sequence
  chemically synthesized
caaaggcattgctccagaga

SEQ ID NO: 36608 - DNA, 20 bp, Artificial Sequence
  chemically synthesized
aaggcattgctccagagaag

SEQ ID NO: 36609 - DNA, 20 bp, Artificial Sequence
  chemically synthesized
tccagagaaggagctctcac

SEQ ID NO: 36610 - DNA, 20 bp, Artificial Sequence
  chemically synthesized
ccagagaaggagctctcact

SEQ ID NO: 36611 - DNA, 20 bp, Artificial Sequence
  chemically synthesized
cccctgccatccccattact

SEQ ID NO: 36612 - DNA, 20 bp, Artificial Sequence
  chemically synthesized
ctgccatccccattactgag

SEQ ID NO: 36613 - DNA, 20 bp, Artificial Sequence
  chemically synthesized
catccccattactgagcagc

SEQ ID NO: 36614 - DNA, 20 bp, Artificial Sequence
  chemically synthesized
atccccattactgagcagca

SEQ ID NO: 36615 - DNA, 20 bp, Artificial Sequence
  chemically synthesized
gagcagcaaggtgccatttt

SEQ ID NO: 36616 - DNA, 20 bp, Artificial Sequence
  chemically synthesized
gcagcaaggtgccattttga

SEQ ID NO: 36617 - DNA, 20 bp, Artificial Sequence
  chemically synthesized
tttgagagcccaacacccac

SEQ ID NO: 36618 - DNA, 20 bp, Artificial Sequence
  chemically synthesized
caccagatgacatcgttcct

SEQ ID NO: 36619 - DNA, 20 bp, Artificial Sequence
  chemically synthesized
tctgcatctctacatccctg

SEQ ID NO: 36620 - DNA, 20 bp, Artificial Sequence
  chemically synthesized
ctgctgacatcccccaccca

SEQ ID NO: 36621 - DNA, 20 bp, Artificial Sequence
  chemically synthesized
gacatcccccacccacagct

SEQ ID NO: 36622 - DNA, 20 bp, Artificial Sequence
  chemically synthesized
ccacagctgagtgctactgc

SEQ ID NO: 36623 - DNA, 20 bp, Artificial Sequence
  chemically synthesized
ctactgctggctgctgtcac

SEQ ID NO: 36624 - DNA, 20 bp, Artificial Sequence
  chemically synthesized
tactgctggctgctgtcacc

SEQ ID NO: 36625 - DNA, 20 bp, Artificial Sequence
  chemically synthesized
actgctggctgctgtcacca

SEQ ID NO: 36626 - DNA, 20 bp, Artificial Sequence
  chemically synthesized
ggctgctgtcaccagggata

SEQ ID NO: 36627 - DNA, 20 bp, Artificial Sequence
  chemically synthesized
ccagggataaagtgtgtcat

SEQ ID NO: 36628 - DNA, 20 bp, Artificial Sequence
  chemically synthesized
gggataaagtgtgtcattag

SEQ ID NO: 36629 - DNA, 20 bp, Artificial Sequence
  chemically synthesized
ataaagtgtgtcattagaag

SEQ ID NO: 36630 - DNA, 20 bp, Artificial Sequence
  chemically synthesized
gaagtggactcccccacccc

SEQ ID NO: 36631 - DNA, 20 bp, Artificial Sequence
  chemically synthesized
gtggactcccccacccccag

SEQ ID NO: 36632 - DNA, 20 bp, Artificial Sequence
  chemically synthesized
gactcccccacccccagtag

SEQ ID NO: 36633 - DNA, 20 bp, Artificial Sequence
  chemically synthesized
actcccccacccccagtagc

SEQ ID NO: 36634 - DNA, 20 bp, Artificial Sequence
  chemically synthesized
ctcccccacccccagtagca

SEQ ID NO: 36635 - DNA, 20 bp, Artificial Sequence
  chemically synthesized
cagggctgctacacatttat

SEQ ID NO: 36636 - DNA, 20 bp, Artificial Sequence
  chemically synthesized
tacacatttataagctccct

SEQ ID NO: 36637 - DNA, 20 bp, Artificial Sequence
  chemically synthesized
agaaaatgctaccccacttg

SEQ ID NO: 36638 - DNA, 20 bp, Artificial Sequence
  chemically synthesized
ccccacttgcagccaccatc

SEQ ID NO: 36639 - DNA, 20 bp, Artificial Sequence
  chemically synthesized
cccacttgcagccaccatct

SEQ ID NO: 36640 - DNA, 20 bp, Artificial Sequence
  chemically synthesized
ccacttgcagccaccatctg

SEQ ID NO: 36641 - DNA, 20 bp, Artificial Sequence
  chemically synthesized
gggctgaaacacatgcccac

SEQ ID NO: 36642 - DNA, 20 bp, Artificial Sequence
  chemically synthesized
gcccaccagcaacccattta

SEQ ID NO: 36643 - DNA, 20 bp, Artificial Sequence
  chemically synthesized
tttatagctgctgccactga

SEQ ID NO: 36644 - DNA, 20 bp, Artificial Sequence
  chemically synthesized
aacacaccccgcaccccttc

SEQ ID NO: 36645 - DNA, 20 bp, Artificial Sequence
  chemically synthesized
cacaccccgcaccccttcaa

SEQ ID NO: 36646 - DNA, 20 bp, Artificial Sequence
  chemically synthesized
accccgcaccccttcaagag

SEQ ID NO: 36647 - DNA, 20 bp, Artificial Sequence
  chemically synthesized
ccccgcaccccttcaagagc

SEQ ID NO: 36648 - DNA, 20 bp, Artificial Sequence
  chemically synthesized
cccgcaccccttcaagagca

SEQ ID NO: 36649 - DNA, 20 bp, Artificial Sequence
  chemically synthesized
tcaagagcagggcaacaatg

SEQ ID NO: 36650 - DNA, 20 bp, Artificial Sequence
  chemically synthesized
agagcagggcaacaatgcag

SEQ ID NO: 36651 - DNA, 20 bp, Artificial Sequence
  chemically synthesized
gcagtagctgctaattcact

SEQ ID NO: 36652 - DNA, 20 bp, Artificial Sequence
  chemically synthesized
cagtagctgctaattcactc

SEQ ID NO: 36653 - DNA, 20 bp, Artificial Sequence
  chemically synthesized
aattcactcaggcattctgc

SEQ ID NO: 36654 - DNA, 20 bp, Artificial Sequence
  chemically synthesized
attcactcaggcattctgct

SEQ ID NO: 36655 - DNA, 20 bp, Artificial Sequence
  chemically synthesized
ttcactcaggcattctgctg

SEQ ID NO: 36656 - DNA, 20 bp, Artificial Sequence
  chemically synthesized
tcactcaggcattctgctgg

SEQ ID NO: 36657 - DNA, 20 bp, Artificial Sequence
  chemically synthesized
aggcattctgctgggggcct

SEQ ID NO: 36658 - DNA, 20 bp, Artificial Sequence
  chemically synthesized
ggcattctgctgggggcctg

SEQ ID NO: 36659 - DNA, 20 bp, Artificial Sequence
  chemically synthesized
gcctgaggatcactccactc

SEQ ID NO: 36660 - DNA, 20 bp, Artificial Sequence
  chemically synthesized
cactccactccagcctatga

SEQ ID NO: 36661 - DNA, 20 bp, Artificial Sequence
  chemically synthesized
ccactccagcctatgatagc

SEQ ID NO: 36662 - DNA, 20 bp, Artificial Sequence
  chemically synthesized
cggtgtccacacacaccact

SEQ ID NO: 36663 - DNA, 20 bp, Artificial Sequence
  chemically synthesized
tgtccacacacaccactgag

SEQ ID NO: 36664 - DNA, 20 bp, Artificial Sequence
  chemically synthesized
cacacaccactgagtggcct

SEQ ID NO: 36665 - DNA, 20 bp, Artificial Sequence
  chemically synthesized
acacaccactgagtggcctg

SEQ ID NO: 36666 - DNA, 20 bp, Artificial Sequence
  chemically synthesized
accactgagtggcctgaggt

SEQ ID NO: 36667 - DNA, 20 bp, Artificial Sequence
  chemically synthesized
ccactgagtggcctgaggtc

SEQ ID NO: 36668 - DNA, 20 bp, Artificial Sequence
  chemically synthesized
ggcctgaggtcaggaacacc

SEQ ID NO: 36669 - DNA, 20 bp, Artificial Sequence
  chemically synthesized
gaggtcaggaacacccagcc

SEQ ID NO: 36670 - DNA, 20 bp, Artificial Sequence
  chemically synthesized
ctttgccttcctcaatgcct

SEQ ID NO: 36671 - DNA, 20 bp, Artificial Sequence
  chemically synthesized
gccttcctcaatgcctaagc

SEQ ID NO: 36672 - DNA, 20 bp, Artificial Sequence
  chemically synthesized
caatgcctaagcaagttgtc

SEQ ID NO: 36673 - DNA, 20 bp, Artificial Sequence
  chemically synthesized
aatgcctaagcaagttgtct

SEQ ID NO: 36674 - DNA, 20 bp, Artificial Sequence
  chemically synthesized
aagcaagttgtctgggaacc

SEQ ID NO: 36675 - DNA, 20 bp, Artificial Sequence
  chemically synthesized
gcaagttgtctgggaaccca

SEQ ID NO: 36676 - DNA, 20 bp, Artificial Sequence
  chemically synthesized
gttgtctgggaacccagaga

SEQ ID NO: 36677 - DNA, 20 bp, Artificial Sequence
  chemically synthesized
cttgtgccatccaccatgac

SEQ ID NO: 36678 - DNA, 20 bp, Artificial Sequence
  chemically synthesized
atccaccatgactggtacct

SEQ ID NO: 36679 - DNA, 20 bp, Artificial Sequence
  chemically synthesized
tggtacctaagcaaccctcc

SEQ ID NO: 36680 - DNA, 20 bp, Artificial Sequence
  chemically synthesized
tacctaagcaaccctcccag

SEQ ID NO: 36681 - DNA, 20 bp, Artificial Sequence
  chemically synthesized
ccctcccagaagcctgatga

SEQ ID NO: 36682 - DNA, 20 bp, Artificial Sequence
  chemically synthesized
cctcccagaagcctgatgat

SEQ ID NO: 36683 - DNA, 20 bp, Artificial Sequence
  chemically synthesized
tctgccactgccatcacaac

SEQ ID NO: 36684 - DNA, 20 bp, Artificial Sequence
  chemically synthesized
cctcctgcatgtgccacctg

SEQ ID NO: 36685 - DNA, 20 bp, Artificial Sequence
  chemically synthesized
ctcctgcatgtgccacctgt

SEQ ID NO: 36686 - DNA, 20 bp, Artificial Sequence
  chemically synthesized
atgtgccacctgtgggtctg

SEQ ID NO: 36687 - DNA, 20 bp, Artificial Sequence
  chemically synthesized
ccacctgtgggtctgaagac

SEQ ID NO: 36688 - DNA, 20 bp, Artificial Sequence
  chemically synthesized
ggtctgaagactggctcatt

SEQ ID NO: 36689 - DNA, 20 bp, Artificial Sequence
  chemically synthesized
actggctcattcagcccttg

SEQ ID NO: 36690 - DNA, 20 bp, Artificial Sequence
  chemically synthesized
cttgcagccaccaccaacac

SEQ ID NO: 36691 - DNA, 20 bp, Artificial Sequence
  chemically synthesized
agccaccaccaacaccagtg

SEQ ID NO: 36692 - DNA, 20 bp, Artificial Sequence
  chemically synthesized
caacaccagtgcagactgct

SEQ ID NO: 36693 - DNA, 20 bp, Artificial Sequence
  chemically synthesized
aacaccagtgcagactgctt

SEQ ID NO: 36694 - DNA, 20 bp, Artificial Sequence
  chemically synthesized
caccagtgcagactgcttgg

SEQ ID NO: 36695 - DNA, 20 bp, Artificial Sequence
  chemically synthesized
agtgcagactgcttgggagc

SEQ ID NO: 36696 - DNA, 20 bp, Artificial Sequence
  chemically synthesized
tgcagactgcttgggagcca

SEQ ID NO: 36697 - DNA, 20 bp, Artificial Sequence
  chemically synthesized
gcagactgcttgggagccag

SEQ ID NO: 36698 - DNA, 20 bp, Artificial Sequence
  chemically synthesized
cagactgcttgggagccaga

SEQ ID NO: 36699 - DNA, 20 bp, Artificial Sequence
  chemically synthesized
ggagccagagggttgtcctg

SEQ ID NO: 36700 - DNA, 20 bp, Artificial Sequence
  chemically synthesized
gggttgtcctgcagttgcta

SEQ ID NO: 36701 - DNA, 20 bp, Artificial Sequence
  chemically synthesized
cccacaccacacccactgtc

SEQ ID NO: 36702 - DNA, 20 bp, Artificial Sequence
  chemically synthesized
acaccacacccactgtccag

SEQ ID NO: 36703 - DNA, 20 bp, Artificial Sequence
  chemically synthesized
cacccactgtccagaagcct

SEQ ID NO: 36704 - DNA, 20 bp, Artificial Sequence
  chemically synthesized
acccactgtccagaagcctg

SEQ ID NO: 36705 - DNA, 20 bp, Artificial Sequence
  chemically synthesized
aagcctgaggacccacacac

SEQ ID NO: 36706 - DNA, 20 bp, Artificial Sequence
  chemically synthesized
tgaggacccacacaccagcc

SEQ ID NO: 36707 - DNA, 20 bp, Artificial Sequence
  chemically synthesized
cacaccagcccagtctacta

SEQ ID NO: 36708 - DNA, 20 bp, Artificial Sequence
  chemically synthesized
tatggccactactgacaccc

SEQ ID NO: 36709 - DNA, 20 bp, Artificial Sequence
  chemically synthesized
acacccaagcaaactgcctg

SEQ ID NO: 36710 - DNA, 20 bp, Artificial Sequence
  chemically synthesized
cacccaagcaaactgcctga

SEQ ID NO: 36711 - DNA, 20 bp, Artificial Sequence
  chemically synthesized
agcaaactgcctgaaggcca

SEQ ID NO: 36712 - DNA, 20 bp, Artificial Sequence
  chemically synthesized
ggccaaagaatcaacccaac

SEQ ID NO: 36713 - DNA, 20 bp, Artificial Sequence
  chemically synthesized
ccaactagactcattaccat

SEQ ID NO: 36714 - DNA, 20 bp, Artificial Sequence
  chemically synthesized
accatcagtgccaatgtaca

SEQ ID NO: 36715 - DNA, 20 bp, Artificial Sequence
  chemically synthesized
agtgccaatgtacacagcca

SEQ ID NO: 36716 - DNA, 20 bp, Artificial Sequence
  chemically synthesized
gtgccaatgtacacagccat

SEQ ID NO: 36717 - DNA, 20 bp, Artificial Sequence
  chemically synthesized
tgccaatgtacacagccatg

SEQ ID NO: 36718 - DNA, 20 bp, Artificial Sequence
  chemically synthesized
tgtacacagccatggggccc

SEQ ID NO: 36719 - DNA, 20 bp, Artificial Sequence
  chemically synthesized
gtacacagccatggggccca

SEQ ID NO: 36720 - DNA, 20 bp, Artificial Sequence
  chemically synthesized
acagccatggggcccaagga

SEQ ID NO: 36721 - DNA, 20 bp, Artificial Sequence
  chemically synthesized
cagccatggggcccaaggac

SEQ ID NO: 36722 - DNA, 20 bp, Artificial Sequence
  chemically synthesized
gggcccaaggacaggaatgc

SEQ ID NO: 36723 - DNA, 20 bp, Artificial Sequence
  chemically synthesized
ggcccaaggacaggaatgct

SEQ ID NO: 36724 - DNA, 20 bp, Artificial Sequence
  chemically synthesized
gctaggcccaccaccaccac

SEQ ID NO: 36725 - DNA, 20 bp, Artificial Sequence
  chemically synthesized
ctaggcccaccaccaccact

SEQ ID NO: 36726 - DNA, 20 bp, Artificial Sequence
  chemically synthesized
taggcccaccaccaccactg

SEQ ID NO: 36727 - DNA, 20 bp, Artificial Sequence
  chemically synthesized
ccaccaccaccactggggcc

SEQ ID NO: 36728 - DNA, 20 bp, Artificial Sequence
  chemically synthesized
caccaccaccactggggcca

SEQ ID NO: 36729 - DNA, 20 bp, Artificial Sequence
  chemically synthesized
ccaccactggggccaaggac

SEQ ID NO: 36730 - DNA, 20 bp, Artificial Sequence
  chemically synthesized
ccacttgatattcttgtctc

SEQ ID NO: 36731 - DNA, 20 bp, Artificial Sequence
  chemically synthesized
ttcactaacaaatgcaccct

SEQ ID NO: 36732 - DNA, 20 bp, Artificial Sequence
  chemically synthesized
ctaagccactgaaaaaatca

SEQ ID NO: 36733 - DNA, 20 bp, Artificial Sequence
  chemically synthesized
acagacactgatgatactgt

SEQ ID NO: 36734 - DNA, 20 bp, Artificial Sequence
  chemically synthesized
gacactgatgatactgttgg

SEQ ID NO: 36735 - DNA, 20 bp, Artificial Sequence
  chemically synthesized
agctgaaaaaaaataatatg

SEQ ID NO: 36736 - DNA, 20 bp, Artificial Sequence
  chemically synthesized
actatgctgctgtatgcacc

SEQ ID NO: 36737 - DNA, 20 bp, Artificial Sequence
  chemically synthesized
gcacctagaaatcaaaatca

SEQ ID NO: 36738 - DNA, 20 bp, Artificial Sequence
  chemically synthesized
tgccctactcaatcaacacc

SEQ ID NO: 36739 - DNA, 20 bp, Artificial Sequence
  chemically synthesized
tcaacaccaagatacatctt

SEQ ID NO: 36740 - DNA, 20 bp, Artificial Sequence
  chemically synthesized
caagatacatcttcagaaaa

SEQ ID NO: 36741 - DNA, 20 bp, Artificial Sequence
  chemically synthesized
caaaaacaaatttacaaaac

SEQ ID NO: 36742 - DNA, 20 bp, Artificial Sequence
  chemically synthesized
aaacaaatttacaaaactgg

SEQ ID NO: 36743 - DNA, 20 bp, Artificial Sequence
  chemically synthesized
caaatttacaaaactggaag

SEQ ID NO: 36744 - DNA, 20 bp, Artificial Sequence
  chemically synthesized
ggaagcagcaatcattacac

SEQ ID NO: 36745 - DNA, 20 bp, Artificial Sequence
  chemically synthesized
agcaatcattacaccagatg

SEQ ID NO: 36746 - DNA, 20 bp, Artificial Sequence
  chemically synthesized
caatcattacaccagatgca

SEQ ID NO: 36747 - DNA, 20 bp, Artificial Sequence
  chemically synthesized
agatgcagagatatcaatgc

SEQ ID NO: 36748 - DNA, 20 bp, Artificial Sequence
  chemically synthesized
aagaacaaaataaacataaa

SEQ ID NO: 36749 - DNA, 20 bp, Artificial Sequence
  chemically synthesized
agaacaaaataaacataaaa

SEQ ID NO: 36750 - DNA, 20 bp, Artificial Sequence
  chemically synthesized
aaaataaacataaaaaggtg

SEQ ID NO: 36751 - DNA, 20 bp, Artificial Sequence
  chemically synthesized
gaagaaatatgacacttcca

SEQ ID NO: 36752 - DNA, 20 bp, Artificial Sequence
  chemically synthesized
aagaaatatgacacttccaa

SEQ ID NO: 36753 - DNA, 20 bp, Artificial Sequence
  chemically synthesized
aaaggaatttaataattctt

SEQ ID NO: 36754 - DNA, 20 bp, Artificial Sequence
  chemically synthesized
taataattcttcagcaacat

SEQ ID NO: 36755 - DNA, 20 bp, Artificial Sequence
  chemically synthesized
aattcttcagcaacataagc

SEQ ID NO: 36756 - DNA, 20 bp, Artificial Sequence
  chemically synthesized
tcttcagcaacataagccag

SEQ ID NO: 36757 - DNA, 20 bp, Artificial Sequence
  chemically synthesized
acataagccagtggaaaaaa

SEQ ID NO: 36758 - DNA, 20 bp, Artificial Sequence
  chemically synthesized
aaaagacatttataaaattc

SEQ ID NO: 36759 - DNA, 20 bp, Artificial Sequence
  chemically synthesized
atttataaaattctggaaaa

SEQ ID NO: 36760 - DNA, 20 bp, Artificial Sequence
  chemically synthesized
gaatccaaaatgttgatatt

SEQ ID NO: 36761 - DNA, 20 bp, Artificial Sequence
  chemically synthesized
aatccaaaatgttgatatta

SEQ ID NO: 36762 - DNA, 20 bp, Artificial Sequence
  chemically synthesized
ccaaaatgttgatattaagg

SEQ ID NO: 36763 - DNA, 20 bp, Artificial Sequence
  chemically synthesized
atgttgatattaaggaagct

SEQ ID NO: 36764 - DNA, 20 bp, Artificial Sequence
  chemically synthesized
tgatattaaggaagctcagt

SEQ ID NO: 36765 - DNA, 20 bp, Artificial Sequence
  chemically synthesized
aaggaagctcagtgagacac

SEQ ID NO: 36766 - DNA, 20 bp, Artificial Sequence
  chemically synthesized
ggaagctcagtgagacacaa

SEQ ID NO: 36767 - DNA, 20 bp, Artificial Sequence
  chemically synthesized
cagtgagacacaagagaact

SEQ ID NO: 36768 - DNA, 20 bp, Artificial Sequence
  chemically synthesized
gaactcagataaacaataaa

SEQ ID NO: 36769 - DNA, 20 bp, Artificial Sequence
  chemically synthesized
gataaacaataaaaagaaat

SEQ ID NO: 36770 - DNA, 20 bp, Artificial Sequence
  chemically synthesized
aagaaatcagaaaaacaatt

SEQ ID NO: 36771 - DNA, 20 bp, Artificial Sequence
  chemically synthesized
agaaatcagaaaaacaattc

SEQ ID NO: 36772 - DNA, 20 bp, Artificial Sequence
  chemically synthesized
aaacaattcaggatatgaat

SEQ ID NO: 36773 - DNA, 20 bp, Artificial Sequence
  chemically synthesized
tatgaatgagaaatttaccc

SEQ ID NO: 36774 - DNA, 20 bp, Artificial Sequence
  chemically synthesized
tgaatgagaaatttacccaa

SEQ ID NO: 36775 - DNA, 20 bp, Artificial Sequence
  chemically synthesized
tgagaaatttacccaagaga

SEQ ID NO: 36776 - DNA, 20 bp, Artificial Sequence
  chemically synthesized
acccaagagatagatacaac

SEQ ID NO: 36777 - DNA, 20 bp, Artificial Sequence
  chemically synthesized
tacaacaagaatgaaccaaa

SEQ ID NO: 36778 - DNA, 20 bp, Artificial Sequence
  chemically synthesized
aaacagaaattctgtaactg

SEQ ID NO: 36779 - DNA, 20 bp, Artificial Sequence
  chemically synthesized
acagaaattctgtaactgaa

SEQ ID NO: 36780 - DNA, 20 bp, Artificial Sequence
  chemically synthesized
gtaactgaagagtttattga

SEQ ID NO: 36781 - DNA, 20 bp, Artificial Sequence
  chemically synthesized
acattcaaaaacttcaacaa

SEQ ID NO: 36782 - DNA, 20 bp, Artificial Sequence
  chemically synthesized
caaaaacttcaacaatagat

SEQ ID NO: 36783 - DNA, 20 bp, Artificial Sequence
  chemically synthesized
cttcaacaatagatcagatc

SEQ ID NO: 36784 - DNA, 20 bp, Artificial Sequence
  chemically synthesized
caacaatagatcagatcaag

SEQ ID NO: 36785 - DNA, 20 bp, Artificial Sequence
  chemically synthesized
caatagatcagatcaagcag

SEQ ID NO: 36786 - DNA, 20 bp, Artificial Sequence
  chemically synthesized
atcaagcagaagaaaaattt

SEQ ID NO: 36787 - DNA, 20 bp, Artificial Sequence
  chemically synthesized
aagaaaaatttcagaacttg

SEQ ID NO: 36788 - DNA, 20 bp, Artificial Sequence
  chemically synthesized
aaaatttcagaacttgaaga

SEQ ID NO: 36789 - DNA, 20 bp, Artificial Sequence
  chemically synthesized
aaatttcagaacttgaagac

SEQ ID NO: 36790 - DNA, 20 bp, Artificial Sequence
  chemically synthesized
gaagacaggtcttttaaaat

SEQ ID NO: 36791 - DNA, 20 bp, Artificial Sequence
  chemically synthesized
acaggtcttttaaaattagc

SEQ ID NO: 36792 - DNA, 20 bp, Artificial Sequence
  chemically synthesized
aaaattagctggtcaaatga

SEQ ID NO: 36793 - DNA, 20 bp, Artificial Sequence
  chemically synthesized
ttagctggtcaaatgataga

SEQ ID NO: 36794 - DNA, 20 bp, Artificial Sequence
  chemically synthesized
tagctggtcaaatgatagaa

SEQ ID NO: 36795 - DNA, 20 bp, Artificial Sequence
  chemically synthesized
aatgatagaaaggaaaaaaa

SEQ ID NO: 36796 - DNA, 20 bp, Artificial Sequence
  chemically synthesized
ggaaaaaaaaagaatgaaca

SEQ ID NO: 36797 - DNA, 20 bp, Artificial Sequence
  chemically synthesized
acaaagtgtatgtgacatat

SEQ ID NO: 36798 - DNA, 20 bp, Artificial Sequence
  chemically synthesized
caaagtgtatgtgacatatg

SEQ ID NO: 36799 - DNA, 20 bp, Artificial Sequence
  chemically synthesized
gtgacatatgaggcactata

SEQ ID NO: 36800 - DNA, 20 bp, Artificial Sequence
  chemically synthesized
tgaacaaatattcaaatttg

SEQ ID NO: 36801 - DNA, 20 bp, Artificial Sequence
  chemically synthesized
tattcaaatttgcagtttcc

SEQ ID NO: 36802 - DNA, 20 bp, Artificial Sequence
  chemically synthesized
tcaaatttgcagtttcccag

SEQ ID NO: 36803 - DNA, 20 bp, Artificial Sequence
  chemically synthesized
caaatttgcagtttcccaga

SEQ ID NO: 36804 - DNA, 20 bp, Artificial Sequence
  chemically synthesized
ttgcagtttcccagaaggta

SEQ ID NO: 36805 - DNA, 20 bp, Artificial Sequence
  chemically synthesized
gcagtttcccagaaggtaaa

SEQ ID NO: 36806 - DNA, 20 bp, Artificial Sequence
  chemically synthesized
agaaggtaaagagaacatga

SEQ ID NO: 36807 - DNA, 20 bp, Artificial Sequence
  chemically synthesized
gaaggtaaagagaacatgaa

SEQ ID NO: 36808 - DNA, 20 bp, Artificial Sequence
  chemically synthesized
taaagagaacatgaaaggtg

SEQ ID NO: 36809 - DNA, 20 bp, Artificial Sequence
  chemically synthesized
aaagagaacatgaaaggtgt

SEQ ID NO: 36810 - DNA, 20 bp, Artificial Sequence
  chemically synthesized
aaacctacgtaacaacacaa

SEQ ID NO: 36811 - DNA, 20 bp, Artificial Sequence
  chemically synthesized
acaatagctgaaaacttgtc

SEQ ID NO: 36812 - DNA, 20 bp, Artificial Sequence
  chemically synthesized
agctgaaaacttgtcaagtc

SEQ ID NO: 36813 - DNA, 20 bp, Artificial Sequence
  chemically synthesized
gaaaacttgtcaagtctagc

SEQ ID NO: 36814 - DNA, 20 bp, Artificial Sequence
  chemically synthesized
gtcaagtctagcaagaaatg

SEQ ID NO: 36815 - DNA, 20 bp, Artificial Sequence
  chemically synthesized
tagcaagaaatgtagacatc

SEQ ID NO: 36816 - DNA, 20 bp, Artificial Sequence
  chemically synthesized
acatccagacaaatgaaaat

SEQ ID NO: 36817 - DNA, 20 bp, Artificial Sequence
  chemically synthesized
cccaaataatataatgcaaa

SEQ ID NO: 36818 - DNA, 20 bp, Artificial Sequence
  chemically synthesized
atgcaaaaagctcttctcca

SEQ ID NO: 36819 - DNA, 20 bp, Artificial Sequence
  chemically synthesized
ctcttctccacagcacatta

SEQ ID NO: 36820 - DNA, 20 bp, Artificial Sequence
  chemically synthesized
cattatagtcaaactgtcaa

SEQ ID NO: 36821 - DNA, 20 bp, Artificial Sequence
  chemically synthesized
agtcaaactgtcaaaagcca

SEQ ID NO: 36822 - DNA, 20 bp, Artificial Sequence
  chemically synthesized
tcaaactgtcaaaagccaaa

SEQ ID NO: 36823 - DNA, 20 bp, Artificial Sequence
  chemically synthesized
actgtcaaaagccaaagagt

SEQ ID NO: 36824 - DNA, 20 bp, Artificial Sequence
  chemically synthesized
aaagagtaagaactctaaaa

SEQ ID NO: 36825 - DNA, 20 bp, Artificial Sequence
  chemically synthesized
agtaagaactctaaaacagc

SEQ ID NO: 36826 - DNA, 20 bp, Artificial Sequence
  chemically synthesized
aaaacagcaagcaaaatgtc

SEQ ID NO: 36827 - DNA, 20 bp, Artificial Sequence
  chemically synthesized
caaaatgtctagtcacttat

SEQ ID NO: 36828 - DNA, 20 bp, Artificial Sequence
  chemically synthesized
aaaatgtctagtcacttata

SEQ ID NO: 36829 - DNA, 20 bp, Artificial Sequence
  chemically synthesized
aaatgtctagtcacttataa

SEQ ID NO: 36830 - DNA, 20 bp, Artificial Sequence
  chemically synthesized
acttataagggaacttccac

SEQ ID NO: 36831 - DNA, 20 bp, Artificial Sequence
  chemically synthesized
gggaacttccacaagattaa

SEQ ID NO: 36832 - DNA, 20 bp, Artificial Sequence
  chemically synthesized
ccacaagattaacagattaa

SEQ ID NO: 36833 - DNA, 20 bp, Artificial Sequence
  chemically synthesized
caagattaacagattaacag

SEQ ID NO: 36834 - DNA, 20 bp, Artificial Sequence
  chemically synthesized
cagattaacagcagatttct

SEQ ID NO: 36835 - DNA, 20 bp, Artificial Sequence
  chemically synthesized
attaacagcagatttctcag

SEQ ID NO: 36836 - DNA, 20 bp, Artificial Sequence
  chemically synthesized
atttctcagcagaaacctca

SEQ ID NO: 36837 - DNA, 20 bp, Artificial Sequence
  chemically synthesized
tttctcagcagaaacctcac

SEQ ID NO: 36838 - DNA, 20 bp, Artificial Sequence
  chemically synthesized
tcagcagaaacctcacaggc

SEQ ID NO: 36839 - DNA, 20 bp, Artificial Sequence
  chemically synthesized
cagcagaaacctcacaggcc

SEQ ID NO: 36840 - DNA, 20 bp, Artificial Sequence
  chemically synthesized
gcagaaacctcacaggccag

SEQ ID NO: 36841 - DNA, 20 bp, Artificial Sequence
  chemically synthesized
gaaacctcacaggccaggag

SEQ ID NO: 36842 - DNA, 20 bp, Artificial Sequence
  chemically synthesized
cctcacaggccaggagaaga

SEQ ID NO: 36843 - DNA, 20 bp, Artificial Sequence
  chemically synthesized
ctcacaggccaggagaagat

SEQ ID NO: 36844 - DNA, 20 bp, Artificial Sequence
  chemically synthesized
atgggatgatatattcaaaa

SEQ ID NO: 36845 - DNA, 20 bp, Artificial Sequence
  chemically synthesized
tgatatattcaaaatagtga

SEQ ID NO: 36846 - DNA, 20 bp, Artificial Sequence
  chemically synthesized
tgaaagaaaaaaatgacacc

SEQ ID NO: 36847 - DNA, 20 bp, Artificial Sequence
  chemically synthesized
gaaagaaaaaaatgacacca

SEQ ID NO: 36848 - DNA, 20 bp, Artificial Sequence
  chemically synthesized
gacaccaaggatgttatacc

SEQ ID NO: 36849 - DNA, 20 bp, Artificial Sequence
  chemically synthesized
aacattgttcttcaaaaatg

SEQ ID NO: 36850 - DNA, 20 bp, Artificial Sequence
  chemically synthesized
acattgttcttcaaaaatga

SEQ ID NO: 36851 - DNA, 20 bp, Artificial Sequence
  chemically synthesized
aggataaataaaatcttttc

SEQ ID NO: 36852 - DNA, 20 bp, Artificial Sequence
  chemically synthesized
ggataaataaaatcttttct

SEQ ID NO: 36853 - DNA, 20 bp, Artificial Sequence
  chemically synthesized
aaataaaatcttttctgggc

SEQ ID NO: 36854 - DNA, 20 bp, Artificial Sequence
  chemically synthesized
ttctgggcaagaaaaatttg

SEQ ID NO: 36855 - DNA, 20 bp, Artificial Sequence
  chemically synthesized
tctgggcaagaaaaatttga

SEQ ID NO: 36856 - DNA, 20 bp, Artificial Sequence
  chemically synthesized
ttgaaggaattcactatcac

SEQ ID NO: 36857 - DNA, 20 bp, Artificial Sequence
  chemically synthesized
ggaattcactatcactagac

SEQ ID NO: 36858 - DNA, 20 bp, Artificial Sequence
  chemically synthesized
tatcactagactggctttac

SEQ ID NO: 36859 - DNA, 20 bp, Artificial Sequence
  chemically synthesized
tggctttacaagaaatattt

SEQ ID NO: 36860 - DNA, 20 bp, Artificial Sequence
  chemically synthesized
ggctttacaagaaatattta

SEQ ID NO: 36861 - DNA, 20 bp, Artificial Sequence
  chemically synthesized
gctttacaagaaatatttaa

SEQ ID NO: 36862 - DNA, 20 bp, Artificial Sequence
  chemically synthesized
tttacaagaaatatttaagg

SEQ ID NO: 36863 - DNA, 20 bp, Artificial Sequence
  chemically synthesized
taagggagtcctacacatga

SEQ ID NO: 36864 - DNA, 20 bp, Artificial Sequence
  chemically synthesized
agtcctacacatgaaagtga

SEQ ID NO: 36865 - DNA, 20 bp, Artificial Sequence
  chemically synthesized
gtcctacacatgaaagtgac

SEQ ID NO: 36866 - DNA, 20 bp, Artificial Sequence
  chemically synthesized
gacaggacactgccattatg

SEQ ID NO: 36867 - DNA, 20 bp, Artificial Sequence
  chemically synthesized
tgccattatgaagacacaca

SEQ ID NO: 36868 - DNA, 20 bp, Artificial Sequence
  chemically synthesized
gccattatgaagacacacaa

SEQ ID NO: 36869 - DNA, 20 bp, Artificial Sequence
  chemically synthesized
cacaaaggtatacaactaac

SEQ ID NO: 36870 - DNA, 20 bp, Artificial Sequence
  chemically synthesized
aaaggtatacaactaactgg

SEQ ID NO: 36871 - DNA, 20 bp, Artificial Sequence
  chemically synthesized
aggtatacaactaactggta

SEQ ID NO: 36872 - DNA, 20 bp, Artificial Sequence
  chemically synthesized
ggtagagcaaaacacaaata

SEQ ID NO: 36873 - DNA, 20 bp, Artificial Sequence
  chemically synthesized
agagcaaaacacaaataaag

SEQ ID NO: 36874 - DNA, 20 bp, Artificial Sequence
  chemically synthesized
agcaaaacacaaataaagaa

SEQ ID NO: 36875 - DNA, 20 bp, Artificial Sequence
  chemically synthesized
aaacacaaataaagaagaga

SEQ ID NO: 36876 - DNA, 20 bp, Artificial Sequence
  chemically synthesized
gaactcaaacgttaccacta

SEQ ID NO: 36877 - DNA, 20 bp, Artificial Sequence
  chemically synthesized
aaaccacaatcataaataat

SEQ ID NO: 36878 - DNA, 20 bp, Artificial Sequence
  chemically synthesized
cacaatcataaataataaga

SEQ ID NO: 36879 - DNA, 20 bp, Artificial Sequence
  chemically synthesized
atcataaataataagaaaga

SEQ ID NO: 36880 - DNA, 20 bp, Artificial Sequence
  chemically synthesized
taaataataagaaagaaaga

SEQ ID NO: 36881 - DNA, 20 bp, Artificial Sequence
  chemically synthesized
taataagaaagaaagaaaga

SEQ ID NO: 36882 - DNA, 20 bp, Artificial Sequence
  chemically synthesized
aagaaagaaagaaagaaaga

SEQ ID NO: 36883 - DNA, 20 bp, Artificial Sequence
  chemically synthesized
gaaagaaagaaagaaagaaa

SEQ ID NO: 36884 - DNA, 20 bp, Artificial Sequence
  chemically synthesized
aagaaagaaagaaagaaaga

SEQ ID NO: 36885 - DNA, 20 bp, Artificial Sequence
  chemically synthesized
gaaagaaagaaagaaagaga

SEQ ID NO: 36886 - DNA, 20 bp, Artificial Sequence
  chemically synthesized
aagaaagaaagaaagagaga

SEQ ID NO: 36887 - DNA, 20 bp, Artificial Sequence
  chemically synthesized
gaaagaaagaaagagagaga

SEQ ID NO: 36888 - DNA, 20 bp, Artificial Sequence
  chemically synthesized
aagaaagaaagagagagaga

SEQ ID NO: 36889 - DNA, 20 bp, Artificial Sequence
  chemically synthesized
gaaagaaagagagagagaga

SEQ ID NO: 36890 - DNA, 20 bp, Artificial Sequence
  chemically synthesized
gagagagagagagagaatga

SEQ ID NO: 36891 - DNA, 20 bp, Artificial Sequence
  chemically synthesized
gagagagagagaatgaaaga

SEQ ID NO: 36892 - DNA, 20 bp, Artificial Sequence
  chemically synthesized
agagagaatgaaagaaagaa

SEQ ID NO: 36893 - DNA, 20 bp, Artificial Sequence
  chemically synthesized
gagagaatgaaagaaagaaa

SEQ ID NO: 36894 - DNA, 20 bp, Artificial Sequence
  chemically synthesized
agaatgaaagaaagaaaagg

SEQ ID NO: 36895 - DNA, 20 bp, Artificial Sequence
  chemically synthesized
gaatgaaagaaagaaaagga

SEQ ID NO: 36896 - DNA, 20 bp, Artificial Sequence
  chemically synthesized
tgaaagaaagaaaaggaagg

SEQ ID NO: 36897 - DNA, 20 bp, Artificial Sequence
  chemically synthesized
gaaagaaagaaaaggaagga

SEQ ID NO: 36898 - DNA, 20 bp, Artificial Sequence
  chemically synthesized
agaaagaaaaggaaggaagg

SEQ ID NO: 36899 - DNA, 20 bp, Artificial Sequence
  chemically synthesized
taaaaaaaaaacaaaacaac

SEQ ID NO: 36900 - DNA, 20 bp, Artificial Sequence
  chemically synthesized
aaaaaaaaaacaaaacaacc

SEQ ID NO: 36901 - DNA, 20 bp, Artificial Sequence
  chemically synthesized
ccaggaatcaattaacaaaa

SEQ ID NO: 36902 - DNA, 20 bp, Artificial Sequence
  chemically synthesized
ggaatcaattaacaaaatgg

SEQ ID NO: 36903 - DNA, 20 bp, Artificial Sequence
  chemically synthesized
gaatcaattaacaaaatggc

SEQ ID NO: 36904 - DNA, 20 bp, Artificial Sequence
  chemically synthesized
attaacaaaatggcaggaat

SEQ ID NO: 36905 - DNA, 20 bp, Artificial Sequence
  chemically synthesized
aagctctcacatgtcaataa

SEQ ID NO: 36906 - DNA, 20 bp, Artificial Sequence
  chemically synthesized
ataatagccttgcatgtaaa

SEQ ID NO: 36907 - DNA, 20 bp, Artificial Sequence
  chemically synthesized
tggattaaattgttacttga

SEQ ID NO: 36908 - DNA, 20 bp, Artificial Sequence
  chemically synthesized
aaattgttacttgaaagata

SEQ ID NO: 36909 - DNA, 20 bp, Artificial Sequence
  chemically synthesized
gttacttgaaagatatagac

SEQ ID NO: 36910 - DNA, 20 bp, Artificial Sequence
  chemically synthesized
aaagatatagactggctaaa

SEQ ID NO: 36911 - DNA, 20 bp, Artificial Sequence
  chemically synthesized
tttaaaacaaaaatatgacc

SEQ ID NO: 36912 - DNA, 20 bp, Artificial Sequence
  chemically synthesized
caaaaatatgacccagttgt

SEQ ID NO: 36913 - DNA, 20 bp, Artificial Sequence
  chemically synthesized
cccagttgtaagctgcctat

SEQ ID NO: 36914 - DNA, 20 bp, Artificial Sequence
  chemically synthesized
agaaacttatctcacttgta

SEQ ID NO: 36915 - DNA, 20 bp, Artificial Sequence
  chemically synthesized
ctcacttgtaaagataaata

SEQ ID NO: 36916 - DNA, 20 bp, Artificial Sequence
  chemically synthesized
taaagataaatatagactga

SEQ ID NO: 36917 - DNA, 20 bp, Artificial Sequence
  chemically synthesized
aaatatagactgaaagtaaa

SEQ ID NO: 36918 - DNA, 20 bp, Artificial Sequence
  chemically synthesized
gactgaaagtaaaaagatga

SEQ ID NO: 36919 - DNA, 20 bp, Artificial Sequence
  chemically synthesized
gatgaaagatcttccataca

SEQ ID NO: 36920 - DNA, 20 bp, Artificial Sequence
  chemically synthesized
tgaaagatcttccatacaaa

SEQ ID NO: 36921 - DNA, 20 bp, Artificial Sequence
  chemically synthesized
tacaaagagaaaccaaaaat

SEQ ID NO: 36922 - DNA, 20 bp, Artificial Sequence
  chemically synthesized
gagaaaccaaaaatgagcaa

SEQ ID NO: 36923 - DNA, 20 bp, Artificial Sequence
  chemically synthesized
aaaccaaaaatgagcaaaag

SEQ ID NO: 36924 - DNA, 20 bp, Artificial Sequence
  chemically synthesized
aaaagtagttatacctataa

SEQ ID NO: 36925 - DNA, 20 bp, Artificial Sequence
  chemically synthesized
gactttaaataaaaaacact

SEQ ID NO: 36926 - DNA, 20 bp, Artificial Sequence
  chemically synthesized
ctttaaataaaaaacactaa

SEQ ID NO: 36927 - DNA, 20 bp, Artificial Sequence
  chemically synthesized
taaaaaacactaagagacaa

SEQ ID NO: 36928 - DNA, 20 bp, Artificial Sequence
  chemically synthesized
aagtcattacataatgataa

SEQ ID NO: 36929 - DNA, 20 bp, Artificial Sequence
  chemically synthesized
agtcattacataatgataaa

SEQ ID NO: 36930 - DNA, 20 bp, Artificial Sequence
  chemically synthesized
taatgataaaaggaacaatt

SEQ ID NO: 36931 - DNA, 20 bp, Artificial Sequence
  chemically synthesized
gataaaaggaacaattcagc

SEQ ID NO: 36932 - DNA, 20 bp, Artificial Sequence
  chemically synthesized
taaaaggaacaattcagcaa

SEQ ID NO: 36933 - DNA, 20 bp, Artificial Sequence
  chemically synthesized
taaacattcacactcaacac

SEQ ID NO: 36934 - DNA, 20 bp, Artificial Sequence
  chemically synthesized
aacattcacactcaacacca

SEQ ID NO: 36935 - DNA, 20 bp, Artificial Sequence
  chemically synthesized
acactcaacaccagagcatc

SEQ ID NO: 36936 - DNA, 20 bp, Artificial Sequence
  chemically synthesized
ccagagcatccagatatgta

SEQ ID NO: 36937 - DNA, 20 bp, Artificial Sequence
  chemically synthesized
atatgtaaagcaaatgttat

SEQ ID NO: 36938 - DNA, 20 bp, Artificial Sequence
  chemically synthesized
agcaaatgttattagatata

SEQ ID NO: 36939 - DNA, 20 bp, Artificial Sequence
  chemically synthesized
gcaaatgttattagatataa

SEQ ID NO: 36940 - DNA, 20 bp, Artificial Sequence
  chemically synthesized
caaatgttattagatataaa

SEQ ID NO: 36941 - DNA, 20 bp, Artificial Sequence
  chemically synthesized
attagatataaagggtgaaa

SEQ ID NO: 36942 - DNA, 20 bp, Artificial Sequence
  chemically synthesized
aatagaatccaatacaataa

SEQ ID NO: 36943 - DNA, 20 bp, Artificial Sequence
  chemically synthesized
gaatccaatacaataatagt

SEQ ID NO: 36944 - DNA, 20 bp, Artificial Sequence
  chemically synthesized
aatccaatacaataatagtt

SEQ ID NO: 36945 - DNA, 20 bp, Artificial Sequence
  chemically synthesized
atccaatacaataatagttg

SEQ ID NO: 36946 - DNA, 20 bp, Artificial Sequence
  chemically synthesized
ggatttcaacattctaatct

SEQ ID NO: 36947 - DNA, 20 bp, Artificial Sequence
  chemically synthesized
caacattctaatctcagcat

SEQ ID NO: 36948 - DNA, 20 bp, Artificial Sequence
  chemically synthesized
attctaatctcagcatcaga

SEQ ID NO: 36949 - DNA, 20 bp, Artificial Sequence
  chemically synthesized
tcagcatcagatagatcatc

SEQ ID NO: 36950 - DNA, 20 bp, Artificial Sequence
  chemically synthesized
catcagatagatcatctaga

SEQ ID NO: 36951 - DNA, 20 bp, Artificial Sequence
  chemically synthesized
atctagacagaaaattaaca

SEQ ID NO: 36952 - DNA, 20 bp, Artificial Sequence
  chemically synthesized
gaaaattaacaaagaaacat

SEQ ID NO: 36953 - DNA, 20 bp, Artificial Sequence
  chemically synthesized
attggatttaaacttgactt

SEQ ID NO: 36954 - DNA, 20 bp, Artificial Sequence
  chemically synthesized
aaacttgactttagaccaaa

SEQ ID NO: 36955 - DNA, 20 bp, Artificial Sequence
  chemically synthesized
ttacacaatatttcatccaa

SEQ ID NO: 36956 - DNA, 20 bp, Artificial Sequence
  chemically synthesized
aatatttcatccaacagcta

SEQ ID NO: 36957 - DNA, 20 bp, Artificial Sequence
  chemically synthesized
acagaatatatttatctcat

SEQ ID NO: 36958 - DNA, 20 bp, Artificial Sequence
  chemically synthesized
tcagcacatgacgcattccc

SEQ ID NO: 36959 - DNA, 20 bp, Artificial Sequence
  chemically synthesized
cagcacatgacgcattcccc

SEQ ID NO: 36960 - DNA, 20 bp, Artificial Sequence
  chemically synthesized
ccccaggatacaccatatgt

SEQ ID NO: 36961 - DNA, 20 bp, Artificial Sequence
  chemically synthesized
caccatatgttagaacacaa

SEQ ID NO: 36962 - DNA, 20 bp, Artificial Sequence
  chemically synthesized
catatgttagaacacaaaag

SEQ ID NO: 36963 - DNA, 20 bp, Artificial Sequence
  chemically synthesized
gaaatatttgaaatcatatt

SEQ ID NO: 36964 - DNA, 20 bp, Artificial Sequence
  chemically synthesized
aatcatattaagcatcttct

SEQ ID NO: 36965 - DNA, 20 bp, Artificial Sequence
  chemically synthesized
agcatcttctcagaccacaa

SEQ ID NO: 36966 - DNA, 20 bp, Artificial Sequence
  chemically synthesized
agaccacaatggaataaaac

SEQ ID NO: 36967 - DNA, 20 bp, Artificial Sequence
  chemically synthesized
taaaactagaaatcaataac

SEQ ID NO: 36968 - DNA, 20 bp, Artificial Sequence
  chemically synthesized
ttaaaacctatacaaataca

SEQ ID NO: 36969 - DNA, 20 bp, Artificial Sequence
  chemically synthesized
tcctgaatgaacgttatgtc

SEQ ID NO: 36970 - DNA, 20 bp, Artificial Sequence
  chemically synthesized
tgaatgaacgttatgtcaag

SEQ ID NO: 36971 - DNA, 20 bp, Artificial Sequence
  chemically synthesized
gttatgtcaagaagaaaatt

SEQ ID NO: 36972 - DNA, 20 bp, Artificial Sequence
  chemically synthesized
atgtcaagaagaaaattaag

SEQ ID NO: 36973 - DNA, 20 bp, Artificial Sequence
  chemically synthesized
tgtcaagaagaaaattaaga

SEQ ID NO: 36974 - DNA, 20 bp, Artificial Sequence
  chemically synthesized
atgaaaattgaaatacaaca

SEQ ID NO: 36975 - DNA, 20 bp, Artificial Sequence
  chemically synthesized
tgaaaattgaaatacaacat

SEQ ID NO: 36976 - DNA, 20 bp, Artificial Sequence
  chemically synthesized
attgaaatacaacataggaa

SEQ ID NO: 36977 - DNA, 20 bp, Artificial Sequence
  chemically synthesized
atacaacataggaaaagcca

SEQ ID NO: 36978 - DNA, 20 bp, Artificial Sequence
  chemically synthesized
tacaacataggaaaagccat

SEQ ID NO: 36979 - DNA, 20 bp, Artificial Sequence
  chemically synthesized
ataggaaaagccatgggata

SEQ ID NO: 36980 - DNA, 20 bp, Artificial Sequence
  chemically synthesized
aaagccatgggatacagcaa

SEQ ID NO: 36981 - DNA, 20 bp, Artificial Sequence
  chemically synthesized
gccatgggatacagcaaaag

SEQ ID NO: 36982 - DNA, 20 bp, Artificial Sequence
  chemically synthesized
gatacagcaaaagcagtgct

SEQ ID NO: 36983 - DNA, 20 bp, Artificial Sequence
  chemically synthesized
tacagcaaaagcagtgctaa

SEQ ID NO: 36984 - DNA, 20 bp, Artificial Sequence
  chemically synthesized
cagcaaaagcagtgctaaga

SEQ ID NO: 36985 - DNA, 20 bp, Artificial Sequence
  chemically synthesized
caaaagcagtgctaagagag

SEQ ID NO: 36986 - DNA, 20 bp, Artificial Sequence
  chemically synthesized
aaacacttaaattaaaaaca

SEQ ID NO: 36987 - DNA, 20 bp, Artificial Sequence
  chemically synthesized
acttaaattaaaaacataga

SEQ ID NO: 36988 - DNA, 20 bp, Artificial Sequence
  chemically synthesized
atctaatcatgtacctcaac

SEQ ID NO: 36989 - DNA, 20 bp, Artificial Sequence
  chemically synthesized
aatcatgtacctcaacaagc

SEQ ID NO: 36990 - DNA, 20 bp, Artificial Sequence
  chemically synthesized
tgtacctcaacaagctagaa

SEQ ID NO: 36991 - DNA, 20 bp, Artificial Sequence
  chemically synthesized
cctcaacaagctagaaaagc

SEQ ID NO: 36992 - DNA, 20 bp, Artificial Sequence
  chemically synthesized
gcaagaacaaaacccaaaac

SEQ ID NO: 36993 - DNA, 20 bp, Artificial Sequence
  chemically synthesized
agaacaaaacccaaaactag

SEQ ID NO: 36994 - DNA, 20 bp, Artificial Sequence
  chemically synthesized
acaaaacccaaaactagcag

SEQ ID NO: 36995 - DNA, 20 bp, Artificial Sequence
  chemically synthesized
caaaacccaaaactagcaga

SEQ ID NO: 36996 - DNA, 20 bp, Artificial Sequence
  chemically synthesized
acccaaaactagcagaagga

SEQ ID NO: 36997 - DNA, 20 bp, Artificial Sequence
  chemically synthesized
gcagaaggaaagaaaaaatg

SEQ ID NO: 36998 - DNA, 20 bp, Artificial Sequence
  chemically synthesized
aggaaagaaaaaatgaagaa

SEQ ID NO: 36999 - DNA, 20 bp, Artificial Sequence
  chemically synthesized
aaagaaaaaatgaagaacag

SEQ ID NO: 37000 - DNA, 20 bp, Artificial Sequence
  chemically synthesized
aacagaagaacttaatgaaa

SEQ ID NO: 37001 - DNA, 20 bp, Artificial Sequence
  chemically synthesized
cagaagaacttaatgaaata

SEQ ID NO: 37002 - DNA, 20 bp, Artificial Sequence
  chemically synthesized
aaatagagaaaaacaacaac

SEQ ID NO: 37003 - DNA, 20 bp, Artificial Sequence
  chemically synthesized
aatagagaaaaacaacaaca

SEQ ID NO: 37004 - DNA, 20 bp, Artificial Sequence
  chemically synthesized
atagagaaaaacaacaacaa

SEQ ID NO: 37005 - DNA, 20 bp, Artificial Sequence
  chemically synthesized
gaaaaacaacaacaagggat

SEQ ID NO: 37006 - DNA, 20 bp, Artificial Sequence
  chemically synthesized
caagggattagcaaaatgaa

SEQ ID NO: 37007 - DNA, 20 bp, Artificial Sequence
  chemically synthesized
tgaaaagttgttatttaaaa

SEQ ID NO: 37008 - DNA, 20 bp, Artificial Sequence
  chemically synthesized
gttatttaaaaaagataaaa

SEQ ID NO: 37009 - DNA, 20 bp, Artificial Sequence
  chemically synthesized
taaaaaagataaaatggata

SEQ ID NO: 37010 - DNA, 20 bp, Artificial Sequence
  chemically synthesized
agataaaatggatatagctc

SEQ ID NO: 37011 - DNA, 20 bp, Artificial Sequence
  chemically synthesized
aaaatggatatagctctagc

SEQ ID NO: 37012 - DNA, 20 bp, Artificial Sequence
  chemically synthesized
tagctctagctagactaacc

SEQ ID NO: 37013 - DNA, 20 bp, Artificial Sequence
  chemically synthesized
tagctagactaaccaagaaa

SEQ ID NO: 37014 - DNA, 20 bp, Artificial Sequence
  chemically synthesized
gctagactaaccaagaaaaa

SEQ ID NO: 37015 - DNA, 20 bp, Artificial Sequence
  chemically synthesized
agactaaccaagaaaaagag

SEQ ID NO: 37016 - DNA, 20 bp, Artificial Sequence
  chemically synthesized
actaaccaagaaaaagagaa

SEQ ID NO: 37017 - DNA, 20 bp, Artificial Sequence
  chemically synthesized
aaagagaagagactgaaata

SEQ ID NO: 37018 - DNA, 20 bp, Artificial Sequence
  chemically synthesized
gagactgaaataaagaaaat

SEQ ID NO: 37019 - DNA, 20 bp, Artificial Sequence
  chemically synthesized
aaagaaaatcagaaataaaa

SEQ ID NO: 37020 - DNA, 20 bp, Artificial Sequence
  chemically synthesized
atatattacaaccgatacca

SEQ ID NO: 37021 - DNA, 20 bp, Artificial Sequence
  chemically synthesized
tacaaccgataccacagaaa

SEQ ID NO: 37022 - DNA, 20 bp, Artificial Sequence
  chemically synthesized
ccgataccacagaaatagaa

SEQ ID NO: 37023 - DNA, 20 bp, Artificial Sequence
  chemically synthesized
acagaaatagaaaagattat

SEQ ID NO: 37024 - DNA, 20 bp, Artificial Sequence
  chemically synthesized
agaaatagaaaagattatca

SEQ ID NO: 37025 - DNA, 20 bp, Artificial Sequence
  chemically synthesized
cactaaaaaactgaaaaatc

SEQ ID NO: 37026 - DNA, 20 bp, Artificial Sequence
  chemically synthesized
ctaaaaaactgaaaaatcta

SEQ ID NO: 37027 - DNA, 20 bp, Artificial Sequence
  chemically synthesized
taaaaaactgaaaaatctag

SEQ ID NO: 37028 - DNA, 20 bp, Artificial Sequence
  chemically synthesized
agaggaaattaataaatttc

SEQ ID NO: 37029 - DNA, 20 bp, Artificial Sequence
  chemically synthesized
ctggacacataccacctacc

SEQ ID NO: 37030 - DNA, 20 bp, Artificial Sequence
  chemically synthesized
ccacctaccaagattgaatt

SEQ ID NO: 37031 - DNA, 20 bp, Artificial Sequence
  chemically synthesized
ctaccaagattgaattaaga

SEQ ID NO: 37032 - DNA, 20 bp, Artificial Sequence
  chemically synthesized
aagattgaattaagaaagaa

SEQ ID NO: 37033 - DNA, 20 bp, Artificial Sequence
  chemically synthesized
gaaagaatagaaaacctgaa

SEQ ID NO: 37034 - DNA, 20 bp, Artificial Sequence
  chemically synthesized
aatagaaaacctgaacagac

SEQ ID NO: 37035 - DNA, 20 bp, Artificial Sequence
  chemically synthesized
aatgaataatgaaattgaat

SEQ ID NO: 37036 - DNA, 20 bp, Artificial Sequence
  chemically synthesized
gaataatgaaattgaatcag

SEQ ID NO: 37037 - DNA, 20 bp, Artificial Sequence
  chemically synthesized
gaaattgaatcagtagtaaa

SEQ ID NO: 37038 - DNA, 20 bp, Artificial Sequence
  chemically synthesized
tagtaaaaagtctcccaaaa

SEQ ID NO: 37039 - DNA, 20 bp, Artificial Sequence
  chemically synthesized
ctcccaaaaaagaaaatttc

SEQ ID NO: 37040 - DNA, 20 bp, Artificial Sequence
  chemically synthesized
aaaaaagaaaatttcaagac

SEQ ID NO: 37041 - DNA, 20 bp, Artificial Sequence
  chemically synthesized
aagaaaatttcaagaccaga

SEQ ID NO: 37042 - DNA, 20 bp, Artificial Sequence
  chemically synthesized
caaattttaccaaactttca

SEQ ID NO: 37043 - DNA, 20 bp, Artificial Sequence
  chemically synthesized
aactttcaaagaaaactaac

SEQ ID NO: 37044 - DNA, 20 bp, Artificial Sequence
  chemically synthesized
aaattcttttaaaaattaaa

SEQ ID NO: 37045 - DNA, 20 bp, Artificial Sequence
  chemically synthesized
aattcttttaaaaattaaac

SEQ ID NO: 37046 - DNA, 20 bp, Artificial Sequence
  chemically synthesized
tcttttaaaaattaaacagg

SEQ ID NO: 37047 - DNA, 20 bp, Artificial Sequence
  chemically synthesized
cttttaaaaattaaacagga

SEQ ID NO: 37048 - DNA, 20 bp, Artificial Sequence
  chemically synthesized
ttctccctaactcattctct

SEQ ID NO: 37049 - DNA, 20 bp, Artificial Sequence
  chemically synthesized
tctccctaactcattctctg

SEQ ID NO: 37050 - DNA, 20 bp, Artificial Sequence
  chemically synthesized
cctaactcattctctgaggc

SEQ ID NO: 37051 - DNA, 20 bp, Artificial Sequence
  chemically synthesized
tattatcctgattccataac

SEQ ID NO: 37052 - DNA, 20 bp, Artificial Sequence
  chemically synthesized
tcctgattccataaccagac

SEQ ID NO: 37053 - DNA, 20 bp, Artificial Sequence
  chemically synthesized
cctgattccataaccagaca

SEQ ID NO: 37054 - DNA, 20 bp, Artificial Sequence
  chemically synthesized
ccataaccagacaaggatgc

SEQ ID NO: 37055 - DNA, 20 bp, Artificial Sequence
  chemically synthesized
tgcaagtaaaaataaaactg

SEQ ID NO: 37056 - DNA, 20 bp, Artificial Sequence
  chemically synthesized
gcaagtaaaaataaaactgc

SEQ ID NO: 37057 - DNA, 20 bp, Artificial Sequence
  chemically synthesized
ctgcaggtcaatatccctga

SEQ ID NO: 37058 - DNA, 20 bp, Artificial Sequence
  chemically synthesized
tcaatatccctgatggaaca

SEQ ID NO: 37059 - DNA, 20 bp, Artificial Sequence
  chemically synthesized
caatatccctgatggaacat

SEQ ID NO: 37060 - DNA, 20 bp, Artificial Sequence
  chemically synthesized
gaaaatcctcaacaaaatac

SEQ ID NO: 37061 - DNA, 20 bp, Artificial Sequence
  chemically synthesized
tactagcaaactgaatccaa

SEQ ID NO: 37062 - DNA, 20 bp, Artificial Sequence
  chemically synthesized
gaatccaacagtacatccaa

SEQ ID NO: 37063 - DNA, 20 bp, Artificial Sequence
  chemically synthesized
aaagataatacaccatgatc

SEQ ID NO: 37064 - DNA, 20 bp, Artificial Sequence
  chemically synthesized
gataatacaccatgatcaag

SEQ ID NO: 37065 - DNA, 20 bp, Artificial Sequence
  chemically synthesized
ataatacaccatgatcaagt

SEQ ID NO: 37066 - DNA, 20 bp, Artificial Sequence
  chemically synthesized
tgatcaagtgggatttatac

SEQ ID NO: 37067 - DNA, 20 bp, Artificial Sequence
  chemically synthesized
gatcaagtgggatttatact

SEQ ID NO: 37068 - DNA, 20 bp, Artificial Sequence
  chemically synthesized
atcaagtgggatttatacta

SEQ ID NO: 37069 - DNA, 20 bp, Artificial Sequence
  chemically synthesized
gggatttatactagggttgc

SEQ ID NO: 37070 - DNA, 20 bp, Artificial Sequence
  chemically synthesized
ttatactagggttgcaagaa

SEQ ID NO: 37071 - DNA, 20 bp, Artificial Sequence
  chemically synthesized
tgatacatcacatcaacaaa

SEQ ID NO: 37072 - DNA, 20 bp, Artificial Sequence
  chemically synthesized
aaaccatatgatcatctcaa

SEQ ID NO: 37073 - DNA, 20 bp, Artificial Sequence
  chemically synthesized
tatgatcatctcaatagata

SEQ ID NO: 37074 - DNA, 20 bp, Artificial Sequence
  chemically synthesized
catctcaatagatacagaaa

SEQ ID NO: 37075 - DNA, 20 bp, Artificial Sequence
  chemically synthesized
ttcatgataaaaactatctg

SEQ ID NO: 37076 - DNA, 20 bp, Artificial Sequence
  chemically synthesized
aaactatctgcagccaatca

SEQ ID NO: 37077 - DNA, 20 bp, Artificial Sequence
  chemically synthesized
ctatctgcagccaatcatag

SEQ ID NO: 37078 - DNA, 20 bp, Artificial Sequence
  chemically synthesized
tatctgcagccaatcataga

SEQ ID NO: 37079 - DNA, 20 bp, Artificial Sequence
  chemically synthesized
aacatatctcaatataataa

SEQ ID NO: 37080 - DNA, 20 bp, Artificial Sequence
  chemically synthesized
agtcatatatgacaaaccca

SEQ ID NO: 37081 - DNA, 20 bp, Artificial Sequence
  chemically synthesized
cagctaacatcatactgaat

SEQ ID NO: 37082 - DNA, 20 bp, Artificial Sequence
  chemically synthesized
agctaacatcatactgaatt

SEQ ID NO: 37083 - DNA, 20 bp, Artificial Sequence
  chemically synthesized
acatcatactgaattgggaa

SEQ ID NO: 37084 - DNA, 20 bp, Artificial Sequence
  chemically synthesized
catactgaattgggaaaagc

SEQ ID NO: 37085 - DNA, 20 bp, Artificial Sequence
  chemically synthesized
actgaattgggaaaagctgg

SEQ ID NO: 37086 - DNA, 20 bp, Artificial Sequence
  chemically synthesized
aagctggaagcctttcctct

SEQ ID NO: 37087 - DNA, 20 bp, Artificial Sequence
  chemically synthesized
tctaagaactgaaacaaaat

SEQ ID NO: 37088 - DNA, 20 bp, Artificial Sequence
  chemically synthesized
ctaagaactgaaacaaaata

SEQ ID NO: 37089 - DNA, 20 bp, Artificial Sequence
  chemically synthesized
actcctattcaatataatac

SEQ ID NO: 37090 - DNA, 20 bp, Artificial Sequence
  chemically synthesized
cctattcaatataatactgg

SEQ ID NO: 37091 - DNA, 20 bp, Artificial Sequence
  chemically synthesized
caatataatactggaagtcc

SEQ ID NO: 37092 - DNA, 20 bp, Artificial Sequence
  chemically synthesized
aatactggaagtcctagcca

SEQ ID NO: 37093 - DNA, 20 bp, Artificial Sequence
  chemically synthesized
gaagtcctagccacagcttt

SEQ ID NO: 37094 - DNA, 20 bp, Artificial Sequence
  chemically synthesized
aagtcctagccacagctttc

SEQ ID NO: 37095 - DNA, 20 bp, Artificial Sequence
  chemically synthesized
cctagccacagctttcaggt

SEQ ID NO: 37096 - DNA, 20 bp, Artificial Sequence
  chemically synthesized
tagccacagctttcaggtca

SEQ ID NO: 37097 - DNA, 20 bp, Artificial Sequence
  chemically synthesized
cacagctttcaggtcagaga

SEQ ID NO: 37098 - DNA, 20 bp, Artificial Sequence
  chemically synthesized
gctttcaggtcagagaaaga

SEQ ID NO: 37099 - DNA, 20 bp, Artificial Sequence
  chemically synthesized
tcaggtcagagaaagaaaga

SEQ ID NO: 37100 - DNA, 20 bp, Artificial Sequence
  chemically synthesized
tcagagaaagaaagaaagaa

SEQ ID NO: 37101 - DNA, 20 bp, Artificial Sequence
  chemically synthesized
cagagaaagaaagaaagaaa

SEQ ID NO: 37102 - DNA, 20 bp, Artificial Sequence
  chemically synthesized
agaaagaaaaggcatgcaaa

SEQ ID NO: 37103 - DNA, 20 bp, Artificial Sequence
  chemically synthesized
gaaagaaaaggcatgcaaat

SEQ ID NO: 37104 - DNA, 20 bp, Artificial Sequence
  chemically synthesized
aaaaggcatgcaaataggaa

SEQ ID NO: 37105 - DNA, 20 bp, Artificial Sequence
  chemically synthesized
catgcaaataggaaaagatg

SEQ ID NO: 37106 - DNA, 20 bp, Artificial Sequence
  chemically synthesized
agtcaaactgtccatctttc

SEQ ID NO: 37107 - DNA, 20 bp, Artificial Sequence
  chemically synthesized
agatgacatgattttatacc

SEQ ID NO: 37108 - DNA, 20 bp, Artificial Sequence
  chemically synthesized
attttatacctagaaaaacc

SEQ ID NO: 37109 - DNA, 20 bp, Artificial Sequence
  chemically synthesized
gaaaaaccaagactccacca

SEQ ID NO: 37110 - DNA, 20 bp, Artificial Sequence
  chemically synthesized
agactccaccaaagcactct

SEQ ID NO: 37111 - DNA, 20 bp, Artificial Sequence
  chemically synthesized
ttagcgctgaaaaataaatt

SEQ ID NO: 37112 - DNA, 20 bp, Artificial Sequence
  chemically synthesized
gctgaaaaataaattcagta

SEQ ID NO: 37113 - DNA, 20 bp, Artificial Sequence
  chemically synthesized
aaataaattcagtaaagtta

SEQ ID NO: 37114 - DNA, 20 bp, Artificial Sequence
  chemically synthesized
aataaattcagtaaagttac

SEQ ID NO: 37115 - DNA, 20 bp, Artificial Sequence
  chemically synthesized
taaattcagtaaagttacag

SEQ ID NO: 37116 - DNA, 20 bp, Artificial Sequence
  chemically synthesized
aaagttacaggagacaaaat

SEQ ID NO: 37117 - DNA, 20 bp, Artificial Sequence
  chemically synthesized
acaaaatcagcatatgaaac

SEQ ID NO: 37118 - DNA, 20 bp, Artificial Sequence
  chemically synthesized
tctacacaccaataataaac

SEQ ID NO: 37119 - DNA, 20 bp, Artificial Sequence
  chemically synthesized
acaccaataataaactagct

SEQ ID NO: 37120 - DNA, 20 bp, Artificial Sequence
  chemically synthesized
ccaataataaactagctgag

SEQ ID NO: 37121 - DNA, 20 bp, Artificial Sequence
  chemically synthesized
caataataaactagctgaga

SEQ ID NO: 37122 - DNA, 20 bp, Artificial Sequence
  chemically synthesized
aactagctgagaaggaaatt

SEQ ID NO: 37123 - DNA, 20 bp, Artificial Sequence
  chemically synthesized
tagctgagaaggaaattaag

SEQ ID NO: 37124 - DNA, 20 bp, Artificial Sequence
  chemically synthesized
agctgagaaggaaattaaga

SEQ ID NO: 37125 - DNA, 20 bp, Artificial Sequence
  chemically synthesized
gaaggcaatcccatttacaa

SEQ ID NO: 37126 - DNA, 20 bp, Artificial Sequence
  chemically synthesized
tagctaaaaaataaaatatt

SEQ ID NO: 37127 - DNA, 20 bp, Artificial Sequence
  chemically synthesized
agctaaaaaataaaatattt

SEQ ID NO: 37128 - DNA, 20 bp, Artificial Sequence
  chemically synthesized
gctaaaaaataaaatattta

SEQ ID NO: 37129 - DNA, 20 bp, Artificial Sequence
  chemically synthesized
atttagggataaatttaacc

SEQ ID NO: 37130 - DNA, 20 bp, Artificial Sequence
  chemically synthesized
tttagggataaatttaacca

SEQ ID NO: 37131 - DNA, 20 bp, Artificial Sequence
  chemically synthesized
ggaaccgaaaaacctctatt

SEQ ID NO: 37132 - DNA, 20 bp, Artificial Sequence
  chemically synthesized
aaactacaaaacactgataa

SEQ ID NO: 37133 - DNA, 20 bp, Artificial Sequence
  chemically synthesized
acactgataaaagaattgaa

SEQ ID NO: 37134 - DNA, 20 bp, Artificial Sequence
  chemically synthesized
cactgataaaagaattgaaa

SEQ ID NO: 37135 - DNA, 20 bp, Artificial Sequence
  chemically synthesized
gataaaagaattgaaaagga

SEQ ID NO: 37136 - DNA, 20 bp, Artificial Sequence
  chemically synthesized
ttgaaaaggacagaaacaaa

SEQ ID NO: 37137 - DNA, 20 bp, Artificial Sequence
  chemically synthesized
gaaaaggacagaaacaaatg

SEQ ID NO: 37138 - DNA, 20 bp, Artificial Sequence
  chemically synthesized
aaaggacagaaacaaatgga

SEQ ID NO: 37139 - DNA, 20 bp, Artificial Sequence
  chemically synthesized
ggagagatatcctatgttca

SEQ ID NO: 37140 - DNA, 20 bp, Artificial Sequence
  chemically synthesized
gatatcctatgttcatggat

SEQ ID NO: 37141 - DNA, 20 bp, Artificial Sequence
  chemically synthesized
aaaaattaatattgttaaaa

SEQ ID NO: 37142 - DNA, 20 bp, Artificial Sequence
  chemically synthesized
taaaatggccatactaccca

SEQ ID NO: 37143 - DNA, 20 bp, Artificial Sequence
  chemically synthesized
atactacccaaagcaatcta

SEQ ID NO: 37144 - DNA, 20 bp, Artificial Sequence
  chemically synthesized
ctatatgaccgctatcaaaa

SEQ ID NO: 37145 - DNA, 20 bp, Artificial Sequence
  chemically synthesized
aatagcaatgtcatttttca

SEQ ID NO: 37146 - DNA, 20 bp, Artificial Sequence
  chemically synthesized
aatgtcatttttcacagaaa

SEQ ID NO: 37147 - DNA, 20 bp, Artificial Sequence
  chemically synthesized
atttgtatgaaattaaaaaa

SEQ ID NO: 37148 - DNA, 20 bp, Artificial Sequence
  chemically synthesized
atgaaattaaaaaatagctc

SEQ ID NO: 37149 - DNA, 20 bp, Artificial Sequence
  chemically synthesized
aaattaaaaaatagctccag

SEQ ID NO: 37150 - DNA, 20 bp, Artificial Sequence
  chemically synthesized
aaaaatagctccagtagcca

SEQ ID NO: 37151 - DNA, 20 bp, Artificial Sequence
  chemically synthesized
ccaaagtcatcctgtgaaaa

SEQ ID NO: 37152 - DNA, 20 bp, Artificial Sequence
  chemically synthesized
ctgtgaaaaaagaacaatgc

SEQ ID NO: 37153 - DNA, 20 bp, Artificial Sequence
  chemically synthesized
gtgaaaaaagaacaatgcta

SEQ ID NO: 37154 - DNA, 20 bp, Artificial Sequence
  chemically synthesized
tgaaaaaagaacaatgctag

SEQ ID NO: 37155 - DNA, 20 bp, Artificial Sequence
  chemically synthesized
tatcatactacctgatttca

SEQ ID NO: 37156 - DNA, 20 bp, Artificial Sequence
  chemically synthesized
gatttcaaagtatattacaa

SEQ ID NO: 37157 - DNA, 20 bp, Artificial Sequence
  chemically synthesized
caaagtatattacaaaagta

SEQ ID NO: 37158 - DNA, 20 bp, Artificial Sequence
  chemically synthesized
aaagtatattacaaaagtat

SEQ ID NO: 37159 - DNA, 20 bp, Artificial Sequence
  chemically synthesized
caaaagtataggaacctaaa

SEQ ID NO: 37160 - DNA, 20 bp, Artificial Sequence
  chemically synthesized
aaacagcatgatactgacat

SEQ ID NO: 37161 - DNA, 20 bp, Artificial Sequence
  chemically synthesized
gcatgatactgacattagaa

SEQ ID NO: 37162 - DNA, 20 bp, Artificial Sequence
  chemically synthesized
ctgacattagaacagacact

SEQ ID NO: 37163 - DNA, 20 bp, Artificial Sequence
  chemically synthesized
agaacagacacttagaccaa

SEQ ID NO: 37164 - DNA, 20 bp, Artificial Sequence
  chemically synthesized
acagacacttagaccaatgg

SEQ ID NO: 37165 - DNA, 20 bp, Artificial Sequence
  chemically synthesized
agacacttagaccaatggaa

SEQ ID NO: 37166 - DNA, 20 bp, Artificial Sequence
  chemically synthesized
cttagaccaatggaagagaa

SEQ ID NO: 37167 - DNA, 20 bp, Artificial Sequence
  chemically synthesized
tagaccaatggaagagaata

SEQ ID NO: 37168 - DNA, 20 bp, Artificial Sequence
  chemically synthesized
atggaagagaatagagaacc

SEQ ID NO: 37169 - DNA, 20 bp, Artificial Sequence
  chemically synthesized
gaaatgcatccacatattta

SEQ ID NO: 37170 - DNA, 20 bp, Artificial Sequence
  chemically synthesized
atccacatatttatagccaa

SEQ ID NO: 37171 - DNA, 20 bp, Artificial Sequence
  chemically synthesized
tagccaacagattttcaaca

SEQ ID NO: 37172 - DNA, 20 bp, Artificial Sequence
  chemically synthesized
agccaacagattttcaacaa

SEQ ID NO: 37173 - DNA, 20 bp, Artificial Sequence
  chemically synthesized
agattttcaacaaaggtgac

SEQ ID NO: 37174 - DNA, 20 bp, Artificial Sequence
  chemically synthesized
aggtgacaagaatatacatt

SEQ ID NO: 37175 - DNA, 20 bp, Artificial Sequence
  chemically synthesized
ggtgacaagaatatacattg

SEQ ID NO: 37176 - DNA, 20 bp, Artificial Sequence
  chemically synthesized
acaagaatatacattgagga

SEQ ID NO: 37177 - DNA, 20 bp, Artificial Sequence
  chemically synthesized
caagaatatacattgaggaa

SEQ ID NO: 37178 - DNA, 20 bp, Artificial Sequence
  chemically synthesized
tatacattgaggaaaggaca

SEQ ID NO: 37179 - DNA, 20 bp, Artificial Sequence
  chemically synthesized
gaggaaaggacacagtgttc

SEQ ID NO: 37180 - DNA, 20 bp, Artificial Sequence
  chemically synthesized
aggacacagtgttcaagaaa

SEQ ID NO: 37181 - DNA, 20 bp, Artificial Sequence
  chemically synthesized
agaaatggtgctgaaaaaat

SEQ ID NO: 37182 - DNA, 20 bp, Artificial Sequence
  chemically synthesized
tgaaaaaattggatatccat

SEQ ID NO: 37183 - DNA, 20 bp, Artificial Sequence
  chemically synthesized
cattggatatccatgtgcaa

SEQ ID NO: 37184 - DNA, 20 bp, Artificial Sequence
  chemically synthesized
catgtgcaaaagaataaaac

SEQ ID NO: 37185 - DNA, 20 bp, Artificial Sequence
  chemically synthesized
ataaaactggactgctgata

SEQ ID NO: 37186 - DNA, 20 bp, Artificial Sequence
  chemically synthesized
actggactgctgatatggtt

SEQ ID NO: 37187 - DNA, 20 bp, Artificial Sequence
  chemically synthesized
aaatataatccccaacttct

SEQ ID NO: 37188 - DNA, 20 bp, Artificial Sequence
  chemically synthesized
aatataatccccaacttctc

SEQ ID NO: 37189 - DNA, 20 bp, Artificial Sequence
  chemically synthesized
tccccaacttctcaggatct

SEQ ID NO: 37190 - DNA, 20 bp, Artificial Sequence
  chemically synthesized
ccaacttctcaggatcttgg

SEQ ID NO: 37191 - DNA, 20 bp, Artificial Sequence
  chemically synthesized
cttctcaggatcttggcgga

SEQ ID NO: 37192 - DNA, 20 bp, Artificial Sequence
  chemically synthesized
ttctcaggatcttggcggat

SEQ ID NO: 37193 - DNA, 20 bp, Artificial Sequence
  chemically synthesized
ctcaggatcttggcggatgg

SEQ ID NO: 37194 - DNA, 20 bp, Artificial Sequence
  chemically synthesized
tcaggatcttggcggatggg

SEQ ID NO: 37195 - DNA, 20 bp, Artificial Sequence
  chemically synthesized
ggatcttggcggatgggagg

SEQ ID NO: 37196 - DNA, 20 bp, Artificial Sequence
  chemically synthesized
gatcttggcggatgggaggt

SEQ ID NO: 37197 - DNA, 20 bp, Artificial Sequence
  chemically synthesized
tggcggatgggaggtaggcc

SEQ ID NO: 37198 - DNA, 20 bp, Artificial Sequence
  chemically synthesized
tgggaggtaggcctagattg

SEQ ID NO: 37199 - DNA, 20 bp, Artificial Sequence
  chemically synthesized
cctagattgcagctccaact

SEQ ID NO: 37200 - DNA, 20 bp, Artificial Sequence
  chemically synthesized
gattgcagctccaactcaga

SEQ ID NO: 37201 - DNA, 20 bp, Artificial Sequence
  chemically synthesized
gcagctccaactcagatgga

SEQ ID NO: 37202 - DNA, 20 bp, Artificial Sequence
  chemically synthesized
agctccaactcagatggaca

SEQ ID NO: 37203 - DNA, 20 bp, Artificial Sequence
  chemically synthesized
tccaactcagatggacagag

SEQ ID NO: 37204 - DNA, 20 bp, Artificial Sequence
  chemically synthesized
cagatggacagagcagcatg

SEQ ID NO: 37205 - DNA, 20 bp, Artificial Sequence
  chemically synthesized
gatggacagagcagcatgtg

SEQ ID NO: 37206 - DNA, 20 bp, Artificial Sequence
  chemically synthesized
atggacagagcagcatgtgg

SEQ ID NO: 37207 - DNA, 20 bp, Artificial Sequence
  chemically synthesized
gaggctcgcattgtgaattt

SEQ ID NO: 37208 - DNA, 20 bp, Artificial Sequence
  chemically synthesized
cgcattgtgaattttagctg

SEQ ID NO: 37209 - DNA, 20 bp, Artificial Sequence
  chemically synthesized
ttgtgaattttagctgcaga

SEQ ID NO: 37210 - DNA, 20 bp, Artificial Sequence
  chemically synthesized
tttagctgcagatagactgc

SEQ ID NO: 37211 - DNA, 20 bp, Artificial Sequence
  chemically synthesized
gatagactgcaagaacaaac

SEQ ID NO: 37212 - DNA, 20 bp, Artificial Sequence
  chemically synthesized
aagaacaaaccagcaatcct

SEQ ID NO: 37213 - DNA, 20 bp, Artificial Sequence
  chemically synthesized
gaacaaaccagcaatcctga

SEQ ID NO: 37214 - DNA, 20 bp, Artificial Sequence
  chemically synthesized
aacaaaccagcaatcctgag

SEQ ID NO: 37215 - DNA, 20 bp, Artificial Sequence
  chemically synthesized
agcaatcctgagaggaccca

SEQ ID NO: 37216 - DNA, 20 bp, Artificial Sequence
  chemically synthesized
gaggacccacagaccctctg

SEQ ID NO: 37217 - DNA, 20 bp, Artificial Sequence
  chemically synthesized
aggacccacagaccctctga

SEQ ID NO: 37218 - DNA, 20 bp, Artificial Sequence
  chemically synthesized
acccacagaccctctgaagg

SEQ ID NO: 37219 - DNA, 20 bp, Artificial Sequence
  chemically synthesized
cacagaccctctgaaggaag

SEQ ID NO: 37220 - DNA, 20 bp, Artificial Sequence
  chemically synthesized
aaggaagtagattgctcctg

SEQ ID NO: 37221 - DNA, 20 bp, Artificial Sequence
  chemically synthesized
aggaagtagattgctcctgc

SEQ ID NO: 37222 - DNA, 20 bp, Artificial Sequence
  chemically synthesized
tagattgctcctgcaggacc

SEQ ID NO: 37223 - DNA, 20 bp, Artificial Sequence
  chemically synthesized
agattgctcctgcaggaccc

SEQ ID NO: 37224 - DNA, 20 bp, Artificial Sequence
  chemically synthesized
attgctcctgcaggacccag

SEQ ID NO: 37225 - DNA, 20 bp, Artificial Sequence
  chemically synthesized
ggagacaccccaaatactgt

SEQ ID NO: 37226 - DNA, 20 bp, Artificial Sequence
  chemically synthesized
tactgtgagtgccccaactg

SEQ ID NO: 37227 - DNA, 20 bp, Artificial Sequence
  chemically synthesized
tgtgagtgccccaactgcgg

SEQ ID NO: 37228 - DNA, 20 bp, Artificial Sequence
  chemically synthesized
gagtgccccaactgcggaag

SEQ ID NO: 37229 - DNA, 20 bp, Artificial Sequence
  chemically synthesized
agtgccccaactgcggaagt

SEQ ID NO: 37230 - DNA, 20 bp, Artificial Sequence
  chemically synthesized
ccccaactgcggaagtggga

SEQ ID NO: 37231 - DNA, 20 bp, Artificial Sequence
  chemically synthesized
cccaactgcggaagtgggaa

SEQ ID NO: 37232 - DNA, 20 bp, Artificial Sequence
  chemically synthesized
ccaactgcggaagtgggaaa

SEQ ID NO: 37233 - DNA, 20 bp, Artificial Sequence
  chemically synthesized
aactgcggaagtgggaaagg

SEQ ID NO: 37234 - DNA, 20 bp, Artificial Sequence
  chemically synthesized
tcctaaacacacactcccac

SEQ ID NO: 37235 - DNA, 20 bp, Artificial Sequence
  chemically synthesized
ctaaacacacactcccactg

SEQ ID NO: 37236 - DNA, 20 bp, Artificial Sequence
  chemically synthesized
cactcccactggagaaactg

SEQ ID NO: 37237 - DNA, 20 bp, Artificial Sequence
  chemically synthesized
actcccactggagaaactga

SEQ ID NO: 37238 - DNA, 20 bp, Artificial Sequence
  chemically synthesized
agaaactgaaggtctgtttg

SEQ ID NO: 37239 - DNA, 20 bp, Artificial Sequence
  chemically synthesized
gaaactgaaggtctgtttgt

SEQ ID NO: 37240 - DNA, 20 bp, Artificial Sequence
  chemically synthesized
aactgaaggtctgtttgtgg

SEQ ID NO: 37241 - DNA, 20 bp, Artificial Sequence
  chemically synthesized
tgaaggtctgtttgtgggag

SEQ ID NO: 37242 - DNA, 20 bp, Artificial Sequence
  chemically synthesized
gagaagtttctgaccttacc

SEQ ID NO: 37243 - DNA, 20 bp, Artificial Sequence
  chemically synthesized
gaagtttctgaccttacctg

SEQ ID NO: 37244 - DNA, 20 bp, Artificial Sequence
  chemically synthesized
ttctgaccttacctggagtt

SEQ ID NO: 37245 - DNA, 20 bp, Artificial Sequence
  chemically synthesized
tacctggagttgagttaact

SEQ ID NO: 37246 - DNA, 20 bp, Artificial Sequence
  chemically synthesized
cctggagttgagttaactta

SEQ ID NO: 37247 - DNA, 20 bp, Artificial Sequence
  chemically synthesized
tggagttgagttaacttaga

SEQ ID NO: 37248 - DNA, 20 bp, Artificial Sequence
  chemically synthesized
ttgagttaacttagagagct

SEQ ID NO: 37249 - DNA, 20 bp, Artificial Sequence
  chemically synthesized
ttagagagctgagcaaaata

SEQ ID NO: 37250 - DNA, 20 bp, Artificial Sequence
  chemically synthesized
tagagagctgagcaaaatac

SEQ ID NO: 37251 - DNA, 20 bp, Artificial Sequence
  chemically synthesized
agctgagcaaaatacaggtg

SEQ ID NO: 37252 - DNA, 20 bp, Artificial Sequence
  chemically synthesized
ctgagcaaaatacaggtgta

SEQ ID NO: 37253 - DNA, 20 bp, Artificial Sequence
  chemically synthesized
tgagcaaaatacaggtgtag

SEQ ID NO: 37254 - DNA, 20 bp, Artificial Sequence
  chemically synthesized
gcaaaatacaggtgtagagg

SEQ ID NO: 37255 - DNA, 20 bp, Artificial Sequence
  chemically synthesized
aaatacaggtgtagaggaag

SEQ ID NO: 37256 - DNA, 20 bp, Artificial Sequence
  chemically synthesized
acaggtgtagaggaagcagt

SEQ ID NO: 37257 - DNA, 20 bp, Artificial Sequence
  chemically synthesized
gtgtagaggaagcagtgaga

SEQ ID NO: 37258 - DNA, 20 bp, Artificial Sequence
  chemically synthesized
tgtagaggaagcagtgagaa

SEQ ID NO: 37259 - DNA, 20 bp, Artificial Sequence
  chemically synthesized
ggaagcagtgagaaaggccc

SEQ ID NO: 37260 - DNA, 20 bp, Artificial Sequence
  chemically synthesized
gaagcagtgagaaaggccct

SEQ ID NO: 37261 - DNA, 20 bp, Artificial Sequence
  chemically synthesized
agcagtgagaaaggccctgg

SEQ ID NO: 37262 - DNA, 20 bp, Artificial Sequence
  chemically synthesized
gaaaggccctgggagctcac

SEQ ID NO: 37263 - DNA, 20 bp, Artificial Sequence
  chemically synthesized
aaaggccctgggagctcact

SEQ ID NO: 37264 - DNA, 20 bp, Artificial Sequence
  chemically synthesized
tgggagctcactgggtccct

SEQ ID NO: 37265 - DNA, 20 bp, Artificial Sequence
  chemically synthesized
gagctcactgggtccctgag

SEQ ID NO: 37266 - DNA, 20 bp, Artificial Sequence
  chemically synthesized
agctcactgggtccctgagc

SEQ ID NO: 37267 - DNA, 20 bp, Artificial Sequence
  chemically synthesized
ctgagcaggccattcctgcc

SEQ ID NO: 37268 - DNA, 20 bp, Artificial Sequence
  chemically synthesized
caggccattcctgcctggca

SEQ ID NO: 37269 - DNA, 20 bp, Artificial Sequence
  chemically synthesized
ccattcctgcctggcatagc

SEQ ID NO: 37270 - DNA, 20 bp, Artificial Sequence
  chemically synthesized
cattcctgcctggcatagcc

SEQ ID NO: 37271 - DNA, 20 bp, Artificial Sequence
  chemically synthesized
ttactaacattgaatgtaaa

SEQ ID NO: 37272 - DNA, 20 bp, Artificial Sequence
  chemically synthesized
ggcctaaatgctccacttaa

SEQ ID NO: 37273 - DNA, 20 bp, Artificial Sequence
  chemically synthesized
gcctaaatgctccacttaaa

SEQ ID NO: 37274 - DNA, 20 bp, Artificial Sequence
  chemically synthesized
cctaaatgctccacttaaaa

SEQ ID NO: 37275 - DNA, 20 bp, Artificial Sequence
  chemically synthesized
ctccacttaaaagggtgaaa

SEQ ID NO: 37276 - DNA, 20 bp, Artificial Sequence
  chemically synthesized
tccacttaaaagggtgaaaa

SEQ ID NO: 37277 - DNA, 20 bp, Artificial Sequence
  chemically synthesized
aaaaaggtatttcatgcaaa

SEQ ID NO: 37278 - DNA, 20 bp, Artificial Sequence
  chemically synthesized
ttcatgcaaatggccaccaa

SEQ ID NO: 37279 - DNA, 20 bp, Artificial Sequence
  chemically synthesized
tgcaaatggccaccaaaagt

SEQ ID NO: 37280 - DNA, 20 bp, Artificial Sequence
  chemically synthesized
aaatggccaccaaaagtgag

SEQ ID NO: 37281 - DNA, 20 bp, Artificial Sequence
  chemically synthesized
aatggccaccaaaagtgagt

SEQ ID NO: 37282 - DNA, 20 bp, Artificial Sequence
  chemically synthesized
agtaggcaaaacaaacttta

SEQ ID NO: 37283 - DNA, 20 bp, Artificial Sequence
  chemically synthesized
caaaacaaactttaaagcaa

SEQ ID NO: 37284 - DNA, 20 bp, Artificial Sequence
  chemically synthesized
aacaaactttaaagcaacag

SEQ ID NO: 37285 - DNA, 20 bp, Artificial Sequence
  chemically synthesized
tttaaagcaacagcagttaa

SEQ ID NO: 37286 - DNA, 20 bp, Artificial Sequence
  chemically synthesized
taaagcaacagcagttaaaa

SEQ ID NO: 37287 - DNA, 20 bp, Artificial Sequence
  chemically synthesized
aacagcagttaaaagagaca

SEQ ID NO: 37288 - DNA, 20 bp, Artificial Sequence
  chemically synthesized
cagcagttaaaagagacaaa

SEQ ID NO: 37289 - DNA, 20 bp, Artificial Sequence
  chemically synthesized
agcagttaaaagagacaaag

SEQ ID NO: 37290 - DNA, 20 bp, Artificial Sequence
  chemically synthesized
gcagttaaaagagacaaaga

SEQ ID NO: 37291 - DNA, 20 bp, Artificial Sequence
  chemically synthesized
caaagagggacattatataa

SEQ ID NO: 37292 - DNA, 20 bp, Artificial Sequence
  chemically synthesized
gggacattatataatggtaa

SEQ ID NO: 37293 - DNA, 20 bp, Artificial Sequence
  chemically synthesized
ggacattatataatggtaaa

SEQ ID NO: 37294 - DNA, 20 bp, Artificial Sequence
  chemically synthesized
tggtaaaaggccttgtccaa

SEQ ID NO: 37295 - DNA, 20 bp, Artificial Sequence
  chemically synthesized
ggtaaaaggccttgtccaac

SEQ ID NO: 37296 - DNA, 20 bp, Artificial Sequence
  chemically synthesized
aacatatatgcacctaacac

SEQ ID NO: 37297 - DNA, 20 bp, Artificial Sequence
  chemically synthesized
catatatgcacctaacactg

SEQ ID NO: 37298 - DNA, 20 bp, Artificial Sequence
  chemically synthesized
cactggagctcccaaattta

SEQ ID NO: 37299 - DNA, 20 bp, Artificial Sequence
  chemically synthesized
atttatagaacaattactaa

SEQ ID NO: 37300 - DNA, 20 bp, Artificial Sequence
  chemically synthesized
gaacaattactaatagacct

SEQ ID NO: 37301 - DNA, 20 bp, Artificial Sequence
  chemically synthesized
tactaatagacctaagaaat

SEQ ID NO: 37302 - DNA, 20 bp, Artificial Sequence
  chemically synthesized
aatagacctaagaaatgaga

SEQ ID NO: 37303 - DNA, 20 bp, Artificial Sequence
  chemically synthesized
gacctaagaaatgagataga

SEQ ID NO: 37304 - DNA, 20 bp, Artificial Sequence
  chemically synthesized
gatagacagcaacacaataa

SEQ ID NO: 37305 - DNA, 20 bp, Artificial Sequence
  chemically synthesized
agacagcaacacaataatag

SEQ ID NO: 37306 - DNA, 20 bp, Artificial Sequence
  chemically synthesized
gacagcaacacaataatagt

SEQ ID NO: 37307 - DNA, 20 bp, Artificial Sequence
  chemically synthesized
acagcaacacaataatagtg

SEQ ID NO: 37308 - DNA, 20 bp, Artificial Sequence
  chemically synthesized
cagcaacacaataatagtgg

SEQ ID NO: 37309 - DNA, 20 bp, Artificial Sequence
  chemically synthesized
ggacttcaatacttcattga

SEQ ID NO: 37310 - DNA, 20 bp, Artificial Sequence
  chemically synthesized
caatacttcattgacagcac

SEQ ID NO: 37311 - DNA, 20 bp, Artificial Sequence
  chemically synthesized
acttcattgacagcactaga

SEQ ID NO: 37312 - DNA, 20 bp, Artificial Sequence
  chemically synthesized
acagcactagacagttcatc

SEQ ID NO: 37313 - DNA, 20 bp, Artificial Sequence
  chemically synthesized
cactagacagttcatcaaga

SEQ ID NO: 37314 - DNA, 20 bp, Artificial Sequence
  chemically synthesized
agacagttcatcaagacaga

SEQ ID NO: 37315 - DNA, 20 bp, Artificial Sequence
  chemically synthesized
gaaagtcaacaaaaaaataa

SEQ ID NO: 37316 - DNA, 20 bp, Artificial Sequence
  chemically synthesized
aatggatttaaattatacct

SEQ ID NO: 37317 - DNA, 20 bp, Artificial Sequence
  chemically synthesized
aaattataccttagaacaaa

SEQ ID NO: 37318 - DNA, 20 bp, Artificial Sequence
  chemically synthesized
cttagaacaaatggacttaa

SEQ ID NO: 37319 - DNA, 20 bp, Artificial Sequence
  chemically synthesized
atggacttaacagttatata

SEQ ID NO: 37320 - DNA, 20 bp, Artificial Sequence
  chemically synthesized
aacatttcatccaataacca

SEQ ID NO: 37321 - DNA, 20 bp, Artificial Sequence
  chemically synthesized
agaacacacattctattcaa

SEQ ID NO: 37322 - DNA, 20 bp, Artificial Sequence
  chemically synthesized
acattctattcaacagcgcg

SEQ ID NO: 37323 - DNA, 20 bp, Artificial Sequence
  chemically synthesized
cagcgcgtggaaatttctcc

SEQ ID NO: 37324 - DNA, 20 bp, Artificial Sequence
  chemically synthesized
agcgcgtggaaatttctcca

SEQ ID NO: 37325 - DNA, 20 bp, Artificial Sequence
  chemically synthesized
gcgtggaaatttctccaagg

SEQ ID NO: 37326 - DNA, 20 bp, Artificial Sequence
  chemically synthesized
ctccaaggtagaccatatga

SEQ ID NO: 37327 - DNA, 20 bp, Artificial Sequence
  chemically synthesized
tccaaggtagaccatatgat

SEQ ID NO: 37328 - DNA, 20 bp, Artificial Sequence
  chemically synthesized
catatgataggccatgaaat

SEQ ID NO: 37329 - DNA, 20 bp, Artificial Sequence
  chemically synthesized
agcctcaataaatttactaa

SEQ ID NO: 37330 - DNA, 20 bp, Artificial Sequence
  chemically synthesized
tttactaacagaccaataac

SEQ ID NO: 37331 - DNA, 20 bp, Artificial Sequence
  chemically synthesized
actaacagaccaataacaag

SEQ ID NO: 37332 - DNA, 20 bp, Artificial Sequence
  chemically synthesized
acagaccaataacaagcagt

SEQ ID NO: 37333 - DNA, 20 bp, Artificial Sequence
  chemically synthesized
aacaagcagtgagatttaat

SEQ ID NO: 37334 - DNA, 20 bp, Artificial Sequence
  chemically synthesized
aaaaattaccaaccaaaaaa

SEQ ID NO: 37335 - DNA, 20 bp, Artificial Sequence
  chemically synthesized
ttaccaaccaaaaaaaagtt

SEQ ID NO: 37336 - DNA, 20 bp, Artificial Sequence
  chemically synthesized
taccaaccaaaaaaaagttc

SEQ ID NO: 37337 - DNA, 20 bp, Artificial Sequence
  chemically synthesized
accaaaaaaaagttcaggac

SEQ ID NO: 37338 - DNA, 20 bp, Artificial Sequence
  chemically synthesized
aaaaaaagttcaggaccaga

SEQ ID NO: 37339 - DNA, 20 bp, Artificial Sequence
  chemically synthesized
aggaccagatggattcacaa

SEQ ID NO: 37340 - DNA, 20 bp, Artificial Sequence
  chemically synthesized
gattcacaacagaattctac

SEQ ID NO: 37341 - DNA, 20 bp, Artificial Sequence
  chemically synthesized
agaattctactagacattca

SEQ ID NO: 37342 - DNA, 20 bp, Artificial Sequence
  chemically synthesized
aattctactagacattcaaa

SEQ ID NO: 37343 - DNA, 20 bp, Artificial Sequence
  chemically synthesized
attctactagacattcaaag

SEQ ID NO: 37344 - DNA, 20 bp, Artificial Sequence
  chemically synthesized
ctagacattcaaagaggaat

SEQ ID NO: 37345 - DNA, 20 bp, Artificial Sequence
  chemically synthesized
tctttttgacactattctac

SEQ ID NO: 37346 - DNA, 20 bp, Artificial Sequence
  chemically synthesized
tttgacactattctacaaga

SEQ ID NO: 37347 - DNA, 20 bp, Artificial Sequence
  chemically synthesized
actattctacaagacagata

SEQ ID NO: 37348 - DNA, 20 bp, Artificial Sequence
  chemically synthesized
attctacaagacagataaag

SEQ ID NO: 37349 - DNA, 20 bp, Artificial Sequence
  chemically synthesized
ttctacaagacagataaaga

SEQ ID NO: 37350 - DNA, 20 bp, Artificial Sequence
  chemically synthesized
ctgccctaattcattctatg

SEQ ID NO: 37351 - DNA, 20 bp, Artificial Sequence
  chemically synthesized
cctaattcattctatgaagc

SEQ ID NO: 37352 - DNA, 20 bp, Artificial Sequence
  chemically synthesized
agccagcatcacaccaaaac

SEQ ID NO: 37353 - DNA, 20 bp, Artificial Sequence
  chemically synthesized
gccagcatcacaccaaaacc

SEQ ID NO: 37354 - DNA, 20 bp, Artificial Sequence
  chemically synthesized
ccagcatcacaccaaaacca

SEQ ID NO: 37355 - DNA, 20 bp, Artificial Sequence
  chemically synthesized
gcatcacaccaaaaccaggg

SEQ ID NO: 37356 - DNA, 20 bp, Artificial Sequence
  chemically synthesized
catcacaccaaaaccaggga

SEQ ID NO: 37357 - DNA, 20 bp, Artificial Sequence
  chemically synthesized
agggaaggacataaccaaaa

SEQ ID NO: 37358 - DNA, 20 bp, Artificial Sequence
  chemically synthesized
ataaccaaaaaagaaaacta

SEQ ID NO: 37359 - DNA, 20 bp, Artificial Sequence
  chemically synthesized
aaaagaaaactacagactga

SEQ ID NO: 37360 - DNA, 20 bp, Artificial Sequence
  chemically synthesized
actgatagccttgatgaaca

SEQ ID NO: 37361 - DNA, 20 bp, Artificial Sequence
  chemically synthesized
taaaatccttaacaaaatac

SEQ ID NO: 37362 - DNA, 20 bp, Artificial Sequence
  chemically synthesized
aaattcaacaacataacaaa

SEQ ID NO: 37363 - DNA, 20 bp, Artificial Sequence
  chemically synthesized
aaagataatccaccatgatc

SEQ ID NO: 37364 - DNA, 20 bp, Artificial Sequence
  chemically synthesized
gataatccaccatgatcaag

SEQ ID NO: 37365 - DNA, 20 bp, Artificial Sequence
  chemically synthesized
ataatccaccatgatcaagc

SEQ ID NO: 37366 - DNA, 20 bp, Artificial Sequence
  chemically synthesized
tgatcaagcaggttccatgc

SEQ ID NO: 37367 - DNA, 20 bp, Artificial Sequence
  chemically synthesized
gatcaagcaggttccatgcc

SEQ ID NO: 37368 - DNA, 20 bp, Artificial Sequence
  chemically synthesized
atcaagcaggttccatgcca

SEQ ID NO: 37369 - DNA, 20 bp, Artificial Sequence
  chemically synthesized
caggttccatgccagggatg

SEQ ID NO: 37370 - DNA, 20 bp, Artificial Sequence
  chemically synthesized
aggttccatgccagggatgc

SEQ ID NO: 37371 - DNA, 20 bp, Artificial Sequence
  chemically synthesized
ggttccatgccagggatgca

SEQ ID NO: 37372 - DNA, 20 bp, Artificial Sequence
  chemically synthesized
ccatgccagggatgcagggt

SEQ ID NO: 37373 - DNA, 20 bp, Artificial Sequence
  chemically synthesized
agggttggtttgacatctgc

SEQ ID NO: 37374 - DNA, 20 bp, Artificial Sequence
  chemically synthesized
tttgacatctgcaagtcaat

SEQ ID NO: 37375 - DNA, 20 bp, Artificial Sequence
  chemically synthesized
agtgtgatacaccacataaa

SEQ ID NO: 37376 - DNA, 20 bp, Artificial Sequence
  chemically synthesized
aaattacatgatcatctcaa

SEQ ID NO: 37377 - DNA, 20 bp, Artificial Sequence
  chemically synthesized
catgatcatctcaatagatg

SEQ ID NO: 37378 - DNA, 20 bp, Artificial Sequence
  chemically synthesized
catctcaatagatgcagaaa

SEQ ID NO: 37379 - DNA, 20 bp, Artificial Sequence
  chemically synthesized
aaaaagcattcaacaaaatc

SEQ ID NO: 37380 - DNA, 20 bp, Artificial Sequence
  chemically synthesized
acatttatgattaaaatgct

SEQ ID NO: 37381 - DNA, 20 bp, Artificial Sequence
  chemically synthesized
attaaaatgctcagcaaaat

SEQ ID NO: 37382 - DNA, 20 bp, Artificial Sequence
  chemically synthesized
gctcagcaaaatcagcatac

SEQ ID NO: 37383 - DNA, 20 bp, Artificial Sequence
  chemically synthesized
tcagcaaaatcagcatacaa

SEQ ID NO: 37384 - DNA, 20 bp, Artificial Sequence
  chemically synthesized
agcatacaagagacatacct

SEQ ID NO: 37385 - DNA, 20 bp, Artificial Sequence
  chemically synthesized
gacatacctcagtgtaataa

SEQ ID NO: 37386 - DNA, 20 bp, Artificial Sequence
  chemically synthesized
agccatctgtgacaaaccca

SEQ ID NO: 37387 - DNA, 20 bp, Artificial Sequence
  chemically synthesized
acagccaacataatattgaa

SEQ ID NO: 37388 - DNA, 20 bp, Artificial Sequence
  chemically synthesized
cagccaacataatattgaat

SEQ ID NO: 37389 - DNA, 20 bp, Artificial Sequence
  chemically synthesized
agccaacataatattgaatg

SEQ ID NO: 37390 - DNA, 20 bp, Artificial Sequence
  chemically synthesized
acataatattgaatggggaa

SEQ ID NO: 37391 - DNA, 20 bp, Artificial Sequence
  chemically synthesized
attgaatggggaaaagttga

SEQ ID NO: 37392 - DNA, 20 bp, Artificial Sequence
  chemically synthesized
aagttgaaagcattccctct

SEQ ID NO: 37393 - DNA, 20 bp, Artificial Sequence
  chemically synthesized
aaagcattccctctgagaac

SEQ ID NO: 37394 - DNA, 20 bp, Artificial Sequence
  chemically synthesized
ttccctctgagaactggaac

SEQ ID NO: 37395 - DNA, 20 bp, Artificial Sequence
  chemically synthesized
tctgagaactggaacaagac

SEQ ID NO: 37396 - DNA, 20 bp, Artificial Sequence
  chemically synthesized
ctgagaactggaacaagaca

SEQ ID NO: 37397 - DNA, 20 bp, Artificial Sequence
  chemically synthesized
ctcaccactcctcttcaaca

SEQ ID NO: 37398 - DNA, 20 bp, Artificial Sequence
  chemically synthesized
actcctcttcaacatagtac

SEQ ID NO: 37399 - DNA, 20 bp, Artificial Sequence
  chemically synthesized
cctcttcaacatagtactgg

SEQ ID NO: 37400 - DNA, 20 bp, Artificial Sequence
  chemically synthesized
caacatagtactggaagtcc

SEQ ID NO: 37401 - DNA, 20 bp, Artificial Sequence
  chemically synthesized
atagtactggaagtcctagc

SEQ ID NO: 37402 - DNA, 20 bp, Artificial Sequence
  chemically synthesized
tagtactggaagtcctagcc

SEQ ID NO: 37403 - DNA, 20 bp, Artificial Sequence
  chemically synthesized
agtactggaagtcctagcca

SEQ ID NO: 37404 - DNA, 20 bp, Artificial Sequence
  chemically synthesized
gaagtcctagccagggcaat

SEQ ID NO: 37405 - DNA, 20 bp, Artificial Sequence
  chemically synthesized
cagggcaatcagacaaaaca

SEQ ID NO: 37406 - DNA, 20 bp, Artificial Sequence
  chemically synthesized
tcagacaaaacaaagaaata

SEQ ID NO: 37407 - DNA, 20 bp, Artificial Sequence
  chemically synthesized
cagacaaaacaaagaaataa

SEQ ID NO: 37408 - DNA, 20 bp, Artificial Sequence
  chemically synthesized
agacaaaacaaagaaataaa

SEQ ID NO: 37409 - DNA, 20 bp, Artificial Sequence
  chemically synthesized
gaaataaagggcattcaaat

SEQ ID NO: 37410 - DNA, 20 bp, Artificial Sequence
  chemically synthesized
aaagggcattcaaatcagta

SEQ ID NO: 37411 - DNA, 20 bp, Artificial Sequence
  chemically synthesized
agggcattcaaatcagtaaa

SEQ ID NO: 37412 - DNA, 20 bp, Artificial Sequence
  chemically synthesized
gggcattcaaatcagtaaag

SEQ ID NO: 37413 - DNA, 20 bp, Artificial Sequence
  chemically synthesized
cattcaaatcagtaaagagg

SEQ ID NO: 37414 - DNA, 20 bp, Artificial Sequence
  chemically synthesized
catttacctttaaaacccta

SEQ ID NO: 37415 - DNA, 20 bp, Artificial Sequence
  chemically synthesized
taaaaccctaaagactcctc

SEQ ID NO: 37416 - DNA, 20 bp, Artificial Sequence
  chemically synthesized
accctaaagactcctccaga

SEQ ID NO: 37417 - DNA, 20 bp, Artificial Sequence
  chemically synthesized
agactcctccagaaagctcc

SEQ ID NO: 37418 - DNA, 20 bp, Artificial Sequence
  chemically synthesized
ctagaactgataaaataatt

SEQ ID NO: 37419 - DNA, 20 bp, Artificial Sequence
  chemically synthesized
actgataaaataattcagca

SEQ ID NO: 37420 - DNA, 20 bp, Artificial Sequence
  chemically synthesized
aaataattcagcaaagtttc

SEQ ID NO: 37421 - DNA, 20 bp, Artificial Sequence
  chemically synthesized
tcagcaaagtttccagatac

SEQ ID NO: 37422 - DNA, 20 bp, Artificial Sequence
  chemically synthesized
caagatgaatgcacacaaat

SEQ ID NO: 37423 - DNA, 20 bp, Artificial Sequence
  chemically synthesized
gtaactcttctatacaccaa

SEQ ID NO: 37424 - DNA, 20 bp, Artificial Sequence
  chemically synthesized
atacaccaacagcaaccaaa

SEQ ID NO: 37425 - DNA, 20 bp, Artificial Sequence
  chemically synthesized
acaccaacagcaaccaaatg

SEQ ID NO: 37426 - DNA, 20 bp, Artificial Sequence
  chemically synthesized
accaaatggagaatcaaatc

SEQ ID NO: 37427 - DNA, 20 bp, Artificial Sequence
  chemically synthesized
gaactcaaccccttgtacaa

SEQ ID NO: 37428 - DNA, 20 bp, Artificial Sequence
  chemically synthesized
ttgtacaatagatgcaaaaa

SEQ ID NO: 37429 - DNA, 20 bp, Artificial Sequence
  chemically synthesized
gccatataaaacgtactctc

SEQ ID NO: 37430 - DNA, 20 bp, Artificial Sequence
  chemically synthesized
tataaaacgtactctcaaga

SEQ ID NO: 37431 - DNA, 20 bp, Artificial Sequence
  chemically synthesized
cgtactctcaagatggatta

SEQ ID NO: 37432 - DNA, 20 bp, Artificial Sequence
  chemically synthesized
taaaactataaaactactaa

SEQ ID NO: 37433 - DNA, 20 bp, Artificial Sequence
  chemically synthesized
aaactactaaaagaaaacat

SEQ ID NO: 37434 - DNA, 20 bp, Artificial Sequence
  chemically synthesized
aactactaaaagaaaacata

SEQ ID NO: 37435 - DNA, 20 bp, Artificial Sequence
  chemically synthesized
actactaaaagaaaacataa

SEQ ID NO: 37436 - DNA, 20 bp, Artificial Sequence
  chemically synthesized
tactaaaagaaaacataagg

SEQ ID NO: 37437 - DNA, 20 bp, Artificial Sequence
  chemically synthesized
aaacataagggagacacttc

SEQ ID NO: 37438 - DNA, 20 bp, Artificial Sequence
  chemically synthesized
aagggagacacttcaagaca

SEQ ID NO: 37439 - DNA, 20 bp, Artificial Sequence
  chemically synthesized
gacacttcaagacatggctt

SEQ ID NO: 37440 - DNA, 20 bp, Artificial Sequence
  chemically synthesized
acacttcaagacatggcttt

SEQ ID NO: 37441 - DNA, 20 bp, Artificial Sequence
  chemically synthesized
tcaagacatggctttgggca

SEQ ID NO: 37442 - DNA, 20 bp, Artificial Sequence
  chemically synthesized
ggctttgggcaaagatttta

SEQ ID NO: 37443 - DNA, 20 bp, Artificial Sequence
  chemically synthesized
tgggcaaagattttatggcc

SEQ ID NO: 37444 - DNA, 20 bp, Artificial Sequence
  chemically synthesized
ttttatggccaagacctcaa

SEQ ID NO: 37445 - DNA, 20 bp, Artificial Sequence
  chemically synthesized
tggccaagacctcaaaagca

SEQ ID NO: 37446 - DNA, 20 bp, Artificial Sequence
  chemically synthesized
ggccaagacctcaaaagcac

SEQ ID NO: 37447 - DNA, 20 bp, Artificial Sequence
  chemically synthesized
ctcaaaagcacaggcaacaa

SEQ ID NO: 37448 - DNA, 20 bp, Artificial Sequence
  chemically synthesized
acaggcaacaaaagcaaaaa

SEQ ID NO: 37449 - DNA, 20 bp, Artificial Sequence
  chemically synthesized
caaaagcaaaaatagacaaa

SEQ ID NO: 37450 - DNA, 20 bp, Artificial Sequence
  chemically synthesized
aaaagcaaaaatagacaaat

SEQ ID NO: 37451 - DNA, 20 bp, Artificial Sequence
  chemically synthesized
tagacaaatgggactatatt

SEQ ID NO: 37452 - DNA, 20 bp, Artificial Sequence
  chemically synthesized
taagctaaaatacatctgca

SEQ ID NO: 37453 - DNA, 20 bp, Artificial Sequence
  chemically synthesized
taaaatacatctgcacagta

SEQ ID NO: 37454 - DNA, 20 bp, Artificial Sequence
  chemically synthesized
aaaatacatctgcacagtaa

SEQ ID NO: 37455 - DNA, 20 bp, Artificial Sequence
  chemically synthesized
agtaaaggaaacaatcaaca

SEQ ID NO: 37456 - DNA, 20 bp, Artificial Sequence
  chemically synthesized
aggaaacaatcaacacagtg

SEQ ID NO: 37457 - DNA, 20 bp, Artificial Sequence
  chemically synthesized
gaaacaatcaacacagtgaa

SEQ ID NO: 37458 - DNA, 20 bp, Artificial Sequence
  chemically synthesized
aatcaacacagtgaagagac

SEQ ID NO: 37459 - DNA, 20 bp, Artificial Sequence
  chemically synthesized
agagacaagctgttgaatgc

SEQ ID NO: 37460 - DNA, 20 bp, Artificial Sequence
  chemically synthesized
aatatttgcatacatttgac

SEQ ID NO: 37461 - DNA, 20 bp, Artificial Sequence
  chemically synthesized
atatttgcatacatttgaca

SEQ ID NO: 37462 - DNA, 20 bp, Artificial Sequence
  chemically synthesized
tttgacaaggaattaatctc

SEQ ID NO: 37463 - DNA, 20 bp, Artificial Sequence
  chemically synthesized
aattaatctccagaatatat

SEQ ID NO: 37464 - DNA, 20 bp, Artificial Sequence
  chemically synthesized
aagaaactcaaacaactcaa

SEQ ID NO: 37465 - DNA, 20 bp, Artificial Sequence
  chemically synthesized
aaactcaaacaactcaacag

SEQ ID NO: 37466 - DNA, 20 bp, Artificial Sequence
  chemically synthesized
aaataatctcattaaaaaat

SEQ ID NO: 37467 - DNA, 20 bp, Artificial Sequence
  chemically synthesized
atctcattaaaaaattggca

SEQ ID NO: 37468 - DNA, 20 bp, Artificial Sequence
  chemically synthesized
tctcattaaaaaattggcaa

SEQ ID NO: 37469 - DNA, 20 bp, Artificial Sequence
  chemically synthesized
tggcaaaggatatttttcaa

SEQ ID NO: 37470 - DNA, 20 bp, Artificial Sequence
  chemically synthesized
caaaggatatttttcaaaag

SEQ ID NO: 37471 - DNA, 20 bp, Artificial Sequence
  chemically synthesized
gaagacatacaaatgcacaa

SEQ ID NO: 37472 - DNA, 20 bp, Artificial Sequence
  chemically synthesized
aagacatacaaatgcacaat

SEQ ID NO: 37473 - DNA, 20 bp, Artificial Sequence
  chemically synthesized
atacaaatgcacaatgggta

SEQ ID NO: 37474 - DNA, 20 bp, Artificial Sequence
  chemically synthesized
tacaaatgcacaatgggtat

SEQ ID NO: 37475 - DNA, 20 bp, Artificial Sequence
  chemically synthesized
acaaatgcacaatgggtatg

SEQ ID NO: 37476 - DNA, 20 bp, Artificial Sequence
  chemically synthesized
tgctcaacattactaatcat

SEQ ID NO: 37477 - DNA, 20 bp, Artificial Sequence
  chemically synthesized
ctcaacattactaatcatca

SEQ ID NO: 37478 - DNA, 20 bp, Artificial Sequence
  chemically synthesized
atgcaaatcaaaaccacaat

SEQ ID NO: 37479 - DNA, 20 bp, Artificial Sequence
  chemically synthesized
aatgagatatcatcttatgc

SEQ ID NO: 37480 - DNA, 20 bp, Artificial Sequence
  chemically synthesized
agatatcatcttatgccagt

SEQ ID NO: 37481 - DNA, 20 bp, Artificial Sequence
  chemically synthesized
aataaataaataacacatgc

SEQ ID NO: 37482 - DNA, 20 bp, Artificial Sequence
  chemically synthesized
aataaataacacatgctggc

SEQ ID NO: 37483 - DNA, 20 bp, Artificial Sequence
  chemically synthesized
ataaataacacatgctggca

SEQ ID NO: 37484 - DNA, 20 bp, Artificial Sequence
  chemically synthesized
cacatgctggcaaggatgtg

SEQ ID NO: 37485 - DNA, 20 bp, Artificial Sequence
  chemically synthesized
acatgctggcaaggatgtga

SEQ ID NO: 37486 - DNA, 20 bp, Artificial Sequence
  chemically synthesized
ctggcaaggatgtgaaggaa

SEQ ID NO: 37487 - DNA, 20 bp, Artificial Sequence
  chemically synthesized
tggcaaggatgtgaaggaaa

SEQ ID NO: 37488 - DNA, 20 bp, Artificial Sequence
  chemically synthesized
tgtgaaggaaaaggcactcg

SEQ ID NO: 37489 - DNA, 20 bp, Artificial Sequence
  chemically synthesized
gtgaaggaaaaggcactcgt

SEQ ID NO: 37490 - DNA, 20 bp, Artificial Sequence
  chemically synthesized
aaggcactcgtaggcactat

SEQ ID NO: 37491 - DNA, 20 bp, Artificial Sequence
  chemically synthesized
cactcgtaggcactattggt

SEQ ID NO: 37492 - DNA, 20 bp, Artificial Sequence
  chemically synthesized
ctattggtaagcatgcaaat

SEQ ID NO: 37493 - DNA, 20 bp, Artificial Sequence
  chemically synthesized
ggtaagcatgcaaattagta

SEQ ID NO: 37494 - DNA, 20 bp, Artificial Sequence
  chemically synthesized
gcaaattagtatagccacta

SEQ ID NO: 37495 - DNA, 20 bp, Artificial Sequence
  chemically synthesized
ccactatggaaaacaatatg

SEQ ID NO: 37496 - DNA, 20 bp, Artificial Sequence
  chemically synthesized
caatatgtagatttaccaaa

SEQ ID NO: 37497 - DNA, 20 bp, Artificial Sequence
  chemically synthesized
gctaaaaattgaactatcat

SEQ ID NO: 37498 - DNA, 20 bp, Artificial Sequence
  chemically synthesized
aattgaactatcataagatc

SEQ ID NO: 37499 - DNA, 20 bp, Artificial Sequence
  chemically synthesized
agatccagcaatcttattac

SEQ ID NO: 37500 - DNA, 20 bp, Artificial Sequence
  chemically synthesized
gatccagcaatcttattact

SEQ ID NO: 37501 - DNA, 20 bp, Artificial Sequence
  chemically synthesized
tattactgggtatttatcca

SEQ ID NO: 37502 - DNA, 20 bp, Artificial Sequence
  chemically synthesized
attactgggtatttatccaa

SEQ ID NO: 37503 - DNA, 20 bp, Artificial Sequence
  chemically synthesized
tgggtatttatccaaaggaa

SEQ ID NO: 37504 - DNA, 20 bp, Artificial Sequence
  chemically synthesized
ttatccaaaggaaaagaatt

SEQ ID NO: 37505 - DNA, 20 bp, Artificial Sequence
  chemically synthesized
aaagaattcagaataataaa

SEQ ID NO: 37506 - DNA, 20 bp, Artificial Sequence
  chemically synthesized
tcagaataataaacagatac

SEQ ID NO: 37507 - DNA, 20 bp, Artificial Sequence
  chemically synthesized
tggtaccacactgtttattg

SEQ ID NO: 37508 - DNA, 20 bp, Artificial Sequence
  chemically synthesized
tattgcagcacgattcacat

SEQ ID NO: 37509 - DNA, 20 bp, Artificial Sequence
  chemically synthesized
cagcacgattcacattagca

SEQ ID NO: 37510 - DNA, 20 bp, Artificial Sequence
  chemically synthesized
gattcacattagcaaagata

SEQ ID NO: 37511 - DNA, 20 bp, Artificial Sequence
  chemically synthesized
caaagatatggaatcaacct

SEQ ID NO: 37512 - DNA, 20 bp, Artificial Sequence
  chemically synthesized
tcaacctaagtgtccatcaa

SEQ ID NO: 37513 - DNA, 20 bp, Artificial Sequence
  chemically synthesized
tgtccatcaatggatgaatg

SEQ ID NO: 37514 - DNA, 20 bp, Artificial Sequence
  chemically synthesized
atggatgaatgaagaaaatg

SEQ ID NO: 37515 - DNA, 20 bp, Artificial Sequence
  chemically synthesized
atataaaatcatttcatttg

SEQ ID NO: 37516 - DNA, 20 bp, Artificial Sequence
  chemically synthesized
tcatttcatttgcagcaaca

SEQ ID NO: 37517 - DNA, 20 bp, Artificial Sequence
  chemically synthesized
tgcagcaacatggatgaaac

SEQ ID NO: 37518 - DNA, 20 bp, Artificial Sequence
  chemically synthesized
agcaacatggatgaaactgg

SEQ ID NO: 37519 - DNA, 20 bp, Artificial Sequence
  chemically synthesized
gtcattatgttaaacgaaat

SEQ ID NO: 37520 - DNA, 20 bp, Artificial Sequence
  chemically synthesized
ttatgttaaacgaaataagc

SEQ ID NO: 37521 - DNA, 20 bp, Artificial Sequence
  chemically synthesized
tatgttaaacgaaataagcc

SEQ ID NO: 37522 - DNA, 20 bp, Artificial Sequence
  chemically synthesized
taaacgaaataagccaggca

SEQ ID NO: 37523 - DNA, 20 bp, Artificial Sequence
  chemically synthesized
cgaaataagccaggcataga

SEQ ID NO: 37524 - DNA, 20 bp, Artificial Sequence
  chemically synthesized
tgcatgttctcactgatatg

SEQ ID NO: 37525 - DNA, 20 bp, Artificial Sequence
  chemically synthesized
gcatgttctcactgatatgt

SEQ ID NO: 37526 - DNA, 20 bp, Artificial Sequence
  chemically synthesized
atgttctcactgatatgtgg

SEQ ID NO: 37527 - DNA, 20 bp, Artificial Sequence
  chemically synthesized
ctgatatgtgggagctaaaa

SEQ ID NO: 37528 - DNA, 20 bp, Artificial Sequence
  chemically synthesized
ctaaaaaagttaatatcatg

SEQ ID NO: 37529 - DNA, 20 bp, Artificial Sequence
  chemically synthesized
taaaaaagttaatatcatgt

SEQ ID NO: 37530 - DNA, 20 bp, Artificial Sequence
  chemically synthesized
aaaagttaatatcatgtagg

SEQ ID NO: 37531 - DNA, 20 bp, Artificial Sequence
  chemically synthesized
aagttaatatcatgtaggta

SEQ ID NO: 37532 - DNA, 20 bp, Artificial Sequence
  chemically synthesized
gttaatatcatgtaggtaga

SEQ ID NO: 37533 - DNA, 20 bp, Artificial Sequence
  chemically synthesized
aatatcatgtaggtagagag

SEQ ID NO: 37534 - DNA, 20 bp, Artificial Sequence
  chemically synthesized
gtaggtagagagtagaatga

SEQ ID NO: 37535 - DNA, 20 bp, Artificial Sequence
  chemically synthesized
gagagtagaatgacagaaac

SEQ ID NO: 37536 - DNA, 20 bp, Artificial Sequence
  chemically synthesized
gagtagaatgacagaaacca

SEQ ID NO: 37537 - DNA, 20 bp, Artificial Sequence
  chemically synthesized
agtagaatgacagaaaccag

SEQ ID NO: 37538 - DNA, 20 bp, Artificial Sequence
  chemically synthesized
agaatgacagaaaccagagg

SEQ ID NO: 37539 - DNA, 20 bp, Artificial Sequence
  chemically synthesized
aatgacagaaaccagaggta

SEQ ID NO: 37540 - DNA, 20 bp, Artificial Sequence
  chemically synthesized
acagaaaccagaggtagaga

SEQ ID NO: 37541 - DNA, 20 bp, Artificial Sequence
  chemically synthesized
cagaaaccagaggtagagaa

SEQ ID NO: 37542 - DNA, 20 bp, Artificial Sequence
  chemically synthesized
agagaaaggtgtgtacgtta

SEQ ID NO: 37543 - DNA, 20 bp, Artificial Sequence
  chemically synthesized
gagaaaggtgtgtacgttat

SEQ ID NO: 37544 - DNA, 20 bp, Artificial Sequence
  chemically synthesized
gaaaggtgtgtacgttatgg

SEQ ID NO: 37545 - DNA, 20 bp, Artificial Sequence
  chemically synthesized
aaaggtgtgtacgttatggg

SEQ ID NO: 37546 - DNA, 20 bp, Artificial Sequence
  chemically synthesized
ggtgtgtacgttatgggagg

SEQ ID NO: 37547 - DNA, 20 bp, Artificial Sequence
  chemically synthesized
gtgtgtacgttatgggagga

SEQ ID NO: 37548 - DNA, 20 bp, Artificial Sequence
  chemically synthesized
tgtgtacgttatgggaggaa

SEQ ID NO: 37549 - DNA, 20 bp, Artificial Sequence
  chemically synthesized
tgtacgttatgggaggaagg

SEQ ID NO: 37550 - DNA, 20 bp, Artificial Sequence
  chemically synthesized
ttatgggaggaagggagacg

SEQ ID NO: 37551 - DNA, 20 bp, Artificial Sequence
  chemically synthesized
atgggaggaagggagacgaa

SEQ ID NO: 37552 - DNA, 20 bp, Artificial Sequence
  chemically synthesized
ggaggaagggagacgaagag

SEQ ID NO: 37553 - DNA, 20 bp, Artificial Sequence
  chemically synthesized
gaagggagacgaagagaagt

SEQ ID NO: 37554 - DNA, 20 bp, Artificial Sequence
  chemically synthesized
gacgaagagaagttggttaa

SEQ ID NO: 37555 - DNA, 20 bp, Artificial Sequence
  chemically synthesized
gagaagttggttaatggaaa

SEQ ID NO: 37556 - DNA, 20 bp, Artificial Sequence
  chemically synthesized
agaagttggttaatggaaac

SEQ ID NO: 37557 - DNA, 20 bp, Artificial Sequence
  chemically synthesized
agttggttaatggaaacagg

SEQ ID NO: 37558 - DNA, 20 bp, Artificial Sequence
  chemically synthesized
ggttaatggaaacaggcagt

SEQ ID NO: 37559 - DNA, 20 bp, Artificial Sequence
  chemically synthesized
aatggaaacaggcagttaga

SEQ ID NO: 37560 - DNA, 20 bp, Artificial Sequence
  chemically synthesized
ggaaacaggcagttagatag

SEQ ID NO: 37561 - DNA, 20 bp, Artificial Sequence
  chemically synthesized
gaaacaggcagttagataga

SEQ ID NO: 37562 - DNA, 20 bp, Artificial Sequence
  chemically synthesized
gaatatgttctgatgttcaa

SEQ ID NO: 37563 - DNA, 20 bp, Artificial Sequence
  chemically synthesized
tgttctgatgttcaatagca

SEQ ID NO: 37564 - DNA, 20 bp, Artificial Sequence
  chemically synthesized
tctgatgttcaatagcaaag

SEQ ID NO: 37565 - DNA, 20 bp, Artificial Sequence
  chemically synthesized
ctgatgttcaatagcaaagt

SEQ ID NO: 37566 - DNA, 20 bp, Artificial Sequence
  chemically synthesized
tgatgttcaatagcaaagta

SEQ ID NO: 37567 - DNA, 20 bp, Artificial Sequence
  chemically synthesized
atagcaaagtagggtgatta

SEQ ID NO: 37568 - DNA, 20 bp, Artificial Sequence
  chemically synthesized
atatattgtatatttcaaaa

SEQ ID NO: 37569 - DNA, 20 bp, Artificial Sequence
  chemically synthesized
tattgtatatttcaaaatag

SEQ ID NO: 37570 - DNA, 20 bp, Artificial Sequence
  chemically synthesized
tgtatatttcaaaatagtag

SEQ ID NO: 37571 - DNA, 20 bp, Artificial Sequence
  chemically synthesized
tatttcaaaatagtagaaga

SEQ ID NO: 37572 - DNA, 20 bp, Artificial Sequence
  chemically synthesized
atttcaaaatagtagaagaa

SEQ ID NO: 37573 - DNA, 20 bp, Artificial Sequence
  chemically synthesized
cttgaaatgttcctaacaca

SEQ ID NO: 37574 - DNA, 20 bp, Artificial Sequence
  chemically synthesized
catagaaacgataaatactt

SEQ ID NO: 37575 - DNA, 20 bp, Artificial Sequence
  chemically synthesized
atagaaacgataaatacttg

SEQ ID NO: 37576 - DNA, 20 bp, Artificial Sequence
  chemically synthesized
aacacgtcatatatcaataa

SEQ ID NO: 37577 - DNA, 20 bp, Artificial Sequence
  chemically synthesized
cgtcatatatcaataaaaga

SEQ ID NO: 37578 - DNA, 20 bp, Artificial Sequence
  chemically synthesized
aaagaaagtcgatctcatat

SEQ ID NO: 37579 - DNA, 20 bp, Artificial Sequence
  chemically synthesized
aagtcgatctcatattggtt

SEQ ID NO: 37580 - DNA, 20 bp, Artificial Sequence
  chemically synthesized
agtcgatctcatattggttg

SEQ ID NO: 37581 - DNA, 20 bp, Artificial Sequence
  chemically synthesized
attggttgaggcctgattgt

SEQ ID NO: 37582 - DNA, 20 bp, Artificial Sequence
  chemically synthesized
taagtaaatctttgtccctc

SEQ ID NO: 37583 - DNA, 20 bp, Artificial Sequence
  chemically synthesized
tccctgtactgtcttgctgt

SEQ ID NO: 37584 - DNA, 20 bp, Artificial Sequence
  chemically synthesized
ccctgtactgtcttgctgtg

SEQ ID NO: 37585 - DNA, 20 bp, Artificial Sequence
  chemically synthesized
ctgtactgtcttgctgtgag

SEQ ID NO: 37586 - DNA, 20 bp, Artificial Sequence
  chemically synthesized
cttatattccaacaccattt

SEQ ID NO: 37587 - DNA, 20 bp, Artificial Sequence
  chemically synthesized
tcctccccatatttttacct

SEQ ID NO: 37588 - DNA, 20 bp, Artificial Sequence
  chemically synthesized
ctcggtttttactgtttata

SEQ ID NO: 37589 - DNA, 20 bp, Artificial Sequence
  chemically synthesized
atatagcacactttgtgcta

SEQ ID NO: 37590 - DNA, 20 bp, Artificial Sequence
  chemically synthesized
ctttgtgctatagtttacct

SEQ ID NO: 37591 - DNA, 20 bp, Artificial Sequence
  chemically synthesized
ctcagtttttactatttata

SEQ ID NO: 37592 - DNA, 20 bp, Artificial Sequence
  chemically synthesized
ccccaaacttctctcttaac

SEQ ID NO: 37593 - DNA, 20 bp, Artificial Sequence
  chemically synthesized
aaacttctctcttaacaagc

SEQ ID NO: 37594 - DNA, 20 bp, Artificial Sequence
  chemically synthesized
ctcttaacaagctagaatat

SEQ ID NO: 37595 - DNA, 20 bp, Artificial Sequence
  chemically synthesized
gctagaatataagtgaatgc

SEQ ID NO: 37596 - DNA, 20 bp, Artificial Sequence
  chemically synthesized
tagaatataagtgaatgcaa

SEQ ID NO: 37597 - DNA, 20 bp, Artificial Sequence
  chemically synthesized
tataagtgaatgcaagagca

SEQ ID NO: 37598 - DNA, 20 bp, Artificial Sequence
  chemically synthesized
taagtgaatgcaagagcata

SEQ ID NO: 37599 - DNA, 20 bp, Artificial Sequence
  chemically synthesized
tgaatgcaagagcatagaga

SEQ ID NO: 37600 - DNA, 20 bp, Artificial Sequence
  chemically synthesized
gaatgcaagagcatagagac

SEQ ID NO: 37601 - DNA, 20 bp, Artificial Sequence
  chemically synthesized
aatgcaagagcatagagaca

SEQ ID NO: 37602 - DNA, 20 bp, Artificial Sequence
  chemically synthesized
tcattcctattttcatattt

SEQ ID NO: 37603 - DNA, 20 bp, Artificial Sequence
  chemically synthesized
cattcctattttcatatttg

SEQ ID NO: 37604 - DNA, 20 bp, Artificial Sequence
  chemically synthesized
tcatatttgaggtataaacc

SEQ ID NO: 37605 - DNA, 20 bp, Artificial Sequence
  chemically synthesized
catatttgaggtataaacca

SEQ ID NO: 37606 - DNA, 20 bp, Artificial Sequence
  chemically synthesized
tatttgaggtataaaccaag

SEQ ID NO: 37607 - DNA, 20 bp, Artificial Sequence
  chemically synthesized
tttttaaatctgcaaataaa

SEQ ID NO: 37608 - DNA, 20 bp, Artificial Sequence
  chemically synthesized
gttttattctgacattaaaa

SEQ ID NO: 37609 - DNA, 20 bp, Artificial Sequence
  chemically synthesized
aatgaatgatcgttttacca

SEQ ID NO: 37610 - DNA, 20 bp, Artificial Sequence
  chemically synthesized
atgatcgttttaccacagcg

SEQ ID NO: 37611 - DNA, 20 bp, Artificial Sequence
  chemically synthesized
tgatcgttttaccacagcgt

SEQ ID NO: 37612 - DNA, 20 bp, Artificial Sequence
  chemically synthesized
cttaaccttcactttcaaac

SEQ ID NO: 37613 - DNA, 20 bp, Artificial Sequence
  chemically synthesized
tttattgatctctattttcc

SEQ ID NO: 37614 - DNA, 20 bp, Artificial Sequence
  chemically synthesized
tctattttcctggaacaaca

SEQ ID NO: 37615 - DNA, 20 bp, Artificial Sequence
  chemically synthesized
ctattttcctggaacaacat

SEQ ID NO: 37616 - DNA, 20 bp, Artificial Sequence
  chemically synthesized
tattttcctggaacaacatg

SEQ ID NO: 37617 - DNA, 20 bp, Artificial Sequence
  chemically synthesized
attttcctggaacaacatgg

SEQ ID NO: 37618 - DNA, 20 bp, Artificial Sequence
  chemically synthesized
aacaacatgggggctatgtt

SEQ ID NO: 37619 - DNA, 20 bp, Artificial Sequence
  chemically synthesized
atgggggctatgtttagcgt

SEQ ID NO: 37620 - DNA, 20 bp, Artificial Sequence
  chemically synthesized
tgggggctatgtttagcgtg

SEQ ID NO: 37621 - DNA, 20 bp, Artificial Sequence
  chemically synthesized
ctatgtttagcgtgaggaca

SEQ ID NO: 37622 - DNA, 20 bp, Artificial Sequence
  chemically synthesized
gtatcacaactttcacctga

SEQ ID NO: 37623 - DNA, 20 bp, Artificial Sequence
  chemically synthesized
acaactttcacctgaaagaa

SEQ ID NO: 37624 - DNA, 20 bp, Artificial Sequence
  chemically synthesized
tttcacctgaaagaaaagat

SEQ ID NO: 37625 - DNA, 20 bp, Artificial Sequence
  chemically synthesized
aaagaaaagatgagctacca

SEQ ID NO: 37626 - DNA, 20 bp, Artificial Sequence
  chemically synthesized
accatggtacatataacaat

SEQ ID NO: 37627 - DNA, 20 bp, Artificial Sequence
  chemically synthesized
ccatggtacatataacaatg

SEQ ID NO: 37628 - DNA, 20 bp, Artificial Sequence
  chemically synthesized
tggtacatataacaatgagg

SEQ ID NO: 37629 - DNA, 20 bp, Artificial Sequence
  chemically synthesized
aatgaggtggttaaaactct

SEQ ID NO: 37630 - DNA, 20 bp, Artificial Sequence
  chemically synthesized
taaaactctaagtcgtcatc

SEQ ID NO: 37631 - DNA, 20 bp, Artificial Sequence
  chemically synthesized
tactaaaaatcactatttca

SEQ ID NO: 37632 - DNA, 20 bp, Artificial Sequence
  chemically synthesized
taaaaatcactatttcaaag

SEQ ID NO: 37633 - DNA, 20 bp, Artificial Sequence
  chemically synthesized
atcactatttcaaagaagta

SEQ ID NO: 37634 - DNA, 20 bp, Artificial Sequence
  chemically synthesized
tatttcaaagaagtatagaa

SEQ ID NO: 37635 - DNA, 20 bp, Artificial Sequence
  chemically synthesized
aagaagtatagaatagatat

SEQ ID NO: 37636 - DNA, 20 bp, Artificial Sequence
  chemically synthesized
gaatagatatcagccaaaat

SEQ ID NO: 37637 - DNA, 20 bp, Artificial Sequence
  chemically synthesized
aatagatatcagccaaaata

SEQ ID NO: 37638 - DNA, 20 bp, Artificial Sequence
  chemically synthesized
atatacatattatacacata

SEQ ID NO: 37639 - DNA, 20 bp, Artificial Sequence
  chemically synthesized
atacatattatacacatatg

SEQ ID NO: 37640 - DNA, 20 bp, Artificial Sequence
  chemically synthesized
ttgtatatgcttaaaaatta

SEQ ID NO: 37641 - DNA, 20 bp, Artificial Sequence
  chemically synthesized
tgcttaaaaattacagactt

SEQ ID NO: 37642 - DNA, 20 bp, Artificial Sequence
  chemically synthesized
ttaaaaattacagactttgg

SEQ ID NO: 37643 - DNA, 20 bp, Artificial Sequence
  chemically synthesized
tggaagtcatatgactattt

SEQ ID NO: 37644 - DNA, 20 bp, Artificial Sequence
  chemically synthesized
tatgactatttcagtgtgtg

SEQ ID NO: 37645 - DNA, 20 bp, Artificial Sequence
  chemically synthesized
caccctcctgttccaaaaca

SEQ ID NO: 37646 - DNA, 20 bp, Artificial Sequence
  chemically synthesized
cctgttccaaaacacagttg

SEQ ID NO: 37647 - DNA, 20 bp, Artificial Sequence
  chemically synthesized
gttccaaaacacagttgcag

SEQ ID NO: 37648 - DNA, 20 bp, Artificial Sequence
  chemically synthesized
ccaaaacacagttgcagaag

SEQ ID NO: 37649 - DNA, 20 bp, Artificial Sequence
  chemically synthesized
aaaacacagttgcagaagca

SEQ ID NO: 37650 - DNA, 20 bp, Artificial Sequence
  chemically synthesized
aaacacagttgcagaagcag

SEQ ID NO: 37651 - DNA, 20 bp, Artificial Sequence
  chemically synthesized
cacagttgcagaagcagagg

SEQ ID NO: 37652 - DNA, 20 bp, Artificial Sequence
  chemically synthesized
agaggaagtcattatacact

SEQ ID NO: 37653 - DNA, 20 bp, Artificial Sequence
  chemically synthesized
cacttagaacatcattttat

SEQ ID NO: 37654 - DNA, 20 bp, Artificial Sequence
  chemically synthesized
acttagaacatcattttata

SEQ ID NO: 37655 - DNA, 20 bp, Artificial Sequence
  chemically synthesized
tagaacatcattttataagg

SEQ ID NO: 37656 - DNA, 20 bp, Artificial Sequence
  chemically synthesized
aacatcattttataaggcag

SEQ ID NO: 37657 - DNA, 20 bp, Artificial Sequence
  chemically synthesized
acatcattttataaggcagc

SEQ ID NO: 37658 - DNA, 20 bp, Artificial Sequence
  chemically synthesized
attttataaggcagcaggtc

SEQ ID NO: 37659 - DNA, 20 bp, Artificial Sequence
  chemically synthesized
ttataaggcagcaggtctgg

SEQ ID NO: 37660 - DNA, 20 bp, Artificial Sequence
  chemically synthesized
tataaggcagcaggtctggt

SEQ ID NO: 37661 - DNA, 20 bp, Artificial Sequence
  chemically synthesized
aaggcagcaggtctggtagg

SEQ ID NO: 37662 - DNA, 20 bp, Artificial Sequence
  chemically synthesized
aggcagcaggtctggtagga

SEQ ID NO: 37663 - DNA, 20 bp, Artificial Sequence
  chemically synthesized
gcagcaggtctggtaggaag

SEQ ID NO: 37664 - DNA, 20 bp, Artificial Sequence
  chemically synthesized
aggtctggtaggaaggagat

SEQ ID NO: 37665 - DNA, 20 bp, Artificial Sequence
  chemically synthesized
ggtctggtaggaaggagatt

SEQ ID NO: 37666 - DNA, 20 bp, Artificial Sequence
  chemically synthesized
attaggtgctacttgtgaca

SEQ ID NO: 37667 - DNA, 20 bp, Artificial Sequence
  chemically synthesized
ttaggtgctacttgtgacaa

SEQ ID NO: 37668 - DNA, 20 bp, Artificial Sequence
  chemically synthesized
gtgctacttgtgacaaaggt

SEQ ID NO: 37669 - DNA, 20 bp, Artificial Sequence
  chemically synthesized
tcagcaaatatttgtgttcc

SEQ ID NO: 37670 - DNA, 20 bp, Artificial Sequence
  chemically synthesized
ttgtgttcccagcacttttc

SEQ ID NO: 37671 - DNA, 20 bp, Artificial Sequence
  chemically synthesized
ccagcacttttctagatcct

SEQ ID NO: 37672 - DNA, 20 bp, Artificial Sequence
  chemically synthesized
tagatcctcagttaaaatca

SEQ ID NO: 37673 - DNA, 20 bp, Artificial Sequence
  chemically synthesized
atcctcagttaaaatcaaag

SEQ ID NO: 37674 - DNA, 20 bp, Artificial Sequence
  chemically synthesized
agttaaaatcaaagcagctg

SEQ ID NO: 37675 - DNA, 20 bp, Artificial Sequence
  chemically synthesized
aatcaaagcagctgcagtct

SEQ ID NO: 37676 - DNA, 20 bp, Artificial Sequence
  chemically synthesized
caaagcagctgcagtcttgg

SEQ ID NO: 37677 - DNA, 20 bp, Artificial Sequence
  chemically synthesized
agcagctgcagtcttggcag

SEQ ID NO: 37678 - DNA, 20 bp, Artificial Sequence
  chemically synthesized
gcagctgcagtcttggcagt

SEQ ID NO: 37679 - DNA, 20 bp, Artificial Sequence
  chemically synthesized
agctgcagtcttggcagtgg

SEQ ID NO: 37680 - DNA, 20 bp, Artificial Sequence
  chemically synthesized
gctgcagtcttggcagtggg

SEQ ID NO: 37681 - DNA, 20 bp, Artificial Sequence
  chemically synthesized
gtgatactcacactttgaac

SEQ ID NO: 37682 - DNA, 20 bp, Artificial Sequence
  chemically synthesized
accacctgcactacctacaa

SEQ ID NO: 37683 - DNA, 20 bp, Artificial Sequence
  chemically synthesized
acctgcactacctacaatgg

SEQ ID NO: 37684 - DNA, 20 bp, Artificial Sequence
  chemically synthesized
gctccaaatattttatatga

SEQ ID NO: 37685 - DNA, 20 bp, Artificial Sequence
  chemically synthesized
ctccaaatattttatatgaa

SEQ ID NO: 37686 - DNA, 20 bp, Artificial Sequence
  chemically synthesized
tccaaatattttatatgaaa

SEQ ID NO: 37687 - DNA, 20 bp, Artificial Sequence
  chemically synthesized
ccaaatattttatatgaaag

SEQ ID NO: 37688 - DNA, 20 bp, Artificial Sequence
  chemically synthesized
tattttatatgaaaggggcc

SEQ ID NO: 37689 - DNA, 20 bp, Artificial Sequence
  chemically synthesized
atatgaaaggggcctagaca

SEQ ID NO: 37690 - DNA, 20 bp, Artificial Sequence
  chemically synthesized
gacatagcatgctgaatgaa

SEQ ID NO: 37691 - DNA, 20 bp, Artificial Sequence
  chemically synthesized
acatagcatgctgaatgaaa

SEQ ID NO: 37692 - DNA, 20 bp, Artificial Sequence
  chemically synthesized
tagcatgctgaatgaaaagg

SEQ ID NO: 37693 - DNA, 20 bp, Artificial Sequence
  chemically synthesized
atgctgaatgaaaaggaagt

SEQ ID NO: 37694 - DNA, 20 bp, Artificial Sequence
  chemically synthesized
ctgaatgaaaaggaagtgag

SEQ ID NO: 37695 - DNA, 20 bp, Artificial Sequence
  chemically synthesized
tgaaaaggaagtgagtagac

SEQ ID NO: 37696 - DNA, 20 bp, Artificial Sequence
  chemically synthesized
gtagactagtgctttccttg

SEQ ID NO: 37697 - DNA, 20 bp, Artificial Sequence
  chemically synthesized
ttccttgaagctgtgcaacc

SEQ ID NO: 37698 - DNA, 20 bp, Artificial Sequence
  chemically synthesized
tgaagctgtgcaaccaagca

SEQ ID NO: 37699 - DNA, 20 bp, Artificial Sequence
  chemically synthesized
aaccaagcatagtttttaca

SEQ ID NO: 37700 - DNA, 20 bp, Artificial Sequence
  chemically synthesized
catagatcgtgtgtttcaca

SEQ ID NO: 37701 - DNA, 20 bp, Artificial Sequence
  chemically synthesized
tgtttcacatggtgtgataa

SEQ ID NO: 37702 - DNA, 20 bp, Artificial Sequence
  chemically synthesized
acatggtgtgataacagctt

SEQ ID NO: 37703 - DNA, 20 bp, Artificial Sequence
  chemically synthesized
agcttgagatgccattgaca

SEQ ID NO: 37704 - DNA, 20 bp, Artificial Sequence
  chemically synthesized
atgccattgacatggcccac

SEQ ID NO: 37705 - DNA, 20 bp, Artificial Sequence
  chemically synthesized
gcccaccggcttatccacat

SEQ ID NO: 37706 - DNA, 20 bp, Artificial Sequence
  chemically synthesized
ggcttatccacatcagtaat

SEQ ID NO: 37707 - DNA, 20 bp, Artificial Sequence
  chemically synthesized
gcttatccacatcagtaatt

SEQ ID NO: 37708 - DNA, 20 bp, Artificial Sequence
  chemically synthesized
cttatccacatcagtaatta

SEQ ID NO: 37709 - DNA, 20 bp, Artificial Sequence
  chemically synthesized
ccacatcagtaattagggca

SEQ ID NO: 37710 - DNA, 20 bp, Artificial Sequence
  chemically synthesized
tactatgcatcccgtgattg

SEQ ID NO: 37711 - DNA, 20 bp, Artificial Sequence
  chemically synthesized
tgtgtttaaaaatgcaatta

SEQ ID NO: 37712 - DNA, 20 bp, Artificial Sequence
  chemically synthesized
tgcaattatggactcattca

SEQ ID NO: 37713 - DNA, 20 bp, Artificial Sequence
  chemically synthesized
tatggactcattcaaagtga

SEQ ID NO: 37714 - DNA, 20 bp, Artificial Sequence
  chemically synthesized
gactcattcaaagtgaaagc

SEQ ID NO: 37715 - DNA, 20 bp, Artificial Sequence
  chemically synthesized
aagctggtatgacaatacat

SEQ ID NO: 37716 - DNA, 20 bp, Artificial Sequence
  chemically synthesized
ttttatgaataaattttata

SEQ ID NO: 37717 - DNA, 20 bp, Artificial Sequence
  chemically synthesized
aataaattttataaagaaat

SEQ ID NO: 37718 - DNA, 20 bp, Artificial Sequence
  chemically synthesized
aagaaataagctaataccta

SEQ ID NO: 37719 - DNA, 20 bp, Artificial Sequence
  chemically synthesized
gaaataagctaatacctaca

SEQ ID NO: 37720 - DNA, 20 bp, Artificial Sequence
  chemically synthesized
acagagtgtttattaaatgc

SEQ ID NO: 37721 - DNA, 20 bp, Artificial Sequence
  chemically synthesized
cagagtgtttattaaatgct

SEQ ID NO: 37722 - DNA, 20 bp, Artificial Sequence
  chemically synthesized
tgtttattaaatgctaggca

SEQ ID NO: 37723 - DNA, 20 bp, Artificial Sequence
  chemically synthesized
taaatgctaggcacagttct

SEQ ID NO: 37724 - DNA, 20 bp, Artificial Sequence
  chemically synthesized
agttctgagtgatttacaac

SEQ ID NO: 37725 - DNA, 20 bp, Artificial Sequence
  chemically synthesized
taattttcacaacattatta

SEQ ID NO: 37726 - DNA, 20 bp, Artificial Sequence
  chemically synthesized
aattttcacaacattattac

SEQ ID NO: 37727 - DNA, 20 bp, Artificial Sequence
  chemically synthesized
tttcacaacattattacagg

SEQ ID NO: 37728 - DNA, 20 bp, Artificial Sequence
  chemically synthesized
ttacaggtagattttatata

SEQ ID NO: 37729 - DNA, 20 bp, Artificial Sequence
  chemically synthesized
acaggtagattttatatatg

SEQ ID NO: 37730 - DNA, 20 bp, Artificial Sequence
  chemically synthesized
attttatatatggagaaact

SEQ ID NO: 37731 - DNA, 20 bp, Artificial Sequence
  chemically synthesized
ttttatatatggagaaactg

SEQ ID NO: 37732 - DNA, 20 bp, Artificial Sequence
  chemically synthesized
tatatggagaaactgaggca

SEQ ID NO: 37733 - DNA, 20 bp, Artificial Sequence
  chemically synthesized
tatggagaaactgaggcaca

SEQ ID NO: 37734 - DNA, 20 bp, Artificial Sequence
  chemically synthesized
taataaatctcaacattacc

SEQ ID NO: 37735 - DNA, 20 bp, Artificial Sequence
  chemically synthesized
aataaatctcaacattaccc

SEQ ID NO: 37736 - DNA, 20 bp, Artificial Sequence
  chemically synthesized
tctcaacattacccaggtga

SEQ ID NO: 37737 - DNA, 20 bp, Artificial Sequence
  chemically synthesized
caacattacccaggtgatgg

SEQ ID NO: 37738 - DNA, 20 bp, Artificial Sequence
  chemically synthesized
acattacccaggtgatggtg

SEQ ID NO: 37739 - DNA, 20 bp, Artificial Sequence
  chemically synthesized
tacccaggtgatggtggagt

SEQ ID NO: 37740 - DNA, 20 bp, Artificial Sequence
  chemically synthesized
agttggaattccaaatcatg

SEQ ID NO: 37741 - DNA, 20 bp, Artificial Sequence
  chemically synthesized
caaatcatgcagtctgactt

SEQ ID NO: 37742 - DNA, 20 bp, Artificial Sequence
  chemically synthesized
atgcagtctgactttagctg

SEQ ID NO: 37743 - DNA, 20 bp, Artificial Sequence
  chemically synthesized
agtctgactttagctgtaga

SEQ ID NO: 37744 - DNA, 20 bp, Artificial Sequence
  chemically synthesized
tgactttagctgtagacagc

SEQ ID NO: 37745 - DNA, 20 bp, Artificial Sequence
  chemically synthesized
tttagctgtagacagcaaga

SEQ ID NO: 37746 - DNA, 20 bp, Artificial Sequence
  chemically synthesized
gctgtagacagcaagatagt

SEQ ID NO: 37747 - DNA, 20 bp, Artificial Sequence
  chemically synthesized
agacagcaagatagtaagta

SEQ ID NO: 37748 - DNA, 20 bp, Artificial Sequence
  chemically synthesized
gacagcaagatagtaagtaa

SEQ ID NO: 37749 - DNA, 20 bp, Artificial Sequence
  chemically synthesized
caagatagtaagtaaaggaa

SEQ ID NO: 37750 - DNA, 20 bp, Artificial Sequence
  chemically synthesized
agatagtaagtaaaggaatg

SEQ ID NO: 37751 - DNA, 20 bp, Artificial Sequence
  chemically synthesized
ggaatggagcaacaaattga

SEQ ID NO: 37752 - DNA, 20 bp, Artificial Sequence
  chemically synthesized
ttttgcttgtttgtttgaaa

SEQ ID NO: 37753 - DNA, 20 bp, Artificial Sequence
  chemically synthesized
tttgcttgtttgtttgaaac

SEQ ID NO: 37754 - DNA, 20 bp, Artificial Sequence
  chemically synthesized
ttgcttgtttgtttgaaaca

SEQ ID NO: 37755 - DNA, 20 bp, Artificial Sequence
  chemically synthesized
agggtctcactctgtcaccc

SEQ ID NO: 37756 - DNA, 20 bp, Artificial Sequence
  chemically synthesized
tctcactctgtcaccccggc

SEQ ID NO: 37757 - DNA, 20 bp, Artificial Sequence
  chemically synthesized
tcactctgtcaccccggctg

SEQ ID NO: 37758 - DNA, 20 bp, Artificial Sequence
  chemically synthesized
tcaccccggctggagtgcaa

SEQ ID NO: 37759 - DNA, 20 bp, Artificial Sequence
  chemically synthesized
tggtgcaatcttgctcactg

SEQ ID NO: 37760 - DNA, 20 bp, Artificial Sequence
  chemically synthesized
cttgctcactgaagcctcac

SEQ ID NO: 37761 - DNA, 20 bp, Artificial Sequence
  chemically synthesized
tgaagcctcactagaacgcc

SEQ ID NO: 37762 - DNA, 20 bp, Artificial Sequence
  chemically synthesized
ttcaattgatcctcctgctt

SEQ ID NO: 37763 - DNA, 20 bp, Artificial Sequence
  chemically synthesized
atcctcctgctttagcctct

SEQ ID NO: 37764 - DNA, 20 bp, Artificial Sequence
  chemically synthesized
tcctcctgctttagcctctc

SEQ ID NO: 37765 - DNA, 20 bp, Artificial Sequence
  chemically synthesized
tcctgctttagcctctcagg

SEQ ID NO: 37766 - DNA, 20 bp, Artificial Sequence
  chemically synthesized
gctttagcctctcaggtagc

SEQ ID NO: 37767 - DNA, 20 bp, Artificial Sequence
  chemically synthesized
ctttagcctctcaggtagct

SEQ ID NO: 37768 - DNA, 20 bp, Artificial Sequence
  chemically synthesized
ctctcaggtagctaggacta

SEQ ID NO: 37769 - DNA, 20 bp, Artificial Sequence
  chemically synthesized
tctcaggtagctaggactac

SEQ ID NO: 37770 - DNA, 20 bp, Artificial Sequence
  chemically synthesized
gtagctaggactacaggtgt

SEQ ID NO: 37771 - DNA, 20 bp, Artificial Sequence
  chemically synthesized
actacaggtgtgagcctcca

SEQ ID NO: 37772 - DNA, 20 bp, Artificial Sequence
  chemically synthesized
caggtgtgagcctccatggc

SEQ ID NO: 37773 - DNA, 20 bp, Artificial Sequence
  chemically synthesized
tgtgagcctccatggccagc

SEQ ID NO: 37774 - DNA, 20 bp, Artificial Sequence
  chemically synthesized
tgagcctccatggccagcta

SEQ ID NO: 37775 - DNA, 20 bp, Artificial Sequence
  chemically synthesized
agaaattttttaaatttctg

SEQ ID NO: 37776 - DNA, 20 bp, Artificial Sequence
  chemically synthesized
tttttaaatttctgtagaaa

SEQ ID NO: 37777 - DNA, 20 bp, Artificial Sequence
  chemically synthesized
ttttaaatttctgtagaaac

SEQ ID NO: 37778 - DNA, 20 bp, Artificial Sequence
  chemically synthesized
tttaaatttctgtagaaaca

SEQ ID NO: 37779 - DNA, 20 bp, Artificial Sequence
  chemically synthesized
cagggtctccctatgttccc

SEQ ID NO: 37780 - DNA, 20 bp, Artificial Sequence
  chemically synthesized
agggtctccctatgttcccc

SEQ ID NO: 37781 - DNA, 20 bp, Artificial Sequence
  chemically synthesized
tctccctatgttccccaggc

SEQ ID NO: 37782 - DNA, 20 bp, Artificial Sequence
  chemically synthesized
ccaggctggtatccaactct

SEQ ID NO: 37783 - DNA, 20 bp, Artificial Sequence
  chemically synthesized
ctcaaacaattctcccacct

SEQ ID NO: 37784 - DNA, 20 bp, Artificial Sequence
  chemically synthesized
tctcccacctcagccttgaa

SEQ ID NO: 37785 - DNA, 20 bp, Artificial Sequence
  chemically synthesized
cctcagccttgaaaagtgtt

SEQ ID NO: 37786 - DNA, 20 bp, Artificial Sequence
  chemically synthesized
cttgaaaagtgttgagatta

SEQ ID NO: 37787 - DNA, 20 bp, Artificial Sequence
  chemically synthesized
ttgaaaagtgttgagattac

SEQ ID NO: 37788 - DNA, 20 bp, Artificial Sequence
  chemically synthesized
acaggtgtgaatcaccatgc

SEQ ID NO: 37789 - DNA, 20 bp, Artificial Sequence
  chemically synthesized
caggtgtgaatcaccatgct

SEQ ID NO: 37790 - DNA, 20 bp, Artificial Sequence
  chemically synthesized
atcaccatgctgggccttga

SEQ ID NO: 37791 - DNA, 20 bp, Artificial Sequence
  chemically synthesized
gggccttgatggatctttaa

SEQ ID NO: 37792 - DNA, 20 bp, Artificial Sequence
  chemically synthesized
ccttgatggatctttaaaag

SEQ ID NO: 37793 - DNA, 20 bp, Artificial Sequence
  chemically synthesized
tgatggatctttaaaagtgg

SEQ ID NO: 37794 - DNA, 20 bp, Artificial Sequence
  chemically synthesized
gatggatctttaaaagtggt

SEQ ID NO: 37795 - DNA, 20 bp, Artificial Sequence
  chemically synthesized
atggatctttaaaagtggtg

SEQ ID NO: 37796 - DNA, 20 bp, Artificial Sequence
  chemically synthesized
tggatctttaaaagtggtgg

SEQ ID NO: 37797 - DNA, 20 bp, Artificial Sequence
  chemically synthesized
ggatctttaaaagtggtggg

SEQ ID NO: 37798 - DNA, 20 bp, Artificial Sequence
  chemically synthesized
tctttaaaagtggtgggggg

SEQ ID NO: 37799 - DNA, 20 bp, Artificial Sequence
  chemically synthesized
ctttaaaagtggtggggggt

SEQ ID NO: 37800 - DNA, 20 bp, Artificial Sequence
  chemically synthesized
ttaaaagtggtggggggtag

SEQ ID NO: 37801 - DNA, 20 bp, Artificial Sequence
  chemically synthesized
gtggtggggggtaggagaaa

SEQ ID NO: 37802 - DNA, 20 bp, Artificial Sequence
  chemically synthesized
ggtggggggtaggagaaaaa

SEQ ID NO: 37803 - DNA, 20 bp, Artificial Sequence
  chemically synthesized
gtggggggtaggagaaaaag

SEQ ID NO: 37804 - DNA, 20 bp, Artificial Sequence
  chemically synthesized
gggggtaggagaaaaagagg

SEQ ID NO: 37805 - DNA, 20 bp, Artificial Sequence
  chemically synthesized
aaaaagaggaagaacaaaaa

SEQ ID NO: 37806 - DNA, 20 bp, Artificial Sequence
  chemically synthesized
gaacaaaaacagtatcacga

SEQ ID NO: 37807 - DNA, 20 bp, Artificial Sequence
  chemically synthesized
tcacgaaagataaacatcgt

SEQ ID NO: 37808 - DNA, 20 bp, Artificial Sequence
  chemically synthesized
cacgaaagataaacatcgtt

SEQ ID NO: 37809 - DNA, 20 bp, Artificial Sequence
  chemically synthesized
agataaacatcgttaggtct

SEQ ID NO: 37810 - DNA, 20 bp, Artificial Sequence
  chemically synthesized
gataaacatcgttaggtctc

SEQ ID NO: 37811 - DNA, 20 bp, Artificial Sequence
  chemically synthesized
aaacatcgttaggtctcggg

SEQ ID NO: 37812 - DNA, 20 bp, Artificial Sequence
  chemically synthesized
aacatcgttaggtctcggga

SEQ ID NO: 37813 - DNA, 20 bp, Artificial Sequence
  chemically synthesized
tcgttaggtctcgggaagga

SEQ ID NO: 37814 - DNA, 20 bp, Artificial Sequence
  chemically synthesized
cgttaggtctcgggaaggat

SEQ ID NO: 37815 - DNA, 20 bp, Artificial Sequence
  chemically synthesized
ggatccttttcattttgctc

SEQ ID NO: 37816 - DNA, 20 bp, Artificial Sequence
  chemically synthesized
atccttttcattttgctcta

SEQ ID NO: 37817 - DNA, 20 bp, Artificial Sequence
  chemically synthesized
tttcattttgctctagagaa

SEQ ID NO: 37818 - DNA, 20 bp, Artificial Sequence
  chemically synthesized
tgctctagagaaaagccatt

SEQ ID NO: 37819 - DNA, 20 bp, Artificial Sequence
  chemically synthesized
acttctgtgttaacaaaaaa

SEQ ID NO: 37820 - DNA, 20 bp, Artificial Sequence
  chemically synthesized
tgtgttaacaaaaaacagcc

SEQ ID NO: 37821 - DNA, 20 bp, Artificial Sequence
  chemically synthesized
gttaacaaaaaacagccgag

SEQ ID NO: 37822 - DNA, 20 bp, Artificial Sequence
  chemically synthesized
caaaaaacagccgagtagcc

SEQ ID NO: 37823 - DNA, 20 bp, Artificial Sequence
  chemically synthesized
agtagcctagtattaaactt

SEQ ID NO: 37824 - DNA, 20 bp, Artificial Sequence
  chemically synthesized
tagcctagtattaaacttta

SEQ ID NO: 37825 - DNA, 20 bp, Artificial Sequence
  chemically synthesized
cctagtattaaactttagag

SEQ ID NO: 37826 - DNA, 20 bp, Artificial Sequence
  chemically synthesized
tttagagcagttgttcttta

SEQ ID NO: 37827 - DNA, 20 bp, Artificial Sequence
  chemically synthesized
gttgttctttacggcaatta

SEQ ID NO: 37828 - DNA, 20 bp, Artificial Sequence
  chemically synthesized
ttgttctttacggcaattac

SEQ ID NO: 37829 - DNA, 20 bp, Artificial Sequence
  chemically synthesized
tgttctttacggcaattaca

SEQ ID NO: 37830 - DNA, 20 bp, Artificial Sequence
  chemically synthesized
gttctttacggcaattacag

SEQ ID NO: 37831 - DNA, 20 bp, Artificial Sequence
  chemically synthesized
acggcaattacaggggcctt

SEQ ID NO: 37832 - DNA, 20 bp, Artificial Sequence
  chemically synthesized
cggcaattacaggggccttc

SEQ ID NO: 37833 - DNA, 20 bp, Artificial Sequence
  chemically synthesized
caattacaggggccttcagg

SEQ ID NO: 37834 - DNA, 20 bp, Artificial Sequence
  chemically synthesized
aggggccttcaggaagctga

SEQ ID NO: 37835 - DNA, 20 bp, Artificial Sequence
  chemically synthesized
ggccttcaggaagctgatgg

SEQ ID NO: 37836 - DNA, 20 bp, Artificial Sequence
  chemically synthesized
aggaagctgatggaagtgtg

SEQ ID NO: 37837 - DNA, 20 bp, Artificial Sequence
  chemically synthesized
gaagtgtgaagtcctcttct

SEQ ID NO: 37838 - DNA, 20 bp, Artificial Sequence
  chemically synthesized
agtgtgaagtcctcttctca

SEQ ID NO: 37839 - DNA, 20 bp, Artificial Sequence
  chemically synthesized
gaagtcctcttctcagagaa

SEQ ID NO: 37840 - DNA, 20 bp, Artificial Sequence
  chemically synthesized
atatacgtgcacctaatttt

SEQ ID NO: 37841 - DNA, 20 bp, Artificial Sequence
  chemically synthesized
atttttagatataatttctg

SEQ ID NO: 37842 - DNA, 20 bp, Artificial Sequence
  chemically synthesized
tttttagatataatttctga

SEQ ID NO: 37843 - DNA, 20 bp, Artificial Sequence
  chemically synthesized
agatataatttctgaaggtt

SEQ ID NO: 37844 - DNA, 20 bp, Artificial Sequence
  chemically synthesized
tgaaggtttagaaactcctt

SEQ ID NO: 37845 - DNA, 20 bp, Artificial Sequence
  chemically synthesized
ccttgagttcacttatatca

SEQ ID NO: 37846 - DNA, 20 bp, Artificial Sequence
  chemically synthesized
tatatcaaagtcctcacctt

SEQ ID NO: 37847 - DNA, 20 bp, Artificial Sequence
  chemically synthesized
cacctttagaactcctgtcc

SEQ ID NO: 37848 - DNA, 20 bp, Artificial Sequence
  chemically synthesized
ctttagaactcctgtcctag

SEQ ID NO: 37849 - DNA, 20 bp, Artificial Sequence
  chemically synthesized
ttagaactcctgtcctagaa

SEQ ID NO: 37850 - DNA, 20 bp, Artificial Sequence
  chemically synthesized
gaactcctgtcctagaagag

SEQ ID NO: 37851 - DNA, 20 bp, Artificial Sequence
  chemically synthesized
ttccataaccactttgactc

SEQ ID NO: 37852 - DNA, 20 bp, Artificial Sequence
  chemically synthesized
gccacttgtaccatgtaatt

SEQ ID NO: 37853 - DNA, 20 bp, Artificial Sequence
  chemically synthesized
cacttgtaccatgtaattca

SEQ ID NO: 37854 - DNA, 20 bp, Artificial Sequence
  chemically synthesized
acttgtaccatgtaattcag

SEQ ID NO: 37855 - DNA, 20 bp, Artificial Sequence
  chemically synthesized
taccatgtaattcagaggtg

SEQ ID NO: 37856 - DNA, 20 bp, Artificial Sequence
  chemically synthesized
taattcagaggtgtagtgtc

SEQ ID NO: 37857 - DNA, 20 bp, Artificial Sequence
  chemically synthesized
agaggtgtagtgtcaagact

SEQ ID NO: 37858 - DNA, 20 bp, Artificial Sequence
  chemically synthesized
gaggtgtagtgtcaagactg

SEQ ID NO: 37859 - DNA, 20 bp, Artificial Sequence
  chemically synthesized
ggtgtagtgtcaagactgag

SEQ ID NO: 37860 - DNA, 20 bp, Artificial Sequence
  chemically synthesized
gtgtagtgtcaagactgagg

SEQ ID NO: 37861 - DNA, 20 bp, Artificial Sequence
  chemically synthesized
tagtgtcaagactgaggagg

SEQ ID NO: 37862 - DNA, 20 bp, Artificial Sequence
  chemically synthesized
tgtcaagactgaggaggaag

SEQ ID NO: 37863 - DNA, 20 bp, Artificial Sequence
  chemically synthesized
gtcaagactgaggaggaagc

SEQ ID NO: 37864 - DNA, 20 bp, Artificial Sequence
  chemically synthesized
ggaagcaggtaaattatgtc

SEQ ID NO: 37865 - DNA, 20 bp, Artificial Sequence
  chemically synthesized
aattatgtccagcaatacgt

SEQ ID NO: 37866 - DNA, 20 bp, Artificial Sequence
  chemically synthesized
tgtccagcaatacgttggct

SEQ ID NO: 37867 - DNA, 20 bp, Artificial Sequence
  chemically synthesized
gtccagcaatacgttggctt

SEQ ID NO: 37868 - DNA, 20 bp, Artificial Sequence
  chemically synthesized
aggcaaaaacaaattgtttc

SEQ ID NO: 37869 - DNA, 20 bp, Artificial Sequence
  chemically synthesized
aattgtttctagtccatttt

SEQ ID NO: 37870 - DNA, 20 bp, Artificial Sequence
  chemically synthesized
ttgtttctagtccattttaa

SEQ ID NO: 37871 - DNA, 20 bp, Artificial Sequence
  chemically synthesized
tgtttctagtccattttaag

SEQ ID NO: 37872 - DNA, 20 bp, Artificial Sequence
  chemically synthesized
gtttctagtccattttaaga

SEQ ID NO: 37873 - DNA, 20 bp, Artificial Sequence
  chemically synthesized
tctagtccattttaagaggg

SEQ ID NO: 37874 - DNA, 20 bp, Artificial Sequence
  chemically synthesized
ttaagagggaagcatttatt

SEQ ID NO: 37875 - DNA, 20 bp, Artificial Sequence
  chemically synthesized
taagagggaagcatttattt

SEQ ID NO: 37876 - DNA, 20 bp, Artificial Sequence
  chemically synthesized
aagagggaagcatttattta

SEQ ID NO: 37877 - DNA, 20 bp, Artificial Sequence
  chemically synthesized
atttagggactacatcgctc

SEQ ID NO: 37878 - DNA, 20 bp, Artificial Sequence
  chemically synthesized
ccttaacatgttaatttctc

SEQ ID NO: 37879 - DNA, 20 bp, Artificial Sequence
  chemically synthesized
ttaacatgttaatttctcca

SEQ ID NO: 37880 - DNA, 20 bp, Artificial Sequence
  chemically synthesized
tccagagtttgtaatgttct

SEQ ID NO: 37881 - DNA, 20 bp, Artificial Sequence
  chemically synthesized
gagtttgtaatgttctgagc

SEQ ID NO: 37882 - DNA, 20 bp, Artificial Sequence
  chemically synthesized
atgttctgagcaagtgtgtg

SEQ ID NO: 37883 - DNA, 20 bp, Artificial Sequence
  chemically synthesized
ttctgagcaagtgtgtgcag

SEQ ID NO: 37884 - DNA, 20 bp, Artificial Sequence
  chemically synthesized
gtgtgcagaagaaatgattg

SEQ ID NO: 37885 - DNA, 20 bp, Artificial Sequence
  chemically synthesized
gcagaagaaatgattgtagt

SEQ ID NO: 37886 - DNA, 20 bp, Artificial Sequence
  chemically synthesized
gaaatgattgtagtaagacc

SEQ ID NO: 37887 - DNA, 20 bp, Artificial Sequence
  chemically synthesized
aaatgattgtagtaagacct

SEQ ID NO: 37888 - DNA, 20 bp, Artificial Sequence
  chemically synthesized
attgtagtaagacctgggca

SEQ ID NO: 37889 - DNA, 20 bp, Artificial Sequence
  chemically synthesized
ttgtagtaagacctgggcaa

SEQ ID NO: 37890 - DNA, 20 bp, Artificial Sequence
  chemically synthesized
gtagtaagacctgggcaaag

SEQ ID NO: 37891 - DNA, 20 bp, Artificial Sequence
  chemically synthesized
agtaagacctgggcaaagga

SEQ ID NO: 37892 - DNA, 20 bp, Artificial Sequence
  chemically synthesized
taagacctgggcaaaggaga

SEQ ID NO: 37893 - DNA, 20 bp, Artificial Sequence
  chemically synthesized
aaacatttttcccccacatt

SEQ ID NO: 37894 - DNA, 20 bp, Artificial Sequence
  chemically synthesized
aacatttttcccccacattt

SEQ ID NO: 37895 - DNA, 20 bp, Artificial Sequence
  chemically synthesized
ttgggcaaaactttccatcc

SEQ ID NO: 37896 - DNA, 20 bp, Artificial Sequence
  chemically synthesized
tgggcaaaactttccatcct

SEQ ID NO: 37897 - DNA, 20 bp, Artificial Sequence
  chemically synthesized
ttccatcctgggtcacacca

SEQ ID NO: 37898 - DNA, 20 bp, Artificial Sequence
  chemically synthesized
ctcctctcctctccctcaac

SEQ ID NO: 37899 - DNA, 20 bp, Artificial Sequence
  chemically synthesized
tcctctccctcaactggtaa

SEQ ID NO: 37900 - DNA, 20 bp, Artificial Sequence
  chemically synthesized
ccaaaacatacctgactact

SEQ ID NO: 37901 - DNA, 20 bp, Artificial Sequence
  chemically synthesized
cttagtacttcccactactg

SEQ ID NO: 37902 - DNA, 20 bp, Artificial Sequence
  chemically synthesized
gtacttcccactactgtgga

SEQ ID NO: 37903 - DNA, 20 bp, Artificial Sequence
  chemically synthesized
cactactgtggatagaattt

SEQ ID NO: 37904 - DNA, 20 bp, Artificial Sequence
  chemically synthesized
ctcattcattgttcataccc

SEQ ID NO: 37905 - DNA, 20 bp, Artificial Sequence
  chemically synthesized
cattcattgttcataccctg

SEQ ID NO: 37906 - DNA, 20 bp, Artificial Sequence
  chemically synthesized
ccctggagacaaaactcctt

SEQ ID NO: 37907 - DNA, 20 bp, Artificial Sequence
  chemically synthesized
cctggagacaaaactcctta

SEQ ID NO: 37908 - DNA, 20 bp, Artificial Sequence
  chemically synthesized
taaggctattaactccccct

SEQ ID NO: 37909 - DNA, 20 bp, Artificial Sequence
  chemically synthesized
tccccctgagcttcacaatc

SEQ ID NO: 37910 - DNA, 20 bp, Artificial Sequence
  chemically synthesized
gcttcacaatctagtccctg

SEQ ID NO: 37911 - DNA, 20 bp, Artificial Sequence
  chemically synthesized
cttcacaatctagtccctgc

SEQ ID NO: 37912 - DNA, 20 bp, Artificial Sequence
  chemically synthesized
tcctctccttttccctctct

SEQ ID NO: 37913 - DNA, 20 bp, Artificial Sequence
  chemically synthesized
ttccctctctgagccccgct

SEQ ID NO: 37914 - DNA, 20 bp, Artificial Sequence
  chemically synthesized
gccccgctcagatcttcgaa

SEQ ID NO: 37915 - DNA, 20 bp, Artificial Sequence
  chemically synthesized
cccgctcagatcttcgaaca

SEQ ID NO: 37916 - DNA, 20 bp, Artificial Sequence
  chemically synthesized
cagagaacacttctgcatct

SEQ ID NO: 37917 - DNA, 20 bp, Artificial Sequence
  chemically synthesized
cttctgcatcttggcatata

SEQ ID NO: 37918 - DNA, 20 bp, Artificial Sequence
  chemically synthesized
gcatatatagttctctcaca

SEQ ID NO: 37919 - DNA, 20 bp, Artificial Sequence
  chemically synthesized
atagaacgctttctcccctt

SEQ ID NO: 37920 - DNA, 20 bp, Artificial Sequence
  chemically synthesized
cctttagctatttatccttc

SEQ ID NO: 37921 - DNA, 20 bp, Artificial Sequence
  chemically synthesized
gctatttatccttcaagtgt

SEQ ID NO: 37922 - DNA, 20 bp, Artificial Sequence
  chemically synthesized
cagctcaaacatctcatcat

SEQ ID NO: 37923 - DNA, 20 bp, Artificial Sequence
  chemically synthesized
gctcaaacatctcatcatta

SEQ ID NO: 37924 - DNA, 20 bp, Artificial Sequence
  chemically synthesized
tcaaacatctcatcattaga

SEQ ID NO: 37925 - DNA, 20 bp, Artificial Sequence
  chemically synthesized
caaacatctcatcattagag

SEQ ID NO: 37926 - DNA, 20 bp, Artificial Sequence
  chemically synthesized
agaggtttttcccaaacctc

SEQ ID NO: 37927 - DNA, 20 bp, Artificial Sequence
  chemically synthesized
gaggtttttcccaaacctct

SEQ ID NO: 37928 - DNA, 20 bp, Artificial Sequence
  chemically synthesized
ttcccaaacctctaggtaac

SEQ ID NO: 37929 - DNA, 20 bp, Artificial Sequence
  chemically synthesized
tcccaaacctctaggtaact

SEQ ID NO: 37930 - DNA, 20 bp, Artificial Sequence
  chemically synthesized
aaacctctaggtaactaggt

SEQ ID NO: 37931 - DNA, 20 bp, Artificial Sequence
  chemically synthesized
agaaaccactccccattcca

SEQ ID NO: 37932 - DNA, 20 bp, Artificial Sequence
  chemically synthesized
ccattccacggtacactgta

SEQ ID NO: 37933 - DNA, 20 bp, Artificial Sequence
  chemically synthesized
cacggtacactgtatagtct

SEQ ID NO: 37934 - DNA, 20 bp, Artificial Sequence
  chemically synthesized
acggtacactgtatagtctt

SEQ ID NO: 37935 - DNA, 20 bp, Artificial Sequence
  chemically synthesized
ctgtatagtcttaggacacc

SEQ ID NO: 37936 - DNA, 20 bp, Artificial Sequence
  chemically synthesized
cttaggacacctggttccct

SEQ ID NO: 37937 - DNA, 20 bp, Artificial Sequence
  chemically synthesized
tacaaatttgtcaattcttg

SEQ ID NO: 37938 - DNA, 20 bp, Artificial Sequence
  chemically synthesized
tttgtcaattcttgaagatt

SEQ ID NO: 37939 - DNA, 20 bp, Artificial Sequence
  chemically synthesized
aattcttgaagattaagaat

SEQ ID NO: 37940 - DNA, 20 bp, Artificial Sequence
  chemically synthesized
actctatctccctcgcctct

SEQ ID NO: 37941 - DNA, 20 bp, Artificial Sequence
  chemically synthesized
tctcagtgcctgatacctaa

SEQ ID NO: 37942 - DNA, 20 bp, Artificial Sequence
  chemically synthesized
atccttactgaataataaaa

SEQ ID NO: 37943 - DNA, 20 bp, Artificial Sequence
  chemically synthesized
taaaatggattaatgaataa

SEQ ID NO: 37944 - DNA, 20 bp, Artificial Sequence
  chemically synthesized
gaataaaagcaataaatttc

SEQ ID NO: 37945 - DNA, 20 bp, Artificial Sequence
  chemically synthesized
aataaaagcaataaatttca

SEQ ID NO: 37946 - DNA, 20 bp, Artificial Sequence
  chemically synthesized
gttaatattaataaattaaa

SEQ ID NO: 37947 - DNA, 20 bp, Artificial Sequence
  chemically synthesized
ttaatattaataaattaaaa

SEQ ID NO: 37948 - DNA, 20 bp, Artificial Sequence
  chemically synthesized
aaattaaaaaggttattttg

SEQ ID NO: 37949 - DNA, 20 bp, Artificial Sequence
  chemically synthesized
aaaaggttattttgaagtct

SEQ ID NO: 37950 - DNA, 20 bp, Artificial Sequence
  chemically synthesized
ttattttgaagtctgagaat

SEQ ID NO: 37951 - DNA, 20 bp, Artificial Sequence
  chemically synthesized
tttcacgtttccattgttca

SEQ ID NO: 37952 - DNA, 20 bp, Artificial Sequence
  chemically synthesized
ttcacgtttccattgttcat

SEQ ID NO: 37953 - DNA, 20 bp, Artificial Sequence
  chemically synthesized
attgttcatgggcaaaattc

SEQ ID NO: 37954 - DNA, 20 bp, Artificial Sequence
  chemically synthesized
gttcatgggcaaaattctgg

SEQ ID NO: 37955 - DNA, 20 bp, Artificial Sequence
  chemically synthesized
atgggcaaaattctggcagc

SEQ ID NO: 37956 - DNA, 20 bp, Artificial Sequence
  chemically synthesized
tgggcaaaattctggcagca

SEQ ID NO: 37957 - DNA, 20 bp, Artificial Sequence
  chemically synthesized
gggcaaaattctggcagcaa

SEQ ID NO: 37958 - DNA, 20 bp, Artificial Sequence
  chemically synthesized
cagcaagggattcttctcct

SEQ ID NO: 37959 - DNA, 20 bp, Artificial Sequence
  chemically synthesized
taagaaaccttttgttttct

SEQ ID NO: 37960 - DNA, 20 bp, Artificial Sequence
  chemically synthesized
gaatacatttccttgtttgc

SEQ ID NO: 37961 - DNA, 20 bp, Artificial Sequence
  chemically synthesized
tccttgtttgccagaaaaca

SEQ ID NO: 37962 - DNA, 20 bp, Artificial Sequence
  chemically synthesized
tgtttgccagaaaacatggt

SEQ ID NO: 37963 - DNA, 20 bp, Artificial Sequence
  chemically synthesized
agaaaacatggtaagataac

SEQ ID NO: 37964 - DNA, 20 bp, Artificial Sequence
  chemically synthesized
aaaacatggtaagataactg

SEQ ID NO: 37965 - DNA, 20 bp, Artificial Sequence
  chemically synthesized
aacatggtaagataactgga

SEQ ID NO: 37966 - DNA, 20 bp, Artificial Sequence
  chemically synthesized
taacattcattttattcatg

SEQ ID NO: 37967 - DNA, 20 bp, Artificial Sequence
  chemically synthesized
ttcatgaagaaactgttatt

SEQ ID NO: 37968 - DNA, 20 bp, Artificial Sequence
  chemically synthesized
aagaaactgttattcagttt

SEQ ID NO: 37969 - DNA, 20 bp, Artificial Sequence
  chemically synthesized
agaaactgttattcagttta

SEQ ID NO: 37970 - DNA, 20 bp, Artificial Sequence
  chemically synthesized
gaaactgttattcagtttaa

SEQ ID NO: 37971 - DNA, 20 bp, Artificial Sequence
  chemically synthesized
aaactgttattcagtttaag

SEQ ID NO: 37972 - DNA, 20 bp, Artificial Sequence
  chemically synthesized
cagtttaaggggttcttttt

SEQ ID NO: 37973 - DNA, 20 bp, Artificial Sequence
  chemically synthesized
ttaaggggttctttttcaga

SEQ ID NO: 37974 - DNA, 20 bp, Artificial Sequence
  chemically synthesized
ggttctttttcagaaagttt

SEQ ID NO: 37975 - DNA, 20 bp, Artificial Sequence
  chemically synthesized
tcagaaagtttcagaaatcc

SEQ ID NO: 37976 - DNA, 20 bp, Artificial Sequence
  chemically synthesized
aatccaagacctttgactgc

SEQ ID NO: 37977 - DNA, 20 bp, Artificial Sequence
  chemically synthesized
gtactgtgttctttcatcta

SEQ ID NO: 37978 - DNA, 20 bp, Artificial Sequence
  chemically synthesized
tactgtgttctttcatctat

SEQ ID NO: 37979 - DNA, 20 bp, Artificial Sequence
  chemically synthesized
ggacatttcctttgaaaact

SEQ ID NO: 37980 - DNA, 20 bp, Artificial Sequence
  chemically synthesized
gacatttcctttgaaaactg

SEQ ID NO: 37981 - DNA, 20 bp, Artificial Sequence
  chemically synthesized
aatatttaattcttacataa

SEQ ID NO: 37982 - DNA, 20 bp, Artificial Sequence
  chemically synthesized
attcttacataatagtaaaa

SEQ ID NO: 37983 - DNA, 20 bp, Artificial Sequence
  chemically synthesized
ataatagtaaaaaagtgaat

SEQ ID NO: 37984 - DNA, 20 bp, Artificial Sequence
  chemically synthesized
gtaaaaaagtgaattggcct

SEQ ID NO: 37985 - DNA, 20 bp, Artificial Sequence
  chemically synthesized
aaagtgaattggccttggaa

SEQ ID NO: 37986 - DNA, 20 bp, Artificial Sequence
  chemically synthesized
cttggaaaagacctaaatcc

SEQ ID NO: 37987 - DNA, 20 bp, Artificial Sequence
  chemically synthesized
aatcaatttgctctatgaac

SEQ ID NO: 37988 - DNA, 20 bp, Artificial Sequence
  chemically synthesized
tcaatttgctctatgaactg

SEQ ID NO: 37989 - DNA, 20 bp, Artificial Sequence
  chemically synthesized
caatttgctctatgaactgg

SEQ ID NO: 37990 - DNA, 20 bp, Artificial Sequence
  chemically synthesized
atttgctctatgaactggag

SEQ ID NO: 37991 - DNA, 20 bp, Artificial Sequence
  chemically synthesized
tgctctatgaactggaggag

SEQ ID NO: 37992 - DNA, 20 bp, Artificial Sequence
  chemically synthesized
gctctatgaactggaggagt

SEQ ID NO: 37993 - DNA, 20 bp, Artificial Sequence
  chemically synthesized
gagtgggattcatgatctct

SEQ ID NO: 37994 - DNA, 20 bp, Artificial Sequence
  chemically synthesized
catatcactactatgaaatg

SEQ ID NO: 37995 - DNA, 20 bp, Artificial Sequence
  chemically synthesized
atatcactactatgaaatgc

SEQ ID NO: 37996 - DNA, 20 bp, Artificial Sequence
  chemically synthesized
tatcactactatgaaatgca

SEQ ID NO: 37997 - DNA, 20 bp, Artificial Sequence
  chemically synthesized
cactactatgaaatgcaggg

SEQ ID NO: 37998 - DNA, 20 bp, Artificial Sequence
  chemically synthesized
aattcaaatcattaaattta

SEQ ID NO: 37999 - DNA, 20 bp, Artificial Sequence
  chemically synthesized
cattaaatttaaagaaacta

SEQ ID NO: 38000 - DNA, 20 bp, Artificial Sequence
  chemically synthesized
taaatttaaagaaactatag

SEQ ID NO: 38001 - DNA, 20 bp, Artificial Sequence
  chemically synthesized
ctatagtggcaatgtattat

SEQ ID NO: 38002 - DNA, 20 bp, Artificial Sequence
  chemically synthesized
tatagtggcaatgtattatt

SEQ ID NO: 38003 - DNA, 20 bp, Artificial Sequence
  chemically synthesized
atgaaaatctcaaaccatac

SEQ ID NO: 38004 - DNA, 20 bp, Artificial Sequence
  chemically synthesized
tgaaaatctcaaaccatacc

SEQ ID NO: 38005 - DNA, 20 bp, Artificial Sequence
  chemically synthesized
gctatgataatattaaaata

SEQ ID NO: 38006 - DNA, 20 bp, Artificial Sequence
  chemically synthesized
attaaaataaagatacattg

SEQ ID NO: 38007 - DNA, 20 bp, Artificial Sequence
  chemically synthesized
aacttgtgtaaatcacattg

SEQ ID NO: 38008 - DNA, 20 bp, Artificial Sequence
  chemically synthesized
acttgtgtaaatcacattgt

SEQ ID NO: 38009 - DNA, 20 bp, Artificial Sequence
  chemically synthesized
cttgtgtaaatcacattgtg

SEQ ID NO: 38010 - DNA, 20 bp, Artificial Sequence
  chemically synthesized
aacacttcccttccccttga

SEQ ID NO: 38011 - DNA, 20 bp, Artificial Sequence
  chemically synthesized
acacttcccttccccttgaa

SEQ ID NO: 38012 - DNA, 20 bp, Artificial Sequence
  chemically synthesized
cacttcccttccccttgaaa

SEQ ID NO: 38013 - DNA, 20 bp, Artificial Sequence
  chemically synthesized
tccccttgaaagggaaatga

SEQ ID NO: 38014 - DNA, 20 bp, Artificial Sequence
  chemically synthesized
aaagggaaatgatagaaaat

SEQ ID NO: 38015 - DNA, 20 bp, Artificial Sequence
  chemically synthesized
atgatagaaaataagtatta

SEQ ID NO: 38016 - DNA, 20 bp, Artificial Sequence
  chemically synthesized
tgatagaaaataagtattaa

SEQ ID NO: 38017 - DNA, 20 bp, Artificial Sequence
  chemically synthesized
tagaaaataagtattaaagg

SEQ ID NO: 38018 - DNA, 20 bp, Artificial Sequence
  chemically synthesized
aataagtattaaaggcagct

SEQ ID NO: 38019 - DNA, 20 bp, Artificial Sequence
  chemically synthesized
ataagtattaaaggcagctt

SEQ ID NO: 38020 - DNA, 20 bp, Artificial Sequence
  chemically synthesized
taagtattaaaggcagctta

SEQ ID NO: 38021 - DNA, 20 bp, Artificial Sequence
  chemically synthesized
aagtattaaaggcagcttag

SEQ ID NO: 38022 - DNA, 20 bp, Artificial Sequence
  chemically synthesized
ttttcaaaaaaaaatccatt

SEQ ID NO: 38023 - DNA, 20 bp, Artificial Sequence
  chemically synthesized
attgagcattttctatgtac

SEQ ID NO: 38024 - DNA, 20 bp, Artificial Sequence
  chemically synthesized
ttgagcattttctatgtacc

SEQ ID NO: 38025 - DNA, 20 bp, Artificial Sequence
  chemically synthesized
ctatgtaccaggcactgttc

SEQ ID NO: 38026 - DNA, 20 bp, Artificial Sequence
  chemically synthesized
caggcactgttctagaccct

SEQ ID NO: 38027 - DNA, 20 bp, Artificial Sequence
  chemically synthesized
acacacatgctactgattat

SEQ ID NO: 38028 - DNA, 20 bp, Artificial Sequence
  chemically synthesized
ataagatccataaaataact

SEQ ID NO: 38029 - DNA, 20 bp, Artificial Sequence
  chemically synthesized
ataaaataacttagtttcac

SEQ ID NO: 38030 - DNA, 20 bp, Artificial Sequence
  chemically synthesized
tagtttcactggcgtgttcc

SEQ ID NO: 38031 - DNA, 20 bp, Artificial Sequence
  chemically synthesized
actggcgtgttcccagtgcc

SEQ ID NO: 38032 - DNA, 20 bp, Artificial Sequence
  chemically synthesized
ctggcgtgttcccagtgccc

SEQ ID NO: 38033 - DNA, 20 bp, Artificial Sequence
  chemically synthesized
tgttcccagtgcccaggtaa

SEQ ID NO: 38034 - DNA, 20 bp, Artificial Sequence
  chemically synthesized
attaatgtttgttaaatgat

SEQ ID NO: 38035 - DNA, 20 bp, Artificial Sequence
  chemically synthesized
tgtttgttaaatgatgagaa

SEQ ID NO: 38036 - DNA, 20 bp, Artificial Sequence
  chemically synthesized
tttgttaaatgatgagaaaa

SEQ ID NO: 38037 - DNA, 20 bp, Artificial Sequence
  chemically synthesized
ttgttaaatgatgagaaaag

SEQ ID NO: 38038 - DNA, 20 bp, Artificial Sequence
  chemically synthesized
taaatgatgagaaaagagga

SEQ ID NO: 38039 - DNA, 20 bp, Artificial Sequence
  chemically synthesized
atgatgagaaaagaggaaag

SEQ ID NO: 38040 - DNA, 20 bp, Artificial Sequence
  chemically synthesized
atgagaaaagaggaaagcag

SEQ ID NO: 38041 - DNA, 20 bp, Artificial Sequence
  chemically synthesized
tgagaaaagaggaaagcaga

SEQ ID NO: 38042 - DNA, 20 bp, Artificial Sequence
  chemically synthesized
gagaaaagaggaaagcagaa

SEQ ID NO: 38043 - DNA, 20 bp, Artificial Sequence
  chemically synthesized
agaaaagaggaaagcagaag

SEQ ID NO: 38044 - DNA, 20 bp, Artificial Sequence
  chemically synthesized
aaagcagaaggggctctgct

SEQ ID NO: 38045 - DNA, 20 bp, Artificial Sequence
  chemically synthesized
aagcagaaggggctctgctc

SEQ ID NO: 38046 - DNA, 20 bp, Artificial Sequence
  chemically synthesized
gaaggggctctgctcaggtg

SEQ ID NO: 38047 - DNA, 20 bp, Artificial Sequence
  chemically synthesized
aaggggctctgctcaggtgc

SEQ ID NO: 38048 - DNA, 20 bp, Artificial Sequence
  chemically synthesized
ctcaggtgcaggaacttgtg

SEQ ID NO: 38049 - DNA, 20 bp, Artificial Sequence
  chemically synthesized
caggtgcaggaacttgtgca

SEQ ID NO: 38050 - DNA, 20 bp, Artificial Sequence
  chemically synthesized
gaacttgtgcagagatcttc

SEQ ID NO: 38051 - DNA, 20 bp, Artificial Sequence
  chemically synthesized
agatcttctggactgattcc

SEQ ID NO: 38052 - DNA, 20 bp, Artificial Sequence
  chemically synthesized
gactgattcccagtgctaac

SEQ ID NO: 38053 - DNA, 20 bp, Artificial Sequence
  chemically synthesized
cagtgctaacaagtcccttc

SEQ ID NO: 38054 - DNA, 20 bp, Artificial Sequence
  chemically synthesized
ttccagttttatccaccaat

SEQ ID NO: 38055 - DNA, 20 bp, Artificial Sequence
  chemically synthesized
caccaataagctatgtcctt

SEQ ID NO: 38056 - DNA, 20 bp, Artificial Sequence
  chemically synthesized
ttgagctcctgcccactctc

SEQ ID NO: 38057 - DNA, 20 bp, Artificial Sequence
  chemically synthesized
gagctcctgcccactctcta

SEQ ID NO: 38058 - DNA, 20 bp, Artificial Sequence
  chemically synthesized
ctagagaaaacttttatttc

SEQ ID NO: 38059 - DNA, 20 bp, Artificial Sequence
  chemically synthesized
tagagaaaacttttatttca

SEQ ID NO: 38060 - DNA, 20 bp, Artificial Sequence
  chemically synthesized
ttttatttcaaggcatactc

SEQ ID NO: 38061 - DNA, 20 bp, Artificial Sequence
  chemically synthesized
tttatttcaaggcatactcc

SEQ ID NO: 38062 - DNA, 20 bp, Artificial Sequence
  chemically synthesized
actccgggattcacatgtga

SEQ ID NO: 38063 - DNA, 20 bp, Artificial Sequence
  chemically synthesized
tccgggattcacatgtgata

SEQ ID NO: 38064 - DNA, 20 bp, Artificial Sequence
  chemically synthesized
ggattcacatgtgatagaga

SEQ ID NO: 38065 - DNA, 20 bp, Artificial Sequence
  chemically synthesized
gatagagatggttctgttcc

SEQ ID NO: 38066 - DNA, 20 bp, Artificial Sequence
  chemically synthesized
atagagatggttctgttccc

SEQ ID NO: 38067 - DNA, 20 bp, Artificial Sequence
  chemically synthesized
ggttctgttcccaggaactt

SEQ ID NO: 38068 - DNA, 20 bp, Artificial Sequence
  chemically synthesized
gttctgttcccaggaacttt

SEQ ID NO: 38069 - DNA, 20 bp, Artificial Sequence
  chemically synthesized
ctttgggcatatttaaaaac

SEQ ID NO: 38070 - DNA, 20 bp, Artificial Sequence
  chemically synthesized
ggcatatttaaaaactggac

SEQ ID NO: 38071 - DNA, 20 bp, Artificial Sequence
  chemically synthesized
ggactggaaaaatttgtgac

SEQ ID NO: 38072 - DNA, 20 bp, Artificial Sequence
  chemically synthesized
gaaaaatttgtgactagaaa

SEQ ID NO: 38073 - DNA, 20 bp, Artificial Sequence
  chemically synthesized
aaaaatttgtgactagaaaa

SEQ ID NO: 38074 - DNA, 20 bp, Artificial Sequence
  chemically synthesized
ttaaaaacacatgctcattt

SEQ ID NO: 38075 - DNA, 20 bp, Artificial Sequence
  chemically synthesized
taaaaacacatgctcatttc

SEQ ID NO: 38076 - DNA, 20 bp, Artificial Sequence
  chemically synthesized
cacatgctcatttcaggata

SEQ ID NO: 38077 - DNA, 20 bp, Artificial Sequence
  chemically synthesized
atttcaggataaagatctct

SEQ ID NO: 38078 - DNA, 20 bp, Artificial Sequence
  chemically synthesized
tttcaggataaagatctctg

SEQ ID NO: 38079 - DNA, 20 bp, Artificial Sequence
  chemically synthesized
ggataaagatctctgaggaa

SEQ ID NO: 38080 - DNA, 20 bp, Artificial Sequence
  chemically synthesized
agaatacaaaataatttaaa

SEQ ID NO: 38081 - DNA, 20 bp, Artificial Sequence
  chemically synthesized
aataatttaaaaagaaacaa

SEQ ID NO: 38082 - DNA, 20 bp, Artificial Sequence
  chemically synthesized
ttaaaaagaaacaacagaaa

SEQ ID NO: 38083 - DNA, 20 bp, Artificial Sequence
  chemically synthesized
taaaaagaaacaacagaaac

SEQ ID NO: 38084 - DNA, 20 bp, Artificial Sequence
  chemically synthesized
atacttcacttctctgtaat

SEQ ID NO: 38085 - DNA, 20 bp, Artificial Sequence
  chemically synthesized
tacttcacttctctgtaata

SEQ ID NO: 38086 - DNA, 20 bp, Artificial Sequence
  chemically synthesized
taataaggtttctgtcctcc

SEQ ID NO: 38087 - DNA, 20 bp, Artificial Sequence
  chemically synthesized
gattctttctcactaaacta

SEQ ID NO: 38088 - DNA, 20 bp, Artificial Sequence
  chemically synthesized
ttctttctcactaaactaca

SEQ ID NO: 38089 - DNA, 20 bp, Artificial Sequence
  chemically synthesized
ctcactaaactacagagaat

SEQ ID NO: 38090 - DNA, 20 bp, Artificial Sequence
  chemically synthesized
gcattctgtccacttctaca

SEQ ID NO: 38091 - DNA, 20 bp, Artificial Sequence
  chemically synthesized
cattctgtccacttctacat

SEQ ID NO: 38092 - DNA, 20 bp, Artificial Sequence
  chemically synthesized
ttttatgaatgcatacacac

SEQ ID NO: 38093 - DNA, 20 bp, Artificial Sequence
  chemically synthesized
atacacacgagaactttgaa

SEQ ID NO: 38094 - DNA, 20 bp, Artificial Sequence
  chemically synthesized
acacgagaactttgaacagt

SEQ ID NO: 38095 - DNA, 20 bp, Artificial Sequence
  chemically synthesized
gaactttgaacagttagtat

SEQ ID NO: 38096 - DNA, 20 bp, Artificial Sequence
  chemically synthesized
aactttgaacagttagtata

SEQ ID NO: 38097 - DNA, 20 bp, Artificial Sequence
  chemically synthesized
taaggtgaattctgattttt

SEQ ID NO: 38098 - DNA, 20 bp, Artificial Sequence
  chemically synthesized
tatataatgcatttaatttt

SEQ ID NO: 38099 - DNA, 20 bp, Artificial Sequence
  chemically synthesized
atttaattttgagattatgc

SEQ ID NO: 38100 - DNA, 20 bp, Artificial Sequence
  chemically synthesized
gagattatgctggctctgat

SEQ ID NO: 38101 - DNA, 20 bp, Artificial Sequence
  chemically synthesized
tgctggctctgattagccaa

SEQ ID NO: 38102 - DNA, 20 bp, Artificial Sequence
  chemically synthesized
tggctctgattagccaaaag

SEQ ID NO: 38103 - DNA, 20 bp, Artificial Sequence
  chemically synthesized
ggctctgattagccaaaaga

SEQ ID NO: 38104 - DNA, 20 bp, Artificial Sequence
  chemically synthesized
tctgattagccaaaagaagg

SEQ ID NO: 38105 - DNA, 20 bp, Artificial Sequence
  chemically synthesized
ggaagtaatatatcacattc

SEQ ID NO: 38106 - DNA, 20 bp, Artificial Sequence
  chemically synthesized
tcacattctggttattattt

SEQ ID NO: 38107 - DNA, 20 bp, Artificial Sequence
  chemically synthesized
ggttattatttcagatcctt

SEQ ID NO: 38108 - DNA, 20 bp, Artificial Sequence
  chemically synthesized
gatcctttagattactgtaa

SEQ ID NO: 38109 - DNA, 20 bp, Artificial Sequence
  chemically synthesized
ttactgtaatagacatgaaa

SEQ ID NO: 38110 - DNA, 20 bp, Artificial Sequence
  chemically synthesized
cacaacacatgacataattt

SEQ ID NO: 38111 - DNA, 20 bp, Artificial Sequence
  chemically synthesized
tcagatcgtttaaatcacac

SEQ ID NO: 38112 - DNA, 20 bp, Artificial Sequence
  chemically synthesized
agtcatcactgccatttacc

SEQ ID NO: 38113 - DNA, 20 bp, Artificial Sequence
  chemically synthesized
actgccatttacccagcaat

SEQ ID NO: 38114 - DNA, 20 bp, Artificial Sequence
  chemically synthesized
ccatttacccagcaatcagt

SEQ ID NO: 38115 - DNA, 20 bp, Artificial Sequence
  chemically synthesized
atcagttggcttgattcttc

SEQ ID NO: 38116 - DNA, 20 bp, Artificial Sequence
  chemically synthesized
gcttgattcttcaagatctt

SEQ ID NO: 38117 - DNA, 20 bp, Artificial Sequence
  chemically synthesized
cttgattcttcaagatcttg

SEQ ID NO: 38118 - DNA, 20 bp, Artificial Sequence
  chemically synthesized
cttcaagatcttgaggaact

SEQ ID NO: 38119 - DNA, 20 bp, Artificial Sequence
  chemically synthesized
ctttgctaatgttccttcaa

SEQ ID NO: 38120 - DNA, 20 bp, Artificial Sequence
  chemically synthesized
tagtcttgacacttttaaac

SEQ ID NO: 38121 - DNA, 20 bp, Artificial Sequence
  chemically synthesized
gtcttgacacttttaaacta

SEQ ID NO: 38122 - DNA, 20 bp, Artificial Sequence
  chemically synthesized
cttgacacttttaaactaga

SEQ ID NO: 38123 - DNA, 20 bp, Artificial Sequence
  chemically synthesized
actagagagtataaacccac

SEQ ID NO: 38124 - DNA, 20 bp, Artificial Sequence
  chemically synthesized
ctagagagtataaacccaca

SEQ ID NO: 38125 - DNA, 20 bp, Artificial Sequence
  chemically synthesized
ggaattgttttataatttta

SEQ ID NO: 38126 - DNA, 20 bp, Artificial Sequence
  chemically synthesized
tttcaaaatcatttacattg

SEQ ID NO: 38127 - DNA, 20 bp, Artificial Sequence
  chemically synthesized
ctaccttgccttctcttacc

SEQ ID NO: 38128 - DNA, 20 bp, Artificial Sequence
  chemically synthesized
ttgccttctcttacccagca

SEQ ID NO: 38129 - DNA, 20 bp, Artificial Sequence
  chemically synthesized
ttctcttacccagcacagat

SEQ ID NO: 38130 - DNA, 20 bp, Artificial Sequence
  chemically synthesized
tctcttacccagcacagatg

SEQ ID NO: 38131 - DNA, 20 bp, Artificial Sequence
  chemically synthesized
ttattttataattcctacat

SEQ ID NO: 38132 - DNA, 20 bp, Artificial Sequence
  chemically synthesized
ttataattcctacataagca

SEQ ID NO: 38133 - DNA, 20 bp, Artificial Sequence
  chemically synthesized
cctacataagcatagcattg

SEQ ID NO: 38134 - DNA, 20 bp, Artificial Sequence
  chemically synthesized
aaaaattactttcattctga

SEQ ID NO: 38135 - DNA, 20 bp, Artificial Sequence
  chemically synthesized
aaaattactttcattctgaa

SEQ ID NO: 38136 - DNA, 20 bp, Artificial Sequence
  chemically synthesized
aattactttcattctgaaag

SEQ ID NO: 38137 - DNA, 20 bp, Artificial Sequence
  chemically synthesized
ctttcattctgaaaggagca

SEQ ID NO: 38138 - DNA, 20 bp, Artificial Sequence
  chemically synthesized
agcacagtattttgcctttt

SEQ ID NO: 38139 - DNA, 20 bp, Artificial Sequence
  chemically synthesized
acagtattttgccttttgag

SEQ ID NO: 38140 - DNA, 20 bp, Artificial Sequence
  chemically synthesized
tgaattaaaacattaattcc

SEQ ID NO: 38141 - DNA, 20 bp, Artificial Sequence
  chemically synthesized
tgtgaatatgaaacattctt

SEQ ID NO: 38142 - DNA, 20 bp, Artificial Sequence
  chemically synthesized
gcatttcatataattactaa

SEQ ID NO: 38143 - DNA, 20 bp, Artificial Sequence
  chemically synthesized
atataattactaacagaatg

SEQ ID NO: 38144 - DNA, 20 bp, Artificial Sequence
  chemically synthesized
ataattactaacagaatgta

SEQ ID NO: 38145 - DNA, 20 bp, Artificial Sequence
  chemically synthesized
tactaacagaatgtagagtt

SEQ ID NO: 38146 - DNA, 20 bp, Artificial Sequence
  chemically synthesized
actaacagaatgtagagttg

SEQ ID NO: 38147 - DNA, 20 bp, Artificial Sequence
  chemically synthesized
gtagagttgaggtttccaac

SEQ ID NO: 38148 - DNA, 20 bp, Artificial Sequence
  chemically synthesized
tttaattatactattttgct

SEQ ID NO: 38149 - DNA, 20 bp, Artificial Sequence
  chemically synthesized
atttctatgttgtcataata

SEQ ID NO: 38150 - DNA, 20 bp, Artificial Sequence
  chemically synthesized
taatttaaatgcacattcca

SEQ ID NO: 38151 - DNA, 20 bp, Artificial Sequence
  chemically synthesized
aaatgcacattccatggcaa

SEQ ID NO: 38152 - DNA, 20 bp, Artificial Sequence
  chemically synthesized
tccctcttcaacacatacac

SEQ ID NO: 38153 - DNA, 20 bp, Artificial Sequence
  chemically synthesized
catacacaagtctgtattca

SEQ ID NO: 38154 - DNA, 20 bp, Artificial Sequence
  chemically synthesized
gtattcatagcctgttgtaa

SEQ ID NO: 38155 - DNA, 20 bp, Artificial Sequence
  chemically synthesized
catagcctgttgtaatagac

SEQ ID NO: 38156 - DNA, 20 bp, Artificial Sequence
  chemically synthesized
atagcctgttgtaatagaca

SEQ ID NO: 38157 - DNA, 20 bp, Artificial Sequence
  chemically synthesized
gtaatagacaaggttaaatg

SEQ ID NO: 38158 - DNA, 20 bp, Artificial Sequence
  chemically synthesized
taaatgctttcctcactcac

SEQ ID NO: 38159 - DNA, 20 bp, Artificial Sequence
  chemically synthesized
tttcctcactcactagcaat

SEQ ID NO: 38160 - DNA, 20 bp, Artificial Sequence
  chemically synthesized
cactagcaattggttatcac

SEQ ID NO: 38161 - DNA, 20 bp, Artificial Sequence
  chemically synthesized
ctagcaattggttatcacta

SEQ ID NO: 38162 - DNA, 20 bp, Artificial Sequence
  chemically synthesized
agcaattggttatcactaga

SEQ ID NO: 38163 - DNA, 20 bp, Artificial Sequence
  chemically synthesized
aaatcttactctacattcct

SEQ ID NO: 38164 - DNA, 20 bp, Artificial Sequence
  chemically synthesized
ctctacattcctcagtcacc

SEQ ID NO: 38165 - DNA, 20 bp, Artificial Sequence
  chemically synthesized
cattcctcagtcacctagtg

SEQ ID NO: 38166 - DNA, 20 bp, Artificial Sequence
  chemically synthesized
attcctcagtcacctagtga

SEQ ID NO: 38167 - DNA, 20 bp, Artificial Sequence
  chemically synthesized
aaggtgtactgatccacctt

SEQ ID NO: 38168 - DNA, 20 bp, Artificial Sequence
  chemically synthesized
aggtgtactgatccaccttc

SEQ ID NO: 38169 - DNA, 20 bp, Artificial Sequence
  chemically synthesized
gtgtactgatccaccttcag

SEQ ID NO: 38170 - DNA, 20 bp, Artificial Sequence
  chemically synthesized
tactgatccaccttcaggag

SEQ ID NO: 38171 - DNA, 20 bp, Artificial Sequence
  chemically synthesized
ggagcagtacaaacctttat

SEQ ID NO: 38172 - DNA, 20 bp, Artificial Sequence
  chemically synthesized
acctttattggtcacttccc

SEQ ID NO: 38173 - DNA, 20 bp, Artificial Sequence
  chemically synthesized
tcacttcccaagcaacttca

SEQ ID NO: 38174 - DNA, 20 bp, Artificial Sequence
  chemically synthesized
acttcccaagcaacttcaaa

SEQ ID NO: 38175 - DNA, 20 bp, Artificial Sequence
  chemically synthesized
tcccaagcaacttcaaagag

SEQ ID NO: 38176 - DNA, 20 bp, Artificial Sequence
  chemically synthesized
aaagagcagtaactcctcca

SEQ ID NO: 38177 - DNA, 20 bp, Artificial Sequence
  chemically synthesized
aagagcagtaactcctccac

SEQ ID NO: 38178 - DNA, 20 bp, Artificial Sequence
  chemically synthesized
agcagtaactcctccacagg

SEQ ID NO: 38179 - DNA, 20 bp, Artificial Sequence
  chemically synthesized
gaagttcttcgacttcccac

SEQ ID NO: 38180 - DNA, 20 bp, Artificial Sequence
  chemically synthesized
aagttcttcgacttcccact

SEQ ID NO: 38181 - DNA, 20 bp, Artificial Sequence
  chemically synthesized
agttcttcgacttcccactg

SEQ ID NO: 38182 - DNA, 20 bp, Artificial Sequence
  chemically synthesized
tcttcgacttcccactgggg

SEQ ID NO: 38183 - DNA, 20 bp, Artificial Sequence
  chemically synthesized
tcccactggggaagcccacc

SEQ ID NO: 38184 - DNA, 20 bp, Artificial Sequence
  chemically synthesized
cccactggggaagcccaccc

SEQ ID NO: 38185 - DNA, 20 bp, Artificial Sequence
  chemically synthesized
ccactggggaagcccaccca

SEQ ID NO: 38186 - DNA, 20 bp, Artificial Sequence
  chemically synthesized
aagcccacccagggatgtta

SEQ ID NO: 38187 - DNA, 20 bp, Artificial Sequence
  chemically synthesized
gcccacccagggatgttaca

SEQ ID NO: 38188 - DNA, 20 bp, Artificial Sequence
  chemically synthesized
ccacccagggatgttacaga

SEQ ID NO: 38189 - DNA, 20 bp, Artificial Sequence
  chemically synthesized
cacccagggatgttacagag

SEQ ID NO: 38190 - DNA, 20 bp, Artificial Sequence
  chemically synthesized
acccagggatgttacagaga

SEQ ID NO: 38191 - DNA, 20 bp, Artificial Sequence
  chemically synthesized
gggatgttacagagagggat

SEQ ID NO: 38192 - DNA, 20 bp, Artificial Sequence
  chemically synthesized
acagagagggatcggcctcg

SEQ ID NO: 38193 - DNA, 20 bp, Artificial Sequence
  chemically synthesized
gcctcgaagcattcttctta

SEQ ID NO: 38194 - DNA, 20 bp, Artificial Sequence
  chemically synthesized
cattcttcttacagtcctcc

SEQ ID NO: 38195 - DNA, 20 bp, Artificial Sequence
  chemically synthesized
ctttgaattcctgtttcaat

SEQ ID NO: 38196 - DNA, 20 bp, Artificial Sequence
  chemically synthesized
gtttcaattagttgtaatcc

SEQ ID NO: 38197 - DNA, 20 bp, Artificial Sequence
  chemically synthesized
tttcaattagttgtaatccc

SEQ ID NO: 38198 - DNA, 20 bp, Artificial Sequence
  chemically synthesized
tcaattagttgtaatcccag

SEQ ID NO: 38199 - DNA, 20 bp, Artificial Sequence
  chemically synthesized
attagttgtaatcccaggag

SEQ ID NO: 38200 - DNA, 20 bp, Artificial Sequence
  chemically synthesized
tagttgtaatcccaggagaa

SEQ ID NO: 38201 - DNA, 20 bp, Artificial Sequence
  chemically synthesized
tcccaggagaagagaactta

SEQ ID NO: 38202 - DNA, 20 bp, Artificial Sequence
  chemically synthesized
cccaggagaagagaacttac

SEQ ID NO: 38203 - DNA, 20 bp, Artificial Sequence
  chemically synthesized
aagagaacttacaggcacaa

SEQ ID NO: 38204 - DNA, 20 bp, Artificial Sequence
  chemically synthesized
gaacttacaggcacaaaagt

SEQ ID NO: 38205 - DNA, 20 bp, Artificial Sequence
  chemically synthesized
acttacaggcacaaaagtta

SEQ ID NO: 38206 - DNA, 20 bp, Artificial Sequence
  chemically synthesized
acaggcacaaaagttagagt

SEQ ID NO: 38207 - DNA, 20 bp, Artificial Sequence
  chemically synthesized
ggcacaaaagttagagttgg

SEQ ID NO: 38208 - DNA, 20 bp, Artificial Sequence
  chemically synthesized
cacaaaagttagagttggta

SEQ ID NO: 38209 - DNA, 20 bp, Artificial Sequence
  chemically synthesized
gttagagttggtagagttac

SEQ ID NO: 38210 - DNA, 20 bp, Artificial Sequence
  chemically synthesized
ttagagttggtagagttacc

SEQ ID NO: 38211 - DNA, 20 bp, Artificial Sequence
  chemically synthesized
ttggtagagttaccaggctt

SEQ ID NO: 38212 - DNA, 20 bp, Artificial Sequence
  chemically synthesized
gtagagttaccaggctttgg

SEQ ID NO: 38213 - DNA, 20 bp, Artificial Sequence
  chemically synthesized
caggctttggtagcttctct

SEQ ID NO: 38214 - DNA, 20 bp, Artificial Sequence
  chemically synthesized
aggctttggtagcttctctt

SEQ ID NO: 38215 - DNA, 20 bp, Artificial Sequence
  chemically synthesized
agcttctcttgggaataaac

SEQ ID NO: 38216 - DNA, 20 bp, Artificial Sequence
  chemically synthesized
ttctcttgggaataaactag

SEQ ID NO: 38217 - DNA, 20 bp, Artificial Sequence
  chemically synthesized
gaaatcttatgtgcttccca

SEQ ID NO: 38218 - DNA, 20 bp, Artificial Sequence
  chemically synthesized
tgtgcttcccacagaattcc

SEQ ID NO: 38219 - DNA, 20 bp, Artificial Sequence
  chemically synthesized
gcttcccacagaattcctgg

SEQ ID NO: 38220 - DNA, 20 bp, Artificial Sequence
  chemically synthesized
tcccacagaattcctggtgg

SEQ ID NO: 38221 - DNA, 20 bp, Artificial Sequence
  chemically synthesized
cccacagaattcctggtgga

SEQ ID NO: 38222 - DNA, 20 bp, Artificial Sequence
  chemically synthesized
cacagaattcctggtggaag

SEQ ID NO: 38223 - DNA, 20 bp, Artificial Sequence
  chemically synthesized
acagaattcctggtggaagg

SEQ ID NO: 38224 - DNA, 20 bp, Artificial Sequence
  chemically synthesized
cctcctctttctcgtctttc

SEQ ID NO: 38225 - DNA, 20 bp, Artificial Sequence
  chemically synthesized
ctcctctttctcgtctttct

SEQ ID NO: 38226 - DNA, 20 bp, Artificial Sequence
  chemically synthesized
ctctttctcgtctttctggg

SEQ ID NO: 38227 - DNA, 20 bp, Artificial Sequence
  chemically synthesized
tctttctcgtctttctgggc

SEQ ID NO: 38228 - DNA, 20 bp, Artificial Sequence
  chemically synthesized
tctttctgggcaggtattgt

SEQ ID NO: 38229 - DNA, 20 bp, Artificial Sequence
  chemically synthesized
ctttctgggcaggtattgtg

SEQ ID NO: 38230 - DNA, 20 bp, Artificial Sequence
  chemically synthesized
ctgggcaggtattgtgagga

SEQ ID NO: 38231 - DNA, 20 bp, Artificial Sequence
  chemically synthesized
gaggacggtatctgccctgt

SEQ ID NO: 38232 - DNA, 20 bp, Artificial Sequence
  chemically synthesized
ccgtcctcacaatacctgcc

SEQ ID NO: 38233 - DNA, 20 bp, Artificial Sequence
  chemically synthesized
cctcacaatacctgcccaga

SEQ ID NO: 38234 - DNA, 20 bp, Artificial Sequence
  chemically synthesized
caatacctgcccagaaagac

SEQ ID NO: 38235 - DNA, 20 bp, Artificial Sequence
  chemically synthesized
acctgcccagaaagacgaga

SEQ ID NO: 38236 - DNA, 20 bp, Artificial Sequence
  chemically synthesized
ctgcccagaaagacgagaaa

SEQ ID NO: 38237 - DNA, 20 bp, Artificial Sequence
  chemically synthesized
tgcccagaaagacgagaaag

SEQ ID NO: 38238 - DNA, 20 bp, Artificial Sequence
  chemically synthesized
cccagaaagacgagaaagag

SEQ ID NO: 38239 - DNA, 20 bp, Artificial Sequence
  chemically synthesized
ccagaaagacgagaaagagg

SEQ ID NO: 38240 - DNA, 20 bp, Artificial Sequence
  chemically synthesized
gaaagacgagaaagaggagg

SEQ ID NO: 38241 - DNA, 20 bp, Artificial Sequence
  chemically synthesized
ggaagaattcctccttccac

SEQ ID NO: 38242 - DNA, 20 bp, Artificial Sequence
  chemically synthesized
gaagaattcctccttccacc

SEQ ID NO: 38243 - DNA, 20 bp, Artificial Sequence
  chemically synthesized
tccttccaccaggaattctg

SEQ ID NO: 38244 - DNA, 20 bp, Artificial Sequence
  chemically synthesized
ccttccaccaggaattctgt

SEQ ID NO: 38245 - DNA, 20 bp, Artificial Sequence
  chemically synthesized
tccaccaggaattctgtggg

SEQ ID NO: 38246 - DNA, 20 bp, Artificial Sequence
  chemically synthesized
gaattctgtgggaagcacat

SEQ ID NO: 38247 - DNA, 20 bp, Artificial Sequence
  chemically synthesized
cacataagatttcatgctac

SEQ ID NO: 38248 - DNA, 20 bp, Artificial Sequence
  chemically synthesized
catgctactagtttattccc

SEQ ID NO: 38249 - DNA, 20 bp, Artificial Sequence
  chemically synthesized
tgctactagtttattcccaa

SEQ ID NO: 38250 - DNA, 20 bp, Artificial Sequence
  chemically synthesized
tactagtttattcccaagag

SEQ ID NO: 38251 - DNA, 20 bp, Artificial Sequence
  chemically synthesized
attcccaagagaagctacca

SEQ ID NO: 38252 - DNA, 20 bp, Artificial Sequence
  chemically synthesized
caagagaagctaccaaagcc

SEQ ID NO: 38253 - DNA, 20 bp, Artificial Sequence
  chemically synthesized
actctaacttttgtgcctgt

SEQ ID NO: 38254 - DNA, 20 bp, Artificial Sequence
  chemically synthesized
gcctgtaagttctcttctcc

SEQ ID NO: 38255 - DNA, 20 bp, Artificial Sequence
  chemically synthesized
cctgtaagttctcttctcct

SEQ ID NO: 38256 - DNA, 20 bp, Artificial Sequence
  chemically synthesized
gggattacaactaattgaaa

SEQ ID NO: 38257 - DNA, 20 bp, Artificial Sequence
  chemically synthesized
ggattacaactaattgaaac

SEQ ID NO: 38258 - DNA, 20 bp, Artificial Sequence
  chemically synthesized
ctaattgaaacaggaattca

SEQ ID NO: 38259 - DNA, 20 bp, Artificial Sequence
  chemically synthesized
taattgaaacaggaattcaa

SEQ ID NO: 38260 - DNA, 20 bp, Artificial Sequence
  chemically synthesized
attgaaacaggaattcaaag

SEQ ID NO: 38261 - DNA, 20 bp, Artificial Sequence
  chemically synthesized
acaggaattcaaaggagtct

SEQ ID NO: 38262 - DNA, 20 bp, Artificial Sequence
  chemically synthesized
aggaattcaaaggagtctcg

SEQ ID NO: 38263 - DNA, 20 bp, Artificial Sequence
  chemically synthesized
ggaattcaaaggagtctcgg

SEQ ID NO: 38264 - DNA, 20 bp, Artificial Sequence
  chemically synthesized
aaggagtctcggaggactgt

SEQ ID NO: 38265 - DNA, 20 bp, Artificial Sequence
  chemically synthesized
gagtctcggaggactgtaag

SEQ ID NO: 38266 - DNA, 20 bp, Artificial Sequence
  chemically synthesized
gactgtaagaagaatgcttc

SEQ ID NO: 38267 - DNA, 20 bp, Artificial Sequence
  chemically synthesized
actgtaagaagaatgcttcg

SEQ ID NO: 38268 - DNA, 20 bp, Artificial Sequence
  chemically synthesized
atccctctctgtaacatccc

SEQ ID NO: 38269 - DNA, 20 bp, Artificial Sequence
  chemically synthesized
tccctctctgtaacatccct

SEQ ID NO: 38270 - DNA, 20 bp, Artificial Sequence
  chemically synthesized
ctctctgtaacatccctggg

SEQ ID NO: 38271 - DNA, 20 bp, Artificial Sequence
  chemically synthesized
tctctgtaacatccctgggt

SEQ ID NO: 38272 - DNA, 20 bp, Artificial Sequence
  chemically synthesized
catccctgggtgggcttccc

SEQ ID NO: 38273 - DNA, 20 bp, Artificial Sequence
  chemically synthesized
ccctgggtgggcttccccag

SEQ ID NO: 38274 - DNA, 20 bp, Artificial Sequence
  chemically synthesized
cctgggtgggcttccccagt

SEQ ID NO: 38275 - DNA, 20 bp, Artificial Sequence
  chemically synthesized
gggtgggcttccccagtggg

SEQ ID NO: 38276 - DNA, 20 bp, Artificial Sequence
  chemically synthesized
gcttccccagtgggaagtcg

SEQ ID NO: 38277 - DNA, 20 bp, Artificial Sequence
  chemically synthesized
ggaagtcgaagaacttcctg

SEQ ID NO: 38278 - DNA, 20 bp, Artificial Sequence
  chemically synthesized
aagtcgaagaacttcctgtg

SEQ ID NO: 38279 - DNA, 20 bp, Artificial Sequence
  chemically synthesized
agtcgaagaacttcctgtgg

SEQ ID NO: 38280 - DNA, 20 bp, Artificial Sequence
  chemically synthesized
tcgaagaacttcctgtggag

SEQ ID NO: 38281 - DNA, 20 bp, Artificial Sequence
  chemically synthesized
ggaggagttactgctctttg

SEQ ID NO: 38282 - DNA, 20 bp, Artificial Sequence
  chemically synthesized
tactgctctttgaagttgct

SEQ ID NO: 38283 - DNA, 20 bp, Artificial Sequence
  chemically synthesized
actgctctttgaagttgctt

SEQ ID NO: 38284 - DNA, 20 bp, Artificial Sequence
  chemically synthesized
gctctttgaagttgcttggg

SEQ ID NO: 38285 - DNA, 20 bp, Artificial Sequence
  chemically synthesized
tgcttgggaagtgaccaata

SEQ ID NO: 38286 - DNA, 20 bp, Artificial Sequence
  chemically synthesized
gcttgggaagtgaccaataa

SEQ ID NO: 38287 - DNA, 20 bp, Artificial Sequence
  chemically synthesized
aaaggtttgtactgctcctg

SEQ ID NO: 38288 - DNA, 20 bp, Artificial Sequence
  chemically synthesized
aaggtttgtactgctcctga

SEQ ID NO: 38289 - DNA, 20 bp, Artificial Sequence
  chemically synthesized
gtttgtactgctcctgaagg

SEQ ID NO: 38290 - DNA, 20 bp, Artificial Sequence
  chemically synthesized
tactgctcctgaaggtggat

SEQ ID NO: 38291 - DNA, 20 bp, Artificial Sequence
  chemically synthesized
gtggatcagtacaccttcac

SEQ ID NO: 38292 - DNA, 20 bp, Artificial Sequence
  chemically synthesized
tggatcagtacaccttcact

SEQ ID NO: 38293 - DNA, 20 bp, Artificial Sequence
  chemically synthesized
tacaccttcactaggtgact

SEQ ID NO: 38294 - DNA, 20 bp, Artificial Sequence
  chemically synthesized
acaccttcactaggtgactg

SEQ ID NO: 38295 - DNA, 20 bp, Artificial Sequence
  chemically synthesized
cactaggtgactgaggaatg

SEQ ID NO: 38296 - DNA, 20 bp, Artificial Sequence
  chemically synthesized
ctaggtgactgaggaatgta

SEQ ID NO: 38297 - DNA, 20 bp, Artificial Sequence
  chemically synthesized
gtgactgaggaatgtagagt

SEQ ID NO: 38298 - DNA, 20 bp, Artificial Sequence
  chemically synthesized
gaatgtagagtaagatttca

SEQ ID NO: 38299 - DNA, 20 bp, Artificial Sequence
  chemically synthesized
agatttcacagataactctc

SEQ ID NO: 38300 - DNA, 20 bp, Artificial Sequence
  chemically synthesized
ctctagtgataaccaattgc

SEQ ID NO: 38301 - DNA, 20 bp, Artificial Sequence
  chemically synthesized
agtgataaccaattgctagt

SEQ ID NO: 38302 - DNA, 20 bp, Artificial Sequence
  chemically synthesized
ataaccaattgctagtgagt

SEQ ID NO: 38303 - DNA, 20 bp, Artificial Sequence
  chemically synthesized
taaccaattgctagtgagtg

SEQ ID NO: 38304 - DNA, 20 bp, Artificial Sequence
  chemically synthesized
caattgctagtgagtgagga

SEQ ID NO: 38305 - DNA, 20 bp, Artificial Sequence
  chemically synthesized
gagtgaggaaagcatttaaa

SEQ ID NO: 38306 - DNA, 20 bp, Artificial Sequence
  chemically synthesized
atttaaacggaatatatatt

SEQ ID NO: 38307 - DNA, 20 bp, Artificial Sequence
  chemically synthesized
tttaaacggaatatatattt

SEQ ID NO: 38308 - DNA, 20 bp, Artificial Sequence
  chemically synthesized
tttaaccttgtctattacaa

SEQ ID NO: 38309 - DNA, 20 bp, Artificial Sequence
  chemically synthesized
ttaaccttgtctattacaac

SEQ ID NO: 38310 - DNA, 20 bp, Artificial Sequence
  chemically synthesized
attacaacaggctatgaata

SEQ ID NO: 38311 - DNA, 20 bp, Artificial Sequence
  chemically synthesized
acagacttgtgtatgtgttg

SEQ ID NO: 38312 - DNA, 20 bp, Artificial Sequence
  chemically synthesized
agacttgtgtatgtgttgaa

SEQ ID NO: 38313 - DNA, 20 bp, Artificial Sequence
  chemically synthesized
gacttgtgtatgtgttgaag

SEQ ID NO: 38314 - DNA, 20 bp, Artificial Sequence
  chemically synthesized
acttgtgtatgtgttgaaga

SEQ ID NO: 38315 - DNA, 20 bp, Artificial Sequence
  chemically synthesized
ttgtgtatgtgttgaagagg

SEQ ID NO: 38316 - DNA, 20 bp, Artificial Sequence
  chemically synthesized
gtatgtgttgaagagggaga

SEQ ID NO: 38317 - DNA, 20 bp, Artificial Sequence
  chemically synthesized
agggagaaagttgaaaatat

SEQ ID NO: 38318 - DNA, 20 bp, Artificial Sequence
  chemically synthesized
gaaaatattagccattgcca

SEQ ID NO: 38319 - DNA, 20 bp, Artificial Sequence
  chemically synthesized
aaatccatattatgacaaca

SEQ ID NO: 38320 - DNA, 20 bp, Artificial Sequence
  chemically synthesized
tatgacaacatagaaataaa

SEQ ID NO: 38321 - DNA, 20 bp, Artificial Sequence
  chemically synthesized
ttttgttttaaaatttttct

SEQ ID NO: 38322 - DNA, 20 bp, Artificial Sequence
  chemically synthesized
taaaatttttctcagcaaaa

SEQ ID NO: 38323 - DNA, 20 bp, Artificial Sequence
  chemically synthesized
tataattaaacattttattt

SEQ ID NO: 38324 - DNA, 20 bp, Artificial Sequence
  chemically synthesized
ataattaaacattttatttt

SEQ ID NO: 38325 - DNA, 20 bp, Artificial Sequence
  chemically synthesized
attaaacattttattttagg

SEQ ID NO: 38326 - DNA, 20 bp, Artificial Sequence
  chemically synthesized
taggaagatgtatatgtgat

SEQ ID NO: 38327 - DNA, 20 bp, Artificial Sequence
  chemically synthesized
gatgtatatgtgattagaac

SEQ ID NO: 38328 - DNA, 20 bp, Artificial Sequence
  chemically synthesized
tatatgtgattagaaccagt

SEQ ID NO: 38329 - DNA, 20 bp, Artificial Sequence
  chemically synthesized
acctcaactctacattctgt

SEQ ID NO: 38330 - DNA, 20 bp, Artificial Sequence
  chemically synthesized
agtaattatatgaaatgctt

SEQ ID NO: 38331 - DNA, 20 bp, Artificial Sequence
  chemically synthesized
gaatgtttcatattcacaat

SEQ ID NO: 38332 - DNA, 20 bp, Artificial Sequence
  chemically synthesized
tttcatattcacaattagct

SEQ ID NO: 38333 - DNA, 20 bp, Artificial Sequence
  chemically synthesized
ttggaattaatgttttaatt

SEQ ID NO: 38334 - DNA, 20 bp, Artificial Sequence
  chemically synthesized
tggaattaatgttttaattc

SEQ ID NO: 38335 - DNA, 20 bp, Artificial Sequence
  chemically synthesized
gaattaatgttttaattcag

SEQ ID NO: 38336 - DNA, 20 bp, Artificial Sequence
  chemically synthesized
ttaattcaggagcttctcaa

SEQ ID NO: 38337 - DNA, 20 bp, Artificial Sequence
  chemically synthesized
taattcaggagcttctcaaa

SEQ ID NO: 38338 - DNA, 20 bp, Artificial Sequence
  chemically synthesized
gcaaaatactgtgctccttt

SEQ ID NO: 38339 - DNA, 20 bp, Artificial Sequence
  chemically synthesized
ctgtgctcctttcagaatga

SEQ ID NO: 38340 - DNA, 20 bp, Artificial Sequence
  chemically synthesized
tcttcaatgctatgcttatg

SEQ ID NO: 38341 - DNA, 20 bp, Artificial Sequence
  chemically synthesized
cttcaatgctatgcttatgt

SEQ ID NO: 38342 - DNA, 20 bp, Artificial Sequence
  chemically synthesized
tatgtaggaattataaaata

SEQ ID NO: 38343 - DNA, 20 bp, Artificial Sequence
  chemically synthesized
aaattgataaaacaatttgc

SEQ ID NO: 38344 - DNA, 20 bp, Artificial Sequence
  chemically synthesized
tgataaaacaatttgcgagt

SEQ ID NO: 38345 - DNA, 20 bp, Artificial Sequence
  chemically synthesized
gataaaacaatttgcgagtg

SEQ ID NO: 38346 - DNA, 20 bp, Artificial Sequence
  chemically synthesized
aggtataacctcatctgtgc

SEQ ID NO: 38347 - DNA, 20 bp, Artificial Sequence
  chemically synthesized
ggtataacctcatctgtgct

SEQ ID NO: 38348 - DNA, 20 bp, Artificial Sequence
  chemically synthesized
taacctcatctgtgctgggt

SEQ ID NO: 38349 - DNA, 20 bp, Artificial Sequence
  chemically synthesized
acctcatctgtgctgggtaa

SEQ ID NO: 38350 - DNA, 20 bp, Artificial Sequence
  chemically synthesized
tcatctgtgctgggtaagag

SEQ ID NO: 38351 - DNA, 20 bp, Artificial Sequence
  chemically synthesized
catctgtgctgggtaagaga

SEQ ID NO: 38352 - DNA, 20 bp, Artificial Sequence
  chemically synthesized
tgtgctgggtaagagaaggc

SEQ ID NO: 38353 - DNA, 20 bp, Artificial Sequence
  chemically synthesized
gtgctgggtaagagaaggca

SEQ ID NO: 38354 - DNA, 20 bp, Artificial Sequence
  chemically synthesized
ctgggtaagagaaggcaagg

SEQ ID NO: 38355 - DNA, 20 bp, Artificial Sequence
  chemically synthesized
gggtaagagaaggcaaggta

SEQ ID NO: 38356 - DNA, 20 bp, Artificial Sequence
  chemically synthesized
tgtaaatgattttgaaaata

SEQ ID NO: 38357 - DNA, 20 bp, Artificial Sequence
  chemically synthesized
aattataaaacaattccttg

SEQ ID NO: 38358 - DNA, 20 bp, Artificial Sequence
  chemically synthesized
attataaaacaattccttgt

SEQ ID NO: 38359 - DNA, 20 bp, Artificial Sequence
  chemically synthesized
ccttgtgggtttatactctc

SEQ ID NO: 38360 - DNA, 20 bp, Artificial Sequence
  chemically synthesized
gtttatactctctagtttaa

SEQ ID NO: 38361 - DNA, 20 bp, Artificial Sequence
  chemically synthesized
ctctctagtttaaaagtgtc

SEQ ID NO: 38362 - DNA, 20 bp, Artificial Sequence
  chemically synthesized
taaaagtgtcaagactattg

SEQ ID NO: 38363 - DNA, 20 bp, Artificial Sequence
  chemically synthesized
aaaagtgtcaagactattga

SEQ ID NO: 38364 - DNA, 20 bp, Artificial Sequence
  chemically synthesized
caagactattgaaggaacat

SEQ ID NO: 38365 - DNA, 20 bp, Artificial Sequence
  chemically synthesized
ctattgaaggaacattagca

SEQ ID NO: 38366 - DNA, 20 bp, Artificial Sequence
  chemically synthesized
aaggaacattagcaaagaaa

SEQ ID NO: 38367 - DNA, 20 bp, Artificial Sequence
  chemically synthesized
cattagcaaagaaaaagtca

SEQ ID NO: 38368 - DNA, 20 bp, Artificial Sequence
  chemically synthesized
aagaaaaagtcatggttttg

SEQ ID NO: 38369 - DNA, 20 bp, Artificial Sequence
  chemically synthesized
agaaaaagtcatggttttga

SEQ ID NO: 38370 - DNA, 20 bp, Artificial Sequence
  chemically synthesized
aagtcatggttttgaaggct

SEQ ID NO: 38371 - DNA, 20 bp, Artificial Sequence
  chemically synthesized
ttttgaaggctgagttcctc

SEQ ID NO: 38372 - DNA, 20 bp, Artificial Sequence
  chemically synthesized
ctgagttcctcaagatcttg

SEQ ID NO: 38373 - DNA, 20 bp, Artificial Sequence
  chemically synthesized
cctcaagatcttgaagaatc

SEQ ID NO: 38374 - DNA, 20 bp, Artificial Sequence
  chemically synthesized
gaatcaagccaactgattgc

SEQ ID NO: 38375 - DNA, 20 bp, Artificial Sequence
  chemically synthesized
aatcaagccaactgattgct

SEQ ID NO: 38376 - DNA, 20 bp, Artificial Sequence
  chemically synthesized
ccaactgattgctgggtaaa

SEQ ID NO: 38377 - DNA, 20 bp, Artificial Sequence
  chemically synthesized
actgattgctgggtaaatgg

SEQ ID NO: 38378 - DNA, 20 bp, Artificial Sequence
  chemically synthesized
ttactatttcatgtctatta

SEQ ID NO: 38379 - DNA, 20 bp, Artificial Sequence
  chemically synthesized
atgtctattacagtaatcta

SEQ ID NO: 38380 - DNA, 20 bp, Artificial Sequence
  chemically synthesized
tgtctattacagtaatctaa

SEQ ID NO: 38381 - DNA, 20 bp, Artificial Sequence
  chemically synthesized
aaaggatctgaaataataac

SEQ ID NO: 38382 - DNA, 20 bp, Artificial Sequence
  chemically synthesized
gatatattacttccttcttt

SEQ ID NO: 38383 - DNA, 20 bp, Artificial Sequence
  chemically synthesized
acttccttcttttggctaat

SEQ ID NO: 38384 - DNA, 20 bp, Artificial Sequence
  chemically synthesized
ttccttcttttggctaatca

SEQ ID NO: 38385 - DNA, 20 bp, Artificial Sequence
  chemically synthesized
ttcttttggctaatcagagc

SEQ ID NO: 38386 - DNA, 20 bp, Artificial Sequence
  chemically synthesized
aaaattaaatgcattatata

SEQ ID NO: 38387 - DNA, 20 bp, Artificial Sequence
  chemically synthesized
tggcatgcattctgaaaaat

SEQ ID NO: 38388 - DNA, 20 bp, Artificial Sequence
  chemically synthesized
caccttatactaactgttca

SEQ ID NO: 38389 - DNA, 20 bp, Artificial Sequence
  chemically synthesized
attcataaaatcaaaattaa

SEQ ID NO: 38390 - DNA, 20 bp, Artificial Sequence
  chemically synthesized
aaaagtcaattttgcctatg

SEQ ID NO: 38391 - DNA, 20 bp, Artificial Sequence
  chemically synthesized
agtcaattttgcctatgtag

SEQ ID NO: 38392 - DNA, 20 bp, Artificial Sequence
  chemically synthesized
caattttgcctatgtagaag

SEQ ID NO: 38393 - DNA, 20 bp, Artificial Sequence
  chemically synthesized
tttgcctatgtagaagtgga

SEQ ID NO: 38394 - DNA, 20 bp, Artificial Sequence
  chemically synthesized
gaagtggacagaatgcatat

SEQ ID NO: 38395 - DNA, 20 bp, Artificial Sequence
  chemically synthesized
agtggacagaatgcatataa

SEQ ID NO: 38396 - DNA, 20 bp, Artificial Sequence
  chemically synthesized
agaatgcatataagagaaca

SEQ ID NO: 38397 - DNA, 20 bp, Artificial Sequence
  chemically synthesized
gcatataagagaacaaagca

SEQ ID NO: 38398 - DNA, 20 bp, Artificial Sequence
  chemically synthesized
aagcacggtcttattctctg

SEQ ID NO: 38399 - DNA, 20 bp, Artificial Sequence
  chemically synthesized
cggtcttattctctgtagtt

SEQ ID NO: 38400 - DNA, 20 bp, Artificial Sequence
  chemically synthesized
cttattctctgtagtttagt

SEQ ID NO: 38401 - DNA, 20 bp, Artificial Sequence
  chemically synthesized
ttctctgtagtttagtgaga

SEQ ID NO: 38402 - DNA, 20 bp, Artificial Sequence
  chemically synthesized
tagtttagtgagaaagaatc

SEQ ID NO: 38403 - DNA, 20 bp, Artificial Sequence
  chemically synthesized
agtttagtgagaaagaatct

SEQ ID NO: 38404 - DNA, 20 bp, Artificial Sequence
  chemically synthesized
tttagtgagaaagaatctag

SEQ ID NO: 38405 - DNA, 20 bp, Artificial Sequence
  chemically synthesized
ttagtgagaaagaatctagg

SEQ ID NO: 38406 - DNA, 20 bp, Artificial Sequence
  chemically synthesized
tgagaaagaatctaggagga

SEQ ID NO: 38407 - DNA, 20 bp, Artificial Sequence
  chemically synthesized
ggaggacagaaaccttatta

SEQ ID NO: 38408 - DNA, 20 bp, Artificial Sequence
  chemically synthesized
aggacagaaaccttattaca

SEQ ID NO: 38409 - DNA, 20 bp, Artificial Sequence
  chemically synthesized
acagaaaccttattacagag

SEQ ID NO: 38410 - DNA, 20 bp, Artificial Sequence
  chemically synthesized
aaccttattacagagaagtg

SEQ ID NO: 38411 - DNA, 20 bp, Artificial Sequence
  chemically synthesized
ttattttgtattcttttcct

SEQ ID NO: 38412 - DNA, 20 bp, Artificial Sequence
  chemically synthesized
attttgtattcttttcctca

SEQ ID NO: 38413 - DNA, 20 bp, Artificial Sequence
  chemically synthesized
agagatctttatcctgaaat

SEQ ID NO: 38414 - DNA, 20 bp, Artificial Sequence
  chemically synthesized
tgtttttaatgtcctttttc

SEQ ID NO: 38415 - DNA, 20 bp, Artificial Sequence
  chemically synthesized
tttctagtcacaaatttttc

SEQ ID NO: 38416 - DNA, 20 bp, Artificial Sequence
  chemically synthesized
agtcacaaatttttccagtc

SEQ ID NO: 38417 - DNA, 20 bp, Artificial Sequence
  chemically synthesized
ccagtttttaaatatgccca

SEQ ID NO: 38418 - DNA, 20 bp, Artificial Sequence
  chemically synthesized
ttaaatatgcccaaagttcc

SEQ ID NO: 38419 - DNA, 20 bp, Artificial Sequence
  chemically synthesized
taaatatgcccaaagttcct

SEQ ID NO: 38420 - DNA, 20 bp, Artificial Sequence
  chemically synthesized
atgcccaaagttcctgggaa

SEQ ID NO: 38421 - DNA, 20 bp, Artificial Sequence
  chemically synthesized
tctctatcacatgtgaatcc

SEQ ID NO: 38422 - DNA, 20 bp, Artificial Sequence
  chemically synthesized
tctatcacatgtgaatcccg

SEQ ID NO: 38423 - DNA, 20 bp, Artificial Sequence
  chemically synthesized
cggagtatgccttgaaataa

SEQ ID NO: 38424 - DNA, 20 bp, Artificial Sequence
  chemically synthesized
cttgaaataaaagttttctc

SEQ ID NO: 38425 - DNA, 20 bp, Artificial Sequence
  chemically synthesized
tgaaataaaagttttctcta

SEQ ID NO: 38426 - DNA, 20 bp, Artificial Sequence
  chemically synthesized
aaataaaagttttctctaga

SEQ ID NO: 38427 - DNA, 20 bp, Artificial Sequence
  chemically synthesized
taaaagttttctctagagag

SEQ ID NO: 38428 - DNA, 20 bp, Artificial Sequence
  chemically synthesized
aaaagttttctctagagagt

SEQ ID NO: 38429 - DNA, 20 bp, Artificial Sequence
  chemically synthesized
agttttctctagagagtggg

SEQ ID NO: 38430 - DNA, 20 bp, Artificial Sequence
  chemically synthesized
gttttctctagagagtgggc

SEQ ID NO: 38431 - DNA, 20 bp, Artificial Sequence
  chemically synthesized
tttctctagagagtgggcag

SEQ ID NO: 38432 - DNA, 20 bp, Artificial Sequence
  chemically synthesized
tagagagtgggcaggagctc

SEQ ID NO: 38433 - DNA, 20 bp, Artificial Sequence
  chemically synthesized
agagagtgggcaggagctca

SEQ ID NO: 38434 - DNA, 20 bp, Artificial Sequence
  chemically synthesized
tgggcaggagctcaaggaca

SEQ ID NO: 38435 - DNA, 20 bp, Artificial Sequence
  chemically synthesized
agctcaaggacatagcttat

SEQ ID NO: 38436 - DNA, 20 bp, Artificial Sequence
  chemically synthesized
tcaaggacatagcttattgg

SEQ ID NO: 38437 - DNA, 20 bp, Artificial Sequence
  chemically synthesized
agcttattggtggataaaac

SEQ ID NO: 38438 - DNA, 20 bp, Artificial Sequence
  chemically synthesized
ttattggtggataaaactgg

SEQ ID NO: 38439 - DNA, 20 bp, Artificial Sequence
  chemically synthesized
tattggtggataaaactgga

SEQ ID NO: 38440 - DNA, 20 bp, Artificial Sequence
  chemically synthesized
attggtggataaaactggaa

SEQ ID NO: 38441 - DNA, 20 bp, Artificial Sequence
  chemically synthesized
taaaactggaagggacttgt

SEQ ID NO: 38442 - DNA, 20 bp, Artificial Sequence
  chemically synthesized
tggaagggacttgttagcac

SEQ ID NO: 38443 - DNA, 20 bp, Artificial Sequence
  chemically synthesized
ggaagggacttgttagcact

SEQ ID NO: 38444 - DNA, 20 bp, Artificial Sequence
  chemically synthesized
gacttgttagcactgggaat

SEQ ID NO: 38445 - DNA, 20 bp, Artificial Sequence
  chemically synthesized
gttagcactgggaatcagtc

SEQ ID NO: 38446 - DNA, 20 bp, Artificial Sequence
  chemically synthesized
agcactgggaatcagtccag

SEQ ID NO: 38447 - DNA, 20 bp, Artificial Sequence
  chemically synthesized
agtccagaagatctctgcac

SEQ ID NO: 38448 - DNA, 20 bp, Artificial Sequence
  chemically synthesized
ctgcacaagttcctgcacct

SEQ ID NO: 38449 - DNA, 20 bp, Artificial Sequence
  chemically synthesized
cacaagttcctgcacctgag

SEQ ID NO: 38450 - DNA, 20 bp, Artificial Sequence
  chemically synthesized
caagttcctgcacctgagca

SEQ ID NO: 38451 - DNA, 20 bp, Artificial Sequence
  chemically synthesized
catcatttaacaaacattaa

SEQ ID NO: 38452 - DNA, 20 bp, Artificial Sequence
  chemically synthesized
tcatttaacaaacattaatg

SEQ ID NO: 38453 - DNA, 20 bp, Artificial Sequence
  chemically synthesized
attaatggagcactgttacc

SEQ ID NO: 38454 - DNA, 20 bp, Artificial Sequence
  chemically synthesized
ttaatggagcactgttacct

SEQ ID NO: 38455 - DNA, 20 bp, Artificial Sequence
  chemically synthesized
gagcactgttacctgggcac

SEQ ID NO: 38456 - DNA, 20 bp, Artificial Sequence
  chemically synthesized
agcactgttacctgggcact

SEQ ID NO: 38457 - DNA, 20 bp, Artificial Sequence
  chemically synthesized
cctgggcactgggaacacgc

SEQ ID NO: 38458 - DNA, 20 bp, Artificial Sequence
  chemically synthesized
gggaacacgccagtgaaact

SEQ ID NO: 38459 - DNA, 20 bp, Artificial Sequence
  chemically synthesized
agtgaaactaagttatttta

SEQ ID NO: 38460 - DNA, 20 bp, Artificial Sequence
  chemically synthesized
tattttatggatcttataat

SEQ ID NO: 38461 - DNA, 20 bp, Artificial Sequence
  chemically synthesized
tttatggatcttataatcag

SEQ ID NO: 38462 - DNA, 20 bp, Artificial Sequence
  chemically synthesized
agtagcatgtgtgttgatct

SEQ ID NO: 38463 - DNA, 20 bp, Artificial Sequence
  chemically synthesized
gtagcatgtgtgttgatctc

SEQ ID NO: 38464 - DNA, 20 bp, Artificial Sequence
  chemically synthesized
tagcatgtgtgttgatctca

SEQ ID NO: 38465 - DNA, 20 bp, Artificial Sequence
  chemically synthesized
tgtgtgttgatctcagggtc

SEQ ID NO: 38466 - DNA, 20 bp, Artificial Sequence
  chemically synthesized
gttgatctcagggtctagaa

SEQ ID NO: 38467 - DNA, 20 bp, Artificial Sequence
  chemically synthesized
tcagggtctagaacagtgcc

SEQ ID NO: 38468 - DNA, 20 bp, Artificial Sequence
  chemically synthesized
ctagaacagtgcctggtaca

SEQ ID NO: 38469 - DNA, 20 bp, Artificial Sequence
  chemically synthesized
ggtacatagaaaatgctcaa

SEQ ID NO: 38470 - DNA, 20 bp, Artificial Sequence
  chemically synthesized
aaatttgtttttcaacccct

SEQ ID NO: 38471 - DNA, 20 bp, Artificial Sequence
  chemically synthesized
ttttctatcatttccctttc

SEQ ID NO: 38472 - DNA, 20 bp, Artificial Sequence
  chemically synthesized
tttctatcatttccctttca

SEQ ID NO: 38473 - DNA, 20 bp, Artificial Sequence
  chemically synthesized
ttctatcatttccctttcaa

SEQ ID NO: 38474 - DNA, 20 bp, Artificial Sequence
  chemically synthesized
tctatcatttccctttcaag

SEQ ID NO: 38475 - DNA, 20 bp, Artificial Sequence
  chemically synthesized
atcatttccctttcaagggg

SEQ ID NO: 38476 - DNA, 20 bp, Artificial Sequence
  chemically synthesized
tcatttccctttcaagggga

SEQ ID NO: 38477 - DNA, 20 bp, Artificial Sequence
  chemically synthesized
catttccctttcaaggggaa

SEQ ID NO: 38478 - DNA, 20 bp, Artificial Sequence
  chemically synthesized
ttccctttcaaggggaaggg

SEQ ID NO: 38479 - DNA, 20 bp, Artificial Sequence
  chemically synthesized
ggggaagggaagtgtttttg

SEQ ID NO: 38480 - DNA, 20 bp, Artificial Sequence
  chemically synthesized
ggaagggaagtgtttttgtg

SEQ ID NO: 38481 - DNA, 20 bp, Artificial Sequence
  chemically synthesized
aagggaagtgtttttgtgga

SEQ ID NO: 38482 - DNA, 20 bp, Artificial Sequence
  chemically synthesized
agggaagtgtttttgtggag

SEQ ID NO: 38483 - DNA, 20 bp, Artificial Sequence
  chemically synthesized
ccccacaatgtgatttacac

SEQ ID NO: 38484 - DNA, 20 bp, Artificial Sequence
  chemically synthesized
tctttattttaatattatca

SEQ ID NO: 38485 - DNA, 20 bp, Artificial Sequence
  chemically synthesized
attttaatattatcatagcc

SEQ ID NO: 38486 - DNA, 20 bp, Artificial Sequence
  chemically synthesized
aatattatcatagcctggta

SEQ ID NO: 38487 - DNA, 20 bp, Artificial Sequence
  chemically synthesized
atcatagcctggtatggttt

SEQ ID NO: 38488 - DNA, 20 bp, Artificial Sequence
  chemically synthesized
tatggtttgagattttcata

SEQ ID NO: 38489 - DNA, 20 bp, Artificial Sequence
  chemically synthesized
gtttgagattttcatataga

SEQ ID NO: 38490 - DNA, 20 bp, Artificial Sequence
  chemically synthesized
ctaataatacattgccacta

SEQ ID NO: 38491 - DNA, 20 bp, Artificial Sequence
  chemically synthesized
ttttacttccctgcatttca

SEQ ID NO: 38492 - DNA, 20 bp, Artificial Sequence
  chemically synthesized
tacttccctgcatttcatag

SEQ ID NO: 38493 - DNA, 20 bp, Artificial Sequence
  chemically synthesized
gcatttcatagtagtgatat

SEQ ID NO: 38494 - DNA, 20 bp, Artificial Sequence
  chemically synthesized
catttcatagtagtgatatg

SEQ ID NO: 38495 - DNA, 20 bp, Artificial Sequence
  chemically synthesized
agtagtgatatgaggtatct

SEQ ID NO: 38496 - DNA, 20 bp, Artificial Sequence
  chemically synthesized
tagtgatatgaggtatctta

SEQ ID NO: 38497 - DNA, 20 bp, Artificial Sequence
  chemically synthesized
gatcatgaatcccactcctc

SEQ ID NO: 38498 - DNA, 20 bp, Artificial Sequence
  chemically synthesized
aatcccactcctccagttca

SEQ ID NO: 38499 - DNA, 20 bp, Artificial Sequence
  chemically synthesized
tcccactcctccagttcata

SEQ ID NO: 38500 - DNA, 20 bp, Artificial Sequence
  chemically synthesized
tcatagagcaaattgattcg

SEQ ID NO: 38501 - DNA, 20 bp, Artificial Sequence
  chemically synthesized
atagagcaaattgattcgta

SEQ ID NO: 38502 - DNA, 20 bp, Artificial Sequence
  chemically synthesized
tagagcaaattgattcgtag

SEQ ID NO: 38503 - DNA, 20 bp, Artificial Sequence
  chemically synthesized
cgtagaggtatttaatgatc

SEQ ID NO: 38504 - DNA, 20 bp, Artificial Sequence
  chemically synthesized
gtatttaatgatcaagcaaa

SEQ ID NO: 38505 - DNA, 20 bp, Artificial Sequence
  chemically synthesized
tttaatgatcaagcaaatgg

SEQ ID NO: 38506 - DNA, 20 bp, Artificial Sequence
  chemically synthesized
taatgatcaagcaaatggca

SEQ ID NO: 38507 - DNA, 20 bp, Artificial Sequence
  chemically synthesized
gatcaagcaaatggcagagt

SEQ ID NO: 38508 - DNA, 20 bp, Artificial Sequence
  chemically synthesized
atcaagcaaatggcagagtt

SEQ ID NO: 38509 - DNA, 20 bp, Artificial Sequence
  chemically synthesized
gcaaatggcagagttaggac

SEQ ID NO: 38510 - DNA, 20 bp, Artificial Sequence
  chemically synthesized
caaatggcagagttaggacc

SEQ ID NO: 38511 - DNA, 20 bp, Artificial Sequence
  chemically synthesized
gcagagttaggaccaggatt

SEQ ID NO: 38512 - DNA, 20 bp, Artificial Sequence
  chemically synthesized
cagagttaggaccaggattt

SEQ ID NO: 38513 - DNA, 20 bp, Artificial Sequence
  chemically synthesized
ccaggatttaggtcttttcc

SEQ ID NO: 38514 - DNA, 20 bp, Artificial Sequence
  chemically synthesized
caggatttaggtcttttcca

SEQ ID NO: 38515 - DNA, 20 bp, Artificial Sequence
  chemically synthesized
tcacttttttactattatgt

SEQ ID NO: 38516 - DNA, 20 bp, Artificial Sequence
  chemically synthesized
agaattaaatattaaaacct

SEQ ID NO: 38517 - DNA, 20 bp, Artificial Sequence
  chemically synthesized
tattaaaacctcagttttca

SEQ ID NO: 38518 - DNA, 20 bp, Artificial Sequence
  chemically synthesized
attaaaacctcagttttcaa

SEQ ID NO: 38519 - DNA, 20 bp, Artificial Sequence
  chemically synthesized
ttttcaaaggaaatgtccta

SEQ ID NO: 38520 - DNA, 20 bp, Artificial Sequence
  chemically synthesized
aggaaatgtcctatagatga

SEQ ID NO: 38521 - DNA, 20 bp, Artificial Sequence
  chemically synthesized
gtcctatagatgaaagaaca

SEQ ID NO: 38522 - DNA, 20 bp, Artificial Sequence
  chemically synthesized
atgaaagaacacagtacttg

SEQ ID NO: 38523 - DNA, 20 bp, Artificial Sequence
  chemically synthesized
gaacacagtacttgcagtca

SEQ ID NO: 38524 - DNA, 20 bp, Artificial Sequence
  chemically synthesized
aacacagtacttgcagtcaa

SEQ ID NO: 38525 - DNA, 20 bp, Artificial Sequence
  chemically synthesized
gtacttgcagtcaaaggtct

SEQ ID NO: 38526 - DNA, 20 bp, Artificial Sequence
  chemically synthesized
atttctgaaactttctgaaa

SEQ ID NO: 38527 - DNA, 20 bp, Artificial Sequence
  chemically synthesized
gaaccccttaaactgaataa

SEQ ID NO: 38528 - DNA, 20 bp, Artificial Sequence
  chemically synthesized
aaaatgaatgttatactctc

SEQ ID NO: 38529 - DNA, 20 bp, Artificial Sequence
  chemically synthesized
agttatcttaccatgttttc

SEQ ID NO: 38530 - DNA, 20 bp, Artificial Sequence
  chemically synthesized
taccatgttttctggcaaac

SEQ ID NO: 38531 - DNA, 20 bp, Artificial Sequence
  chemically synthesized
accatgttttctggcaaaca

SEQ ID NO: 38532 - DNA, 20 bp, Artificial Sequence
  chemically synthesized
aaggaaatgtattcacatcc

SEQ ID NO: 38533 - DNA, 20 bp, Artificial Sequence
  chemically synthesized
attcacatccaagaaaacaa

SEQ ID NO: 38534 - DNA, 20 bp, Artificial Sequence
  chemically synthesized
ttcacatccaagaaaacaaa

SEQ ID NO: 38535 - DNA, 20 bp, Artificial Sequence
  chemically synthesized
caagaaaacaaaaggtttct

SEQ ID NO: 38536 - DNA, 20 bp, Artificial Sequence
  chemically synthesized
aagaaaacaaaaggtttctt

SEQ ID NO: 38537 - DNA, 20 bp, Artificial Sequence
  chemically synthesized
gaaaacaaaaggtttcttag

SEQ ID NO: 38538 - DNA, 20 bp, Artificial Sequence
  chemically synthesized
aacaaaaggtttcttaggag

SEQ ID NO: 38539 - DNA, 20 bp, Artificial Sequence
  chemically synthesized
ggagaagaatcccttgctgc

SEQ ID NO: 38540 - DNA, 20 bp, Artificial Sequence
  chemically synthesized
agaattttgcccatgaacaa

SEQ ID NO: 38541 - DNA, 20 bp, Artificial Sequence
  chemically synthesized
tggaaacgtgaaaaacataa

SEQ ID NO: 38542 - DNA, 20 bp, Artificial Sequence
  chemically synthesized
acgtgaaaaacataacagat

SEQ ID NO: 38543 - DNA, 20 bp, Artificial Sequence
  chemically synthesized
gtgaaaaacataacagatga

SEQ ID NO: 38544 - DNA, 20 bp, Artificial Sequence
  chemically synthesized
gaaaaacataacagatgaga

SEQ ID NO: 38545 - DNA, 20 bp, Artificial Sequence
  chemically synthesized
cataacagatgagagagtca

SEQ ID NO: 38546 - DNA, 20 bp, Artificial Sequence
  chemically synthesized
acagatgagagagtcacagt

SEQ ID NO: 38547 - DNA, 20 bp, Artificial Sequence
  chemically synthesized
gagagagtcacagttagttt

SEQ ID NO: 38548 - DNA, 20 bp, Artificial Sequence
  chemically synthesized
agagagtcacagttagtttt

SEQ ID NO: 38549 - DNA, 20 bp, Artificial Sequence
  chemically synthesized
tagttttgggtactaattct

SEQ ID NO: 38550 - DNA, 20 bp, Artificial Sequence
  chemically synthesized
cattaatccattttattatt

SEQ ID NO: 38551 - DNA, 20 bp, Artificial Sequence
  chemically synthesized
aatccattttattattcagt

SEQ ID NO: 38552 - DNA, 20 bp, Artificial Sequence
  chemically synthesized
atccattttattattcagta

SEQ ID NO: 38553 - DNA, 20 bp, Artificial Sequence
  chemically synthesized
ttattcagtaaggattcatc

SEQ ID NO: 38554 - DNA, 20 bp, Artificial Sequence
  chemically synthesized
aggattcatcaagtgtctat

SEQ ID NO: 38555 - DNA, 20 bp, Artificial Sequence
  chemically synthesized
ggattcatcaagtgtctatt

SEQ ID NO: 38556 - DNA, 20 bp, Artificial Sequence
  chemically synthesized
atcaagtgtctattaggtat

SEQ ID NO: 38557 - DNA, 20 bp, Artificial Sequence
  chemically synthesized
tcaagtgtctattaggtatc

SEQ ID NO: 38558 - DNA, 20 bp, Artificial Sequence
  chemically synthesized
tctattaggtatcaggcact

SEQ ID NO: 38559 - DNA, 20 bp, Artificial Sequence
  chemically synthesized
tattaggtatcaggcactga

SEQ ID NO: 38560 - DNA, 20 bp, Artificial Sequence
  chemically synthesized
attaggtatcaggcactgag

SEQ ID NO: 38561 - DNA, 20 bp, Artificial Sequence
  chemically synthesized
ggtatcaggcactgagaggc

SEQ ID NO: 38562 - DNA, 20 bp, Artificial Sequence
  chemically synthesized
gtatcaggcactgagaggcg

SEQ ID NO: 38563 - DNA, 20 bp, Artificial Sequence
  chemically synthesized
tatcaggcactgagaggcga

SEQ ID NO: 38564 - DNA, 20 bp, Artificial Sequence
  chemically synthesized
tcaggcactgagaggcgagg

SEQ ID NO: 38565 - DNA, 20 bp, Artificial Sequence
  chemically synthesized
gcactgagaggcgagggaga

SEQ ID NO: 38566 - DNA, 20 bp, Artificial Sequence
  chemically synthesized
actgagaggcgagggagata

SEQ ID NO: 38567 - DNA, 20 bp, Artificial Sequence
  chemically synthesized
gaggcgagggagatagagtt

SEQ ID NO: 38568 - DNA, 20 bp, Artificial Sequence
  chemically synthesized
gggagatagagttaagaata

SEQ ID NO: 38569 - DNA, 20 bp, Artificial Sequence
  chemically synthesized
agaactgattcttaatcttc

SEQ ID NO: 38570 - DNA, 20 bp, Artificial Sequence
  chemically synthesized
ttcaagaattgacaaatttg

SEQ ID NO: 38571 - DNA, 20 bp, Artificial Sequence
  chemically synthesized
aagaattgacaaatttgtag

SEQ ID NO: 38572 - DNA, 20 bp, Artificial Sequence
  chemically synthesized
agaattgacaaatttgtaga

SEQ ID NO: 38573 - DNA, 20 bp, Artificial Sequence
  chemically synthesized
attgacaaatttgtagaagg

SEQ ID NO: 38574 - DNA, 20 bp, Artificial Sequence
  chemically synthesized
tagacattgaacatacaata

SEQ ID NO: 38575 - DNA, 20 bp, Artificial Sequence
  chemically synthesized
acaatacagtcaaatgtgat

SEQ ID NO: 38576 - DNA, 20 bp, Artificial Sequence
  chemically synthesized
cagtcaaatgtgatgagtgt

SEQ ID NO: 38577 - DNA, 20 bp, Artificial Sequence
  chemically synthesized
aatgtgatgagtgtgagact

SEQ ID NO: 38578 - DNA, 20 bp, Artificial Sequence
  chemically synthesized
atgtgatgagtgtgagacta

SEQ ID NO: 38579 - DNA, 20 bp, Artificial Sequence
  chemically synthesized
tgtgatgagtgtgagactaa

SEQ ID NO: 38580 - DNA, 20 bp, Artificial Sequence
  chemically synthesized
gagtgtgagactaagggaac

SEQ ID NO: 38581 - DNA, 20 bp, Artificial Sequence
  chemically synthesized
agtgtgagactaagggaacc

SEQ ID NO: 38582 - DNA, 20 bp, Artificial Sequence
  chemically synthesized
ctaagggaaccaggtgtcct

SEQ ID NO: 38583 - DNA, 20 bp, Artificial Sequence
  chemically synthesized
ccaggtgtcctaagactata

SEQ ID NO: 38584 - DNA, 20 bp, Artificial Sequence
  chemically synthesized
taagactatacagtgtaccg

SEQ ID NO: 38585 - DNA, 20 bp, Artificial Sequence
  chemically synthesized
ctatacagtgtaccgtggaa

SEQ ID NO: 38586 - DNA, 20 bp, Artificial Sequence
  chemically synthesized
tatacagtgtaccgtggaat

SEQ ID NO: 38587 - DNA, 20 bp, Artificial Sequence
  chemically synthesized
atacagtgtaccgtggaatg

SEQ ID NO: 38588 - DNA, 20 bp, Artificial Sequence
  chemically synthesized
acagtgtaccgtggaatggg

SEQ ID NO: 38589 - DNA, 20 bp, Artificial Sequence
  chemically synthesized
gtgtaccgtggaatggggag

SEQ ID NO: 38590 - DNA, 20 bp, Artificial Sequence
  chemically synthesized
atggggagtggtttctaacc

SEQ ID NO: 38591 - DNA, 20 bp, Artificial Sequence
  chemically synthesized
tggtttctaacctagttacc

SEQ ID NO: 38592 - DNA, 20 bp, Artificial Sequence
  chemically synthesized
gtttctaacctagttaccta

SEQ ID NO: 38593 - DNA, 20 bp, Artificial Sequence
  chemically synthesized
tttctaacctagttacctag

SEQ ID NO: 38594 - DNA, 20 bp, Artificial Sequence
  chemically synthesized
aacctagttacctagaggtt

SEQ ID NO: 38595 - DNA, 20 bp, Artificial Sequence
  chemically synthesized
acctagttacctagaggttt

SEQ ID NO: 38596 - DNA, 20 bp, Artificial Sequence
  chemically synthesized
ggaaaaacctctctaatgat

SEQ ID NO: 38597 - DNA, 20 bp, Artificial Sequence
  chemically synthesized
tctctaatgatgagatgttt

SEQ ID NO: 38598 - DNA, 20 bp, Artificial Sequence
  chemically synthesized
gatgtttgagctgacacttg

SEQ ID NO: 38599 - DNA, 20 bp, Artificial Sequence
  chemically synthesized
atgtttgagctgacacttga

SEQ ID NO: 38600 - DNA, 20 bp, Artificial Sequence
  chemically synthesized
gctgacacttgaaggataaa

SEQ ID NO: 38601 - DNA, 20 bp, Artificial Sequence
  chemically synthesized
acttgaaggataaatagcta

SEQ ID NO: 38602 - DNA, 20 bp, Artificial Sequence
  chemically synthesized
cttgaaggataaatagctaa

SEQ ID NO: 38603 - DNA, 20 bp, Artificial Sequence
  chemically synthesized
ttgaaggataaatagctaaa

SEQ ID NO: 38604 - DNA, 20 bp, Artificial Sequence
  chemically synthesized
tgaaggataaatagctaaag

SEQ ID NO: 38605 - DNA, 20 bp, Artificial Sequence
  chemically synthesized
aaggataaatagctaaaggg

SEQ ID NO: 38606 - DNA, 20 bp, Artificial Sequence
  chemically synthesized
ataaatagctaaaggggaga

SEQ ID NO: 38607 - DNA, 20 bp, Artificial Sequence
  chemically synthesized
ggggagaaagcgttctatgt

SEQ ID NO: 38608 - DNA, 20 bp, Artificial Sequence
  chemically synthesized
ggagaaagcgttctatgtga

SEQ ID NO: 38609 - DNA, 20 bp, Artificial Sequence
  chemically synthesized
gtgagagaactatatatgcc

SEQ ID NO: 38610 - DNA, 20 bp, Artificial Sequence
  chemically synthesized
gaactatatatgccaagatg

SEQ ID NO: 38611 - DNA, 20 bp, Artificial Sequence
  chemically synthesized
ctatatatgccaagatgcag

SEQ ID NO: 38612 - DNA, 20 bp, Artificial Sequence
  chemically synthesized
gcagaagtgttctctgttcg

SEQ ID NO: 38613 - DNA, 20 bp, Artificial Sequence
  chemically synthesized
tgttctctgttcgaagatct

SEQ ID NO: 38614 - DNA, 20 bp, Artificial Sequence
  chemically synthesized
tctctgttcgaagatctgag

SEQ ID NO: 38615 - DNA, 20 bp, Artificial Sequence
  chemically synthesized
ctctgttcgaagatctgagc

SEQ ID NO: 38616 - DNA, 20 bp, Artificial Sequence
  chemically synthesized
tctgttcgaagatctgagcg

SEQ ID NO: 38617 - DNA, 20 bp, Artificial Sequence
  chemically synthesized
tcgaagatctgagcggggct

SEQ ID NO: 38618 - DNA, 20 bp, Artificial Sequence
  chemically synthesized
gaagatctgagcggggctca

SEQ ID NO: 38619 - DNA, 20 bp, Artificial Sequence
  chemically synthesized
agatctgagcggggctcaga

SEQ ID NO: 38620 - DNA, 20 bp, Artificial Sequence
  chemically synthesized
gatctgagcggggctcagag

SEQ ID NO: 38621 - DNA, 20 bp, Artificial Sequence
  chemically synthesized
atctgagcggggctcagaga

SEQ ID NO: 38622 - DNA, 20 bp, Artificial Sequence
  chemically synthesized
agcggggctcagagagggaa

SEQ ID NO: 38623 - DNA, 20 bp, Artificial Sequence
  chemically synthesized
gcggggctcagagagggaaa

SEQ ID NO: 38624 - DNA, 20 bp, Artificial Sequence
  chemically synthesized
ggggctcagagagggaaaag

SEQ ID NO: 38625 - DNA, 20 bp, Artificial Sequence
  chemically synthesized
ggctcagagagggaaaagga

SEQ ID NO: 38626 - DNA, 20 bp, Artificial Sequence
  chemically synthesized
gctcagagagggaaaaggag

SEQ ID NO: 38627 - DNA, 20 bp, Artificial Sequence
  chemically synthesized
tcagagagggaaaaggagag

SEQ ID NO: 38628 - DNA, 20 bp, Artificial Sequence
  chemically synthesized
agggaaaaggagaggagtat

SEQ ID NO: 38629 - DNA, 20 bp, Artificial Sequence
  chemically synthesized
ggaaaaggagaggagtatga

SEQ ID NO: 38630 - DNA, 20 bp, Artificial Sequence
  chemically synthesized
aaaggagaggagtatgagag

SEQ ID NO: 38631 - DNA, 20 bp, Artificial Sequence
  chemically synthesized
gagaggagtatgagagaaga

SEQ ID NO: 38632 - DNA, 20 bp, Artificial Sequence
  chemically synthesized
agaggagtatgagagaagat

SEQ ID NO: 38633 - DNA, 20 bp, Artificial Sequence
  chemically synthesized
aggagtatgagagaagatgg

SEQ ID NO: 38634 - DNA, 20 bp, Artificial Sequence
  chemically synthesized
gagtatgagagaagatggga

SEQ ID NO: 38635 - DNA, 20 bp, Artificial Sequence
  chemically synthesized
gagaagatgggagagacctg

SEQ ID NO: 38636 - DNA, 20 bp, Artificial Sequence
  chemically synthesized
agaagatgggagagacctgc

SEQ ID NO: 38637 - DNA, 20 bp, Artificial Sequence
  chemically synthesized
gaagatgggagagacctgca

SEQ ID NO: 38638 - DNA, 20 bp, Artificial Sequence
  chemically synthesized
tgggagagacctgcagggac

SEQ ID NO: 38639 - DNA, 20 bp, Artificial Sequence
  chemically synthesized
cctgcagggactagattgtg

SEQ ID NO: 38640 - DNA, 20 bp, Artificial Sequence
  chemically synthesized
agggactagattgtgaagct

SEQ ID NO: 38641 - DNA, 20 bp, Artificial Sequence
  chemically synthesized
gggactagattgtgaagctc

SEQ ID NO: 38642 - DNA, 20 bp, Artificial Sequence
  chemically synthesized
ggactagattgtgaagctca

SEQ ID NO: 38643 - DNA, 20 bp, Artificial Sequence
  chemically synthesized
gactagattgtgaagctcag

SEQ ID NO: 38644 - DNA, 20 bp, Artificial Sequence
  chemically synthesized
actagattgtgaagctcagg

SEQ ID NO: 38645 - DNA, 20 bp, Artificial Sequence
  chemically synthesized
tagattgtgaagctcagggg

SEQ ID NO: 38646 - DNA, 20 bp, Artificial Sequence
  chemically synthesized
tgaagctcagggggagttaa

SEQ ID NO: 38647 - DNA, 20 bp, Artificial Sequence
  chemically synthesized
cagggggagttaatagcctt

SEQ ID NO: 38648 - DNA, 20 bp, Artificial Sequence
  chemically synthesized
agggggagttaatagcctta

SEQ ID NO: 38649 - DNA, 20 bp, Artificial Sequence
  chemically synthesized
ggggagttaatagccttaag

SEQ ID NO: 38650 - DNA, 20 bp, Artificial Sequence
  chemically synthesized
gccttaaggagttttgtctc

SEQ ID NO: 38651 - DNA, 20 bp, Artificial Sequence
  chemically synthesized
ccttaaggagttttgtctcc

SEQ ID NO: 38652 - DNA, 20 bp, Artificial Sequence
  chemically synthesized
cttaaggagttttgtctcca

SEQ ID NO: 38653 - DNA, 20 bp, Artificial Sequence
  chemically synthesized
ccagggtatgaacaatgaat

SEQ ID NO: 38654 - DNA, 20 bp, Artificial Sequence
  chemically synthesized
cagggtatgaacaatgaatg

SEQ ID NO: 38655 - DNA, 20 bp, Artificial Sequence
  chemically synthesized
gggtatgaacaatgaatgag

SEQ ID NO: 38656 - DNA, 20 bp, Artificial Sequence
  chemically synthesized
agtcactgaaattctatcca

SEQ ID NO: 38657 - DNA, 20 bp, Artificial Sequence
  chemically synthesized
cactgaaattctatccacag

SEQ ID NO: 38658 - DNA, 20 bp, Artificial Sequence
  chemically synthesized
tgaaattctatccacagtag

SEQ ID NO: 38659 - DNA, 20 bp, Artificial Sequence
  chemically synthesized
gaaattctatccacagtagt

SEQ ID NO: 38660 - DNA, 20 bp, Artificial Sequence
  chemically synthesized
attctatccacagtagtggg

SEQ ID NO: 38661 - DNA, 20 bp, Artificial Sequence
  chemically synthesized
ccacagtagtgggaagtact

SEQ ID NO: 38662 - DNA, 20 bp, Artificial Sequence
  chemically synthesized
cagtagtgggaagtactaag

SEQ ID NO: 38663 - DNA, 20 bp, Artificial Sequence
  chemically synthesized
agtgggaagtactaagtagt

SEQ ID NO: 38664 - DNA, 20 bp, Artificial Sequence
  chemically synthesized
gtgggaagtactaagtagtc

SEQ ID NO: 38665 - DNA, 20 bp, Artificial Sequence
  chemically synthesized
ctaagtagtcaggtatgttt

SEQ ID NO: 38666 - DNA, 20 bp, Artificial Sequence
  chemically synthesized
agtagtcaggtatgttttgg

SEQ ID NO: 38667 - DNA, 20 bp, Artificial Sequence
  chemically synthesized
agtcaggtatgttttggaag

SEQ ID NO: 38668 - DNA, 20 bp, Artificial Sequence
  chemically synthesized
tttggaagaagcactgttac

SEQ ID NO: 38669 - DNA, 20 bp, Artificial Sequence
  chemically synthesized
aagaagcactgttaccagtt

SEQ ID NO: 38670 - DNA, 20 bp, Artificial Sequence
  chemically synthesized
agaagcactgttaccagttg

SEQ ID NO: 38671 - DNA, 20 bp, Artificial Sequence
  chemically synthesized
gaagcactgttaccagttga

SEQ ID NO: 38672 - DNA, 20 bp, Artificial Sequence
  chemically synthesized
agcactgttaccagttgagg

SEQ ID NO: 38673 - DNA, 20 bp, Artificial Sequence
  chemically synthesized
cactgttaccagttgaggga

SEQ ID NO: 38674 - DNA, 20 bp, Artificial Sequence
  chemically synthesized
actgttaccagttgagggag

SEQ ID NO: 38675 - DNA, 20 bp, Artificial Sequence
  chemically synthesized
tgttaccagttgagggagag

SEQ ID NO: 38676 - DNA, 20 bp, Artificial Sequence
  chemically synthesized
ttaccagttgagggagagga

SEQ ID NO: 38677 - DNA, 20 bp, Artificial Sequence
  chemically synthesized
taccagttgagggagaggag

SEQ ID NO: 38678 - DNA, 20 bp, Artificial Sequence
  chemically synthesized
ccagttgagggagaggagag

SEQ ID NO: 38679 - DNA, 20 bp, Artificial Sequence
  chemically synthesized
cagttgagggagaggagagg

SEQ ID NO: 38680 - DNA, 20 bp, Artificial Sequence
  chemically synthesized
agttgagggagaggagagga

SEQ ID NO: 38681 - DNA, 20 bp, Artificial Sequence
  chemically synthesized
ggagaggagaggagggaaat

SEQ ID NO: 38682 - DNA, 20 bp, Artificial Sequence
  chemically synthesized
agaggagggaaattagactg

SEQ ID NO: 38683 - DNA, 20 bp, Artificial Sequence
  chemically synthesized
aattagactgtggtgtgacc

SEQ ID NO: 38684 - DNA, 20 bp, Artificial Sequence
  chemically synthesized
attagactgtggtgtgaccc

SEQ ID NO: 38685 - DNA, 20 bp, Artificial Sequence
  chemically synthesized
gactgtggtgtgacccagga

SEQ ID NO: 38686 - DNA, 20 bp, Artificial Sequence
  chemically synthesized
gtggtgtgacccaggatgga

SEQ ID NO: 38687 - DNA, 20 bp, Artificial Sequence
  chemically synthesized
tggaaagttttgcccaaatg

SEQ ID NO: 38688 - DNA, 20 bp, Artificial Sequence
  chemically synthesized
ggaaagttttgcccaaatgt

SEQ ID NO: 38689 - DNA, 20 bp, Artificial Sequence
  chemically synthesized
gaaagttttgcccaaatgtg

SEQ ID NO: 38690 - DNA, 20 bp, Artificial Sequence
  chemically synthesized
aaagttttgcccaaatgtgg

SEQ ID NO: 38691 - DNA, 20 bp, Artificial Sequence
  chemically synthesized
tgtttactctctcctttgcc

SEQ ID NO: 38692 - DNA, 20 bp, Artificial Sequence
  chemically synthesized
gtttactctctcctttgccc

SEQ ID NO: 38693 - DNA, 20 bp, Artificial Sequence
  chemically synthesized
ttcttctgcacacacttgct

SEQ ID NO: 38694 - DNA, 20 bp, Artificial Sequence
  chemically synthesized
gctcagaacattacaaactc

SEQ ID NO: 38695 - DNA, 20 bp, Artificial Sequence
  chemically synthesized
tcagaacattacaaactctg

SEQ ID NO: 38696 - DNA, 20 bp, Artificial Sequence
  chemically synthesized
tctggagaaattaacatgtt

SEQ ID NO: 38697 - DNA, 20 bp, Artificial Sequence
  chemically synthesized
ctggagaaattaacatgtta

SEQ ID NO: 38698 - DNA, 20 bp, Artificial Sequence
  chemically synthesized
attaacatgttaaggatatt

SEQ ID NO: 38699 - DNA, 20 bp, Artificial Sequence
  chemically synthesized
ttaacatgttaaggatattt

SEQ ID NO: 38700 - DNA, 20 bp, Artificial Sequence
  chemically synthesized
gatatttaggatcattaaaa

SEQ ID NO: 38701 - DNA, 20 bp, Artificial Sequence
  chemically synthesized
aatgttgtcacacataatga

SEQ ID NO: 38702 - DNA, 20 bp, Artificial Sequence
  chemically synthesized
cacataatgaaagttaattt

SEQ ID NO: 38703 - DNA, 20 bp, Artificial Sequence
  chemically synthesized
aagttaatttaagaattgta

SEQ ID NO: 38704 - DNA, 20 bp, Artificial Sequence
  chemically synthesized
tttaagaattgtaaagactt

SEQ ID NO: 38705 - DNA, 20 bp, Artificial Sequence
  chemically synthesized
ttgtaaagacttgagcgatg

SEQ ID NO: 38706 - DNA, 20 bp, Artificial Sequence
  chemically synthesized
taaatgcttccctcttaaaa

SEQ ID NO: 38707 - DNA, 20 bp, Artificial Sequence
  chemically synthesized
gcttccctcttaaaatggac

SEQ ID NO: 38708 - DNA, 20 bp, Artificial Sequence
  chemically synthesized
gaaacaatttgtttttgcct

SEQ ID NO: 38709 - DNA, 20 bp, Artificial Sequence
  chemically synthesized
tgcctaagccaacgtattgc

SEQ ID NO: 38710 - DNA, 20 bp, Artificial Sequence
  chemically synthesized
taatttacctgcttcctcct

SEQ ID NO: 38711 - DNA, 20 bp, Artificial Sequence
  chemically synthesized
cactacacctctgaattaca

SEQ ID NO: 38712 - DNA, 20 bp, Artificial Sequence
  chemically synthesized
acctctgaattacatggtac

SEQ ID NO: 38713 - DNA, 20 bp, Artificial Sequence
  chemically synthesized
tctgaattacatggtacaag

SEQ ID NO: 38714 - DNA, 20 bp, Artificial Sequence
  chemically synthesized
attacatggtacaagtggca

SEQ ID NO: 38715 - DNA, 20 bp, Artificial Sequence
  chemically synthesized
ttacatggtacaagtggcac

SEQ ID NO: 38716 - DNA, 20 bp, Artificial Sequence
  chemically synthesized
tacatggtacaagtggcaca

SEQ ID NO: 38717 - DNA, 20 bp, Artificial Sequence
  chemically synthesized
atggtacaagtggcacaggg

SEQ ID NO: 38718 - DNA, 20 bp, Artificial Sequence
  chemically synthesized
aagtggcacagggaagaatt

SEQ ID NO: 38719 - DNA, 20 bp, Artificial Sequence
  chemically synthesized
cagggaagaattcagaaaac

SEQ ID NO: 38720 - DNA, 20 bp, Artificial Sequence
  chemically synthesized
gggaagaattcagaaaacta

SEQ ID NO: 38721 - DNA, 20 bp, Artificial Sequence
  chemically synthesized
aattcagaaaactagagtca

SEQ ID NO: 38722 - DNA, 20 bp, Artificial Sequence
  chemically synthesized
tcagaaaactagagtcaaag

SEQ ID NO: 38723 - DNA, 20 bp, Artificial Sequence
  chemically synthesized
aactagagtcaaagtggtta

SEQ ID NO: 38724 - DNA, 20 bp, Artificial Sequence
  chemically synthesized
tagagtcaaagtggttatgg

SEQ ID NO: 38725 - DNA, 20 bp, Artificial Sequence
  chemically synthesized
atggaagaaattataataat

SEQ ID NO: 38726 - DNA, 20 bp, Artificial Sequence
  chemically synthesized
taataatgagtccactcttc

SEQ ID NO: 38727 - DNA, 20 bp, Artificial Sequence
  chemically synthesized
aataatgagtccactcttct

SEQ ID NO: 38728 - DNA, 20 bp, Artificial Sequence
  chemically synthesized
atgagtccactcttctagga

SEQ ID NO: 38729 - DNA, 20 bp, Artificial Sequence
  chemically synthesized
tgagtccactcttctaggac

SEQ ID NO: 38730 - DNA, 20 bp, Artificial Sequence
  chemically synthesized
agtccactcttctaggacag

SEQ ID NO: 38731 - DNA, 20 bp, Artificial Sequence
  chemically synthesized
cttctaggacaggagttcta

SEQ ID NO: 38732 - DNA, 20 bp, Artificial Sequence
  chemically synthesized
ttctaggacaggagttctaa

SEQ ID NO: 38733 - DNA, 20 bp, Artificial Sequence
  chemically synthesized
aggacaggagttctaaaggt

SEQ ID NO: 38734 - DNA, 20 bp, Artificial Sequence
  chemically synthesized
ggacaggagttctaaaggtg

SEQ ID NO: 38735 - DNA, 20 bp, Artificial Sequence
  chemically synthesized
aaaggtgaggactttgatat

SEQ ID NO: 38736 - DNA, 20 bp, Artificial Sequence
  chemically synthesized
actttgatataagtgaactc

SEQ ID NO: 38737 - DNA, 20 bp, Artificial Sequence
  chemically synthesized
ctttgatataagtgaactca

SEQ ID NO: 38738 - DNA, 20 bp, Artificial Sequence
  chemically synthesized
ttgatataagtgaactcaag

SEQ ID NO: 38739 - DNA, 20 bp, Artificial Sequence
  chemically synthesized
tcaaggagtttctaaacctt

SEQ ID NO: 38740 - DNA, 20 bp, Artificial Sequence
  chemically synthesized
cagaaattatatctaaaaat

SEQ ID NO: 38741 - DNA, 20 bp, Artificial Sequence
  chemically synthesized
agaaattatatctaaaaatt

SEQ ID NO: 38742 - DNA, 20 bp, Artificial Sequence
  chemically synthesized
aaaaattaggtgcacgtata

SEQ ID NO: 38743 - DNA, 20 bp, Artificial Sequence
  chemically synthesized
aattaggtgcacgtatatag

SEQ ID NO: 38744 - DNA, 20 bp, Artificial Sequence
  chemically synthesized
atatagaagtacttttctct

SEQ ID NO: 38745 - DNA, 20 bp, Artificial Sequence
  chemically synthesized
tagaagtacttttctctgag

SEQ ID NO: 38746 - DNA, 20 bp, Artificial Sequence
  chemically synthesized
gaagtacttttctctgagaa

SEQ ID NO: 38747 - DNA, 20 bp, Artificial Sequence
  chemically synthesized
aagtacttttctctgagaag

SEQ ID NO: 38748 - DNA, 20 bp, Artificial Sequence
  chemically synthesized
agaggacttcacacttccat

SEQ ID NO: 38749 - DNA, 20 bp, Artificial Sequence
  chemically synthesized
acacttccatcagcttcctg

SEQ ID NO: 38750 - DNA, 20 bp, Artificial Sequence
  chemically synthesized
cacttccatcagcttcctga

SEQ ID NO: 38751 - DNA, 20 bp, Artificial Sequence
  chemically synthesized
aggcccctgtaattgccgta

SEQ ID NO: 38752 - DNA, 20 bp, Artificial Sequence
  chemically synthesized
cgtaaagaacaactgctcta

SEQ ID NO: 38753 - DNA, 20 bp, Artificial Sequence
  chemically synthesized
actgctctaaagtttaatac

SEQ ID NO: 38754 - DNA, 20 bp, Artificial Sequence
  chemically synthesized
ctgctctaaagtttaatact

SEQ ID NO: 38755 - DNA, 20 bp, Artificial Sequence
  chemically synthesized
aagtttaatactaggctact

SEQ ID NO: 38756 - DNA, 20 bp, Artificial Sequence
  chemically synthesized
tcggctgttttttgttaaca

SEQ ID NO: 38757 - DNA, 20 bp, Artificial Sequence
  chemically synthesized
gctgttttttgttaacacag

SEQ ID NO: 38758 - DNA, 20 bp, Artificial Sequence
  chemically synthesized
taacacagaagttttccaaa

SEQ ID NO: 38759 - DNA, 20 bp, Artificial Sequence
  chemically synthesized
ttttccaaatggcttttctc

SEQ ID NO: 38760 - DNA, 20 bp, Artificial Sequence
  chemically synthesized
ttccaaatggcttttctcta

SEQ ID NO: 38761 - DNA, 20 bp, Artificial Sequence
  chemically synthesized
tttctctagagcaaaatgaa

SEQ ID NO: 38762 - DNA, 20 bp, Artificial Sequence
  chemically synthesized
ttctctagagcaaaatgaaa

SEQ ID NO: 38763 - DNA, 20 bp, Artificial Sequence
  chemically synthesized
aaaaggatcccatccttccc

SEQ ID NO: 38764 - DNA, 20 bp, Artificial Sequence
  chemically synthesized
cctaccccccaccactttta

SEQ ID NO: 38765 - DNA, 20 bp, Artificial Sequence
  chemically synthesized
accacttttaaagatccatc

SEQ ID NO: 38766 - DNA, 20 bp, Artificial Sequence
  chemically synthesized
ccacttttaaagatccatca

SEQ ID NO: 38767 - DNA, 20 bp, Artificial Sequence
  chemically synthesized
tttaaagatccatcaaggcc

SEQ ID NO: 38768 - DNA, 20 bp, Artificial Sequence
  chemically synthesized
agatccatcaaggcccagca

SEQ ID NO: 38769 - DNA, 20 bp, Artificial Sequence
  chemically synthesized
ctgtaatctcaacacttttc

SEQ ID NO: 38770 - DNA, 20 bp, Artificial Sequence
  chemically synthesized
tgtaatctcaacacttttca

SEQ ID NO: 38771 - DNA, 20 bp, Artificial Sequence
  chemically synthesized
tctcaacacttttcaaggct

SEQ ID NO: 38772 - DNA, 20 bp, Artificial Sequence
  chemically synthesized
ctcaacacttttcaaggctg

SEQ ID NO: 38773 - DNA, 20 bp, Artificial Sequence
  chemically synthesized
aacacttttcaaggctgagg

SEQ ID NO: 38774 - DNA, 20 bp, Artificial Sequence
  chemically synthesized
acacttttcaaggctgaggt

SEQ ID NO: 38775 - DNA, 20 bp, Artificial Sequence
  chemically synthesized
acttttcaaggctgaggtgg

SEQ ID NO: 38776 - DNA, 20 bp, Artificial Sequence
  chemically synthesized
ctgaggtgggagaattgttt

SEQ ID NO: 38777 - DNA, 20 bp, Artificial Sequence
  chemically synthesized
tgggagaattgtttgagacc

SEQ ID NO: 38778 - DNA, 20 bp, Artificial Sequence
  chemically synthesized
ggagaattgtttgagaccaa

SEQ ID NO: 38779 - DNA, 20 bp, Artificial Sequence
  chemically synthesized
aattgtttgagaccaagagt

SEQ ID NO: 38780 - DNA, 20 bp, Artificial Sequence
  chemically synthesized
tgagaccaagagttggatac

SEQ ID NO: 38781 - DNA, 20 bp, Artificial Sequence
  chemically synthesized
ccaagagttggataccagcc

SEQ ID NO: 38782 - DNA, 20 bp, Artificial Sequence
  chemically synthesized
caagagttggataccagcct

SEQ ID NO: 38783 - DNA, 20 bp, Artificial Sequence
  chemically synthesized
aagagttggataccagcctg

SEQ ID NO: 38784 - DNA, 20 bp, Artificial Sequence
  chemically synthesized
ggataccagcctggggaaca

SEQ ID NO: 38785 - DNA, 20 bp, Artificial Sequence
  chemically synthesized
gataccagcctggggaacat

SEQ ID NO: 38786 - DNA, 20 bp, Artificial Sequence
  chemically synthesized
ataccagcctggggaacata

SEQ ID NO: 38787 - DNA, 20 bp, Artificial Sequence
  chemically synthesized
accagcctggggaacatagg

SEQ ID NO: 38788 - DNA, 20 bp, Artificial Sequence
  chemically synthesized
atagggagaccctgtttcta

SEQ ID NO: 38789 - DNA, 20 bp, Artificial Sequence
  chemically synthesized
agaaatttaaaaaatttctc

SEQ ID NO: 38790 - DNA, 20 bp, Artificial Sequence
  chemically synthesized
atttaaaaaatttctctagc

SEQ ID NO: 38791 - DNA, 20 bp, Artificial Sequence
  chemically synthesized
aaaatttctctagctggcca

SEQ ID NO: 38792 - DNA, 20 bp, Artificial Sequence
  chemically synthesized
aatttctctagctggccatg

SEQ ID NO: 38793 - DNA, 20 bp, Artificial Sequence
  chemically synthesized
atttctctagctggccatgg

SEQ ID NO: 38794 - DNA, 20 bp, Artificial Sequence
  chemically synthesized
gccatggaggctcacacctg

SEQ ID NO: 38795 - DNA, 20 bp, Artificial Sequence
  chemically synthesized
gaggctcacacctgtagtcc

SEQ ID NO: 38796 - DNA, 20 bp, Artificial Sequence
  chemically synthesized
acctgtagtcctagctacct

SEQ ID NO: 38797 - DNA, 20 bp, Artificial Sequence
  chemically synthesized
ctgtagtcctagctacctga

SEQ ID NO: 38798 - DNA, 20 bp, Artificial Sequence
  chemically synthesized
tgtagtcctagctacctgag

SEQ ID NO: 38799 - DNA, 20 bp, Artificial Sequence
  chemically synthesized
cctagctacctgagaggcta

SEQ ID NO: 38800 - DNA, 20 bp, Artificial Sequence
  chemically synthesized
agctacctgagaggctaaag

SEQ ID NO: 38801 - DNA, 20 bp, Artificial Sequence
  chemically synthesized
gctacctgagaggctaaagc

SEQ ID NO: 38802 - DNA, 20 bp, Artificial Sequence
  chemically synthesized
tacctgagaggctaaagcag

SEQ ID NO: 38803 - DNA, 20 bp, Artificial Sequence
  chemically synthesized
acctgagaggctaaagcagg

SEQ ID NO: 38804 - DNA, 20 bp, Artificial Sequence
  chemically synthesized
gcaggaggatcaattgaatc

SEQ ID NO: 38805 - DNA, 20 bp, Artificial Sequence
  chemically synthesized
caggaggatcaattgaatcc

SEQ ID NO: 38806 - DNA, 20 bp, Artificial Sequence
  chemically synthesized
tcaattgaatccaggcgttc

SEQ ID NO: 38807 - DNA, 20 bp, Artificial Sequence
  chemically synthesized
ttgaatccaggcgttctagt

SEQ ID NO: 38808 - DNA, 20 bp, Artificial Sequence
  chemically synthesized
tgaatccaggcgttctagtg

SEQ ID NO: 38809 - DNA, 20 bp, Artificial Sequence
  chemically synthesized
caggcgttctagtgaggctt

SEQ ID NO: 38810 - DNA, 20 bp, Artificial Sequence
  chemically synthesized
cgttctagtgaggcttcagt

SEQ ID NO: 38811 - DNA, 20 bp, Artificial Sequence
  chemically synthesized
ctagtgaggcttcagtgagc

SEQ ID NO: 38812 - DNA, 20 bp, Artificial Sequence
  chemically synthesized
aagattgcaccattgcactc

SEQ ID NO: 38813 - DNA, 20 bp, Artificial Sequence
  chemically synthesized
ttgcaccattgcactccagc

SEQ ID NO: 38814 - DNA, 20 bp, Artificial Sequence
  chemically synthesized
tgcaccattgcactccagcc

SEQ ID NO: 38815 - DNA, 20 bp, Artificial Sequence
  chemically synthesized
gcaccattgcactccagccg

SEQ ID NO: 38816 - DNA, 20 bp, Artificial Sequence
  chemically synthesized
ttgcactccagccggggtga

SEQ ID NO: 38817 - DNA, 20 bp, Artificial Sequence
  chemically synthesized
gcactccagccggggtgaca

SEQ ID NO: 38818 - DNA, 20 bp, Artificial Sequence
  chemically synthesized
tccagccggggtgacagagt

SEQ ID NO: 38819 - DNA, 20 bp, Artificial Sequence
  chemically synthesized
agaccctgtttcaaacaaac

SEQ ID NO: 38820 - DNA, 20 bp, Artificial Sequence
  chemically synthesized
tgtttcaaacaaacaagcaa

SEQ ID NO: 38821 - DNA, 20 bp, Artificial Sequence
  chemically synthesized
aacaaacaagcaaaagcaaa

SEQ ID NO: 38822 - DNA, 20 bp, Artificial Sequence
  chemically synthesized
acttactatcttgctgtcta

SEQ ID NO: 38823 - DNA, 20 bp, Artificial Sequence
  chemically synthesized
tatcttgctgtctacagcta

SEQ ID NO: 38824 - DNA, 20 bp, Artificial Sequence
  chemically synthesized
ttgctgtctacagctaaagt

SEQ ID NO: 38825 - DNA, 20 bp, Artificial Sequence
  chemically synthesized
taaagtcagactgcatgatt

SEQ ID NO: 38826 - DNA, 20 bp, Artificial Sequence
  chemically synthesized
attccaactccaccatcacc

SEQ ID NO: 38827 - DNA, 20 bp, Artificial Sequence
  chemically synthesized
ttccaactccaccatcacct

SEQ ID NO: 38828 - DNA, 20 bp, Artificial Sequence
  chemically synthesized
accatcacctgggtaatgtt

SEQ ID NO: 38829 - DNA, 20 bp, Artificial Sequence
  chemically synthesized
taatgttgagatttattaca

SEQ ID NO: 38830 - DNA, 20 bp, Artificial Sequence
  chemically synthesized
tacatagcatctctgtgcct

SEQ ID NO: 38831 - DNA, 20 bp, Artificial Sequence
  chemically synthesized
aataatgttgtgaaaattaa

SEQ ID NO: 38832 - DNA, 20 bp, Artificial Sequence
  chemically synthesized
gtgaaaattaaaagaaatac

SEQ ID NO: 38833 - DNA, 20 bp, Artificial Sequence
  chemically synthesized
aataccagttgtaaatcact

SEQ ID NO: 38834 - DNA, 20 bp, Artificial Sequence
  chemically synthesized
aaatcactcagaactgtgcc

SEQ ID NO: 38835 - DNA, 20 bp, Artificial Sequence
  chemically synthesized
agcatttaataaacactctg

SEQ ID NO: 38836 - DNA, 20 bp, Artificial Sequence
  chemically synthesized
gcatttaataaacactctgt

SEQ ID NO: 38837 - DNA, 20 bp, Artificial Sequence
  chemically synthesized
aataaacactctgtaggtat

SEQ ID NO: 38838 - DNA, 20 bp, Artificial Sequence
  chemically synthesized
ataaaatttattcataaaat

SEQ ID NO: 38839 - DNA, 20 bp, Artificial Sequence
  chemically synthesized
taaaatttattcataaaatg

SEQ ID NO: 38840 - DNA, 20 bp, Artificial Sequence
  chemically synthesized
aatttattcataaaatgagg

SEQ ID NO: 38841 - DNA, 20 bp, Artificial Sequence
  chemically synthesized
tattcataaaatgaggaagt

SEQ ID NO: 38842 - DNA, 20 bp, Artificial Sequence
  chemically synthesized
tagctcatgtattgtcatac

SEQ ID NO: 38843 - DNA, 20 bp, Artificial Sequence
  chemically synthesized
taccagctttcactttgaat

SEQ ID NO: 38844 - DNA, 20 bp, Artificial Sequence
  chemically synthesized
attgcatttttaaacacaaa

SEQ ID NO: 38845 - DNA, 20 bp, Artificial Sequence
  chemically synthesized
tgcatttttaaacacaaaaa

SEQ ID NO: 38846 - DNA, 20 bp, Artificial Sequence
  chemically synthesized
aaacacaaaaagagaaataa

SEQ ID NO: 38847 - DNA, 20 bp, Artificial Sequence
  chemically synthesized
aacacaaaaagagaaataat

SEQ ID NO: 38848 - DNA, 20 bp, Artificial Sequence
  chemically synthesized
catcaatgttacttcaatca

SEQ ID NO: 38849 - DNA, 20 bp, Artificial Sequence
  chemically synthesized
atcaatgttacttcaatcac

SEQ ID NO: 38850 - DNA, 20 bp, Artificial Sequence
  chemically synthesized
tacttcaatcacgggatgca

SEQ ID NO: 38851 - DNA, 20 bp, Artificial Sequence
  chemically synthesized
atcacgggatgcatagtaat

SEQ ID NO: 38852 - DNA, 20 bp, Artificial Sequence
  chemically synthesized
tcacgggatgcatagtaatt

SEQ ID NO: 38853 - DNA, 20 bp, Artificial Sequence
  chemically synthesized
ctttgccctaattactgatg

SEQ ID NO: 38854 - DNA, 20 bp, Artificial Sequence
  chemically synthesized
ccctaattactgatgtggat

SEQ ID NO: 38855 - DNA, 20 bp, Artificial Sequence
  chemically synthesized
aattactgatgtggataagc

SEQ ID NO: 38856 - DNA, 20 bp, Artificial Sequence
  chemically synthesized
tactgatgtggataagccgg

SEQ ID NO: 38857 - DNA, 20 bp, Artificial Sequence
  chemically synthesized
actgatgtggataagccggt

SEQ ID NO: 38858 - DNA, 20 bp, Artificial Sequence
  chemically synthesized
aagccggtgggccatgtcaa

SEQ ID NO: 38859 - DNA, 20 bp, Artificial Sequence
  chemically synthesized
ggccatgtcaatggcatctc

SEQ ID NO: 38860 - DNA, 20 bp, Artificial Sequence
  chemically synthesized
atctatgtaaaaactatgct

SEQ ID NO: 38861 - DNA, 20 bp, Artificial Sequence
  chemically synthesized
aaaaactatgcttggttgca

SEQ ID NO: 38862 - DNA, 20 bp, Artificial Sequence
  chemically synthesized
atgcttggttgcacagcttc

SEQ ID NO: 38863 - DNA, 20 bp, Artificial Sequence
  chemically synthesized
tgcttggttgcacagcttca

SEQ ID NO: 38864 - DNA, 20 bp, Artificial Sequence
  chemically synthesized
tggttgcacagcttcaagga

SEQ ID NO: 38865 - DNA, 20 bp, Artificial Sequence
  chemically synthesized
cacagcttcaaggaaagcac

SEQ ID NO: 38866 - DNA, 20 bp, Artificial Sequence
  chemically synthesized
ctactcacttccttttcatt

SEQ ID NO: 38867 - DNA, 20 bp, Artificial Sequence
  chemically synthesized
ttcattcagcatgctatgtc

SEQ ID NO: 38868 - DNA, 20 bp, Artificial Sequence
  chemically synthesized
tcattcagcatgctatgtct

SEQ ID NO: 38869 - DNA, 20 bp, Artificial Sequence
  chemically synthesized
cccctttcatataaaatatt

SEQ ID NO: 38870 - DNA, 20 bp, Artificial Sequence
  chemically synthesized
cctttcatataaaatatttg

SEQ ID NO: 38871 - DNA, 20 bp, Artificial Sequence
  chemically synthesized
aatatttggagctgccattg

SEQ ID NO: 38872 - DNA, 20 bp, Artificial Sequence
  chemically synthesized
atatttggagctgccattgt

SEQ ID NO: 38873 - DNA, 20 bp, Artificial Sequence
  chemically synthesized
tttggagctgccattgtagg

SEQ ID NO: 38874 - DNA, 20 bp, Artificial Sequence
  chemically synthesized
agctgccattgtaggtagtg

SEQ ID NO: 38875 - DNA, 20 bp, Artificial Sequence
  chemically synthesized
gctgccattgtaggtagtgc

SEQ ID NO: 38876 - DNA, 20 bp, Artificial Sequence
  chemically synthesized
gccattgtaggtagtgcagg

SEQ ID NO: 38877 - DNA, 20 bp, Artificial Sequence
  chemically synthesized
agtgcaggtggtcttgttca

SEQ ID NO: 38878 - DNA, 20 bp, Artificial Sequence
  chemically synthesized
ggtggtcttgttcaaagtgt

SEQ ID NO: 38879 - DNA, 20 bp, Artificial Sequence
  chemically synthesized
gagtatcacctcccactgcc

SEQ ID NO: 38880 - DNA, 20 bp, Artificial Sequence
  chemically synthesized
acctcccactgccaagactg

SEQ ID NO: 38881 - DNA, 20 bp, Artificial Sequence
  chemically synthesized
cagctgctttgattttaact

SEQ ID NO: 38882 - DNA, 20 bp, Artificial Sequence
  chemically synthesized
agctgctttgattttaactg

SEQ ID NO: 38883 - DNA, 20 bp, Artificial Sequence
  chemically synthesized
tttgattttaactgaggatc

SEQ ID NO: 38884 - DNA, 20 bp, Artificial Sequence
  chemically synthesized
ttttaactgaggatctagaa

SEQ ID NO: 38885 - DNA, 20 bp, Artificial Sequence
  chemically synthesized
ctgaggatctagaaaagtgc

SEQ ID NO: 38886 - DNA, 20 bp, Artificial Sequence
  chemically synthesized
tgaggatctagaaaagtgct

SEQ ID NO: 38887 - DNA, 20 bp, Artificial Sequence
  chemically synthesized
tatttgctgacctttgtcac

SEQ ID NO: 38888 - DNA, 20 bp, Artificial Sequence
  chemically synthesized
ttgctgacctttgtcacaag

SEQ ID NO: 38889 - DNA, 20 bp, Artificial Sequence
  chemically synthesized
gcacctaatctccttcctac

SEQ ID NO: 38890 - DNA, 20 bp, Artificial Sequence
  chemically synthesized
gccttataaaatgatgttct

SEQ ID NO: 38891 - DNA, 20 bp, Artificial Sequence
  chemically synthesized
ctgcttctgcaactgtgttt

SEQ ID NO: 38892 - DNA, 20 bp, Artificial Sequence
  chemically synthesized
tctgcaactgtgttttggaa

SEQ ID NO: 38893 - DNA, 20 bp, Artificial Sequence
  chemically synthesized
ctgcaactgtgttttggaac

SEQ ID NO: 38894 - DNA, 20 bp, Artificial Sequence
  chemically synthesized
gcaactgtgttttggaacag

SEQ ID NO: 38895 - DNA, 20 bp, Artificial Sequence
  chemically synthesized
caactgtgttttggaacagg

SEQ ID NO: 38896 - DNA, 20 bp, Artificial Sequence
  chemically synthesized
aactgtgttttggaacagga

SEQ ID NO: 38897 - DNA, 20 bp, Artificial Sequence
  chemically synthesized
gtgttttggaacaggagggt

SEQ ID NO: 38898 - DNA, 20 bp, Artificial Sequence
  chemically synthesized
ttggaacaggagggtgagat

SEQ ID NO: 38899 - DNA, 20 bp, Artificial Sequence
  chemically synthesized
gaacaggagggtgagattag

SEQ ID NO: 38900 - DNA, 20 bp, Artificial Sequence
  chemically synthesized
agtagccacacacactgaaa

SEQ ID NO: 38901 - DNA, 20 bp, Artificial Sequence
  chemically synthesized
aaatagtcatatgacttcca

SEQ ID NO: 38902 - DNA, 20 bp, Artificial Sequence
  chemically synthesized
ttccaaagtctgtaattttt

SEQ ID NO: 38903 - DNA, 20 bp, Artificial Sequence
  chemically synthesized
atttttaagcatatacaaaa

SEQ ID NO: 38904 - DNA, 20 bp, Artificial Sequence
  chemically synthesized
tatgtgtgtatacatatata

SEQ ID NO: 38905 - DNA, 20 bp, Artificial Sequence
  chemically synthesized
tgtgtgtatacatatatata

SEQ ID NO: 38906 - DNA, 20 bp, Artificial Sequence
  chemically synthesized
tgtgtatacatatatataga

SEQ ID NO: 38907 - DNA, 20 bp, Artificial Sequence
  chemically synthesized
tgtatacatatatatagaga

SEQ ID NO: 38908 - DNA, 20 bp, Artificial Sequence
  chemically synthesized
tatacatatatatagagaga

SEQ ID NO: 38909 - DNA, 20 bp, Artificial Sequence
  chemically synthesized
catatatatagagagagaga

SEQ ID NO: 38910 - DNA, 20 bp, Artificial Sequence
  chemically synthesized
tatatatagagagagagaca

SEQ ID NO: 38911 - DNA, 20 bp, Artificial Sequence
  chemically synthesized
tatatagagagagagacaga

SEQ ID NO: 38912 - DNA, 20 bp, Artificial Sequence
  chemically synthesized
tatagagagagagacagaga

SEQ ID NO: 38913 - DNA, 20 bp, Artificial Sequence
  chemically synthesized
gagagagagacagagagaga

SEQ ID NO: 38914 - DNA, 20 bp, Artificial Sequence
  chemically synthesized
agagagagacagagagagat

SEQ ID NO: 38915 - DNA, 20 bp, Artificial Sequence
  chemically synthesized
gagagagacagagagagatg

SEQ ID NO: 38916 - DNA, 20 bp, Artificial Sequence
  chemically synthesized
agagagacagagagagatgg

SEQ ID NO: 38917 - DNA, 20 bp, Artificial Sequence
  chemically synthesized
agagacagagagagatgggg

SEQ ID NO: 38918 - DNA, 20 bp, Artificial Sequence
  chemically synthesized
agacagagagagatggggga

SEQ ID NO: 38919 - DNA, 20 bp, Artificial Sequence
  chemically synthesized
acagagagagatgggggaga

SEQ ID NO: 38920 - DNA, 20 bp, Artificial Sequence
  chemically synthesized
agagagagatgggggagaga

SEQ ID NO: 38921 - DNA, 20 bp, Artificial Sequence
  chemically synthesized
agagagatgggggagagaga

SEQ ID NO: 38922 - DNA, 20 bp, Artificial Sequence
  chemically synthesized
agagatgggggagagagaga

SEQ ID NO: 38923 - DNA, 20 bp, Artificial Sequence
  chemically synthesized
agatgggggagagagagaga

SEQ ID NO: 38924 - DNA, 20 bp, Artificial Sequence
  chemically synthesized
atgggggagagagagagaga

SEQ ID NO: 38925 - DNA, 20 bp, Artificial Sequence
  chemically synthesized
gggagagagagagagagagc

SEQ ID NO: 38926 - DNA, 20 bp, Artificial Sequence
  chemically synthesized
gagagagagagagagagcga

SEQ ID NO: 38927 - DNA, 20 bp, Artificial Sequence
  chemically synthesized
gagagagagagagagcgaga

SEQ ID NO: 38928 - DNA, 20 bp, Artificial Sequence
  chemically synthesized
gagagagagagagcgagaga

SEQ ID NO: 38929 - DNA, 20 bp, Artificial Sequence
  chemically synthesized
agagagagagagcgagagag

SEQ ID NO: 38930 - DNA, 20 bp, Artificial Sequence
  chemically synthesized
gagagagagcgagagagagg

SEQ ID NO: 38931 - DNA, 20 bp, Artificial Sequence
  chemically synthesized
gagagagcgagagagaggca

SEQ ID NO: 38932 - DNA, 20 bp, Artificial Sequence
  chemically synthesized
gagcgagagagaggcagaga

SEQ ID NO: 38933 - DNA, 20 bp, Artificial Sequence
  chemically synthesized
gcgagagagaggcagagaaa

SEQ ID NO: 38934 - DNA, 20 bp, Artificial Sequence
  chemically synthesized
agagaaagagatccttattt

SEQ ID NO: 38935 - DNA, 20 bp, Artificial Sequence
  chemically synthesized
tattctatacttctttgaaa

SEQ ID NO: 38936 - DNA, 20 bp, Artificial Sequence
  chemically synthesized
ttctttgaaatagtgatttt

SEQ ID NO: 38937 - DNA, 20 bp, Artificial Sequence
  chemically synthesized
aatagtgatttttagtaaat

SEQ ID NO: 38938 - DNA, 20 bp, Artificial Sequence
  chemically synthesized
agtgatttttagtaaattgg

SEQ ID NO: 38939 - DNA, 20 bp, Artificial Sequence
  chemically synthesized
tagtaaattggcagtgttgc

SEQ ID NO: 38940 - DNA, 20 bp, Artificial Sequence
  chemically synthesized
agtgttgccagatgacgact

SEQ ID NO: 38941 - DNA, 20 bp, Artificial Sequence
  chemically synthesized
tgttgccagatgacgactta

SEQ ID NO: 38942 - DNA, 20 bp, Artificial Sequence
  chemically synthesized
cctcattgttatatgtacca

SEQ ID NO: 38943 - DNA, 20 bp, Artificial Sequence
  chemically synthesized
cattgttatatgtaccatgg

SEQ ID NO: 38944 - DNA, 20 bp, Artificial Sequence
  chemically synthesized
tggtagctcatcttttcttt

SEQ ID NO: 38945 - DNA, 20 bp, Artificial Sequence
  chemically synthesized
ggtagctcatcttttctttc

SEQ ID NO: 38946 - DNA, 20 bp, Artificial Sequence
  chemically synthesized
tcatcttttctttcaggtga

SEQ ID NO: 38947 - DNA, 20 bp, Artificial Sequence
  chemically synthesized
ctttgtcctcacgctaaaca

SEQ ID NO: 38948 - DNA, 20 bp, Artificial Sequence
  chemically synthesized
acatagcccccatgttgttc

SEQ ID NO: 38949 - DNA, 20 bp, Artificial Sequence
  chemically synthesized
catagcccccatgttgttcc

SEQ ID NO: 38950 - DNA, 20 bp, Artificial Sequence
  chemically synthesized
cccatgttgttccaggaaaa

SEQ ID NO: 38951 - DNA, 20 bp, Artificial Sequence
  chemically synthesized
catgttgttccaggaaaata

SEQ ID NO: 38952 - DNA, 20 bp, Artificial Sequence
  chemically synthesized
atagagatcaataaaataca

SEQ ID NO: 38953 - DNA, 20 bp, Artificial Sequence
  chemically synthesized
aatacaaagtacttgtttga

SEQ ID NO: 38954 - DNA, 20 bp, Artificial Sequence
  chemically synthesized
aaagtacttgtttgaaagtg

SEQ ID NO: 38955 - DNA, 20 bp, Artificial Sequence
  chemically synthesized
aagtacttgtttgaaagtga

SEQ ID NO: 38956 - DNA, 20 bp, Artificial Sequence
  chemically synthesized
cttgtttgaaagtgaaggtt

SEQ ID NO: 38957 - DNA, 20 bp, Artificial Sequence
  chemically synthesized
aaattcaatgacctacgctg

SEQ ID NO: 38958 - DNA, 20 bp, Artificial Sequence
  chemically synthesized
gatcattcattaatgatatt

SEQ ID NO: 38959 - DNA, 20 bp, Artificial Sequence
  chemically synthesized
agtattttcttttttaatgt

SEQ ID NO: 38960 - DNA, 20 bp, Artificial Sequence
  chemically synthesized
agaataaaaccatttatttg

SEQ ID NO: 38961 - DNA, 20 bp, Artificial Sequence
  chemically synthesized
tatgtgtatgtaaatctcct

SEQ ID NO: 38962 - DNA, 20 bp, Artificial Sequence
  chemically synthesized
ttatacctcaaatatgaaaa

SEQ ID NO: 38963 - DNA, 20 bp, Artificial Sequence
  chemically synthesized
tatacctcaaatatgaaaat

SEQ ID NO: 38964 - DNA, 20 bp, Artificial Sequence
  chemically synthesized
tcttgcattcacttatattc

SEQ ID NO: 38965 - DNA, 20 bp, Artificial Sequence
  chemically synthesized
cacttatattctagcttgtt

SEQ ID NO: 38966 - DNA, 20 bp, Artificial Sequence
  chemically synthesized
cttatattctagcttgttaa

SEQ ID NO: 38967 - DNA, 20 bp, Artificial Sequence
  chemically synthesized
tatattctagcttgttaaga

SEQ ID NO: 38968 - DNA, 20 bp, Artificial Sequence
  chemically synthesized
attctagcttgttaagagag

SEQ ID NO: 38969 - DNA, 20 bp, Artificial Sequence
  chemically synthesized
agcttgttaagagagaagtt

SEQ ID NO: 38970 - DNA, 20 bp, Artificial Sequence
  chemically synthesized
gcttgttaagagagaagttt

SEQ ID NO: 38971 - DNA, 20 bp, Artificial Sequence
  chemically synthesized
cttgttaagagagaagtttg

SEQ ID NO: 38972 - DNA, 20 bp, Artificial Sequence
  chemically synthesized
ggcaaaatgtgctttataaa

SEQ ID NO: 38973 - DNA, 20 bp, Artificial Sequence
  chemically synthesized
ctttataaatagtaaaaact

SEQ ID NO: 38974 - DNA, 20 bp, Artificial Sequence
  chemically synthesized
tttataaatagtaaaaactg

SEQ ID NO: 38975 - DNA, 20 bp, Artificial Sequence
  chemically synthesized
gtaaaaactgaggtaaacta

SEQ ID NO: 38976 - DNA, 20 bp, Artificial Sequence
  chemically synthesized
ctgaggtaaactatagcaca

SEQ ID NO: 38977 - DNA, 20 bp, Artificial Sequence
  chemically synthesized
cacaaagtgtgctatataaa

SEQ ID NO: 38978 - DNA, 20 bp, Artificial Sequence
  chemically synthesized
ctatataaacagtaaaaacc

SEQ ID NO: 38979 - DNA, 20 bp, Artificial Sequence
  chemically synthesized
tatataaacagtaaaaaccg

SEQ ID NO: 38980 - DNA, 20 bp, Artificial Sequence
  chemically synthesized
taaaaaccgaggtaaaaata

SEQ ID NO: 38981 - DNA, 20 bp, Artificial Sequence
  chemically synthesized
aaaaaccgaggtaaaaatat

SEQ ID NO: 38982 - DNA, 20 bp, Artificial Sequence
  chemically synthesized
aaaaccgaggtaaaaatatg

SEQ ID NO: 38983 - DNA, 20 bp, Artificial Sequence
  chemically synthesized
aaccgaggtaaaaatatggg

SEQ ID NO: 38984 - DNA, 20 bp, Artificial Sequence
  chemically synthesized
accgaggtaaaaatatgggg

SEQ ID NO: 38985 - DNA, 20 bp, Artificial Sequence
  chemically synthesized
aaaatatggggaggacaaaa

SEQ ID NO: 38986 - DNA, 20 bp, Artificial Sequence
  chemically synthesized
aaatatggggaggacaaaaa

SEQ ID NO: 38987 - DNA, 20 bp, Artificial Sequence
  chemically synthesized
aatatggggaggacaaaaaa

SEQ ID NO: 38988 - DNA, 20 bp, Artificial Sequence
  chemically synthesized
aggacaaaaaagggctaaaa

SEQ ID NO: 38989 - DNA, 20 bp, Artificial Sequence
  chemically synthesized
aaaaagggctaaaatggtgt

SEQ ID NO: 38990 - DNA, 20 bp, Artificial Sequence
  chemically synthesized
ctaaaatggtgttggaatat

SEQ ID NO: 38991 - DNA, 20 bp, Artificial Sequence
  chemically synthesized
tggtgttggaatataagaaa

SEQ ID NO: 38992 - DNA, 20 bp, Artificial Sequence
  chemically synthesized
tgttggaatataagaaatag

SEQ ID NO: 38993 - DNA, 20 bp, Artificial Sequence
  chemically synthesized
aatataagaaatagcagtaa

SEQ ID NO: 38994 - DNA, 20 bp, Artificial Sequence
  chemically synthesized
ataagaaatagcagtaaaag

SEQ ID NO: 38995 - DNA, 20 bp, Artificial Sequence
  chemically synthesized
gcagtaaaagaagctcctca

SEQ ID NO: 38996 - DNA, 20 bp, Artificial Sequence
  chemically synthesized
taaaagaagctcctcacagc

SEQ ID NO: 38997 - DNA, 20 bp, Artificial Sequence
  chemically synthesized
agaagctcctcacagcaaga

SEQ ID NO: 38998 - DNA, 20 bp, Artificial Sequence
  chemically synthesized
ctcctcacagcaagacagta

SEQ ID NO: 38999 - DNA, 20 bp, Artificial Sequence
  chemically synthesized
tcctcacagcaagacagtac

SEQ ID NO: 39000 - DNA, 20 bp, Artificial Sequence
  chemically synthesized
cctcacagcaagacagtaca

SEQ ID NO: 39001 - DNA, 20 bp, Artificial Sequence
  chemically synthesized
agacagtacagggaaatgtc

SEQ ID NO: 39002 - DNA, 20 bp, Artificial Sequence
  chemically synthesized
acagtacagggaaatgtctg

SEQ ID NO: 39003 - DNA, 20 bp, Artificial Sequence
  chemically synthesized
cagtacagggaaatgtctgg

SEQ ID NO: 39004 - DNA, 20 bp, Artificial Sequence
  chemically synthesized
agtacagggaaatgtctgga

SEQ ID NO: 39005 - DNA, 20 bp, Artificial Sequence
  chemically synthesized
gggaaatgtctggagggaca

SEQ ID NO: 39006 - DNA, 20 bp, Artificial Sequence
  chemically synthesized
gacaaagatttacttacaat

SEQ ID NO: 39007 - DNA, 20 bp, Artificial Sequence
  chemically synthesized
acaaagatttacttacaatc

SEQ ID NO: 39008 - DNA, 20 bp, Artificial Sequence
  chemically synthesized
aatcaggcctcaaccaatat

SEQ ID NO: 39009 - DNA, 20 bp, Artificial Sequence
  chemically synthesized
tatgacgtgtttatatgtat

SEQ ID NO: 39010 - DNA, 20 bp, Artificial Sequence
  chemically synthesized
atgacgtgtttatatgtatc

SEQ ID NO: 39011 - DNA, 20 bp, Artificial Sequence
  chemically synthesized
gcatataatgtataatgatc

SEQ ID NO: 39012 - DNA, 20 bp, Artificial Sequence
  chemically synthesized
ataatgtataatgatcaagt

SEQ ID NO: 39013 - DNA, 20 bp, Artificial Sequence
  chemically synthesized
taatgtataatgatcaagtc

SEQ ID NO: 39014 - DNA, 20 bp, Artificial Sequence
  chemically synthesized
taatgatcaagtcaggtatt

SEQ ID NO: 39015 - DNA, 20 bp, Artificial Sequence
  chemically synthesized
aatgatcaagtcaggtattt

SEQ ID NO: 39016 - DNA, 20 bp, Artificial Sequence
  chemically synthesized
atgatcaagtcaggtatttg

SEQ ID NO: 39017 - DNA, 20 bp, Artificial Sequence
  chemically synthesized
tttggggtattcatcacctc

SEQ ID NO: 39018 - DNA, 20 bp, Artificial Sequence
  chemically synthesized
tatttatcgtttctatgtgt

SEQ ID NO: 39019 - DNA, 20 bp, Artificial Sequence
  chemically synthesized
atttatcgtttctatgtgtt

SEQ ID NO: 39020 - DNA, 20 bp, Artificial Sequence
  chemically synthesized
ctatgtgttaggaacatttc

SEQ ID NO: 39021 - DNA, 20 bp, Artificial Sequence
  chemically synthesized
cctactttgctattgaacat

SEQ ID NO: 39022 - DNA, 20 bp, Artificial Sequence
  chemically synthesized
tacacacctttctctacctc

SEQ ID NO: 39023 - DNA, 20 bp, Artificial Sequence
  chemically synthesized
ctacatgatattaacttttt

SEQ ID NO: 39024 - DNA, 20 bp, Artificial Sequence
  chemically synthesized
cttttttagctcccacatat

SEQ ID NO: 39025 - DNA, 20 bp, Artificial Sequence
  chemically synthesized
tttagctcccacatatcagt

SEQ ID NO: 39026 - DNA, 20 bp, Artificial Sequence
  chemically synthesized
aaaatttgtctttctatgcc

SEQ ID NO: 39027 - DNA, 20 bp, Artificial Sequence
  chemically synthesized
tcgtttaacataatgacttc

SEQ ID NO: 39028 - DNA, 20 bp, Artificial Sequence
  chemically synthesized
gaaatgattttatatttgta

SEQ ID NO: 39029 - DNA, 20 bp, Artificial Sequence
  chemically synthesized
tttcttcattcatccattga

SEQ ID NO: 39030 - DNA, 20 bp, Artificial Sequence
  chemically synthesized
ttcatccattgatggacact

SEQ ID NO: 39031 - DNA, 20 bp, Artificial Sequence
  chemically synthesized
tcatccattgatggacactt

SEQ ID NO: 39032 - DNA, 20 bp, Artificial Sequence
  chemically synthesized
gtgaatcgtgctgcaataaa

SEQ ID NO: 39033 - DNA, 20 bp, Artificial Sequence
  chemically synthesized
tcgtgctgcaataaacagtg

SEQ ID NO: 39034 - DNA, 20 bp, Artificial Sequence
  chemically synthesized
tgcaataaacagtgtggtac

SEQ ID NO: 39035 - DNA, 20 bp, Artificial Sequence
  chemically synthesized
tattctgaattcttttcctt

SEQ ID NO: 39036 - DNA, 20 bp, Artificial Sequence
  chemically synthesized
ttttcctttggataaatacc

SEQ ID NO: 39037 - DNA, 20 bp, Artificial Sequence
  chemically synthesized
ttggataaatacccagtaat

SEQ ID NO: 39038 - DNA, 20 bp, Artificial Sequence
  chemically synthesized
atacccagtaataagattgc

SEQ ID NO: 39039 - DNA, 20 bp, Artificial Sequence
  chemically synthesized
aagattgctggatcttatga

SEQ ID NO: 39040 - DNA, 20 bp, Artificial Sequence
  chemically synthesized
tcttatgatagttcaatttt

SEQ ID NO: 39041 - DNA, 20 bp, Artificial Sequence
  chemically synthesized
tagttcaatttttagctttt

SEQ ID NO: 39042 - DNA, 20 bp, Artificial Sequence
  chemically synthesized
aatctacatattgttttcca

SEQ ID NO: 39043 - DNA, 20 bp, Artificial Sequence
  chemically synthesized
ctacatattgttttccatag

SEQ ID NO: 39044 - DNA, 20 bp, Artificial Sequence
  chemically synthesized
ctaatttgcatgcttaccaa

SEQ ID NO: 39045 - DNA, 20 bp, Artificial Sequence
  chemically synthesized
tgcttaccaatagtgcctac

SEQ ID NO: 39046 - DNA, 20 bp, Artificial Sequence
  chemically synthesized
cttttccttcacatccttgc

SEQ ID NO: 39047 - DNA, 20 bp, Artificial Sequence
  chemically synthesized
taaatcatgatgattctaac

SEQ ID NO: 39048 - DNA, 20 bp, Artificial Sequence
  chemically synthesized
atgatgattctaactggcat

SEQ ID NO: 39049 - DNA, 20 bp, Artificial Sequence
  chemically synthesized
cataagatgatatctcattg

SEQ ID NO: 39050 - DNA, 20 bp, Artificial Sequence
  chemically synthesized
atttgcatttctctgatgat

SEQ ID NO: 39051 - DNA, 20 bp, Artificial Sequence
  chemically synthesized
ctctgatgattagtaatgtt

SEQ ID NO: 39052 - DNA, 20 bp, Artificial Sequence
  chemically synthesized
tcctttgccaattttttaat

SEQ ID NO: 39053 - DNA, 20 bp, Artificial Sequence
  chemically synthesized
ttatttgtttttccactgtt

SEQ ID NO: 39054 - DNA, 20 bp, Artificial Sequence
  chemically synthesized
tttccactgttgagttgttt

SEQ ID NO: 39055 - DNA, 20 bp, Artificial Sequence
  chemically synthesized
tttgagtttcttatatattc

SEQ ID NO: 39056 - DNA, 20 bp, Artificial Sequence
  chemically synthesized
tgagtttcttatatattctg

SEQ ID NO: 39057 - DNA, 20 bp, Artificial Sequence
  chemically synthesized
aaatattttctcgcattcaa

SEQ ID NO: 39058 - DNA, 20 bp, Artificial Sequence
  chemically synthesized
tgattgtttcctttactgtg

SEQ ID NO: 39059 - DNA, 20 bp, Artificial Sequence
  chemically synthesized
tttactgtgcagatgtattt

SEQ ID NO: 39060 - DNA, 20 bp, Artificial Sequence
  chemically synthesized
agatgtattttagcttaata

SEQ ID NO: 39061 - DNA, 20 bp, Artificial Sequence
  chemically synthesized
cttttgttgcctgtgctttt

SEQ ID NO: 39062 - DNA, 20 bp, Artificial Sequence
  chemically synthesized
ttttgttgcctgtgcttttg

SEQ ID NO: 39063 - DNA, 20 bp, Artificial Sequence
  chemically synthesized
tgcctgtgcttttgaggtct

SEQ ID NO: 39064 - DNA, 20 bp, Artificial Sequence
  chemically synthesized
ggccataaaatctttgccca

SEQ ID NO: 39065 - DNA, 20 bp, Artificial Sequence
  chemically synthesized
ttgcccaaagccatgtcttg

SEQ ID NO: 39066 - DNA, 20 bp, Artificial Sequence
  chemically synthesized
gtctcccttatgttttcttt

SEQ ID NO: 39067 - DNA, 20 bp, Artificial Sequence
  chemically synthesized
tcccttatgttttcttttag

SEQ ID NO: 39068 - DNA, 20 bp, Artificial Sequence
  chemically synthesized
gttttcttttagtagtttta

SEQ ID NO: 39069 - DNA, 20 bp, Artificial Sequence
  chemically synthesized
tttagtagttttatagtttt

SEQ ID NO: 39070 - DNA, 20 bp, Artificial Sequence
  chemically synthesized
tagttttaagttttatattt

SEQ ID NO: 39071 - DNA, 20 bp, Artificial Sequence
  chemically synthesized
ttaagtctttaatccatctt

SEQ ID NO: 39072 - DNA, 20 bp, Artificial Sequence
  chemically synthesized
aagtctttaatccatcttga

SEQ ID NO: 39073 - DNA, 20 bp, Artificial Sequence
  chemically synthesized
tcttgagagtacgttttata

SEQ ID NO: 39074 - DNA, 20 bp, Artificial Sequence
  chemically synthesized
acgttttatatggcaataaa

SEQ ID NO: 39075 - DNA, 20 bp, Artificial Sequence
  chemically synthesized
cgttttatatggcaataaat

SEQ ID NO: 39076 - DNA, 20 bp, Artificial Sequence
  chemically synthesized
gttttatatggcaataaata

SEQ ID NO: 39077 - DNA, 20 bp, Artificial Sequence
  chemically synthesized
ttttatatggcaataaatag

SEQ ID NO: 39078 - DNA, 20 bp, Artificial Sequence
  chemically synthesized
gcaataaataggggttgtat

SEQ ID NO: 39079 - DNA, 20 bp, Artificial Sequence
  chemically synthesized
caataaataggggttgtatt

SEQ ID NO: 39080 - DNA, 20 bp, Artificial Sequence
  chemically synthesized
catttttgcatctattgtac

SEQ ID NO: 39081 - DNA, 20 bp, Artificial Sequence
  chemically synthesized
atttttgcatctattgtaca

SEQ ID NO: 39082 - DNA, 20 bp, Artificial Sequence
  chemically synthesized
tttttgcatctattgtacaa

SEQ ID NO: 39083 - DNA, 20 bp, Artificial Sequence
  chemically synthesized
ttttgcatctattgtacaag

SEQ ID NO: 39084 - DNA, 20 bp, Artificial Sequence
  chemically synthesized
catctattgtacaaggggtt

SEQ ID NO: 39085 - DNA, 20 bp, Artificial Sequence
  chemically synthesized
tcttgatttgattctccatt

SEQ ID NO: 39086 - DNA, 20 bp, Artificial Sequence
  chemically synthesized
attctccatttggttgctgt

SEQ ID NO: 39087 - DNA, 20 bp, Artificial Sequence
  chemically synthesized
atttggttgctgttggtgta

SEQ ID NO: 39088 - DNA, 20 bp, Artificial Sequence
  chemically synthesized
tggttgctgttggtgtatag

SEQ ID NO: 39089 - DNA, 20 bp, Artificial Sequence
  chemically synthesized
gttgctgttggtgtatagaa

SEQ ID NO: 39090 - DNA, 20 bp, Artificial Sequence
  chemically synthesized
gtgtgcattcatcttgtatc

SEQ ID NO: 39091 - DNA, 20 bp, Artificial Sequence
  chemically synthesized
actttgctgaattattttat

SEQ ID NO: 39092 - DNA, 20 bp, Artificial Sequence
  chemically synthesized
ctgaattattttatcagttc

SEQ ID NO: 39093 - DNA, 20 bp, Artificial Sequence
  chemically synthesized
tgaattattttatcagttct

SEQ ID NO: 39094 - DNA, 20 bp, Artificial Sequence
  chemically synthesized
aattattttatcagttctag

SEQ ID NO: 39095 - DNA, 20 bp, Artificial Sequence
  chemically synthesized
tatcagttctaggagctttc

SEQ ID NO: 39096 - DNA, 20 bp, Artificial Sequence
  chemically synthesized
tcagttctaggagctttctg

SEQ ID NO: 39097 - DNA, 20 bp, Artificial Sequence
  chemically synthesized
cagttctaggagctttctgg

SEQ ID NO: 39098 - DNA, 20 bp, Artificial Sequence
  chemically synthesized
gttctaggagctttctggag

SEQ ID NO: 39099 - DNA, 20 bp, Artificial Sequence
  chemically synthesized
gagctttctggaggagtctt

SEQ ID NO: 39100 - DNA, 20 bp, Artificial Sequence
  chemically synthesized
agctttctggaggagtcttt

SEQ ID NO: 39101 - DNA, 20 bp, Artificial Sequence
  chemically synthesized
gctttctggaggagtcttta

SEQ ID NO: 39102 - DNA, 20 bp, Artificial Sequence
  chemically synthesized
gaggagtctttagggtttta

SEQ ID NO: 39103 - DNA, 20 bp, Artificial Sequence
  chemically synthesized
aggagtctttagggttttaa

SEQ ID NO: 39104 - DNA, 20 bp, Artificial Sequence
  chemically synthesized
aaggtaaatgatcatatcat

SEQ ID NO: 39105 - DNA, 20 bp, Artificial Sequence
  chemically synthesized
atgatcatatcatcagcaaa

SEQ ID NO: 39106 - DNA, 20 bp, Artificial Sequence
  chemically synthesized
atatcatcagcaaacagtga

SEQ ID NO: 39107 - DNA, 20 bp, Artificial Sequence
  chemically synthesized
tttgttttgtctgattgccc

SEQ ID NO: 39108 - DNA, 20 bp, Artificial Sequence
  chemically synthesized
ttttgtctgattgccctggc

SEQ ID NO: 39109 - DNA, 20 bp, Artificial Sequence
  chemically synthesized
tttgtctgattgccctggct

SEQ ID NO: 39110 - DNA, 20 bp, Artificial Sequence
  chemically synthesized
attgccctggctaggacttc

SEQ ID NO: 39111 - DNA, 20 bp, Artificial Sequence
  chemically synthesized
ggacttccagtactatgttg

SEQ ID NO: 39112 - DNA, 20 bp, Artificial Sequence
  chemically synthesized
acttccagtactatgttgaa

SEQ ID NO: 39113 - DNA, 20 bp, Artificial Sequence
  chemically synthesized
cttccagtactatgttgaag

SEQ ID NO: 39114 - DNA, 20 bp, Artificial Sequence
  chemically synthesized
tccagtactatgttgaagag

SEQ ID NO: 39115 - DNA, 20 bp, Artificial Sequence
  chemically synthesized
agtactatgttgaagaggag

SEQ ID NO: 39116 - DNA, 20 bp, Artificial Sequence
  chemically synthesized
ctatgttgaagaggagtggt

SEQ ID NO: 39117 - DNA, 20 bp, Artificial Sequence
  chemically synthesized
atgttgaagaggagtggtga

SEQ ID NO: 39118 - DNA, 20 bp, Artificial Sequence
  chemically synthesized
ttgaagaggagtggtgagag

SEQ ID NO: 39119 - DNA, 20 bp, Artificial Sequence
  chemically synthesized
tgaagaggagtggtgagagt

SEQ ID NO: 39120 - DNA, 20 bp, Artificial Sequence
  chemically synthesized
tgggcatccttgtcttgttc

SEQ ID NO: 39121 - DNA, 20 bp, Artificial Sequence
  chemically synthesized
ccttgtcttgttccagttct

SEQ ID NO: 39122 - DNA, 20 bp, Artificial Sequence
  chemically synthesized
ttgtcttgttccagttctca

SEQ ID NO: 39123 - DNA, 20 bp, Artificial Sequence
  chemically synthesized
tgtcttgttccagttctcag

SEQ ID NO: 39124 - DNA, 20 bp, Artificial Sequence
  chemically synthesized
gtcttgttccagttctcaga

SEQ ID NO: 39125 - DNA, 20 bp, Artificial Sequence
  chemically synthesized
ttccccattcaatattatgt

SEQ ID NO: 39126 - DNA, 20 bp, Artificial Sequence
  chemically synthesized
attcaatattatgttggctg

SEQ ID NO: 39127 - DNA, 20 bp, Artificial Sequence
  chemically synthesized
ttcaatattatgttggctgt

SEQ ID NO: 39128 - DNA, 20 bp, Artificial Sequence
  chemically synthesized
tgttggctgtgggtttgtca

SEQ ID NO: 39129 - DNA, 20 bp, Artificial Sequence
  chemically synthesized
ggctgtgggtttgtcacaga

SEQ ID NO: 39130 - DNA, 20 bp, Artificial Sequence
  chemically synthesized
cagatggcttttattacact

SEQ ID NO: 39131 - DNA, 20 bp, Artificial Sequence
  chemically synthesized
agatggcttttattacactg

SEQ ID NO: 39132 - DNA, 20 bp, Artificial Sequence
  chemically synthesized
tcttgtatgctgattttgct

SEQ ID NO: 39133 - DNA, 20 bp, Artificial Sequence
  chemically synthesized
ttttaatcataaatgtatgc

SEQ ID NO: 39134 - DNA, 20 bp, Artificial Sequence
  chemically synthesized
atgctttttctgcatctatt

SEQ ID NO: 39135 - DNA, 20 bp, Artificial Sequence
  chemically synthesized
tgtttttaaatctgtttatg

SEQ ID NO: 39136 - DNA, 20 bp, Artificial Sequence
  chemically synthesized
gtatcacacttattgacttg

SEQ ID NO: 39137 - DNA, 20 bp, Artificial Sequence
  chemically synthesized
tcaaaccaaccctgcatccc

SEQ ID NO: 39138 - DNA, 20 bp, Artificial Sequence
  chemically synthesized
ccaaccctgcatccctggca

SEQ ID NO: 39139 - DNA, 20 bp, Artificial Sequence
  chemically synthesized
gcatggaacctgcttgatca

SEQ ID NO: 39140 - DNA, 20 bp, Artificial Sequence
  chemically synthesized
tggaacctgcttgatcatgg

SEQ ID NO: 39141 - DNA, 20 bp, Artificial Sequence
  chemically synthesized
ttttgttatgttgttgaatt

SEQ ID NO: 39142 - DNA, 20 bp, Artificial Sequence
  chemically synthesized
tgttgttgaatttggttatc

SEQ ID NO: 39143 - DNA, 20 bp, Artificial Sequence
  chemically synthesized
tggttatctagtattttgtt

SEQ ID NO: 39144 - DNA, 20 bp, Artificial Sequence
  chemically synthesized
ggttatctagtattttgtta

SEQ ID NO: 39145 - DNA, 20 bp, Artificial Sequence
  chemically synthesized
tagtattttgttaaggattt

SEQ ID NO: 39146 - DNA, 20 bp, Artificial Sequence
  chemically synthesized
ttttagcatctatgttcatc

SEQ ID NO: 39147 - DNA, 20 bp, Artificial Sequence
  chemically synthesized
tttagcatctatgttcatca

SEQ ID NO: 39148 - DNA, 20 bp, Artificial Sequence
  chemically synthesized
tctatgttcatcaaggctat

SEQ ID NO: 39149 - DNA, 20 bp, Artificial Sequence
  chemically synthesized
tcatcaaggctatcagtctg

SEQ ID NO: 39150 - DNA, 20 bp, Artificial Sequence
  chemically synthesized
cagtctgtagttttcttttt

SEQ ID NO: 39151 - DNA, 20 bp, Artificial Sequence
  chemically synthesized
tttttggttatgtccttccc

SEQ ID NO: 39152 - DNA, 20 bp, Artificial Sequence
  chemically synthesized
gttatgtccttccctggttt

SEQ ID NO: 39153 - DNA, 20 bp, Artificial Sequence
  chemically synthesized
ccctggttttggtgtgatgc

SEQ ID NO: 39154 - DNA, 20 bp, Artificial Sequence
  chemically synthesized
ttggtgtgatgctggcttca

SEQ ID NO: 39155 - DNA, 20 bp, Artificial Sequence
  chemically synthesized
gctggcttcatagaatgaat

SEQ ID NO: 39156 - DNA, 20 bp, Artificial Sequence
  chemically synthesized
ctggcttcatagaatgaatt

SEQ ID NO: 39157 - DNA, 20 bp, Artificial Sequence
  chemically synthesized
tggcttcatagaatgaatta

SEQ ID NO: 39158 - DNA, 20 bp, Artificial Sequence
  chemically synthesized
cttcatagaatgaattaggg

SEQ ID NO: 39159 - DNA, 20 bp, Artificial Sequence
  chemically synthesized
ttcatagaatgaattagggc

SEQ ID NO: 39160 - DNA, 20 bp, Artificial Sequence
  chemically synthesized
ttccttctttatctgtcttg

SEQ ID NO: 39161 - DNA, 20 bp, Artificial Sequence
  chemically synthesized
tctttatctgtcttgtagaa

SEQ ID NO: 39162 - DNA, 20 bp, Artificial Sequence
  chemically synthesized
tcttgtagaatagtgtcaaa

SEQ ID NO: 39163 - DNA, 20 bp, Artificial Sequence
  chemically synthesized
gtagaatagtgtcaaaaaga

SEQ ID NO: 39164 - DNA, 20 bp, Artificial Sequence
  chemically synthesized
tagaatagtgtcaaaaagat

SEQ ID NO: 39165 - DNA, 20 bp, Artificial Sequence
  chemically synthesized
agaatagtgtcaaaaagatg

SEQ ID NO: 39166 - DNA, 20 bp, Artificial Sequence
  chemically synthesized
ccaattcctctttgaatgtc

SEQ ID NO: 39167 - DNA, 20 bp, Artificial Sequence
  chemically synthesized
attcctctttgaatgtctag

SEQ ID NO: 39168 - DNA, 20 bp, Artificial Sequence
  chemically synthesized
aattctgttgtgaatccatc

SEQ ID NO: 39169 - DNA, 20 bp, Artificial Sequence
  chemically synthesized
tctggtcctgaacttttttt

SEQ ID NO: 39170 - DNA, 20 bp, Artificial Sequence
  chemically synthesized
gtcctgaacttttttttggt

SEQ ID NO: 39171 - DNA, 20 bp, Artificial Sequence
  chemically synthesized
taaatctcactgcttgttat

SEQ ID NO: 39172 - DNA, 20 bp, Artificial Sequence
  chemically synthesized
actgcttgttattggtctgt

SEQ ID NO: 39173 - DNA, 20 bp, Artificial Sequence
  chemically synthesized
ggtctgttagtaaatttatt

SEQ ID NO: 39174 - DNA, 20 bp, Artificial Sequence
  chemically synthesized
gtctgttagtaaatttattg

SEQ ID NO: 39175 - DNA, 20 bp, Artificial Sequence
  chemically synthesized
atttattgaggctcatttca

SEQ ID NO: 39176 - DNA, 20 bp, Artificial Sequence
  chemically synthesized
tcatttcatggcctatcata

SEQ ID NO: 39177 - DNA, 20 bp, Artificial Sequence
  chemically synthesized
gcctatcatatggtctacct

SEQ ID NO: 39178 - DNA, 20 bp, Artificial Sequence
  chemically synthesized
ctatcatatggtctaccttg

SEQ ID NO: 39179 - DNA, 20 bp, Artificial Sequence
  chemically synthesized
aatttccacgcgctgttgaa

SEQ ID NO: 39180 - DNA, 20 bp, Artificial Sequence
  chemically synthesized
tgaatagaatgtgtgttctg

SEQ ID NO: 39181 - DNA, 20 bp, Artificial Sequence
  chemically synthesized
aatgtgtgttctgtggttat

SEQ ID NO: 39182 - DNA, 20 bp, Artificial Sequence
  chemically synthesized
atgttctgtatataactgtt

SEQ ID NO: 39183 - DNA, 20 bp, Artificial Sequence
  chemically synthesized
ctgttaagtccatttgttct

SEQ ID NO: 39184 - DNA, 20 bp, Artificial Sequence
  chemically synthesized
tgttaagtccatttgttcta

SEQ ID NO: 39185 - DNA, 20 bp, Artificial Sequence
  chemically synthesized
ttctgtcttgatgaactgtc

SEQ ID NO: 39186 - DNA, 20 bp, Artificial Sequence
  chemically synthesized
actgtctagtgctgtcaatg

SEQ ID NO: 39187 - DNA, 20 bp, Artificial Sequence
  chemically synthesized
gtgctgtcaatgaagtattg

SEQ ID NO: 39188 - DNA, 20 bp, Artificial Sequence
  chemically synthesized
ttgctgtctatctcatttct

SEQ ID NO: 39189 - DNA, 20 bp, Artificial Sequence
  chemically synthesized
tgctgtctatctcatttctt

SEQ ID NO: 39190 - DNA, 20 bp, Artificial Sequence
  chemically synthesized
atctcatttcttaggtctat

SEQ ID NO: 39191 - DNA, 20 bp, Artificial Sequence
  chemically synthesized
tagtaattgttctataaatt

SEQ ID NO: 39192 - DNA, 20 bp, Artificial Sequence
  chemically synthesized
agtaattgttctataaattt

SEQ ID NO: 39193 - DNA, 20 bp, Artificial Sequence
  chemically synthesized
taattgttctataaatttgg

SEQ ID NO: 39194 - DNA, 20 bp, Artificial Sequence
  chemically synthesized
ttctataaatttgggagctc

SEQ ID NO: 39195 - DNA, 20 bp, Artificial Sequence
  chemically synthesized
aaatttgggagctccagtgt

SEQ ID NO: 39196 - DNA, 20 bp, Artificial Sequence
  chemically synthesized
aatttgggagctccagtgtt

SEQ ID NO: 39197 - DNA, 20 bp, Artificial Sequence
  chemically synthesized
tgttaggtgcatatatgttt

SEQ ID NO: 39198 - DNA, 20 bp, Artificial Sequence
  chemically synthesized
agattgtgatattttcctgt

SEQ ID NO: 39199 - DNA, 20 bp, Artificial Sequence
  chemically synthesized
gtgatattttcctgttggac

SEQ ID NO: 39200 - DNA, 20 bp, Artificial Sequence
  chemically synthesized
tgatattttcctgttggaca

SEQ ID NO: 39201 - DNA, 20 bp, Artificial Sequence
  chemically synthesized
ttttaactgctgttgcttta

SEQ ID NO: 39202 - DNA, 20 bp, Artificial Sequence
  chemically synthesized
ttgttttgcctactcacttt

SEQ ID NO: 39203 - DNA, 20 bp, Artificial Sequence
  chemically synthesized
ttttgcctactcacttttgg

SEQ ID NO: 39204 - DNA, 20 bp, Artificial Sequence
  chemically synthesized
aatacctttttcaccctttt

SEQ ID NO: 39205 - DNA, 20 bp, Artificial Sequence
  chemically synthesized
acctttttcacccttttaag

SEQ ID NO: 39206 - DNA, 20 bp, Artificial Sequence
  chemically synthesized
ctttttcacccttttaagtg

SEQ ID NO: 39207 - DNA, 20 bp, Artificial Sequence
  chemically synthesized
acccttttaagtggagcatt

SEQ ID NO: 39208 - DNA, 20 bp, Artificial Sequence
  chemically synthesized
cccttttaagtggagcattt

SEQ ID NO: 39209 - DNA, 20 bp, Artificial Sequence
  chemically synthesized
aggccatttacattcaatgt

SEQ ID NO: 39210 - DNA, 20 bp, Artificial Sequence
  chemically synthesized
atgttagtaatgtaaatgcc

SEQ ID NO: 39211 - DNA, 20 bp, Artificial Sequence
  chemically synthesized
atgtaaatgcctggctatgc

SEQ ID NO: 39212 - DNA, 20 bp, Artificial Sequence
  chemically synthesized
tgtaaatgcctggctatgcc

SEQ ID NO: 39213 - DNA, 20 bp, Artificial Sequence
  chemically synthesized
aaatgcctggctatgccagg

SEQ ID NO: 39214 - DNA, 20 bp, Artificial Sequence
  chemically synthesized
aatgcctggctatgccaggc

SEQ ID NO: 39215 - DNA, 20 bp, Artificial Sequence
  chemically synthesized
ctggctatgccaggcaggaa

SEQ ID NO: 39216 - DNA, 20 bp, Artificial Sequence
  chemically synthesized
ccaggcaggaatggcctgct

SEQ ID NO: 39217 - DNA, 20 bp, Artificial Sequence
  chemically synthesized
caggcaggaatggcctgctc

SEQ ID NO: 39218 - DNA, 20 bp, Artificial Sequence
  chemically synthesized
aggcaggaatggcctgctca

SEQ ID NO: 39219 - DNA, 20 bp, Artificial Sequence
  chemically synthesized
gaatggcctgctcagggacc

SEQ ID NO: 39220 - DNA, 20 bp, Artificial Sequence
  chemically synthesized
ggcctgctcagggacccagt

SEQ ID NO: 39221 - DNA, 20 bp, Artificial Sequence
  chemically synthesized
tcagggacccagtgagctcc

SEQ ID NO: 39222 - DNA, 20 bp, Artificial Sequence
  chemically synthesized
cagggacccagtgagctccc

SEQ ID NO: 39223 - DNA, 20 bp, Artificial Sequence
  chemically synthesized
agggacccagtgagctccca

SEQ ID NO: 39224 - DNA, 20 bp, Artificial Sequence
  chemically synthesized
ctctacacctgtattttgct

SEQ ID NO: 39225 - DNA, 20 bp, Artificial Sequence
  chemically synthesized
tgtattttgctcagctctct

SEQ ID NO: 39226 - DNA, 20 bp, Artificial Sequence
  chemically synthesized
tctctaagttaactcaactc

SEQ ID NO: 39227 - DNA, 20 bp, Artificial Sequence
  chemically synthesized
ctctaagttaactcaactcc

SEQ ID NO: 39228 - DNA, 20 bp, Artificial Sequence
  chemically synthesized
aagttaactcaactccaggt

SEQ ID NO: 39229 - DNA, 20 bp, Artificial Sequence
  chemically synthesized
agttaactcaactccaggta

SEQ ID NO: 39230 - DNA, 20 bp, Artificial Sequence
  chemically synthesized
aactcaactccaggtaaggt

SEQ ID NO: 39231 - DNA, 20 bp, Artificial Sequence
  chemically synthesized
tcagaaacttctcccacaaa

SEQ ID NO: 39232 - DNA, 20 bp, Artificial Sequence
  chemically synthesized
ttctcccacaaacagacctt

SEQ ID NO: 39233 - DNA, 20 bp, Artificial Sequence
  chemically synthesized
aaacagaccttcagtttctc

SEQ ID NO: 39234 - DNA, 20 bp, Artificial Sequence
  chemically synthesized
cagaccttcagtttctccag

SEQ ID NO: 39235 - DNA, 20 bp, Artificial Sequence
  chemically synthesized
agaccttcagtttctccagt

SEQ ID NO: 39236 - DNA, 20 bp, Artificial Sequence
  chemically synthesized
accttcagtttctccagtgg

SEQ ID NO: 39237 - DNA, 20 bp, Artificial Sequence
  chemically synthesized
ctccagtgggagtgtgtgtt

SEQ ID NO: 39238 - DNA, 20 bp, Artificial Sequence
  chemically synthesized
tccagtgggagtgtgtgttt

SEQ ID NO: 39239 - DNA, 20 bp, Artificial Sequence
  chemically synthesized
cagtgggagtgtgtgtttag

SEQ ID NO: 39240 - DNA, 20 bp, Artificial Sequence
  chemically synthesized
gtgggagtgtgtgtttagga

SEQ ID NO: 39241 - DNA, 20 bp, Artificial Sequence
  chemically synthesized
tgggagtgtgtgtttaggag

SEQ ID NO: 39242 - DNA, 20 bp, Artificial Sequence
  chemically synthesized
ggagtgtgtgtttaggagag

SEQ ID NO: 39243 - DNA, 20 bp, Artificial Sequence
  chemically synthesized
gagtgtgtgtttaggagagg

SEQ ID NO: 39244 - DNA, 20 bp, Artificial Sequence
  chemically synthesized
atctccctttcccacttccg

SEQ ID NO: 39245 - DNA, 20 bp, Artificial Sequence
  chemically synthesized
ccctttcccacttccgcagt

SEQ ID NO: 39246 - DNA, 20 bp, Artificial Sequence
  chemically synthesized
cctttcccacttccgcagtt

SEQ ID NO: 39247 - DNA, 20 bp, Artificial Sequence
  chemically synthesized
ctttcccacttccgcagttg

SEQ ID NO: 39248 - DNA, 20 bp, Artificial Sequence
  chemically synthesized
ttccgcagttggggcactca

SEQ ID NO: 39249 - DNA, 20 bp, Artificial Sequence
  chemically synthesized
gttggggcactcacagtatt

SEQ ID NO: 39250 - DNA, 20 bp, Artificial Sequence
  chemically synthesized
ttggggcactcacagtattt

SEQ ID NO: 39251 - DNA, 20 bp, Artificial Sequence
  chemically synthesized
tggggcactcacagtatttg

SEQ ID NO: 39252 - DNA, 20 bp, Artificial Sequence
  chemically synthesized
acagtatttggggtgtctcc

SEQ ID NO: 39253 - DNA, 20 bp, Artificial Sequence
  chemically synthesized
cagtatttggggtgtctcct

SEQ ID NO: 39254 - DNA, 20 bp, Artificial Sequence
  chemically synthesized
ggggtgtctcctgggtcctg

SEQ ID NO: 39255 - DNA, 20 bp, Artificial Sequence
  chemically synthesized
gggtgtctcctgggtcctgc

SEQ ID NO: 39256 - DNA, 20 bp, Artificial Sequence
  chemically synthesized
gtgtctcctgggtcctgcag

SEQ ID NO: 39257 - DNA, 20 bp, Artificial Sequence
  chemically synthesized
caggagcaatctacttcctt

SEQ ID NO: 39258 - DNA, 20 bp, Artificial Sequence
  chemically synthesized
ggagcaatctacttccttca

SEQ ID NO: 39259 - DNA, 20 bp, Artificial Sequence
  chemically synthesized
gagcaatctacttccttcag

SEQ ID NO: 39260 - DNA, 20 bp, Artificial Sequence
  chemically synthesized
agcaatctacttccttcaga

SEQ ID NO: 39261 - DNA, 20 bp, Artificial Sequence
  chemically synthesized
tacttccttcagagggtctg

SEQ ID NO: 39262 - DNA, 20 bp, Artificial Sequence
  chemically synthesized
acttccttcagagggtctgt

SEQ ID NO: 39263 - DNA, 20 bp, Artificial Sequence
  chemically synthesized
agagggtctgtgggtcctct

SEQ ID NO: 39264 - DNA, 20 bp, Artificial Sequence
  chemically synthesized
gagggtctgtgggtcctctc

SEQ ID NO: 39265 - DNA, 20 bp, Artificial Sequence
  chemically synthesized
gtgggtcctctcaggattgc

SEQ ID NO: 39266 - DNA, 20 bp, Artificial Sequence
  chemically synthesized
ggattgctggtttgttcttg

SEQ ID NO: 39267 - DNA, 20 bp, Artificial Sequence
  chemically synthesized
ttgttcttgcagtctatctg

SEQ ID NO: 39268 - DNA, 20 bp, Artificial Sequence
  chemically synthesized
gcagctaaaattcacaatgc

SEQ ID NO: 39269 - DNA, 20 bp, Artificial Sequence
  chemically synthesized
acatgctgctctgtccatct

SEQ ID NO: 39270 - DNA, 20 bp, Artificial Sequence
  chemically synthesized
gctgctctgtccatctgagt

SEQ ID NO: 39271 - DNA, 20 bp, Artificial Sequence
  chemically synthesized
tgctctgtccatctgagttg

SEQ ID NO: 39272 - DNA, 20 bp, Artificial Sequence
  chemically synthesized
tctgagttggagctgcaatc

SEQ ID NO: 39273 - DNA, 20 bp, Artificial Sequence
  chemically synthesized
ctgagttggagctgcaatct

SEQ ID NO: 39274 - DNA, 20 bp, Artificial Sequence
  chemically synthesized
aggcctacctcccatccgcc

SEQ ID NO: 39275 - DNA, 20 bp, Artificial Sequence
  chemically synthesized
ctcccatccgccaagatcct

SEQ ID NO: 39276 - DNA, 20 bp, Artificial Sequence
  chemically synthesized
ccatccgccaagatcctgag

SEQ ID NO: 39277 - DNA, 20 bp, Artificial Sequence
  chemically synthesized
ccgccaagatcctgagaagt

SEQ ID NO: 39278 - DNA, 20 bp, Artificial Sequence
  chemically synthesized
cgccaagatcctgagaagtt

SEQ ID NO: 39279 - DNA, 20 bp, Artificial Sequence
  chemically synthesized
gccaagatcctgagaagttg

SEQ ID NO: 39280 - DNA, 20 bp, Artificial Sequence
  chemically synthesized
tggggattatatttcaacat

SEQ ID NO: 39281 - DNA, 20 bp, Artificial Sequence
  chemically synthesized
ttatatttcaacatgagatt

SEQ ID NO: 39282 - DNA, 20 bp, Artificial Sequence
  chemically synthesized
atatttcaacatgagatttg

SEQ ID NO: 39283 - DNA, 20 bp, Artificial Sequence
  chemically synthesized
tatttcaacatgagatttgg

SEQ ID NO: 39284 - DNA, 20 bp, Artificial Sequence
  chemically synthesized
atttcaacatgagatttgga

SEQ ID NO: 39285 - DNA, 20 bp, Artificial Sequence
  chemically synthesized
aacaaacatccaaaccatat

SEQ ID NO: 39286 - DNA, 20 bp, Artificial Sequence
  chemically synthesized
aaacatccaaaccatatcag

SEQ ID NO: 39287 - DNA, 20 bp, Artificial Sequence
  chemically synthesized
tccaaaccatatcagcagtc

SEQ ID NO: 39288 - DNA, 20 bp, Artificial Sequence
  chemically synthesized
cagttttattcttttgcaca

SEQ ID NO: 39289 - DNA, 20 bp, Artificial Sequence
  chemically synthesized
ttttgcacatggatatccaa

SEQ ID NO: 39290 - DNA, 20 bp, Artificial Sequence
  chemically synthesized
caatggatatccaatttttt

SEQ ID NO: 39291 - DNA, 20 bp, Artificial Sequence
  chemically synthesized
cacctttgttgaaaatctgt

SEQ ID NO: 39292 - DNA, 20 bp, Artificial Sequence
  chemically synthesized
atctgttggctataaatatg

SEQ ID NO: 39293 - DNA, 20 bp, Artificial Sequence
  chemically synthesized
taaatatgtggatgcatttc

SEQ ID NO: 39294 - DNA, 20 bp, Artificial Sequence
  chemically synthesized
aaatatgtggatgcatttct

SEQ ID NO: 39295 - DNA, 20 bp, Artificial Sequence
  chemically synthesized
ggttctctattctcttccat

SEQ ID NO: 39296 - DNA, 20 bp, Artificial Sequence
  chemically synthesized
ctattctcttccattggtct

SEQ ID NO: 39297 - DNA, 20 bp, Artificial Sequence
  chemically synthesized
ctaagtgtctgttctaatgt

SEQ ID NO: 39298 - DNA, 20 bp, Artificial Sequence
  chemically synthesized
aatgtcagtatcatgctgtt

SEQ ID NO: 39299 - DNA, 20 bp, Artificial Sequence
  chemically synthesized
atgtcagtatcatgctgttt

SEQ ID NO: 39300 - DNA, 20 bp, Artificial Sequence
  chemically synthesized
tttgtaatatactttgaaat

SEQ ID NO: 39301 - DNA, 20 bp, Artificial Sequence
  chemically synthesized
ttgtaatatactttgaaatc

SEQ ID NO: 39302 - DNA, 20 bp, Artificial Sequence
  chemically synthesized
taatatactttgaaatcagg

SEQ ID NO: 39303 - DNA, 20 bp, Artificial Sequence
  chemically synthesized
atcaggtagtatgatacctc

SEQ ID NO: 39304 - DNA, 20 bp, Artificial Sequence
  chemically synthesized
ctagcattgttcttttttca

SEQ ID NO: 39305 - DNA, 20 bp, Artificial Sequence
  chemically synthesized
tagcattgttcttttttcac

SEQ ID NO: 39306 - DNA, 20 bp, Artificial Sequence
  chemically synthesized
cttttttcacaggatgactt

SEQ ID NO: 39307 - DNA, 20 bp, Artificial Sequence
  chemically synthesized
cacaggatgactttggctac

SEQ ID NO: 39308 - DNA, 20 bp, Artificial Sequence
  chemically synthesized
caggatgactttggctactg

SEQ ID NO: 39309 - DNA, 20 bp, Artificial Sequence
  chemically synthesized
ttttaatttcatacaaattt

SEQ ID NO: 39310 - DNA, 20 bp, Artificial Sequence
  chemically synthesized
atttcatacaaattttagat

SEQ ID NO: 39311 - DNA, 20 bp, Artificial Sequence
  chemically synthesized
aaatgacattgctattttga

SEQ ID NO: 39312 - DNA, 20 bp, Artificial Sequence
  chemically synthesized
tgacattgctattttgatag

SEQ ID NO: 39313 - DNA, 20 bp, Artificial Sequence
  chemically synthesized
ctattttgatagcggtcata

SEQ ID NO: 39314 - DNA, 20 bp, Artificial Sequence
  chemically synthesized
tagcggtcatatagaatctg

SEQ ID NO: 39315 - DNA, 20 bp, Artificial Sequence
  chemically synthesized
atagaatctgtagattgctt

SEQ ID NO: 39316 - DNA, 20 bp, Artificial Sequence
  chemically synthesized
tagaatctgtagattgcttt

SEQ ID NO: 39317 - DNA, 20 bp, Artificial Sequence
  chemically synthesized
aatctgtagattgctttggg

SEQ ID NO: 39318 - DNA, 20 bp, Artificial Sequence
  chemically synthesized
gtagattgctttgggtagta

SEQ ID NO: 39319 - DNA, 20 bp, Artificial Sequence
  chemically synthesized
atttttctgatccatgaaca

SEQ ID NO: 39320 - DNA, 20 bp, Artificial Sequence
  chemically synthesized
tttttctgatccatgaacat

SEQ ID NO: 39321 - DNA, 20 bp, Artificial Sequence
  chemically synthesized
gtccttttcaattcttttat

SEQ ID NO: 39322 - DNA, 20 bp, Artificial Sequence
  chemically synthesized
attcttttatcagtgttttg

SEQ ID NO: 39323 - DNA, 20 bp, Artificial Sequence
  chemically synthesized
gtgttttgtagttttccgaa

SEQ ID NO: 39324 - DNA, 20 bp, Artificial Sequence
  chemically synthesized
gttttgtagttttccgaata

SEQ ID NO: 39325 - DNA, 20 bp, Artificial Sequence
  chemically synthesized
ttttgtagttttccgaatag

SEQ ID NO: 39326 - DNA, 20 bp, Artificial Sequence
  chemically synthesized
ttttccgaatagaggttttt

SEQ ID NO: 39327 - DNA, 20 bp, Artificial Sequence
  chemically synthesized
atagaggtttttcggttcct

SEQ ID NO: 39328 - DNA, 20 bp, Artificial Sequence
  chemically synthesized
tccctaaatattttattttt

SEQ ID NO: 39329 - DNA, 20 bp, Artificial Sequence
  chemically synthesized
tattttttagctattgtaaa

SEQ ID NO: 39330 - DNA, 20 bp, Artificial Sequence
  chemically synthesized
attttttagctattgtaaat

SEQ ID NO: 39331 - DNA, 20 bp, Artificial Sequence
  chemically synthesized
tgccttcttaatttccttct

SEQ ID NO: 39332 - DNA, 20 bp, Artificial Sequence
  chemically synthesized
ttcttaatttccttctcagc

SEQ ID NO: 39333 - DNA, 20 bp, Artificial Sequence
  chemically synthesized
cttctcagctagtttattat

SEQ ID NO: 39334 - DNA, 20 bp, Artificial Sequence
  chemically synthesized
gctagtttattattggtgtg

SEQ ID NO: 39335 - DNA, 20 bp, Artificial Sequence
  chemically synthesized
actttactgaatttattttt

SEQ ID NO: 39336 - DNA, 20 bp, Artificial Sequence
  chemically synthesized
tgaatttatttttcagcgct

SEQ ID NO: 39337 - DNA, 20 bp, Artificial Sequence
  chemically synthesized
aatttatttttcagcgctaa

SEQ ID NO: 39338 - DNA, 20 bp, Artificial Sequence
  chemically synthesized
tttcagcgctaagagtgctt

SEQ ID NO: 39339 - DNA, 20 bp, Artificial Sequence
  chemically synthesized
cagcgctaagagtgctttgg

SEQ ID NO: 39340 - DNA, 20 bp, Artificial Sequence
  chemically synthesized
gcgctaagagtgctttggtg

SEQ ID NO: 39341 - DNA, 20 bp, Artificial Sequence
  chemically synthesized
agagtgctttggtggagtct

SEQ ID NO: 39342 - DNA, 20 bp, Artificial Sequence
  chemically synthesized
tggtggagtcttggtttttc

SEQ ID NO: 39343 - DNA, 20 bp, Artificial Sequence
  chemically synthesized
ggtggagtcttggtttttct

SEQ ID NO: 39344 - DNA, 20 bp, Artificial Sequence
  chemically synthesized
aggtataaaatcatgtcatc

SEQ ID NO: 39345 - DNA, 20 bp, Artificial Sequence
  chemically synthesized
ataaaatcatgtcatctgga

SEQ ID NO: 39346 - DNA, 20 bp, Artificial Sequence
  chemically synthesized
aatcatgtcatctggaaaga

SEQ ID NO: 39347 - DNA, 20 bp, Artificial Sequence
  chemically synthesized
atgtcatctggaaagatgga

SEQ ID NO: 39348 - DNA, 20 bp, Artificial Sequence
  chemically synthesized
tctttctttctctgacctga

SEQ ID NO: 39349 - DNA, 20 bp, Artificial Sequence
  chemically synthesized
tttctctgacctgaaagctg

SEQ ID NO: 39350 - DNA, 20 bp, Artificial Sequence
  chemically synthesized
tctgacctgaaagctgtggc

SEQ ID NO: 39351 - DNA, 20 bp, Artificial Sequence
  chemically synthesized
ctgacctgaaagctgtggct

SEQ ID NO: 39352 - DNA, 20 bp, Artificial Sequence
  chemically synthesized
aaagctgtggctaggacttc

SEQ ID NO: 39353 - DNA, 20 bp, Artificial Sequence
  chemically synthesized
acttccagtattatattgaa

SEQ ID NO: 39354 - DNA, 20 bp, Artificial Sequence
  chemically synthesized
cttccagtattatattgaat

SEQ ID NO: 39355 - DNA, 20 bp, Artificial Sequence
  chemically synthesized
tccagtattatattgaatag

SEQ ID NO: 39356 - DNA, 20 bp, Artificial Sequence
  chemically synthesized
attatattgaataggagtga

SEQ ID NO: 39357 - DNA, 20 bp, Artificial Sequence
  chemically synthesized
atattgaataggagtgatgg

SEQ ID NO: 39358 - DNA, 20 bp, Artificial Sequence
  chemically synthesized
ttgaataggagtgatggaag

SEQ ID NO: 39359 - DNA, 20 bp, Artificial Sequence
  chemically synthesized
tgaataggagtgatggaagt

SEQ ID NO: 39360 - DNA, 20 bp, Artificial Sequence
  chemically synthesized
tgggcatccttattttgttt

SEQ ID NO: 39361 - DNA, 20 bp, Artificial Sequence
  chemically synthesized
ccttattttgtttcagttct

SEQ ID NO: 39362 - DNA, 20 bp, Artificial Sequence
  chemically synthesized
ttattttgtttcagttctta

SEQ ID NO: 39363 - DNA, 20 bp, Artificial Sequence
  chemically synthesized
tattttgtttcagttcttag

SEQ ID NO: 39364 - DNA, 20 bp, Artificial Sequence
  chemically synthesized
ttgtttcagttcttagagga

SEQ ID NO: 39365 - DNA, 20 bp, Artificial Sequence
  chemically synthesized
tgtttcagttcttagaggaa

SEQ ID NO: 39366 - DNA, 20 bp, Artificial Sequence
  chemically synthesized
gttcttagaggaaaggcttc

SEQ ID NO: 39367 - DNA, 20 bp, Artificial Sequence
  chemically synthesized
gcttccagcttttcccaatt

SEQ ID NO: 39368 - DNA, 20 bp, Artificial Sequence
  chemically synthesized
ttcccaattcagtatgatgt

SEQ ID NO: 39369 - DNA, 20 bp, Artificial Sequence
  chemically synthesized
attcagtatgatgttagctg

SEQ ID NO: 39370 - DNA, 20 bp, Artificial Sequence
  chemically synthesized
ttcagtatgatgttagctgt

SEQ ID NO: 39371 - DNA, 20 bp, Artificial Sequence
  chemically synthesized
tatatgacttttattatatt

SEQ ID NO: 39372 - DNA, 20 bp, Artificial Sequence
  chemically synthesized
agatatgttccttctatgat

SEQ ID NO: 39373 - DNA, 20 bp, Artificial Sequence
  chemically synthesized
gttccttctatgattggctg

SEQ ID NO: 39374 - DNA, 20 bp, Artificial Sequence
  chemically synthesized
cttctatgattggctgcaga

SEQ ID NO: 39375 - DNA, 20 bp, Artificial Sequence
  chemically synthesized
tgcagatagtttttatcatg

SEQ ID NO: 39376 - DNA, 20 bp, Artificial Sequence
  chemically synthesized
gcagatagtttttatcatga

SEQ ID NO: 39377 - DNA, 20 bp, Artificial Sequence
  chemically synthesized
atactttttctgtatctatt

SEQ ID NO: 39378 - DNA, 20 bp, Artificial Sequence
  chemically synthesized
tatctattgagatgatcata

SEQ ID NO: 39379 - DNA, 20 bp, Artificial Sequence
  chemically synthesized
ttgaactgttcttgcaaccc

SEQ ID NO: 39380 - DNA, 20 bp, Artificial Sequence
  chemically synthesized
gtataaatcccacttgatca

SEQ ID NO: 39381 - DNA, 20 bp, Artificial Sequence
  chemically synthesized
gatcatggtgtattatcttt

SEQ ID NO: 39382 - DNA, 20 bp, Artificial Sequence
  chemically synthesized
ttatcttttggatgtactgt

SEQ ID NO: 39383 - DNA, 20 bp, Artificial Sequence
  chemically synthesized
tttggatgtactgttggatt

SEQ ID NO: 39384 - DNA, 20 bp, Artificial Sequence
  chemically synthesized
tactgttggattcagtttgc

SEQ ID NO: 39385 - DNA, 20 bp, Artificial Sequence
  chemically synthesized
cagtttgctagtattttgtt

SEQ ID NO: 39386 - DNA, 20 bp, Artificial Sequence
  chemically synthesized
agtttgctagtattttgttg

SEQ ID NO: 39387 - DNA, 20 bp, Artificial Sequence
  chemically synthesized
ttttcacacctatgttccat

SEQ ID NO: 39388 - DNA, 20 bp, Artificial Sequence
  chemically synthesized
tttcacacctatgttccatc

SEQ ID NO: 39389 - DNA, 20 bp, Artificial Sequence
  chemically synthesized
ttcacacctatgttccatca

SEQ ID NO: 39390 - DNA, 20 bp, Artificial Sequence
  chemically synthesized
ccatcagggatattgacctg

SEQ ID NO: 39391 - DNA, 20 bp, Artificial Sequence
  chemically synthesized
tttttacttgcatccttgtc

SEQ ID NO: 39392 - DNA, 20 bp, Artificial Sequence
  chemically synthesized
cttgcatccttgtctggtta

SEQ ID NO: 39393 - DNA, 20 bp, Artificial Sequence
  chemically synthesized
tccttgtctggttatggaat

SEQ ID NO: 39394 - DNA, 20 bp, Artificial Sequence
  chemically synthesized
ccttgtctggttatggaatc

SEQ ID NO: 39395 - DNA, 20 bp, Artificial Sequence
  chemically synthesized
ttatggaatcaggataatac

SEQ ID NO: 39396 - DNA, 20 bp, Artificial Sequence
  chemically synthesized
aatcaggataatactggcct

SEQ ID NO: 39397 - DNA, 20 bp, Artificial Sequence
  chemically synthesized
tcaggataatactggcctca

SEQ ID NO: 39398 - DNA, 20 bp, Artificial Sequence
  chemically synthesized
taatactggcctcagagaat

SEQ ID NO: 39399 - DNA, 20 bp, Artificial Sequence
  chemically synthesized
actggcctcagagaatgagt

SEQ ID NO: 39400 - DNA, 20 bp, Artificial Sequence
  chemically synthesized
ctggcctcagagaatgagtt

SEQ ID NO: 39401 - DNA, 20 bp, Artificial Sequence
  chemically synthesized
tggcctcagagaatgagtta

SEQ ID NO: 39402 - DNA, 20 bp, Artificial Sequence
  chemically synthesized
gcctcagagaatgagttagg

SEQ ID NO: 39403 - DNA, 20 bp, Artificial Sequence
  chemically synthesized
ccttcctgtttaatttttaa

SEQ ID NO: 39404 - DNA, 20 bp, Artificial Sequence
  chemically synthesized
tttaatttttaaaagaattt

SEQ ID NO: 39405 - DNA, 20 bp, Artificial Sequence
  chemically synthesized
ttaatttttaaaagaattta

SEQ ID NO: 39406 - DNA, 20 bp, Artificial Sequence
  chemically synthesized
aatttttaaaagaatttaag

SEQ ID NO: 39407 - DNA, 20 bp, Artificial Sequence
  chemically synthesized
aagaatttaaggagacttgt

SEQ ID NO: 39408 - DNA, 20 bp, Artificial Sequence
  chemically synthesized
gacttgttagttttctttga

SEQ ID NO: 39409 - DNA, 20 bp, Artificial Sequence
  chemically synthesized
gttagttttctttgaaagtt

SEQ ID NO: 39410 - DNA, 20 bp, Artificial Sequence
  chemically synthesized
gaaagtttggtaaaatttga

SEQ ID NO: 39411 - DNA, 20 bp, Artificial Sequence
  chemically synthesized
tttggtaaaatttgacagta

SEQ ID NO: 39412 - DNA, 20 bp, Artificial Sequence
  chemically synthesized
aatttgacagtaaagccatc

SEQ ID NO: 39413 - DNA, 20 bp, Artificial Sequence
  chemically synthesized
ggtcttgaaattttcttttt

SEQ ID NO: 39414 - DNA, 20 bp, Artificial Sequence
  chemically synthesized
gtcttgaaattttctttttt

SEQ ID NO: 39415 - DNA, 20 bp, Artificial Sequence
  chemically synthesized
cttgaaattttcttttttgg

SEQ ID NO: 39416 - DNA, 20 bp, Artificial Sequence
  chemically synthesized
tcaatttcattattcattac

SEQ ID NO: 39417 - DNA, 20 bp, Artificial Sequence
  chemically synthesized
ttattcattactggtctgtt

SEQ ID NO: 39418 - DNA, 20 bp, Artificial Sequence
  chemically synthesized
tattcattactggtctgttc

SEQ ID NO: 39419 - DNA, 20 bp, Artificial Sequence
  chemically synthesized
attctttcttaattcaatct

SEQ ID NO: 39420 - DNA, 20 bp, Artificial Sequence
  chemically synthesized
ctttcttaattcaatcttgg

SEQ ID NO: 39421 - DNA, 20 bp, Artificial Sequence
  chemically synthesized
tttcttaattcaatcttggt

SEQ ID NO: 39422 - DNA, 20 bp, Artificial Sequence
  chemically synthesized
cttaattcaatcttggtagg

SEQ ID NO: 39423 - DNA, 20 bp, Artificial Sequence
  chemically synthesized
cttggtaggtggtatgtgtc

SEQ ID NO: 39424 - DNA, 20 bp, Artificial Sequence
  chemically synthesized
agaaatttattaatttcctc

SEQ ID NO: 39425 - DNA, 20 bp, Artificial Sequence
  chemically synthesized
ttaatttcctctagattttt

SEQ ID NO: 39426 - DNA, 20 bp, Artificial Sequence
  chemically synthesized
ctctagatttttcagttttt

SEQ ID NO: 39427 - DNA, 20 bp, Artificial Sequence
  chemically synthesized
tttttcagttttttagtgta

SEQ ID NO: 39428 - DNA, 20 bp, Artificial Sequence
  chemically synthesized
tagtgtatggttgttcataa

SEQ ID NO: 39429 - DNA, 20 bp, Artificial Sequence
  chemically synthesized
gataatcttttctatttctg

SEQ ID NO: 39430 - DNA, 20 bp, Artificial Sequence
  chemically synthesized
cttttctatttctgtggtat

SEQ ID NO: 39431 - DNA, 20 bp, Artificial Sequence
  chemically synthesized
atttctgattttctttattt

SEQ ID NO: 39432 - DNA, 20 bp, Artificial Sequence
  chemically synthesized
tcagtctcttctctttttct

SEQ ID NO: 39433 - DNA, 20 bp, Artificial Sequence
  chemically synthesized
tctcttctctttttcttggt

SEQ ID NO: 39434 - DNA, 20 bp, Artificial Sequence
  chemically synthesized
tctctttttcttggttagtc

SEQ ID NO: 39435 - DNA, 20 bp, Artificial Sequence
  chemically synthesized
tttttcttggttagtctagc

SEQ ID NO: 39436 - DNA, 20 bp, Artificial Sequence
  chemically synthesized
tttcttggttagtctagcta

SEQ ID NO: 39437 - DNA, 20 bp, Artificial Sequence
  chemically synthesized
ttgtttttctctatttcatt

SEQ ID NO: 39438 - DNA, 20 bp, Artificial Sequence
  chemically synthesized
cattttttctttccttctgc

SEQ ID NO: 39439 - DNA, 20 bp, Artificial Sequence
  chemically synthesized
ttctttccttctgctagttt

SEQ ID NO: 39440 - DNA, 20 bp, Artificial Sequence
  chemically synthesized
tctttccttctgctagtttt

SEQ ID NO: 39441 - DNA, 20 bp, Artificial Sequence
  chemically synthesized
gggttttgttcttgcttttc

SEQ ID NO: 39442 - DNA, 20 bp, Artificial Sequence
  chemically synthesized
tcttgcttttctagcttgtt

SEQ ID NO: 39443 - DNA, 20 bp, Artificial Sequence
  chemically synthesized
cttgcttttctagcttgttg

SEQ ID NO: 39444 - DNA, 20 bp, Artificial Sequence
  chemically synthesized
agcttgttgaggtacatgat

SEQ ID NO: 39445 - DNA, 20 bp, Artificial Sequence
  chemically synthesized
tctttctatgtttttaattt

SEQ ID NO: 39446 - DNA, 20 bp, Artificial Sequence
  chemically synthesized
taatttaagtgtttattgat

SEQ ID NO: 39447 - DNA, 20 bp, Artificial Sequence
  chemically synthesized
ttattgataagcttctctct

SEQ ID NO: 39448 - DNA, 20 bp, Artificial Sequence
  chemically synthesized
actgcttttgctgtatccca

SEQ ID NO: 39449 - DNA, 20 bp, Artificial Sequence
  chemically synthesized
ttcttgacataacgttcatt

SEQ ID NO: 39450 - DNA, 20 bp, Artificial Sequence
  chemically synthesized
tcttgacataacgttcattc

SEQ ID NO: 39451 - DNA, 20 bp, Artificial Sequence
  chemically synthesized
ttgacataacgttcattcag

SEQ ID NO: 39452 - DNA, 20 bp, Artificial Sequence
  chemically synthesized
ttaatttccatgtatttgta

SEQ ID NO: 39453 - DNA, 20 bp, Artificial Sequence
  chemically synthesized
taatttccatgtatttgtat

SEQ ID NO: 39454 - DNA, 20 bp, Artificial Sequence
  chemically synthesized
atgtatttgtataggtttta

SEQ ID NO: 39455 - DNA, 20 bp, Artificial Sequence
  chemically synthesized
tttttcttgttattgatttc

SEQ ID NO: 39456 - DNA, 20 bp, Artificial Sequence
  chemically synthesized
tttctagttttattccattg

SEQ ID NO: 39457 - DNA, 20 bp, Artificial Sequence
  chemically synthesized
gttttattccattgtggtct

SEQ ID NO: 39458 - DNA, 20 bp, Artificial Sequence
  chemically synthesized
ttattccattgtggtctgag

SEQ ID NO: 39459 - DNA, 20 bp, Artificial Sequence
  chemically synthesized
tgatttcaaatatttcaaat

SEQ ID NO: 39460 - DNA, 20 bp, Artificial Sequence
  chemically synthesized
tcaaatatttcaaattagtt

SEQ ID NO: 39461 - DNA, 20 bp, Artificial Sequence
  chemically synthesized
ttcttttgtgttctaacata

SEQ ID NO: 39462 - DNA, 20 bp, Artificial Sequence
  chemically synthesized
ttctaacatatggtgtatcc

SEQ ID NO: 39463 - DNA, 20 bp, Artificial Sequence
  chemically synthesized
tctaacatatggtgtatcct

SEQ ID NO: 39464 - DNA, 20 bp, Artificial Sequence
  chemically synthesized
ctaacatatggtgtatcctg

SEQ ID NO: 39465 - DNA, 20 bp, Artificial Sequence
  chemically synthesized
ggaatgcgtcatgtgctgat

SEQ ID NO: 39466 - DNA, 20 bp, Artificial Sequence
  chemically synthesized
gatgagataaatatattctg

SEQ ID NO: 39467 - DNA, 20 bp, Artificial Sequence
  chemically synthesized
taaatatattctgtagctgt

SEQ ID NO: 39468 - DNA, 20 bp, Artificial Sequence
  chemically synthesized
atgaaatattgtgtaaatgt

SEQ ID NO: 39469 - DNA, 20 bp, Artificial Sequence
  chemically synthesized
gtgtaaatgttagatccatt

SEQ ID NO: 39470 - DNA, 20 bp, Artificial Sequence
  chemically synthesized
tgttagatccatttggtcta

SEQ ID NO: 39471 - DNA, 20 bp, Artificial Sequence
  chemically synthesized
gatccatttggtctaaagtc

SEQ ID NO: 39472 - DNA, 20 bp, Artificial Sequence
  chemically synthesized
ttctttgttaattttctgtc

SEQ ID NO: 39473 - DNA, 20 bp, Artificial Sequence
  chemically synthesized
tagatgatctatctgatgct

SEQ ID NO: 39474 - DNA, 20 bp, Artificial Sequence
  chemically synthesized
gatctatctgatgctgagat

SEQ ID NO: 39475 - DNA, 20 bp, Artificial Sequence
  chemically synthesized
atccccaactattattgtat

SEQ ID NO: 39476 - DNA, 20 bp, Artificial Sequence
  chemically synthesized
taacatttgctttacatatc

SEQ ID NO: 39477 - DNA, 20 bp, Artificial Sequence
  chemically synthesized
ctttacatatctggatgctc

SEQ ID NO: 39478 - DNA, 20 bp, Artificial Sequence
  chemically synthesized
tatctggatgctctggtgtt

SEQ ID NO: 39479 - DNA, 20 bp, Artificial Sequence
  chemically synthesized
tggtgttgagtgtgaatgtt

SEQ ID NO: 39480 - DNA, 20 bp, Artificial Sequence
  chemically synthesized
atgtaatgacttttgtctct

SEQ ID NO: 39481 - DNA, 20 bp, Artificial Sequence
  chemically synthesized
ctcttagtgttttttattta

SEQ ID NO: 39482 - DNA, 20 bp, Artificial Sequence
  chemically synthesized
aaagtcaattttatctgtta

SEQ ID NO: 39483 - DNA, 20 bp, Artificial Sequence
  chemically synthesized
aagtcaattttatctgttat

SEQ ID NO: 39484 - DNA, 20 bp, Artificial Sequence
  chemically synthesized
taactacttttgctcatttt

SEQ ID NO: 39485 - DNA, 20 bp, Artificial Sequence
  chemically synthesized
atttttggtttctctttgta

SEQ ID NO: 39486 - DNA, 20 bp, Artificial Sequence
  chemically synthesized
tttggtttctctttgtatgg

SEQ ID NO: 39487 - DNA, 20 bp, Artificial Sequence
  chemically synthesized
atctttcatctttttacttt

SEQ ID NO: 39488 - DNA, 20 bp, Artificial Sequence
  chemically synthesized
cagtctatatttatctttac

SEQ ID NO: 39489 - DNA, 20 bp, Artificial Sequence
  chemically synthesized
ctatatttatctttacaagt

SEQ ID NO: 39490 - DNA, 20 bp, Artificial Sequence
  chemically synthesized
tttatctttacaagtgagat

SEQ ID NO: 39491 - DNA, 20 bp, Artificial Sequence
  chemically synthesized
caagtgagataagtttctta

SEQ ID NO: 39492 - DNA, 20 bp, Artificial Sequence
  chemically synthesized
aagtgagataagtttcttat

SEQ ID NO: 39493 - DNA, 20 bp, Artificial Sequence
  chemically synthesized
tgagataagtttcttatagg

SEQ ID NO: 39494 - DNA, 20 bp, Artificial Sequence
  chemically synthesized
tcttataggcagcttacaac

SEQ ID NO: 39495 - DNA, 20 bp, Artificial Sequence
  chemically synthesized
cttataggcagcttacaact

SEQ ID NO: 39496 - DNA, 20 bp, Artificial Sequence
  chemically synthesized
atttttgttttaaatctatt

SEQ ID NO: 39497 - DNA, 20 bp, Artificial Sequence
  chemically synthesized
ttgttttaaatctatttagc

SEQ ID NO: 39498 - DNA, 20 bp, Artificial Sequence
  chemically synthesized
ttagccagtctatatctttc

SEQ ID NO: 39499 - DNA, 20 bp, Artificial Sequence
  chemically synthesized
aatttaatccatttacatgc

SEQ ID NO: 39500 - DNA, 20 bp, Artificial Sequence
  chemically synthesized
atttaatccatttacatgca

SEQ ID NO: 39501 - DNA, 20 bp, Artificial Sequence
  chemically synthesized
caaggctattattgacatgt

SEQ ID NO: 39502 - DNA, 20 bp, Artificial Sequence
  chemically synthesized
aggctattattgacatgtga

SEQ ID NO: 39503 - DNA, 20 bp, Artificial Sequence
  chemically synthesized
ccattttgttaattgattcc

SEQ ID NO: 39504 - DNA, 20 bp, Artificial Sequence
  chemically synthesized
tggttgttttgttttttttt

SEQ ID NO: 39505 - DNA, 20 bp, Artificial Sequence
  chemically synthesized
tttcttattatttatgattg

SEQ ID NO: 39506 - DNA, 20 bp, Artificial Sequence
  chemically synthesized
tattatttatgattgtggtt

SEQ ID NO: 39507 - DNA, 20 bp, Artificial Sequence
  chemically synthesized
tgtggtttggtgattttctg

SEQ ID NO: 39508 - DNA, 20 bp, Artificial Sequence
  chemically synthesized
ggtttggtgattttctgtag

SEQ ID NO: 39509 - DNA, 20 bp, Artificial Sequence
  chemically synthesized
tttctgtagtggtaacgttt

SEQ ID NO: 39510 - DNA, 20 bp, Artificial Sequence
  chemically synthesized
ttatttgtgttttgctctac

SEQ ID NO: 39511 - DNA, 20 bp, Artificial Sequence
  chemically synthesized
ttgtgttttgctctaccagt

SEQ ID NO: 39512 - DNA, 20 bp, Artificial Sequence
  chemically synthesized
acctttgtgtgtcttcataa

SEQ ID NO: 39513 - DNA, 20 bp, Artificial Sequence
  chemically synthesized
tttgtgtgtcttcataatgg

SEQ ID NO: 39514 - DNA, 20 bp, Artificial Sequence
  chemically synthesized
tgtcctgtcactttcatgtg

SEQ ID NO: 39515 - DNA, 20 bp, Artificial Sequence
  chemically synthesized
gtcctgtcactttcatgtgt

SEQ ID NO: 39516 - DNA, 20 bp, Artificial Sequence
  chemically synthesized
tcccttaaatatttcttgta

SEQ ID NO: 39517 - DNA, 20 bp, Artificial Sequence
  chemically synthesized
ttaaatatttcttgtaaagc

SEQ ID NO: 39518 - DNA, 20 bp, Artificial Sequence
  chemically synthesized
tatttcttgtaaagccagtc

SEQ ID NO: 39519 - DNA, 20 bp, Artificial Sequence
  chemically synthesized
ttgtaaagccagtctagtga

SEQ ID NO: 39520 - DNA, 20 bp, Artificial Sequence
  chemically synthesized
tccttcaaatttttcttgcc

SEQ ID NO: 39521 - DNA, 20 bp, Artificial Sequence
  chemically synthesized
caaatttttcttgcccagaa

SEQ ID NO: 39522 - DNA, 20 bp, Artificial Sequence
  chemically synthesized
ttatttatccttcatttttg

SEQ ID NO: 39523 - DNA, 20 bp, Artificial Sequence
  chemically synthesized
tttttgaagaacaatgttgc

SEQ ID NO: 39524 - DNA, 20 bp, Artificial Sequence
  chemically synthesized
ttttgaagaacaatgttgct

SEQ ID NO: 39525 - DNA, 20 bp, Artificial Sequence
  chemically synthesized
gttgctgggtataacatcct

SEQ ID NO: 39526 - DNA, 20 bp, Artificial Sequence
  chemically synthesized
tatatcatcccatcttctcc

SEQ ID NO: 39527 - DNA, 20 bp, Artificial Sequence
  chemically synthesized
cccatcttctcctggcctgt

SEQ ID NO: 39528 - DNA, 20 bp, Artificial Sequence
  chemically synthesized
ccatcttctcctggcctgtg

SEQ ID NO: 39529 - DNA, 20 bp, Artificial Sequence
  chemically synthesized
tggcctgtgaggtttctgct

SEQ ID NO: 39530 - DNA, 20 bp, Artificial Sequence
  chemically synthesized
ctgttaatctgttaatcttg

SEQ ID NO: 39531 - DNA, 20 bp, Artificial Sequence
  chemically synthesized
ttaatctgttaatcttgtgg

SEQ ID NO: 39532 - DNA, 20 bp, Artificial Sequence
  chemically synthesized
tcttgtggaagttcccttat

SEQ ID NO: 39533 - DNA, 20 bp, Artificial Sequence
  chemically synthesized
gaagttcccttataagtgac

SEQ ID NO: 39534 - DNA, 20 bp, Artificial Sequence
  chemically synthesized
agacattttgcttgctgttt

SEQ ID NO: 39535 - DNA, 20 bp, Artificial Sequence
  chemically synthesized
acattttgcttgctgtttta

SEQ ID NO: 39536 - DNA, 20 bp, Artificial Sequence
  chemically synthesized
gttttagagttcttactctt

SEQ ID NO: 39537 - DNA, 20 bp, Artificial Sequence
  chemically synthesized
tcttactctttggcttttga

SEQ ID NO: 39538 - DNA, 20 bp, Artificial Sequence
  chemically synthesized
agtttgactataatgtgctg

SEQ ID NO: 39539 - DNA, 20 bp, Artificial Sequence
  chemically synthesized
tttgactataatgtgctgtg

SEQ ID NO: 39540 - DNA, 20 bp, Artificial Sequence
  chemically synthesized
gactataatgtgctgtggag

SEQ ID NO: 39541 - DNA, 20 bp, Artificial Sequence
  chemically synthesized
ctataatgtgctgtggagaa

SEQ ID NO: 39542 - DNA, 20 bp, Artificial Sequence
  chemically synthesized
gctttttgcattatattatt

SEQ ID NO: 39543 - DNA, 20 bp, Artificial Sequence
  chemically synthesized
ctttttgcattatattattt

SEQ ID NO: 39544 - DNA, 20 bp, Artificial Sequence
  chemically synthesized
atttctgattttcatttgtc

SEQ ID NO: 39545 - DNA, 20 bp, Artificial Sequence
  chemically synthesized
tggatgtctacatttcttgc

SEQ ID NO: 39546 - DNA, 20 bp, Artificial Sequence
  chemically synthesized
catttcttgctagacttgac

SEQ ID NO: 39547 - DNA, 20 bp, Artificial Sequence
  chemically synthesized
tgctagacttgacaagtttt

SEQ ID NO: 39548 - DNA, 20 bp, Artificial Sequence
  chemically synthesized
tcagctattgtgttgttacg

SEQ ID NO: 39549 - DNA, 20 bp, Artificial Sequence
  chemically synthesized
cagctattgtgttgttacgt

SEQ ID NO: 39550 - DNA, 20 bp, Artificial Sequence
  chemically synthesized
ttcatgttctctttaccttc

SEQ ID NO: 39551 - DNA, 20 bp, Artificial Sequence
  chemically synthesized
tcatgttctctttaccttct

SEQ ID NO: 39552 - DNA, 20 bp, Artificial Sequence
  chemically synthesized
ttgaatatttgttcacttta

SEQ ID NO: 39553 - DNA, 20 bp, Artificial Sequence
  chemically synthesized
tttcctttctatcatttgac

SEQ ID NO: 39554 - DNA, 20 bp, Artificial Sequence
  chemically synthesized
atttgaccagctaattttaa

SEQ ID NO: 39555 - DNA, 20 bp, Artificial Sequence
  chemically synthesized
attttaaaagacctgtcttc

SEQ ID NO: 39556 - DNA, 20 bp, Artificial Sequence
  chemically synthesized
cttgatctgatctattgttg

SEQ ID NO: 39557 - DNA, 20 bp, Artificial Sequence
  chemically synthesized
atttctttcaataaactctt

SEQ ID NO: 39558 - DNA, 20 bp, Artificial Sequence
  chemically synthesized
ttcaataaactcttcagtta

SEQ ID NO: 39559 - DNA, 20 bp, Artificial Sequence
  chemically synthesized
tcagttacagaatttctgtt

SEQ ID NO: 39560 - DNA, 20 bp, Artificial Sequence
  chemically synthesized
ttcttgttgtatctatctct

SEQ ID NO: 39561 - DNA, 20 bp, Artificial Sequence
  chemically synthesized
tcttgttgtatctatctctt

SEQ ID NO: 39562 - DNA, 20 bp, Artificial Sequence
  chemically synthesized
tttctttttattgtttatct

SEQ ID NO: 39563 - DNA, 20 bp, Artificial Sequence
  chemically synthesized
gagttctcttgtgtctcact

SEQ ID NO: 39564 - DNA, 20 bp, Artificial Sequence
  chemically synthesized
cttccttaatatcaacattt

SEQ ID NO: 39565 - DNA, 20 bp, Artificial Sequence
  chemically synthesized
acattttggattcttttttc

SEQ ID NO: 39566 - DNA, 20 bp, Artificial Sequence
  chemically synthesized
taaatgtcttttttttccac

SEQ ID NO: 39567 - DNA, 20 bp, Artificial Sequence
  chemically synthesized
tccactggcttatgttgctg

SEQ ID NO: 39568 - DNA, 20 bp, Artificial Sequence
  chemically synthesized
gaagaattattaaattcctt

SEQ ID NO: 39569 - DNA, 20 bp, Artificial Sequence
  chemically synthesized
gaattattaaattcctttgg

SEQ ID NO: 39570 - DNA, 20 bp, Artificial Sequence
  chemically synthesized
tgcattgatatctctgcatc

SEQ ID NO: 39571 - DNA, 20 bp, Artificial Sequence
  chemically synthesized
ggtgtaatgattgctgcttc

SEQ ID NO: 39572 - DNA, 20 bp, Artificial Sequence
  chemically synthesized
gttttgtaaatttgtttttg

SEQ ID NO: 39573 - DNA, 20 bp, Artificial Sequence
  chemically synthesized
ttttgtaaatttgtttttgt

SEQ ID NO: 39574 - DNA, 20 bp, Artificial Sequence
  chemically synthesized
tttgtaaatttgtttttgta

SEQ ID NO: 39575 - DNA, 20 bp, Artificial Sequence
  chemically synthesized
ttgtaaatttgtttttgtag

SEQ ID NO: 39576 - DNA, 20 bp, Artificial Sequence
  chemically synthesized
taaatttgtttttgtagggg

SEQ ID NO: 39577 - DNA, 20 bp, Artificial Sequence
  chemically synthesized
taggggaagacttttttctg

SEQ ID NO: 39578 - DNA, 20 bp, Artificial Sequence
  chemically synthesized
ttttttctgaagatgtatct

SEQ ID NO: 39579 - DNA, 20 bp, Artificial Sequence
  chemically synthesized
gatgtatcttggtgttgatt

SEQ ID NO: 39580 - DNA, 20 bp, Artificial Sequence
  chemically synthesized
gtatcttggtgttgattgag

SEQ ID NO: 39581 - DNA, 20 bp, Artificial Sequence
  chemically synthesized
tatcttggtgttgattgagt

SEQ ID NO: 39582 - DNA, 20 bp, Artificial Sequence
  chemically synthesized
atcttggtgttgattgagta

SEQ ID NO: 39583 - DNA, 20 bp, Artificial Sequence
  chemically synthesized
ggcactttgattttgatttc

SEQ ID NO: 39584 - DNA, 20 bp, Artificial Sequence
  chemically synthesized
gcactttgattttgatttct

SEQ ID NO: 39585 - DNA, 20 bp, Artificial Sequence
  chemically synthesized
ttttgatttctaggtgcata

SEQ ID NO: 39586 - DNA, 20 bp, Artificial Sequence
  chemically synthesized
tgatttctaggtgcatacag

SEQ ID NO: 39587 - DNA, 20 bp, Artificial Sequence
  chemically synthesized
tctaggtgcatacagcagca

SEQ ID NO: 39588 - DNA, 20 bp, Artificial Sequence
  chemically synthesized
gtcttcatattatttttttt

SEQ ID NO: 39589 - DNA, 20 bp, Artificial Sequence
  chemically synthesized
tattttttttcagctgccaa

SEQ ID NO: 39590 - DNA, 20 bp, Artificial Sequence
  chemically synthesized
tcagctgccaacagtatcat

SEQ ID NO: 39591 - DNA, 20 bp, Artificial Sequence
  chemically synthesized
atcagtgtctgtgatttttt

SEQ ID NO: 39592 - DNA, 20 bp, Artificial Sequence
  chemically synthesized
agtgtctgtgattttttcag

SEQ ID NO: 39593 - DNA, 20 bp, Artificial Sequence
  chemically synthesized
ctgtgattttttcagtggct

SEQ ID NO: 39594 - DNA, 20 bp, Artificial Sequence
  chemically synthesized
tgtgattttttcagtggctt

SEQ ID NO: 39595 - DNA, 20 bp, Artificial Sequence
  chemically synthesized
gtgattttttcagtggctta

SEQ ID NO: 39596 - DNA, 20 bp, Artificial Sequence
  chemically synthesized
gtggcttagggtgcatttgt

SEQ ID NO: 39597 - DNA, 20 bp, Artificial Sequence
  chemically synthesized
ttagggtgcatttgttagtg

SEQ ID NO: 39598 - DNA, 20 bp, Artificial Sequence
  chemically synthesized
tagggtgcatttgttagtga

SEQ ID NO: 39599 - DNA, 20 bp, Artificial Sequence
  chemically synthesized
ggtgcatttgttagtgaagg

SEQ ID NO: 39600 - DNA, 20 bp, Artificial Sequence
  chemically synthesized
ttgttagtgaaggtggtgat

SEQ ID NO: 39601 - DNA, 20 bp, Artificial Sequence
  chemically synthesized
tgttagtgaaggtggtgatg

SEQ ID NO: 39602 - DNA, 20 bp, Artificial Sequence
  chemically synthesized
aggtggtgatgaggttgtgc

SEQ ID NO: 39603 - DNA, 20 bp, Artificial Sequence
  chemically synthesized
gtggtgatgaggttgtgctg

SEQ ID NO: 39604 - DNA, 20 bp, Artificial Sequence
  chemically synthesized
gatgaggttgtgctggagac

SEQ ID NO: 39605 - DNA, 20 bp, Artificial Sequence
  chemically synthesized
gtgctggagacaagaatatc

SEQ ID NO: 39606 - DNA, 20 bp, Artificial Sequence
  chemically synthesized
ctggagacaagaatatcaag

SEQ ID NO: 39607 - DNA, 20 bp, Artificial Sequence
  chemically synthesized
tggagacaagaatatcaagt

SEQ ID NO: 39608 - DNA, 20 bp, Artificial Sequence
  chemically synthesized
gacaagaatatcaagtgggc

SEQ ID NO: 39609 - DNA, 20 bp, Artificial Sequence
  chemically synthesized
atatcaagtgggccagtcct

SEQ ID NO: 39610 - DNA, 20 bp, Artificial Sequence
  chemically synthesized
agtgggccagtccttggccc

SEQ ID NO: 39611 - DNA, 20 bp, Artificial Sequence
  chemically synthesized
gggccagtccttggccccag

SEQ ID NO: 39612 - DNA, 20 bp, Artificial Sequence
  chemically synthesized
ccagtccttggccccagtgg

SEQ ID NO: 39613 - DNA, 20 bp, Artificial Sequence
  chemically synthesized
gtccttggccccagtggtgg

SEQ ID NO: 39614 - DNA, 20 bp, Artificial Sequence
  chemically synthesized
cttggccccagtggtggtgg

SEQ ID NO: 39615 - DNA, 20 bp, Artificial Sequence
  chemically synthesized
ttggccccagtggtggtggt

SEQ ID NO: 39616 - DNA, 20 bp, Artificial Sequence
  chemically synthesized
cccagtggtggtggtgggcc

SEQ ID NO: 39617 - DNA, 20 bp, Artificial Sequence
  chemically synthesized
gggcctagcattcctgtcct

SEQ ID NO: 39618 - DNA, 20 bp, Artificial Sequence
  chemically synthesized
ggcctagcattcctgtcctt

SEQ ID NO: 39619 - DNA, 20 bp, Artificial Sequence
  chemically synthesized
attcctgtccttgggcccca

SEQ ID NO: 39620 - DNA, 20 bp, Artificial Sequence
  chemically synthesized
ggccccatggctgtgtacat

SEQ ID NO: 39621 - DNA, 20 bp, Artificial Sequence
  chemically synthesized
gctgtgtacattggcactga

SEQ ID NO: 39622 - DNA, 20 bp, Artificial Sequence
  chemically synthesized
acattggcactgatggtaat

SEQ ID NO: 39623 - DNA, 20 bp, Artificial Sequence
  chemically synthesized
ggcactgatggtaatgagtc

SEQ ID NO: 39624 - DNA, 20 bp, Artificial Sequence
  chemically synthesized
ctgatggtaatgagtctagt

SEQ ID NO: 39625 - DNA, 20 bp, Artificial Sequence
  chemically synthesized
tgatggtaatgagtctagtt

SEQ ID NO: 39626 - DNA, 20 bp, Artificial Sequence
  chemically synthesized
gtctagttgggttgattctt

SEQ ID NO: 39627 - DNA, 20 bp, Artificial Sequence
  chemically synthesized
tgggttgattctttggcctt

SEQ ID NO: 39628 - DNA, 20 bp, Artificial Sequence
  chemically synthesized
gggttgattctttggccttc

SEQ ID NO: 39629 - DNA, 20 bp, Artificial Sequence
  chemically synthesized
ttgattctttggccttcagg

SEQ ID NO: 39630 - DNA, 20 bp, Artificial Sequence
  chemically synthesized
tggccttcaggcagtttgct

SEQ ID NO: 39631 - DNA, 20 bp, Artificial Sequence
  chemically synthesized
ggccttcaggcagtttgctt

SEQ ID NO: 39632 - DNA, 20 bp, Artificial Sequence
  chemically synthesized
caggcagtttgcttgggtgt

SEQ ID NO: 39633 - DNA, 20 bp, Artificial Sequence
  chemically synthesized
gcagtttgcttgggtgtcag

SEQ ID NO: 39634 - DNA, 20 bp, Artificial Sequence
  chemically synthesized
gtttgcttgggtgtcagtag

SEQ ID NO: 39635 - DNA, 20 bp, Artificial Sequence
  chemically synthesized
ttgggtgtcagtagtggcca

SEQ ID NO: 39636 - DNA, 20 bp, Artificial Sequence
  chemically synthesized
ggtgtcagtagtggccatag

SEQ ID NO: 39637 - DNA, 20 bp, Artificial Sequence
  chemically synthesized
cagtagtggccatagtagac

SEQ ID NO: 39638 - DNA, 20 bp, Artificial Sequence
  chemically synthesized
agtagtggccatagtagact

SEQ ID NO: 39639 - DNA, 20 bp, Artificial Sequence
  chemically synthesized
gtggccatagtagactgggc

SEQ ID NO: 39640 - DNA, 20 bp, Artificial Sequence
  chemically synthesized
tagtagactgggctggtgtg

SEQ ID NO: 39641 - DNA, 20 bp, Artificial Sequence
  chemically synthesized
agtagactgggctggtgtgt

SEQ ID NO: 39642 - DNA, 20 bp, Artificial Sequence
  chemically synthesized
tgggctggtgtgtgggtcct

SEQ ID NO: 39643 - DNA, 20 bp, Artificial Sequence
  chemically synthesized
gggctggtgtgtgggtcctc

SEQ ID NO: 39644 - DNA, 20 bp, Artificial Sequence
  chemically synthesized
tgtgtgggtcctcaggcttc

SEQ ID NO: 39645 - DNA, 20 bp, Artificial Sequence
  chemically synthesized
tgggtcctcaggcttctgga

SEQ ID NO: 39646 - DNA, 20 bp, Artificial Sequence
  chemically synthesized
gtcctcaggcttctggacag

SEQ ID NO: 39647 - DNA, 20 bp, Artificial Sequence
  chemically synthesized
tcctcaggcttctggacagt

SEQ ID NO: 39648 - DNA, 20 bp, Artificial Sequence
  chemically synthesized
aggcttctggacagtgggtg

SEQ ID NO: 39649 - DNA, 20 bp, Artificial Sequence
  chemically synthesized
tctggacagtgggtgtggtg

SEQ ID NO: 39650 - DNA, 20 bp, Artificial Sequence
  chemically synthesized
ctggacagtgggtgtggtgt

SEQ ID NO: 39651 - DNA, 20 bp, Artificial Sequence
  chemically synthesized
agtgggtgtggtgtgggtga

SEQ ID NO: 39652 - DNA, 20 bp, Artificial Sequence
  chemically synthesized
tgtggtgtgggtgatggctg

SEQ ID NO: 39653 - DNA, 20 bp, Artificial Sequence
  chemically synthesized
ggtgatggctgtagcaactg

SEQ ID NO: 39654 - DNA, 20 bp, Artificial Sequence
  chemically synthesized
gtgatggctgtagcaactgc

SEQ ID NO: 39655 - DNA, 20 bp, Artificial Sequence
  chemically synthesized
gcaactgcaggacaaccctc

SEQ ID NO: 39656 - DNA, 20 bp, Artificial Sequence
  chemically synthesized
aggacaaccctctggctccc

SEQ ID NO: 39657 - DNA, 20 bp, Artificial Sequence
  chemically synthesized
acaaccctctggctcccaag

SEQ ID NO: 39658 - DNA, 20 bp, Artificial Sequence
  chemically synthesized
ggctcccaagcagtctgcac

SEQ ID NO: 39659 - DNA, 20 bp, Artificial Sequence
  chemically synthesized
caagcagtctgcactggtgt

SEQ ID NO: 39660 - DNA, 20 bp, Artificial Sequence
  chemically synthesized
gcagtctgcactggtgttgg

SEQ ID NO: 39661 - DNA, 20 bp, Artificial Sequence
  chemically synthesized
gtctgcactggtgttggtgg

SEQ ID NO: 39662 - DNA, 20 bp, Artificial Sequence
  chemically synthesized
ctggtgttggtggtggctgc

SEQ ID NO: 39663 - DNA, 20 bp, Artificial Sequence
  chemically synthesized
tggtgttggtggtggctgca

SEQ ID NO: 39664 - DNA, 20 bp, Artificial Sequence
  chemically synthesized
ggtgttggtggtggctgcaa

SEQ ID NO: 39665 - DNA, 20 bp, Artificial Sequence
  chemically synthesized
ggtggctgcaagggctgaat

SEQ ID NO: 39666 - DNA, 20 bp, Artificial Sequence
  chemically synthesized
gctgcaagggctgaatgagc

SEQ ID NO: 39667 - DNA, 20 bp, Artificial Sequence
  chemically synthesized
gggctgaatgagccagtctt

SEQ ID NO: 39668 - DNA, 20 bp, Artificial Sequence
  chemically synthesized
tgagccagtcttcagaccca

SEQ ID NO: 39669 - DNA, 20 bp, Artificial Sequence
  chemically synthesized
gagccagtcttcagacccac

SEQ ID NO: 39670 - DNA, 20 bp, Artificial Sequence
  chemically synthesized
ccagtcttcagacccacagg

SEQ ID NO: 39671 - DNA, 20 bp, Artificial Sequence
  chemically synthesized
agacccacaggtggcacatg

SEQ ID NO: 39672 - DNA, 20 bp, Artificial Sequence
  chemically synthesized
gacccacaggtggcacatgc

SEQ ID NO: 39673 - DNA, 20 bp, Artificial Sequence
  chemically synthesized
cccacaggtggcacatgcag

SEQ ID NO: 39674 - DNA, 20 bp, Artificial Sequence
  chemically synthesized
ccacaggtggcacatgcagg

SEQ ID NO: 39675 - DNA, 20 bp, Artificial Sequence
  chemically synthesized
gtggcacatgcaggaggtgc

SEQ ID NO: 39676 - DNA, 20 bp, Artificial Sequence
  chemically synthesized
gcaggaggtgccagttgtga

SEQ ID NO: 39677 - DNA, 20 bp, Artificial Sequence
  chemically synthesized
ggaggtgccagttgtgatgg

SEQ ID NO: 39678 - DNA, 20 bp, Artificial Sequence
  chemically synthesized
ggtgccagttgtgatggcag

SEQ ID NO: 39679 - DNA, 20 bp, Artificial Sequence
  chemically synthesized
gccagttgtgatggcagtgg

SEQ ID NO: 39680 - DNA, 20 bp, Artificial Sequence
  chemically synthesized
ttgtgatggcagtggcagat

SEQ ID NO: 39681 - DNA, 20 bp, Artificial Sequence
  chemically synthesized
tgtgatggcagtggcagatt

SEQ ID NO: 39682 - DNA, 20 bp, Artificial Sequence
  chemically synthesized
gatggcagtggcagattggg

SEQ ID NO: 39683 - DNA, 20 bp, Artificial Sequence
  chemically synthesized
atggcagtggcagattgggt

SEQ ID NO: 39684 - DNA, 20 bp, Artificial Sequence
  chemically synthesized
agattgggtaggcccatcat

SEQ ID NO: 39685 - DNA, 20 bp, Artificial Sequence
  chemically synthesized
gattgggtaggcccatcatc

SEQ ID NO: 39686 - DNA, 20 bp, Artificial Sequence
  chemically synthesized
taggcccatcatcaggcttc

SEQ ID NO: 39687 - DNA, 20 bp, Artificial Sequence
  chemically synthesized
aggcccatcatcaggcttct

SEQ ID NO: 39688 - DNA, 20 bp, Artificial Sequence
  chemically synthesized
gcccatcatcaggcttctgg

SEQ ID NO: 39689 - DNA, 20 bp, Artificial Sequence
  chemically synthesized
cccatcatcaggcttctggg

SEQ ID NO: 39690 - DNA, 20 bp, Artificial Sequence
  chemically synthesized
ccatcatcaggcttctggga

SEQ ID NO: 39691 - DNA, 20 bp, Artificial Sequence
  chemically synthesized
aggcttctgggagggttgct

SEQ ID NO: 39692 - DNA, 20 bp, Artificial Sequence
  chemically synthesized
ggcttctgggagggttgctt

SEQ ID NO: 39693 - DNA, 20 bp, Artificial Sequence
  chemically synthesized
tgggagggttgcttaggtac

SEQ ID NO: 39694 - DNA, 20 bp, Artificial Sequence
  chemically synthesized
ggttgcttaggtaccagtca

SEQ ID NO: 39695 - DNA, 20 bp, Artificial Sequence
  chemically synthesized
tgcttaggtaccagtcatgg

SEQ ID NO: 39696 - DNA, 20 bp, Artificial Sequence
  chemically synthesized
taggtaccagtcatggtgga

SEQ ID NO: 39697 - DNA, 20 bp, Artificial Sequence
  chemically synthesized
ccagtcatggtggatggcac

SEQ ID NO: 39698 - DNA, 20 bp, Artificial Sequence
  chemically synthesized
cagtcatggtggatggcaca

SEQ ID NO: 39699 - DNA, 20 bp, Artificial Sequence
  chemically synthesized
ggatggcacaaggctgtctc

SEQ ID NO: 39700 - DNA, 20 bp, Artificial Sequence
  chemically synthesized
gatggcacaaggctgtctct

SEQ ID NO: 39701 - DNA, 20 bp, Artificial Sequence
  chemically synthesized
caaggctgtctctgggttcc

SEQ ID NO: 39702 - DNA, 20 bp, Artificial Sequence
  chemically synthesized
gggttcccagacaacttgct

SEQ ID NO: 39703 - DNA, 20 bp, Artificial Sequence
  chemically synthesized
ggttcccagacaacttgctt

SEQ ID NO: 39704 - DNA, 20 bp, Artificial Sequence
  chemically synthesized
agacaacttgcttaggcatt

SEQ ID NO: 39705 - DNA, 20 bp, Artificial Sequence
  chemically synthesized
gacaacttgcttaggcattg

SEQ ID NO: 39706 - DNA, 20 bp, Artificial Sequence
  chemically synthesized
aacttgcttaggcattgagg

SEQ ID NO: 39707 - DNA, 20 bp, Artificial Sequence
  chemically synthesized
acttgcttaggcattgagga

SEQ ID NO: 39708 - DNA, 20 bp, Artificial Sequence
  chemically synthesized
cttaggcattgaggaaggca

SEQ ID NO: 39709 - DNA, 20 bp, Artificial Sequence
  chemically synthesized
ggcattgaggaaggcaaagc

SEQ ID NO: 39710 - DNA, 20 bp, Artificial Sequence
  chemically synthesized
gcattgaggaaggcaaagcc

SEQ ID NO: 39711 - DNA, 20 bp, Artificial Sequence
  chemically synthesized
tgaggaaggcaaagccaggc

SEQ ID NO: 39712 - DNA, 20 bp, Artificial Sequence
  chemically synthesized
gaggaaggcaaagccaggct

SEQ ID NO: 39713 - DNA, 20 bp, Artificial Sequence
  chemically synthesized
aggctgggtgttcctgacct

SEQ ID NO: 39714 - DNA, 20 bp, Artificial Sequence
  chemically synthesized
ggctgggtgttcctgacctc

SEQ ID NO: 39715 - DNA, 20 bp, Artificial Sequence
  chemically synthesized
gttcctgacctcaggccact

SEQ ID NO: 39716 - DNA, 20 bp, Artificial Sequence
  chemically synthesized
cctgacctcaggccactcag

SEQ ID NO: 39717 - DNA, 20 bp, Artificial Sequence
  chemically synthesized
aggccactcagtggtgtgtg

SEQ ID NO: 39718 - DNA, 20 bp, Artificial Sequence
  chemically synthesized
tcagtggtgtgtgtggacac

SEQ ID NO: 39719 - DNA, 20 bp, Artificial Sequence
  chemically synthesized
tgtgtggacaccggctatca

SEQ ID NO: 39720 - DNA, 20 bp, Artificial Sequence
  chemically synthesized
gtgtggacaccggctatcat

SEQ ID NO: 39721 - DNA, 20 bp, Artificial Sequence
  chemically synthesized
ggacaccggctatcataggc

SEQ ID NO: 39722 - DNA, 20 bp, Artificial Sequence
  chemically synthesized
acaccggctatcataggctg

SEQ ID NO: 39723 - DNA, 20 bp, Artificial Sequence
  chemically synthesized
ccggctatcataggctggag

SEQ ID NO: 39724 - DNA, 20 bp, Artificial Sequence
  chemically synthesized
ggctatcataggctggagtg

SEQ ID NO: 39725 - DNA, 20 bp, Artificial Sequence
  chemically synthesized
ggctggagtggagtgatcct

SEQ ID NO: 39726 - DNA, 20 bp, Artificial Sequence
  chemically synthesized
gctggagtggagtgatcctc

SEQ ID NO: 39727 - DNA, 20 bp, Artificial Sequence
  chemically synthesized
tggagtgatcctcaggcccc

SEQ ID NO: 39728 - DNA, 20 bp, Artificial Sequence
  chemically synthesized
agtgatcctcaggcccccag

SEQ ID NO: 39729 - DNA, 20 bp, Artificial Sequence
  chemically synthesized
aggcccccagcagaatgcct

SEQ ID NO: 39730 - DNA, 20 bp, Artificial Sequence
  chemically synthesized
agcagaatgcctgagtgaat

SEQ ID NO: 39731 - DNA, 20 bp, Artificial Sequence
  chemically synthesized
agaatgcctgagtgaattag

SEQ ID NO: 39732 - DNA, 20 bp, Artificial Sequence
  chemically synthesized
gcattgttgccctgctcttg

SEQ ID NO: 39733 - DNA, 20 bp, Artificial Sequence
  chemically synthesized
cattgttgccctgctcttga

SEQ ID NO: 39734 - DNA, 20 bp, Artificial Sequence
  chemically synthesized
attgttgccctgctcttgaa

SEQ ID NO: 39735 - DNA, 20 bp, Artificial Sequence
  chemically synthesized
ttgttgccctgctcttgaag

SEQ ID NO: 39736 - DNA, 20 bp, Artificial Sequence
  chemically synthesized
gccctgctcttgaaggggtg

SEQ ID NO: 39737 - DNA, 20 bp, Artificial Sequence
  chemically synthesized
ccctgctcttgaaggggtgc

SEQ ID NO: 39738 - DNA, 20 bp, Artificial Sequence
  chemically synthesized
cctgctcttgaaggggtgcg

SEQ ID NO: 39739 - DNA, 20 bp, Artificial Sequence
  chemically synthesized
ggtgcggggtgtgttgcttt

SEQ ID NO: 39740 - DNA, 20 bp, Artificial Sequence
  chemically synthesized
gcggggtgtgttgctttcag

SEQ ID NO: 39741 - DNA, 20 bp, Artificial Sequence
  chemically synthesized
gggtgtgttgctttcagtgg

SEQ ID NO: 39742 - DNA, 20 bp, Artificial Sequence
  chemically synthesized
tgtgttgctttcagtggcag

SEQ ID NO: 39743 - DNA, 20 bp, Artificial Sequence
  chemically synthesized
tcagtggcagcagctataaa

SEQ ID NO: 39744 - DNA, 20 bp, Artificial Sequence
  chemically synthesized
cagtggcagcagctataaat

SEQ ID NO: 39745 - DNA, 20 bp, Artificial Sequence
  chemically synthesized
agcagctataaatgggttgc

SEQ ID NO: 39746 - DNA, 20 bp, Artificial Sequence
  chemically synthesized
agctataaatgggttgctgg

SEQ ID NO: 39747 - DNA, 20 bp, Artificial Sequence
  chemically synthesized
gctataaatgggttgctggt

SEQ ID NO: 39748 - DNA, 20 bp, Artificial Sequence
  chemically synthesized
ttgctggtgggcatgtgttt

SEQ ID NO: 39749 - DNA, 20 bp, Artificial Sequence
  chemically synthesized
gtgggcatgtgtttcagccc

SEQ ID NO: 39750 - DNA, 20 bp, Artificial Sequence
  chemically synthesized
gcatgtgtttcagccccaga

SEQ ID NO: 39751 - DNA, 20 bp, Artificial Sequence
  chemically synthesized
tgtgtttcagccccagatgg

SEQ ID NO: 39752 - DNA, 20 bp, Artificial Sequence
  chemically synthesized
cagccccagatggtggctgc

SEQ ID NO: 39753 - DNA, 20 bp, Artificial Sequence
  chemically synthesized
ccccagatggtggctgcaag

SEQ ID NO: 39754 - DNA, 20 bp, Artificial Sequence
  chemically synthesized
cccagatggtggctgcaagt

SEQ ID NO: 39755 - DNA, 20 bp, Artificial Sequence
  chemically synthesized
ccagatggtggctgcaagtg

SEQ ID NO: 39756 - DNA, 20 bp, Artificial Sequence
  chemically synthesized
gatggtggctgcaagtgggg

SEQ ID NO: 39757 - DNA, 20 bp, Artificial Sequence
  chemically synthesized
caagtggggtagcattttct

SEQ ID NO: 39758 - DNA, 20 bp, Artificial Sequence
  chemically synthesized
aagtggggtagcattttctt

SEQ ID NO: 39759 - DNA, 20 bp, Artificial Sequence
  chemically synthesized
agtggggtagcattttctta

SEQ ID NO: 39760 - DNA, 20 bp, Artificial Sequence
  chemically synthesized
tggggtagcattttcttagg

SEQ ID NO: 39761 - DNA, 20 bp, Artificial Sequence
  chemically synthesized
ttagggagcttataaatgtg

SEQ ID NO: 39762 - DNA, 20 bp, Artificial Sequence
  chemically synthesized
gggagcttataaatgtgtag

SEQ ID NO: 39763 - DNA, 20 bp, Artificial Sequence
  chemically synthesized
atgtgtagcagccctgctac

SEQ ID NO: 39764 - DNA, 20 bp, Artificial Sequence
  chemically synthesized
tgtgtagcagccctgctact

SEQ ID NO: 39765 - DNA, 20 bp, Artificial Sequence
  chemically synthesized
gtgtagcagccctgctactg

SEQ ID NO: 39766 - DNA, 20 bp, Artificial Sequence
  chemically synthesized
tgtagcagccctgctactgg

SEQ ID NO: 39767 - DNA, 20 bp, Artificial Sequence
  chemically synthesized
agcagccctgctactggggg

SEQ ID NO: 39768 - DNA, 20 bp, Artificial Sequence
  chemically synthesized
gcagccctgctactgggggt

SEQ ID NO: 39769 - DNA, 20 bp, Artificial Sequence
  chemically synthesized
cagccctgctactgggggtg

SEQ ID NO: 39770 - DNA, 20 bp, Artificial Sequence
  chemically synthesized
agccctgctactgggggtgg

SEQ ID NO: 39771 - DNA, 20 bp, Artificial Sequence
  chemically synthesized
ccctgctactgggggtgggg

SEQ ID NO: 39772 - DNA, 20 bp, Artificial Sequence
  chemically synthesized
ctaatgacacactttatccc

SEQ ID NO: 39773 - DNA, 20 bp, Artificial Sequence
  chemically synthesized
acacactttatccctggtga

SEQ ID NO: 39774 - DNA, 20 bp, Artificial Sequence
  chemically synthesized
cactttatccctggtgacag

SEQ ID NO: 39775 - DNA, 20 bp, Artificial Sequence
  chemically synthesized
ttatccctggtgacagcagc

SEQ ID NO: 39776 - DNA, 20 bp, Artificial Sequence
  chemically synthesized
tccctggtgacagcagccag

SEQ ID NO: 39777 - DNA, 20 bp, Artificial Sequence
  chemically synthesized
ctggtgacagcagccagcag

SEQ ID NO: 39778 - DNA, 20 bp, Artificial Sequence
  chemically synthesized
cagcagccagcagtagcact

SEQ ID NO: 39779 - DNA, 20 bp, Artificial Sequence
  chemically synthesized
ccagcagtagcactcagctg

SEQ ID NO: 39780 - DNA, 20 bp, Artificial Sequence
  chemically synthesized
cagcagtagcactcagctgt

SEQ ID NO: 39781 - DNA, 20 bp, Artificial Sequence
  chemically synthesized
cagtagcactcagctgtggg

SEQ ID NO: 39782 - DNA, 20 bp, Artificial Sequence
  chemically synthesized
agtagcactcagctgtgggt

SEQ ID NO: 39783 - DNA, 20 bp, Artificial Sequence
  chemically synthesized
gtagcactcagctgtgggtg

SEQ ID NO: 39784 - DNA, 20 bp, Artificial Sequence
  chemically synthesized
tagcactcagctgtgggtgg

SEQ ID NO: 39785 - DNA, 20 bp, Artificial Sequence
  chemically synthesized
cagctgtgggtgggggatgt

SEQ ID NO: 39786 - DNA, 20 bp, Artificial Sequence
  chemically synthesized
ctgtgggtgggggatgtcag

SEQ ID NO: 39787 - DNA, 20 bp, Artificial Sequence
  chemically synthesized
gtgggtgggggatgtcagca

SEQ ID NO: 39788 - DNA, 20 bp, Artificial Sequence
  chemically synthesized
gggggatgtcagcagagctt

SEQ ID NO: 39789 - DNA, 20 bp, Artificial Sequence
  chemically synthesized
ggggatgtcagcagagcttc

SEQ ID NO: 39790 - DNA, 20 bp, Artificial Sequence
  chemically synthesized
gggatgtcagcagagcttca

SEQ ID NO: 39791 - DNA, 20 bp, Artificial Sequence
  chemically synthesized
tcagcagagcttcagggatg

SEQ ID NO: 39792 - DNA, 20 bp, Artificial Sequence
  chemically synthesized
agcagagcttcagggatgta

SEQ ID NO: 39793 - DNA, 20 bp, Artificial Sequence
  chemically synthesized
gcttcagggatgtagagatg

SEQ ID NO: 39794 - DNA, 20 bp, Artificial Sequence
  chemically synthesized
tgtagagatgcagatgatgt

SEQ ID NO: 39795 - DNA, 20 bp, Artificial Sequence
  chemically synthesized
gtagagatgcagatgatgtt

SEQ ID NO: 39796 - DNA, 20 bp, Artificial Sequence
  chemically synthesized
tagagatgcagatgatgttg

SEQ ID NO: 39797 - DNA, 20 bp, Artificial Sequence
  chemically synthesized
tgcagatgatgttggggtct

SEQ ID NO: 39798 - DNA, 20 bp, Artificial Sequence
  chemically synthesized
gcagatgatgttggggtctg

SEQ ID NO: 39799 - DNA, 20 bp, Artificial Sequence
  chemically synthesized
gtctgaggaacgatgtcatc

SEQ ID NO: 39800 - DNA, 20 bp, Artificial Sequence
  chemically synthesized
tgaggaacgatgtcatctgg

SEQ ID NO: 39801 - DNA, 20 bp, Artificial Sequence
  chemically synthesized
gaggaacgatgtcatctggt

SEQ ID NO: 39802 - DNA, 20 bp, Artificial Sequence
  chemically synthesized
cgatgtcatctggtgggtgt

SEQ ID NO: 39803 - DNA, 20 bp, Artificial Sequence
  chemically synthesized
gatgtcatctggtgggtgtt

SEQ ID NO: 39804 - DNA, 20 bp, Artificial Sequence
  chemically synthesized
tgggtgttgggctctcaaaa

SEQ ID NO: 39805 - DNA, 20 bp, Artificial Sequence
  chemically synthesized
caaaatggcaccttgctgct

SEQ ID NO: 39806 - DNA, 20 bp, Artificial Sequence
  chemically synthesized
ggcaccttgctgctcagtaa

SEQ ID NO: 39807 - DNA, 20 bp, Artificial Sequence
  chemically synthesized
gcaccttgctgctcagtaat

SEQ ID NO: 39808 - DNA, 20 bp, Artificial Sequence
  chemically synthesized
caccttgctgctcagtaatg

SEQ ID NO: 39809 - DNA, 20 bp, Artificial Sequence
  chemically synthesized
ttgctgctcagtaatgggga

SEQ ID NO: 39810 - DNA, 20 bp, Artificial Sequence
  chemically synthesized
ctgctcagtaatggggatgg

SEQ ID NO: 39811 - DNA, 20 bp, Artificial Sequence
  chemically synthesized
tgctcagtaatggggatggc

SEQ ID NO: 39812 - DNA, 20 bp, Artificial Sequence
  chemically synthesized
gctcagtaatggggatggca

SEQ ID NO: 39813 - DNA, 20 bp, Artificial Sequence
  chemically synthesized
ctcagtaatggggatggcag

SEQ ID NO: 39814 - DNA, 20 bp, Artificial Sequence
  chemically synthesized
agtaatggggatggcagggg

SEQ ID NO: 39815 - DNA, 20 bp, Artificial Sequence
  chemically synthesized
gtaatggggatggcaggggt

SEQ ID NO: 39816 - DNA, 20 bp, Artificial Sequence
  chemically synthesized
gggatggcaggggtgggacc

SEQ ID NO: 39817 - DNA, 20 bp, Artificial Sequence
  chemically synthesized
tggcaggggtgggacccagt

SEQ ID NO: 39818 - DNA, 20 bp, Artificial Sequence
  chemically synthesized
gcaggggtgggacccagtga

SEQ ID NO: 39819 - DNA, 20 bp, Artificial Sequence
  chemically synthesized
cccagtgagagctccttctc

SEQ ID NO: 39820 - DNA, 20 bp, Artificial Sequence
  chemically synthesized
cagtgagagctccttctctg

SEQ ID NO: 39821 - DNA, 20 bp, Artificial Sequence
  chemically synthesized
caatgcctttgtgcgattgc

SEQ ID NO: 39822 - DNA, 20 bp, Artificial Sequence
  chemically synthesized
aatgcctttgtgcgattgct

SEQ ID NO: 39823 - DNA, 20 bp, Artificial Sequence
  chemically synthesized
gcctttgtgcgattgctggg

SEQ ID NO: 39824 - DNA, 20 bp, Artificial Sequence
  chemically synthesized
tgctgggcagttccttatga

SEQ ID NO: 39825 - DNA, 20 bp, Artificial Sequence
  chemically synthesized
cagttccttatgatagtctc

SEQ ID NO: 39826 - DNA, 20 bp, Artificial Sequence
  chemically synthesized
agttccttatgatagtctca

SEQ ID NO: 39827 - DNA, 20 bp, Artificial Sequence
  chemically synthesized
tgatagtctcaaggcctgca

SEQ ID NO: 39828 - DNA, 20 bp, Artificial Sequence
  chemically synthesized
gtctcaaggcctgcatggtc

SEQ ID NO: 39829 - DNA, 20 bp, Artificial Sequence
  chemically synthesized
tctcaaggcctgcatggtca

SEQ ID NO: 39830 - DNA, 20 bp, Artificial Sequence
  chemically synthesized
ctcaaggcctgcatggtcaa

SEQ ID NO: 39831 - DNA, 20 bp, Artificial Sequence
  chemically synthesized
atggtcaagggactctcctg

SEQ ID NO: 39832 - DNA, 20 bp, Artificial Sequence
  chemically synthesized
tcaagggactctcctgtggc

SEQ ID NO: 39833 - DNA, 20 bp, Artificial Sequence
  chemically synthesized
caagggactctcctgtggct

SEQ ID NO: 39834 - DNA, 20 bp, Artificial Sequence
  chemically synthesized
tctcctgtggctaggattcc

SEQ ID NO: 39835 - DNA, 20 bp, Artificial Sequence
  chemically synthesized
tcctgtggctaggattcctg

SEQ ID NO: 39836 - DNA, 20 bp, Artificial Sequence
  chemically synthesized
gattcctggagtccataatg

SEQ ID NO: 39837 - DNA, 20 bp, Artificial Sequence
  chemically synthesized
tggagtccataatgcagatg

SEQ ID NO: 39838 - DNA, 20 bp, Artificial Sequence
  chemically synthesized
ataatgcagatgtggaccac

SEQ ID NO: 39839 - DNA, 20 bp, Artificial Sequence
  chemically synthesized
taatgcagatgtggaccact

SEQ ID NO: 39840 - DNA, 20 bp, Artificial Sequence
  chemically synthesized
atgcagatgtggaccactgg

SEQ ID NO: 39841 - DNA, 20 bp, Artificial Sequence
  chemically synthesized
agatgtggaccactgggagt

SEQ ID NO: 39842 - DNA, 20 bp, Artificial Sequence
  chemically synthesized
tcacttaactttcgatgcac

SEQ ID NO: 39843 - DNA, 20 bp, Artificial Sequence
  chemically synthesized
cacttaactttcgatgcact

SEQ ID NO: 39844 - DNA, 20 bp, Artificial Sequence
  chemically synthesized
acttaactttcgatgcactg

SEQ ID NO: 39845 - DNA, 20 bp, Artificial Sequence
  chemically synthesized
ttaactttcgatgcactggg

SEQ ID NO: 39846 - DNA, 20 bp, Artificial Sequence
  chemically synthesized
gatgcactggggagcctctc

SEQ ID NO: 39847 - DNA, 20 bp, Artificial Sequence
  chemically synthesized
ggggagcctctctggcctca

SEQ ID NO: 39848 - DNA, 20 bp, Artificial Sequence
  chemically synthesized
ggagcctctctggcctcaca

SEQ ID NO: 39849 - DNA, 20 bp, Artificial Sequence
  chemically synthesized
gagcctctctggcctcacag

SEQ ID NO: 39850 - DNA, 20 bp, Artificial Sequence
  chemically synthesized
gcctcacagaggatccctac

SEQ ID NO: 39851 - DNA, 20 bp, Artificial Sequence
  chemically synthesized
cctcacagaggatccctact

SEQ ID NO: 39852 - DNA, 20 bp, Artificial Sequence
  chemically synthesized
cacagaggatccctactggg

SEQ ID NO: 39853 - DNA, 20 bp, Artificial Sequence
  chemically synthesized
acagaggatccctactgggt

SEQ ID NO: 39854 - DNA, 20 bp, Artificial Sequence
  chemically synthesized
ttccctccccttcattgcct

SEQ ID NO: 39855 - DNA, 20 bp, Artificial Sequence
  chemically synthesized
gtcacttctctgttgaattc

SEQ ID NO: 39856 - DNA, 20 bp, Artificial Sequence
  chemically synthesized
ttccagaattctctcttatg

SEQ ID NO: 39857 - DNA, 20 bp, Artificial Sequence
  chemically synthesized
tccagaattctctcttatgt

SEQ ID NO: 39858 - DNA, 20 bp, Artificial Sequence
  chemically synthesized
ggattttctacttactattt

SEQ ID NO: 39859 - DNA, 20 bp, Artificial Sequence
  chemically synthesized
cttactattttggttctttg

SEQ ID NO: 39860 - DNA, 20 bp, Artificial Sequence
  chemically synthesized
tactattttggttctttgtg

SEQ ID NO: 39861 - DNA, 20 bp, Artificial Sequence
  chemically synthesized
actattttggttctttgtgg

SEQ ID NO: 39862 - DNA, 20 bp, Artificial Sequence
  chemically synthesized
tattttggttctttgtggag

SEQ ID NO: 39863 - DNA, 20 bp, Artificial Sequence
  chemically synthesized
attttggttctttgtggagg

SEQ ID NO: 39864 - DNA, 20 bp, Artificial Sequence
  chemically synthesized
tggttctttgtggaggaggt

SEQ ID NO: 39865 - DNA, 20 bp, Artificial Sequence
  chemically synthesized
tttgtggaggaggtgagtgt

SEQ ID NO: 39866 - DNA, 20 bp, Artificial Sequence
  chemically synthesized
aggtgagtgtcagctgccct

SEQ ID NO: 39867 - DNA, 20 bp, Artificial Sequence
  chemically synthesized
gagtgtcagctgcccttagt

SEQ ID NO: 39868 - DNA, 20 bp, Artificial Sequence
  chemically synthesized
gcccttagtcagtaatcttc

SEQ ID NO: 39869 - DNA, 20 bp, Artificial Sequence
  chemically synthesized
cccttcccttgaaatttttt

SEQ ID NO: 39870 - DNA, 20 bp, Artificial Sequence
  chemically synthesized
ctttatgtttttatttctaa

SEQ ID NO: 39871 - DNA, 20 bp, Artificial Sequence
  chemically synthesized
ttttatttctaatagactga

SEQ ID NO: 39872 - DNA, 20 bp, Artificial Sequence
  chemically synthesized
ttatttctaatagactgaaa

SEQ ID NO: 39873 - DNA, 20 bp, Artificial Sequence
  chemically synthesized
aatcatattttaaacactct

SEQ ID NO: 39874 - DNA, 20 bp, Artificial Sequence
  chemically synthesized
atcatattttaaacactcta

SEQ ID NO: 39875 - DNA, 20 bp, Artificial Sequence
  chemically synthesized
ttaaacactctaaggctata

SEQ ID NO: 39876 - DNA, 20 bp, Artificial Sequence
  chemically synthesized
taaacactctaaggctatat

SEQ ID NO: 39877 - DNA, 20 bp, Artificial Sequence
  chemically synthesized
aaacactctaaggctatatg

SEQ ID NO: 39878 - DNA, 20 bp, Artificial Sequence
  chemically synthesized
aacactctaaggctatatgg

SEQ ID NO: 39879 - DNA, 20 bp, Artificial Sequence
  chemically synthesized
gctatatgggggactatctg

SEQ ID NO: 39880 - DNA, 20 bp, Artificial Sequence
  chemically synthesized
ctatatgggggactatctga

SEQ ID NO: 39881 - DNA, 20 bp, Artificial Sequence
  chemically synthesized
gggggactatctgaaggcct

SEQ ID NO: 39882 - DNA, 20 bp, Artificial Sequence
  chemically synthesized
actatctgaaggcctcagat

SEQ ID NO: 39883 - DNA, 20 bp, Artificial Sequence
  chemically synthesized
tgaaggcctcagatgagtaa

SEQ ID NO: 39884 - DNA, 20 bp, Artificial Sequence
  chemically synthesized
aggcctcagatgagtaaaag

SEQ ID NO: 39885 - DNA, 20 bp, Artificial Sequence
  chemically synthesized
cctcagatgagtaaaagaag

SEQ ID NO: 39886 - DNA, 20 bp, Artificial Sequence
  chemically synthesized
gagtaaaagaagtagcgaat

SEQ ID NO: 39887 - DNA, 20 bp, Artificial Sequence
  chemically synthesized
atcatttgtttcttcaaata

SEQ ID NO: 39888 - DNA, 20 bp, Artificial Sequence
  chemically synthesized
tatttcccccttatgttctt

SEQ ID NO: 39889 - DNA, 20 bp, Artificial Sequence
  chemically synthesized
aaaaatgtttgcatctacca

SEQ ID NO: 39890 - DNA, 20 bp, Artificial Sequence
  chemically synthesized
aaatacgtaatctaacaaac

SEQ ID NO: 39891 - DNA, 20 bp, Artificial Sequence
  chemically synthesized
aatacgtaatctaacaaaca

SEQ ID NO: 39892 - DNA, 20 bp, Artificial Sequence
  chemically synthesized
ctaacaaacaaggatgtttt

SEQ ID NO: 39893 - DNA, 20 bp, Artificial Sequence
  chemically synthesized
aaggatgttttaagatctct

SEQ ID NO: 39894 - DNA, 20 bp, Artificial Sequence
  chemically synthesized
atgttttaagatctctgagt

SEQ ID NO: 39895 - DNA, 20 bp, Artificial Sequence
  chemically synthesized
agatctctgagtaagatgca

SEQ ID NO: 39896 - DNA, 20 bp, Artificial Sequence
  chemically synthesized
agatgcatagttgcaaataa

SEQ ID NO: 39897 - DNA, 20 bp, Artificial Sequence
  chemically synthesized
gatgcatagttgcaaataaa

SEQ ID NO: 39898 - DNA, 20 bp, Artificial Sequence
  chemically synthesized
tgcatagttgcaaataaaag

SEQ ID NO: 39899 - DNA, 20 bp, Artificial Sequence
  chemically synthesized
tgcaaataaaaggagttttc

SEQ ID NO: 39900 - DNA, 20 bp, Artificial Sequence
  chemically synthesized
gcaaataaaaggagttttca

SEQ ID NO: 39901 - DNA, 20 bp, Artificial Sequence
  chemically synthesized
atctaataaatgtgtaccat

SEQ ID NO: 39902 - DNA, 20 bp, Artificial Sequence
  chemically synthesized
tgtgtaccatcagaaactta

SEQ ID NO: 39903 - DNA, 20 bp, Artificial Sequence
  chemically synthesized
aaacttatggtatattctcc

SEQ ID NO: 39904 - DNA, 20 bp, Artificial Sequence
  chemically synthesized
tatggtatattctcctggaa

SEQ ID NO: 39905 - DNA, 20 bp, Artificial Sequence
  chemically synthesized
atattctcctggaaaagatg

SEQ ID NO: 39906 - DNA, 20 bp, Artificial Sequence
  chemically synthesized
tcctggaaaagatgaagatg

SEQ ID NO: 39907 - DNA, 20 bp, Artificial Sequence
  chemically synthesized
aagatgaagatgaagaaaat

SEQ ID NO: 39908 - DNA, 20 bp, Artificial Sequence
  chemically synthesized
agatgaagaaaataagtcta

SEQ ID NO: 39909 - DNA, 20 bp, Artificial Sequence
  chemically synthesized
tgaagaaaataagtctacag

SEQ ID NO: 39910 - DNA, 20 bp, Artificial Sequence
  chemically synthesized
aagaaaataagtctacagaa

SEQ ID NO: 39911 - DNA, 20 bp, Artificial Sequence
  chemically synthesized
agaaaataagtctacagaag

SEQ ID NO: 39912 - DNA, 20 bp, Artificial Sequence
  chemically synthesized
aaaataagtctacagaagag

SEQ ID NO: 39913 - DNA, 20 bp, Artificial Sequence
  chemically synthesized
acagaagaggagaaattctt

SEQ ID NO: 39914 - DNA, 20 bp, Artificial Sequence
  chemically synthesized
ttggaaattttgcatttttg

SEQ ID NO: 39915 - DNA, 20 bp, Artificial Sequence
  chemically synthesized
aaattttgcatttttgtgga

SEQ ID NO: 39916 - DNA, 20 bp, Artificial Sequence
  chemically synthesized
ttttgcatttttgtggatag

SEQ ID NO: 39917 - DNA, 20 bp, Artificial Sequence
  chemically synthesized
ttttgtggatagtggttttg

SEQ ID NO: 39918 - DNA, 20 bp, Artificial Sequence
  chemically synthesized
gtggatagtggttttgaaga

SEQ ID NO: 39919 - DNA, 20 bp, Artificial Sequence
  chemically synthesized
tagtggttttgaagaaagct

SEQ ID NO: 39920 - DNA, 20 bp, Artificial Sequence
  chemically synthesized
atatatttaaatatgttgct

SEQ ID NO: 39921 - DNA, 20 bp, Artificial Sequence
  chemically synthesized
gatgtgactcccacacttta

SEQ ID NO: 39922 - DNA, 20 bp, Artificial Sequence
  chemically synthesized
gactcccacactttaaagaa

SEQ ID NO: 39923 - DNA, 20 bp, Artificial Sequence
  chemically synthesized
taaagaaaagttcttcattt

SEQ ID NO: 39924 - DNA, 20 bp, Artificial Sequence
  chemically synthesized
ttttagttgcccttgcaaat

SEQ ID NO: 39925 - DNA, 20 bp, Artificial Sequence
  chemically synthesized
gttgcccttgcaaattggct

SEQ ID NO: 39926 - DNA, 20 bp, Artificial Sequence
  chemically synthesized
tcctcaacaaataattttga

SEQ ID NO: 39927 - DNA, 20 bp, Artificial Sequence
  chemically synthesized
tgatggtttctaaaattgtc

SEQ ID NO: 39928 - DNA, 20 bp, Artificial Sequence
  chemically synthesized
tctaaaattgtccagaattt

SEQ ID NO: 39929 - DNA, 20 bp, Artificial Sequence
  chemically synthesized
ctaaaattgtccagaatttg

SEQ ID NO: 39930 - DNA, 20 bp, Artificial Sequence
  chemically synthesized
ccagaatttgaggaaatact

SEQ ID NO: 39931 - DNA, 20 bp, Artificial Sequence
  chemically synthesized
tttgaggaaatacttagatg

SEQ ID NO: 39932 - DNA, 20 bp, Artificial Sequence
  chemically synthesized
gaggaaatacttagatgtag

SEQ ID NO: 39933 - DNA, 20 bp, Artificial Sequence
  chemically synthesized
gacatcaatttatgttaact

SEQ ID NO: 39934 - DNA, 20 bp, Artificial Sequence
  chemically synthesized
tgttaacttagatttattgt

SEQ ID NO: 39935 - DNA, 20 bp, Artificial Sequence
  chemically synthesized
aacttagatttattgttgga

SEQ ID NO: 39936 - DNA, 20 bp, Artificial Sequence
  chemically synthesized
agatttattgttggatggtt

SEQ ID NO: 39937 - DNA, 20 bp, Artificial Sequence
  chemically synthesized
taatcatgtctgttcttgtc

SEQ ID NO: 39938 - DNA, 20 bp, Artificial Sequence
  chemically synthesized
atgtctgttcttgtccagtc

SEQ ID NO: 39939 - DNA, 20 bp, Artificial Sequence
  chemically synthesized
tctgttcttgtccagtctag

SEQ ID NO: 39940 - DNA, 20 bp, Artificial Sequence
  chemically synthesized
acatctgaactgtgatttga

SEQ ID NO: 39941 - DNA, 20 bp, Artificial Sequence
  chemically synthesized
tttgacagtgtccttattat

SEQ ID NO: 39942 - DNA, 20 bp, Artificial Sequence
  chemically synthesized
tatcagactctgctcaatga

SEQ ID NO: 39943 - DNA, 20 bp, Artificial Sequence
  chemically synthesized
gtttaaacttctttttgata

SEQ ID NO: 39944 - DNA, 20 bp, Artificial Sequence
  chemically synthesized
cagtaaaaaacttttcctta

SEQ ID NO: 39945 - DNA, 20 bp, Artificial Sequence
  chemically synthesized
tccttaaagatgaaattctt

SEQ ID NO: 39946 - DNA, 20 bp, Artificial Sequence
  chemically synthesized
ccttaaagatgaaattctta

SEQ ID NO: 39947 - DNA, 20 bp, Artificial Sequence
  chemically synthesized
atgaaattcttaaggacaat

SEQ ID NO: 39948 - DNA, 20 bp, Artificial Sequence
  chemically synthesized
ttaaggacaattagcttgtg

SEQ ID NO: 39949 - DNA, 20 bp, Artificial Sequence
  chemically synthesized
tatgaaaattgcttgcattt

SEQ ID NO: 39950 - DNA, 20 bp, Artificial Sequence
  chemically synthesized
tgaaaattgcttgcattttg

SEQ ID NO: 39951 - DNA, 20 bp, Artificial Sequence
  chemically synthesized
cttgcattttggagttacat

SEQ ID NO: 39952 - DNA, 20 bp, Artificial Sequence
  chemically synthesized
tataaattaatgaatcctat

SEQ ID NO: 39953 - DNA, 20 bp, Artificial Sequence
  chemically synthesized
atcctattggtaccatataa

SEQ ID NO: 39954 - DNA, 20 bp, Artificial Sequence
  chemically synthesized
cttttgtgtctcgcctttca

SEQ ID NO: 39955 - DNA, 20 bp, Artificial Sequence
  chemically synthesized
ttttgtgtctcgcctttcaa

SEQ ID NO: 39956 - DNA, 20 bp, Artificial Sequence
  chemically synthesized
tttgtgtctcgcctttcaaa

SEQ ID NO: 39957 - DNA, 20 bp, Artificial Sequence
  chemically synthesized
tcaaagggcaattttccaaa

SEQ ID NO: 39958 - DNA, 20 bp, Artificial Sequence
  chemically synthesized
tccaaaaagtatattttgca

SEQ ID NO: 39959 - DNA, 20 bp, Artificial Sequence
  chemically synthesized
aaagtatattttgcatggct

SEQ ID NO: 39960 - DNA, 20 bp, Artificial Sequence
  chemically synthesized
aagtatattttgcatggctc

SEQ ID NO: 39961 - DNA, 20 bp, Artificial Sequence
  chemically synthesized
ttttgcatggctcaggctaa

SEQ ID NO: 39962 - DNA, 20 bp, Artificial Sequence
  chemically synthesized
caggctaaaagtaatgtctc

SEQ ID NO: 39963 - DNA, 20 bp, Artificial Sequence
  chemically synthesized
aaaagtaatgtctccagatg

SEQ ID NO: 39964 - DNA, 20 bp, Artificial Sequence
  chemically synthesized
cattgattgtgactattgat

SEQ ID NO: 39965 - DNA, 20 bp, Artificial Sequence
  chemically synthesized
ttgataagatttactatgta

SEQ ID NO: 39966 - DNA, 20 bp, Artificial Sequence
  chemically synthesized
agatttactatgtaaagtat

SEQ ID NO: 39967 - DNA, 20 bp, Artificial Sequence
  chemically synthesized
ctatgtaaagtataagttac

SEQ ID NO: 39968 - DNA, 20 bp, Artificial Sequence
  chemically synthesized
gttactggaataatacattt

SEQ ID NO: 39969 - DNA, 20 bp, Artificial Sequence
  chemically synthesized
aataatacatttaagaaata

SEQ ID NO: 39970 - DNA, 20 bp, Artificial Sequence
  chemically synthesized
aatacatttaagaaatatag

SEQ ID NO: 39971 - DNA, 20 bp, Artificial Sequence
  chemically synthesized
atagtagctattaaaacctg

SEQ ID NO: 39972 - DNA, 20 bp, Artificial Sequence
  chemically synthesized
aaacctgtagtctgatgaaa

SEQ ID NO: 39973 - DNA, 20 bp, Artificial Sequence
  chemically synthesized
tgaaatggaatatgttttga

SEQ ID NO: 39974 - DNA, 20 bp, Artificial Sequence
  chemically synthesized
atggaatatgttttgaaaga

SEQ ID NO: 39975 - DNA, 20 bp, Artificial Sequence
  chemically synthesized
gaatatgttttgaaagacag

SEQ ID NO: 39976 - DNA, 20 bp, Artificial Sequence
  chemically synthesized
gaaagacagcagtgaaaaat

SEQ ID NO: 39977 - DNA, 20 bp, Artificial Sequence
  chemically synthesized
agacagcagtgaaaaatgag

SEQ ID NO: 39978 - DNA, 20 bp, Artificial Sequence
  chemically synthesized
aaaaatgagaagtaatatat

SEQ ID NO: 39979 - DNA, 20 bp, Artificial Sequence
  chemically synthesized
taaaattgctttttgcaatt

SEQ ID NO: 39980 - DNA, 20 bp, Artificial Sequence
  chemically synthesized
tgctttttgcaattgagttg

SEQ ID NO: 39981 - DNA, 20 bp, Artificial Sequence
  chemically synthesized
attgagttgaagattgatgc

SEQ ID NO: 39982 - DNA, 20 bp, Artificial Sequence
  chemically synthesized
ttgagttgaagattgatgcc

SEQ ID NO: 39983 - DNA, 20 bp, Artificial Sequence
  chemically synthesized
tgccaggatcttattacctc

SEQ ID NO: 39984 - DNA, 20 bp, Artificial Sequence
  chemically synthesized
gccaggatcttattacctcc

SEQ ID NO: 39985 - DNA, 20 bp, Artificial Sequence
  chemically synthesized
attacctccaggatttcaca

SEQ ID NO: 39986 - DNA, 20 bp, Artificial Sequence
  chemically synthesized
ttacctccaggatttcacaa

SEQ ID NO: 39987 - DNA, 20 bp, Artificial Sequence
  chemically synthesized
gatttcacaaaggatttctt

SEQ ID NO: 39988 - DNA, 20 bp, Artificial Sequence
  chemically synthesized
cttgagtcatccccttgctc

SEQ ID NO: 39989 - DNA, 20 bp, Artificial Sequence
  chemically synthesized
cttgctctagctcatgaaca

SEQ ID NO: 39990 - DNA, 20 bp, Artificial Sequence
  chemically synthesized
tcatgaacaaagtattgctc

SEQ ID NO: 39991 - DNA, 20 bp, Artificial Sequence
  chemically synthesized
agtattgctcaagtaatcga

SEQ ID NO: 39992 - DNA, 20 bp, Artificial Sequence
  chemically synthesized
tctcacatgtgattattatt

SEQ ID NO: 39993 - DNA, 20 bp, Artificial Sequence
  chemically synthesized
attattatttagtgctgtca

SEQ ID NO: 39994 - DNA, 20 bp, Artificial Sequence
  chemically synthesized
ttattatttagtgctgtcac

SEQ ID NO: 39995 - DNA, 20 bp, Artificial Sequence
  chemically synthesized
tcacgggaaatatcctgcct

SEQ ID NO: 39996 - DNA, 20 bp, Artificial Sequence
  chemically synthesized
aatatcctgcctaagtttac

SEQ ID NO: 39997 - DNA, 20 bp, Artificial Sequence
  chemically synthesized
tatcctgcctaagtttactg

SEQ ID NO: 39998 - DNA, 20 bp, Artificial Sequence
  chemically synthesized
atcctgcctaagtttactgg

SEQ ID NO: 39999 - DNA, 20 bp, Artificial Sequence
  chemically synthesized
cctccctatgtcctcctacc

SEQ ID NO: 40000 - DNA, 20 bp, Artificial Sequence
  chemically synthesized
tttccttgcacactctactc

SEQ ID NO: 40001 - DNA, 20 bp, Artificial Sequence
  chemically synthesized
ttgcacactctactccagct

SEQ ID NO: 40002 - DNA, 20 bp, Artificial Sequence
  chemically synthesized
tgcacactctactccagctt

SEQ ID NO: 40003 - DNA, 20 bp, Artificial Sequence
  chemically synthesized
gcacactctactccagctta

SEQ ID NO: 40004 - DNA, 20 bp, Artificial Sequence
  chemically synthesized
ctctactccagcttagggcc

SEQ ID NO: 40005 - DNA, 20 bp, Artificial Sequence
  chemically synthesized
tctactccagcttagggcct

SEQ ID NO: 40006 - DNA, 20 bp, Artificial Sequence
  chemically synthesized
acccttttaattaccccatt

SEQ ID NO: 40007 - DNA, 20 bp, Artificial Sequence
  chemically synthesized
tcaatttttgccttttcaat

SEQ ID NO: 40008 - DNA, 20 bp, Artificial Sequence
  chemically synthesized
aaaatttatttatatatatt

SEQ ID NO: 40009 - DNA, 20 bp, Artificial Sequence
  chemically synthesized
atttatttatatatatttag

SEQ ID NO: 40010 - DNA, 20 bp, Artificial Sequence
  chemically synthesized
tttatttatatatatttaga

SEQ ID NO: 40011 - DNA, 20 bp, Artificial Sequence
  chemically synthesized
tatatttagaaggtatgtac

SEQ ID NO: 40012 - DNA, 20 bp, Artificial Sequence
  chemically synthesized
tcgttatcatgctgcttata

SEQ ID NO: 40013 - DNA, 20 bp, Artificial Sequence
  chemically synthesized
ctgcttataaagacatacct

SEQ ID NO: 40014 - DNA, 20 bp, Artificial Sequence
  chemically synthesized
tataaagacatacctgagac

SEQ ID NO: 40015 - DNA, 20 bp, Artificial Sequence
  chemically synthesized
ataaagacatacctgagact

SEQ ID NO: 40016 - DNA, 20 bp, Artificial Sequence
  chemically synthesized
cctgagactgggtaatttat

SEQ ID NO: 40017 - DNA, 20 bp, Artificial Sequence
  chemically synthesized
ctgagactgggtaatttata

SEQ ID NO: 40018 - DNA, 20 bp, Artificial Sequence
  chemically synthesized
aaaaacgtttaattgtctca

SEQ ID NO: 40019 - DNA, 20 bp, Artificial Sequence
  chemically synthesized
ttaattgtctcacagttcca

SEQ ID NO: 40020 - DNA, 20 bp, Artificial Sequence
  chemically synthesized
taattgtctcacagttccac

SEQ ID NO: 40021 - DNA, 20 bp, Artificial Sequence
  chemically synthesized
aattgtctcacagttccaca

SEQ ID NO: 40022 - DNA, 20 bp, Artificial Sequence
  chemically synthesized
gtctcacagttccacagggc

SEQ ID NO: 40023 - DNA, 20 bp, Artificial Sequence
  chemically synthesized
tctcacagttccacagggct

SEQ ID NO: 40024 - DNA, 20 bp, Artificial Sequence
  chemically synthesized
ctcacagttccacagggctg

SEQ ID NO: 40025 - DNA, 20 bp, Artificial Sequence
  chemically synthesized
cacagttccacagggctggg

SEQ ID NO: 40026 - DNA, 20 bp, Artificial Sequence
  chemically synthesized
acagttccacagggctgggg

SEQ ID NO: 40027 - DNA, 20 bp, Artificial Sequence
  chemically synthesized
ccacagggctggggaggcct

SEQ ID NO: 40028 - DNA, 20 bp, Artificial Sequence
  chemically synthesized
cacagggctggggaggcctc

SEQ ID NO: 40029 - DNA, 20 bp, Artificial Sequence
  chemically synthesized
cctcgggaaacttacaatca

SEQ ID NO: 40030 - DNA, 20 bp, Artificial Sequence
  chemically synthesized
cgggaaacttacaatcatgg

SEQ ID NO: 40031 - DNA, 20 bp, Artificial Sequence
  chemically synthesized
gaaacttacaatcatggcag

SEQ ID NO: 40032 - DNA, 20 bp, Artificial Sequence
  chemically synthesized
acttacaatcatggcagaag

SEQ ID NO: 40033 - DNA, 20 bp, Artificial Sequence
  chemically synthesized
caaacatgtccttcttcaca

SEQ ID NO: 40034 - DNA, 20 bp, Artificial Sequence
  chemically synthesized
acatgtccttcttcacatgg

SEQ ID NO: 40035 - DNA, 20 bp, Artificial Sequence
  chemically synthesized
tgtccttcttcacatggcag

SEQ ID NO: 40036 - DNA, 20 bp, Artificial Sequence
  chemically synthesized
cttcttcacatggcagcagc

SEQ ID NO: 40037 - DNA, 20 bp, Artificial Sequence
  chemically synthesized
cttcacatggcagcagcaag

SEQ ID NO: 40038 - DNA, 20 bp, Artificial Sequence
  chemically synthesized
cacatggcagcagcaagtag

SEQ ID NO: 40039 - DNA, 20 bp, Artificial Sequence
  chemically synthesized
cagcagcaagtagaagtgcc

SEQ ID NO: 40040 - DNA, 20 bp, Artificial Sequence
  chemically synthesized
caagtagaagtgccaagcaa

SEQ ID NO: 40041 - DNA, 20 bp, Artificial Sequence
  chemically synthesized
aagtagaagtgccaagcaaa

SEQ ID NO: 40042 - DNA, 20 bp, Artificial Sequence
  chemically synthesized
agtagaagtgccaagcaaaa

SEQ ID NO: 40043 - DNA, 20 bp, Artificial Sequence
  chemically synthesized
gtagaagtgccaagcaaaag

SEQ ID NO: 40044 - DNA, 20 bp, Artificial Sequence
  chemically synthesized
tagaagtgccaagcaaaagg

SEQ ID NO: 40045 - DNA, 20 bp, Artificial Sequence
  chemically synthesized
gtgccaagcaaaagggggaa

SEQ ID NO: 40046 - DNA, 20 bp, Artificial Sequence
  chemically synthesized
aaagccgcttataaaaccat

SEQ ID NO: 40047 - DNA, 20 bp, Artificial Sequence
  chemically synthesized
ataaaaccatcagatcttgt

SEQ ID NO: 40048 - DNA, 20 bp, Artificial Sequence
  chemically synthesized
ttgtaagaactcactatcac

SEQ ID NO: 40049 - DNA, 20 bp, Artificial Sequence
  chemically synthesized
taagaactcactatcacgag

SEQ ID NO: 40050 - DNA, 20 bp, Artificial Sequence
  chemically synthesized
agaactcactatcacgagaa

SEQ ID NO: 40051 - DNA, 20 bp, Artificial Sequence
  chemically synthesized
cactatcacgagaagagcat

SEQ ID NO: 40052 - DNA, 20 bp, Artificial Sequence
  chemically synthesized
ctatcacgagaagagcatga

SEQ ID NO: 40053 - DNA, 20 bp, Artificial Sequence
  chemically synthesized
aaatccctcccacaacacgt

SEQ ID NO: 40054 - DNA, 20 bp, Artificial Sequence
  chemically synthesized
aatccctcccacaacacgtg

SEQ ID NO: 40055 - DNA, 20 bp, Artificial Sequence
  chemically synthesized
cccacaacacgtgaggatta

SEQ ID NO: 40056 - DNA, 20 bp, Artificial Sequence
  chemically synthesized
ccacaacacgtgaggattat

SEQ ID NO: 40057 - DNA, 20 bp, Artificial Sequence
  chemically synthesized
gattatgggaactacaattc

SEQ ID NO: 40058 - DNA, 20 bp, Artificial Sequence
  chemically synthesized
tgggaactacaattcaagat

SEQ ID NO: 40059 - DNA, 20 bp, Artificial Sequence
  chemically synthesized
ctacaattcaagatgagatt

SEQ ID NO: 40060 - DNA, 20 bp, Artificial Sequence
  chemically synthesized
tacaattcaagatgagattt

SEQ ID NO: 40061 - DNA, 20 bp, Artificial Sequence
  chemically synthesized
aattcaagatgagatttggg

SEQ ID NO: 40062 - DNA, 20 bp, Artificial Sequence
  chemically synthesized
attcaagatgagatttgggt

SEQ ID NO: 40063 - DNA, 20 bp, Artificial Sequence
  chemically synthesized
ttcaagatgagatttgggtg

SEQ ID NO: 40064 - DNA, 20 bp, Artificial Sequence
  chemically synthesized
atgagatttgggtggggaca

SEQ ID NO: 40065 - DNA, 20 bp, Artificial Sequence
  chemically synthesized
atttgggtggggacacagtc

SEQ ID NO: 40066 - DNA, 20 bp, Artificial Sequence
  chemically synthesized
gggacacagtcaagctgtat

SEQ ID NO: 40067 - DNA, 20 bp, Artificial Sequence
  chemically synthesized
ggacacagtcaagctgtatc

SEQ ID NO: 40068 - DNA, 20 bp, Artificial Sequence
  chemically synthesized
gacacagtcaagctgtatca

SEQ ID NO: 40069 - DNA, 20 bp, Artificial Sequence
  chemically synthesized
gtcaagctgtatcagggtac

SEQ ID NO: 40070 - DNA, 20 bp, Artificial Sequence
  chemically synthesized
gctgtatcagggtacaagct

SEQ ID NO: 40071 - DNA, 20 bp, Artificial Sequence
  chemically synthesized
ctgtatcagggtacaagctc

SEQ ID NO: 40072 - DNA, 20 bp, Artificial Sequence
  chemically synthesized
ccttacatatgtatgttgca

SEQ ID NO: 40073 - DNA, 20 bp, Artificial Sequence
  chemically synthesized
tacatatgtatgttgcatag

SEQ ID NO: 40074 - DNA, 20 bp, Artificial Sequence
  chemically synthesized
atgtatgttgcatagtggtg

SEQ ID NO: 40075 - DNA, 20 bp, Artificial Sequence
  chemically synthesized
gttgcatagtggtgaagtct

SEQ ID NO: 40076 - DNA, 20 bp, Artificial Sequence
  chemically synthesized
agtggtgaagtctgagcttt

SEQ ID NO: 40077 - DNA, 20 bp, Artificial Sequence
  chemically synthesized
ggtgaagtctgagcttttag

SEQ ID NO: 40078 - DNA, 20 bp, Artificial Sequence
  chemically synthesized
ttagtggaccatcacctgaa

SEQ ID NO: 40079 - DNA, 20 bp, Artificial Sequence
  chemically synthesized
tgaatgttgtatccaatccg

SEQ ID NO: 40080 - DNA, 20 bp, Artificial Sequence
  chemically synthesized
gtatccaatccgtagttttt

SEQ ID NO: 40081 - DNA, 20 bp, Artificial Sequence
  chemically synthesized
cctatcctcccacctttctc

SEQ ID NO: 40082 - DNA, 20 bp, Artificial Sequence
  chemically synthesized
tcccacctttctctagtctc

SEQ ID NO: 40083 - DNA, 20 bp, Artificial Sequence
  chemically synthesized
gtctatgcttactcatcgtt

SEQ ID NO: 40084 - DNA, 20 bp, Artificial Sequence
  chemically synthesized
ctcatcgtttagctcccact

SEQ ID NO: 40085 - DNA, 20 bp, Artificial Sequence
  chemically synthesized
ccacttggctctcactaaat

SEQ ID NO: 40086 - DNA, 20 bp, Artificial Sequence
  chemically synthesized
gtgtttgactttctgtttct

SEQ ID NO: 40087 - DNA, 20 bp, Artificial Sequence
  chemically synthesized
tgtttctgagttatttcact

SEQ ID NO: 40088 - DNA, 20 bp, Artificial Sequence
  chemically synthesized
gtttctgagttatttcactg

SEQ ID NO: 40089 - DNA, 20 bp, Artificial Sequence
  chemically synthesized
tcactgaggataatgtcctc

SEQ ID NO: 40090 - DNA, 20 bp, Artificial Sequence
  chemically synthesized
tccagttctaaccatgtttc

SEQ ID NO: 40091 - DNA, 20 bp, Artificial Sequence
  chemically synthesized
cagttctaaccatgtttcta

SEQ ID NO: 40092 - DNA, 20 bp, Artificial Sequence
  chemically synthesized
ttctaaccatgtttctagag

SEQ ID NO: 40093 - DNA, 20 bp, Artificial Sequence
  chemically synthesized
catgatttcattctttttta

SEQ ID NO: 40094 - DNA, 20 bp, Artificial Sequence
  chemically synthesized
tttcattcttttttatggct

SEQ ID NO: 40095 - DNA, 20 bp, Artificial Sequence
  chemically synthesized
ttctttatccaatcgtccat

SEQ ID NO: 40096 - DNA, 20 bp, Artificial Sequence
  chemically synthesized
tttatccaatcgtccattgg

SEQ ID NO: 40097 - DNA, 20 bp, Artificial Sequence
  chemically synthesized
atcgtccattggtagacatt

SEQ ID NO: 40098 - DNA, 20 bp, Artificial Sequence
  chemically synthesized
tcgtccattggtagacattt

SEQ ID NO: 40099 - DNA, 20 bp, Artificial Sequence
  chemically synthesized
tgattccatatctttgctat

SEQ ID NO: 40100 - DNA, 20 bp, Artificial Sequence
  chemically synthesized
gattccatatctttgctatt

SEQ ID NO: 40101 - DNA, 20 bp, Artificial Sequence
  chemically synthesized
catatctttgctattgggaa

SEQ ID NO: 40102 - DNA, 20 bp, Artificial Sequence
  chemically synthesized
ctactttgaacatactaatg

SEQ ID NO: 40103 - DNA, 20 bp, Artificial Sequence
  chemically synthesized
taatatgatctctttcactt

SEQ ID NO: 40104 - DNA, 20 bp, Artificial Sequence
  chemically synthesized
aatatgatctctttcacttt

SEQ ID NO: 40105 - DNA, 20 bp, Artificial Sequence
  chemically synthesized
tttcactttgggtccatacc

SEQ ID NO: 40106 - DNA, 20 bp, Artificial Sequence
  chemically synthesized
cactttgggtccatacccag

SEQ ID NO: 40107 - DNA, 20 bp, Artificial Sequence
  chemically synthesized
tttgggtccatacccagtag

SEQ ID NO: 40108 - DNA, 20 bp, Artificial Sequence
  chemically synthesized
ttgggtccatacccagtagt

SEQ ID NO: 40109 - DNA, 20 bp, Artificial Sequence
  chemically synthesized
catacccagtagtgggattg

SEQ ID NO: 40110 - DNA, 20 bp, Artificial Sequence
  chemically synthesized
atacccagtagtgggattgc

SEQ ID NO: 40111 - DNA, 20 bp, Artificial Sequence
  chemically synthesized
agtgggattgcaggattgaa

SEQ ID NO: 40112 - DNA, 20 bp, Artificial Sequence
  chemically synthesized
gggattgcaggattgaatgg

SEQ ID NO: 40113 - DNA, 20 bp, Artificial Sequence
  chemically synthesized
ttgaatggtagttctgtttc

SEQ ID NO: 40114 - DNA, 20 bp, Artificial Sequence
  chemically synthesized
agttctgtttctagttcttt

SEQ ID NO: 40115 - DNA, 20 bp, Artificial Sequence
  chemically synthesized
tcttcatgctgtcttccata

SEQ ID NO: 40116 - DNA, 20 bp, Artificial Sequence
  chemically synthesized
ctaatttacattcttaccaa

SEQ ID NO: 40117 - DNA, 20 bp, Artificial Sequence
  chemically synthesized
cattcttaccaacagtgtat

SEQ ID NO: 40118 - DNA, 20 bp, Artificial Sequence
  chemically synthesized
gtttttgaactttataatga

SEQ ID NO: 40119 - DNA, 20 bp, Artificial Sequence
  chemically synthesized
ataatgatagccattctgac

SEQ ID NO: 40120 - DNA, 20 bp, Artificial Sequence
  chemically synthesized
atagccattctgactggcat

SEQ ID NO: 40121 - DNA, 20 bp, Artificial Sequence
  chemically synthesized
tagccattctgactggcata

SEQ ID NO: 40122 - DNA, 20 bp, Artificial Sequence
  chemically synthesized
gccattctgactggcataag

SEQ ID NO: 40123 - DNA, 20 bp, Artificial Sequence
  chemically synthesized
ccattctgactggcataagg

SEQ ID NO: 40124 - DNA, 20 bp, Artificial Sequence
  chemically synthesized
tggcataaggaggtatcata

SEQ ID NO: 40125 - DNA, 20 bp, Artificial Sequence
  chemically synthesized
cataaggaggtatcatatgg

SEQ ID NO: 40126 - DNA, 20 bp, Artificial Sequence
  chemically synthesized
aatttgcattctctgattat

SEQ ID NO: 40127 - DNA, 20 bp, Artificial Sequence
  chemically synthesized
aacttttttttgacgtttat

SEQ ID NO: 40128 - DNA, 20 bp, Artificial Sequence
  chemically synthesized
gccacttgtatgtcttcttt

SEQ ID NO: 40129 - DNA, 20 bp, Artificial Sequence
  chemically synthesized
tcttttggaaaatgtctgct

SEQ ID NO: 40130 - DNA, 20 bp, Artificial Sequence
  chemically synthesized
cttttggaaaatgtctgctc

SEQ ID NO: 40131 - DNA, 20 bp, Artificial Sequence
  chemically synthesized
aaaatgtctgctcaggacct

SEQ ID NO: 40132 - DNA, 20 bp, Artificial Sequence
  chemically synthesized
cctgagctcactgtatttgt

SEQ ID NO: 40133 - DNA, 20 bp, Artificial Sequence
  chemically synthesized
ctgagctcactgtatttgtc

SEQ ID NO: 40134 - DNA, 20 bp, Artificial Sequence
  chemically synthesized
tgagctcactgtatttgtca

SEQ ID NO: 40135 - DNA, 20 bp, Artificial Sequence
  chemically synthesized
ctgtatttgtcagggttccc

SEQ ID NO: 40136 - DNA, 20 bp, Artificial Sequence
  chemically synthesized
gtatttgtcagggttcccta

SEQ ID NO: 40137 - DNA, 20 bp, Artificial Sequence
  chemically synthesized
atttgtcagggttccctaga

SEQ ID NO: 40138 - DNA, 20 bp, Artificial Sequence
  chemically synthesized
gtcagggttccctagagaga

SEQ ID NO: 40139 - DNA, 20 bp, Artificial Sequence
  chemically synthesized
ccctagagagacagaactaa

SEQ ID NO: 40140 - DNA, 20 bp, Artificial Sequence
  chemically synthesized
cctagagagacagaactaat

SEQ ID NO: 40141 - DNA, 20 bp, Artificial Sequence
  chemically synthesized
tagagagacagaactaatag

SEQ ID NO: 40142 - DNA, 20 bp, Artificial Sequence
  chemically synthesized
gagacagaactaataggaga

SEQ ID NO: 40143 - DNA, 20 bp, Artificial Sequence
  chemically synthesized
cagaactaataggagataga

SEQ ID NO: 40144 - DNA, 20 bp, Artificial Sequence
  chemically synthesized
actaataggagatagataga

SEQ ID NO: 40145 - DNA, 20 bp, Artificial Sequence
  chemically synthesized
ataggagatagatagataga

SEQ ID NO: 40146 - DNA, 20 bp, Artificial Sequence
  chemically synthesized
gagatagatagatagataga

SEQ ID NO: 40147 - DNA, 20 bp, Artificial Sequence
  chemically synthesized
tagatagatagatagataga

SEQ ID NO: 40148 - DNA, 20 bp, Artificial Sequence
  chemically synthesized
tagatagatagatagataga

SEQ ID NO: 40149 - DNA, 20 bp, Artificial Sequence
  chemically synthesized
tagatagatagatagataga

SEQ ID NO: 40150 - DNA, 20 bp, Artificial Sequence
  chemically synthesized
tagatagatagatagataga

SEQ ID NO: 40151 - DNA, 20 bp, Artificial Sequence
  chemically synthesized
tagatagatagatagataga

SEQ ID NO: 40152 - DNA, 20 bp, Artificial Sequence
  chemically synthesized
gatagatagatagatagata

SEQ ID NO: 40153 - DNA, 20 bp, Artificial Sequence
  chemically synthesized
tagatagatagatatagatt

SEQ ID NO: 40154 - DNA, 20 bp, Artificial Sequence
  chemically synthesized
agatatagatttagatataa

SEQ ID NO: 40155 - DNA, 20 bp, Artificial Sequence
  chemically synthesized
gatatagatttagatataaa

SEQ ID NO: 40156 - DNA, 20 bp, Artificial Sequence
  chemically synthesized
atatagatttagatataaaa

SEQ ID NO: 40157 - DNA, 20 bp, Artificial Sequence
  chemically synthesized
atagatttagatataaaagg

SEQ ID NO: 40158 - DNA, 20 bp, Artificial Sequence
  chemically synthesized
gatataaaagggagtttatt

SEQ ID NO: 40159 - DNA, 20 bp, Artificial Sequence
  chemically synthesized
ataaaagggagtttattaag

SEQ ID NO: 40160 - DNA, 20 bp, Artificial Sequence
  chemically synthesized
gtgttaacttacacaatcac

SEQ ID NO: 40161 - DNA, 20 bp, Artificial Sequence
  chemically synthesized
tgttaacttacacaatcaca

SEQ ID NO: 40162 - DNA, 20 bp, Artificial Sequence
  chemically synthesized
acaatcacaaggtcccacaa

SEQ ID NO: 40163 - DNA, 20 bp, Artificial Sequence
  chemically synthesized
caatcacaaggtcccacaat

SEQ ID NO: 40164 - DNA, 20 bp, Artificial Sequence
  chemically synthesized
tcccacaataggccatctgc

SEQ ID NO: 40165 - DNA, 20 bp, Artificial Sequence
  chemically synthesized
cacaataggccatctgcaag

SEQ ID NO: 40166 - DNA, 20 bp, Artificial Sequence
  chemically synthesized
caataggccatctgcaagca

SEQ ID NO: 40167 - DNA, 20 bp, Artificial Sequence
  chemically synthesized
aataggccatctgcaagcag

SEQ ID NO: 40168 - DNA, 20 bp, Artificial Sequence
  chemically synthesized
taggccatctgcaagcagag

SEQ ID NO: 40169 - DNA, 20 bp, Artificial Sequence
  chemically synthesized
ccatctgcaagcagaggagc

SEQ ID NO: 40170 - DNA, 20 bp, Artificial Sequence
  chemically synthesized
catctgcaagcagaggagca

SEQ ID NO: 40171 - DNA, 20 bp, Artificial Sequence
  chemically synthesized
ctgcaagcagaggagcaagg

SEQ ID NO: 40172 - DNA, 20 bp, Artificial Sequence
  chemically synthesized
aagcagaggagcaaggaagc

SEQ ID NO: 40173 - DNA, 20 bp, Artificial Sequence
  chemically synthesized
aggagcaaggaagccagtcc

SEQ ID NO: 40174 - DNA, 20 bp, Artificial Sequence
  chemically synthesized
ggaagccagtccaagtccca

SEQ ID NO: 40175 - DNA, 20 bp, Artificial Sequence
  chemically synthesized
cagtccaagtcccaaagctg

SEQ ID NO: 40176 - DNA, 20 bp, Artificial Sequence
  chemically synthesized
agtccaagtcccaaagctga

SEQ ID NO: 40177 - DNA, 20 bp, Artificial Sequence
  chemically synthesized
agtcccaaagctgaaggact

SEQ ID NO: 40178 - DNA, 20 bp, Artificial Sequence
  chemically synthesized
tcccaaagctgaaggacttg

SEQ ID NO: 40179 - DNA, 20 bp, Artificial Sequence
  chemically synthesized
ggacttggagtccaatgttt

SEQ ID NO: 40180 - DNA, 20 bp, Artificial Sequence
  chemically synthesized
gacttggagtccaatgtttg

SEQ ID NO: 40181 - DNA, 20 bp, Artificial Sequence
  chemically synthesized
acttggagtccaatgtttga

SEQ ID NO: 40182 - DNA, 20 bp, Artificial Sequence
  chemically synthesized
tggagtccaatgtttgaggg

SEQ ID NO: 40183 - DNA, 20 bp, Artificial Sequence
  chemically synthesized
ggagtccaatgtttgagggc

SEQ ID NO: 40184 - DNA, 20 bp, Artificial Sequence
  chemically synthesized
gtccaatgtttgagggcagg

SEQ ID NO: 40185 - DNA, 20 bp, Artificial Sequence
  chemically synthesized
gtttgagggcaggaagcatc

SEQ ID NO: 40186 - DNA, 20 bp, Artificial Sequence
  chemically synthesized
agggcaggaagcatccagca

SEQ ID NO: 40187 - DNA, 20 bp, Artificial Sequence
  chemically synthesized
gggcaggaagcatccagcat

SEQ ID NO: 40188 - DNA, 20 bp, Artificial Sequence
  chemically synthesized
gcaggaagcatccagcatgg

SEQ ID NO: 40189 - DNA, 20 bp, Artificial Sequence
  chemically synthesized
gaagcatccagcatgggaga

SEQ ID NO: 40190 - DNA, 20 bp, Artificial Sequence
  chemically synthesized
tccagcatgggagaaagatg

SEQ ID NO: 40191 - DNA, 20 bp, Artificial Sequence
  chemically synthesized
ccagcatgggagaaagatgt

SEQ ID NO: 40192 - DNA, 20 bp, Artificial Sequence
  chemically synthesized
atgggagaaagatgtaggct

SEQ ID NO: 40193 - DNA, 20 bp, Artificial Sequence
  chemically synthesized
gggagaaagatgtaggcttg

SEQ ID NO: 40194 - DNA, 20 bp, Artificial Sequence
  chemically synthesized
ggagaaagatgtaggcttgg

SEQ ID NO: 40195 - DNA, 20 bp, Artificial Sequence
  chemically synthesized
aagatgtaggcttggaggct

SEQ ID NO: 40196 - DNA, 20 bp, Artificial Sequence
  chemically synthesized
tgtaggcttggaggctaagc

SEQ ID NO: 40197 - DNA, 20 bp, Artificial Sequence
  chemically synthesized
gcttggaggctaagccagtc

SEQ ID NO: 40198 - DNA, 20 bp, Artificial Sequence
  chemically synthesized
cttggaggctaagccagtcc

SEQ ID NO: 40199 - DNA, 20 bp, Artificial Sequence
  chemically synthesized
tttctgcctgctttatatcc

SEQ ID NO: 40200 - DNA, 20 bp, Artificial Sequence
  chemically synthesized
gctttatatcctggccacac

SEQ ID NO: 40201 - DNA, 20 bp, Artificial Sequence
  chemically synthesized
tggccacactggcaactgat

SEQ ID NO: 40202 - DNA, 20 bp, Artificial Sequence
  chemically synthesized
cacactggcaactgattaga

SEQ ID NO: 40203 - DNA, 20 bp, Artificial Sequence
  chemically synthesized
ctgattagatggtgcccacc

SEQ ID NO: 40204 - DNA, 20 bp, Artificial Sequence
  chemically synthesized
agatggtgcccacccagatt

SEQ ID NO: 40205 - DNA, 20 bp, Artificial Sequence
  chemically synthesized
gatggtgcccacccagatta

SEQ ID NO: 40206 - DNA, 20 bp, Artificial Sequence
  chemically synthesized
atggtgcccacccagattaa

SEQ ID NO: 40207 - DNA, 20 bp, Artificial Sequence
  chemically synthesized
gtgcccacccagattaaggg

SEQ ID NO: 40208 - DNA, 20 bp, Artificial Sequence
  chemically synthesized
tgcccacccagattaagggt

SEQ ID NO: 40209 - DNA, 20 bp, Artificial Sequence
  chemically synthesized
aagggtgggtctgcctttcc

SEQ ID NO: 40210 - DNA, 20 bp, Artificial Sequence
  chemically synthesized
actaaaatgttaatctcctt

SEQ ID NO: 40211 - DNA, 20 bp, Artificial Sequence
  chemically synthesized
ctcctttggcaataccctca

SEQ ID NO: 40212 - DNA, 20 bp, Artificial Sequence
  chemically synthesized
aataccctcacagacacact

SEQ ID NO: 40213 - DNA, 20 bp, Artificial Sequence
  chemically synthesized
ataccctcacagacacactc

SEQ ID NO: 40214 - DNA, 20 bp, Artificial Sequence
  chemically synthesized
ttgcacacttcaatccaatc

SEQ ID NO: 40215 - DNA, 20 bp, Artificial Sequence
  chemically synthesized
aatccaatcaagttgacact

SEQ ID NO: 40216 - DNA, 20 bp, Artificial Sequence
  chemically synthesized
cactcagtattaaccatcac

SEQ ID NO: 40217 - DNA, 20 bp, Artificial Sequence
  chemically synthesized
agtccatcgcttgtcaactt

SEQ ID NO: 40218 - DNA, 20 bp, Artificial Sequence
  chemically synthesized
tgagcctatacacatcccct

SEQ ID NO: 40219 - DNA, 20 bp, Artificial Sequence
  chemically synthesized
gagcctatacacatcccctg

SEQ ID NO: 40220 - DNA, 20 bp, Artificial Sequence
  chemically synthesized
tcatacattatcttcaaata

SEQ ID NO: 40221 - DNA, 20 bp, Artificial Sequence
  chemically synthesized
cttcaaataaagacaacaat

SEQ ID NO: 40222 - DNA, 20 bp, Artificial Sequence
  chemically synthesized
aatacttaaatgctgatatg

SEQ ID NO: 40223 - DNA, 20 bp, Artificial Sequence
  chemically synthesized
aaatcttatgtcacatgata

SEQ ID NO: 40224 - DNA, 20 bp, Artificial Sequence
  chemically synthesized
aatcttatgtcacatgataa

SEQ ID NO: 40225 - DNA, 20 bp, Artificial Sequence
  chemically synthesized
atgtcacatgataaaggaaa

SEQ ID NO: 40226 - DNA, 20 bp, Artificial Sequence
  chemically synthesized
tgtcacatgataaaggaaaa

SEQ ID NO: 40227 - DNA, 20 bp, Artificial Sequence
  chemically synthesized
cacatgataaaggaaaaagg

SEQ ID NO: 40228 - DNA, 20 bp, Artificial Sequence
  chemically synthesized
gtaaaatgtatatattttct

SEQ ID NO: 40229 - DNA, 20 bp, Artificial Sequence
  chemically synthesized
tgtatatattttcttagtac

SEQ ID NO: 40230 - DNA, 20 bp, Artificial Sequence
  chemically synthesized
tttcttagtacaagtgtata

SEQ ID NO: 40231 - DNA, 20 bp, Artificial Sequence
  chemically synthesized
tacaagtgtatacagacacg

SEQ ID NO: 40232 - DNA, 20 bp, Artificial Sequence
  chemically synthesized
acaagtgtatacagacacga

SEQ ID NO: 40233 - DNA, 20 bp, Artificial Sequence
  chemically synthesized
cacgaaggtgtttttaacaa

SEQ ID NO: 40234 - DNA, 20 bp, Artificial Sequence
  chemically synthesized
gaaggtgtttttaacaaaag

SEQ ID NO: 40235 - DNA, 20 bp, Artificial Sequence
  chemically synthesized
aaggtgtttttaacaaaaga

SEQ ID NO: 40236 - DNA, 20 bp, Artificial Sequence
  chemically synthesized
ggtgtttttaacaaaagaag

SEQ ID NO: 40237 - DNA, 20 bp, Artificial Sequence
  chemically synthesized
gtgtttttaacaaaagaagg

SEQ ID NO: 40238 - DNA, 20 bp, Artificial Sequence
  chemically synthesized
ggaaatactcatgacaatta

SEQ ID NO: 40239 - DNA, 20 bp, Artificial Sequence
  chemically synthesized
acagtccttgtatctgcaat

SEQ ID NO: 40240 - DNA, 20 bp, Artificial Sequence
  chemically synthesized
tgcaattggtcacgtgatcg

SEQ ID NO: 40241 - DNA, 20 bp, Artificial Sequence
  chemically synthesized
attggtcacgtgatcgtagc

SEQ ID NO: 40242 - DNA, 20 bp, Artificial Sequence
  chemically synthesized
ttctgtattccctttgccct

SEQ ID NO: 40243 - DNA, 20 bp, Artificial Sequence
  chemically synthesized
gtattccctttgccctcagc

SEQ ID NO: 40244 - DNA, 20 bp, Artificial Sequence
  chemically synthesized
tttgccctcagcaagcacct

SEQ ID NO: 40245 - DNA, 20 bp, Artificial Sequence
  chemically synthesized
gccctcagcaagcacctcag

SEQ ID NO: 40246 - DNA, 20 bp, Artificial Sequence
  chemically synthesized
ccctcagcaagcacctcagc

SEQ ID NO: 40247 - DNA, 20 bp, Artificial Sequence
  chemically synthesized
ttttttttttttttttttcc

SEQ ID NO: 40248 - DNA, 20 bp, Artificial Sequence
  chemically synthesized
tttttttttttttttcctgg

SEQ ID NO: 40249 - DNA, 20 bp, Artificial Sequence
  chemically synthesized
tttttttttttttcctggtg

SEQ ID NO: 40250 - DNA, 20 bp, Artificial Sequence
  chemically synthesized
gtgacccaaacctttatttg

SEQ ID NO: 40251 - DNA, 20 bp, Artificial Sequence
  chemically synthesized
cctttatttgtagtcctgcc

SEQ ID NO: 40252 - DNA, 20 bp, Artificial Sequence
  chemically synthesized
atttgtagtcctgcctggaa

SEQ ID NO: 40253 - DNA, 20 bp, Artificial Sequence
  chemically synthesized
gtcctgcctggaatggcctg

SEQ ID NO: 40254 - DNA, 20 bp, Artificial Sequence
  chemically synthesized
ctgcctggaatggcctgtag

SEQ ID NO: 40255 - DNA, 20 bp, Artificial Sequence
  chemically synthesized
tttcccactgaccttaattc

SEQ ID NO: 40256 - DNA, 20 bp, Artificial Sequence
  chemically synthesized
ttcccactgaccttaattcc

SEQ ID NO: 40257 - DNA, 20 bp, Artificial Sequence
  chemically synthesized
ctgaccttaattccaggaca

SEQ ID NO: 40258 - DNA, 20 bp, Artificial Sequence
  chemically synthesized
ttccaggacatggtaaaact

SEQ ID NO: 40259 - DNA, 20 bp, Artificial Sequence
  chemically synthesized
ccaggacatggtaaaactaa

SEQ ID NO: 40260 - DNA, 20 bp, Artificial Sequence
  chemically synthesized
aaaactaagagacaccctaa

SEQ ID NO: 40261 - DNA, 20 bp, Artificial Sequence
  chemically synthesized
acgcttccttacctccattg

SEQ ID NO: 40262 - DNA, 20 bp, Artificial Sequence
  chemically synthesized
gcttccttacctccattgtg

SEQ ID NO: 40263 - DNA, 20 bp, Artificial Sequence
  chemically synthesized
ttacctccattgtggagttg

SEQ ID NO: 40264 - DNA, 20 bp, Artificial Sequence
  chemically synthesized
gtagactgatttcatcttga

SEQ ID NO: 40265 - DNA, 20 bp, Artificial Sequence
  chemically synthesized
ctgatttcatcttgatagtc

SEQ ID NO: 40266 - DNA, 20 bp, Artificial Sequence
  chemically synthesized
tgatttcatcttgatagtct

SEQ ID NO: 40267 - DNA, 20 bp, Artificial Sequence
  chemically synthesized
atagtctgggttaatcaccg

SEQ ID NO: 40268 - DNA, 20 bp, Artificial Sequence
  chemically synthesized
caacactgtaactctcttct

SEQ ID NO: 40269 - DNA, 20 bp, Artificial Sequence
  chemically synthesized
cttcttagcctgttgactta

SEQ ID NO: 40270 - DNA, 20 bp, Artificial Sequence
  chemically synthesized
ttcttagcctgttgacttaa

SEQ ID NO: 40271 - DNA, 20 bp, Artificial Sequence
  chemically synthesized
ttagcctgttgacttaaagg

SEQ ID NO: 40272 - DNA, 20 bp, Artificial Sequence
  chemically synthesized
tagcctgttgacttaaaggt

SEQ ID NO: 40273 - DNA, 20 bp, Artificial Sequence
  chemically synthesized
gcctgttgacttaaaggtgg

SEQ ID NO: 40274 - DNA, 20 bp, Artificial Sequence
  chemically synthesized
cctgttgacttaaaggtggg

SEQ ID NO: 40275 - DNA, 20 bp, Artificial Sequence
  chemically synthesized
tgttgacttaaaggtgggag

SEQ ID NO: 40276 - DNA, 20 bp, Artificial Sequence
  chemically synthesized
ttaaaggtgggaggagccca

SEQ ID NO: 40277 - DNA, 20 bp, Artificial Sequence
  chemically synthesized
tgggaggagcccaaagtgtc

SEQ ID NO: 40278 - DNA, 20 bp, Artificial Sequence
  chemically synthesized
gggaggagcccaaagtgtcc

SEQ ID NO: 40279 - DNA, 20 bp, Artificial Sequence
  chemically synthesized
aggagcccaaagtgtccagg

SEQ ID NO: 40280 - DNA, 20 bp, Artificial Sequence
  chemically synthesized
caggtggcaatcttaatttg

SEQ ID NO: 40281 - DNA, 20 bp, Artificial Sequence
  chemically synthesized
aatcttaatttgcagtttaa

SEQ ID NO: 40282 - DNA, 20 bp, Artificial Sequence
  chemically synthesized
ggaatcattattgtgtcacc

SEQ ID NO: 40283 - DNA, 20 bp, Artificial Sequence
  chemically synthesized
atcattattgtgtcacctgg

SEQ ID NO: 40284 - DNA, 20 bp, Artificial Sequence
  chemically synthesized
attattgtgtcacctggcgg

SEQ ID NO: 40285 - DNA, 20 bp, Artificial Sequence
  chemically synthesized
ggcggcagtgttcctccctc

SEQ ID NO: 40286 - DNA, 20 bp, Artificial Sequence
  chemically synthesized
gtgttcctccctctggaact

SEQ ID NO: 40287 - DNA, 20 bp, Artificial Sequence
  chemically synthesized
cctctggaactaagacctct

SEQ ID NO: 40288 - DNA, 20 bp, Artificial Sequence
  chemically synthesized
tggaactaagacctctaagc

SEQ ID NO: 40289 - DNA, 20 bp, Artificial Sequence
  chemically synthesized
aactaagacctctaagccag

SEQ ID NO: 40290 - DNA, 20 bp, Artificial Sequence
  chemically synthesized
gccagcagaacataatgcca

SEQ ID NO: 40291 - DNA, 20 bp, Artificial Sequence
  chemically synthesized
ccagcagaacataatgccat

SEQ ID NO: 40292 - DNA, 20 bp, Artificial Sequence
  chemically synthesized
agaacataatgccatgggaa

SEQ ID NO: 40293 - DNA, 20 bp, Artificial Sequence
  chemically synthesized
gaacataatgccatgggaac

SEQ ID NO: 40294 - DNA, 20 bp, Artificial Sequence
  chemically synthesized
cataatgccatgggaacagg

SEQ ID NO: 40295 - DNA, 20 bp, Artificial Sequence
  chemically synthesized
acaggaagcaaaaattttgc

SEQ ID NO: 40296 - DNA, 20 bp, Artificial Sequence
  chemically synthesized
ggaagcaaaaattttgctag

SEQ ID NO: 40297 - DNA, 20 bp, Artificial Sequence
  chemically synthesized
aaattttgctagtggaacac

SEQ ID NO: 40298 - DNA, 20 bp, Artificial Sequence
  chemically synthesized
aattttgctagtggaacact

SEQ ID NO: 40299 - DNA, 20 bp, Artificial Sequence
  chemically synthesized
attttgctagtggaacacta

SEQ ID NO: 40300 - DNA, 20 bp, Artificial Sequence
  chemically synthesized
ttttgctagtggaacactag

SEQ ID NO: 40301 - DNA, 20 bp, Artificial Sequence
  chemically synthesized
tagtggaacactaggggtga

SEQ ID NO: 40302 - DNA, 20 bp, Artificial Sequence
  chemically synthesized
ggaacactaggggtgatggt

SEQ ID NO: 40303 - DNA, 20 bp, Artificial Sequence
  chemically synthesized
acactaggggtgatggtgag

SEQ ID NO: 40304 - DNA, 20 bp, Artificial Sequence
  chemically synthesized
cacttccaccctttgattcc

SEQ ID NO: 40305 - DNA, 20 bp, Artificial Sequence
  chemically synthesized
ggacccgtgaatcctgtcta

SEQ ID NO: 40306 - DNA, 20 bp, Artificial Sequence
  chemically synthesized
gacccgtgaatcctgtctat

SEQ ID NO: 40307 - DNA, 20 bp, Artificial Sequence
  chemically synthesized
cccgtgaatcctgtctatgg

SEQ ID NO: 40308 - DNA, 20 bp, Artificial Sequence
  chemically synthesized
aatcctgtctatgggagaaa

SEQ ID NO: 40309 - DNA, 20 bp, Artificial Sequence
  chemically synthesized
ggagaaacagtaccatatat

SEQ ID NO: 40310 - DNA, 20 bp, Artificial Sequence
  chemically synthesized
ccatatattggacactgatt

SEQ ID NO: 40311 - DNA, 20 bp, Artificial Sequence
  chemically synthesized
atatattggacactgattca

SEQ ID NO: 40312 - DNA, 20 bp, Artificial Sequence
  chemically synthesized
acactgattcagagcataca

SEQ ID NO: 40313 - DNA, 20 bp, Artificial Sequence
  chemically synthesized
tcagagcatacacagccttc

SEQ ID NO: 40314 - DNA, 20 bp, Artificial Sequence
  chemically synthesized
agagcatacacagccttctg

SEQ ID NO: 40315 - DNA, 20 bp, Artificial Sequence
  chemically synthesized
ccttctggagaactttgccc

SEQ ID NO: 40316 - DNA, 20 bp, Artificial Sequence
  chemically synthesized
cttctggagaactttgcccc

SEQ ID NO: 40317 - DNA, 20 bp, Artificial Sequence
  chemically synthesized
aactttgccccaggcctgca

SEQ ID NO: 40318 - DNA, 20 bp, Artificial Sequence
  chemically synthesized
gcctgcaaagtattgtcacc

SEQ ID NO: 40319 - DNA, 20 bp, Artificial Sequence
  chemically synthesized
gcaaagtattgtcacctagt

SEQ ID NO: 40320 - DNA, 20 bp, Artificial Sequence
  chemically synthesized
cattgtaatcgtgacttcaa

SEQ ID NO: 40321 - DNA, 20 bp, Artificial Sequence
  chemically synthesized
attgtaatcgtgacttcaaa

SEQ ID NO: 40322 - DNA, 20 bp, Artificial Sequence
  chemically synthesized
gacttcaaaaggccattcaa

SEQ ID NO: 40323 - DNA, 20 bp, Artificial Sequence
  chemically synthesized
aggccattcaaaagctgctt

SEQ ID NO: 40324 - DNA, 20 bp, Artificial Sequence
  chemically synthesized
ggccattcaaaagctgcttc

SEQ ID NO: 40325 - DNA, 20 bp, Artificial Sequence
  chemically synthesized
caaaagctgcttcaggatga

SEQ ID NO: 40326 - DNA, 20 bp, Artificial Sequence
  chemically synthesized
aaaagctgcttcaggatgat

SEQ ID NO: 40327 - DNA, 20 bp, Artificial Sequence
  chemically synthesized
aaagctgcttcaggatgata

SEQ ID NO: 40328 - DNA, 20 bp, Artificial Sequence
  chemically synthesized
cttcaggatgatagggatca

SEQ ID NO: 40329 - DNA, 20 bp, Artificial Sequence
  chemically synthesized
aggatgatagggatcatggt

SEQ ID NO: 40330 - DNA, 20 bp, Artificial Sequence
  chemically synthesized
gatagggatcatggtaagac

SEQ ID NO: 40331 - DNA, 20 bp, Artificial Sequence
  chemically synthesized
gtaagaccagtaaattccat

SEQ ID NO: 40332 - DNA, 20 bp, Artificial Sequence
  chemically synthesized
ccagtaaattccatgagcat

SEQ ID NO: 40333 - DNA, 20 bp, Artificial Sequence
  chemically synthesized
agcccactgtcacacttctt

SEQ ID NO: 40334 - DNA, 20 bp, Artificial Sequence
  chemically synthesized
gtcacacttctttagccata

SEQ ID NO: 40335 - DNA, 20 bp, Artificial Sequence
  chemically synthesized
cacttctttagccataaagt

SEQ ID NO: 40336 - DNA, 20 bp, Artificial Sequence
  chemically synthesized
ttctttagccataaagtgag

SEQ ID NO: 40337 - DNA, 20 bp, Artificial Sequence
  chemically synthesized
tagccataaagtgagtggct

SEQ ID NO: 40338 - DNA, 20 bp, Artificial Sequence
  chemically synthesized
cataaagtgagtggcttggt

SEQ ID NO: 40339 - DNA, 20 bp, Artificial Sequence
  chemically synthesized
aaagtgagtggcttggtcag

SEQ ID NO: 40340 - DNA, 20 bp, Artificial Sequence
  chemically synthesized
tggtcagaagcaatgctgtg

SEQ ID NO: 40341 - DNA, 20 bp, Artificial Sequence
  chemically synthesized
tgctgtgtggaataccatga

SEQ ID NO: 40342 - DNA, 20 bp, Artificial Sequence
  chemically synthesized
tgtgtggaataccatgacag

SEQ ID NO: 40343 - DNA, 20 bp, Artificial Sequence
  chemically synthesized
gaataccatgacagtggata

SEQ ID NO: 40344 - DNA, 20 bp, Artificial Sequence
  chemically synthesized
tacggcattctgtgattcca

SEQ ID NO: 40345 - DNA, 20 bp, Artificial Sequence
  chemically synthesized
gcattctgtgattccatgga

SEQ ID NO: 40346 - DNA, 20 bp, Artificial Sequence
  chemically synthesized
ttctgtgattccatggatgg

SEQ ID NO: 40347 - DNA, 20 bp, Artificial Sequence
  chemically synthesized
gattccatggatggtagtct

SEQ ID NO: 40348 - DNA, 20 bp, Artificial Sequence
  chemically synthesized
atggatggtagtcttggcat

SEQ ID NO: 40349 - DNA, 20 bp, Artificial Sequence
  chemically synthesized
gtagtcttggcataagcatt

SEQ ID NO: 40350 - DNA, 20 bp, Artificial Sequence
  chemically synthesized
cttggcataagcattgagtt

SEQ ID NO: 40351 - DNA, 20 bp, Artificial Sequence
  chemically synthesized
ttggcataagcattgagttc

SEQ ID NO: 40352 - DNA, 20 bp, Artificial Sequence
  chemically synthesized
ataagcattgagttcaggat

SEQ ID NO: 40353 - DNA, 20 bp, Artificial Sequence
  chemically synthesized
taagcattgagttcaggatt

SEQ ID NO: 40354 - DNA, 20 bp, Artificial Sequence
  chemically synthesized
aggattgggaaacccatatc

SEQ ID NO: 40355 - DNA, 20 bp, Artificial Sequence
  chemically synthesized
gattgggaaacccatatcca

SEQ ID NO: 40356 - DNA, 20 bp, Artificial Sequence
  chemically synthesized
gggaaacccatatccagagt

SEQ ID NO: 40357 - DNA, 20 bp, Artificial Sequence
  chemically synthesized
tccagagtaagtgtctattc

SEQ ID NO: 40358 - DNA, 20 bp, Artificial Sequence
  chemically synthesized
gagtaagtgtctattccagt

SEQ ID NO: 40359 - DNA, 20 bp, Artificial Sequence
  chemically synthesized
agtaagtgtctattccagtg

SEQ ID NO: 40360 - DNA, 20 bp, Artificial Sequence
  chemically synthesized
gtgtctattccagtgaggac

SEQ ID NO: 40361 - DNA, 20 bp, Artificial Sequence
  chemically synthesized
agcctctgccctttccatga

SEQ ID NO: 40362 - DNA, 20 bp, Artificial Sequence
  chemically synthesized
ctctgccctttccatgatgg

SEQ ID NO: 40363 - DNA, 20 bp, Artificial Sequence
  chemically synthesized
ctgccctttccatgatggaa

SEQ ID NO: 40364 - DNA, 20 bp, Artificial Sequence
  chemically synthesized
tgccctttccatgatggaag

SEQ ID NO: 40365 - DNA, 20 bp, Artificial Sequence
  chemically synthesized
caatataatcaacctgccac

SEQ ID NO: 40366 - DNA, 20 bp, Artificial Sequence
  chemically synthesized
aatataatcaacctgccacc

SEQ ID NO: 40367 - DNA, 20 bp, Artificial Sequence
  chemically synthesized
ataatcaacctgccaccagg

SEQ ID NO: 40368 - DNA, 20 bp, Artificial Sequence
  chemically synthesized
tcaacctgccaccaggtagc

SEQ ID NO: 40369 - DNA, 20 bp, Artificial Sequence
  chemically synthesized
ggtagctggctgatcacccc

SEQ ID NO: 40370 - DNA, 20 bp, Artificial Sequence
  chemically synthesized
gtagctggctgatcaccccg

SEQ ID NO: 40371 - DNA, 20 bp, Artificial Sequence
  chemically synthesized
tggctgatcaccccgaggaa

SEQ ID NO: 40372 - DNA, 20 bp, Artificial Sequence
  chemically synthesized
ccgaggaatggtgccatatc

SEQ ID NO: 40373 - DNA, 20 bp, Artificial Sequence
  chemically synthesized
cgaggaatggtgccatatca

SEQ ID NO: 40374 - DNA, 20 bp, Artificial Sequence
  chemically synthesized
gaggaatggtgccatatcaa

SEQ ID NO: 40375 - DNA, 20 bp, Artificial Sequence
  chemically synthesized
atggtgccatatcaagggct

SEQ ID NO: 40376 - DNA, 20 bp, Artificial Sequence
  chemically synthesized
ccatatcaagggcttagtgt

SEQ ID NO: 40377 - DNA, 20 bp, Artificial Sequence
  chemically synthesized
ttagtgttggtctctgatgc

SEQ ID NO: 40378 - DNA, 20 bp, Artificial Sequence
  chemically synthesized
tgttggtctctgatgctggc

SEQ ID NO: 40379 - DNA, 20 bp, Artificial Sequence
  chemically synthesized
tggtctctgatgctggcaag

SEQ ID NO: 40380 - DNA, 20 bp, Artificial Sequence
  chemically synthesized
tctctgatgctggcaagcag

SEQ ID NO: 40381 - DNA, 20 bp, Artificial Sequence
  chemically synthesized
atgctggcaagcagtggctg

SEQ ID NO: 40382 - DNA, 20 bp, Artificial Sequence
  chemically synthesized
tggcaagcagtggctgtggc

SEQ ID NO: 40383 - DNA, 20 bp, Artificial Sequence
  chemically synthesized
ggcaagcagtggctgtggcc

SEQ ID NO: 40384 - DNA, 20 bp, Artificial Sequence
  chemically synthesized
agcagtggctgtggccaggt

SEQ ID NO: 40385 - DNA, 20 bp, Artificial Sequence
  chemically synthesized
ggctgtggccaggtcagctt

SEQ ID NO: 40386 - DNA, 20 bp, Artificial Sequence
  chemically synthesized
gtggccaggtcagctttggt

SEQ ID NO: 40387 - DNA, 20 bp, Artificial Sequence
  chemically synthesized
gccaggtcagctttggtgag

SEQ ID NO: 40388 - DNA, 20 bp, Artificial Sequence
  chemically synthesized
aggtcagctttggtgagtgg

SEQ ID NO: 40389 - DNA, 20 bp, Artificial Sequence
  chemically synthesized
gagtggaagtccatgttgct

SEQ ID NO: 40390 - DNA, 20 bp, Artificial Sequence
  chemically synthesized
aagtccatgttgctgagccc

SEQ ID NO: 40391 - DNA, 20 bp, Artificial Sequence
  chemically synthesized
aacttccatccctgcaactg

SEQ ID NO: 40392 - DNA, 20 bp, Artificial Sequence
  chemically synthesized
aactgtggccactttgttca

SEQ ID NO: 40393 - DNA, 20 bp, Artificial Sequence
  chemically synthesized
actgtggccactttgttcat

SEQ ID NO: 40394 - DNA, 20 bp, Artificial Sequence
  chemically synthesized
cactttgttcatgggtccat

SEQ ID NO: 40395 - DNA, 20 bp, Artificial Sequence
  chemically synthesized
ggtccattggacgatgacat

SEQ ID NO: 40396 - DNA, 20 bp, Artificial Sequence
  chemically synthesized
ccattggacgatgacatgag

SEQ ID NO: 40397 - DNA, 20 bp, Artificial Sequence
  chemically synthesized
ggacgatgacatgagtggcc

SEQ ID NO: 40398 - DNA, 20 bp, Artificial Sequence
  chemically synthesized
gacgatgacatgagtggcct

SEQ ID NO: 40399 - DNA, 20 bp, Artificial Sequence
  chemically synthesized
tgacatgagtggcctgggaa

SEQ ID NO: 40400 - DNA, 20 bp, Artificial Sequence
  chemically synthesized
gacatgagtggcctgggaaa

SEQ ID NO: 40401 - DNA, 20 bp, Artificial Sequence
  chemically synthesized
gagtggcctgggaaaaggct

SEQ ID NO: 40402 - DNA, 20 bp, Artificial Sequence
  chemically synthesized
tggcctgggaaaaggctgag

SEQ ID NO: 40403 - DNA, 20 bp, Artificial Sequence
  chemically synthesized
aaaaggctgagtggtgtcca

SEQ ID NO: 40404 - DNA, 20 bp, Artificial Sequence
  chemically synthesized
tattaaaatcctcttctgct

SEQ ID NO: 40405 - DNA, 20 bp, Artificial Sequence
  chemically synthesized
attaaaatcctcttctgctg

SEQ ID NO: 40406 - DNA, 20 bp, Artificial Sequence
  chemically synthesized
cttctgctgaggtcacccat

SEQ ID NO: 40407 - DNA, 20 bp, Artificial Sequence
  chemically synthesized
tgctgaggtcacccattggt

SEQ ID NO: 40408 - DNA, 20 bp, Artificial Sequence
  chemically synthesized
cccattggtgagcactcaca

SEQ ID NO: 40409 - DNA, 20 bp, Artificial Sequence
  chemically synthesized
ccattggtgagcactcacat

SEQ ID NO: 40410 - DNA, 20 bp, Artificial Sequence
  chemically synthesized
atgggatgaaaatatctttg

SEQ ID NO: 40411 - DNA, 20 bp, Artificial Sequence
  chemically synthesized
ttgtagtttttgactaatca

SEQ ID NO: 40412 - DNA, 20 bp, Artificial Sequence
  chemically synthesized
gtagtttttgactaatcata

SEQ ID NO: 40413 - DNA, 20 bp, Artificial Sequence
  chemically synthesized
tagtttttgactaatcatag

SEQ ID NO: 40414 - DNA, 20 bp, Artificial Sequence
  chemically synthesized
tttctttgtcatcaattttc

SEQ ID NO: 40415 - DNA, 20 bp, Artificial Sequence
  chemically synthesized
tttccagtcatgctttttcc

SEQ ID NO: 40416 - DNA, 20 bp, Artificial Sequence
  chemically synthesized
tttccaagtccctgaccatc

SEQ ID NO: 40417 - DNA, 20 bp, Artificial Sequence
  chemically synthesized
tgaccatctagccaaacctt

SEQ ID NO: 40418 - DNA, 20 bp, Artificial Sequence
  chemically synthesized
tctagccaaacctttggcta

SEQ ID NO: 40419 - DNA, 20 bp, Artificial Sequence
  chemically synthesized
tttggctacagcccatgaat

SEQ ID NO: 40420 - DNA, 20 bp, Artificial Sequence
  chemically synthesized
taagtatataatcgcaaatc

SEQ ID NO: 40421 - DNA, 20 bp, Artificial Sequence
  chemically synthesized
gccatttctccttctgtgca

SEQ ID NO: 40422 - DNA, 20 bp, Artificial Sequence
  chemically synthesized
ttctgtgcaaagtgcacaac

SEQ ID NO: 40423 - DNA, 20 bp, Artificial Sequence
  chemically synthesized
tctgtgcaaagtgcacaacc

SEQ ID NO: 40424 - DNA, 20 bp, Artificial Sequence
  chemically synthesized
acaaccaggcacactgctca

SEQ ID NO: 40425 - DNA, 20 bp, Artificial Sequence
  chemically synthesized
ctgctcaaagttctgccaac

SEQ ID NO: 40426 - DNA, 20 bp, Artificial Sequence
  chemically synthesized
tgctcaaagttctgccaact

SEQ ID NO: 40427 - DNA, 20 bp, Artificial Sequence
  chemically synthesized
tcaaagttctgccaactagg

SEQ ID NO: 40428 - DNA, 20 bp, Artificial Sequence
  chemically synthesized
ttcccttcaccgttgtcctt

SEQ ID NO: 40429 - DNA, 20 bp, Artificial Sequence
  chemically synthesized
tcccttcaccgttgtccttc

SEQ ID NO: 40430 - DNA, 20 bp, Artificial Sequence
  chemically synthesized
cccttcaccgttgtccttca

SEQ ID NO: 40431 - DNA, 20 bp, Artificial Sequence
  chemically synthesized
gttgtccttcagggatgtcc

SEQ ID NO: 40432 - DNA, 20 bp, Artificial Sequence
  chemically synthesized
tccttcagggatgtcctaga

SEQ ID NO: 40433 - DNA, 20 bp, Artificial Sequence
  chemically synthesized
ccttcagggatgtcctagaa

SEQ ID NO: 40434 - DNA, 20 bp, Artificial Sequence
  chemically synthesized
cttcagggatgtcctagaaa

SEQ ID NO: 40435 - DNA, 20 bp, Artificial Sequence
  chemically synthesized
ttcagggatgtcctagaaag

SEQ ID NO: 40436 - DNA, 20 bp, Artificial Sequence
  chemically synthesized
gatgtcctagaaaggggctg

SEQ ID NO: 40437 - DNA, 20 bp, Artificial Sequence
  chemically synthesized
agaaaggggctgtagtgctg

SEQ ID NO: 40438 - DNA, 20 bp, Artificial Sequence
  chemically synthesized
gtgctgcggctgtccacttt

SEQ ID NO: 40439 - DNA, 20 bp, Artificial Sequence
  chemically synthesized
tgctgcggctgtccactttt

SEQ ID NO: 40440 - DNA, 20 bp, Artificial Sequence
  chemically synthesized
tgcggctgtccacttttggg

SEQ ID NO: 40441 - DNA, 20 bp, Artificial Sequence
  chemically synthesized
ggtggtgcctgcatatcgtg

SEQ ID NO: 40442 - DNA, 20 bp, Artificial Sequence
  chemically synthesized
gtgcagaactatctgtgaac

SEQ ID NO: 40443 - DNA, 20 bp, Artificial Sequence
  chemically synthesized
tgcagaactatctgtgaacc

SEQ ID NO: 40444 - DNA, 20 bp, Artificial Sequence
  chemically synthesized
actatctgtgaaccaggacc

SEQ ID NO: 40445 - DNA, 20 bp, Artificial Sequence
  chemically synthesized
ctagtcttctcttcctctgt

SEQ ID NO: 40446 - DNA, 20 bp, Artificial Sequence
  chemically synthesized
cttcctctgtcagctgatca

SEQ ID NO: 40447 - DNA, 20 bp, Artificial Sequence
  chemically synthesized
ttcctctgtcagctgatcat

SEQ ID NO: 40448 - DNA, 20 bp, Artificial Sequence
  chemically synthesized
tcctctgtcagctgatcata

SEQ ID NO: 40449 - DNA, 20 bp, Artificial Sequence
  chemically synthesized
gatcatagggaactccccat

SEQ ID NO: 40450 - DNA, 20 bp, Artificial Sequence
  chemically synthesized
ggaactccccatgagaccat

SEQ ID NO: 40451 - DNA, 20 bp, Artificial Sequence
  chemically synthesized
tccccatgagaccatcggtg

SEQ ID NO: 40452 - DNA, 20 bp, Artificial Sequence
  chemically synthesized
tgagaccatcggtgcagtct

SEQ ID NO: 40453 - DNA, 20 bp, Artificial Sequence
  chemically synthesized
gagaccatcggtgcagtctc

SEQ ID NO: 40454 - DNA, 20 bp, Artificial Sequence
  chemically synthesized
agaccatcggtgcagtctca

SEQ ID NO: 40455 - DNA, 20 bp, Artificial Sequence
  chemically synthesized
accatcggtgcagtctcagg

SEQ ID NO: 40456 - DNA, 20 bp, Artificial Sequence
  chemically synthesized
catcggtgcagtctcaggga

SEQ ID NO: 40457 - DNA, 20 bp, Artificial Sequence
  chemically synthesized
ggtgcagtctcagggagaga

SEQ ID NO: 40458 - DNA, 20 bp, Artificial Sequence
  chemically synthesized
gcagtctcagggagagaaag

SEQ ID NO: 40459 - DNA, 20 bp, Artificial Sequence
  chemically synthesized
agggagagaaagcagtgtgt

SEQ ID NO: 40460 - DNA, 20 bp, Artificial Sequence
  chemically synthesized
gggagagaaagcagtgtgtc

SEQ ID NO: 40461 - DNA, 20 bp, Artificial Sequence
  chemically synthesized
gagagaaagcagtgtgtcag

SEQ ID NO: 40462 - DNA, 20 bp, Artificial Sequence
  chemically synthesized
agaaagcagtgtgtcaggag

SEQ ID NO: 40463 - DNA, 20 bp, Artificial Sequence
  chemically synthesized
aaagcagtgtgtcaggagtg

SEQ ID NO: 40464 - DNA, 20 bp, Artificial Sequence
  chemically synthesized
tgtgtcaggagtggagacca

SEQ ID NO: 40465 - DNA, 20 bp, Artificial Sequence
  chemically synthesized
gtgtcaggagtggagaccat

SEQ ID NO: 40466 - DNA, 20 bp, Artificial Sequence
  chemically synthesized
agtggagaccatgggcattt

SEQ ID NO: 40467 - DNA, 20 bp, Artificial Sequence
  chemically synthesized
ccctttctcatgtaacttac

SEQ ID NO: 40468 - DNA, 20 bp, Artificial Sequence
  chemically synthesized
atgtaacttactagtgcctt

SEQ ID NO: 40469 - DNA, 20 bp, Artificial Sequence
  chemically synthesized
tgtaacttactagtgccttc

SEQ ID NO: 40470 - DNA, 20 bp, Artificial Sequence
  chemically synthesized
agtgccttcaggatctgctc

SEQ ID NO: 40471 - DNA, 20 bp, Artificial Sequence
  chemically synthesized
tgatgcaatgctgctgtgca

SEQ ID NO: 40472 - DNA, 20 bp, Artificial Sequence
  chemically synthesized
gctgtgcacagcccacttta

SEQ ID NO: 40473 - DNA, 20 bp, Artificial Sequence
  chemically synthesized
tgcacagcccactttatggc

SEQ ID NO: 40474 - DNA, 20 bp, Artificial Sequence
  chemically synthesized
cagcccactttatggctaga

SEQ ID NO: 40475 - DNA, 20 bp, Artificial Sequence
  chemically synthesized
cactttatggctagatggat

SEQ ID NO: 40476 - DNA, 20 bp, Artificial Sequence
  chemically synthesized
ttatggctagatggatcaga

SEQ ID NO: 40477 - DNA, 20 bp, Artificial Sequence
  chemically synthesized
tagatggatcagaaagcacc

SEQ ID NO: 40478 - DNA, 20 bp, Artificial Sequence
  chemically synthesized
agaaagcacccagttcatga

SEQ ID NO: 40479 - DNA, 20 bp, Artificial Sequence
  chemically synthesized
gaaagcacccagttcatgat

SEQ ID NO: 40480 - DNA, 20 bp, Artificial Sequence
  chemically synthesized
agcacccagttcatgatagg

SEQ ID NO: 40481 - DNA, 20 bp, Artificial Sequence
  chemically synthesized
ccagttcatgataggcagtt

SEQ ID NO: 40482 - DNA, 20 bp, Artificial Sequence
  chemically synthesized
cagttcatgataggcagttc

SEQ ID NO: 40483 - DNA, 20 bp, Artificial Sequence
  chemically synthesized
gataggcagttcaggtcaca

SEQ ID NO: 40484 - DNA, 20 bp, Artificial Sequence
  chemically synthesized
catggtgacttgatgactca

SEQ ID NO: 40485 - DNA, 20 bp, Artificial Sequence
  chemically synthesized
caaatatttcgtttccacca

SEQ ID NO: 40486 - DNA, 20 bp, Artificial Sequence
  chemically synthesized
atttcgtttccaccaaagcc

SEQ ID NO: 40487 - DNA, 20 bp, Artificial Sequence
  chemically synthesized
tttccaccaaagcccagtaa

SEQ ID NO: 40488 - DNA, 20 bp, Artificial Sequence
  chemically synthesized
ttccaccaaagcccagtaac

SEQ ID NO: 40489 - DNA, 20 bp, Artificial Sequence
  chemically synthesized
ccaaagcccagtaacaggcc

SEQ ID NO: 40490 - DNA, 20 bp, Artificial Sequence
  chemically synthesized
aaagcccagtaacaggccaa

SEQ ID NO: 40491 - DNA, 20 bp, Artificial Sequence
  chemically synthesized
gccaagagctttctccctaa

SEQ ID NO: 40492 - DNA, 20 bp, Artificial Sequence
  chemically synthesized
caagagctttctccctaaaa

SEQ ID NO: 40493 - DNA, 20 bp, Artificial Sequence
  chemically synthesized
agagctttctccctaaaaga

SEQ ID NO: 40494 - DNA, 20 bp, Artificial Sequence
  chemically synthesized
gctttctccctaaaagagag

SEQ ID NO: 40495 - DNA, 20 bp, Artificial Sequence
  chemically synthesized
taaaagagagtagttatctg

SEQ ID NO: 40496 - DNA, 20 bp, Artificial Sequence
  chemically synthesized
aagagagtagttatctgcag

SEQ ID NO: 40497 - DNA, 20 bp, Artificial Sequence
  chemically synthesized
gagtagttatctgcagaaga

SEQ ID NO: 40498 - DNA, 20 bp, Artificial Sequence
  chemically synthesized
tagttatctgcagaagatgg

SEQ ID NO: 40499 - DNA, 20 bp, Artificial Sequence
  chemically synthesized
agttatctgcagaagatggc

SEQ ID NO: 40500 - DNA, 20 bp, Artificial Sequence
  chemically synthesized
gttatctgcagaagatggca

SEQ ID NO: 40501 - DNA, 20 bp, Artificial Sequence
  chemically synthesized
agggccttgctccaaaatcc

SEQ ID NO: 40502 - DNA, 20 bp, Artificial Sequence
  chemically synthesized
ggccttgctccaaaatccta

SEQ ID NO: 40503 - DNA, 20 bp, Artificial Sequence
  chemically synthesized
gccttgctccaaaatcctag

SEQ ID NO: 40504 - DNA, 20 bp, Artificial Sequence
  chemically synthesized
tagaggcctccgctgtgatt

SEQ ID NO: 40505 - DNA, 20 bp, Artificial Sequence
  chemically synthesized
agcctgccaaatgctccaaa

SEQ ID NO: 40506 - DNA, 20 bp, Artificial Sequence
  chemically synthesized
ctccaaacagcatccctatc

SEQ ID NO: 40507 - DNA, 20 bp, Artificial Sequence
  chemically synthesized
ctatctggcactgacacctc

SEQ ID NO: 40508 - DNA, 20 bp, Artificial Sequence
  chemically synthesized
actgacacctcaagcatcat

SEQ ID NO: 40509 - DNA, 20 bp, Artificial Sequence
  chemically synthesized
tcaagcatcattggatctgc

SEQ ID NO: 40510 - DNA, 20 bp, Artificial Sequence
  chemically synthesized
caagcatcattggatctgct

SEQ ID NO: 40511 - DNA, 20 bp, Artificial Sequence
  chemically synthesized
attggatctgctaggtcata

SEQ ID NO: 40512 - DNA, 20 bp, Artificial Sequence
  chemically synthesized
tctgctaggtcatatggccc

SEQ ID NO: 40513 - DNA, 20 bp, Artificial Sequence
  chemically synthesized
gctaggtcatatggcccaag

SEQ ID NO: 40514 - DNA, 20 bp, Artificial Sequence
  chemically synthesized
gtcatatggcccaagtggca

SEQ ID NO: 40515 - DNA, 20 bp, Artificial Sequence
  chemically synthesized
atatggcccaagtggcatag

SEQ ID NO: 40516 - DNA, 20 bp, Artificial Sequence
  chemically synthesized
aagtggcatagcagcttgca

SEQ ID NO: 40517 - DNA, 20 bp, Artificial Sequence
  chemically synthesized
tggcatagcagcttgcacag

SEQ ID NO: 40518 - DNA, 20 bp, Artificial Sequence
  chemically synthesized
tagcagcttgcacagcagcc

SEQ ID NO: 40519 - DNA, 20 bp, Artificial Sequence
  chemically synthesized
tgcacagcagcctggacctg

SEQ ID NO: 40520 - DNA, 20 bp, Artificial Sequence
  chemically synthesized
acagcagcctggacctgtgg

SEQ ID NO: 40521 - DNA, 20 bp, Artificial Sequence
  chemically synthesized
agcagcctggacctgtggca

SEQ ID NO: 40522 - DNA, 20 bp, Artificial Sequence
  chemically synthesized
tgtggcagagccttctgttc

SEQ ID NO: 40523 - DNA, 20 bp, Artificial Sequence
  chemically synthesized
ttctggactccactcaaaac

SEQ ID NO: 40524 - DNA, 20 bp, Artificial Sequence
  chemically synthesized
tggactccactcaaaactgg

SEQ ID NO: 40525 - DNA, 20 bp, Artificial Sequence
  chemically synthesized
actcaaaactggcagccttt

SEQ ID NO: 40526 - DNA, 20 bp, Artificial Sequence
  chemically synthesized
cttttggatcactcgataaa

SEQ ID NO: 40527 - DNA, 20 bp, Artificial Sequence
  chemically synthesized
ttttggatcactcgataaat

SEQ ID NO: 40528 - DNA, 20 bp, Artificial Sequence
  chemically synthesized
ggatcactcgataaatgggc

SEQ ID NO: 40529 - DNA, 20 bp, Artificial Sequence
  chemically synthesized
atcactcgataaatgggcca

SEQ ID NO: 40530 - DNA, 20 bp, Artificial Sequence
  chemically synthesized
ccagagtaacacacccaaat

SEQ ID NO: 40531 - DNA, 20 bp, Artificial Sequence
  chemically synthesized
cagagtaacacacccaaatc

SEQ ID NO: 40532 - DNA, 20 bp, Artificial Sequence
  chemically synthesized
tgttgcctccaaaatccaaa

SEQ ID NO: 40533 - DNA, 20 bp, Artificial Sequence
  chemically synthesized
gttgcctccaaaatccaaat

SEQ ID NO: 40534 - DNA, 20 bp, Artificial Sequence
  chemically synthesized
caaaatccaaataggcccac

SEQ ID NO: 40535 - DNA, 20 bp, Artificial Sequence
  chemically synthesized
aaaatccaaataggcccact

SEQ ID NO: 40536 - DNA, 20 bp, Artificial Sequence
  chemically synthesized
taggcgttgtgcctatttct

SEQ ID NO: 40537 - DNA, 20 bp, Artificial Sequence
  chemically synthesized
tgtgcctatttcttggttgt

SEQ ID NO: 40538 - DNA, 20 bp, Artificial Sequence
  chemically synthesized
tgcctatttcttggttgtaa

SEQ ID NO: 40539 - DNA, 20 bp, Artificial Sequence
  chemically synthesized
ctatttcttggttgtaagag

SEQ ID NO: 40540 - DNA, 20 bp, Artificial Sequence
  chemically synthesized
gttgtaagagtggccaaatg

SEQ ID NO: 40541 - DNA, 20 bp, Artificial Sequence
  chemically synthesized
cagcaaattatccttcactt

SEQ ID NO: 40542 - DNA, 20 bp, Artificial Sequence
  chemically synthesized
caaattatccttcactttag

SEQ ID NO: 40543 - DNA, 20 bp, Artificial Sequence
  chemically synthesized
aaattatccttcactttaga

SEQ ID NO: 40544 - DNA, 20 bp, Artificial Sequence
  chemically synthesized
actttagaaggaatatctca

SEQ ID NO: 40545 - DNA, 20 bp, Artificial Sequence
  chemically synthesized
tttagaaggaatatctcaaa

SEQ ID NO: 40546 - DNA, 20 bp, Artificial Sequence
  chemically synthesized
ctcaaagagccccaaaccat

SEQ ID NO: 40547 - DNA, 20 bp, Artificial Sequence
  chemically synthesized
ggacccctataaattttact

SEQ ID NO: 40548 - DNA, 20 bp, Artificial Sequence
  chemically synthesized
gacccctataaattttactg

SEQ ID NO: 40549 - DNA, 20 bp, Artificial Sequence
  chemically synthesized
ccctataaattttactgagg

SEQ ID NO: 40550 - DNA, 20 bp, Artificial Sequence
  chemically synthesized
tataaattttactgaggtag

SEQ ID NO: 40551 - DNA, 20 bp, Artificial Sequence
  chemically synthesized
ataaattttactgaggtaga

SEQ ID NO: 40552 - DNA, 20 bp, Artificial Sequence
  chemically synthesized
agaaggtccctgaatttaat

SEQ ID NO: 40553 - DNA, 20 bp, Artificial Sequence
  chemically synthesized
aaatgtctcatcaataaatc

SEQ ID NO: 40554 - DNA, 20 bp, Artificial Sequence
  chemically synthesized
gtttgctacttcttgctcac

SEQ ID NO: 40555 - DNA, 20 bp, Artificial Sequence
  chemically synthesized
tacttcttgctcactagttc

SEQ ID NO: 40556 - DNA, 20 bp, Artificial Sequence
  chemically synthesized
tcttgctcactagttccagt

SEQ ID NO: 40557 - DNA, 20 bp, Artificial Sequence
  chemically synthesized
tcagcatgtcatcaatgtaa

SEQ ID NO: 40558 - DNA, 20 bp, Artificial Sequence
  chemically synthesized
tggaccactgtgatatcttg

SEQ ID NO: 40559 - DNA, 20 bp, Artificial Sequence
  chemically synthesized
accactgtgatatcttgtgg

SEQ ID NO: 40560 - DNA, 20 bp, Artificial Sequence
  chemically synthesized
gtgatatcttgtggaagtga

SEQ ID NO: 40561 - DNA, 20 bp, Artificial Sequence
  chemically synthesized
tgatatcttgtggaagtgaa

SEQ ID NO: 40562 - DNA, 20 bp, Artificial Sequence
  chemically synthesized
atcttgtggaagtgaaaggt

SEQ ID NO: 40563 - DNA, 20 bp, Artificial Sequence
  chemically synthesized
tgtggaagtgaaaggtgagc

SEQ ID NO: 40564 - DNA, 20 bp, Artificial Sequence
  chemically synthesized
tgagcaagttctctccaaat

SEQ ID NO: 40565 - DNA, 20 bp, Artificial Sequence
  chemically synthesized
gttctctccaaataagatta

SEQ ID NO: 40566 - DNA, 20 bp, Artificial Sequence
  chemically synthesized
ccaaataagattatggcaca

SEQ ID NO: 40567 - DNA, 20 bp, Artificial Sequence
  chemically synthesized
ataagattatggcacaaagc

SEQ ID NO: 40568 - DNA, 20 bp, Artificial Sequence
  chemically synthesized
aagattatggcacaaagctg

SEQ ID NO: 40569 - DNA, 20 bp, Artificial Sequence
  chemically synthesized
gattatggcacaaagctgga

SEQ ID NO: 40570 - DNA, 20 bp, Artificial Sequence
  chemically synthesized
tggagagttgatatactcct

SEQ ID NO: 40571 - DNA, 20 bp, Artificial Sequence
  chemically synthesized
ttttctttcatcactttgtc

SEQ ID NO: 40572 - DNA, 20 bp, Artificial Sequence
  chemically synthesized
actttgtccagcgaacttac

SEQ ID NO: 40573 - DNA, 20 bp, Artificial Sequence
  chemically synthesized
gttccttgattctccacata

SEQ ID NO: 40574 - DNA, 20 bp, Artificial Sequence
  chemically synthesized
gattctccacatatagtcaa

SEQ ID NO: 40575 - DNA, 20 bp, Artificial Sequence
  chemically synthesized
agtcaaaagtattatgtata

SEQ ID NO: 40576 - DNA, 20 bp, Artificial Sequence
  chemically synthesized
caaaagtattatgtatacag

SEQ ID NO: 40577 - DNA, 20 bp, Artificial Sequence
  chemically synthesized
ctaaattccttgcctctcac

SEQ ID NO: 40578 - DNA, 20 bp, Artificial Sequence
  chemically synthesized
cctctcacaagcgttgaatc

SEQ ID NO: 40579 - DNA, 20 bp, Artificial Sequence
  chemically synthesized
tctcacaagcgttgaatcaa

SEQ ID NO: 40580 - DNA, 20 bp, Artificial Sequence
  chemically synthesized
ctctctaaacaattgatgcc

SEQ ID NO: 40581 - DNA, 20 bp, Artificial Sequence
  chemically synthesized
tctctaaacaattgatgcca

SEQ ID NO: 40582 - DNA, 20 bp, Artificial Sequence
  chemically synthesized
caattgatgccaaggattat

SEQ ID NO: 40583 - DNA, 20 bp, Artificial Sequence
  chemically synthesized
atcagtgttctccataccat

SEQ ID NO: 40584 - DNA, 20 bp, Artificial Sequence
  chemically synthesized
agtgttctccataccattag

SEQ ID NO: 40585 - DNA, 20 bp, Artificial Sequence
  chemically synthesized
gttctccataccattagaag

SEQ ID NO: 40586 - DNA, 20 bp, Artificial Sequence
  chemically synthesized
tctccataccattagaagaa

SEQ ID NO: 40587 - DNA, 20 bp, Artificial Sequence
  chemically synthesized
accattagaagaagagtcct

SEQ ID NO: 40588 - DNA, 20 bp, Artificial Sequence
  chemically synthesized
agaagagtccttagcatatt

SEQ ID NO: 40589 - DNA, 20 bp, Artificial Sequence
  chemically synthesized
gaagagtccttagcatattt

SEQ ID NO: 40590 - DNA, 20 bp, Artificial Sequence
  chemically synthesized
tatttgggtctaatcatatt

SEQ ID NO: 40591 - DNA, 20 bp, Artificial Sequence
  chemically synthesized
ttgggtctaatcatattaag

SEQ ID NO: 40592 - DNA, 20 bp, Artificial Sequence
  chemically synthesized
tcatattaagcagccaactc

SEQ ID NO: 40593 - DNA, 20 bp, Artificial Sequence
  chemically synthesized
agaaaccccaaaaccaatga

SEQ ID NO: 40594 - DNA, 20 bp, Artificial Sequence
  chemically synthesized
tccttaatattctgttcctc

SEQ ID NO: 40595 - DNA, 20 bp, Artificial Sequence
  chemically synthesized
tgttcctctagaaccactcc

SEQ ID NO: 40596 - DNA, 20 bp, Artificial Sequence
  chemically synthesized
cctggtaccaaaatctgtat

SEQ ID NO: 40597 - DNA, 20 bp, Artificial Sequence
  chemically synthesized
ctggtaccaaaatctgtatt

SEQ ID NO: 40598 - DNA, 20 bp, Artificial Sequence
  chemically synthesized
tggtaccaaaatctgtatta

SEQ ID NO: 40599 - DNA, 20 bp, Artificial Sequence
  chemically synthesized
aaatctgtattagggttcta

SEQ ID NO: 40600 - DNA, 20 bp, Artificial Sequence
  chemically synthesized
atctgtattagggttctaca

SEQ ID NO: 40601 - DNA, 20 bp, Artificial Sequence
  chemically synthesized
attagggttctacagagaaa

SEQ ID NO: 40602 - DNA, 20 bp, Artificial Sequence
  chemically synthesized
ctacagagaaacagaattaa

SEQ ID NO: 40603 - DNA, 20 bp, Artificial Sequence
  chemically synthesized
tacagagaaacagaattaat

SEQ ID NO: 40604 - DNA, 20 bp, Artificial Sequence
  chemically synthesized
cagagaaacagaattaatag

SEQ ID NO: 40605 - DNA, 20 bp, Artificial Sequence
  chemically synthesized
ctctatatctatatctatat

SEQ ID NO: 40606 - DNA, 20 bp, Artificial Sequence
  chemically synthesized
ctatatctatatctatatga

SEQ ID NO: 40607 - DNA, 20 bp, Artificial Sequence
  chemically synthesized
ctatatgagagtttattatg

SEQ ID NO: 40608 - DNA, 20 bp, Artificial Sequence
  chemically synthesized
gtattgactcacatgttcac

SEQ ID NO: 40609 - DNA, 20 bp, Artificial Sequence
  chemically synthesized
tattgactcacatgttcaca

SEQ ID NO: 40610 - DNA, 20 bp, Artificial Sequence
  chemically synthesized
atgttcacaaggtcccaaaa

SEQ ID NO: 40611 - DNA, 20 bp, Artificial Sequence
  chemically synthesized
tgttcacaaggtcccaaaac

SEQ ID NO: 40612 - DNA, 20 bp, Artificial Sequence
  chemically synthesized
tcccaaaacaggccatctgc

SEQ ID NO: 40613 - DNA, 20 bp, Artificial Sequence
  chemically synthesized
aaacaggccatctgccagct

SEQ ID NO: 40614 - DNA, 20 bp, Artificial Sequence
  chemically synthesized
aacaggccatctgccagctg

SEQ ID NO: 40615 - DNA, 20 bp, Artificial Sequence
  chemically synthesized
ccatctgccagctgaggaac

SEQ ID NO: 40616 - DNA, 20 bp, Artificial Sequence
  chemically synthesized
catctgccagctgaggaaca

SEQ ID NO: 40617 - DNA, 20 bp, Artificial Sequence
  chemically synthesized
ctgccagctgaggaacaagg

SEQ ID NO: 40618 - DNA, 20 bp, Artificial Sequence
  chemically synthesized
cagctgaggaacaaggaagc

SEQ ID NO: 40619 - DNA, 20 bp, Artificial Sequence
  chemically synthesized
tgaggaacaaggaagctagt

SEQ ID NO: 40620 - DNA, 20 bp, Artificial Sequence
  chemically synthesized
aggaacaaggaagctagtcg

SEQ ID NO: 40621 - DNA, 20 bp, Artificial Sequence
  chemically synthesized
ggaagctagtcggagtccca

SEQ ID NO: 40622 - DNA, 20 bp, Artificial Sequence
  chemically synthesized
tagtcggagtcccaaagctg

SEQ ID NO: 40623 - DNA, 20 bp, Artificial Sequence
  chemically synthesized
agtcccaaagctgaagaacc

SEQ ID NO: 40624 - DNA, 20 bp, Artificial Sequence
  chemically synthesized
tcccaaagctgaagaacctg

SEQ ID NO: 40625 - DNA, 20 bp, Artificial Sequence
  chemically synthesized
gaacctggagttcaatgttc

SEQ ID NO: 40626 - DNA, 20 bp, Artificial Sequence
  chemically synthesized
aacctggagttcaatgttcc

SEQ ID NO: 40627 - DNA, 20 bp, Artificial Sequence
  chemically synthesized
acctggagttcaatgttcca

SEQ ID NO: 40628 - DNA, 20 bp, Artificial Sequence
  chemically synthesized
tggagttcaatgttccaggg

SEQ ID NO: 40629 - DNA, 20 bp, Artificial Sequence
  chemically synthesized
ggagttcaatgttccagggc

SEQ ID NO: 40630 - DNA, 20 bp, Artificial Sequence
  chemically synthesized
gttcaatgttccagggcagg

SEQ ID NO: 40631 - DNA, 20 bp, Artificial Sequence
  chemically synthesized
gttccagggcaggaagaatc

SEQ ID NO: 40632 - DNA, 20 bp, Artificial Sequence
  chemically synthesized
agggcaggaagaatccagca

SEQ ID NO: 40633 - DNA, 20 bp, Artificial Sequence
  chemically synthesized
gggcaggaagaatccagcat

SEQ ID NO: 40634 - DNA, 20 bp, Artificial Sequence
  chemically synthesized
gcaggaagaatccagcatgg

SEQ ID NO: 40635 - DNA, 20 bp, Artificial Sequence
  chemically synthesized
tccagcatgggagaaaaatg

SEQ ID NO: 40636 - DNA, 20 bp, Artificial Sequence
  chemically synthesized
ccagcatgggagaaaaatgt

SEQ ID NO: 40637 - DNA, 20 bp, Artificial Sequence
  chemically synthesized
catgggagaaaaatgtaggc

SEQ ID NO: 40638 - DNA, 20 bp, Artificial Sequence
  chemically synthesized
atgggagaaaaatgtaggct

SEQ ID NO: 40639 - DNA, 20 bp, Artificial Sequence
  chemically synthesized
aaaatgtaggctgggatgcc

SEQ ID NO: 40640 - DNA, 20 bp, Artificial Sequence
  chemically synthesized
gctgggatgccaagccaatc

SEQ ID NO: 40641 - DNA, 20 bp, Artificial Sequence
  chemically synthesized
tttctgcctgctttatatcc

SEQ ID NO: 40642 - DNA, 20 bp, Artificial Sequence
  chemically synthesized
gctttatatcctggctgtgc

SEQ ID NO: 40643 - DNA, 20 bp, Artificial Sequence
  chemically synthesized
tggctgtgctggcaactgat

SEQ ID NO: 40644 - DNA, 20 bp, Artificial Sequence
  chemically synthesized
tgtgctggcaactgattaga

SEQ ID NO: 40645 - DNA, 20 bp, Artificial Sequence
  chemically synthesized
ctgattagatggtgcccacc

SEQ ID NO: 40646 - DNA, 20 bp, Artificial Sequence
  chemically synthesized
agatggtgcccacccagatt

SEQ ID NO: 40647 - DNA, 20 bp, Artificial Sequence
  chemically synthesized
gatggtgcccacccagatta

SEQ ID NO: 40648 - DNA, 20 bp, Artificial Sequence
  chemically synthesized
atggtgcccacccagattaa

SEQ ID NO: 40649 - DNA, 20 bp, Artificial Sequence
  chemically synthesized
gtgcccacccagattaaggg

SEQ ID NO: 40650 - DNA, 20 bp, Artificial Sequence
  chemically synthesized
tgcccacccagattaagggt

SEQ ID NO: 40651 - DNA, 20 bp, Artificial Sequence
  chemically synthesized
aagggtgggtctgccttccc

SEQ ID NO: 40652 - DNA, 20 bp, Artificial Sequence
  chemically synthesized
actgaaatattaatctcctt

SEQ ID NO: 40653 - DNA, 20 bp, Artificial Sequence
  chemically synthesized
ctcctttggtaacaccctca

SEQ ID NO: 40654 - DNA, 20 bp, Artificial Sequence
  chemically synthesized
acaccctcacagacacaccc

SEQ ID NO: 40655 - DNA, 20 bp, Artificial Sequence
  chemically synthesized
gatcattactttgcatcctt

SEQ ID NO: 40656 - DNA, 20 bp, Artificial Sequence
  chemically synthesized
ttgcatccttcagtccaatc

SEQ ID NO: 40657 - DNA, 20 bp, Artificial Sequence
  chemically synthesized
agtccaatcaagttgacact

SEQ ID NO: 40658 - DNA, 20 bp, Artificial Sequence
  chemically synthesized
acactcagtattaaccatca

SEQ ID NO: 40659 - DNA, 20 bp, Artificial Sequence
  chemically synthesized
catcacagtcactttctaat

SEQ ID NO: 40660 - DNA, 20 bp, Artificial Sequence
  chemically synthesized
atcacagtcactttctaatg

SEQ ID NO: 40661 - DNA, 20 bp, Artificial Sequence
  chemically synthesized
cagtcactttctaatgaggt

SEQ ID NO: 40662 - DNA, 20 bp, Artificial Sequence
  chemically synthesized
aggttggtttttttgttgtt

SEQ ID NO: 40663 - DNA, 20 bp, Artificial Sequence
  chemically synthesized
ttttgttgttgagttccttg

SEQ ID NO: 40664 - DNA, 20 bp, Artificial Sequence
  chemically synthesized
tccttgtagattctgtatat

SEQ ID NO: 40665 - DNA, 20 bp, Artificial Sequence
  chemically synthesized
ttagccttttgttgcattca

SEQ ID NO: 40666 - DNA, 20 bp, Artificial Sequence
  chemically synthesized
aatttttttttctcattctg

SEQ ID NO: 40667 - DNA, 20 bp, Artificial Sequence
  chemically synthesized
atttttttttctcattctgt

SEQ ID NO: 40668 - DNA, 20 bp, Artificial Sequence
  chemically synthesized
atccgtttactctgttgatt

SEQ ID NO: 40669 - DNA, 20 bp, Artificial Sequence
  chemically synthesized
tctgttgattcggtcttttg

SEQ ID NO: 40670 - DNA, 20 bp, Artificial Sequence
  chemically synthesized
tgattcggtcttttgcggtg

SEQ ID NO: 40671 - DNA, 20 bp, Artificial Sequence
  chemically synthesized
ttcggtcttttgcggtgcag

SEQ ID NO: 40672 - DNA, 20 bp, Artificial Sequence
  chemically synthesized
tttgcggtgcagaagcattt

SEQ ID NO: 40673 - DNA, 20 bp, Artificial Sequence
  chemically synthesized
agaagcattttagtttaatt

SEQ ID NO: 40674 - DNA, 20 bp, Artificial Sequence
  chemically synthesized
gtttttgtttttgttgtgtt

SEQ ID NO: 40675 - DNA, 20 bp, Artificial Sequence
  chemically synthesized
tttttgttgtgtttagtttt

SEQ ID NO: 40676 - DNA, 20 bp, Artificial Sequence
  chemically synthesized
ttttgttgtgtttagttttg

SEQ ID NO: 40677 - DNA, 20 bp, Artificial Sequence
  chemically synthesized
tgtgtttagttttgaggact

SEQ ID NO: 40678 - DNA, 20 bp, Artificial Sequence
  chemically synthesized
ttggtcataaattctttgcc

SEQ ID NO: 40679 - DNA, 20 bp, Artificial Sequence
  chemically synthesized
tggtcataaattctttgcct

SEQ ID NO: 40680 - DNA, 20 bp, Artificial Sequence
  chemically synthesized
tctaatttttaatcctcttt

SEQ ID NO: 40681 - DNA, 20 bp, Artificial Sequence
  chemically synthesized
taatttttaatcctctttta

SEQ ID NO: 40682 - DNA, 20 bp, Artificial Sequence
  chemically synthesized
tttacccccatttgacacat

SEQ ID NO: 40683 - DNA, 20 bp, Artificial Sequence
  chemically synthesized
atttgacacatgagctaatt

SEQ ID NO: 40684 - DNA, 20 bp, Artificial Sequence
  chemically synthesized
aattgagccttctgtctgtt

SEQ ID NO: 40685 - DNA, 20 bp, Artificial Sequence
  chemically synthesized
gagccttctgtctgttaagt

SEQ ID NO: 40686 - DNA, 20 bp, Artificial Sequence
  chemically synthesized
tgtctgttaagtaagttgac

SEQ ID NO: 40687 - DNA, 20 bp, Artificial Sequence
  chemically synthesized
gttaagtaagttgactagtt

SEQ ID NO: 40688 - DNA, 20 bp, Artificial Sequence
  chemically synthesized
taagttgactagttcagtgt

SEQ ID NO: 40689 - DNA, 20 bp, Artificial Sequence
  chemically synthesized
tttttgccatcataatgctt

SEQ ID NO: 40690 - DNA, 20 bp, Artificial Sequence
  chemically synthesized
tactctccttaattttcccc

SEQ ID NO: 40691 - DNA, 20 bp, Artificial Sequence
  chemically synthesized
actctccttaattttccccc

SEQ ID NO: 40692 - DNA, 20 bp, Artificial Sequence
  chemically synthesized
tccttaattttcccccagga

SEQ ID NO: 40693 - DNA, 20 bp, Artificial Sequence
  chemically synthesized
tttcccccaggatggttttc

SEQ ID NO: 40694 - DNA, 20 bp, Artificial Sequence
  chemically synthesized
ccaggatggttttctagatg

SEQ ID NO: 40695 - DNA, 20 bp, Artificial Sequence
  chemically synthesized
ttttctagatgtggacttgc

SEQ ID NO: 40696 - DNA, 20 bp, Artificial Sequence
  chemically synthesized
atgtggacttgctggatcca

SEQ ID NO: 40697 - DNA, 20 bp, Artificial Sequence
  chemically synthesized
ccaaatgtatccatatattg

SEQ ID NO: 40698 - DNA, 20 bp, Artificial Sequence
  chemically synthesized
attgtggctttgtgttttaa

SEQ ID NO: 40699 - DNA, 20 bp, Artificial Sequence
  chemically synthesized
tgtggctttgtgttttaata

SEQ ID NO: 40700 - DNA, 20 bp, Artificial Sequence
  chemically synthesized
gtggctttgtgttttaatag

SEQ ID NO: 40701 - DNA, 20 bp, Artificial Sequence
  chemically synthesized
gctttgtgttttaatagagg

SEQ ID NO: 40702 - DNA, 20 bp, Artificial Sequence
  chemically synthesized
ttgtgttttaatagaggtag

SEQ ID NO: 40703 - DNA, 20 bp, Artificial Sequence
  chemically synthesized
aatagaggtagcagcaatat

SEQ ID NO: 40704 - DNA, 20 bp, Artificial Sequence
  chemically synthesized
tagaggtagcagcaatatta

SEQ ID NO: 40705 - DNA, 20 bp, Artificial Sequence
  chemically synthesized
agaggtagcagcaatattag

SEQ ID NO: 40706 - DNA, 20 bp, Artificial Sequence
  chemically synthesized
aggtagcagcaatattagag

SEQ ID NO: 40707 - DNA, 20 bp, Artificial Sequence
  chemically synthesized
gtagcagcaatattagagga

SEQ ID NO: 40708 - DNA, 20 bp, Artificial Sequence
  chemically synthesized
caatattagaggagagaatt

SEQ ID NO: 40709 - DNA, 20 bp, Artificial Sequence
  chemically synthesized
aatattagaggagagaatta

SEQ ID NO: 40710 - DNA, 20 bp, Artificial Sequence
  chemically synthesized
agagaattaaggaacgattc

SEQ ID NO: 40711 - DNA, 20 bp, Artificial Sequence
  chemically synthesized
attaaggaacgattctagtg

SEQ ID NO: 40712 - DNA, 20 bp, Artificial Sequence
  chemically synthesized
aaggaacgattctagtgtag

SEQ ID NO: 40713 - DNA, 20 bp, Artificial Sequence
  chemically synthesized
aggaacgattctagtgtagc

SEQ ID NO: 40714 - DNA, 20 bp, Artificial Sequence
  chemically synthesized
cgattctagtgtagcaggac

SEQ ID NO: 40715 - DNA, 20 bp, Artificial Sequence
  chemically synthesized
aagctgcatacaaaacccct

SEQ ID NO: 40716 - DNA, 20 bp, Artificial Sequence
  chemically synthesized
tacaaaacccctcagacacc

SEQ ID NO: 40717 - DNA, 20 bp, Artificial Sequence
  chemically synthesized
acccctcagacaccgagtta

SEQ ID NO: 40718 - DNA, 20 bp, Artificial Sequence
  chemically synthesized
cctcagacaccgagttaaag

SEQ ID NO: 40719 - DNA, 20 bp, Artificial Sequence
  chemically synthesized
ctcagacaccgagttaaaga

SEQ ID NO: 40720 - DNA, 20 bp, Artificial Sequence
  chemically synthesized
agacaccgagttaaagaagg

SEQ ID NO: 40721 - DNA, 20 bp, Artificial Sequence
  chemically synthesized
gacaccgagttaaagaagga

SEQ ID NO: 40722 - DNA, 20 bp, Artificial Sequence
  chemically synthesized
acaccgagttaaagaaggaa

SEQ ID NO: 40723 - DNA, 20 bp, Artificial Sequence
  chemically synthesized
aaagaaggaagggctttatt

SEQ ID NO: 40724 - DNA, 20 bp, Artificial Sequence
  chemically synthesized
aaggaagggctttattcggc

SEQ ID NO: 40725 - DNA, 20 bp, Artificial Sequence
  chemically synthesized
aggaagggctttattcggct

SEQ ID NO: 40726 - DNA, 20 bp, Artificial Sequence
  chemically synthesized
gaagggctttattcggctgg

SEQ ID NO: 40727 - DNA, 20 bp, Artificial Sequence
  chemically synthesized
gctttattcggctgggagct

SEQ ID NO: 40728 - DNA, 20 bp, Artificial Sequence
  chemically synthesized
ctttattcggctgggagctt

SEQ ID NO: 40729 - DNA, 20 bp, Artificial Sequence
  chemically synthesized
attcggctgggagcttgggc

SEQ ID NO: 40730 - DNA, 20 bp, Artificial Sequence
  chemically synthesized
gactcacatctccaacaacc

SEQ ID NO: 40731 - DNA, 20 bp, Artificial Sequence
  chemically synthesized
atctccaacaaccaagctct

SEQ ID NO: 40732 - DNA, 20 bp, Artificial Sequence
  chemically synthesized
ctccaacaaccaagctctca

SEQ ID NO: 40733 - DNA, 20 bp, Artificial Sequence
  chemically synthesized
aacaaccaagctctcagagt

SEQ ID NO: 40734 - DNA, 20 bp, Artificial Sequence
  chemically synthesized
gagcaattcctgtccctttt

SEQ ID NO: 40735 - DNA, 20 bp, Artificial Sequence
  chemically synthesized
agcaattcctgtccctttta

SEQ ID NO: 40736 - DNA, 20 bp, Artificial Sequence
  chemically synthesized
gcaattcctgtcccttttaa

SEQ ID NO: 40737 - DNA, 20 bp, Artificial Sequence
  chemically synthesized
ttttaagggcttacaactct

SEQ ID NO: 40738 - DNA, 20 bp, Artificial Sequence
  chemically synthesized
tttaagggcttacaactcta

SEQ ID NO: 40739 - DNA, 20 bp, Artificial Sequence
  chemically synthesized
ttaagggcttacaactctaa

SEQ ID NO: 40740 - DNA, 20 bp, Artificial Sequence
  chemically synthesized
taagggcttacaactctaag

SEQ ID NO: 40741 - DNA, 20 bp, Artificial Sequence
  chemically synthesized
aagggcttacaactctaagg

SEQ ID NO: 40742 - DNA, 20 bp, Artificial Sequence
  chemically synthesized
actctaagggggtacatgac

SEQ ID NO: 40743 - DNA, 20 bp, Artificial Sequence
  chemically synthesized
ctctaagggggtacatgact

SEQ ID NO: 40744 - DNA, 20 bp, Artificial Sequence
  chemically synthesized
tctaagggggtacatgactg

SEQ ID NO: 40745 - DNA, 20 bp, Artificial Sequence
  chemically synthesized
ctaagggggtacatgactgg

SEQ ID NO: 40746 - DNA, 20 bp, Artificial Sequence
  chemically synthesized
tgactgggggctgcatgcac

SEQ ID NO: 40747 - DNA, 20 bp, Artificial Sequence
  chemically synthesized
gggctgcatgcactggtcat

SEQ ID NO: 40748 - DNA, 20 bp, Artificial Sequence
  chemically synthesized
gcatgcactggtcatcagaa

SEQ ID NO: 40749 - DNA, 20 bp, Artificial Sequence
  chemically synthesized
cactggtcatcagaatggaa

SEQ ID NO: 40750 - DNA, 20 bp, Artificial Sequence
  chemically synthesized
gtcatcagaatggaacagaa

SEQ ID NO: 40751 - DNA, 20 bp, Artificial Sequence
  chemically synthesized
tcatcagaatggaacagaac

SEQ ID NO: 40752 - DNA, 20 bp, Artificial Sequence
  chemically synthesized
cagaatggaacagaacagga

SEQ ID NO: 40753 - DNA, 20 bp, Artificial Sequence
  chemically synthesized
agaatggaacagaacaggac

SEQ ID NO: 40754 - DNA, 20 bp, Artificial Sequence
  chemically synthesized
gaatggaacagaacaggaca

SEQ ID NO: 40755 - DNA, 20 bp, Artificial Sequence
  chemically synthesized
tttcacactgcttttccata

SEQ ID NO: 40756 - DNA, 20 bp, Artificial Sequence
  chemically synthesized
ctgcttttccatacagtgtc

SEQ ID NO: 40757 - DNA, 20 bp, Artificial Sequence
  chemically synthesized
catacagtgtctggaatcta

SEQ ID NO: 40758 - DNA, 20 bp, Artificial Sequence
  chemically synthesized
gaatctatagataacataac

SEQ ID NO: 40759 - DNA, 20 bp, Artificial Sequence
  chemically synthesized
ctatagataacataactggc

SEQ ID NO: 40760 - DNA, 20 bp, Artificial Sequence
  chemically synthesized
tatagataacataactggcc

SEQ ID NO: 40761 - DNA, 20 bp, Artificial Sequence
  chemically synthesized
gataacataactggccaggt

SEQ ID NO: 40762 - DNA, 20 bp, Artificial Sequence
  chemically synthesized
ataacataactggccaggtc

SEQ ID NO: 40763 - DNA, 20 bp, Artificial Sequence
  chemically synthesized
taacataactggccaggtca

SEQ ID NO: 40764 - DNA, 20 bp, Artificial Sequence
  chemically synthesized
aacataactggccaggtcag

SEQ ID NO: 40765 - DNA, 20 bp, Artificial Sequence
  chemically synthesized
gtcaggggtctatctttaac

SEQ ID NO: 40766 - DNA, 20 bp, Artificial Sequence
  chemically synthesized
tcaggggtctatctttaacc

SEQ ID NO: 40767 - DNA, 20 bp, Artificial Sequence
  chemically synthesized
ggtctatctttaaccaggcc

SEQ ID NO: 40768 - DNA, 20 bp, Artificial Sequence
  chemically synthesized
gtctatctttaaccaggccc

SEQ ID NO: 40769 - DNA, 20 bp, Artificial Sequence
  chemically synthesized
ctttaaccaggcccaggatg

SEQ ID NO: 40770 - DNA, 20 bp, Artificial Sequence
  chemically synthesized
ccaggcccaggatgtggtct

SEQ ID NO: 40771 - DNA, 20 bp, Artificial Sequence
  chemically synthesized
caggcccaggatgtggtctc

SEQ ID NO: 40772 - DNA, 20 bp, Artificial Sequence
  chemically synthesized
ggtctcaggctgtttgcctg

SEQ ID NO: 40773 - DNA, 20 bp, Artificial Sequence
  chemically synthesized
tggatttcatttctgccttt

SEQ ID NO: 40774 - DNA, 20 bp, Artificial Sequence
  chemically synthesized
gtttttacttcttctttctt

SEQ ID NO: 40775 - DNA, 20 bp, Artificial Sequence
  chemically synthesized
ttttacttcttctttctttg

SEQ ID NO: 40776 - DNA, 20 bp, Artificial Sequence
  chemically synthesized
tttacttcttctttctttgg

SEQ ID NO: 40777 - DNA, 20 bp, Artificial Sequence
  chemically synthesized
acttcttctttctttggagg

SEQ ID NO: 40778 - DNA, 20 bp, Artificial Sequence
  chemically synthesized
ctttctttggaggcagaaat

SEQ ID NO: 40779 - DNA, 20 bp, Artificial Sequence
  chemically synthesized
tttctttggaggcagaaatt

SEQ ID NO: 40780 - DNA, 20 bp, Artificial Sequence
  chemically synthesized
attgggcataaaacaatatg

SEQ ID NO: 40781 - DNA, 20 bp, Artificial Sequence
  chemically synthesized
ttgggcataaaacaatatga

SEQ ID NO: 40782 - DNA, 20 bp, Artificial Sequence
  chemically synthesized
tgggcataaaacaatatgaa

SEQ ID NO: 40783 - DNA, 20 bp, Artificial Sequence
  chemically synthesized
gcataaaacaatatgaaggg

SEQ ID NO: 40784 - DNA, 20 bp, Artificial Sequence
  chemically synthesized
agggtggtctcctcccttac

SEQ ID NO: 40785 - DNA, 20 bp, Artificial Sequence
  chemically synthesized
gggtggtctcctcccttact

SEQ ID NO: 40786 - DNA, 20 bp, Artificial Sequence
  chemically synthesized
tggtctcctcccttactagg

SEQ ID NO: 40787 - DNA, 20 bp, Artificial Sequence
  chemically synthesized
gtctcctcccttactaggaa

SEQ ID NO: 40788 - DNA, 20 bp, Artificial Sequence
  chemically synthesized
ctcctcccttactaggaaga

SEQ ID NO: 40789 - DNA, 20 bp, Artificial Sequence
  chemically synthesized
ggaagagagaaataccatgt

SEQ ID NO: 40790 - DNA, 20 bp, Artificial Sequence
  chemically synthesized
gaaatacgtatttgtgttat

SEQ ID NO: 40791 - DNA, 20 bp, Artificial Sequence
  chemically synthesized
tgtgttattggatttgacat

SEQ ID NO: 40792 - DNA, 20 bp, Artificial Sequence
  chemically synthesized
gtgttattggatttgacatc

SEQ ID NO: 40793 - DNA, 20 bp, Artificial Sequence
  chemically synthesized
tgttattggatttgacatcg

SEQ ID NO: 40794 - DNA, 20 bp, Artificial Sequence
  chemically synthesized
attggatttgacatcggggt

SEQ ID NO: 40795 - DNA, 20 bp, Artificial Sequence
  chemically synthesized
tttgacatcggggttggacc

SEQ ID NO: 40796 - DNA, 20 bp, Artificial Sequence
  chemically synthesized
catcttctatgaacatctat

SEQ ID NO: 40797 - DNA, 20 bp, Artificial Sequence
  chemically synthesized
aagcacgttctccttatcaa

SEQ ID NO: 40798 - DNA, 20 bp, Artificial Sequence
  chemically synthesized
agcacgttctccttatcaaa

SEQ ID NO: 40799 - DNA, 20 bp, Artificial Sequence
  chemically synthesized
ttatcaaaaggtactttgct

SEQ ID NO: 40800 - DNA, 20 bp, Artificial Sequence
  chemically synthesized
tactttgcttggtgctttaa

SEQ ID NO: 40801 - DNA, 20 bp, Artificial Sequence
  chemically synthesized
ttaaaagataaatgactatg

SEQ ID NO: 40802 - DNA, 20 bp, Artificial Sequence
  chemically synthesized
agataaatgactatgtagct

SEQ ID NO: 40803 - DNA, 20 bp, Artificial Sequence
  chemically synthesized
gataaatgactatgtagctt

SEQ ID NO: 40804 - DNA, 20 bp, Artificial Sequence
  chemically synthesized
taaatgactatgtagcttag

SEQ ID NO: 40805 - DNA, 20 bp, Artificial Sequence
  chemically synthesized
ttcttcataattgaaaacca

SEQ ID NO: 40806 - DNA, 20 bp, Artificial Sequence
  chemically synthesized
ttcataattgaaaaccacag

SEQ ID NO: 40807 - DNA, 20 bp, Artificial Sequence
  chemically synthesized
gctgttatttgaacatacct

SEQ ID NO: 40808 - DNA, 20 bp, Artificial Sequence
  chemically synthesized
gaacatacctgagccccttc

SEQ ID NO: 40809 - DNA, 20 bp, Artificial Sequence
  chemically synthesized
gagccccttctggaccactg

SEQ ID NO: 40810 - DNA, 20 bp, Artificial Sequence
  chemically synthesized
agccccttctggaccactgt

SEQ ID NO: 40811 - DNA, 20 bp, Artificial Sequence
  chemically synthesized
ccccttctggaccactgtag

SEQ ID NO: 40812 - DNA, 20 bp, Artificial Sequence
  chemically synthesized
cttctggaccactgtaggag

SEQ ID NO: 40813 - DNA, 20 bp, Artificial Sequence
  chemically synthesized
ttctggaccactgtaggaga

SEQ ID NO: 40814 - DNA, 20 bp, Artificial Sequence
  chemically synthesized
ctggaccactgtaggagaag

SEQ ID NO: 40815 - DNA, 20 bp, Artificial Sequence
  chemically synthesized
tggaccactgtaggagaagg

SEQ ID NO: 40816 - DNA, 20 bp, Artificial Sequence
  chemically synthesized
accactgtaggagaaggagg

SEQ ID NO: 40817 - DNA, 20 bp, Artificial Sequence
  chemically synthesized
cactgtaggagaaggaggaa

SEQ ID NO: 40818 - DNA, 20 bp, Artificial Sequence
  chemically synthesized
ctgtaggagaaggaggaaga

SEQ ID NO: 40819 - DNA, 20 bp, Artificial Sequence
  chemically synthesized
tgtaggagaaggaggaagag

SEQ ID NO: 40820 - DNA, 20 bp, Artificial Sequence
  chemically synthesized
agaaggaggaagagaggtga

SEQ ID NO: 40821 - DNA, 20 bp, Artificial Sequence
  chemically synthesized
tgaaagtgatttctgctgct

SEQ ID NO: 40822 - DNA, 20 bp, Artificial Sequence
  chemically synthesized
gaaagtgatttctgctgctg

SEQ ID NO: 40823 - DNA, 20 bp, Artificial Sequence
  chemically synthesized
aaagtgatttctgctgctga

SEQ ID NO: 40824 - DNA, 20 bp, Artificial Sequence
  chemically synthesized
gagggcatgtatgatgacaa

SEQ ID NO: 40825 - DNA, 20 bp, Artificial Sequence
  chemically synthesized
agggcatgtatgatgacaat

SEQ ID NO: 40826 - DNA, 20 bp, Artificial Sequence
  chemically synthesized
gtcctaactttgacactaca

SEQ ID NO: 40827 - DNA, 20 bp, Artificial Sequence
  chemically synthesized
ctttgacactacaaagtgac

SEQ ID NO: 40828 - DNA, 20 bp, Artificial Sequence
  chemically synthesized
ttgacactacaaagtgactg

SEQ ID NO: 40829 - DNA, 20 bp, Artificial Sequence
  chemically synthesized
ctacaaagtgactggagctt

SEQ ID NO: 40830 - DNA, 20 bp, Artificial Sequence
  chemically synthesized
tacaaagtgactggagcttt

SEQ ID NO: 40831 - DNA, 20 bp, Artificial Sequence
  chemically synthesized
aagtgactggagctttaggc

SEQ ID NO: 40832 - DNA, 20 bp, Artificial Sequence
  chemically synthesized
tgactggagctttaggcaag

SEQ ID NO: 40833 - DNA, 20 bp, Artificial Sequence
  chemically synthesized
agttactccaattgtctttt

SEQ ID NO: 40834 - DNA, 20 bp, Artificial Sequence
  chemically synthesized
ttttcagactctttcttttt

SEQ ID NO: 40835 - DNA, 20 bp, Artificial Sequence
  chemically synthesized
tttcagactctttctttttg

SEQ ID NO: 40836 - DNA, 20 bp, Artificial Sequence
  chemically synthesized
tgaggtatttgacctctttg

SEQ ID NO: 40837 - DNA, 20 bp, Artificial Sequence
  chemically synthesized
atttgacctctttgcggcat

SEQ ID NO: 40838 - DNA, 20 bp, Artificial Sequence
  chemically synthesized
gctgctatttcacatgcacc

SEQ ID NO: 40839 - DNA, 20 bp, Artificial Sequence
  chemically synthesized
gctatttcacatgcacctag

SEQ ID NO: 40840 - DNA, 20 bp, Artificial Sequence
  chemically synthesized
ctatttcacatgcacctaga

SEQ ID NO: 40841 - DNA, 20 bp, Artificial Sequence
  chemically synthesized
tatttcacatgcacctagaa

SEQ ID NO: 40842 - DNA, 20 bp, Artificial Sequence
  chemically synthesized
aagggactttaaaacatgca

SEQ ID NO: 40843 - DNA, 20 bp, Artificial Sequence
  chemically synthesized
aacatgcacagaattgaaca

SEQ ID NO: 40844 - DNA, 20 bp, Artificial Sequence
  chemically synthesized
atgcacagaattgaacaaag

SEQ ID NO: 40845 - DNA, 20 bp, Artificial Sequence
  chemically synthesized
acaaagcagtaaccattcgt

SEQ ID NO: 40846 - DNA, 20 bp, Artificial Sequence
  chemically synthesized
tcaaatactattatttttga

SEQ ID NO: 40847 - DNA, 20 bp, Artificial Sequence
  chemically synthesized
caaatactattatttttgaa

SEQ ID NO: 40848 - DNA, 20 bp, Artificial Sequence
  chemically synthesized
ttgaaaggtaaataaatcct

SEQ ID NO: 40849 - DNA, 20 bp, Artificial Sequence
  chemically synthesized
tgaaaggtaaataaatcctt

SEQ ID NO: 40850 - DNA, 20 bp, Artificial Sequence
  chemically synthesized
ggtaaataaatccttgggct

SEQ ID NO: 40851 - DNA, 20 bp, Artificial Sequence
  chemically synthesized
aaataaatccttgggcttag

SEQ ID NO: 40852 - DNA, 20 bp, Artificial Sequence
  chemically synthesized
attgctaacctgaatgataa

SEQ ID NO: 40853 - DNA, 20 bp, Artificial Sequence
  chemically synthesized
agaaacttttttccttttaa

SEQ ID NO: 40854 - DNA, 20 bp, Artificial Sequence
  chemically synthesized
acttttttccttttaacagt

SEQ ID NO: 40855 - DNA, 20 bp, Artificial Sequence
  chemically synthesized
ttttttccttttaacagttg

SEQ ID NO: 40856 - DNA, 20 bp, Artificial Sequence
  chemically synthesized
tttttccttttaacagttgg

SEQ ID NO: 40857 - DNA, 20 bp, Artificial Sequence
  chemically synthesized
gaggcatctatactgtgatt

SEQ ID NO: 40858 - DNA, 20 bp, Artificial Sequence
  chemically synthesized
tctatactgtgattcagaca

SEQ ID NO: 40859 - DNA, 20 bp, Artificial Sequence
  chemically synthesized
ctatactgtgattcagacaa

SEQ ID NO: 40860 - DNA, 20 bp, Artificial Sequence
  chemically synthesized
tcagacaaaggccaaaacaa

SEQ ID NO: 40861 - DNA, 20 bp, Artificial Sequence
  chemically synthesized
gacaaaggccaaaacaacag

SEQ ID NO: 40862 - DNA, 20 bp, Artificial Sequence
  chemically synthesized
ccaaaacaacagcagatgaa

SEQ ID NO: 40863 - DNA, 20 bp, Artificial Sequence
  chemically synthesized
caaaacaacagcagatgaat

SEQ ID NO: 40864 - DNA, 20 bp, Artificial Sequence
  chemically synthesized
aaaacaacagcagatgaatg

SEQ ID NO: 40865 - DNA, 20 bp, Artificial Sequence
  chemically synthesized
aacaacagcagatgaatggg

SEQ ID NO: 40866 - DNA, 20 bp, Artificial Sequence
  chemically synthesized
caacagcagatgaatgggga

SEQ ID NO: 40867 - DNA, 20 bp, Artificial Sequence
  chemically synthesized
gggagagaactattttctga

SEQ ID NO: 40868 - DNA, 20 bp, Artificial Sequence
  chemically synthesized
ggagagaactattttctgat

SEQ ID NO: 40869 - DNA, 20 bp, Artificial Sequence
  chemically synthesized
ttctgataggtccatatttt

SEQ ID NO: 40870 - DNA, 20 bp, Artificial Sequence
  chemically synthesized
catattttgagcataatatg

SEQ ID NO: 40871 - DNA, 20 bp, Artificial Sequence
  chemically synthesized
ttgagcataatatgaagact

SEQ ID NO: 40872 - DNA, 20 bp, Artificial Sequence
  chemically synthesized
tgagcataatatgaagactc

SEQ ID NO: 40873 - DNA, 20 bp, Artificial Sequence
  chemically synthesized
gcataatatgaagactcagg

SEQ ID NO: 40874 - DNA, 20 bp, Artificial Sequence
  chemically synthesized
atatgaagactcaggtggaa

SEQ ID NO: 40875 - DNA, 20 bp, Artificial Sequence
  chemically synthesized
gaacctgtaaatgatgctgt

SEQ ID NO: 40876 - DNA, 20 bp, Artificial Sequence
  chemically synthesized
cctgtaaatgatgctgtcag

SEQ ID NO: 40877 - DNA, 20 bp, Artificial Sequence
  chemically synthesized
tgtaaatgatgctgtcagaa

SEQ ID NO: 40878 - DNA, 20 bp, Artificial Sequence
  chemically synthesized
aaatgatgctgtcagaagag

SEQ ID NO: 40879 - DNA, 20 bp, Artificial Sequence
  chemically synthesized
tgatgctgtcagaagagcag

SEQ ID NO: 40880 - DNA, 20 bp, Artificial Sequence
  chemically synthesized
gagcagtggacgcaatgaat

SEQ ID NO: 40881 - DNA, 20 bp, Artificial Sequence
  chemically synthesized
gtggacgcaatgaataagca

SEQ ID NO: 40882 - DNA, 20 bp, Artificial Sequence
  chemically synthesized
caatgaataagcatggctgc

SEQ ID NO: 40883 - DNA, 20 bp, Artificial Sequence
  chemically synthesized
acaggttcacactgttccac

SEQ ID NO: 40884 - DNA, 20 bp, Artificial Sequence
  chemically synthesized
gctgttgttttggcctttgt

SEQ ID NO: 40885 - DNA, 20 bp, Artificial Sequence
  chemically synthesized
gcaatttgtttaaagtaata

SEQ ID NO: 40886 - DNA, 20 bp, Artificial Sequence
  chemically synthesized
taaagtaataagggatggaa

SEQ ID NO: 40887 - DNA, 20 bp, Artificial Sequence
  chemically synthesized
cagatttttaaattagcatt

SEQ ID NO: 40888 - DNA, 20 bp, Artificial Sequence
  chemically synthesized
atttaggatccactaagccc

SEQ ID NO: 40889 - DNA, 20 bp, Artificial Sequence
  chemically synthesized
catattgttaagggacacca

SEQ ID NO: 40890 - DNA, 20 bp, Artificial Sequence
  chemically synthesized
ggtcaaatacctcaaaaaga

SEQ ID NO: 40891 - DNA, 20 bp, Artificial Sequence
  chemically synthesized
aaagagtctgaaaagacaat

SEQ ID NO: 40892 - DNA, 20 bp, Artificial Sequence
  chemically synthesized
cccccagtcatgtaccccct

SEQ ID NO: 40893 - DNA, 20 bp, Artificial Sequence
  chemically synthesized
tgtaagcccttaaaagggac

SEQ ID NO: 40894 - DNA, 20 bp, Artificial Sequence
  chemically synthesized
agagcttggttgttggagat

SEQ ID NO: 40895 - DNA, 20 bp, Artificial Sequence
  chemically synthesized
agtcttgcccaagctcccag

SEQ ID NO: 40896 - DNA, 20 bp, Artificial Sequence
  chemically synthesized
cttctttaactcggtgtctg

SEQ ID NO: 40897 - DNA, 20 bp, Artificial Sequence
  chemically synthesized
tgcagcttgtcctgctacac

SEQ ID NO: 40898 - DNA, 20 bp, Artificial Sequence
  chemically synthesized
aaaacacaaagccacaatat

SEQ ID NO: 40899 - DNA, 20 bp, Artificial Sequence
  chemically synthesized
atttggaaaatatgcacact

SEQ ID NO: 40900 - DNA, 20 bp, Artificial Sequence
  chemically synthesized
catcctgggggaaaattaag

SEQ ID NO: 40901 - DNA, 20 bp, Artificial Sequence
  chemically synthesized
aaaattaaggagagtatgaa

SEQ ID NO: 40902 - DNA, 20 bp, Artificial Sequence
  chemically synthesized
aattagctcatgtgtcaaat

SEQ ID NO: 40903 - DNA, 20 bp, Artificial Sequence
  chemically synthesized
gggaaagacaggctctaaaa

SEQ ID NO: 40904 - DNA, 20 bp, Artificial Sequence
  chemically synthesized
aattagatgtggcctaggca

SEQ ID NO: 40905 - DNA, 20 bp, Artificial Sequence
  chemically synthesized
tgcttctgcaccgcaaaaga

SEQ ID NO: 40906 - DNA, 20 bp, Artificial Sequence
  chemically synthesized
accgcaaaagaccgaatcaa

SEQ ID NO: 40907 - DNA, 20 bp, Artificial Sequence
  chemically synthesized
agaccgaatcaacagagtaa

SEQ ID NO: 40908 - DNA, 20 bp, Artificial Sequence
  chemically synthesized
cagagtaaacggataaccta

SEQ ID NO: 40909 - DNA, 20 bp, Artificial Sequence
  chemically synthesized
agaaaaaaaaattgcaaact

SEQ ID NO: 40910 - DNA, 20 bp, Artificial Sequence
  chemically synthesized
tgcaacaaaaggctaatata

SEQ ID NO: 40911 - DNA, 20 bp, Artificial Sequence
  chemically synthesized
agtgactgtgatggttaata

SEQ ID NO: 40912 - DNA, 20 bp, Artificial Sequence
  chemically synthesized
gtgtcaacttgattggactg

SEQ ID NO: 40913 - DNA, 20 bp, Artificial Sequence
  chemically synthesized
aaggatgcaaagtaatgatc

SEQ ID NO: 40914 - DNA, 20 bp, Artificial Sequence
  chemically synthesized
atgatcttgggtgtgtctgt

SEQ ID NO: 40915 - DNA, 20 bp, Artificial Sequence
  chemically synthesized
aaggcagacccacccttaat

SEQ ID NO: 40916 - DNA, 20 bp, Artificial Sequence
  chemically synthesized
taatcagttgccagcacagc

SEQ ID NO: 40917 - DNA, 20 bp, Artificial Sequence
  chemically synthesized
gcctacatttttctcccatg

SEQ ID NO: 40918 - DNA, 20 bp, Artificial Sequence
  chemically synthesized
ttttgggaccttgtgaacat

SEQ ID NO: 40919 - DNA, 20 bp, Artificial Sequence
  chemically synthesized
ctaatacagattttggtacc

SEQ ID NO: 40920 - DNA, 20 bp, Artificial Sequence
  chemically synthesized
caggagtggttctagaggaa

SEQ ID NO: 40921 - DNA, 20 bp, Artificial Sequence
  chemically synthesized
ttctagaggaacagaatatt

SEQ ID NO: 40922 - DNA, 20 bp, Artificial Sequence
  chemically synthesized
gaggaacagaatattaagga

SEQ ID NO: 40923 - DNA, 20 bp, Artificial Sequence
  chemically synthesized
tggagttctttcattggttt

SEQ ID NO: 40924 - DNA, 20 bp, Artificial Sequence
  chemically synthesized
ttcattggttttggggtttc

SEQ ID NO: 40925 - DNA, 20 bp, Artificial Sequence
  chemically synthesized
tccttggcatcaattgttta

SEQ ID NO: 40926 - DNA, 20 bp, Artificial Sequence
  chemically synthesized
ttcaacgcttgtgagaggca

SEQ ID NO: 40927 - DNA, 20 bp, Artificial Sequence
  chemically synthesized
aatacttttgactatatgtg

SEQ ID NO: 40928 - DNA, 20 bp, Artificial Sequence
  chemically synthesized
tgaaagaaaatgatgaactc

SEQ ID NO: 40929 - DNA, 20 bp, Artificial Sequence
  chemically synthesized
agcaagaagtagcaaacaca

SEQ ID NO: 40930 - DNA, 20 bp, Artificial Sequence
  chemically synthesized
gatgagacatttgtgggaca

SEQ ID NO: 40931 - DNA, 20 bp, Artificial Sequence
  chemically synthesized
tctacctcagtaaaatttat

SEQ ID NO: 40932 - DNA, 20 bp, Artificial Sequence
  chemically synthesized
gagatattccttctaaagtg

SEQ ID NO: 40933 - DNA, 20 bp, Artificial Sequence
  chemically synthesized
acaacgcctagtgggcctat

SEQ ID NO: 40934 - DNA, 20 bp, Artificial Sequence
  chemically synthesized
ggaggcaacatattcctgat

SEQ ID NO: 40935 - DNA, 20 bp, Artificial Sequence
  chemically synthesized
gtgttactctggcccattta

SEQ ID NO: 40936 - DNA, 20 bp, Artificial Sequence
  chemically synthesized
gatccaaaaggctgccagtt

SEQ ID NO: 40937 - DNA, 20 bp, Artificial Sequence
  chemically synthesized
aaaaggctgccagttttgag

SEQ ID NO: 40938 - DNA, 20 bp, Artificial Sequence
  chemically synthesized
ttgaggtgtcagtgccagat

SEQ ID NO: 40939 - DNA, 20 bp, Artificial Sequence
  chemically synthesized
tgtttggagcatttggcagg

SEQ ID NO: 40940 - DNA, 20 bp, Artificial Sequence
  chemically synthesized
tgaatcacagcggaggcctc

SEQ ID NO: 40941 - DNA, 20 bp, Artificial Sequence
  chemically synthesized
tggaaacgaaatatttgact

SEQ ID NO: 40942 - DNA, 20 bp, Artificial Sequence
  chemically synthesized
cctgaactgcctatcatgaa

SEQ ID NO: 40943 - DNA, 20 bp, Artificial Sequence
  chemically synthesized
actgcaccgatggtctcatg

SEQ ID NO: 40944 - DNA, 20 bp, Artificial Sequence
  chemically synthesized
gaaatttggggaagaggtat

SEQ ID NO: 40945 - DNA, 20 bp, Artificial Sequence
  chemically synthesized
caaagatattttcatcccat

SEQ ID NO: 40946 - DNA, 20 bp, Artificial Sequence
  chemically synthesized
tcccatgtgagtgctcacca

SEQ ID NO: 40947 - DNA, 20 bp, Artificial Sequence
  chemically synthesized
aatgggtgacctcagcagaa

SEQ ID NO: 40948 - DNA, 20 bp, Artificial Sequence
  chemically synthesized
aagaggattttaataatcaa

SEQ ID NO: 40949 - DNA, 20 bp, Artificial Sequence
  chemically synthesized
gattttaataatcaagtgga

SEQ ID NO: 40950 - DNA, 20 bp, Artificial Sequence
  chemically synthesized
aacaaagtggccacagttgc

SEQ ID NO: 40951 - DNA, 20 bp, Artificial Sequence
  chemically synthesized
cttgatatggcaccattcct

SEQ ID NO: 40952 - DNA, 20 bp, Artificial Sequence
  chemically synthesized
gggcagaggcttgtcctcac

SEQ ID NO: 40953 - DNA, 20 bp, Artificial Sequence
  chemically synthesized
cactggaatagacacttact

SEQ ID NO: 40954 - DNA, 20 bp, Artificial Sequence
  chemically synthesized
aatagacacttactctggat

SEQ ID NO: 40955 - DNA, 20 bp, Artificial Sequence
  chemically synthesized
tatgccaagactaccatcca

SEQ ID NO: 40956 - DNA, 20 bp, Artificial Sequence
  chemically synthesized
gactaccatccatggaatca

SEQ ID NO: 40957 - DNA, 20 bp, Artificial Sequence
  chemically synthesized
tgacagtgggctcatgctca

SEQ ID NO: 40958 - DNA, 20 bp, Artificial Sequence
  chemically synthesized
ctatcatcctgaagcagctt

SEQ ID NO: 40959 - DNA, 20 bp, Artificial Sequence
  chemically synthesized
tccagaaggctgtgtatgct

SEQ ID NO: 40960 - DNA, 20 bp, Artificial Sequence
  chemically synthesized
ggtactgtttctcccataga

SEQ ID NO: 40961 - DNA, 20 bp, Artificial Sequence
  chemically synthesized
ttctcccatagacaggattc

SEQ ID NO: 40962 - DNA, 20 bp, Artificial Sequence
  chemically synthesized
tagacaggattcacgggtcc

SEQ ID NO: 40963 - DNA, 20 bp, Artificial Sequence
  chemically synthesized
attcacgggtccaggaatca

SEQ ID NO: 40964 - DNA, 20 bp, Artificial Sequence
  chemically synthesized
ttaagtcaacaggctaagaa

SEQ ID NO: 40965 - DNA, 20 bp, Artificial Sequence
  chemically synthesized
gaggtaaggaagcgtatgca

SEQ ID NO: 40966 - DNA, 20 bp, Artificial Sequence
  chemically synthesized
atggaatataggagatccat

SEQ ID NO: 40967 - DNA, 20 bp, Artificial Sequence
  chemically synthesized
ctcttagttttaccatgtcc

SEQ ID NO: 40968 - DNA, 20 bp, Artificial Sequence
  chemically synthesized
gcaggactacaaataaaggt

SEQ ID NO: 40969 - DNA, 20 bp, Artificial Sequence
  chemically synthesized
aggtgcttgctgagggcaaa

SEQ ID NO: 40970 - DNA, 20 bp, Artificial Sequence
  chemically synthesized
tgctgagggcaaagggaata

SEQ ID NO: 40971 - DNA, 20 bp, Artificial Sequence
  chemically synthesized
atacaaggactgtaattgtc

SEQ ID NO: 40972 - DNA, 20 bp, Artificial Sequence
  chemically synthesized
tatgtaatagcatttgcaat

SEQ ID NO: 40973 - DNA, 20 bp, Artificial Sequence
  chemically synthesized
ggtgcattttcaattgcacg

SEQ ID NO: 40974 - DNA, 20 bp, Artificial Sequence
  chemically synthesized
gaagataatgtatgacctca

SEQ ID NO: 40975 - DNA, 20 bp, Artificial Sequence
  chemically synthesized
tggacttgtgatggttaata

SEQ ID NO: 40976 - DNA, 20 bp, Artificial Sequence
  chemically synthesized
aatactgagtgtcaacttga

SEQ ID NO: 40977 - DNA, 20 bp, Artificial Sequence
  chemically synthesized
aagtgtgcaaagtattgatc

SEQ ID NO: 40978 - DNA, 20 bp, Artificial Sequence
  chemically synthesized
ttgatcctgagtgtgtctgt

SEQ ID NO: 40979 - DNA, 20 bp, Artificial Sequence
  chemically synthesized
aaggcagacccacccttaat

SEQ ID NO: 40980 - DNA, 20 bp, Artificial Sequence
  chemically synthesized
taatcagttgccagtgtggc

SEQ ID NO: 40981 - DNA, 20 bp, Artificial Sequence
  chemically synthesized
gcctacatctttctcccatg

SEQ ID NO: 40982 - DNA, 20 bp, Artificial Sequence
  chemically synthesized
ttcaacatcactaataatca

SEQ ID NO: 40983 - DNA, 20 bp, Artificial Sequence
  chemically synthesized
tgatacctccttatgccagt

SEQ ID NO: 40984 - DNA, 20 bp, Artificial Sequence
  chemically synthesized
caaaaacagcagatgttggt

SEQ ID NO: 40985 - DNA, 20 bp, Artificial Sequence
  chemically synthesized
aatgcttatacactgttggt

SEQ ID NO: 40986 - DNA, 20 bp, Artificial Sequence
  chemically synthesized
tcaatcctgcaatcccacta

SEQ ID NO: 40987 - DNA, 20 bp, Artificial Sequence
  chemically synthesized
tgttcccaatagcaaagata

SEQ ID NO: 40988 - DNA, 20 bp, Artificial Sequence
  chemically synthesized
aaatgtctaccaatggacga

SEQ ID NO: 40989 - DNA, 20 bp, Artificial Sequence
  chemically synthesized
tatattactcagccataaaa

SEQ ID NO: 40990 - DNA, 20 bp, Artificial Sequence
  chemically synthesized
agccaagtgggagctaaacg

SEQ ID NO: 40991 - DNA, 20 bp, Artificial Sequence
  chemically synthesized
gatgagtaagcatagacata

SEQ ID NO: 40992 - DNA, 20 bp, Artificial Sequence
  chemically synthesized
ttgagactagagaaaggtgg

SEQ ID NO: 40993 - DNA, 20 bp, Artificial Sequence
  chemically synthesized
ctagagaaaggtgggaggat

SEQ ID NO: 40994 - DNA, 20 bp, Artificial Sequence
  chemically synthesized
atggtgaggactgaaaaact

SEQ ID NO: 40995 - DNA, 20 bp, Artificial Sequence
  chemically synthesized
gaggactgaaaaactacgga

SEQ ID NO: 40996 - DNA, 20 bp, Artificial Sequence
  chemically synthesized
gtccccacccaaatctcatc

SEQ ID NO: 40997 - DNA, 20 bp, Artificial Sequence
  chemically synthesized
taatcctcacgtgttgtggg

SEQ ID NO: 40998 - DNA, 20 bp, Artificial Sequence
  chemically synthesized
agggatttggagggaggtaa

SEQ ID NO: 40999 - DNA, 20 bp, Artificial Sequence
  chemically synthesized
ctcatgctcttctcgtgata

SEQ ID NO: 41000 - DNA, 20 bp, Artificial Sequence
  chemically synthesized
gcaagcaaaatatcacttaa

SEQ ID NO: 41001 - DNA, 20 bp, Artificial Sequence
  chemically synthesized
tcacttaatggggtaattaa

SEQ ID NO: 41002 - DNA, 20 bp, Artificial Sequence
  chemically synthesized
agggtgaagaaattgggcaa

SEQ ID NO: 41003 - DNA, 20 bp, Artificial Sequence
  chemically synthesized
ggcaaatggatgtcatgagg

SEQ ID NO: 41004 - DNA, 20 bp, Artificial Sequence
  chemically synthesized
tcagagcccaggccctaagc

SEQ ID NO: 41005 - DNA, 20 bp, Artificial Sequence
  chemically synthesized
gcccaggccctaagctggag

SEQ ID NO: 41006 - DNA, 20 bp, Artificial Sequence
  chemically synthesized
tggagtagagtgtgcaagga

SEQ ID NO: 41007 - DNA, 20 bp, Artificial Sequence
  chemically synthesized
agtgtgcaaggaaagagtaa

SEQ ID NO: 41008 - DNA, 20 bp, Artificial Sequence
  chemically synthesized
gaaagagtaataggattgaa

SEQ ID NO: 41009 - DNA, 20 bp, Artificial Sequence
  chemically synthesized
ccaggtaggaggacataggg

SEQ ID NO: 41010 - DNA, 20 bp, Artificial Sequence
  chemically synthesized
agacctccagtaaacttagg

SEQ ID NO: 41011 - DNA, 20 bp, Artificial Sequence
  chemically synthesized
actaaataataatcacatgt

SEQ ID NO: 41012 - DNA, 20 bp, Artificial Sequence
  chemically synthesized
ttgttcatgagctagagcaa

SEQ ID NO: 41013 - DNA, 20 bp, Artificial Sequence
  chemically synthesized
atgctattatatggtaccaa

SEQ ID NO: 41014 - DNA, 20 bp, Artificial Sequence
  chemically synthesized
aaaatgcaagcaattttcat

SEQ ID NO: 41015 - DNA, 20 bp, Artificial Sequence
  chemically synthesized
tacacaagctaattgtcctt

SEQ ID NO: 41016 - DNA, 20 bp, Artificial Sequence
  chemically synthesized
aagtttaaactgtcattgag

SEQ ID NO: 41017 - DNA, 20 bp, Artificial Sequence
  chemically synthesized
cagatgttatgtgatgagga

SEQ ID NO: 41018 - DNA, 20 bp, Artificial Sequence
  chemically synthesized
agaacttttctttaaagtgt

SEQ ID NO: 41019 - DNA, 20 bp, Artificial Sequence
  chemically synthesized
acaaaaatgcaaaatttcca

SEQ ID NO: 41020 - DNA, 20 bp, Artificial Sequence
  chemically synthesized
ttcatcttcatcttttccag

SEQ ID NO: 41021 - DNA, 20 bp, Artificial Sequence
  chemically synthesized
gatagtcccccatatagcct

SEQ ID NO: 41022 - DNA, 20 bp, Artificial Sequence
  chemically synthesized
gtagaaaatcccacataaga

SEQ ID NO: 41023 - DNA, 20 bp, Artificial Sequence
  chemically synthesized
tcccacataagagagaattc

SEQ ID NO: 41024 - DNA, 20 bp, Artificial Sequence
  chemically synthesized
agcaaggaagcctacccagt

SEQ ID NO: 41025 - DNA, 20 bp, Artificial Sequence
  chemically synthesized
acatctgcattatggactcc

SEQ ID NO: 41026 - DNA, 20 bp, Artificial Sequence
  chemically synthesized
tccaggaatcctagccacag

SEQ ID NO: 41027 - DNA, 20 bp, Artificial Sequence
  chemically synthesized
ctccagagaaggagctctca

SEQ ID NO: 41028 - DNA, 20 bp, Artificial Sequence
  chemically synthesized
ctgacatcccccacccacag

SEQ ID NO: 41029 - DNA, 20 bp, Artificial Sequence
  chemically synthesized
tactgctggctgctgtcacc

SEQ ID NO: 41030 - DNA, 20 bp, Artificial Sequence
  chemically synthesized
aggcattctgctgggggcct

SEQ ID NO: 41031 - DNA, 20 bp, Artificial Sequence
  chemically synthesized
gccggtgtccacacacacca

SEQ ID NO: 41032 - DNA, 20 bp, Artificial Sequence
  chemically synthesized
acctcctgcatgtgccacct

SEQ ID NO: 41033 - DNA, 20 bp, Artificial Sequence
  chemically synthesized
tgcagactgcttgggagcca

SEQ ID NO: 41034 - DNA, 20 bp, Artificial Sequence
  chemically synthesized
agcaaactgcctgaaggcca

SEQ ID NO: 41035 - DNA, 20 bp, Artificial Sequence
  chemically synthesized
cagccatggggcccaaggac

SEQ ID NO: 41036 - DNA, 20 bp, Artificial Sequence
  chemically synthesized
aagaaatatgacacttccaa

SEQ ID NO: 41037 - DNA, 20 bp, Artificial Sequence
  chemically synthesized
atttataaaattctggaaaa

SEQ ID NO: 41038 - DNA, 20 bp, Artificial Sequence
  chemically synthesized
aagaaatcagaaaaacaatt

SEQ ID NO: 41039 - DNA, 20 bp, Artificial Sequence
  chemically synthesized
tcagaaaaacaattcaggat

SEQ ID NO: 41040 - DNA, 20 bp, Artificial Sequence
  chemically synthesized
acccaagagatagatacaac

SEQ ID NO: 41041 - DNA, 20 bp, Artificial Sequence
  chemically synthesized
aaacagaaattctgtaactg

SEQ ID NO: 41042 - DNA, 20 bp, Artificial Sequence
  chemically synthesized
aatgatagaaaggaaaaaaa

SEQ ID NO: 41043 - DNA, 20 bp, Artificial Sequence
  chemically synthesized
agtcaaactgtcaaaagcca

SEQ ID NO: 41044 - DNA, 20 bp, Artificial Sequence
  chemically synthesized
cctcacaggccaggagaaga

SEQ ID NO: 41045 - DNA, 20 bp, Artificial Sequence
  chemically synthesized
tgaaagaaaaaaatgacacc

SEQ ID NO: 41046 - DNA, 20 bp, Artificial Sequence
  chemically synthesized
aacattgttcttcaaaaatg

SEQ ID NO: 41047 - DNA, 20 bp, Artificial Sequence
  chemically synthesized
tctgggcaagaaaaatttga

SEQ ID NO: 41048 - DNA, 20 bp, Artificial Sequence
  chemically synthesized
gctttacaagaaatatttaa

SEQ ID NO: 41049 - DNA, 20 bp, Artificial Sequence
  chemically synthesized
gaaagaaagagagagagaga

SEQ ID NO: 41050 - DNA, 20 bp, Artificial Sequence
  chemically synthesized
aaaaaaaaaacaaaacaacc

SEQ ID NO: 41051 - DNA, 20 bp, Artificial Sequence
  chemically synthesized
gaatcaattaacaaaatggc

SEQ ID NO: 41052 - DNA, 20 bp, Artificial Sequence
  chemically synthesized
aataatagccttgcatgtaa

SEQ ID NO: 41053 - DNA, 20 bp, Artificial Sequence
  chemically synthesized
gataaaaggaacaattcagc

SEQ ID NO: 41054 - DNA, 20 bp, Artificial Sequence
  chemically synthesized
agcaaatgttattagatata

SEQ ID NO: 41055 - DNA, 20 bp, Artificial Sequence
  chemically synthesized
attagatataaagggtgaaa

SEQ ID NO: 41056 - DNA, 20 bp, Artificial Sequence
  chemically synthesized
aatccaatacaataatagtt

SEQ ID NO: 41057 - DNA, 20 bp, Artificial Sequence
  chemically synthesized
agaaaattaacaaagaaaca

SEQ ID NO: 41058 - DNA, 20 bp, Artificial Sequence
  chemically synthesized
taaacttgactttagaccaa

SEQ ID NO: 41059 - DNA, 20 bp, Artificial Sequence
  chemically synthesized
aatatttcatccaacagcta

SEQ ID NO: 41060 - DNA, 20 bp, Artificial Sequence
  chemically synthesized
tcagcacatgacgcattccc

SEQ ID NO: 41061 - DNA, 20 bp, Artificial Sequence
  chemically synthesized
agcatcttctcagaccacaa

SEQ ID NO: 41062 - DNA, 20 bp, Artificial Sequence
  chemically synthesized
ggaaattaaacaacatgctc

SEQ ID NO: 41063 - DNA, 20 bp, Artificial Sequence
  chemically synthesized
atacaacataggaaaagcca

SEQ ID NO: 41064 - DNA, 20 bp, Artificial Sequence
  chemically synthesized
aatagagaaaaacaacaaca

SEQ ID NO: 41065 - DNA, 20 bp, Artificial Sequence
  chemically synthesized
tgttatttaaaaaagataaa

SEQ ID NO: 41066 - DNA, 20 bp, Artificial Sequence
  chemically synthesized
acacataccacctaccaaga

SEQ ID NO: 41067 - DNA, 20 bp, Artificial Sequence
  chemically synthesized
ctaccaagattgaattaaga

SEQ ID NO: 41068 - DNA, 20 bp, Artificial Sequence
  chemically synthesized
aaaacctgaacagaccagta

SEQ ID NO: 41069 - DNA, 20 bp, Artificial Sequence
  chemically synthesized
accagtaatgaataatgaaa

SEQ ID NO: 41070 - DNA, 20 bp, Artificial Sequence
  chemically synthesized
cttttaaaaattaaacagga

SEQ ID NO: 41071 - DNA, 20 bp, Artificial Sequence
  chemically synthesized
tcctgattccataaccagac

SEQ ID NO: 41072 - DNA, 20 bp, Artificial Sequence
  chemically synthesized
ctcaacaaaatactagcaaa

SEQ ID NO: 41073 - DNA, 20 bp, Artificial Sequence
  chemically synthesized
gataatacaccatgatcaag

SEQ ID NO: 41074 - DNA, 20 bp, Artificial Sequence
  chemically synthesized
tgatcaagtgggatttatac

SEQ ID NO: 41075 - DNA, 20 bp, Artificial Sequence
  chemically synthesized
aacccacagctaacatcata

SEQ ID NO: 41076 - DNA, 20 bp, Artificial Sequence
  chemically synthesized
tctaagaactgaaacaaaat

SEQ ID NO: 41077 - DNA, 20 bp, Artificial Sequence
  chemically synthesized
agctaaaaaataaaatattt

SEQ ID NO: 41078 - DNA, 20 bp, Artificial Sequence
  chemically synthesized
aaactacaaaacactgataa

SEQ ID NO: 41079 - DNA, 20 bp, Artificial Sequence
  chemically synthesized
tggagagatatcctatgttc

SEQ ID NO: 41080 - DNA, 20 bp, Artificial Sequence
  chemically synthesized
agacacttagaccaatggaa

SEQ ID NO: 41081 - DNA, 20 bp, Artificial Sequence
  chemically synthesized
agattttcaacaaaggtgac

SEQ ID NO: 41082 - DNA, 20 bp, Artificial Sequence
  chemically synthesized
aagaaatggtgctgaaaaaa

SEQ ID NO: 41083 - DNA, 20 bp, Artificial Sequence
  chemically synthesized
ctgaaaaaattggatatcca

SEQ ID NO: 41084 - DNA, 20 bp, Artificial Sequence
  chemically synthesized
cattggatatccatgtgcaa

SEQ ID NO: 41085 - DNA, 20 bp, Artificial Sequence
  chemically synthesized
aactggactgctgatatggt

SEQ ID NO: 41086 - DNA, 20 bp, Artificial Sequence
  chemically synthesized
aaatataatccccaacttct

SEQ ID NO: 41087 - DNA, 20 bp, Artificial Sequence
  chemically synthesized
cccaacttctcaggatcttg

SEQ ID NO: 41088 - DNA, 20 bp, Artificial Sequence
  chemically synthesized
agcatgtggaggctcgcatt

SEQ ID NO: 41089 - DNA, 20 bp, Artificial Sequence
  chemically synthesized
caggagacaccccaaatact

SEQ ID NO: 41090 - DNA, 20 bp, Artificial Sequence
  chemically synthesized
gagaagtttctgaccttacc

SEQ ID NO: 41091 - DNA, 20 bp, Artificial Sequence
  chemically synthesized
gtttctgaccttacctggag

SEQ ID NO: 41092 - DNA, 20 bp, Artificial Sequence
  chemically synthesized
agaaaggccctgggagctca

SEQ ID NO: 41093 - DNA, 20 bp, Artificial Sequence
  chemically synthesized
aggcatttacattactaaca

SEQ ID NO: 41094 - DNA, 20 bp, Artificial Sequence
  chemically synthesized
ggcctaaatgctccacttaa

SEQ ID NO: 41095 - DNA, 20 bp, Artificial Sequence
  chemically synthesized
catgcaaatggccaccaaaa

SEQ ID NO: 41096 - DNA, 20 bp, Artificial Sequence
  chemically synthesized
agaaagtcaacaaaaaaata

SEQ ID NO: 41097 - DNA, 20 bp, Artificial Sequence
  chemically synthesized
aaaaaaaagttcaggaccag

SEQ ID NO: 41098 - DNA, 20 bp, Artificial Sequence
  chemically synthesized
aggaccagatggattcacaa

SEQ ID NO: 41099 - DNA, 20 bp, Artificial Sequence
  chemically synthesized
attctactagacattcaaag

SEQ ID NO: 41100 - DNA, 20 bp, Artificial Sequence
  chemically synthesized
gatcaagcaggttccatgcc

SEQ ID NO: 41101 - DNA, 20 bp, Artificial Sequence
  chemically synthesized
caggttccatgccagggatg

SEQ ID NO: 41102 - DNA, 20 bp, Artificial Sequence
  chemically synthesized
aacccacagccaacataata

SEQ ID NO: 41103 - DNA, 20 bp, Artificial Sequence
  chemically synthesized
tctgagaactggaacaagac

SEQ ID NO: 41104 - DNA, 20 bp, Artificial Sequence
  chemically synthesized
gcaaagtttccagatacaag

SEQ ID NO: 41105 - DNA, 20 bp, Artificial Sequence
  chemically synthesized
acaccaacagcaaccaaatg

SEQ ID NO: 41106 - DNA, 20 bp, Artificial Sequence
  chemically synthesized
atataaaacgtactctcaag

SEQ ID NO: 41107 - DNA, 20 bp, Artificial Sequence
  chemically synthesized
cacagtgaagagacaagctg

SEQ ID NO: 41108 - DNA, 20 bp, Artificial Sequence
  chemically synthesized
atatttgcatacatttgaca

SEQ ID NO: 41109 - DNA, 20 bp, Artificial Sequence
  chemically synthesized
tttgacaaggaattaatctc

SEQ ID NO: 41110 - DNA, 20 bp, Artificial Sequence
  chemically synthesized
atctcattaaaaaattggca

SEQ ID NO: 41111 - DNA, 20 bp, Artificial Sequence
  chemically synthesized
agaagacatacaaatgcaca

SEQ ID NO: 41112 - DNA, 20 bp, Artificial Sequence
  chemically synthesized
agatatcatcttatgccagt

SEQ ID NO: 41113 - DNA, 20 bp, Artificial Sequence
  chemically synthesized
aataaataacacatgctggc

SEQ ID NO: 41114 - DNA, 20 bp, Artificial Sequence
  chemically synthesized
aagatccagcaatcttatta

SEQ ID NO: 41115 - DNA, 20 bp, Artificial Sequence
  chemically synthesized
tgggtatttatccaaaggaa

SEQ ID NO: 41116 - DNA, 20 bp, Artificial Sequence
  chemically synthesized
ttatccaaaggaaaagaatt

SEQ ID NO: 41117 - DNA, 20 bp, Artificial Sequence
  chemically synthesized
gattcacattagcaaagata

SEQ ID NO: 41118 - DNA, 20 bp, Artificial Sequence
  chemically synthesized
atcaacctaagtgtccatca

SEQ ID NO: 41119 - DNA, 20 bp, Artificial Sequence
  chemically synthesized
acctaagtgtccatcaatgg

SEQ ID NO: 41120 - DNA, 20 bp, Artificial Sequence
  chemically synthesized
aatgtggtgtatacacacaa

SEQ ID NO: 41121 - DNA, 20 bp, Artificial Sequence
  chemically synthesized
atcatttcatttgcagcaac

SEQ ID NO: 41122 - DNA, 20 bp, Artificial Sequence
  chemically synthesized
aagttaatatcatgtaggta

SEQ ID NO: 41123 - DNA, 20 bp, Artificial Sequence
  chemically synthesized
aatatcatgtaggtagagag

SEQ ID NO: 41124 - DNA, 20 bp, Artificial Sequence
  chemically synthesized
gaaacaggcagttagataga

SEQ ID NO: 41125 - DNA, 20 bp, Artificial Sequence
  chemically synthesized
tctgatgttcaatagcaaag

SEQ ID NO: 41126 - DNA, 20 bp, Artificial Sequence
  chemically synthesized
aacgataaatacttgaggtg

SEQ ID NO: 41127 - DNA, 20 bp, Artificial Sequence
  chemically synthesized
aaacttctctcttaacaagc

SEQ ID NO: 41128 - DNA, 20 bp, Artificial Sequence
  chemically synthesized
cttaacaagctagaatataa

SEQ ID NO: 41129 - DNA, 20 bp, Artificial Sequence
  chemically synthesized
tgaatgcaagagcatagaga

SEQ ID NO: 41130 - DNA, 20 bp, Artificial Sequence
  chemically synthesized
gaaaatacttaatatcatta

SEQ ID NO: 41131 - DNA, 20 bp, Artificial Sequence
  chemically synthesized
ttttaccacagcgtaggtca

SEQ ID NO: 41132 - DNA, 20 bp, Artificial Sequence
  chemically synthesized
atcactatttcaaagaagta

SEQ ID NO: 41133 - DNA, 20 bp, Artificial Sequence
  chemically synthesized
gaatagatatcagccaaaat

SEQ ID NO: 41134 - DNA, 20 bp, Artificial Sequence
  chemically synthesized
aggggcctagacatagcatg

SEQ ID NO: 41135 - DNA, 20 bp, Artificial Sequence
  chemically synthesized
gcatgctgaatgaaaaggaa

SEQ ID NO: 41136 - DNA, 20 bp, Artificial Sequence
  chemically synthesized
tgagctaacttcctcatttt

SEQ ID NO: 41137 - DNA, 20 bp, Artificial Sequence
  chemically synthesized
aagaaataagctaataccta

SEQ ID NO: 41138 - DNA, 20 bp, Artificial Sequence
  chemically synthesized
attaaatgctaggcacagtt

SEQ ID NO: 41139 - DNA, 20 bp, Artificial Sequence
  chemically synthesized
caacattacccaggtgatgg

SEQ ID NO: 41140 - DNA, 20 bp, Artificial Sequence
  chemically synthesized
tacccaggtgatggtggagt

SEQ ID NO: 41141 - DNA, 20 bp, Artificial Sequence
  chemically synthesized
gacagcaagatagtaagtaa

SEQ ID NO: 41142 - DNA, 20 bp, Artificial Sequence
  chemically synthesized
aggaatggagcaacaaattg

SEQ ID NO: 41143 - DNA, 20 bp, Artificial Sequence
  chemically synthesized
ttttgcttgtttgtttgaaa

SEQ ID NO: 41144 - DNA, 20 bp, Artificial Sequence
  chemically synthesized
tctcactctgtcaccccggc

SEQ ID NO: 41145 - DNA, 20 bp, Artificial Sequence
  chemically synthesized
ctgaagcctcactagaacgc

SEQ ID NO: 41146 - DNA, 20 bp, Artificial Sequence
  chemically synthesized
tttttaaatttctgtagaaa

SEQ ID NO: 41147 - DNA, 20 bp, Artificial Sequence
  chemically synthesized
aaagtgttgagattacaggt

SEQ ID NO: 41148 - DNA, 20 bp, Artificial Sequence
  chemically synthesized
aatcaccatgctgggccttg

SEQ ID NO: 41149 - DNA, 20 bp, Artificial Sequence
  chemically synthesized
atggatctttaaaagtggtg

SEQ ID NO: 41150 - DNA, 20 bp, Artificial Sequence
  chemically synthesized
aaacatcgttaggtctcggg

SEQ ID NO: 41151 - DNA, 20 bp, Artificial Sequence
  chemically synthesized
tcgttaggtctcgggaagga

SEQ ID NO: 41152 - DNA, 20 bp, Artificial Sequence
  chemically synthesized
tctgtgttaacaaaaaacag

SEQ ID NO: 41153 - DNA, 20 bp, Artificial Sequence
  chemically synthesized
tctgaaggtttagaaactcc

SEQ ID NO: 41154 - DNA, 20 bp, Artificial Sequence
  chemically synthesized
ctttagaactcctgtcctag

SEQ ID NO: 41155 - DNA, 20 bp, Artificial Sequence
  chemically synthesized
accactttgactctagtttt

SEQ ID NO: 41156 - DNA, 20 bp, Artificial Sequence
  chemically synthesized
ccttaacatgttaatttctc

SEQ ID NO: 41157 - DNA, 20 bp, Artificial Sequence
  chemically synthesized
agtaagacctgggcaaagga

SEQ ID NO: 41158 - DNA, 20 bp, Artificial Sequence
  chemically synthesized
tttgggcaaaactttccatc

SEQ ID NO: 41159 - DNA, 20 bp, Artificial Sequence
  chemically synthesized
acttagtacttcccactact

SEQ ID NO: 41160 - DNA, 20 bp, Artificial Sequence
  chemically synthesized
gtacttcccactactgtgga

SEQ ID NO: 41161 - DNA, 20 bp, Artificial Sequence
  chemically synthesized
tttgtcaattcttgaagatt

SEQ ID NO: 41162 - DNA, 20 bp, Artificial Sequence
  chemically synthesized
tgatacctaatagacacttg

SEQ ID NO: 41163 - DNA, 20 bp, Artificial Sequence
  chemically synthesized
agacacttgatgaatcctta

SEQ ID NO: 41164 - DNA, 20 bp, Artificial Sequence
  chemically synthesized
aatccttactgaataataaa

SEQ ID NO: 41165 - DNA, 20 bp, Artificial Sequence
  chemically synthesized
ctgaataataaaatggatta

SEQ ID NO: 41166 - DNA, 20 bp, Artificial Sequence
  chemically synthesized
aaaaggttattttgaagtct

SEQ ID NO: 41167 - DNA, 20 bp, Artificial Sequence
  chemically synthesized
tgggcaaaattctggcagca

SEQ ID NO: 41168 - DNA, 20 bp, Artificial Sequence
  chemically synthesized
ctaagaaaccttttgttttc

SEQ ID NO: 41169 - DNA, 20 bp, Artificial Sequence
  chemically synthesized
aaccttttgttttcttggat

SEQ ID NO: 41170 - DNA, 20 bp, Artificial Sequence
  chemically synthesized
aaaacatggtaagataactg

SEQ ID NO: 41171 - DNA, 20 bp, Artificial Sequence
  chemically synthesized
agaaactgttattcagttta

SEQ ID NO: 41172 - DNA, 20 bp, Artificial Sequence
  chemically synthesized
tcttacataatagtaaaaaa

SEQ ID NO: 41173 - DNA, 20 bp, Artificial Sequence
  chemically synthesized
cttgatcattaaatacctct

SEQ ID NO: 41174 - DNA, 20 bp, Artificial Sequence
  chemically synthesized
caatttgctctatgaactgg

SEQ ID NO: 41175 - DNA, 20 bp, Artificial Sequence
  chemically synthesized
tgctctatgaactggaggag

SEQ ID NO: 41176 - DNA, 20 bp, Artificial Sequence
  chemically synthesized
tatagtggcaatgtattatt

SEQ ID NO: 41177 - DNA, 20 bp, Artificial Sequence
  chemically synthesized
ataagtattaaaggcagctt

SEQ ID NO: 41178 - DNA, 20 bp, Artificial Sequence
  chemically synthesized
ttttatttcaaggcatactc

SEQ ID NO: 41179 - DNA, 20 bp, Artificial Sequence
  chemically synthesized
ttaaaaacacatgctcattt

SEQ ID NO: 41180 - DNA, 20 bp, Artificial Sequence
  chemically synthesized
ggataaagatctctgaggaa

SEQ ID NO: 41181 - DNA, 20 bp, Artificial Sequence
  chemically synthesized
ttctttctcactaaactaca

SEQ ID NO: 41182 - DNA, 20 bp, Artificial Sequence
  chemically synthesized
tgacttttaattttgatttt

SEQ ID NO: 41183 - DNA, 20 bp, Artificial Sequence
  chemically synthesized
ctttgaacagttagtataag

SEQ ID NO: 41184 - DNA, 20 bp, Artificial Sequence
  chemically synthesized
taaggtgaattctgattttt

SEQ ID NO: 41185 - DNA, 20 bp, Artificial Sequence
  chemically synthesized
gtcttgacacttttaaacta

SEQ ID NO: 41186 - DNA, 20 bp, Artificial Sequence
  chemically synthesized
ctagagagtataaacccaca

SEQ ID NO: 41187 - DNA, 20 bp, Artificial Sequence
  chemically synthesized
ttttgccttttgagaagctc

SEQ ID NO: 41188 - DNA, 20 bp, Artificial Sequence
  chemically synthesized
acattaattccaagctaatt

SEQ ID NO: 41189 - DNA, 20 bp, Artificial Sequence
  chemically synthesized
gcatttcatataattactaa

SEQ ID NO: 41190 - DNA, 20 bp, Artificial Sequence
  chemically synthesized
atataattactaacagaatg

SEQ ID NO: 41191 - DNA, 20 bp, Artificial Sequence
  chemically synthesized
tatttctatgttgtcataat

SEQ ID NO: 41192 - DNA, 20 bp, Artificial Sequence
  chemically synthesized
ctagcaattggttatcacta

SEQ ID NO: 41193 - DNA, 20 bp, Artificial Sequence
  chemically synthesized
cccactggggaagcccaccc

SEQ ID NO: 41194 - DNA, 20 bp, Artificial Sequence
  chemically synthesized
cacccagggatgttacagag

SEQ ID NO: 41195 - DNA, 20 bp, Artificial Sequence
  chemically synthesized
tacagtcctccgagactcct

SEQ ID NO: 41196 - DNA, 20 bp, Artificial Sequence
  chemically synthesized
gaacttacaggcacaaaagt

SEQ ID NO: 41197 - DNA, 20 bp, Artificial Sequence
  chemically synthesized
ggcacaaaagttagagttgg

SEQ ID NO: 41198 - DNA, 20 bp, Artificial Sequence
  chemically synthesized
aggctttggtagcttctctt

SEQ ID NO: 41199 - DNA, 20 bp, Artificial Sequence
  chemically synthesized
gaaatcttatgtgcttccca

SEQ ID NO: 41200 - DNA, 20 bp, Artificial Sequence
  chemically synthesized
acagaattcctggtggaagg

SEQ ID NO: 41201 - DNA, 20 bp, Artificial Sequence
  chemically synthesized
gaaagacgagaaagaggagg

SEQ ID NO: 41202 - DNA, 20 bp, Artificial Sequence
  chemically synthesized
gaagaattcctccttccacc

SEQ ID NO: 41203 - DNA, 20 bp, Artificial Sequence
  chemically synthesized
gcctgtaagttctcttctcc

SEQ ID NO: 41204 - DNA, 20 bp, Artificial Sequence
  chemically synthesized
ggattacaactaattgaaac

SEQ ID NO: 41205 - DNA, 20 bp, Artificial Sequence
  chemically synthesized
taattgaaacaggaattcaa

SEQ ID NO: 41206 - DNA, 20 bp, Artificial Sequence
  chemically synthesized
gagtctcggaggactgtaag

SEQ ID NO: 41207 - DNA, 20 bp, Artificial Sequence
  chemically synthesized
gatccctctctgtaacatcc

SEQ ID NO: 41208 - DNA, 20 bp, Artificial Sequence
  chemically synthesized
agtcgaagaacttcctgtgg

SEQ ID NO: 41209 - DNA, 20 bp, Artificial Sequence
  chemically synthesized
ggtttgtactgctcctgaag

SEQ ID NO: 41210 - DNA, 20 bp, Artificial Sequence
  chemically synthesized
acaccttcactaggtgactg

SEQ ID NO: 41211 - DNA, 20 bp, Artificial Sequence
  chemically synthesized
cactaggtgactgaggaatg

SEQ ID NO: 41212 - DNA, 20 bp, Artificial Sequence
  chemically synthesized
ctagtgataaccaattgcta

SEQ ID NO: 41213 - DNA, 20 bp, Artificial Sequence
  chemically synthesized
gagtgaggaaagcatttaaa

SEQ ID NO: 41214 - DNA, 20 bp, Artificial Sequence
  chemically synthesized
cttgtctattacaacaggct

SEQ ID NO: 41215 - DNA, 20 bp, Artificial Sequence
  chemically synthesized
gaaaatattagccattgcca

SEQ ID NO: 41216 - DNA, 20 bp, Artificial Sequence
  chemically synthesized
agtaattatatgaaatgctt

SEQ ID NO: 41217 - DNA, 20 bp, Artificial Sequence
  chemically synthesized
tttcatattcacaattagct

SEQ ID NO: 41218 - DNA, 20 bp, Artificial Sequence
  chemically synthesized
gcaaaatactgtgctccttt

SEQ ID NO: 41219 - DNA, 20 bp, Artificial Sequence
  chemically synthesized
cttcaatgctatgcttatgt

SEQ ID NO: 41220 - DNA, 20 bp, Artificial Sequence
  chemically synthesized
tcaaattgataaaacaattt

SEQ ID NO: 41221 - DNA, 20 bp, Artificial Sequence
  chemically synthesized
gaggtataacctcatctgtg

SEQ ID NO: 41222 - DNA, 20 bp, Artificial Sequence
  chemically synthesized
aaattataaaacaattcctt

SEQ ID NO: 41223 - DNA, 20 bp, Artificial Sequence
  chemically synthesized
aaaagtcatggttttgaagg

SEQ ID NO: 41224 - DNA, 20 bp, Artificial Sequence
  chemically synthesized
ctgagttcctcaagatcttg

SEQ ID NO: 41225 - DNA, 20 bp, Artificial Sequence
  chemically synthesized
agaatcaagccaactgattg

SEQ ID NO: 41226 - DNA, 20 bp, Artificial Sequence
  chemically synthesized
atgtctattacagtaatcta

SEQ ID NO: 41227 - DNA, 20 bp, Artificial Sequence
  chemically synthesized
aaaggatctgaaataataac

SEQ ID NO: 41228 - DNA, 20 bp, Artificial Sequence
  chemically synthesized
tggcatgcattctgaaaaat

SEQ ID NO: 41229 - DNA, 20 bp, Artificial Sequence
  chemically synthesized
tttgcctatgtagaagtgga

SEQ ID NO: 41230 - DNA, 20 bp, Artificial Sequence
  chemically synthesized
ttctctgtagtttagtgaga

SEQ ID NO: 41231 - DNA, 20 bp, Artificial Sequence
  chemically synthesized
cagaaccatctctatcacat

SEQ ID NO: 41232 - DNA, 20 bp, Artificial Sequence
  chemically synthesized
tctctatcacatgtgaatcc

SEQ ID NO: 41233 - DNA, 20 bp, Artificial Sequence
  chemically synthesized
tgaaataaaagttttctcta

SEQ ID NO: 41234 - DNA, 20 bp, Artificial Sequence
  chemically synthesized
ctcaaggacatagcttattg

SEQ ID NO: 41235 - DNA, 20 bp, Artificial Sequence
  chemically synthesized
ggaagggacttgttagcact

SEQ ID NO: 41236 - DNA, 20 bp, Artificial Sequence
  chemically synthesized
cagtgaaactaagttatttt

SEQ ID NO: 41237 - DNA, 20 bp, Artificial Sequence
  chemically synthesized
agtagcatgtgtgttgatct

SEQ ID NO: 41238 - DNA, 20 bp, Artificial Sequence
  chemically synthesized
tggtacatagaaaatgctca

SEQ ID NO: 41239 - DNA, 20 bp, Artificial Sequence
  chemically synthesized
ggtttgagattttcatatag

SEQ ID NO: 41240 - DNA, 20 bp, Artificial Sequence
  chemically synthesized
gtttctttaaatttaatgat

SEQ ID NO: 41241 - DNA, 20 bp, Artificial Sequence
  chemically synthesized
tatgaggtatcttagagatc

SEQ ID NO: 41242 - DNA, 20 bp, Artificial Sequence
  chemically synthesized
tttaatgatcaagcaaatgg

SEQ ID NO: 41243 - DNA, 20 bp, Artificial Sequence
  chemically synthesized
gcaaatggcagagttaggac

SEQ ID NO: 41244 - DNA, 20 bp, Artificial Sequence
  chemically synthesized
tcacttttttactattatgt

SEQ ID NO: 41245 - DNA, 20 bp, Artificial Sequence
  chemically synthesized
agtacttgcagtcaaaggtc

SEQ ID NO: 41246 - DNA, 20 bp, Artificial Sequence
  chemically synthesized
ctgaaaaagaaccccttaaa

SEQ ID NO: 41247 - DNA, 20 bp, Artificial Sequence
  chemically synthesized
aactgaataacagtttcttc

SEQ ID NO: 41248 - DNA, 20 bp, Artificial Sequence
  chemically synthesized
acagtttcttcatgaataaa

SEQ ID NO: 41249 - DNA, 20 bp, Artificial Sequence
  chemically synthesized
aacaaaaggtttcttaggag

SEQ ID NO: 41250 - DNA, 20 bp, Artificial Sequence
  chemically synthesized
ggagaagaatcccttgctgc

SEQ ID NO: 41251 - DNA, 20 bp, Artificial Sequence
  chemically synthesized
gtgaaaaacataacagatga

SEQ ID NO: 41252 - DNA, 20 bp, Artificial Sequence
  chemically synthesized
tgagagagtcacagttagtt

SEQ ID NO: 41253 - DNA, 20 bp, Artificial Sequence
  chemically synthesized
aatccattttattattcagt

SEQ ID NO: 41254 - DNA, 20 bp, Artificial Sequence
  chemically synthesized
gcactgagaggcgagggaga

SEQ ID NO: 41255 - DNA, 20 bp, Artificial Sequence
  chemically synthesized
gaggcgagggagatagagtt

SEQ ID NO: 41256 - DNA, 20 bp, Artificial Sequence
  chemically synthesized
agaactgattcttaatcttc

SEQ ID NO: 41257 - DNA, 20 bp, Artificial Sequence
  chemically synthesized
atacaatacagtcaaatgtg

SEQ ID NO: 41258 - DNA, 20 bp, Artificial Sequence
  chemically synthesized
taagactatacagtgtaccg

SEQ ID NO: 41259 - DNA, 20 bp, Artificial Sequence
  chemically synthesized
atacagtgtaccgtggaatg

SEQ ID NO: 41260 - DNA, 20 bp, Artificial Sequence
  chemically synthesized
gatgtttgagctgacacttg

SEQ ID NO: 41261 - DNA, 20 bp, Artificial Sequence
  chemically synthesized
gctcagagagggaaaaggag

SEQ ID NO: 41262 - DNA, 20 bp, Artificial Sequence
  chemically synthesized
actagattgtgaagctcagg

SEQ ID NO: 41263 - DNA, 20 bp, Artificial Sequence
  chemically synthesized
agggggagttaatagcctta

SEQ ID NO: 41264 - DNA, 20 bp, Artificial Sequence
  chemically synthesized
gccttaaggagttttgtctc

SEQ ID NO: 41265 - DNA, 20 bp, Artificial Sequence
  chemically synthesized
ttgtctccagggtatgaaca

SEQ ID NO: 41266 - DNA, 20 bp, Artificial Sequence
  chemically synthesized
cagggtatgaacaatgaatg

SEQ ID NO: 41267 - DNA, 20 bp, Artificial Sequence
  chemically synthesized
aattagactgtggtgtgacc

SEQ ID NO: 41268 - DNA, 20 bp, Artificial Sequence
  chemically synthesized
tctggagaaattaacatgtt

SEQ ID NO: 41269 - DNA, 20 bp, Artificial Sequence
  chemically synthesized
attaacatgttaaggatatt

SEQ ID NO: 41270 - DNA, 20 bp, Artificial Sequence
  chemically synthesized
cacataatgaaagttaattt

SEQ ID NO: 41271 - DNA, 20 bp, Artificial Sequence
  chemically synthesized
tcagtcttgacactacacct

SEQ ID NO: 41272 - DNA, 20 bp, Artificial Sequence
  chemically synthesized
atggtacaagtggcacaggg

SEQ ID NO: 41273 - DNA, 20 bp, Artificial Sequence
  chemically synthesized
cagggaagaattcagaaaac

SEQ ID NO: 41274 - DNA, 20 bp, Artificial Sequence
  chemically synthesized
ttatggaagaaattataata

SEQ ID NO: 41275 - DNA, 20 bp, Artificial Sequence
  chemically synthesized
tgagtccactcttctaggac

SEQ ID NO: 41276 - DNA, 20 bp, Artificial Sequence
  chemically synthesized
ctttgatataagtgaactca

SEQ ID NO: 41277 - DNA, 20 bp, Artificial Sequence
  chemically synthesized
tttctctagagcaaaatgaa

SEQ ID NO: 41278 - DNA, 20 bp, Artificial Sequence
  chemically synthesized
acttttcaaggctgaggtgg

SEQ ID NO: 41279 - DNA, 20 bp, Artificial Sequence
  chemically synthesized
tgggagaattgtttgagacc

SEQ ID NO: 41280 - DNA, 20 bp, Artificial Sequence
  chemically synthesized
gaattgtttgagaccaagag

SEQ ID NO: 41281 - DNA, 20 bp, Artificial Sequence
  chemically synthesized
tacctgagaggctaaagcag

SEQ ID NO: 41282 - DNA, 20 bp, Artificial Sequence
  chemically synthesized
ggctaaagcaggaggatcaa

SEQ ID NO: 41283 - DNA, 20 bp, Artificial Sequence
  chemically synthesized
ttgcaccattgcactccagc

SEQ ID NO: 41284 - DNA, 20 bp, Artificial Sequence
  chemically synthesized
ttgcactccagccggggtga

SEQ ID NO: 41285 - DNA, 20 bp, Artificial Sequence
  chemically synthesized
taaagtcagactgcatgatt

SEQ ID NO: 41286 - DNA, 20 bp, Artificial Sequence
  chemically synthesized
aattccaactccaccatcac

SEQ ID NO: 41287 - DNA, 20 bp, Artificial Sequence
  chemically synthesized
ttgtcataccagctttcact

SEQ ID NO: 41288 - DNA, 20 bp, Artificial Sequence
  chemically synthesized
cataccagctttcactttga

SEQ ID NO: 41289 - DNA, 20 bp, Artificial Sequence
  chemically synthesized
catcaatgttacttcaatca

SEQ ID NO: 41290 - DNA, 20 bp, Artificial Sequence
  chemically synthesized
atcacgggatgcatagtaat

SEQ ID NO: 41291 - DNA, 20 bp, Artificial Sequence
  chemically synthesized
tctttgccctaattactgat

SEQ ID NO: 41292 - DNA, 20 bp, Artificial Sequence
  chemically synthesized
caggtggtcttgttcaaagt

SEQ ID NO: 41293 - DNA, 20 bp, Artificial Sequence
  chemically synthesized
cagctgctttgattttaact

SEQ ID NO: 41294 - DNA, 20 bp, Artificial Sequence
  chemically synthesized
gcaactgtgttttggaacag

SEQ ID NO: 41295 - DNA, 20 bp, Artificial Sequence
  chemically synthesized
agtgttgccagatgacgact

SEQ ID NO: 41296 - DNA, 20 bp, Artificial Sequence
  chemically synthesized
agtattttcttttttaatgt

SEQ ID NO: 41297 - DNA, 20 bp, Artificial Sequence
  chemically synthesized
tatacctcaaatatgaaaat

SEQ ID NO: 41298 - DNA, 20 bp, Artificial Sequence
  chemically synthesized
aaaaagggctaaaatggtgt

SEQ ID NO: 41299 - DNA, 20 bp, Artificial Sequence
  chemically synthesized
taatgatcaagtcaggtatt

SEQ ID NO: 41300 - DNA, 20 bp, Artificial Sequence
  chemically synthesized
atgattttatatttgtatgg

SEQ ID NO: 41301 - DNA, 20 bp, Artificial Sequence
  chemically synthesized
gattccatatctttgctaat

SEQ ID NO: 41302 - DNA, 20 bp, Artificial Sequence
  chemically synthesized
accagtatctgtttattatt

SEQ ID NO: 41303 - DNA, 20 bp, Artificial Sequence
  chemically synthesized
ttattctgaattcttttcct

SEQ ID NO: 41304 - DNA, 20 bp, Artificial Sequence
  chemically synthesized
aatacccagtaataagattg

SEQ ID NO: 41305 - DNA, 20 bp, Artificial Sequence
  chemically synthesized
catgcttaccaatagtgcct

SEQ ID NO: 41306 - DNA, 20 bp, Artificial Sequence
  chemically synthesized
gattatttgtttttccactg

SEQ ID NO: 41307 - DNA, 20 bp, Artificial Sequence
  chemically synthesized
tttttccactgttgagttgt

SEQ ID NO: 41308 - DNA, 20 bp, Artificial Sequence
  chemically synthesized
ttaagtctttaatccatctt

SEQ ID NO: 41309 - DNA, 20 bp, Artificial Sequence
  chemically synthesized
cgttttatatggcaataaat

SEQ ID NO: 41310 - DNA, 20 bp, Artificial Sequence
  chemically synthesized
atttttgcatctattgtaca

SEQ ID NO: 41311 - DNA, 20 bp, Artificial Sequence
  chemically synthesized
tgcatctattgtacaagggg

SEQ ID NO: 41312 - DNA, 20 bp, Artificial Sequence
  chemically synthesized
tggttgctgttggtgtatag

SEQ ID NO: 41313 - DNA, 20 bp, Artificial Sequence
  chemically synthesized
tcttgtatctggaaactttg

SEQ ID NO: 41314 - DNA, 20 bp, Artificial Sequence
  chemically synthesized
cagttctaggagctttctgg

SEQ ID NO: 41315 - DNA, 20 bp, Artificial Sequence
  chemically synthesized
gagctttctggaggagtctt

SEQ ID NO: 41316 - DNA, 20 bp, Artificial Sequence
  chemically synthesized
ttgacttcctctttactgat

SEQ ID NO: 41317 - DNA, 20 bp, Artificial Sequence
  chemically synthesized
cttccagtactatgttgaag

SEQ ID NO: 41318 - DNA, 20 bp, Artificial Sequence
  chemically synthesized
ctatgttgaagaggagtggt

SEQ ID NO: 41319 - DNA, 20 bp, Artificial Sequence
  chemically synthesized
gtcttgttccagttctcaga

SEQ ID NO: 41320 - DNA, 20 bp, Artificial Sequence
  chemically synthesized
cattcaatattatgttggct

SEQ ID NO: 41321 - DNA, 20 bp, Artificial Sequence
  chemically synthesized
attttaatcataaatgtatg

SEQ ID NO: 41322 - DNA, 20 bp, Artificial Sequence
  chemically synthesized
taaatgtatgctggattttg

SEQ ID NO: 41323 - DNA, 20 bp, Artificial Sequence
  chemically synthesized
atggaacctgcttgatcatg

SEQ ID NO: 41324 - DNA, 20 bp, Artificial Sequence
  chemically synthesized
attatctttttgttatgttg

SEQ ID NO: 41325 - DNA, 20 bp, Artificial Sequence
  chemically synthesized
tggttatctagtattttgtt

SEQ ID NO: 41326 - DNA, 20 bp, Artificial Sequence
  chemically synthesized
ttggtgtgatgctggcttca

SEQ ID NO: 41327 - DNA, 20 bp, Artificial Sequence
  chemically synthesized
tgtgatgctggcttcataga

SEQ ID NO: 41328 - DNA, 20 bp, Artificial Sequence
  chemically synthesized
ttccttctttatctgtcttg

SEQ ID NO: 41329 - DNA, 20 bp, Artificial Sequence
  chemically synthesized
agatggggaccaattcctct

SEQ ID NO: 41330 - DNA, 20 bp, Artificial Sequence
  chemically synthesized
attcctctttgaatgtctag

SEQ ID NO: 41331 - DNA, 20 bp, Artificial Sequence
  chemically synthesized
atgtctagtagaattctgtt

SEQ ID NO: 41332 - DNA, 20 bp, Artificial Sequence
  chemically synthesized
ggagaaatttccacgcgctg

SEQ ID NO: 41333 - DNA, 20 bp, Artificial Sequence
  chemically synthesized
aatttccacgcgctgttgaa

SEQ ID NO: 41334 - DNA, 20 bp, Artificial Sequence
  chemically synthesized
gaatgtgtgttctgtggtta

SEQ ID NO: 41335 - DNA, 20 bp, Artificial Sequence
  chemically synthesized
aatgcctggctatgccaggc

SEQ ID NO: 41336 - DNA, 20 bp, Artificial Sequence
  chemically synthesized
agaccttcagtttctccagt

SEQ ID NO: 41337 - DNA, 20 bp, Artificial Sequence
  chemically synthesized
ggagtgtgtgtttaggagag

SEQ ID NO: 41338 - DNA, 20 bp, Artificial Sequence
  chemically synthesized
gttggggcactcacagtatt

SEQ ID NO: 41339 - DNA, 20 bp, Artificial Sequence
  chemically synthesized
cacagtatttggggtgtctc

SEQ ID NO: 41340 - DNA, 20 bp, Artificial Sequence
  chemically synthesized
ggagcaatctacttccttca

SEQ ID NO: 41341 - DNA, 20 bp, Artificial Sequence
  chemically synthesized
ctacttccttcagagggtct

SEQ ID NO: 41342 - DNA, 20 bp, Artificial Sequence
  chemically synthesized
agagggtctgtgggtcctct

SEQ ID NO: 41343 - DNA, 20 bp, Artificial Sequence
  chemically synthesized
ccacatgctgctctgtccat

SEQ ID NO: 41344 - DNA, 20 bp, Artificial Sequence
  chemically synthesized
cgccaagatcctgagaagtt

SEQ ID NO: 41345 - DNA, 20 bp, Artificial Sequence
  chemically synthesized
ccagttttattcttttgcac

SEQ ID NO: 41346 - DNA, 20 bp, Artificial Sequence
  chemically synthesized
cttttgcacatggatatcca

SEQ ID NO: 41347 - DNA, 20 bp, Artificial Sequence
  chemically synthesized
aatctgttggctataaatat

SEQ ID NO: 41348 - DNA, 20 bp, Artificial Sequence
  chemically synthesized
ctagcattgttcttttttca

SEQ ID NO: 41349 - DNA, 20 bp, Artificial Sequence
  chemically synthesized
ctattttgatagcggtcata

SEQ ID NO: 41350 - DNA, 20 bp, Artificial Sequence
  chemically synthesized
tatagaatctgtagattgct

SEQ ID NO: 41351 - DNA, 20 bp, Artificial Sequence
  chemically synthesized
atttttctgatccatgaaca

SEQ ID NO: 41352 - DNA, 20 bp, Artificial Sequence
  chemically synthesized
tatcagtgttttgtagtttt

SEQ ID NO: 41353 - DNA, 20 bp, Artificial Sequence
  chemically synthesized
tattttttagctattgtaaa

SEQ ID NO: 41354 - DNA, 20 bp, Artificial Sequence
  chemically synthesized
ttttgtctcctgtaacttta

SEQ ID NO: 41355 - DNA, 20 bp, Artificial Sequence
  chemically synthesized
tgaatttatttttcagcgct

SEQ ID NO: 41356 - DNA, 20 bp, Artificial Sequence
  chemically synthesized
cagcgctaagagtgctttgg

SEQ ID NO: 41357 - DNA, 20 bp, Artificial Sequence
  chemically synthesized
ctaggacttccagtattata

SEQ ID NO: 41358 - DNA, 20 bp, Artificial Sequence
  chemically synthesized
cttccagtattatattgaat

SEQ ID NO: 41359 - DNA, 20 bp, Artificial Sequence
  chemically synthesized
aattcagtatgatgttagct

SEQ ID NO: 41360 - DNA, 20 bp, Artificial Sequence
  chemically synthesized
gcagatagtttttatcatga

SEQ ID NO: 41361 - DNA, 20 bp, Artificial Sequence
  chemically synthesized
tgatcatggtgtattatctt

SEQ ID NO: 41362 - DNA, 20 bp, Artificial Sequence
  chemically synthesized
attatcttttggatgtactg

SEQ ID NO: 41363 - DNA, 20 bp, Artificial Sequence
  chemically synthesized
cagtttgctagtattttgtt

SEQ ID NO: 41364 - DNA, 20 bp, Artificial Sequence
  chemically synthesized
tttcacacctatgttccatc

SEQ ID NO: 41365 - DNA, 20 bp, Artificial Sequence
  chemically synthesized
cttgcatccttgtctggtta

SEQ ID NO: 41366 - DNA, 20 bp, Artificial Sequence
  chemically synthesized
tccttgtctggttatggaat

SEQ ID NO: 41367 - DNA, 20 bp, Artificial Sequence
  chemically synthesized
tcaggataatactggcctca

SEQ ID NO: 41368 - DNA, 20 bp, Artificial Sequence
  chemically synthesized
gataatactggcctcagaga

SEQ ID NO: 41369 - DNA, 20 bp, Artificial Sequence
  chemically synthesized
gcctcagagaatgagttagg

SEQ ID NO: 41370 - DNA, 20 bp, Artificial Sequence
  chemically synthesized
ccttcctgtttaatttttaa

SEQ ID NO: 41371 - DNA, 20 bp, Artificial Sequence
  chemically synthesized
tttctttccttctgctagtt

SEQ ID NO: 41372 - DNA, 20 bp, Artificial Sequence
  chemically synthesized
ctaacatatggtgtatcctg

SEQ ID NO: 41373 - DNA, 20 bp, Artificial Sequence
  chemically synthesized
ataaatatattctgtagctg

SEQ ID NO: 41374 - DNA, 20 bp, Artificial Sequence
  chemically synthesized
gatctatctgatgctgagat

SEQ ID NO: 41375 - DNA, 20 bp, Artificial Sequence
  chemically synthesized
aatccccaactattattgta

SEQ ID NO: 41376 - DNA, 20 bp, Artificial Sequence
  chemically synthesized
ataacatttgctttacatat

SEQ ID NO: 41377 - DNA, 20 bp, Artificial Sequence
  chemically synthesized
catatctggatgctctggtg

SEQ ID NO: 41378 - DNA, 20 bp, Artificial Sequence
  chemically synthesized
tggatgctctggtgttgagt

SEQ ID NO: 41379 - DNA, 20 bp, Artificial Sequence
  chemically synthesized
tggtgttgagtgtgaatgtt

SEQ ID NO: 41380 - DNA, 20 bp, Artificial Sequence
  chemically synthesized
agaattgttatatactcttg

SEQ ID NO: 41381 - DNA, 20 bp, Artificial Sequence
  chemically synthesized
ttcttataggcagcttacaa

SEQ ID NO: 41382 - DNA, 20 bp, Artificial Sequence
  chemically synthesized
attttctgtagtggtaacgt

SEQ ID NO: 41383 - DNA, 20 bp, Artificial Sequence
  chemically synthesized
gtaaagccagtctagtgata

SEQ ID NO: 41384 - DNA, 20 bp, Artificial Sequence
  chemically synthesized
atttttgaagaacaatgttg

SEQ ID NO: 41385 - DNA, 20 bp, Artificial Sequence
  chemically synthesized
catttttttctttcactatt

SEQ ID NO: 41386 - DNA, 20 bp, Artificial Sequence
  chemically synthesized
agacattttgcttgctgttt

SEQ ID NO: 41387 - DNA, 20 bp, Artificial Sequence
  chemically synthesized
ctttttgcattatattattt

SEQ ID NO: 41388 - DNA, 20 bp, Artificial Sequence
  chemically synthesized
aatttctgattttcatttgt

SEQ ID NO: 41389 - DNA, 20 bp, Artificial Sequence
  chemically synthesized
ccttctgggaaactgcaaat

SEQ ID NO: 41390 - DNA, 20 bp, Artificial Sequence
  chemically synthesized
ctgatctattgttgaagttt

SEQ ID NO: 41391 - DNA, 20 bp, Artificial Sequence
  chemically synthesized
ttcaataaactcttcagtta

SEQ ID NO: 41392 - DNA, 20 bp, Artificial Sequence
  chemically synthesized
attcttgttgtatctatctc

SEQ ID NO: 41393 - DNA, 20 bp, Artificial Sequence
  chemically synthesized
gtaaatttctcattcatatc

SEQ ID NO: 41394 - DNA, 20 bp, Artificial Sequence
  chemically synthesized
gatttctttttattgtttat

SEQ ID NO: 41395 - DNA, 20 bp, Artificial Sequence
  chemically synthesized
gcttccttaatatcaacatt

SEQ ID NO: 41396 - DNA, 20 bp, Artificial Sequence
  chemically synthesized
acattttggattcttttttc

SEQ ID NO: 41397 - DNA, 20 bp, Artificial Sequence
  chemically synthesized
tccactggcttatgttgctg

SEQ ID NO: 41398 - DNA, 20 bp, Artificial Sequence
  chemically synthesized
aagatgtatcttggtgttga

SEQ ID NO: 41399 - DNA, 20 bp, Artificial Sequence
  chemically synthesized
ctgtgattttttcagtggct

SEQ ID NO: 41400 - DNA, 20 bp, Artificial Sequence
  chemically synthesized
gatgaggttgtgctggagac

SEQ ID NO: 41401 - DNA, 20 bp, Artificial Sequence
  chemically synthesized
gtacattggcactgatggta

SEQ ID NO: 41402 - DNA, 20 bp, Artificial Sequence
  chemically synthesized
actgatggtaatgagtctag

SEQ ID NO: 41403 - DNA, 20 bp, Artificial Sequence
  chemically synthesized
ttggccttcaggcagtttgc

SEQ ID NO: 41404 - DNA, 20 bp, Artificial Sequence
  chemically synthesized
atagtagactgggctggtgt

SEQ ID NO: 41405 - DNA, 20 bp, Artificial Sequence
  chemically synthesized
ggtcctcaggcttctggaca

SEQ ID NO: 41406 - DNA, 20 bp, Artificial Sequence
  chemically synthesized
ttctggacagtgggtgtggt

SEQ ID NO: 41407 - DNA, 20 bp, Artificial Sequence
  chemically synthesized
gttggtggtggctgcaaggg

SEQ ID NO: 41408 - DNA, 20 bp, Artificial Sequence
  chemically synthesized
gttgtgatggcagtggcaga

SEQ ID NO: 41409 - DNA, 20 bp, Artificial Sequence
  chemically synthesized
gcccatcatcaggcttctgg

SEQ ID NO: 41410 - DNA, 20 bp, Artificial Sequence
  chemically synthesized
ttgcttaggtaccagtcatg

SEQ ID NO: 41411 - DNA, 20 bp, Artificial Sequence
  chemically synthesized
tggatggcacaaggctgtct

SEQ ID NO: 41412 - DNA, 20 bp, Artificial Sequence
  chemically synthesized
ttgaggaaggcaaagccagg

SEQ ID NO: 41413 - DNA, 20 bp, Artificial Sequence
  chemically synthesized
ggacaccggctatcataggc

SEQ ID NO: 41414 - DNA, 20 bp, Artificial Sequence
  chemically synthesized
ccggctatcataggctggag

SEQ ID NO: 41415 - DNA, 20 bp, Artificial Sequence
  chemically synthesized
agtgatcctcaggcccccag

SEQ ID NO: 41416 - DNA, 20 bp, Artificial Sequence
  chemically synthesized
tcaggcccccagcagaatgc

SEQ ID NO: 41417 - DNA, 20 bp, Artificial Sequence
  chemically synthesized
gcccccagcagaatgcctga

SEQ ID NO: 41418 - DNA, 20 bp, Artificial Sequence
  chemically synthesized
cattgttgccctgctcttga

SEQ ID NO: 41419 - DNA, 20 bp, Artificial Sequence
  chemically synthesized
gccctgctcttgaaggggtg

SEQ ID NO: 41420 - DNA, 20 bp, Artificial Sequence
  chemically synthesized
ttcagtggcagcagctataa

SEQ ID NO: 41421 - DNA, 20 bp, Artificial Sequence
  chemically synthesized
ccccagatggtggctgcaag

SEQ ID NO: 41422 - DNA, 20 bp, Artificial Sequence
  chemically synthesized
tgtgtagcagccctgctact

SEQ ID NO: 41423 - DNA, 20 bp, Artificial Sequence
  chemically synthesized
agccctgctactgggggtgg

SEQ ID NO: 41424 - DNA, 20 bp, Artificial Sequence
  chemically synthesized
gccagcagtagcactcagct

SEQ ID NO: 41425 - DNA, 20 bp, Artificial Sequence
  chemically synthesized
gtagcactcagctgtgggtg

SEQ ID NO: 41426 - DNA, 20 bp, Artificial Sequence
  chemically synthesized
ggggatgtcagcagagcttc

SEQ ID NO: 41427 - DNA, 20 bp, Artificial Sequence
  chemically synthesized
tgtagagatgcagatgatgt

SEQ ID NO: 41428 - DNA, 20 bp, Artificial Sequence
  chemically synthesized
ctgaggaacgatgtcatctg

SEQ ID NO: 41429 - DNA, 20 bp, Artificial Sequence
  chemically synthesized
gcaccttgctgctcagtaat

SEQ ID NO: 41430 - DNA, 20 bp, Artificial Sequence
  chemically synthesized
tgctcagtaatggggatggc

SEQ ID NO: 41431 - DNA, 20 bp, Artificial Sequence
  chemically synthesized
tcaagggactctcctgtggc

SEQ ID NO: 41432 - DNA, 20 bp, Artificial Sequence
  chemically synthesized
tctcctgtggctaggattcc

SEQ ID NO: 41433 - DNA, 20 bp, Artificial Sequence
  chemically synthesized
taatgcagatgtggaccact

SEQ ID NO: 41434 - DNA, 20 bp, Artificial Sequence
  chemically synthesized
ggagcctctctggcctcaca

SEQ ID NO: 41435 - DNA, 20 bp, Artificial Sequence
  chemically synthesized
ggcctcacagaggatcccta

SEQ ID NO: 41436 - DNA, 20 bp, Artificial Sequence
  chemically synthesized
tgcttcctgtcacttctctg

SEQ ID NO: 41437 - DNA, 20 bp, Artificial Sequence
  chemically synthesized
gtcacttctctgttgaattc

SEQ ID NO: 41438 - DNA, 20 bp, Artificial Sequence
  chemically synthesized
ttccagaattctctcttatg

SEQ ID NO: 41439 - DNA, 20 bp, Artificial Sequence
  chemically synthesized
tttggttctttgtggaggag

SEQ ID NO: 41440 - DNA, 20 bp, Artificial Sequence
  chemically synthesized
ggactatctgaaggcctcag

SEQ ID NO: 41441 - DNA, 20 bp, Artificial Sequence
  chemically synthesized
tcagatgagtaaaagaagta

SEQ ID NO: 41442 - DNA, 20 bp, Artificial Sequence
  chemically synthesized
atcatttgtttcttcaaata

SEQ ID NO: 41443 - DNA, 20 bp, Artificial Sequence
  chemically synthesized
ttgcatctaccaaagtgtat

SEQ ID NO: 41444 - DNA, 20 bp, Artificial Sequence
  chemically synthesized
aaatacgtaatctaacaaac

SEQ ID NO: 41445 - DNA, 20 bp, Artificial Sequence
  chemically synthesized
acaaggatgttttaagatct

SEQ ID NO: 41446 - DNA, 20 bp, Artificial Sequence
  chemically synthesized
gatgcatagttgcaaataaa

SEQ ID NO: 41447 - DNA, 20 bp, Artificial Sequence
  chemically synthesized
tgcaaataaaaggagttttc

SEQ ID NO: 41448 - DNA, 20 bp, Artificial Sequence
  chemically synthesized
tttggaaattttgcattttt

SEQ ID NO: 41449 - DNA, 20 bp, Artificial Sequence
  chemically synthesized
tgatggtttctaaaattgtc

SEQ ID NO: 41450 - DNA, 20 bp, Artificial Sequence
  chemically synthesized
atgttaacttagatttattg

SEQ ID NO: 41451 - DNA, 20 bp, Artificial Sequence
  chemically synthesized
tatgaaaattgcttgcattt

SEQ ID NO: 41452 - DNA, 20 bp, Artificial Sequence
  chemically synthesized
ctcttctcctttataaatta

SEQ ID NO: 41453 - DNA, 20 bp, Artificial Sequence
  chemically synthesized
ctatgtaaagtataagttac

SEQ ID NO: 41454 - DNA, 20 bp, Artificial Sequence
  chemically synthesized
aaacctgtagtctgatgaaa

SEQ ID NO: 41455 - DNA, 20 bp, Artificial Sequence
  chemically synthesized
aataaaattgctttttgcaa

SEQ ID NO: 41456 - DNA, 20 bp, Artificial Sequence
  chemically synthesized
attgagttgaagattgatgc

SEQ ID NO: 41457 - DNA, 20 bp, Artificial Sequence
  chemically synthesized
tgccaggatcttattacctc

SEQ ID NO: 41458 - DNA, 20 bp, Artificial Sequence
  chemically synthesized
attacctccaggatttcaca

SEQ ID NO: 41459 - DNA, 20 bp, Artificial Sequence
  chemically synthesized
aggatttcacaaaggatttc

SEQ ID NO: 41460 - DNA, 20 bp, Artificial Sequence
  chemically synthesized
ttataaagacatacctgaga

SEQ ID NO: 41461 - DNA, 20 bp, Artificial Sequence
  chemically synthesized
cactatcacgagaagagcat

SEQ ID NO: 41462 - DNA, 20 bp, Artificial Sequence
  chemically synthesized
aaatccctcccacaacacgt

SEQ ID NO: 41463 - DNA, 20 bp, Artificial Sequence
  chemically synthesized
actacaattcaagatgagat

SEQ ID NO: 41464 - DNA, 20 bp, Artificial Sequence
  chemically synthesized
gggacacagtcaagctgtat

SEQ ID NO: 41465 - DNA, 20 bp, Artificial Sequence
  chemically synthesized
agctgtatcagggtacaagc

SEQ ID NO: 41466 - DNA, 20 bp, Artificial Sequence
  chemically synthesized
agtggaccatcacctgaaaa

SEQ ID NO: 41467 - DNA, 20 bp, Artificial Sequence
  chemically synthesized
ctgtgtttgactttctgttt

SEQ ID NO: 41468 - DNA, 20 bp, Artificial Sequence
  chemically synthesized
tgtttctgagttatttcact

SEQ ID NO: 41469 - DNA, 20 bp, Artificial Sequence
  chemically synthesized
gatttcattcttttttatgg

SEQ ID NO: 41470 - DNA, 20 bp, Artificial Sequence
  chemically synthesized
ttaatatgatctctttcact

SEQ ID NO: 41471 - DNA, 20 bp, Artificial Sequence
  chemically synthesized
tttgggtccatacccagtag

SEQ ID NO: 41472 - DNA, 20 bp, Artificial Sequence
  chemically synthesized
catacccagtagtgggattg

SEQ ID NO: 41473 - DNA, 20 bp, Artificial Sequence
  chemically synthesized
ccagtagtgggattgcagga

SEQ ID NO: 41474 - DNA, 20 bp, Artificial Sequence
  chemically synthesized
cctgagctcactgtatttgt

SEQ ID NO: 41475 - DNA, 20 bp, Artificial Sequence
  chemically synthesized
atatagatttagatataaaa

SEQ ID NO: 41476 - DNA, 20 bp, Artificial Sequence
  chemically synthesized
agtcccaaagctgaaggact

SEQ ID NO: 41477 - DNA, 20 bp, Artificial Sequence
  chemically synthesized
gcttggaggctaagccagtc

SEQ ID NO: 41478 - DNA, 20 bp, Artificial Sequence
  chemically synthesized
agatggtgcccacccagatt

SEQ ID NO: 41479 - DNA, 20 bp, Artificial Sequence
  chemically synthesized
ggtgcccacccagattaagg

SEQ ID NO: 41480 - DNA, 20 bp, Artificial Sequence
  chemically synthesized
aataccctcacagacacact

SEQ ID NO: 41481 - DNA, 20 bp, Artificial Sequence
  chemically synthesized
tttttttttttttttcctgg

SEQ ID NO: 41482 - DNA, 20 bp, Artificial Sequence
  chemically synthesized
cctttatttgtagtcctgcc

SEQ ID NO: 41483 - DNA, 20 bp, Artificial Sequence
  chemically synthesized
taaaactaagagacacccta

SEQ ID NO: 41484 - DNA, 20 bp, Artificial Sequence
  chemically synthesized
acgcttccttacctccattg

SEQ ID NO: 41485 - DNA, 20 bp, Artificial Sequence
  chemically synthesized
actgatttcatcttgatagt

SEQ ID NO: 41486 - DNA, 20 bp, Artificial Sequence
  chemically synthesized
aatcttaatttgcagtttaa

SEQ ID NO: 41487 - DNA, 20 bp, Artificial Sequence
  chemically synthesized
aattttgctagtggaacact

SEQ ID NO: 41488 - DNA, 20 bp, Artificial Sequence
  chemically synthesized
gtggaacactaggggtgatg

SEQ ID NO: 41489 - DNA, 20 bp, Artificial Sequence
  chemically synthesized
accctttgattcctggaccc

SEQ ID NO: 41490 - DNA, 20 bp, Artificial Sequence
  chemically synthesized
aggccattcaaaagctgctt

SEQ ID NO: 41491 - DNA, 20 bp, Artificial Sequence
  chemically synthesized
aaaagctgcttcaggatgat

SEQ ID NO: 41492 - DNA, 20 bp, Artificial Sequence
  chemically synthesized
cacacttctttagccataaa

SEQ ID NO: 41493 - DNA, 20 bp, Artificial Sequence
  chemically synthesized
tggtcagaagcaatgctgtg

SEQ ID NO: 41494 - DNA, 20 bp, Artificial Sequence
  chemically synthesized
ctgtgtggaataccatgaca

SEQ ID NO: 41495 - DNA, 20 bp, Artificial Sequence
  chemically synthesized
atacggcattctgtgattcc

SEQ ID NO: 41496 - DNA, 20 bp, Artificial Sequence
  chemically synthesized
tggtagtcttggcataagca

SEQ ID NO: 41497 - DNA, 20 bp, Artificial Sequence
  chemically synthesized
cttggcataagcattgagtt

SEQ ID NO: 41498 - DNA, 20 bp, Artificial Sequence
  chemically synthesized
aggattgggaaacccatatc

SEQ ID NO: 41499 - DNA, 20 bp, Artificial Sequence
  chemically synthesized
gtagctggctgatcaccccg

SEQ ID NO: 41500 - DNA, 20 bp, Artificial Sequence
  chemically synthesized
ctgtggccaggtcagctttg

SEQ ID NO: 41501 - DNA, 20 bp, Artificial Sequence
  chemically synthesized
caactgtggccactttgttc

SEQ ID NO: 41502 - DNA, 20 bp, Artificial Sequence
  chemically synthesized
tgggtccattggacgatgac

SEQ ID NO: 41503 - DNA, 20 bp, Artificial Sequence
  chemically synthesized
atgagtggcctgggaaaagg

SEQ ID NO: 41504 - DNA, 20 bp, Artificial Sequence
  chemically synthesized
aaaaggctgagtggtgtcca

SEQ ID NO: 41505 - DNA, 20 bp, Artificial Sequence
  chemically synthesized
cccattggtgagcactcaca

SEQ ID NO: 41506 - DNA, 20 bp, Artificial Sequence
  chemically synthesized
caaacctttggctacagccc

SEQ ID NO: 41507 - DNA, 20 bp, Artificial Sequence
  chemically synthesized
tcccttcaccgttgtccttc

SEQ ID NO: 41508 - DNA, 20 bp, Artificial Sequence
  chemically synthesized
agtgctgcggctgtccactt

SEQ ID NO: 41509 - DNA, 20 bp, Artificial Sequence
  chemically synthesized
gggagagaaagcagtgtgtc

SEQ ID NO: 41510 - DNA, 20 bp, Artificial Sequence
  chemically synthesized
atgtaacttactagtgcctt

SEQ ID NO: 41511 - DNA, 20 bp, Artificial Sequence
  chemically synthesized
acagcccactttatggctag

SEQ ID NO: 41512 - DNA, 20 bp, Artificial Sequence
  chemically synthesized
caagagctttctccctaaaa

SEQ ID NO: 41513 - DNA, 20 bp, Artificial Sequence
  chemically synthesized
cactgacacctcaagcatca

SEQ ID NO: 41514 - DNA, 20 bp, Artificial Sequence
  chemically synthesized
cactcaaaactggcagcctt

SEQ ID NO: 41515 - DNA, 20 bp, Artificial Sequence
  chemically synthesized
ggatcactcgataaatgggc

SEQ ID NO: 41516 - DNA, 20 bp, Artificial Sequence
  chemically synthesized
cagagtaacacacccaaatc

SEQ ID NO: 41517 - DNA, 20 bp, Artificial Sequence
  chemically synthesized
tgtgcctatttcttggttgt

SEQ ID NO: 41518 - DNA, 20 bp, Artificial Sequence
  chemically synthesized
aaattatccttcactttaga

SEQ ID NO: 41519 - DNA, 20 bp, Artificial Sequence
  chemically synthesized
tttactgaggtagaaggtcc

SEQ ID NO: 41520 - DNA, 20 bp, Artificial Sequence
  chemically synthesized
aagattatggcacaaagctg

SEQ ID NO: 41521 - DNA, 20 bp, Artificial Sequence
  chemically synthesized
gctggagagttgatatactc

SEQ ID NO: 41522 - DNA, 20 bp, Artificial Sequence
  chemically synthesized
ttccttgcctctcacaagcg

SEQ ID NO: 41523 - DNA, 20 bp, Artificial Sequence
  chemically synthesized
cctctcacaagcgttgaatc

SEQ ID NO: 41524 - DNA, 20 bp, Artificial Sequence
  chemically synthesized
ctctctaaacaattgatgcc

SEQ ID NO: 41525 - DNA, 20 bp, Artificial Sequence
  chemically synthesized
gttctccataccattagaag

SEQ ID NO: 41526 - DNA, 20 bp, Artificial Sequence
  chemically synthesized
aagaagagtccttagcatat

SEQ ID NO: 41527 - DNA, 20 bp, Artificial Sequence
  chemically synthesized
cctggtaccaaaatctgtat

SEQ ID NO: 41528 - DNA, 20 bp, Artificial Sequence
  chemically synthesized
attagggttctacagagaaa

SEQ ID NO: 41529 - DNA, 20 bp, Artificial Sequence
  chemically synthesized
ctctatatctatatctatat

SEQ ID NO: 41530 - DNA, 20 bp, Artificial Sequence
  chemically synthesized
tgaggaacaaggaagctagt

SEQ ID NO: 41531 - DNA, 20 bp, Artificial Sequence
  chemically synthesized
agtcccaaagctgaagaacc

SEQ ID NO: 41532 - DNA, 20 bp, Artificial Sequence
  chemically synthesized
gttcaatgttccagggcagg

SEQ ID NO: 41533 - DNA, 20 bp, Artificial Sequence
  chemically synthesized
catgggagaaaaatgtaggc

SEQ ID NO: 41534 - DNA, 20 bp, Artificial Sequence
  chemically synthesized
agatggtgcccacccagatt

SEQ ID NO: 41535 - DNA, 20 bp, Artificial Sequence
  chemically synthesized
ggtgcccacccagattaagg

SEQ ID NO: 41536 - DNA, 20 bp, Artificial Sequence
  chemically synthesized
tgaggttggtttttttgttg

SEQ ID NO: 41537 - DNA, 20 bp, Artificial Sequence
  chemically synthesized
tactctccttaattttcccc

SEQ ID NO: 41538 - DNA, 20 bp, Artificial Sequence
  chemically synthesized
gttttctagatgtggacttg

SEQ ID NO: 41539 - DNA, 20 bp, Artificial Sequence
  chemically synthesized
gtagcagcaatattagagga

SEQ ID NO: 41540 - DNA, 20 bp, Artificial Sequence
  chemically synthesized
catacaaaacccctcagaca

SEQ ID NO: 41541 - DNA, 20 bp, Artificial Sequence
  chemically synthesized
atctccaacaaccaagctct

SEQ ID NO: 41542 - DNA, 20 bp, Artificial Sequence
  chemically synthesized
ttaagggcttacaactctaa

SEQ ID NO: 41543 - DNA, 20 bp, Artificial Sequence
  chemically synthesized
gggctgcatgcactggtcat

SEQ ID NO: 41544 - DNA, 20 bp, Artificial Sequence
  chemically synthesized
agaatggaacagaacaggac

SEQ ID NO: 41545 - DNA, 20 bp, Artificial Sequence
  chemically synthesized
ctgcttttccatacagtgtc

SEQ ID NO: 41546 - DNA, 20 bp, Artificial Sequence
  chemically synthesized
ataacataactggccaggtc

SEQ ID NO: 41547 - DNA, 20 bp, Artificial Sequence
  chemically synthesized
ggtctatctttaaccaggcc

SEQ ID NO: 41548 - DNA, 20 bp, Artificial Sequence
  chemically synthesized
tggtctcaggctgtttgcct

SEQ ID NO: 41549 - DNA, 20 bp, Artificial Sequence
  chemically synthesized
attgggcataaaacaatatg

SEQ ID NO: 41550 - DNA, 20 bp, Artificial Sequence
  chemically synthesized
ggaagagagaaataccatgt

SEQ ID NO: 41551 - DNA, 20 bp, Artificial Sequence
  chemically synthesized
tgaaatacgtatttgtgtta

SEQ ID NO: 41552 - DNA, 20 bp, Artificial Sequence
  chemically synthesized
tgtgttattggatttgacat

SEQ ID NO: 41553 - DNA, 20 bp, Artificial Sequence
  chemically synthesized
tgagggcatgtatgatgaca

SEQ ID NO: 41554 - DNA, 20 bp, Artificial Sequence
  chemically synthesized
aagggactttaaaacatgca

SEQ ID NO: 41555 - DNA, 20 bp, Artificial Sequence
  chemically synthesized
taaataaatccttgggctta

SEQ ID NO: 41556 - DNA, 20 bp, Artificial Sequence
  chemically synthesized
actttaaacaaattgctaac

SEQ ID NO: 41557 - DNA, 20 bp, Artificial Sequence
  chemically synthesized
aaaggccaaaacaacagcag

SEQ ID NO: 41558 - DNA, 20 bp, Artificial Sequence
  chemically synthesized
tcagaagagcagtggacgca

SEQ ID NO: 41559 - DNA, 20 bp, Artificial Sequence
  chemically synthesized
atgctcaaaatatggaccta

SEQ ID NO: 41560 - DNA, 20 bp, Artificial Sequence
  chemically synthesized
aaagaggtcaaatacctcaa

SEQ ID NO: 41561 - DNA, 20 bp, Artificial Sequence
  chemically synthesized
catcatacatgccctcagca

SEQ ID NO: 41562 - DNA, 20 bp, Artificial Sequence
  chemically synthesized
ctgctgtggttttcaattat

SEQ ID NO: 41563 - DNA, 20 bp, Artificial Sequence
  chemically synthesized
tatgcccaatttctgcctcc

SEQ ID NO: 41564 - DNA, 20 bp, Artificial Sequence
  chemically synthesized
gaagaagtaaaaactaaaag

SEQ ID NO: 41565 - DNA, 20 bp, Artificial Sequence
  chemically synthesized
atgcagcttgtcctgctaca

SEQ ID NO: 41566 - DNA, 20 bp, Artificial Sequence
  chemically synthesized
tggatccagcaagtccacat

SEQ ID NO: 41567 - DNA, 20 bp, Artificial Sequence
  chemically synthesized
agcattatgatggcaaaaaa

SEQ ID NO: 41568 - DNA, 20 bp, Artificial Sequence
  chemically synthesized
aaattagatgtggcctaggc

SEQ ID NO: 41569 - DNA, 20 bp, Artificial Sequence
  chemically synthesized
acagagtaaacggataacct

SEQ ID NO: 41570 - DNA, 20 bp, Artificial Sequence
  chemically synthesized
taaacggataacctacagaa

SEQ ID NO: 41571 - DNA, 20 bp, Artificial Sequence
  chemically synthesized
atgcaacaaaaggctaatat

SEQ ID NO: 41572 - DNA, 20 bp, Artificial Sequence
  chemically synthesized
caacaaaaaaaccaacctca

SEQ ID NO: 41573 - DNA, 20 bp, Artificial Sequence
  chemically synthesized
acagccaggatataaagcag

SEQ ID NO: 41574 - DNA, 20 bp, Artificial Sequence
  chemically synthesized
ccaggagtggttctagagga

SEQ ID NO: 41575 - DNA, 20 bp, Artificial Sequence
  chemically synthesized
taatacttttgactatatgt

SEQ ID NO: 41576 - DNA, 20 bp, Artificial Sequence
  chemically synthesized
gttcgctggacaaagtgatg

SEQ ID NO: 41577 - DNA, 20 bp, Artificial Sequence
  chemically synthesized
catttggccactcttacaac

SEQ ID NO: 41578 - DNA, 20 bp, Artificial Sequence
  chemically synthesized
agataactactctcttttag

SEQ ID NO: 41579 - DNA, 20 bp, Artificial Sequence
  chemically synthesized
gaaggcactagtaagttaca

SEQ ID NO: 41580 - DNA, 20 bp, Artificial Sequence
  chemically synthesized
gttgtgcactttgcacagaa

SEQ ID NO: 41581 - DNA, 20 bp, Artificial Sequence
  chemically synthesized
atgactggaaaattgatgac

SEQ ID NO: 41582 - DNA, 20 bp, Artificial Sequence
  chemically synthesized
agactaccatccatggaatc

SEQ ID NO: 41583 - DNA, 20 bp, Artificial Sequence
  chemically synthesized
ttgctgagggcaaagggaat

SEQ ID NO: 41584 - DNA, 20 bp, Artificial Sequence
  chemically synthesized
gtgtctgtatacacttgtac

SEQ ID NO: 41585 - DNA, 20 bp, Artificial Sequence
  chemically synthesized
gtggccaggatataaagcag

SEQ ID NO: 41586 - DNA, 20 bp, Artificial Sequence
  chemically synthesized
gttcaacatcactaataatc

SEQ ID NO: 41587 - DNA, 20 bp, Artificial Sequence
  chemically synthesized
atgatacctccttatgccag

SEQ ID NO: 41588 - DNA, 20 bp, Artificial Sequence
  chemically synthesized
tgttggtgaggatgtggaga

SEQ ID NO: 41589 - DNA, 20 bp, Artificial Sequence
  chemically synthesized
aaatgcttatacactgttgg

SEQ ID NO: 41590 - DNA, 20 bp, Artificial Sequence
  chemically synthesized
catgaagatttcttaaagaa

SEQ ID NO: 41591 - DNA, 20 bp, Artificial Sequence
  chemically synthesized
ctaccaatggacgattggat

SEQ ID NO: 41592 - DNA, 20 bp, Artificial Sequence
  chemically synthesized
atatattactcagccataaa

SEQ ID NO: 41593 - DNA, 20 bp, Artificial Sequence
  chemically synthesized
agaatgaaatcatgtcttct

SEQ ID NO: 41594 - DNA, 20 bp, Artificial Sequence
  chemically synthesized
attatcctcagtgaaataac

SEQ ID NO: 41595 - DNA, 20 bp, Artificial Sequence
  chemically synthesized
ctcagtgaaataactcagaa

SEQ ID NO: 41596 - DNA, 20 bp, Artificial Sequence
  chemically synthesized
cgatgagtaagcatagacat

SEQ ID NO: 41597 - DNA, 20 bp, Artificial Sequence
  chemically synthesized
aataatagacacttgagact

SEQ ID NO: 41598 - DNA, 20 bp, Artificial Sequence
  chemically synthesized
aatggggtaattaaaagggt

SEQ ID NO: 41599 - DNA, 20 bp, Artificial Sequence
  chemically synthesized
cactaaataataatcacatg

SEQ ID NO: 41600 - DNA, 20 bp, Artificial Sequence
  chemically synthesized
gctagagcaaggggatgact

SEQ ID NO: 41601 - DNA, 20 bp, Artificial Sequence
  chemically synthesized
ctacacaagctaattgtcct

SEQ ID NO: 41602 - DNA, 20 bp, Artificial Sequence
  chemically synthesized
tcagatgttatgtgatgagg

SEQ ID NO: 41603 - DNA, 20 bp, Artificial Sequence
  chemically synthesized
atagaacacatgaggaggaa

SEQ ID NO: 41604 - DNA, 20 bp, Artificial Sequence
  chemically synthesized
tcctcaaattctggacaatt

SEQ ID NO: 41605 - DNA, 20 bp, Artificial Sequence
  chemically synthesized
cacaaaaatgcaaaatttcc

SEQ ID NO: 41606 - DNA, 20 bp, Artificial Sequence
  chemically synthesized
cttcatcttcatcttttcca

SEQ ID NO: 41607 - DNA, 20 bp, Artificial Sequence
  chemically synthesized
gaaatagagattctttattt

SEQ ID NO: 41608 - DNA, 20 bp, Artificial Sequence
  chemically synthesized
tgatttgggaaatgaaatga

SEQ ID NO: 41609 - DNA, 20 bp, Artificial Sequence
  chemically synthesized
gattatgctctttcagtcta

SEQ ID NO: 41610 - DNA, 20 bp, Artificial Sequence
  chemically synthesized
acaaagaaccaaaatagtaa

SEQ ID NO: 41611 - DNA, 20 bp, Artificial Sequence
  chemically synthesized
agtagaaaatcccacataag

SEQ ID NO: 41612 - DNA, 20 bp, Artificial Sequence
  chemically synthesized
ctacacatttataagctccc

SEQ ID NO: 41613 - DNA, 20 bp, Artificial Sequence
  chemically synthesized
aagcaaactgcctgaaggcc

SEQ ID NO: 41614 - DNA, 20 bp, Artificial Sequence
  chemically synthesized
gactatgctgctgtatgcac

SEQ ID NO: 41615 - DNA, 20 bp, Artificial Sequence
  chemically synthesized
atcaacaccaagatacatct

SEQ ID NO: 41616 - DNA, 20 bp, Artificial Sequence
  chemically synthesized
caaaataaacataaaaaggt

SEQ ID NO: 41617 - DNA, 20 bp, Artificial Sequence
  chemically synthesized
catttataaaattctggaaa

SEQ ID NO: 41618 - DNA, 20 bp, Artificial Sequence
  chemically synthesized
agaactcagataaacaataa

SEQ ID NO: 41619 - DNA, 20 bp, Artificial Sequence
  chemically synthesized
agataaacaataaaaagaaa

SEQ ID NO: 41620 - DNA, 20 bp, Artificial Sequence
  chemically synthesized
aaaacaattcaggatatgaa

SEQ ID NO: 41621 - DNA, 20 bp, Artificial Sequence
  chemically synthesized
tacccaagagatagatacaa

SEQ ID NO: 41622 - DNA, 20 bp, Artificial Sequence
  chemically synthesized
atacaacaagaatgaaccaa

SEQ ID NO: 41623 - DNA, 20 bp, Artificial Sequence
  chemically synthesized
tgtaactgaagagtttattg

SEQ ID NO: 41624 - DNA, 20 bp, Artificial Sequence
  chemically synthesized
acaatagatcagatcaagca

SEQ ID NO: 41625 - DNA, 20 bp, Artificial Sequence
  chemically synthesized
taaaattagctggtcaaatg

SEQ ID NO: 41626 - DNA, 20 bp, Artificial Sequence
  chemically synthesized
aaatgatagaaaggaaaaaa

SEQ ID NO: 41627 - DNA, 20 bp, Artificial Sequence
  chemically synthesized
tgaaaacttgtcaagtctag

SEQ ID NO: 41628 - DNA, 20 bp, Artificial Sequence
  chemically synthesized
gacatccagacaaatgaaaa

SEQ ID NO: 41629 - DNA, 20 bp, Artificial Sequence
  chemically synthesized
gattaacagcagatttctca

SEQ ID NO: 41630 - DNA, 20 bp, Artificial Sequence
  chemically synthesized
atgatatattcaaaatagtg

SEQ ID NO: 41631 - DNA, 20 bp, Artificial Sequence
  chemically synthesized
taaataaaatcttttctggg

SEQ ID NO: 41632 - DNA, 20 bp, Artificial Sequence
  chemically synthesized
ctatcactagactggcttta

SEQ ID NO: 41633 - DNA, 20 bp, Artificial Sequence
  chemically synthesized
gagcaaaacacaaataaaga

SEQ ID NO: 41634 - DNA, 20 bp, Artificial Sequence
  chemically synthesized
agaactcaaacgttaccact

SEQ ID NO: 41635 - DNA, 20 bp, Artificial Sequence
  chemically synthesized
caaaccacaatcataaataa

SEQ ID NO: 41636 - DNA, 20 bp, Artificial Sequence
  chemically synthesized
ccacaatcataaataataag

SEQ ID NO: 41637 - DNA, 20 bp, Artificial Sequence
  chemically synthesized
aatcataaataataagaaag

SEQ ID NO: 41638 - DNA, 20 bp, Artificial Sequence
  chemically synthesized
ataaataataagaaagaaag

SEQ ID NO: 41639 - DNA, 20 bp, Artificial Sequence
  chemically synthesized
ataataagaaagaaagaaag

SEQ ID NO: 41640 - DNA, 20 bp, Artificial Sequence
  chemically synthesized
agaaagaaagagagagagag

SEQ ID NO: 41641 - DNA, 20 bp, Artificial Sequence
  chemically synthesized
agagagagagagagagaatg

SEQ ID NO: 41642 - DNA, 20 bp, Artificial Sequence
  chemically synthesized
agagagagagagaatgaaag

SEQ ID NO: 41643 - DNA, 20 bp, Artificial Sequence
  chemically synthesized
aagaaagaaaaggaaggaag

SEQ ID NO: 41644 - DNA, 20 bp, Artificial Sequence
  chemically synthesized
acccagttgtaagctgccta

SEQ ID NO: 41645 - DNA, 20 bp, Artificial Sequence
  chemically synthesized
atgaaagatcttccatacaa

SEQ ID NO: 41646 - DNA, 20 bp, Artificial Sequence
  chemically synthesized
tattagatataaagggtgaa

SEQ ID NO: 41647 - DNA, 20 bp, Artificial Sequence
  chemically synthesized
gcatcagatagatcatctag

SEQ ID NO: 41648 - DNA, 20 bp, Artificial Sequence
  chemically synthesized
catctagacagaaaattaac

SEQ ID NO: 41649 - DNA, 20 bp, Artificial Sequence
  chemically synthesized
caatatttcatccaacagct

SEQ ID NO: 41650 - DNA, 20 bp, Artificial Sequence
  chemically synthesized
cagaccacaatggaataaaa

SEQ ID NO: 41651 - DNA, 20 bp, Artificial Sequence
  chemically synthesized
ataaaactagaaatcaataa

SEQ ID NO: 41652 - DNA, 20 bp, Artificial Sequence
  chemically synthesized
ctgaatgaacgttatgtcaa

SEQ ID NO: 41653 - DNA, 20 bp, Artificial Sequence
  chemically synthesized
taaacacttaaattaaaaac

SEQ ID NO: 41654 - DNA, 20 bp, Artificial Sequence
  chemically synthesized
taatcatgtacctcaacaag

SEQ ID NO: 41655 - DNA, 20 bp, Artificial Sequence
  chemically synthesized
aacccaaaactagcagaagg

SEQ ID NO: 41656 - DNA, 20 bp, Artificial Sequence
  chemically synthesized
acagaagaacttaatgaaat

SEQ ID NO: 41657 - DNA, 20 bp, Artificial Sequence
  chemically synthesized
atagctctagctagactaac

SEQ ID NO: 41658 - DNA, 20 bp, Artificial Sequence
  chemically synthesized
aaaagagaagagactgaaat

SEQ ID NO: 41659 - DNA, 20 bp, Artificial Sequence
  chemically synthesized
agagactgaaataaagaaaa

SEQ ID NO: 41660 - DNA, 20 bp, Artificial Sequence
  chemically synthesized
taaagaaaatcagaaataaa

SEQ ID NO: 41661 - DNA, 20 bp, Artificial Sequence
  chemically synthesized
aatatattacaaccgatacc

SEQ ID NO: 41662 - DNA, 20 bp, Artificial Sequence
  chemically synthesized
ttacaaccgataccacagaa

SEQ ID NO: 41663 - DNA, 20 bp, Artificial Sequence
  chemically synthesized
accacctaccaagattgaat

SEQ ID NO: 41664 - DNA, 20 bp, Artificial Sequence
  chemically synthesized
cctaccaagattgaattaag

SEQ ID NO: 41665 - DNA, 20 bp, Artificial Sequence
  chemically synthesized
caagattgaattaagaaaga

SEQ ID NO: 41666 - DNA, 20 bp, Artificial Sequence
  chemically synthesized
gtagtaaaaagtctcccaaa

SEQ ID NO: 41667 - DNA, 20 bp, Artificial Sequence
  chemically synthesized
tcaaattttaccaaactttc

SEQ ID NO: 41668 - DNA, 20 bp, Artificial Sequence
  chemically synthesized
atatgatcatctcaatagat

SEQ ID NO: 41669 - DNA, 20 bp, Artificial Sequence
  chemically synthesized
ctagccacagctttcaggtc

SEQ ID NO: 41670 - DNA, 20 bp, Artificial Sequence
  chemically synthesized
ccacagctttcaggtcagag

SEQ ID NO: 41671 - DNA, 20 bp, Artificial Sequence
  chemically synthesized
agctttcaggtcagagaaag

SEQ ID NO: 41672 - DNA, 20 bp, Artificial Sequence
  chemically synthesized
ttcaggtcagagaaagaaag

SEQ ID NO: 41673 - DNA, 20 bp, Artificial Sequence
  chemically synthesized
cagatgacatgattttatac

SEQ ID NO: 41674 - DNA, 20 bp, Artificial Sequence
  chemically synthesized
aaaactacaaaacactgata

SEQ ID NO: 41675 - DNA, 20 bp, Artificial Sequence
  chemically synthesized
tgataaaagaattgaaaagg

SEQ ID NO: 41676 - DNA, 20 bp, Artificial Sequence
  chemically synthesized
agatatcctatgttcatgga

SEQ ID NO: 41677 - DNA, 20 bp, Artificial Sequence
  chemically synthesized
aaatagcaatgtcatttttc

SEQ ID NO: 41678 - DNA, 20 bp, Artificial Sequence
  chemically synthesized
cagacacttagaccaatgga

SEQ ID NO: 41679 - DNA, 20 bp, Artificial Sequence
  chemically synthesized
aatggaagagaatagagaac

SEQ ID NO: 41680 - DNA, 20 bp, Artificial Sequence
  chemically synthesized
cagattttcaacaaaggtga

SEQ ID NO: 41681 - DNA, 20 bp, Artificial Sequence
  chemically synthesized
tgaggaaaggacacagtgtt

SEQ ID NO: 41682 - DNA, 20 bp, Artificial Sequence
  chemically synthesized
ccattggatatccatgtgca

SEQ ID NO: 41683 - DNA, 20 bp, Artificial Sequence
  chemically synthesized
cctaaacacacactcccact

SEQ ID NO: 41684 - DNA, 20 bp, Artificial Sequence
  chemically synthesized
tacaggtgtagaggaagcag

SEQ ID NO: 41685 - DNA, 20 bp, Artificial Sequence
  chemically synthesized
agaacaattactaatagacc

SEQ ID NO: 41686 - DNA, 20 bp, Artificial Sequence
  chemically synthesized
gcactagacagttcatcaag

SEQ ID NO: 41687 - DNA, 20 bp, Artificial Sequence
  chemically synthesized
caggaccagatggattcaca

SEQ ID NO: 41688 - DNA, 20 bp, Artificial Sequence
  chemically synthesized
cagggaaggacataaccaaa

SEQ ID NO: 41689 - DNA, 20 bp, Artificial Sequence
  chemically synthesized
acatgatcatctcaatagat

SEQ ID NO: 41690 - DNA, 20 bp, Artificial Sequence
  chemically synthesized
ccagggcaatcagacaaaac

SEQ ID NO: 41691 - DNA, 20 bp, Artificial Sequence
  chemically synthesized
ttaaaaccctaaagactcct

SEQ ID NO: 41692 - DNA, 20 bp, Artificial Sequence
  chemically synthesized
tacaccaacagcaaccaaat

SEQ ID NO: 41693 - DNA, 20 bp, Artificial Sequence
  chemically synthesized
ttaaaactataaaactacta

SEQ ID NO: 41694 - DNA, 20 bp, Artificial Sequence
  chemically synthesized
aagagacaagctgttgaatg

SEQ ID NO: 41695 - DNA, 20 bp, Artificial Sequence
  chemically synthesized
atttgacaaggaattaatct

SEQ ID NO: 41696 - DNA, 20 bp, Artificial Sequence
  chemically synthesized
gaattaatctccagaatata

SEQ ID NO: 41697 - DNA, 20 bp, Artificial Sequence
  chemically synthesized
gctcaacattactaatcatc

SEQ ID NO: 41698 - DNA, 20 bp, Artificial Sequence
  chemically synthesized
gagatatcatcttatgccag

SEQ ID NO: 41699 - DNA, 20 bp, Artificial Sequence
  chemically synthesized
ctgggtatttatccaaagga

SEQ ID NO: 41700 - DNA, 20 bp, Artificial Sequence
  chemically synthesized
tttatccaaaggaaaagaat

SEQ ID NO: 41701 - DNA, 20 bp, Artificial Sequence
  chemically synthesized
gtgtccatcaatggatgaat

SEQ ID NO: 41702 - DNA, 20 bp, Artificial Sequence
  chemically synthesized
ttaaacgaaataagccaggc

SEQ ID NO: 41703 - DNA, 20 bp, Artificial Sequence
  chemically synthesized
taatatcatgtaggtagaga

SEQ ID NO: 41704 - DNA, 20 bp, Artificial Sequence
  chemically synthesized
tgtaggtagagagtagaatg

SEQ ID NO: 41705 - DNA, 20 bp, Artificial Sequence
  chemically synthesized
gaatgacagaaaccagaggt

SEQ ID NO: 41706 - DNA, 20 bp, Artificial Sequence
  chemically synthesized
ttgtatatttcaaaatagta

SEQ ID NO: 41707 - DNA, 20 bp, Artificial Sequence
  chemically synthesized
tcttgaaatgttcctaacac

SEQ ID NO: 41708 - DNA, 20 bp, Artificial Sequence
  chemically synthesized
aaacacgtcatatatcaata

SEQ ID NO: 41709 - DNA, 20 bp, Artificial Sequence
  chemically synthesized
caaacttctctcttaacaag

SEQ ID NO: 41710 - DNA, 20 bp, Artificial Sequence
  chemically synthesized
ggttttattctgacattaaa

SEQ ID NO: 41711 - DNA, 20 bp, Artificial Sequence
  chemically synthesized
agtatcacaactttcacctg

SEQ ID NO: 41712 - DNA, 20 bp, Artificial Sequence
  chemically synthesized
aatcactatttcaaagaagt

SEQ ID NO: 41713 - DNA, 20 bp, Artificial Sequence
  chemically synthesized
tatacatattatacacatat

SEQ ID NO: 41714 - DNA, 20 bp, Artificial Sequence
  chemically synthesized
tccacatcagtaattagggc

SEQ ID NO: 41715 - DNA, 20 bp, Artificial Sequence
  chemically synthesized
attttatgaataaattttat

SEQ ID NO: 41716 - DNA, 20 bp, Artificial Sequence
  chemically synthesized
tacaggtagattttatatat

SEQ ID NO: 41717 - DNA, 20 bp, Artificial Sequence
  chemically synthesized
gtgagcctccatggccagct

SEQ ID NO: 41718 - DNA, 20 bp, Artificial Sequence
  chemically synthesized
gagaaattttttaaatttct

SEQ ID NO: 41719 - DNA, 20 bp, Artificial Sequence
  chemically synthesized
tttaaaagtggtggggggta

SEQ ID NO: 41720 - DNA, 20 bp, Artificial Sequence
  chemically synthesized
gatccttttcattttgctct

SEQ ID NO: 41721 - DNA, 20 bp, Artificial Sequence
  chemically synthesized
aagtgtgaagtcctcttctc

SEQ ID NO: 41722 - DNA, 20 bp, Artificial Sequence
  chemically synthesized
tagatataatttctgaaggt

SEQ ID NO: 41723 - DNA, 20 bp, Artificial Sequence
  chemically synthesized
gttctgagcaagtgtgtgca

SEQ ID NO: 41724 - DNA, 20 bp, Artificial Sequence
  chemically synthesized
agtacttcccactactgtgg

SEQ ID NO: 41725 - DNA, 20 bp, Artificial Sequence
  chemically synthesized
caaacctctaggtaactagg

SEQ ID NO: 41726 - DNA, 20 bp, Artificial Sequence
  chemically synthesized
atttgtcaattcttgaagat

SEQ ID NO: 41727 - DNA, 20 bp, Artificial Sequence
  chemically synthesized
aaaaaggttattttgaagtc

SEQ ID NO: 41728 - DNA, 20 bp, Artificial Sequence
  chemically synthesized
gcagcaagggattcttctcc

SEQ ID NO: 41729 - DNA, 20 bp, Artificial Sequence
  chemically synthesized
tgaatacatttccttgtttg

SEQ ID NO: 41730 - DNA, 20 bp, Artificial Sequence
  chemically synthesized
ataacattcattttattcat

SEQ ID NO: 41731 - DNA, 20 bp, Artificial Sequence
  chemically synthesized
tcagtttaaggggttctttt

SEQ ID NO: 41732 - DNA, 20 bp, Artificial Sequence
  chemically synthesized
gggttctttttcagaaagtt

SEQ ID NO: 41733 - DNA, 20 bp, Artificial Sequence
  chemically synthesized
aaattcaaatcattaaattt

SEQ ID NO: 41734 - DNA, 20 bp, Artificial Sequence
  chemically synthesized
ttccccttgaaagggaaatg

SEQ ID NO: 41735 - DNA, 20 bp, Artificial Sequence
  chemically synthesized
cattaatgtttgttaaatga

SEQ ID NO: 41736 - DNA, 20 bp, Artificial Sequence
  chemically synthesized
tgagctcctgcccactctct

SEQ ID NO: 41737 - DNA, 20 bp, Artificial Sequence
  chemically synthesized
tggactggaaaaatttgtga

SEQ ID NO: 41738 - DNA, 20 bp, Artificial Sequence
  chemically synthesized
aggataaagatctctgagga

SEQ ID NO: 41739 - DNA, 20 bp, Artificial Sequence
  chemically synthesized
aagaatacaaaataatttaa

SEQ ID NO: 41740 - DNA, 20 bp, Artificial Sequence
  chemically synthesized
aaataatttaaaaagaaaca

SEQ ID NO: 41741 - DNA, 20 bp, Artificial Sequence
  chemically synthesized
attctttctcactaaactac

SEQ ID NO: 41742 - DNA, 20 bp, Artificial Sequence
  chemically synthesized
ataaggtgaattctgatttt

SEQ ID NO: 41743 - DNA, 20 bp, Artificial Sequence
  chemically synthesized
tcctacataagcatagcatt

SEQ ID NO: 41744 - DNA, 20 bp, Artificial Sequence
  chemically synthesized
agcatttcatataattacta

SEQ ID NO: 41745 - DNA, 20 bp, Artificial Sequence
  chemically synthesized
gtttaattatactattttgc

SEQ ID NO: 41746 - DNA, 20 bp, Artificial Sequence
  chemically synthesized
tgaaatcttatgtgcttccc

SEQ ID NO: 41747 - DNA, 20 bp, Artificial Sequence
  chemically synthesized
accgtcctcacaatacctgc

SEQ ID NO: 41748 - DNA, 20 bp, Artificial Sequence
  chemically synthesized
acaatacctgcccagaaaga

SEQ ID NO: 41749 - DNA, 20 bp, Artificial Sequence
  chemically synthesized
agaaagacgagaaagaggag

SEQ ID NO: 41750 - DNA, 20 bp, Artificial Sequence
  chemically synthesized
ggagtctcggaggactgtaa

SEQ ID NO: 41751 - DNA, 20 bp, Artificial Sequence
  chemically synthesized
cttgtgtatgtgttgaagag

SEQ ID NO: 41752 - DNA, 20 bp, Artificial Sequence
  chemically synthesized
aaaatccatattatgacaac

SEQ ID NO: 41753 - DNA, 20 bp, Artificial Sequence
  chemically synthesized
tagtaattatatgaaatgct

SEQ ID NO: 41754 - DNA, 20 bp, Artificial Sequence
  chemically synthesized
ggcaaaatactgtgctcctt

SEQ ID NO: 41755 - DNA, 20 bp, Artificial Sequence
  chemically synthesized
ttatgtaggaattataaaat

SEQ ID NO: 41756 - DNA, 20 bp, Artificial Sequence
  chemically synthesized
actattgaaggaacattagc

SEQ ID NO: 41757 - DNA, 20 bp, Artificial Sequence
  chemically synthesized
gctgagttcctcaagatctt

SEQ ID NO: 41758 - DNA, 20 bp, Artificial Sequence
  chemically synthesized
taaaggatctgaaataataa

SEQ ID NO: 41759 - DNA, 20 bp, Artificial Sequence
  chemically synthesized
atggcatgcattctgaaaaa

SEQ ID NO: 41760 - DNA, 20 bp, Artificial Sequence
  chemically synthesized
ttttgcctatgtagaagtgg

SEQ ID NO: 41761 - DNA, 20 bp, Artificial Sequence
  chemically synthesized
tcttattctctgtagtttag

SEQ ID NO: 41762 - DNA, 20 bp, Artificial Sequence
  chemically synthesized
attctctgtagtttagtgag

SEQ ID NO: 41763 - DNA, 20 bp, Artificial Sequence
  chemically synthesized
gtgagaaagaatctaggagg

SEQ ID NO: 41764 - DNA, 20 bp, Artificial Sequence
  chemically synthesized
tctagaacagtgcctggtac

SEQ ID NO: 41765 - DNA, 20 bp, Artificial Sequence
  chemically synthesized
ttcacttttttactattatg

SEQ ID NO: 41766 - DNA, 20 bp, Artificial Sequence
  chemically synthesized
caaggaaatgtattcacatc

SEQ ID NO: 41767 - DNA, 20 bp, Artificial Sequence
  chemically synthesized
aaacaaaaggtttcttagga

SEQ ID NO: 41768 - DNA, 20 bp, Artificial Sequence
  chemically synthesized
aggagaagaatcccttgctg

SEQ ID NO: 41769 - DNA, 20 bp, Artificial Sequence
  chemically synthesized
agaggcgagggagatagagt

SEQ ID NO: 41770 - DNA, 20 bp, Artificial Sequence
  chemically synthesized
cagaactgattcttaatctt

SEQ ID NO: 41771 - DNA, 20 bp, Artificial Sequence
  chemically synthesized
gaaggataaatagctaaagg

SEQ ID NO: 41772 - DNA, 20 bp, Artificial Sequence
  chemically synthesized
ctcagaacattacaaactct

SEQ ID NO: 41773 - DNA, 20 bp, Artificial Sequence
  chemically synthesized
acacataatgaaagttaatt

SEQ ID NO: 41774 - DNA, 20 bp, Artificial Sequence
  chemically synthesized
tgcttccctcttaaaatgga

SEQ ID NO: 41775 - DNA, 20 bp, Artificial Sequence
  chemically synthesized
catggtacaagtggcacagg

SEQ ID NO: 41776 - DNA, 20 bp, Artificial Sequence
  chemically synthesized
caagtggcacagggaagaat

SEQ ID NO: 41777 - DNA, 20 bp, Artificial Sequence
  chemically synthesized
ctagagtcaaagtggttatg

SEQ ID NO: 41778 - DNA, 20 bp, Artificial Sequence
  chemically synthesized
ctcaaggagtttctaaacct

SEQ ID NO: 41779 - DNA, 20 bp, Artificial Sequence
  chemically synthesized
cacttttcaaggctgaggtg

SEQ ID NO: 41780 - DNA, 20 bp, Artificial Sequence
  chemically synthesized
catagggagaccctgtttct

SEQ ID NO: 41781 - DNA, 20 bp, Artificial Sequence
  chemically synthesized
taataatgttgtgaaaatta

SEQ ID NO: 41782 - DNA, 20 bp, Artificial Sequence
  chemically synthesized
ttgcatttttaaacacaaaa

SEQ ID NO: 41783 - DNA, 20 bp, Artificial Sequence
  chemically synthesized
ctttgattttaactgaggat

SEQ ID NO: 41784 - DNA, 20 bp, Artificial Sequence
  chemically synthesized
agagagagcgagagagaggc

SEQ ID NO: 41785 - DNA, 20 bp, Artificial Sequence
  chemically synthesized
aagtattttcttttttaatg

SEQ ID NO: 41786 - DNA, 20 bp, Artificial Sequence
  chemically synthesized
gctaaaatggtgttggaata

SEQ ID NO: 41787 - DNA, 20 bp, Artificial Sequence
  chemically synthesized
tttggtgtgatgctggcttc

SEQ ID NO: 41788 - DNA, 20 bp, Artificial Sequence
  chemically synthesized
gttccttctttatctgtctt

SEQ ID NO: 41789 - DNA, 20 bp, Artificial Sequence
  chemically synthesized
aattcctctttgaatgtcta

SEQ ID NO: 41790 - DNA, 20 bp, Artificial Sequence
  chemically synthesized
cctatcatatggtctacctt

SEQ ID NO: 41791 - DNA, 20 bp, Artificial Sequence
  chemically synthesized
aaatttccacgcgctgttga

SEQ ID NO: 41792 - DNA, 20 bp, Artificial Sequence
  chemically synthesized
taactcaactccaggtaagg

SEQ ID NO: 41793 - DNA, 20 bp, Artificial Sequence
  chemically synthesized
gctattttgatagcggtcat

SEQ ID NO: 41794 - DNA, 20 bp, Artificial Sequence
  chemically synthesized
agctagtttattattggtgt

SEQ ID NO: 41795 - DNA, 20 bp, Artificial Sequence
  chemically synthesized
atcaggataatactggcctc

SEQ ID NO: 41796 - DNA, 20 bp, Artificial Sequence
  chemically synthesized
ggcctcagagaatgagttag

SEQ ID NO: 41797 - DNA, 20 bp, Artificial Sequence
  chemically synthesized
tccttcctgtttaattttta

SEQ ID NO: 41798 - DNA, 20 bp, Artificial Sequence
  chemically synthesized
tcttggtaggtggtatgtgt

SEQ ID NO: 41799 - DNA, 20 bp, Artificial Sequence
  chemically synthesized
tgatctatctgatgctgaga

SEQ ID NO: 41800 - DNA, 20 bp, Artificial Sequence
  chemically synthesized
ctggtgttgagtgtgaatgt

SEQ ID NO: 41801 - DNA, 20 bp, Artificial Sequence
  chemically synthesized
ttccttcaaatttttcttgc

SEQ ID NO: 41802 - DNA, 20 bp, Artificial Sequence
  chemically synthesized
ctggcctgtgaggtttctgc

SEQ ID NO: 41803 - DNA, 20 bp, Artificial Sequence
  chemically synthesized
tttcaataaactcttcagtt

SEQ ID NO: 41804 - DNA, 20 bp, Artificial Sequence
  chemically synthesized
aacattttggattctttttt

SEQ ID NO: 41805 - DNA, 20 bp, Artificial Sequence
  chemically synthesized
ttccactggcttatgttgct

SEQ ID NO: 41806 - DNA, 20 bp, Artificial Sequence
  chemically synthesized
tgatgaggttgtgctggaga

SEQ ID NO: 41807 - DNA, 20 bp, Artificial Sequence
  chemically synthesized
gagtgatcctcaggccccca

SEQ ID NO: 41808 - DNA, 20 bp, Artificial Sequence
  chemically synthesized
tgtcacttctctgttgaatt

SEQ ID NO: 41809 - DNA, 20 bp, Artificial Sequence
  chemically synthesized
aatcatttgtttcttcaaat

SEQ ID NO: 41810 - DNA, 20 bp, Artificial Sequence
  chemically synthesized
catctaataaatgtgtacca

SEQ ID NO: 41811 - DNA, 20 bp, Artificial Sequence
  chemically synthesized
ctcctggaaaagatgaagat

SEQ ID NO: 41812 - DNA, 20 bp, Artificial Sequence
  chemically synthesized
gaaaataagtctacagaaga

SEQ ID NO: 41813 - DNA, 20 bp, Artificial Sequence
  chemically synthesized
tttttgtggatagtggtttt

SEQ ID NO: 41814 - DNA, 20 bp, Artificial Sequence
  chemically synthesized
agatgtgactcccacacttt

SEQ ID NO: 41815 - DNA, 20 bp, Artificial Sequence
  chemically synthesized
ttgatggtttctaaaattgt

SEQ ID NO: 41816 - DNA, 20 bp, Artificial Sequence
  chemically synthesized
agttactggaataatacatt

SEQ ID NO: 41817 - DNA, 20 bp, Artificial Sequence
  chemically synthesized
aacttacaatcatggcagaa

SEQ ID NO: 41818 - DNA, 20 bp, Artificial Sequence
  chemically synthesized
tagttctgtttctagttctt

SEQ ID NO: 41819 - DNA, 20 bp, Artificial Sequence
  chemically synthesized
ggcaggaagcatccagcatg

SEQ ID NO: 41820 - DNA, 20 bp, Artificial Sequence
  chemically synthesized
acccgtgaatcctgtctatg

SEQ ID NO: 41821 - DNA, 20 bp, Artificial Sequence
  chemically synthesized
gaaaaggctgagtggtgtcc

SEQ ID NO: 41822 - DNA, 20 bp, Artificial Sequence
  chemically synthesized
cgttgtccttcagggatgtc

SEQ ID NO: 41823 - DNA, 20 bp, Artificial Sequence
  chemically synthesized
ccatcggtgcagtctcaggg

SEQ ID NO: 41824 - DNA, 20 bp, Artificial Sequence
  chemically synthesized
ccactttatggctagatgga

SEQ ID NO: 41825 - DNA, 20 bp, Artificial Sequence
  chemically synthesized
atcatattaagcagccaact

SEQ ID NO: 41826 - DNA, 20 bp, Artificial Sequence
  chemically synthesized
aatctgtattagggttctac

SEQ ID NO: 41827 - DNA, 20 bp, Artificial Sequence
  chemically synthesized
tattagggttctacagagaa

SEQ ID NO: 41828 - DNA, 20 bp, Artificial Sequence
  chemically synthesized
agttcaatgttccagggcag

SEQ ID NO: 41829 - DNA, 20 bp, Artificial Sequence
  chemically synthesized
ggcaggaagaatccagcatg

SEQ ID NO: 41830 - DNA, 20 bp, Artificial Sequence
  chemically synthesized
ggtagcagcaatattagagg

SEQ ID NO: 41831 - DNA, 20 bp, Artificial Sequence
  chemically synthesized
ggggctgcatgcactggtca

SEQ ID NO: 41832 - DNA, 20 bp, Artificial Sequence
  chemically synthesized
tacttcttctttctttggag

SEQ ID NO: 41833 - DNA, 20 bp, Artificial Sequence
  chemically synthesized
tctcctcccttactaggaag

SEQ ID NO: 41834 - DNA, 20 bp, Artificial Sequence
  chemically synthesized
aggaagagagaaataccatg

SEQ ID NO: 41835 - DNA, 20 bp, Artificial Sequence
  chemically synthesized
gaagggactttaaaacatgc

SEQ ID NO: 41836 - DNA, 20 bp, Artificial Sequence
  chemically synthesized
aattgctaacctgaatgata

SEQ ID NO: 41837 - DNA, 20 bp, Artificial Sequence
  chemically synthesized
cctccaaagaaagaagaagt

SEQ ID NO: 41838 - DNA, 20 bp, Artificial Sequence
  chemically synthesized
aatattgctgctacctctat

SEQ ID NO: 41839 - DNA, 20 bp, Artificial Sequence
  chemically synthesized
atccagcaagtccacatcta

SEQ ID NO: 41840 - DNA, 20 bp, Artificial Sequence
  chemically synthesized
agaatttatgaccaagtcct

SEQ ID NO: 41841 - DNA, 20 bp, Artificial Sequence
  chemically synthesized
tcctcaaaactaaacacaac

SEQ ID NO: 41842 - DNA, 20 bp, Artificial Sequence
  chemically synthesized
aaactaaacacaacaaaaac

SEQ ID NO: 41843 - DNA, 20 bp, Artificial Sequence
  chemically synthesized
tacaaggaactcaacaacaa

SEQ ID NO: 41844 - DNA, 20 bp, Artificial Sequence
  chemically synthesized
atggacctctatgattagtc

SEQ ID NO: 41845 - DNA, 20 bp, Artificial Sequence
  chemically synthesized
tatttcctccttcttttgtt

SEQ ID NO: 41846 - DNA, 20 bp, Artificial Sequence
  chemically synthesized
ggatataaagcaggcagaaa

SEQ ID NO: 41847 - DNA, 20 bp, Artificial Sequence
  chemically synthesized
aataatcagagaatgcaaat

SEQ ID NO: 41848 - DNA, 20 bp, Artificial Sequence
  chemically synthesized
tggctatcattataaagttc

SEQ ID NO: 41849 - DNA, 20 bp, Artificial Sequence
  chemically synthesized
taggagtatggtgaggactg

SEQ ID NO: 41850 - DNA, 20 bp, Artificial Sequence
  chemically synthesized
catttttcactgctgtcttt

SEQ ID NO: 41851 - DNA, 20 bp, Artificial Sequence
  chemically synthesized
aaatatatctaagctttctt

SEQ ID NO: 41852 - DNA, 20 bp, Artificial Sequence
  chemically synthesized
tatttacattttttatcctt

SEQ ID NO: 41853 - DNA, 20 bp, Artificial Sequence
  chemically synthesized
tgcatcttactcagagatct

SEQ ID NO: 41854 - DNA, 20 bp, Artificial Sequence
  chemically synthesized
ttgggaaatgaaatgaaaag

SEQ ID NO: 41855 - DNA, 20 bp, Artificial Sequence
  chemically synthesized
tctttcagtctattagaaat

SEQ ID NO: 41856 - DNA, 20 bp, Artificial Sequence
  chemically synthesized
agaaaaaagtcttcccctac

SEQ ID NO: 41857 - DNA, 20 bp, Artificial Sequence
  chemically synthesized
cccctacaaaaacaaattta

SEQ ID NO: 41858 - DNA, 20 bp, Artificial Sequence
  chemically synthesized
aaacaataaaaagaaatcag

SEQ ID NO: 41859 - DNA, 20 bp, Artificial Sequence
  chemically synthesized
aagaaatacaaaatacattc

SEQ ID NO: 41860 - DNA, 20 bp, Artificial Sequence
  chemically synthesized
tacgtaacaacacaatagct

SEQ ID NO: 41861 - DNA, 20 bp, Artificial Sequence
  chemically synthesized
aagccaaagagtaagaactc

SEQ ID NO: 41862 - DNA, 20 bp, Artificial Sequence
  chemically synthesized
tatacaactaactggtagag

SEQ ID NO: 41863 - DNA, 20 bp, Artificial Sequence
  chemically synthesized
gaaaaggaaggaaggaagaa

SEQ ID NO: 41864 - DNA, 20 bp, Artificial Sequence
  chemically synthesized
aaggaaggaagaaaaaaaca

SEQ ID NO: 41865 - DNA, 20 bp, Artificial Sequence
  chemically synthesized
caaaacaaacaaactaaaaa

SEQ ID NO: 41866 - DNA, 20 bp, Artificial Sequence
  chemically synthesized
caaacaaactaaaaaaaaaa

SEQ ID NO: 41867 - DNA, 20 bp, Artificial Sequence
  chemically synthesized
atagactggctaaatagatt

SEQ ID NO: 41868 - DNA, 20 bp, Artificial Sequence
  chemically synthesized
gataaaattgactttaaata

SEQ ID NO: 41869 - DNA, 20 bp, Artificial Sequence
  chemically synthesized
cttctcagaccacaatggaa

SEQ ID NO: 41870 - DNA, 20 bp, Artificial Sequence
  chemically synthesized
aactagaaatcaataacaag

SEQ ID NO: 41871 - DNA, 20 bp, Artificial Sequence
  chemically synthesized
atcaataacaagaaaaactt

SEQ ID NO: 41872 - DNA, 20 bp, Artificial Sequence
  chemically synthesized
tatcaataaacacttaaatt

SEQ ID NO: 41873 - DNA, 20 bp, Artificial Sequence
  chemically synthesized
acaagctagaaaagcaagaa

SEQ ID NO: 41874 - DNA, 20 bp, Artificial Sequence
  chemically synthesized
agaaaagcaagaacaaaacc

SEQ ID NO: 41875 - DNA, 20 bp, Artificial Sequence
  chemically synthesized
aagaacttaatgaaatagag

SEQ ID NO: 41876 - DNA, 20 bp, Artificial Sequence
  chemically synthesized
ttatgaacaaccatacacta

SEQ ID NO: 41877 - DNA, 20 bp, Artificial Sequence
  chemically synthesized
gattgaattaagaaagaata

SEQ ID NO: 41878 - DNA, 20 bp, Artificial Sequence
  chemically synthesized
aattttaccaaactttcaaa

SEQ ID NO: 41879 - DNA, 20 bp, Artificial Sequence
  chemically synthesized
gacaaggatgcaagtaaaaa

SEQ ID NO: 41880 - DNA, 20 bp, Artificial Sequence
  chemically synthesized
atcacatcaacaaaaagaac

SEQ ID NO: 41881 - DNA, 20 bp, Artificial Sequence
  chemically synthesized
atttaacattccttcatgat

SEQ ID NO: 41882 - DNA, 20 bp, Artificial Sequence
  chemically synthesized
tgacatgattttatacctag

SEQ ID NO: 41883 - DNA, 20 bp, Artificial Sequence
  chemically synthesized
taaatttaaccaaggaaccg

SEQ ID NO: 41884 - DNA, 20 bp, Artificial Sequence
  chemically synthesized
aaccgaaaaacctctattcg

SEQ ID NO: 41885 - DNA, 20 bp, Artificial Sequence
  chemically synthesized
aacctctattcggaaaacta

SEQ ID NO: 41886 - DNA, 20 bp, Artificial Sequence
  chemically synthesized
gtcatttttcacagaaatgg

SEQ ID NO: 41887 - DNA, 20 bp, Artificial Sequence
  chemically synthesized
gatatccatgtgcaaaagaa

SEQ ID NO: 41888 - DNA, 20 bp, Artificial Sequence
  chemically synthesized
ggccaccaaaagtgagtagg

SEQ ID NO: 41889 - DNA, 20 bp, Artificial Sequence
  chemically synthesized
ctatgaagccagcatcacac

SEQ ID NO: 41890 - DNA, 20 bp, Artificial Sequence
  chemically synthesized
ggaaggacataaccaaaaaa

SEQ ID NO: 41891 - DNA, 20 bp, Artificial Sequence
  chemically synthesized
tacaccacataaacagattt

SEQ ID NO: 41892 - DNA, 20 bp, Artificial Sequence
  chemically synthesized
tcctagccagggcaatcaga

SEQ ID NO: 41893 - DNA, 20 bp, Artificial Sequence
  chemically synthesized
atgatatgatcatttacctt

SEQ ID NO: 41894 - DNA, 20 bp, Artificial Sequence
  chemically synthesized
aacccctatttattgccata

SEQ ID NO: 41895 - DNA, 20 bp, Artificial Sequence
  chemically synthesized
atggattaaagacttaaata

SEQ ID NO: 41896 - DNA, 20 bp, Artificial Sequence
  chemically synthesized
aaagacttaaatataaaact

SEQ ID NO: 41897 - DNA, 20 bp, Artificial Sequence
  chemically synthesized
aaatataaaacttaaaacta

SEQ ID NO: 41898 - DNA, 20 bp, Artificial Sequence
  chemically synthesized
aaactataaaactactaaaa

SEQ ID NO: 41899 - DNA, 20 bp, Artificial Sequence
  chemically synthesized
ctcaaacaactcaacagtgg

SEQ ID NO: 41900 - DNA, 20 bp, Artificial Sequence
  chemically synthesized
atcatcagagaaatgcaaat

SEQ ID NO: 41901 - DNA, 20 bp, Artificial Sequence
  chemically synthesized
aaattagtatagccactatg

SEQ ID NO: 41902 - DNA, 20 bp, Artificial Sequence
  chemically synthesized
aaagtagggtgattatagtt

SEQ ID NO: 41903 - DNA, 20 bp, Artificial Sequence
  chemically synthesized
acatataacaatgaggtggt

SEQ ID NO: 41904 - DNA, 20 bp, Artificial Sequence
  chemically synthesized
ctaatctcaccctcctgttc

SEQ ID NO: 41905 - DNA, 20 bp, Artificial Sequence
  chemically synthesized
aggagaaaaagaggaagaac

SEQ ID NO: 41906 - DNA, 20 bp, Artificial Sequence
  chemically synthesized
ctctagagaaaagccatttg

SEQ ID NO: 41907 - DNA, 20 bp, Artificial Sequence
  chemically synthesized
ggaaaacttctgtgttaaca

SEQ ID NO: 41908 - DNA, 20 bp, Artificial Sequence
  chemically synthesized
agcaatacgttggcttaggc

SEQ ID NO: 41909 - DNA, 20 bp, Artificial Sequence
  chemically synthesized
atttttcccccacatttggg

SEQ ID NO: 41910 - DNA, 20 bp, Artificial Sequence
  chemically synthesized
actggtaacagtgcttcttc

SEQ ID NO: 41911 - DNA, 20 bp, Artificial Sequence
  chemically synthesized
cattgttcataccctggaga

SEQ ID NO: 41912 - DNA, 20 bp, Artificial Sequence
  chemically synthesized
gaagtctgagaattagtacc

SEQ ID NO: 41913 - DNA, 20 bp, Artificial Sequence
  chemically synthesized
atacatttccttgtttgcca

SEQ ID NO: 41914 - DNA, 20 bp, Artificial Sequence
  chemically synthesized
atctataggacatttccttt

SEQ ID NO: 41915 - DNA, 20 bp, Artificial Sequence
  chemically synthesized
cattgtggggacctctccac

SEQ ID NO: 41916 - DNA, 20 bp, Artificial Sequence
  chemically synthesized
taaaggcagcttaggggttg

SEQ ID NO: 41917 - DNA, 20 bp, Artificial Sequence
  chemically synthesized
gctcctgcccactctctaga

SEQ ID NO: 41918 - DNA, 20 bp, Artificial Sequence
  chemically synthesized
caggaactttgggcatattt

SEQ ID NO: 41919 - DNA, 20 bp, Artificial Sequence
  chemically synthesized
gtgactagaaaaaggacatt

SEQ ID NO: 41920 - DNA, 20 bp, Artificial Sequence
  chemically synthesized
atcttgaggaactcagcctt

SEQ ID NO: 41921 - DNA, 20 bp, Artificial Sequence
  chemically synthesized
cttttgagaagctcctgaat

SEQ ID NO: 41922 - DNA, 20 bp, Artificial Sequence
  chemically synthesized
tattttgctgagaaaaattt

SEQ ID NO: 41923 - DNA, 20 bp, Artificial Sequence
  chemically synthesized
aataaagaaaatcaaattga

SEQ ID NO: 41924 - DNA, 20 bp, Artificial Sequence
  chemically synthesized
taaagacatctgtaaaatta

SEQ ID NO: 41925 - DNA, 20 bp, Artificial Sequence
  chemically synthesized
ggacatagcttattggtgga

SEQ ID NO: 41926 - DNA, 20 bp, Artificial Sequence
  chemically synthesized
attatgtaagaattaaatat

SEQ ID NO: 41927 - DNA, 20 bp, Artificial Sequence
  chemically synthesized
ggaaatgtattcacatccaa

SEQ ID NO: 41928 - DNA, 20 bp, Artificial Sequence
  chemically synthesized
ccatgaacaatggaaacgtg

SEQ ID NO: 41929 - DNA, 20 bp, Artificial Sequence
  chemically synthesized
tagttacctagaggtttggg

SEQ ID NO: 41930 - DNA, 20 bp, Artificial Sequence
  chemically synthesized
gtggcacagggaagaattca

SEQ ID NO: 41931 - DNA, 20 bp, Artificial Sequence
  chemically synthesized
gtgaaacacacgatctatgt

SEQ ID NO: 41932 - DNA, 20 bp, Artificial Sequence
  chemically synthesized
ttcaatgacctacgctgtgg

SEQ ID NO: 41933 - DNA, 20 bp, Artificial Sequence
  chemically synthesized
tttcttttttaatgtcagaa

SEQ ID NO: 41934 - DNA, 20 bp, Artificial Sequence
  chemically synthesized
aaatgtgctttataaatagt

SEQ ID NO: 41935 - DNA, 20 bp, Artificial Sequence
  chemically synthesized
aagtgtgctatataaacagt

SEQ ID NO: 41936 - DNA, 20 bp, Artificial Sequence
  chemically synthesized
tcaaggataaaaaatgtaaa

SEQ ID NO: 41937 - DNA, 20 bp, Artificial Sequence
  chemically synthesized
aacttctttttgatacagta

SEQ ID NO: 41938 - DNA, 20 bp, Artificial Sequence
  chemically synthesized
ttaagaaatatagtagctat

SEQ ID NO: 41939 - DNA, 20 bp, Artificial Sequence
  chemically synthesized
gactgggtaatttataagga

SEQ ID NO: 41940 - DNA, 20 bp, Artificial Sequence
  chemically synthesized
aaagggggaaaagccgctta

SEQ ID NO: 41941 - DNA, 20 bp, Artificial Sequence
  chemically synthesized
cataattatgcctaacatac

SEQ ID NO: 41942 - DNA, 20 bp, Artificial Sequence
  chemically synthesized
accttaattccaggacatgg

SEQ ID NO: 41943 - DNA, 20 bp, Artificial Sequence
  chemically synthesized
cttctgttctggactccact

SEQ ID NO: 41944 - DNA, 20 bp, Artificial Sequence
  chemically synthesized
gcagccaactccagaaaccc

SEQ ID NO: 41945 - DNA, 20 bp, Artificial Sequence
  chemically synthesized
ctcacatgttcacaaggtcc

SEQ ID NO: 41946 - DNA, 20 bp, Artificial Sequence
  chemically synthesized
gtagcaggacaagctgcata

SEQ ID NO: 41947 - DNA, 20 bp, Artificial Sequence
  chemically synthesized
ttggaggcagaaattgggca

SEQ ID NO: 41948 - DNA, 20 bp, Artificial Sequence
  chemically synthesized
taggagatttcttcataatt

SEQ ID NO: 41949 - DNA, 20 bp, Artificial Sequence
  chemically synthesized
catgcacctagaagggactt

SEQ ID NO: 41950 - DNA, 20 bp, Artificial Sequence
  chemically synthesized
actgtgattcagacaaaggc

SEQ ID NO: 41951 - DNA, 20 bp, Artificial Sequence
  chemically synthesized
ttctctccccattcatctgc

SEQ ID NO: 41952 - DNA, 20 bp, Artificial Sequence
  chemically synthesized
cctccaactgttaaaaggaa

SEQ ID NO: 41953 - DNA, 20 bp, Artificial Sequence
  chemically synthesized
tattatcattcaggttagca

SEQ ID NO: 41954 - DNA, 20 bp, Artificial Sequence
  chemically synthesized
taataagggatggaaatgag

SEQ ID NO: 41955 - DNA, 20 bp, Artificial Sequence
  chemically synthesized
catttaggatccactaagcc

SEQ ID NO: 41956 - DNA, 20 bp, Artificial Sequence
  chemically synthesized
aagggacaccaacgaatggt

SEQ ID NO: 41957 - DNA, 20 bp, Artificial Sequence
  chemically synthesized
actgctttgttcaattctgt

SEQ ID NO: 41958 - DNA, 20 bp, Artificial Sequence
  chemically synthesized
tatgttcaaataacagctgc

SEQ ID NO: 41959 - DNA, 20 bp, Artificial Sequence
  chemically synthesized
agtaccttttgataaggaga

SEQ ID NO: 41960 - DNA, 20 bp, Artificial Sequence
  chemically synthesized
tgcttatagatgttcataga

SEQ ID NO: 41961 - DNA, 20 bp, Artificial Sequence
  chemically synthesized
agggaggagaccacccttca

SEQ ID NO: 41962 - DNA, 20 bp, Artificial Sequence
  chemically synthesized
acctggccagttatgttatc

SEQ ID NO: 41963 - DNA, 20 bp, Artificial Sequence
  chemically synthesized
ggacaggaattgctcactct

SEQ ID NO: 41964 - DNA, 20 bp, Artificial Sequence
  chemically synthesized
cttctttaactcggtgtctg

SEQ ID NO: 41965 - DNA, 20 bp, Artificial Sequence
  chemically synthesized
ggtgtctgaggggttttgta

SEQ ID NO: 41966 - DNA, 20 bp, Artificial Sequence
  chemically synthesized
aattaaggagagtatgaaaa

SEQ ID NO: 41967 - DNA, 20 bp, Artificial Sequence
  chemically synthesized
caaatgggggtaaaataata

SEQ ID NO: 41968 - DNA, 20 bp, Artificial Sequence
  chemically synthesized
agggaaagacaggctctaaa

SEQ ID NO: 41969 - DNA, 20 bp, Artificial Sequence
  chemically synthesized
aatgggacttaattaaacta

SEQ ID NO: 41970 - DNA, 20 bp, Artificial Sequence
  chemically synthesized
atggttaatactgagtgtca

SEQ ID NO: 41971 - DNA, 20 bp, Artificial Sequence
  chemically synthesized
gtctgtgagggtgttaccaa

SEQ ID NO: 41972 - DNA, 20 bp, Artificial Sequence
  chemically synthesized
aggcagaaaaatgtgaaaag

SEQ ID NO: 41973 - DNA, 20 bp, Artificial Sequence
  chemically synthesized
gaaaaatgtgaaaaggctag

SEQ ID NO: 41974 - DNA, 20 bp, Artificial Sequence
  chemically synthesized
agcctacatttttctcccat

SEQ ID NO: 41975 - DNA, 20 bp, Artificial Sequence
  chemically synthesized
gaacattgaactccaggttc

SEQ ID NO: 41976 - DNA, 20 bp, Artificial Sequence
  chemically synthesized
tcttcagctttgggactccg

SEQ ID NO: 41977 - DNA, 20 bp, Artificial Sequence
  chemically synthesized
tgttcctcagctggcagatg

SEQ ID NO: 41978 - DNA, 20 bp, Artificial Sequence
  chemically synthesized
agatatatatctcctattaa

SEQ ID NO: 41979 - DNA, 20 bp, Artificial Sequence
  chemically synthesized
gtttctctgtagaaccctaa

SEQ ID NO: 41980 - DNA, 20 bp, Artificial Sequence
  chemically synthesized
attaaggatggagttctttc

SEQ ID NO: 41981 - DNA, 20 bp, Artificial Sequence
  chemically synthesized
tggagttctttcattggttt

SEQ ID NO: 41982 - DNA, 20 bp, Artificial Sequence
  chemically synthesized
gttttggggtttctggagtt

SEQ ID NO: 41983 - DNA, 20 bp, Artificial Sequence
  chemically synthesized
tttctggagttggctgctta

SEQ ID NO: 41984 - DNA, 20 bp, Artificial Sequence
  chemically synthesized
cactgataatccttggcatc

SEQ ID NO: 41985 - DNA, 20 bp, Artificial Sequence
  chemically synthesized
aaaataaatgcatttgacac

SEQ ID NO: 41986 - DNA, 20 bp, Artificial Sequence
  chemically synthesized
tgcatttgacactcttgatt

SEQ ID NO: 41987 - DNA, 20 bp, Artificial Sequence
  chemically synthesized
ggaacatagtgaagttggtt

SEQ ID NO: 41988 - DNA, 20 bp, Artificial Sequence
  chemically synthesized
actcaggagtatatcaactc

SEQ ID NO: 41989 - DNA, 20 bp, Artificial Sequence
  chemically synthesized
gagcaagaagtagcaaacac

SEQ ID NO: 41990 - DNA, 20 bp, Artificial Sequence
  chemically synthesized
ggacagaggatgggaaataa

SEQ ID NO: 41991 - DNA, 20 bp, Artificial Sequence
  chemically synthesized
agtaaaatttataggggtcc

SEQ ID NO: 41992 - DNA, 20 bp, Artificial Sequence
  chemically synthesized
cacaacgcctagtgggccta

SEQ ID NO: 41993 - DNA, 20 bp, Artificial Sequence
  chemically synthesized
ggattttggaggcaacatat

SEQ ID NO: 41994 - DNA, 20 bp, Artificial Sequence
  chemically synthesized
atcgagtgatccaaaaggct

SEQ ID NO: 41995 - DNA, 20 bp, Artificial Sequence
  chemically synthesized
atatgacctagcagatccaa

SEQ ID NO: 41996 - DNA, 20 bp, Artificial Sequence
  chemically synthesized
gtgtcagtgccagataggga

SEQ ID NO: 41997 - DNA, 20 bp, Artificial Sequence
  chemically synthesized
ctgaatcacagcggaggcct

SEQ ID NO: 41998 - DNA, 20 bp, Artificial Sequence
  chemically synthesized
agaaagctcttggcctgtta

SEQ ID NO: 41999 - DNA, 20 bp, Artificial Sequence
  chemically synthesized
tgaactgcctatcatgaact

SEQ ID NO: 42000 - DNA, 20 bp, Artificial Sequence
  chemically synthesized
agcaaatggaagtggtatat

SEQ ID NO: 42001 - DNA, 20 bp, Artificial Sequence
  chemically synthesized
tggaagtggtatatatgcga

SEQ ID NO: 42002 - DNA, 20 bp, Artificial Sequence
  chemically synthesized
catggtctccactcctgaca

SEQ ID NO: 42003 - DNA, 20 bp, Artificial Sequence
  chemically synthesized
tttgcacagaaggagaaatg

SEQ ID NO: 42004 - DNA, 20 bp, Artificial Sequence
  chemically synthesized
agaaggagaaatggccagat

SEQ ID NO: 42005 - DNA, 20 bp, Artificial Sequence
  chemically synthesized
cttattcatgggctgtagcc

SEQ ID NO: 42006 - DNA, 20 bp, Artificial Sequence
  chemically synthesized
agaggtatgtggatggacct

SEQ ID NO: 42007 - DNA, 20 bp, Artificial Sequence
  chemically synthesized
caatgggtgacctcagcaga

SEQ ID NO: 42008 - DNA, 20 bp, Artificial Sequence
  chemically synthesized
cacagttgcagggatggaag

SEQ ID NO: 42009 - DNA, 20 bp, Artificial Sequence
  chemically synthesized
aaagctgacctggccacagc

SEQ ID NO: 42010 - DNA, 20 bp, Artificial Sequence
  chemically synthesized
cagccagctacctggtggca

SEQ ID NO: 42011 - DNA, 20 bp, Artificial Sequence
  chemically synthesized
tcttccatcatggaaagggc

SEQ ID NO: 42012 - DNA, 20 bp, Artificial Sequence
  chemically synthesized
aatagacacttactctggat

SEQ ID NO: 42013 - DNA, 20 bp, Artificial Sequence
  chemically synthesized
gggtttcccaatcctgaact

SEQ ID NO: 42014 - DNA, 20 bp, Artificial Sequence
  chemically synthesized
tgtcatggtattccacacag

SEQ ID NO: 42015 - DNA, 20 bp, Artificial Sequence
  chemically synthesized
catgatccctatcatcctga

SEQ ID NO: 42016 - DNA, 20 bp, Artificial Sequence
  chemically synthesized
ttttgaatggccttttgaag

SEQ ID NO: 42017 - DNA, 20 bp, Artificial Sequence
  chemically synthesized
aatcagtgtccaatatatgg

SEQ ID NO: 42018 - DNA, 20 bp, Artificial Sequence
  chemically synthesized
tggtactgtttctcccatag

SEQ ID NO: 42019 - DNA, 20 bp, Artificial Sequence
  chemically synthesized
tagtgttccactagcaaaat

SEQ ID NO: 42020 - DNA, 20 bp, Artificial Sequence
  chemically synthesized
ttcccatggcattatgttct

SEQ ID NO: 42021 - DNA, 20 bp, Artificial Sequence
  chemically synthesized
actgccgccaggtgacacaa

SEQ ID NO: 42022 - DNA, 20 bp, Artificial Sequence
  chemically synthesized
tgattccattaaactgcaaa

SEQ ID NO: 42023 - DNA, 20 bp, Artificial Sequence
  chemically synthesized
gagagttacagtgttggctg

SEQ ID NO: 42024 - DNA, 20 bp, Artificial Sequence
  chemically synthesized
ggagatccattagggtgtct

SEQ ID NO: 42025 - DNA, 20 bp, Artificial Sequence
  chemically synthesized
ttccaggcaggactacaaat

SEQ ID NO: 42026 - DNA, 20 bp, Artificial Sequence
  chemically synthesized
aaaaaagacaagacctgctg

SEQ ID NO: 42027 - DNA, 20 bp, Artificial Sequence
  chemically synthesized
tttttcctttatcatgtgac

SEQ ID NO: 42028 - DNA, 20 bp, Artificial Sequence
  chemically synthesized
atatcagcatttaagtattg

SEQ ID NO: 42029 - DNA, 20 bp, Artificial Sequence
  chemically synthesized
ttatgtaatagcatttgcaa

SEQ ID NO: 42030 - DNA, 20 bp, Artificial Sequence
  chemically synthesized
gcattttcaattgcacgaag

SEQ ID NO: 42031 - DNA, 20 bp, Artificial Sequence
  chemically synthesized
atggttaatactgagtgtca

SEQ ID NO: 42032 - DNA, 20 bp, Artificial Sequence
  chemically synthesized
taatactgagtgtcaacttg

SEQ ID NO: 42033 - DNA, 20 bp, Artificial Sequence
  chemically synthesized
gtctgtgagggtattgccaa

SEQ ID NO: 42034 - DNA, 20 bp, Artificial Sequence
  chemically synthesized
aaaacatgtgaaaatcctgg

SEQ ID NO: 42035 - DNA, 20 bp, Artificial Sequence
  chemically synthesized
ctacatctttctcccatgct

SEQ ID NO: 42036 - DNA, 20 bp, Artificial Sequence
  chemically synthesized
aaacattggactccaagtcc

SEQ ID NO: 42037 - DNA, 20 bp, Artificial Sequence
  chemically synthesized
ccttcagctttgggacttgg

SEQ ID NO: 42038 - DNA, 20 bp, Artificial Sequence
  chemically synthesized
ttggactggcttccttgctc

SEQ ID NO: 42039 - DNA, 20 bp, Artificial Sequence
  chemically synthesized
agatggcctattgtgggacc

SEQ ID NO: 42040 - DNA, 20 bp, Artificial Sequence
  chemically synthesized
gtgaggatgtggagacaaga

SEQ ID NO: 42041 - DNA, 20 bp, Artificial Sequence
  chemically synthesized
aaactttatggaagacagca

SEQ ID NO: 42042 - DNA, 20 bp, Artificial Sequence
  chemically synthesized
caacctaaatgtctaccaat

SEQ ID NO: 42043 - DNA, 20 bp, Artificial Sequence
  chemically synthesized
tatggtgaggactgaaaaac

SEQ ID NO: 42044 - DNA, 20 bp, Artificial Sequence
  chemically synthesized
aacatacatatgtaaggaac

SEQ ID NO: 42045 - DNA, 20 bp, Artificial Sequence
  chemically synthesized
aacccgagcttgtaccctga

SEQ ID NO: 42046 - DNA, 20 bp, Artificial Sequence
  chemically synthesized
ataatcctcacgtgttgtgg

SEQ ID NO: 42047 - DNA, 20 bp, Artificial Sequence
  chemically synthesized
agtgagttcttacaagatct

SEQ ID NO: 42048 - DNA, 20 bp, Artificial Sequence
  chemically synthesized
caagatctgatggttttata

SEQ ID NO: 42049 - DNA, 20 bp, Artificial Sequence
  chemically synthesized
ttataagcggcttttccccc

SEQ ID NO: 42050 - DNA, 20 bp, Artificial Sequence
  chemically synthesized
ctgctgccatgtgaagaagg

SEQ ID NO: 42051 - DNA, 20 bp, Artificial Sequence
  chemically synthesized
tgccatgtgaagaaggacat

SEQ ID NO: 42052 - DNA, 20 bp, Artificial Sequence
  chemically synthesized
catgtttgtttcttcttctg

SEQ ID NO: 42053 - DNA, 20 bp, Artificial Sequence
  chemically synthesized
tttcttcttctgccatgatt

SEQ ID NO: 42054 - DNA, 20 bp, Artificial Sequence
  chemically synthesized
tgtggaactgtgagacaatt

SEQ ID NO: 42055 - DNA, 20 bp, Artificial Sequence
  chemically synthesized
aaaaatataaaataaattag

SEQ ID NO: 42056 - DNA, 20 bp, Artificial Sequence
  chemically synthesized
gagtgtgcaaggaaagagta

SEQ ID NO: 42057 - DNA, 20 bp, Artificial Sequence
  chemically synthesized
gtgagaatacacaaataatc

SEQ ID NO: 42058 - DNA, 20 bp, Artificial Sequence
  chemically synthesized
atattccatttcatcagact

SEQ ID NO: 42059 - DNA, 20 bp, Artificial Sequence
  chemically synthesized
gatgctattatatggtacca

SEQ ID NO: 42060 - DNA, 20 bp, Artificial Sequence
  chemically synthesized
taagaatttcatctttaagg

SEQ ID NO: 42061 - DNA, 20 bp, Artificial Sequence
  chemically synthesized
agttttttactgtatcaaaa

SEQ ID NO: 42062 - DNA, 20 bp, Artificial Sequence
  chemically synthesized
tctagactggacaagaacag

SEQ ID NO: 42063 - DNA, 20 bp, Artificial Sequence
  chemically synthesized
agcaacatatttaaatatat

SEQ ID NO: 42064 - DNA, 20 bp, Artificial Sequence
  chemically synthesized
cttttccaggagaatatacc

SEQ ID NO: 42065 - DNA, 20 bp, Artificial Sequence
  chemically synthesized
tctgatggtacacatttatt

SEQ ID NO: 42066 - DNA, 20 bp, Artificial Sequence
  chemically synthesized
actcagagatcttaaaacat

SEQ ID NO: 42067 - DNA, 20 bp, Artificial Sequence
  chemically synthesized
atcttaaaacatccttgttt

SEQ ID NO: 42068 - DNA, 20 bp, Artificial Sequence
  chemically synthesized
tgaagaacataagggggaaa

SEQ ID NO: 42069 - DNA, 20 bp, Artificial Sequence
  chemically synthesized
gattctttatttgaagaaac

SEQ ID NO: 42070 - DNA, 20 bp, Artificial Sequence
  chemically synthesized
tttatttgaagaaacaaatg

SEQ ID NO: 42071 - DNA, 20 bp, Artificial Sequence
  chemically synthesized
tagtcccccatatagcctta

SEQ ID NO: 42072 - DNA, 20 bp, Artificial Sequence
  chemically synthesized
atagccttagagtgtttaaa

SEQ ID NO: 42073 - DNA, 20 bp, Artificial Sequence
  chemically synthesized
gtctattagaaataaaaaca

SEQ ID NO: 42074 - DNA, 20 bp, Artificial Sequence
  chemically synthesized
gcttaaaaaatttcaaggga

SEQ ID NO: 42075 - DNA, 20 bp, Artificial Sequence
  chemically synthesized
aaatttcaagggaaggggct

SEQ ID NO: 42076 - DNA, 20 bp, Artificial Sequence
  chemically synthesized
ctgaggtcaggaacacccag

SEQ ID NO: 42077 - DNA, 20 bp, Artificial Sequence
  chemically synthesized
ccaccaccaacaccagtgca

SEQ ID NO: 42078 - DNA, 20 bp, Artificial Sequence
  chemically synthesized
aaacagaaattctgtaactg

SEQ ID NO: 42079 - DNA, 20 bp, Artificial Sequence
  chemically synthesized
agtgaacaaatattcaaatt

SEQ ID NO: 42080 - DNA, 20 bp, Artificial Sequence
  chemically synthesized
tcacttataagggaacttcc

SEQ ID NO: 42081 - DNA, 20 bp, Artificial Sequence
  chemically synthesized
aagggaacttccacaagatt

SEQ ID NO: 42082 - DNA, 20 bp, Artificial Sequence
  chemically synthesized
cacaagattaacagattaac

SEQ ID NO: 42083 - DNA, 20 bp, Artificial Sequence
  chemically synthesized
aaggaattcactatcactag

SEQ ID NO: 42084 - DNA, 20 bp, Artificial Sequence
  chemically synthesized
caataatagccttgcatgta

SEQ ID NO: 42085 - DNA, 20 bp, Artificial Sequence
  chemically synthesized
tgaaagatatagactggcta

SEQ ID NO: 42086 - DNA, 20 bp, Artificial Sequence
  chemically synthesized
gaatccaatacaataatagt

SEQ ID NO: 42087 - DNA, 20 bp, Artificial Sequence
  chemically synthesized
cagaaaattaacaaagaaac

SEQ ID NO: 42088 - DNA, 20 bp, Artificial Sequence
  chemically synthesized
agcaaaagcagtgctaagag

SEQ ID NO: 42089 - DNA, 20 bp, Artificial Sequence
  chemically synthesized
acacttaaattaaaaacata

SEQ ID NO: 42090 - DNA, 20 bp, Artificial Sequence
  chemically synthesized
aaatagagaaaaacaacaac

SEQ ID NO: 42091 - DNA, 20 bp, Artificial Sequence
  chemically synthesized
aaccgataccacagaaatag

SEQ ID NO: 42092 - DNA, 20 bp, Artificial Sequence
  chemically synthesized
ttctggacacataccaccta

SEQ ID NO: 42093 - DNA, 20 bp, Artificial Sequence
  chemically synthesized
aaaagaaaatttcaagacca

SEQ ID NO: 42094 - DNA, 20 bp, Artificial Sequence
  chemically synthesized
attctctgaggccagtatta

SEQ ID NO: 42095 - DNA, 20 bp, Artificial Sequence
  chemically synthesized
agataatacaccatgatcaa

SEQ ID NO: 42096 - DNA, 20 bp, Artificial Sequence
  chemically synthesized
ataatactggaagtcctagc

SEQ ID NO: 42097 - DNA, 20 bp, Artificial Sequence
  chemically synthesized
actgtccatctttccagatg

SEQ ID NO: 42098 - DNA, 20 bp, Artificial Sequence
  chemically synthesized
aaatcagcatatgaaacaag

SEQ ID NO: 42099 - DNA, 20 bp, Artificial Sequence
  chemically synthesized
ccatactacccaaagcaatc

SEQ ID NO: 42100 - DNA, 20 bp, Artificial Sequence
  chemically synthesized
aatgctagaggtatcatact

SEQ ID NO: 42101 - DNA, 20 bp, Artificial Sequence
  chemically synthesized
gcatccacatatttatagcc

SEQ ID NO: 42102 - DNA, 20 bp, Artificial Sequence
  chemically synthesized
gaataaaactggactgctga

SEQ ID NO: 42103 - DNA, 20 bp, Artificial Sequence
  chemically synthesized
ctggactgctgatatggttt

SEQ ID NO: 42104 - DNA, 20 bp, Artificial Sequence
  chemically synthesized
cttggcggatgggaggtagg

SEQ ID NO: 42105 - DNA, 20 bp, Artificial Sequence
  chemically synthesized
cccacagaccctctgaagga

SEQ ID NO: 42106 - DNA, 20 bp, Artificial Sequence
  chemically synthesized
tcccactggagaaactgaag

SEQ ID NO: 42107 - DNA, 20 bp, Artificial Sequence
  chemically synthesized
actgaaggtctgtttgtggg

SEQ ID NO: 42108 - DNA, 20 bp, Artificial Sequence
  chemically synthesized
cagaaagtcaacaaaaaaat

SEQ ID NO: 42109 - DNA, 20 bp, Artificial Sequence
  chemically synthesized
taacagaccaataacaagca

SEQ ID NO: 42110 - DNA, 20 bp, Artificial Sequence
  chemically synthesized
caaaaaaaagttcaggacca

SEQ ID NO: 42111 - DNA, 20 bp, Artificial Sequence
  chemically synthesized
ttccatgccagggatgcagg

SEQ ID NO: 42112 - DNA, 20 bp, Artificial Sequence
  chemically synthesized
taagtgtgatacaccacata

SEQ ID NO: 42113 - DNA, 20 bp, Artificial Sequence
  chemically synthesized
caacaaaatccagcatacat

SEQ ID NO: 42114 - DNA, 20 bp, Artificial Sequence
  chemically synthesized
taaagaggaagtcaaactgt

SEQ ID NO: 42115 - DNA, 20 bp, Artificial Sequence
  chemically synthesized
gaactgataaaataattcag

SEQ ID NO: 42116 - DNA, 20 bp, Artificial Sequence
  chemically synthesized
catataaaacgtactctcaa

SEQ ID NO: 42117 - DNA, 20 bp, Artificial Sequence
  chemically synthesized
ataagggagacacttcaaga

SEQ ID NO: 42118 - DNA, 20 bp, Artificial Sequence
  chemically synthesized
cttcaagacatggctttggg

SEQ ID NO: 42119 - DNA, 20 bp, Artificial Sequence
  chemically synthesized
tcttatgccagttagaatca

SEQ ID NO: 42120 - DNA, 20 bp, Artificial Sequence
  chemically synthesized
agccactatggaaaacaata

SEQ ID NO: 42121 - DNA, 20 bp, Artificial Sequence
  chemically synthesized
ataaacagatactggtacca

SEQ ID NO: 42122 - DNA, 20 bp, Artificial Sequence
  chemically synthesized
gtaccacactgtttattgca

SEQ ID NO: 42123 - DNA, 20 bp, Artificial Sequence
  chemically synthesized
tgatgttcaatagcaaagta

SEQ ID NO: 42124 - DNA, 20 bp, Artificial Sequence
  chemically synthesized
tcgatctcatattggttgag

SEQ ID NO: 42125 - DNA, 20 bp, Artificial Sequence
  chemically synthesized
ccctgtactgtcttgctgtg

SEQ ID NO: 42126 - DNA, 20 bp, Artificial Sequence
  chemically synthesized
tgtcctccccatatttttac

SEQ ID NO: 42127 - DNA, 20 bp, Artificial Sequence
  chemically synthesized
catatttttacctcggtttt

SEQ ID NO: 42128 - DNA, 20 bp, Artificial Sequence
  chemically synthesized
ttatatagcacactttgtgc

SEQ ID NO: 42129 - DNA, 20 bp, Artificial Sequence
  chemically synthesized
cactttgtgctatagtttac

SEQ ID NO: 42130 - DNA, 20 bp, Artificial Sequence
  chemically synthesized
catatttgaggtataaacca

SEQ ID NO: 42131 - DNA, 20 bp, Artificial Sequence
  chemically synthesized
tatttttaaatctgcaaata

SEQ ID NO: 42132 - DNA, 20 bp, Artificial Sequence
  chemically synthesized
acttaatatcattaatgaat

SEQ ID NO: 42133 - DNA, 20 bp, Artificial Sequence
  chemically synthesized
ttcctggaacaacatggggg

SEQ ID NO: 42134 - DNA, 20 bp, Artificial Sequence
  chemically synthesized
gagaaatttcactattttgt

SEQ ID NO: 42135 - DNA, 20 bp, Artificial Sequence
  chemically synthesized
aggcagcaggtctggtagga

SEQ ID NO: 42136 - DNA, 20 bp, Artificial Sequence
  chemically synthesized
tgaaaaggaagtgagtagac

SEQ ID NO: 42137 - DNA, 20 bp, Artificial Sequence
  chemically synthesized
cttgaagctgtgcaaccaag

SEQ ID NO: 42138 - DNA, 20 bp, Artificial Sequence
  chemically synthesized
gcatagtttttacatagatc

SEQ ID NO: 42139 - DNA, 20 bp, Artificial Sequence
  chemically synthesized
tgtgtttcacatggtgtgat

SEQ ID NO: 42140 - DNA, 20 bp, Artificial Sequence
  chemically synthesized
agatgccattgacatggccc

SEQ ID NO: 42141 - DNA, 20 bp, Artificial Sequence
  chemically synthesized
aatcctaattactatgcatc

SEQ ID NO: 42142 - DNA, 20 bp, Artificial Sequence
  chemically synthesized
ttttcctattatttctcttt

SEQ ID NO: 42143 - DNA, 20 bp, Artificial Sequence
  chemically synthesized
gaaataagctaatacctaca

SEQ ID NO: 42144 - DNA, 20 bp, Artificial Sequence
  chemically synthesized
taaatgctaggcacagttct

SEQ ID NO: 42145 - DNA, 20 bp, Artificial Sequence
  chemically synthesized
attttcacaacattattaca

SEQ ID NO: 42146 - DNA, 20 bp, Artificial Sequence
  chemically synthesized
agcaacaaattgatggatct

SEQ ID NO: 42147 - DNA, 20 bp, Artificial Sequence
  chemically synthesized
aaattgatggatctttttgc

SEQ ID NO: 42148 - DNA, 20 bp, Artificial Sequence
  chemically synthesized
tgatggatctttttgctttt

SEQ ID NO: 42149 - DNA, 20 bp, Artificial Sequence
  chemically synthesized
ggatctttttgcttttgctt

SEQ ID NO: 42150 - DNA, 20 bp, Artificial Sequence
  chemically synthesized
actgaagcctcactagaacg

SEQ ID NO: 42151 - DNA, 20 bp, Artificial Sequence
  chemically synthesized
cgcctggattcaattgatcc

SEQ ID NO: 42152 - DNA, 20 bp, Artificial Sequence
  chemically synthesized
cacctcagccttgaaaagtg

SEQ ID NO: 42153 - DNA, 20 bp, Artificial Sequence
  chemically synthesized
aatttttagatataatttct

SEQ ID NO: 42154 - DNA, 20 bp, Artificial Sequence
  chemically synthesized
tcttccataaccactttgac

SEQ ID NO: 42155 - DNA, 20 bp, Artificial Sequence
  chemically synthesized
taaattatgtccagcaatac

SEQ ID NO: 42156 - DNA, 20 bp, Artificial Sequence
  chemically synthesized
cgttggcttaggcaaaaaca

SEQ ID NO: 42157 - DNA, 20 bp, Artificial Sequence
  chemically synthesized
ccttaacatgttaatttctc

SEQ ID NO: 42158 - DNA, 20 bp, Artificial Sequence
  chemically synthesized
tgagcaagtgtgtgcagaag

SEQ ID NO: 42159 - DNA, 20 bp, Artificial Sequence
  chemically synthesized
tcctctccctcaactggtaa

SEQ ID NO: 42160 - DNA, 20 bp, Artificial Sequence
  chemically synthesized
cttaaggctattaactcccc

SEQ ID NO: 42161 - DNA, 20 bp, Artificial Sequence
  chemically synthesized
atatatagttctctcacata

SEQ ID NO: 42162 - DNA, 20 bp, Artificial Sequence
  chemically synthesized
ctcaaacatctcatcattag

SEQ ID NO: 42163 - DNA, 20 bp, Artificial Sequence
  chemically synthesized
tctacaaatttgtcaattct

SEQ ID NO: 42164 - DNA, 20 bp, Artificial Sequence
  chemically synthesized
gaatccttactgaataataa

SEQ ID NO: 42165 - DNA, 20 bp, Artificial Sequence
  chemically synthesized
aactgtgactctctcatctg

SEQ ID NO: 42166 - DNA, 20 bp, Artificial Sequence
  chemically synthesized
tctctcatctgttatgtttt

SEQ ID NO: 42167 - DNA, 20 bp, Artificial Sequence
  chemically synthesized
atgggcaaaattctggcagc

SEQ ID NO: 42168 - DNA, 20 bp, Artificial Sequence
  chemically synthesized
gattcttctcctaagaaacc

SEQ ID NO: 42169 - DNA, 20 bp, Artificial Sequence
  chemically synthesized
tcttggatgtgaatacattt

SEQ ID NO: 42170 - DNA, 20 bp, Artificial Sequence
  chemically synthesized
tattcatgaagaaactgtta

SEQ ID NO: 42171 - DNA, 20 bp, Artificial Sequence
  chemically synthesized
gtttaaggggttctttttca

SEQ ID NO: 42172 - DNA, 20 bp, Artificial Sequence
  chemically synthesized
aggacatttcctttgaaaac

SEQ ID NO: 42173 - DNA, 20 bp, Artificial Sequence
  chemically synthesized
atcctggtcctaactctgcc

SEQ ID NO: 42174 - DNA, 20 bp, Artificial Sequence
  chemically synthesized
ttgctctatgaactggagga

SEQ ID NO: 42175 - DNA, 20 bp, Artificial Sequence
  chemically synthesized
gatagaaaataagtattaaa

SEQ ID NO: 42176 - DNA, 20 bp, Artificial Sequence
  chemically synthesized
cctgagatcaacacacatgc

SEQ ID NO: 42177 - DNA, 20 bp, Artificial Sequence
  chemically synthesized
ttataagatccataaaataa

SEQ ID NO: 42178 - DNA, 20 bp, Artificial Sequence
  chemically synthesized
cccaggtaacagtgctccat

SEQ ID NO: 42179 - DNA, 20 bp, Artificial Sequence
  chemically synthesized
acttgtgcagagatcttctg

SEQ ID NO: 42180 - DNA, 20 bp, Artificial Sequence
  chemically synthesized
cccagtgctaacaagtccct

SEQ ID NO: 42181 - DNA, 20 bp, Artificial Sequence
  chemically synthesized
cttttatttcaaggcatact

SEQ ID NO: 42182 - DNA, 20 bp, Artificial Sequence
  chemically synthesized
aatacttcacttctctgtaa

SEQ ID NO: 42183 - DNA, 20 bp, Artificial Sequence
  chemically synthesized
tgtaataaggtttctgtcct

SEQ ID NO: 42184 - DNA, 20 bp, Artificial Sequence
  chemically synthesized
ctaaactacagagaataaga

SEQ ID NO: 42185 - DNA, 20 bp, Artificial Sequence
  chemically synthesized
taggcaaaattgacttttaa

SEQ ID NO: 42186 - DNA, 20 bp, Artificial Sequence
  chemically synthesized
aacagttagtataaggtgaa

SEQ ID NO: 42187 - DNA, 20 bp, Artificial Sequence
  chemically synthesized
catatataatgcatttaatt

SEQ ID NO: 42188 - DNA, 20 bp, Artificial Sequence
  chemically synthesized
taattttgagattatgctgg

SEQ ID NO: 42189 - DNA, 20 bp, Artificial Sequence
  chemically synthesized
ctggttattatttcagatcc

SEQ ID NO: 42190 - DNA, 20 bp, Artificial Sequence
  chemically synthesized
caacacatgacataatttca

SEQ ID NO: 42191 - DNA, 20 bp, Artificial Sequence
  chemically synthesized
tgccatttacccagcaatca

SEQ ID NO: 42192 - DNA, 20 bp, Artificial Sequence
  chemically synthesized
atttacccagcaatcagttg

SEQ ID NO: 42193 - DNA, 20 bp, Artificial Sequence
  chemically synthesized
gagagtataaacccacaagg

SEQ ID NO: 42194 - DNA, 20 bp, Artificial Sequence
  chemically synthesized
gaggttatacctcactcgca

SEQ ID NO: 42195 - DNA, 20 bp, Artificial Sequence
  chemically synthesized
actcgcaaattgttttatca

SEQ ID NO: 42196 - DNA, 20 bp, Artificial Sequence
  chemically synthesized
ttactaacagaatgtagagt

SEQ ID NO: 42197 - DNA, 20 bp, Artificial Sequence
  chemically synthesized
atatacatcttcctaaaata

SEQ ID NO: 42198 - DNA, 20 bp, Artificial Sequence
  chemically synthesized
ttatttctatgttgtcataa

SEQ ID NO: 42199 - DNA, 20 bp, Artificial Sequence
  chemically synthesized
aaatgtagcctaaatatata

SEQ ID NO: 42200 - DNA, 20 bp, Artificial Sequence
  chemically synthesized
cctaaatatatattccgttt

SEQ ID NO: 42201 - DNA, 20 bp, Artificial Sequence
  chemically synthesized
cctccgagactcctttgaat

SEQ ID NO: 42202 - DNA, 20 bp, Artificial Sequence
  chemically synthesized
agttagagttggtagagtta

SEQ ID NO: 42203 - DNA, 20 bp, Artificial Sequence
  chemically synthesized
tggtagagttaccaggcttt

SEQ ID NO: 42204 - DNA, 20 bp, Artificial Sequence
  chemically synthesized
aactagtagcatgaaatctt

SEQ ID NO: 42205 - DNA, 20 bp, Artificial Sequence
  chemically synthesized
aggaattctgtgggaagcac

SEQ ID NO: 42206 - DNA, 20 bp, Artificial Sequence
  chemically synthesized
agcacataagatttcatgct

SEQ ID NO: 42207 - DNA, 20 bp, Artificial Sequence
  chemically synthesized
tgcctgtaagttctcttctc

SEQ ID NO: 42208 - DNA, 20 bp, Artificial Sequence
  chemically synthesized
gtctcggaggactgtaagaa

SEQ ID NO: 42209 - DNA, 20 bp, Artificial Sequence
  chemically synthesized
cctctctgtaacatccctgg

SEQ ID NO: 42210 - DNA, 20 bp, Artificial Sequence
  chemically synthesized
gaggagttactgctctttga

SEQ ID NO: 42211 - DNA, 20 bp, Artificial Sequence
  chemically synthesized
ttgcttgggaagtgaccaat

SEQ ID NO: 42212 - DNA, 20 bp, Artificial Sequence
  chemically synthesized
aggtgactgaggaatgtaga

SEQ ID NO: 42213 - DNA, 20 bp, Artificial Sequence
  chemically synthesized
aaaaagttaatatttacatt

SEQ ID NO: 42214 - DNA, 20 bp, Artificial Sequence
  chemically synthesized
tttattttaggaagatgtat

SEQ ID NO: 42215 - DNA, 20 bp, Artificial Sequence
  chemically synthesized
attctgttagtaattatatg

SEQ ID NO: 42216 - DNA, 20 bp, Artificial Sequence
  chemically synthesized
taattatatgaaatgcttaa

SEQ ID NO: 42217 - DNA, 20 bp, Artificial Sequence
  chemically synthesized
aagaatgtttcatattcaca

SEQ ID NO: 42218 - DNA, 20 bp, Artificial Sequence
  chemically synthesized
attcacaattagcttggaat

SEQ ID NO: 42219 - DNA, 20 bp, Artificial Sequence
  chemically synthesized
tggaattaatgttttaattc

SEQ ID NO: 42220 - DNA, 20 bp, Artificial Sequence
  chemically synthesized
agtaatttttttcttcaatg

SEQ ID NO: 42221 - DNA, 20 bp, Artificial Sequence
  chemically synthesized
aaggtagagaaccacaatgt

SEQ ID NO: 42222 - DNA, 20 bp, Artificial Sequence
  chemically synthesized
aaattataaaacaattcctt

SEQ ID NO: 42223 - DNA, 20 bp, Artificial Sequence
  chemically synthesized
ttccttgtgggtttatactc

SEQ ID NO: 42224 - DNA, 20 bp, Artificial Sequence
  chemically synthesized
aacattagcaaagaaaaagt

SEQ ID NO: 42225 - DNA, 20 bp, Artificial Sequence
  chemically synthesized
agatcttgaagaatcaagcc

SEQ ID NO: 42226 - DNA, 20 bp, Artificial Sequence
  chemically synthesized
gtaaatggcagtgatgactt

SEQ ID NO: 42227 - DNA, 20 bp, Artificial Sequence
  chemically synthesized
taacacatttatttttcatt

SEQ ID NO: 42228 - DNA, 20 bp, Artificial Sequence
  chemically synthesized
caaagcacggtcttattctc

SEQ ID NO: 42229 - DNA, 20 bp, Artificial Sequence
  chemically synthesized
aagtgaagtattttatgtgt

SEQ ID NO: 42230 - DNA, 20 bp, Artificial Sequence
  chemically synthesized
attttatgtgtacctgtttc

SEQ ID NO: 42231 - DNA, 20 bp, Artificial Sequence
  chemically synthesized
atctttatcctgaaatgagc

SEQ ID NO: 42232 - DNA, 20 bp, Artificial Sequence
  chemically synthesized
ctagtcacaaatttttccag

SEQ ID NO: 42233 - DNA, 20 bp, Artificial Sequence
  chemically synthesized
cccggagtatgccttgaaat

SEQ ID NO: 42234 - DNA, 20 bp, Artificial Sequence
  chemically synthesized
agtgggcaggagctcaagga

SEQ ID NO: 42235 - DNA, 20 bp, Artificial Sequence
  chemically synthesized
ctgcacctgagcagagcccc

SEQ ID NO: 42236 - DNA, 20 bp, Artificial Sequence
  chemically synthesized
ctggtacatagaaaatgctc

SEQ ID NO: 42237 - DNA, 20 bp, Artificial Sequence
  chemically synthesized
atggatttttttttgaaaaa

SEQ ID NO: 42238 - DNA, 20 bp, Artificial Sequence
  chemically synthesized
ttccctttcaaggggaaggg

SEQ ID NO: 42239 - DNA, 20 bp, Artificial Sequence
  chemically synthesized
tttgtggagaggtccccaca

SEQ ID NO: 42240 - DNA, 20 bp, Artificial Sequence
  chemically synthesized
ttaatattatcatagcctgg

SEQ ID NO: 42241 - DNA, 20 bp, Artificial Sequence
  chemically synthesized
ttatcatagcctggtatggt

SEQ ID NO: 42242 - DNA, 20 bp, Artificial Sequence
  chemically synthesized
ttcatatagatggataatta

SEQ ID NO: 42243 - DNA, 20 bp, Artificial Sequence
  chemically synthesized
tcctaataatacattgccac

SEQ ID NO: 42244 - DNA, 20 bp, Artificial Sequence
  chemically synthesized
cactatagtttctttaaatt

SEQ ID NO: 42245 - DNA, 20 bp, Artificial Sequence
  chemically synthesized
ctcctccagttcatagagca

SEQ ID NO: 42246 - DNA, 20 bp, Artificial Sequence
  chemically synthesized
agcaaatggcagagttagga

SEQ ID NO: 42247 - DNA, 20 bp, Artificial Sequence
  chemically synthesized
taagaattaaatattaaaac

SEQ ID NO: 42248 - DNA, 20 bp, Artificial Sequence
  chemically synthesized
cagtacttgcagtcaaaggt

SEQ ID NO: 42249 - DNA, 20 bp, Artificial Sequence
  chemically synthesized
aagaaccccttaaactgaat

SEQ ID NO: 42250 - DNA, 20 bp, Artificial Sequence
  chemically synthesized
tatactctccagttatctta

SEQ ID NO: 42251 - DNA, 20 bp, Artificial Sequence
  chemically synthesized
tattcacatccaagaaaaca

SEQ ID NO: 42252 - DNA, 20 bp, Artificial Sequence
  chemically synthesized
taacagatgagagagtcaca

SEQ ID NO: 42253 - DNA, 20 bp, Artificial Sequence
  chemically synthesized
ttaatattaaccttgaaatt

SEQ ID NO: 42254 - DNA, 20 bp, Artificial Sequence
  chemically synthesized
taatccattttattattcag

SEQ ID NO: 42255 - DNA, 20 bp, Artificial Sequence
  chemically synthesized
agatagagttaagaatacag

SEQ ID NO: 42256 - DNA, 20 bp, Artificial Sequence
  chemically synthesized
cagtgtaccgtggaatgggg

SEQ ID NO: 42257 - DNA, 20 bp, Artificial Sequence
  chemically synthesized
ggtttctaacctagttacct

SEQ ID NO: 42258 - DNA, 20 bp, Artificial Sequence
  chemically synthesized
gaaaaacctctctaatgatg

SEQ ID NO: 42259 - DNA, 20 bp, Artificial Sequence
  chemically synthesized
gatgggagagacctgcaggg

SEQ ID NO: 42260 - DNA, 20 bp, Artificial Sequence
  chemically synthesized
agggggagttaatagcctta

SEQ ID NO: 42261 - DNA, 20 bp, Artificial Sequence
  chemically synthesized
gggaagtactaagtagtcag

SEQ ID NO: 42262 - DNA, 20 bp, Artificial Sequence
  chemically synthesized
ctgtggtgtgacccaggatg

SEQ ID NO: 42263 - DNA, 20 bp, Artificial Sequence
  chemically synthesized
tttgcccaaatgtgggggaa

SEQ ID NO: 42264 - DNA, 20 bp, Artificial Sequence
  chemically synthesized
aggatatttaggatcattaa

SEQ ID NO: 42265 - DNA, 20 bp, Artificial Sequence
  chemically synthesized
gagcgatgtagtccctaaat

SEQ ID NO: 42266 - DNA, 20 bp, Artificial Sequence
  chemically synthesized
cttaaaatggactagaaaca

SEQ ID NO: 42267 - DNA, 20 bp, Artificial Sequence
  chemically synthesized
cgtattgctggacataattt

SEQ ID NO: 42268 - DNA, 20 bp, Artificial Sequence
  chemically synthesized
ctttgatataagtgaactca

SEQ ID NO: 42269 - DNA, 20 bp, Artificial Sequence
  chemically synthesized
gaagaggacttcacacttcc

SEQ ID NO: 42270 - DNA, 20 bp, Artificial Sequence
  chemically synthesized
gccgtaaagaacaactgctc

SEQ ID NO: 42271 - DNA, 20 bp, Artificial Sequence
  chemically synthesized
agtttaatactaggctactc

SEQ ID NO: 42272 - DNA, 20 bp, Artificial Sequence
  chemically synthesized
cggctgttttttgttaacac

SEQ ID NO: 42273 - DNA, 20 bp, Artificial Sequence
  chemically synthesized
gttaacacagaagttttcca

SEQ ID NO: 42274 - DNA, 20 bp, Artificial Sequence
  chemically synthesized
ccatccttcccgagacctaa

SEQ ID NO: 42275 - DNA, 20 bp, Artificial Sequence
  chemically synthesized
acgatgtttatctttcgtga

SEQ ID NO: 42276 - DNA, 20 bp, Artificial Sequence
  chemically synthesized
agatccatcaaggcccagca

SEQ ID NO: 42277 - DNA, 20 bp, Artificial Sequence
  chemically synthesized
tttcaaggctgaggtgggag

SEQ ID NO: 42278 - DNA, 20 bp, Artificial Sequence
  chemically synthesized
gcctggggaacatagggaga

SEQ ID NO: 42279 - DNA, 20 bp, Artificial Sequence
  chemically synthesized
attgaatccaggcgttctag

SEQ ID NO: 42280 - DNA, 20 bp, Artificial Sequence
  chemically synthesized
ttctagtgaggcttcagtga

SEQ ID NO: 42281 - DNA, 20 bp, Artificial Sequence
  chemically synthesized
gccggggtgacagagtgaga

SEQ ID NO: 42282 - DNA, 20 bp, Artificial Sequence
  chemically synthesized
tctacagctaaagtcagact

SEQ ID NO: 42283 - DNA, 20 bp, Artificial Sequence
  chemically synthesized
ccaccatcacctgggtaatg

SEQ ID NO: 42284 - DNA, 20 bp, Artificial Sequence
  chemically synthesized
attacatagcatctctgtgc

SEQ ID NO: 42285 - DNA, 20 bp, Artificial Sequence
  chemically synthesized
ttaataaacactctgtaggt

SEQ ID NO: 42286 - DNA, 20 bp, Artificial Sequence
  chemically synthesized
gttagctcatgtattgtcat

SEQ ID NO: 42287 - DNA, 20 bp, Artificial Sequence
  chemically synthesized
aatcacgggatgcatagtaa

SEQ ID NO: 42288 - DNA, 20 bp, Artificial Sequence
  chemically synthesized
acacacgatctatgtaaaaa

SEQ ID NO: 42289 - DNA, 20 bp, Artificial Sequence
  chemically synthesized
gtaaaaactatgcttggttg

SEQ ID NO: 42290 - DNA, 20 bp, Artificial Sequence
  chemically synthesized
cctcccactgccaagactgc

SEQ ID NO: 42291 - DNA, 20 bp, Artificial Sequence
  chemically synthesized
cactgccaagactgcagctg

SEQ ID NO: 42292 - DNA, 20 bp, Artificial Sequence
  chemically synthesized
tctaagtgtataatgacttc

SEQ ID NO: 42293 - DNA, 20 bp, Artificial Sequence
  chemically synthesized
gacttcctctgcttctgcaa

SEQ ID NO: 42294 - DNA, 20 bp, Artificial Sequence
  chemically synthesized
ctgtgttttggaacaggagg

SEQ ID NO: 42295 - DNA, 20 bp, Artificial Sequence
  chemically synthesized
tattctatacttctttgaaa

SEQ ID NO: 42296 - DNA, 20 bp, Artificial Sequence
  chemically synthesized
agtgttgccagatgacgact

SEQ ID NO: 42297 - DNA, 20 bp, Artificial Sequence
  chemically synthesized
agatcaataaaatacaaagt

SEQ ID NO: 42298 - DNA, 20 bp, Artificial Sequence
  chemically synthesized
tcagaataaaaccatttatt

SEQ ID NO: 42299 - DNA, 20 bp, Artificial Sequence
  chemically synthesized
tatatgtgtatgtaaatctc

SEQ ID NO: 42300 - DNA, 20 bp, Artificial Sequence
  chemically synthesized
gctcttgcattcacttatat

SEQ ID NO: 42301 - DNA, 20 bp, Artificial Sequence
  chemically synthesized
atattctagcttgttaagag

SEQ ID NO: 42302 - DNA, 20 bp, Artificial Sequence
  chemically synthesized
agagagaagtttggggcaaa

SEQ ID NO: 42303 - DNA, 20 bp, Artificial Sequence
  chemically synthesized
cagggaaatgtctggaggga

SEQ ID NO: 42304 - DNA, 20 bp, Artificial Sequence
  chemically synthesized
ctttcttttattgatatatg

SEQ ID NO: 42305 - DNA, 20 bp, Artificial Sequence
  chemically synthesized
tattcatcacctcaagtatt

SEQ ID NO: 42306 - DNA, 20 bp, Artificial Sequence
  chemically synthesized
ctattttgaaatatacaata

SEQ ID NO: 42307 - DNA, 20 bp, Artificial Sequence
  chemically synthesized
catattccttctatctaact

SEQ ID NO: 42308 - DNA, 20 bp, Artificial Sequence
  chemically synthesized
cgtacacacctttctctacc

SEQ ID NO: 42309 - DNA, 20 bp, Artificial Sequence
  chemically synthesized
gcaaaatttgtctttctatg

SEQ ID NO: 42310 - DNA, 20 bp, Artificial Sequence
  chemically synthesized
gtctttctatgcctggctta

SEQ ID NO: 42311 - DNA, 20 bp, Artificial Sequence
  chemically synthesized
tttcgtttaacataatgact

SEQ ID NO: 42312 - DNA, 20 bp, Artificial Sequence
  chemically synthesized
catccatgttgctgcaaatg

SEQ ID NO: 42313 - DNA, 20 bp, Artificial Sequence
  chemically synthesized
catccattgatggacactta

SEQ ID NO: 42314 - DNA, 20 bp, Artificial Sequence
  chemically synthesized
ataaacagtgtggtaccagt

SEQ ID NO: 42315 - DNA, 20 bp, Artificial Sequence
  chemically synthesized
ctttggataaatacccagta

SEQ ID NO: 42316 - DNA, 20 bp, Artificial Sequence
  chemically synthesized
gatcttatgatagttcaatt

SEQ ID NO: 42317 - DNA, 20 bp, Artificial Sequence
  chemically synthesized
agctttttggtaaatctaca

SEQ ID NO: 42318 - DNA, 20 bp, Artificial Sequence
  chemically synthesized
catagtggctatactaattt

SEQ ID NO: 42319 - DNA, 20 bp, Artificial Sequence
  chemically synthesized
ttattaatttatttaaatca

SEQ ID NO: 42320 - DNA, 20 bp, Artificial Sequence
  chemically synthesized
ggcataagatgatatctcat

SEQ ID NO: 42321 - DNA, 20 bp, Artificial Sequence
  chemically synthesized
aagatgatatctcattgtgg

SEQ ID NO: 42322 - DNA, 20 bp, Artificial Sequence
  chemically synthesized
ggttttgatttgcatttctc

SEQ ID NO: 42323 - DNA, 20 bp, Artificial Sequence
  chemically synthesized
tatcctttgccaatttttta

SEQ ID NO: 42324 - DNA, 20 bp, Artificial Sequence
  chemically synthesized
gccaattttttaatgagatt

SEQ ID NO: 42325 - DNA, 20 bp, Artificial Sequence
  chemically synthesized
tatttgtttttccactgttg

SEQ ID NO: 42326 - DNA, 20 bp, Artificial Sequence
  chemically synthesized
tttttccactgttgagttgt

SEQ ID NO: 42327 - DNA, 20 bp, Artificial Sequence
  chemically synthesized
tttgagtttcttatatattc

SEQ ID NO: 42328 - DNA, 20 bp, Artificial Sequence
  chemically synthesized
gcaaatattttctcgcattc

SEQ ID NO: 42329 - DNA, 20 bp, Artificial Sequence
  chemically synthesized
aacagcttgtctcttcactg

SEQ ID NO: 42330 - DNA, 20 bp, Artificial Sequence
  chemically synthesized
gcttgtctcttcactgtgtt

SEQ ID NO: 42331 - DNA, 20 bp, Artificial Sequence
  chemically synthesized
cctttactgtgcagatgtat

SEQ ID NO: 42332 - DNA, 20 bp, Artificial Sequence
  chemically synthesized
atatagtcccatttgtctat

SEQ ID NO: 42333 - DNA, 20 bp, Artificial Sequence
  chemically synthesized
tctatttttgcttttgttgc

SEQ ID NO: 42334 - DNA, 20 bp, Artificial Sequence
  chemically synthesized
catgtcttgaagtgtctccc

SEQ ID NO: 42335 - DNA, 20 bp, Artificial Sequence
  chemically synthesized
tctcccttatgttttctttt

SEQ ID NO: 42336 - DNA, 20 bp, Artificial Sequence
  chemically synthesized
atgttttcttttagtagttt

SEQ ID NO: 42337 - DNA, 20 bp, Artificial Sequence
  chemically synthesized
cttttagtagttttatagtt

SEQ ID NO: 42338 - DNA, 20 bp, Artificial Sequence
  chemically synthesized
gtctttaatccatcttgaga

SEQ ID NO: 42339 - DNA, 20 bp, Artificial Sequence
  chemically synthesized
tattgtacaaggggttgagt

SEQ ID NO: 42340 - DNA, 20 bp, Artificial Sequence
  chemically synthesized
tacaaggggttgagttcttg

SEQ ID NO: 42341 - DNA, 20 bp, Artificial Sequence
  chemically synthesized
ctgttggtgtatagaagagt

SEQ ID NO: 42342 - DNA, 20 bp, Artificial Sequence
  chemically synthesized
tgaattattttatcagttct

SEQ ID NO: 42343 - DNA, 20 bp, Artificial Sequence
  chemically synthesized
gagctttctggaggagtctt

SEQ ID NO: 42344 - DNA, 20 bp, Artificial Sequence
  chemically synthesized
tcatatcatcagcaaacagt

SEQ ID NO: 42345 - DNA, 20 bp, Artificial Sequence
  chemically synthesized
tgacagtttgacttcctctt

SEQ ID NO: 42346 - DNA, 20 bp, Artificial Sequence
  chemically synthesized
gatttgaatgccctttattt

SEQ ID NO: 42347 - DNA, 20 bp, Artificial Sequence
  chemically synthesized
gccctttatttctttgtttt

SEQ ID NO: 42348 - DNA, 20 bp, Artificial Sequence
  chemically synthesized
cttgttccagttctcagagg

SEQ ID NO: 42349 - DNA, 20 bp, Artificial Sequence
  chemically synthesized
cattcaatattatgttggct

SEQ ID NO: 42350 - DNA, 20 bp, Artificial Sequence
  chemically synthesized
ttggctgtgggtttgtcaca

SEQ ID NO: 42351 - DNA, 20 bp, Artificial Sequence
  chemically synthesized
actgaggtatgtctcttgta

SEQ ID NO: 42352 - DNA, 20 bp, Artificial Sequence
  chemically synthesized
cattttaatcataaatgtat

SEQ ID NO: 42353 - DNA, 20 bp, Artificial Sequence
  chemically synthesized
aatgtatgctggattttgtt

SEQ ID NO: 42354 - DNA, 20 bp, Artificial Sequence
  chemically synthesized
tattgagatgatcatgtaat

SEQ ID NO: 42355 - DNA, 20 bp, Artificial Sequence
  chemically synthesized
catgtaatttttgtttttaa

SEQ ID NO: 42356 - DNA, 20 bp, Artificial Sequence
  chemically synthesized
ccctgcatccctggcatgga

SEQ ID NO: 42357 - DNA, 20 bp, Artificial Sequence
  chemically synthesized
catggaacctgcttgatcat

SEQ ID NO: 42358 - DNA, 20 bp, Artificial Sequence
  chemically synthesized
ttggttatctagtattttgt

SEQ ID NO: 42359 - DNA, 20 bp, Artificial Sequence
  chemically synthesized
gttcatcaaggctatcagtc

SEQ ID NO: 42360 - DNA, 20 bp, Artificial Sequence
  chemically synthesized
cttttttggttatgtccttc

SEQ ID NO: 42361 - DNA, 20 bp, Artificial Sequence
  chemically synthesized
ttccctggttttggtgtgat

SEQ ID NO: 42362 - DNA, 20 bp, Artificial Sequence
  chemically synthesized
tttaattaccaattaaatct

SEQ ID NO: 42363 - DNA, 20 bp, Artificial Sequence
  chemically synthesized
agctccagtgttaggtgcat

SEQ ID NO: 42364 - DNA, 20 bp, Artificial Sequence
  chemically synthesized
agtgttaggtgcatatatgt

SEQ ID NO: 42365 - DNA, 20 bp, Artificial Sequence
  chemically synthesized
tctttgtctcttttaactgc

SEQ ID NO: 42366 - DNA, 20 bp, Artificial Sequence
  chemically synthesized
tcttttaactgctgttgctt

SEQ ID NO: 42367 - DNA, 20 bp, Artificial Sequence
  chemically synthesized
ttaactgctgttgctttaaa

SEQ ID NO: 42368 - DNA, 20 bp, Artificial Sequence
  chemically synthesized
tgagctcccagggcctttct

SEQ ID NO: 42369 - DNA, 20 bp, Artificial Sequence
  chemically synthesized
acttctcccacaaacagacc

SEQ ID NO: 42370 - DNA, 20 bp, Artificial Sequence
  chemically synthesized
tcagtttctccagtgggagt

SEQ ID NO: 42371 - DNA, 20 bp, Artificial Sequence
  chemically synthesized
cagagggtctgtgggtcctc

SEQ ID NO: 42372 - DNA, 20 bp, Artificial Sequence
  chemically synthesized
ctgtgggtcctctcaggatt

SEQ ID NO: 42373 - DNA, 20 bp, Artificial Sequence
  chemically synthesized
ccgccaagatcctgagaagt

SEQ ID NO: 42374 - DNA, 20 bp, Artificial Sequence
  chemically synthesized
gttggggattatatttcaac

SEQ ID NO: 42375 - DNA, 20 bp, Artificial Sequence
  chemically synthesized
catccaaaccatatcagcag

SEQ ID NO: 42376 - DNA, 20 bp, Artificial Sequence
  chemically synthesized
ctgttctaatgtcagtatca

SEQ ID NO: 42377 - DNA, 20 bp, Artificial Sequence
  chemically synthesized
ttttttaatttcatacaaat

SEQ ID NO: 42378 - DNA, 20 bp, Artificial Sequence
  chemically synthesized
taatttcatacaaattttag

SEQ ID NO: 42379 - DNA, 20 bp, Artificial Sequence
  chemically synthesized
gatagcggtcatatagaatc

SEQ ID NO: 42380 - DNA, 20 bp, Artificial Sequence
  chemically synthesized
gcggtcatatagaatctgta

SEQ ID NO: 42381 - DNA, 20 bp, Artificial Sequence
  chemically synthesized
tgaacataggatatctctcc

SEQ ID NO: 42382 - DNA, 20 bp, Artificial Sequence
  chemically synthesized
gtccttttcaattcttttat

SEQ ID NO: 42383 - DNA, 20 bp, Artificial Sequence
  chemically synthesized
caattcttttatcagtgttt

SEQ ID NO: 42384 - DNA, 20 bp, Artificial Sequence
  chemically synthesized
tgttttgtagttttccgaat

SEQ ID NO: 42385 - DNA, 20 bp, Artificial Sequence
  chemically synthesized
ttattttttagctattgtaa

SEQ ID NO: 42386 - DNA, 20 bp, Artificial Sequence
  chemically synthesized
ccttcttaatttccttctca

SEQ ID NO: 42387 - DNA, 20 bp, Artificial Sequence
  chemically synthesized
ttattattggtgtgtagaaa

SEQ ID NO: 42388 - DNA, 20 bp, Artificial Sequence
  chemically synthesized
tattggtgtgtagaaacatt

SEQ ID NO: 42389 - DNA, 20 bp, Artificial Sequence
  chemically synthesized
gaaacattgcttgtttcata

SEQ ID NO: 42390 - DNA, 20 bp, Artificial Sequence
  chemically synthesized
aatttatttttcagcgctaa

SEQ ID NO: 42391 - DNA, 20 bp, Artificial Sequence
  chemically synthesized
taagagtgctttggtggagt

SEQ ID NO: 42392 - DNA, 20 bp, Artificial Sequence
  chemically synthesized
tcatgtcatctggaaagatg

SEQ ID NO: 42393 - DNA, 20 bp, Artificial Sequence
  chemically synthesized
gatggaagtgggcatcctta

SEQ ID NO: 42394 - DNA, 20 bp, Artificial Sequence
  chemically synthesized
tttgtttcagttcttagagg

SEQ ID NO: 42395 - DNA, 20 bp, Artificial Sequence
  chemically synthesized
cagttcttagaggaaaggct

SEQ ID NO: 42396 - DNA, 20 bp, Artificial Sequence
  chemically synthesized
aattcagtatgatgttagct

SEQ ID NO: 42397 - DNA, 20 bp, Artificial Sequence
  chemically synthesized
tatattgagatatgttcctt

SEQ ID NO: 42398 - DNA, 20 bp, Artificial Sequence
  chemically synthesized
tccttctatgattggctgca

SEQ ID NO: 42399 - DNA, 20 bp, Artificial Sequence
  chemically synthesized
tgtatctattgagatgatca

SEQ ID NO: 42400 - DNA, 20 bp, Artificial Sequence
  chemically synthesized
ttgatgtgatgtatcacatt

SEQ ID NO: 42401 - DNA, 20 bp, Artificial Sequence
  chemically synthesized
tattatcttttggatgtact

SEQ ID NO: 42402 - DNA, 20 bp, Artificial Sequence
  chemically synthesized
cttttggatgtactgttgga

SEQ ID NO: 42403 - DNA, 20 bp, Artificial Sequence
  chemically synthesized
tcagtttgctagtattttgt

SEQ ID NO: 42404 - DNA, 20 bp, Artificial Sequence
  chemically synthesized
ttccatcagggatattgacc

SEQ ID NO: 42405 - DNA, 20 bp, Artificial Sequence
  chemically synthesized
atgagttagggagaattcct

SEQ ID NO: 42406 - DNA, 20 bp, Artificial Sequence
  chemically synthesized
aaaagaatttaaggagactt

SEQ ID NO: 42407 - DNA, 20 bp, Artificial Sequence
  chemically synthesized
gagacttgttagttttcttt

SEQ ID NO: 42408 - DNA, 20 bp, Artificial Sequence
  chemically synthesized
ttttttgggagactttttac

SEQ ID NO: 42409 - DNA, 20 bp, Artificial Sequence
  chemically synthesized
attattcattactggtctgt

SEQ ID NO: 42410 - DNA, 20 bp, Artificial Sequence
  chemically synthesized
ccagaaatttattaatttcc

SEQ ID NO: 42411 - DNA, 20 bp, Artificial Sequence
  chemically synthesized
tattaatttcctctagattt

SEQ ID NO: 42412 - DNA, 20 bp, Artificial Sequence
  chemically synthesized
taatatattttcttttttat

SEQ ID NO: 42413 - DNA, 20 bp, Artificial Sequence
  chemically synthesized
tcattttgctaatcccttgt

SEQ ID NO: 42414 - DNA, 20 bp, Artificial Sequence
  chemically synthesized
ttcattttttctttccttct

SEQ ID NO: 42415 - DNA, 20 bp, Artificial Sequence
  chemically synthesized
tttctttccttctgctagtt

SEQ ID NO: 42416 - DNA, 20 bp, Artificial Sequence
  chemically synthesized
ctgctagttttgggttttgt

SEQ ID NO: 42417 - DNA, 20 bp, Artificial Sequence
  chemically synthesized
ttgggttttgttcttgcttt

SEQ ID NO: 42418 - DNA, 20 bp, Artificial Sequence
  chemically synthesized
cttttctagcttgttgaggt

SEQ ID NO: 42419 - DNA, 20 bp, Artificial Sequence
  chemically synthesized
ctagcttgttgaggtacatg

SEQ ID NO: 42420 - DNA, 20 bp, Artificial Sequence
  chemically synthesized
attatatatttgaaatcttt

SEQ ID NO: 42421 - DNA, 20 bp, Artificial Sequence
  chemically synthesized
tctttctatgtttttaattt

SEQ ID NO: 42422 - DNA, 20 bp, Artificial Sequence
  chemically synthesized
tttaatttaagtgtttattg

SEQ ID NO: 42423 - DNA, 20 bp, Artificial Sequence
  chemically synthesized
ttgataagcttctctcttag

SEQ ID NO: 42424 - DNA, 20 bp, Artificial Sequence
  chemically synthesized
gcactgcttttgctgtatcc

SEQ ID NO: 42425 - DNA, 20 bp, Artificial Sequence
  chemically synthesized
tatgttgtatttcaattttc

SEQ ID NO: 42426 - DNA, 20 bp, Artificial Sequence
  chemically synthesized
tttcatttgtttcaaaaaat

SEQ ID NO: 42427 - DNA, 20 bp, Artificial Sequence
  chemically synthesized
ataacgttcattcaggagca

SEQ ID NO: 42428 - DNA, 20 bp, Artificial Sequence
  chemically synthesized
tttaatttccatgtatttgt

SEQ ID NO: 42429 - DNA, 20 bp, Artificial Sequence
  chemically synthesized
ccatgtatttgtataggttt

SEQ ID NO: 42430 - DNA, 20 bp, Artificial Sequence
  chemically synthesized
ggttttaaagtttttcttgt

SEQ ID NO: 42431 - DNA, 20 bp, Artificial Sequence
  chemically synthesized
agtttttcttgttattgatt

SEQ ID NO: 42432 - DNA, 20 bp, Artificial Sequence
  chemically synthesized
tattccattgtggtctgaga

SEQ ID NO: 42433 - DNA, 20 bp, Artificial Sequence
  chemically synthesized
gtggtctgagaagatgctta

SEQ ID NO: 42434 - DNA, 20 bp, Artificial Sequence
  chemically synthesized
tagatccatttggtctaaag

SEQ ID NO: 42435 - DNA, 20 bp, Artificial Sequence
  chemically synthesized
tctaaagtcaagtttaaatc

SEQ ID NO: 42436 - DNA, 20 bp, Artificial Sequence
  chemically synthesized
tctagatgatctatctgatg

SEQ ID NO: 42437 - DNA, 20 bp, Artificial Sequence
  chemically synthesized
aaatccccaactattattgt

SEQ ID NO: 42438 - DNA, 20 bp, Artificial Sequence
  chemically synthesized
caccctttatatctaataac

SEQ ID NO: 42439 - DNA, 20 bp, Artificial Sequence
  chemically synthesized
gatgctctggtgttgagtgt

SEQ ID NO: 42440 - DNA, 20 bp, Artificial Sequence
  chemically synthesized
atgtaatgacttttgtctct

SEQ ID NO: 42441 - DNA, 20 bp, Artificial Sequence
  chemically synthesized
tataactacttttgctcatt

SEQ ID NO: 42442 - DNA, 20 bp, Artificial Sequence
  chemically synthesized
tatttatctttacaagtgag

SEQ ID NO: 42443 - DNA, 20 bp, Artificial Sequence
  chemically synthesized
agtgagataagtttcttata

SEQ ID NO: 42444 - DNA, 20 bp, Artificial Sequence
  chemically synthesized
agcttacaactgggtcatat

SEQ ID NO: 42445 - DNA, 20 bp, Artificial Sequence
  chemically synthesized
caaggctattattgacatgt

SEQ ID NO: 42446 - DNA, 20 bp, Artificial Sequence
  chemically synthesized
cttattcctgccattttgtt

SEQ ID NO: 42447 - DNA, 20 bp, Artificial Sequence
  chemically synthesized
cattttgttaattgattcct

SEQ ID NO: 42448 - DNA, 20 bp, Artificial Sequence
  chemically synthesized
tgttaattgattcctggttg

SEQ ID NO: 42449 - DNA, 20 bp, Artificial Sequence
  chemically synthesized
cctggttgttttgttttttt

SEQ ID NO: 42450 - DNA, 20 bp, Artificial Sequence
  chemically synthesized
gttgttttgtttttttttta

SEQ ID NO: 42451 - DNA, 20 bp, Artificial Sequence
  chemically synthesized
ttttgttttttttttagttt

SEQ ID NO: 42452 - DNA, 20 bp, Artificial Sequence
  chemically synthesized
ttttttttagtttgtttgtt

SEQ ID NO: 42453 - DNA, 20 bp, Artificial Sequence
  chemically synthesized
ctttctttctttcttattat

SEQ ID NO: 42454 - DNA, 20 bp, Artificial Sequence
  chemically synthesized
tctttcttattatttatgat

SEQ ID NO: 42455 - DNA, 20 bp, Artificial Sequence
  chemically synthesized
tattatttatgattgtggtt

SEQ ID NO: 42456 - DNA, 20 bp, Artificial Sequence
  chemically synthesized
ttggtgattttctgtagtgg

SEQ ID NO: 42457 - DNA, 20 bp, Artificial Sequence
  chemically synthesized
gagttctttctcttctttat

SEQ ID NO: 42458 - DNA, 20 bp, Artificial Sequence
  chemically synthesized
ttcaaatttttcttgcccag

SEQ ID NO: 42459 - DNA, 20 bp, Artificial Sequence
  chemically synthesized
tcccatcttctcctggcctg

SEQ ID NO: 42460 - DNA, 20 bp, Artificial Sequence
  chemically synthesized
cccttataagtgactagaca

SEQ ID NO: 42461 - DNA, 20 bp, Artificial Sequence
  chemically synthesized
aagtgactagacattttgct

SEQ ID NO: 42462 - DNA, 20 bp, Artificial Sequence
  chemically synthesized
ctgttttagagttcttactc

SEQ ID NO: 42463 - DNA, 20 bp, Artificial Sequence
  chemically synthesized
gttcttactctttggctttt

SEQ ID NO: 42464 - DNA, 20 bp, Artificial Sequence
  chemically synthesized
gactataatgtgctgtggag

SEQ ID NO: 42465 - DNA, 20 bp, Artificial Sequence
  chemically synthesized
gcattatattatttgggaat

SEQ ID NO: 42466 - DNA, 20 bp, Artificial Sequence
  chemically synthesized
tacatttcttgctagacttg

SEQ ID NO: 42467 - DNA, 20 bp, Artificial Sequence
  chemically synthesized
ttcagctattgtgttgttac

SEQ ID NO: 42468 - DNA, 20 bp, Artificial Sequence
  chemically synthesized
ttcaagttctgaaatttttc

SEQ ID NO: 42469 - DNA, 20 bp, Artificial Sequence
  chemically synthesized
tgcttgatctgatctattgt

SEQ ID NO: 42470 - DNA, 20 bp, Artificial Sequence
  chemically synthesized
aaactcttcagttacagaat

SEQ ID NO: 42471 - DNA, 20 bp, Artificial Sequence
  chemically synthesized
aatttctcattcatatcctg

SEQ ID NO: 42472 - DNA, 20 bp, Artificial Sequence
  chemically synthesized
attcatatcctgaattgttt

SEQ ID NO: 42473 - DNA, 20 bp, Artificial Sequence
  chemically synthesized
ttgtttttctgatttctttt

SEQ ID NO: 42474 - DNA, 20 bp, Artificial Sequence
  chemically synthesized
ctgagttctcttgtgtctca

SEQ ID NO: 42475 - DNA, 20 bp, Artificial Sequence
  chemically synthesized
agcttccttaatatcaacat

SEQ ID NO: 42476 - DNA, 20 bp, Artificial Sequence
  chemically synthesized
tataaatgtcttttttttcc

SEQ ID NO: 42477 - DNA, 20 bp, Artificial Sequence
  chemically synthesized
tgtcatatttcttcaccttt

SEQ ID NO: 42478 - DNA, 20 bp, Artificial Sequence
  chemically synthesized
tgatatctctgcatctggtg

SEQ ID NO: 42479 - DNA, 20 bp, Artificial Sequence
  chemically synthesized
tctgcatctggtgtaatgat

SEQ ID NO: 42480 - DNA, 20 bp, Artificial Sequence
  chemically synthesized
ctggtgtaatgattgctgct

SEQ ID NO: 42481 - DNA, 20 bp, Artificial Sequence
  chemically synthesized
tgctgcttccagttttgtaa

SEQ ID NO: 42482 - DNA, 20 bp, Artificial Sequence
  chemically synthesized
tttctgaagatgtatcttgg

SEQ ID NO: 42483 - DNA, 20 bp, Artificial Sequence
  chemically synthesized
ggtgttgattgagtagggca

SEQ ID NO: 42484 - DNA, 20 bp, Artificial Sequence
  chemically synthesized
gattgagtagggcactttga

SEQ ID NO: 42485 - DNA, 20 bp, Artificial Sequence
  chemically synthesized
gccaacagtatcatcagtgt

SEQ ID NO: 42486 - DNA, 20 bp, Artificial Sequence
  chemically synthesized
tcagtgtctgtgattttttc

SEQ ID NO: 42487 - DNA, 20 bp, Artificial Sequence
  chemically synthesized
gatggtaatgagtctagttg

SEQ ID NO: 42488 - DNA, 20 bp, Artificial Sequence
  chemically synthesized
ggttgattctttggccttca

SEQ ID NO: 42489 - DNA, 20 bp, Artificial Sequence
  chemically synthesized
gattctttggccttcaggca

SEQ ID NO: 42490 - DNA, 20 bp, Artificial Sequence
  chemically synthesized
ctgggctggtgtgtgggtcc

SEQ ID NO: 42491 - DNA, 20 bp, Artificial Sequence
  chemically synthesized
gtgccagttgtgatggcagt

SEQ ID NO: 42492 - DNA, 20 bp, Artificial Sequence
  chemically synthesized
cagattgggtaggcccatca

SEQ ID NO: 42493 - DNA, 20 bp, Artificial Sequence
  chemically synthesized
catcatcaggcttctgggag

SEQ ID NO: 42494 - DNA, 20 bp, Artificial Sequence
  chemically synthesized
tgtctctgggttcccagaca

SEQ ID NO: 42495 - DNA, 20 bp, Artificial Sequence
  chemically synthesized
tcttgaaggggtgcggggtg

SEQ ID NO: 42496 - DNA, 20 bp, Artificial Sequence
  chemically synthesized
taaatgggttgctggtgggc

SEQ ID NO: 42497 - DNA, 20 bp, Artificial Sequence
  chemically synthesized
agtggggtagcattttctta

SEQ ID NO: 42498 - DNA, 20 bp, Artificial Sequence
  chemically synthesized
ctgtgggtgggggatgtcag

SEQ ID NO: 42499 - DNA, 20 bp, Artificial Sequence
  chemically synthesized
ttctctggagcaatgccttt

SEQ ID NO: 42500 - DNA, 20 bp, Artificial Sequence
  chemically synthesized
gtcaagggactctcctgtgg

SEQ ID NO: 42501 - DNA, 20 bp, Artificial Sequence
  chemically synthesized
tcacagaggatccctactgg

SEQ ID NO: 42502 - DNA, 20 bp, Artificial Sequence
  chemically synthesized
gatccctactgggtaggctt

SEQ ID NO: 42503 - DNA, 20 bp, Artificial Sequence
  chemically synthesized
tccctccccttcattgcctt

SEQ ID NO: 42504 - DNA, 20 bp, Artificial Sequence
  chemically synthesized
attccagaattctctcttat

SEQ ID NO: 42505 - DNA, 20 bp, Artificial Sequence
  chemically synthesized
gccccttcccttgaaatttt

SEQ ID NO: 42506 - DNA, 20 bp, Artificial Sequence
  chemically synthesized
cccttgaaattttttaagct

SEQ ID NO: 42507 - DNA, 20 bp, Artificial Sequence
  chemically synthesized
agaagtagcgaattagttaa

SEQ ID NO: 42508 - DNA, 20 bp, Artificial Sequence
  chemically synthesized
ttcatttcccaaatcaaatc

SEQ ID NO: 42509 - DNA, 20 bp, Artificial Sequence
  chemically synthesized
ttatgttcttcagcaaataa

SEQ ID NO: 42510 - DNA, 20 bp, Artificial Sequence
  chemically synthesized
atacgtaatctaacaaacaa

SEQ ID NO: 42511 - DNA, 20 bp, Artificial Sequence
  chemically synthesized
gatgcatagttgcaaataaa

SEQ ID NO: 42512 - DNA, 20 bp, Artificial Sequence
  chemically synthesized
aattttgcatttttgtggat

SEQ ID NO: 42513 - DNA, 20 bp, Artificial Sequence
  chemically synthesized
ttgtggatagtggttttgaa

SEQ ID NO: 42514 - DNA, 20 bp, Artificial Sequence
  chemically synthesized
tagttgcccttgcaaattgg

SEQ ID NO: 42515 - DNA, 20 bp, Artificial Sequence
  chemically synthesized
tttcctcaacaaataatttt

SEQ ID NO: 42516 - DNA, 20 bp, Artificial Sequence
  chemically synthesized
atgacatcaatttatgttaa

SEQ ID NO: 42517 - DNA, 20 bp, Artificial Sequence
  chemically synthesized
tgtctgttcttgtccagtct

SEQ ID NO: 42518 - DNA, 20 bp, Artificial Sequence
  chemically synthesized
ttcttgtccagtctagaagt

SEQ ID NO: 42519 - DNA, 20 bp, Artificial Sequence
  chemically synthesized
ctcatcacataacatctgaa

SEQ ID NO: 42520 - DNA, 20 bp, Artificial Sequence
  chemically synthesized
attatcagactctgctcaat

SEQ ID NO: 42521 - DNA, 20 bp, Artificial Sequence
  chemically synthesized
agatgaaattcttaaggaca

SEQ ID NO: 42522 - DNA, 20 bp, Artificial Sequence
  chemically synthesized
cttgtgtagactcatatgaa

SEQ ID NO: 42523 - DNA, 20 bp, Artificial Sequence
  chemically synthesized
atgaagttctactttgtgac

SEQ ID NO: 42524 - DNA, 20 bp, Artificial Sequence
  chemically synthesized
accattgattgtgactattg

SEQ ID NO: 42525 - DNA, 20 bp, Artificial Sequence
  chemically synthesized
ctgtagtctgatgaaatgga

SEQ ID NO: 42526 - DNA, 20 bp, Artificial Sequence
  chemically synthesized
aagtaatatataagtaataa

SEQ ID NO: 42527 - DNA, 20 bp, Artificial Sequence
  chemically synthesized
attgctttttgcaattgagt

SEQ ID NO: 42528 - DNA, 20 bp, Artificial Sequence
  chemically synthesized
atgccaggatcttattacct

SEQ ID NO: 42529 - DNA, 20 bp, Artificial Sequence
  chemically synthesized
tattacctccaggatttcac

SEQ ID NO: 42530 - DNA, 20 bp, Artificial Sequence
  chemically synthesized
aaagtattgctcaagtaatc

SEQ ID NO: 42531 - DNA, 20 bp, Artificial Sequence
  chemically synthesized
gattatttgtgtattctcac

SEQ ID NO: 42532 - DNA, 20 bp, Artificial Sequence
  chemically synthesized
tgtcacgggaaatatcctgc

SEQ ID NO: 42533 - DNA, 20 bp, Artificial Sequence
  chemically synthesized
tctttccttgcacactctac

SEQ ID NO: 42534 - DNA, 20 bp, Artificial Sequence
  chemically synthesized
aattaccccattaagtgata

SEQ ID NO: 42535 - DNA, 20 bp, Artificial Sequence
  chemically synthesized
tatgtactagttcgttatca

SEQ ID NO: 42536 - DNA, 20 bp, Artificial Sequence
  chemically synthesized
ctgggtaatttataaggaaa

SEQ ID NO: 42537 - DNA, 20 bp, Artificial Sequence
  chemically synthesized
tgccaagcaaaagggggaaa

SEQ ID NO: 42538 - DNA, 20 bp, Artificial Sequence
  chemically synthesized
gagcatgagagtaacctcct

SEQ ID NO: 42539 - DNA, 20 bp, Artificial Sequence
  chemically synthesized
caaatccctcccacaacacg

SEQ ID NO: 42540 - DNA, 20 bp, Artificial Sequence
  chemically synthesized
tatgggaactacaattcaag

SEQ ID NO: 42541 - DNA, 20 bp, Artificial Sequence
  chemically synthesized
atgttgcatagtggtgaagt

SEQ ID NO: 42542 - DNA, 20 bp, Artificial Sequence
  chemically synthesized
agtgaatgttgtatccaatc

SEQ ID NO: 42543 - DNA, 20 bp, Artificial Sequence
  chemically synthesized
tattatttcattctatatgt

SEQ ID NO: 42544 - DNA, 20 bp, Artificial Sequence
  chemically synthesized
tctatatgtctatgcttact

SEQ ID NO: 42545 - DNA, 20 bp, Artificial Sequence
  chemically synthesized
tctcactaaatgagaacata

SEQ ID NO: 42546 - DNA, 20 bp, Artificial Sequence
  chemically synthesized
agaacatactgtgtttgact

SEQ ID NO: 42547 - DNA, 20 bp, Artificial Sequence
  chemically synthesized
ataatgtcctccagttctaa

SEQ ID NO: 42548 - DNA, 20 bp, Artificial Sequence
  chemically synthesized
taaccatgtttctagagaag

SEQ ID NO: 42549 - DNA, 20 bp, Artificial Sequence
  chemically synthesized
cgtccattggtagacattta

SEQ ID NO: 42550 - DNA, 20 bp, Artificial Sequence
  chemically synthesized
ctttgggtccatacccagta

SEQ ID NO: 42551 - DNA, 20 bp, Artificial Sequence
  chemically synthesized
ccatacccagtagtgggatt

SEQ ID NO: 42552 - DNA, 20 bp, Artificial Sequence
  chemically synthesized
attgcaggattgaatggtag

SEQ ID NO: 42553 - DNA, 20 bp, Artificial Sequence
  chemically synthesized
aatcttcatgctgtcttcca

SEQ ID NO: 42554 - DNA, 20 bp, Artificial Sequence
  chemically synthesized
tccacatcctcaccaacatc

SEQ ID NO: 42555 - DNA, 20 bp, Artificial Sequence
  chemically synthesized
ggcataaggaggtatcatat

SEQ ID NO: 42556 - DNA, 20 bp, Artificial Sequence
  chemically synthesized
tggtggttttaatttgcatt

SEQ ID NO: 42557 - DNA, 20 bp, Artificial Sequence
  chemically synthesized
agtgatgttgaacttttttt

SEQ ID NO: 42558 - DNA, 20 bp, Artificial Sequence
  chemically synthesized
tagatagatagatagataga

SEQ ID NO: 42559 - DNA, 20 bp, Artificial Sequence
  chemically synthesized
atatagatttagatataaaa

SEQ ID NO: 42560 - DNA, 20 bp, Artificial Sequence
  chemically synthesized
aagctgaaggacttggagtc

SEQ ID NO: 42561 - DNA, 20 bp, Artificial Sequence
  chemically synthesized
atccagcatgggagaaagat

SEQ ID NO: 42562 - DNA, 20 bp, Artificial Sequence
  chemically synthesized
ggcttggaggctaagccagt

SEQ ID NO: 42563 - DNA, 20 bp, Artificial Sequence
  chemically synthesized
taagccagtccaggattttc

SEQ ID NO: 42564 - DNA, 20 bp, Artificial Sequence
  chemically synthesized
ttttcacatgttttttttct

SEQ ID NO: 42565 - DNA, 20 bp, Artificial Sequence
  chemically synthesized
tatatcctggccacactggc

SEQ ID NO: 42566 - DNA, 20 bp, Artificial Sequence
  chemically synthesized
aactgattagatggtgccca

SEQ ID NO: 42567 - DNA, 20 bp, Artificial Sequence
  chemically synthesized
agtattaaccatcacaagtc

SEQ ID NO: 42568 - DNA, 20 bp, Artificial Sequence
  chemically synthesized
acaagtgtatacagacacga

SEQ ID NO: 42569 - DNA, 20 bp, Artificial Sequence
  chemically synthesized
tcctgcctggaatggcctgt

SEQ ID NO: 42570 - DNA, 20 bp, Artificial Sequence
  chemically synthesized
ggatctcctatattccatgc

SEQ ID NO: 42571 - DNA, 20 bp, Artificial Sequence
  chemically synthesized
acctccattgtggagttgta

SEQ ID NO: 42572 - DNA, 20 bp, Artificial Sequence
  chemically synthesized
tccaggtggcaatcttaatt

SEQ ID NO: 42573 - DNA, 20 bp, Artificial Sequence
  chemically synthesized
cttccacttccacttccacc

SEQ ID NO: 42574 - DNA, 20 bp, Artificial Sequence
  chemically synthesized
aaacagtaccatatattgga

SEQ ID NO: 42575 - DNA, 20 bp, Artificial Sequence
  chemically synthesized
acttcaaaaggccattcaaa

SEQ ID NO: 42576 - DNA, 20 bp, Artificial Sequence
  chemically synthesized
acttctttagccataaagtg

SEQ ID NO: 42577 - DNA, 20 bp, Artificial Sequence
  chemically synthesized
atgacagtggatacggcatt

SEQ ID NO: 42578 - DNA, 20 bp, Artificial Sequence
  chemically synthesized
tcttggcataagcattgagt

SEQ ID NO: 42579 - DNA, 20 bp, Artificial Sequence
  chemically synthesized
ccgaggaatggtgccatatc

SEQ ID NO: 42580 - DNA, 20 bp, Artificial Sequence
  chemically synthesized
caagcagtggctgtggccag

SEQ ID NO: 42581 - DNA, 20 bp, Artificial Sequence
  chemically synthesized
cagaattgatcatcctatcc

SEQ ID NO: 42582 - DNA, 20 bp, Artificial Sequence
  chemically synthesized
acatgggatgaaaatatctt

SEQ ID NO: 42583 - DNA, 20 bp, Artificial Sequence
  chemically synthesized
ctttgtcatcaattttccag

SEQ ID NO: 42584 - DNA, 20 bp, Artificial Sequence
  chemically synthesized
gctcaaagttctgccaacta

SEQ ID NO: 42585 - DNA, 20 bp, Artificial Sequence
  chemically synthesized
tgatgactcatagtcaaata

SEQ ID NO: 42586 - DNA, 20 bp, Artificial Sequence
  chemically synthesized
ccaaagcccagtaacaggcc

SEQ ID NO: 42587 - DNA, 20 bp, Artificial Sequence
  chemically synthesized
caaaatcctagaggcctccg

SEQ ID NO: 42588 - DNA, 20 bp, Artificial Sequence
  chemically synthesized
tcatatggcccaagtggcat

SEQ ID NO: 42589 - DNA, 20 bp, Artificial Sequence
  chemically synthesized
gtagaaggtccctgaattta

SEQ ID NO: 42590 - DNA, 20 bp, Artificial Sequence
  chemically synthesized
atgtctcatcaataaatcca

SEQ ID NO: 42591 - DNA, 20 bp, Artificial Sequence
  chemically synthesized
ggtgagcaagttctctccaa

SEQ ID NO: 42592 - DNA, 20 bp, Artificial Sequence
  chemically synthesized
ccaaccaacttcactatgtt

SEQ ID NO: 42593 - DNA, 20 bp, Artificial Sequence
  chemically synthesized
actctctaaacaattgatgc

SEQ ID NO: 42594 - DNA, 20 bp, Artificial Sequence
  chemically synthesized
ctctatatctatatctatat

SEQ ID NO: 42595 - DNA, 20 bp, Artificial Sequence
  chemically synthesized
tagccttttcacatttttct

SEQ ID NO: 42596 - DNA, 20 bp, Artificial Sequence
  chemically synthesized
tatatcctggctgtgctggc

SEQ ID NO: 42597 - DNA, 20 bp, Artificial Sequence
  chemically synthesized
aactgattagatggtgccca

SEQ ID NO: 42598 - DNA, 20 bp, Artificial Sequence
  chemically synthesized
cacagtcactttctaatgag

SEQ ID NO: 42599 - DNA, 20 bp, Artificial Sequence
  chemically synthesized
ttttttgttgttgagttcct

SEQ ID NO: 42600 - DNA, 20 bp, Artificial Sequence
  chemically synthesized
tattagccttttgttgcatt

SEQ ID NO: 42601 - DNA, 20 bp, Artificial Sequence
  chemically synthesized
tttttctcattctgtaggtt

SEQ ID NO: 42602 - DNA, 20 bp, Artificial Sequence
  chemically synthesized
tgtaggttatccgtttactc

SEQ ID NO: 42603 - DNA, 20 bp, Artificial Sequence
  chemically synthesized
cttttgcggtgcagaagcat

SEQ ID NO: 42604 - DNA, 20 bp, Artificial Sequence
  chemically synthesized
agtttaattaagtcccattt

SEQ ID NO: 42605 - DNA, 20 bp, Artificial Sequence
  chemically synthesized
attaagtcccatttgtctgt

SEQ ID NO: 42606 - DNA, 20 bp, Artificial Sequence
  chemically synthesized
tttgtctgtttttgtttttg

SEQ ID NO: 42607 - DNA, 20 bp, Artificial Sequence
  chemically synthesized
ctgtttttgtttttgttgtg

SEQ ID NO: 42608 - DNA, 20 bp, Artificial Sequence
  chemically synthesized
aagttgactagttcagtgta

SEQ ID NO: 42609 - DNA, 20 bp, Artificial Sequence
  chemically synthesized
tttctaattttttgccatca

SEQ ID NO: 42610 - DNA, 20 bp, Artificial Sequence
  chemically synthesized
tctccttaattttcccccag

SEQ ID NO: 42611 - DNA, 20 bp, Artificial Sequence
  chemically synthesized
ttccaaatgtatccatatat

SEQ ID NO: 42612 - DNA, 20 bp, Artificial Sequence
  chemically synthesized
tgtatccatatattgtggct

SEQ ID NO: 42613 - DNA, 20 bp, Artificial Sequence
  chemically synthesized
tattagaggagagaattaag

SEQ ID NO: 42614 - DNA, 20 bp, Artificial Sequence
  chemically synthesized
agacaccgagttaaagaagg

SEQ ID NO: 42615 - DNA, 20 bp, Artificial Sequence
  chemically synthesized
aggaagggctttattcggct

SEQ ID NO: 42616 - DNA, 20 bp, Artificial Sequence
  chemically synthesized
gagcaattcctgtccctttt

SEQ ID NO: 42617 - DNA, 20 bp, Artificial Sequence
  chemically synthesized
cagaatggaacagaacagga

SEQ ID NO: 42618 - DNA, 20 bp, Artificial Sequence
  chemically synthesized
gaacaggacagggattttca

SEQ ID NO: 42619 - DNA, 20 bp, Artificial Sequence
  chemically synthesized
aggcccaggatgtggtctca

SEQ ID NO: 42620 - DNA, 20 bp, Artificial Sequence
  chemically synthesized
gtggtctcaggctgtttgcc

SEQ ID NO: 42621 - DNA, 20 bp, Artificial Sequence
  chemically synthesized
tgtggatttcatttctgcct

SEQ ID NO: 42622 - DNA, 20 bp, Artificial Sequence
  chemically synthesized
atgaaatacgtatttgtgtt

SEQ ID NO: 42623 - DNA, 20 bp, Artificial Sequence
  chemically synthesized
gttctccttatcaaaaggta

SEQ ID NO: 42624 - DNA, 20 bp, Artificial Sequence
  chemically synthesized
ttatcaaaaggtactttgct

SEQ ID NO: 42625 - DNA, 20 bp, Artificial Sequence
  chemically synthesized
ctttaaaagataaatgacta

SEQ ID NO: 42626 - DNA, 20 bp, Artificial Sequence
  chemically synthesized
gataaatgactatgtagctt

SEQ ID NO: 42627 - DNA, 20 bp, Artificial Sequence
  chemically synthesized
agaaggaggaagagaggtga

SEQ ID NO: 42628 - DNA, 20 bp, Artificial Sequence
  chemically synthesized
ctttgacactacaaagtgac

SEQ ID NO: 42629 - DNA, 20 bp, Artificial Sequence
  chemically synthesized
tttgaaaggtaaataaatcc

SEQ ID NO: 42630 - DNA, 20 bp, Artificial Sequence
  chemically synthesized
aacagttggaggcatctata

SEQ ID NO: 42631 - DNA, 22 bp, Artificial Sequence
  chemically synthesized
gcagccatgcttattcattgcg

SEQ ID NO: 42632 - DNA, 22 bp, Artificial Sequence
  chemically synthesized
attcattgcgtccactgctctt

SEQ ID NO: 42633 - DNA, 22 bp, Artificial Sequence
  chemically synthesized
ttcattgcgtccactgctcttc

SEQ ID NO: 42634 - DNA, 22 bp, Artificial Sequence
  chemically synthesized
attgcgtccactgctcttctga

SEQ ID NO: 42635 - DNA, 22 bp, Artificial Sequence
  chemically synthesized
cgtccactgctcttctgacagc

SEQ ID NO: 42636 - DNA, 22 bp, Artificial Sequence
  chemically synthesized
ctcttctgacagcatcatttac

SEQ ID NO: 42637 - DNA, 22 bp, Artificial Sequence
  chemically synthesized
ttctgacagcatcatttacagg

SEQ ID NO: 42638 - DNA, 22 bp, Artificial Sequence
  chemically synthesized
ctgacagcatcatttacaggtt

SEQ ID NO: 42639 - DNA, 22 bp, Artificial Sequence
  chemically synthesized
tgacagcatcatttacaggttc

SEQ ID NO: 42640 - DNA, 22 bp, Artificial Sequence
  chemically synthesized
acagcatcatttacaggttcac

SEQ ID NO: 42641 - DNA, 22 bp, Artificial Sequence
  chemically synthesized
acaggttcacactgttccacct

SEQ ID NO: 42642 - DNA, 22 bp, Artificial Sequence
  chemically synthesized
caggttcacactgttccacctg

SEQ ID NO: 42643 - DNA, 22 bp, Artificial Sequence
  chemically synthesized
acactgttccacctgagtcttc

SEQ ID NO: 42644 - DNA, 22 bp, Artificial Sequence
  chemically synthesized
ttccacctgagtcttcatatta

SEQ ID NO: 42645 - DNA, 22 bp, Artificial Sequence
  chemically synthesized
cacctgagtcttcatattatgc

SEQ ID NO: 42646 - DNA, 22 bp, Artificial Sequence
  chemically synthesized
agtcttcatattatgctcaaaa

SEQ ID NO: 42647 - DNA, 22 bp, Artificial Sequence
  chemically synthesized
catattatgctcaaaatatgga

SEQ ID NO: 42648 - DNA, 22 bp, Artificial Sequence
  chemically synthesized
atattatgctcaaaatatggac

SEQ ID NO: 42649 - DNA, 22 bp, Artificial Sequence
  chemically synthesized
tgctcaaaatatggacctatca

SEQ ID NO: 42650 - DNA, 22 bp, Artificial Sequence
  chemically synthesized
aaaatatggacctatcagaaaa

SEQ ID NO: 42651 - DNA, 22 bp, Artificial Sequence
  chemically synthesized
tcagaaaatagttctctcccca

SEQ ID NO: 42652 - DNA, 22 bp, Artificial Sequence
  chemically synthesized
tctccccattcatctgctgttg

SEQ ID NO: 42653 - DNA, 22 bp, Artificial Sequence
  chemically synthesized
tccccattcatctgctgttgtt

SEQ ID NO: 42654 - DNA, 22 bp, Artificial Sequence
  chemically synthesized
cccattcatctgctgttgtttt

SEQ ID NO: 42655 - DNA, 22 bp, Artificial Sequence
  chemically synthesized
atctgctgttgttttggccttt

SEQ ID NO: 42656 - DNA, 22 bp, Artificial Sequence
  chemically synthesized
ctgttgttttggcctttgtctg

SEQ ID NO: 42657 - DNA, 22 bp, Artificial Sequence
  chemically synthesized
ttgttttggcctttgtctgaat

SEQ ID NO: 42658 - DNA, 22 bp, Artificial Sequence
  chemically synthesized
ttttggcctttgtctgaatcac

SEQ ID NO: 42659 - DNA, 22 bp, Artificial Sequence
  chemically synthesized
tggcctttgtctgaatcacagt

SEQ ID NO: 42660 - DNA, 22 bp, Artificial Sequence
  chemically synthesized
ggcctttgtctgaatcacagta

SEQ ID NO: 42661 - DNA, 22 bp, Artificial Sequence
  chemically synthesized
gcctttgtctgaatcacagtat

SEQ ID NO: 42662 - DNA, 22 bp, Artificial Sequence
  chemically synthesized
tgtctgaatcacagtatagatg

SEQ ID NO: 42663 - DNA, 22 bp, Artificial Sequence
  chemically synthesized
gtctgaatcacagtatagatgc

SEQ ID NO: 42664 - DNA, 22 bp, Artificial Sequence
  chemically synthesized
tctgaatcacagtatagatgcc

SEQ ID NO: 42665 - DNA, 22 bp, Artificial Sequence
  chemically synthesized
aatcacagtatagatgcctcca

SEQ ID NO: 42666 - DNA, 22 bp, Artificial Sequence
  chemically synthesized
caactgttaaaaggaaaaaagt

SEQ ID NO: 42667 - DNA, 22 bp, Artificial Sequence
  chemically synthesized
ttaaaaggaaaaaagtttctat

SEQ ID NO: 42668 - DNA, 22 bp, Artificial Sequence
  chemically synthesized
aaaggaaaaaagtttctattat

SEQ ID NO: 42669 - DNA, 22 bp, Artificial Sequence
  chemically synthesized
ctattatcattcaggttagcaa

SEQ ID NO: 42670 - DNA, 22 bp, Artificial Sequence
  chemically synthesized
tattatcattcaggttagcaat

SEQ ID NO: 42671 - DNA, 22 bp, Artificial Sequence
  chemically synthesized
ttatcattcaggttagcaattt

SEQ ID NO: 42672 - DNA, 22 bp, Artificial Sequence
  chemically synthesized
tcattcaggttagcaatttgtt

SEQ ID NO: 42673 - DNA, 22 bp, Artificial Sequence
  chemically synthesized
aggttagcaatttgtttaaagt

SEQ ID NO: 42674 - DNA, 22 bp, Artificial Sequence
  chemically synthesized
gcaatttgtttaaagtaataag

SEQ ID NO: 42675 - DNA, 22 bp, Artificial Sequence
  chemically synthesized
gtttaaagtaataagggatgga

SEQ ID NO: 42676 - DNA, 22 bp, Artificial Sequence
  chemically synthesized
tttaaagtaataagggatggaa

SEQ ID NO: 42677 - DNA, 22 bp, Artificial Sequence
  chemically synthesized
aaagtaataagggatggaaatg

SEQ ID NO: 42678 - DNA, 22 bp, Artificial Sequence
  chemically synthesized
aagtaataagggatggaaatga

SEQ ID NO: 42679 - DNA, 22 bp, Artificial Sequence
  chemically synthesized
agatttttaaattagcatttag

SEQ ID NO: 42680 - DNA, 22 bp, Artificial Sequence
  chemically synthesized
ttaaattagcatttaggatcca

SEQ ID NO: 42681 - DNA, 22 bp, Artificial Sequence
  chemically synthesized
taaattagcatttaggatccac

SEQ ID NO: 42682 - DNA, 22 bp, Artificial Sequence
  chemically synthesized
aaattagcatttaggatccact

SEQ ID NO: 42683 - DNA, 22 bp, Artificial Sequence
  chemically synthesized
aattagcatttaggatccacta

SEQ ID NO: 42684 - DNA, 22 bp, Artificial Sequence
  chemically synthesized
gcatttaggatccactaagccc

SEQ ID NO: 42685 - DNA, 22 bp, Artificial Sequence
  chemically synthesized
aggatccactaagcccaaggat

SEQ ID NO: 42686 - DNA, 22 bp, Artificial Sequence
  chemically synthesized
ggatccactaagcccaaggatt

SEQ ID NO: 42687 - DNA, 22 bp, Artificial Sequence
  chemically synthesized
agcccaaggatttatttacctt

SEQ ID NO: 42688 - DNA, 22 bp, Artificial Sequence
  chemically synthesized
atttacctttcaaaaataatag

SEQ ID NO: 42689 - DNA, 22 bp, Artificial Sequence
  chemically synthesized
tttacctttcaaaaataatagt

SEQ ID NO: 42690 - DNA, 22 bp, Artificial Sequence
  chemically synthesized
acctttcaaaaataatagtatt

SEQ ID NO: 42691 - DNA, 22 bp, Artificial Sequence
  chemically synthesized
cctttcaaaaataatagtattt

SEQ ID NO: 42692 - DNA, 22 bp, Artificial Sequence
  chemically synthesized
tcaaaaataatagtatttgaca

SEQ ID NO: 42693 - DNA, 22 bp, Artificial Sequence
  chemically synthesized
caaaaataatagtatttgacat

SEQ ID NO: 42694 - DNA, 22 bp, Artificial Sequence
  chemically synthesized
aaaaataatagtatttgacata

SEQ ID NO: 42695 - DNA, 22 bp, Artificial Sequence
  chemically synthesized
gacatattgttaagggacacca

SEQ ID NO: 42696 - DNA, 22 bp, Artificial Sequence
  chemically synthesized
acatattgttaagggacaccaa

SEQ ID NO: 42697 - DNA, 22 bp, Artificial Sequence
  chemically synthesized
ttaagggacaccaacgaatggt

SEQ ID NO: 42698 - DNA, 22 bp, Artificial Sequence
  chemically synthesized
agggacaccaacgaatggttac

SEQ ID NO: 42699 - DNA, 22 bp, Artificial Sequence
  chemically synthesized
ctgctttgttcaattctgtgca

SEQ ID NO: 42700 - DNA, 22 bp, Artificial Sequence
  chemically synthesized
ctttgttcaattctgtgcatgt

SEQ ID NO: 42701 - DNA, 22 bp, Artificial Sequence
  chemically synthesized
tgttcaattctgtgcatgtttt

SEQ ID NO: 42702 - DNA, 22 bp, Artificial Sequence
  chemically synthesized
gttcaattctgtgcatgtttta

SEQ ID NO: 42703 - DNA, 22 bp, Artificial Sequence
  chemically synthesized
ttcaattctgtgcatgttttaa

SEQ ID NO: 42704 - DNA, 22 bp, Artificial Sequence
  chemically synthesized
aattctgtgcatgttttaaagt

SEQ ID NO: 42705 - DNA, 22 bp, Artificial Sequence
  chemically synthesized
tgtgcatgttttaaagtccctt

SEQ ID NO: 42706 - DNA, 22 bp, Artificial Sequence
  chemically synthesized
tgcatgttttaaagtcccttct

SEQ ID NO: 42707 - DNA, 22 bp, Artificial Sequence
  chemically synthesized
taaagtcccttctaggtgcatg

SEQ ID NO: 42708 - DNA, 22 bp, Artificial Sequence
  chemically synthesized
aaagtcccttctaggtgcatgt

SEQ ID NO: 42709 - DNA, 22 bp, Artificial Sequence
  chemically synthesized
aagtcccttctaggtgcatgtg

SEQ ID NO: 42710 - DNA, 22 bp, Artificial Sequence
  chemically synthesized
ctaggtgcatgtgaaatagcag

SEQ ID NO: 42711 - DNA, 22 bp, Artificial Sequence
  chemically synthesized
taggtgcatgtgaaatagcagc

SEQ ID NO: 42712 - DNA, 22 bp, Artificial Sequence
  chemically synthesized
ggtgcatgtgaaatagcagcag

SEQ ID NO: 42713 - DNA, 22 bp, Artificial Sequence
  chemically synthesized
atgccgcaaagaggtcaaatac

SEQ ID NO: 42714 - DNA, 22 bp, Artificial Sequence
  chemically synthesized
aaaaagaaagagtctgaaaaga

SEQ ID NO: 42715 - DNA, 22 bp, Artificial Sequence
  chemically synthesized
aaaagacaattggagtaactac

SEQ ID NO: 42716 - DNA, 22 bp, Artificial Sequence
  chemically synthesized
gagtaactacttgcctaaagct

SEQ ID NO: 42717 - DNA, 22 bp, Artificial Sequence
  chemically synthesized
cttgcctaaagctccagtcact

SEQ ID NO: 42718 - DNA, 22 bp, Artificial Sequence
  chemically synthesized
gcctaaagctccagtcactttg

SEQ ID NO: 42719 - DNA, 22 bp, Artificial Sequence
  chemically synthesized
cctaaagctccagtcactttgt

SEQ ID NO: 42720 - DNA, 22 bp, Artificial Sequence
  chemically synthesized
aagctccagtcactttgtagtg

SEQ ID NO: 42721 - DNA, 22 bp, Artificial Sequence
  chemically synthesized
cagtcactttgtagtgtcaaag

SEQ ID NO: 42722 - DNA, 22 bp, Artificial Sequence
  chemically synthesized
tgtagtgtcaaagttaggacaa

SEQ ID NO: 42723 - DNA, 22 bp, Artificial Sequence
  chemically synthesized
gtagtgtcaaagttaggacaaa

SEQ ID NO: 42724 - DNA, 22 bp, Artificial Sequence
  chemically synthesized
tagtgtcaaagttaggacaaat

SEQ ID NO: 42725 - DNA, 22 bp, Artificial Sequence
  chemically synthesized
ggacaaatacccattgtcatca

SEQ ID NO: 42726 - DNA, 22 bp, Artificial Sequence
  chemically synthesized
tcatcatacatgccctcagcag

SEQ ID NO: 42727 - DNA, 22 bp, Artificial Sequence
  chemically synthesized
agcagcagaaatcactttcacc

SEQ ID NO: 42728 - DNA, 22 bp, Artificial Sequence
  chemically synthesized
tcacctctcttcctccttctcc

SEQ ID NO: 42729 - DNA, 22 bp, Artificial Sequence
  chemically synthesized
cacctctcttcctccttctcct

SEQ ID NO: 42730 - DNA, 22 bp, Artificial Sequence
  chemically synthesized
acctctcttcctccttctccta

SEQ ID NO: 42731 - DNA, 22 bp, Artificial Sequence
  chemically synthesized
tcttcctccttctcctacagtg

SEQ ID NO: 42732 - DNA, 22 bp, Artificial Sequence
  chemically synthesized
ttcctccttctcctacagtggt

SEQ ID NO: 42733 - DNA, 22 bp, Artificial Sequence
  chemically synthesized
cctccttctcctacagtggtcc

SEQ ID NO: 42734 - DNA, 22 bp, Artificial Sequence
  chemically synthesized
ctccttctcctacagtggtcca

SEQ ID NO: 42735 - DNA, 22 bp, Artificial Sequence
  chemically synthesized
cttctcctacagtggtccagaa

SEQ ID NO: 42736 - DNA, 22 bp, Artificial Sequence
  chemically synthesized
ctcctacagtggtccagaaggg

SEQ ID NO: 42737 - DNA, 22 bp, Artificial Sequence
  chemically synthesized
tcctacagtggtccagaagggg

SEQ ID NO: 42738 - DNA, 22 bp, Artificial Sequence
  chemically synthesized
ctacagtggtccagaaggggct

SEQ ID NO: 42739 - DNA, 22 bp, Artificial Sequence
  chemically synthesized
cagtggtccagaaggggctcag

SEQ ID NO: 42740 - DNA, 22 bp, Artificial Sequence
  chemically synthesized
aggtatgttcaaataacagctg

SEQ ID NO: 42741 - DNA, 22 bp, Artificial Sequence
  chemically synthesized
aaataacagctgctgtggtttt

SEQ ID NO: 42742 - DNA, 22 bp, Artificial Sequence
  chemically synthesized
ctgtggttttcaattatgaaga

SEQ ID NO: 42743 - DNA, 22 bp, Artificial Sequence
  chemically synthesized
tggttttcaattatgaagaaat

SEQ ID NO: 42744 - DNA, 22 bp, Artificial Sequence
  chemically synthesized
tcaattatgaagaaatctccta

SEQ ID NO: 42745 - DNA, 22 bp, Artificial Sequence
  chemically synthesized
caattatgaagaaatctcctaa

SEQ ID NO: 42746 - DNA, 22 bp, Artificial Sequence
  chemically synthesized
aattatgaagaaatctcctaag

SEQ ID NO: 42747 - DNA, 22 bp, Artificial Sequence
  chemically synthesized
tgaagaaatctcctaagctaca

SEQ ID NO: 42748 - DNA, 22 bp, Artificial Sequence
  chemically synthesized
ctaagctacatagtcatttatc

SEQ ID NO: 42749 - DNA, 22 bp, Artificial Sequence
  chemically synthesized
agctacatagtcatttatcttt

SEQ ID NO: 42750 - DNA, 22 bp, Artificial Sequence
  chemically synthesized
catagtcatttatcttttaaag

SEQ ID NO: 42751 - DNA, 22 bp, Artificial Sequence
  chemically synthesized
atcttttaaagcaccaagcaaa

SEQ ID NO: 42752 - DNA, 22 bp, Artificial Sequence
  chemically synthesized
tcttttaaagcaccaagcaaag

SEQ ID NO: 42753 - DNA, 22 bp, Artificial Sequence
  chemically synthesized
ttaaagcaccaagcaaagtacc

SEQ ID NO: 42754 - DNA, 22 bp, Artificial Sequence
  chemically synthesized
taaagcaccaagcaaagtacct

SEQ ID NO: 42755 - DNA, 22 bp, Artificial Sequence
  chemically synthesized
aaagcaccaagcaaagtacctt

SEQ ID NO: 42756 - DNA, 22 bp, Artificial Sequence
  chemically synthesized
aagcaccaagcaaagtaccttt

SEQ ID NO: 42757 - DNA, 22 bp, Artificial Sequence
  chemically synthesized
ttgataaggagaacgtgcttat

SEQ ID NO: 42758 - DNA, 22 bp, Artificial Sequence
  chemically synthesized
tgataaggagaacgtgcttata

SEQ ID NO: 42759 - DNA, 22 bp, Artificial Sequence
  chemically synthesized
gataaggagaacgtgcttatag

SEQ ID NO: 42760 - DNA, 22 bp, Artificial Sequence
  chemically synthesized
ataaggagaacgtgcttataga

SEQ ID NO: 42761 - DNA, 22 bp, Artificial Sequence
  chemically synthesized
atagatgttcatagaagatgct

SEQ ID NO: 42762 - DNA, 22 bp, Artificial Sequence
  chemically synthesized
tagatgttcatagaagatgctt

SEQ ID NO: 42763 - DNA, 22 bp, Artificial Sequence
  chemically synthesized
atagaagatgcttggtccaacc

SEQ ID NO: 42764 - DNA, 22 bp, Artificial Sequence
  chemically synthesized
ggtccaaccccgatgtcaaatc

SEQ ID NO: 42765 - DNA, 22 bp, Artificial Sequence
  chemically synthesized
gtccaaccccgatgtcaaatcc

SEQ ID NO: 42766 - DNA, 22 bp, Artificial Sequence
  chemically synthesized
cattctcacatggtatttctct

SEQ ID NO: 42767 - DNA, 22 bp, Artificial Sequence
  chemically synthesized
attctcacatggtatttctctc

SEQ ID NO: 42768 - DNA, 22 bp, Artificial Sequence
  chemically synthesized
tcacatggtatttctctcttcc

SEQ ID NO: 42769 - DNA, 22 bp, Artificial Sequence
  chemically synthesized
acatggtatttctctcttccta

SEQ ID NO: 42770 - DNA, 22 bp, Artificial Sequence
  chemically synthesized
ctctcttcctagtaagggagga

SEQ ID NO: 42771 - DNA, 22 bp, Artificial Sequence
  chemically synthesized
tctcttcctagtaagggaggag

SEQ ID NO: 42772 - DNA, 22 bp, Artificial Sequence
  chemically synthesized
tcttcctagtaagggaggagac

SEQ ID NO: 42773 - DNA, 22 bp, Artificial Sequence
  chemically synthesized
ttcctagtaagggaggagacca

SEQ ID NO: 42774 - DNA, 22 bp, Artificial Sequence
  chemically synthesized
cctagtaagggaggagaccacc

SEQ ID NO: 42775 - DNA, 22 bp, Artificial Sequence
  chemically synthesized
ctagtaagggaggagaccaccc

SEQ ID NO: 42776 - DNA, 22 bp, Artificial Sequence
  chemically synthesized
gtaagggaggagaccacccttc

SEQ ID NO: 42777 - DNA, 22 bp, Artificial Sequence
  chemically synthesized
catattgttttatgcccaattt

SEQ ID NO: 42778 - DNA, 22 bp, Artificial Sequence
  chemically synthesized
atattgttttatgcccaatttc

SEQ ID NO: 42779 - DNA, 22 bp, Artificial Sequence
  chemically synthesized
ttttatgcccaatttctgcctc

SEQ ID NO: 42780 - DNA, 22 bp, Artificial Sequence
  chemically synthesized
tatgcccaatttctgcctccaa

SEQ ID NO: 42781 - DNA, 22 bp, Artificial Sequence
  chemically synthesized
atgcccaatttctgcctccaaa

SEQ ID NO: 42782 - DNA, 22 bp, Artificial Sequence
  chemically synthesized
tgcccaatttctgcctccaaag

SEQ ID NO: 42783 - DNA, 22 bp, Artificial Sequence
  chemically synthesized
ctgcctccaaagaaagaagaag

SEQ ID NO: 42784 - DNA, 22 bp, Artificial Sequence
  chemically synthesized
tgcctccaaagaaagaagaagt

SEQ ID NO: 42785 - DNA, 22 bp, Artificial Sequence
  chemically synthesized
cctccaaagaaagaagaagtaa

SEQ ID NO: 42786 - DNA, 22 bp, Artificial Sequence
  chemically synthesized
caaagaaagaagaagtaaaaac

SEQ ID NO: 42787 - DNA, 22 bp, Artificial Sequence
  chemically synthesized
aaaggcagaaatgaaatccaca

SEQ ID NO: 42788 - DNA, 22 bp, Artificial Sequence
  chemically synthesized
agaccacatcctgggcctggtt

SEQ ID NO: 42789 - DNA, 22 bp, Artificial Sequence
  chemically synthesized
ggcctggttaaagatagacccc

SEQ ID NO: 42790 - DNA, 22 bp, Artificial Sequence
  chemically synthesized
gttaaagatagacccctgacct

SEQ ID NO: 42791 - DNA, 22 bp, Artificial Sequence
  chemically synthesized
aagatagacccctgacctggcc

SEQ ID NO: 42792 - DNA, 22 bp, Artificial Sequence
  chemically synthesized
acctggccagttatgttatcta

SEQ ID NO: 42793 - DNA, 22 bp, Artificial Sequence
  chemically synthesized
gccagttatgttatctatagat

SEQ ID NO: 42794 - DNA, 22 bp, Artificial Sequence
  chemically synthesized
tgttatctatagattccagaca

SEQ ID NO: 42795 - DNA, 22 bp, Artificial Sequence
  chemically synthesized
tctatagattccagacactgta

SEQ ID NO: 42796 - DNA, 22 bp, Artificial Sequence
  chemically synthesized
tagattccagacactgtatgga

SEQ ID NO: 42797 - DNA, 22 bp, Artificial Sequence
  chemically synthesized
cagacactgtatggaaaagcag

SEQ ID NO: 42798 - DNA, 22 bp, Artificial Sequence
  chemically synthesized
tatggaaaagcagtgtgaaaat

SEQ ID NO: 42799 - DNA, 22 bp, Artificial Sequence
  chemically synthesized
tcctgttctgttccattctgat

SEQ ID NO: 42800 - DNA, 22 bp, Artificial Sequence
  chemically synthesized
ttctgttccattctgatgacca

SEQ ID NO: 42801 - DNA, 22 bp, Artificial Sequence
  chemically synthesized
tgttccattctgatgaccagtg

SEQ ID NO: 42802 - DNA, 22 bp, Artificial Sequence
  chemically synthesized
ttccattctgatgaccagtgca

SEQ ID NO: 42803 - DNA, 22 bp, Artificial Sequence
  chemically synthesized
cattctgatgaccagtgcatgc

SEQ ID NO: 42804 - DNA, 22 bp, Artificial Sequence
  chemically synthesized
tgatgaccagtgcatgcagccc

SEQ ID NO: 42805 - DNA, 22 bp, Artificial Sequence
  chemically synthesized
atgaccagtgcatgcagccccc

SEQ ID NO: 42806 - DNA, 22 bp, Artificial Sequence
  chemically synthesized
agagttgtaagcccttaaaagg

SEQ ID NO: 42807 - DNA, 22 bp, Artificial Sequence
  chemically synthesized
gagttgtaagcccttaaaaggg

SEQ ID NO: 42808 - DNA, 22 bp, Artificial Sequence
  chemically synthesized
taagcccttaaaagggacagga

SEQ ID NO: 42809 - DNA, 22 bp, Artificial Sequence
  chemically synthesized
aaaagggacaggaattgctcac

SEQ ID NO: 42810 - DNA, 22 bp, Artificial Sequence
  chemically synthesized
aaagggacaggaattgctcact

SEQ ID NO: 42811 - DNA, 22 bp, Artificial Sequence
  chemically synthesized
ctcactctgagagcttggttgt

SEQ ID NO: 42812 - DNA, 22 bp, Artificial Sequence
  chemically synthesized
actctgagagcttggttgttgg

SEQ ID NO: 42813 - DNA, 22 bp, Artificial Sequence
  chemically synthesized
tgagagcttggttgttggagat

SEQ ID NO: 42814 - DNA, 22 bp, Artificial Sequence
  chemically synthesized
agagcttggttgttggagatgt

SEQ ID NO: 42815 - DNA, 22 bp, Artificial Sequence
  chemically synthesized
ggttgttggagatgtgagtctt

SEQ ID NO: 42816 - DNA, 22 bp, Artificial Sequence
  chemically synthesized
gttgttggagatgtgagtcttg

SEQ ID NO: 42817 - DNA, 22 bp, Artificial Sequence
  chemically synthesized
ttggagatgtgagtcttgccca

SEQ ID NO: 42818 - DNA, 22 bp, Artificial Sequence
  chemically synthesized
gagatgtgagtcttgcccaagc

SEQ ID NO: 42819 - DNA, 22 bp, Artificial Sequence
  chemically synthesized
gcccaagctcccagccgaataa

SEQ ID NO: 42820 - DNA, 22 bp, Artificial Sequence
  chemically synthesized
cccaagctcccagccgaataaa

SEQ ID NO: 42821 - DNA, 22 bp, Artificial Sequence
  chemically synthesized
ccagccgaataaagcccttcct

SEQ ID NO: 42822 - DNA, 22 bp, Artificial Sequence
  chemically synthesized
ccttctttaactcggtgtctga

SEQ ID NO: 42823 - DNA, 22 bp, Artificial Sequence
  chemically synthesized
cttctttaactcggtgtctgag

SEQ ID NO: 42824 - DNA, 22 bp, Artificial Sequence
  chemically synthesized
ctttaactcggtgtctgagggg

SEQ ID NO: 42825 - DNA, 22 bp, Artificial Sequence
  chemically synthesized
tttaactcggtgtctgaggggt

SEQ ID NO: 42826 - DNA, 22 bp, Artificial Sequence
  chemically synthesized
taactcggtgtctgaggggttt

SEQ ID NO: 42827 - DNA, 22 bp, Artificial Sequence
  chemically synthesized
aactcggtgtctgaggggtttt

SEQ ID NO: 42828 - DNA, 22 bp, Artificial Sequence
  chemically synthesized
actcggtgtctgaggggttttg

SEQ ID NO: 42829 - DNA, 22 bp, Artificial Sequence
  chemically synthesized
ggtgtctgaggggttttgtatg

SEQ ID NO: 42830 - DNA, 22 bp, Artificial Sequence
  chemically synthesized
aggggttttgtatgcagcttgt

SEQ ID NO: 42831 - DNA, 22 bp, Artificial Sequence
  chemically synthesized
tgtatgcagcttgtcctgctac

SEQ ID NO: 42832 - DNA, 22 bp, Artificial Sequence
  chemically synthesized
gtatgcagcttgtcctgctaca

SEQ ID NO: 42833 - DNA, 22 bp, Artificial Sequence
  chemically synthesized
tatgcagcttgtcctgctacac

SEQ ID NO: 42834 - DNA, 22 bp, Artificial Sequence
  chemically synthesized
gtcctgctacactagaatcgtt

SEQ ID NO: 42835 - DNA, 22 bp, Artificial Sequence
  chemically synthesized
tcctgctacactagaatcgttc

SEQ ID NO: 42836 - DNA, 22 bp, Artificial Sequence
  chemically synthesized
ctacactagaatcgttccttaa

SEQ ID NO: 42837 - DNA, 22 bp, Artificial Sequence
  chemically synthesized
cactagaatcgttccttaattc

SEQ ID NO: 42838 - DNA, 22 bp, Artificial Sequence
  chemically synthesized
gaatcgttccttaattctctcc

SEQ ID NO: 42839 - DNA, 22 bp, Artificial Sequence
  chemically synthesized
cttaattctctcctctaatatt

SEQ ID NO: 42840 - DNA, 22 bp, Artificial Sequence
  chemically synthesized
aattctctcctctaatattgct

SEQ ID NO: 42841 - DNA, 22 bp, Artificial Sequence
  chemically synthesized
attctctcctctaatattgctg

SEQ ID NO: 42842 - DNA, 22 bp, Artificial Sequence
  chemically synthesized
tctcctctaatattgctgctac

SEQ ID NO: 42843 - DNA, 22 bp, Artificial Sequence
  chemically synthesized
tcctctaatattgctgctacct

SEQ ID NO: 42844 - DNA, 22 bp, Artificial Sequence
  chemically synthesized
ctctaatattgctgctacctct

SEQ ID NO: 42845 - DNA, 22 bp, Artificial Sequence
  chemically synthesized
taatattgctgctacctctatt

SEQ ID NO: 42846 - DNA, 22 bp, Artificial Sequence
  chemically synthesized
atattgctgctacctctattaa

SEQ ID NO: 42847 - DNA, 22 bp, Artificial Sequence
  chemically synthesized
ctgctacctctattaaaacaca

SEQ ID NO: 42848 - DNA, 22 bp, Artificial Sequence
  chemically synthesized
ctacctctattaaaacacaaag

SEQ ID NO: 42849 - DNA, 22 bp, Artificial Sequence
  chemically synthesized
cctctattaaaacacaaagcca

SEQ ID NO: 42850 - DNA, 22 bp, Artificial Sequence
  chemically synthesized
tattaaaacacaaagccacaat

SEQ ID NO: 42851 - DNA, 22 bp, Artificial Sequence
  chemically synthesized
ttaaaacacaaagccacaatat

SEQ ID NO: 42852 - DNA, 22 bp, Artificial Sequence
  chemically synthesized
aaacacaaagccacaatatatg

SEQ ID NO: 42853 - DNA, 22 bp, Artificial Sequence
  chemically synthesized
ggaaaatatgcacactttggat

SEQ ID NO: 42854 - DNA, 22 bp, Artificial Sequence
  chemically synthesized
gaaaatatgcacactttggatc

SEQ ID NO: 42855 - DNA, 22 bp, Artificial Sequence
  chemically synthesized
tggatccagcaagtccacatct

SEQ ID NO: 42856 - DNA, 22 bp, Artificial Sequence
  chemically synthesized
ggatccagcaagtccacatcta

SEQ ID NO: 42857 - DNA, 22 bp, Artificial Sequence
  chemically synthesized
gatccagcaagtccacatctag

SEQ ID NO: 42858 - DNA, 22 bp, Artificial Sequence
  chemically synthesized
gaaaaccatcctgggggaaaat

SEQ ID NO: 42859 - DNA, 22 bp, Artificial Sequence
  chemically synthesized
ggggaaaattaaggagagtatg

SEQ ID NO: 42860 - DNA, 22 bp, Artificial Sequence
  chemically synthesized
aggagagtatgaaaaggatgtt

SEQ ID NO: 42861 - DNA, 22 bp, Artificial Sequence
  chemically synthesized
actaaagcattatgatggcaaa

SEQ ID NO: 42862 - DNA, 22 bp, Artificial Sequence
  chemically synthesized
ctaaagcattatgatggcaaaa

SEQ ID NO: 42863 - DNA, 22 bp, Artificial Sequence
  chemically synthesized
aagcattatgatggcaaaaaat

SEQ ID NO: 42864 - DNA, 22 bp, Artificial Sequence
  chemically synthesized
tgatggcaaaaaattagaaaca

SEQ ID NO: 42865 - DNA, 22 bp, Artificial Sequence
  chemically synthesized
gaaacaacttacactgaactag

SEQ ID NO: 42866 - DNA, 22 bp, Artificial Sequence
  chemically synthesized
acactgaactagtcaacttact

SEQ ID NO: 42867 - DNA, 22 bp, Artificial Sequence
  chemically synthesized
cactgaactagtcaacttactt

SEQ ID NO: 42868 - DNA, 22 bp, Artificial Sequence
  chemically synthesized
aactagtcaacttacttaacag

SEQ ID NO: 42869 - DNA, 22 bp, Artificial Sequence
  chemically synthesized
gtcaacttacttaacagacaga

SEQ ID NO: 42870 - DNA, 22 bp, Artificial Sequence
  chemically synthesized
acttaacagacagaaggctcaa

SEQ ID NO: 42871 - DNA, 22 bp, Artificial Sequence
  chemically synthesized
cttaacagacagaaggctcaat

SEQ ID NO: 42872 - DNA, 22 bp, Artificial Sequence
  chemically synthesized
aacagacagaaggctcaattag

SEQ ID NO: 42873 - DNA, 22 bp, Artificial Sequence
  chemically synthesized
acagacagaaggctcaattagc

SEQ ID NO: 42874 - DNA, 22 bp, Artificial Sequence
  chemically synthesized
aattagctcatgtgtcaaatgg

SEQ ID NO: 42875 - DNA, 22 bp, Artificial Sequence
  chemically synthesized
gctcatgtgtcaaatgggggta

SEQ ID NO: 42876 - DNA, 22 bp, Artificial Sequence
  chemically synthesized
atgtgtcaaatgggggtaaaat

SEQ ID NO: 42877 - DNA, 22 bp, Artificial Sequence
  chemically synthesized
agtttggagggaaagacaggct

SEQ ID NO: 42878 - DNA, 22 bp, Artificial Sequence
  chemically synthesized
gtttggagggaaagacaggctc

SEQ ID NO: 42879 - DNA, 22 bp, Artificial Sequence
  chemically synthesized
ggagggaaagacaggctctaaa

SEQ ID NO: 42880 - DNA, 22 bp, Artificial Sequence
  chemically synthesized
gagggaaagacaggctctaaaa

SEQ ID NO: 42881 - DNA, 22 bp, Artificial Sequence
  chemically synthesized
taaaagaggattaaaaattaga

SEQ ID NO: 42882 - DNA, 22 bp, Artificial Sequence
  chemically synthesized
aaagaggattaaaaattagatg

SEQ ID NO: 42883 - DNA, 22 bp, Artificial Sequence
  chemically synthesized
aaaattagatgtggcctaggca

SEQ ID NO: 42884 - DNA, 22 bp, Artificial Sequence
  chemically synthesized
gatgtggcctaggcaaagaatt

SEQ ID NO: 42885 - DNA, 22 bp, Artificial Sequence
  chemically synthesized
ggcaaagaatttatgaccaagt

SEQ ID NO: 42886 - DNA, 22 bp, Artificial Sequence
  chemically synthesized
atgaccaagtcctcaaaactaa

SEQ ID NO: 42887 - DNA, 22 bp, Artificial Sequence
  chemically synthesized
tgaccaagtcctcaaaactaaa

SEQ ID NO: 42888 - DNA, 22 bp, Artificial Sequence
  chemically synthesized
aaaactaaacacaacaaaaaca

SEQ ID NO: 42889 - DNA, 22 bp, Artificial Sequence
  chemically synthesized
aacacaacaaaaacaaaaacag

SEQ ID NO: 42890 - DNA, 22 bp, Artificial Sequence
  chemically synthesized
aattaaactaaaatgcttctgc

SEQ ID NO: 42891 - DNA, 22 bp, Artificial Sequence
  chemically synthesized
attaaactaaaatgcttctgca

SEQ ID NO: 42892 - DNA, 22 bp, Artificial Sequence
  chemically synthesized
aactaaaatgcttctgcaccgc

SEQ ID NO: 42893 - DNA, 22 bp, Artificial Sequence
  chemically synthesized
aaatgcttctgcaccgcaaaag

SEQ ID NO: 42894 - DNA, 22 bp, Artificial Sequence
  chemically synthesized
ctgcaccgcaaaagaccgaatc

SEQ ID NO: 42895 - DNA, 22 bp, Artificial Sequence
  chemically synthesized
tgcaccgcaaaagaccgaatca

SEQ ID NO: 42896 - DNA, 22 bp, Artificial Sequence
  chemically synthesized
caccgcaaaagaccgaatcaac

SEQ ID NO: 42897 - DNA, 22 bp, Artificial Sequence
  chemically synthesized
cagaatgagaaaaaaaaattgc

SEQ ID NO: 42898 - DNA, 22 bp, Artificial Sequence
  chemically synthesized
caaactatgaatgcaacaaaag

SEQ ID NO: 42899 - DNA, 22 bp, Artificial Sequence
  chemically synthesized
tgaatgcaacaaaaggctaata

SEQ ID NO: 42900 - DNA, 22 bp, Artificial Sequence
  chemically synthesized
atatacagaatctacaaggaac

SEQ ID NO: 42901 - DNA, 22 bp, Artificial Sequence
  chemically synthesized
caaggaactcaacaacaaaaaa

SEQ ID NO: 42902 - DNA, 22 bp, Artificial Sequence
  chemically synthesized
aacaacaaaaaaaccaacctca

SEQ ID NO: 42903 - DNA, 22 bp, Artificial Sequence
  chemically synthesized
attagaaagtgactgtgatggt

SEQ ID NO: 42904 - DNA, 22 bp, Artificial Sequence
  chemically synthesized
gaaagtgactgtgatggttaat

SEQ ID NO: 42905 - DNA, 22 bp, Artificial Sequence
  chemically synthesized
tgatggttaatactgagtgtca

SEQ ID NO: 42906 - DNA, 22 bp, Artificial Sequence
  chemically synthesized
atactgagtgtcaacttgattg

SEQ ID NO: 42907 - DNA, 22 bp, Artificial Sequence
  chemically synthesized
agtgtcaacttgattggactga

SEQ ID NO: 42908 - DNA, 22 bp, Artificial Sequence
  chemically synthesized
gattggactgaaggatgcaaag

SEQ ID NO: 42909 - DNA, 22 bp, Artificial Sequence
  chemically synthesized
attggactgaaggatgcaaagt

SEQ ID NO: 42910 - DNA, 22 bp, Artificial Sequence
  chemically synthesized
gactgaaggatgcaaagtaatg

SEQ ID NO: 42911 - DNA, 22 bp, Artificial Sequence
  chemically synthesized
aaggatgcaaagtaatgatctt

SEQ ID NO: 42912 - DNA, 22 bp, Artificial Sequence
  chemically synthesized
gggtgtgtctgtgagggtgtta

SEQ ID NO: 42913 - DNA, 22 bp, Artificial Sequence
  chemically synthesized
ggtgtgtctgtgagggtgttac

SEQ ID NO: 42914 - DNA, 22 bp, Artificial Sequence
  chemically synthesized
tgagggtgttaccaaaggagat

SEQ ID NO: 42915 - DNA, 22 bp, Artificial Sequence
  chemically synthesized
ccaaaggagattaatatttcag

SEQ ID NO: 42916 - DNA, 22 bp, Artificial Sequence
  chemically synthesized
atatttcagtcagtgggctggg

SEQ ID NO: 42917 - DNA, 22 bp, Artificial Sequence
  chemically synthesized
cagtcagtgggctggggaaggc

SEQ ID NO: 42918 - DNA, 22 bp, Artificial Sequence
  chemically synthesized
agtcagtgggctggggaaggca

SEQ ID NO: 42919 - DNA, 22 bp, Artificial Sequence
  chemically synthesized
gggaaggcagacccacccttaa

SEQ ID NO: 42920 - DNA, 22 bp, Artificial Sequence
  chemically synthesized
aatctgggtgggcaccatctaa

SEQ ID NO: 42921 - DNA, 22 bp, Artificial Sequence
  chemically synthesized
atctgggtgggcaccatctaat

SEQ ID NO: 42922 - DNA, 22 bp, Artificial Sequence
  chemically synthesized
ggtgggcaccatctaatcagtt

SEQ ID NO: 42923 - DNA, 22 bp, Artificial Sequence
  chemically synthesized
atcagttgccagcacagccagg

SEQ ID NO: 42924 - DNA, 22 bp, Artificial Sequence
  chemically synthesized
ccagcacagccaggatataaag

SEQ ID NO: 42925 - DNA, 22 bp, Artificial Sequence
  chemically synthesized
gattggcttggcatcccagcct

SEQ ID NO: 42926 - DNA, 22 bp, Artificial Sequence
  chemically synthesized
gcttggcatcccagcctacatt

SEQ ID NO: 42927 - DNA, 22 bp, Artificial Sequence
  chemically synthesized
ggcatcccagcctacatttttc

SEQ ID NO: 42928 - DNA, 22 bp, Artificial Sequence
  chemically synthesized
gcatcccagcctacatttttct

SEQ ID NO: 42929 - DNA, 22 bp, Artificial Sequence
  chemically synthesized
catttttctcccatgctggatt

SEQ ID NO: 42930 - DNA, 22 bp, Artificial Sequence
  chemically synthesized
ttctcccatgctggattcttcc

SEQ ID NO: 42931 - DNA, 22 bp, Artificial Sequence
  chemically synthesized
tctcccatgctggattcttcct

SEQ ID NO: 42932 - DNA, 22 bp, Artificial Sequence
  chemically synthesized
ctcccatgctggattcttcctg

SEQ ID NO: 42933 - DNA, 22 bp, Artificial Sequence
  chemically synthesized
tcccatgctggattcttcctgc

SEQ ID NO: 42934 - DNA, 22 bp, Artificial Sequence
  chemically synthesized
ccatgctggattcttcctgccc

SEQ ID NO: 42935 - DNA, 22 bp, Artificial Sequence
  chemically synthesized
gattcttcctgccctggaacat

SEQ ID NO: 42936 - DNA, 22 bp, Artificial Sequence
  chemically synthesized
ttcctgccctggaacattgaac

SEQ ID NO: 42937 - DNA, 22 bp, Artificial Sequence
  chemically synthesized
cctgccctggaacattgaactc

SEQ ID NO: 42938 - DNA, 22 bp, Artificial Sequence
  chemically synthesized
ctgccctggaacattgaactcc

SEQ ID NO: 42939 - DNA, 22 bp, Artificial Sequence
  chemically synthesized
ccctggaacattgaactccagg

SEQ ID NO: 42940 - DNA, 22 bp, Artificial Sequence
  chemically synthesized
gaacattgaactccaggttctt

SEQ ID NO: 42941 - DNA, 22 bp, Artificial Sequence
  chemically synthesized
aactccaggttcttcagctttg

SEQ ID NO: 42942 - DNA, 22 bp, Artificial Sequence
  chemically synthesized
caggttcttcagctttgggact

SEQ ID NO: 42943 - DNA, 22 bp, Artificial Sequence
  chemically synthesized
ttcagctttgggactccgacta

SEQ ID NO: 42944 - DNA, 22 bp, Artificial Sequence
  chemically synthesized
cagctttgggactccgactagc

SEQ ID NO: 42945 - DNA, 22 bp, Artificial Sequence
  chemically synthesized
agctttgggactccgactagct

SEQ ID NO: 42946 - DNA, 22 bp, Artificial Sequence
  chemically synthesized
tgggactccgactagcttcctt

SEQ ID NO: 42947 - DNA, 22 bp, Artificial Sequence
  chemically synthesized
gggactccgactagcttccttg

SEQ ID NO: 42948 - DNA, 22 bp, Artificial Sequence
  chemically synthesized
ggactccgactagcttccttgt

SEQ ID NO: 42949 - DNA, 22 bp, Artificial Sequence
  chemically synthesized
cgactagcttccttgttcctca

SEQ ID NO: 42950 - DNA, 22 bp, Artificial Sequence
  chemically synthesized
gcttccttgttcctcagctggc

SEQ ID NO: 42951 - DNA, 22 bp, Artificial Sequence
  chemically synthesized
ccttgttcctcagctggcagat

SEQ ID NO: 42952 - DNA, 22 bp, Artificial Sequence
  chemically synthesized
cttgttcctcagctggcagatg

SEQ ID NO: 42953 - DNA, 22 bp, Artificial Sequence
  chemically synthesized
gttcctcagctggcagatggcc

SEQ ID NO: 42954 - DNA, 22 bp, Artificial Sequence
  chemically synthesized
ttcctcagctggcagatggcct

SEQ ID NO: 42955 - DNA, 22 bp, Artificial Sequence
  chemically synthesized
ctcagctggcagatggcctgtt

SEQ ID NO: 42956 - DNA, 22 bp, Artificial Sequence
  chemically synthesized
agctggcagatggcctgttttg

SEQ ID NO: 42957 - DNA, 22 bp, Artificial Sequence
  chemically synthesized
gcagatggcctgttttgggacc

SEQ ID NO: 42958 - DNA, 22 bp, Artificial Sequence
  chemically synthesized
ttttgggaccttgtgaacatgt

SEQ ID NO: 42959 - DNA, 22 bp, Artificial Sequence
  chemically synthesized
tgggaccttgtgaacatgtgag

SEQ ID NO: 42960 - DNA, 22 bp, Artificial Sequence
  chemically synthesized
gggaccttgtgaacatgtgagt

SEQ ID NO: 42961 - DNA, 22 bp, Artificial Sequence
  chemically synthesized
ggaccttgtgaacatgtgagtc

SEQ ID NO: 42962 - DNA, 22 bp, Artificial Sequence
  chemically synthesized
gtgaacatgtgagtcaatacta

SEQ ID NO: 42963 - DNA, 22 bp, Artificial Sequence
  chemically synthesized
tgaacatgtgagtcaatactac

SEQ ID NO: 42964 - DNA, 22 bp, Artificial Sequence
  chemically synthesized
cataataaactctcatatagat

SEQ ID NO: 42965 - DNA, 22 bp, Artificial Sequence
  chemically synthesized
tcatatagatatagatatagag

SEQ ID NO: 42966 - DNA, 22 bp, Artificial Sequence
  chemically synthesized
atatagatatagatatagagat

SEQ ID NO: 42967 - DNA, 22 bp, Artificial Sequence
  chemically synthesized
ctattaattctgtttctctgta

SEQ ID NO: 42968 - DNA, 22 bp, Artificial Sequence
  chemically synthesized
ttaattctgtttctctgtagaa

SEQ ID NO: 42969 - DNA, 22 bp, Artificial Sequence
  chemically synthesized
attctgtttctctgtagaaccc

SEQ ID NO: 42970 - DNA, 22 bp, Artificial Sequence
  chemically synthesized
tgtttctctgtagaaccctaat

SEQ ID NO: 42971 - DNA, 22 bp, Artificial Sequence
  chemically synthesized
tttctctgtagaaccctaatac

SEQ ID NO: 42972 - DNA, 22 bp, Artificial Sequence
  chemically synthesized
ctctgtagaaccctaatacaga

SEQ ID NO: 42973 - DNA, 22 bp, Artificial Sequence
  chemically synthesized
tctgtagaaccctaatacagat

SEQ ID NO: 42974 - DNA, 22 bp, Artificial Sequence
  chemically synthesized
tgtagaaccctaatacagattt

SEQ ID NO: 42975 - DNA, 22 bp, Artificial Sequence
  chemically synthesized
tagaaccctaatacagattttg

SEQ ID NO: 42976 - DNA, 22 bp, Artificial Sequence
  chemically synthesized
atacagattttggtaccaggag

SEQ ID NO: 42977 - DNA, 22 bp, Artificial Sequence
  chemically synthesized
tggtaccaggagtggttctaga

SEQ ID NO: 42978 - DNA, 22 bp, Artificial Sequence
  chemically synthesized
ggtaccaggagtggttctagag

SEQ ID NO: 42979 - DNA, 22 bp, Artificial Sequence
  chemically synthesized
gtaccaggagtggttctagagg

SEQ ID NO: 42980 - DNA, 22 bp, Artificial Sequence
  chemically synthesized
tagaggaacagaatattaagga

SEQ ID NO: 42981 - DNA, 22 bp, Artificial Sequence
  chemically synthesized
gaggaacagaatattaaggatg

SEQ ID NO: 42982 - DNA, 22 bp, Artificial Sequence
  chemically synthesized
aggatggagttctttcattggt

SEQ ID NO: 42983 - DNA, 22 bp, Artificial Sequence
  chemically synthesized
tttcattggttttggggtttct

SEQ ID NO: 42984 - DNA, 22 bp, Artificial Sequence
  chemically synthesized
tcattggttttggggtttctgg

SEQ ID NO: 42985 - DNA, 22 bp, Artificial Sequence
  chemically synthesized
cattggttttggggtttctgga

SEQ ID NO: 42986 - DNA, 22 bp, Artificial Sequence
  chemically synthesized
attggttttggggtttctggag

SEQ ID NO: 42987 - DNA, 22 bp, Artificial Sequence
  chemically synthesized
gttttggggtttctggagttgg

SEQ ID NO: 42988 - DNA, 22 bp, Artificial Sequence
  chemically synthesized
tggggtttctggagttggctgc

SEQ ID NO: 42989 - DNA, 22 bp, Artificial Sequence
  chemically synthesized
ggggtttctggagttggctgct

SEQ ID NO: 42990 - DNA, 22 bp, Artificial Sequence
  chemically synthesized
gggtttctggagttggctgctt

SEQ ID NO: 42991 - DNA, 22 bp, Artificial Sequence
  chemically synthesized
ctggagttggctgcttaatatg

SEQ ID NO: 42992 - DNA, 22 bp, Artificial Sequence
  chemically synthesized
tggagttggctgcttaatatga

SEQ ID NO: 42993 - DNA, 22 bp, Artificial Sequence
  chemically synthesized
gagttggctgcttaatatgatt

SEQ ID NO: 42994 - DNA, 22 bp, Artificial Sequence
  chemically synthesized
gctgcttaatatgattagaccc

SEQ ID NO: 42995 - DNA, 22 bp, Artificial Sequence
  chemically synthesized
cttaatatgattagacccaaat

SEQ ID NO: 42996 - DNA, 22 bp, Artificial Sequence
  chemically synthesized
aatatgattagacccaaatatg

SEQ ID NO: 42997 - DNA, 22 bp, Artificial Sequence
  chemically synthesized
atatgattagacccaaatatgc

SEQ ID NO: 42998 - DNA, 22 bp, Artificial Sequence
  chemically synthesized
gacccaaatatgctaaggactc

SEQ ID NO: 42999 - DNA, 22 bp, Artificial Sequence
  chemically synthesized
aggactcttcttctaatggtat

SEQ ID NO: 43000 - DNA, 22 bp, Artificial Sequence
  chemically synthesized
ttcttctaatggtatggagaac

SEQ ID NO: 43001 - DNA, 22 bp, Artificial Sequence
  chemically synthesized
cttctaatggtatggagaacac

SEQ ID NO: 43002 - DNA, 22 bp, Artificial Sequence
  chemically synthesized
ttctaatggtatggagaacact

SEQ ID NO: 43003 - DNA, 22 bp, Artificial Sequence
  chemically synthesized
ctaatggtatggagaacactga

SEQ ID NO: 43004 - DNA, 22 bp, Artificial Sequence
  chemically synthesized
taatggtatggagaacactgat

SEQ ID NO: 43005 - DNA, 22 bp, Artificial Sequence
  chemically synthesized
atggtatggagaacactgataa

SEQ ID NO: 43006 - DNA, 22 bp, Artificial Sequence
  chemically synthesized
ataatccttggcatcaattgtt

SEQ ID NO: 43007 - DNA, 22 bp, Artificial Sequence
  chemically synthesized
ggcatcaattgtttagagagtt

SEQ ID NO: 43008 - DNA, 22 bp, Artificial Sequence
  chemically synthesized
gcatcaattgtttagagagtta

SEQ ID NO: 43009 - DNA, 22 bp, Artificial Sequence
  chemically synthesized
tttagagagttatgcaaaataa

SEQ ID NO: 43010 - DNA, 22 bp, Artificial Sequence
  chemically synthesized
agagagttatgcaaaataaatg

SEQ ID NO: 43011 - DNA, 22 bp, Artificial Sequence
  chemically synthesized
gagagttatgcaaaataaatgc

SEQ ID NO: 43012 - DNA, 22 bp, Artificial Sequence
  chemically synthesized
tgcaaaataaatgcatttgaca

SEQ ID NO: 43013 - DNA, 22 bp, Artificial Sequence
  chemically synthesized
gacactcttgattcaacgcttg

SEQ ID NO: 43014 - DNA, 22 bp, Artificial Sequence
  chemically synthesized
acactcttgattcaacgcttgt

SEQ ID NO: 43015 - DNA, 22 bp, Artificial Sequence
  chemically synthesized
ttgattcaacgcttgtgagagg

SEQ ID NO: 43016 - DNA, 22 bp, Artificial Sequence
  chemically synthesized
gattcaacgcttgtgagaggca

SEQ ID NO: 43017 - DNA, 22 bp, Artificial Sequence
  chemically synthesized
attcaacgcttgtgagaggcaa

SEQ ID NO: 43018 - DNA, 22 bp, Artificial Sequence
  chemically synthesized
aacgcttgtgagaggcaaggaa

SEQ ID NO: 43019 - DNA, 22 bp, Artificial Sequence
  chemically synthesized
gtgagaggcaaggaatttagct

SEQ ID NO: 43020 - DNA, 22 bp, Artificial Sequence
  chemically synthesized
tgagaggcaaggaatttagcta

SEQ ID NO: 43021 - DNA, 22 bp, Artificial Sequence
  chemically synthesized
agctactgtatacataatactt

SEQ ID NO: 43022 - DNA, 22 bp, Artificial Sequence
  chemically synthesized
gctactgtatacataatacttt

SEQ ID NO: 43023 - DNA, 22 bp, Artificial Sequence
  chemically synthesized
ctgtatacataatacttttgac

SEQ ID NO: 43024 - DNA, 22 bp, Artificial Sequence
  chemically synthesized
tatacataatacttttgactat

SEQ ID NO: 43025 - DNA, 22 bp, Artificial Sequence
  chemically synthesized
ttgactatatgtggagaatcaa

SEQ ID NO: 43026 - DNA, 22 bp, Artificial Sequence
  chemically synthesized
tgactatatgtggagaatcaag

SEQ ID NO: 43027 - DNA, 22 bp, Artificial Sequence
  chemically synthesized
gactatatgtggagaatcaagg

SEQ ID NO: 43028 - DNA, 22 bp, Artificial Sequence
  chemically synthesized
actatatgtggagaatcaagga

SEQ ID NO: 43029 - DNA, 22 bp, Artificial Sequence
  chemically synthesized
tatgtggagaatcaaggaacat

SEQ ID NO: 43030 - DNA, 22 bp, Artificial Sequence
  chemically synthesized
gttggttgcttgtaagttcgct

SEQ ID NO: 43031 - DNA, 22 bp, Artificial Sequence
  chemically synthesized
gttgcttgtaagttcgctggac

SEQ ID NO: 43032 - DNA, 22 bp, Artificial Sequence
  chemically synthesized
cttgtaagttcgctggacaaag

SEQ ID NO: 43033 - DNA, 22 bp, Artificial Sequence
  chemically synthesized
gtaagttcgctggacaaagtga

SEQ ID NO: 43034 - DNA, 22 bp, Artificial Sequence
  chemically synthesized
taagttcgctggacaaagtgat

SEQ ID NO: 43035 - DNA, 22 bp, Artificial Sequence
  chemically synthesized
gctggacaaagtgatgaaagaa

SEQ ID NO: 43036 - DNA, 22 bp, Artificial Sequence
  chemically synthesized
gacaaagtgatgaaagaaaatg

SEQ ID NO: 43037 - DNA, 22 bp, Artificial Sequence
  chemically synthesized
aggagtatatcaactctccagc

SEQ ID NO: 43038 - DNA, 22 bp, Artificial Sequence
  chemically synthesized
tccagctttgtgccataatctt

SEQ ID NO: 43039 - DNA, 22 bp, Artificial Sequence
  chemically synthesized
cagctttgtgccataatcttat

SEQ ID NO: 43040 - DNA, 22 bp, Artificial Sequence
  chemically synthesized
tgtgccataatcttatttggag

SEQ ID NO: 43041 - DNA, 22 bp, Artificial Sequence
  chemically synthesized
gtgccataatcttatttggaga

SEQ ID NO: 43042 - DNA, 22 bp, Artificial Sequence
  chemically synthesized
tgccataatcttatttggagag

SEQ ID NO: 43043 - DNA, 22 bp, Artificial Sequence
  chemically synthesized
atttggagagaacttgctcacc

SEQ ID NO: 43044 - DNA, 22 bp, Artificial Sequence
  chemically synthesized
tttggagagaacttgctcacct

SEQ ID NO: 43045 - DNA, 22 bp, Artificial Sequence
  chemically synthesized
ggagagaacttgctcacctttc

SEQ ID NO: 43046 - DNA, 22 bp, Artificial Sequence
  chemically synthesized
gagagaacttgctcacctttca

SEQ ID NO: 43047 - DNA, 22 bp, Artificial Sequence
  chemically synthesized
gctcacctttcacttccacaag

SEQ ID NO: 43048 - DNA, 22 bp, Artificial Sequence
  chemically synthesized
ctcacctttcacttccacaaga

SEQ ID NO: 43049 - DNA, 22 bp, Artificial Sequence
  chemically synthesized
acctttcacttccacaagatat

SEQ ID NO: 43050 - DNA, 22 bp, Artificial Sequence
  chemically synthesized
tcacttccacaagatatcacag

SEQ ID NO: 43051 - DNA, 22 bp, Artificial Sequence
  chemically synthesized
cacttccacaagatatcacagt

SEQ ID NO: 43052 - DNA, 22 bp, Artificial Sequence
  chemically synthesized
acttccacaagatatcacagtg

SEQ ID NO: 43053 - DNA, 22 bp, Artificial Sequence
  chemically synthesized
ccacaagatatcacagtggtcc

SEQ ID NO: 43054 - DNA, 22 bp, Artificial Sequence
  chemically synthesized
cacaagatatcacagtggtcca

SEQ ID NO: 43055 - DNA, 22 bp, Artificial Sequence
  chemically synthesized
cattgatgacatgctgactgga

SEQ ID NO: 43056 - DNA, 22 bp, Artificial Sequence
  chemically synthesized
atgacatgctgactggaactag

SEQ ID NO: 43057 - DNA, 22 bp, Artificial Sequence
  chemically synthesized
actggaactagtgagcaagaag

SEQ ID NO: 43058 - DNA, 22 bp, Artificial Sequence
  chemically synthesized
gaactagtgagcaagaagtagc

SEQ ID NO: 43059 - DNA, 22 bp, Artificial Sequence
  chemically synthesized
gtgagcaagaagtagcaaacac

SEQ ID NO: 43060 - DNA, 22 bp, Artificial Sequence
  chemically synthesized
gatttattgatgagacatttgt

SEQ ID NO: 43061 - DNA, 22 bp, Artificial Sequence
  chemically synthesized
attgatgagacatttgtgggac

SEQ ID NO: 43062 - DNA, 22 bp, Artificial Sequence
  chemically synthesized
ttgatgagacatttgtgggaca

SEQ ID NO: 43063 - DNA, 22 bp, Artificial Sequence
  chemically synthesized
atgagacatttgtgggacagag

SEQ ID NO: 43064 - DNA, 22 bp, Artificial Sequence
  chemically synthesized
gtgggacagaggatgggaaata

SEQ ID NO: 43065 - DNA, 22 bp, Artificial Sequence
  chemically synthesized
tgggacagaggatgggaaataa

SEQ ID NO: 43066 - DNA, 22 bp, Artificial Sequence
  chemically synthesized
attaaattcagggaccttctac

SEQ ID NO: 43067 - DNA, 22 bp, Artificial Sequence
  chemically synthesized
aattcagggaccttctacctca

SEQ ID NO: 43068 - DNA, 22 bp, Artificial Sequence
  chemically synthesized
agggaccttctacctcagtaaa

SEQ ID NO: 43069 - DNA, 22 bp, Artificial Sequence
  chemically synthesized
ctacctcagtaaaatttatagg

SEQ ID NO: 43070 - DNA, 22 bp, Artificial Sequence
  chemically synthesized
tacctcagtaaaatttataggg

SEQ ID NO: 43071 - DNA, 22 bp, Artificial Sequence
  chemically synthesized
cctcagtaaaatttataggggt

SEQ ID NO: 43072 - DNA, 22 bp, Artificial Sequence
  chemically synthesized
agtaaaatttataggggtccaa

SEQ ID NO: 43073 - DNA, 22 bp, Artificial Sequence
  chemically synthesized
ataggggtccaatggtttgggg

SEQ ID NO: 43074 - DNA, 22 bp, Artificial Sequence
  chemically synthesized
taggggtccaatggtttggggc

SEQ ID NO: 43075 - DNA, 22 bp, Artificial Sequence
  chemically synthesized
ggggctctttgagatattcctt

SEQ ID NO: 43076 - DNA, 22 bp, Artificial Sequence
  chemically synthesized
gggctctttgagatattccttc

SEQ ID NO: 43077 - DNA, 22 bp, Artificial Sequence
  chemically synthesized
tttgagatattccttctaaagt

SEQ ID NO: 43078 - DNA, 22 bp, Artificial Sequence
  chemically synthesized
tgagatattccttctaaagtga

SEQ ID NO: 43079 - DNA, 22 bp, Artificial Sequence
  chemically synthesized
gagatattccttctaaagtgaa

SEQ ID NO: 43080 - DNA, 22 bp, Artificial Sequence
  chemically synthesized
agatattccttctaaagtgaag

SEQ ID NO: 43081 - DNA, 22 bp, Artificial Sequence
  chemically synthesized
cttctaaagtgaaggataattt

SEQ ID NO: 43082 - DNA, 22 bp, Artificial Sequence
  chemically synthesized
ctaaagtgaaggataatttgct

SEQ ID NO: 43083 - DNA, 22 bp, Artificial Sequence
  chemically synthesized
taaagtgaaggataatttgctg

SEQ ID NO: 43084 - DNA, 22 bp, Artificial Sequence
  chemically synthesized
aagtgaaggataatttgctgca

SEQ ID NO: 43085 - DNA, 22 bp, Artificial Sequence
  chemically synthesized
gctgcatttggccactcttaca

SEQ ID NO: 43086 - DNA, 22 bp, Artificial Sequence
  chemically synthesized
ctgcatttggccactcttacaa

SEQ ID NO: 43087 - DNA, 22 bp, Artificial Sequence
  chemically synthesized
catttggccactcttacaacca

SEQ ID NO: 43088 - DNA, 22 bp, Artificial Sequence
  chemically synthesized
ggccactcttacaaccaagaaa

SEQ ID NO: 43089 - DNA, 22 bp, Artificial Sequence
  chemically synthesized
gccactcttacaaccaagaaat

SEQ ID NO: 43090 - DNA, 22 bp, Artificial Sequence
  chemically synthesized
ttacaaccaagaaataggcaca

SEQ ID NO: 43091 - DNA, 22 bp, Artificial Sequence
  chemically synthesized
acaaccaagaaataggcacaac

SEQ ID NO: 43092 - DNA, 22 bp, Artificial Sequence
  chemically synthesized
caaccaagaaataggcacaacg

SEQ ID NO: 43093 - DNA, 22 bp, Artificial Sequence
  chemically synthesized
gtgggcctatttggattttgga

SEQ ID NO: 43094 - DNA, 22 bp, Artificial Sequence
  chemically synthesized
tttggattttggaggcaacata

SEQ ID NO: 43095 - DNA, 22 bp, Artificial Sequence
  chemically synthesized
ggattttggaggcaacatattc

SEQ ID NO: 43096 - DNA, 22 bp, Artificial Sequence
  chemically synthesized
gattttggaggcaacatattcc

SEQ ID NO: 43097 - DNA, 22 bp, Artificial Sequence
  chemically synthesized
tggaggcaacatattcctgatt

SEQ ID NO: 43098 - DNA, 22 bp, Artificial Sequence
  chemically synthesized
ggaggcaacatattcctgattt

SEQ ID NO: 43099 - DNA, 22 bp, Artificial Sequence
  chemically synthesized
gaggcaacatattcctgatttg

SEQ ID NO: 43100 - DNA, 22 bp, Artificial Sequence
  chemically synthesized
ctgatttgggtgtgttactctg

SEQ ID NO: 43101 - DNA, 22 bp, Artificial Sequence
  chemically synthesized
atttgggtgtgttactctggcc

SEQ ID NO: 43102 - DNA, 22 bp, Artificial Sequence
  chemically synthesized
gggtgtgttactctggcccatt

SEQ ID NO: 43103 - DNA, 22 bp, Artificial Sequence
  chemically synthesized
ggtgtgttactctggcccattt

SEQ ID NO: 43104 - DNA, 22 bp, Artificial Sequence
  chemically synthesized
ctctggcccatttatcgagtga

SEQ ID NO: 43105 - DNA, 22 bp, Artificial Sequence
  chemically synthesized
tggcccatttatcgagtgatcc

SEQ ID NO: 43106 - DNA, 22 bp, Artificial Sequence
  chemically synthesized
gcccatttatcgagtgatccaa

SEQ ID NO: 43107 - DNA, 22 bp, Artificial Sequence
  chemically synthesized
atcgagtgatccaaaaggctgc

SEQ ID NO: 43108 - DNA, 22 bp, Artificial Sequence
  chemically synthesized
tcgagtgatccaaaaggctgcc

SEQ ID NO: 43109 - DNA, 22 bp, Artificial Sequence
  chemically synthesized
ccagttttgagtggagtccaga

SEQ ID NO: 43110 - DNA, 22 bp, Artificial Sequence
  chemically synthesized
tgagtggagtccagaacagaag

SEQ ID NO: 43111 - DNA, 22 bp, Artificial Sequence
  chemically synthesized
gagtggagtccagaacagaagg

SEQ ID NO: 43112 - DNA, 22 bp, Artificial Sequence
  chemically synthesized
agtggagtccagaacagaaggc

SEQ ID NO: 43113 - DNA, 22 bp, Artificial Sequence
  chemically synthesized
tgccacaggtccaggctgctgt

SEQ ID NO: 43114 - DNA, 22 bp, Artificial Sequence
  chemically synthesized
ccacaggtccaggctgctgtgc

SEQ ID NO: 43115 - DNA, 22 bp, Artificial Sequence
  chemically synthesized
ctgtgcaagctgctatgccact

SEQ ID NO: 43116 - DNA, 22 bp, Artificial Sequence
  chemically synthesized
tgcaagctgctatgccacttgg

SEQ ID NO: 43117 - DNA, 22 bp, Artificial Sequence
  chemically synthesized
ctatgccacttgggccatatga

SEQ ID NO: 43118 - DNA, 22 bp, Artificial Sequence
  chemically synthesized
tgccacttgggccatatgacct

SEQ ID NO: 43119 - DNA, 22 bp, Artificial Sequence
  chemically synthesized
gggccatatgacctagcagatc

SEQ ID NO: 43120 - DNA, 22 bp, Artificial Sequence
  chemically synthesized
ggccatatgacctagcagatcc

SEQ ID NO: 43121 - DNA, 22 bp, Artificial Sequence
  chemically synthesized
gcagatccaatgatgcttgagg

SEQ ID NO: 43122 - DNA, 22 bp, Artificial Sequence
  chemically synthesized
gaggtgtcagtgccagataggg

SEQ ID NO: 43123 - DNA, 22 bp, Artificial Sequence
  chemically synthesized
aggtgtcagtgccagataggga

SEQ ID NO: 43124 - DNA, 22 bp, Artificial Sequence
  chemically synthesized
tttggagcatttggcaggctga

SEQ ID NO: 43125 - DNA, 22 bp, Artificial Sequence
  chemically synthesized
ggagcatttggcaggctgaatc

SEQ ID NO: 43126 - DNA, 22 bp, Artificial Sequence
  chemically synthesized
gagcatttggcaggctgaatca

SEQ ID NO: 43127 - DNA, 22 bp, Artificial Sequence
  chemically synthesized
ggcaggctgaatcacagcggag

SEQ ID NO: 43128 - DNA, 22 bp, Artificial Sequence
  chemically synthesized
gcaggctgaatcacagcggagg

SEQ ID NO: 43129 - DNA, 22 bp, Artificial Sequence
  chemically synthesized
aatcacagcggaggcctctagg

SEQ ID NO: 43130 - DNA, 22 bp, Artificial Sequence
  chemically synthesized
taggattttggagcaaggccct

SEQ ID NO: 43131 - DNA, 22 bp, Artificial Sequence
  chemically synthesized
ggattttggagcaaggccctgc

SEQ ID NO: 43132 - DNA, 22 bp, Artificial Sequence
  chemically synthesized
tggagcaaggccctgccatctt

SEQ ID NO: 43133 - DNA, 22 bp, Artificial Sequence
  chemically synthesized
ggagcaaggccctgccatcttc

SEQ ID NO: 43134 - DNA, 22 bp, Artificial Sequence
  chemically synthesized
gagcaaggccctgccatcttct

SEQ ID NO: 43135 - DNA, 22 bp, Artificial Sequence
  chemically synthesized
ccatcttctgcagataactact

SEQ ID NO: 43136 - DNA, 22 bp, Artificial Sequence
  chemically synthesized
ctgcagataactactctctttt

SEQ ID NO: 43137 - DNA, 22 bp, Artificial Sequence
  chemically synthesized
tgcagataactactctctttta

SEQ ID NO: 43138 - DNA, 22 bp, Artificial Sequence
  chemically synthesized
cagataactactctcttttagg

SEQ ID NO: 43139 - DNA, 22 bp, Artificial Sequence
  chemically synthesized
ctctcttttagggagaaagctc

SEQ ID NO: 43140 - DNA, 22 bp, Artificial Sequence
  chemically synthesized
tcttttagggagaaagctcttg

SEQ ID NO: 43141 - DNA, 22 bp, Artificial Sequence
  chemically synthesized
ttttagggagaaagctcttggc

SEQ ID NO: 43142 - DNA, 22 bp, Artificial Sequence
  chemically synthesized
ttagggagaaagctcttggcct

SEQ ID NO: 43143 - DNA, 22 bp, Artificial Sequence
  chemically synthesized
tagggagaaagctcttggcctg

SEQ ID NO: 43144 - DNA, 22 bp, Artificial Sequence
  chemically synthesized
agggagaaagctcttggcctgt

SEQ ID NO: 43145 - DNA, 22 bp, Artificial Sequence
  chemically synthesized
gggagaaagctcttggcctgtt

SEQ ID NO: 43146 - DNA, 22 bp, Artificial Sequence
  chemically synthesized
ttggcctgttactgggctttgg

SEQ ID NO: 43147 - DNA, 22 bp, Artificial Sequence
  chemically synthesized
ggcctgttactgggctttggtg

SEQ ID NO: 43148 - DNA, 22 bp, Artificial Sequence
  chemically synthesized
gcctgttactgggctttggtgg

SEQ ID NO: 43149 - DNA, 22 bp, Artificial Sequence
  chemically synthesized
ttactgggctttggtggaaacg

SEQ ID NO: 43150 - DNA, 22 bp, Artificial Sequence
  chemically synthesized
ctgggctttggtggaaacgaaa

SEQ ID NO: 43151 - DNA, 22 bp, Artificial Sequence
  chemically synthesized
ggctttggtggaaacgaaatat

SEQ ID NO: 43152 - DNA, 22 bp, Artificial Sequence
  chemically synthesized
tggtggaaacgaaatatttgac

SEQ ID NO: 43153 - DNA, 22 bp, Artificial Sequence
  chemically synthesized
ggtggaaacgaaatatttgact

SEQ ID NO: 43154 - DNA, 22 bp, Artificial Sequence
  chemically synthesized
gtggaaacgaaatatttgacta

SEQ ID NO: 43155 - DNA, 22 bp, Artificial Sequence
  chemically synthesized
gactatgagtcatcaagtcacc

SEQ ID NO: 43156 - DNA, 22 bp, Artificial Sequence
  chemically synthesized
actatgagtcatcaagtcacca

SEQ ID NO: 43157 - DNA, 22 bp, Artificial Sequence
  chemically synthesized
tgagtcatcaagtcaccatgtg

SEQ ID NO: 43158 - DNA, 22 bp, Artificial Sequence
  chemically synthesized
aactgcctatcatgaactgggt

SEQ ID NO: 43159 - DNA, 22 bp, Artificial Sequence
  chemically synthesized
cctatcatgaactgggtgcttt

SEQ ID NO: 43160 - DNA, 22 bp, Artificial Sequence
  chemically synthesized
tcatgaactgggtgctttctga

SEQ ID NO: 43161 - DNA, 22 bp, Artificial Sequence
  chemically synthesized
ggtgctttctgatccatctagc

SEQ ID NO: 43162 - DNA, 22 bp, Artificial Sequence
  chemically synthesized
tctgatccatctagccataaag

SEQ ID NO: 43163 - DNA, 22 bp, Artificial Sequence
  chemically synthesized
ctgatccatctagccataaagt

SEQ ID NO: 43164 - DNA, 22 bp, Artificial Sequence
  chemically synthesized
tgatccatctagccataaagtg

SEQ ID NO: 43165 - DNA, 22 bp, Artificial Sequence
  chemically synthesized
atccatctagccataaagtggg

SEQ ID NO: 43166 - DNA, 22 bp, Artificial Sequence
  chemically synthesized
gccataaagtgggctgtgcaca

SEQ ID NO: 43167 - DNA, 22 bp, Artificial Sequence
  chemically synthesized
tgcacagcagcattgcatcagc

SEQ ID NO: 43168 - DNA, 22 bp, Artificial Sequence
  chemically synthesized
catcagcaaatggaagtggtat

SEQ ID NO: 43169 - DNA, 22 bp, Artificial Sequence
  chemically synthesized
ggcttgagcagatcctgaaggc

SEQ ID NO: 43170 - DNA, 22 bp, Artificial Sequence
  chemically synthesized
gagcagatcctgaaggcactag

SEQ ID NO: 43171 - DNA, 22 bp, Artificial Sequence
  chemically synthesized
agcagatcctgaaggcactagt

SEQ ID NO: 43172 - DNA, 22 bp, Artificial Sequence
  chemically synthesized
aaggcactagtaagttacatga

SEQ ID NO: 43173 - DNA, 22 bp, Artificial Sequence
  chemically synthesized
gtaagttacatgagaaaggggc

SEQ ID NO: 43174 - DNA, 22 bp, Artificial Sequence
  chemically synthesized
catgagaaaggggctcaaatgc

SEQ ID NO: 43175 - DNA, 22 bp, Artificial Sequence
  chemically synthesized
aaatgcccatggtctccactcc

SEQ ID NO: 43176 - DNA, 22 bp, Artificial Sequence
  chemically synthesized
cactcctgacacactgctttct

SEQ ID NO: 43177 - DNA, 22 bp, Artificial Sequence
  chemically synthesized
ctgacacactgctttctctccc

SEQ ID NO: 43178 - DNA, 22 bp, Artificial Sequence
  chemically synthesized
acacactgctttctctccctga

SEQ ID NO: 43179 - DNA, 22 bp, Artificial Sequence
  chemically synthesized
ctttctctccctgagactgcac

SEQ ID NO: 43180 - DNA, 22 bp, Artificial Sequence
  chemically synthesized
tctctccctgagactgcaccga

SEQ ID NO: 43181 - DNA, 22 bp, Artificial Sequence
  chemically synthesized
ctctccctgagactgcaccgat

SEQ ID NO: 43182 - DNA, 22 bp, Artificial Sequence
  chemically synthesized
tctccctgagactgcaccgatg

SEQ ID NO: 43183 - DNA, 22 bp, Artificial Sequence
  chemically synthesized
tccctgagactgcaccgatggt

SEQ ID NO: 43184 - DNA, 22 bp, Artificial Sequence
  chemically synthesized
cctgagactgcaccgatggtct

SEQ ID NO: 43185 - DNA, 22 bp, Artificial Sequence
  chemically synthesized
agactgcaccgatggtctcatg

SEQ ID NO: 43186 - DNA, 22 bp, Artificial Sequence
  chemically synthesized
caccgatggtctcatggggagt

SEQ ID NO: 43187 - DNA, 22 bp, Artificial Sequence
  chemically synthesized
atggggagttccctatgatcag

SEQ ID NO: 43188 - DNA, 22 bp, Artificial Sequence
  chemically synthesized
cctatgatcagctgacagagga

SEQ ID NO: 43189 - DNA, 22 bp, Artificial Sequence
  chemically synthesized
tgatcagctgacagaggaagag

SEQ ID NO: 43190 - DNA, 22 bp, Artificial Sequence
  chemically synthesized
acagaggaagagaagactaggt

SEQ ID NO: 43191 - DNA, 22 bp, Artificial Sequence
  chemically synthesized
ggtcctggttcacagatagttc

SEQ ID NO: 43192 - DNA, 22 bp, Artificial Sequence
  chemically synthesized
gttcacagatagttctgcacga

SEQ ID NO: 43193 - DNA, 22 bp, Artificial Sequence
  chemically synthesized
acagatagttctgcacgatatg

SEQ ID NO: 43194 - DNA, 22 bp, Artificial Sequence
  chemically synthesized
tgcacgatatgcaggcaccacc

SEQ ID NO: 43195 - DNA, 22 bp, Artificial Sequence
  chemically synthesized
cacgatatgcaggcaccaccca

SEQ ID NO: 43196 - DNA, 22 bp, Artificial Sequence
  chemically synthesized
cagcccctttctaggacatccc

SEQ ID NO: 43197 - DNA, 22 bp, Artificial Sequence
  chemically synthesized
tctaggacatccctgaaggaca

SEQ ID NO: 43198 - DNA, 22 bp, Artificial Sequence
  chemically synthesized
ctaggacatccctgaaggacaa

SEQ ID NO: 43199 - DNA, 22 bp, Artificial Sequence
  chemically synthesized
taggacatccctgaaggacaac

SEQ ID NO: 43200 - DNA, 22 bp, Artificial Sequence
  chemically synthesized
ggacatccctgaaggacaacgg

SEQ ID NO: 43201 - DNA, 22 bp, Artificial Sequence
  chemically synthesized
aaggacaacggtgaagggaaat

SEQ ID NO: 43202 - DNA, 22 bp, Artificial Sequence
  chemically synthesized
cctagttggcagaactttgagc

SEQ ID NO: 43203 - DNA, 22 bp, Artificial Sequence
  chemically synthesized
ctagttggcagaactttgagca

SEQ ID NO: 43204 - DNA, 22 bp, Artificial Sequence
  chemically synthesized
gttggcagaactttgagcagtg

SEQ ID NO: 43205 - DNA, 22 bp, Artificial Sequence
  chemically synthesized
gcagaactttgagcagtgtgcc

SEQ ID NO: 43206 - DNA, 22 bp, Artificial Sequence
  chemically synthesized
tgagcagtgtgcctggttgtgc

SEQ ID NO: 43207 - DNA, 22 bp, Artificial Sequence
  chemically synthesized
gagcagtgtgcctggttgtgca

SEQ ID NO: 43208 - DNA, 22 bp, Artificial Sequence
  chemically synthesized
agcagtgtgcctggttgtgcac

SEQ ID NO: 43209 - DNA, 22 bp, Artificial Sequence
  chemically synthesized
gttgtgcactttgcacagaagg

SEQ ID NO: 43210 - DNA, 22 bp, Artificial Sequence
  chemically synthesized
tgcactttgcacagaaggagaa

SEQ ID NO: 43211 - DNA, 22 bp, Artificial Sequence
  chemically synthesized
tgcacagaaggagaaatggcca

SEQ ID NO: 43212 - DNA, 22 bp, Artificial Sequence
  chemically synthesized
gcacagaaggagaaatggccag

SEQ ID NO: 43213 - DNA, 22 bp, Artificial Sequence
  chemically synthesized
cacagaaggagaaatggccaga

SEQ ID NO: 43214 - DNA, 22 bp, Artificial Sequence
  chemically synthesized
gcgattatatacttattcatgg

SEQ ID NO: 43215 - DNA, 22 bp, Artificial Sequence
  chemically synthesized
cgattatatacttattcatggg

SEQ ID NO: 43216 - DNA, 22 bp, Artificial Sequence
  chemically synthesized
tatacttattcatgggctgtag

SEQ ID NO: 43217 - DNA, 22 bp, Artificial Sequence
  chemically synthesized
attcatgggctgtagccaaagg

SEQ ID NO: 43218 - DNA, 22 bp, Artificial Sequence
  chemically synthesized
ttcatgggctgtagccaaaggt

SEQ ID NO: 43219 - DNA, 22 bp, Artificial Sequence
  chemically synthesized
atgggctgtagccaaaggtttg

SEQ ID NO: 43220 - DNA, 22 bp, Artificial Sequence
  chemically synthesized
tagccaaaggtttggctagatg

SEQ ID NO: 43221 - DNA, 22 bp, Artificial Sequence
  chemically synthesized
ggctagatggtcagggacttgg

SEQ ID NO: 43222 - DNA, 22 bp, Artificial Sequence
  chemically synthesized
gctagatggtcagggacttgga

SEQ ID NO: 43223 - DNA, 22 bp, Artificial Sequence
  chemically synthesized
gatggtcagggacttggaaaaa

SEQ ID NO: 43224 - DNA, 22 bp, Artificial Sequence
  chemically synthesized
ggaaaaagcatgactggaaaat

SEQ ID NO: 43225 - DNA, 22 bp, Artificial Sequence
  chemically synthesized
gaaaaagcatgactggaaaatt

SEQ ID NO: 43226 - DNA, 22 bp, Artificial Sequence
  chemically synthesized
gaaaattgatgacaaagaaatt

SEQ ID NO: 43227 - DNA, 22 bp, Artificial Sequence
  chemically synthesized
atgacaaagaaatttggggaag

SEQ ID NO: 43228 - DNA, 22 bp, Artificial Sequence
  chemically synthesized
ggggaagaggtatgtggatgga

SEQ ID NO: 43229 - DNA, 22 bp, Artificial Sequence
  chemically synthesized
gggaagaggtatgtggatggac

SEQ ID NO: 43230 - DNA, 22 bp, Artificial Sequence
  chemically synthesized
tatgattagtcaaaaactacaa

SEQ ID NO: 43231 - DNA, 22 bp, Artificial Sequence
  chemically synthesized
tgattagtcaaaaactacaaag

SEQ ID NO: 43232 - DNA, 22 bp, Artificial Sequence
  chemically synthesized
gtcaaaaactacaaagatattt

SEQ ID NO: 43233 - DNA, 22 bp, Artificial Sequence
  chemically synthesized
caaagatattttcatcccatgt

SEQ ID NO: 43234 - DNA, 22 bp, Artificial Sequence
  chemically synthesized
tcatcccatgtgagtgctcacc

SEQ ID NO: 43235 - DNA, 22 bp, Artificial Sequence
  chemically synthesized
catcccatgtgagtgctcacca

SEQ ID NO: 43236 - DNA, 22 bp, Artificial Sequence
  chemically synthesized
atcccatgtgagtgctcaccaa

SEQ ID NO: 43237 - DNA, 22 bp, Artificial Sequence
  chemically synthesized
accaatgggtgacctcagcaga

SEQ ID NO: 43238 - DNA, 22 bp, Artificial Sequence
  chemically synthesized
agcagaagaggattttaataat

SEQ ID NO: 43239 - DNA, 22 bp, Artificial Sequence
  chemically synthesized
taataatcaagtggataggatg

SEQ ID NO: 43240 - DNA, 22 bp, Artificial Sequence
  chemically synthesized
aataatcaagtggataggatga

SEQ ID NO: 43241 - DNA, 22 bp, Artificial Sequence
  chemically synthesized
ataatcaagtggataggatgat

SEQ ID NO: 43242 - DNA, 22 bp, Artificial Sequence
  chemically synthesized
tgtggacaccactcagcctttt

SEQ ID NO: 43243 - DNA, 22 bp, Artificial Sequence
  chemically synthesized
tggacaccactcagccttttcc

SEQ ID NO: 43244 - DNA, 22 bp, Artificial Sequence
  chemically synthesized
agccttttcccaggccactcat

SEQ ID NO: 43245 - DNA, 22 bp, Artificial Sequence
  chemically synthesized
ttcccaggccactcatgtcatc

SEQ ID NO: 43246 - DNA, 22 bp, Artificial Sequence
  chemically synthesized
tcccaggccactcatgtcatcg

SEQ ID NO: 43247 - DNA, 22 bp, Artificial Sequence
  chemically synthesized
cccaggccactcatgtcatcgt

SEQ ID NO: 43248 - DNA, 22 bp, Artificial Sequence
  chemically synthesized
ccaggccactcatgtcatcgtc

SEQ ID NO: 43249 - DNA, 22 bp, Artificial Sequence
  chemically synthesized
atgtcatcgtccaatggaccca

SEQ ID NO: 43250 - DNA, 22 bp, Artificial Sequence
  chemically synthesized
cagggatggaagttatgcttgg

SEQ ID NO: 43251 - DNA, 22 bp, Artificial Sequence
  chemically synthesized
tgcttgggctcagcaacatgga

SEQ ID NO: 43252 - DNA, 22 bp, Artificial Sequence
  chemically synthesized
gggctcagcaacatggacttcc

SEQ ID NO: 43253 - DNA, 22 bp, Artificial Sequence
  chemically synthesized
ggctcagcaacatggacttcca

SEQ ID NO: 43254 - DNA, 22 bp, Artificial Sequence
  chemically synthesized
agcaacatggacttccactcac

SEQ ID NO: 43255 - DNA, 22 bp, Artificial Sequence
  chemically synthesized
ccactcaccaaagctgacctgg

SEQ ID NO: 43256 - DNA, 22 bp, Artificial Sequence
  chemically synthesized
cactcaccaaagctgacctggc

SEQ ID NO: 43257 - DNA, 22 bp, Artificial Sequence
  chemically synthesized
accaaagctgacctggccacag

SEQ ID NO: 43258 - DNA, 22 bp, Artificial Sequence
  chemically synthesized
acctggccacagccactgcttg

SEQ ID NO: 43259 - DNA, 22 bp, Artificial Sequence
  chemically synthesized
gccacagccactgcttgccagc

SEQ ID NO: 43260 - DNA, 22 bp, Artificial Sequence
  chemically synthesized
cttgccagcatcagagaccaac

SEQ ID NO: 43261 - DNA, 22 bp, Artificial Sequence
  chemically synthesized
gccagcatcagagaccaacact

SEQ ID NO: 43262 - DNA, 22 bp, Artificial Sequence
  chemically synthesized
ccagcatcagagaccaacacta

SEQ ID NO: 43263 - DNA, 22 bp, Artificial Sequence
  chemically synthesized
agcccttgatatggcaccattc

SEQ ID NO: 43264 - DNA, 22 bp, Artificial Sequence
  chemically synthesized
gatatggcaccattcctcgggg

SEQ ID NO: 43265 - DNA, 22 bp, Artificial Sequence
  chemically synthesized
atatggcaccattcctcggggt

SEQ ID NO: 43266 - DNA, 22 bp, Artificial Sequence
  chemically synthesized
ctcggggtgatcagccagctac

SEQ ID NO: 43267 - DNA, 22 bp, Artificial Sequence
  chemically synthesized
ggggtgatcagccagctacctg

SEQ ID NO: 43268 - DNA, 22 bp, Artificial Sequence
  chemically synthesized
cctggtggcaggttgattatat

SEQ ID NO: 43269 - DNA, 22 bp, Artificial Sequence
  chemically synthesized
gtggcaggttgattatattgga

SEQ ID NO: 43270 - DNA, 22 bp, Artificial Sequence
  chemically synthesized
attatattggacctcttccatc

SEQ ID NO: 43271 - DNA, 22 bp, Artificial Sequence
  chemically synthesized
tattggacctcttccatcatgg

SEQ ID NO: 43272 - DNA, 22 bp, Artificial Sequence
  chemically synthesized
gacctcttccatcatggaaagg

SEQ ID NO: 43273 - DNA, 22 bp, Artificial Sequence
  chemically synthesized
ttccatcatggaaagggcagag

SEQ ID NO: 43274 - DNA, 22 bp, Artificial Sequence
  chemically synthesized
ccatcatggaaagggcagaggc

SEQ ID NO: 43275 - DNA, 22 bp, Artificial Sequence
  chemically synthesized
catcatggaaagggcagaggct

SEQ ID NO: 43276 - DNA, 22 bp, Artificial Sequence
  chemically synthesized
gtcctcactggaatagacactt

SEQ ID NO: 43277 - DNA, 22 bp, Artificial Sequence
  chemically synthesized
tcctcactggaatagacactta

SEQ ID NO: 43278 - DNA, 22 bp, Artificial Sequence
  chemically synthesized
actggaatagacacttactctg

SEQ ID NO: 43279 - DNA, 22 bp, Artificial Sequence
  chemically synthesized
gaatagacacttactctggata

SEQ ID NO: 43280 - DNA, 22 bp, Artificial Sequence
  chemically synthesized
actctggatatgggtttcccaa

SEQ ID NO: 43281 - DNA, 22 bp, Artificial Sequence
  chemically synthesized
ctctggatatgggtttcccaat

SEQ ID NO: 43282 - DNA, 22 bp, Artificial Sequence
  chemically synthesized
tggatatgggtttcccaatcct

SEQ ID NO: 43283 - DNA, 22 bp, Artificial Sequence
  chemically synthesized
gatatgggtttcccaatcctga

SEQ ID NO: 43284 - DNA, 22 bp, Artificial Sequence
  chemically synthesized
cccaatcctgaactcaatgctt

SEQ ID NO: 43285 - DNA, 22 bp, Artificial Sequence
  chemically synthesized
ccaatcctgaactcaatgctta

SEQ ID NO: 43286 - DNA, 22 bp, Artificial Sequence
  chemically synthesized
aactcaatgcttatgccaagac

SEQ ID NO: 43287 - DNA, 22 bp, Artificial Sequence
  chemically synthesized
aatgcttatgccaagactacca

SEQ ID NO: 43288 - DNA, 22 bp, Artificial Sequence
  chemically synthesized
atgccaagactaccatccatgg

SEQ ID NO: 43289 - DNA, 22 bp, Artificial Sequence
  chemically synthesized
tgccaagactaccatccatgga

SEQ ID NO: 43290 - DNA, 22 bp, Artificial Sequence
  chemically synthesized
ccatccatggaatcacagaatg

SEQ ID NO: 43291 - DNA, 22 bp, Artificial Sequence
  chemically synthesized
tcatggtattccacacagcatt

SEQ ID NO: 43292 - DNA, 22 bp, Artificial Sequence
  chemically synthesized
cacacagcattgcttctgacca

SEQ ID NO: 43293 - DNA, 22 bp, Artificial Sequence
  chemically synthesized
cttctgaccaagccactcactt

SEQ ID NO: 43294 - DNA, 22 bp, Artificial Sequence
  chemically synthesized
ctgaccaagccactcactttat

SEQ ID NO: 43295 - DNA, 22 bp, Artificial Sequence
  chemically synthesized
tgaccaagccactcactttatg

SEQ ID NO: 43296 - DNA, 22 bp, Artificial Sequence
  chemically synthesized
accaagccactcactttatggc

SEQ ID NO: 43297 - DNA, 22 bp, Artificial Sequence
  chemically synthesized
actttatggctaaagaagtgtg

SEQ ID NO: 43298 - DNA, 22 bp, Artificial Sequence
  chemically synthesized
tatggctaaagaagtgtgacag

SEQ ID NO: 43299 - DNA, 22 bp, Artificial Sequence
  chemically synthesized
atggctaaagaagtgtgacagt

SEQ ID NO: 43300 - DNA, 22 bp, Artificial Sequence
  chemically synthesized
tggctaaagaagtgtgacagtg

SEQ ID NO: 43301 - DNA, 22 bp, Artificial Sequence
  chemically synthesized
aagaagtgtgacagtgggctca

SEQ ID NO: 43302 - DNA, 22 bp, Artificial Sequence
  chemically synthesized
atgctcatggaatttactggtc

SEQ ID NO: 43303 - DNA, 22 bp, Artificial Sequence
  chemically synthesized
atggaatttactggtcttacca

SEQ ID NO: 43304 - DNA, 22 bp, Artificial Sequence
  chemically synthesized
actggtcttaccatgatcccta

SEQ ID NO: 43305 - DNA, 22 bp, Artificial Sequence
  chemically synthesized
ctggtcttaccatgatccctat

SEQ ID NO: 43306 - DNA, 22 bp, Artificial Sequence
  chemically synthesized
gtcttaccatgatccctatcat

SEQ ID NO: 43307 - DNA, 22 bp, Artificial Sequence
  chemically synthesized
accatgatccctatcatcctga

SEQ ID NO: 43308 - DNA, 22 bp, Artificial Sequence
  chemically synthesized
ccatgatccctatcatcctgaa

SEQ ID NO: 43309 - DNA, 22 bp, Artificial Sequence
  chemically synthesized
tcatcctgaagcagcttttgaa

SEQ ID NO: 43310 - DNA, 22 bp, Artificial Sequence
  chemically synthesized
aagcagcttttgaatggccttt

SEQ ID NO: 43311 - DNA, 22 bp, Artificial Sequence
  chemically synthesized
ttgaatggccttttgaagtcac

SEQ ID NO: 43312 - DNA, 22 bp, Artificial Sequence
  chemically synthesized
tgaatggccttttgaagtcacg

SEQ ID NO: 43313 - DNA, 22 bp, Artificial Sequence
  chemically synthesized
gaatggccttttgaagtcacga

SEQ ID NO: 43314 - DNA, 22 bp, Artificial Sequence
  chemically synthesized
aatggccttttgaagtcacgat

SEQ ID NO: 43315 - DNA, 22 bp, Artificial Sequence
  chemically synthesized
ttgaagtcacgattacaatgcc

SEQ ID NO: 43316 - DNA, 22 bp, Artificial Sequence
  chemically synthesized
tgaagtcacgattacaatgcca

SEQ ID NO: 43317 - DNA, 22 bp, Artificial Sequence
  chemically synthesized
gaagtcacgattacaatgccaa

SEQ ID NO: 43318 - DNA, 22 bp, Artificial Sequence
  chemically synthesized
aagtcacgattacaatgccaac

SEQ ID NO: 43319 - DNA, 22 bp, Artificial Sequence
  chemically synthesized
caatgccaactaggtgacaata

SEQ ID NO: 43320 - DNA, 22 bp, Artificial Sequence
  chemically synthesized
ggtgacaatactttgcaggcct

SEQ ID NO: 43321 - DNA, 22 bp, Artificial Sequence
  chemically synthesized
tgcaggcctggggcaaagttct

SEQ ID NO: 43322 - DNA, 22 bp, Artificial Sequence
  chemically synthesized
gcaggcctggggcaaagttctc

SEQ ID NO: 43323 - DNA, 22 bp, Artificial Sequence
  chemically synthesized
caggcctggggcaaagttctcc

SEQ ID NO: 43324 - DNA, 22 bp, Artificial Sequence
  chemically synthesized
gggcaaagttctccagaaggct

SEQ ID NO: 43325 - DNA, 22 bp, Artificial Sequence
  chemically synthesized
tccagaaggctgtgtatgctct

SEQ ID NO: 43326 - DNA, 22 bp, Artificial Sequence
  chemically synthesized
cagaaggctgtgtatgctctga

SEQ ID NO: 43327 - DNA, 22 bp, Artificial Sequence
  chemically synthesized
tgtatgctctgaatcagtgtcc

SEQ ID NO: 43328 - DNA, 22 bp, Artificial Sequence
  chemically synthesized
tgaatcagtgtccaatatatgg

SEQ ID NO: 43329 - DNA, 22 bp, Artificial Sequence
  chemically synthesized
aatcagtgtccaatatatggta

SEQ ID NO: 43330 - DNA, 22 bp, Artificial Sequence
  chemically synthesized
tttctcccatagacaggattca

SEQ ID NO: 43331 - DNA, 22 bp, Artificial Sequence
  chemically synthesized
ctcccatagacaggattcacgg

SEQ ID NO: 43332 - DNA, 22 bp, Artificial Sequence
  chemically synthesized
tcccatagacaggattcacggg

SEQ ID NO: 43333 - DNA, 22 bp, Artificial Sequence
  chemically synthesized
ccatagacaggattcacgggtc

SEQ ID NO: 43334 - DNA, 22 bp, Artificial Sequence
  chemically synthesized
acgggtccaggaatcaaagggt

SEQ ID NO: 43335 - DNA, 22 bp, Artificial Sequence
  chemically synthesized
accatcacccctagtgttccac

SEQ ID NO: 43336 - DNA, 22 bp, Artificial Sequence
  chemically synthesized
gtgttccactagcaaaattttt

SEQ ID NO: 43337 - DNA, 22 bp, Artificial Sequence
  chemically synthesized
cactagcaaaatttttgcttcc

SEQ ID NO: 43338 - DNA, 22 bp, Artificial Sequence
  chemically synthesized
gcaaaatttttgcttcctgttc

SEQ ID NO: 43339 - DNA, 22 bp, Artificial Sequence
  chemically synthesized
ttgcttcctgttcccatggcat

SEQ ID NO: 43340 - DNA, 22 bp, Artificial Sequence
  chemically synthesized
tgcttcctgttcccatggcatt

SEQ ID NO: 43341 - DNA, 22 bp, Artificial Sequence
  chemically synthesized
gcttcctgttcccatggcatta

SEQ ID NO: 43342 - DNA, 22 bp, Artificial Sequence
  chemically synthesized
cttcctgttcccatggcattat

SEQ ID NO: 43343 - DNA, 22 bp, Artificial Sequence
  chemically synthesized
cctgttcccatggcattatgtt

SEQ ID NO: 43344 - DNA, 22 bp, Artificial Sequence
  chemically synthesized
ctgttcccatggcattatgttc

SEQ ID NO: 43345 - DNA, 22 bp, Artificial Sequence
  chemically synthesized
ttcccatggcattatgttctgc

SEQ ID NO: 43346 - DNA, 22 bp, Artificial Sequence
  chemically synthesized
ccatggcattatgttctgctgg

SEQ ID NO: 43347 - DNA, 22 bp, Artificial Sequence
  chemically synthesized
tgttctgctggcttagaggtct

SEQ ID NO: 43348 - DNA, 22 bp, Artificial Sequence
  chemically synthesized
tgctggcttagaggtcttagtt

SEQ ID NO: 43349 - DNA, 22 bp, Artificial Sequence
  chemically synthesized
ctggcttagaggtcttagttcc

SEQ ID NO: 43350 - DNA, 22 bp, Artificial Sequence
  chemically synthesized
gcttagaggtcttagttccaga

SEQ ID NO: 43351 - DNA, 22 bp, Artificial Sequence
  chemically synthesized
agaggtcttagttccagaggga

SEQ ID NO: 43352 - DNA, 22 bp, Artificial Sequence
  chemically synthesized
gaggtcttagttccagagggag

SEQ ID NO: 43353 - DNA, 22 bp, Artificial Sequence
  chemically synthesized
agttccagagggaggaacactg

SEQ ID NO: 43354 - DNA, 22 bp, Artificial Sequence
  chemically synthesized
gttccagagggaggaacactgc

SEQ ID NO: 43355 - DNA, 22 bp, Artificial Sequence
  chemically synthesized
cagagggaggaacactgccgcc

SEQ ID NO: 43356 - DNA, 22 bp, Artificial Sequence
  chemically synthesized
ccgccaggtgacacaataatga

SEQ ID NO: 43357 - DNA, 22 bp, Artificial Sequence
  chemically synthesized
cattaaactgcaaattaagatt

SEQ ID NO: 43358 - DNA, 22 bp, Artificial Sequence
  chemically synthesized
aactgcaaattaagattgccac

SEQ ID NO: 43359 - DNA, 22 bp, Artificial Sequence
  chemically synthesized
caaattaagattgccacctgga

SEQ ID NO: 43360 - DNA, 22 bp, Artificial Sequence
  chemically synthesized
agattgccacctggacactttg

SEQ ID NO: 43361 - DNA, 22 bp, Artificial Sequence
  chemically synthesized
ccacctggacactttgggctcc

SEQ ID NO: 43362 - DNA, 22 bp, Artificial Sequence
  chemically synthesized
gacactttgggctcctcccacc

SEQ ID NO: 43363 - DNA, 22 bp, Artificial Sequence
  chemically synthesized
tgggctcctcccacctttaagt

SEQ ID NO: 43364 - DNA, 22 bp, Artificial Sequence
  chemically synthesized
gggctcctcccacctttaagtc

SEQ ID NO: 43365 - DNA, 22 bp, Artificial Sequence
  chemically synthesized
ggctcctcccacctttaagtca

SEQ ID NO: 43366 - DNA, 22 bp, Artificial Sequence
  chemically synthesized
ctcccacctttaagtcaacagg

SEQ ID NO: 43367 - DNA, 22 bp, Artificial Sequence
  chemically synthesized
ccacctttaagtcaacaggcta

SEQ ID NO: 43368 - DNA, 22 bp, Artificial Sequence
  chemically synthesized
taagtcaacaggctaagaagag

SEQ ID NO: 43369 - DNA, 22 bp, Artificial Sequence
  chemically synthesized
aagtcaacaggctaagaagaga

SEQ ID NO: 43370 - DNA, 22 bp, Artificial Sequence
  chemically synthesized
agtcaacaggctaagaagagag

SEQ ID NO: 43371 - DNA, 22 bp, Artificial Sequence
  chemically synthesized
agaagagagttacagtgttggc

SEQ ID NO: 43372 - DNA, 22 bp, Artificial Sequence
  chemically synthesized
cagtgttggctgcggtgattaa

SEQ ID NO: 43373 - DNA, 22 bp, Artificial Sequence
  chemically synthesized
gctgcggtgattaacccagact

SEQ ID NO: 43374 - DNA, 22 bp, Artificial Sequence
  chemically synthesized
cggtgattaacccagactatca

SEQ ID NO: 43375 - DNA, 22 bp, Artificial Sequence
  chemically synthesized
acccagactatcaagatgaaat

SEQ ID NO: 43376 - DNA, 22 bp, Artificial Sequence
  chemically synthesized
tcaagatgaaatcagtctacaa

SEQ ID NO: 43377 - DNA, 22 bp, Artificial Sequence
  chemically synthesized
caactccacaatggaggtaagg

SEQ ID NO: 43378 - DNA, 22 bp, Artificial Sequence
  chemically synthesized
cacaatggaggtaaggaagcgt

SEQ ID NO: 43379 - DNA, 22 bp, Artificial Sequence
  chemically synthesized
gggtgtctcttagttttaccat

SEQ ID NO: 43380 - DNA, 22 bp, Artificial Sequence
  chemically synthesized
ttagttttaccatgtcctggaa

SEQ ID NO: 43381 - DNA, 22 bp, Artificial Sequence
  chemically synthesized
agttttaccatgtcctggaatt

SEQ ID NO: 43382 - DNA, 22 bp, Artificial Sequence
  chemically synthesized
gttttaccatgtcctggaatta

SEQ ID NO: 43383 - DNA, 22 bp, Artificial Sequence
  chemically synthesized
taccatgtcctggaattaaggt

SEQ ID NO: 43384 - DNA, 22 bp, Artificial Sequence
  chemically synthesized
accatgtcctggaattaaggtc

SEQ ID NO: 43385 - DNA, 22 bp, Artificial Sequence
  chemically synthesized
ccatgtcctggaattaaggtca

SEQ ID NO: 43386 - DNA, 22 bp, Artificial Sequence
  chemically synthesized
gaattaaggtcagtgggaaact

SEQ ID NO: 43387 - DNA, 22 bp, Artificial Sequence
  chemically synthesized
aggtcagtgggaaactactaca

SEQ ID NO: 43388 - DNA, 22 bp, Artificial Sequence
  chemically synthesized
ctacaggccattccaggcagga

SEQ ID NO: 43389 - DNA, 22 bp, Artificial Sequence
  chemically synthesized
caggccattccaggcaggacta

SEQ ID NO: 43390 - DNA, 22 bp, Artificial Sequence
  chemically synthesized
caggcaggactacaaataaagg

SEQ ID NO: 43391 - DNA, 22 bp, Artificial Sequence
  chemically synthesized
caaataaaggtttgggtcactc

SEQ ID NO: 43392 - DNA, 22 bp, Artificial Sequence
  chemically synthesized
gggtcactccaccaggaaaaaa

SEQ ID NO: 43393 - DNA, 22 bp, Artificial Sequence
  chemically synthesized
ggtcactccaccaggaaaaaaa

SEQ ID NO: 43394 - DNA, 22 bp, Artificial Sequence
  chemically synthesized
caccaggaaaaaaaaaaaaaaa

SEQ ID NO: 43395 - DNA, 22 bp, Artificial Sequence
  chemically synthesized
ctgaggtgcttgctgagggcaa

SEQ ID NO: 43396 - DNA, 22 bp, Artificial Sequence
  chemically synthesized
aggtgcttgctgagggcaaagg

SEQ ID NO: 43397 - DNA, 22 bp, Artificial Sequence
  chemically synthesized
gctgagggcaaagggaatacag

SEQ ID NO: 43398 - DNA, 22 bp, Artificial Sequence
  chemically synthesized
ctgagggcaaagggaatacaga

SEQ ID NO: 43399 - DNA, 22 bp, Artificial Sequence
  chemically synthesized
agggcaaagggaatacagaata

SEQ ID NO: 43400 - DNA, 22 bp, Artificial Sequence
  chemically synthesized
cgatcacgtgaccaattgcaga

SEQ ID NO: 43401 - DNA, 22 bp, Artificial Sequence
  chemically synthesized
cagatacaaggactgtaattgt

SEQ ID NO: 43402 - DNA, 22 bp, Artificial Sequence
  chemically synthesized
taattgtcatgagtatttcctc

SEQ ID NO: 43403 - DNA, 22 bp, Artificial Sequence
  chemically synthesized
tcatgagtatttcctccttctt

SEQ ID NO: 43404 - DNA, 22 bp, Artificial Sequence
  chemically synthesized
cctccttcttttgttaaaaaca

SEQ ID NO: 43405 - DNA, 22 bp, Artificial Sequence
  chemically synthesized
ctccttcttttgttaaaaacac

SEQ ID NO: 43406 - DNA, 22 bp, Artificial Sequence
  chemically synthesized
cttcttttgttaaaaacacctt

SEQ ID NO: 43407 - DNA, 22 bp, Artificial Sequence
  chemically synthesized
cttttgttaaaaacaccttcgt

SEQ ID NO: 43408 - DNA, 22 bp, Artificial Sequence
  chemically synthesized
ttttgttaaaaacaccttcgtg

SEQ ID NO: 43409 - DNA, 22 bp, Artificial Sequence
  chemically synthesized
ttgttaaaaacaccttcgtgtc

SEQ ID NO: 43410 - DNA, 22 bp, Artificial Sequence
  chemically synthesized
tgttaaaaacaccttcgtgtct

SEQ ID NO: 43411 - DNA, 22 bp, Artificial Sequence
  chemically synthesized
gttaaaaacaccttcgtgtctg

SEQ ID NO: 43412 - DNA, 22 bp, Artificial Sequence
  chemically synthesized
ttaaaaacaccttcgtgtctgt

SEQ ID NO: 43413 - DNA, 22 bp, Artificial Sequence
  chemically synthesized
aaaacaccttcgtgtctgtata

SEQ ID NO: 43414 - DNA, 22 bp, Artificial Sequence
  chemically synthesized
cgtgtctgtatacacttgtact

SEQ ID NO: 43415 - DNA, 22 bp, Artificial Sequence
  chemically synthesized
gtgtctgtatacacttgtacta

SEQ ID NO: 43416 - DNA, 22 bp, Artificial Sequence
  chemically synthesized
tatacacttgtactaagaaaat

SEQ ID NO: 43417 - DNA, 22 bp, Artificial Sequence
  chemically synthesized
gtactaagaaaatatatacatt

SEQ ID NO: 43418 - DNA, 22 bp, Artificial Sequence
  chemically synthesized
tactaagaaaatatatacattt

SEQ ID NO: 43419 - DNA, 22 bp, Artificial Sequence
  chemically synthesized
agaaaatatatacattttactt

SEQ ID NO: 43420 - DNA, 22 bp, Artificial Sequence
  chemically synthesized
tacttcctttttcctttatcat

SEQ ID NO: 43421 - DNA, 22 bp, Artificial Sequence
  chemically synthesized
acttcctttttcctttatcatg

SEQ ID NO: 43422 - DNA, 22 bp, Artificial Sequence
  chemically synthesized
cttcctttttcctttatcatgt

SEQ ID NO: 43423 - DNA, 22 bp, Artificial Sequence
  chemically synthesized
cctttttcctttatcatgtgac

SEQ ID NO: 43424 - DNA, 22 bp, Artificial Sequence
  chemically synthesized
ctttttcctttatcatgtgaca

SEQ ID NO: 43425 - DNA, 22 bp, Artificial Sequence
  chemically synthesized
tttcctttatcatgtgacataa

SEQ ID NO: 43426 - DNA, 22 bp, Artificial Sequence
  chemically synthesized
ttcctttatcatgtgacataag

SEQ ID NO: 43427 - DNA, 22 bp, Artificial Sequence
  chemically synthesized
tcctttatcatgtgacataaga

SEQ ID NO: 43428 - DNA, 22 bp, Artificial Sequence
  chemically synthesized
cctttatcatgtgacataagat

SEQ ID NO: 43429 - DNA, 22 bp, Artificial Sequence
  chemically synthesized
ctttatcatgtgacataagatt

SEQ ID NO: 43430 - DNA, 22 bp, Artificial Sequence
  chemically synthesized
tatcatgtgacataagatttat

SEQ ID NO: 43431 - DNA, 22 bp, Artificial Sequence
  chemically synthesized
atcatgtgacataagatttatt

SEQ ID NO: 43432 - DNA, 22 bp, Artificial Sequence
  chemically synthesized
tcatgtgacataagatttattg

SEQ ID NO: 43433 - DNA, 22 bp, Artificial Sequence
  chemically synthesized
attgacttcatatcagcattta

SEQ ID NO: 43434 - DNA, 22 bp, Artificial Sequence
  chemically synthesized
ttgacttcatatcagcatttaa

SEQ ID NO: 43435 - DNA, 22 bp, Artificial Sequence
  chemically synthesized
acttcatatcagcatttaagta

SEQ ID NO: 43436 - DNA, 22 bp, Artificial Sequence
  chemically synthesized
catatcagcatttaagtattgt

SEQ ID NO: 43437 - DNA, 22 bp, Artificial Sequence
  chemically synthesized
atatcagcatttaagtattgtt

SEQ ID NO: 43438 - DNA, 22 bp, Artificial Sequence
  chemically synthesized
aagtattgttaagtttatgtaa

SEQ ID NO: 43439 - DNA, 22 bp, Artificial Sequence
  chemically synthesized
agtattgttaagtttatgtaat

SEQ ID NO: 43440 - DNA, 22 bp, Artificial Sequence
  chemically synthesized
ttaagtttatgtaatagcattt

SEQ ID NO: 43441 - DNA, 22 bp, Artificial Sequence
  chemically synthesized
agtttatgtaatagcatttgca

SEQ ID NO: 43442 - DNA, 22 bp, Artificial Sequence
  chemically synthesized
atgtaatagcatttgcaatggg

SEQ ID NO: 43443 - DNA, 22 bp, Artificial Sequence
  chemically synthesized
tgtaatagcatttgcaatgggg

SEQ ID NO: 43444 - DNA, 22 bp, Artificial Sequence
  chemically synthesized
gcaatggggattggtgcatttt

SEQ ID NO: 43445 - DNA, 22 bp, Artificial Sequence
  chemically synthesized
caatggggattggtgcattttc

SEQ ID NO: 43446 - DNA, 22 bp, Artificial Sequence
  chemically synthesized
gtgcattttcaattgcacgaag

SEQ ID NO: 43447 - DNA, 22 bp, Artificial Sequence
  chemically synthesized
tcaattgcacgaaggatagttt

SEQ ID NO: 43448 - DNA, 22 bp, Artificial Sequence
  chemically synthesized
caattgcacgaaggatagtttt

SEQ ID NO: 43449 - DNA, 22 bp, Artificial Sequence
  chemically synthesized
aattgcacgaaggatagtttta

SEQ ID NO: 43450 - DNA, 22 bp, Artificial Sequence
  chemically synthesized
cacgaaggatagttttagtatg

SEQ ID NO: 43451 - DNA, 22 bp, Artificial Sequence
  chemically synthesized
tagtatgttaggcataattatg

SEQ ID NO: 43452 - DNA, 22 bp, Artificial Sequence
  chemically synthesized
agtatgttaggcataattatga

SEQ ID NO: 43453 - DNA, 22 bp, Artificial Sequence
  chemically synthesized
gtatgttaggcataattatgac

SEQ ID NO: 43454 - DNA, 22 bp, Artificial Sequence
  chemically synthesized
ggcataattatgacttattgtt

SEQ ID NO: 43455 - DNA, 22 bp, Artificial Sequence
  chemically synthesized
tgacttattgttgtctttattt

SEQ ID NO: 43456 - DNA, 22 bp, Artificial Sequence
  chemically synthesized
attgttgtctttatttgaagat

SEQ ID NO: 43457 - DNA, 22 bp, Artificial Sequence
  chemically synthesized
ttgttgtctttatttgaagata

SEQ ID NO: 43458 - DNA, 22 bp, Artificial Sequence
  chemically synthesized
ttgtctttatttgaagataatg

SEQ ID NO: 43459 - DNA, 22 bp, Artificial Sequence
  chemically synthesized
tctttatttgaagataatgtat

SEQ ID NO: 43460 - DNA, 22 bp, Artificial Sequence
  chemically synthesized
tatttgaagataatgtatgacc

SEQ ID NO: 43461 - DNA, 22 bp, Artificial Sequence
  chemically synthesized
atttgaagataatgtatgacct

SEQ ID NO: 43462 - DNA, 22 bp, Artificial Sequence
  chemically synthesized
tttgaagataatgtatgacctc

SEQ ID NO: 43463 - DNA, 22 bp, Artificial Sequence
  chemically synthesized
gaagataatgtatgacctcagg

SEQ ID NO: 43464 - DNA, 22 bp, Artificial Sequence
  chemically synthesized
aagataatgtatgacctcaggg

SEQ ID NO: 43465 - DNA, 22 bp, Artificial Sequence
  chemically synthesized
aggggatgtgtataggctcaag

SEQ ID NO: 43466 - DNA, 22 bp, Artificial Sequence
  chemically synthesized
aagttgacaagcgatggacttg

SEQ ID NO: 43467 - DNA, 22 bp, Artificial Sequence
  chemically synthesized
acaagcgatggacttgtgatgg

SEQ ID NO: 43468 - DNA, 22 bp, Artificial Sequence
  chemically synthesized
gtgatggttaatactgagtgtc

SEQ ID NO: 43469 - DNA, 22 bp, Artificial Sequence
  chemically synthesized
tgatggttaatactgagtgtca

SEQ ID NO: 43470 - DNA, 22 bp, Artificial Sequence
  chemically synthesized
atactgagtgtcaacttgattg

SEQ ID NO: 43471 - DNA, 22 bp, Artificial Sequence
  chemically synthesized
agtgtcaacttgattggattga

SEQ ID NO: 43472 - DNA, 22 bp, Artificial Sequence
  chemically synthesized
gattggattgaagtgtgcaaag

SEQ ID NO: 43473 - DNA, 22 bp, Artificial Sequence
  chemically synthesized
attggattgaagtgtgcaaagt

SEQ ID NO: 43474 - DNA, 22 bp, Artificial Sequence
  chemically synthesized
gattgaagtgtgcaaagtattg

SEQ ID NO: 43475 - DNA, 22 bp, Artificial Sequence
  chemically synthesized
aagtgtgcaaagtattgatcct

SEQ ID NO: 43476 - DNA, 22 bp, Artificial Sequence
  chemically synthesized
atcctgagtgtgtctgtgaggg

SEQ ID NO: 43477 - DNA, 22 bp, Artificial Sequence
  chemically synthesized
agtgtgtctgtgagggtattgc

SEQ ID NO: 43478 - DNA, 22 bp, Artificial Sequence
  chemically synthesized
tgagggtattgccaaaggagat

SEQ ID NO: 43479 - DNA, 22 bp, Artificial Sequence
  chemically synthesized
ccaaaggagattaacattttag

SEQ ID NO: 43480 - DNA, 22 bp, Artificial Sequence
  chemically synthesized
acattttagtcagtgggctggg

SEQ ID NO: 43481 - DNA, 22 bp, Artificial Sequence
  chemically synthesized
tagtcagtgggctgggaaaggc

SEQ ID NO: 43482 - DNA, 22 bp, Artificial Sequence
  chemically synthesized
agtcagtgggctgggaaaggca

SEQ ID NO: 43483 - DNA, 22 bp, Artificial Sequence
  chemically synthesized
gtcagtgggctgggaaaggcag

SEQ ID NO: 43484 - DNA, 22 bp, Artificial Sequence
  chemically synthesized
ggaaaggcagacccacccttaa

SEQ ID NO: 43485 - DNA, 22 bp, Artificial Sequence
  chemically synthesized
aatctgggtgggcaccatctaa

SEQ ID NO: 43486 - DNA, 22 bp, Artificial Sequence
  chemically synthesized
atctgggtgggcaccatctaat

SEQ ID NO: 43487 - DNA, 22 bp, Artificial Sequence
  chemically synthesized
ggtgggcaccatctaatcagtt

SEQ ID NO: 43488 - DNA, 22 bp, Artificial Sequence
  chemically synthesized
atcagttgccagtgtggccagg

SEQ ID NO: 43489 - DNA, 22 bp, Artificial Sequence
  chemically synthesized
ccagtgtggccaggatataaag

SEQ ID NO: 43490 - DNA, 22 bp, Artificial Sequence
  chemically synthesized
gactggcttagcctccaagcct

SEQ ID NO: 43491 - DNA, 22 bp, Artificial Sequence
  chemically synthesized
gcttagcctccaagcctacatc

SEQ ID NO: 43492 - DNA, 22 bp, Artificial Sequence
  chemically synthesized
agcctccaagcctacatctttc

SEQ ID NO: 43493 - DNA, 22 bp, Artificial Sequence
  chemically synthesized
gcctccaagcctacatctttct

SEQ ID NO: 43494 - DNA, 22 bp, Artificial Sequence
  chemically synthesized
caagcctacatctttctcccat

SEQ ID NO: 43495 - DNA, 22 bp, Artificial Sequence
  chemically synthesized
catctttctcccatgctggatg

SEQ ID NO: 43496 - DNA, 22 bp, Artificial Sequence
  chemically synthesized
tctcccatgctggatgcttcct

SEQ ID NO: 43497 - DNA, 22 bp, Artificial Sequence
  chemically synthesized
ctcccatgctggatgcttcctg

SEQ ID NO: 43498 - DNA, 22 bp, Artificial Sequence
  chemically synthesized
tcccatgctggatgcttcctgc

SEQ ID NO: 43499 - DNA, 22 bp, Artificial Sequence
  chemically synthesized
ccatgctggatgcttcctgccc

SEQ ID NO: 43500 - DNA, 22 bp, Artificial Sequence
  chemically synthesized
gatgcttcctgccctcaaacat

SEQ ID NO: 43501 - DNA, 22 bp, Artificial Sequence
  chemically synthesized
cctgccctcaaacattggactc

SEQ ID NO: 43502 - DNA, 22 bp, Artificial Sequence
  chemically synthesized
ctgccctcaaacattggactcc

SEQ ID NO: 43503 - DNA, 22 bp, Artificial Sequence
  chemically synthesized
ccctcaaacattggactccaag

SEQ ID NO: 43504 - DNA, 22 bp, Artificial Sequence
  chemically synthesized
aaacattggactccaagtcctt

SEQ ID NO: 43505 - DNA, 22 bp, Artificial Sequence
  chemically synthesized
gactccaagtccttcagctttg

SEQ ID NO: 43506 - DNA, 22 bp, Artificial Sequence
  chemically synthesized
caagtccttcagctttgggact

SEQ ID NO: 43507 - DNA, 22 bp, Artificial Sequence
  chemically synthesized
cagctttgggacttggactggc

SEQ ID NO: 43508 - DNA, 22 bp, Artificial Sequence
  chemically synthesized
agctttgggacttggactggct

SEQ ID NO: 43509 - DNA, 22 bp, Artificial Sequence
  chemically synthesized
tgggacttggactggcttcctt

SEQ ID NO: 43510 - DNA, 22 bp, Artificial Sequence
  chemically synthesized
gggacttggactggcttccttg

SEQ ID NO: 43511 - DNA, 22 bp, Artificial Sequence
  chemically synthesized
ggacttggactggcttccttgc

SEQ ID NO: 43512 - DNA, 22 bp, Artificial Sequence
  chemically synthesized
ggactggcttccttgctcctct

SEQ ID NO: 43513 - DNA, 22 bp, Artificial Sequence
  chemically synthesized
gactggcttccttgctcctctg

SEQ ID NO: 43514 - DNA, 22 bp, Artificial Sequence
  chemically synthesized
gcttccttgctcctctgcttgc

SEQ ID NO: 43515 - DNA, 22 bp, Artificial Sequence
  chemically synthesized
ccttgctcctctgcttgcagat

SEQ ID NO: 43516 - DNA, 22 bp, Artificial Sequence
  chemically synthesized
cttgctcctctgcttgcagatg

SEQ ID NO: 43517 - DNA, 22 bp, Artificial Sequence
  chemically synthesized
gctcctctgcttgcagatggcc

SEQ ID NO: 43518 - DNA, 22 bp, Artificial Sequence
  chemically synthesized
ctcctctgcttgcagatggcct

SEQ ID NO: 43519 - DNA, 22 bp, Artificial Sequence
  chemically synthesized
ctctgcttgcagatggcctatt

SEQ ID NO: 43520 - DNA, 22 bp, Artificial Sequence
  chemically synthesized
tgcttgcagatggcctattgtg

SEQ ID NO: 43521 - DNA, 22 bp, Artificial Sequence
  chemically synthesized
cttgcagatggcctattgtggg

SEQ ID NO: 43522 - DNA, 22 bp, Artificial Sequence
  chemically synthesized
gcagatggcctattgtgggacc

SEQ ID NO: 43523 - DNA, 22 bp, Artificial Sequence
  chemically synthesized
cagatggcctattgtgggacct

SEQ ID NO: 43524 - DNA, 22 bp, Artificial Sequence
  chemically synthesized
ttgtgggaccttgtgattgtgt

SEQ ID NO: 43525 - DNA, 22 bp, Artificial Sequence
  chemically synthesized
tgggaccttgtgattgtgtaag

SEQ ID NO: 43526 - DNA, 22 bp, Artificial Sequence
  chemically synthesized
gtgattgtgtaagttaacacta

SEQ ID NO: 43527 - DNA, 22 bp, Artificial Sequence
  chemically synthesized
tgattgtgtaagttaacactac

SEQ ID NO: 43528 - DNA, 22 bp, Artificial Sequence
  chemically synthesized
tgtaagttaacactacttaata

SEQ ID NO: 43529 - DNA, 22 bp, Artificial Sequence
  chemically synthesized
acactacttaataaactccctt

SEQ ID NO: 43530 - DNA, 22 bp, Artificial Sequence
  chemically synthesized
cttaataaactcccttttatat

SEQ ID NO: 43531 - DNA, 22 bp, Artificial Sequence
  chemically synthesized
aataaactcccttttatatcta

SEQ ID NO: 43532 - DNA, 22 bp, Artificial Sequence
  chemically synthesized
ataaactcccttttatatctaa

SEQ ID NO: 43533 - DNA, 22 bp, Artificial Sequence
  chemically synthesized
ccttttatatctaaatctatat

SEQ ID NO: 43534 - DNA, 22 bp, Artificial Sequence
  chemically synthesized
ttatatctaaatctatatctat

SEQ ID NO: 43535 - DNA, 22 bp, Artificial Sequence
  chemically synthesized
tatatctaaatctatatctatc

SEQ ID NO: 43536 - DNA, 22 bp, Artificial Sequence
  chemically synthesized
atatctaaatctatatctatct

SEQ ID NO: 43537 - DNA, 22 bp, Artificial Sequence
  chemically synthesized
tatctaaatctatatctatcta

SEQ ID NO: 43538 - DNA, 22 bp, Artificial Sequence
  chemically synthesized
aatctatatctatctatctatc

SEQ ID NO: 43539 - DNA, 22 bp, Artificial Sequence
  chemically synthesized
tatctatctatctatctatcta

SEQ ID NO: 43540 - DNA, 22 bp, Artificial Sequence
  chemically synthesized
tctatctatctatctatctatc

SEQ ID NO: 43541 - DNA, 22 bp, Artificial Sequence
  chemically synthesized
tctatctatctatctatctatc

SEQ ID NO: 43542 - DNA, 22 bp, Artificial Sequence
  chemically synthesized
tctatctatctatctatctatc

SEQ ID NO: 43543 - DNA, 22 bp, Artificial Sequence
  chemically synthesized
tctatctatctatctatctatc

SEQ ID NO: 43544 - DNA, 22 bp, Artificial Sequence
  chemically synthesized
tctatctatctatctatctatc

SEQ ID NO: 43545 - DNA, 22 bp, Artificial Sequence
  chemically synthesized
tctatctatctatctatctcct

SEQ ID NO: 43546 - DNA, 22 bp, Artificial Sequence
  chemically synthesized
tctatctatctatctcctatta

SEQ ID NO: 43547 - DNA, 22 bp, Artificial Sequence
  chemically synthesized
tctatctatctcctattagttc

SEQ ID NO: 43548 - DNA, 22 bp, Artificial Sequence
  chemically synthesized
tctatctcctattagttctgtc

SEQ ID NO: 43549 - DNA, 22 bp, Artificial Sequence
  chemically synthesized
tctcctattagttctgtctctc

SEQ ID NO: 43550 - DNA, 22 bp, Artificial Sequence
  chemically synthesized
ctattagttctgtctctctagg

SEQ ID NO: 43551 - DNA, 22 bp, Artificial Sequence
  chemically synthesized
ttagttctgtctctctagggaa

SEQ ID NO: 43552 - DNA, 22 bp, Artificial Sequence
  chemically synthesized
gttctgtctctctagggaaccc

SEQ ID NO: 43553 - DNA, 22 bp, Artificial Sequence
  chemically synthesized
tgtctctctagggaaccctgac

SEQ ID NO: 43554 - DNA, 22 bp, Artificial Sequence
  chemically synthesized
tctctctagggaaccctgacaa

SEQ ID NO: 43555 - DNA, 22 bp, Artificial Sequence
  chemically synthesized
tctagggaaccctgacaaatac

SEQ ID NO: 43556 - DNA, 22 bp, Artificial Sequence
  chemically synthesized
tagggaaccctgacaaatacag

SEQ ID NO: 43557 - DNA, 22 bp, Artificial Sequence
  chemically synthesized
gggaaccctgacaaatacagtg

SEQ ID NO: 43558 - DNA, 22 bp, Artificial Sequence
  chemically synthesized
acaaatacagtgagctcaggtc

SEQ ID NO: 43559 - DNA, 22 bp, Artificial Sequence
  chemically synthesized
aggtcctgagcagacattttcc

SEQ ID NO: 43560 - DNA, 22 bp, Artificial Sequence
  chemically synthesized
agcagacattttccaaaagaag

SEQ ID NO: 43561 - DNA, 22 bp, Artificial Sequence
  chemically synthesized
tccaaaagaagacatacaagtg

SEQ ID NO: 43562 - DNA, 22 bp, Artificial Sequence
  chemically synthesized
ccaaaagaagacatacaagtgg

SEQ ID NO: 43563 - DNA, 22 bp, Artificial Sequence
  chemically synthesized
caaaagaagacatacaagtggc

SEQ ID NO: 43564 - DNA, 22 bp, Artificial Sequence
  chemically synthesized
aacatcactaataatcagagaa

SEQ ID NO: 43565 - DNA, 22 bp, Artificial Sequence
  chemically synthesized
ataatcagagaatgcaaattaa

SEQ ID NO: 43566 - DNA, 22 bp, Artificial Sequence
  chemically synthesized
aaaccaccatatgatacctcct

SEQ ID NO: 43567 - DNA, 22 bp, Artificial Sequence
  chemically synthesized
cttatgccagtcagaatggcta

SEQ ID NO: 43568 - DNA, 22 bp, Artificial Sequence
  chemically synthesized
atgccagtcagaatggctatca

SEQ ID NO: 43569 - DNA, 22 bp, Artificial Sequence
  chemically synthesized
tgccagtcagaatggctatcat

SEQ ID NO: 43570 - DNA, 22 bp, Artificial Sequence
  chemically synthesized
tcattataaagttcaaaaacag

SEQ ID NO: 43571 - DNA, 22 bp, Artificial Sequence
  chemically synthesized
taaagttcaaaaacagcagatg

SEQ ID NO: 43572 - DNA, 22 bp, Artificial Sequence
  chemically synthesized
aaaaacagcagatgttggtgag

SEQ ID NO: 43573 - DNA, 22 bp, Artificial Sequence
  chemically synthesized
gtgaggatgtggagacaagaaa

SEQ ID NO: 43574 - DNA, 22 bp, Artificial Sequence
  chemically synthesized
atacactgttggtaagaatgta

SEQ ID NO: 43575 - DNA, 22 bp, Artificial Sequence
  chemically synthesized
tacactgttggtaagaatgtaa

SEQ ID NO: 43576 - DNA, 22 bp, Artificial Sequence
  chemically synthesized
ttggtaagaatgtaaattagta

SEQ ID NO: 43577 - DNA, 22 bp, Artificial Sequence
  chemically synthesized
gtaagaatgtaaattagtacaa

SEQ ID NO: 43578 - DNA, 22 bp, Artificial Sequence
  chemically synthesized
gtacaaactttatggaagacag

SEQ ID NO: 43579 - DNA, 22 bp, Artificial Sequence
  chemically synthesized
tatggaagacagcatgaagatt

SEQ ID NO: 43580 - DNA, 22 bp, Artificial Sequence
  chemically synthesized
atggaagacagcatgaagattt

SEQ ID NO: 43581 - DNA, 22 bp, Artificial Sequence
  chemically synthesized
tggaagacagcatgaagatttc

SEQ ID NO: 43582 - DNA, 22 bp, Artificial Sequence
  chemically synthesized
cttaaagaactagaaacagaac

SEQ ID NO: 43583 - DNA, 22 bp, Artificial Sequence
  chemically synthesized
ttaaagaactagaaacagaact

SEQ ID NO: 43584 - DNA, 22 bp, Artificial Sequence
  chemically synthesized
aaagaactagaaacagaactac

SEQ ID NO: 43585 - DNA, 22 bp, Artificial Sequence
  chemically synthesized
aagaactagaaacagaactacc

SEQ ID NO: 43586 - DNA, 22 bp, Artificial Sequence
  chemically synthesized
gaaacagaactaccattcaatc

SEQ ID NO: 43587 - DNA, 22 bp, Artificial Sequence
  chemically synthesized
ccattcaatcctgcaatcccac

SEQ ID NO: 43588 - DNA, 22 bp, Artificial Sequence
  chemically synthesized
aatcctgcaatcccactactgg

SEQ ID NO: 43589 - DNA, 22 bp, Artificial Sequence
  chemically synthesized
caatcccactactgggtatgga

SEQ ID NO: 43590 - DNA, 22 bp, Artificial Sequence
  chemically synthesized
ctgggtatggacccaaagtgaa

SEQ ID NO: 43591 - DNA, 22 bp, Artificial Sequence
  chemically synthesized
ggtatggacccaaagtgaaaga

SEQ ID NO: 43592 - DNA, 22 bp, Artificial Sequence
  chemically synthesized
aaaaagatatctgcattagtat

SEQ ID NO: 43593 - DNA, 22 bp, Artificial Sequence
  chemically synthesized
cattagtatgttcaaagtagca

SEQ ID NO: 43594 - DNA, 22 bp, Artificial Sequence
  chemically synthesized
gtatgttcaaagtagcactgtt

SEQ ID NO: 43595 - DNA, 22 bp, Artificial Sequence
  chemically synthesized
aaagtagcactgttcccaatag

SEQ ID NO: 43596 - DNA, 22 bp, Artificial Sequence
  chemically synthesized
ttcccaatagcaaagatatgga

SEQ ID NO: 43597 - DNA, 22 bp, Artificial Sequence
  chemically synthesized
ccaatagcaaagatatggaatc

SEQ ID NO: 43598 - DNA, 22 bp, Artificial Sequence
  chemically synthesized
aatgtctaccaatggacgattg

SEQ ID NO: 43599 - DNA, 22 bp, Artificial Sequence
  chemically synthesized
ccaatggacgattggataaaga

SEQ ID NO: 43600 - DNA, 22 bp, Artificial Sequence
  chemically synthesized
gataaagaaaatgtggtgtata

SEQ ID NO: 43601 - DNA, 22 bp, Artificial Sequence
  chemically synthesized
atatacatatatattactcagc

SEQ ID NO: 43602 - DNA, 22 bp, Artificial Sequence
  chemically synthesized
tatacatatatattactcagcc

SEQ ID NO: 43603 - DNA, 22 bp, Artificial Sequence
  chemically synthesized
ctcagccataaaaaagaatgaa

SEQ ID NO: 43604 - DNA, 22 bp, Artificial Sequence
  chemically synthesized
agccataaaaaagaatgaaatc

SEQ ID NO: 43605 - DNA, 22 bp, Artificial Sequence
  chemically synthesized
ctctagaaacatggttagaact

SEQ ID NO: 43606 - DNA, 22 bp, Artificial Sequence
  chemically synthesized
tctagaaacatggttagaactg

SEQ ID NO: 43607 - DNA, 22 bp, Artificial Sequence
  chemically synthesized
tagaaacatggttagaactgga

SEQ ID NO: 43608 - DNA, 22 bp, Artificial Sequence
  chemically synthesized
gaaacatggttagaactggagg

SEQ ID NO: 43609 - DNA, 22 bp, Artificial Sequence
  chemically synthesized
gaactggaggacattatcctca

SEQ ID NO: 43610 - DNA, 22 bp, Artificial Sequence
  chemically synthesized
gaggacattatcctcagtgaaa

SEQ ID NO: 43611 - DNA, 22 bp, Artificial Sequence
  chemically synthesized
tcctcagtgaaataactcagaa

SEQ ID NO: 43612 - DNA, 22 bp, Artificial Sequence
  chemically synthesized
agtgaaataactcagaaacaga

SEQ ID NO: 43613 - DNA, 22 bp, Artificial Sequence
  chemically synthesized
agaaacagaaagtcaaacacag

SEQ ID NO: 43614 - DNA, 22 bp, Artificial Sequence
  chemically synthesized
tcatttagtgagagccaagtgg

SEQ ID NO: 43615 - DNA, 22 bp, Artificial Sequence
  chemically synthesized
atttagtgagagccaagtggga

SEQ ID NO: 43616 - DNA, 22 bp, Artificial Sequence
  chemically synthesized
agtgagagccaagtgggagcta

SEQ ID NO: 43617 - DNA, 22 bp, Artificial Sequence
  chemically synthesized
gtgagagccaagtgggagctaa

SEQ ID NO: 43618 - DNA, 22 bp, Artificial Sequence
  chemically synthesized
aacgatgagtaagcatagacat

SEQ ID NO: 43619 - DNA, 22 bp, Artificial Sequence
  chemically synthesized
gagactagagaaaggtgggagg

SEQ ID NO: 43620 - DNA, 22 bp, Artificial Sequence
  chemically synthesized
agactagagaaaggtgggagga

SEQ ID NO: 43621 - DNA, 22 bp, Artificial Sequence
  chemically synthesized
gagaaaggtgggaggataggag

SEQ ID NO: 43622 - DNA, 22 bp, Artificial Sequence
  chemically synthesized
aaaaactacggattggatacaa

SEQ ID NO: 43623 - DNA, 22 bp, Artificial Sequence
  chemically synthesized
cggattggatacaacattcact

SEQ ID NO: 43624 - DNA, 22 bp, Artificial Sequence
  chemically synthesized
gatacaacattcacttttcagg

SEQ ID NO: 43625 - DNA, 22 bp, Artificial Sequence
  chemically synthesized
acttttcaggtgatggtccact

SEQ ID NO: 43626 - DNA, 22 bp, Artificial Sequence
  chemically synthesized
ttcaggtgatggtccactaaaa

SEQ ID NO: 43627 - DNA, 22 bp, Artificial Sequence
  chemically synthesized
tcaggtgatggtccactaaaag

SEQ ID NO: 43628 - DNA, 22 bp, Artificial Sequence
  chemically synthesized
caggtgatggtccactaaaagc

SEQ ID NO: 43629 - DNA, 22 bp, Artificial Sequence
  chemically synthesized
aggtgatggtccactaaaagct

SEQ ID NO: 43630 - DNA, 22 bp, Artificial Sequence
  chemically synthesized
aaagctcagacttcaccactat

SEQ ID NO: 43631 - DNA, 22 bp, Artificial Sequence
  chemically synthesized
agacttcaccactatgcaacat

SEQ ID NO: 43632 - DNA, 22 bp, Artificial Sequence
  chemically synthesized
caccactatgcaacatacatat

SEQ ID NO: 43633 - DNA, 22 bp, Artificial Sequence
  chemically synthesized
accactatgcaacatacatatg

SEQ ID NO: 43634 - DNA, 22 bp, Artificial Sequence
  chemically synthesized
tgcaacatacatatgtaaggaa

SEQ ID NO: 43635 - DNA, 22 bp, Artificial Sequence
  chemically synthesized
gtaccctgatacagcttgactg

SEQ ID NO: 43636 - DNA, 22 bp, Artificial Sequence
  chemically synthesized
taccctgatacagcttgactgt

SEQ ID NO: 43637 - DNA, 22 bp, Artificial Sequence
  chemically synthesized
atacagcttgactgtgtcccca

SEQ ID NO: 43638 - DNA, 22 bp, Artificial Sequence
  chemically synthesized
gactgtgtccccacccaaatct

SEQ ID NO: 43639 - DNA, 22 bp, Artificial Sequence
  chemically synthesized
actgtgtccccacccaaatctc

SEQ ID NO: 43640 - DNA, 22 bp, Artificial Sequence
  chemically synthesized
tgtccccacccaaatctcatct

SEQ ID NO: 43641 - DNA, 22 bp, Artificial Sequence
  chemically synthesized
atcttgaattgtagttcccata

SEQ ID NO: 43642 - DNA, 22 bp, Artificial Sequence
  chemically synthesized
gaattgtagttcccataatcct

SEQ ID NO: 43643 - DNA, 22 bp, Artificial Sequence
  chemically synthesized
aattgtagttcccataatcctc

SEQ ID NO: 43644 - DNA, 22 bp, Artificial Sequence
  chemically synthesized
tagttcccataatcctcacgtg

SEQ ID NO: 43645 - DNA, 22 bp, Artificial Sequence
  chemically synthesized
ccataatcctcacgtgttgtgg

SEQ ID NO: 43646 - DNA, 22 bp, Artificial Sequence
  chemically synthesized
acgtgttgtgggagggatttgg

SEQ ID NO: 43647 - DNA, 22 bp, Artificial Sequence
  chemically synthesized
tgggagggatttggagggaggt

SEQ ID NO: 43648 - DNA, 22 bp, Artificial Sequence
  chemically synthesized
ggagggaggtaattgaatcata

SEQ ID NO: 43649 - DNA, 22 bp, Artificial Sequence
  chemically synthesized
gagggaggtaattgaatcatag

SEQ ID NO: 43650 - DNA, 22 bp, Artificial Sequence
  chemically synthesized
aatcatagaggaggttactctc

SEQ ID NO: 43651 - DNA, 22 bp, Artificial Sequence
  chemically synthesized
ctctcatgctcttctcgtgata

SEQ ID NO: 43652 - DNA, 22 bp, Artificial Sequence
  chemically synthesized
tcatgctcttctcgtgatagtg

SEQ ID NO: 43653 - DNA, 22 bp, Artificial Sequence
  chemically synthesized
atgctcttctcgtgatagtgag

SEQ ID NO: 43654 - DNA, 22 bp, Artificial Sequence
  chemically synthesized
ttctcgtgatagtgagttctta

SEQ ID NO: 43655 - DNA, 22 bp, Artificial Sequence
  chemically synthesized
ctcgtgatagtgagttcttaca

SEQ ID NO: 43656 - DNA, 22 bp, Artificial Sequence
  chemically synthesized
tcgtgatagtgagttcttacaa

SEQ ID NO: 43657 - DNA, 22 bp, Artificial Sequence
  chemically synthesized
gtgatagtgagttcttacaaga

SEQ ID NO: 43658 - DNA, 22 bp, Artificial Sequence
  chemically synthesized
ttacaagatctgatggttttat

SEQ ID NO: 43659 - DNA, 22 bp, Artificial Sequence
  chemically synthesized
acaagatctgatggttttataa

SEQ ID NO: 43660 - DNA, 22 bp, Artificial Sequence
  chemically synthesized
caagatctgatggttttataag

SEQ ID NO: 43661 - DNA, 22 bp, Artificial Sequence
  chemically synthesized
atggttttataagcggcttttc

SEQ ID NO: 43662 - DNA, 22 bp, Artificial Sequence
  chemically synthesized
tataagcggcttttcccccttt

SEQ ID NO: 43663 - DNA, 22 bp, Artificial Sequence
  chemically synthesized
ataagcggcttttccccctttt

SEQ ID NO: 43664 - DNA, 22 bp, Artificial Sequence
  chemically synthesized
taagcggcttttcccccttttg

SEQ ID NO: 43665 - DNA, 22 bp, Artificial Sequence
  chemically synthesized
ttcccccttttgcttggcactt

SEQ ID NO: 43666 - DNA, 22 bp, Artificial Sequence
  chemically synthesized
tcccccttttgcttggcacttc

SEQ ID NO: 43667 - DNA, 22 bp, Artificial Sequence
  chemically synthesized
cccccttttgcttggcacttct

SEQ ID NO: 43668 - DNA, 22 bp, Artificial Sequence
  chemically synthesized
ccccttttgcttggcacttcta

SEQ ID NO: 43669 - DNA, 22 bp, Artificial Sequence
  chemically synthesized
ttgcttggcacttctacttgct

SEQ ID NO: 43670 - DNA, 22 bp, Artificial Sequence
  chemically synthesized
tgcttggcacttctacttgctg

SEQ ID NO: 43671 - DNA, 22 bp, Artificial Sequence
  chemically synthesized
gcttggcacttctacttgctgc

SEQ ID NO: 43672 - DNA, 22 bp, Artificial Sequence
  chemically synthesized
cttggcacttctacttgctgct

SEQ ID NO: 43673 - DNA, 22 bp, Artificial Sequence
  chemically synthesized
ggcacttctacttgctgctgcc

SEQ ID NO: 43674 - DNA, 22 bp, Artificial Sequence
  chemically synthesized
gcacttctacttgctgctgcca

SEQ ID NO: 43675 - DNA, 22 bp, Artificial Sequence
  chemically synthesized
ctacttgctgctgccatgtgaa

SEQ ID NO: 43676 - DNA, 22 bp, Artificial Sequence
  chemically synthesized
tacttgctgctgccatgtgaag

SEQ ID NO: 43677 - DNA, 22 bp, Artificial Sequence
  chemically synthesized
cttgctgctgccatgtgaagaa

SEQ ID NO: 43678 - DNA, 22 bp, Artificial Sequence
  chemically synthesized
gctgctgccatgtgaagaagga

SEQ ID NO: 43679 - DNA, 22 bp, Artificial Sequence
  chemically synthesized
ctgctgccatgtgaagaaggac

SEQ ID NO: 43680 - DNA, 22 bp, Artificial Sequence
  chemically synthesized
ctgccatgtgaagaaggacatg

SEQ ID NO: 43681 - DNA, 22 bp, Artificial Sequence
  chemically synthesized
ccatgtgaagaaggacatgttt

SEQ ID NO: 43682 - DNA, 22 bp, Artificial Sequence
  chemically synthesized
gtttcttcttctgccatgattg

SEQ ID NO: 43683 - DNA, 22 bp, Artificial Sequence
  chemically synthesized
tttcttcttctgccatgattgt

SEQ ID NO: 43684 - DNA, 22 bp, Artificial Sequence
  chemically synthesized
cttcttctgccatgattgtaag

SEQ ID NO: 43685 - DNA, 22 bp, Artificial Sequence
  chemically synthesized
ttcttctgccatgattgtaagt

SEQ ID NO: 43686 - DNA, 22 bp, Artificial Sequence
  chemically synthesized
cttctgccatgattgtaagttt

SEQ ID NO: 43687 - DNA, 22 bp, Artificial Sequence
  chemically synthesized
ttctgccatgattgtaagtttc

SEQ ID NO: 43688 - DNA, 22 bp, Artificial Sequence
  chemically synthesized
ctgccatgattgtaagtttccc

SEQ ID NO: 43689 - DNA, 22 bp, Artificial Sequence
  chemically synthesized
tgccatgattgtaagtttcccg

SEQ ID NO: 43690 - DNA, 22 bp, Artificial Sequence
  chemically synthesized
ccatgattgtaagtttcccgag

SEQ ID NO: 43691 - DNA, 22 bp, Artificial Sequence
  chemically synthesized
taagtttcccgaggcctcccca

SEQ ID NO: 43692 - DNA, 22 bp, Artificial Sequence
  chemically synthesized
cccgaggcctccccagccctgt

SEQ ID NO: 43693 - DNA, 22 bp, Artificial Sequence
  chemically synthesized
ccgaggcctccccagccctgtg

SEQ ID NO: 43694 - DNA, 22 bp, Artificial Sequence
  chemically synthesized
cccagccctgtggaactgtgag

SEQ ID NO: 43695 - DNA, 22 bp, Artificial Sequence
  chemically synthesized
tggaactgtgagacaattaaac

SEQ ID NO: 43696 - DNA, 22 bp, Artificial Sequence
  chemically synthesized
tgagacaattaaacgttttttc

SEQ ID NO: 43697 - DNA, 22 bp, Artificial Sequence
  chemically synthesized
aacgttttttccttataaatta

SEQ ID NO: 43698 - DNA, 22 bp, Artificial Sequence
  chemically synthesized
tttccttataaattacccagtc

SEQ ID NO: 43699 - DNA, 22 bp, Artificial Sequence
  chemically synthesized
ttccttataaattacccagtct

SEQ ID NO: 43700 - DNA, 22 bp, Artificial Sequence
  chemically synthesized
tccttataaattacccagtctc

SEQ ID NO: 43701 - DNA, 22 bp, Artificial Sequence
  chemically synthesized
ccttataaattacccagtctca

SEQ ID NO: 43702 - DNA, 22 bp, Artificial Sequence
  chemically synthesized
cttataaattacccagtctcag

SEQ ID NO: 43703 - DNA, 22 bp, Artificial Sequence
  chemically synthesized
ataaattacccagtctcaggta

SEQ ID NO: 43704 - DNA, 22 bp, Artificial Sequence
  chemically synthesized
taaattacccagtctcaggtat

SEQ ID NO: 43705 - DNA, 22 bp, Artificial Sequence
  chemically synthesized
cccagtctcaggtatgtcttta

SEQ ID NO: 43706 - DNA, 22 bp, Artificial Sequence
  chemically synthesized
aggtatgtctttataagcagca

SEQ ID NO: 43707 - DNA, 22 bp, Artificial Sequence
  chemically synthesized
tataagcagcatgataacgaac

SEQ ID NO: 43708 - DNA, 22 bp, Artificial Sequence
  chemically synthesized
ataagcagcatgataacgaact

SEQ ID NO: 43709 - DNA, 22 bp, Artificial Sequence
  chemically synthesized
taagcagcatgataacgaacta

SEQ ID NO: 43710 - DNA, 22 bp, Artificial Sequence
  chemically synthesized
gtacataccttctaaatatata

SEQ ID NO: 43711 - DNA, 22 bp, Artificial Sequence
  chemically synthesized
ctaaatatatataaataaattt

SEQ ID NO: 43712 - DNA, 22 bp, Artificial Sequence
  chemically synthesized
taaatatatataaataaatttt

SEQ ID NO: 43713 - DNA, 22 bp, Artificial Sequence
  chemically synthesized
aatatatataaataaattttaa

SEQ ID NO: 43714 - DNA, 22 bp, Artificial Sequence
  chemically synthesized
taaaaatataaaataaattaga

SEQ ID NO: 43715 - DNA, 22 bp, Artificial Sequence
  chemically synthesized
aaaaatataaaataaattagat

SEQ ID NO: 43716 - DNA, 22 bp, Artificial Sequence
  chemically synthesized
aaaatataaaataaattagatc

SEQ ID NO: 43717 - DNA, 22 bp, Artificial Sequence
  chemically synthesized
gatctgattgaaaaggcaaaaa

SEQ ID NO: 43718 - DNA, 22 bp, Artificial Sequence
  chemically synthesized
attgaaaaggcaaaaattgagc

SEQ ID NO: 43719 - DNA, 22 bp, Artificial Sequence
  chemically synthesized
aaaaggcaaaaattgagcaagc

SEQ ID NO: 43720 - DNA, 22 bp, Artificial Sequence
  chemically synthesized
agcaagcaaaatatcacttaat

SEQ ID NO: 43721 - DNA, 22 bp, Artificial Sequence
  chemically synthesized
aatggggtaattaaaagggtga

SEQ ID NO: 43722 - DNA, 22 bp, Artificial Sequence
  chemically synthesized
atggggtaattaaaagggtgaa

SEQ ID NO: 43723 - DNA, 22 bp, Artificial Sequence
  chemically synthesized
aaagggtgaagaaattgggcaa

SEQ ID NO: 43724 - DNA, 22 bp, Artificial Sequence
  chemically synthesized
ggcaaatggatgtcatgaggag

SEQ ID NO: 43725 - DNA, 22 bp, Artificial Sequence
  chemically synthesized
ttaggcagaggtaatggtcaga

SEQ ID NO: 43726 - DNA, 22 bp, Artificial Sequence
  chemically synthesized
taggcagaggtaatggtcagag

SEQ ID NO: 43727 - DNA, 22 bp, Artificial Sequence
  chemically synthesized
aggcagaggtaatggtcagagc

SEQ ID NO: 43728 - DNA, 22 bp, Artificial Sequence
  chemically synthesized
ggcagaggtaatggtcagagcc

SEQ ID NO: 43729 - DNA, 22 bp, Artificial Sequence
  chemically synthesized
agctggagtagagtgtgcaagg

SEQ ID NO: 43730 - DNA, 22 bp, Artificial Sequence
  chemically synthesized
gagtagagtgtgcaaggaaaga

SEQ ID NO: 43731 - DNA, 22 bp, Artificial Sequence
  chemically synthesized
aaaaggataaccaggtaggagg

SEQ ID NO: 43732 - DNA, 22 bp, Artificial Sequence
  chemically synthesized
cagtaaacttaggcaggatatt

SEQ ID NO: 43733 - DNA, 22 bp, Artificial Sequence
  chemically synthesized
aggcaggatatttcccgtgaca

SEQ ID NO: 43734 - DNA, 22 bp, Artificial Sequence
  chemically synthesized
ggcaggatatttcccgtgacag

SEQ ID NO: 43735 - DNA, 22 bp, Artificial Sequence
  chemically synthesized
cccgtgacagcactaaataata

SEQ ID NO: 43736 - DNA, 22 bp, Artificial Sequence
  chemically synthesized
ccgtgacagcactaaataataa

SEQ ID NO: 43737 - DNA, 22 bp, Artificial Sequence
  chemically synthesized
aataataatcacatgtgagaat

SEQ ID NO: 43738 - DNA, 22 bp, Artificial Sequence
  chemically synthesized
tcgattacttgagcaatacttt

SEQ ID NO: 43739 - DNA, 22 bp, Artificial Sequence
  chemically synthesized
cttgagcaatactttgttcatg

SEQ ID NO: 43740 - DNA, 22 bp, Artificial Sequence
  chemically synthesized
gagcaatactttgttcatgagc

SEQ ID NO: 43741 - DNA, 22 bp, Artificial Sequence
  chemically synthesized
agcaatactttgttcatgagct

SEQ ID NO: 43742 - DNA, 22 bp, Artificial Sequence
  chemically synthesized
tgttcatgagctagagcaaggg

SEQ ID NO: 43743 - DNA, 22 bp, Artificial Sequence
  chemically synthesized
gttcatgagctagagcaagggg

SEQ ID NO: 43744 - DNA, 22 bp, Artificial Sequence
  chemically synthesized
ttcatgagctagagcaagggga

SEQ ID NO: 43745 - DNA, 22 bp, Artificial Sequence
  chemically synthesized
atgagctagagcaaggggatga

SEQ ID NO: 43746 - DNA, 22 bp, Artificial Sequence
  chemically synthesized
gagcaaggggatgactcaagaa

SEQ ID NO: 43747 - DNA, 22 bp, Artificial Sequence
  chemically synthesized
aagaaatcctttgtgaaatcct

SEQ ID NO: 43748 - DNA, 22 bp, Artificial Sequence
  chemically synthesized
tgtgaaatcctggaggtaataa

SEQ ID NO: 43749 - DNA, 22 bp, Artificial Sequence
  chemically synthesized
gtgaaatcctggaggtaataag

SEQ ID NO: 43750 - DNA, 22 bp, Artificial Sequence
  chemically synthesized
tgaaatcctggaggtaataaga

SEQ ID NO: 43751 - DNA, 22 bp, Artificial Sequence
  chemically synthesized
gaggtaataagatcctggcatc

SEQ ID NO: 43752 - DNA, 22 bp, Artificial Sequence
  chemically synthesized
gcatcaatcttcaactcaattg

SEQ ID NO: 43753 - DNA, 22 bp, Artificial Sequence
  chemically synthesized
caactcaattgcaaaaagcaat

SEQ ID NO: 43754 - DNA, 22 bp, Artificial Sequence
  chemically synthesized
aactcaattgcaaaaagcaatt

SEQ ID NO: 43755 - DNA, 22 bp, Artificial Sequence
  chemically synthesized
aattgcaaaaagcaattttatt

SEQ ID NO: 43756 - DNA, 22 bp, Artificial Sequence
  chemically synthesized
caaaaagcaattttattactta

SEQ ID NO: 43757 - DNA, 22 bp, Artificial Sequence
  chemically synthesized
tattacttatatattacttctc

SEQ ID NO: 43758 - DNA, 22 bp, Artificial Sequence
  chemically synthesized
attacttatatattacttctca

SEQ ID NO: 43759 - DNA, 22 bp, Artificial Sequence
  chemically synthesized
ttacttatatattacttctcat

SEQ ID NO: 43760 - DNA, 22 bp, Artificial Sequence
  chemically synthesized
cttatatattacttctcatttt

SEQ ID NO: 43761 - DNA, 22 bp, Artificial Sequence
  chemically synthesized
atatattacttctcatttttca

SEQ ID NO: 43762 - DNA, 22 bp, Artificial Sequence
  chemically synthesized
tatattacttctcatttttcac

SEQ ID NO: 43763 - DNA, 22 bp, Artificial Sequence
  chemically synthesized
cttctcatttttcactgctgtc

SEQ ID NO: 43764 - DNA, 22 bp, Artificial Sequence
  chemically synthesized
ctcatttttcactgctgtcttt

SEQ ID NO: 43765 - DNA, 22 bp, Artificial Sequence
  chemically synthesized
tcatttttcactgctgtctttc

SEQ ID NO: 43766 - DNA, 22 bp, Artificial Sequence
  chemically synthesized
atttttcactgctgtctttcaa

SEQ ID NO: 43767 - DNA, 22 bp, Artificial Sequence
  chemically synthesized
ttcactgctgtctttcaaaaca

SEQ ID NO: 43768 - DNA, 22 bp, Artificial Sequence
  chemically synthesized
tcactgctgtctttcaaaacat

SEQ ID NO: 43769 - DNA, 22 bp, Artificial Sequence
  chemically synthesized
cactgctgtctttcaaaacata

SEQ ID NO: 43770 - DNA, 22 bp, Artificial Sequence
  chemically synthesized
actgctgtctttcaaaacatat

SEQ ID NO: 43771 - DNA, 22 bp, Artificial Sequence
  chemically synthesized
ctgtctttcaaaacatattcca

SEQ ID NO: 43772 - DNA, 22 bp, Artificial Sequence
  chemically synthesized
tctttcaaaacatattccattt

SEQ ID NO: 43773 - DNA, 22 bp, Artificial Sequence
  chemically synthesized
tcaaaacatattccatttcatc

SEQ ID NO: 43774 - DNA, 22 bp, Artificial Sequence
  chemically synthesized
caaaacatattccatttcatca

SEQ ID NO: 43775 - DNA, 22 bp, Artificial Sequence
  chemically synthesized
aaaacatattccatttcatcag

SEQ ID NO: 43776 - DNA, 22 bp, Artificial Sequence
  chemically synthesized
catttcatcagactacaggttt

SEQ ID NO: 43777 - DNA, 22 bp, Artificial Sequence
  chemically synthesized
catcagactacaggttttaata

SEQ ID NO: 43778 - DNA, 22 bp, Artificial Sequence
  chemically synthesized
atcagactacaggttttaatag

SEQ ID NO: 43779 - DNA, 22 bp, Artificial Sequence
  chemically synthesized
caggttttaatagctactatat

SEQ ID NO: 43780 - DNA, 22 bp, Artificial Sequence
  chemically synthesized
taatagctactatatttcttaa

SEQ ID NO: 43781 - DNA, 22 bp, Artificial Sequence
  chemically synthesized
aatagctactatatttcttaaa

SEQ ID NO: 43782 - DNA, 22 bp, Artificial Sequence
  chemically synthesized
atagctactatatttcttaaat

SEQ ID NO: 43783 - DNA, 22 bp, Artificial Sequence
  chemically synthesized
ctatatttcttaaatgtattat

SEQ ID NO: 43784 - DNA, 22 bp, Artificial Sequence
  chemically synthesized
tatttcttaaatgtattattcc

SEQ ID NO: 43785 - DNA, 22 bp, Artificial Sequence
  chemically synthesized
cttaaatgtattattccagtaa

SEQ ID NO: 43786 - DNA, 22 bp, Artificial Sequence
  chemically synthesized
ttaaatgtattattccagtaac

SEQ ID NO: 43787 - DNA, 22 bp, Artificial Sequence
  chemically synthesized
aaatgtattattccagtaactt

SEQ ID NO: 43788 - DNA, 22 bp, Artificial Sequence
  chemically synthesized
aatgtattattccagtaactta

SEQ ID NO: 43789 - DNA, 22 bp, Artificial Sequence
  chemically synthesized
ttccagtaacttatactttaca

SEQ ID NO: 43790 - DNA, 22 bp, Artificial Sequence
  chemically synthesized
cagtaacttatactttacatag

SEQ ID NO: 43791 - DNA, 22 bp, Artificial Sequence
  chemically synthesized
atactttacatagtaaatctta

SEQ ID NO: 43792 - DNA, 22 bp, Artificial Sequence
  chemically synthesized
tactttacatagtaaatcttat

SEQ ID NO: 43793 - DNA, 22 bp, Artificial Sequence
  chemically synthesized
tacatagtaaatcttatcaata

SEQ ID NO: 43794 - DNA, 22 bp, Artificial Sequence
  chemically synthesized
acatagtaaatcttatcaatag

SEQ ID NO: 43795 - DNA, 22 bp, Artificial Sequence
  chemically synthesized
catagtaaatcttatcaatagt

SEQ ID NO: 43796 - DNA, 22 bp, Artificial Sequence
  chemically synthesized
atcaatagtcacaatcaatggt

SEQ ID NO: 43797 - DNA, 22 bp, Artificial Sequence
  chemically synthesized
tcaatagtcacaatcaatggtc

SEQ ID NO: 43798 - DNA, 22 bp, Artificial Sequence
  chemically synthesized
catctggagacattacttttag

SEQ ID NO: 43799 - DNA, 22 bp, Artificial Sequence
  chemically synthesized
atctggagacattacttttagc

SEQ ID NO: 43800 - DNA, 22 bp, Artificial Sequence
  chemically synthesized
gagacattacttttagcctgag

SEQ ID NO: 43801 - DNA, 22 bp, Artificial Sequence
  chemically synthesized
cttttagcctgagccatgcaaa

SEQ ID NO: 43802 - DNA, 22 bp, Artificial Sequence
  chemically synthesized
ttagcctgagccatgcaaaata

SEQ ID NO: 43803 - DNA, 22 bp, Artificial Sequence
  chemically synthesized
tagcctgagccatgcaaaatat

SEQ ID NO: 43804 - DNA, 22 bp, Artificial Sequence
  chemically synthesized
agcctgagccatgcaaaatata

SEQ ID NO: 43805 - DNA, 22 bp, Artificial Sequence
  chemically synthesized
gcctgagccatgcaaaatatac

SEQ ID NO: 43806 - DNA, 22 bp, Artificial Sequence
  chemically synthesized
agccatgcaaaatatacttttt

SEQ ID NO: 43807 - DNA, 22 bp, Artificial Sequence
  chemically synthesized
tttggaaaattgccctttgaaa

SEQ ID NO: 43808 - DNA, 22 bp, Artificial Sequence
  chemically synthesized
ttggaaaattgccctttgaaag

SEQ ID NO: 43809 - DNA, 22 bp, Artificial Sequence
  chemically synthesized
tggaaaattgccctttgaaagg

SEQ ID NO: 43810 - DNA, 22 bp, Artificial Sequence
  chemically synthesized
ggaaaattgccctttgaaaggc

SEQ ID NO: 43811 - DNA, 22 bp, Artificial Sequence
  chemically synthesized
gaaaattgccctttgaaaggcg

SEQ ID NO: 43812 - DNA, 22 bp, Artificial Sequence
  chemically synthesized
ccctttgaaaggcgagacacaa

SEQ ID NO: 43813 - DNA, 22 bp, Artificial Sequence
  chemically synthesized
tgaaaggcgagacacaaaaggc

SEQ ID NO: 43814 - DNA, 22 bp, Artificial Sequence
  chemically synthesized
gaaaggcgagacacaaaaggca

SEQ ID NO: 43815 - DNA, 22 bp, Artificial Sequence
  chemically synthesized
aaaggcgagacacaaaaggcaa

SEQ ID NO: 43816 - DNA, 22 bp, Artificial Sequence
  chemically synthesized
atgctattatatggtaccaata

SEQ ID NO: 43817 - DNA, 22 bp, Artificial Sequence
  chemically synthesized
ttatatggtaccaataggattc

SEQ ID NO: 43818 - DNA, 22 bp, Artificial Sequence
  chemically synthesized
tatggtaccaataggattcatt

SEQ ID NO: 43819 - DNA, 22 bp, Artificial Sequence
  chemically synthesized
attaatttataaaggagaagag

SEQ ID NO: 43820 - DNA, 22 bp, Artificial Sequence
  chemically synthesized
atttataaaggagaagagctaa

SEQ ID NO: 43821 - DNA, 22 bp, Artificial Sequence
  chemically synthesized
ataaaggagaagagctaatgta

SEQ ID NO: 43822 - DNA, 22 bp, Artificial Sequence
  chemically synthesized
taaaggagaagagctaatgtaa

SEQ ID NO: 43823 - DNA, 22 bp, Artificial Sequence
  chemically synthesized
atgtaactccaaaatgcaagca

SEQ ID NO: 43824 - DNA, 22 bp, Artificial Sequence
  chemically synthesized
caaaatgcaagcaattttcata

SEQ ID NO: 43825 - DNA, 22 bp, Artificial Sequence
  chemically synthesized
tcatatgagtctacacaagcta

SEQ ID NO: 43826 - DNA, 22 bp, Artificial Sequence
  chemically synthesized
catatgagtctacacaagctaa

SEQ ID NO: 43827 - DNA, 22 bp, Artificial Sequence
  chemically synthesized
atatgagtctacacaagctaat

SEQ ID NO: 43828 - DNA, 22 bp, Artificial Sequence
  chemically synthesized
cacaagctaattgtccttaaga

SEQ ID NO: 43829 - DNA, 22 bp, Artificial Sequence
  chemically synthesized
attgtccttaagaatttcatct

SEQ ID NO: 43830 - DNA, 22 bp, Artificial Sequence
  chemically synthesized
tccttaagaatttcatctttaa

SEQ ID NO: 43831 - DNA, 22 bp, Artificial Sequence
  chemically synthesized
aagaatttcatctttaaggaaa

SEQ ID NO: 43832 - DNA, 22 bp, Artificial Sequence
  chemically synthesized
agaatttcatctttaaggaaaa

SEQ ID NO: 43833 - DNA, 22 bp, Artificial Sequence
  chemically synthesized
catctttaaggaaaagtttttt

SEQ ID NO: 43834 - DNA, 22 bp, Artificial Sequence
  chemically synthesized
atctttaaggaaaagtttttta

SEQ ID NO: 43835 - DNA, 22 bp, Artificial Sequence
  chemically synthesized
taaggaaaagttttttactgta

SEQ ID NO: 43836 - DNA, 22 bp, Artificial Sequence
  chemically synthesized
aaggaaaagttttttactgtat

SEQ ID NO: 43837 - DNA, 22 bp, Artificial Sequence
  chemically synthesized
aggaaaagttttttactgtatc

SEQ ID NO: 43838 - DNA, 22 bp, Artificial Sequence
  chemically synthesized
tttactgtatcaaaaagaagtt

SEQ ID NO: 43839 - DNA, 22 bp, Artificial Sequence
  chemically synthesized
ttactgtatcaaaaagaagttt

SEQ ID NO: 43840 - DNA, 22 bp, Artificial Sequence
  chemically synthesized
tactgtatcaaaaagaagttta

SEQ ID NO: 43841 - DNA, 22 bp, Artificial Sequence
  chemically synthesized
actgtatcaaaaagaagtttaa

SEQ ID NO: 43842 - DNA, 22 bp, Artificial Sequence
  chemically synthesized
ctgtatcaaaaagaagtttaaa

SEQ ID NO: 43843 - DNA, 22 bp, Artificial Sequence
  chemically synthesized
tatcaaaaagaagtttaaactg

SEQ ID NO: 43844 - DNA, 22 bp, Artificial Sequence
  chemically synthesized
aaactgtcattgagcagagtct

SEQ ID NO: 43845 - DNA, 22 bp, Artificial Sequence
  chemically synthesized
aactgtcattgagcagagtctg

SEQ ID NO: 43846 - DNA, 22 bp, Artificial Sequence
  chemically synthesized
tcattgagcagagtctgataat

SEQ ID NO: 43847 - DNA, 22 bp, Artificial Sequence
  chemically synthesized
agcagagtctgataataaggac

SEQ ID NO: 43848 - DNA, 22 bp, Artificial Sequence
  chemically synthesized
ataataaggacactgtcaaatc

SEQ ID NO: 43849 - DNA, 22 bp, Artificial Sequence
  chemically synthesized
tcaaatcacagttcagatgtta

SEQ ID NO: 43850 - DNA, 22 bp, Artificial Sequence
  chemically synthesized
agatgttatgtgatgaggacag

SEQ ID NO: 43851 - DNA, 22 bp, Artificial Sequence
  chemically synthesized
tgtgatgaggacagaatagaac

SEQ ID NO: 43852 - DNA, 22 bp, Artificial Sequence
  chemically synthesized
ctagactggacaagaacagaca

SEQ ID NO: 43853 - DNA, 22 bp, Artificial Sequence
  chemically synthesized
tagactggacaagaacagacat

SEQ ID NO: 43854 - DNA, 22 bp, Artificial Sequence
  chemically synthesized
gactggacaagaacagacatga

SEQ ID NO: 43855 - DNA, 22 bp, Artificial Sequence
  chemically synthesized
gacaagaacagacatgattaac

SEQ ID NO: 43856 - DNA, 22 bp, Artificial Sequence
  chemically synthesized
acttaaccatccaacaataaat

SEQ ID NO: 43857 - DNA, 22 bp, Artificial Sequence
  chemically synthesized
aaccatccaacaataaatctaa

SEQ ID NO: 43858 - DNA, 22 bp, Artificial Sequence
  chemically synthesized
accatccaacaataaatctaag

SEQ ID NO: 43859 - DNA, 22 bp, Artificial Sequence
  chemically synthesized
agttaacataaattgatgtcat

SEQ ID NO: 43860 - DNA, 22 bp, Artificial Sequence
  chemically synthesized
acataaattgatgtcatctact

SEQ ID NO: 43861 - DNA, 22 bp, Artificial Sequence
  chemically synthesized
atgtcatctactacatctaagt

SEQ ID NO: 43862 - DNA, 22 bp, Artificial Sequence
  chemically synthesized
ctacatctaagtatttcctcaa

SEQ ID NO: 43863 - DNA, 22 bp, Artificial Sequence
  chemically synthesized
catctaagtatttcctcaaatt

SEQ ID NO: 43864 - DNA, 22 bp, Artificial Sequence
  chemically synthesized
agtatttcctcaaattctggac

SEQ ID NO: 43865 - DNA, 22 bp, Artificial Sequence
  chemically synthesized
cctcaaattctggacaatttta

SEQ ID NO: 43866 - DNA, 22 bp, Artificial Sequence
  chemically synthesized
ctcaaattctggacaattttag

SEQ ID NO: 43867 - DNA, 22 bp, Artificial Sequence
  chemically synthesized
aaattctggacaattttagaaa

SEQ ID NO: 43868 - DNA, 22 bp, Artificial Sequence
  chemically synthesized
tggacaattttagaaaccatca

SEQ ID NO: 43869 - DNA, 22 bp, Artificial Sequence
  chemically synthesized
gacaattttagaaaccatcaaa

SEQ ID NO: 43870 - DNA, 22 bp, Artificial Sequence
  chemically synthesized
tagaaaccatcaaaattatttg

SEQ ID NO: 43871 - DNA, 22 bp, Artificial Sequence
  chemically synthesized
agaaaccatcaaaattatttgt

SEQ ID NO: 43872 - DNA, 22 bp, Artificial Sequence
  chemically synthesized
gaaaccatcaaaattatttgtt

SEQ ID NO: 43873 - DNA, 22 bp, Artificial Sequence
  chemically synthesized
tttgttgaggaaaaataaactt

SEQ ID NO: 43874 - DNA, 22 bp, Artificial Sequence
  chemically synthesized
gttgaggaaaaataaacttagc

SEQ ID NO: 43875 - DNA, 22 bp, Artificial Sequence
  chemically synthesized
ttgaggaaaaataaacttagcc

SEQ ID NO: 43876 - DNA, 22 bp, Artificial Sequence
  chemically synthesized
aggaaaaataaacttagccaat

SEQ ID NO: 43877 - DNA, 22 bp, Artificial Sequence
  chemically synthesized
agccaatttgcaagggcaacta

SEQ ID NO: 43878 - DNA, 22 bp, Artificial Sequence
  chemically synthesized
gccaatttgcaagggcaactaa

SEQ ID NO: 43879 - DNA, 22 bp, Artificial Sequence
  chemically synthesized
gcaagggcaactaaaatgaaga

SEQ ID NO: 43880 - DNA, 22 bp, Artificial Sequence
  chemically synthesized
caagggcaactaaaatgaagaa

SEQ ID NO: 43881 - DNA, 22 bp, Artificial Sequence
  chemically synthesized
aaatgaagaacttttctttaaa

SEQ ID NO: 43882 - DNA, 22 bp, Artificial Sequence
  chemically synthesized
ttctttaaagtgtgggagtcac

SEQ ID NO: 43883 - DNA, 22 bp, Artificial Sequence
  chemically synthesized
tctttaaagtgtgggagtcaca

SEQ ID NO: 43884 - DNA, 22 bp, Artificial Sequence
  chemically synthesized
ctttaaagtgtgggagtcacat

SEQ ID NO: 43885 - DNA, 22 bp, Artificial Sequence
  chemically synthesized
tttaaagtgtgggagtcacatc

SEQ ID NO: 43886 - DNA, 22 bp, Artificial Sequence
  chemically synthesized
taaagtgtgggagtcacatctt

SEQ ID NO: 43887 - DNA, 22 bp, Artificial Sequence
  chemically synthesized
aaagtgtgggagtcacatctta

SEQ ID NO: 43888 - DNA, 22 bp, Artificial Sequence
  chemically synthesized
aagtgtgggagtcacatcttag

SEQ ID NO: 43889 - DNA, 22 bp, Artificial Sequence
  chemically synthesized
agcaacatatttaaatatatct

SEQ ID NO: 43890 - DNA, 22 bp, Artificial Sequence
  chemically synthesized
gcaacatatttaaatatatcta

SEQ ID NO: 43891 - DNA, 22 bp, Artificial Sequence
  chemically synthesized
aaatatatctaagctttcttca

SEQ ID NO: 43892 - DNA, 22 bp, Artificial Sequence
  chemically synthesized
aatatatctaagctttcttcaa

SEQ ID NO: 43893 - DNA, 22 bp, Artificial Sequence
  chemically synthesized
agctttcttcaaaaccactatc

SEQ ID NO: 43894 - DNA, 22 bp, Artificial Sequence
  chemically synthesized
tcttcaaaaccactatccacaa

SEQ ID NO: 43895 - DNA, 22 bp, Artificial Sequence
  chemically synthesized
cttcaaaaccactatccacaaa

SEQ ID NO: 43896 - DNA, 22 bp, Artificial Sequence
  chemically synthesized
ttcaaaaccactatccacaaaa

SEQ ID NO: 43897 - DNA, 22 bp, Artificial Sequence
  chemically synthesized
caaaaccactatccacaaaaat

SEQ ID NO: 43898 - DNA, 22 bp, Artificial Sequence
  chemically synthesized
aaaaccactatccacaaaaatg

SEQ ID NO: 43899 - DNA, 22 bp, Artificial Sequence
  chemically synthesized
tccacaaaaatgcaaaatttcc

SEQ ID NO: 43900 - DNA, 22 bp, Artificial Sequence
  chemically synthesized
ccaaagaatttctcctcttctg

SEQ ID NO: 43901 - DNA, 22 bp, Artificial Sequence
  chemically synthesized
caaagaatttctcctcttctgt

SEQ ID NO: 43902 - DNA, 22 bp, Artificial Sequence
  chemically synthesized
ctcctcttctgtagacttattt

SEQ ID NO: 43903 - DNA, 22 bp, Artificial Sequence
  chemically synthesized
tcctcttctgtagacttatttt

SEQ ID NO: 43904 - DNA, 22 bp, Artificial Sequence
  chemically synthesized
ctcttctgtagacttattttct

SEQ ID NO: 43905 - DNA, 22 bp, Artificial Sequence
  chemically synthesized
ttctgtagacttattttcttca

SEQ ID NO: 43906 - DNA, 22 bp, Artificial Sequence
  chemically synthesized
ctgtagacttattttcttcatc

SEQ ID NO: 43907 - DNA, 22 bp, Artificial Sequence
  chemically synthesized
tgtagacttattttcttcatct

SEQ ID NO: 43908 - DNA, 22 bp, Artificial Sequence
  chemically synthesized
tagacttattttcttcatcttc

SEQ ID NO: 43909 - DNA, 22 bp, Artificial Sequence
  chemically synthesized
attttcttcatcttcatctttt

SEQ ID NO: 43910 - DNA, 22 bp, Artificial Sequence
  chemically synthesized
ttttcttcatcttcatcttttc

SEQ ID NO: 43911 - DNA, 22 bp, Artificial Sequence
  chemically synthesized
tcttcatcttcatcttttccag

SEQ ID NO: 43912 - DNA, 22 bp, Artificial Sequence
  chemically synthesized
cttcatcttcatcttttccagg

SEQ ID NO: 43913 - DNA, 22 bp, Artificial Sequence
  chemically synthesized
ttcatcttcatcttttccagga

SEQ ID NO: 43914 - DNA, 22 bp, Artificial Sequence
  chemically synthesized
catcttcatcttttccaggaga

SEQ ID NO: 43915 - DNA, 22 bp, Artificial Sequence
  chemically synthesized
atcttcatcttttccaggagaa

SEQ ID NO: 43916 - DNA, 22 bp, Artificial Sequence
  chemically synthesized
catcttttccaggagaatatac

SEQ ID NO: 43917 - DNA, 22 bp, Artificial Sequence
  chemically synthesized
atcttttccaggagaatatacc

SEQ ID NO: 43918 - DNA, 22 bp, Artificial Sequence
  chemically synthesized
ttccaggagaatataccataag

SEQ ID NO: 43919 - DNA, 22 bp, Artificial Sequence
  chemically synthesized
tccaggagaatataccataagt

SEQ ID NO: 43920 - DNA, 22 bp, Artificial Sequence
  chemically synthesized
ccaggagaatataccataagtt

SEQ ID NO: 43921 - DNA, 22 bp, Artificial Sequence
  chemically synthesized
caggagaatataccataagttt

SEQ ID NO: 43922 - DNA, 22 bp, Artificial Sequence
  chemically synthesized
ctgatggtacacatttattaga

SEQ ID NO: 43923 - DNA, 22 bp, Artificial Sequence
  chemically synthesized
tgatggtacacatttattagat

SEQ ID NO: 43924 - DNA, 22 bp, Artificial Sequence
  chemically synthesized
atggtacacatttattagatgt

SEQ ID NO: 43925 - DNA, 22 bp, Artificial Sequence
  chemically synthesized
attagatgttttatttacattt

SEQ ID NO: 43926 - DNA, 22 bp, Artificial Sequence
  chemically synthesized
ttagatgttttatttacatttt

SEQ ID NO: 43927 - DNA, 22 bp, Artificial Sequence
  chemically synthesized
gatgttttatttacatttttta

SEQ ID NO: 43928 - DNA, 22 bp, Artificial Sequence
  chemically synthesized
tatttacattttttatccttga

SEQ ID NO: 43929 - DNA, 22 bp, Artificial Sequence
  chemically synthesized
atttacattttttatccttgaa

SEQ ID NO: 43930 - DNA, 22 bp, Artificial Sequence
  chemically synthesized
tttacattttttatccttgaaa

SEQ ID NO: 43931 - DNA, 22 bp, Artificial Sequence
  chemically synthesized
acattttttatccttgaaaact

SEQ ID NO: 43932 - DNA, 22 bp, Artificial Sequence
  chemically synthesized
cattttttatccttgaaaactc

SEQ ID NO: 43933 - DNA, 22 bp, Artificial Sequence
  chemically synthesized
tttatccttgaaaactcctttt

SEQ ID NO: 43934 - DNA, 22 bp, Artificial Sequence
  chemically synthesized
ttatccttgaaaactcctttta

SEQ ID NO: 43935 - DNA, 22 bp, Artificial Sequence
  chemically synthesized
tatccttgaaaactccttttat

SEQ ID NO: 43936 - DNA, 22 bp, Artificial Sequence
  chemically synthesized
atccttgaaaactccttttatt

SEQ ID NO: 43937 - DNA, 22 bp, Artificial Sequence
  chemically synthesized
tccttgaaaactccttttattt

SEQ ID NO: 43938 - DNA, 22 bp, Artificial Sequence
  chemically synthesized
gaaaactccttttatttgcaac

SEQ ID NO: 43939 - DNA, 22 bp, Artificial Sequence
  chemically synthesized
aaaactccttttatttgcaact

SEQ ID NO: 43940 - DNA, 22 bp, Artificial Sequence
  chemically synthesized
cttttatttgcaactatgcatc

SEQ ID NO: 43941 - DNA, 22 bp, Artificial Sequence
  chemically synthesized
ttatttgcaactatgcatctta

SEQ ID NO: 43942 - DNA, 22 bp, Artificial Sequence
  chemically synthesized
tatttgcaactatgcatcttac

SEQ ID NO: 43943 - DNA, 22 bp, Artificial Sequence
  chemically synthesized
atttgcaactatgcatcttact

SEQ ID NO: 43944 - DNA, 22 bp, Artificial Sequence
  chemically synthesized
tttgcaactatgcatcttactc

SEQ ID NO: 43945 - DNA, 22 bp, Artificial Sequence
  chemically synthesized
gcaactatgcatcttactcaga

SEQ ID NO: 43946 - DNA, 22 bp, Artificial Sequence
  chemically synthesized
caactatgcatcttactcagag

SEQ ID NO: 43947 - DNA, 22 bp, Artificial Sequence
  chemically synthesized
tgcatcttactcagagatctta

SEQ ID NO: 43948 - DNA, 22 bp, Artificial Sequence
  chemically synthesized
actcagagatcttaaaacatcc

SEQ ID NO: 43949 - DNA, 22 bp, Artificial Sequence
  chemically synthesized
ctcagagatcttaaaacatcct

SEQ ID NO: 43950 - DNA, 22 bp, Artificial Sequence
  chemically synthesized
agagatcttaaaacatccttgt

SEQ ID NO: 43951 - DNA, 22 bp, Artificial Sequence
  chemically synthesized
aaaacatccttgtttgttagat

SEQ ID NO: 43952 - DNA, 22 bp, Artificial Sequence
  chemically synthesized
aaacatccttgtttgttagatt

SEQ ID NO: 43953 - DNA, 22 bp, Artificial Sequence
  chemically synthesized
gtttgttagattacgtatttca

SEQ ID NO: 43954 - DNA, 22 bp, Artificial Sequence
  chemically synthesized
tttgttagattacgtatttcaa

SEQ ID NO: 43955 - DNA, 22 bp, Artificial Sequence
  chemically synthesized
gttagattacgtatttcaaatt

SEQ ID NO: 43956 - DNA, 22 bp, Artificial Sequence
  chemically synthesized
ttagattacgtatttcaaattc

SEQ ID NO: 43957 - DNA, 22 bp, Artificial Sequence
  chemically synthesized
gattacgtatttcaaattcata

SEQ ID NO: 43958 - DNA, 22 bp, Artificial Sequence
  chemically synthesized
cgtatttcaaattcatatacac

SEQ ID NO: 43959 - DNA, 22 bp, Artificial Sequence
  chemically synthesized
caaattcatatacactttggta

SEQ ID NO: 43960 - DNA, 22 bp, Artificial Sequence
  chemically synthesized
aaattcatatacactttggtag

SEQ ID NO: 43961 - DNA, 22 bp, Artificial Sequence
  chemically synthesized
atatacactttggtagatgcaa

SEQ ID NO: 43962 - DNA, 22 bp, Artificial Sequence
  chemically synthesized
tggtagatgcaaacatttttat

SEQ ID NO: 43963 - DNA, 22 bp, Artificial Sequence
  chemically synthesized
ggtagatgcaaacatttttatt

SEQ ID NO: 43964 - DNA, 22 bp, Artificial Sequence
  chemically synthesized
gtagatgcaaacatttttattt

SEQ ID NO: 43965 - DNA, 22 bp, Artificial Sequence
  chemically synthesized
ttatttgctgaagaacataagg

SEQ ID NO: 43966 - DNA, 22 bp, Artificial Sequence
  chemically synthesized
tatttgctgaagaacataaggg

SEQ ID NO: 43967 - DNA, 22 bp, Artificial Sequence
  chemically synthesized
atttgctgaagaacataagggg

SEQ ID NO: 43968 - DNA, 22 bp, Artificial Sequence
  chemically synthesized
tttgctgaagaacataaggggg

SEQ ID NO: 43969 - DNA, 22 bp, Artificial Sequence
  chemically synthesized
gctgaagaacataagggggaaa

SEQ ID NO: 43970 - DNA, 22 bp, Artificial Sequence
  chemically synthesized
ctgaagaacataagggggaaat

SEQ ID NO: 43971 - DNA, 22 bp, Artificial Sequence
  chemically synthesized
aagaacataagggggaaataga

SEQ ID NO: 43972 - DNA, 22 bp, Artificial Sequence
  chemically synthesized
tttatttgaagaaacaaatgat

SEQ ID NO: 43973 - DNA, 22 bp, Artificial Sequence
  chemically synthesized
tatttgaagaaacaaatgattt

SEQ ID NO: 43974 - DNA, 22 bp, Artificial Sequence
  chemically synthesized
atttgaagaaacaaatgatttg

SEQ ID NO: 43975 - DNA, 22 bp, Artificial Sequence
  chemically synthesized
tttgaagaaacaaatgatttga

SEQ ID NO: 43976 - DNA, 22 bp, Artificial Sequence
  chemically synthesized
gaagaaacaaatgatttgattt

SEQ ID NO: 43977 - DNA, 22 bp, Artificial Sequence
  chemically synthesized
aagaaacaaatgatttgatttg

SEQ ID NO: 43978 - DNA, 22 bp, Artificial Sequence
  chemically synthesized
gatttgggaaatgaaatgaaaa

SEQ ID NO: 43979 - DNA, 22 bp, Artificial Sequence
  chemically synthesized
atttgggaaatgaaatgaaaag

SEQ ID NO: 43980 - DNA, 22 bp, Artificial Sequence
  chemically synthesized
gggaaatgaaatgaaaagaaaa

SEQ ID NO: 43981 - DNA, 22 bp, Artificial Sequence
  chemically synthesized
ggaaatgaaatgaaaagaaaaa

SEQ ID NO: 43982 - DNA, 22 bp, Artificial Sequence
  chemically synthesized
actaattcgctacttcttttac

SEQ ID NO: 43983 - DNA, 22 bp, Artificial Sequence
  chemically synthesized
attcgctacttcttttactcat

SEQ ID NO: 43984 - DNA, 22 bp, Artificial Sequence
  chemically synthesized
gctacttcttttactcatctga

SEQ ID NO: 43985 - DNA, 22 bp, Artificial Sequence
  chemically synthesized
cttcttttactcatctgaggcc

SEQ ID NO: 43986 - DNA, 22 bp, Artificial Sequence
  chemically synthesized
cttttactcatctgaggccttc

SEQ ID NO: 43987 - DNA, 22 bp, Artificial Sequence
  chemically synthesized
ttttactcatctgaggccttca

SEQ ID NO: 43988 - DNA, 22 bp, Artificial Sequence
  chemically synthesized
ttactcatctgaggccttcaga

SEQ ID NO: 43989 - DNA, 22 bp, Artificial Sequence
  chemically synthesized
tactcatctgaggccttcagat

SEQ ID NO: 43990 - DNA, 22 bp, Artificial Sequence
  chemically synthesized
actcatctgaggccttcagata

SEQ ID NO: 43991 - DNA, 22 bp, Artificial Sequence
  chemically synthesized
ctcatctgaggccttcagatag

SEQ ID NO: 43992 - DNA, 22 bp, Artificial Sequence
  chemically synthesized
atctgaggccttcagatagtcc

SEQ ID NO: 43993 - DNA, 22 bp, Artificial Sequence
  chemically synthesized
aggccttcagatagtcccccat

SEQ ID NO: 43994 - DNA, 22 bp, Artificial Sequence
  chemically synthesized
cagatagtcccccatatagcct

SEQ ID NO: 43995 - DNA, 22 bp, Artificial Sequence
  chemically synthesized
agatagtcccccatatagcctt

SEQ ID NO: 43996 - DNA, 22 bp, Artificial Sequence
  chemically synthesized
agagtgtttaaaatatgattat

SEQ ID NO: 43997 - DNA, 22 bp, Artificial Sequence
  chemically synthesized
gagtgtttaaaatatgattatg

SEQ ID NO: 43998 - DNA, 22 bp, Artificial Sequence
  chemically synthesized
aaaatatgattatgctctttca

SEQ ID NO: 43999 - DNA, 22 bp, Artificial Sequence
  chemically synthesized
aaatatgattatgctctttcag

SEQ ID NO: 44000 - DNA, 22 bp, Artificial Sequence
  chemically synthesized
tgctctttcagtctattagaaa

SEQ ID NO: 44001 - DNA, 22 bp, Artificial Sequence
  chemically synthesized
tttcagtctattagaaataaaa

SEQ ID NO: 44002 - DNA, 22 bp, Artificial Sequence
  chemically synthesized
tcagtctattagaaataaaaac

SEQ ID NO: 44003 - DNA, 22 bp, Artificial Sequence
  chemically synthesized
cagtctattagaaataaaaaca

SEQ ID NO: 44004 - DNA, 22 bp, Artificial Sequence
  chemically synthesized
agtctattagaaataaaaacat

SEQ ID NO: 44005 - DNA, 22 bp, Artificial Sequence
  chemically synthesized
ttagaaataaaaacataaagct

SEQ ID NO: 44006 - DNA, 22 bp, Artificial Sequence
  chemically synthesized
gaaataaaaacataaagcttaa

SEQ ID NO: 44007 - DNA, 22 bp, Artificial Sequence
  chemically synthesized
aaaaaatttcaagggaaggggc

SEQ ID NO: 44008 - DNA, 22 bp, Artificial Sequence
  chemically synthesized
aaaaatttcaagggaaggggct

SEQ ID NO: 44009 - DNA, 22 bp, Artificial Sequence
  chemically synthesized
caagggaaggggcttgaagatt

SEQ ID NO: 44010 - DNA, 22 bp, Artificial Sequence
  chemically synthesized
aagggaaggggcttgaagatta

SEQ ID NO: 44011 - DNA, 22 bp, Artificial Sequence
  chemically synthesized
gaagattactgactaagggcag

SEQ ID NO: 44012 - DNA, 22 bp, Artificial Sequence
  chemically synthesized
aagattactgactaagggcagc

SEQ ID NO: 44013 - DNA, 22 bp, Artificial Sequence
  chemically synthesized
ctgactaagggcagctgacact

SEQ ID NO: 44014 - DNA, 22 bp, Artificial Sequence
  chemically synthesized
actaagggcagctgacactcac

SEQ ID NO: 44015 - DNA, 22 bp, Artificial Sequence
  chemically synthesized
agggcagctgacactcacctcc

SEQ ID NO: 44016 - DNA, 22 bp, Artificial Sequence
  chemically synthesized
acactcacctcctccacaaaga

SEQ ID NO: 44017 - DNA, 22 bp, Artificial Sequence
  chemically synthesized
acctcctccacaaagaaccaaa

SEQ ID NO: 44018 - DNA, 22 bp, Artificial Sequence
  chemically synthesized
ctccacaaagaaccaaaatagt

SEQ ID NO: 44019 - DNA, 22 bp, Artificial Sequence
  chemically synthesized
cacaaagaaccaaaatagtaag

SEQ ID NO: 44020 - DNA, 22 bp, Artificial Sequence
  chemically synthesized
tggaattcaacagagaagtgac

SEQ ID NO: 44021 - DNA, 22 bp, Artificial Sequence
  chemically synthesized
gaattcaacagagaagtgacag

SEQ ID NO: 44022 - DNA, 22 bp, Artificial Sequence
  chemically synthesized
aacagagaagtgacaggaagca

SEQ ID NO: 44023 - DNA, 22 bp, Artificial Sequence
  chemically synthesized
aggcaatgaaggggagggaagc

SEQ ID NO: 44024 - DNA, 22 bp, Artificial Sequence
  chemically synthesized
cccagtagggatcctctgtgag

SEQ ID NO: 44025 - DNA, 22 bp, Artificial Sequence
  chemically synthesized
tgtgaggccagagaggctcccc

SEQ ID NO: 44026 - DNA, 22 bp, Artificial Sequence
  chemically synthesized
tgaggccagagaggctccccag

SEQ ID NO: 44027 - DNA, 22 bp, Artificial Sequence
  chemically synthesized
cccagtgcatcgaaagttaagt

SEQ ID NO: 44028 - DNA, 22 bp, Artificial Sequence
  chemically synthesized
agtgactgactcccagtggtcc

SEQ ID NO: 44029 - DNA, 22 bp, Artificial Sequence
  chemically synthesized
actcccagtggtccacatctgc

SEQ ID NO: 44030 - DNA, 22 bp, Artificial Sequence
  chemically synthesized
ccagtggtccacatctgcatta

SEQ ID NO: 44031 - DNA, 22 bp, Artificial Sequence
  chemically synthesized
cattatggactccaggaatcct

SEQ ID NO: 44032 - DNA, 22 bp, Artificial Sequence
  chemically synthesized
tggactccaggaatcctagcca

SEQ ID NO: 44033 - DNA, 22 bp, Artificial Sequence
  chemically synthesized
caggaatcctagccacaggaga

SEQ ID NO: 44034 - DNA, 22 bp, Artificial Sequence
  chemically synthesized
gccacaggagagtcccttgacc

SEQ ID NO: 44035 - DNA, 22 bp, Artificial Sequence
  chemically synthesized
gaccatgcaggccttgagacta

SEQ ID NO: 44036 - DNA, 22 bp, Artificial Sequence
  chemically synthesized
accatgcaggccttgagactat

SEQ ID NO: 44037 - DNA, 22 bp, Artificial Sequence
  chemically synthesized
gagactatcataaggaactgcc

SEQ ID NO: 44038 - DNA, 22 bp, Artificial Sequence
  chemically synthesized
agactatcataaggaactgccc

SEQ ID NO: 44039 - DNA, 22 bp, Artificial Sequence
  chemically synthesized
tcataaggaactgcccagcaat

SEQ ID NO: 44040 - DNA, 22 bp, Artificial Sequence
  chemically synthesized
cccagcaatcgcacaaaggcat

SEQ ID NO: 44041 - DNA, 22 bp, Artificial Sequence
  chemically synthesized
ctccagagaaggagctctcact

SEQ ID NO: 44042 - DNA, 22 bp, Artificial Sequence
  chemically synthesized
cagagaaggagctctcactggg

SEQ ID NO: 44043 - DNA, 22 bp, Artificial Sequence
  chemically synthesized
tcactgggtcccacccctgcca

SEQ ID NO: 44044 - DNA, 22 bp, Artificial Sequence
  chemically synthesized
actgggtcccacccctgccatc

SEQ ID NO: 44045 - DNA, 22 bp, Artificial Sequence
  chemically synthesized
ggtcccacccctgccatcccca

SEQ ID NO: 44046 - DNA, 22 bp, Artificial Sequence
  chemically synthesized
ccatccccattactgagcagca

SEQ ID NO: 44047 - DNA, 22 bp, Artificial Sequence
  chemically synthesized
ctgagcagcaaggtgccatttt

SEQ ID NO: 44048 - DNA, 22 bp, Artificial Sequence
  chemically synthesized
agcagcaaggtgccattttgag

SEQ ID NO: 44049 - DNA, 22 bp, Artificial Sequence
  chemically synthesized
tgagagcccaacacccaccaga

SEQ ID NO: 44050 - DNA, 22 bp, Artificial Sequence
  chemically synthesized
gagagcccaacacccaccagat

SEQ ID NO: 44051 - DNA, 22 bp, Artificial Sequence
  chemically synthesized
agagcccaacacccaccagatg

SEQ ID NO: 44052 - DNA, 22 bp, Artificial Sequence
  chemically synthesized
ctcagaccccaacatcatctgc

SEQ ID NO: 44053 - DNA, 22 bp, Artificial Sequence
  chemically synthesized
agaccccaacatcatctgcatc

SEQ ID NO: 44054 - DNA, 22 bp, Artificial Sequence
  chemically synthesized
catctctacatccctgaagctc

SEQ ID NO: 44055 - DNA, 22 bp, Artificial Sequence
  chemically synthesized
tacatccctgaagctctgctga

SEQ ID NO: 44056 - DNA, 22 bp, Artificial Sequence
  chemically synthesized
catccctgaagctctgctgaca

SEQ ID NO: 44057 - DNA, 22 bp, Artificial Sequence
  chemically synthesized
aagctctgctgacatcccccac

SEQ ID NO: 44058 - DNA, 22 bp, Artificial Sequence
  chemically synthesized
tgctgacatcccccacccacag

SEQ ID NO: 44059 - DNA, 22 bp, Artificial Sequence
  chemically synthesized
ctgacatcccccacccacagct

SEQ ID NO: 44060 - DNA, 22 bp, Artificial Sequence
  chemically synthesized
acatcccccacccacagctgag

SEQ ID NO: 44061 - DNA, 22 bp, Artificial Sequence
  chemically synthesized
agtgctactgctggctgctgtc

SEQ ID NO: 44062 - DNA, 22 bp, Artificial Sequence
  chemically synthesized
ctgctggctgctgtcaccaggg

SEQ ID NO: 44063 - DNA, 22 bp, Artificial Sequence
  chemically synthesized
ctggctgctgtcaccagggata

SEQ ID NO: 44064 - DNA, 22 bp, Artificial Sequence
  chemically synthesized
gctgctgtcaccagggataaag

SEQ ID NO: 44065 - DNA, 22 bp, Artificial Sequence
  chemically synthesized
ctgtcaccagggataaagtgtg

SEQ ID NO: 44066 - DNA, 22 bp, Artificial Sequence
  chemically synthesized
tcaccagggataaagtgtgtca

SEQ ID NO: 44067 - DNA, 22 bp, Artificial Sequence
  chemically synthesized
gaagtggactcccccaccccca

SEQ ID NO: 44068 - DNA, 22 bp, Artificial Sequence
  chemically synthesized
ccccacccccagtagcagggct

SEQ ID NO: 44069 - DNA, 22 bp, Artificial Sequence
  chemically synthesized
ctacacatttataagctcccta

SEQ ID NO: 44070 - DNA, 22 bp, Artificial Sequence
  chemically synthesized
cacatttataagctccctaaga

SEQ ID NO: 44071 - DNA, 22 bp, Artificial Sequence
  chemically synthesized
ataagctccctaagaaaatgct

SEQ ID NO: 44072 - DNA, 22 bp, Artificial Sequence
  chemically synthesized
taagctccctaagaaaatgcta

SEQ ID NO: 44073 - DNA, 22 bp, Artificial Sequence
  chemically synthesized
cctaagaaaatgctaccccact

SEQ ID NO: 44074 - DNA, 22 bp, Artificial Sequence
  chemically synthesized
agaaaatgctaccccacttgca

SEQ ID NO: 44075 - DNA, 22 bp, Artificial Sequence
  chemically synthesized
ccccacttgcagccaccatctg

SEQ ID NO: 44076 - DNA, 22 bp, Artificial Sequence
  chemically synthesized
gcagccaccatctggggctgaa

SEQ ID NO: 44077 - DNA, 22 bp, Artificial Sequence
  chemically synthesized
cagccaccatctggggctgaaa

SEQ ID NO: 44078 - DNA, 22 bp, Artificial Sequence
  chemically synthesized
gggctgaaacacatgcccacca

SEQ ID NO: 44079 - DNA, 22 bp, Artificial Sequence
  chemically synthesized
aaacacatgcccaccagcaacc

SEQ ID NO: 44080 - DNA, 22 bp, Artificial Sequence
  chemically synthesized
atagctgctgccactgaaagca

SEQ ID NO: 44081 - DNA, 22 bp, Artificial Sequence
  chemically synthesized
tagctgctgccactgaaagcaa

SEQ ID NO: 44082 - DNA, 22 bp, Artificial Sequence
  chemically synthesized
ctgccactgaaagcaacacacc

SEQ ID NO: 44083 - DNA, 22 bp, Artificial Sequence
  chemically synthesized
ccactgaaagcaacacaccccg

SEQ ID NO: 44084 - DNA, 22 bp, Artificial Sequence
  chemically synthesized
aaagcaacacaccccgcacccc

SEQ ID NO: 44085 - DNA, 22 bp, Artificial Sequence
  chemically synthesized
caagagcagggcaacaatgcag

SEQ ID NO: 44086 - DNA, 22 bp, Artificial Sequence
  chemically synthesized
aagagcagggcaacaatgcagt

SEQ ID NO: 44087 - DNA, 22 bp, Artificial Sequence
  chemically synthesized
ctaattcactcaggcattctgc

SEQ ID NO: 44088 - DNA, 22 bp, Artificial Sequence
  chemically synthesized
attcactcaggcattctgctgg

SEQ ID NO: 44089 - DNA, 22 bp, Artificial Sequence
  chemically synthesized
actcaggcattctgctgggggc

SEQ ID NO: 44090 - DNA, 22 bp, Artificial Sequence
  chemically synthesized
aggcattctgctgggggcctga

SEQ ID NO: 44091 - DNA, 22 bp, Artificial Sequence
  chemically synthesized
tgctgggggcctgaggatcact

SEQ ID NO: 44092 - DNA, 22 bp, Artificial Sequence
  chemically synthesized
ctgggggcctgaggatcactcc

SEQ ID NO: 44093 - DNA, 22 bp, Artificial Sequence
  chemically synthesized
ggggcctgaggatcactccact

SEQ ID NO: 44094 - DNA, 22 bp, Artificial Sequence
  chemically synthesized
aggatcactccactccagccta

SEQ ID NO: 44095 - DNA, 22 bp, Artificial Sequence
  chemically synthesized
cactccagcctatgatagccgg

SEQ ID NO: 44096 - DNA, 22 bp, Artificial Sequence
  chemically synthesized
cagcctatgatagccggtgtcc

SEQ ID NO: 44097 - DNA, 22 bp, Artificial Sequence
  chemically synthesized
tgatagccggtgtccacacaca

SEQ ID NO: 44098 - DNA, 22 bp, Artificial Sequence
  chemically synthesized
agtggcctgaggtcaggaacac

SEQ ID NO: 44099 - DNA, 22 bp, Artificial Sequence
  chemically synthesized
aggtcaggaacacccagcctgg

SEQ ID NO: 44100 - DNA, 22 bp, Artificial Sequence
  chemically synthesized
gctttgccttcctcaatgccta

SEQ ID NO: 44101 - DNA, 22 bp, Artificial Sequence
  chemically synthesized
tgccttcctcaatgcctaagca

SEQ ID NO: 44102 - DNA, 22 bp, Artificial Sequence
  chemically synthesized
gccttcctcaatgcctaagcaa

SEQ ID NO: 44103 - DNA, 22 bp, Artificial Sequence
  chemically synthesized
ccttcctcaatgcctaagcaag

SEQ ID NO: 44104 - DNA, 22 bp, Artificial Sequence
  chemically synthesized
cctcaatgcctaagcaagttgt

SEQ ID NO: 44105 - DNA, 22 bp, Artificial Sequence
  chemically synthesized
ctcaatgcctaagcaagttgtc

SEQ ID NO: 44106 - DNA, 22 bp, Artificial Sequence
  chemically synthesized
aatgcctaagcaagttgtctgg

SEQ ID NO: 44107 - DNA, 22 bp, Artificial Sequence
  chemically synthesized
agcaagttgtctgggaacccag

SEQ ID NO: 44108 - DNA, 22 bp, Artificial Sequence
  chemically synthesized
tctgggaacccagagacagcct

SEQ ID NO: 44109 - DNA, 22 bp, Artificial Sequence
  chemically synthesized
ggaacccagagacagccttgtg

SEQ ID NO: 44110 - DNA, 22 bp, Artificial Sequence
  chemically synthesized
gtgccatccaccatgactggta

SEQ ID NO: 44111 - DNA, 22 bp, Artificial Sequence
  chemically synthesized
tgccatccaccatgactggtac

SEQ ID NO: 44112 - DNA, 22 bp, Artificial Sequence
  chemically synthesized
gtacctaagcaaccctcccaga

SEQ ID NO: 44113 - DNA, 22 bp, Artificial Sequence
  chemically synthesized
agcaaccctcccagaagcctga

SEQ ID NO: 44114 - DNA, 22 bp, Artificial Sequence
  chemically synthesized
ccagaagcctgatgatgggcct

SEQ ID NO: 44115 - DNA, 22 bp, Artificial Sequence
  chemically synthesized
atgatgggcctacccaatctgc

SEQ ID NO: 44116 - DNA, 22 bp, Artificial Sequence
  chemically synthesized
cccaatctgccactgccatcac

SEQ ID NO: 44117 - DNA, 22 bp, Artificial Sequence
  chemically synthesized
ccactgccatcacaactggcac

SEQ ID NO: 44118 - DNA, 22 bp, Artificial Sequence
  chemically synthesized
ccatcacaactggcacctcctg

SEQ ID NO: 44119 - DNA, 22 bp, Artificial Sequence
  chemically synthesized
gcacctcctgcatgtgccacct

SEQ ID NO: 44120 - DNA, 22 bp, Artificial Sequence
  chemically synthesized
ctgcatgtgccacctgtgggtc

SEQ ID NO: 44121 - DNA, 22 bp, Artificial Sequence
  chemically synthesized
catgtgccacctgtgggtctga

SEQ ID NO: 44122 - DNA, 22 bp, Artificial Sequence
  chemically synthesized
tgggtctgaagactggctcatt

SEQ ID NO: 44123 - DNA, 22 bp, Artificial Sequence
  chemically synthesized
aagactggctcattcagccctt

SEQ ID NO: 44124 - DNA, 22 bp, Artificial Sequence
  chemically synthesized
gctcattcagcccttgcagcca

SEQ ID NO: 44125 - DNA, 22 bp, Artificial Sequence
  chemically synthesized
attcagcccttgcagccaccac

SEQ ID NO: 44126 - DNA, 22 bp, Artificial Sequence
  chemically synthesized
agcccttgcagccaccaccaac

SEQ ID NO: 44127 - DNA, 22 bp, Artificial Sequence
  chemically synthesized
gcagccaccaccaacaccagtg

SEQ ID NO: 44128 - DNA, 22 bp, Artificial Sequence
  chemically synthesized
cagccaccaccaacaccagtgc

SEQ ID NO: 44129 - DNA, 22 bp, Artificial Sequence
  chemically synthesized
cttgggagccagagggttgtcc

SEQ ID NO: 44130 - DNA, 22 bp, Artificial Sequence
  chemically synthesized
gggagccagagggttgtcctgc

SEQ ID NO: 44131 - DNA, 22 bp, Artificial Sequence
  chemically synthesized
ggagccagagggttgtcctgca

SEQ ID NO: 44132 - DNA, 22 bp, Artificial Sequence
  chemically synthesized
tcctgcagttgctacagccatc

SEQ ID NO: 44133 - DNA, 22 bp, Artificial Sequence
  chemically synthesized
cagttgctacagccatcaccca

SEQ ID NO: 44134 - DNA, 22 bp, Artificial Sequence
  chemically synthesized
ctacagccatcacccacaccac

SEQ ID NO: 44135 - DNA, 22 bp, Artificial Sequence
  chemically synthesized
cagccatcacccacaccacacc

SEQ ID NO: 44136 - DNA, 22 bp, Artificial Sequence
  chemically synthesized
tccagaagcctgaggacccaca

SEQ ID NO: 44137 - DNA, 22 bp, Artificial Sequence
  chemically synthesized
aggacccacacaccagcccagt

SEQ ID NO: 44138 - DNA, 22 bp, Artificial Sequence
  chemically synthesized
ctatggccactactgacaccca

SEQ ID NO: 44139 - DNA, 22 bp, Artificial Sequence
  chemically synthesized
tggccactactgacacccaagc

SEQ ID NO: 44140 - DNA, 22 bp, Artificial Sequence
  chemically synthesized
ctgacacccaagcaaactgcct

SEQ ID NO: 44141 - DNA, 22 bp, Artificial Sequence
  chemically synthesized
acacccaagcaaactgcctgaa

SEQ ID NO: 44142 - DNA, 22 bp, Artificial Sequence
  chemically synthesized
cctgaaggccaaagaatcaacc

SEQ ID NO: 44143 - DNA, 22 bp, Artificial Sequence
  chemically synthesized
aaggccaaagaatcaacccaac

SEQ ID NO: 44144 - DNA, 22 bp, Artificial Sequence
  chemically synthesized
gactcattaccatcagtgccaa

SEQ ID NO: 44145 - DNA, 22 bp, Artificial Sequence
  chemically synthesized
attaccatcagtgccaatgtac

SEQ ID NO: 44146 - DNA, 22 bp, Artificial Sequence
  chemically synthesized
ccatcagtgccaatgtacacag

SEQ ID NO: 44147 - DNA, 22 bp, Artificial Sequence
  chemically synthesized
ggcccaccaccaccactggggc

SEQ ID NO: 44148 - DNA, 22 bp, Artificial Sequence
  chemically synthesized
gggccaaggactggcccacttg

SEQ ID NO: 44149 - DNA, 22 bp, Artificial Sequence
  chemically synthesized
gcccacttgatattcttgtctc

SEQ ID NO: 44150 - DNA, 22 bp, Artificial Sequence
  chemically synthesized
gatattcttgtctccagcacaa

SEQ ID NO: 44151 - DNA, 22 bp, Artificial Sequence
  chemically synthesized
atattcttgtctccagcacaac

SEQ ID NO: 44152 - DNA, 22 bp, Artificial Sequence
  chemically synthesized
ttgtctccagcacaacctcatc

SEQ ID NO: 44153 - DNA, 22 bp, Artificial Sequence
  chemically synthesized
gtctccagcacaacctcatcac

SEQ ID NO: 44154 - DNA, 22 bp, Artificial Sequence
  chemically synthesized
tctccagcacaacctcatcacc

SEQ ID NO: 44155 - DNA, 22 bp, Artificial Sequence
  chemically synthesized
cagcacaacctcatcaccacct

SEQ ID NO: 44156 - DNA, 22 bp, Artificial Sequence
  chemically synthesized
atcaccaccttcactaacaaat

SEQ ID NO: 44157 - DNA, 22 bp, Artificial Sequence
  chemically synthesized
cactaacaaatgcaccctaagc

SEQ ID NO: 44158 - DNA, 22 bp, Artificial Sequence
  chemically synthesized
actaacaaatgcaccctaagcc

SEQ ID NO: 44159 - DNA, 22 bp, Artificial Sequence
  chemically synthesized
acaaatgcaccctaagccactg

SEQ ID NO: 44160 - DNA, 22 bp, Artificial Sequence
  chemically synthesized
agccactgaaaaaatcacagac

SEQ ID NO: 44161 - DNA, 22 bp, Artificial Sequence
  chemically synthesized
aaaaaatcacagacactgatga

SEQ ID NO: 44162 - DNA, 22 bp, Artificial Sequence
  chemically synthesized
atgatactgttggcagctgaaa

SEQ ID NO: 44163 - DNA, 22 bp, Artificial Sequence
  chemically synthesized
ttggcagctgaaaaaaaataat

SEQ ID NO: 44164 - DNA, 22 bp, Artificial Sequence
  chemically synthesized
gcagctgaaaaaaaataatatg

SEQ ID NO: 44165 - DNA, 22 bp, Artificial Sequence
  chemically synthesized
aaaaaaaataatatgaagacta

SEQ ID NO: 44166 - DNA, 22 bp, Artificial Sequence
  chemically synthesized
tgctgctgtatgcacctagaaa

SEQ ID NO: 44167 - DNA, 22 bp, Artificial Sequence
  chemically synthesized
ctgtatgcacctagaaatcaaa

SEQ ID NO: 44168 - DNA, 22 bp, Artificial Sequence
  chemically synthesized
tatgcacctagaaatcaaaatc

SEQ ID NO: 44169 - DNA, 22 bp, Artificial Sequence
  chemically synthesized
gaaatcaaaatcaaagtgccct

SEQ ID NO: 44170 - DNA, 22 bp, Artificial Sequence
  chemically synthesized
ctcaatcaacaccaagatacat

SEQ ID NO: 44171 - DNA, 22 bp, Artificial Sequence
  chemically synthesized
aatcaacaccaagatacatctt

SEQ ID NO: 44172 - DNA, 22 bp, Artificial Sequence
  chemically synthesized
cagaaaaaagtcttcccctaca

SEQ ID NO: 44173 - DNA, 22 bp, Artificial Sequence
  chemically synthesized
agaaaaaagtcttcccctacaa

SEQ ID NO: 44174 - DNA, 22 bp, Artificial Sequence
  chemically synthesized
cccctacaaaaacaaatttaca

SEQ ID NO: 44175 - DNA, 22 bp, Artificial Sequence
  chemically synthesized
ccctacaaaaacaaatttacaa

SEQ ID NO: 44176 - DNA, 22 bp, Artificial Sequence
  chemically synthesized
caaaaacaaatttacaaaactg

SEQ ID NO: 44177 - DNA, 22 bp, Artificial Sequence
  chemically synthesized
acaaaactggaagcagcaatca

SEQ ID NO: 44178 - DNA, 22 bp, Artificial Sequence
  chemically synthesized
caaaactggaagcagcaatcat

SEQ ID NO: 44179 - DNA, 22 bp, Artificial Sequence
  chemically synthesized
gaagcagcaatcattacaccag

SEQ ID NO: 44180 - DNA, 22 bp, Artificial Sequence
  chemically synthesized
caccagatgcagagatatcaat

SEQ ID NO: 44181 - DNA, 22 bp, Artificial Sequence
  chemically synthesized
ccaaaggaatttaataattctt

SEQ ID NO: 44182 - DNA, 22 bp, Artificial Sequence
  chemically synthesized
caaaggaatttaataattcttc

SEQ ID NO: 44183 - DNA, 22 bp, Artificial Sequence
  chemically synthesized
aataattcttcagcaacataag

SEQ ID NO: 44184 - DNA, 22 bp, Artificial Sequence
  chemically synthesized
ataattcttcagcaacataagc

SEQ ID NO: 44185 - DNA, 22 bp, Artificial Sequence
  chemically synthesized
ttcagcaacataagccagtgga

SEQ ID NO: 44186 - DNA, 22 bp, Artificial Sequence
  chemically synthesized
cagcaacataagccagtggaaa

SEQ ID NO: 44187 - DNA, 22 bp, Artificial Sequence
  chemically synthesized
agcaacataagccagtggaaaa

SEQ ID NO: 44188 - DNA, 22 bp, Artificial Sequence
  chemically synthesized
ataaaattctggaaaaaagaat

SEQ ID NO: 44189 - DNA, 22 bp, Artificial Sequence
  chemically synthesized
taaaattctggaaaaaagaatc

SEQ ID NO: 44190 - DNA, 22 bp, Artificial Sequence
  chemically synthesized
tggaaaaaagaatccaaaatgt

SEQ ID NO: 44191 - DNA, 22 bp, Artificial Sequence
  chemically synthesized
gaaaaaagaatccaaaatgttg

SEQ ID NO: 44192 - DNA, 22 bp, Artificial Sequence
  chemically synthesized
atattaaggaagctcagtgaga

SEQ ID NO: 44193 - DNA, 22 bp, Artificial Sequence
  chemically synthesized
aggaagctcagtgagacacaag

SEQ ID NO: 44194 - DNA, 22 bp, Artificial Sequence
  chemically synthesized
agtgagacacaagagaactcag

SEQ ID NO: 44195 - DNA, 22 bp, Artificial Sequence
  chemically synthesized
agataaacaataaaaagaaatc

SEQ ID NO: 44196 - DNA, 22 bp, Artificial Sequence
  chemically synthesized
aggatatgaatgagaaatttac

SEQ ID NO: 44197 - DNA, 22 bp, Artificial Sequence
  chemically synthesized
acccaagagatagatacaacaa

SEQ ID NO: 44198 - DNA, 22 bp, Artificial Sequence
  chemically synthesized
cccaagagatagatacaacaag

SEQ ID NO: 44199 - DNA, 22 bp, Artificial Sequence
  chemically synthesized
tgtaactgaagagtttattgaa

SEQ ID NO: 44200 - DNA, 22 bp, Artificial Sequence
  chemically synthesized
taactgaagagtttattgaaag

SEQ ID NO: 44201 - DNA, 22 bp, Artificial Sequence
  chemically synthesized
aagagtttattgaaagaaatac

SEQ ID NO: 44202 - DNA, 22 bp, Artificial Sequence
  chemically synthesized
attgaaagaaatacaaaataca

SEQ ID NO: 44203 - DNA, 22 bp, Artificial Sequence
  chemically synthesized
ttgaaagaaatacaaaatacat

SEQ ID NO: 44204 - DNA, 22 bp, Artificial Sequence
  chemically synthesized
aaagaaatacaaaatacattca

SEQ ID NO: 44205 - DNA, 22 bp, Artificial Sequence
  chemically synthesized
aaaaacttcaacaatagatcag

SEQ ID NO: 44206 - DNA, 22 bp, Artificial Sequence
  chemically synthesized
caacaatagatcagatcaagca

SEQ ID NO: 44207 - DNA, 22 bp, Artificial Sequence
  chemically synthesized
aacaatagatcagatcaagcag

SEQ ID NO: 44208 - DNA, 22 bp, Artificial Sequence
  chemically synthesized
cagaacttgaagacaggtcttt

SEQ ID NO: 44209 - DNA, 22 bp, Artificial Sequence
  chemically synthesized
agaacttgaagacaggtctttt

SEQ ID NO: 44210 - DNA, 22 bp, Artificial Sequence
  chemically synthesized
gaagacaggtcttttaaaatta

SEQ ID NO: 44211 - DNA, 22 bp, Artificial Sequence
  chemically synthesized
aagacaggtcttttaaaattag

SEQ ID NO: 44212 - DNA, 22 bp, Artificial Sequence
  chemically synthesized
ttaaaattagctggtcaaatga

SEQ ID NO: 44213 - DNA, 22 bp, Artificial Sequence
  chemically synthesized
taaaattagctggtcaaatgat

SEQ ID NO: 44214 - DNA, 22 bp, Artificial Sequence
  chemically synthesized
aaaattagctggtcaaatgata

SEQ ID NO: 44215 - DNA, 22 bp, Artificial Sequence
  chemically synthesized
aaattagctggtcaaatgatag

SEQ ID NO: 44216 - DNA, 22 bp, Artificial Sequence
  chemically synthesized
gctggtcaaatgatagaaagga

SEQ ID NO: 44217 - DNA, 22 bp, Artificial Sequence
  chemically synthesized
gtcaaatgatagaaaggaaaaa

SEQ ID NO: 44218 - DNA, 22 bp, Artificial Sequence
  chemically synthesized
taaagtgaacaaatattcaaat

SEQ ID NO: 44219 - DNA, 22 bp, Artificial Sequence
  chemically synthesized
aaatttgcagtttcccagaagg

SEQ ID NO: 44220 - DNA, 22 bp, Artificial Sequence
  chemically synthesized
gcagtttcccagaaggtaaaga

SEQ ID NO: 44221 - DNA, 22 bp, Artificial Sequence
  chemically synthesized
cagtttcccagaaggtaaagag

SEQ ID NO: 44222 - DNA, 22 bp, Artificial Sequence
  chemically synthesized
cccagaaggtaaagagaacatg

SEQ ID NO: 44223 - DNA, 22 bp, Artificial Sequence
  chemically synthesized
ccagaaggtaaagagaacatga

SEQ ID NO: 44224 - DNA, 22 bp, Artificial Sequence
  chemically synthesized
cgtaacaacacaatagctgaaa

SEQ ID NO: 44225 - DNA, 22 bp, Artificial Sequence
  chemically synthesized
aaaacttgtcaagtctagcaag

SEQ ID NO: 44226 - DNA, 22 bp, Artificial Sequence
  chemically synthesized
gtcaagtctagcaagaaatgta

SEQ ID NO: 44227 - DNA, 22 bp, Artificial Sequence
  chemically synthesized
tcaagtctagcaagaaatgtag

SEQ ID NO: 44228 - DNA, 22 bp, Artificial Sequence
  chemically synthesized
gcaagaaatgtagacatccaga

SEQ ID NO: 44229 - DNA, 22 bp, Artificial Sequence
  chemically synthesized
ccaaataatataatgcaaaaag

SEQ ID NO: 44230 - DNA, 22 bp, Artificial Sequence
  chemically synthesized
ttctccacagcacattatagtc

SEQ ID NO: 44231 - DNA, 22 bp, Artificial Sequence
  chemically synthesized
ctccacagcacattatagtcaa

SEQ ID NO: 44232 - DNA, 22 bp, Artificial Sequence
  chemically synthesized
tccacagcacattatagtcaaa

SEQ ID NO: 44233 - DNA, 22 bp, Artificial Sequence
  chemically synthesized
cacagcacattatagtcaaact

SEQ ID NO: 44234 - DNA, 22 bp, Artificial Sequence
  chemically synthesized
tagtcaaactgtcaaaagccaa

SEQ ID NO: 44235 - DNA, 22 bp, Artificial Sequence
  chemically synthesized
tcaaaagccaaagagtaagaac

SEQ ID NO: 44236 - DNA, 22 bp, Artificial Sequence
  chemically synthesized
taaaacagcaagcaaaatgtct

SEQ ID NO: 44237 - DNA, 22 bp, Artificial Sequence
  chemically synthesized
aaacagcaagcaaaatgtctag

SEQ ID NO: 44238 - DNA, 22 bp, Artificial Sequence
  chemically synthesized
gtcacttataagggaacttcca

SEQ ID NO: 44239 - DNA, 22 bp, Artificial Sequence
  chemically synthesized
ataagggaacttccacaagatt

SEQ ID NO: 44240 - DNA, 22 bp, Artificial Sequence
  chemically synthesized
taagggaacttccacaagatta

SEQ ID NO: 44241 - DNA, 22 bp, Artificial Sequence
  chemically synthesized
ccacaagattaacagattaaca

SEQ ID NO: 44242 - DNA, 22 bp, Artificial Sequence
  chemically synthesized
cacaagattaacagattaacag

SEQ ID NO: 44243 - DNA, 22 bp, Artificial Sequence
  chemically synthesized
acagattaacagcagatttctc

SEQ ID NO: 44244 - DNA, 22 bp, Artificial Sequence
  chemically synthesized
acagcagatttctcagcagaaa

SEQ ID NO: 44245 - DNA, 22 bp, Artificial Sequence
  chemically synthesized
ctcagcagaaacctcacaggcc

SEQ ID NO: 44246 - DNA, 22 bp, Artificial Sequence
  chemically synthesized
tcagcagaaacctcacaggcca

SEQ ID NO: 44247 - DNA, 22 bp, Artificial Sequence
  chemically synthesized
agcagaaacctcacaggccagg

SEQ ID NO: 44248 - DNA, 22 bp, Artificial Sequence
  chemically synthesized
acaggccaggagaagatgggat

SEQ ID NO: 44249 - DNA, 22 bp, Artificial Sequence
  chemically synthesized
aaaatagtgaaagaaaaaaatg

SEQ ID NO: 44250 - DNA, 22 bp, Artificial Sequence
  chemically synthesized
tacccagcaacattgttcttca

SEQ ID NO: 44251 - DNA, 22 bp, Artificial Sequence
  chemically synthesized
ttcttcaaaaatgaaggataaa

SEQ ID NO: 44252 - DNA, 22 bp, Artificial Sequence
  chemically synthesized
ttcaaaaatgaaggataaataa

SEQ ID NO: 44253 - DNA, 22 bp, Artificial Sequence
  chemically synthesized
caaaaatgaaggataaataaaa

SEQ ID NO: 44254 - DNA, 22 bp, Artificial Sequence
  chemically synthesized
aaaaatgaaggataaataaaat

SEQ ID NO: 44255 - DNA, 22 bp, Artificial Sequence
  chemically synthesized
ttctgggcaagaaaaatttgaa

SEQ ID NO: 44256 - DNA, 22 bp, Artificial Sequence
  chemically synthesized
tctgggcaagaaaaatttgaag

SEQ ID NO: 44257 - DNA, 22 bp, Artificial Sequence
  chemically synthesized
ctgggcaagaaaaatttgaagg

SEQ ID NO: 44258 - DNA, 22 bp, Artificial Sequence
  chemically synthesized
tgggcaagaaaaatttgaagga

SEQ ID NO: 44259 - DNA, 22 bp, Artificial Sequence
  chemically synthesized
ggcaagaaaaatttgaaggaat

SEQ ID NO: 44260 - DNA, 22 bp, Artificial Sequence
  chemically synthesized
gaaggaattcactatcactaga

SEQ ID NO: 44261 - DNA, 22 bp, Artificial Sequence
  chemically synthesized
aaggaattcactatcactagac

SEQ ID NO: 44262 - DNA, 22 bp, Artificial Sequence
  chemically synthesized
actatcactagactggctttac

SEQ ID NO: 44263 - DNA, 22 bp, Artificial Sequence
  chemically synthesized
tcactagactggctttacaaga

SEQ ID NO: 44264 - DNA, 22 bp, Artificial Sequence
  chemically synthesized
gactggctttacaagaaatatt

SEQ ID NO: 44265 - DNA, 22 bp, Artificial Sequence
  chemically synthesized
gctttacaagaaatatttaagg

SEQ ID NO: 44266 - DNA, 22 bp, Artificial Sequence
  chemically synthesized
tacaagaaatatttaagggagt

SEQ ID NO: 44267 - DNA, 22 bp, Artificial Sequence
  chemically synthesized
acaagaaatatttaagggagtc

SEQ ID NO: 44268 - DNA, 22 bp, Artificial Sequence
  chemically synthesized
caagaaatatttaagggagtcc

SEQ ID NO: 44269 - DNA, 22 bp, Artificial Sequence
  chemically synthesized
aagggagtcctacacatgaaag

SEQ ID NO: 44270 - DNA, 22 bp, Artificial Sequence
  chemically synthesized
agggagtcctacacatgaaagt

SEQ ID NO: 44271 - DNA, 22 bp, Artificial Sequence
  chemically synthesized
cacatgaaagtgacaggacact

SEQ ID NO: 44272 - DNA, 22 bp, Artificial Sequence
  chemically synthesized
ccattatgaagacacacaaagg

SEQ ID NO: 44273 - DNA, 22 bp, Artificial Sequence
  chemically synthesized
tgaagacacacaaaggtataca

SEQ ID NO: 44274 - DNA, 22 bp, Artificial Sequence
  chemically synthesized
actggtagagcaaaacacaaat

SEQ ID NO: 44275 - DNA, 22 bp, Artificial Sequence
  chemically synthesized
gtagagcaaaacacaaataaag

SEQ ID NO: 44276 - DNA, 22 bp, Artificial Sequence
  chemically synthesized
aaacgttaccactacagaaaat

SEQ ID NO: 44277 - DNA, 22 bp, Artificial Sequence
  chemically synthesized
ccactacagaaaatcaccaaac

SEQ ID NO: 44278 - DNA, 22 bp, Artificial Sequence
  chemically synthesized
cagaaaatcaccaaaccacaat

SEQ ID NO: 44279 - DNA, 22 bp, Artificial Sequence
  chemically synthesized
aaaaaaaaacaaaacaaccagg

SEQ ID NO: 44280 - DNA, 22 bp, Artificial Sequence
  chemically synthesized
acaaaatggcaggaataagctc

SEQ ID NO: 44281 - DNA, 22 bp, Artificial Sequence
  chemically synthesized
tcacatgtcaataatagccttg

SEQ ID NO: 44282 - DNA, 22 bp, Artificial Sequence
  chemically synthesized
acatgtcaataatagccttgca

SEQ ID NO: 44283 - DNA, 22 bp, Artificial Sequence
  chemically synthesized
gcatgtaaatggattaaattgt

SEQ ID NO: 44284 - DNA, 22 bp, Artificial Sequence
  chemically synthesized
catgtaaatggattaaattgtt

SEQ ID NO: 44285 - DNA, 22 bp, Artificial Sequence
  chemically synthesized
aattgttacttgaaagatatag

SEQ ID NO: 44286 - DNA, 22 bp, Artificial Sequence
  chemically synthesized
ttacttgaaagatatagactgg

SEQ ID NO: 44287 - DNA, 22 bp, Artificial Sequence
  chemically synthesized
cttgaaagatatagactggcta

SEQ ID NO: 44288 - DNA, 22 bp, Artificial Sequence
  chemically synthesized
gaaagatatagactggctaaat

SEQ ID NO: 44289 - DNA, 22 bp, Artificial Sequence
  chemically synthesized
aaagatatagactggctaaata

SEQ ID NO: 44290 - DNA, 22 bp, Artificial Sequence
  chemically synthesized
gctaaatagatttaaaacaaaa

SEQ ID NO: 44291 - DNA, 22 bp, Artificial Sequence
  chemically synthesized
aatagatttaaaacaaaaatat

SEQ ID NO: 44292 - DNA, 22 bp, Artificial Sequence
  chemically synthesized
aaaacaaaaatatgacccagtt

SEQ ID NO: 44293 - DNA, 22 bp, Artificial Sequence
  chemically synthesized
aaacaaaaatatgacccagttg

SEQ ID NO: 44294 - DNA, 22 bp, Artificial Sequence
  chemically synthesized
taagctgcctataagaaactta

SEQ ID NO: 44295 - DNA, 22 bp, Artificial Sequence
  chemically synthesized
cctataagaaacttatctcact

SEQ ID NO: 44296 - DNA, 22 bp, Artificial Sequence
  chemically synthesized
taagaaacttatctcacttgta

SEQ ID NO: 44297 - DNA, 22 bp, Artificial Sequence
  chemically synthesized
atctcacttgtaaagataaata

SEQ ID NO: 44298 - DNA, 22 bp, Artificial Sequence
  chemically synthesized
tctcacttgtaaagataaatat

SEQ ID NO: 44299 - DNA, 22 bp, Artificial Sequence
  chemically synthesized
acttgtaaagataaatatagac

SEQ ID NO: 44300 - DNA, 22 bp, Artificial Sequence
  chemically synthesized
gtaaagataaatatagactgaa

SEQ ID NO: 44301 - DNA, 22 bp, Artificial Sequence
  chemically synthesized
taaagataaatatagactgaaa

SEQ ID NO: 44302 - DNA, 22 bp, Artificial Sequence
  chemically synthesized
aaagtaaaaagatgaaagatct

SEQ ID NO: 44303 - DNA, 22 bp, Artificial Sequence
  chemically synthesized
ccatacaaagagaaaccaaaaa

SEQ ID NO: 44304 - DNA, 22 bp, Artificial Sequence
  chemically synthesized
catacaaagagaaaccaaaaat

SEQ ID NO: 44305 - DNA, 22 bp, Artificial Sequence
  chemically synthesized
tacctataacagataaaattga

SEQ ID NO: 44306 - DNA, 22 bp, Artificial Sequence
  chemically synthesized
taacagataaaattgactttaa

SEQ ID NO: 44307 - DNA, 22 bp, Artificial Sequence
  chemically synthesized
actttaaataaaaaacactaag

SEQ ID NO: 44308 - DNA, 22 bp, Artificial Sequence
  chemically synthesized
taaataaaaaacactaagagac

SEQ ID NO: 44309 - DNA, 22 bp, Artificial Sequence
  chemically synthesized
aaataaaaaacactaagagaca

SEQ ID NO: 44310 - DNA, 22 bp, Artificial Sequence
  chemically synthesized
aataaaaaacactaagagacaa

SEQ ID NO: 44311 - DNA, 22 bp, Artificial Sequence
  chemically synthesized
agagacaaaagtcattacataa

SEQ ID NO: 44312 - DNA, 22 bp, Artificial Sequence
  chemically synthesized
cataatgataaaaggaacaatt

SEQ ID NO: 44313 - DNA, 22 bp, Artificial Sequence
  chemically synthesized
agcaagagtatataacaattct

SEQ ID NO: 44314 - DNA, 22 bp, Artificial Sequence
  chemically synthesized
taaacattcacactcaacacca

SEQ ID NO: 44315 - DNA, 22 bp, Artificial Sequence
  chemically synthesized
aacattcacactcaacaccaga

SEQ ID NO: 44316 - DNA, 22 bp, Artificial Sequence
  chemically synthesized
acactcaacaccagagcatcca

SEQ ID NO: 44317 - DNA, 22 bp, Artificial Sequence
  chemically synthesized
aacaccagagcatccagatatg

SEQ ID NO: 44318 - DNA, 22 bp, Artificial Sequence
  chemically synthesized
ttagatataaagggtgaaatag

SEQ ID NO: 44319 - DNA, 22 bp, Artificial Sequence
  chemically synthesized
gatataaagggtgaaatagaat

SEQ ID NO: 44320 - DNA, 22 bp, Artificial Sequence
  chemically synthesized
gggatttcaacattctaatctc

SEQ ID NO: 44321 - DNA, 22 bp, Artificial Sequence
  chemically synthesized
caacattctaatctcagcatca

SEQ ID NO: 44322 - DNA, 22 bp, Artificial Sequence
  chemically synthesized
aacattctaatctcagcatcag

SEQ ID NO: 44323 - DNA, 22 bp, Artificial Sequence
  chemically synthesized
taatctcagcatcagatagatc

SEQ ID NO: 44324 - DNA, 22 bp, Artificial Sequence
  chemically synthesized
atctcagcatcagatagatcat

SEQ ID NO: 44325 - DNA, 22 bp, Artificial Sequence
  chemically synthesized
agcatcagatagatcatctaga

SEQ ID NO: 44326 - DNA, 22 bp, Artificial Sequence
  chemically synthesized
gacagaaaattaacaaagaaac

SEQ ID NO: 44327 - DNA, 22 bp, Artificial Sequence
  chemically synthesized
acaaagaaacattggatttaaa

SEQ ID NO: 44328 - DNA, 22 bp, Artificial Sequence
  chemically synthesized
gatttaaacttgactttagacc

SEQ ID NO: 44329 - DNA, 22 bp, Artificial Sequence
  chemically synthesized
aaacttgactttagaccaaatg

SEQ ID NO: 44330 - DNA, 22 bp, Artificial Sequence
  chemically synthesized
aacttgactttagaccaaatgg

SEQ ID NO: 44331 - DNA, 22 bp, Artificial Sequence
  chemically synthesized
gactttagaccaaatggatcta

SEQ ID NO: 44332 - DNA, 22 bp, Artificial Sequence
  chemically synthesized
actttagaccaaatggatctaa

SEQ ID NO: 44333 - DNA, 22 bp, Artificial Sequence
  chemically synthesized
tagaccaaatggatctaacatt

SEQ ID NO: 44334 - DNA, 22 bp, Artificial Sequence
  chemically synthesized
agaccaaatggatctaacattt

SEQ ID NO: 44335 - DNA, 22 bp, Artificial Sequence
  chemically synthesized
gaccaaatggatctaacattta

SEQ ID NO: 44336 - DNA, 22 bp, Artificial Sequence
  chemically synthesized
acatttacacaatatttcatcc

SEQ ID NO: 44337 - DNA, 22 bp, Artificial Sequence
  chemically synthesized
acacaatatttcatccaacagc

SEQ ID NO: 44338 - DNA, 22 bp, Artificial Sequence
  chemically synthesized
cacaatatttcatccaacagct

SEQ ID NO: 44339 - DNA, 22 bp, Artificial Sequence
  chemically synthesized
catccaacagctacagaatata

SEQ ID NO: 44340 - DNA, 22 bp, Artificial Sequence
  chemically synthesized
atccaacagctacagaatatat

SEQ ID NO: 44341 - DNA, 22 bp, Artificial Sequence
  chemically synthesized
cagaatatatttatctcatcag

SEQ ID NO: 44342 - DNA, 22 bp, Artificial Sequence
  chemically synthesized
atctcatcagcacatgacgcat

SEQ ID NO: 44343 - DNA, 22 bp, Artificial Sequence
  chemically synthesized
tctcatcagcacatgacgcatt

SEQ ID NO: 44344 - DNA, 22 bp, Artificial Sequence
  chemically synthesized
atcagcacatgacgcattcccc

SEQ ID NO: 44345 - DNA, 22 bp, Artificial Sequence
  chemically synthesized
cccaggatacaccatatgttag

SEQ ID NO: 44346 - DNA, 22 bp, Artificial Sequence
  chemically synthesized
gaacacaaaagaagtctcaact

SEQ ID NO: 44347 - DNA, 22 bp, Artificial Sequence
  chemically synthesized
aactaatttgaaatatttgaaa

SEQ ID NO: 44348 - DNA, 22 bp, Artificial Sequence
  chemically synthesized
atttgaaatatttgaaatcata

SEQ ID NO: 44349 - DNA, 22 bp, Artificial Sequence
  chemically synthesized
gaaatatttgaaatcatattaa

SEQ ID NO: 44350 - DNA, 22 bp, Artificial Sequence
  chemically synthesized
aaatatttgaaatcatattaag

SEQ ID NO: 44351 - DNA, 22 bp, Artificial Sequence
  chemically synthesized
gaaatcatattaagcatcttct

SEQ ID NO: 44352 - DNA, 22 bp, Artificial Sequence
  chemically synthesized
aaatcatattaagcatcttctc

SEQ ID NO: 44353 - DNA, 22 bp, Artificial Sequence
  chemically synthesized
agcatcttctcagaccacaatg

SEQ ID NO: 44354 - DNA, 22 bp, Artificial Sequence
  chemically synthesized
ctcagaccacaatggaataaaa

SEQ ID NO: 44355 - DNA, 22 bp, Artificial Sequence
  chemically synthesized
tcagaccacaatggaataaaac

SEQ ID NO: 44356 - DNA, 22 bp, Artificial Sequence
  chemically synthesized
agaccacaatggaataaaacta

SEQ ID NO: 44357 - DNA, 22 bp, Artificial Sequence
  chemically synthesized
gaaatcaataacaagaaaaact

SEQ ID NO: 44358 - DNA, 22 bp, Artificial Sequence
  chemically synthesized
taaaacctatacaaatacatgg

SEQ ID NO: 44359 - DNA, 22 bp, Artificial Sequence
  chemically synthesized
aaaacctatacaaatacatgga

SEQ ID NO: 44360 - DNA, 22 bp, Artificial Sequence
  chemically synthesized
aaacctatacaaatacatggaa

SEQ ID NO: 44361 - DNA, 22 bp, Artificial Sequence
  chemically synthesized
tacaaatacatggaaattaaac

SEQ ID NO: 44362 - DNA, 22 bp, Artificial Sequence
  chemically synthesized
aacaacatgctcctgaatgaac

SEQ ID NO: 44363 - DNA, 22 bp, Artificial Sequence
  chemically synthesized
ctgaatgaacgttatgtcaaga

SEQ ID NO: 44364 - DNA, 22 bp, Artificial Sequence
  chemically synthesized
aatgaacgttatgtcaagaaga

SEQ ID NO: 44365 - DNA, 22 bp, Artificial Sequence
  chemically synthesized
tgtcaagaagaaaattaagaag

SEQ ID NO: 44366 - DNA, 22 bp, Artificial Sequence
  chemically synthesized
agaaggaaatcaaaaatttttt

SEQ ID NO: 44367 - DNA, 22 bp, Artificial Sequence
  chemically synthesized
tttgaaacaaatgaaaattgaa

SEQ ID NO: 44368 - DNA, 22 bp, Artificial Sequence
  chemically synthesized
ttgaaacaaatgaaaattgaaa

SEQ ID NO: 44369 - DNA, 22 bp, Artificial Sequence
  chemically synthesized
tgaaacaaatgaaaattgaaat

SEQ ID NO: 44370 - DNA, 22 bp, Artificial Sequence
  chemically synthesized
gaaacaaatgaaaattgaaata

SEQ ID NO: 44371 - DNA, 22 bp, Artificial Sequence
  chemically synthesized
aaacaaatgaaaattgaaatac

SEQ ID NO: 44372 - DNA, 22 bp, Artificial Sequence
  chemically synthesized
aaatacaacataggaaaagcca

SEQ ID NO: 44373 - DNA, 22 bp, Artificial Sequence
  chemically synthesized
agagagaagcttatcaataaac

SEQ ID NO: 44374 - DNA, 22 bp, Artificial Sequence
  chemically synthesized
atcaataaacacttaaattaaa

SEQ ID NO: 44375 - DNA, 22 bp, Artificial Sequence
  chemically synthesized
tcaataaacacttaaattaaaa

SEQ ID NO: 44376 - DNA, 22 bp, Artificial Sequence
  chemically synthesized
aaattaaaaacatagaaagatt

SEQ ID NO: 44377 - DNA, 22 bp, Artificial Sequence
  chemically synthesized
aattaaaaacatagaaagattt

SEQ ID NO: 44378 - DNA, 22 bp, Artificial Sequence
  chemically synthesized
aaaacatagaaagatttcaaat

SEQ ID NO: 44379 - DNA, 22 bp, Artificial Sequence
  chemically synthesized
caaatatataatctaatcatgt

SEQ ID NO: 44380 - DNA, 22 bp, Artificial Sequence
  chemically synthesized
aaatatataatctaatcatgta

SEQ ID NO: 44381 - DNA, 22 bp, Artificial Sequence
  chemically synthesized
atcatgtacctcaacaagctag

SEQ ID NO: 44382 - DNA, 22 bp, Artificial Sequence
  chemically synthesized
aacaagctagaaaagcaagaac

SEQ ID NO: 44383 - DNA, 22 bp, Artificial Sequence
  chemically synthesized
gaaaagcaagaacaaaacccaa

SEQ ID NO: 44384 - DNA, 22 bp, Artificial Sequence
  chemically synthesized
gcagaaggaaagaaaaaatgaa

SEQ ID NO: 44385 - DNA, 22 bp, Artificial Sequence
  chemically synthesized
aatgaaatagagaaaaacaaca

SEQ ID NO: 44386 - DNA, 22 bp, Artificial Sequence
  chemically synthesized
atgaaatagagaaaaacaacaa

SEQ ID NO: 44387 - DNA, 22 bp, Artificial Sequence
  chemically synthesized
gcaaaatgaaaagttgttattt

SEQ ID NO: 44388 - DNA, 22 bp, Artificial Sequence
  chemically synthesized
ttatttaaaaaagataaaatgg

SEQ ID NO: 44389 - DNA, 22 bp, Artificial Sequence
  chemically synthesized
tttaaaaaagataaaatggata

SEQ ID NO: 44390 - DNA, 22 bp, Artificial Sequence
  chemically synthesized
aaaaaagataaaatggatatag

SEQ ID NO: 44391 - DNA, 22 bp, Artificial Sequence
  chemically synthesized
aaaaagataaaatggatatagc

SEQ ID NO: 44392 - DNA, 22 bp, Artificial Sequence
  chemically synthesized
tagctagactaaccaagaaaaa

SEQ ID NO: 44393 - DNA, 22 bp, Artificial Sequence
  chemically synthesized
gctagactaaccaagaaaaaga

SEQ ID NO: 44394 - DNA, 22 bp, Artificial Sequence
  chemically synthesized
gactaaccaagaaaaagagaag

SEQ ID NO: 44395 - DNA, 22 bp, Artificial Sequence
  chemically synthesized
accaagaaaaagagaagagact

SEQ ID NO: 44396 - DNA, 22 bp, Artificial Sequence
  chemically synthesized
aaataaagaaaatcagaaataa

SEQ ID NO: 44397 - DNA, 22 bp, Artificial Sequence
  chemically synthesized
caaccgataccacagaaataga

SEQ ID NO: 44398 - DNA, 22 bp, Artificial Sequence
  chemically synthesized
tcagagactattatgaacaacc

SEQ ID NO: 44399 - DNA, 22 bp, Artificial Sequence
  chemically synthesized
ttatgaacaaccatacactaaa

SEQ ID NO: 44400 - DNA, 22 bp, Artificial Sequence
  chemically synthesized
tgaacaaccatacactaaaaaa

SEQ ID NO: 44401 - DNA, 22 bp, Artificial Sequence
  chemically synthesized
aaaaactgaaaaatctagagga

SEQ ID NO: 44402 - DNA, 22 bp, Artificial Sequence
  chemically synthesized
aaaaatctagaggaaattaata

SEQ ID NO: 44403 - DNA, 22 bp, Artificial Sequence
  chemically synthesized
gaggaaattaataaatttctgg

SEQ ID NO: 44404 - DNA, 22 bp, Artificial Sequence
  chemically synthesized
ataaatttctggacacatacca

SEQ ID NO: 44405 - DNA, 22 bp, Artificial Sequence
  chemically synthesized
ctggacacataccacctaccaa

SEQ ID NO: 44406 - DNA, 22 bp, Artificial Sequence
  chemically synthesized
tggacacataccacctaccaag

SEQ ID NO: 44407 - DNA, 22 bp, Artificial Sequence
  chemically synthesized
gacacataccacctaccaagat

SEQ ID NO: 44408 - DNA, 22 bp, Artificial Sequence
  chemically synthesized
ccaagattgaattaagaaagaa

SEQ ID NO: 44409 - DNA, 22 bp, Artificial Sequence
  chemically synthesized
aattaagaaagaatagaaaacc

SEQ ID NO: 44410 - DNA, 22 bp, Artificial Sequence
  chemically synthesized
agaaagaatagaaaacctgaac

SEQ ID NO: 44411 - DNA, 22 bp, Artificial Sequence
  chemically synthesized
aacagaccagtaatgaataatg

SEQ ID NO: 44412 - DNA, 22 bp, Artificial Sequence
  chemically synthesized
aatcagtagtaaaaagtctccc

SEQ ID NO: 44413 - DNA, 22 bp, Artificial Sequence
  chemically synthesized
ccaaaaaagaaaatttcaagac

SEQ ID NO: 44414 - DNA, 22 bp, Artificial Sequence
  chemically synthesized
caagaccagatggctttactgt

SEQ ID NO: 44415 - DNA, 22 bp, Artificial Sequence
  chemically synthesized
aagaccagatggctttactgtc

SEQ ID NO: 44416 - DNA, 22 bp, Artificial Sequence
  chemically synthesized
tactgtcaaattttaccaaact

SEQ ID NO: 44417 - DNA, 22 bp, Artificial Sequence
  chemically synthesized
actgtcaaattttaccaaactt

SEQ ID NO: 44418 - DNA, 22 bp, Artificial Sequence
  chemically synthesized
ctgtcaaattttaccaaacttt

SEQ ID NO: 44419 - DNA, 22 bp, Artificial Sequence
  chemically synthesized
tcaaattttaccaaactttcaa

SEQ ID NO: 44420 - DNA, 22 bp, Artificial Sequence
  chemically synthesized
taccaaactttcaaagaaaact

SEQ ID NO: 44421 - DNA, 22 bp, Artificial Sequence
  chemically synthesized
accaaactttcaaagaaaacta

SEQ ID NO: 44422 - DNA, 22 bp, Artificial Sequence
  chemically synthesized
ccaaactttcaaagaaaactaa

SEQ ID NO: 44423 - DNA, 22 bp, Artificial Sequence
  chemically synthesized
tcaaagaaaactaacaagtctc

SEQ ID NO: 44424 - DNA, 22 bp, Artificial Sequence
  chemically synthesized
caaagaaaactaacaagtctcc

SEQ ID NO: 44425 - DNA, 22 bp, Artificial Sequence
  chemically synthesized
aaagaaaactaacaagtctcct

SEQ ID NO: 44426 - DNA, 22 bp, Artificial Sequence
  chemically synthesized
acaagtctccttaaattctttt

SEQ ID NO: 44427 - DNA, 22 bp, Artificial Sequence
  chemically synthesized
cttaaattcttttaaaaattaa

SEQ ID NO: 44428 - DNA, 22 bp, Artificial Sequence
  chemically synthesized
aaattcttttaaaaattaaaca

SEQ ID NO: 44429 - DNA, 22 bp, Artificial Sequence
  chemically synthesized
aattcttttaaaaattaaacag

SEQ ID NO: 44430 - DNA, 22 bp, Artificial Sequence
  chemically synthesized
ttttaaaaattaaacaggaagg

SEQ ID NO: 44431 - DNA, 22 bp, Artificial Sequence
  chemically synthesized
ttaaaaattaaacaggaaggaa

SEQ ID NO: 44432 - DNA, 22 bp, Artificial Sequence
  chemically synthesized
taaaaattaaacaggaaggaat

SEQ ID NO: 44433 - DNA, 22 bp, Artificial Sequence
  chemically synthesized
aaaaattaaacaggaaggaatt

SEQ ID NO: 44434 - DNA, 22 bp, Artificial Sequence
  chemically synthesized
aaaattaaacaggaaggaattc

SEQ ID NO: 44435 - DNA, 22 bp, Artificial Sequence
  chemically synthesized
aacaggaaggaattctccctaa

SEQ ID NO: 44436 - DNA, 22 bp, Artificial Sequence
  chemically synthesized
tccctaactcattctctgaggc

SEQ ID NO: 44437 - DNA, 22 bp, Artificial Sequence
  chemically synthesized
cctaactcattctctgaggcca

SEQ ID NO: 44438 - DNA, 22 bp, Artificial Sequence
  chemically synthesized
actcattctctgaggccagtat

SEQ ID NO: 44439 - DNA, 22 bp, Artificial Sequence
  chemically synthesized
attctctgaggccagtattatc

SEQ ID NO: 44440 - DNA, 22 bp, Artificial Sequence
  chemically synthesized
tctgaggccagtattatcctga

SEQ ID NO: 44441 - DNA, 22 bp, Artificial Sequence
  chemically synthesized
tgaggccagtattatcctgatt

SEQ ID NO: 44442 - DNA, 22 bp, Artificial Sequence
  chemically synthesized
aggccagtattatcctgattcc

SEQ ID NO: 44443 - DNA, 22 bp, Artificial Sequence
  chemically synthesized
tcctgattccataaccagacaa

SEQ ID NO: 44444 - DNA, 22 bp, Artificial Sequence
  chemically synthesized
attccataaccagacaaggatg

SEQ ID NO: 44445 - DNA, 22 bp, Artificial Sequence
  chemically synthesized
cataaccagacaaggatgcaag

SEQ ID NO: 44446 - DNA, 22 bp, Artificial Sequence
  chemically synthesized
caggtcaatatccctgatggaa

SEQ ID NO: 44447 - DNA, 22 bp, Artificial Sequence
  chemically synthesized
atggaacataggtgtgaaaatc

SEQ ID NO: 44448 - DNA, 22 bp, Artificial Sequence
  chemically synthesized
aacaaaatactagcaaactgaa

SEQ ID NO: 44449 - DNA, 22 bp, Artificial Sequence
  chemically synthesized
gcaaactgaatccaacagtaca

SEQ ID NO: 44450 - DNA, 22 bp, Artificial Sequence
  chemically synthesized
aatccaacagtacatccaaaag

SEQ ID NO: 44451 - DNA, 22 bp, Artificial Sequence
  chemically synthesized
atactagggttgcaagaacagt

SEQ ID NO: 44452 - DNA, 22 bp, Artificial Sequence
  chemically synthesized
tactagggttgcaagaacagtt

SEQ ID NO: 44453 - DNA, 22 bp, Artificial Sequence
  chemically synthesized
gggttgcaagaacagttcaaat

SEQ ID NO: 44454 - DNA, 22 bp, Artificial Sequence
  chemically synthesized
caagaacagttcaaatcaataa

SEQ ID NO: 44455 - DNA, 22 bp, Artificial Sequence
  chemically synthesized
aaatcaataaatgtgatacatc

SEQ ID NO: 44456 - DNA, 22 bp, Artificial Sequence
  chemically synthesized
aatagatacagaaaaagtattt

SEQ ID NO: 44457 - DNA, 22 bp, Artificial Sequence
  chemically synthesized
gataaaatttaacattccttca

SEQ ID NO: 44458 - DNA, 22 bp, Artificial Sequence
  chemically synthesized
ataaaatttaacattccttcat

SEQ ID NO: 44459 - DNA, 22 bp, Artificial Sequence
  chemically synthesized
aacattccttcatgataaaaac

SEQ ID NO: 44460 - DNA, 22 bp, Artificial Sequence
  chemically synthesized
acattccttcatgataaaaact

SEQ ID NO: 44461 - DNA, 22 bp, Artificial Sequence
  chemically synthesized
cttcatgataaaaactatctgc

SEQ ID NO: 44462 - DNA, 22 bp, Artificial Sequence
  chemically synthesized
catgataaaaactatctgcagc

SEQ ID NO: 44463 - DNA, 22 bp, Artificial Sequence
  chemically synthesized
atgataaaaactatctgcagcc

SEQ ID NO: 44464 - DNA, 22 bp, Artificial Sequence
  chemically synthesized
tctgcagccaatcatagaagga

SEQ ID NO: 44465 - DNA, 22 bp, Artificial Sequence
  chemically synthesized
cagccaatcatagaaggaacat

SEQ ID NO: 44466 - DNA, 22 bp, Artificial Sequence
  chemically synthesized
aatataataaaagtcatatatg

SEQ ID NO: 44467 - DNA, 22 bp, Artificial Sequence
  chemically synthesized
acatcatactgaattgggaaaa

SEQ ID NO: 44468 - DNA, 22 bp, Artificial Sequence
  chemically synthesized
aattgggaaaagctggaagcct

SEQ ID NO: 44469 - DNA, 22 bp, Artificial Sequence
  chemically synthesized
ggaaaagctggaagcctttcct

SEQ ID NO: 44470 - DNA, 22 bp, Artificial Sequence
  chemically synthesized
gaagcctttcctctaagaactg

SEQ ID NO: 44471 - DNA, 22 bp, Artificial Sequence
  chemically synthesized
tcctctaagaactgaaacaaaa

SEQ ID NO: 44472 - DNA, 22 bp, Artificial Sequence
  chemically synthesized
cctctaagaactgaaacaaaat

SEQ ID NO: 44473 - DNA, 22 bp, Artificial Sequence
  chemically synthesized
ctctaagaactgaaacaaaata

SEQ ID NO: 44474 - DNA, 22 bp, Artificial Sequence
  chemically synthesized
taagaactgaaacaaaataagg

SEQ ID NO: 44475 - DNA, 22 bp, Artificial Sequence
  chemically synthesized
agaactgaaacaaaataaggat

SEQ ID NO: 44476 - DNA, 22 bp, Artificial Sequence
  chemically synthesized
aaacaaaataaggatgcccact

SEQ ID NO: 44477 - DNA, 22 bp, Artificial Sequence
  chemically synthesized
ccatcactcctattcaatataa

SEQ ID NO: 44478 - DNA, 22 bp, Artificial Sequence
  chemically synthesized
catcactcctattcaatataat

SEQ ID NO: 44479 - DNA, 22 bp, Artificial Sequence
  chemically synthesized
ctattcaatataatactggaag

SEQ ID NO: 44480 - DNA, 22 bp, Artificial Sequence
  chemically synthesized
ttcaatataatactggaagtcc

SEQ ID NO: 44481 - DNA, 22 bp, Artificial Sequence
  chemically synthesized
aatataatactggaagtcctag

SEQ ID NO: 44482 - DNA, 22 bp, Artificial Sequence
  chemically synthesized
gaagtcctagccacagctttca

SEQ ID NO: 44483 - DNA, 22 bp, Artificial Sequence
  chemically synthesized
gccacagctttcaggtcagaga

SEQ ID NO: 44484 - DNA, 22 bp, Artificial Sequence
  chemically synthesized
tcaggtcagagaaagaaagaaa

SEQ ID NO: 44485 - DNA, 22 bp, Artificial Sequence
  chemically synthesized
caggtcagagaaagaaagaaag

SEQ ID NO: 44486 - DNA, 22 bp, Artificial Sequence
  chemically synthesized
aggtcagagaaagaaagaaaga

SEQ ID NO: 44487 - DNA, 22 bp, Artificial Sequence
  chemically synthesized
tccatctttccagatgacatga

SEQ ID NO: 44488 - DNA, 22 bp, Artificial Sequence
  chemically synthesized
tccagatgacatgattttatac

SEQ ID NO: 44489 - DNA, 22 bp, Artificial Sequence
  chemically synthesized
ccagatgacatgattttatacc

SEQ ID NO: 44490 - DNA, 22 bp, Artificial Sequence
  chemically synthesized
cagatgacatgattttatacct

SEQ ID NO: 44491 - DNA, 22 bp, Artificial Sequence
  chemically synthesized
tatacctagaaaaaccaagact

SEQ ID NO: 44492 - DNA, 22 bp, Artificial Sequence
  chemically synthesized
atacctagaaaaaccaagactc

SEQ ID NO: 44493 - DNA, 22 bp, Artificial Sequence
  chemically synthesized
tacctagaaaaaccaagactcc

SEQ ID NO: 44494 - DNA, 22 bp, Artificial Sequence
  chemically synthesized
gaaaaaccaagactccaccaaa

SEQ ID NO: 44495 - DNA, 22 bp, Artificial Sequence
  chemically synthesized
caccaaagcactcttagcgctg

SEQ ID NO: 44496 - DNA, 22 bp, Artificial Sequence
  chemically synthesized
ttagcgctgaaaaataaattca

SEQ ID NO: 44497 - DNA, 22 bp, Artificial Sequence
  chemically synthesized
agcgctgaaaaataaattcagt

SEQ ID NO: 44498 - DNA, 22 bp, Artificial Sequence
  chemically synthesized
gcgctgaaaaataaattcagta

SEQ ID NO: 44499 - DNA, 22 bp, Artificial Sequence
  chemically synthesized
aaaaataaattcagtaaagtta

SEQ ID NO: 44500 - DNA, 22 bp, Artificial Sequence
  chemically synthesized
agtaaagttacaggagacaaaa

SEQ ID NO: 44501 - DNA, 22 bp, Artificial Sequence
  chemically synthesized
caggagacaaaatcagcatatg

SEQ ID NO: 44502 - DNA, 22 bp, Artificial Sequence
  chemically synthesized
ctacacaccaataataaactag

SEQ ID NO: 44503 - DNA, 22 bp, Artificial Sequence
  chemically synthesized
tacacaccaataataaactagc

SEQ ID NO: 44504 - DNA, 22 bp, Artificial Sequence
  chemically synthesized
cacaccaataataaactagctg

SEQ ID NO: 44505 - DNA, 22 bp, Artificial Sequence
  chemically synthesized
gctgagaaggaaattaagaagg

SEQ ID NO: 44506 - DNA, 22 bp, Artificial Sequence
  chemically synthesized
agaaggaaattaagaaggcaat

SEQ ID NO: 44507 - DNA, 22 bp, Artificial Sequence
  chemically synthesized
agaaggcaatcccatttacaat

SEQ ID NO: 44508 - DNA, 22 bp, Artificial Sequence
  chemically synthesized
acaatagctaaaaaataaaata

SEQ ID NO: 44509 - DNA, 22 bp, Artificial Sequence
  chemically synthesized
caatagctaaaaaataaaatat

SEQ ID NO: 44510 - DNA, 22 bp, Artificial Sequence
  chemically synthesized
aaaaataaaatatttagggata

SEQ ID NO: 44511 - DNA, 22 bp, Artificial Sequence
  chemically synthesized
agggataaatttaaccaaggaa

SEQ ID NO: 44512 - DNA, 22 bp, Artificial Sequence
  chemically synthesized
gggataaatttaaccaaggaac

SEQ ID NO: 44513 - DNA, 22 bp, Artificial Sequence
  chemically synthesized
aaccaaggaaccgaaaaacctc

SEQ ID NO: 44514 - DNA, 22 bp, Artificial Sequence
  chemically synthesized
accaaggaaccgaaaaacctct

SEQ ID NO: 44515 - DNA, 22 bp, Artificial Sequence
  chemically synthesized
tattcggaaaactacaaaacac

SEQ ID NO: 44516 - DNA, 22 bp, Artificial Sequence
  chemically synthesized
ttcggaaaactacaaaacactg

SEQ ID NO: 44517 - DNA, 22 bp, Artificial Sequence
  chemically synthesized
ggaaaactacaaaacactgata

SEQ ID NO: 44518 - DNA, 22 bp, Artificial Sequence
  chemically synthesized
caaaacactgataaaagaattg

SEQ ID NO: 44519 - DNA, 22 bp, Artificial Sequence
  chemically synthesized
ataaaagaattgaaaaggacag

SEQ ID NO: 44520 - DNA, 22 bp, Artificial Sequence
  chemically synthesized
aaaaggacagaaacaaatggag

SEQ ID NO: 44521 - DNA, 22 bp, Artificial Sequence
  chemically synthesized
tgttcatggatcagaaaaatta

SEQ ID NO: 44522 - DNA, 22 bp, Artificial Sequence
  chemically synthesized
atggatcagaaaaattaatatt

SEQ ID NO: 44523 - DNA, 22 bp, Artificial Sequence
  chemically synthesized
atattgttaaaatggccatact

SEQ ID NO: 44524 - DNA, 22 bp, Artificial Sequence
  chemically synthesized
ttaaaatggccatactacccaa

SEQ ID NO: 44525 - DNA, 22 bp, Artificial Sequence
  chemically synthesized
aaatggccatactacccaaagc

SEQ ID NO: 44526 - DNA, 22 bp, Artificial Sequence
  chemically synthesized
cccaaagcaatctacagattct

SEQ ID NO: 44527 - DNA, 22 bp, Artificial Sequence
  chemically synthesized
cagattctatatgaccgctatc

SEQ ID NO: 44528 - DNA, 22 bp, Artificial Sequence
  chemically synthesized
tatatgaccgctatcaaaatag

SEQ ID NO: 44529 - DNA, 22 bp, Artificial Sequence
  chemically synthesized
tatgaccgctatcaaaatagca

SEQ ID NO: 44530 - DNA, 22 bp, Artificial Sequence
  chemically synthesized
tcaaaatagcaatgtcattttt

SEQ ID NO: 44531 - DNA, 22 bp, Artificial Sequence
  chemically synthesized
ttcacagaaatggaaaaaccaa

SEQ ID NO: 44532 - DNA, 22 bp, Artificial Sequence
  chemically synthesized
tcacagaaatggaaaaaccaat

SEQ ID NO: 44533 - DNA, 22 bp, Artificial Sequence
  chemically synthesized
cacagaaatggaaaaaccaatc

SEQ ID NO: 44534 - DNA, 22 bp, Artificial Sequence
  chemically synthesized
acagaaatggaaaaaccaatct

SEQ ID NO: 44535 - DNA, 22 bp, Artificial Sequence
  chemically synthesized
aaatttgtatgaaattaaaaaa

SEQ ID NO: 44536 - DNA, 22 bp, Artificial Sequence
  chemically synthesized
gtatgaaattaaaaaatagctc

SEQ ID NO: 44537 - DNA, 22 bp, Artificial Sequence
  chemically synthesized
tatgaaattaaaaaatagctcc

SEQ ID NO: 44538 - DNA, 22 bp, Artificial Sequence
  chemically synthesized
aaaaatagctccagtagccaaa

SEQ ID NO: 44539 - DNA, 22 bp, Artificial Sequence
  chemically synthesized
cagtagccaaagtcatcctgtg

SEQ ID NO: 44540 - DNA, 22 bp, Artificial Sequence
  chemically synthesized
tgaaaaaagaacaatgctagag

SEQ ID NO: 44541 - DNA, 22 bp, Artificial Sequence
  chemically synthesized
gaggtatcatactacctgattt

SEQ ID NO: 44542 - DNA, 22 bp, Artificial Sequence
  chemically synthesized
cctgatttcaaagtatattaca

SEQ ID NO: 44543 - DNA, 22 bp, Artificial Sequence
  chemically synthesized
atttcaaagtatattacaaaag

SEQ ID NO: 44544 - DNA, 22 bp, Artificial Sequence
  chemically synthesized
caaagtatattacaaaagtata

SEQ ID NO: 44545 - DNA, 22 bp, Artificial Sequence
  chemically synthesized
aaagtatattacaaaagtatag

SEQ ID NO: 44546 - DNA, 22 bp, Artificial Sequence
  chemically synthesized
caaaagtataggaacctaaaca

SEQ ID NO: 44547 - DNA, 22 bp, Artificial Sequence
  chemically synthesized
aacagcatgatactgacattag

SEQ ID NO: 44548 - DNA, 22 bp, Artificial Sequence
  chemically synthesized
acattagaacagacacttagac

SEQ ID NO: 44549 - DNA, 22 bp, Artificial Sequence
  chemically synthesized
gaacagacacttagaccaatgg

SEQ ID NO: 44550 - DNA, 22 bp, Artificial Sequence
  chemically synthesized
agaccaatggaagagaatagag

SEQ ID NO: 44551 - DNA, 22 bp, Artificial Sequence
  chemically synthesized
gaccaatggaagagaatagaga

SEQ ID NO: 44552 - DNA, 22 bp, Artificial Sequence
  chemically synthesized
gaaatgcatccacatatttata

SEQ ID NO: 44553 - DNA, 22 bp, Artificial Sequence
  chemically synthesized
atagccaacagattttcaacaa

SEQ ID NO: 44554 - DNA, 22 bp, Artificial Sequence
  chemically synthesized
tagccaacagattttcaacaaa

SEQ ID NO: 44555 - DNA, 22 bp, Artificial Sequence
  chemically synthesized
tcaacaaaggtgacaagaatat

SEQ ID NO: 44556 - DNA, 22 bp, Artificial Sequence
  chemically synthesized
caacaaaggtgacaagaatata

SEQ ID NO: 44557 - DNA, 22 bp, Artificial Sequence
  chemically synthesized
aacaaaggtgacaagaatatac

SEQ ID NO: 44558 - DNA, 22 bp, Artificial Sequence
  chemically synthesized
aggaaaggacacagtgttcaag

SEQ ID NO: 44559 - DNA, 22 bp, Artificial Sequence
  chemically synthesized
aagaaatggtgctgaaaaaatt

SEQ ID NO: 44560 - DNA, 22 bp, Artificial Sequence
  chemically synthesized
aaaaaattggatatccattgga

SEQ ID NO: 44561 - DNA, 22 bp, Artificial Sequence
  chemically synthesized
gatatccattggatatccatgt

SEQ ID NO: 44562 - DNA, 22 bp, Artificial Sequence
  chemically synthesized
gatatccatgtgcaaaagaata

SEQ ID NO: 44563 - DNA, 22 bp, Artificial Sequence
  chemically synthesized
gactgctgatatggtttggatg

SEQ ID NO: 44564 - DNA, 22 bp, Artificial Sequence
  chemically synthesized
ctgatatggtttggatgtttgt

SEQ ID NO: 44565 - DNA, 22 bp, Artificial Sequence
  chemically synthesized
atatggtttggatgtttgttcc

SEQ ID NO: 44566 - DNA, 22 bp, Artificial Sequence
  chemically synthesized
ggatgtttgttccctccaaatc

SEQ ID NO: 44567 - DNA, 22 bp, Artificial Sequence
  chemically synthesized
gatgtttgttccctccaaatct

SEQ ID NO: 44568 - DNA, 22 bp, Artificial Sequence
  chemically synthesized
gttccctccaaatctcatgttg

SEQ ID NO: 44569 - DNA, 22 bp, Artificial Sequence
  chemically synthesized
ttccctccaaatctcatgttga

SEQ ID NO: 44570 - DNA, 22 bp, Artificial Sequence
  chemically synthesized
cctccaaatctcatgttgaaat

SEQ ID NO: 44571 - DNA, 22 bp, Artificial Sequence
  chemically synthesized
caaatctcatgttgaaatataa

SEQ ID NO: 44572 - DNA, 22 bp, Artificial Sequence
  chemically synthesized
atgttgaaatataatccccaac

SEQ ID NO: 44573 - DNA, 22 bp, Artificial Sequence
  chemically synthesized
aaatataatccccaacttctca

SEQ ID NO: 44574 - DNA, 22 bp, Artificial Sequence
  chemically synthesized
ctcaggatcttggcggatggga

SEQ ID NO: 44575 - DNA, 22 bp, Artificial Sequence
  chemically synthesized
tcaggatcttggcggatgggag

SEQ ID NO: 44576 - DNA, 22 bp, Artificial Sequence
  chemically synthesized
aggatcttggcggatgggaggt

SEQ ID NO: 44577 - DNA, 22 bp, Artificial Sequence
  chemically synthesized
ggcggatgggaggtaggcctag

SEQ ID NO: 44578 - DNA, 22 bp, Artificial Sequence
  chemically synthesized
gcggatgggaggtaggcctaga

SEQ ID NO: 44579 - DNA, 22 bp, Artificial Sequence
  chemically synthesized
gattgcagctccaactcagatg

SEQ ID NO: 44580 - DNA, 22 bp, Artificial Sequence
  chemically synthesized
cagctccaactcagatggacag

SEQ ID NO: 44581 - DNA, 22 bp, Artificial Sequence
  chemically synthesized
caactcagatggacagagcagc

SEQ ID NO: 44582 - DNA, 22 bp, Artificial Sequence
  chemically synthesized
agatggacagagcagcatgtgg

SEQ ID NO: 44583 - DNA, 22 bp, Artificial Sequence
  chemically synthesized
gcattgtgaattttagctgcag

SEQ ID NO: 44584 - DNA, 22 bp, Artificial Sequence
  chemically synthesized
tgaattttagctgcagatagac

SEQ ID NO: 44585 - DNA, 22 bp, Artificial Sequence
  chemically synthesized
tagctgcagatagactgcaaga

SEQ ID NO: 44586 - DNA, 22 bp, Artificial Sequence
  chemically synthesized
agctgcagatagactgcaagaa

SEQ ID NO: 44587 - DNA, 22 bp, Artificial Sequence
  chemically synthesized
gctgcagatagactgcaagaac

SEQ ID NO: 44588 - DNA, 22 bp, Artificial Sequence
  chemically synthesized
cagatagactgcaagaacaaac

SEQ ID NO: 44589 - DNA, 22 bp, Artificial Sequence
  chemically synthesized
caagaacaaaccagcaatcctg

SEQ ID NO: 44590 - DNA, 22 bp, Artificial Sequence
  chemically synthesized
agaggacccacagaccctctga

SEQ ID NO: 44591 - DNA, 22 bp, Artificial Sequence
  chemically synthesized
tgaaggaagtagattgctcctg

SEQ ID NO: 44592 - DNA, 22 bp, Artificial Sequence
  chemically synthesized
aaggaagtagattgctcctgca

SEQ ID NO: 44593 - DNA, 22 bp, Artificial Sequence
  chemically synthesized
ctcctgcaggacccaggagaca

SEQ ID NO: 44594 - DNA, 22 bp, Artificial Sequence
  chemically synthesized
ctgcaggacccaggagacaccc

SEQ ID NO: 44595 - DNA, 22 bp, Artificial Sequence
  chemically synthesized
caggacccaggagacaccccaa

SEQ ID NO: 44596 - DNA, 22 bp, Artificial Sequence
  chemically synthesized
tgagtgccccaactgcggaagt

SEQ ID NO: 44597 - DNA, 22 bp, Artificial Sequence
  chemically synthesized
cggaagtgggaaagggagatcc

SEQ ID NO: 44598 - DNA, 22 bp, Artificial Sequence
  chemically synthesized
ctctcctaaacacacactccca

SEQ ID NO: 44599 - DNA, 22 bp, Artificial Sequence
  chemically synthesized
tcctaaacacacactcccactg

SEQ ID NO: 44600 - DNA, 22 bp, Artificial Sequence
  chemically synthesized
ctaaacacacactcccactgga

SEQ ID NO: 44601 - DNA, 22 bp, Artificial Sequence
  chemically synthesized
aacacacactcccactggagaa

SEQ ID NO: 44602 - DNA, 22 bp, Artificial Sequence
  chemically synthesized
ccactggagaaactgaaggtct

SEQ ID NO: 44603 - DNA, 22 bp, Artificial Sequence
  chemically synthesized
gagaaactgaaggtctgtttgt

SEQ ID NO: 44604 - DNA, 22 bp, Artificial Sequence
  chemically synthesized
aaggtctgtttgtgggagaagt

SEQ ID NO: 44605 - DNA, 22 bp, Artificial Sequence
  chemically synthesized
tttgtgggagaagtttctgacc

SEQ ID NO: 44606 - DNA, 22 bp, Artificial Sequence
  chemically synthesized
gtgggagaagtttctgacctta

SEQ ID NO: 44607 - DNA, 22 bp, Artificial Sequence
  chemically synthesized
tgggagaagtttctgaccttac

SEQ ID NO: 44608 - DNA, 22 bp, Artificial Sequence
  chemically synthesized
ctgaccttacctggagttgagt

SEQ ID NO: 44609 - DNA, 22 bp, Artificial Sequence
  chemically synthesized
tgaccttacctggagttgagtt

SEQ ID NO: 44610 - DNA, 22 bp, Artificial Sequence
  chemically synthesized
accttacctggagttgagttaa

SEQ ID NO: 44611 - DNA, 22 bp, Artificial Sequence
  chemically synthesized
acctggagttgagttaacttag

SEQ ID NO: 44612 - DNA, 22 bp, Artificial Sequence
  chemically synthesized
cctggagttgagttaacttaga

SEQ ID NO: 44613 - DNA, 22 bp, Artificial Sequence
  chemically synthesized
gagttgagttaacttagagagc

SEQ ID NO: 44614 - DNA, 22 bp, Artificial Sequence
  chemically synthesized
agttaacttagagagctgagca

SEQ ID NO: 44615 - DNA, 22 bp, Artificial Sequence
  chemically synthesized
acttagagagctgagcaaaata

SEQ ID NO: 44616 - DNA, 22 bp, Artificial Sequence
  chemically synthesized
agagagctgagcaaaatacagg

SEQ ID NO: 44617 - DNA, 22 bp, Artificial Sequence
  chemically synthesized
gagagctgagcaaaatacaggt

SEQ ID NO: 44618 - DNA, 22 bp, Artificial Sequence
  chemically synthesized
agcaaaatacaggtgtagagga

SEQ ID NO: 44619 - DNA, 22 bp, Artificial Sequence
  chemically synthesized
ggagctcactgggtccctgagc

SEQ ID NO: 44620 - DNA, 22 bp, Artificial Sequence
  chemically synthesized
actgggtccctgagcaggccat

SEQ ID NO: 44621 - DNA, 22 bp, Artificial Sequence
  chemically synthesized
ggtccctgagcaggccattcct

SEQ ID NO: 44622 - DNA, 22 bp, Artificial Sequence
  chemically synthesized
agcaggccattcctgcctggca

SEQ ID NO: 44623 - DNA, 22 bp, Artificial Sequence
  chemically synthesized
ctgcctggcatagccaggcatt

SEQ ID NO: 44624 - DNA, 22 bp, Artificial Sequence
  chemically synthesized
cctggcatagccaggcatttac

SEQ ID NO: 44625 - DNA, 22 bp, Artificial Sequence
  chemically synthesized
gcatagccaggcatttacatta

SEQ ID NO: 44626 - DNA, 22 bp, Artificial Sequence
  chemically synthesized
acattactaacattgaatgtaa

SEQ ID NO: 44627 - DNA, 22 bp, Artificial Sequence
  chemically synthesized
cattactaacattgaatgtaaa

SEQ ID NO: 44628 - DNA, 22 bp, Artificial Sequence
  chemically synthesized
ctaacattgaatgtaaatggcc

SEQ ID NO: 44629 - DNA, 22 bp, Artificial Sequence
  chemically synthesized
acattgaatgtaaatggcctaa

SEQ ID NO: 44630 - DNA, 22 bp, Artificial Sequence
  chemically synthesized
aatgtaaatggcctaaatgctc

SEQ ID NO: 44631 - DNA, 22 bp, Artificial Sequence
  chemically synthesized
aatgctccacttaaaagggtga

SEQ ID NO: 44632 - DNA, 22 bp, Artificial Sequence
  chemically synthesized
cacttaaaagggtgaaaaaggt

SEQ ID NO: 44633 - DNA, 22 bp, Artificial Sequence
  chemically synthesized
aaaagggtgaaaaaggtatttc

SEQ ID NO: 44634 - DNA, 22 bp, Artificial Sequence
  chemically synthesized
aaagggtgaaaaaggtatttca

SEQ ID NO: 44635 - DNA, 22 bp, Artificial Sequence
  chemically synthesized
catgcaaatggccaccaaaagt

SEQ ID NO: 44636 - DNA, 22 bp, Artificial Sequence
  chemically synthesized
atgcaaatggccaccaaaagtg

SEQ ID NO: 44637 - DNA, 22 bp, Artificial Sequence
  chemically synthesized
taaagcaacagcagttaaaaga

SEQ ID NO: 44638 - DNA, 22 bp, Artificial Sequence
  chemically synthesized
aaagcaacagcagttaaaagag

SEQ ID NO: 44639 - DNA, 22 bp, Artificial Sequence
  chemically synthesized
aagcaacagcagttaaaagaga

SEQ ID NO: 44640 - DNA, 22 bp, Artificial Sequence
  chemically synthesized
aaagagacaaagagggacatta

SEQ ID NO: 44641 - DNA, 22 bp, Artificial Sequence
  chemically synthesized
tataatggtaaaaggccttgtc

SEQ ID NO: 44642 - DNA, 22 bp, Artificial Sequence
  chemically synthesized
gtccaacaggaaaatatcacaa

SEQ ID NO: 44643 - DNA, 22 bp, Artificial Sequence
  chemically synthesized
tccaacaggaaaatatcacaat

SEQ ID NO: 44644 - DNA, 22 bp, Artificial Sequence
  chemically synthesized
aaacatatatgcacctaacact

SEQ ID NO: 44645 - DNA, 22 bp, Artificial Sequence
  chemically synthesized
aacatatatgcacctaacactg

SEQ ID NO: 44646 - DNA, 22 bp, Artificial Sequence
  chemically synthesized
acactggagctcccaaatttat

SEQ ID NO: 44647 - DNA, 22 bp, Artificial Sequence
  chemically synthesized
gagctcccaaatttatagaaca

SEQ ID NO: 44648 - DNA, 22 bp, Artificial Sequence
  chemically synthesized
ccaaatttatagaacaattact

SEQ ID NO: 44649 - DNA, 22 bp, Artificial Sequence
  chemically synthesized
atagaacaattactaatagacc

SEQ ID NO: 44650 - DNA, 22 bp, Artificial Sequence
  chemically synthesized
tagaacaattactaatagacct

SEQ ID NO: 44651 - DNA, 22 bp, Artificial Sequence
  chemically synthesized
ctaatagacctaagaaatgaga

SEQ ID NO: 44652 - DNA, 22 bp, Artificial Sequence
  chemically synthesized
atagacctaagaaatgagatag

SEQ ID NO: 44653 - DNA, 22 bp, Artificial Sequence
  chemically synthesized
agaaatgagatagacagcaaca

SEQ ID NO: 44654 - DNA, 22 bp, Artificial Sequence
  chemically synthesized
caatacttcattgacagcacta

SEQ ID NO: 44655 - DNA, 22 bp, Artificial Sequence
  chemically synthesized
aatacttcattgacagcactag

SEQ ID NO: 44656 - DNA, 22 bp, Artificial Sequence
  chemically synthesized
cattgacagcactagacagttc

SEQ ID NO: 44657 - DNA, 22 bp, Artificial Sequence
  chemically synthesized
attgacagcactagacagttca

SEQ ID NO: 44658 - DNA, 22 bp, Artificial Sequence
  chemically synthesized
acagcactagacagttcatcaa

SEQ ID NO: 44659 - DNA, 22 bp, Artificial Sequence
  chemically synthesized
gacagttcatcaagacagaaag

SEQ ID NO: 44660 - DNA, 22 bp, Artificial Sequence
  chemically synthesized
atcaagacagaaagtcaacaaa

SEQ ID NO: 44661 - DNA, 22 bp, Artificial Sequence
  chemically synthesized
aaattataccttagaacaaatg

SEQ ID NO: 44662 - DNA, 22 bp, Artificial Sequence
  chemically synthesized
aattataccttagaacaaatgg

SEQ ID NO: 44663 - DNA, 22 bp, Artificial Sequence
  chemically synthesized
taccttagaacaaatggactta

SEQ ID NO: 44664 - DNA, 22 bp, Artificial Sequence
  chemically synthesized
agaacaaatggacttaacagtt

SEQ ID NO: 44665 - DNA, 22 bp, Artificial Sequence
  chemically synthesized
gaacaaatggacttaacagtta

SEQ ID NO: 44666 - DNA, 22 bp, Artificial Sequence
  chemically synthesized
aacagttatatacagaacattt

SEQ ID NO: 44667 - DNA, 22 bp, Artificial Sequence
  chemically synthesized
acagttatatacagaacatttc

SEQ ID NO: 44668 - DNA, 22 bp, Artificial Sequence
  chemically synthesized
tatacagaacatttcatccaat

SEQ ID NO: 44669 - DNA, 22 bp, Artificial Sequence
  chemically synthesized
catccaataaccacagaacaca

SEQ ID NO: 44670 - DNA, 22 bp, Artificial Sequence
  chemically synthesized
atccaataaccacagaacacac

SEQ ID NO: 44671 - DNA, 22 bp, Artificial Sequence
  chemically synthesized
tattcaacagcgcgtggaaatt

SEQ ID NO: 44672 - DNA, 22 bp, Artificial Sequence
  chemically synthesized
ttcaacagcgcgtggaaatttc

SEQ ID NO: 44673 - DNA, 22 bp, Artificial Sequence
  chemically synthesized
aacagcgcgtggaaatttctcc

SEQ ID NO: 44674 - DNA, 22 bp, Artificial Sequence
  chemically synthesized
ctccaaggtagaccatatgata

SEQ ID NO: 44675 - DNA, 22 bp, Artificial Sequence
  chemically synthesized
tccaaggtagaccatatgatag

SEQ ID NO: 44676 - DNA, 22 bp, Artificial Sequence
  chemically synthesized
caaggtagaccatatgataggc

SEQ ID NO: 44677 - DNA, 22 bp, Artificial Sequence
  chemically synthesized
aataaatttactaacagaccaa

SEQ ID NO: 44678 - DNA, 22 bp, Artificial Sequence
  chemically synthesized
actaacagaccaataacaagca

SEQ ID NO: 44679 - DNA, 22 bp, Artificial Sequence
  chemically synthesized
ctaacagaccaataacaagcag

SEQ ID NO: 44680 - DNA, 22 bp, Artificial Sequence
  chemically synthesized
acagaccaataacaagcagtga

SEQ ID NO: 44681 - DNA, 22 bp, Artificial Sequence
  chemically synthesized
aattggtaattaaaaaattacc

SEQ ID NO: 44682 - DNA, 22 bp, Artificial Sequence
  chemically synthesized
attggtaattaaaaaattacca

SEQ ID NO: 44683 - DNA, 22 bp, Artificial Sequence
  chemically synthesized
gtaattaaaaaattaccaacca

SEQ ID NO: 44684 - DNA, 22 bp, Artificial Sequence
  chemically synthesized
aaaaattaccaaccaaaaaaaa

SEQ ID NO: 44685 - DNA, 22 bp, Artificial Sequence
  chemically synthesized
ccaaccaaaaaaaagttcagga

SEQ ID NO: 44686 - DNA, 22 bp, Artificial Sequence
  chemically synthesized
aggaccagatggattcacaaca

SEQ ID NO: 44687 - DNA, 22 bp, Artificial Sequence
  chemically synthesized
acaacagaattctactagacat

SEQ ID NO: 44688 - DNA, 22 bp, Artificial Sequence
  chemically synthesized
tactagacattcaaagaggaat

SEQ ID NO: 44689 - DNA, 22 bp, Artificial Sequence
  chemically synthesized
ctagacattcaaagaggaattg

SEQ ID NO: 44690 - DNA, 22 bp, Artificial Sequence
  chemically synthesized
gacattcaaagaggaattggtc

SEQ ID NO: 44691 - DNA, 22 bp, Artificial Sequence
  chemically synthesized
aaagaggaattggtccccatct

SEQ ID NO: 44692 - DNA, 22 bp, Artificial Sequence
  chemically synthesized
gtccccatctttttgacactat

SEQ ID NO: 44693 - DNA, 22 bp, Artificial Sequence
  chemically synthesized
tttgacactattctacaagaca

SEQ ID NO: 44694 - DNA, 22 bp, Artificial Sequence
  chemically synthesized
ttgacactattctacaagacag

SEQ ID NO: 44695 - DNA, 22 bp, Artificial Sequence
  chemically synthesized
tgacactattctacaagacaga

SEQ ID NO: 44696 - DNA, 22 bp, Artificial Sequence
  chemically synthesized
gacactattctacaagacagat

SEQ ID NO: 44697 - DNA, 22 bp, Artificial Sequence
  chemically synthesized
acactattctacaagacagata

SEQ ID NO: 44698 - DNA, 22 bp, Artificial Sequence
  chemically synthesized
ttctacaagacagataaagaag

SEQ ID NO: 44699 - DNA, 22 bp, Artificial Sequence
  chemically synthesized
tacaagacagataaagaaggaa

SEQ ID NO: 44700 - DNA, 22 bp, Artificial Sequence
  chemically synthesized
caagacagataaagaaggaacc

SEQ ID NO: 44701 - DNA, 22 bp, Artificial Sequence
  chemically synthesized
ccctaattcattctatgaagcc

SEQ ID NO: 44702 - DNA, 22 bp, Artificial Sequence
  chemically synthesized
attcattctatgaagccagcat

SEQ ID NO: 44703 - DNA, 22 bp, Artificial Sequence
  chemically synthesized
attctatgaagccagcatcaca

SEQ ID NO: 44704 - DNA, 22 bp, Artificial Sequence
  chemically synthesized
tatgaagccagcatcacaccaa

SEQ ID NO: 44705 - DNA, 22 bp, Artificial Sequence
  chemically synthesized
tgaagccagcatcacaccaaaa

SEQ ID NO: 44706 - DNA, 22 bp, Artificial Sequence
  chemically synthesized
cagactgatagccttgatgaac

SEQ ID NO: 44707 - DNA, 22 bp, Artificial Sequence
  chemically synthesized
atagccttgatgaacatagatg

SEQ ID NO: 44708 - DNA, 22 bp, Artificial Sequence
  chemically synthesized
gatgaacatagatgctaaaatc

SEQ ID NO: 44709 - DNA, 22 bp, Artificial Sequence
  chemically synthesized
atgaacatagatgctaaaatcc

SEQ ID NO: 44710 - DNA, 22 bp, Artificial Sequence
  chemically synthesized
aaatccttaacaaaatactaga

SEQ ID NO: 44711 - DNA, 22 bp, Artificial Sequence
  chemically synthesized
aacaaaatactagataaccaaa

SEQ ID NO: 44712 - DNA, 22 bp, Artificial Sequence
  chemically synthesized
acaaaatactagataaccaaat

SEQ ID NO: 44713 - DNA, 22 bp, Artificial Sequence
  chemically synthesized
gataaccaaattcaacaacata

SEQ ID NO: 44714 - DNA, 22 bp, Artificial Sequence
  chemically synthesized
aacaacataacaaaaagataat

SEQ ID NO: 44715 - DNA, 22 bp, Artificial Sequence
  chemically synthesized
catgccagggatgcagggttgg

SEQ ID NO: 44716 - DNA, 22 bp, Artificial Sequence
  chemically synthesized
gtttgacatctgcaagtcaata

SEQ ID NO: 44717 - DNA, 22 bp, Artificial Sequence
  chemically synthesized
gacatctgcaagtcaataagtg

SEQ ID NO: 44718 - DNA, 22 bp, Artificial Sequence
  chemically synthesized
acatctgcaagtcaataagtgt

SEQ ID NO: 44719 - DNA, 22 bp, Artificial Sequence
  chemically synthesized
caagtcaataagtgtgatacac

SEQ ID NO: 44720 - DNA, 22 bp, Artificial Sequence
  chemically synthesized
aaaaacaaaaattacatgatca

SEQ ID NO: 44721 - DNA, 22 bp, Artificial Sequence
  chemically synthesized
aaaacaaaaattacatgatcat

SEQ ID NO: 44722 - DNA, 22 bp, Artificial Sequence
  chemically synthesized
catgatcatctcaatagatgca

SEQ ID NO: 44723 - DNA, 22 bp, Artificial Sequence
  chemically synthesized
aatagatgcagaaaaagcattc

SEQ ID NO: 44724 - DNA, 22 bp, Artificial Sequence
  chemically synthesized
aacaaaatccagcatacattta

SEQ ID NO: 44725 - DNA, 22 bp, Artificial Sequence
  chemically synthesized
atgattaaaatgctcagcaaaa

SEQ ID NO: 44726 - DNA, 22 bp, Artificial Sequence
  chemically synthesized
tgattaaaatgctcagcaaaat

SEQ ID NO: 44727 - DNA, 22 bp, Artificial Sequence
  chemically synthesized
aaatgctcagcaaaatcagcat

SEQ ID NO: 44728 - DNA, 22 bp, Artificial Sequence
  chemically synthesized
agcaaaatcagcatacaagaga

SEQ ID NO: 44729 - DNA, 22 bp, Artificial Sequence
  chemically synthesized
agtgtaataaaagccatctgtg

SEQ ID NO: 44730 - DNA, 22 bp, Artificial Sequence
  chemically synthesized
tgacaaacccacagccaacata

SEQ ID NO: 44731 - DNA, 22 bp, Artificial Sequence
  chemically synthesized
aatggggaaaagttgaaagcat

SEQ ID NO: 44732 - DNA, 22 bp, Artificial Sequence
  chemically synthesized
aaagcattccctctgagaactg

SEQ ID NO: 44733 - DNA, 22 bp, Artificial Sequence
  chemically synthesized
cctctgagaactggaacaagac

SEQ ID NO: 44734 - DNA, 22 bp, Artificial Sequence
  chemically synthesized
tgagaactggaacaagacaagg

SEQ ID NO: 44735 - DNA, 22 bp, Artificial Sequence
  chemically synthesized
agaactggaacaagacaaggat

SEQ ID NO: 44736 - DNA, 22 bp, Artificial Sequence
  chemically synthesized
gaacaagacaaggatgcccact

SEQ ID NO: 44737 - DNA, 22 bp, Artificial Sequence
  chemically synthesized
tcaccactcctcttcaacatag

SEQ ID NO: 44738 - DNA, 22 bp, Artificial Sequence
  chemically synthesized
accactcctcttcaacatagta

SEQ ID NO: 44739 - DNA, 22 bp, Artificial Sequence
  chemically synthesized
ctcttcaacatagtactggaag

SEQ ID NO: 44740 - DNA, 22 bp, Artificial Sequence
  chemically synthesized
ttcaacatagtactggaagtcc

SEQ ID NO: 44741 - DNA, 22 bp, Artificial Sequence
  chemically synthesized
caacatagtactggaagtccta

SEQ ID NO: 44742 - DNA, 22 bp, Artificial Sequence
  chemically synthesized
aacatagtactggaagtcctag

SEQ ID NO: 44743 - DNA, 22 bp, Artificial Sequence
  chemically synthesized
gaagtcctagccagggcaatca

SEQ ID NO: 44744 - DNA, 22 bp, Artificial Sequence
  chemically synthesized
gccagggcaatcagacaaaaca

SEQ ID NO: 44745 - DNA, 22 bp, Artificial Sequence
  chemically synthesized
aaatcagtaaagaggaagtcaa

SEQ ID NO: 44746 - DNA, 22 bp, Artificial Sequence
  chemically synthesized
tcactgtttgctgatgatatga

SEQ ID NO: 44747 - DNA, 22 bp, Artificial Sequence
  chemically synthesized
tttgctgatgatatgatcattt

SEQ ID NO: 44748 - DNA, 22 bp, Artificial Sequence
  chemically synthesized
gctgatgatatgatcatttacc

SEQ ID NO: 44749 - DNA, 22 bp, Artificial Sequence
  chemically synthesized
ctgatgatatgatcatttacct

SEQ ID NO: 44750 - DNA, 22 bp, Artificial Sequence
  chemically synthesized
atgatatgatcatttaccttta

SEQ ID NO: 44751 - DNA, 22 bp, Artificial Sequence
  chemically synthesized
acctttaaaaccctaaagactc

SEQ ID NO: 44752 - DNA, 22 bp, Artificial Sequence
  chemically synthesized
cctttaaaaccctaaagactcc

SEQ ID NO: 44753 - DNA, 22 bp, Artificial Sequence
  chemically synthesized
taaaaccctaaagactcctcca

SEQ ID NO: 44754 - DNA, 22 bp, Artificial Sequence
  chemically synthesized
aaaaccctaaagactcctccag

SEQ ID NO: 44755 - DNA, 22 bp, Artificial Sequence
  chemically synthesized
aaaccctaaagactcctccaga

SEQ ID NO: 44756 - DNA, 22 bp, Artificial Sequence
  chemically synthesized
aagactcctccagaaagctcct

SEQ ID NO: 44757 - DNA, 22 bp, Artificial Sequence
  chemically synthesized
ctccagaaagctcctagaactg

SEQ ID NO: 44758 - DNA, 22 bp, Artificial Sequence
  chemically synthesized
cagaaagctcctagaactgata

SEQ ID NO: 44759 - DNA, 22 bp, Artificial Sequence
  chemically synthesized
ctagaactgataaaataattca

SEQ ID NO: 44760 - DNA, 22 bp, Artificial Sequence
  chemically synthesized
gaactgataaaataattcagca

SEQ ID NO: 44761 - DNA, 22 bp, Artificial Sequence
  chemically synthesized
ataaaataattcagcaaagttt

SEQ ID NO: 44762 - DNA, 22 bp, Artificial Sequence
  chemically synthesized
agcaaagtttccagatacaaga

SEQ ID NO: 44763 - DNA, 22 bp, Artificial Sequence
  chemically synthesized
ccagatacaagatgaatgcaca

SEQ ID NO: 44764 - DNA, 22 bp, Artificial Sequence
  chemically synthesized
cagatacaagatgaatgcacac

SEQ ID NO: 44765 - DNA, 22 bp, Artificial Sequence
  chemically synthesized
ttctatacaccaacagcaacca

SEQ ID NO: 44766 - DNA, 22 bp, Artificial Sequence
  chemically synthesized
ctatacaccaacagcaaccaaa

SEQ ID NO: 44767 - DNA, 22 bp, Artificial Sequence
  chemically synthesized
tatacaccaacagcaaccaaat

SEQ ID NO: 44768 - DNA, 22 bp, Artificial Sequence
  chemically synthesized
tacaccaacagcaaccaaatgg

SEQ ID NO: 44769 - DNA, 22 bp, Artificial Sequence
  chemically synthesized
aaccccttgtacaatagatgca

SEQ ID NO: 44770 - DNA, 22 bp, Artificial Sequence
  chemically synthesized
gtacaatagatgcaaaaatggc

SEQ ID NO: 44771 - DNA, 22 bp, Artificial Sequence
  chemically synthesized
tacaatagatgcaaaaatggcc

SEQ ID NO: 44772 - DNA, 22 bp, Artificial Sequence
  chemically synthesized
atacaacccctatttattgcca

SEQ ID NO: 44773 - DNA, 22 bp, Artificial Sequence
  chemically synthesized
tttattgccatataaaacgtac

SEQ ID NO: 44774 - DNA, 22 bp, Artificial Sequence
  chemically synthesized
attgccatataaaacgtactct

SEQ ID NO: 44775 - DNA, 22 bp, Artificial Sequence
  chemically synthesized
ttgccatataaaacgtactctc

SEQ ID NO: 44776 - DNA, 22 bp, Artificial Sequence
  chemically synthesized
ccatataaaacgtactctcaag

SEQ ID NO: 44777 - DNA, 22 bp, Artificial Sequence
  chemically synthesized
tcaagatggattaaagacttaa

SEQ ID NO: 44778 - DNA, 22 bp, Artificial Sequence
  chemically synthesized
aagatggattaaagacttaaat

SEQ ID NO: 44779 - DNA, 22 bp, Artificial Sequence
  chemically synthesized
aagacttaaatataaaacttaa

SEQ ID NO: 44780 - DNA, 22 bp, Artificial Sequence
  chemically synthesized
aaatataaaacttaaaactata

SEQ ID NO: 44781 - DNA, 22 bp, Artificial Sequence
  chemically synthesized
aatataaaacttaaaactataa

SEQ ID NO: 44782 - DNA, 22 bp, Artificial Sequence
  chemically synthesized
aaaactataaaactactaaaag

SEQ ID NO: 44783 - DNA, 22 bp, Artificial Sequence
  chemically synthesized
aaactataaaactactaaaaga

SEQ ID NO: 44784 - DNA, 22 bp, Artificial Sequence
  chemically synthesized
taaaactactaaaagaaaacat

SEQ ID NO: 44785 - DNA, 22 bp, Artificial Sequence
  chemically synthesized
ctaaaagaaaacataagggaga

SEQ ID NO: 44786 - DNA, 22 bp, Artificial Sequence
  chemically synthesized
aaagaaaacataagggagacac

SEQ ID NO: 44787 - DNA, 22 bp, Artificial Sequence
  chemically synthesized
caagacatggctttgggcaaag

SEQ ID NO: 44788 - DNA, 22 bp, Artificial Sequence
  chemically synthesized
aagacatggctttgggcaaaga

SEQ ID NO: 44789 - DNA, 22 bp, Artificial Sequence
  chemically synthesized
tgggcaaagattttatggccaa

SEQ ID NO: 44790 - DNA, 22 bp, Artificial Sequence
  chemically synthesized
gggcaaagattttatggccaag

SEQ ID NO: 44791 - DNA, 22 bp, Artificial Sequence
  chemically synthesized
ggcaaagattttatggccaaga

SEQ ID NO: 44792 - DNA, 22 bp, Artificial Sequence
  chemically synthesized
tatggccaagacctcaaaagca

SEQ ID NO: 44793 - DNA, 22 bp, Artificial Sequence
  chemically synthesized
atggccaagacctcaaaagcac

SEQ ID NO: 44794 - DNA, 22 bp, Artificial Sequence
  chemically synthesized
tggccaagacctcaaaagcaca

SEQ ID NO: 44795 - DNA, 22 bp, Artificial Sequence
  chemically synthesized
aaaagcacaggcaacaaaagca

SEQ ID NO: 44796 - DNA, 22 bp, Artificial Sequence
  chemically synthesized
tattaagctaaaatacatctgc

SEQ ID NO: 44797 - DNA, 22 bp, Artificial Sequence
  chemically synthesized
agctaaaatacatctgcacagt

SEQ ID NO: 44798 - DNA, 22 bp, Artificial Sequence
  chemically synthesized
aaatacatctgcacagtaaagg

SEQ ID NO: 44799 - DNA, 22 bp, Artificial Sequence
  chemically synthesized
cacagtaaaggaaacaatcaac

SEQ ID NO: 44800 - DNA, 22 bp, Artificial Sequence
  chemically synthesized
ttgaatgcgagaaaatatttgc

SEQ ID NO: 44801 - DNA, 22 bp, Artificial Sequence
  chemically synthesized
aatgcgagaaaatatttgcata

SEQ ID NO: 44802 - DNA, 22 bp, Artificial Sequence
  chemically synthesized
gcatacatttgacaaggaatta

SEQ ID NO: 44803 - DNA, 22 bp, Artificial Sequence
  chemically synthesized
catacatttgacaaggaattaa

SEQ ID NO: 44804 - DNA, 22 bp, Artificial Sequence
  chemically synthesized
gacaaggaattaatctccagaa

SEQ ID NO: 44805 - DNA, 22 bp, Artificial Sequence
  chemically synthesized
acaaggaattaatctccagaat

SEQ ID NO: 44806 - DNA, 22 bp, Artificial Sequence
  chemically synthesized
atctccagaatatataagaaac

SEQ ID NO: 44807 - DNA, 22 bp, Artificial Sequence
  chemically synthesized
cagaatatataagaaactcaaa

SEQ ID NO: 44808 - DNA, 22 bp, Artificial Sequence
  chemically synthesized
aaacaactcaacagtggaaaaa

SEQ ID NO: 44809 - DNA, 22 bp, Artificial Sequence
  chemically synthesized
aacagtggaaaaacaaataatc

SEQ ID NO: 44810 - DNA, 22 bp, Artificial Sequence
  chemically synthesized
attaaaaaattggcaaaggata

SEQ ID NO: 44811 - DNA, 22 bp, Artificial Sequence
  chemically synthesized
aaaaattggcaaaggatatttt

SEQ ID NO: 44812 - DNA, 22 bp, Artificial Sequence
  chemically synthesized
gcaaaggatatttttcaaaaga

SEQ ID NO: 44813 - DNA, 22 bp, Artificial Sequence
  chemically synthesized
ttcaaaagaagacatacaaatg

SEQ ID NO: 44814 - DNA, 22 bp, Artificial Sequence
  chemically synthesized
tcaaaagaagacatacaaatgc

SEQ ID NO: 44815 - DNA, 22 bp, Artificial Sequence
  chemically synthesized
caaaagaagacatacaaatgca

SEQ ID NO: 44816 - DNA, 22 bp, Artificial Sequence
  chemically synthesized
aaaagaagacatacaaatgcac

SEQ ID NO: 44817 - DNA, 22 bp, Artificial Sequence
  chemically synthesized
ctcaacattactaatcatcaga

SEQ ID NO: 44818 - DNA, 22 bp, Artificial Sequence
  chemically synthesized
aacattactaatcatcagagaa

SEQ ID NO: 44819 - DNA, 22 bp, Artificial Sequence
  chemically synthesized
ctaatcatcagagaaatgcaaa

SEQ ID NO: 44820 - DNA, 22 bp, Artificial Sequence
  chemically synthesized
atcatcagagaaatgcaaatca

SEQ ID NO: 44821 - DNA, 22 bp, Artificial Sequence
  chemically synthesized
atgccagttagaatcatcatga

SEQ ID NO: 44822 - DNA, 22 bp, Artificial Sequence
  chemically synthesized
tgccagttagaatcatcatgat

SEQ ID NO: 44823 - DNA, 22 bp, Artificial Sequence
  chemically synthesized
gaatcatcatgatttaaataaa

SEQ ID NO: 44824 - DNA, 22 bp, Artificial Sequence
  chemically synthesized
aaataaattaataaataaataa

SEQ ID NO: 44825 - DNA, 22 bp, Artificial Sequence
  chemically synthesized
aataaattaataaataaataac

SEQ ID NO: 44826 - DNA, 22 bp, Artificial Sequence
  chemically synthesized
ataaataaataacacatgctgg

SEQ ID NO: 44827 - DNA, 22 bp, Artificial Sequence
  chemically synthesized
gcaaggatgtgaaggaaaaggc

SEQ ID NO: 44828 - DNA, 22 bp, Artificial Sequence
  chemically synthesized
gtaggcactattggtaagcatg

SEQ ID NO: 44829 - DNA, 22 bp, Artificial Sequence
  chemically synthesized
ttggtaagcatgcaaattagta

SEQ ID NO: 44830 - DNA, 22 bp, Artificial Sequence
  chemically synthesized
gtaagcatgcaaattagtatag

SEQ ID NO: 44831 - DNA, 22 bp, Artificial Sequence
  chemically synthesized
gtatagccactatggaaaacaa

SEQ ID NO: 44832 - DNA, 22 bp, Artificial Sequence
  chemically synthesized
tggaaaacaatatgtagattta

SEQ ID NO: 44833 - DNA, 22 bp, Artificial Sequence
  chemically synthesized
accaaaaagctaaaaattgaac

SEQ ID NO: 44834 - DNA, 22 bp, Artificial Sequence
  chemically synthesized
ccaaaaagctaaaaattgaact

SEQ ID NO: 44835 - DNA, 22 bp, Artificial Sequence
  chemically synthesized
aaaattgaactatcataagatc

SEQ ID NO: 44836 - DNA, 22 bp, Artificial Sequence
  chemically synthesized
aactatcataagatccagcaat

SEQ ID NO: 44837 - DNA, 22 bp, Artificial Sequence
  chemically synthesized
tcataagatccagcaatcttat

SEQ ID NO: 44838 - DNA, 22 bp, Artificial Sequence
  chemically synthesized
attactgggtatttatccaaag

SEQ ID NO: 44839 - DNA, 22 bp, Artificial Sequence
  chemically synthesized
ttactgggtatttatccaaagg

SEQ ID NO: 44840 - DNA, 22 bp, Artificial Sequence
  chemically synthesized
ctgggtatttatccaaaggaaa

SEQ ID NO: 44841 - DNA, 22 bp, Artificial Sequence
  chemically synthesized
ggtatttatccaaaggaaaaga

SEQ ID NO: 44842 - DNA, 22 bp, Artificial Sequence
  chemically synthesized
atccaaaggaaaagaattcaga

SEQ ID NO: 44843 - DNA, 22 bp, Artificial Sequence
  chemically synthesized
tccaaaggaaaagaattcagaa

SEQ ID NO: 44844 - DNA, 22 bp, Artificial Sequence
  chemically synthesized
agaataataaacagatactggt

SEQ ID NO: 44845 - DNA, 22 bp, Artificial Sequence
  chemically synthesized
gtaccacactgtttattgcagc

SEQ ID NO: 44846 - DNA, 22 bp, Artificial Sequence
  chemically synthesized
tttattgcagcacgattcacat

SEQ ID NO: 44847 - DNA, 22 bp, Artificial Sequence
  chemically synthesized
attgcagcacgattcacattag

SEQ ID NO: 44848 - DNA, 22 bp, Artificial Sequence
  chemically synthesized
ttgcagcacgattcacattagc

SEQ ID NO: 44849 - DNA, 22 bp, Artificial Sequence
  chemically synthesized
cagcacgattcacattagcaaa

SEQ ID NO: 44850 - DNA, 22 bp, Artificial Sequence
  chemically synthesized
acattagcaaagatatggaatc

SEQ ID NO: 44851 - DNA, 22 bp, Artificial Sequence
  chemically synthesized
gcaaagatatggaatcaaccta

SEQ ID NO: 44852 - DNA, 22 bp, Artificial Sequence
  chemically synthesized
agtgtccatcaatggatgaatg

SEQ ID NO: 44853 - DNA, 22 bp, Artificial Sequence
  chemically synthesized
aatattattcaaccatacaaat

SEQ ID NO: 44854 - DNA, 22 bp, Artificial Sequence
  chemically synthesized
ttcaaccatacaaatataaaat

SEQ ID NO: 44855 - DNA, 22 bp, Artificial Sequence
  chemically synthesized
aaccatacaaatataaaatcat

SEQ ID NO: 44856 - DNA, 22 bp, Artificial Sequence
  chemically synthesized
catttgcagcaacatggatgaa

SEQ ID NO: 44857 - DNA, 22 bp, Artificial Sequence
  chemically synthesized
atttgcagcaacatggatgaaa

SEQ ID NO: 44858 - DNA, 22 bp, Artificial Sequence
  chemically synthesized
gcagcaacatggatgaaactgg

SEQ ID NO: 44859 - DNA, 22 bp, Artificial Sequence
  chemically synthesized
cagcaacatggatgaaactgga

SEQ ID NO: 44860 - DNA, 22 bp, Artificial Sequence
  chemically synthesized
gaagtcattatgttaaacgaaa

SEQ ID NO: 44861 - DNA, 22 bp, Artificial Sequence
  chemically synthesized
tgttaaacgaaataagccaggc

SEQ ID NO: 44862 - DNA, 22 bp, Artificial Sequence
  chemically synthesized
aacgaaataagccaggcataga

SEQ ID NO: 44863 - DNA, 22 bp, Artificial Sequence
  chemically synthesized
tgcatgttctcactgatatgtg

SEQ ID NO: 44864 - DNA, 22 bp, Artificial Sequence
  chemically synthesized
gcatgttctcactgatatgtgg

SEQ ID NO: 44865 - DNA, 22 bp, Artificial Sequence
  chemically synthesized
catgttctcactgatatgtggg

SEQ ID NO: 44866 - DNA, 22 bp, Artificial Sequence
  chemically synthesized
tcactgatatgtgggagctaaa

SEQ ID NO: 44867 - DNA, 22 bp, Artificial Sequence
  chemically synthesized
actgatatgtgggagctaaaaa

SEQ ID NO: 44868 - DNA, 22 bp, Artificial Sequence
  chemically synthesized
atatgtgggagctaaaaaagtt

SEQ ID NO: 44869 - DNA, 22 bp, Artificial Sequence
  chemically synthesized
aaaaagttaatatcatgtaggt

SEQ ID NO: 44870 - DNA, 22 bp, Artificial Sequence
  chemically synthesized
atatcatgtaggtagagagtag

SEQ ID NO: 44871 - DNA, 22 bp, Artificial Sequence
  chemically synthesized
tgggaggaagggagacgaagag

SEQ ID NO: 44872 - DNA, 22 bp, Artificial Sequence
  chemically synthesized
gttaatggaaacaggcagttag

SEQ ID NO: 44873 - DNA, 22 bp, Artificial Sequence
  chemically synthesized
atggaaacaggcagttagatag

SEQ ID NO: 44874 - DNA, 22 bp, Artificial Sequence
  chemically synthesized
gatagaaggaatatgttctgat

SEQ ID NO: 44875 - DNA, 22 bp, Artificial Sequence
  chemically synthesized
tgatgttcaatagcaaagtagg

SEQ ID NO: 44876 - DNA, 22 bp, Artificial Sequence
  chemically synthesized
atgttcaatagcaaagtagggt

SEQ ID NO: 44877 - DNA, 22 bp, Artificial Sequence
  chemically synthesized
aatagcaaagtagggtgattat

SEQ ID NO: 44878 - DNA, 22 bp, Artificial Sequence
  chemically synthesized
tagttaaaaacaatatattgta

SEQ ID NO: 44879 - DNA, 22 bp, Artificial Sequence
  chemically synthesized
aaaacaatatattgtatatttc

SEQ ID NO: 44880 - DNA, 22 bp, Artificial Sequence
  chemically synthesized
tatatttcaaaatagtagaaga

SEQ ID NO: 44881 - DNA, 22 bp, Artificial Sequence
  chemically synthesized
caaaatagtagaagaaaggtct

SEQ ID NO: 44882 - DNA, 22 bp, Artificial Sequence
  chemically synthesized
aaaatagtagaagaaaggtctt

SEQ ID NO: 44883 - DNA, 22 bp, Artificial Sequence
  chemically synthesized
gaaatgttcctaacacatagaa

SEQ ID NO: 44884 - DNA, 22 bp, Artificial Sequence
  chemically synthesized
aaatgttcctaacacatagaaa

SEQ ID NO: 44885 - DNA, 22 bp, Artificial Sequence
  chemically synthesized
ctaacacatagaaacgataaat

SEQ ID NO: 44886 - DNA, 22 bp, Artificial Sequence
  chemically synthesized
acacatagaaacgataaatact

SEQ ID NO: 44887 - DNA, 22 bp, Artificial Sequence
  chemically synthesized
gaggtgatgaataccccaaata

SEQ ID NO: 44888 - DNA, 22 bp, Artificial Sequence
  chemically synthesized
aggtgatgaataccccaaatac

SEQ ID NO: 44889 - DNA, 22 bp, Artificial Sequence
  chemically synthesized
acttgatcattatacattatat

SEQ ID NO: 44890 - DNA, 22 bp, Artificial Sequence
  chemically synthesized
gatcattatacattatatgcat

SEQ ID NO: 44891 - DNA, 22 bp, Artificial Sequence
  chemically synthesized
atcattatacattatatgcatg

SEQ ID NO: 44892 - DNA, 22 bp, Artificial Sequence
  chemically synthesized
tacattatatgcatgtaacaaa

SEQ ID NO: 44893 - DNA, 22 bp, Artificial Sequence
  chemically synthesized
tatgcatgtaacaaaatgtcac

SEQ ID NO: 44894 - DNA, 22 bp, Artificial Sequence
  chemically synthesized
atacatataaacacgtcatata

SEQ ID NO: 44895 - DNA, 22 bp, Artificial Sequence
  chemically synthesized
atattggttgaggcctgattgt

SEQ ID NO: 44896 - DNA, 22 bp, Artificial Sequence
  chemically synthesized
gttgaggcctgattgtaagtaa

SEQ ID NO: 44897 - DNA, 22 bp, Artificial Sequence
  chemically synthesized
aggcctgattgtaagtaaatct

SEQ ID NO: 44898 - DNA, 22 bp, Artificial Sequence
  chemically synthesized
attgtaagtaaatctttgtccc

SEQ ID NO: 44899 - DNA, 22 bp, Artificial Sequence
  chemically synthesized
taagtaaatctttgtccctcca

SEQ ID NO: 44900 - DNA, 22 bp, Artificial Sequence
  chemically synthesized
tgtccctccagacatttccctg

SEQ ID NO: 44901 - DNA, 22 bp, Artificial Sequence
  chemically synthesized
gtccctccagacatttccctgt

SEQ ID NO: 44902 - DNA, 22 bp, Artificial Sequence
  chemically synthesized
tccctccagacatttccctgta

SEQ ID NO: 44903 - DNA, 22 bp, Artificial Sequence
  chemically synthesized
cagacatttccctgtactgtct

SEQ ID NO: 44904 - DNA, 22 bp, Artificial Sequence
  chemically synthesized
ccctgtactgtcttgctgtgag

SEQ ID NO: 44905 - DNA, 22 bp, Artificial Sequence
  chemically synthesized
cctgtactgtcttgctgtgagg

SEQ ID NO: 44906 - DNA, 22 bp, Artificial Sequence
  chemically synthesized
tactgtcttgctgtgaggagct

SEQ ID NO: 44907 - DNA, 22 bp, Artificial Sequence
  chemically synthesized
tcttgctgtgaggagcttcttt

SEQ ID NO: 44908 - DNA, 22 bp, Artificial Sequence
  chemically synthesized
gctgtgaggagcttcttttact

SEQ ID NO: 44909 - DNA, 22 bp, Artificial Sequence
  chemically synthesized
ctgtgaggagcttcttttactg

SEQ ID NO: 44910 - DNA, 22 bp, Artificial Sequence
  chemically synthesized
tgaggagcttcttttactgcta

SEQ ID NO: 44911 - DNA, 22 bp, Artificial Sequence
  chemically synthesized
cttttactgctatttcttatat

SEQ ID NO: 44912 - DNA, 22 bp, Artificial Sequence
  chemically synthesized
ttttactgctatttcttatatt

SEQ ID NO: 44913 - DNA, 22 bp, Artificial Sequence
  chemically synthesized
ttactgctatttcttatattcc

SEQ ID NO: 44914 - DNA, 22 bp, Artificial Sequence
  chemically synthesized
tactgctatttcttatattcca

SEQ ID NO: 44915 - DNA, 22 bp, Artificial Sequence
  chemically synthesized
actgctatttcttatattccaa

SEQ ID NO: 44916 - DNA, 22 bp, Artificial Sequence
  chemically synthesized
ctgctatttcttatattccaac

SEQ ID NO: 44917 - DNA, 22 bp, Artificial Sequence
  chemically synthesized
ctatttcttatattccaacacc

SEQ ID NO: 44918 - DNA, 22 bp, Artificial Sequence
  chemically synthesized
tttcttatattccaacaccatt

SEQ ID NO: 44919 - DNA, 22 bp, Artificial Sequence
  chemically synthesized
cttatattccaacaccatttta

SEQ ID NO: 44920 - DNA, 22 bp, Artificial Sequence
  chemically synthesized
ttatattccaacaccattttag

SEQ ID NO: 44921 - DNA, 22 bp, Artificial Sequence
  chemically synthesized
atattccaacaccattttagcc

SEQ ID NO: 44922 - DNA, 22 bp, Artificial Sequence
  chemically synthesized
tattccaacaccattttagccc

SEQ ID NO: 44923 - DNA, 22 bp, Artificial Sequence
  chemically synthesized
caacaccattttagcccttttt

SEQ ID NO: 44924 - DNA, 22 bp, Artificial Sequence
  chemically synthesized
tagcccttttttgtcctcccca

SEQ ID NO: 44925 - DNA, 22 bp, Artificial Sequence
  chemically synthesized
agcccttttttgtcctccccat

SEQ ID NO: 44926 - DNA, 22 bp, Artificial Sequence
  chemically synthesized
gcccttttttgtcctccccata

SEQ ID NO: 44927 - DNA, 22 bp, Artificial Sequence
  chemically synthesized
ttttgtcctccccatattttta

SEQ ID NO: 44928 - DNA, 22 bp, Artificial Sequence
  chemically synthesized
tttgtcctccccatatttttac

SEQ ID NO: 44929 - DNA, 22 bp, Artificial Sequence
  chemically synthesized
ttgtcctccccatatttttacc

SEQ ID NO: 44930 - DNA, 22 bp, Artificial Sequence
  chemically synthesized
tgtcctccccatatttttacct

SEQ ID NO: 44931 - DNA, 22 bp, Artificial Sequence
  chemically synthesized
gtcctccccatatttttacctc

SEQ ID NO: 44932 - DNA, 22 bp, Artificial Sequence
  chemically synthesized
tcctccccatatttttacctcg

SEQ ID NO: 44933 - DNA, 22 bp, Artificial Sequence
  chemically synthesized
cccatatttttacctcggtttt

SEQ ID NO: 44934 - DNA, 22 bp, Artificial Sequence
  chemically synthesized
ttacctcggtttttactgttta

SEQ ID NO: 44935 - DNA, 22 bp, Artificial Sequence
  chemically synthesized
tacctcggtttttactgtttat

SEQ ID NO: 44936 - DNA, 22 bp, Artificial Sequence
  chemically synthesized
acctcggtttttactgtttata

SEQ ID NO: 44937 - DNA, 22 bp, Artificial Sequence
  chemically synthesized
cctcggtttttactgtttatat

SEQ ID NO: 44938 - DNA, 22 bp, Artificial Sequence
  chemically synthesized
ggtttttactgtttatatagca

SEQ ID NO: 44939 - DNA, 22 bp, Artificial Sequence
  chemically synthesized
ttactgtttatatagcacactt

SEQ ID NO: 44940 - DNA, 22 bp, Artificial Sequence
  chemically synthesized
tactgtttatatagcacacttt

SEQ ID NO: 44941 - DNA, 22 bp, Artificial Sequence
  chemically synthesized
actgtttatatagcacactttg

SEQ ID NO: 44942 - DNA, 22 bp, Artificial Sequence
  chemically synthesized
ctgtttatatagcacactttgt

SEQ ID NO: 44943 - DNA, 22 bp, Artificial Sequence
  chemically synthesized
tttatatagcacactttgtgct

SEQ ID NO: 44944 - DNA, 22 bp, Artificial Sequence
  chemically synthesized
atatagcacactttgtgctata

SEQ ID NO: 44945 - DNA, 22 bp, Artificial Sequence
  chemically synthesized
tatagcacactttgtgctatag

SEQ ID NO: 44946 - DNA, 22 bp, Artificial Sequence
  chemically synthesized
tgtgctatagtttacctcagtt

SEQ ID NO: 44947 - DNA, 22 bp, Artificial Sequence
  chemically synthesized
gtgctatagtttacctcagttt

SEQ ID NO: 44948 - DNA, 22 bp, Artificial Sequence
  chemically synthesized
tgctatagtttacctcagtttt

SEQ ID NO: 44949 - DNA, 22 bp, Artificial Sequence
  chemically synthesized
tagtttacctcagtttttacta

SEQ ID NO: 44950 - DNA, 22 bp, Artificial Sequence
  chemically synthesized
acctcagtttttactatttata

SEQ ID NO: 44951 - DNA, 22 bp, Artificial Sequence
  chemically synthesized
cctcagtttttactatttataa

SEQ ID NO: 44952 - DNA, 22 bp, Artificial Sequence
  chemically synthesized
agtttttactatttataaagca

SEQ ID NO: 44953 - DNA, 22 bp, Artificial Sequence
  chemically synthesized
ttactatttataaagcacattt

SEQ ID NO: 44954 - DNA, 22 bp, Artificial Sequence
  chemically synthesized
tactatttataaagcacatttt

SEQ ID NO: 44955 - DNA, 22 bp, Artificial Sequence
  chemically synthesized
actatttataaagcacattttg

SEQ ID NO: 44956 - DNA, 22 bp, Artificial Sequence
  chemically synthesized
ctatttataaagcacattttgc

SEQ ID NO: 44957 - DNA, 22 bp, Artificial Sequence
  chemically synthesized
tttataaagcacattttgcccc

SEQ ID NO: 44958 - DNA, 22 bp, Artificial Sequence
  chemically synthesized
ataaagcacattttgccccaaa

SEQ ID NO: 44959 - DNA, 22 bp, Artificial Sequence
  chemically synthesized
taaagcacattttgccccaaac

SEQ ID NO: 44960 - DNA, 22 bp, Artificial Sequence
  chemically synthesized
tgccccaaacttctctcttaac

SEQ ID NO: 44961 - DNA, 22 bp, Artificial Sequence
  chemically synthesized
gccccaaacttctctcttaaca

SEQ ID NO: 44962 - DNA, 22 bp, Artificial Sequence
  chemically synthesized
ccccaaacttctctcttaacaa

SEQ ID NO: 44963 - DNA, 22 bp, Artificial Sequence
  chemically synthesized
ctctcttaacaagctagaatat

SEQ ID NO: 44964 - DNA, 22 bp, Artificial Sequence
  chemically synthesized
tctcttaacaagctagaatata

SEQ ID NO: 44965 - DNA, 22 bp, Artificial Sequence
  chemically synthesized
tcttaacaagctagaatataag

SEQ ID NO: 44966 - DNA, 22 bp, Artificial Sequence
  chemically synthesized
ttaacaagctagaatataagtg

SEQ ID NO: 44967 - DNA, 22 bp, Artificial Sequence
  chemically synthesized
aacaagctagaatataagtgaa

SEQ ID NO: 44968 - DNA, 22 bp, Artificial Sequence
  chemically synthesized
acaagctagaatataagtgaat

SEQ ID NO: 44969 - DNA, 22 bp, Artificial Sequence
  chemically synthesized
gaatataagtgaatgcaagagc

SEQ ID NO: 44970 - DNA, 22 bp, Artificial Sequence
  chemically synthesized
ctattttcatatttgaggtata

SEQ ID NO: 44971 - DNA, 22 bp, Artificial Sequence
  chemically synthesized
ttttcatatttgaggtataaac

SEQ ID NO: 44972 - DNA, 22 bp, Artificial Sequence
  chemically synthesized
tcatatttgaggtataaaccaa

SEQ ID NO: 44973 - DNA, 22 bp, Artificial Sequence
  chemically synthesized
catatttgaggtataaaccaag

SEQ ID NO: 44974 - DNA, 22 bp, Artificial Sequence
  chemically synthesized
atatttgaggtataaaccaagg

SEQ ID NO: 44975 - DNA, 22 bp, Artificial Sequence
  chemically synthesized
gaggtataaaccaaggagattt

SEQ ID NO: 44976 - DNA, 22 bp, Artificial Sequence
  chemically synthesized
aggtataaaccaaggagattta

SEQ ID NO: 44977 - DNA, 22 bp, Artificial Sequence
  chemically synthesized
acatacacatatatatttttaa

SEQ ID NO: 44978 - DNA, 22 bp, Artificial Sequence
  chemically synthesized
catacacatatatatttttaaa

SEQ ID NO: 44979 - DNA, 22 bp, Artificial Sequence
  chemically synthesized
ttaaatctgcaaataaatggtt

SEQ ID NO: 44980 - DNA, 22 bp, Artificial Sequence
  chemically synthesized
taaatctgcaaataaatggttt

SEQ ID NO: 44981 - DNA, 22 bp, Artificial Sequence
  chemically synthesized
aaatctgcaaataaatggtttt

SEQ ID NO: 44982 - DNA, 22 bp, Artificial Sequence
  chemically synthesized
aatctgcaaataaatggtttta

SEQ ID NO: 44983 - DNA, 22 bp, Artificial Sequence
  chemically synthesized
caaataaatggttttattctga

SEQ ID NO: 44984 - DNA, 22 bp, Artificial Sequence
  chemically synthesized
tattctgacattaaaaaagaaa

SEQ ID NO: 44985 - DNA, 22 bp, Artificial Sequence
  chemically synthesized
attctgacattaaaaaagaaaa

SEQ ID NO: 44986 - DNA, 22 bp, Artificial Sequence
  chemically synthesized
ttctgacattaaaaaagaaaat

SEQ ID NO: 44987 - DNA, 22 bp, Artificial Sequence
  chemically synthesized
tgacattaaaaaagaaaatact

SEQ ID NO: 44988 - DNA, 22 bp, Artificial Sequence
  chemically synthesized
acattaaaaaagaaaatactta

SEQ ID NO: 44989 - DNA, 22 bp, Artificial Sequence
  chemically synthesized
aaaaagaaaatacttaatatca

SEQ ID NO: 44990 - DNA, 22 bp, Artificial Sequence
  chemically synthesized
aatatcattaatgaatgatcgt

SEQ ID NO: 44991 - DNA, 22 bp, Artificial Sequence
  chemically synthesized
atatcattaatgaatgatcgtt

SEQ ID NO: 44992 - DNA, 22 bp, Artificial Sequence
  chemically synthesized
atgaatgatcgttttaccacag

SEQ ID NO: 44993 - DNA, 22 bp, Artificial Sequence
  chemically synthesized
taccacagcgtaggtcattgaa

SEQ ID NO: 44994 - DNA, 22 bp, Artificial Sequence
  chemically synthesized
accacagcgtaggtcattgaat

SEQ ID NO: 44995 - DNA, 22 bp, Artificial Sequence
  chemically synthesized
ccacagcgtaggtcattgaatt

SEQ ID NO: 44996 - DNA, 22 bp, Artificial Sequence
  chemically synthesized
aatttgaacttaaccttcactt

SEQ ID NO: 44997 - DNA, 22 bp, Artificial Sequence
  chemically synthesized
gaacttaaccttcactttcaaa

SEQ ID NO: 44998 - DNA, 22 bp, Artificial Sequence
  chemically synthesized
aacttaaccttcactttcaaac

SEQ ID NO: 44999 - DNA, 22 bp, Artificial Sequence
  chemically synthesized
aaccttcactttcaaacaagta

SEQ ID NO: 45000 - DNA, 22 bp, Artificial Sequence
  chemically synthesized
accttcactttcaaacaagtac

SEQ ID NO: 45001 - DNA, 22 bp, Artificial Sequence
  chemically synthesized
cactttcaaacaagtactttgt

SEQ ID NO: 45002 - DNA, 22 bp, Artificial Sequence
  chemically synthesized
actttcaaacaagtactttgta

SEQ ID NO: 45003 - DNA, 22 bp, Artificial Sequence
  chemically synthesized
tcaaacaagtactttgtatttt

SEQ ID NO: 45004 - DNA, 22 bp, Artificial Sequence
  chemically synthesized
caaacaagtactttgtatttta

SEQ ID NO: 45005 - DNA, 22 bp, Artificial Sequence
  chemically synthesized
aaacaagtactttgtattttat

SEQ ID NO: 45006 - DNA, 22 bp, Artificial Sequence
  chemically synthesized
tgtattttattgatctctattt

SEQ ID NO: 45007 - DNA, 22 bp, Artificial Sequence
  chemically synthesized
gtattttattgatctctatttt

SEQ ID NO: 45008 - DNA, 22 bp, Artificial Sequence
  chemically synthesized
tattttattgatctctattttc

SEQ ID NO: 45009 - DNA, 22 bp, Artificial Sequence
  chemically synthesized
tattgatctctattttcctgga

SEQ ID NO: 45010 - DNA, 22 bp, Artificial Sequence
  chemically synthesized
attgatctctattttcctggaa

SEQ ID NO: 45011 - DNA, 22 bp, Artificial Sequence
  chemically synthesized
ttgatctctattttcctggaac

SEQ ID NO: 45012 - DNA, 22 bp, Artificial Sequence
  chemically synthesized
atctctattttcctggaacaac

SEQ ID NO: 45013 - DNA, 22 bp, Artificial Sequence
  chemically synthesized
tattttcctggaacaacatggg

SEQ ID NO: 45014 - DNA, 22 bp, Artificial Sequence
  chemically synthesized
ttttcctggaacaacatggggg

SEQ ID NO: 45015 - DNA, 22 bp, Artificial Sequence
  chemically synthesized
tcctggaacaacatgggggcta

SEQ ID NO: 45016 - DNA, 22 bp, Artificial Sequence
  chemically synthesized
cctggaacaacatgggggctat

SEQ ID NO: 45017 - DNA, 22 bp, Artificial Sequence
  chemically synthesized
ctggaacaacatgggggctatg

SEQ ID NO: 45018 - DNA, 22 bp, Artificial Sequence
  chemically synthesized
gaacaacatgggggctatgttt

SEQ ID NO: 45019 - DNA, 22 bp, Artificial Sequence
  chemically synthesized
tgtttagcgtgaggacaaagta

SEQ ID NO: 45020 - DNA, 22 bp, Artificial Sequence
  chemically synthesized
agcgtgaggacaaagtatcaca

SEQ ID NO: 45021 - DNA, 22 bp, Artificial Sequence
  chemically synthesized
gcgtgaggacaaagtatcacaa

SEQ ID NO: 45022 - DNA, 22 bp, Artificial Sequence
  chemically synthesized
tcacctgaaagaaaagatgagc

SEQ ID NO: 45023 - DNA, 22 bp, Artificial Sequence
  chemically synthesized
cacctgaaagaaaagatgagct

SEQ ID NO: 45024 - DNA, 22 bp, Artificial Sequence
  chemically synthesized
acctgaaagaaaagatgagcta

SEQ ID NO: 45025 - DNA, 22 bp, Artificial Sequence
  chemically synthesized
aaagaaaagatgagctaccatg

SEQ ID NO: 45026 - DNA, 22 bp, Artificial Sequence
  chemically synthesized
ccatggtacatataacaatgag

SEQ ID NO: 45027 - DNA, 22 bp, Artificial Sequence
  chemically synthesized
aaactctaagtcgtcatctggc

SEQ ID NO: 45028 - DNA, 22 bp, Artificial Sequence
  chemically synthesized
taagtcgtcatctggcaacact

SEQ ID NO: 45029 - DNA, 22 bp, Artificial Sequence
  chemically synthesized
agtcgtcatctggcaacactgc

SEQ ID NO: 45030 - DNA, 22 bp, Artificial Sequence
  chemically synthesized
gcaacactgccaatttactaaa

SEQ ID NO: 45031 - DNA, 22 bp, Artificial Sequence
  chemically synthesized
ccaatttactaaaaatcactat

SEQ ID NO: 45032 - DNA, 22 bp, Artificial Sequence
  chemically synthesized
actaaaaatcactatttcaaag

SEQ ID NO: 45033 - DNA, 22 bp, Artificial Sequence
  chemically synthesized
ctaaaaatcactatttcaaaga

SEQ ID NO: 45034 - DNA, 22 bp, Artificial Sequence
  chemically synthesized
aaaatcactatttcaaagaagt

SEQ ID NO: 45035 - DNA, 22 bp, Artificial Sequence
  chemically synthesized
tttcaaagaagtatagaataga

SEQ ID NO: 45036 - DNA, 22 bp, Artificial Sequence
  chemically synthesized
caaagaagtatagaatagatat

SEQ ID NO: 45037 - DNA, 22 bp, Artificial Sequence
  chemically synthesized
aaagaagtatagaatagatatc

SEQ ID NO: 45038 - DNA, 22 bp, Artificial Sequence
  chemically synthesized
tttctctgcctctctctcgctc

SEQ ID NO: 45039 - DNA, 22 bp, Artificial Sequence
  chemically synthesized
tctctgcctctctctcgctctc

SEQ ID NO: 45040 - DNA, 22 bp, Artificial Sequence
  chemically synthesized
ctctgcctctctctcgctctct

SEQ ID NO: 45041 - DNA, 22 bp, Artificial Sequence
  chemically synthesized
tctgcctctctctcgctctctc

SEQ ID NO: 45042 - DNA, 22 bp, Artificial Sequence
  chemically synthesized
tgcctctctctcgctctctctc

SEQ ID NO: 45043 - DNA, 22 bp, Artificial Sequence
  chemically synthesized
cctctctctcgctctctctctc

SEQ ID NO: 45044 - DNA, 22 bp, Artificial Sequence
  chemically synthesized
tctctcgctctctctctctctc

SEQ ID NO: 45045 - DNA, 22 bp, Artificial Sequence
  chemically synthesized
tctcgctctctctctctctctc

SEQ ID NO: 45046 - DNA, 22 bp, Artificial Sequence
  chemically synthesized
tcgctctctctctctctctccc

SEQ ID NO: 45047 - DNA, 22 bp, Artificial Sequence
  chemically synthesized
gctctctctctctctctccccc

SEQ ID NO: 45048 - DNA, 22 bp, Artificial Sequence
  chemically synthesized
tctctctctctctcccccatct

SEQ ID NO: 45049 - DNA, 22 bp, Artificial Sequence
  chemically synthesized
tctctctctctcccccatctct

SEQ ID NO: 45050 - DNA, 22 bp, Artificial Sequence
  chemically synthesized
tctctctctcccccatctctct

SEQ ID NO: 45051 - DNA, 22 bp, Artificial Sequence
  chemically synthesized
tctctctcccccatctctctct

SEQ ID NO: 45052 - DNA, 22 bp, Artificial Sequence
  chemically synthesized
tctctcccccatctctctctgt

SEQ ID NO: 45053 - DNA, 22 bp, Artificial Sequence
  chemically synthesized
tctcccccatctctctctgtct

SEQ ID NO: 45054 - DNA, 22 bp, Artificial Sequence
  chemically synthesized
tcccccatctctctctgtctct

SEQ ID NO: 45055 - DNA, 22 bp, Artificial Sequence
  chemically synthesized
ccccatctctctctgtctctct

SEQ ID NO: 45056 - DNA, 22 bp, Artificial Sequence
  chemically synthesized
tctctgtctctctctctatata

SEQ ID NO: 45057 - DNA, 22 bp, Artificial Sequence
  chemically synthesized
tctgtctctctctctatatata

SEQ ID NO: 45058 - DNA, 22 bp, Artificial Sequence
  chemically synthesized
tgtctctctctctatatatatg

SEQ ID NO: 45059 - DNA, 22 bp, Artificial Sequence
  chemically synthesized
tctctctctctatatatatgta

SEQ ID NO: 45060 - DNA, 22 bp, Artificial Sequence
  chemically synthesized
tctctctatatatatgtataca

SEQ ID NO: 45061 - DNA, 22 bp, Artificial Sequence
  chemically synthesized
tctctatatatatgtatacaca

SEQ ID NO: 45062 - DNA, 22 bp, Artificial Sequence
  chemically synthesized
tctatatatatgtatacacaca

SEQ ID NO: 45063 - DNA, 22 bp, Artificial Sequence
  chemically synthesized
tatatatatgtatacacacata

SEQ ID NO: 45064 - DNA, 22 bp, Artificial Sequence
  chemically synthesized
tatatatgtatacacacatata

SEQ ID NO: 45065 - DNA, 22 bp, Artificial Sequence
  chemically synthesized
tacacatatggagaaatttcac

SEQ ID NO: 45066 - DNA, 22 bp, Artificial Sequence
  chemically synthesized
cactattttgtatatgcttaaa

SEQ ID NO: 45067 - DNA, 22 bp, Artificial Sequence
  chemically synthesized
actattttgtatatgcttaaaa

SEQ ID NO: 45068 - DNA, 22 bp, Artificial Sequence
  chemically synthesized
ttttgtatatgcttaaaaatta

SEQ ID NO: 45069 - DNA, 22 bp, Artificial Sequence
  chemically synthesized
tgtatatgcttaaaaattacag

SEQ ID NO: 45070 - DNA, 22 bp, Artificial Sequence
  chemically synthesized
gtatatgcttaaaaattacaga

SEQ ID NO: 45071 - DNA, 22 bp, Artificial Sequence
  chemically synthesized
tatatgcttaaaaattacagac

SEQ ID NO: 45072 - DNA, 22 bp, Artificial Sequence
  chemically synthesized
aaaaattacagactttggaagt

SEQ ID NO: 45073 - DNA, 22 bp, Artificial Sequence
  chemically synthesized
aaaattacagactttggaagtc

SEQ ID NO: 45074 - DNA, 22 bp, Artificial Sequence
  chemically synthesized
cagactttggaagtcatatgac

SEQ ID NO: 45075 - DNA, 22 bp, Artificial Sequence
  chemically synthesized
tggaagtcatatgactatttca

SEQ ID NO: 45076 - DNA, 22 bp, Artificial Sequence
  chemically synthesized
ggaagtcatatgactatttcag

SEQ ID NO: 45077 - DNA, 22 bp, Artificial Sequence
  chemically synthesized
gaagtcatatgactatttcagt

SEQ ID NO: 45078 - DNA, 22 bp, Artificial Sequence
  chemically synthesized
tttcagtgtgtgtggctactaa

SEQ ID NO: 45079 - DNA, 22 bp, Artificial Sequence
  chemically synthesized
cagtgtgtgtggctactaatct

SEQ ID NO: 45080 - DNA, 22 bp, Artificial Sequence
  chemically synthesized
agtgtgtgtggctactaatctc

SEQ ID NO: 45081 - DNA, 22 bp, Artificial Sequence
  chemically synthesized
ctaatctcaccctcctgttcca

SEQ ID NO: 45082 - DNA, 22 bp, Artificial Sequence
  chemically synthesized
atctcaccctcctgttccaaaa

SEQ ID NO: 45083 - DNA, 22 bp, Artificial Sequence
  chemically synthesized
accctcctgttccaaaacacag

SEQ ID NO: 45084 - DNA, 22 bp, Artificial Sequence
  chemically synthesized
ctgttccaaaacacagttgcag

SEQ ID NO: 45085 - DNA, 22 bp, Artificial Sequence
  chemically synthesized
ttccaaaacacagttgcagaag

SEQ ID NO: 45086 - DNA, 22 bp, Artificial Sequence
  chemically synthesized
caaaacacagttgcagaagcag

SEQ ID NO: 45087 - DNA, 22 bp, Artificial Sequence
  chemically synthesized
cagaagcagaggaagtcattat

SEQ ID NO: 45088 - DNA, 22 bp, Artificial Sequence
  chemically synthesized
tacacttagaacatcattttat

SEQ ID NO: 45089 - DNA, 22 bp, Artificial Sequence
  chemically synthesized
agaacatcattttataaggcag

SEQ ID NO: 45090 - DNA, 22 bp, Artificial Sequence
  chemically synthesized
gaacatcattttataaggcagc

SEQ ID NO: 45091 - DNA, 22 bp, Artificial Sequence
  chemically synthesized
tataaggcagcaggtctggtag

SEQ ID NO: 45092 - DNA, 22 bp, Artificial Sequence
  chemically synthesized
ataaggcagcaggtctggtagg

SEQ ID NO: 45093 - DNA, 22 bp, Artificial Sequence
  chemically synthesized
taaggcagcaggtctggtagga

SEQ ID NO: 45094 - DNA, 22 bp, Artificial Sequence
  chemically synthesized
gtaggaaggagattaggtgcta

SEQ ID NO: 45095 - DNA, 22 bp, Artificial Sequence
  chemically synthesized
ggtgctacttgtgacaaaggtc

SEQ ID NO: 45096 - DNA, 22 bp, Artificial Sequence
  chemically synthesized
cttgtgacaaaggtcagcaaat

SEQ ID NO: 45097 - DNA, 22 bp, Artificial Sequence
  chemically synthesized
gtgacaaaggtcagcaaatatt

SEQ ID NO: 45098 - DNA, 22 bp, Artificial Sequence
  chemically synthesized
tgacaaaggtcagcaaatattt

SEQ ID NO: 45099 - DNA, 22 bp, Artificial Sequence
  chemically synthesized
gtgttcccagcacttttctaga

SEQ ID NO: 45100 - DNA, 22 bp, Artificial Sequence
  chemically synthesized
tgttcccagcacttttctagat

SEQ ID NO: 45101 - DNA, 22 bp, Artificial Sequence
  chemically synthesized
ccagcacttttctagatcctca

SEQ ID NO: 45102 - DNA, 22 bp, Artificial Sequence
  chemically synthesized
ttctagatcctcagttaaaatc

SEQ ID NO: 45103 - DNA, 22 bp, Artificial Sequence
  chemically synthesized
tctagatcctcagttaaaatca

SEQ ID NO: 45104 - DNA, 22 bp, Artificial Sequence
  chemically synthesized
ctagatcctcagttaaaatcaa

SEQ ID NO: 45105 - DNA, 22 bp, Artificial Sequence
  chemically synthesized
tagatcctcagttaaaatcaaa

SEQ ID NO: 45106 - DNA, 22 bp, Artificial Sequence
  chemically synthesized
gatcctcagttaaaatcaaagc

SEQ ID NO: 45107 - DNA, 22 bp, Artificial Sequence
  chemically synthesized
agttaaaatcaaagcagctgca

SEQ ID NO: 45108 - DNA, 22 bp, Artificial Sequence
  chemically synthesized
aaatcaaagcagctgcagtctt

SEQ ID NO: 45109 - DNA, 22 bp, Artificial Sequence
  chemically synthesized
cagtcttggcagtgggaggtga

SEQ ID NO: 45110 - DNA, 22 bp, Artificial Sequence
  chemically synthesized
ggcagtgggaggtgatactcac

SEQ ID NO: 45111 - DNA, 22 bp, Artificial Sequence
  chemically synthesized
gcagtgggaggtgatactcaca

SEQ ID NO: 45112 - DNA, 22 bp, Artificial Sequence
  chemically synthesized
acactttgaacaagaccacctg

SEQ ID NO: 45113 - DNA, 22 bp, Artificial Sequence
  chemically synthesized
tgaacaagaccacctgcactac

SEQ ID NO: 45114 - DNA, 22 bp, Artificial Sequence
  chemically synthesized
gaacaagaccacctgcactacc

SEQ ID NO: 45115 - DNA, 22 bp, Artificial Sequence
  chemically synthesized
aacaagaccacctgcactacct

SEQ ID NO: 45116 - DNA, 22 bp, Artificial Sequence
  chemically synthesized
cactacctacaatggcagctcc

SEQ ID NO: 45117 - DNA, 22 bp, Artificial Sequence
  chemically synthesized
cctacaatggcagctccaaata

SEQ ID NO: 45118 - DNA, 22 bp, Artificial Sequence
  chemically synthesized
caatggcagctccaaatatttt

SEQ ID NO: 45119 - DNA, 22 bp, Artificial Sequence
  chemically synthesized
caaatattttatatgaaagggg

SEQ ID NO: 45120 - DNA, 22 bp, Artificial Sequence
  chemically synthesized
tatatgaaaggggcctagacat

SEQ ID NO: 45121 - DNA, 22 bp, Artificial Sequence
  chemically synthesized
atatgaaaggggcctagacata

SEQ ID NO: 45122 - DNA, 22 bp, Artificial Sequence
  chemically synthesized
tatgaaaggggcctagacatag

SEQ ID NO: 45123 - DNA, 22 bp, Artificial Sequence
  chemically synthesized
gacatagcatgctgaatgaaaa

SEQ ID NO: 45124 - DNA, 22 bp, Artificial Sequence
  chemically synthesized
aatgaaaaggaagtgagtagac

SEQ ID NO: 45125 - DNA, 22 bp, Artificial Sequence
  chemically synthesized
gtgctttccttgaagctgtgca

SEQ ID NO: 45126 - DNA, 22 bp, Artificial Sequence
  chemically synthesized
tccttgaagctgtgcaaccaag

SEQ ID NO: 45127 - DNA, 22 bp, Artificial Sequence
  chemically synthesized
ccttgaagctgtgcaaccaagc

SEQ ID NO: 45128 - DNA, 22 bp, Artificial Sequence
  chemically synthesized
cttgaagctgtgcaaccaagca

SEQ ID NO: 45129 - DNA, 22 bp, Artificial Sequence
  chemically synthesized
gaagctgtgcaaccaagcatag

SEQ ID NO: 45130 - DNA, 22 bp, Artificial Sequence
  chemically synthesized
aagctgtgcaaccaagcatagt

SEQ ID NO: 45131 - DNA, 22 bp, Artificial Sequence
  chemically synthesized
tgcaaccaagcatagtttttac

SEQ ID NO: 45132 - DNA, 22 bp, Artificial Sequence
  chemically synthesized
ttacatagatcgtgtgtttcac

SEQ ID NO: 45133 - DNA, 22 bp, Artificial Sequence
  chemically synthesized
tacatagatcgtgtgtttcaca

SEQ ID NO: 45134 - DNA, 22 bp, Artificial Sequence
  chemically synthesized
acatagatcgtgtgtttcacat

SEQ ID NO: 45135 - DNA, 22 bp, Artificial Sequence
  chemically synthesized
catagatcgtgtgtttcacatg

SEQ ID NO: 45136 - DNA, 22 bp, Artificial Sequence
  chemically synthesized
cacatggtgtgataacagcttg

SEQ ID NO: 45137 - DNA, 22 bp, Artificial Sequence
  chemically synthesized
acatggtgtgataacagcttga

SEQ ID NO: 45138 - DNA, 22 bp, Artificial Sequence
  chemically synthesized
gagatgccattgacatggccca

SEQ ID NO: 45139 - DNA, 22 bp, Artificial Sequence
  chemically synthesized
agatgccattgacatggcccac

SEQ ID NO: 45140 - DNA, 22 bp, Artificial Sequence
  chemically synthesized
acatggcccaccggcttatcca

SEQ ID NO: 45141 - DNA, 22 bp, Artificial Sequence
  chemically synthesized
atccacatcagtaattagggca

SEQ ID NO: 45142 - DNA, 22 bp, Artificial Sequence
  chemically synthesized
tccacatcagtaattagggcaa

SEQ ID NO: 45143 - DNA, 22 bp, Artificial Sequence
  chemically synthesized
gggcaaagaaatcctaattact

SEQ ID NO: 45144 - DNA, 22 bp, Artificial Sequence
  chemically synthesized
attactatgcatcccgtgattg

SEQ ID NO: 45145 - DNA, 22 bp, Artificial Sequence
  chemically synthesized
ctatgcatcccgtgattgaagt

SEQ ID NO: 45146 - DNA, 22 bp, Artificial Sequence
  chemically synthesized
tgcatcccgtgattgaagtaac

SEQ ID NO: 45147 - DNA, 22 bp, Artificial Sequence
  chemically synthesized
aagtaacattgatgtatacata

SEQ ID NO: 45148 - DNA, 22 bp, Artificial Sequence
  chemically synthesized
atgtatacatattttttcctat

SEQ ID NO: 45149 - DNA, 22 bp, Artificial Sequence
  chemically synthesized
tttcctattatttctctttttg

SEQ ID NO: 45150 - DNA, 22 bp, Artificial Sequence
  chemically synthesized
ttcctattatttctctttttgt

SEQ ID NO: 45151 - DNA, 22 bp, Artificial Sequence
  chemically synthesized
tcctattatttctctttttgtg

SEQ ID NO: 45152 - DNA, 22 bp, Artificial Sequence
  chemically synthesized
cctattatttctctttttgtgt

SEQ ID NO: 45153 - DNA, 22 bp, Artificial Sequence
  chemically synthesized
ctattatttctctttttgtgtt

SEQ ID NO: 45154 - DNA, 22 bp, Artificial Sequence
  chemically synthesized
ttatttctctttttgtgtttaa

SEQ ID NO: 45155 - DNA, 22 bp, Artificial Sequence
  chemically synthesized
tttctctttttgtgtttaaaaa

SEQ ID NO: 45156 - DNA, 22 bp, Artificial Sequence
  chemically synthesized
ctctttttgtgtttaaaaatgc

SEQ ID NO: 45157 - DNA, 22 bp, Artificial Sequence
  chemically synthesized
tctttttgtgtttaaaaatgca

SEQ ID NO: 45158 - DNA, 22 bp, Artificial Sequence
  chemically synthesized
tttttgtgtttaaaaatgcaat

SEQ ID NO: 45159 - DNA, 22 bp, Artificial Sequence
  chemically synthesized
tttgtgtttaaaaatgcaatta

SEQ ID NO: 45160 - DNA, 22 bp, Artificial Sequence
  chemically synthesized
ttgtgtttaaaaatgcaattat

SEQ ID NO: 45161 - DNA, 22 bp, Artificial Sequence
  chemically synthesized
tgtgtttaaaaatgcaattatg

SEQ ID NO: 45162 - DNA, 22 bp, Artificial Sequence
  chemically synthesized
gtgtttaaaaatgcaattatgg

SEQ ID NO: 45163 - DNA, 22 bp, Artificial Sequence
  chemically synthesized
tgtttaaaaatgcaattatgga

SEQ ID NO: 45164 - DNA, 22 bp, Artificial Sequence
  chemically synthesized
aaaaatgcaattatggactcat

SEQ ID NO: 45165 - DNA, 22 bp, Artificial Sequence
  chemically synthesized
aaaatgcaattatggactcatt

SEQ ID NO: 45166 - DNA, 22 bp, Artificial Sequence
  chemically synthesized
tggactcattcaaagtgaaagc

SEQ ID NO: 45167 - DNA, 22 bp, Artificial Sequence
  chemically synthesized
attcaaagtgaaagctggtatg

SEQ ID NO: 45168 - DNA, 22 bp, Artificial Sequence
  chemically synthesized
aaagtgaaagctggtatgacaa

SEQ ID NO: 45169 - DNA, 22 bp, Artificial Sequence
  chemically synthesized
gtatgacaatacatgagctaac

SEQ ID NO: 45170 - DNA, 22 bp, Artificial Sequence
  chemically synthesized
acttcctcattttatgaataaa

SEQ ID NO: 45171 - DNA, 22 bp, Artificial Sequence
  chemically synthesized
cctcattttatgaataaatttt

SEQ ID NO: 45172 - DNA, 22 bp, Artificial Sequence
  chemically synthesized
ctcattttatgaataaatttta

SEQ ID NO: 45173 - DNA, 22 bp, Artificial Sequence
  chemically synthesized
attttatgaataaattttataa

SEQ ID NO: 45174 - DNA, 22 bp, Artificial Sequence
  chemically synthesized
tatgaataaattttataaagaa

SEQ ID NO: 45175 - DNA, 22 bp, Artificial Sequence
  chemically synthesized
atgaataaattttataaagaaa

SEQ ID NO: 45176 - DNA, 22 bp, Artificial Sequence
  chemically synthesized
tgaataaattttataaagaaat

SEQ ID NO: 45177 - DNA, 22 bp, Artificial Sequence
  chemically synthesized
tataaagaaataagctaatacc

SEQ ID NO: 45178 - DNA, 22 bp, Artificial Sequence
  chemically synthesized
ataaagaaataagctaatacct

SEQ ID NO: 45179 - DNA, 22 bp, Artificial Sequence
  chemically synthesized
taaagaaataagctaataccta

SEQ ID NO: 45180 - DNA, 22 bp, Artificial Sequence
  chemically synthesized
atacctacagagtgtttattaa

SEQ ID NO: 45181 - DNA, 22 bp, Artificial Sequence
  chemically synthesized
cagagtgtttattaaatgctag

SEQ ID NO: 45182 - DNA, 22 bp, Artificial Sequence
  chemically synthesized
attaaatgctaggcacagttct

SEQ ID NO: 45183 - DNA, 22 bp, Artificial Sequence
  chemically synthesized
ttaaatgctaggcacagttctg

SEQ ID NO: 45184 - DNA, 22 bp, Artificial Sequence
  chemically synthesized
aatgctaggcacagttctgagt

SEQ ID NO: 45185 - DNA, 22 bp, Artificial Sequence
  chemically synthesized
ggcacagttctgagtgatttac

SEQ ID NO: 45186 - DNA, 22 bp, Artificial Sequence
  chemically synthesized
tgagtgatttacaactggtatt

SEQ ID NO: 45187 - DNA, 22 bp, Artificial Sequence
  chemically synthesized
agtgatttacaactggtatttc

SEQ ID NO: 45188 - DNA, 22 bp, Artificial Sequence
  chemically synthesized
acaactggtatttcttttaatt

SEQ ID NO: 45189 - DNA, 22 bp, Artificial Sequence
  chemically synthesized
caactggtatttcttttaattt

SEQ ID NO: 45190 - DNA, 22 bp, Artificial Sequence
  chemically synthesized
gtatttcttttaattttcacaa

SEQ ID NO: 45191 - DNA, 22 bp, Artificial Sequence
  chemically synthesized
cttttaattttcacaacattat

SEQ ID NO: 45192 - DNA, 22 bp, Artificial Sequence
  chemically synthesized
ttttaattttcacaacattatt

SEQ ID NO: 45193 - DNA, 22 bp, Artificial Sequence
  chemically synthesized
ttaattttcacaacattattac

SEQ ID NO: 45194 - DNA, 22 bp, Artificial Sequence
  chemically synthesized
taattttcacaacattattaca

SEQ ID NO: 45195 - DNA, 22 bp, Artificial Sequence
  chemically synthesized
aattttcacaacattattacag

SEQ ID NO: 45196 - DNA, 22 bp, Artificial Sequence
  chemically synthesized
attttcacaacattattacagg

SEQ ID NO: 45197 - DNA, 22 bp, Artificial Sequence
  chemically synthesized
tcacaacattattacaggtaga

SEQ ID NO: 45198 - DNA, 22 bp, Artificial Sequence
  chemically synthesized
cacaacattattacaggtagat

SEQ ID NO: 45199 - DNA, 22 bp, Artificial Sequence
  chemically synthesized
acaacattattacaggtagatt

SEQ ID NO: 45200 - DNA, 22 bp, Artificial Sequence
  chemically synthesized
ttacaggtagattttatatatg

SEQ ID NO: 45201 - DNA, 22 bp, Artificial Sequence
  chemically synthesized
caggtagattttatatatggag

SEQ ID NO: 45202 - DNA, 22 bp, Artificial Sequence
  chemically synthesized
tatatatggagaaactgaggca

SEQ ID NO: 45203 - DNA, 22 bp, Artificial Sequence
  chemically synthesized
atatatggagaaactgaggcac

SEQ ID NO: 45204 - DNA, 22 bp, Artificial Sequence
  chemically synthesized
tatatggagaaactgaggcaca

SEQ ID NO: 45205 - DNA, 22 bp, Artificial Sequence
  chemically synthesized
aggcacagagatgctatgtaat

SEQ ID NO: 45206 - DNA, 22 bp, Artificial Sequence
  chemically synthesized
tgtaataaatctcaacattacc

SEQ ID NO: 45207 - DNA, 22 bp, Artificial Sequence
  chemically synthesized
aacattacccaggtgatggtgg

SEQ ID NO: 45208 - DNA, 22 bp, Artificial Sequence
  chemically synthesized
cccaggtgatggtggagttgga

SEQ ID NO: 45209 - DNA, 22 bp, Artificial Sequence
  chemically synthesized
gaattccaaatcatgcagtctg

SEQ ID NO: 45210 - DNA, 22 bp, Artificial Sequence
  chemically synthesized
caaatcatgcagtctgacttta

SEQ ID NO: 45211 - DNA, 22 bp, Artificial Sequence
  chemically synthesized
actttagctgtagacagcaaga

SEQ ID NO: 45212 - DNA, 22 bp, Artificial Sequence
  chemically synthesized
tagctgtagacagcaagatagt

SEQ ID NO: 45213 - DNA, 22 bp, Artificial Sequence
  chemically synthesized
agctgtagacagcaagatagta

SEQ ID NO: 45214 - DNA, 22 bp, Artificial Sequence
  chemically synthesized
gctgtagacagcaagatagtaa

SEQ ID NO: 45215 - DNA, 22 bp, Artificial Sequence
  chemically synthesized
tagacagcaagatagtaagtaa

SEQ ID NO: 45216 - DNA, 22 bp, Artificial Sequence
  chemically synthesized
atggatctttttgcttttgctt

SEQ ID NO: 45217 - DNA, 22 bp, Artificial Sequence
  chemically synthesized
tttgcttttgcttgtttgtttg

SEQ ID NO: 45218 - DNA, 22 bp, Artificial Sequence
  chemically synthesized
ttgcttttgcttgtttgtttga

SEQ ID NO: 45219 - DNA, 22 bp, Artificial Sequence
  chemically synthesized
tgcttttgcttgtttgtttgaa

SEQ ID NO: 45220 - DNA, 22 bp, Artificial Sequence
  chemically synthesized
gcttttgcttgtttgtttgaaa

SEQ ID NO: 45221 - DNA, 22 bp, Artificial Sequence
  chemically synthesized
cttttgcttgtttgtttgaaac

SEQ ID NO: 45222 - DNA, 22 bp, Artificial Sequence
  chemically synthesized
ttgcttgtttgtttgaaacagg

SEQ ID NO: 45223 - DNA, 22 bp, Artificial Sequence
  chemically synthesized
tgcttgtttgtttgaaacaggg

SEQ ID NO: 45224 - DNA, 22 bp, Artificial Sequence
  chemically synthesized
gcttgtttgtttgaaacagggt

SEQ ID NO: 45225 - DNA, 22 bp, Artificial Sequence
  chemically synthesized
cttgtttgtttgaaacagggtc

SEQ ID NO: 45226 - DNA, 22 bp, Artificial Sequence
  chemically synthesized
gtttgtttgaaacagggtctca

SEQ ID NO: 45227 - DNA, 22 bp, Artificial Sequence
  chemically synthesized
tttgtttgaaacagggtctcac

SEQ ID NO: 45228 - DNA, 22 bp, Artificial Sequence
  chemically synthesized
gtttgaaacagggtctcactct

SEQ ID NO: 45229 - DNA, 22 bp, Artificial Sequence
  chemically synthesized
tttgaaacagggtctcactctg

SEQ ID NO: 45230 - DNA, 22 bp, Artificial Sequence
  chemically synthesized
gaaacagggtctcactctgtca

SEQ ID NO: 45231 - DNA, 22 bp, Artificial Sequence
  chemically synthesized
aaacagggtctcactctgtcac

SEQ ID NO: 45232 - DNA, 22 bp, Artificial Sequence
  chemically synthesized
actctgtcaccccggctggagt

SEQ ID NO: 45233 - DNA, 22 bp, Artificial Sequence
  chemically synthesized
tgtcaccccggctggagtgcaa

SEQ ID NO: 45234 - DNA, 22 bp, Artificial Sequence
  chemically synthesized
tcaccccggctggagtgcaatg

SEQ ID NO: 45235 - DNA, 22 bp, Artificial Sequence
  chemically synthesized
gagtgcaatggtgcaatcttgc

SEQ ID NO: 45236 - DNA, 22 bp, Artificial Sequence
  chemically synthesized
gctcactgaagcctcactagaa

SEQ ID NO: 45237 - DNA, 22 bp, Artificial Sequence
  chemically synthesized
ctcactgaagcctcactagaac

SEQ ID NO: 45238 - DNA, 22 bp, Artificial Sequence
  chemically synthesized
actgaagcctcactagaacgcc

SEQ ID NO: 45239 - DNA, 22 bp, Artificial Sequence
  chemically synthesized
aagcctcactagaacgcctgga

SEQ ID NO: 45240 - DNA, 22 bp, Artificial Sequence
  chemically synthesized
actagaacgcctggattcaatt

SEQ ID NO: 45241 - DNA, 22 bp, Artificial Sequence
  chemically synthesized
gaacgcctggattcaattgatc

SEQ ID NO: 45242 - DNA, 22 bp, Artificial Sequence
  chemically synthesized
gattcaattgatcctcctgctt

SEQ ID NO: 45243 - DNA, 22 bp, Artificial Sequence
  chemically synthesized
aattgatcctcctgctttagcc

SEQ ID NO: 45244 - DNA, 22 bp, Artificial Sequence
  chemically synthesized
atcctcctgctttagcctctca

SEQ ID NO: 45245 - DNA, 22 bp, Artificial Sequence
  chemically synthesized
ctgctttagcctctcaggtagc

SEQ ID NO: 45246 - DNA, 22 bp, Artificial Sequence
  chemically synthesized
ctttagcctctcaggtagctag

SEQ ID NO: 45247 - DNA, 22 bp, Artificial Sequence
  chemically synthesized
tagcctctcaggtagctaggac

SEQ ID NO: 45248 - DNA, 22 bp, Artificial Sequence
  chemically synthesized
agcctctcaggtagctaggact

SEQ ID NO: 45249 - DNA, 22 bp, Artificial Sequence
  chemically synthesized
gcctctcaggtagctaggacta

SEQ ID NO: 45250 - DNA, 22 bp, Artificial Sequence
  chemically synthesized
tcaggtagctaggactacaggt

SEQ ID NO: 45251 - DNA, 22 bp, Artificial Sequence
  chemically synthesized
aggtagctaggactacaggtgt

SEQ ID NO: 45252 - DNA, 22 bp, Artificial Sequence
  chemically synthesized
ggactacaggtgtgagcctcca

SEQ ID NO: 45253 - DNA, 22 bp, Artificial Sequence
  chemically synthesized
caggtgtgagcctccatggcca

SEQ ID NO: 45254 - DNA, 22 bp, Artificial Sequence
  chemically synthesized
catggccagctagagaaatttt

SEQ ID NO: 45255 - DNA, 22 bp, Artificial Sequence
  chemically synthesized
gagaaattttttaaatttctgt

SEQ ID NO: 45256 - DNA, 22 bp, Artificial Sequence
  chemically synthesized
tttaaatttctgtagaaacagg

SEQ ID NO: 45257 - DNA, 22 bp, Artificial Sequence
  chemically synthesized
ttaaatttctgtagaaacaggg

SEQ ID NO: 45258 - DNA, 22 bp, Artificial Sequence
  chemically synthesized
taaatttctgtagaaacagggt

SEQ ID NO: 45259 - DNA, 22 bp, Artificial Sequence
  chemically synthesized
aaatttctgtagaaacagggtc

SEQ ID NO: 45260 - DNA, 22 bp, Artificial Sequence
  chemically synthesized
aatttctgtagaaacagggtct

SEQ ID NO: 45261 - DNA, 22 bp, Artificial Sequence
  chemically synthesized
ctgtagaaacagggtctcccta

SEQ ID NO: 45262 - DNA, 22 bp, Artificial Sequence
  chemically synthesized
tgtagaaacagggtctccctat

SEQ ID NO: 45263 - DNA, 22 bp, Artificial Sequence
  chemically synthesized
tagaaacagggtctccctatgt

SEQ ID NO: 45264 - DNA, 22 bp, Artificial Sequence
  chemically synthesized
cctatgttccccaggctggtat

SEQ ID NO: 45265 - DNA, 22 bp, Artificial Sequence
  chemically synthesized
tgttccccaggctggtatccaa

SEQ ID NO: 45266 - DNA, 22 bp, Artificial Sequence
  chemically synthesized
cccaggctggtatccaactctt

SEQ ID NO: 45267 - DNA, 22 bp, Artificial Sequence
  chemically synthesized
gtatccaactcttggtctcaaa

SEQ ID NO: 45268 - DNA, 22 bp, Artificial Sequence
  chemically synthesized
ttggtctcaaacaattctccca

SEQ ID NO: 45269 - DNA, 22 bp, Artificial Sequence
  chemically synthesized
ggtctcaaacaattctcccacc

SEQ ID NO: 45270 - DNA, 22 bp, Artificial Sequence
  chemically synthesized
gtctcaaacaattctcccacct

SEQ ID NO: 45271 - DNA, 22 bp, Artificial Sequence
  chemically synthesized
aaacaattctcccacctcagcc

SEQ ID NO: 45272 - DNA, 22 bp, Artificial Sequence
  chemically synthesized
tcccacctcagccttgaaaagt

SEQ ID NO: 45273 - DNA, 22 bp, Artificial Sequence
  chemically synthesized
ccacctcagccttgaaaagtgt

SEQ ID NO: 45274 - DNA, 22 bp, Artificial Sequence
  chemically synthesized
agccttgaaaagtgttgagatt

SEQ ID NO: 45275 - DNA, 22 bp, Artificial Sequence
  chemically synthesized
gaaaagtgttgagattacaggt

SEQ ID NO: 45276 - DNA, 22 bp, Artificial Sequence
  chemically synthesized
aaaagtgttgagattacaggtg

SEQ ID NO: 45277 - DNA, 22 bp, Artificial Sequence
  chemically synthesized
agattacaggtgtgaatcacca

SEQ ID NO: 45278 - DNA, 22 bp, Artificial Sequence
  chemically synthesized
caggtgtgaatcaccatgctgg

SEQ ID NO: 45279 - DNA, 22 bp, Artificial Sequence
  chemically synthesized
ggccttgatggatctttaaaag

SEQ ID NO: 45280 - DNA, 22 bp, Artificial Sequence
  chemically synthesized
gatggatctttaaaagtggtgg

SEQ ID NO: 45281 - DNA, 22 bp, Artificial Sequence
  chemically synthesized
atggatctttaaaagtggtggg

SEQ ID NO: 45282 - DNA, 22 bp, Artificial Sequence
  chemically synthesized
taaaagtggtggggggtaggag

SEQ ID NO: 45283 - DNA, 22 bp, Artificial Sequence
  chemically synthesized
aaaagtggtggggggtaggaga

SEQ ID NO: 45284 - DNA, 22 bp, Artificial Sequence
  chemically synthesized
aaagtggtggggggtaggagaa

SEQ ID NO: 45285 - DNA, 22 bp, Artificial Sequence
  chemically synthesized
ggtctcgggaaggatgggatcc

SEQ ID NO: 45286 - DNA, 22 bp, Artificial Sequence
  chemically synthesized
gggaaggatgggatccttttca

SEQ ID NO: 45287 - DNA, 22 bp, Artificial Sequence
  chemically synthesized
ttcattttgctctagagaaaag

SEQ ID NO: 45288 - DNA, 22 bp, Artificial Sequence
  chemically synthesized
tcattttgctctagagaaaagc

SEQ ID NO: 45289 - DNA, 22 bp, Artificial Sequence
  chemically synthesized
cattttgctctagagaaaagcc

SEQ ID NO: 45290 - DNA, 22 bp, Artificial Sequence
  chemically synthesized
attttgctctagagaaaagcca

SEQ ID NO: 45291 - DNA, 22 bp, Artificial Sequence
  chemically synthesized
tgctctagagaaaagccatttg

SEQ ID NO: 45292 - DNA, 22 bp, Artificial Sequence
  chemically synthesized
gctctagagaaaagccatttgg

SEQ ID NO: 45293 - DNA, 22 bp, Artificial Sequence
  chemically synthesized
ctctagagaaaagccatttgga

SEQ ID NO: 45294 - DNA, 22 bp, Artificial Sequence
  chemically synthesized
tagagaaaagccatttggaaaa

SEQ ID NO: 45295 - DNA, 22 bp, Artificial Sequence
  chemically synthesized
gagaaaagccatttggaaaact

SEQ ID NO: 45296 - DNA, 22 bp, Artificial Sequence
  chemically synthesized
ggaaaacttctgtgttaacaaa

SEQ ID NO: 45297 - DNA, 22 bp, Artificial Sequence
  chemically synthesized
gaaaacttctgtgttaacaaaa

SEQ ID NO: 45298 - DNA, 22 bp, Artificial Sequence
  chemically synthesized
ctgtgttaacaaaaaacagccg

SEQ ID NO: 45299 - DNA, 22 bp, Artificial Sequence
  chemically synthesized
tgtgttaacaaaaaacagccga

SEQ ID NO: 45300 - DNA, 22 bp, Artificial Sequence
  chemically synthesized
tgttaacaaaaaacagccgagt

SEQ ID NO: 45301 - DNA, 22 bp, Artificial Sequence
  chemically synthesized
acaaaaaacagccgagtagcct

SEQ ID NO: 45302 - DNA, 22 bp, Artificial Sequence
  chemically synthesized
gtattaaactttagagcagttg

SEQ ID NO: 45303 - DNA, 22 bp, Artificial Sequence
  chemically synthesized
aactttagagcagttgttcttt

SEQ ID NO: 45304 - DNA, 22 bp, Artificial Sequence
  chemically synthesized
tagagcagttgttctttacggc

SEQ ID NO: 45305 - DNA, 22 bp, Artificial Sequence
  chemically synthesized
agagcagttgttctttacggca

SEQ ID NO: 45306 - DNA, 22 bp, Artificial Sequence
  chemically synthesized
gagcagttgttctttacggcaa

SEQ ID NO: 45307 - DNA, 22 bp, Artificial Sequence
  chemically synthesized
ttctttacggcaattacagggg

SEQ ID NO: 45308 - DNA, 22 bp, Artificial Sequence
  chemically synthesized
tttacggcaattacaggggcct

SEQ ID NO: 45309 - DNA, 22 bp, Artificial Sequence
  chemically synthesized
tacggcaattacaggggccttc

SEQ ID NO: 45310 - DNA, 22 bp, Artificial Sequence
  chemically synthesized
acggcaattacaggggccttca

SEQ ID NO: 45311 - DNA, 22 bp, Artificial Sequence
  chemically synthesized
cggcaattacaggggccttcag

SEQ ID NO: 45312 - DNA, 22 bp, Artificial Sequence
  chemically synthesized
caggggccttcaggaagctgat

SEQ ID NO: 45313 - DNA, 22 bp, Artificial Sequence
  chemically synthesized
caggaagctgatggaagtgtga

SEQ ID NO: 45314 - DNA, 22 bp, Artificial Sequence
  chemically synthesized
aggaagctgatggaagtgtgaa

SEQ ID NO: 45315 - DNA, 22 bp, Artificial Sequence
  chemically synthesized
atggaagtgtgaagtcctcttc

SEQ ID NO: 45316 - DNA, 22 bp, Artificial Sequence
  chemically synthesized
ttctcagagaaaagtacttcta

SEQ ID NO: 45317 - DNA, 22 bp, Artificial Sequence
  chemically synthesized
ctcagagaaaagtacttctata

SEQ ID NO: 45318 - DNA, 22 bp, Artificial Sequence
  chemically synthesized
tcagagaaaagtacttctatat

SEQ ID NO: 45319 - DNA, 22 bp, Artificial Sequence
  chemically synthesized
agagaaaagtacttctatatac

SEQ ID NO: 45320 - DNA, 22 bp, Artificial Sequence
  chemically synthesized
ctatatacgtgcacctaatttt

SEQ ID NO: 45321 - DNA, 22 bp, Artificial Sequence
  chemically synthesized
tatatacgtgcacctaattttt

SEQ ID NO: 45322 - DNA, 22 bp, Artificial Sequence
  chemically synthesized
tatacgtgcacctaatttttag

SEQ ID NO: 45323 - DNA, 22 bp, Artificial Sequence
  chemically synthesized
atttttagatataatttctgaa

SEQ ID NO: 45324 - DNA, 22 bp, Artificial Sequence
  chemically synthesized
ttagatataatttctgaaggtt

SEQ ID NO: 45325 - DNA, 22 bp, Artificial Sequence
  chemically synthesized
tagatataatttctgaaggttt

SEQ ID NO: 45326 - DNA, 22 bp, Artificial Sequence
  chemically synthesized
agatataatttctgaaggttta

SEQ ID NO: 45327 - DNA, 22 bp, Artificial Sequence
  chemically synthesized
gatataatttctgaaggtttag

SEQ ID NO: 45328 - DNA, 22 bp, Artificial Sequence
  chemically synthesized
ctgaaggtttagaaactccttg

SEQ ID NO: 45329 - DNA, 22 bp, Artificial Sequence
  chemically synthesized
tgaaggtttagaaactccttga

SEQ ID NO: 45330 - DNA, 22 bp, Artificial Sequence
  chemically synthesized
aaggtttagaaactccttgagt

SEQ ID NO: 45331 - DNA, 22 bp, Artificial Sequence
  chemically synthesized
agaaactccttgagttcactta

SEQ ID NO: 45332 - DNA, 22 bp, Artificial Sequence
  chemically synthesized
gaaactccttgagttcacttat

SEQ ID NO: 45333 - DNA, 22 bp, Artificial Sequence
  chemically synthesized
cttgagttcacttatatcaaag

SEQ ID NO: 45334 - DNA, 22 bp, Artificial Sequence
  chemically synthesized
gagttcacttatatcaaagtcc

SEQ ID NO: 45335 - DNA, 22 bp, Artificial Sequence
  chemically synthesized
agttcacttatatcaaagtcct

SEQ ID NO: 45336 - DNA, 22 bp, Artificial Sequence
  chemically synthesized
acttatatcaaagtcctcacct

SEQ ID NO: 45337 - DNA, 22 bp, Artificial Sequence
  chemically synthesized
atatcaaagtcctcacctttag

SEQ ID NO: 45338 - DNA, 22 bp, Artificial Sequence
  chemically synthesized
tatcaaagtcctcacctttaga

SEQ ID NO: 45339 - DNA, 22 bp, Artificial Sequence
  chemically synthesized
acctttagaactcctgtcctag

SEQ ID NO: 45340 - DNA, 22 bp, Artificial Sequence
  chemically synthesized
tagaactcctgtcctagaagag

SEQ ID NO: 45341 - DNA, 22 bp, Artificial Sequence
  chemically synthesized
agaactcctgtcctagaagagt

SEQ ID NO: 45342 - DNA, 22 bp, Artificial Sequence
  chemically synthesized
gaactcctgtcctagaagagtg

SEQ ID NO: 45343 - DNA, 22 bp, Artificial Sequence
  chemically synthesized
ctgtcctagaagagtggactca

SEQ ID NO: 45344 - DNA, 22 bp, Artificial Sequence
  chemically synthesized
tcctagaagagtggactcatta

SEQ ID NO: 45345 - DNA, 22 bp, Artificial Sequence
  chemically synthesized
gaagagtggactcattattata

SEQ ID NO: 45346 - DNA, 22 bp, Artificial Sequence
  chemically synthesized
attattataatttcttccataa

SEQ ID NO: 45347 - DNA, 22 bp, Artificial Sequence
  chemically synthesized
ttataatttcttccataaccac

SEQ ID NO: 45348 - DNA, 22 bp, Artificial Sequence
  chemically synthesized
taatttcttccataaccacttt

SEQ ID NO: 45349 - DNA, 22 bp, Artificial Sequence
  chemically synthesized
cttccataaccactttgactct

SEQ ID NO: 45350 - DNA, 22 bp, Artificial Sequence
  chemically synthesized
ttccataaccactttgactcta

SEQ ID NO: 45351 - DNA, 22 bp, Artificial Sequence
  chemically synthesized
ccataaccactttgactctagt

SEQ ID NO: 45352 - DNA, 22 bp, Artificial Sequence
  chemically synthesized
cataaccactttgactctagtt

SEQ ID NO: 45353 - DNA, 22 bp, Artificial Sequence
  chemically synthesized
tgactctagttttctgaattct

SEQ ID NO: 45354 - DNA, 22 bp, Artificial Sequence
  chemically synthesized
gactctagttttctgaattctt

SEQ ID NO: 45355 - DNA, 22 bp, Artificial Sequence
  chemically synthesized
actctagttttctgaattcttc

SEQ ID NO: 45356 - DNA, 22 bp, Artificial Sequence
  chemically synthesized
tagttttctgaattcttccctg

SEQ ID NO: 45357 - DNA, 22 bp, Artificial Sequence
  chemically synthesized
gttttctgaattcttccctgtg

SEQ ID NO: 45358 - DNA, 22 bp, Artificial Sequence
  chemically synthesized
tctgaattcttccctgtgccac

SEQ ID NO: 45359 - DNA, 22 bp, Artificial Sequence
  chemically synthesized
ctgaattcttccctgtgccact

SEQ ID NO: 45360 - DNA, 22 bp, Artificial Sequence
  chemically synthesized
tgaattcttccctgtgccactt

SEQ ID NO: 45361 - DNA, 22 bp, Artificial Sequence
  chemically synthesized
aattcttccctgtgccacttgt

SEQ ID NO: 45362 - DNA, 22 bp, Artificial Sequence
  chemically synthesized
ttccctgtgccacttgtaccat

SEQ ID NO: 45363 - DNA, 22 bp, Artificial Sequence
  chemically synthesized
ccctgtgccacttgtaccatgt

SEQ ID NO: 45364 - DNA, 22 bp, Artificial Sequence
  chemically synthesized
cctgtgccacttgtaccatgta

SEQ ID NO: 45365 - DNA, 22 bp, Artificial Sequence
  chemically synthesized
tgccacttgtaccatgtaattc

SEQ ID NO: 45366 - DNA, 22 bp, Artificial Sequence
  chemically synthesized
gtaccatgtaattcagaggtgt

SEQ ID NO: 45367 - DNA, 22 bp, Artificial Sequence
  chemically synthesized
taccatgtaattcagaggtgta

SEQ ID NO: 45368 - DNA, 22 bp, Artificial Sequence
  chemically synthesized
agaggtgtagtgtcaagactga

SEQ ID NO: 45369 - DNA, 22 bp, Artificial Sequence
  chemically synthesized
aggaggaagcaggtaaattatg

SEQ ID NO: 45370 - DNA, 22 bp, Artificial Sequence
  chemically synthesized
tgtccagcaatacgttggctta

SEQ ID NO: 45371 - DNA, 22 bp, Artificial Sequence
  chemically synthesized
gcttaggcaaaaacaaattgtt

SEQ ID NO: 45372 - DNA, 22 bp, Artificial Sequence
  chemically synthesized
aggcaaaaacaaattgtttcta

SEQ ID NO: 45373 - DNA, 22 bp, Artificial Sequence
  chemically synthesized
ggcaaaaacaaattgtttctag

SEQ ID NO: 45374 - DNA, 22 bp, Artificial Sequence
  chemically synthesized
tttctagtccattttaagaggg

SEQ ID NO: 45375 - DNA, 22 bp, Artificial Sequence
  chemically synthesized
ctagtccattttaagagggaag

SEQ ID NO: 45376 - DNA, 22 bp, Artificial Sequence
  chemically synthesized
tagtccattttaagagggaagc

SEQ ID NO: 45377 - DNA, 22 bp, Artificial Sequence
  chemically synthesized
gtccattttaagagggaagcat

SEQ ID NO: 45378 - DNA, 22 bp, Artificial Sequence
  chemically synthesized
taagagggaagcatttatttag

SEQ ID NO: 45379 - DNA, 22 bp, Artificial Sequence
  chemically synthesized
aagagggaagcatttatttagg

SEQ ID NO: 45380 - DNA, 22 bp, Artificial Sequence
  chemically synthesized
agagggaagcatttatttaggg

SEQ ID NO: 45381 - DNA, 22 bp, Artificial Sequence
  chemically synthesized
atttagggactacatcgctcaa

SEQ ID NO: 45382 - DNA, 22 bp, Artificial Sequence
  chemically synthesized
tttagggactacatcgctcaag

SEQ ID NO: 45383 - DNA, 22 bp, Artificial Sequence
  chemically synthesized
agggactacatcgctcaagtct

SEQ ID NO: 45384 - DNA, 22 bp, Artificial Sequence
  chemically synthesized
gggactacatcgctcaagtctt

SEQ ID NO: 45385 - DNA, 22 bp, Artificial Sequence
  chemically synthesized
catcgctcaagtctttacaatt

SEQ ID NO: 45386 - DNA, 22 bp, Artificial Sequence
  chemically synthesized
aagtctttacaattcttaaatt

SEQ ID NO: 45387 - DNA, 22 bp, Artificial Sequence
  chemically synthesized
tacaattcttaaattaactttc

SEQ ID NO: 45388 - DNA, 22 bp, Artificial Sequence
  chemically synthesized
acaattcttaaattaactttca

SEQ ID NO: 45389 - DNA, 22 bp, Artificial Sequence
  chemically synthesized
caattcttaaattaactttcat

SEQ ID NO: 45390 - DNA, 22 bp, Artificial Sequence
  chemically synthesized
ttaaattaactttcattatgtg

SEQ ID NO: 45391 - DNA, 22 bp, Artificial Sequence
  chemically synthesized
aaattaactttcattatgtgtg

SEQ ID NO: 45392 - DNA, 22 bp, Artificial Sequence
  chemically synthesized
aattaactttcattatgtgtga

SEQ ID NO: 45393 - DNA, 22 bp, Artificial Sequence
  chemically synthesized
actttcattatgtgtgacaaca

SEQ ID NO: 45394 - DNA, 22 bp, Artificial Sequence
  chemically synthesized
tcattatgtgtgacaacattta

SEQ ID NO: 45395 - DNA, 22 bp, Artificial Sequence
  chemically synthesized
cattatgtgtgacaacatttat

SEQ ID NO: 45396 - DNA, 22 bp, Artificial Sequence
  chemically synthesized
attatgtgtgacaacatttatt

SEQ ID NO: 45397 - DNA, 22 bp, Artificial Sequence
  chemically synthesized
tgtgtgacaacatttattaaac

SEQ ID NO: 45398 - DNA, 22 bp, Artificial Sequence
  chemically synthesized
attaaacttttttaatgatcct

SEQ ID NO: 45399 - DNA, 22 bp, Artificial Sequence
  chemically synthesized
ttaaacttttttaatgatccta

SEQ ID NO: 45400 - DNA, 22 bp, Artificial Sequence
  chemically synthesized
aacttttttaatgatcctaaat

SEQ ID NO: 45401 - DNA, 22 bp, Artificial Sequence
  chemically synthesized
ttttaatgatcctaaatatcct

SEQ ID NO: 45402 - DNA, 22 bp, Artificial Sequence
  chemically synthesized
tttaatgatcctaaatatcctt

SEQ ID NO: 45403 - DNA, 22 bp, Artificial Sequence
  chemically synthesized
ttaatgatcctaaatatcctta

SEQ ID NO: 45404 - DNA, 22 bp, Artificial Sequence
  chemically synthesized
taatgatcctaaatatccttaa

SEQ ID NO: 45405 - DNA, 22 bp, Artificial Sequence
  chemically synthesized
aatgatcctaaatatccttaac

SEQ ID NO: 45406 - DNA, 22 bp, Artificial Sequence
  chemically synthesized
atgatcctaaatatccttaaca

SEQ ID NO: 45407 - DNA, 22 bp, Artificial Sequence
  chemically synthesized
aatatccttaacatgttaattt

SEQ ID NO: 45408 - DNA, 22 bp, Artificial Sequence
  chemically synthesized
aacatgttaatttctccagagt

SEQ ID NO: 45409 - DNA, 22 bp, Artificial Sequence
  chemically synthesized
acatgttaatttctccagagtt

SEQ ID NO: 45410 - DNA, 22 bp, Artificial Sequence
  chemically synthesized
atttctccagagtttgtaatgt

SEQ ID NO: 45411 - DNA, 22 bp, Artificial Sequence
  chemically synthesized
ctccagagtttgtaatgttctg

SEQ ID NO: 45412 - DNA, 22 bp, Artificial Sequence
  chemically synthesized
tccagagtttgtaatgttctga

SEQ ID NO: 45413 - DNA, 22 bp, Artificial Sequence
  chemically synthesized
cagagtttgtaatgttctgagc

SEQ ID NO: 45414 - DNA, 22 bp, Artificial Sequence
  chemically synthesized
gtaatgttctgagcaagtgtgt

SEQ ID NO: 45415 - DNA, 22 bp, Artificial Sequence
  chemically synthesized
taatgttctgagcaagtgtgtg

SEQ ID NO: 45416 - DNA, 22 bp, Artificial Sequence
  chemically synthesized
tgagcaagtgtgtgcagaagaa

SEQ ID NO: 45417 - DNA, 22 bp, Artificial Sequence
  chemically synthesized
agcaagtgtgtgcagaagaaat

SEQ ID NO: 45418 - DNA, 22 bp, Artificial Sequence
  chemically synthesized
tagtaagacctgggcaaaggag

SEQ ID NO: 45419 - DNA, 22 bp, Artificial Sequence
  chemically synthesized
ggcaaaggagagagtaaacatt

SEQ ID NO: 45420 - DNA, 22 bp, Artificial Sequence
  chemically synthesized
ttcccccacatttgggcaaaac

SEQ ID NO: 45421 - DNA, 22 bp, Artificial Sequence
  chemically synthesized
tcccccacatttgggcaaaact

SEQ ID NO: 45422 - DNA, 22 bp, Artificial Sequence
  chemically synthesized
cccccacatttgggcaaaactt

SEQ ID NO: 45423 - DNA, 22 bp, Artificial Sequence
  chemically synthesized
ccccacatttgggcaaaacttt

SEQ ID NO: 45424 - DNA, 22 bp, Artificial Sequence
  chemically synthesized
gggcaaaactttccatcctggg

SEQ ID NO: 45425 - DNA, 22 bp, Artificial Sequence
  chemically synthesized
ggcaaaactttccatcctgggt

SEQ ID NO: 45426 - DNA, 22 bp, Artificial Sequence
  chemically synthesized
tccatcctgggtcacaccacag

SEQ ID NO: 45427 - DNA, 22 bp, Artificial Sequence
  chemically synthesized
ccatcctgggtcacaccacagt

SEQ ID NO: 45428 - DNA, 22 bp, Artificial Sequence
  chemically synthesized
catcctgggtcacaccacagtc

SEQ ID NO: 45429 - DNA, 22 bp, Artificial Sequence
  chemically synthesized
ggtcacaccacagtctaatttc

SEQ ID NO: 45430 - DNA, 22 bp, Artificial Sequence
  chemically synthesized
atttccctcctctcctctccct

SEQ ID NO: 45431 - DNA, 22 bp, Artificial Sequence
  chemically synthesized
ccctcctctcctctccctcaac

SEQ ID NO: 45432 - DNA, 22 bp, Artificial Sequence
  chemically synthesized
cctcctctcctctccctcaact

SEQ ID NO: 45433 - DNA, 22 bp, Artificial Sequence
  chemically synthesized
ctctcctctccctcaactggta

SEQ ID NO: 45434 - DNA, 22 bp, Artificial Sequence
  chemically synthesized
tcctctccctcaactggtaaca

SEQ ID NO: 45435 - DNA, 22 bp, Artificial Sequence
  chemically synthesized
ctctccctcaactggtaacagt

SEQ ID NO: 45436 - DNA, 22 bp, Artificial Sequence
  chemically synthesized
tccctcaactggtaacagtgct

SEQ ID NO: 45437 - DNA, 22 bp, Artificial Sequence
  chemically synthesized
cctcaactggtaacagtgcttc

SEQ ID NO: 45438 - DNA, 22 bp, Artificial Sequence
  chemically synthesized
aactggtaacagtgcttcttcc

SEQ ID NO: 45439 - DNA, 22 bp, Artificial Sequence
  chemically synthesized
gtaacagtgcttcttccaaaac

SEQ ID NO: 45440 - DNA, 22 bp, Artificial Sequence
  chemically synthesized
cttccaaaacatacctgactac

SEQ ID NO: 45441 - DNA, 22 bp, Artificial Sequence
  chemically synthesized
ttccaaaacatacctgactact

SEQ ID NO: 45442 - DNA, 22 bp, Artificial Sequence
  chemically synthesized
ccaaaacatacctgactactta

SEQ ID NO: 45443 - DNA, 22 bp, Artificial Sequence
  chemically synthesized
caaaacatacctgactacttag

SEQ ID NO: 45444 - DNA, 22 bp, Artificial Sequence
  chemically synthesized
actacttagtacttcccactac

SEQ ID NO: 45445 - DNA, 22 bp, Artificial Sequence
  chemically synthesized
cttagtacttcccactactgtg

SEQ ID NO: 45446 - DNA, 22 bp, Artificial Sequence
  chemically synthesized
agtacttcccactactgtggat

SEQ ID NO: 45447 - DNA, 22 bp, Artificial Sequence
  chemically synthesized
gtacttcccactactgtggata

SEQ ID NO: 45448 - DNA, 22 bp, Artificial Sequence
  chemically synthesized
cccactactgtggatagaattt

SEQ ID NO: 45449 - DNA, 22 bp, Artificial Sequence
  chemically synthesized
ccactactgtggatagaatttc

SEQ ID NO: 45450 - DNA, 22 bp, Artificial Sequence
  chemically synthesized
ctgtggatagaatttcagtgac

SEQ ID NO: 45451 - DNA, 22 bp, Artificial Sequence
  chemically synthesized
tggatagaatttcagtgactcc

SEQ ID NO: 45452 - DNA, 22 bp, Artificial Sequence
  chemically synthesized
cagtgactcctcattcattgtt

SEQ ID NO: 45453 - DNA, 22 bp, Artificial Sequence
  chemically synthesized
agtgactcctcattcattgttc

SEQ ID NO: 45454 - DNA, 22 bp, Artificial Sequence
  chemically synthesized
ctcattcattgttcataccctg

SEQ ID NO: 45455 - DNA, 22 bp, Artificial Sequence
  chemically synthesized
attcattgttcataccctggag

SEQ ID NO: 45456 - DNA, 22 bp, Artificial Sequence
  chemically synthesized
attgttcataccctggagacaa

SEQ ID NO: 45457 - DNA, 22 bp, Artificial Sequence
  chemically synthesized
ttcataccctggagacaaaact

SEQ ID NO: 45458 - DNA, 22 bp, Artificial Sequence
  chemically synthesized
ataccctggagacaaaactcct

SEQ ID NO: 45459 - DNA, 22 bp, Artificial Sequence
  chemically synthesized
gagacaaaactccttaaggcta

SEQ ID NO: 45460 - DNA, 22 bp, Artificial Sequence
  chemically synthesized
cttaaggctattaactccccct

SEQ ID NO: 45461 - DNA, 22 bp, Artificial Sequence
  chemically synthesized
aaggctattaactccccctgag

SEQ ID NO: 45462 - DNA, 22 bp, Artificial Sequence
  chemically synthesized
aggctattaactccccctgagc

SEQ ID NO: 45463 - DNA, 22 bp, Artificial Sequence
  chemically synthesized
ttaactccccctgagcttcaca

SEQ ID NO: 45464 - DNA, 22 bp, Artificial Sequence
  chemically synthesized
actccccctgagcttcacaatc

SEQ ID NO: 45465 - DNA, 22 bp, Artificial Sequence
  chemically synthesized
cccctgagcttcacaatctagt

SEQ ID NO: 45466 - DNA, 22 bp, Artificial Sequence
  chemically synthesized
agcttcacaatctagtccctgc

SEQ ID NO: 45467 - DNA, 22 bp, Artificial Sequence
  chemically synthesized
cacaatctagtccctgcaggtc

SEQ ID NO: 45468 - DNA, 22 bp, Artificial Sequence
  chemically synthesized
acaatctagtccctgcaggtct

SEQ ID NO: 45469 - DNA, 22 bp, Artificial Sequence
  chemically synthesized
gtccctgcaggtctctcccatc

SEQ ID NO: 45470 - DNA, 22 bp, Artificial Sequence
  chemically synthesized
caggtctctcccatcttctctc

SEQ ID NO: 45471 - DNA, 22 bp, Artificial Sequence
  chemically synthesized
tcccatcttctctcatactcct

SEQ ID NO: 45472 - DNA, 22 bp, Artificial Sequence
  chemically synthesized
ccatcttctctcatactcctct

SEQ ID NO: 45473 - DNA, 22 bp, Artificial Sequence
  chemically synthesized
ctctcatactcctctccttttc

SEQ ID NO: 45474 - DNA, 22 bp, Artificial Sequence
  chemically synthesized
tctcatactcctctccttttcc

SEQ ID NO: 45475 - DNA, 22 bp, Artificial Sequence
  chemically synthesized
tcatactcctctccttttccct

SEQ ID NO: 45476 - DNA, 22 bp, Artificial Sequence
  chemically synthesized
atactcctctccttttccctct

SEQ ID NO: 45477 - DNA, 22 bp, Artificial Sequence
  chemically synthesized
ctctccttttccctctctgagc

SEQ ID NO: 45478 - DNA, 22 bp, Artificial Sequence
  chemically synthesized
tccttttccctctctgagcccc

SEQ ID NO: 45479 - DNA, 22 bp, Artificial Sequence
  chemically synthesized
cttttccctctctgagccccgc

SEQ ID NO: 45480 - DNA, 22 bp, Artificial Sequence
  chemically synthesized
ttccctctctgagccccgctca

SEQ ID NO: 45481 - DNA, 22 bp, Artificial Sequence
  chemically synthesized
tccctctctgagccccgctcag

SEQ ID NO: 45482 - DNA, 22 bp, Artificial Sequence
  chemically synthesized
ccctctctgagccccgctcaga

SEQ ID NO: 45483 - DNA, 22 bp, Artificial Sequence
  chemically synthesized
cctctctgagccccgctcagat

SEQ ID NO: 45484 - DNA, 22 bp, Artificial Sequence
  chemically synthesized
tctgagccccgctcagatcttc

SEQ ID NO: 45485 - DNA, 22 bp, Artificial Sequence
  chemically synthesized
tgagccccgctcagatcttcga

SEQ ID NO: 45486 - DNA, 22 bp, Artificial Sequence
  chemically synthesized
agccccgctcagatcttcgaac

SEQ ID NO: 45487 - DNA, 22 bp, Artificial Sequence
  chemically synthesized
agatcttcgaacagagaacact

SEQ ID NO: 45488 - DNA, 22 bp, Artificial Sequence
  chemically synthesized
cgaacagagaacacttctgcat

SEQ ID NO: 45489 - DNA, 22 bp, Artificial Sequence
  chemically synthesized
gaacagagaacacttctgcatc

SEQ ID NO: 45490 - DNA, 22 bp, Artificial Sequence
  chemically synthesized
ctgcatcttggcatatatagtt

SEQ ID NO: 45491 - DNA, 22 bp, Artificial Sequence
  chemically synthesized
tgcatcttggcatatatagttc

SEQ ID NO: 45492 - DNA, 22 bp, Artificial Sequence
  chemically synthesized
catcttggcatatatagttctc

SEQ ID NO: 45493 - DNA, 22 bp, Artificial Sequence
  chemically synthesized
ggcatatatagttctctcacat

SEQ ID NO: 45494 - DNA, 22 bp, Artificial Sequence
  chemically synthesized
gcatatatagttctctcacata

SEQ ID NO: 45495 - DNA, 22 bp, Artificial Sequence
  chemically synthesized
tctcacatagaacgctttctcc

SEQ ID NO: 45496 - DNA, 22 bp, Artificial Sequence
  chemically synthesized
tcacatagaacgctttctcccc

SEQ ID NO: 45497 - DNA, 22 bp, Artificial Sequence
  chemically synthesized
acatagaacgctttctcccctt

SEQ ID NO: 45498 - DNA, 22 bp, Artificial Sequence
  chemically synthesized
tctcccctttagctatttatcc

SEQ ID NO: 45499 - DNA, 22 bp, Artificial Sequence
  chemically synthesized
ctcccctttagctatttatcct

SEQ ID NO: 45500 - DNA, 22 bp, Artificial Sequence
  chemically synthesized
tcccctttagctatttatcctt

SEQ ID NO: 45501 - DNA, 22 bp, Artificial Sequence
  chemically synthesized
ccctttagctatttatccttca

SEQ ID NO: 45502 - DNA, 22 bp, Artificial Sequence
  chemically synthesized
tagctatttatccttcaagtgt

SEQ ID NO: 45503 - DNA, 22 bp, Artificial Sequence
  chemically synthesized
agctatttatccttcaagtgtc

SEQ ID NO: 45504 - DNA, 22 bp, Artificial Sequence
  chemically synthesized
gctatttatccttcaagtgtca

SEQ ID NO: 45505 - DNA, 22 bp, Artificial Sequence
  chemically synthesized
tttatccttcaagtgtcagctc

SEQ ID NO: 45506 - DNA, 22 bp, Artificial Sequence
  chemically synthesized
atccttcaagtgtcagctcaaa

SEQ ID NO: 45507 - DNA, 22 bp, Artificial Sequence
  chemically synthesized
tccttcaagtgtcagctcaaac

SEQ ID NO: 45508 - DNA, 22 bp, Artificial Sequence
  chemically synthesized
caagtgtcagctcaaacatctc

SEQ ID NO: 45509 - DNA, 22 bp, Artificial Sequence
  chemically synthesized
aagtgtcagctcaaacatctca

SEQ ID NO: 45510 - DNA, 22 bp, Artificial Sequence
  chemically synthesized
aaacatctcatcattagagagg

SEQ ID NO: 45511 - DNA, 22 bp, Artificial Sequence
  chemically synthesized
atcattagagaggtttttccca

SEQ ID NO: 45512 - DNA, 22 bp, Artificial Sequence
  chemically synthesized
gagaggtttttcccaaacctct

SEQ ID NO: 45513 - DNA, 22 bp, Artificial Sequence
  chemically synthesized
ttcccaaacctctaggtaacta

SEQ ID NO: 45514 - DNA, 22 bp, Artificial Sequence
  chemically synthesized
tcccaaacctctaggtaactag

SEQ ID NO: 45515 - DNA, 22 bp, Artificial Sequence
  chemically synthesized
cccaaacctctaggtaactagg

SEQ ID NO: 45516 - DNA, 22 bp, Artificial Sequence
  chemically synthesized
ccaaacctctaggtaactaggt

SEQ ID NO: 45517 - DNA, 22 bp, Artificial Sequence
  chemically synthesized
taggtaactaggttagaaacca

SEQ ID NO: 45518 - DNA, 22 bp, Artificial Sequence
  chemically synthesized
ggtaactaggttagaaaccact

SEQ ID NO: 45519 - DNA, 22 bp, Artificial Sequence
  chemically synthesized
ggttagaaaccactccccattc

SEQ ID NO: 45520 - DNA, 22 bp, Artificial Sequence
  chemically synthesized
gaaaccactccccattccacgg

SEQ ID NO: 45521 - DNA, 22 bp, Artificial Sequence
  chemically synthesized
cccattccacggtacactgtat

SEQ ID NO: 45522 - DNA, 22 bp, Artificial Sequence
  chemically synthesized
cacggtacactgtatagtctta

SEQ ID NO: 45523 - DNA, 22 bp, Artificial Sequence
  chemically synthesized
tatagtcttaggacacctggtt

SEQ ID NO: 45524 - DNA, 22 bp, Artificial Sequence
  chemically synthesized
aggacacctggttcccttagtc

SEQ ID NO: 45525 - DNA, 22 bp, Artificial Sequence
  chemically synthesized
ggacacctggttcccttagtct

SEQ ID NO: 45526 - DNA, 22 bp, Artificial Sequence
  chemically synthesized
gttcccttagtctcacactcat

SEQ ID NO: 45527 - DNA, 22 bp, Artificial Sequence
  chemically synthesized
ccttagtctcacactcatcaca

SEQ ID NO: 45528 - DNA, 22 bp, Artificial Sequence
  chemically synthesized
agtctcacactcatcacatttg

SEQ ID NO: 45529 - DNA, 22 bp, Artificial Sequence
  chemically synthesized
gtctcacactcatcacatttga

SEQ ID NO: 45530 - DNA, 22 bp, Artificial Sequence
  chemically synthesized
acactcatcacatttgactgta

SEQ ID NO: 45531 - DNA, 22 bp, Artificial Sequence
  chemically synthesized
atcacatttgactgtattgtat

SEQ ID NO: 45532 - DNA, 22 bp, Artificial Sequence
  chemically synthesized
gactgtattgtatgttcaatgt

SEQ ID NO: 45533 - DNA, 22 bp, Artificial Sequence
  chemically synthesized
actgtattgtatgttcaatgtc

SEQ ID NO: 45534 - DNA, 22 bp, Artificial Sequence
  chemically synthesized
tattgtatgttcaatgtctacc

SEQ ID NO: 45535 - DNA, 22 bp, Artificial Sequence
  chemically synthesized
tatgttcaatgtctaccttcta

SEQ ID NO: 45536 - DNA, 22 bp, Artificial Sequence
  chemically synthesized
aatgtctaccttctacaaattt

SEQ ID NO: 45537 - DNA, 22 bp, Artificial Sequence
  chemically synthesized
ccttctacaaatttgtcaattc

SEQ ID NO: 45538 - DNA, 22 bp, Artificial Sequence
  chemically synthesized
ctacaaatttgtcaattcttga

SEQ ID NO: 45539 - DNA, 22 bp, Artificial Sequence
  chemically synthesized
tacaaatttgtcaattcttgaa

SEQ ID NO: 45540 - DNA, 22 bp, Artificial Sequence
  chemically synthesized
caaatttgtcaattcttgaaga

SEQ ID NO: 45541 - DNA, 22 bp, Artificial Sequence
  chemically synthesized
gtcaattcttgaagattaagaa

SEQ ID NO: 45542 - DNA, 22 bp, Artificial Sequence
  chemically synthesized
tcaattcttgaagattaagaat

SEQ ID NO: 45543 - DNA, 22 bp, Artificial Sequence
  chemically synthesized
ttgaagattaagaatcagttct

SEQ ID NO: 45544 - DNA, 22 bp, Artificial Sequence
  chemically synthesized
gaagattaagaatcagttctgt

SEQ ID NO: 45545 - DNA, 22 bp, Artificial Sequence
  chemically synthesized
aagattaagaatcagttctgta

SEQ ID NO: 45546 - DNA, 22 bp, Artificial Sequence
  chemically synthesized
agaatcagttctgtattcttaa

SEQ ID NO: 45547 - DNA, 22 bp, Artificial Sequence
  chemically synthesized
tgtattcttaactctatctccc

SEQ ID NO: 45548 - DNA, 22 bp, Artificial Sequence
  chemically synthesized
tattcttaactctatctccctc

SEQ ID NO: 45549 - DNA, 22 bp, Artificial Sequence
  chemically synthesized
ttaactctatctccctcgcctc

SEQ ID NO: 45550 - DNA, 22 bp, Artificial Sequence
  chemically synthesized
aactctatctccctcgcctctc

SEQ ID NO: 45551 - DNA, 22 bp, Artificial Sequence
  chemically synthesized
actctatctccctcgcctctca

SEQ ID NO: 45552 - DNA, 22 bp, Artificial Sequence
  chemically synthesized
tatctccctcgcctctcagtgc

SEQ ID NO: 45553 - DNA, 22 bp, Artificial Sequence
  chemically synthesized
tctccctcgcctctcagtgcct

SEQ ID NO: 45554 - DNA, 22 bp, Artificial Sequence
  chemically synthesized
cctcgcctctcagtgcctgata

SEQ ID NO: 45555 - DNA, 22 bp, Artificial Sequence
  chemically synthesized
gcctctcagtgcctgataccta

SEQ ID NO: 45556 - DNA, 22 bp, Artificial Sequence
  chemically synthesized
tcagtgcctgatacctaataga

SEQ ID NO: 45557 - DNA, 22 bp, Artificial Sequence
  chemically synthesized
agtgcctgatacctaatagaca

SEQ ID NO: 45558 - DNA, 22 bp, Artificial Sequence
  chemically synthesized
atacctaatagacacttgatga

SEQ ID NO: 45559 - DNA, 22 bp, Artificial Sequence
  chemically synthesized
atagacacttgatgaatcctta

SEQ ID NO: 45560 - DNA, 22 bp, Artificial Sequence
  chemically synthesized
gatgaatccttactgaataata

SEQ ID NO: 45561 - DNA, 22 bp, Artificial Sequence
  chemically synthesized
atgaatccttactgaataataa

SEQ ID NO: 45562 - DNA, 22 bp, Artificial Sequence
  chemically synthesized
actgaataataaaatggattaa

SEQ ID NO: 45563 - DNA, 22 bp, Artificial Sequence
  chemically synthesized
ctgaataataaaatggattaat

SEQ ID NO: 45564 - DNA, 22 bp, Artificial Sequence
  chemically synthesized
aataataaaatggattaatgaa

SEQ ID NO: 45565 - DNA, 22 bp, Artificial Sequence
  chemically synthesized
atgaataaaagcaataaatttc

SEQ ID NO: 45566 - DNA, 22 bp, Artificial Sequence
  chemically synthesized
caaggttaatattaataaatta

SEQ ID NO: 45567 - DNA, 22 bp, Artificial Sequence
  chemically synthesized
aaggttaatattaataaattaa

SEQ ID NO: 45568 - DNA, 22 bp, Artificial Sequence
  chemically synthesized
atattaataaattaaaaaggtt

SEQ ID NO: 45569 - DNA, 22 bp, Artificial Sequence
  chemically synthesized
ataaattaaaaaggttattttg

SEQ ID NO: 45570 - DNA, 22 bp, Artificial Sequence
  chemically synthesized
aaaaggttattttgaagtctga

SEQ ID NO: 45571 - DNA, 22 bp, Artificial Sequence
  chemically synthesized
ttttgaagtctgagaattagta

SEQ ID NO: 45572 - DNA, 22 bp, Artificial Sequence
  chemically synthesized
tgaagtctgagaattagtaccc

SEQ ID NO: 45573 - DNA, 22 bp, Artificial Sequence
  chemically synthesized
gaagtctgagaattagtaccca

SEQ ID NO: 45574 - DNA, 22 bp, Artificial Sequence
  chemically synthesized
aagtctgagaattagtacccaa

SEQ ID NO: 45575 - DNA, 22 bp, Artificial Sequence
  chemically synthesized
agaattagtacccaaaactaac

SEQ ID NO: 45576 - DNA, 22 bp, Artificial Sequence
  chemically synthesized
gtacccaaaactaactgtgact

SEQ ID NO: 45577 - DNA, 22 bp, Artificial Sequence
  chemically synthesized
actgtgactctctcatctgtta

SEQ ID NO: 45578 - DNA, 22 bp, Artificial Sequence
  chemically synthesized
tgactctctcatctgttatgtt

SEQ ID NO: 45579 - DNA, 22 bp, Artificial Sequence
  chemically synthesized
tctcatctgttatgtttttcac

SEQ ID NO: 45580 - DNA, 22 bp, Artificial Sequence
  chemically synthesized
tcatctgttatgtttttcacgt

SEQ ID NO: 45581 - DNA, 22 bp, Artificial Sequence
  chemically synthesized
atctgttatgtttttcacgttt

SEQ ID NO: 45582 - DNA, 22 bp, Artificial Sequence
  chemically synthesized
ttatgtttttcacgtttccatt

SEQ ID NO: 45583 - DNA, 22 bp, Artificial Sequence
  chemically synthesized
tgtttttcacgtttccattgtt

SEQ ID NO: 45584 - DNA, 22 bp, Artificial Sequence
  chemically synthesized
ttcacgtttccattgttcatgg

SEQ ID NO: 45585 - DNA, 22 bp, Artificial Sequence
  chemically synthesized
tcacgtttccattgttcatggg

SEQ ID NO: 45586 - DNA, 22 bp, Artificial Sequence
  chemically synthesized
cacgtttccattgttcatgggc

SEQ ID NO: 45587 - DNA, 22 bp, Artificial Sequence
  chemically synthesized
acgtttccattgttcatgggca

SEQ ID NO: 45588 - DNA, 22 bp, Artificial Sequence
  chemically synthesized
ccattgttcatgggcaaaattc

SEQ ID NO: 45589 - DNA, 22 bp, Artificial Sequence
  chemically synthesized
cattgttcatgggcaaaattct

SEQ ID NO: 45590 - DNA, 22 bp, Artificial Sequence
  chemically synthesized
ttcatgggcaaaattctggcag

SEQ ID NO: 45591 - DNA, 22 bp, Artificial Sequence
  chemically synthesized
atgggcaaaattctggcagcaa

SEQ ID NO: 45592 - DNA, 22 bp, Artificial Sequence
  chemically synthesized
tggcagcaagggattcttctcc

SEQ ID NO: 45593 - DNA, 22 bp, Artificial Sequence
  chemically synthesized
gcagcaagggattcttctccta

SEQ ID NO: 45594 - DNA, 22 bp, Artificial Sequence
  chemically synthesized
ttctcctaagaaaccttttgtt

SEQ ID NO: 45595 - DNA, 22 bp, Artificial Sequence
  chemically synthesized
ctcctaagaaaccttttgtttt

SEQ ID NO: 45596 - DNA, 22 bp, Artificial Sequence
  chemically synthesized
tcctaagaaaccttttgttttc

SEQ ID NO: 45597 - DNA, 22 bp, Artificial Sequence
  chemically synthesized
ctaagaaaccttttgttttctt

SEQ ID NO: 45598 - DNA, 22 bp, Artificial Sequence
  chemically synthesized
agaaaccttttgttttcttgga

SEQ ID NO: 45599 - DNA, 22 bp, Artificial Sequence
  chemically synthesized
ttgttttcttggatgtgaatac

SEQ ID NO: 45600 - DNA, 22 bp, Artificial Sequence
  chemically synthesized
tgttttcttggatgtgaataca

SEQ ID NO: 45601 - DNA, 22 bp, Artificial Sequence
  chemically synthesized
gttttcttggatgtgaatacat

SEQ ID NO: 45602 - DNA, 22 bp, Artificial Sequence
  chemically synthesized
ttttcttggatgtgaatacatt

SEQ ID NO: 45603 - DNA, 22 bp, Artificial Sequence
  chemically synthesized
tcttggatgtgaatacatttcc

SEQ ID NO: 45604 - DNA, 22 bp, Artificial Sequence
  chemically synthesized
cttggatgtgaatacatttcct

SEQ ID NO: 45605 - DNA, 22 bp, Artificial Sequence
  chemically synthesized
ttggatgtgaatacatttcctt

SEQ ID NO: 45606 - DNA, 22 bp, Artificial Sequence
  chemically synthesized
ggatgtgaatacatttccttgt

SEQ ID NO: 45607 - DNA, 22 bp, Artificial Sequence
  chemically synthesized
gatgtgaatacatttccttgtt

SEQ ID NO: 45608 - DNA, 22 bp, Artificial Sequence
  chemically synthesized
ccttgtttgccagaaaacatgg

SEQ ID NO: 45609 - DNA, 22 bp, Artificial Sequence
  chemically synthesized
cttgtttgccagaaaacatggt

SEQ ID NO: 45610 - DNA, 22 bp, Artificial Sequence
  chemically synthesized
gtttgccagaaaacatggtaag

SEQ ID NO: 45611 - DNA, 22 bp, Artificial Sequence
  chemically synthesized
tttgccagaaaacatggtaaga

SEQ ID NO: 45612 - DNA, 22 bp, Artificial Sequence
  chemically synthesized
gccagaaaacatggtaagataa

SEQ ID NO: 45613 - DNA, 22 bp, Artificial Sequence
  chemically synthesized
ccagaaaacatggtaagataac

SEQ ID NO: 45614 - DNA, 22 bp, Artificial Sequence
  chemically synthesized
gagagtataacattcattttat

SEQ ID NO: 45615 - DNA, 22 bp, Artificial Sequence
  chemically synthesized
attttattcatgaagaaactgt

SEQ ID NO: 45616 - DNA, 22 bp, Artificial Sequence
  chemically synthesized
tattcatgaagaaactgttatt

SEQ ID NO: 45617 - DNA, 22 bp, Artificial Sequence
  chemically synthesized
attcatgaagaaactgttattc

SEQ ID NO: 45618 - DNA, 22 bp, Artificial Sequence
  chemically synthesized
ttcatgaagaaactgttattca

SEQ ID NO: 45619 - DNA, 22 bp, Artificial Sequence
  chemically synthesized
atgaagaaactgttattcagtt

SEQ ID NO: 45620 - DNA, 22 bp, Artificial Sequence
  chemically synthesized
ttattcagtttaaggggttctt

SEQ ID NO: 45621 - DNA, 22 bp, Artificial Sequence
  chemically synthesized
ttcagtttaaggggttcttttt

SEQ ID NO: 45622 - DNA, 22 bp, Artificial Sequence
  chemically synthesized
agtttaaggggttctttttcag

SEQ ID NO: 45623 - DNA, 22 bp, Artificial Sequence
  chemically synthesized
aaggggttctttttcagaaagt

SEQ ID NO: 45624 - DNA, 22 bp, Artificial Sequence
  chemically synthesized
aggggttctttttcagaaagtt

SEQ ID NO: 45625 - DNA, 22 bp, Artificial Sequence
  chemically synthesized
tttttcagaaagtttcagaaat

SEQ ID NO: 45626 - DNA, 22 bp, Artificial Sequence
  chemically synthesized
tttcagaaagtttcagaaatcc

SEQ ID NO: 45627 - DNA, 22 bp, Artificial Sequence
  chemically synthesized
ttcagaaagtttcagaaatcca

SEQ ID NO: 45628 - DNA, 22 bp, Artificial Sequence
  chemically synthesized
tcagaaagtttcagaaatccaa

SEQ ID NO: 45629 - DNA, 22 bp, Artificial Sequence
  chemically synthesized
cagaaagtttcagaaatccaag

SEQ ID NO: 45630 - DNA, 22 bp, Artificial Sequence
  chemically synthesized
agaaagtttcagaaatccaaga

SEQ ID NO: 45631 - DNA, 22 bp, Artificial Sequence
  chemically synthesized
cagaaatccaagacctttgact

SEQ ID NO: 45632 - DNA, 22 bp, Artificial Sequence
  chemically synthesized
agaaatccaagacctttgactg

SEQ ID NO: 45633 - DNA, 22 bp, Artificial Sequence
  chemically synthesized
tgactgcaagtactgtgttctt

SEQ ID NO: 45634 - DNA, 22 bp, Artificial Sequence
  chemically synthesized
gactgcaagtactgtgttcttt

SEQ ID NO: 45635 - DNA, 22 bp, Artificial Sequence
  chemically synthesized
actgcaagtactgtgttctttc

SEQ ID NO: 45636 - DNA, 22 bp, Artificial Sequence
  chemically synthesized
caagtactgtgttctttcatct

SEQ ID NO: 45637 - DNA, 22 bp, Artificial Sequence
  chemically synthesized
tgttctttcatctataggacat

SEQ ID NO: 45638 - DNA, 22 bp, Artificial Sequence
  chemically synthesized
tttcatctataggacatttcct

SEQ ID NO: 45639 - DNA, 22 bp, Artificial Sequence
  chemically synthesized
tcatctataggacatttccttt

SEQ ID NO: 45640 - DNA, 22 bp, Artificial Sequence
  chemically synthesized
catctataggacatttcctttg

SEQ ID NO: 45641 - DNA, 22 bp, Artificial Sequence
  chemically synthesized
atctataggacatttcctttga

SEQ ID NO: 45642 - DNA, 22 bp, Artificial Sequence
  chemically synthesized
taggacatttcctttgaaaact

SEQ ID NO: 45643 - DNA, 22 bp, Artificial Sequence
  chemically synthesized
cctttgaaaactgaggttttaa

SEQ ID NO: 45644 - DNA, 22 bp, Artificial Sequence
  chemically synthesized
ctttgaaaactgaggttttaat

SEQ ID NO: 45645 - DNA, 22 bp, Artificial Sequence
  chemically synthesized
tgaaaactgaggttttaatatt

SEQ ID NO: 45646 - DNA, 22 bp, Artificial Sequence
  chemically synthesized
gaaaactgaggttttaatattt

SEQ ID NO: 45647 - DNA, 22 bp, Artificial Sequence
  chemically synthesized
aaaactgaggttttaatattta

SEQ ID NO: 45648 - DNA, 22 bp, Artificial Sequence
  chemically synthesized
aggttttaatatttaattctta

SEQ ID NO: 45649 - DNA, 22 bp, Artificial Sequence
  chemically synthesized
taatatttaattcttacataat

SEQ ID NO: 45650 - DNA, 22 bp, Artificial Sequence
  chemically synthesized
aatatttaattcttacataata

SEQ ID NO: 45651 - DNA, 22 bp, Artificial Sequence
  chemically synthesized
atatttaattcttacataatag

SEQ ID NO: 45652 - DNA, 22 bp, Artificial Sequence
  chemically synthesized
aattcttacataatagtaaaaa

SEQ ID NO: 45653 - DNA, 22 bp, Artificial Sequence
  chemically synthesized
attcttacataatagtaaaaaa

SEQ ID NO: 45654 - DNA, 22 bp, Artificial Sequence
  chemically synthesized
ttacataatagtaaaaaagtga

SEQ ID NO: 45655 - DNA, 22 bp, Artificial Sequence
  chemically synthesized
acataatagtaaaaaagtgaat

SEQ ID NO: 45656 - DNA, 22 bp, Artificial Sequence
  chemically synthesized
cataatagtaaaaaagtgaatt

SEQ ID NO: 45657 - DNA, 22 bp, Artificial Sequence
  chemically synthesized
gccttggaaaagacctaaatcc

SEQ ID NO: 45658 - DNA, 22 bp, Artificial Sequence
  chemically synthesized
ggaaaagacctaaatcctggtc

SEQ ID NO: 45659 - DNA, 22 bp, Artificial Sequence
  chemically synthesized
gaaaagacctaaatcctggtcc

SEQ ID NO: 45660 - DNA, 22 bp, Artificial Sequence
  chemically synthesized
aatcctggtcctaactctgcca

SEQ ID NO: 45661 - DNA, 22 bp, Artificial Sequence
  chemically synthesized
gtcctaactctgccatttgctt

SEQ ID NO: 45662 - DNA, 22 bp, Artificial Sequence
  chemically synthesized
actctgccatttgcttgatcat

SEQ ID NO: 45663 - DNA, 22 bp, Artificial Sequence
  chemically synthesized
tgccatttgcttgatcattaaa

SEQ ID NO: 45664 - DNA, 22 bp, Artificial Sequence
  chemically synthesized
ccatttgcttgatcattaaata

SEQ ID NO: 45665 - DNA, 22 bp, Artificial Sequence
  chemically synthesized
gcttgatcattaaatacctcta

SEQ ID NO: 45666 - DNA, 22 bp, Artificial Sequence
  chemically synthesized
cttgatcattaaatacctctac

SEQ ID NO: 45667 - DNA, 22 bp, Artificial Sequence
  chemically synthesized
gatcattaaatacctctacgaa

SEQ ID NO: 45668 - DNA, 22 bp, Artificial Sequence
  chemically synthesized
atcattaaatacctctacgaat

SEQ ID NO: 45669 - DNA, 22 bp, Artificial Sequence
  chemically synthesized
aatacctctacgaatcaatttg

SEQ ID NO: 45670 - DNA, 22 bp, Artificial Sequence
  chemically synthesized
tacgaatcaatttgctctatga

SEQ ID NO: 45671 - DNA, 22 bp, Artificial Sequence
  chemically synthesized
cgaatcaatttgctctatgaac

SEQ ID NO: 45672 - DNA, 22 bp, Artificial Sequence
  chemically synthesized
gctctatgaactggaggagtgg

SEQ ID NO: 45673 - DNA, 22 bp, Artificial Sequence
  chemically synthesized
ctctatgaactggaggagtggg

SEQ ID NO: 45674 - DNA, 22 bp, Artificial Sequence
  chemically synthesized
tatgaactggaggagtgggatt

SEQ ID NO: 45675 - DNA, 22 bp, Artificial Sequence
  chemically synthesized
tgaactggaggagtgggattca

SEQ ID NO: 45676 - DNA, 22 bp, Artificial Sequence
  chemically synthesized
gaggagtgggattcatgatctc

SEQ ID NO: 45677 - DNA, 22 bp, Artificial Sequence
  chemically synthesized
atgatctctaagatacctcata

SEQ ID NO: 45678 - DNA, 22 bp, Artificial Sequence
  chemically synthesized
taagatacctcatatcactact

SEQ ID NO: 45679 - DNA, 22 bp, Artificial Sequence
  chemically synthesized
agatacctcatatcactactat

SEQ ID NO: 45680 - DNA, 22 bp, Artificial Sequence
  chemically synthesized
atatcactactatgaaatgcag

SEQ ID NO: 45681 - DNA, 22 bp, Artificial Sequence
  chemically synthesized
ctatgaaatgcagggaagtaaa

SEQ ID NO: 45682 - DNA, 22 bp, Artificial Sequence
  chemically synthesized
tgaaatgcagggaagtaaaaat

SEQ ID NO: 45683 - DNA, 22 bp, Artificial Sequence
  chemically synthesized
aaatcattaaatttaaagaaac

SEQ ID NO: 45684 - DNA, 22 bp, Artificial Sequence
  chemically synthesized
aatttaaagaaactatagtggc

SEQ ID NO: 45685 - DNA, 22 bp, Artificial Sequence
  chemically synthesized
aaagaaactatagtggcaatgt

SEQ ID NO: 45686 - DNA, 22 bp, Artificial Sequence
  chemically synthesized
aagaaactatagtggcaatgta

SEQ ID NO: 45687 - DNA, 22 bp, Artificial Sequence
  chemically synthesized
tagtggcaatgtattattagga

SEQ ID NO: 45688 - DNA, 22 bp, Artificial Sequence
  chemically synthesized
ttaggaataaacacaataatta

SEQ ID NO: 45689 - DNA, 22 bp, Artificial Sequence
  chemically synthesized
ggaataaacacaataattatcc

SEQ ID NO: 45690 - DNA, 22 bp, Artificial Sequence
  chemically synthesized
tccatctatatgaaaatctcaa

SEQ ID NO: 45691 - DNA, 22 bp, Artificial Sequence
  chemically synthesized
tatgaaaatctcaaaccatacc

SEQ ID NO: 45692 - DNA, 22 bp, Artificial Sequence
  chemically synthesized
aaaccataccaggctatgataa

SEQ ID NO: 45693 - DNA, 22 bp, Artificial Sequence
  chemically synthesized
tgataatattaaaataaagata

SEQ ID NO: 45694 - DNA, 22 bp, Artificial Sequence
  chemically synthesized
aaataaagatacattgaagatg

SEQ ID NO: 45695 - DNA, 22 bp, Artificial Sequence
  chemically synthesized
aagatgatatcaacttgtgtaa

SEQ ID NO: 45696 - DNA, 22 bp, Artificial Sequence
  chemically synthesized
gtgtaaatcacattgtggggac

SEQ ID NO: 45697 - DNA, 22 bp, Artificial Sequence
  chemically synthesized
tgtaaatcacattgtggggacc

SEQ ID NO: 45698 - DNA, 22 bp, Artificial Sequence
  chemically synthesized
tggggacctctccacaaaaaca

SEQ ID NO: 45699 - DNA, 22 bp, Artificial Sequence
  chemically synthesized
tccacaaaaacacttcccttcc

SEQ ID NO: 45700 - DNA, 22 bp, Artificial Sequence
  chemically synthesized
cacaaaaacacttcccttcccc

SEQ ID NO: 45701 - DNA, 22 bp, Artificial Sequence
  chemically synthesized
cccttccccttgaaagggaaat

SEQ ID NO: 45702 - DNA, 22 bp, Artificial Sequence
  chemically synthesized
ccttccccttgaaagggaaatg

SEQ ID NO: 45703 - DNA, 22 bp, Artificial Sequence
  chemically synthesized
ccccttgaaagggaaatgatag

SEQ ID NO: 45704 - DNA, 22 bp, Artificial Sequence
  chemically synthesized
cccttgaaagggaaatgataga

SEQ ID NO: 45705 - DNA, 22 bp, Artificial Sequence
  chemically synthesized
gaaagggaaatgatagaaaata

SEQ ID NO: 45706 - DNA, 22 bp, Artificial Sequence
  chemically synthesized
aaagggaaatgatagaaaataa

SEQ ID NO: 45707 - DNA, 22 bp, Artificial Sequence
  chemically synthesized
aaggcagcttaggggttgaaaa

SEQ ID NO: 45708 - DNA, 22 bp, Artificial Sequence
  chemically synthesized
aggggttgaaaaacaaattttt

SEQ ID NO: 45709 - DNA, 22 bp, Artificial Sequence
  chemically synthesized
ggggttgaaaaacaaatttttt

SEQ ID NO: 45710 - DNA, 22 bp, Artificial Sequence
  chemically synthesized
aaaaacaaattttttcaaaaaa

SEQ ID NO: 45711 - DNA, 22 bp, Artificial Sequence
  chemically synthesized
tttcaaaaaaaaatccattgag

SEQ ID NO: 45712 - DNA, 22 bp, Artificial Sequence
  chemically synthesized
ttcaaaaaaaaatccattgagc

SEQ ID NO: 45713 - DNA, 22 bp, Artificial Sequence
  chemically synthesized
tcaaaaaaaaatccattgagca

SEQ ID NO: 45714 - DNA, 22 bp, Artificial Sequence
  chemically synthesized
caaaaaaaaatccattgagcat

SEQ ID NO: 45715 - DNA, 22 bp, Artificial Sequence
  chemically synthesized
aaaaaaaaatccattgagcatt

SEQ ID NO: 45716 - DNA, 22 bp, Artificial Sequence
  chemically synthesized
agcattttctatgtaccaggca

SEQ ID NO: 45717 - DNA, 22 bp, Artificial Sequence
  chemically synthesized
tctatgtaccaggcactgttct

SEQ ID NO: 45718 - DNA, 22 bp, Artificial Sequence
  chemically synthesized
ctatgtaccaggcactgttcta

SEQ ID NO: 45719 - DNA, 22 bp, Artificial Sequence
  chemically synthesized
tatgtaccaggcactgttctag

SEQ ID NO: 45720 - DNA, 22 bp, Artificial Sequence
  chemically synthesized
tgtaccaggcactgttctagac

SEQ ID NO: 45721 - DNA, 22 bp, Artificial Sequence
  chemically synthesized
ttctagaccctgagatcaacac

SEQ ID NO: 45722 - DNA, 22 bp, Artificial Sequence
  chemically synthesized
tagaccctgagatcaacacaca

SEQ ID NO: 45723 - DNA, 22 bp, Artificial Sequence
  chemically synthesized
gaccctgagatcaacacacatg

SEQ ID NO: 45724 - DNA, 22 bp, Artificial Sequence
  chemically synthesized
agatcaacacacatgctactga

SEQ ID NO: 45725 - DNA, 22 bp, Artificial Sequence
  chemically synthesized
ctgattataagatccataaaat

SEQ ID NO: 45726 - DNA, 22 bp, Artificial Sequence
  chemically synthesized
attataagatccataaaataac

SEQ ID NO: 45727 - DNA, 22 bp, Artificial Sequence
  chemically synthesized
taagatccataaaataacttag

SEQ ID NO: 45728 - DNA, 22 bp, Artificial Sequence
  chemically synthesized
agtttcactggcgtgttcccag

SEQ ID NO: 45729 - DNA, 22 bp, Artificial Sequence
  chemically synthesized
gtttcactggcgtgttcccagt

SEQ ID NO: 45730 - DNA, 22 bp, Artificial Sequence
  chemically synthesized
cactggcgtgttcccagtgccc

SEQ ID NO: 45731 - DNA, 22 bp, Artificial Sequence
  chemically synthesized
actggcgtgttcccagtgccca

SEQ ID NO: 45732 - DNA, 22 bp, Artificial Sequence
  chemically synthesized
gcgtgttcccagtgcccaggta

SEQ ID NO: 45733 - DNA, 22 bp, Artificial Sequence
  chemically synthesized
ccagtgcccaggtaacagtgct

SEQ ID NO: 45734 - DNA, 22 bp, Artificial Sequence
  chemically synthesized
cattaatgtttgttaaatgatg

SEQ ID NO: 45735 - DNA, 22 bp, Artificial Sequence
  chemically synthesized
atgtttgttaaatgatgagaaa

SEQ ID NO: 45736 - DNA, 22 bp, Artificial Sequence
  chemically synthesized
gttaaatgatgagaaaagagga

SEQ ID NO: 45737 - DNA, 22 bp, Artificial Sequence
  chemically synthesized
ttaaatgatgagaaaagaggaa

SEQ ID NO: 45738 - DNA, 22 bp, Artificial Sequence
  chemically synthesized
aatgatgagaaaagaggaaagc

SEQ ID NO: 45739 - DNA, 22 bp, Artificial Sequence
  chemically synthesized
tgctcaggtgcaggaacttgtg

SEQ ID NO: 45740 - DNA, 22 bp, Artificial Sequence
  chemically synthesized
ctcaggtgcaggaacttgtgca

SEQ ID NO: 45741 - DNA, 22 bp, Artificial Sequence
  chemically synthesized
aggtgcaggaacttgtgcagag

SEQ ID NO: 45742 - DNA, 22 bp, Artificial Sequence
  chemically synthesized
gtgcagagatcttctggactga

SEQ ID NO: 45743 - DNA, 22 bp, Artificial Sequence
  chemically synthesized
tgcagagatcttctggactgat

SEQ ID NO: 45744 - DNA, 22 bp, Artificial Sequence
  chemically synthesized
ctggactgattcccagtgctaa

SEQ ID NO: 45745 - DNA, 22 bp, Artificial Sequence
  chemically synthesized
tggactgattcccagtgctaac

SEQ ID NO: 45746 - DNA, 22 bp, Artificial Sequence
  chemically synthesized
gactgattcccagtgctaacaa

SEQ ID NO: 45747 - DNA, 22 bp, Artificial Sequence
  chemically synthesized
attcccagtgctaacaagtccc

SEQ ID NO: 45748 - DNA, 22 bp, Artificial Sequence
  chemically synthesized
ccagtgctaacaagtcccttcc

SEQ ID NO: 45749 - DNA, 22 bp, Artificial Sequence
  chemically synthesized
acaagtcccttccagttttatc

SEQ ID NO: 45750 - DNA, 22 bp, Artificial Sequence
  chemically synthesized
ccagttttatccaccaataagc

SEQ ID NO: 45751 - DNA, 22 bp, Artificial Sequence
  chemically synthesized
cagttttatccaccaataagct

SEQ ID NO: 45752 - DNA, 22 bp, Artificial Sequence
  chemically synthesized
tatccaccaataagctatgtcc

SEQ ID NO: 45753 - DNA, 22 bp, Artificial Sequence
  chemically synthesized
atccaccaataagctatgtcct

SEQ ID NO: 45754 - DNA, 22 bp, Artificial Sequence
  chemically synthesized
tccaccaataagctatgtcctt

SEQ ID NO: 45755 - DNA, 22 bp, Artificial Sequence
  chemically synthesized
tgtccttgagctcctgcccact

SEQ ID NO: 45756 - DNA, 22 bp, Artificial Sequence
  chemically synthesized
gagctcctgcccactctctaga

SEQ ID NO: 45757 - DNA, 22 bp, Artificial Sequence
  chemically synthesized
agctcctgcccactctctagag

SEQ ID NO: 45758 - DNA, 22 bp, Artificial Sequence
  chemically synthesized
ctgcccactctctagagaaaac

SEQ ID NO: 45759 - DNA, 22 bp, Artificial Sequence
  chemically synthesized
cccactctctagagaaaacttt

SEQ ID NO: 45760 - DNA, 22 bp, Artificial Sequence
  chemically synthesized
tctagagaaaacttttatttca

SEQ ID NO: 45761 - DNA, 22 bp, Artificial Sequence
  chemically synthesized
tagagaaaacttttatttcaag

SEQ ID NO: 45762 - DNA, 22 bp, Artificial Sequence
  chemically synthesized
gagaaaacttttatttcaaggc

SEQ ID NO: 45763 - DNA, 22 bp, Artificial Sequence
  chemically synthesized
ttatttcaaggcatactccggg

SEQ ID NO: 45764 - DNA, 22 bp, Artificial Sequence
  chemically synthesized
tatttcaaggcatactccggga

SEQ ID NO: 45765 - DNA, 22 bp, Artificial Sequence
  chemically synthesized
atttcaaggcatactccgggat

SEQ ID NO: 45766 - DNA, 22 bp, Artificial Sequence
  chemically synthesized
tttcaaggcatactccgggatt

SEQ ID NO: 45767 - DNA, 22 bp, Artificial Sequence
  chemically synthesized
caaggcatactccgggattcac

SEQ ID NO: 45768 - DNA, 22 bp, Artificial Sequence
  chemically synthesized
aaggcatactccgggattcaca

SEQ ID NO: 45769 - DNA, 22 bp, Artificial Sequence
  chemically synthesized
cgggattcacatgtgatagaga

SEQ ID NO: 45770 - DNA, 22 bp, Artificial Sequence
  chemically synthesized
acatgtgatagagatggttctg

SEQ ID NO: 45771 - DNA, 22 bp, Artificial Sequence
  chemically synthesized
tgttcccaggaactttgggcat

SEQ ID NO: 45772 - DNA, 22 bp, Artificial Sequence
  chemically synthesized
ttcccaggaactttgggcatat

SEQ ID NO: 45773 - DNA, 22 bp, Artificial Sequence
  chemically synthesized
ccaggaactttgggcatattta

SEQ ID NO: 45774 - DNA, 22 bp, Artificial Sequence
  chemically synthesized
tgggcatatttaaaaactggac

SEQ ID NO: 45775 - DNA, 22 bp, Artificial Sequence
  chemically synthesized
gggcatatttaaaaactggact

SEQ ID NO: 45776 - DNA, 22 bp, Artificial Sequence
  chemically synthesized
ggcatatttaaaaactggactg

SEQ ID NO: 45777 - DNA, 22 bp, Artificial Sequence
  chemically synthesized
aaaaactggactggaaaaattt

SEQ ID NO: 45778 - DNA, 22 bp, Artificial Sequence
  chemically synthesized
aaaactggactggaaaaatttg

SEQ ID NO: 45779 - DNA, 22 bp, Artificial Sequence
  chemically synthesized
gactggaaaaatttgtgactag

SEQ ID NO: 45780 - DNA, 22 bp, Artificial Sequence
  chemically synthesized
gaaaaatttgtgactagaaaaa

SEQ ID NO: 45781 - DNA, 22 bp, Artificial Sequence
  chemically synthesized
gtgactagaaaaaggacattaa

SEQ ID NO: 45782 - DNA, 22 bp, Artificial Sequence
  chemically synthesized
tgactagaaaaaggacattaaa

SEQ ID NO: 45783 - DNA, 22 bp, Artificial Sequence
  chemically synthesized
gaaaaaggacattaaaaacaca

SEQ ID NO: 45784 - DNA, 22 bp, Artificial Sequence
  chemically synthesized
aaaacacatgctcatttcagga

SEQ ID NO: 45785 - DNA, 22 bp, Artificial Sequence
  chemically synthesized
atttcaggataaagatctctga

SEQ ID NO: 45786 - DNA, 22 bp, Artificial Sequence
  chemically synthesized
caggataaagatctctgaggaa

SEQ ID NO: 45787 - DNA, 22 bp, Artificial Sequence
  chemically synthesized
aggataaagatctctgaggaaa

SEQ ID NO: 45788 - DNA, 22 bp, Artificial Sequence
  chemically synthesized
tgaggaaaagaatacaaaataa

SEQ ID NO: 45789 - DNA, 22 bp, Artificial Sequence
  chemically synthesized
aggaaaagaatacaaaataatt

SEQ ID NO: 45790 - DNA, 22 bp, Artificial Sequence
  chemically synthesized
aaaaagaaacaacagaaacagg

SEQ ID NO: 45791 - DNA, 22 bp, Artificial Sequence
  chemically synthesized
aaaagaaacaacagaaacaggt

SEQ ID NO: 45792 - DNA, 22 bp, Artificial Sequence
  chemically synthesized
cacttctctgtaataaggtttc

SEQ ID NO: 45793 - DNA, 22 bp, Artificial Sequence
  chemically synthesized
acttctctgtaataaggtttct

SEQ ID NO: 45794 - DNA, 22 bp, Artificial Sequence
  chemically synthesized
ctctgtaataaggtttctgtcc

SEQ ID NO: 45795 - DNA, 22 bp, Artificial Sequence
  chemically synthesized
tctgtaataaggtttctgtcct

SEQ ID NO: 45796 - DNA, 22 bp, Artificial Sequence
  chemically synthesized
tgtaataaggtttctgtcctcc

SEQ ID NO: 45797 - DNA, 22 bp, Artificial Sequence
  chemically synthesized
taataaggtttctgtcctccta

SEQ ID NO: 45798 - DNA, 22 bp, Artificial Sequence
  chemically synthesized
ctgtcctcctagattctttctc

SEQ ID NO: 45799 - DNA, 22 bp, Artificial Sequence
  chemically synthesized
tgtcctcctagattctttctca

SEQ ID NO: 45800 - DNA, 22 bp, Artificial Sequence
  chemically synthesized
tcctcctagattctttctcact

SEQ ID NO: 45801 - DNA, 22 bp, Artificial Sequence
  chemically synthesized
ctagattctttctcactaaact

SEQ ID NO: 45802 - DNA, 22 bp, Artificial Sequence
  chemically synthesized
gattctttctcactaaactaca

SEQ ID NO: 45803 - DNA, 22 bp, Artificial Sequence
  chemically synthesized
tttctcactaaactacagagaa

SEQ ID NO: 45804 - DNA, 22 bp, Artificial Sequence
  chemically synthesized
tctcactaaactacagagaata

SEQ ID NO: 45805 - DNA, 22 bp, Artificial Sequence
  chemically synthesized
ctcactaaactacagagaataa

SEQ ID NO: 45806 - DNA, 22 bp, Artificial Sequence
  chemically synthesized
tcactaaactacagagaataag

SEQ ID NO: 45807 - DNA, 22 bp, Artificial Sequence
  chemically synthesized
actaaactacagagaataagac

SEQ ID NO: 45808 - DNA, 22 bp, Artificial Sequence
  chemically synthesized
aactacagagaataagaccgtg

SEQ ID NO: 45809 - DNA, 22 bp, Artificial Sequence
  chemically synthesized
cagagaataagaccgtgctttg

SEQ ID NO: 45810 - DNA, 22 bp, Artificial Sequence
  chemically synthesized
tgttctcttatatgcattctgt

SEQ ID NO: 45811 - DNA, 22 bp, Artificial Sequence
  chemically synthesized
gttctcttatatgcattctgtc

SEQ ID NO: 45812 - DNA, 22 bp, Artificial Sequence
  chemically synthesized
ttctcttatatgcattctgtcc

SEQ ID NO: 45813 - DNA, 22 bp, Artificial Sequence
  chemically synthesized
tcttatatgcattctgtccact

SEQ ID NO: 45814 - DNA, 22 bp, Artificial Sequence
  chemically synthesized
ttatatgcattctgtccacttc

SEQ ID NO: 45815 - DNA, 22 bp, Artificial Sequence
  chemically synthesized
atatgcattctgtccacttcta

SEQ ID NO: 45816 - DNA, 22 bp, Artificial Sequence
  chemically synthesized
tatgcattctgtccacttctac

SEQ ID NO: 45817 - DNA, 22 bp, Artificial Sequence
  chemically synthesized
tgtccacttctacataggcaaa

SEQ ID NO: 45818 - DNA, 22 bp, Artificial Sequence
  chemically synthesized
tccacttctacataggcaaaat

SEQ ID NO: 45819 - DNA, 22 bp, Artificial Sequence
  chemically synthesized
ctacataggcaaaattgacttt

SEQ ID NO: 45820 - DNA, 22 bp, Artificial Sequence
  chemically synthesized
tacataggcaaaattgactttt

SEQ ID NO: 45821 - DNA, 22 bp, Artificial Sequence
  chemically synthesized
cataggcaaaattgacttttaa

SEQ ID NO: 45822 - DNA, 22 bp, Artificial Sequence
  chemically synthesized
acttttaattttgattttatga

SEQ ID NO: 45823 - DNA, 22 bp, Artificial Sequence
  chemically synthesized
ttaattttgattttatgaatgc

SEQ ID NO: 45824 - DNA, 22 bp, Artificial Sequence
  chemically synthesized
taattttgattttatgaatgca

SEQ ID NO: 45825 - DNA, 22 bp, Artificial Sequence
  chemically synthesized
aattttgattttatgaatgcat

SEQ ID NO: 45826 - DNA, 22 bp, Artificial Sequence
  chemically synthesized
attttgattttatgaatgcata

SEQ ID NO: 45827 - DNA, 22 bp, Artificial Sequence
  chemically synthesized
tgattttatgaatgcatacaca

SEQ ID NO: 45828 - DNA, 22 bp, Artificial Sequence
  chemically synthesized
gattttatgaatgcatacacac

SEQ ID NO: 45829 - DNA, 22 bp, Artificial Sequence
  chemically synthesized
attttatgaatgcatacacacg

SEQ ID NO: 45830 - DNA, 22 bp, Artificial Sequence
  chemically synthesized
tatgaatgcatacacacgagaa

SEQ ID NO: 45831 - DNA, 22 bp, Artificial Sequence
  chemically synthesized
atgaatgcatacacacgagaac

SEQ ID NO: 45832 - DNA, 22 bp, Artificial Sequence
  chemically synthesized
tgaatgcatacacacgagaact

SEQ ID NO: 45833 - DNA, 22 bp, Artificial Sequence
  chemically synthesized
tgaacagttagtataaggtgaa

SEQ ID NO: 45834 - DNA, 22 bp, Artificial Sequence
  chemically synthesized
gaacagttagtataaggtgaat

SEQ ID NO: 45835 - DNA, 22 bp, Artificial Sequence
  chemically synthesized
aacagttagtataaggtgaatt

SEQ ID NO: 45836 - DNA, 22 bp, Artificial Sequence
  chemically synthesized
gtataaggtgaattctgatttt

SEQ ID NO: 45837 - DNA, 22 bp, Artificial Sequence
  chemically synthesized
tgatttttcagaatgcatgcca

SEQ ID NO: 45838 - DNA, 22 bp, Artificial Sequence
  chemically synthesized
atttttcagaatgcatgccata

SEQ ID NO: 45839 - DNA, 22 bp, Artificial Sequence
  chemically synthesized
ttcagaatgcatgccatatata

SEQ ID NO: 45840 - DNA, 22 bp, Artificial Sequence
  chemically synthesized
tcagaatgcatgccatatataa

SEQ ID NO: 45841 - DNA, 22 bp, Artificial Sequence
  chemically synthesized
cagaatgcatgccatatataat

SEQ ID NO: 45842 - DNA, 22 bp, Artificial Sequence
  chemically synthesized
agaatgcatgccatatataatg

SEQ ID NO: 45843 - DNA, 22 bp, Artificial Sequence
  chemically synthesized
aattttgagattatgctggctc

SEQ ID NO: 45844 - DNA, 22 bp, Artificial Sequence
  chemically synthesized
attttgagattatgctggctct

SEQ ID NO: 45845 - DNA, 22 bp, Artificial Sequence
  chemically synthesized
tgagattatgctggctctgatt

SEQ ID NO: 45846 - DNA, 22 bp, Artificial Sequence
  chemically synthesized
gagattatgctggctctgatta

SEQ ID NO: 45847 - DNA, 22 bp, Artificial Sequence
  chemically synthesized
agattatgctggctctgattag

SEQ ID NO: 45848 - DNA, 22 bp, Artificial Sequence
  chemically synthesized
tgctggctctgattagccaaaa

SEQ ID NO: 45849 - DNA, 22 bp, Artificial Sequence
  chemically synthesized
gctctgattagccaaaagaagg

SEQ ID NO: 45850 - DNA, 22 bp, Artificial Sequence
  chemically synthesized
tgattagccaaaagaaggaagt

SEQ ID NO: 45851 - DNA, 22 bp, Artificial Sequence
  chemically synthesized
attagccaaaagaaggaagtaa

SEQ ID NO: 45852 - DNA, 22 bp, Artificial Sequence
  chemically synthesized
gccaaaagaaggaagtaatata

SEQ ID NO: 45853 - DNA, 22 bp, Artificial Sequence
  chemically synthesized
tggttattatttcagatccttt

SEQ ID NO: 45854 - DNA, 22 bp, Artificial Sequence
  chemically synthesized
gttattatttcagatcctttag

SEQ ID NO: 45855 - DNA, 22 bp, Artificial Sequence
  chemically synthesized
ttatttcagatcctttagatta

SEQ ID NO: 45856 - DNA, 22 bp, Artificial Sequence
  chemically synthesized
tttcagatcctttagattactg

SEQ ID NO: 45857 - DNA, 22 bp, Artificial Sequence
  chemically synthesized
cagatcctttagattactgtaa

SEQ ID NO: 45858 - DNA, 22 bp, Artificial Sequence
  chemically synthesized
agatcctttagattactgtaat

SEQ ID NO: 45859 - DNA, 22 bp, Artificial Sequence
  chemically synthesized
tagattactgtaatagacatga

SEQ ID NO: 45860 - DNA, 22 bp, Artificial Sequence
  chemically synthesized
agattactgtaatagacatgaa

SEQ ID NO: 45861 - DNA, 22 bp, Artificial Sequence
  chemically synthesized
gattactgtaatagacatgaaa

SEQ ID NO: 45862 - DNA, 22 bp, Artificial Sequence
  chemically synthesized
ctgtaatagacatgaaatagta

SEQ ID NO: 45863 - DNA, 22 bp, Artificial Sequence
  chemically synthesized
taatagacatgaaatagtaaac

SEQ ID NO: 45864 - DNA, 22 bp, Artificial Sequence
  chemically synthesized
tatatcacaacacatgacataa

SEQ ID NO: 45865 - DNA, 22 bp, Artificial Sequence
  chemically synthesized
cagatcgtttaaatcacacaag

SEQ ID NO: 45866 - DNA, 22 bp, Artificial Sequence
  chemically synthesized
agatcgtttaaatcacacaagt

SEQ ID NO: 45867 - DNA, 22 bp, Artificial Sequence
  chemically synthesized
aaatcacacaagtcatcactgc

SEQ ID NO: 45868 - DNA, 22 bp, Artificial Sequence
  chemically synthesized
aatcacacaagtcatcactgcc

SEQ ID NO: 45869 - DNA, 22 bp, Artificial Sequence
  chemically synthesized
ccatttacccagcaatcagttg

SEQ ID NO: 45870 - DNA, 22 bp, Artificial Sequence
  chemically synthesized
acccagcaatcagttggcttga

SEQ ID NO: 45871 - DNA, 22 bp, Artificial Sequence
  chemically synthesized
cccagcaatcagttggcttgat

SEQ ID NO: 45872 - DNA, 22 bp, Artificial Sequence
  chemically synthesized
gcttgattcttcaagatcttga

SEQ ID NO: 45873 - DNA, 22 bp, Artificial Sequence
  chemically synthesized
gattcttcaagatcttgaggaa

SEQ ID NO: 45874 - DNA, 22 bp, Artificial Sequence
  chemically synthesized
attcttcaagatcttgaggaac

SEQ ID NO: 45875 - DNA, 22 bp, Artificial Sequence
  chemically synthesized
ttcaagatcttgaggaactcag

SEQ ID NO: 45876 - DNA, 22 bp, Artificial Sequence
  chemically synthesized
caagatcttgaggaactcagcc

SEQ ID NO: 45877 - DNA, 22 bp, Artificial Sequence
  chemically synthesized
aagatcttgaggaactcagcct

SEQ ID NO: 45878 - DNA, 22 bp, Artificial Sequence
  chemically synthesized
gaggaactcagccttcaaaacc

SEQ ID NO: 45879 - DNA, 22 bp, Artificial Sequence
  chemically synthesized
aggaactcagccttcaaaacca

SEQ ID NO: 45880 - DNA, 22 bp, Artificial Sequence
  chemically synthesized
agccttcaaaaccatgactttt

SEQ ID NO: 45881 - DNA, 22 bp, Artificial Sequence
  chemically synthesized
caaaaccatgactttttctttg

SEQ ID NO: 45882 - DNA, 22 bp, Artificial Sequence
  chemically synthesized
aaaaccatgactttttctttgc

SEQ ID NO: 45883 - DNA, 22 bp, Artificial Sequence
  chemically synthesized
tttctttgctaatgttccttca

SEQ ID NO: 45884 - DNA, 22 bp, Artificial Sequence
  chemically synthesized
ttctttgctaatgttccttcaa

SEQ ID NO: 45885 - DNA, 22 bp, Artificial Sequence
  chemically synthesized
tctttgctaatgttccttcaat

SEQ ID NO: 45886 - DNA, 22 bp, Artificial Sequence
  chemically synthesized
ctttgctaatgttccttcaata

SEQ ID NO: 45887 - DNA, 22 bp, Artificial Sequence
  chemically synthesized
tttgctaatgttccttcaatag

SEQ ID NO: 45888 - DNA, 22 bp, Artificial Sequence
  chemically synthesized
tgctaatgttccttcaatagtc

SEQ ID NO: 45889 - DNA, 22 bp, Artificial Sequence
  chemically synthesized
gctaatgttccttcaatagtct

SEQ ID NO: 45890 - DNA, 22 bp, Artificial Sequence
  chemically synthesized
ctaatgttccttcaatagtctt

SEQ ID NO: 45891 - DNA, 22 bp, Artificial Sequence
  chemically synthesized
atgttccttcaatagtcttgac

SEQ ID NO: 45892 - DNA, 22 bp, Artificial Sequence
  chemically synthesized
cttcaatagtcttgacactttt

SEQ ID NO: 45893 - DNA, 22 bp, Artificial Sequence
  chemically synthesized
caatagtcttgacacttttaaa

SEQ ID NO: 45894 - DNA, 22 bp, Artificial Sequence
  chemically synthesized
aatagtcttgacacttttaaac

SEQ ID NO: 45895 - DNA, 22 bp, Artificial Sequence
  chemically synthesized
gacacttttaaactagagagta

SEQ ID NO: 45896 - DNA, 22 bp, Artificial Sequence
  chemically synthesized
acacttttaaactagagagtat

SEQ ID NO: 45897 - DNA, 22 bp, Artificial Sequence
  chemically synthesized
ttaaactagagagtataaaccc

SEQ ID NO: 45898 - DNA, 22 bp, Artificial Sequence
  chemically synthesized
taaactagagagtataaaccca

SEQ ID NO: 45899 - DNA, 22 bp, Artificial Sequence
  chemically synthesized
aaactagagagtataaacccac

SEQ ID NO: 45900 - DNA, 22 bp, Artificial Sequence
  chemically synthesized
aactagagagtataaacccaca

SEQ ID NO: 45901 - DNA, 22 bp, Artificial Sequence
  chemically synthesized
gagagtataaacccacaaggaa

SEQ ID NO: 45902 - DNA, 22 bp, Artificial Sequence
  chemically synthesized
ttttataattttacagatgtct

SEQ ID NO: 45903 - DNA, 22 bp, Artificial Sequence
  chemically synthesized
tataattttacagatgtcttta

SEQ ID NO: 45904 - DNA, 22 bp, Artificial Sequence
  chemically synthesized
ataattttacagatgtctttat

SEQ ID NO: 45905 - DNA, 22 bp, Artificial Sequence
  chemically synthesized
taattttacagatgtctttatt

SEQ ID NO: 45906 - DNA, 22 bp, Artificial Sequence
  chemically synthesized
tacagatgtctttattttcaaa

SEQ ID NO: 45907 - DNA, 22 bp, Artificial Sequence
  chemically synthesized
acagatgtctttattttcaaaa

SEQ ID NO: 45908 - DNA, 22 bp, Artificial Sequence
  chemically synthesized
cagatgtctttattttcaaaat

SEQ ID NO: 45909 - DNA, 22 bp, Artificial Sequence
  chemically synthesized
tattttcaaaatcatttacatt

SEQ ID NO: 45910 - DNA, 22 bp, Artificial Sequence
  chemically synthesized
attttcaaaatcatttacattg

SEQ ID NO: 45911 - DNA, 22 bp, Artificial Sequence
  chemically synthesized
ttttcaaaatcatttacattgt

SEQ ID NO: 45912 - DNA, 22 bp, Artificial Sequence
  chemically synthesized
tcaaaatcatttacattgtggt

SEQ ID NO: 45913 - DNA, 22 bp, Artificial Sequence
  chemically synthesized
caaaatcatttacattgtggtt

SEQ ID NO: 45914 - DNA, 22 bp, Artificial Sequence
  chemically synthesized
aaaatcatttacattgtggttc

SEQ ID NO: 45915 - DNA, 22 bp, Artificial Sequence
  chemically synthesized
acattgtggttctctaccttgc

SEQ ID NO: 45916 - DNA, 22 bp, Artificial Sequence
  chemically synthesized
cattgtggttctctaccttgcc

SEQ ID NO: 45917 - DNA, 22 bp, Artificial Sequence
  chemically synthesized
tggttctctaccttgccttctc

SEQ ID NO: 45918 - DNA, 22 bp, Artificial Sequence
  chemically synthesized
tctaccttgccttctcttaccc

SEQ ID NO: 45919 - DNA, 22 bp, Artificial Sequence
  chemically synthesized
taccttgccttctcttacccag

SEQ ID NO: 45920 - DNA, 22 bp, Artificial Sequence
  chemically synthesized
ccttgccttctcttacccagca

SEQ ID NO: 45921 - DNA, 22 bp, Artificial Sequence
  chemically synthesized
gccttctcttacccagcacaga

SEQ ID NO: 45922 - DNA, 22 bp, Artificial Sequence
  chemically synthesized
ccttctcttacccagcacagat

SEQ ID NO: 45923 - DNA, 22 bp, Artificial Sequence
  chemically synthesized
ctcttacccagcacagatgagg

SEQ ID NO: 45924 - DNA, 22 bp, Artificial Sequence
  chemically synthesized
tcttacccagcacagatgaggt

SEQ ID NO: 45925 - DNA, 22 bp, Artificial Sequence
  chemically synthesized
ttacccagcacagatgaggtta

SEQ ID NO: 45926 - DNA, 22 bp, Artificial Sequence
  chemically synthesized
acccagcacagatgaggttata

SEQ ID NO: 45927 - DNA, 22 bp, Artificial Sequence
  chemically synthesized
cccagcacagatgaggttatac

SEQ ID NO: 45928 - DNA, 22 bp, Artificial Sequence
  chemically synthesized
tacctcactcgcaaattgtttt

SEQ ID NO: 45929 - DNA, 22 bp, Artificial Sequence
  chemically synthesized
actcgcaaattgttttatcaat

SEQ ID NO: 45930 - DNA, 22 bp, Artificial Sequence
  chemically synthesized
gcaaattgttttatcaatttga

SEQ ID NO: 45931 - DNA, 22 bp, Artificial Sequence
  chemically synthesized
ttttatcaatttgattttcttt

SEQ ID NO: 45932 - DNA, 22 bp, Artificial Sequence
  chemically synthesized
tatcaatttgattttctttatt

SEQ ID NO: 45933 - DNA, 22 bp, Artificial Sequence
  chemically synthesized
atcaatttgattttctttattt

SEQ ID NO: 45934 - DNA, 22 bp, Artificial Sequence
  chemically synthesized
tcaatttgattttctttatttt

SEQ ID NO: 45935 - DNA, 22 bp, Artificial Sequence
  chemically synthesized
gattttctttattttataattc

SEQ ID NO: 45936 - DNA, 22 bp, Artificial Sequence
  chemically synthesized
attttctttattttataattcc

SEQ ID NO: 45937 - DNA, 22 bp, Artificial Sequence
  chemically synthesized
tctttattttataattcctaca

SEQ ID NO: 45938 - DNA, 22 bp, Artificial Sequence
  chemically synthesized
ctttattttataattcctacat

SEQ ID NO: 45939 - DNA, 22 bp, Artificial Sequence
  chemically synthesized
tttattttataattcctacata

SEQ ID NO: 45940 - DNA, 22 bp, Artificial Sequence
  chemically synthesized
tattttataattcctacataag

SEQ ID NO: 45941 - DNA, 22 bp, Artificial Sequence
  chemically synthesized
attttataattcctacataagc

SEQ ID NO: 45942 - DNA, 22 bp, Artificial Sequence
  chemically synthesized
ttttataattcctacataagca

SEQ ID NO: 45943 - DNA, 22 bp, Artificial Sequence
  chemically synthesized
tataattcctacataagcatag

SEQ ID NO: 45944 - DNA, 22 bp, Artificial Sequence
  chemically synthesized
ataattcctacataagcatagc

SEQ ID NO: 45945 - DNA, 22 bp, Artificial Sequence
  chemically synthesized
taattcctacataagcatagca

SEQ ID NO: 45946 - DNA, 22 bp, Artificial Sequence
  chemically synthesized
ctacataagcatagcattgaag

SEQ ID NO: 45947 - DNA, 22 bp, Artificial Sequence
  chemically synthesized
cataagcatagcattgaagaaa

SEQ ID NO: 45948 - DNA, 22 bp, Artificial Sequence
  chemically synthesized
aagaaaaaaattactttcattc

SEQ ID NO: 45949 - DNA, 22 bp, Artificial Sequence
  chemically synthesized
ctttcattctgaaaggagcaca

SEQ ID NO: 45950 - DNA, 22 bp, Artificial Sequence
  chemically synthesized
tcattctgaaaggagcacagta

SEQ ID NO: 45951 - DNA, 22 bp, Artificial Sequence
  chemically synthesized
cattctgaaaggagcacagtat

SEQ ID NO: 45952 - DNA, 22 bp, Artificial Sequence
  chemically synthesized
attctgaaaggagcacagtatt

SEQ ID NO: 45953 - DNA, 22 bp, Artificial Sequence
  chemically synthesized
tgaaaggagcacagtattttgc

SEQ ID NO: 45954 - DNA, 22 bp, Artificial Sequence
  chemically synthesized
aaaggagcacagtattttgcct

SEQ ID NO: 45955 - DNA, 22 bp, Artificial Sequence
  chemically synthesized
tgccttttgagaagctcctgaa

SEQ ID NO: 45956 - DNA, 22 bp, Artificial Sequence
  chemically synthesized
gccttttgagaagctcctgaat

SEQ ID NO: 45957 - DNA, 22 bp, Artificial Sequence
  chemically synthesized
ccttttgagaagctcctgaatt

SEQ ID NO: 45958 - DNA, 22 bp, Artificial Sequence
  chemically synthesized
ttgagaagctcctgaattaaaa

SEQ ID NO: 45959 - DNA, 22 bp, Artificial Sequence
  chemically synthesized
tgagaagctcctgaattaaaac

SEQ ID NO: 45960 - DNA, 22 bp, Artificial Sequence
  chemically synthesized
gagaagctcctgaattaaaaca

SEQ ID NO: 45961 - DNA, 22 bp, Artificial Sequence
  chemically synthesized
agaagctcctgaattaaaacat

SEQ ID NO: 45962 - DNA, 22 bp, Artificial Sequence
  chemically synthesized
ctgaattaaaacattaattcca

SEQ ID NO: 45963 - DNA, 22 bp, Artificial Sequence
  chemically synthesized
aattaaaacattaattccaagc

SEQ ID NO: 45964 - DNA, 22 bp, Artificial Sequence
  chemically synthesized
aaacattaattccaagctaatt

SEQ ID NO: 45965 - DNA, 22 bp, Artificial Sequence
  chemically synthesized
attccaagctaattgtgaatat

SEQ ID NO: 45966 - DNA, 22 bp, Artificial Sequence
  chemically synthesized
caagctaattgtgaatatgaaa

SEQ ID NO: 45967 - DNA, 22 bp, Artificial Sequence
  chemically synthesized
attgtgaatatgaaacattctt

SEQ ID NO: 45968 - DNA, 22 bp, Artificial Sequence
  chemically synthesized
tgaatatgaaacattcttaagc

SEQ ID NO: 45969 - DNA, 22 bp, Artificial Sequence
  chemically synthesized
ttaagcatttcatataattact

SEQ ID NO: 45970 - DNA, 22 bp, Artificial Sequence
  chemically synthesized
aagcatttcatataattactaa

SEQ ID NO: 45971 - DNA, 22 bp, Artificial Sequence
  chemically synthesized
agcatttcatataattactaac

SEQ ID NO: 45972 - DNA, 22 bp, Artificial Sequence
  chemically synthesized
catataattactaacagaatgt

SEQ ID NO: 45973 - DNA, 22 bp, Artificial Sequence
  chemically synthesized
atataattactaacagaatgta

SEQ ID NO: 45974 - DNA, 22 bp, Artificial Sequence
  chemically synthesized
ctaacagaatgtagagttgagg

SEQ ID NO: 45975 - DNA, 22 bp, Artificial Sequence
  chemically synthesized
acagaatgtagagttgaggttt

SEQ ID NO: 45976 - DNA, 22 bp, Artificial Sequence
  chemically synthesized
aggtttccaactggttctaatc

SEQ ID NO: 45977 - DNA, 22 bp, Artificial Sequence
  chemically synthesized
ccaactggttctaatcacatat

SEQ ID NO: 45978 - DNA, 22 bp, Artificial Sequence
  chemically synthesized
caactggttctaatcacatata

SEQ ID NO: 45979 - DNA, 22 bp, Artificial Sequence
  chemically synthesized
gttctaatcacatatacatctt

SEQ ID NO: 45980 - DNA, 22 bp, Artificial Sequence
  chemically synthesized
taatcacatatacatcttccta

SEQ ID NO: 45981 - DNA, 22 bp, Artificial Sequence
  chemically synthesized
atcacatatacatcttcctaaa

SEQ ID NO: 45982 - DNA, 22 bp, Artificial Sequence
  chemically synthesized
cctaaaataaaatgtttaatta

SEQ ID NO: 45983 - DNA, 22 bp, Artificial Sequence
  chemically synthesized
ctaaaataaaatgtttaattat

SEQ ID NO: 45984 - DNA, 22 bp, Artificial Sequence
  chemically synthesized
aaataaaatgtttaattatact

SEQ ID NO: 45985 - DNA, 22 bp, Artificial Sequence
  chemically synthesized
aattatactattttgctgagaa

SEQ ID NO: 45986 - DNA, 22 bp, Artificial Sequence
  chemically synthesized
attatactattttgctgagaaa

SEQ ID NO: 45987 - DNA, 22 bp, Artificial Sequence
  chemically synthesized
tactattttgctgagaaaaatt

SEQ ID NO: 45988 - DNA, 22 bp, Artificial Sequence
  chemically synthesized
ttttgctgagaaaaattttaaa

SEQ ID NO: 45989 - DNA, 22 bp, Artificial Sequence
  chemically synthesized
tgctgagaaaaattttaaaaca

SEQ ID NO: 45990 - DNA, 22 bp, Artificial Sequence
  chemically synthesized
gctgagaaaaattttaaaacaa

SEQ ID NO: 45991 - DNA, 22 bp, Artificial Sequence
  chemically synthesized
ctgagaaaaattttaaaacaaa

SEQ ID NO: 45992 - DNA, 22 bp, Artificial Sequence
  chemically synthesized
agaaaaattttaaaacaaaaaa

SEQ ID NO: 45993 - DNA, 22 bp, Artificial Sequence
  chemically synthesized
taaaacaaaaaatgtaaatatt

SEQ ID NO: 45994 - DNA, 22 bp, Artificial Sequence
  chemically synthesized
aaaacaaaaaatgtaaatatta

SEQ ID NO: 45995 - DNA, 22 bp, Artificial Sequence
  chemically synthesized
aaacaaaaaatgtaaatattaa

SEQ ID NO: 45996 - DNA, 22 bp, Artificial Sequence
  chemically synthesized
actttttatttctatgttgtca

SEQ ID NO: 45997 - DNA, 22 bp, Artificial Sequence
  chemically synthesized
tttatttctatgttgtcataat

SEQ ID NO: 45998 - DNA, 22 bp, Artificial Sequence
  chemically synthesized
ttatttctatgttgtcataata

SEQ ID NO: 45999 - DNA, 22 bp, Artificial Sequence
  chemically synthesized
tatttctatgttgtcataatat

SEQ ID NO: 46000 - DNA, 22 bp, Artificial Sequence
  chemically synthesized
atttctatgttgtcataatatg

SEQ ID NO: 46001 - DNA, 22 bp, Artificial Sequence
  chemically synthesized
tttctatgttgtcataatatgg

SEQ ID NO: 46002 - DNA, 22 bp, Artificial Sequence
  chemically synthesized
ctatgttgtcataatatggatt

SEQ ID NO: 46003 - DNA, 22 bp, Artificial Sequence
  chemically synthesized
tatgttgtcataatatggattt

SEQ ID NO: 46004 - DNA, 22 bp, Artificial Sequence
  chemically synthesized
tgttgtcataatatggatttta

SEQ ID NO: 46005 - DNA, 22 bp, Artificial Sequence
  chemically synthesized
tcataatatggattttaaattt

SEQ ID NO: 46006 - DNA, 22 bp, Artificial Sequence
  chemically synthesized
taaattttaatttaaatgcaca

SEQ ID NO: 46007 - DNA, 22 bp, Artificial Sequence
  chemically synthesized
aaattttaatttaaatgcacat

SEQ ID NO: 46008 - DNA, 22 bp, Artificial Sequence
  chemically synthesized
aattttaatttaaatgcacatt

SEQ ID NO: 46009 - DNA, 22 bp, Artificial Sequence
  chemically synthesized
taatttaaatgcacattccatg

SEQ ID NO: 46010 - DNA, 22 bp, Artificial Sequence
  chemically synthesized
aatttaaatgcacattccatgg

SEQ ID NO: 46011 - DNA, 22 bp, Artificial Sequence
  chemically synthesized
atttaaatgcacattccatggc

SEQ ID NO: 46012 - DNA, 22 bp, Artificial Sequence
  chemically synthesized
aaatgcacattccatggcaatg

SEQ ID NO: 46013 - DNA, 22 bp, Artificial Sequence
  chemically synthesized
aatgcacattccatggcaatgg

SEQ ID NO: 46014 - DNA, 22 bp, Artificial Sequence
  chemically synthesized
catggcaatggctaatattttc

SEQ ID NO: 46015 - DNA, 22 bp, Artificial Sequence
  chemically synthesized
atattttcaactttctccctct

SEQ ID NO: 46016 - DNA, 22 bp, Artificial Sequence
  chemically synthesized
tcaactttctccctcttcaaca

SEQ ID NO: 46017 - DNA, 22 bp, Artificial Sequence
  chemically synthesized
caactttctccctcttcaacac

SEQ ID NO: 46018 - DNA, 22 bp, Artificial Sequence
  chemically synthesized
aactttctccctcttcaacaca

SEQ ID NO: 46019 - DNA, 22 bp, Artificial Sequence
  chemically synthesized
tctccctcttcaacacatacac

SEQ ID NO: 46020 - DNA, 22 bp, Artificial Sequence
  chemically synthesized
ctccctcttcaacacatacaca

SEQ ID NO: 46021 - DNA, 22 bp, Artificial Sequence
  chemically synthesized
tccctcttcaacacatacacaa

SEQ ID NO: 46022 - DNA, 22 bp, Artificial Sequence
  chemically synthesized
cctcttcaacacatacacaagt

SEQ ID NO: 46023 - DNA, 22 bp, Artificial Sequence
  chemically synthesized
ttcaacacatacacaagtctgt

SEQ ID NO: 46024 - DNA, 22 bp, Artificial Sequence
  chemically synthesized
caacacatacacaagtctgtat

SEQ ID NO: 46025 - DNA, 22 bp, Artificial Sequence
  chemically synthesized
aacacatacacaagtctgtatt

SEQ ID NO: 46026 - DNA, 22 bp, Artificial Sequence
  chemically synthesized
tattcatagcctgttgtaatag

SEQ ID NO: 46027 - DNA, 22 bp, Artificial Sequence
  chemically synthesized
atagcctgttgtaatagacaag

SEQ ID NO: 46028 - DNA, 22 bp, Artificial Sequence
  chemically synthesized
ttgtaatagacaaggttaaatg

SEQ ID NO: 46029 - DNA, 22 bp, Artificial Sequence
  chemically synthesized
taatagacaaggttaaatgtag

SEQ ID NO: 46030 - DNA, 22 bp, Artificial Sequence
  chemically synthesized
aatgtagcctaaatatatattc

SEQ ID NO: 46031 - DNA, 22 bp, Artificial Sequence
  chemically synthesized
aatatatattccgtttaaatgc

SEQ ID NO: 46032 - DNA, 22 bp, Artificial Sequence
  chemically synthesized
cgtttaaatgctttcctcactc

SEQ ID NO: 46033 - DNA, 22 bp, Artificial Sequence
  chemically synthesized
aaatgctttcctcactcactag

SEQ ID NO: 46034 - DNA, 22 bp, Artificial Sequence
  chemically synthesized
aatgctttcctcactcactagc

SEQ ID NO: 46035 - DNA, 22 bp, Artificial Sequence
  chemically synthesized
tcctcactcactagcaattggt

SEQ ID NO: 46036 - DNA, 22 bp, Artificial Sequence
  chemically synthesized
cctcactcactagcaattggtt

SEQ ID NO: 46037 - DNA, 22 bp, Artificial Sequence
  chemically synthesized
ctcactcactagcaattggtta

SEQ ID NO: 46038 - DNA, 22 bp, Artificial Sequence
  chemically synthesized
actcactagcaattggttatca

SEQ ID NO: 46039 - DNA, 22 bp, Artificial Sequence
  chemically synthesized
actagcaattggttatcactag

SEQ ID NO: 46040 - DNA, 22 bp, Artificial Sequence
  chemically synthesized
gcaattggttatcactagagag

SEQ ID NO: 46041 - DNA, 22 bp, Artificial Sequence
  chemically synthesized
gttatcactagagagttatctg

SEQ ID NO: 46042 - DNA, 22 bp, Artificial Sequence
  chemically synthesized
tcactagagagttatctgtgaa

SEQ ID NO: 46043 - DNA, 22 bp, Artificial Sequence
  chemically synthesized
gagagttatctgtgaaatctta

SEQ ID NO: 46044 - DNA, 22 bp, Artificial Sequence
  chemically synthesized
tctgtgaaatcttactctacat

SEQ ID NO: 46045 - DNA, 22 bp, Artificial Sequence
  chemically synthesized
tgaaatcttactctacattcct

SEQ ID NO: 46046 - DNA, 22 bp, Artificial Sequence
  chemically synthesized
actctacattcctcagtcacct

SEQ ID NO: 46047 - DNA, 22 bp, Artificial Sequence
  chemically synthesized
ctctacattcctcagtcaccta

SEQ ID NO: 46048 - DNA, 22 bp, Artificial Sequence
  chemically synthesized
tacattcctcagtcacctagtg

SEQ ID NO: 46049 - DNA, 22 bp, Artificial Sequence
  chemically synthesized
cattcctcagtcacctagtgaa

SEQ ID NO: 46050 - DNA, 22 bp, Artificial Sequence
  chemically synthesized
ctcagtcacctagtgaaggtgt

SEQ ID NO: 46051 - DNA, 22 bp, Artificial Sequence
  chemically synthesized
agtcacctagtgaaggtgtact

SEQ ID NO: 46052 - DNA, 22 bp, Artificial Sequence
  chemically synthesized
gtgaaggtgtactgatccacct

SEQ ID NO: 46053 - DNA, 22 bp, Artificial Sequence
  chemically synthesized
atccaccttcaggagcagtaca

SEQ ID NO: 46054 - DNA, 22 bp, Artificial Sequence
  chemically synthesized
caggagcagtacaaacctttat

SEQ ID NO: 46055 - DNA, 22 bp, Artificial Sequence
  chemically synthesized
aggagcagtacaaacctttatt

SEQ ID NO: 46056 - DNA, 22 bp, Artificial Sequence
  chemically synthesized
tattggtcacttcccaagcaac

SEQ ID NO: 46057 - DNA, 22 bp, Artificial Sequence
  chemically synthesized
attggtcacttcccaagcaact

SEQ ID NO: 46058 - DNA, 22 bp, Artificial Sequence
  chemically synthesized
ttggtcacttcccaagcaactt

SEQ ID NO: 46059 - DNA, 22 bp, Artificial Sequence
  chemically synthesized
gtcacttcccaagcaacttcaa

SEQ ID NO: 46060 - DNA, 22 bp, Artificial Sequence
  chemically synthesized
cccaagcaacttcaaagagcag

SEQ ID NO: 46061 - DNA, 22 bp, Artificial Sequence
  chemically synthesized
ccaagcaacttcaaagagcagt

SEQ ID NO: 46062 - DNA, 22 bp, Artificial Sequence
  chemically synthesized
caaagagcagtaactcctccac

SEQ ID NO: 46063 - DNA, 22 bp, Artificial Sequence
  chemically synthesized
aaagagcagtaactcctccaca

SEQ ID NO: 46064 - DNA, 22 bp, Artificial Sequence
  chemically synthesized
ctccacaggaagttcttcgact

SEQ ID NO: 46065 - DNA, 22 bp, Artificial Sequence
  chemically synthesized
cacaggaagttcttcgacttcc

SEQ ID NO: 46066 - DNA, 22 bp, Artificial Sequence
  chemically synthesized
ttcgacttcccactggggaagc

SEQ ID NO: 46067 - DNA, 22 bp, Artificial Sequence
  chemically synthesized
cgacttcccactggggaagccc

SEQ ID NO: 46068 - DNA, 22 bp, Artificial Sequence
  chemically synthesized
gacttcccactggggaagccca

SEQ ID NO: 46069 - DNA, 22 bp, Artificial Sequence
  chemically synthesized
cccactggggaagcccacccag

SEQ ID NO: 46070 - DNA, 22 bp, Artificial Sequence
  chemically synthesized
ccactggggaagcccacccagg

SEQ ID NO: 46071 - DNA, 22 bp, Artificial Sequence
  chemically synthesized
gggaagcccacccagggatgtt

SEQ ID NO: 46072 - DNA, 22 bp, Artificial Sequence
  chemically synthesized
cagagagggatcggcctcgaag

SEQ ID NO: 46073 - DNA, 22 bp, Artificial Sequence
  chemically synthesized
gaagcattcttcttacagtcct

SEQ ID NO: 46074 - DNA, 22 bp, Artificial Sequence
  chemically synthesized
ttcttacagtcctccgagactc

SEQ ID NO: 46075 - DNA, 22 bp, Artificial Sequence
  chemically synthesized
cttacagtcctccgagactcct

SEQ ID NO: 46076 - DNA, 22 bp, Artificial Sequence
  chemically synthesized
ttacagtcctccgagactcctt

SEQ ID NO: 46077 - DNA, 22 bp, Artificial Sequence
  chemically synthesized
acagtcctccgagactcctttg

SEQ ID NO: 46078 - DNA, 22 bp, Artificial Sequence
  chemically synthesized
cagtcctccgagactcctttga

SEQ ID NO: 46079 - DNA, 22 bp, Artificial Sequence
  chemically synthesized
cgagactcctttgaattcctgt

SEQ ID NO: 46080 - DNA, 22 bp, Artificial Sequence
  chemically synthesized
ctttgaattcctgtttcaatta

SEQ ID NO: 46081 - DNA, 22 bp, Artificial Sequence
  chemically synthesized
tgaattcctgtttcaattagtt

SEQ ID NO: 46082 - DNA, 22 bp, Artificial Sequence
  chemically synthesized
gaattcctgtttcaattagttg

SEQ ID NO: 46083 - DNA, 22 bp, Artificial Sequence
  chemically synthesized
aattcctgtttcaattagttgt

SEQ ID NO: 46084 - DNA, 22 bp, Artificial Sequence
  chemically synthesized
ctgtttcaattagttgtaatcc

SEQ ID NO: 46085 - DNA, 22 bp, Artificial Sequence
  chemically synthesized
tttcaattagttgtaatcccag

SEQ ID NO: 46086 - DNA, 22 bp, Artificial Sequence
  chemically synthesized
caattagttgtaatcccaggag

SEQ ID NO: 46087 - DNA, 22 bp, Artificial Sequence
  chemically synthesized
aattagttgtaatcccaggaga

SEQ ID NO: 46088 - DNA, 22 bp, Artificial Sequence
  chemically synthesized
gttgtaatcccaggagaagaga

SEQ ID NO: 46089 - DNA, 22 bp, Artificial Sequence
  chemically synthesized
taatcccaggagaagagaactt

SEQ ID NO: 46090 - DNA, 22 bp, Artificial Sequence
  chemically synthesized
acaggcacaaaagttagagttg

SEQ ID NO: 46091 - DNA, 22 bp, Artificial Sequence
  chemically synthesized
caggcacaaaagttagagttgg

SEQ ID NO: 46092 - DNA, 22 bp, Artificial Sequence
  chemically synthesized
gagttggtagagttaccaggct

SEQ ID NO: 46093 - DNA, 22 bp, Artificial Sequence
  chemically synthesized
gtagagttaccaggctttggta

SEQ ID NO: 46094 - DNA, 22 bp, Artificial Sequence
  chemically synthesized
ccaggctttggtagcttctctt

SEQ ID NO: 46095 - DNA, 22 bp, Artificial Sequence
  chemically synthesized
tggtagcttctcttgggaataa

SEQ ID NO: 46096 - DNA, 22 bp, Artificial Sequence
  chemically synthesized
ggtagcttctcttgggaataaa

SEQ ID NO: 46097 - DNA, 22 bp, Artificial Sequence
  chemically synthesized
gtagcttctcttgggaataaac

SEQ ID NO: 46098 - DNA, 22 bp, Artificial Sequence
  chemically synthesized
ctcttgggaataaactagtagc

SEQ ID NO: 46099 - DNA, 22 bp, Artificial Sequence
  chemically synthesized
tcttgggaataaactagtagca

SEQ ID NO: 46100 - DNA, 22 bp, Artificial Sequence
  chemically synthesized
ttgggaataaactagtagcatg

SEQ ID NO: 46101 - DNA, 22 bp, Artificial Sequence
  chemically synthesized
gggaataaactagtagcatgaa

SEQ ID NO: 46102 - DNA, 22 bp, Artificial Sequence
  chemically synthesized
ggaataaactagtagcatgaaa

SEQ ID NO: 46103 - DNA, 22 bp, Artificial Sequence
  chemically synthesized
gtagcatgaaatcttatgtgct

SEQ ID NO: 46104 - DNA, 22 bp, Artificial Sequence
  chemically synthesized
atgtgcttcccacagaattcct

SEQ ID NO: 46105 - DNA, 22 bp, Artificial Sequence
  chemically synthesized
tgtgcttcccacagaattcctg

SEQ ID NO: 46106 - DNA, 22 bp, Artificial Sequence
  chemically synthesized
cccacagaattcctggtggaag

SEQ ID NO: 46107 - DNA, 22 bp, Artificial Sequence
  chemically synthesized
ccacagaattcctggtggaagg

SEQ ID NO: 46108 - DNA, 22 bp, Artificial Sequence
  chemically synthesized
ctggtggaaggaggaattcttc

SEQ ID NO: 46109 - DNA, 22 bp, Artificial Sequence
  chemically synthesized
gtggaaggaggaattcttcctc

SEQ ID NO: 46110 - DNA, 22 bp, Artificial Sequence
  chemically synthesized
ttcctcctctttctcgtctttc

SEQ ID NO: 46111 - DNA, 22 bp, Artificial Sequence
  chemically synthesized
cctcctctttctcgtctttctg

SEQ ID NO: 46112 - DNA, 22 bp, Artificial Sequence
  chemically synthesized
ctcctctttctcgtctttctgg

SEQ ID NO: 46113 - DNA, 22 bp, Artificial Sequence
  chemically synthesized
ctctttctcgtctttctgggca

SEQ ID NO: 46114 - DNA, 22 bp, Artificial Sequence
  chemically synthesized
tttctcgtctttctgggcaggt

SEQ ID NO: 46115 - DNA, 22 bp, Artificial Sequence
  chemically synthesized
tctcgtctttctgggcaggtat

SEQ ID NO: 46116 - DNA, 22 bp, Artificial Sequence
  chemically synthesized
ctcgtctttctgggcaggtatt

SEQ ID NO: 46117 - DNA, 22 bp, Artificial Sequence
  chemically synthesized
tcgtctttctgggcaggtattg

SEQ ID NO: 46118 - DNA, 22 bp, Artificial Sequence
  chemically synthesized
gtctttctgggcaggtattgtg

SEQ ID NO: 46119 - DNA, 22 bp, Artificial Sequence
  chemically synthesized
tctgggcaggtattgtgaggac

SEQ ID NO: 46120 - DNA, 22 bp, Artificial Sequence
  chemically synthesized
ctgggcaggtattgtgaggacg

SEQ ID NO: 46121 - DNA, 22 bp, Artificial Sequence
  chemically synthesized
tgggcaggtattgtgaggacgg

SEQ ID NO: 46122 - DNA, 22 bp, Artificial Sequence
  chemically synthesized
ggcaggtattgtgaggacggta

SEQ ID NO: 46123 - DNA, 22 bp, Artificial Sequence
  chemically synthesized
tgaggacggtatctgccctgtc

SEQ ID NO: 46124 - DNA, 22 bp, Artificial Sequence
  chemically synthesized
acagggcagataccgtcctcac

SEQ ID NO: 46125 - DNA, 22 bp, Artificial Sequence
  chemically synthesized
acaatacctgcccagaaagacg

SEQ ID NO: 46126 - DNA, 22 bp, Artificial Sequence
  chemically synthesized
cccagaaagacgagaaagagga

SEQ ID NO: 46127 - DNA, 22 bp, Artificial Sequence
  chemically synthesized
ctccttccaccaggaattctgt

SEQ ID NO: 46128 - DNA, 22 bp, Artificial Sequence
  chemically synthesized
cttccaccaggaattctgtggg

SEQ ID NO: 46129 - DNA, 22 bp, Artificial Sequence
  chemically synthesized
ccaccaggaattctgtgggaag

SEQ ID NO: 46130 - DNA, 22 bp, Artificial Sequence
  chemically synthesized
caccaggaattctgtgggaagc

SEQ ID NO: 46131 - DNA, 22 bp, Artificial Sequence
  chemically synthesized
tgtgggaagcacataagatttc

SEQ ID NO: 46132 - DNA, 22 bp, Artificial Sequence
  chemically synthesized
tgggaagcacataagatttcat

SEQ ID NO: 46133 - DNA, 22 bp, Artificial Sequence
  chemically synthesized
catgctactagtttattcccaa

SEQ ID NO: 46134 - DNA, 22 bp, Artificial Sequence
  chemically synthesized
atgctactagtttattcccaag

SEQ ID NO: 46135 - DNA, 22 bp, Artificial Sequence
  chemically synthesized
ctagtttattcccaagagaagc

SEQ ID NO: 46136 - DNA, 22 bp, Artificial Sequence
  chemically synthesized
gtttattcccaagagaagctac

SEQ ID NO: 46137 - DNA, 22 bp, Artificial Sequence
  chemically synthesized
attcccaagagaagctaccaaa

SEQ ID NO: 46138 - DNA, 22 bp, Artificial Sequence
  chemically synthesized
ttcccaagagaagctaccaaag

SEQ ID NO: 46139 - DNA, 22 bp, Artificial Sequence
  chemically synthesized
ccaagagaagctaccaaagcct

SEQ ID NO: 46140 - DNA, 22 bp, Artificial Sequence
  chemically synthesized
ccaaagcctggtaactctacca

SEQ ID NO: 46141 - DNA, 22 bp, Artificial Sequence
  chemically synthesized
gtaactctaccaactctaactt

SEQ ID NO: 46142 - DNA, 22 bp, Artificial Sequence
  chemically synthesized
taccaactctaacttttgtgcc

SEQ ID NO: 46143 - DNA, 22 bp, Artificial Sequence
  chemically synthesized
ccaactctaacttttgtgcctg

SEQ ID NO: 46144 - DNA, 22 bp, Artificial Sequence
  chemically synthesized
taacttttgtgcctgtaagttc

SEQ ID NO: 46145 - DNA, 22 bp, Artificial Sequence
  chemically synthesized
acttttgtgcctgtaagttctc

SEQ ID NO: 46146 - DNA, 22 bp, Artificial Sequence
  chemically synthesized
ttgtgcctgtaagttctcttct

SEQ ID NO: 46147 - DNA, 22 bp, Artificial Sequence
  chemically synthesized
tgtgcctgtaagttctcttctc

SEQ ID NO: 46148 - DNA, 22 bp, Artificial Sequence
  chemically synthesized
gtgcctgtaagttctcttctcc

SEQ ID NO: 46149 - DNA, 22 bp, Artificial Sequence
  chemically synthesized
tgcctgtaagttctcttctcct

SEQ ID NO: 46150 - DNA, 22 bp, Artificial Sequence
  chemically synthesized
taagttctcttctcctgggatt

SEQ ID NO: 46151 - DNA, 22 bp, Artificial Sequence
  chemically synthesized
tcttctcctgggattacaacta

SEQ ID NO: 46152 - DNA, 22 bp, Artificial Sequence
  chemically synthesized
ttctcctgggattacaactaat

SEQ ID NO: 46153 - DNA, 22 bp, Artificial Sequence
  chemically synthesized
ctcctgggattacaactaattg

SEQ ID NO: 46154 - DNA, 22 bp, Artificial Sequence
  chemically synthesized
tcctgggattacaactaattga

SEQ ID NO: 46155 - DNA, 22 bp, Artificial Sequence
  chemically synthesized
ctgggattacaactaattgaaa

SEQ ID NO: 46156 - DNA, 22 bp, Artificial Sequence
  chemically synthesized
ggattacaactaattgaaacag

SEQ ID NO: 46157 - DNA, 22 bp, Artificial Sequence
  chemically synthesized
caactaattgaaacaggaattc

SEQ ID NO: 46158 - DNA, 22 bp, Artificial Sequence
  chemically synthesized
attgaaacaggaattcaaagga

SEQ ID NO: 46159 - DNA, 22 bp, Artificial Sequence
  chemically synthesized
aaacaggaattcaaaggagtct

SEQ ID NO: 46160 - DNA, 22 bp, Artificial Sequence
  chemically synthesized
aaaggagtctcggaggactgta

SEQ ID NO: 46161 - DNA, 22 bp, Artificial Sequence
  chemically synthesized
ggaggactgtaagaagaatgct

SEQ ID NO: 46162 - DNA, 22 bp, Artificial Sequence
  chemically synthesized
taagaagaatgcttcgaggccg

SEQ ID NO: 46163 - DNA, 22 bp, Artificial Sequence
  chemically synthesized
cgaggccgatccctctctgtaa

SEQ ID NO: 46164 - DNA, 22 bp, Artificial Sequence
  chemically synthesized
gaggccgatccctctctgtaac

SEQ ID NO: 46165 - DNA, 22 bp, Artificial Sequence
  chemically synthesized
tctgtaacatccctgggtgggc

SEQ ID NO: 46166 - DNA, 22 bp, Artificial Sequence
  chemically synthesized
tgtaacatccctgggtgggctt

SEQ ID NO: 46167 - DNA, 22 bp, Artificial Sequence
  chemically synthesized
taacatccctgggtgggcttcc

SEQ ID NO: 46168 - DNA, 22 bp, Artificial Sequence
  chemically synthesized
ggtgggcttccccagtgggaag

SEQ ID NO: 46169 - DNA, 22 bp, Artificial Sequence
  chemically synthesized
ccccagtgggaagtcgaagaac

SEQ ID NO: 46170 - DNA, 22 bp, Artificial Sequence
  chemically synthesized
cccagtgggaagtcgaagaact

SEQ ID NO: 46171 - DNA, 22 bp, Artificial Sequence
  chemically synthesized
cctgtggaggagttactgctct

SEQ ID NO: 46172 - DNA, 22 bp, Artificial Sequence
  chemically synthesized
ctgtggaggagttactgctctt

SEQ ID NO: 46173 - DNA, 22 bp, Artificial Sequence
  chemically synthesized
tggaggagttactgctctttga

SEQ ID NO: 46174 - DNA, 22 bp, Artificial Sequence
  chemically synthesized
ctgctctttgaagttgcttggg

SEQ ID NO: 46175 - DNA, 22 bp, Artificial Sequence
  chemically synthesized
ctctttgaagttgcttgggaag

SEQ ID NO: 46176 - DNA, 22 bp, Artificial Sequence
  chemically synthesized
tttgaagttgcttgggaagtga

SEQ ID NO: 46177 - DNA, 22 bp, Artificial Sequence
  chemically synthesized
tgaagttgcttgggaagtgacc

SEQ ID NO: 46178 - DNA, 22 bp, Artificial Sequence
  chemically synthesized
gaagttgcttgggaagtgacca

SEQ ID NO: 46179 - DNA, 22 bp, Artificial Sequence
  chemically synthesized
aagttgcttgggaagtgaccaa

SEQ ID NO: 46180 - DNA, 22 bp, Artificial Sequence
  chemically synthesized
cttgggaagtgaccaataaagg

SEQ ID NO: 46181 - DNA, 22 bp, Artificial Sequence
  chemically synthesized
gggaagtgaccaataaaggttt

SEQ ID NO: 46182 - DNA, 22 bp, Artificial Sequence
  chemically synthesized
ggaagtgaccaataaaggtttg

SEQ ID NO: 46183 - DNA, 22 bp, Artificial Sequence
  chemically synthesized
gtactgctcctgaaggtggatc

SEQ ID NO: 46184 - DNA, 22 bp, Artificial Sequence
  chemically synthesized
tactgctcctgaaggtggatca

SEQ ID NO: 46185 - DNA, 22 bp, Artificial Sequence
  chemically synthesized
ctcctgaaggtggatcagtaca

SEQ ID NO: 46186 - DNA, 22 bp, Artificial Sequence
  chemically synthesized
ctgaaggtggatcagtacacct

SEQ ID NO: 46187 - DNA, 22 bp, Artificial Sequence
  chemically synthesized
aaggtggatcagtacaccttca

SEQ ID NO: 46188 - DNA, 22 bp, Artificial Sequence
  chemically synthesized
cactaggtgactgaggaatgta

SEQ ID NO: 46189 - DNA, 22 bp, Artificial Sequence
  chemically synthesized
actaggtgactgaggaatgtag

SEQ ID NO: 46190 - DNA, 22 bp, Artificial Sequence
  chemically synthesized
ggtgactgaggaatgtagagta

SEQ ID NO: 46191 - DNA, 22 bp, Artificial Sequence
  chemically synthesized
aggaatgtagagtaagatttca

SEQ ID NO: 46192 - DNA, 22 bp, Artificial Sequence
  chemically synthesized
cacagataactctctagtgata

SEQ ID NO: 46193 - DNA, 22 bp, Artificial Sequence
  chemically synthesized
acagataactctctagtgataa

SEQ ID NO: 46194 - DNA, 22 bp, Artificial Sequence
  chemically synthesized
tctagtgataaccaattgctag

SEQ ID NO: 46195 - DNA, 22 bp, Artificial Sequence
  chemically synthesized
tagtgataaccaattgctagtg

SEQ ID NO: 46196 - DNA, 22 bp, Artificial Sequence
  chemically synthesized
gtgataaccaattgctagtgag

SEQ ID NO: 46197 - DNA, 22 bp, Artificial Sequence
  chemically synthesized
ctagtgagtgaggaaagcattt

SEQ ID NO: 46198 - DNA, 22 bp, Artificial Sequence
  chemically synthesized
gtgagtgaggaaagcatttaaa

SEQ ID NO: 46199 - DNA, 22 bp, Artificial Sequence
  chemically synthesized
aaacggaatatatatttaggct

SEQ ID NO: 46200 - DNA, 22 bp, Artificial Sequence
  chemically synthesized
aacggaatatatatttaggcta

SEQ ID NO: 46201 - DNA, 22 bp, Artificial Sequence
  chemically synthesized
aggctacatttaaccttgtcta

SEQ ID NO: 46202 - DNA, 22 bp, Artificial Sequence
  chemically synthesized
ggctacatttaaccttgtctat

SEQ ID NO: 46203 - DNA, 22 bp, Artificial Sequence
  chemically synthesized
catttaaccttgtctattacaa

SEQ ID NO: 46204 - DNA, 22 bp, Artificial Sequence
  chemically synthesized
aaccttgtctattacaacaggc

SEQ ID NO: 46205 - DNA, 22 bp, Artificial Sequence
  chemically synthesized
accttgtctattacaacaggct

SEQ ID NO: 46206 - DNA, 22 bp, Artificial Sequence
  chemically synthesized
gtctattacaacaggctatgaa

SEQ ID NO: 46207 - DNA, 22 bp, Artificial Sequence
  chemically synthesized
tctattacaacaggctatgaat

SEQ ID NO: 46208 - DNA, 22 bp, Artificial Sequence
  chemically synthesized
ttacaacaggctatgaatacag

SEQ ID NO: 46209 - DNA, 22 bp, Artificial Sequence
  chemically synthesized
caacaggctatgaatacagact

SEQ ID NO: 46210 - DNA, 22 bp, Artificial Sequence
  chemically synthesized
tgaatacagacttgtgtatgtg

SEQ ID NO: 46211 - DNA, 22 bp, Artificial Sequence
  chemically synthesized
gtgtatgtgttgaagagggaga

SEQ ID NO: 46212 - DNA, 22 bp, Artificial Sequence
  chemically synthesized
tgtatgtgttgaagagggagaa

SEQ ID NO: 46213 - DNA, 22 bp, Artificial Sequence
  chemically synthesized
aagagggagaaagttgaaaata

SEQ ID NO: 46214 - DNA, 22 bp, Artificial Sequence
  chemically synthesized
aaaatattagccattgccatgg

SEQ ID NO: 46215 - DNA, 22 bp, Artificial Sequence
  chemically synthesized
gccattgccatggaatgtgcat

SEQ ID NO: 46216 - DNA, 22 bp, Artificial Sequence
  chemically synthesized
ccatggaatgtgcatttaaatt

SEQ ID NO: 46217 - DNA, 22 bp, Artificial Sequence
  chemically synthesized
aaattaaaatttaaaatccata

SEQ ID NO: 46218 - DNA, 22 bp, Artificial Sequence
  chemically synthesized
aattaaaatttaaaatccatat

SEQ ID NO: 46219 - DNA, 22 bp, Artificial Sequence
  chemically synthesized
aaatttaaaatccatattatga

SEQ ID NO: 46220 - DNA, 22 bp, Artificial Sequence
  chemically synthesized
aaaatccatattatgacaacat

SEQ ID NO: 46221 - DNA, 22 bp, Artificial Sequence
  chemically synthesized
aaatccatattatgacaacata

SEQ ID NO: 46222 - DNA, 22 bp, Artificial Sequence
  chemically synthesized
tgacaacatagaaataaaaagt

SEQ ID NO: 46223 - DNA, 22 bp, Artificial Sequence
  chemically synthesized
atatttacattttttgttttaa

SEQ ID NO: 46224 - DNA, 22 bp, Artificial Sequence
  chemically synthesized
acattttttgttttaaaatttt

SEQ ID NO: 46225 - DNA, 22 bp, Artificial Sequence
  chemically synthesized
cattttttgttttaaaattttt

SEQ ID NO: 46226 - DNA, 22 bp, Artificial Sequence
  chemically synthesized
tttgttttaaaatttttctcag

SEQ ID NO: 46227 - DNA, 22 bp, Artificial Sequence
  chemically synthesized
ttgttttaaaatttttctcagc

SEQ ID NO: 46228 - DNA, 22 bp, Artificial Sequence
  chemically synthesized
tgttttaaaatttttctcagca

SEQ ID NO: 46229 - DNA, 22 bp, Artificial Sequence
  chemically synthesized
gttttaaaatttttctcagcaa

SEQ ID NO: 46230 - DNA, 22 bp, Artificial Sequence
  chemically synthesized
ttttaaaatttttctcagcaaa

SEQ ID NO: 46231 - DNA, 22 bp, Artificial Sequence
  chemically synthesized
taaaatttttctcagcaaaata

SEQ ID NO: 46232 - DNA, 22 bp, Artificial Sequence
  chemically synthesized
aaaatttttctcagcaaaatag

SEQ ID NO: 46233 - DNA, 22 bp, Artificial Sequence
  chemically synthesized
aaatttttctcagcaaaatagt

SEQ ID NO: 46234 - DNA, 22 bp, Artificial Sequence
  chemically synthesized
ttctcagcaaaatagtataatt

SEQ ID NO: 46235 - DNA, 22 bp, Artificial Sequence
  chemically synthesized
tctcagcaaaatagtataatta

SEQ ID NO: 46236 - DNA, 22 bp, Artificial Sequence
  chemically synthesized
ctcagcaaaatagtataattaa

SEQ ID NO: 46237 - DNA, 22 bp, Artificial Sequence
  chemically synthesized
tcagcaaaatagtataattaaa

SEQ ID NO: 46238 - DNA, 22 bp, Artificial Sequence
  chemically synthesized
agcaaaatagtataattaaaca

SEQ ID NO: 46239 - DNA, 22 bp, Artificial Sequence
  chemically synthesized
aacattttattttaggaagatg

SEQ ID NO: 46240 - DNA, 22 bp, Artificial Sequence
  chemically synthesized
tattttaggaagatgtatatgt

SEQ ID NO: 46241 - DNA, 22 bp, Artificial Sequence
  chemically synthesized
attttaggaagatgtatatgtg

SEQ ID NO: 46242 - DNA, 22 bp, Artificial Sequence
  chemically synthesized
ttttaggaagatgtatatgtga

SEQ ID NO: 46243 - DNA, 22 bp, Artificial Sequence
  chemically synthesized
taggaagatgtatatgtgatta

SEQ ID NO: 46244 - DNA, 22 bp, Artificial Sequence
  chemically synthesized
aggaagatgtatatgtgattag

SEQ ID NO: 46245 - DNA, 22 bp, Artificial Sequence
  chemically synthesized
ggaagatgtatatgtgattaga

SEQ ID NO: 46246 - DNA, 22 bp, Artificial Sequence
  chemically synthesized
gaaccagttggaaacctcaact

SEQ ID NO: 46247 - DNA, 22 bp, Artificial Sequence
  chemically synthesized
gaaacctcaactctacattctg

SEQ ID NO: 46248 - DNA, 22 bp, Artificial Sequence
  chemically synthesized
aactctacattctgttagtaat

SEQ ID NO: 46249 - DNA, 22 bp, Artificial Sequence
  chemically synthesized
tacattctgttagtaattatat

SEQ ID NO: 46250 - DNA, 22 bp, Artificial Sequence
  chemically synthesized
cattctgttagtaattatatga

SEQ ID NO: 46251 - DNA, 22 bp, Artificial Sequence
  chemically synthesized
tgttagtaattatatgaaatgc

SEQ ID NO: 46252 - DNA, 22 bp, Artificial Sequence
  chemically synthesized
ttagtaattatatgaaatgctt

SEQ ID NO: 46253 - DNA, 22 bp, Artificial Sequence
  chemically synthesized
gtaattatatgaaatgcttaag

SEQ ID NO: 46254 - DNA, 22 bp, Artificial Sequence
  chemically synthesized
tatgaaatgcttaagaatgttt

SEQ ID NO: 46255 - DNA, 22 bp, Artificial Sequence
  chemically synthesized
aagaatgtttcatattcacaat

SEQ ID NO: 46256 - DNA, 22 bp, Artificial Sequence
  chemically synthesized
agaatgtttcatattcacaatt

SEQ ID NO: 46257 - DNA, 22 bp, Artificial Sequence
  chemically synthesized
catattcacaattagcttggaa

SEQ ID NO: 46258 - DNA, 22 bp, Artificial Sequence
  chemically synthesized
atattcacaattagcttggaat

SEQ ID NO: 46259 - DNA, 22 bp, Artificial Sequence
  chemically synthesized
acaattagcttggaattaatgt

SEQ ID NO: 46260 - DNA, 22 bp, Artificial Sequence
  chemically synthesized
gcttggaattaatgttttaatt

SEQ ID NO: 46261 - DNA, 22 bp, Artificial Sequence
  chemically synthesized
ggaattaatgttttaattcagg

SEQ ID NO: 46262 - DNA, 22 bp, Artificial Sequence
  chemically synthesized
gaattaatgttttaattcagga

SEQ ID NO: 46263 - DNA, 22 bp, Artificial Sequence
  chemically synthesized
atgttttaattcaggagcttct

SEQ ID NO: 46264 - DNA, 22 bp, Artificial Sequence
  chemically synthesized
taattcaggagcttctcaaaag

SEQ ID NO: 46265 - DNA, 22 bp, Artificial Sequence
  chemically synthesized
aattcaggagcttctcaaaagg

SEQ ID NO: 46266 - DNA, 22 bp, Artificial Sequence
  chemically synthesized
attcaggagcttctcaaaaggc

SEQ ID NO: 46267 - DNA, 22 bp, Artificial Sequence
  chemically synthesized
aggagcttctcaaaaggcaaaa

SEQ ID NO: 46268 - DNA, 22 bp, Artificial Sequence
  chemically synthesized
ctcaaaaggcaaaatactgtgc

SEQ ID NO: 46269 - DNA, 22 bp, Artificial Sequence
  chemically synthesized
tcaaaaggcaaaatactgtgct

SEQ ID NO: 46270 - DNA, 22 bp, Artificial Sequence
  chemically synthesized
aaaaggcaaaatactgtgctcc

SEQ ID NO: 46271 - DNA, 22 bp, Artificial Sequence
  chemically synthesized
tgctcctttcagaatgaaagta

SEQ ID NO: 46272 - DNA, 22 bp, Artificial Sequence
  chemically synthesized
ctttcagaatgaaagtaatttt

SEQ ID NO: 46273 - DNA, 22 bp, Artificial Sequence
  chemically synthesized
tcagaatgaaagtaattttttt

SEQ ID NO: 46274 - DNA, 22 bp, Artificial Sequence
  chemically synthesized
cagaatgaaagtaatttttttc

SEQ ID NO: 46275 - DNA, 22 bp, Artificial Sequence
  chemically synthesized
agaatgaaagtaatttttttct

SEQ ID NO: 46276 - DNA, 22 bp, Artificial Sequence
  chemically synthesized
ttttcttcaatgctatgcttat

SEQ ID NO: 46277 - DNA, 22 bp, Artificial Sequence
  chemically synthesized
tttcttcaatgctatgcttatg

SEQ ID NO: 46278 - DNA, 22 bp, Artificial Sequence
  chemically synthesized
ttcttcaatgctatgcttatgt

SEQ ID NO: 46279 - DNA, 22 bp, Artificial Sequence
  chemically synthesized
tcttcaatgctatgcttatgta

SEQ ID NO: 46280 - DNA, 22 bp, Artificial Sequence
  chemically synthesized
cttcaatgctatgcttatgtag

SEQ ID NO: 46281 - DNA, 22 bp, Artificial Sequence
  chemically synthesized
ttcaatgctatgcttatgtagg

SEQ ID NO: 46282 - DNA, 22 bp, Artificial Sequence
  chemically synthesized
caatgctatgcttatgtaggaa

SEQ ID NO: 46283 - DNA, 22 bp, Artificial Sequence
  chemically synthesized
aatgctatgcttatgtaggaat

SEQ ID NO: 46284 - DNA, 22 bp, Artificial Sequence
  chemically synthesized
tgcttatgtaggaattataaaa

SEQ ID NO: 46285 - DNA, 22 bp, Artificial Sequence
  chemically synthesized
atgtaggaattataaaataaag

SEQ ID NO: 46286 - DNA, 22 bp, Artificial Sequence
  chemically synthesized
tgtaggaattataaaataaaga

SEQ ID NO: 46287 - DNA, 22 bp, Artificial Sequence
  chemically synthesized
taaaataaagaaaatcaaattg

SEQ ID NO: 46288 - DNA, 22 bp, Artificial Sequence
  chemically synthesized
ataaaacaatttgcgagtgagg

SEQ ID NO: 46289 - DNA, 22 bp, Artificial Sequence
  chemically synthesized
gcgagtgaggtataacctcatc

SEQ ID NO: 46290 - DNA, 22 bp, Artificial Sequence
  chemically synthesized
cgagtgaggtataacctcatct

SEQ ID NO: 46291 - DNA, 22 bp, Artificial Sequence
  chemically synthesized
atctgtgctgggtaagagaagg

SEQ ID NO: 46292 - DNA, 22 bp, Artificial Sequence
  chemically synthesized
tgctgggtaagagaaggcaagg

SEQ ID NO: 46293 - DNA, 22 bp, Artificial Sequence
  chemically synthesized
ggtaagagaaggcaaggtagag

SEQ ID NO: 46294 - DNA, 22 bp, Artificial Sequence
  chemically synthesized
tgaaaataaagacatctgtaaa

SEQ ID NO: 46295 - DNA, 22 bp, Artificial Sequence
  chemically synthesized
gaaaataaagacatctgtaaaa

SEQ ID NO: 46296 - DNA, 22 bp, Artificial Sequence
  chemically synthesized
aaaataaagacatctgtaaaat

SEQ ID NO: 46297 - DNA, 22 bp, Artificial Sequence
  chemically synthesized
taaaattataaaacaattcctt

SEQ ID NO: 46298 - DNA, 22 bp, Artificial Sequence
  chemically synthesized
taaaacaattccttgtgggttt

SEQ ID NO: 46299 - DNA, 22 bp, Artificial Sequence
  chemically synthesized
cttgtgggtttatactctctag

SEQ ID NO: 46300 - DNA, 22 bp, Artificial Sequence
  chemically synthesized
gtgggtttatactctctagttt

SEQ ID NO: 46301 - DNA, 22 bp, Artificial Sequence
  chemically synthesized
tgggtttatactctctagttta

SEQ ID NO: 46302 - DNA, 22 bp, Artificial Sequence
  chemically synthesized
atactctctagtttaaaagtgt

SEQ ID NO: 46303 - DNA, 22 bp, Artificial Sequence
  chemically synthesized
tactctctagtttaaaagtgtc

SEQ ID NO: 46304 - DNA, 22 bp, Artificial Sequence
  chemically synthesized
tctagtttaaaagtgtcaagac

SEQ ID NO: 46305 - DNA, 22 bp, Artificial Sequence
  chemically synthesized
tagtttaaaagtgtcaagacta

SEQ ID NO: 46306 - DNA, 22 bp, Artificial Sequence
  chemically synthesized
gtttaaaagtgtcaagactatt

SEQ ID NO: 46307 - DNA, 22 bp, Artificial Sequence
  chemically synthesized
aaaagtgtcaagactattgaag

SEQ ID NO: 46308 - DNA, 22 bp, Artificial Sequence
  chemically synthesized
aaagtgtcaagactattgaagg

SEQ ID NO: 46309 - DNA, 22 bp, Artificial Sequence
  chemically synthesized
ttgaaggaacattagcaaagaa

SEQ ID NO: 46310 - DNA, 22 bp, Artificial Sequence
  chemically synthesized
aaggaacattagcaaagaaaaa

SEQ ID NO: 46311 - DNA, 22 bp, Artificial Sequence
  chemically synthesized
gcaaagaaaaagtcatggtttt

SEQ ID NO: 46312 - DNA, 22 bp, Artificial Sequence
  chemically synthesized
tgaaggctgagttcctcaagat

SEQ ID NO: 46313 - DNA, 22 bp, Artificial Sequence
  chemically synthesized
gaaggctgagttcctcaagatc

SEQ ID NO: 46314 - DNA, 22 bp, Artificial Sequence
  chemically synthesized
aaggctgagttcctcaagatct

SEQ ID NO: 46315 - DNA, 22 bp, Artificial Sequence
  chemically synthesized
agttcctcaagatcttgaagaa

SEQ ID NO: 46316 - DNA, 22 bp, Artificial Sequence
  chemically synthesized
ctcaagatcttgaagaatcaag

SEQ ID NO: 46317 - DNA, 22 bp, Artificial Sequence
  chemically synthesized
aagatcttgaagaatcaagcca

SEQ ID NO: 46318 - DNA, 22 bp, Artificial Sequence
  chemically synthesized
gaagaatcaagccaactgattg

SEQ ID NO: 46319 - DNA, 22 bp, Artificial Sequence
  chemically synthesized
aagaatcaagccaactgattgc

SEQ ID NO: 46320 - DNA, 22 bp, Artificial Sequence
  chemically synthesized
attgctgggtaaatggcagtga

SEQ ID NO: 46321 - DNA, 22 bp, Artificial Sequence
  chemically synthesized
ctgggtaaatggcagtgatgac

SEQ ID NO: 46322 - DNA, 22 bp, Artificial Sequence
  chemically synthesized
ggtaaatggcagtgatgacttg

SEQ ID NO: 46323 - DNA, 22 bp, Artificial Sequence
  chemically synthesized
gtgtgatttaaacgatctgaaa

SEQ ID NO: 46324 - DNA, 22 bp, Artificial Sequence
  chemically synthesized
tgtgatttaaacgatctgaaat

SEQ ID NO: 46325 - DNA, 22 bp, Artificial Sequence
  chemically synthesized
aaacgatctgaaattatgtcat

SEQ ID NO: 46326 - DNA, 22 bp, Artificial Sequence
  chemically synthesized
aacgatctgaaattatgtcatg

SEQ ID NO: 46327 - DNA, 22 bp, Artificial Sequence
  chemically synthesized
aaattatgtcatgtgttgtgat

SEQ ID NO: 46328 - DNA, 22 bp, Artificial Sequence
  chemically synthesized
tgtcatgtgttgtgatatataa

SEQ ID NO: 46329 - DNA, 22 bp, Artificial Sequence
  chemically synthesized
tgatatataacacatttatttt

SEQ ID NO: 46330 - DNA, 22 bp, Artificial Sequence
  chemically synthesized
atttttcattttgtgtttacta

SEQ ID NO: 46331 - DNA, 22 bp, Artificial Sequence
  chemically synthesized
tttttcattttgtgtttactat

SEQ ID NO: 46332 - DNA, 22 bp, Artificial Sequence
  chemically synthesized
ttcattttgtgtttactatttc

SEQ ID NO: 46333 - DNA, 22 bp, Artificial Sequence
  chemically synthesized
tcattttgtgtttactatttca

SEQ ID NO: 46334 - DNA, 22 bp, Artificial Sequence
  chemically synthesized
cattttgtgtttactatttcat

SEQ ID NO: 46335 - DNA, 22 bp, Artificial Sequence
  chemically synthesized
attttgtgtttactatttcatg

SEQ ID NO: 46336 - DNA, 22 bp, Artificial Sequence
  chemically synthesized
tgtgtttactatttcatgtcta

SEQ ID NO: 46337 - DNA, 22 bp, Artificial Sequence
  chemically synthesized
gtgtttactatttcatgtctat

SEQ ID NO: 46338 - DNA, 22 bp, Artificial Sequence
  chemically synthesized
tgtttactatttcatgtctatt

SEQ ID NO: 46339 - DNA, 22 bp, Artificial Sequence
  chemically synthesized
actatttcatgtctattacagt

SEQ ID NO: 46340 - DNA, 22 bp, Artificial Sequence
  chemically synthesized
ctatttcatgtctattacagta

SEQ ID NO: 46341 - DNA, 22 bp, Artificial Sequence
  chemically synthesized
tttcatgtctattacagtaatc

SEQ ID NO: 46342 - DNA, 22 bp, Artificial Sequence
  chemically synthesized
catgtctattacagtaatctaa

SEQ ID NO: 46343 - DNA, 22 bp, Artificial Sequence
  chemically synthesized
atgtctattacagtaatctaaa

SEQ ID NO: 46344 - DNA, 22 bp, Artificial Sequence
  chemically synthesized
ttacagtaatctaaaggatctg

SEQ ID NO: 46345 - DNA, 22 bp, Artificial Sequence
  chemically synthesized
cagtaatctaaaggatctgaaa

SEQ ID NO: 46346 - DNA, 22 bp, Artificial Sequence
  chemically synthesized
aaggatctgaaataataaccag

SEQ ID NO: 46347 - DNA, 22 bp, Artificial Sequence
  chemically synthesized
aaataataaccagaatgtgata

SEQ ID NO: 46348 - DNA, 22 bp, Artificial Sequence
  chemically synthesized
cttccttcttttggctaatcag

SEQ ID NO: 46349 - DNA, 22 bp, Artificial Sequence
  chemically synthesized
ccttcttttggctaatcagagc

SEQ ID NO: 46350 - DNA, 22 bp, Artificial Sequence
  chemically synthesized
cttcttttggctaatcagagcc

SEQ ID NO: 46351 - DNA, 22 bp, Artificial Sequence
  chemically synthesized
cttttggctaatcagagccagc

SEQ ID NO: 46352 - DNA, 22 bp, Artificial Sequence
  chemically synthesized
ttttggctaatcagagccagca

SEQ ID NO: 46353 - DNA, 22 bp, Artificial Sequence
  chemically synthesized
ttggctaatcagagccagcata

SEQ ID NO: 46354 - DNA, 22 bp, Artificial Sequence
  chemically synthesized
tggctaatcagagccagcataa

SEQ ID NO: 46355 - DNA, 22 bp, Artificial Sequence
  chemically synthesized
ggctaatcagagccagcataat

SEQ ID NO: 46356 - DNA, 22 bp, Artificial Sequence
  chemically synthesized
gctaatcagagccagcataatc

SEQ ID NO: 46357 - DNA, 22 bp, Artificial Sequence
  chemically synthesized
atcagagccagcataatctcaa

SEQ ID NO: 46358 - DNA, 22 bp, Artificial Sequence
  chemically synthesized
aaaattaaatgcattatatatg

SEQ ID NO: 46359 - DNA, 22 bp, Artificial Sequence
  chemically synthesized
aatgcattatatatggcatgca

SEQ ID NO: 46360 - DNA, 22 bp, Artificial Sequence
  chemically synthesized
tatatggcatgcattctgaaaa

SEQ ID NO: 46361 - DNA, 22 bp, Artificial Sequence
  chemically synthesized
tgaaaaatcagaattcacctta

SEQ ID NO: 46362 - DNA, 22 bp, Artificial Sequence
  chemically synthesized
aaaaatcagaattcaccttata

SEQ ID NO: 46363 - DNA, 22 bp, Artificial Sequence
  chemically synthesized
accttatactaactgttcaaag

SEQ ID NO: 46364 - DNA, 22 bp, Artificial Sequence
  chemically synthesized
atactaactgttcaaagttctc

SEQ ID NO: 46365 - DNA, 22 bp, Artificial Sequence
  chemically synthesized
tactaactgttcaaagttctcg

SEQ ID NO: 46366 - DNA, 22 bp, Artificial Sequence
  chemically synthesized
actgttcaaagttctcgtgtgt

SEQ ID NO: 46367 - DNA, 22 bp, Artificial Sequence
  chemically synthesized
ttcaaagttctcgtgtgtatgc

SEQ ID NO: 46368 - DNA, 22 bp, Artificial Sequence
  chemically synthesized
aaagttctcgtgtgtatgcatt

SEQ ID NO: 46369 - DNA, 22 bp, Artificial Sequence
  chemically synthesized
tcgtgtgtatgcattcataaaa

SEQ ID NO: 46370 - DNA, 22 bp, Artificial Sequence
  chemically synthesized
gtgtgtatgcattcataaaatc

SEQ ID NO: 46371 - DNA, 22 bp, Artificial Sequence
  chemically synthesized
ataaaatcaaaattaaaagtca

SEQ ID NO: 46372 - DNA, 22 bp, Artificial Sequence
  chemically synthesized
aaagtcaattttgcctatgtag

SEQ ID NO: 46373 - DNA, 22 bp, Artificial Sequence
  chemically synthesized
tgcctatgtagaagtggacaga

SEQ ID NO: 46374 - DNA, 22 bp, Artificial Sequence
  chemically synthesized
gcctatgtagaagtggacagaa

SEQ ID NO: 46375 - DNA, 22 bp, Artificial Sequence
  chemically synthesized
cctatgtagaagtggacagaat

SEQ ID NO: 46376 - DNA, 22 bp, Artificial Sequence
  chemically synthesized
tgtagaagtggacagaatgcat

SEQ ID NO: 46377 - DNA, 22 bp, Artificial Sequence
  chemically synthesized
attctctgtagtttagtgagaa

SEQ ID NO: 46378 - DNA, 22 bp, Artificial Sequence
  chemically synthesized
ttctctgtagtttagtgagaaa

SEQ ID NO: 46379 - DNA, 22 bp, Artificial Sequence
  chemically synthesized
tctgtagtttagtgagaaagaa

SEQ ID NO: 46380 - DNA, 22 bp, Artificial Sequence
  chemically synthesized
tgtagtttagtgagaaagaatc

SEQ ID NO: 46381 - DNA, 22 bp, Artificial Sequence
  chemically synthesized
tagtttagtgagaaagaatcta

SEQ ID NO: 46382 - DNA, 22 bp, Artificial Sequence
  chemically synthesized
agtgagaaagaatctaggagga

SEQ ID NO: 46383 - DNA, 22 bp, Artificial Sequence
  chemically synthesized
gtgagaaagaatctaggaggac

SEQ ID NO: 46384 - DNA, 22 bp, Artificial Sequence
  chemically synthesized
ggaggacagaaaccttattaca

SEQ ID NO: 46385 - DNA, 22 bp, Artificial Sequence
  chemically synthesized
attacagagaagtgaagtattt

SEQ ID NO: 46386 - DNA, 22 bp, Artificial Sequence
  chemically synthesized
ttacagagaagtgaagtatttt

SEQ ID NO: 46387 - DNA, 22 bp, Artificial Sequence
  chemically synthesized
cagagaagtgaagtattttatg

SEQ ID NO: 46388 - DNA, 22 bp, Artificial Sequence
  chemically synthesized
tatgtgtacctgtttctgttgt

SEQ ID NO: 46389 - DNA, 22 bp, Artificial Sequence
  chemically synthesized
atgtgtacctgtttctgttgtt

SEQ ID NO: 46390 - DNA, 22 bp, Artificial Sequence
  chemically synthesized
tgtgtacctgtttctgttgttt

SEQ ID NO: 46391 - DNA, 22 bp, Artificial Sequence
  chemically synthesized
tttctgttgtttctttttaaat

SEQ ID NO: 46392 - DNA, 22 bp, Artificial Sequence
  chemically synthesized
ctgttgtttctttttaaattat

SEQ ID NO: 46393 - DNA, 22 bp, Artificial Sequence
  chemically synthesized
tgttgtttctttttaaattatt

SEQ ID NO: 46394 - DNA, 22 bp, Artificial Sequence
  chemically synthesized
ttgtttctttttaaattatttt

SEQ ID NO: 46395 - DNA, 22 bp, Artificial Sequence
  chemically synthesized
tttctttttaaattattttgta

SEQ ID NO: 46396 - DNA, 22 bp, Artificial Sequence
  chemically synthesized
ctttttaaattattttgtattc

SEQ ID NO: 46397 - DNA, 22 bp, Artificial Sequence
  chemically synthesized
tttttaaattattttgtattct

SEQ ID NO: 46398 - DNA, 22 bp, Artificial Sequence
  chemically synthesized
tttaaattattttgtattcttt

SEQ ID NO: 46399 - DNA, 22 bp, Artificial Sequence
  chemically synthesized
ttaaattattttgtattctttt

SEQ ID NO: 46400 - DNA, 22 bp, Artificial Sequence
  chemically synthesized
taaattattttgtattcttttc

SEQ ID NO: 46401 - DNA, 22 bp, Artificial Sequence
  chemically synthesized
aaattattttgtattcttttcc

SEQ ID NO: 46402 - DNA, 22 bp, Artificial Sequence
  chemically synthesized
aattattttgtattcttttcct

SEQ ID NO: 46403 - DNA, 22 bp, Artificial Sequence
  chemically synthesized
ttttgtattcttttcctcagag

SEQ ID NO: 46404 - DNA, 22 bp, Artificial Sequence
  chemically synthesized
tgtattcttttcctcagagatc

SEQ ID NO: 46405 - DNA, 22 bp, Artificial Sequence
  chemically synthesized
gtattcttttcctcagagatct

SEQ ID NO: 46406 - DNA, 22 bp, Artificial Sequence
  chemically synthesized
tattcttttcctcagagatctt

SEQ ID NO: 46407 - DNA, 22 bp, Artificial Sequence
  chemically synthesized
ttttcctcagagatctttatcc

SEQ ID NO: 46408 - DNA, 22 bp, Artificial Sequence
  chemically synthesized
ttcctcagagatctttatcctg

SEQ ID NO: 46409 - DNA, 22 bp, Artificial Sequence
  chemically synthesized
tcctcagagatctttatcctga

SEQ ID NO: 46410 - DNA, 22 bp, Artificial Sequence
  chemically synthesized
cctcagagatctttatcctgaa

SEQ ID NO: 46411 - DNA, 22 bp, Artificial Sequence
  chemically synthesized
ctcagagatctttatcctgaaa

SEQ ID NO: 46412 - DNA, 22 bp, Artificial Sequence
  chemically synthesized
agagatctttatcctgaaatga

SEQ ID NO: 46413 - DNA, 22 bp, Artificial Sequence
  chemically synthesized
tatcctgaaatgagcatgtgtt

SEQ ID NO: 46414 - DNA, 22 bp, Artificial Sequence
  chemically synthesized
atcctgaaatgagcatgtgttt

SEQ ID NO: 46415 - DNA, 22 bp, Artificial Sequence
  chemically synthesized
tcctgaaatgagcatgtgtttt

SEQ ID NO: 46416 - DNA, 22 bp, Artificial Sequence
  chemically synthesized
aaatgagcatgtgtttttaatg

SEQ ID NO: 46417 - DNA, 22 bp, Artificial Sequence
  chemically synthesized
ttaatgtcctttttctagtcac

SEQ ID NO: 46418 - DNA, 22 bp, Artificial Sequence
  chemically synthesized
taatgtcctttttctagtcaca

SEQ ID NO: 46419 - DNA, 22 bp, Artificial Sequence
  chemically synthesized
aatgtcctttttctagtcacaa

SEQ ID NO: 46420 - DNA, 22 bp, Artificial Sequence
  chemically synthesized
atgtcctttttctagtcacaaa

SEQ ID NO: 46421 - DNA, 22 bp, Artificial Sequence
  chemically synthesized
tttctagtcacaaatttttcca

SEQ ID NO: 46422 - DNA, 22 bp, Artificial Sequence
  chemically synthesized
ttctagtcacaaatttttccag

SEQ ID NO: 46423 - DNA, 22 bp, Artificial Sequence
  chemically synthesized
tctagtcacaaatttttccagt

SEQ ID NO: 46424 - DNA, 22 bp, Artificial Sequence
  chemically synthesized
ctagtcacaaatttttccagtc

SEQ ID NO: 46425 - DNA, 22 bp, Artificial Sequence
  chemically synthesized
tagtcacaaatttttccagtcc

SEQ ID NO: 46426 - DNA, 22 bp, Artificial Sequence
  chemically synthesized
gtcacaaatttttccagtccag

SEQ ID NO: 46427 - DNA, 22 bp, Artificial Sequence
  chemically synthesized
ttccagtccagtttttaaatat

SEQ ID NO: 46428 - DNA, 22 bp, Artificial Sequence
  chemically synthesized
tccagtccagtttttaaatatg

SEQ ID NO: 46429 - DNA, 22 bp, Artificial Sequence
  chemically synthesized
ccagtccagtttttaaatatgc

SEQ ID NO: 46430 - DNA, 22 bp, Artificial Sequence
  chemically synthesized
cagtccagtttttaaatatgcc

SEQ ID NO: 46431 - DNA, 22 bp, Artificial Sequence
  chemically synthesized
ttaaatatgcccaaagttcctg

SEQ ID NO: 46432 - DNA, 22 bp, Artificial Sequence
  chemically synthesized
taaatatgcccaaagttcctgg

SEQ ID NO: 46433 - DNA, 22 bp, Artificial Sequence
  chemically synthesized
aaatatgcccaaagttcctggg

SEQ ID NO: 46434 - DNA, 22 bp, Artificial Sequence
  chemically synthesized
aatatgcccaaagttcctggga

SEQ ID NO: 46435 - DNA, 22 bp, Artificial Sequence
  chemically synthesized
ctgggaacagaaccatctctat

SEQ ID NO: 46436 - DNA, 22 bp, Artificial Sequence
  chemically synthesized
ggaacagaaccatctctatcac

SEQ ID NO: 46437 - DNA, 22 bp, Artificial Sequence
  chemically synthesized
tatcacatgtgaatcccggagt

SEQ ID NO: 46438 - DNA, 22 bp, Artificial Sequence
  chemically synthesized
tcacatgtgaatcccggagtat

SEQ ID NO: 46439 - DNA, 22 bp, Artificial Sequence
  chemically synthesized
gaaataaaagttttctctagag

SEQ ID NO: 46440 - DNA, 22 bp, Artificial Sequence
  chemically synthesized
aaataaaagttttctctagaga

SEQ ID NO: 46441 - DNA, 22 bp, Artificial Sequence
  chemically synthesized
tctctagagagtgggcaggagc

SEQ ID NO: 46442 - DNA, 22 bp, Artificial Sequence
  chemically synthesized
ctctagagagtgggcaggagct

SEQ ID NO: 46443 - DNA, 22 bp, Artificial Sequence
  chemically synthesized
tctagagagtgggcaggagctc

SEQ ID NO: 46444 - DNA, 22 bp, Artificial Sequence
  chemically synthesized
tagagagtgggcaggagctcaa

SEQ ID NO: 46445 - DNA, 22 bp, Artificial Sequence
  chemically synthesized
gagagtgggcaggagctcaagg

SEQ ID NO: 46446 - DNA, 22 bp, Artificial Sequence
  chemically synthesized
aaggacatagcttattggtgga

SEQ ID NO: 46447 - DNA, 22 bp, Artificial Sequence
  chemically synthesized
attggtggataaaactggaagg

SEQ ID NO: 46448 - DNA, 22 bp, Artificial Sequence
  chemically synthesized
ttggtggataaaactggaaggg

SEQ ID NO: 46449 - DNA, 22 bp, Artificial Sequence
  chemically synthesized
gtggataaaactggaagggact

SEQ ID NO: 46450 - DNA, 22 bp, Artificial Sequence
  chemically synthesized
gaagggacttgttagcactggg

SEQ ID NO: 46451 - DNA, 22 bp, Artificial Sequence
  chemically synthesized
gttagcactgggaatcagtcca

SEQ ID NO: 46452 - DNA, 22 bp, Artificial Sequence
  chemically synthesized
ttagcactgggaatcagtccag

SEQ ID NO: 46453 - DNA, 22 bp, Artificial Sequence
  chemically synthesized
gcactgggaatcagtccagaag

SEQ ID NO: 46454 - DNA, 22 bp, Artificial Sequence
  chemically synthesized
ggaatcagtccagaagatctct

SEQ ID NO: 46455 - DNA, 22 bp, Artificial Sequence
  chemically synthesized
tgcacaagttcctgcacctgag

SEQ ID NO: 46456 - DNA, 22 bp, Artificial Sequence
  chemically synthesized
cacaagttcctgcacctgagca

SEQ ID NO: 46457 - DNA, 22 bp, Artificial Sequence
  chemically synthesized
ctgcacctgagcagagcccctt

SEQ ID NO: 46458 - DNA, 22 bp, Artificial Sequence
  chemically synthesized
cacctgagcagagccccttctg

SEQ ID NO: 46459 - DNA, 22 bp, Artificial Sequence
  chemically synthesized
agcagagccccttctgctttcc

SEQ ID NO: 46460 - DNA, 22 bp, Artificial Sequence
  chemically synthesized
ctgctttcctcttttctcatca

SEQ ID NO: 46461 - DNA, 22 bp, Artificial Sequence
  chemically synthesized
tgctttcctcttttctcatcat

SEQ ID NO: 46462 - DNA, 22 bp, Artificial Sequence
  chemically synthesized
ctttcctcttttctcatcattt

SEQ ID NO: 46463 - DNA, 22 bp, Artificial Sequence
  chemically synthesized
tcctcttttctcatcatttaac

SEQ ID NO: 46464 - DNA, 22 bp, Artificial Sequence
  chemically synthesized
cctcttttctcatcatttaaca

SEQ ID NO: 46465 - DNA, 22 bp, Artificial Sequence
  chemically synthesized
ctcttttctcatcatttaacaa

SEQ ID NO: 46466 - DNA, 22 bp, Artificial Sequence
  chemically synthesized
ttttctcatcatttaacaaaca

SEQ ID NO: 46467 - DNA, 22 bp, Artificial Sequence
  chemically synthesized
ttctcatcatttaacaaacatt

SEQ ID NO: 46468 - DNA, 22 bp, Artificial Sequence
  chemically synthesized
tctcatcatttaacaaacatta

SEQ ID NO: 46469 - DNA, 22 bp, Artificial Sequence
  chemically synthesized
ctcatcatttaacaaacattaa

SEQ ID NO: 46470 - DNA, 22 bp, Artificial Sequence
  chemically synthesized
tcatcatttaacaaacattaat

SEQ ID NO: 46471 - DNA, 22 bp, Artificial Sequence
  chemically synthesized
atcatttaacaaacattaatgg

SEQ ID NO: 46472 - DNA, 22 bp, Artificial Sequence
  chemically synthesized
aacaaacattaatggagcactg

SEQ ID NO: 46473 - DNA, 22 bp, Artificial Sequence
  chemically synthesized
acaaacattaatggagcactgt

SEQ ID NO: 46474 - DNA, 22 bp, Artificial Sequence
  chemically synthesized
atggagcactgttacctgggca

SEQ ID NO: 46475 - DNA, 22 bp, Artificial Sequence
  chemically synthesized
ttacctgggcactgggaacacg

SEQ ID NO: 46476 - DNA, 22 bp, Artificial Sequence
  chemically synthesized
cctgggcactgggaacacgcca

SEQ ID NO: 46477 - DNA, 22 bp, Artificial Sequence
  chemically synthesized
ggcactgggaacacgccagtga

SEQ ID NO: 46478 - DNA, 22 bp, Artificial Sequence
  chemically synthesized
ggaacacgccagtgaaactaag

SEQ ID NO: 46479 - DNA, 22 bp, Artificial Sequence
  chemically synthesized
agttattttatggatcttataa

SEQ ID NO: 46480 - DNA, 22 bp, Artificial Sequence
  chemically synthesized
ttttatggatcttataatcagt

SEQ ID NO: 46481 - DNA, 22 bp, Artificial Sequence
  chemically synthesized
tatggatcttataatcagtagc

SEQ ID NO: 46482 - DNA, 22 bp, Artificial Sequence
  chemically synthesized
atggatcttataatcagtagca

SEQ ID NO: 46483 - DNA, 22 bp, Artificial Sequence
  chemically synthesized
tggatcttataatcagtagcat

SEQ ID NO: 46484 - DNA, 22 bp, Artificial Sequence
  chemically synthesized
ataatcagtagcatgtgtgttg

SEQ ID NO: 46485 - DNA, 22 bp, Artificial Sequence
  chemically synthesized
taatcagtagcatgtgtgttga

SEQ ID NO: 46486 - DNA, 22 bp, Artificial Sequence
  chemically synthesized
atctcagggtctagaacagtgc

SEQ ID NO: 46487 - DNA, 22 bp, Artificial Sequence
  chemically synthesized
agggtctagaacagtgcctggt

SEQ ID NO: 46488 - DNA, 22 bp, Artificial Sequence
  chemically synthesized
gaacagtgcctggtacatagaa

SEQ ID NO: 46489 - DNA, 22 bp, Artificial Sequence
  chemically synthesized
gtacatagaaaatgctcaatgg

SEQ ID NO: 46490 - DNA, 22 bp, Artificial Sequence
  chemically synthesized
aatggatttttttttgaaaaaa

SEQ ID NO: 46491 - DNA, 22 bp, Artificial Sequence
  chemically synthesized
ttttttgaaaaaatttgttttt

SEQ ID NO: 46492 - DNA, 22 bp, Artificial Sequence
  chemically synthesized
tttttgaaaaaatttgtttttc

SEQ ID NO: 46493 - DNA, 22 bp, Artificial Sequence
  chemically synthesized
ttttgaaaaaatttgtttttca

SEQ ID NO: 46494 - DNA, 22 bp, Artificial Sequence
  chemically synthesized
tttgaaaaaatttgtttttcaa

SEQ ID NO: 46495 - DNA, 22 bp, Artificial Sequence
  chemically synthesized
ttgaaaaaatttgtttttcaac

SEQ ID NO: 46496 - DNA, 22 bp, Artificial Sequence
  chemically synthesized
tgaaaaaatttgtttttcaacc

SEQ ID NO: 46497 - DNA, 22 bp, Artificial Sequence
  chemically synthesized
gaaaaaatttgtttttcaaccc

SEQ ID NO: 46498 - DNA, 22 bp, Artificial Sequence
  chemically synthesized
aaaaaatttgtttttcaacccc

SEQ ID NO: 46499 - DNA, 22 bp, Artificial Sequence
  chemically synthesized
gtttttcaacccctaagctgcc

SEQ ID NO: 46500 - DNA, 22 bp, Artificial Sequence
  chemically synthesized
tttttcaacccctaagctgcct

SEQ ID NO: 46501 - DNA, 22 bp, Artificial Sequence
  chemically synthesized
ttcaacccctaagctgccttta

SEQ ID NO: 46502 - DNA, 22 bp, Artificial Sequence
  chemically synthesized
tcaacccctaagctgcctttaa

SEQ ID NO: 46503 - DNA, 22 bp, Artificial Sequence
  chemically synthesized
caacccctaagctgcctttaat

SEQ ID NO: 46504 - DNA, 22 bp, Artificial Sequence
  chemically synthesized
aacccctaagctgcctttaata

SEQ ID NO: 46505 - DNA, 22 bp, Artificial Sequence
  chemically synthesized
agctgcctttaatacttatttt

SEQ ID NO: 46506 - DNA, 22 bp, Artificial Sequence
  chemically synthesized
cctttaatacttattttctatc

SEQ ID NO: 46507 - DNA, 22 bp, Artificial Sequence
  chemically synthesized
taatacttattttctatcattt

SEQ ID NO: 46508 - DNA, 22 bp, Artificial Sequence
  chemically synthesized
aatacttattttctatcatttc

SEQ ID NO: 46509 - DNA, 22 bp, Artificial Sequence
  chemically synthesized
atacttattttctatcatttcc

SEQ ID NO: 46510 - DNA, 22 bp, Artificial Sequence
  chemically synthesized
attttctatcatttccctttca

SEQ ID NO: 46511 - DNA, 22 bp, Artificial Sequence
  chemically synthesized
ttttctatcatttccctttcaa

SEQ ID NO: 46512 - DNA, 22 bp, Artificial Sequence
  chemically synthesized
tctatcatttccctttcaaggg

SEQ ID NO: 46513 - DNA, 22 bp, Artificial Sequence
  chemically synthesized
ctatcatttccctttcaagggg

SEQ ID NO: 46514 - DNA, 22 bp, Artificial Sequence
  chemically synthesized
tatcatttccctttcaagggga

SEQ ID NO: 46515 - DNA, 22 bp, Artificial Sequence
  chemically synthesized
tcatttccctttcaaggggaag

SEQ ID NO: 46516 - DNA, 22 bp, Artificial Sequence
  chemically synthesized
ccctttcaaggggaagggaagt

SEQ ID NO: 46517 - DNA, 22 bp, Artificial Sequence
  chemically synthesized
cctttcaaggggaagggaagtg

SEQ ID NO: 46518 - DNA, 22 bp, Artificial Sequence
  chemically synthesized
tcaaggggaagggaagtgtttt

SEQ ID NO: 46519 - DNA, 22 bp, Artificial Sequence
  chemically synthesized
caaggggaagggaagtgttttt

SEQ ID NO: 46520 - DNA, 22 bp, Artificial Sequence
  chemically synthesized
aaggggaagggaagtgtttttg

SEQ ID NO: 46521 - DNA, 22 bp, Artificial Sequence
  chemically synthesized
ttgtggagaggtccccacaatg

SEQ ID NO: 46522 - DNA, 22 bp, Artificial Sequence
  chemically synthesized
tgtggagaggtccccacaatgt

SEQ ID NO: 46523 - DNA, 22 bp, Artificial Sequence
  chemically synthesized
gtggagaggtccccacaatgtg

SEQ ID NO: 46524 - DNA, 22 bp, Artificial Sequence
  chemically synthesized
tggagaggtccccacaatgtga

SEQ ID NO: 46525 - DNA, 22 bp, Artificial Sequence
  chemically synthesized
acacaagttgatatcatcttca

SEQ ID NO: 46526 - DNA, 22 bp, Artificial Sequence
  chemically synthesized
cacaagttgatatcatcttcaa

SEQ ID NO: 46527 - DNA, 22 bp, Artificial Sequence
  chemically synthesized
atatcatcttcaatgtatcttt

SEQ ID NO: 46528 - DNA, 22 bp, Artificial Sequence
  chemically synthesized
caatgtatctttattttaatat

SEQ ID NO: 46529 - DNA, 22 bp, Artificial Sequence
  chemically synthesized
aatgtatctttattttaatatt

SEQ ID NO: 46530 - DNA, 22 bp, Artificial Sequence
  chemically synthesized
tattttaatattatcatagcct

SEQ ID NO: 46531 - DNA, 22 bp, Artificial Sequence
  chemically synthesized
attttaatattatcatagcctg

SEQ ID NO: 46532 - DNA, 22 bp, Artificial Sequence
  chemically synthesized
ttttaatattatcatagcctgg

SEQ ID NO: 46533 - DNA, 22 bp, Artificial Sequence
  chemically synthesized
taatattatcatagcctggtat

SEQ ID NO: 46534 - DNA, 22 bp, Artificial Sequence
  chemically synthesized
aatattatcatagcctggtatg

SEQ ID NO: 46535 - DNA, 22 bp, Artificial Sequence
  chemically synthesized
atattatcatagcctggtatgg

SEQ ID NO: 46536 - DNA, 22 bp, Artificial Sequence
  chemically synthesized
tcatagcctggtatggtttgag

SEQ ID NO: 46537 - DNA, 22 bp, Artificial Sequence
  chemically synthesized
gtatggtttgagattttcatat

SEQ ID NO: 46538 - DNA, 22 bp, Artificial Sequence
  chemically synthesized
gagattttcatatagatggata

SEQ ID NO: 46539 - DNA, 22 bp, Artificial Sequence
  chemically synthesized
agattttcatatagatggataa

SEQ ID NO: 46540 - DNA, 22 bp, Artificial Sequence
  chemically synthesized
tcatatagatggataattattg

SEQ ID NO: 46541 - DNA, 22 bp, Artificial Sequence
  chemically synthesized
catatagatggataattattgt

SEQ ID NO: 46542 - DNA, 22 bp, Artificial Sequence
  chemically synthesized
atatagatggataattattgtg

SEQ ID NO: 46543 - DNA, 22 bp, Artificial Sequence
  chemically synthesized
ttgtgtttattcctaataatac

SEQ ID NO: 46544 - DNA, 22 bp, Artificial Sequence
  chemically synthesized
tgtttattcctaataatacatt

SEQ ID NO: 46545 - DNA, 22 bp, Artificial Sequence
  chemically synthesized
attcctaataatacattgccac

SEQ ID NO: 46546 - DNA, 22 bp, Artificial Sequence
  chemically synthesized
ttcctaataatacattgccact

SEQ ID NO: 46547 - DNA, 22 bp, Artificial Sequence
  chemically synthesized
ctaataatacattgccactata

SEQ ID NO: 46548 - DNA, 22 bp, Artificial Sequence
  chemically synthesized
ataatacattgccactatagtt

SEQ ID NO: 46549 - DNA, 22 bp, Artificial Sequence
  chemically synthesized
ccactatagtttctttaaattt

SEQ ID NO: 46550 - DNA, 22 bp, Artificial Sequence
  chemically synthesized
tagtttctttaaatttaatgat

SEQ ID NO: 46551 - DNA, 22 bp, Artificial Sequence
  chemically synthesized
ctttaaatttaatgatttgaat

SEQ ID NO: 46552 - DNA, 22 bp, Artificial Sequence
  chemically synthesized
tttaaatttaatgatttgaatt

SEQ ID NO: 46553 - DNA, 22 bp, Artificial Sequence
  chemically synthesized
taaatttaatgatttgaatttt

SEQ ID NO: 46554 - DNA, 22 bp, Artificial Sequence
  chemically synthesized
aaatttaatgatttgaattttt

SEQ ID NO: 46555 - DNA, 22 bp, Artificial Sequence
  chemically synthesized
aatttaatgatttgaattttta

SEQ ID NO: 46556 - DNA, 22 bp, Artificial Sequence
  chemically synthesized
aatgatttgaatttttacttcc

SEQ ID NO: 46557 - DNA, 22 bp, Artificial Sequence
  chemically synthesized
atgatttgaatttttacttccc

SEQ ID NO: 46558 - DNA, 22 bp, Artificial Sequence
  chemically synthesized
gaatttttacttccctgcattt

SEQ ID NO: 46559 - DNA, 22 bp, Artificial Sequence
  chemically synthesized
aatttttacttccctgcatttc

SEQ ID NO: 46560 - DNA, 22 bp, Artificial Sequence
  chemically synthesized
ttacttccctgcatttcatagt

SEQ ID NO: 46561 - DNA, 22 bp, Artificial Sequence
  chemically synthesized
tacttccctgcatttcatagta

SEQ ID NO: 46562 - DNA, 22 bp, Artificial Sequence
  chemically synthesized
acttccctgcatttcatagtag

SEQ ID NO: 46563 - DNA, 22 bp, Artificial Sequence
  chemically synthesized
cttccctgcatttcatagtagt

SEQ ID NO: 46564 - DNA, 22 bp, Artificial Sequence
  chemically synthesized
ccctgcatttcatagtagtgat

SEQ ID NO: 46565 - DNA, 22 bp, Artificial Sequence
  chemically synthesized
cctgcatttcatagtagtgata

SEQ ID NO: 46566 - DNA, 22 bp, Artificial Sequence
  chemically synthesized
catttcatagtagtgatatgag

SEQ ID NO: 46567 - DNA, 22 bp, Artificial Sequence
  chemically synthesized
catagtagtgatatgaggtatc

SEQ ID NO: 46568 - DNA, 22 bp, Artificial Sequence
  chemically synthesized
atagtagtgatatgaggtatct

SEQ ID NO: 46569 - DNA, 22 bp, Artificial Sequence
  chemically synthesized
agagatcatgaatcccactcct

SEQ ID NO: 46570 - DNA, 22 bp, Artificial Sequence
  chemically synthesized
gagatcatgaatcccactcctc

SEQ ID NO: 46571 - DNA, 22 bp, Artificial Sequence
  chemically synthesized
ctccagttcatagagcaaattg

SEQ ID NO: 46572 - DNA, 22 bp, Artificial Sequence
  chemically synthesized
cagttcatagagcaaattgatt

SEQ ID NO: 46573 - DNA, 22 bp, Artificial Sequence
  chemically synthesized
atagagcaaattgattcgtaga

SEQ ID NO: 46574 - DNA, 22 bp, Artificial Sequence
  chemically synthesized
attcgtagaggtatttaatgat

SEQ ID NO: 46575 - DNA, 22 bp, Artificial Sequence
  chemically synthesized
gtagaggtatttaatgatcaag

SEQ ID NO: 46576 - DNA, 22 bp, Artificial Sequence
  chemically synthesized
aatgatcaagcaaatggcagag

SEQ ID NO: 46577 - DNA, 22 bp, Artificial Sequence
  chemically synthesized
atgatcaagcaaatggcagagt

SEQ ID NO: 46578 - DNA, 22 bp, Artificial Sequence
  chemically synthesized
ggaccaggatttaggtcttttc

SEQ ID NO: 46579 - DNA, 22 bp, Artificial Sequence
  chemically synthesized
aggtcttttccaaggccaattc

SEQ ID NO: 46580 - DNA, 22 bp, Artificial Sequence
  chemically synthesized
ggtcttttccaaggccaattca

SEQ ID NO: 46581 - DNA, 22 bp, Artificial Sequence
  chemically synthesized
ttccaaggccaattcacttttt

SEQ ID NO: 46582 - DNA, 22 bp, Artificial Sequence
  chemically synthesized
tccaaggccaattcactttttt

SEQ ID NO: 46583 - DNA, 22 bp, Artificial Sequence
  chemically synthesized
ccaaggccaattcactttttta

SEQ ID NO: 46584 - DNA, 22 bp, Artificial Sequence
  chemically synthesized
caaggccaattcacttttttac

SEQ ID NO: 46585 - DNA, 22 bp, Artificial Sequence
  chemically synthesized
acttttttactattatgtaaga

SEQ ID NO: 46586 - DNA, 22 bp, Artificial Sequence
  chemically synthesized
ttttactattatgtaagaatta

SEQ ID NO: 46587 - DNA, 22 bp, Artificial Sequence
  chemically synthesized
tttactattatgtaagaattaa

SEQ ID NO: 46588 - DNA, 22 bp, Artificial Sequence
  chemically synthesized
ttactattatgtaagaattaaa

SEQ ID NO: 46589 - DNA, 22 bp, Artificial Sequence
  chemically synthesized
tactattatgtaagaattaaat

SEQ ID NO: 46590 - DNA, 22 bp, Artificial Sequence
  chemically synthesized
actattatgtaagaattaaata

SEQ ID NO: 46591 - DNA, 22 bp, Artificial Sequence
  chemically synthesized
ctattatgtaagaattaaatat

SEQ ID NO: 46592 - DNA, 22 bp, Artificial Sequence
  chemically synthesized
ttatgtaagaattaaatattaa

SEQ ID NO: 46593 - DNA, 22 bp, Artificial Sequence
  chemically synthesized
tgtaagaattaaatattaaaac

SEQ ID NO: 46594 - DNA, 22 bp, Artificial Sequence
  chemically synthesized
aatattaaaacctcagttttca

SEQ ID NO: 46595 - DNA, 22 bp, Artificial Sequence
  chemically synthesized
aaacctcagttttcaaaggaaa

SEQ ID NO: 46596 - DNA, 22 bp, Artificial Sequence
  chemically synthesized
agttttcaaaggaaatgtccta

SEQ ID NO: 46597 - DNA, 22 bp, Artificial Sequence
  chemically synthesized
tcaaaggaaatgtcctatagat

SEQ ID NO: 46598 - DNA, 22 bp, Artificial Sequence
  chemically synthesized
caaaggaaatgtcctatagatg

SEQ ID NO: 46599 - DNA, 22 bp, Artificial Sequence
  chemically synthesized
aaaggaaatgtcctatagatga

SEQ ID NO: 46600 - DNA, 22 bp, Artificial Sequence
  chemically synthesized
tagatgaaagaacacagtactt

SEQ ID NO: 46601 - DNA, 22 bp, Artificial Sequence
  chemically synthesized
gcagtcaaaggtcttggatttc

SEQ ID NO: 46602 - DNA, 22 bp, Artificial Sequence
  chemically synthesized
cagtcaaaggtcttggatttct

SEQ ID NO: 46603 - DNA, 22 bp, Artificial Sequence
  chemically synthesized
ggatttctgaaactttctgaaa

SEQ ID NO: 46604 - DNA, 22 bp, Artificial Sequence
  chemically synthesized
gatttctgaaactttctgaaaa

SEQ ID NO: 46605 - DNA, 22 bp, Artificial Sequence
  chemically synthesized
ctgaaactttctgaaaaagaac

SEQ ID NO: 46606 - DNA, 22 bp, Artificial Sequence
  chemically synthesized
tgaaactttctgaaaaagaacc

SEQ ID NO: 46607 - DNA, 22 bp, Artificial Sequence
  chemically synthesized
aaactttctgaaaaagaacccc

SEQ ID NO: 46608 - DNA, 22 bp, Artificial Sequence
  chemically synthesized
tctgaaaaagaaccccttaaac

SEQ ID NO: 46609 - DNA, 22 bp, Artificial Sequence
  chemically synthesized
ctgaaaaagaaccccttaaact

SEQ ID NO: 46610 - DNA, 22 bp, Artificial Sequence
  chemically synthesized
tgaaaaagaaccccttaaactg

SEQ ID NO: 46611 - DNA, 22 bp, Artificial Sequence
  chemically synthesized
aaaaagaaccccttaaactgaa

SEQ ID NO: 46612 - DNA, 22 bp, Artificial Sequence
  chemically synthesized
aaactgaataacagtttcttca

SEQ ID NO: 46613 - DNA, 22 bp, Artificial Sequence
  chemically synthesized
aactgaataacagtttcttcat

SEQ ID NO: 46614 - DNA, 22 bp, Artificial Sequence
  chemically synthesized
aataacagtttcttcatgaata

SEQ ID NO: 46615 - DNA, 22 bp, Artificial Sequence
  chemically synthesized
cttcatgaataaaatgaatgtt

SEQ ID NO: 46616 - DNA, 22 bp, Artificial Sequence
  chemically synthesized
ttcatgaataaaatgaatgtta

SEQ ID NO: 46617 - DNA, 22 bp, Artificial Sequence
  chemically synthesized
catgaataaaatgaatgttata

SEQ ID NO: 46618 - DNA, 22 bp, Artificial Sequence
  chemically synthesized
atgaataaaatgaatgttatac

SEQ ID NO: 46619 - DNA, 22 bp, Artificial Sequence
  chemically synthesized
tactctccagttatcttaccat

SEQ ID NO: 46620 - DNA, 22 bp, Artificial Sequence
  chemically synthesized
tccagttatcttaccatgtttt

SEQ ID NO: 46621 - DNA, 22 bp, Artificial Sequence
  chemically synthesized
cagttatcttaccatgttttct

SEQ ID NO: 46622 - DNA, 22 bp, Artificial Sequence
  chemically synthesized
tcttaccatgttttctggcaaa

SEQ ID NO: 46623 - DNA, 22 bp, Artificial Sequence
  chemically synthesized
accatgttttctggcaaacaag

SEQ ID NO: 46624 - DNA, 22 bp, Artificial Sequence
  chemically synthesized
ccatgttttctggcaaacaagg

SEQ ID NO: 46625 - DNA, 22 bp, Artificial Sequence
  chemically synthesized
tctggcaaacaaggaaatgtat

SEQ ID NO: 46626 - DNA, 22 bp, Artificial Sequence
  chemically synthesized
ctggcaaacaaggaaatgtatt

SEQ ID NO: 46627 - DNA, 22 bp, Artificial Sequence
  chemically synthesized
tggcaaacaaggaaatgtattc

SEQ ID NO: 46628 - DNA, 22 bp, Artificial Sequence
  chemically synthesized
gcaaacaaggaaatgtattcac

SEQ ID NO: 46629 - DNA, 22 bp, Artificial Sequence
  chemically synthesized
acatccaagaaaacaaaaggtt

SEQ ID NO: 46630 - DNA, 22 bp, Artificial Sequence
  chemically synthesized
cttaggagaagaatcccttgct

SEQ ID NO: 46631 - DNA, 22 bp, Artificial Sequence
  chemically synthesized
ttaggagaagaatcccttgctg

SEQ ID NO: 46632 - DNA, 22 bp, Artificial Sequence
  chemically synthesized
aggagaagaatcccttgctgcc

SEQ ID NO: 46633 - DNA, 22 bp, Artificial Sequence
  chemically synthesized
ggagaagaatcccttgctgcca

SEQ ID NO: 46634 - DNA, 22 bp, Artificial Sequence
  chemically synthesized
gctgccagaattttgcccatga

SEQ ID NO: 46635 - DNA, 22 bp, Artificial Sequence
  chemically synthesized
ctgccagaattttgcccatgaa

SEQ ID NO: 46636 - DNA, 22 bp, Artificial Sequence
  chemically synthesized
ccagaattttgcccatgaacaa

SEQ ID NO: 46637 - DNA, 22 bp, Artificial Sequence
  chemically synthesized
tgcccatgaacaatggaaacgt

SEQ ID NO: 46638 - DNA, 22 bp, Artificial Sequence
  chemically synthesized
gcccatgaacaatggaaacgtg

SEQ ID NO: 46639 - DNA, 22 bp, Artificial Sequence
  chemically synthesized
cccatgaacaatggaaacgtga

SEQ ID NO: 46640 - DNA, 22 bp, Artificial Sequence
  chemically synthesized
gttttgggtactaattctcaga

SEQ ID NO: 46641 - DNA, 22 bp, Artificial Sequence
  chemically synthesized
tgggtactaattctcagacttc

SEQ ID NO: 46642 - DNA, 22 bp, Artificial Sequence
  chemically synthesized
gggtactaattctcagacttca

SEQ ID NO: 46643 - DNA, 22 bp, Artificial Sequence
  chemically synthesized
ggtactaattctcagacttcaa

SEQ ID NO: 46644 - DNA, 22 bp, Artificial Sequence
  chemically synthesized
attctcagacttcaaaataacc

SEQ ID NO: 46645 - DNA, 22 bp, Artificial Sequence
  chemically synthesized
tcagacttcaaaataacctttt

SEQ ID NO: 46646 - DNA, 22 bp, Artificial Sequence
  chemically synthesized
agacttcaaaataaccttttta

SEQ ID NO: 46647 - DNA, 22 bp, Artificial Sequence
  chemically synthesized
caaaataacctttttaatttat

SEQ ID NO: 46648 - DNA, 22 bp, Artificial Sequence
  chemically synthesized
aaaataacctttttaatttatt

SEQ ID NO: 46649 - DNA, 22 bp, Artificial Sequence
  chemically synthesized
tttaatttattaatattaacct

SEQ ID NO: 46650 - DNA, 22 bp, Artificial Sequence
  chemically synthesized
ttaatttattaatattaacctt

SEQ ID NO: 46651 - DNA, 22 bp, Artificial Sequence
  chemically synthesized
taatttattaatattaaccttg

SEQ ID NO: 46652 - DNA, 22 bp, Artificial Sequence
  chemically synthesized
aatttattaatattaaccttga

SEQ ID NO: 46653 - DNA, 22 bp, Artificial Sequence
  chemically synthesized
atttattaatattaaccttgaa

SEQ ID NO: 46654 - DNA, 22 bp, Artificial Sequence
  chemically synthesized
attaatattaaccttgaaattt

SEQ ID NO: 46655 - DNA, 22 bp, Artificial Sequence
  chemically synthesized
ttaatattaaccttgaaattta

SEQ ID NO: 46656 - DNA, 22 bp, Artificial Sequence
  chemically synthesized
atattaaccttgaaatttattg

SEQ ID NO: 46657 - DNA, 22 bp, Artificial Sequence
  chemically synthesized
accttgaaatttattgctttta

SEQ ID NO: 46658 - DNA, 22 bp, Artificial Sequence
  chemically synthesized
gaaatttattgcttttattcat

SEQ ID NO: 46659 - DNA, 22 bp, Artificial Sequence
  chemically synthesized
aaatttattgcttttattcatt

SEQ ID NO: 46660 - DNA, 22 bp, Artificial Sequence
  chemically synthesized
attgcttttattcattaatcca

SEQ ID NO: 46661 - DNA, 22 bp, Artificial Sequence
  chemically synthesized
ttgcttttattcattaatccat

SEQ ID NO: 46662 - DNA, 22 bp, Artificial Sequence
  chemically synthesized
cttttattcattaatccatttt

SEQ ID NO: 46663 - DNA, 22 bp, Artificial Sequence
  chemically synthesized
ttattcattaatccattttatt

SEQ ID NO: 46664 - DNA, 22 bp, Artificial Sequence
  chemically synthesized
tattcattaatccattttatta

SEQ ID NO: 46665 - DNA, 22 bp, Artificial Sequence
  chemically synthesized
attcattaatccattttattat

SEQ ID NO: 46666 - DNA, 22 bp, Artificial Sequence
  chemically synthesized
ttcattaatccattttattatt

SEQ ID NO: 46667 - DNA, 22 bp, Artificial Sequence
  chemically synthesized
attaatccattttattattcag

SEQ ID NO: 46668 - DNA, 22 bp, Artificial Sequence
  chemically synthesized
atccattttattattcagtaag

SEQ ID NO: 46669 - DNA, 22 bp, Artificial Sequence
  chemically synthesized
tattattcagtaaggattcatc

SEQ ID NO: 46670 - DNA, 22 bp, Artificial Sequence
  chemically synthesized
attattcagtaaggattcatca

SEQ ID NO: 46671 - DNA, 22 bp, Artificial Sequence
  chemically synthesized
ttattcagtaaggattcatcaa

SEQ ID NO: 46672 - DNA, 22 bp, Artificial Sequence
  chemically synthesized
ttcagtaaggattcatcaagtg

SEQ ID NO: 46673 - DNA, 22 bp, Artificial Sequence
  chemically synthesized
agtaaggattcatcaagtgtct

SEQ ID NO: 46674 - DNA, 22 bp, Artificial Sequence
  chemically synthesized
atcaagtgtctattaggtatca

SEQ ID NO: 46675 - DNA, 22 bp, Artificial Sequence
  chemically synthesized
ttaggtatcaggcactgagagg

SEQ ID NO: 46676 - DNA, 22 bp, Artificial Sequence
  chemically synthesized
ggtatcaggcactgagaggcga

SEQ ID NO: 46677 - DNA, 22 bp, Artificial Sequence
  chemically synthesized
agaggcgagggagatagagtta

SEQ ID NO: 46678 - DNA, 22 bp, Artificial Sequence
  chemically synthesized
agaatacagaactgattcttaa

SEQ ID NO: 46679 - DNA, 22 bp, Artificial Sequence
  chemically synthesized
attcttaatcttcaagaattga

SEQ ID NO: 46680 - DNA, 22 bp, Artificial Sequence
  chemically synthesized
ttaatcttcaagaattgacaaa

SEQ ID NO: 46681 - DNA, 22 bp, Artificial Sequence
  chemically synthesized
aatcttcaagaattgacaaatt

SEQ ID NO: 46682 - DNA, 22 bp, Artificial Sequence
  chemically synthesized
atcttcaagaattgacaaattt

SEQ ID NO: 46683 - DNA, 22 bp, Artificial Sequence
  chemically synthesized
caagaattgacaaatttgtaga

SEQ ID NO: 46684 - DNA, 22 bp, Artificial Sequence
  chemically synthesized
aagaattgacaaatttgtagaa

SEQ ID NO: 46685 - DNA, 22 bp, Artificial Sequence
  chemically synthesized
acaaatttgtagaaggtagaca

SEQ ID NO: 46686 - DNA, 22 bp, Artificial Sequence
  chemically synthesized
gtagaaggtagacattgaacat

SEQ ID NO: 46687 - DNA, 22 bp, Artificial Sequence
  chemically synthesized
tagaaggtagacattgaacata

SEQ ID NO: 46688 - DNA, 22 bp, Artificial Sequence
  chemically synthesized
aacatacaatacagtcaaatgt

SEQ ID NO: 46689 - DNA, 22 bp, Artificial Sequence
  chemically synthesized
agggaaccaggtgtcctaagac

SEQ ID NO: 46690 - DNA, 22 bp, Artificial Sequence
  chemically synthesized
agactatacagtgtaccgtgga

SEQ ID NO: 46691 - DNA, 22 bp, Artificial Sequence
  chemically synthesized
tacagtgtaccgtggaatgggg

SEQ ID NO: 46692 - DNA, 22 bp, Artificial Sequence
  chemically synthesized
ctaacctagttacctagaggtt

SEQ ID NO: 46693 - DNA, 22 bp, Artificial Sequence
  chemically synthesized
taacctagttacctagaggttt

SEQ ID NO: 46694 - DNA, 22 bp, Artificial Sequence
  chemically synthesized
acctagttacctagaggtttgg

SEQ ID NO: 46695 - DNA, 22 bp, Artificial Sequence
  chemically synthesized
gttacctagaggtttgggaaaa

SEQ ID NO: 46696 - DNA, 22 bp, Artificial Sequence
  chemically synthesized
cctagaggtttgggaaaaacct

SEQ ID NO: 46697 - DNA, 22 bp, Artificial Sequence
  chemically synthesized
gaggtttgggaaaaacctctct

SEQ ID NO: 46698 - DNA, 22 bp, Artificial Sequence
  chemically synthesized
gggaaaaacctctctaatgatg

SEQ ID NO: 46699 - DNA, 22 bp, Artificial Sequence
  chemically synthesized
ggaaaaacctctctaatgatga

SEQ ID NO: 46700 - DNA, 22 bp, Artificial Sequence
  chemically synthesized
tctaatgatgagatgtttgagc

SEQ ID NO: 46701 - DNA, 22 bp, Artificial Sequence
  chemically synthesized
taatgatgagatgtttgagctg

SEQ ID NO: 46702 - DNA, 22 bp, Artificial Sequence
  chemically synthesized
atgatgagatgtttgagctgac

SEQ ID NO: 46703 - DNA, 22 bp, Artificial Sequence
  chemically synthesized
gagctgacacttgaaggataaa

SEQ ID NO: 46704 - DNA, 22 bp, Artificial Sequence
  chemically synthesized
agctgacacttgaaggataaat

SEQ ID NO: 46705 - DNA, 22 bp, Artificial Sequence
  chemically synthesized
acacttgaaggataaatagcta

SEQ ID NO: 46706 - DNA, 22 bp, Artificial Sequence
  chemically synthesized
gaaggataaatagctaaagggg

SEQ ID NO: 46707 - DNA, 22 bp, Artificial Sequence
  chemically synthesized
aaggataaatagctaaagggga

SEQ ID NO: 46708 - DNA, 22 bp, Artificial Sequence
  chemically synthesized
aaggggagaaagcgttctatgt

SEQ ID NO: 46709 - DNA, 22 bp, Artificial Sequence
  chemically synthesized
tatgtgagagaactatatatgc

SEQ ID NO: 46710 - DNA, 22 bp, Artificial Sequence
  chemically synthesized
tgtgagagaactatatatgcca

SEQ ID NO: 46711 - DNA, 22 bp, Artificial Sequence
  chemically synthesized
tatatgccaagatgcagaagtg

SEQ ID NO: 46712 - DNA, 22 bp, Artificial Sequence
  chemically synthesized
tctgttcgaagatctgagcggg

SEQ ID NO: 46713 - DNA, 22 bp, Artificial Sequence
  chemically synthesized
tgttcgaagatctgagcggggc

SEQ ID NO: 46714 - DNA, 22 bp, Artificial Sequence
  chemically synthesized
ttcgaagatctgagcggggctc

SEQ ID NO: 46715 - DNA, 22 bp, Artificial Sequence
  chemically synthesized
gaagatctgagcggggctcaga

SEQ ID NO: 46716 - DNA, 22 bp, Artificial Sequence
  chemically synthesized
agcggggctcagagagggaaaa

SEQ ID NO: 46717 - DNA, 22 bp, Artificial Sequence
  chemically synthesized
agagagggaaaaggagaggagt

SEQ ID NO: 46718 - DNA, 22 bp, Artificial Sequence
  chemically synthesized
cagggactagattgtgaagctc

SEQ ID NO: 46719 - DNA, 22 bp, Artificial Sequence
  chemically synthesized
gattgtgaagctcagggggagt

SEQ ID NO: 46720 - DNA, 22 bp, Artificial Sequence
  chemically synthesized
tgaagctcagggggagttaata

SEQ ID NO: 46721 - DNA, 22 bp, Artificial Sequence
  chemically synthesized
agggggagttaatagccttaag

SEQ ID NO: 46722 - DNA, 22 bp, Artificial Sequence
  chemically synthesized
atagccttaaggagttttgtct

SEQ ID NO: 46723 - DNA, 22 bp, Artificial Sequence
  chemically synthesized
aaggagttttgtctccagggta

SEQ ID NO: 46724 - DNA, 22 bp, Artificial Sequence
  chemically synthesized
aggagttttgtctccagggtat

SEQ ID NO: 46725 - DNA, 22 bp, Artificial Sequence
  chemically synthesized
tgtctccagggtatgaacaatg

SEQ ID NO: 46726 - DNA, 22 bp, Artificial Sequence
  chemically synthesized
gtctccagggtatgaacaatga

SEQ ID NO: 46727 - DNA, 22 bp, Artificial Sequence
  chemically synthesized
tctccagggtatgaacaatgaa

SEQ ID NO: 46728 - DNA, 22 bp, Artificial Sequence
  chemically synthesized
cagggtatgaacaatgaatgag

SEQ ID NO: 46729 - DNA, 22 bp, Artificial Sequence
  chemically synthesized
aaattctatccacagtagtggg

SEQ ID NO: 46730 - DNA, 22 bp, Artificial Sequence
  chemically synthesized
tatccacagtagtgggaagtac

SEQ ID NO: 46731 - DNA, 22 bp, Artificial Sequence
  chemically synthesized
tccacagtagtgggaagtacta

SEQ ID NO: 46732 - DNA, 22 bp, Artificial Sequence
  chemically synthesized
agtagtcaggtatgttttggaa

SEQ ID NO: 46733 - DNA, 22 bp, Artificial Sequence
  chemically synthesized
tggaagaagcactgttaccagt

SEQ ID NO: 46734 - DNA, 22 bp, Artificial Sequence
  chemically synthesized
ggaagaagcactgttaccagtt

SEQ ID NO: 46735 - DNA, 22 bp, Artificial Sequence
  chemically synthesized
gaagaagcactgttaccagttg

SEQ ID NO: 46736 - DNA, 22 bp, Artificial Sequence
  chemically synthesized
ttaccagttgagggagaggaga

SEQ ID NO: 46737 - DNA, 22 bp, Artificial Sequence
  chemically synthesized
ccagttgagggagaggagagga

SEQ ID NO: 46738 - DNA, 22 bp, Artificial Sequence
  chemically synthesized
agggagaggagaggagggaaat

SEQ ID NO: 46739 - DNA, 22 bp, Artificial Sequence
  chemically synthesized
gactgtggtgtgacccaggatg

SEQ ID NO: 46740 - DNA, 22 bp, Artificial Sequence
  chemically synthesized
tggtgtgacccaggatggaaag

SEQ ID NO: 46741 - DNA, 22 bp, Artificial Sequence
  chemically synthesized
tgcccaaatgtgggggaaaaat

SEQ ID NO: 46742 - DNA, 22 bp, Artificial Sequence
  chemically synthesized
gcccaaatgtgggggaaaaatg

SEQ ID NO: 46743 - DNA, 22 bp, Artificial Sequence
  chemically synthesized
cccaaatgtgggggaaaaatgt

SEQ ID NO: 46744 - DNA, 22 bp, Artificial Sequence
  chemically synthesized
actctctcctttgcccaggtct

SEQ ID NO: 46745 - DNA, 22 bp, Artificial Sequence
  chemically synthesized
ctctctcctttgcccaggtctt

SEQ ID NO: 46746 - DNA, 22 bp, Artificial Sequence
  chemically synthesized
tctcctttgcccaggtcttact

SEQ ID NO: 46747 - DNA, 22 bp, Artificial Sequence
  chemically synthesized
tcctttgcccaggtcttactac

SEQ ID NO: 46748 - DNA, 22 bp, Artificial Sequence
  chemically synthesized
ctttgcccaggtcttactacaa

SEQ ID NO: 46749 - DNA, 22 bp, Artificial Sequence
  chemically synthesized
tgcccaggtcttactacaatca

SEQ ID NO: 46750 - DNA, 22 bp, Artificial Sequence
  chemically synthesized
gcccaggtcttactacaatcat

SEQ ID NO: 46751 - DNA, 22 bp, Artificial Sequence
  chemically synthesized
cccaggtcttactacaatcatt

SEQ ID NO: 46752 - DNA, 22 bp, Artificial Sequence
  chemically synthesized
actacaatcatttcttctgcac

SEQ ID NO: 46753 - DNA, 22 bp, Artificial Sequence
  chemically synthesized
ctacaatcatttcttctgcaca

SEQ ID NO: 46754 - DNA, 22 bp, Artificial Sequence
  chemically synthesized
caatcatttcttctgcacacac

SEQ ID NO: 46755 - DNA, 22 bp, Artificial Sequence
  chemically synthesized
cttctgcacacacttgctcaga

SEQ ID NO: 46756 - DNA, 22 bp, Artificial Sequence
  chemically synthesized
ttctgcacacacttgctcagaa

SEQ ID NO: 46757 - DNA, 22 bp, Artificial Sequence
  chemically synthesized
ctgcacacacttgctcagaaca

SEQ ID NO: 46758 - DNA, 22 bp, Artificial Sequence
  chemically synthesized
tgcacacacttgctcagaacat

SEQ ID NO: 46759 - DNA, 22 bp, Artificial Sequence
  chemically synthesized
cacacacttgctcagaacatta

SEQ ID NO: 46760 - DNA, 22 bp, Artificial Sequence
  chemically synthesized
gctcagaacattacaaactctg

SEQ ID NO: 46761 - DNA, 22 bp, Artificial Sequence
  chemically synthesized
ctcagaacattacaaactctgg

SEQ ID NO: 46762 - DNA, 22 bp, Artificial Sequence
  chemically synthesized
agaacattacaaactctggaga

SEQ ID NO: 46763 - DNA, 22 bp, Artificial Sequence
  chemically synthesized
caaactctggagaaattaacat

SEQ ID NO: 46764 - DNA, 22 bp, Artificial Sequence
  chemically synthesized
tggagaaattaacatgttaagg

SEQ ID NO: 46765 - DNA, 22 bp, Artificial Sequence
  chemically synthesized
gagaaattaacatgttaaggat

SEQ ID NO: 46766 - DNA, 22 bp, Artificial Sequence
  chemically synthesized
acatgttaaggatatttaggat

SEQ ID NO: 46767 - DNA, 22 bp, Artificial Sequence
  chemically synthesized
aggatatttaggatcattaaaa

SEQ ID NO: 46768 - DNA, 22 bp, Artificial Sequence
  chemically synthesized
aggatcattaaaaaagtttaat

SEQ ID NO: 46769 - DNA, 22 bp, Artificial Sequence
  chemically synthesized
ggatcattaaaaaagtttaata

SEQ ID NO: 46770 - DNA, 22 bp, Artificial Sequence
  chemically synthesized
aaaaagtttaataaatgttgtc

SEQ ID NO: 46771 - DNA, 22 bp, Artificial Sequence
  chemically synthesized
aataaatgttgtcacacataat

SEQ ID NO: 46772 - DNA, 22 bp, Artificial Sequence
  chemically synthesized
ataaatgttgtcacacataatg

SEQ ID NO: 46773 - DNA, 22 bp, Artificial Sequence
  chemically synthesized
tcacacataatgaaagttaatt

SEQ ID NO: 46774 - DNA, 22 bp, Artificial Sequence
  chemically synthesized
atttaagaattgtaaagacttg

SEQ ID NO: 46775 - DNA, 22 bp, Artificial Sequence
  chemically synthesized
aagaattgtaaagacttgagcg

SEQ ID NO: 46776 - DNA, 22 bp, Artificial Sequence
  chemically synthesized
agaattgtaaagacttgagcga

SEQ ID NO: 46777 - DNA, 22 bp, Artificial Sequence
  chemically synthesized
taaagacttgagcgatgtagtc

SEQ ID NO: 46778 - DNA, 22 bp, Artificial Sequence
  chemically synthesized
gagcgatgtagtccctaaataa

SEQ ID NO: 46779 - DNA, 22 bp, Artificial Sequence
  chemically synthesized
agcgatgtagtccctaaataaa

SEQ ID NO: 46780 - DNA, 22 bp, Artificial Sequence
  chemically synthesized
aataaatgcttccctcttaaaa

SEQ ID NO: 46781 - DNA, 22 bp, Artificial Sequence
  chemically synthesized
ccctcttaaaatggactagaaa

SEQ ID NO: 46782 - DNA, 22 bp, Artificial Sequence
  chemically synthesized
cctcttaaaatggactagaaac

SEQ ID NO: 46783 - DNA, 22 bp, Artificial Sequence
  chemically synthesized
ttaaaatggactagaaacaatt

SEQ ID NO: 46784 - DNA, 22 bp, Artificial Sequence
  chemically synthesized
aaaatggactagaaacaatttg

SEQ ID NO: 46785 - DNA, 22 bp, Artificial Sequence
  chemically synthesized
aaatggactagaaacaatttgt

SEQ ID NO: 46786 - DNA, 22 bp, Artificial Sequence
  chemically synthesized
gaaacaatttgtttttgcctaa

SEQ ID NO: 46787 - DNA, 22 bp, Artificial Sequence
  chemically synthesized
gtttttgcctaagccaacgtat

SEQ ID NO: 46788 - DNA, 22 bp, Artificial Sequence
  chemically synthesized
tttttgcctaagccaacgtatt

SEQ ID NO: 46789 - DNA, 22 bp, Artificial Sequence
  chemically synthesized
ttgcctaagccaacgtattgct

SEQ ID NO: 46790 - DNA, 22 bp, Artificial Sequence
  chemically synthesized
tgcctaagccaacgtattgctg

SEQ ID NO: 46791 - DNA, 22 bp, Artificial Sequence
  chemically synthesized
gcctaagccaacgtattgctgg

SEQ ID NO: 46792 - DNA, 22 bp, Artificial Sequence
  chemically synthesized
cctaagccaacgtattgctgga

SEQ ID NO: 46793 - DNA, 22 bp, Artificial Sequence
  chemically synthesized
agccaacgtattgctggacata

SEQ ID NO: 46794 - DNA, 22 bp, Artificial Sequence
  chemically synthesized
ctggacataatttacctgcttc

SEQ ID NO: 46795 - DNA, 22 bp, Artificial Sequence
  chemically synthesized
gacataatttacctgcttcctc

SEQ ID NO: 46796 - DNA, 22 bp, Artificial Sequence
  chemically synthesized
acctgcttcctcctcagtcttg

SEQ ID NO: 46797 - DNA, 22 bp, Artificial Sequence
  chemically synthesized
cctgcttcctcctcagtcttga

SEQ ID NO: 46798 - DNA, 22 bp, Artificial Sequence
  chemically synthesized
cttcctcctcagtcttgacact

SEQ ID NO: 46799 - DNA, 22 bp, Artificial Sequence
  chemically synthesized
cctcctcagtcttgacactaca

SEQ ID NO: 46800 - DNA, 22 bp, Artificial Sequence
  chemically synthesized
ctcctcagtcttgacactacac

SEQ ID NO: 46801 - DNA, 22 bp, Artificial Sequence
  chemically synthesized
ctcagtcttgacactacacctc

SEQ ID NO: 46802 - DNA, 22 bp, Artificial Sequence
  chemically synthesized
agtcttgacactacacctctga

SEQ ID NO: 46803 - DNA, 22 bp, Artificial Sequence
  chemically synthesized
gacactacacctctgaattaca

SEQ ID NO: 46804 - DNA, 22 bp, Artificial Sequence
  chemically synthesized
acactacacctctgaattacat

SEQ ID NO: 46805 - DNA, 22 bp, Artificial Sequence
  chemically synthesized
cacctctgaattacatggtaca

SEQ ID NO: 46806 - DNA, 22 bp, Artificial Sequence
  chemically synthesized
tgaattacatggtacaagtggc

SEQ ID NO: 46807 - DNA, 22 bp, Artificial Sequence
  chemically synthesized
aattacatggtacaagtggcac

SEQ ID NO: 46808 - DNA, 22 bp, Artificial Sequence
  chemically synthesized
catggtacaagtggcacaggga

SEQ ID NO: 46809 - DNA, 22 bp, Artificial Sequence
  chemically synthesized
agaaaactagagtcaaagtggt

SEQ ID NO: 46810 - DNA, 22 bp, Artificial Sequence
  chemically synthesized
gagtcaaagtggttatggaaga

SEQ ID NO: 46811 - DNA, 22 bp, Artificial Sequence
  chemically synthesized
tggaagaaattataataatgag

SEQ ID NO: 46812 - DNA, 22 bp, Artificial Sequence
  chemically synthesized
taataatgagtccactcttcta

SEQ ID NO: 46813 - DNA, 22 bp, Artificial Sequence
  chemically synthesized
ttctaggacaggagttctaaag

SEQ ID NO: 46814 - DNA, 22 bp, Artificial Sequence
  chemically synthesized
ctaggacaggagttctaaaggt

SEQ ID NO: 46815 - DNA, 22 bp, Artificial Sequence
  chemically synthesized
taggacaggagttctaaaggtg

SEQ ID NO: 46816 - DNA, 22 bp, Artificial Sequence
  chemically synthesized
ggacaggagttctaaaggtgag

SEQ ID NO: 46817 - DNA, 22 bp, Artificial Sequence
  chemically synthesized
taaaggtgaggactttgatata

SEQ ID NO: 46818 - DNA, 22 bp, Artificial Sequence
  chemically synthesized
aaggtgaggactttgatataag

SEQ ID NO: 46819 - DNA, 22 bp, Artificial Sequence
  chemically synthesized
tgatataagtgaactcaaggag

SEQ ID NO: 46820 - DNA, 22 bp, Artificial Sequence
  chemically synthesized
gatataagtgaactcaaggagt

SEQ ID NO: 46821 - DNA, 22 bp, Artificial Sequence
  chemically synthesized
atataagtgaactcaaggagtt

SEQ ID NO: 46822 - DNA, 22 bp, Artificial Sequence
  chemically synthesized
aaggagtttctaaaccttcaga

SEQ ID NO: 46823 - DNA, 22 bp, Artificial Sequence
  chemically synthesized
ctaaaccttcagaaattatatc

SEQ ID NO: 46824 - DNA, 22 bp, Artificial Sequence
  chemically synthesized
taaaccttcagaaattatatct

SEQ ID NO: 46825 - DNA, 22 bp, Artificial Sequence
  chemically synthesized
aaccttcagaaattatatctaa

SEQ ID NO: 46826 - DNA, 22 bp, Artificial Sequence
  chemically synthesized
cagaaattatatctaaaaatta

SEQ ID NO: 46827 - DNA, 22 bp, Artificial Sequence
  chemically synthesized
agaaattatatctaaaaattag

SEQ ID NO: 46828 - DNA, 22 bp, Artificial Sequence
  chemically synthesized
tatctaaaaattaggtgcacgt

SEQ ID NO: 46829 - DNA, 22 bp, Artificial Sequence
  chemically synthesized
aaaattaggtgcacgtatatag

SEQ ID NO: 46830 - DNA, 22 bp, Artificial Sequence
  chemically synthesized
ggtgcacgtatatagaagtact

SEQ ID NO: 46831 - DNA, 22 bp, Artificial Sequence
  chemically synthesized
ttctctgagaagaggacttcac

SEQ ID NO: 46832 - DNA, 22 bp, Artificial Sequence
  chemically synthesized
tctctgagaagaggacttcaca

SEQ ID NO: 46833 - DNA, 22 bp, Artificial Sequence
  chemically synthesized
ctctgagaagaggacttcacac

SEQ ID NO: 46834 - DNA, 22 bp, Artificial Sequence
  chemically synthesized
tctgagaagaggacttcacact

SEQ ID NO: 46835 - DNA, 22 bp, Artificial Sequence
  chemically synthesized
tgagaagaggacttcacacttc

SEQ ID NO: 46836 - DNA, 22 bp, Artificial Sequence
  chemically synthesized
agaagaggacttcacacttcca

SEQ ID NO: 46837 - DNA, 22 bp, Artificial Sequence
  chemically synthesized
cacacttccatcagcttcctga

SEQ ID NO: 46838 - DNA, 22 bp, Artificial Sequence
  chemically synthesized
acacttccatcagcttcctgaa

SEQ ID NO: 46839 - DNA, 22 bp, Artificial Sequence
  chemically synthesized
ccatcagcttcctgaaggcccc

SEQ ID NO: 46840 - DNA, 22 bp, Artificial Sequence
  chemically synthesized
catcagcttcctgaaggcccct

SEQ ID NO: 46841 - DNA, 22 bp, Artificial Sequence
  chemically synthesized
cctgaaggcccctgtaattgcc

SEQ ID NO: 46842 - DNA, 22 bp, Artificial Sequence
  chemically synthesized
ctgaaggcccctgtaattgccg

SEQ ID NO: 46843 - DNA, 22 bp, Artificial Sequence
  chemically synthesized
aaggcccctgtaattgccgtaa

SEQ ID NO: 46844 - DNA, 22 bp, Artificial Sequence
  chemically synthesized
taattgccgtaaagaacaactg

SEQ ID NO: 46845 - DNA, 22 bp, Artificial Sequence
  chemically synthesized
ccgtaaagaacaactgctctaa

SEQ ID NO: 46846 - DNA, 22 bp, Artificial Sequence
  chemically synthesized
ctctaaagtttaatactaggct

SEQ ID NO: 46847 - DNA, 22 bp, Artificial Sequence
  chemically synthesized
taaagtttaatactaggctact

SEQ ID NO: 46848 - DNA, 22 bp, Artificial Sequence
  chemically synthesized
aagtttaatactaggctactcg

SEQ ID NO: 46849 - DNA, 22 bp, Artificial Sequence
  chemically synthesized
aatactaggctactcggctgtt

SEQ ID NO: 46850 - DNA, 22 bp, Artificial Sequence
  chemically synthesized
atactaggctactcggctgttt

SEQ ID NO: 46851 - DNA, 22 bp, Artificial Sequence
  chemically synthesized
ggctactcggctgttttttgtt

SEQ ID NO: 46852 - DNA, 22 bp, Artificial Sequence
  chemically synthesized
ctcggctgttttttgttaacac

SEQ ID NO: 46853 - DNA, 22 bp, Artificial Sequence
  chemically synthesized
ggctgttttttgttaacacaga

SEQ ID NO: 46854 - DNA, 22 bp, Artificial Sequence
  chemically synthesized
ttttttgttaacacagaagttt

SEQ ID NO: 46855 - DNA, 22 bp, Artificial Sequence
  chemically synthesized
tttgttaacacagaagttttcc

SEQ ID NO: 46856 - DNA, 22 bp, Artificial Sequence
  chemically synthesized
ttgttaacacagaagttttcca

SEQ ID NO: 46857 - DNA, 22 bp, Artificial Sequence
  chemically synthesized
tgttaacacagaagttttccaa

SEQ ID NO: 46858 - DNA, 22 bp, Artificial Sequence
  chemically synthesized
gttaacacagaagttttccaaa

SEQ ID NO: 46859 - DNA, 22 bp, Artificial Sequence
  chemically synthesized
ttaacacagaagttttccaaat

SEQ ID NO: 46860 - DNA, 22 bp, Artificial Sequence
  chemically synthesized
acacagaagttttccaaatggc

SEQ ID NO: 46861 - DNA, 22 bp, Artificial Sequence
  chemically synthesized
tccaaatggcttttctctagag

SEQ ID NO: 46862 - DNA, 22 bp, Artificial Sequence
  chemically synthesized
ccaaatggcttttctctagagc

SEQ ID NO: 46863 - DNA, 22 bp, Artificial Sequence
  chemically synthesized
caaatggcttttctctagagca

SEQ ID NO: 46864 - DNA, 22 bp, Artificial Sequence
  chemically synthesized
ttctctagagcaaaatgaaaag

SEQ ID NO: 46865 - DNA, 22 bp, Artificial Sequence
  chemically synthesized
tctctagagcaaaatgaaaagg

SEQ ID NO: 46866 - DNA, 22 bp, Artificial Sequence
  chemically synthesized
ctctagagcaaaatgaaaagga

SEQ ID NO: 46867 - DNA, 22 bp, Artificial Sequence
  chemically synthesized
tctagagcaaaatgaaaaggat

SEQ ID NO: 46868 - DNA, 22 bp, Artificial Sequence
  chemically synthesized
tagagcaaaatgaaaaggatcc

SEQ ID NO: 46869 - DNA, 22 bp, Artificial Sequence
  chemically synthesized
gagcaaaatgaaaaggatccca

SEQ ID NO: 46870 - DNA, 22 bp, Artificial Sequence
  chemically synthesized
cccgagacctaacgatgtttat

SEQ ID NO: 46871 - DNA, 22 bp, Artificial Sequence
  chemically synthesized
ccgagacctaacgatgtttatc

SEQ ID NO: 46872 - DNA, 22 bp, Artificial Sequence
  chemically synthesized
acgatgtttatctttcgtgata

SEQ ID NO: 46873 - DNA, 22 bp, Artificial Sequence
  chemically synthesized
atctttcgtgatactgtttttg

SEQ ID NO: 46874 - DNA, 22 bp, Artificial Sequence
  chemically synthesized
tctttcgtgatactgtttttgt

SEQ ID NO: 46875 - DNA, 22 bp, Artificial Sequence
  chemically synthesized
tcgtgatactgtttttgttctt

SEQ ID NO: 46876 - DNA, 22 bp, Artificial Sequence
  chemically synthesized
cgtgatactgtttttgttcttc

SEQ ID NO: 46877 - DNA, 22 bp, Artificial Sequence
  chemically synthesized
gtgatactgtttttgttcttcc

SEQ ID NO: 46878 - DNA, 22 bp, Artificial Sequence
  chemically synthesized
tttttgttcttcctctttttct

SEQ ID NO: 46879 - DNA, 22 bp, Artificial Sequence
  chemically synthesized
ttgttcttcctctttttctcct

SEQ ID NO: 46880 - DNA, 22 bp, Artificial Sequence
  chemically synthesized
tgttcttcctctttttctccta

SEQ ID NO: 46881 - DNA, 22 bp, Artificial Sequence
  chemically synthesized
gttcttcctctttttctcctac

SEQ ID NO: 46882 - DNA, 22 bp, Artificial Sequence
  chemically synthesized
ttcttcctctttttctcctacc

SEQ ID NO: 46883 - DNA, 22 bp, Artificial Sequence
  chemically synthesized
ttcctctttttctcctaccccc

SEQ ID NO: 46884 - DNA, 22 bp, Artificial Sequence
  chemically synthesized
cctctttttctcctacccccca

SEQ ID NO: 46885 - DNA, 22 bp, Artificial Sequence
  chemically synthesized
ctctttttctcctaccccccac

SEQ ID NO: 46886 - DNA, 22 bp, Artificial Sequence
  chemically synthesized
tttttctcctaccccccaccac

SEQ ID NO: 46887 - DNA, 22 bp, Artificial Sequence
  chemically synthesized
tttctcctaccccccaccactt

SEQ ID NO: 46888 - DNA, 22 bp, Artificial Sequence
  chemically synthesized
ttctcctaccccccaccacttt

SEQ ID NO: 46889 - DNA, 22 bp, Artificial Sequence
  chemically synthesized
tctcctaccccccaccactttt

SEQ ID NO: 46890 - DNA, 22 bp, Artificial Sequence
  chemically synthesized
ctcctaccccccaccactttta

SEQ ID NO: 46891 - DNA, 22 bp, Artificial Sequence
  chemically synthesized
tcctaccccccaccacttttaa

SEQ ID NO: 46892 - DNA, 22 bp, Artificial Sequence
  chemically synthesized
ctaccccccaccacttttaaag

SEQ ID NO: 46893 - DNA, 22 bp, Artificial Sequence
  chemically synthesized
ccccccaccacttttaaagatc

SEQ ID NO: 46894 - DNA, 22 bp, Artificial Sequence
  chemically synthesized
ttaaagatccatcaaggcccag

SEQ ID NO: 46895 - DNA, 22 bp, Artificial Sequence
  chemically synthesized
taaagatccatcaaggcccagc

SEQ ID NO: 46896 - DNA, 22 bp, Artificial Sequence
  chemically synthesized
aaagatccatcaaggcccagca

SEQ ID NO: 46897 - DNA, 22 bp, Artificial Sequence
  chemically synthesized
aagatccatcaaggcccagcat

SEQ ID NO: 46898 - DNA, 22 bp, Artificial Sequence
  chemically synthesized
acacctgtaatctcaacacttt

SEQ ID NO: 46899 - DNA, 22 bp, Artificial Sequence
  chemically synthesized
taatctcaacacttttcaaggc

SEQ ID NO: 46900 - DNA, 22 bp, Artificial Sequence
  chemically synthesized
aacacttttcaaggctgaggtg

SEQ ID NO: 46901 - DNA, 22 bp, Artificial Sequence
  chemically synthesized
ttcaaggctgaggtgggagaat

SEQ ID NO: 46902 - DNA, 22 bp, Artificial Sequence
  chemically synthesized
tcaaggctgaggtgggagaatt

SEQ ID NO: 46903 - DNA, 22 bp, Artificial Sequence
  chemically synthesized
caaggctgaggtgggagaattg

SEQ ID NO: 46904 - DNA, 22 bp, Artificial Sequence
  chemically synthesized
aaggctgaggtgggagaattgt

SEQ ID NO: 46905 - DNA, 22 bp, Artificial Sequence
  chemically synthesized
aggtgggagaattgtttgagac

SEQ ID NO: 46906 - DNA, 22 bp, Artificial Sequence
  chemically synthesized
tttgagaccaagagttggatac

SEQ ID NO: 46907 - DNA, 22 bp, Artificial Sequence
  chemically synthesized
gagaccaagagttggataccag

SEQ ID NO: 46908 - DNA, 22 bp, Artificial Sequence
  chemically synthesized
agaccaagagttggataccagc

SEQ ID NO: 46909 - DNA, 22 bp, Artificial Sequence
  chemically synthesized
gataccagcctggggaacatag

SEQ ID NO: 46910 - DNA, 22 bp, Artificial Sequence
  chemically synthesized
gggaacatagggagaccctgtt

SEQ ID NO: 46911 - DNA, 22 bp, Artificial Sequence
  chemically synthesized
tttctacagaaatttaaaaaat

SEQ ID NO: 46912 - DNA, 22 bp, Artificial Sequence
  chemically synthesized
ctacagaaatttaaaaaatttc

SEQ ID NO: 46913 - DNA, 22 bp, Artificial Sequence
  chemically synthesized
tacagaaatttaaaaaatttct

SEQ ID NO: 46914 - DNA, 22 bp, Artificial Sequence
  chemically synthesized
cagaaatttaaaaaatttctct

SEQ ID NO: 46915 - DNA, 22 bp, Artificial Sequence
  chemically synthesized
aaaaaatttctctagctggcca

SEQ ID NO: 46916 - DNA, 22 bp, Artificial Sequence
  chemically synthesized
aaaaatttctctagctggccat

SEQ ID NO: 46917 - DNA, 22 bp, Artificial Sequence
  chemically synthesized
ctctagctggccatggaggctc

SEQ ID NO: 46918 - DNA, 22 bp, Artificial Sequence
  chemically synthesized
tctagctggccatggaggctca

SEQ ID NO: 46919 - DNA, 22 bp, Artificial Sequence
  chemically synthesized
tagctggccatggaggctcaca

SEQ ID NO: 46920 - DNA, 22 bp, Artificial Sequence
  chemically synthesized
gctggccatggaggctcacacc

SEQ ID NO: 46921 - DNA, 22 bp, Artificial Sequence
  chemically synthesized
gccatggaggctcacacctgta

SEQ ID NO: 46922 - DNA, 22 bp, Artificial Sequence
  chemically synthesized
acacctgtagtcctagctacct

SEQ ID NO: 46923 - DNA, 22 bp, Artificial Sequence
  chemically synthesized
tagtcctagctacctgagaggc

SEQ ID NO: 46924 - DNA, 22 bp, Artificial Sequence
  chemically synthesized
gctacctgagaggctaaagcag

SEQ ID NO: 46925 - DNA, 22 bp, Artificial Sequence
  chemically synthesized
cctgagaggctaaagcaggagg

SEQ ID NO: 46926 - DNA, 22 bp, Artificial Sequence
  chemically synthesized
agaggctaaagcaggaggatca

SEQ ID NO: 46927 - DNA, 22 bp, Artificial Sequence
  chemically synthesized
aagcaggaggatcaattgaatc

SEQ ID NO: 46928 - DNA, 22 bp, Artificial Sequence
  chemically synthesized
aatccaggcgttctagtgaggc

SEQ ID NO: 46929 - DNA, 22 bp, Artificial Sequence
  chemically synthesized
tagtgaggcttcagtgagcaag

SEQ ID NO: 46930 - DNA, 22 bp, Artificial Sequence
  chemically synthesized
gtgaggcttcagtgagcaagat

SEQ ID NO: 46931 - DNA, 22 bp, Artificial Sequence
  chemically synthesized
cagtgagcaagattgcaccatt

SEQ ID NO: 46932 - DNA, 22 bp, Artificial Sequence
  chemically synthesized
agtgagcaagattgcaccattg

SEQ ID NO: 46933 - DNA, 22 bp, Artificial Sequence
  chemically synthesized
caccattgcactccagccgggg

SEQ ID NO: 46934 - DNA, 22 bp, Artificial Sequence
  chemically synthesized
cactccagccggggtgacagag

SEQ ID NO: 46935 - DNA, 22 bp, Artificial Sequence
  chemically synthesized
cagccggggtgacagagtgaga

SEQ ID NO: 46936 - DNA, 22 bp, Artificial Sequence
  chemically synthesized
tttcaaacaaacaagcaaaagc

SEQ ID NO: 46937 - DNA, 22 bp, Artificial Sequence
  chemically synthesized
caaacaaacaagcaaaagcaaa

SEQ ID NO: 46938 - DNA, 22 bp, Artificial Sequence
  chemically synthesized
aaacaaacaagcaaaagcaaaa

SEQ ID NO: 46939 - DNA, 22 bp, Artificial Sequence
  chemically synthesized
gttgctccattcctttacttac

SEQ ID NO: 46940 - DNA, 22 bp, Artificial Sequence
  chemically synthesized
ttgctccattcctttacttact

SEQ ID NO: 46941 - DNA, 22 bp, Artificial Sequence
  chemically synthesized
ctccattcctttacttactatc

SEQ ID NO: 46942 - DNA, 22 bp, Artificial Sequence
  chemically synthesized
cattcctttacttactatcttg

SEQ ID NO: 46943 - DNA, 22 bp, Artificial Sequence
  chemically synthesized
ctttacttactatcttgctgtc

SEQ ID NO: 46944 - DNA, 22 bp, Artificial Sequence
  chemically synthesized
tacttactatcttgctgtctac

SEQ ID NO: 46945 - DNA, 22 bp, Artificial Sequence
  chemically synthesized
acttactatcttgctgtctaca

SEQ ID NO: 46946 - DNA, 22 bp, Artificial Sequence
  chemically synthesized
cttactatcttgctgtctacag

SEQ ID NO: 46947 - DNA, 22 bp, Artificial Sequence
  chemically synthesized
actatcttgctgtctacagcta

SEQ ID NO: 46948 - DNA, 22 bp, Artificial Sequence
  chemically synthesized
ctatcttgctgtctacagctaa

SEQ ID NO: 46949 - DNA, 22 bp, Artificial Sequence
  chemically synthesized
tcttgctgtctacagctaaagt

SEQ ID NO: 46950 - DNA, 22 bp, Artificial Sequence
  chemically synthesized
gctgtctacagctaaagtcaga

SEQ ID NO: 46951 - DNA, 22 bp, Artificial Sequence
  chemically synthesized
ctgtctacagctaaagtcagac

SEQ ID NO: 46952 - DNA, 22 bp, Artificial Sequence
  chemically synthesized
tctacagctaaagtcagactgc

SEQ ID NO: 46953 - DNA, 22 bp, Artificial Sequence
  chemically synthesized
cagctaaagtcagactgcatga

SEQ ID NO: 46954 - DNA, 22 bp, Artificial Sequence
  chemically synthesized
aagtcagactgcatgatttgga

SEQ ID NO: 46955 - DNA, 22 bp, Artificial Sequence
  chemically synthesized
catgatttggaattccaactcc

SEQ ID NO: 46956 - DNA, 22 bp, Artificial Sequence
  chemically synthesized
ggaattccaactccaccatcac

SEQ ID NO: 46957 - DNA, 22 bp, Artificial Sequence
  chemically synthesized
gaattccaactccaccatcacc

SEQ ID NO: 46958 - DNA, 22 bp, Artificial Sequence
  chemically synthesized
caactccaccatcacctgggta

SEQ ID NO: 46959 - DNA, 22 bp, Artificial Sequence
  chemically synthesized
caccatcacctgggtaatgttg

SEQ ID NO: 46960 - DNA, 22 bp, Artificial Sequence
  chemically synthesized
ggtaatgttgagatttattaca

SEQ ID NO: 46961 - DNA, 22 bp, Artificial Sequence
  chemically synthesized
agatttattacatagcatctct

SEQ ID NO: 46962 - DNA, 22 bp, Artificial Sequence
  chemically synthesized
attacatagcatctctgtgcct

SEQ ID NO: 46963 - DNA, 22 bp, Artificial Sequence
  chemically synthesized
ttacatagcatctctgtgcctc

SEQ ID NO: 46964 - DNA, 22 bp, Artificial Sequence
  chemically synthesized
catagcatctctgtgcctcagt

SEQ ID NO: 46965 - DNA, 22 bp, Artificial Sequence
  chemically synthesized
tgtgcctcagtttctccatata

SEQ ID NO: 46966 - DNA, 22 bp, Artificial Sequence
  chemically synthesized
tgcctcagtttctccatatata

SEQ ID NO: 46967 - DNA, 22 bp, Artificial Sequence
  chemically synthesized
agtttctccatatataaaatct

SEQ ID NO: 46968 - DNA, 22 bp, Artificial Sequence
  chemically synthesized
ctccatatataaaatctacctg

SEQ ID NO: 46969 - DNA, 22 bp, Artificial Sequence
  chemically synthesized
tccatatataaaatctacctgt

SEQ ID NO: 46970 - DNA, 22 bp, Artificial Sequence
  chemically synthesized
catatataaaatctacctgtaa

SEQ ID NO: 46971 - DNA, 22 bp, Artificial Sequence
  chemically synthesized
cctgtaataatgttgtgaaaat

SEQ ID NO: 46972 - DNA, 22 bp, Artificial Sequence
  chemically synthesized
taataatgttgtgaaaattaaa

SEQ ID NO: 46973 - DNA, 22 bp, Artificial Sequence
  chemically synthesized
tgaaaattaaaagaaataccag

SEQ ID NO: 46974 - DNA, 22 bp, Artificial Sequence
  chemically synthesized
aaagaaataccagttgtaaatc

SEQ ID NO: 46975 - DNA, 22 bp, Artificial Sequence
  chemically synthesized
taaatcactcagaactgtgcct

SEQ ID NO: 46976 - DNA, 22 bp, Artificial Sequence
  chemically synthesized
agaactgtgcctagcatttaat

SEQ ID NO: 46977 - DNA, 22 bp, Artificial Sequence
  chemically synthesized
tgcctagcatttaataaacact

SEQ ID NO: 46978 - DNA, 22 bp, Artificial Sequence
  chemically synthesized
gcatttaataaacactctgtag

SEQ ID NO: 46979 - DNA, 22 bp, Artificial Sequence
  chemically synthesized
aataaacactctgtaggtatta

SEQ ID NO: 46980 - DNA, 22 bp, Artificial Sequence
  chemically synthesized
ataaacactctgtaggtattag

SEQ ID NO: 46981 - DNA, 22 bp, Artificial Sequence
  chemically synthesized
tgtaggtattagcttatttctt

SEQ ID NO: 46982 - DNA, 22 bp, Artificial Sequence
  chemically synthesized
taggtattagcttatttcttta

SEQ ID NO: 46983 - DNA, 22 bp, Artificial Sequence
  chemically synthesized
gcttatttctttataaaattta

SEQ ID NO: 46984 - DNA, 22 bp, Artificial Sequence
  chemically synthesized
atttctttataaaatttattca

SEQ ID NO: 46985 - DNA, 22 bp, Artificial Sequence
  chemically synthesized
tttctttataaaatttattcat

SEQ ID NO: 46986 - DNA, 22 bp, Artificial Sequence
  chemically synthesized
ctttataaaatttattcataaa

SEQ ID NO: 46987 - DNA, 22 bp, Artificial Sequence
  chemically synthesized
tttataaaatttattcataaaa

SEQ ID NO: 46988 - DNA, 22 bp, Artificial Sequence
  chemically synthesized
tataaaatttattcataaaatg

SEQ ID NO: 46989 - DNA, 22 bp, Artificial Sequence
  chemically synthesized
ataaaatttattcataaaatga

SEQ ID NO: 46990 - DNA, 22 bp, Artificial Sequence
  chemically synthesized
taaaatttattcataaaatgag

SEQ ID NO: 46991 - DNA, 22 bp, Artificial Sequence
  chemically synthesized
attcataaaatgaggaagttag

SEQ ID NO: 46992 - DNA, 22 bp, Artificial Sequence
  chemically synthesized
ttcataaaatgaggaagttagc

SEQ ID NO: 46993 - DNA, 22 bp, Artificial Sequence
  chemically synthesized
ataaaatgaggaagttagctca

SEQ ID NO: 46994 - DNA, 22 bp, Artificial Sequence
  chemically synthesized
gctcatgtattgtcataccagc

SEQ ID NO: 46995 - DNA, 22 bp, Artificial Sequence
  chemically synthesized
atgtattgtcataccagctttc

SEQ ID NO: 46996 - DNA, 22 bp, Artificial Sequence
  chemically synthesized
tcataccagctttcactttgaa

SEQ ID NO: 46997 - DNA, 22 bp, Artificial Sequence
  chemically synthesized
tcactttgaatgagtccataat

SEQ ID NO: 46998 - DNA, 22 bp, Artificial Sequence
  chemically synthesized
cactttgaatgagtccataatt

SEQ ID NO: 46999 - DNA, 22 bp, Artificial Sequence
  chemically synthesized
actttgaatgagtccataattg

SEQ ID NO: 47000 - DNA, 22 bp, Artificial Sequence
  chemically synthesized
tgaatgagtccataattgcatt

SEQ ID NO: 47001 - DNA, 22 bp, Artificial Sequence
  chemically synthesized
gaatgagtccataattgcattt

SEQ ID NO: 47002 - DNA, 22 bp, Artificial Sequence
  chemically synthesized
aatgagtccataattgcatttt

SEQ ID NO: 47003 - DNA, 22 bp, Artificial Sequence
  chemically synthesized
catttttaaacacaaaaagaga

SEQ ID NO: 47004 - DNA, 22 bp, Artificial Sequence
  chemically synthesized
ttaaacacaaaaagagaaataa

SEQ ID NO: 47005 - DNA, 22 bp, Artificial Sequence
  chemically synthesized
taaacacaaaaagagaaataat

SEQ ID NO: 47006 - DNA, 22 bp, Artificial Sequence
  chemically synthesized
aaacacaaaaagagaaataata

SEQ ID NO: 47007 - DNA, 22 bp, Artificial Sequence
  chemically synthesized
aacacaaaaagagaaataatag

SEQ ID NO: 47008 - DNA, 22 bp, Artificial Sequence
  chemically synthesized
cttcaatcacgggatgcatagt

SEQ ID NO: 47009 - DNA, 22 bp, Artificial Sequence
  chemically synthesized
caatcacgggatgcatagtaat

SEQ ID NO: 47010 - DNA, 22 bp, Artificial Sequence
  chemically synthesized
aatcacgggatgcatagtaatt

SEQ ID NO: 47011 - DNA, 22 bp, Artificial Sequence
  chemically synthesized
ggatttctttgccctaattact

SEQ ID NO: 47012 - DNA, 22 bp, Artificial Sequence
  chemically synthesized
ctttgccctaattactgatgtg

SEQ ID NO: 47013 - DNA, 22 bp, Artificial Sequence
  chemically synthesized
tttgccctaattactgatgtgg

SEQ ID NO: 47014 - DNA, 22 bp, Artificial Sequence
  chemically synthesized
tgccctaattactgatgtggat

SEQ ID NO: 47015 - DNA, 22 bp, Artificial Sequence
  chemically synthesized
gccctaattactgatgtggata

SEQ ID NO: 47016 - DNA, 22 bp, Artificial Sequence
  chemically synthesized
ccctaattactgatgtggataa

SEQ ID NO: 47017 - DNA, 22 bp, Artificial Sequence
  chemically synthesized
attactgatgtggataagccgg

SEQ ID NO: 47018 - DNA, 22 bp, Artificial Sequence
  chemically synthesized
ctgatgtggataagccggtggg

SEQ ID NO: 47019 - DNA, 22 bp, Artificial Sequence
  chemically synthesized
atgtggataagccggtgggcca

SEQ ID NO: 47020 - DNA, 22 bp, Artificial Sequence
  chemically synthesized
aagctgttatcacaccatgtga

SEQ ID NO: 47021 - DNA, 22 bp, Artificial Sequence
  chemically synthesized
ttatcacaccatgtgaaacaca

SEQ ID NO: 47022 - DNA, 22 bp, Artificial Sequence
  chemically synthesized
tcacaccatgtgaaacacacga

SEQ ID NO: 47023 - DNA, 22 bp, Artificial Sequence
  chemically synthesized
tgtaaaaactatgcttggttgc

SEQ ID NO: 47024 - DNA, 22 bp, Artificial Sequence
  chemically synthesized
tgcttggttgcacagcttcaag

SEQ ID NO: 47025 - DNA, 22 bp, Artificial Sequence
  chemically synthesized
ggttgcacagcttcaaggaaag

SEQ ID NO: 47026 - DNA, 22 bp, Artificial Sequence
  chemically synthesized
gttgcacagcttcaaggaaagc

SEQ ID NO: 47027 - DNA, 22 bp, Artificial Sequence
  chemically synthesized
cacagcttcaaggaaagcacta

SEQ ID NO: 47028 - DNA, 22 bp, Artificial Sequence
  chemically synthesized
caaggaaagcactagtctactc

SEQ ID NO: 47029 - DNA, 22 bp, Artificial Sequence
  chemically synthesized
aaggaaagcactagtctactca

SEQ ID NO: 47030 - DNA, 22 bp, Artificial Sequence
  chemically synthesized
gtctactcacttccttttcatt

SEQ ID NO: 47031 - DNA, 22 bp, Artificial Sequence
  chemically synthesized
ctcacttccttttcattcagca

SEQ ID NO: 47032 - DNA, 22 bp, Artificial Sequence
  chemically synthesized
acttccttttcattcagcatgc

SEQ ID NO: 47033 - DNA, 22 bp, Artificial Sequence
  chemically synthesized
ccttttcattcagcatgctatg

SEQ ID NO: 47034 - DNA, 22 bp, Artificial Sequence
  chemically synthesized
cttttcattcagcatgctatgt

SEQ ID NO: 47035 - DNA, 22 bp, Artificial Sequence
  chemically synthesized
ttcattcagcatgctatgtcta

SEQ ID NO: 47036 - DNA, 22 bp, Artificial Sequence
  chemically synthesized
tcattcagcatgctatgtctag

SEQ ID NO: 47037 - DNA, 22 bp, Artificial Sequence
  chemically synthesized
cattcagcatgctatgtctagg

SEQ ID NO: 47038 - DNA, 22 bp, Artificial Sequence
  chemically synthesized
attcagcatgctatgtctaggc

SEQ ID NO: 47039 - DNA, 22 bp, Artificial Sequence
  chemically synthesized
agcatgctatgtctaggcccct

SEQ ID NO: 47040 - DNA, 22 bp, Artificial Sequence
  chemically synthesized
tgtctaggcccctttcatataa

SEQ ID NO: 47041 - DNA, 22 bp, Artificial Sequence
  chemically synthesized
ggcccctttcatataaaatatt

SEQ ID NO: 47042 - DNA, 22 bp, Artificial Sequence
  chemically synthesized
tcatataaaatatttggagctg

SEQ ID NO: 47043 - DNA, 22 bp, Artificial Sequence
  chemically synthesized
catataaaatatttggagctgc

SEQ ID NO: 47044 - DNA, 22 bp, Artificial Sequence
  chemically synthesized
atataaaatatttggagctgcc

SEQ ID NO: 47045 - DNA, 22 bp, Artificial Sequence
  chemically synthesized
ggagctgccattgtaggtagtg

SEQ ID NO: 47046 - DNA, 22 bp, Artificial Sequence
  chemically synthesized
gagctgccattgtaggtagtgc

SEQ ID NO: 47047 - DNA, 22 bp, Artificial Sequence
  chemically synthesized
ccattgtaggtagtgcaggtgg

SEQ ID NO: 47048 - DNA, 22 bp, Artificial Sequence
  chemically synthesized
taggtagtgcaggtggtcttgt

SEQ ID NO: 47049 - DNA, 22 bp, Artificial Sequence
  chemically synthesized
gttcaaagtgtgagtatcacct

SEQ ID NO: 47050 - DNA, 22 bp, Artificial Sequence
  chemically synthesized
ttcaaagtgtgagtatcacctc

SEQ ID NO: 47051 - DNA, 22 bp, Artificial Sequence
  chemically synthesized
aaagtgtgagtatcacctccca

SEQ ID NO: 47052 - DNA, 22 bp, Artificial Sequence
  chemically synthesized
ccactgccaagactgcagctgc

SEQ ID NO: 47053 - DNA, 22 bp, Artificial Sequence
  chemically synthesized
ccaagactgcagctgctttgat

SEQ ID NO: 47054 - DNA, 22 bp, Artificial Sequence
  chemically synthesized
cagctgctttgattttaactga

SEQ ID NO: 47055 - DNA, 22 bp, Artificial Sequence
  chemically synthesized
ctttgattttaactgaggatct

SEQ ID NO: 47056 - DNA, 22 bp, Artificial Sequence
  chemically synthesized
tgattttaactgaggatctaga

SEQ ID NO: 47057 - DNA, 22 bp, Artificial Sequence
  chemically synthesized
gattttaactgaggatctagaa

SEQ ID NO: 47058 - DNA, 22 bp, Artificial Sequence
  chemically synthesized
attttaactgaggatctagaaa

SEQ ID NO: 47059 - DNA, 22 bp, Artificial Sequence
  chemically synthesized
taactgaggatctagaaaagtg

SEQ ID NO: 47060 - DNA, 22 bp, Artificial Sequence
  chemically synthesized
aactgaggatctagaaaagtgc

SEQ ID NO: 47061 - DNA, 22 bp, Artificial Sequence
  chemically synthesized
actgaggatctagaaaagtgct

SEQ ID NO: 47062 - DNA, 22 bp, Artificial Sequence
  chemically synthesized
aggatctagaaaagtgctggga

SEQ ID NO: 47063 - DNA, 22 bp, Artificial Sequence
  chemically synthesized
gaaaagtgctgggaacacaaat

SEQ ID NO: 47064 - DNA, 22 bp, Artificial Sequence
  chemically synthesized
ggaacacaaatatttgctgacc

SEQ ID NO: 47065 - DNA, 22 bp, Artificial Sequence
  chemically synthesized
gctgacctttgtcacaagtagc

SEQ ID NO: 47066 - DNA, 22 bp, Artificial Sequence
  chemically synthesized
ctgacctttgtcacaagtagca

SEQ ID NO: 47067 - DNA, 22 bp, Artificial Sequence
  chemically synthesized
acctttgtcacaagtagcacct

SEQ ID NO: 47068 - DNA, 22 bp, Artificial Sequence
  chemically synthesized
tgtcacaagtagcacctaatct

SEQ ID NO: 47069 - DNA, 22 bp, Artificial Sequence
  chemically synthesized
gtcacaagtagcacctaatctc

SEQ ID NO: 47070 - DNA, 22 bp, Artificial Sequence
  chemically synthesized
tcacaagtagcacctaatctcc

SEQ ID NO: 47071 - DNA, 22 bp, Artificial Sequence
  chemically synthesized
atctccttcctaccagacctgc

SEQ ID NO: 47072 - DNA, 22 bp, Artificial Sequence
  chemically synthesized
cttcctaccagacctgctgcct

SEQ ID NO: 47073 - DNA, 22 bp, Artificial Sequence
  chemically synthesized
cctaccagacctgctgccttat

SEQ ID NO: 47074 - DNA, 22 bp, Artificial Sequence
  chemically synthesized
ctaccagacctgctgccttata

SEQ ID NO: 47075 - DNA, 22 bp, Artificial Sequence
  chemically synthesized
ccagacctgctgccttataaaa

SEQ ID NO: 47076 - DNA, 22 bp, Artificial Sequence
  chemically synthesized
ctgccttataaaatgatgttct

SEQ ID NO: 47077 - DNA, 22 bp, Artificial Sequence
  chemically synthesized
ccttataaaatgatgttctaag

SEQ ID NO: 47078 - DNA, 22 bp, Artificial Sequence
  chemically synthesized
ataaaatgatgttctaagtgta

SEQ ID NO: 47079 - DNA, 22 bp, Artificial Sequence
  chemically synthesized
taaaatgatgttctaagtgtat

SEQ ID NO: 47080 - DNA, 22 bp, Artificial Sequence
  chemically synthesized
taagtgtataatgacttcctct

SEQ ID NO: 47081 - DNA, 22 bp, Artificial Sequence
  chemically synthesized
agtgtataatgacttcctctgc

SEQ ID NO: 47082 - DNA, 22 bp, Artificial Sequence
  chemically synthesized
cctctgcttctgcaactgtgtt

SEQ ID NO: 47083 - DNA, 22 bp, Artificial Sequence
  chemically synthesized
ctctgcttctgcaactgtgttt

SEQ ID NO: 47084 - DNA, 22 bp, Artificial Sequence
  chemically synthesized
tgcttctgcaactgtgttttgg

SEQ ID NO: 47085 - DNA, 22 bp, Artificial Sequence
  chemically synthesized
cttctgcaactgtgttttggaa

SEQ ID NO: 47086 - DNA, 22 bp, Artificial Sequence
  chemically synthesized
ctgcaactgtgttttggaacag

SEQ ID NO: 47087 - DNA, 22 bp, Artificial Sequence
  chemically synthesized
tgcaactgtgttttggaacagg

SEQ ID NO: 47088 - DNA, 22 bp, Artificial Sequence
  chemically synthesized
caactgtgttttggaacaggag

SEQ ID NO: 47089 - DNA, 22 bp, Artificial Sequence
  chemically synthesized
tgttttggaacaggagggtgag

SEQ ID NO: 47090 - DNA, 22 bp, Artificial Sequence
  chemically synthesized
tggaacaggagggtgagattag

SEQ ID NO: 47091 - DNA, 22 bp, Artificial Sequence
  chemically synthesized
ggaacaggagggtgagattagt

SEQ ID NO: 47092 - DNA, 22 bp, Artificial Sequence
  chemically synthesized
gaacaggagggtgagattagta

SEQ ID NO: 47093 - DNA, 22 bp, Artificial Sequence
  chemically synthesized
gtagccacacacactgaaatag

SEQ ID NO: 47094 - DNA, 22 bp, Artificial Sequence
  chemically synthesized
aaatagtcatatgacttccaaa

SEQ ID NO: 47095 - DNA, 22 bp, Artificial Sequence
  chemically synthesized
ccaaagtctgtaatttttaagc

SEQ ID NO: 47096 - DNA, 22 bp, Artificial Sequence
  chemically synthesized
caaagtctgtaatttttaagca

SEQ ID NO: 47097 - DNA, 22 bp, Artificial Sequence
  chemically synthesized
taatttttaagcatatacaaaa

SEQ ID NO: 47098 - DNA, 22 bp, Artificial Sequence
  chemically synthesized
ttaagcatatacaaaatagtga

SEQ ID NO: 47099 - DNA, 22 bp, Artificial Sequence
  chemically synthesized
taagcatatacaaaatagtgaa

SEQ ID NO: 47100 - DNA, 22 bp, Artificial Sequence
  chemically synthesized
aagcatatacaaaatagtgaaa

SEQ ID NO: 47101 - DNA, 22 bp, Artificial Sequence
  chemically synthesized
agcatatacaaaatagtgaaat

SEQ ID NO: 47102 - DNA, 22 bp, Artificial Sequence
  chemically synthesized
ctccatatgtgtataatatgta

SEQ ID NO: 47103 - DNA, 22 bp, Artificial Sequence
  chemically synthesized
tccatatgtgtataatatgtat

SEQ ID NO: 47104 - DNA, 22 bp, Artificial Sequence
  chemically synthesized
catatgtgtataatatgtatat

SEQ ID NO: 47105 - DNA, 22 bp, Artificial Sequence
  chemically synthesized
attttggctgatatctattcta

SEQ ID NO: 47106 - DNA, 22 bp, Artificial Sequence
  chemically synthesized
ttttggctgatatctattctat

SEQ ID NO: 47107 - DNA, 22 bp, Artificial Sequence
  chemically synthesized
tggctgatatctattctatact

SEQ ID NO: 47108 - DNA, 22 bp, Artificial Sequence
  chemically synthesized
ggctgatatctattctatactt

SEQ ID NO: 47109 - DNA, 22 bp, Artificial Sequence
  chemically synthesized
gctgatatctattctatacttc

SEQ ID NO: 47110 - DNA, 22 bp, Artificial Sequence
  chemically synthesized
atatctattctatacttctttg

SEQ ID NO: 47111 - DNA, 22 bp, Artificial Sequence
  chemically synthesized
ttctatacttctttgaaatagt

SEQ ID NO: 47112 - DNA, 22 bp, Artificial Sequence
  chemically synthesized
tatacttctttgaaatagtgat

SEQ ID NO: 47113 - DNA, 22 bp, Artificial Sequence
  chemically synthesized
tacttctttgaaatagtgattt

SEQ ID NO: 47114 - DNA, 22 bp, Artificial Sequence
  chemically synthesized
ctttgaaatagtgatttttagt

SEQ ID NO: 47115 - DNA, 22 bp, Artificial Sequence
  chemically synthesized
tttgaaatagtgatttttagta

SEQ ID NO: 47116 - DNA, 22 bp, Artificial Sequence
  chemically synthesized
tgaaatagtgatttttagtaaa

SEQ ID NO: 47117 - DNA, 22 bp, Artificial Sequence
  chemically synthesized
gaaatagtgatttttagtaaat

SEQ ID NO: 47118 - DNA, 22 bp, Artificial Sequence
  chemically synthesized
aaatagtgatttttagtaaatt

SEQ ID NO: 47119 - DNA, 22 bp, Artificial Sequence
  chemically synthesized
ttagtaaattggcagtgttgcc

SEQ ID NO: 47120 - DNA, 22 bp, Artificial Sequence
  chemically synthesized
tagtaaattggcagtgttgcca

SEQ ID NO: 47121 - DNA, 22 bp, Artificial Sequence
  chemically synthesized
agtaaattggcagtgttgccag

SEQ ID NO: 47122 - DNA, 22 bp, Artificial Sequence
  chemically synthesized
gtaaattggcagtgttgccaga

SEQ ID NO: 47123 - DNA, 22 bp, Artificial Sequence
  chemically synthesized
gcagtgttgccagatgacgact

SEQ ID NO: 47124 - DNA, 22 bp, Artificial Sequence
  chemically synthesized
ccagatgacgacttagagtttt

SEQ ID NO: 47125 - DNA, 22 bp, Artificial Sequence
  chemically synthesized
agagttttaaccacctcattgt

SEQ ID NO: 47126 - DNA, 22 bp, Artificial Sequence
  chemically synthesized
gagttttaaccacctcattgtt

SEQ ID NO: 47127 - DNA, 22 bp, Artificial Sequence
  chemically synthesized
taaccacctcattgttatatgt

SEQ ID NO: 47128 - DNA, 22 bp, Artificial Sequence
  chemically synthesized
aaccacctcattgttatatgta

SEQ ID NO: 47129 - DNA, 22 bp, Artificial Sequence
  chemically synthesized
accacctcattgttatatgtac

SEQ ID NO: 47130 - DNA, 22 bp, Artificial Sequence
  chemically synthesized
attgttatatgtaccatggtag

SEQ ID NO: 47131 - DNA, 22 bp, Artificial Sequence
  chemically synthesized
ttatatgtaccatggtagctca

SEQ ID NO: 47132 - DNA, 22 bp, Artificial Sequence
  chemically synthesized
tatgtaccatggtagctcatct

SEQ ID NO: 47133 - DNA, 22 bp, Artificial Sequence
  chemically synthesized
atcttttctttcaggtgaaagt

SEQ ID NO: 47134 - DNA, 22 bp, Artificial Sequence
  chemically synthesized
ttctttcaggtgaaagttgtga

SEQ ID NO: 47135 - DNA, 22 bp, Artificial Sequence
  chemically synthesized
tctttcaggtgaaagttgtgat

SEQ ID NO: 47136 - DNA, 22 bp, Artificial Sequence
  chemically synthesized
ctttcaggtgaaagttgtgata

SEQ ID NO: 47137 - DNA, 22 bp, Artificial Sequence
  chemically synthesized
tttcaggtgaaagttgtgatac

SEQ ID NO: 47138 - DNA, 22 bp, Artificial Sequence
  chemically synthesized
tcaggtgaaagttgtgatactt

SEQ ID NO: 47139 - DNA, 22 bp, Artificial Sequence
  chemically synthesized
caggtgaaagttgtgatacttt

SEQ ID NO: 47140 - DNA, 22 bp, Artificial Sequence
  chemically synthesized
aggtgaaagttgtgatactttg

SEQ ID NO: 47141 - DNA, 22 bp, Artificial Sequence
  chemically synthesized
tgatactttgtcctcacgctaa

SEQ ID NO: 47142 - DNA, 22 bp, Artificial Sequence
  chemically synthesized
tgtcctcacgctaaacatagcc

SEQ ID NO: 47143 - DNA, 22 bp, Artificial Sequence
  chemically synthesized
gtcctcacgctaaacatagccc

SEQ ID NO: 47144 - DNA, 22 bp, Artificial Sequence
  chemically synthesized
tcctcacgctaaacatagcccc

SEQ ID NO: 47145 - DNA, 22 bp, Artificial Sequence
  chemically synthesized
acgctaaacatagcccccatgt

SEQ ID NO: 47146 - DNA, 22 bp, Artificial Sequence
  chemically synthesized
aacatagcccccatgttgttcc

SEQ ID NO: 47147 - DNA, 22 bp, Artificial Sequence
  chemically synthesized
ttccaggaaaatagagatcaat

SEQ ID NO: 47148 - DNA, 22 bp, Artificial Sequence
  chemically synthesized
caggaaaatagagatcaataaa

SEQ ID NO: 47149 - DNA, 22 bp, Artificial Sequence
  chemically synthesized
gtttgaaagtgaaggttaagtt

SEQ ID NO: 47150 - DNA, 22 bp, Artificial Sequence
  chemically synthesized
tttgaaagtgaaggttaagttc

SEQ ID NO: 47151 - DNA, 22 bp, Artificial Sequence
  chemically synthesized
gaaagtgaaggttaagttcaaa

SEQ ID NO: 47152 - DNA, 22 bp, Artificial Sequence
  chemically synthesized
aaagtgaaggttaagttcaaat

SEQ ID NO: 47153 - DNA, 22 bp, Artificial Sequence
  chemically synthesized
agttcaaattcaatgacctacg

SEQ ID NO: 47154 - DNA, 22 bp, Artificial Sequence
  chemically synthesized
aaattcaatgacctacgctgtg

SEQ ID NO: 47155 - DNA, 22 bp, Artificial Sequence
  chemically synthesized
aatgacctacgctgtggtaaaa

SEQ ID NO: 47156 - DNA, 22 bp, Artificial Sequence
  chemically synthesized
cgctgtggtaaaacgatcattc

SEQ ID NO: 47157 - DNA, 22 bp, Artificial Sequence
  chemically synthesized
tggtaaaacgatcattcattaa

SEQ ID NO: 47158 - DNA, 22 bp, Artificial Sequence
  chemically synthesized
attaatgatattaagtattttc

SEQ ID NO: 47159 - DNA, 22 bp, Artificial Sequence
  chemically synthesized
atgatattaagtattttctttt

SEQ ID NO: 47160 - DNA, 22 bp, Artificial Sequence
  chemically synthesized
agtattttcttttttaatgtca

SEQ ID NO: 47161 - DNA, 22 bp, Artificial Sequence
  chemically synthesized
tcttttttaatgtcagaataaa

SEQ ID NO: 47162 - DNA, 22 bp, Artificial Sequence
  chemically synthesized
cttttttaatgtcagaataaaa

SEQ ID NO: 47163 - DNA, 22 bp, Artificial Sequence
  chemically synthesized
ttttttaatgtcagaataaaac

SEQ ID NO: 47164 - DNA, 22 bp, Artificial Sequence
  chemically synthesized
ttttaatgtcagaataaaacca

SEQ ID NO: 47165 - DNA, 22 bp, Artificial Sequence
  chemically synthesized
tttaatgtcagaataaaaccat

SEQ ID NO: 47166 - DNA, 22 bp, Artificial Sequence
  chemically synthesized
ttaatgtcagaataaaaccatt

SEQ ID NO: 47167 - DNA, 22 bp, Artificial Sequence
  chemically synthesized
taatgtcagaataaaaccattt

SEQ ID NO: 47168 - DNA, 22 bp, Artificial Sequence
  chemically synthesized
aatgtcagaataaaaccattta

SEQ ID NO: 47169 - DNA, 22 bp, Artificial Sequence
  chemically synthesized
atgtcagaataaaaccatttat

SEQ ID NO: 47170 - DNA, 22 bp, Artificial Sequence
  chemically synthesized
atttgcagatttaaaaatatat

SEQ ID NO: 47171 - DNA, 22 bp, Artificial Sequence
  chemically synthesized
tttgcagatttaaaaatatata

SEQ ID NO: 47172 - DNA, 22 bp, Artificial Sequence
  chemically synthesized
gcagatttaaaaatatatatgt

SEQ ID NO: 47173 - DNA, 22 bp, Artificial Sequence
  chemically synthesized
cagatttaaaaatatatatgtg

SEQ ID NO: 47174 - DNA, 22 bp, Artificial Sequence
  chemically synthesized
aaaaatatatatgtgtatgtaa

SEQ ID NO: 47175 - DNA, 22 bp, Artificial Sequence
  chemically synthesized
aaaatatatatgtgtatgtaaa

SEQ ID NO: 47176 - DNA, 22 bp, Artificial Sequence
  chemically synthesized
cttggtttatacctcaaatatg

SEQ ID NO: 47177 - DNA, 22 bp, Artificial Sequence
  chemically synthesized
ggtttatacctcaaatatgaaa

SEQ ID NO: 47178 - DNA, 22 bp, Artificial Sequence
  chemically synthesized
gtttatacctcaaatatgaaaa

SEQ ID NO: 47179 - DNA, 22 bp, Artificial Sequence
  chemically synthesized
atacctcaaatatgaaaatagg

SEQ ID NO: 47180 - DNA, 22 bp, Artificial Sequence
  chemically synthesized
tacctcaaatatgaaaatagga

SEQ ID NO: 47181 - DNA, 22 bp, Artificial Sequence
  chemically synthesized
aaatatgaaaataggaatgacc

SEQ ID NO: 47182 - DNA, 22 bp, Artificial Sequence
  chemically synthesized
tctctatgctcttgcattcact

SEQ ID NO: 47183 - DNA, 22 bp, Artificial Sequence
  chemically synthesized
tatgctcttgcattcacttata

SEQ ID NO: 47184 - DNA, 22 bp, Artificial Sequence
  chemically synthesized
tgctcttgcattcacttatatt

SEQ ID NO: 47185 - DNA, 22 bp, Artificial Sequence
  chemically synthesized
ttgcattcacttatattctagc

SEQ ID NO: 47186 - DNA, 22 bp, Artificial Sequence
  chemically synthesized
gcattcacttatattctagctt

SEQ ID NO: 47187 - DNA, 22 bp, Artificial Sequence
  chemically synthesized
cattcacttatattctagcttg

SEQ ID NO: 47188 - DNA, 22 bp, Artificial Sequence
  chemically synthesized
acttatattctagcttgttaag

SEQ ID NO: 47189 - DNA, 22 bp, Artificial Sequence
  chemically synthesized
atattctagcttgttaagagag

SEQ ID NO: 47190 - DNA, 22 bp, Artificial Sequence
  chemically synthesized
tattctagcttgttaagagaga

SEQ ID NO: 47191 - DNA, 22 bp, Artificial Sequence
  chemically synthesized
tagcttgttaagagagaagttt

SEQ ID NO: 47192 - DNA, 22 bp, Artificial Sequence
  chemically synthesized
gcttgttaagagagaagtttgg

SEQ ID NO: 47193 - DNA, 22 bp, Artificial Sequence
  chemically synthesized
gttaagagagaagtttggggca

SEQ ID NO: 47194 - DNA, 22 bp, Artificial Sequence
  chemically synthesized
ttaagagagaagtttggggcaa

SEQ ID NO: 47195 - DNA, 22 bp, Artificial Sequence
  chemically synthesized
agagagaagtttggggcaaaat

SEQ ID NO: 47196 - DNA, 22 bp, Artificial Sequence
  chemically synthesized
ggggcaaaatgtgctttataaa

SEQ ID NO: 47197 - DNA, 22 bp, Artificial Sequence
  chemically synthesized
gggcaaaatgtgctttataaat

SEQ ID NO: 47198 - DNA, 22 bp, Artificial Sequence
  chemically synthesized
tataaatagtaaaaactgaggt

SEQ ID NO: 47199 - DNA, 22 bp, Artificial Sequence
  chemically synthesized
ataaatagtaaaaactgaggta

SEQ ID NO: 47200 - DNA, 22 bp, Artificial Sequence
  chemically synthesized
taaatagtaaaaactgaggtaa

SEQ ID NO: 47201 - DNA, 22 bp, Artificial Sequence
  chemically synthesized
aggtaaactatagcacaaagtg

SEQ ID NO: 47202 - DNA, 22 bp, Artificial Sequence
  chemically synthesized
tagcacaaagtgtgctatataa

SEQ ID NO: 47203 - DNA, 22 bp, Artificial Sequence
  chemically synthesized
tataaacagtaaaaaccgaggt

SEQ ID NO: 47204 - DNA, 22 bp, Artificial Sequence
  chemically synthesized
aaatggtgttggaatataagaa

SEQ ID NO: 47205 - DNA, 22 bp, Artificial Sequence
  chemically synthesized
gaatataagaaatagcagtaaa

SEQ ID NO: 47206 - DNA, 22 bp, Artificial Sequence
  chemically synthesized
ctcacagcaagacagtacaggg

SEQ ID NO: 47207 - DNA, 22 bp, Artificial Sequence
  chemically synthesized
acagcaagacagtacagggaaa

SEQ ID NO: 47208 - DNA, 22 bp, Artificial Sequence
  chemically synthesized
gagggacaaagatttacttaca

SEQ ID NO: 47209 - DNA, 22 bp, Artificial Sequence
  chemically synthesized
acttacaatcaggcctcaacca

SEQ ID NO: 47210 - DNA, 22 bp, Artificial Sequence
  chemically synthesized
cttacaatcaggcctcaaccaa

SEQ ID NO: 47211 - DNA, 22 bp, Artificial Sequence
  chemically synthesized
acaatcaggcctcaaccaatat

SEQ ID NO: 47212 - DNA, 22 bp, Artificial Sequence
  chemically synthesized
caatcaggcctcaaccaatatg

SEQ ID NO: 47213 - DNA, 22 bp, Artificial Sequence
  chemically synthesized
aaccaatatgagatcgactttc

SEQ ID NO: 47214 - DNA, 22 bp, Artificial Sequence
  chemically synthesized
tcttttattgatatatgacgtg

SEQ ID NO: 47215 - DNA, 22 bp, Artificial Sequence
  chemically synthesized
cttttattgatatatgacgtgt

SEQ ID NO: 47216 - DNA, 22 bp, Artificial Sequence
  chemically synthesized
ttttattgatatatgacgtgtt

SEQ ID NO: 47217 - DNA, 22 bp, Artificial Sequence
  chemically synthesized
ttattgatatatgacgtgttta

SEQ ID NO: 47218 - DNA, 22 bp, Artificial Sequence
  chemically synthesized
tattgatatatgacgtgtttat

SEQ ID NO: 47219 - DNA, 22 bp, Artificial Sequence
  chemically synthesized
attgatatatgacgtgtttata

SEQ ID NO: 47220 - DNA, 22 bp, Artificial Sequence
  chemically synthesized
ttgatatatgacgtgtttatat

SEQ ID NO: 47221 - DNA, 22 bp, Artificial Sequence
  chemically synthesized
atatatgacgtgtttatatgta

SEQ ID NO: 47222 - DNA, 22 bp, Artificial Sequence
  chemically synthesized
atatgtatcaggtacatgtgac

SEQ ID NO: 47223 - DNA, 22 bp, Artificial Sequence
  chemically synthesized
tatgtatcaggtacatgtgaca

SEQ ID NO: 47224 - DNA, 22 bp, Artificial Sequence
  chemically synthesized
tgttacatgcatataatgtata

SEQ ID NO: 47225 - DNA, 22 bp, Artificial Sequence
  chemically synthesized
gttacatgcatataatgtataa

SEQ ID NO: 47226 - DNA, 22 bp, Artificial Sequence
  chemically synthesized
ttacatgcatataatgtataat

SEQ ID NO: 47227 - DNA, 22 bp, Artificial Sequence
  chemically synthesized
catgcatataatgtataatgat

SEQ ID NO: 47228 - DNA, 22 bp, Artificial Sequence
  chemically synthesized
ggggtattcatcacctcaagta

SEQ ID NO: 47229 - DNA, 22 bp, Artificial Sequence
  chemically synthesized
gggtattcatcacctcaagtat

SEQ ID NO: 47230 - DNA, 22 bp, Artificial Sequence
  chemically synthesized
atcacctcaagtatttatcgtt

SEQ ID NO: 47231 - DNA, 22 bp, Artificial Sequence
  chemically synthesized
aagtatttatcgtttctatgtg

SEQ ID NO: 47232 - DNA, 22 bp, Artificial Sequence
  chemically synthesized
atcgtttctatgtgttaggaac

SEQ ID NO: 47233 - DNA, 22 bp, Artificial Sequence
  chemically synthesized
tcgtttctatgtgttaggaaca

SEQ ID NO: 47234 - DNA, 22 bp, Artificial Sequence
  chemically synthesized
ctatgtgttaggaacatttcaa

SEQ ID NO: 47235 - DNA, 22 bp, Artificial Sequence
  chemically synthesized
tatgtgttaggaacatttcaag

SEQ ID NO: 47236 - DNA, 22 bp, Artificial Sequence
  chemically synthesized
tgtgttaggaacatttcaagac

SEQ ID NO: 47237 - DNA, 22 bp, Artificial Sequence
  chemically synthesized
ggaacatttcaagacctttctt

SEQ ID NO: 47238 - DNA, 22 bp, Artificial Sequence
  chemically synthesized
caagacctttcttctactattt

SEQ ID NO: 47239 - DNA, 22 bp, Artificial Sequence
  chemically synthesized
aagacctttcttctactatttt

SEQ ID NO: 47240 - DNA, 22 bp, Artificial Sequence
  chemically synthesized
tcttctactattttgaaatata

SEQ ID NO: 47241 - DNA, 22 bp, Artificial Sequence
  chemically synthesized
cttctactattttgaaatatac

SEQ ID NO: 47242 - DNA, 22 bp, Artificial Sequence
  chemically synthesized
ttctactattttgaaatataca

SEQ ID NO: 47243 - DNA, 22 bp, Artificial Sequence
  chemically synthesized
ctactattttgaaatatacaat

SEQ ID NO: 47244 - DNA, 22 bp, Artificial Sequence
  chemically synthesized
tactattttgaaatatacaata

SEQ ID NO: 47245 - DNA, 22 bp, Artificial Sequence
  chemically synthesized
ctattttgaaatatacaatata

SEQ ID NO: 47246 - DNA, 22 bp, Artificial Sequence
  chemically synthesized
ttttgaaatatacaatatattg

SEQ ID NO: 47247 - DNA, 22 bp, Artificial Sequence
  chemically synthesized
tgaaatatacaatatattgttt

SEQ ID NO: 47248 - DNA, 22 bp, Artificial Sequence
  chemically synthesized
gaaatatacaatatattgtttt

SEQ ID NO: 47249 - DNA, 22 bp, Artificial Sequence
  chemically synthesized
aaatatacaatatattgttttt

SEQ ID NO: 47250 - DNA, 22 bp, Artificial Sequence
  chemically synthesized
tttttaactataatcaccctac

SEQ ID NO: 47251 - DNA, 22 bp, Artificial Sequence
  chemically synthesized
ttaactataatcaccctacttt

SEQ ID NO: 47252 - DNA, 22 bp, Artificial Sequence
  chemically synthesized
taactataatcaccctactttg

SEQ ID NO: 47253 - DNA, 22 bp, Artificial Sequence
  chemically synthesized
aactataatcaccctactttgc

SEQ ID NO: 47254 - DNA, 22 bp, Artificial Sequence
  chemically synthesized
actataatcaccctactttgct

SEQ ID NO: 47255 - DNA, 22 bp, Artificial Sequence
  chemically synthesized
taatcaccctactttgctattg

SEQ ID NO: 47256 - DNA, 22 bp, Artificial Sequence
  chemically synthesized
ctttgctattgaacatcagaac

SEQ ID NO: 47257 - DNA, 22 bp, Artificial Sequence
  chemically synthesized
tgctattgaacatcagaacata

SEQ ID NO: 47258 - DNA, 22 bp, Artificial Sequence
  chemically synthesized
gctattgaacatcagaacatat

SEQ ID NO: 47259 - DNA, 22 bp, Artificial Sequence
  chemically synthesized
ctattgaacatcagaacatatt

SEQ ID NO: 47260 - DNA, 22 bp, Artificial Sequence
  chemically synthesized
ttgaacatcagaacatattcct

SEQ ID NO: 47261 - DNA, 22 bp, Artificial Sequence
  chemically synthesized
aacatcagaacatattccttct

SEQ ID NO: 47262 - DNA, 22 bp, Artificial Sequence
  chemically synthesized
cttctatctaactgcctgtttc

SEQ ID NO: 47263 - DNA, 22 bp, Artificial Sequence
  chemically synthesized
ctatctaactgcctgtttccat

SEQ ID NO: 47264 - DNA, 22 bp, Artificial Sequence
  chemically synthesized
tatctaactgcctgtttccatt

SEQ ID NO: 47265 - DNA, 22 bp, Artificial Sequence
  chemically synthesized
tctaactgcctgtttccattaa

SEQ ID NO: 47266 - DNA, 22 bp, Artificial Sequence
  chemically synthesized
actgcctgtttccattaaccaa

SEQ ID NO: 47267 - DNA, 22 bp, Artificial Sequence
  chemically synthesized
cctgtttccattaaccaacttc

SEQ ID NO: 47268 - DNA, 22 bp, Artificial Sequence
  chemically synthesized
tttccattaaccaacttctctt

SEQ ID NO: 47269 - DNA, 22 bp, Artificial Sequence
  chemically synthesized
ccattaaccaacttctcttcgt

SEQ ID NO: 47270 - DNA, 22 bp, Artificial Sequence
  chemically synthesized
cattaaccaacttctcttcgtc

SEQ ID NO: 47271 - DNA, 22 bp, Artificial Sequence
  chemically synthesized
accaacttctcttcgtctccct

SEQ ID NO: 47272 - DNA, 22 bp, Artificial Sequence
  chemically synthesized
ctcttcgtctcccttcctccca

SEQ ID NO: 47273 - DNA, 22 bp, Artificial Sequence
  chemically synthesized
tcttcgtctcccttcctcccat

SEQ ID NO: 47274 - DNA, 22 bp, Artificial Sequence
  chemically synthesized
ttcgtctcccttcctcccataa

SEQ ID NO: 47275 - DNA, 22 bp, Artificial Sequence
  chemically synthesized
cgtctcccttcctcccataacg

SEQ ID NO: 47276 - DNA, 22 bp, Artificial Sequence
  chemically synthesized
gtctcccttcctcccataacgt

SEQ ID NO: 47277 - DNA, 22 bp, Artificial Sequence
  chemically synthesized
ccttcctcccataacgtacaca

SEQ ID NO: 47278 - DNA, 22 bp, Artificial Sequence
  chemically synthesized
cctcccataacgtacacacctt

SEQ ID NO: 47279 - DNA, 22 bp, Artificial Sequence
  chemically synthesized
ctcccataacgtacacaccttt

SEQ ID NO: 47280 - DNA, 22 bp, Artificial Sequence
  chemically synthesized
ccataacgtacacacctttctc

SEQ ID NO: 47281 - DNA, 22 bp, Artificial Sequence
  chemically synthesized
tctctacctctggtttctgtca

SEQ ID NO: 47282 - DNA, 22 bp, Artificial Sequence
  chemically synthesized
ctctacctctggtttctgtcat

SEQ ID NO: 47283 - DNA, 22 bp, Artificial Sequence
  chemically synthesized
tctacctctggtttctgtcatt

SEQ ID NO: 47284 - DNA, 22 bp, Artificial Sequence
  chemically synthesized
tacctctggtttctgtcattct

SEQ ID NO: 47285 - DNA, 22 bp, Artificial Sequence
  chemically synthesized
cctctggtttctgtcattctac

SEQ ID NO: 47286 - DNA, 22 bp, Artificial Sequence
  chemically synthesized
tggtttctgtcattctactctc

SEQ ID NO: 47287 - DNA, 22 bp, Artificial Sequence
  chemically synthesized
gtttctgtcattctactctcta

SEQ ID NO: 47288 - DNA, 22 bp, Artificial Sequence
  chemically synthesized
ctgtcattctactctctaccta

SEQ ID NO: 47289 - DNA, 22 bp, Artificial Sequence
  chemically synthesized
tgtcattctactctctacctac

SEQ ID NO: 47290 - DNA, 22 bp, Artificial Sequence
  chemically synthesized
tcattctactctctacctacat

SEQ ID NO: 47291 - DNA, 22 bp, Artificial Sequence
  chemically synthesized
tactctctacctacatgatatt

SEQ ID NO: 47292 - DNA, 22 bp, Artificial Sequence
  chemically synthesized
ctctctacctacatgatattaa

SEQ ID NO: 47293 - DNA, 22 bp, Artificial Sequence
  chemically synthesized
tctacctacatgatattaactt

SEQ ID NO: 47294 - DNA, 22 bp, Artificial Sequence
  chemically synthesized
tacctacatgatattaactttt

SEQ ID NO: 47295 - DNA, 22 bp, Artificial Sequence
  chemically synthesized
cctacatgatattaactttttt

SEQ ID NO: 47296 - DNA, 22 bp, Artificial Sequence
  chemically synthesized
catgatattaacttttttagct

SEQ ID NO: 47297 - DNA, 22 bp, Artificial Sequence
  chemically synthesized
acttttttagctcccacatatc

SEQ ID NO: 47298 - DNA, 22 bp, Artificial Sequence
  chemically synthesized
ttttagctcccacatatcagtg

SEQ ID NO: 47299 - DNA, 22 bp, Artificial Sequence
  chemically synthesized
tttagctcccacatatcagtga

SEQ ID NO: 47300 - DNA, 22 bp, Artificial Sequence
  chemically synthesized
ttagctcccacatatcagtgag

SEQ ID NO: 47301 - DNA, 22 bp, Artificial Sequence
  chemically synthesized
tagctcccacatatcagtgaga

SEQ ID NO: 47302 - DNA, 22 bp, Artificial Sequence
  chemically synthesized
agctcccacatatcagtgagaa

SEQ ID NO: 47303 - DNA, 22 bp, Artificial Sequence
  chemically synthesized
gctcccacatatcagtgagaac

SEQ ID NO: 47304 - DNA, 22 bp, Artificial Sequence
  chemically synthesized
ccacatatcagtgagaacatgc

SEQ ID NO: 47305 - DNA, 22 bp, Artificial Sequence
  chemically synthesized
gtctttctatgcctggcttatt

SEQ ID NO: 47306 - DNA, 22 bp, Artificial Sequence
  chemically synthesized
tctttctatgcctggcttattt

SEQ ID NO: 47307 - DNA, 22 bp, Artificial Sequence
  chemically synthesized
tctatgcctggcttatttcgtt

SEQ ID NO: 47308 - DNA, 22 bp, Artificial Sequence
  chemically synthesized
ctatgcctggcttatttcgttt

SEQ ID NO: 47309 - DNA, 22 bp, Artificial Sequence
  chemically synthesized
tatgcctggcttatttcgttta

SEQ ID NO: 47310 - DNA, 22 bp, Artificial Sequence
  chemically synthesized
tgcctggcttatttcgtttaac

SEQ ID NO: 47311 - DNA, 22 bp, Artificial Sequence
  chemically synthesized
gcttatttcgtttaacataatg

SEQ ID NO: 47312 - DNA, 22 bp, Artificial Sequence
  chemically synthesized
atttcgtttaacataatgactt

SEQ ID NO: 47313 - DNA, 22 bp, Artificial Sequence
  chemically synthesized
tttcgtttaacataatgacttc

SEQ ID NO: 47314 - DNA, 22 bp, Artificial Sequence
  chemically synthesized
cgtttaacataatgacttccag

SEQ ID NO: 47315 - DNA, 22 bp, Artificial Sequence
  chemically synthesized
gtttaacataatgacttccagt

SEQ ID NO: 47316 - DNA, 22 bp, Artificial Sequence
  chemically synthesized
aacataatgacttccagtttca

SEQ ID NO: 47317 - DNA, 22 bp, Artificial Sequence
  chemically synthesized
acataatgacttccagtttcat

SEQ ID NO: 47318 - DNA, 22 bp, Artificial Sequence
  chemically synthesized
ccagtttcatccatgttgctgc

SEQ ID NO: 47319 - DNA, 22 bp, Artificial Sequence
  chemically synthesized
cagtttcatccatgttgctgca

SEQ ID NO: 47320 - DNA, 22 bp, Artificial Sequence
  chemically synthesized
catccatgttgctgcaaatgaa

SEQ ID NO: 47321 - DNA, 22 bp, Artificial Sequence
  chemically synthesized
atccatgttgctgcaaatgaaa

SEQ ID NO: 47322 - DNA, 22 bp, Artificial Sequence
  chemically synthesized
ctgcaaatgaaatgattttata

SEQ ID NO: 47323 - DNA, 22 bp, Artificial Sequence
  chemically synthesized
caaatgaaatgattttatattt

SEQ ID NO: 47324 - DNA, 22 bp, Artificial Sequence
  chemically synthesized
tatatttgtatggttgaataat

SEQ ID NO: 47325 - DNA, 22 bp, Artificial Sequence
  chemically synthesized
atatttgtatggttgaataata

SEQ ID NO: 47326 - DNA, 22 bp, Artificial Sequence
  chemically synthesized
tatttgtatggttgaataatat

SEQ ID NO: 47327 - DNA, 22 bp, Artificial Sequence
  chemically synthesized
gtatggttgaataatattcaat

SEQ ID NO: 47328 - DNA, 22 bp, Artificial Sequence
  chemically synthesized
tatggttgaataatattcaatt

SEQ ID NO: 47329 - DNA, 22 bp, Artificial Sequence
  chemically synthesized
aataatattcaattgtgtgtat

SEQ ID NO: 47330 - DNA, 22 bp, Artificial Sequence
  chemically synthesized
aattgtgtgtatacaccacatt

SEQ ID NO: 47331 - DNA, 22 bp, Artificial Sequence
  chemically synthesized
tgtgtatacaccacattttctt

SEQ ID NO: 47332 - DNA, 22 bp, Artificial Sequence
  chemically synthesized
tcttcattcatccattgatgga

SEQ ID NO: 47333 - DNA, 22 bp, Artificial Sequence
  chemically synthesized
cttcattcatccattgatggac

SEQ ID NO: 47334 - DNA, 22 bp, Artificial Sequence
  chemically synthesized
ttcattcatccattgatggaca

SEQ ID NO: 47335 - DNA, 22 bp, Artificial Sequence
  chemically synthesized
cattcatccattgatggacact

SEQ ID NO: 47336 - DNA, 22 bp, Artificial Sequence
  chemically synthesized
attcatccattgatggacactt

SEQ ID NO: 47337 - DNA, 22 bp, Artificial Sequence
  chemically synthesized
atccattgatggacacttaggt

SEQ ID NO: 47338 - DNA, 22 bp, Artificial Sequence
  chemically synthesized
atggacacttaggttgattcca

SEQ ID NO: 47339 - DNA, 22 bp, Artificial Sequence
  chemically synthesized
aggttgattccatatctttgct

SEQ ID NO: 47340 - DNA, 22 bp, Artificial Sequence
  chemically synthesized
ggttgattccatatctttgcta

SEQ ID NO: 47341 - DNA, 22 bp, Artificial Sequence
  chemically synthesized
attccatatctttgctaatgtg

SEQ ID NO: 47342 - DNA, 22 bp, Artificial Sequence
  chemically synthesized
catatctttgctaatgtgaatc

SEQ ID NO: 47343 - DNA, 22 bp, Artificial Sequence
  chemically synthesized
tgctaatgtgaatcgtgctgca

SEQ ID NO: 47344 - DNA, 22 bp, Artificial Sequence
  chemically synthesized
gctaatgtgaatcgtgctgcaa

SEQ ID NO: 47345 - DNA, 22 bp, Artificial Sequence
  chemically synthesized
ctaatgtgaatcgtgctgcaat

SEQ ID NO: 47346 - DNA, 22 bp, Artificial Sequence
  chemically synthesized
atgtgaatcgtgctgcaataaa

SEQ ID NO: 47347 - DNA, 22 bp, Artificial Sequence
  chemically synthesized
caataaacagtgtggtaccagt

SEQ ID NO: 47348 - DNA, 22 bp, Artificial Sequence
  chemically synthesized
tttattattctgaattcttttc

SEQ ID NO: 47349 - DNA, 22 bp, Artificial Sequence
  chemically synthesized
attattctgaattcttttcctt

SEQ ID NO: 47350 - DNA, 22 bp, Artificial Sequence
  chemically synthesized
ttattctgaattcttttccttt

SEQ ID NO: 47351 - DNA, 22 bp, Artificial Sequence
  chemically synthesized
ttctgaattcttttcctttgga

SEQ ID NO: 47352 - DNA, 22 bp, Artificial Sequence
  chemically synthesized
tgaattcttttcctttggataa

SEQ ID NO: 47353 - DNA, 22 bp, Artificial Sequence
  chemically synthesized
aattcttttcctttggataaat

SEQ ID NO: 47354 - DNA, 22 bp, Artificial Sequence
  chemically synthesized
ttttcctttggataaataccca

SEQ ID NO: 47355 - DNA, 22 bp, Artificial Sequence
  chemically synthesized
ttcctttggataaatacccagt

SEQ ID NO: 47356 - DNA, 22 bp, Artificial Sequence
  chemically synthesized
tcctttggataaatacccagta

SEQ ID NO: 47357 - DNA, 22 bp, Artificial Sequence
  chemically synthesized
cctttggataaatacccagtaa

SEQ ID NO: 47358 - DNA, 22 bp, Artificial Sequence
  chemically synthesized
ctttggataaatacccagtaat

SEQ ID NO: 47359 - DNA, 22 bp, Artificial Sequence
  chemically synthesized
tggataaatacccagtaataag

SEQ ID NO: 47360 - DNA, 22 bp, Artificial Sequence
  chemically synthesized
ggataaatacccagtaataaga

SEQ ID NO: 47361 - DNA, 22 bp, Artificial Sequence
  chemically synthesized
gataaatacccagtaataagat

SEQ ID NO: 47362 - DNA, 22 bp, Artificial Sequence
  chemically synthesized
ctggatcttatgatagttcaat

SEQ ID NO: 47363 - DNA, 22 bp, Artificial Sequence
  chemically synthesized
gatcttatgatagttcaatttt

SEQ ID NO: 47364 - DNA, 22 bp, Artificial Sequence
  chemically synthesized
atgatagttcaatttttagctt

SEQ ID NO: 47365 - DNA, 22 bp, Artificial Sequence
  chemically synthesized
tgatagttcaatttttagcttt

SEQ ID NO: 47366 - DNA, 22 bp, Artificial Sequence
  chemically synthesized
aatttttagctttttggtaaat

SEQ ID NO: 47367 - DNA, 22 bp, Artificial Sequence
  chemically synthesized
ttagctttttggtaaatctaca

SEQ ID NO: 47368 - DNA, 22 bp, Artificial Sequence
  chemically synthesized
tagctttttggtaaatctacat

SEQ ID NO: 47369 - DNA, 22 bp, Artificial Sequence
  chemically synthesized
agctttttggtaaatctacata

SEQ ID NO: 47370 - DNA, 22 bp, Artificial Sequence
  chemically synthesized
gctttttggtaaatctacatat

SEQ ID NO: 47371 - DNA, 22 bp, Artificial Sequence
  chemically synthesized
tttggtaaatctacatattgtt

SEQ ID NO: 47372 - DNA, 22 bp, Artificial Sequence
  chemically synthesized
ttggtaaatctacatattgttt

SEQ ID NO: 47373 - DNA, 22 bp, Artificial Sequence
  chemically synthesized
tggtaaatctacatattgtttt

SEQ ID NO: 47374 - DNA, 22 bp, Artificial Sequence
  chemically synthesized
ggtaaatctacatattgttttc

SEQ ID NO: 47375 - DNA, 22 bp, Artificial Sequence
  chemically synthesized
gtaaatctacatattgttttcc

SEQ ID NO: 47376 - DNA, 22 bp, Artificial Sequence
  chemically synthesized
catattgttttccatagtggct

SEQ ID NO: 47377 - DNA, 22 bp, Artificial Sequence
  chemically synthesized
ttttccatagtggctatactaa

SEQ ID NO: 47378 - DNA, 22 bp, Artificial Sequence
  chemically synthesized
tccatagtggctatactaattt

SEQ ID NO: 47379 - DNA, 22 bp, Artificial Sequence
  chemically synthesized
ccatagtggctatactaatttg

SEQ ID NO: 47380 - DNA, 22 bp, Artificial Sequence
  chemically synthesized
catagtggctatactaatttgc

SEQ ID NO: 47381 - DNA, 22 bp, Artificial Sequence
  chemically synthesized
tactaatttgcatgcttaccaa

SEQ ID NO: 47382 - DNA, 22 bp, Artificial Sequence
  chemically synthesized
atttgcatgcttaccaatagtg

SEQ ID NO: 47383 - DNA, 22 bp, Artificial Sequence
  chemically synthesized
gcatgcttaccaatagtgccta

SEQ ID NO: 47384 - DNA, 22 bp, Artificial Sequence
  chemically synthesized
catgcttaccaatagtgcctac

SEQ ID NO: 47385 - DNA, 22 bp, Artificial Sequence
  chemically synthesized
accaatagtgcctacgagtgcc

SEQ ID NO: 47386 - DNA, 22 bp, Artificial Sequence
  chemically synthesized
ccaatagtgcctacgagtgcct

SEQ ID NO: 47387 - DNA, 22 bp, Artificial Sequence
  chemically synthesized
cgagtgccttttccttcacatc

SEQ ID NO: 47388 - DNA, 22 bp, Artificial Sequence
  chemically synthesized
ttccttcacatccttgccagca

SEQ ID NO: 47389 - DNA, 22 bp, Artificial Sequence
  chemically synthesized
tccttcacatccttgccagcat

SEQ ID NO: 47390 - DNA, 22 bp, Artificial Sequence
  chemically synthesized
ccttcacatccttgccagcatg

SEQ ID NO: 47391 - DNA, 22 bp, Artificial Sequence
  chemically synthesized
cttcacatccttgccagcatgt

SEQ ID NO: 47392 - DNA, 22 bp, Artificial Sequence
  chemically synthesized
cacatccttgccagcatgtgtt

SEQ ID NO: 47393 - DNA, 22 bp, Artificial Sequence
  chemically synthesized
acatccttgccagcatgtgtta

SEQ ID NO: 47394 - DNA, 22 bp, Artificial Sequence
  chemically synthesized
gccagcatgtgttatttattta

SEQ ID NO: 47395 - DNA, 22 bp, Artificial Sequence
  chemically synthesized
ccagcatgtgttatttatttat

SEQ ID NO: 47396 - DNA, 22 bp, Artificial Sequence
  chemically synthesized
tttatttattaatttatttaaa

SEQ ID NO: 47397 - DNA, 22 bp, Artificial Sequence
  chemically synthesized
atttattaatttatttaaatca

SEQ ID NO: 47398 - DNA, 22 bp, Artificial Sequence
  chemically synthesized
tttattaatttatttaaatcat

SEQ ID NO: 47399 - DNA, 22 bp, Artificial Sequence
  chemically synthesized
attaatttatttaaatcatgat

SEQ ID NO: 47400 - DNA, 22 bp, Artificial Sequence
  chemically synthesized
ttaatttatttaaatcatgatg

SEQ ID NO: 47401 - DNA, 22 bp, Artificial Sequence
  chemically synthesized
atttatttaaatcatgatgatt

SEQ ID NO: 47402 - DNA, 22 bp, Artificial Sequence
  chemically synthesized
atttaaatcatgatgattctaa

SEQ ID NO: 47403 - DNA, 22 bp, Artificial Sequence
  chemically synthesized
tttaaatcatgatgattctaac

SEQ ID NO: 47404 - DNA, 22 bp, Artificial Sequence
  chemically synthesized
aaatcatgatgattctaactgg

SEQ ID NO: 47405 - DNA, 22 bp, Artificial Sequence
  chemically synthesized
aatcatgatgattctaactggc

SEQ ID NO: 47406 - DNA, 22 bp, Artificial Sequence
  chemically synthesized
taactggcataagatgatatct

SEQ ID NO: 47407 - DNA, 22 bp, Artificial Sequence
  chemically synthesized
actggcataagatgatatctca

SEQ ID NO: 47408 - DNA, 22 bp, Artificial Sequence
  chemically synthesized
gcataagatgatatctcattgt

SEQ ID NO: 47409 - DNA, 22 bp, Artificial Sequence
  chemically synthesized
attgtggttttgatttgcattt

SEQ ID NO: 47410 - DNA, 22 bp, Artificial Sequence
  chemically synthesized
tggttttgatttgcatttctct

SEQ ID NO: 47411 - DNA, 22 bp, Artificial Sequence
  chemically synthesized
tgatttgcatttctctgatgat

SEQ ID NO: 47412 - DNA, 22 bp, Artificial Sequence
  chemically synthesized
gatttgcatttctctgatgatt

SEQ ID NO: 47413 - DNA, 22 bp, Artificial Sequence
  chemically synthesized
atttgcatttctctgatgatta

SEQ ID NO: 47414 - DNA, 22 bp, Artificial Sequence
  chemically synthesized
gcatttctctgatgattagtaa

SEQ ID NO: 47415 - DNA, 22 bp, Artificial Sequence
  chemically synthesized
catttctctgatgattagtaat

SEQ ID NO: 47416 - DNA, 22 bp, Artificial Sequence
  chemically synthesized
ctctgatgattagtaatgttga

SEQ ID NO: 47417 - DNA, 22 bp, Artificial Sequence
  chemically synthesized
tctgatgattagtaatgttgag

SEQ ID NO: 47418 - DNA, 22 bp, Artificial Sequence
  chemically synthesized
tgatgattagtaatgttgagca

SEQ ID NO: 47419 - DNA, 22 bp, Artificial Sequence
  chemically synthesized
atgattagtaatgttgagcaat

SEQ ID NO: 47420 - DNA, 22 bp, Artificial Sequence
  chemically synthesized
gtaatgttgagcaatttcccca

SEQ ID NO: 47421 - DNA, 22 bp, Artificial Sequence
  chemically synthesized
agcaatttccccatacccattg

SEQ ID NO: 47422 - DNA, 22 bp, Artificial Sequence
  chemically synthesized
ccccatacccattgtgcatttg

SEQ ID NO: 47423 - DNA, 22 bp, Artificial Sequence
  chemically synthesized
cccatacccattgtgcatttgt

SEQ ID NO: 47424 - DNA, 22 bp, Artificial Sequence
  chemically synthesized
tgcatttgtatgtcttcttttg

SEQ ID NO: 47425 - DNA, 22 bp, Artificial Sequence
  chemically synthesized
gtatgtcttcttttgaaaaata

SEQ ID NO: 47426 - DNA, 22 bp, Artificial Sequence
  chemically synthesized
tatgtcttcttttgaaaaatat

SEQ ID NO: 47427 - DNA, 22 bp, Artificial Sequence
  chemically synthesized
cttttgaaaaatatcctttgcc

SEQ ID NO: 47428 - DNA, 22 bp, Artificial Sequence
  chemically synthesized
ttttgaaaaatatcctttgcca

SEQ ID NO: 47429 - DNA, 22 bp, Artificial Sequence
  chemically synthesized
ttgaaaaatatcctttgccaat

SEQ ID NO: 47430 - DNA, 22 bp, Artificial Sequence
  chemically synthesized
tgaaaaatatcctttgccaatt

SEQ ID NO: 47431 - DNA, 22 bp, Artificial Sequence
  chemically synthesized
gaaaaatatcctttgccaattt

SEQ ID NO: 47432 - DNA, 22 bp, Artificial Sequence
  chemically synthesized
aaaaatatcctttgccaatttt

SEQ ID NO: 47433 - DNA, 22 bp, Artificial Sequence
  chemically synthesized
tgccaattttttaatgagatta

SEQ ID NO: 47434 - DNA, 22 bp, Artificial Sequence
  chemically synthesized
gccaattttttaatgagattat

SEQ ID NO: 47435 - DNA, 22 bp, Artificial Sequence
  chemically synthesized
ccaattttttaatgagattatt

SEQ ID NO: 47436 - DNA, 22 bp, Artificial Sequence
  chemically synthesized
tttaatgagattatttgttttt

SEQ ID NO: 47437 - DNA, 22 bp, Artificial Sequence
  chemically synthesized
ttaatgagattatttgtttttc

SEQ ID NO: 47438 - DNA, 22 bp, Artificial Sequence
  chemically synthesized
taatgagattatttgtttttcc

SEQ ID NO: 47439 - DNA, 22 bp, Artificial Sequence
  chemically synthesized
aatgagattatttgtttttcca

SEQ ID NO: 47440 - DNA, 22 bp, Artificial Sequence
  chemically synthesized
atgagattatttgtttttccac

SEQ ID NO: 47441 - DNA, 22 bp, Artificial Sequence
  chemically synthesized
tttgtttttccactgttgagtt

SEQ ID NO: 47442 - DNA, 22 bp, Artificial Sequence
  chemically synthesized
gtttttccactgttgagttgtt

SEQ ID NO: 47443 - DNA, 22 bp, Artificial Sequence
  chemically synthesized
tttttccactgttgagttgttt

SEQ ID NO: 47444 - DNA, 22 bp, Artificial Sequence
  chemically synthesized
ttccactgttgagttgtttgag

SEQ ID NO: 47445 - DNA, 22 bp, Artificial Sequence
  chemically synthesized
tccactgttgagttgtttgagt

SEQ ID NO: 47446 - DNA, 22 bp, Artificial Sequence
  chemically synthesized
ccactgttgagttgtttgagtt

SEQ ID NO: 47447 - DNA, 22 bp, Artificial Sequence
  chemically synthesized
cactgttgagttgtttgagttt

SEQ ID NO: 47448 - DNA, 22 bp, Artificial Sequence
  chemically synthesized
ttgagttgtttgagtttcttat

SEQ ID NO: 47449 - DNA, 22 bp, Artificial Sequence
  chemically synthesized
agttgtttgagtttcttatata

SEQ ID NO: 47450 - DNA, 22 bp, Artificial Sequence
  chemically synthesized
tttgagtttcttatatattctg

SEQ ID NO: 47451 - DNA, 22 bp, Artificial Sequence
  chemically synthesized
gagtttcttatatattctggag

SEQ ID NO: 47452 - DNA, 22 bp, Artificial Sequence
  chemically synthesized
agtttcttatatattctggaga

SEQ ID NO: 47453 - DNA, 22 bp, Artificial Sequence
  chemically synthesized
cttatatattctggagattaat

SEQ ID NO: 47454 - DNA, 22 bp, Artificial Sequence
  chemically synthesized
ttatatattctggagattaatt

SEQ ID NO: 47455 - DNA, 22 bp, Artificial Sequence
  chemically synthesized
atatattctggagattaattcc

SEQ ID NO: 47456 - DNA, 22 bp, Artificial Sequence
  chemically synthesized
tatattctggagattaattcct

SEQ ID NO: 47457 - DNA, 22 bp, Artificial Sequence
  chemically synthesized
tggagattaattccttgtcaaa

SEQ ID NO: 47458 - DNA, 22 bp, Artificial Sequence
  chemically synthesized
gagattaattccttgtcaaatg

SEQ ID NO: 47459 - DNA, 22 bp, Artificial Sequence
  chemically synthesized
attccttgtcaaatgtatgcaa

SEQ ID NO: 47460 - DNA, 22 bp, Artificial Sequence
  chemically synthesized
cttgtcaaatgtatgcaaatat

SEQ ID NO: 47461 - DNA, 22 bp, Artificial Sequence
  chemically synthesized
gtcaaatgtatgcaaatatttt

SEQ ID NO: 47462 - DNA, 22 bp, Artificial Sequence
  chemically synthesized
tcaaatgtatgcaaatattttc

SEQ ID NO: 47463 - DNA, 22 bp, Artificial Sequence
  chemically synthesized
tctcgcattcaacagcttgtct

SEQ ID NO: 47464 - DNA, 22 bp, Artificial Sequence
  chemically synthesized
ctcgcattcaacagcttgtctc

SEQ ID NO: 47465 - DNA, 22 bp, Artificial Sequence
  chemically synthesized
tcgcattcaacagcttgtctct

SEQ ID NO: 47466 - DNA, 22 bp, Artificial Sequence
  chemically synthesized
gcattcaacagcttgtctcttc

SEQ ID NO: 47467 - DNA, 22 bp, Artificial Sequence
  chemically synthesized
aacagcttgtctcttcactgtg

SEQ ID NO: 47468 - DNA, 22 bp, Artificial Sequence
  chemically synthesized
gtctcttcactgtgttgattgt

SEQ ID NO: 47469 - DNA, 22 bp, Artificial Sequence
  chemically synthesized
tctcttcactgtgttgattgtt

SEQ ID NO: 47470 - DNA, 22 bp, Artificial Sequence
  chemically synthesized
ttcactgtgttgattgtttcct

SEQ ID NO: 47471 - DNA, 22 bp, Artificial Sequence
  chemically synthesized
cactgtgttgattgtttccttt

SEQ ID NO: 47472 - DNA, 22 bp, Artificial Sequence
  chemically synthesized
actgtgttgattgtttccttta

SEQ ID NO: 47473 - DNA, 22 bp, Artificial Sequence
  chemically synthesized
tgttgattgtttcctttactgt

SEQ ID NO: 47474 - DNA, 22 bp, Artificial Sequence
  chemically synthesized
attgtttcctttactgtgcaga

SEQ ID NO: 47475 - DNA, 22 bp, Artificial Sequence
  chemically synthesized
tttcctttactgtgcagatgta

SEQ ID NO: 47476 - DNA, 22 bp, Artificial Sequence
  chemically synthesized
cctttactgtgcagatgtattt

SEQ ID NO: 47477 - DNA, 22 bp, Artificial Sequence
  chemically synthesized
ctttactgtgcagatgtatttt

SEQ ID NO: 47478 - DNA, 22 bp, Artificial Sequence
  chemically synthesized
tactgtgcagatgtattttagc

SEQ ID NO: 47479 - DNA, 22 bp, Artificial Sequence
  chemically synthesized
actgtgcagatgtattttagct

SEQ ID NO: 47480 - DNA, 22 bp, Artificial Sequence
  chemically synthesized
ctgtgcagatgtattttagctt

SEQ ID NO: 47481 - DNA, 22 bp, Artificial Sequence
  chemically synthesized
tgcagatgtattttagcttaat

SEQ ID NO: 47482 - DNA, 22 bp, Artificial Sequence
  chemically synthesized
tagcttaatatagtcccatttg

SEQ ID NO: 47483 - DNA, 22 bp, Artificial Sequence
  chemically synthesized
agcttaatatagtcccatttgt

SEQ ID NO: 47484 - DNA, 22 bp, Artificial Sequence
  chemically synthesized
gcttaatatagtcccatttgtc

SEQ ID NO: 47485 - DNA, 22 bp, Artificial Sequence
  chemically synthesized
aatatagtcccatttgtctatt

SEQ ID NO: 47486 - DNA, 22 bp, Artificial Sequence
  chemically synthesized
atatagtcccatttgtctattt

SEQ ID NO: 47487 - DNA, 22 bp, Artificial Sequence
  chemically synthesized
gtctatttttgcttttgttgcc

SEQ ID NO: 47488 - DNA, 22 bp, Artificial Sequence
  chemically synthesized
tctatttttgcttttgttgcct

SEQ ID NO: 47489 - DNA, 22 bp, Artificial Sequence
  chemically synthesized
tttttgcttttgttgcctgtgc

SEQ ID NO: 47490 - DNA, 22 bp, Artificial Sequence
  chemically synthesized
ttgcttttgttgcctgtgcttt

SEQ ID NO: 47491 - DNA, 22 bp, Artificial Sequence
  chemically synthesized
tgcttttgttgcctgtgctttt

SEQ ID NO: 47492 - DNA, 22 bp, Artificial Sequence
  chemically synthesized
gcttttgttgcctgtgcttttg

SEQ ID NO: 47493 - DNA, 22 bp, Artificial Sequence
  chemically synthesized
cttttgttgcctgtgcttttga

SEQ ID NO: 47494 - DNA, 22 bp, Artificial Sequence
  chemically synthesized
ttgttgcctgtgcttttgaggt

SEQ ID NO: 47495 - DNA, 22 bp, Artificial Sequence
  chemically synthesized
tgttgcctgtgcttttgaggtc

SEQ ID NO: 47496 - DNA, 22 bp, Artificial Sequence
  chemically synthesized
gttgcctgtgcttttgaggtct

SEQ ID NO: 47497 - DNA, 22 bp, Artificial Sequence
  chemically synthesized
ttgcctgtgcttttgaggtctt

SEQ ID NO: 47498 - DNA, 22 bp, Artificial Sequence
  chemically synthesized
cctgtgcttttgaggtcttggc

SEQ ID NO: 47499 - DNA, 22 bp, Artificial Sequence
  chemically synthesized
tgcttttgaggtcttggccata

SEQ ID NO: 47500 - DNA, 22 bp, Artificial Sequence
  chemically synthesized
ttgaggtcttggccataaaatc

SEQ ID NO: 47501 - DNA, 22 bp, Artificial Sequence
  chemically synthesized
tgaggtcttggccataaaatct

SEQ ID NO: 47502 - DNA, 22 bp, Artificial Sequence
  chemically synthesized
gaggtcttggccataaaatctt

SEQ ID NO: 47503 - DNA, 22 bp, Artificial Sequence
  chemically synthesized
aggtcttggccataaaatcttt

SEQ ID NO: 47504 - DNA, 22 bp, Artificial Sequence
  chemically synthesized
ggccataaaatctttgcccaaa

SEQ ID NO: 47505 - DNA, 22 bp, Artificial Sequence
  chemically synthesized
gccataaaatctttgcccaaag

SEQ ID NO: 47506 - DNA, 22 bp, Artificial Sequence
  chemically synthesized
tgcccaaagccatgtcttgaag

SEQ ID NO: 47507 - DNA, 22 bp, Artificial Sequence
  chemically synthesized
gcccaaagccatgtcttgaagt

SEQ ID NO: 47508 - DNA, 22 bp, Artificial Sequence
  chemically synthesized
cccaaagccatgtcttgaagtg

SEQ ID NO: 47509 - DNA, 22 bp, Artificial Sequence
  chemically synthesized
gaagtgtctcccttatgttttc

SEQ ID NO: 47510 - DNA, 22 bp, Artificial Sequence
  chemically synthesized
aagtgtctcccttatgttttct

SEQ ID NO: 47511 - DNA, 22 bp, Artificial Sequence
  chemically synthesized
ccttatgttttcttttagtagt

SEQ ID NO: 47512 - DNA, 22 bp, Artificial Sequence
  chemically synthesized
atgttttcttttagtagtttta

SEQ ID NO: 47513 - DNA, 22 bp, Artificial Sequence
  chemically synthesized
tgttttcttttagtagttttat

SEQ ID NO: 47514 - DNA, 22 bp, Artificial Sequence
  chemically synthesized
tcttttagtagttttatagttt

SEQ ID NO: 47515 - DNA, 22 bp, Artificial Sequence
  chemically synthesized
cttttagtagttttatagtttt

SEQ ID NO: 47516 - DNA, 22 bp, Artificial Sequence
  chemically synthesized
ttttagtagttttatagtttta

SEQ ID NO: 47517 - DNA, 22 bp, Artificial Sequence
  chemically synthesized
ttagtagttttatagttttaag

SEQ ID NO: 47518 - DNA, 22 bp, Artificial Sequence
  chemically synthesized
tagtagttttatagttttaagt

SEQ ID NO: 47519 - DNA, 22 bp, Artificial Sequence
  chemically synthesized
agtagttttatagttttaagtt

SEQ ID NO: 47520 - DNA, 22 bp, Artificial Sequence
  chemically synthesized
gtagttttatagttttaagttt

SEQ ID NO: 47521 - DNA, 22 bp, Artificial Sequence
  chemically synthesized
tatagttttaagttttatattt

SEQ ID NO: 47522 - DNA, 22 bp, Artificial Sequence
  chemically synthesized
atagttttaagttttatattta

SEQ ID NO: 47523 - DNA, 22 bp, Artificial Sequence
  chemically synthesized
tagttttaagttttatatttaa

SEQ ID NO: 47524 - DNA, 22 bp, Artificial Sequence
  chemically synthesized
taagttttatatttaagtcttt

SEQ ID NO: 47525 - DNA, 22 bp, Artificial Sequence
  chemically synthesized
aagttttatatttaagtcttta

SEQ ID NO: 47526 - DNA, 22 bp, Artificial Sequence
  chemically synthesized
agttttatatttaagtctttaa

SEQ ID NO: 47527 - DNA, 22 bp, Artificial Sequence
  chemically synthesized
tatatttaagtctttaatccat

SEQ ID NO: 47528 - DNA, 22 bp, Artificial Sequence
  chemically synthesized
atatttaagtctttaatccatc

SEQ ID NO: 47529 - DNA, 22 bp, Artificial Sequence
  chemically synthesized
tatttaagtctttaatccatct

SEQ ID NO: 47530 - DNA, 22 bp, Artificial Sequence
  chemically synthesized
aagtctttaatccatcttgaga

SEQ ID NO: 47531 - DNA, 22 bp, Artificial Sequence
  chemically synthesized
agtctttaatccatcttgagag

SEQ ID NO: 47532 - DNA, 22 bp, Artificial Sequence
  chemically synthesized
taatccatcttgagagtacgtt

SEQ ID NO: 47533 - DNA, 22 bp, Artificial Sequence
  chemically synthesized
aatccatcttgagagtacgttt

SEQ ID NO: 47534 - DNA, 22 bp, Artificial Sequence
  chemically synthesized
atccatcttgagagtacgtttt

SEQ ID NO: 47535 - DNA, 22 bp, Artificial Sequence
  chemically synthesized
gagagtacgttttatatggcaa

SEQ ID NO: 47536 - DNA, 22 bp, Artificial Sequence
  chemically synthesized
agagtacgttttatatggcaat

SEQ ID NO: 47537 - DNA, 22 bp, Artificial Sequence
  chemically synthesized
tatatggcaataaataggggtt

SEQ ID NO: 47538 - DNA, 22 bp, Artificial Sequence
  chemically synthesized
atatggcaataaataggggttg

SEQ ID NO: 47539 - DNA, 22 bp, Artificial Sequence
  chemically synthesized
tatggcaataaataggggttgt

SEQ ID NO: 47540 - DNA, 22 bp, Artificial Sequence
  chemically synthesized
tattaggccatttttgcatcta

SEQ ID NO: 47541 - DNA, 22 bp, Artificial Sequence
  chemically synthesized
ggccatttttgcatctattgta

SEQ ID NO: 47542 - DNA, 22 bp, Artificial Sequence
  chemically synthesized
ttgcatctattgtacaaggggt

SEQ ID NO: 47543 - DNA, 22 bp, Artificial Sequence
  chemically synthesized
tgcatctattgtacaaggggtt

SEQ ID NO: 47544 - DNA, 22 bp, Artificial Sequence
  chemically synthesized
gcatctattgtacaaggggttg

SEQ ID NO: 47545 - DNA, 22 bp, Artificial Sequence
  chemically synthesized
catctattgtacaaggggttga

SEQ ID NO: 47546 - DNA, 22 bp, Artificial Sequence
  chemically synthesized
ttgtacaaggggttgagttctt

SEQ ID NO: 47547 - DNA, 22 bp, Artificial Sequence
  chemically synthesized
tacaaggggttgagttcttgat

SEQ ID NO: 47548 - DNA, 22 bp, Artificial Sequence
  chemically synthesized
agttcttgatttgattctccat

SEQ ID NO: 47549 - DNA, 22 bp, Artificial Sequence
  chemically synthesized
ttgatttgattctccatttggt

SEQ ID NO: 47550 - DNA, 22 bp, Artificial Sequence
  chemically synthesized
gatttgattctccatttggttg

SEQ ID NO: 47551 - DNA, 22 bp, Artificial Sequence
  chemically synthesized
atttgattctccatttggttgc

SEQ ID NO: 47552 - DNA, 22 bp, Artificial Sequence
  chemically synthesized
gattctccatttggttgctgtt

SEQ ID NO: 47553 - DNA, 22 bp, Artificial Sequence
  chemically synthesized
attctccatttggttgctgttg

SEQ ID NO: 47554 - DNA, 22 bp, Artificial Sequence
  chemically synthesized
tccatttggttgctgttggtgt

SEQ ID NO: 47555 - DNA, 22 bp, Artificial Sequence
  chemically synthesized
catttggttgctgttggtgtat

SEQ ID NO: 47556 - DNA, 22 bp, Artificial Sequence
  chemically synthesized
ggttgctgttggtgtatagaag

SEQ ID NO: 47557 - DNA, 22 bp, Artificial Sequence
  chemically synthesized
gttgctgttggtgtatagaaga

SEQ ID NO: 47558 - DNA, 22 bp, Artificial Sequence
  chemically synthesized
ctgttggtgtatagaagagtta

SEQ ID NO: 47559 - DNA, 22 bp, Artificial Sequence
  chemically synthesized
ttggtgtatagaagagttactg

SEQ ID NO: 47560 - DNA, 22 bp, Artificial Sequence
  chemically synthesized
gtgtatagaagagttactgatt

SEQ ID NO: 47561 - DNA, 22 bp, Artificial Sequence
  chemically synthesized
ctgatttgtgtgcattcatctt

SEQ ID NO: 47562 - DNA, 22 bp, Artificial Sequence
  chemically synthesized
atttgtgtgcattcatcttgta

SEQ ID NO: 47563 - DNA, 22 bp, Artificial Sequence
  chemically synthesized
gtgtgcattcatcttgtatctg

SEQ ID NO: 47564 - DNA, 22 bp, Artificial Sequence
  chemically synthesized
tgtgcattcatcttgtatctgg

SEQ ID NO: 47565 - DNA, 22 bp, Artificial Sequence
  chemically synthesized
atcttgtatctggaaactttgc

SEQ ID NO: 47566 - DNA, 22 bp, Artificial Sequence
  chemically synthesized
gtatctggaaactttgctgaat

SEQ ID NO: 47567 - DNA, 22 bp, Artificial Sequence
  chemically synthesized
tatctggaaactttgctgaatt

SEQ ID NO: 47568 - DNA, 22 bp, Artificial Sequence
  chemically synthesized
gaaactttgctgaattatttta

SEQ ID NO: 47569 - DNA, 22 bp, Artificial Sequence
  chemically synthesized
tgctgaattattttatcagttc

SEQ ID NO: 47570 - DNA, 22 bp, Artificial Sequence
  chemically synthesized
gctgaattattttatcagttct

SEQ ID NO: 47571 - DNA, 22 bp, Artificial Sequence
  chemically synthesized
ctgaattattttatcagttcta

SEQ ID NO: 47572 - DNA, 22 bp, Artificial Sequence
  chemically synthesized
aattattttatcagttctagga

SEQ ID NO: 47573 - DNA, 22 bp, Artificial Sequence
  chemically synthesized
ttttatcagttctaggagcttt

SEQ ID NO: 47574 - DNA, 22 bp, Artificial Sequence
  chemically synthesized
tatcagttctaggagctttctg

SEQ ID NO: 47575 - DNA, 22 bp, Artificial Sequence
  chemically synthesized
atcagttctaggagctttctgg

SEQ ID NO: 47576 - DNA, 22 bp, Artificial Sequence
  chemically synthesized
tcagttctaggagctttctgga

SEQ ID NO: 47577 - DNA, 22 bp, Artificial Sequence
  chemically synthesized
taggagctttctggaggagtct

SEQ ID NO: 47578 - DNA, 22 bp, Artificial Sequence
  chemically synthesized
ggagctttctggaggagtcttt

SEQ ID NO: 47579 - DNA, 22 bp, Artificial Sequence
  chemically synthesized
tctggaggagtctttagggttt

SEQ ID NO: 47580 - DNA, 22 bp, Artificial Sequence
  chemically synthesized
ctggaggagtctttagggtttt

SEQ ID NO: 47581 - DNA, 22 bp, Artificial Sequence
  chemically synthesized
tggaggagtctttagggtttta

SEQ ID NO: 47582 - DNA, 22 bp, Artificial Sequence
  chemically synthesized
gaggagtctttagggttttaaa

SEQ ID NO: 47583 - DNA, 22 bp, Artificial Sequence
  chemically synthesized
tagggttttaaaggtaaatgat

SEQ ID NO: 47584 - DNA, 22 bp, Artificial Sequence
  chemically synthesized
agggttttaaaggtaaatgatc

SEQ ID NO: 47585 - DNA, 22 bp, Artificial Sequence
  chemically synthesized
gggttttaaaggtaaatgatca

SEQ ID NO: 47586 - DNA, 22 bp, Artificial Sequence
  chemically synthesized
taaaggtaaatgatcatatcat

SEQ ID NO: 47587 - DNA, 22 bp, Artificial Sequence
  chemically synthesized
aaaggtaaatgatcatatcatc

SEQ ID NO: 47588 - DNA, 22 bp, Artificial Sequence
  chemically synthesized
aaggtaaatgatcatatcatca

SEQ ID NO: 47589 - DNA, 22 bp, Artificial Sequence
  chemically synthesized
gacttcctctttactgatttga

SEQ ID NO: 47590 - DNA, 22 bp, Artificial Sequence
  chemically synthesized
acttcctctttactgatttgaa

SEQ ID NO: 47591 - DNA, 22 bp, Artificial Sequence
  chemically synthesized
cctctttactgatttgaatgcc

SEQ ID NO: 47592 - DNA, 22 bp, Artificial Sequence
  chemically synthesized
ctctttactgatttgaatgccc

SEQ ID NO: 47593 - DNA, 22 bp, Artificial Sequence
  chemically synthesized
tttactgatttgaatgcccttt

SEQ ID NO: 47594 - DNA, 22 bp, Artificial Sequence
  chemically synthesized
tactgatttgaatgccctttat

SEQ ID NO: 47595 - DNA, 22 bp, Artificial Sequence
  chemically synthesized
actgatttgaatgccctttatt

SEQ ID NO: 47596 - DNA, 22 bp, Artificial Sequence
  chemically synthesized
ctgatttgaatgccctttattt

SEQ ID NO: 47597 - DNA, 22 bp, Artificial Sequence
  chemically synthesized
atttgaatgccctttatttctt

SEQ ID NO: 47598 - DNA, 22 bp, Artificial Sequence
  chemically synthesized
gaatgccctttatttctttgtt

SEQ ID NO: 47599 - DNA, 22 bp, Artificial Sequence
  chemically synthesized
aatgccctttatttctttgttt

SEQ ID NO: 47600 - DNA, 22 bp, Artificial Sequence
  chemically synthesized
tatttctttgttttgtctgatt

SEQ ID NO: 47601 - DNA, 22 bp, Artificial Sequence
  chemically synthesized
atttctttgttttgtctgattg

SEQ ID NO: 47602 - DNA, 22 bp, Artificial Sequence
  chemically synthesized
tttctttgttttgtctgattgc

SEQ ID NO: 47603 - DNA, 22 bp, Artificial Sequence
  chemically synthesized
ctttgttttgtctgattgccct

SEQ ID NO: 47604 - DNA, 22 bp, Artificial Sequence
  chemically synthesized
tttgttttgtctgattgccctg

SEQ ID NO: 47605 - DNA, 22 bp, Artificial Sequence
  chemically synthesized
tgttttgtctgattgccctggc

SEQ ID NO: 47606 - DNA, 22 bp, Artificial Sequence
  chemically synthesized
gttttgtctgattgccctggct

SEQ ID NO: 47607 - DNA, 22 bp, Artificial Sequence
  chemically synthesized
ttttgtctgattgccctggcta

SEQ ID NO: 47608 - DNA, 22 bp, Artificial Sequence
  chemically synthesized
tgtctgattgccctggctagga

SEQ ID NO: 47609 - DNA, 22 bp, Artificial Sequence
  chemically synthesized
gtctgattgccctggctaggac

SEQ ID NO: 47610 - DNA, 22 bp, Artificial Sequence
  chemically synthesized
tctgattgccctggctaggact

SEQ ID NO: 47611 - DNA, 22 bp, Artificial Sequence
  chemically synthesized
attgccctggctaggacttcca

SEQ ID NO: 47612 - DNA, 22 bp, Artificial Sequence
  chemically synthesized
ccctggctaggacttccagtac

SEQ ID NO: 47613 - DNA, 22 bp, Artificial Sequence
  chemically synthesized
gctaggacttccagtactatgt

SEQ ID NO: 47614 - DNA, 22 bp, Artificial Sequence
  chemically synthesized
ggacttccagtactatgttgaa

SEQ ID NO: 47615 - DNA, 22 bp, Artificial Sequence
  chemically synthesized
ccagtactatgttgaagaggag

SEQ ID NO: 47616 - DNA, 22 bp, Artificial Sequence
  chemically synthesized
cagtactatgttgaagaggagt

SEQ ID NO: 47617 - DNA, 22 bp, Artificial Sequence
  chemically synthesized
tgttgaagaggagtggtgagag

SEQ ID NO: 47618 - DNA, 22 bp, Artificial Sequence
  chemically synthesized
aagaggagtggtgagagtgggc

SEQ ID NO: 47619 - DNA, 22 bp, Artificial Sequence
  chemically synthesized
gtcttgttccagttctcagagg

SEQ ID NO: 47620 - DNA, 22 bp, Artificial Sequence
  chemically synthesized
tcttgttccagttctcagaggg

SEQ ID NO: 47621 - DNA, 22 bp, Artificial Sequence
  chemically synthesized
gttccagttctcagagggaatg

SEQ ID NO: 47622 - DNA, 22 bp, Artificial Sequence
  chemically synthesized
ttccagttctcagagggaatgc

SEQ ID NO: 47623 - DNA, 22 bp, Artificial Sequence
  chemically synthesized
cagttctcagagggaatgcttt

SEQ ID NO: 47624 - DNA, 22 bp, Artificial Sequence
  chemically synthesized
tcagagggaatgctttcaactt

SEQ ID NO: 47625 - DNA, 22 bp, Artificial Sequence
  chemically synthesized
agagggaatgctttcaactttt

SEQ ID NO: 47626 - DNA, 22 bp, Artificial Sequence
  chemically synthesized
tcaacttttccccattcaatat

SEQ ID NO: 47627 - DNA, 22 bp, Artificial Sequence
  chemically synthesized
caacttttccccattcaatatt

SEQ ID NO: 47628 - DNA, 22 bp, Artificial Sequence
  chemically synthesized
aacttttccccattcaatatta

SEQ ID NO: 47629 - DNA, 22 bp, Artificial Sequence
  chemically synthesized
ttccccattcaatattatgttg

SEQ ID NO: 47630 - DNA, 22 bp, Artificial Sequence
  chemically synthesized
tccccattcaatattatgttgg

SEQ ID NO: 47631 - DNA, 22 bp, Artificial Sequence
  chemically synthesized
ccccattcaatattatgttggc

SEQ ID NO: 47632 - DNA, 22 bp, Artificial Sequence
  chemically synthesized
cccattcaatattatgttggct

SEQ ID NO: 47633 - DNA, 22 bp, Artificial Sequence
  chemically synthesized
aatattatgttggctgtgggtt

SEQ ID NO: 47634 - DNA, 22 bp, Artificial Sequence
  chemically synthesized
tgttggctgtgggtttgtcaca

SEQ ID NO: 47635 - DNA, 22 bp, Artificial Sequence
  chemically synthesized
gctgtgggtttgtcacagatgg

SEQ ID NO: 47636 - DNA, 22 bp, Artificial Sequence
  chemically synthesized
tgggtttgtcacagatggcttt

SEQ ID NO: 47637 - DNA, 22 bp, Artificial Sequence
  chemically synthesized
gtcacagatggcttttattaca

SEQ ID NO: 47638 - DNA, 22 bp, Artificial Sequence
  chemically synthesized
tcacagatggcttttattacac

SEQ ID NO: 47639 - DNA, 22 bp, Artificial Sequence
  chemically synthesized
ttattacactgaggtatgtctc

SEQ ID NO: 47640 - DNA, 22 bp, Artificial Sequence
  chemically synthesized
tattacactgaggtatgtctct

SEQ ID NO: 47641 - DNA, 22 bp, Artificial Sequence
  chemically synthesized
attacactgaggtatgtctctt

SEQ ID NO: 47642 - DNA, 22 bp, Artificial Sequence
  chemically synthesized
ttacactgaggtatgtctcttg

SEQ ID NO: 47643 - DNA, 22 bp, Artificial Sequence
  chemically synthesized
cactgaggtatgtctcttgtat

SEQ ID NO: 47644 - DNA, 22 bp, Artificial Sequence
  chemically synthesized
aggtatgtctcttgtatgctga

SEQ ID NO: 47645 - DNA, 22 bp, Artificial Sequence
  chemically synthesized
ttgtatgctgattttgctgagc

SEQ ID NO: 47646 - DNA, 22 bp, Artificial Sequence
  chemically synthesized
gtatgctgattttgctgagcat

SEQ ID NO: 47647 - DNA, 22 bp, Artificial Sequence
  chemically synthesized
tatgctgattttgctgagcatt

SEQ ID NO: 47648 - DNA, 22 bp, Artificial Sequence
  chemically synthesized
attttgctgagcattttaatca

SEQ ID NO: 47649 - DNA, 22 bp, Artificial Sequence
  chemically synthesized
tgctgagcattttaatcataaa

SEQ ID NO: 47650 - DNA, 22 bp, Artificial Sequence
  chemically synthesized
gctgagcattttaatcataaat

SEQ ID NO: 47651 - DNA, 22 bp, Artificial Sequence
  chemically synthesized
ctgagcattttaatcataaatg

SEQ ID NO: 47652 - DNA, 22 bp, Artificial Sequence
  chemically synthesized
agcattttaatcataaatgtat

SEQ ID NO: 47653 - DNA, 22 bp, Artificial Sequence
  chemically synthesized
taatcataaatgtatgctggat

SEQ ID NO: 47654 - DNA, 22 bp, Artificial Sequence
  chemically synthesized
aatcataaatgtatgctggatt

SEQ ID NO: 47655 - DNA, 22 bp, Artificial Sequence
  chemically synthesized
atcataaatgtatgctggattt

SEQ ID NO: 47656 - DNA, 22 bp, Artificial Sequence
  chemically synthesized
gattttgttgaatgctttttct

SEQ ID NO: 47657 - DNA, 22 bp, Artificial Sequence
  chemically synthesized
tgttgaatgctttttctgcatc

SEQ ID NO: 47658 - DNA, 22 bp, Artificial Sequence
  chemically synthesized
gttgaatgctttttctgcatct

SEQ ID NO: 47659 - DNA, 22 bp, Artificial Sequence
  chemically synthesized
ttgaatgctttttctgcatcta

SEQ ID NO: 47660 - DNA, 22 bp, Artificial Sequence
  chemically synthesized
aatgctttttctgcatctattg

SEQ ID NO: 47661 - DNA, 22 bp, Artificial Sequence
  chemically synthesized
tttctgcatctattgagatgat

SEQ ID NO: 47662 - DNA, 22 bp, Artificial Sequence
  chemically synthesized
ttctgcatctattgagatgatc

SEQ ID NO: 47663 - DNA, 22 bp, Artificial Sequence
  chemically synthesized
tctgcatctattgagatgatca

SEQ ID NO: 47664 - DNA, 22 bp, Artificial Sequence
  chemically synthesized
ctgcatctattgagatgatcat

SEQ ID NO: 47665 - DNA, 22 bp, Artificial Sequence
  chemically synthesized
tgcatctattgagatgatcatg

SEQ ID NO: 47666 - DNA, 22 bp, Artificial Sequence
  chemically synthesized
catctattgagatgatcatgta

SEQ ID NO: 47667 - DNA, 22 bp, Artificial Sequence
  chemically synthesized
ttgagatgatcatgtaattttt

SEQ ID NO: 47668 - DNA, 22 bp, Artificial Sequence
  chemically synthesized
agatgatcatgtaatttttgtt

SEQ ID NO: 47669 - DNA, 22 bp, Artificial Sequence
  chemically synthesized
ttgtttttaaatctgtttatgt

SEQ ID NO: 47670 - DNA, 22 bp, Artificial Sequence
  chemically synthesized
tgtttttaaatctgtttatgtg

SEQ ID NO: 47671 - DNA, 22 bp, Artificial Sequence
  chemically synthesized
gtttttaaatctgtttatgtgg

SEQ ID NO: 47672 - DNA, 22 bp, Artificial Sequence
  chemically synthesized
tttttaaatctgtttatgtggt

SEQ ID NO: 47673 - DNA, 22 bp, Artificial Sequence
  chemically synthesized
ttaaatctgtttatgtggtgta

SEQ ID NO: 47674 - DNA, 22 bp, Artificial Sequence
  chemically synthesized
taaatctgtttatgtggtgtat

SEQ ID NO: 47675 - DNA, 22 bp, Artificial Sequence
  chemically synthesized
aaatctgtttatgtggtgtatc

SEQ ID NO: 47676 - DNA, 22 bp, Artificial Sequence
  chemically synthesized
aatctgtttatgtggtgtatca

SEQ ID NO: 47677 - DNA, 22 bp, Artificial Sequence
  chemically synthesized
tttatgtggtgtatcacactta

SEQ ID NO: 47678 - DNA, 22 bp, Artificial Sequence
  chemically synthesized
atgtggtgtatcacacttattg

SEQ ID NO: 47679 - DNA, 22 bp, Artificial Sequence
  chemically synthesized
tgtggtgtatcacacttattga

SEQ ID NO: 47680 - DNA, 22 bp, Artificial Sequence
  chemically synthesized
attgacttgcagatgtcaaacc

SEQ ID NO: 47681 - DNA, 22 bp, Artificial Sequence
  chemically synthesized
ttgacttgcagatgtcaaacca

SEQ ID NO: 47682 - DNA, 22 bp, Artificial Sequence
  chemically synthesized
acttgcagatgtcaaaccaacc

SEQ ID NO: 47683 - DNA, 22 bp, Artificial Sequence
  chemically synthesized
gcagatgtcaaaccaaccctgc

SEQ ID NO: 47684 - DNA, 22 bp, Artificial Sequence
  chemically synthesized
cagatgtcaaaccaaccctgca

SEQ ID NO: 47685 - DNA, 22 bp, Artificial Sequence
  chemically synthesized
catccctggcatggaacctgct

SEQ ID NO: 47686 - DNA, 22 bp, Artificial Sequence
  chemically synthesized
gcatggaacctgcttgatcatg

SEQ ID NO: 47687 - DNA, 22 bp, Artificial Sequence
  chemically synthesized
cttgatcatggtggattatctt

SEQ ID NO: 47688 - DNA, 22 bp, Artificial Sequence
  chemically synthesized
gatcatggtggattatcttttt

SEQ ID NO: 47689 - DNA, 22 bp, Artificial Sequence
  chemically synthesized
atcatggtggattatctttttg

SEQ ID NO: 47690 - DNA, 22 bp, Artificial Sequence
  chemically synthesized
tctttttgttatgttgttgaat

SEQ ID NO: 47691 - DNA, 22 bp, Artificial Sequence
  chemically synthesized
tttgttatgttgttgaatttgg

SEQ ID NO: 47692 - DNA, 22 bp, Artificial Sequence
  chemically synthesized
ttgttatgttgttgaatttggt

SEQ ID NO: 47693 - DNA, 22 bp, Artificial Sequence
  chemically synthesized
tgttatgttgttgaatttggtt

SEQ ID NO: 47694 - DNA, 22 bp, Artificial Sequence
  chemically synthesized
gttatgttgttgaatttggtta

SEQ ID NO: 47695 - DNA, 22 bp, Artificial Sequence
  chemically synthesized
ttatgttgttgaatttggttat

SEQ ID NO: 47696 - DNA, 22 bp, Artificial Sequence
  chemically synthesized
tgttgttgaatttggttatcta

SEQ ID NO: 47697 - DNA, 22 bp, Artificial Sequence
  chemically synthesized
ttgaatttggttatctagtatt

SEQ ID NO: 47698 - DNA, 22 bp, Artificial Sequence
  chemically synthesized
aatttggttatctagtattttg

SEQ ID NO: 47699 - DNA, 22 bp, Artificial Sequence
  chemically synthesized
ggttatctagtattttgttaag

SEQ ID NO: 47700 - DNA, 22 bp, Artificial Sequence
  chemically synthesized
gttatctagtattttgttaagg

SEQ ID NO: 47701 - DNA, 22 bp, Artificial Sequence
  chemically synthesized
tctagtattttgttaaggattt

SEQ ID NO: 47702 - DNA, 22 bp, Artificial Sequence
  chemically synthesized
gtattttgttaaggattttagc

SEQ ID NO: 47703 - DNA, 22 bp, Artificial Sequence
  chemically synthesized
tgttaaggattttagcatctat

SEQ ID NO: 47704 - DNA, 22 bp, Artificial Sequence
  chemically synthesized
gttaaggattttagcatctatg

SEQ ID NO: 47705 - DNA, 22 bp, Artificial Sequence
  chemically synthesized
ttaaggattttagcatctatgt

SEQ ID NO: 47706 - DNA, 22 bp, Artificial Sequence
  chemically synthesized
aggattttagcatctatgttca

SEQ ID NO: 47707 - DNA, 22 bp, Artificial Sequence
  chemically synthesized
tagcatctatgttcatcaaggc

SEQ ID NO: 47708 - DNA, 22 bp, Artificial Sequence
  chemically synthesized
agcatctatgttcatcaaggct

SEQ ID NO: 47709 - DNA, 22 bp, Artificial Sequence
  chemically synthesized
gcatctatgttcatcaaggcta

SEQ ID NO: 47710 - DNA, 22 bp, Artificial Sequence
  chemically synthesized
tgttcatcaaggctatcagtct

SEQ ID NO: 47711 - DNA, 22 bp, Artificial Sequence
  chemically synthesized
atcaaggctatcagtctgtagt

SEQ ID NO: 47712 - DNA, 22 bp, Artificial Sequence
  chemically synthesized
tcagtctgtagttttctttttt

SEQ ID NO: 47713 - DNA, 22 bp, Artificial Sequence
  chemically synthesized
tagttttcttttttggttatgt

SEQ ID NO: 47714 - DNA, 22 bp, Artificial Sequence
  chemically synthesized
tcttttttggttatgtccttcc

SEQ ID NO: 47715 - DNA, 22 bp, Artificial Sequence
  chemically synthesized
cttttttggttatgtccttccc

SEQ ID NO: 47716 - DNA, 22 bp, Artificial Sequence
  chemically synthesized
ttttttggttatgtccttccct

SEQ ID NO: 47717 - DNA, 22 bp, Artificial Sequence
  chemically synthesized
ttttggttatgtccttccctgg

SEQ ID NO: 47718 - DNA, 22 bp, Artificial Sequence
  chemically synthesized
tttggttatgtccttccctggt

SEQ ID NO: 47719 - DNA, 22 bp, Artificial Sequence
  chemically synthesized
ttggttatgtccttccctggtt

SEQ ID NO: 47720 - DNA, 22 bp, Artificial Sequence
  chemically synthesized
tggttatgtccttccctggttt

SEQ ID NO: 47721 - DNA, 22 bp, Artificial Sequence
  chemically synthesized
ggttatgtccttccctggtttt

SEQ ID NO: 47722 - DNA, 22 bp, Artificial Sequence
  chemically synthesized
gttatgtccttccctggttttg

SEQ ID NO: 47723 - DNA, 22 bp, Artificial Sequence
  chemically synthesized
tgtccttccctggttttggtgt

SEQ ID NO: 47724 - DNA, 22 bp, Artificial Sequence
  chemically synthesized
ccctggttttggtgtgatgctg

SEQ ID NO: 47725 - DNA, 22 bp, Artificial Sequence
  chemically synthesized
cctggttttggtgtgatgctgg

SEQ ID NO: 47726 - DNA, 22 bp, Artificial Sequence
  chemically synthesized
gttttggtgtgatgctggcttc

SEQ ID NO: 47727 - DNA, 22 bp, Artificial Sequence
  chemically synthesized
tggtgtgatgctggcttcatag

SEQ ID NO: 47728 - DNA, 22 bp, Artificial Sequence
  chemically synthesized
ggtgtgatgctggcttcataga

SEQ ID NO: 47729 - DNA, 22 bp, Artificial Sequence
  chemically synthesized
gtgtgatgctggcttcatagaa

SEQ ID NO: 47730 - DNA, 22 bp, Artificial Sequence
  chemically synthesized
gcttcatagaatgaattagggc

SEQ ID NO: 47731 - DNA, 22 bp, Artificial Sequence
  chemically synthesized
catagaatgaattagggcaggt

SEQ ID NO: 47732 - DNA, 22 bp, Artificial Sequence
  chemically synthesized
atagaatgaattagggcaggtt

SEQ ID NO: 47733 - DNA, 22 bp, Artificial Sequence
  chemically synthesized
gggcaggttccttctttatctg

SEQ ID NO: 47734 - DNA, 22 bp, Artificial Sequence
  chemically synthesized
cttctttatctgtcttgtagaa

SEQ ID NO: 47735 - DNA, 22 bp, Artificial Sequence
  chemically synthesized
ctttatctgtcttgtagaatag

SEQ ID NO: 47736 - DNA, 22 bp, Artificial Sequence
  chemically synthesized
tttatctgtcttgtagaatagt

SEQ ID NO: 47737 - DNA, 22 bp, Artificial Sequence
  chemically synthesized
tatctgtcttgtagaatagtgt

SEQ ID NO: 47738 - DNA, 22 bp, Artificial Sequence
  chemically synthesized
atctgtcttgtagaatagtgtc

SEQ ID NO: 47739 - DNA, 22 bp, Artificial Sequence
  chemically synthesized
tctgtcttgtagaatagtgtca

SEQ ID NO: 47740 - DNA, 22 bp, Artificial Sequence
  chemically synthesized
tcttgtagaatagtgtcaaaaa

SEQ ID NO: 47741 - DNA, 22 bp, Artificial Sequence
  chemically synthesized
gtagaatagtgtcaaaaagatg

SEQ ID NO: 47742 - DNA, 22 bp, Artificial Sequence
  chemically synthesized
tagaatagtgtcaaaaagatgg

SEQ ID NO: 47743 - DNA, 22 bp, Artificial Sequence
  chemically synthesized
ctctttgaatgtctagtagaat

SEQ ID NO: 47744 - DNA, 22 bp, Artificial Sequence
  chemically synthesized
tttgaatgtctagtagaattct

SEQ ID NO: 47745 - DNA, 22 bp, Artificial Sequence
  chemically synthesized
tgaatgtctagtagaattctgt

SEQ ID NO: 47746 - DNA, 22 bp, Artificial Sequence
  chemically synthesized
gaatgtctagtagaattctgtt

SEQ ID NO: 47747 - DNA, 22 bp, Artificial Sequence
  chemically synthesized
aatgtctagtagaattctgttg

SEQ ID NO: 47748 - DNA, 22 bp, Artificial Sequence
  chemically synthesized
gtagaattctgttgtgaatcca

SEQ ID NO: 47749 - DNA, 22 bp, Artificial Sequence
  chemically synthesized
tgttgtgaatccatctggtcct

SEQ ID NO: 47750 - DNA, 22 bp, Artificial Sequence
  chemically synthesized
ttgtgaatccatctggtcctga

SEQ ID NO: 47751 - DNA, 22 bp, Artificial Sequence
  chemically synthesized
tgaatccatctggtcctgaact

SEQ ID NO: 47752 - DNA, 22 bp, Artificial Sequence
  chemically synthesized
gtcctgaacttttttttggttg

SEQ ID NO: 47753 - DNA, 22 bp, Artificial Sequence
  chemically synthesized
aacttttttttggttggtaatt

SEQ ID NO: 47754 - DNA, 22 bp, Artificial Sequence
  chemically synthesized
ttttttggttggtaatttttta

SEQ ID NO: 47755 - DNA, 22 bp, Artificial Sequence
  chemically synthesized
tttttggttggtaattttttaa

SEQ ID NO: 47756 - DNA, 22 bp, Artificial Sequence
  chemically synthesized
ttttggttggtaattttttaat

SEQ ID NO: 47757 - DNA, 22 bp, Artificial Sequence
  chemically synthesized
tttggttggtaattttttaatt

SEQ ID NO: 47758 - DNA, 22 bp, Artificial Sequence
  chemically synthesized
ttggttggtaattttttaatta

SEQ ID NO: 47759 - DNA, 22 bp, Artificial Sequence
  chemically synthesized
tggttggtaattttttaattac

SEQ ID NO: 47760 - DNA, 22 bp, Artificial Sequence
  chemically synthesized
ggttggtaattttttaattacc

SEQ ID NO: 47761 - DNA, 22 bp, Artificial Sequence
  chemically synthesized
gttggtaattttttaattacca

SEQ ID NO: 47762 - DNA, 22 bp, Artificial Sequence
  chemically synthesized
gtaattttttaattaccaatta

SEQ ID NO: 47763 - DNA, 22 bp, Artificial Sequence
  chemically synthesized
tttaattaccaattaaatctca

SEQ ID NO: 47764 - DNA, 22 bp, Artificial Sequence
  chemically synthesized
ttaattaccaattaaatctcac

SEQ ID NO: 47765 - DNA, 22 bp, Artificial Sequence
  chemically synthesized
taattaccaattaaatctcact

SEQ ID NO: 47766 - DNA, 22 bp, Artificial Sequence
  chemically synthesized
aattaccaattaaatctcactg

SEQ ID NO: 47767 - DNA, 22 bp, Artificial Sequence
  chemically synthesized
attaccaattaaatctcactgc

SEQ ID NO: 47768 - DNA, 22 bp, Artificial Sequence
  chemically synthesized
ccaattaaatctcactgcttgt

SEQ ID NO: 47769 - DNA, 22 bp, Artificial Sequence
  chemically synthesized
aatctcactgcttgttattggt

SEQ ID NO: 47770 - DNA, 22 bp, Artificial Sequence
  chemically synthesized
actgcttgttattggtctgtta

SEQ ID NO: 47771 - DNA, 22 bp, Artificial Sequence
  chemically synthesized
cttgttattggtctgttagtaa

SEQ ID NO: 47772 - DNA, 22 bp, Artificial Sequence
  chemically synthesized
gttattggtctgttagtaaatt

SEQ ID NO: 47773 - DNA, 22 bp, Artificial Sequence
  chemically synthesized
ttattggtctgttagtaaattt

SEQ ID NO: 47774 - DNA, 22 bp, Artificial Sequence
  chemically synthesized
ttggtctgttagtaaatttatt

SEQ ID NO: 47775 - DNA, 22 bp, Artificial Sequence
  chemically synthesized
gtctgttagtaaatttattgag

SEQ ID NO: 47776 - DNA, 22 bp, Artificial Sequence
  chemically synthesized
ttagtaaatttattgaggctca

SEQ ID NO: 47777 - DNA, 22 bp, Artificial Sequence
  chemically synthesized
gtaaatttattgaggctcattt

SEQ ID NO: 47778 - DNA, 22 bp, Artificial Sequence
  chemically synthesized
attgaggctcatttcatggcct

SEQ ID NO: 47779 - DNA, 22 bp, Artificial Sequence
  chemically synthesized
ttgaggctcatttcatggccta

SEQ ID NO: 47780 - DNA, 22 bp, Artificial Sequence
  chemically synthesized
aggctcatttcatggcctatca

SEQ ID NO: 47781 - DNA, 22 bp, Artificial Sequence
  chemically synthesized
atttcatggcctatcatatggt

SEQ ID NO: 47782 - DNA, 22 bp, Artificial Sequence
  chemically synthesized
catggcctatcatatggtctac

SEQ ID NO: 47783 - DNA, 22 bp, Artificial Sequence
  chemically synthesized
atggcctatcatatggtctacc

SEQ ID NO: 47784 - DNA, 22 bp, Artificial Sequence
  chemically synthesized
tcatatggtctaccttggagaa

SEQ ID NO: 47785 - DNA, 22 bp, Artificial Sequence
  chemically synthesized
ccttggagaaatttccacgcgc

SEQ ID NO: 47786 - DNA, 22 bp, Artificial Sequence
  chemically synthesized
ggagaaatttccacgcgctgtt

SEQ ID NO: 47787 - DNA, 22 bp, Artificial Sequence
  chemically synthesized
gagaaatttccacgcgctgttg

SEQ ID NO: 47788 - DNA, 22 bp, Artificial Sequence
  chemically synthesized
ccacgcgctgttgaatagaatg

SEQ ID NO: 47789 - DNA, 22 bp, Artificial Sequence
  chemically synthesized
cacgcgctgttgaatagaatgt

SEQ ID NO: 47790 - DNA, 22 bp, Artificial Sequence
  chemically synthesized
ttgaatagaatgtgtgttctgt

SEQ ID NO: 47791 - DNA, 22 bp, Artificial Sequence
  chemically synthesized
aatagaatgtgtgttctgtggt

SEQ ID NO: 47792 - DNA, 22 bp, Artificial Sequence
  chemically synthesized
tgtggttattggatgaaatgtt

SEQ ID NO: 47793 - DNA, 22 bp, Artificial Sequence
  chemically synthesized
tggttattggatgaaatgttct

SEQ ID NO: 47794 - DNA, 22 bp, Artificial Sequence
  chemically synthesized
ttggatgaaatgttctgtatat

SEQ ID NO: 47795 - DNA, 22 bp, Artificial Sequence
  chemically synthesized
gatgaaatgttctgtatataac

SEQ ID NO: 47796 - DNA, 22 bp, Artificial Sequence
  chemically synthesized
tgtatataactgttaagtccat

SEQ ID NO: 47797 - DNA, 22 bp, Artificial Sequence
  chemically synthesized
tatataactgttaagtccattt

SEQ ID NO: 47798 - DNA, 22 bp, Artificial Sequence
  chemically synthesized
ttaagtccatttgttctaaggt

SEQ ID NO: 47799 - DNA, 22 bp, Artificial Sequence
  chemically synthesized
agtccatttgttctaaggtata

SEQ ID NO: 47800 - DNA, 22 bp, Artificial Sequence
  chemically synthesized
gttctaaggtataatttaaatc

SEQ ID NO: 47801 - DNA, 22 bp, Artificial Sequence
  chemically synthesized
ttctaaggtataatttaaatcc

SEQ ID NO: 47802 - DNA, 22 bp, Artificial Sequence
  chemically synthesized
taaggtataatttaaatccatt

SEQ ID NO: 47803 - DNA, 22 bp, Artificial Sequence
  chemically synthesized
aggtataatttaaatccattat

SEQ ID NO: 47804 - DNA, 22 bp, Artificial Sequence
  chemically synthesized
aaatccattatttttttgttga

SEQ ID NO: 47805 - DNA, 22 bp, Artificial Sequence
  chemically synthesized
aatccattatttttttgttgac

SEQ ID NO: 47806 - DNA, 22 bp, Artificial Sequence
  chemically synthesized
tttttttgttgactttctgtct

SEQ ID NO: 47807 - DNA, 22 bp, Artificial Sequence
  chemically synthesized
ttttgttgactttctgtcttga

SEQ ID NO: 47808 - DNA, 22 bp, Artificial Sequence
  chemically synthesized
tttgttgactttctgtcttgat

SEQ ID NO: 47809 - DNA, 22 bp, Artificial Sequence
  chemically synthesized
ttgttgactttctgtcttgatg

SEQ ID NO: 47810 - DNA, 22 bp, Artificial Sequence
  chemically synthesized
tgttgactttctgtcttgatga

SEQ ID NO: 47811 - DNA, 22 bp, Artificial Sequence
  chemically synthesized
gttgactttctgtcttgatgaa

SEQ ID NO: 47812 - DNA, 22 bp, Artificial Sequence
  chemically synthesized
ttgactttctgtcttgatgaac

SEQ ID NO: 47813 - DNA, 22 bp, Artificial Sequence
  chemically synthesized
actttctgtcttgatgaactgt

SEQ ID NO: 47814 - DNA, 22 bp, Artificial Sequence
  chemically synthesized
tctgtcttgatgaactgtctag

SEQ ID NO: 47815 - DNA, 22 bp, Artificial Sequence
  chemically synthesized
ctgtcttgatgaactgtctagt

SEQ ID NO: 47816 - DNA, 22 bp, Artificial Sequence
  chemically synthesized
tgtcttgatgaactgtctagtg

SEQ ID NO: 47817 - DNA, 22 bp, Artificial Sequence
  chemically synthesized
tcttgatgaactgtctagtgct

SEQ ID NO: 47818 - DNA, 22 bp, Artificial Sequence
  chemically synthesized
gatgaactgtctagtgctgtca

SEQ ID NO: 47819 - DNA, 22 bp, Artificial Sequence
  chemically synthesized
atgaactgtctagtgctgtcaa

SEQ ID NO: 47820 - DNA, 22 bp, Artificial Sequence
  chemically synthesized
tctagtgctgtcaatgaagtat

SEQ ID NO: 47821 - DNA, 22 bp, Artificial Sequence
  chemically synthesized
gtgctgtcaatgaagtattgaa

SEQ ID NO: 47822 - DNA, 22 bp, Artificial Sequence
  chemically synthesized
tcaatgaagtattgaagtcccc

SEQ ID NO: 47823 - DNA, 22 bp, Artificial Sequence
  chemically synthesized
aagtcccccactattattgtgt

SEQ ID NO: 47824 - DNA, 22 bp, Artificial Sequence
  chemically synthesized
ttattgtgttgctgtctatctc

SEQ ID NO: 47825 - DNA, 22 bp, Artificial Sequence
  chemically synthesized
ttgtgttgctgtctatctcatt

SEQ ID NO: 47826 - DNA, 22 bp, Artificial Sequence
  chemically synthesized
tgttgctgtctatctcatttct

SEQ ID NO: 47827 - DNA, 22 bp, Artificial Sequence
  chemically synthesized
ctgtctatctcatttcttaggt

SEQ ID NO: 47828 - DNA, 22 bp, Artificial Sequence
  chemically synthesized
tctatctcatttcttaggtcta

SEQ ID NO: 47829 - DNA, 22 bp, Artificial Sequence
  chemically synthesized
tctcatttcttaggtctattag

SEQ ID NO: 47830 - DNA, 22 bp, Artificial Sequence
  chemically synthesized
atttcttaggtctattagtaat

SEQ ID NO: 47831 - DNA, 22 bp, Artificial Sequence
  chemically synthesized
cttaggtctattagtaattgtt

SEQ ID NO: 47832 - DNA, 22 bp, Artificial Sequence
  chemically synthesized
ttaggtctattagtaattgttc

SEQ ID NO: 47833 - DNA, 22 bp, Artificial Sequence
  chemically synthesized
aggtctattagtaattgttcta

SEQ ID NO: 47834 - DNA, 22 bp, Artificial Sequence
  chemically synthesized
ggtctattagtaattgttctat

SEQ ID NO: 47835 - DNA, 22 bp, Artificial Sequence
  chemically synthesized
ttagtaattgttctataaattt

SEQ ID NO: 47836 - DNA, 22 bp, Artificial Sequence
  chemically synthesized
gtaattgttctataaatttggg

SEQ ID NO: 47837 - DNA, 22 bp, Artificial Sequence
  chemically synthesized
ttctataaatttgggagctcca

SEQ ID NO: 47838 - DNA, 22 bp, Artificial Sequence
  chemically synthesized
tataaatttgggagctccagtg

SEQ ID NO: 47839 - DNA, 22 bp, Artificial Sequence
  chemically synthesized
taaatttgggagctccagtgtt

SEQ ID NO: 47840 - DNA, 22 bp, Artificial Sequence
  chemically synthesized
gggagctccagtgttaggtgca

SEQ ID NO: 47841 - DNA, 22 bp, Artificial Sequence
  chemically synthesized
ggagctccagtgttaggtgcat

SEQ ID NO: 47842 - DNA, 22 bp, Artificial Sequence
  chemically synthesized
cagtgttaggtgcatatatgtt

SEQ ID NO: 47843 - DNA, 22 bp, Artificial Sequence
  chemically synthesized
ggtgcatatatgtttaagattg

SEQ ID NO: 47844 - DNA, 22 bp, Artificial Sequence
  chemically synthesized
aagattgtgatattttcctgtt

SEQ ID NO: 47845 - DNA, 22 bp, Artificial Sequence
  chemically synthesized
agattgtgatattttcctgttg

SEQ ID NO: 47846 - DNA, 22 bp, Artificial Sequence
  chemically synthesized
tgatattttcctgttggacaag

SEQ ID NO: 47847 - DNA, 22 bp, Artificial Sequence
  chemically synthesized
tcctgttggacaaggcctttta

SEQ ID NO: 47848 - DNA, 22 bp, Artificial Sequence
  chemically synthesized
cctgttggacaaggccttttac

SEQ ID NO: 47849 - DNA, 22 bp, Artificial Sequence
  chemically synthesized
ctgttggacaaggccttttacc

SEQ ID NO: 47850 - DNA, 22 bp, Artificial Sequence
  chemically synthesized
ttggacaaggccttttaccatt

SEQ ID NO: 47851 - DNA, 22 bp, Artificial Sequence
  chemically synthesized
gacaaggccttttaccattata

SEQ ID NO: 47852 - DNA, 22 bp, Artificial Sequence
  chemically synthesized
ttaccattatataatgtccctc

SEQ ID NO: 47853 - DNA, 22 bp, Artificial Sequence
  chemically synthesized
taccattatataatgtccctct

SEQ ID NO: 47854 - DNA, 22 bp, Artificial Sequence
  chemically synthesized
accattatataatgtccctctt

SEQ ID NO: 47855 - DNA, 22 bp, Artificial Sequence
  chemically synthesized
ccattatataatgtccctcttt

SEQ ID NO: 47856 - DNA, 22 bp, Artificial Sequence
  chemically synthesized
tataatgtccctctttgtctct

SEQ ID NO: 47857 - DNA, 22 bp, Artificial Sequence
  chemically synthesized
tttgtctcttttaactgctgtt

SEQ ID NO: 47858 - DNA, 22 bp, Artificial Sequence
  chemically synthesized
tgtctcttttaactgctgttgc

SEQ ID NO: 47859 - DNA, 22 bp, Artificial Sequence
  chemically synthesized
gtctcttttaactgctgttgct

SEQ ID NO: 47860 - DNA, 22 bp, Artificial Sequence
  chemically synthesized
tctcttttaactgctgttgctt

SEQ ID NO: 47861 - DNA, 22 bp, Artificial Sequence
  chemically synthesized
ttttaactgctgttgctttaaa

SEQ ID NO: 47862 - DNA, 22 bp, Artificial Sequence
  chemically synthesized
ttaactgctgttgctttaaagt

SEQ ID NO: 47863 - DNA, 22 bp, Artificial Sequence
  chemically synthesized
taactgctgttgctttaaagtt

SEQ ID NO: 47864 - DNA, 22 bp, Artificial Sequence
  chemically synthesized
aactgctgttgctttaaagttt

SEQ ID NO: 47865 - DNA, 22 bp, Artificial Sequence
  chemically synthesized
actgctgttgctttaaagtttg

SEQ ID NO: 47866 - DNA, 22 bp, Artificial Sequence
  chemically synthesized
ctgttgctttaaagtttgtttt

SEQ ID NO: 47867 - DNA, 22 bp, Artificial Sequence
  chemically synthesized
ttgctttaaagtttgttttgcc

SEQ ID NO: 47868 - DNA, 22 bp, Artificial Sequence
  chemically synthesized
ctttaaagtttgttttgcctac

SEQ ID NO: 47869 - DNA, 22 bp, Artificial Sequence
  chemically synthesized
taaagtttgttttgcctactca

SEQ ID NO: 47870 - DNA, 22 bp, Artificial Sequence
  chemically synthesized
aaagtttgttttgcctactcac

SEQ ID NO: 47871 - DNA, 22 bp, Artificial Sequence
  chemically synthesized
aagtttgttttgcctactcact

SEQ ID NO: 47872 - DNA, 22 bp, Artificial Sequence
  chemically synthesized
gttttgcctactcacttttggt

SEQ ID NO: 47873 - DNA, 22 bp, Artificial Sequence
  chemically synthesized
ttttgcctactcacttttggtg

SEQ ID NO: 47874 - DNA, 22 bp, Artificial Sequence
  chemically synthesized
tgcctactcacttttggtggcc

SEQ ID NO: 47875 - DNA, 22 bp, Artificial Sequence
  chemically synthesized
gcctactcacttttggtggcca

SEQ ID NO: 47876 - DNA, 22 bp, Artificial Sequence
  chemically synthesized
cctactcacttttggtggccat

SEQ ID NO: 47877 - DNA, 22 bp, Artificial Sequence
  chemically synthesized
ctcacttttggtggccatttgc

SEQ ID NO: 47878 - DNA, 22 bp, Artificial Sequence
  chemically synthesized
acttttggtggccatttgcatg

SEQ ID NO: 47879 - DNA, 22 bp, Artificial Sequence
  chemically synthesized
ttggtggccatttgcatgaaat

SEQ ID NO: 47880 - DNA, 22 bp, Artificial Sequence
  chemically synthesized
tggtggccatttgcatgaaata

SEQ ID NO: 47881 - DNA, 22 bp, Artificial Sequence
  chemically synthesized
ggtggccatttgcatgaaatac

SEQ ID NO: 47882 - DNA, 22 bp, Artificial Sequence
  chemically synthesized
gtggccatttgcatgaaatacc

SEQ ID NO: 47883 - DNA, 22 bp, Artificial Sequence
  chemically synthesized
gcatgaaatacctttttcaccc

SEQ ID NO: 47884 - DNA, 22 bp, Artificial Sequence
  chemically synthesized
catgaaatacctttttcaccct

SEQ ID NO: 47885 - DNA, 22 bp, Artificial Sequence
  chemically synthesized
tttcacccttttaagtggagca

SEQ ID NO: 47886 - DNA, 22 bp, Artificial Sequence
  chemically synthesized
ttcacccttttaagtggagcat

SEQ ID NO: 47887 - DNA, 22 bp, Artificial Sequence
  chemically synthesized
tcacccttttaagtggagcatt

SEQ ID NO: 47888 - DNA, 22 bp, Artificial Sequence
  chemically synthesized
cacccttttaagtggagcattt

SEQ ID NO: 47889 - DNA, 22 bp, Artificial Sequence
  chemically synthesized
acccttttaagtggagcattta

SEQ ID NO: 47890 - DNA, 22 bp, Artificial Sequence
  chemically synthesized
ttaagtggagcatttaggccat

SEQ ID NO: 47891 - DNA, 22 bp, Artificial Sequence
  chemically synthesized
taagtggagcatttaggccatt

SEQ ID NO: 47892 - DNA, 22 bp, Artificial Sequence
  chemically synthesized
aagtggagcatttaggccattt

SEQ ID NO: 47893 - DNA, 22 bp, Artificial Sequence
  chemically synthesized
agtggagcatttaggccattta

SEQ ID NO: 47894 - DNA, 22 bp, Artificial Sequence
  chemically synthesized
aggccatttacattcaatgtta

SEQ ID NO: 47895 - DNA, 22 bp, Artificial Sequence
  chemically synthesized
ggccatttacattcaatgttag

SEQ ID NO: 47896 - DNA, 22 bp, Artificial Sequence
  chemically synthesized
acattcaatgttagtaatgtaa

SEQ ID NO: 47897 - DNA, 22 bp, Artificial Sequence
  chemically synthesized
cattcaatgttagtaatgtaaa

SEQ ID NO: 47898 - DNA, 22 bp, Artificial Sequence
  chemically synthesized
aatgttagtaatgtaaatgcct

SEQ ID NO: 47899 - DNA, 22 bp, Artificial Sequence
  chemically synthesized
gtaatgtaaatgcctggctatg

SEQ ID NO: 47900 - DNA, 22 bp, Artificial Sequence
  chemically synthesized
gctatgccaggcaggaatggcc

SEQ ID NO: 47901 - DNA, 22 bp, Artificial Sequence
  chemically synthesized
tgccaggcaggaatggcctgct

SEQ ID NO: 47902 - DNA, 22 bp, Artificial Sequence
  chemically synthesized
ctcagggacccagtgagctccc

SEQ ID NO: 47903 - DNA, 22 bp, Artificial Sequence
  chemically synthesized
agggacccagtgagctcccagg

SEQ ID NO: 47904 - DNA, 22 bp, Artificial Sequence
  chemically synthesized
ccagggcctttctcactgcttc

SEQ ID NO: 47905 - DNA, 22 bp, Artificial Sequence
  chemically synthesized
tctcactgcttcctctacacct

SEQ ID NO: 47906 - DNA, 22 bp, Artificial Sequence
  chemically synthesized
ctcactgcttcctctacacctg

SEQ ID NO: 47907 - DNA, 22 bp, Artificial Sequence
  chemically synthesized
tcactgcttcctctacacctgt

SEQ ID NO: 47908 - DNA, 22 bp, Artificial Sequence
  chemically synthesized
actgcttcctctacacctgtat

SEQ ID NO: 47909 - DNA, 22 bp, Artificial Sequence
  chemically synthesized
cttcctctacacctgtattttg

SEQ ID NO: 47910 - DNA, 22 bp, Artificial Sequence
  chemically synthesized
cctctacacctgtattttgctc

SEQ ID NO: 47911 - DNA, 22 bp, Artificial Sequence
  chemically synthesized
ctctacacctgtattttgctca

SEQ ID NO: 47912 - DNA, 22 bp, Artificial Sequence
  chemically synthesized
tacacctgtattttgctcagct

SEQ ID NO: 47913 - DNA, 22 bp, Artificial Sequence
  chemically synthesized
cacctgtattttgctcagctct

SEQ ID NO: 47914 - DNA, 22 bp, Artificial Sequence
  chemically synthesized
tattttgctcagctctctaagt

SEQ ID NO: 47915 - DNA, 22 bp, Artificial Sequence
  chemically synthesized
tgctcagctctctaagttaact

SEQ ID NO: 47916 - DNA, 22 bp, Artificial Sequence
  chemically synthesized
gctcagctctctaagttaactc

SEQ ID NO: 47917 - DNA, 22 bp, Artificial Sequence
  chemically synthesized
ctcagctctctaagttaactca

SEQ ID NO: 47918 - DNA, 22 bp, Artificial Sequence
  chemically synthesized
agctctctaagttaactcaact

SEQ ID NO: 47919 - DNA, 22 bp, Artificial Sequence
  chemically synthesized
tctaagttaactcaactccagg

SEQ ID NO: 47920 - DNA, 22 bp, Artificial Sequence
  chemically synthesized
taagttaactcaactccaggta

SEQ ID NO: 47921 - DNA, 22 bp, Artificial Sequence
  chemically synthesized
agttaactcaactccaggtaag

SEQ ID NO: 47922 - DNA, 22 bp, Artificial Sequence
  chemically synthesized
actcaactccaggtaaggtcag

SEQ ID NO: 47923 - DNA, 22 bp, Artificial Sequence
  chemically synthesized
aactccaggtaaggtcagaaac

SEQ ID NO: 47924 - DNA, 22 bp, Artificial Sequence
  chemically synthesized
caggtaaggtcagaaacttctc

SEQ ID NO: 47925 - DNA, 22 bp, Artificial Sequence
  chemically synthesized
ctcccacaaacagaccttcagt

SEQ ID NO: 47926 - DNA, 22 bp, Artificial Sequence
  chemically synthesized
tcccacaaacagaccttcagtt

SEQ ID NO: 47927 - DNA, 22 bp, Artificial Sequence
  chemically synthesized
ccacaaacagaccttcagtttc

SEQ ID NO: 47928 - DNA, 22 bp, Artificial Sequence
  chemically synthesized
cagtttctccagtgggagtgtg

SEQ ID NO: 47929 - DNA, 22 bp, Artificial Sequence
  chemically synthesized
agtttctccagtgggagtgtgt

SEQ ID NO: 47930 - DNA, 22 bp, Artificial Sequence
  chemically synthesized
ctccagtgggagtgtgtgttta

SEQ ID NO: 47931 - DNA, 22 bp, Artificial Sequence
  chemically synthesized
tccagtgggagtgtgtgtttag

SEQ ID NO: 47932 - DNA, 22 bp, Artificial Sequence
  chemically synthesized
cagtgggagtgtgtgtttagga

SEQ ID NO: 47933 - DNA, 22 bp, Artificial Sequence
  chemically synthesized
aggagaggaggatctccctttc

SEQ ID NO: 47934 - DNA, 22 bp, Artificial Sequence
  chemically synthesized
ggagaggaggatctccctttcc

SEQ ID NO: 47935 - DNA, 22 bp, Artificial Sequence
  chemically synthesized
cctttcccacttccgcagttgg

SEQ ID NO: 47936 - DNA, 22 bp, Artificial Sequence
  chemically synthesized
tcccacttccgcagttggggca

SEQ ID NO: 47937 - DNA, 22 bp, Artificial Sequence
  chemically synthesized
cccacttccgcagttggggcac

SEQ ID NO: 47938 - DNA, 22 bp, Artificial Sequence
  chemically synthesized
ccacttccgcagttggggcact

SEQ ID NO: 47939 - DNA, 22 bp, Artificial Sequence
  chemically synthesized
ccgcagttggggcactcacagt

SEQ ID NO: 47940 - DNA, 22 bp, Artificial Sequence
  chemically synthesized
cgcagttggggcactcacagta

SEQ ID NO: 47941 - DNA, 22 bp, Artificial Sequence
  chemically synthesized
gggcactcacagtatttggggt

SEQ ID NO: 47942 - DNA, 22 bp, Artificial Sequence
  chemically synthesized
acagtatttggggtgtctcctg

SEQ ID NO: 47943 - DNA, 22 bp, Artificial Sequence
  chemically synthesized
ggggtgtctcctgggtcctgca

SEQ ID NO: 47944 - DNA, 22 bp, Artificial Sequence
  chemically synthesized
gggtgtctcctgggtcctgcag

SEQ ID NO: 47945 - DNA, 22 bp, Artificial Sequence
  chemically synthesized
ctgggtcctgcaggagcaatct

SEQ ID NO: 47946 - DNA, 22 bp, Artificial Sequence
  chemically synthesized
ggtcctgcaggagcaatctact

SEQ ID NO: 47947 - DNA, 22 bp, Artificial Sequence
  chemically synthesized
caggagcaatctacttccttca

SEQ ID NO: 47948 - DNA, 22 bp, Artificial Sequence
  chemically synthesized
cttccttcagagggtctgtggg

SEQ ID NO: 47949 - DNA, 22 bp, Artificial Sequence
  chemically synthesized
ccttcagagggtctgtgggtcc

SEQ ID NO: 47950 - DNA, 22 bp, Artificial Sequence
  chemically synthesized
cttcagagggtctgtgggtcct

SEQ ID NO: 47951 - DNA, 22 bp, Artificial Sequence
  chemically synthesized
cagagggtctgtgggtcctctc

SEQ ID NO: 47952 - DNA, 22 bp, Artificial Sequence
  chemically synthesized
agagggtctgtgggtcctctca

SEQ ID NO: 47953 - DNA, 22 bp, Artificial Sequence
  chemically synthesized
tgggtcctctcaggattgctgg

SEQ ID NO: 47954 - DNA, 22 bp, Artificial Sequence
  chemically synthesized
tcaggattgctggtttgttctt

SEQ ID NO: 47955 - DNA, 22 bp, Artificial Sequence
  chemically synthesized
aggattgctggtttgttcttgc

SEQ ID NO: 47956 - DNA, 22 bp, Artificial Sequence
  chemically synthesized
ctggtttgttcttgcagtctat

SEQ ID NO: 47957 - DNA, 22 bp, Artificial Sequence
  chemically synthesized
gtttgttcttgcagtctatctg

SEQ ID NO: 47958 - DNA, 22 bp, Artificial Sequence
  chemically synthesized
gttcttgcagtctatctgcagc

SEQ ID NO: 47959 - DNA, 22 bp, Artificial Sequence
  chemically synthesized
ttcttgcagtctatctgcagct

SEQ ID NO: 47960 - DNA, 22 bp, Artificial Sequence
  chemically synthesized
ttgcagtctatctgcagctaaa

SEQ ID NO: 47961 - DNA, 22 bp, Artificial Sequence
  chemically synthesized
gcagtctatctgcagctaaaat

SEQ ID NO: 47962 - DNA, 22 bp, Artificial Sequence
  chemically synthesized
cagtctatctgcagctaaaatt

SEQ ID NO: 47963 - DNA, 22 bp, Artificial Sequence
  chemically synthesized
tctgcagctaaaattcacaatg

SEQ ID NO: 47964 - DNA, 22 bp, Artificial Sequence
  chemically synthesized
cagctaaaattcacaatgcgag

SEQ ID NO: 47965 - DNA, 22 bp, Artificial Sequence
  chemically synthesized
aaattcacaatgcgagcctcca

SEQ ID NO: 47966 - DNA, 22 bp, Artificial Sequence
  chemically synthesized
acaatgcgagcctccacatgct

SEQ ID NO: 47967 - DNA, 22 bp, Artificial Sequence
  chemically synthesized
cacatgctgctctgtccatctg

SEQ ID NO: 47968 - DNA, 22 bp, Artificial Sequence
  chemically synthesized
ctctgtccatctgagttggagc

SEQ ID NO: 47969 - DNA, 22 bp, Artificial Sequence
  chemically synthesized
tgtccatctgagttggagctgc

SEQ ID NO: 47970 - DNA, 22 bp, Artificial Sequence
  chemically synthesized
tccatctgagttggagctgcaa

SEQ ID NO: 47971 - DNA, 22 bp, Artificial Sequence
  chemically synthesized
agttggagctgcaatctaggcc

SEQ ID NO: 47972 - DNA, 22 bp, Artificial Sequence
  chemically synthesized
gagctgcaatctaggcctacct

SEQ ID NO: 47973 - DNA, 22 bp, Artificial Sequence
  chemically synthesized
caatctaggcctacctcccatc

SEQ ID NO: 47974 - DNA, 22 bp, Artificial Sequence
  chemically synthesized
ggcctacctcccatccgccaag

SEQ ID NO: 47975 - DNA, 22 bp, Artificial Sequence
  chemically synthesized
cctcccatccgccaagatcctg

SEQ ID NO: 47976 - DNA, 22 bp, Artificial Sequence
  chemically synthesized
ccatccgccaagatcctgagaa

SEQ ID NO: 47977 - DNA, 22 bp, Artificial Sequence
  chemically synthesized
agaagttggggattatatttca

SEQ ID NO: 47978 - DNA, 22 bp, Artificial Sequence
  chemically synthesized
gggattatatttcaacatgaga

SEQ ID NO: 47979 - DNA, 22 bp, Artificial Sequence
  chemically synthesized
tatttcaacatgagatttggag

SEQ ID NO: 47980 - DNA, 22 bp, Artificial Sequence
  chemically synthesized
caacatgagatttggagggaac

SEQ ID NO: 47981 - DNA, 22 bp, Artificial Sequence
  chemically synthesized
aacatgagatttggagggaaca

SEQ ID NO: 47982 - DNA, 22 bp, Artificial Sequence
  chemically synthesized
ggagggaacaaacatccaaacc

SEQ ID NO: 47983 - DNA, 22 bp, Artificial Sequence
  chemically synthesized
gagggaacaaacatccaaacca

SEQ ID NO: 47984 - DNA, 22 bp, Artificial Sequence
  chemically synthesized
tattcttttgcacatggatatc

SEQ ID NO: 47985 - DNA, 22 bp, Artificial Sequence
  chemically synthesized
attcttttgcacatggatatcc

SEQ ID NO: 47986 - DNA, 22 bp, Artificial Sequence
  chemically synthesized
ttcttttgcacatggatatcca

SEQ ID NO: 47987 - DNA, 22 bp, Artificial Sequence
  chemically synthesized
ttttgcacatggatatccaatg

SEQ ID NO: 47988 - DNA, 22 bp, Artificial Sequence
  chemically synthesized
ttgcacatggatatccaatgga

SEQ ID NO: 47989 - DNA, 22 bp, Artificial Sequence
  chemically synthesized
tgcacatggatatccaatggat

SEQ ID NO: 47990 - DNA, 22 bp, Artificial Sequence
  chemically synthesized
gcacatggatatccaatggata

SEQ ID NO: 47991 - DNA, 22 bp, Artificial Sequence
  chemically synthesized
cacatggatatccaatggatat

SEQ ID NO: 47992 - DNA, 22 bp, Artificial Sequence
  chemically synthesized
tttcagcaccatttcttgaaca

SEQ ID NO: 47993 - DNA, 22 bp, Artificial Sequence
  chemically synthesized
ttcagcaccatttcttgaacac

SEQ ID NO: 47994 - DNA, 22 bp, Artificial Sequence
  chemically synthesized
tcagcaccatttcttgaacact

SEQ ID NO: 47995 - DNA, 22 bp, Artificial Sequence
  chemically synthesized
cagcaccatttcttgaacactg

SEQ ID NO: 47996 - DNA, 22 bp, Artificial Sequence
  chemically synthesized
agcaccatttcttgaacactgt

SEQ ID NO: 47997 - DNA, 22 bp, Artificial Sequence
  chemically synthesized
cttgaacactgtgtcctttcct

SEQ ID NO: 47998 - DNA, 22 bp, Artificial Sequence
  chemically synthesized
ttgaacactgtgtcctttcctc

SEQ ID NO: 47999 - DNA, 22 bp, Artificial Sequence
  chemically synthesized
gaacactgtgtcctttcctcaa

SEQ ID NO: 48000 - DNA, 22 bp, Artificial Sequence
  chemically synthesized
aacactgtgtcctttcctcaat

SEQ ID NO: 48001 - DNA, 22 bp, Artificial Sequence
  chemically synthesized
tgtcctttcctcaatgtatatt

SEQ ID NO: 48002 - DNA, 22 bp, Artificial Sequence
  chemically synthesized
tcctcaatgtatattcttgtca

SEQ ID NO: 48003 - DNA, 22 bp, Artificial Sequence
  chemically synthesized
cctcaatgtatattcttgtcac

SEQ ID NO: 48004 - DNA, 22 bp, Artificial Sequence
  chemically synthesized
ctcaatgtatattcttgtcacc

SEQ ID NO: 48005 - DNA, 22 bp, Artificial Sequence
  chemically synthesized
aatgtatattcttgtcaccttt

SEQ ID NO: 48006 - DNA, 22 bp, Artificial Sequence
  chemically synthesized
ttgtcacctttgttgaaaatct

SEQ ID NO: 48007 - DNA, 22 bp, Artificial Sequence
  chemically synthesized
gtcacctttgttgaaaatctgt

SEQ ID NO: 48008 - DNA, 22 bp, Artificial Sequence
  chemically synthesized
tcacctttgttgaaaatctgtt

SEQ ID NO: 48009 - DNA, 22 bp, Artificial Sequence
  chemically synthesized
tgttgaaaatctgttggctata

SEQ ID NO: 48010 - DNA, 22 bp, Artificial Sequence
  chemically synthesized
gttgaaaatctgttggctataa

SEQ ID NO: 48011 - DNA, 22 bp, Artificial Sequence
  chemically synthesized
ttgaaaatctgttggctataaa

SEQ ID NO: 48012 - DNA, 22 bp, Artificial Sequence
  chemically synthesized
aaaatctgttggctataaatat

SEQ ID NO: 48013 - DNA, 22 bp, Artificial Sequence
  chemically synthesized
ttggctataaatatgtggatgc

SEQ ID NO: 48014 - DNA, 22 bp, Artificial Sequence
  chemically synthesized
gctataaatatgtggatgcatt

SEQ ID NO: 48015 - DNA, 22 bp, Artificial Sequence
  chemically synthesized
taaatatgtggatgcatttcta

SEQ ID NO: 48016 - DNA, 22 bp, Artificial Sequence
  chemically synthesized
ctaggttctctattctcttcca

SEQ ID NO: 48017 - DNA, 22 bp, Artificial Sequence
  chemically synthesized
taggttctctattctcttccat

SEQ ID NO: 48018 - DNA, 22 bp, Artificial Sequence
  chemically synthesized
ggttctctattctcttccattg

SEQ ID NO: 48019 - DNA, 22 bp, Artificial Sequence
  chemically synthesized
tctattctcttccattggtcta

SEQ ID NO: 48020 - DNA, 22 bp, Artificial Sequence
  chemically synthesized
tattctcttccattggtctaag

SEQ ID NO: 48021 - DNA, 22 bp, Artificial Sequence
  chemically synthesized
ttctcttccattggtctaagtg

SEQ ID NO: 48022 - DNA, 22 bp, Artificial Sequence
  chemically synthesized
tcttccattggtctaagtgtct

SEQ ID NO: 48023 - DNA, 22 bp, Artificial Sequence
  chemically synthesized
ttccattggtctaagtgtctgt

SEQ ID NO: 48024 - DNA, 22 bp, Artificial Sequence
  chemically synthesized
ccattggtctaagtgtctgttc

SEQ ID NO: 48025 - DNA, 22 bp, Artificial Sequence
  chemically synthesized
cattggtctaagtgtctgttct

SEQ ID NO: 48026 - DNA, 22 bp, Artificial Sequence
  chemically synthesized
gtctaagtgtctgttctaatgt

SEQ ID NO: 48027 - DNA, 22 bp, Artificial Sequence
  chemically synthesized
agtgtctgttctaatgtcagta

SEQ ID NO: 48028 - DNA, 22 bp, Artificial Sequence
  chemically synthesized
ttctaatgtcagtatcatgctg

SEQ ID NO: 48029 - DNA, 22 bp, Artificial Sequence
  chemically synthesized
taatgtcagtatcatgctgttt

SEQ ID NO: 48030 - DNA, 22 bp, Artificial Sequence
  chemically synthesized
atgtcagtatcatgctgtttag

SEQ ID NO: 48031 - DNA, 22 bp, Artificial Sequence
  chemically synthesized
tttaggttcctatacttttgta

SEQ ID NO: 48032 - DNA, 22 bp, Artificial Sequence
  chemically synthesized
aggttcctatacttttgtaata

SEQ ID NO: 48033 - DNA, 22 bp, Artificial Sequence
  chemically synthesized
ggttcctatacttttgtaatat

SEQ ID NO: 48034 - DNA, 22 bp, Artificial Sequence
  chemically synthesized
ctatacttttgtaatatacttt

SEQ ID NO: 48035 - DNA, 22 bp, Artificial Sequence
  chemically synthesized
tacttttgtaatatactttgaa

SEQ ID NO: 48036 - DNA, 22 bp, Artificial Sequence
  chemically synthesized
ttgtaatatactttgaaatcag

SEQ ID NO: 48037 - DNA, 22 bp, Artificial Sequence
  chemically synthesized
tgtaatatactttgaaatcagg

SEQ ID NO: 48038 - DNA, 22 bp, Artificial Sequence
  chemically synthesized
gtaatatactttgaaatcaggt

SEQ ID NO: 48039 - DNA, 22 bp, Artificial Sequence
  chemically synthesized
taatatactttgaaatcaggta

SEQ ID NO: 48040 - DNA, 22 bp, Artificial Sequence
  chemically synthesized
tgaaatcaggtagtatgatacc

SEQ ID NO: 48041 - DNA, 22 bp, Artificial Sequence
  chemically synthesized
gaaatcaggtagtatgatacct

SEQ ID NO: 48042 - DNA, 22 bp, Artificial Sequence
  chemically synthesized
aaatcaggtagtatgatacctc

SEQ ID NO: 48043 - DNA, 22 bp, Artificial Sequence
  chemically synthesized
tagcattgttcttttttcacag

SEQ ID NO: 48044 - DNA, 22 bp, Artificial Sequence
  chemically synthesized
gcattgttcttttttcacagga

SEQ ID NO: 48045 - DNA, 22 bp, Artificial Sequence
  chemically synthesized
ttcttttttcacaggatgactt

SEQ ID NO: 48046 - DNA, 22 bp, Artificial Sequence
  chemically synthesized
ttttttcacaggatgactttgg

SEQ ID NO: 48047 - DNA, 22 bp, Artificial Sequence
  chemically synthesized
ttttcacaggatgactttggct

SEQ ID NO: 48048 - DNA, 22 bp, Artificial Sequence
  chemically synthesized
tttcacaggatgactttggcta

SEQ ID NO: 48049 - DNA, 22 bp, Artificial Sequence
  chemically synthesized
ttcacaggatgactttggctac

SEQ ID NO: 48050 - DNA, 22 bp, Artificial Sequence
  chemically synthesized
tcacaggatgactttggctact

SEQ ID NO: 48051 - DNA, 22 bp, Artificial Sequence
  chemically synthesized
cacaggatgactttggctactg

SEQ ID NO: 48052 - DNA, 22 bp, Artificial Sequence
  chemically synthesized
acaggatgactttggctactgg

SEQ ID NO: 48053 - DNA, 22 bp, Artificial Sequence
  chemically synthesized
tggctactggagctatttttta

SEQ ID NO: 48054 - DNA, 22 bp, Artificial Sequence
  chemically synthesized
ggctactggagctattttttaa

SEQ ID NO: 48055 - DNA, 22 bp, Artificial Sequence
  chemically synthesized
gctactggagctattttttaat

SEQ ID NO: 48056 - DNA, 22 bp, Artificial Sequence
  chemically synthesized
ctggagctattttttaatttca

SEQ ID NO: 48057 - DNA, 22 bp, Artificial Sequence
  chemically synthesized
gagctattttttaatttcatac

SEQ ID NO: 48058 - DNA, 22 bp, Artificial Sequence
  chemically synthesized
ttttttaatttcatacaaattt

SEQ ID NO: 48059 - DNA, 22 bp, Artificial Sequence
  chemically synthesized
tttaatttcatacaaattttag

SEQ ID NO: 48060 - DNA, 22 bp, Artificial Sequence
  chemically synthesized
ttaatttcatacaaattttaga

SEQ ID NO: 48061 - DNA, 22 bp, Artificial Sequence
  chemically synthesized
taatttcatacaaattttagat

SEQ ID NO: 48062 - DNA, 22 bp, Artificial Sequence
  chemically synthesized
aatttcatacaaattttagatt

SEQ ID NO: 48063 - DNA, 22 bp, Artificial Sequence
  chemically synthesized
atttcatacaaattttagattg

SEQ ID NO: 48064 - DNA, 22 bp, Artificial Sequence
  chemically synthesized
catacaaattttagattggttt

SEQ ID NO: 48065 - DNA, 22 bp, Artificial Sequence
  chemically synthesized
atacaaattttagattggtttt

SEQ ID NO: 48066 - DNA, 22 bp, Artificial Sequence
  chemically synthesized
tagattggtttttccatttctg

SEQ ID NO: 48067 - DNA, 22 bp, Artificial Sequence
  chemically synthesized
agattggtttttccatttctgt

SEQ ID NO: 48068 - DNA, 22 bp, Artificial Sequence
  chemically synthesized
gattggtttttccatttctgtg

SEQ ID NO: 48069 - DNA, 22 bp, Artificial Sequence
  chemically synthesized
gtttttccatttctgtgaaaaa

SEQ ID NO: 48070 - DNA, 22 bp, Artificial Sequence
  chemically synthesized
ttccatttctgtgaaaaatgac

SEQ ID NO: 48071 - DNA, 22 bp, Artificial Sequence
  chemically synthesized
tccatttctgtgaaaaatgaca

SEQ ID NO: 48072 - DNA, 22 bp, Artificial Sequence
  chemically synthesized
ccatttctgtgaaaaatgacat

SEQ ID NO: 48073 - DNA, 22 bp, Artificial Sequence
  chemically synthesized
catttctgtgaaaaatgacatt

SEQ ID NO: 48074 - DNA, 22 bp, Artificial Sequence
  chemically synthesized
ctgtgaaaaatgacattgctat

SEQ ID NO: 48075 - DNA, 22 bp, Artificial Sequence
  chemically synthesized
tgtgaaaaatgacattgctatt

SEQ ID NO: 48076 - DNA, 22 bp, Artificial Sequence
  chemically synthesized
tgaaaaatgacattgctatttt

SEQ ID NO: 48077 - DNA, 22 bp, Artificial Sequence
  chemically synthesized
ctattttgatagcggtcatata

SEQ ID NO: 48078 - DNA, 22 bp, Artificial Sequence
  chemically synthesized
ttttgatagcggtcatatagaa

SEQ ID NO: 48079 - DNA, 22 bp, Artificial Sequence
  chemically synthesized
tgatagcggtcatatagaatct

SEQ ID NO: 48080 - DNA, 22 bp, Artificial Sequence
  chemically synthesized
gatagcggtcatatagaatctg

SEQ ID NO: 48081 - DNA, 22 bp, Artificial Sequence
  chemically synthesized
atagcggtcatatagaatctgt

SEQ ID NO: 48082 - DNA, 22 bp, Artificial Sequence
  chemically synthesized
tagattgctttgggtagtatgg

SEQ ID NO: 48083 - DNA, 22 bp, Artificial Sequence
  chemically synthesized
ctttgggtagtatggccatttt

SEQ ID NO: 48084 - DNA, 22 bp, Artificial Sequence
  chemically synthesized
tgggtagtatggccattttaac

SEQ ID NO: 48085 - DNA, 22 bp, Artificial Sequence
  chemically synthesized
gggtagtatggccattttaaca

SEQ ID NO: 48086 - DNA, 22 bp, Artificial Sequence
  chemically synthesized
ggtagtatggccattttaacaa

SEQ ID NO: 48087 - DNA, 22 bp, Artificial Sequence
  chemically synthesized
taacaatattaatttttctgat

SEQ ID NO: 48088 - DNA, 22 bp, Artificial Sequence
  chemically synthesized
aacaatattaatttttctgatc

SEQ ID NO: 48089 - DNA, 22 bp, Artificial Sequence
  chemically synthesized
acaatattaatttttctgatcc

SEQ ID NO: 48090 - DNA, 22 bp, Artificial Sequence
  chemically synthesized
atttttctgatccatgaacata

SEQ ID NO: 48091 - DNA, 22 bp, Artificial Sequence
  chemically synthesized
ttctgatccatgaacataggat

SEQ ID NO: 48092 - DNA, 22 bp, Artificial Sequence
  chemically synthesized
tctgatccatgaacataggata

SEQ ID NO: 48093 - DNA, 22 bp, Artificial Sequence
  chemically synthesized
ctgatccatgaacataggatat

SEQ ID NO: 48094 - DNA, 22 bp, Artificial Sequence
  chemically synthesized
tgatccatgaacataggatatc

SEQ ID NO: 48095 - DNA, 22 bp, Artificial Sequence
  chemically synthesized
atccatgaacataggatatctc

SEQ ID NO: 48096 - DNA, 22 bp, Artificial Sequence
  chemically synthesized
tccatttgtttctgtccttttc

SEQ ID NO: 48097 - DNA, 22 bp, Artificial Sequence
  chemically synthesized
catttgtttctgtccttttcaa

SEQ ID NO: 48098 - DNA, 22 bp, Artificial Sequence
  chemically synthesized
gtttctgtccttttcaattctt

SEQ ID NO: 48099 - DNA, 22 bp, Artificial Sequence
  chemically synthesized
tttctgtccttttcaattcttt

SEQ ID NO: 48100 - DNA, 22 bp, Artificial Sequence
  chemically synthesized
ctgtccttttcaattcttttat

SEQ ID NO: 48101 - DNA, 22 bp, Artificial Sequence
  chemically synthesized
tgtccttttcaattcttttatc

SEQ ID NO: 48102 - DNA, 22 bp, Artificial Sequence
  chemically synthesized
tccttttcaattcttttatcag

SEQ ID NO: 48103 - DNA, 22 bp, Artificial Sequence
  chemically synthesized
ttcaattcttttatcagtgttt

SEQ ID NO: 48104 - DNA, 22 bp, Artificial Sequence
  chemically synthesized
tcaattcttttatcagtgtttt

SEQ ID NO: 48105 - DNA, 22 bp, Artificial Sequence
  chemically synthesized
caattcttttatcagtgttttg

SEQ ID NO: 48106 - DNA, 22 bp, Artificial Sequence
  chemically synthesized
aattcttttatcagtgttttgt

SEQ ID NO: 48107 - DNA, 22 bp, Artificial Sequence
  chemically synthesized
ttttatcagtgttttgtagttt

SEQ ID NO: 48108 - DNA, 22 bp, Artificial Sequence
  chemically synthesized
ttatcagtgttttgtagttttc

SEQ ID NO: 48109 - DNA, 22 bp, Artificial Sequence
  chemically synthesized
tatcagtgttttgtagttttcc

SEQ ID NO: 48110 - DNA, 22 bp, Artificial Sequence
  chemically synthesized
atcagtgttttgtagttttccg

SEQ ID NO: 48111 - DNA, 22 bp, Artificial Sequence
  chemically synthesized
tcagtgttttgtagttttccga

SEQ ID NO: 48112 - DNA, 22 bp, Artificial Sequence
  chemically synthesized
tgtagttttccgaatagaggtt

SEQ ID NO: 48113 - DNA, 22 bp, Artificial Sequence
  chemically synthesized
gtagttttccgaatagaggttt

SEQ ID NO: 48114 - DNA, 22 bp, Artificial Sequence
  chemically synthesized
tagttttccgaatagaggtttt

SEQ ID NO: 48115 - DNA, 22 bp, Artificial Sequence
  chemically synthesized
tccgaatagaggtttttcggtt

SEQ ID NO: 48116 - DNA, 22 bp, Artificial Sequence
  chemically synthesized
ccgaatagaggtttttcggttc

SEQ ID NO: 48117 - DNA, 22 bp, Artificial Sequence
  chemically synthesized
cgaatagaggtttttcggttcc

SEQ ID NO: 48118 - DNA, 22 bp, Artificial Sequence
  chemically synthesized
ttcggttccttggttaaattta

SEQ ID NO: 48119 - DNA, 22 bp, Artificial Sequence
  chemically synthesized
tcggttccttggttaaatttat

SEQ ID NO: 48120 - DNA, 22 bp, Artificial Sequence
  chemically synthesized
cggttccttggttaaatttatc

SEQ ID NO: 48121 - DNA, 22 bp, Artificial Sequence
  chemically synthesized
ggttccttggttaaatttatcc

SEQ ID NO: 48122 - DNA, 22 bp, Artificial Sequence
  chemically synthesized
cttggttaaatttatccctaaa

SEQ ID NO: 48123 - DNA, 22 bp, Artificial Sequence
  chemically synthesized
ggttaaatttatccctaaatat

SEQ ID NO: 48124 - DNA, 22 bp, Artificial Sequence
  chemically synthesized
gttaaatttatccctaaatatt

SEQ ID NO: 48125 - DNA, 22 bp, Artificial Sequence
  chemically synthesized
aatttatccctaaatattttat

SEQ ID NO: 48126 - DNA, 22 bp, Artificial Sequence
  chemically synthesized
atccctaaatattttatttttt

SEQ ID NO: 48127 - DNA, 22 bp, Artificial Sequence
  chemically synthesized
tccctaaatattttatttttta

SEQ ID NO: 48128 - DNA, 22 bp, Artificial Sequence
  chemically synthesized
aatattttattttttagctatt

SEQ ID NO: 48129 - DNA, 22 bp, Artificial Sequence
  chemically synthesized
tattttttagctattgtaaatg

SEQ ID NO: 48130 - DNA, 22 bp, Artificial Sequence
  chemically synthesized
attttttagctattgtaaatgg

SEQ ID NO: 48131 - DNA, 22 bp, Artificial Sequence
  chemically synthesized
ttttttagctattgtaaatggg

SEQ ID NO: 48132 - DNA, 22 bp, Artificial Sequence
  chemically synthesized
tttagctattgtaaatgggatt

SEQ ID NO: 48133 - DNA, 22 bp, Artificial Sequence
  chemically synthesized
ttagctattgtaaatgggattg

SEQ ID NO: 48134 - DNA, 22 bp, Artificial Sequence
  chemically synthesized
tagctattgtaaatgggattgc

SEQ ID NO: 48135 - DNA, 22 bp, Artificial Sequence
  chemically synthesized
agctattgtaaatgggattgcc

SEQ ID NO: 48136 - DNA, 22 bp, Artificial Sequence
  chemically synthesized
gctattgtaaatgggattgcct

SEQ ID NO: 48137 - DNA, 22 bp, Artificial Sequence
  chemically synthesized
ttgtaaatgggattgccttctt

SEQ ID NO: 48138 - DNA, 22 bp, Artificial Sequence
  chemically synthesized
taaatgggattgccttcttaat

SEQ ID NO: 48139 - DNA, 22 bp, Artificial Sequence
  chemically synthesized
ccttcttaatttccttctcagc

SEQ ID NO: 48140 - DNA, 22 bp, Artificial Sequence
  chemically synthesized
cttaatttccttctcagctagt

SEQ ID NO: 48141 - DNA, 22 bp, Artificial Sequence
  chemically synthesized
ttaatttccttctcagctagtt

SEQ ID NO: 48142 - DNA, 22 bp, Artificial Sequence
  chemically synthesized
aatttccttctcagctagttta

SEQ ID NO: 48143 - DNA, 22 bp, Artificial Sequence
  chemically synthesized
atttccttctcagctagtttat

SEQ ID NO: 48144 - DNA, 22 bp, Artificial Sequence
  chemically synthesized
ccttctcagctagtttattatt

SEQ ID NO: 48145 - DNA, 22 bp, Artificial Sequence
  chemically synthesized
cttctcagctagtttattattg

SEQ ID NO: 48146 - DNA, 22 bp, Artificial Sequence
  chemically synthesized
ctcagctagtttattattggtg

SEQ ID NO: 48147 - DNA, 22 bp, Artificial Sequence
  chemically synthesized
tcagctagtttattattggtgt

SEQ ID NO: 48148 - DNA, 22 bp, Artificial Sequence
  chemically synthesized
agctagtttattattggtgtgt

SEQ ID NO: 48149 - DNA, 22 bp, Artificial Sequence
  chemically synthesized
gtttattattggtgtgtagaaa

SEQ ID NO: 48150 - DNA, 22 bp, Artificial Sequence
  chemically synthesized
attattggtgtgtagaaacatt

SEQ ID NO: 48151 - DNA, 22 bp, Artificial Sequence
  chemically synthesized
ttattggtgtgtagaaacattg

SEQ ID NO: 48152 - DNA, 22 bp, Artificial Sequence
  chemically synthesized
ttggtgtgtagaaacattgctt

SEQ ID NO: 48153 - DNA, 22 bp, Artificial Sequence
  chemically synthesized
gtgtgtagaaacattgcttgtt

SEQ ID NO: 48154 - DNA, 22 bp, Artificial Sequence
  chemically synthesized
cttgtttcatatgctgattttg

SEQ ID NO: 48155 - DNA, 22 bp, Artificial Sequence
  chemically synthesized
gtttcatatgctgattttgtct

SEQ ID NO: 48156 - DNA, 22 bp, Artificial Sequence
  chemically synthesized
tttcatatgctgattttgtctc

SEQ ID NO: 48157 - DNA, 22 bp, Artificial Sequence
  chemically synthesized
catatgctgattttgtctcctg

SEQ ID NO: 48158 - DNA, 22 bp, Artificial Sequence
  chemically synthesized
atatgctgattttgtctcctgt

SEQ ID NO: 48159 - DNA, 22 bp, Artificial Sequence
  chemically synthesized
attttgtctcctgtaactttac

SEQ ID NO: 48160 - DNA, 22 bp, Artificial Sequence
  chemically synthesized
tgtctcctgtaactttactgaa

SEQ ID NO: 48161 - DNA, 22 bp, Artificial Sequence
  chemically synthesized
gtctcctgtaactttactgaat

SEQ ID NO: 48162 - DNA, 22 bp, Artificial Sequence
  chemically synthesized
tctcctgtaactttactgaatt

SEQ ID NO: 48163 - DNA, 22 bp, Artificial Sequence
  chemically synthesized
ctgtaactttactgaatttatt

SEQ ID NO: 48164 - DNA, 22 bp, Artificial Sequence
  chemically synthesized
taactttactgaatttattttt

SEQ ID NO: 48165 - DNA, 22 bp, Artificial Sequence
  chemically synthesized
tactgaatttatttttcagcgc

SEQ ID NO: 48166 - DNA, 22 bp, Artificial Sequence
  chemically synthesized
actgaatttatttttcagcgct

SEQ ID NO: 48167 - DNA, 22 bp, Artificial Sequence
  chemically synthesized
ctgaatttatttttcagcgcta

SEQ ID NO: 48168 - DNA, 22 bp, Artificial Sequence
  chemically synthesized
aatttatttttcagcgctaaga

SEQ ID NO: 48169 - DNA, 22 bp, Artificial Sequence
  chemically synthesized
atttttcagcgctaagagtgct

SEQ ID NO: 48170 - DNA, 22 bp, Artificial Sequence
  chemically synthesized
tttttcagcgctaagagtgctt

SEQ ID NO: 48171 - DNA, 22 bp, Artificial Sequence
  chemically synthesized
ttcagcgctaagagtgctttgg

SEQ ID NO: 48172 - DNA, 22 bp, Artificial Sequence
  chemically synthesized
tcagcgctaagagtgctttggt

SEQ ID NO: 48173 - DNA, 22 bp, Artificial Sequence
  chemically synthesized
cagcgctaagagtgctttggtg

SEQ ID NO: 48174 - DNA, 22 bp, Artificial Sequence
  chemically synthesized
agcgctaagagtgctttggtgg

SEQ ID NO: 48175 - DNA, 22 bp, Artificial Sequence
  chemically synthesized
agagtgctttggtggagtcttg

SEQ ID NO: 48176 - DNA, 22 bp, Artificial Sequence
  chemically synthesized
tggtggagtcttggtttttcta

SEQ ID NO: 48177 - DNA, 22 bp, Artificial Sequence
  chemically synthesized
ggtggagtcttggtttttctag

SEQ ID NO: 48178 - DNA, 22 bp, Artificial Sequence
  chemically synthesized
gtggagtcttggtttttctagg

SEQ ID NO: 48179 - DNA, 22 bp, Artificial Sequence
  chemically synthesized
ggtttttctaggtataaaatca

SEQ ID NO: 48180 - DNA, 22 bp, Artificial Sequence
  chemically synthesized
gtttttctaggtataaaatcat

SEQ ID NO: 48181 - DNA, 22 bp, Artificial Sequence
  chemically synthesized
ttctaggtataaaatcatgtca

SEQ ID NO: 48182 - DNA, 22 bp, Artificial Sequence
  chemically synthesized
tctaggtataaaatcatgtcat

SEQ ID NO: 48183 - DNA, 22 bp, Artificial Sequence
  chemically synthesized
ctaggtataaaatcatgtcatc

SEQ ID NO: 48184 - DNA, 22 bp, Artificial Sequence
  chemically synthesized
taggtataaaatcatgtcatct

SEQ ID NO: 48185 - DNA, 22 bp, Artificial Sequence
  chemically synthesized
ggtataaaatcatgtcatctgg

SEQ ID NO: 48186 - DNA, 22 bp, Artificial Sequence
  chemically synthesized
gaaagatggacagtttgacttc

SEQ ID NO: 48187 - DNA, 22 bp, Artificial Sequence
  chemically synthesized
gacttcatcttttcctatttgc

SEQ ID NO: 48188 - DNA, 22 bp, Artificial Sequence
  chemically synthesized
acttcatcttttcctatttgca

SEQ ID NO: 48189 - DNA, 22 bp, Artificial Sequence
  chemically synthesized
catcttttcctatttgcatgcc

SEQ ID NO: 48190 - DNA, 22 bp, Artificial Sequence
  chemically synthesized
atcttttcctatttgcatgcct

SEQ ID NO: 48191 - DNA, 22 bp, Artificial Sequence
  chemically synthesized
ttcctatttgcatgccttttct

SEQ ID NO: 48192 - DNA, 22 bp, Artificial Sequence
  chemically synthesized
tcctatttgcatgccttttctt

SEQ ID NO: 48193 - DNA, 22 bp, Artificial Sequence
  chemically synthesized
cctatttgcatgccttttcttt

SEQ ID NO: 48194 - DNA, 22 bp, Artificial Sequence
  chemically synthesized
ctatttgcatgccttttctttc

SEQ ID NO: 48195 - DNA, 22 bp, Artificial Sequence
  chemically synthesized
tttgcatgccttttctttcttt

SEQ ID NO: 48196 - DNA, 22 bp, Artificial Sequence
  chemically synthesized
gcatgccttttctttctttctt

SEQ ID NO: 48197 - DNA, 22 bp, Artificial Sequence
  chemically synthesized
catgccttttctttctttcttt

SEQ ID NO: 48198 - DNA, 22 bp, Artificial Sequence
  chemically synthesized
ttctttctttctttctctgacc

SEQ ID NO: 48199 - DNA, 22 bp, Artificial Sequence
  chemically synthesized
tctttctttctttctctgacct

SEQ ID NO: 48200 - DNA, 22 bp, Artificial Sequence
  chemically synthesized
ctttctttctttctctgacctg

SEQ ID NO: 48201 - DNA, 22 bp, Artificial Sequence
  chemically synthesized
tttctttctttctctgacctga

SEQ ID NO: 48202 - DNA, 22 bp, Artificial Sequence
  chemically synthesized
tctttctttctctgacctgaaa

SEQ ID NO: 48203 - DNA, 22 bp, Artificial Sequence
  chemically synthesized
ctttctttctctgacctgaaag

SEQ ID NO: 48204 - DNA, 22 bp, Artificial Sequence
  chemically synthesized
tttctttctctgacctgaaagc

SEQ ID NO: 48205 - DNA, 22 bp, Artificial Sequence
  chemically synthesized
tctttctctgacctgaaagctg

SEQ ID NO: 48206 - DNA, 22 bp, Artificial Sequence
  chemically synthesized
ctttctctgacctgaaagctgt

SEQ ID NO: 48207 - DNA, 22 bp, Artificial Sequence
  chemically synthesized
tttctctgacctgaaagctgtg

SEQ ID NO: 48208 - DNA, 22 bp, Artificial Sequence
  chemically synthesized
tctctgacctgaaagctgtggc

SEQ ID NO: 48209 - DNA, 22 bp, Artificial Sequence
  chemically synthesized
ctctgacctgaaagctgtggct

SEQ ID NO: 48210 - DNA, 22 bp, Artificial Sequence
  chemically synthesized
tctgacctgaaagctgtggcta

SEQ ID NO: 48211 - DNA, 22 bp, Artificial Sequence
  chemically synthesized
tgacctgaaagctgtggctagg

SEQ ID NO: 48212 - DNA, 22 bp, Artificial Sequence
  chemically synthesized
acctgaaagctgtggctaggac

SEQ ID NO: 48213 - DNA, 22 bp, Artificial Sequence
  chemically synthesized
aaagctgtggctaggacttcca

SEQ ID NO: 48214 - DNA, 22 bp, Artificial Sequence
  chemically synthesized
tggctaggacttccagtattat

SEQ ID NO: 48215 - DNA, 22 bp, Artificial Sequence
  chemically synthesized
ggacttccagtattatattgaa

SEQ ID NO: 48216 - DNA, 22 bp, Artificial Sequence
  chemically synthesized
ccagtattatattgaataggag

SEQ ID NO: 48217 - DNA, 22 bp, Artificial Sequence
  chemically synthesized
cagtattatattgaataggagt

SEQ ID NO: 48218 - DNA, 22 bp, Artificial Sequence
  chemically synthesized
tattgaataggagtgatggaag

SEQ ID NO: 48219 - DNA, 22 bp, Artificial Sequence
  chemically synthesized
aataggagtgatggaagtgggc

SEQ ID NO: 48220 - DNA, 22 bp, Artificial Sequence
  chemically synthesized
attttgtttcagttcttagagg

SEQ ID NO: 48221 - DNA, 22 bp, Artificial Sequence
  chemically synthesized
ttttgtttcagttcttagagga

SEQ ID NO: 48222 - DNA, 22 bp, Artificial Sequence
  chemically synthesized
tgtttcagttcttagaggaaag

SEQ ID NO: 48223 - DNA, 22 bp, Artificial Sequence
  chemically synthesized
gtttcagttcttagaggaaagg

SEQ ID NO: 48224 - DNA, 22 bp, Artificial Sequence
  chemically synthesized
tttcagttcttagaggaaaggc

SEQ ID NO: 48225 - DNA, 22 bp, Artificial Sequence
  chemically synthesized
cagttcttagaggaaaggcttc

SEQ ID NO: 48226 - DNA, 22 bp, Artificial Sequence
  chemically synthesized
agttcttagaggaaaggcttcc

SEQ ID NO: 48227 - DNA, 22 bp, Artificial Sequence
  chemically synthesized
ttagaggaaaggcttccagctt

SEQ ID NO: 48228 - DNA, 22 bp, Artificial Sequence
  chemically synthesized
agaggaaaggcttccagctttt

SEQ ID NO: 48229 - DNA, 22 bp, Artificial Sequence
  chemically synthesized
gaggaaaggcttccagcttttc

SEQ ID NO: 48230 - DNA, 22 bp, Artificial Sequence
  chemically synthesized
ccagcttttcccaattcagtat

SEQ ID NO: 48231 - DNA, 22 bp, Artificial Sequence
  chemically synthesized
cagcttttcccaattcagtatg

SEQ ID NO: 48232 - DNA, 22 bp, Artificial Sequence
  chemically synthesized
ttcccaattcagtatgatgtta

SEQ ID NO: 48233 - DNA, 22 bp, Artificial Sequence
  chemically synthesized
tcccaattcagtatgatgttag

SEQ ID NO: 48234 - DNA, 22 bp, Artificial Sequence
  chemically synthesized
cccaattcagtatgatgttagc

SEQ ID NO: 48235 - DNA, 22 bp, Artificial Sequence
  chemically synthesized
ccaattcagtatgatgttagct

SEQ ID NO: 48236 - DNA, 22 bp, Artificial Sequence
  chemically synthesized
agtatgatgttagctgtgggtt

SEQ ID NO: 48237 - DNA, 22 bp, Artificial Sequence
  chemically synthesized
gctgtgggtttgtcatatatga

SEQ ID NO: 48238 - DNA, 22 bp, Artificial Sequence
  chemically synthesized
tgggtttgtcatatatgacttt

SEQ ID NO: 48239 - DNA, 22 bp, Artificial Sequence
  chemically synthesized
gtcatatatgacttttattata

SEQ ID NO: 48240 - DNA, 22 bp, Artificial Sequence
  chemically synthesized
tcatatatgacttttattatat

SEQ ID NO: 48241 - DNA, 22 bp, Artificial Sequence
  chemically synthesized
ttattatattgagatatgttcc

SEQ ID NO: 48242 - DNA, 22 bp, Artificial Sequence
  chemically synthesized
tattatattgagatatgttcct

SEQ ID NO: 48243 - DNA, 22 bp, Artificial Sequence
  chemically synthesized
attatattgagatatgttcctt

SEQ ID NO: 48244 - DNA, 22 bp, Artificial Sequence
  chemically synthesized
ttatattgagatatgttccttc

SEQ ID NO: 48245 - DNA, 22 bp, Artificial Sequence
  chemically synthesized
tattgagatatgttccttctat

SEQ ID NO: 48246 - DNA, 22 bp, Artificial Sequence
  chemically synthesized
agatatgttccttctatgattg

SEQ ID NO: 48247 - DNA, 22 bp, Artificial Sequence
  chemically synthesized
cttctatgattggctgcagata

SEQ ID NO: 48248 - DNA, 22 bp, Artificial Sequence
  chemically synthesized
ctatgattggctgcagatagtt

SEQ ID NO: 48249 - DNA, 22 bp, Artificial Sequence
  chemically synthesized
tatgattggctgcagatagttt

SEQ ID NO: 48250 - DNA, 22 bp, Artificial Sequence
  chemically synthesized
tgattggctgcagatagttttt

SEQ ID NO: 48251 - DNA, 22 bp, Artificial Sequence
  chemically synthesized
gctgcagatagtttttatcatg

SEQ ID NO: 48252 - DNA, 22 bp, Artificial Sequence
  chemically synthesized
cagatagtttttatcatgaagg

SEQ ID NO: 48253 - DNA, 22 bp, Artificial Sequence
  chemically synthesized
ttatcatgaaggaatgttaaat

SEQ ID NO: 48254 - DNA, 22 bp, Artificial Sequence
  chemically synthesized
tatcatgaaggaatgttaaatt

SEQ ID NO: 48255 - DNA, 22 bp, Artificial Sequence
  chemically synthesized
atcatgaaggaatgttaaattt

SEQ ID NO: 48256 - DNA, 22 bp, Artificial Sequence
  chemically synthesized
tcatgaaggaatgttaaatttt

SEQ ID NO: 48257 - DNA, 22 bp, Artificial Sequence
  chemically synthesized
aattttatcaaatactttttct

SEQ ID NO: 48258 - DNA, 22 bp, Artificial Sequence
  chemically synthesized
tatcaaatactttttctgtatc

SEQ ID NO: 48259 - DNA, 22 bp, Artificial Sequence
  chemically synthesized
atcaaatactttttctgtatct

SEQ ID NO: 48260 - DNA, 22 bp, Artificial Sequence
  chemically synthesized
tcaaatactttttctgtatcta

SEQ ID NO: 48261 - DNA, 22 bp, Artificial Sequence
  chemically synthesized
tttctgtatctattgagatgat

SEQ ID NO: 48262 - DNA, 22 bp, Artificial Sequence
  chemically synthesized
ttctgtatctattgagatgatc

SEQ ID NO: 48263 - DNA, 22 bp, Artificial Sequence
  chemically synthesized
tctgtatctattgagatgatca

SEQ ID NO: 48264 - DNA, 22 bp, Artificial Sequence
  chemically synthesized
ctgtatctattgagatgatcat

SEQ ID NO: 48265 - DNA, 22 bp, Artificial Sequence
  chemically synthesized
tgtatctattgagatgatcata

SEQ ID NO: 48266 - DNA, 22 bp, Artificial Sequence
  chemically synthesized
tatctattgagatgatcatatg

SEQ ID NO: 48267 - DNA, 22 bp, Artificial Sequence
  chemically synthesized
ttgagatgatcatatggttttt

SEQ ID NO: 48268 - DNA, 22 bp, Artificial Sequence
  chemically synthesized
agatgatcatatggtttttgtt

SEQ ID NO: 48269 - DNA, 22 bp, Artificial Sequence
  chemically synthesized
ttgttctttttgttgatgtgat

SEQ ID NO: 48270 - DNA, 22 bp, Artificial Sequence
  chemically synthesized
tgttctttttgttgatgtgatg

SEQ ID NO: 48271 - DNA, 22 bp, Artificial Sequence
  chemically synthesized
gttctttttgttgatgtgatgt

SEQ ID NO: 48272 - DNA, 22 bp, Artificial Sequence
  chemically synthesized
ttctttttgttgatgtgatgta

SEQ ID NO: 48273 - DNA, 22 bp, Artificial Sequence
  chemically synthesized
tttttgttgatgtgatgtatca

SEQ ID NO: 48274 - DNA, 22 bp, Artificial Sequence
  chemically synthesized
tttgttgatgtgatgtatcaca

SEQ ID NO: 48275 - DNA, 22 bp, Artificial Sequence
  chemically synthesized
ttgttgatgtgatgtatcacat

SEQ ID NO: 48276 - DNA, 22 bp, Artificial Sequence
  chemically synthesized
tgttgatgtgatgtatcacatt

SEQ ID NO: 48277 - DNA, 22 bp, Artificial Sequence
  chemically synthesized
gttgatgtgatgtatcacattt

SEQ ID NO: 48278 - DNA, 22 bp, Artificial Sequence
  chemically synthesized
ttgatgtgatgtatcacattta

SEQ ID NO: 48279 - DNA, 22 bp, Artificial Sequence
  chemically synthesized
atgtgatgtatcacatttattg

SEQ ID NO: 48280 - DNA, 22 bp, Artificial Sequence
  chemically synthesized
attgatttgaactgttcttgca

SEQ ID NO: 48281 - DNA, 22 bp, Artificial Sequence
  chemically synthesized
ttgatttgaactgttcttgcaa

SEQ ID NO: 48282 - DNA, 22 bp, Artificial Sequence
  chemically synthesized
atttgaactgttcttgcaaccc

SEQ ID NO: 48283 - DNA, 22 bp, Artificial Sequence
  chemically synthesized
gaactgttcttgcaaccctagt

SEQ ID NO: 48284 - DNA, 22 bp, Artificial Sequence
  chemically synthesized
aactgttcttgcaaccctagta

SEQ ID NO: 48285 - DNA, 22 bp, Artificial Sequence
  chemically synthesized
ttcttgcaaccctagtataaat

SEQ ID NO: 48286 - DNA, 22 bp, Artificial Sequence
  chemically synthesized
ttgcaaccctagtataaatccc

SEQ ID NO: 48287 - DNA, 22 bp, Artificial Sequence
  chemically synthesized
gcaaccctagtataaatcccac

SEQ ID NO: 48288 - DNA, 22 bp, Artificial Sequence
  chemically synthesized
caaccctagtataaatcccact

SEQ ID NO: 48289 - DNA, 22 bp, Artificial Sequence
  chemically synthesized
gtataaatcccacttgatcatg

SEQ ID NO: 48290 - DNA, 22 bp, Artificial Sequence
  chemically synthesized
gatcatggtgtattatcttttg

SEQ ID NO: 48291 - DNA, 22 bp, Artificial Sequence
  chemically synthesized
atcatggtgtattatcttttgg

SEQ ID NO: 48292 - DNA, 22 bp, Artificial Sequence
  chemically synthesized
tcttttggatgtactgttggat

SEQ ID NO: 48293 - DNA, 22 bp, Artificial Sequence
  chemically synthesized
ttggatgtactgttggattcag

SEQ ID NO: 48294 - DNA, 22 bp, Artificial Sequence
  chemically synthesized
tggatgtactgttggattcagt

SEQ ID NO: 48295 - DNA, 22 bp, Artificial Sequence
  chemically synthesized
ggatgtactgttggattcagtt

SEQ ID NO: 48296 - DNA, 22 bp, Artificial Sequence
  chemically synthesized
gatgtactgttggattcagttt

SEQ ID NO: 48297 - DNA, 22 bp, Artificial Sequence
  chemically synthesized
ttggattcagtttgctagtatt

SEQ ID NO: 48298 - DNA, 22 bp, Artificial Sequence
  chemically synthesized
gattcagtttgctagtattttg

SEQ ID NO: 48299 - DNA, 22 bp, Artificial Sequence
  chemically synthesized
agtttgctagtattttgttgag

SEQ ID NO: 48300 - DNA, 22 bp, Artificial Sequence
  chemically synthesized
gctagtattttgttgaggattt

SEQ ID NO: 48301 - DNA, 22 bp, Artificial Sequence
  chemically synthesized
ctagtattttgttgaggatttt

SEQ ID NO: 48302 - DNA, 22 bp, Artificial Sequence
  chemically synthesized
gtattttgttgaggattttcac

SEQ ID NO: 48303 - DNA, 22 bp, Artificial Sequence
  chemically synthesized
tgttgaggattttcacacctat

SEQ ID NO: 48304 - DNA, 22 bp, Artificial Sequence
  chemically synthesized
gttgaggattttcacacctatg

SEQ ID NO: 48305 - DNA, 22 bp, Artificial Sequence
  chemically synthesized
ttgaggattttcacacctatgt

SEQ ID NO: 48306 - DNA, 22 bp, Artificial Sequence
  chemically synthesized
aggattttcacacctatgttcc

SEQ ID NO: 48307 - DNA, 22 bp, Artificial Sequence
  chemically synthesized
tcacacctatgttccatcaggg

SEQ ID NO: 48308 - DNA, 22 bp, Artificial Sequence
  chemically synthesized
cacacctatgttccatcaggga

SEQ ID NO: 48309 - DNA, 22 bp, Artificial Sequence
  chemically synthesized
acacctatgttccatcagggat

SEQ ID NO: 48310 - DNA, 22 bp, Artificial Sequence
  chemically synthesized
tgttccatcagggatattgacc

SEQ ID NO: 48311 - DNA, 22 bp, Artificial Sequence
  chemically synthesized
catcagggatattgacctgcag

SEQ ID NO: 48312 - DNA, 22 bp, Artificial Sequence
  chemically synthesized
acctgcagttttatttttactt

SEQ ID NO: 48313 - DNA, 22 bp, Artificial Sequence
  chemically synthesized
cagttttatttttacttgcatc

SEQ ID NO: 48314 - DNA, 22 bp, Artificial Sequence
  chemically synthesized
tatttttacttgcatccttgtc

SEQ ID NO: 48315 - DNA, 22 bp, Artificial Sequence
  chemically synthesized
atttttacttgcatccttgtct

SEQ ID NO: 48316 - DNA, 22 bp, Artificial Sequence
  chemically synthesized
tttttacttgcatccttgtctg

SEQ ID NO: 48317 - DNA, 22 bp, Artificial Sequence
  chemically synthesized
ttacttgcatccttgtctggtt

SEQ ID NO: 48318 - DNA, 22 bp, Artificial Sequence
  chemically synthesized
tacttgcatccttgtctggtta

SEQ ID NO: 48319 - DNA, 22 bp, Artificial Sequence
  chemically synthesized
acttgcatccttgtctggttat

SEQ ID NO: 48320 - DNA, 22 bp, Artificial Sequence
  chemically synthesized
cttgcatccttgtctggttatg

SEQ ID NO: 48321 - DNA, 22 bp, Artificial Sequence
  chemically synthesized
gcatccttgtctggttatggaa

SEQ ID NO: 48322 - DNA, 22 bp, Artificial Sequence
  chemically synthesized
catccttgtctggttatggaat

SEQ ID NO: 48323 - DNA, 22 bp, Artificial Sequence
  chemically synthesized
gtctggttatggaatcaggata

SEQ ID NO: 48324 - DNA, 22 bp, Artificial Sequence
  chemically synthesized
tctggttatggaatcaggataa

SEQ ID NO: 48325 - DNA, 22 bp, Artificial Sequence
  chemically synthesized
gttatggaatcaggataatact

SEQ ID NO: 48326 - DNA, 22 bp, Artificial Sequence
  chemically synthesized
tggaatcaggataatactggcc

SEQ ID NO: 48327 - DNA, 22 bp, Artificial Sequence
  chemically synthesized
gcctcagagaatgagttaggga

SEQ ID NO: 48328 - DNA, 22 bp, Artificial Sequence
  chemically synthesized
agagaatgagttagggagaatt

SEQ ID NO: 48329 - DNA, 22 bp, Artificial Sequence
  chemically synthesized
gggagaattccttcctgtttaa

SEQ ID NO: 48330 - DNA, 22 bp, Artificial Sequence
  chemically synthesized
cttcctgtttaatttttaaaag

SEQ ID NO: 48331 - DNA, 22 bp, Artificial Sequence
  chemically synthesized
cctgtttaatttttaaaagaat

SEQ ID NO: 48332 - DNA, 22 bp, Artificial Sequence
  chemically synthesized
ctgtttaatttttaaaagaatt

SEQ ID NO: 48333 - DNA, 22 bp, Artificial Sequence
  chemically synthesized
tttaatttttaaaagaatttaa

SEQ ID NO: 48334 - DNA, 22 bp, Artificial Sequence
  chemically synthesized
aatttttaaaagaatttaagga

SEQ ID NO: 48335 - DNA, 22 bp, Artificial Sequence
  chemically synthesized
atttttaaaagaatttaaggag

SEQ ID NO: 48336 - DNA, 22 bp, Artificial Sequence
  chemically synthesized
ttaaaagaatttaaggagactt

SEQ ID NO: 48337 - DNA, 22 bp, Artificial Sequence
  chemically synthesized
taaaagaatttaaggagacttg

SEQ ID NO: 48338 - DNA, 22 bp, Artificial Sequence
  chemically synthesized
aaaagaatttaaggagacttgt

SEQ ID NO: 48339 - DNA, 22 bp, Artificial Sequence
  chemically synthesized
aaagaatttaaggagacttgtt

SEQ ID NO: 48340 - DNA, 22 bp, Artificial Sequence
  chemically synthesized
aaggagacttgttagttttctt

SEQ ID NO: 48341 - DNA, 22 bp, Artificial Sequence
  chemically synthesized
aggagacttgttagttttcttt

SEQ ID NO: 48342 - DNA, 22 bp, Artificial Sequence
  chemically synthesized
gttagttttctttgaaagtttg

SEQ ID NO: 48343 - DNA, 22 bp, Artificial Sequence
  chemically synthesized
ttagttttctttgaaagtttgg

SEQ ID NO: 48344 - DNA, 22 bp, Artificial Sequence
  chemically synthesized
gttttctttgaaagtttggtaa

SEQ ID NO: 48345 - DNA, 22 bp, Artificial Sequence
  chemically synthesized
tctttgaaagtttggtaaaatt

SEQ ID NO: 48346 - DNA, 22 bp, Artificial Sequence
  chemically synthesized
ctttgaaagtttggtaaaattt

SEQ ID NO: 48347 - DNA, 22 bp, Artificial Sequence
  chemically synthesized
tttgaaagtttggtaaaatttg

SEQ ID NO: 48348 - DNA, 22 bp, Artificial Sequence
  chemically synthesized
tgaaagtttggtaaaatttgac

SEQ ID NO: 48349 - DNA, 22 bp, Artificial Sequence
  chemically synthesized
gaaagtttggtaaaatttgaca

SEQ ID NO: 48350 - DNA, 22 bp, Artificial Sequence
  chemically synthesized
aaagtttggtaaaatttgacag

SEQ ID NO: 48351 - DNA, 22 bp, Artificial Sequence
  chemically synthesized
ggtaaaatttgacagtaaagcc

SEQ ID NO: 48352 - DNA, 22 bp, Artificial Sequence
  chemically synthesized
gtaaaatttgacagtaaagcca

SEQ ID NO: 48353 - DNA, 22 bp, Artificial Sequence
  chemically synthesized
gacagtaaagccatctggtctt

SEQ ID NO: 48354 - DNA, 22 bp, Artificial Sequence
  chemically synthesized
acagtaaagccatctggtcttg

SEQ ID NO: 48355 - DNA, 22 bp, Artificial Sequence
  chemically synthesized
gtcttgaaattttcttttttgg

SEQ ID NO: 48356 - DNA, 22 bp, Artificial Sequence
  chemically synthesized
gaaattttcttttttgggagac

SEQ ID NO: 48357 - DNA, 22 bp, Artificial Sequence
  chemically synthesized
aaattttcttttttgggagact

SEQ ID NO: 48358 - DNA, 22 bp, Artificial Sequence
  chemically synthesized
tcttttttgggagactttttac

SEQ ID NO: 48359 - DNA, 22 bp, Artificial Sequence
  chemically synthesized
cttttttgggagactttttact

SEQ ID NO: 48360 - DNA, 22 bp, Artificial Sequence
  chemically synthesized
ttttttgggagactttttacta

SEQ ID NO: 48361 - DNA, 22 bp, Artificial Sequence
  chemically synthesized
ttttgggagactttttactact

SEQ ID NO: 48362 - DNA, 22 bp, Artificial Sequence
  chemically synthesized
tttgggagactttttactactg

SEQ ID NO: 48363 - DNA, 22 bp, Artificial Sequence
  chemically synthesized
ttgggagactttttactactga

SEQ ID NO: 48364 - DNA, 22 bp, Artificial Sequence
  chemically synthesized
tgggagactttttactactgat

SEQ ID NO: 48365 - DNA, 22 bp, Artificial Sequence
  chemically synthesized
gggagactttttactactgatt

SEQ ID NO: 48366 - DNA, 22 bp, Artificial Sequence
  chemically synthesized
ggagactttttactactgattc

SEQ ID NO: 48367 - DNA, 22 bp, Artificial Sequence
  chemically synthesized
tttactactgattcaatttcat

SEQ ID NO: 48368 - DNA, 22 bp, Artificial Sequence
  chemically synthesized
ttactactgattcaatttcatt

SEQ ID NO: 48369 - DNA, 22 bp, Artificial Sequence
  chemically synthesized
tactactgattcaatttcatta

SEQ ID NO: 48370 - DNA, 22 bp, Artificial Sequence
  chemically synthesized
actactgattcaatttcattat

SEQ ID NO: 48371 - DNA, 22 bp, Artificial Sequence
  chemically synthesized
ctactgattcaatttcattatt

SEQ ID NO: 48372 - DNA, 22 bp, Artificial Sequence
  chemically synthesized
ctgattcaatttcattattcat

SEQ ID NO: 48373 - DNA, 22 bp, Artificial Sequence
  chemically synthesized
attcaatttcattattcattac

SEQ ID NO: 48374 - DNA, 22 bp, Artificial Sequence
  chemically synthesized
aatttcattattcattactggt

SEQ ID NO: 48375 - DNA, 22 bp, Artificial Sequence
  chemically synthesized
cattattcattactggtctgtt

SEQ ID NO: 48376 - DNA, 22 bp, Artificial Sequence
  chemically synthesized
attattcattactggtctgttc

SEQ ID NO: 48377 - DNA, 22 bp, Artificial Sequence
  chemically synthesized
ttcattactggtctgttcaggt

SEQ ID NO: 48378 - DNA, 22 bp, Artificial Sequence
  chemically synthesized
attactggtctgttcaggtttt

SEQ ID NO: 48379 - DNA, 22 bp, Artificial Sequence
  chemically synthesized
ctggtctgttcaggttttctat

SEQ ID NO: 48380 - DNA, 22 bp, Artificial Sequence
  chemically synthesized
gtctgttcaggttttctattct

SEQ ID NO: 48381 - DNA, 22 bp, Artificial Sequence
  chemically synthesized
ttcaggttttctattctttctt

SEQ ID NO: 48382 - DNA, 22 bp, Artificial Sequence
  chemically synthesized
aggttttctattctttcttaat

SEQ ID NO: 48383 - DNA, 22 bp, Artificial Sequence
  chemically synthesized
tctattctttcttaattcaatc

SEQ ID NO: 48384 - DNA, 22 bp, Artificial Sequence
  chemically synthesized
ctattctttcttaattcaatct

SEQ ID NO: 48385 - DNA, 22 bp, Artificial Sequence
  chemically synthesized
tattctttcttaattcaatctt

SEQ ID NO: 48386 - DNA, 22 bp, Artificial Sequence
  chemically synthesized
ttctttcttaattcaatcttgg

SEQ ID NO: 48387 - DNA, 22 bp, Artificial Sequence
  chemically synthesized
tttcttaattcaatcttggtag

SEQ ID NO: 48388 - DNA, 22 bp, Artificial Sequence
  chemically synthesized
tcttaattcaatcttggtaggt

SEQ ID NO: 48389 - DNA, 22 bp, Artificial Sequence
  chemically synthesized
cttaattcaatcttggtaggtg

SEQ ID NO: 48390 - DNA, 22 bp, Artificial Sequence
  chemically synthesized
ttaattcaatcttggtaggtgg

SEQ ID NO: 48391 - DNA, 22 bp, Artificial Sequence
  chemically synthesized
aattcaatcttggtaggtggta

SEQ ID NO: 48392 - DNA, 22 bp, Artificial Sequence
  chemically synthesized
attcaatcttggtaggtggtat

SEQ ID NO: 48393 - DNA, 22 bp, Artificial Sequence
  chemically synthesized
aatcttggtaggtggtatgtgt

SEQ ID NO: 48394 - DNA, 22 bp, Artificial Sequence
  chemically synthesized
ggtaggtggtatgtgtccagaa

SEQ ID NO: 48395 - DNA, 22 bp, Artificial Sequence
  chemically synthesized
gtaggtggtatgtgtccagaaa

SEQ ID NO: 48396 - DNA, 22 bp, Artificial Sequence
  chemically synthesized
attaatttcctctagatttttc

SEQ ID NO: 48397 - DNA, 22 bp, Artificial Sequence
  chemically synthesized
ttaatttcctctagatttttca

SEQ ID NO: 48398 - DNA, 22 bp, Artificial Sequence
  chemically synthesized
atttcctctagatttttcagtt

SEQ ID NO: 48399 - DNA, 22 bp, Artificial Sequence
  chemically synthesized
cctctagatttttcagtttttt

SEQ ID NO: 48400 - DNA, 22 bp, Artificial Sequence
  chemically synthesized
ctctagatttttcagtttttta

SEQ ID NO: 48401 - DNA, 22 bp, Artificial Sequence
  chemically synthesized
tagatttttcagttttttagtg

SEQ ID NO: 48402 - DNA, 22 bp, Artificial Sequence
  chemically synthesized
gatttttcagttttttagtgta

SEQ ID NO: 48403 - DNA, 22 bp, Artificial Sequence
  chemically synthesized
ttcagttttttagtgtatggtt

SEQ ID NO: 48404 - DNA, 22 bp, Artificial Sequence
  chemically synthesized
tcagttttttagtgtatggttg

SEQ ID NO: 48405 - DNA, 22 bp, Artificial Sequence
  chemically synthesized
cagttttttagtgtatggttgt

SEQ ID NO: 48406 - DNA, 22 bp, Artificial Sequence
  chemically synthesized
agttttttagtgtatggttgtt

SEQ ID NO: 48407 - DNA, 22 bp, Artificial Sequence
  chemically synthesized
tttagtgtatggttgttcataa

SEQ ID NO: 48408 - DNA, 22 bp, Artificial Sequence
  chemically synthesized
ttagtgtatggttgttcataat

SEQ ID NO: 48409 - DNA, 22 bp, Artificial Sequence
  chemically synthesized
tagtgtatggttgttcataata

SEQ ID NO: 48410 - DNA, 22 bp, Artificial Sequence
  chemically synthesized
agtgtatggttgttcataatag

SEQ ID NO: 48411 - DNA, 22 bp, Artificial Sequence
  chemically synthesized
gtgtatggttgttcataatagt

SEQ ID NO: 48412 - DNA, 22 bp, Artificial Sequence
  chemically synthesized
ttcataatagtctctgataatc

SEQ ID NO: 48413 - DNA, 22 bp, Artificial Sequence
  chemically synthesized
ataatagtctctgataatcttt

SEQ ID NO: 48414 - DNA, 22 bp, Artificial Sequence
  chemically synthesized
tgataatcttttctatttctgt

SEQ ID NO: 48415 - DNA, 22 bp, Artificial Sequence
  chemically synthesized
ataatcttttctatttctgtgg

SEQ ID NO: 48416 - DNA, 22 bp, Artificial Sequence
  chemically synthesized
ttctatttctgtggtatcggtt

SEQ ID NO: 48417 - DNA, 22 bp, Artificial Sequence
  chemically synthesized
tctatttctgtggtatcggttg

SEQ ID NO: 48418 - DNA, 22 bp, Artificial Sequence
  chemically synthesized
ctatttctgtggtatcggttgt

SEQ ID NO: 48419 - DNA, 22 bp, Artificial Sequence
  chemically synthesized
tatttctgtggtatcggttgta

SEQ ID NO: 48420 - DNA, 22 bp, Artificial Sequence
  chemically synthesized
tttctgtggtatcggttgtaat

SEQ ID NO: 48421 - DNA, 22 bp, Artificial Sequence
  chemically synthesized
ctgtggtatcggttgtaatata

SEQ ID NO: 48422 - DNA, 22 bp, Artificial Sequence
  chemically synthesized
tgtggtatcggttgtaatatat

SEQ ID NO: 48423 - DNA, 22 bp, Artificial Sequence
  chemically synthesized
tggtatcggttgtaatatattt

SEQ ID NO: 48424 - DNA, 22 bp, Artificial Sequence
  chemically synthesized
taatatattttcttttttattt

SEQ ID NO: 48425 - DNA, 22 bp, Artificial Sequence
  chemically synthesized
tcttttttatttctgattttct

SEQ ID NO: 48426 - DNA, 22 bp, Artificial Sequence
  chemically synthesized
cttttttatttctgattttctt

SEQ ID NO: 48427 - DNA, 22 bp, Artificial Sequence
  chemically synthesized
ttttttatttctgattttcttt

SEQ ID NO: 48428 - DNA, 22 bp, Artificial Sequence
  chemically synthesized
ttttatttctgattttctttat

SEQ ID NO: 48429 - DNA, 22 bp, Artificial Sequence
  chemically synthesized
tttatttctgattttctttatt

SEQ ID NO: 48430 - DNA, 22 bp, Artificial Sequence
  chemically synthesized
ttatttctgattttctttattt

SEQ ID NO: 48431 - DNA, 22 bp, Artificial Sequence
  chemically synthesized
tatttctgattttctttatttc

SEQ ID NO: 48432 - DNA, 22 bp, Artificial Sequence
  chemically synthesized
atttctgattttctttatttca

SEQ ID NO: 48433 - DNA, 22 bp, Artificial Sequence
  chemically synthesized
tttctgattttctttatttcag

SEQ ID NO: 48434 - DNA, 22 bp, Artificial Sequence
  chemically synthesized
ctgattttctttatttcagtct

SEQ ID NO: 48435 - DNA, 22 bp, Artificial Sequence
  chemically synthesized
tgattttctttatttcagtctc

SEQ ID NO: 48436 - DNA, 22 bp, Artificial Sequence
  chemically synthesized
attttctttatttcagtctctt

SEQ ID NO: 48437 - DNA, 22 bp, Artificial Sequence
  chemically synthesized
tctttatttcagtctcttctct

SEQ ID NO: 48438 - DNA, 22 bp, Artificial Sequence
  chemically synthesized
ctttatttcagtctcttctctt

SEQ ID NO: 48439 - DNA, 22 bp, Artificial Sequence
  chemically synthesized
tttatttcagtctcttctcttt

SEQ ID NO: 48440 - DNA, 22 bp, Artificial Sequence
  chemically synthesized
tatttcagtctcttctcttttt

SEQ ID NO: 48441 - DNA, 22 bp, Artificial Sequence
  chemically synthesized
atttcagtctcttctctttttc

SEQ ID NO: 48442 - DNA, 22 bp, Artificial Sequence
  chemically synthesized
tttcagtctcttctctttttct

SEQ ID NO: 48443 - DNA, 22 bp, Artificial Sequence
  chemically synthesized
cagtctcttctctttttcttgg

SEQ ID NO: 48444 - DNA, 22 bp, Artificial Sequence
  chemically synthesized
agtctcttctctttttcttggt

SEQ ID NO: 48445 - DNA, 22 bp, Artificial Sequence
  chemically synthesized
ttctctttttcttggttagtct

SEQ ID NO: 48446 - DNA, 22 bp, Artificial Sequence
  chemically synthesized
ctctttttcttggttagtctag

SEQ ID NO: 48447 - DNA, 22 bp, Artificial Sequence
  chemically synthesized
tctttttcttggttagtctagc

SEQ ID NO: 48448 - DNA, 22 bp, Artificial Sequence
  chemically synthesized
tttttcttggttagtctagcta

SEQ ID NO: 48449 - DNA, 22 bp, Artificial Sequence
  chemically synthesized
tttcttggttagtctagctaga

SEQ ID NO: 48450 - DNA, 22 bp, Artificial Sequence
  chemically synthesized
ttcttggttagtctagctagag

SEQ ID NO: 48451 - DNA, 22 bp, Artificial Sequence
  chemically synthesized
tcttggttagtctagctagagc

SEQ ID NO: 48452 - DNA, 22 bp, Artificial Sequence
  chemically synthesized
cttggttagtctagctagagct

SEQ ID NO: 48453 - DNA, 22 bp, Artificial Sequence
  chemically synthesized
ttggttagtctagctagagcta

SEQ ID NO: 48454 - DNA, 22 bp, Artificial Sequence
  chemically synthesized
ggttagtctagctagagctata

SEQ ID NO: 48455 - DNA, 22 bp, Artificial Sequence
  chemically synthesized
gttagtctagctagagctatat

SEQ ID NO: 48456 - DNA, 22 bp, Artificial Sequence
  chemically synthesized
gtctagctagagctatatccat

SEQ ID NO: 48457 - DNA, 22 bp, Artificial Sequence
  chemically synthesized
gctagagctatatccattttat

SEQ ID NO: 48458 - DNA, 22 bp, Artificial Sequence
  chemically synthesized
gagctatatccattttatcttt

SEQ ID NO: 48459 - DNA, 22 bp, Artificial Sequence
  chemically synthesized
tatccattttatcttttttaaa

SEQ ID NO: 48460 - DNA, 22 bp, Artificial Sequence
  chemically synthesized
tatcttttttaaataacaactt

SEQ ID NO: 48461 - DNA, 22 bp, Artificial Sequence
  chemically synthesized
atcttttttaaataacaacttt

SEQ ID NO: 48462 - DNA, 22 bp, Artificial Sequence
  chemically synthesized
tcttttttaaataacaactttt

SEQ ID NO: 48463 - DNA, 22 bp, Artificial Sequence
  chemically synthesized
ttttaaataacaacttttcatt

SEQ ID NO: 48464 - DNA, 22 bp, Artificial Sequence
  chemically synthesized
tttaaataacaacttttcattt

SEQ ID NO: 48465 - DNA, 22 bp, Artificial Sequence
  chemically synthesized
ttaaataacaacttttcatttt

SEQ ID NO: 48466 - DNA, 22 bp, Artificial Sequence
  chemically synthesized
taaataacaacttttcattttg

SEQ ID NO: 48467 - DNA, 22 bp, Artificial Sequence
  chemically synthesized
aaataacaacttttcattttgc

SEQ ID NO: 48468 - DNA, 22 bp, Artificial Sequence
  chemically synthesized
aataacaacttttcattttgct

SEQ ID NO: 48469 - DNA, 22 bp, Artificial Sequence
  chemically synthesized
ttcattttgctaatcccttgtt

SEQ ID NO: 48470 - DNA, 22 bp, Artificial Sequence
  chemically synthesized
tcattttgctaatcccttgttg

SEQ ID NO: 48471 - DNA, 22 bp, Artificial Sequence
  chemically synthesized
cattttgctaatcccttgttgt

SEQ ID NO: 48472 - DNA, 22 bp, Artificial Sequence
  chemically synthesized
attttgctaatcccttgttgtt

SEQ ID NO: 48473 - DNA, 22 bp, Artificial Sequence
  chemically synthesized
tgctaatcccttgttgttgttt

SEQ ID NO: 48474 - DNA, 22 bp, Artificial Sequence
  chemically synthesized
gctaatcccttgttgttgtttt

SEQ ID NO: 48475 - DNA, 22 bp, Artificial Sequence
  chemically synthesized
ctaatcccttgttgttgttttt

SEQ ID NO: 48476 - DNA, 22 bp, Artificial Sequence
  chemically synthesized
atcccttgttgttgtttttctc

SEQ ID NO: 48477 - DNA, 22 bp, Artificial Sequence
  chemically synthesized
gttgttgtttttctctatttca

SEQ ID NO: 48478 - DNA, 22 bp, Artificial Sequence
  chemically synthesized
ttgttgtttttctctatttcat

SEQ ID NO: 48479 - DNA, 22 bp, Artificial Sequence
  chemically synthesized
ttgtttttctctatttcattaa

SEQ ID NO: 48480 - DNA, 22 bp, Artificial Sequence
  chemically synthesized
tttttctctatttcattaagtt

SEQ ID NO: 48481 - DNA, 22 bp, Artificial Sequence
  chemically synthesized
ttctctatttcattaagttctt

SEQ ID NO: 48482 - DNA, 22 bp, Artificial Sequence
  chemically synthesized
tctctatttcattaagttcttc

SEQ ID NO: 48483 - DNA, 22 bp, Artificial Sequence
  chemically synthesized
ctctatttcattaagttcttct

SEQ ID NO: 48484 - DNA, 22 bp, Artificial Sequence
  chemically synthesized
tctatttcattaagttcttctg

SEQ ID NO: 48485 - DNA, 22 bp, Artificial Sequence
  chemically synthesized
tatttcattaagttcttctgtt

SEQ ID NO: 48486 - DNA, 22 bp, Artificial Sequence
  chemically synthesized
tttcattaagttcttctgttct

SEQ ID NO: 48487 - DNA, 22 bp, Artificial Sequence
  chemically synthesized
cattaagttcttctgttcttca

SEQ ID NO: 48488 - DNA, 22 bp, Artificial Sequence
  chemically synthesized
attaagttcttctgttcttcat

SEQ ID NO: 48489 - DNA, 22 bp, Artificial Sequence
  chemically synthesized
agttcttctgttcttcattttt

SEQ ID NO: 48490 - DNA, 22 bp, Artificial Sequence
  chemically synthesized
ttctgttcttcattttttcttt

SEQ ID NO: 48491 - DNA, 22 bp, Artificial Sequence
  chemically synthesized
ctgttcttcattttttctttcc

SEQ ID NO: 48492 - DNA, 22 bp, Artificial Sequence
  chemically synthesized
tgttcttcattttttctttcct

SEQ ID NO: 48493 - DNA, 22 bp, Artificial Sequence
  chemically synthesized
ttcttcattttttctttccttc

SEQ ID NO: 48494 - DNA, 22 bp, Artificial Sequence
  chemically synthesized
ttcattttttctttccttctgc

SEQ ID NO: 48495 - DNA, 22 bp, Artificial Sequence
  chemically synthesized
cattttttctttccttctgcta

SEQ ID NO: 48496 - DNA, 22 bp, Artificial Sequence
  chemically synthesized
attttttctttccttctgctag

SEQ ID NO: 48497 - DNA, 22 bp, Artificial Sequence
  chemically synthesized
tttctttccttctgctagtttt

SEQ ID NO: 48498 - DNA, 22 bp, Artificial Sequence
  chemically synthesized
ttctttccttctgctagttttg

SEQ ID NO: 48499 - DNA, 22 bp, Artificial Sequence
  chemically synthesized
tctttccttctgctagttttgg

SEQ ID NO: 48500 - DNA, 22 bp, Artificial Sequence
  chemically synthesized
ctttccttctgctagttttggg

SEQ ID NO: 48501 - DNA, 22 bp, Artificial Sequence
  chemically synthesized
tttccttctgctagttttgggt

SEQ ID NO: 48502 - DNA, 22 bp, Artificial Sequence
  chemically synthesized
tccttctgctagttttgggttt

SEQ ID NO: 48503 - DNA, 22 bp, Artificial Sequence
  chemically synthesized
ccttctgctagttttgggtttt

SEQ ID NO: 48504 - DNA, 22 bp, Artificial Sequence
  chemically synthesized
cttctgctagttttgggttttg

SEQ ID NO: 48505 - DNA, 22 bp, Artificial Sequence
  chemically synthesized
ctgctagttttgggttttgttc

SEQ ID NO: 48506 - DNA, 22 bp, Artificial Sequence
  chemically synthesized
tgctagttttgggttttgttct

SEQ ID NO: 48507 - DNA, 22 bp, Artificial Sequence
  chemically synthesized
ctagttttgggttttgttcttg

SEQ ID NO: 48508 - DNA, 22 bp, Artificial Sequence
  chemically synthesized
gttttgggttttgttcttgctt

SEQ ID NO: 48509 - DNA, 22 bp, Artificial Sequence
  chemically synthesized
tgggttttgttcttgcttttct

SEQ ID NO: 48510 - DNA, 22 bp, Artificial Sequence
  chemically synthesized
gggttttgttcttgcttttcta

SEQ ID NO: 48511 - DNA, 22 bp, Artificial Sequence
  chemically synthesized
ggttttgttcttgcttttctag

SEQ ID NO: 48512 - DNA, 22 bp, Artificial Sequence
  chemically synthesized
tgttcttgcttttctagcttgt

SEQ ID NO: 48513 - DNA, 22 bp, Artificial Sequence
  chemically synthesized
gttcttgcttttctagcttgtt

SEQ ID NO: 48514 - DNA, 22 bp, Artificial Sequence
  chemically synthesized
ttcttgcttttctagcttgttg

SEQ ID NO: 48515 - DNA, 22 bp, Artificial Sequence
  chemically synthesized
ttgcttttctagcttgttgagg

SEQ ID NO: 48516 - DNA, 22 bp, Artificial Sequence
  chemically synthesized
gcttttctagcttgttgaggta

SEQ ID NO: 48517 - DNA, 22 bp, Artificial Sequence
  chemically synthesized
cttttctagcttgttgaggtac

SEQ ID NO: 48518 - DNA, 22 bp, Artificial Sequence
  chemically synthesized
ttctagcttgttgaggtacatg

SEQ ID NO: 48519 - DNA, 22 bp, Artificial Sequence
  chemically synthesized
tctagcttgttgaggtacatga

SEQ ID NO: 48520 - DNA, 22 bp, Artificial Sequence
  chemically synthesized
ctagcttgttgaggtacatgat

SEQ ID NO: 48521 - DNA, 22 bp, Artificial Sequence
  chemically synthesized
tagcttgttgaggtacatgatt

SEQ ID NO: 48522 - DNA, 22 bp, Artificial Sequence
  chemically synthesized
gcttgttgaggtacatgattag

SEQ ID NO: 48523 - DNA, 22 bp, Artificial Sequence
  chemically synthesized
gttgaggtacatgattagatta

SEQ ID NO: 48524 - DNA, 22 bp, Artificial Sequence
  chemically synthesized
ttgaggtacatgattagattat

SEQ ID NO: 48525 - DNA, 22 bp, Artificial Sequence
  chemically synthesized
aggtacatgattagattatata

SEQ ID NO: 48526 - DNA, 22 bp, Artificial Sequence
  chemically synthesized
gattatatatttgaaatctttc

SEQ ID NO: 48527 - DNA, 22 bp, Artificial Sequence
  chemically synthesized
tatatttgaaatctttctatgt

SEQ ID NO: 48528 - DNA, 22 bp, Artificial Sequence
  chemically synthesized
gaaatctttctatgtttttaat

SEQ ID NO: 48529 - DNA, 22 bp, Artificial Sequence
  chemically synthesized
aaatctttctatgtttttaatt

SEQ ID NO: 48530 - DNA, 22 bp, Artificial Sequence
  chemically synthesized
tctatgtttttaatttaagtgt

SEQ ID NO: 48531 - DNA, 22 bp, Artificial Sequence
  chemically synthesized
ctatgtttttaatttaagtgtt

SEQ ID NO: 48532 - DNA, 22 bp, Artificial Sequence
  chemically synthesized
tatgtttttaatttaagtgttt

SEQ ID NO: 48533 - DNA, 22 bp, Artificial Sequence
  chemically synthesized
tgtttttaatttaagtgtttat

SEQ ID NO: 48534 - DNA, 22 bp, Artificial Sequence
  chemically synthesized
ttaatttaagtgtttattgata

SEQ ID NO: 48535 - DNA, 22 bp, Artificial Sequence
  chemically synthesized
taatttaagtgtttattgataa

SEQ ID NO: 48536 - DNA, 22 bp, Artificial Sequence
  chemically synthesized
aatttaagtgtttattgataag

SEQ ID NO: 48537 - DNA, 22 bp, Artificial Sequence
  chemically synthesized
atttaagtgtttattgataagc

SEQ ID NO: 48538 - DNA, 22 bp, Artificial Sequence
  chemically synthesized
aagtgtttattgataagcttct

SEQ ID NO: 48539 - DNA, 22 bp, Artificial Sequence
  chemically synthesized
agtgtttattgataagcttctc

SEQ ID NO: 48540 - DNA, 22 bp, Artificial Sequence
  chemically synthesized
attgataagcttctctcttagc

SEQ ID NO: 48541 - DNA, 22 bp, Artificial Sequence
  chemically synthesized
ttgataagcttctctcttagca

SEQ ID NO: 48542 - DNA, 22 bp, Artificial Sequence
  chemically synthesized
ataagcttctctcttagcactg

SEQ ID NO: 48543 - DNA, 22 bp, Artificial Sequence
  chemically synthesized
ctctcttagcactgcttttgct

SEQ ID NO: 48544 - DNA, 22 bp, Artificial Sequence
  chemically synthesized
tctcttagcactgcttttgctg

SEQ ID NO: 48545 - DNA, 22 bp, Artificial Sequence
  chemically synthesized
tcttagcactgcttttgctgta

SEQ ID NO: 48546 - DNA, 22 bp, Artificial Sequence
  chemically synthesized
ttagcactgcttttgctgtatc

SEQ ID NO: 48547 - DNA, 22 bp, Artificial Sequence
  chemically synthesized
agcactgcttttgctgtatccc

SEQ ID NO: 48548 - DNA, 22 bp, Artificial Sequence
  chemically synthesized
gcactgcttttgctgtatccca

SEQ ID NO: 48549 - DNA, 22 bp, Artificial Sequence
  chemically synthesized
cttttgctgtatcccatggctt

SEQ ID NO: 48550 - DNA, 22 bp, Artificial Sequence
  chemically synthesized
ttgctgtatcccatggcttttc

SEQ ID NO: 48551 - DNA, 22 bp, Artificial Sequence
  chemically synthesized
tgctgtatcccatggcttttcc

SEQ ID NO: 48552 - DNA, 22 bp, Artificial Sequence
  chemically synthesized
gctgtatcccatggcttttcct

SEQ ID NO: 48553 - DNA, 22 bp, Artificial Sequence
  chemically synthesized
ctgtatcccatggcttttccta

SEQ ID NO: 48554 - DNA, 22 bp, Artificial Sequence
  chemically synthesized
tatcccatggcttttcctatgt

SEQ ID NO: 48555 - DNA, 22 bp, Artificial Sequence
  chemically synthesized
ttcctatgttgtatttcaattt

SEQ ID NO: 48556 - DNA, 22 bp, Artificial Sequence
  chemically synthesized
tcctatgttgtatttcaatttt

SEQ ID NO: 48557 - DNA, 22 bp, Artificial Sequence
  chemically synthesized
cctatgttgtatttcaattttc

SEQ ID NO: 48558 - DNA, 22 bp, Artificial Sequence
  chemically synthesized
ctatgttgtatttcaattttca

SEQ ID NO: 48559 - DNA, 22 bp, Artificial Sequence
  chemically synthesized
tgttgtatttcaattttcattt

SEQ ID NO: 48560 - DNA, 22 bp, Artificial Sequence
  chemically synthesized
tatttcaattttcatttgtttc

SEQ ID NO: 48561 - DNA, 22 bp, Artificial Sequence
  chemically synthesized
caattttcatttgtttcaaaaa

SEQ ID NO: 48562 - DNA, 22 bp, Artificial Sequence
  chemically synthesized
aattttcatttgtttcaaaaaa

SEQ ID NO: 48563 - DNA, 22 bp, Artificial Sequence
  chemically synthesized
tcatttgtttcaaaaaattttt

SEQ ID NO: 48564 - DNA, 22 bp, Artificial Sequence
  chemically synthesized
catttgtttcaaaaaatttttg

SEQ ID NO: 48565 - DNA, 22 bp, Artificial Sequence
  chemically synthesized
atttgtttcaaaaaatttttga

SEQ ID NO: 48566 - DNA, 22 bp, Artificial Sequence
  chemically synthesized
gtttcaaaaaatttttgatttc

SEQ ID NO: 48567 - DNA, 22 bp, Artificial Sequence
  chemically synthesized
tttcaaaaaatttttgatttcc

SEQ ID NO: 48568 - DNA, 22 bp, Artificial Sequence
  chemically synthesized
caaaaaatttttgatttccttc

SEQ ID NO: 48569 - DNA, 22 bp, Artificial Sequence
  chemically synthesized
aaaaaatttttgatttccttct

SEQ ID NO: 48570 - DNA, 22 bp, Artificial Sequence
  chemically synthesized
ttgatttccttcttaattttct

SEQ ID NO: 48571 - DNA, 22 bp, Artificial Sequence
  chemically synthesized
tgatttccttcttaattttctt

SEQ ID NO: 48572 - DNA, 22 bp, Artificial Sequence
  chemically synthesized
gatttccttcttaattttcttc

SEQ ID NO: 48573 - DNA, 22 bp, Artificial Sequence
  chemically synthesized
atttccttcttaattttcttct

SEQ ID NO: 48574 - DNA, 22 bp, Artificial Sequence
  chemically synthesized
ccttcttaattttcttcttgac

SEQ ID NO: 48575 - DNA, 22 bp, Artificial Sequence
  chemically synthesized
cttcttaattttcttcttgaca

SEQ ID NO: 48576 - DNA, 22 bp, Artificial Sequence
  chemically synthesized
cttaattttcttcttgacataa

SEQ ID NO: 48577 - DNA, 22 bp, Artificial Sequence
  chemically synthesized
ttaattttcttcttgacataac

SEQ ID NO: 48578 - DNA, 22 bp, Artificial Sequence
  chemically synthesized
aattttcttcttgacataacgt

SEQ ID NO: 48579 - DNA, 22 bp, Artificial Sequence
  chemically synthesized
attttcttcttgacataacgtt

SEQ ID NO: 48580 - DNA, 22 bp, Artificial Sequence
  chemically synthesized
tcttcttgacataacgttcatt

SEQ ID NO: 48581 - DNA, 22 bp, Artificial Sequence
  chemically synthesized
cttcttgacataacgttcattc

SEQ ID NO: 48582 - DNA, 22 bp, Artificial Sequence
  chemically synthesized
ttcttgacataacgttcattca

SEQ ID NO: 48583 - DNA, 22 bp, Artificial Sequence
  chemically synthesized
cttgacataacgttcattcagg

SEQ ID NO: 48584 - DNA, 22 bp, Artificial Sequence
  chemically synthesized
ttgacataacgttcattcagga

SEQ ID NO: 48585 - DNA, 22 bp, Artificial Sequence
  chemically synthesized
gacataacgttcattcaggagc

SEQ ID NO: 48586 - DNA, 22 bp, Artificial Sequence
  chemically synthesized
acataacgttcattcaggagca

SEQ ID NO: 48587 - DNA, 22 bp, Artificial Sequence
  chemically synthesized
attcaggagcatgttgtttaat

SEQ ID NO: 48588 - DNA, 22 bp, Artificial Sequence
  chemically synthesized
aggagcatgttgtttaatttcc

SEQ ID NO: 48589 - DNA, 22 bp, Artificial Sequence
  chemically synthesized
tttaatttccatgtatttgtat

SEQ ID NO: 48590 - DNA, 22 bp, Artificial Sequence
  chemically synthesized
aatttccatgtatttgtatagg

SEQ ID NO: 48591 - DNA, 22 bp, Artificial Sequence
  chemically synthesized
atttccatgtatttgtataggt

SEQ ID NO: 48592 - DNA, 22 bp, Artificial Sequence
  chemically synthesized
ccatgtatttgtataggtttta

SEQ ID NO: 48593 - DNA, 22 bp, Artificial Sequence
  chemically synthesized
catgtatttgtataggttttaa

SEQ ID NO: 48594 - DNA, 22 bp, Artificial Sequence
  chemically synthesized
gtataggttttaaagtttttct

SEQ ID NO: 48595 - DNA, 22 bp, Artificial Sequence
  chemically synthesized
tataggttttaaagtttttctt

SEQ ID NO: 48596 - DNA, 22 bp, Artificial Sequence
  chemically synthesized
taaagtttttcttgttattgat

SEQ ID NO: 48597 - DNA, 22 bp, Artificial Sequence
  chemically synthesized
aaagtttttcttgttattgatt

SEQ ID NO: 48598 - DNA, 22 bp, Artificial Sequence
  chemically synthesized
aagtttttcttgttattgattt

SEQ ID NO: 48599 - DNA, 22 bp, Artificial Sequence
  chemically synthesized
ttcttgttattgatttctagtt

SEQ ID NO: 48600 - DNA, 22 bp, Artificial Sequence
  chemically synthesized
tcttgttattgatttctagttt

SEQ ID NO: 48601 - DNA, 22 bp, Artificial Sequence
  chemically synthesized
cttgttattgatttctagtttt

SEQ ID NO: 48602 - DNA, 22 bp, Artificial Sequence
  chemically synthesized
ttgttattgatttctagtttta

SEQ ID NO: 48603 - DNA, 22 bp, Artificial Sequence
  chemically synthesized
gttattgatttctagttttatt

SEQ ID NO: 48604 - DNA, 22 bp, Artificial Sequence
  chemically synthesized
ttattgatttctagttttattc

SEQ ID NO: 48605 - DNA, 22 bp, Artificial Sequence
  chemically synthesized
ttgatttctagttttattccat

SEQ ID NO: 48606 - DNA, 22 bp, Artificial Sequence
  chemically synthesized
atttctagttttattccattgt

SEQ ID NO: 48607 - DNA, 22 bp, Artificial Sequence
  chemically synthesized
ctagttttattccattgtggtc

SEQ ID NO: 48608 - DNA, 22 bp, Artificial Sequence
  chemically synthesized
tagttttattccattgtggtct

SEQ ID NO: 48609 - DNA, 22 bp, Artificial Sequence
  chemically synthesized
gttttattccattgtggtctga

SEQ ID NO: 48610 - DNA, 22 bp, Artificial Sequence
  chemically synthesized
tattccattgtggtctgagaag

SEQ ID NO: 48611 - DNA, 22 bp, Artificial Sequence
  chemically synthesized
attccattgtggtctgagaaga

SEQ ID NO: 48612 - DNA, 22 bp, Artificial Sequence
  chemically synthesized
ttccattgtggtctgagaagat

SEQ ID NO: 48613 - DNA, 22 bp, Artificial Sequence
  chemically synthesized
cattgtggtctgagaagatgct

SEQ ID NO: 48614 - DNA, 22 bp, Artificial Sequence
  chemically synthesized
tggtctgagaagatgcttaata

SEQ ID NO: 48615 - DNA, 22 bp, Artificial Sequence
  chemically synthesized
agaagatgcttaatatgatttc

SEQ ID NO: 48616 - DNA, 22 bp, Artificial Sequence
  chemically synthesized
aatatgatttcaaatatttcaa

SEQ ID NO: 48617 - DNA, 22 bp, Artificial Sequence
  chemically synthesized
atatgatttcaaatatttcaaa

SEQ ID NO: 48618 - DNA, 22 bp, Artificial Sequence
  chemically synthesized
caaatatttcaaattagttgag

SEQ ID NO: 48619 - DNA, 22 bp, Artificial Sequence
  chemically synthesized
aaatatttcaaattagttgaga

SEQ ID NO: 48620 - DNA, 22 bp, Artificial Sequence
  chemically synthesized
caaattagttgagacttctttt

SEQ ID NO: 48621 - DNA, 22 bp, Artificial Sequence
  chemically synthesized
aaattagttgagacttcttttg

SEQ ID NO: 48622 - DNA, 22 bp, Artificial Sequence
  chemically synthesized
gttgagacttcttttgtgttct

SEQ ID NO: 48623 - DNA, 22 bp, Artificial Sequence
  chemically synthesized
agacttcttttgtgttctaaca

SEQ ID NO: 48624 - DNA, 22 bp, Artificial Sequence
  chemically synthesized
cttttgtgttctaacatatggt

SEQ ID NO: 48625 - DNA, 22 bp, Artificial Sequence
  chemically synthesized
ttttgtgttctaacatatggtg

SEQ ID NO: 48626 - DNA, 22 bp, Artificial Sequence
  chemically synthesized
ttgtgttctaacatatggtgta

SEQ ID NO: 48627 - DNA, 22 bp, Artificial Sequence
  chemically synthesized
tgtgttctaacatatggtgtat

SEQ ID NO: 48628 - DNA, 22 bp, Artificial Sequence
  chemically synthesized
gtgttctaacatatggtgtatc

SEQ ID NO: 48629 - DNA, 22 bp, Artificial Sequence
  chemically synthesized
tgttctaacatatggtgtatcc

SEQ ID NO: 48630 - DNA, 22 bp, Artificial Sequence
  chemically synthesized
taacatatggtgtatcctgggg

SEQ ID NO: 48631 - DNA, 22 bp, Artificial Sequence
  chemically synthesized
acatatggtgtatcctggggaa

SEQ ID NO: 48632 - DNA, 22 bp, Artificial Sequence
  chemically synthesized
gggaatgcgtcatgtgctgatg

SEQ ID NO: 48633 - DNA, 22 bp, Artificial Sequence
  chemically synthesized
atgagataaatatattctgtag

SEQ ID NO: 48634 - DNA, 22 bp, Artificial Sequence
  chemically synthesized
tgtagctgttggatgaaatatt

SEQ ID NO: 48635 - DNA, 22 bp, Artificial Sequence
  chemically synthesized
tagctgttggatgaaatattgt

SEQ ID NO: 48636 - DNA, 22 bp, Artificial Sequence
  chemically synthesized
ttggatgaaatattgtgtaaat

SEQ ID NO: 48637 - DNA, 22 bp, Artificial Sequence
  chemically synthesized
gatgaaatattgtgtaaatgtt

SEQ ID NO: 48638 - DNA, 22 bp, Artificial Sequence
  chemically synthesized
tgtaaatgttagatccatttgg

SEQ ID NO: 48639 - DNA, 22 bp, Artificial Sequence
  chemically synthesized
gatccatttggtctaaagtcaa

SEQ ID NO: 48640 - DNA, 22 bp, Artificial Sequence
  chemically synthesized
ggtctaaagtcaagtttaaatc

SEQ ID NO: 48641 - DNA, 22 bp, Artificial Sequence
  chemically synthesized
gtctaaagtcaagtttaaatcc

SEQ ID NO: 48642 - DNA, 22 bp, Artificial Sequence
  chemically synthesized
aagtcaagtttaaatccaatgt

SEQ ID NO: 48643 - DNA, 22 bp, Artificial Sequence
  chemically synthesized
aaatccaatgtttctttgttaa

SEQ ID NO: 48644 - DNA, 22 bp, Artificial Sequence
  chemically synthesized
aatccaatgtttctttgttaat

SEQ ID NO: 48645 - DNA, 22 bp, Artificial Sequence
  chemically synthesized
ctttgttaattttctgtctaga

SEQ ID NO: 48646 - DNA, 22 bp, Artificial Sequence
  chemically synthesized
tttgttaattttctgtctagat

SEQ ID NO: 48647 - DNA, 22 bp, Artificial Sequence
  chemically synthesized
tgttaattttctgtctagatga

SEQ ID NO: 48648 - DNA, 22 bp, Artificial Sequence
  chemically synthesized
gttaattttctgtctagatgat

SEQ ID NO: 48649 - DNA, 22 bp, Artificial Sequence
  chemically synthesized
ttaattttctgtctagatgatc

SEQ ID NO: 48650 - DNA, 22 bp, Artificial Sequence
  chemically synthesized
attttctgtctagatgatctat

SEQ ID NO: 48651 - DNA, 22 bp, Artificial Sequence
  chemically synthesized
tctgtctagatgatctatctga

SEQ ID NO: 48652 - DNA, 22 bp, Artificial Sequence
  chemically synthesized
ctgtctagatgatctatctgat

SEQ ID NO: 48653 - DNA, 22 bp, Artificial Sequence
  chemically synthesized
tgtctagatgatctatctgatg

SEQ ID NO: 48654 - DNA, 22 bp, Artificial Sequence
  chemically synthesized
tctagatgatctatctgatgct

SEQ ID NO: 48655 - DNA, 22 bp, Artificial Sequence
  chemically synthesized
gatgatctatctgatgctgaga

SEQ ID NO: 48656 - DNA, 22 bp, Artificial Sequence
  chemically synthesized
tctgatgctgagattagaatgt

SEQ ID NO: 48657 - DNA, 22 bp, Artificial Sequence
  chemically synthesized
atgctgagattagaatgttgaa

SEQ ID NO: 48658 - DNA, 22 bp, Artificial Sequence
  chemically synthesized
agattagaatgttgaaatcccc

SEQ ID NO: 48659 - DNA, 22 bp, Artificial Sequence
  chemically synthesized
gaatgttgaaatccccaactat

SEQ ID NO: 48660 - DNA, 22 bp, Artificial Sequence
  chemically synthesized
aaatccccaactattattgtat

SEQ ID NO: 48661 - DNA, 22 bp, Artificial Sequence
  chemically synthesized
ttattgtattggattctatttc

SEQ ID NO: 48662 - DNA, 22 bp, Artificial Sequence
  chemically synthesized
ttgtattggattctatttcacc

SEQ ID NO: 48663 - DNA, 22 bp, Artificial Sequence
  chemically synthesized
tattggattctatttcaccctt

SEQ ID NO: 48664 - DNA, 22 bp, Artificial Sequence
  chemically synthesized
gattctatttcaccctttatat

SEQ ID NO: 48665 - DNA, 22 bp, Artificial Sequence
  chemically synthesized
tatttcaccctttatatctaat

SEQ ID NO: 48666 - DNA, 22 bp, Artificial Sequence
  chemically synthesized
tttcaccctttatatctaataa

SEQ ID NO: 48667 - DNA, 22 bp, Artificial Sequence
  chemically synthesized
caccctttatatctaataacat

SEQ ID NO: 48668 - DNA, 22 bp, Artificial Sequence
  chemically synthesized
accctttatatctaataacatt

SEQ ID NO: 48669 - DNA, 22 bp, Artificial Sequence
  chemically synthesized
tatatctaataacatttgcttt

SEQ ID NO: 48670 - DNA, 22 bp, Artificial Sequence
  chemically synthesized
atatctaataacatttgcttta

SEQ ID NO: 48671 - DNA, 22 bp, Artificial Sequence
  chemically synthesized
tatctaataacatttgctttac

SEQ ID NO: 48672 - DNA, 22 bp, Artificial Sequence
  chemically synthesized
ataacatttgctttacatatct

SEQ ID NO: 48673 - DNA, 22 bp, Artificial Sequence
  chemically synthesized
gctttacatatctggatgctct

SEQ ID NO: 48674 - DNA, 22 bp, Artificial Sequence
  chemically synthesized
ctttacatatctggatgctctg

SEQ ID NO: 48675 - DNA, 22 bp, Artificial Sequence
  chemically synthesized
tacatatctggatgctctggtg

SEQ ID NO: 48676 - DNA, 22 bp, Artificial Sequence
  chemically synthesized
acatatctggatgctctggtgt

SEQ ID NO: 48677 - DNA, 22 bp, Artificial Sequence
  chemically synthesized
catatctggatgctctggtgtt

SEQ ID NO: 48678 - DNA, 22 bp, Artificial Sequence
  chemically synthesized
gatgctctggtgttgagtgtga

SEQ ID NO: 48679 - DNA, 22 bp, Artificial Sequence
  chemically synthesized
tggtgttgagtgtgaatgttta

SEQ ID NO: 48680 - DNA, 22 bp, Artificial Sequence
  chemically synthesized
gtgttgagtgtgaatgtttaga

SEQ ID NO: 48681 - DNA, 22 bp, Artificial Sequence
  chemically synthesized
agtgtgaatgtttagaattgtt

SEQ ID NO: 48682 - DNA, 22 bp, Artificial Sequence
  chemically synthesized
agaattgttatatactcttgct

SEQ ID NO: 48683 - DNA, 22 bp, Artificial Sequence
  chemically synthesized
gaattgttatatactcttgctg

SEQ ID NO: 48684 - DNA, 22 bp, Artificial Sequence
  chemically synthesized
ttatatactcttgctgaattgt

SEQ ID NO: 48685 - DNA, 22 bp, Artificial Sequence
  chemically synthesized
tatactcttgctgaattgttcc

SEQ ID NO: 48686 - DNA, 22 bp, Artificial Sequence
  chemically synthesized
ttgctgaattgttccttttatc

SEQ ID NO: 48687 - DNA, 22 bp, Artificial Sequence
  chemically synthesized
gctgaattgttccttttatcat

SEQ ID NO: 48688 - DNA, 22 bp, Artificial Sequence
  chemically synthesized
ctgaattgttccttttatcatt

SEQ ID NO: 48689 - DNA, 22 bp, Artificial Sequence
  chemically synthesized
aattgttccttttatcattatg

SEQ ID NO: 48690 - DNA, 22 bp, Artificial Sequence
  chemically synthesized
ttccttttatcattatgtaatg

SEQ ID NO: 48691 - DNA, 22 bp, Artificial Sequence
  chemically synthesized
cttttatcattatgtaatgact

SEQ ID NO: 48692 - DNA, 22 bp, Artificial Sequence
  chemically synthesized
ttatcattatgtaatgactttt

SEQ ID NO: 48693 - DNA, 22 bp, Artificial Sequence
  chemically synthesized
tatcattatgtaatgacttttg

SEQ ID NO: 48694 - DNA, 22 bp, Artificial Sequence
  chemically synthesized
atcattatgtaatgacttttgt

SEQ ID NO: 48695 - DNA, 22 bp, Artificial Sequence
  chemically synthesized
tcattatgtaatgacttttgtc

SEQ ID NO: 48696 - DNA, 22 bp, Artificial Sequence
  chemically synthesized
tgtaatgacttttgtctcttag

SEQ ID NO: 48697 - DNA, 22 bp, Artificial Sequence
  chemically synthesized
ttgtctcttagtgttttttatt

SEQ ID NO: 48698 - DNA, 22 bp, Artificial Sequence
  chemically synthesized
tgtctcttagtgttttttattt

SEQ ID NO: 48699 - DNA, 22 bp, Artificial Sequence
  chemically synthesized
gtctcttagtgttttttattta

SEQ ID NO: 48700 - DNA, 22 bp, Artificial Sequence
  chemically synthesized
tctcttagtgttttttatttaa

SEQ ID NO: 48701 - DNA, 22 bp, Artificial Sequence
  chemically synthesized
ttagtgttttttatttaaagtc

SEQ ID NO: 48702 - DNA, 22 bp, Artificial Sequence
  chemically synthesized
agtgttttttatttaaagtcaa

SEQ ID NO: 48703 - DNA, 22 bp, Artificial Sequence
  chemically synthesized
gtgttttttatttaaagtcaat

SEQ ID NO: 48704 - DNA, 22 bp, Artificial Sequence
  chemically synthesized
tttatttaaagtcaattttatc

SEQ ID NO: 48705 - DNA, 22 bp, Artificial Sequence
  chemically synthesized
ttatttaaagtcaattttatct

SEQ ID NO: 48706 - DNA, 22 bp, Artificial Sequence
  chemically synthesized
tatttaaagtcaattttatctg

SEQ ID NO: 48707 - DNA, 22 bp, Artificial Sequence
  chemically synthesized
atttaaagtcaattttatctgt

SEQ ID NO: 48708 - DNA, 22 bp, Artificial Sequence
  chemically synthesized
tttaaagtcaattttatctgtt

SEQ ID NO: 48709 - DNA, 22 bp, Artificial Sequence
  chemically synthesized
aaagtcaattttatctgttata

SEQ ID NO: 48710 - DNA, 22 bp, Artificial Sequence
  chemically synthesized
aagtcaattttatctgttatag

SEQ ID NO: 48711 - DNA, 22 bp, Artificial Sequence
  chemically synthesized
tatctgttataggtataactac

SEQ ID NO: 48712 - DNA, 22 bp, Artificial Sequence
  chemically synthesized
atctgttataggtataactact

SEQ ID NO: 48713 - DNA, 22 bp, Artificial Sequence
  chemically synthesized
tctgttataggtataactactt

SEQ ID NO: 48714 - DNA, 22 bp, Artificial Sequence
  chemically synthesized
ttataggtataactacttttgc

SEQ ID NO: 48715 - DNA, 22 bp, Artificial Sequence
  chemically synthesized
taggtataactacttttgctca

SEQ ID NO: 48716 - DNA, 22 bp, Artificial Sequence
  chemically synthesized
cttttgctcatttttggtttct

SEQ ID NO: 48717 - DNA, 22 bp, Artificial Sequence
  chemically synthesized
ttgctcatttttggtttctctt

SEQ ID NO: 48718 - DNA, 22 bp, Artificial Sequence
  chemically synthesized
tgctcatttttggtttctcttt

SEQ ID NO: 48719 - DNA, 22 bp, Artificial Sequence
  chemically synthesized
gctcatttttggtttctctttg

SEQ ID NO: 48720 - DNA, 22 bp, Artificial Sequence
  chemically synthesized
ctcatttttggtttctctttgt

SEQ ID NO: 48721 - DNA, 22 bp, Artificial Sequence
  chemically synthesized
atttttggtttctctttgtatg

SEQ ID NO: 48722 - DNA, 22 bp, Artificial Sequence
  chemically synthesized
ttggtttctctttgtatggaag

SEQ ID NO: 48723 - DNA, 22 bp, Artificial Sequence
  chemically synthesized
tggtttctctttgtatggaaga

SEQ ID NO: 48724 - DNA, 22 bp, Artificial Sequence
  chemically synthesized
ggtttctctttgtatggaagat

SEQ ID NO: 48725 - DNA, 22 bp, Artificial Sequence
  chemically synthesized
gtttctctttgtatggaagatc

SEQ ID NO: 48726 - DNA, 22 bp, Artificial Sequence
  chemically synthesized
ctctttgtatggaagatctttc

SEQ ID NO: 48727 - DNA, 22 bp, Artificial Sequence
  chemically synthesized
tctttgtatggaagatctttca

SEQ ID NO: 48728 - DNA, 22 bp, Artificial Sequence
  chemically synthesized
tttgtatggaagatctttcatc

SEQ ID NO: 48729 - DNA, 22 bp, Artificial Sequence
  chemically synthesized
tgtatggaagatctttcatctt

SEQ ID NO: 48730 - DNA, 22 bp, Artificial Sequence
  chemically synthesized
gtatggaagatctttcatcttt

SEQ ID NO: 48731 - DNA, 22 bp, Artificial Sequence
  chemically synthesized
tatggaagatctttcatctttt

SEQ ID NO: 48732 - DNA, 22 bp, Artificial Sequence
  chemically synthesized
tcatctttttactttcagtcta

SEQ ID NO: 48733 - DNA, 22 bp, Artificial Sequence
  chemically synthesized
catctttttactttcagtctat

SEQ ID NO: 48734 - DNA, 22 bp, Artificial Sequence
  chemically synthesized
atctttttactttcagtctata

SEQ ID NO: 48735 - DNA, 22 bp, Artificial Sequence
  chemically synthesized
tttactttcagtctatatttat

SEQ ID NO: 48736 - DNA, 22 bp, Artificial Sequence
  chemically synthesized
ttactttcagtctatatttatc

SEQ ID NO: 48737 - DNA, 22 bp, Artificial Sequence
  chemically synthesized
tactttcagtctatatttatct

SEQ ID NO: 48738 - DNA, 22 bp, Artificial Sequence
  chemically synthesized
actttcagtctatatttatctt

SEQ ID NO: 48739 - DNA, 22 bp, Artificial Sequence
  chemically synthesized
ctttcagtctatatttatcttt

SEQ ID NO: 48740 - DNA, 22 bp, Artificial Sequence
  chemically synthesized
tcagtctatatttatctttaca

SEQ ID NO: 48741 - DNA, 22 bp, Artificial Sequence
  chemically synthesized
cagtctatatttatctttacaa

SEQ ID NO: 48742 - DNA, 22 bp, Artificial Sequence
  chemically synthesized
agtctatatttatctttacaag

SEQ ID NO: 48743 - DNA, 22 bp, Artificial Sequence
  chemically synthesized
tatttatctttacaagtgagat

SEQ ID NO: 48744 - DNA, 22 bp, Artificial Sequence
  chemically synthesized
atctttacaagtgagataagtt

SEQ ID NO: 48745 - DNA, 22 bp, Artificial Sequence
  chemically synthesized
tctttacaagtgagataagttt

SEQ ID NO: 48746 - DNA, 22 bp, Artificial Sequence
  chemically synthesized
tacaagtgagataagtttctta

SEQ ID NO: 48747 - DNA, 22 bp, Artificial Sequence
  chemically synthesized
acaagtgagataagtttcttat

SEQ ID NO: 48748 - DNA, 22 bp, Artificial Sequence
  chemically synthesized
caagtgagataagtttcttata

SEQ ID NO: 48749 - DNA, 22 bp, Artificial Sequence
  chemically synthesized
cttataggcagcttacaactgg

SEQ ID NO: 48750 - DNA, 22 bp, Artificial Sequence
  chemically synthesized
ttataggcagcttacaactggg

SEQ ID NO: 48751 - DNA, 22 bp, Artificial Sequence
  chemically synthesized
ataggcagcttacaactgggtc

SEQ ID NO: 48752 - DNA, 22 bp, Artificial Sequence
  chemically synthesized
taggcagcttacaactgggtca

SEQ ID NO: 48753 - DNA, 22 bp, Artificial Sequence
  chemically synthesized
acaactgggtcatatttttgtt

SEQ ID NO: 48754 - DNA, 22 bp, Artificial Sequence
  chemically synthesized
caactgggtcatatttttgttt

SEQ ID NO: 48755 - DNA, 22 bp, Artificial Sequence
  chemically synthesized
ggtcatatttttgttttaaatc

SEQ ID NO: 48756 - DNA, 22 bp, Artificial Sequence
  chemically synthesized
ttgttttaaatctatttagcca

SEQ ID NO: 48757 - DNA, 22 bp, Artificial Sequence
  chemically synthesized
tgttttaaatctatttagccag

SEQ ID NO: 48758 - DNA, 22 bp, Artificial Sequence
  chemically synthesized
gttttaaatctatttagccagt

SEQ ID NO: 48759 - DNA, 22 bp, Artificial Sequence
  chemically synthesized
ttttaaatctatttagccagtc

SEQ ID NO: 48760 - DNA, 22 bp, Artificial Sequence
  chemically synthesized
taaatctatttagccagtctat

SEQ ID NO: 48761 - DNA, 22 bp, Artificial Sequence
  chemically synthesized
aaatctatttagccagtctata

SEQ ID NO: 48762 - DNA, 22 bp, Artificial Sequence
  chemically synthesized
aatctatttagccagtctatat

SEQ ID NO: 48763 - DNA, 22 bp, Artificial Sequence
  chemically synthesized
tttagccagtctatatctttca

SEQ ID NO: 48764 - DNA, 22 bp, Artificial Sequence
  chemically synthesized
agccagtctatatctttcaagt

SEQ ID NO: 48765 - DNA, 22 bp, Artificial Sequence
  chemically synthesized
gccagtctatatctttcaagta

SEQ ID NO: 48766 - DNA, 22 bp, Artificial Sequence
  chemically synthesized
tatctttcaagtaacaatttaa

SEQ ID NO: 48767 - DNA, 22 bp, Artificial Sequence
  chemically synthesized
tcaagtaacaatttaatccatt

SEQ ID NO: 48768 - DNA, 22 bp, Artificial Sequence
  chemically synthesized
caagtaacaatttaatccattt

SEQ ID NO: 48769 - DNA, 22 bp, Artificial Sequence
  chemically synthesized
aagtaacaatttaatccattta

SEQ ID NO: 48770 - DNA, 22 bp, Artificial Sequence
  chemically synthesized
aatccatttacatgcaaggcta

SEQ ID NO: 48771 - DNA, 22 bp, Artificial Sequence
  chemically synthesized
atccatttacatgcaaggctat

SEQ ID NO: 48772 - DNA, 22 bp, Artificial Sequence
  chemically synthesized
acatgcaaggctattattgaca

SEQ ID NO: 48773 - DNA, 22 bp, Artificial Sequence
  chemically synthesized
catgcaaggctattattgacat

SEQ ID NO: 48774 - DNA, 22 bp, Artificial Sequence
  chemically synthesized
ttattgacatgtgagagcttat

SEQ ID NO: 48775 - DNA, 22 bp, Artificial Sequence
  chemically synthesized
ttgacatgtgagagcttattcc

SEQ ID NO: 48776 - DNA, 22 bp, Artificial Sequence
  chemically synthesized
acatgtgagagcttattcctgc

SEQ ID NO: 48777 - DNA, 22 bp, Artificial Sequence
  chemically synthesized
attcctgccattttgttaattg

SEQ ID NO: 48778 - DNA, 22 bp, Artificial Sequence
  chemically synthesized
ttcctgccattttgttaattga

SEQ ID NO: 48779 - DNA, 22 bp, Artificial Sequence
  chemically synthesized
ctgccattttgttaattgattc

SEQ ID NO: 48780 - DNA, 22 bp, Artificial Sequence
  chemically synthesized
ccattttgttaattgattcctg

SEQ ID NO: 48781 - DNA, 22 bp, Artificial Sequence
  chemically synthesized
tgttaattgattcctggttgtt

SEQ ID NO: 48782 - DNA, 22 bp, Artificial Sequence
  chemically synthesized
gttaattgattcctggttgttt

SEQ ID NO: 48783 - DNA, 22 bp, Artificial Sequence
  chemically synthesized
ttaattgattcctggttgtttt

SEQ ID NO: 48784 - DNA, 22 bp, Artificial Sequence
  chemically synthesized
attgattcctggttgttttgtt

SEQ ID NO: 48785 - DNA, 22 bp, Artificial Sequence
  chemically synthesized
attcctggttgttttgtttttt

SEQ ID NO: 48786 - DNA, 22 bp, Artificial Sequence
  chemically synthesized
ctggttgttttgtttttttttt

SEQ ID NO: 48787 - DNA, 22 bp, Artificial Sequence
  chemically synthesized
gttgttttgttttttttttagt

SEQ ID NO: 48788 - DNA, 22 bp, Artificial Sequence
  chemically synthesized
ttttgttttttttttagtttgt

SEQ ID NO: 48789 - DNA, 22 bp, Artificial Sequence
  chemically synthesized
tgttttttttttagtttgtttg

SEQ ID NO: 48790 - DNA, 22 bp, Artificial Sequence
  chemically synthesized
gttttttttttagtttgtttgt

SEQ ID NO: 48791 - DNA, 22 bp, Artificial Sequence
  chemically synthesized
ttttttttttagtttgtttgtt

SEQ ID NO: 48792 - DNA, 22 bp, Artificial Sequence
  chemically synthesized
tttttttagtttgtttgttttg

SEQ ID NO: 48793 - DNA, 22 bp, Artificial Sequence
  chemically synthesized
ttttttagtttgtttgttttgt

SEQ ID NO: 48794 - DNA, 22 bp, Artificial Sequence
  chemically synthesized
tttttagtttgtttgttttgtg

SEQ ID NO: 48795 - DNA, 22 bp, Artificial Sequence
  chemically synthesized
ttttagtttgtttgttttgtgt

SEQ ID NO: 48796 - DNA, 22 bp, Artificial Sequence
  chemically synthesized
tttagtttgtttgttttgtgtt

SEQ ID NO: 48797 - DNA, 22 bp, Artificial Sequence
  chemically synthesized
ttagtttgtttgttttgtgttt

SEQ ID NO: 48798 - DNA, 22 bp, Artificial Sequence
  chemically synthesized
tagtttgtttgttttgtgtttt

SEQ ID NO: 48799 - DNA, 22 bp, Artificial Sequence
  chemically synthesized
agtttgtttgttttgtgttttt

SEQ ID NO: 48800 - DNA, 22 bp, Artificial Sequence
  chemically synthesized
gtttgtttgttttgtgtttttt

SEQ ID NO: 48801 - DNA, 22 bp, Artificial Sequence
  chemically synthesized
gtttgttttgtgtttttttctt

SEQ ID NO: 48802 - DNA, 22 bp, Artificial Sequence
  chemically synthesized
tttgttttgtgtttttttcttc

SEQ ID NO: 48803 - DNA, 22 bp, Artificial Sequence
  chemically synthesized
gttttgtgtttttttcttcctt

SEQ ID NO: 48804 - DNA, 22 bp, Artificial Sequence
  chemically synthesized
ttttgtgtttttttcttccttc

SEQ ID NO: 48805 - DNA, 22 bp, Artificial Sequence
  chemically synthesized
tgtgtttttttcttccttcctt

SEQ ID NO: 48806 - DNA, 22 bp, Artificial Sequence
  chemically synthesized
gtgtttttttcttccttccttc

SEQ ID NO: 48807 - DNA, 22 bp, Artificial Sequence
  chemically synthesized
tgtttttttcttccttccttcc

SEQ ID NO: 48808 - DNA, 22 bp, Artificial Sequence
  chemically synthesized
ttttcttccttccttccttttc

SEQ ID NO: 48809 - DNA, 22 bp, Artificial Sequence
  chemically synthesized
tttcttccttccttccttttct

SEQ ID NO: 48810 - DNA, 22 bp, Artificial Sequence
  chemically synthesized
ttcttccttccttccttttctt

SEQ ID NO: 48811 - DNA, 22 bp, Artificial Sequence
  chemically synthesized
tcttccttccttccttttcttt

SEQ ID NO: 48812 - DNA, 22 bp, Artificial Sequence
  chemically synthesized
cttccttccttccttttctttc

SEQ ID NO: 48813 - DNA, 22 bp, Artificial Sequence
  chemically synthesized
ttccttccttccttttctttct

SEQ ID NO: 48814 - DNA, 22 bp, Artificial Sequence
  chemically synthesized
ccttccttccttttctttcttt

SEQ ID NO: 48815 - DNA, 22 bp, Artificial Sequence
  chemically synthesized
cttccttccttttctttctttc

SEQ ID NO: 48816 - DNA, 22 bp, Artificial Sequence
  chemically synthesized
ccttccttttctttctttcatt

SEQ ID NO: 48817 - DNA, 22 bp, Artificial Sequence
  chemically synthesized
cttccttttctttctttcattc

SEQ ID NO: 48818 - DNA, 22 bp, Artificial Sequence
  chemically synthesized
ccttttctttctttcattctct

SEQ ID NO: 48819 - DNA, 22 bp, Artificial Sequence
  chemically synthesized
cttttctttctttcattctctc

SEQ ID NO: 48820 - DNA, 22 bp, Artificial Sequence
  chemically synthesized
ttctttctttcattctctctct

SEQ ID NO: 48821 - DNA, 22 bp, Artificial Sequence
  chemically synthesized
tctttctttcattctctctctc

SEQ ID NO: 48822 - DNA, 22 bp, Artificial Sequence
  chemically synthesized
ctttctttcattctctctctct

SEQ ID NO: 48823 - DNA, 22 bp, Artificial Sequence
  chemically synthesized
tttctttcattctctctctctc

SEQ ID NO: 48824 - DNA, 22 bp, Artificial Sequence
  chemically synthesized
tctttcattctctctctctctc

SEQ ID NO: 48825 - DNA, 22 bp, Artificial Sequence
  chemically synthesized
ctttcattctctctctctctct

SEQ ID NO: 48826 - DNA, 22 bp, Artificial Sequence
  chemically synthesized
tttcattctctctctctctctc

SEQ ID NO: 48827 - DNA, 22 bp, Artificial Sequence
  chemically synthesized
tcattctctctctctctctctt

SEQ ID NO: 48828 - DNA, 22 bp, Artificial Sequence
  chemically synthesized
cattctctctctctctctcttt

SEQ ID NO: 48829 - DNA, 22 bp, Artificial Sequence
  chemically synthesized
attctctctctctctctctttc

SEQ ID NO: 48830 - DNA, 22 bp, Artificial Sequence
  chemically synthesized
tctctctctctctctttctttc

SEQ ID NO: 48831 - DNA, 22 bp, Artificial Sequence
  chemically synthesized
tctctctctctctttctttctt

SEQ ID NO: 48832 - DNA, 22 bp, Artificial Sequence
  chemically synthesized
tctctctctctttctttctttc

SEQ ID NO: 48833 - DNA, 22 bp, Artificial Sequence
  chemically synthesized
tctctctctttctttctttctt

SEQ ID NO: 48834 - DNA, 22 bp, Artificial Sequence
  chemically synthesized
tctctctttctttctttctttc

SEQ ID NO: 48835 - DNA, 22 bp, Artificial Sequence
  chemically synthesized
tctctttctttctttctttctt

SEQ ID NO: 48836 - DNA, 22 bp, Artificial Sequence
  chemically synthesized
tctttctttctttctttctttc

SEQ ID NO: 48837 - DNA, 22 bp, Artificial Sequence
  chemically synthesized
tttctttctttctttctttctt

SEQ ID NO: 48838 - DNA, 22 bp, Artificial Sequence
  chemically synthesized
tctttctttctttctttcttat

SEQ ID NO: 48839 - DNA, 22 bp, Artificial Sequence
  chemically synthesized
ctttctttctttctttcttatt

SEQ ID NO: 48840 - DNA, 22 bp, Artificial Sequence
  chemically synthesized
tttctttctttctttcttatta

SEQ ID NO: 48841 - DNA, 22 bp, Artificial Sequence
  chemically synthesized
tctttctttctttcttattatt

SEQ ID NO: 48842 - DNA, 22 bp, Artificial Sequence
  chemically synthesized
ctttctttctttcttattattt

SEQ ID NO: 48843 - DNA, 22 bp, Artificial Sequence
  chemically synthesized
tttctttctttcttattattta

SEQ ID NO: 48844 - DNA, 22 bp, Artificial Sequence
  chemically synthesized
tctttctttcttattatttatg

SEQ ID NO: 48845 - DNA, 22 bp, Artificial Sequence
  chemically synthesized
ctttctttcttattatttatga

SEQ ID NO: 48846 - DNA, 22 bp, Artificial Sequence
  chemically synthesized
tttctttcttattatttatgat

SEQ ID NO: 48847 - DNA, 22 bp, Artificial Sequence
  chemically synthesized
tctttcttattatttatgattg

SEQ ID NO: 48848 - DNA, 22 bp, Artificial Sequence
  chemically synthesized
ctttcttattatttatgattgt

SEQ ID NO: 48849 - DNA, 22 bp, Artificial Sequence
  chemically synthesized
tttcttattatttatgattgtg

SEQ ID NO: 48850 - DNA, 22 bp, Artificial Sequence
  chemically synthesized
tcttattatttatgattgtggt

SEQ ID NO: 48851 - DNA, 22 bp, Artificial Sequence
  chemically synthesized
cttattatttatgattgtggtt

SEQ ID NO: 48852 - DNA, 22 bp, Artificial Sequence
  chemically synthesized
ttattatttatgattgtggttt

SEQ ID NO: 48853 - DNA, 22 bp, Artificial Sequence
  chemically synthesized
attatttatgattgtggtttgg

SEQ ID NO: 48854 - DNA, 22 bp, Artificial Sequence
  chemically synthesized
ttatttatgattgtggtttggt

SEQ ID NO: 48855 - DNA, 22 bp, Artificial Sequence
  chemically synthesized
tttatgattgtggtttggtgat

SEQ ID NO: 48856 - DNA, 22 bp, Artificial Sequence
  chemically synthesized
atgattgtggtttggtgatttt

SEQ ID NO: 48857 - DNA, 22 bp, Artificial Sequence
  chemically synthesized
tgattgtggtttggtgattttc

SEQ ID NO: 48858 - DNA, 22 bp, Artificial Sequence
  chemically synthesized
tggtttggtgattttctgtagt

SEQ ID NO: 48859 - DNA, 22 bp, Artificial Sequence
  chemically synthesized
ggtgattttctgtagtggtaac

SEQ ID NO: 48860 - DNA, 22 bp, Artificial Sequence
  chemically synthesized
gtgattttctgtagtggtaacg

SEQ ID NO: 48861 - DNA, 22 bp, Artificial Sequence
  chemically synthesized
tctgtagtggtaacgtttgagt

SEQ ID NO: 48862 - DNA, 22 bp, Artificial Sequence
  chemically synthesized
ctgtagtggtaacgtttgagtt

SEQ ID NO: 48863 - DNA, 22 bp, Artificial Sequence
  chemically synthesized
tgtagtggtaacgtttgagttc

SEQ ID NO: 48864 - DNA, 22 bp, Artificial Sequence
  chemically synthesized
tagtggtaacgtttgagttctt

SEQ ID NO: 48865 - DNA, 22 bp, Artificial Sequence
  chemically synthesized
gagttctttctcttctttattt

SEQ ID NO: 48866 - DNA, 22 bp, Artificial Sequence
  chemically synthesized
agttctttctcttctttatttg

SEQ ID NO: 48867 - DNA, 22 bp, Artificial Sequence
  chemically synthesized
tttctcttctttatttgtgttt

SEQ ID NO: 48868 - DNA, 22 bp, Artificial Sequence
  chemically synthesized
tctcttctttatttgtgttttg

SEQ ID NO: 48869 - DNA, 22 bp, Artificial Sequence
  chemically synthesized
ctcttctttatttgtgttttgc

SEQ ID NO: 48870 - DNA, 22 bp, Artificial Sequence
  chemically synthesized
tcttctttatttgtgttttgct

SEQ ID NO: 48871 - DNA, 22 bp, Artificial Sequence
  chemically synthesized
ttctttatttgtgttttgctct

SEQ ID NO: 48872 - DNA, 22 bp, Artificial Sequence
  chemically synthesized
ctttatttgtgttttgctctac

SEQ ID NO: 48873 - DNA, 22 bp, Artificial Sequence
  chemically synthesized
tttatttgtgttttgctctacc

SEQ ID NO: 48874 - DNA, 22 bp, Artificial Sequence
  chemically synthesized
tatttgtgttttgctctaccag

SEQ ID NO: 48875 - DNA, 22 bp, Artificial Sequence
  chemically synthesized
atttgtgttttgctctaccagt

SEQ ID NO: 48876 - DNA, 22 bp, Artificial Sequence
  chemically synthesized
tttgtgttttgctctaccagtt

SEQ ID NO: 48877 - DNA, 22 bp, Artificial Sequence
  chemically synthesized
gtgttttgctctaccagttagt

SEQ ID NO: 48878 - DNA, 22 bp, Artificial Sequence
  chemically synthesized
tgttttgctctaccagttagtt

SEQ ID NO: 48879 - DNA, 22 bp, Artificial Sequence
  chemically synthesized
tgctctaccagttagttgtata

SEQ ID NO: 48880 - DNA, 22 bp, Artificial Sequence
  chemically synthesized
gctctaccagttagttgtatac

SEQ ID NO: 48881 - DNA, 22 bp, Artificial Sequence
  chemically synthesized
ctctaccagttagttgtatacc

SEQ ID NO: 48882 - DNA, 22 bp, Artificial Sequence
  chemically synthesized
taccagttagttgtataccttt

SEQ ID NO: 48883 - DNA, 22 bp, Artificial Sequence
  chemically synthesized
ccagttagttgtatacctttgt

SEQ ID NO: 48884 - DNA, 22 bp, Artificial Sequence
  chemically synthesized
gttgtatacctttgtgtgtctt

SEQ ID NO: 48885 - DNA, 22 bp, Artificial Sequence
  chemically synthesized
tatacctttgtgtgtcttcata

SEQ ID NO: 48886 - DNA, 22 bp, Artificial Sequence
  chemically synthesized
tgtgtgtcttcataatggcagt

SEQ ID NO: 48887 - DNA, 22 bp, Artificial Sequence
  chemically synthesized
gtgtgtcttcataatggcagtg

SEQ ID NO: 48888 - DNA, 22 bp, Artificial Sequence
  chemically synthesized
tgtgtcttcataatggcagtgt

SEQ ID NO: 48889 - DNA, 22 bp, Artificial Sequence
  chemically synthesized
cataatggcagtgtcctgtcac

SEQ ID NO: 48890 - DNA, 22 bp, Artificial Sequence
  chemically synthesized
ataatggcagtgtcctgtcact

SEQ ID NO: 48891 - DNA, 22 bp, Artificial Sequence
  chemically synthesized
tcactttcatgtgtaggactcc

SEQ ID NO: 48892 - DNA, 22 bp, Artificial Sequence
  chemically synthesized
tcatgtgtaggactcccttaaa

SEQ ID NO: 48893 - DNA, 22 bp, Artificial Sequence
  chemically synthesized
catgtgtaggactcccttaaat

SEQ ID NO: 48894 - DNA, 22 bp, Artificial Sequence
  chemically synthesized
atgtgtaggactcccttaaata

SEQ ID NO: 48895 - DNA, 22 bp, Artificial Sequence
  chemically synthesized
ccttaaatatttcttgtaaagc

SEQ ID NO: 48896 - DNA, 22 bp, Artificial Sequence
  chemically synthesized
aaatatttcttgtaaagccagt

SEQ ID NO: 48897 - DNA, 22 bp, Artificial Sequence
  chemically synthesized
aatatttcttgtaaagccagtc

SEQ ID NO: 48898 - DNA, 22 bp, Artificial Sequence
  chemically synthesized
cttgtaaagccagtctagtgat

SEQ ID NO: 48899 - DNA, 22 bp, Artificial Sequence
  chemically synthesized
ttgtaaagccagtctagtgata

SEQ ID NO: 48900 - DNA, 22 bp, Artificial Sequence
  chemically synthesized
gtaaagccagtctagtgatagt

SEQ ID NO: 48901 - DNA, 22 bp, Artificial Sequence
  chemically synthesized
taaagccagtctagtgatagtg

SEQ ID NO: 48902 - DNA, 22 bp, Artificial Sequence
  chemically synthesized
gtgatagtgaattccttcaaat

SEQ ID NO: 48903 - DNA, 22 bp, Artificial Sequence
  chemically synthesized
cttcaaatttttcttgcccaga

SEQ ID NO: 48904 - DNA, 22 bp, Artificial Sequence
  chemically synthesized
caaatttttcttgcccagaaaa

SEQ ID NO: 48905 - DNA, 22 bp, Artificial Sequence
  chemically synthesized
aaatttttcttgcccagaaaag

SEQ ID NO: 48906 - DNA, 22 bp, Artificial Sequence
  chemically synthesized
ttcttgcccagaaaagatttta

SEQ ID NO: 48907 - DNA, 22 bp, Artificial Sequence
  chemically synthesized
tcttgcccagaaaagattttat

SEQ ID NO: 48908 - DNA, 22 bp, Artificial Sequence
  chemically synthesized
cttgcccagaaaagattttatt

SEQ ID NO: 48909 - DNA, 22 bp, Artificial Sequence
  chemically synthesized
ttgcccagaaaagattttattt

SEQ ID NO: 48910 - DNA, 22 bp, Artificial Sequence
  chemically synthesized
gcccagaaaagattttatttat

SEQ ID NO: 48911 - DNA, 22 bp, Artificial Sequence
  chemically synthesized
cccagaaaagattttatttatc

SEQ ID NO: 48912 - DNA, 22 bp, Artificial Sequence
  chemically synthesized
tatttatccttcatttttgaag

SEQ ID NO: 48913 - DNA, 22 bp, Artificial Sequence
  chemically synthesized
atttatccttcatttttgaaga

SEQ ID NO: 48914 - DNA, 22 bp, Artificial Sequence
  chemically synthesized
tttatccttcatttttgaagaa

SEQ ID NO: 48915 - DNA, 22 bp, Artificial Sequence
  chemically synthesized
atccttcatttttgaagaacaa

SEQ ID NO: 48916 - DNA, 22 bp, Artificial Sequence
  chemically synthesized
tccttcatttttgaagaacaat

SEQ ID NO: 48917 - DNA, 22 bp, Artificial Sequence
  chemically synthesized
catttttgaagaacaatgttgc

SEQ ID NO: 48918 - DNA, 22 bp, Artificial Sequence
  chemically synthesized
atttttgaagaacaatgttgct

SEQ ID NO: 48919 - DNA, 22 bp, Artificial Sequence
  chemically synthesized
ttgaagaacaatgttgctgggt

SEQ ID NO: 48920 - DNA, 22 bp, Artificial Sequence
  chemically synthesized
tgaagaacaatgttgctgggta

SEQ ID NO: 48921 - DNA, 22 bp, Artificial Sequence
  chemically synthesized
gaagaacaatgttgctgggtat

SEQ ID NO: 48922 - DNA, 22 bp, Artificial Sequence
  chemically synthesized
aagaacaatgttgctgggtata

SEQ ID NO: 48923 - DNA, 22 bp, Artificial Sequence
  chemically synthesized
ctgggtataacatccttggtgt

SEQ ID NO: 48924 - DNA, 22 bp, Artificial Sequence
  chemically synthesized
ggtataacatccttggtgtcat

SEQ ID NO: 48925 - DNA, 22 bp, Artificial Sequence
  chemically synthesized
ggtgtcatttttttctttcact

SEQ ID NO: 48926 - DNA, 22 bp, Artificial Sequence
  chemically synthesized
gtgtcatttttttctttcacta

SEQ ID NO: 48927 - DNA, 22 bp, Artificial Sequence
  chemically synthesized
ttttctttcactattttgaata

SEQ ID NO: 48928 - DNA, 22 bp, Artificial Sequence
  chemically synthesized
tttctttcactattttgaatat

SEQ ID NO: 48929 - DNA, 22 bp, Artificial Sequence
  chemically synthesized
ttctttcactattttgaatata

SEQ ID NO: 48930 - DNA, 22 bp, Artificial Sequence
  chemically synthesized
tctttcactattttgaatatat

SEQ ID NO: 48931 - DNA, 22 bp, Artificial Sequence
  chemically synthesized
ctttcactattttgaatatatc

SEQ ID NO: 48932 - DNA, 22 bp, Artificial Sequence
  chemically synthesized
tttcactattttgaatatatca

SEQ ID NO: 48933 - DNA, 22 bp, Artificial Sequence
  chemically synthesized
tcactattttgaatatatcatc

SEQ ID NO: 48934 - DNA, 22 bp, Artificial Sequence
  chemically synthesized
cactattttgaatatatcatcc

SEQ ID NO: 48935 - DNA, 22 bp, Artificial Sequence
  chemically synthesized
actattttgaatatatcatccc

SEQ ID NO: 48936 - DNA, 22 bp, Artificial Sequence
  chemically synthesized
ttttgaatatatcatcccatct

SEQ ID NO: 48937 - DNA, 22 bp, Artificial Sequence
  chemically synthesized
tgaatatatcatcccatcttct

SEQ ID NO: 48938 - DNA, 22 bp, Artificial Sequence
  chemically synthesized
gaatatatcatcccatcttctc

SEQ ID NO: 48939 - DNA, 22 bp, Artificial Sequence
  chemically synthesized
aatatatcatcccatcttctcc

SEQ ID NO: 48940 - DNA, 22 bp, Artificial Sequence
  chemically synthesized
ctcctggcctgtgaggtttctg

SEQ ID NO: 48941 - DNA, 22 bp, Artificial Sequence
  chemically synthesized
tcctggcctgtgaggtttctgc

SEQ ID NO: 48942 - DNA, 22 bp, Artificial Sequence
  chemically synthesized
ctggcctgtgaggtttctgctg

SEQ ID NO: 48943 - DNA, 22 bp, Artificial Sequence
  chemically synthesized
gcctgtgaggtttctgctgaga

SEQ ID NO: 48944 - DNA, 22 bp, Artificial Sequence
  chemically synthesized
tgaggtttctgctgagaaatct

SEQ ID NO: 48945 - DNA, 22 bp, Artificial Sequence
  chemically synthesized
ctgctgagaaatctgctgttaa

SEQ ID NO: 48946 - DNA, 22 bp, Artificial Sequence
  chemically synthesized
tgctgagaaatctgctgttaat

SEQ ID NO: 48947 - DNA, 22 bp, Artificial Sequence
  chemically synthesized
ctgagaaatctgctgttaatct

SEQ ID NO: 48948 - DNA, 22 bp, Artificial Sequence
  chemically synthesized
agaaatctgctgttaatctgtt

SEQ ID NO: 48949 - DNA, 22 bp, Artificial Sequence
  chemically synthesized
ctgttaatctgttaatcttgtg

SEQ ID NO: 48950 - DNA, 22 bp, Artificial Sequence
  chemically synthesized
ttaatctgttaatcttgtggaa

SEQ ID NO: 48951 - DNA, 22 bp, Artificial Sequence
  chemically synthesized
atctgttaatcttgtggaagtt

SEQ ID NO: 48952 - DNA, 22 bp, Artificial Sequence
  chemically synthesized
ttaatcttgtggaagttccctt

SEQ ID NO: 48953 - DNA, 22 bp, Artificial Sequence
  chemically synthesized
atcttgtggaagttcccttata

SEQ ID NO: 48954 - DNA, 22 bp, Artificial Sequence
  chemically synthesized
gtggaagttcccttataagtga

SEQ ID NO: 48955 - DNA, 22 bp, Artificial Sequence
  chemically synthesized
tggaagttcccttataagtgac

SEQ ID NO: 48956 - DNA, 22 bp, Artificial Sequence
  chemically synthesized
ccttataagtgactagacattt

SEQ ID NO: 48957 - DNA, 22 bp, Artificial Sequence
  chemically synthesized
ataagtgactagacattttgct

SEQ ID NO: 48958 - DNA, 22 bp, Artificial Sequence
  chemically synthesized
taagtgactagacattttgctt

SEQ ID NO: 48959 - DNA, 22 bp, Artificial Sequence
  chemically synthesized
gacattttgcttgctgttttag

SEQ ID NO: 48960 - DNA, 22 bp, Artificial Sequence
  chemically synthesized
tgcttgctgttttagagttctt

SEQ ID NO: 48961 - DNA, 22 bp, Artificial Sequence
  chemically synthesized
gcttgctgttttagagttctta

SEQ ID NO: 48962 - DNA, 22 bp, Artificial Sequence
  chemically synthesized
cttgctgttttagagttcttac

SEQ ID NO: 48963 - DNA, 22 bp, Artificial Sequence
  chemically synthesized
gctgttttagagttcttactct

SEQ ID NO: 48964 - DNA, 22 bp, Artificial Sequence
  chemically synthesized
ctgttttagagttcttactctt

SEQ ID NO: 48965 - DNA, 22 bp, Artificial Sequence
  chemically synthesized
ttttagagttcttactctttgg

SEQ ID NO: 48966 - DNA, 22 bp, Artificial Sequence
  chemically synthesized
tagagttcttactctttggctt

SEQ ID NO: 48967 - DNA, 22 bp, Artificial Sequence
  chemically synthesized
agagttcttactctttggcttt

SEQ ID NO: 48968 - DNA, 22 bp, Artificial Sequence
  chemically synthesized
gagttcttactctttggctttt

SEQ ID NO: 48969 - DNA, 22 bp, Artificial Sequence
  chemically synthesized
ttactctttggcttttgacagt

SEQ ID NO: 48970 - DNA, 22 bp, Artificial Sequence
  chemically synthesized
actctttggcttttgacagttt

SEQ ID NO: 48971 - DNA, 22 bp, Artificial Sequence
  chemically synthesized
ctctttggcttttgacagtttg

SEQ ID NO: 48972 - DNA, 22 bp, Artificial Sequence
  chemically synthesized
tttggcttttgacagtttgact

SEQ ID NO: 48973 - DNA, 22 bp, Artificial Sequence
  chemically synthesized
tggcttttgacagtttgactat

SEQ ID NO: 48974 - DNA, 22 bp, Artificial Sequence
  chemically synthesized
ggcttttgacagtttgactata

SEQ ID NO: 48975 - DNA, 22 bp, Artificial Sequence
  chemically synthesized
gcttttgacagtttgactataa

SEQ ID NO: 48976 - DNA, 22 bp, Artificial Sequence
  chemically synthesized
ttgacagtttgactataatgtg

SEQ ID NO: 48977 - DNA, 22 bp, Artificial Sequence
  chemically synthesized
tgacagtttgactataatgtgc

SEQ ID NO: 48978 - DNA, 22 bp, Artificial Sequence
  chemically synthesized
gacagtttgactataatgtgct

SEQ ID NO: 48979 - DNA, 22 bp, Artificial Sequence
  chemically synthesized
acagtttgactataatgtgctg

SEQ ID NO: 48980 - DNA, 22 bp, Artificial Sequence
  chemically synthesized
gactataatgtgctgtggagaa

SEQ ID NO: 48981 - DNA, 22 bp, Artificial Sequence
  chemically synthesized
actataatgtgctgtggagaag

SEQ ID NO: 48982 - DNA, 22 bp, Artificial Sequence
  chemically synthesized
taatgtgctgtggagaagagct

SEQ ID NO: 48983 - DNA, 22 bp, Artificial Sequence
  chemically synthesized
tggagaagagctttttgcatta

SEQ ID NO: 48984 - DNA, 22 bp, Artificial Sequence
  chemically synthesized
tttgcattatattatttgggaa

SEQ ID NO: 48985 - DNA, 22 bp, Artificial Sequence
  chemically synthesized
ttgcattatattatttgggaat

SEQ ID NO: 48986 - DNA, 22 bp, Artificial Sequence
  chemically synthesized
tgcattatattatttgggaatt

SEQ ID NO: 48987 - DNA, 22 bp, Artificial Sequence
  chemically synthesized
gcattatattatttgggaattt

SEQ ID NO: 48988 - DNA, 22 bp, Artificial Sequence
  chemically synthesized
cattatattatttgggaatttc

SEQ ID NO: 48989 - DNA, 22 bp, Artificial Sequence
  chemically synthesized
tattatttgggaatttctgatt

SEQ ID NO: 48990 - DNA, 22 bp, Artificial Sequence
  chemically synthesized
tttgggaatttctgattttcat

SEQ ID NO: 48991 - DNA, 22 bp, Artificial Sequence
  chemically synthesized
gggaatttctgattttcatttg

SEQ ID NO: 48992 - DNA, 22 bp, Artificial Sequence
  chemically synthesized
ggaatttctgattttcatttgt

SEQ ID NO: 48993 - DNA, 22 bp, Artificial Sequence
  chemically synthesized
ctgattttcatttgtctggatg

SEQ ID NO: 48994 - DNA, 22 bp, Artificial Sequence
  chemically synthesized
tgattttcatttgtctggatgt

SEQ ID NO: 48995 - DNA, 22 bp, Artificial Sequence
  chemically synthesized
attttcatttgtctggatgtct

SEQ ID NO: 48996 - DNA, 22 bp, Artificial Sequence
  chemically synthesized
tcatttgtctggatgtctacat

SEQ ID NO: 48997 - DNA, 22 bp, Artificial Sequence
  chemically synthesized
catttgtctggatgtctacatt

SEQ ID NO: 48998 - DNA, 22 bp, Artificial Sequence
  chemically synthesized
atttgtctggatgtctacattt

SEQ ID NO: 48999 - DNA, 22 bp, Artificial Sequence
  chemically synthesized
gtctggatgtctacatttcttg

SEQ ID NO: 49000 - DNA, 22 bp, Artificial Sequence
  chemically synthesized
tctggatgtctacatttcttgc

SEQ ID NO: 49001 - DNA, 22 bp, Artificial Sequence
  chemically synthesized
gatgtctacatttcttgctaga

SEQ ID NO: 49002 - DNA, 22 bp, Artificial Sequence
  chemically synthesized
catttcttgctagacttgacaa

SEQ ID NO: 49003 - DNA, 22 bp, Artificial Sequence
  chemically synthesized
cttgctagacttgacaagtttt

SEQ ID NO: 49004 - DNA, 22 bp, Artificial Sequence
  chemically synthesized
ttgctagacttgacaagttttc

SEQ ID NO: 49005 - DNA, 22 bp, Artificial Sequence
  chemically synthesized
gctagacttgacaagttttcag

SEQ ID NO: 49006 - DNA, 22 bp, Artificial Sequence
  chemically synthesized
ctagacttgacaagttttcagc

SEQ ID NO: 49007 - DNA, 22 bp, Artificial Sequence
  chemically synthesized
gacttgacaagttttcagctat

SEQ ID NO: 49008 - DNA, 22 bp, Artificial Sequence
  chemically synthesized
gacaagttttcagctattgtgt

SEQ ID NO: 49009 - DNA, 22 bp, Artificial Sequence
  chemically synthesized
acaagttttcagctattgtgtt

SEQ ID NO: 49010 - DNA, 22 bp, Artificial Sequence
  chemically synthesized
tcagctattgtgttgttacgta

SEQ ID NO: 49011 - DNA, 22 bp, Artificial Sequence
  chemically synthesized
cagctattgtgttgttacgtag

SEQ ID NO: 49012 - DNA, 22 bp, Artificial Sequence
  chemically synthesized
agctattgtgttgttacgtagg

SEQ ID NO: 49013 - DNA, 22 bp, Artificial Sequence
  chemically synthesized
ttgtgttgttacgtaggtttcc

SEQ ID NO: 49014 - DNA, 22 bp, Artificial Sequence
  chemically synthesized
tgttgttacgtaggtttcctac

SEQ ID NO: 49015 - DNA, 22 bp, Artificial Sequence
  chemically synthesized
ttacgtaggtttcctacacctt

SEQ ID NO: 49016 - DNA, 22 bp, Artificial Sequence
  chemically synthesized
cgtaggtttcctacacctttca

SEQ ID NO: 49017 - DNA, 22 bp, Artificial Sequence
  chemically synthesized
cctacacctttcatgttctctt

SEQ ID NO: 49018 - DNA, 22 bp, Artificial Sequence
  chemically synthesized
ctacacctttcatgttctcttt

SEQ ID NO: 49019 - DNA, 22 bp, Artificial Sequence
  chemically synthesized
cacctttcatgttctctttacc

SEQ ID NO: 49020 - DNA, 22 bp, Artificial Sequence
  chemically synthesized
tcatgttctctttaccttctgg

SEQ ID NO: 49021 - DNA, 22 bp, Artificial Sequence
  chemically synthesized
catgttctctttaccttctggg

SEQ ID NO: 49022 - DNA, 22 bp, Artificial Sequence
  chemically synthesized
atgttctctttaccttctggga

SEQ ID NO: 49023 - DNA, 22 bp, Artificial Sequence
  chemically synthesized
tctttaccttctgggaaactgc

SEQ ID NO: 49024 - DNA, 22 bp, Artificial Sequence
  chemically synthesized
tttaccttctgggaaactgcaa

SEQ ID NO: 49025 - DNA, 22 bp, Artificial Sequence
  chemically synthesized
taccttctgggaaactgcaaat

SEQ ID NO: 49026 - DNA, 22 bp, Artificial Sequence
  chemically synthesized
accttctgggaaactgcaaatt

SEQ ID NO: 49027 - DNA, 22 bp, Artificial Sequence
  chemically synthesized
ccttctgggaaactgcaaattt

SEQ ID NO: 49028 - DNA, 22 bp, Artificial Sequence
  chemically synthesized
ctgggaaactgcaaatttgaat

SEQ ID NO: 49029 - DNA, 22 bp, Artificial Sequence
  chemically synthesized
tgggaaactgcaaatttgaata

SEQ ID NO: 49030 - DNA, 22 bp, Artificial Sequence
  chemically synthesized
ggaaactgcaaatttgaatatt

SEQ ID NO: 49031 - DNA, 22 bp, Artificial Sequence
  chemically synthesized
caaatttgaatatttgttcact

SEQ ID NO: 49032 - DNA, 22 bp, Artificial Sequence
  chemically synthesized
gaatatttgttcactttatagt

SEQ ID NO: 49033 - DNA, 22 bp, Artificial Sequence
  chemically synthesized
aatatttgttcactttatagtg

SEQ ID NO: 49034 - DNA, 22 bp, Artificial Sequence
  chemically synthesized
gttcactttatagtgcctcata

SEQ ID NO: 49035 - DNA, 22 bp, Artificial Sequence
  chemically synthesized
ttcactttatagtgcctcatat

SEQ ID NO: 49036 - DNA, 22 bp, Artificial Sequence
  chemically synthesized
actttatagtgcctcatatgtc

SEQ ID NO: 49037 - DNA, 22 bp, Artificial Sequence
  chemically synthesized
tatagtgcctcatatgtcacat

SEQ ID NO: 49038 - DNA, 22 bp, Artificial Sequence
  chemically synthesized
atagtgcctcatatgtcacata

SEQ ID NO: 49039 - DNA, 22 bp, Artificial Sequence
  chemically synthesized
tagtgcctcatatgtcacatac

SEQ ID NO: 49040 - DNA, 22 bp, Artificial Sequence
  chemically synthesized
atatgtcacatacactttgttc

SEQ ID NO: 49041 - DNA, 22 bp, Artificial Sequence
  chemically synthesized
tgttcattctttttttttcctt

SEQ ID NO: 49042 - DNA, 22 bp, Artificial Sequence
  chemically synthesized
gttcattctttttttttccttt

SEQ ID NO: 49043 - DNA, 22 bp, Artificial Sequence
  chemically synthesized
ttcattctttttttttcctttc

SEQ ID NO: 49044 - DNA, 22 bp, Artificial Sequence
  chemically synthesized
attctttttttttcctttctat

SEQ ID NO: 49045 - DNA, 22 bp, Artificial Sequence
  chemically synthesized
tttttttttcctttctatcatt

SEQ ID NO: 49046 - DNA, 22 bp, Artificial Sequence
  chemically synthesized
tttttttcctttctatcatttg

SEQ ID NO: 49047 - DNA, 22 bp, Artificial Sequence
  chemically synthesized
ttttttcctttctatcatttga

SEQ ID NO: 49048 - DNA, 22 bp, Artificial Sequence
  chemically synthesized
tttttcctttctatcatttgac

SEQ ID NO: 49049 - DNA, 22 bp, Artificial Sequence
  chemically synthesized
ttttcctttctatcatttgacc

SEQ ID NO: 49050 - DNA, 22 bp, Artificial Sequence
  chemically synthesized
tttcctttctatcatttgacca

SEQ ID NO: 49051 - DNA, 22 bp, Artificial Sequence
  chemically synthesized
ttcctttctatcatttgaccag

SEQ ID NO: 49052 - DNA, 22 bp, Artificial Sequence
  chemically synthesized
tcctttctatcatttgaccagc

SEQ ID NO: 49053 - DNA, 22 bp, Artificial Sequence
  chemically synthesized
cctttctatcatttgaccagct

SEQ ID NO: 49054 - DNA, 22 bp, Artificial Sequence
  chemically synthesized
ctttctatcatttgaccagcta

SEQ ID NO: 49055 - DNA, 22 bp, Artificial Sequence
  chemically synthesized
tctatcatttgaccagctaatt

SEQ ID NO: 49056 - DNA, 22 bp, Artificial Sequence
  chemically synthesized
ctatcatttgaccagctaattt

SEQ ID NO: 49057 - DNA, 22 bp, Artificial Sequence
  chemically synthesized
tatcatttgaccagctaatttt

SEQ ID NO: 49058 - DNA, 22 bp, Artificial Sequence
  chemically synthesized
tcatttgaccagctaattttaa

SEQ ID NO: 49059 - DNA, 22 bp, Artificial Sequence
  chemically synthesized
gaccagctaattttaaaagacc

SEQ ID NO: 49060 - DNA, 22 bp, Artificial Sequence
  chemically synthesized
accagctaattttaaaagacct

SEQ ID NO: 49061 - DNA, 22 bp, Artificial Sequence
  chemically synthesized
attttaaaagacctgtcttcaa

SEQ ID NO: 49062 - DNA, 22 bp, Artificial Sequence
  chemically synthesized
taaaagacctgtcttcaagttc

SEQ ID NO: 49063 - DNA, 22 bp, Artificial Sequence
  chemically synthesized
aaaagacctgtcttcaagttct

SEQ ID NO: 49064 - DNA, 22 bp, Artificial Sequence
  chemically synthesized
aaagacctgtcttcaagttctg

SEQ ID NO: 49065 - DNA, 22 bp, Artificial Sequence
  chemically synthesized
tcttcaagttctgaaatttttc

SEQ ID NO: 49066 - DNA, 22 bp, Artificial Sequence
  chemically synthesized
caagttctgaaatttttcttct

SEQ ID NO: 49067 - DNA, 22 bp, Artificial Sequence
  chemically synthesized
aagttctgaaatttttcttctg

SEQ ID NO: 49068 - DNA, 22 bp, Artificial Sequence
  chemically synthesized
tgaaatttttcttctgcttgat

SEQ ID NO: 49069 - DNA, 22 bp, Artificial Sequence
  chemically synthesized
aaatttttcttctgcttgatct

SEQ ID NO: 49070 - DNA, 22 bp, Artificial Sequence
  chemically synthesized
ttcttctgcttgatctgatcta

SEQ ID NO: 49071 - DNA, 22 bp, Artificial Sequence
  chemically synthesized
tcttctgcttgatctgatctat

SEQ ID NO: 49072 - DNA, 22 bp, Artificial Sequence
  chemically synthesized
cttctgcttgatctgatctatt

SEQ ID NO: 49073 - DNA, 22 bp, Artificial Sequence
  chemically synthesized
ttctgcttgatctgatctattg

SEQ ID NO: 49074 - DNA, 22 bp, Artificial Sequence
  chemically synthesized
ctgcttgatctgatctattgtt

SEQ ID NO: 49075 - DNA, 22 bp, Artificial Sequence
  chemically synthesized
tgcttgatctgatctattgttg

SEQ ID NO: 49076 - DNA, 22 bp, Artificial Sequence
  chemically synthesized
cttgatctgatctattgttgaa

SEQ ID NO: 49077 - DNA, 22 bp, Artificial Sequence
  chemically synthesized
gatctgatctattgttgaagtt

SEQ ID NO: 49078 - DNA, 22 bp, Artificial Sequence
  chemically synthesized
atctgatctattgttgaagttt

SEQ ID NO: 49079 - DNA, 22 bp, Artificial Sequence
  chemically synthesized
atctattgttgaagtttttgaa

SEQ ID NO: 49080 - DNA, 22 bp, Artificial Sequence
  chemically synthesized
ttgttgaagtttttgaatgtat

SEQ ID NO: 49081 - DNA, 22 bp, Artificial Sequence
  chemically synthesized
ttgaagtttttgaatgtatttt

SEQ ID NO: 49082 - DNA, 22 bp, Artificial Sequence
  chemically synthesized
aagtttttgaatgtattttgta

SEQ ID NO: 49083 - DNA, 22 bp, Artificial Sequence
  chemically synthesized
ttgaatgtattttgtatttctt

SEQ ID NO: 49084 - DNA, 22 bp, Artificial Sequence
  chemically synthesized
tgaatgtattttgtatttcttt

SEQ ID NO: 49085 - DNA, 22 bp, Artificial Sequence
  chemically synthesized
gaatgtattttgtatttctttc

SEQ ID NO: 49086 - DNA, 22 bp, Artificial Sequence
  chemically synthesized
aatgtattttgtatttctttca

SEQ ID NO: 49087 - DNA, 22 bp, Artificial Sequence
  chemically synthesized
tgtatttctttcaataaactct

SEQ ID NO: 49088 - DNA, 22 bp, Artificial Sequence
  chemically synthesized
gtatttctttcaataaactctt

SEQ ID NO: 49089 - DNA, 22 bp, Artificial Sequence
  chemically synthesized
tatttctttcaataaactcttc

SEQ ID NO: 49090 - DNA, 22 bp, Artificial Sequence
  chemically synthesized
ctttcaataaactcttcagtta

SEQ ID NO: 49091 - DNA, 22 bp, Artificial Sequence
  chemically synthesized
tttcaataaactcttcagttac

SEQ ID NO: 49092 - DNA, 22 bp, Artificial Sequence
  chemically synthesized
tcaataaactcttcagttacag

SEQ ID NO: 49093 - DNA, 22 bp, Artificial Sequence
  chemically synthesized
caataaactcttcagttacaga

SEQ ID NO: 49094 - DNA, 22 bp, Artificial Sequence
  chemically synthesized
aataaactcttcagttacagaa

SEQ ID NO: 49095 - DNA, 22 bp, Artificial Sequence
  chemically synthesized
ttcagttacagaatttctgttt

SEQ ID NO: 49096 - DNA, 22 bp, Artificial Sequence
  chemically synthesized
cagttacagaatttctgtttgg

SEQ ID NO: 49097 - DNA, 22 bp, Artificial Sequence
  chemically synthesized
agttacagaatttctgtttggt

SEQ ID NO: 49098 - DNA, 22 bp, Artificial Sequence
  chemically synthesized
cagaatttctgtttggttcatt

SEQ ID NO: 49099 - DNA, 22 bp, Artificial Sequence
  chemically synthesized
ctgtttggttcattcttgttgt

SEQ ID NO: 49100 - DNA, 22 bp, Artificial Sequence
  chemically synthesized
tgtttggttcattcttgttgta

SEQ ID NO: 49101 - DNA, 22 bp, Artificial Sequence
  chemically synthesized
tttggttcattcttgttgtatc

SEQ ID NO: 49102 - DNA, 22 bp, Artificial Sequence
  chemically synthesized
ggttcattcttgttgtatctat

SEQ ID NO: 49103 - DNA, 22 bp, Artificial Sequence
  chemically synthesized
gttcattcttgttgtatctatc

SEQ ID NO: 49104 - DNA, 22 bp, Artificial Sequence
  chemically synthesized
attcttgttgtatctatctctt

SEQ ID NO: 49105 - DNA, 22 bp, Artificial Sequence
  chemically synthesized
ttgttgtatctatctcttgggt

SEQ ID NO: 49106 - DNA, 22 bp, Artificial Sequence
  chemically synthesized
gttgtatctatctcttgggtaa

SEQ ID NO: 49107 - DNA, 22 bp, Artificial Sequence
  chemically synthesized
ttgtatctatctcttgggtaaa

SEQ ID NO: 49108 - DNA, 22 bp, Artificial Sequence
  chemically synthesized
tatctatctcttgggtaaattt

SEQ ID NO: 49109 - DNA, 22 bp, Artificial Sequence
  chemically synthesized
tctcttgggtaaatttctcatt

SEQ ID NO: 49110 - DNA, 22 bp, Artificial Sequence
  chemically synthesized
ttgggtaaatttctcattcata

SEQ ID NO: 49111 - DNA, 22 bp, Artificial Sequence
  chemically synthesized
gggtaaatttctcattcatatc

SEQ ID NO: 49112 - DNA, 22 bp, Artificial Sequence
  chemically synthesized
ggtaaatttctcattcatatcc

SEQ ID NO: 49113 - DNA, 22 bp, Artificial Sequence
  chemically synthesized
ctcattcatatcctgaattgtt

SEQ ID NO: 49114 - DNA, 22 bp, Artificial Sequence
  chemically synthesized
tcattcatatcctgaattgttt

SEQ ID NO: 49115 - DNA, 22 bp, Artificial Sequence
  chemically synthesized
attcatatcctgaattgttttt

SEQ ID NO: 49116 - DNA, 22 bp, Artificial Sequence
  chemically synthesized
atatcctgaattgtttttctga

SEQ ID NO: 49117 - DNA, 22 bp, Artificial Sequence
  chemically synthesized
aattgtttttctgatttctttt

SEQ ID NO: 49118 - DNA, 22 bp, Artificial Sequence
  chemically synthesized
tttttctgatttctttttattg

SEQ ID NO: 49119 - DNA, 22 bp, Artificial Sequence
  chemically synthesized
ttctgatttctttttattgttt

SEQ ID NO: 49120 - DNA, 22 bp, Artificial Sequence
  chemically synthesized
tctgatttctttttattgttta

SEQ ID NO: 49121 - DNA, 22 bp, Artificial Sequence
  chemically synthesized
ctgatttctttttattgtttat

SEQ ID NO: 49122 - DNA, 22 bp, Artificial Sequence
  chemically synthesized
tgatttctttttattgtttatc

SEQ ID NO: 49123 - DNA, 22 bp, Artificial Sequence
  chemically synthesized
atttctttttattgtttatctg

SEQ ID NO: 49124 - DNA, 22 bp, Artificial Sequence
  chemically synthesized
ctttttattgtttatctgagtt

SEQ ID NO: 49125 - DNA, 22 bp, Artificial Sequence
  chemically synthesized
tttttattgtttatctgagttc

SEQ ID NO: 49126 - DNA, 22 bp, Artificial Sequence
  chemically synthesized
tttattgtttatctgagttctc

SEQ ID NO: 49127 - DNA, 22 bp, Artificial Sequence
  chemically synthesized
ttattgtttatctgagttctct

SEQ ID NO: 49128 - DNA, 22 bp, Artificial Sequence
  chemically synthesized
tattgtttatctgagttctctt

SEQ ID NO: 49129 - DNA, 22 bp, Artificial Sequence
  chemically synthesized
attgtttatctgagttctcttg

SEQ ID NO: 49130 - DNA, 22 bp, Artificial Sequence
  chemically synthesized
ttgtttatctgagttctcttgt

SEQ ID NO: 49131 - DNA, 22 bp, Artificial Sequence
  chemically synthesized
tttatctgagttctcttgtgtc

SEQ ID NO: 49132 - DNA, 22 bp, Artificial Sequence
  chemically synthesized
atctgagttctcttgtgtctca

SEQ ID NO: 49133 - DNA, 22 bp, Artificial Sequence
  chemically synthesized
tctgagttctcttgtgtctcac

SEQ ID NO: 49134 - DNA, 22 bp, Artificial Sequence
  chemically synthesized
agttctcttgtgtctcactgag

SEQ ID NO: 49135 - DNA, 22 bp, Artificial Sequence
  chemically synthesized
tcttgtgtctcactgagcttcc

SEQ ID NO: 49136 - DNA, 22 bp, Artificial Sequence
  chemically synthesized
ttgtgtctcactgagcttcctt

SEQ ID NO: 49137 - DNA, 22 bp, Artificial Sequence
  chemically synthesized
gtgtctcactgagcttccttaa

SEQ ID NO: 49138 - DNA, 22 bp, Artificial Sequence
  chemically synthesized
tgtctcactgagcttccttaat

SEQ ID NO: 49139 - DNA, 22 bp, Artificial Sequence
  chemically synthesized
actgagcttccttaatatcaac

SEQ ID NO: 49140 - DNA, 22 bp, Artificial Sequence
  chemically synthesized
agcttccttaatatcaacattt

SEQ ID NO: 49141 - DNA, 22 bp, Artificial Sequence
  chemically synthesized
ccttaatatcaacattttggat

SEQ ID NO: 49142 - DNA, 22 bp, Artificial Sequence
  chemically synthesized
cttaatatcaacattttggatt

SEQ ID NO: 49143 - DNA, 22 bp, Artificial Sequence
  chemically synthesized
aatatcaacattttggattctt

SEQ ID NO: 49144 - DNA, 22 bp, Artificial Sequence
  chemically synthesized
atatcaacattttggattcttt

SEQ ID NO: 49145 - DNA, 22 bp, Artificial Sequence
  chemically synthesized
tggattcttttttccagaattt

SEQ ID NO: 49146 - DNA, 22 bp, Artificial Sequence
  chemically synthesized
ggattcttttttccagaatttt

SEQ ID NO: 49147 - DNA, 22 bp, Artificial Sequence
  chemically synthesized
gattcttttttccagaatttta

SEQ ID NO: 49148 - DNA, 22 bp, Artificial Sequence
  chemically synthesized
ttttttccagaattttataaat

SEQ ID NO: 49149 - DNA, 22 bp, Artificial Sequence
  chemically synthesized
ttttccagaattttataaatgt

SEQ ID NO: 49150 - DNA, 22 bp, Artificial Sequence
  chemically synthesized
tttccagaattttataaatgtc

SEQ ID NO: 49151 - DNA, 22 bp, Artificial Sequence
  chemically synthesized
ttccagaattttataaatgtct

SEQ ID NO: 49152 - DNA, 22 bp, Artificial Sequence
  chemically synthesized
tccagaattttataaatgtctt

SEQ ID NO: 49153 - DNA, 22 bp, Artificial Sequence
  chemically synthesized
ccagaattttataaatgtcttt

SEQ ID NO: 49154 - DNA, 22 bp, Artificial Sequence
  chemically synthesized
cagaattttataaatgtctttt

SEQ ID NO: 49155 - DNA, 22 bp, Artificial Sequence
  chemically synthesized
tataaatgtcttttttttccac

SEQ ID NO: 49156 - DNA, 22 bp, Artificial Sequence
  chemically synthesized
ataaatgtcttttttttccact

SEQ ID NO: 49157 - DNA, 22 bp, Artificial Sequence
  chemically synthesized
taaatgtcttttttttccactg

SEQ ID NO: 49158 - DNA, 22 bp, Artificial Sequence
  chemically synthesized
ttttttccactggcttatgttg

SEQ ID NO: 49159 - DNA, 22 bp, Artificial Sequence
  chemically synthesized
tttttccactggcttatgttgc

SEQ ID NO: 49160 - DNA, 22 bp, Artificial Sequence
  chemically synthesized
ttttccactggcttatgttgct

SEQ ID NO: 49161 - DNA, 22 bp, Artificial Sequence
  chemically synthesized
tttccactggcttatgttgctg

SEQ ID NO: 49162 - DNA, 22 bp, Artificial Sequence
  chemically synthesized
ttccactggcttatgttgctga

SEQ ID NO: 49163 - DNA, 22 bp, Artificial Sequence
  chemically synthesized
tccactggcttatgttgctgaa

SEQ ID NO: 49164 - DNA, 22 bp, Artificial Sequence
  chemically synthesized
ccactggcttatgttgctgaag

SEQ ID NO: 49165 - DNA, 22 bp, Artificial Sequence
  chemically synthesized
cactggcttatgttgctgaaga

SEQ ID NO: 49166 - DNA, 22 bp, Artificial Sequence
  chemically synthesized
gcttatgttgctgaagaattat

SEQ ID NO: 49167 - DNA, 22 bp, Artificial Sequence
  chemically synthesized
atgttgctgaagaattattaaa

SEQ ID NO: 49168 - DNA, 22 bp, Artificial Sequence
  chemically synthesized
tgttgctgaagaattattaaat

SEQ ID NO: 49169 - DNA, 22 bp, Artificial Sequence
  chemically synthesized
ctgaagaattattaaattcctt

SEQ ID NO: 49170 - DNA, 22 bp, Artificial Sequence
  chemically synthesized
aagaattattaaattcctttgg

SEQ ID NO: 49171 - DNA, 22 bp, Artificial Sequence
  chemically synthesized
ttaaattcctttggaagtgtca

SEQ ID NO: 49172 - DNA, 22 bp, Artificial Sequence
  chemically synthesized
aattcctttggaagtgtcatat

SEQ ID NO: 49173 - DNA, 22 bp, Artificial Sequence
  chemically synthesized
ctttggaagtgtcatatttctt

SEQ ID NO: 49174 - DNA, 22 bp, Artificial Sequence
  chemically synthesized
tggaagtgtcatatttcttcac

SEQ ID NO: 49175 - DNA, 22 bp, Artificial Sequence
  chemically synthesized
ggaagtgtcatatttcttcacc

SEQ ID NO: 49176 - DNA, 22 bp, Artificial Sequence
  chemically synthesized
gaagtgtcatatttcttcacct

SEQ ID NO: 49177 - DNA, 22 bp, Artificial Sequence
  chemically synthesized
cttcacctttttatgtttattt

SEQ ID NO: 49178 - DNA, 22 bp, Artificial Sequence
  chemically synthesized
ttcacctttttatgtttatttt

SEQ ID NO: 49179 - DNA, 22 bp, Artificial Sequence
  chemically synthesized
cacctttttatgtttattttgt

SEQ ID NO: 49180 - DNA, 22 bp, Artificial Sequence
  chemically synthesized
acctttttatgtttattttgtt

SEQ ID NO: 49181 - DNA, 22 bp, Artificial Sequence
  chemically synthesized
tttatgtttattttgttcttgc

SEQ ID NO: 49182 - DNA, 22 bp, Artificial Sequence
  chemically synthesized
ttatgtttattttgttcttgca

SEQ ID NO: 49183 - DNA, 22 bp, Artificial Sequence
  chemically synthesized
tatgtttattttgttcttgcat

SEQ ID NO: 49184 - DNA, 22 bp, Artificial Sequence
  chemically synthesized
atgtttattttgttcttgcatt

SEQ ID NO: 49185 - DNA, 22 bp, Artificial Sequence
  chemically synthesized
tgtttattttgttcttgcattg

SEQ ID NO: 49186 - DNA, 22 bp, Artificial Sequence
  chemically synthesized
attttgttcttgcattgatatc

SEQ ID NO: 49187 - DNA, 22 bp, Artificial Sequence
  chemically synthesized
ttttgttcttgcattgatatct

SEQ ID NO: 49188 - DNA, 22 bp, Artificial Sequence
  chemically synthesized
tgttcttgcattgatatctctg

SEQ ID NO: 49189 - DNA, 22 bp, Artificial Sequence
  chemically synthesized
gttcttgcattgatatctctgc

SEQ ID NO: 49190 - DNA, 22 bp, Artificial Sequence
  chemically synthesized
ttcttgcattgatatctctgca

SEQ ID NO: 49191 - DNA, 22 bp, Artificial Sequence
  chemically synthesized
ttgcattgatatctctgcatct

SEQ ID NO: 49192 - DNA, 22 bp, Artificial Sequence
  chemically synthesized
gcattgatatctctgcatctgg

SEQ ID NO: 49193 - DNA, 22 bp, Artificial Sequence
  chemically synthesized
cattgatatctctgcatctggt

SEQ ID NO: 49194 - DNA, 22 bp, Artificial Sequence
  chemically synthesized
atatctctgcatctggtgtaat

SEQ ID NO: 49195 - DNA, 22 bp, Artificial Sequence
  chemically synthesized
tgcatctggtgtaatgattgct

SEQ ID NO: 49196 - DNA, 22 bp, Artificial Sequence
  chemically synthesized
catctggtgtaatgattgctgc

SEQ ID NO: 49197 - DNA, 22 bp, Artificial Sequence
  chemically synthesized
gtgtaatgattgctgcttccag

SEQ ID NO: 49198 - DNA, 22 bp, Artificial Sequence
  chemically synthesized
ctgcttccagttttgtaaattt

SEQ ID NO: 49199 - DNA, 22 bp, Artificial Sequence
  chemically synthesized
cttccagttttgtaaatttgtt

SEQ ID NO: 49200 - DNA, 22 bp, Artificial Sequence
  chemically synthesized
ccagttttgtaaatttgttttt

SEQ ID NO: 49201 - DNA, 22 bp, Artificial Sequence
  chemically synthesized
cagttttgtaaatttgtttttg

SEQ ID NO: 49202 - DNA, 22 bp, Artificial Sequence
  chemically synthesized
tgtaaatttgtttttgtagggg

SEQ ID NO: 49203 - DNA, 22 bp, Artificial Sequence
  chemically synthesized
gtaaatttgtttttgtagggga

SEQ ID NO: 49204 - DNA, 22 bp, Artificial Sequence
  chemically synthesized
taaatttgtttttgtaggggaa

SEQ ID NO: 49205 - DNA, 22 bp, Artificial Sequence
  chemically synthesized
gtttttgtaggggaagactttt

SEQ ID NO: 49206 - DNA, 22 bp, Artificial Sequence
  chemically synthesized
tttttgtaggggaagacttttt

SEQ ID NO: 49207 - DNA, 22 bp, Artificial Sequence
  chemically synthesized
ttgtaggggaagacttttttct

SEQ ID NO: 49208 - DNA, 22 bp, Artificial Sequence
  chemically synthesized
tgtaggggaagacttttttctg

SEQ ID NO: 49209 - DNA, 22 bp, Artificial Sequence
  chemically synthesized
gtaggggaagacttttttctga

SEQ ID NO: 49210 - DNA, 22 bp, Artificial Sequence
  chemically synthesized
taggggaagacttttttctgaa

SEQ ID NO: 49211 - DNA, 22 bp, Artificial Sequence
  chemically synthesized
ttttctgaagatgtatcttggt

SEQ ID NO: 49212 - DNA, 22 bp, Artificial Sequence
  chemically synthesized
tttctgaagatgtatcttggtg

SEQ ID NO: 49213 - DNA, 22 bp, Artificial Sequence
  chemically synthesized
ttctgaagatgtatcttggtgt

SEQ ID NO: 49214 - DNA, 22 bp, Artificial Sequence
  chemically synthesized
tctgaagatgtatcttggtgtt

SEQ ID NO: 49215 - DNA, 22 bp, Artificial Sequence
  chemically synthesized
ctgaagatgtatcttggtgttg

SEQ ID NO: 49216 - DNA, 22 bp, Artificial Sequence
  chemically synthesized
tgaagatgtatcttggtgttga

SEQ ID NO: 49217 - DNA, 22 bp, Artificial Sequence
  chemically synthesized
aagatgtatcttggtgttgatt

SEQ ID NO: 49218 - DNA, 22 bp, Artificial Sequence
  chemically synthesized
ggtgttgattgagtagggcact

SEQ ID NO: 49219 - DNA, 22 bp, Artificial Sequence
  chemically synthesized
gtgttgattgagtagggcactt

SEQ ID NO: 49220 - DNA, 22 bp, Artificial Sequence
  chemically synthesized
attgagtagggcactttgattt

SEQ ID NO: 49221 - DNA, 22 bp, Artificial Sequence
  chemically synthesized
agtagggcactttgattttgat

SEQ ID NO: 49222 - DNA, 22 bp, Artificial Sequence
  chemically synthesized
tgattttgatttctaggtgcat

SEQ ID NO: 49223 - DNA, 22 bp, Artificial Sequence
  chemically synthesized
gattttgatttctaggtgcata

SEQ ID NO: 49224 - DNA, 22 bp, Artificial Sequence
  chemically synthesized
attttgatttctaggtgcatac

SEQ ID NO: 49225 - DNA, 22 bp, Artificial Sequence
  chemically synthesized
tgatttctaggtgcatacagca

SEQ ID NO: 49226 - DNA, 22 bp, Artificial Sequence
  chemically synthesized
gatttctaggtgcatacagcag

SEQ ID NO: 49227 - DNA, 22 bp, Artificial Sequence
  chemically synthesized
atttctaggtgcatacagcagc

SEQ ID NO: 49228 - DNA, 22 bp, Artificial Sequence
  chemically synthesized
ctaggtgcatacagcagcatag

SEQ ID NO: 49229 - DNA, 22 bp, Artificial Sequence
  chemically synthesized
taggtgcatacagcagcatagt

SEQ ID NO: 49230 - DNA, 22 bp, Artificial Sequence
  chemically synthesized
ggtgcatacagcagcatagtct

SEQ ID NO: 49231 - DNA, 22 bp, Artificial Sequence
  chemically synthesized
catattattttttttcagctgc

SEQ ID NO: 49232 - DNA, 22 bp, Artificial Sequence
  chemically synthesized
atattattttttttcagctgcc

SEQ ID NO: 49233 - DNA, 22 bp, Artificial Sequence
  chemically synthesized
ttttttttcagctgccaacagt

SEQ ID NO: 49234 - DNA, 22 bp, Artificial Sequence
  chemically synthesized
tttttcagctgccaacagtatc

SEQ ID NO: 49235 - DNA, 22 bp, Artificial Sequence
  chemically synthesized
ttttcagctgccaacagtatca

SEQ ID NO: 49236 - DNA, 22 bp, Artificial Sequence
  chemically synthesized
tttcagctgccaacagtatcat

SEQ ID NO: 49237 - DNA, 22 bp, Artificial Sequence
  chemically synthesized
ttcagctgccaacagtatcatc

SEQ ID NO: 49238 - DNA, 22 bp, Artificial Sequence
  chemically synthesized
tcagctgccaacagtatcatca

SEQ ID NO: 49239 - DNA, 22 bp, Artificial Sequence
  chemically synthesized
cagctgccaacagtatcatcag

SEQ ID NO: 49240 - DNA, 22 bp, Artificial Sequence
  chemically synthesized
agctgccaacagtatcatcagt

SEQ ID NO: 49241 - DNA, 22 bp, Artificial Sequence
  chemically synthesized
ccaacagtatcatcagtgtctg

SEQ ID NO: 49242 - DNA, 22 bp, Artificial Sequence
  chemically synthesized
tgattttttcagtggcttaggg

SEQ ID NO: 49243 - DNA, 22 bp, Artificial Sequence
  chemically synthesized
tttcagtggcttagggtgcatt

SEQ ID NO: 49244 - DNA, 22 bp, Artificial Sequence
  chemically synthesized
ttcagtggcttagggtgcattt

SEQ ID NO: 49245 - DNA, 22 bp, Artificial Sequence
  chemically synthesized
tcagtggcttagggtgcatttg

SEQ ID NO: 49246 - DNA, 22 bp, Artificial Sequence
  chemically synthesized
cagtggcttagggtgcatttgt

SEQ ID NO: 49247 - DNA, 22 bp, Artificial Sequence
  chemically synthesized
agtggcttagggtgcatttgtt

SEQ ID NO: 49248 - DNA, 22 bp, Artificial Sequence
  chemically synthesized
agggtgcatttgttagtgaagg

SEQ ID NO: 49249 - DNA, 22 bp, Artificial Sequence
  chemically synthesized
gggtgcatttgttagtgaaggt

SEQ ID NO: 49250 - DNA, 22 bp, Artificial Sequence
  chemically synthesized
gttagtgaaggtggtgatgagg

SEQ ID NO: 49251 - DNA, 22 bp, Artificial Sequence
  chemically synthesized
ttagtgaaggtggtgatgaggt

SEQ ID NO: 49252 - DNA, 22 bp, Artificial Sequence
  chemically synthesized
gtgaaggtggtgatgaggttgt

SEQ ID NO: 49253 - DNA, 22 bp, Artificial Sequence
  chemically synthesized
tgctggagacaagaatatcaag

SEQ ID NO: 49254 - DNA, 22 bp, Artificial Sequence
  chemically synthesized
gagacaagaatatcaagtgggc

SEQ ID NO: 49255 - DNA, 22 bp, Artificial Sequence
  chemically synthesized
ggccccagtggtggtggtgggc

SEQ ID NO: 49256 - DNA, 22 bp, Artificial Sequence
  chemically synthesized
gccccagtggtggtggtgggcc

SEQ ID NO: 49257 - DNA, 22 bp, Artificial Sequence
  chemically synthesized
gcattcctgtccttgggcccca

SEQ ID NO: 49258 - DNA, 22 bp, Artificial Sequence
  chemically synthesized
ctgtccttgggccccatggctg

SEQ ID NO: 49259 - DNA, 22 bp, Artificial Sequence
  chemically synthesized
tccttgggccccatggctgtgt

SEQ ID NO: 49260 - DNA, 22 bp, Artificial Sequence
  chemically synthesized
gggccccatggctgtgtacatt

SEQ ID NO: 49261 - DNA, 22 bp, Artificial Sequence
  chemically synthesized
ggccccatggctgtgtacattg

SEQ ID NO: 49262 - DNA, 22 bp, Artificial Sequence
  chemically synthesized
tgtacattggcactgatggtaa

SEQ ID NO: 49263 - DNA, 22 bp, Artificial Sequence
  chemically synthesized
gcactgatggtaatgagtctag

SEQ ID NO: 49264 - DNA, 22 bp, Artificial Sequence
  chemically synthesized
atggtaatgagtctagttgggt

SEQ ID NO: 49265 - DNA, 22 bp, Artificial Sequence
  chemically synthesized
gttgggttgattctttggcctt

SEQ ID NO: 49266 - DNA, 22 bp, Artificial Sequence
  chemically synthesized
ggttgattctttggccttcagg

SEQ ID NO: 49267 - DNA, 22 bp, Artificial Sequence
  chemically synthesized
attctttggccttcaggcagtt

SEQ ID NO: 49268 - DNA, 22 bp, Artificial Sequence
  chemically synthesized
tttggccttcaggcagtttgct

SEQ ID NO: 49269 - DNA, 22 bp, Artificial Sequence
  chemically synthesized
tggccttcaggcagtttgcttg

SEQ ID NO: 49270 - DNA, 22 bp, Artificial Sequence
  chemically synthesized
ggccttcaggcagtttgcttgg

SEQ ID NO: 49271 - DNA, 22 bp, Artificial Sequence
  chemically synthesized
gccttcaggcagtttgcttggg

SEQ ID NO: 49272 - DNA, 22 bp, Artificial Sequence
  chemically synthesized
caggcagtttgcttgggtgtca

SEQ ID NO: 49273 - DNA, 22 bp, Artificial Sequence
  chemically synthesized
aggcagtttgcttgggtgtcag

SEQ ID NO: 49274 - DNA, 22 bp, Artificial Sequence
  chemically synthesized
gcttgggtgtcagtagtggcca

SEQ ID NO: 49275 - DNA, 22 bp, Artificial Sequence
  chemically synthesized
cttgggtgtcagtagtggccat

SEQ ID NO: 49276 - DNA, 22 bp, Artificial Sequence
  chemically synthesized
gggtgtcagtagtggccatagt

SEQ ID NO: 49277 - DNA, 22 bp, Artificial Sequence
  chemically synthesized
ggtgtcagtagtggccatagta

SEQ ID NO: 49278 - DNA, 22 bp, Artificial Sequence
  chemically synthesized
ggctggtgtgtgggtcctcagg

SEQ ID NO: 49279 - DNA, 22 bp, Artificial Sequence
  chemically synthesized
gtgtgtgggtcctcaggcttct

SEQ ID NO: 49280 - DNA, 22 bp, Artificial Sequence
  chemically synthesized
aggcttctggacagtgggtgtg

SEQ ID NO: 49281 - DNA, 22 bp, Artificial Sequence
  chemically synthesized
ctggacagtgggtgtggtgtgg

SEQ ID NO: 49282 - DNA, 22 bp, Artificial Sequence
  chemically synthesized
tggacagtgggtgtggtgtggg

SEQ ID NO: 49283 - DNA, 22 bp, Artificial Sequence
  chemically synthesized
gacagtgggtgtggtgtgggtg

SEQ ID NO: 49284 - DNA, 22 bp, Artificial Sequence
  chemically synthesized
tagcaactgcaggacaaccctc

SEQ ID NO: 49285 - DNA, 22 bp, Artificial Sequence
  chemically synthesized
caggacaaccctctggctccca

SEQ ID NO: 49286 - DNA, 22 bp, Artificial Sequence
  chemically synthesized
tggctcccaagcagtctgcact

SEQ ID NO: 49287 - DNA, 22 bp, Artificial Sequence
  chemically synthesized
gctcccaagcagtctgcactgg

SEQ ID NO: 49288 - DNA, 22 bp, Artificial Sequence
  chemically synthesized
ccaagcagtctgcactggtgtt

SEQ ID NO: 49289 - DNA, 22 bp, Artificial Sequence
  chemically synthesized
cactggtgttggtggtggctgc

SEQ ID NO: 49290 - DNA, 22 bp, Artificial Sequence
  chemically synthesized
gtgttggtggtggctgcaaggg

SEQ ID NO: 49291 - DNA, 22 bp, Artificial Sequence
  chemically synthesized
gtggtggctgcaagggctgaat

SEQ ID NO: 49292 - DNA, 22 bp, Artificial Sequence
  chemically synthesized
caagggctgaatgagccagtct

SEQ ID NO: 49293 - DNA, 22 bp, Artificial Sequence
  chemically synthesized
aatgagccagtcttcagaccca

SEQ ID NO: 49294 - DNA, 22 bp, Artificial Sequence
  chemically synthesized
cagacccacaggtggcacatgc

SEQ ID NO: 49295 - DNA, 22 bp, Artificial Sequence
  chemically synthesized
agacccacaggtggcacatgca

SEQ ID NO: 49296 - DNA, 22 bp, Artificial Sequence
  chemically synthesized
tgatggcagtggcagattgggt

SEQ ID NO: 49297 - DNA, 22 bp, Artificial Sequence
  chemically synthesized
ggtaggcccatcatcaggcttc

SEQ ID NO: 49298 - DNA, 22 bp, Artificial Sequence
  chemically synthesized
ctgggagggttgcttaggtacc

SEQ ID NO: 49299 - DNA, 22 bp, Artificial Sequence
  chemically synthesized
tgggagggttgcttaggtacca

SEQ ID NO: 49300 - DNA, 22 bp, Artificial Sequence
  chemically synthesized
ggagggttgcttaggtaccagt

SEQ ID NO: 49301 - DNA, 22 bp, Artificial Sequence
  chemically synthesized
cttaggtaccagtcatggtgga

SEQ ID NO: 49302 - DNA, 22 bp, Artificial Sequence
  chemically synthesized
aggtaccagtcatggtggatgg

SEQ ID NO: 49303 - DNA, 22 bp, Artificial Sequence
  chemically synthesized
ggtaccagtcatggtggatggc

SEQ ID NO: 49304 - DNA, 22 bp, Artificial Sequence
  chemically synthesized
tctctgggttcccagacaactt

SEQ ID NO: 49305 - DNA, 22 bp, Artificial Sequence
  chemically synthesized
tgggttcccagacaacttgctt

SEQ ID NO: 49306 - DNA, 22 bp, Artificial Sequence
  chemically synthesized
ggttcccagacaacttgcttag

SEQ ID NO: 49307 - DNA, 22 bp, Artificial Sequence
  chemically synthesized
ccagacaacttgcttaggcatt

SEQ ID NO: 49308 - DNA, 22 bp, Artificial Sequence
  chemically synthesized
gcttaggcattgaggaaggcaa

SEQ ID NO: 49309 - DNA, 22 bp, Artificial Sequence
  chemically synthesized
cttaggcattgaggaaggcaaa

SEQ ID NO: 49310 - DNA, 22 bp, Artificial Sequence
  chemically synthesized
aggcattgaggaaggcaaagcc

SEQ ID NO: 49311 - DNA, 22 bp, Artificial Sequence
  chemically synthesized
ggcattgaggaaggcaaagcca

SEQ ID NO: 49312 - DNA, 22 bp, Artificial Sequence
  chemically synthesized
aggaaggcaaagccaggctggg

SEQ ID NO: 49313 - DNA, 22 bp, Artificial Sequence
  chemically synthesized
ggtgttcctgacctcaggccac

SEQ ID NO: 49314 - DNA, 22 bp, Artificial Sequence
  chemically synthesized
ctgacctcaggccactcagtgg

SEQ ID NO: 49315 - DNA, 22 bp, Artificial Sequence
  chemically synthesized
acctcaggccactcagtggtgt

SEQ ID NO: 49316 - DNA, 22 bp, Artificial Sequence
  chemically synthesized
aggccactcagtggtgtgtgtg

SEQ ID NO: 49317 - DNA, 22 bp, Artificial Sequence
  chemically synthesized
agtggtgtgtgtggacaccggc

SEQ ID NO: 49318 - DNA, 22 bp, Artificial Sequence
  chemically synthesized
tcataggctggagtggagtgat

SEQ ID NO: 49319 - DNA, 22 bp, Artificial Sequence
  chemically synthesized
gagtggagtgatcctcaggccc

SEQ ID NO: 49320 - DNA, 22 bp, Artificial Sequence
  chemically synthesized
aggcccccagcagaatgcctga

SEQ ID NO: 49321 - DNA, 22 bp, Artificial Sequence
  chemically synthesized
agtgaattagcagctactgcat

SEQ ID NO: 49322 - DNA, 22 bp, Artificial Sequence
  chemically synthesized
gcagctactgcattgttgccct

SEQ ID NO: 49323 - DNA, 22 bp, Artificial Sequence
  chemically synthesized
ctgcattgttgccctgctcttg

SEQ ID NO: 49324 - DNA, 22 bp, Artificial Sequence
  chemically synthesized
cattgttgccctgctcttgaag

SEQ ID NO: 49325 - DNA, 22 bp, Artificial Sequence
  chemically synthesized
ttgccctgctcttgaaggggtg

SEQ ID NO: 49326 - DNA, 22 bp, Artificial Sequence
  chemically synthesized
ccctgctcttgaaggggtgcgg

SEQ ID NO: 49327 - DNA, 22 bp, Artificial Sequence
  chemically synthesized
ctcttgaaggggtgcggggtgt

SEQ ID NO: 49328 - DNA, 22 bp, Artificial Sequence
  chemically synthesized
ttgaaggggtgcggggtgtgtt

SEQ ID NO: 49329 - DNA, 22 bp, Artificial Sequence
  chemically synthesized
gaaggggtgcggggtgtgttgc

SEQ ID NO: 49330 - DNA, 22 bp, Artificial Sequence
  chemically synthesized
aaggggtgcggggtgtgttgct

SEQ ID NO: 49331 - DNA, 22 bp, Artificial Sequence
  chemically synthesized
ctttcagtggcagcagctataa

SEQ ID NO: 49332 - DNA, 22 bp, Artificial Sequence
  chemically synthesized
tcagtggcagcagctataaatg

SEQ ID NO: 49333 - DNA, 22 bp, Artificial Sequence
  chemically synthesized
cagtggcagcagctataaatgg

SEQ ID NO: 49334 - DNA, 22 bp, Artificial Sequence
  chemically synthesized
agtggcagcagctataaatggg

SEQ ID NO: 49335 - DNA, 22 bp, Artificial Sequence
  chemically synthesized
taaatgggttgctggtgggcat

SEQ ID NO: 49336 - DNA, 22 bp, Artificial Sequence
  chemically synthesized
ctggtgggcatgtgtttcagcc

SEQ ID NO: 49337 - DNA, 22 bp, Artificial Sequence
  chemically synthesized
gtgggcatgtgtttcagcccca

SEQ ID NO: 49338 - DNA, 22 bp, Artificial Sequence
  chemically synthesized
cagccccagatggtggctgcaa

SEQ ID NO: 49339 - DNA, 22 bp, Artificial Sequence
  chemically synthesized
agccccagatggtggctgcaag

SEQ ID NO: 49340 - DNA, 22 bp, Artificial Sequence
  chemically synthesized
caagtggggtagcattttctta

SEQ ID NO: 49341 - DNA, 22 bp, Artificial Sequence
  chemically synthesized
tcttagggagcttataaatgtg

SEQ ID NO: 49342 - DNA, 22 bp, Artificial Sequence
  chemically synthesized
cttagggagcttataaatgtgt

SEQ ID NO: 49343 - DNA, 22 bp, Artificial Sequence
  chemically synthesized
ttagggagcttataaatgtgta

SEQ ID NO: 49344 - DNA, 22 bp, Artificial Sequence
  chemically synthesized
agggagcttataaatgtgtagc

SEQ ID NO: 49345 - DNA, 22 bp, Artificial Sequence
  chemically synthesized
gggagcttataaatgtgtagca

SEQ ID NO: 49346 - DNA, 22 bp, Artificial Sequence
  chemically synthesized
ataaatgtgtagcagccctgct

SEQ ID NO: 49347 - DNA, 22 bp, Artificial Sequence
  chemically synthesized
taaatgtgtagcagccctgcta

SEQ ID NO: 49348 - DNA, 22 bp, Artificial Sequence
  chemically synthesized
ctactgggggtgggggagtcca

SEQ ID NO: 49349 - DNA, 22 bp, Artificial Sequence
  chemically synthesized
ctgggggtgggggagtccactt

SEQ ID NO: 49350 - DNA, 22 bp, Artificial Sequence
  chemically synthesized
ggggtgggggagtccacttcta

SEQ ID NO: 49351 - DNA, 22 bp, Artificial Sequence
  chemically synthesized
ctaatgacacactttatccctg

SEQ ID NO: 49352 - DNA, 22 bp, Artificial Sequence
  chemically synthesized
taatgacacactttatccctgg

SEQ ID NO: 49353 - DNA, 22 bp, Artificial Sequence
  chemically synthesized
atgacacactttatccctggtg

SEQ ID NO: 49354 - DNA, 22 bp, Artificial Sequence
  chemically synthesized
tatccctggtgacagcagccag

SEQ ID NO: 49355 - DNA, 22 bp, Artificial Sequence
  chemically synthesized
atccctggtgacagcagccagc

SEQ ID NO: 49356 - DNA, 22 bp, Artificial Sequence
  chemically synthesized
tccctggtgacagcagccagca

SEQ ID NO: 49357 - DNA, 22 bp, Artificial Sequence
  chemically synthesized
gtgacagcagccagcagtagca

SEQ ID NO: 49358 - DNA, 22 bp, Artificial Sequence
  chemically synthesized
agctgtgggtgggggatgtcag

SEQ ID NO: 49359 - DNA, 22 bp, Artificial Sequence
  chemically synthesized
tgggtgggggatgtcagcagag

SEQ ID NO: 49360 - DNA, 22 bp, Artificial Sequence
  chemically synthesized
cagggatgtagagatgcagatg

SEQ ID NO: 49361 - DNA, 22 bp, Artificial Sequence
  chemically synthesized
agggatgtagagatgcagatga

SEQ ID NO: 49362 - DNA, 22 bp, Artificial Sequence
  chemically synthesized
gggtctgaggaacgatgtcatc

SEQ ID NO: 49363 - DNA, 22 bp, Artificial Sequence
  chemically synthesized
aggaacgatgtcatctggtggg

SEQ ID NO: 49364 - DNA, 22 bp, Artificial Sequence
  chemically synthesized
gtgggtgttgggctctcaaaat

SEQ ID NO: 49365 - DNA, 22 bp, Artificial Sequence
  chemically synthesized
ggctctcaaaatggcaccttgc

SEQ ID NO: 49366 - DNA, 22 bp, Artificial Sequence
  chemically synthesized
tcaaaatggcaccttgctgctc

SEQ ID NO: 49367 - DNA, 22 bp, Artificial Sequence
  chemically synthesized
aaaatggcaccttgctgctcag

SEQ ID NO: 49368 - DNA, 22 bp, Artificial Sequence
  chemically synthesized
gctgctcagtaatggggatggc

SEQ ID NO: 49369 - DNA, 22 bp, Artificial Sequence
  chemically synthesized
ctgctcagtaatggggatggca

SEQ ID NO: 49370 - DNA, 22 bp, Artificial Sequence
  chemically synthesized
ctcagtaatggggatggcaggg

SEQ ID NO: 49371 - DNA, 22 bp, Artificial Sequence
  chemically synthesized
agtaatggggatggcaggggtg

SEQ ID NO: 49372 - DNA, 22 bp, Artificial Sequence
  chemically synthesized
cttctctggagcaatgcctttg

SEQ ID NO: 49373 - DNA, 22 bp, Artificial Sequence
  chemically synthesized
ctctggagcaatgcctttgtgc

SEQ ID NO: 49374 - DNA, 22 bp, Artificial Sequence
  chemically synthesized
tctggagcaatgcctttgtgcg

SEQ ID NO: 49375 - DNA, 22 bp, Artificial Sequence
  chemically synthesized
tggagcaatgcctttgtgcgat

SEQ ID NO: 49376 - DNA, 22 bp, Artificial Sequence
  chemically synthesized
gagcaatgcctttgtgcgattg

SEQ ID NO: 49377 - DNA, 22 bp, Artificial Sequence
  chemically synthesized
tgtgcgattgctgggcagttcc

SEQ ID NO: 49378 - DNA, 22 bp, Artificial Sequence
  chemically synthesized
gtgcgattgctgggcagttcct

SEQ ID NO: 49379 - DNA, 22 bp, Artificial Sequence
  chemically synthesized
tgcgattgctgggcagttcctt

SEQ ID NO: 49380 - DNA, 22 bp, Artificial Sequence
  chemically synthesized
ctgggcagttccttatgatagt

SEQ ID NO: 49381 - DNA, 22 bp, Artificial Sequence
  chemically synthesized
ggcagttccttatgatagtctc

SEQ ID NO: 49382 - DNA, 22 bp, Artificial Sequence
  chemically synthesized
cttatgatagtctcaaggcctg

SEQ ID NO: 49383 - DNA, 22 bp, Artificial Sequence
  chemically synthesized
atgatagtctcaaggcctgcat

SEQ ID NO: 49384 - DNA, 22 bp, Artificial Sequence
  chemically synthesized
tgatagtctcaaggcctgcatg

SEQ ID NO: 49385 - DNA, 22 bp, Artificial Sequence
  chemically synthesized
aaggcctgcatggtcaagggac

SEQ ID NO: 49386 - DNA, 22 bp, Artificial Sequence
  chemically synthesized
catggtcaagggactctcctgt

SEQ ID NO: 49387 - DNA, 22 bp, Artificial Sequence
  chemically synthesized
tcctgtggctaggattcctgga

SEQ ID NO: 49388 - DNA, 22 bp, Artificial Sequence
  chemically synthesized
ctgtggctaggattcctggagt

SEQ ID NO: 49389 - DNA, 22 bp, Artificial Sequence
  chemically synthesized
tggctaggattcctggagtcca

SEQ ID NO: 49390 - DNA, 22 bp, Artificial Sequence
  chemically synthesized
ggattcctggagtccataatgc

SEQ ID NO: 49391 - DNA, 22 bp, Artificial Sequence
  chemically synthesized
ctggagtccataatgcagatgt

SEQ ID NO: 49392 - DNA, 22 bp, Artificial Sequence
  chemically synthesized
gagtccataatgcagatgtgga

SEQ ID NO: 49393 - DNA, 22 bp, Artificial Sequence
  chemically synthesized
ggagtcagtcacttaactttcg

SEQ ID NO: 49394 - DNA, 22 bp, Artificial Sequence
  chemically synthesized
aactttcgatgcactggggagc

SEQ ID NO: 49395 - DNA, 22 bp, Artificial Sequence
  chemically synthesized
actttcgatgcactggggagcc

SEQ ID NO: 49396 - DNA, 22 bp, Artificial Sequence
  chemically synthesized
tcgatgcactggggagcctctc

SEQ ID NO: 49397 - DNA, 22 bp, Artificial Sequence
  chemically synthesized
cgatgcactggggagcctctct

SEQ ID NO: 49398 - DNA, 22 bp, Artificial Sequence
  chemically synthesized
gatgcactggggagcctctctg

SEQ ID NO: 49399 - DNA, 22 bp, Artificial Sequence
  chemically synthesized
gggagcctctctggcctcacag

SEQ ID NO: 49400 - DNA, 22 bp, Artificial Sequence
  chemically synthesized
tctggcctcacagaggatccct

SEQ ID NO: 49401 - DNA, 22 bp, Artificial Sequence
  chemically synthesized
tggcctcacagaggatccctac

SEQ ID NO: 49402 - DNA, 22 bp, Artificial Sequence
  chemically synthesized
gcctcacagaggatccctactg

SEQ ID NO: 49403 - DNA, 22 bp, Artificial Sequence
  chemically synthesized
acagaggatccctactgggtag

SEQ ID NO: 49404 - DNA, 22 bp, Artificial Sequence
  chemically synthesized
ctgggtaggcttccttgcttcc

SEQ ID NO: 49405 - DNA, 22 bp, Artificial Sequence
  chemically synthesized
ggtaggcttccttgcttccctc

SEQ ID NO: 49406 - DNA, 22 bp, Artificial Sequence
  chemically synthesized
ccttgcttccctccccttcatt

SEQ ID NO: 49407 - DNA, 22 bp, Artificial Sequence
  chemically synthesized
cttgcttccctccccttcattg

SEQ ID NO: 49408 - DNA, 22 bp, Artificial Sequence
  chemically synthesized
gcttccctccccttcattgcct

SEQ ID NO: 49409 - DNA, 22 bp, Artificial Sequence
  chemically synthesized
cttccctccccttcattgcctt

SEQ ID NO: 49410 - DNA, 22 bp, Artificial Sequence
  chemically synthesized
ccctccccttcattgccttaga

SEQ ID NO: 49411 - DNA, 22 bp, Artificial Sequence
  chemically synthesized
cctccccttcattgccttagat

SEQ ID NO: 49412 - DNA, 22 bp, Artificial Sequence
  chemically synthesized
cccttcattgccttagatgctt

SEQ ID NO: 49413 - DNA, 22 bp, Artificial Sequence
  chemically synthesized
cattgccttagatgcttcctgt

SEQ ID NO: 49414 - DNA, 22 bp, Artificial Sequence
  chemically synthesized
attgccttagatgcttcctgtc

SEQ ID NO: 49415 - DNA, 22 bp, Artificial Sequence
  chemically synthesized
ccttagatgcttcctgtcactt

SEQ ID NO: 49416 - DNA, 22 bp, Artificial Sequence
  chemically synthesized
agatgcttcctgtcacttctct

SEQ ID NO: 49417 - DNA, 22 bp, Artificial Sequence
  chemically synthesized
gatgcttcctgtcacttctctg

SEQ ID NO: 49418 - DNA, 22 bp, Artificial Sequence
  chemically synthesized
cctgtcacttctctgttgaatt

SEQ ID NO: 49419 - DNA, 22 bp, Artificial Sequence
  chemically synthesized
ctgtcacttctctgttgaattc

SEQ ID NO: 49420 - DNA, 22 bp, Artificial Sequence
  chemically synthesized
tcacttctctgttgaattccag

SEQ ID NO: 49421 - DNA, 22 bp, Artificial Sequence
  chemically synthesized
ctctgttgaattccagaattct

SEQ ID NO: 49422 - DNA, 22 bp, Artificial Sequence
  chemically synthesized
tctgttgaattccagaattctc

SEQ ID NO: 49423 - DNA, 22 bp, Artificial Sequence
  chemically synthesized
tgttgaattccagaattctctc

SEQ ID NO: 49424 - DNA, 22 bp, Artificial Sequence
  chemically synthesized
ttgaattccagaattctctctt

SEQ ID NO: 49425 - DNA, 22 bp, Artificial Sequence
  chemically synthesized
aattccagaattctctcttatg

SEQ ID NO: 49426 - DNA, 22 bp, Artificial Sequence
  chemically synthesized
cagaattctctcttatgtggga

SEQ ID NO: 49427 - DNA, 22 bp, Artificial Sequence
  chemically synthesized
tctcttatgtgggattttctac

SEQ ID NO: 49428 - DNA, 22 bp, Artificial Sequence
  chemically synthesized
tcttatgtgggattttctactt

SEQ ID NO: 49429 - DNA, 22 bp, Artificial Sequence
  chemically synthesized
ttatgtgggattttctacttac

SEQ ID NO: 49430 - DNA, 22 bp, Artificial Sequence
  chemically synthesized
atgtgggattttctacttacta

SEQ ID NO: 49431 - DNA, 22 bp, Artificial Sequence
  chemically synthesized
tgtgggattttctacttactat

SEQ ID NO: 49432 - DNA, 22 bp, Artificial Sequence
  chemically synthesized
tctacttactattttggttctt

SEQ ID NO: 49433 - DNA, 22 bp, Artificial Sequence
  chemically synthesized
ctacttactattttggttcttt

SEQ ID NO: 49434 - DNA, 22 bp, Artificial Sequence
  chemically synthesized
tacttactattttggttctttg

SEQ ID NO: 49435 - DNA, 22 bp, Artificial Sequence
  chemically synthesized
cttactattttggttctttgtg

SEQ ID NO: 49436 - DNA, 22 bp, Artificial Sequence
  chemically synthesized
actattttggttctttgtggag

SEQ ID NO: 49437 - DNA, 22 bp, Artificial Sequence
  chemically synthesized
ctattttggttctttgtggagg

SEQ ID NO: 49438 - DNA, 22 bp, Artificial Sequence
  chemically synthesized
ttttggttctttgtggaggagg

SEQ ID NO: 49439 - DNA, 22 bp, Artificial Sequence
  chemically synthesized
tggttctttgtggaggaggtga

SEQ ID NO: 49440 - DNA, 22 bp, Artificial Sequence
  chemically synthesized
ggttctttgtggaggaggtgag

SEQ ID NO: 49441 - DNA, 22 bp, Artificial Sequence
  chemically synthesized
gttctttgtggaggaggtgagt

SEQ ID NO: 49442 - DNA, 22 bp, Artificial Sequence
  chemically synthesized
tttgtggaggaggtgagtgtca

SEQ ID NO: 49443 - DNA, 22 bp, Artificial Sequence
  chemically synthesized
tgtggaggaggtgagtgtcagc

SEQ ID NO: 49444 - DNA, 22 bp, Artificial Sequence
  chemically synthesized
gtggaggaggtgagtgtcagct

SEQ ID NO: 49445 - DNA, 22 bp, Artificial Sequence
  chemically synthesized
tggaggaggtgagtgtcagctg

SEQ ID NO: 49446 - DNA, 22 bp, Artificial Sequence
  chemically synthesized
cccttagtcagtaatcttcaag

SEQ ID NO: 49447 - DNA, 22 bp, Artificial Sequence
  chemically synthesized
agtcagtaatcttcaagcccct

SEQ ID NO: 49448 - DNA, 22 bp, Artificial Sequence
  chemically synthesized
gtcagtaatcttcaagcccctt

SEQ ID NO: 49449 - DNA, 22 bp, Artificial Sequence
  chemically synthesized
caagccccttcccttgaaattt

SEQ ID NO: 49450 - DNA, 22 bp, Artificial Sequence
  chemically synthesized
aagccccttcccttgaaatttt

SEQ ID NO: 49451 - DNA, 22 bp, Artificial Sequence
  chemically synthesized
cccttgaaattttttaagcttt

SEQ ID NO: 49452 - DNA, 22 bp, Artificial Sequence
  chemically synthesized
ccttgaaattttttaagcttta

SEQ ID NO: 49453 - DNA, 22 bp, Artificial Sequence
  chemically synthesized
gaaattttttaagctttatgtt

SEQ ID NO: 49454 - DNA, 22 bp, Artificial Sequence
  chemically synthesized
aaattttttaagctttatgttt

SEQ ID NO: 49455 - DNA, 22 bp, Artificial Sequence
  chemically synthesized
tttaagctttatgtttttattt

SEQ ID NO: 49456 - DNA, 22 bp, Artificial Sequence
  chemically synthesized
ttaagctttatgtttttatttc

SEQ ID NO: 49457 - DNA, 22 bp, Artificial Sequence
  chemically synthesized
taagctttatgtttttatttct

SEQ ID NO: 49458 - DNA, 22 bp, Artificial Sequence
  chemically synthesized
aagctttatgtttttatttcta

SEQ ID NO: 49459 - DNA, 22 bp, Artificial Sequence
  chemically synthesized
agctttatgtttttatttctaa

SEQ ID NO: 49460 - DNA, 22 bp, Artificial Sequence
  chemically synthesized
tatgtttttatttctaatagac

SEQ ID NO: 49461 - DNA, 22 bp, Artificial Sequence
  chemically synthesized
atgtttttatttctaatagact

SEQ ID NO: 49462 - DNA, 22 bp, Artificial Sequence
  chemically synthesized
tgtttttatttctaatagactg

SEQ ID NO: 49463 - DNA, 22 bp, Artificial Sequence
  chemically synthesized
ttatttctaatagactgaaaga

SEQ ID NO: 49464 - DNA, 22 bp, Artificial Sequence
  chemically synthesized
tatttctaatagactgaaagag

SEQ ID NO: 49465 - DNA, 22 bp, Artificial Sequence
  chemically synthesized
atttctaatagactgaaagagc

SEQ ID NO: 49466 - DNA, 22 bp, Artificial Sequence
  chemically synthesized
tttctaatagactgaaagagca

SEQ ID NO: 49467 - DNA, 22 bp, Artificial Sequence
  chemically synthesized
ctaatagactgaaagagcataa

SEQ ID NO: 49468 - DNA, 22 bp, Artificial Sequence
  chemically synthesized
taatagactgaaagagcataat

SEQ ID NO: 49469 - DNA, 22 bp, Artificial Sequence
  chemically synthesized
atagactgaaagagcataatca

SEQ ID NO: 49470 - DNA, 22 bp, Artificial Sequence
  chemically synthesized
aaagagcataatcatattttaa

SEQ ID NO: 49471 - DNA, 22 bp, Artificial Sequence
  chemically synthesized
taaacactctaaggctatatgg

SEQ ID NO: 49472 - DNA, 22 bp, Artificial Sequence
  chemically synthesized
aaacactctaaggctatatggg

SEQ ID NO: 49473 - DNA, 22 bp, Artificial Sequence
  chemically synthesized
aacactctaaggctatatgggg

SEQ ID NO: 49474 - DNA, 22 bp, Artificial Sequence
  chemically synthesized
taaggctatatgggggactatc

SEQ ID NO: 49475 - DNA, 22 bp, Artificial Sequence
  chemically synthesized
aggctatatgggggactatctg

SEQ ID NO: 49476 - DNA, 22 bp, Artificial Sequence
  chemically synthesized
tatgggggactatctgaaggcc

SEQ ID NO: 49477 - DNA, 22 bp, Artificial Sequence
  chemically synthesized
tctgaaggcctcagatgagtaa

SEQ ID NO: 49478 - DNA, 22 bp, Artificial Sequence
  chemically synthesized
aaggcctcagatgagtaaaaga

SEQ ID NO: 49479 - DNA, 22 bp, Artificial Sequence
  chemically synthesized
agatgagtaaaagaagtagcga

SEQ ID NO: 49480 - DNA, 22 bp, Artificial Sequence
  chemically synthesized
gttaactatgtttttcttttca

SEQ ID NO: 49481 - DNA, 22 bp, Artificial Sequence
  chemically synthesized
actatgtttttcttttcatttc

SEQ ID NO: 49482 - DNA, 22 bp, Artificial Sequence
  chemically synthesized
tgtttttcttttcatttcattt

SEQ ID NO: 49483 - DNA, 22 bp, Artificial Sequence
  chemically synthesized
ttcttttcatttcatttcccaa

SEQ ID NO: 49484 - DNA, 22 bp, Artificial Sequence
  chemically synthesized
tcttttcatttcatttcccaaa

SEQ ID NO: 49485 - DNA, 22 bp, Artificial Sequence
  chemically synthesized
cttttcatttcatttcccaaat

SEQ ID NO: 49486 - DNA, 22 bp, Artificial Sequence
  chemically synthesized
ttttcatttcatttcccaaatc

SEQ ID NO: 49487 - DNA, 22 bp, Artificial Sequence
  chemically synthesized
ttcatttcatttcccaaatcaa

SEQ ID NO: 49488 - DNA, 22 bp, Artificial Sequence
  chemically synthesized
tcatttcatttcccaaatcaaa

SEQ ID NO: 49489 - DNA, 22 bp, Artificial Sequence
  chemically synthesized
catttcatttcccaaatcaaat

SEQ ID NO: 49490 - DNA, 22 bp, Artificial Sequence
  chemically synthesized
atttcatttcccaaatcaaatc

SEQ ID NO: 49491 - DNA, 22 bp, Artificial Sequence
  chemically synthesized
catttcccaaatcaaatcattt

SEQ ID NO: 49492 - DNA, 22 bp, Artificial Sequence
  chemically synthesized
atttcccaaatcaaatcatttg

SEQ ID NO: 49493 - DNA, 22 bp, Artificial Sequence
  chemically synthesized
cccaaatcaaatcatttgtttc

SEQ ID NO: 49494 - DNA, 22 bp, Artificial Sequence
  chemically synthesized
ccaaatcaaatcatttgtttct

SEQ ID NO: 49495 - DNA, 22 bp, Artificial Sequence
  chemically synthesized
gtttcttcaaataaagaatctc

SEQ ID NO: 49496 - DNA, 22 bp, Artificial Sequence
  chemically synthesized
tttcttcaaataaagaatctct

SEQ ID NO: 49497 - DNA, 22 bp, Artificial Sequence
  chemically synthesized
cttcaaataaagaatctctatt

SEQ ID NO: 49498 - DNA, 22 bp, Artificial Sequence
  chemically synthesized
ttcaaataaagaatctctattt

SEQ ID NO: 49499 - DNA, 22 bp, Artificial Sequence
  chemically synthesized
caaataaagaatctctatttcc

SEQ ID NO: 49500 - DNA, 22 bp, Artificial Sequence
  chemically synthesized
aaataaagaatctctatttccc

SEQ ID NO: 49501 - DNA, 22 bp, Artificial Sequence
  chemically synthesized
tatttcccccttatgttcttca

SEQ ID NO: 49502 - DNA, 22 bp, Artificial Sequence
  chemically synthesized
tttcccccttatgttcttcagc

SEQ ID NO: 49503 - DNA, 22 bp, Artificial Sequence
  chemically synthesized
cccccttatgttcttcagcaaa

SEQ ID NO: 49504 - DNA, 22 bp, Artificial Sequence
  chemically synthesized
ccccttatgttcttcagcaaat

SEQ ID NO: 49505 - DNA, 22 bp, Artificial Sequence
  chemically synthesized
atgttcttcagcaaataaaaat

SEQ ID NO: 49506 - DNA, 22 bp, Artificial Sequence
  chemically synthesized
tgttcttcagcaaataaaaatg

SEQ ID NO: 49507 - DNA, 22 bp, Artificial Sequence
  chemically synthesized
ttcagcaaataaaaatgtttgc

SEQ ID NO: 49508 - DNA, 22 bp, Artificial Sequence
  chemically synthesized
cagcaaataaaaatgtttgcat

SEQ ID NO: 49509 - DNA, 22 bp, Artificial Sequence
  chemically synthesized
agcaaataaaaatgtttgcatc

SEQ ID NO: 49510 - DNA, 22 bp, Artificial Sequence
  chemically synthesized
gcatctaccaaagtgtatatga

SEQ ID NO: 49511 - DNA, 22 bp, Artificial Sequence
  chemically synthesized
catctaccaaagtgtatatgaa

SEQ ID NO: 49512 - DNA, 22 bp, Artificial Sequence
  chemically synthesized
ccaaagtgtatatgaatttgaa

SEQ ID NO: 49513 - DNA, 22 bp, Artificial Sequence
  chemically synthesized
gaaatacgtaatctaacaaaca

SEQ ID NO: 49514 - DNA, 22 bp, Artificial Sequence
  chemically synthesized
aaatacgtaatctaacaaacaa

SEQ ID NO: 49515 - DNA, 22 bp, Artificial Sequence
  chemically synthesized
acaaacaaggatgttttaagat

SEQ ID NO: 49516 - DNA, 22 bp, Artificial Sequence
  chemically synthesized
taagatctctgagtaagatgca

SEQ ID NO: 49517 - DNA, 22 bp, Artificial Sequence
  chemically synthesized
aagatctctgagtaagatgcat

SEQ ID NO: 49518 - DNA, 22 bp, Artificial Sequence
  chemically synthesized
agatctctgagtaagatgcata

SEQ ID NO: 49519 - DNA, 22 bp, Artificial Sequence
  chemically synthesized
tgagtaagatgcatagttgcaa

SEQ ID NO: 49520 - DNA, 22 bp, Artificial Sequence
  chemically synthesized
agtaagatgcatagttgcaaat

SEQ ID NO: 49521 - DNA, 22 bp, Artificial Sequence
  chemically synthesized
caaataaaaggagttttcaagg

SEQ ID NO: 49522 - DNA, 22 bp, Artificial Sequence
  chemically synthesized
tcaaggataaaaaatgtaaata

SEQ ID NO: 49523 - DNA, 22 bp, Artificial Sequence
  chemically synthesized
caaggataaaaaatgtaaataa

SEQ ID NO: 49524 - DNA, 22 bp, Artificial Sequence
  chemically synthesized
aaggataaaaaatgtaaataaa

SEQ ID NO: 49525 - DNA, 22 bp, Artificial Sequence
  chemically synthesized
ataaatgtgtaccatcagaaac

SEQ ID NO: 49526 - DNA, 22 bp, Artificial Sequence
  chemically synthesized
atggtatattctcctggaaaag

SEQ ID NO: 49527 - DNA, 22 bp, Artificial Sequence
  chemically synthesized
tggtatattctcctggaaaaga

SEQ ID NO: 49528 - DNA, 22 bp, Artificial Sequence
  chemically synthesized
tcctggaaaagatgaagatgaa

SEQ ID NO: 49529 - DNA, 22 bp, Artificial Sequence
  chemically synthesized
ctggaaaagatgaagatgaaga

SEQ ID NO: 49530 - DNA, 22 bp, Artificial Sequence
  chemically synthesized
gaaaagatgaagatgaagaaaa

SEQ ID NO: 49531 - DNA, 22 bp, Artificial Sequence
  chemically synthesized
cagaagaggagaaattctttgg

SEQ ID NO: 49532 - DNA, 22 bp, Artificial Sequence
  chemically synthesized
tttggaaattttgcatttttgt

SEQ ID NO: 49533 - DNA, 22 bp, Artificial Sequence
  chemically synthesized
tggaaattttgcatttttgtgg

SEQ ID NO: 49534 - DNA, 22 bp, Artificial Sequence
  chemically synthesized
ggaaattttgcatttttgtgga

SEQ ID NO: 49535 - DNA, 22 bp, Artificial Sequence
  chemically synthesized
gaaattttgcatttttgtggat

SEQ ID NO: 49536 - DNA, 22 bp, Artificial Sequence
  chemically synthesized
tgcatttttgtggatagtggtt

SEQ ID NO: 49537 - DNA, 22 bp, Artificial Sequence
  chemically synthesized
gcatttttgtggatagtggttt

SEQ ID NO: 49538 - DNA, 22 bp, Artificial Sequence
  chemically synthesized
catttttgtggatagtggtttt

SEQ ID NO: 49539 - DNA, 22 bp, Artificial Sequence
  chemically synthesized
ttgtggatagtggttttgaaga

SEQ ID NO: 49540 - DNA, 22 bp, Artificial Sequence
  chemically synthesized
tgtggatagtggttttgaagaa

SEQ ID NO: 49541 - DNA, 22 bp, Artificial Sequence
  chemically synthesized
gtggatagtggttttgaagaaa

SEQ ID NO: 49542 - DNA, 22 bp, Artificial Sequence
  chemically synthesized
tggatagtggttttgaagaaag

SEQ ID NO: 49543 - DNA, 22 bp, Artificial Sequence
  chemically synthesized
tgaagaaagcttagatatattt

SEQ ID NO: 49544 - DNA, 22 bp, Artificial Sequence
  chemically synthesized
gaagaaagcttagatatattta

SEQ ID NO: 49545 - DNA, 22 bp, Artificial Sequence
  chemically synthesized
aagaaagcttagatatatttaa

SEQ ID NO: 49546 - DNA, 22 bp, Artificial Sequence
  chemically synthesized
agatatatttaaatatgttgct

SEQ ID NO: 49547 - DNA, 22 bp, Artificial Sequence
  chemically synthesized
gatatatttaaatatgttgcta

SEQ ID NO: 49548 - DNA, 22 bp, Artificial Sequence
  chemically synthesized
aaatatgttgctaagatgtgac

SEQ ID NO: 49549 - DNA, 22 bp, Artificial Sequence
  chemically synthesized
aatatgttgctaagatgtgact

SEQ ID NO: 49550 - DNA, 22 bp, Artificial Sequence
  chemically synthesized
ctaagatgtgactcccacactt

SEQ ID NO: 49551 - DNA, 22 bp, Artificial Sequence
  chemically synthesized
agatgtgactcccacactttaa

SEQ ID NO: 49552 - DNA, 22 bp, Artificial Sequence
  chemically synthesized
ccacactttaaagaaaagttct

SEQ ID NO: 49553 - DNA, 22 bp, Artificial Sequence
  chemically synthesized
taaagaaaagttcttcatttta

SEQ ID NO: 49554 - DNA, 22 bp, Artificial Sequence
  chemically synthesized
aaagaaaagttcttcattttag

SEQ ID NO: 49555 - DNA, 22 bp, Artificial Sequence
  chemically synthesized
aagaaaagttcttcattttagt

SEQ ID NO: 49556 - DNA, 22 bp, Artificial Sequence
  chemically synthesized
ttcattttagttgcccttgcaa

SEQ ID NO: 49557 - DNA, 22 bp, Artificial Sequence
  chemically synthesized
cattttagttgcccttgcaaat

SEQ ID NO: 49558 - DNA, 22 bp, Artificial Sequence
  chemically synthesized
attttagttgcccttgcaaatt

SEQ ID NO: 49559 - DNA, 22 bp, Artificial Sequence
  chemically synthesized
tagttgcccttgcaaattggct

SEQ ID NO: 49560 - DNA, 22 bp, Artificial Sequence
  chemically synthesized
agttgcccttgcaaattggcta

SEQ ID NO: 49561 - DNA, 22 bp, Artificial Sequence
  chemically synthesized
gttgcccttgcaaattggctaa

SEQ ID NO: 49562 - DNA, 22 bp, Artificial Sequence
  chemically synthesized
cccttgcaaattggctaagttt

SEQ ID NO: 49563 - DNA, 22 bp, Artificial Sequence
  chemically synthesized
gcaaattggctaagtttatttt

SEQ ID NO: 49564 - DNA, 22 bp, Artificial Sequence
  chemically synthesized
caaattggctaagtttattttt

SEQ ID NO: 49565 - DNA, 22 bp, Artificial Sequence
  chemically synthesized
gctaagtttatttttcctcaac

SEQ ID NO: 49566 - DNA, 22 bp, Artificial Sequence
  chemically synthesized
agtttatttttcctcaacaaat

SEQ ID NO: 49567 - DNA, 22 bp, Artificial Sequence
  chemically synthesized
atttttcctcaacaaataattt

SEQ ID NO: 49568 - DNA, 22 bp, Artificial Sequence
  chemically synthesized
tttttcctcaacaaataatttt

SEQ ID NO: 49569 - DNA, 22 bp, Artificial Sequence
  chemically synthesized
ttcctcaacaaataattttgat

SEQ ID NO: 49570 - DNA, 22 bp, Artificial Sequence
  chemically synthesized
tcctcaacaaataattttgatg

SEQ ID NO: 49571 - DNA, 22 bp, Artificial Sequence
  chemically synthesized
cctcaacaaataattttgatgg

SEQ ID NO: 49572 - DNA, 22 bp, Artificial Sequence
  chemically synthesized
ctcaacaaataattttgatggt

SEQ ID NO: 49573 - DNA, 22 bp, Artificial Sequence
  chemically synthesized
aacaaataattttgatggtttc

SEQ ID NO: 49574 - DNA, 22 bp, Artificial Sequence
  chemically synthesized
tgatggtttctaaaattgtcca

SEQ ID NO: 49575 - DNA, 22 bp, Artificial Sequence
  chemically synthesized
gatggtttctaaaattgtccag

SEQ ID NO: 49576 - DNA, 22 bp, Artificial Sequence
  chemically synthesized
atggtttctaaaattgtccaga

SEQ ID NO: 49577 - DNA, 22 bp, Artificial Sequence
  chemically synthesized
ctaaaattgtccagaatttgag

SEQ ID NO: 49578 - DNA, 22 bp, Artificial Sequence
  chemically synthesized
taaaattgtccagaatttgagg

SEQ ID NO: 49579 - DNA, 22 bp, Artificial Sequence
  chemically synthesized
aaattgtccagaatttgaggaa

SEQ ID NO: 49580 - DNA, 22 bp, Artificial Sequence
  chemically synthesized
tccagaatttgaggaaatactt

SEQ ID NO: 49581 - DNA, 22 bp, Artificial Sequence
  chemically synthesized
gaggaaatacttagatgtagta

SEQ ID NO: 49582 - DNA, 22 bp, Artificial Sequence
  chemically synthesized
aggaaatacttagatgtagtag

SEQ ID NO: 49583 - DNA, 22 bp, Artificial Sequence
  chemically synthesized
agatgtagtagatgacatcaat

SEQ ID NO: 49584 - DNA, 22 bp, Artificial Sequence
  chemically synthesized
gatgtagtagatgacatcaatt

SEQ ID NO: 49585 - DNA, 22 bp, Artificial Sequence
  chemically synthesized
atgttaacttagatttattgtt

SEQ ID NO: 49586 - DNA, 22 bp, Artificial Sequence
  chemically synthesized
tgttaacttagatttattgttg

SEQ ID NO: 49587 - DNA, 22 bp, Artificial Sequence
  chemically synthesized
acttagatttattgttggatgg

SEQ ID NO: 49588 - DNA, 22 bp, Artificial Sequence
  chemically synthesized
agatttattgttggatggttaa

SEQ ID NO: 49589 - DNA, 22 bp, Artificial Sequence
  chemically synthesized
gatttattgttggatggttaag

SEQ ID NO: 49590 - DNA, 22 bp, Artificial Sequence
  chemically synthesized
attgttggatggttaagttaat

SEQ ID NO: 49591 - DNA, 22 bp, Artificial Sequence
  chemically synthesized
ttgttggatggttaagttaatc

SEQ ID NO: 49592 - DNA, 22 bp, Artificial Sequence
  chemically synthesized
ttggatggttaagttaatcatg

SEQ ID NO: 49593 - DNA, 22 bp, Artificial Sequence
  chemically synthesized
gatggttaagttaatcatgtct

SEQ ID NO: 49594 - DNA, 22 bp, Artificial Sequence
  chemically synthesized
agttaatcatgtctgttcttgt

SEQ ID NO: 49595 - DNA, 22 bp, Artificial Sequence
  chemically synthesized
atcatgtctgttcttgtccagt

SEQ ID NO: 49596 - DNA, 22 bp, Artificial Sequence
  chemically synthesized
ttcttgtccagtctagaagttt

SEQ ID NO: 49597 - DNA, 22 bp, Artificial Sequence
  chemically synthesized
ttgtccagtctagaagtttctg

SEQ ID NO: 49598 - DNA, 22 bp, Artificial Sequence
  chemically synthesized
gtccagtctagaagtttctgct

SEQ ID NO: 49599 - DNA, 22 bp, Artificial Sequence
  chemically synthesized
tccagtctagaagtttctgctt

SEQ ID NO: 49600 - DNA, 22 bp, Artificial Sequence
  chemically synthesized
gaagtttctgcttcctcctcat

SEQ ID NO: 49601 - DNA, 22 bp, Artificial Sequence
  chemically synthesized
ctgcttcctcctcatgtgttct

SEQ ID NO: 49602 - DNA, 22 bp, Artificial Sequence
  chemically synthesized
tgcttcctcctcatgtgttcta

SEQ ID NO: 49603 - DNA, 22 bp, Artificial Sequence
  chemically synthesized
cttcctcctcatgtgttctatt

SEQ ID NO: 49604 - DNA, 22 bp, Artificial Sequence
  chemically synthesized
cctcctcatgtgttctattctg

SEQ ID NO: 49605 - DNA, 22 bp, Artificial Sequence
  chemically synthesized
ctcctcatgtgttctattctgt

SEQ ID NO: 49606 - DNA, 22 bp, Artificial Sequence
  chemically synthesized
ctcatgtgttctattctgtcct

SEQ ID NO: 49607 - DNA, 22 bp, Artificial Sequence
  chemically synthesized
atgtgttctattctgtcctcat

SEQ ID NO: 49608 - DNA, 22 bp, Artificial Sequence
  chemically synthesized
tattctgtcctcatcacataac

SEQ ID NO: 49609 - DNA, 22 bp, Artificial Sequence
  chemically synthesized
ttctgtcctcatcacataacat

SEQ ID NO: 49610 - DNA, 22 bp, Artificial Sequence
  chemically synthesized
tgtcctcatcacataacatctg

SEQ ID NO: 49611 - DNA, 22 bp, Artificial Sequence
  chemically synthesized
tcctcatcacataacatctgaa

SEQ ID NO: 49612 - DNA, 22 bp, Artificial Sequence
  chemically synthesized
atcacataacatctgaactgtg

SEQ ID NO: 49613 - DNA, 22 bp, Artificial Sequence
  chemically synthesized
aactgtgatttgacagtgtcct

SEQ ID NO: 49614 - DNA, 22 bp, Artificial Sequence
  chemically synthesized
tgatttgacagtgtccttatta

SEQ ID NO: 49615 - DNA, 22 bp, Artificial Sequence
  chemically synthesized
gacagtgtccttattatcagac

SEQ ID NO: 49616 - DNA, 22 bp, Artificial Sequence
  chemically synthesized
acagtgtccttattatcagact

SEQ ID NO: 49617 - DNA, 22 bp, Artificial Sequence
  chemically synthesized
attatcagactctgctcaatga

SEQ ID NO: 49618 - DNA, 22 bp, Artificial Sequence
  chemically synthesized
ttatcagactctgctcaatgac

SEQ ID NO: 49619 - DNA, 22 bp, Artificial Sequence
  chemically synthesized
tcagactctgctcaatgacagt

SEQ ID NO: 49620 - DNA, 22 bp, Artificial Sequence
  chemically synthesized
tgctcaatgacagtttaaactt

SEQ ID NO: 49621 - DNA, 22 bp, Artificial Sequence
  chemically synthesized
ctcaatgacagtttaaacttct

SEQ ID NO: 49622 - DNA, 22 bp, Artificial Sequence
  chemically synthesized
aatgacagtttaaacttctttt

SEQ ID NO: 49623 - DNA, 22 bp, Artificial Sequence
  chemically synthesized
aaacttctttttgatacagtaa

SEQ ID NO: 49624 - DNA, 22 bp, Artificial Sequence
  chemically synthesized
aacttctttttgatacagtaaa

SEQ ID NO: 49625 - DNA, 22 bp, Artificial Sequence
  chemically synthesized
ctttttgatacagtaaaaaact

SEQ ID NO: 49626 - DNA, 22 bp, Artificial Sequence
  chemically synthesized
tttttgatacagtaaaaaactt

SEQ ID NO: 49627 - DNA, 22 bp, Artificial Sequence
  chemically synthesized
tttgatacagtaaaaaactttt

SEQ ID NO: 49628 - DNA, 22 bp, Artificial Sequence
  chemically synthesized
ttgatacagtaaaaaacttttc

SEQ ID NO: 49629 - DNA, 22 bp, Artificial Sequence
  chemically synthesized
tgatacagtaaaaaacttttcc

SEQ ID NO: 49630 - DNA, 22 bp, Artificial Sequence
  chemically synthesized
gatacagtaaaaaacttttcct

SEQ ID NO: 49631 - DNA, 22 bp, Artificial Sequence
  chemically synthesized
atacagtaaaaaacttttcctt

SEQ ID NO: 49632 - DNA, 22 bp, Artificial Sequence
  chemically synthesized
ttccttaaagatgaaattctta

SEQ ID NO: 49633 - DNA, 22 bp, Artificial Sequence
  chemically synthesized
tccttaaagatgaaattcttaa

SEQ ID NO: 49634 - DNA, 22 bp, Artificial Sequence
  chemically synthesized
ccttaaagatgaaattcttaag

SEQ ID NO: 49635 - DNA, 22 bp, Artificial Sequence
  chemically synthesized
cttaaagatgaaattcttaagg

SEQ ID NO: 49636 - DNA, 22 bp, Artificial Sequence
  chemically synthesized
aaagatgaaattcttaaggaca

SEQ ID NO: 49637 - DNA, 22 bp, Artificial Sequence
  chemically synthesized
aagatgaaattcttaaggacaa

SEQ ID NO: 49638 - DNA, 22 bp, Artificial Sequence
  chemically synthesized
ttaaggacaattagcttgtgta

SEQ ID NO: 49639 - DNA, 22 bp, Artificial Sequence
  chemically synthesized
aaggacaattagcttgtgtaga

SEQ ID NO: 49640 - DNA, 22 bp, Artificial Sequence
  chemically synthesized
aggacaattagcttgtgtagac

SEQ ID NO: 49641 - DNA, 22 bp, Artificial Sequence
  chemically synthesized
gcttgtgtagactcatatgaaa

SEQ ID NO: 49642 - DNA, 22 bp, Artificial Sequence
  chemically synthesized
gtgtagactcatatgaaaattg

SEQ ID NO: 49643 - DNA, 22 bp, Artificial Sequence
  chemically synthesized
tgtagactcatatgaaaattgc

SEQ ID NO: 49644 - DNA, 22 bp, Artificial Sequence
  chemically synthesized
atatgaaaattgcttgcatttt

SEQ ID NO: 49645 - DNA, 22 bp, Artificial Sequence
  chemically synthesized
cttgcattttggagttacatta

SEQ ID NO: 49646 - DNA, 22 bp, Artificial Sequence
  chemically synthesized
gcattttggagttacattagct

SEQ ID NO: 49647 - DNA, 22 bp, Artificial Sequence
  chemically synthesized
cattttggagttacattagctc

SEQ ID NO: 49648 - DNA, 22 bp, Artificial Sequence
  chemically synthesized
tggagttacattagctcttctc

SEQ ID NO: 49649 - DNA, 22 bp, Artificial Sequence
  chemically synthesized
ggagttacattagctcttctcc

SEQ ID NO: 49650 - DNA, 22 bp, Artificial Sequence
  chemically synthesized
gagttacattagctcttctcct

SEQ ID NO: 49651 - DNA, 22 bp, Artificial Sequence
  chemically synthesized
cattagctcttctcctttataa

SEQ ID NO: 49652 - DNA, 22 bp, Artificial Sequence
  chemically synthesized
gctcttctcctttataaattaa

SEQ ID NO: 49653 - DNA, 22 bp, Artificial Sequence
  chemically synthesized
ttctcctttataaattaatgaa

SEQ ID NO: 49654 - DNA, 22 bp, Artificial Sequence
  chemically synthesized
ctcctttataaattaatgaatc

SEQ ID NO: 49655 - DNA, 22 bp, Artificial Sequence
  chemically synthesized
tcctttataaattaatgaatcc

SEQ ID NO: 49656 - DNA, 22 bp, Artificial Sequence
  chemically synthesized
ctttataaattaatgaatccta

SEQ ID NO: 49657 - DNA, 22 bp, Artificial Sequence
  chemically synthesized
tataaattaatgaatcctattg

SEQ ID NO: 49658 - DNA, 22 bp, Artificial Sequence
  chemically synthesized
ataaattaatgaatcctattgg

SEQ ID NO: 49659 - DNA, 22 bp, Artificial Sequence
  chemically synthesized
taaattaatgaatcctattggt

SEQ ID NO: 49660 - DNA, 22 bp, Artificial Sequence
  chemically synthesized
atgaatcctattggtaccatat

SEQ ID NO: 49661 - DNA, 22 bp, Artificial Sequence
  chemically synthesized
ttggtaccatataatagcatca

SEQ ID NO: 49662 - DNA, 22 bp, Artificial Sequence
  chemically synthesized
gtaccatataatagcatcaaca

SEQ ID NO: 49663 - DNA, 22 bp, Artificial Sequence
  chemically synthesized
gccttttgtgtctcgcctttca

SEQ ID NO: 49664 - DNA, 22 bp, Artificial Sequence
  chemically synthesized
ccttttgtgtctcgcctttcaa

SEQ ID NO: 49665 - DNA, 22 bp, Artificial Sequence
  chemically synthesized
ttgtgtctcgcctttcaaaggg

SEQ ID NO: 49666 - DNA, 22 bp, Artificial Sequence
  chemically synthesized
tgtgtctcgcctttcaaagggc

SEQ ID NO: 49667 - DNA, 22 bp, Artificial Sequence
  chemically synthesized
gtgtctcgcctttcaaagggca

SEQ ID NO: 49668 - DNA, 22 bp, Artificial Sequence
  chemically synthesized
tgtctcgcctttcaaagggcaa

SEQ ID NO: 49669 - DNA, 22 bp, Artificial Sequence
  chemically synthesized
gcctttcaaagggcaattttcc

SEQ ID NO: 49670 - DNA, 22 bp, Artificial Sequence
  chemically synthesized
tcaaagggcaattttccaaaaa

SEQ ID NO: 49671 - DNA, 22 bp, Artificial Sequence
  chemically synthesized
caaagggcaattttccaaaaag

SEQ ID NO: 49672 - DNA, 22 bp, Artificial Sequence
  chemically synthesized
aaagggcaattttccaaaaagt

SEQ ID NO: 49673 - DNA, 22 bp, Artificial Sequence
  chemically synthesized
tccaaaaagtatattttgcatg

SEQ ID NO: 49674 - DNA, 22 bp, Artificial Sequence
  chemically synthesized
ccaaaaagtatattttgcatgg

SEQ ID NO: 49675 - DNA, 22 bp, Artificial Sequence
  chemically synthesized
caaaaagtatattttgcatggc

SEQ ID NO: 49676 - DNA, 22 bp, Artificial Sequence
  chemically synthesized
tgcatggctcaggctaaaagta

SEQ ID NO: 49677 - DNA, 22 bp, Artificial Sequence
  chemically synthesized
gcatggctcaggctaaaagtaa

SEQ ID NO: 49678 - DNA, 22 bp, Artificial Sequence
  chemically synthesized
catggctcaggctaaaagtaat

SEQ ID NO: 49679 - DNA, 22 bp, Artificial Sequence
  chemically synthesized
aggctaaaagtaatgtctccag

SEQ ID NO: 49680 - DNA, 22 bp, Artificial Sequence
  chemically synthesized
aaagtaatgtctccagatgaag

SEQ ID NO: 49681 - DNA, 22 bp, Artificial Sequence
  chemically synthesized
cagatgaagttctactttgtga

SEQ ID NO: 49682 - DNA, 22 bp, Artificial Sequence
  chemically synthesized
tactttgtgaccattgattgtg

SEQ ID NO: 49683 - DNA, 22 bp, Artificial Sequence
  chemically synthesized
ctttgtgaccattgattgtgac

SEQ ID NO: 49684 - DNA, 22 bp, Artificial Sequence
  chemically synthesized
tgtgaccattgattgtgactat

SEQ ID NO: 49685 - DNA, 22 bp, Artificial Sequence
  chemically synthesized
gtgaccattgattgtgactatt

SEQ ID NO: 49686 - DNA, 22 bp, Artificial Sequence
  chemically synthesized
tgaccattgattgtgactattg

SEQ ID NO: 49687 - DNA, 22 bp, Artificial Sequence
  chemically synthesized
attgtgactattgataagattt

SEQ ID NO: 49688 - DNA, 22 bp, Artificial Sequence
  chemically synthesized
tgactattgataagatttacta

SEQ ID NO: 49689 - DNA, 22 bp, Artificial Sequence
  chemically synthesized
ttgataagatttactatgtaaa

SEQ ID NO: 49690 - DNA, 22 bp, Artificial Sequence
  chemically synthesized
ataagatttactatgtaaagta

SEQ ID NO: 49691 - DNA, 22 bp, Artificial Sequence
  chemically synthesized
actatgtaaagtataagttact

SEQ ID NO: 49692 - DNA, 22 bp, Artificial Sequence
  chemically synthesized
ctatgtaaagtataagttactg

SEQ ID NO: 49693 - DNA, 22 bp, Artificial Sequence
  chemically synthesized
tgtaaagtataagttactggaa

SEQ ID NO: 49694 - DNA, 22 bp, Artificial Sequence
  chemically synthesized
ctggaataatacatttaagaaa

SEQ ID NO: 49695 - DNA, 22 bp, Artificial Sequence
  chemically synthesized
gaataatacatttaagaaatat

SEQ ID NO: 49696 - DNA, 22 bp, Artificial Sequence
  chemically synthesized
aagaaatatagtagctattaaa

SEQ ID NO: 49697 - DNA, 22 bp, Artificial Sequence
  chemically synthesized
agaaatatagtagctattaaaa

SEQ ID NO: 49698 - DNA, 22 bp, Artificial Sequence
  chemically synthesized
ttaaaacctgtagtctgatgaa

SEQ ID NO: 49699 - DNA, 22 bp, Artificial Sequence
  chemically synthesized
aaacctgtagtctgatgaaatg

SEQ ID NO: 49700 - DNA, 22 bp, Artificial Sequence
  chemically synthesized
tagtctgatgaaatggaatatg

SEQ ID NO: 49701 - DNA, 22 bp, Artificial Sequence
  chemically synthesized
atgaaatggaatatgttttgaa

SEQ ID NO: 49702 - DNA, 22 bp, Artificial Sequence
  chemically synthesized
tgaaagacagcagtgaaaaatg

SEQ ID NO: 49703 - DNA, 22 bp, Artificial Sequence
  chemically synthesized
gaaagacagcagtgaaaaatga

SEQ ID NO: 49704 - DNA, 22 bp, Artificial Sequence
  chemically synthesized
aaagacagcagtgaaaaatgag

SEQ ID NO: 49705 - DNA, 22 bp, Artificial Sequence
  chemically synthesized
ctttttgcaattgagttgaaga

SEQ ID NO: 49706 - DNA, 22 bp, Artificial Sequence
  chemically synthesized
tttgcaattgagttgaagattg

SEQ ID NO: 49707 - DNA, 22 bp, Artificial Sequence
  chemically synthesized
ttgcaattgagttgaagattga

SEQ ID NO: 49708 - DNA, 22 bp, Artificial Sequence
  chemically synthesized
tgcaattgagttgaagattgat

SEQ ID NO: 49709 - DNA, 22 bp, Artificial Sequence
  chemically synthesized
gcaattgagttgaagattgatg

SEQ ID NO: 49710 - DNA, 22 bp, Artificial Sequence
  chemically synthesized
caattgagttgaagattgatgc

SEQ ID NO: 49711 - DNA, 22 bp, Artificial Sequence
  chemically synthesized
agttgaagattgatgccaggat

SEQ ID NO: 49712 - DNA, 22 bp, Artificial Sequence
  chemically synthesized
aagattgatgccaggatcttat

SEQ ID NO: 49713 - DNA, 22 bp, Artificial Sequence
  chemically synthesized
atgccaggatcttattacctcc

SEQ ID NO: 49714 - DNA, 22 bp, Artificial Sequence
  chemically synthesized
attacctccaggatttcacaaa

SEQ ID NO: 49715 - DNA, 22 bp, Artificial Sequence
  chemically synthesized
ttacctccaggatttcacaaag

SEQ ID NO: 49716 - DNA, 22 bp, Artificial Sequence
  chemically synthesized
cctccaggatttcacaaaggat

SEQ ID NO: 49717 - DNA, 22 bp, Artificial Sequence
  chemically synthesized
caggatttcacaaaggatttct

SEQ ID NO: 49718 - DNA, 22 bp, Artificial Sequence
  chemically synthesized
cacaaaggatttcttgagtcat

SEQ ID NO: 49719 - DNA, 22 bp, Artificial Sequence
  chemically synthesized
acaaaggatttcttgagtcatc

SEQ ID NO: 49720 - DNA, 22 bp, Artificial Sequence
  chemically synthesized
cttgagtcatccccttgctcta

SEQ ID NO: 49721 - DNA, 22 bp, Artificial Sequence
  chemically synthesized
ttgagtcatccccttgctctag

SEQ ID NO: 49722 - DNA, 22 bp, Artificial Sequence
  chemically synthesized
gagtcatccccttgctctagct

SEQ ID NO: 49723 - DNA, 22 bp, Artificial Sequence
  chemically synthesized
agtcatccccttgctctagctc

SEQ ID NO: 49724 - DNA, 22 bp, Artificial Sequence
  chemically synthesized
gctctagctcatgaacaaagta

SEQ ID NO: 49725 - DNA, 22 bp, Artificial Sequence
  chemically synthesized
ctctagctcatgaacaaagtat

SEQ ID NO: 49726 - DNA, 22 bp, Artificial Sequence
  chemically synthesized
tagctcatgaacaaagtattgc

SEQ ID NO: 49727 - DNA, 22 bp, Artificial Sequence
  chemically synthesized
gctcatgaacaaagtattgctc

SEQ ID NO: 49728 - DNA, 22 bp, Artificial Sequence
  chemically synthesized
atgaacaaagtattgctcaagt

SEQ ID NO: 49729 - DNA, 22 bp, Artificial Sequence
  chemically synthesized
ctcaagtaatcgacagattatt

SEQ ID NO: 49730 - DNA, 22 bp, Artificial Sequence
  chemically synthesized
aagtaatcgacagattatttgt

SEQ ID NO: 49731 - DNA, 22 bp, Artificial Sequence
  chemically synthesized
tttgtgtattctcacatgtgat

SEQ ID NO: 49732 - DNA, 22 bp, Artificial Sequence
  chemically synthesized
gtgtattctcacatgtgattat

SEQ ID NO: 49733 - DNA, 22 bp, Artificial Sequence
  chemically synthesized
tgtattctcacatgtgattatt

SEQ ID NO: 49734 - DNA, 22 bp, Artificial Sequence
  chemically synthesized
tcacatgtgattattatttagt

SEQ ID NO: 49735 - DNA, 22 bp, Artificial Sequence
  chemically synthesized
acatgtgattattatttagtgc

SEQ ID NO: 49736 - DNA, 22 bp, Artificial Sequence
  chemically synthesized
ttatttagtgctgtcacgggaa

SEQ ID NO: 49737 - DNA, 22 bp, Artificial Sequence
  chemically synthesized
tttagtgctgtcacgggaaata

SEQ ID NO: 49738 - DNA, 22 bp, Artificial Sequence
  chemically synthesized
agtgctgtcacgggaaatatcc

SEQ ID NO: 49739 - DNA, 22 bp, Artificial Sequence
  chemically synthesized
gtgctgtcacgggaaatatcct

SEQ ID NO: 49740 - DNA, 22 bp, Artificial Sequence
  chemically synthesized
tcacgggaaatatcctgcctaa

SEQ ID NO: 49741 - DNA, 22 bp, Artificial Sequence
  chemically synthesized
cctaagtttactggaggtcttc

SEQ ID NO: 49742 - DNA, 22 bp, Artificial Sequence
  chemically synthesized
agtttactggaggtcttcctcc

SEQ ID NO: 49743 - DNA, 22 bp, Artificial Sequence
  chemically synthesized
actggaggtcttcctcccctta

SEQ ID NO: 49744 - DNA, 22 bp, Artificial Sequence
  chemically synthesized
ctggaggtcttcctccccttac

SEQ ID NO: 49745 - DNA, 22 bp, Artificial Sequence
  chemically synthesized
gaggtcttcctccccttacccc

SEQ ID NO: 49746 - DNA, 22 bp, Artificial Sequence
  chemically synthesized
cctccccttacccctccctatg

SEQ ID NO: 49747 - DNA, 22 bp, Artificial Sequence
  chemically synthesized
ctccccttacccctccctatgt

SEQ ID NO: 49748 - DNA, 22 bp, Artificial Sequence
  chemically synthesized
cccttacccctccctatgtcct

SEQ ID NO: 49749 - DNA, 22 bp, Artificial Sequence
  chemically synthesized
acccctccctatgtcctcctac

SEQ ID NO: 49750 - DNA, 22 bp, Artificial Sequence
  chemically synthesized
cccctccctatgtcctcctacc

SEQ ID NO: 49751 - DNA, 22 bp, Artificial Sequence
  chemically synthesized
cctatgtcctcctacctggtta

SEQ ID NO: 49752 - DNA, 22 bp, Artificial Sequence
  chemically synthesized
tgtcctcctacctggttatcct

SEQ ID NO: 49753 - DNA, 22 bp, Artificial Sequence
  chemically synthesized
ctacctggttatccttttcaat

SEQ ID NO: 49754 - DNA, 22 bp, Artificial Sequence
  chemically synthesized
cctggttatccttttcaatcct

SEQ ID NO: 49755 - DNA, 22 bp, Artificial Sequence
  chemically synthesized
gttatccttttcaatcctatta

SEQ ID NO: 49756 - DNA, 22 bp, Artificial Sequence
  chemically synthesized
tccttttcaatcctattactct

SEQ ID NO: 49757 - DNA, 22 bp, Artificial Sequence
  chemically synthesized
ttcaatcctattactctttcct

SEQ ID NO: 49758 - DNA, 22 bp, Artificial Sequence
  chemically synthesized
tcaatcctattactctttcctt

SEQ ID NO: 49759 - DNA, 22 bp, Artificial Sequence
  chemically synthesized
caatcctattactctttccttg

SEQ ID NO: 49760 - DNA, 22 bp, Artificial Sequence
  chemically synthesized
aatcctattactctttccttgc

SEQ ID NO: 49761 - DNA, 22 bp, Artificial Sequence
  chemically synthesized
ttactctttccttgcacactct

SEQ ID NO: 49762 - DNA, 22 bp, Artificial Sequence
  chemically synthesized
ctctttccttgcacactctact

SEQ ID NO: 49763 - DNA, 22 bp, Artificial Sequence
  chemically synthesized
tttccttgcacactctactcca

SEQ ID NO: 49764 - DNA, 22 bp, Artificial Sequence
  chemically synthesized
tccttgcacactctactccagc

SEQ ID NO: 49765 - DNA, 22 bp, Artificial Sequence
  chemically synthesized
ccttgcacactctactccagct

SEQ ID NO: 49766 - DNA, 22 bp, Artificial Sequence
  chemically synthesized
cttgcacactctactccagctt

SEQ ID NO: 49767 - DNA, 22 bp, Artificial Sequence
  chemically synthesized
gcacactctactccagcttagg

SEQ ID NO: 49768 - DNA, 22 bp, Artificial Sequence
  chemically synthesized
cacactctactccagcttaggg

SEQ ID NO: 49769 - DNA, 22 bp, Artificial Sequence
  chemically synthesized
tactccagcttagggcctgggc

SEQ ID NO: 49770 - DNA, 22 bp, Artificial Sequence
  chemically synthesized
ctccagcttagggcctgggctc

SEQ ID NO: 49771 - DNA, 22 bp, Artificial Sequence
  chemically synthesized
cagcttagggcctgggctctga

SEQ ID NO: 49772 - DNA, 22 bp, Artificial Sequence
  chemically synthesized
agggcctgggctctgaccatta

SEQ ID NO: 49773 - DNA, 22 bp, Artificial Sequence
  chemically synthesized
gggcctgggctctgaccattac

SEQ ID NO: 49774 - DNA, 22 bp, Artificial Sequence
  chemically synthesized
ggctctgaccattacctctgcc

SEQ ID NO: 49775 - DNA, 22 bp, Artificial Sequence
  chemically synthesized
tgaccattacctctgcctaaaa

SEQ ID NO: 49776 - DNA, 22 bp, Artificial Sequence
  chemically synthesized
accattacctctgcctaaaaat

SEQ ID NO: 49777 - DNA, 22 bp, Artificial Sequence
  chemically synthesized
cctctgcctaaaaattcctcct

SEQ ID NO: 49778 - DNA, 22 bp, Artificial Sequence
  chemically synthesized
tgcctaaaaattcctcctcatg

SEQ ID NO: 49779 - DNA, 22 bp, Artificial Sequence
  chemically synthesized
cctaaaaattcctcctcatgac

SEQ ID NO: 49780 - DNA, 22 bp, Artificial Sequence
  chemically synthesized
aaaattcctcctcatgacatcc

SEQ ID NO: 49781 - DNA, 22 bp, Artificial Sequence
  chemically synthesized
ctcctcatgacatccatttgcc

SEQ ID NO: 49782 - DNA, 22 bp, Artificial Sequence
  chemically synthesized
ctcatgacatccatttgcccaa

SEQ ID NO: 49783 - DNA, 22 bp, Artificial Sequence
  chemically synthesized
atgacatccatttgcccaattt

SEQ ID NO: 49784 - DNA, 22 bp, Artificial Sequence
  chemically synthesized
gcccaatttcttcaccctttta

SEQ ID NO: 49785 - DNA, 22 bp, Artificial Sequence
  chemically synthesized
cccaatttcttcacccttttaa

SEQ ID NO: 49786 - DNA, 22 bp, Artificial Sequence
  chemically synthesized
cttcacccttttaattacccca

SEQ ID NO: 49787 - DNA, 22 bp, Artificial Sequence
  chemically synthesized
ttcacccttttaattaccccat

SEQ ID NO: 49788 - DNA, 22 bp, Artificial Sequence
  chemically synthesized
cacccttttaattaccccatta

SEQ ID NO: 49789 - DNA, 22 bp, Artificial Sequence
  chemically synthesized
acccttttaattaccccattaa

SEQ ID NO: 49790 - DNA, 22 bp, Artificial Sequence
  chemically synthesized
ttaattaccccattaagtgata

SEQ ID NO: 49791 - DNA, 22 bp, Artificial Sequence
  chemically synthesized
taattaccccattaagtgatat

SEQ ID NO: 49792 - DNA, 22 bp, Artificial Sequence
  chemically synthesized
aattaccccattaagtgatatt

SEQ ID NO: 49793 - DNA, 22 bp, Artificial Sequence
  chemically synthesized
attaccccattaagtgatattt

SEQ ID NO: 49794 - DNA, 22 bp, Artificial Sequence
  chemically synthesized
ccccattaagtgatattttgct

SEQ ID NO: 49795 - DNA, 22 bp, Artificial Sequence
  chemically synthesized
agtgatattttgcttgctcaat

SEQ ID NO: 49796 - DNA, 22 bp, Artificial Sequence
  chemically synthesized
tgcttgctcaatttttgccttt

SEQ ID NO: 49797 - DNA, 22 bp, Artificial Sequence
  chemically synthesized
gcttgctcaatttttgcctttt

SEQ ID NO: 49798 - DNA, 22 bp, Artificial Sequence
  chemically synthesized
cttgctcaatttttgccttttc

SEQ ID NO: 49799 - DNA, 22 bp, Artificial Sequence
  chemically synthesized
gctcaatttttgccttttcaat

SEQ ID NO: 49800 - DNA, 22 bp, Artificial Sequence
  chemically synthesized
ctcaatttttgccttttcaatc

SEQ ID NO: 49801 - DNA, 22 bp, Artificial Sequence
  chemically synthesized
aatttttgccttttcaatcaga

SEQ ID NO: 49802 - DNA, 22 bp, Artificial Sequence
  chemically synthesized
ttgccttttcaatcagatctaa

SEQ ID NO: 49803 - DNA, 22 bp, Artificial Sequence
  chemically synthesized
tgccttttcaatcagatctaat

SEQ ID NO: 49804 - DNA, 22 bp, Artificial Sequence
  chemically synthesized
gccttttcaatcagatctaatt

SEQ ID NO: 49805 - DNA, 22 bp, Artificial Sequence
  chemically synthesized
ccttttcaatcagatctaattt

SEQ ID NO: 49806 - DNA, 22 bp, Artificial Sequence
  chemically synthesized
ttcaatcagatctaatttattt

SEQ ID NO: 49807 - DNA, 22 bp, Artificial Sequence
  chemically synthesized
tcaatcagatctaatttatttt

SEQ ID NO: 49808 - DNA, 22 bp, Artificial Sequence
  chemically synthesized
caatcagatctaatttatttta

SEQ ID NO: 49809 - DNA, 22 bp, Artificial Sequence
  chemically synthesized
aatcagatctaatttattttat

SEQ ID NO: 49810 - DNA, 22 bp, Artificial Sequence
  chemically synthesized
atttattttatatttttaaaat

SEQ ID NO: 49811 - DNA, 22 bp, Artificial Sequence
  chemically synthesized
attttatatttttaaaatttat

SEQ ID NO: 49812 - DNA, 22 bp, Artificial Sequence
  chemically synthesized
ttttatatttttaaaatttatt

SEQ ID NO: 49813 - DNA, 22 bp, Artificial Sequence
  chemically synthesized
tatatttttaaaatttatttat

SEQ ID NO: 49814 - DNA, 22 bp, Artificial Sequence
  chemically synthesized
atatttttaaaatttatttata

SEQ ID NO: 49815 - DNA, 22 bp, Artificial Sequence
  chemically synthesized
tatttttaaaatttatttatat

SEQ ID NO: 49816 - DNA, 22 bp, Artificial Sequence
  chemically synthesized
ttaaaatttatttatatatatt

SEQ ID NO: 49817 - DNA, 22 bp, Artificial Sequence
  chemically synthesized
taaaatttatttatatatattt

SEQ ID NO: 49818 - DNA, 22 bp, Artificial Sequence
  chemically synthesized
aaaatttatttatatatattta

SEQ ID NO: 49819 - DNA, 22 bp, Artificial Sequence
  chemically synthesized
aaatttatttatatatatttag

SEQ ID NO: 49820 - DNA, 22 bp, Artificial Sequence
  chemically synthesized
atttatatatatttagaaggta

SEQ ID NO: 49821 - DNA, 22 bp, Artificial Sequence
  chemically synthesized
tttatatatatttagaaggtat

SEQ ID NO: 49822 - DNA, 22 bp, Artificial Sequence
  chemically synthesized
atatatatttagaaggtatgta

SEQ ID NO: 49823 - DNA, 22 bp, Artificial Sequence
  chemically synthesized
tatatatttagaaggtatgtac

SEQ ID NO: 49824 - DNA, 22 bp, Artificial Sequence
  chemically synthesized
agaaggtatgtactagttcgtt

SEQ ID NO: 49825 - DNA, 22 bp, Artificial Sequence
  chemically synthesized
gaaggtatgtactagttcgtta

SEQ ID NO: 49826 - DNA, 22 bp, Artificial Sequence
  chemically synthesized
gttcgttatcatgctgcttata

SEQ ID NO: 49827 - DNA, 22 bp, Artificial Sequence
  chemically synthesized
gttatcatgctgcttataaaga

SEQ ID NO: 49828 - DNA, 22 bp, Artificial Sequence
  chemically synthesized
tcatgctgcttataaagacata

SEQ ID NO: 49829 - DNA, 22 bp, Artificial Sequence
  chemically synthesized
cttataaagacatacctgagac

SEQ ID NO: 49830 - DNA, 22 bp, Artificial Sequence
  chemically synthesized
ataaagacatacctgagactgg

SEQ ID NO: 49831 - DNA, 22 bp, Artificial Sequence
  chemically synthesized
taaagacatacctgagactggg

SEQ ID NO: 49832 - DNA, 22 bp, Artificial Sequence
  chemically synthesized
agactgggtaatttataaggaa

SEQ ID NO: 49833 - DNA, 22 bp, Artificial Sequence
  chemically synthesized
ggtaatttataaggaaaaaacg

SEQ ID NO: 49834 - DNA, 22 bp, Artificial Sequence
  chemically synthesized
ataaggaaaaaacgtttaattg

SEQ ID NO: 49835 - DNA, 22 bp, Artificial Sequence
  chemically synthesized
taaggaaaaaacgtttaattgt

SEQ ID NO: 49836 - DNA, 22 bp, Artificial Sequence
  chemically synthesized
aattgtctcacagttccacagg

SEQ ID NO: 49837 - DNA, 22 bp, Artificial Sequence
  chemically synthesized
attgtctcacagttccacaggg

SEQ ID NO: 49838 - DNA, 22 bp, Artificial Sequence
  chemically synthesized
tctcacagttccacagggctgg

SEQ ID NO: 49839 - DNA, 22 bp, Artificial Sequence
  chemically synthesized
acagttccacagggctggggag

SEQ ID NO: 49840 - DNA, 22 bp, Artificial Sequence
  chemically synthesized
cacagggctggggaggcctcgg

SEQ ID NO: 49841 - DNA, 22 bp, Artificial Sequence
  chemically synthesized
gggaggcctcgggaaacttaca

SEQ ID NO: 49842 - DNA, 22 bp, Artificial Sequence
  chemically synthesized
gggaaacttacaatcatggcag

SEQ ID NO: 49843 - DNA, 22 bp, Artificial Sequence
  chemically synthesized
acaatcatggcagaagaagaaa

SEQ ID NO: 49844 - DNA, 22 bp, Artificial Sequence
  chemically synthesized
caatcatggcagaagaagaaac

SEQ ID NO: 49845 - DNA, 22 bp, Artificial Sequence
  chemically synthesized
cttcacatggcagcagcaagta

SEQ ID NO: 49846 - DNA, 22 bp, Artificial Sequence
  chemically synthesized
ttcacatggcagcagcaagtag

SEQ ID NO: 49847 - DNA, 22 bp, Artificial Sequence
  chemically synthesized
cacatggcagcagcaagtagaa

SEQ ID NO: 49848 - DNA, 22 bp, Artificial Sequence
  chemically synthesized
acatggcagcagcaagtagaag

SEQ ID NO: 49849 - DNA, 22 bp, Artificial Sequence
  chemically synthesized
ataaaaccatcagatcttgtaa

SEQ ID NO: 49850 - DNA, 22 bp, Artificial Sequence
  chemically synthesized
taaaaccatcagatcttgtaag

SEQ ID NO: 49851 - DNA, 22 bp, Artificial Sequence
  chemically synthesized
gtaagaactcactatcacgaga

SEQ ID NO: 49852 - DNA, 22 bp, Artificial Sequence
  chemically synthesized
taagaactcactatcacgagaa

SEQ ID NO: 49853 - DNA, 22 bp, Artificial Sequence
  chemically synthesized
actatcacgagaagagcatgag

SEQ ID NO: 49854 - DNA, 22 bp, Artificial Sequence
  chemically synthesized
tcacgagaagagcatgagagta

SEQ ID NO: 49855 - DNA, 22 bp, Artificial Sequence
  chemically synthesized
ctctatgattcaattacctccc

SEQ ID NO: 49856 - DNA, 22 bp, Artificial Sequence
  chemically synthesized
tatgattcaattacctccctcc

SEQ ID NO: 49857 - DNA, 22 bp, Artificial Sequence
  chemically synthesized
tgattcaattacctccctccaa

SEQ ID NO: 49858 - DNA, 22 bp, Artificial Sequence
  chemically synthesized
aattacctccctccaaatccct

SEQ ID NO: 49859 - DNA, 22 bp, Artificial Sequence
  chemically synthesized
cctccctccaaatccctcccac

SEQ ID NO: 49860 - DNA, 22 bp, Artificial Sequence
  chemically synthesized
cctccaaatccctcccacaaca

SEQ ID NO: 49861 - DNA, 22 bp, Artificial Sequence
  chemically synthesized
caaatccctcccacaacacgtg

SEQ ID NO: 49862 - DNA, 22 bp, Artificial Sequence
  chemically synthesized
ccacaacacgtgaggattatgg

SEQ ID NO: 49863 - DNA, 22 bp, Artificial Sequence
  chemically synthesized
tgggaactacaattcaagatga

SEQ ID NO: 49864 - DNA, 22 bp, Artificial Sequence
  chemically synthesized
caattcaagatgagatttgggt

SEQ ID NO: 49865 - DNA, 22 bp, Artificial Sequence
  chemically synthesized
aagatgagatttgggtggggac

SEQ ID NO: 49866 - DNA, 22 bp, Artificial Sequence
  chemically synthesized
gggtggggacacagtcaagctg

SEQ ID NO: 49867 - DNA, 22 bp, Artificial Sequence
  chemically synthesized
ggtggggacacagtcaagctgt

SEQ ID NO: 49868 - DNA, 22 bp, Artificial Sequence
  chemically synthesized
tatcagggtacaagctcgggtt

SEQ ID NO: 49869 - DNA, 22 bp, Artificial Sequence
  chemically synthesized
gggttccttacatatgtatgtt

SEQ ID NO: 49870 - DNA, 22 bp, Artificial Sequence
  chemically synthesized
cttacatatgtatgttgcatag

SEQ ID NO: 49871 - DNA, 22 bp, Artificial Sequence
  chemically synthesized
acatatgtatgttgcatagtgg

SEQ ID NO: 49872 - DNA, 22 bp, Artificial Sequence
  chemically synthesized
catatgtatgttgcatagtggt

SEQ ID NO: 49873 - DNA, 22 bp, Artificial Sequence
  chemically synthesized
catagtggtgaagtctgagctt

SEQ ID NO: 49874 - DNA, 22 bp, Artificial Sequence
  chemically synthesized
agcttttagtggaccatcacct

SEQ ID NO: 49875 - DNA, 22 bp, Artificial Sequence
  chemically synthesized
ttagtggaccatcacctgaaaa

SEQ ID NO: 49876 - DNA, 22 bp, Artificial Sequence
  chemically synthesized
tagtggaccatcacctgaaaag

SEQ ID NO: 49877 - DNA, 22 bp, Artificial Sequence
  chemically synthesized
agtggaccatcacctgaaaagt

SEQ ID NO: 49878 - DNA, 22 bp, Artificial Sequence
  chemically synthesized
gtggaccatcacctgaaaagtg

SEQ ID NO: 49879 - DNA, 22 bp, Artificial Sequence
  chemically synthesized
aaaagtgaatgttgtatccaat

SEQ ID NO: 49880 - DNA, 22 bp, Artificial Sequence
  chemically synthesized
tatccaatccgtagtttttcag

SEQ ID NO: 49881 - DNA, 22 bp, Artificial Sequence
  chemically synthesized
ttcagtcctcaccatactccta

SEQ ID NO: 49882 - DNA, 22 bp, Artificial Sequence
  chemically synthesized
tcagtcctcaccatactcctat

SEQ ID NO: 49883 - DNA, 22 bp, Artificial Sequence
  chemically synthesized
cagtcctcaccatactcctatc

SEQ ID NO: 49884 - DNA, 22 bp, Artificial Sequence
  chemically synthesized
agtcctcaccatactcctatcc

SEQ ID NO: 49885 - DNA, 22 bp, Artificial Sequence
  chemically synthesized
accatactcctatcctcccacc

SEQ ID NO: 49886 - DNA, 22 bp, Artificial Sequence
  chemically synthesized
ctatcctcccacctttctctag

SEQ ID NO: 49887 - DNA, 22 bp, Artificial Sequence
  chemically synthesized
tcctcccacctttctctagtct

SEQ ID NO: 49888 - DNA, 22 bp, Artificial Sequence
  chemically synthesized
ccacctttctctagtctcaagt

SEQ ID NO: 49889 - DNA, 22 bp, Artificial Sequence
  chemically synthesized
tctctagtctcaagtgtctatt

SEQ ID NO: 49890 - DNA, 22 bp, Artificial Sequence
  chemically synthesized
ctctagtctcaagtgtctatta

SEQ ID NO: 49891 - DNA, 22 bp, Artificial Sequence
  chemically synthesized
tctagtctcaagtgtctattat

SEQ ID NO: 49892 - DNA, 22 bp, Artificial Sequence
  chemically synthesized
tagtctcaagtgtctattattt

SEQ ID NO: 49893 - DNA, 22 bp, Artificial Sequence
  chemically synthesized
gtctcaagtgtctattatttca

SEQ ID NO: 49894 - DNA, 22 bp, Artificial Sequence
  chemically synthesized
aagtgtctattatttcattcta

SEQ ID NO: 49895 - DNA, 22 bp, Artificial Sequence
  chemically synthesized
ttatttcattctatatgtctat

SEQ ID NO: 49896 - DNA, 22 bp, Artificial Sequence
  chemically synthesized
tttcattctatatgtctatgct

SEQ ID NO: 49897 - DNA, 22 bp, Artificial Sequence
  chemically synthesized
cattctatatgtctatgcttac

SEQ ID NO: 49898 - DNA, 22 bp, Artificial Sequence
  chemically synthesized
attctatatgtctatgcttact

SEQ ID NO: 49899 - DNA, 22 bp, Artificial Sequence
  chemically synthesized
tatatgtctatgcttactcatc

SEQ ID NO: 49900 - DNA, 22 bp, Artificial Sequence
  chemically synthesized
tatgtctatgcttactcatcgt

SEQ ID NO: 49901 - DNA, 22 bp, Artificial Sequence
  chemically synthesized
tgcttactcatcgtttagctcc

SEQ ID NO: 49902 - DNA, 22 bp, Artificial Sequence
  chemically synthesized
actcatcgtttagctcccactt

SEQ ID NO: 49903 - DNA, 22 bp, Artificial Sequence
  chemically synthesized
ctcatcgtttagctcccacttg

SEQ ID NO: 49904 - DNA, 22 bp, Artificial Sequence
  chemically synthesized
atcgtttagctcccacttggct

SEQ ID NO: 49905 - DNA, 22 bp, Artificial Sequence
  chemically synthesized
agctcccacttggctctcacta

SEQ ID NO: 49906 - DNA, 22 bp, Artificial Sequence
  chemically synthesized
gctcccacttggctctcactaa

SEQ ID NO: 49907 - DNA, 22 bp, Artificial Sequence
  chemically synthesized
ccacttggctctcactaaatga

SEQ ID NO: 49908 - DNA, 22 bp, Artificial Sequence
  chemically synthesized
ggctctcactaaatgagaacat

SEQ ID NO: 49909 - DNA, 22 bp, Artificial Sequence
  chemically synthesized
gctctcactaaatgagaacata

SEQ ID NO: 49910 - DNA, 22 bp, Artificial Sequence
  chemically synthesized
tcactaaatgagaacatactgt

SEQ ID NO: 49911 - DNA, 22 bp, Artificial Sequence
  chemically synthesized
actaaatgagaacatactgtgt

SEQ ID NO: 49912 - DNA, 22 bp, Artificial Sequence
  chemically synthesized
aatgagaacatactgtgtttga

SEQ ID NO: 49913 - DNA, 22 bp, Artificial Sequence
  chemically synthesized
tgtttgactttctgtttctgag

SEQ ID NO: 49914 - DNA, 22 bp, Artificial Sequence
  chemically synthesized
gactttctgtttctgagttatt

SEQ ID NO: 49915 - DNA, 22 bp, Artificial Sequence
  chemically synthesized
actttctgtttctgagttattt

SEQ ID NO: 49916 - DNA, 22 bp, Artificial Sequence
  chemically synthesized
tctgtttctgagttatttcact

SEQ ID NO: 49917 - DNA, 22 bp, Artificial Sequence
  chemically synthesized
ctgtttctgagttatttcactg

SEQ ID NO: 49918 - DNA, 22 bp, Artificial Sequence
  chemically synthesized
tgtttctgagttatttcactga

SEQ ID NO: 49919 - DNA, 22 bp, Artificial Sequence
  chemically synthesized
tttctgagttatttcactgagg

SEQ ID NO: 49920 - DNA, 22 bp, Artificial Sequence
  chemically synthesized
ctgagttatttcactgaggata

SEQ ID NO: 49921 - DNA, 22 bp, Artificial Sequence
  chemically synthesized
tgagttatttcactgaggataa

SEQ ID NO: 49922 - DNA, 22 bp, Artificial Sequence
  chemically synthesized
agttatttcactgaggataatg

SEQ ID NO: 49923 - DNA, 22 bp, Artificial Sequence
  chemically synthesized
tttcactgaggataatgtcctc

SEQ ID NO: 49924 - DNA, 22 bp, Artificial Sequence
  chemically synthesized
cactgaggataatgtcctccag

SEQ ID NO: 49925 - DNA, 22 bp, Artificial Sequence
  chemically synthesized
actgaggataatgtcctccagt

SEQ ID NO: 49926 - DNA, 22 bp, Artificial Sequence
  chemically synthesized
aggataatgtcctccagttcta

SEQ ID NO: 49927 - DNA, 22 bp, Artificial Sequence
  chemically synthesized
cagttctaaccatgtttctaga

SEQ ID NO: 49928 - DNA, 22 bp, Artificial Sequence
  chemically synthesized
taaccatgtttctagagaagac

SEQ ID NO: 49929 - DNA, 22 bp, Artificial Sequence
  chemically synthesized
accatgtttctagagaagacat

SEQ ID NO: 49930 - DNA, 22 bp, Artificial Sequence
  chemically synthesized
ctagagaagacatgatttcatt

SEQ ID NO: 49931 - DNA, 22 bp, Artificial Sequence
  chemically synthesized
tagagaagacatgatttcattc

SEQ ID NO: 49932 - DNA, 22 bp, Artificial Sequence
  chemically synthesized
gagaagacatgatttcattctt

SEQ ID NO: 49933 - DNA, 22 bp, Artificial Sequence
  chemically synthesized
cattcttttttatggctgagta

SEQ ID NO: 49934 - DNA, 22 bp, Artificial Sequence
  chemically synthesized
attcttttttatggctgagtaa

SEQ ID NO: 49935 - DNA, 22 bp, Artificial Sequence
  chemically synthesized
ttttttatggctgagtaatata

SEQ ID NO: 49936 - DNA, 22 bp, Artificial Sequence
  chemically synthesized
ttttatggctgagtaatatata

SEQ ID NO: 49937 - DNA, 22 bp, Artificial Sequence
  chemically synthesized
tttatggctgagtaatatatat

SEQ ID NO: 49938 - DNA, 22 bp, Artificial Sequence
  chemically synthesized
ttatggctgagtaatatatatg

SEQ ID NO: 49939 - DNA, 22 bp, Artificial Sequence
  chemically synthesized
tatggctgagtaatatatatgt

SEQ ID NO: 49940 - DNA, 22 bp, Artificial Sequence
  chemically synthesized
atggctgagtaatatatatgta

SEQ ID NO: 49941 - DNA, 22 bp, Artificial Sequence
  chemically synthesized
tggctgagtaatatatatgtat

SEQ ID NO: 49942 - DNA, 22 bp, Artificial Sequence
  chemically synthesized
agtaatatatatgtatataaat

SEQ ID NO: 49943 - DNA, 22 bp, Artificial Sequence
  chemically synthesized
tctttatccaatcgtccattgg

SEQ ID NO: 49944 - DNA, 22 bp, Artificial Sequence
  chemically synthesized
ctttatccaatcgtccattggt

SEQ ID NO: 49945 - DNA, 22 bp, Artificial Sequence
  chemically synthesized
tttatccaatcgtccattggta

SEQ ID NO: 49946 - DNA, 22 bp, Artificial Sequence
  chemically synthesized
tatccaatcgtccattggtaga

SEQ ID NO: 49947 - DNA, 22 bp, Artificial Sequence
  chemically synthesized
atccaatcgtccattggtagac

SEQ ID NO: 49948 - DNA, 22 bp, Artificial Sequence
  chemically synthesized
tccaatcgtccattggtagaca

SEQ ID NO: 49949 - DNA, 22 bp, Artificial Sequence
  chemically synthesized
gtagacatttaggttgattcca

SEQ ID NO: 49950 - DNA, 22 bp, Artificial Sequence
  chemically synthesized
aggttgattccatatctttgct

SEQ ID NO: 49951 - DNA, 22 bp, Artificial Sequence
  chemically synthesized
ggttgattccatatctttgcta

SEQ ID NO: 49952 - DNA, 22 bp, Artificial Sequence
  chemically synthesized
attccatatctttgctattggg

SEQ ID NO: 49953 - DNA, 22 bp, Artificial Sequence
  chemically synthesized
catatctttgctattgggaaca

SEQ ID NO: 49954 - DNA, 22 bp, Artificial Sequence
  chemically synthesized
tgctattgggaacagtgctact

SEQ ID NO: 49955 - DNA, 22 bp, Artificial Sequence
  chemically synthesized
gctattgggaacagtgctactt

SEQ ID NO: 49956 - DNA, 22 bp, Artificial Sequence
  chemically synthesized
ctattgggaacagtgctacttt

SEQ ID NO: 49957 - DNA, 22 bp, Artificial Sequence
  chemically synthesized
ttgggaacagtgctactttgaa

SEQ ID NO: 49958 - DNA, 22 bp, Artificial Sequence
  chemically synthesized
ggaacagtgctactttgaacat

SEQ ID NO: 49959 - DNA, 22 bp, Artificial Sequence
  chemically synthesized
ctttgaacatactaatgcagat

SEQ ID NO: 49960 - DNA, 22 bp, Artificial Sequence
  chemically synthesized
tgaacatactaatgcagatatc

SEQ ID NO: 49961 - DNA, 22 bp, Artificial Sequence
  chemically synthesized
gaacatactaatgcagatatct

SEQ ID NO: 49962 - DNA, 22 bp, Artificial Sequence
  chemically synthesized
aacatactaatgcagatatctt

SEQ ID NO: 49963 - DNA, 22 bp, Artificial Sequence
  chemically synthesized
atgcagatatcttttttaatat

SEQ ID NO: 49964 - DNA, 22 bp, Artificial Sequence
  chemically synthesized
ttttaatatgatctctttcact

SEQ ID NO: 49965 - DNA, 22 bp, Artificial Sequence
  chemically synthesized
tttaatatgatctctttcactt

SEQ ID NO: 49966 - DNA, 22 bp, Artificial Sequence
  chemically synthesized
ttaatatgatctctttcacttt

SEQ ID NO: 49967 - DNA, 22 bp, Artificial Sequence
  chemically synthesized
taatatgatctctttcactttg

SEQ ID NO: 49968 - DNA, 22 bp, Artificial Sequence
  chemically synthesized
aatatgatctctttcactttgg

SEQ ID NO: 49969 - DNA, 22 bp, Artificial Sequence
  chemically synthesized
atatgatctctttcactttggg

SEQ ID NO: 49970 - DNA, 22 bp, Artificial Sequence
  chemically synthesized
tttcactttgggtccataccca

SEQ ID NO: 49971 - DNA, 22 bp, Artificial Sequence
  chemically synthesized
tcactttgggtccatacccagt

SEQ ID NO: 49972 - DNA, 22 bp, Artificial Sequence
  chemically synthesized
cactttgggtccatacccagta

SEQ ID NO: 49973 - DNA, 22 bp, Artificial Sequence
  chemically synthesized
actttgggtccatacccagtag

SEQ ID NO: 49974 - DNA, 22 bp, Artificial Sequence
  chemically synthesized
tgggtccatacccagtagtggg

SEQ ID NO: 49975 - DNA, 22 bp, Artificial Sequence
  chemically synthesized
gggtccatacccagtagtggga

SEQ ID NO: 49976 - DNA, 22 bp, Artificial Sequence
  chemically synthesized
ggtccatacccagtagtgggat

SEQ ID NO: 49977 - DNA, 22 bp, Artificial Sequence
  chemically synthesized
caggattgaatggtagttctgt

SEQ ID NO: 49978 - DNA, 22 bp, Artificial Sequence
  chemically synthesized
aatggtagttctgtttctagtt

SEQ ID NO: 49979 - DNA, 22 bp, Artificial Sequence
  chemically synthesized
tgtttctagttctttaagaaat

SEQ ID NO: 49980 - DNA, 22 bp, Artificial Sequence
  chemically synthesized
tttctagttctttaagaaatct

SEQ ID NO: 49981 - DNA, 22 bp, Artificial Sequence
  chemically synthesized
ctagttctttaagaaatcttca

SEQ ID NO: 49982 - DNA, 22 bp, Artificial Sequence
  chemically synthesized
tagttctttaagaaatcttcat

SEQ ID NO: 49983 - DNA, 22 bp, Artificial Sequence
  chemically synthesized
gttctttaagaaatcttcatgc

SEQ ID NO: 49984 - DNA, 22 bp, Artificial Sequence
  chemically synthesized
tttaagaaatcttcatgctgtc

SEQ ID NO: 49985 - DNA, 22 bp, Artificial Sequence
  chemically synthesized
taagaaatcttcatgctgtctt

SEQ ID NO: 49986 - DNA, 22 bp, Artificial Sequence
  chemically synthesized
aagaaatcttcatgctgtcttc

SEQ ID NO: 49987 - DNA, 22 bp, Artificial Sequence
  chemically synthesized
agaaatcttcatgctgtcttcc

SEQ ID NO: 49988 - DNA, 22 bp, Artificial Sequence
  chemically synthesized
catgctgtcttccataaagttt

SEQ ID NO: 49989 - DNA, 22 bp, Artificial Sequence
  chemically synthesized
atgctgtcttccataaagtttg

SEQ ID NO: 49990 - DNA, 22 bp, Artificial Sequence
  chemically synthesized
tcttccataaagtttgtactaa

SEQ ID NO: 49991 - DNA, 22 bp, Artificial Sequence
  chemically synthesized
ccataaagtttgtactaattta

SEQ ID NO: 49992 - DNA, 22 bp, Artificial Sequence
  chemically synthesized
cataaagtttgtactaatttac

SEQ ID NO: 49993 - DNA, 22 bp, Artificial Sequence
  chemically synthesized
gtactaatttacattcttacca

SEQ ID NO: 49994 - DNA, 22 bp, Artificial Sequence
  chemically synthesized
tactaatttacattcttaccaa

SEQ ID NO: 49995 - DNA, 22 bp, Artificial Sequence
  chemically synthesized
atttacattcttaccaacagtg

SEQ ID NO: 49996 - DNA, 22 bp, Artificial Sequence
  chemically synthesized
acattcttaccaacagtgtata

SEQ ID NO: 49997 - DNA, 22 bp, Artificial Sequence
  chemically synthesized
cattcttaccaacagtgtataa

SEQ ID NO: 49998 - DNA, 22 bp, Artificial Sequence
  chemically synthesized
ttaccaacagtgtataagcatt

SEQ ID NO: 49999 - DNA, 22 bp, Artificial Sequence
  chemically synthesized
accaacagtgtataagcatttt

SEQ ID NO: 50000 - DNA, 22 bp, Artificial Sequence
  chemically synthesized
ccaacagtgtataagcattttc

SEQ ID NO: 50001 - DNA, 22 bp, Artificial Sequence
  chemically synthesized
tcttgtctccacatcctcacca

SEQ ID NO: 50002 - DNA, 22 bp, Artificial Sequence
  chemically synthesized
cttgtctccacatcctcaccaa

SEQ ID NO: 50003 - DNA, 22 bp, Artificial Sequence
  chemically synthesized
ttgtctccacatcctcaccaac

SEQ ID NO: 50004 - DNA, 22 bp, Artificial Sequence
  chemically synthesized
gtctccacatcctcaccaacat

SEQ ID NO: 50005 - DNA, 22 bp, Artificial Sequence
  chemically synthesized
tctccacatcctcaccaacatc

SEQ ID NO: 50006 - DNA, 22 bp, Artificial Sequence
  chemically synthesized
cacatcctcaccaacatctgct

SEQ ID NO: 50007 - DNA, 22 bp, Artificial Sequence
  chemically synthesized
accaacatctgctgtttttgaa

SEQ ID NO: 50008 - DNA, 22 bp, Artificial Sequence
  chemically synthesized
ctgtttttgaactttataatga

SEQ ID NO: 50009 - DNA, 22 bp, Artificial Sequence
  chemically synthesized
tttttgaactttataatgatag

SEQ ID NO: 50010 - DNA, 22 bp, Artificial Sequence
  chemically synthesized
ttgaactttataatgatagcca

SEQ ID NO: 50011 - DNA, 22 bp, Artificial Sequence
  chemically synthesized
tgaactttataatgatagccat

SEQ ID NO: 50012 - DNA, 22 bp, Artificial Sequence
  chemically synthesized
gaactttataatgatagccatt

SEQ ID NO: 50013 - DNA, 22 bp, Artificial Sequence
  chemically synthesized
aactttataatgatagccattc

SEQ ID NO: 50014 - DNA, 22 bp, Artificial Sequence
  chemically synthesized
tataatgatagccattctgact

SEQ ID NO: 50015 - DNA, 22 bp, Artificial Sequence
  chemically synthesized
ataatgatagccattctgactg

SEQ ID NO: 50016 - DNA, 22 bp, Artificial Sequence
  chemically synthesized
taatgatagccattctgactgg

SEQ ID NO: 50017 - DNA, 22 bp, Artificial Sequence
  chemically synthesized
tgactggcataaggaggtatca

SEQ ID NO: 50018 - DNA, 22 bp, Artificial Sequence
  chemically synthesized
actggcataaggaggtatcata

SEQ ID NO: 50019 - DNA, 22 bp, Artificial Sequence
  chemically synthesized
gcataaggaggtatcatatggt

SEQ ID NO: 50020 - DNA, 22 bp, Artificial Sequence
  chemically synthesized
taatttgcattctctgattatt

SEQ ID NO: 50021 - DNA, 22 bp, Artificial Sequence
  chemically synthesized
aatttgcattctctgattatta

SEQ ID NO: 50022 - DNA, 22 bp, Artificial Sequence
  chemically synthesized
atttgcattctctgattattag

SEQ ID NO: 50023 - DNA, 22 bp, Artificial Sequence
  chemically synthesized
gcattctctgattattagtgat

SEQ ID NO: 50024 - DNA, 22 bp, Artificial Sequence
  chemically synthesized
cattctctgattattagtgatg

SEQ ID NO: 50025 - DNA, 22 bp, Artificial Sequence
  chemically synthesized
tctgattattagtgatgttgaa

SEQ ID NO: 50026 - DNA, 22 bp, Artificial Sequence
  chemically synthesized
tgattattagtgatgttgaact

SEQ ID NO: 50027 - DNA, 22 bp, Artificial Sequence
  chemically synthesized
attattagtgatgttgaacttt

SEQ ID NO: 50028 - DNA, 22 bp, Artificial Sequence
  chemically synthesized
ttagtgatgttgaacttttttt

SEQ ID NO: 50029 - DNA, 22 bp, Artificial Sequence
  chemically synthesized
gtgatgttgaacttttttttga

SEQ ID NO: 50030 - DNA, 22 bp, Artificial Sequence
  chemically synthesized
aacttttttttgacgtttattg

SEQ ID NO: 50031 - DNA, 22 bp, Artificial Sequence
  chemically synthesized
ttttttgacgtttattggccac

SEQ ID NO: 50032 - DNA, 22 bp, Artificial Sequence
  chemically synthesized
tttttgacgtttattggccact

SEQ ID NO: 50033 - DNA, 22 bp, Artificial Sequence
  chemically synthesized
ttttgacgtttattggccactt

SEQ ID NO: 50034 - DNA, 22 bp, Artificial Sequence
  chemically synthesized
tttgacgtttattggccacttg

SEQ ID NO: 50035 - DNA, 22 bp, Artificial Sequence
  chemically synthesized
ttgacgtttattggccacttgt

SEQ ID NO: 50036 - DNA, 22 bp, Artificial Sequence
  chemically synthesized
tgacgtttattggccacttgta

SEQ ID NO: 50037 - DNA, 22 bp, Artificial Sequence
  chemically synthesized
gacgtttattggccacttgtat

SEQ ID NO: 50038 - DNA, 22 bp, Artificial Sequence
  chemically synthesized
acgtttattggccacttgtatg

SEQ ID NO: 50039 - DNA, 22 bp, Artificial Sequence
  chemically synthesized
attggccacttgtatgtcttct

SEQ ID NO: 50040 - DNA, 22 bp, Artificial Sequence
  chemically synthesized
ttggccacttgtatgtcttctt

SEQ ID NO: 50041 - DNA, 22 bp, Artificial Sequence
  chemically synthesized
gccacttgtatgtcttcttttg

SEQ ID NO: 50042 - DNA, 22 bp, Artificial Sequence
  chemically synthesized
gtatgtcttcttttggaaaatg

SEQ ID NO: 50043 - DNA, 22 bp, Artificial Sequence
  chemically synthesized
tatgtcttcttttggaaaatgt

SEQ ID NO: 50044 - DNA, 22 bp, Artificial Sequence
  chemically synthesized
cttttggaaaatgtctgctcag

SEQ ID NO: 50045 - DNA, 22 bp, Artificial Sequence
  chemically synthesized
ttttggaaaatgtctgctcagg

SEQ ID NO: 50046 - DNA, 22 bp, Artificial Sequence
  chemically synthesized
ttggaaaatgtctgctcaggac

SEQ ID NO: 50047 - DNA, 22 bp, Artificial Sequence
  chemically synthesized
tggaaaatgtctgctcaggacc

SEQ ID NO: 50048 - DNA, 22 bp, Artificial Sequence
  chemically synthesized
ggaaaatgtctgctcaggacct

SEQ ID NO: 50049 - DNA, 22 bp, Artificial Sequence
  chemically synthesized
gaaaatgtctgctcaggacctg

SEQ ID NO: 50050 - DNA, 22 bp, Artificial Sequence
  chemically synthesized
ctcaggacctgagctcactgta

SEQ ID NO: 50051 - DNA, 22 bp, Artificial Sequence
  chemically synthesized
aggacctgagctcactgtattt

SEQ ID NO: 50052 - DNA, 22 bp, Artificial Sequence
  chemically synthesized
agctcactgtatttgtcagggt

SEQ ID NO: 50053 - DNA, 22 bp, Artificial Sequence
  chemically synthesized
actgtatttgtcagggttccct

SEQ ID NO: 50054 - DNA, 22 bp, Artificial Sequence
  chemically synthesized
tatttgtcagggttccctagag

SEQ ID NO: 50055 - DNA, 22 bp, Artificial Sequence
  chemically synthesized
gtcagggttccctagagagaca

SEQ ID NO: 50056 - DNA, 22 bp, Artificial Sequence
  chemically synthesized
tcagggttccctagagagacag

SEQ ID NO: 50057 - DNA, 22 bp, Artificial Sequence
  chemically synthesized
cctagagagacagaactaatag

SEQ ID NO: 50058 - DNA, 22 bp, Artificial Sequence
  chemically synthesized
gagagacagaactaataggaga

SEQ ID NO: 50059 - DNA, 22 bp, Artificial Sequence
  chemically synthesized
ataggagatagatagatagata

SEQ ID NO: 50060 - DNA, 22 bp, Artificial Sequence
  chemically synthesized
agatataaaagggagtttatta

SEQ ID NO: 50061 - DNA, 22 bp, Artificial Sequence
  chemically synthesized
gatataaaagggagtttattaa

SEQ ID NO: 50062 - DNA, 22 bp, Artificial Sequence
  chemically synthesized
attaagtagtgttaacttacac

SEQ ID NO: 50063 - DNA, 22 bp, Artificial Sequence
  chemically synthesized
ttaagtagtgttaacttacaca

SEQ ID NO: 50064 - DNA, 22 bp, Artificial Sequence
  chemically synthesized
agtagtgttaacttacacaatc

SEQ ID NO: 50065 - DNA, 22 bp, Artificial Sequence
  chemically synthesized
acttacacaatcacaaggtccc

SEQ ID NO: 50066 - DNA, 22 bp, Artificial Sequence
  chemically synthesized
acacaatcacaaggtcccacaa

SEQ ID NO: 50067 - DNA, 22 bp, Artificial Sequence
  chemically synthesized
cacaatcacaaggtcccacaat

SEQ ID NO: 50068 - DNA, 22 bp, Artificial Sequence
  chemically synthesized
caagcagaggagcaaggaagcc

SEQ ID NO: 50069 - DNA, 22 bp, Artificial Sequence
  chemically synthesized
aaggacttggagtccaatgttt

SEQ ID NO: 50070 - DNA, 22 bp, Artificial Sequence
  chemically synthesized
ggagtccaatgtttgagggcag

SEQ ID NO: 50071 - DNA, 22 bp, Artificial Sequence
  chemically synthesized
gagtccaatgtttgagggcagg

SEQ ID NO: 50072 - DNA, 22 bp, Artificial Sequence
  chemically synthesized
gagggcaggaagcatccagcat

SEQ ID NO: 50073 - DNA, 22 bp, Artificial Sequence
  chemically synthesized
agggcaggaagcatccagcatg

SEQ ID NO: 50074 - DNA, 22 bp, Artificial Sequence
  chemically synthesized
ggaggctaagccagtccaggat

SEQ ID NO: 50075 - DNA, 22 bp, Artificial Sequence
  chemically synthesized
gaggctaagccagtccaggatt

SEQ ID NO: 50076 - DNA, 22 bp, Artificial Sequence
  chemically synthesized
agccagtccaggattttcacat

SEQ ID NO: 50077 - DNA, 22 bp, Artificial Sequence
  chemically synthesized
tcacatgttttttttctgcctg

SEQ ID NO: 50078 - DNA, 22 bp, Artificial Sequence
  chemically synthesized
cacatgttttttttctgcctgc

SEQ ID NO: 50079 - DNA, 22 bp, Artificial Sequence
  chemically synthesized
acatgttttttttctgcctgct

SEQ ID NO: 50080 - DNA, 22 bp, Artificial Sequence
  chemically synthesized
tttttctgcctgctttatatcc

SEQ ID NO: 50081 - DNA, 22 bp, Artificial Sequence
  chemically synthesized
ttttctgcctgctttatatcct

SEQ ID NO: 50082 - DNA, 22 bp, Artificial Sequence
  chemically synthesized
tttctgcctgctttatatcctg

SEQ ID NO: 50083 - DNA, 22 bp, Artificial Sequence
  chemically synthesized
ttctgcctgctttatatcctgg

SEQ ID NO: 50084 - DNA, 22 bp, Artificial Sequence
  chemically synthesized
tctgcctgctttatatcctggc

SEQ ID NO: 50085 - DNA, 22 bp, Artificial Sequence
  chemically synthesized
ctgcctgctttatatcctggcc

SEQ ID NO: 50086 - DNA, 22 bp, Artificial Sequence
  chemically synthesized
tgcctgctttatatcctggcca

SEQ ID NO: 50087 - DNA, 22 bp, Artificial Sequence
  chemically synthesized
cctgctttatatcctggccaca

SEQ ID NO: 50088 - DNA, 22 bp, Artificial Sequence
  chemically synthesized
ctttatatcctggccacactgg

SEQ ID NO: 50089 - DNA, 22 bp, Artificial Sequence
  chemically synthesized
tatatcctggccacactggcaa

SEQ ID NO: 50090 - DNA, 22 bp, Artificial Sequence
  chemically synthesized
atatcctggccacactggcaac

SEQ ID NO: 50091 - DNA, 22 bp, Artificial Sequence
  chemically synthesized
tatcctggccacactggcaact

SEQ ID NO: 50092 - DNA, 22 bp, Artificial Sequence
  chemically synthesized
gccacactggcaactgattaga

SEQ ID NO: 50093 - DNA, 22 bp, Artificial Sequence
  chemically synthesized
gcaactgattagatggtgccca

SEQ ID NO: 50094 - DNA, 22 bp, Artificial Sequence
  chemically synthesized
attagatggtgcccacccagat

SEQ ID NO: 50095 - DNA, 22 bp, Artificial Sequence
  chemically synthesized
gatggtgcccacccagattaag

SEQ ID NO: 50096 - DNA, 22 bp, Artificial Sequence
  chemically synthesized
agggtgggtctgcctttcccag

SEQ ID NO: 50097 - DNA, 22 bp, Artificial Sequence
  chemically synthesized
cctttcccagcccactgactaa

SEQ ID NO: 50098 - DNA, 22 bp, Artificial Sequence
  chemically synthesized
tcccagcccactgactaaaatg

SEQ ID NO: 50099 - DNA, 22 bp, Artificial Sequence
  chemically synthesized
cccagcccactgactaaaatgt

SEQ ID NO: 50100 - DNA, 22 bp, Artificial Sequence
  chemically synthesized
ccagcccactgactaaaatgtt

SEQ ID NO: 50101 - DNA, 22 bp, Artificial Sequence
  chemically synthesized
actaaaatgttaatctcctttg

SEQ ID NO: 50102 - DNA, 22 bp, Artificial Sequence
  chemically synthesized
aaatgttaatctcctttggcaa

SEQ ID NO: 50103 - DNA, 22 bp, Artificial Sequence
  chemically synthesized
atctcctttggcaataccctca

SEQ ID NO: 50104 - DNA, 22 bp, Artificial Sequence
  chemically synthesized
ctttggcaataccctcacagac

SEQ ID NO: 50105 - DNA, 22 bp, Artificial Sequence
  chemically synthesized
tggcaataccctcacagacaca

SEQ ID NO: 50106 - DNA, 22 bp, Artificial Sequence
  chemically synthesized
ggcaataccctcacagacacac

SEQ ID NO: 50107 - DNA, 22 bp, Artificial Sequence
  chemically synthesized
gcaataccctcacagacacact

SEQ ID NO: 50108 - DNA, 22 bp, Artificial Sequence
  chemically synthesized
acagacacactcaggatcaata

SEQ ID NO: 50109 - DNA, 22 bp, Artificial Sequence
  chemically synthesized
aggatcaatactttgcacactt

SEQ ID NO: 50110 - DNA, 22 bp, Artificial Sequence
  chemically synthesized
tgcacacttcaatccaatcaag

SEQ ID NO: 50111 - DNA, 22 bp, Artificial Sequence
  chemically synthesized
gcacacttcaatccaatcaagt

SEQ ID NO: 50112 - DNA, 22 bp, Artificial Sequence
  chemically synthesized
cacacttcaatccaatcaagtt

SEQ ID NO: 50113 - DNA, 22 bp, Artificial Sequence
  chemically synthesized
caatccaatcaagttgacactc

SEQ ID NO: 50114 - DNA, 22 bp, Artificial Sequence
  chemically synthesized
aatccaatcaagttgacactca

SEQ ID NO: 50115 - DNA, 22 bp, Artificial Sequence
  chemically synthesized
acactcagtattaaccatcaca

SEQ ID NO: 50116 - DNA, 22 bp, Artificial Sequence
  chemically synthesized
agtattaaccatcacaagtcca

SEQ ID NO: 50117 - DNA, 22 bp, Artificial Sequence
  chemically synthesized
accatcacaagtccatcgcttg

SEQ ID NO: 50118 - DNA, 22 bp, Artificial Sequence
  chemically synthesized
gtcaacttgagcctatacacat

SEQ ID NO: 50119 - DNA, 22 bp, Artificial Sequence
  chemically synthesized
tcaacttgagcctatacacatc

SEQ ID NO: 50120 - DNA, 22 bp, Artificial Sequence
  chemically synthesized
gagcctatacacatcccctgag

SEQ ID NO: 50121 - DNA, 22 bp, Artificial Sequence
  chemically synthesized
agcctatacacatcccctgagg

SEQ ID NO: 50122 - DNA, 22 bp, Artificial Sequence
  chemically synthesized
tacacatcccctgaggtcatac

SEQ ID NO: 50123 - DNA, 22 bp, Artificial Sequence
  chemically synthesized
aggtcatacattatcttcaaat

SEQ ID NO: 50124 - DNA, 22 bp, Artificial Sequence
  chemically synthesized
tcttcaaataaagacaacaata

SEQ ID NO: 50125 - DNA, 22 bp, Artificial Sequence
  chemically synthesized
caaataaagacaacaataagtc

SEQ ID NO: 50126 - DNA, 22 bp, Artificial Sequence
  chemically synthesized
aaataaagacaacaataagtca

SEQ ID NO: 50127 - DNA, 22 bp, Artificial Sequence
  chemically synthesized
tgcctaacatactaaaactatc

SEQ ID NO: 50128 - DNA, 22 bp, Artificial Sequence
  chemically synthesized
acatactaaaactatccttcgt

SEQ ID NO: 50129 - DNA, 22 bp, Artificial Sequence
  chemically synthesized
aaactatccttcgtgcaattga

SEQ ID NO: 50130 - DNA, 22 bp, Artificial Sequence
  chemically synthesized
tccttcgtgcaattgaaaatgc

SEQ ID NO: 50131 - DNA, 22 bp, Artificial Sequence
  chemically synthesized
cgtgcaattgaaaatgcaccaa

SEQ ID NO: 50132 - DNA, 22 bp, Artificial Sequence
  chemically synthesized
gtgcaattgaaaatgcaccaat

SEQ ID NO: 50133 - DNA, 22 bp, Artificial Sequence
  chemically synthesized
aaaatgcaccaatccccattgc

SEQ ID NO: 50134 - DNA, 22 bp, Artificial Sequence
  chemically synthesized
caaatgctattacataaactta

SEQ ID NO: 50135 - DNA, 22 bp, Artificial Sequence
  chemically synthesized
ttacataaacttaacaatactt

SEQ ID NO: 50136 - DNA, 22 bp, Artificial Sequence
  chemically synthesized
cataaacttaacaatacttaaa

SEQ ID NO: 50137 - DNA, 22 bp, Artificial Sequence
  chemically synthesized
aacaatacttaaatgctgatat

SEQ ID NO: 50138 - DNA, 22 bp, Artificial Sequence
  chemically synthesized
acaatacttaaatgctgatatg

SEQ ID NO: 50139 - DNA, 22 bp, Artificial Sequence
  chemically synthesized
aaatgctgatatgaagtcaata

SEQ ID NO: 50140 - DNA, 22 bp, Artificial Sequence
  chemically synthesized
aatgctgatatgaagtcaataa

SEQ ID NO: 50141 - DNA, 22 bp, Artificial Sequence
  chemically synthesized
atatgaagtcaataaatcttat

SEQ ID NO: 50142 - DNA, 22 bp, Artificial Sequence
  chemically synthesized
atgtcacatgataaaggaaaaa

SEQ ID NO: 50143 - DNA, 22 bp, Artificial Sequence
  chemically synthesized
tgtcacatgataaaggaaaaag

SEQ ID NO: 50144 - DNA, 22 bp, Artificial Sequence
  chemically synthesized
tcttagtacaagtgtatacaga

SEQ ID NO: 50145 - DNA, 22 bp, Artificial Sequence
  chemically synthesized
cttagtacaagtgtatacagac

SEQ ID NO: 50146 - DNA, 22 bp, Artificial Sequence
  chemically synthesized
ttagtacaagtgtatacagaca

SEQ ID NO: 50147 - DNA, 22 bp, Artificial Sequence
  chemically synthesized
agtacaagtgtatacagacacg

SEQ ID NO: 50148 - DNA, 22 bp, Artificial Sequence
  chemically synthesized
gtacaagtgtatacagacacga

SEQ ID NO: 50149 - DNA, 22 bp, Artificial Sequence
  chemically synthesized
ttaacaaaagaaggaggaaata

SEQ ID NO: 50150 - DNA, 22 bp, Artificial Sequence
  chemically synthesized
taacaaaagaaggaggaaatac

SEQ ID NO: 50151 - DNA, 22 bp, Artificial Sequence
  chemically synthesized
aacaaaagaaggaggaaatact

SEQ ID NO: 50152 - DNA, 22 bp, Artificial Sequence
  chemically synthesized
acaaaagaaggaggaaatactc

SEQ ID NO: 50153 - DNA, 22 bp, Artificial Sequence
  chemically synthesized
atgacaattacagtccttgtat

SEQ ID NO: 50154 - DNA, 22 bp, Artificial Sequence
  chemically synthesized
cagtccttgtatctgcaattgg

SEQ ID NO: 50155 - DNA, 22 bp, Artificial Sequence
  chemically synthesized
gtatctgcaattggtcacgtga

SEQ ID NO: 50156 - DNA, 22 bp, Artificial Sequence
  chemically synthesized
tatctgcaattggtcacgtgat

SEQ ID NO: 50157 - DNA, 22 bp, Artificial Sequence
  chemically synthesized
caattggtcacgtgatcgtagc

SEQ ID NO: 50158 - DNA, 22 bp, Artificial Sequence
  chemically synthesized
gtcacgtgatcgtagctggtat

SEQ ID NO: 50159 - DNA, 22 bp, Artificial Sequence
  chemically synthesized
gtattgatgactaccttcttct

SEQ ID NO: 50160 - DNA, 22 bp, Artificial Sequence
  chemically synthesized
atgactaccttcttctgctaca

SEQ ID NO: 50161 - DNA, 22 bp, Artificial Sequence
  chemically synthesized
ccttcttctgctacatattctg

SEQ ID NO: 50162 - DNA, 22 bp, Artificial Sequence
  chemically synthesized
cttctgctacatattctgtatt

SEQ ID NO: 50163 - DNA, 22 bp, Artificial Sequence
  chemically synthesized
ttctgctacatattctgtattc

SEQ ID NO: 50164 - DNA, 22 bp, Artificial Sequence
  chemically synthesized
ctgctacatattctgtattccc

SEQ ID NO: 50165 - DNA, 22 bp, Artificial Sequence
  chemically synthesized
tgctacatattctgtattccct

SEQ ID NO: 50166 - DNA, 22 bp, Artificial Sequence
  chemically synthesized
ctacatattctgtattcccttt

SEQ ID NO: 50167 - DNA, 22 bp, Artificial Sequence
  chemically synthesized
catattctgtattccctttgcc

SEQ ID NO: 50168 - DNA, 22 bp, Artificial Sequence
  chemically synthesized
tgtattccctttgccctcagca

SEQ ID NO: 50169 - DNA, 22 bp, Artificial Sequence
  chemically synthesized
tattccctttgccctcagcaag

SEQ ID NO: 50170 - DNA, 22 bp, Artificial Sequence
  chemically synthesized
cctttgccctcagcaagcacct

SEQ ID NO: 50171 - DNA, 22 bp, Artificial Sequence
  chemically synthesized
tgccctcagcaagcacctcagc

SEQ ID NO: 50172 - DNA, 22 bp, Artificial Sequence
  chemically synthesized
gccctcagcaagcacctcagca

SEQ ID NO: 50173 - DNA, 22 bp, Artificial Sequence
  chemically synthesized
ccctcagcaagcacctcagcag

SEQ ID NO: 50174 - DNA, 22 bp, Artificial Sequence
  chemically synthesized
agcaagcacctcagcaggtctt

SEQ ID NO: 50175 - DNA, 22 bp, Artificial Sequence
  chemically synthesized
agcaggtcttgtcttttttttt

SEQ ID NO: 50176 - DNA, 22 bp, Artificial Sequence
  chemically synthesized
gtcttttttttttttttttttc

SEQ ID NO: 50177 - DNA, 22 bp, Artificial Sequence
  chemically synthesized
tcttttttttttttttttttcc

SEQ ID NO: 50178 - DNA, 22 bp, Artificial Sequence
  chemically synthesized
ttttttttttttttttcctggt

SEQ ID NO: 50179 - DNA, 22 bp, Artificial Sequence
  chemically synthesized
tttttttttttttttcctggtg

SEQ ID NO: 50180 - DNA, 22 bp, Artificial Sequence
  chemically synthesized
ttttttttttttttcctggtgg

SEQ ID NO: 50181 - DNA, 22 bp, Artificial Sequence
  chemically synthesized
tttttttttttttcctggtgga

SEQ ID NO: 50182 - DNA, 22 bp, Artificial Sequence
  chemically synthesized
ttttttttttttcctggtggag

SEQ ID NO: 50183 - DNA, 22 bp, Artificial Sequence
  chemically synthesized
tttttttttttcctggtggagt

SEQ ID NO: 50184 - DNA, 22 bp, Artificial Sequence
  chemically synthesized
ttttttttttcctggtggagtg

SEQ ID NO: 50185 - DNA, 22 bp, Artificial Sequence
  chemically synthesized
tttttttttcctggtggagtga

SEQ ID NO: 50186 - DNA, 22 bp, Artificial Sequence
  chemically synthesized
ttttttttcctggtggagtgac

SEQ ID NO: 50187 - DNA, 22 bp, Artificial Sequence
  chemically synthesized
tttttttcctggtggagtgacc

SEQ ID NO: 50188 - DNA, 22 bp, Artificial Sequence
  chemically synthesized
ttttttcctggtggagtgaccc

SEQ ID NO: 50189 - DNA, 22 bp, Artificial Sequence
  chemically synthesized
tttttcctggtggagtgaccca

SEQ ID NO: 50190 - DNA, 22 bp, Artificial Sequence
  chemically synthesized
ttttcctggtggagtgacccaa

SEQ ID NO: 50191 - DNA, 22 bp, Artificial Sequence
  chemically synthesized
tttcctggtggagtgacccaaa

SEQ ID NO: 50192 - DNA, 22 bp, Artificial Sequence
  chemically synthesized
ttcctggtggagtgacccaaac

SEQ ID NO: 50193 - DNA, 22 bp, Artificial Sequence
  chemically synthesized
tcctggtggagtgacccaaacc

SEQ ID NO: 50194 - DNA, 22 bp, Artificial Sequence
  chemically synthesized
cctggtggagtgacccaaacct

SEQ ID NO: 50195 - DNA, 22 bp, Artificial Sequence
  chemically synthesized
ctggtggagtgacccaaacctt

SEQ ID NO: 50196 - DNA, 22 bp, Artificial Sequence
  chemically synthesized
gtggagtgacccaaacctttat

SEQ ID NO: 50197 - DNA, 22 bp, Artificial Sequence
  chemically synthesized
tatttgtagtcctgcctggaat

SEQ ID NO: 50198 - DNA, 22 bp, Artificial Sequence
  chemically synthesized
atttgtagtcctgcctggaatg

SEQ ID NO: 50199 - DNA, 22 bp, Artificial Sequence
  chemically synthesized
tttgtagtcctgcctggaatgg

SEQ ID NO: 50200 - DNA, 22 bp, Artificial Sequence
  chemically synthesized
gtagtcctgcctggaatggcct

SEQ ID NO: 50201 - DNA, 22 bp, Artificial Sequence
  chemically synthesized
tagtcctgcctggaatggcctg

SEQ ID NO: 50202 - DNA, 22 bp, Artificial Sequence
  chemically synthesized
cctggaatggcctgtagtagtt

SEQ ID NO: 50203 - DNA, 22 bp, Artificial Sequence
  chemically synthesized
gaatggcctgtagtagtttccc

SEQ ID NO: 50204 - DNA, 22 bp, Artificial Sequence
  chemically synthesized
tagtagtttcccactgacctta

SEQ ID NO: 50205 - DNA, 22 bp, Artificial Sequence
  chemically synthesized
cccactgaccttaattccagga

SEQ ID NO: 50206 - DNA, 22 bp, Artificial Sequence
  chemically synthesized
ccactgaccttaattccaggac

SEQ ID NO: 50207 - DNA, 22 bp, Artificial Sequence
  chemically synthesized
accttaattccaggacatggta

SEQ ID NO: 50208 - DNA, 22 bp, Artificial Sequence
  chemically synthesized
aattccaggacatggtaaaact

SEQ ID NO: 50209 - DNA, 22 bp, Artificial Sequence
  chemically synthesized
attccaggacatggtaaaacta

SEQ ID NO: 50210 - DNA, 22 bp, Artificial Sequence
  chemically synthesized
caggacatggtaaaactaagag

SEQ ID NO: 50211 - DNA, 22 bp, Artificial Sequence
  chemically synthesized
agagacaccctaatggatctcc

SEQ ID NO: 50212 - DNA, 22 bp, Artificial Sequence
  chemically synthesized
atggatctcctatattccatgc

SEQ ID NO: 50213 - DNA, 22 bp, Artificial Sequence
  chemically synthesized
ctatattccatgcatacgcttc

SEQ ID NO: 50214 - DNA, 22 bp, Artificial Sequence
  chemically synthesized
tattccatgcatacgcttcctt

SEQ ID NO: 50215 - DNA, 22 bp, Artificial Sequence
  chemically synthesized
catgcatacgcttccttacctc

SEQ ID NO: 50216 - DNA, 22 bp, Artificial Sequence
  chemically synthesized
ccttacctccattgtggagttg

SEQ ID NO: 50217 - DNA, 22 bp, Artificial Sequence
  chemically synthesized
cttacctccattgtggagttgt

SEQ ID NO: 50218 - DNA, 22 bp, Artificial Sequence
  chemically synthesized
acctccattgtggagttgtaga

SEQ ID NO: 50219 - DNA, 22 bp, Artificial Sequence
  chemically synthesized
cctccattgtggagttgtagac

SEQ ID NO: 50220 - DNA, 22 bp, Artificial Sequence
  chemically synthesized
cattgtggagttgtagactgat

SEQ ID NO: 50221 - DNA, 22 bp, Artificial Sequence
  chemically synthesized
tggagttgtagactgatttcat

SEQ ID NO: 50222 - DNA, 22 bp, Artificial Sequence
  chemically synthesized
tagactgatttcatcttgatag

SEQ ID NO: 50223 - DNA, 22 bp, Artificial Sequence
  chemically synthesized
atttcatcttgatagtctgggt

SEQ ID NO: 50224 - DNA, 22 bp, Artificial Sequence
  chemically synthesized
catcttgatagtctgggttaat

SEQ ID NO: 50225 - DNA, 22 bp, Artificial Sequence
  chemically synthesized
atcttgatagtctgggttaatc

SEQ ID NO: 50226 - DNA, 22 bp, Artificial Sequence
  chemically synthesized
gatagtctgggttaatcaccgc

SEQ ID NO: 50227 - DNA, 22 bp, Artificial Sequence
  chemically synthesized
atagtctgggttaatcaccgca

SEQ ID NO: 50228 - DNA, 22 bp, Artificial Sequence
  chemically synthesized
ggttaatcaccgcagccaacac

SEQ ID NO: 50229 - DNA, 22 bp, Artificial Sequence
  chemically synthesized
atcaccgcagccaacactgtaa

SEQ ID NO: 50230 - DNA, 22 bp, Artificial Sequence
  chemically synthesized
taactctcttcttagcctgttg

SEQ ID NO: 50231 - DNA, 22 bp, Artificial Sequence
  chemically synthesized
tcttcttagcctgttgacttaa

SEQ ID NO: 50232 - DNA, 22 bp, Artificial Sequence
  chemically synthesized
ttcttagcctgttgacttaaag

SEQ ID NO: 50233 - DNA, 22 bp, Artificial Sequence
  chemically synthesized
cttagcctgttgacttaaaggt

SEQ ID NO: 50234 - DNA, 22 bp, Artificial Sequence
  chemically synthesized
ttagcctgttgacttaaaggtg

SEQ ID NO: 50235 - DNA, 22 bp, Artificial Sequence
  chemically synthesized
agcctgttgacttaaaggtggg

SEQ ID NO: 50236 - DNA, 22 bp, Artificial Sequence
  chemically synthesized
gcctgttgacttaaaggtggga

SEQ ID NO: 50237 - DNA, 22 bp, Artificial Sequence
  chemically synthesized
ttgacttaaaggtgggaggagc

SEQ ID NO: 50238 - DNA, 22 bp, Artificial Sequence
  chemically synthesized
acttaaaggtgggaggagccca

SEQ ID NO: 50239 - DNA, 22 bp, Artificial Sequence
  chemically synthesized
aaaggtgggaggagcccaaagt

SEQ ID NO: 50240 - DNA, 22 bp, Artificial Sequence
  chemically synthesized
aaggtgggaggagcccaaagtg

SEQ ID NO: 50241 - DNA, 22 bp, Artificial Sequence
  chemically synthesized
aatttgcagtttaatggaatca

SEQ ID NO: 50242 - DNA, 22 bp, Artificial Sequence
  chemically synthesized
atttgcagtttaatggaatcat

SEQ ID NO: 50243 - DNA, 22 bp, Artificial Sequence
  chemically synthesized
gcagtttaatggaatcattatt

SEQ ID NO: 50244 - DNA, 22 bp, Artificial Sequence
  chemically synthesized
cagtttaatggaatcattattg

SEQ ID NO: 50245 - DNA, 22 bp, Artificial Sequence
  chemically synthesized
aatggaatcattattgtgtcac

SEQ ID NO: 50246 - DNA, 22 bp, Artificial Sequence
  chemically synthesized
atggaatcattattgtgtcacc

SEQ ID NO: 50247 - DNA, 22 bp, Artificial Sequence
  chemically synthesized
ttgtgtcacctggcggcagtgt

SEQ ID NO: 50248 - DNA, 22 bp, Artificial Sequence
  chemically synthesized
tgtcacctggcggcagtgttcc

SEQ ID NO: 50249 - DNA, 22 bp, Artificial Sequence
  chemically synthesized
gcggcagtgttcctccctctgg

SEQ ID NO: 50250 - DNA, 22 bp, Artificial Sequence
  chemically synthesized
ctccctctggaactaagacctc

SEQ ID NO: 50251 - DNA, 22 bp, Artificial Sequence
  chemically synthesized
cctctggaactaagacctctaa

SEQ ID NO: 50252 - DNA, 22 bp, Artificial Sequence
  chemically synthesized
tggaactaagacctctaagcca

SEQ ID NO: 50253 - DNA, 22 bp, Artificial Sequence
  chemically synthesized
gaactaagacctctaagccagc

SEQ ID NO: 50254 - DNA, 22 bp, Artificial Sequence
  chemically synthesized
agacctctaagccagcagaaca

SEQ ID NO: 50255 - DNA, 22 bp, Artificial Sequence
  chemically synthesized
taagccagcagaacataatgcc

SEQ ID NO: 50256 - DNA, 22 bp, Artificial Sequence
  chemically synthesized
agccagcagaacataatgccat

SEQ ID NO: 50257 - DNA, 22 bp, Artificial Sequence
  chemically synthesized
tgctagtggaacactaggggtg

SEQ ID NO: 50258 - DNA, 22 bp, Artificial Sequence
  chemically synthesized
gctagtggaacactaggggtga

SEQ ID NO: 50259 - DNA, 22 bp, Artificial Sequence
  chemically synthesized
ctagtggaacactaggggtgat

SEQ ID NO: 50260 - DNA, 22 bp, Artificial Sequence
  chemically synthesized
gtggaacactaggggtgatggt

SEQ ID NO: 50261 - DNA, 22 bp, Artificial Sequence
  chemically synthesized
ggggtgatggtgagtggtgcca

SEQ ID NO: 50262 - DNA, 22 bp, Artificial Sequence
  chemically synthesized
ccacttccacttccaccctttg

SEQ ID NO: 50263 - DNA, 22 bp, Artificial Sequence
  chemically synthesized
cacttccacttccaccctttga

SEQ ID NO: 50264 - DNA, 22 bp, Artificial Sequence
  chemically synthesized
ccacttccaccctttgattcct

SEQ ID NO: 50265 - DNA, 22 bp, Artificial Sequence
  chemically synthesized
cacttccaccctttgattcctg

SEQ ID NO: 50266 - DNA, 22 bp, Artificial Sequence
  chemically synthesized
ccaccctttgattcctggaccc

SEQ ID NO: 50267 - DNA, 22 bp, Artificial Sequence
  chemically synthesized
caccctttgattcctggacccg

SEQ ID NO: 50268 - DNA, 22 bp, Artificial Sequence
  chemically synthesized
tgattcctggacccgtgaatcc

SEQ ID NO: 50269 - DNA, 22 bp, Artificial Sequence
  chemically synthesized
gattcctggacccgtgaatcct

SEQ ID NO: 50270 - DNA, 22 bp, Artificial Sequence
  chemically synthesized
attcctggacccgtgaatcctg

SEQ ID NO: 50271 - DNA, 22 bp, Artificial Sequence
  chemically synthesized
ctggacccgtgaatcctgtcta

SEQ ID NO: 50272 - DNA, 22 bp, Artificial Sequence
  chemically synthesized
gacccgtgaatcctgtctatgg

SEQ ID NO: 50273 - DNA, 22 bp, Artificial Sequence
  chemically synthesized
tctatgggagaaacagtaccat

SEQ ID NO: 50274 - DNA, 22 bp, Artificial Sequence
  chemically synthesized
tgggagaaacagtaccatatat

SEQ ID NO: 50275 - DNA, 22 bp, Artificial Sequence
  chemically synthesized
gacactgattcagagcatacac

SEQ ID NO: 50276 - DNA, 22 bp, Artificial Sequence
  chemically synthesized
attcagagcatacacagccttc

SEQ ID NO: 50277 - DNA, 22 bp, Artificial Sequence
  chemically synthesized
agagcatacacagccttctgga

SEQ ID NO: 50278 - DNA, 22 bp, Artificial Sequence
  chemically synthesized
ctggagaactttgccccaggcc

SEQ ID NO: 50279 - DNA, 22 bp, Artificial Sequence
  chemically synthesized
tggagaactttgccccaggcct

SEQ ID NO: 50280 - DNA, 22 bp, Artificial Sequence
  chemically synthesized
gagaactttgccccaggcctgc

SEQ ID NO: 50281 - DNA, 22 bp, Artificial Sequence
  chemically synthesized
tgccccaggcctgcaaagtatt

SEQ ID NO: 50282 - DNA, 22 bp, Artificial Sequence
  chemically synthesized
gccccaggcctgcaaagtattg

SEQ ID NO: 50283 - DNA, 22 bp, Artificial Sequence
  chemically synthesized
ccccaggcctgcaaagtattgt

SEQ ID NO: 50284 - DNA, 22 bp, Artificial Sequence
  chemically synthesized
caaagtattgtcacctagttgg

SEQ ID NO: 50285 - DNA, 22 bp, Artificial Sequence
  chemically synthesized
tcacctagttggcattgtaatc

SEQ ID NO: 50286 - DNA, 22 bp, Artificial Sequence
  chemically synthesized
gttggcattgtaatcgtgactt

SEQ ID NO: 50287 - DNA, 22 bp, Artificial Sequence
  chemically synthesized
gcattgtaatcgtgacttcaaa

SEQ ID NO: 50288 - DNA, 22 bp, Artificial Sequence
  chemically synthesized
taatcgtgacttcaaaaggcca

SEQ ID NO: 50289 - DNA, 22 bp, Artificial Sequence
  chemically synthesized
caaaaggccattcaaaagctgc

SEQ ID NO: 50290 - DNA, 22 bp, Artificial Sequence
  chemically synthesized
aaaaggccattcaaaagctgct

SEQ ID NO: 50291 - DNA, 22 bp, Artificial Sequence
  chemically synthesized
aaaagctgcttcaggatgatag

SEQ ID NO: 50292 - DNA, 22 bp, Artificial Sequence
  chemically synthesized
cttcaggatgatagggatcatg

SEQ ID NO: 50293 - DNA, 22 bp, Artificial Sequence
  chemically synthesized
caggatgatagggatcatggta

SEQ ID NO: 50294 - DNA, 22 bp, Artificial Sequence
  chemically synthesized
aggatgatagggatcatggtaa

SEQ ID NO: 50295 - DNA, 22 bp, Artificial Sequence
  chemically synthesized
catgagcatgagcccactgtca

SEQ ID NO: 50296 - DNA, 22 bp, Artificial Sequence
  chemically synthesized
tcacacttctttagccataaag

SEQ ID NO: 50297 - DNA, 22 bp, Artificial Sequence
  chemically synthesized
ctttagccataaagtgagtggc

SEQ ID NO: 50298 - DNA, 22 bp, Artificial Sequence
  chemically synthesized
tttagccataaagtgagtggct

SEQ ID NO: 50299 - DNA, 22 bp, Artificial Sequence
  chemically synthesized
tagccataaagtgagtggcttg

SEQ ID NO: 50300 - DNA, 22 bp, Artificial Sequence
  chemically synthesized
agccataaagtgagtggcttgg

SEQ ID NO: 50301 - DNA, 22 bp, Artificial Sequence
  chemically synthesized
gccataaagtgagtggcttggt

SEQ ID NO: 50302 - DNA, 22 bp, Artificial Sequence
  chemically synthesized
ggtcagaagcaatgctgtgtgg

SEQ ID NO: 50303 - DNA, 22 bp, Artificial Sequence
  chemically synthesized
gtcagaagcaatgctgtgtgga

SEQ ID NO: 50304 - DNA, 22 bp, Artificial Sequence
  chemically synthesized
tgtggaataccatgacagtgga

SEQ ID NO: 50305 - DNA, 22 bp, Artificial Sequence
  chemically synthesized
tgtgattccatggatggtagtc

SEQ ID NO: 50306 - DNA, 22 bp, Artificial Sequence
  chemically synthesized
tgattccatggatggtagtctt

SEQ ID NO: 50307 - DNA, 22 bp, Artificial Sequence
  chemically synthesized
catggatggtagtcttggcata

SEQ ID NO: 50308 - DNA, 22 bp, Artificial Sequence
  chemically synthesized
ggcataagcattgagttcagga

SEQ ID NO: 50309 - DNA, 22 bp, Artificial Sequence
  chemically synthesized
gcataagcattgagttcaggat

SEQ ID NO: 50310 - DNA, 22 bp, Artificial Sequence
  chemically synthesized
agttcaggattgggaaacccat

SEQ ID NO: 50311 - DNA, 22 bp, Artificial Sequence
  chemically synthesized
aggattgggaaacccatatcca

SEQ ID NO: 50312 - DNA, 22 bp, Artificial Sequence
  chemically synthesized
ggaaacccatatccagagtaag

SEQ ID NO: 50313 - DNA, 22 bp, Artificial Sequence
  chemically synthesized
ttccagtgaggacaagcctctg

SEQ ID NO: 50314 - DNA, 22 bp, Artificial Sequence
  chemically synthesized
cagtgaggacaagcctctgccc

SEQ ID NO: 50315 - DNA, 22 bp, Artificial Sequence
  chemically synthesized
tgccctttccatgatggaagag

SEQ ID NO: 50316 - DNA, 22 bp, Artificial Sequence
  chemically synthesized
ccctttccatgatggaagaggt

SEQ ID NO: 50317 - DNA, 22 bp, Artificial Sequence
  chemically synthesized
tccatgatggaagaggtccaat

SEQ ID NO: 50318 - DNA, 22 bp, Artificial Sequence
  chemically synthesized
ccatgatggaagaggtccaata

SEQ ID NO: 50319 - DNA, 22 bp, Artificial Sequence
  chemically synthesized
catgatggaagaggtccaatat

SEQ ID NO: 50320 - DNA, 22 bp, Artificial Sequence
  chemically synthesized
ccaccaggtagctggctgatca

SEQ ID NO: 50321 - DNA, 22 bp, Artificial Sequence
  chemically synthesized
gctgatcaccccgaggaatggt

SEQ ID NO: 50322 - DNA, 22 bp, Artificial Sequence
  chemically synthesized
atcaccccgaggaatggtgcca

SEQ ID NO: 50323 - DNA, 22 bp, Artificial Sequence
  chemically synthesized
agtgttggtctctgatgctggc

SEQ ID NO: 50324 - DNA, 22 bp, Artificial Sequence
  chemically synthesized
gtgttggtctctgatgctggca

SEQ ID NO: 50325 - DNA, 22 bp, Artificial Sequence
  chemically synthesized
gtctctgatgctggcaagcagt

SEQ ID NO: 50326 - DNA, 22 bp, Artificial Sequence
  chemically synthesized
tgatgctggcaagcagtggctg

SEQ ID NO: 50327 - DNA, 22 bp, Artificial Sequence
  chemically synthesized
atgctggcaagcagtggctgtg

SEQ ID NO: 50328 - DNA, 22 bp, Artificial Sequence
  chemically synthesized
gcaagcagtggctgtggccagg

SEQ ID NO: 50329 - DNA, 22 bp, Artificial Sequence
  chemically synthesized
tggccaggtcagctttggtgag

SEQ ID NO: 50330 - DNA, 22 bp, Artificial Sequence
  chemically synthesized
tggtgagtggaagtccatgttg

SEQ ID NO: 50331 - DNA, 22 bp, Artificial Sequence
  chemically synthesized
ggtgagtggaagtccatgttgc

SEQ ID NO: 50332 - DNA, 22 bp, Artificial Sequence
  chemically synthesized
gtgagtggaagtccatgttgct

SEQ ID NO: 50333 - DNA, 22 bp, Artificial Sequence
  chemically synthesized
ctgagcccaagcataacttcca

SEQ ID NO: 50334 - DNA, 22 bp, Artificial Sequence
  chemically synthesized
agcccaagcataacttccatcc

SEQ ID NO: 50335 - DNA, 22 bp, Artificial Sequence
  chemically synthesized
ccatccctgcaactgtggccac

SEQ ID NO: 50336 - DNA, 22 bp, Artificial Sequence
  chemically synthesized
catccctgcaactgtggccact

SEQ ID NO: 50337 - DNA, 22 bp, Artificial Sequence
  chemically synthesized
caactgtggccactttgttcat

SEQ ID NO: 50338 - DNA, 22 bp, Artificial Sequence
  chemically synthesized
tggccactttgttcatgggtcc

SEQ ID NO: 50339 - DNA, 22 bp, Artificial Sequence
  chemically synthesized
tgttcatgggtccattggacga

SEQ ID NO: 50340 - DNA, 22 bp, Artificial Sequence
  chemically synthesized
gttcatgggtccattggacgat

SEQ ID NO: 50341 - DNA, 22 bp, Artificial Sequence
  chemically synthesized
ttcatgggtccattggacgatg

SEQ ID NO: 50342 - DNA, 22 bp, Artificial Sequence
  chemically synthesized
atgggtccattggacgatgaca

SEQ ID NO: 50343 - DNA, 22 bp, Artificial Sequence
  chemically synthesized
gacgatgacatgagtggcctgg

SEQ ID NO: 50344 - DNA, 22 bp, Artificial Sequence
  chemically synthesized
ggaaaaggctgagtggtgtcca

SEQ ID NO: 50345 - DNA, 22 bp, Artificial Sequence
  chemically synthesized
agtggtgtccacagaattgatc

SEQ ID NO: 50346 - DNA, 22 bp, Artificial Sequence
  chemically synthesized
atcatcctatccacttgattat

SEQ ID NO: 50347 - DNA, 22 bp, Artificial Sequence
  chemically synthesized
tccacttgattattaaaatcct

SEQ ID NO: 50348 - DNA, 22 bp, Artificial Sequence
  chemically synthesized
gattattaaaatcctcttctgc

SEQ ID NO: 50349 - DNA, 22 bp, Artificial Sequence
  chemically synthesized
attattaaaatcctcttctgct

SEQ ID NO: 50350 - DNA, 22 bp, Artificial Sequence
  chemically synthesized
ttaaaatcctcttctgctgagg

SEQ ID NO: 50351 - DNA, 22 bp, Artificial Sequence
  chemically synthesized
aaatcctcttctgctgaggtca

SEQ ID NO: 50352 - DNA, 22 bp, Artificial Sequence
  chemically synthesized
ttctgctgaggtcacccattgg

SEQ ID NO: 50353 - DNA, 22 bp, Artificial Sequence
  chemically synthesized
ctgctgaggtcacccattggtg

SEQ ID NO: 50354 - DNA, 22 bp, Artificial Sequence
  chemically synthesized
tgctgaggtcacccattggtga

SEQ ID NO: 50355 - DNA, 22 bp, Artificial Sequence
  chemically synthesized
ctgaggtcacccattggtgagc

SEQ ID NO: 50356 - DNA, 22 bp, Artificial Sequence
  chemically synthesized
aggtcacccattggtgagcact

SEQ ID NO: 50357 - DNA, 22 bp, Artificial Sequence
  chemically synthesized
gtgagcactcacatgggatgaa

SEQ ID NO: 50358 - DNA, 22 bp, Artificial Sequence
  chemically synthesized
acatgggatgaaaatatctttg

SEQ ID NO: 50359 - DNA, 22 bp, Artificial Sequence
  chemically synthesized
tgtagtttttgactaatcatag

SEQ ID NO: 50360 - DNA, 22 bp, Artificial Sequence
  chemically synthesized
gtagtttttgactaatcataga

SEQ ID NO: 50361 - DNA, 22 bp, Artificial Sequence
  chemically synthesized
tagtttttgactaatcatagag

SEQ ID NO: 50362 - DNA, 22 bp, Artificial Sequence
  chemically synthesized
ttgactaatcatagaggtccat

SEQ ID NO: 50363 - DNA, 22 bp, Artificial Sequence
  chemically synthesized
tgactaatcatagaggtccatc

SEQ ID NO: 50364 - DNA, 22 bp, Artificial Sequence
  chemically synthesized
gactaatcatagaggtccatcc

SEQ ID NO: 50365 - DNA, 22 bp, Artificial Sequence
  chemically synthesized
actaatcatagaggtccatcca

SEQ ID NO: 50366 - DNA, 22 bp, Artificial Sequence
  chemically synthesized
atcatagaggtccatccacata

SEQ ID NO: 50367 - DNA, 22 bp, Artificial Sequence
  chemically synthesized
ttccccaaatttctttgtcatc

SEQ ID NO: 50368 - DNA, 22 bp, Artificial Sequence
  chemically synthesized
ccccaaatttctttgtcatcaa

SEQ ID NO: 50369 - DNA, 22 bp, Artificial Sequence
  chemically synthesized
cccaaatttctttgtcatcaat

SEQ ID NO: 50370 - DNA, 22 bp, Artificial Sequence
  chemically synthesized
ctttgtcatcaattttccagtc

SEQ ID NO: 50371 - DNA, 22 bp, Artificial Sequence
  chemically synthesized
tttgtcatcaattttccagtca

SEQ ID NO: 50372 - DNA, 22 bp, Artificial Sequence
  chemically synthesized
tgtcatcaattttccagtcatg

SEQ ID NO: 50373 - DNA, 22 bp, Artificial Sequence
  chemically synthesized
gtcatcaattttccagtcatgc

SEQ ID NO: 50374 - DNA, 22 bp, Artificial Sequence
  chemically synthesized
tcatcaattttccagtcatgct

SEQ ID NO: 50375 - DNA, 22 bp, Artificial Sequence
  chemically synthesized
tccagtcatgctttttccaagt

SEQ ID NO: 50376 - DNA, 22 bp, Artificial Sequence
  chemically synthesized
ccagtcatgctttttccaagtc

SEQ ID NO: 50377 - DNA, 22 bp, Artificial Sequence
  chemically synthesized
cagtcatgctttttccaagtcc

SEQ ID NO: 50378 - DNA, 22 bp, Artificial Sequence
  chemically synthesized
tttccaagtccctgaccatcta

SEQ ID NO: 50379 - DNA, 22 bp, Artificial Sequence
  chemically synthesized
ttccaagtccctgaccatctag

SEQ ID NO: 50380 - DNA, 22 bp, Artificial Sequence
  chemically synthesized
tccaagtccctgaccatctagc

SEQ ID NO: 50381 - DNA, 22 bp, Artificial Sequence
  chemically synthesized
ccaagtccctgaccatctagcc

SEQ ID NO: 50382 - DNA, 22 bp, Artificial Sequence
  chemically synthesized
caagtccctgaccatctagcca

SEQ ID NO: 50383 - DNA, 22 bp, Artificial Sequence
  chemically synthesized
accatctagccaaacctttggc

SEQ ID NO: 50384 - DNA, 22 bp, Artificial Sequence
  chemically synthesized
gccaaacctttggctacagccc

SEQ ID NO: 50385 - DNA, 22 bp, Artificial Sequence
  chemically synthesized
tggctacagcccatgaataagt

SEQ ID NO: 50386 - DNA, 22 bp, Artificial Sequence
  chemically synthesized
ggctacagcccatgaataagta

SEQ ID NO: 50387 - DNA, 22 bp, Artificial Sequence
  chemically synthesized
gctacagcccatgaataagtat

SEQ ID NO: 50388 - DNA, 22 bp, Artificial Sequence
  chemically synthesized
cagcccatgaataagtatataa

SEQ ID NO: 50389 - DNA, 22 bp, Artificial Sequence
  chemically synthesized
gccatttctccttctgtgcaaa

SEQ ID NO: 50390 - DNA, 22 bp, Artificial Sequence
  chemically synthesized
ctccttctgtgcaaagtgcaca

SEQ ID NO: 50391 - DNA, 22 bp, Artificial Sequence
  chemically synthesized
tccttctgtgcaaagtgcacaa

SEQ ID NO: 50392 - DNA, 22 bp, Artificial Sequence
  chemically synthesized
cttctgtgcaaagtgcacaacc

SEQ ID NO: 50393 - DNA, 22 bp, Artificial Sequence
  chemically synthesized
ctgtgcaaagtgcacaaccagg

SEQ ID NO: 50394 - DNA, 22 bp, Artificial Sequence
  chemically synthesized
tgtgcaaagtgcacaaccaggc

SEQ ID NO: 50395 - DNA, 22 bp, Artificial Sequence
  chemically synthesized
tgcaaagtgcacaaccaggcac

SEQ ID NO: 50396 - DNA, 22 bp, Artificial Sequence
  chemically synthesized
ctcaaagttctgccaactagga

SEQ ID NO: 50397 - DNA, 22 bp, Artificial Sequence
  chemically synthesized
aaagttctgccaactaggaaga

SEQ ID NO: 50398 - DNA, 22 bp, Artificial Sequence
  chemically synthesized
tgccaactaggaagatttccct

SEQ ID NO: 50399 - DNA, 22 bp, Artificial Sequence
  chemically synthesized
ccaactaggaagatttcccttc

SEQ ID NO: 50400 - DNA, 22 bp, Artificial Sequence
  chemically synthesized
ggaagatttcccttcaccgttg

SEQ ID NO: 50401 - DNA, 22 bp, Artificial Sequence
  chemically synthesized
cccttcaccgttgtccttcagg

SEQ ID NO: 50402 - DNA, 22 bp, Artificial Sequence
  chemically synthesized
ccttcaccgttgtccttcaggg

SEQ ID NO: 50403 - DNA, 22 bp, Artificial Sequence
  chemically synthesized
caccgttgtccttcagggatgt

SEQ ID NO: 50404 - DNA, 22 bp, Artificial Sequence
  chemically synthesized
accgttgtccttcagggatgtc

SEQ ID NO: 50405 - DNA, 22 bp, Artificial Sequence
  chemically synthesized
tccttcagggatgtcctagaaa

SEQ ID NO: 50406 - DNA, 22 bp, Artificial Sequence
  chemically synthesized
cagggatgtcctagaaaggggc

SEQ ID NO: 50407 - DNA, 22 bp, Artificial Sequence
  chemically synthesized
agggatgtcctagaaaggggct

SEQ ID NO: 50408 - DNA, 22 bp, Artificial Sequence
  chemically synthesized
gaaaggggctgtagtgctgcgg

SEQ ID NO: 50409 - DNA, 22 bp, Artificial Sequence
  chemically synthesized
tagtgctgcggctgtccacttt

SEQ ID NO: 50410 - DNA, 22 bp, Artificial Sequence
  chemically synthesized
cggctgtccacttttgggtggt

SEQ ID NO: 50411 - DNA, 22 bp, Artificial Sequence
  chemically synthesized
tccacttttgggtggtgcctgc

SEQ ID NO: 50412 - DNA, 22 bp, Artificial Sequence
  chemically synthesized
ttgggtggtgcctgcatatcgt

SEQ ID NO: 50413 - DNA, 22 bp, Artificial Sequence
  chemically synthesized
tgggtggtgcctgcatatcgtg

SEQ ID NO: 50414 - DNA, 22 bp, Artificial Sequence
  chemically synthesized
gggtggtgcctgcatatcgtgc

SEQ ID NO: 50415 - DNA, 22 bp, Artificial Sequence
  chemically synthesized
ggtggtgcctgcatatcgtgca

SEQ ID NO: 50416 - DNA, 22 bp, Artificial Sequence
  chemically synthesized
catatcgtgcagaactatctgt

SEQ ID NO: 50417 - DNA, 22 bp, Artificial Sequence
  chemically synthesized
tctgtgaaccaggacctagtct

SEQ ID NO: 50418 - DNA, 22 bp, Artificial Sequence
  chemically synthesized
tgaaccaggacctagtcttctc

SEQ ID NO: 50419 - DNA, 22 bp, Artificial Sequence
  chemically synthesized
gtcttctcttcctctgtcagct

SEQ ID NO: 50420 - DNA, 22 bp, Artificial Sequence
  chemically synthesized
ctcttcctctgtcagctgatca

SEQ ID NO: 50421 - DNA, 22 bp, Artificial Sequence
  chemically synthesized
tcttcctctgtcagctgatcat

SEQ ID NO: 50422 - DNA, 22 bp, Artificial Sequence
  chemically synthesized
ttcctctgtcagctgatcatag

SEQ ID NO: 50423 - DNA, 22 bp, Artificial Sequence
  chemically synthesized
cctctgtcagctgatcataggg

SEQ ID NO: 50424 - DNA, 22 bp, Artificial Sequence
  chemically synthesized
ctctgtcagctgatcataggga

SEQ ID NO: 50425 - DNA, 22 bp, Artificial Sequence
  chemically synthesized
tgtcagctgatcatagggaact

SEQ ID NO: 50426 - DNA, 22 bp, Artificial Sequence
  chemically synthesized
tcagctgatcatagggaactcc

SEQ ID NO: 50427 - DNA, 22 bp, Artificial Sequence
  chemically synthesized
atcatagggaactccccatgag

SEQ ID NO: 50428 - DNA, 22 bp, Artificial Sequence
  chemically synthesized
cccatgagaccatcggtgcagt

SEQ ID NO: 50429 - DNA, 22 bp, Artificial Sequence
  chemically synthesized
agggagagaaagcagtgtgtca

SEQ ID NO: 50430 - DNA, 22 bp, Artificial Sequence
  chemically synthesized
gagcccctttctcatgtaactt

SEQ ID NO: 50431 - DNA, 22 bp, Artificial Sequence
  chemically synthesized
agcccctttctcatgtaactta

SEQ ID NO: 50432 - DNA, 22 bp, Artificial Sequence
  chemically synthesized
tctcatgtaacttactagtgcc

SEQ ID NO: 50433 - DNA, 22 bp, Artificial Sequence
  chemically synthesized
ctcatgtaacttactagtgcct

SEQ ID NO: 50434 - DNA, 22 bp, Artificial Sequence
  chemically synthesized
tcatgtaacttactagtgcctt

SEQ ID NO: 50435 - DNA, 22 bp, Artificial Sequence
  chemically synthesized
atgtaacttactagtgccttca

SEQ ID NO: 50436 - DNA, 22 bp, Artificial Sequence
  chemically synthesized
actagtgccttcaggatctgct

SEQ ID NO: 50437 - DNA, 22 bp, Artificial Sequence
  chemically synthesized
ctagtgccttcaggatctgctc

SEQ ID NO: 50438 - DNA, 22 bp, Artificial Sequence
  chemically synthesized
gtgccttcaggatctgctcaag

SEQ ID NO: 50439 - DNA, 22 bp, Artificial Sequence
  chemically synthesized
caggatctgctcaagcccaatc

SEQ ID NO: 50440 - DNA, 22 bp, Artificial Sequence
  chemically synthesized
aggatctgctcaagcccaatcg

SEQ ID NO: 50441 - DNA, 22 bp, Artificial Sequence
  chemically synthesized
ctcaagcccaatcgcatatata

SEQ ID NO: 50442 - DNA, 22 bp, Artificial Sequence
  chemically synthesized
aagcccaatcgcatatatacca

SEQ ID NO: 50443 - DNA, 22 bp, Artificial Sequence
  chemically synthesized
ccatttgctgatgcaatgctgc

SEQ ID NO: 50444 - DNA, 22 bp, Artificial Sequence
  chemically synthesized
catttgctgatgcaatgctgct

SEQ ID NO: 50445 - DNA, 22 bp, Artificial Sequence
  chemically synthesized
gctgatgcaatgctgctgtgca

SEQ ID NO: 50446 - DNA, 22 bp, Artificial Sequence
  chemically synthesized
ctgatgcaatgctgctgtgcac

SEQ ID NO: 50447 - DNA, 22 bp, Artificial Sequence
  chemically synthesized
atgcaatgctgctgtgcacagc

SEQ ID NO: 50448 - DNA, 22 bp, Artificial Sequence
  chemically synthesized
ctgtgcacagcccactttatgg

SEQ ID NO: 50449 - DNA, 22 bp, Artificial Sequence
  chemically synthesized
tgcacagcccactttatggcta

SEQ ID NO: 50450 - DNA, 22 bp, Artificial Sequence
  chemically synthesized
tatggctagatggatcagaaag

SEQ ID NO: 50451 - DNA, 22 bp, Artificial Sequence
  chemically synthesized
atggctagatggatcagaaagc

SEQ ID NO: 50452 - DNA, 22 bp, Artificial Sequence
  chemically synthesized
tggctagatggatcagaaagca

SEQ ID NO: 50453 - DNA, 22 bp, Artificial Sequence
  chemically synthesized
gatggatcagaaagcacccagt

SEQ ID NO: 50454 - DNA, 22 bp, Artificial Sequence
  chemically synthesized
atgataggcagttcaggtcaca

SEQ ID NO: 50455 - DNA, 22 bp, Artificial Sequence
  chemically synthesized
aggtcacatggtgacttgatga

SEQ ID NO: 50456 - DNA, 22 bp, Artificial Sequence
  chemically synthesized
gatgactcatagtcaaatattt

SEQ ID NO: 50457 - DNA, 22 bp, Artificial Sequence
  chemically synthesized
atgactcatagtcaaatatttc

SEQ ID NO: 50458 - DNA, 22 bp, Artificial Sequence
  chemically synthesized
atagtcaaatatttcgtttcca

SEQ ID NO: 50459 - DNA, 22 bp, Artificial Sequence
  chemically synthesized
cgtttccaccaaagcccagtaa

SEQ ID NO: 50460 - DNA, 22 bp, Artificial Sequence
  chemically synthesized
gtttccaccaaagcccagtaac

SEQ ID NO: 50461 - DNA, 22 bp, Artificial Sequence
  chemically synthesized
ccaccaaagcccagtaacaggc

SEQ ID NO: 50462 - DNA, 22 bp, Artificial Sequence
  chemically synthesized
caccaaagcccagtaacaggcc

SEQ ID NO: 50463 - DNA, 22 bp, Artificial Sequence
  chemically synthesized
tctccctaaaagagagtagtta

SEQ ID NO: 50464 - DNA, 22 bp, Artificial Sequence
  chemically synthesized
ctccctaaaagagagtagttat

SEQ ID NO: 50465 - DNA, 22 bp, Artificial Sequence
  chemically synthesized
tccctaaaagagagtagttatc

SEQ ID NO: 50466 - DNA, 22 bp, Artificial Sequence
  chemically synthesized
cctaaaagagagtagttatctg

SEQ ID NO: 50467 - DNA, 22 bp, Artificial Sequence
  chemically synthesized
aaagagagtagttatctgcaga

SEQ ID NO: 50468 - DNA, 22 bp, Artificial Sequence
  chemically synthesized
tctgcagaagatggcagggcct

SEQ ID NO: 50469 - DNA, 22 bp, Artificial Sequence
  chemically synthesized
cagaagatggcagggccttgct

SEQ ID NO: 50470 - DNA, 22 bp, Artificial Sequence
  chemically synthesized
gctccaaaatcctagaggcctc

SEQ ID NO: 50471 - DNA, 22 bp, Artificial Sequence
  chemically synthesized
ctccaaaatcctagaggcctcc

SEQ ID NO: 50472 - DNA, 22 bp, Artificial Sequence
  chemically synthesized
caaaatcctagaggcctccgct

SEQ ID NO: 50473 - DNA, 22 bp, Artificial Sequence
  chemically synthesized
gaggcctccgctgtgattcagc

SEQ ID NO: 50474 - DNA, 22 bp, Artificial Sequence
  chemically synthesized
cgctgtgattcagcctgccaaa

SEQ ID NO: 50475 - DNA, 22 bp, Artificial Sequence
  chemically synthesized
tgattcagcctgccaaatgctc

SEQ ID NO: 50476 - DNA, 22 bp, Artificial Sequence
  chemically synthesized
agcctgccaaatgctccaaaca

SEQ ID NO: 50477 - DNA, 22 bp, Artificial Sequence
  chemically synthesized
ccaaatgctccaaacagcatcc

SEQ ID NO: 50478 - DNA, 22 bp, Artificial Sequence
  chemically synthesized
caaacagcatccctatctggca

SEQ ID NO: 50479 - DNA, 22 bp, Artificial Sequence
  chemically synthesized
tctggcactgacacctcaagca

SEQ ID NO: 50480 - DNA, 22 bp, Artificial Sequence
  chemically synthesized
gcactgacacctcaagcatcat

SEQ ID NO: 50481 - DNA, 22 bp, Artificial Sequence
  chemically synthesized
acacctcaagcatcattggatc

SEQ ID NO: 50482 - DNA, 22 bp, Artificial Sequence
  chemically synthesized
aagcatcattggatctgctagg

SEQ ID NO: 50483 - DNA, 22 bp, Artificial Sequence
  chemically synthesized
gatctgctaggtcatatggccc

SEQ ID NO: 50484 - DNA, 22 bp, Artificial Sequence
  chemically synthesized
ctaggtcatatggcccaagtgg

SEQ ID NO: 50485 - DNA, 22 bp, Artificial Sequence
  chemically synthesized
ggtcatatggcccaagtggcat

SEQ ID NO: 50486 - DNA, 22 bp, Artificial Sequence
  chemically synthesized
gcacagcagcctggacctgtgg

SEQ ID NO: 50487 - DNA, 22 bp, Artificial Sequence
  chemically synthesized
cacagcagcctggacctgtggc

SEQ ID NO: 50488 - DNA, 22 bp, Artificial Sequence
  chemically synthesized
gacctgtggcagagccttctgt

SEQ ID NO: 50489 - DNA, 22 bp, Artificial Sequence
  chemically synthesized
tggcagagccttctgttctgga

SEQ ID NO: 50490 - DNA, 22 bp, Artificial Sequence
  chemically synthesized
ctgttctggactccactcaaaa

SEQ ID NO: 50491 - DNA, 22 bp, Artificial Sequence
  chemically synthesized
tgttctggactccactcaaaac

SEQ ID NO: 50492 - DNA, 22 bp, Artificial Sequence
  chemically synthesized
ttctggactccactcaaaactg

SEQ ID NO: 50493 - DNA, 22 bp, Artificial Sequence
  chemically synthesized
tggactccactcaaaactggca

SEQ ID NO: 50494 - DNA, 22 bp, Artificial Sequence
  chemically synthesized
gactccactcaaaactggcagc

SEQ ID NO: 50495 - DNA, 22 bp, Artificial Sequence
  chemically synthesized
cactcaaaactggcagcctttt

SEQ ID NO: 50496 - DNA, 22 bp, Artificial Sequence
  chemically synthesized
aaaactggcagccttttggatc

SEQ ID NO: 50497 - DNA, 22 bp, Artificial Sequence
  chemically synthesized
gcagccttttggatcactcgat

SEQ ID NO: 50498 - DNA, 22 bp, Artificial Sequence
  chemically synthesized
ttggatcactcgataaatgggc

SEQ ID NO: 50499 - DNA, 22 bp, Artificial Sequence
  chemically synthesized
tggatcactcgataaatgggcc

SEQ ID NO: 50500 - DNA, 22 bp, Artificial Sequence
  chemically synthesized
ggatcactcgataaatgggcca

SEQ ID NO: 50501 - DNA, 22 bp, Artificial Sequence
  chemically synthesized
gatcactcgataaatgggccag

SEQ ID NO: 50502 - DNA, 22 bp, Artificial Sequence
  chemically synthesized
gataaatgggccagagtaacac

SEQ ID NO: 50503 - DNA, 22 bp, Artificial Sequence
  chemically synthesized
cctccaaaatccaaataggccc

SEQ ID NO: 50504 - DNA, 22 bp, Artificial Sequence
  chemically synthesized
caaaatccaaataggcccacta

SEQ ID NO: 50505 - DNA, 22 bp, Artificial Sequence
  chemically synthesized
ggcgttgtgcctatttcttggt

SEQ ID NO: 50506 - DNA, 22 bp, Artificial Sequence
  chemically synthesized
tgcctatttcttggttgtaaga

SEQ ID NO: 50507 - DNA, 22 bp, Artificial Sequence
  chemically synthesized
tttcttggttgtaagagtggcc

SEQ ID NO: 50508 - DNA, 22 bp, Artificial Sequence
  chemically synthesized
cttggttgtaagagtggccaaa

SEQ ID NO: 50509 - DNA, 22 bp, Artificial Sequence
  chemically synthesized
ttggttgtaagagtggccaaat

SEQ ID NO: 50510 - DNA, 22 bp, Artificial Sequence
  chemically synthesized
ggttgtaagagtggccaaatgc

SEQ ID NO: 50511 - DNA, 22 bp, Artificial Sequence
  chemically synthesized
gttgtaagagtggccaaatgca

SEQ ID NO: 50512 - DNA, 22 bp, Artificial Sequence
  chemically synthesized
taagagtggccaaatgcagcaa

SEQ ID NO: 50513 - DNA, 22 bp, Artificial Sequence
  chemically synthesized
tccttcactttagaaggaatat

SEQ ID NO: 50514 - DNA, 22 bp, Artificial Sequence
  chemically synthesized
cactttagaaggaatatctcaa

SEQ ID NO: 50515 - DNA, 22 bp, Artificial Sequence
  chemically synthesized
actttagaaggaatatctcaaa

SEQ ID NO: 50516 - DNA, 22 bp, Artificial Sequence
  chemically synthesized
tagaaggaatatctcaaagagc

SEQ ID NO: 50517 - DNA, 22 bp, Artificial Sequence
  chemically synthesized
agaaggaatatctcaaagagcc

SEQ ID NO: 50518 - DNA, 22 bp, Artificial Sequence
  chemically synthesized
gaaggaatatctcaaagagccc

SEQ ID NO: 50519 - DNA, 22 bp, Artificial Sequence
  chemically synthesized
aaagagccccaaaccattggac

SEQ ID NO: 50520 - DNA, 22 bp, Artificial Sequence
  chemically synthesized
gacccctataaattttactgag

SEQ ID NO: 50521 - DNA, 22 bp, Artificial Sequence
  chemically synthesized
taaattttactgaggtagaagg

SEQ ID NO: 50522 - DNA, 22 bp, Artificial Sequence
  chemically synthesized
tactgaggtagaaggtccctga

SEQ ID NO: 50523 - DNA, 22 bp, Artificial Sequence
  chemically synthesized
actgaggtagaaggtccctgaa

SEQ ID NO: 50524 - DNA, 22 bp, Artificial Sequence
  chemically synthesized
ctgaggtagaaggtccctgaat

SEQ ID NO: 50525 - DNA, 22 bp, Artificial Sequence
  chemically synthesized
aggtagaaggtccctgaattta

SEQ ID NO: 50526 - DNA, 22 bp, Artificial Sequence
  chemically synthesized
aatttaatcagatttatttccc

SEQ ID NO: 50527 - DNA, 22 bp, Artificial Sequence
  chemically synthesized
aatcagatttatttcccatcct

SEQ ID NO: 50528 - DNA, 22 bp, Artificial Sequence
  chemically synthesized
atcagatttatttcccatcctc

SEQ ID NO: 50529 - DNA, 22 bp, Artificial Sequence
  chemically synthesized
atttcccatcctctgtcccaca

SEQ ID NO: 50530 - DNA, 22 bp, Artificial Sequence
  chemically synthesized
tttcccatcctctgtcccacaa

SEQ ID NO: 50531 - DNA, 22 bp, Artificial Sequence
  chemically synthesized
cccatcctctgtcccacaaatg

SEQ ID NO: 50532 - DNA, 22 bp, Artificial Sequence
  chemically synthesized
ccatcctctgtcccacaaatgt

SEQ ID NO: 50533 - DNA, 22 bp, Artificial Sequence
  chemically synthesized
tgtcccacaaatgtctcatcaa

SEQ ID NO: 50534 - DNA, 22 bp, Artificial Sequence
  chemically synthesized
tcccacaaatgtctcatcaata

SEQ ID NO: 50535 - DNA, 22 bp, Artificial Sequence
  chemically synthesized
atcaataaatccagtgtgtttg

SEQ ID NO: 50536 - DNA, 22 bp, Artificial Sequence
  chemically synthesized
gctacttcttgctcactagttc

SEQ ID NO: 50537 - DNA, 22 bp, Artificial Sequence
  chemically synthesized
ctacttcttgctcactagttcc

SEQ ID NO: 50538 - DNA, 22 bp, Artificial Sequence
  chemically synthesized
cttcttgctcactagttccagt

SEQ ID NO: 50539 - DNA, 22 bp, Artificial Sequence
  chemically synthesized
cttgctcactagttccagtcag

SEQ ID NO: 50540 - DNA, 22 bp, Artificial Sequence
  chemically synthesized
ttgctcactagttccagtcagc

SEQ ID NO: 50541 - DNA, 22 bp, Artificial Sequence
  chemically synthesized
gctcactagttccagtcagcat

SEQ ID NO: 50542 - DNA, 22 bp, Artificial Sequence
  chemically synthesized
ctcactagttccagtcagcatg

SEQ ID NO: 50543 - DNA, 22 bp, Artificial Sequence
  chemically synthesized
actagttccagtcagcatgtca

SEQ ID NO: 50544 - DNA, 22 bp, Artificial Sequence
  chemically synthesized
gttccagtcagcatgtcatcaa

SEQ ID NO: 50545 - DNA, 22 bp, Artificial Sequence
  chemically synthesized
cagtcagcatgtcatcaatgta

SEQ ID NO: 50546 - DNA, 22 bp, Artificial Sequence
  chemically synthesized
tgatatcttgtggaagtgaaag

SEQ ID NO: 50547 - DNA, 22 bp, Artificial Sequence
  chemically synthesized
gtggaagtgaaaggtgagcaag

SEQ ID NO: 50548 - DNA, 22 bp, Artificial Sequence
  chemically synthesized
tggaagtgaaaggtgagcaagt

SEQ ID NO: 50549 - DNA, 22 bp, Artificial Sequence
  chemically synthesized
tctccaaataagattatggcac

SEQ ID NO: 50550 - DNA, 22 bp, Artificial Sequence
  chemically synthesized
tccaaataagattatggcacaa

SEQ ID NO: 50551 - DNA, 22 bp, Artificial Sequence
  chemically synthesized
caaataagattatggcacaaag

SEQ ID NO: 50552 - DNA, 22 bp, Artificial Sequence
  chemically synthesized
tggcacaaagctggagagttga

SEQ ID NO: 50553 - DNA, 22 bp, Artificial Sequence
  chemically synthesized
gagagttgatatactcctgagt

SEQ ID NO: 50554 - DNA, 22 bp, Artificial Sequence
  chemically synthesized
atatactcctgagttcatcatt

SEQ ID NO: 50555 - DNA, 22 bp, Artificial Sequence
  chemically synthesized
ctgagttcatcattttctttca

SEQ ID NO: 50556 - DNA, 22 bp, Artificial Sequence
  chemically synthesized
agttcatcattttctttcatca

SEQ ID NO: 50557 - DNA, 22 bp, Artificial Sequence
  chemically synthesized
atcattttctttcatcactttg

SEQ ID NO: 50558 - DNA, 22 bp, Artificial Sequence
  chemically synthesized
tctttcatcactttgtccagcg

SEQ ID NO: 50559 - DNA, 22 bp, Artificial Sequence
  chemically synthesized
ctttcatcactttgtccagcga

SEQ ID NO: 50560 - DNA, 22 bp, Artificial Sequence
  chemically synthesized
tttcatcactttgtccagcgaa

SEQ ID NO: 50561 - DNA, 22 bp, Artificial Sequence
  chemically synthesized
tcatcactttgtccagcgaact

SEQ ID NO: 50562 - DNA, 22 bp, Artificial Sequence
  chemically synthesized
catcactttgtccagcgaactt

SEQ ID NO: 50563 - DNA, 22 bp, Artificial Sequence
  chemically synthesized
atcactttgtccagcgaactta

SEQ ID NO: 50564 - DNA, 22 bp, Artificial Sequence
  chemically synthesized
tgtccagcgaacttacaagcaa

SEQ ID NO: 50565 - DNA, 22 bp, Artificial Sequence
  chemically synthesized
gtccagcgaacttacaagcaac

SEQ ID NO: 50566 - DNA, 22 bp, Artificial Sequence
  chemically synthesized
tccagcgaacttacaagcaacc

SEQ ID NO: 50567 - DNA, 22 bp, Artificial Sequence
  chemically synthesized
acaagcaaccaaccaacttcac

SEQ ID NO: 50568 - DNA, 22 bp, Artificial Sequence
  chemically synthesized
caagcaaccaaccaacttcact

SEQ ID NO: 50569 - DNA, 22 bp, Artificial Sequence
  chemically synthesized
cactatgttccttgattctcca

SEQ ID NO: 50570 - DNA, 22 bp, Artificial Sequence
  chemically synthesized
actatgttccttgattctccac

SEQ ID NO: 50571 - DNA, 22 bp, Artificial Sequence
  chemically synthesized
tgttccttgattctccacatat

SEQ ID NO: 50572 - DNA, 22 bp, Artificial Sequence
  chemically synthesized
cttgattctccacatatagtca

SEQ ID NO: 50573 - DNA, 22 bp, Artificial Sequence
  chemically synthesized
gattctccacatatagtcaaaa

SEQ ID NO: 50574 - DNA, 22 bp, Artificial Sequence
  chemically synthesized
attctccacatatagtcaaaag

SEQ ID NO: 50575 - DNA, 22 bp, Artificial Sequence
  chemically synthesized
tccacatatagtcaaaagtatt

SEQ ID NO: 50576 - DNA, 22 bp, Artificial Sequence
  chemically synthesized
cacatatagtcaaaagtattat

SEQ ID NO: 50577 - DNA, 22 bp, Artificial Sequence
  chemically synthesized
tgtatacagtagctaaattcct

SEQ ID NO: 50578 - DNA, 22 bp, Artificial Sequence
  chemically synthesized
aattccttgcctctcacaagcg

SEQ ID NO: 50579 - DNA, 22 bp, Artificial Sequence
  chemically synthesized
cttgcctctcacaagcgttgaa

SEQ ID NO: 50580 - DNA, 22 bp, Artificial Sequence
  chemically synthesized
gcctctcacaagcgttgaatca

SEQ ID NO: 50581 - DNA, 22 bp, Artificial Sequence
  chemically synthesized
cctctcacaagcgttgaatcaa

SEQ ID NO: 50582 - DNA, 22 bp, Artificial Sequence
  chemically synthesized
tcacaagcgttgaatcaagagt

SEQ ID NO: 50583 - DNA, 22 bp, Artificial Sequence
  chemically synthesized
acaagcgttgaatcaagagtgt

SEQ ID NO: 50584 - DNA, 22 bp, Artificial Sequence
  chemically synthesized
aatcaagagtgtcaaatgcatt

SEQ ID NO: 50585 - DNA, 22 bp, Artificial Sequence
  chemically synthesized
attttgcataactctctaaaca

SEQ ID NO: 50586 - DNA, 22 bp, Artificial Sequence
  chemically synthesized
ttttgcataactctctaaacaa

SEQ ID NO: 50587 - DNA, 22 bp, Artificial Sequence
  chemically synthesized
tgcataactctctaaacaattg

SEQ ID NO: 50588 - DNA, 22 bp, Artificial Sequence
  chemically synthesized
gcataactctctaaacaattga

SEQ ID NO: 50589 - DNA, 22 bp, Artificial Sequence
  chemically synthesized
cataactctctaaacaattgat

SEQ ID NO: 50590 - DNA, 22 bp, Artificial Sequence
  chemically synthesized
tctaaacaattgatgccaagga

SEQ ID NO: 50591 - DNA, 22 bp, Artificial Sequence
  chemically synthesized
taaacaattgatgccaaggatt

SEQ ID NO: 50592 - DNA, 22 bp, Artificial Sequence
  chemically synthesized
aacaattgatgccaaggattat

SEQ ID NO: 50593 - DNA, 22 bp, Artificial Sequence
  chemically synthesized
atgccaaggattatcagtgttc

SEQ ID NO: 50594 - DNA, 22 bp, Artificial Sequence
  chemically synthesized
tcagtgttctccataccattag

SEQ ID NO: 50595 - DNA, 22 bp, Artificial Sequence
  chemically synthesized
tccataccattagaagaagagt

SEQ ID NO: 50596 - DNA, 22 bp, Artificial Sequence
  chemically synthesized
cataccattagaagaagagtcc

SEQ ID NO: 50597 - DNA, 22 bp, Artificial Sequence
  chemically synthesized
gaagaagagtccttagcatatt

SEQ ID NO: 50598 - DNA, 22 bp, Artificial Sequence
  chemically synthesized
agcatatttgggtctaatcata

SEQ ID NO: 50599 - DNA, 22 bp, Artificial Sequence
  chemically synthesized
gcatatttgggtctaatcatat

SEQ ID NO: 50600 - DNA, 22 bp, Artificial Sequence
  chemically synthesized
gggtctaatcatattaagcagc

SEQ ID NO: 50601 - DNA, 22 bp, Artificial Sequence
  chemically synthesized
ggtctaatcatattaagcagcc

SEQ ID NO: 50602 - DNA, 22 bp, Artificial Sequence
  chemically synthesized
atcatattaagcagccaactcc

SEQ ID NO: 50603 - DNA, 22 bp, Artificial Sequence
  chemically synthesized
agcagccaactccagaaacccc

SEQ ID NO: 50604 - DNA, 22 bp, Artificial Sequence
  chemically synthesized
cagaaaccccaaaaccaatgaa

SEQ ID NO: 50605 - DNA, 22 bp, Artificial Sequence
  chemically synthesized
catccttaatattctgttcctc

SEQ ID NO: 50606 - DNA, 22 bp, Artificial Sequence
  chemically synthesized
aatattctgttcctctagaacc

SEQ ID NO: 50607 - DNA, 22 bp, Artificial Sequence
  chemically synthesized
atattctgttcctctagaacca

SEQ ID NO: 50608 - DNA, 22 bp, Artificial Sequence
  chemically synthesized
tgttcctctagaaccactcctg

SEQ ID NO: 50609 - DNA, 22 bp, Artificial Sequence
  chemically synthesized
ttcctctagaaccactcctggt

SEQ ID NO: 50610 - DNA, 22 bp, Artificial Sequence
  chemically synthesized
ctctagaaccactcctggtacc

SEQ ID NO: 50611 - DNA, 22 bp, Artificial Sequence
  chemically synthesized
tagaaccactcctggtaccaaa

SEQ ID NO: 50612 - DNA, 22 bp, Artificial Sequence
  chemically synthesized
gaaccactcctggtaccaaaat

SEQ ID NO: 50613 - DNA, 22 bp, Artificial Sequence
  chemically synthesized
ctggtaccaaaatctgtattag

SEQ ID NO: 50614 - DNA, 22 bp, Artificial Sequence
  chemically synthesized
gtaccaaaatctgtattagggt

SEQ ID NO: 50615 - DNA, 22 bp, Artificial Sequence
  chemically synthesized
tattagggttctacagagaaac

SEQ ID NO: 50616 - DNA, 22 bp, Artificial Sequence
  chemically synthesized
gggttctacagagaaacagaat

SEQ ID NO: 50617 - DNA, 22 bp, Artificial Sequence
  chemically synthesized
tacagagaaacagaattaatag

SEQ ID NO: 50618 - DNA, 22 bp, Artificial Sequence
  chemically synthesized
cagagaaacagaattaatagga

SEQ ID NO: 50619 - DNA, 22 bp, Artificial Sequence
  chemically synthesized
ataggagatatatatctatatc

SEQ ID NO: 50620 - DNA, 22 bp, Artificial Sequence
  chemically synthesized
tatctatatctatatctatatc

SEQ ID NO: 50621 - DNA, 22 bp, Artificial Sequence
  chemically synthesized
tatctatatctatatctatatc

SEQ ID NO: 50622 - DNA, 22 bp, Artificial Sequence
  chemically synthesized
tatctatatctatatctatatc

SEQ ID NO: 50623 - DNA, 22 bp, Artificial Sequence
  chemically synthesized
tatctatatctatatctatctc

SEQ ID NO: 50624 - DNA, 22 bp, Artificial Sequence
  chemically synthesized
tatctatatctatctctatatc

SEQ ID NO: 50625 - DNA, 22 bp, Artificial Sequence
  chemically synthesized
tatctatctctatatctatctc

SEQ ID NO: 50626 - DNA, 22 bp, Artificial Sequence
  chemically synthesized
tctctatatctatctctatatc

SEQ ID NO: 50627 - DNA, 22 bp, Artificial Sequence
  chemically synthesized
tatatctatctctatatctata

SEQ ID NO: 50628 - DNA, 22 bp, Artificial Sequence
  chemically synthesized
tatctatctctatatctatatc

SEQ ID NO: 50629 - DNA, 22 bp, Artificial Sequence
  chemically synthesized
tctctatatctatatctatatg

SEQ ID NO: 50630 - DNA, 22 bp, Artificial Sequence
  chemically synthesized
tatatctatatctatatgagag

SEQ ID NO: 50631 - DNA, 22 bp, Artificial Sequence
  chemically synthesized
tatctatatctatatgagagtt

SEQ ID NO: 50632 - DNA, 22 bp, Artificial Sequence
  chemically synthesized
tatctatatgagagtttattat

SEQ ID NO: 50633 - DNA, 22 bp, Artificial Sequence
  chemically synthesized
tatgagagtttattatgtagta

SEQ ID NO: 50634 - DNA, 22 bp, Artificial Sequence
  chemically synthesized
attatgtagtattgactcacat

SEQ ID NO: 50635 - DNA, 22 bp, Artificial Sequence
  chemically synthesized
ttatgtagtattgactcacatg

SEQ ID NO: 50636 - DNA, 22 bp, Artificial Sequence
  chemically synthesized
tgtagtattgactcacatgttc

SEQ ID NO: 50637 - DNA, 22 bp, Artificial Sequence
  chemically synthesized
actcacatgttcacaaggtccc

SEQ ID NO: 50638 - DNA, 22 bp, Artificial Sequence
  chemically synthesized
acatgttcacaaggtcccaaaa

SEQ ID NO: 50639 - DNA, 22 bp, Artificial Sequence
  chemically synthesized
acaaggtcccaaaacaggccat

SEQ ID NO: 50640 - DNA, 22 bp, Artificial Sequence
  chemically synthesized
ccagctgaggaacaaggaagct

SEQ ID NO: 50641 - DNA, 22 bp, Artificial Sequence
  chemically synthesized
aggaacaaggaagctagtcgga

SEQ ID NO: 50642 - DNA, 22 bp, Artificial Sequence
  chemically synthesized
gtcggagtcccaaagctgaaga

SEQ ID NO: 50643 - DNA, 22 bp, Artificial Sequence
  chemically synthesized
aagaacctggagttcaatgttc

SEQ ID NO: 50644 - DNA, 22 bp, Artificial Sequence
  chemically synthesized
gagttcaatgttccagggcagg

SEQ ID NO: 50645 - DNA, 22 bp, Artificial Sequence
  chemically synthesized
aatgttccagggcaggaagaat

SEQ ID NO: 50646 - DNA, 22 bp, Artificial Sequence
  chemically synthesized
cagggcaggaagaatccagcat

SEQ ID NO: 50647 - DNA, 22 bp, Artificial Sequence
  chemically synthesized
ggatgccaagccaatctagcct

SEQ ID NO: 50648 - DNA, 22 bp, Artificial Sequence
  chemically synthesized
gccttttcacatttttctgcct

SEQ ID NO: 50649 - DNA, 22 bp, Artificial Sequence
  chemically synthesized
ttcacatttttctgcctgcttt

SEQ ID NO: 50650 - DNA, 22 bp, Artificial Sequence
  chemically synthesized
tcacatttttctgcctgcttta

SEQ ID NO: 50651 - DNA, 22 bp, Artificial Sequence
  chemically synthesized
cacatttttctgcctgctttat

SEQ ID NO: 50652 - DNA, 22 bp, Artificial Sequence
  chemically synthesized
acatttttctgcctgctttata

SEQ ID NO: 50653 - DNA, 22 bp, Artificial Sequence
  chemically synthesized
ttctgcctgctttatatcctgg

SEQ ID NO: 50654 - DNA, 22 bp, Artificial Sequence
  chemically synthesized
tctgcctgctttatatcctggc

SEQ ID NO: 50655 - DNA, 22 bp, Artificial Sequence
  chemically synthesized
ctgcctgctttatatcctggct

SEQ ID NO: 50656 - DNA, 22 bp, Artificial Sequence
  chemically synthesized
tgcctgctttatatcctggctg

SEQ ID NO: 50657 - DNA, 22 bp, Artificial Sequence
  chemically synthesized
cctgctttatatcctggctgtg

SEQ ID NO: 50658 - DNA, 22 bp, Artificial Sequence
  chemically synthesized
ctttatatcctggctgtgctgg

SEQ ID NO: 50659 - DNA, 22 bp, Artificial Sequence
  chemically synthesized
tatatcctggctgtgctggcaa

SEQ ID NO: 50660 - DNA, 22 bp, Artificial Sequence
  chemically synthesized
atatcctggctgtgctggcaac

SEQ ID NO: 50661 - DNA, 22 bp, Artificial Sequence
  chemically synthesized
tatcctggctgtgctggcaact

SEQ ID NO: 50662 - DNA, 22 bp, Artificial Sequence
  chemically synthesized
gctgtgctggcaactgattaga

SEQ ID NO: 50663 - DNA, 22 bp, Artificial Sequence
  chemically synthesized
tgctggcaactgattagatggt

SEQ ID NO: 50664 - DNA, 22 bp, Artificial Sequence
  chemically synthesized
gcaactgattagatggtgccca

SEQ ID NO: 50665 - DNA, 22 bp, Artificial Sequence
  chemically synthesized
attagatggtgcccacccagat

SEQ ID NO: 50666 - DNA, 22 bp, Artificial Sequence
  chemically synthesized
gatggtgcccacccagattaag

SEQ ID NO: 50667 - DNA, 22 bp, Artificial Sequence
  chemically synthesized
agggtgggtctgccttccccag

SEQ ID NO: 50668 - DNA, 22 bp, Artificial Sequence
  chemically synthesized
ccttccccagcccactgactga

SEQ ID NO: 50669 - DNA, 22 bp, Artificial Sequence
  chemically synthesized
ccccagcccactgactgaaata

SEQ ID NO: 50670 - DNA, 22 bp, Artificial Sequence
  chemically synthesized
cccagcccactgactgaaatat

SEQ ID NO: 50671 - DNA, 22 bp, Artificial Sequence
  chemically synthesized
actgaaatattaatctcctttg

SEQ ID NO: 50672 - DNA, 22 bp, Artificial Sequence
  chemically synthesized
aaatattaatctcctttggtaa

SEQ ID NO: 50673 - DNA, 22 bp, Artificial Sequence
  chemically synthesized
atctcctttggtaacaccctca

SEQ ID NO: 50674 - DNA, 22 bp, Artificial Sequence
  chemically synthesized
ctttggtaacaccctcacagac

SEQ ID NO: 50675 - DNA, 22 bp, Artificial Sequence
  chemically synthesized
tggtaacaccctcacagacaca

SEQ ID NO: 50676 - DNA, 22 bp, Artificial Sequence
  chemically synthesized
ggtaacaccctcacagacacac

SEQ ID NO: 50677 - DNA, 22 bp, Artificial Sequence
  chemically synthesized
gtaacaccctcacagacacacc

SEQ ID NO: 50678 - DNA, 22 bp, Artificial Sequence
  chemically synthesized
acagacacacccaagatcatta

SEQ ID NO: 50679 - DNA, 22 bp, Artificial Sequence
  chemically synthesized
ctttgcatccttcagtccaatc

SEQ ID NO: 50680 - DNA, 22 bp, Artificial Sequence
  chemically synthesized
tgcatccttcagtccaatcaag

SEQ ID NO: 50681 - DNA, 22 bp, Artificial Sequence
  chemically synthesized
gcatccttcagtccaatcaagt

SEQ ID NO: 50682 - DNA, 22 bp, Artificial Sequence
  chemically synthesized
catccttcagtccaatcaagtt

SEQ ID NO: 50683 - DNA, 22 bp, Artificial Sequence
  chemically synthesized
cagtccaatcaagttgacactc

SEQ ID NO: 50684 - DNA, 22 bp, Artificial Sequence
  chemically synthesized
agtccaatcaagttgacactca

SEQ ID NO: 50685 - DNA, 22 bp, Artificial Sequence
  chemically synthesized
acactcagtattaaccatcaca

SEQ ID NO: 50686 - DNA, 22 bp, Artificial Sequence
  chemically synthesized
agtattaaccatcacagtcact

SEQ ID NO: 50687 - DNA, 22 bp, Artificial Sequence
  chemically synthesized
accatcacagtcactttctaat

SEQ ID NO: 50688 - DNA, 22 bp, Artificial Sequence
  chemically synthesized
tctaatgaggttggtttttttg

SEQ ID NO: 50689 - DNA, 22 bp, Artificial Sequence
  chemically synthesized
ctaatgaggttggtttttttgt

SEQ ID NO: 50690 - DNA, 22 bp, Artificial Sequence
  chemically synthesized
taatgaggttggtttttttgtt

SEQ ID NO: 50691 - DNA, 22 bp, Artificial Sequence
  chemically synthesized
atgaggttggtttttttgttgt

SEQ ID NO: 50692 - DNA, 22 bp, Artificial Sequence
  chemically synthesized
gtttttttgttgttgagttcct

SEQ ID NO: 50693 - DNA, 22 bp, Artificial Sequence
  chemically synthesized
ttttgttgttgagttccttgta

SEQ ID NO: 50694 - DNA, 22 bp, Artificial Sequence
  chemically synthesized
tttgttgttgagttccttgtag

SEQ ID NO: 50695 - DNA, 22 bp, Artificial Sequence
  chemically synthesized
ttgttgttgagttccttgtaga

SEQ ID NO: 50696 - DNA, 22 bp, Artificial Sequence
  chemically synthesized
tgttgttgagttccttgtagat

SEQ ID NO: 50697 - DNA, 22 bp, Artificial Sequence
  chemically synthesized
gttgttgagttccttgtagatt

SEQ ID NO: 50698 - DNA, 22 bp, Artificial Sequence
  chemically synthesized
ttgttgagttccttgtagattc

SEQ ID NO: 50699 - DNA, 22 bp, Artificial Sequence
  chemically synthesized
ttgagttccttgtagattctgt

SEQ ID NO: 50700 - DNA, 22 bp, Artificial Sequence
  chemically synthesized
agttccttgtagattctgtata

SEQ ID NO: 50701 - DNA, 22 bp, Artificial Sequence
  chemically synthesized
cttgtagattctgtatattagc

SEQ ID NO: 50702 - DNA, 22 bp, Artificial Sequence
  chemically synthesized
gtagattctgtatattagcctt

SEQ ID NO: 50703 - DNA, 22 bp, Artificial Sequence
  chemically synthesized
tagattctgtatattagccttt

SEQ ID NO: 50704 - DNA, 22 bp, Artificial Sequence
  chemically synthesized
tgtatattagccttttgttgca

SEQ ID NO: 50705 - DNA, 22 bp, Artificial Sequence
  chemically synthesized
tatattagccttttgttgcatt

SEQ ID NO: 50706 - DNA, 22 bp, Artificial Sequence
  chemically synthesized
gccttttgttgcattcatagtt

SEQ ID NO: 50707 - DNA, 22 bp, Artificial Sequence
  chemically synthesized
ttgttgcattcatagtttgcaa

SEQ ID NO: 50708 - DNA, 22 bp, Artificial Sequence
  chemically synthesized
tgttgcattcatagtttgcaat

SEQ ID NO: 50709 - DNA, 22 bp, Artificial Sequence
  chemically synthesized
gttgcattcatagtttgcaatt

SEQ ID NO: 50710 - DNA, 22 bp, Artificial Sequence
  chemically synthesized
ttgcattcatagtttgcaattt

SEQ ID NO: 50711 - DNA, 22 bp, Artificial Sequence
  chemically synthesized
cattcatagtttgcaatttttt

SEQ ID NO: 50712 - DNA, 22 bp, Artificial Sequence
  chemically synthesized
atagtttgcaatttttttttct

SEQ ID NO: 50713 - DNA, 22 bp, Artificial Sequence
  chemically synthesized
gcaatttttttttctcattctg

SEQ ID NO: 50714 - DNA, 22 bp, Artificial Sequence
  chemically synthesized
caatttttttttctcattctgt

SEQ ID NO: 50715 - DNA, 22 bp, Artificial Sequence
  chemically synthesized
ttttttctcattctgtaggtta

SEQ ID NO: 50716 - DNA, 22 bp, Artificial Sequence
  chemically synthesized
tttttctcattctgtaggttat

SEQ ID NO: 50717 - DNA, 22 bp, Artificial Sequence
  chemically synthesized
ttttctcattctgtaggttatc

SEQ ID NO: 50718 - DNA, 22 bp, Artificial Sequence
  chemically synthesized
tttctcattctgtaggttatcc

SEQ ID NO: 50719 - DNA, 22 bp, Artificial Sequence
  chemically synthesized
ttctcattctgtaggttatccg

SEQ ID NO: 50720 - DNA, 22 bp, Artificial Sequence
  chemically synthesized
tctcattctgtaggttatccgt

SEQ ID NO: 50721 - DNA, 22 bp, Artificial Sequence
  chemically synthesized
ctcattctgtaggttatccgtt

SEQ ID NO: 50722 - DNA, 22 bp, Artificial Sequence
  chemically synthesized
tcattctgtaggttatccgttt

SEQ ID NO: 50723 - DNA, 22 bp, Artificial Sequence
  chemically synthesized
attctgtaggttatccgtttac

SEQ ID NO: 50724 - DNA, 22 bp, Artificial Sequence
  chemically synthesized
tgtaggttatccgtttactctg

SEQ ID NO: 50725 - DNA, 22 bp, Artificial Sequence
  chemically synthesized
taggttatccgtttactctgtt

SEQ ID NO: 50726 - DNA, 22 bp, Artificial Sequence
  chemically synthesized
tccgtttactctgttgattcgg

SEQ ID NO: 50727 - DNA, 22 bp, Artificial Sequence
  chemically synthesized
actctgttgattcggtcttttg

SEQ ID NO: 50728 - DNA, 22 bp, Artificial Sequence
  chemically synthesized
ctctgttgattcggtcttttgc

SEQ ID NO: 50729 - DNA, 22 bp, Artificial Sequence
  chemically synthesized
tgttgattcggtcttttgcggt

SEQ ID NO: 50730 - DNA, 22 bp, Artificial Sequence
  chemically synthesized
ttgattcggtcttttgcggtgc

SEQ ID NO: 50731 - DNA, 22 bp, Artificial Sequence
  chemically synthesized
attcggtcttttgcggtgcaga

SEQ ID NO: 50732 - DNA, 22 bp, Artificial Sequence
  chemically synthesized
ggtcttttgcggtgcagaagca

SEQ ID NO: 50733 - DNA, 22 bp, Artificial Sequence
  chemically synthesized
ttgcggtgcagaagcattttag

SEQ ID NO: 50734 - DNA, 22 bp, Artificial Sequence
  chemically synthesized
tgcggtgcagaagcattttagt

SEQ ID NO: 50735 - DNA, 22 bp, Artificial Sequence
  chemically synthesized
gcggtgcagaagcattttagtt

SEQ ID NO: 50736 - DNA, 22 bp, Artificial Sequence
  chemically synthesized
cggtgcagaagcattttagttt

SEQ ID NO: 50737 - DNA, 22 bp, Artificial Sequence
  chemically synthesized
tagtttaattaagtcccatttg

SEQ ID NO: 50738 - DNA, 22 bp, Artificial Sequence
  chemically synthesized
agtttaattaagtcccatttgt

SEQ ID NO: 50739 - DNA, 22 bp, Artificial Sequence
  chemically synthesized
gtttaattaagtcccatttgtc

SEQ ID NO: 50740 - DNA, 22 bp, Artificial Sequence
  chemically synthesized
aattaagtcccatttgtctgtt

SEQ ID NO: 50741 - DNA, 22 bp, Artificial Sequence
  chemically synthesized
attaagtcccatttgtctgttt

SEQ ID NO: 50742 - DNA, 22 bp, Artificial Sequence
  chemically synthesized
agtcccatttgtctgtttttgt

SEQ ID NO: 50743 - DNA, 22 bp, Artificial Sequence
  chemically synthesized
gtctgtttttgtttttgttgtg

SEQ ID NO: 50744 - DNA, 22 bp, Artificial Sequence
  chemically synthesized
tctgtttttgtttttgttgtgt

SEQ ID NO: 50745 - DNA, 22 bp, Artificial Sequence
  chemically synthesized
tttttgtttttgttgtgtttag

SEQ ID NO: 50746 - DNA, 22 bp, Artificial Sequence
  chemically synthesized
ttgtttttgttgtgtttagttt

SEQ ID NO: 50747 - DNA, 22 bp, Artificial Sequence
  chemically synthesized
tgtttttgttgtgtttagtttt

SEQ ID NO: 50748 - DNA, 22 bp, Artificial Sequence
  chemically synthesized
gtttttgttgtgtttagttttg

SEQ ID NO: 50749 - DNA, 22 bp, Artificial Sequence
  chemically synthesized
tttttgttgtgtttagttttga

SEQ ID NO: 50750 - DNA, 22 bp, Artificial Sequence
  chemically synthesized
ttgttgtgtttagttttgagga

SEQ ID NO: 50751 - DNA, 22 bp, Artificial Sequence
  chemically synthesized
tgttgtgtttagttttgaggac

SEQ ID NO: 50752 - DNA, 22 bp, Artificial Sequence
  chemically synthesized
gttgtgtttagttttgaggact

SEQ ID NO: 50753 - DNA, 22 bp, Artificial Sequence
  chemically synthesized
ttgtgtttagttttgaggactt

SEQ ID NO: 50754 - DNA, 22 bp, Artificial Sequence
  chemically synthesized
tgtttagttttgaggacttggt

SEQ ID NO: 50755 - DNA, 22 bp, Artificial Sequence
  chemically synthesized
agttttgaggacttggtcataa

SEQ ID NO: 50756 - DNA, 22 bp, Artificial Sequence
  chemically synthesized
gttttgaggacttggtcataaa

SEQ ID NO: 50757 - DNA, 22 bp, Artificial Sequence
  chemically synthesized
tgaggacttggtcataaattct

SEQ ID NO: 50758 - DNA, 22 bp, Artificial Sequence
  chemically synthesized
gaggacttggtcataaattctt

SEQ ID NO: 50759 - DNA, 22 bp, Artificial Sequence
  chemically synthesized
aggacttggtcataaattcttt

SEQ ID NO: 50760 - DNA, 22 bp, Artificial Sequence
  chemically synthesized
ggtcataaattctttgcctagg

SEQ ID NO: 50761 - DNA, 22 bp, Artificial Sequence
  chemically synthesized
gtcataaattctttgcctaggc

SEQ ID NO: 50762 - DNA, 22 bp, Artificial Sequence
  chemically synthesized
tttgcctaggccacatctaatt

SEQ ID NO: 50763 - DNA, 22 bp, Artificial Sequence
  chemically synthesized
tgcctaggccacatctaatttt

SEQ ID NO: 50764 - DNA, 22 bp, Artificial Sequence
  chemically synthesized
gcctaggccacatctaattttt

SEQ ID NO: 50765 - DNA, 22 bp, Artificial Sequence
  chemically synthesized
cctaggccacatctaattttta

SEQ ID NO: 50766 - DNA, 22 bp, Artificial Sequence
  chemically synthesized
ggccacatctaatttttaatcc

SEQ ID NO: 50767 - DNA, 22 bp, Artificial Sequence
  chemically synthesized
atttttaatcctcttttagagc

SEQ ID NO: 50768 - DNA, 22 bp, Artificial Sequence
  chemically synthesized
ttaatcctcttttagagcctgt

SEQ ID NO: 50769 - DNA, 22 bp, Artificial Sequence
  chemically synthesized
taatcctcttttagagcctgtc

SEQ ID NO: 50770 - DNA, 22 bp, Artificial Sequence
  chemically synthesized
aatcctcttttagagcctgtct

SEQ ID NO: 50771 - DNA, 22 bp, Artificial Sequence
  chemically synthesized
atcctcttttagagcctgtctt

SEQ ID NO: 50772 - DNA, 22 bp, Artificial Sequence
  chemically synthesized
ttttagagcctgtctttccctc

SEQ ID NO: 50773 - DNA, 22 bp, Artificial Sequence
  chemically synthesized
ttagagcctgtctttccctcca

SEQ ID NO: 50774 - DNA, 22 bp, Artificial Sequence
  chemically synthesized
tagagcctgtctttccctccaa

SEQ ID NO: 50775 - DNA, 22 bp, Artificial Sequence
  chemically synthesized
agagcctgtctttccctccaaa

SEQ ID NO: 50776 - DNA, 22 bp, Artificial Sequence
  chemically synthesized
gagcctgtctttccctccaaac

SEQ ID NO: 50777 - DNA, 22 bp, Artificial Sequence
  chemically synthesized
tctttccctccaaactaaatat

SEQ ID NO: 50778 - DNA, 22 bp, Artificial Sequence
  chemically synthesized
tccctccaaactaaatattatt

SEQ ID NO: 50779 - DNA, 22 bp, Artificial Sequence
  chemically synthesized
ccctccaaactaaatattattt

SEQ ID NO: 50780 - DNA, 22 bp, Artificial Sequence
  chemically synthesized
cctccaaactaaatattatttt

SEQ ID NO: 50781 - DNA, 22 bp, Artificial Sequence
  chemically synthesized
caaactaaatattattttaccc

SEQ ID NO: 50782 - DNA, 22 bp, Artificial Sequence
  chemically synthesized
aatattattttacccccatttg

SEQ ID NO: 50783 - DNA, 22 bp, Artificial Sequence
  chemically synthesized
ttttacccccatttgacacatg

SEQ ID NO: 50784 - DNA, 22 bp, Artificial Sequence
  chemically synthesized
tacccccatttgacacatgagc

SEQ ID NO: 50785 - DNA, 22 bp, Artificial Sequence
  chemically synthesized
acccccatttgacacatgagct

SEQ ID NO: 50786 - DNA, 22 bp, Artificial Sequence
  chemically synthesized
cccccatttgacacatgagcta

SEQ ID NO: 50787 - DNA, 22 bp, Artificial Sequence
  chemically synthesized
gacacatgagctaattgagcct

SEQ ID NO: 50788 - DNA, 22 bp, Artificial Sequence
  chemically synthesized
acacatgagctaattgagcctt

SEQ ID NO: 50789 - DNA, 22 bp, Artificial Sequence
  chemically synthesized
attgagccttctgtctgttaag

SEQ ID NO: 50790 - DNA, 22 bp, Artificial Sequence
  chemically synthesized
agccttctgtctgttaagtaag

SEQ ID NO: 50791 - DNA, 22 bp, Artificial Sequence
  chemically synthesized
ctgtctgttaagtaagttgact

SEQ ID NO: 50792 - DNA, 22 bp, Artificial Sequence
  chemically synthesized
tgtctgttaagtaagttgacta

SEQ ID NO: 50793 - DNA, 22 bp, Artificial Sequence
  chemically synthesized
tctgttaagtaagttgactagt

SEQ ID NO: 50794 - DNA, 22 bp, Artificial Sequence
  chemically synthesized
ttaagtaagttgactagttcag

SEQ ID NO: 50795 - DNA, 22 bp, Artificial Sequence
  chemically synthesized
agtaagttgactagttcagtgt

SEQ ID NO: 50796 - DNA, 22 bp, Artificial Sequence
  chemically synthesized
actagttcagtgtaagttgttt

SEQ ID NO: 50797 - DNA, 22 bp, Artificial Sequence
  chemically synthesized
gttcagtgtaagttgtttctaa

SEQ ID NO: 50798 - DNA, 22 bp, Artificial Sequence
  chemically synthesized
agtgtaagttgtttctaatttt

SEQ ID NO: 50799 - DNA, 22 bp, Artificial Sequence
  chemically synthesized
tttctaattttttgccatcata

SEQ ID NO: 50800 - DNA, 22 bp, Artificial Sequence
  chemically synthesized
ctaattttttgccatcataatg

SEQ ID NO: 50801 - DNA, 22 bp, Artificial Sequence
  chemically synthesized
taattttttgccatcataatgc

SEQ ID NO: 50802 - DNA, 22 bp, Artificial Sequence
  chemically synthesized
attttttgccatcataatgctt

SEQ ID NO: 50803 - DNA, 22 bp, Artificial Sequence
  chemically synthesized
tttgccatcataatgctttagt

SEQ ID NO: 50804 - DNA, 22 bp, Artificial Sequence
  chemically synthesized
ttgccatcataatgctttagta

SEQ ID NO: 50805 - DNA, 22 bp, Artificial Sequence
  chemically synthesized
tgccatcataatgctttagtaa

SEQ ID NO: 50806 - DNA, 22 bp, Artificial Sequence
  chemically synthesized
gccatcataatgctttagtaaa

SEQ ID NO: 50807 - DNA, 22 bp, Artificial Sequence
  chemically synthesized
ccatcataatgctttagtaaac

SEQ ID NO: 50808 - DNA, 22 bp, Artificial Sequence
  chemically synthesized
tagtaaacatccttttcatact

SEQ ID NO: 50809 - DNA, 22 bp, Artificial Sequence
  chemically synthesized
agtaaacatccttttcatactc

SEQ ID NO: 50810 - DNA, 22 bp, Artificial Sequence
  chemically synthesized
gtaaacatccttttcatactct

SEQ ID NO: 50811 - DNA, 22 bp, Artificial Sequence
  chemically synthesized
ttcatactctccttaattttcc

SEQ ID NO: 50812 - DNA, 22 bp, Artificial Sequence
  chemically synthesized
tcatactctccttaattttccc

SEQ ID NO: 50813 - DNA, 22 bp, Artificial Sequence
  chemically synthesized
catactctccttaattttcccc

SEQ ID NO: 50814 - DNA, 22 bp, Artificial Sequence
  chemically synthesized
atactctccttaattttccccc

SEQ ID NO: 50815 - DNA, 22 bp, Artificial Sequence
  chemically synthesized
tccttaattttcccccaggatg

SEQ ID NO: 50816 - DNA, 22 bp, Artificial Sequence
  chemically synthesized
cttaattttcccccaggatggt

SEQ ID NO: 50817 - DNA, 22 bp, Artificial Sequence
  chemically synthesized
aattttcccccaggatggtttt

SEQ ID NO: 50818 - DNA, 22 bp, Artificial Sequence
  chemically synthesized
attttcccccaggatggttttc

SEQ ID NO: 50819 - DNA, 22 bp, Artificial Sequence
  chemically synthesized
tcccccaggatggttttctaga

SEQ ID NO: 50820 - DNA, 22 bp, Artificial Sequence
  chemically synthesized
cccccaggatggttttctagat

SEQ ID NO: 50821 - DNA, 22 bp, Artificial Sequence
  chemically synthesized
ccccaggatggttttctagatg

SEQ ID NO: 50822 - DNA, 22 bp, Artificial Sequence
  chemically synthesized
tctagatgtggacttgctggat

SEQ ID NO: 50823 - DNA, 22 bp, Artificial Sequence
  chemically synthesized
ctagatgtggacttgctggatc

SEQ ID NO: 50824 - DNA, 22 bp, Artificial Sequence
  chemically synthesized
tagatgtggacttgctggatcc

SEQ ID NO: 50825 - DNA, 22 bp, Artificial Sequence
  chemically synthesized
gatgtggacttgctggatccaa

SEQ ID NO: 50826 - DNA, 22 bp, Artificial Sequence
  chemically synthesized
gctggatccaaagtgtgcatat

SEQ ID NO: 50827 - DNA, 22 bp, Artificial Sequence
  chemically synthesized
ctggatccaaagtgtgcatatt

SEQ ID NO: 50828 - DNA, 22 bp, Artificial Sequence
  chemically synthesized
gatccaaagtgtgcatattttc

SEQ ID NO: 50829 - DNA, 22 bp, Artificial Sequence
  chemically synthesized
tccaaatgtatccatatattgt

SEQ ID NO: 50830 - DNA, 22 bp, Artificial Sequence
  chemically synthesized
ccaaatgtatccatatattgtg

SEQ ID NO: 50831 - DNA, 22 bp, Artificial Sequence
  chemically synthesized
caaatgtatccatatattgtgg

SEQ ID NO: 50832 - DNA, 22 bp, Artificial Sequence
  chemically synthesized
tggctttgtgttttaatagagg

SEQ ID NO: 50833 - DNA, 22 bp, Artificial Sequence
  chemically synthesized
tgtgttttaatagaggtagcag

SEQ ID NO: 50834 - DNA, 22 bp, Artificial Sequence
  chemically synthesized
gtgttttaatagaggtagcagc

SEQ ID NO: 50835 - DNA, 22 bp, Artificial Sequence
  chemically synthesized
tgttttaatagaggtagcagca

SEQ ID NO: 50836 - DNA, 22 bp, Artificial Sequence
  chemically synthesized
taatagaggtagcagcaatatt

SEQ ID NO: 50837 - DNA, 22 bp, Artificial Sequence
  chemically synthesized
aatagaggtagcagcaatatta

SEQ ID NO: 50838 - DNA, 22 bp, Artificial Sequence
  chemically synthesized
atagaggtagcagcaatattag

SEQ ID NO: 50839 - DNA, 22 bp, Artificial Sequence
  chemically synthesized
gaggagagaattaaggaacgat

SEQ ID NO: 50840 - DNA, 22 bp, Artificial Sequence
  chemically synthesized
aggaacgattctagtgtagcag

SEQ ID NO: 50841 - DNA, 22 bp, Artificial Sequence
  chemically synthesized
tagtgtagcaggacaagctgca

SEQ ID NO: 50842 - DNA, 22 bp, Artificial Sequence
  chemically synthesized
gtgtagcaggacaagctgcata

SEQ ID NO: 50843 - DNA, 22 bp, Artificial Sequence
  chemically synthesized
catacaaaacccctcagacacc

SEQ ID NO: 50844 - DNA, 22 bp, Artificial Sequence
  chemically synthesized
agacaccgagttaaagaaggaa

SEQ ID NO: 50845 - DNA, 22 bp, Artificial Sequence
  chemically synthesized
aagaaggaagggctttattcgg

SEQ ID NO: 50846 - DNA, 22 bp, Artificial Sequence
  chemically synthesized
tattcggctgggagcttgggca

SEQ ID NO: 50847 - DNA, 22 bp, Artificial Sequence
  chemically synthesized
attcggctgggagcttgggcaa

SEQ ID NO: 50848 - DNA, 22 bp, Artificial Sequence
  chemically synthesized
ttcggctgggagcttgggcaag

SEQ ID NO: 50849 - DNA, 22 bp, Artificial Sequence
  chemically synthesized
ggctgggagcttgggcaagact

SEQ ID NO: 50850 - DNA, 22 bp, Artificial Sequence
  chemically synthesized
ggagcttgggcaagactcacat

SEQ ID NO: 50851 - DNA, 22 bp, Artificial Sequence
  chemically synthesized
gggcaagactcacatctccaac

SEQ ID NO: 50852 - DNA, 22 bp, Artificial Sequence
  chemically synthesized
ggcaagactcacatctccaaca

SEQ ID NO: 50853 - DNA, 22 bp, Artificial Sequence
  chemically synthesized
acatctccaacaaccaagctct

SEQ ID NO: 50854 - DNA, 22 bp, Artificial Sequence
  chemically synthesized
caacaaccaagctctcagagtg

SEQ ID NO: 50855 - DNA, 22 bp, Artificial Sequence
  chemically synthesized
tcagagtgagcaattcctgtcc

SEQ ID NO: 50856 - DNA, 22 bp, Artificial Sequence
  chemically synthesized
agagtgagcaattcctgtccct

SEQ ID NO: 50857 - DNA, 22 bp, Artificial Sequence
  chemically synthesized
ctgtcccttttaagggcttaca

SEQ ID NO: 50858 - DNA, 22 bp, Artificial Sequence
  chemically synthesized
tcccttttaagggcttacaact

SEQ ID NO: 50859 - DNA, 22 bp, Artificial Sequence
  chemically synthesized
ttaagggcttacaactctaagg

SEQ ID NO: 50860 - DNA, 22 bp, Artificial Sequence
  chemically synthesized
taagggcttacaactctaaggg

SEQ ID NO: 50861 - DNA, 22 bp, Artificial Sequence
  chemically synthesized
aagggcttacaactctaagggg

SEQ ID NO: 50862 - DNA, 22 bp, Artificial Sequence
  chemically synthesized
agggcttacaactctaaggggg

SEQ ID NO: 50863 - DNA, 22 bp, Artificial Sequence
  chemically synthesized
acaactctaagggggtacatga

SEQ ID NO: 50864 - DNA, 22 bp, Artificial Sequence
  chemically synthesized
caactctaagggggtacatgac

SEQ ID NO: 50865 - DNA, 22 bp, Artificial Sequence
  chemically synthesized
taagggggtacatgactggggg

SEQ ID NO: 50866 - DNA, 22 bp, Artificial Sequence
  chemically synthesized
agggggtacatgactgggggct

SEQ ID NO: 50867 - DNA, 22 bp, Artificial Sequence
  chemically synthesized
ggggctgcatgcactggtcatc

SEQ ID NO: 50868 - DNA, 22 bp, Artificial Sequence
  chemically synthesized
catgcactggtcatcagaatgg

SEQ ID NO: 50869 - DNA, 22 bp, Artificial Sequence
  chemically synthesized
gtcatcagaatggaacagaaca

SEQ ID NO: 50870 - DNA, 22 bp, Artificial Sequence
  chemically synthesized
tcacactgcttttccatacagt

SEQ ID NO: 50871 - DNA, 22 bp, Artificial Sequence
  chemically synthesized
cacactgcttttccatacagtg

SEQ ID NO: 50872 - DNA, 22 bp, Artificial Sequence
  chemically synthesized
acactgcttttccatacagtgt

SEQ ID NO: 50873 - DNA, 22 bp, Artificial Sequence
  chemically synthesized
cttttccatacagtgtctggaa

SEQ ID NO: 50874 - DNA, 22 bp, Artificial Sequence
  chemically synthesized
ttccatacagtgtctggaatct

SEQ ID NO: 50875 - DNA, 22 bp, Artificial Sequence
  chemically synthesized
tccatacagtgtctggaatcta

SEQ ID NO: 50876 - DNA, 22 bp, Artificial Sequence
  chemically synthesized
ccatacagtgtctggaatctat

SEQ ID NO: 50877 - DNA, 22 bp, Artificial Sequence
  chemically synthesized
catacagtgtctggaatctata

SEQ ID NO: 50878 - DNA, 22 bp, Artificial Sequence
  chemically synthesized
gaatctatagataacataactg

SEQ ID NO: 50879 - DNA, 22 bp, Artificial Sequence
  chemically synthesized
tagataacataactggccaggt

SEQ ID NO: 50880 - DNA, 22 bp, Artificial Sequence
  chemically synthesized
gccaggtcaggggtctatcttt

SEQ ID NO: 50881 - DNA, 22 bp, Artificial Sequence
  chemically synthesized
tctttaaccaggcccaggatgt

SEQ ID NO: 50882 - DNA, 22 bp, Artificial Sequence
  chemically synthesized
taaccaggcccaggatgtggtc

SEQ ID NO: 50883 - DNA, 22 bp, Artificial Sequence
  chemically synthesized
aaccaggcccaggatgtggtct

SEQ ID NO: 50884 - DNA, 22 bp, Artificial Sequence
  chemically synthesized
accaggcccaggatgtggtctc

SEQ ID NO: 50885 - DNA, 22 bp, Artificial Sequence
  chemically synthesized
aggctgtttgcctgtggatttc

SEQ ID NO: 50886 - DNA, 22 bp, Artificial Sequence
  chemically synthesized
tttgcctgtggatttcatttct

SEQ ID NO: 50887 - DNA, 22 bp, Artificial Sequence
  chemically synthesized
gcctgtggatttcatttctgcc

SEQ ID NO: 50888 - DNA, 22 bp, Artificial Sequence
  chemically synthesized
cctgtggatttcatttctgcct

SEQ ID NO: 50889 - DNA, 22 bp, Artificial Sequence
  chemically synthesized
tggatttcatttctgcctttta

SEQ ID NO: 50890 - DNA, 22 bp, Artificial Sequence
  chemically synthesized
catttctgccttttagttttta

SEQ ID NO: 50891 - DNA, 22 bp, Artificial Sequence
  chemically synthesized
atttctgccttttagtttttac

SEQ ID NO: 50892 - DNA, 22 bp, Artificial Sequence
  chemically synthesized
ctgccttttagtttttacttct

SEQ ID NO: 50893 - DNA, 22 bp, Artificial Sequence
  chemically synthesized
tgccttttagtttttacttctt

SEQ ID NO: 50894 - DNA, 22 bp, Artificial Sequence
  chemically synthesized
ccttttagtttttacttcttct

SEQ ID NO: 50895 - DNA, 22 bp, Artificial Sequence
  chemically synthesized
ttagtttttacttcttctttct

SEQ ID NO: 50896 - DNA, 22 bp, Artificial Sequence
  chemically synthesized
tagtttttacttcttctttctt

SEQ ID NO: 50897 - DNA, 22 bp, Artificial Sequence
  chemically synthesized
agtttttacttcttctttcttt

SEQ ID NO: 50898 - DNA, 22 bp, Artificial Sequence
  chemically synthesized
gtttttacttcttctttctttg

SEQ ID NO: 50899 - DNA, 22 bp, Artificial Sequence
  chemically synthesized
ttacttcttctttctttggagg

SEQ ID NO: 50900 - DNA, 22 bp, Artificial Sequence
  chemically synthesized
tacttcttctttctttggaggc

SEQ ID NO: 50901 - DNA, 22 bp, Artificial Sequence
  chemically synthesized
acttcttctttctttggaggca

SEQ ID NO: 50902 - DNA, 22 bp, Artificial Sequence
  chemically synthesized
cttcttctttctttggaggcag

SEQ ID NO: 50903 - DNA, 22 bp, Artificial Sequence
  chemically synthesized
cttctttctttggaggcagaaa

SEQ ID NO: 50904 - DNA, 22 bp, Artificial Sequence
  chemically synthesized
ttctttctttggaggcagaaat

SEQ ID NO: 50905 - DNA, 22 bp, Artificial Sequence
  chemically synthesized
ctttctttggaggcagaaattg

SEQ ID NO: 50906 - DNA, 22 bp, Artificial Sequence
  chemically synthesized
tttctttggaggcagaaattgg

SEQ ID NO: 50907 - DNA, 22 bp, Artificial Sequence
  chemically synthesized
tctttggaggcagaaattgggc

SEQ ID NO: 50908 - DNA, 22 bp, Artificial Sequence
  chemically synthesized
ctttggaggcagaaattgggca

SEQ ID NO: 50909 - DNA, 22 bp, Artificial Sequence
  chemically synthesized
tttggaggcagaaattgggcat

SEQ ID NO: 50910 - DNA, 22 bp, Artificial Sequence
  chemically synthesized
tggaggcagaaattgggcataa

SEQ ID NO: 50911 - DNA, 22 bp, Artificial Sequence
  chemically synthesized
ggaggcagaaattgggcataaa

SEQ ID NO: 50912 - DNA, 22 bp, Artificial Sequence
  chemically synthesized
gaggcagaaattgggcataaaa

SEQ ID NO: 50913 - DNA, 22 bp, Artificial Sequence
  chemically synthesized
ggcataaaacaatatgaagggt

SEQ ID NO: 50914 - DNA, 22 bp, Artificial Sequence
  chemically synthesized
ctcccttactaggaagagagaa

SEQ ID NO: 50915 - DNA, 22 bp, Artificial Sequence
  chemically synthesized
ccttactaggaagagagaaata

SEQ ID NO: 50916 - DNA, 22 bp, Artificial Sequence
  chemically synthesized
actaggaagagagaaataccat

SEQ ID NO: 50917 - DNA, 22 bp, Artificial Sequence
  chemically synthesized
ctaggaagagagaaataccatg

SEQ ID NO: 50918 - DNA, 22 bp, Artificial Sequence
  chemically synthesized
ggaagagagaaataccatgtga

SEQ ID NO: 50919 - DNA, 22 bp, Artificial Sequence
  chemically synthesized
gtgttattggatttgacatcgg

SEQ ID NO: 50920 - DNA, 22 bp, Artificial Sequence
  chemically synthesized
tgttattggatttgacatcggg

SEQ ID NO: 50921 - DNA, 22 bp, Artificial Sequence
  chemically synthesized
ttggatttgacatcggggttgg

SEQ ID NO: 50922 - DNA, 22 bp, Artificial Sequence
  chemically synthesized
gatttgacatcggggttggacc

SEQ ID NO: 50923 - DNA, 22 bp, Artificial Sequence
  chemically synthesized
gacatcggggttggaccaagca

SEQ ID NO: 50924 - DNA, 22 bp, Artificial Sequence
  chemically synthesized
acatcggggttggaccaagcat

SEQ ID NO: 50925 - DNA, 22 bp, Artificial Sequence
  chemically synthesized
gaccaagcatcttctatgaaca

SEQ ID NO: 50926 - DNA, 22 bp, Artificial Sequence
  chemically synthesized
ctatgaacatctataagcacgt

SEQ ID NO: 50927 - DNA, 22 bp, Artificial Sequence
  chemically synthesized
tatgaacatctataagcacgtt

SEQ ID NO: 50928 - DNA, 22 bp, Artificial Sequence
  chemically synthesized
tgaacatctataagcacgttct

SEQ ID NO: 50929 - DNA, 22 bp, Artificial Sequence
  chemically synthesized
taagcacgttctccttatcaaa

SEQ ID NO: 50930 - DNA, 22 bp, Artificial Sequence
  chemically synthesized
tccttatcaaaaggtactttgc

SEQ ID NO: 50931 - DNA, 22 bp, Artificial Sequence
  chemically synthesized
cttatcaaaaggtactttgctt

SEQ ID NO: 50932 - DNA, 22 bp, Artificial Sequence
  chemically synthesized
atcaaaaggtactttgcttggt

SEQ ID NO: 50933 - DNA, 22 bp, Artificial Sequence
  chemically synthesized
tcaaaaggtactttgcttggtg

SEQ ID NO: 50934 - DNA, 22 bp, Artificial Sequence
  chemically synthesized
tgcttggtgctttaaaagataa

SEQ ID NO: 50935 - DNA, 22 bp, Artificial Sequence
  chemically synthesized
gcttggtgctttaaaagataaa

SEQ ID NO: 50936 - DNA, 22 bp, Artificial Sequence
  chemically synthesized
cttggtgctttaaaagataaat

SEQ ID NO: 50937 - DNA, 22 bp, Artificial Sequence
  chemically synthesized
ggtgctttaaaagataaatgac

SEQ ID NO: 50938 - DNA, 22 bp, Artificial Sequence
  chemically synthesized
gtgctttaaaagataaatgact

SEQ ID NO: 50939 - DNA, 22 bp, Artificial Sequence
  chemically synthesized
taaaagataaatgactatgtag

SEQ ID NO: 50940 - DNA, 22 bp, Artificial Sequence
  chemically synthesized
aaaagataaatgactatgtagc

SEQ ID NO: 50941 - DNA, 22 bp, Artificial Sequence
  chemically synthesized
aaagataaatgactatgtagct

SEQ ID NO: 50942 - DNA, 22 bp, Artificial Sequence
  chemically synthesized
tgtagcttaggagatttcttca

SEQ ID NO: 50943 - DNA, 22 bp, Artificial Sequence
  chemically synthesized
aggagatttcttcataattgaa

SEQ ID NO: 50944 - DNA, 22 bp, Artificial Sequence
  chemically synthesized
ggagatttcttcataattgaaa

SEQ ID NO: 50945 - DNA, 22 bp, Artificial Sequence
  chemically synthesized
cttcataattgaaaaccacagc

SEQ ID NO: 50946 - DNA, 22 bp, Artificial Sequence
  chemically synthesized
ttcataattgaaaaccacagca

SEQ ID NO: 50947 - DNA, 22 bp, Artificial Sequence
  chemically synthesized
cataattgaaaaccacagcagc

SEQ ID NO: 50948 - DNA, 22 bp, Artificial Sequence
  chemically synthesized
ataattgaaaaccacagcagct

SEQ ID NO: 50949 - DNA, 22 bp, Artificial Sequence
  chemically synthesized
aaaaccacagcagctgttattt

SEQ ID NO: 50950 - DNA, 22 bp, Artificial Sequence
  chemically synthesized
ttatttgaacatacctgagccc

SEQ ID NO: 50951 - DNA, 22 bp, Artificial Sequence
  chemically synthesized
tttgaacatacctgagcccctt

SEQ ID NO: 50952 - DNA, 22 bp, Artificial Sequence
  chemically synthesized
gaacatacctgagccccttctg

SEQ ID NO: 50953 - DNA, 22 bp, Artificial Sequence
  chemically synthesized
aacatacctgagccccttctgg

SEQ ID NO: 50954 - DNA, 22 bp, Artificial Sequence
  chemically synthesized
agccccttctggaccactgtag

SEQ ID NO: 50955 - DNA, 22 bp, Artificial Sequence
  chemically synthesized
ctggaccactgtaggagaagga

SEQ ID NO: 50956 - DNA, 22 bp, Artificial Sequence
  chemically synthesized
tggaccactgtaggagaaggag

SEQ ID NO: 50957 - DNA, 22 bp, Artificial Sequence
  chemically synthesized
gaccactgtaggagaaggagga

SEQ ID NO: 50958 - DNA, 22 bp, Artificial Sequence
  chemically synthesized
taggagaaggaggaagagaggt

SEQ ID NO: 50959 - DNA, 22 bp, Artificial Sequence
  chemically synthesized
ctgctgctgagggcatgtatga

SEQ ID NO: 50960 - DNA, 22 bp, Artificial Sequence
  chemically synthesized
tgctgctgagggcatgtatgat

SEQ ID NO: 50961 - DNA, 22 bp, Artificial Sequence
  chemically synthesized
ctgctgagggcatgtatgatga

SEQ ID NO: 50962 - DNA, 22 bp, Artificial Sequence
  chemically synthesized
ctgagggcatgtatgatgacaa

SEQ ID NO: 50963 - DNA, 22 bp, Artificial Sequence
  chemically synthesized
agggcatgtatgatgacaatgg

SEQ ID NO: 50964 - DNA, 22 bp, Artificial Sequence
  chemically synthesized
gtcctaactttgacactacaaa

SEQ ID NO: 50965 - DNA, 22 bp, Artificial Sequence
  chemically synthesized
tcctaactttgacactacaaag

SEQ ID NO: 50966 - DNA, 22 bp, Artificial Sequence
  chemically synthesized
actttgacactacaaagtgact

SEQ ID NO: 50967 - DNA, 22 bp, Artificial Sequence
  chemically synthesized
tgacactacaaagtgactggag

SEQ ID NO: 50968 - DNA, 22 bp, Artificial Sequence
  chemically synthesized
gacactacaaagtgactggagc

SEQ ID NO: 50969 - DNA, 22 bp, Artificial Sequence
  chemically synthesized
acactacaaagtgactggagct

SEQ ID NO: 50970 - DNA, 22 bp, Artificial Sequence
  chemically synthesized
caaagtgactggagctttaggc

SEQ ID NO: 50971 - DNA, 22 bp, Artificial Sequence
  chemically synthesized
gagctttaggcaagtagttact

SEQ ID NO: 50972 - DNA, 22 bp, Artificial Sequence
  chemically synthesized
taggcaagtagttactccaatt

SEQ ID NO: 50973 - DNA, 22 bp, Artificial Sequence
  chemically synthesized
aggcaagtagttactccaattg

SEQ ID NO: 50974 - DNA, 22 bp, Artificial Sequence
  chemically synthesized
ggcaagtagttactccaattgt

SEQ ID NO: 50975 - DNA, 22 bp, Artificial Sequence
  chemically synthesized
ctccaattgtcttttcagactc

SEQ ID NO: 50976 - DNA, 22 bp, Artificial Sequence
  chemically synthesized
caattgtcttttcagactcttt

SEQ ID NO: 50977 - DNA, 22 bp, Artificial Sequence
  chemically synthesized
tcttttcagactctttcttttt

SEQ ID NO: 50978 - DNA, 22 bp, Artificial Sequence
  chemically synthesized
ttcagactctttctttttgagg

SEQ ID NO: 50979 - DNA, 22 bp, Artificial Sequence
  chemically synthesized
tcagactctttctttttgaggt

SEQ ID NO: 50980 - DNA, 22 bp, Artificial Sequence
  chemically synthesized
cagactctttctttttgaggta

SEQ ID NO: 50981 - DNA, 22 bp, Artificial Sequence
  chemically synthesized
agactctttctttttgaggtat

SEQ ID NO: 50982 - DNA, 22 bp, Artificial Sequence
  chemically synthesized
tttctttttgaggtatttgacc

SEQ ID NO: 50983 - DNA, 22 bp, Artificial Sequence
  chemically synthesized
tctttttgaggtatttgacctc

SEQ ID NO: 50984 - DNA, 22 bp, Artificial Sequence
  chemically synthesized
ctttttgaggtatttgacctct

SEQ ID NO: 50985 - DNA, 22 bp, Artificial Sequence
  chemically synthesized
tttttgaggtatttgacctctt

SEQ ID NO: 50986 - DNA, 22 bp, Artificial Sequence
  chemically synthesized
tttgaggtatttgacctctttg

SEQ ID NO: 50987 - DNA, 22 bp, Artificial Sequence
  chemically synthesized
ttgaggtatttgacctctttgc

SEQ ID NO: 50988 - DNA, 22 bp, Artificial Sequence
  chemically synthesized
tgaggtatttgacctctttgcg

SEQ ID NO: 50989 - DNA, 22 bp, Artificial Sequence
  chemically synthesized
gaggtatttgacctctttgcgg

SEQ ID NO: 50990 - DNA, 22 bp, Artificial Sequence
  chemically synthesized
aggtatttgacctctttgcggc

SEQ ID NO: 50991 - DNA, 22 bp, Artificial Sequence
  chemically synthesized
gacctctttgcggcatcagcct

SEQ ID NO: 50992 - DNA, 22 bp, Artificial Sequence
  chemically synthesized
acctctttgcggcatcagcctg

SEQ ID NO: 50993 - DNA, 22 bp, Artificial Sequence
  chemically synthesized
tttgcggcatcagcctgctgct

SEQ ID NO: 50994 - DNA, 22 bp, Artificial Sequence
  chemically synthesized
tgcggcatcagcctgctgctat

SEQ ID NO: 50995 - DNA, 22 bp, Artificial Sequence
  chemically synthesized
gcggcatcagcctgctgctatt

SEQ ID NO: 50996 - DNA, 22 bp, Artificial Sequence
  chemically synthesized
cggcatcagcctgctgctattt

SEQ ID NO: 50997 - DNA, 22 bp, Artificial Sequence
  chemically synthesized
ctgctatttcacatgcacctag

SEQ ID NO: 50998 - DNA, 22 bp, Artificial Sequence
  chemically synthesized
ctatttcacatgcacctagaag

SEQ ID NO: 50999 - DNA, 22 bp, Artificial Sequence
  chemically synthesized
tttcacatgcacctagaaggga

SEQ ID NO: 51000 - DNA, 22 bp, Artificial Sequence
  chemically synthesized
cacatgcacctagaagggactt

SEQ ID NO: 51001 - DNA, 22 bp, Artificial Sequence
  chemically synthesized
acatgcacctagaagggacttt

SEQ ID NO: 51002 - DNA, 22 bp, Artificial Sequence
  chemically synthesized
gaagggactttaaaacatgcac

SEQ ID NO: 51003 - DNA, 22 bp, Artificial Sequence
  chemically synthesized
taaaacatgcacagaattgaac

SEQ ID NO: 51004 - DNA, 22 bp, Artificial Sequence
  chemically synthesized
aaaacatgcacagaattgaaca

SEQ ID NO: 51005 - DNA, 22 bp, Artificial Sequence
  chemically synthesized
aaacatgcacagaattgaacaa

SEQ ID NO: 51006 - DNA, 22 bp, Artificial Sequence
  chemically synthesized
aacaaagcagtaaccattcgtt

SEQ ID NO: 51007 - DNA, 22 bp, Artificial Sequence
  chemically synthesized
gttggtgtcccttaacaatatg

SEQ ID NO: 51008 - DNA, 22 bp, Artificial Sequence
  chemically synthesized
gtgtcccttaacaatatgtcaa

SEQ ID NO: 51009 - DNA, 22 bp, Artificial Sequence
  chemically synthesized
aacaatatgtcaaatactatta

SEQ ID NO: 51010 - DNA, 22 bp, Artificial Sequence
  chemically synthesized
acaatatgtcaaatactattat

SEQ ID NO: 51011 - DNA, 22 bp, Artificial Sequence
  chemically synthesized
ttatttttgaaaggtaaataaa

SEQ ID NO: 51012 - DNA, 22 bp, Artificial Sequence
  chemically synthesized
tttttgaaaggtaaataaatcc

SEQ ID NO: 51013 - DNA, 22 bp, Artificial Sequence
  chemically synthesized
ttgaaaggtaaataaatccttg

SEQ ID NO: 51014 - DNA, 22 bp, Artificial Sequence
  chemically synthesized
tgaaaggtaaataaatccttgg

SEQ ID NO: 51015 - DNA, 22 bp, Artificial Sequence
  chemically synthesized
gaaaggtaaataaatccttggg

SEQ ID NO: 51016 - DNA, 22 bp, Artificial Sequence
  chemically synthesized
aaaggtaaataaatccttgggc

SEQ ID NO: 51017 - DNA, 22 bp, Artificial Sequence
  chemically synthesized
gggcttagtggatcctaaatgc

SEQ ID NO: 51018 - DNA, 22 bp, Artificial Sequence
  chemically synthesized
ggcttagtggatcctaaatgct

SEQ ID NO: 51019 - DNA, 22 bp, Artificial Sequence
  chemically synthesized
agtggatcctaaatgctaattt

SEQ ID NO: 51020 - DNA, 22 bp, Artificial Sequence
  chemically synthesized
gtggatcctaaatgctaattta

SEQ ID NO: 51021 - DNA, 22 bp, Artificial Sequence
  chemically synthesized
aatgctaatttaaaaatctgaa

SEQ ID NO: 51022 - DNA, 22 bp, Artificial Sequence
  chemically synthesized
atttaaaaatctgaactcattt

SEQ ID NO: 51023 - DNA, 22 bp, Artificial Sequence
  chemically synthesized
aaaaatctgaactcatttccat

SEQ ID NO: 51024 - DNA, 22 bp, Artificial Sequence
  chemically synthesized
aaaatctgaactcatttccatc

SEQ ID NO: 51025 - DNA, 22 bp, Artificial Sequence
  chemically synthesized
aactcatttccatcccttatta

SEQ ID NO: 51026 - DNA, 22 bp, Artificial Sequence
  chemically synthesized
atttccatcccttattacttta

SEQ ID NO: 51027 - DNA, 22 bp, Artificial Sequence
  chemically synthesized
ccatcccttattactttaaaca

SEQ ID NO: 51028 - DNA, 22 bp, Artificial Sequence
  chemically synthesized
catcccttattactttaaacaa

SEQ ID NO: 51029 - DNA, 22 bp, Artificial Sequence
  chemically synthesized
attactttaaacaaattgctaa

SEQ ID NO: 51030 - DNA, 22 bp, Artificial Sequence
  chemically synthesized
ttactttaaacaaattgctaac

SEQ ID NO: 51031 - DNA, 22 bp, Artificial Sequence
  chemically synthesized
ctttaaacaaattgctaacctg

SEQ ID NO: 51032 - DNA, 22 bp, Artificial Sequence
  chemically synthesized
taaacaaattgctaacctgaat

SEQ ID NO: 51033 - DNA, 22 bp, Artificial Sequence
  chemically synthesized
aaacaaattgctaacctgaatg

SEQ ID NO: 51034 - DNA, 22 bp, Artificial Sequence
  chemically synthesized
aacaaattgctaacctgaatga

SEQ ID NO: 51035 - DNA, 22 bp, Artificial Sequence
  chemically synthesized
ctaacctgaatgataatagaaa

SEQ ID NO: 51036 - DNA, 22 bp, Artificial Sequence
  chemically synthesized
acctgaatgataatagaaactt

SEQ ID NO: 51037 - DNA, 22 bp, Artificial Sequence
  chemically synthesized
aatgataatagaaacttttttc

SEQ ID NO: 51038 - DNA, 22 bp, Artificial Sequence
  chemically synthesized
ttttccttttaacagttggagg

SEQ ID NO: 51039 - DNA, 22 bp, Artificial Sequence
  chemically synthesized
tttccttttaacagttggaggc

SEQ ID NO: 51040 - DNA, 22 bp, Artificial Sequence
  chemically synthesized
ttccttttaacagttggaggca

SEQ ID NO: 51041 - DNA, 22 bp, Artificial Sequence
  chemically synthesized
tccttttaacagttggaggcat

SEQ ID NO: 51042 - DNA, 22 bp, Artificial Sequence
  chemically synthesized
ccttttaacagttggaggcatc

SEQ ID NO: 51043 - DNA, 22 bp, Artificial Sequence
  chemically synthesized
cttttaacagttggaggcatct

SEQ ID NO: 51044 - DNA, 22 bp, Artificial Sequence
  chemically synthesized
ttaacagttggaggcatctata

SEQ ID NO: 51045 - DNA, 22 bp, Artificial Sequence
  chemically synthesized
taacagttggaggcatctatac

SEQ ID NO: 51046 - DNA, 22 bp, Artificial Sequence
  chemically synthesized
aacagttggaggcatctatact

SEQ ID NO: 51047 - DNA, 22 bp, Artificial Sequence
  chemically synthesized
acagttggaggcatctatactg

SEQ ID NO: 51048 - DNA, 22 bp, Artificial Sequence
  chemically synthesized
gaggcatctatactgtgattca

SEQ ID NO: 51049 - DNA, 22 bp, Artificial Sequence
  chemically synthesized
tactgtgattcagacaaaggcc

SEQ ID NO: 51050 - DNA, 22 bp, Artificial Sequence
  chemically synthesized
tgattcagacaaaggccaaaac

SEQ ID NO: 51051 - DNA, 22 bp, Artificial Sequence
  chemically synthesized
agacaaaggccaaaacaacagc

SEQ ID NO: 51052 - DNA, 22 bp, Artificial Sequence
  chemically synthesized
ttttctgataggtccatatttt

SEQ ID NO: 51053 - DNA, 22 bp, Artificial Sequence
  chemically synthesized
tctgataggtccatattttgag

SEQ ID NO: 51054 - DNA, 22 bp, Artificial Sequence
  chemically synthesized
ctgataggtccatattttgagc

SEQ ID NO: 51055 - DNA, 22 bp, Artificial Sequence
  chemically synthesized
tgataggtccatattttgagca

SEQ ID NO: 51056 - DNA, 22 bp, Artificial Sequence
  chemically synthesized
ataggtccatattttgagcata

SEQ ID NO: 51057 - DNA, 22 bp, Artificial Sequence
  chemically synthesized
tgagcataatatgaagactcag

SEQ ID NO: 51058 - DNA, 22 bp, Artificial Sequence
  chemically synthesized
gagcataatatgaagactcagg

SEQ ID NO: 51059 - DNA, 22 bp, Artificial Sequence
  chemically synthesized
agcataatatgaagactcaggt

SEQ ID NO: 51060 - DNA, 22 bp, Artificial Sequence
  chemically synthesized
aggtggaacagtgtgaacctgt

SEQ ID NO: 51061 - DNA, 22 bp, Artificial Sequence
  chemically synthesized
taaatgatgctgtcagaagagc

SEQ ID NO: 51062 - DNA, 22 bp, Artificial Sequence
  chemically synthesized
tcagaagagcagtggacgcaat

SEQ ID NO: 51063 - DNA, 20 bp, Artificial Sequence
  chemically synthesized
tgtccttctggcagggaacc

SEQ ID NO: 51064 - DNA, 20 bp, Artificial Sequence
  chemically synthesized
gtccttctggcagggaacct

SEQ ID NO: 51065 - DNA, 20 bp, Artificial Sequence
  chemically synthesized
cttctggcagggaacctggg

SEQ ID NO: 51066 - DNA, 20 bp, Artificial Sequence
  chemically synthesized
tggcagggaacctgggcagc

SEQ ID NO: 51067 - DNA, 20 bp, Artificial Sequence
  chemically synthesized
ggcagggaacctgggcagcg

SEQ ID NO: 51068 - DNA, 20 bp, Artificial Sequence
  chemically synthesized
tgggcagcgaggatcctctg

SEQ ID NO: 51069 - DNA, 20 bp, Artificial Sequence
  chemically synthesized
agaacactcattcccaaatc

SEQ ID NO: 51070 - DNA, 20 bp, Artificial Sequence
  chemically synthesized
ccaaatccagaaatgtactg

SEQ ID NO: 51071 - DNA, 20 bp, Artificial Sequence
  chemically synthesized
caaatccagaaatgtactgt

SEQ ID NO: 51072 - DNA, 20 bp, Artificial Sequence
  chemically synthesized
gaaatgtactgtaggtgaca

SEQ ID NO: 51073 - DNA, 20 bp, Artificial Sequence
  chemically synthesized
aaagacacaaatgccaccat

SEQ ID NO: 51074 - DNA, 20 bp, Artificial Sequence
  chemically synthesized
gacacaaatgccaccattag

SEQ ID NO: 51075 - DNA, 20 bp, Artificial Sequence
  chemically synthesized
acacaaatgccaccattagc

SEQ ID NO: 51076 - DNA, 20 bp, Artificial Sequence
  chemically synthesized
gccaccattagcaggattta

SEQ ID NO: 51077 - DNA, 20 bp, Artificial Sequence
  chemically synthesized
caccattagcaggatttaaa

SEQ ID NO: 51078 - DNA, 20 bp, Artificial Sequence
  chemically synthesized
gcaggatttaaagagcattt

SEQ ID NO: 51079 - DNA, 20 bp, Artificial Sequence
  chemically synthesized
taaagagcatttcagaaaat

SEQ ID NO: 51080 - DNA, 20 bp, Artificial Sequence
  chemically synthesized
agagcatttcagaaaattgg

SEQ ID NO: 51081 - DNA, 20 bp, Artificial Sequence
  chemically synthesized
cagaaaattggcagtttact

SEQ ID NO: 51082 - DNA, 20 bp, Artificial Sequence
  chemically synthesized
agaaaattggcagtttacta

SEQ ID NO: 51083 - DNA, 20 bp, Artificial Sequence
  chemically synthesized
aattggcagtttactaaggt

SEQ ID NO: 51084 - DNA, 20 bp, Artificial Sequence
  chemically synthesized
ctaaggtaagaatttctata

SEQ ID NO: 51085 - DNA, 20 bp, Artificial Sequence
  chemically synthesized
gtcttgacatatgaatcatt

SEQ ID NO: 51086 - DNA, 20 bp, Artificial Sequence
  chemically synthesized
tcttgacatatgaatcattt

SEQ ID NO: 51087 - DNA, 20 bp, Artificial Sequence
  chemically synthesized
cttgacatatgaatcattta

SEQ ID NO: 51088 - DNA, 20 bp, Artificial Sequence
  chemically synthesized
gacatatgaatcatttaggg

SEQ ID NO: 51089 - DNA, 20 bp, Artificial Sequence
  chemically synthesized
atcatttagggaagacaata

SEQ ID NO: 51090 - DNA, 20 bp, Artificial Sequence
  chemically synthesized
tatggtttctgtgaatttta

SEQ ID NO: 51091 - DNA, 20 bp, Artificial Sequence
  chemically synthesized
tttaaagacttctaattaat

SEQ ID NO: 51092 - DNA, 20 bp, Artificial Sequence
  chemically synthesized
aaagacttctaattaatcag

SEQ ID NO: 51093 - DNA, 20 bp, Artificial Sequence
  chemically synthesized
agacttctaattaatcagaa

SEQ ID NO: 51094 - DNA, 20 bp, Artificial Sequence
  chemically synthesized
ctaattaatcagaagagtgc

SEQ ID NO: 51095 - DNA, 20 bp, Artificial Sequence
  chemically synthesized
gaagagtgctggatattgca

SEQ ID NO: 51096 - DNA, 20 bp, Artificial Sequence
  chemically synthesized
tgcatagacttctccaccct

SEQ ID NO: 51097 - DNA, 20 bp, Artificial Sequence
  chemically synthesized
tctccacccttagctgtact

SEQ ID NO: 51098 - DNA, 20 bp, Artificial Sequence
  chemically synthesized
agctgtacttagctgatttg

SEQ ID NO: 51099 - DNA, 20 bp, Artificial Sequence
  chemically synthesized
gctgtacttagctgatttgt

SEQ ID NO: 51100 - DNA, 20 bp, Artificial Sequence
  chemically synthesized
actgtaacctccctgaactt

SEQ ID NO: 51101 - DNA, 20 bp, Artificial Sequence
  chemically synthesized
tccatttccctttcaaactc

SEQ ID NO: 51102 - DNA, 20 bp, Artificial Sequence
  chemically synthesized
ccatttccctttcaaactct

SEQ ID NO: 51103 - DNA, 20 bp, Artificial Sequence
  chemically synthesized
tttcaaactctgggaaaaaa

SEQ ID NO: 51104 - DNA, 20 bp, Artificial Sequence
  chemically synthesized
actctgggaaaaaaaagaaa

SEQ ID NO: 51105 - DNA, 20 bp, Artificial Sequence
  chemically synthesized
aaaaagaaaaagcatctatg

SEQ ID NO: 51106 - DNA, 20 bp, Artificial Sequence
  chemically synthesized
aaagaaaaagcatctatgaa

SEQ ID NO: 51107 - DNA, 20 bp, Artificial Sequence
  chemically synthesized
aagaaaaagcatctatgaag

SEQ ID NO: 51108 - DNA, 20 bp, Artificial Sequence
  chemically synthesized
agcatctatgaagaggtgtg

SEQ ID NO: 51109 - DNA, 20 bp, Artificial Sequence
  chemically synthesized
gcatctatgaagaggtgtgt

SEQ ID NO: 51110 - DNA, 20 bp, Artificial Sequence
  chemically synthesized
gtgtgtgggtccaaccctga

SEQ ID NO: 51111 - DNA, 20 bp, Artificial Sequence
  chemically synthesized
cagcaaaaccctctccaaac

SEQ ID NO: 51112 - DNA, 20 bp, Artificial Sequence
  chemically synthesized
tctccaaactagccttgctg

SEQ ID NO: 51113 - DNA, 20 bp, Artificial Sequence
  chemically synthesized
ctccaaactagccttgctgt

SEQ ID NO: 51114 - DNA, 20 bp, Artificial Sequence
  chemically synthesized
caaactagccttgctgtagg

SEQ ID NO: 51115 - DNA, 20 bp, Artificial Sequence
  chemically synthesized
actagccttgctgtaggcag

SEQ ID NO: 51116 - DNA, 20 bp, Artificial Sequence
  chemically synthesized
tctgctatctgcctcatcta

SEQ ID NO: 51117 - DNA, 20 bp, Artificial Sequence
  chemically synthesized
tgtgcgaatgcatgaaaata

SEQ ID NO: 51118 - DNA, 20 bp, Artificial Sequence
  chemically synthesized
atgcatgaaaataaagttta

SEQ ID NO: 51119 - DNA, 20 bp, Artificial Sequence
  chemically synthesized
gaaaataaagtttaaagata

SEQ ID NO: 51120 - DNA, 20 bp, Artificial Sequence
  chemically synthesized
aaaataaagtttaaagatat

SEQ ID NO: 51121 - DNA, 20 bp, Artificial Sequence
  chemically synthesized
ataaagtttaaagatatggg

SEQ ID NO: 51122 - DNA, 20 bp, Artificial Sequence
  chemically synthesized
ttaaagatatgggtggcctt

SEQ ID NO: 51123 - DNA, 20 bp, Artificial Sequence
  chemically synthesized
taaagatatgggtggccttc

SEQ ID NO: 51124 - DNA, 20 bp, Artificial Sequence
  chemically synthesized
aagatatgggtggccttcag

SEQ ID NO: 51125 - DNA, 20 bp, Artificial Sequence
  chemically synthesized
gtggccttcaggagacacgc

SEQ ID NO: 51126 - DNA, 20 bp, Artificial Sequence
  chemically synthesized
cttcaggagacacgccagcc

SEQ ID NO: 51127 - DNA, 20 bp, Artificial Sequence
  chemically synthesized
atcttttcacaatgacacaa

SEQ ID NO: 51128 - DNA, 20 bp, Artificial Sequence
  chemically synthesized
ccatctcttcactttacacc

SEQ ID NO: 51129 - DNA, 20 bp, Artificial Sequence
  chemically synthesized
atctcttcactttacaccca

SEQ ID NO: 51130 - DNA, 20 bp, Artificial Sequence
  chemically synthesized
tctcttcactttacacccag

SEQ ID NO: 51131 - DNA, 20 bp, Artificial Sequence
  chemically synthesized
ttacacccagaggaaaaaaa

SEQ ID NO: 51132 - DNA, 20 bp, Artificial Sequence
  chemically synthesized
ccagaggaaaaaaaaagtta

SEQ ID NO: 51133 - DNA, 20 bp, Artificial Sequence
  chemically synthesized
cagaggaaaaaaaaagttaa

SEQ ID NO: 51134 - DNA, 20 bp, Artificial Sequence
  chemically synthesized
agaggaaaaaaaaagttaaa

SEQ ID NO: 51135 - DNA, 20 bp, Artificial Sequence
  chemically synthesized
aagttaaagggtttctcaac

SEQ ID NO: 51136 - DNA, 20 bp, Artificial Sequence
  chemically synthesized
agttaaagggtttctcaacc

SEQ ID NO: 51137 - DNA, 20 bp, Artificial Sequence
  chemically synthesized
aaagggtttctcaaccaggt

SEQ ID NO: 51138 - DNA, 20 bp, Artificial Sequence
  chemically synthesized
tttctcaaccaggtaagtca

SEQ ID NO: 51139 - DNA, 20 bp, Artificial Sequence
  chemically synthesized
tctcaaccaggtaagtcatg

SEQ ID NO: 51140 - DNA, 20 bp, Artificial Sequence
  chemically synthesized
tcaaccaggtaagtcatgga

SEQ ID NO: 51141 - DNA, 20 bp, Artificial Sequence
  chemically synthesized
gcaacactcaacacacttgt

SEQ ID NO: 51142 - DNA, 20 bp, Artificial Sequence
  chemically synthesized
gtgagttcttgtgcactgtc

SEQ ID NO: 51143 - DNA, 20 bp, Artificial Sequence
  chemically synthesized
gcactgtctggcttttttgc

SEQ ID NO: 51144 - DNA, 20 bp, Artificial Sequence
  chemically synthesized
tggcttttttgctagcctat

SEQ ID NO: 51145 - DNA, 20 bp, Artificial Sequence
  chemically synthesized
gctagcctataagctgcatg

SEQ ID NO: 51146 - DNA, 20 bp, Artificial Sequence
  chemically synthesized
ctagcctataagctgcatga

SEQ ID NO: 51147 - DNA, 20 bp, Artificial Sequence
  chemically synthesized
ctataagctgcatgaaggct

SEQ ID NO: 51148 - DNA, 20 bp, Artificial Sequence
  chemically synthesized
ctgcatgaaggctgagacta

SEQ ID NO: 51149 - DNA, 20 bp, Artificial Sequence
  chemically synthesized
catgaaggctgagactatgg

SEQ ID NO: 51150 - DNA, 20 bp, Artificial Sequence
  chemically synthesized
ggctgagactatggcagtct

SEQ ID NO: 51151 - DNA, 20 bp, Artificial Sequence
  chemically synthesized
actatggcagtcttggctca

SEQ ID NO: 51152 - DNA, 20 bp, Artificial Sequence
  chemically synthesized
atggcagtcttggctcatag

SEQ ID NO: 51153 - DNA, 20 bp, Artificial Sequence
  chemically synthesized
tggcagtcttggctcataga

SEQ ID NO: 51154 - DNA, 20 bp, Artificial Sequence
  chemically synthesized
cttggctcatagaaggtaat

SEQ ID NO: 51155 - DNA, 20 bp, Artificial Sequence
  chemically synthesized
ggctcatagaaggtaatcag

SEQ ID NO: 51156 - DNA, 20 bp, Artificial Sequence
  chemically synthesized
ttgattgaatttttccctta

SEQ ID NO: 51157 - DNA, 20 bp, Artificial Sequence
  chemically synthesized
cttaaagccaattctaatgt

SEQ ID NO: 51158 - DNA, 20 bp, Artificial Sequence
  chemically synthesized
tgtatgtgtgctgctgtaaa

SEQ ID NO: 51159 - DNA, 20 bp, Artificial Sequence
  chemically synthesized
gtatgtgtgctgctgtaaat

SEQ ID NO: 51160 - DNA, 20 bp, Artificial Sequence
  chemically synthesized
tatgtgtgctgctgtaaata

SEQ ID NO: 51161 - DNA, 20 bp, Artificial Sequence
  chemically synthesized
tgtgctgctgtaaatagggt

SEQ ID NO: 51162 - DNA, 20 bp, Artificial Sequence
  chemically synthesized
acttaaataccaattgattt

SEQ ID NO: 51163 - DNA, 20 bp, Artificial Sequence
  chemically synthesized
aataccaattgattttagcc

SEQ ID NO: 51164 - DNA, 20 bp, Artificial Sequence
  chemically synthesized
ataccaattgattttagccc

SEQ ID NO: 51165 - DNA, 20 bp, Artificial Sequence
  chemically synthesized
agcccaggataatgaaaatg

SEQ ID NO: 51166 - DNA, 20 bp, Artificial Sequence
  chemically synthesized
aatgaaaatgcagtcttgct

SEQ ID NO: 51167 - DNA, 20 bp, Artificial Sequence
  chemically synthesized
aaaatgcagtcttgctcagc

SEQ ID NO: 51168 - DNA, 20 bp, Artificial Sequence
  chemically synthesized
gaaatgtaaccatctgaaca

SEQ ID NO: 51169 - DNA, 20 bp, Artificial Sequence
  chemically synthesized
ccatctgaacacagctcctt

SEQ ID NO: 51170 - DNA, 20 bp, Artificial Sequence
  chemically synthesized
atctgaacacagctccttaa

SEQ ID NO: 51171 - DNA, 20 bp, Artificial Sequence
  chemically synthesized
cacagctccttaagagatat

SEQ ID NO: 51172 - DNA, 20 bp, Artificial Sequence
  chemically synthesized
agctccttaagagatataag

SEQ ID NO: 51173 - DNA, 20 bp, Artificial Sequence
  chemically synthesized
gctccttaagagatataaga

SEQ ID NO: 51174 - DNA, 20 bp, Artificial Sequence
  chemically synthesized
ctccttaagagatataagaa

SEQ ID NO: 51175 - DNA, 20 bp, Artificial Sequence
  chemically synthesized
cttaagagatataagaaggg

SEQ ID NO: 51176 - DNA, 20 bp, Artificial Sequence
  chemically synthesized
aagagatataagaagggtgg

SEQ ID NO: 51177 - DNA, 20 bp, Artificial Sequence
  chemically synthesized
agatataagaagggtggaag

SEQ ID NO: 51178 - DNA, 20 bp, Artificial Sequence
  chemically synthesized
gatataagaagggtggaagt

SEQ ID NO: 51179 - DNA, 20 bp, Artificial Sequence
  chemically synthesized
aagaagggtggaagtgggtg

SEQ ID NO: 51180 - DNA, 20 bp, Artificial Sequence
  chemically synthesized
agaagggtggaagtgggtga

SEQ ID NO: 51181 - DNA, 20 bp, Artificial Sequence
  chemically synthesized
gaagggtggaagtgggtgaa

SEQ ID NO: 51182 - DNA, 20 bp, Artificial Sequence
  chemically synthesized
gggtggaagtgggtgaaggg

SEQ ID NO: 51183 - DNA, 20 bp, Artificial Sequence
  chemically synthesized
ggtggaagtgggtgaagggt

SEQ ID NO: 51184 - DNA, 20 bp, Artificial Sequence
  chemically synthesized
tgggtgaagggtaggccctc

SEQ ID NO: 51185 - DNA, 20 bp, Artificial Sequence
  chemically synthesized
ggtgaagggtaggccctcca

SEQ ID NO: 51186 - DNA, 20 bp, Artificial Sequence
  chemically synthesized
ggtaggccctccagagttct

SEQ ID NO: 51187 - DNA, 20 bp, Artificial Sequence
  chemically synthesized
tccagagttctcagttgttg

SEQ ID NO: 51188 - DNA, 20 bp, Artificial Sequence
  chemically synthesized
ccagagttctcagttgttgc

SEQ ID NO: 51189 - DNA, 20 bp, Artificial Sequence
  chemically synthesized
gagttctcagttgttgcggg

SEQ ID NO: 51190 - DNA, 20 bp, Artificial Sequence
  chemically synthesized
ctcagttgttgcgggaagtc

SEQ ID NO: 51191 - DNA, 20 bp, Artificial Sequence
  chemically synthesized
tcagttgttgcgggaagtct

SEQ ID NO: 51192 - DNA, 20 bp, Artificial Sequence
  chemically synthesized
gggaagtctgggactccaaa

SEQ ID NO: 51193 - DNA, 20 bp, Artificial Sequence
  chemically synthesized
gaagtctgggactccaaacg

SEQ ID NO: 51194 - DNA, 20 bp, Artificial Sequence
  chemically synthesized
aagtctgggactccaaacgg

SEQ ID NO: 51195 - DNA, 20 bp, Artificial Sequence
  chemically synthesized
agtctgggactccaaacgga

SEQ ID NO: 51196 - DNA, 20 bp, Artificial Sequence
  chemically synthesized
gggactccaaacggagggat

SEQ ID NO: 51197 - DNA, 20 bp, Artificial Sequence
  chemically synthesized
ccaaacggagggatcagctg

SEQ ID NO: 51198 - DNA, 20 bp, Artificial Sequence
  chemically synthesized
ggagggatcagctgaagcca

SEQ ID NO: 51199 - DNA, 20 bp, Artificial Sequence
  chemically synthesized
gggatcagctgaagccatgg

SEQ ID NO: 51200 - DNA, 20 bp, Artificial Sequence
  chemically synthesized
atcagctgaagccatggcag

SEQ ID NO: 51201 - DNA, 20 bp, Artificial Sequence
  chemically synthesized
gaagccatggcagaagttcg

SEQ ID NO: 51202 - DNA, 20 bp, Artificial Sequence
  chemically synthesized
gcagaagttcgtggattgtg

SEQ ID NO: 51203 - DNA, 20 bp, Artificial Sequence
  chemically synthesized
cgtggattgtgaagatttca

SEQ ID NO: 51204 - DNA, 20 bp, Artificial Sequence
  chemically synthesized
aagatttcatggacatttat

SEQ ID NO: 51205 - DNA, 20 bp, Artificial Sequence
  chemically synthesized
atctctaaacataaattgta

SEQ ID NO: 51206 - DNA, 20 bp, Artificial Sequence
  chemically synthesized
cataaattgtaaagatttca

SEQ ID NO: 51207 - DNA, 20 bp, Artificial Sequence
  chemically synthesized
atggacacttatcacttccc

SEQ ID NO: 51208 - DNA, 20 bp, Artificial Sequence
  chemically synthesized
ctttaatctcttaatcctgt

SEQ ID NO: 51209 - DNA, 20 bp, Artificial Sequence
  chemically synthesized
atctcttaatcctgtcagct

SEQ ID NO: 51210 - DNA, 20 bp, Artificial Sequence
  chemically synthesized
tctcttaatcctgtcagctg

SEQ ID NO: 51211 - DNA, 20 bp, Artificial Sequence
  chemically synthesized
tcttaatcctgtcagctgag

SEQ ID NO: 51212 - DNA, 20 bp, Artificial Sequence
  chemically synthesized
cttaatcctgtcagctgagg

SEQ ID NO: 51213 - DNA, 20 bp, Artificial Sequence
  chemically synthesized
gaggaggatgtatattgcct

SEQ ID NO: 51214 - DNA, 20 bp, Artificial Sequence
  chemically synthesized
aggaggatgtatattgcctc

SEQ ID NO: 51215 - DNA, 20 bp, Artificial Sequence
  chemically synthesized
cattaactgcacaaattgta

SEQ ID NO: 51216 - DNA, 20 bp, Artificial Sequence
  chemically synthesized
attgtacagcatgtgtgttt

SEQ ID NO: 51217 - DNA, 20 bp, Artificial Sequence
  chemically synthesized
tgtttgagcaacatgaaatg

SEQ ID NO: 51218 - DNA, 20 bp, Artificial Sequence
  chemically synthesized
aaatgtggacaccttgaaaa

SEQ ID NO: 51219 - DNA, 20 bp, Artificial Sequence
  chemically synthesized
tggacaccttgaaaaaagaa

SEQ ID NO: 51220 - DNA, 20 bp, Artificial Sequence
  chemically synthesized
ggacaccttgaaaaaagaac

SEQ ID NO: 51221 - DNA, 20 bp, Artificial Sequence
  chemically synthesized
ttgaaaaaagaacaggataa

SEQ ID NO: 51222 - DNA, 20 bp, Artificial Sequence
  chemically synthesized
acaggataacagcaattgtt

SEQ ID NO: 51223 - DNA, 20 bp, Artificial Sequence
  chemically synthesized
caggataacagcaattgttc

SEQ ID NO: 51224 - DNA, 20 bp, Artificial Sequence
  chemically synthesized
aggataacagcaattgttca

SEQ ID NO: 51225 - DNA, 20 bp, Artificial Sequence
  chemically synthesized
acagcaattgttcagggaat

SEQ ID NO: 51226 - DNA, 20 bp, Artificial Sequence
  chemically synthesized
agcaattgttcagggaataa

SEQ ID NO: 51227 - DNA, 20 bp, Artificial Sequence
  chemically synthesized
caattgttcagggaataaga

SEQ ID NO: 51228 - DNA, 20 bp, Artificial Sequence
  chemically synthesized
taaccttaaactctgactgc

SEQ ID NO: 51229 - DNA, 20 bp, Artificial Sequence
  chemically synthesized
cttaaactctgactgctggt

SEQ ID NO: 51230 - DNA, 20 bp, Artificial Sequence
  chemically synthesized
aactctgactgctggtgagc

SEQ ID NO: 51231 - DNA, 20 bp, Artificial Sequence
  chemically synthesized
actctgactgctggtgagcc

SEQ ID NO: 51232 - DNA, 20 bp, Artificial Sequence
  chemically synthesized
ctgactgctggtgagccagg

SEQ ID NO: 51233 - DNA, 20 bp, Artificial Sequence
  chemically synthesized
tgctggtgagccaggcagaa

SEQ ID NO: 51234 - DNA, 20 bp, Artificial Sequence
  chemically synthesized
ctggtgagccaggcagaaca

SEQ ID NO: 51235 - DNA, 20 bp, Artificial Sequence
  chemically synthesized
ccatatttctcttctttcaa

SEQ ID NO: 51236 - DNA, 20 bp, Artificial Sequence
  chemically synthesized
tctcttctttcaaaagcaaa

SEQ ID NO: 51237 - DNA, 20 bp, Artificial Sequence
  chemically synthesized
ctcttctttcaaaagcaaat

SEQ ID NO: 51238 - DNA, 20 bp, Artificial Sequence
  chemically synthesized
cttctttcaaaagcaaatgg

SEQ ID NO: 51239 - DNA, 20 bp, Artificial Sequence
  chemically synthesized
tatcgctgaattctttttct

SEQ ID NO: 51240 - DNA, 20 bp, Artificial Sequence
  chemically synthesized
ctgaattctttttctcagca

SEQ ID NO: 51241 - DNA, 20 bp, Artificial Sequence
  chemically synthesized
tctcagcatggaacatccct

SEQ ID NO: 51242 - DNA, 20 bp, Artificial Sequence
  chemically synthesized
agcatggaacatccctgaga

SEQ ID NO: 51243 - DNA, 20 bp, Artificial Sequence
  chemically synthesized
catggaacatccctgagaaa

SEQ ID NO: 51244 - DNA, 20 bp, Artificial Sequence
  chemically synthesized
atccctgagaaagagaatac

SEQ ID NO: 51245 - DNA, 20 bp, Artificial Sequence
  chemically synthesized
ctgagaaagagaatacgagc

SEQ ID NO: 51246 - DNA, 20 bp, Artificial Sequence
  chemically synthesized
tgagaaagagaatacgagcc

SEQ ID NO: 51247 - DNA, 20 bp, Artificial Sequence
  chemically synthesized
agaaagagaatacgagccag

SEQ ID NO: 51248 - DNA, 20 bp, Artificial Sequence
  chemically synthesized
gaaagagaatacgagccagg

SEQ ID NO: 51249 - DNA, 20 bp, Artificial Sequence
  chemically synthesized
agaatacgagccaggaggta

SEQ ID NO: 51250 - DNA, 20 bp, Artificial Sequence
  chemically synthesized
gaatacgagccaggaggtat

SEQ ID NO: 51251 - DNA, 20 bp, Artificial Sequence
  chemically synthesized
aggaggtataggcttataaa

SEQ ID NO: 51252 - DNA, 20 bp, Artificial Sequence
  chemically synthesized
gcttataaacagcccccctc

SEQ ID NO: 51253 - DNA, 20 bp, Artificial Sequence
  chemically synthesized
cttataaacagcccccctcc

SEQ ID NO: 51254 - DNA, 20 bp, Artificial Sequence
  chemically synthesized
ccaggtgcgcctgtctctta

SEQ ID NO: 51255 - DNA, 20 bp, Artificial Sequence
  chemically synthesized
tgcgcctgtctcttatggtc

SEQ ID NO: 51256 - DNA, 20 bp, Artificial Sequence
  chemically synthesized
gtctcttatggtcgagactg

SEQ ID NO: 51257 - DNA, 20 bp, Artificial Sequence
  chemically synthesized
tctcttatggtcgagactgc

SEQ ID NO: 51258 - DNA, 20 bp, Artificial Sequence
  chemically synthesized
ctcttatggtcgagactgca

SEQ ID NO: 51259 - DNA, 20 bp, Artificial Sequence
  chemically synthesized
tcttatggtcgagactgcag

SEQ ID NO: 51260 - DNA, 20 bp, Artificial Sequence
  chemically synthesized
tcgagactgcaggggtgaaa

SEQ ID NO: 51261 - DNA, 20 bp, Artificial Sequence
  chemically synthesized
tgcaggggtgaaatagaccc

SEQ ID NO: 51262 - DNA, 20 bp, Artificial Sequence
  chemically synthesized
aaatagaccccagtctccca

SEQ ID NO: 51263 - DNA, 20 bp, Artificial Sequence
  chemically synthesized
ccagtctcccacagcgctcc

SEQ ID NO: 51264 - DNA, 20 bp, Artificial Sequence
  chemically synthesized
cagtctcccacagcgctccc

SEQ ID NO: 51265 - DNA, 20 bp, Artificial Sequence
  chemically synthesized
cacagcgctcccaggcttat

SEQ ID NO: 51266 - DNA, 20 bp, Artificial Sequence
  chemically synthesized
acagcgctcccaggcttatt

SEQ ID NO: 51267 - DNA, 20 bp, Artificial Sequence
  chemically synthesized
gcgctcccaggcttattagg

SEQ ID NO: 51268 - DNA, 20 bp, Artificial Sequence
  chemically synthesized
gctcccaggcttattaggaa

SEQ ID NO: 51269 - DNA, 20 bp, Artificial Sequence
  chemically synthesized
ctcccaggcttattaggaag

SEQ ID NO: 51270 - DNA, 20 bp, Artificial Sequence
  chemically synthesized
aattcccgcctaataaattt

SEQ ID NO: 51271 - DNA, 20 bp, Artificial Sequence
  chemically synthesized
cccgcctaataaattttggt

SEQ ID NO: 51272 - DNA, 20 bp, Artificial Sequence
  chemically synthesized
ctaataaattttggtcagac

SEQ ID NO: 51273 - DNA, 20 bp, Artificial Sequence
  chemically synthesized
taaaaaccctgtctcctgat

SEQ ID NO: 51274 - DNA, 20 bp, Artificial Sequence
  chemically synthesized
taagatgttatcaatgacaa

SEQ ID NO: 51275 - DNA, 20 bp, Artificial Sequence
  chemically synthesized
aatggtgcccgaaacttcat

SEQ ID NO: 51276 - DNA, 20 bp, Artificial Sequence
  chemically synthesized
tagcaattttaatttcgcct

SEQ ID NO: 51277 - DNA, 20 bp, Artificial Sequence
  chemically synthesized
ttaatttcgcctcggtcctg

SEQ ID NO: 51278 - DNA, 20 bp, Artificial Sequence
  chemically synthesized
tgatattctattaccttgta

SEQ ID NO: 51279 - DNA, 20 bp, Artificial Sequence
  chemically synthesized
aatccctaatacaaacttgc

SEQ ID NO: 51280 - DNA, 20 bp, Artificial Sequence
  chemically synthesized
tacaaacttgctggtttttg

SEQ ID NO: 51281 - DNA, 20 bp, Artificial Sequence
  chemically synthesized
ttgctggtttttgtggcttg

SEQ ID NO: 51282 - DNA, 20 bp, Artificial Sequence
  chemically synthesized
tgctggtttttgtggcttgt

SEQ ID NO: 51283 - DNA, 20 bp, Artificial Sequence
  chemically synthesized
gctggtttttgtggcttgtg

SEQ ID NO: 51284 - DNA, 20 bp, Artificial Sequence
  chemically synthesized
ttgtggcttgtggggcatca

SEQ ID NO: 51285 - DNA, 20 bp, Artificial Sequence
  chemically synthesized
ccgaaatgtgatgcctcccc

SEQ ID NO: 51286 - DNA, 20 bp, Artificial Sequence
  chemically synthesized
tgatgcctcccccggatgcc

SEQ ID NO: 51287 - DNA, 20 bp, Artificial Sequence
  chemically synthesized
actctgtccctttatttcta

SEQ ID NO: 51288 - DNA, 20 bp, Artificial Sequence
  chemically synthesized
tgtccctttatttctaaagt

SEQ ID NO: 51289 - DNA, 20 bp, Artificial Sequence
  chemically synthesized
ttctaaagttggccgacgct

SEQ ID NO: 51290 - DNA, 20 bp, Artificial Sequence
  chemically synthesized
tctaaagttggccgacgctt

SEQ ID NO: 51291 - DNA, 20 bp, Artificial Sequence
  chemically synthesized
ctaaagttggccgacgctta

SEQ ID NO: 51292 - DNA, 20 bp, Artificial Sequence
  chemically synthesized
tggccgacgcttagggaaaa

SEQ ID NO: 51293 - DNA, 20 bp, Artificial Sequence
  chemically synthesized
gacgcttagggaaaatagaa

SEQ ID NO: 51294 - DNA, 20 bp, Artificial Sequence
  chemically synthesized
aaaagaacctacgtgaatat

SEQ ID NO: 51295 - DNA, 20 bp, Artificial Sequence
  chemically synthesized
aaagaacctacgtgaatatt

SEQ ID NO: 51296 - DNA, 20 bp, Artificial Sequence
  chemically synthesized
aagaacctacgtgaatattg

SEQ ID NO: 51297 - DNA, 20 bp, Artificial Sequence
  chemically synthesized
aacctacgtgaatattgggg

SEQ ID NO: 51298 - DNA, 20 bp, Artificial Sequence
  chemically synthesized
acctacgtgaatattggggc

SEQ ID NO: 51299 - DNA, 20 bp, Artificial Sequence
  chemically synthesized
ggggcaggttccctgatact

SEQ ID NO: 51300 - DNA, 20 bp, Artificial Sequence
  chemically synthesized
gcaggttccctgatactcag

SEQ ID NO: 51301 - DNA, 20 bp, Artificial Sequence
  chemically synthesized
ttccctgatactcagtggcg

SEQ ID NO: 51302 - DNA, 20 bp, Artificial Sequence
  chemically synthesized
ccctgatactcagtggcgtg

SEQ ID NO: 51303 - DNA, 20 bp, Artificial Sequence
  chemically synthesized
cagtggcgtggagatgtaac

SEQ ID NO: 51304 - DNA, 20 bp, Artificial Sequence
  chemically synthesized
gcgtggagatgtaacaagcc

SEQ ID NO: 51305 - DNA, 20 bp, Artificial Sequence
  chemically synthesized
tgtaacaagcctggatgtgt

SEQ ID NO: 51306 - DNA, 20 bp, Artificial Sequence
  chemically synthesized
ctggatgtgtgagtgatgat

SEQ ID NO: 51307 - DNA, 20 bp, Artificial Sequence
  chemically synthesized
tggatgtgtgagtgatgatc

SEQ ID NO: 51308 - DNA, 20 bp, Artificial Sequence
  chemically synthesized
agtgatgatcaggccaacaa

SEQ ID NO: 51309 - DNA, 20 bp, Artificial Sequence
  chemically synthesized
ggccaacaacagtctgtatt

SEQ ID NO: 51310 - DNA, 20 bp, Artificial Sequence
  chemically synthesized
caacaacagtctgtatttgg

SEQ ID NO: 51311 - DNA, 20 bp, Artificial Sequence
  chemically synthesized
tctgtatttggaagaaatat

SEQ ID NO: 51312 - DNA, 20 bp, Artificial Sequence
  chemically synthesized
cagatgtgaatgttatgacc

SEQ ID NO: 51313 - DNA, 20 bp, Artificial Sequence
  chemically synthesized
agatgtgaatgttatgacct

SEQ ID NO: 51314 - DNA, 20 bp, Artificial Sequence
  chemically synthesized
tgtgaatgttatgacctagg

SEQ ID NO: 51315 - DNA, 20 bp, Artificial Sequence
  chemically synthesized
tgttatgacctaggaagcaa

SEQ ID NO: 51316 - DNA, 20 bp, Artificial Sequence
  chemically synthesized
tatgacctaggaagcaatgg

SEQ ID NO: 51317 - DNA, 20 bp, Artificial Sequence
  chemically synthesized
aaaattattctttttgcctt

SEQ ID NO: 51318 - DNA, 20 bp, Artificial Sequence
  chemically synthesized
ttgtcaacacaaaaaatact

SEQ ID NO: 51319 - DNA, 20 bp, Artificial Sequence
  chemically synthesized
gttgtatactgatttgttaa

SEQ ID NO: 51320 - DNA, 20 bp, Artificial Sequence
  chemically synthesized
gtatactgatttgttaaaag

SEQ ID NO: 51321 - DNA, 20 bp, Artificial Sequence
  chemically synthesized
tactgatttgttaaaagcag

SEQ ID NO: 51322 - DNA, 20 bp, Artificial Sequence
  chemically synthesized
ttgttaaaagcagcagcatg

SEQ ID NO: 51323 - DNA, 20 bp, Artificial Sequence
  chemically synthesized
taaaagcagcagcatgcagt

SEQ ID NO: 51324 - DNA, 20 bp, Artificial Sequence
  chemically synthesized
aaaagcagcagcatgcagtt

SEQ ID NO: 51325 - DNA, 20 bp, Artificial Sequence
  chemically synthesized
tgcagttaggatgatatctt

SEQ ID NO: 51326 - DNA, 20 bp, Artificial Sequence
  chemically synthesized
gcagttaggatgatatcttt

SEQ ID NO: 51327 - DNA, 20 bp, Artificial Sequence
  chemically synthesized
cagttaggatgatatctttg

SEQ ID NO: 51328 - DNA, 20 bp, Artificial Sequence
  chemically synthesized
ggatgatatctttggggaaa

SEQ ID NO: 51329 - DNA, 20 bp, Artificial Sequence
  chemically synthesized
tgatatctttggggaaatgg

SEQ ID NO: 51330 - DNA, 20 bp, Artificial Sequence
  chemically synthesized
atatctttggggaaatggca

SEQ ID NO: 51331 - DNA, 20 bp, Artificial Sequence
  chemically synthesized
aaccccatgctcaccatcaa

SEQ ID NO: 51332 - DNA, 20 bp, Artificial Sequence
  chemically synthesized
accccatgctcaccatcaac

SEQ ID NO: 51333 - DNA, 20 bp, Artificial Sequence
  chemically synthesized
ccatcaacgggattgaattt

SEQ ID NO: 51334 - DNA, 20 bp, Artificial Sequence
  chemically synthesized
gggattgaatttgagctgct

SEQ ID NO: 51335 - DNA, 20 bp, Artificial Sequence
  chemically synthesized
gaatttgagctgctgagaat

SEQ ID NO: 51336 - DNA, 20 bp, Artificial Sequence
  chemically synthesized
ttatcttcaattctgtgaaa

SEQ ID NO: 51337 - DNA, 20 bp, Artificial Sequence
  chemically synthesized
aattctgtgaaatggaattt

SEQ ID NO: 51338 - DNA, 20 bp, Artificial Sequence
  chemically synthesized
tgtgaaatggaattttagac

SEQ ID NO: 51339 - DNA, 20 bp, Artificial Sequence
  chemically synthesized
tttagaccagcctgtgactg

SEQ ID NO: 51340 - DNA, 20 bp, Artificial Sequence
  chemically synthesized
cagcctgtgactgaagccac

SEQ ID NO: 51341 - DNA, 20 bp, Artificial Sequence
  chemically synthesized
agcctgtgactgaagccact

SEQ ID NO: 51342 - DNA, 20 bp, Artificial Sequence
  chemically synthesized
actgaagccactgggcatta

SEQ ID NO: 51343 - DNA, 20 bp, Artificial Sequence
  chemically synthesized
gccgcattgtttctctctgc

SEQ ID NO: 51344 - DNA, 20 bp, Artificial Sequence
  chemically synthesized
cgcattgtttctctctgcaa

SEQ ID NO: 51345 - DNA, 20 bp, Artificial Sequence
  chemically synthesized
cattgtttctctctgcaaga

SEQ ID NO: 51346 - DNA, 20 bp, Artificial Sequence
  chemically synthesized
attgtttctctctgcaagag

SEQ ID NO: 51347 - DNA, 20 bp, Artificial Sequence
  chemically synthesized
gtttctctctgcaagagagg

SEQ ID NO: 51348 - DNA, 20 bp, Artificial Sequence
  chemically synthesized
tttctctctgcaagagagga

SEQ ID NO: 51349 - DNA, 20 bp, Artificial Sequence
  chemically synthesized
ctctctgcaagagaggaagg

SEQ ID NO: 51350 - DNA, 20 bp, Artificial Sequence
  chemically synthesized
tctctgcaagagaggaagga

SEQ ID NO: 51351 - DNA, 20 bp, Artificial Sequence
  chemically synthesized
tgcaagagaggaaggaaggc

SEQ ID NO: 51352 - DNA, 20 bp, Artificial Sequence
  chemically synthesized
caagagaggaaggaaggctg

SEQ ID NO: 51353 - DNA, 20 bp, Artificial Sequence
  chemically synthesized
gaggaaggaaggctggagta

SEQ ID NO: 51354 - DNA, 20 bp, Artificial Sequence
  chemically synthesized
aggaaggctggagtacagct

SEQ ID NO: 51355 - DNA, 20 bp, Artificial Sequence
  chemically synthesized
tggagtacagctgagctttc

SEQ ID NO: 51356 - DNA, 20 bp, Artificial Sequence
  chemically synthesized
agtacagctgagctttctgg

SEQ ID NO: 51357 - DNA, 20 bp, Artificial Sequence
  chemically synthesized
gtacagctgagctttctggc

SEQ ID NO: 51358 - DNA, 20 bp, Artificial Sequence
  chemically synthesized
ctgagctttctggcaggcac

SEQ ID NO: 51359 - DNA, 20 bp, Artificial Sequence
  chemically synthesized
agctttctggcaggcactgg

SEQ ID NO: 51360 - DNA, 20 bp, Artificial Sequence
  chemically synthesized
ctttctggcaggcactggtg

SEQ ID NO: 51361 - DNA, 20 bp, Artificial Sequence
  chemically synthesized
ccttccccattctttgtaac

SEQ ID NO: 51362 - DNA, 20 bp, Artificial Sequence
  chemically synthesized
tccccattctttgtaactgg

SEQ ID NO: 51363 - DNA, 20 bp, Artificial Sequence
  chemically synthesized
ttctttgtaactggtggcct

SEQ ID NO: 51364 - DNA, 20 bp, Artificial Sequence
  chemically synthesized
tttgtaactggtggccttag

SEQ ID NO: 51365 - DNA, 20 bp, Artificial Sequence
  chemically synthesized
tgtaactggtggccttagaa

SEQ ID NO: 51366 - DNA, 20 bp, Artificial Sequence
  chemically synthesized
gtaactggtggccttagaag

SEQ ID NO: 51367 - DNA, 20 bp, Artificial Sequence
  chemically synthesized
taactggtggccttagaaga

SEQ ID NO: 51368 - DNA, 20 bp, Artificial Sequence
  chemically synthesized
ggtggccttagaagagggtt

SEQ ID NO: 51369 - DNA, 20 bp, Artificial Sequence
  chemically synthesized
gtggccttagaagagggttc

SEQ ID NO: 51370 - DNA, 20 bp, Artificial Sequence
  chemically synthesized
tggccttagaagagggttca

SEQ ID NO: 51371 - DNA, 20 bp, Artificial Sequence
  chemically synthesized
agggttcagggttatgtgtt

SEQ ID NO: 51372 - DNA, 20 bp, Artificial Sequence
  chemically synthesized
gggttatgtgtttggaacac

SEQ ID NO: 51373 - DNA, 20 bp, Artificial Sequence
  chemically synthesized
tatgtgtttggaacacgagt

SEQ ID NO: 51374 - DNA, 20 bp, Artificial Sequence
  chemically synthesized
ggaacacgagttagtataaa

SEQ ID NO: 51375 - DNA, 20 bp, Artificial Sequence
  chemically synthesized
agttagtataaatggttctg

SEQ ID NO: 51376 - DNA, 20 bp, Artificial Sequence
  chemically synthesized
tggttctgaagcacttgatt

SEQ ID NO: 51377 - DNA, 20 bp, Artificial Sequence
  chemically synthesized
tcagactgtgctttaaaaaa

SEQ ID NO: 51378 - DNA, 20 bp, Artificial Sequence
  chemically synthesized
cagactgtgctttaaaaaat

SEQ ID NO: 51379 - DNA, 20 bp, Artificial Sequence
  chemically synthesized
ctgtgctttaaaaaatagga

SEQ ID NO: 51380 - DNA, 20 bp, Artificial Sequence
  chemically synthesized
gctttaaaaaataggaaaga

SEQ ID NO: 51381 - DNA, 20 bp, Artificial Sequence
  chemically synthesized
ttaaaaaataggaaagaaag

SEQ ID NO: 51382 - DNA, 20 bp, Artificial Sequence
  chemically synthesized
aaaataggaaagaaagtaga

SEQ ID NO: 51383 - DNA, 20 bp, Artificial Sequence
  chemically synthesized
aggaaagaaagtagaaagaa

SEQ ID NO: 51384 - DNA, 20 bp, Artificial Sequence
  chemically synthesized
aaagtagaaagaacagctga

SEQ ID NO: 51385 - DNA, 20 bp, Artificial Sequence
  chemically synthesized
agaaagaacagctgatggtt

SEQ ID NO: 51386 - DNA, 20 bp, Artificial Sequence
  chemically synthesized
aagaacagctgatggtttgg

SEQ ID NO: 51387 - DNA, 20 bp, Artificial Sequence
  chemically synthesized
agaacagctgatggtttgga

SEQ ID NO: 51388 - DNA, 20 bp, Artificial Sequence
  chemically synthesized
gaacagctgatggtttggaa

SEQ ID NO: 51389 - DNA, 20 bp, Artificial Sequence
  chemically synthesized
acagctgatggtttggaagg

SEQ ID NO: 51390 - DNA, 20 bp, Artificial Sequence
  chemically synthesized
tggtttggaagggagccacc

SEQ ID NO: 51391 - DNA, 20 bp, Artificial Sequence
  chemically synthesized
gaagggagccaccaagcacc

SEQ ID NO: 51392 - DNA, 20 bp, Artificial Sequence
  chemically synthesized
agggagccaccaagcaccaa

SEQ ID NO: 51393 - DNA, 20 bp, Artificial Sequence
  chemically synthesized
gggagccaccaagcaccaag

SEQ ID NO: 51394 - DNA, 20 bp, Artificial Sequence
  chemically synthesized
caccaagcaccaagaggtgt

SEQ ID NO: 51395 - DNA, 20 bp, Artificial Sequence
  chemically synthesized
ctgaatccgtttctcaatct

SEQ ID NO: 51396 - DNA, 20 bp, Artificial Sequence
  chemically synthesized
ccgtttctcaatcttagctg

SEQ ID NO: 51397 - DNA, 20 bp, Artificial Sequence
  chemically synthesized
cgtttctcaatcttagctgc

SEQ ID NO: 51398 - DNA, 20 bp, Artificial Sequence
  chemically synthesized
gtttctcaatcttagctgca

SEQ ID NO: 51399 - DNA, 20 bp, Artificial Sequence
  chemically synthesized
caatcttagctgcagggcat

SEQ ID NO: 51400 - DNA, 20 bp, Artificial Sequence
  chemically synthesized
tagctgcagggcattggcta

SEQ ID NO: 51401 - DNA, 20 bp, Artificial Sequence
  chemically synthesized
gctgcagggcattggctaaa

SEQ ID NO: 51402 - DNA, 20 bp, Artificial Sequence
  chemically synthesized
ctgcagggcattggctaaag

SEQ ID NO: 51403 - DNA, 20 bp, Artificial Sequence
  chemically synthesized
cagggcattggctaaagagg

SEQ ID NO: 51404 - DNA, 20 bp, Artificial Sequence
  chemically synthesized
agggcattggctaaagagga

SEQ ID NO: 51405 - DNA, 20 bp, Artificial Sequence
  chemically synthesized
agaggaaggtgaaaactgct

SEQ ID NO: 51406 - DNA, 20 bp, Artificial Sequence
  chemically synthesized
tgagtcactatcaaatcaat

SEQ ID NO: 51407 - DNA, 20 bp, Artificial Sequence
  chemically synthesized
attggtttttctaatcccct

SEQ ID NO: 51408 - DNA, 20 bp, Artificial Sequence
  chemically synthesized
tggtttttctaatcccctga

SEQ ID NO: 51409 - DNA, 20 bp, Artificial Sequence
  chemically synthesized
ttctaatcccctgagagaaa

SEQ ID NO: 51410 - DNA, 20 bp, Artificial Sequence
  chemically synthesized
atcccctgagagaaaaagta

SEQ ID NO: 51411 - DNA, 20 bp, Artificial Sequence
  chemically synthesized
cccctgagagaaaaagtaca

SEQ ID NO: 51412 - DNA, 20 bp, Artificial Sequence
  chemically synthesized
aaaaagtacagagtttattg

SEQ ID NO: 51413 - DNA, 20 bp, Artificial Sequence
  chemically synthesized
ttaaaatgccatgcccctca

SEQ ID NO: 51414 - DNA, 20 bp, Artificial Sequence
  chemically synthesized
tgccatgcccctcacggcca

SEQ ID NO: 51415 - DNA, 20 bp, Artificial Sequence
  chemically synthesized
gccatgcccctcacggccaa

SEQ ID NO: 51416 - DNA, 20 bp, Artificial Sequence
  chemically synthesized
cggccaaaggcatctgaatt

SEQ ID NO: 51417 - DNA, 20 bp, Artificial Sequence
  chemically synthesized
ggccaaaggcatctgaatta

SEQ ID NO: 51418 - DNA, 20 bp, Artificial Sequence
  chemically synthesized
caaaggcatctgaattaagg

SEQ ID NO: 51419 - DNA, 20 bp, Artificial Sequence
  chemically synthesized
aggcatctgaattaaggaag

SEQ ID NO: 51420 - DNA, 20 bp, Artificial Sequence
  chemically synthesized
aattaaggaagcagtattca

SEQ ID NO: 51421 - DNA, 20 bp, Artificial Sequence
  chemically synthesized
gtattcacagctgctttctc

SEQ ID NO: 51422 - DNA, 20 bp, Artificial Sequence
  chemically synthesized
agctgctttctccagacatt

SEQ ID NO: 51423 - DNA, 20 bp, Artificial Sequence
  chemically synthesized
tttctccagacattgagctc

SEQ ID NO: 51424 - DNA, 20 bp, Artificial Sequence
  chemically synthesized
ttctccagacattgagctca

SEQ ID NO: 51425 - DNA, 20 bp, Artificial Sequence
  chemically synthesized
ccagacattgagctcaagga

SEQ ID NO: 51426 - DNA, 20 bp, Artificial Sequence
  chemically synthesized
aatctgaactctgcttttat

SEQ ID NO: 51427 - DNA, 20 bp, Artificial Sequence
  chemically synthesized
tttatcagctgcgaaaatcc

SEQ ID NO: 51428 - DNA, 20 bp, Artificial Sequence
  chemically synthesized
aaaatccaagcattcatttc

SEQ ID NO: 51429 - DNA, 20 bp, Artificial Sequence
  chemically synthesized
tccaagcattcatttccagc

SEQ ID NO: 51430 - DNA, 20 bp, Artificial Sequence
  chemically synthesized
gcattcatttccagctggtt

SEQ ID NO: 51431 - DNA, 20 bp, Artificial Sequence
  chemically synthesized
ctggttcagtgcctatgtaa

SEQ ID NO: 51432 - DNA, 20 bp, Artificial Sequence
  chemically synthesized
agtatactgtgtacaaaaat

SEQ ID NO: 51433 - DNA, 20 bp, Artificial Sequence
  chemically synthesized
tgtacaaaaataagattaaa

SEQ ID NO: 51434 - DNA, 20 bp, Artificial Sequence
  chemically synthesized
aagattaaaaagctaacatt

SEQ ID NO: 51435 - DNA, 20 bp, Artificial Sequence
  chemically synthesized
ttaaaaagctaacattaagc

SEQ ID NO: 51436 - DNA, 20 bp, Artificial Sequence
  chemically synthesized
gtgtgtttgtatgttttcta

SEQ ID NO: 51437 - DNA, 20 bp, Artificial Sequence
  chemically synthesized
tttgtatgttttctacagtt

SEQ ID NO: 51438 - DNA, 20 bp, Artificial Sequence
  chemically synthesized
ttctgaataatttgatccga

SEQ ID NO: 51439 - DNA, 20 bp, Artificial Sequence
  chemically synthesized
atatgatttcatttcttttc

SEQ ID NO: 51440 - DNA, 20 bp, Artificial Sequence
  chemically synthesized
atgatttcatttcttttcga

SEQ ID NO: 51441 - DNA, 20 bp, Artificial Sequence
  chemically synthesized
tatgcatactttctaaatgc

SEQ ID NO: 51442 - DNA, 20 bp, Artificial Sequence
  chemically synthesized
aaatgcaagaataaattcct

SEQ ID NO: 51443 - DNA, 20 bp, Artificial Sequence
  chemically synthesized
tcctgagctccatgtgactt

SEQ ID NO: 51444 - DNA, 20 bp, Artificial Sequence
  chemically synthesized
ccatgtgacttcagtaccat

SEQ ID NO: 51445 - DNA, 20 bp, Artificial Sequence
  chemically synthesized
cttcagtaccatcagctctt

SEQ ID NO: 51446 - DNA, 20 bp, Artificial Sequence
  chemically synthesized
cagtaccatcagctctttgg

SEQ ID NO: 51447 - DNA, 20 bp, Artificial Sequence
  chemically synthesized
tcagctctttggcagcttat

SEQ ID NO: 51448 - DNA, 20 bp, Artificial Sequence
  chemically synthesized
tttggcagcttatgagtata

SEQ ID NO: 51449 - DNA, 20 bp, Artificial Sequence
  chemically synthesized
acagctttttaattctcacc

SEQ ID NO: 51450 - DNA, 20 bp, Artificial Sequence
  chemically synthesized
tttaattctcacctggtccc

SEQ ID NO: 51451 - DNA, 20 bp, Artificial Sequence
  chemically synthesized
ttaattctcacctggtcccc

SEQ ID NO: 51452 - DNA, 20 bp, Artificial Sequence
  chemically synthesized
ctcacctggtccccaggata

SEQ ID NO: 51453 - DNA, 20 bp, Artificial Sequence
  chemically synthesized
ccaggatatggtttacttgt

SEQ ID NO: 51454 - DNA, 20 bp, Artificial Sequence
  chemically synthesized
aggatatggtttacttgtca

SEQ ID NO: 51455 - DNA, 20 bp, Artificial Sequence
  chemically synthesized
atatggtttacttgtcagag

SEQ ID NO: 51456 - DNA, 20 bp, Artificial Sequence
  chemically synthesized
acttgtcagagtagttttat

SEQ ID NO: 51457 - DNA, 20 bp, Artificial Sequence
  chemically synthesized
cttgtcagagtagttttatg

SEQ ID NO: 51458 - DNA, 20 bp, Artificial Sequence
  chemically synthesized
ctttctcctgactctgattc

SEQ ID NO: 51459 - DNA, 20 bp, Artificial Sequence
  chemically synthesized
tttctcctgactctgattct

SEQ ID NO: 51460 - DNA, 20 bp, Artificial Sequence
  chemically synthesized
gattctaggtaacacctgat

SEQ ID NO: 51461 - DNA, 20 bp, Artificial Sequence
  chemically synthesized
gtaacacctgatgagatgaa

SEQ ID NO: 51462 - DNA, 20 bp, Artificial Sequence
  chemically synthesized
cacctgatgagatgaacaga

SEQ ID NO: 51463 - DNA, 20 bp, Artificial Sequence
  chemically synthesized
tgcacctcacttcctcttac

SEQ ID NO: 51464 - DNA, 20 bp, Artificial Sequence
  chemically synthesized
gcacctcacttcctcttact

SEQ ID NO: 51465 - DNA, 20 bp, Artificial Sequence
  chemically synthesized
acttcctcttactgggcatg

SEQ ID NO: 51466 - DNA, 20 bp, Artificial Sequence
  chemically synthesized
cttcctcttactgggcatga

SEQ ID NO: 51467 - DNA, 20 bp, Artificial Sequence
  chemically synthesized
ctcttactgggcatgaagga

SEQ ID NO: 51468 - DNA, 20 bp, Artificial Sequence
  chemically synthesized
cttactgggcatgaaggaaa

SEQ ID NO: 51469 - DNA, 20 bp, Artificial Sequence
  chemically synthesized
tactgggcatgaaggaaaga

SEQ ID NO: 51470 - DNA, 20 bp, Artificial Sequence
  chemically synthesized
ctgggcatgaaggaaagaga

SEQ ID NO: 51471 - DNA, 20 bp, Artificial Sequence
  chemically synthesized
ggcatgaaggaaagagagag

SEQ ID NO: 51472 - DNA, 20 bp, Artificial Sequence
  chemically synthesized
tgaaggaaagagagagaagt

SEQ ID NO: 51473 - DNA, 20 bp, Artificial Sequence
  chemically synthesized
gaaggaaagagagagaagtc

SEQ ID NO: 51474 - DNA, 20 bp, Artificial Sequence
  chemically synthesized
aaggaaagagagagaagtca

SEQ ID NO: 51475 - DNA, 20 bp, Artificial Sequence
  chemically synthesized
gaaagagagagaagtcaggg

SEQ ID NO: 51476 - DNA, 20 bp, Artificial Sequence
  chemically synthesized
aagagagagaagtcagggta

SEQ ID NO: 51477 - DNA, 20 bp, Artificial Sequence
  chemically synthesized
tgctacattttttttttctg

SEQ ID NO: 51478 - DNA, 20 bp, Artificial Sequence
  chemically synthesized
attttttttttctgtggaaa

SEQ ID NO: 51479 - DNA, 20 bp, Artificial Sequence
  chemically synthesized
tttttttttctgtggaaaaa

SEQ ID NO: 51480 - DNA, 20 bp, Artificial Sequence
  chemically synthesized
atatttctaattaaccttga

SEQ ID NO: 51481 - DNA, 20 bp, Artificial Sequence
  chemically synthesized
tatttctaattaaccttgat

SEQ ID NO: 51482 - DNA, 20 bp, Artificial Sequence
  chemically synthesized
aattaaccttgatgggaaca

SEQ ID NO: 51483 - DNA, 20 bp, Artificial Sequence
  chemically synthesized
cttgatgggaacatagaaca

SEQ ID NO: 51484 - DNA, 20 bp, Artificial Sequence
  chemically synthesized
aacatagaacatagattgta

SEQ ID NO: 51485 - DNA, 20 bp, Artificial Sequence
  chemically synthesized
acatagaacatagattgtaa

SEQ ID NO: 51486 - DNA, 20 bp, Artificial Sequence
  chemically synthesized
catagaacatagattgtaaa

SEQ ID NO: 51487 - DNA, 20 bp, Artificial Sequence
  chemically synthesized
agggaacttgcacattatcg

SEQ ID NO: 51488 - DNA, 20 bp, Artificial Sequence
  chemically synthesized
gaacttgcacattatcgcag

SEQ ID NO: 51489 - DNA, 20 bp, Artificial Sequence
  chemically synthesized
aacttgcacattatcgcagt

SEQ ID NO: 51490 - DNA, 20 bp, Artificial Sequence
  chemically synthesized
tatcgcagtaggctgaataa

SEQ ID NO: 51491 - DNA, 20 bp, Artificial Sequence
  chemically synthesized
gtaggctgaataatggctaa

SEQ ID NO: 51492 - DNA, 20 bp, Artificial Sequence
  chemically synthesized
tggctaatggctcactctga

SEQ ID NO: 51493 - DNA, 20 bp, Artificial Sequence
  chemically synthesized
ctcactctgaaagatatgta

SEQ ID NO: 51494 - DNA, 20 bp, Artificial Sequence
  chemically synthesized
gcttaacccctgaaacctgt

SEQ ID NO: 51495 - DNA, 20 bp, Artificial Sequence
  chemically synthesized
cctgtgagtattatcttttc

SEQ ID NO: 51496 - DNA, 20 bp, Artificial Sequence
  chemically synthesized
tattatcttttctagccaaa

SEQ ID NO: 51497 - DNA, 20 bp, Artificial Sequence
  chemically synthesized
agacttttgcatatataatt

SEQ ID NO: 51498 - DNA, 20 bp, Artificial Sequence
  chemically synthesized
gacttttgcatatataatta

SEQ ID NO: 51499 - DNA, 20 bp, Artificial Sequence
  chemically synthesized
gcatatataattaaggatct

SEQ ID NO: 51500 - DNA, 20 bp, Artificial Sequence
  chemically synthesized
catatataattaaggatctt

SEQ ID NO: 51501 - DNA, 20 bp, Artificial Sequence
  chemically synthesized
tataattaaggatcttggga

SEQ ID NO: 51502 - DNA, 20 bp, Artificial Sequence
  chemically synthesized
ataattaaggatcttgggat

SEQ ID NO: 51503 - DNA, 20 bp, Artificial Sequence
  chemically synthesized
taattaaggatcttgggatg

SEQ ID NO: 51504 - DNA, 20 bp, Artificial Sequence
  chemically synthesized
attaaggatcttgggatggg

SEQ ID NO: 51505 - DNA, 20 bp, Artificial Sequence
  chemically synthesized
ggggagatatcctaattatt

SEQ ID NO: 51506 - DNA, 20 bp, Artificial Sequence
  chemically synthesized
gggagatatcctaattattt

SEQ ID NO: 51507 - DNA, 20 bp, Artificial Sequence
  chemically synthesized
tgtatcctaaatgtaatcac

SEQ ID NO: 51508 - DNA, 20 bp, Artificial Sequence
  chemically synthesized
gtaatcacaagtgtcattat

SEQ ID NO: 51509 - DNA, 20 bp, Artificial Sequence
  chemically synthesized
aatcacaagtgtcattataa

SEQ ID NO: 51510 - DNA, 20 bp, Artificial Sequence
  chemically synthesized
atcacaagtgtcattataag

SEQ ID NO: 51511 - DNA, 20 bp, Artificial Sequence
  chemically synthesized
tcacaagtgtcattataaga

SEQ ID NO: 51512 - DNA, 20 bp, Artificial Sequence
  chemically synthesized
acaagtgtcattataagagg

SEQ ID NO: 51513 - DNA, 20 bp, Artificial Sequence
  chemically synthesized
caagtgtcattataagaggg

SEQ ID NO: 51514 - DNA, 20 bp, Artificial Sequence
  chemically synthesized
gtcattataagagggaggca

SEQ ID NO: 51515 - DNA, 20 bp, Artificial Sequence
  chemically synthesized
tcattataagagggaggcaa

SEQ ID NO: 51516 - DNA, 20 bp, Artificial Sequence
  chemically synthesized
cattataagagggaggcaaa

SEQ ID NO: 51517 - DNA, 20 bp, Artificial Sequence
  chemically synthesized
ttataagagggaggcaaagg

SEQ ID NO: 51518 - DNA, 20 bp, Artificial Sequence
  chemically synthesized
caaagggagatttgacttat

SEQ ID NO: 51519 - DNA, 20 bp, Artificial Sequence
  chemically synthesized
aagggagatttgacttataa

SEQ ID NO: 51520 - DNA, 20 bp, Artificial Sequence
  chemically synthesized
agggagatttgacttataag

SEQ ID NO: 51521 - DNA, 20 bp, Artificial Sequence
  chemically synthesized
ggagatttgacttataagag

SEQ ID NO: 51522 - DNA, 20 bp, Artificial Sequence
  chemically synthesized
aaaatgtgacgtgattacaa

SEQ ID NO: 51523 - DNA, 20 bp, Artificial Sequence
  chemically synthesized
atgtgacgtgattacaaaag

SEQ ID NO: 51524 - DNA, 20 bp, Artificial Sequence
  chemically synthesized
gtgacgtgattacaaaagca

SEQ ID NO: 51525 - DNA, 20 bp, Artificial Sequence
  chemically synthesized
agcagagatacatttttttg

SEQ ID NO: 51526 - DNA, 20 bp, Artificial Sequence
  chemically synthesized
gatacatttttttgaagatc

SEQ ID NO: 51527 - DNA, 20 bp, Artificial Sequence
  chemically synthesized
atacatttttttgaagatcg

SEQ ID NO: 51528 - DNA, 20 bp, Artificial Sequence
  chemically synthesized
catttttttgaagatcgagg

SEQ ID NO: 51529 - DNA, 20 bp, Artificial Sequence
  chemically synthesized
tttttttgaagatcgaggaa

SEQ ID NO: 51530 - DNA, 20 bp, Artificial Sequence
  chemically synthesized
ttttttgaagatcgaggaag

SEQ ID NO: 51531 - DNA, 20 bp, Artificial Sequence
  chemically synthesized
cgaggaagaggctacaaacc

SEQ ID NO: 51532 - DNA, 20 bp, Artificial Sequence
  chemically synthesized
gaggaagaggctacaaacca

SEQ ID NO: 51533 - DNA, 20 bp, Artificial Sequence
  chemically synthesized
aggctacaaaccaaggaatg

SEQ ID NO: 51534 - DNA, 20 bp, Artificial Sequence
  chemically synthesized
ggctacaaaccaaggaatgt

SEQ ID NO: 51535 - DNA, 20 bp, Artificial Sequence
  chemically synthesized
tacaaaccaaggaatgtggg

SEQ ID NO: 51536 - DNA, 20 bp, Artificial Sequence
  chemically synthesized
caaggaatgtgggtagcctc

SEQ ID NO: 51537 - DNA, 20 bp, Artificial Sequence
  chemically synthesized
ggaatgtgggtagcctctag

SEQ ID NO: 51538 - DNA, 20 bp, Artificial Sequence
  chemically synthesized
aatgtgggtagcctctagaa

SEQ ID NO: 51539 - DNA, 20 bp, Artificial Sequence
  chemically synthesized
atgtgggtagcctctagaag

SEQ ID NO: 51540 - DNA, 20 bp, Artificial Sequence
  chemically synthesized
gtagcctctagaagaggaaa

SEQ ID NO: 51541 - DNA, 20 bp, Artificial Sequence
  chemically synthesized
agaagaggaaacagaatcca

SEQ ID NO: 51542 - DNA, 20 bp, Artificial Sequence
  chemically synthesized
aggaaacagaatccatggaa

SEQ ID NO: 51543 - DNA, 20 bp, Artificial Sequence
  chemically synthesized
ggaaacagaatccatggaaa

SEQ ID NO: 51544 - DNA, 20 bp, Artificial Sequence
  chemically synthesized
aacagaatccatggaaaagg

SEQ ID NO: 51545 - DNA, 20 bp, Artificial Sequence
  chemically synthesized
acagaatccatggaaaaggc

SEQ ID NO: 51546 - DNA, 20 bp, Artificial Sequence
  chemically synthesized
caggaaaacacaatctctca

SEQ ID NO: 51547 - DNA, 20 bp, Artificial Sequence
  chemically synthesized
ggaaaacacaatctctcata

SEQ ID NO: 51548 - DNA, 20 bp, Artificial Sequence
  chemically synthesized
acaatctctcatagagtctc

SEQ ID NO: 51549 - DNA, 20 bp, Artificial Sequence
  chemically synthesized
atctctcatagagtctccag

SEQ ID NO: 51550 - DNA, 20 bp, Artificial Sequence
  chemically synthesized
catagagtctccagaagaaa

SEQ ID NO: 51551 - DNA, 20 bp, Artificial Sequence
  chemically synthesized
ccacactgacacctcgactt

SEQ ID NO: 51552 - DNA, 20 bp, Artificial Sequence
  chemically synthesized
ctgacacctcgactttagcc

SEQ ID NO: 51553 - DNA, 20 bp, Artificial Sequence
  chemically synthesized
tagcccagtgaaaccgattt

SEQ ID NO: 51554 - DNA, 20 bp, Artificial Sequence
  chemically synthesized
cttctgacctccacaacttc

SEQ ID NO: 51555 - DNA, 20 bp, Artificial Sequence
  chemically synthesized
taatacatttgtgttgtttt

SEQ ID NO: 51556 - DNA, 20 bp, Artificial Sequence
  chemically synthesized
gttttaagccaataaatttg

SEQ ID NO: 51557 - DNA, 20 bp, Artificial Sequence
  chemically synthesized
aaatttgtggtaatttttta

SEQ ID NO: 51558 - DNA, 20 bp, Artificial Sequence
  chemically synthesized
tttgtggtaattttttacag

SEQ ID NO: 51559 - DNA, 20 bp, Artificial Sequence
  chemically synthesized
tggtaattttttacagcagc

SEQ ID NO: 51560 - DNA, 20 bp, Artificial Sequence
  chemically synthesized
gtaattttttacagcagcaa

SEQ ID NO: 51561 - DNA, 20 bp, Artificial Sequence
  chemically synthesized
taattttttacagcagcaag

SEQ ID NO: 51562 - DNA, 20 bp, Artificial Sequence
  chemically synthesized
ttacagcagcaagaggaaat

SEQ ID NO: 51563 - DNA, 20 bp, Artificial Sequence
  chemically synthesized
gcaagaggaaatcagttacg

SEQ ID NO: 51564 - DNA, 20 bp, Artificial Sequence
  chemically synthesized
aggaaatcagttacgtagaa

SEQ ID NO: 51565 - DNA, 20 bp, Artificial Sequence
  chemically synthesized
aaatcagttacgtagaatag

SEQ ID NO: 51566 - DNA, 20 bp, Artificial Sequence
  chemically synthesized
aatcagttacgtagaatagt

SEQ ID NO: 51567 - DNA, 20 bp, Artificial Sequence
  chemically synthesized
agaatagtaggtcctgtctc

SEQ ID NO: 51568 - DNA, 20 bp, Artificial Sequence
  chemically synthesized
tcctgtctctggctaatcat

SEQ ID NO: 51569 - DNA, 20 bp, Artificial Sequence
  chemically synthesized
gctaatcattagaatcactc

SEQ ID NO: 51570 - DNA, 20 bp, Artificial Sequence
  chemically synthesized
aatcattagaatcactccag

SEQ ID NO: 51571 - DNA, 20 bp, Artificial Sequence
  chemically synthesized
ctccagaagcttgttacata

SEQ ID NO: 51572 - DNA, 20 bp, Artificial Sequence
  chemically synthesized
aagcttgttacatacagacc

SEQ ID NO: 51573 - DNA, 20 bp, Artificial Sequence
  chemically synthesized
gcttgttacatacagaccca

SEQ ID NO: 51574 - DNA, 20 bp, Artificial Sequence
  chemically synthesized
gttacatacagacccagagc

SEQ ID NO: 51575 - DNA, 20 bp, Artificial Sequence
  chemically synthesized
agacccagagccagtgaatc

SEQ ID NO: 51576 - DNA, 20 bp, Artificial Sequence
  chemically synthesized
gacccagagccagtgaatca

SEQ ID NO: 51577 - DNA, 20 bp, Artificial Sequence
  chemically synthesized
gagccagtgaatcaaggatt

SEQ ID NO: 51578 - DNA, 20 bp, Artificial Sequence
  chemically synthesized
ccagtgaatcaaggatttgg

SEQ ID NO: 51579 - DNA, 20 bp, Artificial Sequence
  chemically synthesized
gtgaatcaaggatttggtgg

SEQ ID NO: 51580 - DNA, 20 bp, Artificial Sequence
  chemically synthesized
tgaatcaaggatttggtggt

SEQ ID NO: 51581 - DNA, 20 bp, Artificial Sequence
  chemically synthesized
gaatcaaggatttggtggtg

SEQ ID NO: 51582 - DNA, 20 bp, Artificial Sequence
  chemically synthesized
aaggatttggtggtggggcc

SEQ ID NO: 51583 - DNA, 20 bp, Artificial Sequence
  chemically synthesized
ggatttggtggtggggccca

SEQ ID NO: 51584 - DNA, 20 bp, Artificial Sequence
  chemically synthesized
gggcccagagcctgaatatt

SEQ ID NO: 51585 - DNA, 20 bp, Artificial Sequence
  chemically synthesized
ccagagcctgaatattaagc

SEQ ID NO: 51586 - DNA, 20 bp, Artificial Sequence
  chemically synthesized
attaagcaagttcttcgttt

SEQ ID NO: 51587 - DNA, 20 bp, Artificial Sequence
  chemically synthesized
aagttcttcgttttagaaat

SEQ ID NO: 51588 - DNA, 20 bp, Artificial Sequence
  chemically synthesized
agttcttcgttttagaaatg

SEQ ID NO: 51589 - DNA, 20 bp, Artificial Sequence
  chemically synthesized
gttttagaaatgaggaaacc

SEQ ID NO: 51590 - DNA, 20 bp, Artificial Sequence
  chemically synthesized
ttttagaaatgaggaaacca

SEQ ID NO: 51591 - DNA, 20 bp, Artificial Sequence
  chemically synthesized
agaaatgaggaaaccaaggt

SEQ ID NO: 51592 - DNA, 20 bp, Artificial Sequence
  chemically synthesized
gaaatgaggaaaccaaggtt

SEQ ID NO: 51593 - DNA, 20 bp, Artificial Sequence
  chemically synthesized
aatgaggaaaccaaggttgg

SEQ ID NO: 51594 - DNA, 20 bp, Artificial Sequence
  chemically synthesized
gaggaaaccaaggttgggag

SEQ ID NO: 51595 - DNA, 20 bp, Artificial Sequence
  chemically synthesized
aaccaaggttgggagaagct

SEQ ID NO: 51596 - DNA, 20 bp, Artificial Sequence
  chemically synthesized
aagcaacttactcaaataca

SEQ ID NO: 51597 - DNA, 20 bp, Artificial Sequence
  chemically synthesized
agcaacttactcaaatacat

SEQ ID NO: 51598 - DNA, 20 bp, Artificial Sequence
  chemically synthesized
gcaacttactcaaatacata

SEQ ID NO: 51599 - DNA, 20 bp, Artificial Sequence
  chemically synthesized
tcttttgaattttcttaccc

SEQ ID NO: 51600 - DNA, 20 bp, Artificial Sequence
  chemically synthesized
tgtaaatgtgatttcattta

SEQ ID NO: 51601 - DNA, 20 bp, Artificial Sequence
  chemically synthesized
ttgacatattcattaaaatg

SEQ ID NO: 51602 - DNA, 20 bp, Artificial Sequence
  chemically synthesized
tcattaaaatgaagaaataa

SEQ ID NO: 51603 - DNA, 20 bp, Artificial Sequence
  chemically synthesized
aaaatgaagaaataaaagat

SEQ ID NO: 51604 - DNA, 20 bp, Artificial Sequence
  chemically synthesized
aagaaataaaagatgagaaa

SEQ ID NO: 51605 - DNA, 20 bp, Artificial Sequence
  chemically synthesized
attatataatgtttattgat

SEQ ID NO: 51606 - DNA, 20 bp, Artificial Sequence
  chemically synthesized
agaatgaatatgatgcaatc

SEQ ID NO: 51607 - DNA, 20 bp, Artificial Sequence
  chemically synthesized
gcaatctggttttctgtgtt

SEQ ID NO: 51608 - DNA, 20 bp, Artificial Sequence
  chemically synthesized
gtgttcagattcctgacctc

SEQ ID NO: 51609 - DNA, 20 bp, Artificial Sequence
  chemically synthesized
gttcagattcctgacctctg

SEQ ID NO: 51610 - DNA, 20 bp, Artificial Sequence
  chemically synthesized
ggagttaacctttctttgta

SEQ ID NO: 51611 - DNA, 20 bp, Artificial Sequence
  chemically synthesized
taacctttctttgtaaagat

SEQ ID NO: 51612 - DNA, 20 bp, Artificial Sequence
  chemically synthesized
ctttctttgtaaagattaga

SEQ ID NO: 51613 - DNA, 20 bp, Artificial Sequence
  chemically synthesized
tctttgtaaagattagacag

SEQ ID NO: 51614 - DNA, 20 bp, Artificial Sequence
  chemically synthesized
ctttgtaaagattagacagc

SEQ ID NO: 51615 - DNA, 20 bp, Artificial Sequence
  chemically synthesized
tgtaaagattagacagcagg

SEQ ID NO: 51616 - DNA, 20 bp, Artificial Sequence
  chemically synthesized
gtaaagattagacagcaggc

SEQ ID NO: 51617 - DNA, 20 bp, Artificial Sequence
  chemically synthesized
taaagattagacagcaggca

SEQ ID NO: 51618 - DNA, 20 bp, Artificial Sequence
  chemically synthesized
agattagacagcaggcaggg

SEQ ID NO: 51619 - DNA, 20 bp, Artificial Sequence
  chemically synthesized
ggaagaatgcctttgaaact

SEQ ID NO: 51620 - DNA, 20 bp, Artificial Sequence
  chemically synthesized
aagaatgcctttgaaactga

SEQ ID NO: 51621 - DNA, 20 bp, Artificial Sequence
  chemically synthesized
tgcctttgaaactgagagca

SEQ ID NO: 51622 - DNA, 20 bp, Artificial Sequence
  chemically synthesized
ttgaaactgagagcaaagac

SEQ ID NO: 51623 - DNA, 20 bp, Artificial Sequence
  chemically synthesized
tgcaatttacattgatgtcc

SEQ ID NO: 51624 - DNA, 20 bp, Artificial Sequence
  chemically synthesized
gtcctggtgctgtgcataat

SEQ ID NO: 51625 - DNA, 20 bp, Artificial Sequence
  chemically synthesized
aataagttgcttaaacatga

SEQ ID NO: 51626 - DNA, 20 bp, Artificial Sequence
  chemically synthesized
aagttgcttaaacatgacag

SEQ ID NO: 51627 - DNA, 20 bp, Artificial Sequence
  chemically synthesized
agttgcttaaacatgacagc

SEQ ID NO: 51628 - DNA, 20 bp, Artificial Sequence
  chemically synthesized
gcttaaacatgacagcagga

SEQ ID NO: 51629 - DNA, 20 bp, Artificial Sequence
  chemically synthesized
cttaaacatgacagcaggat

SEQ ID NO: 51630 - DNA, 20 bp, Artificial Sequence
  chemically synthesized
acataaaatttatttataaa

SEQ ID NO: 51631 - DNA, 20 bp, Artificial Sequence
  chemically synthesized
aaatttatttataaatggta

SEQ ID NO: 51632 - DNA, 20 bp, Artificial Sequence
  chemically synthesized
acctctgctgaacttcctca

SEQ ID NO: 51633 - DNA, 20 bp, Artificial Sequence
  chemically synthesized
cttcctcatagaatgttcat

SEQ ID NO: 51634 - DNA, 20 bp, Artificial Sequence
  chemically synthesized
agaatgttcatcagaaaaca

SEQ ID NO: 51635 - DNA, 20 bp, Artificial Sequence
  chemically synthesized
ttctatctactctttcttcc

SEQ ID NO: 51636 - DNA, 20 bp, Artificial Sequence
  chemically synthesized
accactgacatcatgaccct

SEQ ID NO: 51637 - DNA, 20 bp, Artificial Sequence
  chemically synthesized
gaccctcagttctattcccc

SEQ ID NO: 51638 - DNA, 20 bp, Artificial Sequence
  chemically synthesized
ctgcccactcccctgaaatc

SEQ ID NO: 51639 - DNA, 20 bp, Artificial Sequence
  chemically synthesized
ccataaatccaaccaccgcc

SEQ ID NO: 51640 - DNA, 20 bp, Artificial Sequence
  chemically synthesized
cataaatccaaccaccgcct

SEQ ID NO: 51641 - DNA, 20 bp, Artificial Sequence
  chemically synthesized
caaccaccgcctgggtatct

SEQ ID NO: 51642 - DNA, 20 bp, Artificial Sequence
  chemically synthesized
accgcctgggtatctcagtt

SEQ ID NO: 51643 - DNA, 20 bp, Artificial Sequence
  chemically synthesized
tccctccatcaactcaaatt

SEQ ID NO: 51644 - DNA, 20 bp, Artificial Sequence
  chemically synthesized
caactcaaatttggctgaca

SEQ ID NO: 51645 - DNA, 20 bp, Artificial Sequence
  chemically synthesized
aaatttggctgacacagttt

SEQ ID NO: 51646 - DNA, 20 bp, Artificial Sequence
  chemically synthesized
gctgacacagttttggattc

SEQ ID NO: 51647 - DNA, 20 bp, Artificial Sequence
  chemically synthesized
tgacacagttttggattcta

SEQ ID NO: 51648 - DNA, 20 bp, Artificial Sequence
  chemically synthesized
gttttggattctagagcatg

SEQ ID NO: 51649 - DNA, 20 bp, Artificial Sequence
  chemically synthesized
ttttggattctagagcatgc

SEQ ID NO: 51650 - DNA, 20 bp, Artificial Sequence
  chemically synthesized
tttgcactcactcttccctc

SEQ ID NO: 51651 - DNA, 20 bp, Artificial Sequence
  chemically synthesized
cccgtccttcctcactttgc

SEQ ID NO: 51652 - DNA, 20 bp, Artificial Sequence
  chemically synthesized
ccagttccaacttctctctg

SEQ ID NO: 51653 - DNA, 20 bp, Artificial Sequence
  chemically synthesized
ccaacttctctctgaagact

SEQ ID NO: 51654 - DNA, 20 bp, Artificial Sequence
  chemically synthesized
ttctctctgaagactcagtt

SEQ ID NO: 51655 - DNA, 20 bp, Artificial Sequence
  chemically synthesized
tctctctgaagactcagttt

SEQ ID NO: 51656 - DNA, 20 bp, Artificial Sequence
  chemically synthesized
ctgaagactcagtttaggta

SEQ ID NO: 51657 - DNA, 20 bp, Artificial Sequence
  chemically synthesized
tgaagactcagtttaggtac

SEQ ID NO: 51658 - DNA, 20 bp, Artificial Sequence
  chemically synthesized
agtttaggtacaggctcctt

SEQ ID NO: 51659 - DNA, 20 bp, Artificial Sequence
  chemically synthesized
gtttaggtacaggctccttt

SEQ ID NO: 51660 - DNA, 20 bp, Artificial Sequence
  chemically synthesized
aatttttttttgactctacc

SEQ ID NO: 51661 - DNA, 20 bp, Artificial Sequence
  chemically synthesized
ttttttgactctacctagcc

SEQ ID NO: 51662 - DNA, 20 bp, Artificial Sequence
  chemically synthesized
gactctacctagcccagact

SEQ ID NO: 51663 - DNA, 20 bp, Artificial Sequence
  chemically synthesized
tcatctacgatattaatctg

SEQ ID NO: 51664 - DNA, 20 bp, Artificial Sequence
  chemically synthesized
taatctgcagtgtcatgcac

SEQ ID NO: 51665 - DNA, 20 bp, Artificial Sequence
  chemically synthesized
acaaaatatttgctgaatga

SEQ ID NO: 51666 - DNA, 20 bp, Artificial Sequence
  chemically synthesized
tatttgctgaatgaaagaat

SEQ ID NO: 51667 - DNA, 20 bp, Artificial Sequence
  chemically synthesized
tttgctgaatgaaagaatga

SEQ ID NO: 51668 - DNA, 20 bp, Artificial Sequence
  chemically synthesized
aaagaatgagagttaacttt

SEQ ID NO: 51669 - DNA, 20 bp, Artificial Sequence
  chemically synthesized
aatgagagttaacttttagt

SEQ ID NO: 51670 - DNA, 20 bp, Artificial Sequence
  chemically synthesized
atgagagttaacttttagtc

SEQ ID NO: 51671 - DNA, 20 bp, Artificial Sequence
  chemically synthesized
ttaacttttagtcaggcata

SEQ ID NO: 51672 - DNA, 20 bp, Artificial Sequence
  chemically synthesized
ggcataaagataaaaaacca

SEQ ID NO: 51673 - DNA, 20 bp, Artificial Sequence
  chemically synthesized
aaaaccaaagtcttttactc

SEQ ID NO: 51674 - DNA, 20 bp, Artificial Sequence
  chemically synthesized
caaagtcttttactccggtg

SEQ ID NO: 51675 - DNA, 20 bp, Artificial Sequence
  chemically synthesized
aagtcttttactccggtgtg

SEQ ID NO: 51676 - DNA, 20 bp, Artificial Sequence
  chemically synthesized
actccggtgtggagtgtttt

SEQ ID NO: 51677 - DNA, 20 bp, Artificial Sequence
  chemically synthesized
ctccggtgtggagtgttttc

SEQ ID NO: 51678 - DNA, 20 bp, Artificial Sequence
  chemically synthesized
ttttcaggattcctaccaat

SEQ ID NO: 51679 - DNA, 20 bp, Artificial Sequence
  chemically synthesized
tttcaggattcctaccaatt

SEQ ID NO: 51680 - DNA, 20 bp, Artificial Sequence
  chemically synthesized
caggattcctaccaattagg

SEQ ID NO: 51681 - DNA, 20 bp, Artificial Sequence
  chemically synthesized
aggattcctaccaattagga

SEQ ID NO: 51682 - DNA, 20 bp, Artificial Sequence
  chemically synthesized
ggtgtttgattcttcaaact

SEQ ID NO: 51683 - DNA, 20 bp, Artificial Sequence
  chemically synthesized
aaacacctccccttaactga

SEQ ID NO: 51684 - DNA, 20 bp, Artificial Sequence
  chemically synthesized
actgatggattcttcaaact

SEQ ID NO: 51685 - DNA, 20 bp, Artificial Sequence
  chemically synthesized
ggattcttcaaactcagcat

SEQ ID NO: 51686 - DNA, 20 bp, Artificial Sequence
  chemically synthesized
tcttcaaactcagcatcagt

SEQ ID NO: 51687 - DNA, 20 bp, Artificial Sequence
  chemically synthesized
ttcaaactcagcatcagtta

SEQ ID NO: 51688 - DNA, 20 bp, Artificial Sequence
  chemically synthesized
tcaaactcagcatcagttag

SEQ ID NO: 51689 - DNA, 20 bp, Artificial Sequence
  chemically synthesized
caaactcagcatcagttaga

SEQ ID NO: 51690 - DNA, 20 bp, Artificial Sequence
  chemically synthesized
cagcatcagttagagggcat

SEQ ID NO: 51691 - DNA, 20 bp, Artificial Sequence
  chemically synthesized
agcatcagttagagggcatt

SEQ ID NO: 51692 - DNA, 20 bp, Artificial Sequence
  chemically synthesized
gcatcagttagagggcatta

SEQ ID NO: 51693 - DNA, 20 bp, Artificial Sequence
  chemically synthesized
cacttctcaaaccctgcatt

SEQ ID NO: 51694 - DNA, 20 bp, Artificial Sequence
  chemically synthesized
acttctcaaaccctgcattc

SEQ ID NO: 51695 - DNA, 20 bp, Artificial Sequence
  chemically synthesized
cttctcaaaccctgcattca

SEQ ID NO: 51696 - DNA, 20 bp, Artificial Sequence
  chemically synthesized
ctcaaaccctgcattcaggg

SEQ ID NO: 51697 - DNA, 20 bp, Artificial Sequence
  chemically synthesized
ttcagggaagatgtctgttg

SEQ ID NO: 51698 - DNA, 20 bp, Artificial Sequence
  chemically synthesized
tcagggaagatgtctgttgt

SEQ ID NO: 51699 - DNA, 20 bp, Artificial Sequence
  chemically synthesized
cagggaagatgtctgttgtg

SEQ ID NO: 51700 - DNA, 20 bp, Artificial Sequence
  chemically synthesized
ggaagatgtctgttgtgggg

SEQ ID NO: 51701 - DNA, 20 bp, Artificial Sequence
  chemically synthesized
atgtctgttgtggggtggtc

SEQ ID NO: 51702 - DNA, 20 bp, Artificial Sequence
  chemically synthesized
gtggggtggtctggcctact

SEQ ID NO: 51703 - DNA, 20 bp, Artificial Sequence
  chemically synthesized
tggtctggcctacttggcct

SEQ ID NO: 51704 - DNA, 20 bp, Artificial Sequence
  chemically synthesized
tggcctacttggcctgagcc

SEQ ID NO: 51705 - DNA, 20 bp, Artificial Sequence
  chemically synthesized
ggcctacttggcctgagcca

SEQ ID NO: 51706 - DNA, 20 bp, Artificial Sequence
  chemically synthesized
cttggcctgagccaaggttc

SEQ ID NO: 51707 - DNA, 20 bp, Artificial Sequence
  chemically synthesized
ttggcctgagccaaggttct

SEQ ID NO: 51708 - DNA, 20 bp, Artificial Sequence
  chemically synthesized
gcctgagccaaggttctggg

SEQ ID NO: 51709 - DNA, 20 bp, Artificial Sequence
  chemically synthesized
aggttctgggcagttctgtt

SEQ ID NO: 51710 - DNA, 20 bp, Artificial Sequence
  chemically synthesized
cagttacacatgcatgcgtt

SEQ ID NO: 51711 - DNA, 20 bp, Artificial Sequence
  chemically synthesized
catgcgttgagcattgattc

SEQ ID NO: 51712 - DNA, 20 bp, Artificial Sequence
  chemically synthesized
gttgagcattgattcaagcc

SEQ ID NO: 51713 - DNA, 20 bp, Artificial Sequence
  chemically synthesized
gcattgattcaagcctggcc

SEQ ID NO: 51714 - DNA, 20 bp, Artificial Sequence
  chemically synthesized
cattgattcaagcctggcct

SEQ ID NO: 51715 - DNA, 20 bp, Artificial Sequence
  chemically synthesized
ttcaagcctggcctgggcac

SEQ ID NO: 51716 - DNA, 20 bp, Artificial Sequence
  chemically synthesized
tcaagcctggcctgggcact

SEQ ID NO: 51717 - DNA, 20 bp, Artificial Sequence
  chemically synthesized
cctggcctgggcactaggca

SEQ ID NO: 51718 - DNA, 20 bp, Artificial Sequence
  chemically synthesized
ctgggcactaggcatggttt

SEQ ID NO: 51719 - DNA, 20 bp, Artificial Sequence
  chemically synthesized
ctaggcatggttttagatat

SEQ ID NO: 51720 - DNA, 20 bp, Artificial Sequence
  chemically synthesized
taggcatggttttagatatt

SEQ ID NO: 51721 - DNA, 20 bp, Artificial Sequence
  chemically synthesized
aggcatggttttagatatta

SEQ ID NO: 51722 - DNA, 20 bp, Artificial Sequence
  chemically synthesized
tattctgttttccttgcctt

SEQ ID NO: 51723 - DNA, 20 bp, Artificial Sequence
  chemically synthesized
ttttccttgccttaagatac

SEQ ID NO: 51724 - DNA, 20 bp, Artificial Sequence
  chemically synthesized
cttgccttaagataccagtc

SEQ ID NO: 51725 - DNA, 20 bp, Artificial Sequence
  chemically synthesized
gccttaagataccagtctag

SEQ ID NO: 51726 - DNA, 20 bp, Artificial Sequence
  chemically synthesized
ccttaagataccagtctagt

SEQ ID NO: 51727 - DNA, 20 bp, Artificial Sequence
  chemically synthesized
ttaagataccagtctagtag

SEQ ID NO: 51728 - DNA, 20 bp, Artificial Sequence
  chemically synthesized
ccagtctagtaggagccact

SEQ ID NO: 51729 - DNA, 20 bp, Artificial Sequence
  chemically synthesized
cagtctagtaggagccacta

SEQ ID NO: 51730 - DNA, 20 bp, Artificial Sequence
  chemically synthesized
agccactaaggccccttttt

SEQ ID NO: 51731 - DNA, 20 bp, Artificial Sequence
  chemically synthesized
ctaaggcccctttttgagcc

SEQ ID NO: 51732 - DNA, 20 bp, Artificial Sequence
  chemically synthesized
aacataccctgcttctaatc

SEQ ID NO: 51733 - DNA, 20 bp, Artificial Sequence
  chemically synthesized
cttctaatcaagtcatctat

SEQ ID NO: 51734 - DNA, 20 bp, Artificial Sequence
  chemically synthesized
ctaatcaagtcatctattgg

SEQ ID NO: 51735 - DNA, 20 bp, Artificial Sequence
  chemically synthesized
tcatctattggcagtgacct

SEQ ID NO: 51736 - DNA, 20 bp, Artificial Sequence
  chemically synthesized
catctattggcagtgacctt

SEQ ID NO: 51737 - DNA, 20 bp, Artificial Sequence
  chemically synthesized
cagtgaccttgggcaaatca

SEQ ID NO: 51738 - DNA, 20 bp, Artificial Sequence
  chemically synthesized
gggcaaatcatagtctctcc

SEQ ID NO: 51739 - DNA, 20 bp, Artificial Sequence
  chemically synthesized
attacttttctaattgaaac

SEQ ID NO: 51740 - DNA, 20 bp, Artificial Sequence
  chemically synthesized
aagaacctctctctataccc

SEQ ID NO: 51741 - DNA, 20 bp, Artificial Sequence
  chemically synthesized
ctataccccagatttatttt

SEQ ID NO: 51742 - DNA, 20 bp, Artificial Sequence
  chemically synthesized
tataccccagatttattttg

SEQ ID NO: 51743 - DNA, 20 bp, Artificial Sequence
  chemically synthesized
agatttattttgaggattat

SEQ ID NO: 51744 - DNA, 20 bp, Artificial Sequence
  chemically synthesized
gaggattatgagttaattca

SEQ ID NO: 51745 - DNA, 20 bp, Artificial Sequence
  chemically synthesized
taattcatagctaaaatgct

SEQ ID NO: 51746 - DNA, 20 bp, Artificial Sequence
  chemically synthesized
ctaaaatgcttagcacctaa

SEQ ID NO: 51747 - DNA, 20 bp, Artificial Sequence
  chemically synthesized
ttcaattgcgtattactaaa

SEQ ID NO: 51748 - DNA, 20 bp, Artificial Sequence
  chemically synthesized
aattgcgtattactaaaaag

SEQ ID NO: 51749 - DNA, 20 bp, Artificial Sequence
  chemically synthesized
attgcgtattactaaaaaga

SEQ ID NO: 51750 - DNA, 20 bp, Artificial Sequence
  chemically synthesized
aaaaagaaggaatgatttcc

SEQ ID NO: 51751 - DNA, 20 bp, Artificial Sequence
  chemically synthesized
aaagaaggaatgatttccta

SEQ ID NO: 51752 - DNA, 20 bp, Artificial Sequence
  chemically synthesized
aagaaggaatgatttcctag

SEQ ID NO: 51753 - DNA, 20 bp, Artificial Sequence
  chemically synthesized
gaaggaatgatttcctagag

SEQ ID NO: 51754 - DNA, 20 bp, Artificial Sequence
  chemically synthesized
aaggaatgatttcctagagg

SEQ ID NO: 51755 - DNA, 20 bp, Artificial Sequence
  chemically synthesized
cctagaggaggtgcttcttc

SEQ ID NO: 51756 - DNA, 20 bp, Artificial Sequence
  chemically synthesized
aggaggtgcttcttctggcc

SEQ ID NO: 51757 - DNA, 20 bp, Artificial Sequence
  chemically synthesized
ggaggtgcttcttctggcca

SEQ ID NO: 51758 - DNA, 20 bp, Artificial Sequence
  chemically synthesized
gaggtgcttcttctggccaa

SEQ ID NO: 51759 - DNA, 20 bp, Artificial Sequence
  chemically synthesized
cttctggccaagggctgatt

SEQ ID NO: 51760 - DNA, 20 bp, Artificial Sequence
  chemically synthesized
tctggccaagggctgattca

SEQ ID NO: 51761 - DNA, 20 bp, Artificial Sequence
  chemically synthesized
cagagccttaattaactaaa

SEQ ID NO: 51762 - DNA, 20 bp, Artificial Sequence
  chemically synthesized
cttaattaactaaatagatc

SEQ ID NO: 51763 - DNA, 20 bp, Artificial Sequence
  chemically synthesized
atagatcaagcatatctaac

SEQ ID NO: 51764 - DNA, 20 bp, Artificial Sequence
  chemically synthesized
aagcatatctaactggtcac

SEQ ID NO: 51765 - DNA, 20 bp, Artificial Sequence
  chemically synthesized
catatctaactggtcaccgg

SEQ ID NO: 51766 - DNA, 20 bp, Artificial Sequence
  chemically synthesized
atctaactggtcaccggaag

SEQ ID NO: 51767 - DNA, 20 bp, Artificial Sequence
  chemically synthesized
ggtcaccggaagtggtccat

SEQ ID NO: 51768 - DNA, 20 bp, Artificial Sequence
  chemically synthesized
gtcaccggaagtggtccatg

SEQ ID NO: 51769 - DNA, 20 bp, Artificial Sequence
  chemically synthesized
ggaagtggtccatgaggctg

SEQ ID NO: 51770 - DNA, 20 bp, Artificial Sequence
  chemically synthesized
ggtccatgaggctgcagcaa

SEQ ID NO: 51771 - DNA, 20 bp, Artificial Sequence
  chemically synthesized
gtccatgaggctgcagcaat

SEQ ID NO: 51772 - DNA, 20 bp, Artificial Sequence
  chemically synthesized
catgaggctgcagcaatggg

SEQ ID NO: 51773 - DNA, 20 bp, Artificial Sequence
  chemically synthesized
atgaggctgcagcaatggga

SEQ ID NO: 51774 - DNA, 20 bp, Artificial Sequence
  chemically synthesized
ctgcagcaatgggaaggtgt

SEQ ID NO: 51775 - DNA, 20 bp, Artificial Sequence
  chemically synthesized
gcagcaatgggaaggtgtca

SEQ ID NO: 51776 - DNA, 20 bp, Artificial Sequence
  chemically synthesized
gcaatgggaaggtgtcagag

SEQ ID NO: 51777 - DNA, 20 bp, Artificial Sequence
  chemically synthesized
caatgggaaggtgtcagagc

SEQ ID NO: 51778 - DNA, 20 bp, Artificial Sequence
  chemically synthesized
aatgggaaggtgtcagagca

SEQ ID NO: 51779 - DNA, 20 bp, Artificial Sequence
  chemically synthesized
atgggaaggtgtcagagcag

SEQ ID NO: 51780 - DNA, 20 bp, Artificial Sequence
  chemically synthesized
gaaggtgtcagagcaggggt

SEQ ID NO: 51781 - DNA, 20 bp, Artificial Sequence
  chemically synthesized
aaggtgtcagagcaggggtt

SEQ ID NO: 51782 - DNA, 20 bp, Artificial Sequence
  chemically synthesized
tcagagcaggggttgggaaa

SEQ ID NO: 51783 - DNA, 20 bp, Artificial Sequence
  chemically synthesized
caggggttgggaaaaagaca

SEQ ID NO: 51784 - DNA, 20 bp, Artificial Sequence
  chemically synthesized
ggggttgggaaaaagacata

SEQ ID NO: 51785 - DNA, 20 bp, Artificial Sequence
  chemically synthesized
ggttgggaaaaagacataga

SEQ ID NO: 51786 - DNA, 20 bp, Artificial Sequence
  chemically synthesized
gagagaaacgtgcatgtccg

SEQ ID NO: 51787 - DNA, 20 bp, Artificial Sequence
  chemically synthesized
agaaacgtgcatgtccgtag

SEQ ID NO: 51788 - DNA, 20 bp, Artificial Sequence
  chemically synthesized
aaacgtgcatgtccgtagtg

SEQ ID NO: 51789 - DNA, 20 bp, Artificial Sequence
  chemically synthesized
aacgtgcatgtccgtagtgg

SEQ ID NO: 51790 - DNA, 20 bp, Artificial Sequence
  chemically synthesized
acgtgcatgtccgtagtgga

SEQ ID NO: 51791 - DNA, 20 bp, Artificial Sequence
  chemically synthesized
cgtgcatgtccgtagtggag

SEQ ID NO: 51792 - DNA, 20 bp, Artificial Sequence
  chemically synthesized
tgcatgtccgtagtggaggg

SEQ ID NO: 51793 - DNA, 20 bp, Artificial Sequence
  chemically synthesized
ccgtagtggaggggagctct

SEQ ID NO: 51794 - DNA, 20 bp, Artificial Sequence
  chemically synthesized
cgtagtggaggggagctctt

SEQ ID NO: 51795 - DNA, 20 bp, Artificial Sequence
  chemically synthesized
gggagctcttaggatgtcta

SEQ ID NO: 51796 - DNA, 20 bp, Artificial Sequence
  chemically synthesized
taggatgtctacagatttcc

SEQ ID NO: 51797 - DNA, 20 bp, Artificial Sequence
  chemically synthesized
gacaataattgaaatgaaca

SEQ ID NO: 51798 - DNA, 20 bp, Artificial Sequence
  chemically synthesized
acaataattgaaatgaacaa

SEQ ID NO: 51799 - DNA, 20 bp, Artificial Sequence
  chemically synthesized
taattgaaatgaacaaaggc

SEQ ID NO: 51800 - DNA, 20 bp, Artificial Sequence
  chemically synthesized
aattgaaatgaacaaaggca

SEQ ID NO: 51801 - DNA, 20 bp, Artificial Sequence
  chemically synthesized
attgaaatgaacaaaggcaa

SEQ ID NO: 51802 - DNA, 20 bp, Artificial Sequence
  chemically synthesized
aaaggcaagggatgaccaat

SEQ ID NO: 51803 - DNA, 20 bp, Artificial Sequence
  chemically synthesized
aggcaagggatgaccaataa

SEQ ID NO: 51804 - DNA, 20 bp, Artificial Sequence
  chemically synthesized
atcacctttcccttgttctt

SEQ ID NO: 51805 - DNA, 20 bp, Artificial Sequence
  chemically synthesized
tttcccttgttcttcagctc

SEQ ID NO: 51806 - DNA, 20 bp, Artificial Sequence
  chemically synthesized
ttcagctccagctgtgccca

SEQ ID NO: 51807 - DNA, 20 bp, Artificial Sequence
  chemically synthesized
agctgtgcccacagacacca

SEQ ID NO: 51808 - DNA, 20 bp, Artificial Sequence
  chemically synthesized
gctgtgcccacagacaccac

SEQ ID NO: 51809 - DNA, 20 bp, Artificial Sequence
  chemically synthesized
ctgtgcccacagacaccaca

SEQ ID NO: 51810 - DNA, 20 bp, Artificial Sequence
  chemically synthesized
tgcccacagacaccacaggg

SEQ ID NO: 51811 - DNA, 20 bp, Artificial Sequence
  chemically synthesized
cacagggaagcctctgaaca

SEQ ID NO: 51812 - DNA, 20 bp, Artificial Sequence
  chemically synthesized
acagggaagcctctgaacac

SEQ ID NO: 51813 - DNA, 20 bp, Artificial Sequence
  chemically synthesized
cagggaagcctctgaacaca

SEQ ID NO: 51814 - DNA, 20 bp, Artificial Sequence
  chemically synthesized
agggaagcctctgaacacag

SEQ ID NO: 51815 - DNA, 20 bp, Artificial Sequence
  chemically synthesized
ctgaacacaggggtttgaac

SEQ ID NO: 51816 - DNA, 20 bp, Artificial Sequence
  chemically synthesized
tgaacacaggggtttgaacc

SEQ ID NO: 51817 - DNA, 20 bp, Artificial Sequence
  chemically synthesized
gaacacaggggtttgaacca

SEQ ID NO: 51818 - DNA, 20 bp, Artificial Sequence
  chemically synthesized
gtttgaaccagggcctctct

SEQ ID NO: 51819 - DNA, 20 bp, Artificial Sequence
  chemically synthesized
tttccaactctgataccctg

SEQ ID NO: 51820 - DNA, 20 bp, Artificial Sequence
  chemically synthesized
ctctgataccctgaagttct

SEQ ID NO: 51821 - DNA, 20 bp, Artificial Sequence
  chemically synthesized
tcagaaacttccataaattt

SEQ ID NO: 51822 - DNA, 20 bp, Artificial Sequence
  chemically synthesized
acttccataaattttggctg

SEQ ID NO: 51823 - DNA, 20 bp, Artificial Sequence
  chemically synthesized
tccataaattttggctgaag

SEQ ID NO: 51824 - DNA, 20 bp, Artificial Sequence
  chemically synthesized
aattttggctgaagaagcca

SEQ ID NO: 51825 - DNA, 20 bp, Artificial Sequence
  chemically synthesized
agaagccatagcaaacttgt

SEQ ID NO: 51826 - DNA, 20 bp, Artificial Sequence
  chemically synthesized
gccatagcaaacttgtcaga

SEQ ID NO: 51827 - DNA, 20 bp, Artificial Sequence
  chemically synthesized
atggtttcttacctttaact

SEQ ID NO: 51828 - DNA, 20 bp, Artificial Sequence
  chemically synthesized
ttttctctctcctctatgtg

SEQ ID NO: 51829 - DNA, 20 bp, Artificial Sequence
  chemically synthesized
tcctctatgtgtggtgactt

SEQ ID NO: 51830 - DNA, 20 bp, Artificial Sequence
  chemically synthesized
cctctatgtgtggtgacttc

SEQ ID NO: 51831 - DNA, 20 bp, Artificial Sequence
  chemically synthesized
tgtggtgacttcaggaaacc

SEQ ID NO: 51832 - DNA, 20 bp, Artificial Sequence
  chemically synthesized
gtggtgacttcaggaaaccc

SEQ ID NO: 51833 - DNA, 20 bp, Artificial Sequence
  chemically synthesized
gacttcaggaaacccaggcc

SEQ ID NO: 51834 - DNA, 20 bp, Artificial Sequence
  chemically synthesized
cttcaggaaacccaggccca

SEQ ID NO: 51835 - DNA, 20 bp, Artificial Sequence
  chemically synthesized
ttcaggaaacccaggcccag

SEQ ID NO: 51836 - DNA, 20 bp, Artificial Sequence
  chemically synthesized
acccaggcccagaggatata

SEQ ID NO: 51837 - DNA, 20 bp, Artificial Sequence
  chemically synthesized
ttctccttcaaaccactctt

SEQ ID NO: 51838 - DNA, 20 bp, Artificial Sequence
  chemically synthesized
aaaccactctttggatattc

SEQ ID NO: 51839 - DNA, 20 bp, Artificial Sequence
  chemically synthesized
actgcttcactgcgcttcac

SEQ ID NO: 51840 - DNA, 20 bp, Artificial Sequence
  chemically synthesized
cttcactgcgcttcactggt

SEQ ID NO: 51841 - DNA, 20 bp, Artificial Sequence
  chemically synthesized
ggtcagtgcgtcactcaaac

SEQ ID NO: 51842 - DNA, 20 bp, Artificial Sequence
  chemically synthesized
gcgtcactcaaactagctga

SEQ ID NO: 51843 - DNA, 20 bp, Artificial Sequence
  chemically synthesized
agaattgtctaactcataca

SEQ ID NO: 51844 - DNA, 20 bp, Artificial Sequence
  chemically synthesized
gaattgtctaactcatacac

SEQ ID NO: 51845 - DNA, 20 bp, Artificial Sequence
  chemically synthesized
aattgtctaactcatacaca

SEQ ID NO: 51846 - DNA, 20 bp, Artificial Sequence
  chemically synthesized
ctaactcatacacagggaca

SEQ ID NO: 51847 - DNA, 20 bp, Artificial Sequence
  chemically synthesized
tcatacacagggacaaagtc

SEQ ID NO: 51848 - DNA, 20 bp, Artificial Sequence
  chemically synthesized
acacagggacaaagtccagc

SEQ ID NO: 51849 - DNA, 20 bp, Artificial Sequence
  chemically synthesized
gtccagcaagcttatttaac

SEQ ID NO: 51850 - DNA, 20 bp, Artificial Sequence
  chemically synthesized
accggttacacaattgcctt

SEQ ID NO: 51851 - DNA, 20 bp, Artificial Sequence
  chemically synthesized
acaattgcctttggttttta

SEQ ID NO: 51852 - DNA, 20 bp, Artificial Sequence
  chemically synthesized
ggtttttacagtttgttcct

SEQ ID NO: 51853 - DNA, 20 bp, Artificial Sequence
  chemically synthesized
agtttgttcctaagtgtttc

SEQ ID NO: 51854 - DNA, 20 bp, Artificial Sequence
  chemically synthesized
tttgttcctaagtgtttcca

SEQ ID NO: 51855 - DNA, 20 bp, Artificial Sequence
  chemically synthesized
ttgttcctaagtgtttccag

SEQ ID NO: 51856 - DNA, 20 bp, Artificial Sequence
  chemically synthesized
cctaagtgtttccagaggct

SEQ ID NO: 51857 - DNA, 20 bp, Artificial Sequence
  chemically synthesized
ggcttggttcctcttcacct

SEQ ID NO: 51858 - DNA, 20 bp, Artificial Sequence
  chemically synthesized
gcttggttcctcttcacctg

SEQ ID NO: 51859 - DNA, 20 bp, Artificial Sequence
  chemically synthesized
tggttcctcttcacctgagg

SEQ ID NO: 51860 - DNA, 20 bp, Artificial Sequence
  chemically synthesized
gttcctcttcacctgaggta

SEQ ID NO: 51861 - DNA, 20 bp, Artificial Sequence
  chemically synthesized
gattgaccaattatttattc

SEQ ID NO: 51862 - DNA, 20 bp, Artificial Sequence
  chemically synthesized
caattatttattccagttaa

SEQ ID NO: 51863 - DNA, 20 bp, Artificial Sequence
  chemically synthesized
ttatttattccagttaaaag

SEQ ID NO: 51864 - DNA, 20 bp, Artificial Sequence
  chemically synthesized
tatttattccagttaaaagt

SEQ ID NO: 51865 - DNA, 20 bp, Artificial Sequence
  chemically synthesized
taaaagtaggcttatttcaa

SEQ ID NO: 51866 - DNA, 20 bp, Artificial Sequence
  chemically synthesized
aaaagtaggcttatttcaaa

SEQ ID NO: 51867 - DNA, 20 bp, Artificial Sequence
  chemically synthesized
agtaggcttatttcaaaagg

SEQ ID NO: 51868 - DNA, 20 bp, Artificial Sequence
  chemically synthesized
taggcttatttcaaaaggca

SEQ ID NO: 51869 - DNA, 20 bp, Artificial Sequence
  chemically synthesized
ttcaaaaggcagagaatttg

SEQ ID NO: 51870 - DNA, 20 bp, Artificial Sequence
  chemically synthesized
ggcagagaatttgaagctat

SEQ ID NO: 51871 - DNA, 20 bp, Artificial Sequence
  chemically synthesized
gcagagaatttgaagctatc

SEQ ID NO: 51872 - DNA, 20 bp, Artificial Sequence
  chemically synthesized
cagagaatttgaagctatcg

SEQ ID NO: 51873 - DNA, 20 bp, Artificial Sequence
  chemically synthesized
gaatttgaagctatcgggga

SEQ ID NO: 51874 - DNA, 20 bp, Artificial Sequence
  chemically synthesized
aatttgaagctatcggggaa

SEQ ID NO: 51875 - DNA, 20 bp, Artificial Sequence
  chemically synthesized
gctatcggggaaaggaactg

SEQ ID NO: 51876 - DNA, 20 bp, Artificial Sequence
  chemically synthesized
atcggggaaaggaactgtgg

SEQ ID NO: 51877 - DNA, 20 bp, Artificial Sequence
  chemically synthesized
gggaaaggaactgtggcaga

SEQ ID NO: 51878 - DNA, 20 bp, Artificial Sequence
  chemically synthesized
cagatagtgcctgctgtgtg

SEQ ID NO: 51879 - DNA, 20 bp, Artificial Sequence
  chemically synthesized
atagtgcctgctgtgtgtgg

SEQ ID NO: 51880 - DNA, 20 bp, Artificial Sequence
  chemically synthesized
agtgcctgctgtgtgtggtg

SEQ ID NO: 51881 - DNA, 20 bp, Artificial Sequence
  chemically synthesized
gtgcctgctgtgtgtggtgg

SEQ ID NO: 51882 - DNA, 20 bp, Artificial Sequence
  chemically synthesized
gtggtggaggattctctgct

SEQ ID NO: 51883 - DNA, 20 bp, Artificial Sequence
  chemically synthesized
ttctctgctcagtcctgact

SEQ ID NO: 51884 - DNA, 20 bp, Artificial Sequence
  chemically synthesized
tctctgctcagtcctgactc

SEQ ID NO: 51885 - DNA, 20 bp, Artificial Sequence
  chemically synthesized
tgctcagtcctgactcaggc

SEQ ID NO: 51886 - DNA, 20 bp, Artificial Sequence
  chemically synthesized
gctcagtcctgactcaggct

SEQ ID NO: 51887 - DNA, 20 bp, Artificial Sequence
  chemically synthesized
cagtcctgactcaggctagg

SEQ ID NO: 51888 - DNA, 20 bp, Artificial Sequence
  chemically synthesized
agtcctgactcaggctagga

SEQ ID NO: 51889 - DNA, 20 bp, Artificial Sequence
  chemically synthesized
tgactcaggctaggaaggaa

SEQ ID NO: 51890 - DNA, 20 bp, Artificial Sequence
  chemically synthesized
gactcaggctaggaaggaac

SEQ ID NO: 51891 - DNA, 20 bp, Artificial Sequence
  chemically synthesized
actcaggctaggaaggaaca

SEQ ID NO: 51892 - DNA, 20 bp, Artificial Sequence
  chemically synthesized
caggctaggaaggaacaggg

SEQ ID NO: 51893 - DNA, 20 bp, Artificial Sequence
  chemically synthesized
ggaaggaacagggcagtgct

SEQ ID NO: 51894 - DNA, 20 bp, Artificial Sequence
  chemically synthesized
cagggcagtgctgagtctcc

SEQ ID NO: 51895 - DNA, 20 bp, Artificial Sequence
  chemically synthesized
gggcagtgctgagtctcctg

SEQ ID NO: 51896 - DNA, 20 bp, Artificial Sequence
  chemically synthesized
agcactgccctgttccttcc

SEQ ID NO: 51897 - DNA, 20 bp, Artificial Sequence
  chemically synthesized
gccctgttccttcctagcct

SEQ ID NO: 51898 - DNA, 20 bp, Artificial Sequence
  chemically synthesized
tgttccttcctagcctgagt

SEQ ID NO: 51899 - DNA, 20 bp, Artificial Sequence
  chemically synthesized
gttccttcctagcctgagtc

SEQ ID NO: 51900 - DNA, 20 bp, Artificial Sequence
  chemically synthesized
tcctagcctgagtcaggact

SEQ ID NO: 51901 - DNA, 20 bp, Artificial Sequence
  chemically synthesized
tagcctgagtcaggactgag

SEQ ID NO: 51902 - DNA, 20 bp, Artificial Sequence
  chemically synthesized
gcctgagtcaggactgagca

SEQ ID NO: 51903 - DNA, 20 bp, Artificial Sequence
  chemically synthesized
agagaatcctccaccacaca

SEQ ID NO: 51904 - DNA, 20 bp, Artificial Sequence
  chemically synthesized
gaatcctccaccacacacag

SEQ ID NO: 51905 - DNA, 20 bp, Artificial Sequence
  chemically synthesized
aatcctccaccacacacagc

SEQ ID NO: 51906 - DNA, 20 bp, Artificial Sequence
  chemically synthesized
acagcaggcactatctgcca

SEQ ID NO: 51907 - DNA, 20 bp, Artificial Sequence
  chemically synthesized
gccacagttcctttccccga

SEQ ID NO: 51908 - DNA, 20 bp, Artificial Sequence
  chemically synthesized
aattctctgccttttgaaat

SEQ ID NO: 51909 - DNA, 20 bp, Artificial Sequence
  chemically synthesized
gaaataagcctacttttaac

SEQ ID NO: 51910 - DNA, 20 bp, Artificial Sequence
  chemically synthesized
ttttaactggaataaataat

SEQ ID NO: 51911 - DNA, 20 bp, Artificial Sequence
  chemically synthesized
taattggtcaatctctacct

SEQ ID NO: 51912 - DNA, 20 bp, Artificial Sequence
  chemically synthesized
aattggtcaatctctacctc

SEQ ID NO: 51913 - DNA, 20 bp, Artificial Sequence
  chemically synthesized
gtcaatctctacctcaggtg

SEQ ID NO: 51914 - DNA, 20 bp, Artificial Sequence
  chemically synthesized
caatctctacctcaggtgaa

SEQ ID NO: 51915 - DNA, 20 bp, Artificial Sequence
  chemically synthesized
aatctctacctcaggtgaag

SEQ ID NO: 51916 - DNA, 20 bp, Artificial Sequence
  chemically synthesized
acctcaggtgaagaggaacc

SEQ ID NO: 51917 - DNA, 20 bp, Artificial Sequence
  chemically synthesized
gtgaagaggaaccaagcctc

SEQ ID NO: 51918 - DNA, 20 bp, Artificial Sequence
  chemically synthesized
accaagcctctggaaacact

SEQ ID NO: 51919 - DNA, 20 bp, Artificial Sequence
  chemically synthesized
ccaagcctctggaaacactt

SEQ ID NO: 51920 - DNA, 20 bp, Artificial Sequence
  chemically synthesized
ggaacaaactgtaaaaacca

SEQ ID NO: 51921 - DNA, 20 bp, Artificial Sequence
  chemically synthesized
gaacaaactgtaaaaaccaa

SEQ ID NO: 51922 - DNA, 20 bp, Artificial Sequence
  chemically synthesized
accaaaggcaattgtgtaac

SEQ ID NO: 51923 - DNA, 20 bp, Artificial Sequence
  chemically synthesized
aattgtgtaaccggttaaat

SEQ ID NO: 51924 - DNA, 20 bp, Artificial Sequence
  chemically synthesized
aaccggttaaataagcttgc

SEQ ID NO: 51925 - DNA, 20 bp, Artificial Sequence
  chemically synthesized
tggactttgtccctgtgtat

SEQ ID NO: 51926 - DNA, 20 bp, Artificial Sequence
  chemically synthesized
ctttgtccctgtgtatgagt

SEQ ID NO: 51927 - DNA, 20 bp, Artificial Sequence
  chemically synthesized
tatgagttagacaattcttt

SEQ ID NO: 51928 - DNA, 20 bp, Artificial Sequence
  chemically synthesized
agttagacaattctttcagc

SEQ ID NO: 51929 - DNA, 20 bp, Artificial Sequence
  chemically synthesized
acaattctttcagctagttt

SEQ ID NO: 51930 - DNA, 20 bp, Artificial Sequence
  chemically synthesized
agtttgagtgacgcactgac

SEQ ID NO: 51931 - DNA, 20 bp, Artificial Sequence
  chemically synthesized
gagtgacgcactgaccagtg

SEQ ID NO: 51932 - DNA, 20 bp, Artificial Sequence
  chemically synthesized
acgcactgaccagtgaagcg

SEQ ID NO: 51933 - DNA, 20 bp, Artificial Sequence
  chemically synthesized
ctgaccagtgaagcgcagtg

SEQ ID NO: 51934 - DNA, 20 bp, Artificial Sequence
  chemically synthesized
accagtgaagcgcagtgaag

SEQ ID NO: 51935 - DNA, 20 bp, Artificial Sequence
  chemically synthesized
agtgaagcgcagtgaagcag

SEQ ID NO: 51936 - DNA, 20 bp, Artificial Sequence
  chemically synthesized
gtgaagcgcagtgaagcagt

SEQ ID NO: 51937 - DNA, 20 bp, Artificial Sequence
  chemically synthesized
cgcagtgaagcagtgggaac

SEQ ID NO: 51938 - DNA, 20 bp, Artificial Sequence
  chemically synthesized
agtgggaaccggaatatcca

SEQ ID NO: 51939 - DNA, 20 bp, Artificial Sequence
  chemically synthesized
tgggaaccggaatatccaaa

SEQ ID NO: 51940 - DNA, 20 bp, Artificial Sequence
  chemically synthesized
gaaccggaatatccaaagag

SEQ ID NO: 51941 - DNA, 20 bp, Artificial Sequence
  chemically synthesized
aatatccaaagagtggtttg

SEQ ID NO: 51942 - DNA, 20 bp, Artificial Sequence
  chemically synthesized
atatccaaagagtggtttga

SEQ ID NO: 51943 - DNA, 20 bp, Artificial Sequence
  chemically synthesized
atccaaagagtggtttgaag

SEQ ID NO: 51944 - DNA, 20 bp, Artificial Sequence
  chemically synthesized
aaagagtggtttgaaggaga

SEQ ID NO: 51945 - DNA, 20 bp, Artificial Sequence
  chemically synthesized
gagtggtttgaaggagaaag

SEQ ID NO: 51946 - DNA, 20 bp, Artificial Sequence
  chemically synthesized
tgaaggagaaagaagcattg

SEQ ID NO: 51947 - DNA, 20 bp, Artificial Sequence
  chemically synthesized
cattgtggctttatatcctc

SEQ ID NO: 51948 - DNA, 20 bp, Artificial Sequence
  chemically synthesized
attgtggctttatatcctct

SEQ ID NO: 51949 - DNA, 20 bp, Artificial Sequence
  chemically synthesized
ggctttatatcctctgggcc

SEQ ID NO: 51950 - DNA, 20 bp, Artificial Sequence
  chemically synthesized
gctttatatcctctgggcct

SEQ ID NO: 51951 - DNA, 20 bp, Artificial Sequence
  chemically synthesized
ctctgggcctgggtttcctg

SEQ ID NO: 51952 - DNA, 20 bp, Artificial Sequence
  chemically synthesized
tttcctgaagtcaccacaca

SEQ ID NO: 51953 - DNA, 20 bp, Artificial Sequence
  chemically synthesized
tcctgaagtcaccacacata

SEQ ID NO: 51954 - DNA, 20 bp, Artificial Sequence
  chemically synthesized
cctgaagtcaccacacatag

SEQ ID NO: 51955 - DNA, 20 bp, Artificial Sequence
  chemically synthesized
tgaagtcaccacacatagag

SEQ ID NO: 51956 - DNA, 20 bp, Artificial Sequence
  chemically synthesized
aagtcaccacacatagagga

SEQ ID NO: 51957 - DNA, 20 bp, Artificial Sequence
  chemically synthesized
gtcaccacacatagaggaga

SEQ ID NO: 51958 - DNA, 20 bp, Artificial Sequence
  chemically synthesized
cacatagaggagagagaaaa

SEQ ID NO: 51959 - DNA, 20 bp, Artificial Sequence
  chemically synthesized
agaggagagagaaaatggct

SEQ ID NO: 51960 - DNA, 20 bp, Artificial Sequence
  chemically synthesized
gagagaaaatggctgagtta

SEQ ID NO: 51961 - DNA, 20 bp, Artificial Sequence
  chemically synthesized
agagaaaatggctgagttaa

SEQ ID NO: 51962 - DNA, 20 bp, Artificial Sequence
  chemically synthesized
aaaatggctgagttaaaggt

SEQ ID NO: 51963 - DNA, 20 bp, Artificial Sequence
  chemically synthesized
aaggtaagaaaccatctgac

SEQ ID NO: 51964 - DNA, 20 bp, Artificial Sequence
  chemically synthesized
accatctgacaagtttgcta

SEQ ID NO: 51965 - DNA, 20 bp, Artificial Sequence
  chemically synthesized
caagtttgctatggcttctt

SEQ ID NO: 51966 - DNA, 20 bp, Artificial Sequence
  chemically synthesized
gcttcttcagccaaaattta

SEQ ID NO: 51967 - DNA, 20 bp, Artificial Sequence
  chemically synthesized
tcttcagccaaaatttatgg

SEQ ID NO: 51968 - DNA, 20 bp, Artificial Sequence
  chemically synthesized
caaaatttatggaagtttct

SEQ ID NO: 51969 - DNA, 20 bp, Artificial Sequence
  chemically synthesized
atggaagtttctgagaactt

SEQ ID NO: 51970 - DNA, 20 bp, Artificial Sequence
  chemically synthesized
tggaagtttctgagaacttc

SEQ ID NO: 51971 - DNA, 20 bp, Artificial Sequence
  chemically synthesized
ggaagtttctgagaacttca

SEQ ID NO: 51972 - DNA, 20 bp, Artificial Sequence
  chemically synthesized
ttctgagaacttcagggtat

SEQ ID NO: 51973 - DNA, 20 bp, Artificial Sequence
  chemically synthesized
ctgagaacttcagggtatca

SEQ ID NO: 51974 - DNA, 20 bp, Artificial Sequence
  chemically synthesized
gaacttcagggtatcagagt

SEQ ID NO: 51975 - DNA, 20 bp, Artificial Sequence
  chemically synthesized
tcagggtatcagagttggaa

SEQ ID NO: 51976 - DNA, 20 bp, Artificial Sequence
  chemically synthesized
tatcagagttggaaaagact

SEQ ID NO: 51977 - DNA, 20 bp, Artificial Sequence
  chemically synthesized
tcagagttggaaaagactta

SEQ ID NO: 51978 - DNA, 20 bp, Artificial Sequence
  chemically synthesized
agagttggaaaagacttaga

SEQ ID NO: 51979 - DNA, 20 bp, Artificial Sequence
  chemically synthesized
gagttggaaaagacttagag

SEQ ID NO: 51980 - DNA, 20 bp, Artificial Sequence
  chemically synthesized
gaaaagacttagagaggccc

SEQ ID NO: 51981 - DNA, 20 bp, Artificial Sequence
  chemically synthesized
ctggttcaaacccctgtgtt

SEQ ID NO: 51982 - DNA, 20 bp, Artificial Sequence
  chemically synthesized
ggttcaaacccctgtgttca

SEQ ID NO: 51983 - DNA, 20 bp, Artificial Sequence
  chemically synthesized
gttcaaacccctgtgttcag

SEQ ID NO: 51984 - DNA, 20 bp, Artificial Sequence
  chemically synthesized
tgtgttcagaggcttccctg

SEQ ID NO: 51985 - DNA, 20 bp, Artificial Sequence
  chemically synthesized
aggcttccctgtggtgtctg

SEQ ID NO: 51986 - DNA, 20 bp, Artificial Sequence
  chemically synthesized
ggcttccctgtggtgtctgt

SEQ ID NO: 51987 - DNA, 20 bp, Artificial Sequence
  chemically synthesized
ccctgtggtgtctgtgggca

SEQ ID NO: 51988 - DNA, 20 bp, Artificial Sequence
  chemically synthesized
gtggtgtctgtgggcacagc

SEQ ID NO: 51989 - DNA, 20 bp, Artificial Sequence
  chemically synthesized
ggtgtctgtgggcacagctg

SEQ ID NO: 51990 - DNA, 20 bp, Artificial Sequence
  chemically synthesized
tgtgggcacagctggagctg

SEQ ID NO: 51991 - DNA, 20 bp, Artificial Sequence
  chemically synthesized
cacagctggagctgaagaac

SEQ ID NO: 51992 - DNA, 20 bp, Artificial Sequence
  chemically synthesized
acagctggagctgaagaaca

SEQ ID NO: 51993 - DNA, 20 bp, Artificial Sequence
  chemically synthesized
cagctggagctgaagaacaa

SEQ ID NO: 51994 - DNA, 20 bp, Artificial Sequence
  chemically synthesized
tggagctgaagaacaaggga

SEQ ID NO: 51995 - DNA, 20 bp, Artificial Sequence
  chemically synthesized
ggagctgaagaacaagggaa

SEQ ID NO: 51996 - DNA, 20 bp, Artificial Sequence
  chemically synthesized
agaacaagggaaaggtgata

SEQ ID NO: 51997 - DNA, 20 bp, Artificial Sequence
  chemically synthesized
gaacaagggaaaggtgataa

SEQ ID NO: 51998 - DNA, 20 bp, Artificial Sequence
  chemically synthesized
aagggaaaggtgataaagga

SEQ ID NO: 51999 - DNA, 20 bp, Artificial Sequence
  chemically synthesized
ggtgataaaggaaagaaatg

SEQ ID NO: 52000 - DNA, 20 bp, Artificial Sequence
  chemically synthesized
gaaagaaatgaagctcttat

SEQ ID NO: 52001 - DNA, 20 bp, Artificial Sequence
  chemically synthesized
gttcatttcaattattgtct

SEQ ID NO: 52002 - DNA, 20 bp, Artificial Sequence
  chemically synthesized
attattgtcttggaaatctg

SEQ ID NO: 52003 - DNA, 20 bp, Artificial Sequence
  chemically synthesized
tggaaatctgtagacatcct

SEQ ID NO: 52004 - DNA, 20 bp, Artificial Sequence
  chemically synthesized
gaaatctgtagacatcctaa

SEQ ID NO: 52005 - DNA, 20 bp, Artificial Sequence
  chemically synthesized
ctaagagctcccctccacta

SEQ ID NO: 52006 - DNA, 20 bp, Artificial Sequence
  chemically synthesized
ctgacaccttcccattgctg

SEQ ID NO: 52007 - DNA, 20 bp, Artificial Sequence
  chemically synthesized
ttcccattgctgcagcctca

SEQ ID NO: 52008 - DNA, 20 bp, Artificial Sequence
  chemically synthesized
gcagcctcatggaccacttc

SEQ ID NO: 52009 - DNA, 20 bp, Artificial Sequence
  chemically synthesized
catggaccacttccggtgac

SEQ ID NO: 52010 - DNA, 20 bp, Artificial Sequence
  chemically synthesized
gaccacttccggtgaccagt

SEQ ID NO: 52011 - DNA, 20 bp, Artificial Sequence
  chemically synthesized
ttagatatgcttgatctatt

SEQ ID NO: 52012 - DNA, 20 bp, Artificial Sequence
  chemically synthesized
cttgatctatttagttaatt

SEQ ID NO: 52013 - DNA, 20 bp, Artificial Sequence
  chemically synthesized
ttgatctatttagttaatta

SEQ ID NO: 52014 - DNA, 20 bp, Artificial Sequence
  chemically synthesized
agttaattaaggctctgaat

SEQ ID NO: 52015 - DNA, 20 bp, Artificial Sequence
  chemically synthesized
taaggctctgaatcagccct

SEQ ID NO: 52016 - DNA, 20 bp, Artificial Sequence
  chemically synthesized
gctctgaatcagcccttggc

SEQ ID NO: 52017 - DNA, 20 bp, Artificial Sequence
  chemically synthesized
ctgaatcagcccttggccag

SEQ ID NO: 52018 - DNA, 20 bp, Artificial Sequence
  chemically synthesized
aatcagcccttggccagaag

SEQ ID NO: 52019 - DNA, 20 bp, Artificial Sequence
  chemically synthesized
gccagaagaagcacctcctc

SEQ ID NO: 52020 - DNA, 20 bp, Artificial Sequence
  chemically synthesized
ccagaagaagcacctcctct

SEQ ID NO: 52021 - DNA, 20 bp, Artificial Sequence
  chemically synthesized
aggaaatcattccttctttt

SEQ ID NO: 52022 - DNA, 20 bp, Artificial Sequence
  chemically synthesized
tttagtaatacgcaattgaa

SEQ ID NO: 52023 - DNA, 20 bp, Artificial Sequence
  chemically synthesized
acgcaattgaaaagtatgtg

SEQ ID NO: 52024 - DNA, 20 bp, Artificial Sequence
  chemically synthesized
cgcaattgaaaagtatgtgt

SEQ ID NO: 52025 - DNA, 20 bp, Artificial Sequence
  chemically synthesized
atgtgtgggttatgtgctgt

SEQ ID NO: 52026 - DNA, 20 bp, Artificial Sequence
  chemically synthesized
tgtgtgggttatgtgctgtt

SEQ ID NO: 52027 - DNA, 20 bp, Artificial Sequence
  chemically synthesized
gttatgtgctgttaggtgct

SEQ ID NO: 52028 - DNA, 20 bp, Artificial Sequence
  chemically synthesized
ctgttaggtgctaagcattt

SEQ ID NO: 52029 - DNA, 20 bp, Artificial Sequence
  chemically synthesized
cataatcctcaaaataaatc

SEQ ID NO: 52030 - DNA, 20 bp, Artificial Sequence
  chemically synthesized
ataatcctcaaaataaatct

SEQ ID NO: 52031 - DNA, 20 bp, Artificial Sequence
  chemically synthesized
taatcctcaaaataaatctg

SEQ ID NO: 52032 - DNA, 20 bp, Artificial Sequence
  chemically synthesized
ctcaaaataaatctggggta

SEQ ID NO: 52033 - DNA, 20 bp, Artificial Sequence
  chemically synthesized
caaaataaatctggggtata

SEQ ID NO: 52034 - DNA, 20 bp, Artificial Sequence
  chemically synthesized
aaataaatctggggtataga

SEQ ID NO: 52035 - DNA, 20 bp, Artificial Sequence
  chemically synthesized
ataaatctggggtatagaga

SEQ ID NO: 52036 - DNA, 20 bp, Artificial Sequence
  chemically synthesized
taaatctggggtatagagag

SEQ ID NO: 52037 - DNA, 20 bp, Artificial Sequence
  chemically synthesized
agagaggttcttgtttcaat

SEQ ID NO: 52038 - DNA, 20 bp, Artificial Sequence
  chemically synthesized
ggttcttgtttcaattagaa

SEQ ID NO: 52039 - DNA, 20 bp, Artificial Sequence
  chemically synthesized
tcaattagaaaagtaatgct

SEQ ID NO: 52040 - DNA, 20 bp, Artificial Sequence
  chemically synthesized
aattagaaaagtaatgcttg

SEQ ID NO: 52041 - DNA, 20 bp, Artificial Sequence
  chemically synthesized
ttagaaaagtaatgcttgga

SEQ ID NO: 52042 - DNA, 20 bp, Artificial Sequence
  chemically synthesized
ggagagactatgatttgccc

SEQ ID NO: 52043 - DNA, 20 bp, Artificial Sequence
  chemically synthesized
gagagactatgatttgccca

SEQ ID NO: 52044 - DNA, 20 bp, Artificial Sequence
  chemically synthesized
ttgcccaaggtcactgccaa

SEQ ID NO: 52045 - DNA, 20 bp, Artificial Sequence
  chemically synthesized
ctgccaatagatgacttgat

SEQ ID NO: 52046 - DNA, 20 bp, Artificial Sequence
  chemically synthesized
ccaatagatgacttgattag

SEQ ID NO: 52047 - DNA, 20 bp, Artificial Sequence
  chemically synthesized
atagatgacttgattagaag

SEQ ID NO: 52048 - DNA, 20 bp, Artificial Sequence
  chemically synthesized
tagatgacttgattagaagc

SEQ ID NO: 52049 - DNA, 20 bp, Artificial Sequence
  chemically synthesized
agatgacttgattagaagca

SEQ ID NO: 52050 - DNA, 20 bp, Artificial Sequence
  chemically synthesized
gcagggtatgtttgaatgcg

SEQ ID NO: 52051 - DNA, 20 bp, Artificial Sequence
  chemically synthesized
gtatgtttgaatgcgaagtc

SEQ ID NO: 52052 - DNA, 20 bp, Artificial Sequence
  chemically synthesized
tatgtttgaatgcgaagtcc

SEQ ID NO: 52053 - DNA, 20 bp, Artificial Sequence
  chemically synthesized
atgcgaagtccaggctcaaa

SEQ ID NO: 52054 - DNA, 20 bp, Artificial Sequence
  chemically synthesized
tgcgaagtccaggctcaaaa

SEQ ID NO: 52055 - DNA, 20 bp, Artificial Sequence
  chemically synthesized
gcgaagtccaggctcaaaaa

SEQ ID NO: 52056 - DNA, 20 bp, Artificial Sequence
  chemically synthesized
cgaagtccaggctcaaaaag

SEQ ID NO: 52057 - DNA, 20 bp, Artificial Sequence
  chemically synthesized
ccaggctcaaaaaggggcct

SEQ ID NO: 52058 - DNA, 20 bp, Artificial Sequence
  chemically synthesized
ggctcaaaaaggggccttag

SEQ ID NO: 52059 - DNA, 20 bp, Artificial Sequence
  chemically synthesized
ggggccttagtggctcctac

SEQ ID NO: 52060 - DNA, 20 bp, Artificial Sequence
  chemically synthesized
cttagtggctcctactagac

SEQ ID NO: 52061 - DNA, 20 bp, Artificial Sequence
  chemically synthesized
tcctactagactggtatctt

SEQ ID NO: 52062 - DNA, 20 bp, Artificial Sequence
  chemically synthesized
cctactagactggtatctta

SEQ ID NO: 52063 - DNA, 20 bp, Artificial Sequence
  chemically synthesized
ctagactggtatcttaaggc

SEQ ID NO: 52064 - DNA, 20 bp, Artificial Sequence
  chemically synthesized
tagactggtatcttaaggca

SEQ ID NO: 52065 - DNA, 20 bp, Artificial Sequence
  chemically synthesized
gtatcttaaggcaaggaaaa

SEQ ID NO: 52066 - DNA, 20 bp, Artificial Sequence
  chemically synthesized
ctaatatctaaaaccatgcc

SEQ ID NO: 52067 - DNA, 20 bp, Artificial Sequence
  chemically synthesized
ctaaaaccatgcctagtgcc

SEQ ID NO: 52068 - DNA, 20 bp, Artificial Sequence
  chemically synthesized
taaaaccatgcctagtgccc

SEQ ID NO: 52069 - DNA, 20 bp, Artificial Sequence
  chemically synthesized
accatgcctagtgcccaggc

SEQ ID NO: 52070 - DNA, 20 bp, Artificial Sequence
  chemically synthesized
ccatgcctagtgcccaggcc

SEQ ID NO: 52071 - DNA, 20 bp, Artificial Sequence
  chemically synthesized
cgcatgcatgtgtaactgaa

SEQ ID NO: 52072 - DNA, 20 bp, Artificial Sequence
  chemically synthesized
tgtaactgaacagaactgcc

SEQ ID NO: 52073 - DNA, 20 bp, Artificial Sequence
  chemically synthesized
aacagaactgcccagaacct

SEQ ID NO: 52074 - DNA, 20 bp, Artificial Sequence
  chemically synthesized
aactgcccagaaccttggct

SEQ ID NO: 52075 - DNA, 20 bp, Artificial Sequence
  chemically synthesized
actgcccagaaccttggctc

SEQ ID NO: 52076 - DNA, 20 bp, Artificial Sequence
  chemically synthesized
ccagaaccttggctcaggcc

SEQ ID NO: 52077 - DNA, 20 bp, Artificial Sequence
  chemically synthesized
gaaccttggctcaggccaag

SEQ ID NO: 52078 - DNA, 20 bp, Artificial Sequence
  chemically synthesized
aaccttggctcaggccaagt

SEQ ID NO: 52079 - DNA, 20 bp, Artificial Sequence
  chemically synthesized
ttggctcaggccaagtaggc

SEQ ID NO: 52080 - DNA, 20 bp, Artificial Sequence
  chemically synthesized
taggccagaccaccccacaa

SEQ ID NO: 52081 - DNA, 20 bp, Artificial Sequence
  chemically synthesized
acagacatcttccctgaatg

SEQ ID NO: 52082 - DNA, 20 bp, Artificial Sequence
  chemically synthesized
cagacatcttccctgaatgc

SEQ ID NO: 52083 - DNA, 20 bp, Artificial Sequence
  chemically synthesized
agacatcttccctgaatgca

SEQ ID NO: 52084 - DNA, 20 bp, Artificial Sequence
  chemically synthesized
cttccctgaatgcagggttt

SEQ ID NO: 52085 - DNA, 20 bp, Artificial Sequence
  chemically synthesized
ccctgaatgcagggtttgag

SEQ ID NO: 52086 - DNA, 20 bp, Artificial Sequence
  chemically synthesized
aatgccctctaactgatgct

SEQ ID NO: 52087 - DNA, 20 bp, Artificial Sequence
  chemically synthesized
tctaactgatgctgagtttg

SEQ ID NO: 52088 - DNA, 20 bp, Artificial Sequence
  chemically synthesized
gctgagtttgaagaatccat

SEQ ID NO: 52089 - DNA, 20 bp, Artificial Sequence
  chemically synthesized
gtttgaagaatccatcagtt

SEQ ID NO: 52090 - DNA, 20 bp, Artificial Sequence
  chemically synthesized
tttgaagaatccatcagtta

SEQ ID NO: 52091 - DNA, 20 bp, Artificial Sequence
  chemically synthesized
ttgaagaatccatcagttaa

SEQ ID NO: 52092 - DNA, 20 bp, Artificial Sequence
  chemically synthesized
tgaagaatccatcagttaag

SEQ ID NO: 52093 - DNA, 20 bp, Artificial Sequence
  chemically synthesized
aagaatccatcagttaaggg

SEQ ID NO: 52094 - DNA, 20 bp, Artificial Sequence
  chemically synthesized
agaatccatcagttaagggg

SEQ ID NO: 52095 - DNA, 20 bp, Artificial Sequence
  chemically synthesized
agttaaggggaggtgtttct

SEQ ID NO: 52096 - DNA, 20 bp, Artificial Sequence
  chemically synthesized
gggaggtgtttctgagtttg

SEQ ID NO: 52097 - DNA, 20 bp, Artificial Sequence
  chemically synthesized
gaatcaaacaccttcctaat

SEQ ID NO: 52098 - DNA, 20 bp, Artificial Sequence
  chemically synthesized
tcaaacaccttcctaattgg

SEQ ID NO: 52099 - DNA, 20 bp, Artificial Sequence
  chemically synthesized
caaacaccttcctaattggt

SEQ ID NO: 52100 - DNA, 20 bp, Artificial Sequence
  chemically synthesized
atcctgaaaacactccacac

SEQ ID NO: 52101 - DNA, 20 bp, Artificial Sequence
  chemically synthesized
cctgaaaacactccacaccg

SEQ ID NO: 52102 - DNA, 20 bp, Artificial Sequence
  chemically synthesized
aacactccacaccggagtaa

SEQ ID NO: 52103 - DNA, 20 bp, Artificial Sequence
  chemically synthesized
cacaccggagtaaaagactt

SEQ ID NO: 52104 - DNA, 20 bp, Artificial Sequence
  chemically synthesized
ttatctttatgcctgactaa

SEQ ID NO: 52105 - DNA, 20 bp, Artificial Sequence
  chemically synthesized
ttaactctcattctttcatt

SEQ ID NO: 52106 - DNA, 20 bp, Artificial Sequence
  chemically synthesized
attcagcaaatattttgtgc

SEQ ID NO: 52107 - DNA, 20 bp, Artificial Sequence
  chemically synthesized
tgtgctagtgcatgacactg

SEQ ID NO: 52108 - DNA, 20 bp, Artificial Sequence
  chemically synthesized
gacactgcagattaatatcg

SEQ ID NO: 52109 - DNA, 20 bp, Artificial Sequence
  chemically synthesized
attaatatcgtagatgaact

SEQ ID NO: 52110 - DNA, 20 bp, Artificial Sequence
  chemically synthesized
tatcgtagatgaactgagtc

SEQ ID NO: 52111 - DNA, 20 bp, Artificial Sequence
  chemically synthesized
atcgtagatgaactgagtct

SEQ ID NO: 52112 - DNA, 20 bp, Artificial Sequence
  chemically synthesized
tagatgaactgagtctgggc

SEQ ID NO: 52113 - DNA, 20 bp, Artificial Sequence
  chemically synthesized
agatgaactgagtctgggct

SEQ ID NO: 52114 - DNA, 20 bp, Artificial Sequence
  chemically synthesized
tgaactgagtctgggctagg

SEQ ID NO: 52115 - DNA, 20 bp, Artificial Sequence
  chemically synthesized
aactgagtctgggctaggta

SEQ ID NO: 52116 - DNA, 20 bp, Artificial Sequence
  chemically synthesized
agtcaaaaaaaaatttccta

SEQ ID NO: 52117 - DNA, 20 bp, Artificial Sequence
  chemically synthesized
gtcaaaaaaaaatttcctaa

SEQ ID NO: 52118 - DNA, 20 bp, Artificial Sequence
  chemically synthesized
caaaaaaaaatttcctaaag

SEQ ID NO: 52119 - DNA, 20 bp, Artificial Sequence
  chemically synthesized
aaggagcctgtacctaaact

SEQ ID NO: 52120 - DNA, 20 bp, Artificial Sequence
  chemically synthesized
ctgtacctaaactgagtctt

SEQ ID NO: 52121 - DNA, 20 bp, Artificial Sequence
  chemically synthesized
gtacctaaactgagtcttca

SEQ ID NO: 52122 - DNA, 20 bp, Artificial Sequence
  chemically synthesized
acctaaactgagtcttcaga

SEQ ID NO: 52123 - DNA, 20 bp, Artificial Sequence
  chemically synthesized
taaactgagtcttcagagag

SEQ ID NO: 52124 - DNA, 20 bp, Artificial Sequence
  chemically synthesized
ctgagtcttcagagagaagt

SEQ ID NO: 52125 - DNA, 20 bp, Artificial Sequence
  chemically synthesized
cttcagagagaagttggaac

SEQ ID NO: 52126 - DNA, 20 bp, Artificial Sequence
  chemically synthesized
gagagaagttggaactggca

SEQ ID NO: 52127 - DNA, 20 bp, Artificial Sequence
  chemically synthesized
gaagttggaactggcaaagt

SEQ ID NO: 52128 - DNA, 20 bp, Artificial Sequence
  chemically synthesized
aagttggaactggcaaagtg

SEQ ID NO: 52129 - DNA, 20 bp, Artificial Sequence
  chemically synthesized
ttggaactggcaaagtgagg

SEQ ID NO: 52130 - DNA, 20 bp, Artificial Sequence
  chemically synthesized
tggaactggcaaagtgagga

SEQ ID NO: 52131 - DNA, 20 bp, Artificial Sequence
  chemically synthesized
actggcaaagtgaggaagga

SEQ ID NO: 52132 - DNA, 20 bp, Artificial Sequence
  chemically synthesized
ctggcaaagtgaggaaggac

SEQ ID NO: 52133 - DNA, 20 bp, Artificial Sequence
  chemically synthesized
tggcaaagtgaggaaggacg

SEQ ID NO: 52134 - DNA, 20 bp, Artificial Sequence
  chemically synthesized
aagtgaggaaggacggggtc

SEQ ID NO: 52135 - DNA, 20 bp, Artificial Sequence
  chemically synthesized
gtgaggaaggacggggtctg

SEQ ID NO: 52136 - DNA, 20 bp, Artificial Sequence
  chemically synthesized
tgaggaaggacggggtctgg

SEQ ID NO: 52137 - DNA, 20 bp, Artificial Sequence
  chemically synthesized
gaggaaggacggggtctgga

SEQ ID NO: 52138 - DNA, 20 bp, Artificial Sequence
  chemically synthesized
gaaggacggggtctggaggg

SEQ ID NO: 52139 - DNA, 20 bp, Artificial Sequence
  chemically synthesized
aggacggggtctggagggaa

SEQ ID NO: 52140 - DNA, 20 bp, Artificial Sequence
  chemically synthesized
cggggtctggagggaagagt

SEQ ID NO: 52141 - DNA, 20 bp, Artificial Sequence
  chemically synthesized
tggagggaagagtgagtgca

SEQ ID NO: 52142 - DNA, 20 bp, Artificial Sequence
  chemically synthesized
ggagggaagagtgagtgcaa

SEQ ID NO: 52143 - DNA, 20 bp, Artificial Sequence
  chemically synthesized
gaagagtgagtgcaaaggca

SEQ ID NO: 52144 - DNA, 20 bp, Artificial Sequence
  chemically synthesized
gtgcaaaggcacagcacata

SEQ ID NO: 52145 - DNA, 20 bp, Artificial Sequence
  chemically synthesized
tacagaatgcctgcatgctc

SEQ ID NO: 52146 - DNA, 20 bp, Artificial Sequence
  chemically synthesized
tctagaatccaaaactgtgt

SEQ ID NO: 52147 - DNA, 20 bp, Artificial Sequence
  chemically synthesized
aaactgtgtcagccaaattt

SEQ ID NO: 52148 - DNA, 20 bp, Artificial Sequence
  chemically synthesized
gtcagccaaatttgagttga

SEQ ID NO: 52149 - DNA, 20 bp, Artificial Sequence
  chemically synthesized
cagccaaatttgagttgatg

SEQ ID NO: 52150 - DNA, 20 bp, Artificial Sequence
  chemically synthesized
agccaaatttgagttgatgg

SEQ ID NO: 52151 - DNA, 20 bp, Artificial Sequence
  chemically synthesized
gccaaatttgagttgatgga

SEQ ID NO: 52152 - DNA, 20 bp, Artificial Sequence
  chemically synthesized
aatttgagttgatggaggga

SEQ ID NO: 52153 - DNA, 20 bp, Artificial Sequence
  chemically synthesized
gatggagggacagccaaact

SEQ ID NO: 52154 - DNA, 20 bp, Artificial Sequence
  chemically synthesized
gacagccaaactgagatacc

SEQ ID NO: 52155 - DNA, 20 bp, Artificial Sequence
  chemically synthesized
acagccaaactgagataccc

SEQ ID NO: 52156 - DNA, 20 bp, Artificial Sequence
  chemically synthesized
gccaaactgagatacccagg

SEQ ID NO: 52157 - DNA, 20 bp, Artificial Sequence
  chemically synthesized
aaactgagatacccaggcgg

SEQ ID NO: 52158 - DNA, 20 bp, Artificial Sequence
  chemically synthesized
tgagatacccaggcggtggt

SEQ ID NO: 52159 - DNA, 20 bp, Artificial Sequence
  chemically synthesized
ccaggcggtggttggattta

SEQ ID NO: 52160 - DNA, 20 bp, Artificial Sequence
  chemically synthesized
ggtggttggatttatggatc

SEQ ID NO: 52161 - DNA, 20 bp, Artificial Sequence
  chemically synthesized
ggatttatggatctggattt

SEQ ID NO: 52162 - DNA, 20 bp, Artificial Sequence
  chemically synthesized
gatttatggatctggatttc

SEQ ID NO: 52163 - DNA, 20 bp, Artificial Sequence
  chemically synthesized
atttatggatctggatttca

SEQ ID NO: 52164 - DNA, 20 bp, Artificial Sequence
  chemically synthesized
tttatggatctggatttcag

SEQ ID NO: 52165 - DNA, 20 bp, Artificial Sequence
  chemically synthesized
tatggatctggatttcaggg

SEQ ID NO: 52166 - DNA, 20 bp, Artificial Sequence
  chemically synthesized
ggatctggatttcaggggag

SEQ ID NO: 52167 - DNA, 20 bp, Artificial Sequence
  chemically synthesized
gatctggatttcaggggagt

SEQ ID NO: 52168 - DNA, 20 bp, Artificial Sequence
  chemically synthesized
ctggatttcaggggagtggg

SEQ ID NO: 52169 - DNA, 20 bp, Artificial Sequence
  chemically synthesized
tggatttcaggggagtgggc

SEQ ID NO: 52170 - DNA, 20 bp, Artificial Sequence
  chemically synthesized
ggatttcaggggagtgggca

SEQ ID NO: 52171 - DNA, 20 bp, Artificial Sequence
  chemically synthesized
ttcaggggagtgggcagggc

SEQ ID NO: 52172 - DNA, 20 bp, Artificial Sequence
  chemically synthesized
tcaggggagtgggcagggct

SEQ ID NO: 52173 - DNA, 20 bp, Artificial Sequence
  chemically synthesized
caggggagtgggcagggcta

SEQ ID NO: 52174 - DNA, 20 bp, Artificial Sequence
  chemically synthesized
aggggagtgggcagggctag

SEQ ID NO: 52175 - DNA, 20 bp, Artificial Sequence
  chemically synthesized
agtgggcagggctaggggaa

SEQ ID NO: 52176 - DNA, 20 bp, Artificial Sequence
  chemically synthesized
agggctaggggaatagaact

SEQ ID NO: 52177 - DNA, 20 bp, Artificial Sequence
  chemically synthesized
gggctaggggaatagaactg

SEQ ID NO: 52178 - DNA, 20 bp, Artificial Sequence
  chemically synthesized
ggctaggggaatagaactga

SEQ ID NO: 52179 - DNA, 20 bp, Artificial Sequence
  chemically synthesized
agaactgagggtcatgatgt

SEQ ID NO: 52180 - DNA, 20 bp, Artificial Sequence
  chemically synthesized
actgagggtcatgatgtcag

SEQ ID NO: 52181 - DNA, 20 bp, Artificial Sequence
  chemically synthesized
gagggtcatgatgtcagtgg

SEQ ID NO: 52182 - DNA, 20 bp, Artificial Sequence
  chemically synthesized
agggtcatgatgtcagtggt

SEQ ID NO: 52183 - DNA, 20 bp, Artificial Sequence
  chemically synthesized
ggtcatgatgtcagtggtag

SEQ ID NO: 52184 - DNA, 20 bp, Artificial Sequence
  chemically synthesized
gatgtcagtggtaggagttg

SEQ ID NO: 52185 - DNA, 20 bp, Artificial Sequence
  chemically synthesized
agtggtaggagttgaagtct

SEQ ID NO: 52186 - DNA, 20 bp, Artificial Sequence
  chemically synthesized
ggtaggagttgaagtcttgg

SEQ ID NO: 52187 - DNA, 20 bp, Artificial Sequence
  chemically synthesized
ggagttgaagtcttggaaga

SEQ ID NO: 52188 - DNA, 20 bp, Artificial Sequence
  chemically synthesized
agttgaagtcttggaagaaa

SEQ ID NO: 52189 - DNA, 20 bp, Artificial Sequence
  chemically synthesized
tgaagtcttggaagaaagag

SEQ ID NO: 52190 - DNA, 20 bp, Artificial Sequence
  chemically synthesized
gtcttggaagaaagagtaga

SEQ ID NO: 52191 - DNA, 20 bp, Artificial Sequence
  chemically synthesized
ttttctgatgaacattctat

SEQ ID NO: 52192 - DNA, 20 bp, Artificial Sequence
  chemically synthesized
tttctgatgaacattctatg

SEQ ID NO: 52193 - DNA, 20 bp, Artificial Sequence
  chemically synthesized
ctgatgaacattctatgagg

SEQ ID NO: 52194 - DNA, 20 bp, Artificial Sequence
  chemically synthesized
gaacattctatgaggaagtt

SEQ ID NO: 52195 - DNA, 20 bp, Artificial Sequence
  chemically synthesized
cattctatgaggaagttcag

SEQ ID NO: 52196 - DNA, 20 bp, Artificial Sequence
  chemically synthesized
ttctatgaggaagttcagca

SEQ ID NO: 52197 - DNA, 20 bp, Artificial Sequence
  chemically synthesized
tctatgaggaagttcagcag

SEQ ID NO: 52198 - DNA, 20 bp, Artificial Sequence
  chemically synthesized
tgaggaagttcagcagaggt

SEQ ID NO: 52199 - DNA, 20 bp, Artificial Sequence
  chemically synthesized
cctatcctgctgtcatgttt

SEQ ID NO: 52200 - DNA, 20 bp, Artificial Sequence
  chemically synthesized
tttaagcaacttattatgca

SEQ ID NO: 52201 - DNA, 20 bp, Artificial Sequence
  chemically synthesized
caacttattatgcacagcac

SEQ ID NO: 52202 - DNA, 20 bp, Artificial Sequence
  chemically synthesized
aacttattatgcacagcacc

SEQ ID NO: 52203 - DNA, 20 bp, Artificial Sequence
  chemically synthesized
catcaatgtaaattgcatgc

SEQ ID NO: 52204 - DNA, 20 bp, Artificial Sequence
  chemically synthesized
tgcatgccagtctttgctct

SEQ ID NO: 52205 - DNA, 20 bp, Artificial Sequence
  chemically synthesized
agtctttgctctcagtttca

SEQ ID NO: 52206 - DNA, 20 bp, Artificial Sequence
  chemically synthesized
gtctttgctctcagtttcaa

SEQ ID NO: 52207 - DNA, 20 bp, Artificial Sequence
  chemically synthesized
cctgctgtctaatctttaca

SEQ ID NO: 52208 - DNA, 20 bp, Artificial Sequence
  chemically synthesized
ctgtctaatctttacaaaga

SEQ ID NO: 52209 - DNA, 20 bp, Artificial Sequence
  chemically synthesized
tgtctaatctttacaaagaa

SEQ ID NO: 52210 - DNA, 20 bp, Artificial Sequence
  chemically synthesized
ttacaaagaaaggttaactc

SEQ ID NO: 52211 - DNA, 20 bp, Artificial Sequence
  chemically synthesized
acaaagaaaggttaactcca

SEQ ID NO: 52212 - DNA, 20 bp, Artificial Sequence
  chemically synthesized
caaagaaaggttaactccag

SEQ ID NO: 52213 - DNA, 20 bp, Artificial Sequence
  chemically synthesized
gaaaggttaactccagaggt

SEQ ID NO: 52214 - DNA, 20 bp, Artificial Sequence
  chemically synthesized
aaaggttaactccagaggtc

SEQ ID NO: 52215 - DNA, 20 bp, Artificial Sequence
  chemically synthesized
agaggtcaggaatctgaaca

SEQ ID NO: 52216 - DNA, 20 bp, Artificial Sequence
  chemically synthesized
ggaatctgaacacagaaaac

SEQ ID NO: 52217 - DNA, 20 bp, Artificial Sequence
  chemically synthesized
ttaatgaatatgtcaacaca

SEQ ID NO: 52218 - DNA, 20 bp, Artificial Sequence
  chemically synthesized
atgaaatcacatttacacaa

SEQ ID NO: 52219 - DNA, 20 bp, Artificial Sequence
  chemically synthesized
catttacacaaaagtacaac

SEQ ID NO: 52220 - DNA, 20 bp, Artificial Sequence
  chemically synthesized
atttacacaaaagtacaact

SEQ ID NO: 52221 - DNA, 20 bp, Artificial Sequence
  chemically synthesized
tttacacaaaagtacaactg

SEQ ID NO: 52222 - DNA, 20 bp, Artificial Sequence
  chemically synthesized
cacaaaagtacaactggggt

SEQ ID NO: 52223 - DNA, 20 bp, Artificial Sequence
  chemically synthesized
actggggtaagaaaattcaa

SEQ ID NO: 52224 - DNA, 20 bp, Artificial Sequence
  chemically synthesized
gtaagaaaattcaaaagata

SEQ ID NO: 52225 - DNA, 20 bp, Artificial Sequence
  chemically synthesized
atgaaataccctatgtattt

SEQ ID NO: 52226 - DNA, 20 bp, Artificial Sequence
  chemically synthesized
aataccctatgtatttgagt

SEQ ID NO: 52227 - DNA, 20 bp, Artificial Sequence
  chemically synthesized
atgtatttgagtaagttgct

SEQ ID NO: 52228 - DNA, 20 bp, Artificial Sequence
  chemically synthesized
tgcttagcttctcccaacct

SEQ ID NO: 52229 - DNA, 20 bp, Artificial Sequence
  chemically synthesized
gtttcctcatttctaaaacg

SEQ ID NO: 52230 - DNA, 20 bp, Artificial Sequence
  chemically synthesized
cgaagaacttgcttaatatt

SEQ ID NO: 52231 - DNA, 20 bp, Artificial Sequence
  chemically synthesized
gaagaacttgcttaatattc

SEQ ID NO: 52232 - DNA, 20 bp, Artificial Sequence
  chemically synthesized
cttgcttaatattcaggctc

SEQ ID NO: 52233 - DNA, 20 bp, Artificial Sequence
  chemically synthesized
ttgcttaatattcaggctct

SEQ ID NO: 52234 - DNA, 20 bp, Artificial Sequence
  chemically synthesized
ccaccaaatccttgattcac

SEQ ID NO: 52235 - DNA, 20 bp, Artificial Sequence
  chemically synthesized
aatccttgattcactggctc

SEQ ID NO: 52236 - DNA, 20 bp, Artificial Sequence
  chemically synthesized
atccttgattcactggctct

SEQ ID NO: 52237 - DNA, 20 bp, Artificial Sequence
  chemically synthesized
gctctgggtctgtatgtaac

SEQ ID NO: 52238 - DNA, 20 bp, Artificial Sequence
  chemically synthesized
gtctgtatgtaacaagcttc

SEQ ID NO: 52239 - DNA, 20 bp, Artificial Sequence
  chemically synthesized
ctgtatgtaacaagcttctg

SEQ ID NO: 52240 - DNA, 20 bp, Artificial Sequence
  chemically synthesized
tctggagtgattctaatgat

SEQ ID NO: 52241 - DNA, 20 bp, Artificial Sequence
  chemically synthesized
gagtgattctaatgattagc

SEQ ID NO: 52242 - DNA, 20 bp, Artificial Sequence
  chemically synthesized
gtgattctaatgattagcca

SEQ ID NO: 52243 - DNA, 20 bp, Artificial Sequence
  chemically synthesized
ttctaatgattagccagaga

SEQ ID NO: 52244 - DNA, 20 bp, Artificial Sequence
  chemically synthesized
tctaatgattagccagagac

SEQ ID NO: 52245 - DNA, 20 bp, Artificial Sequence
  chemically synthesized
aaaaattaccacaaatttat

SEQ ID NO: 52246 - DNA, 20 bp, Artificial Sequence
  chemically synthesized
aacacaaatgtattatcttg

SEQ ID NO: 52247 - DNA, 20 bp, Artificial Sequence
  chemically synthesized
aatgtattatcttgaagttg

SEQ ID NO: 52248 - DNA, 20 bp, Artificial Sequence
  chemically synthesized
tgtattatcttgaagttgtg

SEQ ID NO: 52249 - DNA, 20 bp, Artificial Sequence
  chemically synthesized
gtattatcttgaagttgtgg

SEQ ID NO: 52250 - DNA, 20 bp, Artificial Sequence
  chemically synthesized
tatcttgaagttgtggaggt

SEQ ID NO: 52251 - DNA, 20 bp, Artificial Sequence
  chemically synthesized
cttgaagttgtggaggtcag

SEQ ID NO: 52252 - DNA, 20 bp, Artificial Sequence
  chemically synthesized
ggaggtcagaagtctgaaat

SEQ ID NO: 52253 - DNA, 20 bp, Artificial Sequence
  chemically synthesized
aagtctgaaatcggtttcac

SEQ ID NO: 52254 - DNA, 20 bp, Artificial Sequence
  chemically synthesized
agtctgaaatcggtttcact

SEQ ID NO: 52255 - DNA, 20 bp, Artificial Sequence
  chemically synthesized
aaatcggtttcactgggcta

SEQ ID NO: 52256 - DNA, 20 bp, Artificial Sequence
  chemically synthesized
ggtttcactgggctaaagtc

SEQ ID NO: 52257 - DNA, 20 bp, Artificial Sequence
  chemically synthesized
gtttcactgggctaaagtcg

SEQ ID NO: 52258 - DNA, 20 bp, Artificial Sequence
  chemically synthesized
ctgggctaaagtcgaggtgt

SEQ ID NO: 52259 - DNA, 20 bp, Artificial Sequence
  chemically synthesized
ctaaagtcgaggtgtcagtg

SEQ ID NO: 52260 - DNA, 20 bp, Artificial Sequence
  chemically synthesized
gtcagtgtggctgtttcttc

SEQ ID NO: 52261 - DNA, 20 bp, Artificial Sequence
  chemically synthesized
cagtgtggctgtttcttctg

SEQ ID NO: 52262 - DNA, 20 bp, Artificial Sequence
  chemically synthesized
gtttcttctggagactctat

SEQ ID NO: 52263 - DNA, 20 bp, Artificial Sequence
  chemically synthesized
ttcttctggagactctatga

SEQ ID NO: 52264 - DNA, 20 bp, Artificial Sequence
  chemically synthesized
gtgttttcctgccttttcca

SEQ ID NO: 52265 - DNA, 20 bp, Artificial Sequence
  chemically synthesized
atggattctgtttcctcttc

SEQ ID NO: 52266 - DNA, 20 bp, Artificial Sequence
  chemically synthesized
ggattctgtttcctcttcta

SEQ ID NO: 52267 - DNA, 20 bp, Artificial Sequence
  chemically synthesized
gattctgtttcctcttctag

SEQ ID NO: 52268 - DNA, 20 bp, Artificial Sequence
  chemically synthesized
tagaggctacccacattcct

SEQ ID NO: 52269 - DNA, 20 bp, Artificial Sequence
  chemically synthesized
tacccacattccttggtttg

SEQ ID NO: 52270 - DNA, 20 bp, Artificial Sequence
  chemically synthesized
gtcacattttctcctcttat

SEQ ID NO: 52271 - DNA, 20 bp, Artificial Sequence
  chemically synthesized
atgacacttgtgattacatt

SEQ ID NO: 52272 - DNA, 20 bp, Artificial Sequence
  chemically synthesized
tgacacttgtgattacattt

SEQ ID NO: 52273 - DNA, 20 bp, Artificial Sequence
  chemically synthesized
ttaggatacacccaaataat

SEQ ID NO: 52274 - DNA, 20 bp, Artificial Sequence
  chemically synthesized
taggatacacccaaataatt

SEQ ID NO: 52275 - DNA, 20 bp, Artificial Sequence
  chemically synthesized
ttaggatatctccccatccc

SEQ ID NO: 52276 - DNA, 20 bp, Artificial Sequence
  chemically synthesized
atccttaattatatatgcaa

SEQ ID NO: 52277 - DNA, 20 bp, Artificial Sequence
  chemically synthesized
tatatatgcaaaagtctgtt

SEQ ID NO: 52278 - DNA, 20 bp, Artificial Sequence
  chemically synthesized
tatgcaaaagtctgtttggc

SEQ ID NO: 52279 - DNA, 20 bp, Artificial Sequence
  chemically synthesized
aaaagtctgtttggctagaa

SEQ ID NO: 52280 - DNA, 20 bp, Artificial Sequence
  chemically synthesized
gctagaaaagataatactca

SEQ ID NO: 52281 - DNA, 20 bp, Artificial Sequence
  chemically synthesized
ctagaaaagataatactcac

SEQ ID NO: 52282 - DNA, 20 bp, Artificial Sequence
  chemically synthesized
aagataatactcacaggttt

SEQ ID NO: 52283 - DNA, 20 bp, Artificial Sequence
  chemically synthesized
agataatactcacaggtttc

SEQ ID NO: 52284 - DNA, 20 bp, Artificial Sequence
  chemically synthesized
gataatactcacaggtttca

SEQ ID NO: 52285 - DNA, 20 bp, Artificial Sequence
  chemically synthesized
ataatactcacaggtttcag

SEQ ID NO: 52286 - DNA, 20 bp, Artificial Sequence
  chemically synthesized
actcacaggtttcaggggtt

SEQ ID NO: 52287 - DNA, 20 bp, Artificial Sequence
  chemically synthesized
gttaagccatacatatcttt

SEQ ID NO: 52288 - DNA, 20 bp, Artificial Sequence
  chemically synthesized
taagccatacatatctttca

SEQ ID NO: 52289 - DNA, 20 bp, Artificial Sequence
  chemically synthesized
ccatacatatctttcagagt

SEQ ID NO: 52290 - DNA, 20 bp, Artificial Sequence
  chemically synthesized
tatctttcagagtgagccat

SEQ ID NO: 52291 - DNA, 20 bp, Artificial Sequence
  chemically synthesized
gtgagccattagccattatt

SEQ ID NO: 52292 - DNA, 20 bp, Artificial Sequence
  chemically synthesized
agcctactgcgataatgtgc

SEQ ID NO: 52293 - DNA, 20 bp, Artificial Sequence
  chemically synthesized
ctatgttctatgttcccatc

SEQ ID NO: 52294 - DNA, 20 bp, Artificial Sequence
  chemically synthesized
tatgttctatgttcccatca

SEQ ID NO: 52295 - DNA, 20 bp, Artificial Sequence
  chemically synthesized
atgttcccatcaaggttaat

SEQ ID NO: 52296 - DNA, 20 bp, Artificial Sequence
  chemically synthesized
tcaaggttaattagaaatat

SEQ ID NO: 52297 - DNA, 20 bp, Artificial Sequence
  chemically synthesized
aatattagactctttttcca

SEQ ID NO: 52298 - DNA, 20 bp, Artificial Sequence
  chemically synthesized
ttccacagaaaaaaaaaatg

SEQ ID NO: 52299 - DNA, 20 bp, Artificial Sequence
  chemically synthesized
cacagaaaaaaaaaatgtag

SEQ ID NO: 52300 - DNA, 20 bp, Artificial Sequence
  chemically synthesized
agaaaaaaaaaatgtagcag

SEQ ID NO: 52301 - DNA, 20 bp, Artificial Sequence
  chemically synthesized
ctctctctttccttcatgcc

SEQ ID NO: 52302 - DNA, 20 bp, Artificial Sequence
  chemically synthesized
ctctttccttcatgcccagt

SEQ ID NO: 52303 - DNA, 20 bp, Artificial Sequence
  chemically synthesized
ctttccttcatgcccagtaa

SEQ ID NO: 52304 - DNA, 20 bp, Artificial Sequence
  chemically synthesized
tttccttcatgcccagtaag

SEQ ID NO: 52305 - DNA, 20 bp, Artificial Sequence
  chemically synthesized
ccttcatgcccagtaagagg

SEQ ID NO: 52306 - DNA, 20 bp, Artificial Sequence
  chemically synthesized
catgcccagtaagaggaagt

SEQ ID NO: 52307 - DNA, 20 bp, Artificial Sequence
  chemically synthesized
atgcccagtaagaggaagtg

SEQ ID NO: 52308 - DNA, 20 bp, Artificial Sequence
  chemically synthesized
gcaccatctgttcatctcat

SEQ ID NO: 52309 - DNA, 20 bp, Artificial Sequence
  chemically synthesized
caccatctgttcatctcatc

SEQ ID NO: 52310 - DNA, 20 bp, Artificial Sequence
  chemically synthesized
tcatctcatcaggtgttacc

SEQ ID NO: 52311 - DNA, 20 bp, Artificial Sequence
  chemically synthesized
catcaggtgttacctagaat

SEQ ID NO: 52312 - DNA, 20 bp, Artificial Sequence
  chemically synthesized
tcaggtgttacctagaatca

SEQ ID NO: 52313 - DNA, 20 bp, Artificial Sequence
  chemically synthesized
gtgttacctagaatcagagt

SEQ ID NO: 52314 - DNA, 20 bp, Artificial Sequence
  chemically synthesized
tgttacctagaatcagagtc

SEQ ID NO: 52315 - DNA, 20 bp, Artificial Sequence
  chemically synthesized
ttacctagaatcagagtcag

SEQ ID NO: 52316 - DNA, 20 bp, Artificial Sequence
  chemically synthesized
ctagaatcagagtcaggaga

SEQ ID NO: 52317 - DNA, 20 bp, Artificial Sequence
  chemically synthesized
cctcataaaactactctgac

SEQ ID NO: 52318 - DNA, 20 bp, Artificial Sequence
  chemically synthesized
ctgacaagtaaaccatatcc

SEQ ID NO: 52319 - DNA, 20 bp, Artificial Sequence
  chemically synthesized
tgacaagtaaaccatatcct

SEQ ID NO: 52320 - DNA, 20 bp, Artificial Sequence
  chemically synthesized
gacaagtaaaccatatcctg

SEQ ID NO: 52321 - DNA, 20 bp, Artificial Sequence
  chemically synthesized
gtaaaccatatcctggggac

SEQ ID NO: 52322 - DNA, 20 bp, Artificial Sequence
  chemically synthesized
taaaccatatcctggggacc

SEQ ID NO: 52323 - DNA, 20 bp, Artificial Sequence
  chemically synthesized
ccatatcctggggaccaggt

SEQ ID NO: 52324 - DNA, 20 bp, Artificial Sequence
  chemically synthesized
gggaccaggtgagaattaaa

SEQ ID NO: 52325 - DNA, 20 bp, Artificial Sequence
  chemically synthesized
ttaaaaagctgtatactcat

SEQ ID NO: 52326 - DNA, 20 bp, Artificial Sequence
  chemically synthesized
tgtatactcataagctgcca

SEQ ID NO: 52327 - DNA, 20 bp, Artificial Sequence
  chemically synthesized
tatactcataagctgccaaa

SEQ ID NO: 52328 - DNA, 20 bp, Artificial Sequence
  chemically synthesized
ataagctgccaaagagctga

SEQ ID NO: 52329 - DNA, 20 bp, Artificial Sequence
  chemically synthesized
ccaaagagctgatggtactg

SEQ ID NO: 52330 - DNA, 20 bp, Artificial Sequence
  chemically synthesized
ctgatggtactgaagtcaca

SEQ ID NO: 52331 - DNA, 20 bp, Artificial Sequence
  chemically synthesized
gatggtactgaagtcacatg

SEQ ID NO: 52332 - DNA, 20 bp, Artificial Sequence
  chemically synthesized
tactgaagtcacatggagct

SEQ ID NO: 52333 - DNA, 20 bp, Artificial Sequence
  chemically synthesized
actgaagtcacatggagctc

SEQ ID NO: 52334 - DNA, 20 bp, Artificial Sequence
  chemically synthesized
caggaatttattcttgcatt

SEQ ID NO: 52335 - DNA, 20 bp, Artificial Sequence
  chemically synthesized
aatttattcttgcatttaga

SEQ ID NO: 52336 - DNA, 20 bp, Artificial Sequence
  chemically synthesized
atgcatataattctctcgaa

SEQ ID NO: 52337 - DNA, 20 bp, Artificial Sequence
  chemically synthesized
atgaaatcatatttttctgt

SEQ ID NO: 52338 - DNA, 20 bp, Artificial Sequence
  chemically synthesized
ttctgtcggatcaaattatt

SEQ ID NO: 52339 - DNA, 20 bp, Artificial Sequence
  chemically synthesized
ttattcagaaatccgaactg

SEQ ID NO: 52340 - DNA, 20 bp, Artificial Sequence
  chemically synthesized
caaacacacttgcttaatgt

SEQ ID NO: 52341 - DNA, 20 bp, Artificial Sequence
  chemically synthesized
tttaatcttatttttgtaca

SEQ ID NO: 52342 - DNA, 20 bp, Artificial Sequence
  chemically synthesized
gtacacagtatacttttaca

SEQ ID NO: 52343 - DNA, 20 bp, Artificial Sequence
  chemically synthesized
tacacagtatacttttacat

SEQ ID NO: 52344 - DNA, 20 bp, Artificial Sequence
  chemically synthesized
cttttacataggcactgaac

SEQ ID NO: 52345 - DNA, 20 bp, Artificial Sequence
  chemically synthesized
tacataggcactgaaccagc

SEQ ID NO: 52346 - DNA, 20 bp, Artificial Sequence
  chemically synthesized
accagctggaaatgaatgct

SEQ ID NO: 52347 - DNA, 20 bp, Artificial Sequence
  chemically synthesized
aatgaatgcttggattttcg

SEQ ID NO: 52348 - DNA, 20 bp, Artificial Sequence
  chemically synthesized
tggattttcgcagctgataa

SEQ ID NO: 52349 - DNA, 20 bp, Artificial Sequence
  chemically synthesized
attttcgcagctgataaaag

SEQ ID NO: 52350 - DNA, 20 bp, Artificial Sequence
  chemically synthesized
tttcgcagctgataaaagca

SEQ ID NO: 52351 - DNA, 20 bp, Artificial Sequence
  chemically synthesized
cagctgataaaagcagagtt

SEQ ID NO: 52352 - DNA, 20 bp, Artificial Sequence
  chemically synthesized
agagttcagattctgtcctt

SEQ ID NO: 52353 - DNA, 20 bp, Artificial Sequence
  chemically synthesized
ctgtccttgagctcaatgtc

SEQ ID NO: 52354 - DNA, 20 bp, Artificial Sequence
  chemically synthesized
gtccttgagctcaatgtctg

SEQ ID NO: 52355 - DNA, 20 bp, Artificial Sequence
  chemically synthesized
ttgagctcaatgtctggaga

SEQ ID NO: 52356 - DNA, 20 bp, Artificial Sequence
  chemically synthesized
agctcaatgtctggagaaag

SEQ ID NO: 52357 - DNA, 20 bp, Artificial Sequence
  chemically synthesized
tgaatactgcttccttaatt

SEQ ID NO: 52358 - DNA, 20 bp, Artificial Sequence
  chemically synthesized
ttccttaattcagatgcctt

SEQ ID NO: 52359 - DNA, 20 bp, Artificial Sequence
  chemically synthesized
attcagatgcctttggccgt

SEQ ID NO: 52360 - DNA, 20 bp, Artificial Sequence
  chemically synthesized
ttcagatgcctttggccgtg

SEQ ID NO: 52361 - DNA, 20 bp, Artificial Sequence
  chemically synthesized
tcagatgcctttggccgtga

SEQ ID NO: 52362 - DNA, 20 bp, Artificial Sequence
  chemically synthesized
cagatgcctttggccgtgag

SEQ ID NO: 52363 - DNA, 20 bp, Artificial Sequence
  chemically synthesized
gcctttggccgtgaggggca

SEQ ID NO: 52364 - DNA, 20 bp, Artificial Sequence
  chemically synthesized
gtgaggggcatggcatttta

SEQ ID NO: 52365 - DNA, 20 bp, Artificial Sequence
  chemically synthesized
aaactctgtactttttctct

SEQ ID NO: 52366 - DNA, 20 bp, Artificial Sequence
  chemically synthesized
aactctgtactttttctctc

SEQ ID NO: 52367 - DNA, 20 bp, Artificial Sequence
  chemically synthesized
actctgtactttttctctca

SEQ ID NO: 52368 - DNA, 20 bp, Artificial Sequence
  chemically synthesized
ctctgtactttttctctcag

SEQ ID NO: 52369 - DNA, 20 bp, Artificial Sequence
  chemically synthesized
tactttttctctcaggggat

SEQ ID NO: 52370 - DNA, 20 bp, Artificial Sequence
  chemically synthesized
agaaaaaccaattgatttga

SEQ ID NO: 52371 - DNA, 20 bp, Artificial Sequence
  chemically synthesized
caattgatttgatagtgact

SEQ ID NO: 52372 - DNA, 20 bp, Artificial Sequence
  chemically synthesized
ttgatttgatagtgactcag

SEQ ID NO: 52373 - DNA, 20 bp, Artificial Sequence
  chemically synthesized
gcagttttcaccttcctctt

SEQ ID NO: 52374 - DNA, 20 bp, Artificial Sequence
  chemically synthesized
cctctttagccaatgccctg

SEQ ID NO: 52375 - DNA, 20 bp, Artificial Sequence
  chemically synthesized
ttagccaatgccctgcagct

SEQ ID NO: 52376 - DNA, 20 bp, Artificial Sequence
  chemically synthesized
aatgccctgcagctaagatt

SEQ ID NO: 52377 - DNA, 20 bp, Artificial Sequence
  chemically synthesized
ctgcagctaagattgagaaa

SEQ ID NO: 52378 - DNA, 20 bp, Artificial Sequence
  chemically synthesized
ctaagattgagaaacggatt

SEQ ID NO: 52379 - DNA, 20 bp, Artificial Sequence
  chemically synthesized
gattcagaactcacacctct

SEQ ID NO: 52380 - DNA, 20 bp, Artificial Sequence
  chemically synthesized
aactcacacctcttggtgct

SEQ ID NO: 52381 - DNA, 20 bp, Artificial Sequence
  chemically synthesized
tcacacctcttggtgcttgg

SEQ ID NO: 52382 - DNA, 20 bp, Artificial Sequence
  chemically synthesized
gtggctcccttccaaaccat

SEQ ID NO: 52383 - DNA, 20 bp, Artificial Sequence
  chemically synthesized
actttctttcctatttttta

SEQ ID NO: 52384 - DNA, 20 bp, Artificial Sequence
  chemically synthesized
ctttcctattttttaaagca

SEQ ID NO: 52385 - DNA, 20 bp, Artificial Sequence
  chemically synthesized
tttaaagcacagtctgaatc

SEQ ID NO: 52386 - DNA, 20 bp, Artificial Sequence
  chemically synthesized
acagtctgaatcaagtgctt

SEQ ID NO: 52387 - DNA, 20 bp, Artificial Sequence
  chemically synthesized
ataaccctgaaccctcttct

SEQ ID NO: 52388 - DNA, 20 bp, Artificial Sequence
  chemically synthesized
taaccctgaaccctcttcta

SEQ ID NO: 52389 - DNA, 20 bp, Artificial Sequence
  chemically synthesized
gaaccctcttctaaggccac

SEQ ID NO: 52390 - DNA, 20 bp, Artificial Sequence
  chemically synthesized
ttctaaggccaccagttaca

SEQ ID NO: 52391 - DNA, 20 bp, Artificial Sequence
  chemically synthesized
aggccaccagttacaaagaa

SEQ ID NO: 52392 - DNA, 20 bp, Artificial Sequence
  chemically synthesized
ggccaccagttacaaagaat

SEQ ID NO: 52393 - DNA, 20 bp, Artificial Sequence
  chemically synthesized
gccaccagttacaaagaatg

SEQ ID NO: 52394 - DNA, 20 bp, Artificial Sequence
  chemically synthesized
accagttacaaagaatgggg

SEQ ID NO: 52395 - DNA, 20 bp, Artificial Sequence
  chemically synthesized
ccagttacaaagaatgggga

SEQ ID NO: 52396 - DNA, 20 bp, Artificial Sequence
  chemically synthesized
aaagaatggggaaggttaat

SEQ ID NO: 52397 - DNA, 20 bp, Artificial Sequence
  chemically synthesized
aggttaatgagtaactccac

SEQ ID NO: 52398 - DNA, 20 bp, Artificial Sequence
  chemically synthesized
gtaactccaccagtgcctgc

SEQ ID NO: 52399 - DNA, 20 bp, Artificial Sequence
  chemically synthesized
ctccaccagtgcctgccaga

SEQ ID NO: 52400 - DNA, 20 bp, Artificial Sequence
  chemically synthesized
ccagtgcctgccagaaagct

SEQ ID NO: 52401 - DNA, 20 bp, Artificial Sequence
  chemically synthesized
cagaaagctcagctgtactc

SEQ ID NO: 52402 - DNA, 20 bp, Artificial Sequence
  chemically synthesized
cagccttccttcctctcttg

SEQ ID NO: 52403 - DNA, 20 bp, Artificial Sequence
  chemically synthesized
gccttccttcctctcttgca

SEQ ID NO: 52404 - DNA, 20 bp, Artificial Sequence
  chemically synthesized
cttccttcctctcttgcaga

SEQ ID NO: 52405 - DNA, 20 bp, Artificial Sequence
  chemically synthesized
tcttgcagagagaaacaatg

SEQ ID NO: 52406 - DNA, 20 bp, Artificial Sequence
  chemically synthesized
tgcagagagaaacaatgcgg

SEQ ID NO: 52407 - DNA, 20 bp, Artificial Sequence
  chemically synthesized
aacaatgcggcagttgaaca

SEQ ID NO: 52408 - DNA, 20 bp, Artificial Sequence
  chemically synthesized
tgcggcagttgaacaaagcg

SEQ ID NO: 52409 - DNA, 20 bp, Artificial Sequence
  chemically synthesized
gcggcagttgaacaaagcga

SEQ ID NO: 52410 - DNA, 20 bp, Artificial Sequence
  chemically synthesized
agcgaaggcactgtaatgcc

SEQ ID NO: 52411 - DNA, 20 bp, Artificial Sequence
  chemically synthesized
gaaggcactgtaatgcccag

SEQ ID NO: 52412 - DNA, 20 bp, Artificial Sequence
  chemically synthesized
actgtaatgcccagtggctt

SEQ ID NO: 52413 - DNA, 20 bp, Artificial Sequence
  chemically synthesized
atgcccagtggcttcagtca

SEQ ID NO: 52414 - DNA, 20 bp, Artificial Sequence
  chemically synthesized
tgcccagtggcttcagtcac

SEQ ID NO: 52415 - DNA, 20 bp, Artificial Sequence
  chemically synthesized
cagtggcttcagtcacaggc

SEQ ID NO: 52416 - DNA, 20 bp, Artificial Sequence
  chemically synthesized
tggtctaaaattccatttca

SEQ ID NO: 52417 - DNA, 20 bp, Artificial Sequence
  chemically synthesized
aattccatttcacagaattg

SEQ ID NO: 52418 - DNA, 20 bp, Artificial Sequence
  chemically synthesized
tcacagaattgaagataatt

SEQ ID NO: 52419 - DNA, 20 bp, Artificial Sequence
  chemically synthesized
cacagaattgaagataattt

SEQ ID NO: 52420 - DNA, 20 bp, Artificial Sequence
  chemically synthesized
acagaattgaagataatttg

SEQ ID NO: 52421 - DNA, 20 bp, Artificial Sequence
  chemically synthesized
ttggggttattaccaattct

SEQ ID NO: 52422 - DNA, 20 bp, Artificial Sequence
  chemically synthesized
gggttattaccaattctcag

SEQ ID NO: 52423 - DNA, 20 bp, Artificial Sequence
  chemically synthesized
ctcaaattcaatcccgttga

SEQ ID NO: 52424 - DNA, 20 bp, Artificial Sequence
  chemically synthesized
aattcaatcccgttgatggt

SEQ ID NO: 52425 - DNA, 20 bp, Artificial Sequence
  chemically synthesized
aatcccgttgatggtgagca

SEQ ID NO: 52426 - DNA, 20 bp, Artificial Sequence
  chemically synthesized
atcccgttgatggtgagcat

SEQ ID NO: 52427 - DNA, 20 bp, Artificial Sequence
  chemically synthesized
tcccgttgatggtgagcatg

SEQ ID NO: 52428 - DNA, 20 bp, Artificial Sequence
  chemically synthesized
gtgagcatggggttcatttt

SEQ ID NO: 52429 - DNA, 20 bp, Artificial Sequence
  chemically synthesized
gagcatggggttcattttga

SEQ ID NO: 52430 - DNA, 20 bp, Artificial Sequence
  chemically synthesized
catggggttcattttgagag

SEQ ID NO: 52431 - DNA, 20 bp, Artificial Sequence
  chemically synthesized
tcattttgagagtagaaaat

SEQ ID NO: 52432 - DNA, 20 bp, Artificial Sequence
  chemically synthesized
tgagagtagaaaattggatg

SEQ ID NO: 52433 - DNA, 20 bp, Artificial Sequence
  chemically synthesized
gagtagaaaattggatgcag

SEQ ID NO: 52434 - DNA, 20 bp, Artificial Sequence
  chemically synthesized
gtagaaaattggatgcagtg

SEQ ID NO: 52435 - DNA, 20 bp, Artificial Sequence
  chemically synthesized
aattggatgcagtggagaat

SEQ ID NO: 52436 - DNA, 20 bp, Artificial Sequence
  chemically synthesized
gcagtggagaatcagaatgt

SEQ ID NO: 52437 - DNA, 20 bp, Artificial Sequence
  chemically synthesized
tggagaatcagaatgttgga

SEQ ID NO: 52438 - DNA, 20 bp, Artificial Sequence
  chemically synthesized
tggtctctgccatttcccca

SEQ ID NO: 52439 - DNA, 20 bp, Artificial Sequence
  chemically synthesized
tgctgctgcttttaacaaat

SEQ ID NO: 52440 - DNA, 20 bp, Artificial Sequence
  chemically synthesized
taacaaatcagtatacaact

SEQ ID NO: 52441 - DNA, 20 bp, Artificial Sequence
  chemically synthesized
tttcaaatatacaaaatatt

SEQ ID NO: 52442 - DNA, 20 bp, Artificial Sequence
  chemically synthesized
tatacaaaatattgagtctg

SEQ ID NO: 52443 - DNA, 20 bp, Artificial Sequence
  chemically synthesized
atacaaaatattgagtctga

SEQ ID NO: 52444 - DNA, 20 bp, Artificial Sequence
  chemically synthesized
atattgagtctgaaggcaaa

SEQ ID NO: 52445 - DNA, 20 bp, Artificial Sequence
  chemically synthesized
ttttcacttccattgcttcc

SEQ ID NO: 52446 - DNA, 20 bp, Artificial Sequence
  chemically synthesized
tttcacttccattgcttcct

SEQ ID NO: 52447 - DNA, 20 bp, Artificial Sequence
  chemically synthesized
tctgatatttcttccaaata

SEQ ID NO: 52448 - DNA, 20 bp, Artificial Sequence
  chemically synthesized
ttccaaatacagactgttgt

SEQ ID NO: 52449 - DNA, 20 bp, Artificial Sequence
  chemically synthesized
ctgatcatcactcacacatc

SEQ ID NO: 52450 - DNA, 20 bp, Artificial Sequence
  chemically synthesized
tgatcatcactcacacatcc

SEQ ID NO: 52451 - DNA, 20 bp, Artificial Sequence
  chemically synthesized
tgttacatctccacgccact

SEQ ID NO: 52452 - DNA, 20 bp, Artificial Sequence
  chemically synthesized
atctccacgccactgagtat

SEQ ID NO: 52453 - DNA, 20 bp, Artificial Sequence
  chemically synthesized
tctccacgccactgagtatc

SEQ ID NO: 52454 - DNA, 20 bp, Artificial Sequence
  chemically synthesized
ctccacgccactgagtatca

SEQ ID NO: 52455 - DNA, 20 bp, Artificial Sequence
  chemically synthesized
aacctgccccaatattcacg

SEQ ID NO: 52456 - DNA, 20 bp, Artificial Sequence
  chemically synthesized
acctgccccaatattcacgt

SEQ ID NO: 52457 - DNA, 20 bp, Artificial Sequence
  chemically synthesized
ggttcttttctattttccct

SEQ ID NO: 52458 - DNA, 20 bp, Artificial Sequence
  chemically synthesized
tttctattttccctaagcgt

SEQ ID NO: 52459 - DNA, 20 bp, Artificial Sequence
  chemically synthesized
ccctaagcgtcggccaactt

SEQ ID NO: 52460 - DNA, 20 bp, Artificial Sequence
  chemically synthesized
gtcggccaactttagaaata

SEQ ID NO: 52461 - DNA, 20 bp, Artificial Sequence
  chemically synthesized
tcggccaactttagaaataa

SEQ ID NO: 52462 - DNA, 20 bp, Artificial Sequence
  chemically synthesized
cggccaactttagaaataaa

SEQ ID NO: 52463 - DNA, 20 bp, Artificial Sequence
  chemically synthesized
caactttagaaataaaggga

SEQ ID NO: 52464 - DNA, 20 bp, Artificial Sequence
  chemically synthesized
actttagaaataaagggaca

SEQ ID NO: 52465 - DNA, 20 bp, Artificial Sequence
  chemically synthesized
aataaagggacagagtacaa

SEQ ID NO: 52466 - DNA, 20 bp, Artificial Sequence
  chemically synthesized
taaagggacagagtacaaaa

SEQ ID NO: 52467 - DNA, 20 bp, Artificial Sequence
  chemically synthesized
aagggacagagtacaaaaga

SEQ ID NO: 52468 - DNA, 20 bp, Artificial Sequence
  chemically synthesized
tacaaaagagagaaatttta

SEQ ID NO: 52469 - DNA, 20 bp, Artificial Sequence
  chemically synthesized
aaagagagaaattttaaagc

SEQ ID NO: 52470 - DNA, 20 bp, Artificial Sequence
  chemically synthesized
aagagagaaattttaaagcc

SEQ ID NO: 52471 - DNA, 20 bp, Artificial Sequence
  chemically synthesized
aaattttaaagccgggcatc

SEQ ID NO: 52472 - DNA, 20 bp, Artificial Sequence
  chemically synthesized
aattttaaagccgggcatcc

SEQ ID NO: 52473 - DNA, 20 bp, Artificial Sequence
  chemically synthesized
attttaaagccgggcatccg

SEQ ID NO: 52474 - DNA, 20 bp, Artificial Sequence
  chemically synthesized
ttttaaagccgggcatccgg

SEQ ID NO: 52475 - DNA, 20 bp, Artificial Sequence
  chemically synthesized
ttaaagccgggcatccgggg

SEQ ID NO: 52476 - DNA, 20 bp, Artificial Sequence
  chemically synthesized
taaagccgggcatccggggg

SEQ ID NO: 52477 - DNA, 20 bp, Artificial Sequence
  chemically synthesized
ccgggggaggcatcacattt

SEQ ID NO: 52478 - DNA, 20 bp, Artificial Sequence
  chemically synthesized
ggggaggcatcacatttcgg

SEQ ID NO: 52479 - DNA, 20 bp, Artificial Sequence
  chemically synthesized
gggaggcatcacatttcggt

SEQ ID NO: 52480 - DNA, 20 bp, Artificial Sequence
  chemically synthesized
taggttccgtgatgccccac

SEQ ID NO: 52481 - DNA, 20 bp, Artificial Sequence
  chemically synthesized
gccccacaagccacaaaaac

SEQ ID NO: 52482 - DNA, 20 bp, Artificial Sequence
  chemically synthesized
cacaagccacaaaaaccagc

SEQ ID NO: 52483 - DNA, 20 bp, Artificial Sequence
  chemically synthesized
aaaaaccagcaagtttgtat

SEQ ID NO: 52484 - DNA, 20 bp, Artificial Sequence
  chemically synthesized
aaaaccagcaagtttgtatt

SEQ ID NO: 52485 - DNA, 20 bp, Artificial Sequence
  chemically synthesized
aaaccagcaagtttgtatta

SEQ ID NO: 52486 - DNA, 20 bp, Artificial Sequence
  chemically synthesized
ttgtattagggattttcaaa

SEQ ID NO: 52487 - DNA, 20 bp, Artificial Sequence
  chemically synthesized
tgtattagggattttcaaat

SEQ ID NO: 52488 - DNA, 20 bp, Artificial Sequence
  chemically synthesized
gtattagggattttcaaatg

SEQ ID NO: 52489 - DNA, 20 bp, Artificial Sequence
  chemically synthesized
attagggattttcaaatggg

SEQ ID NO: 52490 - DNA, 20 bp, Artificial Sequence
  chemically synthesized
ttagggattttcaaatgggg

SEQ ID NO: 52491 - DNA, 20 bp, Artificial Sequence
  chemically synthesized
gggattttcaaatggggagg

SEQ ID NO: 52492 - DNA, 20 bp, Artificial Sequence
  chemically synthesized
atggggaggcagtgtgcaaa

SEQ ID NO: 52493 - DNA, 20 bp, Artificial Sequence
  chemically synthesized
tggggaggcagtgtgcaaat

SEQ ID NO: 52494 - DNA, 20 bp, Artificial Sequence
  chemically synthesized
aggcagtgtgcaaataggtg

SEQ ID NO: 52495 - DNA, 20 bp, Artificial Sequence
  chemically synthesized
ggcagtgtgcaaataggtgt

SEQ ID NO: 52496 - DNA, 20 bp, Artificial Sequence
  chemically synthesized
gtgcaaataggtgtgggtca

SEQ ID NO: 52497 - DNA, 20 bp, Artificial Sequence
  chemically synthesized
aggtgtgggtcacagacatc

SEQ ID NO: 52498 - DNA, 20 bp, Artificial Sequence
  chemically synthesized
acagacatcaagtactttac

SEQ ID NO: 52499 - DNA, 20 bp, Artificial Sequence
  chemically synthesized
cagacatcaagtactttaca

SEQ ID NO: 52500 - DNA, 20 bp, Artificial Sequence
  chemically synthesized
tcaagtactttacaaggtaa

SEQ ID NO: 52501 - DNA, 20 bp, Artificial Sequence
  chemically synthesized
acaaggtaatagaatatcac

SEQ ID NO: 52502 - DNA, 20 bp, Artificial Sequence
  chemically synthesized
caaggtaatagaatatcaca

SEQ ID NO: 52503 - DNA, 20 bp, Artificial Sequence
  chemically synthesized
gtaatagaatatcacaaggc

SEQ ID NO: 52504 - DNA, 20 bp, Artificial Sequence
  chemically synthesized
atagaatatcacaaggcaag

SEQ ID NO: 52505 - DNA, 20 bp, Artificial Sequence
  chemically synthesized
agaatatcacaaggcaagtg

SEQ ID NO: 52506 - DNA, 20 bp, Artificial Sequence
  chemically synthesized
gaatatcacaaggcaagtgg

SEQ ID NO: 52507 - DNA, 20 bp, Artificial Sequence
  chemically synthesized
tatcacaaggcaagtggagg

SEQ ID NO: 52508 - DNA, 20 bp, Artificial Sequence
  chemically synthesized
atcacaaggcaagtggaggc

SEQ ID NO: 52509 - DNA, 20 bp, Artificial Sequence
  chemically synthesized
tcacaaggcaagtggaggca

SEQ ID NO: 52510 - DNA, 20 bp, Artificial Sequence
  chemically synthesized
aaggcaagtggaggcagggt

SEQ ID NO: 52511 - DNA, 20 bp, Artificial Sequence
  chemically synthesized
gtggaggcagggtgagatca

SEQ ID NO: 52512 - DNA, 20 bp, Artificial Sequence
  chemically synthesized
tggaggcagggtgagatcac

SEQ ID NO: 52513 - DNA, 20 bp, Artificial Sequence
  chemically synthesized
agggtgagatcacaggacca

SEQ ID NO: 52514 - DNA, 20 bp, Artificial Sequence
  chemically synthesized
gggtgagatcacaggaccac

SEQ ID NO: 52515 - DNA, 20 bp, Artificial Sequence
  chemically synthesized
gatcacaggaccacaggacc

SEQ ID NO: 52516 - DNA, 20 bp, Artificial Sequence
  chemically synthesized
atcacaggaccacaggaccg

SEQ ID NO: 52517 - DNA, 20 bp, Artificial Sequence
  chemically synthesized
cgaaattaaaattgctaatg

SEQ ID NO: 52518 - DNA, 20 bp, Artificial Sequence
  chemically synthesized
taaaattgctaatgaagttt

SEQ ID NO: 52519 - DNA, 20 bp, Artificial Sequence
  chemically synthesized
aaaattgctaatgaagtttc

SEQ ID NO: 52520 - DNA, 20 bp, Artificial Sequence
  chemically synthesized
tgtcattgataacatcttat

SEQ ID NO: 52521 - DNA, 20 bp, Artificial Sequence
  chemically synthesized
gtcattgataacatcttatc

SEQ ID NO: 52522 - DNA, 20 bp, Artificial Sequence
  chemically synthesized
cattgataacatcttatcag

SEQ ID NO: 52523 - DNA, 20 bp, Artificial Sequence
  chemically synthesized
gataacatcttatcaggaga

SEQ ID NO: 52524 - DNA, 20 bp, Artificial Sequence
  chemically synthesized
ataacatcttatcaggagac

SEQ ID NO: 52525 - DNA, 20 bp, Artificial Sequence
  chemically synthesized
taacatcttatcaggagaca

SEQ ID NO: 52526 - DNA, 20 bp, Artificial Sequence
  chemically synthesized
ttatcaggagacagggtttt

SEQ ID NO: 52527 - DNA, 20 bp, Artificial Sequence
  chemically synthesized
tatcaggagacagggttttt

SEQ ID NO: 52528 - DNA, 20 bp, Artificial Sequence
  chemically synthesized
acagggtttttaggatcaac

SEQ ID NO: 52529 - DNA, 20 bp, Artificial Sequence
  chemically synthesized
ctggtctgaccaaaatttat

SEQ ID NO: 52530 - DNA, 20 bp, Artificial Sequence
  chemically synthesized
tggtctgaccaaaatttatt

SEQ ID NO: 52531 - DNA, 20 bp, Artificial Sequence
  chemically synthesized
tctgaccaaaatttattagg

SEQ ID NO: 52532 - DNA, 20 bp, Artificial Sequence
  chemically synthesized
ctgaccaaaatttattaggc

SEQ ID NO: 52533 - DNA, 20 bp, Artificial Sequence
  chemically synthesized
gggaatttcctcttcctaat

SEQ ID NO: 52534 - DNA, 20 bp, Artificial Sequence
  chemically synthesized
tttcctcttcctaataagcc

SEQ ID NO: 52535 - DNA, 20 bp, Artificial Sequence
  chemically synthesized
ttcctcttcctaataagcct

SEQ ID NO: 52536 - DNA, 20 bp, Artificial Sequence
  chemically synthesized
cctcttcctaataagcctgg

SEQ ID NO: 52537 - DNA, 20 bp, Artificial Sequence
  chemically synthesized
taataagcctgggagcgctg

SEQ ID NO: 52538 - DNA, 20 bp, Artificial Sequence
  chemically synthesized
aataagcctgggagcgctgt

SEQ ID NO: 52539 - DNA, 20 bp, Artificial Sequence
  chemically synthesized
taagcctgggagcgctgtgg

SEQ ID NO: 52540 - DNA, 20 bp, Artificial Sequence
  chemically synthesized
ctgggagcgctgtgggagac

SEQ ID NO: 52541 - DNA, 20 bp, Artificial Sequence
  chemically synthesized
tgggagcgctgtgggagact

SEQ ID NO: 52542 - DNA, 20 bp, Artificial Sequence
  chemically synthesized
gggagcgctgtgggagactg

SEQ ID NO: 52543 - DNA, 20 bp, Artificial Sequence
  chemically synthesized
tggggtctatttcacccctg

SEQ ID NO: 52544 - DNA, 20 bp, Artificial Sequence
  chemically synthesized
acccctgcagtctcgaccat

SEQ ID NO: 52545 - DNA, 20 bp, Artificial Sequence
  chemically synthesized
ccctgcagtctcgaccataa

SEQ ID NO: 52546 - DNA, 20 bp, Artificial Sequence
  chemically synthesized
gcagtctcgaccataagaga

SEQ ID NO: 52547 - DNA, 20 bp, Artificial Sequence
  chemically synthesized
cagtctcgaccataagagac

SEQ ID NO: 52548 - DNA, 20 bp, Artificial Sequence
  chemically synthesized
ccataagagacaggcgcacc

SEQ ID NO: 52549 - DNA, 20 bp, Artificial Sequence
  chemically synthesized
ataagagacaggcgcacctg

SEQ ID NO: 52550 - DNA, 20 bp, Artificial Sequence
  chemically synthesized
taagagacaggcgcacctgg

SEQ ID NO: 52551 - DNA, 20 bp, Artificial Sequence
  chemically synthesized
aagagacaggcgcacctgga

SEQ ID NO: 52552 - DNA, 20 bp, Artificial Sequence
  chemically synthesized
agagacaggcgcacctggag

SEQ ID NO: 52553 - DNA, 20 bp, Artificial Sequence
  chemically synthesized
gagacaggcgcacctggagg

SEQ ID NO: 52554 - DNA, 20 bp, Artificial Sequence
  chemically synthesized
agacaggcgcacctggaggg

SEQ ID NO: 52555 - DNA, 20 bp, Artificial Sequence
  chemically synthesized
cctggaggggggctgtttat

SEQ ID NO: 52556 - DNA, 20 bp, Artificial Sequence
  chemically synthesized
gtttataagcctatacctcc

SEQ ID NO: 52557 - DNA, 20 bp, Artificial Sequence
  chemically synthesized
ctggctcgtattctctttct

SEQ ID NO: 52558 - DNA, 20 bp, Artificial Sequence
  chemically synthesized
tggctcgtattctctttctc

SEQ ID NO: 52559 - DNA, 20 bp, Artificial Sequence
  chemically synthesized
ggctcgtattctctttctca

SEQ ID NO: 52560 - DNA, 20 bp, Artificial Sequence
  chemically synthesized
tctcagggatgttccatgct

SEQ ID NO: 52561 - DNA, 20 bp, Artificial Sequence
  chemically synthesized
ggatgttccatgctgagaaa

SEQ ID NO: 52562 - DNA, 20 bp, Artificial Sequence
  chemically synthesized
ccatgctgagaaaaagaatt

SEQ ID NO: 52563 - DNA, 20 bp, Artificial Sequence
  chemically synthesized
tttctcccatttgcttttga

SEQ ID NO: 52564 - DNA, 20 bp, Artificial Sequence
  chemically synthesized
ctcccatttgcttttgaaag

SEQ ID NO: 52565 - DNA, 20 bp, Artificial Sequence
  chemically synthesized
cccatttgcttttgaaagaa

SEQ ID NO: 52566 - DNA, 20 bp, Artificial Sequence
  chemically synthesized
cttttgaaagaagagaaata

SEQ ID NO: 52567 - DNA, 20 bp, Artificial Sequence
  chemically synthesized
aaatatggctctgttctgcc

SEQ ID NO: 52568 - DNA, 20 bp, Artificial Sequence
  chemically synthesized
ctctgttctgcctggctcac

SEQ ID NO: 52569 - DNA, 20 bp, Artificial Sequence
  chemically synthesized
tgttctgcctggctcaccag

SEQ ID NO: 52570 - DNA, 20 bp, Artificial Sequence
  chemically synthesized
ctgcctggctcaccagcagt

SEQ ID NO: 52571 - DNA, 20 bp, Artificial Sequence
  chemically synthesized
gcctggctcaccagcagtca

SEQ ID NO: 52572 - DNA, 20 bp, Artificial Sequence
  chemically synthesized
ctcaccagcagtcagagttt

SEQ ID NO: 52573 - DNA, 20 bp, Artificial Sequence
  chemically synthesized
tcaccagcagtcagagttta

SEQ ID NO: 52574 - DNA, 20 bp, Artificial Sequence
  chemically synthesized
tgttatcctgttcttttttc

SEQ ID NO: 52575 - DNA, 20 bp, Artificial Sequence
  chemically synthesized
gttatcctgttcttttttca

SEQ ID NO: 52576 - DNA, 20 bp, Artificial Sequence
  chemically synthesized
cacatgctgtacaatttgtg

SEQ ID NO: 52577 - DNA, 20 bp, Artificial Sequence
  chemically synthesized
tgcagttaatgcaattatta

SEQ ID NO: 52578 - DNA, 20 bp, Artificial Sequence
  chemically synthesized
gcagttaatgcaattattac

SEQ ID NO: 52579 - DNA, 20 bp, Artificial Sequence
  chemically synthesized
cagttaatgcaattattaca

SEQ ID NO: 52580 - DNA, 20 bp, Artificial Sequence
  chemically synthesized
tgcaattattacagggtcct

SEQ ID NO: 52581 - DNA, 20 bp, Artificial Sequence
  chemically synthesized
gcaattattacagggtcctg

SEQ ID NO: 52582 - DNA, 20 bp, Artificial Sequence
  chemically synthesized
gaggcaatatacatcctcct

SEQ ID NO: 52583 - DNA, 20 bp, Artificial Sequence
  chemically synthesized
tatacatcctcctcagctga

SEQ ID NO: 52584 - DNA, 20 bp, Artificial Sequence
  chemically synthesized
atacatcctcctcagctgac

SEQ ID NO: 52585 - DNA, 20 bp, Artificial Sequence
  chemically synthesized
cctcctcagctgacaggatt

SEQ ID NO: 52586 - DNA, 20 bp, Artificial Sequence
  chemically synthesized
tcctcagctgacaggattaa

SEQ ID NO: 52587 - DNA, 20 bp, Artificial Sequence
  chemically synthesized
ctgacaggattaagagatta

SEQ ID NO: 52588 - DNA, 20 bp, Artificial Sequence
  chemically synthesized
aggattaagagattaaagta

SEQ ID NO: 52589 - DNA, 20 bp, Artificial Sequence
  chemically synthesized
ttaagagattaaagtaaaga

SEQ ID NO: 52590 - DNA, 20 bp, Artificial Sequence
  chemically synthesized
taagagattaaagtaaagac

SEQ ID NO: 52591 - DNA, 20 bp, Artificial Sequence
  chemically synthesized
taaagacaggcataaatcac

SEQ ID NO: 52592 - DNA, 20 bp, Artificial Sequence
  chemically synthesized
aaagacaggcataaatcaca

SEQ ID NO: 52593 - DNA, 20 bp, Artificial Sequence
  chemically synthesized
taaatcacaaggatattgac

SEQ ID NO: 52594 - DNA, 20 bp, Artificial Sequence
  chemically synthesized
aaatcacaaggatattgact

SEQ ID NO: 52595 - DNA, 20 bp, Artificial Sequence
  chemically synthesized
aatcacaaggatattgactg

SEQ ID NO: 52596 - DNA, 20 bp, Artificial Sequence
  chemically synthesized
cacaaggatattgactgggg

SEQ ID NO: 52597 - DNA, 20 bp, Artificial Sequence
  chemically synthesized
atattgactggggaagtgat

SEQ ID NO: 52598 - DNA, 20 bp, Artificial Sequence
  chemically synthesized
aaatctttacaatttatgtt

SEQ ID NO: 52599 - DNA, 20 bp, Artificial Sequence
  chemically synthesized
atctttacaatttatgttta

SEQ ID NO: 52600 - DNA, 20 bp, Artificial Sequence
  chemically synthesized
caatttatgtttagagattg

SEQ ID NO: 52601 - DNA, 20 bp, Artificial Sequence
  chemically synthesized
tatgtttagagattgcagta

SEQ ID NO: 52602 - DNA, 20 bp, Artificial Sequence
  chemically synthesized
tttagagattgcagtaaaga

SEQ ID NO: 52603 - DNA, 20 bp, Artificial Sequence
  chemically synthesized
ttagagattgcagtaaagac

SEQ ID NO: 52604 - DNA, 20 bp, Artificial Sequence
  chemically synthesized
attgcagtaaagacaggcat

SEQ ID NO: 52605 - DNA, 20 bp, Artificial Sequence
  chemically synthesized
acaggcataagaaattacaa

SEQ ID NO: 52606 - DNA, 20 bp, Artificial Sequence
  chemically synthesized
aaattacaaaagtattaatt

SEQ ID NO: 52607 - DNA, 20 bp, Artificial Sequence
  chemically synthesized
aattacaaaagtattaattt

SEQ ID NO: 52608 - DNA, 20 bp, Artificial Sequence
  chemically synthesized
attacaaaagtattaatttg

SEQ ID NO: 52609 - DNA, 20 bp, Artificial Sequence
  chemically synthesized
caatccacgaacttctgcca

SEQ ID NO: 52610 - DNA, 20 bp, Artificial Sequence
  chemically synthesized
acgaacttctgccatggctt

SEQ ID NO: 52611 - DNA, 20 bp, Artificial Sequence
  chemically synthesized
cttcagctgatccctccgtt

SEQ ID NO: 52612 - DNA, 20 bp, Artificial Sequence
  chemically synthesized
tcagctgatccctccgtttg

SEQ ID NO: 52613 - DNA, 20 bp, Artificial Sequence
  chemically synthesized
gatccctccgtttggagtcc

SEQ ID NO: 52614 - DNA, 20 bp, Artificial Sequence
  chemically synthesized
ccagacttcccgcaacaact

SEQ ID NO: 52615 - DNA, 20 bp, Artificial Sequence
  chemically synthesized
cccgcaacaactgagaactc

SEQ ID NO: 52616 - DNA, 20 bp, Artificial Sequence
  chemically synthesized
cgcaacaactgagaactctg

SEQ ID NO: 52617 - DNA, 20 bp, Artificial Sequence
  chemically synthesized
gcaacaactgagaactctgg

SEQ ID NO: 52618 - DNA, 20 bp, Artificial Sequence
  chemically synthesized
caacaactgagaactctgga

SEQ ID NO: 52619 - DNA, 20 bp, Artificial Sequence
  chemically synthesized
ccacccttcttatatctctt

SEQ ID NO: 52620 - DNA, 20 bp, Artificial Sequence
  chemically synthesized
cacccttcttatatctctta

SEQ ID NO: 52621 - DNA, 20 bp, Artificial Sequence
  chemically synthesized
cccttcttatatctcttaag

SEQ ID NO: 52622 - DNA, 20 bp, Artificial Sequence
  chemically synthesized
atctcttaaggagctgtgtt

SEQ ID NO: 52623 - DNA, 20 bp, Artificial Sequence
  chemically synthesized
cttaaggagctgtgttcaga

SEQ ID NO: 52624 - DNA, 20 bp, Artificial Sequence
  chemically synthesized
atggttacatttcgcttgct

SEQ ID NO: 52625 - DNA, 20 bp, Artificial Sequence
  chemically synthesized
ttacatttcgcttgctgagc

SEQ ID NO: 52626 - DNA, 20 bp, Artificial Sequence
  chemically synthesized
agactgcattttcattatcc

SEQ ID NO: 52627 - DNA, 20 bp, Artificial Sequence
  chemically synthesized
gactgcattttcattatcct

SEQ ID NO: 52628 - DNA, 20 bp, Artificial Sequence
  chemically synthesized
tatcctgggctaaaatcaat

SEQ ID NO: 52629 - DNA, 20 bp, Artificial Sequence
  chemically synthesized
gctaaaatcaattggtattt

SEQ ID NO: 52630 - DNA, 20 bp, Artificial Sequence
  chemically synthesized
aaatcaattggtatttaagt

SEQ ID NO: 52631 - DNA, 20 bp, Artificial Sequence
  chemically synthesized
atcaattggtatttaagtta

SEQ ID NO: 52632 - DNA, 20 bp, Artificial Sequence
  chemically synthesized
ggtatttaagttagagcaaa

SEQ ID NO: 52633 - DNA, 20 bp, Artificial Sequence
  chemically synthesized
gtatttaagttagagcaaaa

SEQ ID NO: 52634 - DNA, 20 bp, Artificial Sequence
  chemically synthesized
tatttaagttagagcaaaaa

SEQ ID NO: 52635 - DNA, 20 bp, Artificial Sequence
  chemically synthesized
aagggttctaaccctattta

SEQ ID NO: 52636 - DNA, 20 bp, Artificial Sequence
  chemically synthesized
ggttctaaccctatttacag

SEQ ID NO: 52637 - DNA, 20 bp, Artificial Sequence
  chemically synthesized
cagcacacatacacttacat

SEQ ID NO: 52638 - DNA, 20 bp, Artificial Sequence
  chemically synthesized
acatacacttacattagaat

SEQ ID NO: 52639 - DNA, 20 bp, Artificial Sequence
  chemically synthesized
cttacattagaattggcttt

SEQ ID NO: 52640 - DNA, 20 bp, Artificial Sequence
  chemically synthesized
ttacattagaattggcttta

SEQ ID NO: 52641 - DNA, 20 bp, Artificial Sequence
  chemically synthesized
tacattagaattggctttaa

SEQ ID NO: 52642 - DNA, 20 bp, Artificial Sequence
  chemically synthesized
ttccactgattaccttctat

SEQ ID NO: 52643 - DNA, 20 bp, Artificial Sequence
  chemically synthesized
ctgattaccttctatgagcc

SEQ ID NO: 52644 - DNA, 20 bp, Artificial Sequence
  chemically synthesized
tctatgagccaagactgcca

SEQ ID NO: 52645 - DNA, 20 bp, Artificial Sequence
  chemically synthesized
agccaagactgccatagtct

SEQ ID NO: 52646 - DNA, 20 bp, Artificial Sequence
  chemically synthesized
ccatagtctcagccttcatg

SEQ ID NO: 52647 - DNA, 20 bp, Artificial Sequence
  chemically synthesized
ctcagccttcatgcagctta

SEQ ID NO: 52648 - DNA, 20 bp, Artificial Sequence
  chemically synthesized
tcagccttcatgcagcttat

SEQ ID NO: 52649 - DNA, 20 bp, Artificial Sequence
  chemically synthesized
ccttcatgcagcttataggc

SEQ ID NO: 52650 - DNA, 20 bp, Artificial Sequence
  chemically synthesized
cagcttataggctagcaaaa

SEQ ID NO: 52651 - DNA, 20 bp, Artificial Sequence
  chemically synthesized
ttataggctagcaaaaaagc

SEQ ID NO: 52652 - DNA, 20 bp, Artificial Sequence
  chemically synthesized
aggctagcaaaaaagccaga

SEQ ID NO: 52653 - DNA, 20 bp, Artificial Sequence
  chemically synthesized
aaaaaagccagacagtgcac

SEQ ID NO: 52654 - DNA, 20 bp, Artificial Sequence
  chemically synthesized
gacagtgcacaagaactcac

SEQ ID NO: 52655 - DNA, 20 bp, Artificial Sequence
  chemically synthesized
caagaactcacaagtgtgtt

SEQ ID NO: 52656 - DNA, 20 bp, Artificial Sequence
  chemically synthesized
acaagtgtgttgagtgttgc

SEQ ID NO: 52657 - DNA, 20 bp, Artificial Sequence
  chemically synthesized
aagtgtgttgagtgttgcaa

SEQ ID NO: 52658 - DNA, 20 bp, Artificial Sequence
  chemically synthesized
gtgttgagtgttgcaagagt

SEQ ID NO: 52659 - DNA, 20 bp, Artificial Sequence
  chemically synthesized
agtgttgcaagagtaagttt

SEQ ID NO: 52660 - DNA, 20 bp, Artificial Sequence
  chemically synthesized
gtgttgcaagagtaagtttc

SEQ ID NO: 52661 - DNA, 20 bp, Artificial Sequence
  chemically synthesized
tgttgcaagagtaagtttca

SEQ ID NO: 52662 - DNA, 20 bp, Artificial Sequence
  chemically synthesized
gttgcaagagtaagtttcag

SEQ ID NO: 52663 - DNA, 20 bp, Artificial Sequence
  chemically synthesized
ggggctctccatgacttacc

SEQ ID NO: 52664 - DNA, 20 bp, Artificial Sequence
  chemically synthesized
tctccatgacttacctggtt

SEQ ID NO: 52665 - DNA, 20 bp, Artificial Sequence
  chemically synthesized
ctttaactttttttttcctc

SEQ ID NO: 52666 - DNA, 20 bp, Artificial Sequence
  chemically synthesized
tttaactttttttttcctct

SEQ ID NO: 52667 - DNA, 20 bp, Artificial Sequence
  chemically synthesized
ttttttttcctctgggtgta

SEQ ID NO: 52668 - DNA, 20 bp, Artificial Sequence
  chemically synthesized
tttcctctgggtgtaaagtg

SEQ ID NO: 52669 - DNA, 20 bp, Artificial Sequence
  chemically synthesized
tcctctgggtgtaaagtgaa

SEQ ID NO: 52670 - DNA, 20 bp, Artificial Sequence
  chemically synthesized
ctgggtgtaaagtgaagaga

SEQ ID NO: 52671 - DNA, 20 bp, Artificial Sequence
  chemically synthesized
taaagtgaagagatggcaat

SEQ ID NO: 52672 - DNA, 20 bp, Artificial Sequence
  chemically synthesized
aagtgaagagatggcaatca

SEQ ID NO: 52673 - DNA, 20 bp, Artificial Sequence
  chemically synthesized
tgaagagatggcaatcagag

SEQ ID NO: 52674 - DNA, 20 bp, Artificial Sequence
  chemically synthesized
gaagagatggcaatcagagt

SEQ ID NO: 52675 - DNA, 20 bp, Artificial Sequence
  chemically synthesized
ttccattgtgtcattgtgaa

SEQ ID NO: 52676 - DNA, 20 bp, Artificial Sequence
  chemically synthesized
gtgtcattgtgaaaagatgc

SEQ ID NO: 52677 - DNA, 20 bp, Artificial Sequence
  chemically synthesized
tgtcattgtgaaaagatgct

SEQ ID NO: 52678 - DNA, 20 bp, Artificial Sequence
  chemically synthesized
attgtgaaaagatgctgggc

SEQ ID NO: 52679 - DNA, 20 bp, Artificial Sequence
  chemically synthesized
ctgggctggcgtgtctcctg

SEQ ID NO: 52680 - DNA, 20 bp, Artificial Sequence
  chemically synthesized
tgggctggcgtgtctcctga

SEQ ID NO: 52681 - DNA, 20 bp, Artificial Sequence
  chemically synthesized
ttcatgcattcgcacaaata

SEQ ID NO: 52682 - DNA, 20 bp, Artificial Sequence
  chemically synthesized
acaaatatagatgtgttcca

SEQ ID NO: 52683 - DNA, 20 bp, Artificial Sequence
  chemically synthesized
tatagatgtgttccatagat

SEQ ID NO: 52684 - DNA, 20 bp, Artificial Sequence
  chemically synthesized
atagatgtgttccatagatg

SEQ ID NO: 52685 - DNA, 20 bp, Artificial Sequence
  chemically synthesized
gatgtgttccatagatgagg

SEQ ID NO: 52686 - DNA, 20 bp, Artificial Sequence
  chemically synthesized
tgttccatagatgaggcaga

SEQ ID NO: 52687 - DNA, 20 bp, Artificial Sequence
  chemically synthesized
tccatagatgaggcagatag

SEQ ID NO: 52688 - DNA, 20 bp, Artificial Sequence
  chemically synthesized
catagatgaggcagatagca

SEQ ID NO: 52689 - DNA, 20 bp, Artificial Sequence
  chemically synthesized
atagatgaggcagatagcag

SEQ ID NO: 52690 - DNA, 20 bp, Artificial Sequence
  chemically synthesized
atagcagaggcttctgccta

SEQ ID NO: 52691 - DNA, 20 bp, Artificial Sequence
  chemically synthesized
cagaggcttctgcctacagc

SEQ ID NO: 52692 - DNA, 20 bp, Artificial Sequence
  chemically synthesized
agaggcttctgcctacagca

SEQ ID NO: 52693 - DNA, 20 bp, Artificial Sequence
  chemically synthesized
gcttctgcctacagcaaggc

SEQ ID NO: 52694 - DNA, 20 bp, Artificial Sequence
  chemically synthesized
tgcctacagcaaggctagtt

SEQ ID NO: 52695 - DNA, 20 bp, Artificial Sequence
  chemically synthesized
cctacagcaaggctagtttg

SEQ ID NO: 52696 - DNA, 20 bp, Artificial Sequence
  chemically synthesized
tacagcaaggctagtttgga

SEQ ID NO: 52697 - DNA, 20 bp, Artificial Sequence
  chemically synthesized
acagcaaggctagtttggag

SEQ ID NO: 52698 - DNA, 20 bp, Artificial Sequence
  chemically synthesized
cagcaaggctagtttggaga

SEQ ID NO: 52699 - DNA, 20 bp, Artificial Sequence
  chemically synthesized
tttggagagggttttgctgt

SEQ ID NO: 52700 - DNA, 20 bp, Artificial Sequence
  chemically synthesized
ttggagagggttttgctgtc

SEQ ID NO: 52701 - DNA, 20 bp, Artificial Sequence
  chemically synthesized
tggagagggttttgctgtca

SEQ ID NO: 52702 - DNA, 20 bp, Artificial Sequence
  chemically synthesized
gagggttttgctgtcagggt

SEQ ID NO: 52703 - DNA, 20 bp, Artificial Sequence
  chemically synthesized
tggacccacacacctcttca

SEQ ID NO: 52704 - DNA, 20 bp, Artificial Sequence
  chemically synthesized
atgctttttcttttttttcc

SEQ ID NO: 52705 - DNA, 20 bp, Artificial Sequence
  chemically synthesized
gctttttcttttttttccca

SEQ ID NO: 52706 - DNA, 20 bp, Artificial Sequence
  chemically synthesized
ttttttttcccagagtttga

SEQ ID NO: 52707 - DNA, 20 bp, Artificial Sequence
  chemically synthesized
tttttttcccagagtttgaa

SEQ ID NO: 52708 - DNA, 20 bp, Artificial Sequence
  chemically synthesized
ttttttcccagagtttgaaa

SEQ ID NO: 52709 - DNA, 20 bp, Artificial Sequence
  chemically synthesized
cccagagtttgaaagggaaa

SEQ ID NO: 52710 - DNA, 20 bp, Artificial Sequence
  chemically synthesized
cagagtttgaaagggaaatg

SEQ ID NO: 52711 - DNA, 20 bp, Artificial Sequence
  chemically synthesized
tgaaagggaaatggagtctc

SEQ ID NO: 52712 - DNA, 20 bp, Artificial Sequence
  chemically synthesized
gggaaatggagtctcaagtt

SEQ ID NO: 52713 - DNA, 20 bp, Artificial Sequence
  chemically synthesized
ggaaatggagtctcaagttc

SEQ ID NO: 52714 - DNA, 20 bp, Artificial Sequence
  chemically synthesized
gaaatggagtctcaagttca

SEQ ID NO: 52715 - DNA, 20 bp, Artificial Sequence
  chemically synthesized
aatggagtctcaagttcagg

SEQ ID NO: 52716 - DNA, 20 bp, Artificial Sequence
  chemically synthesized
atggagtctcaagttcaggg

SEQ ID NO: 52717 - DNA, 20 bp, Artificial Sequence
  chemically synthesized
tctcaagttcagggaggtta

SEQ ID NO: 52718 - DNA, 20 bp, Artificial Sequence
  chemically synthesized
agttcagggaggttacagtg

SEQ ID NO: 52719 - DNA, 20 bp, Artificial Sequence
  chemically synthesized
tacagtgtagacccacaaat

SEQ ID NO: 52720 - DNA, 20 bp, Artificial Sequence
  chemically synthesized
tgtagacccacaaatcagct

SEQ ID NO: 52721 - DNA, 20 bp, Artificial Sequence
  chemically synthesized
acccacaaatcagctaagta

SEQ ID NO: 52722 - DNA, 20 bp, Artificial Sequence
  chemically synthesized
caaatcagctaagtacagct

SEQ ID NO: 52723 - DNA, 20 bp, Artificial Sequence
  chemically synthesized
aaatcagctaagtacagcta

SEQ ID NO: 52724 - DNA, 20 bp, Artificial Sequence
  chemically synthesized
aatcagctaagtacagctaa

SEQ ID NO: 52725 - DNA, 20 bp, Artificial Sequence
  chemically synthesized
cagctaagtacagctaaggg

SEQ ID NO: 52726 - DNA, 20 bp, Artificial Sequence
  chemically synthesized
gctaagtacagctaagggtg

SEQ ID NO: 52727 - DNA, 20 bp, Artificial Sequence
  chemically synthesized
aagtacagctaagggtggag

SEQ ID NO: 52728 - DNA, 20 bp, Artificial Sequence
  chemically synthesized
ggagaagtctatgcaatatc

SEQ ID NO: 52729 - DNA, 20 bp, Artificial Sequence
  chemically synthesized
ccagcactcttctgattaat

SEQ ID NO: 52730 - DNA, 20 bp, Artificial Sequence
  chemically synthesized
gcactcttctgattaattag

SEQ ID NO: 52731 - DNA, 20 bp, Artificial Sequence
  chemically synthesized
ttagaagtctttaaaattca

SEQ ID NO: 52732 - DNA, 20 bp, Artificial Sequence
  chemically synthesized
ccctaaatgattcatatgtc

SEQ ID NO: 52733 - DNA, 20 bp, Artificial Sequence
  chemically synthesized
atgattcatatgtcaagaca

SEQ ID NO: 52734 - DNA, 20 bp, Artificial Sequence
  chemically synthesized
tcatatgtcaagacacagta

SEQ ID NO: 52735 - DNA, 20 bp, Artificial Sequence
  chemically synthesized
cacagtaaagatattatatg

SEQ ID NO: 52736 - DNA, 20 bp, Artificial Sequence
  chemically synthesized
tggaacatcatacacaaaca

SEQ ID NO: 52737 - DNA, 20 bp, Artificial Sequence
  chemically synthesized
ggaacatcatacacaaacat

SEQ ID NO: 52738 - DNA, 20 bp, Artificial Sequence
  chemically synthesized
tacacaaacataggtccata

SEQ ID NO: 52739 - DNA, 20 bp, Artificial Sequence
  chemically synthesized
ccatatagaaattcttacct

SEQ ID NO: 52740 - DNA, 20 bp, Artificial Sequence
  chemically synthesized
tgctctttaaatcctgctaa

SEQ ID NO: 52741 - DNA, 20 bp, Artificial Sequence
  chemically synthesized
tctttaaatcctgctaatgg

SEQ ID NO: 52742 - DNA, 20 bp, Artificial Sequence
  chemically synthesized
atttgtgtctttgtcaccta

SEQ ID NO: 52743 - DNA, 20 bp, Artificial Sequence
  chemically synthesized
tgtcacctacagtacatttc

SEQ ID NO: 52744 - DNA, 20 bp, Artificial Sequence
  chemically synthesized
ctacagtacatttctggatt

SEQ ID NO: 52745 - DNA, 20 bp, Artificial Sequence
  chemically synthesized
tacagtacatttctggattt

SEQ ID NO: 52746 - DNA, 20 bp, Artificial Sequence
  chemically synthesized
acatttctggatttgggaat

SEQ ID NO: 52747 - DNA, 20 bp, Artificial Sequence
  chemically synthesized
atttgggaatgagtgttctt

SEQ ID NO: 52748 - DNA, 20 bp, Artificial Sequence
  chemically synthesized
ttgggaatgagtgttcttca

SEQ ID NO: 52749 - DNA, 20 bp, Artificial Sequence
  chemically synthesized
tgggaatgagtgttcttcag

SEQ ID NO: 52750 - DNA, 20 bp, Artificial Sequence
  chemically synthesized
ttcagaggatcctcgctgcc

SEQ ID NO: 52751 - DNA, 20 bp, Artificial Sequence
  chemically synthesized
tcagaggatcctcgctgccc

SEQ ID NO: 52752 - DNA, 20 bp, Artificial Sequence
  chemically synthesized
tcgctgcccaggttccctgc

SEQ ID NO: 52753 - DNA, 20 bp, Artificial Sequence
  chemically synthesized
ctgcccaggttccctgccag

SEQ ID NO: 52754 - DNA, 20 bp, Artificial Sequence
  chemically synthesized
tgcccaggttccctgccaga

SEQ ID NO: 52755 - DNA, 20 bp, Artificial Sequence
  chemically synthesized
caggttccctgccagaagga

SEQ ID NO: 52756 - DNA, 20 bp, Artificial Sequence
  chemically synthesized
tggcagggaacctgggcagc

SEQ ID NO: 52757 - DNA, 20 bp, Artificial Sequence
  chemically synthesized
gacacaaatgccaccattag

SEQ ID NO: 52758 - DNA, 20 bp, Artificial Sequence
  chemically synthesized
aattggcagtttactaaggt

SEQ ID NO: 52759 - DNA, 20 bp, Artificial Sequence
  chemically synthesized
tctttactgtgtcttgacat

SEQ ID NO: 52760 - DNA, 20 bp, Artificial Sequence
  chemically synthesized
gggaagacaatatggtttct

SEQ ID NO: 52761 - DNA, 20 bp, Artificial Sequence
  chemically synthesized
aaagacttctaattaatcag

SEQ ID NO: 52762 - DNA, 20 bp, Artificial Sequence
  chemically synthesized
tctaattaatcagaagagtg

SEQ ID NO: 52763 - DNA, 20 bp, Artificial Sequence
  chemically synthesized
tagctgtacttagctgattt

SEQ ID NO: 52764 - DNA, 20 bp, Artificial Sequence
  chemically synthesized
aagcatctatgaagaggtgt

SEQ ID NO: 52765 - DNA, 20 bp, Artificial Sequence
  chemically synthesized
tggaacacatctatatttgt

SEQ ID NO: 52766 - DNA, 20 bp, Artificial Sequence
  chemically synthesized
tgaaaataaagtttaaagat

SEQ ID NO: 52767 - DNA, 20 bp, Artificial Sequence
  chemically synthesized
ccagaggaaaaaaaaagtta

SEQ ID NO: 52768 - DNA, 20 bp, Artificial Sequence
  chemically synthesized
ttgcaacactcaacacactt

SEQ ID NO: 52769 - DNA, 20 bp, Artificial Sequence
  chemically synthesized
agtggaaatttgtcgattga

SEQ ID NO: 52770 - DNA, 20 bp, Artificial Sequence
  chemically synthesized
tgtatgtgtgctgctgtaaa

SEQ ID NO: 52771 - DNA, 20 bp, Artificial Sequence
  chemically synthesized
aataccaattgattttagcc

SEQ ID NO: 52772 - DNA, 20 bp, Artificial Sequence
  chemically synthesized
agctccttaagagatataag

SEQ ID NO: 52773 - DNA, 20 bp, Artificial Sequence
  chemically synthesized
gagatataagaagggtggaa

SEQ ID NO: 52774 - DNA, 20 bp, Artificial Sequence
  chemically synthesized
aagaagggtggaagtgggtg

SEQ ID NO: 52775 - DNA, 20 bp, Artificial Sequence
  chemically synthesized
tgggtgaagggtaggccctc

SEQ ID NO: 52776 - DNA, 20 bp, Artificial Sequence
  chemically synthesized
aagtctgggactccaaacgg

SEQ ID NO: 52777 - DNA, 20 bp, Artificial Sequence
  chemically synthesized
tgaagccatggcagaagttc

SEQ ID NO: 52778 - DNA, 20 bp, Artificial Sequence
  chemically synthesized
tcttaatcctgtcagctgag

SEQ ID NO: 52779 - DNA, 20 bp, Artificial Sequence
  chemically synthesized
tggacaccttgaaaaaagaa

SEQ ID NO: 52780 - DNA, 20 bp, Artificial Sequence
  chemically synthesized
aggataacagcaattgttca

SEQ ID NO: 52781 - DNA, 20 bp, Artificial Sequence
  chemically synthesized
agcaaatgggagaaatatcg

SEQ ID NO: 52782 - DNA, 20 bp, Artificial Sequence
  chemically synthesized
catggaacatccctgagaaa

SEQ ID NO: 52783 - DNA, 20 bp, Artificial Sequence
  chemically synthesized
tctcttatggtcgagactgc

SEQ ID NO: 52784 - DNA, 20 bp, Artificial Sequence
  chemically synthesized
accgaaatgtgatgcctccc

SEQ ID NO: 52785 - DNA, 20 bp, Artificial Sequence
  chemically synthesized
gaaaatagaaaagaacctac

SEQ ID NO: 52786 - DNA, 20 bp, Artificial Sequence
  chemically synthesized
ggcgtggagatgtaacaagc

SEQ ID NO: 52787 - DNA, 20 bp, Artificial Sequence
  chemically synthesized
gatgtaacaagcctggatgt

SEQ ID NO: 52788 - DNA, 20 bp, Artificial Sequence
  chemically synthesized
atttggaagaaatatcagat

SEQ ID NO: 52789 - DNA, 20 bp, Artificial Sequence
  chemically synthesized
taaaagcagcagcatgcagt

SEQ ID NO: 52790 - DNA, 20 bp, Artificial Sequence
  chemically synthesized
aaccccatgctcaccatcaa

SEQ ID NO: 52791 - DNA, 20 bp, Artificial Sequence
  chemically synthesized
catgctcaccatcaacggga

SEQ ID NO: 52792 - DNA, 20 bp, Artificial Sequence
  chemically synthesized
gggattgaatttgagctgct

SEQ ID NO: 52793 - DNA, 20 bp, Artificial Sequence
  chemically synthesized
ttatcttcaattctgtgaaa

SEQ ID NO: 52794 - DNA, 20 bp, Artificial Sequence
  chemically synthesized
tgcaagagaggaaggaaggc

SEQ ID NO: 52795 - DNA, 20 bp, Artificial Sequence
  chemically synthesized
agctttctggcaggcactgg

SEQ ID NO: 52796 - DNA, 20 bp, Artificial Sequence
  chemically synthesized
tgtaactggtggccttagaa

SEQ ID NO: 52797 - DNA, 20 bp, Artificial Sequence
  chemically synthesized
ggtggccttagaagagggtt

SEQ ID NO: 52798 - DNA, 20 bp, Artificial Sequence
  chemically synthesized
cagggttatgtgtttggaac

SEQ ID NO: 52799 - DNA, 20 bp, Artificial Sequence
  chemically synthesized
gccaccaagcaccaagaggt

SEQ ID NO: 52800 - DNA, 20 bp, Artificial Sequence
  chemically synthesized
agcaccaagaggtgtgagtt

SEQ ID NO: 52801 - DNA, 20 bp, Artificial Sequence
  chemically synthesized
aaagaggaaggtgaaaactg

SEQ ID NO: 52802 - DNA, 20 bp, Artificial Sequence
  chemically synthesized
atcccctgagagaaaaagta

SEQ ID NO: 52803 - DNA, 20 bp, Artificial Sequence
  chemically synthesized
cccctcacggccaaaggcat

SEQ ID NO: 52804 - DNA, 20 bp, Artificial Sequence
  chemically synthesized
ccagacattgagctcaagga

SEQ ID NO: 52805 - DNA, 20 bp, Artificial Sequence
  chemically synthesized
gtttgtatgttttctacagt

SEQ ID NO: 52806 - DNA, 20 bp, Artificial Sequence
  chemically synthesized
gttttctacagttcggattt

SEQ ID NO: 52807 - DNA, 20 bp, Artificial Sequence
  chemically synthesized
atgatttcatttcttttcga

SEQ ID NO: 52808 - DNA, 20 bp, Artificial Sequence
  chemically synthesized
tatgcatactttctaaatgc

SEQ ID NO: 52809 - DNA, 20 bp, Artificial Sequence
  chemically synthesized
catcagctctttggcagctt

SEQ ID NO: 52810 - DNA, 20 bp, Artificial Sequence
  chemically synthesized
tttaattctcacctggtccc

SEQ ID NO: 52811 - DNA, 20 bp, Artificial Sequence
  chemically synthesized
ccaggatatggtttacttgt

SEQ ID NO: 52812 - DNA, 20 bp, Artificial Sequence
  chemically synthesized
tgaaggaaagagagagaagt

SEQ ID NO: 52813 - DNA, 20 bp, Artificial Sequence
  chemically synthesized
attttttttttctgtggaaa

SEQ ID NO: 52814 - DNA, 20 bp, Artificial Sequence
  chemically synthesized
ttgcacattatcgcagtagg

SEQ ID NO: 52815 - DNA, 20 bp, Artificial Sequence
  chemically synthesized
tggcttaacccctgaaacct

SEQ ID NO: 52816 - DNA, 20 bp, Artificial Sequence
  chemically synthesized
agacttttgcatatataatt

SEQ ID NO: 52817 - DNA, 20 bp, Artificial Sequence
  chemically synthesized
gcatatataattaaggatct

SEQ ID NO: 52818 - DNA, 20 bp, Artificial Sequence
  chemically synthesized
tggggagatatcctaattat

SEQ ID NO: 52819 - DNA, 20 bp, Artificial Sequence
  chemically synthesized
gaggaagaggctacaaacca

SEQ ID NO: 52820 - DNA, 20 bp, Artificial Sequence
  chemically synthesized
gaggctacaaaccaaggaat

SEQ ID NO: 52821 - DNA, 20 bp, Artificial Sequence
  chemically synthesized
gtagcctctagaagaggaaa

SEQ ID NO: 52822 - DNA, 20 bp, Artificial Sequence
  chemically synthesized
caggaaaacacaatctctca

SEQ ID NO: 52823 - DNA, 20 bp, Artificial Sequence
  chemically synthesized
gcaagaggaaatcagttacg

SEQ ID NO: 52824 - DNA, 20 bp, Artificial Sequence
  chemically synthesized
tcctgtctctggctaatcat

SEQ ID NO: 52825 - DNA, 20 bp, Artificial Sequence
  chemically synthesized
tacatacagacccagagcca

SEQ ID NO: 52826 - DNA, 20 bp, Artificial Sequence
  chemically synthesized
agacccagagccagtgaatc

SEQ ID NO: 52827 - DNA, 20 bp, Artificial Sequence
  chemically synthesized
ttggtggtggggcccagagc

SEQ ID NO: 52828 - DNA, 20 bp, Artificial Sequence
  chemically synthesized
aagcaacttactcaaataca

SEQ ID NO: 52829 - DNA, 20 bp, Artificial Sequence
  chemically synthesized
taattttattactttatctt

SEQ ID NO: 52830 - DNA, 20 bp, Artificial Sequence
  chemically synthesized
attatataatgtttattgat

SEQ ID NO: 52831 - DNA, 20 bp, Artificial Sequence
  chemically synthesized
tataatgtttattgattaga

SEQ ID NO: 52832 - DNA, 20 bp, Artificial Sequence
  chemically synthesized
gtgttcagattcctgacctc

SEQ ID NO: 52833 - DNA, 20 bp, Artificial Sequence
  chemically synthesized
agattagacagcaggcaggg

SEQ ID NO: 52834 - DNA, 20 bp, Artificial Sequence
  chemically synthesized
aagttgcttaaacatgacag

SEQ ID NO: 52835 - DNA, 20 bp, Artificial Sequence
  chemically synthesized
gcttaaacatgacagcagga

SEQ ID NO: 52836 - DNA, 20 bp, Artificial Sequence
  chemically synthesized
acctctgctgaacttcctca

SEQ ID NO: 52837 - DNA, 20 bp, Artificial Sequence
  chemically synthesized
tccataaatccaaccaccgc

SEQ ID NO: 52838 - DNA, 20 bp, Artificial Sequence
  chemically synthesized
caaatttggctgacacagtt

SEQ ID NO: 52839 - DNA, 20 bp, Artificial Sequence
  chemically synthesized
gcactagcacaaaatatttg

SEQ ID NO: 52840 - DNA, 20 bp, Artificial Sequence
  chemically synthesized
acaaaatatttgctgaatga

SEQ ID NO: 52841 - DNA, 20 bp, Artificial Sequence
  chemically synthesized
tatttgctgaatgaaagaat

SEQ ID NO: 52842 - DNA, 20 bp, Artificial Sequence
  chemically synthesized
caaagtcttttactccggtg

SEQ ID NO: 52843 - DNA, 20 bp, Artificial Sequence
  chemically synthesized
actccggtgtggagtgtttt

SEQ ID NO: 52844 - DNA, 20 bp, Artificial Sequence
  chemically synthesized
gaaacacctccccttaactg

SEQ ID NO: 52845 - DNA, 20 bp, Artificial Sequence
  chemically synthesized
ttcagggaagatgtctgttg

SEQ ID NO: 52846 - DNA, 20 bp, Artificial Sequence
  chemically synthesized
ctataccccagatttatttt

SEQ ID NO: 52847 - DNA, 20 bp, Artificial Sequence
  chemically synthesized
ccagatttattttgaggatt

SEQ ID NO: 52848 - DNA, 20 bp, Artificial Sequence
  chemically synthesized
attgcgtattactaaaaaga

SEQ ID NO: 52849 - DNA, 20 bp, Artificial Sequence
  chemically synthesized
caatgggaaggtgtcagagc

SEQ ID NO: 52850 - DNA, 20 bp, Artificial Sequence
  chemically synthesized
ccgtagtggaggggagctct

SEQ ID NO: 52851 - DNA, 20 bp, Artificial Sequence
  chemically synthesized
aattgaaatgaacaaaggca

SEQ ID NO: 52852 - DNA, 20 bp, Artificial Sequence
  chemically synthesized
acagggaagcctctgaacac

SEQ ID NO: 52853 - DNA, 20 bp, Artificial Sequence
  chemically synthesized
cttcaggaaacccaggccca

SEQ ID NO: 52854 - DNA, 20 bp, Artificial Sequence
  chemically synthesized
tttctccttcaaaccactct

SEQ ID NO: 52855 - DNA, 20 bp, Artificial Sequence
  chemically synthesized
gcgtcactcaaactagctga

SEQ ID NO: 52856 - DNA, 20 bp, Artificial Sequence
  chemically synthesized
taggcttatttcaaaaggca

SEQ ID NO: 52857 - DNA, 20 bp, Artificial Sequence
  chemically synthesized
agtgcctgctgtgtgtggtg

SEQ ID NO: 52858 - DNA, 20 bp, Artificial Sequence
  chemically synthesized
taggaaggaacagggcagtg

SEQ ID NO: 52859 - DNA, 20 bp, Artificial Sequence
  chemically synthesized
ctgccctgttccttcctagc

SEQ ID NO: 52860 - DNA, 20 bp, Artificial Sequence
  chemically synthesized
gcctgagtcaggactgagca

SEQ ID NO: 52861 - DNA, 20 bp, Artificial Sequence
  chemically synthesized
gaaataagcctacttttaac

SEQ ID NO: 52862 - DNA, 20 bp, Artificial Sequence
  chemically synthesized
gctggactttgtccctgtgt

SEQ ID NO: 52863 - DNA, 20 bp, Artificial Sequence
  chemically synthesized
agacaattctttcagctagt

SEQ ID NO: 52864 - DNA, 20 bp, Artificial Sequence
  chemically synthesized
cgcagtgaagcagtgggaac

SEQ ID NO: 52865 - DNA, 20 bp, Artificial Sequence
  chemically synthesized
agtgggaaccggaatatcca

SEQ ID NO: 52866 - DNA, 20 bp, Artificial Sequence
  chemically synthesized
tggctttatatcctctgggc

SEQ ID NO: 52867 - DNA, 20 bp, Artificial Sequence
  chemically synthesized
atagaggagagagaaaatgg

SEQ ID NO: 52868 - DNA, 20 bp, Artificial Sequence
  chemically synthesized
atggaagtttctgagaactt

SEQ ID NO: 52869 - DNA, 20 bp, Artificial Sequence
  chemically synthesized
ttctgagaacttcagggtat

SEQ ID NO: 52870 - DNA, 20 bp, Artificial Sequence
  chemically synthesized
ctatttagttaattaaggct

SEQ ID NO: 52871 - DNA, 20 bp, Artificial Sequence
  chemically synthesized
tacgcaattgaaaagtatgt

SEQ ID NO: 52872 - DNA, 20 bp, Artificial Sequence
  chemically synthesized
aggtgctaagcattttagct

SEQ ID NO: 52873 - DNA, 20 bp, Artificial Sequence
  chemically synthesized
cataatcctcaaaataaatc

SEQ ID NO: 52874 - DNA, 20 bp, Artificial Sequence
  chemically synthesized
atagatgacttgattagaag

SEQ ID NO: 52875 - DNA, 20 bp, Artificial Sequence
  chemically synthesized
tgattagaagcagggtatgt

SEQ ID NO: 52876 - DNA, 20 bp, Artificial Sequence
  chemically synthesized
gtatcttaaggcaaggaaaa

SEQ ID NO: 52877 - DNA, 20 bp, Artificial Sequence
  chemically synthesized
gcctagtgcccaggccaggc

SEQ ID NO: 52878 - DNA, 20 bp, Artificial Sequence
  chemically synthesized
ccccacaacagacatcttcc

SEQ ID NO: 52879 - DNA, 20 bp, Artificial Sequence
  chemically synthesized
acagacatcttccctgaatg

SEQ ID NO: 52880 - DNA, 20 bp, Artificial Sequence
  chemically synthesized
ctaatgccctctaactgatg

SEQ ID NO: 52881 - DNA, 20 bp, Artificial Sequence
  chemically synthesized
tctaactgatgctgagtttg

SEQ ID NO: 52882 - DNA, 20 bp, Artificial Sequence
  chemically synthesized
tcagttaaggggaggtgttt

SEQ ID NO: 52883 - DNA, 20 bp, Artificial Sequence
  chemically synthesized
gggaggtgtttctgagtttg

SEQ ID NO: 52884 - DNA, 20 bp, Artificial Sequence
  chemically synthesized
caaacaccttcctaattggt

SEQ ID NO: 52885 - DNA, 20 bp, Artificial Sequence
  chemically synthesized
atcctgaaaacactccacac

SEQ ID NO: 52886 - DNA, 20 bp, Artificial Sequence
  chemically synthesized
agattaatatcgtagatgaa

SEQ ID NO: 52887 - DNA, 20 bp, Artificial Sequence
  chemically synthesized
tgaactgagtctgggctagg

SEQ ID NO: 52888 - DNA, 20 bp, Artificial Sequence
  chemically synthesized
taaaggagcctgtacctaaa

SEQ ID NO: 52889 - DNA, 20 bp, Artificial Sequence
  chemically synthesized
actggcaaagtgaggaagga

SEQ ID NO: 52890 - DNA, 20 bp, Artificial Sequence
  chemically synthesized
gaaggacggggtctggaggg

SEQ ID NO: 52891 - DNA, 20 bp, Artificial Sequence
  chemically synthesized
gacggggtctggagggaaga

SEQ ID NO: 52892 - DNA, 20 bp, Artificial Sequence
  chemically synthesized
gtgcaaaggcacagcacata

SEQ ID NO: 52893 - DNA, 20 bp, Artificial Sequence
  chemically synthesized
tacagaatgcctgcatgctc

SEQ ID NO: 52894 - DNA, 20 bp, Artificial Sequence
  chemically synthesized
caaaactgtgtcagccaaat

SEQ ID NO: 52895 - DNA, 20 bp, Artificial Sequence
  chemically synthesized
ctgagatacccaggcggtgg

SEQ ID NO: 52896 - DNA, 20 bp, Artificial Sequence
  chemically synthesized
cccaggcggtggttggattt

SEQ ID NO: 52897 - DNA, 20 bp, Artificial Sequence
  chemically synthesized
cggtggttggatttatggat

SEQ ID NO: 52898 - DNA, 20 bp, Artificial Sequence
  chemically synthesized
tttatggatctggatttcag

SEQ ID NO: 52899 - DNA, 20 bp, Artificial Sequence
  chemically synthesized
aggggagtgggcagggctag

SEQ ID NO: 52900 - DNA, 20 bp, Artificial Sequence
  chemically synthesized
agggctaggggaatagaact

SEQ ID NO: 52901 - DNA, 20 bp, Artificial Sequence
  chemically synthesized
agggtcatgatgtcagtggt

SEQ ID NO: 52902 - DNA, 20 bp, Artificial Sequence
  chemically synthesized
ggagttgaagtcttggaaga

SEQ ID NO: 52903 - DNA, 20 bp, Artificial Sequence
  chemically synthesized
aaaggttaactccagaggtc

SEQ ID NO: 52904 - DNA, 20 bp, Artificial Sequence
  chemically synthesized
tcttttatttcttcatttta

SEQ ID NO: 52905 - DNA, 20 bp, Artificial Sequence
  chemically synthesized
catttacacaaaagtacaac

SEQ ID NO: 52906 - DNA, 20 bp, Artificial Sequence
  chemically synthesized
aaatgaaataccctatgtat

SEQ ID NO: 52907 - DNA, 20 bp, Artificial Sequence
  chemically synthesized
aaatccttgattcactggct

SEQ ID NO: 52908 - DNA, 20 bp, Artificial Sequence
  chemically synthesized
gtctgtatgtaacaagcttc

SEQ ID NO: 52909 - DNA, 20 bp, Artificial Sequence
  chemically synthesized
tgtgttttcctgccttttcc

SEQ ID NO: 52910 - DNA, 20 bp, Artificial Sequence
  chemically synthesized
atgacacttgtgattacatt

SEQ ID NO: 52911 - DNA, 20 bp, Artificial Sequence
  chemically synthesized
ttaggatacacccaaataat

SEQ ID NO: 52912 - DNA, 20 bp, Artificial Sequence
  chemically synthesized
agataatactcacaggtttc

SEQ ID NO: 52913 - DNA, 20 bp, Artificial Sequence
  chemically synthesized
gttaagccatacatatcttt

SEQ ID NO: 52914 - DNA, 20 bp, Artificial Sequence
  chemically synthesized
tcatctcatcaggtgttacc

SEQ ID NO: 52915 - DNA, 20 bp, Artificial Sequence
  chemically synthesized
catcaggtgttacctagaat

SEQ ID NO: 52916 - DNA, 20 bp, Artificial Sequence
  chemically synthesized
ccatatcctggggaccaggt

SEQ ID NO: 52917 - DNA, 20 bp, Artificial Sequence
  chemically synthesized
actgaagtcacatggagctc

SEQ ID NO: 52918 - DNA, 20 bp, Artificial Sequence
  chemically synthesized
aatgaaatcatatttttctg

SEQ ID NO: 52919 - DNA, 20 bp, Artificial Sequence
  chemically synthesized
aggcactgaaccagctggaa

SEQ ID NO: 52920 - DNA, 20 bp, Artificial Sequence
  chemically synthesized
aaccagctggaaatgaatgc

SEQ ID NO: 52921 - DNA, 20 bp, Artificial Sequence
  chemically synthesized
attttcgcagctgataaaag

SEQ ID NO: 52922 - DNA, 20 bp, Artificial Sequence
  chemically synthesized
aatgtctggagaaagcagct

SEQ ID NO: 52923 - DNA, 20 bp, Artificial Sequence
  chemically synthesized
actctgtactttttctctca

SEQ ID NO: 52924 - DNA, 20 bp, Artificial Sequence
  chemically synthesized
cctgcagctaagattgagaa

SEQ ID NO: 52925 - DNA, 20 bp, Artificial Sequence
  chemically synthesized
cctattttttaaagcacagt

SEQ ID NO: 52926 - DNA, 20 bp, Artificial Sequence
  chemically synthesized
ttctaaggccaccagttaca

SEQ ID NO: 52927 - DNA, 20 bp, Artificial Sequence
  chemically synthesized
acaaagaatggggaaggtta

SEQ ID NO: 52928 - DNA, 20 bp, Artificial Sequence
  chemically synthesized
tggtctaaaattccatttca

SEQ ID NO: 52929 - DNA, 20 bp, Artificial Sequence
  chemically synthesized
tcacagaattgaagataatt

SEQ ID NO: 52930 - DNA, 20 bp, Artificial Sequence
  chemically synthesized
aatcccgttgatggtgagca

SEQ ID NO: 52931 - DNA, 20 bp, Artificial Sequence
  chemically synthesized
gtgagcatggggttcatttt

SEQ ID NO: 52932 - DNA, 20 bp, Artificial Sequence
  chemically synthesized
ttcattttgagagtagaaaa

SEQ ID NO: 52933 - DNA, 20 bp, Artificial Sequence
  chemically synthesized
gtagaaaattggatgcagtg

SEQ ID NO: 52934 - DNA, 20 bp, Artificial Sequence
  chemically synthesized
aattggatgcagtggagaat

SEQ ID NO: 52935 - DNA, 20 bp, Artificial Sequence
  chemically synthesized
tgcagtggagaatcagaatg

SEQ ID NO: 52936 - DNA, 20 bp, Artificial Sequence
  chemically synthesized
attttcaaatatacaaaata

SEQ ID NO: 52937 - DNA, 20 bp, Artificial Sequence
  chemically synthesized
atattgagtctgaaggcaaa

SEQ ID NO: 52938 - DNA, 20 bp, Artificial Sequence
  chemically synthesized
cttgttacatctccacgcca

SEQ ID NO: 52939 - DNA, 20 bp, Artificial Sequence
  chemically synthesized
caactttagaaataaaggga

SEQ ID NO: 52940 - DNA, 20 bp, Artificial Sequence
  chemically synthesized
aaaaccagcaagtttgtatt

SEQ ID NO: 52941 - DNA, 20 bp, Artificial Sequence
  chemically synthesized
gaggcagtgtgcaaataggt

SEQ ID NO: 52942 - DNA, 20 bp, Artificial Sequence
  chemically synthesized
tcaagtactttacaaggtaa

SEQ ID NO: 52943 - DNA, 20 bp, Artificial Sequence
  chemically synthesized
tatcacaaggcaagtggagg

SEQ ID NO: 52944 - DNA, 20 bp, Artificial Sequence
  chemically synthesized
gataacatcttatcaggaga

SEQ ID NO: 52945 - DNA, 20 bp, Artificial Sequence
  chemically synthesized
ttatcaggagacagggtttt

SEQ ID NO: 52946 - DNA, 20 bp, Artificial Sequence
  chemically synthesized
ctgaccaaaatttattaggc

SEQ ID NO: 52947 - DNA, 20 bp, Artificial Sequence
  chemically synthesized
ctgggagcgctgtgggagac

SEQ ID NO: 52948 - DNA, 20 bp, Artificial Sequence
  chemically synthesized
tggctcgtattctctttctc

SEQ ID NO: 52949 - DNA, 20 bp, Artificial Sequence
  chemically synthesized
ggatgttccatgctgagaaa

SEQ ID NO: 52950 - DNA, 20 bp, Artificial Sequence
  chemically synthesized
ctgcctggctcaccagcagt

SEQ ID NO: 52951 - DNA, 20 bp, Artificial Sequence
  chemically synthesized
tgcagttaatgcaattatta

SEQ ID NO: 52952 - DNA, 20 bp, Artificial Sequence
  chemically synthesized
tatacatcctcctcagctga

SEQ ID NO: 52953 - DNA, 20 bp, Artificial Sequence
  chemically synthesized
taaagacaggcataaatcac

SEQ ID NO: 52954 - DNA, 20 bp, Artificial Sequence
  chemically synthesized
cttcagctgatccctccgtt

SEQ ID NO: 52955 - DNA, 20 bp, Artificial Sequence
  chemically synthesized
ggtatttaagttagagcaaa

SEQ ID NO: 52956 - DNA, 20 bp, Artificial Sequence
  chemically synthesized
cagcacacatacacttacat

SEQ ID NO: 52957 - DNA, 20 bp, Artificial Sequence
  chemically synthesized
cacaagaactcacaagtgtg

SEQ ID NO: 52958 - DNA, 20 bp, Artificial Sequence
  chemically synthesized
acaagtgtgttgagtgttgc

SEQ ID NO: 52959 - DNA, 20 bp, Artificial Sequence
  chemically synthesized
cctttaactttttttttcct

SEQ ID NO: 52960 - DNA, 20 bp, Artificial Sequence
  chemically synthesized
taaagtgaagagatggcaat

SEQ ID NO: 52961 - DNA, 20 bp, Artificial Sequence
  chemically synthesized
tacagcaaggctagtttgga

SEQ ID NO: 52962 - DNA, 20 bp, Artificial Sequence
  chemically synthesized
tttggagagggttttgctgt

SEQ ID NO: 52963 - DNA, 20 bp, Artificial Sequence
  chemically synthesized
atgctttttcttttttttcc

SEQ ID NO: 52964 - DNA, 20 bp, Artificial Sequence
  chemically synthesized
cccagagtttgaaagggaaa

SEQ ID NO: 52965 - DNA, 20 bp, Artificial Sequence
  chemically synthesized
caaatcagctaagtacagct

SEQ ID NO: 52966 - DNA, 20 bp, Artificial Sequence
  chemically synthesized
ttgtcacctacagtacattt

SEQ ID NO: 52967 - DNA, 20 bp, Artificial Sequence
  chemically synthesized
tacagtacatttctggattt

SEQ ID NO: 52968 - DNA, 20 bp, Artificial Sequence
  chemically synthesized
gtacatttctggatttggga

SEQ ID NO: 52969 - DNA, 20 bp, Artificial Sequence
  chemically synthesized
ttgggaatgagtgttcttca

SEQ ID NO: 52970 - DNA, 20 bp, Artificial Sequence
  chemically synthesized
aagaacactcattcccaaat

SEQ ID NO: 52971 - DNA, 20 bp, Artificial Sequence
  chemically synthesized
agcaggatttaaagagcatt

SEQ ID NO: 52972 - DNA, 20 bp, Artificial Sequence
  chemically synthesized
aaattggcagtttactaagg

SEQ ID NO: 52973 - DNA, 20 bp, Artificial Sequence
  chemically synthesized
ctttcaaactctgggaaaaa

SEQ ID NO: 52974 - DNA, 20 bp, Artificial Sequence
  chemically synthesized
tcttctttcaaaagcaaatg

SEQ ID NO: 52975 - DNA, 20 bp, Artificial Sequence
  chemically synthesized
ttctcagcatggaacatccc

SEQ ID NO: 52976 - DNA, 20 bp, Artificial Sequence
  chemically synthesized
gcatggaacatccctgagaa

SEQ ID NO: 52977 - DNA, 20 bp, Artificial Sequence
  chemically synthesized
ttggccgacgcttagggaaa

SEQ ID NO: 52978 - DNA, 20 bp, Artificial Sequence
  chemically synthesized
ccaacaacagtctgtatttg

SEQ ID NO: 52979 - DNA, 20 bp, Artificial Sequence
  chemically synthesized
cgggattgaatttgagctgc

SEQ ID NO: 52980 - DNA, 20 bp, Artificial Sequence
  chemically synthesized
actgtgctttaaaaaatagg

SEQ ID NO: 52981 - DNA, 20 bp, Artificial Sequence
  chemically synthesized
tttaaaaaataggaaagaaa

SEQ ID NO: 52982 - DNA, 20 bp, Artificial Sequence
  chemically synthesized
ttggtttttctaatcccctg

SEQ ID NO: 52983 - DNA, 20 bp, Artificial Sequence
  chemically synthesized
tccagacattgagctcaagg

SEQ ID NO: 52984 - DNA, 20 bp, Artificial Sequence
  chemically synthesized
tttctgaataatttgatccg

SEQ ID NO: 52985 - DNA, 20 bp, Artificial Sequence
  chemically synthesized
tatgatttcatttcttttcg

SEQ ID NO: 52986 - DNA, 20 bp, Artificial Sequence
  chemically synthesized
atatgcatactttctaaatg

SEQ ID NO: 52987 - DNA, 20 bp, Artificial Sequence
  chemically synthesized
gggagatttgacttataaga

SEQ ID NO: 52988 - DNA, 20 bp, Artificial Sequence
  chemically synthesized
ggtagcctctagaagaggaa

SEQ ID NO: 52989 - DNA, 20 bp, Artificial Sequence
  chemically synthesized
aatctctcatagagtctcca

SEQ ID NO: 52990 - DNA, 20 bp, Artificial Sequence
  chemically synthesized
agcaagaggaaatcagttac

SEQ ID NO: 52991 - DNA, 20 bp, Artificial Sequence
  chemically synthesized
gtcctgtctctggctaatca

SEQ ID NO: 52992 - DNA, 20 bp, Artificial Sequence
  chemically synthesized
tattaagcaagttcttcgtt

SEQ ID NO: 52993 - DNA, 20 bp, Artificial Sequence
  chemically synthesized
gttgacatattcattaaaat

SEQ ID NO: 52994 - DNA, 20 bp, Artificial Sequence
  chemically synthesized
taaaatgaagaaataaaaga

SEQ ID NO: 52995 - DNA, 20 bp, Artificial Sequence
  chemically synthesized
aattatataatgtttattga

SEQ ID NO: 52996 - DNA, 20 bp, Artificial Sequence
  chemically synthesized
aagattagacagcaggcagg

SEQ ID NO: 52997 - DNA, 20 bp, Artificial Sequence
  chemically synthesized
aacctctgctgaacttcctc

SEQ ID NO: 52998 - DNA, 20 bp, Artificial Sequence
  chemically synthesized
acttcctcatagaatgttca

SEQ ID NO: 52999 - DNA, 20 bp, Artificial Sequence
  chemically synthesized
cacaaaatatttgctgaatg

SEQ ID NO: 53000 - DNA, 20 bp, Artificial Sequence
  chemically synthesized
aggtgtttgattcttcaaac

SEQ ID NO: 53001 - DNA, 20 bp, Artificial Sequence
  chemically synthesized
gggttgggaaaaagacatag

SEQ ID NO: 53002 - DNA, 20 bp, Artificial Sequence
  chemically synthesized
actctgataccctgaagttc

SEQ ID NO: 53003 - DNA, 20 bp, Artificial Sequence
  chemically synthesized
tgcgtcactcaaactagctg

SEQ ID NO: 53004 - DNA, 20 bp, Artificial Sequence
  chemically synthesized
gtaggcttatttcaaaaggc

SEQ ID NO: 53005 - DNA, 20 bp, Artificial Sequence
  chemically synthesized
agcctgagtcaggactgagc

SEQ ID NO: 53006 - DNA, 20 bp, Artificial Sequence
  chemically synthesized
tatccaaagagtggtttgaa

SEQ ID NO: 53007 - DNA, 20 bp, Artificial Sequence
  chemically synthesized
agtcaccacacatagaggag

SEQ ID NO: 53008 - DNA, 20 bp, Artificial Sequence
  chemically synthesized
gaaaatggctgagttaaagg

SEQ ID NO: 53009 - DNA, 20 bp, Artificial Sequence
  chemically synthesized
caagggaaaggtgataaagg

SEQ ID NO: 53010 - DNA, 20 bp, Artificial Sequence
  chemically synthesized
gagagaggttcttgtttcaa

SEQ ID NO: 53011 - DNA, 20 bp, Artificial Sequence
  chemically synthesized
ggtatcttaaggcaaggaaa

SEQ ID NO: 53012 - DNA, 20 bp, Artificial Sequence
  chemically synthesized
ctctaactgatgctgagttt

SEQ ID NO: 53013 - DNA, 20 bp, Artificial Sequence
  chemically synthesized
ggggaggtgtttctgagttt

SEQ ID NO: 53014 - DNA, 20 bp, Artificial Sequence
  chemically synthesized
agtgcaaaggcacagcacat

SEQ ID NO: 53015 - DNA, 20 bp, Artificial Sequence
  chemically synthesized
atacagaatgcctgcatgct

SEQ ID NO: 53016 - DNA, 20 bp, Artificial Sequence
  chemically synthesized
tggtaggagttgaagtcttg

SEQ ID NO: 53017 - DNA, 20 bp, Artificial Sequence
  chemically synthesized
agtcttggaagaaagagtag

SEQ ID NO: 53018 - DNA, 20 bp, Artificial Sequence
  chemically synthesized
gcctgctgtctaatctttac

SEQ ID NO: 53019 - DNA, 20 bp, Artificial Sequence
  chemically synthesized
cagaggtcaggaatctgaac

SEQ ID NO: 53020 - DNA, 20 bp, Artificial Sequence
  chemically synthesized
acacaaaagtacaactgggg

SEQ ID NO: 53021 - DNA, 20 bp, Artificial Sequence
  chemically synthesized
atatgcaaaagtctgtttgg

SEQ ID NO: 53022 - DNA, 20 bp, Artificial Sequence
  chemically synthesized
tatgttcccatcaaggttaa

SEQ ID NO: 53023 - DNA, 20 bp, Artificial Sequence
  chemically synthesized
aaatattagactctttttcc

SEQ ID NO: 53024 - DNA, 20 bp, Artificial Sequence
  chemically synthesized
ttcatctcatcaggtgttac

SEQ ID NO: 53025 - DNA, 20 bp, Artificial Sequence
  chemically synthesized
gttacctagaatcagagtca

SEQ ID NO: 53026 - DNA, 20 bp, Artificial Sequence
  chemically synthesized
accatatcctggggaccagg

SEQ ID NO: 53027 - DNA, 20 bp, Artificial Sequence
  chemically synthesized
tcaggaatttattcttgcat

SEQ ID NO: 53028 - DNA, 20 bp, Artificial Sequence
  chemically synthesized
tatgcatataattctctcga

SEQ ID NO: 53029 - DNA, 20 bp, Artificial Sequence
  chemically synthesized
tttctgtcggatcaaattat

SEQ ID NO: 53030 - DNA, 20 bp, Artificial Sequence
  chemically synthesized
attattcagaaatccgaact

SEQ ID NO: 53031 - DNA, 20 bp, Artificial Sequence
  chemically synthesized
tgtccttgagctcaatgtct

SEQ ID NO: 53032 - DNA, 20 bp, Artificial Sequence
  chemically synthesized
gtactttttctctcagggga

SEQ ID NO: 53033 - DNA, 20 bp, Artificial Sequence
  chemically synthesized
caatgccctgcagctaagat

SEQ ID NO: 53034 - DNA, 20 bp, Artificial Sequence
  chemically synthesized
cttctaaggccaccagttac

SEQ ID NO: 53035 - DNA, 20 bp, Artificial Sequence
  chemically synthesized
agtaactccaccagtgcctg

SEQ ID NO: 53036 - DNA, 20 bp, Artificial Sequence
  chemically synthesized
ccttccttcctctcttgcag

SEQ ID NO: 53037 - DNA, 20 bp, Artificial Sequence
  chemically synthesized
ctggtctaaaattccatttc

SEQ ID NO: 53038 - DNA, 20 bp, Artificial Sequence
  chemically synthesized
gcatggggttcattttgaga

SEQ ID NO: 53039 - DNA, 20 bp, Artificial Sequence
  chemically synthesized
agtagaaaattggatgcagt

SEQ ID NO: 53040 - DNA, 20 bp, Artificial Sequence
  chemically synthesized
aaattggatgcagtggagaa

SEQ ID NO: 53041 - DNA, 20 bp, Artificial Sequence
  chemically synthesized
aatattgagtctgaaggcaa

SEQ ID NO: 53042 - DNA, 20 bp, Artificial Sequence
  chemically synthesized
tccctaagcgtcggccaact

SEQ ID NO: 53043 - DNA, 20 bp, Artificial Sequence
  chemically synthesized
aaagggacagagtacaaaag

SEQ ID NO: 53044 - DNA, 20 bp, Artificial Sequence
  chemically synthesized
atcaagtactttacaaggta

SEQ ID NO: 53045 - DNA, 20 bp, Artificial Sequence
  chemically synthesized
ttctcagggatgttccatgc

SEQ ID NO: 53046 - DNA, 20 bp, Artificial Sequence
  chemically synthesized
gggatgttccatgctgagaa

SEQ ID NO: 53047 - DNA, 20 bp, Artificial Sequence
  chemically synthesized
tcccatttgcttttgaaaga

SEQ ID NO: 53048 - DNA, 20 bp, Artificial Sequence
  chemically synthesized
gattgcagtaaagacaggca

SEQ ID NO: 53049 - DNA, 20 bp, Artificial Sequence
  chemically synthesized
gcagcacacatacacttaca

SEQ ID NO: 53050 - DNA, 20 bp, Artificial Sequence
  chemically synthesized
ctctccatgacttacctggt

SEQ ID NO: 53051 - DNA, 20 bp, Artificial Sequence
  chemically synthesized
attagaagtctttaaaattc

SEQ ID NO: 53052 - DNA, 20 bp, Artificial Sequence
  chemically synthesized
atacacaaacataggtccat

SEQ ID NO: 53053 - DNA, 20 bp, Artificial Sequence
  chemically synthesized
tgtgggtccaaccctgacag

SEQ ID NO: 53054 - DNA, 20 bp, Artificial Sequence
  chemically synthesized
tggtcagaccagttgatcct

SEQ ID NO: 53055 - DNA, 20 bp, Artificial Sequence
  chemically synthesized
cattggctaaagaggaaggt

SEQ ID NO: 53056 - DNA, 20 bp, Artificial Sequence
  chemically synthesized
agaatccatggaaaaggcag

SEQ ID NO: 53057 - DNA, 20 bp, Artificial Sequence
  chemically synthesized
tcctcatagaatgttcatca

SEQ ID NO: 53058 - DNA, 20 bp, Artificial Sequence
  chemically synthesized
tttagtcaggcataaagata

SEQ ID NO: 53059 - DNA, 20 bp, Artificial Sequence
  chemically synthesized
aacacttaggaacaaactgt

SEQ ID NO: 53060 - DNA, 20 bp, Artificial Sequence
  chemically synthesized
gactggtatcttaaggcaag

SEQ ID NO: 53061 - DNA, 20 bp, Artificial Sequence
  chemically synthesized
cagaatatgtccctaatatc

SEQ ID NO: 53062 - DNA, 20 bp, Artificial Sequence
  chemically synthesized
tcctaattggtaggaatcct

SEQ ID NO: 53063 - DNA, 20 bp, Artificial Sequence
  chemically synthesized
tgcctgcatgctctagaatc

SEQ ID NO: 53064 - DNA, 20 bp, Artificial Sequence
  chemically synthesized
aggtcaggaatctgaacaca

SEQ ID NO: 53065 - DNA, 20 bp, Artificial Sequence
  chemically synthesized
aataaacattatataatttt

SEQ ID NO: 53066 - DNA, 20 bp, Artificial Sequence
  chemically synthesized
aaccttggtttcctcatttc

SEQ ID NO: 53067 - DNA, 20 bp, Artificial Sequence
  chemically synthesized
ttaccacaaatttattggct

SEQ ID NO: 53068 - DNA, 20 bp, Artificial Sequence
  chemically synthesized
agtcaggagaaagcacctca

SEQ ID NO: 53069 - DNA, 20 bp, Artificial Sequence
  chemically synthesized
attcagaaatccgaactgta

SEQ ID NO: 53070 - DNA, 20 bp, Artificial Sequence
  chemically synthesized
tttttctctcaggggattag

SEQ ID NO: 53071 - DNA, 20 bp, Artificial Sequence
  chemically synthesized
cgtgatgccccacaagccac

SEQ ID NO: 53072 - DNA, 20 bp, Artificial Sequence
  chemically synthesized
agacacaaatgccaccatta

SEQ ID NO: 53073 - DNA, 20 bp, Artificial Sequence
  chemically synthesized
aaagagcatttcagaaaatt

SEQ ID NO: 53074 - DNA, 20 bp, Artificial Sequence
  chemically synthesized
gtaagaatttctatatggac

SEQ ID NO: 53075 - DNA, 20 bp, Artificial Sequence
  chemically synthesized
gaatcatttagggaagacaa

SEQ ID NO: 53076 - DNA, 20 bp, Artificial Sequence
  chemically synthesized
ctccacccttagctgtactt

SEQ ID NO: 53077 - DNA, 20 bp, Artificial Sequence
  chemically synthesized
tttgtgcgaatgcatgaaaa

SEQ ID NO: 53078 - DNA, 20 bp, Artificial Sequence
  chemically synthesized
caatgacacaatggaaccta

SEQ ID NO: 53079 - DNA, 20 bp, Artificial Sequence
  chemically synthesized
ccagaggaaaaaaaaagtta

SEQ ID NO: 53080 - DNA, 20 bp, Artificial Sequence
  chemically synthesized
ttgtgagttcttgtgcactg

SEQ ID NO: 53081 - DNA, 20 bp, Artificial Sequence
  chemically synthesized
gaaggtaatcagtggaaatt

SEQ ID NO: 53082 - DNA, 20 bp, Artificial Sequence
  chemically synthesized
gtaatcagtggaaatttgtc

SEQ ID NO: 53083 - DNA, 20 bp, Artificial Sequence
  chemically synthesized
tttgctctaacttaaatacc

SEQ ID NO: 53084 - DNA, 20 bp, Artificial Sequence
  chemically synthesized
ctgaagccatggcagaagtt

SEQ ID NO: 53085 - DNA, 20 bp, Artificial Sequence
  chemically synthesized
tggcagaagttcgtggattg

SEQ ID NO: 53086 - DNA, 20 bp, Artificial Sequence
  chemically synthesized
caatctctaaacataaattg

SEQ ID NO: 53087 - DNA, 20 bp, Artificial Sequence
  chemically synthesized
cacttccccagtcaatatcc

SEQ ID NO: 53088 - DNA, 20 bp, Artificial Sequence
  chemically synthesized
ctgcacaaattgtacagcat

SEQ ID NO: 53089 - DNA, 20 bp, Artificial Sequence
  chemically synthesized
gagaatacgagccaggaggt

SEQ ID NO: 53090 - DNA, 20 bp, Artificial Sequence
  chemically synthesized
cccagtctcccacagcgctc

SEQ ID NO: 53091 - DNA, 20 bp, Artificial Sequence
  chemically synthesized
aaaatccctaatacaaactt

SEQ ID NO: 53092 - DNA, 20 bp, Artificial Sequence
  chemically synthesized
aatacaaacttgctggtttt

SEQ ID NO: 53093 - DNA, 20 bp, Artificial Sequence
  chemically synthesized
tgtgatgcctcccccggatg

SEQ ID NO: 53094 - DNA, 20 bp, Artificial Sequence
  chemically synthesized
cctttatttctaaagttggc

SEQ ID NO: 53095 - DNA, 20 bp, Artificial Sequence
  chemically synthesized
acaaaaaatactaagttgta

SEQ ID NO: 53096 - DNA, 20 bp, Artificial Sequence
  chemically synthesized
atggcagagaccatccaaca

SEQ ID NO: 53097 - DNA, 20 bp, Artificial Sequence
  chemically synthesized
gaaccccatgctcaccatca

SEQ ID NO: 53098 - DNA, 20 bp, Artificial Sequence
  chemically synthesized
gccactgggcattacagtgc

SEQ ID NO: 53099 - DNA, 20 bp, Artificial Sequence
  chemically synthesized
ttcgctttgttcaactgccg

SEQ ID NO: 53100 - DNA, 20 bp, Artificial Sequence
  chemically synthesized
gaaggaaggctggagtacag

SEQ ID NO: 53101 - DNA, 20 bp, Artificial Sequence
  chemically synthesized
ttagaagagggttcagggtt

SEQ ID NO: 53102 - DNA, 20 bp, Artificial Sequence
  chemically synthesized
agtataaatggttctgaagc

SEQ ID NO: 53103 - DNA, 20 bp, Artificial Sequence
  chemically synthesized
tctgaagcacttgattcaga

SEQ ID NO: 53104 - DNA, 20 bp, Artificial Sequence
  chemically synthesized
agaaagtagaaagaacagct

SEQ ID NO: 53105 - DNA, 20 bp, Artificial Sequence
  chemically synthesized
ccaagaggtgtgagttctga

SEQ ID NO: 53106 - DNA, 20 bp, Artificial Sequence
  chemically synthesized
gctgagtcactatcaaatca

SEQ ID NO: 53107 - DNA, 20 bp, Artificial Sequence
  chemically synthesized
atcccctgagagaaaaagta

SEQ ID NO: 53108 - DNA, 20 bp, Artificial Sequence
  chemically synthesized
agaaaaagtacagagtttat

SEQ ID NO: 53109 - DNA, 20 bp, Artificial Sequence
  chemically synthesized
attaaggaagcagtattcac

SEQ ID NO: 53110 - DNA, 20 bp, Artificial Sequence
  chemically synthesized
gctcaaggacagaatctgaa

SEQ ID NO: 53111 - DNA, 20 bp, Artificial Sequence
  chemically synthesized
aaagtatactgtgtacaaaa

SEQ ID NO: 53112 - DNA, 20 bp, Artificial Sequence
  chemically synthesized
aaaaagctaacattaagcaa

SEQ ID NO: 53113 - DNA, 20 bp, Artificial Sequence
  chemically synthesized
aacattaagcaagtgtgttt

SEQ ID NO: 53114 - DNA, 20 bp, Artificial Sequence
  chemically synthesized
tgtttgtatgttttctacag

SEQ ID NO: 53115 - DNA, 20 bp, Artificial Sequence
  chemically synthesized
taatttgatccgacagaaaa

SEQ ID NO: 53116 - DNA, 20 bp, Artificial Sequence
  chemically synthesized
ttcagtaccatcagctcttt

SEQ ID NO: 53117 - DNA, 20 bp, Artificial Sequence
  chemically synthesized
tctttggcagcttatgagta

SEQ ID NO: 53118 - DNA, 20 bp, Artificial Sequence
  chemically synthesized
ttctcacctggtccccagga

SEQ ID NO: 53119 - DNA, 20 bp, Artificial Sequence
  chemically synthesized
ggatatggtttacttgtcag

SEQ ID NO: 53120 - DNA, 20 bp, Artificial Sequence
  chemically synthesized
cttgtcagagtagttttatg

SEQ ID NO: 53121 - DNA, 20 bp, Artificial Sequence
  chemically synthesized
tatgaggtgctttctcctga

SEQ ID NO: 53122 - DNA, 20 bp, Artificial Sequence
  chemically synthesized
accttgatgggaacatagaa

SEQ ID NO: 53123 - DNA, 20 bp, Artificial Sequence
  chemically synthesized
ggctcactctgaaagatatg

SEQ ID NO: 53124 - DNA, 20 bp, Artificial Sequence
  chemically synthesized
cattataagagggaggcaaa

SEQ ID NO: 53125 - DNA, 20 bp, Artificial Sequence
  chemically synthesized
ttataagaggagaaaatgtg

SEQ ID NO: 53126 - DNA, 20 bp, Artificial Sequence
  chemically synthesized
cctcgactttagcccagtga

SEQ ID NO: 53127 - DNA, 20 bp, Artificial Sequence
  chemically synthesized
acttcaagataatacatttg

SEQ ID NO: 53128 - DNA, 20 bp, Artificial Sequence
  chemically synthesized
ctaatcattagaatcactcc

SEQ ID NO: 53129 - DNA, 20 bp, Artificial Sequence
  chemically synthesized
cagacccagagccagtgaat

SEQ ID NO: 53130 - DNA, 20 bp, Artificial Sequence
  chemically synthesized
gcctgaatattaagcaagtt

SEQ ID NO: 53131 - DNA, 20 bp, Artificial Sequence
  chemically synthesized
ccagttgtacttttgtgtaa

SEQ ID NO: 53132 - DNA, 20 bp, Artificial Sequence
  chemically synthesized
tgtgtaaatgtgatttcatt

SEQ ID NO: 53133 - DNA, 20 bp, Artificial Sequence
  chemically synthesized
tgaagaaataaaagatgaga

SEQ ID NO: 53134 - DNA, 20 bp, Artificial Sequence
  chemically synthesized
aaacagttttaaaaattata

SEQ ID NO: 53135 - DNA, 20 bp, Artificial Sequence
  chemically synthesized
tttaaaaattatataatgtt

SEQ ID NO: 53136 - DNA, 20 bp, Artificial Sequence
  chemically synthesized
ttagaatgaatatgatgcaa

SEQ ID NO: 53137 - DNA, 20 bp, Artificial Sequence
  chemically synthesized
atgcaatctggttttctgtg

SEQ ID NO: 53138 - DNA, 20 bp, Artificial Sequence
  chemically synthesized
ctggagttaacctttctttg

SEQ ID NO: 53139 - DNA, 20 bp, Artificial Sequence
  chemically synthesized
tcctggtgctgtgcataata

SEQ ID NO: 53140 - DNA, 20 bp, Artificial Sequence
  chemically synthesized
tgcttaaacatgacagcagg

SEQ ID NO: 53141 - DNA, 20 bp, Artificial Sequence
  chemically synthesized
aatttatttataaatggtaa

SEQ ID NO: 53142 - DNA, 20 bp, Artificial Sequence
  chemically synthesized
atagaatgttcatcagaaaa

SEQ ID NO: 53143 - DNA, 20 bp, Artificial Sequence
  chemically synthesized
tccaaccaccgcctgggtat

SEQ ID NO: 53144 - DNA, 20 bp, Artificial Sequence
  chemically synthesized
atcaactcaaatttggctga

SEQ ID NO: 53145 - DNA, 20 bp, Artificial Sequence
  chemically synthesized
tcaaatttggctgacacagt

SEQ ID NO: 53146 - DNA, 20 bp, Artificial Sequence
  chemically synthesized
ttccaacttctctctgaaga

SEQ ID NO: 53147 - DNA, 20 bp, Artificial Sequence
  chemically synthesized
aagtcttttactccggtgtg

SEQ ID NO: 53148 - DNA, 20 bp, Artificial Sequence
  chemically synthesized
tactccggtgtggagtgttt

SEQ ID NO: 53149 - DNA, 20 bp, Artificial Sequence
  chemically synthesized
aggattcctaccaattagga

SEQ ID NO: 53150 - DNA, 20 bp, Artificial Sequence
  chemically synthesized
ttcctaccaattaggaaggt

SEQ ID NO: 53151 - DNA, 20 bp, Artificial Sequence
  chemically synthesized
agaaacacctccccttaact

SEQ ID NO: 53152 - DNA, 20 bp, Artificial Sequence
  chemically synthesized
ttacacatgcatgcgttgag

SEQ ID NO: 53153 - DNA, 20 bp, Artificial Sequence
  chemically synthesized
agcctggcctgggcactagg

SEQ ID NO: 53154 - DNA, 20 bp, Artificial Sequence
  chemically synthesized
ttttagatattagggacata

SEQ ID NO: 53155 - DNA, 20 bp, Artificial Sequence
  chemically synthesized
ggacttcgcattcaaacata

SEQ ID NO: 53156 - DNA, 20 bp, Artificial Sequence
  chemically synthesized
acaagaacctctctctatac

SEQ ID NO: 53157 - DNA, 20 bp, Artificial Sequence
  chemically synthesized
tctataccccagatttattt

SEQ ID NO: 53158 - DNA, 20 bp, Artificial Sequence
  chemically synthesized
tatgagttaattcatagcta

SEQ ID NO: 53159 - DNA, 20 bp, Artificial Sequence
  chemically synthesized
tgcgtattactaaaaagaag

SEQ ID NO: 53160 - DNA, 20 bp, Artificial Sequence
  chemically synthesized
aaggaatgatttcctagagg

SEQ ID NO: 53161 - DNA, 20 bp, Artificial Sequence
  chemically synthesized
aggtgcttcttctggccaag

SEQ ID NO: 53162 - DNA, 20 bp, Artificial Sequence
  chemically synthesized
aggggagctcttaggatgtc

SEQ ID NO: 53163 - DNA, 20 bp, Artificial Sequence
  chemically synthesized
aaaggcaagggatgaccaat

SEQ ID NO: 53164 - DNA, 20 bp, Artificial Sequence
  chemically synthesized
acagggaagcctctgaacac

SEQ ID NO: 53165 - DNA, 20 bp, Artificial Sequence
  chemically synthesized
aagccatagcaaacttgtca

SEQ ID NO: 53166 - DNA, 20 bp, Artificial Sequence
  chemically synthesized
gcccagaggatataaagcca

SEQ ID NO: 53167 - DNA, 20 bp, Artificial Sequence
  chemically synthesized
tctttggatattccggttcc

SEQ ID NO: 53168 - DNA, 20 bp, Artificial Sequence
  chemically synthesized
ttccggttcccactgcttca

SEQ ID NO: 53169 - DNA, 20 bp, Artificial Sequence
  chemically synthesized
atacacagggacaaagtcca

SEQ ID NO: 53170 - DNA, 20 bp, Artificial Sequence
  chemically synthesized
taaccggttacacaattgcc

SEQ ID NO: 53171 - DNA, 20 bp, Artificial Sequence
  chemically synthesized
acacaattgcctttggtttt

SEQ ID NO: 53172 - DNA, 20 bp, Artificial Sequence
  chemically synthesized
ggtttttacagtttgttcct

SEQ ID NO: 53173 - DNA, 20 bp, Artificial Sequence
  chemically synthesized
gtttgttcctaagtgtttcc

SEQ ID NO: 53174 - DNA, 20 bp, Artificial Sequence
  chemically synthesized
tggttcctcttcacctgagg

SEQ ID NO: 53175 - DNA, 20 bp, Artificial Sequence
  chemically synthesized
attatttattccagttaaaa

SEQ ID NO: 53176 - DNA, 20 bp, Artificial Sequence
  chemically synthesized
tagtgcctgctgtgtgtggt

SEQ ID NO: 53177 - DNA, 20 bp, Artificial Sequence
  chemically synthesized
ctgccacagttcctttcccc

SEQ ID NO: 53178 - DNA, 20 bp, Artificial Sequence
  chemically synthesized
gcaattgtgtaaccggttaa

SEQ ID NO: 53179 - DNA, 20 bp, Artificial Sequence
  chemically synthesized
tgagttagacaattctttca

SEQ ID NO: 53180 - DNA, 20 bp, Artificial Sequence
  chemically synthesized
gggaaccggaatatccaaag

SEQ ID NO: 53181 - DNA, 20 bp, Artificial Sequence
  chemically synthesized
tttgaaggagaaagaagcat

SEQ ID NO: 53182 - DNA, 20 bp, Artificial Sequence
  chemically synthesized
tggctttatatcctctgggc

SEQ ID NO: 53183 - DNA, 20 bp, Artificial Sequence
  chemically synthesized
taaaggtaagaaaccatctg

SEQ ID NO: 53184 - DNA, 20 bp, Artificial Sequence
  chemically synthesized
aaaccatctgacaagtttgc

SEQ ID NO: 53185 - DNA, 20 bp, Artificial Sequence
  chemically synthesized
cttcttcagccaaaatttat

SEQ ID NO: 53186 - DNA, 20 bp, Artificial Sequence
  chemically synthesized
tggttcaaacccctgtgttc

SEQ ID NO: 53187 - DNA, 20 bp, Artificial Sequence
  chemically synthesized
ctcccctccactacggacat

SEQ ID NO: 53188 - DNA, 20 bp, Artificial Sequence
  chemically synthesized
cacttccggtgaccagttag

SEQ ID NO: 53189 - DNA, 20 bp, Artificial Sequence
  chemically synthesized
tctggggtatagagagaggt

SEQ ID NO: 53190 - DNA, 20 bp, Artificial Sequence
  chemically synthesized
tcttgtttcaattagaaaag

SEQ ID NO: 53191 - DNA, 20 bp, Artificial Sequence
  chemically synthesized
aaaagtaatgcttggagaga

SEQ ID NO: 53192 - DNA, 20 bp, Artificial Sequence
  chemically synthesized
aaggtcactgccaatagatg

SEQ ID NO: 53193 - DNA, 20 bp, Artificial Sequence
  chemically synthesized
atgacttgattagaagcagg

SEQ ID NO: 53194 - DNA, 20 bp, Artificial Sequence
  chemically synthesized
aaccatgcctagtgcccagg

SEQ ID NO: 53195 - DNA, 20 bp, Artificial Sequence
  chemically synthesized
acagacatcttccctgaatg

SEQ ID NO: 53196 - DNA, 20 bp, Artificial Sequence
  chemically synthesized
ctaatgccctctaactgatg

SEQ ID NO: 53197 - DNA, 20 bp, Artificial Sequence
  chemically synthesized
agaatccatcagttaagggg

SEQ ID NO: 53198 - DNA, 20 bp, Artificial Sequence
  chemically synthesized
tcagttaaggggaggtgttt

SEQ ID NO: 53199 - DNA, 20 bp, Artificial Sequence
  chemically synthesized
tccacaccggagtaaaagac

SEQ ID NO: 53200 - DNA, 20 bp, Artificial Sequence
  chemically synthesized
tttgtgctagtgcatgacac

SEQ ID NO: 53201 - DNA, 20 bp, Artificial Sequence
  chemically synthesized
actgagatacccaggcggtg

SEQ ID NO: 53202 - DNA, 20 bp, Artificial Sequence
  chemically synthesized
gcggtggttggatttatgga

SEQ ID NO: 53203 - DNA, 20 bp, Artificial Sequence
  chemically synthesized
gaagaaagagtagatagaaa

SEQ ID NO: 53204 - DNA, 20 bp, Artificial Sequence
  chemically synthesized
tgtaaaatcctatcctgctg

SEQ ID NO: 53205 - DNA, 20 bp, Artificial Sequence
  chemically synthesized
attgcatgccagtctttgct

SEQ ID NO: 53206 - DNA, 20 bp, Artificial Sequence
  chemically synthesized
caggaatctgaacacagaaa

SEQ ID NO: 53207 - DNA, 20 bp, Artificial Sequence
  chemically synthesized
aaacattatataatttttaa

SEQ ID NO: 53208 - DNA, 20 bp, Artificial Sequence
  chemically synthesized
ataccctatgtatttgagta

SEQ ID NO: 53209 - DNA, 20 bp, Artificial Sequence
  chemically synthesized
ctatgtatttgagtaagttg

SEQ ID NO: 53210 - DNA, 20 bp, Artificial Sequence
  chemically synthesized
gttgcttagcttctcccaac

SEQ ID NO: 53211 - DNA, 20 bp, Artificial Sequence
  chemically synthesized
cctcatttctaaaacgaaga

SEQ ID NO: 53212 - DNA, 20 bp, Artificial Sequence
  chemically synthesized
tctgggccccaccaccaaat

SEQ ID NO: 53213 - DNA, 20 bp, Artificial Sequence
  chemically synthesized
tggctctgggtctgtatgta

SEQ ID NO: 53214 - DNA, 20 bp, Artificial Sequence
  chemically synthesized
ctgtatgtaacaagcttctg

SEQ ID NO: 53215 - DNA, 20 bp, Artificial Sequence
  chemically synthesized
acaagcttctggagtgattc

SEQ ID NO: 53216 - DNA, 20 bp, Artificial Sequence
  chemically synthesized
caggacctactattctacgt

SEQ ID NO: 53217 - DNA, 20 bp, Artificial Sequence
  chemically synthesized
taaaaaattaccacaaattt

SEQ ID NO: 53218 - DNA, 20 bp, Artificial Sequence
  chemically synthesized
gtggaggtcagaagtctgaa

SEQ ID NO: 53219 - DNA, 20 bp, Artificial Sequence
  chemically synthesized
taaagtcgaggtgtcagtgt

SEQ ID NO: 53220 - DNA, 20 bp, Artificial Sequence
  chemically synthesized
gtttcttctggagactctat

SEQ ID NO: 53221 - DNA, 20 bp, Artificial Sequence
  chemically synthesized
tctggagactctatgagaga

SEQ ID NO: 53222 - DNA, 20 bp, Artificial Sequence
  chemically synthesized
ttgtgttttcctgccttttc

SEQ ID NO: 53223 - DNA, 20 bp, Artificial Sequence
  chemically synthesized
tttcctgccttttccatgga

SEQ ID NO: 53224 - DNA, 20 bp, Artificial Sequence
  chemically synthesized
tctagaggctacccacattc

SEQ ID NO: 53225 - DNA, 20 bp, Artificial Sequence
  chemically synthesized
cgatcttcaaaaaaatgtat

SEQ ID NO: 53226 - DNA, 20 bp, Artificial Sequence
  chemically synthesized
cctccctcttataatgacac

SEQ ID NO: 53227 - DNA, 20 bp, Artificial Sequence
  chemically synthesized
ccttaattatatatgcaaaa

SEQ ID NO: 53228 - DNA, 20 bp, Artificial Sequence
  chemically synthesized
ggctagaaaagataatactc

SEQ ID NO: 53229 - DNA, 20 bp, Artificial Sequence
  chemically synthesized
acagaaaaaaaaaatgtagc

SEQ ID NO: 53230 - DNA, 20 bp, Artificial Sequence
  chemically synthesized
tgtagaaaacatacaaacac

SEQ ID NO: 53231 - DNA, 20 bp, Artificial Sequence
  chemically synthesized
tacaaacacacttgcttaat

SEQ ID NO: 53232 - DNA, 20 bp, Artificial Sequence
  chemically synthesized
gcactgaaccagctggaaat

SEQ ID NO: 53233 - DNA, 20 bp, Artificial Sequence
  chemically synthesized
gaaccagctggaaatgaatg

SEQ ID NO: 53234 - DNA, 20 bp, Artificial Sequence
  chemically synthesized
cgcagctgataaaagcagag

SEQ ID NO: 53235 - DNA, 20 bp, Artificial Sequence
  chemically synthesized
ctggagaaagcagctgtgaa

SEQ ID NO: 53236 - DNA, 20 bp, Artificial Sequence
  chemically synthesized
aactctgtactttttctctc

SEQ ID NO: 53237 - DNA, 20 bp, Artificial Sequence
  chemically synthesized
ctcaggggattagaaaaacc

SEQ ID NO: 53238 - DNA, 20 bp, Artificial Sequence
  chemically synthesized
aattgatttgatagtgactc

SEQ ID NO: 53239 - DNA, 20 bp, Artificial Sequence
  chemically synthesized
ctttagccaatgccctgcag

SEQ ID NO: 53240 - DNA, 20 bp, Artificial Sequence
  chemically synthesized
ccctgcagctaagattgaga

SEQ ID NO: 53241 - DNA, 20 bp, Artificial Sequence
  chemically synthesized
gattcagaactcacacctct

SEQ ID NO: 53242 - DNA, 20 bp, Artificial Sequence
  chemically synthesized
tttaaagcacagtctgaatc

SEQ ID NO: 53243 - DNA, 20 bp, Artificial Sequence
  chemically synthesized
gcgaaggcactgtaatgccc

SEQ ID NO: 53244 - DNA, 20 bp, Artificial Sequence
  chemically synthesized
atatcatcctaactgcatgc

SEQ ID NO: 53245 - DNA, 20 bp, Artificial Sequence
  chemically synthesized
aaagaataatttttcacttc

SEQ ID NO: 53246 - DNA, 20 bp, Artificial Sequence
  chemically synthesized
cctgatcatcactcacacat

SEQ ID NO: 53247 - DNA, 20 bp, Artificial Sequence
  chemically synthesized
cccacaagccacaaaaacca

SEQ ID NO: 53248 - DNA, 20 bp, Artificial Sequence
  chemically synthesized
aaaaaccagcaagtttgtat

SEQ ID NO: 53249 - DNA, 20 bp, Artificial Sequence
  chemically synthesized
ggcgaaattaaaattgctaa

SEQ ID NO: 53250 - DNA, 20 bp, Artificial Sequence
  chemically synthesized
gataacatcttatcaggaga

SEQ ID NO: 53251 - DNA, 20 bp, Artificial Sequence
  chemically synthesized
gacaggcgcacctggagggg

SEQ ID NO: 53252 - DNA, 20 bp, Artificial Sequence
  chemically synthesized
aattcagcgatatttctccc

SEQ ID NO: 53253 - DNA, 20 bp, Artificial Sequence
  chemically synthesized
ctgcctggctcaccagcagt

SEQ ID NO: 53254 - DNA, 20 bp, Artificial Sequence
  chemically synthesized
atatacatcctcctcagctg

SEQ ID NO: 53255 - DNA, 20 bp, Artificial Sequence
  chemically synthesized
cctcctcagctgacaggatt

SEQ ID NO: 53256 - DNA, 20 bp, Artificial Sequence
  chemically synthesized
gtccatgaaatctttacaat

SEQ ID NO: 53257 - DNA, 20 bp, Artificial Sequence
  chemically synthesized
aaatctttacaatttatgtt

SEQ ID NO: 53258 - DNA, 20 bp, Artificial Sequence
  chemically synthesized
cacaatccacgaacttctgc

SEQ ID NO: 53259 - DNA, 20 bp, Artificial Sequence
  chemically synthesized
gccatggcttcagctgatcc

SEQ ID NO: 53260 - DNA, 20 bp, Artificial Sequence
  chemically synthesized
gctgtgttcagatggttaca

SEQ ID NO: 53261 - DNA, 20 bp, Artificial Sequence
  chemically synthesized
acacatacacttacattaga

SEQ ID NO: 53262 - DNA, 20 bp, Artificial Sequence
  chemically synthesized
tcaatcaatcgacaaatttc

SEQ ID NO: 53263 - DNA, 20 bp, Artificial Sequence
  chemically synthesized
tgccatagtctcagccttca

SEQ ID NO: 53264 - DNA, 20 bp, Artificial Sequence
  chemically synthesized
gtgtgttgagtgttgcaaga

SEQ ID NO: 53265 - DNA, 20 bp, Artificial Sequence
  chemically synthesized
ccatagatgaggcagatagc

SEQ ID NO: 53266 - DNA, 20 bp, Artificial Sequence
  chemically synthesized
aggcttctgcctacagcaag

SEQ ID NO: 53267 - DNA, 20 bp, Artificial Sequence
  chemically synthesized
tacagcaaggctagtttgga

SEQ ID NO: 53268 - DNA, 20 bp, Artificial Sequence
  chemically synthesized
ggacccacacacctcttcat

SEQ ID NO: 53269 - DNA, 20 bp, Artificial Sequence
  chemically synthesized
atgctttttcttttttttcc

SEQ ID NO: 53270 - DNA, 20 bp, Artificial Sequence
  chemically synthesized
ctatgcaatatccagcactc

SEQ ID NO: 53271 - DNA, 20 bp, Artificial Sequence
  chemically synthesized
gaaaccatattgtcttccct

SEQ ID NO: 53272 - DNA, 20 bp, Artificial Sequence
  chemically synthesized
tttgtcacctacagtacatt

SEQ ID NO: 53273 - DNA, 22 bp, Artificial Sequence
  chemically synthesized
tccttctggcagggaacctggg

SEQ ID NO: 53274 - DNA, 22 bp, Artificial Sequence
  chemically synthesized
ctggcagggaacctgggcagcg

SEQ ID NO: 53275 - DNA, 22 bp, Artificial Sequence
  chemically synthesized
tggcagggaacctgggcagcga

SEQ ID NO: 53276 - DNA, 22 bp, Artificial Sequence
  chemically synthesized
gcagggaacctgggcagcgagg

SEQ ID NO: 53277 - DNA, 22 bp, Artificial Sequence
  chemically synthesized
ggcagcgaggatcctctgaaga

SEQ ID NO: 53278 - DNA, 22 bp, Artificial Sequence
  chemically synthesized
tgaagaacactcattcccaaat

SEQ ID NO: 53279 - DNA, 22 bp, Artificial Sequence
  chemically synthesized
aagaacactcattcccaaatcc

SEQ ID NO: 53280 - DNA, 22 bp, Artificial Sequence
  chemically synthesized
attcccaaatccagaaatgtac

SEQ ID NO: 53281 - DNA, 22 bp, Artificial Sequence
  chemically synthesized
ccaaatccagaaatgtactgta

SEQ ID NO: 53282 - DNA, 22 bp, Artificial Sequence
  chemically synthesized
taggtgacaaagacacaaatgc

SEQ ID NO: 53283 - DNA, 22 bp, Artificial Sequence
  chemically synthesized
gcaggatttaaagagcatttca

SEQ ID NO: 53284 - DNA, 22 bp, Artificial Sequence
  chemically synthesized
aaagagcatttcagaaaattgg

SEQ ID NO: 53285 - DNA, 22 bp, Artificial Sequence
  chemically synthesized
aagagcatttcagaaaattggc

SEQ ID NO: 53286 - DNA, 22 bp, Artificial Sequence
  chemically synthesized
cagaaaattggcagtttactaa

SEQ ID NO: 53287 - DNA, 22 bp, Artificial Sequence
  chemically synthesized
agaaaattggcagtttactaag

SEQ ID NO: 53288 - DNA, 22 bp, Artificial Sequence
  chemically synthesized
gcagtttactaaggtaagaatt

SEQ ID NO: 53289 - DNA, 22 bp, Artificial Sequence
  chemically synthesized
actaaggtaagaatttctatat

SEQ ID NO: 53290 - DNA, 22 bp, Artificial Sequence
  chemically synthesized
ctaaggtaagaatttctatatg

SEQ ID NO: 53291 - DNA, 22 bp, Artificial Sequence
  chemically synthesized
aggtaagaatttctatatggac

SEQ ID NO: 53292 - DNA, 22 bp, Artificial Sequence
  chemically synthesized
ctatatggacctatgtttgtgt

SEQ ID NO: 53293 - DNA, 22 bp, Artificial Sequence
  chemically synthesized
tatatggacctatgtttgtgta

SEQ ID NO: 53294 - DNA, 22 bp, Artificial Sequence
  chemically synthesized
tatggacctatgtttgtgtatg

SEQ ID NO: 53295 - DNA, 22 bp, Artificial Sequence
  chemically synthesized
tgtttgtgtatgatgttccaca

SEQ ID NO: 53296 - DNA, 22 bp, Artificial Sequence
  chemically synthesized
gtgtatgatgttccacatataa

SEQ ID NO: 53297 - DNA, 22 bp, Artificial Sequence
  chemically synthesized
tgtatgatgttccacatataat

SEQ ID NO: 53298 - DNA, 22 bp, Artificial Sequence
  chemically synthesized
cacatataatatctttactgtg

SEQ ID NO: 53299 - DNA, 22 bp, Artificial Sequence
  chemically synthesized
tactgtgtcttgacatatgaat

SEQ ID NO: 53300 - DNA, 22 bp, Artificial Sequence
  chemically synthesized
actgtgtcttgacatatgaatc

SEQ ID NO: 53301 - DNA, 22 bp, Artificial Sequence
  chemically synthesized
ctgtgtcttgacatatgaatca

SEQ ID NO: 53302 - DNA, 22 bp, Artificial Sequence
  chemically synthesized
tgtcttgacatatgaatcattt

SEQ ID NO: 53303 - DNA, 22 bp, Artificial Sequence
  chemically synthesized
gacatatgaatcatttagggaa

SEQ ID NO: 53304 - DNA, 22 bp, Artificial Sequence
  chemically synthesized
acatatgaatcatttagggaag

SEQ ID NO: 53305 - DNA, 22 bp, Artificial Sequence
  chemically synthesized
agggaagacaatatggtttctg

SEQ ID NO: 53306 - DNA, 22 bp, Artificial Sequence
  chemically synthesized
gggaagacaatatggtttctgt

SEQ ID NO: 53307 - DNA, 22 bp, Artificial Sequence
  chemically synthesized
ctgtgaattttaaagacttcta

SEQ ID NO: 53308 - DNA, 22 bp, Artificial Sequence
  chemically synthesized
tgtgaattttaaagacttctaa

SEQ ID NO: 53309 - DNA, 22 bp, Artificial Sequence
  chemically synthesized
tgaattttaaagacttctaatt

SEQ ID NO: 53310 - DNA, 22 bp, Artificial Sequence
  chemically synthesized
taaagacttctaattaatcaga

SEQ ID NO: 53311 - DNA, 22 bp, Artificial Sequence
  chemically synthesized
aaagacttctaattaatcagaa

SEQ ID NO: 53312 - DNA, 22 bp, Artificial Sequence
  chemically synthesized
aagacttctaattaatcagaag

SEQ ID NO: 53313 - DNA, 22 bp, Artificial Sequence
  chemically synthesized
ctaattaatcagaagagtgctg

SEQ ID NO: 53314 - DNA, 22 bp, Artificial Sequence
  chemically synthesized
taattaatcagaagagtgctgg

SEQ ID NO: 53315 - DNA, 22 bp, Artificial Sequence
  chemically synthesized
attaatcagaagagtgctggat

SEQ ID NO: 53316 - DNA, 22 bp, Artificial Sequence
  chemically synthesized
atcagaagagtgctggatattg

SEQ ID NO: 53317 - DNA, 22 bp, Artificial Sequence
  chemically synthesized
gatattgcatagacttctccac

SEQ ID NO: 53318 - DNA, 22 bp, Artificial Sequence
  chemically synthesized
catagacttctccacccttagc

SEQ ID NO: 53319 - DNA, 22 bp, Artificial Sequence
  chemically synthesized
ctccacccttagctgtacttag

SEQ ID NO: 53320 - DNA, 22 bp, Artificial Sequence
  chemically synthesized
tccacccttagctgtacttagc

SEQ ID NO: 53321 - DNA, 22 bp, Artificial Sequence
  chemically synthesized
cacccttagctgtacttagctg

SEQ ID NO: 53322 - DNA, 22 bp, Artificial Sequence
  chemically synthesized
agctgtacttagctgatttgtg

SEQ ID NO: 53323 - DNA, 22 bp, Artificial Sequence
  chemically synthesized
gctgtacttagctgatttgtgg

SEQ ID NO: 53324 - DNA, 22 bp, Artificial Sequence
  chemically synthesized
tacttagctgatttgtgggtct

SEQ ID NO: 53325 - DNA, 22 bp, Artificial Sequence
  chemically synthesized
agctgatttgtgggtctacact

SEQ ID NO: 53326 - DNA, 22 bp, Artificial Sequence
  chemically synthesized
gctgatttgtgggtctacactg

SEQ ID NO: 53327 - DNA, 22 bp, Artificial Sequence
  chemically synthesized
atttgtgggtctacactgtaac

SEQ ID NO: 53328 - DNA, 22 bp, Artificial Sequence
  chemically synthesized
gtgggtctacactgtaacctcc

SEQ ID NO: 53329 - DNA, 22 bp, Artificial Sequence
  chemically synthesized
tgggtctacactgtaacctccc

SEQ ID NO: 53330 - DNA, 22 bp, Artificial Sequence
  chemically synthesized
cactgtaacctccctgaacttg

SEQ ID NO: 53331 - DNA, 22 bp, Artificial Sequence
  chemically synthesized
taacctccctgaacttgagact

SEQ ID NO: 53332 - DNA, 22 bp, Artificial Sequence
  chemically synthesized
cctgaacttgagactccatttc

SEQ ID NO: 53333 - DNA, 22 bp, Artificial Sequence
  chemically synthesized
aacttgagactccatttccctt

SEQ ID NO: 53334 - DNA, 22 bp, Artificial Sequence
  chemically synthesized
gagactccatttccctttcaaa

SEQ ID NO: 53335 - DNA, 22 bp, Artificial Sequence
  chemically synthesized
agactccatttccctttcaaac

SEQ ID NO: 53336 - DNA, 22 bp, Artificial Sequence
  chemically synthesized
catttccctttcaaactctggg

SEQ ID NO: 53337 - DNA, 22 bp, Artificial Sequence
  chemically synthesized
ccctttcaaactctgggaaaaa

SEQ ID NO: 53338 - DNA, 22 bp, Artificial Sequence
  chemically synthesized
cctttcaaactctgggaaaaaa

SEQ ID NO: 53339 - DNA, 22 bp, Artificial Sequence
  chemically synthesized
tcaaactctgggaaaaaaaaga

SEQ ID NO: 53340 - DNA, 22 bp, Artificial Sequence
  chemically synthesized
caaactctgggaaaaaaaagaa

SEQ ID NO: 53341 - DNA, 22 bp, Artificial Sequence
  chemically synthesized
aaactctgggaaaaaaaagaaa

SEQ ID NO: 53342 - DNA, 22 bp, Artificial Sequence
  chemically synthesized
tgggaaaaaaaagaaaaagcat

SEQ ID NO: 53343 - DNA, 22 bp, Artificial Sequence
  chemically synthesized
ggaaaaaaaagaaaaagcatct

SEQ ID NO: 53344 - DNA, 22 bp, Artificial Sequence
  chemically synthesized
tgaagaggtgtgtgggtccaac

SEQ ID NO: 53345 - DNA, 22 bp, Artificial Sequence
  chemically synthesized
acagcaaaaccctctccaaact

SEQ ID NO: 53346 - DNA, 22 bp, Artificial Sequence
  chemically synthesized
tccaaactagccttgctgtagg

SEQ ID NO: 53347 - DNA, 22 bp, Artificial Sequence
  chemically synthesized
caaactagccttgctgtaggca

SEQ ID NO: 53348 - DNA, 22 bp, Artificial Sequence
  chemically synthesized
gccttgctgtaggcagaagcct

SEQ ID NO: 53349 - DNA, 22 bp, Artificial Sequence
  chemically synthesized
gctgtaggcagaagcctctgct

SEQ ID NO: 53350 - DNA, 22 bp, Artificial Sequence
  chemically synthesized
ctgtaggcagaagcctctgcta

SEQ ID NO: 53351 - DNA, 22 bp, Artificial Sequence
  chemically synthesized
taggcagaagcctctgctatct

SEQ ID NO: 53352 - DNA, 22 bp, Artificial Sequence
  chemically synthesized
tgctatctgcctcatctatgga

SEQ ID NO: 53353 - DNA, 22 bp, Artificial Sequence
  chemically synthesized
ctatctgcctcatctatggaac

SEQ ID NO: 53354 - DNA, 22 bp, Artificial Sequence
  chemically synthesized
tctgcctcatctatggaacaca

SEQ ID NO: 53355 - DNA, 22 bp, Artificial Sequence
  chemically synthesized
cctcatctatggaacacatcta

SEQ ID NO: 53356 - DNA, 22 bp, Artificial Sequence
  chemically synthesized
atctatggaacacatctatatt

SEQ ID NO: 53357 - DNA, 22 bp, Artificial Sequence
  chemically synthesized
tggaacacatctatatttgtgc

SEQ ID NO: 53358 - DNA, 22 bp, Artificial Sequence
  chemically synthesized
tatttgtgcgaatgcatgaaaa

SEQ ID NO: 53359 - DNA, 22 bp, Artificial Sequence
  chemically synthesized
gtgcgaatgcatgaaaataaag

SEQ ID NO: 53360 - DNA, 22 bp, Artificial Sequence
  chemically synthesized
tgcgaatgcatgaaaataaagt

SEQ ID NO: 53361 - DNA, 22 bp, Artificial Sequence
  chemically synthesized
aaagatatgggtggccttcagg

SEQ ID NO: 53362 - DNA, 22 bp, Artificial Sequence
  chemically synthesized
aagatatgggtggccttcagga

SEQ ID NO: 53363 - DNA, 22 bp, Artificial Sequence
  chemically synthesized
caggagacacgccagcccagca

SEQ ID NO: 53364 - DNA, 22 bp, Artificial Sequence
  chemically synthesized
aggagacacgccagcccagcat

SEQ ID NO: 53365 - DNA, 22 bp, Artificial Sequence
  chemically synthesized
ttcacaatgacacaatggaacc

SEQ ID NO: 53366 - DNA, 22 bp, Artificial Sequence
  chemically synthesized
tcacaatgacacaatggaacct

SEQ ID NO: 53367 - DNA, 22 bp, Artificial Sequence
  chemically synthesized
cacaatgacacaatggaaccta

SEQ ID NO: 53368 - DNA, 22 bp, Artificial Sequence
  chemically synthesized
acaatgacacaatggaacctac

SEQ ID NO: 53369 - DNA, 22 bp, Artificial Sequence
  chemically synthesized
ctctgattgccatctcttcact

SEQ ID NO: 53370 - DNA, 22 bp, Artificial Sequence
  chemically synthesized
tgattgccatctcttcacttta

SEQ ID NO: 53371 - DNA, 22 bp, Artificial Sequence
  chemically synthesized
attgccatctcttcactttaca

SEQ ID NO: 53372 - DNA, 22 bp, Artificial Sequence
  chemically synthesized
ccatctcttcactttacaccca

SEQ ID NO: 53373 - DNA, 22 bp, Artificial Sequence
  chemically synthesized
ttcactttacacccagaggaaa

SEQ ID NO: 53374 - DNA, 22 bp, Artificial Sequence
  chemically synthesized
cactttacacccagaggaaaaa

SEQ ID NO: 53375 - DNA, 22 bp, Artificial Sequence
  chemically synthesized
actttacacccagaggaaaaaa

SEQ ID NO: 53376 - DNA, 22 bp, Artificial Sequence
  chemically synthesized
tacacccagaggaaaaaaaaag

SEQ ID NO: 53377 - DNA, 22 bp, Artificial Sequence
  chemically synthesized
acacccagaggaaaaaaaaagt

SEQ ID NO: 53378 - DNA, 22 bp, Artificial Sequence
  chemically synthesized
cacccagaggaaaaaaaaagtt

SEQ ID NO: 53379 - DNA, 22 bp, Artificial Sequence
  chemically synthesized
aagggtttctcaaccaggtaag

SEQ ID NO: 53380 - DNA, 22 bp, Artificial Sequence
  chemically synthesized
ctcaaccaggtaagtcatggag

SEQ ID NO: 53381 - DNA, 22 bp, Artificial Sequence
  chemically synthesized
tcaaccaggtaagtcatggaga

SEQ ID NO: 53382 - DNA, 22 bp, Artificial Sequence
  chemically synthesized
aaccaggtaagtcatggagagc

SEQ ID NO: 53383 - DNA, 22 bp, Artificial Sequence
  chemically synthesized
aaacttactcttgcaacactca

SEQ ID NO: 53384 - DNA, 22 bp, Artificial Sequence
  chemically synthesized
actcttgcaacactcaacacac

SEQ ID NO: 53385 - DNA, 22 bp, Artificial Sequence
  chemically synthesized
ctcttgcaacactcaacacact

SEQ ID NO: 53386 - DNA, 22 bp, Artificial Sequence
  chemically synthesized
ttgcaacactcaacacacttgt

SEQ ID NO: 53387 - DNA, 22 bp, Artificial Sequence
  chemically synthesized
gcaacactcaacacacttgtga

SEQ ID NO: 53388 - DNA, 22 bp, Artificial Sequence
  chemically synthesized
caacactcaacacacttgtgag

SEQ ID NO: 53389 - DNA, 22 bp, Artificial Sequence
  chemically synthesized
aacacacttgtgagttcttgtg

SEQ ID NO: 53390 - DNA, 22 bp, Artificial Sequence
  chemically synthesized
gtgagttcttgtgcactgtctg

SEQ ID NO: 53391 - DNA, 22 bp, Artificial Sequence
  chemically synthesized
tgagttcttgtgcactgtctgg

SEQ ID NO: 53392 - DNA, 22 bp, Artificial Sequence
  chemically synthesized
ttgtgcactgtctggctttttt

SEQ ID NO: 53393 - DNA, 22 bp, Artificial Sequence
  chemically synthesized
gtgcactgtctggcttttttgc

SEQ ID NO: 53394 - DNA, 22 bp, Artificial Sequence
  chemically synthesized
tgcactgtctggcttttttgct

SEQ ID NO: 53395 - DNA, 22 bp, Artificial Sequence
  chemically synthesized
tctggcttttttgctagcctat

SEQ ID NO: 53396 - DNA, 22 bp, Artificial Sequence
  chemically synthesized
gcttttttgctagcctataagc

SEQ ID NO: 53397 - DNA, 22 bp, Artificial Sequence
  chemically synthesized
ttttgctagcctataagctgca

SEQ ID NO: 53398 - DNA, 22 bp, Artificial Sequence
  chemically synthesized
tttgctagcctataagctgcat

SEQ ID NO: 53399 - DNA, 22 bp, Artificial Sequence
  chemically synthesized
ttgctagcctataagctgcatg

SEQ ID NO: 53400 - DNA, 22 bp, Artificial Sequence
  chemically synthesized
tgctagcctataagctgcatga

SEQ ID NO: 53401 - DNA, 22 bp, Artificial Sequence
  chemically synthesized
gctagcctataagctgcatgaa

SEQ ID NO: 53402 - DNA, 22 bp, Artificial Sequence
  chemically synthesized
ctagcctataagctgcatgaag

SEQ ID NO: 53403 - DNA, 22 bp, Artificial Sequence
  chemically synthesized
gcctataagctgcatgaaggct

SEQ ID NO: 53404 - DNA, 22 bp, Artificial Sequence
  chemically synthesized
taagctgcatgaaggctgagac

SEQ ID NO: 53405 - DNA, 22 bp, Artificial Sequence
  chemically synthesized
catgaaggctgagactatggca

SEQ ID NO: 53406 - DNA, 22 bp, Artificial Sequence
  chemically synthesized
agactatggcagtcttggctca

SEQ ID NO: 53407 - DNA, 22 bp, Artificial Sequence
  chemically synthesized
tggcagtcttggctcatagaag

SEQ ID NO: 53408 - DNA, 22 bp, Artificial Sequence
  chemically synthesized
ggctcatagaaggtaatcagtg

SEQ ID NO: 53409 - DNA, 22 bp, Artificial Sequence
  chemically synthesized
gctcatagaaggtaatcagtgg

SEQ ID NO: 53410 - DNA, 22 bp, Artificial Sequence
  chemically synthesized
atagaaggtaatcagtggaaat

SEQ ID NO: 53411 - DNA, 22 bp, Artificial Sequence
  chemically synthesized
gtcgattgattgaatttttccc

SEQ ID NO: 53412 - DNA, 22 bp, Artificial Sequence
  chemically synthesized
tcgattgattgaatttttccct

SEQ ID NO: 53413 - DNA, 22 bp, Artificial Sequence
  chemically synthesized
attgaatttttcccttaaagcc

SEQ ID NO: 53414 - DNA, 22 bp, Artificial Sequence
  chemically synthesized
aatttttcccttaaagccaatt

SEQ ID NO: 53415 - DNA, 22 bp, Artificial Sequence
  chemically synthesized
ttcccttaaagccaattctaat

SEQ ID NO: 53416 - DNA, 22 bp, Artificial Sequence
  chemically synthesized
tcccttaaagccaattctaatg

SEQ ID NO: 53417 - DNA, 22 bp, Artificial Sequence
  chemically synthesized
cccttaaagccaattctaatgt

SEQ ID NO: 53418 - DNA, 22 bp, Artificial Sequence
  chemically synthesized
ccttaaagccaattctaatgta

SEQ ID NO: 53419 - DNA, 22 bp, Artificial Sequence
  chemically synthesized
aaagccaattctaatgtaagtg

SEQ ID NO: 53420 - DNA, 22 bp, Artificial Sequence
  chemically synthesized
aagccaattctaatgtaagtgt

SEQ ID NO: 53421 - DNA, 22 bp, Artificial Sequence
  chemically synthesized
taatgtaagtgtatgtgtgctg

SEQ ID NO: 53422 - DNA, 22 bp, Artificial Sequence
  chemically synthesized
atgtaagtgtatgtgtgctgct

SEQ ID NO: 53423 - DNA, 22 bp, Artificial Sequence
  chemically synthesized
ctgtaaatagggttagaaccct

SEQ ID NO: 53424 - DNA, 22 bp, Artificial Sequence
  chemically synthesized
taaatagggttagaaccctttt

SEQ ID NO: 53425 - DNA, 22 bp, Artificial Sequence
  chemically synthesized
gaaccctttttgctctaactta

SEQ ID NO: 53426 - DNA, 22 bp, Artificial Sequence
  chemically synthesized
tttgctctaacttaaataccaa

SEQ ID NO: 53427 - DNA, 22 bp, Artificial Sequence
  chemically synthesized
ttgctctaacttaaataccaat

SEQ ID NO: 53428 - DNA, 22 bp, Artificial Sequence
  chemically synthesized
tgctctaacttaaataccaatt

SEQ ID NO: 53429 - DNA, 22 bp, Artificial Sequence
  chemically synthesized
gctctaacttaaataccaattg

SEQ ID NO: 53430 - DNA, 22 bp, Artificial Sequence
  chemically synthesized
ctctaacttaaataccaattga

SEQ ID NO: 53431 - DNA, 22 bp, Artificial Sequence
  chemically synthesized
taacttaaataccaattgattt

SEQ ID NO: 53432 - DNA, 22 bp, Artificial Sequence
  chemically synthesized
acttaaataccaattgatttta

SEQ ID NO: 53433 - DNA, 22 bp, Artificial Sequence
  chemically synthesized
aaataccaattgattttagccc

SEQ ID NO: 53434 - DNA, 22 bp, Artificial Sequence
  chemically synthesized
aataccaattgattttagccca

SEQ ID NO: 53435 - DNA, 22 bp, Artificial Sequence
  chemically synthesized
attttagcccaggataatgaaa

SEQ ID NO: 53436 - DNA, 22 bp, Artificial Sequence
  chemically synthesized
tagcccaggataatgaaaatgc

SEQ ID NO: 53437 - DNA, 22 bp, Artificial Sequence
  chemically synthesized
agcccaggataatgaaaatgca

SEQ ID NO: 53438 - DNA, 22 bp, Artificial Sequence
  chemically synthesized
gcccaggataatgaaaatgcag

SEQ ID NO: 53439 - DNA, 22 bp, Artificial Sequence
  chemically synthesized
gctcagcaagcgaaatgtaacc

SEQ ID NO: 53440 - DNA, 22 bp, Artificial Sequence
  chemically synthesized
ctcagcaagcgaaatgtaacca

SEQ ID NO: 53441 - DNA, 22 bp, Artificial Sequence
  chemically synthesized
agcaagcgaaatgtaaccatct

SEQ ID NO: 53442 - DNA, 22 bp, Artificial Sequence
  chemically synthesized
aacacagctccttaagagatat

SEQ ID NO: 53443 - DNA, 22 bp, Artificial Sequence
  chemically synthesized
cttaagagatataagaagggtg

SEQ ID NO: 53444 - DNA, 22 bp, Artificial Sequence
  chemically synthesized
aagagatataagaagggtggaa

SEQ ID NO: 53445 - DNA, 22 bp, Artificial Sequence
  chemically synthesized
agagatataagaagggtggaag

SEQ ID NO: 53446 - DNA, 22 bp, Artificial Sequence
  chemically synthesized
cagagttctcagttgttgcggg

SEQ ID NO: 53447 - DNA, 22 bp, Artificial Sequence
  chemically synthesized
tcagttgttgcgggaagtctgg

SEQ ID NO: 53448 - DNA, 22 bp, Artificial Sequence
  chemically synthesized
agttgttgcgggaagtctggga

SEQ ID NO: 53449 - DNA, 22 bp, Artificial Sequence
  chemically synthesized
ttgcgggaagtctgggactcca

SEQ ID NO: 53450 - DNA, 22 bp, Artificial Sequence
  chemically synthesized
cgggaagtctgggactccaaac

SEQ ID NO: 53451 - DNA, 22 bp, Artificial Sequence
  chemically synthesized
ggactccaaacggagggatcag

SEQ ID NO: 53452 - DNA, 22 bp, Artificial Sequence
  chemically synthesized
caaacggagggatcagctgaag

SEQ ID NO: 53453 - DNA, 22 bp, Artificial Sequence
  chemically synthesized
aagccatggcagaagttcgtgg

SEQ ID NO: 53454 - DNA, 22 bp, Artificial Sequence
  chemically synthesized
gtggattgtgaagatttcatgg

SEQ ID NO: 53455 - DNA, 22 bp, Artificial Sequence
  chemically synthesized
tgaagatttcatggacatttat

SEQ ID NO: 53456 - DNA, 22 bp, Artificial Sequence
  chemically synthesized
catggacatttattagttcccc

SEQ ID NO: 53457 - DNA, 22 bp, Artificial Sequence
  chemically synthesized
atggacatttattagttcccca

SEQ ID NO: 53458 - DNA, 22 bp, Artificial Sequence
  chemically synthesized
attagttccccaaattaatact

SEQ ID NO: 53459 - DNA, 22 bp, Artificial Sequence
  chemically synthesized
ttagttccccaaattaatactt

SEQ ID NO: 53460 - DNA, 22 bp, Artificial Sequence
  chemically synthesized
gttccccaaattaatacttttg

SEQ ID NO: 53461 - DNA, 22 bp, Artificial Sequence
  chemically synthesized
cccaaattaatacttttgtaat

SEQ ID NO: 53462 - DNA, 22 bp, Artificial Sequence
  chemically synthesized
atacttttgtaatttcttatgc

SEQ ID NO: 53463 - DNA, 22 bp, Artificial Sequence
  chemically synthesized
ttgtaatttcttatgcctgtct

SEQ ID NO: 53464 - DNA, 22 bp, Artificial Sequence
  chemically synthesized
tgtaatttcttatgcctgtctt

SEQ ID NO: 53465 - DNA, 22 bp, Artificial Sequence
  chemically synthesized
gtaatttcttatgcctgtcttt

SEQ ID NO: 53466 - DNA, 22 bp, Artificial Sequence
  chemically synthesized
taatttcttatgcctgtcttta

SEQ ID NO: 53467 - DNA, 22 bp, Artificial Sequence
  chemically synthesized
cttatgcctgtctttactgcaa

SEQ ID NO: 53468 - DNA, 22 bp, Artificial Sequence
  chemically synthesized
ttatgcctgtctttactgcaat

SEQ ID NO: 53469 - DNA, 22 bp, Artificial Sequence
  chemically synthesized
atgcctgtctttactgcaatct

SEQ ID NO: 53470 - DNA, 22 bp, Artificial Sequence
  chemically synthesized
tgcctgtctttactgcaatctc

SEQ ID NO: 53471 - DNA, 22 bp, Artificial Sequence
  chemically synthesized
tctttactgcaatctctaaaca

SEQ ID NO: 53472 - DNA, 22 bp, Artificial Sequence
  chemically synthesized
tactgcaatctctaaacataaa

SEQ ID NO: 53473 - DNA, 22 bp, Artificial Sequence
  chemically synthesized
actgcaatctctaaacataaat

SEQ ID NO: 53474 - DNA, 22 bp, Artificial Sequence
  chemically synthesized
ctgcaatctctaaacataaatt

SEQ ID NO: 53475 - DNA, 22 bp, Artificial Sequence
  chemically synthesized
caatctctaaacataaattgta

SEQ ID NO: 53476 - DNA, 22 bp, Artificial Sequence
  chemically synthesized
taaacataaattgtaaagattt

SEQ ID NO: 53477 - DNA, 22 bp, Artificial Sequence
  chemically synthesized
aacataaattgtaaagatttca

SEQ ID NO: 53478 - DNA, 22 bp, Artificial Sequence
  chemically synthesized
taaagatttcatggacacttat

SEQ ID NO: 53479 - DNA, 22 bp, Artificial Sequence
  chemically synthesized
catggacacttatcacttcccc

SEQ ID NO: 53480 - DNA, 22 bp, Artificial Sequence
  chemically synthesized
atggacacttatcacttcccca

SEQ ID NO: 53481 - DNA, 22 bp, Artificial Sequence
  chemically synthesized
atcacttccccagtcaatatcc

SEQ ID NO: 53482 - DNA, 22 bp, Artificial Sequence
  chemically synthesized
tcacttccccagtcaatatcct

SEQ ID NO: 53483 - DNA, 22 bp, Artificial Sequence
  chemically synthesized
ccccagtcaatatccttgtgat

SEQ ID NO: 53484 - DNA, 22 bp, Artificial Sequence
  chemically synthesized
cccagtcaatatccttgtgatt

SEQ ID NO: 53485 - DNA, 22 bp, Artificial Sequence
  chemically synthesized
gtgatttatgcctgtctttact

SEQ ID NO: 53486 - DNA, 22 bp, Artificial Sequence
  chemically synthesized
tgatttatgcctgtctttactt

SEQ ID NO: 53487 - DNA, 22 bp, Artificial Sequence
  chemically synthesized
atgcctgtctttactttaatct

SEQ ID NO: 53488 - DNA, 22 bp, Artificial Sequence
  chemically synthesized
tgcctgtctttactttaatctc

SEQ ID NO: 53489 - DNA, 22 bp, Artificial Sequence
  chemically synthesized
tctttactttaatctcttaatc

SEQ ID NO: 53490 - DNA, 22 bp, Artificial Sequence
  chemically synthesized
tactttaatctcttaatcctgt

SEQ ID NO: 53491 - DNA, 22 bp, Artificial Sequence
  chemically synthesized
actttaatctcttaatcctgtc

SEQ ID NO: 53492 - DNA, 22 bp, Artificial Sequence
  chemically synthesized
ctttaatctcttaatcctgtca

SEQ ID NO: 53493 - DNA, 22 bp, Artificial Sequence
  chemically synthesized
taatctcttaatcctgtcagct

SEQ ID NO: 53494 - DNA, 22 bp, Artificial Sequence
  chemically synthesized
aatctcttaatcctgtcagctg

SEQ ID NO: 53495 - DNA, 22 bp, Artificial Sequence
  chemically synthesized
atctcttaatcctgtcagctga

SEQ ID NO: 53496 - DNA, 22 bp, Artificial Sequence
  chemically synthesized
ttaatcctgtcagctgaggagg

SEQ ID NO: 53497 - DNA, 22 bp, Artificial Sequence
  chemically synthesized
aatcctgtcagctgaggaggat

SEQ ID NO: 53498 - DNA, 22 bp, Artificial Sequence
  chemically synthesized
atcctgtcagctgaggaggatg

SEQ ID NO: 53499 - DNA, 22 bp, Artificial Sequence
  chemically synthesized
tcagctgaggaggatgtatatt

SEQ ID NO: 53500 - DNA, 22 bp, Artificial Sequence
  chemically synthesized
aggaggatgtatattgcctcag

SEQ ID NO: 53501 - DNA, 22 bp, Artificial Sequence
  chemically synthesized
cctcaggaccctgtaataattg

SEQ ID NO: 53502 - DNA, 22 bp, Artificial Sequence
  chemically synthesized
aggaccctgtaataattgcatt

SEQ ID NO: 53503 - DNA, 22 bp, Artificial Sequence
  chemically synthesized
taataattgcattaactgcaca

SEQ ID NO: 53504 - DNA, 22 bp, Artificial Sequence
  chemically synthesized
cattaactgcacaaattgtaca

SEQ ID NO: 53505 - DNA, 22 bp, Artificial Sequence
  chemically synthesized
actgcacaaattgtacagcatg

SEQ ID NO: 53506 - DNA, 22 bp, Artificial Sequence
  chemically synthesized
cacaaattgtacagcatgtgtg

SEQ ID NO: 53507 - DNA, 22 bp, Artificial Sequence
  chemically synthesized
tacagcatgtgtgtttgagcaa

SEQ ID NO: 53508 - DNA, 22 bp, Artificial Sequence
  chemically synthesized
gagcaacatgaaatgtggacac

SEQ ID NO: 53509 - DNA, 22 bp, Artificial Sequence
  chemically synthesized
agcaacatgaaatgtggacacc

SEQ ID NO: 53510 - DNA, 22 bp, Artificial Sequence
  chemically synthesized
gaaaaaagaacaggataacagc

SEQ ID NO: 53511 - DNA, 22 bp, Artificial Sequence
  chemically synthesized
aaaaaagaacaggataacagca

SEQ ID NO: 53512 - DNA, 22 bp, Artificial Sequence
  chemically synthesized
ttcagggaataagagagataac

SEQ ID NO: 53513 - DNA, 22 bp, Artificial Sequence
  chemically synthesized
agggaataagagagataacctt

SEQ ID NO: 53514 - DNA, 22 bp, Artificial Sequence
  chemically synthesized
aaactctgactgctggtgagcc

SEQ ID NO: 53515 - DNA, 22 bp, Artificial Sequence
  chemically synthesized
aactctgactgctggtgagcca

SEQ ID NO: 53516 - DNA, 22 bp, Artificial Sequence
  chemically synthesized
tgactgctggtgagccaggcag

SEQ ID NO: 53517 - DNA, 22 bp, Artificial Sequence
  chemically synthesized
actgctggtgagccaggcagaa

SEQ ID NO: 53518 - DNA, 22 bp, Artificial Sequence
  chemically synthesized
ctggtgagccaggcagaacaga

SEQ ID NO: 53519 - DNA, 22 bp, Artificial Sequence
  chemically synthesized
gtgagccaggcagaacagagcc

SEQ ID NO: 53520 - DNA, 22 bp, Artificial Sequence
  chemically synthesized
ctcttctttcaaaagcaaatgg

SEQ ID NO: 53521 - DNA, 22 bp, Artificial Sequence
  chemically synthesized
tcttctttcaaaagcaaatggg

SEQ ID NO: 53522 - DNA, 22 bp, Artificial Sequence
  chemically synthesized
ttctttcaaaagcaaatgggag

SEQ ID NO: 53523 - DNA, 22 bp, Artificial Sequence
  chemically synthesized
ctttcaaaagcaaatgggagaa

SEQ ID NO: 53524 - DNA, 22 bp, Artificial Sequence
  chemically synthesized
tttcaaaagcaaatgggagaaa

SEQ ID NO: 53525 - DNA, 22 bp, Artificial Sequence
  chemically synthesized
tcaaaagcaaatgggagaaata

SEQ ID NO: 53526 - DNA, 22 bp, Artificial Sequence
  chemically synthesized
caaaagcaaatgggagaaatat

SEQ ID NO: 53527 - DNA, 22 bp, Artificial Sequence
  chemically synthesized
aaaagcaaatgggagaaatatc

SEQ ID NO: 53528 - DNA, 22 bp, Artificial Sequence
  chemically synthesized
aattctttttctcagcatggaa

SEQ ID NO: 53529 - DNA, 22 bp, Artificial Sequence
  chemically synthesized
tttttctcagcatggaacatcc

SEQ ID NO: 53530 - DNA, 22 bp, Artificial Sequence
  chemically synthesized
tttctcagcatggaacatccct

SEQ ID NO: 53531 - DNA, 22 bp, Artificial Sequence
  chemically synthesized
ttctcagcatggaacatccctg

SEQ ID NO: 53532 - DNA, 22 bp, Artificial Sequence
  chemically synthesized
tctcagcatggaacatccctga

SEQ ID NO: 53533 - DNA, 22 bp, Artificial Sequence
  chemically synthesized
ctcagcatggaacatccctgag

SEQ ID NO: 53534 - DNA, 22 bp, Artificial Sequence
  chemically synthesized
tcagcatggaacatccctgaga

SEQ ID NO: 53535 - DNA, 22 bp, Artificial Sequence
  chemically synthesized
agcatggaacatccctgagaaa

SEQ ID NO: 53536 - DNA, 22 bp, Artificial Sequence
  chemically synthesized
agaaagagaatacgagccagga

SEQ ID NO: 53537 - DNA, 22 bp, Artificial Sequence
  chemically synthesized
ataaacagcccccctccaggtg

SEQ ID NO: 53538 - DNA, 22 bp, Artificial Sequence
  chemically synthesized
taaacagcccccctccaggtgc

SEQ ID NO: 53539 - DNA, 22 bp, Artificial Sequence
  chemically synthesized
caggtgcgcctgtctcttatgg

SEQ ID NO: 53540 - DNA, 22 bp, Artificial Sequence
  chemically synthesized
tctcttatggtcgagactgcag

SEQ ID NO: 53541 - DNA, 22 bp, Artificial Sequence
  chemically synthesized
ttatggtcgagactgcaggggt

SEQ ID NO: 53542 - DNA, 22 bp, Artificial Sequence
  chemically synthesized
atggtcgagactgcaggggtga

SEQ ID NO: 53543 - DNA, 22 bp, Artificial Sequence
  chemically synthesized
tggtcgagactgcaggggtgaa

SEQ ID NO: 53544 - DNA, 22 bp, Artificial Sequence
  chemically synthesized
caggggtgaaatagaccccagt

SEQ ID NO: 53545 - DNA, 22 bp, Artificial Sequence
  chemically synthesized
ccacagcgctcccaggcttatt

SEQ ID NO: 53546 - DNA, 22 bp, Artificial Sequence
  chemically synthesized
ccaggcttattaggaagaggaa

SEQ ID NO: 53547 - DNA, 22 bp, Artificial Sequence
  chemically synthesized
attaggaagaggaaattcccgc

SEQ ID NO: 53548 - DNA, 22 bp, Artificial Sequence
  chemically synthesized
ttaggaagaggaaattcccgcc

SEQ ID NO: 53549 - DNA, 22 bp, Artificial Sequence
  chemically synthesized
ggaagaggaaattcccgcctaa

SEQ ID NO: 53550 - DNA, 22 bp, Artificial Sequence
  chemically synthesized
ccgcctaataaattttggtcag

SEQ ID NO: 53551 - DNA, 22 bp, Artificial Sequence
  chemically synthesized
ataaattttggtcagaccagtt

SEQ ID NO: 53552 - DNA, 22 bp, Artificial Sequence
  chemically synthesized
tggtcagaccagttgatcctaa

SEQ ID NO: 53553 - DNA, 22 bp, Artificial Sequence
  chemically synthesized
ggtcagaccagttgatcctaaa

SEQ ID NO: 53554 - DNA, 22 bp, Artificial Sequence
  chemically synthesized
gtcagaccagttgatcctaaaa

SEQ ID NO: 53555 - DNA, 22 bp, Artificial Sequence
  chemically synthesized
atcctaaaaaccctgtctcctg

SEQ ID NO: 53556 - DNA, 22 bp, Artificial Sequence
  chemically synthesized
aaaaccctgtctcctgataaga

SEQ ID NO: 53557 - DNA, 22 bp, Artificial Sequence
  chemically synthesized
tctcctgataagatgttatcaa

SEQ ID NO: 53558 - DNA, 22 bp, Artificial Sequence
  chemically synthesized
ctgataagatgttatcaatgac

SEQ ID NO: 53559 - DNA, 22 bp, Artificial Sequence
  chemically synthesized
ataagatgttatcaatgacaat

SEQ ID NO: 53560 - DNA, 22 bp, Artificial Sequence
  chemically synthesized
tcaatgacaatggtgcccgaaa

SEQ ID NO: 53561 - DNA, 22 bp, Artificial Sequence
  chemically synthesized
cattagcaattttaatttcgcc

SEQ ID NO: 53562 - DNA, 22 bp, Artificial Sequence
  chemically synthesized
attagcaattttaatttcgcct

SEQ ID NO: 53563 - DNA, 22 bp, Artificial Sequence
  chemically synthesized
gcaattttaatttcgcctcggt

SEQ ID NO: 53564 - DNA, 22 bp, Artificial Sequence
  chemically synthesized
taatttcgcctcggtcctgtgg

SEQ ID NO: 53565 - DNA, 22 bp, Artificial Sequence
  chemically synthesized
aatttcgcctcggtcctgtggt

SEQ ID NO: 53566 - DNA, 22 bp, Artificial Sequence
  chemically synthesized
atttcgcctcggtcctgtggtc

SEQ ID NO: 53567 - DNA, 22 bp, Artificial Sequence
  chemically synthesized
cgcctcggtcctgtggtcctgt

SEQ ID NO: 53568 - DNA, 22 bp, Artificial Sequence
  chemically synthesized
gcctcggtcctgtggtcctgtg

SEQ ID NO: 53569 - DNA, 22 bp, Artificial Sequence
  chemically synthesized
ggtcctgtggtcctgtgatctc

SEQ ID NO: 53570 - DNA, 22 bp, Artificial Sequence
  chemically synthesized
tggtcctgtgatctcaccctgc

SEQ ID NO: 53571 - DNA, 22 bp, Artificial Sequence
  chemically synthesized
tgatctcaccctgcctccactt

SEQ ID NO: 53572 - DNA, 22 bp, Artificial Sequence
  chemically synthesized
accctgcctccacttgccttgt

SEQ ID NO: 53573 - DNA, 22 bp, Artificial Sequence
  chemically synthesized
cctccacttgccttgtgatatt

SEQ ID NO: 53574 - DNA, 22 bp, Artificial Sequence
  chemically synthesized
cacttgccttgtgatattctat

SEQ ID NO: 53575 - DNA, 22 bp, Artificial Sequence
  chemically synthesized
gccttgtgatattctattacct

SEQ ID NO: 53576 - DNA, 22 bp, Artificial Sequence
  chemically synthesized
ccttgtgatattctattacctt

SEQ ID NO: 53577 - DNA, 22 bp, Artificial Sequence
  chemically synthesized
gtgatattctattaccttgtaa

SEQ ID NO: 53578 - DNA, 22 bp, Artificial Sequence
  chemically synthesized
tgatattctattaccttgtaaa

SEQ ID NO: 53579 - DNA, 22 bp, Artificial Sequence
  chemically synthesized
tattaccttgtaaagtacttga

SEQ ID NO: 53580 - DNA, 22 bp, Artificial Sequence
  chemically synthesized
ttaccttgtaaagtacttgatg

SEQ ID NO: 53581 - DNA, 22 bp, Artificial Sequence
  chemically synthesized
ccttgtaaagtacttgatgtct

SEQ ID NO: 53582 - DNA, 22 bp, Artificial Sequence
  chemically synthesized
gtaaagtacttgatgtctgtga

SEQ ID NO: 53583 - DNA, 22 bp, Artificial Sequence
  chemically synthesized
taaagtacttgatgtctgtgac

SEQ ID NO: 53584 - DNA, 22 bp, Artificial Sequence
  chemically synthesized
gatgtctgtgacccacacctat

SEQ ID NO: 53585 - DNA, 22 bp, Artificial Sequence
  chemically synthesized
atgtctgtgacccacacctatt

SEQ ID NO: 53586 - DNA, 22 bp, Artificial Sequence
  chemically synthesized
tgacccacacctatttgcacac

SEQ ID NO: 53587 - DNA, 22 bp, Artificial Sequence
  chemically synthesized
tttgcacactgcctccccattt

SEQ ID NO: 53588 - DNA, 22 bp, Artificial Sequence
  chemically synthesized
gcacactgcctccccatttgaa

SEQ ID NO: 53589 - DNA, 22 bp, Artificial Sequence
  chemically synthesized
cacactgcctccccatttgaaa

SEQ ID NO: 53590 - DNA, 22 bp, Artificial Sequence
  chemically synthesized
cctccccatttgaaaatcccta

SEQ ID NO: 53591 - DNA, 22 bp, Artificial Sequence
  chemically synthesized
cccatttgaaaatccctaatac

SEQ ID NO: 53592 - DNA, 22 bp, Artificial Sequence
  chemically synthesized
gaaaatccctaatacaaacttg

SEQ ID NO: 53593 - DNA, 22 bp, Artificial Sequence
  chemically synthesized
aaaatccctaatacaaacttgc

SEQ ID NO: 53594 - DNA, 22 bp, Artificial Sequence
  chemically synthesized
atacaaacttgctggtttttgt

SEQ ID NO: 53595 - DNA, 22 bp, Artificial Sequence
  chemically synthesized
gctggtttttgtggcttgtggg

SEQ ID NO: 53596 - DNA, 22 bp, Artificial Sequence
  chemically synthesized
ctggtttttgtggcttgtgggg

SEQ ID NO: 53597 - DNA, 22 bp, Artificial Sequence
  chemically synthesized
gtttttgtggcttgtggggcat

SEQ ID NO: 53598 - DNA, 22 bp, Artificial Sequence
  chemically synthesized
ttgtggcttgtggggcatcacg

SEQ ID NO: 53599 - DNA, 22 bp, Artificial Sequence
  chemically synthesized
tgtggcttgtggggcatcacgg

SEQ ID NO: 53600 - DNA, 22 bp, Artificial Sequence
  chemically synthesized
gtggcttgtggggcatcacgga

SEQ ID NO: 53601 - DNA, 22 bp, Artificial Sequence
  chemically synthesized
tggcttgtggggcatcacggaa

SEQ ID NO: 53602 - DNA, 22 bp, Artificial Sequence
  chemically synthesized
gtggggcatcacggaacctacc

SEQ ID NO: 53603 - DNA, 22 bp, Artificial Sequence
  chemically synthesized
tggggcatcacggaacctaccg

SEQ ID NO: 53604 - DNA, 22 bp, Artificial Sequence
  chemically synthesized
ccgaaatgtgatgcctcccccg

SEQ ID NO: 53605 - DNA, 22 bp, Artificial Sequence
  chemically synthesized
ccccggatgcccggctttaaaa

SEQ ID NO: 53606 - DNA, 22 bp, Artificial Sequence
  chemically synthesized
taaaatttctctcttttgtact

SEQ ID NO: 53607 - DNA, 22 bp, Artificial Sequence
  chemically synthesized
aaaatttctctcttttgtactc

SEQ ID NO: 53608 - DNA, 22 bp, Artificial Sequence
  chemically synthesized
aaatttctctcttttgtactct

SEQ ID NO: 53609 - DNA, 22 bp, Artificial Sequence
  chemically synthesized
ctctcttttgtactctgtccct

SEQ ID NO: 53610 - DNA, 22 bp, Artificial Sequence
  chemically synthesized
tctcttttgtactctgtccctt

SEQ ID NO: 53611 - DNA, 22 bp, Artificial Sequence
  chemically synthesized
tcttttgtactctgtcccttta

SEQ ID NO: 53612 - DNA, 22 bp, Artificial Sequence
  chemically synthesized
ttttgtactctgtccctttatt

SEQ ID NO: 53613 - DNA, 22 bp, Artificial Sequence
  chemically synthesized
ttgtactctgtccctttatttc

SEQ ID NO: 53614 - DNA, 22 bp, Artificial Sequence
  chemically synthesized
tgtactctgtccctttatttct

SEQ ID NO: 53615 - DNA, 22 bp, Artificial Sequence
  chemically synthesized
gtactctgtccctttatttcta

SEQ ID NO: 53616 - DNA, 22 bp, Artificial Sequence
  chemically synthesized
tactctgtccctttatttctaa

SEQ ID NO: 53617 - DNA, 22 bp, Artificial Sequence
  chemically synthesized
tgtccctttatttctaaagttg

SEQ ID NO: 53618 - DNA, 22 bp, Artificial Sequence
  chemically synthesized
tccctttatttctaaagttggc

SEQ ID NO: 53619 - DNA, 22 bp, Artificial Sequence
  chemically synthesized
tatttctaaagttggccgacgc

SEQ ID NO: 53620 - DNA, 22 bp, Artificial Sequence
  chemically synthesized
atttctaaagttggccgacgct

SEQ ID NO: 53621 - DNA, 22 bp, Artificial Sequence
  chemically synthesized
tttctaaagttggccgacgctt

SEQ ID NO: 53622 - DNA, 22 bp, Artificial Sequence
  chemically synthesized
ctaaagttggccgacgcttagg

SEQ ID NO: 53623 - DNA, 22 bp, Artificial Sequence
  chemically synthesized
taaagttggccgacgcttaggg

SEQ ID NO: 53624 - DNA, 22 bp, Artificial Sequence
  chemically synthesized
aagttggccgacgcttagggaa

SEQ ID NO: 53625 - DNA, 22 bp, Artificial Sequence
  chemically synthesized
gccgacgcttagggaaaataga

SEQ ID NO: 53626 - DNA, 22 bp, Artificial Sequence
  chemically synthesized
agggaaaatagaaaagaaccta

SEQ ID NO: 53627 - DNA, 22 bp, Artificial Sequence
  chemically synthesized
gggaaaatagaaaagaacctac

SEQ ID NO: 53628 - DNA, 22 bp, Artificial Sequence
  chemically synthesized
cgtgaatattggggcaggttcc

SEQ ID NO: 53629 - DNA, 22 bp, Artificial Sequence
  chemically synthesized
gggcaggttccctgatactcag

SEQ ID NO: 53630 - DNA, 22 bp, Artificial Sequence
  chemically synthesized
cctgatactcagtggcgtggag

SEQ ID NO: 53631 - DNA, 22 bp, Artificial Sequence
  chemically synthesized
atactcagtggcgtggagatgt

SEQ ID NO: 53632 - DNA, 22 bp, Artificial Sequence
  chemically synthesized
agtggcgtggagatgtaacaag

SEQ ID NO: 53633 - DNA, 22 bp, Artificial Sequence
  chemically synthesized
gatgtgtgagtgatgatcaggc

SEQ ID NO: 53634 - DNA, 22 bp, Artificial Sequence
  chemically synthesized
tatttggaagaaatatcagatg

SEQ ID NO: 53635 - DNA, 22 bp, Artificial Sequence
  chemically synthesized
ggaagaaatatcagatgtgaat

SEQ ID NO: 53636 - DNA, 22 bp, Artificial Sequence
  chemically synthesized
gaagaaatatcagatgtgaatg

SEQ ID NO: 53637 - DNA, 22 bp, Artificial Sequence
  chemically synthesized
tgacctaggaagcaatggaagt

SEQ ID NO: 53638 - DNA, 22 bp, Artificial Sequence
  chemically synthesized
ggaagcaatggaagtgaaaaat

SEQ ID NO: 53639 - DNA, 22 bp, Artificial Sequence
  chemically synthesized
ttctttttgccttcagactcaa

SEQ ID NO: 53640 - DNA, 22 bp, Artificial Sequence
  chemically synthesized
tttttgccttcagactcaatat

SEQ ID NO: 53641 - DNA, 22 bp, Artificial Sequence
  chemically synthesized
tttgccttcagactcaatattt

SEQ ID NO: 53642 - DNA, 22 bp, Artificial Sequence
  chemically synthesized
ttgccttcagactcaatatttt

SEQ ID NO: 53643 - DNA, 22 bp, Artificial Sequence
  chemically synthesized
tgccttcagactcaatattttg

SEQ ID NO: 53644 - DNA, 22 bp, Artificial Sequence
  chemically synthesized
gccttcagactcaatattttgt

SEQ ID NO: 53645 - DNA, 22 bp, Artificial Sequence
  chemically synthesized
ccttcagactcaatattttgta

SEQ ID NO: 53646 - DNA, 22 bp, Artificial Sequence
  chemically synthesized
cagactcaatattttgtatatt

SEQ ID NO: 53647 - DNA, 22 bp, Artificial Sequence
  chemically synthesized
agactcaatattttgtatattt

SEQ ID NO: 53648 - DNA, 22 bp, Artificial Sequence
  chemically synthesized
aatattttgtatatttgaaaat

SEQ ID NO: 53649 - DNA, 22 bp, Artificial Sequence
  chemically synthesized
tgtatatttgaaaatttgtcaa

SEQ ID NO: 53650 - DNA, 22 bp, Artificial Sequence
  chemically synthesized
gtatatttgaaaatttgtcaac

SEQ ID NO: 53651 - DNA, 22 bp, Artificial Sequence
  chemically synthesized
tatatttgaaaatttgtcaaca

SEQ ID NO: 53652 - DNA, 22 bp, Artificial Sequence
  chemically synthesized
gaaaatttgtcaacacaaaaaa

SEQ ID NO: 53653 - DNA, 22 bp, Artificial Sequence
  chemically synthesized
aaaatttgtcaacacaaaaaat

SEQ ID NO: 53654 - DNA, 22 bp, Artificial Sequence
  chemically synthesized
gtcaacacaaaaaatactaagt

SEQ ID NO: 53655 - DNA, 22 bp, Artificial Sequence
  chemically synthesized
tcaacacaaaaaatactaagtt

SEQ ID NO: 53656 - DNA, 22 bp, Artificial Sequence
  chemically synthesized
agttgtatactgatttgttaaa

SEQ ID NO: 53657 - DNA, 22 bp, Artificial Sequence
  chemically synthesized
tatactgatttgttaaaagcag

SEQ ID NO: 53658 - DNA, 22 bp, Artificial Sequence
  chemically synthesized
atttgttaaaagcagcagcatg

SEQ ID NO: 53659 - DNA, 22 bp, Artificial Sequence
  chemically synthesized
gttaaaagcagcagcatgcagt

SEQ ID NO: 53660 - DNA, 22 bp, Artificial Sequence
  chemically synthesized
ttaaaagcagcagcatgcagtt

SEQ ID NO: 53661 - DNA, 22 bp, Artificial Sequence
  chemically synthesized
aaagcagcagcatgcagttagg

SEQ ID NO: 53662 - DNA, 22 bp, Artificial Sequence
  chemically synthesized
ggatgatatctttggggaaatg

SEQ ID NO: 53663 - DNA, 22 bp, Artificial Sequence
  chemically synthesized
tggggaaatggcagagaccatc

SEQ ID NO: 53664 - DNA, 22 bp, Artificial Sequence
  chemically synthesized
ggggaaatggcagagaccatcc

SEQ ID NO: 53665 - DNA, 22 bp, Artificial Sequence
  chemically synthesized
gggaaatggcagagaccatcca

SEQ ID NO: 53666 - DNA, 22 bp, Artificial Sequence
  chemically synthesized
tgattctccactgcatccaatt

SEQ ID NO: 53667 - DNA, 22 bp, Artificial Sequence
  chemically synthesized
attctccactgcatccaatttt

SEQ ID NO: 53668 - DNA, 22 bp, Artificial Sequence
  chemically synthesized
tccactgcatccaattttctac

SEQ ID NO: 53669 - DNA, 22 bp, Artificial Sequence
  chemically synthesized
cactgcatccaattttctactc

SEQ ID NO: 53670 - DNA, 22 bp, Artificial Sequence
  chemically synthesized
catccaattttctactctcaaa

SEQ ID NO: 53671 - DNA, 22 bp, Artificial Sequence
  chemically synthesized
tctactctcaaaatgaacccca

SEQ ID NO: 53672 - DNA, 22 bp, Artificial Sequence
  chemically synthesized
ctactctcaaaatgaaccccat

SEQ ID NO: 53673 - DNA, 22 bp, Artificial Sequence
  chemically synthesized
tactctcaaaatgaaccccatg

SEQ ID NO: 53674 - DNA, 22 bp, Artificial Sequence
  chemically synthesized
ctctcaaaatgaaccccatgct

SEQ ID NO: 53675 - DNA, 22 bp, Artificial Sequence
  chemically synthesized
tcaaaatgaaccccatgctcac

SEQ ID NO: 53676 - DNA, 22 bp, Artificial Sequence
  chemically synthesized
aaaatgaaccccatgctcacca

SEQ ID NO: 53677 - DNA, 22 bp, Artificial Sequence
  chemically synthesized
accatcaacgggattgaatttg

SEQ ID NO: 53678 - DNA, 22 bp, Artificial Sequence
  chemically synthesized
aatttgagctgctgagaattgg

SEQ ID NO: 53679 - DNA, 22 bp, Artificial Sequence
  chemically synthesized
gagctgctgagaattggtaata

SEQ ID NO: 53680 - DNA, 22 bp, Artificial Sequence
  chemically synthesized
agctgctgagaattggtaataa

SEQ ID NO: 53681 - DNA, 22 bp, Artificial Sequence
  chemically synthesized
ctgagaattggtaataacccca

SEQ ID NO: 53682 - DNA, 22 bp, Artificial Sequence
  chemically synthesized
agaattggtaataaccccaaat

SEQ ID NO: 53683 - DNA, 22 bp, Artificial Sequence
  chemically synthesized
gtaataaccccaaattatcttc

SEQ ID NO: 53684 - DNA, 22 bp, Artificial Sequence
  chemically synthesized
tcttcaattctgtgaaatggaa

SEQ ID NO: 53685 - DNA, 22 bp, Artificial Sequence
  chemically synthesized
caattctgtgaaatggaatttt

SEQ ID NO: 53686 - DNA, 22 bp, Artificial Sequence
  chemically synthesized
aattctgtgaaatggaatttta

SEQ ID NO: 53687 - DNA, 22 bp, Artificial Sequence
  chemically synthesized
tgtgaaatggaattttagacca

SEQ ID NO: 53688 - DNA, 22 bp, Artificial Sequence
  chemically synthesized
tgaaatggaattttagaccagc

SEQ ID NO: 53689 - DNA, 22 bp, Artificial Sequence
  chemically synthesized
tagaccagcctgtgactgaagc

SEQ ID NO: 53690 - DNA, 22 bp, Artificial Sequence
  chemically synthesized
agaccagcctgtgactgaagcc

SEQ ID NO: 53691 - DNA, 22 bp, Artificial Sequence
  chemically synthesized
gaccagcctgtgactgaagcca

SEQ ID NO: 53692 - DNA, 22 bp, Artificial Sequence
  chemically synthesized
tgactgaagccactgggcatta

SEQ ID NO: 53693 - DNA, 22 bp, Artificial Sequence
  chemically synthesized
aagccactgggcattacagtgc

SEQ ID NO: 53694 - DNA, 22 bp, Artificial Sequence
  chemically synthesized
ggcattacagtgccttcgcttt

SEQ ID NO: 53695 - DNA, 22 bp, Artificial Sequence
  chemically synthesized
cagtgccttcgctttgttcaac

SEQ ID NO: 53696 - DNA, 22 bp, Artificial Sequence
  chemically synthesized
cgctttgttcaactgccgcatt

SEQ ID NO: 53697 - DNA, 22 bp, Artificial Sequence
  chemically synthesized
gctttgttcaactgccgcattg

SEQ ID NO: 53698 - DNA, 22 bp, Artificial Sequence
  chemically synthesized
tgttcaactgccgcattgtttc

SEQ ID NO: 53699 - DNA, 22 bp, Artificial Sequence
  chemically synthesized
gttcaactgccgcattgtttct

SEQ ID NO: 53700 - DNA, 22 bp, Artificial Sequence
  chemically synthesized
ttcaactgccgcattgtttctc

SEQ ID NO: 53701 - DNA, 22 bp, Artificial Sequence
  chemically synthesized
aactgccgcattgtttctctct

SEQ ID NO: 53702 - DNA, 22 bp, Artificial Sequence
  chemically synthesized
ccgcattgtttctctctgcaag

SEQ ID NO: 53703 - DNA, 22 bp, Artificial Sequence
  chemically synthesized
tttctctctgcaagagaggaag

SEQ ID NO: 53704 - DNA, 22 bp, Artificial Sequence
  chemically synthesized
ctctctgcaagagaggaaggaa

SEQ ID NO: 53705 - DNA, 22 bp, Artificial Sequence
  chemically synthesized
tctctgcaagagaggaaggaag

SEQ ID NO: 53706 - DNA, 22 bp, Artificial Sequence
  chemically synthesized
tctgcaagagaggaaggaaggc

SEQ ID NO: 53707 - DNA, 22 bp, Artificial Sequence
  chemically synthesized
tgcaagagaggaaggaaggctg

SEQ ID NO: 53708 - DNA, 22 bp, Artificial Sequence
  chemically synthesized
caagagaggaaggaaggctgga

SEQ ID NO: 53709 - DNA, 22 bp, Artificial Sequence
  chemically synthesized
gagtacagctgagctttctggc

SEQ ID NO: 53710 - DNA, 22 bp, Artificial Sequence
  chemically synthesized
agctttctggcaggcactggtg

SEQ ID NO: 53711 - DNA, 22 bp, Artificial Sequence
  chemically synthesized
tctggcaggcactggtggagtt

SEQ ID NO: 53712 - DNA, 22 bp, Artificial Sequence
  chemically synthesized
ctggcaggcactggtggagtta

SEQ ID NO: 53713 - DNA, 22 bp, Artificial Sequence
  chemically synthesized
tggcaggcactggtggagttac

SEQ ID NO: 53714 - DNA, 22 bp, Artificial Sequence
  chemically synthesized
gcaggcactggtggagttactc

SEQ ID NO: 53715 - DNA, 22 bp, Artificial Sequence
  chemically synthesized
gtggagttactcattaaccttc

SEQ ID NO: 53716 - DNA, 22 bp, Artificial Sequence
  chemically synthesized
ctcattaaccttccccattctt

SEQ ID NO: 53717 - DNA, 22 bp, Artificial Sequence
  chemically synthesized
attaaccttccccattctttgt

SEQ ID NO: 53718 - DNA, 22 bp, Artificial Sequence
  chemically synthesized
accttccccattctttgtaact

SEQ ID NO: 53719 - DNA, 22 bp, Artificial Sequence
  chemically synthesized
ccccattctttgtaactggtgg

SEQ ID NO: 53720 - DNA, 22 bp, Artificial Sequence
  chemically synthesized
cccattctttgtaactggtggc

SEQ ID NO: 53721 - DNA, 22 bp, Artificial Sequence
  chemically synthesized
tttgtaactggtggccttagaa

SEQ ID NO: 53722 - DNA, 22 bp, Artificial Sequence
  chemically synthesized
tgtaactggtggccttagaaga

SEQ ID NO: 53723 - DNA, 22 bp, Artificial Sequence
  chemically synthesized
gtaactggtggccttagaagag

SEQ ID NO: 53724 - DNA, 22 bp, Artificial Sequence
  chemically synthesized
taactggtggccttagaagagg

SEQ ID NO: 53725 - DNA, 22 bp, Artificial Sequence
  chemically synthesized
gtggccttagaagagggttcag

SEQ ID NO: 53726 - DNA, 22 bp, Artificial Sequence
  chemically synthesized
agaagagggttcagggttatgt

SEQ ID NO: 53727 - DNA, 22 bp, Artificial Sequence
  chemically synthesized
gaagagggttcagggttatgtg

SEQ ID NO: 53728 - DNA, 22 bp, Artificial Sequence
  chemically synthesized
agggttatgtgtttggaacacg

SEQ ID NO: 53729 - DNA, 22 bp, Artificial Sequence
  chemically synthesized
tgtgtttggaacacgagttagt

SEQ ID NO: 53730 - DNA, 22 bp, Artificial Sequence
  chemically synthesized
ggaacacgagttagtataaatg

SEQ ID NO: 53731 - DNA, 22 bp, Artificial Sequence
  chemically synthesized
gaacacgagttagtataaatgg

SEQ ID NO: 53732 - DNA, 22 bp, Artificial Sequence
  chemically synthesized
gtataaatggttctgaagcact

SEQ ID NO: 53733 - DNA, 22 bp, Artificial Sequence
  chemically synthesized
tgaagcacttgattcagactgt

SEQ ID NO: 53734 - DNA, 22 bp, Artificial Sequence
  chemically synthesized
aagcacttgattcagactgtgc

SEQ ID NO: 53735 - DNA, 22 bp, Artificial Sequence
  chemically synthesized
gattcagactgtgctttaaaaa

SEQ ID NO: 53736 - DNA, 22 bp, Artificial Sequence
  chemically synthesized
attcagactgtgctttaaaaaa

SEQ ID NO: 53737 - DNA, 22 bp, Artificial Sequence
  chemically synthesized
agactgtgctttaaaaaatagg

SEQ ID NO: 53738 - DNA, 22 bp, Artificial Sequence
  chemically synthesized
tgctttaaaaaataggaaagaa

SEQ ID NO: 53739 - DNA, 22 bp, Artificial Sequence
  chemically synthesized
taaaaaataggaaagaaagtag

SEQ ID NO: 53740 - DNA, 22 bp, Artificial Sequence
  chemically synthesized
aaaaaataggaaagaaagtaga

SEQ ID NO: 53741 - DNA, 22 bp, Artificial Sequence
  chemically synthesized
aaaaataggaaagaaagtagaa

SEQ ID NO: 53742 - DNA, 22 bp, Artificial Sequence
  chemically synthesized
atggtttggaagggagccacca

SEQ ID NO: 53743 - DNA, 22 bp, Artificial Sequence
  chemically synthesized
ggaagggagccaccaagcacca

SEQ ID NO: 53744 - DNA, 22 bp, Artificial Sequence
  chemically synthesized
gaagggagccaccaagcaccaa

SEQ ID NO: 53745 - DNA, 22 bp, Artificial Sequence
  chemically synthesized
tgaatccgtttctcaatcttag

SEQ ID NO: 53746 - DNA, 22 bp, Artificial Sequence
  chemically synthesized
aatccgtttctcaatcttagct

SEQ ID NO: 53747 - DNA, 22 bp, Artificial Sequence
  chemically synthesized
ctcaatcttagctgcagggcat

SEQ ID NO: 53748 - DNA, 22 bp, Artificial Sequence
  chemically synthesized
tcaatcttagctgcagggcatt

SEQ ID NO: 53749 - DNA, 22 bp, Artificial Sequence
  chemically synthesized
aatcttagctgcagggcattgg

SEQ ID NO: 53750 - DNA, 22 bp, Artificial Sequence
  chemically synthesized
agctgcagggcattggctaaag

SEQ ID NO: 53751 - DNA, 22 bp, Artificial Sequence
  chemically synthesized
gctgcagggcattggctaaaga

SEQ ID NO: 53752 - DNA, 22 bp, Artificial Sequence
  chemically synthesized
cagggcattggctaaagaggaa

SEQ ID NO: 53753 - DNA, 22 bp, Artificial Sequence
  chemically synthesized
gctaaagaggaaggtgaaaact

SEQ ID NO: 53754 - DNA, 22 bp, Artificial Sequence
  chemically synthesized
aagaggaaggtgaaaactgctg

SEQ ID NO: 53755 - DNA, 22 bp, Artificial Sequence
  chemically synthesized
ctgagtcactatcaaatcaatt

SEQ ID NO: 53756 - DNA, 22 bp, Artificial Sequence
  chemically synthesized
agtcactatcaaatcaattggt

SEQ ID NO: 53757 - DNA, 22 bp, Artificial Sequence
  chemically synthesized
tcaaatcaattggtttttctaa

SEQ ID NO: 53758 - DNA, 22 bp, Artificial Sequence
  chemically synthesized
gtttttctaatcccctgagaga

SEQ ID NO: 53759 - DNA, 22 bp, Artificial Sequence
  chemically synthesized
ttctaatcccctgagagaaaaa

SEQ ID NO: 53760 - DNA, 22 bp, Artificial Sequence
  chemically synthesized
tctaatcccctgagagaaaaag

SEQ ID NO: 53761 - DNA, 22 bp, Artificial Sequence
  chemically synthesized
ctaatcccctgagagaaaaagt

SEQ ID NO: 53762 - DNA, 22 bp, Artificial Sequence
  chemically synthesized
taatcccctgagagaaaaagta

SEQ ID NO: 53763 - DNA, 22 bp, Artificial Sequence
  chemically synthesized
atcccctgagagaaaaagtaca

SEQ ID NO: 53764 - DNA, 22 bp, Artificial Sequence
  chemically synthesized
agagaaaaagtacagagtttat

SEQ ID NO: 53765 - DNA, 22 bp, Artificial Sequence
  chemically synthesized
attgcagctttaaaatgccatg

SEQ ID NO: 53766 - DNA, 22 bp, Artificial Sequence
  chemically synthesized
ttgcagctttaaaatgccatgc

SEQ ID NO: 53767 - DNA, 22 bp, Artificial Sequence
  chemically synthesized
cagctttaaaatgccatgcccc

SEQ ID NO: 53768 - DNA, 22 bp, Artificial Sequence
  chemically synthesized
taaaatgccatgcccctcacgg

SEQ ID NO: 53769 - DNA, 22 bp, Artificial Sequence
  chemically synthesized
aaaatgccatgcccctcacggc

SEQ ID NO: 53770 - DNA, 22 bp, Artificial Sequence
  chemically synthesized
aaatgccatgcccctcacggcc

SEQ ID NO: 53771 - DNA, 22 bp, Artificial Sequence
  chemically synthesized
acggccaaaggcatctgaatta

SEQ ID NO: 53772 - DNA, 22 bp, Artificial Sequence
  chemically synthesized
aattaaggaagcagtattcaca

SEQ ID NO: 53773 - DNA, 22 bp, Artificial Sequence
  chemically synthesized
aggaagcagtattcacagctgc

SEQ ID NO: 53774 - DNA, 22 bp, Artificial Sequence
  chemically synthesized
acagctgctttctccagacatt

SEQ ID NO: 53775 - DNA, 22 bp, Artificial Sequence
  chemically synthesized
ctttctccagacattgagctca

SEQ ID NO: 53776 - DNA, 22 bp, Artificial Sequence
  chemically synthesized
tctccagacattgagctcaagg

SEQ ID NO: 53777 - DNA, 22 bp, Artificial Sequence
  chemically synthesized
ctccagacattgagctcaagga

SEQ ID NO: 53778 - DNA, 22 bp, Artificial Sequence
  chemically synthesized
tccagacattgagctcaaggac

SEQ ID NO: 53779 - DNA, 22 bp, Artificial Sequence
  chemically synthesized
cagacattgagctcaaggacag

SEQ ID NO: 53780 - DNA, 22 bp, Artificial Sequence
  chemically synthesized
agctcaaggacagaatctgaac

SEQ ID NO: 53781 - DNA, 22 bp, Artificial Sequence
  chemically synthesized
aaggacagaatctgaactctgc

SEQ ID NO: 53782 - DNA, 22 bp, Artificial Sequence
  chemically synthesized
aactctgcttttatcagctgcg

SEQ ID NO: 53783 - DNA, 22 bp, Artificial Sequence
  chemically synthesized
tgcttttatcagctgcgaaaat

SEQ ID NO: 53784 - DNA, 22 bp, Artificial Sequence
  chemically synthesized
cttttatcagctgcgaaaatcc

SEQ ID NO: 53785 - DNA, 22 bp, Artificial Sequence
  chemically synthesized
ttatcagctgcgaaaatccaag

SEQ ID NO: 53786 - DNA, 22 bp, Artificial Sequence
  chemically synthesized
tatcagctgcgaaaatccaagc

SEQ ID NO: 53787 - DNA, 22 bp, Artificial Sequence
  chemically synthesized
atcagctgcgaaaatccaagca

SEQ ID NO: 53788 - DNA, 22 bp, Artificial Sequence
  chemically synthesized
tcagctgcgaaaatccaagcat

SEQ ID NO: 53789 - DNA, 22 bp, Artificial Sequence
  chemically synthesized
cgaaaatccaagcattcatttc

SEQ ID NO: 53790 - DNA, 22 bp, Artificial Sequence
  chemically synthesized
atttccagctggttcagtgcct

SEQ ID NO: 53791 - DNA, 22 bp, Artificial Sequence
  chemically synthesized
ccagctggttcagtgcctatgt

SEQ ID NO: 53792 - DNA, 22 bp, Artificial Sequence
  chemically synthesized
cagctggttcagtgcctatgta

SEQ ID NO: 53793 - DNA, 22 bp, Artificial Sequence
  chemically synthesized
gttcagtgcctatgtaaaagta

SEQ ID NO: 53794 - DNA, 22 bp, Artificial Sequence
  chemically synthesized
agtgcctatgtaaaagtatact

SEQ ID NO: 53795 - DNA, 22 bp, Artificial Sequence
  chemically synthesized
tgtaaaagtatactgtgtacaa

SEQ ID NO: 53796 - DNA, 22 bp, Artificial Sequence
  chemically synthesized
tgtacaaaaataagattaaaaa

SEQ ID NO: 53797 - DNA, 22 bp, Artificial Sequence
  chemically synthesized
aaaagctaacattaagcaagtg

SEQ ID NO: 53798 - DNA, 22 bp, Artificial Sequence
  chemically synthesized
acattaagcaagtgtgtttgta

SEQ ID NO: 53799 - DNA, 22 bp, Artificial Sequence
  chemically synthesized
agcaagtgtgtttgtatgtttt

SEQ ID NO: 53800 - DNA, 22 bp, Artificial Sequence
  chemically synthesized
gtatgttttctacagttcggat

SEQ ID NO: 53801 - DNA, 22 bp, Artificial Sequence
  chemically synthesized
tatgttttctacagttcggatt

SEQ ID NO: 53802 - DNA, 22 bp, Artificial Sequence
  chemically synthesized
tctacagttcggatttctgaat

SEQ ID NO: 53803 - DNA, 22 bp, Artificial Sequence
  chemically synthesized
ctacagttcggatttctgaata

SEQ ID NO: 53804 - DNA, 22 bp, Artificial Sequence
  chemically synthesized
tacagttcggatttctgaataa

SEQ ID NO: 53805 - DNA, 22 bp, Artificial Sequence
  chemically synthesized
cagttcggatttctgaataatt

SEQ ID NO: 53806 - DNA, 22 bp, Artificial Sequence
  chemically synthesized
ggatttctgaataatttgatcc

SEQ ID NO: 53807 - DNA, 22 bp, Artificial Sequence
  chemically synthesized
ctgaataatttgatccgacaga

SEQ ID NO: 53808 - DNA, 22 bp, Artificial Sequence
  chemically synthesized
tgaataatttgatccgacagaa

SEQ ID NO: 53809 - DNA, 22 bp, Artificial Sequence
  chemically synthesized
aataatttgatccgacagaaaa

SEQ ID NO: 53810 - DNA, 22 bp, Artificial Sequence
  chemically synthesized
gatccgacagaaaaatatgatt

SEQ ID NO: 53811 - DNA, 22 bp, Artificial Sequence
  chemically synthesized
atccgacagaaaaatatgattt

SEQ ID NO: 53812 - DNA, 22 bp, Artificial Sequence
  chemically synthesized
catttcttttcgagagaattat

SEQ ID NO: 53813 - DNA, 22 bp, Artificial Sequence
  chemically synthesized
atttcttttcgagagaattata

SEQ ID NO: 53814 - DNA, 22 bp, Artificial Sequence
  chemically synthesized
cttttcgagagaattatatgca

SEQ ID NO: 53815 - DNA, 22 bp, Artificial Sequence
  chemically synthesized
ttttcgagagaattatatgcat

SEQ ID NO: 53816 - DNA, 22 bp, Artificial Sequence
  chemically synthesized
ttcgagagaattatatgcatac

SEQ ID NO: 53817 - DNA, 22 bp, Artificial Sequence
  chemically synthesized
tcgagagaattatatgcatact

SEQ ID NO: 53818 - DNA, 22 bp, Artificial Sequence
  chemically synthesized
cgagagaattatatgcatactt

SEQ ID NO: 53819 - DNA, 22 bp, Artificial Sequence
  chemically synthesized
gagagaattatatgcatacttt

SEQ ID NO: 53820 - DNA, 22 bp, Artificial Sequence
  chemically synthesized
tatgcatactttctaaatgcaa

SEQ ID NO: 53821 - DNA, 22 bp, Artificial Sequence
  chemically synthesized
tctaaatgcaagaataaattcc

SEQ ID NO: 53822 - DNA, 22 bp, Artificial Sequence
  chemically synthesized
ctaaatgcaagaataaattcct

SEQ ID NO: 53823 - DNA, 22 bp, Artificial Sequence
  chemically synthesized
taaatgcaagaataaattcctg

SEQ ID NO: 53824 - DNA, 22 bp, Artificial Sequence
  chemically synthesized
aatgcaagaataaattcctgag

SEQ ID NO: 53825 - DNA, 22 bp, Artificial Sequence
  chemically synthesized
ctgagctccatgtgacttcagt

SEQ ID NO: 53826 - DNA, 22 bp, Artificial Sequence
  chemically synthesized
agctccatgtgacttcagtacc

SEQ ID NO: 53827 - DNA, 22 bp, Artificial Sequence
  chemically synthesized
catgtgacttcagtaccatcag

SEQ ID NO: 53828 - DNA, 22 bp, Artificial Sequence
  chemically synthesized
cagtaccatcagctctttggca

SEQ ID NO: 53829 - DNA, 22 bp, Artificial Sequence
  chemically synthesized
agtaccatcagctctttggcag

SEQ ID NO: 53830 - DNA, 22 bp, Artificial Sequence
  chemically synthesized
tttggcagcttatgagtataca

SEQ ID NO: 53831 - DNA, 22 bp, Artificial Sequence
  chemically synthesized
tggcagcttatgagtatacagc

SEQ ID NO: 53832 - DNA, 22 bp, Artificial Sequence
  chemically synthesized
ggcagcttatgagtatacagct

SEQ ID NO: 53833 - DNA, 22 bp, Artificial Sequence
  chemically synthesized
gcagcttatgagtatacagctt

SEQ ID NO: 53834 - DNA, 22 bp, Artificial Sequence
  chemically synthesized
atgagtatacagctttttaatt

SEQ ID NO: 53835 - DNA, 22 bp, Artificial Sequence
  chemically synthesized
tgagtatacagctttttaattc

SEQ ID NO: 53836 - DNA, 22 bp, Artificial Sequence
  chemically synthesized
tttaattctcacctggtcccca

SEQ ID NO: 53837 - DNA, 22 bp, Artificial Sequence
  chemically synthesized
ttaattctcacctggtccccag

SEQ ID NO: 53838 - DNA, 22 bp, Artificial Sequence
  chemically synthesized
taattctcacctggtccccagg

SEQ ID NO: 53839 - DNA, 22 bp, Artificial Sequence
  chemically synthesized
aattctcacctggtccccagga

SEQ ID NO: 53840 - DNA, 22 bp, Artificial Sequence
  chemically synthesized
attctcacctggtccccaggat

SEQ ID NO: 53841 - DNA, 22 bp, Artificial Sequence
  chemically synthesized
tcacctggtccccaggatatgg

SEQ ID NO: 53842 - DNA, 22 bp, Artificial Sequence
  chemically synthesized
acctggtccccaggatatggtt

SEQ ID NO: 53843 - DNA, 22 bp, Artificial Sequence
  chemically synthesized
gtccccaggatatggtttactt

SEQ ID NO: 53844 - DNA, 22 bp, Artificial Sequence
  chemically synthesized
acttgtcagagtagttttatga

SEQ ID NO: 53845 - DNA, 22 bp, Artificial Sequence
  chemically synthesized
cttgtcagagtagttttatgag

SEQ ID NO: 53846 - DNA, 22 bp, Artificial Sequence
  chemically synthesized
gtcagagtagttttatgaggtg

SEQ ID NO: 53847 - DNA, 22 bp, Artificial Sequence
  chemically synthesized
tcagagtagttttatgaggtgc

SEQ ID NO: 53848 - DNA, 22 bp, Artificial Sequence
  chemically synthesized
tatgaggtgctttctcctgact

SEQ ID NO: 53849 - DNA, 22 bp, Artificial Sequence
  chemically synthesized
atgaggtgctttctcctgactc

SEQ ID NO: 53850 - DNA, 22 bp, Artificial Sequence
  chemically synthesized
tgaggtgctttctcctgactct

SEQ ID NO: 53851 - DNA, 22 bp, Artificial Sequence
  chemically synthesized
tctcctgactctgattctaggt

SEQ ID NO: 53852 - DNA, 22 bp, Artificial Sequence
  chemically synthesized
ctcctgactctgattctaggta

SEQ ID NO: 53853 - DNA, 22 bp, Artificial Sequence
  chemically synthesized
tcctgactctgattctaggtaa

SEQ ID NO: 53854 - DNA, 22 bp, Artificial Sequence
  chemically synthesized
ctgactctgattctaggtaaca

SEQ ID NO: 53855 - DNA, 22 bp, Artificial Sequence
  chemically synthesized
actctgattctaggtaacacct

SEQ ID NO: 53856 - DNA, 22 bp, Artificial Sequence
  chemically synthesized
tgattctaggtaacacctgatg

SEQ ID NO: 53857 - DNA, 22 bp, Artificial Sequence
  chemically synthesized
attctaggtaacacctgatgag

SEQ ID NO: 53858 - DNA, 22 bp, Artificial Sequence
  chemically synthesized
taggtaacacctgatgagatga

SEQ ID NO: 53859 - DNA, 22 bp, Artificial Sequence
  chemically synthesized
ggtaacacctgatgagatgaac

SEQ ID NO: 53860 - DNA, 22 bp, Artificial Sequence
  chemically synthesized
atgagatgaacagatggtgcac

SEQ ID NO: 53861 - DNA, 22 bp, Artificial Sequence
  chemically synthesized
acttcctcttactgggcatgaa

SEQ ID NO: 53862 - DNA, 22 bp, Artificial Sequence
  chemically synthesized
cctcttactgggcatgaaggaa

SEQ ID NO: 53863 - DNA, 22 bp, Artificial Sequence
  chemically synthesized
ctcttactgggcatgaaggaaa

SEQ ID NO: 53864 - DNA, 22 bp, Artificial Sequence
  chemically synthesized
ttactgggcatgaaggaaagag

SEQ ID NO: 53865 - DNA, 22 bp, Artificial Sequence
  chemically synthesized
actgggcatgaaggaaagagag

SEQ ID NO: 53866 - DNA, 22 bp, Artificial Sequence
  chemically synthesized
ctgggcatgaaggaaagagaga

SEQ ID NO: 53867 - DNA, 22 bp, Artificial Sequence
  chemically synthesized
ggcatgaaggaaagagagagaa

SEQ ID NO: 53868 - DNA, 22 bp, Artificial Sequence
  chemically synthesized
ctgctacattttttttttctgt

SEQ ID NO: 53869 - DNA, 22 bp, Artificial Sequence
  chemically synthesized
ctacattttttttttctgtgga

SEQ ID NO: 53870 - DNA, 22 bp, Artificial Sequence
  chemically synthesized
cattttttttttctgtggaaaa

SEQ ID NO: 53871 - DNA, 22 bp, Artificial Sequence
  chemically synthesized
tttttttctgtggaaaaagagt

SEQ ID NO: 53872 - DNA, 22 bp, Artificial Sequence
  chemically synthesized
ttttttctgtggaaaaagagtc

SEQ ID NO: 53873 - DNA, 22 bp, Artificial Sequence
  chemically synthesized
tttttctgtggaaaaagagtct

SEQ ID NO: 53874 - DNA, 22 bp, Artificial Sequence
  chemically synthesized
ttttctgtggaaaaagagtcta

SEQ ID NO: 53875 - DNA, 22 bp, Artificial Sequence
  chemically synthesized
tttctgtggaaaaagagtctaa

SEQ ID NO: 53876 - DNA, 22 bp, Artificial Sequence
  chemically synthesized
ttctgtggaaaaagagtctaat

SEQ ID NO: 53877 - DNA, 22 bp, Artificial Sequence
  chemically synthesized
tctgtggaaaaagagtctaata

SEQ ID NO: 53878 - DNA, 22 bp, Artificial Sequence
  chemically synthesized
ctgtggaaaaagagtctaatat

SEQ ID NO: 53879 - DNA, 22 bp, Artificial Sequence
  chemically synthesized
tgtggaaaaagagtctaatatt

SEQ ID NO: 53880 - DNA, 22 bp, Artificial Sequence
  chemically synthesized
tggaaaaagagtctaatatttc

SEQ ID NO: 53881 - DNA, 22 bp, Artificial Sequence
  chemically synthesized
atatttctaattaaccttgatg

SEQ ID NO: 53882 - DNA, 22 bp, Artificial Sequence
  chemically synthesized
ctaattaaccttgatgggaaca

SEQ ID NO: 53883 - DNA, 22 bp, Artificial Sequence
  chemically synthesized
taattaaccttgatgggaacat

SEQ ID NO: 53884 - DNA, 22 bp, Artificial Sequence
  chemically synthesized
attaaccttgatgggaacatag

SEQ ID NO: 53885 - DNA, 22 bp, Artificial Sequence
  chemically synthesized
accttgatgggaacatagaaca

SEQ ID NO: 53886 - DNA, 22 bp, Artificial Sequence
  chemically synthesized
gatgggaacatagaacatagat

SEQ ID NO: 53887 - DNA, 22 bp, Artificial Sequence
  chemically synthesized
atgggaacatagaacatagatt

SEQ ID NO: 53888 - DNA, 22 bp, Artificial Sequence
  chemically synthesized
taaagggaacttgcacattatc

SEQ ID NO: 53889 - DNA, 22 bp, Artificial Sequence
  chemically synthesized
gcacattatcgcagtaggctga

SEQ ID NO: 53890 - DNA, 22 bp, Artificial Sequence
  chemically synthesized
cacattatcgcagtaggctgaa

SEQ ID NO: 53891 - DNA, 22 bp, Artificial Sequence
  chemically synthesized
tcgcagtaggctgaataatggc

SEQ ID NO: 53892 - DNA, 22 bp, Artificial Sequence
  chemically synthesized
aataatggctaatggctcactc

SEQ ID NO: 53893 - DNA, 22 bp, Artificial Sequence
  chemically synthesized
atggctcactctgaaagatatg

SEQ ID NO: 53894 - DNA, 22 bp, Artificial Sequence
  chemically synthesized
actctgaaagatatgtatggct

SEQ ID NO: 53895 - DNA, 22 bp, Artificial Sequence
  chemically synthesized
tgaaagatatgtatggcttaac

SEQ ID NO: 53896 - DNA, 22 bp, Artificial Sequence
  chemically synthesized
aaagatatgtatggcttaaccc

SEQ ID NO: 53897 - DNA, 22 bp, Artificial Sequence
  chemically synthesized
aacccctgaaacctgtgagtat

SEQ ID NO: 53898 - DNA, 22 bp, Artificial Sequence
  chemically synthesized
acccctgaaacctgtgagtatt

SEQ ID NO: 53899 - DNA, 22 bp, Artificial Sequence
  chemically synthesized
aaacctgtgagtattatctttt

SEQ ID NO: 53900 - DNA, 22 bp, Artificial Sequence
  chemically synthesized
tgagtattatcttttctagcca

SEQ ID NO: 53901 - DNA, 22 bp, Artificial Sequence
  chemically synthesized
tcttttctagccaaacagactt

SEQ ID NO: 53902 - DNA, 22 bp, Artificial Sequence
  chemically synthesized
ttctagccaaacagacttttgc

SEQ ID NO: 53903 - DNA, 22 bp, Artificial Sequence
  chemically synthesized
tctagccaaacagacttttgca

SEQ ID NO: 53904 - DNA, 22 bp, Artificial Sequence
  chemically synthesized
ctagccaaacagacttttgcat

SEQ ID NO: 53905 - DNA, 22 bp, Artificial Sequence
  chemically synthesized
tagccaaacagacttttgcata

SEQ ID NO: 53906 - DNA, 22 bp, Artificial Sequence
  chemically synthesized
gccaaacagacttttgcatata

SEQ ID NO: 53907 - DNA, 22 bp, Artificial Sequence
  chemically synthesized
ttgcatatataattaaggatct

SEQ ID NO: 53908 - DNA, 22 bp, Artificial Sequence
  chemically synthesized
tgcatatataattaaggatctt

SEQ ID NO: 53909 - DNA, 22 bp, Artificial Sequence
  chemically synthesized
gcatatataattaaggatcttg

SEQ ID NO: 53910 - DNA, 22 bp, Artificial Sequence
  chemically synthesized
catatataattaaggatcttgg

SEQ ID NO: 53911 - DNA, 22 bp, Artificial Sequence
  chemically synthesized
aggatcttgggatggggagata

SEQ ID NO: 53912 - DNA, 22 bp, Artificial Sequence
  chemically synthesized
gggatggggagatatcctaatt

SEQ ID NO: 53913 - DNA, 22 bp, Artificial Sequence
  chemically synthesized
ggatggggagatatcctaatta

SEQ ID NO: 53914 - DNA, 22 bp, Artificial Sequence
  chemically synthesized
attatttgggtgtatcctaaat

SEQ ID NO: 53915 - DNA, 22 bp, Artificial Sequence
  chemically synthesized
tttgggtgtatcctaaatgtaa

SEQ ID NO: 53916 - DNA, 22 bp, Artificial Sequence
  chemically synthesized
gggtgtatcctaaatgtaatca

SEQ ID NO: 53917 - DNA, 22 bp, Artificial Sequence
  chemically synthesized
ggtgtatcctaaatgtaatcac

SEQ ID NO: 53918 - DNA, 22 bp, Artificial Sequence
  chemically synthesized
aatgtaatcacaagtgtcatta

SEQ ID NO: 53919 - DNA, 22 bp, Artificial Sequence
  chemically synthesized
taagagggaggcaaagggagat

SEQ ID NO: 53920 - DNA, 22 bp, Artificial Sequence
  chemically synthesized
gacttataagaggagaaaatgt

SEQ ID NO: 53921 - DNA, 22 bp, Artificial Sequence
  chemically synthesized
acttataagaggagaaaatgtg

SEQ ID NO: 53922 - DNA, 22 bp, Artificial Sequence
  chemically synthesized
ataagaggagaaaatgtgacgt

SEQ ID NO: 53923 - DNA, 22 bp, Artificial Sequence
  chemically synthesized
taagaggagaaaatgtgacgtg

SEQ ID NO: 53924 - DNA, 22 bp, Artificial Sequence
  chemically synthesized
caaaagcagagatacatttttt

SEQ ID NO: 53925 - DNA, 22 bp, Artificial Sequence
  chemically synthesized
ttttgaagatcgaggaagaggc

SEQ ID NO: 53926 - DNA, 22 bp, Artificial Sequence
  chemically synthesized
tttgaagatcgaggaagaggct

SEQ ID NO: 53927 - DNA, 22 bp, Artificial Sequence
  chemically synthesized
ttgaagatcgaggaagaggcta

SEQ ID NO: 53928 - DNA, 22 bp, Artificial Sequence
  chemically synthesized
tgaagatcgaggaagaggctac

SEQ ID NO: 53929 - DNA, 22 bp, Artificial Sequence
  chemically synthesized
gaagatcgaggaagaggctaca

SEQ ID NO: 53930 - DNA, 22 bp, Artificial Sequence
  chemically synthesized
aagatcgaggaagaggctacaa

SEQ ID NO: 53931 - DNA, 22 bp, Artificial Sequence
  chemically synthesized
caaaccaaggaatgtgggtagc

SEQ ID NO: 53932 - DNA, 22 bp, Artificial Sequence
  chemically synthesized
tagaagaggaaacagaatccat

SEQ ID NO: 53933 - DNA, 22 bp, Artificial Sequence
  chemically synthesized
gaagaggaaacagaatccatgg

SEQ ID NO: 53934 - DNA, 22 bp, Artificial Sequence
  chemically synthesized
tcatagagtctccagaagaaac

SEQ ID NO: 53935 - DNA, 22 bp, Artificial Sequence
  chemically synthesized
atagagtctccagaagaaacag

SEQ ID NO: 53936 - DNA, 22 bp, Artificial Sequence
  chemically synthesized
cagaagaaacagccacactgac

SEQ ID NO: 53937 - DNA, 22 bp, Artificial Sequence
  chemically synthesized
acacctcgactttagcccagtg

SEQ ID NO: 53938 - DNA, 22 bp, Artificial Sequence
  chemically synthesized
gactttagcccagtgaaaccga

SEQ ID NO: 53939 - DNA, 22 bp, Artificial Sequence
  chemically synthesized
tagcccagtgaaaccgatttca

SEQ ID NO: 53940 - DNA, 22 bp, Artificial Sequence
  chemically synthesized
agcccagtgaaaccgatttcag

SEQ ID NO: 53941 - DNA, 22 bp, Artificial Sequence
  chemically synthesized
gcccagtgaaaccgatttcaga

SEQ ID NO: 53942 - DNA, 22 bp, Artificial Sequence
  chemically synthesized
cagacttctgacctccacaact

SEQ ID NO: 53943 - DNA, 22 bp, Artificial Sequence
  chemically synthesized
agacttctgacctccacaactt

SEQ ID NO: 53944 - DNA, 22 bp, Artificial Sequence
  chemically synthesized
ctgacctccacaacttcaagat

SEQ ID NO: 53945 - DNA, 22 bp, Artificial Sequence
  chemically synthesized
tgacctccacaacttcaagata

SEQ ID NO: 53946 - DNA, 22 bp, Artificial Sequence
  chemically synthesized
acctccacaacttcaagataat

SEQ ID NO: 53947 - DNA, 22 bp, Artificial Sequence
  chemically synthesized
cacaacttcaagataatacatt

SEQ ID NO: 53948 - DNA, 22 bp, Artificial Sequence
  chemically synthesized
caagataatacatttgtgttgt

SEQ ID NO: 53949 - DNA, 22 bp, Artificial Sequence
  chemically synthesized
aagataatacatttgtgttgtt

SEQ ID NO: 53950 - DNA, 22 bp, Artificial Sequence
  chemically synthesized
gtgttgttttaagccaataaat

SEQ ID NO: 53951 - DNA, 22 bp, Artificial Sequence
  chemically synthesized
tgttgttttaagccaataaatt

SEQ ID NO: 53952 - DNA, 22 bp, Artificial Sequence
  chemically synthesized
ttttaagccaataaatttgtgg

SEQ ID NO: 53953 - DNA, 22 bp, Artificial Sequence
  chemically synthesized
taagccaataaatttgtggtaa

SEQ ID NO: 53954 - DNA, 22 bp, Artificial Sequence
  chemically synthesized
aagccaataaatttgtggtaat

SEQ ID NO: 53955 - DNA, 22 bp, Artificial Sequence
  chemically synthesized
agccaataaatttgtggtaatt

SEQ ID NO: 53956 - DNA, 22 bp, Artificial Sequence
  chemically synthesized
gtggtaattttttacagcagca

SEQ ID NO: 53957 - DNA, 22 bp, Artificial Sequence
  chemically synthesized
tggtaattttttacagcagcaa

SEQ ID NO: 53958 - DNA, 22 bp, Artificial Sequence
  chemically synthesized
tttacagcagcaagaggaaatc

SEQ ID NO: 53959 - DNA, 22 bp, Artificial Sequence
  chemically synthesized
ttacagcagcaagaggaaatca

SEQ ID NO: 53960 - DNA, 22 bp, Artificial Sequence
  chemically synthesized
tacagcagcaagaggaaatcag

SEQ ID NO: 53961 - DNA, 22 bp, Artificial Sequence
  chemically synthesized
acagcagcaagaggaaatcagt

SEQ ID NO: 53962 - DNA, 22 bp, Artificial Sequence
  chemically synthesized
cagcagcaagaggaaatcagtt

SEQ ID NO: 53963 - DNA, 22 bp, Artificial Sequence
  chemically synthesized
cgtagaatagtaggtcctgtct

SEQ ID NO: 53964 - DNA, 22 bp, Artificial Sequence
  chemically synthesized
tctctggctaatcattagaatc

SEQ ID NO: 53965 - DNA, 22 bp, Artificial Sequence
  chemically synthesized
tggctaatcattagaatcactc

SEQ ID NO: 53966 - DNA, 22 bp, Artificial Sequence
  chemically synthesized
gctaatcattagaatcactcca

SEQ ID NO: 53967 - DNA, 22 bp, Artificial Sequence
  chemically synthesized
atcattagaatcactccagaag

SEQ ID NO: 53968 - DNA, 22 bp, Artificial Sequence
  chemically synthesized
gaatcactccagaagcttgtta

SEQ ID NO: 53969 - DNA, 22 bp, Artificial Sequence
  chemically synthesized
cagaagcttgttacatacagac

SEQ ID NO: 53970 - DNA, 22 bp, Artificial Sequence
  chemically synthesized
gttacatacagacccagagcca

SEQ ID NO: 53971 - DNA, 22 bp, Artificial Sequence
  chemically synthesized
ttacatacagacccagagccag

SEQ ID NO: 53972 - DNA, 22 bp, Artificial Sequence
  chemically synthesized
catacagacccagagccagtga

SEQ ID NO: 53973 - DNA, 22 bp, Artificial Sequence
  chemically synthesized
ggtggtggggcccagagcctga

SEQ ID NO: 53974 - DNA, 22 bp, Artificial Sequence
  chemically synthesized
gtggtggggcccagagcctgaa

SEQ ID NO: 53975 - DNA, 22 bp, Artificial Sequence
  chemically synthesized
aatattaagcaagttcttcgtt

SEQ ID NO: 53976 - DNA, 22 bp, Artificial Sequence
  chemically synthesized
agcaagttcttcgttttagaaa

SEQ ID NO: 53977 - DNA, 22 bp, Artificial Sequence
  chemically synthesized
ttcgttttagaaatgaggaaac

SEQ ID NO: 53978 - DNA, 22 bp, Artificial Sequence
  chemically synthesized
cgttttagaaatgaggaaacca

SEQ ID NO: 53979 - DNA, 22 bp, Artificial Sequence
  chemically synthesized
gttttagaaatgaggaaaccaa

SEQ ID NO: 53980 - DNA, 22 bp, Artificial Sequence
  chemically synthesized
tagaaatgaggaaaccaaggtt

SEQ ID NO: 53981 - DNA, 22 bp, Artificial Sequence
  chemically synthesized
agaaatgaggaaaccaaggttg

SEQ ID NO: 53982 - DNA, 22 bp, Artificial Sequence
  chemically synthesized
gaaatgaggaaaccaaggttgg

SEQ ID NO: 53983 - DNA, 22 bp, Artificial Sequence
  chemically synthesized
ggagaagctaagcaacttactc

SEQ ID NO: 53984 - DNA, 22 bp, Artificial Sequence
  chemically synthesized
agcaacttactcaaatacatag

SEQ ID NO: 53985 - DNA, 22 bp, Artificial Sequence
  chemically synthesized
actcaaatacatagggtatttc

SEQ ID NO: 53986 - DNA, 22 bp, Artificial Sequence
  chemically synthesized
ctcaaatacatagggtatttca

SEQ ID NO: 53987 - DNA, 22 bp, Artificial Sequence
  chemically synthesized
aaatacatagggtatttcattt

SEQ ID NO: 53988 - DNA, 22 bp, Artificial Sequence
  chemically synthesized
cattttaaatttaattttatta

SEQ ID NO: 53989 - DNA, 22 bp, Artificial Sequence
  chemically synthesized
attttaaatttaattttattac

SEQ ID NO: 53990 - DNA, 22 bp, Artificial Sequence
  chemically synthesized
taaatttaattttattacttta

SEQ ID NO: 53991 - DNA, 22 bp, Artificial Sequence
  chemically synthesized
aaatttaattttattactttat

SEQ ID NO: 53992 - DNA, 22 bp, Artificial Sequence
  chemically synthesized
aatttaattttattactttatc

SEQ ID NO: 53993 - DNA, 22 bp, Artificial Sequence
  chemically synthesized
aattttattactttatcttttg

SEQ ID NO: 53994 - DNA, 22 bp, Artificial Sequence
  chemically synthesized
attttattactttatcttttga

SEQ ID NO: 53995 - DNA, 22 bp, Artificial Sequence
  chemically synthesized
tattactttatcttttgaattt

SEQ ID NO: 53996 - DNA, 22 bp, Artificial Sequence
  chemically synthesized
attactttatcttttgaatttt

SEQ ID NO: 53997 - DNA, 22 bp, Artificial Sequence
  chemically synthesized
ttactttatcttttgaattttc

SEQ ID NO: 53998 - DNA, 22 bp, Artificial Sequence
  chemically synthesized
ctttatcttttgaattttctta

SEQ ID NO: 53999 - DNA, 22 bp, Artificial Sequence
  chemically synthesized
tatcttttgaattttcttaccc

SEQ ID NO: 54000 - DNA, 22 bp, Artificial Sequence
  chemically synthesized
atcttttgaattttcttacccc

SEQ ID NO: 54001 - DNA, 22 bp, Artificial Sequence
  chemically synthesized
tcttttgaattttcttacccca

SEQ ID NO: 54002 - DNA, 22 bp, Artificial Sequence
  chemically synthesized
ttgaattttcttaccccagttg

SEQ ID NO: 54003 - DNA, 22 bp, Artificial Sequence
  chemically synthesized
tgaattttcttaccccagttgt

SEQ ID NO: 54004 - DNA, 22 bp, Artificial Sequence
  chemically synthesized
gaattttcttaccccagttgta

SEQ ID NO: 54005 - DNA, 22 bp, Artificial Sequence
  chemically synthesized
aattttcttaccccagttgtac

SEQ ID NO: 54006 - DNA, 22 bp, Artificial Sequence
  chemically synthesized
tcttaccccagttgtacttttg

SEQ ID NO: 54007 - DNA, 22 bp, Artificial Sequence
  chemically synthesized
cttaccccagttgtacttttgt

SEQ ID NO: 54008 - DNA, 22 bp, Artificial Sequence
  chemically synthesized
ttaccccagttgtacttttgtg

SEQ ID NO: 54009 - DNA, 22 bp, Artificial Sequence
  chemically synthesized
accccagttgtacttttgtgta

SEQ ID NO: 54010 - DNA, 22 bp, Artificial Sequence
  chemically synthesized
ccccagttgtacttttgtgtaa

SEQ ID NO: 54011 - DNA, 22 bp, Artificial Sequence
  chemically synthesized
tacttttgtgtaaatgtgattt

SEQ ID NO: 54012 - DNA, 22 bp, Artificial Sequence
  chemically synthesized
ttgtgtaaatgtgatttcattt

SEQ ID NO: 54013 - DNA, 22 bp, Artificial Sequence
  chemically synthesized
tgtgtaaatgtgatttcattta

SEQ ID NO: 54014 - DNA, 22 bp, Artificial Sequence
  chemically synthesized
gtgtaaatgtgatttcatttac

SEQ ID NO: 54015 - DNA, 22 bp, Artificial Sequence
  chemically synthesized
tgtaaatgtgatttcatttacg

SEQ ID NO: 54016 - DNA, 22 bp, Artificial Sequence
  chemically synthesized
catttacggctttgtgttgaca

SEQ ID NO: 54017 - DNA, 22 bp, Artificial Sequence
  chemically synthesized
atttacggctttgtgttgacat

SEQ ID NO: 54018 - DNA, 22 bp, Artificial Sequence
  chemically synthesized
acggctttgtgttgacatattc

SEQ ID NO: 54019 - DNA, 22 bp, Artificial Sequence
  chemically synthesized
cggctttgtgttgacatattca

SEQ ID NO: 54020 - DNA, 22 bp, Artificial Sequence
  chemically synthesized
tgtgttgacatattcattaaaa

SEQ ID NO: 54021 - DNA, 22 bp, Artificial Sequence
  chemically synthesized
gtgttgacatattcattaaaat

SEQ ID NO: 54022 - DNA, 22 bp, Artificial Sequence
  chemically synthesized
tgttgacatattcattaaaatg

SEQ ID NO: 54023 - DNA, 22 bp, Artificial Sequence
  chemically synthesized
acatattcattaaaatgaagaa

SEQ ID NO: 54024 - DNA, 22 bp, Artificial Sequence
  chemically synthesized
attaaaatgaagaaataaaaga

SEQ ID NO: 54025 - DNA, 22 bp, Artificial Sequence
  chemically synthesized
aaatgaagaaataaaagatgag

SEQ ID NO: 54026 - DNA, 22 bp, Artificial Sequence
  chemically synthesized
taaaaattatataatgtttatt

SEQ ID NO: 54027 - DNA, 22 bp, Artificial Sequence
  chemically synthesized
aaaaattatataatgtttattg

SEQ ID NO: 54028 - DNA, 22 bp, Artificial Sequence
  chemically synthesized
aaaattatataatgtttattga

SEQ ID NO: 54029 - DNA, 22 bp, Artificial Sequence
  chemically synthesized
tataatgtttattgattagaat

SEQ ID NO: 54030 - DNA, 22 bp, Artificial Sequence
  chemically synthesized
attgattagaatgaatatgatg

SEQ ID NO: 54031 - DNA, 22 bp, Artificial Sequence
  chemically synthesized
ttgattagaatgaatatgatgc

SEQ ID NO: 54032 - DNA, 22 bp, Artificial Sequence
  chemically synthesized
attagaatgaatatgatgcaat

SEQ ID NO: 54033 - DNA, 22 bp, Artificial Sequence
  chemically synthesized
gaatgaatatgatgcaatctgg

SEQ ID NO: 54034 - DNA, 22 bp, Artificial Sequence
  chemically synthesized
gttttctgtgttcagattcctg

SEQ ID NO: 54035 - DNA, 22 bp, Artificial Sequence
  chemically synthesized
tctgtgttcagattcctgacct

SEQ ID NO: 54036 - DNA, 22 bp, Artificial Sequence
  chemically synthesized
ctgtgttcagattcctgacctc

SEQ ID NO: 54037 - DNA, 22 bp, Artificial Sequence
  chemically synthesized
tgtgttcagattcctgacctct

SEQ ID NO: 54038 - DNA, 22 bp, Artificial Sequence
  chemically synthesized
tgttcagattcctgacctctgg

SEQ ID NO: 54039 - DNA, 22 bp, Artificial Sequence
  chemically synthesized
agattcctgacctctggagtta

SEQ ID NO: 54040 - DNA, 22 bp, Artificial Sequence
  chemically synthesized
ctgacctctggagttaaccttt

SEQ ID NO: 54041 - DNA, 22 bp, Artificial Sequence
  chemically synthesized
acctctggagttaacctttctt

SEQ ID NO: 54042 - DNA, 22 bp, Artificial Sequence
  chemically synthesized
tggagttaacctttctttgtaa

SEQ ID NO: 54043 - DNA, 22 bp, Artificial Sequence
  chemically synthesized
gagttaacctttctttgtaaag

SEQ ID NO: 54044 - DNA, 22 bp, Artificial Sequence
  chemically synthesized
acctttctttgtaaagattaga

SEQ ID NO: 54045 - DNA, 22 bp, Artificial Sequence
  chemically synthesized
tctttgtaaagattagacagca

SEQ ID NO: 54046 - DNA, 22 bp, Artificial Sequence
  chemically synthesized
ctttgtaaagattagacagcag

SEQ ID NO: 54047 - DNA, 22 bp, Artificial Sequence
  chemically synthesized
tttgtaaagattagacagcagg

SEQ ID NO: 54048 - DNA, 22 bp, Artificial Sequence
  chemically synthesized
tgtaaagattagacagcaggca

SEQ ID NO: 54049 - DNA, 22 bp, Artificial Sequence
  chemically synthesized
gtaaagattagacagcaggcag

SEQ ID NO: 54050 - DNA, 22 bp, Artificial Sequence
  chemically synthesized
taaagattagacagcaggcagg

SEQ ID NO: 54051 - DNA, 22 bp, Artificial Sequence
  chemically synthesized
gacagcaggcagggaagaatgc

SEQ ID NO: 54052 - DNA, 22 bp, Artificial Sequence
  chemically synthesized
tgaaactgagagcaaagactgg

SEQ ID NO: 54053 - DNA, 22 bp, Artificial Sequence
  chemically synthesized
gaaactgagagcaaagactggc

SEQ ID NO: 54054 - DNA, 22 bp, Artificial Sequence
  chemically synthesized
aaactgagagcaaagactggca

SEQ ID NO: 54055 - DNA, 22 bp, Artificial Sequence
  chemically synthesized
agagcaaagactggcatgcaat

SEQ ID NO: 54056 - DNA, 22 bp, Artificial Sequence
  chemically synthesized
gcatgcaatttacattgatgtc

SEQ ID NO: 54057 - DNA, 22 bp, Artificial Sequence
  chemically synthesized
acattgatgtcctggtgctgtg

SEQ ID NO: 54058 - DNA, 22 bp, Artificial Sequence
  chemically synthesized
cattgatgtcctggtgctgtgc

SEQ ID NO: 54059 - DNA, 22 bp, Artificial Sequence
  chemically synthesized
atgtcctggtgctgtgcataat

SEQ ID NO: 54060 - DNA, 22 bp, Artificial Sequence
  chemically synthesized
gtgctgtgcataataagttgct

SEQ ID NO: 54061 - DNA, 22 bp, Artificial Sequence
  chemically synthesized
tgcataataagttgcttaaaca

SEQ ID NO: 54062 - DNA, 22 bp, Artificial Sequence
  chemically synthesized
cttaaacatgacagcaggatag

SEQ ID NO: 54063 - DNA, 22 bp, Artificial Sequence
  chemically synthesized
aaacatgacagcaggataggat

SEQ ID NO: 54064 - DNA, 22 bp, Artificial Sequence
  chemically synthesized
aacatgacagcaggataggatt

SEQ ID NO: 54065 - DNA, 22 bp, Artificial Sequence
  chemically synthesized
tacataaaatttatttataaat

SEQ ID NO: 54066 - DNA, 22 bp, Artificial Sequence
  chemically synthesized
acataaaatttatttataaatg

SEQ ID NO: 54067 - DNA, 22 bp, Artificial Sequence
  chemically synthesized
cataaaatttatttataaatgg

SEQ ID NO: 54068 - DNA, 22 bp, Artificial Sequence
  chemically synthesized
atttataaatggtaaagatgtt

SEQ ID NO: 54069 - DNA, 22 bp, Artificial Sequence
  chemically synthesized
tttataaatggtaaagatgttt

SEQ ID NO: 54070 - DNA, 22 bp, Artificial Sequence
  chemically synthesized
ataaatggtaaagatgtttcca

SEQ ID NO: 54071 - DNA, 22 bp, Artificial Sequence
  chemically synthesized
taaatggtaaagatgtttccaa

SEQ ID NO: 54072 - DNA, 22 bp, Artificial Sequence
  chemically synthesized
ccaacctctgctgaacttcctc

SEQ ID NO: 54073 - DNA, 22 bp, Artificial Sequence
  chemically synthesized
caacctctgctgaacttcctca

SEQ ID NO: 54074 - DNA, 22 bp, Artificial Sequence
  chemically synthesized
tgctgaacttcctcatagaatg

SEQ ID NO: 54075 - DNA, 22 bp, Artificial Sequence
  chemically synthesized
ctgaacttcctcatagaatgtt

SEQ ID NO: 54076 - DNA, 22 bp, Artificial Sequence
  chemically synthesized
aacttcctcatagaatgttcat

SEQ ID NO: 54077 - DNA, 22 bp, Artificial Sequence
  chemically synthesized
cctcatagaatgttcatcagaa

SEQ ID NO: 54078 - DNA, 22 bp, Artificial Sequence
  chemically synthesized
ctcatagaatgttcatcagaaa

SEQ ID NO: 54079 - DNA, 22 bp, Artificial Sequence
  chemically synthesized
atagaatgttcatcagaaaaca

SEQ ID NO: 54080 - DNA, 22 bp, Artificial Sequence
  chemically synthesized
atcagaaaacaaagtttctatc

SEQ ID NO: 54081 - DNA, 22 bp, Artificial Sequence
  chemically synthesized
ctatctactctttcttccaaga

SEQ ID NO: 54082 - DNA, 22 bp, Artificial Sequence
  chemically synthesized
tatctactctttcttccaagac

SEQ ID NO: 54083 - DNA, 22 bp, Artificial Sequence
  chemically synthesized
tctactctttcttccaagactt

SEQ ID NO: 54084 - DNA, 22 bp, Artificial Sequence
  chemically synthesized
ctctttcttccaagacttcaac

SEQ ID NO: 54085 - DNA, 22 bp, Artificial Sequence
  chemically synthesized
tttcttccaagacttcaactcc

SEQ ID NO: 54086 - DNA, 22 bp, Artificial Sequence
  chemically synthesized
tcttccaagacttcaactccta

SEQ ID NO: 54087 - DNA, 22 bp, Artificial Sequence
  chemically synthesized
cttccaagacttcaactcctac

SEQ ID NO: 54088 - DNA, 22 bp, Artificial Sequence
  chemically synthesized
ttccaagacttcaactcctacc

SEQ ID NO: 54089 - DNA, 22 bp, Artificial Sequence
  chemically synthesized
ccaagacttcaactcctaccac

SEQ ID NO: 54090 - DNA, 22 bp, Artificial Sequence
  chemically synthesized
caagacttcaactcctaccact

SEQ ID NO: 54091 - DNA, 22 bp, Artificial Sequence
  chemically synthesized
caactcctaccactgacatcat

SEQ ID NO: 54092 - DNA, 22 bp, Artificial Sequence
  chemically synthesized
aactcctaccactgacatcatg

SEQ ID NO: 54093 - DNA, 22 bp, Artificial Sequence
  chemically synthesized
ctaccactgacatcatgaccct

SEQ ID NO: 54094 - DNA, 22 bp, Artificial Sequence
  chemically synthesized
ccactgacatcatgaccctcag

SEQ ID NO: 54095 - DNA, 22 bp, Artificial Sequence
  chemically synthesized
acatcatgaccctcagttctat

SEQ ID NO: 54096 - DNA, 22 bp, Artificial Sequence
  chemically synthesized
agttctattcccctagccctgc

SEQ ID NO: 54097 - DNA, 22 bp, Artificial Sequence
  chemically synthesized
tattcccctagccctgcccact

SEQ ID NO: 54098 - DNA, 22 bp, Artificial Sequence
  chemically synthesized
ttcccctagccctgcccactcc

SEQ ID NO: 54099 - DNA, 22 bp, Artificial Sequence
  chemically synthesized
ccctagccctgcccactcccct

SEQ ID NO: 54100 - DNA, 22 bp, Artificial Sequence
  chemically synthesized
gccctgcccactcccctgaaat

SEQ ID NO: 54101 - DNA, 22 bp, Artificial Sequence
  chemically synthesized
cccactcccctgaaatccagat

SEQ ID NO: 54102 - DNA, 22 bp, Artificial Sequence
  chemically synthesized
ccctgaaatccagatccataaa

SEQ ID NO: 54103 - DNA, 22 bp, Artificial Sequence
  chemically synthesized
aaatccagatccataaatccaa

SEQ ID NO: 54104 - DNA, 22 bp, Artificial Sequence
  chemically synthesized
ggtatctcagtttggctgtccc

SEQ ID NO: 54105 - DNA, 22 bp, Artificial Sequence
  chemically synthesized
agtttggctgtccctccatcaa

SEQ ID NO: 54106 - DNA, 22 bp, Artificial Sequence
  chemically synthesized
ggctgtccctccatcaactcaa

SEQ ID NO: 54107 - DNA, 22 bp, Artificial Sequence
  chemically synthesized
gctgtccctccatcaactcaaa

SEQ ID NO: 54108 - DNA, 22 bp, Artificial Sequence
  chemically synthesized
tccctccatcaactcaaatttg

SEQ ID NO: 54109 - DNA, 22 bp, Artificial Sequence
  chemically synthesized
catcaactcaaatttggctgac

SEQ ID NO: 54110 - DNA, 22 bp, Artificial Sequence
  chemically synthesized
aaatttggctgacacagttttg

SEQ ID NO: 54111 - DNA, 22 bp, Artificial Sequence
  chemically synthesized
ggctgacacagttttggattct

SEQ ID NO: 54112 - DNA, 22 bp, Artificial Sequence
  chemically synthesized
gctgacacagttttggattcta

SEQ ID NO: 54113 - DNA, 22 bp, Artificial Sequence
  chemically synthesized
acacagttttggattctagagc

SEQ ID NO: 54114 - DNA, 22 bp, Artificial Sequence
  chemically synthesized
tggattctagagcatgcaggca

SEQ ID NO: 54115 - DNA, 22 bp, Artificial Sequence
  chemically synthesized
ggattctagagcatgcaggcat

SEQ ID NO: 54116 - DNA, 22 bp, Artificial Sequence
  chemically synthesized
gattctagagcatgcaggcatt

SEQ ID NO: 54117 - DNA, 22 bp, Artificial Sequence
  chemically synthesized
tagagcatgcaggcattctgta

SEQ ID NO: 54118 - DNA, 22 bp, Artificial Sequence
  chemically synthesized
gagcatgcaggcattctgtatg

SEQ ID NO: 54119 - DNA, 22 bp, Artificial Sequence
  chemically synthesized
tgtatgtgctgtgcctttgcac

SEQ ID NO: 54120 - DNA, 22 bp, Artificial Sequence
  chemically synthesized
tatgtgctgtgcctttgcactc

SEQ ID NO: 54121 - DNA, 22 bp, Artificial Sequence
  chemically synthesized
tgcctttgcactcactcttccc

SEQ ID NO: 54122 - DNA, 22 bp, Artificial Sequence
  chemically synthesized
tgcactcactcttccctccaga

SEQ ID NO: 54123 - DNA, 22 bp, Artificial Sequence
  chemically synthesized
gcactcactcttccctccagac

SEQ ID NO: 54124 - DNA, 22 bp, Artificial Sequence
  chemically synthesized
cactcactcttccctccagacc

SEQ ID NO: 54125 - DNA, 22 bp, Artificial Sequence
  chemically synthesized
actcttccctccagaccccgtc

SEQ ID NO: 54126 - DNA, 22 bp, Artificial Sequence
  chemically synthesized
ttccctccagaccccgtccttc

SEQ ID NO: 54127 - DNA, 22 bp, Artificial Sequence
  chemically synthesized
ccctccagaccccgtccttcct

SEQ ID NO: 54128 - DNA, 22 bp, Artificial Sequence
  chemically synthesized
cctccagaccccgtccttcctc

SEQ ID NO: 54129 - DNA, 22 bp, Artificial Sequence
  chemically synthesized
cagaccccgtccttcctcactt

SEQ ID NO: 54130 - DNA, 22 bp, Artificial Sequence
  chemically synthesized
cctcactttgccagttccaact

SEQ ID NO: 54131 - DNA, 22 bp, Artificial Sequence
  chemically synthesized
ctcactttgccagttccaactt

SEQ ID NO: 54132 - DNA, 22 bp, Artificial Sequence
  chemically synthesized
actttgccagttccaacttctc

SEQ ID NO: 54133 - DNA, 22 bp, Artificial Sequence
  chemically synthesized
tgccagttccaacttctctctg

SEQ ID NO: 54134 - DNA, 22 bp, Artificial Sequence
  chemically synthesized
gccagttccaacttctctctga

SEQ ID NO: 54135 - DNA, 22 bp, Artificial Sequence
  chemically synthesized
ccagttccaacttctctctgaa

SEQ ID NO: 54136 - DNA, 22 bp, Artificial Sequence
  chemically synthesized
caacttctctctgaagactcag

SEQ ID NO: 54137 - DNA, 22 bp, Artificial Sequence
  chemically synthesized
ctctctgaagactcagtttagg

SEQ ID NO: 54138 - DNA, 22 bp, Artificial Sequence
  chemically synthesized
tctctgaagactcagtttaggt

SEQ ID NO: 54139 - DNA, 22 bp, Artificial Sequence
  chemically synthesized
tctgaagactcagtttaggtac

SEQ ID NO: 54140 - DNA, 22 bp, Artificial Sequence
  chemically synthesized
tgaagactcagtttaggtacag

SEQ ID NO: 54141 - DNA, 22 bp, Artificial Sequence
  chemically synthesized
aagactcagtttaggtacaggc

SEQ ID NO: 54142 - DNA, 22 bp, Artificial Sequence
  chemically synthesized
agtttaggtacaggctccttta

SEQ ID NO: 54143 - DNA, 22 bp, Artificial Sequence
  chemically synthesized
aggtacaggctcctttaggaaa

SEQ ID NO: 54144 - DNA, 22 bp, Artificial Sequence
  chemically synthesized
ggtacaggctcctttaggaaat

SEQ ID NO: 54145 - DNA, 22 bp, Artificial Sequence
  chemically synthesized
ctttaggaaatttttttttgac

SEQ ID NO: 54146 - DNA, 22 bp, Artificial Sequence
  chemically synthesized
taggaaatttttttttgactct

SEQ ID NO: 54147 - DNA, 22 bp, Artificial Sequence
  chemically synthesized
aggaaatttttttttgactcta

SEQ ID NO: 54148 - DNA, 22 bp, Artificial Sequence
  chemically synthesized
ggaaatttttttttgactctac

SEQ ID NO: 54149 - DNA, 22 bp, Artificial Sequence
  chemically synthesized
ttttttgactctacctagccca

SEQ ID NO: 54150 - DNA, 22 bp, Artificial Sequence
  chemically synthesized
tttttgactctacctagcccag

SEQ ID NO: 54151 - DNA, 22 bp, Artificial Sequence
  chemically synthesized
ttttgactctacctagcccaga

SEQ ID NO: 54152 - DNA, 22 bp, Artificial Sequence
  chemically synthesized
tttgactctacctagcccagac

SEQ ID NO: 54153 - DNA, 22 bp, Artificial Sequence
  chemically synthesized
ttgactctacctagcccagact

SEQ ID NO: 54154 - DNA, 22 bp, Artificial Sequence
  chemically synthesized
tgactctacctagcccagactc

SEQ ID NO: 54155 - DNA, 22 bp, Artificial Sequence
  chemically synthesized
gactctacctagcccagactca

SEQ ID NO: 54156 - DNA, 22 bp, Artificial Sequence
  chemically synthesized
actctacctagcccagactcag

SEQ ID NO: 54157 - DNA, 22 bp, Artificial Sequence
  chemically synthesized
tacctagcccagactcagttca

SEQ ID NO: 54158 - DNA, 22 bp, Artificial Sequence
  chemically synthesized
cctagcccagactcagttcatc

SEQ ID NO: 54159 - DNA, 22 bp, Artificial Sequence
  chemically synthesized
gcccagactcagttcatctacg

SEQ ID NO: 54160 - DNA, 22 bp, Artificial Sequence
  chemically synthesized
agttcatctacgatattaatct

SEQ ID NO: 54161 - DNA, 22 bp, Artificial Sequence
  chemically synthesized
atctacgatattaatctgcagt

SEQ ID NO: 54162 - DNA, 22 bp, Artificial Sequence
  chemically synthesized
cgatattaatctgcagtgtcat

SEQ ID NO: 54163 - DNA, 22 bp, Artificial Sequence
  chemically synthesized
atctgcagtgtcatgcactagc

SEQ ID NO: 54164 - DNA, 22 bp, Artificial Sequence
  chemically synthesized
cagtgtcatgcactagcacaaa

SEQ ID NO: 54165 - DNA, 22 bp, Artificial Sequence
  chemically synthesized
gcacaaaatatttgctgaatga

SEQ ID NO: 54166 - DNA, 22 bp, Artificial Sequence
  chemically synthesized
gctgaatgaaagaatgagagtt

SEQ ID NO: 54167 - DNA, 22 bp, Artificial Sequence
  chemically synthesized
ctgaatgaaagaatgagagtta

SEQ ID NO: 54168 - DNA, 22 bp, Artificial Sequence
  chemically synthesized
aatgaaagaatgagagttaact

SEQ ID NO: 54169 - DNA, 22 bp, Artificial Sequence
  chemically synthesized
acttttagtcaggcataaagat

SEQ ID NO: 54170 - DNA, 22 bp, Artificial Sequence
  chemically synthesized
ttagtcaggcataaagataaaa

SEQ ID NO: 54171 - DNA, 22 bp, Artificial Sequence
  chemically synthesized
tagtcaggcataaagataaaaa

SEQ ID NO: 54172 - DNA, 22 bp, Artificial Sequence
  chemically synthesized
agtcaggcataaagataaaaaa

SEQ ID NO: 54173 - DNA, 22 bp, Artificial Sequence
  chemically synthesized
gtcaggcataaagataaaaaac

SEQ ID NO: 54174 - DNA, 22 bp, Artificial Sequence
  chemically synthesized
ttactccggtgtggagtgtttt

SEQ ID NO: 54175 - DNA, 22 bp, Artificial Sequence
  chemically synthesized
tactccggtgtggagtgttttc

SEQ ID NO: 54176 - DNA, 22 bp, Artificial Sequence
  chemically synthesized
actccggtgtggagtgttttca

SEQ ID NO: 54177 - DNA, 22 bp, Artificial Sequence
  chemically synthesized
ctccggtgtggagtgttttcag

SEQ ID NO: 54178 - DNA, 22 bp, Artificial Sequence
  chemically synthesized
cggtgtggagtgttttcaggat

SEQ ID NO: 54179 - DNA, 22 bp, Artificial Sequence
  chemically synthesized
tcaggattcctaccaattagga

SEQ ID NO: 54180 - DNA, 22 bp, Artificial Sequence
  chemically synthesized
caggattcctaccaattaggaa

SEQ ID NO: 54181 - DNA, 22 bp, Artificial Sequence
  chemically synthesized
aggattcctaccaattaggaag

SEQ ID NO: 54182 - DNA, 22 bp, Artificial Sequence
  chemically synthesized
ctaccaattaggaaggtgtttg

SEQ ID NO: 54183 - DNA, 22 bp, Artificial Sequence
  chemically synthesized
ccaattaggaaggtgtttgatt

SEQ ID NO: 54184 - DNA, 22 bp, Artificial Sequence
  chemically synthesized
ggaaggtgtttgattcttcaaa

SEQ ID NO: 54185 - DNA, 22 bp, Artificial Sequence
  chemically synthesized
gattcttcaaactcagaaacac

SEQ ID NO: 54186 - DNA, 22 bp, Artificial Sequence
  chemically synthesized
attcttcaaactcagaaacacc

SEQ ID NO: 54187 - DNA, 22 bp, Artificial Sequence
  chemically synthesized
ttcaaactcagaaacacctccc

SEQ ID NO: 54188 - DNA, 22 bp, Artificial Sequence
  chemically synthesized
caaactcagaaacacctcccct

SEQ ID NO: 54189 - DNA, 22 bp, Artificial Sequence
  chemically synthesized
aaactcagaaacacctcccctt

SEQ ID NO: 54190 - DNA, 22 bp, Artificial Sequence
  chemically synthesized
agaaacacctccccttaactga

SEQ ID NO: 54191 - DNA, 22 bp, Artificial Sequence
  chemically synthesized
cccttaactgatggattcttca

SEQ ID NO: 54192 - DNA, 22 bp, Artificial Sequence
  chemically synthesized
aactgatggattcttcaaactc

SEQ ID NO: 54193 - DNA, 22 bp, Artificial Sequence
  chemically synthesized
actgatggattcttcaaactca

SEQ ID NO: 54194 - DNA, 22 bp, Artificial Sequence
  chemically synthesized
atggattcttcaaactcagcat

SEQ ID NO: 54195 - DNA, 22 bp, Artificial Sequence
  chemically synthesized
ttcaaactcagcatcagttaga

SEQ ID NO: 54196 - DNA, 22 bp, Artificial Sequence
  chemically synthesized
caaactcagcatcagttagagg

SEQ ID NO: 54197 - DNA, 22 bp, Artificial Sequence
  chemically synthesized
aaactcagcatcagttagaggg

SEQ ID NO: 54198 - DNA, 22 bp, Artificial Sequence
  chemically synthesized
agcatcagttagagggcattag

SEQ ID NO: 54199 - DNA, 22 bp, Artificial Sequence
  chemically synthesized
gagggcattagggcacttctca

SEQ ID NO: 54200 - DNA, 22 bp, Artificial Sequence
  chemically synthesized
gggcacttctcaaaccctgcat

SEQ ID NO: 54201 - DNA, 22 bp, Artificial Sequence
  chemically synthesized
ctcaaaccctgcattcagggaa

SEQ ID NO: 54202 - DNA, 22 bp, Artificial Sequence
  chemically synthesized
tcaaaccctgcattcagggaag

SEQ ID NO: 54203 - DNA, 22 bp, Artificial Sequence
  chemically synthesized
aaaccctgcattcagggaagat

SEQ ID NO: 54204 - DNA, 22 bp, Artificial Sequence
  chemically synthesized
cattcagggaagatgtctgttg

SEQ ID NO: 54205 - DNA, 22 bp, Artificial Sequence
  chemically synthesized
agggaagatgtctgttgtgggg

SEQ ID NO: 54206 - DNA, 22 bp, Artificial Sequence
  chemically synthesized
ttgtggggtggtctggcctact

SEQ ID NO: 54207 - DNA, 22 bp, Artificial Sequence
  chemically synthesized
tggggtggtctggcctacttgg

SEQ ID NO: 54208 - DNA, 22 bp, Artificial Sequence
  chemically synthesized
gcctacttggcctgagccaagg

SEQ ID NO: 54209 - DNA, 22 bp, Artificial Sequence
  chemically synthesized
cttggcctgagccaaggttctg

SEQ ID NO: 54210 - DNA, 22 bp, Artificial Sequence
  chemically synthesized
ggcctgagccaaggttctgggc

SEQ ID NO: 54211 - DNA, 22 bp, Artificial Sequence
  chemically synthesized
gcctgagccaaggttctgggca

SEQ ID NO: 54212 - DNA, 22 bp, Artificial Sequence
  chemically synthesized
agccaaggttctgggcagttct

SEQ ID NO: 54213 - DNA, 22 bp, Artificial Sequence
  chemically synthesized
tgggcagttctgttcagttaca

SEQ ID NO: 54214 - DNA, 22 bp, Artificial Sequence
  chemically synthesized
ggcagttctgttcagttacaca

SEQ ID NO: 54215 - DNA, 22 bp, Artificial Sequence
  chemically synthesized
tgttcagttacacatgcatgcg

SEQ ID NO: 54216 - DNA, 22 bp, Artificial Sequence
  chemically synthesized
ttcagttacacatgcatgcgtt

SEQ ID NO: 54217 - DNA, 22 bp, Artificial Sequence
  chemically synthesized
agttacacatgcatgcgttgag

SEQ ID NO: 54218 - DNA, 22 bp, Artificial Sequence
  chemically synthesized
cacatgcatgcgttgagcattg

SEQ ID NO: 54219 - DNA, 22 bp, Artificial Sequence
  chemically synthesized
agcattgattcaagcctggcct

SEQ ID NO: 54220 - DNA, 22 bp, Artificial Sequence
  chemically synthesized
attcaagcctggcctgggcact

SEQ ID NO: 54221 - DNA, 22 bp, Artificial Sequence
  chemically synthesized
aagcctggcctgggcactaggc

SEQ ID NO: 54222 - DNA, 22 bp, Artificial Sequence
  chemically synthesized
gcctgggcactaggcatggttt

SEQ ID NO: 54223 - DNA, 22 bp, Artificial Sequence
  chemically synthesized
ggcactaggcatggttttagat

SEQ ID NO: 54224 - DNA, 22 bp, Artificial Sequence
  chemically synthesized
ggcatggttttagatattaggg

SEQ ID NO: 54225 - DNA, 22 bp, Artificial Sequence
  chemically synthesized
tagatattagggacatattctg

SEQ ID NO: 54226 - DNA, 22 bp, Artificial Sequence
  chemically synthesized
agatattagggacatattctgt

SEQ ID NO: 54227 - DNA, 22 bp, Artificial Sequence
  chemically synthesized
gatattagggacatattctgtt

SEQ ID NO: 54228 - DNA, 22 bp, Artificial Sequence
  chemically synthesized
gggacatattctgttttccttg

SEQ ID NO: 54229 - DNA, 22 bp, Artificial Sequence
  chemically synthesized
tgttttccttgccttaagatac

SEQ ID NO: 54230 - DNA, 22 bp, Artificial Sequence
  chemically synthesized
ttttccttgccttaagatacca

SEQ ID NO: 54231 - DNA, 22 bp, Artificial Sequence
  chemically synthesized
tccttgccttaagataccagtc

SEQ ID NO: 54232 - DNA, 22 bp, Artificial Sequence
  chemically synthesized
ccttgccttaagataccagtct

SEQ ID NO: 54233 - DNA, 22 bp, Artificial Sequence
  chemically synthesized
cttgccttaagataccagtcta

SEQ ID NO: 54234 - DNA, 22 bp, Artificial Sequence
  chemically synthesized
gccttaagataccagtctagta

SEQ ID NO: 54235 - DNA, 22 bp, Artificial Sequence
  chemically synthesized
ccttaagataccagtctagtag

SEQ ID NO: 54236 - DNA, 22 bp, Artificial Sequence
  chemically synthesized
aagataccagtctagtaggagc

SEQ ID NO: 54237 - DNA, 22 bp, Artificial Sequence
  chemically synthesized
agataccagtctagtaggagcc

SEQ ID NO: 54238 - DNA, 22 bp, Artificial Sequence
  chemically synthesized
gtaggagccactaaggcccctt

SEQ ID NO: 54239 - DNA, 22 bp, Artificial Sequence
  chemically synthesized
aggcccctttttgagcctggac

SEQ ID NO: 54240 - DNA, 22 bp, Artificial Sequence
  chemically synthesized
tttgagcctggacttcgcattc

SEQ ID NO: 54241 - DNA, 22 bp, Artificial Sequence
  chemically synthesized
ttgagcctggacttcgcattca

SEQ ID NO: 54242 - DNA, 22 bp, Artificial Sequence
  chemically synthesized
tgagcctggacttcgcattcaa

SEQ ID NO: 54243 - DNA, 22 bp, Artificial Sequence
  chemically synthesized
gagcctggacttcgcattcaaa

SEQ ID NO: 54244 - DNA, 22 bp, Artificial Sequence
  chemically synthesized
agcctggacttcgcattcaaac

SEQ ID NO: 54245 - DNA, 22 bp, Artificial Sequence
  chemically synthesized
gacttcgcattcaaacataccc

SEQ ID NO: 54246 - DNA, 22 bp, Artificial Sequence
  chemically synthesized
cgcattcaaacataccctgctt

SEQ ID NO: 54247 - DNA, 22 bp, Artificial Sequence
  chemically synthesized
gcattcaaacataccctgcttc

SEQ ID NO: 54248 - DNA, 22 bp, Artificial Sequence
  chemically synthesized
aaacataccctgcttctaatca

SEQ ID NO: 54249 - DNA, 22 bp, Artificial Sequence
  chemically synthesized
cttctaatcaagtcatctattg

SEQ ID NO: 54250 - DNA, 22 bp, Artificial Sequence
  chemically synthesized
ctaatcaagtcatctattggca

SEQ ID NO: 54251 - DNA, 22 bp, Artificial Sequence
  chemically synthesized
taatcaagtcatctattggcag

SEQ ID NO: 54252 - DNA, 22 bp, Artificial Sequence
  chemically synthesized
atcaagtcatctattggcagtg

SEQ ID NO: 54253 - DNA, 22 bp, Artificial Sequence
  chemically synthesized
ttggcagtgaccttgggcaaat

SEQ ID NO: 54254 - DNA, 22 bp, Artificial Sequence
  chemically synthesized
gcagtgaccttgggcaaatcat

SEQ ID NO: 54255 - DNA, 22 bp, Artificial Sequence
  chemically synthesized
gggcaaatcatagtctctccaa

SEQ ID NO: 54256 - DNA, 22 bp, Artificial Sequence
  chemically synthesized
ggcaaatcatagtctctccaag

SEQ ID NO: 54257 - DNA, 22 bp, Artificial Sequence
  chemically synthesized
tccaagcattacttttctaatt

SEQ ID NO: 54258 - DNA, 22 bp, Artificial Sequence
  chemically synthesized
caagcattacttttctaattga

SEQ ID NO: 54259 - DNA, 22 bp, Artificial Sequence
  chemically synthesized
cttttctaattgaaacaagaac

SEQ ID NO: 54260 - DNA, 22 bp, Artificial Sequence
  chemically synthesized
ttctaattgaaacaagaacctc

SEQ ID NO: 54261 - DNA, 22 bp, Artificial Sequence
  chemically synthesized
tctaattgaaacaagaacctct

SEQ ID NO: 54262 - DNA, 22 bp, Artificial Sequence
  chemically synthesized
ctaattgaaacaagaacctctc

SEQ ID NO: 54263 - DNA, 22 bp, Artificial Sequence
  chemically synthesized
taattgaaacaagaacctctct

SEQ ID NO: 54264 - DNA, 22 bp, Artificial Sequence
  chemically synthesized
attgaaacaagaacctctctct

SEQ ID NO: 54265 - DNA, 22 bp, Artificial Sequence
  chemically synthesized
aaacaagaacctctctctatac

SEQ ID NO: 54266 - DNA, 22 bp, Artificial Sequence
  chemically synthesized
tctctataccccagatttattt

SEQ ID NO: 54267 - DNA, 22 bp, Artificial Sequence
  chemically synthesized
tctataccccagatttattttg

SEQ ID NO: 54268 - DNA, 22 bp, Artificial Sequence
  chemically synthesized
tataccccagatttattttgag

SEQ ID NO: 54269 - DNA, 22 bp, Artificial Sequence
  chemically synthesized
taccccagatttattttgagga

SEQ ID NO: 54270 - DNA, 22 bp, Artificial Sequence
  chemically synthesized
attttgaggattatgagttaat

SEQ ID NO: 54271 - DNA, 22 bp, Artificial Sequence
  chemically synthesized
ttttgaggattatgagttaatt

SEQ ID NO: 54272 - DNA, 22 bp, Artificial Sequence
  chemically synthesized
tgaggattatgagttaattcat

SEQ ID NO: 54273 - DNA, 22 bp, Artificial Sequence
  chemically synthesized
gaggattatgagttaattcata

SEQ ID NO: 54274 - DNA, 22 bp, Artificial Sequence
  chemically synthesized
aggattatgagttaattcatag

SEQ ID NO: 54275 - DNA, 22 bp, Artificial Sequence
  chemically synthesized
tgagttaattcatagctaaaat

SEQ ID NO: 54276 - DNA, 22 bp, Artificial Sequence
  chemically synthesized
attcatagctaaaatgcttagc

SEQ ID NO: 54277 - DNA, 22 bp, Artificial Sequence
  chemically synthesized
atagctaaaatgcttagcacct

SEQ ID NO: 54278 - DNA, 22 bp, Artificial Sequence
  chemically synthesized
aaatgcttagcacctaacagca

SEQ ID NO: 54279 - DNA, 22 bp, Artificial Sequence
  chemically synthesized
agcacctaacagcacataaccc

SEQ ID NO: 54280 - DNA, 22 bp, Artificial Sequence
  chemically synthesized
gcacctaacagcacataaccca

SEQ ID NO: 54281 - DNA, 22 bp, Artificial Sequence
  chemically synthesized
acagcacataacccacacatac

SEQ ID NO: 54282 - DNA, 22 bp, Artificial Sequence
  chemically synthesized
ttcaattgcgtattactaaaaa

SEQ ID NO: 54283 - DNA, 22 bp, Artificial Sequence
  chemically synthesized
tcaattgcgtattactaaaaag

SEQ ID NO: 54284 - DNA, 22 bp, Artificial Sequence
  chemically synthesized
caattgcgtattactaaaaaga

SEQ ID NO: 54285 - DNA, 22 bp, Artificial Sequence
  chemically synthesized
aattgcgtattactaaaaagaa

SEQ ID NO: 54286 - DNA, 22 bp, Artificial Sequence
  chemically synthesized
cgtattactaaaaagaaggaat

SEQ ID NO: 54287 - DNA, 22 bp, Artificial Sequence
  chemically synthesized
ctaaaaagaaggaatgatttcc

SEQ ID NO: 54288 - DNA, 22 bp, Artificial Sequence
  chemically synthesized
aaaagaaggaatgatttcctag

SEQ ID NO: 54289 - DNA, 22 bp, Artificial Sequence
  chemically synthesized
cctagaggaggtgcttcttctg

SEQ ID NO: 54290 - DNA, 22 bp, Artificial Sequence
  chemically synthesized
ctagaggaggtgcttcttctgg

SEQ ID NO: 54291 - DNA, 22 bp, Artificial Sequence
  chemically synthesized
gaggaggtgcttcttctggcca

SEQ ID NO: 54292 - DNA, 22 bp, Artificial Sequence
  chemically synthesized
cttctggccaagggctgattca

SEQ ID NO: 54293 - DNA, 22 bp, Artificial Sequence
  chemically synthesized
ttctggccaagggctgattcag

SEQ ID NO: 54294 - DNA, 22 bp, Artificial Sequence
  chemically synthesized
ctggccaagggctgattcagag

SEQ ID NO: 54295 - DNA, 22 bp, Artificial Sequence
  chemically synthesized
tggccaagggctgattcagagc

SEQ ID NO: 54296 - DNA, 22 bp, Artificial Sequence
  chemically synthesized
gccaagggctgattcagagcct

SEQ ID NO: 54297 - DNA, 22 bp, Artificial Sequence
  chemically synthesized
attcagagccttaattaactaa

SEQ ID NO: 54298 - DNA, 22 bp, Artificial Sequence
  chemically synthesized
agagccttaattaactaaatag

SEQ ID NO: 54299 - DNA, 22 bp, Artificial Sequence
  chemically synthesized
aattaactaaatagatcaagca

SEQ ID NO: 54300 - DNA, 22 bp, Artificial Sequence
  chemically synthesized
attaactaaatagatcaagcat

SEQ ID NO: 54301 - DNA, 22 bp, Artificial Sequence
  chemically synthesized
actaaatagatcaagcatatct

SEQ ID NO: 54302 - DNA, 22 bp, Artificial Sequence
  chemically synthesized
aatagatcaagcatatctaact

SEQ ID NO: 54303 - DNA, 22 bp, Artificial Sequence
  chemically synthesized
actggtcaccggaagtggtcca

SEQ ID NO: 54304 - DNA, 22 bp, Artificial Sequence
  chemically synthesized
gtcaccggaagtggtccatgag

SEQ ID NO: 54305 - DNA, 22 bp, Artificial Sequence
  chemically synthesized
cagcaatgggaaggtgtcagag

SEQ ID NO: 54306 - DNA, 22 bp, Artificial Sequence
  chemically synthesized
ggaaaaagacatagagagaaac

SEQ ID NO: 54307 - DNA, 22 bp, Artificial Sequence
  chemically synthesized
ttaggatgtctacagatttcca

SEQ ID NO: 54308 - DNA, 22 bp, Artificial Sequence
  chemically synthesized
aggatgtctacagatttccaag

SEQ ID NO: 54309 - DNA, 22 bp, Artificial Sequence
  chemically synthesized
ggatgtctacagatttccaaga

SEQ ID NO: 54310 - DNA, 22 bp, Artificial Sequence
  chemically synthesized
cagatttccaagacaataattg

SEQ ID NO: 54311 - DNA, 22 bp, Artificial Sequence
  chemically synthesized
ccaagacaataattgaaatgaa

SEQ ID NO: 54312 - DNA, 22 bp, Artificial Sequence
  chemically synthesized
caagacaataattgaaatgaac

SEQ ID NO: 54313 - DNA, 22 bp, Artificial Sequence
  chemically synthesized
aaatgaacaaaggcaagggatg

SEQ ID NO: 54314 - DNA, 22 bp, Artificial Sequence
  chemically synthesized
catttctttcctttatcacctt

SEQ ID NO: 54315 - DNA, 22 bp, Artificial Sequence
  chemically synthesized
atttctttcctttatcaccttt

SEQ ID NO: 54316 - DNA, 22 bp, Artificial Sequence
  chemically synthesized
ctttcctttatcacctttccct

SEQ ID NO: 54317 - DNA, 22 bp, Artificial Sequence
  chemically synthesized
tttcctttatcacctttccctt

SEQ ID NO: 54318 - DNA, 22 bp, Artificial Sequence
  chemically synthesized
tcctttatcacctttcccttgt

SEQ ID NO: 54319 - DNA, 22 bp, Artificial Sequence
  chemically synthesized
cctttatcacctttcccttgtt

SEQ ID NO: 54320 - DNA, 22 bp, Artificial Sequence
  chemically synthesized
ctttatcacctttcccttgttc

SEQ ID NO: 54321 - DNA, 22 bp, Artificial Sequence
  chemically synthesized
tatcacctttcccttgttcttc

SEQ ID NO: 54322 - DNA, 22 bp, Artificial Sequence
  chemically synthesized
atcacctttcccttgttcttca

SEQ ID NO: 54323 - DNA, 22 bp, Artificial Sequence
  chemically synthesized
tcacctttcccttgttcttcag

SEQ ID NO: 54324 - DNA, 22 bp, Artificial Sequence
  chemically synthesized
tcccttgttcttcagctccagc

SEQ ID NO: 54325 - DNA, 22 bp, Artificial Sequence
  chemically synthesized
cccttgttcttcagctccagct

SEQ ID NO: 54326 - DNA, 22 bp, Artificial Sequence
  chemically synthesized
ccttgttcttcagctccagctg

SEQ ID NO: 54327 - DNA, 22 bp, Artificial Sequence
  chemically synthesized
gttcttcagctccagctgtgcc

SEQ ID NO: 54328 - DNA, 22 bp, Artificial Sequence
  chemically synthesized
ttcttcagctccagctgtgccc

SEQ ID NO: 54329 - DNA, 22 bp, Artificial Sequence
  chemically synthesized
ttcagctccagctgtgcccaca

SEQ ID NO: 54330 - DNA, 22 bp, Artificial Sequence
  chemically synthesized
cagctccagctgtgcccacaga

SEQ ID NO: 54331 - DNA, 22 bp, Artificial Sequence
  chemically synthesized
agctccagctgtgcccacagac

SEQ ID NO: 54332 - DNA, 22 bp, Artificial Sequence
  chemically synthesized
cagctgtgcccacagacaccac

SEQ ID NO: 54333 - DNA, 22 bp, Artificial Sequence
  chemically synthesized
tgcccacagacaccacagggaa

SEQ ID NO: 54334 - DNA, 22 bp, Artificial Sequence
  chemically synthesized
tgaacacaggggtttgaaccag

SEQ ID NO: 54335 - DNA, 22 bp, Artificial Sequence
  chemically synthesized
aacacaggggtttgaaccaggg

SEQ ID NO: 54336 - DNA, 22 bp, Artificial Sequence
  chemically synthesized
gaaccagggcctctctaagtct

SEQ ID NO: 54337 - DNA, 22 bp, Artificial Sequence
  chemically synthesized
aaccagggcctctctaagtctt

SEQ ID NO: 54338 - DNA, 22 bp, Artificial Sequence
  chemically synthesized
tctaagtcttttccaactctga

SEQ ID NO: 54339 - DNA, 22 bp, Artificial Sequence
  chemically synthesized
taagtcttttccaactctgata

SEQ ID NO: 54340 - DNA, 22 bp, Artificial Sequence
  chemically synthesized
agtcttttccaactctgatacc

SEQ ID NO: 54341 - DNA, 22 bp, Artificial Sequence
  chemically synthesized
ttccaactctgataccctgaag

SEQ ID NO: 54342 - DNA, 22 bp, Artificial Sequence
  chemically synthesized
tccaactctgataccctgaagt

SEQ ID NO: 54343 - DNA, 22 bp, Artificial Sequence
  chemically synthesized
ccaactctgataccctgaagtt

SEQ ID NO: 54344 - DNA, 22 bp, Artificial Sequence
  chemically synthesized
caactctgataccctgaagttc

SEQ ID NO: 54345 - DNA, 22 bp, Artificial Sequence
  chemically synthesized
tgataccctgaagttctcagaa

SEQ ID NO: 54346 - DNA, 22 bp, Artificial Sequence
  chemically synthesized
ataccctgaagttctcagaaac

SEQ ID NO: 54347 - DNA, 22 bp, Artificial Sequence
  chemically synthesized
aagttctcagaaacttccataa

SEQ ID NO: 54348 - DNA, 22 bp, Artificial Sequence
  chemically synthesized
tcagaaacttccataaattttg

SEQ ID NO: 54349 - DNA, 22 bp, Artificial Sequence
  chemically synthesized
agaaacttccataaattttggc

SEQ ID NO: 54350 - DNA, 22 bp, Artificial Sequence
  chemically synthesized
ccataaattttggctgaagaag

SEQ ID NO: 54351 - DNA, 22 bp, Artificial Sequence
  chemically synthesized
cataaattttggctgaagaagc

SEQ ID NO: 54352 - DNA, 22 bp, Artificial Sequence
  chemically synthesized
tggctgaagaagccatagcaaa

SEQ ID NO: 54353 - DNA, 22 bp, Artificial Sequence
  chemically synthesized
ggctgaagaagccatagcaaac

SEQ ID NO: 54354 - DNA, 22 bp, Artificial Sequence
  chemically synthesized
gctgaagaagccatagcaaact

SEQ ID NO: 54355 - DNA, 22 bp, Artificial Sequence
  chemically synthesized
aagaagccatagcaaacttgtc

SEQ ID NO: 54356 - DNA, 22 bp, Artificial Sequence
  chemically synthesized
gtcagatggtttcttaccttta

SEQ ID NO: 54357 - DNA, 22 bp, Artificial Sequence
  chemically synthesized
tcagatggtttcttacctttaa

SEQ ID NO: 54358 - DNA, 22 bp, Artificial Sequence
  chemically synthesized
cttacctttaactcagccattt

SEQ ID NO: 54359 - DNA, 22 bp, Artificial Sequence
  chemically synthesized
ttacctttaactcagccatttt

SEQ ID NO: 54360 - DNA, 22 bp, Artificial Sequence
  chemically synthesized
acctttaactcagccattttct

SEQ ID NO: 54361 - DNA, 22 bp, Artificial Sequence
  chemically synthesized
cctttaactcagccattttctc

SEQ ID NO: 54362 - DNA, 22 bp, Artificial Sequence
  chemically synthesized
taactcagccattttctctctc

SEQ ID NO: 54363 - DNA, 22 bp, Artificial Sequence
  chemically synthesized
aactcagccattttctctctcc

SEQ ID NO: 54364 - DNA, 22 bp, Artificial Sequence
  chemically synthesized
actcagccattttctctctcct

SEQ ID NO: 54365 - DNA, 22 bp, Artificial Sequence
  chemically synthesized
agccattttctctctcctctat

SEQ ID NO: 54366 - DNA, 22 bp, Artificial Sequence
  chemically synthesized
tctctctcctctatgtgtggtg

SEQ ID NO: 54367 - DNA, 22 bp, Artificial Sequence
  chemically synthesized
ctctctcctctatgtgtggtga

SEQ ID NO: 54368 - DNA, 22 bp, Artificial Sequence
  chemically synthesized
tctctcctctatgtgtggtgac

SEQ ID NO: 54369 - DNA, 22 bp, Artificial Sequence
  chemically synthesized
tctcctctatgtgtggtgactt

SEQ ID NO: 54370 - DNA, 22 bp, Artificial Sequence
  chemically synthesized
tcctctatgtgtggtgacttca

SEQ ID NO: 54371 - DNA, 22 bp, Artificial Sequence
  chemically synthesized
ctctatgtgtggtgacttcagg

SEQ ID NO: 54372 - DNA, 22 bp, Artificial Sequence
  chemically synthesized
tatgtgtggtgacttcaggaaa

SEQ ID NO: 54373 - DNA, 22 bp, Artificial Sequence
  chemically synthesized
tgtgtggtgacttcaggaaacc

SEQ ID NO: 54374 - DNA, 22 bp, Artificial Sequence
  chemically synthesized
caggaaacccaggcccagagga

SEQ ID NO: 54375 - DNA, 22 bp, Artificial Sequence
  chemically synthesized
aggaaacccaggcccagaggat

SEQ ID NO: 54376 - DNA, 22 bp, Artificial Sequence
  chemically synthesized
ctttctccttcaaaccactctt

SEQ ID NO: 54377 - DNA, 22 bp, Artificial Sequence
  chemically synthesized
tttctccttcaaaccactcttt

SEQ ID NO: 54378 - DNA, 22 bp, Artificial Sequence
  chemically synthesized
tctccttcaaaccactctttgg

SEQ ID NO: 54379 - DNA, 22 bp, Artificial Sequence
  chemically synthesized
ctccttcaaaccactctttgga

SEQ ID NO: 54380 - DNA, 22 bp, Artificial Sequence
  chemically synthesized
tccttcaaaccactctttggat

SEQ ID NO: 54381 - DNA, 22 bp, Artificial Sequence
  chemically synthesized
cttcaaaccactctttggatat

SEQ ID NO: 54382 - DNA, 22 bp, Artificial Sequence
  chemically synthesized
caaaccactctttggatattcc

SEQ ID NO: 54383 - DNA, 22 bp, Artificial Sequence
  chemically synthesized
aaaccactctttggatattccg

SEQ ID NO: 54384 - DNA, 22 bp, Artificial Sequence
  chemically synthesized
tttggatattccggttcccact

SEQ ID NO: 54385 - DNA, 22 bp, Artificial Sequence
  chemically synthesized
tggatattccggttcccactgc

SEQ ID NO: 54386 - DNA, 22 bp, Artificial Sequence
  chemically synthesized
ggatattccggttcccactgct

SEQ ID NO: 54387 - DNA, 22 bp, Artificial Sequence
  chemically synthesized
gatattccggttcccactgctt

SEQ ID NO: 54388 - DNA, 22 bp, Artificial Sequence
  chemically synthesized
cggttcccactgcttcactgcg

SEQ ID NO: 54389 - DNA, 22 bp, Artificial Sequence
  chemically synthesized
ccactgcttcactgcgcttcac

SEQ ID NO: 54390 - DNA, 22 bp, Artificial Sequence
  chemically synthesized
cttcactgcgcttcactggtca

SEQ ID NO: 54391 - DNA, 22 bp, Artificial Sequence
  chemically synthesized
cactgcgcttcactggtcagtg

SEQ ID NO: 54392 - DNA, 22 bp, Artificial Sequence
  chemically synthesized
actgcgcttcactggtcagtgc

SEQ ID NO: 54393 - DNA, 22 bp, Artificial Sequence
  chemically synthesized
cgcttcactggtcagtgcgtca

SEQ ID NO: 54394 - DNA, 22 bp, Artificial Sequence
  chemically synthesized
cactggtcagtgcgtcactcaa

SEQ ID NO: 54395 - DNA, 22 bp, Artificial Sequence
  chemically synthesized
actggtcagtgcgtcactcaaa

SEQ ID NO: 54396 - DNA, 22 bp, Artificial Sequence
  chemically synthesized
gtcagtgcgtcactcaaactag

SEQ ID NO: 54397 - DNA, 22 bp, Artificial Sequence
  chemically synthesized
aaactagctgaaagaattgtct

SEQ ID NO: 54398 - DNA, 22 bp, Artificial Sequence
  chemically synthesized
gctgaaagaattgtctaactca

SEQ ID NO: 54399 - DNA, 22 bp, Artificial Sequence
  chemically synthesized
aaagaattgtctaactcataca

SEQ ID NO: 54400 - DNA, 22 bp, Artificial Sequence
  chemically synthesized
tctaactcatacacagggacaa

SEQ ID NO: 54401 - DNA, 22 bp, Artificial Sequence
  chemically synthesized
actcatacacagggacaaagtc

SEQ ID NO: 54402 - DNA, 22 bp, Artificial Sequence
  chemically synthesized
atacacagggacaaagtccagc

SEQ ID NO: 54403 - DNA, 22 bp, Artificial Sequence
  chemically synthesized
atttaaccggttacacaattgc

SEQ ID NO: 54404 - DNA, 22 bp, Artificial Sequence
  chemically synthesized
tttaaccggttacacaattgcc

SEQ ID NO: 54405 - DNA, 22 bp, Artificial Sequence
  chemically synthesized
aaccggttacacaattgccttt

SEQ ID NO: 54406 - DNA, 22 bp, Artificial Sequence
  chemically synthesized
accggttacacaattgcctttg

SEQ ID NO: 54407 - DNA, 22 bp, Artificial Sequence
  chemically synthesized
cacaattgcctttggtttttac

SEQ ID NO: 54408 - DNA, 22 bp, Artificial Sequence
  chemically synthesized
cctttggtttttacagtttgtt

SEQ ID NO: 54409 - DNA, 22 bp, Artificial Sequence
  chemically synthesized
tggtttttacagtttgttccta

SEQ ID NO: 54410 - DNA, 22 bp, Artificial Sequence
  chemically synthesized
ggtttttacagtttgttcctaa

SEQ ID NO: 54411 - DNA, 22 bp, Artificial Sequence
  chemically synthesized
gtttttacagtttgttcctaag

SEQ ID NO: 54412 - DNA, 22 bp, Artificial Sequence
  chemically synthesized
ttacagtttgttcctaagtgtt

SEQ ID NO: 54413 - DNA, 22 bp, Artificial Sequence
  chemically synthesized
tacagtttgttcctaagtgttt

SEQ ID NO: 54414 - DNA, 22 bp, Artificial Sequence
  chemically synthesized
acagtttgttcctaagtgtttc

SEQ ID NO: 54415 - DNA, 22 bp, Artificial Sequence
  chemically synthesized
cagtttgttcctaagtgtttcc

SEQ ID NO: 54416 - DNA, 22 bp, Artificial Sequence
  chemically synthesized
gttcctaagtgtttccagaggc

SEQ ID NO: 54417 - DNA, 22 bp, Artificial Sequence
  chemically synthesized
ttcctaagtgtttccagaggct

SEQ ID NO: 54418 - DNA, 22 bp, Artificial Sequence
  chemically synthesized
ctaagtgtttccagaggcttgg

SEQ ID NO: 54419 - DNA, 22 bp, Artificial Sequence
  chemically synthesized
agtgtttccagaggcttggttc

SEQ ID NO: 54420 - DNA, 22 bp, Artificial Sequence
  chemically synthesized
ccagaggcttggttcctcttca

SEQ ID NO: 54421 - DNA, 22 bp, Artificial Sequence
  chemically synthesized
cagaggcttggttcctcttcac

SEQ ID NO: 54422 - DNA, 22 bp, Artificial Sequence
  chemically synthesized
ggttcctcttcacctgaggtag

SEQ ID NO: 54423 - DNA, 22 bp, Artificial Sequence
  chemically synthesized
gttcctcttcacctgaggtaga

SEQ ID NO: 54424 - DNA, 22 bp, Artificial Sequence
  chemically synthesized
ctcttcacctgaggtagagatt

SEQ ID NO: 54425 - DNA, 22 bp, Artificial Sequence
  chemically synthesized
ttcacctgaggtagagattgac

SEQ ID NO: 54426 - DNA, 22 bp, Artificial Sequence
  chemically synthesized
cacctgaggtagagattgacca

SEQ ID NO: 54427 - DNA, 22 bp, Artificial Sequence
  chemically synthesized
acctgaggtagagattgaccaa

SEQ ID NO: 54428 - DNA, 22 bp, Artificial Sequence
  chemically synthesized
aggtagagattgaccaattatt

SEQ ID NO: 54429 - DNA, 22 bp, Artificial Sequence
  chemically synthesized
accaattatttattccagttaa

SEQ ID NO: 54430 - DNA, 22 bp, Artificial Sequence
  chemically synthesized
tttattccagttaaaagtaggc

SEQ ID NO: 54431 - DNA, 22 bp, Artificial Sequence
  chemically synthesized
attccagttaaaagtaggctta

SEQ ID NO: 54432 - DNA, 22 bp, Artificial Sequence
  chemically synthesized
ttccagttaaaagtaggcttat

SEQ ID NO: 54433 - DNA, 22 bp, Artificial Sequence
  chemically synthesized
cagttaaaagtaggcttatttc

SEQ ID NO: 54434 - DNA, 22 bp, Artificial Sequence
  chemically synthesized
aaagtaggcttatttcaaaagg

SEQ ID NO: 54435 - DNA, 22 bp, Artificial Sequence
  chemically synthesized
atttcaaaaggcagagaatttg

SEQ ID NO: 54436 - DNA, 22 bp, Artificial Sequence
  chemically synthesized
tttcaaaaggcagagaatttga

SEQ ID NO: 54437 - DNA, 22 bp, Artificial Sequence
  chemically synthesized
caaaaggcagagaatttgaagc

SEQ ID NO: 54438 - DNA, 22 bp, Artificial Sequence
  chemically synthesized
aaaaggcagagaatttgaagct

SEQ ID NO: 54439 - DNA, 22 bp, Artificial Sequence
  chemically synthesized
gaagctatcggggaaaggaact

SEQ ID NO: 54440 - DNA, 22 bp, Artificial Sequence
  chemically synthesized
aagctatcggggaaaggaactg

SEQ ID NO: 54441 - DNA, 22 bp, Artificial Sequence
  chemically synthesized
tcggggaaaggaactgtggcag

SEQ ID NO: 54442 - DNA, 22 bp, Artificial Sequence
  chemically synthesized
tggcagatagtgcctgctgtgt

SEQ ID NO: 54443 - DNA, 22 bp, Artificial Sequence
  chemically synthesized
ctgtgtgtggtggaggattctc

SEQ ID NO: 54444 - DNA, 22 bp, Artificial Sequence
  chemically synthesized
tgtgtggtggaggattctctgc

SEQ ID NO: 54445 - DNA, 22 bp, Artificial Sequence
  chemically synthesized
tctgctcagtcctgactcaggc

SEQ ID NO: 54446 - DNA, 22 bp, Artificial Sequence
  chemically synthesized
tgctcagtcctgactcaggcta

SEQ ID NO: 54447 - DNA, 22 bp, Artificial Sequence
  chemically synthesized
ctcagtcctgactcaggctagg

SEQ ID NO: 54448 - DNA, 22 bp, Artificial Sequence
  chemically synthesized
agtcctgactcaggctaggaag

SEQ ID NO: 54449 - DNA, 22 bp, Artificial Sequence
  chemically synthesized
actcaggctaggaaggaacagg

SEQ ID NO: 54450 - DNA, 22 bp, Artificial Sequence
  chemically synthesized
aggctaggaaggaacagggcag

SEQ ID NO: 54451 - DNA, 22 bp, Artificial Sequence
  chemically synthesized
ggaaggaacagggcagtgctga

SEQ ID NO: 54452 - DNA, 22 bp, Artificial Sequence
  chemically synthesized
caggagactcagcactgccctg

SEQ ID NO: 54453 - DNA, 22 bp, Artificial Sequence
  chemically synthesized
agcactgccctgttccttccta

SEQ ID NO: 54454 - DNA, 22 bp, Artificial Sequence
  chemically synthesized
ccctgttccttcctagcctgag

SEQ ID NO: 54455 - DNA, 22 bp, Artificial Sequence
  chemically synthesized
ttccttcctagcctgagtcagg

SEQ ID NO: 54456 - DNA, 22 bp, Artificial Sequence
  chemically synthesized
cttcctagcctgagtcaggact

SEQ ID NO: 54457 - DNA, 22 bp, Artificial Sequence
  chemically synthesized
cctagcctgagtcaggactgag

SEQ ID NO: 54458 - DNA, 22 bp, Artificial Sequence
  chemically synthesized
ctagcctgagtcaggactgagc

SEQ ID NO: 54459 - DNA, 22 bp, Artificial Sequence
  chemically synthesized
gcctgagtcaggactgagcaga

SEQ ID NO: 54460 - DNA, 22 bp, Artificial Sequence
  chemically synthesized
agtcaggactgagcagagaatc

SEQ ID NO: 54461 - DNA, 22 bp, Artificial Sequence
  chemically synthesized
agcagagaatcctccaccacac

SEQ ID NO: 54462 - DNA, 22 bp, Artificial Sequence
  chemically synthesized
caccacacacagcaggcactat

SEQ ID NO: 54463 - DNA, 22 bp, Artificial Sequence
  chemically synthesized
tctgccacagttcctttccccg

SEQ ID NO: 54464 - DNA, 22 bp, Artificial Sequence
  chemically synthesized
ccacagttcctttccccgatag

SEQ ID NO: 54465 - DNA, 22 bp, Artificial Sequence
  chemically synthesized
ctttccccgatagcttcaaatt

SEQ ID NO: 54466 - DNA, 22 bp, Artificial Sequence
  chemically synthesized
tccccgatagcttcaaattctc

SEQ ID NO: 54467 - DNA, 22 bp, Artificial Sequence
  chemically synthesized
ccccgatagcttcaaattctct

SEQ ID NO: 54468 - DNA, 22 bp, Artificial Sequence
  chemically synthesized
cccgatagcttcaaattctctg

SEQ ID NO: 54469 - DNA, 22 bp, Artificial Sequence
  chemically synthesized
caaattctctgccttttgaaat

SEQ ID NO: 54470 - DNA, 22 bp, Artificial Sequence
  chemically synthesized
aaattctctgccttttgaaata

SEQ ID NO: 54471 - DNA, 22 bp, Artificial Sequence
  chemically synthesized
tctgccttttgaaataagccta

SEQ ID NO: 54472 - DNA, 22 bp, Artificial Sequence
  chemically synthesized
tgccttttgaaataagcctact

SEQ ID NO: 54473 - DNA, 22 bp, Artificial Sequence
  chemically synthesized
ccttttgaaataagcctacttt

SEQ ID NO: 54474 - DNA, 22 bp, Artificial Sequence
  chemically synthesized
ttgaaataagcctacttttaac

SEQ ID NO: 54475 - DNA, 22 bp, Artificial Sequence
  chemically synthesized
tgaaataagcctacttttaact

SEQ ID NO: 54476 - DNA, 22 bp, Artificial Sequence
  chemically synthesized
gaaataagcctacttttaactg

SEQ ID NO: 54477 - DNA, 22 bp, Artificial Sequence
  chemically synthesized
aaataagcctacttttaactgg

SEQ ID NO: 54478 - DNA, 22 bp, Artificial Sequence
  chemically synthesized
cttttaactggaataaataatt

SEQ ID NO: 54479 - DNA, 22 bp, Artificial Sequence
  chemically synthesized
ttaactggaataaataattggt

SEQ ID NO: 54480 - DNA, 22 bp, Artificial Sequence
  chemically synthesized
taactggaataaataattggtc

SEQ ID NO: 54481 - DNA, 22 bp, Artificial Sequence
  chemically synthesized
aactggaataaataattggtca

SEQ ID NO: 54482 - DNA, 22 bp, Artificial Sequence
  chemically synthesized
actggaataaataattggtcaa

SEQ ID NO: 54483 - DNA, 22 bp, Artificial Sequence
  chemically synthesized
gaataaataattggtcaatctc

SEQ ID NO: 54484 - DNA, 22 bp, Artificial Sequence
  chemically synthesized
gtcaatctctacctcaggtgaa

SEQ ID NO: 54485 - DNA, 22 bp, Artificial Sequence
  chemically synthesized
tacctcaggtgaagaggaacca

SEQ ID NO: 54486 - DNA, 22 bp, Artificial Sequence
  chemically synthesized
cctcaggtgaagaggaaccaag

SEQ ID NO: 54487 - DNA, 22 bp, Artificial Sequence
  chemically synthesized
aggtgaagaggaaccaagcctc

SEQ ID NO: 54488 - DNA, 22 bp, Artificial Sequence
  chemically synthesized
tggaaacacttaggaacaaact

SEQ ID NO: 54489 - DNA, 22 bp, Artificial Sequence
  chemically synthesized
gaaacacttaggaacaaactgt

SEQ ID NO: 54490 - DNA, 22 bp, Artificial Sequence
  chemically synthesized
aggaacaaactgtaaaaaccaa

SEQ ID NO: 54491 - DNA, 22 bp, Artificial Sequence
  chemically synthesized
ggaacaaactgtaaaaaccaaa

SEQ ID NO: 54492 - DNA, 22 bp, Artificial Sequence
  chemically synthesized
taaaaaccaaaggcaattgtgt

SEQ ID NO: 54493 - DNA, 22 bp, Artificial Sequence
  chemically synthesized
tgtaaccggttaaataagcttg

SEQ ID NO: 54494 - DNA, 22 bp, Artificial Sequence
  chemically synthesized
aataagcttgctggactttgtc

SEQ ID NO: 54495 - DNA, 22 bp, Artificial Sequence
  chemically synthesized
gctggactttgtccctgtgtat

SEQ ID NO: 54496 - DNA, 22 bp, Artificial Sequence
  chemically synthesized
ctggactttgtccctgtgtatg

SEQ ID NO: 54497 - DNA, 22 bp, Artificial Sequence
  chemically synthesized
gactttgtccctgtgtatgagt

SEQ ID NO: 54498 - DNA, 22 bp, Artificial Sequence
  chemically synthesized
tgtccctgtgtatgagttagac

SEQ ID NO: 54499 - DNA, 22 bp, Artificial Sequence
  chemically synthesized
gtccctgtgtatgagttagaca

SEQ ID NO: 54500 - DNA, 22 bp, Artificial Sequence
  chemically synthesized
tccctgtgtatgagttagacaa

SEQ ID NO: 54501 - DNA, 22 bp, Artificial Sequence
  chemically synthesized
tgtatgagttagacaattcttt

SEQ ID NO: 54502 - DNA, 22 bp, Artificial Sequence
  chemically synthesized
gacaattctttcagctagtttg

SEQ ID NO: 54503 - DNA, 22 bp, Artificial Sequence
  chemically synthesized
tttcagctagtttgagtgacgc

SEQ ID NO: 54504 - DNA, 22 bp, Artificial Sequence
  chemically synthesized
tcagctagtttgagtgacgcac

SEQ ID NO: 54505 - DNA, 22 bp, Artificial Sequence
  chemically synthesized
cagctagtttgagtgacgcact

SEQ ID NO: 54506 - DNA, 22 bp, Artificial Sequence
  chemically synthesized
agctagtttgagtgacgcactg

SEQ ID NO: 54507 - DNA, 22 bp, Artificial Sequence
  chemically synthesized
gtttgagtgacgcactgaccag

SEQ ID NO: 54508 - DNA, 22 bp, Artificial Sequence
  chemically synthesized
gagtgacgcactgaccagtgaa

SEQ ID NO: 54509 - DNA, 22 bp, Artificial Sequence
  chemically synthesized
agtgacgcactgaccagtgaag

SEQ ID NO: 54510 - DNA, 22 bp, Artificial Sequence
  chemically synthesized
accagtgaagcgcagtgaagca

SEQ ID NO: 54511 - DNA, 22 bp, Artificial Sequence
  chemically synthesized
gaaggagaaagaagcattgtgg

SEQ ID NO: 54512 - DNA, 22 bp, Artificial Sequence
  chemically synthesized
aaggagaaagaagcattgtggc

SEQ ID NO: 54513 - DNA, 22 bp, Artificial Sequence
  chemically synthesized
tggctttatatcctctgggcct

SEQ ID NO: 54514 - DNA, 22 bp, Artificial Sequence
  chemically synthesized
tatatcctctgggcctgggttt

SEQ ID NO: 54515 - DNA, 22 bp, Artificial Sequence
  chemically synthesized
atatcctctgggcctgggtttc

SEQ ID NO: 54516 - DNA, 22 bp, Artificial Sequence
  chemically synthesized
tatcctctgggcctgggtttcc

SEQ ID NO: 54517 - DNA, 22 bp, Artificial Sequence
  chemically synthesized
tgggcctgggtttcctgaagtc

SEQ ID NO: 54518 - DNA, 22 bp, Artificial Sequence
  chemically synthesized
ggcctgggtttcctgaagtcac

SEQ ID NO: 54519 - DNA, 22 bp, Artificial Sequence
  chemically synthesized
ggtttcctgaagtcaccacaca

SEQ ID NO: 54520 - DNA, 22 bp, Artificial Sequence
  chemically synthesized
cctgaagtcaccacacatagag

SEQ ID NO: 54521 - DNA, 22 bp, Artificial Sequence
  chemically synthesized
ctgaagtcaccacacatagagg

SEQ ID NO: 54522 - DNA, 22 bp, Artificial Sequence
  chemically synthesized
aagtcaccacacatagaggaga

SEQ ID NO: 54523 - DNA, 22 bp, Artificial Sequence
  chemically synthesized
agttaaaggtaagaaaccatct

SEQ ID NO: 54524 - DNA, 22 bp, Artificial Sequence
  chemically synthesized
aaggtaagaaaccatctgacaa

SEQ ID NO: 54525 - DNA, 22 bp, Artificial Sequence
  chemically synthesized
acaagtttgctatggcttcttc

SEQ ID NO: 54526 - DNA, 22 bp, Artificial Sequence
  chemically synthesized
gctatggcttcttcagccaaaa

SEQ ID NO: 54527 - DNA, 22 bp, Artificial Sequence
  chemically synthesized
ctatggcttcttcagccaaaat

SEQ ID NO: 54528 - DNA, 22 bp, Artificial Sequence
  chemically synthesized
tggcttcttcagccaaaattta

SEQ ID NO: 54529 - DNA, 22 bp, Artificial Sequence
  chemically synthesized
cttcagccaaaatttatggaag

SEQ ID NO: 54530 - DNA, 22 bp, Artificial Sequence
  chemically synthesized
ttcagccaaaatttatggaagt

SEQ ID NO: 54531 - DNA, 22 bp, Artificial Sequence
  chemically synthesized
cagccaaaatttatggaagttt

SEQ ID NO: 54532 - DNA, 22 bp, Artificial Sequence
  chemically synthesized
agccaaaatttatggaagtttc

SEQ ID NO: 54533 - DNA, 22 bp, Artificial Sequence
  chemically synthesized
atggaagtttctgagaacttca

SEQ ID NO: 54534 - DNA, 22 bp, Artificial Sequence
  chemically synthesized
tggaagtttctgagaacttcag

SEQ ID NO: 54535 - DNA, 22 bp, Artificial Sequence
  chemically synthesized
ctgagaacttcagggtatcaga

SEQ ID NO: 54536 - DNA, 22 bp, Artificial Sequence
  chemically synthesized
tgagaacttcagggtatcagag

SEQ ID NO: 54537 - DNA, 22 bp, Artificial Sequence
  chemically synthesized
agaacttcagggtatcagagtt

SEQ ID NO: 54538 - DNA, 22 bp, Artificial Sequence
  chemically synthesized
cagggtatcagagttggaaaag

SEQ ID NO: 54539 - DNA, 22 bp, Artificial Sequence
  chemically synthesized
agggtatcagagttggaaaaga

SEQ ID NO: 54540 - DNA, 22 bp, Artificial Sequence
  chemically synthesized
gaaaagacttagagaggccctg

SEQ ID NO: 54541 - DNA, 22 bp, Artificial Sequence
  chemically synthesized
agagaggccctggttcaaaccc

SEQ ID NO: 54542 - DNA, 22 bp, Artificial Sequence
  chemically synthesized
gagaggccctggttcaaacccc

SEQ ID NO: 54543 - DNA, 22 bp, Artificial Sequence
  chemically synthesized
gttcaaacccctgtgttcagag

SEQ ID NO: 54544 - DNA, 22 bp, Artificial Sequence
  chemically synthesized
aaacccctgtgttcagaggctt

SEQ ID NO: 54545 - DNA, 22 bp, Artificial Sequence
  chemically synthesized
tgttcagaggcttccctgtggt

SEQ ID NO: 54546 - DNA, 22 bp, Artificial Sequence
  chemically synthesized
agaggcttccctgtggtgtctg

SEQ ID NO: 54547 - DNA, 22 bp, Artificial Sequence
  chemically synthesized
ccctgtggtgtctgtgggcaca

SEQ ID NO: 54548 - DNA, 22 bp, Artificial Sequence
  chemically synthesized
cctgtggtgtctgtgggcacag

SEQ ID NO: 54549 - DNA, 22 bp, Artificial Sequence
  chemically synthesized
tggtgtctgtgggcacagctgg

SEQ ID NO: 54550 - DNA, 22 bp, Artificial Sequence
  chemically synthesized
tgggcacagctggagctgaaga

SEQ ID NO: 54551 - DNA, 22 bp, Artificial Sequence
  chemically synthesized
gagctgaagaacaagggaaagg

SEQ ID NO: 54552 - DNA, 22 bp, Artificial Sequence
  chemically synthesized
aagaacaagggaaaggtgataa

SEQ ID NO: 54553 - DNA, 22 bp, Artificial Sequence
  chemically synthesized
ttattggtcatcccttgccttt

SEQ ID NO: 54554 - DNA, 22 bp, Artificial Sequence
  chemically synthesized
attggtcatcccttgcctttgt

SEQ ID NO: 54555 - DNA, 22 bp, Artificial Sequence
  chemically synthesized
ttggtcatcccttgcctttgtt

SEQ ID NO: 54556 - DNA, 22 bp, Artificial Sequence
  chemically synthesized
gtcatcccttgcctttgttcat

SEQ ID NO: 54557 - DNA, 22 bp, Artificial Sequence
  chemically synthesized
gcctttgttcatttcaattatt

SEQ ID NO: 54558 - DNA, 22 bp, Artificial Sequence
  chemically synthesized
cctttgttcatttcaattattg

SEQ ID NO: 54559 - DNA, 22 bp, Artificial Sequence
  chemically synthesized
tgttcatttcaattattgtctt

SEQ ID NO: 54560 - DNA, 22 bp, Artificial Sequence
  chemically synthesized
gttcatttcaattattgtcttg

SEQ ID NO: 54561 - DNA, 22 bp, Artificial Sequence
  chemically synthesized
ttcatttcaattattgtcttgg

SEQ ID NO: 54562 - DNA, 22 bp, Artificial Sequence
  chemically synthesized
atttcaattattgtcttggaaa

SEQ ID NO: 54563 - DNA, 22 bp, Artificial Sequence
  chemically synthesized
caattattgtcttggaaatctg

SEQ ID NO: 54564 - DNA, 22 bp, Artificial Sequence
  chemically synthesized
aattattgtcttggaaatctgt

SEQ ID NO: 54565 - DNA, 22 bp, Artificial Sequence
  chemically synthesized
ttgtcttggaaatctgtagaca

SEQ ID NO: 54566 - DNA, 22 bp, Artificial Sequence
  chemically synthesized
tcttggaaatctgtagacatcc

SEQ ID NO: 54567 - DNA, 22 bp, Artificial Sequence
  chemically synthesized
ggaaatctgtagacatcctaag

SEQ ID NO: 54568 - DNA, 22 bp, Artificial Sequence
  chemically synthesized
gaaatctgtagacatcctaaga

SEQ ID NO: 54569 - DNA, 22 bp, Artificial Sequence
  chemically synthesized
tagacatcctaagagctcccct

SEQ ID NO: 54570 - DNA, 22 bp, Artificial Sequence
  chemically synthesized
agagctcccctccactacggac

SEQ ID NO: 54571 - DNA, 22 bp, Artificial Sequence
  chemically synthesized
ccctccactacggacatgcacg

SEQ ID NO: 54572 - DNA, 22 bp, Artificial Sequence
  chemically synthesized
cactacggacatgcacgtttct

SEQ ID NO: 54573 - DNA, 22 bp, Artificial Sequence
  chemically synthesized
cggacatgcacgtttctctcta

SEQ ID NO: 54574 - DNA, 22 bp, Artificial Sequence
  chemically synthesized
ctctctatgtctttttcccaac

SEQ ID NO: 54575 - DNA, 22 bp, Artificial Sequence
  chemically synthesized
tctctatgtctttttcccaacc

SEQ ID NO: 54576 - DNA, 22 bp, Artificial Sequence
  chemically synthesized
tctatgtctttttcccaacccc

SEQ ID NO: 54577 - DNA, 22 bp, Artificial Sequence
  chemically synthesized
tatgtctttttcccaacccctg

SEQ ID NO: 54578 - DNA, 22 bp, Artificial Sequence
  chemically synthesized
tgtctttttcccaacccctgct

SEQ ID NO: 54579 - DNA, 22 bp, Artificial Sequence
  chemically synthesized
tttcccaacccctgctctgaca

SEQ ID NO: 54580 - DNA, 22 bp, Artificial Sequence
  chemically synthesized
ttcccaacccctgctctgacac

SEQ ID NO: 54581 - DNA, 22 bp, Artificial Sequence
  chemically synthesized
tcccaacccctgctctgacacc

SEQ ID NO: 54582 - DNA, 22 bp, Artificial Sequence
  chemically synthesized
cccaacccctgctctgacacct

SEQ ID NO: 54583 - DNA, 22 bp, Artificial Sequence
  chemically synthesized
ccaacccctgctctgacacctt

SEQ ID NO: 54584 - DNA, 22 bp, Artificial Sequence
  chemically synthesized
ctctgacaccttcccattgctg

SEQ ID NO: 54585 - DNA, 22 bp, Artificial Sequence
  chemically synthesized
tgacaccttcccattgctgcag

SEQ ID NO: 54586 - DNA, 22 bp, Artificial Sequence
  chemically synthesized
acaccttcccattgctgcagcc

SEQ ID NO: 54587 - DNA, 22 bp, Artificial Sequence
  chemically synthesized
cccattgctgcagcctcatgga

SEQ ID NO: 54588 - DNA, 22 bp, Artificial Sequence
  chemically synthesized
ccattgctgcagcctcatggac

SEQ ID NO: 54589 - DNA, 22 bp, Artificial Sequence
  chemically synthesized
ctgcagcctcatggaccacttc

SEQ ID NO: 54590 - DNA, 22 bp, Artificial Sequence
  chemically synthesized
cagcctcatggaccacttccgg

SEQ ID NO: 54591 - DNA, 22 bp, Artificial Sequence
  chemically synthesized
atggaccacttccggtgaccag

SEQ ID NO: 54592 - DNA, 22 bp, Artificial Sequence
  chemically synthesized
ccggtgaccagttagatatgct

SEQ ID NO: 54593 - DNA, 22 bp, Artificial Sequence
  chemically synthesized
cggtgaccagttagatatgctt

SEQ ID NO: 54594 - DNA, 22 bp, Artificial Sequence
  chemically synthesized
gatatgcttgatctatttagtt

SEQ ID NO: 54595 - DNA, 22 bp, Artificial Sequence
  chemically synthesized
gatctatttagttaattaaggc

SEQ ID NO: 54596 - DNA, 22 bp, Artificial Sequence
  chemically synthesized
atctatttagttaattaaggct

SEQ ID NO: 54597 - DNA, 22 bp, Artificial Sequence
  chemically synthesized
tttagttaattaaggctctgaa

SEQ ID NO: 54598 - DNA, 22 bp, Artificial Sequence
  chemically synthesized
agttaattaaggctctgaatca

SEQ ID NO: 54599 - DNA, 22 bp, Artificial Sequence
  chemically synthesized
gttaattaaggctctgaatcag

SEQ ID NO: 54600 - DNA, 22 bp, Artificial Sequence
  chemically synthesized
attaaggctctgaatcagccct

SEQ ID NO: 54601 - DNA, 22 bp, Artificial Sequence
  chemically synthesized
aggctctgaatcagcccttggc

SEQ ID NO: 54602 - DNA, 22 bp, Artificial Sequence
  chemically synthesized
tgaatcagcccttggccagaag

SEQ ID NO: 54603 - DNA, 22 bp, Artificial Sequence
  chemically synthesized
aatcagcccttggccagaagaa

SEQ ID NO: 54604 - DNA, 22 bp, Artificial Sequence
  chemically synthesized
ggccagaagaagcacctcctct

SEQ ID NO: 54605 - DNA, 22 bp, Artificial Sequence
  chemically synthesized
gccagaagaagcacctcctcta

SEQ ID NO: 54606 - DNA, 22 bp, Artificial Sequence
  chemically synthesized
ctctaggaaatcattccttctt

SEQ ID NO: 54607 - DNA, 22 bp, Artificial Sequence
  chemically synthesized
taggaaatcattccttcttttt

SEQ ID NO: 54608 - DNA, 22 bp, Artificial Sequence
  chemically synthesized
ggaaatcattccttctttttag

SEQ ID NO: 54609 - DNA, 22 bp, Artificial Sequence
  chemically synthesized
cttctttttagtaatacgcaat

SEQ ID NO: 54610 - DNA, 22 bp, Artificial Sequence
  chemically synthesized
ctttttagtaatacgcaattga

SEQ ID NO: 54611 - DNA, 22 bp, Artificial Sequence
  chemically synthesized
tttttagtaatacgcaattgaa

SEQ ID NO: 54612 - DNA, 22 bp, Artificial Sequence
  chemically synthesized
tttagtaatacgcaattgaaaa

SEQ ID NO: 54613 - DNA, 22 bp, Artificial Sequence
  chemically synthesized
ttagtaatacgcaattgaaaag

SEQ ID NO: 54614 - DNA, 22 bp, Artificial Sequence
  chemically synthesized
tagtaatacgcaattgaaaagt

SEQ ID NO: 54615 - DNA, 22 bp, Artificial Sequence
  chemically synthesized
agtaatacgcaattgaaaagta

SEQ ID NO: 54616 - DNA, 22 bp, Artificial Sequence
  chemically synthesized
gtaatacgcaattgaaaagtat

SEQ ID NO: 54617 - DNA, 22 bp, Artificial Sequence
  chemically synthesized
aaaagtatgtgtgggttatgtg

SEQ ID NO: 54618 - DNA, 22 bp, Artificial Sequence
  chemically synthesized
tgtgctgttaggtgctaagcat

SEQ ID NO: 54619 - DNA, 22 bp, Artificial Sequence
  chemically synthesized
ttaggtgctaagcattttagct

SEQ ID NO: 54620 - DNA, 22 bp, Artificial Sequence
  chemically synthesized
ggtgctaagcattttagctatg

SEQ ID NO: 54621 - DNA, 22 bp, Artificial Sequence
  chemically synthesized
agcattttagctatgaattaac

SEQ ID NO: 54622 - DNA, 22 bp, Artificial Sequence
  chemically synthesized
tagctatgaattaactcataat

SEQ ID NO: 54623 - DNA, 22 bp, Artificial Sequence
  chemically synthesized
agctatgaattaactcataatc

SEQ ID NO: 54624 - DNA, 22 bp, Artificial Sequence
  chemically synthesized
gctatgaattaactcataatcc

SEQ ID NO: 54625 - DNA, 22 bp, Artificial Sequence
  chemically synthesized
tgaattaactcataatcctcaa

SEQ ID NO: 54626 - DNA, 22 bp, Artificial Sequence
  chemically synthesized
actcataatcctcaaaataaat

SEQ ID NO: 54627 - DNA, 22 bp, Artificial Sequence
  chemically synthesized
ataatcctcaaaataaatctgg

SEQ ID NO: 54628 - DNA, 22 bp, Artificial Sequence
  chemically synthesized
aaaataaatctggggtatagag

SEQ ID NO: 54629 - DNA, 22 bp, Artificial Sequence
  chemically synthesized
gggtatagagagaggttcttgt

SEQ ID NO: 54630 - DNA, 22 bp, Artificial Sequence
  chemically synthesized
ttgtttcaattagaaaagtaat

SEQ ID NO: 54631 - DNA, 22 bp, Artificial Sequence
  chemically synthesized
gtttcaattagaaaagtaatgc

SEQ ID NO: 54632 - DNA, 22 bp, Artificial Sequence
  chemically synthesized
tttcaattagaaaagtaatgct

SEQ ID NO: 54633 - DNA, 22 bp, Artificial Sequence
  chemically synthesized
caattagaaaagtaatgcttgg

SEQ ID NO: 54634 - DNA, 22 bp, Artificial Sequence
  chemically synthesized
aattagaaaagtaatgcttgga

SEQ ID NO: 54635 - DNA, 22 bp, Artificial Sequence
  chemically synthesized
gaaaagtaatgcttggagagac

SEQ ID NO: 54636 - DNA, 22 bp, Artificial Sequence
  chemically synthesized
ggagagactatgatttgcccaa

SEQ ID NO: 54637 - DNA, 22 bp, Artificial Sequence
  chemically synthesized
gagagactatgatttgcccaag

SEQ ID NO: 54638 - DNA, 22 bp, Artificial Sequence
  chemically synthesized
tgatttgcccaaggtcactgcc

SEQ ID NO: 54639 - DNA, 22 bp, Artificial Sequence
  chemically synthesized
gcccaaggtcactgccaataga

SEQ ID NO: 54640 - DNA, 22 bp, Artificial Sequence
  chemically synthesized
cccaaggtcactgccaatagat

SEQ ID NO: 54641 - DNA, 22 bp, Artificial Sequence
  chemically synthesized
ccaatagatgacttgattagaa

SEQ ID NO: 54642 - DNA, 22 bp, Artificial Sequence
  chemically synthesized
gattagaagcagggtatgtttg

SEQ ID NO: 54643 - DNA, 22 bp, Artificial Sequence
  chemically synthesized
attagaagcagggtatgtttga

SEQ ID NO: 54644 - DNA, 22 bp, Artificial Sequence
  chemically synthesized
gaagcagggtatgtttgaatgc

SEQ ID NO: 54645 - DNA, 22 bp, Artificial Sequence
  chemically synthesized
gaatgcgaagtccaggctcaaa

SEQ ID NO: 54646 - DNA, 22 bp, Artificial Sequence
  chemically synthesized
aatgcgaagtccaggctcaaaa

SEQ ID NO: 54647 - DNA, 22 bp, Artificial Sequence
  chemically synthesized
aaaaaggggccttagtggctcc

SEQ ID NO: 54648 - DNA, 22 bp, Artificial Sequence
  chemically synthesized
agtggctcctactagactggta

SEQ ID NO: 54649 - DNA, 22 bp, Artificial Sequence
  chemically synthesized
gtggctcctactagactggtat

SEQ ID NO: 54650 - DNA, 22 bp, Artificial Sequence
  chemically synthesized
ctactagactggtatcttaagg

SEQ ID NO: 54651 - DNA, 22 bp, Artificial Sequence
  chemically synthesized
ctagactggtatcttaaggcaa

SEQ ID NO: 54652 - DNA, 22 bp, Artificial Sequence
  chemically synthesized
gactggtatcttaaggcaagga

SEQ ID NO: 54653 - DNA, 22 bp, Artificial Sequence
  chemically synthesized
gtatcttaaggcaaggaaaaca

SEQ ID NO: 54654 - DNA, 22 bp, Artificial Sequence
  chemically synthesized
aaggcaaggaaaacagaatatg

SEQ ID NO: 54655 - DNA, 22 bp, Artificial Sequence
  chemically synthesized
aggcaaggaaaacagaatatgt

SEQ ID NO: 54656 - DNA, 22 bp, Artificial Sequence
  chemically synthesized
atatctaaaaccatgcctagtg

SEQ ID NO: 54657 - DNA, 22 bp, Artificial Sequence
  chemically synthesized
aaaccatgcctagtgcccaggc

SEQ ID NO: 54658 - DNA, 22 bp, Artificial Sequence
  chemically synthesized
gtgcccaggccaggcttgaatc

SEQ ID NO: 54659 - DNA, 22 bp, Artificial Sequence
  chemically synthesized
gaatcaatgctcaacgcatgca

SEQ ID NO: 54660 - DNA, 22 bp, Artificial Sequence
  chemically synthesized
aatcaatgctcaacgcatgcat

SEQ ID NO: 54661 - DNA, 22 bp, Artificial Sequence
  chemically synthesized
aacgcatgcatgtgtaactgaa

SEQ ID NO: 54662 - DNA, 22 bp, Artificial Sequence
  chemically synthesized
aacagaactgcccagaaccttg

SEQ ID NO: 54663 - DNA, 22 bp, Artificial Sequence
  chemically synthesized
cccagaaccttggctcaggcca

SEQ ID NO: 54664 - DNA, 22 bp, Artificial Sequence
  chemically synthesized
ggctcaggccaagtaggccaga

SEQ ID NO: 54665 - DNA, 22 bp, Artificial Sequence
  chemically synthesized
gctcaggccaagtaggccagac

SEQ ID NO: 54666 - DNA, 22 bp, Artificial Sequence
  chemically synthesized
aggccaagtaggccagaccacc

SEQ ID NO: 54667 - DNA, 22 bp, Artificial Sequence
  chemically synthesized
ccctgaatgcagggtttgagaa

SEQ ID NO: 54668 - DNA, 22 bp, Artificial Sequence
  chemically synthesized
cctgaatgcagggtttgagaag

SEQ ID NO: 54669 - DNA, 22 bp, Artificial Sequence
  chemically synthesized
aatgcagggtttgagaagtgcc

SEQ ID NO: 54670 - DNA, 22 bp, Artificial Sequence
  chemically synthesized
gagaagtgccctaatgccctct

SEQ ID NO: 54671 - DNA, 22 bp, Artificial Sequence
  chemically synthesized
agaagtgccctaatgccctcta

SEQ ID NO: 54672 - DNA, 22 bp, Artificial Sequence
  chemically synthesized
atgccctctaactgatgctgag

SEQ ID NO: 54673 - DNA, 22 bp, Artificial Sequence
  chemically synthesized
taactgatgctgagtttgaaga

SEQ ID NO: 54674 - DNA, 22 bp, Artificial Sequence
  chemically synthesized
actgatgctgagtttgaagaat

SEQ ID NO: 54675 - DNA, 22 bp, Artificial Sequence
  chemically synthesized
atgctgagtttgaagaatccat

SEQ ID NO: 54676 - DNA, 22 bp, Artificial Sequence
  chemically synthesized
agtttgaagaatccatcagtta

SEQ ID NO: 54677 - DNA, 22 bp, Artificial Sequence
  chemically synthesized
gaagaatccatcagttaagggg

SEQ ID NO: 54678 - DNA, 22 bp, Artificial Sequence
  chemically synthesized
aagaatccatcagttaagggga

SEQ ID NO: 54679 - DNA, 22 bp, Artificial Sequence
  chemically synthesized
aggggaggtgtttctgagtttg

SEQ ID NO: 54680 - DNA, 22 bp, Artificial Sequence
  chemically synthesized
ctgagtttgaagaatcaaacac

SEQ ID NO: 54681 - DNA, 22 bp, Artificial Sequence
  chemically synthesized
tgagtttgaagaatcaaacacc

SEQ ID NO: 54682 - DNA, 22 bp, Artificial Sequence
  chemically synthesized
agtttgaagaatcaaacacctt

SEQ ID NO: 54683 - DNA, 22 bp, Artificial Sequence
  chemically synthesized
gaagaatcaaacaccttcctaa

SEQ ID NO: 54684 - DNA, 22 bp, Artificial Sequence
  chemically synthesized
aagaatcaaacaccttcctaat

SEQ ID NO: 54685 - DNA, 22 bp, Artificial Sequence
  chemically synthesized
cctaattggtaggaatcctgaa

SEQ ID NO: 54686 - DNA, 22 bp, Artificial Sequence
  chemically synthesized
ctaattggtaggaatcctgaaa

SEQ ID NO: 54687 - DNA, 22 bp, Artificial Sequence
  chemically synthesized
attggtaggaatcctgaaaaca

SEQ ID NO: 54688 - DNA, 22 bp, Artificial Sequence
  chemically synthesized
gtaggaatcctgaaaacactcc

SEQ ID NO: 54689 - DNA, 22 bp, Artificial Sequence
  chemically synthesized
aaaacactccacaccggagtaa

SEQ ID NO: 54690 - DNA, 22 bp, Artificial Sequence
  chemically synthesized
cacaccggagtaaaagactttg

SEQ ID NO: 54691 - DNA, 22 bp, Artificial Sequence
  chemically synthesized
tggttttttatctttatgcctg

SEQ ID NO: 54692 - DNA, 22 bp, Artificial Sequence
  chemically synthesized
ggttttttatctttatgcctga

SEQ ID NO: 54693 - DNA, 22 bp, Artificial Sequence
  chemically synthesized
gttttttatctttatgcctgac

SEQ ID NO: 54694 - DNA, 22 bp, Artificial Sequence
  chemically synthesized
tttatctttatgcctgactaaa

SEQ ID NO: 54695 - DNA, 22 bp, Artificial Sequence
  chemically synthesized
ttatctttatgcctgactaaaa

SEQ ID NO: 54696 - DNA, 22 bp, Artificial Sequence
  chemically synthesized
tatctttatgcctgactaaaag

SEQ ID NO: 54697 - DNA, 22 bp, Artificial Sequence
  chemically synthesized
atctttatgcctgactaaaagt

SEQ ID NO: 54698 - DNA, 22 bp, Artificial Sequence
  chemically synthesized
tctttatgcctgactaaaagtt

SEQ ID NO: 54699 - DNA, 22 bp, Artificial Sequence
  chemically synthesized
tatgcctgactaaaagttaact

SEQ ID NO: 54700 - DNA, 22 bp, Artificial Sequence
  chemically synthesized
atgcctgactaaaagttaactc

SEQ ID NO: 54701 - DNA, 22 bp, Artificial Sequence
  chemically synthesized
tgcctgactaaaagttaactct

SEQ ID NO: 54702 - DNA, 22 bp, Artificial Sequence
  chemically synthesized
actaaaagttaactctcattct

SEQ ID NO: 54703 - DNA, 22 bp, Artificial Sequence
  chemically synthesized
aaagttaactctcattctttca

SEQ ID NO: 54704 - DNA, 22 bp, Artificial Sequence
  chemically synthesized
actctcattctttcattcagca

SEQ ID NO: 54705 - DNA, 22 bp, Artificial Sequence
  chemically synthesized
tcattctttcattcagcaaata

SEQ ID NO: 54706 - DNA, 22 bp, Artificial Sequence
  chemically synthesized
attctttcattcagcaaatatt

SEQ ID NO: 54707 - DNA, 22 bp, Artificial Sequence
  chemically synthesized
tttcattcagcaaatattttgt

SEQ ID NO: 54708 - DNA, 22 bp, Artificial Sequence
  chemically synthesized
tcattcagcaaatattttgtgc

SEQ ID NO: 54709 - DNA, 22 bp, Artificial Sequence
  chemically synthesized
cattcagcaaatattttgtgct

SEQ ID NO: 54710 - DNA, 22 bp, Artificial Sequence
  chemically synthesized
attcagcaaatattttgtgcta

SEQ ID NO: 54711 - DNA, 22 bp, Artificial Sequence
  chemically synthesized
agcaaatattttgtgctagtgc

SEQ ID NO: 54712 - DNA, 22 bp, Artificial Sequence
  chemically synthesized
tgtgctagtgcatgacactgca

SEQ ID NO: 54713 - DNA, 22 bp, Artificial Sequence
  chemically synthesized
gtgctagtgcatgacactgcag

SEQ ID NO: 54714 - DNA, 22 bp, Artificial Sequence
  chemically synthesized
tgctagtgcatgacactgcaga

SEQ ID NO: 54715 - DNA, 22 bp, Artificial Sequence
  chemically synthesized
gtgcatgacactgcagattaat

SEQ ID NO: 54716 - DNA, 22 bp, Artificial Sequence
  chemically synthesized
cagattaatatcgtagatgaac

SEQ ID NO: 54717 - DNA, 22 bp, Artificial Sequence
  chemically synthesized
atatcgtagatgaactgagtct

SEQ ID NO: 54718 - DNA, 22 bp, Artificial Sequence
  chemically synthesized
agtctgggctaggtagagtcaa

SEQ ID NO: 54719 - DNA, 22 bp, Artificial Sequence
  chemically synthesized
ggctaggtagagtcaaaaaaaa

SEQ ID NO: 54720 - DNA, 22 bp, Artificial Sequence
  chemically synthesized
ggtagagtcaaaaaaaaatttc

SEQ ID NO: 54721 - DNA, 22 bp, Artificial Sequence
  chemically synthesized
cctaaaggagcctgtacctaaa

SEQ ID NO: 54722 - DNA, 22 bp, Artificial Sequence
  chemically synthesized
ctaaaggagcctgtacctaaac

SEQ ID NO: 54723 - DNA, 22 bp, Artificial Sequence
  chemically synthesized
aaggagcctgtacctaaactga

SEQ ID NO: 54724 - DNA, 22 bp, Artificial Sequence
  chemically synthesized
tacctaaactgagtcttcagag

SEQ ID NO: 54725 - DNA, 22 bp, Artificial Sequence
  chemically synthesized
aactgagtcttcagagagaagt

SEQ ID NO: 54726 - DNA, 22 bp, Artificial Sequence
  chemically synthesized
agtcttcagagagaagttggaa

SEQ ID NO: 54727 - DNA, 22 bp, Artificial Sequence
  chemically synthesized
cagagagaagttggaactggca

SEQ ID NO: 54728 - DNA, 22 bp, Artificial Sequence
  chemically synthesized
agagagaagttggaactggcaa

SEQ ID NO: 54729 - DNA, 22 bp, Artificial Sequence
  chemically synthesized
gaactggcaaagtgaggaagga

SEQ ID NO: 54730 - DNA, 22 bp, Artificial Sequence
  chemically synthesized
gcaaagtgaggaaggacggggt

SEQ ID NO: 54731 - DNA, 22 bp, Artificial Sequence
  chemically synthesized
gagggaagagtgagtgcaaagg

SEQ ID NO: 54732 - DNA, 22 bp, Artificial Sequence
  chemically synthesized
catgctctagaatccaaaactg

SEQ ID NO: 54733 - DNA, 22 bp, Artificial Sequence
  chemically synthesized
tagaatccaaaactgtgtcagc

SEQ ID NO: 54734 - DNA, 22 bp, Artificial Sequence
  chemically synthesized
gaatccaaaactgtgtcagcca

SEQ ID NO: 54735 - DNA, 22 bp, Artificial Sequence
  chemically synthesized
tgtcagccaaatttgagttgat

SEQ ID NO: 54736 - DNA, 22 bp, Artificial Sequence
  chemically synthesized
gagttgatggagggacagccaa

SEQ ID NO: 54737 - DNA, 22 bp, Artificial Sequence
  chemically synthesized
agttgatggagggacagccaaa

SEQ ID NO: 54738 - DNA, 22 bp, Artificial Sequence
  chemically synthesized
atggagggacagccaaactgag

SEQ ID NO: 54739 - DNA, 22 bp, Artificial Sequence
  chemically synthesized
agatacccaggcggtggttgga

SEQ ID NO: 54740 - DNA, 22 bp, Artificial Sequence
  chemically synthesized
gatttatggatctggatttcag

SEQ ID NO: 54741 - DNA, 22 bp, Artificial Sequence
  chemically synthesized
atggatctggatttcaggggag

SEQ ID NO: 54742 - DNA, 22 bp, Artificial Sequence
  chemically synthesized
tggatctggatttcaggggagt

SEQ ID NO: 54743 - DNA, 22 bp, Artificial Sequence
  chemically synthesized
gatttcaggggagtgggcaggg

SEQ ID NO: 54744 - DNA, 22 bp, Artificial Sequence
  chemically synthesized
caggggagtgggcagggctagg

SEQ ID NO: 54745 - DNA, 22 bp, Artificial Sequence
  chemically synthesized
aggggagtgggcagggctaggg

SEQ ID NO: 54746 - DNA, 22 bp, Artificial Sequence
  chemically synthesized
ggggaatagaactgagggtcat

SEQ ID NO: 54747 - DNA, 22 bp, Artificial Sequence
  chemically synthesized
agggtcatgatgtcagtggtag

SEQ ID NO: 54748 - DNA, 22 bp, Artificial Sequence
  chemically synthesized
aagtcttggaagaaagagtaga

SEQ ID NO: 54749 - DNA, 22 bp, Artificial Sequence
  chemically synthesized
ggaagaaagagtagatagaaac

SEQ ID NO: 54750 - DNA, 22 bp, Artificial Sequence
  chemically synthesized
gaagaaagagtagatagaaact

SEQ ID NO: 54751 - DNA, 22 bp, Artificial Sequence
  chemically synthesized
tgttttctgatgaacattctat

SEQ ID NO: 54752 - DNA, 22 bp, Artificial Sequence
  chemically synthesized
gttttctgatgaacattctatg

SEQ ID NO: 54753 - DNA, 22 bp, Artificial Sequence
  chemically synthesized
ttttctgatgaacattctatga

SEQ ID NO: 54754 - DNA, 22 bp, Artificial Sequence
  chemically synthesized
tctgatgaacattctatgagga

SEQ ID NO: 54755 - DNA, 22 bp, Artificial Sequence
  chemically synthesized
ctgatgaacattctatgaggaa

SEQ ID NO: 54756 - DNA, 22 bp, Artificial Sequence
  chemically synthesized
tgatgaacattctatgaggaag

SEQ ID NO: 54757 - DNA, 22 bp, Artificial Sequence
  chemically synthesized
atgaacattctatgaggaagtt

SEQ ID NO: 54758 - DNA, 22 bp, Artificial Sequence
  chemically synthesized
tatgaggaagttcagcagaggt

SEQ ID NO: 54759 - DNA, 22 bp, Artificial Sequence
  chemically synthesized
tgaggaagttcagcagaggttg

SEQ ID NO: 54760 - DNA, 22 bp, Artificial Sequence
  chemically synthesized
agcagaggttggaaacatcttt

SEQ ID NO: 54761 - DNA, 22 bp, Artificial Sequence
  chemically synthesized
gaaacatctttaccatttataa

SEQ ID NO: 54762 - DNA, 22 bp, Artificial Sequence
  chemically synthesized
taccatttataaataaatttta

SEQ ID NO: 54763 - DNA, 22 bp, Artificial Sequence
  chemically synthesized
accatttataaataaattttat

SEQ ID NO: 54764 - DNA, 22 bp, Artificial Sequence
  chemically synthesized
ccatttataaataaattttatg

SEQ ID NO: 54765 - DNA, 22 bp, Artificial Sequence
  chemically synthesized
ataaataaattttatgtaaaat

SEQ ID NO: 54766 - DNA, 22 bp, Artificial Sequence
  chemically synthesized
taaataaattttatgtaaaatc

SEQ ID NO: 54767 - DNA, 22 bp, Artificial Sequence
  chemically synthesized
tatgtaaaatcctatcctgctg

SEQ ID NO: 54768 - DNA, 22 bp, Artificial Sequence
  chemically synthesized
atgtaaaatcctatcctgctgt

SEQ ID NO: 54769 - DNA, 22 bp, Artificial Sequence
  chemically synthesized
tgtaaaatcctatcctgctgtc

SEQ ID NO: 54770 - DNA, 22 bp, Artificial Sequence
  chemically synthesized
tcctgctgtcatgtttaagcaa

SEQ ID NO: 54771 - DNA, 22 bp, Artificial Sequence
  chemically synthesized
ctgtcatgtttaagcaacttat

SEQ ID NO: 54772 - DNA, 22 bp, Artificial Sequence
  chemically synthesized
tcatgtttaagcaacttattat

SEQ ID NO: 54773 - DNA, 22 bp, Artificial Sequence
  chemically synthesized
aagcaacttattatgcacagca

SEQ ID NO: 54774 - DNA, 22 bp, Artificial Sequence
  chemically synthesized
agcaacttattatgcacagcac

SEQ ID NO: 54775 - DNA, 22 bp, Artificial Sequence
  chemically synthesized
attatgcacagcaccaggacat

SEQ ID NO: 54776 - DNA, 22 bp, Artificial Sequence
  chemically synthesized
ttatgcacagcaccaggacatc

SEQ ID NO: 54777 - DNA, 22 bp, Artificial Sequence
  chemically synthesized
tgcacagcaccaggacatcaat

SEQ ID NO: 54778 - DNA, 22 bp, Artificial Sequence
  chemically synthesized
catgccagtctttgctctcagt

SEQ ID NO: 54779 - DNA, 22 bp, Artificial Sequence
  chemically synthesized
tgctctcagtttcaaaggcatt

SEQ ID NO: 54780 - DNA, 22 bp, Artificial Sequence
  chemically synthesized
gctctcagtttcaaaggcattc

SEQ ID NO: 54781 - DNA, 22 bp, Artificial Sequence
  chemically synthesized
ctctcagtttcaaaggcattct

SEQ ID NO: 54782 - DNA, 22 bp, Artificial Sequence
  chemically synthesized
tcagtttcaaaggcattcttcc

SEQ ID NO: 54783 - DNA, 22 bp, Artificial Sequence
  chemically synthesized
agtttcaaaggcattcttccct

SEQ ID NO: 54784 - DNA, 22 bp, Artificial Sequence
  chemically synthesized
caaaggcattcttccctgcctg

SEQ ID NO: 54785 - DNA, 22 bp, Artificial Sequence
  chemically synthesized
aaaggcattcttccctgcctgc

SEQ ID NO: 54786 - DNA, 22 bp, Artificial Sequence
  chemically synthesized
ttccctgcctgctgtctaatct

SEQ ID NO: 54787 - DNA, 22 bp, Artificial Sequence
  chemically synthesized
ccctgcctgctgtctaatcttt

SEQ ID NO: 54788 - DNA, 22 bp, Artificial Sequence
  chemically synthesized
cctgcctgctgtctaatcttta

SEQ ID NO: 54789 - DNA, 22 bp, Artificial Sequence
  chemically synthesized
cctgctgtctaatctttacaaa

SEQ ID NO: 54790 - DNA, 22 bp, Artificial Sequence
  chemically synthesized
ctgtctaatctttacaaagaaa

SEQ ID NO: 54791 - DNA, 22 bp, Artificial Sequence
  chemically synthesized
tctaatctttacaaagaaaggt

SEQ ID NO: 54792 - DNA, 22 bp, Artificial Sequence
  chemically synthesized
atctttacaaagaaaggttaac

SEQ ID NO: 54793 - DNA, 22 bp, Artificial Sequence
  chemically synthesized
tacaaagaaaggttaactccag

SEQ ID NO: 54794 - DNA, 22 bp, Artificial Sequence
  chemically synthesized
acaaagaaaggttaactccaga

SEQ ID NO: 54795 - DNA, 22 bp, Artificial Sequence
  chemically synthesized
caaagaaaggttaactccagag

SEQ ID NO: 54796 - DNA, 22 bp, Artificial Sequence
  chemically synthesized
actccagaggtcaggaatctga

SEQ ID NO: 54797 - DNA, 22 bp, Artificial Sequence
  chemically synthesized
cagaggtcaggaatctgaacac

SEQ ID NO: 54798 - DNA, 22 bp, Artificial Sequence
  chemically synthesized
aacacagaaaaccagattgcat

SEQ ID NO: 54799 - DNA, 22 bp, Artificial Sequence
  chemically synthesized
catcatattcattctaatcaat

SEQ ID NO: 54800 - DNA, 22 bp, Artificial Sequence
  chemically synthesized
attctaatcaataaacattata

SEQ ID NO: 54801 - DNA, 22 bp, Artificial Sequence
  chemically synthesized
taatcaataaacattatataat

SEQ ID NO: 54802 - DNA, 22 bp, Artificial Sequence
  chemically synthesized
atcaataaacattatataattt

SEQ ID NO: 54803 - DNA, 22 bp, Artificial Sequence
  chemically synthesized
tataatttttaaaactgtttct

SEQ ID NO: 54804 - DNA, 22 bp, Artificial Sequence
  chemically synthesized
ttaaaactgtttctcatctttt

SEQ ID NO: 54805 - DNA, 22 bp, Artificial Sequence
  chemically synthesized
taaaactgtttctcatctttta

SEQ ID NO: 54806 - DNA, 22 bp, Artificial Sequence
  chemically synthesized
aaaactgtttctcatcttttat

SEQ ID NO: 54807 - DNA, 22 bp, Artificial Sequence
  chemically synthesized
aaactgtttctcatcttttatt

SEQ ID NO: 54808 - DNA, 22 bp, Artificial Sequence
  chemically synthesized
tttctcatcttttatttcttca

SEQ ID NO: 54809 - DNA, 22 bp, Artificial Sequence
  chemically synthesized
ctcatcttttatttcttcattt

SEQ ID NO: 54810 - DNA, 22 bp, Artificial Sequence
  chemically synthesized
tcatcttttatttcttcatttt

SEQ ID NO: 54811 - DNA, 22 bp, Artificial Sequence
  chemically synthesized
atcttttatttcttcattttaa

SEQ ID NO: 54812 - DNA, 22 bp, Artificial Sequence
  chemically synthesized
ttatttcttcattttaatgaat

SEQ ID NO: 54813 - DNA, 22 bp, Artificial Sequence
  chemically synthesized
tatttcttcattttaatgaata

SEQ ID NO: 54814 - DNA, 22 bp, Artificial Sequence
  chemically synthesized
atttcttcattttaatgaatat

SEQ ID NO: 54815 - DNA, 22 bp, Artificial Sequence
  chemically synthesized
tttcttcattttaatgaatatg

SEQ ID NO: 54816 - DNA, 22 bp, Artificial Sequence
  chemically synthesized
cttcattttaatgaatatgtca

SEQ ID NO: 54817 - DNA, 22 bp, Artificial Sequence
  chemically synthesized
ttcattttaatgaatatgtcaa

SEQ ID NO: 54818 - DNA, 22 bp, Artificial Sequence
  chemically synthesized
cattttaatgaatatgtcaaca

SEQ ID NO: 54819 - DNA, 22 bp, Artificial Sequence
  chemically synthesized
attttaatgaatatgtcaacac

SEQ ID NO: 54820 - DNA, 22 bp, Artificial Sequence
  chemically synthesized
taatgaatatgtcaacacaaag

SEQ ID NO: 54821 - DNA, 22 bp, Artificial Sequence
  chemically synthesized
aatgaatatgtcaacacaaagc

SEQ ID NO: 54822 - DNA, 22 bp, Artificial Sequence
  chemically synthesized
atgaatatgtcaacacaaagcc

SEQ ID NO: 54823 - DNA, 22 bp, Artificial Sequence
  chemically synthesized
acacaaaagtacaactggggta

SEQ ID NO: 54824 - DNA, 22 bp, Artificial Sequence
  chemically synthesized
cacaaaagtacaactggggtaa

SEQ ID NO: 54825 - DNA, 22 bp, Artificial Sequence
  chemically synthesized
gggtaagaaaattcaaaagata

SEQ ID NO: 54826 - DNA, 22 bp, Artificial Sequence
  chemically synthesized
aaaagataaagtaataaaatta

SEQ ID NO: 54827 - DNA, 22 bp, Artificial Sequence
  chemically synthesized
aatttaaaatgaaataccctat

SEQ ID NO: 54828 - DNA, 22 bp, Artificial Sequence
  chemically synthesized
aaaatgaaataccctatgtatt

SEQ ID NO: 54829 - DNA, 22 bp, Artificial Sequence
  chemically synthesized
aaatgaaataccctatgtattt

SEQ ID NO: 54830 - DNA, 22 bp, Artificial Sequence
  chemically synthesized
tgtatttgagtaagttgcttag

SEQ ID NO: 54831 - DNA, 22 bp, Artificial Sequence
  chemically synthesized
gagtaagttgcttagcttctcc

SEQ ID NO: 54832 - DNA, 22 bp, Artificial Sequence
  chemically synthesized
agtaagttgcttagcttctccc

SEQ ID NO: 54833 - DNA, 22 bp, Artificial Sequence
  chemically synthesized
cttagcttctcccaaccttggt

SEQ ID NO: 54834 - DNA, 22 bp, Artificial Sequence
  chemically synthesized
agcttctcccaaccttggtttc

SEQ ID NO: 54835 - DNA, 22 bp, Artificial Sequence
  chemically synthesized
gcttctcccaaccttggtttcc

SEQ ID NO: 54836 - DNA, 22 bp, Artificial Sequence
  chemically synthesized
ctcccaaccttggtttcctcat

SEQ ID NO: 54837 - DNA, 22 bp, Artificial Sequence
  chemically synthesized
tcccaaccttggtttcctcatt

SEQ ID NO: 54838 - DNA, 22 bp, Artificial Sequence
  chemically synthesized
ccaaccttggtttcctcatttc

SEQ ID NO: 54839 - DNA, 22 bp, Artificial Sequence
  chemically synthesized
ggtttcctcatttctaaaacga

SEQ ID NO: 54840 - DNA, 22 bp, Artificial Sequence
  chemically synthesized
gtttcctcatttctaaaacgaa

SEQ ID NO: 54841 - DNA, 22 bp, Artificial Sequence
  chemically synthesized
cctcatttctaaaacgaagaac

SEQ ID NO: 54842 - DNA, 22 bp, Artificial Sequence
  chemically synthesized
ctcatttctaaaacgaagaact

SEQ ID NO: 54843 - DNA, 22 bp, Artificial Sequence
  chemically synthesized
atttctaaaacgaagaacttgc

SEQ ID NO: 54844 - DNA, 22 bp, Artificial Sequence
  chemically synthesized
ctaaaacgaagaacttgcttaa

SEQ ID NO: 54845 - DNA, 22 bp, Artificial Sequence
  chemically synthesized
taaaacgaagaacttgcttaat

SEQ ID NO: 54846 - DNA, 22 bp, Artificial Sequence
  chemically synthesized
aaacgaagaacttgcttaatat

SEQ ID NO: 54847 - DNA, 22 bp, Artificial Sequence
  chemically synthesized
gcttaatattcaggctctgggc

SEQ ID NO: 54848 - DNA, 22 bp, Artificial Sequence
  chemically synthesized
cttaatattcaggctctgggcc

SEQ ID NO: 54849 - DNA, 22 bp, Artificial Sequence
  chemically synthesized
aatattcaggctctgggcccca

SEQ ID NO: 54850 - DNA, 22 bp, Artificial Sequence
  chemically synthesized
atattcaggctctgggccccac

SEQ ID NO: 54851 - DNA, 22 bp, Artificial Sequence
  chemically synthesized
aggctctgggccccaccaccaa

SEQ ID NO: 54852 - DNA, 22 bp, Artificial Sequence
  chemically synthesized
tgggccccaccaccaaatcctt

SEQ ID NO: 54853 - DNA, 22 bp, Artificial Sequence
  chemically synthesized
ggccccaccaccaaatccttga

SEQ ID NO: 54854 - DNA, 22 bp, Artificial Sequence
  chemically synthesized
gattcactggctctgggtctgt

SEQ ID NO: 54855 - DNA, 22 bp, Artificial Sequence
  chemically synthesized
attcactggctctgggtctgta

SEQ ID NO: 54856 - DNA, 22 bp, Artificial Sequence
  chemically synthesized
actggctctgggtctgtatgta

SEQ ID NO: 54857 - DNA, 22 bp, Artificial Sequence
  chemically synthesized
gctctgggtctgtatgtaacaa

SEQ ID NO: 54858 - DNA, 22 bp, Artificial Sequence
  chemically synthesized
tgggtctgtatgtaacaagctt

SEQ ID NO: 54859 - DNA, 22 bp, Artificial Sequence
  chemically synthesized
ggtctgtatgtaacaagcttct

SEQ ID NO: 54860 - DNA, 22 bp, Artificial Sequence
  chemically synthesized
tatgtaacaagcttctggagtg

SEQ ID NO: 54861 - DNA, 22 bp, Artificial Sequence
  chemically synthesized
ctggagtgattctaatgattag

SEQ ID NO: 54862 - DNA, 22 bp, Artificial Sequence
  chemically synthesized
tggagtgattctaatgattagc

SEQ ID NO: 54863 - DNA, 22 bp, Artificial Sequence
  chemically synthesized
gagtgattctaatgattagcca

SEQ ID NO: 54864 - DNA, 22 bp, Artificial Sequence
  chemically synthesized
taatgattagccagagacagga

SEQ ID NO: 54865 - DNA, 22 bp, Artificial Sequence
  chemically synthesized
atgattagccagagacaggacc

SEQ ID NO: 54866 - DNA, 22 bp, Artificial Sequence
  chemically synthesized
gccagagacaggacctactatt

SEQ ID NO: 54867 - DNA, 22 bp, Artificial Sequence
  chemically synthesized
ctattctacgtaactgatttcc

SEQ ID NO: 54868 - DNA, 22 bp, Artificial Sequence
  chemically synthesized
ttctacgtaactgatttcctct

SEQ ID NO: 54869 - DNA, 22 bp, Artificial Sequence
  chemically synthesized
tacgtaactgatttcctcttgc

SEQ ID NO: 54870 - DNA, 22 bp, Artificial Sequence
  chemically synthesized
cgtaactgatttcctcttgctg

SEQ ID NO: 54871 - DNA, 22 bp, Artificial Sequence
  chemically synthesized
atttcctcttgctgctgtaaaa

SEQ ID NO: 54872 - DNA, 22 bp, Artificial Sequence
  chemically synthesized
cctcttgctgctgtaaaaaatt

SEQ ID NO: 54873 - DNA, 22 bp, Artificial Sequence
  chemically synthesized
ctcttgctgctgtaaaaaatta

SEQ ID NO: 54874 - DNA, 22 bp, Artificial Sequence
  chemically synthesized
ttgctgctgtaaaaaattacca

SEQ ID NO: 54875 - DNA, 22 bp, Artificial Sequence
  chemically synthesized
gctgctgtaaaaaattaccaca

SEQ ID NO: 54876 - DNA, 22 bp, Artificial Sequence
  chemically synthesized
ctgctgtaaaaaattaccacaa

SEQ ID NO: 54877 - DNA, 22 bp, Artificial Sequence
  chemically synthesized
ctgtaaaaaattaccacaaatt

SEQ ID NO: 54878 - DNA, 22 bp, Artificial Sequence
  chemically synthesized
taaaaaattaccacaaatttat

SEQ ID NO: 54879 - DNA, 22 bp, Artificial Sequence
  chemically synthesized
ccacaaatttattggcttaaaa

SEQ ID NO: 54880 - DNA, 22 bp, Artificial Sequence
  chemically synthesized
attggcttaaaacaacacaaat

SEQ ID NO: 54881 - DNA, 22 bp, Artificial Sequence
  chemically synthesized
ttggcttaaaacaacacaaatg

SEQ ID NO: 54882 - DNA, 22 bp, Artificial Sequence
  chemically synthesized
gcttaaaacaacacaaatgtat

SEQ ID NO: 54883 - DNA, 22 bp, Artificial Sequence
  chemically synthesized
aaaacaacacaaatgtattatc

SEQ ID NO: 54884 - DNA, 22 bp, Artificial Sequence
  chemically synthesized
aaacaacacaaatgtattatct

SEQ ID NO: 54885 - DNA, 22 bp, Artificial Sequence
  chemically synthesized
tcttgaagttgtggaggtcaga

SEQ ID NO: 54886 - DNA, 22 bp, Artificial Sequence
  chemically synthesized
gaagttgtggaggtcagaagtc

SEQ ID NO: 54887 - DNA, 22 bp, Artificial Sequence
  chemically synthesized
aagttgtggaggtcagaagtct

SEQ ID NO: 54888 - DNA, 22 bp, Artificial Sequence
  chemically synthesized
tggaggtcagaagtctgaaatc

SEQ ID NO: 54889 - DNA, 22 bp, Artificial Sequence
  chemically synthesized
aaatcggtttcactgggctaaa

SEQ ID NO: 54890 - DNA, 22 bp, Artificial Sequence
  chemically synthesized
cactgggctaaagtcgaggtgt

SEQ ID NO: 54891 - DNA, 22 bp, Artificial Sequence
  chemically synthesized
actgggctaaagtcgaggtgtc

SEQ ID NO: 54892 - DNA, 22 bp, Artificial Sequence
  chemically synthesized
ggctaaagtcgaggtgtcagtg

SEQ ID NO: 54893 - DNA, 22 bp, Artificial Sequence
  chemically synthesized
aagtcgaggtgtcagtgtggct

SEQ ID NO: 54894 - DNA, 22 bp, Artificial Sequence
  chemically synthesized
tttcttctggagactctatgag

SEQ ID NO: 54895 - DNA, 22 bp, Artificial Sequence
  chemically synthesized
cttctggagactctatgagaga

SEQ ID NO: 54896 - DNA, 22 bp, Artificial Sequence
  chemically synthesized
ttctggagactctatgagagat

SEQ ID NO: 54897 - DNA, 22 bp, Artificial Sequence
  chemically synthesized
ctggagactctatgagagattg

SEQ ID NO: 54898 - DNA, 22 bp, Artificial Sequence
  chemically synthesized
tggagactctatgagagattgt

SEQ ID NO: 54899 - DNA, 22 bp, Artificial Sequence
  chemically synthesized
gagactctatgagagattgtgt

SEQ ID NO: 54900 - DNA, 22 bp, Artificial Sequence
  chemically synthesized
tatgagagattgtgttttcctg

SEQ ID NO: 54901 - DNA, 22 bp, Artificial Sequence
  chemically synthesized
tgagagattgtgttttcctgcc

SEQ ID NO: 54902 - DNA, 22 bp, Artificial Sequence
  chemically synthesized
tgttttcctgccttttccatgg

SEQ ID NO: 54903 - DNA, 22 bp, Artificial Sequence
  chemically synthesized
tcctgccttttccatggattct

SEQ ID NO: 54904 - DNA, 22 bp, Artificial Sequence
  chemically synthesized
cctgccttttccatggattctg

SEQ ID NO: 54905 - DNA, 22 bp, Artificial Sequence
  chemically synthesized
ctgccttttccatggattctgt

SEQ ID NO: 54906 - DNA, 22 bp, Artificial Sequence
  chemically synthesized
ccttttccatggattctgtttc

SEQ ID NO: 54907 - DNA, 22 bp, Artificial Sequence
  chemically synthesized
ttccatggattctgtttcctct

SEQ ID NO: 54908 - DNA, 22 bp, Artificial Sequence
  chemically synthesized
tccatggattctgtttcctctt

SEQ ID NO: 54909 - DNA, 22 bp, Artificial Sequence
  chemically synthesized
ccatggattctgtttcctcttc

SEQ ID NO: 54910 - DNA, 22 bp, Artificial Sequence
  chemically synthesized
catggattctgtttcctcttct

SEQ ID NO: 54911 - DNA, 22 bp, Artificial Sequence
  chemically synthesized
tgtttcctcttctagaggctac

SEQ ID NO: 54912 - DNA, 22 bp, Artificial Sequence
  chemically synthesized
tttcctcttctagaggctaccc

SEQ ID NO: 54913 - DNA, 22 bp, Artificial Sequence
  chemically synthesized
cctcttctagaggctacccaca

SEQ ID NO: 54914 - DNA, 22 bp, Artificial Sequence
  chemically synthesized
ctcttctagaggctacccacat

SEQ ID NO: 54915 - DNA, 22 bp, Artificial Sequence
  chemically synthesized
ttctagaggctacccacattcc

SEQ ID NO: 54916 - DNA, 22 bp, Artificial Sequence
  chemically synthesized
ctagaggctacccacattcctt

SEQ ID NO: 54917 - DNA, 22 bp, Artificial Sequence
  chemically synthesized
tagaggctacccacattccttg

SEQ ID NO: 54918 - DNA, 22 bp, Artificial Sequence
  chemically synthesized
gaggctacccacattccttggt

SEQ ID NO: 54919 - DNA, 22 bp, Artificial Sequence
  chemically synthesized
cccacattccttggtttgtagc

SEQ ID NO: 54920 - DNA, 22 bp, Artificial Sequence
  chemically synthesized
cttggtttgtagcctcttcctc

SEQ ID NO: 54921 - DNA, 22 bp, Artificial Sequence
  chemically synthesized
ggtttgtagcctcttcctcgat

SEQ ID NO: 54922 - DNA, 22 bp, Artificial Sequence
  chemically synthesized
gtttgtagcctcttcctcgatc

SEQ ID NO: 54923 - DNA, 22 bp, Artificial Sequence
  chemically synthesized
gtagcctcttcctcgatcttca

SEQ ID NO: 54924 - DNA, 22 bp, Artificial Sequence
  chemically synthesized
tagcctcttcctcgatcttcaa

SEQ ID NO: 54925 - DNA, 22 bp, Artificial Sequence
  chemically synthesized
ttcctcgatcttcaaaaaaatg

SEQ ID NO: 54926 - DNA, 22 bp, Artificial Sequence
  chemically synthesized
cctcgatcttcaaaaaaatgta

SEQ ID NO: 54927 - DNA, 22 bp, Artificial Sequence
  chemically synthesized
ctcgatcttcaaaaaaatgtat

SEQ ID NO: 54928 - DNA, 22 bp, Artificial Sequence
  chemically synthesized
gatcttcaaaaaaatgtatctc

SEQ ID NO: 54929 - DNA, 22 bp, Artificial Sequence
  chemically synthesized
caaaaaaatgtatctctgcttt

SEQ ID NO: 54930 - DNA, 22 bp, Artificial Sequence
  chemically synthesized
aaaaaaatgtatctctgctttt

SEQ ID NO: 54931 - DNA, 22 bp, Artificial Sequence
  chemically synthesized
tgcttttgtaatcacgtcacat

SEQ ID NO: 54932 - DNA, 22 bp, Artificial Sequence
  chemically synthesized
cttttgtaatcacgtcacattt

SEQ ID NO: 54933 - DNA, 22 bp, Artificial Sequence
  chemically synthesized
ttgtaatcacgtcacattttct

SEQ ID NO: 54934 - DNA, 22 bp, Artificial Sequence
  chemically synthesized
tgtaatcacgtcacattttctc

SEQ ID NO: 54935 - DNA, 22 bp, Artificial Sequence
  chemically synthesized
gtaatcacgtcacattttctcc

SEQ ID NO: 54936 - DNA, 22 bp, Artificial Sequence
  chemically synthesized
taatcacgtcacattttctcct

SEQ ID NO: 54937 - DNA, 22 bp, Artificial Sequence
  chemically synthesized
tctcctcttataagtcaaatct

SEQ ID NO: 54938 - DNA, 22 bp, Artificial Sequence
  chemically synthesized
ctcctcttataagtcaaatctc

SEQ ID NO: 54939 - DNA, 22 bp, Artificial Sequence
  chemically synthesized
tcctcttataagtcaaatctcc

SEQ ID NO: 54940 - DNA, 22 bp, Artificial Sequence
  chemically synthesized
ctcttataagtcaaatctccct

SEQ ID NO: 54941 - DNA, 22 bp, Artificial Sequence
  chemically synthesized
ttataagtcaaatctccctttg

SEQ ID NO: 54942 - DNA, 22 bp, Artificial Sequence
  chemically synthesized
ataagtcaaatctccctttgcc

SEQ ID NO: 54943 - DNA, 22 bp, Artificial Sequence
  chemically synthesized
taagtcaaatctccctttgcct

SEQ ID NO: 54944 - DNA, 22 bp, Artificial Sequence
  chemically synthesized
cctttgcctccctcttataatg

SEQ ID NO: 54945 - DNA, 22 bp, Artificial Sequence
  chemically synthesized
tgcctccctcttataatgacac

SEQ ID NO: 54946 - DNA, 22 bp, Artificial Sequence
  chemically synthesized
gcctccctcttataatgacact

SEQ ID NO: 54947 - DNA, 22 bp, Artificial Sequence
  chemically synthesized
cctccctcttataatgacactt

SEQ ID NO: 54948 - DNA, 22 bp, Artificial Sequence
  chemically synthesized
cctcttataatgacacttgtga

SEQ ID NO: 54949 - DNA, 22 bp, Artificial Sequence
  chemically synthesized
ttataatgacacttgtgattac

SEQ ID NO: 54950 - DNA, 22 bp, Artificial Sequence
  chemically synthesized
ataatgacacttgtgattacat

SEQ ID NO: 54951 - DNA, 22 bp, Artificial Sequence
  chemically synthesized
taatgacacttgtgattacatt

SEQ ID NO: 54952 - DNA, 22 bp, Artificial Sequence
  chemically synthesized
gtgattacatttaggatacacc

SEQ ID NO: 54953 - DNA, 22 bp, Artificial Sequence
  chemically synthesized
tgattacatttaggatacaccc

SEQ ID NO: 54954 - DNA, 22 bp, Artificial Sequence
  chemically synthesized
catttaggatacacccaaataa

SEQ ID NO: 54955 - DNA, 22 bp, Artificial Sequence
  chemically synthesized
aggatacacccaaataattagg

SEQ ID NO: 54956 - DNA, 22 bp, Artificial Sequence
  chemically synthesized
ggatacacccaaataattagga

SEQ ID NO: 54957 - DNA, 22 bp, Artificial Sequence
  chemically synthesized
ggatatctccccatcccaagat

SEQ ID NO: 54958 - DNA, 22 bp, Artificial Sequence
  chemically synthesized
cccatcccaagatccttaatta

SEQ ID NO: 54959 - DNA, 22 bp, Artificial Sequence
  chemically synthesized
aattatatatgcaaaagtctgt

SEQ ID NO: 54960 - DNA, 22 bp, Artificial Sequence
  chemically synthesized
attatatatgcaaaagtctgtt

SEQ ID NO: 54961 - DNA, 22 bp, Artificial Sequence
  chemically synthesized
tatatgcaaaagtctgtttggc

SEQ ID NO: 54962 - DNA, 22 bp, Artificial Sequence
  chemically synthesized
tttggctagaaaagataatact

SEQ ID NO: 54963 - DNA, 22 bp, Artificial Sequence
  chemically synthesized
ggctagaaaagataatactcac

SEQ ID NO: 54964 - DNA, 22 bp, Artificial Sequence
  chemically synthesized
gctagaaaagataatactcaca

SEQ ID NO: 54965 - DNA, 22 bp, Artificial Sequence
  chemically synthesized
gaaaagataatactcacaggtt

SEQ ID NO: 54966 - DNA, 22 bp, Artificial Sequence
  chemically synthesized
acaggtttcaggggttaagcca

SEQ ID NO: 54967 - DNA, 22 bp, Artificial Sequence
  chemically synthesized
caggggttaagccatacatatc

SEQ ID NO: 54968 - DNA, 22 bp, Artificial Sequence
  chemically synthesized
aggggttaagccatacatatct

SEQ ID NO: 54969 - DNA, 22 bp, Artificial Sequence
  chemically synthesized
agccatacatatctttcagagt

SEQ ID NO: 54970 - DNA, 22 bp, Artificial Sequence
  chemically synthesized
tcagagtgagccattagccatt

SEQ ID NO: 54971 - DNA, 22 bp, Artificial Sequence
  chemically synthesized
cagagtgagccattagccatta

SEQ ID NO: 54972 - DNA, 22 bp, Artificial Sequence
  chemically synthesized
agagtgagccattagccattat

SEQ ID NO: 54973 - DNA, 22 bp, Artificial Sequence
  chemically synthesized
gccattattcagcctactgcga

SEQ ID NO: 54974 - DNA, 22 bp, Artificial Sequence
  chemically synthesized
ttcagcctactgcgataatgtg

SEQ ID NO: 54975 - DNA, 22 bp, Artificial Sequence
  chemically synthesized
agcctactgcgataatgtgcaa

SEQ ID NO: 54976 - DNA, 22 bp, Artificial Sequence
  chemically synthesized
ctgcgataatgtgcaagttccc

SEQ ID NO: 54977 - DNA, 22 bp, Artificial Sequence
  chemically synthesized
cgataatgtgcaagttcccttt

SEQ ID NO: 54978 - DNA, 22 bp, Artificial Sequence
  chemically synthesized
cctttacaatctatgttctatg

SEQ ID NO: 54979 - DNA, 22 bp, Artificial Sequence
  chemically synthesized
tacaatctatgttctatgttcc

SEQ ID NO: 54980 - DNA, 22 bp, Artificial Sequence
  chemically synthesized
acaatctatgttctatgttccc

SEQ ID NO: 54981 - DNA, 22 bp, Artificial Sequence
  chemically synthesized
caatctatgttctatgttccca

SEQ ID NO: 54982 - DNA, 22 bp, Artificial Sequence
  chemically synthesized
tgttctatgttcccatcaaggt

SEQ ID NO: 54983 - DNA, 22 bp, Artificial Sequence
  chemically synthesized
tatgttcccatcaaggttaatt

SEQ ID NO: 54984 - DNA, 22 bp, Artificial Sequence
  chemically synthesized
tgttcccatcaaggttaattag

SEQ ID NO: 54985 - DNA, 22 bp, Artificial Sequence
  chemically synthesized
ccatcaaggttaattagaaata

SEQ ID NO: 54986 - DNA, 22 bp, Artificial Sequence
  chemically synthesized
attagaaatattagactctttt

SEQ ID NO: 54987 - DNA, 22 bp, Artificial Sequence
  chemically synthesized
gaaatattagactctttttcca

SEQ ID NO: 54988 - DNA, 22 bp, Artificial Sequence
  chemically synthesized
gactctttttccacagaaaaaa

SEQ ID NO: 54989 - DNA, 22 bp, Artificial Sequence
  chemically synthesized
tttttccacagaaaaaaaaaat

SEQ ID NO: 54990 - DNA, 22 bp, Artificial Sequence
  chemically synthesized
tttccacagaaaaaaaaaatgt

SEQ ID NO: 54991 - DNA, 22 bp, Artificial Sequence
  chemically synthesized
ttccacagaaaaaaaaaatgta

SEQ ID NO: 54992 - DNA, 22 bp, Artificial Sequence
  chemically synthesized
tccacagaaaaaaaaaatgtag

SEQ ID NO: 54993 - DNA, 22 bp, Artificial Sequence
  chemically synthesized
ccacagaaaaaaaaaatgtagc

SEQ ID NO: 54994 - DNA, 22 bp, Artificial Sequence
  chemically synthesized
cacagaaaaaaaaaatgtagca

SEQ ID NO: 54995 - DNA, 22 bp, Artificial Sequence
  chemically synthesized
catctctaccctgacttctctc

SEQ ID NO: 54996 - DNA, 22 bp, Artificial Sequence
  chemically synthesized
atctctaccctgacttctctct

SEQ ID NO: 54997 - DNA, 22 bp, Artificial Sequence
  chemically synthesized
taccctgacttctctctctttc

SEQ ID NO: 54998 - DNA, 22 bp, Artificial Sequence
  chemically synthesized
ccctgacttctctctctttcct

SEQ ID NO: 54999 - DNA, 22 bp, Artificial Sequence
  chemically synthesized
acttctctctctttccttcatg

SEQ ID NO: 55000 - DNA, 22 bp, Artificial Sequence
  chemically synthesized
ctctctctttccttcatgccca

SEQ ID NO: 55001 - DNA, 22 bp, Artificial Sequence
  chemically synthesized
tctctctttccttcatgcccag

SEQ ID NO: 55002 - DNA, 22 bp, Artificial Sequence
  chemically synthesized
tctctttccttcatgcccagta

SEQ ID NO: 55003 - DNA, 22 bp, Artificial Sequence
  chemically synthesized
tctttccttcatgcccagtaag

SEQ ID NO: 55004 - DNA, 22 bp, Artificial Sequence
  chemically synthesized
tttccttcatgcccagtaagag

SEQ ID NO: 55005 - DNA, 22 bp, Artificial Sequence
  chemically synthesized
tccttcatgcccagtaagagga

SEQ ID NO: 55006 - DNA, 22 bp, Artificial Sequence
  chemically synthesized
ccttcatgcccagtaagaggaa

SEQ ID NO: 55007 - DNA, 22 bp, Artificial Sequence
  chemically synthesized
cttcatgcccagtaagaggaag

SEQ ID NO: 55008 - DNA, 22 bp, Artificial Sequence
  chemically synthesized
catgcccagtaagaggaagtga

SEQ ID NO: 55009 - DNA, 22 bp, Artificial Sequence
  chemically synthesized
atgcccagtaagaggaagtgag

SEQ ID NO: 55010 - DNA, 22 bp, Artificial Sequence
  chemically synthesized
ttcatctcatcaggtgttacct

SEQ ID NO: 55011 - DNA, 22 bp, Artificial Sequence
  chemically synthesized
atctcatcaggtgttacctaga

SEQ ID NO: 55012 - DNA, 22 bp, Artificial Sequence
  chemically synthesized
atcaggtgttacctagaatcag

SEQ ID NO: 55013 - DNA, 22 bp, Artificial Sequence
  chemically synthesized
cctagaatcagagtcaggagaa

SEQ ID NO: 55014 - DNA, 22 bp, Artificial Sequence
  chemically synthesized
gaatcagagtcaggagaaagca

SEQ ID NO: 55015 - DNA, 22 bp, Artificial Sequence
  chemically synthesized
ataaaactactctgacaagtaa

SEQ ID NO: 55016 - DNA, 22 bp, Artificial Sequence
  chemically synthesized
ctctgacaagtaaaccatatcc

SEQ ID NO: 55017 - DNA, 22 bp, Artificial Sequence
  chemically synthesized
tgacaagtaaaccatatcctgg

SEQ ID NO: 55018 - DNA, 22 bp, Artificial Sequence
  chemically synthesized
acaagtaaaccatatcctgggg

SEQ ID NO: 55019 - DNA, 22 bp, Artificial Sequence
  chemically synthesized
gggaccaggtgagaattaaaaa

SEQ ID NO: 55020 - DNA, 22 bp, Artificial Sequence
  chemically synthesized
aaaagctgtatactcataagct

SEQ ID NO: 55021 - DNA, 22 bp, Artificial Sequence
  chemically synthesized
tatactcataagctgccaaaga

SEQ ID NO: 55022 - DNA, 22 bp, Artificial Sequence
  chemically synthesized
ataagctgccaaagagctgatg

SEQ ID NO: 55023 - DNA, 22 bp, Artificial Sequence
  chemically synthesized
ccaaagagctgatggtactgaa

SEQ ID NO: 55024 - DNA, 22 bp, Artificial Sequence
  chemically synthesized
atggtactgaagtcacatggag

SEQ ID NO: 55025 - DNA, 22 bp, Artificial Sequence
  chemically synthesized
aagtcacatggagctcaggaat

SEQ ID NO: 55026 - DNA, 22 bp, Artificial Sequence
  chemically synthesized
aggaatttattcttgcatttag

SEQ ID NO: 55027 - DNA, 22 bp, Artificial Sequence
  chemically synthesized
attcttgcatttagaaagtatg

SEQ ID NO: 55028 - DNA, 22 bp, Artificial Sequence
  chemically synthesized
ttcttgcatttagaaagtatgc

SEQ ID NO: 55029 - DNA, 22 bp, Artificial Sequence
  chemically synthesized
ttgcatttagaaagtatgcata

SEQ ID NO: 55030 - DNA, 22 bp, Artificial Sequence
  chemically synthesized
gcatttagaaagtatgcatata

SEQ ID NO: 55031 - DNA, 22 bp, Artificial Sequence
  chemically synthesized
catttagaaagtatgcatataa

SEQ ID NO: 55032 - DNA, 22 bp, Artificial Sequence
  chemically synthesized
agaaagtatgcatataattctc

SEQ ID NO: 55033 - DNA, 22 bp, Artificial Sequence
  chemically synthesized
gaaagtatgcatataattctct

SEQ ID NO: 55034 - DNA, 22 bp, Artificial Sequence
  chemically synthesized
tctcgaaaagaaatgaaatcat

SEQ ID NO: 55035 - DNA, 22 bp, Artificial Sequence
  chemically synthesized
tcgaaaagaaatgaaatcatat

SEQ ID NO: 55036 - DNA, 22 bp, Artificial Sequence
  chemically synthesized
gaaaagaaatgaaatcatattt

SEQ ID NO: 55037 - DNA, 22 bp, Artificial Sequence
  chemically synthesized
ttctgtcggatcaaattattca

SEQ ID NO: 55038 - DNA, 22 bp, Artificial Sequence
  chemically synthesized
tctgtcggatcaaattattcag

SEQ ID NO: 55039 - DNA, 22 bp, Artificial Sequence
  chemically synthesized
ctgtcggatcaaattattcaga

SEQ ID NO: 55040 - DNA, 22 bp, Artificial Sequence
  chemically synthesized
tgtcggatcaaattattcagaa

SEQ ID NO: 55041 - DNA, 22 bp, Artificial Sequence
  chemically synthesized
tcggatcaaattattcagaaat

SEQ ID NO: 55042 - DNA, 22 bp, Artificial Sequence
  chemically synthesized
ttcagaaatccgaactgtagaa

SEQ ID NO: 55043 - DNA, 22 bp, Artificial Sequence
  chemically synthesized
agaaatccgaactgtagaaaac

SEQ ID NO: 55044 - DNA, 22 bp, Artificial Sequence
  chemically synthesized
tagaaaacatacaaacacactt

SEQ ID NO: 55045 - DNA, 22 bp, Artificial Sequence
  chemically synthesized
gcttaatgttagctttttaatc

SEQ ID NO: 55046 - DNA, 22 bp, Artificial Sequence
  chemically synthesized
cttaatgttagctttttaatct

SEQ ID NO: 55047 - DNA, 22 bp, Artificial Sequence
  chemically synthesized
aatgttagctttttaatcttat

SEQ ID NO: 55048 - DNA, 22 bp, Artificial Sequence
  chemically synthesized
atgttagctttttaatcttatt

SEQ ID NO: 55049 - DNA, 22 bp, Artificial Sequence
  chemically synthesized
gctttttaatcttatttttgta

SEQ ID NO: 55050 - DNA, 22 bp, Artificial Sequence
  chemically synthesized
tttaatcttatttttgtacaca

SEQ ID NO: 55051 - DNA, 22 bp, Artificial Sequence
  chemically synthesized
ttaatcttatttttgtacacag

SEQ ID NO: 55052 - DNA, 22 bp, Artificial Sequence
  chemically synthesized
taatcttatttttgtacacagt

SEQ ID NO: 55053 - DNA, 22 bp, Artificial Sequence
  chemically synthesized
aatcttatttttgtacacagta

SEQ ID NO: 55054 - DNA, 22 bp, Artificial Sequence
  chemically synthesized
atcttatttttgtacacagtat

SEQ ID NO: 55055 - DNA, 22 bp, Artificial Sequence
  chemically synthesized
atttttgtacacagtatacttt

SEQ ID NO: 55056 - DNA, 22 bp, Artificial Sequence
  chemically synthesized
tttttgtacacagtatactttt

SEQ ID NO: 55057 - DNA, 22 bp, Artificial Sequence
  chemically synthesized
ttgtacacagtatacttttaca

SEQ ID NO: 55058 - DNA, 22 bp, Artificial Sequence
  chemically synthesized
tgtacacagtatacttttacat

SEQ ID NO: 55059 - DNA, 22 bp, Artificial Sequence
  chemically synthesized
gtacacagtatacttttacata

SEQ ID NO: 55060 - DNA, 22 bp, Artificial Sequence
  chemically synthesized
tacacagtatacttttacatag

SEQ ID NO: 55061 - DNA, 22 bp, Artificial Sequence
  chemically synthesized
ttacataggcactgaaccagct

SEQ ID NO: 55062 - DNA, 22 bp, Artificial Sequence
  chemically synthesized
tacataggcactgaaccagctg

SEQ ID NO: 55063 - DNA, 22 bp, Artificial Sequence
  chemically synthesized
acataggcactgaaccagctgg

SEQ ID NO: 55064 - DNA, 22 bp, Artificial Sequence
  chemically synthesized
cataggcactgaaccagctgga

SEQ ID NO: 55065 - DNA, 22 bp, Artificial Sequence
  chemically synthesized
aaccagctggaaatgaatgctt

SEQ ID NO: 55066 - DNA, 22 bp, Artificial Sequence
  chemically synthesized
gaaatgaatgcttggattttcg

SEQ ID NO: 55067 - DNA, 22 bp, Artificial Sequence
  chemically synthesized
ggattttcgcagctgataaaag

SEQ ID NO: 55068 - DNA, 22 bp, Artificial Sequence
  chemically synthesized
gattttcgcagctgataaaagc

SEQ ID NO: 55069 - DNA, 22 bp, Artificial Sequence
  chemically synthesized
tcgcagctgataaaagcagagt

SEQ ID NO: 55070 - DNA, 22 bp, Artificial Sequence
  chemically synthesized
cgcagctgataaaagcagagtt

SEQ ID NO: 55071 - DNA, 22 bp, Artificial Sequence
  chemically synthesized
gcagctgataaaagcagagttc

SEQ ID NO: 55072 - DNA, 22 bp, Artificial Sequence
  chemically synthesized
ataaaagcagagttcagattct

SEQ ID NO: 55073 - DNA, 22 bp, Artificial Sequence
  chemically synthesized
agattctgtccttgagctcaat

SEQ ID NO: 55074 - DNA, 22 bp, Artificial Sequence
  chemically synthesized
tgtccttgagctcaatgtctgg

SEQ ID NO: 55075 - DNA, 22 bp, Artificial Sequence
  chemically synthesized
tccttgagctcaatgtctggag

SEQ ID NO: 55076 - DNA, 22 bp, Artificial Sequence
  chemically synthesized
gagctcaatgtctggagaaagc

SEQ ID NO: 55077 - DNA, 22 bp, Artificial Sequence
  chemically synthesized
agctcaatgtctggagaaagca

SEQ ID NO: 55078 - DNA, 22 bp, Artificial Sequence
  chemically synthesized
aatgtctggagaaagcagctgt

SEQ ID NO: 55079 - DNA, 22 bp, Artificial Sequence
  chemically synthesized
gagaaagcagctgtgaatactg

SEQ ID NO: 55080 - DNA, 22 bp, Artificial Sequence
  chemically synthesized
tgaatactgcttccttaattca

SEQ ID NO: 55081 - DNA, 22 bp, Artificial Sequence
  chemically synthesized
cttccttaattcagatgccttt

SEQ ID NO: 55082 - DNA, 22 bp, Artificial Sequence
  chemically synthesized
ccttaattcagatgcctttggc

SEQ ID NO: 55083 - DNA, 22 bp, Artificial Sequence
  chemically synthesized
cttaattcagatgcctttggcc

SEQ ID NO: 55084 - DNA, 22 bp, Artificial Sequence
  chemically synthesized
aattcagatgcctttggccgtg

SEQ ID NO: 55085 - DNA, 22 bp, Artificial Sequence
  chemically synthesized
attcagatgcctttggccgtga

SEQ ID NO: 55086 - DNA, 22 bp, Artificial Sequence
  chemically synthesized
agatgcctttggccgtgagggg

SEQ ID NO: 55087 - DNA, 22 bp, Artificial Sequence
  chemically synthesized
tggccgtgaggggcatggcatt

SEQ ID NO: 55088 - DNA, 22 bp, Artificial Sequence
  chemically synthesized
ggccgtgaggggcatggcattt

SEQ ID NO: 55089 - DNA, 22 bp, Artificial Sequence
  chemically synthesized
gccgtgaggggcatggcatttt

SEQ ID NO: 55090 - DNA, 22 bp, Artificial Sequence
  chemically synthesized
taaagctgcaataaactctgta

SEQ ID NO: 55091 - DNA, 22 bp, Artificial Sequence
  chemically synthesized
aaagctgcaataaactctgtac

SEQ ID NO: 55092 - DNA, 22 bp, Artificial Sequence
  chemically synthesized
aagctgcaataaactctgtact

SEQ ID NO: 55093 - DNA, 22 bp, Artificial Sequence
  chemically synthesized
caataaactctgtactttttct

SEQ ID NO: 55094 - DNA, 22 bp, Artificial Sequence
  chemically synthesized
tgtactttttctctcaggggat

SEQ ID NO: 55095 - DNA, 22 bp, Artificial Sequence
  chemically synthesized
tactttttctctcaggggatta

SEQ ID NO: 55096 - DNA, 22 bp, Artificial Sequence
  chemically synthesized
tttctctcaggggattagaaaa

SEQ ID NO: 55097 - DNA, 22 bp, Artificial Sequence
  chemically synthesized
ttctctcaggggattagaaaaa

SEQ ID NO: 55098 - DNA, 22 bp, Artificial Sequence
  chemically synthesized
tctctcaggggattagaaaaac

SEQ ID NO: 55099 - DNA, 22 bp, Artificial Sequence
  chemically synthesized
ctctcaggggattagaaaaacc

SEQ ID NO: 55100 - DNA, 22 bp, Artificial Sequence
  chemically synthesized
tctcaggggattagaaaaacca

SEQ ID NO: 55101 - DNA, 22 bp, Artificial Sequence
  chemically synthesized
tcaggggattagaaaaaccaat

SEQ ID NO: 55102 - DNA, 22 bp, Artificial Sequence
  chemically synthesized
aggggattagaaaaaccaattg

SEQ ID NO: 55103 - DNA, 22 bp, Artificial Sequence
  chemically synthesized
gaaaaaccaattgatttgatag

SEQ ID NO: 55104 - DNA, 22 bp, Artificial Sequence
  chemically synthesized
atttgatagtgactcagcagtt

SEQ ID NO: 55105 - DNA, 22 bp, Artificial Sequence
  chemically synthesized
gatagtgactcagcagttttca

SEQ ID NO: 55106 - DNA, 22 bp, Artificial Sequence
  chemically synthesized
atagtgactcagcagttttcac

SEQ ID NO: 55107 - DNA, 22 bp, Artificial Sequence
  chemically synthesized
agcagttttcaccttcctcttt

SEQ ID NO: 55108 - DNA, 22 bp, Artificial Sequence
  chemically synthesized
tcaccttcctctttagccaatg

SEQ ID NO: 55109 - DNA, 22 bp, Artificial Sequence
  chemically synthesized
caccttcctctttagccaatgc

SEQ ID NO: 55110 - DNA, 22 bp, Artificial Sequence
  chemically synthesized
accttcctctttagccaatgcc

SEQ ID NO: 55111 - DNA, 22 bp, Artificial Sequence
  chemically synthesized
cctctttagccaatgccctgca

SEQ ID NO: 55112 - DNA, 22 bp, Artificial Sequence
  chemically synthesized
ctctttagccaatgccctgcag

SEQ ID NO: 55113 - DNA, 22 bp, Artificial Sequence
  chemically synthesized
tttagccaatgccctgcagcta

SEQ ID NO: 55114 - DNA, 22 bp, Artificial Sequence
  chemically synthesized
tagccaatgccctgcagctaag

SEQ ID NO: 55115 - DNA, 22 bp, Artificial Sequence
  chemically synthesized
agccaatgccctgcagctaaga

SEQ ID NO: 55116 - DNA, 22 bp, Artificial Sequence
  chemically synthesized
gccaatgccctgcagctaagat

SEQ ID NO: 55117 - DNA, 22 bp, Artificial Sequence
  chemically synthesized
cagctaagattgagaaacggat

SEQ ID NO: 55118 - DNA, 22 bp, Artificial Sequence
  chemically synthesized
agattgagaaacggattcagaa

SEQ ID NO: 55119 - DNA, 22 bp, Artificial Sequence
  chemically synthesized
agaaacggattcagaactcaca

SEQ ID NO: 55120 - DNA, 22 bp, Artificial Sequence
  chemically synthesized
agaactcacacctcttggtgct

SEQ ID NO: 55121 - DNA, 22 bp, Artificial Sequence
  chemically synthesized
acacctcttggtgcttggtggc

SEQ ID NO: 55122 - DNA, 22 bp, Artificial Sequence
  chemically synthesized
ttggtgcttggtggctcccttc

SEQ ID NO: 55123 - DNA, 22 bp, Artificial Sequence
  chemically synthesized
ggtgcttggtggctcccttcca

SEQ ID NO: 55124 - DNA, 22 bp, Artificial Sequence
  chemically synthesized
gtgcttggtggctcccttccaa

SEQ ID NO: 55125 - DNA, 22 bp, Artificial Sequence
  chemically synthesized
ggtggctcccttccaaaccatc

SEQ ID NO: 55126 - DNA, 22 bp, Artificial Sequence
  chemically synthesized
gtggctcccttccaaaccatca

SEQ ID NO: 55127 - DNA, 22 bp, Artificial Sequence
  chemically synthesized
ccttccaaaccatcagctgttc

SEQ ID NO: 55128 - DNA, 22 bp, Artificial Sequence
  chemically synthesized
ccaaaccatcagctgttctttc

SEQ ID NO: 55129 - DNA, 22 bp, Artificial Sequence
  chemically synthesized
caaaccatcagctgttctttct

SEQ ID NO: 55130 - DNA, 22 bp, Artificial Sequence
  chemically synthesized
ttctttctactttctttcctat

SEQ ID NO: 55131 - DNA, 22 bp, Artificial Sequence
  chemically synthesized
tttctactttctttcctatttt

SEQ ID NO: 55132 - DNA, 22 bp, Artificial Sequence
  chemically synthesized
tctactttctttcctatttttt

SEQ ID NO: 55133 - DNA, 22 bp, Artificial Sequence
  chemically synthesized
ctactttctttcctatttttta

SEQ ID NO: 55134 - DNA, 22 bp, Artificial Sequence
  chemically synthesized
tactttctttcctattttttaa

SEQ ID NO: 55135 - DNA, 22 bp, Artificial Sequence
  chemically synthesized
ctttctttcctattttttaaag

SEQ ID NO: 55136 - DNA, 22 bp, Artificial Sequence
  chemically synthesized
tctttcctattttttaaagcac

SEQ ID NO: 55137 - DNA, 22 bp, Artificial Sequence
  chemically synthesized
ctttcctattttttaaagcaca

SEQ ID NO: 55138 - DNA, 22 bp, Artificial Sequence
  chemically synthesized
tttcctattttttaaagcacag

SEQ ID NO: 55139 - DNA, 22 bp, Artificial Sequence
  chemically synthesized
tcctattttttaaagcacagtc

SEQ ID NO: 55140 - DNA, 22 bp, Artificial Sequence
  chemically synthesized
cctattttttaaagcacagtct

SEQ ID NO: 55141 - DNA, 22 bp, Artificial Sequence
  chemically synthesized
ctattttttaaagcacagtctg

SEQ ID NO: 55142 - DNA, 22 bp, Artificial Sequence
  chemically synthesized
ttttttaaagcacagtctgaat

SEQ ID NO: 55143 - DNA, 22 bp, Artificial Sequence
  chemically synthesized
tttaaagcacagtctgaatcaa

SEQ ID NO: 55144 - DNA, 22 bp, Artificial Sequence
  chemically synthesized
ttaaagcacagtctgaatcaag

SEQ ID NO: 55145 - DNA, 22 bp, Artificial Sequence
  chemically synthesized
taaagcacagtctgaatcaagt

SEQ ID NO: 55146 - DNA, 22 bp, Artificial Sequence
  chemically synthesized
aaagcacagtctgaatcaagtg

SEQ ID NO: 55147 - DNA, 22 bp, Artificial Sequence
  chemically synthesized
aagcacagtctgaatcaagtgc

SEQ ID NO: 55148 - DNA, 22 bp, Artificial Sequence
  chemically synthesized
aatcaagtgcttcagaaccatt

SEQ ID NO: 55149 - DNA, 22 bp, Artificial Sequence
  chemically synthesized
cagaaccatttatactaactcg

SEQ ID NO: 55150 - DNA, 22 bp, Artificial Sequence
  chemically synthesized
agaaccatttatactaactcgt

SEQ ID NO: 55151 - DNA, 22 bp, Artificial Sequence
  chemically synthesized
atactaactcgtgttccaaaca

SEQ ID NO: 55152 - DNA, 22 bp, Artificial Sequence
  chemically synthesized
tactaactcgtgttccaaacac

SEQ ID NO: 55153 - DNA, 22 bp, Artificial Sequence
  chemically synthesized
actcgtgttccaaacacataac

SEQ ID NO: 55154 - DNA, 22 bp, Artificial Sequence
  chemically synthesized
gtgttccaaacacataaccctg

SEQ ID NO: 55155 - DNA, 22 bp, Artificial Sequence
  chemically synthesized
caaacacataaccctgaaccct

SEQ ID NO: 55156 - DNA, 22 bp, Artificial Sequence
  chemically synthesized
aaccctcttctaaggccaccag

SEQ ID NO: 55157 - DNA, 22 bp, Artificial Sequence
  chemically synthesized
ttctaaggccaccagttacaaa

SEQ ID NO: 55158 - DNA, 22 bp, Artificial Sequence
  chemically synthesized
ctaaggccaccagttacaaaga

SEQ ID NO: 55159 - DNA, 22 bp, Artificial Sequence
  chemically synthesized
taaggccaccagttacaaagaa

SEQ ID NO: 55160 - DNA, 22 bp, Artificial Sequence
  chemically synthesized
aggccaccagttacaaagaatg

SEQ ID NO: 55161 - DNA, 22 bp, Artificial Sequence
  chemically synthesized
caaagaatggggaaggttaatg

SEQ ID NO: 55162 - DNA, 22 bp, Artificial Sequence
  chemically synthesized
atgagtaactccaccagtgcct

SEQ ID NO: 55163 - DNA, 22 bp, Artificial Sequence
  chemically synthesized
caccagtgcctgccagaaagct

SEQ ID NO: 55164 - DNA, 22 bp, Artificial Sequence
  chemically synthesized
ccagaaagctcagctgtactcc

SEQ ID NO: 55165 - DNA, 22 bp, Artificial Sequence
  chemically synthesized
agctgtactccagccttccttc

SEQ ID NO: 55166 - DNA, 22 bp, Artificial Sequence
  chemically synthesized
tactccagccttccttcctctc

SEQ ID NO: 55167 - DNA, 22 bp, Artificial Sequence
  chemically synthesized
cagccttccttcctctcttgca

SEQ ID NO: 55168 - DNA, 22 bp, Artificial Sequence
  chemically synthesized
ccttcctctcttgcagagagaa

SEQ ID NO: 55169 - DNA, 22 bp, Artificial Sequence
  chemically synthesized
cttcctctcttgcagagagaaa

SEQ ID NO: 55170 - DNA, 22 bp, Artificial Sequence
  chemically synthesized
cctctcttgcagagagaaacaa

SEQ ID NO: 55171 - DNA, 22 bp, Artificial Sequence
  chemically synthesized
ctctcttgcagagagaaacaat

SEQ ID NO: 55172 - DNA, 22 bp, Artificial Sequence
  chemically synthesized
tcttgcagagagaaacaatgcg

SEQ ID NO: 55173 - DNA, 22 bp, Artificial Sequence
  chemically synthesized
ttgcagagagaaacaatgcggc

SEQ ID NO: 55174 - DNA, 22 bp, Artificial Sequence
  chemically synthesized
gcagagagaaacaatgcggcag

SEQ ID NO: 55175 - DNA, 22 bp, Artificial Sequence
  chemically synthesized
cagagagaaacaatgcggcagt

SEQ ID NO: 55176 - DNA, 22 bp, Artificial Sequence
  chemically synthesized
aacaaagcgaaggcactgtaat

SEQ ID NO: 55177 - DNA, 22 bp, Artificial Sequence
  chemically synthesized
taatgcccagtggcttcagtca

SEQ ID NO: 55178 - DNA, 22 bp, Artificial Sequence
  chemically synthesized
cagtcacaggctggtctaaaat

SEQ ID NO: 55179 - DNA, 22 bp, Artificial Sequence
  chemically synthesized
agtcacaggctggtctaaaatt

SEQ ID NO: 55180 - DNA, 22 bp, Artificial Sequence
  chemically synthesized
gtctaaaattccatttcacaga

SEQ ID NO: 55181 - DNA, 22 bp, Artificial Sequence
  chemically synthesized
aaattccatttcacagaattga

SEQ ID NO: 55182 - DNA, 22 bp, Artificial Sequence
  chemically synthesized
catttcacagaattgaagataa

SEQ ID NO: 55183 - DNA, 22 bp, Artificial Sequence
  chemically synthesized
cacagaattgaagataatttgg

SEQ ID NO: 55184 - DNA, 22 bp, Artificial Sequence
  chemically synthesized
acagaattgaagataatttggg

SEQ ID NO: 55185 - DNA, 22 bp, Artificial Sequence
  chemically synthesized
aagataatttggggttattacc

SEQ ID NO: 55186 - DNA, 22 bp, Artificial Sequence
  chemically synthesized
ggggttattaccaattctcagc

SEQ ID NO: 55187 - DNA, 22 bp, Artificial Sequence
  chemically synthesized
gggttattaccaattctcagca

SEQ ID NO: 55188 - DNA, 22 bp, Artificial Sequence
  chemically synthesized
ttaccaattctcagcagctcaa

SEQ ID NO: 55189 - DNA, 22 bp, Artificial Sequence
  chemically synthesized
ccaattctcagcagctcaaatt

SEQ ID NO: 55190 - DNA, 22 bp, Artificial Sequence
  chemically synthesized
tcagcagctcaaattcaatccc

SEQ ID NO: 55191 - DNA, 22 bp, Artificial Sequence
  chemically synthesized
agcagctcaaattcaatcccgt

SEQ ID NO: 55192 - DNA, 22 bp, Artificial Sequence
  chemically synthesized
aaattcaatcccgttgatggtg

SEQ ID NO: 55193 - DNA, 22 bp, Artificial Sequence
  chemically synthesized
aatcccgttgatggtgagcatg

SEQ ID NO: 55194 - DNA, 22 bp, Artificial Sequence
  chemically synthesized
atggtgagcatggggttcattt

SEQ ID NO: 55195 - DNA, 22 bp, Artificial Sequence
  chemically synthesized
attttgagagtagaaaattgga

SEQ ID NO: 55196 - DNA, 22 bp, Artificial Sequence
  chemically synthesized
tgagagtagaaaattggatgca

SEQ ID NO: 55197 - DNA, 22 bp, Artificial Sequence
  chemically synthesized
gagagtagaaaattggatgcag

SEQ ID NO: 55198 - DNA, 22 bp, Artificial Sequence
  chemically synthesized
agagtagaaaattggatgcagt

SEQ ID NO: 55199 - DNA, 22 bp, Artificial Sequence
  chemically synthesized
gatgcagtggagaatcagaatg

SEQ ID NO: 55200 - DNA, 22 bp, Artificial Sequence
  chemically synthesized
gatggtctctgccatttcccca

SEQ ID NO: 55201 - DNA, 22 bp, Artificial Sequence
  chemically synthesized
tgccatttccccaaagatatca

SEQ ID NO: 55202 - DNA, 22 bp, Artificial Sequence
  chemically synthesized
ccatttccccaaagatatcatc

SEQ ID NO: 55203 - DNA, 22 bp, Artificial Sequence
  chemically synthesized
ccccaaagatatcatcctaact

SEQ ID NO: 55204 - DNA, 22 bp, Artificial Sequence
  chemically synthesized
cccaaagatatcatcctaactg

SEQ ID NO: 55205 - DNA, 22 bp, Artificial Sequence
  chemically synthesized
actgcatgctgctgcttttaac

SEQ ID NO: 55206 - DNA, 22 bp, Artificial Sequence
  chemically synthesized
catgctgctgcttttaacaaat

SEQ ID NO: 55207 - DNA, 22 bp, Artificial Sequence
  chemically synthesized
ctgcttttaacaaatcagtata

SEQ ID NO: 55208 - DNA, 22 bp, Artificial Sequence
  chemically synthesized
cttttaacaaatcagtatacaa

SEQ ID NO: 55209 - DNA, 22 bp, Artificial Sequence
  chemically synthesized
ttaacaaatcagtatacaactt

SEQ ID NO: 55210 - DNA, 22 bp, Artificial Sequence
  chemically synthesized
taacaaatcagtatacaactta

SEQ ID NO: 55211 - DNA, 22 bp, Artificial Sequence
  chemically synthesized
aacaaatcagtatacaacttag

SEQ ID NO: 55212 - DNA, 22 bp, Artificial Sequence
  chemically synthesized
acaaatcagtatacaacttagt

SEQ ID NO: 55213 - DNA, 22 bp, Artificial Sequence
  chemically synthesized
agtattttttgtgttgacaaat

SEQ ID NO: 55214 - DNA, 22 bp, Artificial Sequence
  chemically synthesized
gtattttttgtgttgacaaatt

SEQ ID NO: 55215 - DNA, 22 bp, Artificial Sequence
  chemically synthesized
tttgtgttgacaaattttcaaa

SEQ ID NO: 55216 - DNA, 22 bp, Artificial Sequence
  chemically synthesized
ttgtgttgacaaattttcaaat

SEQ ID NO: 55217 - DNA, 22 bp, Artificial Sequence
  chemically synthesized
tgtgttgacaaattttcaaata

SEQ ID NO: 55218 - DNA, 22 bp, Artificial Sequence
  chemically synthesized
gtgttgacaaattttcaaatat

SEQ ID NO: 55219 - DNA, 22 bp, Artificial Sequence
  chemically synthesized
tgttgacaaattttcaaatata

SEQ ID NO: 55220 - DNA, 22 bp, Artificial Sequence
  chemically synthesized
acaaattttcaaatatacaaaa

SEQ ID NO: 55221 - DNA, 22 bp, Artificial Sequence
  chemically synthesized
tcaaatatacaaaatattgagt

SEQ ID NO: 55222 - DNA, 22 bp, Artificial Sequence
  chemically synthesized
caaatatacaaaatattgagtc

SEQ ID NO: 55223 - DNA, 22 bp, Artificial Sequence
  chemically synthesized
aaatatacaaaatattgagtct

SEQ ID NO: 55224 - DNA, 22 bp, Artificial Sequence
  chemically synthesized
agtctgaaggcaaaaagaataa

SEQ ID NO: 55225 - DNA, 22 bp, Artificial Sequence
  chemically synthesized
aaggcaaaaagaataatttttc

SEQ ID NO: 55226 - DNA, 22 bp, Artificial Sequence
  chemically synthesized
ttcacttccattgcttcctagg

SEQ ID NO: 55227 - DNA, 22 bp, Artificial Sequence
  chemically synthesized
tcacttccattgcttcctaggt

SEQ ID NO: 55228 - DNA, 22 bp, Artificial Sequence
  chemically synthesized
cacttccattgcttcctaggtc

SEQ ID NO: 55229 - DNA, 22 bp, Artificial Sequence
  chemically synthesized
acttccattgcttcctaggtca

SEQ ID NO: 55230 - DNA, 22 bp, Artificial Sequence
  chemically synthesized
ccattgcttcctaggtcataac

SEQ ID NO: 55231 - DNA, 22 bp, Artificial Sequence
  chemically synthesized
cattgcttcctaggtcataaca

SEQ ID NO: 55232 - DNA, 22 bp, Artificial Sequence
  chemically synthesized
cttcctaggtcataacattcac

SEQ ID NO: 55233 - DNA, 22 bp, Artificial Sequence
  chemically synthesized
cctaggtcataacattcacatc

SEQ ID NO: 55234 - DNA, 22 bp, Artificial Sequence
  chemically synthesized
ctaggtcataacattcacatct

SEQ ID NO: 55235 - DNA, 22 bp, Artificial Sequence
  chemically synthesized
ggtcataacattcacatctgat

SEQ ID NO: 55236 - DNA, 22 bp, Artificial Sequence
  chemically synthesized
acatctgatatttcttccaaat

SEQ ID NO: 55237 - DNA, 22 bp, Artificial Sequence
  chemically synthesized
atatttcttccaaatacagact

SEQ ID NO: 55238 - DNA, 22 bp, Artificial Sequence
  chemically synthesized
cttccaaatacagactgttgtt

SEQ ID NO: 55239 - DNA, 22 bp, Artificial Sequence
  chemically synthesized
ttccaaatacagactgttgttg

SEQ ID NO: 55240 - DNA, 22 bp, Artificial Sequence
  chemically synthesized
ccaaatacagactgttgttggc

SEQ ID NO: 55241 - DNA, 22 bp, Artificial Sequence
  chemically synthesized
caaatacagactgttgttggcc

SEQ ID NO: 55242 - DNA, 22 bp, Artificial Sequence
  chemically synthesized
ttgttggcctgatcatcactca

SEQ ID NO: 55243 - DNA, 22 bp, Artificial Sequence
  chemically synthesized
ttggcctgatcatcactcacac

SEQ ID NO: 55244 - DNA, 22 bp, Artificial Sequence
  chemically synthesized
gcctgatcatcactcacacatc

SEQ ID NO: 55245 - DNA, 22 bp, Artificial Sequence
  chemically synthesized
atcatcactcacacatccaggc

SEQ ID NO: 55246 - DNA, 22 bp, Artificial Sequence
  chemically synthesized
acacatccaggcttgttacatc

SEQ ID NO: 55247 - DNA, 22 bp, Artificial Sequence
  chemically synthesized
gttacatctccacgccactgag

SEQ ID NO: 55248 - DNA, 22 bp, Artificial Sequence
  chemically synthesized
ttacatctccacgccactgagt

SEQ ID NO: 55249 - DNA, 22 bp, Artificial Sequence
  chemically synthesized
catctccacgccactgagtatc

SEQ ID NO: 55250 - DNA, 22 bp, Artificial Sequence
  chemically synthesized
cacgccactgagtatcagggaa

SEQ ID NO: 55251 - DNA, 22 bp, Artificial Sequence
  chemically synthesized
agtatcagggaacctgccccaa

SEQ ID NO: 55252 - DNA, 22 bp, Artificial Sequence
  chemically synthesized
ccccaatattcacgtaggttct

SEQ ID NO: 55253 - DNA, 22 bp, Artificial Sequence
  chemically synthesized
acgtaggttcttttctattttc

SEQ ID NO: 55254 - DNA, 22 bp, Artificial Sequence
  chemically synthesized
ttttctattttccctaagcgtc

SEQ ID NO: 55255 - DNA, 22 bp, Artificial Sequence
  chemically synthesized
ttctattttccctaagcgtcgg

SEQ ID NO: 55256 - DNA, 22 bp, Artificial Sequence
  chemically synthesized
tctattttccctaagcgtcggc

SEQ ID NO: 55257 - DNA, 22 bp, Artificial Sequence
  chemically synthesized
ctattttccctaagcgtcggcc

SEQ ID NO: 55258 - DNA, 22 bp, Artificial Sequence
  chemically synthesized
tattttccctaagcgtcggcca

SEQ ID NO: 55259 - DNA, 22 bp, Artificial Sequence
  chemically synthesized
ttttccctaagcgtcggccaac

SEQ ID NO: 55260 - DNA, 22 bp, Artificial Sequence
  chemically synthesized
tccctaagcgtcggccaacttt

SEQ ID NO: 55261 - DNA, 22 bp, Artificial Sequence
  chemically synthesized
ccctaagcgtcggccaacttta

SEQ ID NO: 55262 - DNA, 22 bp, Artificial Sequence
  chemically synthesized
cctaagcgtcggccaactttag

SEQ ID NO: 55263 - DNA, 22 bp, Artificial Sequence
  chemically synthesized
agcgtcggccaactttagaaat

SEQ ID NO: 55264 - DNA, 22 bp, Artificial Sequence
  chemically synthesized
tagaaataaagggacagagtac

SEQ ID NO: 55265 - DNA, 22 bp, Artificial Sequence
  chemically synthesized
agaaataaagggacagagtaca

SEQ ID NO: 55266 - DNA, 22 bp, Artificial Sequence
  chemically synthesized
gaaataaagggacagagtacaa

SEQ ID NO: 55267 - DNA, 22 bp, Artificial Sequence
  chemically synthesized
taaagccgggcatccgggggag

SEQ ID NO: 55268 - DNA, 22 bp, Artificial Sequence
  chemically synthesized
aaagccgggcatccgggggagg

SEQ ID NO: 55269 - DNA, 22 bp, Artificial Sequence
  chemically synthesized
aagccgggcatccgggggaggc

SEQ ID NO: 55270 - DNA, 22 bp, Artificial Sequence
  chemically synthesized
cggtaggttccgtgatgcccca

SEQ ID NO: 55271 - DNA, 22 bp, Artificial Sequence
  chemically synthesized
ggtaggttccgtgatgccccac

SEQ ID NO: 55272 - DNA, 22 bp, Artificial Sequence
  chemically synthesized
cgtgatgccccacaagccacaa

SEQ ID NO: 55273 - DNA, 22 bp, Artificial Sequence
  chemically synthesized
gtattagggattttcaaatggg

SEQ ID NO: 55274 - DNA, 22 bp, Artificial Sequence
  chemically synthesized
tattagggattttcaaatgggg

SEQ ID NO: 55275 - DNA, 22 bp, Artificial Sequence
  chemically synthesized
gggattttcaaatggggaggca

SEQ ID NO: 55276 - DNA, 22 bp, Artificial Sequence
  chemically synthesized
tcaaatggggaggcagtgtgca

SEQ ID NO: 55277 - DNA, 22 bp, Artificial Sequence
  chemically synthesized
caaatggggaggcagtgtgcaa

SEQ ID NO: 55278 - DNA, 22 bp, Artificial Sequence
  chemically synthesized
aaatggggaggcagtgtgcaaa

SEQ ID NO: 55279 - DNA, 22 bp, Artificial Sequence
  chemically synthesized
tacaaggtaatagaatatcaca

SEQ ID NO: 55280 - DNA, 22 bp, Artificial Sequence
  chemically synthesized
acaaggtaatagaatatcacaa

SEQ ID NO: 55281 - DNA, 22 bp, Artificial Sequence
  chemically synthesized
caaggtaatagaatatcacaag

SEQ ID NO: 55282 - DNA, 22 bp, Artificial Sequence
  chemically synthesized
aaattgctaatgaagtttcggg

SEQ ID NO: 55283 - DNA, 22 bp, Artificial Sequence
  chemically synthesized
ctaatgaagtttcgggcaccat

SEQ ID NO: 55284 - DNA, 22 bp, Artificial Sequence
  chemically synthesized
atgaagtttcgggcaccattgt

SEQ ID NO: 55285 - DNA, 22 bp, Artificial Sequence
  chemically synthesized
cgggcaccattgtcattgataa

SEQ ID NO: 55286 - DNA, 22 bp, Artificial Sequence
  chemically synthesized
gggcaccattgtcattgataac

SEQ ID NO: 55287 - DNA, 22 bp, Artificial Sequence
  chemically synthesized
tcattgataacatcttatcagg

SEQ ID NO: 55288 - DNA, 22 bp, Artificial Sequence
  chemically synthesized
ataacatcttatcaggagacag

SEQ ID NO: 55289 - DNA, 22 bp, Artificial Sequence
  chemically synthesized
atcaggagacagggtttttagg

SEQ ID NO: 55290 - DNA, 22 bp, Artificial Sequence
  chemically synthesized
tcaggagacagggtttttagga

SEQ ID NO: 55291 - DNA, 22 bp, Artificial Sequence
  chemically synthesized
ttaggatcaactggtctgacca

SEQ ID NO: 55292 - DNA, 22 bp, Artificial Sequence
  chemically synthesized
taggatcaactggtctgaccaa

SEQ ID NO: 55293 - DNA, 22 bp, Artificial Sequence
  chemically synthesized
aggatcaactggtctgaccaaa

SEQ ID NO: 55294 - DNA, 22 bp, Artificial Sequence
  chemically synthesized
ggatcaactggtctgaccaaaa

SEQ ID NO: 55295 - DNA, 22 bp, Artificial Sequence
  chemically synthesized
gtctgaccaaaatttattaggc

SEQ ID NO: 55296 - DNA, 22 bp, Artificial Sequence
  chemically synthesized
accaaaatttattaggcgggaa

SEQ ID NO: 55297 - DNA, 22 bp, Artificial Sequence
  chemically synthesized
attaggcgggaatttcctcttc

SEQ ID NO: 55298 - DNA, 22 bp, Artificial Sequence
  chemically synthesized
ttaggcgggaatttcctcttcc

SEQ ID NO: 55299 - DNA, 22 bp, Artificial Sequence
  chemically synthesized
ggcgggaatttcctcttcctaa

SEQ ID NO: 55300 - DNA, 22 bp, Artificial Sequence
  chemically synthesized
cctcttcctaataagcctggga

SEQ ID NO: 55301 - DNA, 22 bp, Artificial Sequence
  chemically synthesized
ctcttcctaataagcctgggag

SEQ ID NO: 55302 - DNA, 22 bp, Artificial Sequence
  chemically synthesized
ttcctaataagcctgggagcgc

SEQ ID NO: 55303 - DNA, 22 bp, Artificial Sequence
  chemically synthesized
cctaataagcctgggagcgctg

SEQ ID NO: 55304 - DNA, 22 bp, Artificial Sequence
  chemically synthesized
ctaataagcctgggagcgctgt

SEQ ID NO: 55305 - DNA, 22 bp, Artificial Sequence
  chemically synthesized
ataagcctgggagcgctgtggg

SEQ ID NO: 55306 - DNA, 22 bp, Artificial Sequence
  chemically synthesized
ggagcgctgtgggagactgggg

SEQ ID NO: 55307 - DNA, 22 bp, Artificial Sequence
  chemically synthesized
tgggagactggggtctatttca

SEQ ID NO: 55308 - DNA, 22 bp, Artificial Sequence
  chemically synthesized
gggtctatttcacccctgcagt

SEQ ID NO: 55309 - DNA, 22 bp, Artificial Sequence
  chemically synthesized
tttcacccctgcagtctcgacc

SEQ ID NO: 55310 - DNA, 22 bp, Artificial Sequence
  chemically synthesized
cacccctgcagtctcgaccata

SEQ ID NO: 55311 - DNA, 22 bp, Artificial Sequence
  chemically synthesized
acccctgcagtctcgaccataa

SEQ ID NO: 55312 - DNA, 22 bp, Artificial Sequence
  chemically synthesized
cagtctcgaccataagagacag

SEQ ID NO: 55313 - DNA, 22 bp, Artificial Sequence
  chemically synthesized
gaccataagagacaggcgcacc

SEQ ID NO: 55314 - DNA, 22 bp, Artificial Sequence
  chemically synthesized
gaggggggctgtttataagcct

SEQ ID NO: 55315 - DNA, 22 bp, Artificial Sequence
  chemically synthesized
tttataagcctatacctcctgg

SEQ ID NO: 55316 - DNA, 22 bp, Artificial Sequence
  chemically synthesized
ataagcctatacctcctggctc

SEQ ID NO: 55317 - DNA, 22 bp, Artificial Sequence
  chemically synthesized
taagcctatacctcctggctcg

SEQ ID NO: 55318 - DNA, 22 bp, Artificial Sequence
  chemically synthesized
tacctcctggctcgtattctct

SEQ ID NO: 55319 - DNA, 22 bp, Artificial Sequence
  chemically synthesized
ctggctcgtattctctttctca

SEQ ID NO: 55320 - DNA, 22 bp, Artificial Sequence
  chemically synthesized
gctcgtattctctttctcaggg

SEQ ID NO: 55321 - DNA, 22 bp, Artificial Sequence
  chemically synthesized
gtattctctttctcagggatgt

SEQ ID NO: 55322 - DNA, 22 bp, Artificial Sequence
  chemically synthesized
tctttctcagggatgttccatg

SEQ ID NO: 55323 - DNA, 22 bp, Artificial Sequence
  chemically synthesized
tttctcagggatgttccatgct

SEQ ID NO: 55324 - DNA, 22 bp, Artificial Sequence
  chemically synthesized
tctcagggatgttccatgctga

SEQ ID NO: 55325 - DNA, 22 bp, Artificial Sequence
  chemically synthesized
ctcagggatgttccatgctgag

SEQ ID NO: 55326 - DNA, 22 bp, Artificial Sequence
  chemically synthesized
tcagggatgttccatgctgaga

SEQ ID NO: 55327 - DNA, 22 bp, Artificial Sequence
  chemically synthesized
agggatgttccatgctgagaaa

SEQ ID NO: 55328 - DNA, 22 bp, Artificial Sequence
  chemically synthesized
catgctgagaaaaagaattcag

SEQ ID NO: 55329 - DNA, 22 bp, Artificial Sequence
  chemically synthesized
agaaaaagaattcagcgatatt

SEQ ID NO: 55330 - DNA, 22 bp, Artificial Sequence
  chemically synthesized
agcgatatttctcccatttgct

SEQ ID NO: 55331 - DNA, 22 bp, Artificial Sequence
  chemically synthesized
ctcccatttgcttttgaaagaa

SEQ ID NO: 55332 - DNA, 22 bp, Artificial Sequence
  chemically synthesized
tcccatttgcttttgaaagaag

SEQ ID NO: 55333 - DNA, 22 bp, Artificial Sequence
  chemically synthesized
ccatttgcttttgaaagaagag

SEQ ID NO: 55334 - DNA, 22 bp, Artificial Sequence
  chemically synthesized
gcttttgaaagaagagaaatat

SEQ ID NO: 55335 - DNA, 22 bp, Artificial Sequence
  chemically synthesized
cttttgaaagaagagaaatatg

SEQ ID NO: 55336 - DNA, 22 bp, Artificial Sequence
  chemically synthesized
ttgaaagaagagaaatatggct

SEQ ID NO: 55337 - DNA, 22 bp, Artificial Sequence
  chemically synthesized
tgaaagaagagaaatatggctc

SEQ ID NO: 55338 - DNA, 22 bp, Artificial Sequence
  chemically synthesized
gaaagaagagaaatatggctct

SEQ ID NO: 55339 - DNA, 22 bp, Artificial Sequence
  chemically synthesized
aaagaagagaaatatggctctg

SEQ ID NO: 55340 - DNA, 22 bp, Artificial Sequence
  chemically synthesized
tgttctgcctggctcaccagca

SEQ ID NO: 55341 - DNA, 22 bp, Artificial Sequence
  chemically synthesized
ttctgcctggctcaccagcagt

SEQ ID NO: 55342 - DNA, 22 bp, Artificial Sequence
  chemically synthesized
tgcctggctcaccagcagtcag

SEQ ID NO: 55343 - DNA, 22 bp, Artificial Sequence
  chemically synthesized
cctggctcaccagcagtcagag

SEQ ID NO: 55344 - DNA, 22 bp, Artificial Sequence
  chemically synthesized
gctcaccagcagtcagagttta

SEQ ID NO: 55345 - DNA, 22 bp, Artificial Sequence
  chemically synthesized
accagcagtcagagtttaaggt

SEQ ID NO: 55346 - DNA, 22 bp, Artificial Sequence
  chemically synthesized
aaggttatctctcttattccct

SEQ ID NO: 55347 - DNA, 22 bp, Artificial Sequence
  chemically synthesized
aggttatctctcttattccctg

SEQ ID NO: 55348 - DNA, 22 bp, Artificial Sequence
  chemically synthesized
tctctcttattccctgaacaat

SEQ ID NO: 55349 - DNA, 22 bp, Artificial Sequence
  chemically synthesized
tcttattccctgaacaattgct

SEQ ID NO: 55350 - DNA, 22 bp, Artificial Sequence
  chemically synthesized
ttattccctgaacaattgctgt

SEQ ID NO: 55351 - DNA, 22 bp, Artificial Sequence
  chemically synthesized
attccctgaacaattgctgtta

SEQ ID NO: 55352 - DNA, 22 bp, Artificial Sequence
  chemically synthesized
ttccctgaacaattgctgttat

SEQ ID NO: 55353 - DNA, 22 bp, Artificial Sequence
  chemically synthesized
cctgaacaattgctgttatcct

SEQ ID NO: 55354 - DNA, 22 bp, Artificial Sequence
  chemically synthesized
aacaattgctgttatcctgttc

SEQ ID NO: 55355 - DNA, 22 bp, Artificial Sequence
  chemically synthesized
ctgttatcctgttcttttttca

SEQ ID NO: 55356 - DNA, 22 bp, Artificial Sequence
  chemically synthesized
ttatcctgttcttttttcaagg

SEQ ID NO: 55357 - DNA, 22 bp, Artificial Sequence
  chemically synthesized
tcctgttcttttttcaaggtgt

SEQ ID NO: 55358 - DNA, 22 bp, Artificial Sequence
  chemically synthesized
ttcttttttcaaggtgtccaca

SEQ ID NO: 55359 - DNA, 22 bp, Artificial Sequence
  chemically synthesized
ttttttcaaggtgtccacattt

SEQ ID NO: 55360 - DNA, 22 bp, Artificial Sequence
  chemically synthesized
ttttcaaggtgtccacatttca

SEQ ID NO: 55361 - DNA, 22 bp, Artificial Sequence
  chemically synthesized
tttcaaggtgtccacatttcat

SEQ ID NO: 55362 - DNA, 22 bp, Artificial Sequence
  chemically synthesized
ttcaaggtgtccacatttcatg

SEQ ID NO: 55363 - DNA, 22 bp, Artificial Sequence
  chemically synthesized
tcaaggtgtccacatttcatgt

SEQ ID NO: 55364 - DNA, 22 bp, Artificial Sequence
  chemically synthesized
caaggtgtccacatttcatgtt

SEQ ID NO: 55365 - DNA, 22 bp, Artificial Sequence
  chemically synthesized
aaggtgtccacatttcatgttg

SEQ ID NO: 55366 - DNA, 22 bp, Artificial Sequence
  chemically synthesized
catgttgctcaaacacacatgc

SEQ ID NO: 55367 - DNA, 22 bp, Artificial Sequence
  chemically synthesized
atgttgctcaaacacacatgct

SEQ ID NO: 55368 - DNA, 22 bp, Artificial Sequence
  chemically synthesized
ctcaaacacacatgctgtacaa

SEQ ID NO: 55369 - DNA, 22 bp, Artificial Sequence
  chemically synthesized
aaacacacatgctgtacaattt

SEQ ID NO: 55370 - DNA, 22 bp, Artificial Sequence
  chemically synthesized
tacaatttgtgcagttaatgca

SEQ ID NO: 55371 - DNA, 22 bp, Artificial Sequence
  chemically synthesized
gtgcagttaatgcaattattac

SEQ ID NO: 55372 - DNA, 22 bp, Artificial Sequence
  chemically synthesized
tgcagttaatgcaattattaca

SEQ ID NO: 55373 - DNA, 22 bp, Artificial Sequence
  chemically synthesized
atgcaattattacagggtcctg

SEQ ID NO: 55374 - DNA, 22 bp, Artificial Sequence
  chemically synthesized
ttacagggtcctgaggcaatat

SEQ ID NO: 55375 - DNA, 22 bp, Artificial Sequence
  chemically synthesized
cagggtcctgaggcaatataca

SEQ ID NO: 55376 - DNA, 22 bp, Artificial Sequence
  chemically synthesized
aggcaatatacatcctcctcag

SEQ ID NO: 55377 - DNA, 22 bp, Artificial Sequence
  chemically synthesized
ctcagctgacaggattaagaga

SEQ ID NO: 55378 - DNA, 22 bp, Artificial Sequence
  chemically synthesized
agctgacaggattaagagatta

SEQ ID NO: 55379 - DNA, 22 bp, Artificial Sequence
  chemically synthesized
acaggattaagagattaaagta

SEQ ID NO: 55380 - DNA, 22 bp, Artificial Sequence
  chemically synthesized
agagattaaagtaaagacaggc

SEQ ID NO: 55381 - DNA, 22 bp, Artificial Sequence
  chemically synthesized
aagtaaagacaggcataaatca

SEQ ID NO: 55382 - DNA, 22 bp, Artificial Sequence
  chemically synthesized
actggggaagtgataagtgtcc

SEQ ID NO: 55383 - DNA, 22 bp, Artificial Sequence
  chemically synthesized
gggaagtgataagtgtccatga

SEQ ID NO: 55384 - DNA, 22 bp, Artificial Sequence
  chemically synthesized
tacaatttatgtttagagattg

SEQ ID NO: 55385 - DNA, 22 bp, Artificial Sequence
  chemically synthesized
acaatttatgtttagagattgc

SEQ ID NO: 55386 - DNA, 22 bp, Artificial Sequence
  chemically synthesized
caatttatgtttagagattgca

SEQ ID NO: 55387 - DNA, 22 bp, Artificial Sequence
  chemically synthesized
atgtttagagattgcagtaaag

SEQ ID NO: 55388 - DNA, 22 bp, Artificial Sequence
  chemically synthesized
tgtttagagattgcagtaaaga

SEQ ID NO: 55389 - DNA, 22 bp, Artificial Sequence
  chemically synthesized
agagattgcagtaaagacaggc

SEQ ID NO: 55390 - DNA, 22 bp, Artificial Sequence
  chemically synthesized
gagattgcagtaaagacaggca

SEQ ID NO: 55391 - DNA, 22 bp, Artificial Sequence
  chemically synthesized
cagtaaagacaggcataagaaa

SEQ ID NO: 55392 - DNA, 22 bp, Artificial Sequence
  chemically synthesized
caaaagtattaatttggggaac

SEQ ID NO: 55393 - DNA, 22 bp, Artificial Sequence
  chemically synthesized
atttggggaactaataaatgtc

SEQ ID NO: 55394 - DNA, 22 bp, Artificial Sequence
  chemically synthesized
ggggaactaataaatgtccatg

SEQ ID NO: 55395 - DNA, 22 bp, Artificial Sequence
  chemically synthesized
gggaactaataaatgtccatga

SEQ ID NO: 55396 - DNA, 22 bp, Artificial Sequence
  chemically synthesized
ataaatgtccatgaaatcttca

SEQ ID NO: 55397 - DNA, 22 bp, Artificial Sequence
  chemically synthesized
cacaatccacgaacttctgcca

SEQ ID NO: 55398 - DNA, 22 bp, Artificial Sequence
  chemically synthesized
acaatccacgaacttctgccat

SEQ ID NO: 55399 - DNA, 22 bp, Artificial Sequence
  chemically synthesized
ctgccatggcttcagctgatcc

SEQ ID NO: 55400 - DNA, 22 bp, Artificial Sequence
  chemically synthesized
tgccatggcttcagctgatccc

SEQ ID NO: 55401 - DNA, 22 bp, Artificial Sequence
  chemically synthesized
ccatggcttcagctgatccctc

SEQ ID NO: 55402 - DNA, 22 bp, Artificial Sequence
  chemically synthesized
cagctgatccctccgtttggag

SEQ ID NO: 55403 - DNA, 22 bp, Artificial Sequence
  chemically synthesized
agctgatccctccgtttggagt

SEQ ID NO: 55404 - DNA, 22 bp, Artificial Sequence
  chemically synthesized
atccctccgtttggagtcccag

SEQ ID NO: 55405 - DNA, 22 bp, Artificial Sequence
  chemically synthesized
cgtttggagtcccagacttccc

SEQ ID NO: 55406 - DNA, 22 bp, Artificial Sequence
  chemically synthesized
ggagtcccagacttcccgcaac

SEQ ID NO: 55407 - DNA, 22 bp, Artificial Sequence
  chemically synthesized
gagtcccagacttcccgcaaca

SEQ ID NO: 55408 - DNA, 22 bp, Artificial Sequence
  chemically synthesized
cccgcaacaactgagaactctg

SEQ ID NO: 55409 - DNA, 22 bp, Artificial Sequence
  chemically synthesized
ccgcaacaactgagaactctgg

SEQ ID NO: 55410 - DNA, 22 bp, Artificial Sequence
  chemically synthesized
agaactctggagggcctaccct

SEQ ID NO: 55411 - DNA, 22 bp, Artificial Sequence
  chemically synthesized
tggagggcctacccttcaccca

SEQ ID NO: 55412 - DNA, 22 bp, Artificial Sequence
  chemically synthesized
gagggcctacccttcacccact

SEQ ID NO: 55413 - DNA, 22 bp, Artificial Sequence
  chemically synthesized
cccttcacccacttccaccctt

SEQ ID NO: 55414 - DNA, 22 bp, Artificial Sequence
  chemically synthesized
cacccacttccacccttcttat

SEQ ID NO: 55415 - DNA, 22 bp, Artificial Sequence
  chemically synthesized
acccacttccacccttcttata

SEQ ID NO: 55416 - DNA, 22 bp, Artificial Sequence
  chemically synthesized
ccacccttcttatatctcttaa

SEQ ID NO: 55417 - DNA, 22 bp, Artificial Sequence
  chemically synthesized
cacccttcttatatctcttaag

SEQ ID NO: 55418 - DNA, 22 bp, Artificial Sequence
  chemically synthesized
cttatatctcttaaggagctgt

SEQ ID NO: 55419 - DNA, 22 bp, Artificial Sequence
  chemically synthesized
ttatatctcttaaggagctgtg

SEQ ID NO: 55420 - DNA, 22 bp, Artificial Sequence
  chemically synthesized
atatctcttaaggagctgtgtt

SEQ ID NO: 55421 - DNA, 22 bp, Artificial Sequence
  chemically synthesized
tatctcttaaggagctgtgttc

SEQ ID NO: 55422 - DNA, 22 bp, Artificial Sequence
  chemically synthesized
ttaaggagctgtgttcagatgg

SEQ ID NO: 55423 - DNA, 22 bp, Artificial Sequence
  chemically synthesized
aaggagctgtgttcagatggtt

SEQ ID NO: 55424 - DNA, 22 bp, Artificial Sequence
  chemically synthesized
aggagctgtgttcagatggtta

SEQ ID NO: 55425 - DNA, 22 bp, Artificial Sequence
  chemically synthesized
tgttcagatggttacatttcgc

SEQ ID NO: 55426 - DNA, 22 bp, Artificial Sequence
  chemically synthesized
agatggttacatttcgcttgct

SEQ ID NO: 55427 - DNA, 22 bp, Artificial Sequence
  chemically synthesized
catttcgcttgctgagcaagac

SEQ ID NO: 55428 - DNA, 22 bp, Artificial Sequence
  chemically synthesized
cgcttgctgagcaagactgcat

SEQ ID NO: 55429 - DNA, 22 bp, Artificial Sequence
  chemically synthesized
gcttgctgagcaagactgcatt

SEQ ID NO: 55430 - DNA, 22 bp, Artificial Sequence
  chemically synthesized
gctgagcaagactgcattttca

SEQ ID NO: 55431 - DNA, 22 bp, Artificial Sequence
  chemically synthesized
ctgagcaagactgcattttcat

SEQ ID NO: 55432 - DNA, 22 bp, Artificial Sequence
  chemically synthesized
agcaagactgcattttcattat

SEQ ID NO: 55433 - DNA, 22 bp, Artificial Sequence
  chemically synthesized
cattttcattatcctgggctaa

SEQ ID NO: 55434 - DNA, 22 bp, Artificial Sequence
  chemically synthesized
tcattatcctgggctaaaatca

SEQ ID NO: 55435 - DNA, 22 bp, Artificial Sequence
  chemically synthesized
cattatcctgggctaaaatcaa

SEQ ID NO: 55436 - DNA, 22 bp, Artificial Sequence
  chemically synthesized
attatcctgggctaaaatcaat

SEQ ID NO: 55437 - DNA, 22 bp, Artificial Sequence
  chemically synthesized
tcctgggctaaaatcaattggt

SEQ ID NO: 55438 - DNA, 22 bp, Artificial Sequence
  chemically synthesized
ggctaaaatcaattggtattta

SEQ ID NO: 55439 - DNA, 22 bp, Artificial Sequence
  chemically synthesized
aaatcaattggtatttaagtta

SEQ ID NO: 55440 - DNA, 22 bp, Artificial Sequence
  chemically synthesized
gtatttaagttagagcaaaaag

SEQ ID NO: 55441 - DNA, 22 bp, Artificial Sequence
  chemically synthesized
aagttagagcaaaaagggttct

SEQ ID NO: 55442 - DNA, 22 bp, Artificial Sequence
  chemically synthesized
agttagagcaaaaagggttcta

SEQ ID NO: 55443 - DNA, 22 bp, Artificial Sequence
  chemically synthesized
gagcaaaaagggttctaaccct

SEQ ID NO: 55444 - DNA, 22 bp, Artificial Sequence
  chemically synthesized
taaccctatttacagcagcaca

SEQ ID NO: 55445 - DNA, 22 bp, Artificial Sequence
  chemically synthesized
accctatttacagcagcacaca

SEQ ID NO: 55446 - DNA, 22 bp, Artificial Sequence
  chemically synthesized
tttacagcagcacacatacact

SEQ ID NO: 55447 - DNA, 22 bp, Artificial Sequence
  chemically synthesized
acagcagcacacatacacttac

SEQ ID NO: 55448 - DNA, 22 bp, Artificial Sequence
  chemically synthesized
cagcagcacacatacacttaca

SEQ ID NO: 55449 - DNA, 22 bp, Artificial Sequence
  chemically synthesized
acattagaattggctttaaggg

SEQ ID NO: 55450 - DNA, 22 bp, Artificial Sequence
  chemically synthesized
cattagaattggctttaaggga

SEQ ID NO: 55451 - DNA, 22 bp, Artificial Sequence
  chemically synthesized
gaattggctttaagggaaaaat

SEQ ID NO: 55452 - DNA, 22 bp, Artificial Sequence
  chemically synthesized
gctttaagggaaaaattcaatc

SEQ ID NO: 55453 - DNA, 22 bp, Artificial Sequence
  chemically synthesized
taagggaaaaattcaatcaatc

SEQ ID NO: 55454 - DNA, 22 bp, Artificial Sequence
  chemically synthesized
aagggaaaaattcaatcaatcg

SEQ ID NO: 55455 - DNA, 22 bp, Artificial Sequence
  chemically synthesized
agggaaaaattcaatcaatcga

SEQ ID NO: 55456 - DNA, 22 bp, Artificial Sequence
  chemically synthesized
aatcaatcgacaaatttccact

SEQ ID NO: 55457 - DNA, 22 bp, Artificial Sequence
  chemically synthesized
ccactgattaccttctatgagc

SEQ ID NO: 55458 - DNA, 22 bp, Artificial Sequence
  chemically synthesized
cactgattaccttctatgagcc

SEQ ID NO: 55459 - DNA, 22 bp, Artificial Sequence
  chemically synthesized
attaccttctatgagccaagac

SEQ ID NO: 55460 - DNA, 22 bp, Artificial Sequence
  chemically synthesized
ccttctatgagccaagactgcc

SEQ ID NO: 55461 - DNA, 22 bp, Artificial Sequence
  chemically synthesized
ctatgagccaagactgccatag

SEQ ID NO: 55462 - DNA, 22 bp, Artificial Sequence
  chemically synthesized
tatgagccaagactgccatagt

SEQ ID NO: 55463 - DNA, 22 bp, Artificial Sequence
  chemically synthesized
tgagccaagactgccatagtct

SEQ ID NO: 55464 - DNA, 22 bp, Artificial Sequence
  chemically synthesized
ccatagtctcagccttcatgca

SEQ ID NO: 55465 - DNA, 22 bp, Artificial Sequence
  chemically synthesized
agccttcatgcagcttataggc

SEQ ID NO: 55466 - DNA, 22 bp, Artificial Sequence
  chemically synthesized
catgcagcttataggctagcaa

SEQ ID NO: 55467 - DNA, 22 bp, Artificial Sequence
  chemically synthesized
atgcagcttataggctagcaaa

SEQ ID NO: 55468 - DNA, 22 bp, Artificial Sequence
  chemically synthesized
ataggctagcaaaaaagccaga

SEQ ID NO: 55469 - DNA, 22 bp, Artificial Sequence
  chemically synthesized
taggctagcaaaaaagccagac

SEQ ID NO: 55470 - DNA, 22 bp, Artificial Sequence
  chemically synthesized
gcaaaaaagccagacagtgcac

SEQ ID NO: 55471 - DNA, 22 bp, Artificial Sequence
  chemically synthesized
acaagtgtgttgagtgttgcaa

SEQ ID NO: 55472 - DNA, 22 bp, Artificial Sequence
  chemically synthesized
agtgttgcaagagtaagtttca

SEQ ID NO: 55473 - DNA, 22 bp, Artificial Sequence
  chemically synthesized
caagagtaagtttcaggggctc

SEQ ID NO: 55474 - DNA, 22 bp, Artificial Sequence
  chemically synthesized
caggggctctccatgacttacc

SEQ ID NO: 55475 - DNA, 22 bp, Artificial Sequence
  chemically synthesized
aggggctctccatgacttacct

SEQ ID NO: 55476 - DNA, 22 bp, Artificial Sequence
  chemically synthesized
tccatgacttacctggttgaga

SEQ ID NO: 55477 - DNA, 22 bp, Artificial Sequence
  chemically synthesized
catgacttacctggttgagaaa

SEQ ID NO: 55478 - DNA, 22 bp, Artificial Sequence
  chemically synthesized
acctggttgagaaaccctttaa

SEQ ID NO: 55479 - DNA, 22 bp, Artificial Sequence
  chemically synthesized
cctggttgagaaaccctttaac

SEQ ID NO: 55480 - DNA, 22 bp, Artificial Sequence
  chemically synthesized
gttgagaaaccctttaactttt

SEQ ID NO: 55481 - DNA, 22 bp, Artificial Sequence
  chemically synthesized
agaaaccctttaactttttttt

SEQ ID NO: 55482 - DNA, 22 bp, Artificial Sequence
  chemically synthesized
taactttttttttcctctgggt

SEQ ID NO: 55483 - DNA, 22 bp, Artificial Sequence
  chemically synthesized
aactttttttttcctctgggtg

SEQ ID NO: 55484 - DNA, 22 bp, Artificial Sequence
  chemically synthesized
actttttttttcctctgggtgt

SEQ ID NO: 55485 - DNA, 22 bp, Artificial Sequence
  chemically synthesized
tttttttcctctgggtgtaaag

SEQ ID NO: 55486 - DNA, 22 bp, Artificial Sequence
  chemically synthesized
ttttttcctctgggtgtaaagt

SEQ ID NO: 55487 - DNA, 22 bp, Artificial Sequence
  chemically synthesized
tttttcctctgggtgtaaagtg

SEQ ID NO: 55488 - DNA, 22 bp, Artificial Sequence
  chemically synthesized
ttttcctctgggtgtaaagtga

SEQ ID NO: 55489 - DNA, 22 bp, Artificial Sequence
  chemically synthesized
tttcctctgggtgtaaagtgaa

SEQ ID NO: 55490 - DNA, 22 bp, Artificial Sequence
  chemically synthesized
ttcctctgggtgtaaagtgaag

SEQ ID NO: 55491 - DNA, 22 bp, Artificial Sequence
  chemically synthesized
tcctctgggtgtaaagtgaaga

SEQ ID NO: 55492 - DNA, 22 bp, Artificial Sequence
  chemically synthesized
cctctgggtgtaaagtgaagag

SEQ ID NO: 55493 - DNA, 22 bp, Artificial Sequence
  chemically synthesized
ctctgggtgtaaagtgaagaga

SEQ ID NO: 55494 - DNA, 22 bp, Artificial Sequence
  chemically synthesized
tgggtgtaaagtgaagagatgg

SEQ ID NO: 55495 - DNA, 22 bp, Artificial Sequence
  chemically synthesized
ggtgtaaagtgaagagatggca

SEQ ID NO: 55496 - DNA, 22 bp, Artificial Sequence
  chemically synthesized
cattgtgtcattgtgaaaagat

SEQ ID NO: 55497 - DNA, 22 bp, Artificial Sequence
  chemically synthesized
tgtcattgtgaaaagatgctgg

SEQ ID NO: 55498 - DNA, 22 bp, Artificial Sequence
  chemically synthesized
tgaaaagatgctgggctggcgt

SEQ ID NO: 55499 - DNA, 22 bp, Artificial Sequence
  chemically synthesized
ggctggcgtgtctcctgaaggc

SEQ ID NO: 55500 - DNA, 22 bp, Artificial Sequence
  chemically synthesized
gcgtgtctcctgaaggccaccc

SEQ ID NO: 55501 - DNA, 22 bp, Artificial Sequence
  chemically synthesized
ctgaaggccacccatatcttta

SEQ ID NO: 55502 - DNA, 22 bp, Artificial Sequence
  chemically synthesized
aaggccacccatatctttaaac

SEQ ID NO: 55503 - DNA, 22 bp, Artificial Sequence
  chemically synthesized
taaactttattttcatgcattc

SEQ ID NO: 55504 - DNA, 22 bp, Artificial Sequence
  chemically synthesized
aaactttattttcatgcattcg

SEQ ID NO: 55505 - DNA, 22 bp, Artificial Sequence
  chemically synthesized
aactttattttcatgcattcgc

SEQ ID NO: 55506 - DNA, 22 bp, Artificial Sequence
  chemically synthesized
tattttcatgcattcgcacaaa

SEQ ID NO: 55507 - DNA, 22 bp, Artificial Sequence
  chemically synthesized
attttcatgcattcgcacaaat

SEQ ID NO: 55508 - DNA, 22 bp, Artificial Sequence
  chemically synthesized
ttttcatgcattcgcacaaata

SEQ ID NO: 55509 - DNA, 22 bp, Artificial Sequence
  chemically synthesized
tcatgcattcgcacaaatatag

SEQ ID NO: 55510 - DNA, 22 bp, Artificial Sequence
  chemically synthesized
catgcattcgcacaaatataga

SEQ ID NO: 55511 - DNA, 22 bp, Artificial Sequence
  chemically synthesized
atgcattcgcacaaatatagat

SEQ ID NO: 55512 - DNA, 22 bp, Artificial Sequence
  chemically synthesized
gcacaaatatagatgtgttcca

SEQ ID NO: 55513 - DNA, 22 bp, Artificial Sequence
  chemically synthesized
catagatgaggcagatagcaga

SEQ ID NO: 55514 - DNA, 22 bp, Artificial Sequence
  chemically synthesized
ctgcctacagcaaggctagttt

SEQ ID NO: 55515 - DNA, 22 bp, Artificial Sequence
  chemically synthesized
tgcctacagcaaggctagtttg

SEQ ID NO: 55516 - DNA, 22 bp, Artificial Sequence
  chemically synthesized
cctacagcaaggctagtttgga

SEQ ID NO: 55517 - DNA, 22 bp, Artificial Sequence
  chemically synthesized
cagcaaggctagtttggagagg

SEQ ID NO: 55518 - DNA, 22 bp, Artificial Sequence
  chemically synthesized
gtttggagagggttttgctgtc

SEQ ID NO: 55519 - DNA, 22 bp, Artificial Sequence
  chemically synthesized
ggagagggttttgctgtcaggg

SEQ ID NO: 55520 - DNA, 22 bp, Artificial Sequence
  chemically synthesized
gagagggttttgctgtcagggt

SEQ ID NO: 55521 - DNA, 22 bp, Artificial Sequence
  chemically synthesized
tgctgtcagggttggacccaca

SEQ ID NO: 55522 - DNA, 22 bp, Artificial Sequence
  chemically synthesized
gctgtcagggttggacccacac

SEQ ID NO: 55523 - DNA, 22 bp, Artificial Sequence
  chemically synthesized
ctgtcagggttggacccacaca

SEQ ID NO: 55524 - DNA, 22 bp, Artificial Sequence
  chemically synthesized
tcagggttggacccacacacct

SEQ ID NO: 55525 - DNA, 22 bp, Artificial Sequence
  chemically synthesized
gacccacacacctcttcataga

SEQ ID NO: 55526 - DNA, 22 bp, Artificial Sequence
  chemically synthesized
ttcatagatgctttttcttttt

SEQ ID NO: 55527 - DNA, 22 bp, Artificial Sequence
  chemically synthesized
catagatgctttttcttttttt

SEQ ID NO: 55528 - DNA, 22 bp, Artificial Sequence
  chemically synthesized
atagatgctttttctttttttt

SEQ ID NO: 55529 - DNA, 22 bp, Artificial Sequence
  chemically synthesized
tttcttttttttcccagagttt

SEQ ID NO: 55530 - DNA, 22 bp, Artificial Sequence
  chemically synthesized
ttcttttttttcccagagtttg

SEQ ID NO: 55531 - DNA, 22 bp, Artificial Sequence
  chemically synthesized
tcttttttttcccagagtttga

SEQ ID NO: 55532 - DNA, 22 bp, Artificial Sequence
  chemically synthesized
cttttttttcccagagtttgaa

SEQ ID NO: 55533 - DNA, 22 bp, Artificial Sequence
  chemically synthesized
ttttttttcccagagtttgaaa

SEQ ID NO: 55534 - DNA, 22 bp, Artificial Sequence
  chemically synthesized
ttttttcccagagtttgaaagg

SEQ ID NO: 55535 - DNA, 22 bp, Artificial Sequence
  chemically synthesized
tttttcccagagtttgaaaggg

SEQ ID NO: 55536 - DNA, 22 bp, Artificial Sequence
  chemically synthesized
ttttcccagagtttgaaaggga

SEQ ID NO: 55537 - DNA, 22 bp, Artificial Sequence
  chemically synthesized
tttcccagagtttgaaagggaa

SEQ ID NO: 55538 - DNA, 22 bp, Artificial Sequence
  chemically synthesized
ttcccagagtttgaaagggaaa

SEQ ID NO: 55539 - DNA, 22 bp, Artificial Sequence
  chemically synthesized
tcccagagtttgaaagggaaat

SEQ ID NO: 55540 - DNA, 22 bp, Artificial Sequence
  chemically synthesized
cccagagtttgaaagggaaatg

SEQ ID NO: 55541 - DNA, 22 bp, Artificial Sequence
  chemically synthesized
ccagagtttgaaagggaaatgg

SEQ ID NO: 55542 - DNA, 22 bp, Artificial Sequence
  chemically synthesized
gaaagggaaatggagtctcaag

SEQ ID NO: 55543 - DNA, 22 bp, Artificial Sequence
  chemically synthesized
aaagggaaatggagtctcaagt

SEQ ID NO: 55544 - DNA, 22 bp, Artificial Sequence
  chemically synthesized
aagttcagggaggttacagtgt

SEQ ID NO: 55545 - DNA, 22 bp, Artificial Sequence
  chemically synthesized
agggaggttacagtgtagaccc

SEQ ID NO: 55546 - DNA, 22 bp, Artificial Sequence
  chemically synthesized
cagtgtagacccacaaatcagc

SEQ ID NO: 55547 - DNA, 22 bp, Artificial Sequence
  chemically synthesized
agtacagctaagggtggagaag

SEQ ID NO: 55548 - DNA, 22 bp, Artificial Sequence
  chemically synthesized
agggtggagaagtctatgcaat

SEQ ID NO: 55549 - DNA, 22 bp, Artificial Sequence
  chemically synthesized
tgcaatatccagcactcttctg

SEQ ID NO: 55550 - DNA, 22 bp, Artificial Sequence
  chemically synthesized
ttctgattaattagaagtcttt

SEQ ID NO: 55551 - DNA, 22 bp, Artificial Sequence
  chemically synthesized
ctgattaattagaagtctttaa

SEQ ID NO: 55552 - DNA, 22 bp, Artificial Sequence
  chemically synthesized
tgattaattagaagtctttaaa

SEQ ID NO: 55553 - DNA, 22 bp, Artificial Sequence
  chemically synthesized
attaattagaagtctttaaaat

SEQ ID NO: 55554 - DNA, 22 bp, Artificial Sequence
  chemically synthesized
attagaagtctttaaaattcac

SEQ ID NO: 55555 - DNA, 22 bp, Artificial Sequence
  chemically synthesized
gaagtctttaaaattcacagaa

SEQ ID NO: 55556 - DNA, 22 bp, Artificial Sequence
  chemically synthesized
taaaattcacagaaaccatatt

SEQ ID NO: 55557 - DNA, 22 bp, Artificial Sequence
  chemically synthesized
aaaattcacagaaaccatattg

SEQ ID NO: 55558 - DNA, 22 bp, Artificial Sequence
  chemically synthesized
aaattcacagaaaccatattgt

SEQ ID NO: 55559 - DNA, 22 bp, Artificial Sequence
  chemically synthesized
acagaaaccatattgtcttccc

SEQ ID NO: 55560 - DNA, 22 bp, Artificial Sequence
  chemically synthesized
tcttccctaaatgattcatatg

SEQ ID NO: 55561 - DNA, 22 bp, Artificial Sequence
  chemically synthesized
ccctaaatgattcatatgtcaa

SEQ ID NO: 55562 - DNA, 22 bp, Artificial Sequence
  chemically synthesized
cctaaatgattcatatgtcaag

SEQ ID NO: 55563 - DNA, 22 bp, Artificial Sequence
  chemically synthesized
aatgattcatatgtcaagacac

SEQ ID NO: 55564 - DNA, 22 bp, Artificial Sequence
  chemically synthesized
atatgtcaagacacagtaaaga

SEQ ID NO: 55565 - DNA, 22 bp, Artificial Sequence
  chemically synthesized
tatgtggaacatcatacacaaa

SEQ ID NO: 55566 - DNA, 22 bp, Artificial Sequence
  chemically synthesized
ttaccttagtaaactgccaatt

SEQ ID NO: 55567 - DNA, 22 bp, Artificial Sequence
  chemically synthesized
accttagtaaactgccaatttt

SEQ ID NO: 55568 - DNA, 22 bp, Artificial Sequence
  chemically synthesized
ccttagtaaactgccaattttc

SEQ ID NO: 55569 - DNA, 22 bp, Artificial Sequence
  chemically synthesized
agtaaactgccaattttctgaa

SEQ ID NO: 55570 - DNA, 22 bp, Artificial Sequence
  chemically synthesized
gtaaactgccaattttctgaaa

SEQ ID NO: 55571 - DNA, 22 bp, Artificial Sequence
  chemically synthesized
ccaattttctgaaatgctcttt

SEQ ID NO: 55572 - DNA, 22 bp, Artificial Sequence
  chemically synthesized
tctgaaatgctctttaaatcct

SEQ ID NO: 55573 - DNA, 22 bp, Artificial Sequence
  chemically synthesized
ctgaaatgctctttaaatcctg

SEQ ID NO: 55574 - DNA, 22 bp, Artificial Sequence
  chemically synthesized
tgaaatgctctttaaatcctgc

SEQ ID NO: 55575 - DNA, 22 bp, Artificial Sequence
  chemically synthesized
aaatgctctttaaatcctgcta

SEQ ID NO: 55576 - DNA, 22 bp, Artificial Sequence
  chemically synthesized
tttaaatcctgctaatggtggc

SEQ ID NO: 55577 - DNA, 22 bp, Artificial Sequence
  chemically synthesized
taaatcctgctaatggtggcat

SEQ ID NO: 55578 - DNA, 22 bp, Artificial Sequence
  chemically synthesized
aaatcctgctaatggtggcatt

SEQ ID NO: 55579 - DNA, 22 bp, Artificial Sequence
  chemically synthesized
aatcctgctaatggtggcattt

SEQ ID NO: 55580 - DNA, 22 bp, Artificial Sequence
  chemically synthesized
ctaatggtggcatttgtgtctt

SEQ ID NO: 55581 - DNA, 22 bp, Artificial Sequence
  chemically synthesized
atggtggcatttgtgtctttgt

SEQ ID NO: 55582 - DNA, 22 bp, Artificial Sequence
  chemically synthesized
gtgtctttgtcacctacagtac

SEQ ID NO: 55583 - DNA, 22 bp, Artificial Sequence
  chemically synthesized
tgtctttgtcacctacagtaca

SEQ ID NO: 55584 - DNA, 22 bp, Artificial Sequence
  chemically synthesized
tgtcacctacagtacatttctg

SEQ ID NO: 55585 - DNA, 22 bp, Artificial Sequence
  chemically synthesized
gtcacctacagtacatttctgg

SEQ ID NO: 55586 - DNA, 22 bp, Artificial Sequence
  chemically synthesized
tcacctacagtacatttctgga

SEQ ID NO: 55587 - DNA, 22 bp, Artificial Sequence
  chemically synthesized
cagtacatttctggatttggga

SEQ ID NO: 55588 - DNA, 22 bp, Artificial Sequence
  chemically synthesized
ctggatttgggaatgagtgttc

SEQ ID NO: 55589 - DNA, 22 bp, Artificial Sequence
  chemically synthesized
tggatttgggaatgagtgttct

SEQ ID NO: 55590 - DNA, 22 bp, Artificial Sequence
  chemically synthesized
gatttgggaatgagtgttcttc

SEQ ID NO: 55591 - DNA, 22 bp, Artificial Sequence
  chemically synthesized
gggaatgagtgttcttcagagg

SEQ ID NO: 55592 - DNA, 22 bp, Artificial Sequence
  chemically synthesized
ggaatgagtgttcttcagagga

SEQ ID NO: 55593 - DNA, 22 bp, Artificial Sequence
  chemically synthesized
ttcagaggatcctcgctgccca

SEQ ID NO: 55594 - DNA, 22 bp, Artificial Sequence
  chemically synthesized
cagaggatcctcgctgcccagg

SEQ ID NO: 55595 - DNA, 22 bp, Artificial Sequence
  chemically synthesized
agaggatcctcgctgcccaggt

SEQ ID NO: 55596 - DNA, 22 bp, Artificial Sequence
  chemically synthesized
gctgcccaggttccctgccaga

SEQ ID NO: 55597 - DNA, 22 bp, Artificial Sequence
  chemically synthesized
cccaggttccctgccagaagga

SEQ ID NO: 55598 - DNA, 20 bp, Artificial Sequence
  chemically synthesized
ctccttttgccacaccctca

SEQ ID NO: 55599 - DNA, 20 bp, Artificial Sequence
  chemically synthesized
acaccctcacagacataacc

SEQ ID NO: 55600 - DNA, 20 bp, Artificial Sequence
  chemically synthesized
ttgcatctttcaatccaatc

SEQ ID NO: 55601 - DNA, 20 bp, Artificial Sequence
  chemically synthesized
tttcaatccaatcaagttga

SEQ ID NO: 55602 - DNA, 20 bp, Artificial Sequence
  chemically synthesized
ttgacagtattaaccatcac

SEQ ID NO: 55603 - DNA, 20 bp, Artificial Sequence
  chemically synthesized
tcatacataatcttcaaata

SEQ ID NO: 55604 - DNA, 20 bp, Artificial Sequence
  chemically synthesized
cttcaaataaagacaataat

SEQ ID NO: 55605 - DNA, 20 bp, Artificial Sequence
  chemically synthesized
ttcaaataaagacaataata

SEQ ID NO: 55606 - DNA, 20 bp, Artificial Sequence
  chemically synthesized
tacaactatcctcatacaac

SEQ ID NO: 55607 - DNA, 20 bp, Artificial Sequence
  chemically synthesized
cgcaccaatccccaaaccaa

SEQ ID NO: 55608 - DNA, 20 bp, Artificial Sequence
  chemically synthesized
caaaccaaaagttattacat

SEQ ID NO: 55609 - DNA, 20 bp, Artificial Sequence
  chemically synthesized
aaaccaaaagttattacata

SEQ ID NO: 55610 - DNA, 20 bp, Artificial Sequence
  chemically synthesized
aatgcttaaatgctgatgtg

SEQ ID NO: 55611 - DNA, 20 bp, Artificial Sequence
  chemically synthesized
gatgtgaagtccataaatct

SEQ ID NO: 55612 - DNA, 20 bp, Artificial Sequence
  chemically synthesized
atgtgaagtccataaatcta

SEQ ID NO: 55613 - DNA, 20 bp, Artificial Sequence
  chemically synthesized
aaatctaaggtcacatgata

SEQ ID NO: 55614 - DNA, 20 bp, Artificial Sequence
  chemically synthesized
aatctaaggtcacatgataa

SEQ ID NO: 55615 - DNA, 20 bp, Artificial Sequence
  chemically synthesized
cacatgataaaggaaaaata

SEQ ID NO: 55616 - DNA, 20 bp, Artificial Sequence
  chemically synthesized
acatgataaaggaaaaataa

SEQ ID NO: 55617 - DNA, 20 bp, Artificial Sequence
  chemically synthesized
aaaataaaggaaataaaata

SEQ ID NO: 55618 - DNA, 20 bp, Artificial Sequence
  chemically synthesized
ataaaataaagatattttct

SEQ ID NO: 55619 - DNA, 20 bp, Artificial Sequence
  chemically synthesized
taaagatattttcttagcac

SEQ ID NO: 55620 - DNA, 20 bp, Artificial Sequence
  chemically synthesized
cacaagtgtacacatgcatt

SEQ ID NO: 55621 - DNA, 20 bp, Artificial Sequence
  chemically synthesized
agtgtacacatgcatttaga

SEQ ID NO: 55622 - DNA, 20 bp, Artificial Sequence
  chemically synthesized
gtacacatgcatttagaaag

SEQ ID NO: 55623 - DNA, 20 bp, Artificial Sequence
  chemically synthesized
atgcatttagaaagtggata

SEQ ID NO: 55624 - DNA, 20 bp, Artificial Sequence
  chemically synthesized
agaaagtggatatagtgctg

SEQ ID NO: 55625 - DNA, 20 bp, Artificial Sequence
  chemically synthesized
gtgctgcagctgtccacttt

SEQ ID NO: 55626 - DNA, 20 bp, Artificial Sequence
  chemically synthesized
tgctgcagctgtccactttc

SEQ ID NO: 55627 - DNA, 20 bp, Artificial Sequence
  chemically synthesized
tgcagctgtccactttcggg

SEQ ID NO: 55628 - DNA, 20 bp, Artificial Sequence
  chemically synthesized
ggtggtgcctgcatatcgtg

SEQ ID NO: 55629 - DNA, 20 bp, Artificial Sequence
  chemically synthesized
gtgcagaaccatctatgaac

SEQ ID NO: 55630 - DNA, 20 bp, Artificial Sequence
  chemically synthesized
accatctatgaaccagtcct

SEQ ID NO: 55631 - DNA, 20 bp, Artificial Sequence
  chemically synthesized
cttcctctgtcaactgatca

SEQ ID NO: 55632 - DNA, 20 bp, Artificial Sequence
  chemically synthesized
ttcctctgtcaactgatcat

SEQ ID NO: 55633 - DNA, 20 bp, Artificial Sequence
  chemically synthesized
tcctctgtcaactgatcata

SEQ ID NO: 55634 - DNA, 20 bp, Artificial Sequence
  chemically synthesized
gatcatagggaactccccat

SEQ ID NO: 55635 - DNA, 20 bp, Artificial Sequence
  chemically synthesized
atcatagggaactccccatg

SEQ ID NO: 55636 - DNA, 20 bp, Artificial Sequence
  chemically synthesized
ggaactccccatgaggccat

SEQ ID NO: 55637 - DNA, 20 bp, Artificial Sequence
  chemically synthesized
tccccatgaggccattggtg

SEQ ID NO: 55638 - DNA, 20 bp, Artificial Sequence
  chemically synthesized
ccccatgaggccattggtgc

SEQ ID NO: 55639 - DNA, 20 bp, Artificial Sequence
  chemically synthesized
atgaggccattggtgcaggc

SEQ ID NO: 55640 - DNA, 20 bp, Artificial Sequence
  chemically synthesized
tgaggccattggtgcaggct

SEQ ID NO: 55641 - DNA, 20 bp, Artificial Sequence
  chemically synthesized
gaggccattggtgcaggctg

SEQ ID NO: 55642 - DNA, 20 bp, Artificial Sequence
  chemically synthesized
aggccattggtgcaggctgg

SEQ ID NO: 55643 - DNA, 20 bp, Artificial Sequence
  chemically synthesized
gccattggtgcaggctgggg

SEQ ID NO: 55644 - DNA, 20 bp, Artificial Sequence
  chemically synthesized
ccattggtgcaggctggggg

SEQ ID NO: 55645 - DNA, 20 bp, Artificial Sequence
  chemically synthesized
cattggtgcaggctggggga

SEQ ID NO: 55646 - DNA, 20 bp, Artificial Sequence
  chemically synthesized
tggtgcaggctgggggaggg

SEQ ID NO: 55647 - DNA, 20 bp, Artificial Sequence
  chemically synthesized
ggtgcaggctgggggaggga

SEQ ID NO: 55648 - DNA, 20 bp, Artificial Sequence
  chemically synthesized
gcaggctgggggagggaagg

SEQ ID NO: 55649 - DNA, 20 bp, Artificial Sequence
  chemically synthesized
caggctgggggagggaaggc

SEQ ID NO: 55650 - DNA, 20 bp, Artificial Sequence
  chemically synthesized
aggctgggggagggaaggca

SEQ ID NO: 55651 - DNA, 20 bp, Artificial Sequence
  chemically synthesized
ctgggggagggaaggcaggg

SEQ ID NO: 55652 - DNA, 20 bp, Artificial Sequence
  chemically synthesized
gagggaaggcagggtggcat

SEQ ID NO: 55653 - DNA, 20 bp, Artificial Sequence
  chemically synthesized
ggaaggcagggtggcatgag

SEQ ID NO: 55654 - DNA, 20 bp, Artificial Sequence
  chemically synthesized
aaggcagggtggcatgagtg

SEQ ID NO: 55655 - DNA, 20 bp, Artificial Sequence
  chemically synthesized
ggtggcatgagtggagaaca

SEQ ID NO: 55656 - DNA, 20 bp, Artificial Sequence
  chemically synthesized
gtggcatgagtggagaacat

SEQ ID NO: 55657 - DNA, 20 bp, Artificial Sequence
  chemically synthesized
agtggagaacatgggcattt

SEQ ID NO: 55658 - DNA, 20 bp, Artificial Sequence
  chemically synthesized
atgtaacttacttgtgcctt

SEQ ID NO: 55659 - DNA, 20 bp, Artificial Sequence
  chemically synthesized
tgtaacttacttgtgccttc

SEQ ID NO: 55660 - DNA, 20 bp, Artificial Sequence
  chemically synthesized
tgtgccttcaggacctgctc

SEQ ID NO: 55661 - DNA, 20 bp, Artificial Sequence
  chemically synthesized
cgctgtgctgacccacttca

SEQ ID NO: 55662 - DNA, 20 bp, Artificial Sequence
  chemically synthesized
gtgctgacccacttcatggc

SEQ ID NO: 55663 - DNA, 20 bp, Artificial Sequence
  chemically synthesized
tgacccacttcatggctaga

SEQ ID NO: 55664 - DNA, 20 bp, Artificial Sequence
  chemically synthesized
gacccacttcatggctagat

SEQ ID NO: 55665 - DNA, 20 bp, Artificial Sequence
  chemically synthesized
cacttcatggctagatgggt

SEQ ID NO: 55666 - DNA, 20 bp, Artificial Sequence
  chemically synthesized
tcatggctagatgggtcaga

SEQ ID NO: 55667 - DNA, 20 bp, Artificial Sequence
  chemically synthesized
tagatgggtcagaaagcaac

SEQ ID NO: 55668 - DNA, 20 bp, Artificial Sequence
  chemically synthesized
agaaagcaaccagttcatga

SEQ ID NO: 55669 - DNA, 20 bp, Artificial Sequence
  chemically synthesized
gaaagcaaccagttcatgat

SEQ ID NO: 55670 - DNA, 20 bp, Artificial Sequence
  chemically synthesized
agcaaccagttcatgatagg

SEQ ID NO: 55671 - DNA, 20 bp, Artificial Sequence
  chemically synthesized
gcaaccagttcatgataggc

SEQ ID NO: 55672 - DNA, 20 bp, Artificial Sequence
  chemically synthesized
cagttcatgataggcaggtt

SEQ ID NO: 55673 - DNA, 20 bp, Artificial Sequence
  chemically synthesized
agttcatgataggcaggttc

SEQ ID NO: 55674 - DNA, 20 bp, Artificial Sequence
  chemically synthesized
tcatgataggcaggttcagg

SEQ ID NO: 55675 - DNA, 20 bp, Artificial Sequence
  chemically synthesized
ataggcaggttcaggtagca

SEQ ID NO: 55676 - DNA, 20 bp, Artificial Sequence
  chemically synthesized
catggtgactttatgaccca

SEQ ID NO: 55677 - DNA, 20 bp, Artificial Sequence
  chemically synthesized
atgacccacagtcaaacgtt

SEQ ID NO: 55678 - DNA, 20 bp, Artificial Sequence
  chemically synthesized
caaacgttcagttaccacca

SEQ ID NO: 55679 - DNA, 20 bp, Artificial Sequence
  chemically synthesized
ttaccaccaaagcccaataa

SEQ ID NO: 55680 - DNA, 20 bp, Artificial Sequence
  chemically synthesized
aaagcccaataacagaccaa

SEQ ID NO: 55681 - DNA, 20 bp, Artificial Sequence
  chemically synthesized
gaccaatagctgtctctcaa

SEQ ID NO: 55682 - DNA, 20 bp, Artificial Sequence
  chemically synthesized
accaatagctgtctctcaaa

SEQ ID NO: 55683 - DNA, 20 bp, Artificial Sequence
  chemically synthesized
caatagctgtctctcaaaag

SEQ ID NO: 55684 - DNA, 20 bp, Artificial Sequence
  chemically synthesized
atagctgtctctcaaaagga

SEQ ID NO: 55685 - DNA, 20 bp, Artificial Sequence
  chemically synthesized
gctgtctctcaaaaggagag

SEQ ID NO: 55686 - DNA, 20 bp, Artificial Sequence
  chemically synthesized
aaaaggagagtagttatctg

SEQ ID NO: 55687 - DNA, 20 bp, Artificial Sequence
  chemically synthesized
aggagagtagttatctgcag

SEQ ID NO: 55688 - DNA, 20 bp, Artificial Sequence
  chemically synthesized
agagtagttatctgcagaag

SEQ ID NO: 55689 - DNA, 20 bp, Artificial Sequence
  chemically synthesized
gtagttatctgcagaagtgg

SEQ ID NO: 55690 - DNA, 20 bp, Artificial Sequence
  chemically synthesized
tagttatctgcagaagtggc

SEQ ID NO: 55691 - DNA, 20 bp, Artificial Sequence
  chemically synthesized
agttatctgcagaagtggca

SEQ ID NO: 55692 - DNA, 20 bp, Artificial Sequence
  chemically synthesized
agggccttgctccaaaatcc

SEQ ID NO: 55693 - DNA, 20 bp, Artificial Sequence
  chemically synthesized
ggccttgctccaaaatccta

SEQ ID NO: 55694 - DNA, 20 bp, Artificial Sequence
  chemically synthesized
gccttgctccaaaatcctag

SEQ ID NO: 55695 - DNA, 20 bp, Artificial Sequence
  chemically synthesized
tctccactgtgattcaccta

SEQ ID NO: 55696 - DNA, 20 bp, Artificial Sequence
  chemically synthesized
ctccactgtgattcacctat

SEQ ID NO: 55697 - DNA, 20 bp, Artificial Sequence
  chemically synthesized
tccactgtgattcacctatg

SEQ ID NO: 55698 - DNA, 20 bp, Artificial Sequence
  chemically synthesized
ccactgtgattcacctatgg

SEQ ID NO: 55699 - DNA, 20 bp, Artificial Sequence
  chemically synthesized
tcacctatgggggcctgcca

SEQ ID NO: 55700 - DNA, 20 bp, Artificial Sequence
  chemically synthesized
cacctatgggggcctgccaa

SEQ ID NO: 55701 - DNA, 20 bp, Artificial Sequence
  chemically synthesized
ggcctgccaaaggctccaaa

SEQ ID NO: 55702 - DNA, 20 bp, Artificial Sequence
  chemically synthesized
ctatctgccactgacacctc

SEQ ID NO: 55703 - DNA, 20 bp, Artificial Sequence
  chemically synthesized
actgacacctcaagcaccat

SEQ ID NO: 55704 - DNA, 20 bp, Artificial Sequence
  chemically synthesized
ctcaagcaccattggatctg

SEQ ID NO: 55705 - DNA, 20 bp, Artificial Sequence
  chemically synthesized
tcaagcaccattggatctgc

SEQ ID NO: 55706 - DNA, 20 bp, Artificial Sequence
  chemically synthesized
caagcaccattggatctgcg

SEQ ID NO: 55707 - DNA, 20 bp, Artificial Sequence
  chemically synthesized
attggatctgcggggtcatg

SEQ ID NO: 55708 - DNA, 20 bp, Artificial Sequence
  chemically synthesized
gcggggtcatgtggcccaaa

SEQ ID NO: 55709 - DNA, 20 bp, Artificial Sequence
  chemically synthesized
gggtcatgtggcccaaatgg

SEQ ID NO: 55710 - DNA, 20 bp, Artificial Sequence
  chemically synthesized
gtcatgtggcccaaatggca

SEQ ID NO: 55711 - DNA, 20 bp, Artificial Sequence
  chemically synthesized
atgtggcccaaatggcagag

SEQ ID NO: 55712 - DNA, 20 bp, Artificial Sequence
  chemically synthesized
aaatggcagagcagctttca

SEQ ID NO: 55713 - DNA, 20 bp, Artificial Sequence
  chemically synthesized
tggcagagcagctttcacag

SEQ ID NO: 55714 - DNA, 20 bp, Artificial Sequence
  chemically synthesized
gagcagctttcacagcagcc

SEQ ID NO: 55715 - DNA, 20 bp, Artificial Sequence
  chemically synthesized
acagcagcctggacctgttt

SEQ ID NO: 55716 - DNA, 20 bp, Artificial Sequence
  chemically synthesized
agcagcctggacctgtttca

SEQ ID NO: 55717 - DNA, 20 bp, Artificial Sequence
  chemically synthesized
ttcagagccttcttttgttc

SEQ ID NO: 55718 - DNA, 20 bp, Artificial Sequence
  chemically synthesized
ttctagactgcacttaaatc

SEQ ID NO: 55719 - DNA, 20 bp, Artificial Sequence
  chemically synthesized
tagactgcacttaaatctgg

SEQ ID NO: 55720 - DNA, 20 bp, Artificial Sequence
  chemically synthesized
acttaaatctggcagccttt

SEQ ID NO: 55721 - DNA, 20 bp, Artificial Sequence
  chemically synthesized
cttaaatctggcagcctttc

SEQ ID NO: 55722 - DNA, 20 bp, Artificial Sequence
  chemically synthesized
ctttcaggtcactcgataaa

SEQ ID NO: 55723 - DNA, 20 bp, Artificial Sequence
  chemically synthesized
tttcaggtcactcgataaat

SEQ ID NO: 55724 - DNA, 20 bp, Artificial Sequence
  chemically synthesized
aggtcactcgataaatgggc

SEQ ID NO: 55725 - DNA, 20 bp, Artificial Sequence
  chemically synthesized
gtcactcgataaatgggcca

SEQ ID NO: 55726 - DNA, 20 bp, Artificial Sequence
  chemically synthesized
ccagagtaacacacccaaac

SEQ ID NO: 55727 - DNA, 20 bp, Artificial Sequence
  chemically synthesized
cagagtaacacacccaaacg

SEQ ID NO: 55728 - DNA, 20 bp, Artificial Sequence
  chemically synthesized
tgttgcctccaaaatccaaa

SEQ ID NO: 55729 - DNA, 20 bp, Artificial Sequence
  chemically synthesized
gttgcctccaaaatccaaat

SEQ ID NO: 55730 - DNA, 20 bp, Artificial Sequence
  chemically synthesized
caaaatccaaataggcccac

SEQ ID NO: 55731 - DNA, 20 bp, Artificial Sequence
  chemically synthesized
aaaatccaaataggcccacc

SEQ ID NO: 55732 - DNA, 20 bp, Artificial Sequence
  chemically synthesized
caggcattgtgcctctttct

SEQ ID NO: 55733 - DNA, 20 bp, Artificial Sequence
  chemically synthesized
tgtgcctctttcttggttgt

SEQ ID NO: 55734 - DNA, 20 bp, Artificial Sequence
  chemically synthesized
tgcctctttcttggttgtaa

SEQ ID NO: 55735 - DNA, 20 bp, Artificial Sequence
  chemically synthesized
gcctctttcttggttgtaag

SEQ ID NO: 55736 - DNA, 20 bp, Artificial Sequence
  chemically synthesized
cctctttcttggttgtaaga

SEQ ID NO: 55737 - DNA, 20 bp, Artificial Sequence
  chemically synthesized
ctctttcttggttgtaagag

SEQ ID NO: 55738 - DNA, 20 bp, Artificial Sequence
  chemically synthesized
gttgtaagaggggccaaacg

SEQ ID NO: 55739 - DNA, 20 bp, Artificial Sequence
  chemically synthesized
taagaggggccaaacgcagc

SEQ ID NO: 55740 - DNA, 20 bp, Artificial Sequence
  chemically synthesized
cagcaagttatgcttcacct

SEQ ID NO: 55741 - DNA, 20 bp, Artificial Sequence
  chemically synthesized
caagttatgcttcaccttag

SEQ ID NO: 55742 - DNA, 20 bp, Artificial Sequence
  chemically synthesized
aagttatgcttcaccttaga

SEQ ID NO: 55743 - DNA, 20 bp, Artificial Sequence
  chemically synthesized
ccttagaaggaatatctcca

SEQ ID NO: 55744 - DNA, 20 bp, Artificial Sequence
  chemically synthesized
cttagaaggaatatctccat

SEQ ID NO: 55745 - DNA, 20 bp, Artificial Sequence
  chemically synthesized
ctccataggtctcatgccac

SEQ ID NO: 55746 - DNA, 20 bp, Artificial Sequence
  chemically synthesized
gtctcatgccactggaaccc

SEQ ID NO: 55747 - DNA, 20 bp, Artificial Sequence
  chemically synthesized
ggaaccctagaaattttacc

SEQ ID NO: 55748 - DNA, 20 bp, Artificial Sequence
  chemically synthesized
gaaccctagaaattttaccg

SEQ ID NO: 55749 - DNA, 20 bp, Artificial Sequence
  chemically synthesized
ccctagaaattttaccgagg

SEQ ID NO: 55750 - DNA, 20 bp, Artificial Sequence
  chemically synthesized
agaaattttaccgaggtaga

SEQ ID NO: 55751 - DNA, 20 bp, Artificial Sequence
  chemically synthesized
ggtagaaagtccctaaattt

SEQ ID NO: 55752 - DNA, 20 bp, Artificial Sequence
  chemically synthesized
gaaagtccctaaattttagc

SEQ ID NO: 55753 - DNA, 20 bp, Artificial Sequence
  chemically synthesized
tggatttatttcccatcctc

SEQ ID NO: 55754 - DNA, 20 bp, Artificial Sequence
  chemically synthesized
catacaaatgtctcaccaat

SEQ ID NO: 55755 - DNA, 20 bp, Artificial Sequence
  chemically synthesized
aaatgtctcaccaataagtt

SEQ ID NO: 55756 - DNA, 20 bp, Artificial Sequence
  chemically synthesized
tcataatgtcatgaatgtaa

SEQ ID NO: 55757 - DNA, 20 bp, Artificial Sequence
  chemically synthesized
atgtcatgaatgtaatggac

SEQ ID NO: 55758 - DNA, 20 bp, Artificial Sequence
  chemically synthesized
tggaccagtgttatatctcg

SEQ ID NO: 55759 - DNA, 20 bp, Artificial Sequence
  chemically synthesized
accagtgttatatctcgtgg

SEQ ID NO: 55760 - DNA, 20 bp, Artificial Sequence
  chemically synthesized
ttatatctcgtggaagtgaa

SEQ ID NO: 55761 - DNA, 20 bp, Artificial Sequence
  chemically synthesized
atctcgtggaagtgaaaagc

SEQ ID NO: 55762 - DNA, 20 bp, Artificial Sequence
  chemically synthesized
cgtggaagtgaaaagcgagc

SEQ ID NO: 55763 - DNA, 20 bp, Artificial Sequence
  chemically synthesized
gtggaagtgaaaagcgagca

SEQ ID NO: 55764 - DNA, 20 bp, Artificial Sequence
  chemically synthesized
cgagcaaggtctctccaaat

SEQ ID NO: 55765 - DNA, 20 bp, Artificial Sequence
  chemically synthesized
ccaaataagattatgacaca

SEQ ID NO: 55766 - DNA, 20 bp, Artificial Sequence
  chemically synthesized
ataagattatgacacaaagc

SEQ ID NO: 55767 - DNA, 20 bp, Artificial Sequence
  chemically synthesized
aagattatgacacaaagctg

SEQ ID NO: 55768 - DNA, 20 bp, Artificial Sequence
  chemically synthesized
gattatgacacaaagctgga

SEQ ID NO: 55769 - DNA, 20 bp, Artificial Sequence
  chemically synthesized
tggagagttgatacacccct

SEQ ID NO: 55770 - DNA, 20 bp, Artificial Sequence
  chemically synthesized
ggagagttgatacacccctg

SEQ ID NO: 55771 - DNA, 20 bp, Artificial Sequence
  chemically synthesized
gagttgatacacccctgagg

SEQ ID NO: 55772 - DNA, 20 bp, Artificial Sequence
  chemically synthesized
agttgatacacccctgaggt

SEQ ID NO: 55773 - DNA, 20 bp, Artificial Sequence
  chemically synthesized
gttgatacacccctgaggta

SEQ ID NO: 55774 - DNA, 20 bp, Artificial Sequence
  chemically synthesized
gatacacccctgaggtaggg

SEQ ID NO: 55775 - DNA, 20 bp, Artificial Sequence
  chemically synthesized
acccctgaggtagggtggta

SEQ ID NO: 55776 - DNA, 20 bp, Artificial Sequence
  chemically synthesized
cccctgaggtagggtggtaa

SEQ ID NO: 55777 - DNA, 20 bp, Artificial Sequence
  chemically synthesized
gggtggtaaaggtataatgc

SEQ ID NO: 55778 - DNA, 20 bp, Artificial Sequence
  chemically synthesized
aggtataatgctggccttgt

SEQ ID NO: 55779 - DNA, 20 bp, Artificial Sequence
  chemically synthesized
aatgctggccttgtcagctg

SEQ ID NO: 55780 - DNA, 20 bp, Artificial Sequence
  chemically synthesized
atgctggccttgtcagctga

SEQ ID NO: 55781 - DNA, 20 bp, Artificial Sequence
  chemically synthesized
agctgaaggcaaattgcttc

SEQ ID NO: 55782 - DNA, 20 bp, Artificial Sequence
  chemically synthesized
tgaaggcaaattgcttctgg

SEQ ID NO: 55783 - DNA, 20 bp, Artificial Sequence
  chemically synthesized
gaaggcaaattgcttctggt

SEQ ID NO: 55784 - DNA, 20 bp, Artificial Sequence
  chemically synthesized
attgcttctggtgggtctta

SEQ ID NO: 55785 - DNA, 20 bp, Artificial Sequence
  chemically synthesized
cttctggtgggtcttatgga

SEQ ID NO: 55786 - DNA, 20 bp, Artificial Sequence
  chemically synthesized
ttctggtgggtcttatggac

SEQ ID NO: 55787 - DNA, 20 bp, Artificial Sequence
  chemically synthesized
gtgggtcttatggacaggaa

SEQ ID NO: 55788 - DNA, 20 bp, Artificial Sequence
  chemically synthesized
gggtcttatggacaggaatg

SEQ ID NO: 55789 - DNA, 20 bp, Artificial Sequence
  chemically synthesized
tatggacaggaatggagaaa

SEQ ID NO: 55790 - DNA, 20 bp, Artificial Sequence
  chemically synthesized
tggagaaaaagccacttgcc

SEQ ID NO: 55791 - DNA, 20 bp, Artificial Sequence
  chemically synthesized
aaagccacttgccaagccaa

SEQ ID NO: 55792 - DNA, 20 bp, Artificial Sequence
  chemically synthesized
ccaagccaatggctgcatac

SEQ ID NO: 55793 - DNA, 20 bp, Artificial Sequence
  chemically synthesized
caagccaatggctgcatacc

SEQ ID NO: 55794 - DNA, 20 bp, Artificial Sequence
  chemically synthesized
aatggctgcataccaggcac

SEQ ID NO: 55795 - DNA, 20 bp, Artificial Sequence
  chemically synthesized
atggctgcataccaggcacc

SEQ ID NO: 55796 - DNA, 20 bp, Artificial Sequence
  chemically synthesized
ggctgcataccaggcaccag

SEQ ID NO: 55797 - DNA, 20 bp, Artificial Sequence
  chemically synthesized
ggagatgtgttaatttgctc

SEQ ID NO: 55798 - DNA, 20 bp, Artificial Sequence
  chemically synthesized
tcaagcaacaaaaccacaac

SEQ ID NO: 55799 - DNA, 20 bp, Artificial Sequence
  chemically synthesized
agcaacaaaaccacaactgg

SEQ ID NO: 55800 - DNA, 20 bp, Artificial Sequence
  chemically synthesized
caacaaaaccacaactggta

SEQ ID NO: 55801 - DNA, 20 bp, Artificial Sequence
  chemically synthesized
caaaaccacaactggtagag

SEQ ID NO: 55802 - DNA, 20 bp, Artificial Sequence
  chemically synthesized
actggtagagcagctgcaat

SEQ ID NO: 55803 - DNA, 20 bp, Artificial Sequence
  chemically synthesized
tggtagagcagctgcaattg

SEQ ID NO: 55804 - DNA, 20 bp, Artificial Sequence
  chemically synthesized
ctgcaattggagtcaccact

SEQ ID NO: 55805 - DNA, 20 bp, Artificial Sequence
  chemically synthesized
attggagtcaccacttggtt

SEQ ID NO: 55806 - DNA, 20 bp, Artificial Sequence
  chemically synthesized
ataatccaccatcattttcc

SEQ ID NO: 55807 - DNA, 20 bp, Artificial Sequence
  chemically synthesized
agatccatctgtcctctgca

SEQ ID NO: 55808 - DNA, 20 bp, Artificial Sequence
  chemically synthesized
gatccatctgtcctctgcac

SEQ ID NO: 55809 - DNA, 20 bp, Artificial Sequence
  chemically synthesized
tgtcctctgcacaggtcaaa

SEQ ID NO: 55810 - DNA, 20 bp, Artificial Sequence
  chemically synthesized
gtcctctgcacaggtcaaat

SEQ ID NO: 55811 - DNA, 20 bp, Artificial Sequence
  chemically synthesized
cctctgcacaggtcaaatgg

SEQ ID NO: 55812 - DNA, 20 bp, Artificial Sequence
  chemically synthesized
tctgcacaggtcaaatggga

SEQ ID NO: 55813 - DNA, 20 bp, Artificial Sequence
  chemically synthesized
ggtcaaatgggagagttgaa

SEQ ID NO: 55814 - DNA, 20 bp, Artificial Sequence
  chemically synthesized
gtcaaatgggagagttgaac

SEQ ID NO: 55815 - DNA, 20 bp, Artificial Sequence
  chemically synthesized
tcaaatgggagagttgaaca

SEQ ID NO: 55816 - DNA, 20 bp, Artificial Sequence
  chemically synthesized
gggagagttgaacagggatg

SEQ ID NO: 55817 - DNA, 20 bp, Artificial Sequence
  chemically synthesized
agagttgaacagggatgtgg

SEQ ID NO: 55818 - DNA, 20 bp, Artificial Sequence
  chemically synthesized
gagttgaacagggatgtggt

SEQ ID NO: 55819 - DNA, 20 bp, Artificial Sequence
  chemically synthesized
tcaccacccctgcgtctttc

SEQ ID NO: 55820 - DNA, 20 bp, Artificial Sequence
  chemically synthesized
tgcgtctttcaagtccttga

SEQ ID NO: 55821 - DNA, 20 bp, Artificial Sequence
  chemically synthesized
gatggtgacactaatcactt

SEQ ID NO: 55822 - DNA, 20 bp, Artificial Sequence
  chemically synthesized
actaatcacttcagtccctc

SEQ ID NO: 55823 - DNA, 20 bp, Artificial Sequence
  chemically synthesized
ctaatcacttcagtccctcc

SEQ ID NO: 55824 - DNA, 20 bp, Artificial Sequence
  chemically synthesized
taatcacttcagtccctcca

SEQ ID NO: 55825 - DNA, 20 bp, Artificial Sequence
  chemically synthesized
cacttcagtccctccaggga

SEQ ID NO: 55826 - DNA, 20 bp, Artificial Sequence
  chemically synthesized
acttcagtccctccagggat

SEQ ID NO: 55827 - DNA, 20 bp, Artificial Sequence
  chemically synthesized
ttttgatttttttatttttc

SEQ ID NO: 55828 - DNA, 20 bp, Artificial Sequence
  chemically synthesized
tttgatttttttatttttct

SEQ ID NO: 55829 - DNA, 20 bp, Artificial Sequence
  chemically synthesized
gatttttttatttttctagg

SEQ ID NO: 55830 - DNA, 20 bp, Artificial Sequence
  chemically synthesized
tttttttatttttctaggta

SEQ ID NO: 55831 - DNA, 20 bp, Artificial Sequence
  chemically synthesized
tttatttttctaggtagaga

SEQ ID NO: 55832 - DNA, 20 bp, Artificial Sequence
  chemically synthesized
ctaggtagagacagctctaa

SEQ ID NO: 55833 - DNA, 20 bp, Artificial Sequence
  chemically synthesized
cagctctaatggcttctgtt

SEQ ID NO: 55834 - DNA, 20 bp, Artificial Sequence
  chemically synthesized
tttggcctttcccaccataa

SEQ ID NO: 55835 - DNA, 20 bp, Artificial Sequence
  chemically synthesized
cataatagccctcatcctac

SEQ ID NO: 55836 - DNA, 20 bp, Artificial Sequence
  chemically synthesized
atagccctcatcctaccagt

SEQ ID NO: 55837 - DNA, 20 bp, Artificial Sequence
  chemically synthesized
tagccctcatcctaccagtc

SEQ ID NO: 55838 - DNA, 20 bp, Artificial Sequence
  chemically synthesized
agccctcatcctaccagtca

SEQ ID NO: 55839 - DNA, 20 bp, Artificial Sequence
  chemically synthesized
ccctcatcctaccagtcagg

SEQ ID NO: 55840 - DNA, 20 bp, Artificial Sequence
  chemically synthesized
taccagtcagggagccaatg

SEQ ID NO: 55841 - DNA, 20 bp, Artificial Sequence
  chemically synthesized
agccaatgtggcatttctgc

SEQ ID NO: 55842 - DNA, 20 bp, Artificial Sequence
  chemically synthesized
tggcatttctgccagctaat

SEQ ID NO: 55843 - DNA, 20 bp, Artificial Sequence
  chemically synthesized
tctatacaaattatgcattt

SEQ ID NO: 55844 - DNA, 20 bp, Artificial Sequence
  chemically synthesized
caaattatgcattttggcac

SEQ ID NO: 55845 - DNA, 20 bp, Artificial Sequence
  chemically synthesized
aaattatgcattttggcact

SEQ ID NO: 55846 - DNA, 20 bp, Artificial Sequence
  chemically synthesized
tttggcactgggaaaatgac

SEQ ID NO: 55847 - DNA, 20 bp, Artificial Sequence
  chemically synthesized
tggcactgggaaaatgacca

SEQ ID NO: 55848 - DNA, 20 bp, Artificial Sequence
  chemically synthesized
ggcactgggaaaatgaccag

SEQ ID NO: 55849 - DNA, 20 bp, Artificial Sequence
  chemically synthesized
tgggaaaatgaccagaggat

SEQ ID NO: 55850 - DNA, 20 bp, Artificial Sequence
  chemically synthesized
aaatgaccagaggataagtc

SEQ ID NO: 55851 - DNA, 20 bp, Artificial Sequence
  chemically synthesized
aatgaccagaggataagtcc

SEQ ID NO: 55852 - DNA, 20 bp, Artificial Sequence
  chemically synthesized
atgaccagaggataagtcca

SEQ ID NO: 55853 - DNA, 20 bp, Artificial Sequence
  chemically synthesized
ggataagtccagggacccac

SEQ ID NO: 55854 - DNA, 20 bp, Artificial Sequence
  chemically synthesized
ggacccactggaaccactgt

SEQ ID NO: 55855 - DNA, 20 bp, Artificial Sequence
  chemically synthesized
ccactggaaccactgtaagt

SEQ ID NO: 55856 - DNA, 20 bp, Artificial Sequence
  chemically synthesized
aaccactgtaagtcagaaat

SEQ ID NO: 55857 - DNA, 20 bp, Artificial Sequence
  chemically synthesized
attaattacctaacctccat

SEQ ID NO: 55858 - DNA, 20 bp, Artificial Sequence
  chemically synthesized
ccataagcccctactttaac

SEQ ID NO: 55859 - DNA, 20 bp, Artificial Sequence
  chemically synthesized
cataagcccctactttaact

SEQ ID NO: 55860 - DNA, 20 bp, Artificial Sequence
  chemically synthesized
ataagcccctactttaactg

SEQ ID NO: 55861 - DNA, 20 bp, Artificial Sequence
  chemically synthesized
ggggaaccacaataacgttt

SEQ ID NO: 55862 - DNA, 20 bp, Artificial Sequence
  chemically synthesized
gggaaccacaataacgtttt

SEQ ID NO: 55863 - DNA, 20 bp, Artificial Sequence
  chemically synthesized
caataacgttttgggtaccc

SEQ ID NO: 55864 - DNA, 20 bp, Artificial Sequence
  chemically synthesized
gggtaccctggaatcaacgt

SEQ ID NO: 55865 - DNA, 20 bp, Artificial Sequence
  chemically synthesized
ccctggaatcaacgtcagct

SEQ ID NO: 55866 - DNA, 20 bp, Artificial Sequence
  chemically synthesized
ctggaatcaacgtcagctca

SEQ ID NO: 55867 - DNA, 20 bp, Artificial Sequence
  chemically synthesized
aatcaacgtcagctcagagc

SEQ ID NO: 55868 - DNA, 20 bp, Artificial Sequence
  chemically synthesized
gtcagctcagagccagtgtc

SEQ ID NO: 55869 - DNA, 20 bp, Artificial Sequence
  chemically synthesized
tctcattacttccctttctc

SEQ ID NO: 55870 - DNA, 20 bp, Artificial Sequence
  chemically synthesized
ttccctttctccagtacaca

SEQ ID NO: 55871 - DNA, 20 bp, Artificial Sequence
  chemically synthesized
tccagtacacacagttaccc

SEQ ID NO: 55872 - DNA, 20 bp, Artificial Sequence
  chemically synthesized
acacacagttaccctggtaa

SEQ ID NO: 55873 - DNA, 20 bp, Artificial Sequence
  chemically synthesized
cacacagttaccctggtaaa

SEQ ID NO: 55874 - DNA, 20 bp, Artificial Sequence
  chemically synthesized
cagttaccctggtaaaaggc

SEQ ID NO: 55875 - DNA, 20 bp, Artificial Sequence
  chemically synthesized
gttaccctggtaaaaggcca

SEQ ID NO: 55876 - DNA, 20 bp, Artificial Sequence
  chemically synthesized
ttaccctggtaaaaggccag

SEQ ID NO: 55877 - DNA, 20 bp, Artificial Sequence
  chemically synthesized
taaaaggccagaggtctcct

SEQ ID NO: 55878 - DNA, 20 bp, Artificial Sequence
  chemically synthesized
aaaaggccagaggtctcctt

SEQ ID NO: 55879 - DNA, 20 bp, Artificial Sequence
  chemically synthesized
aaaggccagaggtctcctta

SEQ ID NO: 55880 - DNA, 20 bp, Artificial Sequence
  chemically synthesized
ggccagaggtctccttaggg

SEQ ID NO: 55881 - DNA, 20 bp, Artificial Sequence
  chemically synthesized
gccagaggtctccttaggga

SEQ ID NO: 55882 - DNA, 20 bp, Artificial Sequence
  chemically synthesized
gaggtctccttagggaagga

SEQ ID NO: 55883 - DNA, 20 bp, Artificial Sequence
  chemically synthesized
aggtctccttagggaaggat

SEQ ID NO: 55884 - DNA, 20 bp, Artificial Sequence
  chemically synthesized
gtctccttagggaaggatgg

SEQ ID NO: 55885 - DNA, 20 bp, Artificial Sequence
  chemically synthesized
ccttagggaaggatgggaga

SEQ ID NO: 55886 - DNA, 20 bp, Artificial Sequence
  chemically synthesized
ttagggaaggatgggagaaa

SEQ ID NO: 55887 - DNA, 20 bp, Artificial Sequence
  chemically synthesized
aaggatgggagaaagagtaa

SEQ ID NO: 55888 - DNA, 20 bp, Artificial Sequence
  chemically synthesized
gggagaaagagtaacagcat

SEQ ID NO: 55889 - DNA, 20 bp, Artificial Sequence
  chemically synthesized
agagtaacagcataagttgt

SEQ ID NO: 55890 - DNA, 20 bp, Artificial Sequence
  chemically synthesized
gtaacagcataagttgtcag

SEQ ID NO: 55891 - DNA, 20 bp, Artificial Sequence
  chemically synthesized
agcataagttgtcagtagcc

SEQ ID NO: 55892 - DNA, 20 bp, Artificial Sequence
  chemically synthesized
ataagttgtcagtagcctag

SEQ ID NO: 55893 - DNA, 20 bp, Artificial Sequence
  chemically synthesized
gcctagtggtgtccttcctc

SEQ ID NO: 55894 - DNA, 20 bp, Artificial Sequence
  chemically synthesized
cctagtggtgtccttcctca

SEQ ID NO: 55895 - DNA, 20 bp, Artificial Sequence
  chemically synthesized
ctagtggtgtccttcctcaa

SEQ ID NO: 55896 - DNA, 20 bp, Artificial Sequence
  chemically synthesized
tagtggtgtccttcctcaag

SEQ ID NO: 55897 - DNA, 20 bp, Artificial Sequence
  chemically synthesized
tgtccttcctcaaggggatc

SEQ ID NO: 55898 - DNA, 20 bp, Artificial Sequence
  chemically synthesized
gatccagcctccccttcatt

SEQ ID NO: 55899 - DNA, 20 bp, Artificial Sequence
  chemically synthesized
ccagcctccccttcattcag

SEQ ID NO: 55900 - DNA, 20 bp, Artificial Sequence
  chemically synthesized
cagcctccccttcattcagt

SEQ ID NO: 55901 - DNA, 20 bp, Artificial Sequence
  chemically synthesized
ccccttcattcagtgggttc

SEQ ID NO: 55902 - DNA, 20 bp, Artificial Sequence
  chemically synthesized
agtgggttctggaactgtaa

SEQ ID NO: 55903 - DNA, 20 bp, Artificial Sequence
  chemically synthesized
gtgggttctggaactgtaac

SEQ ID NO: 55904 - DNA, 20 bp, Artificial Sequence
  chemically synthesized
tctggaactgtaacaggttc

SEQ ID NO: 55905 - DNA, 20 bp, Artificial Sequence
  chemically synthesized
aactgtaacaggttcgagtc

SEQ ID NO: 55906 - DNA, 20 bp, Artificial Sequence
  chemically synthesized
ttcgagtctggaaattgatt

SEQ ID NO: 55907 - DNA, 20 bp, Artificial Sequence
  chemically synthesized
tcgagtctggaaattgattg

SEQ ID NO: 55908 - DNA, 20 bp, Artificial Sequence
  chemically synthesized
cgagtctggaaattgattga

SEQ ID NO: 55909 - DNA, 20 bp, Artificial Sequence
  chemically synthesized
gattctctgtttttataatt

SEQ ID NO: 55910 - DNA, 20 bp, Artificial Sequence
  chemically synthesized
tctgtttttataattcagat

SEQ ID NO: 55911 - DNA, 20 bp, Artificial Sequence
  chemically synthesized
ttataattcagattagtctt

SEQ ID NO: 55912 - DNA, 20 bp, Artificial Sequence
  chemically synthesized
agtctttagtccattctacc

SEQ ID NO: 55913 - DNA, 20 bp, Artificial Sequence
  chemically synthesized
ctttagtccattctacctgg

SEQ ID NO: 55914 - DNA, 20 bp, Artificial Sequence
  chemically synthesized
gttttttgtttatataaatc

SEQ ID NO: 55915 - DNA, 20 bp, Artificial Sequence
  chemically synthesized
ttttgtttatataaatcaag

SEQ ID NO: 55916 - DNA, 20 bp, Artificial Sequence
  chemically synthesized
tttgtttatataaatcaagt

SEQ ID NO: 55917 - DNA, 20 bp, Artificial Sequence
  chemically synthesized
atataaatcaagtaggaata

SEQ ID NO: 55918 - DNA, 20 bp, Artificial Sequence
  chemically synthesized
taaatcaagtaggaatacag

SEQ ID NO: 55919 - DNA, 20 bp, Artificial Sequence
  chemically synthesized
aaatcaagtaggaatacagt

SEQ ID NO: 55920 - DNA, 20 bp, Artificial Sequence
  chemically synthesized
tttcccatcaatttcacttc

SEQ ID NO: 55921 - DNA, 20 bp, Artificial Sequence
  chemically synthesized
ttcccatcaatttcacttct

SEQ ID NO: 55922 - DNA, 20 bp, Artificial Sequence
  chemically synthesized
ctaggaacaccatgattaat

SEQ ID NO: 55923 - DNA, 20 bp, Artificial Sequence
  chemically synthesized
catgattaattagccaatgc

SEQ ID NO: 55924 - DNA, 20 bp, Artificial Sequence
  chemically synthesized
tgattaattagccaatgcca

SEQ ID NO: 55925 - DNA, 20 bp, Artificial Sequence
  chemically synthesized
ccaatgccagagctctacat

SEQ ID NO: 55926 - DNA, 20 bp, Artificial Sequence
  chemically synthesized
tgccagagctctacatgagt

SEQ ID NO: 55927 - DNA, 20 bp, Artificial Sequence
  chemically synthesized
catgagtcagactattctga

SEQ ID NO: 55928 - DNA, 20 bp, Artificial Sequence
  chemically synthesized
tttgcctctgctgtctatta

SEQ ID NO: 55929 - DNA, 20 bp, Artificial Sequence
  chemically synthesized
gcctctgctgtctattatgg

SEQ ID NO: 55930 - DNA, 20 bp, Artificial Sequence
  chemically synthesized
tatgcccaccttgcctttga

SEQ ID NO: 55931 - DNA, 20 bp, Artificial Sequence
  chemically synthesized
ccaccttgcctttgatggtt

SEQ ID NO: 55932 - DNA, 20 bp, Artificial Sequence
  chemically synthesized
gatggttcagtgccaacact

SEQ ID NO: 55933 - DNA, 20 bp, Artificial Sequence
  chemically synthesized
acacttggcccctgccacct

SEQ ID NO: 55934 - DNA, 20 bp, Artificial Sequence
  chemically synthesized
cacttggcccctgccacctc

SEQ ID NO: 55935 - DNA, 20 bp, Artificial Sequence
  chemically synthesized
cccattgtatttaaattttg

SEQ ID NO: 55936 - DNA, 20 bp, Artificial Sequence
  chemically synthesized
tgtatttaaattttgtagtt

SEQ ID NO: 55937 - DNA, 20 bp, Artificial Sequence
  chemically synthesized
attttgtagttgagtgactg

SEQ ID NO: 55938 - DNA, 20 bp, Artificial Sequence
  chemically synthesized
gtgactgtggttcctactgt

SEQ ID NO: 55939 - DNA, 20 bp, Artificial Sequence
  chemically synthesized
ctactgttagatctgacata

SEQ ID NO: 55940 - DNA, 20 bp, Artificial Sequence
  chemically synthesized
actgttagatctgacataca

SEQ ID NO: 55941 - DNA, 20 bp, Artificial Sequence
  chemically synthesized
gttagatctgacatacagag

SEQ ID NO: 55942 - DNA, 20 bp, Artificial Sequence
  chemically synthesized
tagatctgacatacagagaa

SEQ ID NO: 55943 - DNA, 20 bp, Artificial Sequence
  chemically synthesized
catacagagaagagcaatta

SEQ ID NO: 55944 - DNA, 20 bp, Artificial Sequence
  chemically synthesized
atacagagaagagcaattac

SEQ ID NO: 55945 - DNA, 20 bp, Artificial Sequence
  chemically synthesized
ttacgggctcttcaaaaata

SEQ ID NO: 55946 - DNA, 20 bp, Artificial Sequence
  chemically synthesized
tacgggctcttcaaaaatac

SEQ ID NO: 55947 - DNA, 20 bp, Artificial Sequence
  chemically synthesized
tctcacaaatctatttcaca

SEQ ID NO: 55948 - DNA, 20 bp, Artificial Sequence
  chemically synthesized
aaatctatttcacaaagctt

SEQ ID NO: 55949 - DNA, 20 bp, Artificial Sequence
  chemically synthesized
tatttcacaaagcttcggcc

SEQ ID NO: 55950 - DNA, 20 bp, Artificial Sequence
  chemically synthesized
atttcacaaagcttcggcca

SEQ ID NO: 55951 - DNA, 20 bp, Artificial Sequence
  chemically synthesized
tttcacaaagcttcggccaa

SEQ ID NO: 55952 - DNA, 20 bp, Artificial Sequence
  chemically synthesized
tcggccaagggtgtatcttc

SEQ ID NO: 55953 - DNA, 20 bp, Artificial Sequence
  chemically synthesized
gtgtatcttctggaccctcc

SEQ ID NO: 55954 - DNA, 20 bp, Artificial Sequence
  chemically synthesized
atcttctggaccctcccagc

SEQ ID NO: 55955 - DNA, 20 bp, Artificial Sequence
  chemically synthesized
tcttctggaccctcccagct

SEQ ID NO: 55956 - DNA, 20 bp, Artificial Sequence
  chemically synthesized
tggaccctcccagctgggat

SEQ ID NO: 55957 - DNA, 20 bp, Artificial Sequence
  chemically synthesized
accctcccagctgggatgag

SEQ ID NO: 55958 - DNA, 20 bp, Artificial Sequence
  chemically synthesized
ccctcccagctgggatgagt

SEQ ID NO: 55959 - DNA, 20 bp, Artificial Sequence
  chemically synthesized
agctgggatgagtaggtcta

SEQ ID NO: 55960 - DNA, 20 bp, Artificial Sequence
  chemically synthesized
tccaccatcctaatctccct

SEQ ID NO: 55961 - DNA, 20 bp, Artificial Sequence
  chemically synthesized
tcctaatctccctaagcctt

SEQ ID NO: 55962 - DNA, 20 bp, Artificial Sequence
  chemically synthesized
cacttcctctacattaaacc

SEQ ID NO: 55963 - DNA, 20 bp, Artificial Sequence
  chemically synthesized
acttcctctacattaaacca

SEQ ID NO: 55964 - DNA, 20 bp, Artificial Sequence
  chemically synthesized
acattaaaccaaggcatttc

SEQ ID NO: 55965 - DNA, 20 bp, Artificial Sequence
  chemically synthesized
catttccagctcactaacat

SEQ ID NO: 55966 - DNA, 20 bp, Artificial Sequence
  chemically synthesized
ccatcttttaatccatattt

SEQ ID NO: 55967 - DNA, 20 bp, Artificial Sequence
  chemically synthesized
aatccatatttcagctaacc

SEQ ID NO: 55968 - DNA, 20 bp, Artificial Sequence
  chemically synthesized
aacttttttttttttttttt

SEQ ID NO: 55969 - DNA, 20 bp, Artificial Sequence
  chemically synthesized
tttttttttttttttggaaa

SEQ ID NO: 55970 - DNA, 20 bp, Artificial Sequence
  chemically synthesized
tttttttttttttggaaatg

SEQ ID NO: 55971 - DNA, 20 bp, Artificial Sequence
  chemically synthesized
atggagtcttgctctgttac

SEQ ID NO: 55972 - DNA, 20 bp, Artificial Sequence
  chemically synthesized
tggagtcttgctctgttacc

SEQ ID NO: 55973 - DNA, 20 bp, Artificial Sequence
  chemically synthesized
gtcttgctctgttaccaggc

SEQ ID NO: 55974 - DNA, 20 bp, Artificial Sequence
  chemically synthesized
tctgttaccaggctggaatg

SEQ ID NO: 55975 - DNA, 20 bp, Artificial Sequence
  chemically synthesized
gttaccaggctggaatgcag

SEQ ID NO: 55976 - DNA, 20 bp, Artificial Sequence
  chemically synthesized
ttaccaggctggaatgcagt

SEQ ID NO: 55977 - DNA, 20 bp, Artificial Sequence
  chemically synthesized
taccaggctggaatgcagtg

SEQ ID NO: 55978 - DNA, 20 bp, Artificial Sequence
  chemically synthesized
ggaatgcagtggggcgatct

SEQ ID NO: 55979 - DNA, 20 bp, Artificial Sequence
  chemically synthesized
tcactgcaatctctgcctca

SEQ ID NO: 55980 - DNA, 20 bp, Artificial Sequence
  chemically synthesized
cactgcaatctctgcctcac

SEQ ID NO: 55981 - DNA, 20 bp, Artificial Sequence
  chemically synthesized
aatctctgcctcacaggttc

SEQ ID NO: 55982 - DNA, 20 bp, Artificial Sequence
  chemically synthesized
ctctgcctcacaggttcaag

SEQ ID NO: 55983 - DNA, 20 bp, Artificial Sequence
  chemically synthesized
ttcaagcagttctcttgcct

SEQ ID NO: 55984 - DNA, 20 bp, Artificial Sequence
  chemically synthesized
ttctcttgcctcagcctccc

SEQ ID NO: 55985 - DNA, 20 bp, Artificial Sequence
  chemically synthesized
tcttgcctcagcctcccaag

SEQ ID NO: 55986 - DNA, 20 bp, Artificial Sequence
  chemically synthesized
cctcagcctcccaagtagat

SEQ ID NO: 55987 - DNA, 20 bp, Artificial Sequence
  chemically synthesized
ctcccaagtagatgagatta

SEQ ID NO: 55988 - DNA, 20 bp, Artificial Sequence
  chemically synthesized
cagttacgcatcaccatgcc

SEQ ID NO: 55989 - DNA, 20 bp, Artificial Sequence
  chemically synthesized
ccagctaatttttgtatttt

SEQ ID NO: 55990 - DNA, 20 bp, Artificial Sequence
  chemically synthesized
gctaatttttgtatttttag

SEQ ID NO: 55991 - DNA, 20 bp, Artificial Sequence
  chemically synthesized
taatttttgtatttttagca

SEQ ID NO: 55992 - DNA, 20 bp, Artificial Sequence
  chemically synthesized
ttttgtatttttagcagaga

SEQ ID NO: 55993 - DNA, 20 bp, Artificial Sequence
  chemically synthesized
tttgtatttttagcagagat

SEQ ID NO: 55994 - DNA, 20 bp, Artificial Sequence
  chemically synthesized
ttgtatttttagcagagatg

SEQ ID NO: 55995 - DNA, 20 bp, Artificial Sequence
  chemically synthesized
gagatggggtttcaccattt

SEQ ID NO: 55996 - DNA, 20 bp, Artificial Sequence
  chemically synthesized
tggggtttcaccattttagc

SEQ ID NO: 55997 - DNA, 20 bp, Artificial Sequence
  chemically synthesized
tctgcccgcccccgcctccc

SEQ ID NO: 55998 - DNA, 20 bp, Artificial Sequence
  chemically synthesized
ctgcccgcccccgcctccca

SEQ ID NO: 55999 - DNA, 20 bp, Artificial Sequence
  chemically synthesized
gcccccgcctcccaaggtgc

SEQ ID NO: 56000 - DNA, 20 bp, Artificial Sequence
  chemically synthesized
cccccgcctcccaaggtgct

SEQ ID NO: 56001 - DNA, 20 bp, Artificial Sequence
  chemically synthesized
ctcccaaggtgctgggatta

SEQ ID NO: 56002 - DNA, 20 bp, Artificial Sequence
  chemically synthesized
tcccaaggtgctgggattac

SEQ ID NO: 56003 - DNA, 20 bp, Artificial Sequence
  chemically synthesized
ggtgctgggattacaggcgt

SEQ ID NO: 56004 - DNA, 20 bp, Artificial Sequence
  chemically synthesized
caggcgtgagccactgctcc

SEQ ID NO: 56005 - DNA, 20 bp, Artificial Sequence
  chemically synthesized
gccactgctcccggccctat

SEQ ID NO: 56006 - DNA, 20 bp, Artificial Sequence
  chemically synthesized
gccctatcagaaccttttct

SEQ ID NO: 56007 - DNA, 20 bp, Artificial Sequence
  chemically synthesized
agaaccttttctaagtcccc

SEQ ID NO: 56008 - DNA, 20 bp, Artificial Sequence
  chemically synthesized
ccgagctgcaacattaaatg

SEQ ID NO: 56009 - DNA, 20 bp, Artificial Sequence
  chemically synthesized
ttaaatgcagaatccctact

SEQ ID NO: 56010 - DNA, 20 bp, Artificial Sequence
  chemically synthesized
aatgcagaatccctacttag

SEQ ID NO: 56011 - DNA, 20 bp, Artificial Sequence
  chemically synthesized
atgcagaatccctacttagt

SEQ ID NO: 56012 - DNA, 20 bp, Artificial Sequence
  chemically synthesized
tgcagaatccctacttagta

SEQ ID NO: 56013 - DNA, 20 bp, Artificial Sequence
  chemically synthesized
tagggccaaaccaataaatt

SEQ ID NO: 56014 - DNA, 20 bp, Artificial Sequence
  chemically synthesized
ccattcccatgcctgttctc

SEQ ID NO: 56015 - DNA, 20 bp, Artificial Sequence
  chemically synthesized
agatttctgccaatataaat

SEQ ID NO: 56016 - DNA, 20 bp, Artificial Sequence
  chemically synthesized
ttctgccaatataaattaga

SEQ ID NO: 56017 - DNA, 20 bp, Artificial Sequence
  chemically synthesized
caatataaattagaaagctt

SEQ ID NO: 56018 - DNA, 20 bp, Artificial Sequence
  chemically synthesized
tataaattagaaagcttaag

SEQ ID NO: 56019 - DNA, 20 bp, Artificial Sequence
  chemically synthesized
gaaagcttaagcagttcttt

SEQ ID NO: 56020 - DNA, 20 bp, Artificial Sequence
  chemically synthesized
aagcttaagcagttctttta

SEQ ID NO: 56021 - DNA, 20 bp, Artificial Sequence
  chemically synthesized
gagtataatgcacctcctca

SEQ ID NO: 56022 - DNA, 20 bp, Artificial Sequence
  chemically synthesized
agtataatgcacctcctcat

SEQ ID NO: 56023 - DNA, 20 bp, Artificial Sequence
  chemically synthesized
cacactctgaacctcacctc

SEQ ID NO: 56024 - DNA, 20 bp, Artificial Sequence
  chemically synthesized
acactctgaacctcacctct

SEQ ID NO: 56025 - DNA, 20 bp, Artificial Sequence
  chemically synthesized
cactctgaacctcacctctg

SEQ ID NO: 56026 - DNA, 20 bp, Artificial Sequence
  chemically synthesized
acctcacctctggggcccgc

SEQ ID NO: 56027 - DNA, 20 bp, Artificial Sequence
  chemically synthesized
cctcacctctggggcccgca

SEQ ID NO: 56028 - DNA, 20 bp, Artificial Sequence
  chemically synthesized
tctggggcccgcaaggaatt

SEQ ID NO: 56029 - DNA, 20 bp, Artificial Sequence
  chemically synthesized
ggcccgcaaggaatttagcc

SEQ ID NO: 56030 - DNA, 20 bp, Artificial Sequence
  chemically synthesized
caaggaatttagcctagtta

SEQ ID NO: 56031 - DNA, 20 bp, Artificial Sequence
  chemically synthesized
aaggaatttagcctagttat

SEQ ID NO: 56032 - DNA, 20 bp, Artificial Sequence
  chemically synthesized
atttagcctagttataggtc

SEQ ID NO: 56033 - DNA, 20 bp, Artificial Sequence
  chemically synthesized
tagcctagttataggtctag

SEQ ID NO: 56034 - DNA, 20 bp, Artificial Sequence
  chemically synthesized
gttataggtctagaagcatt

SEQ ID NO: 56035 - DNA, 20 bp, Artificial Sequence
  chemically synthesized
ttataggtctagaagcattc

SEQ ID NO: 56036 - DNA, 20 bp, Artificial Sequence
  chemically synthesized
tataggtctagaagcattca

SEQ ID NO: 56037 - DNA, 20 bp, Artificial Sequence
  chemically synthesized
ataggtctagaagcattcag

SEQ ID NO: 56038 - DNA, 20 bp, Artificial Sequence
  chemically synthesized
ctagaagcattcaggggcat

SEQ ID NO: 56039 - DNA, 20 bp, Artificial Sequence
  chemically synthesized
tagaagcattcaggggcatt

SEQ ID NO: 56040 - DNA, 20 bp, Artificial Sequence
  chemically synthesized
agaagcattcaggggcatta

SEQ ID NO: 56041 - DNA, 20 bp, Artificial Sequence
  chemically synthesized
gaagcattcaggggcattag

SEQ ID NO: 56042 - DNA, 20 bp, Artificial Sequence
  chemically synthesized
gggcattaggggtgcctctt

SEQ ID NO: 56043 - DNA, 20 bp, Artificial Sequence
  chemically synthesized
ggcattaggggtgcctcttg

SEQ ID NO: 56044 - DNA, 20 bp, Artificial Sequence
  chemically synthesized
cattaggggtgcctcttgag

SEQ ID NO: 56045 - DNA, 20 bp, Artificial Sequence
  chemically synthesized
agaatcaacattatcttgcc

SEQ ID NO: 56046 - DNA, 20 bp, Artificial Sequence
  chemically synthesized
atcaacattatcttgcctgg

SEQ ID NO: 56047 - DNA, 20 bp, Artificial Sequence
  chemically synthesized
atcttgcctggcagctgcct

SEQ ID NO: 56048 - DNA, 20 bp, Artificial Sequence
  chemically synthesized
tcttgcctggcagctgcctc

SEQ ID NO: 56049 - DNA, 20 bp, Artificial Sequence
  chemically synthesized
cttgcctggcagctgcctca

SEQ ID NO: 56050 - DNA, 20 bp, Artificial Sequence
  chemically synthesized
gcctggcagctgcctcaggg

SEQ ID NO: 56051 - DNA, 20 bp, Artificial Sequence
  chemically synthesized
cctggcagctgcctcaggga

SEQ ID NO: 56052 - DNA, 20 bp, Artificial Sequence
  chemically synthesized
aaggccatcactgttgcctc

SEQ ID NO: 56053 - DNA, 20 bp, Artificial Sequence
  chemically synthesized
gccatcactgttgcctcaag

SEQ ID NO: 56054 - DNA, 20 bp, Artificial Sequence
  chemically synthesized
cactgttgcctcaagcagtg

SEQ ID NO: 56055 - DNA, 20 bp, Artificial Sequence
  chemically synthesized
actgttgcctcaagcagtgc

SEQ ID NO: 56056 - DNA, 20 bp, Artificial Sequence
  chemically synthesized
ctgttgcctcaagcagtgca

SEQ ID NO: 56057 - DNA, 20 bp, Artificial Sequence
  chemically synthesized
cagtgcagggtttacatcct

SEQ ID NO: 56058 - DNA, 20 bp, Artificial Sequence
  chemically synthesized
agggtttacatcctcagaca

SEQ ID NO: 56059 - DNA, 20 bp, Artificial Sequence
  chemically synthesized
gggtttacatcctcagacaa

SEQ ID NO: 56060 - DNA, 20 bp, Artificial Sequence
  chemically synthesized
tttacatcctcagacaaagg

SEQ ID NO: 56061 - DNA, 20 bp, Artificial Sequence
  chemically synthesized
catcctcagacaaaggtgga

SEQ ID NO: 56062 - DNA, 20 bp, Artificial Sequence
  chemically synthesized
atcctcagacaaaggtggaa

SEQ ID NO: 56063 - DNA, 20 bp, Artificial Sequence
  chemically synthesized
gacaaaggtggaaaggctaa

SEQ ID NO: 56064 - DNA, 20 bp, Artificial Sequence
  chemically synthesized
aaaggtggaaaggctaatgg

SEQ ID NO: 56065 - DNA, 20 bp, Artificial Sequence
  chemically synthesized
tggaaaggctaatggcagca

SEQ ID NO: 56066 - DNA, 20 bp, Artificial Sequence
  chemically synthesized
ggaaaggctaatggcagcac

SEQ ID NO: 56067 - DNA, 20 bp, Artificial Sequence
  chemically synthesized
aggctaatggcagcacgggt

SEQ ID NO: 56068 - DNA, 20 bp, Artificial Sequence
  chemically synthesized
ggctaatggcagcacgggtc

SEQ ID NO: 56069 - DNA, 20 bp, Artificial Sequence
  chemically synthesized
gctaatggcagcacgggtca

SEQ ID NO: 56070 - DNA, 20 bp, Artificial Sequence
  chemically synthesized
taatggcagcacgggtcagg

SEQ ID NO: 56071 - DNA, 20 bp, Artificial Sequence
  chemically synthesized
aatggcagcacgggtcaggg

SEQ ID NO: 56072 - DNA, 20 bp, Artificial Sequence
  chemically synthesized
atggcagcacgggtcaggga

SEQ ID NO: 56073 - DNA, 20 bp, Artificial Sequence
  chemically synthesized
tggcagcacgggtcagggag

SEQ ID NO: 56074 - DNA, 20 bp, Artificial Sequence
  chemically synthesized
ggaggggatgttaccactac

SEQ ID NO: 56075 - DNA, 20 bp, Artificial Sequence
  chemically synthesized
gaggggatgttaccactact

SEQ ID NO: 56076 - DNA, 20 bp, Artificial Sequence
  chemically synthesized
aggggatgttaccactactg

SEQ ID NO: 56077 - DNA, 20 bp, Artificial Sequence
  chemically synthesized
gatgttaccactactgggga

SEQ ID NO: 56078 - DNA, 20 bp, Artificial Sequence
  chemically synthesized
atgttaccactactggggat

SEQ ID NO: 56079 - DNA, 20 bp, Artificial Sequence
  chemically synthesized
tgttaccactactggggatg

SEQ ID NO: 56080 - DNA, 20 bp, Artificial Sequence
  chemically synthesized
gatggggaaactgtttcttc

SEQ ID NO: 56081 - DNA, 20 bp, Artificial Sequence
  chemically synthesized
aactgtttcttctggcaaaa

SEQ ID NO: 56082 - DNA, 20 bp, Artificial Sequence
  chemically synthesized
ttctggcaaaaaagtttcat

SEQ ID NO: 56083 - DNA, 20 bp, Artificial Sequence
  chemically synthesized
ctggcaaaaaagtttcatca

SEQ ID NO: 56084 - DNA, 20 bp, Artificial Sequence
  chemically synthesized
ttcatcagagttcacaaact

SEQ ID NO: 56085 - DNA, 20 bp, Artificial Sequence
  chemically synthesized
gttcacaaactcagtgtcct

SEQ ID NO: 56086 - DNA, 20 bp, Artificial Sequence
  chemically synthesized
ctcagtgtcctcagcttcat

SEQ ID NO: 56087 - DNA, 20 bp, Artificial Sequence
  chemically synthesized
tcagtgtcctcagcttcatc

SEQ ID NO: 56088 - DNA, 20 bp, Artificial Sequence
  chemically synthesized
cagtgtcctcagcttcatca

SEQ ID NO: 56089 - DNA, 20 bp, Artificial Sequence
  chemically synthesized
ctcccacacatccccactcc

SEQ ID NO: 56090 - DNA, 20 bp, Artificial Sequence
  chemically synthesized
cacatccccactccaagttc

SEQ ID NO: 56091 - DNA, 20 bp, Artificial Sequence
  chemically synthesized
acatccccactccaagttcc

SEQ ID NO: 56092 - DNA, 20 bp, Artificial Sequence
  chemically synthesized
catccccactccaagttcca

SEQ ID NO: 56093 - DNA, 20 bp, Artificial Sequence
  chemically synthesized
tccagggtcccatttttttc

SEQ ID NO: 56094 - DNA, 20 bp, Artificial Sequence
  chemically synthesized
agtcaatgccctcactttaa

SEQ ID NO: 56095 - DNA, 20 bp, Artificial Sequence
  chemically synthesized
tcactttaacagtaaacacc

SEQ ID NO: 56096 - DNA, 20 bp, Artificial Sequence
  chemically synthesized
tttaacagtaaacacctggc

SEQ ID NO: 56097 - DNA, 20 bp, Artificial Sequence
  chemically synthesized
ttaacagtaaacacctggca

SEQ ID NO: 56098 - DNA, 20 bp, Artificial Sequence
  chemically synthesized
tgtgcatgcacctcttgttg

SEQ ID NO: 56099 - DNA, 20 bp, Artificial Sequence
  chemically synthesized
atgcacctcttgttgcagat

SEQ ID NO: 56100 - DNA, 20 bp, Artificial Sequence
  chemically synthesized
atcagctactcgcatgataa

SEQ ID NO: 56101 - DNA, 20 bp, Artificial Sequence
  chemically synthesized
caatttcaactctttctcta

SEQ ID NO: 56102 - DNA, 20 bp, Artificial Sequence
  chemically synthesized
aatttcaactctttctctac

SEQ ID NO: 56103 - DNA, 20 bp, Artificial Sequence
  chemically synthesized
tttcaactctttctctacag

SEQ ID NO: 56104 - DNA, 20 bp, Artificial Sequence
  chemically synthesized
caggagttaaaactctcatt

SEQ ID NO: 56105 - DNA, 20 bp, Artificial Sequence
  chemically synthesized
aggagttaaaactctcattc

SEQ ID NO: 56106 - DNA, 20 bp, Artificial Sequence
  chemically synthesized
ggagttaaaactctcattca

SEQ ID NO: 56107 - DNA, 20 bp, Artificial Sequence
  chemically synthesized
actctcattcagggcaatct

SEQ ID NO: 56108 - DNA, 20 bp, Artificial Sequence
  chemically synthesized
ctcattcagggcaatcttag

SEQ ID NO: 56109 - DNA, 20 bp, Artificial Sequence
  chemically synthesized
gggcaatcttagcagatttg

SEQ ID NO: 56110 - DNA, 20 bp, Artificial Sequence
  chemically synthesized
atcttagcagatttgtggct

SEQ ID NO: 56111 - DNA, 20 bp, Artificial Sequence
  chemically synthesized
tggctcagtatctgcttctg

SEQ ID NO: 56112 - DNA, 20 bp, Artificial Sequence
  chemically synthesized
ggctcagtatctgcttctga

SEQ ID NO: 56113 - DNA, 20 bp, Artificial Sequence
  chemically synthesized
tcagtatctgcttctgaagg

SEQ ID NO: 56114 - DNA, 20 bp, Artificial Sequence
  chemically synthesized
cagtatctgcttctgaaggt

SEQ ID NO: 56115 - DNA, 20 bp, Artificial Sequence
  chemically synthesized
gtatctgcttctgaaggtgg

SEQ ID NO: 56116 - DNA, 20 bp, Artificial Sequence
  chemically synthesized
ctgcttctgaaggtgggaga

SEQ ID NO: 56117 - DNA, 20 bp, Artificial Sequence
  chemically synthesized
aggtgggagacagatcccct

SEQ ID NO: 56118 - DNA, 20 bp, Artificial Sequence
  chemically synthesized
ttttctttcatctctttctc

SEQ ID NO: 56119 - DNA, 20 bp, Artificial Sequence
  chemically synthesized
ttctttcatctctttctcca

SEQ ID NO: 56120 - DNA, 20 bp, Artificial Sequence
  chemically synthesized
atctctttctccagagaact

SEQ ID NO: 56121 - DNA, 20 bp, Artificial Sequence
  chemically synthesized
tctctttctccagagaactt

SEQ ID NO: 56122 - DNA, 20 bp, Artificial Sequence
  chemically synthesized
tctttctccagagaacttag

SEQ ID NO: 56123 - DNA, 20 bp, Artificial Sequence
  chemically synthesized
accaacttcattatgttcct

SEQ ID NO: 56124 - DNA, 20 bp, Artificial Sequence
  chemically synthesized
gttccttggttctccacata

SEQ ID NO: 56125 - DNA, 20 bp, Artificial Sequence
  chemically synthesized
tggttctccacatatagtca

SEQ ID NO: 56126 - DNA, 20 bp, Artificial Sequence
  chemically synthesized
ggttctccacatatagtcaa

SEQ ID NO: 56127 - DNA, 20 bp, Artificial Sequence
  chemically synthesized
atagtcaaaggtattatgta

SEQ ID NO: 56128 - DNA, 20 bp, Artificial Sequence
  chemically synthesized
agtcaaaggtattatgtata

SEQ ID NO: 56129 - DNA, 20 bp, Artificial Sequence
  chemically synthesized
ctaaactccttgcctctcat

SEQ ID NO: 56130 - DNA, 20 bp, Artificial Sequence
  chemically synthesized
gcctctcataagtgatgaat

SEQ ID NO: 56131 - DNA, 20 bp, Artificial Sequence
  chemically synthesized
tctcataagtgatgaatcag

SEQ ID NO: 56132 - DNA, 20 bp, Artificial Sequence
  chemically synthesized
gcataactctctaaacaatt

SEQ ID NO: 56133 - DNA, 20 bp, Artificial Sequence
  chemically synthesized
cataactctctaaacaattc

SEQ ID NO: 56134 - DNA, 20 bp, Artificial Sequence
  chemically synthesized
ctctctaaacaattcaggcc

SEQ ID NO: 56135 - DNA, 20 bp, Artificial Sequence
  chemically synthesized
caattcaggccaagtactat

SEQ ID NO: 56136 - DNA, 20 bp, Artificial Sequence
  chemically synthesized
atcagtgttctccatactat

SEQ ID NO: 56137 - DNA, 20 bp, Artificial Sequence
  chemically synthesized
agtgttctccatactattag

SEQ ID NO: 56138 - DNA, 20 bp, Artificial Sequence
  chemically synthesized
gttctccatactattagaag

SEQ ID NO: 56139 - DNA, 20 bp, Artificial Sequence
  chemically synthesized
tctccatactattagaagta

SEQ ID NO: 56140 - DNA, 20 bp, Artificial Sequence
  chemically synthesized
actattagaagtagagtcct

SEQ ID NO: 56141 - DNA, 20 bp, Artificial Sequence
  chemically synthesized
gtagagtccttagcattttt

SEQ ID NO: 56142 - DNA, 20 bp, Artificial Sequence
  chemically synthesized
tttggtctaatcatattaat

SEQ ID NO: 56143 - DNA, 20 bp, Artificial Sequence
  chemically synthesized
tcatattaatcagccaacac

SEQ ID NO: 56144 - DNA, 20 bp, Artificial Sequence
  chemically synthesized
tattaatcagccaacaccag

SEQ ID NO: 56145 - DNA, 20 bp, Artificial Sequence
  chemically synthesized
agaagtcccaaaaccaatga

SEQ ID NO: 56146 - DNA, 20 bp, Artificial Sequence
  chemically synthesized
tccttaatattctgttcctc

SEQ ID NO: 56147 - DNA, 20 bp, Artificial Sequence
  chemically synthesized
tgttcctcaagaaccacttc

SEQ ID NO: 56148 - DNA, 20 bp, Artificial Sequence
  chemically synthesized
tctggtatgaaaatctgtat

SEQ ID NO: 56149 - DNA, 20 bp, Artificial Sequence
  chemically synthesized
gtatgaaaatctgtattagt

SEQ ID NO: 56150 - DNA, 20 bp, Artificial Sequence
  chemically synthesized
tatgaaaatctgtattagtc

SEQ ID NO: 56151 - DNA, 20 bp, Artificial Sequence
  chemically synthesized
atgaaaatctgtattagtcg

SEQ ID NO: 56152 - DNA, 20 bp, Artificial Sequence
  chemically synthesized
ctgtattagtcggggttctc

SEQ ID NO: 56153 - DNA, 20 bp, Artificial Sequence
  chemically synthesized
gtattagtcggggttctcta

SEQ ID NO: 56154 - DNA, 20 bp, Artificial Sequence
  chemically synthesized
tattagtcggggttctctag

SEQ ID NO: 56155 - DNA, 20 bp, Artificial Sequence
  chemically synthesized
attagtcggggttctctaga

SEQ ID NO: 56156 - DNA, 20 bp, Artificial Sequence
  chemically synthesized
gtcggggttctctagaggga

SEQ ID NO: 56157 - DNA, 20 bp, Artificial Sequence
  chemically synthesized
ctctagagggacagaactaa

SEQ ID NO: 56158 - DNA, 20 bp, Artificial Sequence
  chemically synthesized
tctagagggacagaactaat

SEQ ID NO: 56159 - DNA, 20 bp, Artificial Sequence
  chemically synthesized
tagagggacagaactaatag

SEQ ID NO: 56160 - DNA, 20 bp, Artificial Sequence
  chemically synthesized
gattatatatatatatatat

SEQ ID NO: 56161 - DNA, 20 bp, Artificial Sequence
  chemically synthesized
ttatatatatatatatatga

SEQ ID NO: 56162 - DNA, 20 bp, Artificial Sequence
  chemically synthesized
atatatatatatatatgaga

SEQ ID NO: 56163 - DNA, 20 bp, Artificial Sequence
  chemically synthesized
atatatatatatatgagaga

SEQ ID NO: 56164 - DNA, 20 bp, Artificial Sequence
  chemically synthesized
atatatatatatgagagaga

SEQ ID NO: 56165 - DNA, 20 bp, Artificial Sequence
  chemically synthesized
atatatatatgagagagaga

SEQ ID NO: 56166 - DNA, 20 bp, Artificial Sequence
  chemically synthesized
atatatatgagagagagaga

SEQ ID NO: 56167 - DNA, 20 bp, Artificial Sequence
  chemically synthesized
atatatgagagagagagaga

SEQ ID NO: 56168 - DNA, 20 bp, Artificial Sequence
  chemically synthesized
atatgagagagagagagaga

SEQ ID NO: 56169 - DNA, 20 bp, Artificial Sequence
  chemically synthesized
tatgtatatatgtgtatata

SEQ ID NO: 56170 - DNA, 20 bp, Artificial Sequence
  chemically synthesized
tatatatgtgtatatatagt

SEQ ID NO: 56171 - DNA, 20 bp, Artificial Sequence
  chemically synthesized
agtatacctatatctatcta

SEQ ID NO: 56172 - DNA, 20 bp, Artificial Sequence
  chemically synthesized
cctatatctatctatagata

SEQ ID NO: 56173 - DNA, 20 bp, Artificial Sequence
  chemically synthesized
gatatagatatactcacaca

SEQ ID NO: 56174 - DNA, 20 bp, Artificial Sequence
  chemically synthesized
atatagatatactcacacaa

SEQ ID NO: 56175 - DNA, 20 bp, Artificial Sequence
  chemically synthesized
tatagatatactcacacaaa

SEQ ID NO: 56176 - DNA, 20 bp, Artificial Sequence
  chemically synthesized
atagatatactcacacaaag

SEQ ID NO: 56177 - DNA, 20 bp, Artificial Sequence
  chemically synthesized
agatatactcacacaaaggg

SEQ ID NO: 56178 - DNA, 20 bp, Artificial Sequence
  chemically synthesized
cacacaaaggggagcttatt

SEQ ID NO: 56179 - DNA, 20 bp, Artificial Sequence
  chemically synthesized
acaaaggggagcttattaag

SEQ ID NO: 56180 - DNA, 20 bp, Artificial Sequence
  chemically synthesized
attaagtggtattaactcac

SEQ ID NO: 56181 - DNA, 20 bp, Artificial Sequence
  chemically synthesized
gtattaactcacaagattac

SEQ ID NO: 56182 - DNA, 20 bp, Artificial Sequence
  chemically synthesized
tattaactcacaagattaca

SEQ ID NO: 56183 - DNA, 20 bp, Artificial Sequence
  chemically synthesized
aagattacaaggtcccataa

SEQ ID NO: 56184 - DNA, 20 bp, Artificial Sequence
  chemically synthesized
agattacaaggtcccataat

SEQ ID NO: 56185 - DNA, 20 bp, Artificial Sequence
  chemically synthesized
taataggccacctgcaatct

SEQ ID NO: 56186 - DNA, 20 bp, Artificial Sequence
  chemically synthesized
aataggccacctgcaatctg

SEQ ID NO: 56187 - DNA, 20 bp, Artificial Sequence
  chemically synthesized
taggccacctgcaatctgag

SEQ ID NO: 56188 - DNA, 20 bp, Artificial Sequence
  chemically synthesized
ccacctgcaatctgaggagc

SEQ ID NO: 56189 - DNA, 20 bp, Artificial Sequence
  chemically synthesized
cacctgcaatctgaggagca

SEQ ID NO: 56190 - DNA, 20 bp, Artificial Sequence
  chemically synthesized
ctgcaatctgaggagcaagg

SEQ ID NO: 56191 - DNA, 20 bp, Artificial Sequence
  chemically synthesized
aatctgaggagcaaggaaga

SEQ ID NO: 56192 - DNA, 20 bp, Artificial Sequence
  chemically synthesized
aggagcaaggaagacagtcc

SEQ ID NO: 56193 - DNA, 20 bp, Artificial Sequence
  chemically synthesized
ggaagacagtccaagtccca

SEQ ID NO: 56194 - DNA, 20 bp, Artificial Sequence
  chemically synthesized
cagtccaagtcccacagctg

SEQ ID NO: 56195 - DNA, 20 bp, Artificial Sequence
  chemically synthesized
agtcccacagctgaagaact

SEQ ID NO: 56196 - DNA, 20 bp, Artificial Sequence
  chemically synthesized
tcccacagctgaagaacttg

SEQ ID NO: 56197 - DNA, 20 bp, Artificial Sequence
  chemically synthesized
gaacttggagtccgatgttc

SEQ ID NO: 56198 - DNA, 20 bp, Artificial Sequence
  chemically synthesized
acttggagtccgatgttcaa

SEQ ID NO: 56199 - DNA, 20 bp, Artificial Sequence
  chemically synthesized
tggagtccgatgttcaagag

SEQ ID NO: 56200 - DNA, 20 bp, Artificial Sequence
  chemically synthesized
ggagtccgatgttcaagagc

SEQ ID NO: 56201 - DNA, 20 bp, Artificial Sequence
  chemically synthesized
gtccgatgttcaagagcagg

SEQ ID NO: 56202 - DNA, 20 bp, Artificial Sequence
  chemically synthesized
tccgatgttcaagagcagga

SEQ ID NO: 56203 - DNA, 20 bp, Artificial Sequence
  chemically synthesized
gttcaagagcaggaaggatc

SEQ ID NO: 56204 - DNA, 20 bp, Artificial Sequence
  chemically synthesized
agagcaggaaggatccagca

SEQ ID NO: 56205 - DNA, 20 bp, Artificial Sequence
  chemically synthesized
gagcaggaaggatccagcac

SEQ ID NO: 56206 - DNA, 20 bp, Artificial Sequence
  chemically synthesized
gcaggaaggatccagcacag

SEQ ID NO: 56207 - DNA, 20 bp, Artificial Sequence
  chemically synthesized
gaaggatccagcacaggaga

SEQ ID NO: 56208 - DNA, 20 bp, Artificial Sequence
  chemically synthesized
tccagcacaggagaaagatg

SEQ ID NO: 56209 - DNA, 20 bp, Artificial Sequence
  chemically synthesized
ccagcacaggagaaagatgt

SEQ ID NO: 56210 - DNA, 20 bp, Artificial Sequence
  chemically synthesized
cacaggagaaagatgtaggc

SEQ ID NO: 56211 - DNA, 20 bp, Artificial Sequence
  chemically synthesized
acaggagaaagatgtaggct

SEQ ID NO: 56212 - DNA, 20 bp, Artificial Sequence
  chemically synthesized
aggagaaagatgtaggctgg

SEQ ID NO: 56213 - DNA, 20 bp, Artificial Sequence
  chemically synthesized
ggagaaagatgtaggctggg

SEQ ID NO: 56214 - DNA, 20 bp, Artificial Sequence
  chemically synthesized
aagatgtaggctgggaggct

SEQ ID NO: 56215 - DNA, 20 bp, Artificial Sequence
  chemically synthesized
tgtaggctgggaggctaagc

SEQ ID NO: 56216 - DNA, 20 bp, Artificial Sequence
  chemically synthesized
gctgggaggctaagccagtc

SEQ ID NO: 56217 - DNA, 20 bp, Artificial Sequence
  chemically synthesized
gcctttttacatttttctgc

SEQ ID NO: 56218 - DNA, 20 bp, Artificial Sequence
  chemically synthesized
tttctgccagctttatattc

SEQ ID NO: 56219 - DNA, 20 bp, Artificial Sequence
  chemically synthesized
agctttatattctggctcta

SEQ ID NO: 56220 - DNA, 20 bp, Artificial Sequence
  chemically synthesized
tatattctggctctacagct

SEQ ID NO: 56221 - DNA, 20 bp, Artificial Sequence
  chemically synthesized
atattctggctctacagctt

SEQ ID NO: 56222 - DNA, 20 bp, Artificial Sequence
  chemically synthesized
tattctggctctacagcttg

SEQ ID NO: 56223 - DNA, 20 bp, Artificial Sequence
  chemically synthesized
attctggctctacagcttgg

SEQ ID NO: 56224 - DNA, 20 bp, Artificial Sequence
  chemically synthesized
ctggctctacagcttggggg

SEQ ID NO: 56225 - DNA, 20 bp, Artificial Sequence
  chemically synthesized
gctctacagcttgggggcag

SEQ ID NO: 56226 - DNA, 20 bp, Artificial Sequence
  chemically synthesized
ctctacagcttgggggcagc

SEQ ID NO: 56227 - DNA, 20 bp, Artificial Sequence
  chemically synthesized
tctacagcttgggggcagca

SEQ ID NO: 56228 - DNA, 20 bp, Artificial Sequence
  chemically synthesized
ctacagcttgggggcagcag

SEQ ID NO: 56229 - DNA, 20 bp, Artificial Sequence
  chemically synthesized
cagcttgggggcagcagggg

SEQ ID NO: 56230 - DNA, 20 bp, Artificial Sequence
  chemically synthesized
agcttgggggcagcaggggc

SEQ ID NO: 56231 - DNA, 20 bp, Artificial Sequence
  chemically synthesized
gcttgggggcagcaggggca

SEQ ID NO: 56232 - DNA, 20 bp, Artificial Sequence
  chemically synthesized
cttgggggcagcaggggcag

SEQ ID NO: 56233 - DNA, 20 bp, Artificial Sequence
  chemically synthesized
ggcagcaggggcaggggcct

SEQ ID NO: 56234 - DNA, 20 bp, Artificial Sequence
  chemically synthesized
gcagcaggggcaggggcctc

SEQ ID NO: 56235 - DNA, 20 bp, Artificial Sequence
  chemically synthesized
cagcaggggcaggggcctca

SEQ ID NO: 56236 - DNA, 20 bp, Artificial Sequence
  chemically synthesized
caggggcctcagggtgcttg

SEQ ID NO: 56237 - DNA, 20 bp, Artificial Sequence
  chemically synthesized
aggggcctcagggtgcttgc

SEQ ID NO: 56238 - DNA, 20 bp, Artificial Sequence
  chemically synthesized
ggggcctcagggtgcttgca

SEQ ID NO: 56239 - DNA, 20 bp, Artificial Sequence
  chemically synthesized
tgcttgcagggatgacacac

SEQ ID NO: 56240 - DNA, 20 bp, Artificial Sequence
  chemically synthesized
acacactggcctcttttcca

SEQ ID NO: 56241 - DNA, 20 bp, Artificial Sequence
  chemically synthesized
cacactggcctcttttccat

SEQ ID NO: 56242 - DNA, 20 bp, Artificial Sequence
  chemically synthesized
acactggcctcttttccata

SEQ ID NO: 56243 - DNA, 20 bp, Artificial Sequence
  chemically synthesized
ctggcctcttttccataggg

SEQ ID NO: 56244 - DNA, 20 bp, Artificial Sequence
  chemically synthesized
cctcttttccatagggtggc

SEQ ID NO: 56245 - DNA, 20 bp, Artificial Sequence
  chemically synthesized
ctcttttccatagggtggct

SEQ ID NO: 56246 - DNA, 20 bp, Artificial Sequence
  chemically synthesized
tcttttccatagggtggctg

SEQ ID NO: 56247 - DNA, 20 bp, Artificial Sequence
  chemically synthesized
atagggtggctggggcacac

SEQ ID NO: 56248 - DNA, 20 bp, Artificial Sequence
  chemically synthesized
tagggtggctggggcacact

SEQ ID NO: 56249 - DNA, 20 bp, Artificial Sequence
  chemically synthesized
agggtggctggggcacactg

SEQ ID NO: 56250 - DNA, 20 bp, Artificial Sequence
  chemically synthesized
gctggggcacactggggtgt

SEQ ID NO: 56251 - DNA, 20 bp, Artificial Sequence
  chemically synthesized
ggcacactggggtgtgagta

SEQ ID NO: 56252 - DNA, 20 bp, Artificial Sequence
  chemically synthesized
tggggtgtgagtaaagcact

SEQ ID NO: 56253 - DNA, 20 bp, Artificial Sequence
  chemically synthesized
ggggtgtgagtaaagcactc

SEQ ID NO: 56254 - DNA, 20 bp, Artificial Sequence
  chemically synthesized
caggatcttttttccttccc

SEQ ID NO: 56255 - DNA, 20 bp, Artificial Sequence
  chemically synthesized
cttttttccttccctagtcc

SEQ ID NO: 56256 - DNA, 20 bp, Artificial Sequence
  chemically synthesized
ttccttccctagtccaagta

SEQ ID NO: 56257 - DNA, 20 bp, Artificial Sequence
  chemically synthesized
ttccctagtccaagtacagc

SEQ ID NO: 56258 - DNA, 20 bp, Artificial Sequence
  chemically synthesized
tccctagtccaagtacagca

SEQ ID NO: 56259 - DNA, 20 bp, Artificial Sequence
  chemically synthesized
ccctagtccaagtacagcaa

SEQ ID NO: 56260 - DNA, 20 bp, Artificial Sequence
  chemically synthesized
tagtccaagtacagcaaggg

SEQ ID NO: 56261 - DNA, 20 bp, Artificial Sequence
  chemically synthesized
cagcaagggcagtatgactg

SEQ ID NO: 56262 - DNA, 20 bp, Artificial Sequence
  chemically synthesized
gggcagtatgactgcagtgt

SEQ ID NO: 56263 - DNA, 20 bp, Artificial Sequence
  chemically synthesized
cagtatgactgcagtgttag

SEQ ID NO: 56264 - DNA, 20 bp, Artificial Sequence
  chemically synthesized
tatgactgcagtgttagtgg

SEQ ID NO: 56265 - DNA, 20 bp, Artificial Sequence
  chemically synthesized
gactgcagtgttagtggcag

SEQ ID NO: 56266 - DNA, 20 bp, Artificial Sequence
  chemically synthesized
actgcagtgttagtggcaga

SEQ ID NO: 56267 - DNA, 20 bp, Artificial Sequence
  chemically synthesized
gttagtggcagaaggacttt

SEQ ID NO: 56268 - DNA, 20 bp, Artificial Sequence
  chemically synthesized
gaaggactttcagtcacctc

SEQ ID NO: 56269 - DNA, 20 bp, Artificial Sequence
  chemically synthesized
aaggactttcagtcacctct

SEQ ID NO: 56270 - DNA, 20 bp, Artificial Sequence
  chemically synthesized
ggactttcagtcacctctgg

SEQ ID NO: 56271 - DNA, 20 bp, Artificial Sequence
  chemically synthesized
agcttcaccccacaaaaaca

SEQ ID NO: 56272 - DNA, 20 bp, Artificial Sequence
  chemically synthesized
cttcaccccacaaaaacaca

SEQ ID NO: 56273 - DNA, 20 bp, Artificial Sequence
  chemically synthesized
ccccacaaaaacacagagtg

SEQ ID NO: 56274 - DNA, 20 bp, Artificial Sequence
  chemically synthesized
acaaaaacacagagtgcagc

SEQ ID NO: 56275 - DNA, 20 bp, Artificial Sequence
  chemically synthesized
aaaacacagagtgcagccag

SEQ ID NO: 56276 - DNA, 20 bp, Artificial Sequence
  chemically synthesized
gccagtggaaatgttcaact

SEQ ID NO: 56277 - DNA, 20 bp, Artificial Sequence
  chemically synthesized
ggaaatgttcaactgagttc

SEQ ID NO: 56278 - DNA, 20 bp, Artificial Sequence
  chemically synthesized
gaaatgttcaactgagttcg

SEQ ID NO: 56279 - DNA, 20 bp, Artificial Sequence
  chemically synthesized
agttcgaggtgcctgcactg

SEQ ID NO: 56280 - DNA, 20 bp, Artificial Sequence
  chemically synthesized
gttcgaggtgcctgcactgt

SEQ ID NO: 56281 - DNA, 20 bp, Artificial Sequence
  chemically synthesized
ggtgcctgcactgtgggccc

SEQ ID NO: 56282 - DNA, 20 bp, Artificial Sequence
  chemically synthesized
cctgcactgtgggcccaagc

SEQ ID NO: 56283 - DNA, 20 bp, Artificial Sequence
  chemically synthesized
ctgcactgtgggcccaagcc

SEQ ID NO: 56284 - DNA, 20 bp, Artificial Sequence
  chemically synthesized
gcactgtgggcccaagccag

SEQ ID NO: 56285 - DNA, 20 bp, Artificial Sequence
  chemically synthesized
cccaagccaggagccttgcc

SEQ ID NO: 56286 - DNA, 20 bp, Artificial Sequence
  chemically synthesized
gccaggagccttgcctggtg

SEQ ID NO: 56287 - DNA, 20 bp, Artificial Sequence
  chemically synthesized
caggagccttgcctggtgaa

SEQ ID NO: 56288 - DNA, 20 bp, Artificial Sequence
  chemically synthesized
gagccttgcctggtgaagag

SEQ ID NO: 56289 - DNA, 20 bp, Artificial Sequence
  chemically synthesized
ccttgcctggtgaagagtag

SEQ ID NO: 56290 - DNA, 20 bp, Artificial Sequence
  chemically synthesized
cttgcctggtgaagagtagc

SEQ ID NO: 56291 - DNA, 20 bp, Artificial Sequence
  chemically synthesized
tggtgaagagtagcaggtga

SEQ ID NO: 56292 - DNA, 20 bp, Artificial Sequence
  chemically synthesized
agtagcaggtgaaagctcac

SEQ ID NO: 56293 - DNA, 20 bp, Artificial Sequence
  chemically synthesized
gcaggtgaaagctcacaaga

SEQ ID NO: 56294 - DNA, 20 bp, Artificial Sequence
  chemically synthesized
aggtgaaagctcacaagaaa

SEQ ID NO: 56295 - DNA, 20 bp, Artificial Sequence
  chemically synthesized
agctcacaagaaagagaaac

SEQ ID NO: 56296 - DNA, 20 bp, Artificial Sequence
  chemically synthesized
attctttccctgctgtgtgc

SEQ ID NO: 56297 - DNA, 20 bp, Artificial Sequence
  chemically synthesized
tctttccctgctgtgtgctg

SEQ ID NO: 56298 - DNA, 20 bp, Artificial Sequence
  chemically synthesized
ctttccctgctgtgtgctgg

SEQ ID NO: 56299 - DNA, 20 bp, Artificial Sequence
  chemically synthesized
ctgctgtgtgctggaggtgt

SEQ ID NO: 56300 - DNA, 20 bp, Artificial Sequence
  chemically synthesized
tgctgtgtgctggaggtgtc

SEQ ID NO: 56301 - DNA, 20 bp, Artificial Sequence
  chemically synthesized
gctgtgtgctggaggtgtca

SEQ ID NO: 56302 - DNA, 20 bp, Artificial Sequence
  chemically synthesized
gtgtgctggaggtgtcaggg

SEQ ID NO: 56303 - DNA, 20 bp, Artificial Sequence
  chemically synthesized
tgctggaggtgtcagggaag

SEQ ID NO: 56304 - DNA, 20 bp, Artificial Sequence
  chemically synthesized
ggaggtgtcagggaagtggc

SEQ ID NO: 56305 - DNA, 20 bp, Artificial Sequence
  chemically synthesized
gaggtgtcagggaagtggcc

SEQ ID NO: 56306 - DNA, 20 bp, Artificial Sequence
  chemically synthesized
ggccaggtcccttctttctc

SEQ ID NO: 56307 - DNA, 20 bp, Artificial Sequence
  chemically synthesized
gtcccttctttctcaagccc

SEQ ID NO: 56308 - DNA, 20 bp, Artificial Sequence
  chemically synthesized
tcccttctttctcaagccca

SEQ ID NO: 56309 - DNA, 20 bp, Artificial Sequence
  chemically synthesized
cccttctttctcaagcccaa

SEQ ID NO: 56310 - DNA, 20 bp, Artificial Sequence
  chemically synthesized
ctcaagcccaagggcattaa

SEQ ID NO: 56311 - DNA, 20 bp, Artificial Sequence
  chemically synthesized
aagcccaagggcattaacgg

SEQ ID NO: 56312 - DNA, 20 bp, Artificial Sequence
  chemically synthesized
cattaacggtggtactgctg

SEQ ID NO: 56313 - DNA, 20 bp, Artificial Sequence
  chemically synthesized
tggtactgctgcagctgaaa

SEQ ID NO: 56314 - DNA, 20 bp, Artificial Sequence
  chemically synthesized
tactgctgcagctgaaatgg

SEQ ID NO: 56315 - DNA, 20 bp, Artificial Sequence
  chemically synthesized
ctgctgcagctgaaatggca

SEQ ID NO: 56316 - DNA, 20 bp, Artificial Sequence
  chemically synthesized
tgctgcagctgaaatggcag

SEQ ID NO: 56317 - DNA, 20 bp, Artificial Sequence
  chemically synthesized
gctgcagctgaaatggcaga

SEQ ID NO: 56318 - DNA, 20 bp, Artificial Sequence
  chemically synthesized
ctgcagctgaaatggcagag

SEQ ID NO: 56319 - DNA, 20 bp, Artificial Sequence
  chemically synthesized
ctgaaatggcagaggggctg

SEQ ID NO: 56320 - DNA, 20 bp, Artificial Sequence
  chemically synthesized
tgaaatggcagaggggctgt

SEQ ID NO: 56321 - DNA, 20 bp, Artificial Sequence
  chemically synthesized
aggggctgtgggttgtctct

SEQ ID NO: 56322 - DNA, 20 bp, Artificial Sequence
  chemically synthesized
tgtctcttggatttcctccc

SEQ ID NO: 56323 - DNA, 20 bp, Artificial Sequence
  chemically synthesized
tctcttggatttcctcccca

SEQ ID NO: 56324 - DNA, 20 bp, Artificial Sequence
  chemically synthesized
cttggatttcctccccagag

SEQ ID NO: 56325 - DNA, 20 bp, Artificial Sequence
  chemically synthesized
atttcctccccagagaagca

SEQ ID NO: 56326 - DNA, 20 bp, Artificial Sequence
  chemically synthesized
ttcctccccagagaagcaca

SEQ ID NO: 56327 - DNA, 20 bp, Artificial Sequence
  chemically synthesized
ccaacactgactaaaatgtt

SEQ ID NO: 56328 - DNA, 20 bp, Artificial Sequence
  chemically synthesized
caacactgactaaaatgttc

SEQ ID NO: 56329 - DNA, 20 bp, Artificial Sequence
  chemically synthesized
cactgactaaaatgttcagg

SEQ ID NO: 56330 - DNA, 20 bp, Artificial Sequence
  chemically synthesized
actgactaaaatgttcaggc

SEQ ID NO: 56331 - DNA, 20 bp, Artificial Sequence
  chemically synthesized
ctgactaaaatgttcaggca

SEQ ID NO: 56332 - DNA, 20 bp, Artificial Sequence
  chemically synthesized
ctaaaatgttcaggcagggc

SEQ ID NO: 56333 - DNA, 20 bp, Artificial Sequence
  chemically synthesized
taaaatgttcaggcagggcc

SEQ ID NO: 56334 - DNA, 20 bp, Artificial Sequence
  chemically synthesized
aaaatgttcaggcagggcca

SEQ ID NO: 56335 - DNA, 20 bp, Artificial Sequence
  chemically synthesized
atgttcaggcagggccaggg

SEQ ID NO: 56336 - DNA, 20 bp, Artificial Sequence
  chemically synthesized
cagggtggctgtgctctgcc

SEQ ID NO: 56337 - DNA, 20 bp, Artificial Sequence
  chemically synthesized
gtggctgtgctctgcccagt

SEQ ID NO: 56338 - DNA, 20 bp, Artificial Sequence
  chemically synthesized
tggctgtgctctgcccagtg

SEQ ID NO: 56339 - DNA, 20 bp, Artificial Sequence
  chemically synthesized
gtgctctgcccagtgaggaa

SEQ ID NO: 56340 - DNA, 20 bp, Artificial Sequence
  chemically synthesized
ctctgcccagtgaggaatag

SEQ ID NO: 56341 - DNA, 20 bp, Artificial Sequence
  chemically synthesized
tctgcccagtgaggaatagt

SEQ ID NO: 56342 - DNA, 20 bp, Artificial Sequence
  chemically synthesized
ctgcccagtgaggaatagta

SEQ ID NO: 56343 - DNA, 20 bp, Artificial Sequence
  chemically synthesized
tgcccagtgaggaatagtag

SEQ ID NO: 56344 - DNA, 20 bp, Artificial Sequence
  chemically synthesized
ccagtgaggaatagtagggg

SEQ ID NO: 56345 - DNA, 20 bp, Artificial Sequence
  chemically synthesized
cagtgaggaatagtaggggc

SEQ ID NO: 56346 - DNA, 20 bp, Artificial Sequence
  chemically synthesized
agtgaggaatagtaggggca

SEQ ID NO: 56347 - DNA, 20 bp, Artificial Sequence
  chemically synthesized
ggaatagtaggggcagggac

SEQ ID NO: 56348 - DNA, 20 bp, Artificial Sequence
  chemically synthesized
agtaggggcagggaccagtg

SEQ ID NO: 56349 - DNA, 20 bp, Artificial Sequence
  chemically synthesized
gcagggaccagtgcagaaaa

SEQ ID NO: 56350 - DNA, 20 bp, Artificial Sequence
  chemically synthesized
gaccagtgcagaaaacagtg

SEQ ID NO: 56351 - DNA, 20 bp, Artificial Sequence
  chemically synthesized
cagtgtggccacttttccat

SEQ ID NO: 56352 - DNA, 20 bp, Artificial Sequence
  chemically synthesized
agtgtggccacttttccata

SEQ ID NO: 56353 - DNA, 20 bp, Artificial Sequence
  chemically synthesized
gtggccacttttccataagg

SEQ ID NO: 56354 - DNA, 20 bp, Artificial Sequence
  chemically synthesized
ataaggcagctacactgtgc

SEQ ID NO: 56355 - DNA, 20 bp, Artificial Sequence
  chemically synthesized
aaggcagctacactgtgctg

SEQ ID NO: 56356 - DNA, 20 bp, Artificial Sequence
  chemically synthesized
aggcagctacactgtgctgg

SEQ ID NO: 56357 - DNA, 20 bp, Artificial Sequence
  chemically synthesized
acactgtgctggaggtccgt

SEQ ID NO: 56358 - DNA, 20 bp, Artificial Sequence
  chemically synthesized
actgtgctggaggtccgtga

SEQ ID NO: 56359 - DNA, 20 bp, Artificial Sequence
  chemically synthesized
ggaggtccgtgagagtcctg

SEQ ID NO: 56360 - DNA, 20 bp, Artificial Sequence
  chemically synthesized
gaagctcctcgctccctcct

SEQ ID NO: 56361 - DNA, 20 bp, Artificial Sequence
  chemically synthesized
tgagcccatactttaatctc

SEQ ID NO: 56362 - DNA, 20 bp, Artificial Sequence
  chemically synthesized
agcccatactttaatctcaa

SEQ ID NO: 56363 - DNA, 20 bp, Artificial Sequence
  chemically synthesized
tactttaatctcaagagttt

SEQ ID NO: 56364 - DNA, 20 bp, Artificial Sequence
  chemically synthesized
tctcaagagtttgagataaa

SEQ ID NO: 56365 - DNA, 20 bp, Artificial Sequence
  chemically synthesized
caagagtttgagataaacag

SEQ ID NO: 56366 - DNA, 20 bp, Artificial Sequence
  chemically synthesized
agtttgagataaacagtggt

SEQ ID NO: 56367 - DNA, 20 bp, Artificial Sequence
  chemically synthesized
gtttgagataaacagtggta

SEQ ID NO: 56368 - DNA, 20 bp, Artificial Sequence
  chemically synthesized
tgagataaacagtggtaagg

SEQ ID NO: 56369 - DNA, 20 bp, Artificial Sequence
  chemically synthesized
ataaacagtggtaaggaaga

SEQ ID NO: 56370 - DNA, 20 bp, Artificial Sequence
  chemically synthesized
tggtaaggaagaaagtacaa

SEQ ID NO: 56371 - DNA, 20 bp, Artificial Sequence
  chemically synthesized
ggtaaggaagaaagtacaac

SEQ ID NO: 56372 - DNA, 20 bp, Artificial Sequence
  chemically synthesized
ggaagaaagtacaacgggta

SEQ ID NO: 56373 - DNA, 20 bp, Artificial Sequence
  chemically synthesized
cgggtacggctaatgaaacc

SEQ ID NO: 56374 - DNA, 20 bp, Artificial Sequence
  chemically synthesized
gggtacggctaatgaaaccc

SEQ ID NO: 56375 - DNA, 20 bp, Artificial Sequence
  chemically synthesized
tacggctaatgaaacccagg

SEQ ID NO: 56376 - DNA, 20 bp, Artificial Sequence
  chemically synthesized
ctaatgaaacccaggaagat

SEQ ID NO: 56377 - DNA, 20 bp, Artificial Sequence
  chemically synthesized
caggaagataagtcaatgcg

SEQ ID NO: 56378 - DNA, 20 bp, Artificial Sequence
  chemically synthesized
gaagataagtcaatgcgtag

SEQ ID NO: 56379 - DNA, 20 bp, Artificial Sequence
  chemically synthesized
gtagaagtaattccaaccta

SEQ ID NO: 56380 - DNA, 20 bp, Artificial Sequence
  chemically synthesized
ctttttaaaaatcatattta

SEQ ID NO: 56381 - DNA, 20 bp, Artificial Sequence
  chemically synthesized
ttttaaaaatcatatttata

SEQ ID NO: 56382 - DNA, 20 bp, Artificial Sequence
  chemically synthesized
tttaaaaatcatatttatag

SEQ ID NO: 56383 - DNA, 20 bp, Artificial Sequence
  chemically synthesized
atcatatttatagaggtttg

SEQ ID NO: 56384 - DNA, 20 bp, Artificial Sequence
  chemically synthesized
agaggtttgcagtgatacta

SEQ ID NO: 56385 - DNA, 20 bp, Artificial Sequence
  chemically synthesized
caatattgcaaatcattatt

SEQ ID NO: 56386 - DNA, 20 bp, Artificial Sequence
  chemically synthesized
caaatcattattaagaatac

SEQ ID NO: 56387 - DNA, 20 bp, Artificial Sequence
  chemically synthesized
atcattattaagaatacaag

SEQ ID NO: 56388 - DNA, 20 bp, Artificial Sequence
  chemically synthesized
tttctttaacacctgtgata

SEQ ID NO: 56389 - DNA, 20 bp, Artificial Sequence
  chemically synthesized
ttctttaacacctgtgatac

SEQ ID NO: 56390 - DNA, 20 bp, Artificial Sequence
  chemically synthesized
ttgatatgaattctacgtaa

SEQ ID NO: 56391 - DNA, 20 bp, Artificial Sequence
  chemically synthesized
ttgcttcttgccaccaccca

SEQ ID NO: 56392 - DNA, 20 bp, Artificial Sequence
  chemically synthesized
cttcttgccaccacccaaag

SEQ ID NO: 56393 - DNA, 20 bp, Artificial Sequence
  chemically synthesized
ttcttgccaccacccaaaga

SEQ ID NO: 56394 - DNA, 20 bp, Artificial Sequence
  chemically synthesized
accacccaaagaaggttgta

SEQ ID NO: 56395 - DNA, 20 bp, Artificial Sequence
  chemically synthesized
aaagaaggttgtatagcact

SEQ ID NO: 56396 - DNA, 20 bp, Artificial Sequence
  chemically synthesized
aactgcaaccgtgtatctct

SEQ ID NO: 56397 - DNA, 20 bp, Artificial Sequence
  chemically synthesized
actgcaaccgtgtatctctt

SEQ ID NO: 56398 - DNA, 20 bp, Artificial Sequence
  chemically synthesized
ttgccctcttccctccctat

SEQ ID NO: 56399 - DNA, 20 bp, Artificial Sequence
  chemically synthesized
cctccctatcagcatgtatc

SEQ ID NO: 56400 - DNA, 20 bp, Artificial Sequence
  chemically synthesized
ccctatcagcatgtatctag

SEQ ID NO: 56401 - DNA, 20 bp, Artificial Sequence
  chemically synthesized
gtatctagcagcattctgaa

SEQ ID NO: 56402 - DNA, 20 bp, Artificial Sequence
  chemically synthesized
attctgaaaagttaactgca

SEQ ID NO: 56403 - DNA, 20 bp, Artificial Sequence
  chemically synthesized
tgaaaagttaactgcacagt

SEQ ID NO: 56404 - DNA, 20 bp, Artificial Sequence
  chemically synthesized
actgcacagtgagcgactgc

SEQ ID NO: 56405 - DNA, 20 bp, Artificial Sequence
  chemically synthesized
ctgcacagtgagcgactgct

SEQ ID NO: 56406 - DNA, 20 bp, Artificial Sequence
  chemically synthesized
gagcgactgctgggcatctt

SEQ ID NO: 56407 - DNA, 20 bp, Artificial Sequence
  chemically synthesized
agcgactgctgggcatctta

SEQ ID NO: 56408 - DNA, 20 bp, Artificial Sequence
  chemically synthesized
gcgactgctgggcatcttaa

SEQ ID NO: 56409 - DNA, 20 bp, Artificial Sequence
  chemically synthesized
cgactgctgggcatcttaag

SEQ ID NO: 56410 - DNA, 20 bp, Artificial Sequence
  chemically synthesized
aaggggcattcttttctacc

SEQ ID NO: 56411 - DNA, 20 bp, Artificial Sequence
  chemically synthesized
aggggcattcttttctacct

SEQ ID NO: 56412 - DNA, 20 bp, Artificial Sequence
  chemically synthesized
ccccctcctccactcatgtc

SEQ ID NO: 56413 - DNA, 20 bp, Artificial Sequence
  chemically synthesized
ctccactcatgtctagcatg

SEQ ID NO: 56414 - DNA, 20 bp, Artificial Sequence
  chemically synthesized
tccactcatgtctagcatgc

SEQ ID NO: 56415 - DNA, 20 bp, Artificial Sequence
  chemically synthesized
catgtctagcatgcaggact

SEQ ID NO: 56416 - DNA, 20 bp, Artificial Sequence
  chemically synthesized
atgtctagcatgcaggactt

SEQ ID NO: 56417 - DNA, 20 bp, Artificial Sequence
  chemically synthesized
tgcaggacttgggtaatctc

SEQ ID NO: 56418 - DNA, 20 bp, Artificial Sequence
  chemically synthesized
gcaggacttgggtaatctct

SEQ ID NO: 56419 - DNA, 20 bp, Artificial Sequence
  chemically synthesized
caggacttgggtaatctctg

SEQ ID NO: 56420 - DNA, 20 bp, Artificial Sequence
  chemically synthesized
ttgggtaatctctggggttt

SEQ ID NO: 56421 - DNA, 20 bp, Artificial Sequence
  chemically synthesized
ctctggggtttcagattctc

SEQ ID NO: 56422 - DNA, 20 bp, Artificial Sequence
  chemically synthesized
tctccagacctccattctct

SEQ ID NO: 56423 - DNA, 20 bp, Artificial Sequence
  chemically synthesized
ctccagacctccattctctc

SEQ ID NO: 56424 - DNA, 20 bp, Artificial Sequence
  chemically synthesized
tccagacctccattctctca

SEQ ID NO: 56425 - DNA, 20 bp, Artificial Sequence
  chemically synthesized
ccagacctccattctctcag

SEQ ID NO: 56426 - DNA, 20 bp, Artificial Sequence
  chemically synthesized
ttccacctcctgctcatatc

SEQ ID NO: 56427 - DNA, 20 bp, Artificial Sequence
  chemically synthesized
ctcatatctagctatctgcc

SEQ ID NO: 56428 - DNA, 20 bp, Artificial Sequence
  chemically synthesized
ctaaccataaaatcttaaat

SEQ ID NO: 56429 - DNA, 20 bp, Artificial Sequence
  chemically synthesized
catgtcatgataaaaaaaat

SEQ ID NO: 56430 - DNA, 20 bp, Artificial Sequence
  chemically synthesized
taaaaaaaataagacaccat

SEQ ID NO: 56431 - DNA, 20 bp, Artificial Sequence
  chemically synthesized
aaaaaataagacaccatcag

SEQ ID NO: 56432 - DNA, 20 bp, Artificial Sequence
  chemically synthesized
tcagtggcaactgtgttgcc

SEQ ID NO: 56433 - DNA, 20 bp, Artificial Sequence
  chemically synthesized
ttgatctgctaatccctgtg

SEQ ID NO: 56434 - DNA, 20 bp, Artificial Sequence
  chemically synthesized
ccctgtgtagaaatgaacct

SEQ ID NO: 56435 - DNA, 20 bp, Artificial Sequence
  chemically synthesized
ctgtgtagaaatgaaccttg

SEQ ID NO: 56436 - DNA, 20 bp, Artificial Sequence
  chemically synthesized
tgtgtagaaatgaaccttgg

SEQ ID NO: 56437 - DNA, 20 bp, Artificial Sequence
  chemically synthesized
atttcttacaatatgtgcat

SEQ ID NO: 56438 - DNA, 20 bp, Artificial Sequence
  chemically synthesized
ttgtaacactgtcactttga

SEQ ID NO: 56439 - DNA, 20 bp, Artificial Sequence
  chemically synthesized
ctgtcactttgacagttgat

SEQ ID NO: 56440 - DNA, 20 bp, Artificial Sequence
  chemically synthesized
gttgataagcatcttctgaa

SEQ ID NO: 56441 - DNA, 20 bp, Artificial Sequence
  chemically synthesized
cttctgaatggtccctcctt

SEQ ID NO: 56442 - DNA, 20 bp, Artificial Sequence
  chemically synthesized
tcctttagttacaaaaatgt

SEQ ID NO: 56443 - DNA, 20 bp, Artificial Sequence
  chemically synthesized
gttacaaaaatgttggtgca

SEQ ID NO: 56444 - DNA, 20 bp, Artificial Sequence
  chemically synthesized
tgttggtgcatggatgatgt

SEQ ID NO: 56445 - DNA, 20 bp, Artificial Sequence
  chemically synthesized
gttggtgcatggatgatgtt

SEQ ID NO: 56446 - DNA, 20 bp, Artificial Sequence
  chemically synthesized
tgatgttgggaataaataaa

SEQ ID NO: 56447 - DNA, 20 bp, Artificial Sequence
  chemically synthesized
actaaattatgttctcatct

SEQ ID NO: 56448 - DNA, 20 bp, Artificial Sequence
  chemically synthesized
ctaaattatgttctcatctt

SEQ ID NO: 56449 - DNA, 20 bp, Artificial Sequence
  chemically synthesized
tctcatcttgggcaaaaatt

SEQ ID NO: 56450 - DNA, 20 bp, Artificial Sequence
  chemically synthesized
aaaattaagcaaaaaaaaaa

SEQ ID NO: 56451 - DNA, 20 bp, Artificial Sequence
  chemically synthesized
aattaagcaaaaaaaaaatg

SEQ ID NO: 56452 - DNA, 20 bp, Artificial Sequence
  chemically synthesized
attaagcaaaaaaaaaatgg

SEQ ID NO: 56453 - DNA, 20 bp, Artificial Sequence
  chemically synthesized
aaaaaaaaatggaggatatg

SEQ ID NO: 56454 - DNA, 20 bp, Artificial Sequence
  chemically synthesized
ggatatgaagctcctccaca

SEQ ID NO: 56455 - DNA, 20 bp, Artificial Sequence
  chemically synthesized
tatgaagctcctccacaaag

SEQ ID NO: 56456 - DNA, 20 bp, Artificial Sequence
  chemically synthesized
atgaagctcctccacaaaga

SEQ ID NO: 56457 - DNA, 20 bp, Artificial Sequence
  chemically synthesized
aaagaaggccatttttgtac

SEQ ID NO: 56458 - DNA, 20 bp, Artificial Sequence
  chemically synthesized
aagaaggccatttttgtact

SEQ ID NO: 56459 - DNA, 20 bp, Artificial Sequence
  chemically synthesized
tttttgtactaggcttacta

SEQ ID NO: 56460 - DNA, 20 bp, Artificial Sequence
  chemically synthesized
ctacagtgacacaccactat

SEQ ID NO: 56461 - DNA, 20 bp, Artificial Sequence
  chemically synthesized
agtgacacaccactattagt

SEQ ID NO: 56462 - DNA, 20 bp, Artificial Sequence
  chemically synthesized
gtgacacaccactattagtt

SEQ ID NO: 56463 - DNA, 20 bp, Artificial Sequence
  chemically synthesized
tgacacaccactattagttg

SEQ ID NO: 56464 - DNA, 20 bp, Artificial Sequence
  chemically synthesized
acacaccactattagttggg

SEQ ID NO: 56465 - DNA, 20 bp, Artificial Sequence
  chemically synthesized
actattagttggggagaatt

SEQ ID NO: 56466 - DNA, 20 bp, Artificial Sequence
  chemically synthesized
ggggagaattcagtttttcc

SEQ ID NO: 56467 - DNA, 20 bp, Artificial Sequence
  chemically synthesized
gggagaattcagtttttcca

SEQ ID NO: 56468 - DNA, 20 bp, Artificial Sequence
  chemically synthesized
cagtttttccaaggtgttga

SEQ ID NO: 56469 - DNA, 20 bp, Artificial Sequence
  chemically synthesized
agtttttccaaggtgttgat

SEQ ID NO: 56470 - DNA, 20 bp, Artificial Sequence
  chemically synthesized
ccaaggtgttgataggcatc

SEQ ID NO: 56471 - DNA, 20 bp, Artificial Sequence
  chemically synthesized
gttgataggcatccagattt

SEQ ID NO: 56472 - DNA, 20 bp, Artificial Sequence
  chemically synthesized
tgataggcatccagatttca

SEQ ID NO: 56473 - DNA, 20 bp, Artificial Sequence
  chemically synthesized
gataggcatccagatttcag

SEQ ID NO: 56474 - DNA, 20 bp, Artificial Sequence
  chemically synthesized
tttcagaggaaattgtaaaa

SEQ ID NO: 56475 - DNA, 20 bp, Artificial Sequence
  chemically synthesized
cagaggaaattgtaaaaaag

SEQ ID NO: 56476 - DNA, 20 bp, Artificial Sequence
  chemically synthesized
aattgtaaaaaagcagaacc

SEQ ID NO: 56477 - DNA, 20 bp, Artificial Sequence
  chemically synthesized
attgtaaaaaagcagaacct

SEQ ID NO: 56478 - DNA, 20 bp, Artificial Sequence
  chemically synthesized
actgcccacgatttttcttt

SEQ ID NO: 56479 - DNA, 20 bp, Artificial Sequence
  chemically synthesized
ttttctttgagatcaaatct

SEQ ID NO: 56480 - DNA, 20 bp, Artificial Sequence
  chemically synthesized
tttctttgagatcaaatctg

SEQ ID NO: 56481 - DNA, 20 bp, Artificial Sequence
  chemically synthesized
gaggcaacaaatctgttcaa

SEQ ID NO: 56482 - DNA, 20 bp, Artificial Sequence
  chemically synthesized
ttcaaaagctgctttctgcc

SEQ ID NO: 56483 - DNA, 20 bp, Artificial Sequence
  chemically synthesized
agctgctttctgcctggttg

SEQ ID NO: 56484 - DNA, 20 bp, Artificial Sequence
  chemically synthesized
ctttctgcctggttgtggca

SEQ ID NO: 56485 - DNA, 20 bp, Artificial Sequence
  chemically synthesized
tttctgcctggttgtggcaa

SEQ ID NO: 56486 - DNA, 20 bp, Artificial Sequence
  chemically synthesized
ttctgcctggttgtggcaaa

SEQ ID NO: 56487 - DNA, 20 bp, Artificial Sequence
  chemically synthesized
tgcctggttgtggcaaaggg

SEQ ID NO: 56488 - DNA, 20 bp, Artificial Sequence
  chemically synthesized
ggttgtggcaaagggtggcc

SEQ ID NO: 56489 - DNA, 20 bp, Artificial Sequence
  chemically synthesized
tgtggcaaagggtggccaag

SEQ ID NO: 56490 - DNA, 20 bp, Artificial Sequence
  chemically synthesized
gtggcaaagggtggccaagt

SEQ ID NO: 56491 - DNA, 20 bp, Artificial Sequence
  chemically synthesized
tggcaaagggtggccaagtg

SEQ ID NO: 56492 - DNA, 20 bp, Artificial Sequence
  chemically synthesized
aagggtggccaagtggggct

SEQ ID NO: 56493 - DNA, 20 bp, Artificial Sequence
  chemically synthesized
ctcagctgtgttcccattgc

SEQ ID NO: 56494 - DNA, 20 bp, Artificial Sequence
  chemically synthesized
tcagctgtgttcccattgca

SEQ ID NO: 56495 - DNA, 20 bp, Artificial Sequence
  chemically synthesized
gttcccattgcaaggctact

SEQ ID NO: 56496 - DNA, 20 bp, Artificial Sequence
  chemically synthesized
tactgagcatcccctgtcct

SEQ ID NO: 56497 - DNA, 20 bp, Artificial Sequence
  chemically synthesized
actgagcatcccctgtcctg

SEQ ID NO: 56498 - DNA, 20 bp, Artificial Sequence
  chemically synthesized
tcccctgtcctgaggctcct

SEQ ID NO: 56499 - DNA, 20 bp, Artificial Sequence
  chemically synthesized
cccctgtcctgaggctcctt

SEQ ID NO: 56500 - DNA, 20 bp, Artificial Sequence
  chemically synthesized
ctgaggctccttaggacacc

SEQ ID NO: 56501 - DNA, 20 bp, Artificial Sequence
  chemically synthesized
gctccttaggacacctggct

SEQ ID NO: 56502 - DNA, 20 bp, Artificial Sequence
  chemically synthesized
taggacacctggctgagctt

SEQ ID NO: 56503 - DNA, 20 bp, Artificial Sequence
  chemically synthesized
gacacctggctgagcttcag

SEQ ID NO: 56504 - DNA, 20 bp, Artificial Sequence
  chemically synthesized
agcttcagcagccctcttcc

SEQ ID NO: 56505 - DNA, 20 bp, Artificial Sequence
  chemically synthesized
cagcagccctcttccaagcc

SEQ ID NO: 56506 - DNA, 20 bp, Artificial Sequence
  chemically synthesized
gcagccctcttccaagcctg

SEQ ID NO: 56507 - DNA, 20 bp, Artificial Sequence
  chemically synthesized
tcttccaagcctggagatgc

SEQ ID NO: 56508 - DNA, 20 bp, Artificial Sequence
  chemically synthesized
ggagatgccagctccatctc

SEQ ID NO: 56509 - DNA, 20 bp, Artificial Sequence
  chemically synthesized
tccatctctggcacaaaatg

SEQ ID NO: 56510 - DNA, 20 bp, Artificial Sequence
  chemically synthesized
acaaaatgtagtgattttca

SEQ ID NO: 56511 - DNA, 20 bp, Artificial Sequence
  chemically synthesized
caaaatgtagtgattttcac

SEQ ID NO: 56512 - DNA, 20 bp, Artificial Sequence
  chemically synthesized
aaaatgtagtgattttcaca

SEQ ID NO: 56513 - DNA, 20 bp, Artificial Sequence
  chemically synthesized
tgtagtgattttcacagggt

SEQ ID NO: 56514 - DNA, 20 bp, Artificial Sequence
  chemically synthesized
tagtgattttcacagggtga

SEQ ID NO: 56515 - DNA, 20 bp, Artificial Sequence
  chemically synthesized
agtgattttcacagggtgag

SEQ ID NO: 56516 - DNA, 20 bp, Artificial Sequence
  chemically synthesized
ttcacagggtgagaggccaa

SEQ ID NO: 56517 - DNA, 20 bp, Artificial Sequence
  chemically synthesized
cacagggtgagaggccaaaa

SEQ ID NO: 56518 - DNA, 20 bp, Artificial Sequence
  chemically synthesized
acagggtgagaggccaaaag

SEQ ID NO: 56519 - DNA, 20 bp, Artificial Sequence
  chemically synthesized
caaaagaggctaataaaatg

SEQ ID NO: 56520 - DNA, 20 bp, Artificial Sequence
  chemically synthesized
agaggctaataaaatgaaga

SEQ ID NO: 56521 - DNA, 20 bp, Artificial Sequence
  chemically synthesized
ctaataaaatgaagatagcc

SEQ ID NO: 56522 - DNA, 20 bp, Artificial Sequence
  chemically synthesized
tgaagatagccaagcttcca

SEQ ID NO: 56523 - DNA, 20 bp, Artificial Sequence
  chemically synthesized
agccaagcttccatggaatt

SEQ ID NO: 56524 - DNA, 20 bp, Artificial Sequence
  chemically synthesized
gcttccatggaattaagcaa

SEQ ID NO: 56525 - DNA, 20 bp, Artificial Sequence
  chemically synthesized
cttccatggaattaagcaac

SEQ ID NO: 56526 - DNA, 20 bp, Artificial Sequence
  chemically synthesized
aggacaaccttgaccacttt

SEQ ID NO: 56527 - DNA, 20 bp, Artificial Sequence
  chemically synthesized
ggacaaccttgaccactttg

SEQ ID NO: 56528 - DNA, 20 bp, Artificial Sequence
  chemically synthesized
gacaaccttgaccactttga

SEQ ID NO: 56529 - DNA, 20 bp, Artificial Sequence
  chemically synthesized
acaaccttgaccactttgag

SEQ ID NO: 56530 - DNA, 20 bp, Artificial Sequence
  chemically synthesized
cttgaccactttgaggggtg

SEQ ID NO: 56531 - DNA, 20 bp, Artificial Sequence
  chemically synthesized
gaccactttgaggggtgtgg

SEQ ID NO: 56532 - DNA, 20 bp, Artificial Sequence
  chemically synthesized
accactttgaggggtgtggt

SEQ ID NO: 56533 - DNA, 20 bp, Artificial Sequence
  chemically synthesized
ccactttgaggggtgtggtg

SEQ ID NO: 56534 - DNA, 20 bp, Artificial Sequence
  chemically synthesized
cactttgaggggtgtggtgg

SEQ ID NO: 56535 - DNA, 20 bp, Artificial Sequence
  chemically synthesized
ggtgtggtgggggccacatg

SEQ ID NO: 56536 - DNA, 20 bp, Artificial Sequence
  chemically synthesized
tggtgggggccacatgcaga

SEQ ID NO: 56537 - DNA, 20 bp, Artificial Sequence
  chemically synthesized
gtgggggccacatgcagatg

SEQ ID NO: 56538 - DNA, 20 bp, Artificial Sequence
  chemically synthesized
ggggccacatgcagatggag

SEQ ID NO: 56539 - DNA, 20 bp, Artificial Sequence
  chemically synthesized
gggccacatgcagatggagt

SEQ ID NO: 56540 - DNA, 20 bp, Artificial Sequence
  chemically synthesized
catgcagatggagtgggtta

SEQ ID NO: 56541 - DNA, 20 bp, Artificial Sequence
  chemically synthesized
tgcagatggagtgggttaaa

SEQ ID NO: 56542 - DNA, 20 bp, Artificial Sequence
  chemically synthesized
ggagtgggttaaagagtgac

SEQ ID NO: 56543 - DNA, 20 bp, Artificial Sequence
  chemically synthesized
gtgggttaaagagtgactag

SEQ ID NO: 56544 - DNA, 20 bp, Artificial Sequence
  chemically synthesized
gggttaaagagtgactagaa

SEQ ID NO: 56545 - DNA, 20 bp, Artificial Sequence
  chemically synthesized
ttaaagagtgactagaagag

SEQ ID NO: 56546 - DNA, 20 bp, Artificial Sequence
  chemically synthesized
aagagtgactagaagagcag

SEQ ID NO: 56547 - DNA, 20 bp, Artificial Sequence
  chemically synthesized
agagtgactagaagagcagt

SEQ ID NO: 56548 - DNA, 20 bp, Artificial Sequence
  chemically synthesized
gagtgactagaagagcagtg

SEQ ID NO: 56549 - DNA, 20 bp, Artificial Sequence
  chemically synthesized
agtgactagaagagcagtgg

SEQ ID NO: 56550 - DNA, 20 bp, Artificial Sequence
  chemically synthesized
gactagaagagcagtggggg

SEQ ID NO: 56551 - DNA, 20 bp, Artificial Sequence
  chemically synthesized
tagaagagcagtgggggtgg

SEQ ID NO: 56552 - DNA, 20 bp, Artificial Sequence
  chemically synthesized
aagagcagtgggggtggcag

SEQ ID NO: 56553 - DNA, 20 bp, Artificial Sequence
  chemically synthesized
agagcagtgggggtggcagc

SEQ ID NO: 56554 - DNA, 20 bp, Artificial Sequence
  chemically synthesized
agcagtgggggtggcagcag

SEQ ID NO: 56555 - DNA, 20 bp, Artificial Sequence
  chemically synthesized
cagtgggggtggcagcagga

SEQ ID NO: 56556 - DNA, 20 bp, Artificial Sequence
  chemically synthesized
tgggggtggcagcaggagag

SEQ ID NO: 56557 - DNA, 20 bp, Artificial Sequence
  chemically synthesized
gtggcagcaggagagaagcc

SEQ ID NO: 56558 - DNA, 20 bp, Artificial Sequence
  chemically synthesized
ggagagaagcctggctctga

SEQ ID NO: 56559 - DNA, 20 bp, Artificial Sequence
  chemically synthesized
gagaagcctggctctgaaag

SEQ ID NO: 56560 - DNA, 20 bp, Artificial Sequence
  chemically synthesized
agcctggctctgaaagcagc

SEQ ID NO: 56561 - DNA, 20 bp, Artificial Sequence
  chemically synthesized
tctgaaagcagcgagacttc

SEQ ID NO: 56562 - DNA, 20 bp, Artificial Sequence
  chemically synthesized
ctgaaagcagcgagacttct

SEQ ID NO: 56563 - DNA, 20 bp, Artificial Sequence
  chemically synthesized
tgaaagcagcgagacttcta

SEQ ID NO: 56564 - DNA, 20 bp, Artificial Sequence
  chemically synthesized
agcgagacttctagggaata

SEQ ID NO: 56565 - DNA, 20 bp, Artificial Sequence
  chemically synthesized
gcgagacttctagggaatac

SEQ ID NO: 56566 - DNA, 20 bp, Artificial Sequence
  chemically synthesized
cgagacttctagggaataca

SEQ ID NO: 56567 - DNA, 20 bp, Artificial Sequence
  chemically synthesized
acttctagggaatacagggt

SEQ ID NO: 56568 - DNA, 20 bp, Artificial Sequence
  chemically synthesized
cttctagggaatacagggtc

SEQ ID NO: 56569 - DNA, 20 bp, Artificial Sequence
  chemically synthesized
ttctagggaatacagggtca

SEQ ID NO: 56570 - DNA, 20 bp, Artificial Sequence
  chemically synthesized
tctagggaatacagggtcag

SEQ ID NO: 56571 - DNA, 20 bp, Artificial Sequence
  chemically synthesized
tagggaatacagggtcaggg

SEQ ID NO: 56572 - DNA, 20 bp, Artificial Sequence
  chemically synthesized
agggaatacagggtcagggg

SEQ ID NO: 56573 - DNA, 20 bp, Artificial Sequence
  chemically synthesized
agggtcaggggaggttctga

SEQ ID NO: 56574 - DNA, 20 bp, Artificial Sequence
  chemically synthesized
ttctgaaagatgacacactg

SEQ ID NO: 56575 - DNA, 20 bp, Artificial Sequence
  chemically synthesized
ctgaaagatgacacactgca

SEQ ID NO: 56576 - DNA, 20 bp, Artificial Sequence
  chemically synthesized
tgtgtttgtatgccgatgac

SEQ ID NO: 56577 - DNA, 20 bp, Artificial Sequence
  chemically synthesized
gtatgccgatgacaagtatc

SEQ ID NO: 56578 - DNA, 20 bp, Artificial Sequence
  chemically synthesized
tgccgatgacaagtatccag

SEQ ID NO: 56579 - DNA, 20 bp, Artificial Sequence
  chemically synthesized
gatgacaagtatccagtaga

SEQ ID NO: 56580 - DNA, 20 bp, Artificial Sequence
  chemically synthesized
atgacaagtatccagtagaa

SEQ ID NO: 56581 - DNA, 20 bp, Artificial Sequence
  chemically synthesized
acaagtatccagtagaaagg

SEQ ID NO: 56582 - DNA, 20 bp, Artificial Sequence
  chemically synthesized
ccagtagaaaggcagatgaa

SEQ ID NO: 56583 - DNA, 20 bp, Artificial Sequence
  chemically synthesized
gatgaacagattctcattct

SEQ ID NO: 56584 - DNA, 20 bp, Artificial Sequence
  chemically synthesized
aacagattctcattctcaga

SEQ ID NO: 56585 - DNA, 20 bp, Artificial Sequence
  chemically synthesized
acagattctcattctcagaa

SEQ ID NO: 56586 - DNA, 20 bp, Artificial Sequence
  chemically synthesized
aaggcctgtcctgacctcct

SEQ ID NO: 56587 - DNA, 20 bp, Artificial Sequence
  chemically synthesized
ggcctgtcctgacctcctga

SEQ ID NO: 56588 - DNA, 20 bp, Artificial Sequence
  chemically synthesized
cctgacctcctgagagtaca

SEQ ID NO: 56589 - DNA, 20 bp, Artificial Sequence
  chemically synthesized
cctgagagtacacagaccat

SEQ ID NO: 56590 - DNA, 20 bp, Artificial Sequence
  chemically synthesized
ctgagagtacacagaccatg

SEQ ID NO: 56591 - DNA, 20 bp, Artificial Sequence
  chemically synthesized
tgagagtacacagaccatga

SEQ ID NO: 56592 - DNA, 20 bp, Artificial Sequence
  chemically synthesized
gagtacacagaccatgaggg

SEQ ID NO: 56593 - DNA, 20 bp, Artificial Sequence
  chemically synthesized
agtacacagaccatgagggc

SEQ ID NO: 56594 - DNA, 20 bp, Artificial Sequence
  chemically synthesized
gtacacagaccatgagggca

SEQ ID NO: 56595 - DNA, 20 bp, Artificial Sequence
  chemically synthesized
acagaccatgagggcagggc

SEQ ID NO: 56596 - DNA, 20 bp, Artificial Sequence
  chemically synthesized
cagaccatgagggcagggca

SEQ ID NO: 56597 - DNA, 20 bp, Artificial Sequence
  chemically synthesized
gaccatgagggcagggcaag

SEQ ID NO: 56598 - DNA, 20 bp, Artificial Sequence
  chemically synthesized
accatgagggcagggcaagg

SEQ ID NO: 56599 - DNA, 20 bp, Artificial Sequence
  chemically synthesized
catgagggcagggcaaggag

SEQ ID NO: 56600 - DNA, 20 bp, Artificial Sequence
  chemically synthesized
atgagggcagggcaaggagg

SEQ ID NO: 56601 - DNA, 20 bp, Artificial Sequence
  chemically synthesized
cacgctcactgtttcatgca

SEQ ID NO: 56602 - DNA, 20 bp, Artificial Sequence
  chemically synthesized
actgtttcatgcaaagtcct

SEQ ID NO: 56603 - DNA, 20 bp, Artificial Sequence
  chemically synthesized
tcatgcaaagtccttggcca

SEQ ID NO: 56604 - DNA, 20 bp, Artificial Sequence
  chemically synthesized
caatttaatatgctctatgc

SEQ ID NO: 56605 - DNA, 20 bp, Artificial Sequence
  chemically synthesized
tatgctctatgctggaaaac

SEQ ID NO: 56606 - DNA, 20 bp, Artificial Sequence
  chemically synthesized
tggaaaactggattattgaa

SEQ ID NO: 56607 - DNA, 20 bp, Artificial Sequence
  chemically synthesized
ggaaaactggattattgaac

SEQ ID NO: 56608 - DNA, 20 bp, Artificial Sequence
  chemically synthesized
ctggattattgaacaggcat

SEQ ID NO: 56609 - DNA, 20 bp, Artificial Sequence
  chemically synthesized
tctgaacctaatccactaaa

SEQ ID NO: 56610 - DNA, 20 bp, Artificial Sequence
  chemically synthesized
atccactaaaaagcacttga

SEQ ID NO: 56611 - DNA, 20 bp, Artificial Sequence
  chemically synthesized
agatatatcaaaatatcatt

SEQ ID NO: 56612 - DNA, 20 bp, Artificial Sequence
  chemically synthesized
atcaaaatatcattgagaaa

SEQ ID NO: 56613 - DNA, 20 bp, Artificial Sequence
  chemically synthesized
tcattgagaaatagatattt

SEQ ID NO: 56614 - DNA, 20 bp, Artificial Sequence
  chemically synthesized
cattgagaaatagatatttt

SEQ ID NO: 56615 - DNA, 20 bp, Artificial Sequence
  chemically synthesized
ctcatttgaactctcttttc

SEQ ID NO: 56616 - DNA, 20 bp, Artificial Sequence
  chemically synthesized
tcatttgaactctcttttcc

SEQ ID NO: 56617 - DNA, 20 bp, Artificial Sequence
  chemically synthesized
tttgaactctcttttccagg

SEQ ID NO: 56618 - DNA, 20 bp, Artificial Sequence
  chemically synthesized
tgaactctcttttccaggaa

SEQ ID NO: 56619 - DNA, 20 bp, Artificial Sequence
  chemically synthesized
tttccaggaagagttgtgct

SEQ ID NO: 56620 - DNA, 20 bp, Artificial Sequence
  chemically synthesized
ttccaggaagagttgtgctt

SEQ ID NO: 56621 - DNA, 20 bp, Artificial Sequence
  chemically synthesized
ttgtgcttgggtaaattcta

SEQ ID NO: 56622 - DNA, 20 bp, Artificial Sequence
  chemically synthesized
tgggtaaattctatagctca

SEQ ID NO: 56623 - DNA, 20 bp, Artificial Sequence
  chemically synthesized
aaaacacacaataaattaat

SEQ ID NO: 56624 - DNA, 20 bp, Artificial Sequence
  chemically synthesized
aaacacacaataaattaata

SEQ ID NO: 56625 - DNA, 20 bp, Artificial Sequence
  chemically synthesized
aattaataaggtgcttccta

SEQ ID NO: 56626 - DNA, 20 bp, Artificial Sequence
  chemically synthesized
aataaggtgcttcctacagt

SEQ ID NO: 56627 - DNA, 20 bp, Artificial Sequence
  chemically synthesized
ggtgcttcctacagtgagtt

SEQ ID NO: 56628 - DNA, 20 bp, Artificial Sequence
  chemically synthesized
gagttcagttaaacattttg

SEQ ID NO: 56629 - DNA, 20 bp, Artificial Sequence
  chemically synthesized
gttcagttaaacattttgaa

SEQ ID NO: 56630 - DNA, 20 bp, Artificial Sequence
  chemically synthesized
tgaagagtgtttttgaaatg

SEQ ID NO: 56631 - DNA, 20 bp, Artificial Sequence
  chemically synthesized
agagtgtttttgaaatgtag

SEQ ID NO: 56632 - DNA, 20 bp, Artificial Sequence
  chemically synthesized
agtgtttttgaaatgtagca

SEQ ID NO: 56633 - DNA, 20 bp, Artificial Sequence
  chemically synthesized
gtttttgaaatgtagcagag

SEQ ID NO: 56634 - DNA, 20 bp, Artificial Sequence
  chemically synthesized
tttttgaaatgtagcagagc

SEQ ID NO: 56635 - DNA, 20 bp, Artificial Sequence
  chemically synthesized
ggctacaattgatattcaaa

SEQ ID NO: 56636 - DNA, 20 bp, Artificial Sequence
  chemically synthesized
ctacaattgatattcaaaaa

SEQ ID NO: 56637 - DNA, 20 bp, Artificial Sequence
  chemically synthesized
tacaattgatattcaaaaag

SEQ ID NO: 56638 - DNA, 20 bp, Artificial Sequence
  chemically synthesized
atttatttccccctttaact

SEQ ID NO: 56639 - DNA, 20 bp, Artificial Sequence
  chemically synthesized
tgtcattttattatgcttca

SEQ ID NO: 56640 - DNA, 20 bp, Artificial Sequence
  chemically synthesized
tcattttattatgcttcata

SEQ ID NO: 56641 - DNA, 20 bp, Artificial Sequence
  chemically synthesized
cttcatagagcatcactgct

SEQ ID NO: 56642 - DNA, 20 bp, Artificial Sequence
  chemically synthesized
cactgctgagatcccctccc

SEQ ID NO: 56643 - DNA, 20 bp, Artificial Sequence
  chemically synthesized
ccctccccagctcatgttgc

SEQ ID NO: 56644 - DNA, 20 bp, Artificial Sequence
  chemically synthesized
cctccccagctcatgttgct

SEQ ID NO: 56645 - DNA, 20 bp, Artificial Sequence
  chemically synthesized
tgctaggaaatatcccaaaa

SEQ ID NO: 56646 - DNA, 20 bp, Artificial Sequence
  chemically synthesized
ttgtttctctgattcacctc

SEQ ID NO: 56647 - DNA, 20 bp, Artificial Sequence
  chemically synthesized
tgtttctctgattcacctcc

SEQ ID NO: 56648 - DNA, 20 bp, Artificial Sequence
  chemically synthesized
gtttctctgattcacctcca

SEQ ID NO: 56649 - DNA, 20 bp, Artificial Sequence
  chemically synthesized
attcacctccagggctcata

SEQ ID NO: 56650 - DNA, 20 bp, Artificial Sequence
  chemically synthesized
ctccagggctcatatggcaa

SEQ ID NO: 56651 - DNA, 20 bp, Artificial Sequence
  chemically synthesized
tccagggctcatatggcaat

SEQ ID NO: 56652 - DNA, 20 bp, Artificial Sequence
  chemically synthesized
ccagggctcatatggcaatg

SEQ ID NO: 56653 - DNA, 20 bp, Artificial Sequence
  chemically synthesized
atatggcaatggggatttaa

SEQ ID NO: 56654 - DNA, 20 bp, Artificial Sequence
  chemically synthesized
tatggcaatggggatttaat

SEQ ID NO: 56655 - DNA, 20 bp, Artificial Sequence
  chemically synthesized
atggcaatggggatttaata

SEQ ID NO: 56656 - DNA, 20 bp, Artificial Sequence
  chemically synthesized
atttaatagggtttatttgt

SEQ ID NO: 56657 - DNA, 20 bp, Artificial Sequence
  chemically synthesized
atagggtttatttgttggtg

SEQ ID NO: 56658 - DNA, 20 bp, Artificial Sequence
  chemically synthesized
acattaaacaaatcttttaa

SEQ ID NO: 56659 - DNA, 20 bp, Artificial Sequence
  chemically synthesized
cattaaacaaatcttttaat

SEQ ID NO: 56660 - DNA, 20 bp, Artificial Sequence
  chemically synthesized
ggaaaaatacttttatatta

SEQ ID NO: 56661 - DNA, 20 bp, Artificial Sequence
  chemically synthesized
gaaaaatacttttatattat

SEQ ID NO: 56662 - DNA, 20 bp, Artificial Sequence
  chemically synthesized
tttatattataggcaaaatg

SEQ ID NO: 56663 - DNA, 20 bp, Artificial Sequence
  chemically synthesized
gtagatgtatattgctactg

SEQ ID NO: 56664 - DNA, 20 bp, Artificial Sequence
  chemically synthesized
aagtaaatgtattttattaa

SEQ ID NO: 56665 - DNA, 20 bp, Artificial Sequence
  chemically synthesized
atgtattttattaatggtgt

SEQ ID NO: 56666 - DNA, 20 bp, Artificial Sequence
  chemically synthesized
tgagaatttcttcctcactg

SEQ ID NO: 56667 - DNA, 20 bp, Artificial Sequence
  chemically synthesized
atgcatatttgcatgtgtaa

SEQ ID NO: 56668 - DNA, 20 bp, Artificial Sequence
  chemically synthesized
atttgcatgtgtaaaagact

SEQ ID NO: 56669 - DNA, 20 bp, Artificial Sequence
  chemically synthesized
aagacttagcaatttgtgaa

SEQ ID NO: 56670 - DNA, 20 bp, Artificial Sequence
  chemically synthesized
acttagcaatttgtgaatag

SEQ ID NO: 56671 - DNA, 20 bp, Artificial Sequence
  chemically synthesized
atgtttctccgcttctcact

SEQ ID NO: 56672 - DNA, 20 bp, Artificial Sequence
  chemically synthesized
tctccgcttctcactgagca

SEQ ID NO: 56673 - DNA, 20 bp, Artificial Sequence
  chemically synthesized
ctcactgagcatggctgtaa

SEQ ID NO: 56674 - DNA, 20 bp, Artificial Sequence
  chemically synthesized
aagaaactttttcctctccc

SEQ ID NO: 56675 - DNA, 20 bp, Artificial Sequence
  chemically synthesized
agaaactttttcctctcccc

SEQ ID NO: 56676 - DNA, 20 bp, Artificial Sequence
  chemically synthesized
tttcctctccccgggcattc

SEQ ID NO: 56677 - DNA, 20 bp, Artificial Sequence
  chemically synthesized
ccgggcattccagcacacat

SEQ ID NO: 56678 - DNA, 20 bp, Artificial Sequence
  chemically synthesized
gcattccagcacacattgga

SEQ ID NO: 56679 - DNA, 20 bp, Artificial Sequence
  chemically synthesized
ttggaaagataacacgtcca

SEQ ID NO: 56680 - DNA, 20 bp, Artificial Sequence
  chemically synthesized
aaagataacacgtccacaga

SEQ ID NO: 56681 - DNA, 20 bp, Artificial Sequence
  chemically synthesized
taacacgtccacagaaagcc

SEQ ID NO: 56682 - DNA, 20 bp, Artificial Sequence
  chemically synthesized
cagaaagcctggctttccaa

SEQ ID NO: 56683 - DNA, 20 bp, Artificial Sequence
  chemically synthesized
gaaagcctggctttccaaaa

SEQ ID NO: 56684 - DNA, 20 bp, Artificial Sequence
  chemically synthesized
ggctttccaaaagagcttat

SEQ ID NO: 56685 - DNA, 20 bp, Artificial Sequence
  chemically synthesized
ctttccaaaagagcttatca

SEQ ID NO: 56686 - DNA, 20 bp, Artificial Sequence
  chemically synthesized
ttatcagagaatgtgccccc

SEQ ID NO: 56687 - DNA, 20 bp, Artificial Sequence
  chemically synthesized
tatcagagaatgtgcccccc

SEQ ID NO: 56688 - DNA, 20 bp, Artificial Sequence
  chemically synthesized
taaaacatatgttaatcctg

SEQ ID NO: 56689 - DNA, 20 bp, Artificial Sequence
  chemically synthesized
aacatatgttaatcctgtgg

SEQ ID NO: 56690 - DNA, 20 bp, Artificial Sequence
  chemically synthesized
catatgttaatcctgtggca

SEQ ID NO: 56691 - DNA, 20 bp, Artificial Sequence
  chemically synthesized
atgttaatcctgtggcagag

SEQ ID NO: 56692 - DNA, 20 bp, Artificial Sequence
  chemically synthesized
tgtggcagagaagtttgttc

SEQ ID NO: 56693 - DNA, 20 bp, Artificial Sequence
  chemically synthesized
gagaagtttgttctagcctt

SEQ ID NO: 56694 - DNA, 20 bp, Artificial Sequence
  chemically synthesized
agaagtttgttctagccttt

SEQ ID NO: 56695 - DNA, 20 bp, Artificial Sequence
  chemically synthesized
tttgttctagcctttgggtg

SEQ ID NO: 56696 - DNA, 20 bp, Artificial Sequence
  chemically synthesized
ttgggtgtagcctgctgaat

SEQ ID NO: 56697 - DNA, 20 bp, Artificial Sequence
  chemically synthesized
tagcctgctgaataagttca

SEQ ID NO: 56698 - DNA, 20 bp, Artificial Sequence
  chemically synthesized
gttcacagtgatctacatcc

SEQ ID NO: 56699 - DNA, 20 bp, Artificial Sequence
  chemically synthesized
gatctacatcctagtttcca

SEQ ID NO: 56700 - DNA, 20 bp, Artificial Sequence
  chemically synthesized
atctacatcctagtttccat

SEQ ID NO: 56701 - DNA, 20 bp, Artificial Sequence
  chemically synthesized
ctagtttccatgggctgaaa

SEQ ID NO: 56702 - DNA, 20 bp, Artificial Sequence
  chemically synthesized
ccctgcactccctacacaca

SEQ ID NO: 56703 - DNA, 20 bp, Artificial Sequence
  chemically synthesized
actccctacacacacagaca

SEQ ID NO: 56704 - DNA, 20 bp, Artificial Sequence
  chemically synthesized
ttctttgatattttcttgaa

SEQ ID NO: 56705 - DNA, 20 bp, Artificial Sequence
  chemically synthesized
ttcaaatgtgtttgacttta

SEQ ID NO: 56706 - DNA, 20 bp, Artificial Sequence
  chemically synthesized
tcaacttgtaaaattttatc

SEQ ID NO: 56707 - DNA, 20 bp, Artificial Sequence
  chemically synthesized
aaattttatctggtaattta

SEQ ID NO: 56708 - DNA, 20 bp, Artificial Sequence
  chemically synthesized
taatttatagattaaattgc

SEQ ID NO: 56709 - DNA, 20 bp, Artificial Sequence
  chemically synthesized
agcatctacctccctttcat

SEQ ID NO: 56710 - DNA, 20 bp, Artificial Sequence
  chemically synthesized
ctttcatcagactctccctg

SEQ ID NO: 56711 - DNA, 20 bp, Artificial Sequence
  chemically synthesized
tttcatcagactctccctgc

SEQ ID NO: 56712 - DNA, 20 bp, Artificial Sequence
  chemically synthesized
ttcatcagactctccctgca

SEQ ID NO: 56713 - DNA, 20 bp, Artificial Sequence
  chemically synthesized
tcagactctccctgcagggc

SEQ ID NO: 56714 - DNA, 20 bp, Artificial Sequence
  chemically synthesized
tctaactatgtatgtgcttc

SEQ ID NO: 56715 - DNA, 20 bp, Artificial Sequence
  chemically synthesized
actatgtatgtgcttcaaga

SEQ ID NO: 56716 - DNA, 20 bp, Artificial Sequence
  chemically synthesized
tgcttcaagatggaactcct

SEQ ID NO: 56717 - DNA, 20 bp, Artificial Sequence
  chemically synthesized
agatggaactcctgagttca

SEQ ID NO: 56718 - DNA, 20 bp, Artificial Sequence
  chemically synthesized
gatggaactcctgagttcac

SEQ ID NO: 56719 - DNA, 20 bp, Artificial Sequence
  chemically synthesized
cacaggtgatttataaacca

SEQ ID NO: 56720 - DNA, 20 bp, Artificial Sequence
  chemically synthesized
actacaaaactctcaccctc

SEQ ID NO: 56721 - DNA, 20 bp, Artificial Sequence
  chemically synthesized
tacaaaactctcaccctcca

SEQ ID NO: 56722 - DNA, 20 bp, Artificial Sequence
  chemically synthesized
accctccagagatttgcctc

SEQ ID NO: 56723 - DNA, 20 bp, Artificial Sequence
  chemically synthesized
ccctccagagatttgcctca

SEQ ID NO: 56724 - DNA, 20 bp, Artificial Sequence
  chemically synthesized
cctccagagatttgcctcaa

SEQ ID NO: 56725 - DNA, 20 bp, Artificial Sequence
  chemically synthesized
gggacaacaccctgctcaca

SEQ ID NO: 56726 - DNA, 20 bp, Artificial Sequence
  chemically synthesized
ggacaacaccctgctcacaa

SEQ ID NO: 56727 - DNA, 20 bp, Artificial Sequence
  chemically synthesized
caccctgctcacaaaggcac

SEQ ID NO: 56728 - DNA, 20 bp, Artificial Sequence
  chemically synthesized
cctgctcacaaaggcaccag

SEQ ID NO: 56729 - DNA, 20 bp, Artificial Sequence
  chemically synthesized
ctgctcacaaaggcaccagc

SEQ ID NO: 56730 - DNA, 20 bp, Artificial Sequence
  chemically synthesized
caggcaactgctcaactacc

SEQ ID NO: 56731 - DNA, 20 bp, Artificial Sequence
  chemically synthesized
gcaactgctcaactacctgg

SEQ ID NO: 56732 - DNA, 20 bp, Artificial Sequence
  chemically synthesized
tgctcaactacctggtggat

SEQ ID NO: 56733 - DNA, 20 bp, Artificial Sequence
  chemically synthesized
gctcaactacctggtggata

SEQ ID NO: 56734 - DNA, 20 bp, Artificial Sequence
  chemically synthesized
acctggtggataaggtgccc

SEQ ID NO: 56735 - DNA, 20 bp, Artificial Sequence
  chemically synthesized
ggtggataaggtgcccaagc

SEQ ID NO: 56736 - DNA, 20 bp, Artificial Sequence
  chemically synthesized
ataaggtgcccaagctagca

SEQ ID NO: 56737 - DNA, 20 bp, Artificial Sequence
  chemically synthesized
cctcctctgttgccttttaa

SEQ ID NO: 56738 - DNA, 20 bp, Artificial Sequence
  chemically synthesized
agtgccactttctgctccta

SEQ ID NO: 56739 - DNA, 20 bp, Artificial Sequence
  chemically synthesized
cactttctgctcctaaagtg

SEQ ID NO: 56740 - DNA, 20 bp, Artificial Sequence
  chemically synthesized
tttctgctcctaaagtgaag

SEQ ID NO: 56741 - DNA, 20 bp, Artificial Sequence
  chemically synthesized
gctcctaaagtgaagtagta

SEQ ID NO: 56742 - DNA, 20 bp, Artificial Sequence
  chemically synthesized
cctaaagtgaagtagtacgg

SEQ ID NO: 56743 - DNA, 20 bp, Artificial Sequence
  chemically synthesized
ctaaagtgaagtagtacggc

SEQ ID NO: 56744 - DNA, 20 bp, Artificial Sequence
  chemically synthesized
actgctgcatttcttcccct

SEQ ID NO: 56745 - DNA, 20 bp, Artificial Sequence
  chemically synthesized
ctgcatttcttcccctaagc

SEQ ID NO: 56746 - DNA, 20 bp, Artificial Sequence
  chemically synthesized
ttcttcccctaagctagctt

SEQ ID NO: 56747 - DNA, 20 bp, Artificial Sequence
  chemically synthesized
ttcccctaagctagctttgg

SEQ ID NO: 56748 - DNA, 20 bp, Artificial Sequence
  chemically synthesized
gcaaatcactttctttatac

SEQ ID NO: 56749 - DNA, 20 bp, Artificial Sequence
  chemically synthesized
cagacttctctcttcttaat

SEQ ID NO: 56750 - DNA, 20 bp, Artificial Sequence
  chemically synthesized
tcttcttaattggattctgc

SEQ ID NO: 56751 - DNA, 20 bp, Artificial Sequence
  chemically synthesized
tcttaattggattctgcaag

SEQ ID NO: 56752 - DNA, 20 bp, Artificial Sequence
  chemically synthesized
caaacaattaacctgctctt

SEQ ID NO: 56753 - DNA, 20 bp, Artificial Sequence
  chemically synthesized
aacctgctcttcagttacat

SEQ ID NO: 56754 - DNA, 20 bp, Artificial Sequence
  chemically synthesized
cagttacattggaatgtgtt

SEQ ID NO: 56755 - DNA, 20 bp, Artificial Sequence
  chemically synthesized
agatttattttttcaaatgt

SEQ ID NO: 56756 - DNA, 20 bp, Artificial Sequence
  chemically synthesized
ttttttcaaatgttggaaca

SEQ ID NO: 56757 - DNA, 20 bp, Artificial Sequence
  chemically synthesized
atgttggaacaaagatgaaa

SEQ ID NO: 56758 - DNA, 20 bp, Artificial Sequence
  chemically synthesized
tggaacaaagatgaaaaagt

SEQ ID NO: 56759 - DNA, 20 bp, Artificial Sequence
  chemically synthesized
aacaaagatgaaaaagtgag

SEQ ID NO: 56760 - DNA, 20 bp, Artificial Sequence
  chemically synthesized
caaagatgaaaaagtgagaa

SEQ ID NO: 56761 - DNA, 20 bp, Artificial Sequence
  chemically synthesized
tgaaaaagtgagaagagccc

SEQ ID NO: 56762 - DNA, 20 bp, Artificial Sequence
  chemically synthesized
aagagccctagattttttct

SEQ ID NO: 56763 - DNA, 20 bp, Artificial Sequence
  chemically synthesized
tagattttttcttggaaatc

SEQ ID NO: 56764 - DNA, 20 bp, Artificial Sequence
  chemically synthesized
ttggaaatctggcttaaatc

SEQ ID NO: 56765 - DNA, 20 bp, Artificial Sequence
  chemically synthesized
tggaaatctggcttaaatcc

SEQ ID NO: 56766 - DNA, 20 bp, Artificial Sequence
  chemically synthesized
gtttctttatttccttgatt

SEQ ID NO: 56767 - DNA, 20 bp, Artificial Sequence
  chemically synthesized
tttctttatttccttgattt

SEQ ID NO: 56768 - DNA, 20 bp, Artificial Sequence
  chemically synthesized
atttccttgatttgggaatt

SEQ ID NO: 56769 - DNA, 20 bp, Artificial Sequence
  chemically synthesized
tgatttgggaatttggtcac

SEQ ID NO: 56770 - DNA, 20 bp, Artificial Sequence
  chemically synthesized
acaaataacatgattttcct

SEQ ID NO: 56771 - DNA, 20 bp, Artificial Sequence
  chemically synthesized
taacatgattttcctaagtc

SEQ ID NO: 56772 - DNA, 20 bp, Artificial Sequence
  chemically synthesized
agatttctttgtttataaaa

SEQ ID NO: 56773 - DNA, 20 bp, Artificial Sequence
  chemically synthesized
gatttctttgtttataaaat

SEQ ID NO: 56774 - DNA, 20 bp, Artificial Sequence
  chemically synthesized
atttctttgtttataaaatg

SEQ ID NO: 56775 - DNA, 20 bp, Artificial Sequence
  chemically synthesized
tgctaccctacctataccat

SEQ ID NO: 56776 - DNA, 20 bp, Artificial Sequence
  chemically synthesized
acctataccatgagctaaat

SEQ ID NO: 56777 - DNA, 20 bp, Artificial Sequence
  chemically synthesized
ataccatgagctaaataagc

SEQ ID NO: 56778 - DNA, 20 bp, Artificial Sequence
  chemically synthesized
taaataagctagtatttgta

SEQ ID NO: 56779 - DNA, 20 bp, Artificial Sequence
  chemically synthesized
aaataagctagtatttgtaa

SEQ ID NO: 56780 - DNA, 20 bp, Artificial Sequence
  chemically synthesized
cttacattcacaatcacaca

SEQ ID NO: 56781 - DNA, 20 bp, Artificial Sequence
  chemically synthesized
tgtatgtatgtataaaaatg

SEQ ID NO: 56782 - DNA, 20 bp, Artificial Sequence
  chemically synthesized
gtatgtatgtataaaaatgt

SEQ ID NO: 56783 - DNA, 20 bp, Artificial Sequence
  chemically synthesized
tatgtatgtataaaaatgtg

SEQ ID NO: 56784 - DNA, 20 bp, Artificial Sequence
  chemically synthesized
acccactcaacaaataccct

SEQ ID NO: 56785 - DNA, 20 bp, Artificial Sequence
  chemically synthesized
cattatatgcgtatatcatc

SEQ ID NO: 56786 - DNA, 20 bp, Artificial Sequence
  chemically synthesized
tgcgtatatcatctggcaaa

SEQ ID NO: 56787 - DNA, 20 bp, Artificial Sequence
  chemically synthesized
atggatgtgtataatttctc

SEQ ID NO: 56788 - DNA, 20 bp, Artificial Sequence
  chemically synthesized
tggatgtgtataatttctcc

SEQ ID NO: 56789 - DNA, 20 bp, Artificial Sequence
  chemically synthesized
ggatgtgtataatttctcca

SEQ ID NO: 56790 - DNA, 20 bp, Artificial Sequence
  chemically synthesized
tgtataatttctccagggat

SEQ ID NO: 56791 - DNA, 20 bp, Artificial Sequence
  chemically synthesized
ataatttctccagggataag

SEQ ID NO: 56792 - DNA, 20 bp, Artificial Sequence
  chemically synthesized
aagaagcaaatgtataccga

SEQ ID NO: 56793 - DNA, 20 bp, Artificial Sequence
  chemically synthesized
agcaaatgtataccgatgga

SEQ ID NO: 56794 - DNA, 20 bp, Artificial Sequence
  chemically synthesized
taccgatggaaagccttact

SEQ ID NO: 56795 - DNA, 20 bp, Artificial Sequence
  chemically synthesized
accgatggaaagccttactc

SEQ ID NO: 56796 - DNA, 20 bp, Artificial Sequence
  chemically synthesized
gccttactcaggccataaca

SEQ ID NO: 56797 - DNA, 20 bp, Artificial Sequence
  chemically synthesized
cttactcaggccataacaaa

SEQ ID NO: 56798 - DNA, 20 bp, Artificial Sequence
  chemically synthesized
tactcaggccataacaaaga

SEQ ID NO: 56799 - DNA, 20 bp, Artificial Sequence
  chemically synthesized
ataacaaagagagaaatgct

SEQ ID NO: 56800 - DNA, 20 bp, Artificial Sequence
  chemically synthesized
gctgagtcccactccatgaa

SEQ ID NO: 56801 - DNA, 20 bp, Artificial Sequence
  chemically synthesized
ctgagtcccactccatgaac

SEQ ID NO: 56802 - DNA, 20 bp, Artificial Sequence
  chemically synthesized
tcccactccatgaacaggtc

SEQ ID NO: 56803 - DNA, 20 bp, Artificial Sequence
  chemically synthesized
cccactccatgaacaggtca

SEQ ID NO: 56804 - DNA, 20 bp, Artificial Sequence
  chemically synthesized
caaggaaccaaacatattca

SEQ ID NO: 56805 - DNA, 20 bp, Artificial Sequence
  chemically synthesized
aggaaccaaacatattcaaa

SEQ ID NO: 56806 - DNA, 20 bp, Artificial Sequence
  chemically synthesized
atttcattgtttcaacttgc

SEQ ID NO: 56807 - DNA, 20 bp, Artificial Sequence
  chemically synthesized
cattgtttcaacttgctagt

SEQ ID NO: 56808 - DNA, 20 bp, Artificial Sequence
  chemically synthesized
attgtttcaacttgctagtg

SEQ ID NO: 56809 - DNA, 20 bp, Artificial Sequence
  chemically synthesized
ttgtttcaacttgctagtga

SEQ ID NO: 56810 - DNA, 20 bp, Artificial Sequence
  chemically synthesized
tgtttcaacttgctagtgag

SEQ ID NO: 56811 - DNA, 20 bp, Artificial Sequence
  chemically synthesized
tttcaacttgctagtgaggg

SEQ ID NO: 56812 - DNA, 20 bp, Artificial Sequence
  chemically synthesized
acttgctagtgaggggagca

SEQ ID NO: 56813 - DNA, 20 bp, Artificial Sequence
  chemically synthesized
aggggagcatggcacctgaa

SEQ ID NO: 56814 - DNA, 20 bp, Artificial Sequence
  chemically synthesized
gggagcatggcacctgaaca

SEQ ID NO: 56815 - DNA, 20 bp, Artificial Sequence
  chemically synthesized
tgatataaattaatgaaact

SEQ ID NO: 56816 - DNA, 20 bp, Artificial Sequence
  chemically synthesized
aattaatgaaactgagaacc

SEQ ID NO: 56817 - DNA, 20 bp, Artificial Sequence
  chemically synthesized
atgaaactgagaaccaagcg

SEQ ID NO: 56818 - DNA, 20 bp, Artificial Sequence
  chemically synthesized
gaaactgagaaccaagcgaa

SEQ ID NO: 56819 - DNA, 20 bp, Artificial Sequence
  chemically synthesized
tgagaaccaagcgaagagct

SEQ ID NO: 56820 - DNA, 20 bp, Artificial Sequence
  chemically synthesized
gagcttagccatcctttgca

SEQ ID NO: 56821 - DNA, 20 bp, Artificial Sequence
  chemically synthesized
ttagccatcctttgcatagt

SEQ ID NO: 56822 - DNA, 20 bp, Artificial Sequence
  chemically synthesized
ctttgcatagttagctacaa

SEQ ID NO: 56823 - DNA, 20 bp, Artificial Sequence
  chemically synthesized
tacaatggctatttattttt

SEQ ID NO: 56824 - DNA, 20 bp, Artificial Sequence
  chemically synthesized
atggctatttatttttcagc

SEQ ID NO: 56825 - DNA, 20 bp, Artificial Sequence
  chemically synthesized
tatttatttttcagccagac

SEQ ID NO: 56826 - DNA, 20 bp, Artificial Sequence
  chemically synthesized
cagccagactggccatcatg

SEQ ID NO: 56827 - DNA, 20 bp, Artificial Sequence
  chemically synthesized
agccagactggccatcatgt

SEQ ID NO: 56828 - DNA, 20 bp, Artificial Sequence
  chemically synthesized
atcatgtaggcacactcttt

SEQ ID NO: 56829 - DNA, 20 bp, Artificial Sequence
  chemically synthesized
gtaggcacactcttttagat

SEQ ID NO: 56830 - DNA, 20 bp, Artificial Sequence
  chemically synthesized
ttttttctgcccattcattc

SEQ ID NO: 56831 - DNA, 20 bp, Artificial Sequence
  chemically synthesized
cattcattccagcaccgtga

SEQ ID NO: 56832 - DNA, 20 bp, Artificial Sequence
  chemically synthesized
cagcaccgtgacagtcttca

SEQ ID NO: 56833 - DNA, 20 bp, Artificial Sequence
  chemically synthesized
agcaccgtgacagtcttcac

SEQ ID NO: 56834 - DNA, 20 bp, Artificial Sequence
  chemically synthesized
gcaccgtgacagtcttcacg

SEQ ID NO: 56835 - DNA, 20 bp, Artificial Sequence
  chemically synthesized
gaaattaaacttattttttt

SEQ ID NO: 56836 - DNA, 20 bp, Artificial Sequence
  chemically synthesized
agaatttttcaatcatatac

SEQ ID NO: 56837 - DNA, 20 bp, Artificial Sequence
  chemically synthesized
tcatatacaagattttgaac

SEQ ID NO: 56838 - DNA, 20 bp, Artificial Sequence
  chemically synthesized
catatacaagattttgaact

SEQ ID NO: 56839 - DNA, 20 bp, Artificial Sequence
  chemically synthesized
aattaaatgaattgcacata

SEQ ID NO: 56840 - DNA, 20 bp, Artificial Sequence
  chemically synthesized
atgaattgcacataaagcca

SEQ ID NO: 56841 - DNA, 20 bp, Artificial Sequence
  chemically synthesized
tatgtatttttactacattg

SEQ ID NO: 56842 - DNA, 20 bp, Artificial Sequence
  chemically synthesized
atgtatttttactacattgt

SEQ ID NO: 56843 - DNA, 20 bp, Artificial Sequence
  chemically synthesized
gtatttttactacattgtgg

SEQ ID NO: 56844 - DNA, 20 bp, Artificial Sequence
  chemically synthesized
aactatgtcttacctgattt

SEQ ID NO: 56845 - DNA, 20 bp, Artificial Sequence
  chemically synthesized
ttacctgatttcagaaataa

SEQ ID NO: 56846 - DNA, 20 bp, Artificial Sequence
  chemically synthesized
cctgatttcagaaataaaag

SEQ ID NO: 56847 - DNA, 20 bp, Artificial Sequence
  chemically synthesized
gatttcagaaataaaagaag

SEQ ID NO: 56848 - DNA, 20 bp, Artificial Sequence
  chemically synthesized
ttcagaaataaaagaagtag

SEQ ID NO: 56849 - DNA, 20 bp, Artificial Sequence
  chemically synthesized
cacttccttatgttccattt

SEQ ID NO: 56850 - DNA, 20 bp, Artificial Sequence
  chemically synthesized
acttccttatgttccatttt

SEQ ID NO: 56851 - DNA, 20 bp, Artificial Sequence
  chemically synthesized
cttatgttccattttgggac

SEQ ID NO: 56852 - DNA, 20 bp, Artificial Sequence
  chemically synthesized
tgttccattttgggactggc

SEQ ID NO: 56853 - DNA, 20 bp, Artificial Sequence
  chemically synthesized
tccattttgggactggccag

SEQ ID NO: 56854 - DNA, 20 bp, Artificial Sequence
  chemically synthesized
tgggactggccagcagtgcc

SEQ ID NO: 56855 - DNA, 20 bp, Artificial Sequence
  chemically synthesized
actggccagcagtgcccaga

SEQ ID NO: 56856 - DNA, 20 bp, Artificial Sequence
  chemically synthesized
cagaaagtgtgtcccaatcc

SEQ ID NO: 56857 - DNA, 20 bp, Artificial Sequence
  chemically synthesized
agaaagtgtgtcccaatccc

SEQ ID NO: 56858 - DNA, 20 bp, Artificial Sequence
  chemically synthesized
aggacattgttgacttacat

SEQ ID NO: 56859 - DNA, 20 bp, Artificial Sequence
  chemically synthesized
gacattgttgacttacatga

SEQ ID NO: 56860 - DNA, 20 bp, Artificial Sequence
  chemically synthesized
gagtaaacgcacccacaaac

SEQ ID NO: 56861 - DNA, 20 bp, Artificial Sequence
  chemically synthesized
aaacgcacccacaaaccaga

SEQ ID NO: 56862 - DNA, 20 bp, Artificial Sequence
  chemically synthesized
acaaaccagatagtcaaatt

SEQ ID NO: 56863 - DNA, 20 bp, Artificial Sequence
  chemically synthesized
aattaagttaatgattctct

SEQ ID NO: 56864 - DNA, 20 bp, Artificial Sequence
  chemically synthesized
ttaagttaatgattctctca

SEQ ID NO: 56865 - DNA, 20 bp, Artificial Sequence
  chemically synthesized
ctctcagagacccatgccac

SEQ ID NO: 56866 - DNA, 20 bp, Artificial Sequence
  chemically synthesized
agagacccatgccactggct

SEQ ID NO: 56867 - DNA, 20 bp, Artificial Sequence
  chemically synthesized
gacccatgccactggctcag

SEQ ID NO: 56868 - DNA, 20 bp, Artificial Sequence
  chemically synthesized
acccatgccactggctcagc

SEQ ID NO: 56869 - DNA, 20 bp, Artificial Sequence
  chemically synthesized
cccatgccactggctcagca

SEQ ID NO: 56870 - DNA, 20 bp, Artificial Sequence
  chemically synthesized
ttcaaacattaccttgaata

SEQ ID NO: 56871 - DNA, 20 bp, Artificial Sequence
  chemically synthesized
caaacattaccttgaatata

SEQ ID NO: 56872 - DNA, 20 bp, Artificial Sequence
  chemically synthesized
tagagtcttataaaatattt

SEQ ID NO: 56873 - DNA, 20 bp, Artificial Sequence
  chemically synthesized
gagtcttataaaatatttga

SEQ ID NO: 56874 - DNA, 20 bp, Artificial Sequence
  chemically synthesized
atttgagagtgcaatgtcaa

SEQ ID NO: 56875 - DNA, 20 bp, Artificial Sequence
  chemically synthesized
agtgcaatgtcaatagatgc

SEQ ID NO: 56876 - DNA, 20 bp, Artificial Sequence
  chemically synthesized
gtgcaatgtcaatagatgct

SEQ ID NO: 56877 - DNA, 20 bp, Artificial Sequence
  chemically synthesized
caatgtcaatagatgctggg

SEQ ID NO: 56878 - DNA, 20 bp, Artificial Sequence
  chemically synthesized
tgtcaatagatgctgggaag

SEQ ID NO: 56879 - DNA, 20 bp, Artificial Sequence
  chemically synthesized
tagatgctgggaagtggtga

SEQ ID NO: 56880 - DNA, 20 bp, Artificial Sequence
  chemically synthesized
gtgaaagccatttcccccct

SEQ ID NO: 56881 - DNA, 20 bp, Artificial Sequence
  chemically synthesized
cttactccttccctcacccc

SEQ ID NO: 56882 - DNA, 20 bp, Artificial Sequence
  chemically synthesized
agaccttcatctttcctgat

SEQ ID NO: 56883 - DNA, 20 bp, Artificial Sequence
  chemically synthesized
ttctttcattctctttcttt

SEQ ID NO: 56884 - DNA, 20 bp, Artificial Sequence
  chemically synthesized
tggataaaataaaatcataa

SEQ ID NO: 56885 - DNA, 20 bp, Artificial Sequence
  chemically synthesized
ataaaataaaatcataaaag

SEQ ID NO: 56886 - DNA, 20 bp, Artificial Sequence
  chemically synthesized
taaaagtagctcatatttgc

SEQ ID NO: 56887 - DNA, 20 bp, Artificial Sequence
  chemically synthesized
ttgctggtaacttccatgac

SEQ ID NO: 56888 - DNA, 20 bp, Artificial Sequence
  chemically synthesized
ccatgaccagaccctctgcc

SEQ ID NO: 56889 - DNA, 20 bp, Artificial Sequence
  chemically synthesized
tgccaagtgctgcacatcca

SEQ ID NO: 56890 - DNA, 20 bp, Artificial Sequence
  chemically synthesized
gcacatccatagcctccctc

SEQ ID NO: 56891 - DNA, 20 bp, Artificial Sequence
  chemically synthesized
gcctccctcaagctttccaa

SEQ ID NO: 56892 - DNA, 20 bp, Artificial Sequence
  chemically synthesized
cctccctcaagctttccaac

SEQ ID NO: 56893 - DNA, 20 bp, Artificial Sequence
  chemically synthesized
ccctcaagctttccaacagg

SEQ ID NO: 56894 - DNA, 20 bp, Artificial Sequence
  chemically synthesized
tccaacaggcagtgctgtac

SEQ ID NO: 56895 - DNA, 20 bp, Artificial Sequence
  chemically synthesized
ccaacaggcagtgctgtacg

SEQ ID NO: 56896 - DNA, 20 bp, Artificial Sequence
  chemically synthesized
aacaggcagtgctgtacgag

SEQ ID NO: 56897 - DNA, 20 bp, Artificial Sequence
  chemically synthesized
acaggcagtgctgtacgagg

SEQ ID NO: 56898 - DNA, 20 bp, Artificial Sequence
  chemically synthesized
caggcagtgctgtacgagga

SEQ ID NO: 56899 - DNA, 20 bp, Artificial Sequence
  chemically synthesized
aggcagtgctgtacgaggag

SEQ ID NO: 56900 - DNA, 20 bp, Artificial Sequence
  chemically synthesized
ggcagtgctgtacgaggagg

SEQ ID NO: 56901 - DNA, 20 bp, Artificial Sequence
  chemically synthesized
tgctgtacgaggagggggct

SEQ ID NO: 56902 - DNA, 20 bp, Artificial Sequence
  chemically synthesized
gctgtacgaggagggggctg

SEQ ID NO: 56903 - DNA, 20 bp, Artificial Sequence
  chemically synthesized
gagggggctgaggccttccc

SEQ ID NO: 56904 - DNA, 20 bp, Artificial Sequence
  chemically synthesized
agggggctgaggccttcccg

SEQ ID NO: 56905 - DNA, 20 bp, Artificial Sequence
  chemically synthesized
cccgaggttgtgtcgctacc

SEQ ID NO: 56906 - DNA, 20 bp, Artificial Sequence
  chemically synthesized
ccgaggttgtgtcgctaccc

SEQ ID NO: 56907 - DNA, 20 bp, Artificial Sequence
  chemically synthesized
cgaggttgtgtcgctaccca

SEQ ID NO: 56908 - DNA, 20 bp, Artificial Sequence
  chemically synthesized
gaggttgtgtcgctacccag

SEQ ID NO: 56909 - DNA, 20 bp, Artificial Sequence
  chemically synthesized
tgtgtcgctacccaggggtg

SEQ ID NO: 56910 - DNA, 20 bp, Artificial Sequence
  chemically synthesized
ctacccaggggtgcagctga

SEQ ID NO: 56911 - DNA, 20 bp, Artificial Sequence
  chemically synthesized
gctgatagacacaacccttt

SEQ ID NO: 56912 - DNA, 20 bp, Artificial Sequence
  chemically synthesized
ctgatagacacaaccctttc

SEQ ID NO: 56913 - DNA, 20 bp, Artificial Sequence
  chemically synthesized
gacacaaccctttcaggtct

SEQ ID NO: 56914 - DNA, 20 bp, Artificial Sequence
  chemically synthesized
cctttcaggtcttagtttac

SEQ ID NO: 56915 - DNA, 20 bp, Artificial Sequence
  chemically synthesized
tcaggtcttagtttacgagc

SEQ ID NO: 56916 - DNA, 20 bp, Artificial Sequence
  chemically synthesized
gtcttagtttacgagcaagc

SEQ ID NO: 56917 - DNA, 20 bp, Artificial Sequence
  chemically synthesized
tcttagtttacgagcaagct

SEQ ID NO: 56918 - DNA, 20 bp, Artificial Sequence
  chemically synthesized
ctgtgccgaaatgacaacat

SEQ ID NO: 56919 - DNA, 20 bp, Artificial Sequence
  chemically synthesized
cttcaaaatttatttattcc

SEQ ID NO: 56920 - DNA, 20 bp, Artificial Sequence
  chemically synthesized
gtaattataaattatgttat

SEQ ID NO: 56921 - DNA, 20 bp, Artificial Sequence
  chemically synthesized
ttataagatatcaatccttc

SEQ ID NO: 56922 - DNA, 20 bp, Artificial Sequence
  chemically synthesized
tataagatatcaatccttcc

SEQ ID NO: 56923 - DNA, 20 bp, Artificial Sequence
  chemically synthesized
taagatatcaatccttccag

SEQ ID NO: 56924 - DNA, 20 bp, Artificial Sequence
  chemically synthesized
aagatatcaatccttccagg

SEQ ID NO: 56925 - DNA, 20 bp, Artificial Sequence
  chemically synthesized
agatatcaatccttccagga

SEQ ID NO: 56926 - DNA, 20 bp, Artificial Sequence
  chemically synthesized
gatatcaatccttccaggag

SEQ ID NO: 56927 - DNA, 20 bp, Artificial Sequence
  chemically synthesized
atatcaatccttccaggagg

SEQ ID NO: 56928 - DNA, 20 bp, Artificial Sequence
  chemically synthesized
tcaatccttccaggaggggg

SEQ ID NO: 56929 - DNA, 20 bp, Artificial Sequence
  chemically synthesized
atccttccaggagggggtgg

SEQ ID NO: 56930 - DNA, 20 bp, Artificial Sequence
  chemically synthesized
gtggctcatgcctataatcc

SEQ ID NO: 56931 - DNA, 20 bp, Artificial Sequence
  chemically synthesized
tgcctataatcccagcattt

SEQ ID NO: 56932 - DNA, 20 bp, Artificial Sequence
  chemically synthesized
gcctataatcccagcatttt

SEQ ID NO: 56933 - DNA, 20 bp, Artificial Sequence
  chemically synthesized
ctataatcccagcattttgg

SEQ ID NO: 56934 - DNA, 20 bp, Artificial Sequence
  chemically synthesized
tataatcccagcattttggg

SEQ ID NO: 56935 - DNA, 20 bp, Artificial Sequence
  chemically synthesized
cccagcattttgggaggcca

SEQ ID NO: 56936 - DNA, 20 bp, Artificial Sequence
  chemically synthesized
agcattttgggaggccacgg

SEQ ID NO: 56937 - DNA, 20 bp, Artificial Sequence
  chemically synthesized
ttttgggaggccacggcaga

SEQ ID NO: 56938 - DNA, 20 bp, Artificial Sequence
  chemically synthesized
ccacggcagatggatcacct

SEQ ID NO: 56939 - DNA, 20 bp, Artificial Sequence
  chemically synthesized
cacggcagatggatcacctg

SEQ ID NO: 56940 - DNA, 20 bp, Artificial Sequence
  chemically synthesized
gcagatggatcacctgaggc

SEQ ID NO: 56941 - DNA, 20 bp, Artificial Sequence
  chemically synthesized
cagatggatcacctgaggcc

SEQ ID NO: 56942 - DNA, 20 bp, Artificial Sequence
  chemically synthesized
gatggatcacctgaggccag

SEQ ID NO: 56943 - DNA, 20 bp, Artificial Sequence
  chemically synthesized
tcacctgaggccaggagttt

SEQ ID NO: 56944 - DNA, 20 bp, Artificial Sequence
  chemically synthesized
tgaggccaggagtttgagac

SEQ ID NO: 56945 - DNA, 20 bp, Artificial Sequence
  chemically synthesized
ccaggagtttgagacaagcc

SEQ ID NO: 56946 - DNA, 20 bp, Artificial Sequence
  chemically synthesized
caggagtttgagacaagcct

SEQ ID NO: 56947 - DNA, 20 bp, Artificial Sequence
  chemically synthesized
tctacaaaaaatacaaaaat

SEQ ID NO: 56948 - DNA, 20 bp, Artificial Sequence
  chemically synthesized
caaaaaatacaaaaattagc

SEQ ID NO: 56949 - DNA, 20 bp, Artificial Sequence
  chemically synthesized
aaaaaatacaaaaattagct

SEQ ID NO: 56950 - DNA, 20 bp, Artificial Sequence
  chemically synthesized
atacaaaaattagctgggtg

SEQ ID NO: 56951 - DNA, 20 bp, Artificial Sequence
  chemically synthesized
acaaaaattagctgggtgtg

SEQ ID NO: 56952 - DNA, 20 bp, Artificial Sequence
  chemically synthesized
caaaaattagctgggtgtgg

SEQ ID NO: 56953 - DNA, 20 bp, Artificial Sequence
  chemically synthesized
ctgggtgtggaggcacatgc

SEQ ID NO: 56954 - DNA, 20 bp, Artificial Sequence
  chemically synthesized
gaggcacatgccagtcatcc

SEQ ID NO: 56955 - DNA, 20 bp, Artificial Sequence
  chemically synthesized
tgccagtcatcccagctact

SEQ ID NO: 56956 - DNA, 20 bp, Artificial Sequence
  chemically synthesized
cagtcatcccagctactaag

SEQ ID NO: 56957 - DNA, 20 bp, Artificial Sequence
  chemically synthesized
agtcatcccagctactaagt

SEQ ID NO: 56958 - DNA, 20 bp, Artificial Sequence
  chemically synthesized
tcccagctactaagtaggct

SEQ ID NO: 56959 - DNA, 20 bp, Artificial Sequence
  chemically synthesized
cccagctactaagtaggctg

SEQ ID NO: 56960 - DNA, 20 bp, Artificial Sequence
  chemically synthesized
tactaagtaggctgaggcac

SEQ ID NO: 56961 - DNA, 20 bp, Artificial Sequence
  chemically synthesized
gcactagaattgcttgaaca

SEQ ID NO: 56962 - DNA, 20 bp, Artificial Sequence
  chemically synthesized
cactagaattgcttgaacac

SEQ ID NO: 56963 - DNA, 20 bp, Artificial Sequence
  chemically synthesized
ctagaattgcttgaacacag

SEQ ID NO: 56964 - DNA, 20 bp, Artificial Sequence
  chemically synthesized
aattgcttgaacacaggaga

SEQ ID NO: 56965 - DNA, 20 bp, Artificial Sequence
  chemically synthesized
ttgcttgaacacaggagatg

SEQ ID NO: 56966 - DNA, 20 bp, Artificial Sequence
  chemically synthesized
tgcttgaacacaggagatgg

SEQ ID NO: 56967 - DNA, 20 bp, Artificial Sequence
  chemically synthesized
aacacaggagatggaggttg

SEQ ID NO: 56968 - DNA, 20 bp, Artificial Sequence
  chemically synthesized
caggagatggaggttgcagt

SEQ ID NO: 56969 - DNA, 20 bp, Artificial Sequence
  chemically synthesized
gatggaggttgcagtgagcc

SEQ ID NO: 56970 - DNA, 20 bp, Artificial Sequence
  chemically synthesized
aagaatgtgccactgcactc

SEQ ID NO: 56971 - DNA, 20 bp, Artificial Sequence
  chemically synthesized
tgtgccactgcactccagcc

SEQ ID NO: 56972 - DNA, 20 bp, Artificial Sequence
  chemically synthesized
gtgccactgcactccagcct

SEQ ID NO: 56973 - DNA, 20 bp, Artificial Sequence
  chemically synthesized
ctgcactccagcctgggtga

SEQ ID NO: 56974 - DNA, 20 bp, Artificial Sequence
  chemically synthesized
gcactccagcctgggtgaca

SEQ ID NO: 56975 - DNA, 20 bp, Artificial Sequence
  chemically synthesized
tccagcctgggtgacagagc

SEQ ID NO: 56976 - DNA, 20 bp, Artificial Sequence
  chemically synthesized
gtgacagagcaagaatgtct

SEQ ID NO: 56977 - DNA, 20 bp, Artificial Sequence
  chemically synthesized
tgacagagcaagaatgtctc

SEQ ID NO: 56978 - DNA, 20 bp, Artificial Sequence
  chemically synthesized
agagcaagaatgtctcagga

SEQ ID NO: 56979 - DNA, 20 bp, Artificial Sequence
  chemically synthesized
aatatcaatccttcctattc

SEQ ID NO: 56980 - DNA, 20 bp, Artificial Sequence
  chemically synthesized
atcaatccttcctattctag

SEQ ID NO: 56981 - DNA, 20 bp, Artificial Sequence
  chemically synthesized
ccttcctattctagtagttg

SEQ ID NO: 56982 - DNA, 20 bp, Artificial Sequence
  chemically synthesized
atatttttaaaaataaaaca

SEQ ID NO: 56983 - DNA, 20 bp, Artificial Sequence
  chemically synthesized
tatttttaaaaataaaacat

SEQ ID NO: 56984 - DNA, 20 bp, Artificial Sequence
  chemically synthesized
atttttaaaaataaaacata

SEQ ID NO: 56985 - DNA, 20 bp, Artificial Sequence
  chemically synthesized
taaaaataaaacatagggtc

SEQ ID NO: 56986 - DNA, 20 bp, Artificial Sequence
  chemically synthesized
ataaaacatagggtcgagtg

SEQ ID NO: 56987 - DNA, 20 bp, Artificial Sequence
  chemically synthesized
aaacatagggtcgagtgcgg

SEQ ID NO: 56988 - DNA, 20 bp, Artificial Sequence
  chemically synthesized
gtggctcaactctgtaatcc

SEQ ID NO: 56989 - DNA, 20 bp, Artificial Sequence
  chemically synthesized
actctgtaatcccagcactt

SEQ ID NO: 56990 - DNA, 20 bp, Artificial Sequence
  chemically synthesized
ctctgtaatcccagcacttt

SEQ ID NO: 56991 - DNA, 20 bp, Artificial Sequence
  chemically synthesized
ctgtaatcccagcactttgg

SEQ ID NO: 56992 - DNA, 20 bp, Artificial Sequence
  chemically synthesized
tgtaatcccagcactttggg

SEQ ID NO: 56993 - DNA, 20 bp, Artificial Sequence
  chemically synthesized
tcccagcactttgggaggcc

SEQ ID NO: 56994 - DNA, 20 bp, Artificial Sequence
  chemically synthesized
agcactttgggaggccaaga

SEQ ID NO: 56995 - DNA, 20 bp, Artificial Sequence
  chemically synthesized
gcactttgggaggccaagac

SEQ ID NO: 56996 - DNA, 20 bp, Artificial Sequence
  chemically synthesized
ctttgggaggccaagacagg

SEQ ID NO: 56997 - DNA, 20 bp, Artificial Sequence
  chemically synthesized
ggccaagacaggtggatcac

SEQ ID NO: 56998 - DNA, 20 bp, Artificial Sequence
  chemically synthesized
gccaagacaggtggatcaca

SEQ ID NO: 56999 - DNA, 20 bp, Artificial Sequence
  chemically synthesized
agacaggtggatcacaaggt

SEQ ID NO: 57000 - DNA, 20 bp, Artificial Sequence
  chemically synthesized
gacaggtggatcacaaggtc

SEQ ID NO: 57001 - DNA, 20 bp, Artificial Sequence
  chemically synthesized
caggtggatcacaaggtcag

SEQ ID NO: 57002 - DNA, 20 bp, Artificial Sequence
  chemically synthesized
gatcacaaggtcaggagttt

SEQ ID NO: 57003 - DNA, 20 bp, Artificial Sequence
  chemically synthesized
caaggtcaggagtttgagac

SEQ ID NO: 57004 - DNA, 20 bp, Artificial Sequence
  chemically synthesized
gtcaggagtttgagaccagc

SEQ ID NO: 57005 - DNA, 20 bp, Artificial Sequence
  chemically synthesized
tcaggagtttgagaccagcc

SEQ ID NO: 57006 - DNA, 20 bp, Artificial Sequence
  chemically synthesized
tgagaccagccaggccaatg

SEQ ID NO: 57007 - DNA, 20 bp, Artificial Sequence
  chemically synthesized
tctactaaaaatacaaaaat

SEQ ID NO: 57008 - DNA, 20 bp, Artificial Sequence
  chemically synthesized
ctaaaaatacaaaaattagc

SEQ ID NO: 57009 - DNA, 20 bp, Artificial Sequence
  chemically synthesized
taaaaatacaaaaattagcc

SEQ ID NO: 57010 - DNA, 20 bp, Artificial Sequence
  chemically synthesized
atacaaaaattagccaggcg

SEQ ID NO: 57011 - DNA, 20 bp, Artificial Sequence
  chemically synthesized
caaaaattagccaggcgtgg

SEQ ID NO: 57012 - DNA, 20 bp, Artificial Sequence
  chemically synthesized
aaattagccaggcgtggtgg

SEQ ID NO: 57013 - DNA, 20 bp, Artificial Sequence
  chemically synthesized
aattagccaggcgtggtggt

SEQ ID NO: 57014 - DNA, 20 bp, Artificial Sequence
  chemically synthesized
gtggtgggcacctgtaatcc

SEQ ID NO: 57015 - DNA, 20 bp, Artificial Sequence
  chemically synthesized
gcacctgtaatcccagctac

SEQ ID NO: 57016 - DNA, 20 bp, Artificial Sequence
  chemically synthesized
cacctgtaatcccagctact

SEQ ID NO: 57017 - DNA, 20 bp, Artificial Sequence
  chemically synthesized
acctgtaatcccagctacta

SEQ ID NO: 57018 - DNA, 20 bp, Artificial Sequence
  chemically synthesized
ctgtaatcccagctactagg

SEQ ID NO: 57019 - DNA, 20 bp, Artificial Sequence
  chemically synthesized
tgtaatcccagctactaggg

SEQ ID NO: 57020 - DNA, 20 bp, Artificial Sequence
  chemically synthesized
atcccagctactagggaggc

SEQ ID NO: 57021 - DNA, 20 bp, Artificial Sequence
  chemically synthesized
cccagctactagggaggctg

SEQ ID NO: 57022 - DNA, 20 bp, Artificial Sequence
  chemically synthesized
ctggagtattcacttgaacc

SEQ ID NO: 57023 - DNA, 20 bp, Artificial Sequence
  chemically synthesized
tggagtattcacttgaaccc

SEQ ID NO: 57024 - DNA, 20 bp, Artificial Sequence
  chemically synthesized
gagtattcacttgaacccag

SEQ ID NO: 57025 - DNA, 20 bp, Artificial Sequence
  chemically synthesized
agtattcacttgaacccagg

SEQ ID NO: 57026 - DNA, 20 bp, Artificial Sequence
  chemically synthesized
attcacttgaacccaggagg

SEQ ID NO: 57027 - DNA, 20 bp, Artificial Sequence
  chemically synthesized
cacttgaacccaggaggtgg

SEQ ID NO: 57028 - DNA, 20 bp, Artificial Sequence
  chemically synthesized
aacccaggaggtggaagttg

SEQ ID NO: 57029 - DNA, 20 bp, Artificial Sequence
  chemically synthesized
caggaggtggaagttgcagt

SEQ ID NO: 57030 - DNA, 20 bp, Artificial Sequence
  chemically synthesized
gcagtgagccaaaatcacgt

SEQ ID NO: 57031 - DNA, 20 bp, Artificial Sequence
  chemically synthesized
tcacgtcagtgcacttcaac

SEQ ID NO: 57032 - DNA, 20 bp, Artificial Sequence
  chemically synthesized
cacgtcagtgcacttcaacc

SEQ ID NO: 57033 - DNA, 20 bp, Artificial Sequence
  chemically synthesized
acgtcagtgcacttcaaccg

SEQ ID NO: 57034 - DNA, 20 bp, Artificial Sequence
  chemically synthesized
cagtgcacttcaaccggggt

SEQ ID NO: 57035 - DNA, 20 bp, Artificial Sequence
  chemically synthesized
gtgcacttcaaccggggtga

SEQ ID NO: 57036 - DNA, 20 bp, Artificial Sequence
  chemically synthesized
aataaaataaaataaaataa

SEQ ID NO: 57037 - DNA, 20 bp, Artificial Sequence
  chemically synthesized
aataaaataaaataaaagca

SEQ ID NO: 57038 - DNA, 20 bp, Artificial Sequence
  chemically synthesized
tctttccgcaaatgaattca

SEQ ID NO: 57039 - DNA, 20 bp, Artificial Sequence
  chemically synthesized
cttacattttcgttctcatg

SEQ ID NO: 57040 - DNA, 20 bp, Artificial Sequence
  chemically synthesized
attttcgttctcatgaagta

SEQ ID NO: 57041 - DNA, 20 bp, Artificial Sequence
  chemically synthesized
tcgttctcatgaagtaaagc

SEQ ID NO: 57042 - DNA, 20 bp, Artificial Sequence
  chemically synthesized
gttctcatgaagtaaagcaa

SEQ ID NO: 57043 - DNA, 20 bp, Artificial Sequence
  chemically synthesized
ctcatgaagtaaagcaagag

SEQ ID NO: 57044 - DNA, 20 bp, Artificial Sequence
  chemically synthesized
atgaagtaaagcaagagtgg

SEQ ID NO: 57045 - DNA, 20 bp, Artificial Sequence
  chemically synthesized
aaagcaagagtggtagaatt

SEQ ID NO: 57046 - DNA, 20 bp, Artificial Sequence
  chemically synthesized
gcaagagtggtagaattaag

SEQ ID NO: 57047 - DNA, 20 bp, Artificial Sequence
  chemically synthesized
gagtggtagaattaagtgga

SEQ ID NO: 57048 - DNA, 20 bp, Artificial Sequence
  chemically synthesized
gtggtagaattaagtggaaa

SEQ ID NO: 57049 - DNA, 20 bp, Artificial Sequence
  chemically synthesized
aagtggaaagagtctatctc

SEQ ID NO: 57050 - DNA, 20 bp, Artificial Sequence
  chemically synthesized
gaaagagtctatctctagtg

SEQ ID NO: 57051 - DNA, 20 bp, Artificial Sequence
  chemically synthesized
tatctctagtgtagtcacgt

SEQ ID NO: 57052 - DNA, 20 bp, Artificial Sequence
  chemically synthesized
ctctagtgtagtcacgtcag

SEQ ID NO: 57053 - DNA, 20 bp, Artificial Sequence
  chemically synthesized
gtcacgtcagtggttgtgtc

SEQ ID NO: 57054 - DNA, 20 bp, Artificial Sequence
  chemically synthesized
cgtcagtggttgtgtcaaga

SEQ ID NO: 57055 - DNA, 20 bp, Artificial Sequence
  chemically synthesized
agtggttgtgtcaagatggt

SEQ ID NO: 57056 - DNA, 20 bp, Artificial Sequence
  chemically synthesized
gtggttgtgtcaagatggtt

SEQ ID NO: 57057 - DNA, 20 bp, Artificial Sequence
  chemically synthesized
ggttgtgtcaagatggttag

SEQ ID NO: 57058 - DNA, 20 bp, Artificial Sequence
  chemically synthesized
gttgtgtcaagatggttagg

SEQ ID NO: 57059 - DNA, 20 bp, Artificial Sequence
  chemically synthesized
gaggctcctcccgtttaaaa

SEQ ID NO: 57060 - DNA, 20 bp, Artificial Sequence
  chemically synthesized
tcccgtttaaaacagtatcc

SEQ ID NO: 57061 - DNA, 20 bp, Artificial Sequence
  chemically synthesized
ttaaaacagtatccaagccc

SEQ ID NO: 57062 - DNA, 20 bp, Artificial Sequence
  chemically synthesized
agccccagttgtaaatcaat

SEQ ID NO: 57063 - DNA, 20 bp, Artificial Sequence
  chemically synthesized
gccccagttgtaaatcaatt

SEQ ID NO: 57064 - DNA, 20 bp, Artificial Sequence
  chemically synthesized
ccccagttgtaaatcaattg

SEQ ID NO: 57065 - DNA, 20 bp, Artificial Sequence
  chemically synthesized
ccagttgtaaatcaattggg

SEQ ID NO: 57066 - DNA, 20 bp, Artificial Sequence
  chemically synthesized
gacacgccaactctgatcat

SEQ ID NO: 57067 - DNA, 20 bp, Artificial Sequence
  chemically synthesized
tctgatcatcagcaatatct

SEQ ID NO: 57068 - DNA, 20 bp, Artificial Sequence
  chemically synthesized
catcagcaatatctgagctc

SEQ ID NO: 57069 - DNA, 20 bp, Artificial Sequence
  chemically synthesized
caatatctgagctccagtct

SEQ ID NO: 57070 - DNA, 20 bp, Artificial Sequence
  chemically synthesized
ccagtctcagatattgtgtg

SEQ ID NO: 57071 - DNA, 20 bp, Artificial Sequence
  chemically synthesized
tctcagatattgtgtgcagt

SEQ ID NO: 57072 - DNA, 20 bp, Artificial Sequence
  chemically synthesized
ccctctacctccttccctac

SEQ ID NO: 57073 - DNA, 20 bp, Artificial Sequence
  chemically synthesized
taccagaaaaatcaccactt

SEQ ID NO: 57074 - DNA, 20 bp, Artificial Sequence
  chemically synthesized
aaaatcaccactttagtccc

SEQ ID NO: 57075 - DNA, 20 bp, Artificial Sequence
  chemically synthesized
ccactttagtccctggccac

SEQ ID NO: 57076 - DNA, 20 bp, Artificial Sequence
  chemically synthesized
cactttagtccctggccacc

SEQ ID NO: 57077 - DNA, 20 bp, Artificial Sequence
  chemically synthesized
ccctggccaccgggacaccc

SEQ ID NO: 57078 - DNA, 20 bp, Artificial Sequence
  chemically synthesized
cctggccaccgggacacccc

SEQ ID NO: 57079 - DNA, 20 bp, Artificial Sequence
  chemically synthesized
tggccaccgggacaccccag

SEQ ID NO: 57080 - DNA, 20 bp, Artificial Sequence
  chemically synthesized
ggccaccgggacaccccagg

SEQ ID NO: 57081 - DNA, 20 bp, Artificial Sequence
  chemically synthesized
gccaccgggacaccccagga

SEQ ID NO: 57082 - DNA, 20 bp, Artificial Sequence
  chemically synthesized
ccgggacaccccaggagggt

SEQ ID NO: 57083 - DNA, 20 bp, Artificial Sequence
  chemically synthesized
ggacaccccaggagggtgag

SEQ ID NO: 57084 - DNA, 20 bp, Artificial Sequence
  chemically synthesized
cccaggagggtgagtggtct

SEQ ID NO: 57085 - DNA, 20 bp, Artificial Sequence
  chemically synthesized
ccaggagggtgagtggtctg

SEQ ID NO: 57086 - DNA, 20 bp, Artificial Sequence
  chemically synthesized
ggagggtgagtggtctgagg

SEQ ID NO: 57087 - DNA, 20 bp, Artificial Sequence
  chemically synthesized
tgagtggtctgaggtagtta

SEQ ID NO: 57088 - DNA, 20 bp, Artificial Sequence
  chemically synthesized
tgaggtagttatggcactta

SEQ ID NO: 57089 - DNA, 20 bp, Artificial Sequence
  chemically synthesized
tggctcccttgctgctgatc

SEQ ID NO: 57090 - DNA, 20 bp, Artificial Sequence
  chemically synthesized
ttgctgctgatctggaactc

SEQ ID NO: 57091 - DNA, 20 bp, Artificial Sequence
  chemically synthesized
tgatctggaactcaagcccc

SEQ ID NO: 57092 - DNA, 20 bp, Artificial Sequence
  chemically synthesized
tctggaactcaagccccaag

SEQ ID NO: 57093 - DNA, 20 bp, Artificial Sequence
  chemically synthesized
caagccccaagaagtcccct

SEQ ID NO: 57094 - DNA, 20 bp, Artificial Sequence
  chemically synthesized
ggatgatctgaatatacatt

SEQ ID NO: 57095 - DNA, 20 bp, Artificial Sequence
  chemically synthesized
gatgatctgaatatacattt

SEQ ID NO: 57096 - DNA, 20 bp, Artificial Sequence
  chemically synthesized
atctgaatatacatttggga

SEQ ID NO: 57097 - DNA, 20 bp, Artificial Sequence
  chemically synthesized
atatacatttgggacagatc

SEQ ID NO: 57098 - DNA, 20 bp, Artificial Sequence
  chemically synthesized
tatacatttgggacagatct

SEQ ID NO: 57099 - DNA, 20 bp, Artificial Sequence
  chemically synthesized
atacatttgggacagatcta

SEQ ID NO: 57100 - DNA, 20 bp, Artificial Sequence
  chemically synthesized
acatttgggacagatctagg

SEQ ID NO: 57101 - DNA, 20 bp, Artificial Sequence
  chemically synthesized
gacagatctagggagtttct

SEQ ID NO: 57102 - DNA, 20 bp, Artificial Sequence
  chemically synthesized
gggagtttctgagcaacact

SEQ ID NO: 57103 - DNA, 20 bp, Artificial Sequence
  chemically synthesized
tttctgagcaacacttagac

SEQ ID NO: 57104 - DNA, 20 bp, Artificial Sequence
  chemically synthesized
ttctgagcaacacttagact

SEQ ID NO: 57105 - DNA, 20 bp, Artificial Sequence
  chemically synthesized
tctgagcaacacttagactg

SEQ ID NO: 57106 - DNA, 20 bp, Artificial Sequence
  chemically synthesized
cctacttgaattcgctactt

SEQ ID NO: 57107 - DNA, 20 bp, Artificial Sequence
  chemically synthesized
ctacttgaattcgctacttt

SEQ ID NO: 57108 - DNA, 20 bp, Artificial Sequence
  chemically synthesized
aattcgctactttgggactc

SEQ ID NO: 57109 - DNA, 20 bp, Artificial Sequence
  chemically synthesized
ctactttgggactcaagtct

SEQ ID NO: 57110 - DNA, 20 bp, Artificial Sequence
  chemically synthesized
tactttgggactcaagtcta

SEQ ID NO: 57111 - DNA, 20 bp, Artificial Sequence
  chemically synthesized
actttgggactcaagtctaa

SEQ ID NO: 57112 - DNA, 20 bp, Artificial Sequence
  chemically synthesized
ggactcaagtctaagggact

SEQ ID NO: 57113 - DNA, 20 bp, Artificial Sequence
  chemically synthesized
aagtctaagggactgagact

SEQ ID NO: 57114 - DNA, 20 bp, Artificial Sequence
  chemically synthesized
ctaagggactgagactgaga

SEQ ID NO: 57115 - DNA, 20 bp, Artificial Sequence
  chemically synthesized
taagggactgagactgagac

SEQ ID NO: 57116 - DNA, 20 bp, Artificial Sequence
  chemically synthesized
agggactgagactgagacag

SEQ ID NO: 57117 - DNA, 20 bp, Artificial Sequence
  chemically synthesized
ggactgagactgagacagga

SEQ ID NO: 57118 - DNA, 20 bp, Artificial Sequence
  chemically synthesized
agactgagacaggagagcac

SEQ ID NO: 57119 - DNA, 20 bp, Artificial Sequence
  chemically synthesized
ggagagcacaagactaactt

SEQ ID NO: 57120 - DNA, 20 bp, Artificial Sequence
  chemically synthesized
cttgcaactgtcaatgcctc

SEQ ID NO: 57121 - DNA, 20 bp, Artificial Sequence
  chemically synthesized
aatgcctccagccaaatgcc

SEQ ID NO: 57122 - DNA, 20 bp, Artificial Sequence
  chemically synthesized
ctccagccaaatgcccagca

SEQ ID NO: 57123 - DNA, 20 bp, Artificial Sequence
  chemically synthesized
ccagccaaatgcccagcaca

SEQ ID NO: 57124 - DNA, 20 bp, Artificial Sequence
  chemically synthesized
caaatgcccagcacagagct

SEQ ID NO: 57125 - DNA, 20 bp, Artificial Sequence
  chemically synthesized
atgcccagcacagagctcag

SEQ ID NO: 57126 - DNA, 20 bp, Artificial Sequence
  chemically synthesized
gtggatttgactcttccatt

SEQ ID NO: 57127 - DNA, 20 bp, Artificial Sequence
  chemically synthesized
ctcttccattcagaaactca

SEQ ID NO: 57128 - DNA, 20 bp, Artificial Sequence
  chemically synthesized
gcacacttcattctcaatca

SEQ ID NO: 57129 - DNA, 20 bp, Artificial Sequence
  chemically synthesized
cacacttcattctcaatcac

SEQ ID NO: 57130 - DNA, 20 bp, Artificial Sequence
  chemically synthesized
acacttcattctcaatcaca

SEQ ID NO: 57131 - DNA, 20 bp, Artificial Sequence
  chemically synthesized
acttcattctcaatcacagg

SEQ ID NO: 57132 - DNA, 20 bp, Artificial Sequence
  chemically synthesized
cattctcaatcacagggagc

SEQ ID NO: 57133 - DNA, 20 bp, Artificial Sequence
  chemically synthesized
attctcaatcacagggagct

SEQ ID NO: 57134 - DNA, 20 bp, Artificial Sequence
  chemically synthesized
acagggagctgggcttcctt

SEQ ID NO: 57135 - DNA, 20 bp, Artificial Sequence
  chemically synthesized
ggagctgggcttccttgaga

SEQ ID NO: 57136 - DNA, 20 bp, Artificial Sequence
  chemically synthesized
ctgggcttccttgagaaagc

SEQ ID NO: 57137 - DNA, 20 bp, Artificial Sequence
  chemically synthesized
ccttgagaaagccagcccca

SEQ ID NO: 57138 - DNA, 20 bp, Artificial Sequence
  chemically synthesized
cttgagaaagccagccccaa

SEQ ID NO: 57139 - DNA, 20 bp, Artificial Sequence
  chemically synthesized
caaaggtacctgtgtttaaa

SEQ ID NO: 57140 - DNA, 20 bp, Artificial Sequence
  chemically synthesized
acctgtgtttaaaaagatga

SEQ ID NO: 57141 - DNA, 20 bp, Artificial Sequence
  chemically synthesized
gtttaaaaagatgaaagaaa

SEQ ID NO: 57142 - DNA, 20 bp, Artificial Sequence
  chemically synthesized
tacgtccacaacatgttcac

SEQ ID NO: 57143 - DNA, 20 bp, Artificial Sequence
  chemically synthesized
acgtccacaacatgttcaca

SEQ ID NO: 57144 - DNA, 20 bp, Artificial Sequence
  chemically synthesized
acatgttcacaaggaaactc

SEQ ID NO: 57145 - DNA, 20 bp, Artificial Sequence
  chemically synthesized
tgttcacaaggaaactccag

SEQ ID NO: 57146 - DNA, 20 bp, Artificial Sequence
  chemically synthesized
acaaggaaactccagaagaa

SEQ ID NO: 57147 - DNA, 20 bp, Artificial Sequence
  chemically synthesized
aaggaaactccagaagaaca

SEQ ID NO: 57148 - DNA, 20 bp, Artificial Sequence
  chemically synthesized
gaaactccagaagaacagag

SEQ ID NO: 57149 - DNA, 20 bp, Artificial Sequence
  chemically synthesized
actccagaagaacagagcag

SEQ ID NO: 57150 - DNA, 20 bp, Artificial Sequence
  chemically synthesized
gaagaacagagcagtggtga

SEQ ID NO: 57151 - DNA, 20 bp, Artificial Sequence
  chemically synthesized
tggacctcctgtctgtccgt

SEQ ID NO: 57152 - DNA, 20 bp, Artificial Sequence
  chemically synthesized
ggacctcctgtctgtccgtg

SEQ ID NO: 57153 - DNA, 20 bp, Artificial Sequence
  chemically synthesized
cctgtctgtccgtgaggctg

SEQ ID NO: 57154 - DNA, 20 bp, Artificial Sequence
  chemically synthesized
tccgtgaggctgtagaacac

SEQ ID NO: 57155 - DNA, 20 bp, Artificial Sequence
  chemically synthesized
ccgtgaggctgtagaacaca

SEQ ID NO: 57156 - DNA, 20 bp, Artificial Sequence
  chemically synthesized
tgaggctgtagaacacaagg

SEQ ID NO: 57157 - DNA, 20 bp, Artificial Sequence
  chemically synthesized
aaggcagctcccaatgctgc

SEQ ID NO: 57158 - DNA, 20 bp, Artificial Sequence
  chemically synthesized
ctgccagactctctgaaccc

SEQ ID NO: 57159 - DNA, 20 bp, Artificial Sequence
  chemically synthesized
gccagactctctgaaccctg

SEQ ID NO: 57160 - DNA, 20 bp, Artificial Sequence
  chemically synthesized
cagactctctgaaccctgga

SEQ ID NO: 57161 - DNA, 20 bp, Artificial Sequence
  chemically synthesized
ggagagtgtaaacgtcatat

SEQ ID NO: 57162 - DNA, 20 bp, Artificial Sequence
  chemically synthesized
agagtgtaaacgtcatataa

SEQ ID NO: 57163 - DNA, 20 bp, Artificial Sequence
  chemically synthesized
gagtctatgttccaaaaacc

SEQ ID NO: 57164 - DNA, 20 bp, Artificial Sequence
  chemically synthesized
aaacctggatttaacaatct

SEQ ID NO: 57165 - DNA, 20 bp, Artificial Sequence
  chemically synthesized
taacaatctgagctttgtca

SEQ ID NO: 57166 - DNA, 20 bp, Artificial Sequence
  chemically synthesized
agctttgtcatggtgctttg

SEQ ID NO: 57167 - DNA, 20 bp, Artificial Sequence
  chemically synthesized
ttgtcatggtgctttgcggt

SEQ ID NO: 57168 - DNA, 20 bp, Artificial Sequence
  chemically synthesized
tctttgcttttaaaaccata

SEQ ID NO: 57169 - DNA, 20 bp, Artificial Sequence
  chemically synthesized
taaagaataatgtttaaatg

SEQ ID NO: 57170 - DNA, 20 bp, Artificial Sequence
  chemically synthesized
aagaataatgtttaaatgta

SEQ ID NO: 57171 - DNA, 20 bp, Artificial Sequence
  chemically synthesized
aatgtttaaatgtagagtct

SEQ ID NO: 57172 - DNA, 20 bp, Artificial Sequence
  chemically synthesized
tgctattgtttttatatttt

SEQ ID NO: 57173 - DNA, 20 bp, Artificial Sequence
  chemically synthesized
ttcactcaacattacataat

SEQ ID NO: 57174 - DNA, 20 bp, Artificial Sequence
  chemically synthesized
attacataatgagttttgta

SEQ ID NO: 57175 - DNA, 20 bp, Artificial Sequence
  chemically synthesized
tcttcataactaatatttta

SEQ ID NO: 57176 - DNA, 20 bp, Artificial Sequence
  chemically synthesized
cttcataactaatattttaa

SEQ ID NO: 57177 - DNA, 20 bp, Artificial Sequence
  chemically synthesized
tcataactaatattttaaag

SEQ ID NO: 57178 - DNA, 20 bp, Artificial Sequence
  chemically synthesized
ataactaatattttaaagga

SEQ ID NO: 57179 - DNA, 20 bp, Artificial Sequence
  chemically synthesized
aaggagagctactgattaat

SEQ ID NO: 57180 - DNA, 20 bp, Artificial Sequence
  chemically synthesized
agctactgattaatgagcat

SEQ ID NO: 57181 - DNA, 20 bp, Artificial Sequence
  chemically synthesized
gctactgattaatgagcatg

SEQ ID NO: 57182 - DNA, 20 bp, Artificial Sequence
  chemically synthesized
aatgagcatgaggtttcctt

SEQ ID NO: 57183 - DNA, 20 bp, Artificial Sequence
  chemically synthesized
atgagcatgaggtttccttt

SEQ ID NO: 57184 - DNA, 20 bp, Artificial Sequence
  chemically synthesized
tgagcatgaggtttcctttg

SEQ ID NO: 57185 - DNA, 20 bp, Artificial Sequence
  chemically synthesized
atgaggtttcctttggggat

SEQ ID NO: 57186 - DNA, 20 bp, Artificial Sequence
  chemically synthesized
tgaggtttcctttggggatg

SEQ ID NO: 57187 - DNA, 20 bp, Artificial Sequence
  chemically synthesized
tggggatgaggaaaatattc

SEQ ID NO: 57188 - DNA, 20 bp, Artificial Sequence
  chemically synthesized
atattctggaaatatgatga

SEQ ID NO: 57189 - DNA, 20 bp, Artificial Sequence
  chemically synthesized
tgaatgtactaaatgccact

SEQ ID NO: 57190 - DNA, 20 bp, Artificial Sequence
  chemically synthesized
atgtactaaatgccacttgg

SEQ ID NO: 57191 - DNA, 20 bp, Artificial Sequence
  chemically synthesized
ttggtggtaccctgcaaaaa

SEQ ID NO: 57192 - DNA, 20 bp, Artificial Sequence
  chemically synthesized
ccctgcaaaaatggttaaaa

SEQ ID NO: 57193 - DNA, 20 bp, Artificial Sequence
  chemically synthesized
tacattttattgcaataaaa

SEQ ID NO: 57194 - DNA, 20 bp, Artificial Sequence
  chemically synthesized
tttattgcaataaaaaagaa

SEQ ID NO: 57195 - DNA, 20 bp, Artificial Sequence
  chemically synthesized
aagaatagtcatcatttact

SEQ ID NO: 57196 - DNA, 20 bp, Artificial Sequence
  chemically synthesized
ttactaagcattatcctttc

SEQ ID NO: 57197 - DNA, 20 bp, Artificial Sequence
  chemically synthesized
tactaagcattatcctttcc

SEQ ID NO: 57198 - DNA, 20 bp, Artificial Sequence
  chemically synthesized
gcattatcctttccaggcac

SEQ ID NO: 57199 - DNA, 20 bp, Artificial Sequence
  chemically synthesized
ccaggcacaagcttataatg

SEQ ID NO: 57200 - DNA, 20 bp, Artificial Sequence
  chemically synthesized
atctcacttcatcctcacaa

SEQ ID NO: 57201 - DNA, 20 bp, Artificial Sequence
  chemically synthesized
ctcacaacagtcctatgaaa

SEQ ID NO: 57202 - DNA, 20 bp, Artificial Sequence
  chemically synthesized
tcacaacagtcctatgaaac

SEQ ID NO: 57203 - DNA, 20 bp, Artificial Sequence
  chemically synthesized
caacagtcctatgaaacagg

SEQ ID NO: 57204 - DNA, 20 bp, Artificial Sequence
  chemically synthesized
gttccatcactcctgctcta

SEQ ID NO: 57205 - DNA, 20 bp, Artificial Sequence
  chemically synthesized
atcactcctgctctacagtt

SEQ ID NO: 57206 - DNA, 20 bp, Artificial Sequence
  chemically synthesized
tcactcctgctctacagtta

SEQ ID NO: 57207 - DNA, 20 bp, Artificial Sequence
  chemically synthesized
gctctacagttaaggaaact

SEQ ID NO: 57208 - DNA, 20 bp, Artificial Sequence
  chemically synthesized
ctctacagttaaggaaactg

SEQ ID NO: 57209 - DNA, 20 bp, Artificial Sequence
  chemically synthesized
agttaaggaaactgaggtgt

SEQ ID NO: 57210 - DNA, 20 bp, Artificial Sequence
  chemically synthesized
gttaaggaaactgaggtgta

SEQ ID NO: 57211 - DNA, 20 bp, Artificial Sequence
  chemically synthesized
taaggaaactgaggtgtaag

SEQ ID NO: 57212 - DNA, 20 bp, Artificial Sequence
  chemically synthesized
aaggaaactgaggtgtaagg

SEQ ID NO: 57213 - DNA, 20 bp, Artificial Sequence
  chemically synthesized
tgaggtgtaaggaggttgtc

SEQ ID NO: 57214 - DNA, 20 bp, Artificial Sequence
  chemically synthesized
gaggttgtctagttcaacct

SEQ ID NO: 57215 - DNA, 20 bp, Artificial Sequence
  chemically synthesized
tgtctagttcaacctgagcc

SEQ ID NO: 57216 - DNA, 20 bp, Artificial Sequence
  chemically synthesized
gtctagttcaacctgagcct

SEQ ID NO: 57217 - DNA, 20 bp, Artificial Sequence
  chemically synthesized
tcaacctgagcctgggtctg

SEQ ID NO: 57218 - DNA, 20 bp, Artificial Sequence
  chemically synthesized
aacctgagcctgggtctgcg

SEQ ID NO: 57219 - DNA, 20 bp, Artificial Sequence
  chemically synthesized
tgcttcctccccgtgcgcgt

SEQ ID NO: 57220 - DNA, 20 bp, Artificial Sequence
  chemically synthesized
cctccacatctttgttcata

SEQ ID NO: 57221 - DNA, 20 bp, Artificial Sequence
  chemically synthesized
cttattccttaatattttct

SEQ ID NO: 57222 - DNA, 20 bp, Artificial Sequence
  chemically synthesized
ccttaatattttctgagcct

SEQ ID NO: 57223 - DNA, 20 bp, Artificial Sequence
  chemically synthesized
ctaagttcccataaattata

SEQ ID NO: 57224 - DNA, 20 bp, Artificial Sequence
  chemically synthesized
aacactgccaatttattttc

SEQ ID NO: 57225 - DNA, 20 bp, Artificial Sequence
  chemically synthesized
actgccaatttattttctag

SEQ ID NO: 57226 - DNA, 20 bp, Artificial Sequence
  chemically synthesized
ctgccaatttattttctaga

SEQ ID NO: 57227 - DNA, 20 bp, Artificial Sequence
  chemically synthesized
tattttctagaaggttatga

SEQ ID NO: 57228 - DNA, 20 bp, Artificial Sequence
  chemically synthesized
atgacagtgtaaaatgtcac

SEQ ID NO: 57229 - DNA, 20 bp, Artificial Sequence
  chemically synthesized
tcacttcaccacacttgtat

SEQ ID NO: 57230 - DNA, 20 bp, Artificial Sequence
  chemically synthesized
agtgttcaatttttaaatat

SEQ ID NO: 57231 - DNA, 20 bp, Artificial Sequence
  chemically synthesized
ttaaatattagctaatctaa

SEQ ID NO: 57232 - DNA, 20 bp, Artificial Sequence
  chemically synthesized
taaatattagctaatctaac

SEQ ID NO: 57233 - DNA, 20 bp, Artificial Sequence
  chemically synthesized
tttatacttctttgacaatt

SEQ ID NO: 57234 - DNA, 20 bp, Artificial Sequence
  chemically synthesized
ttatacttctttgacaattt

SEQ ID NO: 57235 - DNA, 20 bp, Artificial Sequence
  chemically synthesized
atacttctttgacaatttgg

SEQ ID NO: 57236 - DNA, 20 bp, Artificial Sequence
  chemically synthesized
acttctttgacaatttggga

SEQ ID NO: 57237 - DNA, 20 bp, Artificial Sequence
  chemically synthesized
tttgacaatttgggagagtg

SEQ ID NO: 57238 - DNA, 20 bp, Artificial Sequence
  chemically synthesized
tgggagagtgaagattctcc

SEQ ID NO: 57239 - DNA, 20 bp, Artificial Sequence
  chemically synthesized
ttttctttgccaaattcaaa

SEQ ID NO: 57240 - DNA, 20 bp, Artificial Sequence
  chemically synthesized
tttgccaaattcaaatagaa

SEQ ID NO: 57241 - DNA, 20 bp, Artificial Sequence
  chemically synthesized
tagaacggttgcaaaattgc

SEQ ID NO: 57242 - DNA, 20 bp, Artificial Sequence
  chemically synthesized
gaacggttgcaaaattgcca

SEQ ID NO: 57243 - DNA, 20 bp, Artificial Sequence
  chemically synthesized
aacggttgcaaaattgccag

SEQ ID NO: 57244 - DNA, 20 bp, Artificial Sequence
  chemically synthesized
cagaggaaatgctgtttttc

SEQ ID NO: 57245 - DNA, 20 bp, Artificial Sequence
  chemically synthesized
ggaaatgctgtttttccaga

SEQ ID NO: 57246 - DNA, 20 bp, Artificial Sequence
  chemically synthesized
tttttccagatggacacacc

SEQ ID NO: 57247 - DNA, 20 bp, Artificial Sequence
  chemically synthesized
ttttccagatggacacaccc

SEQ ID NO: 57248 - DNA, 20 bp, Artificial Sequence
  chemically synthesized
tttccagatggacacaccca

SEQ ID NO: 57249 - DNA, 20 bp, Artificial Sequence
  chemically synthesized
ggacacacccagggatgttt

SEQ ID NO: 57250 - DNA, 20 bp, Artificial Sequence
  chemically synthesized
cagtgttctcacaaataatc

SEQ ID NO: 57251 - DNA, 20 bp, Artificial Sequence
  chemically synthesized
atccagttttctaattttgc

SEQ ID NO: 57252 - DNA, 20 bp, Artificial Sequence
  chemically synthesized
gttttctaattttgcaagcc

SEQ ID NO: 57253 - DNA, 20 bp, Artificial Sequence
  chemically synthesized
tttgcaagcccagctttcat

SEQ ID NO: 57254 - DNA, 20 bp, Artificial Sequence
  chemically synthesized
tgcaaaaatccttgctttgc

SEQ ID NO: 57255 - DNA, 20 bp, Artificial Sequence
  chemically synthesized
aaatccttgctttgcgagca

SEQ ID NO: 57256 - DNA, 20 bp, Artificial Sequence
  chemically synthesized
cttgctttgcgagcatggca

SEQ ID NO: 57257 - DNA, 20 bp, Artificial Sequence
  chemically synthesized
ttgctttgcgagcatggcac

SEQ ID NO: 57258 - DNA, 20 bp, Artificial Sequence
  chemically synthesized
tttgcgagcatggcacaggc

SEQ ID NO: 57259 - DNA, 20 bp, Artificial Sequence
  chemically synthesized
tgcgagcatggcacaggcaa

SEQ ID NO: 57260 - DNA, 20 bp, Artificial Sequence
  chemically synthesized
gcatggcacaggcaagagat

SEQ ID NO: 57261 - DNA, 20 bp, Artificial Sequence
  chemically synthesized
catggcacaggcaagagatg

SEQ ID NO: 57262 - DNA, 20 bp, Artificial Sequence
  chemically synthesized
gcactctctctttcttcccc

SEQ ID NO: 57263 - DNA, 20 bp, Artificial Sequence
  chemically synthesized
actctctctttcttccccca

SEQ ID NO: 57264 - DNA, 20 bp, Artificial Sequence
  chemically synthesized
ccagagcctttgactgcact

SEQ ID NO: 57265 - DNA, 20 bp, Artificial Sequence
  chemically synthesized
tgcacttagatcattgactt

SEQ ID NO: 57266 - DNA, 20 bp, Artificial Sequence
  chemically synthesized
ttagatcattgactttggtt

SEQ ID NO: 57267 - DNA, 20 bp, Artificial Sequence
  chemically synthesized
ttcagaaacctgactgcatc

SEQ ID NO: 57268 - DNA, 20 bp, Artificial Sequence
  chemically synthesized
cagaaacctgactgcatctg

SEQ ID NO: 57269 - DNA, 20 bp, Artificial Sequence
  chemically synthesized
actgcatctggagttgacat

SEQ ID NO: 57270 - DNA, 20 bp, Artificial Sequence
  chemically synthesized
gcatctggagttgacatgag

SEQ ID NO: 57271 - DNA, 20 bp, Artificial Sequence
  chemically synthesized
tggagttgacatgagcagca

SEQ ID NO: 57272 - DNA, 20 bp, Artificial Sequence
  chemically synthesized
agttgacatgagcagcatgg

SEQ ID NO: 57273 - DNA, 20 bp, Artificial Sequence
  chemically synthesized
agcatggaagatgtttgtcc

SEQ ID NO: 57274 - DNA, 20 bp, Artificial Sequence
  chemically synthesized
tttgtcccagcacctcactc

SEQ ID NO: 57275 - DNA, 20 bp, Artificial Sequence
  chemically synthesized
tgtcccagcacctcactcca

SEQ ID NO: 57276 - DNA, 20 bp, Artificial Sequence
  chemically synthesized
gtcccagcacctcactccag

SEQ ID NO: 57277 - DNA, 20 bp, Artificial Sequence
  chemically synthesized
cagcacctcactccagaggc

SEQ ID NO: 57278 - DNA, 20 bp, Artificial Sequence
  chemically synthesized
cctcactccagaggccagct

SEQ ID NO: 57279 - DNA, 20 bp, Artificial Sequence
  chemically synthesized
gaggccagctcagctcaatc

SEQ ID NO: 57280 - DNA, 20 bp, Artificial Sequence
  chemically synthesized
aggccagctcagctcaatct

SEQ ID NO: 57281 - DNA, 20 bp, Artificial Sequence
  chemically synthesized
ccagctcagctcaatctggg

SEQ ID NO: 57282 - DNA, 20 bp, Artificial Sequence
  chemically synthesized
agctcagctcaatctgggca

SEQ ID NO: 57283 - DNA, 20 bp, Artificial Sequence
  chemically synthesized
atctgggcagagctgcatga

SEQ ID NO: 57284 - DNA, 20 bp, Artificial Sequence
  chemically synthesized
tgggcagagctgcatgatgg

SEQ ID NO: 57285 - DNA, 20 bp, Artificial Sequence
  chemically synthesized
gatggaagtttctgactacc

SEQ ID NO: 57286 - DNA, 20 bp, Artificial Sequence
  chemically synthesized
agtttctgactaccaagcat

SEQ ID NO: 57287 - DNA, 20 bp, Artificial Sequence
  chemically synthesized
gtttctgactaccaagcatc

SEQ ID NO: 57288 - DNA, 20 bp, Artificial Sequence
  chemically synthesized
tctgactaccaagcatcggg

SEQ ID NO: 57289 - DNA, 20 bp, Artificial Sequence
  chemically synthesized
tgactaccaagcatcgggca

SEQ ID NO: 57290 - DNA, 20 bp, Artificial Sequence
  chemically synthesized
gactaccaagcatcgggcag

SEQ ID NO: 57291 - DNA, 20 bp, Artificial Sequence
  chemically synthesized
actaccaagcatcgggcaga

SEQ ID NO: 57292 - DNA, 20 bp, Artificial Sequence
  chemically synthesized
cgggcagagggtgcatcacc

SEQ ID NO: 57293 - DNA, 20 bp, Artificial Sequence
  chemically synthesized
ggtgcatcacctggactaca

SEQ ID NO: 57294 - DNA, 20 bp, Artificial Sequence
  chemically synthesized
cctggactacatagttgtgt

SEQ ID NO: 57295 - DNA, 20 bp, Artificial Sequence
  chemically synthesized
ctggactacatagttgtgtg

SEQ ID NO: 57296 - DNA, 20 bp, Artificial Sequence
  chemically synthesized
tggactacatagttgtgtga

SEQ ID NO: 57297 - DNA, 20 bp, Artificial Sequence
  chemically synthesized
gactacatagttgtgtgagg

SEQ ID NO: 57298 - DNA, 20 bp, Artificial Sequence
  chemically synthesized
tgtgagggagcaccgttctc

SEQ ID NO: 57299 - DNA, 20 bp, Artificial Sequence
  chemically synthesized
ttctctagaatctgctattt

SEQ ID NO: 57300 - DNA, 20 bp, Artificial Sequence
  chemically synthesized
ctagaatctgctatttgagc

SEQ ID NO: 57301 - DNA, 20 bp, Artificial Sequence
  chemically synthesized
tagaatctgctatttgagca

SEQ ID NO: 57302 - DNA, 20 bp, Artificial Sequence
  chemically synthesized
caaggcaaacatcctgataa

SEQ ID NO: 57303 - DNA, 20 bp, Artificial Sequence
  chemically synthesized
taatggtgaaaacctaccgc

SEQ ID NO: 57304 - DNA, 20 bp, Artificial Sequence
  chemically synthesized
gaaaacctaccgcaagttgc

SEQ ID NO: 57305 - DNA, 20 bp, Artificial Sequence
  chemically synthesized
aaaacctaccgcaagttgcc

SEQ ID NO: 57306 - DNA, 20 bp, Artificial Sequence
  chemically synthesized
cctaccgcaagttgccagga

SEQ ID NO: 57307 - DNA, 20 bp, Artificial Sequence
  chemically synthesized
agttgccaggaaagttgatg

SEQ ID NO: 57308 - DNA, 20 bp, Artificial Sequence
  chemically synthesized
ggaaagttgatgtggtctgc

SEQ ID NO: 57309 - DNA, 20 bp, Artificial Sequence
  chemically synthesized
aagttgatgtggtctgcgag

SEQ ID NO: 57310 - DNA, 20 bp, Artificial Sequence
  chemically synthesized
agttgatgtggtctgcgagt

SEQ ID NO: 57311 - DNA, 20 bp, Artificial Sequence
  chemically synthesized
tgcgagtaggtgctgccatc

SEQ ID NO: 57312 - DNA, 20 bp, Artificial Sequence
  chemically synthesized
gagtaggtgctgccatccag

SEQ ID NO: 57313 - DNA, 20 bp, Artificial Sequence
  chemically synthesized
ctgccatccagtggccgaca

SEQ ID NO: 57314 - DNA, 20 bp, Artificial Sequence
  chemically synthesized
gccatccagtggccgacata

SEQ ID NO: 57315 - DNA, 20 bp, Artificial Sequence
  chemically synthesized
gacatagagatgtcatctct

SEQ ID NO: 57316 - DNA, 20 bp, Artificial Sequence
  chemically synthesized
acatagagatgtcatctctg

SEQ ID NO: 57317 - DNA, 20 bp, Artificial Sequence
  chemically synthesized
catagagatgtcatctctga

SEQ ID NO: 57318 - DNA, 20 bp, Artificial Sequence
  chemically synthesized
agagatgtcatctctgaggg

SEQ ID NO: 57319 - DNA, 20 bp, Artificial Sequence
  chemically synthesized
gagatgtcatctctgagggc

SEQ ID NO: 57320 - DNA, 20 bp, Artificial Sequence
  chemically synthesized
atgtcatctctgagggcagg

SEQ ID NO: 57321 - DNA, 20 bp, Artificial Sequence
  chemically synthesized
tgtcatctctgagggcaggt

SEQ ID NO: 57322 - DNA, 20 bp, Artificial Sequence
  chemically synthesized
ctctgagggcaggtaggcca

SEQ ID NO: 57323 - DNA, 20 bp, Artificial Sequence
  chemically synthesized
tctgagggcaggtaggccac

SEQ ID NO: 57324 - DNA, 20 bp, Artificial Sequence
  chemically synthesized
gcaggtaggccacaggtgac

SEQ ID NO: 57325 - DNA, 20 bp, Artificial Sequence
  chemically synthesized
aggtaggccacaggtgacaa

SEQ ID NO: 57326 - DNA, 20 bp, Artificial Sequence
  chemically synthesized
ggtaggccacaggtgacaag

SEQ ID NO: 57327 - DNA, 20 bp, Artificial Sequence
  chemically synthesized
cacaggtgacaagaggattg

SEQ ID NO: 57328 - DNA, 20 bp, Artificial Sequence
  chemically synthesized
aggattgaagccctccctga

SEQ ID NO: 57329 - DNA, 20 bp, Artificial Sequence
  chemically synthesized
ggattgaagccctccctgat

SEQ ID NO: 57330 - DNA, 20 bp, Artificial Sequence
  chemically synthesized
gattgaagccctccctgatg

SEQ ID NO: 57331 - DNA, 20 bp, Artificial Sequence
  chemically synthesized
agccctccctgatggggcct

SEQ ID NO: 57332 - DNA, 20 bp, Artificial Sequence
  chemically synthesized
gccctccctgatggggcctt

SEQ ID NO: 57333 - DNA, 20 bp, Artificial Sequence
  chemically synthesized
ccctccctgatggggccttg

SEQ ID NO: 57334 - DNA, 20 bp, Artificial Sequence
  chemically synthesized
ctccctgatggggccttggg

SEQ ID NO: 57335 - DNA, 20 bp, Artificial Sequence
  chemically synthesized
ccctgatggggccttgggga

SEQ ID NO: 57336 - DNA, 20 bp, Artificial Sequence
  chemically synthesized
cctgatggggccttggggag

SEQ ID NO: 57337 - DNA, 20 bp, Artificial Sequence
  chemically synthesized
ctgatggggccttggggaga

SEQ ID NO: 57338 - DNA, 20 bp, Artificial Sequence
  chemically synthesized
atggggccttggggagaggg

SEQ ID NO: 57339 - DNA, 20 bp, Artificial Sequence
  chemically synthesized
gggccttggggagagggcag

SEQ ID NO: 57340 - DNA, 20 bp, Artificial Sequence
  chemically synthesized
ggccttggggagagggcagc

SEQ ID NO: 57341 - DNA, 20 bp, Artificial Sequence
  chemically synthesized
gccttggggagagggcagca

SEQ ID NO: 57342 - DNA, 20 bp, Artificial Sequence
  chemically synthesized
tggggagagggcagcagggt

SEQ ID NO: 57343 - DNA, 20 bp, Artificial Sequence
  chemically synthesized
agagggcagcagggtaagtc

SEQ ID NO: 57344 - DNA, 20 bp, Artificial Sequence
  chemically synthesized
gggcagcagggtaagtccag

SEQ ID NO: 57345 - DNA, 20 bp, Artificial Sequence
  chemically synthesized
cagcagggtaagtccagcgg

SEQ ID NO: 57346 - DNA, 20 bp, Artificial Sequence
  chemically synthesized
agcagggtaagtccagcggc

SEQ ID NO: 57347 - DNA, 20 bp, Artificial Sequence
  chemically synthesized
ggtaagtccagcggcaggat

SEQ ID NO: 57348 - DNA, 20 bp, Artificial Sequence
  chemically synthesized
caggatcagtccattgattg

SEQ ID NO: 57349 - DNA, 20 bp, Artificial Sequence
  chemically synthesized
attgtggatgacgactgacc

SEQ ID NO: 57350 - DNA, 20 bp, Artificial Sequence
  chemically synthesized
actgacctggaaaatcccct

SEQ ID NO: 57351 - DNA, 20 bp, Artificial Sequence
  chemically synthesized
ccaaactctgcatttgatcc

SEQ ID NO: 57352 - DNA, 20 bp, Artificial Sequence
  chemically synthesized
actctgcatttgatccaagt

SEQ ID NO: 57353 - DNA, 20 bp, Artificial Sequence
  chemically synthesized
ctctgcatttgatccaagtc

SEQ ID NO: 57354 - DNA, 20 bp, Artificial Sequence
  chemically synthesized
tctgcatttgatccaagtca

SEQ ID NO: 57355 - DNA, 20 bp, Artificial Sequence
  chemically synthesized
gatccaagtcagggaacacc

SEQ ID NO: 57356 - DNA, 20 bp, Artificial Sequence
  chemically synthesized
agggaacacctggaaacatg

SEQ ID NO: 57357 - DNA, 20 bp, Artificial Sequence
  chemically synthesized
gggaacacctggaaacatga

SEQ ID NO: 57358 - DNA, 20 bp, Artificial Sequence
  chemically synthesized
ggaacacctggaaacatgaa

SEQ ID NO: 57359 - DNA, 20 bp, Artificial Sequence
  chemically synthesized
gaacacctggaaacatgaag

SEQ ID NO: 57360 - DNA, 20 bp, Artificial Sequence
  chemically synthesized
acacctggaaacatgaaggg

SEQ ID NO: 57361 - DNA, 20 bp, Artificial Sequence
  chemically synthesized
acctggaaacatgaagggga

SEQ ID NO: 57362 - DNA, 20 bp, Artificial Sequence
  chemically synthesized
tggaaacatgaaggggagag

SEQ ID NO: 57363 - DNA, 20 bp, Artificial Sequence
  chemically synthesized
ggaaacatgaaggggagagc

SEQ ID NO: 57364 - DNA, 20 bp, Artificial Sequence
  chemically synthesized
gaaaactttgacctccctct

SEQ ID NO: 57365 - DNA, 20 bp, Artificial Sequence
  chemically synthesized
aaactttgacctccctctca

SEQ ID NO: 57366 - DNA, 20 bp, Artificial Sequence
  chemically synthesized
aactttgacctccctctcag

SEQ ID NO: 57367 - DNA, 20 bp, Artificial Sequence
  chemically synthesized
tgacctccctctcagaggct

SEQ ID NO: 57368 - DNA, 20 bp, Artificial Sequence
  chemically synthesized
ctgatgtcattattgacatg

SEQ ID NO: 57369 - DNA, 20 bp, Artificial Sequence
  chemically synthesized
acatgtagaaaattgatgaa

SEQ ID NO: 57370 - DNA, 20 bp, Artificial Sequence
  chemically synthesized
catgtagaaaattgatgaac

SEQ ID NO: 57371 - DNA, 20 bp, Artificial Sequence
  chemically synthesized
gaaaattgatgaacaggcct

SEQ ID NO: 57372 - DNA, 20 bp, Artificial Sequence
  chemically synthesized
caggcctgagttatgttttg

SEQ ID NO: 57373 - DNA, 20 bp, Artificial Sequence
  chemically synthesized
ttatgttttgtggcacctca

SEQ ID NO: 57374 - DNA, 20 bp, Artificial Sequence
  chemically synthesized
ttttgtggcacctcatggtc

SEQ ID NO: 57375 - DNA, 20 bp, Artificial Sequence
  chemically synthesized
gtggcacctcatggtctagt

SEQ ID NO: 57376 - DNA, 20 bp, Artificial Sequence
  chemically synthesized
catggtctagttagtgttct

SEQ ID NO: 57377 - DNA, 20 bp, Artificial Sequence
  chemically synthesized
tgttctgagaatcattttct

SEQ ID NO: 57378 - DNA, 20 bp, Artificial Sequence
  chemically synthesized
tctgagaatcattttctcag

SEQ ID NO: 57379 - DNA, 20 bp, Artificial Sequence
  chemically synthesized
tcattttctcagtggacctg

SEQ ID NO: 57380 - DNA, 20 bp, Artificial Sequence
  chemically synthesized
cattttctcagtggacctgc

SEQ ID NO: 57381 - DNA, 20 bp, Artificial Sequence
  chemically synthesized
ttctcagtggacctgcaggt

SEQ ID NO: 57382 - DNA, 20 bp, Artificial Sequence
  chemically synthesized
agtggacctgcaggtgagac

SEQ ID NO: 57383 - DNA, 20 bp, Artificial Sequence
  chemically synthesized
gtggacctgcaggtgagacc

SEQ ID NO: 57384 - DNA, 20 bp, Artificial Sequence
  chemically synthesized
acctgcaggtgagaccaggc

SEQ ID NO: 57385 - DNA, 20 bp, Artificial Sequence
  chemically synthesized
cctgcaggtgagaccaggcg

SEQ ID NO: 57386 - DNA, 20 bp, Artificial Sequence
  chemically synthesized
gcaggtgagaccaggcgagg

SEQ ID NO: 57387 - DNA, 20 bp, Artificial Sequence
  chemically synthesized
ggtgagaccaggcgaggcag

SEQ ID NO: 57388 - DNA, 20 bp, Artificial Sequence
  chemically synthesized
gaccaggcgaggcagaagcc

SEQ ID NO: 57389 - DNA, 20 bp, Artificial Sequence
  chemically synthesized
caggcgaggcagaagcctag

SEQ ID NO: 57390 - DNA, 20 bp, Artificial Sequence
  chemically synthesized
aggcgaggcagaagcctagt

SEQ ID NO: 57391 - DNA, 20 bp, Artificial Sequence
  chemically synthesized
ggcgaggcagaagcctagtg

SEQ ID NO: 57392 - DNA, 20 bp, Artificial Sequence
  chemically synthesized
gcgaggcagaagcctagtgg

SEQ ID NO: 57393 - DNA, 20 bp, Artificial Sequence
  chemically synthesized
ggcagaagcctagtggggga

SEQ ID NO: 57394 - DNA, 20 bp, Artificial Sequence
  chemically synthesized
agaagcctagtgggggatgg

SEQ ID NO: 57395 - DNA, 20 bp, Artificial Sequence
  chemically synthesized
gcctagtgggggatggtggt

SEQ ID NO: 57396 - DNA, 20 bp, Artificial Sequence
  chemically synthesized
ggatggtggttagaaatgtg

SEQ ID NO: 57397 - DNA, 20 bp, Artificial Sequence
  chemically synthesized
ggtggttagaaatgtgtgga

SEQ ID NO: 57398 - DNA, 20 bp, Artificial Sequence
  chemically synthesized
tagaaatgtgtggatggttg

SEQ ID NO: 57399 - DNA, 20 bp, Artificial Sequence
  chemically synthesized
agaaatgtgtggatggttgt

SEQ ID NO: 57400 - DNA, 20 bp, Artificial Sequence
  chemically synthesized
gaaatgtgtggatggttgtg

SEQ ID NO: 57401 - DNA, 20 bp, Artificial Sequence
  chemically synthesized
atgtgtggatggttgtgggg

SEQ ID NO: 57402 - DNA, 20 bp, Artificial Sequence
  chemically synthesized
tgtggatggttgtggggcag

SEQ ID NO: 57403 - DNA, 20 bp, Artificial Sequence
  chemically synthesized
tggttgtggggcagaagaaa

SEQ ID NO: 57404 - DNA, 20 bp, Artificial Sequence
  chemically synthesized
tgtggggcagaagaaacagc

SEQ ID NO: 57405 - DNA, 20 bp, Artificial Sequence
  chemically synthesized
ggggcagaagaaacagcaag

SEQ ID NO: 57406 - DNA, 20 bp, Artificial Sequence
  chemically synthesized
gggcagaagaaacagcaagt

SEQ ID NO: 57407 - DNA, 20 bp, Artificial Sequence
  chemically synthesized
aagaaacagcaagtaggctc

SEQ ID NO: 57408 - DNA, 20 bp, Artificial Sequence
  chemically synthesized
agaaacagcaagtaggctct

SEQ ID NO: 57409 - DNA, 20 bp, Artificial Sequence
  chemically synthesized
acagcaagtaggctctgggc

SEQ ID NO: 57410 - DNA, 20 bp, Artificial Sequence
  chemically synthesized
gctctgggccagctacaaac

SEQ ID NO: 57411 - DNA, 20 bp, Artificial Sequence
  chemically synthesized
atgatgtctactgatgatga

SEQ ID NO: 57412 - DNA, 20 bp, Artificial Sequence
  chemically synthesized
tctactgatgatgatagtga

SEQ ID NO: 57413 - DNA, 20 bp, Artificial Sequence
  chemically synthesized
actgatgatgatagtgatgg

SEQ ID NO: 57414 - DNA, 20 bp, Artificial Sequence
  chemically synthesized
gatgatgatagtgatggtgg

SEQ ID NO: 57415 - DNA, 20 bp, Artificial Sequence
  chemically synthesized
gatgatagtgatggtggtgg

SEQ ID NO: 57416 - DNA, 20 bp, Artificial Sequence
  chemically synthesized
gatagtgatggtggtggtgg

SEQ ID NO: 57417 - DNA, 20 bp, Artificial Sequence
  chemically synthesized
gatggtggtggtggtggtga

SEQ ID NO: 57418 - DNA, 20 bp, Artificial Sequence
  chemically synthesized
ggtggtggtggtggtgatgg

SEQ ID NO: 57419 - DNA, 20 bp, Artificial Sequence
  chemically synthesized
ggtggtggtggtgatggtgg

SEQ ID NO: 57420 - DNA, 20 bp, Artificial Sequence
  chemically synthesized
ggtggtggtgatggtggtgg

SEQ ID NO: 57421 - DNA, 20 bp, Artificial Sequence
  chemically synthesized
ggtggtggtaataattgtga

SEQ ID NO: 57422 - DNA, 20 bp, Artificial Sequence
  chemically synthesized
ggtggtaataattgtgatgg

SEQ ID NO: 57423 - DNA, 20 bp, Artificial Sequence
  chemically synthesized
ggtaataattgtgatggtgg

SEQ ID NO: 57424 - DNA, 20 bp, Artificial Sequence
  chemically synthesized
tggtggtggaatgatgatga

SEQ ID NO: 57425 - DNA, 20 bp, Artificial Sequence
  chemically synthesized
tggtggaatgatgatgatgg

SEQ ID NO: 57426 - DNA, 20 bp, Artificial Sequence
  chemically synthesized
tggaatgatgatgatggtgg

SEQ ID NO: 57427 - DNA, 20 bp, Artificial Sequence
  chemically synthesized
aatgatgatgatggtggtgg

SEQ ID NO: 57428 - DNA, 20 bp, Artificial Sequence
  chemically synthesized
atgatgatgatggtggtggt

SEQ ID NO: 57429 - DNA, 20 bp, Artificial Sequence
  chemically synthesized
atgatgatggtggtggtggg

SEQ ID NO: 57430 - DNA, 20 bp, Artificial Sequence
  chemically synthesized
gtggtggtgggtagtaatga

SEQ ID NO: 57431 - DNA, 20 bp, Artificial Sequence
  chemically synthesized
gtgggtagtaatgatggtgt

SEQ ID NO: 57432 - DNA, 20 bp, Artificial Sequence
  chemically synthesized
agtaatgatggtgttggtga

SEQ ID NO: 57433 - DNA, 20 bp, Artificial Sequence
  chemically synthesized
aatgatggtgttggtgatgg

SEQ ID NO: 57434 - DNA, 20 bp, Artificial Sequence
  chemically synthesized
gatggtgttggtgatggtgg

SEQ ID NO: 57435 - DNA, 20 bp, Artificial Sequence
  chemically synthesized
ggtgttggtgatggtggtag

SEQ ID NO: 57436 - DNA, 20 bp, Artificial Sequence
  chemically synthesized
ggtgatggtggtagtggtcg

SEQ ID NO: 57437 - DNA, 20 bp, Artificial Sequence
  chemically synthesized
ggtggtagtggtcgtggtga

SEQ ID NO: 57438 - DNA, 20 bp, Artificial Sequence
  chemically synthesized
agtggtcgtggtgatggtga

SEQ ID NO: 57439 - DNA, 20 bp, Artificial Sequence
  chemically synthesized
cgtggtgatggtgatagtga

SEQ ID NO: 57440 - DNA, 20 bp, Artificial Sequence
  chemically synthesized
gatggtgatagtgatagtga

SEQ ID NO: 57441 - DNA, 20 bp, Artificial Sequence
  chemically synthesized
ggtgatagtgatagtgatgg

SEQ ID NO: 57442 - DNA, 20 bp, Artificial Sequence
  chemically synthesized
gatagtgatagtgatggtgg

SEQ ID NO: 57443 - DNA, 20 bp, Artificial Sequence
  chemically synthesized
ggtggtaatgataatgctaa

SEQ ID NO: 57444 - DNA, 20 bp, Artificial Sequence
  chemically synthesized
ggtaatgataatgctaatgg

SEQ ID NO: 57445 - DNA, 20 bp, Artificial Sequence
  chemically synthesized
aatgataatgctaatggtgg

SEQ ID NO: 57446 - DNA, 20 bp, Artificial Sequence
  chemically synthesized
gataatgattatcatgatga

SEQ ID NO: 57447 - DNA, 20 bp, Artificial Sequence
  chemically synthesized
aatgattatcatgatgatag

SEQ ID NO: 57448 - DNA, 20 bp, Artificial Sequence
  chemically synthesized
gattatcatgatgatagcgg

SEQ ID NO: 57449 - DNA, 20 bp, Artificial Sequence
  chemically synthesized
catgatgatagcggtggtga

SEQ ID NO: 57450 - DNA, 20 bp, Artificial Sequence
  chemically synthesized
gatagcggtggtgatggtga

SEQ ID NO: 57451 - DNA, 20 bp, Artificial Sequence
  chemically synthesized
gatggtgatggtgatgataa

SEQ ID NO: 57452 - DNA, 20 bp, Artificial Sequence
  chemically synthesized
gatggtgatgataatggtga

SEQ ID NO: 57453 - DNA, 20 bp, Artificial Sequence
  chemically synthesized
ggtgatgataatggtgatgg

SEQ ID NO: 57454 - DNA, 20 bp, Artificial Sequence
  chemically synthesized
gatgataatggtgatggtgg

SEQ ID NO: 57455 - DNA, 20 bp, Artificial Sequence
  chemically synthesized
tggtggtagaatgatgatga

SEQ ID NO: 57456 - DNA, 20 bp, Artificial Sequence
  chemically synthesized
tagaatgatgatgatggtga

SEQ ID NO: 57457 - DNA, 20 bp, Artificial Sequence
  chemically synthesized
aatgatgatgatggtgatgg

SEQ ID NO: 57458 - DNA, 20 bp, Artificial Sequence
  chemically synthesized
gatgatgatggtgatggtgg

SEQ ID NO: 57459 - DNA, 20 bp, Artificial Sequence
  chemically synthesized
gatgatggtgatggtggtgg

SEQ ID NO: 57460 - DNA, 20 bp, Artificial Sequence
  chemically synthesized
gatggtgatggtggtggtgg

SEQ ID NO: 57461 - DNA, 20 bp, Artificial Sequence
  chemically synthesized
ggtgatggtggtggtggtgg

SEQ ID NO: 57462 - DNA, 20 bp, Artificial Sequence
  chemically synthesized
ggtggtggtagtaatgatga

SEQ ID NO: 57463 - DNA, 20 bp, Artificial Sequence
  chemically synthesized
ggtggtagtaatgatgatgg

SEQ ID NO: 57464 - DNA, 20 bp, Artificial Sequence
  chemically synthesized
ggtagtaatgatgatggtgg

SEQ ID NO: 57465 - DNA, 20 bp, Artificial Sequence
  chemically synthesized
atggtggtggtgatgatgtt

SEQ ID NO: 57466 - DNA, 20 bp, Artificial Sequence
  chemically synthesized
tggtggtggtgatgatgttg

SEQ ID NO: 57467 - DNA, 20 bp, Artificial Sequence
  chemically synthesized
ggtggtggtgatgatgttga

SEQ ID NO: 57468 - DNA, 20 bp, Artificial Sequence
  chemically synthesized
gatgttgagggtgatgataa

SEQ ID NO: 57469 - DNA, 20 bp, Artificial Sequence
  chemically synthesized
gagggtgatgataatagtga

SEQ ID NO: 57470 - DNA, 20 bp, Artificial Sequence
  chemically synthesized
ggtgatgataatagtgacag

SEQ ID NO: 57471 - DNA, 20 bp, Artificial Sequence
  chemically synthesized
gatgataatagtgacagtgg

SEQ ID NO: 57472 - DNA, 20 bp, Artificial Sequence
  chemically synthesized
gataatagtgacagtggtgg

SEQ ID NO: 57473 - DNA, 20 bp, Artificial Sequence
  chemically synthesized
agtggtggtggtaatgataa

SEQ ID NO: 57474 - DNA, 20 bp, Artificial Sequence
  chemically synthesized
ggtggtaatgataatggtga

SEQ ID NO: 57475 - DNA, 20 bp, Artificial Sequence
  chemically synthesized
ggtaatgataatggtgatgg

SEQ ID NO: 57476 - DNA, 20 bp, Artificial Sequence
  chemically synthesized
taatggtgatggtggaatga

SEQ ID NO: 57477 - DNA, 20 bp, Artificial Sequence
  chemically synthesized
tgatggtggaatgatggtga

SEQ ID NO: 57478 - DNA, 20 bp, Artificial Sequence
  chemically synthesized
tggtggaatgatggtgatgg

SEQ ID NO: 57479 - DNA, 20 bp, Artificial Sequence
  chemically synthesized
tggaatgatggtgatggtgg

SEQ ID NO: 57480 - DNA, 20 bp, Artificial Sequence
  chemically synthesized
tgatggtggtggaatgatga

SEQ ID NO: 57481 - DNA, 20 bp, Artificial Sequence
  chemically synthesized
tggtggtggaatgatgatgg

SEQ ID NO: 57482 - DNA, 20 bp, Artificial Sequence
  chemically synthesized
ggaatgatgatggtggtgct

SEQ ID NO: 57483 - DNA, 20 bp, Artificial Sequence
  chemically synthesized
atgatgatggtggtgctgag

SEQ ID NO: 57484 - DNA, 20 bp, Artificial Sequence
  chemically synthesized
gtggtgctgagtagtaatga

SEQ ID NO: 57485 - DNA, 20 bp, Artificial Sequence
  chemically synthesized
ctgagtagtaatgatggtga

SEQ ID NO: 57486 - DNA, 20 bp, Artificial Sequence
  chemically synthesized
agtagtaatgatggtgatgg

SEQ ID NO: 57487 - DNA, 20 bp, Artificial Sequence
  chemically synthesized
agtaatgatggtgatggtgg

SEQ ID NO: 57488 - DNA, 20 bp, Artificial Sequence
  chemically synthesized
aatgatggtgatggtggtgg

SEQ ID NO: 57489 - DNA, 20 bp, Artificial Sequence
  chemically synthesized
ggtgatggtggtggtggctg

SEQ ID NO: 57490 - DNA, 20 bp, Artificial Sequence
  chemically synthesized
ggtggtggctgtggtgatga

SEQ ID NO: 57491 - DNA, 20 bp, Artificial Sequence
  chemically synthesized
ggtggctgtggtgatgatgg

SEQ ID NO: 57492 - DNA, 20 bp, Artificial Sequence
  chemically synthesized
ggctgtggtgatgatggtgg

SEQ ID NO: 57493 - DNA, 20 bp, Artificial Sequence
  chemically synthesized
tgtggtgatgatggtggtgg

SEQ ID NO: 57494 - DNA, 20 bp, Artificial Sequence
  chemically synthesized
ggtgatgatggtggtggtag

SEQ ID NO: 57495 - DNA, 20 bp, Artificial Sequence
  chemically synthesized
gatgatggtggtggtagtgg

SEQ ID NO: 57496 - DNA, 20 bp, Artificial Sequence
  chemically synthesized
ggtagtggtagtaacgatga

SEQ ID NO: 57497 - DNA, 20 bp, Artificial Sequence
  chemically synthesized
agtggtagtaacgatgatgg

SEQ ID NO: 57498 - DNA, 20 bp, Artificial Sequence
  chemically synthesized
ggtagtaacgatgatggtgg

SEQ ID NO: 57499 - DNA, 20 bp, Artificial Sequence
  chemically synthesized
gatgatggtggtggtgatga

SEQ ID NO: 57500 - DNA, 20 bp, Artificial Sequence
  chemically synthesized
ggtggtgatgatagtgatga

SEQ ID NO: 57501 - DNA, 20 bp, Artificial Sequence
  chemically synthesized
gtgatgatggtgatgatgtt

SEQ ID NO: 57502 - DNA, 20 bp, Artificial Sequence
  chemically synthesized
tgatgatggtgatgatgttg

SEQ ID NO: 57503 - DNA, 20 bp, Artificial Sequence
  chemically synthesized
gatgatggtgatgatgttga

SEQ ID NO: 57504 - DNA, 20 bp, Artificial Sequence
  chemically synthesized
gatgttgagggtgatgataa

SEQ ID NO: 57505 - DNA, 20 bp, Artificial Sequence
  chemically synthesized
gagggtgatgataatagtga

SEQ ID NO: 57506 - DNA, 20 bp, Artificial Sequence
  chemically synthesized
ggtgatgataatagtgatag

SEQ ID NO: 57507 - DNA, 20 bp, Artificial Sequence
  chemically synthesized
gatgataatagtgatagcgg

SEQ ID NO: 57508 - DNA, 20 bp, Artificial Sequence
  chemically synthesized
taccaccaccatcatcacca

SEQ ID NO: 57509 - DNA, 20 bp, Artificial Sequence
  chemically synthesized
ccatcaccatcattactact

SEQ ID NO: 57510 - DNA, 20 bp, Artificial Sequence
  chemically synthesized
attatcattaccaccaccat

SEQ ID NO: 57511 - DNA, 20 bp, Artificial Sequence
  chemically synthesized
accaccatcactatcatcat

SEQ ID NO: 57512 - DNA, 20 bp, Artificial Sequence
  chemically synthesized
accatcactatcatcatcag

SEQ ID NO: 57513 - DNA, 20 bp, Artificial Sequence
  chemically synthesized
atcagtagacatcatataac

SEQ ID NO: 57514 - DNA, 20 bp, Artificial Sequence
  chemically synthesized
gacatcatataaccagtttg

SEQ ID NO: 57515 - DNA, 20 bp, Artificial Sequence
  chemically synthesized
tcatataaccagtttgtagc

SEQ ID NO: 57516 - DNA, 20 bp, Artificial Sequence
  chemically synthesized
taaccagtttgtagctggcc

SEQ ID NO: 57517 - DNA, 20 bp, Artificial Sequence
  chemically synthesized
accagtttgtagctggccca

SEQ ID NO: 57518 - DNA, 20 bp, Artificial Sequence
  chemically synthesized
ttctaaccaccatcccccac

SEQ ID NO: 57519 - DNA, 20 bp, Artificial Sequence
  chemically synthesized
tctaaccaccatcccccact

SEQ ID NO: 57520 - DNA, 20 bp, Artificial Sequence
  chemically synthesized
cactaggcttctgcctcgcc

SEQ ID NO: 57521 - DNA, 20 bp, Artificial Sequence
  chemically synthesized
gcctcgcctggtctcacctg

SEQ ID NO: 57522 - DNA, 20 bp, Artificial Sequence
  chemically synthesized
cctcgcctggtctcacctgc

SEQ ID NO: 57523 - DNA, 20 bp, Artificial Sequence
  chemically synthesized
gtctcacctgcaggtccact

SEQ ID NO: 57524 - DNA, 20 bp, Artificial Sequence
  chemically synthesized
tccactgagaaaatgattct

SEQ ID NO: 57525 - DNA, 20 bp, Artificial Sequence
  chemically synthesized
atgattctcagaacactaac

SEQ ID NO: 57526 - DNA, 20 bp, Artificial Sequence
  chemically synthesized
cagaacactaactagaccat

SEQ ID NO: 57527 - DNA, 20 bp, Artificial Sequence
  chemically synthesized
agaacactaactagaccatg

SEQ ID NO: 57528 - DNA, 20 bp, Artificial Sequence
  chemically synthesized
aggtgccacaaaacataact

SEQ ID NO: 57529 - DNA, 20 bp, Artificial Sequence
  chemically synthesized
ggtgccacaaaacataactc

SEQ ID NO: 57530 - DNA, 20 bp, Artificial Sequence
  chemically synthesized
ctacatgtcaataatgacat

SEQ ID NO: 57531 - DNA, 20 bp, Artificial Sequence
  chemically synthesized
tacatgtcaataatgacatc

SEQ ID NO: 57532 - DNA, 20 bp, Artificial Sequence
  chemically synthesized
aataatgacatcaggtcaat

SEQ ID NO: 57533 - DNA, 20 bp, Artificial Sequence
  chemically synthesized
atcaggtcaattggcgttct

SEQ ID NO: 57534 - DNA, 20 bp, Artificial Sequence
  chemically synthesized
aattggcgttctcagcctct

SEQ ID NO: 57535 - DNA, 20 bp, Artificial Sequence
  chemically synthesized
ttggcgttctcagcctctga

SEQ ID NO: 57536 - DNA, 20 bp, Artificial Sequence
  chemically synthesized
tggcgttctcagcctctgag

SEQ ID NO: 57537 - DNA, 20 bp, Artificial Sequence
  chemically synthesized
ggcgttctcagcctctgaga

SEQ ID NO: 57538 - DNA, 20 bp, Artificial Sequence
  chemically synthesized
cgttctcagcctctgagagg

SEQ ID NO: 57539 - DNA, 20 bp, Artificial Sequence
  chemically synthesized
gttctcagcctctgagaggg

SEQ ID NO: 57540 - DNA, 20 bp, Artificial Sequence
  chemically synthesized
agcctctgagagggaggtca

SEQ ID NO: 57541 - DNA, 20 bp, Artificial Sequence
  chemically synthesized
tgctctccccttcatgtttc

SEQ ID NO: 57542 - DNA, 20 bp, Artificial Sequence
  chemically synthesized
gctctccccttcatgtttcc

SEQ ID NO: 57543 - DNA, 20 bp, Artificial Sequence
  chemically synthesized
tttccaggtgttccctgact

SEQ ID NO: 57544 - DNA, 20 bp, Artificial Sequence
  chemically synthesized
tccctgacttggatcaaatg

SEQ ID NO: 57545 - DNA, 20 bp, Artificial Sequence
  chemically synthesized
cctgacttggatcaaatgca

SEQ ID NO: 57546 - DNA, 20 bp, Artificial Sequence
  chemically synthesized
cttggatcaaatgcagagtt

SEQ ID NO: 57547 - DNA, 20 bp, Artificial Sequence
  chemically synthesized
tggatcaaatgcagagtttg

SEQ ID NO: 57548 - DNA, 20 bp, Artificial Sequence
  chemically synthesized
ggatcaaatgcagagtttgg

SEQ ID NO: 57549 - DNA, 20 bp, Artificial Sequence
  chemically synthesized
atgcagagtttggaggtgtt

SEQ ID NO: 57550 - DNA, 20 bp, Artificial Sequence
  chemically synthesized
tgcagagtttggaggtgttg

SEQ ID NO: 57551 - DNA, 20 bp, Artificial Sequence
  chemically synthesized
agtttggaggtgttgaggcc

SEQ ID NO: 57552 - DNA, 20 bp, Artificial Sequence
  chemically synthesized
gtttggaggtgttgaggcca

SEQ ID NO: 57553 - DNA, 20 bp, Artificial Sequence
  chemically synthesized
tttggaggtgttgaggccaa

SEQ ID NO: 57554 - DNA, 20 bp, Artificial Sequence
  chemically synthesized
ttggaggtgttgaggccaag

SEQ ID NO: 57555 - DNA, 20 bp, Artificial Sequence
  chemically synthesized
ttgaggccaaggggattttc

SEQ ID NO: 57556 - DNA, 20 bp, Artificial Sequence
  chemically synthesized
tgaggccaaggggattttcc

SEQ ID NO: 57557 - DNA, 20 bp, Artificial Sequence
  chemically synthesized
gccaaggggattttccaggt

SEQ ID NO: 57558 - DNA, 20 bp, Artificial Sequence
  chemically synthesized
cagtcgtcatccacaatcaa

SEQ ID NO: 57559 - DNA, 20 bp, Artificial Sequence
  chemically synthesized
caatggactgatcctgccgc

SEQ ID NO: 57560 - DNA, 20 bp, Artificial Sequence
  chemically synthesized
taccctgctgccctctcccc

SEQ ID NO: 57561 - DNA, 20 bp, Artificial Sequence
  chemically synthesized
accctgctgccctctcccca

SEQ ID NO: 57562 - DNA, 20 bp, Artificial Sequence
  chemically synthesized
ccctctccccaaggccccat

SEQ ID NO: 57563 - DNA, 20 bp, Artificial Sequence
  chemically synthesized
cctctccccaaggccccatc

SEQ ID NO: 57564 - DNA, 20 bp, Artificial Sequence
  chemically synthesized
ctctccccaaggccccatca

SEQ ID NO: 57565 - DNA, 20 bp, Artificial Sequence
  chemically synthesized
ctccccaaggccccatcagg

SEQ ID NO: 57566 - DNA, 20 bp, Artificial Sequence
  chemically synthesized
tccccaaggccccatcaggg

SEQ ID NO: 57567 - DNA, 20 bp, Artificial Sequence
  chemically synthesized
ccccaaggccccatcaggga

SEQ ID NO: 57568 - DNA, 20 bp, Artificial Sequence
  chemically synthesized
ttcaatcctcttgtcacctg

SEQ ID NO: 57569 - DNA, 20 bp, Artificial Sequence
  chemically synthesized
acctgtggcctacctgccct

SEQ ID NO: 57570 - DNA, 20 bp, Artificial Sequence
  chemically synthesized
ctgtggcctacctgccctca

SEQ ID NO: 57571 - DNA, 20 bp, Artificial Sequence
  chemically synthesized
cagagatgacatctctatgt

SEQ ID NO: 57572 - DNA, 20 bp, Artificial Sequence
  chemically synthesized
gacatctctatgtcggccac

SEQ ID NO: 57573 - DNA, 20 bp, Artificial Sequence
  chemically synthesized
tctctatgtcggccactgga

SEQ ID NO: 57574 - DNA, 20 bp, Artificial Sequence
  chemically synthesized
ctatgtcggccactggatgg

SEQ ID NO: 57575 - DNA, 20 bp, Artificial Sequence
  chemically synthesized
tggatggcagcacctactcg

SEQ ID NO: 57576 - DNA, 20 bp, Artificial Sequence
  chemically synthesized
gcagaccacatcaactttcc

SEQ ID NO: 57577 - DNA, 20 bp, Artificial Sequence
  chemically synthesized
tcaactttcctggcaacttg

SEQ ID NO: 57578 - DNA, 20 bp, Artificial Sequence
  chemically synthesized
actttcctggcaacttgcgg

SEQ ID NO: 57579 - DNA, 20 bp, Artificial Sequence
  chemically synthesized
ctttcctggcaacttgcggt

SEQ ID NO: 57580 - DNA, 20 bp, Artificial Sequence
  chemically synthesized
cggtaggttttcaccattat

SEQ ID NO: 57581 - DNA, 20 bp, Artificial Sequence
  chemically synthesized
ggtaggttttcaccattatc

SEQ ID NO: 57582 - DNA, 20 bp, Artificial Sequence
  chemically synthesized
ggatgtttgccttgctcaaa

SEQ ID NO: 57583 - DNA, 20 bp, Artificial Sequence
  chemically synthesized
tgtttgccttgctcaaatag

SEQ ID NO: 57584 - DNA, 20 bp, Artificial Sequence
  chemically synthesized
cttgctcaaatagcagattc

SEQ ID NO: 57585 - DNA, 20 bp, Artificial Sequence
  chemically synthesized
tgctcaaatagcagattcta

SEQ ID NO: 57586 - DNA, 20 bp, Artificial Sequence
  chemically synthesized
aaatagcagattctagagaa

SEQ ID NO: 57587 - DNA, 20 bp, Artificial Sequence
  chemically synthesized
tgctccctcacacaactatg

SEQ ID NO: 57588 - DNA, 20 bp, Artificial Sequence
  chemically synthesized
cctcacacaactatgtagtc

SEQ ID NO: 57589 - DNA, 20 bp, Artificial Sequence
  chemically synthesized
ctcacacaactatgtagtcc

SEQ ID NO: 57590 - DNA, 20 bp, Artificial Sequence
  chemically synthesized
tgcaccctctgcccgatgct

SEQ ID NO: 57591 - DNA, 20 bp, Artificial Sequence
  chemically synthesized
accctctgcccgatgcttgg

SEQ ID NO: 57592 - DNA, 20 bp, Artificial Sequence
  chemically synthesized
tctgcccgatgcttggtagt

SEQ ID NO: 57593 - DNA, 20 bp, Artificial Sequence
  chemically synthesized
agtcagaaacttccatcatg

SEQ ID NO: 57594 - DNA, 20 bp, Artificial Sequence
  chemically synthesized
ttccatcatgcagctctgcc

SEQ ID NO: 57595 - DNA, 20 bp, Artificial Sequence
  chemically synthesized
catgcagctctgcccagatt

SEQ ID NO: 57596 - DNA, 20 bp, Artificial Sequence
  chemically synthesized
agctctgcccagattgagct

SEQ ID NO: 57597 - DNA, 20 bp, Artificial Sequence
  chemically synthesized
ctgcccagattgagctgagc

SEQ ID NO: 57598 - DNA, 20 bp, Artificial Sequence
  chemically synthesized
gattgagctgagctggcctc

SEQ ID NO: 57599 - DNA, 20 bp, Artificial Sequence
  chemically synthesized
ttgagctgagctggcctctg

SEQ ID NO: 57600 - DNA, 20 bp, Artificial Sequence
  chemically synthesized
gctgagctggcctctggagt

SEQ ID NO: 57601 - DNA, 20 bp, Artificial Sequence
  chemically synthesized
ctgagctggcctctggagtg

SEQ ID NO: 57602 - DNA, 20 bp, Artificial Sequence
  chemically synthesized
tggcctctggagtgaggtgc

SEQ ID NO: 57603 - DNA, 20 bp, Artificial Sequence
  chemically synthesized
ggcctctggagtgaggtgct

SEQ ID NO: 57604 - DNA, 20 bp, Artificial Sequence
  chemically synthesized
catgctgctcatgtcaactc

SEQ ID NO: 57605 - DNA, 20 bp, Artificial Sequence
  chemically synthesized
gctcatgtcaactccagatg

SEQ ID NO: 57606 - DNA, 20 bp, Artificial Sequence
  chemically synthesized
atgtcaactccagatgcagt

SEQ ID NO: 57607 - DNA, 20 bp, Artificial Sequence
  chemically synthesized
tgtcaactccagatgcagtc

SEQ ID NO: 57608 - DNA, 20 bp, Artificial Sequence
  chemically synthesized
gcagtcaggtttctgaacca

SEQ ID NO: 57609 - DNA, 20 bp, Artificial Sequence
  chemically synthesized
tgaaccaaagtcaatgatct

SEQ ID NO: 57610 - DNA, 20 bp, Artificial Sequence
  chemically synthesized
caaagtcaatgatctaagtg

SEQ ID NO: 57611 - DNA, 20 bp, Artificial Sequence
  chemically synthesized
caatgatctaagtgcagtca

SEQ ID NO: 57612 - DNA, 20 bp, Artificial Sequence
  chemically synthesized
aatgatctaagtgcagtcaa

SEQ ID NO: 57613 - DNA, 20 bp, Artificial Sequence
  chemically synthesized
ctaagtgcagtcaaaggctc

SEQ ID NO: 57614 - DNA, 20 bp, Artificial Sequence
  chemically synthesized
taagtgcagtcaaaggctct

SEQ ID NO: 57615 - DNA, 20 bp, Artificial Sequence
  chemically synthesized
aagtgcagtcaaaggctctg

SEQ ID NO: 57616 - DNA, 20 bp, Artificial Sequence
  chemically synthesized
agtgcagtcaaaggctctgg

SEQ ID NO: 57617 - DNA, 20 bp, Artificial Sequence
  chemically synthesized
gcagtcaaaggctctggggg

SEQ ID NO: 57618 - DNA, 20 bp, Artificial Sequence
  chemically synthesized
tcaaaggctctgggggaaga

SEQ ID NO: 57619 - DNA, 20 bp, Artificial Sequence
  chemically synthesized
aaaggctctgggggaagaaa

SEQ ID NO: 57620 - DNA, 20 bp, Artificial Sequence
  chemically synthesized
aggctctgggggaagaaaga

SEQ ID NO: 57621 - DNA, 20 bp, Artificial Sequence
  chemically synthesized
gctctgggggaagaaagaga

SEQ ID NO: 57622 - DNA, 20 bp, Artificial Sequence
  chemically synthesized
ttgcctgtgccatgctcgca

SEQ ID NO: 57623 - DNA, 20 bp, Artificial Sequence
  chemically synthesized
ctgtgccatgctcgcaaagc

SEQ ID NO: 57624 - DNA, 20 bp, Artificial Sequence
  chemically synthesized
tgtgccatgctcgcaaagca

SEQ ID NO: 57625 - DNA, 20 bp, Artificial Sequence
  chemically synthesized
tttttgcaaaattctaatga

SEQ ID NO: 57626 - DNA, 20 bp, Artificial Sequence
  chemically synthesized
tgcaaaattctaatgaaagc

SEQ ID NO: 57627 - DNA, 20 bp, Artificial Sequence
  chemically synthesized
gcaaaattctaatgaaagct

SEQ ID NO: 57628 - DNA, 20 bp, Artificial Sequence
  chemically synthesized
gaaagctgggcttgcaaaat

SEQ ID NO: 57629 - DNA, 20 bp, Artificial Sequence
  chemically synthesized
ggcttgcaaaattagaaaac

SEQ ID NO: 57630 - DNA, 20 bp, Artificial Sequence
  chemically synthesized
tagaaaactggattatttgt

SEQ ID NO: 57631 - DNA, 20 bp, Artificial Sequence
  chemically synthesized
tgagaacactgaaacatccc

SEQ ID NO: 57632 - DNA, 20 bp, Artificial Sequence
  chemically synthesized
gagaacactgaaacatccct

SEQ ID NO: 57633 - DNA, 20 bp, Artificial Sequence
  chemically synthesized
catccctgggtgtgtccatc

SEQ ID NO: 57634 - DNA, 20 bp, Artificial Sequence
  chemically synthesized
ggtgtgtccatctggaaaaa

SEQ ID NO: 57635 - DNA, 20 bp, Artificial Sequence
  chemically synthesized
tggaaaaacagcatttcctc

SEQ ID NO: 57636 - DNA, 20 bp, Artificial Sequence
  chemically synthesized
gcaaccgttctatttgaatt

SEQ ID NO: 57637 - DNA, 20 bp, Artificial Sequence
  chemically synthesized
cgttctatttgaatttggca

SEQ ID NO: 57638 - DNA, 20 bp, Artificial Sequence
  chemically synthesized
tgaatttggcaaagaaaata

SEQ ID NO: 57639 - DNA, 20 bp, Artificial Sequence
  chemically synthesized
atttggcaaagaaaataaag

SEQ ID NO: 57640 - DNA, 20 bp, Artificial Sequence
  chemically synthesized
aataaagcagtttttcacaa

SEQ ID NO: 57641 - DNA, 20 bp, Artificial Sequence
  chemically synthesized
cacaaaagaataaacacaac

SEQ ID NO: 57642 - DNA, 20 bp, Artificial Sequence
  chemically synthesized
acaaaagaataaacacaacc

SEQ ID NO: 57643 - DNA, 20 bp, Artificial Sequence
  chemically synthesized
aaaagaataaacacaaccag

SEQ ID NO: 57644 - DNA, 20 bp, Artificial Sequence
  chemically synthesized
ttcactctcccaaattgtca

SEQ ID NO: 57645 - DNA, 20 bp, Artificial Sequence
  chemically synthesized
actctcccaaattgtcaaag

SEQ ID NO: 57646 - DNA, 20 bp, Artificial Sequence
  chemically synthesized
attgtcaaagaagtataaat

SEQ ID NO: 57647 - DNA, 20 bp, Artificial Sequence
  chemically synthesized
gtataaattagaaaatgaat

SEQ ID NO: 57648 - DNA, 20 bp, Artificial Sequence
  chemically synthesized
tataaattagaaaatgaatc

SEQ ID NO: 57649 - DNA, 20 bp, Artificial Sequence
  chemically synthesized
tcaggacaatttcaacctgt

SEQ ID NO: 57650 - DNA, 20 bp, Artificial Sequence
  chemically synthesized
acaatttcaacctgttagat

SEQ ID NO: 57651 - DNA, 20 bp, Artificial Sequence
  chemically synthesized
taaaaattgaacactcatac

SEQ ID NO: 57652 - DNA, 20 bp, Artificial Sequence
  chemically synthesized
attgaacactcatacaagtg

SEQ ID NO: 57653 - DNA, 20 bp, Artificial Sequence
  chemically synthesized
acactcatacaagtgtggtg

SEQ ID NO: 57654 - DNA, 20 bp, Artificial Sequence
  chemically synthesized
gtggtgaagtgattgttttc

SEQ ID NO: 57655 - DNA, 20 bp, Artificial Sequence
  chemically synthesized
tttacactgtcataaccttc

SEQ ID NO: 57656 - DNA, 20 bp, Artificial Sequence
  chemically synthesized
taaccttctagaaaataaat

SEQ ID NO: 57657 - DNA, 20 bp, Artificial Sequence
  chemically synthesized
ccttctagaaaataaattgg

SEQ ID NO: 57658 - DNA, 20 bp, Artificial Sequence
  chemically synthesized
aaataaattggcagtgttat

SEQ ID NO: 57659 - DNA, 20 bp, Artificial Sequence
  chemically synthesized
aataaattggcagtgttatt

SEQ ID NO: 57660 - DNA, 20 bp, Artificial Sequence
  chemically synthesized
taaattggcagtgttattgg

SEQ ID NO: 57661 - DNA, 20 bp, Artificial Sequence
  chemically synthesized
ttggcagtgttattgggaga

SEQ ID NO: 57662 - DNA, 20 bp, Artificial Sequence
  chemically synthesized
aaatatgtctatataattta

SEQ ID NO: 57663 - DNA, 20 bp, Artificial Sequence
  chemically synthesized
aatatgtctatataatttat

SEQ ID NO: 57664 - DNA, 20 bp, Artificial Sequence
  chemically synthesized
ctatataatttatgggaact

SEQ ID NO: 57665 - DNA, 20 bp, Artificial Sequence
  chemically synthesized
tatataatttatgggaactt

SEQ ID NO: 57666 - DNA, 20 bp, Artificial Sequence
  chemically synthesized
aatttatgggaacttaggct

SEQ ID NO: 57667 - DNA, 20 bp, Artificial Sequence
  chemically synthesized
acttaggctcagaaaatatt

SEQ ID NO: 57668 - DNA, 20 bp, Artificial Sequence
  chemically synthesized
cttaggctcagaaaatatta

SEQ ID NO: 57669 - DNA, 20 bp, Artificial Sequence
  chemically synthesized
ctcagaaaatattaaggaat

SEQ ID NO: 57670 - DNA, 20 bp, Artificial Sequence
  chemically synthesized
aagaatgaactttatgaaca

SEQ ID NO: 57671 - DNA, 20 bp, Artificial Sequence
  chemically synthesized
gaactttatgaacaaagatg

SEQ ID NO: 57672 - DNA, 20 bp, Artificial Sequence
  chemically synthesized
actttatgaacaaagatgtg

SEQ ID NO: 57673 - DNA, 20 bp, Artificial Sequence
  chemically synthesized
ctttatgaacaaagatgtgg

SEQ ID NO: 57674 - DNA, 20 bp, Artificial Sequence
  chemically synthesized
tttatgaacaaagatgtgga

SEQ ID NO: 57675 - DNA, 20 bp, Artificial Sequence
  chemically synthesized
tgaacaaagatgtggagggt

SEQ ID NO: 57676 - DNA, 20 bp, Artificial Sequence
  chemically synthesized
acaaagatgtggagggttgg

SEQ ID NO: 57677 - DNA, 20 bp, Artificial Sequence
  chemically synthesized
agatgtggagggttggaagc

SEQ ID NO: 57678 - DNA, 20 bp, Artificial Sequence
  chemically synthesized
atgtggagggttggaagcaa

SEQ ID NO: 57679 - DNA, 20 bp, Artificial Sequence
  chemically synthesized
tgtggagggttggaagcaag

SEQ ID NO: 57680 - DNA, 20 bp, Artificial Sequence
  chemically synthesized
gtggagggttggaagcaaga

SEQ ID NO: 57681 - DNA, 20 bp, Artificial Sequence
  chemically synthesized
tggagggttggaagcaagag

SEQ ID NO: 57682 - DNA, 20 bp, Artificial Sequence
  chemically synthesized
ggagggttggaagcaagagg

SEQ ID NO: 57683 - DNA, 20 bp, Artificial Sequence
  chemically synthesized
gagggttggaagcaagaggg

SEQ ID NO: 57684 - DNA, 20 bp, Artificial Sequence
  chemically synthesized
aagaggggggccaacgcgca

SEQ ID NO: 57685 - DNA, 20 bp, Artificial Sequence
  chemically synthesized
agaggggggccaacgcgcac

SEQ ID NO: 57686 - DNA, 20 bp, Artificial Sequence
  chemically synthesized
gaggggggccaacgcgcacg

SEQ ID NO: 57687 - DNA, 20 bp, Artificial Sequence
  chemically synthesized
ggggggccaacgcgcacggg

SEQ ID NO: 57688 - DNA, 20 bp, Artificial Sequence
  chemically synthesized
gggggccaacgcgcacgggg

SEQ ID NO: 57689 - DNA, 20 bp, Artificial Sequence
  chemically synthesized
ggccaacgcgcacggggagg

SEQ ID NO: 57690 - DNA, 20 bp, Artificial Sequence
  chemically synthesized
gcgcacggggaggaagcatt

SEQ ID NO: 57691 - DNA, 20 bp, Artificial Sequence
  chemically synthesized
cgcacggggaggaagcattt

SEQ ID NO: 57692 - DNA, 20 bp, Artificial Sequence
  chemically synthesized
acggggaggaagcatttggg

SEQ ID NO: 57693 - DNA, 20 bp, Artificial Sequence
  chemically synthesized
gcatttgggcagtgactccg

SEQ ID NO: 57694 - DNA, 20 bp, Artificial Sequence
  chemically synthesized
gggcagtgactccgcagacc

SEQ ID NO: 57695 - DNA, 20 bp, Artificial Sequence
  chemically synthesized
ggcagtgactccgcagaccc

SEQ ID NO: 57696 - DNA, 20 bp, Artificial Sequence
  chemically synthesized
tgactccgcagacccaggct

SEQ ID NO: 57697 - DNA, 20 bp, Artificial Sequence
  chemically synthesized
gactccgcagacccaggctc

SEQ ID NO: 57698 - DNA, 20 bp, Artificial Sequence
  chemically synthesized
gacccaggctcaggttgaac

SEQ ID NO: 57699 - DNA, 20 bp, Artificial Sequence
  chemically synthesized
tagacaacctccttacacct

SEQ ID NO: 57700 - DNA, 20 bp, Artificial Sequence
  chemically synthesized
cacctcagtttccttaactg

SEQ ID NO: 57701 - DNA, 20 bp, Artificial Sequence
  chemically synthesized
cctcagtttccttaactgta

SEQ ID NO: 57702 - DNA, 20 bp, Artificial Sequence
  chemically synthesized
cagtttccttaactgtagag

SEQ ID NO: 57703 - DNA, 20 bp, Artificial Sequence
  chemically synthesized
agtttccttaactgtagagc

SEQ ID NO: 57704 - DNA, 20 bp, Artificial Sequence
  chemically synthesized
tttccttaactgtagagcag

SEQ ID NO: 57705 - DNA, 20 bp, Artificial Sequence
  chemically synthesized
taactgtagagcaggagtga

SEQ ID NO: 57706 - DNA, 20 bp, Artificial Sequence
  chemically synthesized
tgatggaactgcctgtttca

SEQ ID NO: 57707 - DNA, 20 bp, Artificial Sequence
  chemically synthesized
gatggaactgcctgtttcat

SEQ ID NO: 57708 - DNA, 20 bp, Artificial Sequence
  chemically synthesized
ctgtttcataggactgttgt

SEQ ID NO: 57709 - DNA, 20 bp, Artificial Sequence
  chemically synthesized
tgtttcataggactgttgtg

SEQ ID NO: 57710 - DNA, 20 bp, Artificial Sequence
  chemically synthesized
ataggactgttgtgaggatg

SEQ ID NO: 57711 - DNA, 20 bp, Artificial Sequence
  chemically synthesized
gactgttgtgaggatgaagt

SEQ ID NO: 57712 - DNA, 20 bp, Artificial Sequence
  chemically synthesized
agtgagatacaccacattat

SEQ ID NO: 57713 - DNA, 20 bp, Artificial Sequence
  chemically synthesized
ccacattataagcttgtgcc

SEQ ID NO: 57714 - DNA, 20 bp, Artificial Sequence
  chemically synthesized
attataagcttgtgcctgga

SEQ ID NO: 57715 - DNA, 20 bp, Artificial Sequence
  chemically synthesized
ttataagcttgtgcctggaa

SEQ ID NO: 57716 - DNA, 20 bp, Artificial Sequence
  chemically synthesized
tgcctggaaaggataatgct

SEQ ID NO: 57717 - DNA, 20 bp, Artificial Sequence
  chemically synthesized
ttattgcaataaaatgtaca

SEQ ID NO: 57718 - DNA, 20 bp, Artificial Sequence
  chemically synthesized
caataaaatgtacacagcgt

SEQ ID NO: 57719 - DNA, 20 bp, Artificial Sequence
  chemically synthesized
ataaaatgtacacagcgtaa

SEQ ID NO: 57720 - DNA, 20 bp, Artificial Sequence
  chemically synthesized
tactattttaaccatttttg

SEQ ID NO: 57721 - DNA, 20 bp, Artificial Sequence
  chemically synthesized
actattttaaccatttttgc

SEQ ID NO: 57722 - DNA, 20 bp, Artificial Sequence
  chemically synthesized
ctattttaaccatttttgca

SEQ ID NO: 57723 - DNA, 20 bp, Artificial Sequence
  chemically synthesized
catttttgcagggtaccacc

SEQ ID NO: 57724 - DNA, 20 bp, Artificial Sequence
  chemically synthesized
ttttgcagggtaccaccaag

SEQ ID NO: 57725 - DNA, 20 bp, Artificial Sequence
  chemically synthesized
gggtaccaccaagtggcatt

SEQ ID NO: 57726 - DNA, 20 bp, Artificial Sequence
  chemically synthesized
agtggcatttagtacattca

SEQ ID NO: 57727 - DNA, 20 bp, Artificial Sequence
  chemically synthesized
ggcatttagtacattcacag

SEQ ID NO: 57728 - DNA, 20 bp, Artificial Sequence
  chemically synthesized
tgcaaccatcatcatatttc

SEQ ID NO: 57729 - DNA, 20 bp, Artificial Sequence
  chemically synthesized
gaatattttcctcatcccca

SEQ ID NO: 57730 - DNA, 20 bp, Artificial Sequence
  chemically synthesized
aatattttcctcatccccaa

SEQ ID NO: 57731 - DNA, 20 bp, Artificial Sequence
  chemically synthesized
gaaacctcatgctcattaat

SEQ ID NO: 57732 - DNA, 20 bp, Artificial Sequence
  chemically synthesized
acctcatgctcattaatcag

SEQ ID NO: 57733 - DNA, 20 bp, Artificial Sequence
  chemically synthesized
gtagctctcctttaaaatat

SEQ ID NO: 57734 - DNA, 20 bp, Artificial Sequence
  chemically synthesized
cctttaaaatattagttatg

SEQ ID NO: 57735 - DNA, 20 bp, Artificial Sequence
  chemically synthesized
aatattagttatgaagatca

SEQ ID NO: 57736 - DNA, 20 bp, Artificial Sequence
  chemically synthesized
aaaactcattatgtaatgtt

SEQ ID NO: 57737 - DNA, 20 bp, Artificial Sequence
  chemically synthesized
gtaatgttgagtgaaaaaat

SEQ ID NO: 57738 - DNA, 20 bp, Artificial Sequence
  chemically synthesized
taatgttgagtgaaaaaatc

SEQ ID NO: 57739 - DNA, 20 bp, Artificial Sequence
  chemically synthesized
aatgttgagtgaaaaaatca

SEQ ID NO: 57740 - DNA, 20 bp, Artificial Sequence
  chemically synthesized
attttgtgatatgatgtaat

SEQ ID NO: 57741 - DNA, 20 bp, Artificial Sequence
  chemically synthesized
tgatatgatgtaattagtga

SEQ ID NO: 57742 - DNA, 20 bp, Artificial Sequence
  chemically synthesized
tatgatgtaattagtgaaag

SEQ ID NO: 57743 - DNA, 20 bp, Artificial Sequence
  chemically synthesized
tagtgaaagaagcatacaaa

SEQ ID NO: 57744 - DNA, 20 bp, Artificial Sequence
  chemically synthesized
gtctgaaaatataaaaacaa

SEQ ID NO: 57745 - DNA, 20 bp, Artificial Sequence
  chemically synthesized
acaatagcaattgcatttct

SEQ ID NO: 57746 - DNA, 20 bp, Artificial Sequence
  chemically synthesized
catttaaacattattcttta

SEQ ID NO: 57747 - DNA, 20 bp, Artificial Sequence
  chemically synthesized
attattctttatggttttaa

SEQ ID NO: 57748 - DNA, 20 bp, Artificial Sequence
  chemically synthesized
tctttatggttttaaaagca

SEQ ID NO: 57749 - DNA, 20 bp, Artificial Sequence
  chemically synthesized
tggttttaaaagcaaagaaa

SEQ ID NO: 57750 - DNA, 20 bp, Artificial Sequence
  chemically synthesized
ggttttaaaagcaaagaaaa

SEQ ID NO: 57751 - DNA, 20 bp, Artificial Sequence
  chemically synthesized
taaaagcaaagaaaaaggta

SEQ ID NO: 57752 - DNA, 20 bp, Artificial Sequence
  chemically synthesized
agaaacaacaaccaaccgca

SEQ ID NO: 57753 - DNA, 20 bp, Artificial Sequence
  chemically synthesized
aaccgcaaagcaccatgaca

SEQ ID NO: 57754 - DNA, 20 bp, Artificial Sequence
  chemically synthesized
caaagcaccatgacaaagct

SEQ ID NO: 57755 - DNA, 20 bp, Artificial Sequence
  chemically synthesized
aaagctcagattgttaaatc

SEQ ID NO: 57756 - DNA, 20 bp, Artificial Sequence
  chemically synthesized
aagctcagattgttaaatcc

SEQ ID NO: 57757 - DNA, 20 bp, Artificial Sequence
  chemically synthesized
gattgttaaatccaggtttt

SEQ ID NO: 57758 - DNA, 20 bp, Artificial Sequence
  chemically synthesized
aaatccaggtttttggaaca

SEQ ID NO: 57759 - DNA, 20 bp, Artificial Sequence
  chemically synthesized
tatatgacgtttacactctc

SEQ ID NO: 57760 - DNA, 20 bp, Artificial Sequence
  chemically synthesized
atatgacgtttacactctcc

SEQ ID NO: 57761 - DNA, 20 bp, Artificial Sequence
  chemically synthesized
tatgacgtttacactctcca

SEQ ID NO: 57762 - DNA, 20 bp, Artificial Sequence
  chemically synthesized
cgtttacactctccagggtt

SEQ ID NO: 57763 - DNA, 20 bp, Artificial Sequence
  chemically synthesized
tttacactctccagggttca

SEQ ID NO: 57764 - DNA, 20 bp, Artificial Sequence
  chemically synthesized
tacactctccagggttcaga

SEQ ID NO: 57765 - DNA, 20 bp, Artificial Sequence
  chemically synthesized
tctccagggttcagagagtc

SEQ ID NO: 57766 - DNA, 20 bp, Artificial Sequence
  chemically synthesized
ccagggttcagagagtctgg

SEQ ID NO: 57767 - DNA, 20 bp, Artificial Sequence
  chemically synthesized
ttcagagagtctggcagcat

SEQ ID NO: 57768 - DNA, 20 bp, Artificial Sequence
  chemically synthesized
tcagagagtctggcagcatt

SEQ ID NO: 57769 - DNA, 20 bp, Artificial Sequence
  chemically synthesized
agagagtctggcagcattgg

SEQ ID NO: 57770 - DNA, 20 bp, Artificial Sequence
  chemically synthesized
gggagctgccttgtgttcta

SEQ ID NO: 57771 - DNA, 20 bp, Artificial Sequence
  chemically synthesized
ccttgtgttctacagcctca

SEQ ID NO: 57772 - DNA, 20 bp, Artificial Sequence
  chemically synthesized
gtgttctacagcctcacgga

SEQ ID NO: 57773 - DNA, 20 bp, Artificial Sequence
  chemically synthesized
tctacagcctcacggacaga

SEQ ID NO: 57774 - DNA, 20 bp, Artificial Sequence
  chemically synthesized
ctacagcctcacggacagac

SEQ ID NO: 57775 - DNA, 20 bp, Artificial Sequence
  chemically synthesized
acagcctcacggacagacag

SEQ ID NO: 57776 - DNA, 20 bp, Artificial Sequence
  chemically synthesized
cagcctcacggacagacagg

SEQ ID NO: 57777 - DNA, 20 bp, Artificial Sequence
  chemically synthesized
tcaccactgctctgttcttc

SEQ ID NO: 57778 - DNA, 20 bp, Artificial Sequence
  chemically synthesized
accactgctctgttcttctg

SEQ ID NO: 57779 - DNA, 20 bp, Artificial Sequence
  chemically synthesized
gtttccttgtgaacatgttg

SEQ ID NO: 57780 - DNA, 20 bp, Artificial Sequence
  chemically synthesized
ttgtgaacatgttgtggacg

SEQ ID NO: 57781 - DNA, 20 bp, Artificial Sequence
  chemically synthesized
ttctttcatctttttaaaca

SEQ ID NO: 57782 - DNA, 20 bp, Artificial Sequence
  chemically synthesized
tctttcatctttttaaacac

SEQ ID NO: 57783 - DNA, 20 bp, Artificial Sequence
  chemically synthesized
tttttaaacacaggtacctt

SEQ ID NO: 57784 - DNA, 20 bp, Artificial Sequence
  chemically synthesized
ttttaaacacaggtaccttt

SEQ ID NO: 57785 - DNA, 20 bp, Artificial Sequence
  chemically synthesized
tttaaacacaggtacctttg

SEQ ID NO: 57786 - DNA, 20 bp, Artificial Sequence
  chemically synthesized
aacacaggtacctttggggc

SEQ ID NO: 57787 - DNA, 20 bp, Artificial Sequence
  chemically synthesized
cctttggggctggctttctc

SEQ ID NO: 57788 - DNA, 20 bp, Artificial Sequence
  chemically synthesized
ctttggggctggctttctca

SEQ ID NO: 57789 - DNA, 20 bp, Artificial Sequence
  chemically synthesized
tggggctggctttctcaagg

SEQ ID NO: 57790 - DNA, 20 bp, Artificial Sequence
  chemically synthesized
ctggctttctcaaggaagcc

SEQ ID NO: 57791 - DNA, 20 bp, Artificial Sequence
  chemically synthesized
aagcccagctccctgtgatt

SEQ ID NO: 57792 - DNA, 20 bp, Artificial Sequence
  chemically synthesized
gctccctgtgattgagaatg

SEQ ID NO: 57793 - DNA, 20 bp, Artificial Sequence
  chemically synthesized
atgaagtgtgcaatcgctat

SEQ ID NO: 57794 - DNA, 20 bp, Artificial Sequence
  chemically synthesized
aatcgctatgagtttctgaa

SEQ ID NO: 57795 - DNA, 20 bp, Artificial Sequence
  chemically synthesized
cgctatgagtttctgaatgg

SEQ ID NO: 57796 - DNA, 20 bp, Artificial Sequence
  chemically synthesized
ctatgagtttctgaatggaa

SEQ ID NO: 57797 - DNA, 20 bp, Artificial Sequence
  chemically synthesized
atggaagagtcaaatccact

SEQ ID NO: 57798 - DNA, 20 bp, Artificial Sequence
  chemically synthesized
aaatccactgagctctgtgc

SEQ ID NO: 57799 - DNA, 20 bp, Artificial Sequence
  chemically synthesized
aatccactgagctctgtgct

SEQ ID NO: 57800 - DNA, 20 bp, Artificial Sequence
  chemically synthesized
tgagctctgtgctgggcatt

SEQ ID NO: 57801 - DNA, 20 bp, Artificial Sequence
  chemically synthesized
ctctgtgctgggcatttggc

SEQ ID NO: 57802 - DNA, 20 bp, Artificial Sequence
  chemically synthesized
ctgtgctgggcatttggctg

SEQ ID NO: 57803 - DNA, 20 bp, Artificial Sequence
  chemically synthesized
tgtgctgggcatttggctgg

SEQ ID NO: 57804 - DNA, 20 bp, Artificial Sequence
  chemically synthesized
catttggctggaggcattga

SEQ ID NO: 57805 - DNA, 20 bp, Artificial Sequence
  chemically synthesized
ctggaggcattgacagttgc

SEQ ID NO: 57806 - DNA, 20 bp, Artificial Sequence
  chemically synthesized
tggaggcattgacagttgca

SEQ ID NO: 57807 - DNA, 20 bp, Artificial Sequence
  chemically synthesized
ggcattgacagttgcaaggt

SEQ ID NO: 57808 - DNA, 20 bp, Artificial Sequence
  chemically synthesized
tgacagttgcaaggtaagaa

SEQ ID NO: 57809 - DNA, 20 bp, Artificial Sequence
  chemically synthesized
ttgcaaggtaagaaaagatc

SEQ ID NO: 57810 - DNA, 20 bp, Artificial Sequence
  chemically synthesized
gcaaggtaagaaaagatcaa

SEQ ID NO: 57811 - DNA, 20 bp, Artificial Sequence
  chemically synthesized
aagaaaagatcaagagacca

SEQ ID NO: 57812 - DNA, 20 bp, Artificial Sequence
  chemically synthesized
aaagatcaagagaccaaagt

SEQ ID NO: 57813 - DNA, 20 bp, Artificial Sequence
  chemically synthesized
agtcttgtgctctcctgtct

SEQ ID NO: 57814 - DNA, 20 bp, Artificial Sequence
  chemically synthesized
gtgctctcctgtctcagtct

SEQ ID NO: 57815 - DNA, 20 bp, Artificial Sequence
  chemically synthesized
ctgtctcagtctcagtccct

SEQ ID NO: 57816 - DNA, 20 bp, Artificial Sequence
  chemically synthesized
agtctcagtcccttagactt

SEQ ID NO: 57817 - DNA, 20 bp, Artificial Sequence
  chemically synthesized
tcccttagacttgagtccca

SEQ ID NO: 57818 - DNA, 20 bp, Artificial Sequence
  chemically synthesized
cttagacttgagtcccaaag

SEQ ID NO: 57819 - DNA, 20 bp, Artificial Sequence
  chemically synthesized
agtcccaaagtagcgaattc

SEQ ID NO: 57820 - DNA, 20 bp, Artificial Sequence
  chemically synthesized
cccaaagtagcgaattcaag

SEQ ID NO: 57821 - DNA, 20 bp, Artificial Sequence
  chemically synthesized
ccaaagtagcgaattcaagt

SEQ ID NO: 57822 - DNA, 20 bp, Artificial Sequence
  chemically synthesized
ttcaagtaggatttaatcaa

SEQ ID NO: 57823 - DNA, 20 bp, Artificial Sequence
  chemically synthesized
aagtaggatttaatcaatgg

SEQ ID NO: 57824 - DNA, 20 bp, Artificial Sequence
  chemically synthesized
atttaatcaatggaagaccc

SEQ ID NO: 57825 - DNA, 20 bp, Artificial Sequence
  chemically synthesized
tcaatggaagaccccagtct

SEQ ID NO: 57826 - DNA, 20 bp, Artificial Sequence
  chemically synthesized
accccagtctaagtgttgct

SEQ ID NO: 57827 - DNA, 20 bp, Artificial Sequence
  chemically synthesized
agtgttgctcagaaactccc

SEQ ID NO: 57828 - DNA, 20 bp, Artificial Sequence
  chemically synthesized
atctgtcccaaatgtatatt

SEQ ID NO: 57829 - DNA, 20 bp, Artificial Sequence
  chemically synthesized
aatgtatattcagatcatcc

SEQ ID NO: 57830 - DNA, 20 bp, Artificial Sequence
  chemically synthesized
atgtatattcagatcatcca

SEQ ID NO: 57831 - DNA, 20 bp, Artificial Sequence
  chemically synthesized
tgtatattcagatcatccaa

SEQ ID NO: 57832 - DNA, 20 bp, Artificial Sequence
  chemically synthesized
gtatattcagatcatccaag

SEQ ID NO: 57833 - DNA, 20 bp, Artificial Sequence
  chemically synthesized
gatcatccaaggggacttct

SEQ ID NO: 57834 - DNA, 20 bp, Artificial Sequence
  chemically synthesized
atcatccaaggggacttctt

SEQ ID NO: 57835 - DNA, 20 bp, Artificial Sequence
  chemically synthesized
tcatccaaggggacttcttg

SEQ ID NO: 57836 - DNA, 20 bp, Artificial Sequence
  chemically synthesized
aaggggacttcttggggctt

SEQ ID NO: 57837 - DNA, 20 bp, Artificial Sequence
  chemically synthesized
acttcttggggcttgagttc

SEQ ID NO: 57838 - DNA, 20 bp, Artificial Sequence
  chemically synthesized
ttggggcttgagttccagat

SEQ ID NO: 57839 - DNA, 20 bp, Artificial Sequence
  chemically synthesized
gggcttgagttccagatcag

SEQ ID NO: 57840 - DNA, 20 bp, Artificial Sequence
  chemically synthesized
ttgagttccagatcagcagc

SEQ ID NO: 57841 - DNA, 20 bp, Artificial Sequence
  chemically synthesized
tgagttccagatcagcagca

SEQ ID NO: 57842 - DNA, 20 bp, Artificial Sequence
  chemically synthesized
gagttccagatcagcagcaa

SEQ ID NO: 57843 - DNA, 20 bp, Artificial Sequence
  chemically synthesized
gttccagatcagcagcaagg

SEQ ID NO: 57844 - DNA, 20 bp, Artificial Sequence
  chemically synthesized
atcagcagcaagggagccat

SEQ ID NO: 57845 - DNA, 20 bp, Artificial Sequence
  chemically synthesized
cataagtgccataactacct

SEQ ID NO: 57846 - DNA, 20 bp, Artificial Sequence
  chemically synthesized
cctcagaccactcaccctcc

SEQ ID NO: 57847 - DNA, 20 bp, Artificial Sequence
  chemically synthesized
ctcagaccactcaccctcct

SEQ ID NO: 57848 - DNA, 20 bp, Artificial Sequence
  chemically synthesized
tcagaccactcaccctcctg

SEQ ID NO: 57849 - DNA, 20 bp, Artificial Sequence
  chemically synthesized
ctcaccctcctggggtgtcc

SEQ ID NO: 57850 - DNA, 20 bp, Artificial Sequence
  chemically synthesized
accctcctggggtgtcccgg

SEQ ID NO: 57851 - DNA, 20 bp, Artificial Sequence
  chemically synthesized
tcctggggtgtcccggtggc

SEQ ID NO: 57852 - DNA, 20 bp, Artificial Sequence
  chemically synthesized
cctggggtgtcccggtggcc

SEQ ID NO: 57853 - DNA, 20 bp, Artificial Sequence
  chemically synthesized
ctggggtgtcccggtggcca

SEQ ID NO: 57854 - DNA, 20 bp, Artificial Sequence
  chemically synthesized
gtcccggtggccagggacta

SEQ ID NO: 57855 - DNA, 20 bp, Artificial Sequence
  chemically synthesized
ccggtggccagggactaaag

SEQ ID NO: 57856 - DNA, 20 bp, Artificial Sequence
  chemically synthesized
gactaaagtggtgatttttc

SEQ ID NO: 57857 - DNA, 20 bp, Artificial Sequence
  chemically synthesized
taaagtggtgatttttctgg

SEQ ID NO: 57858 - DNA, 20 bp, Artificial Sequence
  chemically synthesized
aaagtggtgatttttctggt

SEQ ID NO: 57859 - DNA, 20 bp, Artificial Sequence
  chemically synthesized
aagtggtgatttttctggta

SEQ ID NO: 57860 - DNA, 20 bp, Artificial Sequence
  chemically synthesized
tggtgatttttctggtaggg

SEQ ID NO: 57861 - DNA, 20 bp, Artificial Sequence
  chemically synthesized
ggtgatttttctggtaggga

SEQ ID NO: 57862 - DNA, 20 bp, Artificial Sequence
  chemically synthesized
tgatttttctggtagggaag

SEQ ID NO: 57863 - DNA, 20 bp, Artificial Sequence
  chemically synthesized
gatttttctggtagggaagg

SEQ ID NO: 57864 - DNA, 20 bp, Artificial Sequence
  chemically synthesized
ttttctggtagggaaggagg

SEQ ID NO: 57865 - DNA, 20 bp, Artificial Sequence
  chemically synthesized
ttctggtagggaaggaggta

SEQ ID NO: 57866 - DNA, 20 bp, Artificial Sequence
  chemically synthesized
tctggtagggaaggaggtag

SEQ ID NO: 57867 - DNA, 20 bp, Artificial Sequence
  chemically synthesized
ctggtagggaaggaggtaga

SEQ ID NO: 57868 - DNA, 20 bp, Artificial Sequence
  chemically synthesized
agggaaggaggtagagggta

SEQ ID NO: 57869 - DNA, 20 bp, Artificial Sequence
  chemically synthesized
gggaaggaggtagagggtac

SEQ ID NO: 57870 - DNA, 20 bp, Artificial Sequence
  chemically synthesized
aggaggtagagggtacagga

SEQ ID NO: 57871 - DNA, 20 bp, Artificial Sequence
  chemically synthesized
gaggtagagggtacaggaca

SEQ ID NO: 57872 - DNA, 20 bp, Artificial Sequence
  chemically synthesized
actaactgcacacaatatct

SEQ ID NO: 57873 - DNA, 20 bp, Artificial Sequence
  chemically synthesized
ctgcacacaatatctgagac

SEQ ID NO: 57874 - DNA, 20 bp, Artificial Sequence
  chemically synthesized
gcacacaatatctgagactg

SEQ ID NO: 57875 - DNA, 20 bp, Artificial Sequence
  chemically synthesized
caatatctgagactggagct

SEQ ID NO: 57876 - DNA, 20 bp, Artificial Sequence
  chemically synthesized
gctcagatattgctgatgat

SEQ ID NO: 57877 - DNA, 20 bp, Artificial Sequence
  chemically synthesized
tcagatattgctgatgatca

SEQ ID NO: 57878 - DNA, 20 bp, Artificial Sequence
  chemically synthesized
atattgctgatgatcagagt

SEQ ID NO: 57879 - DNA, 20 bp, Artificial Sequence
  chemically synthesized
ctccccaattgatttacaac

SEQ ID NO: 57880 - DNA, 20 bp, Artificial Sequence
  chemically synthesized
tccccaattgatttacaact

SEQ ID NO: 57881 - DNA, 20 bp, Artificial Sequence
  chemically synthesized
ccccaattgatttacaactg

SEQ ID NO: 57882 - DNA, 20 bp, Artificial Sequence
  chemically synthesized
attgatttacaactggggct

SEQ ID NO: 57883 - DNA, 20 bp, Artificial Sequence
  chemically synthesized
ggcttggatactgttttaaa

SEQ ID NO: 57884 - DNA, 20 bp, Artificial Sequence
  chemically synthesized
gcttggatactgttttaaac

SEQ ID NO: 57885 - DNA, 20 bp, Artificial Sequence
  chemically synthesized
ttggatactgttttaaacgg

SEQ ID NO: 57886 - DNA, 20 bp, Artificial Sequence
  chemically synthesized
tggatactgttttaaacggg

SEQ ID NO: 57887 - DNA, 20 bp, Artificial Sequence
  chemically synthesized
gatactgttttaaacgggag

SEQ ID NO: 57888 - DNA, 20 bp, Artificial Sequence
  chemically synthesized
aaccactgacgtgactacac

SEQ ID NO: 57889 - DNA, 20 bp, Artificial Sequence
  chemically synthesized
ccactgacgtgactacacta

SEQ ID NO: 57890 - DNA, 20 bp, Artificial Sequence
  chemically synthesized
tgacgtgactacactagaga

SEQ ID NO: 57891 - DNA, 20 bp, Artificial Sequence
  chemically synthesized
ccactcttgctttacttcat

SEQ ID NO: 57892 - DNA, 20 bp, Artificial Sequence
  chemically synthesized
cttcatgagaacgaaaatgt

SEQ ID NO: 57893 - DNA, 20 bp, Artificial Sequence
  chemically synthesized
ttgcaccatgaattcatttg

SEQ ID NO: 57894 - DNA, 20 bp, Artificial Sequence
  chemically synthesized
accatgaattcatttgcgga

SEQ ID NO: 57895 - DNA, 20 bp, Artificial Sequence
  chemically synthesized
ttattttattttattttatt

SEQ ID NO: 57896 - DNA, 20 bp, Artificial Sequence
  chemically synthesized
ttttattgagactctcaccc

SEQ ID NO: 57897 - DNA, 20 bp, Artificial Sequence
  chemically synthesized
tgagactctcaccccggttg

SEQ ID NO: 57898 - DNA, 20 bp, Artificial Sequence
  chemically synthesized
gaagtgcactgacgtgattt

SEQ ID NO: 57899 - DNA, 20 bp, Artificial Sequence
  chemically synthesized
tcactgcaacttccacctcc

SEQ ID NO: 57900 - DNA, 20 bp, Artificial Sequence
  chemically synthesized
cactgcaacttccacctcct

SEQ ID NO: 57901 - DNA, 20 bp, Artificial Sequence
  chemically synthesized
aacttccacctcctgggttc

SEQ ID NO: 57902 - DNA, 20 bp, Artificial Sequence
  chemically synthesized
ctgggttcaagtgaatactc

SEQ ID NO: 57903 - DNA, 20 bp, Artificial Sequence
  chemically synthesized
agtgaatactccagcctccc

SEQ ID NO: 57904 - DNA, 20 bp, Artificial Sequence
  chemically synthesized
gaatactccagcctccctag

SEQ ID NO: 57905 - DNA, 20 bp, Artificial Sequence
  chemically synthesized
actccagcctccctagtagc

SEQ ID NO: 57906 - DNA, 20 bp, Artificial Sequence
  chemically synthesized
ctccagcctccctagtagct

SEQ ID NO: 57907 - DNA, 20 bp, Artificial Sequence
  chemically synthesized
ctccctagtagctgggatta

SEQ ID NO: 57908 - DNA, 20 bp, Artificial Sequence
  chemically synthesized
tccctagtagctgggattac

SEQ ID NO: 57909 - DNA, 20 bp, Artificial Sequence
  chemically synthesized
caggtgcccaccaccacgcc

SEQ ID NO: 57910 - DNA, 20 bp, Artificial Sequence
  chemically synthesized
ctggctaatttttgtatttt

SEQ ID NO: 57911 - DNA, 20 bp, Artificial Sequence
  chemically synthesized
gctaatttttgtatttttag

SEQ ID NO: 57912 - DNA, 20 bp, Artificial Sequence
  chemically synthesized
taatttttgtatttttagta

SEQ ID NO: 57913 - DNA, 20 bp, Artificial Sequence
  chemically synthesized
ttttgtatttttagtagaga

SEQ ID NO: 57914 - DNA, 20 bp, Artificial Sequence
  chemically synthesized
tttgtatttttagtagagat

SEQ ID NO: 57915 - DNA, 20 bp, Artificial Sequence
  chemically synthesized
ttgtatttttagtagagatg

SEQ ID NO: 57916 - DNA, 20 bp, Artificial Sequence
  chemically synthesized
gagatggggtttcaccacat

SEQ ID NO: 57917 - DNA, 20 bp, Artificial Sequence
  chemically synthesized
ggggtttcaccacattggcc

SEQ ID NO: 57918 - DNA, 20 bp, Artificial Sequence
  chemically synthesized
tttcaccacattggcctggc

SEQ ID NO: 57919 - DNA, 20 bp, Artificial Sequence
  chemically synthesized
accttgtgatccacctgtct

SEQ ID NO: 57920 - DNA, 20 bp, Artificial Sequence
  chemically synthesized
ccacctgtcttggcctccca

SEQ ID NO: 57921 - DNA, 20 bp, Artificial Sequence
  chemically synthesized
gtcttggcctcccaaagtgc

SEQ ID NO: 57922 - DNA, 20 bp, Artificial Sequence
  chemically synthesized
tcttggcctcccaaagtgct

SEQ ID NO: 57923 - DNA, 20 bp, Artificial Sequence
  chemically synthesized
ctcccaaagtgctgggatta

SEQ ID NO: 57924 - DNA, 20 bp, Artificial Sequence
  chemically synthesized
cccaaagtgctgggattaca

SEQ ID NO: 57925 - DNA, 20 bp, Artificial Sequence
  chemically synthesized
agtgctgggattacagagtt

SEQ ID NO: 57926 - DNA, 20 bp, Artificial Sequence
  chemically synthesized
aaatatttatttatttattt

SEQ ID NO: 57927 - DNA, 20 bp, Artificial Sequence
  chemically synthesized
tttatttaagccacaactac

SEQ ID NO: 57928 - DNA, 20 bp, Artificial Sequence
  chemically synthesized
ttaagccacaactactagaa

SEQ ID NO: 57929 - DNA, 20 bp, Artificial Sequence
  chemically synthesized
taagccacaactactagaat

SEQ ID NO: 57930 - DNA, 20 bp, Artificial Sequence
  chemically synthesized
gccacaactactagaatagg

SEQ ID NO: 57931 - DNA, 20 bp, Artificial Sequence
  chemically synthesized
ccacaactactagaatagga

SEQ ID NO: 57932 - DNA, 20 bp, Artificial Sequence
  chemically synthesized
gatattttattaattttatt

SEQ ID NO: 57933 - DNA, 20 bp, Artificial Sequence
  chemically synthesized
attatttttttttctttcct

SEQ ID NO: 57934 - DNA, 20 bp, Artificial Sequence
  chemically synthesized
gacattcttgctctgtcacc

SEQ ID NO: 57935 - DNA, 20 bp, Artificial Sequence
  chemically synthesized
acattcttgctctgtcaccc

SEQ ID NO: 57936 - DNA, 20 bp, Artificial Sequence
  chemically synthesized
tcttgctctgtcacccaggc

SEQ ID NO: 57937 - DNA, 20 bp, Artificial Sequence
  chemically synthesized
ttgctctgtcacccaggctg

SEQ ID NO: 57938 - DNA, 20 bp, Artificial Sequence
  chemically synthesized
ctgtcacccaggctggagtg

SEQ ID NO: 57939 - DNA, 20 bp, Artificial Sequence
  chemically synthesized
tcacccaggctggagtgcag

SEQ ID NO: 57940 - DNA, 20 bp, Artificial Sequence
  chemically synthesized
ggagtgcagtggcacattct

SEQ ID NO: 57941 - DNA, 20 bp, Artificial Sequence
  chemically synthesized
aacctccatctcctgtgttc

SEQ ID NO: 57942 - DNA, 20 bp, Artificial Sequence
  chemically synthesized
ctcctgtgttcaagcaattc

SEQ ID NO: 57943 - DNA, 20 bp, Artificial Sequence
  chemically synthesized
ttcaagcaattctagtgcct

SEQ ID NO: 57944 - DNA, 20 bp, Artificial Sequence
  chemically synthesized
ttctagtgcctcagcctact

SEQ ID NO: 57945 - DNA, 20 bp, Artificial Sequence
  chemically synthesized
tagtgcctcagcctacttag

SEQ ID NO: 57946 - DNA, 20 bp, Artificial Sequence
  chemically synthesized
gcctcagcctacttagtagc

SEQ ID NO: 57947 - DNA, 20 bp, Artificial Sequence
  chemically synthesized
cctcagcctacttagtagct

SEQ ID NO: 57948 - DNA, 20 bp, Artificial Sequence
  chemically synthesized
tacttagtagctgggatgac

SEQ ID NO: 57949 - DNA, 20 bp, Artificial Sequence
  chemically synthesized
ctggcatgtgcctccacacc

SEQ ID NO: 57950 - DNA, 20 bp, Artificial Sequence
  chemically synthesized
gctaatttttgtattttttg

SEQ ID NO: 57951 - DNA, 20 bp, Artificial Sequence
  chemically synthesized
taatttttgtattttttgta

SEQ ID NO: 57952 - DNA, 20 bp, Artificial Sequence
  chemically synthesized
ttttgtattttttgtagaga

SEQ ID NO: 57953 - DNA, 20 bp, Artificial Sequence
  chemically synthesized
tttgtattttttgtagagac

SEQ ID NO: 57954 - DNA, 20 bp, Artificial Sequence
  chemically synthesized
ttgtattttttgtagagaca

SEQ ID NO: 57955 - DNA, 20 bp, Artificial Sequence
  chemically synthesized
tttttgtagagacagggttt

SEQ ID NO: 57956 - DNA, 20 bp, Artificial Sequence
  chemically synthesized
cagggttttggcatgttgcc

SEQ ID NO: 57957 - DNA, 20 bp, Artificial Sequence
  chemically synthesized
agggttttggcatgttgccc

SEQ ID NO: 57958 - DNA, 20 bp, Artificial Sequence
  chemically synthesized
ccaggcttgtctcaaactcc

SEQ ID NO: 57959 - DNA, 20 bp, Artificial Sequence
  chemically synthesized
ttgtctcaaactcctggcct

SEQ ID NO: 57960 - DNA, 20 bp, Artificial Sequence
  chemically synthesized
tgtctcaaactcctggcctc

SEQ ID NO: 57961 - DNA, 20 bp, Artificial Sequence
  chemically synthesized
ctcaggtgatccatctgccg

SEQ ID NO: 57962 - DNA, 20 bp, Artificial Sequence
  chemically synthesized
gccgtggcctcccaaaatgc

SEQ ID NO: 57963 - DNA, 20 bp, Artificial Sequence
  chemically synthesized
ccgtggcctcccaaaatgct

SEQ ID NO: 57964 - DNA, 20 bp, Artificial Sequence
  chemically synthesized
ctcccaaaatgctgggatta

SEQ ID NO: 57965 - DNA, 20 bp, Artificial Sequence
  chemically synthesized
tcccaaaatgctgggattat

SEQ ID NO: 57966 - DNA, 20 bp, Artificial Sequence
  chemically synthesized
aatgctgggattataggcat

SEQ ID NO: 57967 - DNA, 20 bp, Artificial Sequence
  chemically synthesized
catgagccaccaccccctcc

SEQ ID NO: 57968 - DNA, 20 bp, Artificial Sequence
  chemically synthesized
gagccaccaccccctcctgg

SEQ ID NO: 57969 - DNA, 20 bp, Artificial Sequence
  chemically synthesized
agccaccaccccctcctgga

SEQ ID NO: 57970 - DNA, 20 bp, Artificial Sequence
  chemically synthesized
tataacataatttataatta

SEQ ID NO: 57971 - DNA, 20 bp, Artificial Sequence
  chemically synthesized
tataattacagaaaacatgt

SEQ ID NO: 57972 - DNA, 20 bp, Artificial Sequence
  chemically synthesized
cagaaaacatgtgagttcac

SEQ ID NO: 57973 - DNA, 20 bp, Artificial Sequence
  chemically synthesized
agaaaacatgtgagttcact

SEQ ID NO: 57974 - DNA, 20 bp, Artificial Sequence
  chemically synthesized
ctaggaataaataaattttg

SEQ ID NO: 57975 - DNA, 20 bp, Artificial Sequence
  chemically synthesized
ataaattttgaagataataa

SEQ ID NO: 57976 - DNA, 20 bp, Artificial Sequence
  chemically synthesized
tttcacttatgttgtcattt

SEQ ID NO: 57977 - DNA, 20 bp, Artificial Sequence
  chemically synthesized
cttatgttgtcatttcggca

SEQ ID NO: 57978 - DNA, 20 bp, Artificial Sequence
  chemically synthesized
gttgtcatttcggcacagtt

SEQ ID NO: 57979 - DNA, 20 bp, Artificial Sequence
  chemically synthesized
catttcggcacagtttggta

SEQ ID NO: 57980 - DNA, 20 bp, Artificial Sequence
  chemically synthesized
atttcggcacagtttggtat

SEQ ID NO: 57981 - DNA, 20 bp, Artificial Sequence
  chemically synthesized
gcacagtttggtataggatg

SEQ ID NO: 57982 - DNA, 20 bp, Artificial Sequence
  chemically synthesized
acagtttggtataggatgtg

SEQ ID NO: 57983 - DNA, 20 bp, Artificial Sequence
  chemically synthesized
gagatgttaacatttatacc

SEQ ID NO: 57984 - DNA, 20 bp, Artificial Sequence
  chemically synthesized
acctagcttgctcgtaaact

SEQ ID NO: 57985 - DNA, 20 bp, Artificial Sequence
  chemically synthesized
gctcgtaaactaagacctga

SEQ ID NO: 57986 - DNA, 20 bp, Artificial Sequence
  chemically synthesized
ctcgtaaactaagacctgaa

SEQ ID NO: 57987 - DNA, 20 bp, Artificial Sequence
  chemically synthesized
tcgtaaactaagacctgaaa

SEQ ID NO: 57988 - DNA, 20 bp, Artificial Sequence
  chemically synthesized
cctgaaagggttgtgtctat

SEQ ID NO: 57989 - DNA, 20 bp, Artificial Sequence
  chemically synthesized
gtgtctatcagctgcacccc

SEQ ID NO: 57990 - DNA, 20 bp, Artificial Sequence
  chemically synthesized
tgtctatcagctgcacccct

SEQ ID NO: 57991 - DNA, 20 bp, Artificial Sequence
  chemically synthesized
ctatcagctgcacccctggg

SEQ ID NO: 57992 - DNA, 20 bp, Artificial Sequence
  chemically synthesized
cctgggtagcgacacaacct

SEQ ID NO: 57993 - DNA, 20 bp, Artificial Sequence
  chemically synthesized
ctgggtagcgacacaacctc

SEQ ID NO: 57994 - DNA, 20 bp, Artificial Sequence
  chemically synthesized
ggtagcgacacaacctcggg

SEQ ID NO: 57995 - DNA, 20 bp, Artificial Sequence
  chemically synthesized
gtagcgacacaacctcggga

SEQ ID NO: 57996 - DNA, 20 bp, Artificial Sequence
  chemically synthesized
acacaacctcgggaaggcct

SEQ ID NO: 57997 - DNA, 20 bp, Artificial Sequence
  chemically synthesized
gcctcagccccctcctcgta

SEQ ID NO: 57998 - DNA, 20 bp, Artificial Sequence
  chemically synthesized
cctcgtacagcactgcctgt

SEQ ID NO: 57999 - DNA, 20 bp, Artificial Sequence
  chemically synthesized
gtacagcactgcctgttgga

SEQ ID NO: 58000 - DNA, 20 bp, Artificial Sequence
  chemically synthesized
cactgcctgttggaaagctt

SEQ ID NO: 58001 - DNA, 20 bp, Artificial Sequence
  chemically synthesized
actgcctgttggaaagcttg

SEQ ID NO: 58002 - DNA, 20 bp, Artificial Sequence
  chemically synthesized
ctgcctgttggaaagcttga

SEQ ID NO: 58003 - DNA, 20 bp, Artificial Sequence
  chemically synthesized
gcctgttggaaagcttgagg

SEQ ID NO: 58004 - DNA, 20 bp, Artificial Sequence
  chemically synthesized
cctgttggaaagcttgaggg

SEQ ID NO: 58005 - DNA, 20 bp, Artificial Sequence
  chemically synthesized
ggaaagcttgagggaggcta

SEQ ID NO: 58006 - DNA, 20 bp, Artificial Sequence
  chemically synthesized
tgagggaggctatggatgtg

SEQ ID NO: 58007 - DNA, 20 bp, Artificial Sequence
  chemically synthesized
ggctatggatgtgcagcact

SEQ ID NO: 58008 - DNA, 20 bp, Artificial Sequence
  chemically synthesized
tatggatgtgcagcacttgg

SEQ ID NO: 58009 - DNA, 20 bp, Artificial Sequence
  chemically synthesized
tggatgtgcagcacttggca

SEQ ID NO: 58010 - DNA, 20 bp, Artificial Sequence
  chemically synthesized
ggatgtgcagcacttggcag

SEQ ID NO: 58011 - DNA, 20 bp, Artificial Sequence
  chemically synthesized
gatgtgcagcacttggcaga

SEQ ID NO: 58012 - DNA, 20 bp, Artificial Sequence
  chemically synthesized
gcagcacttggcagagggtc

SEQ ID NO: 58013 - DNA, 20 bp, Artificial Sequence
  chemically synthesized
cttggcagagggtctggtca

SEQ ID NO: 58014 - DNA, 20 bp, Artificial Sequence
  chemically synthesized
ggcagagggtctggtcatgg

SEQ ID NO: 58015 - DNA, 20 bp, Artificial Sequence
  chemically synthesized
ggtctggtcatggaagttac

SEQ ID NO: 58016 - DNA, 20 bp, Artificial Sequence
  chemically synthesized
tggaagttaccagcaaatat

SEQ ID NO: 58017 - DNA, 20 bp, Artificial Sequence
  chemically synthesized
tatgattttattttatccaa

SEQ ID NO: 58018 - DNA, 20 bp, Artificial Sequence
  chemically synthesized
attttattttatccaaaaga

SEQ ID NO: 58019 - DNA, 20 bp, Artificial Sequence
  chemically synthesized
tttattttatccaaaagaaa

SEQ ID NO: 58020 - DNA, 20 bp, Artificial Sequence
  chemically synthesized
atccaaaagaaagagaatga

SEQ ID NO: 58021 - DNA, 20 bp, Artificial Sequence
  chemically synthesized
caaaagaaagagaatgaaag

SEQ ID NO: 58022 - DNA, 20 bp, Artificial Sequence
  chemically synthesized
aaagaaagagaatgaaagaa

SEQ ID NO: 58023 - DNA, 20 bp, Artificial Sequence
  chemically synthesized
aagaaagagaatgaaagaag

SEQ ID NO: 58024 - DNA, 20 bp, Artificial Sequence
  chemically synthesized
agaaagagaatgaaagaaga

SEQ ID NO: 58025 - DNA, 20 bp, Artificial Sequence
  chemically synthesized
gaaagagaatgaaagaagag

SEQ ID NO: 58026 - DNA, 20 bp, Artificial Sequence
  chemically synthesized
aagagaatgaaagaagaggg

SEQ ID NO: 58027 - DNA, 20 bp, Artificial Sequence
  chemically synthesized
agagaatgaaagaagagggg

SEQ ID NO: 58028 - DNA, 20 bp, Artificial Sequence
  chemically synthesized
gaaagaagaggggaggaaac

SEQ ID NO: 58029 - DNA, 20 bp, Artificial Sequence
  chemically synthesized
ggggaggaaacaagactaat

SEQ ID NO: 58030 - DNA, 20 bp, Artificial Sequence
  chemically synthesized
gggaggaaacaagactaatc

SEQ ID NO: 58031 - DNA, 20 bp, Artificial Sequence
  chemically synthesized
ggaaacaagactaatcagga

SEQ ID NO: 58032 - DNA, 20 bp, Artificial Sequence
  chemically synthesized
aagactaatcaggaaagatg

SEQ ID NO: 58033 - DNA, 20 bp, Artificial Sequence
  chemically synthesized
agactaatcaggaaagatga

SEQ ID NO: 58034 - DNA, 20 bp, Artificial Sequence
  chemically synthesized
aatcaggaaagatgaaggtc

SEQ ID NO: 58035 - DNA, 20 bp, Artificial Sequence
  chemically synthesized
atcaggaaagatgaaggtct

SEQ ID NO: 58036 - DNA, 20 bp, Artificial Sequence
  chemically synthesized
tcaggaaagatgaaggtcta

SEQ ID NO: 58037 - DNA, 20 bp, Artificial Sequence
  chemically synthesized
caggaaagatgaaggtctag

SEQ ID NO: 58038 - DNA, 20 bp, Artificial Sequence
  chemically synthesized
aaagatgaaggtctaggggt

SEQ ID NO: 58039 - DNA, 20 bp, Artificial Sequence
  chemically synthesized
aagatgaaggtctaggggtg

SEQ ID NO: 58040 - DNA, 20 bp, Artificial Sequence
  chemically synthesized
agatgaaggtctaggggtga

SEQ ID NO: 58041 - DNA, 20 bp, Artificial Sequence
  chemically synthesized
tgaaggtctaggggtgaggg

SEQ ID NO: 58042 - DNA, 20 bp, Artificial Sequence
  chemically synthesized
gaaggtctaggggtgaggga

SEQ ID NO: 58043 - DNA, 20 bp, Artificial Sequence
  chemically synthesized
aggtctaggggtgagggaag

SEQ ID NO: 58044 - DNA, 20 bp, Artificial Sequence
  chemically synthesized
ctaggggtgagggaaggagt

SEQ ID NO: 58045 - DNA, 20 bp, Artificial Sequence
  chemically synthesized
taggggtgagggaaggagta

SEQ ID NO: 58046 - DNA, 20 bp, Artificial Sequence
  chemically synthesized
ggggtgagggaaggagtaag

SEQ ID NO: 58047 - DNA, 20 bp, Artificial Sequence
  chemically synthesized
ggaaggagtaaggagacata

SEQ ID NO: 58048 - DNA, 20 bp, Artificial Sequence
  chemically synthesized
gaaggagtaaggagacataa

SEQ ID NO: 58049 - DNA, 20 bp, Artificial Sequence
  chemically synthesized
aaggagacataaaggcaatg

SEQ ID NO: 58050 - DNA, 20 bp, Artificial Sequence
  chemically synthesized
ggagacataaaggcaatgtg

SEQ ID NO: 58051 - DNA, 20 bp, Artificial Sequence
  chemically synthesized
gacataaaggcaatgtggag

SEQ ID NO: 58052 - DNA, 20 bp, Artificial Sequence
  chemically synthesized
aaaggcaatgtggagcagct

SEQ ID NO: 58053 - DNA, 20 bp, Artificial Sequence
  chemically synthesized
aaggcaatgtggagcagctg

SEQ ID NO: 58054 - DNA, 20 bp, Artificial Sequence
  chemically synthesized
aggcaatgtggagcagctga

SEQ ID NO: 58055 - DNA, 20 bp, Artificial Sequence
  chemically synthesized
ggcaatgtggagcagctgag

SEQ ID NO: 58056 - DNA, 20 bp, Artificial Sequence
  chemically synthesized
gcaatgtggagcagctgagg

SEQ ID NO: 58057 - DNA, 20 bp, Artificial Sequence
  chemically synthesized
caatgtggagcagctgaggg

SEQ ID NO: 58058 - DNA, 20 bp, Artificial Sequence
  chemically synthesized
ggagcagctgaggggggaaa

SEQ ID NO: 58059 - DNA, 20 bp, Artificial Sequence
  chemically synthesized
aaatggctttcaccacttcc

SEQ ID NO: 58060 - DNA, 20 bp, Artificial Sequence
  chemically synthesized
tgcactctcaaatattttat

SEQ ID NO: 58061 - DNA, 20 bp, Artificial Sequence
  chemically synthesized
ttttataagactctatattc

SEQ ID NO: 58062 - DNA, 20 bp, Artificial Sequence
  chemically synthesized
tttataagactctatattca

SEQ ID NO: 58063 - DNA, 20 bp, Artificial Sequence
  chemically synthesized
ggtaatgtttgaaccctgct

SEQ ID NO: 58064 - DNA, 20 bp, Artificial Sequence
  chemically synthesized
atgtttgaaccctgctgagc

SEQ ID NO: 58065 - DNA, 20 bp, Artificial Sequence
  chemically synthesized
tttgaaccctgctgagccag

SEQ ID NO: 58066 - DNA, 20 bp, Artificial Sequence
  chemically synthesized
accctgctgagccagtggca

SEQ ID NO: 58067 - DNA, 20 bp, Artificial Sequence
  chemically synthesized
ccctgctgagccagtggcat

SEQ ID NO: 58068 - DNA, 20 bp, Artificial Sequence
  chemically synthesized
agccagtggcatgggtctct

SEQ ID NO: 58069 - DNA, 20 bp, Artificial Sequence
  chemically synthesized
ccagtggcatgggtctctga

SEQ ID NO: 58070 - DNA, 20 bp, Artificial Sequence
  chemically synthesized
attaacttaatttgactatc

SEQ ID NO: 58071 - DNA, 20 bp, Artificial Sequence
  chemically synthesized
taatttgactatctggtttg

SEQ ID NO: 58072 - DNA, 20 bp, Artificial Sequence
  chemically synthesized
aatttgactatctggtttgt

SEQ ID NO: 58073 - DNA, 20 bp, Artificial Sequence
  chemically synthesized
gggtgcgtttactctcatgt

SEQ ID NO: 58074 - DNA, 20 bp, Artificial Sequence
  chemically synthesized
catgtaagtcaacaatgtcc

SEQ ID NO: 58075 - DNA, 20 bp, Artificial Sequence
  chemically synthesized
atgtaagtcaacaatgtcct

SEQ ID NO: 58076 - DNA, 20 bp, Artificial Sequence
  chemically synthesized
agtcaacaatgtcctgggat

SEQ ID NO: 58077 - DNA, 20 bp, Artificial Sequence
  chemically synthesized
gtcaacaatgtcctgggatt

SEQ ID NO: 58078 - DNA, 20 bp, Artificial Sequence
  chemically synthesized
tgggattgggacacactttc

SEQ ID NO: 58079 - DNA, 20 bp, Artificial Sequence
  chemically synthesized
gggattgggacacactttct

SEQ ID NO: 58080 - DNA, 20 bp, Artificial Sequence
  chemically synthesized
acacactttctgggcactgc

SEQ ID NO: 58081 - DNA, 20 bp, Artificial Sequence
  chemically synthesized
actttctgggcactgctggc

SEQ ID NO: 58082 - DNA, 20 bp, Artificial Sequence
  chemically synthesized
actgctggccagtcccaaaa

SEQ ID NO: 58083 - DNA, 20 bp, Artificial Sequence
  chemically synthesized
ccagtcccaaaatggaacat

SEQ ID NO: 58084 - DNA, 20 bp, Artificial Sequence
  chemically synthesized
cagtcccaaaatggaacata

SEQ ID NO: 58085 - DNA, 20 bp, Artificial Sequence
  chemically synthesized
tcccaaaatggaacataagg

SEQ ID NO: 58086 - DNA, 20 bp, Artificial Sequence
  chemically synthesized
caaaatggaacataaggaag

SEQ ID NO: 58087 - DNA, 20 bp, Artificial Sequence
  chemically synthesized
acttcttttatttctgaaat

SEQ ID NO: 58088 - DNA, 20 bp, Artificial Sequence
  chemically synthesized
cttcttttatttctgaaatc

SEQ ID NO: 58089 - DNA, 20 bp, Artificial Sequence
  chemically synthesized
ttttatttctgaaatcaggt

SEQ ID NO: 58090 - DNA, 20 bp, Artificial Sequence
  chemically synthesized
ttctgaaatcaggtaagaca

SEQ ID NO: 58091 - DNA, 20 bp, Artificial Sequence
  chemically synthesized
acatagtttttttaaattat

SEQ ID NO: 58092 - DNA, 20 bp, Artificial Sequence
  chemically synthesized
ttattttttctcccacaatg

SEQ ID NO: 58093 - DNA, 20 bp, Artificial Sequence
  chemically synthesized
tagtaaaaatacatatgcca

SEQ ID NO: 58094 - DNA, 20 bp, Artificial Sequence
  chemically synthesized
tttttgattcatgaaattcc

SEQ ID NO: 58095 - DNA, 20 bp, Artificial Sequence
  chemically synthesized
tgaaaaattcttaaaaaaat

SEQ ID NO: 58096 - DNA, 20 bp, Artificial Sequence
  chemically synthesized
ataagtttaatttccccgtg

SEQ ID NO: 58097 - DNA, 20 bp, Artificial Sequence
  chemically synthesized
tttccccgtgaagactgtca

SEQ ID NO: 58098 - DNA, 20 bp, Artificial Sequence
  chemically synthesized
cgtgaagactgtcacggtgc

SEQ ID NO: 58099 - DNA, 20 bp, Artificial Sequence
  chemically synthesized
tgtcacggtgctggaatgaa

SEQ ID NO: 58100 - DNA, 20 bp, Artificial Sequence
  chemically synthesized
gtcacggtgctggaatgaat

SEQ ID NO: 58101 - DNA, 20 bp, Artificial Sequence
  chemically synthesized
acggtgctggaatgaatggg

SEQ ID NO: 58102 - DNA, 20 bp, Artificial Sequence
  chemically synthesized
tgaatgggcagaaaaaataa

SEQ ID NO: 58103 - DNA, 20 bp, Artificial Sequence
  chemically synthesized
ggttgatttttctaatctaa

SEQ ID NO: 58104 - DNA, 20 bp, Artificial Sequence
  chemically synthesized
ttgatttttctaatctaaaa

SEQ ID NO: 58105 - DNA, 20 bp, Artificial Sequence
  chemically synthesized
aaaagagtgtgcctacatga

SEQ ID NO: 58106 - DNA, 20 bp, Artificial Sequence
  chemically synthesized
gagtgtgcctacatgatggc

SEQ ID NO: 58107 - DNA, 20 bp, Artificial Sequence
  chemically synthesized
tgcctacatgatggccagtc

SEQ ID NO: 58108 - DNA, 20 bp, Artificial Sequence
  chemically synthesized
cagtctggctgaaaaataaa

SEQ ID NO: 58109 - DNA, 20 bp, Artificial Sequence
  chemically synthesized
tgaaaaataaatagccattg

SEQ ID NO: 58110 - DNA, 20 bp, Artificial Sequence
  chemically synthesized
ccattgtagctaactatgca

SEQ ID NO: 58111 - DNA, 20 bp, Artificial Sequence
  chemically synthesized
cattgtagctaactatgcaa

SEQ ID NO: 58112 - DNA, 20 bp, Artificial Sequence
  chemically synthesized
gtagctaactatgcaaagga

SEQ ID NO: 58113 - DNA, 20 bp, Artificial Sequence
  chemically synthesized
taactatgcaaaggatggct

SEQ ID NO: 58114 - DNA, 20 bp, Artificial Sequence
  chemically synthesized
ggatggctaagctcttcgct

SEQ ID NO: 58115 - DNA, 20 bp, Artificial Sequence
  chemically synthesized
taagctcttcgcttggttct

SEQ ID NO: 58116 - DNA, 20 bp, Artificial Sequence
  chemically synthesized
taatttatatcatctctgtt

SEQ ID NO: 58117 - DNA, 20 bp, Artificial Sequence
  chemically synthesized
aatttatatcatctctgttc

SEQ ID NO: 58118 - DNA, 20 bp, Artificial Sequence
  chemically synthesized
aggtgccatgctcccctcac

SEQ ID NO: 58119 - DNA, 20 bp, Artificial Sequence
  chemically synthesized
gccatgctcccctcactagc

SEQ ID NO: 58120 - DNA, 20 bp, Artificial Sequence
  chemically synthesized
aataactctttgaatatgtt

SEQ ID NO: 58121 - DNA, 20 bp, Artificial Sequence
  chemically synthesized
ttggttccttgacctgttca

SEQ ID NO: 58122 - DNA, 20 bp, Artificial Sequence
  chemically synthesized
ggttccttgacctgttcatg

SEQ ID NO: 58123 - DNA, 20 bp, Artificial Sequence
  chemically synthesized
tccttgacctgttcatggag

SEQ ID NO: 58124 - DNA, 20 bp, Artificial Sequence
  chemically synthesized
ccttgacctgttcatggagt

SEQ ID NO: 58125 - DNA, 20 bp, Artificial Sequence
  chemically synthesized
cctgttcatggagtgggact

SEQ ID NO: 58126 - DNA, 20 bp, Artificial Sequence
  chemically synthesized
cagcatttctctctttgtta

SEQ ID NO: 58127 - DNA, 20 bp, Artificial Sequence
  chemically synthesized
ttctctctttgttatggcct

SEQ ID NO: 58128 - DNA, 20 bp, Artificial Sequence
  chemically synthesized
ctctttgttatggcctgagt

SEQ ID NO: 58129 - DNA, 20 bp, Artificial Sequence
  chemically synthesized
tctttgttatggcctgagta

SEQ ID NO: 58130 - DNA, 20 bp, Artificial Sequence
  chemically synthesized
gcctgagtaaggctttccat

SEQ ID NO: 58131 - DNA, 20 bp, Artificial Sequence
  chemically synthesized
atacatttgcttcttatccc

SEQ ID NO: 58132 - DNA, 20 bp, Artificial Sequence
  chemically synthesized
acatttgcttcttatccctg

SEQ ID NO: 58133 - DNA, 20 bp, Artificial Sequence
  chemically synthesized
aattatacacatccatttgc

SEQ ID NO: 58134 - DNA, 20 bp, Artificial Sequence
  chemically synthesized
ataatgattcaacaaatact

SEQ ID NO: 58135 - DNA, 20 bp, Artificial Sequence
  chemically synthesized
taatgattcaacaaatactc

SEQ ID NO: 58136 - DNA, 20 bp, Artificial Sequence
  chemically synthesized
aatgattcaacaaatactca

SEQ ID NO: 58137 - DNA, 20 bp, Artificial Sequence
  chemically synthesized
aaatactcagggtatttgtt

SEQ ID NO: 58138 - DNA, 20 bp, Artificial Sequence
  chemically synthesized
tactcagggtatttgttgag

SEQ ID NO: 58139 - DNA, 20 bp, Artificial Sequence
  chemically synthesized
actcagggtatttgttgagt

SEQ ID NO: 58140 - DNA, 20 bp, Artificial Sequence
  chemically synthesized
agggtatttgttgagtgggt

SEQ ID NO: 58141 - DNA, 20 bp, Artificial Sequence
  chemically synthesized
gggtatttgttgagtgggtt

SEQ ID NO: 58142 - DNA, 20 bp, Artificial Sequence
  chemically synthesized
ccgtgtgtgattgtgaatgt

SEQ ID NO: 58143 - DNA, 20 bp, Artificial Sequence
  chemically synthesized
tgtgtgtcctttacaaatac

SEQ ID NO: 58144 - DNA, 20 bp, Artificial Sequence
  chemically synthesized
tttacaaatactagcttatt

SEQ ID NO: 58145 - DNA, 20 bp, Artificial Sequence
  chemically synthesized
atactagcttatttagctca

SEQ ID NO: 58146 - DNA, 20 bp, Artificial Sequence
  chemically synthesized
agcttatttagctcatggta

SEQ ID NO: 58147 - DNA, 20 bp, Artificial Sequence
  chemically synthesized
gcttatttagctcatggtat

SEQ ID NO: 58148 - DNA, 20 bp, Artificial Sequence
  chemically synthesized
tatttagctcatggtatagg

SEQ ID NO: 58149 - DNA, 20 bp, Artificial Sequence
  chemically synthesized
atttagctcatggtataggt

SEQ ID NO: 58150 - DNA, 20 bp, Artificial Sequence
  chemically synthesized
tttagctcatggtataggta

SEQ ID NO: 58151 - DNA, 20 bp, Artificial Sequence
  chemically synthesized
agctcatggtataggtaggg

SEQ ID NO: 58152 - DNA, 20 bp, Artificial Sequence
  chemically synthesized
atggtataggtagggtagca

SEQ ID NO: 58153 - DNA, 20 bp, Artificial Sequence
  chemically synthesized
tcatccccattttataaaca

SEQ ID NO: 58154 - DNA, 20 bp, Artificial Sequence
  chemically synthesized
attttataaacaaagaaatc

SEQ ID NO: 58155 - DNA, 20 bp, Artificial Sequence
  chemically synthesized
taaacaaagaaatctagact

SEQ ID NO: 58156 - DNA, 20 bp, Artificial Sequence
  chemically synthesized
aaacaaagaaatctagactt

SEQ ID NO: 58157 - DNA, 20 bp, Artificial Sequence
  chemically synthesized
cgtgaccaaattcccaaatc

SEQ ID NO: 58158 - DNA, 20 bp, Artificial Sequence
  chemically synthesized
gtgaccaaattcccaaatca

SEQ ID NO: 58159 - DNA, 20 bp, Artificial Sequence
  chemically synthesized
attcccaaatcaaggaaata

SEQ ID NO: 58160 - DNA, 20 bp, Artificial Sequence
  chemically synthesized
atcaaggaaataaagaaacc

SEQ ID NO: 58161 - DNA, 20 bp, Artificial Sequence
  chemically synthesized
aaataaagaaacctggattt

SEQ ID NO: 58162 - DNA, 20 bp, Artificial Sequence
  chemically synthesized
aaagaaacctggatttaagc

SEQ ID NO: 58163 - DNA, 20 bp, Artificial Sequence
  chemically synthesized
tggatttaagccagatttcc

SEQ ID NO: 58164 - DNA, 20 bp, Artificial Sequence
  chemically synthesized
cagatttccaagaaaaaatc

SEQ ID NO: 58165 - DNA, 20 bp, Artificial Sequence
  chemically synthesized
agatttccaagaaaaaatct

SEQ ID NO: 58166 - DNA, 20 bp, Artificial Sequence
  chemically synthesized
gatttccaagaaaaaatcta

SEQ ID NO: 58167 - DNA, 20 bp, Artificial Sequence
  chemically synthesized
aacacattccaatgtaactg

SEQ ID NO: 58168 - DNA, 20 bp, Artificial Sequence
  chemically synthesized
cacattccaatgtaactgaa

SEQ ID NO: 58169 - DNA, 20 bp, Artificial Sequence
  chemically synthesized
attccaatgtaactgaagag

SEQ ID NO: 58170 - DNA, 20 bp, Artificial Sequence
  chemically synthesized
ttccaatgtaactgaagagc

SEQ ID NO: 58171 - DNA, 20 bp, Artificial Sequence
  chemically synthesized
ggttaattgtttgccacttg

SEQ ID NO: 58172 - DNA, 20 bp, Artificial Sequence
  chemically synthesized
gccacttgcagaatccaatt

SEQ ID NO: 58173 - DNA, 20 bp, Artificial Sequence
  chemically synthesized
acttgcagaatccaattaag

SEQ ID NO: 58174 - DNA, 20 bp, Artificial Sequence
  chemically synthesized
ttgcagaatccaattaagaa

SEQ ID NO: 58175 - DNA, 20 bp, Artificial Sequence
  chemically synthesized
gcagaatccaattaagaaga

SEQ ID NO: 58176 - DNA, 20 bp, Artificial Sequence
  chemically synthesized
gaatccaattaagaagagag

SEQ ID NO: 58177 - DNA, 20 bp, Artificial Sequence
  chemically synthesized
caattaagaagagagaagtc

SEQ ID NO: 58178 - DNA, 20 bp, Artificial Sequence
  chemically synthesized
gaagagagaagtctggtata

SEQ ID NO: 58179 - DNA, 20 bp, Artificial Sequence
  chemically synthesized
agagaagtctggtataaaga

SEQ ID NO: 58180 - DNA, 20 bp, Artificial Sequence
  chemically synthesized
aagaaagtgatttgcttcca

SEQ ID NO: 58181 - DNA, 20 bp, Artificial Sequence
  chemically synthesized
aagtgatttgcttccaaagc

SEQ ID NO: 58182 - DNA, 20 bp, Artificial Sequence
  chemically synthesized
atttgcttccaaagctagct

SEQ ID NO: 58183 - DNA, 20 bp, Artificial Sequence
  chemically synthesized
tttgcttccaaagctagctt

SEQ ID NO: 58184 - DNA, 20 bp, Artificial Sequence
  chemically synthesized
ttgcttccaaagctagctta

SEQ ID NO: 58185 - DNA, 20 bp, Artificial Sequence
  chemically synthesized
tgcttccaaagctagcttag

SEQ ID NO: 58186 - DNA, 20 bp, Artificial Sequence
  chemically synthesized
ttccaaagctagcttagggg

SEQ ID NO: 58187 - DNA, 20 bp, Artificial Sequence
  chemically synthesized
ctagcttaggggaagaaatg

SEQ ID NO: 58188 - DNA, 20 bp, Artificial Sequence
  chemically synthesized
gcttaggggaagaaatgcag

SEQ ID NO: 58189 - DNA, 20 bp, Artificial Sequence
  chemically synthesized
cctgccgtactacttcactt

SEQ ID NO: 58190 - DNA, 20 bp, Artificial Sequence
  chemically synthesized
ctgccgtactacttcacttt

SEQ ID NO: 58191 - DNA, 20 bp, Artificial Sequence
  chemically synthesized
gccgtactacttcactttag

SEQ ID NO: 58192 - DNA, 20 bp, Artificial Sequence
  chemically synthesized
gtactacttcactttaggag

SEQ ID NO: 58193 - DNA, 20 bp, Artificial Sequence
  chemically synthesized
tacttcactttaggagcaga

SEQ ID NO: 58194 - DNA, 20 bp, Artificial Sequence
  chemically synthesized
ttcactttaggagcagaaag

SEQ ID NO: 58195 - DNA, 20 bp, Artificial Sequence
  chemically synthesized
gcagaaagtggcacttttaa

SEQ ID NO: 58196 - DNA, 20 bp, Artificial Sequence
  chemically synthesized
cagaaagtggcacttttaaa

SEQ ID NO: 58197 - DNA, 20 bp, Artificial Sequence
  chemically synthesized
gtggcacttttaaaaggcaa

SEQ ID NO: 58198 - DNA, 20 bp, Artificial Sequence
  chemically synthesized
ggcacttttaaaaggcaaca

SEQ ID NO: 58199 - DNA, 20 bp, Artificial Sequence
  chemically synthesized
gcacttttaaaaggcaacag

SEQ ID NO: 58200 - DNA, 20 bp, Artificial Sequence
  chemically synthesized
acttttaaaaggcaacagag

SEQ ID NO: 58201 - DNA, 20 bp, Artificial Sequence
  chemically synthesized
cttttaaaaggcaacagagg

SEQ ID NO: 58202 - DNA, 20 bp, Artificial Sequence
  chemically synthesized
taaaaggcaacagaggaggc

SEQ ID NO: 58203 - DNA, 20 bp, Artificial Sequence
  chemically synthesized
aggcaacagaggaggcgagc

SEQ ID NO: 58204 - DNA, 20 bp, Artificial Sequence
  chemically synthesized
ggcaacagaggaggcgagca

SEQ ID NO: 58205 - DNA, 20 bp, Artificial Sequence
  chemically synthesized
agaggaggcgagcaaggatt

SEQ ID NO: 58206 - DNA, 20 bp, Artificial Sequence
  chemically synthesized
gaggaggcgagcaaggattc

SEQ ID NO: 58207 - DNA, 20 bp, Artificial Sequence
  chemically synthesized
aggaggcgagcaaggattca

SEQ ID NO: 58208 - DNA, 20 bp, Artificial Sequence
  chemically synthesized
ggaggcgagcaaggattcag

SEQ ID NO: 58209 - DNA, 20 bp, Artificial Sequence
  chemically synthesized
aaggattcaggggtccatgc

SEQ ID NO: 58210 - DNA, 20 bp, Artificial Sequence
  chemically synthesized
ttcaggggtccatgctagct

SEQ ID NO: 58211 - DNA, 20 bp, Artificial Sequence
  chemically synthesized
tcaggggtccatgctagctt

SEQ ID NO: 58212 - DNA, 20 bp, Artificial Sequence
  chemically synthesized
agcttgggcaccttatccac

SEQ ID NO: 58213 - DNA, 20 bp, Artificial Sequence
  chemically synthesized
gcttgggcaccttatccacc

SEQ ID NO: 58214 - DNA, 20 bp, Artificial Sequence
  chemically synthesized
tgggcaccttatccaccagg

SEQ ID NO: 58215 - DNA, 20 bp, Artificial Sequence
  chemically synthesized
accttatccaccaggtagtt

SEQ ID NO: 58216 - DNA, 20 bp, Artificial Sequence
  chemically synthesized
ttatccaccaggtagttgag

SEQ ID NO: 58217 - DNA, 20 bp, Artificial Sequence
  chemically synthesized
gtagttgagcagttgcctgc

SEQ ID NO: 58218 - DNA, 20 bp, Artificial Sequence
  chemically synthesized
ttgcctgctggtgcctttgt

SEQ ID NO: 58219 - DNA, 20 bp, Artificial Sequence
  chemically synthesized
cctgctggtgcctttgtgag

SEQ ID NO: 58220 - DNA, 20 bp, Artificial Sequence
  chemically synthesized
ctgctggtgcctttgtgagc

SEQ ID NO: 58221 - DNA, 20 bp, Artificial Sequence
  chemically synthesized
tgctggtgcctttgtgagca

SEQ ID NO: 58222 - DNA, 20 bp, Artificial Sequence
  chemically synthesized
tgagcagggtgttgtccctt

SEQ ID NO: 58223 - DNA, 20 bp, Artificial Sequence
  chemically synthesized
gagcagggtgttgtcccttg

SEQ ID NO: 58224 - DNA, 20 bp, Artificial Sequence
  chemically synthesized
tgtcccttgaggcaaatctc

SEQ ID NO: 58225 - DNA, 20 bp, Artificial Sequence
  chemically synthesized
tcccttgaggcaaatctctg

SEQ ID NO: 58226 - DNA, 20 bp, Artificial Sequence
  chemically synthesized
cccttgaggcaaatctctgg

SEQ ID NO: 58227 - DNA, 20 bp, Artificial Sequence
  chemically synthesized
ccttgaggcaaatctctgga

SEQ ID NO: 58228 - DNA, 20 bp, Artificial Sequence
  chemically synthesized
gaggcaaatctctggagggt

SEQ ID NO: 58229 - DNA, 20 bp, Artificial Sequence
  chemically synthesized
ggcaaatctctggagggtga

SEQ ID NO: 58230 - DNA, 20 bp, Artificial Sequence
  chemically synthesized
tctggagggtgagagttttg

SEQ ID NO: 58231 - DNA, 20 bp, Artificial Sequence
  chemically synthesized
ggagggtgagagttttgtag

SEQ ID NO: 58232 - DNA, 20 bp, Artificial Sequence
  chemically synthesized
gagggtgagagttttgtagt

SEQ ID NO: 58233 - DNA, 20 bp, Artificial Sequence
  chemically synthesized
gttttgtagtgggcatgctt

SEQ ID NO: 58234 - DNA, 20 bp, Artificial Sequence
  chemically synthesized
ttataaatcacctgtgaact

SEQ ID NO: 58235 - DNA, 20 bp, Artificial Sequence
  chemically synthesized
tataaatcacctgtgaactc

SEQ ID NO: 58236 - DNA, 20 bp, Artificial Sequence
  chemically synthesized
taaatcacctgtgaactcag

SEQ ID NO: 58237 - DNA, 20 bp, Artificial Sequence
  chemically synthesized
aactcaggagttccatcttg

SEQ ID NO: 58238 - DNA, 20 bp, Artificial Sequence
  chemically synthesized
tccatcttgaagcacataca

SEQ ID NO: 58239 - DNA, 20 bp, Artificial Sequence
  chemically synthesized
tcttgaagcacatacatagt

SEQ ID NO: 58240 - DNA, 20 bp, Artificial Sequence
  chemically synthesized
agttagatgaacttgccctg

SEQ ID NO: 58241 - DNA, 20 bp, Artificial Sequence
  chemically synthesized
gttagatgaacttgccctgc

SEQ ID NO: 58242 - DNA, 20 bp, Artificial Sequence
  chemically synthesized
ttagatgaacttgccctgca

SEQ ID NO: 58243 - DNA, 20 bp, Artificial Sequence
  chemically synthesized
agatgaacttgccctgcagg

SEQ ID NO: 58244 - DNA, 20 bp, Artificial Sequence
  chemically synthesized
atgaacttgccctgcaggga

SEQ ID NO: 58245 - DNA, 20 bp, Artificial Sequence
  chemically synthesized
ctgcagggagagtctgatga

SEQ ID NO: 58246 - DNA, 20 bp, Artificial Sequence
  chemically synthesized
tgcagggagagtctgatgaa

SEQ ID NO: 58247 - DNA, 20 bp, Artificial Sequence
  chemically synthesized
gcagggagagtctgatgaaa

SEQ ID NO: 58248 - DNA, 20 bp, Artificial Sequence
  chemically synthesized
agggagagtctgatgaaagg

SEQ ID NO: 58249 - DNA, 20 bp, Artificial Sequence
  chemically synthesized
gggagagtctgatgaaaggg

SEQ ID NO: 58250 - DNA, 20 bp, Artificial Sequence
  chemically synthesized
agagtctgatgaaagggagg

SEQ ID NO: 58251 - DNA, 20 bp, Artificial Sequence
  chemically synthesized
caatttaatctataaattac

SEQ ID NO: 58252 - DNA, 20 bp, Artificial Sequence
  chemically synthesized
attaccagataaaattttac

SEQ ID NO: 58253 - DNA, 20 bp, Artificial Sequence
  chemically synthesized
aattttacaagttgacttta

SEQ ID NO: 58254 - DNA, 20 bp, Artificial Sequence
  chemically synthesized
aagtcaaacacatttgaatt

SEQ ID NO: 58255 - DNA, 20 bp, Artificial Sequence
  chemically synthesized
tcaaacacatttgaatttag

SEQ ID NO: 58256 - DNA, 20 bp, Artificial Sequence
  chemically synthesized
aacacatttgaatttagtgg

SEQ ID NO: 58257 - DNA, 20 bp, Artificial Sequence
  chemically synthesized
gaatttagtggaagccattc

SEQ ID NO: 58258 - DNA, 20 bp, Artificial Sequence
  chemically synthesized
agccattcaagaaaatatca

SEQ ID NO: 58259 - DNA, 20 bp, Artificial Sequence
  chemically synthesized
agaaaatatcaaagaaaata

SEQ ID NO: 58260 - DNA, 20 bp, Artificial Sequence
  chemically synthesized
aaaatatcaaagaaaataca

SEQ ID NO: 58261 - DNA, 20 bp, Artificial Sequence
  chemically synthesized
atatcaaagaaaatacagag

SEQ ID NO: 58262 - DNA, 20 bp, Artificial Sequence
  chemically synthesized
tatcaaagaaaatacagagc

SEQ ID NO: 58263 - DNA, 20 bp, Artificial Sequence
  chemically synthesized
tcaaagaaaatacagagcag

SEQ ID NO: 58264 - DNA, 20 bp, Artificial Sequence
  chemically synthesized
aagaaaatacagagcaggag

SEQ ID NO: 58265 - DNA, 20 bp, Artificial Sequence
  chemically synthesized
atacagagcaggagaagatt

SEQ ID NO: 58266 - DNA, 20 bp, Artificial Sequence
  chemically synthesized
gagcaggagaagattaagca

SEQ ID NO: 58267 - DNA, 20 bp, Artificial Sequence
  chemically synthesized
gcaggagaagattaagcaaa

SEQ ID NO: 58268 - DNA, 20 bp, Artificial Sequence
  chemically synthesized
agattaagcaaagagttttt

SEQ ID NO: 58269 - DNA, 20 bp, Artificial Sequence
  chemically synthesized
gattaagcaaagagtttttt

SEQ ID NO: 58270 - DNA, 20 bp, Artificial Sequence
  chemically synthesized
attaagcaaagagttttttg

SEQ ID NO: 58271 - DNA, 20 bp, Artificial Sequence
  chemically synthesized
aaagagttttttggggaaat

SEQ ID NO: 58272 - DNA, 20 bp, Artificial Sequence
  chemically synthesized
ggtgtctatgtctgtgtgtg

SEQ ID NO: 58273 - DNA, 20 bp, Artificial Sequence
  chemically synthesized
gtgtctatgtctgtgtgtgt

SEQ ID NO: 58274 - DNA, 20 bp, Artificial Sequence
  chemically synthesized
tgtctatgtctgtgtgtgta

SEQ ID NO: 58275 - DNA, 20 bp, Artificial Sequence
  chemically synthesized
tctatgtctgtgtgtgtagg

SEQ ID NO: 58276 - DNA, 20 bp, Artificial Sequence
  chemically synthesized
gtctgtgtgtgtagggagtg

SEQ ID NO: 58277 - DNA, 20 bp, Artificial Sequence
  chemically synthesized
tctgtgtgtgtagggagtgc

SEQ ID NO: 58278 - DNA, 20 bp, Artificial Sequence
  chemically synthesized
ctgtgtgtgtagggagtgca

SEQ ID NO: 58279 - DNA, 20 bp, Artificial Sequence
  chemically synthesized
tgtgtgtgtagggagtgcag

SEQ ID NO: 58280 - DNA, 20 bp, Artificial Sequence
  chemically synthesized
gggatatgaatattctattt

SEQ ID NO: 58281 - DNA, 20 bp, Artificial Sequence
  chemically synthesized
gaatattctatttcagccca

SEQ ID NO: 58282 - DNA, 20 bp, Artificial Sequence
  chemically synthesized
ctatttcagcccatggaaac

SEQ ID NO: 58283 - DNA, 20 bp, Artificial Sequence
  chemically synthesized
tatttcagcccatggaaact

SEQ ID NO: 58284 - DNA, 20 bp, Artificial Sequence
  chemically synthesized
agcccatggaaactaggatg

SEQ ID NO: 58285 - DNA, 20 bp, Artificial Sequence
  chemically synthesized
tagatcactgtgaacttatt

SEQ ID NO: 58286 - DNA, 20 bp, Artificial Sequence
  chemically synthesized
atcactgtgaacttattcag

SEQ ID NO: 58287 - DNA, 20 bp, Artificial Sequence
  chemically synthesized
tcactgtgaacttattcagc

SEQ ID NO: 58288 - DNA, 20 bp, Artificial Sequence
  chemically synthesized
tattcagcaggctacaccca

SEQ ID NO: 58289 - DNA, 20 bp, Artificial Sequence
  chemically synthesized
attcagcaggctacacccaa

SEQ ID NO: 58290 - DNA, 20 bp, Artificial Sequence
  chemically synthesized
agcaggctacacccaaaggc

SEQ ID NO: 58291 - DNA, 20 bp, Artificial Sequence
  chemically synthesized
tagaacaaacttctctgcca

SEQ ID NO: 58292 - DNA, 20 bp, Artificial Sequence
  chemically synthesized
agaacaaacttctctgccac

SEQ ID NO: 58293 - DNA, 20 bp, Artificial Sequence
  chemically synthesized
aacatatgttttaatcgacc

SEQ ID NO: 58294 - DNA, 20 bp, Artificial Sequence
  chemically synthesized
acatatgttttaatcgacct

SEQ ID NO: 58295 - DNA, 20 bp, Artificial Sequence
  chemically synthesized
catatgttttaatcgacctg

SEQ ID NO: 58296 - DNA, 20 bp, Artificial Sequence
  chemically synthesized
atatgttttaatcgacctgg

SEQ ID NO: 58297 - DNA, 20 bp, Artificial Sequence
  chemically synthesized
tatgttttaatcgacctggg

SEQ ID NO: 58298 - DNA, 20 bp, Artificial Sequence
  chemically synthesized
tggggggcacattctctgat

SEQ ID NO: 58299 - DNA, 20 bp, Artificial Sequence
  chemically synthesized
cattctctgataagctcttt

SEQ ID NO: 58300 - DNA, 20 bp, Artificial Sequence
  chemically synthesized
ctctgataagctcttttgga

SEQ ID NO: 58301 - DNA, 20 bp, Artificial Sequence
  chemically synthesized
gataagctcttttggaaagc

SEQ ID NO: 58302 - DNA, 20 bp, Artificial Sequence
  chemically synthesized
ataagctcttttggaaagcc

SEQ ID NO: 58303 - DNA, 20 bp, Artificial Sequence
  chemically synthesized
ttggaaagccaggctttctg

SEQ ID NO: 58304 - DNA, 20 bp, Artificial Sequence
  chemically synthesized
gttatctttccaatgtgtgc

SEQ ID NO: 58305 - DNA, 20 bp, Artificial Sequence
  chemically synthesized
ccaatgtgtgctggaatgcc

SEQ ID NO: 58306 - DNA, 20 bp, Artificial Sequence
  chemically synthesized
caatgtgtgctggaatgccc

SEQ ID NO: 58307 - DNA, 20 bp, Artificial Sequence
  chemically synthesized
aatgtgtgctggaatgcccg

SEQ ID NO: 58308 - DNA, 20 bp, Artificial Sequence
  chemically synthesized
tgtgtgctggaatgcccggg

SEQ ID NO: 58309 - DNA, 20 bp, Artificial Sequence
  chemically synthesized
tgtgctggaatgcccgggga

SEQ ID NO: 58310 - DNA, 20 bp, Artificial Sequence
  chemically synthesized
gtgctggaatgcccggggag

SEQ ID NO: 58311 - DNA, 20 bp, Artificial Sequence
  chemically synthesized
gaatgcccggggagaggaaa

SEQ ID NO: 58312 - DNA, 20 bp, Artificial Sequence
  chemically synthesized
agaggaaaaagtttctttta

SEQ ID NO: 58313 - DNA, 20 bp, Artificial Sequence
  chemically synthesized
gtttcttttacagccatgct

SEQ ID NO: 58314 - DNA, 20 bp, Artificial Sequence
  chemically synthesized
cttttacagccatgctcagt

SEQ ID NO: 58315 - DNA, 20 bp, Artificial Sequence
  chemically synthesized
ttacagccatgctcagtgag

SEQ ID NO: 58316 - DNA, 20 bp, Artificial Sequence
  chemically synthesized
cagccatgctcagtgagaag

SEQ ID NO: 58317 - DNA, 20 bp, Artificial Sequence
  chemically synthesized
gccatgctcagtgagaagcg

SEQ ID NO: 58318 - DNA, 20 bp, Artificial Sequence
  chemically synthesized
tcttctattcacaaattgct

SEQ ID NO: 58319 - DNA, 20 bp, Artificial Sequence
  chemically synthesized
gcatacacattcacacacca

SEQ ID NO: 58320 - DNA, 20 bp, Artificial Sequence
  chemically synthesized
acacattcacacaccacagt

SEQ ID NO: 58321 - DNA, 20 bp, Artificial Sequence
  chemically synthesized
cacattcacacaccacagtg

SEQ ID NO: 58322 - DNA, 20 bp, Artificial Sequence
  chemically synthesized
attcacacaccacagtgagg

SEQ ID NO: 58323 - DNA, 20 bp, Artificial Sequence
  chemically synthesized
ttaataaaatacatttactt

SEQ ID NO: 58324 - DNA, 20 bp, Artificial Sequence
  chemically synthesized
ataaaatacatttacttcag

SEQ ID NO: 58325 - DNA, 20 bp, Artificial Sequence
  chemically synthesized
acattttgcctataatataa

SEQ ID NO: 58326 - DNA, 20 bp, Artificial Sequence
  chemically synthesized
aaaagtatttttcctattaa

SEQ ID NO: 58327 - DNA, 20 bp, Artificial Sequence
  chemically synthesized
ttaaatccccattgccatat

SEQ ID NO: 58328 - DNA, 20 bp, Artificial Sequence
  chemically synthesized
ccccattgccatatgagccc

SEQ ID NO: 58329 - DNA, 20 bp, Artificial Sequence
  chemically synthesized
ccattgccatatgagccctg

SEQ ID NO: 58330 - DNA, 20 bp, Artificial Sequence
  chemically synthesized
cattgccatatgagccctgg

SEQ ID NO: 58331 - DNA, 20 bp, Artificial Sequence
  chemically synthesized
tatgagccctggaggtgaat

SEQ ID NO: 58332 - DNA, 20 bp, Artificial Sequence
  chemically synthesized
tgagccctggaggtgaatca

SEQ ID NO: 58333 - DNA, 20 bp, Artificial Sequence
  chemically synthesized
gaggtgaatcagagaaacaa

SEQ ID NO: 58334 - DNA, 20 bp, Artificial Sequence
  chemically synthesized
aggtgaatcagagaaacaaa

SEQ ID NO: 58335 - DNA, 20 bp, Artificial Sequence
  chemically synthesized
tcagagaaacaaaaggattg

SEQ ID NO: 58336 - DNA, 20 bp, Artificial Sequence
  chemically synthesized
aaggattgtggaaaaatcat

SEQ ID NO: 58337 - DNA, 20 bp, Artificial Sequence
  chemically synthesized
aggattgtggaaaaatcatc

SEQ ID NO: 58338 - DNA, 20 bp, Artificial Sequence
  chemically synthesized
aaaaatcatcaggttaaaaa

SEQ ID NO: 58339 - DNA, 20 bp, Artificial Sequence
  chemically synthesized
aagaaaaattgattctgttt

SEQ ID NO: 58340 - DNA, 20 bp, Artificial Sequence
  chemically synthesized
agaaaaattgattctgtttt

SEQ ID NO: 58341 - DNA, 20 bp, Artificial Sequence
  chemically synthesized
ttctgttttgggatatttcc

SEQ ID NO: 58342 - DNA, 20 bp, Artificial Sequence
  chemically synthesized
gggatatttcctagcaacat

SEQ ID NO: 58343 - DNA, 20 bp, Artificial Sequence
  chemically synthesized
tatttcctagcaacatgagc

SEQ ID NO: 58344 - DNA, 20 bp, Artificial Sequence
  chemically synthesized
atttcctagcaacatgagct

SEQ ID NO: 58345 - DNA, 20 bp, Artificial Sequence
  chemically synthesized
tttcctagcaacatgagctg

SEQ ID NO: 58346 - DNA, 20 bp, Artificial Sequence
  chemically synthesized
tcctagcaacatgagctggg

SEQ ID NO: 58347 - DNA, 20 bp, Artificial Sequence
  chemically synthesized
cctagcaacatgagctgggg

SEQ ID NO: 58348 - DNA, 20 bp, Artificial Sequence
  chemically synthesized
ctagcaacatgagctgggga

SEQ ID NO: 58349 - DNA, 20 bp, Artificial Sequence
  chemically synthesized
tagcaacatgagctggggag

SEQ ID NO: 58350 - DNA, 20 bp, Artificial Sequence
  chemically synthesized
atgagctggggaggggatct

SEQ ID NO: 58351 - DNA, 20 bp, Artificial Sequence
  chemically synthesized
agctggggaggggatctcag

SEQ ID NO: 58352 - DNA, 20 bp, Artificial Sequence
  chemically synthesized
ctcagcagtgatgctctatg

SEQ ID NO: 58353 - DNA, 20 bp, Artificial Sequence
  chemically synthesized
tgaagcataataaaatgaca

SEQ ID NO: 58354 - DNA, 20 bp, Artificial Sequence
  chemically synthesized
ataataaaatgacacagtta

SEQ ID NO: 58355 - DNA, 20 bp, Artificial Sequence
  chemically synthesized
taataaaatgacacagttac

SEQ ID NO: 58356 - DNA, 20 bp, Artificial Sequence
  chemically synthesized
tgacacagttacaggtaact

SEQ ID NO: 58357 - DNA, 20 bp, Artificial Sequence
  chemically synthesized
agttacaggtaacttagtta

SEQ ID NO: 58358 - DNA, 20 bp, Artificial Sequence
  chemically synthesized
gttacaggtaacttagttaa

SEQ ID NO: 58359 - DNA, 20 bp, Artificial Sequence
  chemically synthesized
ttacaggtaacttagttaaa

SEQ ID NO: 58360 - DNA, 20 bp, Artificial Sequence
  chemically synthesized
tacaggtaacttagttaaag

SEQ ID NO: 58361 - DNA, 20 bp, Artificial Sequence
  chemically synthesized
acaggtaacttagttaaagg

SEQ ID NO: 58362 - DNA, 20 bp, Artificial Sequence
  chemically synthesized
tagttaaagggggaaataaa

SEQ ID NO: 58363 - DNA, 20 bp, Artificial Sequence
  chemically synthesized
ttaaagggggaaataaatgg

SEQ ID NO: 58364 - DNA, 20 bp, Artificial Sequence
  chemically synthesized
ctctttttgaatatcaattg

SEQ ID NO: 58365 - DNA, 20 bp, Artificial Sequence
  chemically synthesized
atgtttaactgaactcactg

SEQ ID NO: 58366 - DNA, 20 bp, Artificial Sequence
  chemically synthesized
tgtttaactgaactcactgt

SEQ ID NO: 58367 - DNA, 20 bp, Artificial Sequence
  chemically synthesized
ttaactgaactcactgtagg

SEQ ID NO: 58368 - DNA, 20 bp, Artificial Sequence
  chemically synthesized
ttaatttattgtgtgttttg

SEQ ID NO: 58369 - DNA, 20 bp, Artificial Sequence
  chemically synthesized
gtgttttgaagtcacactgt

SEQ ID NO: 58370 - DNA, 20 bp, Artificial Sequence
  chemically synthesized
tgaagtcacactgtgagcta

SEQ ID NO: 58371 - DNA, 20 bp, Artificial Sequence
  chemically synthesized
gtgagctatagaatttaccc

SEQ ID NO: 58372 - DNA, 20 bp, Artificial Sequence
  chemically synthesized
tacccaagcacaactcttcc

SEQ ID NO: 58373 - DNA, 20 bp, Artificial Sequence
  chemically synthesized
aagcacaactcttcctggaa

SEQ ID NO: 58374 - DNA, 20 bp, Artificial Sequence
  chemically synthesized
gcacaactcttcctggaaaa

SEQ ID NO: 58375 - DNA, 20 bp, Artificial Sequence
  chemically synthesized
acaactcttcctggaaaaga

SEQ ID NO: 58376 - DNA, 20 bp, Artificial Sequence
  chemically synthesized
ctggaaaagagagttcaaat

SEQ ID NO: 58377 - DNA, 20 bp, Artificial Sequence
  chemically synthesized
aagagagttcaaatgagaaa

SEQ ID NO: 58378 - DNA, 20 bp, Artificial Sequence
  chemically synthesized
agttcaaatgagaaacagtg

SEQ ID NO: 58379 - DNA, 20 bp, Artificial Sequence
  chemically synthesized
gttcaaatgagaaacagtgc

SEQ ID NO: 58380 - DNA, 20 bp, Artificial Sequence
  chemically synthesized
ttcaaatgagaaacagtgcg

SEQ ID NO: 58381 - DNA, 20 bp, Artificial Sequence
  chemically synthesized
atgagaaacagtgcggggtg

SEQ ID NO: 58382 - DNA, 20 bp, Artificial Sequence
  chemically synthesized
aacagtgcggggtgaagaca

SEQ ID NO: 58383 - DNA, 20 bp, Artificial Sequence
  chemically synthesized
gcggggtgaagacatggata

SEQ ID NO: 58384 - DNA, 20 bp, Artificial Sequence
  chemically synthesized
cggggtgaagacatggatat

SEQ ID NO: 58385 - DNA, 20 bp, Artificial Sequence
  chemically synthesized
gatattttgatatatctatc

SEQ ID NO: 58386 - DNA, 20 bp, Artificial Sequence
  chemically synthesized
tatatctatcaagtgctttt

SEQ ID NO: 58387 - DNA, 20 bp, Artificial Sequence
  chemically synthesized
atctatcaagtgctttttag

SEQ ID NO: 58388 - DNA, 20 bp, Artificial Sequence
  chemically synthesized
tcaagtgctttttagtggat

SEQ ID NO: 58389 - DNA, 20 bp, Artificial Sequence
  chemically synthesized
caagtgctttttagtggatt

SEQ ID NO: 58390 - DNA, 20 bp, Artificial Sequence
  chemically synthesized
gctttttagtggattaggtt

SEQ ID NO: 58391 - DNA, 20 bp, Artificial Sequence
  chemically synthesized
ggattaggttcagaatgcat

SEQ ID NO: 58392 - DNA, 20 bp, Artificial Sequence
  chemically synthesized
ccaatgcctgttcaataatc

SEQ ID NO: 58393 - DNA, 20 bp, Artificial Sequence
  chemically synthesized
tgttcaataatccagttttc

SEQ ID NO: 58394 - DNA, 20 bp, Artificial Sequence
  chemically synthesized
aataatccagttttccagca

SEQ ID NO: 58395 - DNA, 20 bp, Artificial Sequence
  chemically synthesized
taatccagttttccagcata

SEQ ID NO: 58396 - DNA, 20 bp, Artificial Sequence
  chemically synthesized
agcatagagcatattaaatt

SEQ ID NO: 58397 - DNA, 20 bp, Artificial Sequence
  chemically synthesized
gcatagagcatattaaattg

SEQ ID NO: 58398 - DNA, 20 bp, Artificial Sequence
  chemically synthesized
tagagcatattaaattgagg

SEQ ID NO: 58399 - DNA, 20 bp, Artificial Sequence
  chemically synthesized
agagcatattaaattgagga

SEQ ID NO: 58400 - DNA, 20 bp, Artificial Sequence
  chemically synthesized
tattaaattgaggaaggaca

SEQ ID NO: 58401 - DNA, 20 bp, Artificial Sequence
  chemically synthesized
attgaggaaggacaaagtca

SEQ ID NO: 58402 - DNA, 20 bp, Artificial Sequence
  chemically synthesized
tgaggaaggacaaagtcaca

SEQ ID NO: 58403 - DNA, 20 bp, Artificial Sequence
  chemically synthesized
gaggaaggacaaagtcacag

SEQ ID NO: 58404 - DNA, 20 bp, Artificial Sequence
  chemically synthesized
gaaggacaaagtcacagagg

SEQ ID NO: 58405 - DNA, 20 bp, Artificial Sequence
  chemically synthesized
aaggacaaagtcacagaggt

SEQ ID NO: 58406 - DNA, 20 bp, Artificial Sequence
  chemically synthesized
aggacaaagtcacagaggtg

SEQ ID NO: 58407 - DNA, 20 bp, Artificial Sequence
  chemically synthesized
gacaaagtcacagaggtggg

SEQ ID NO: 58408 - DNA, 20 bp, Artificial Sequence
  chemically synthesized
aaagtcacagaggtggggag

SEQ ID NO: 58409 - DNA, 20 bp, Artificial Sequence
  chemically synthesized
aagtcacagaggtggggagc

SEQ ID NO: 58410 - DNA, 20 bp, Artificial Sequence
  chemically synthesized
tcacagaggtggggagcagg

SEQ ID NO: 58411 - DNA, 20 bp, Artificial Sequence
  chemically synthesized
ggtggggagcaggtggactg

SEQ ID NO: 58412 - DNA, 20 bp, Artificial Sequence
  chemically synthesized
ggagcaggtggactgtggcc

SEQ ID NO: 58413 - DNA, 20 bp, Artificial Sequence
  chemically synthesized
gagcaggtggactgtggcca

SEQ ID NO: 58414 - DNA, 20 bp, Artificial Sequence
  chemically synthesized
gccaaggactttgcatgaaa

SEQ ID NO: 58415 - DNA, 20 bp, Artificial Sequence
  chemically synthesized
aggactttgcatgaaacagt

SEQ ID NO: 58416 - DNA, 20 bp, Artificial Sequence
  chemically synthesized
tcctccttgccctgccctca

SEQ ID NO: 58417 - DNA, 20 bp, Artificial Sequence
  chemically synthesized
cctcatggtctgtgtactct

SEQ ID NO: 58418 - DNA, 20 bp, Artificial Sequence
  chemically synthesized
ctcatggtctgtgtactctc

SEQ ID NO: 58419 - DNA, 20 bp, Artificial Sequence
  chemically synthesized
catggtctgtgtactctcag

SEQ ID NO: 58420 - DNA, 20 bp, Artificial Sequence
  chemically synthesized
atggtctgtgtactctcagg

SEQ ID NO: 58421 - DNA, 20 bp, Artificial Sequence
  chemically synthesized
tctgtgtactctcaggaggt

SEQ ID NO: 58422 - DNA, 20 bp, Artificial Sequence
  chemically synthesized
ctgtgtactctcaggaggtc

SEQ ID NO: 58423 - DNA, 20 bp, Artificial Sequence
  chemically synthesized
gtactctcaggaggtcagga

SEQ ID NO: 58424 - DNA, 20 bp, Artificial Sequence
  chemically synthesized
tactctcaggaggtcaggac

SEQ ID NO: 58425 - DNA, 20 bp, Artificial Sequence
  chemically synthesized
aggtcaggacaggcctttct

SEQ ID NO: 58426 - DNA, 20 bp, Artificial Sequence
  chemically synthesized
ggacaggcctttctgagaat

SEQ ID NO: 58427 - DNA, 20 bp, Artificial Sequence
  chemically synthesized
ctgttcatctgcctttctac

SEQ ID NO: 58428 - DNA, 20 bp, Artificial Sequence
  chemically synthesized
ttctactggatacttgtcat

SEQ ID NO: 58429 - DNA, 20 bp, Artificial Sequence
  chemically synthesized
atacaaacacatgttctctg

SEQ ID NO: 58430 - DNA, 20 bp, Artificial Sequence
  chemically synthesized
ctctgcagtgtgtcatcttt

SEQ ID NO: 58431 - DNA, 20 bp, Artificial Sequence
  chemically synthesized
tcccctgaccctgtattccc

SEQ ID NO: 58432 - DNA, 20 bp, Artificial Sequence
  chemically synthesized
cctgaccctgtattccctag

SEQ ID NO: 58433 - DNA, 20 bp, Artificial Sequence
  chemically synthesized
cctagaagtctcgctgcttt

SEQ ID NO: 58434 - DNA, 20 bp, Artificial Sequence
  chemically synthesized
tagaagtctcgctgctttca

SEQ ID NO: 58435 - DNA, 20 bp, Artificial Sequence
  chemically synthesized
agtctcgctgctttcagagc

SEQ ID NO: 58436 - DNA, 20 bp, Artificial Sequence
  chemically synthesized
gtctcgctgctttcagagcc

SEQ ID NO: 58437 - DNA, 20 bp, Artificial Sequence
  chemically synthesized
tgccacccccactgctcttc

SEQ ID NO: 58438 - DNA, 20 bp, Artificial Sequence
  chemically synthesized
taacccactccatctgcatg

SEQ ID NO: 58439 - DNA, 20 bp, Artificial Sequence
  chemically synthesized
ggcccccaccacacccctca

SEQ ID NO: 58440 - DNA, 20 bp, Artificial Sequence
  chemically synthesized
ccccaccacacccctcaaag

SEQ ID NO: 58441 - DNA, 20 bp, Artificial Sequence
  chemically synthesized
ccacacccctcaaagtggtc

SEQ ID NO: 58442 - DNA, 20 bp, Artificial Sequence
  chemically synthesized
cacacccctcaaagtggtca

SEQ ID NO: 58443 - DNA, 20 bp, Artificial Sequence
  chemically synthesized
tgtcctgttgcttaattcca

SEQ ID NO: 58444 - DNA, 20 bp, Artificial Sequence
  chemically synthesized
cctgttgcttaattccatgg

SEQ ID NO: 58445 - DNA, 20 bp, Artificial Sequence
  chemically synthesized
tgcttaattccatggaagct

SEQ ID NO: 58446 - DNA, 20 bp, Artificial Sequence
  chemically synthesized
cttggctatcttcattttat

SEQ ID NO: 58447 - DNA, 20 bp, Artificial Sequence
  chemically synthesized
ttcattttattagcctcttt

SEQ ID NO: 58448 - DNA, 20 bp, Artificial Sequence
  chemically synthesized
aaaatcactacattttgtgc

SEQ ID NO: 58449 - DNA, 20 bp, Artificial Sequence
  chemically synthesized
aatcactacattttgtgcca

SEQ ID NO: 58450 - DNA, 20 bp, Artificial Sequence
  chemically synthesized
actacattttgtgccagaga

SEQ ID NO: 58451 - DNA, 20 bp, Artificial Sequence
  chemically synthesized
tacattttgtgccagagatg

SEQ ID NO: 58452 - DNA, 20 bp, Artificial Sequence
  chemically synthesized
ttttgtgccagagatggagc

SEQ ID NO: 58453 - DNA, 20 bp, Artificial Sequence
  chemically synthesized
agagatggagctggcatctc

SEQ ID NO: 58454 - DNA, 20 bp, Artificial Sequence
  chemically synthesized
gagatggagctggcatctcc

SEQ ID NO: 58455 - DNA, 20 bp, Artificial Sequence
  chemically synthesized
ggagctggcatctccaggct

SEQ ID NO: 58456 - DNA, 20 bp, Artificial Sequence
  chemically synthesized
gctggcatctccaggcttgg

SEQ ID NO: 58457 - DNA, 20 bp, Artificial Sequence
  chemically synthesized
tggcatctccaggcttggaa

SEQ ID NO: 58458 - DNA, 20 bp, Artificial Sequence
  chemically synthesized
ggcatctccaggcttggaag

SEQ ID NO: 58459 - DNA, 20 bp, Artificial Sequence
  chemically synthesized
gcatctccaggcttggaaga

SEQ ID NO: 58460 - DNA, 20 bp, Artificial Sequence
  chemically synthesized
ggcttggaagagggctgctg

SEQ ID NO: 58461 - DNA, 20 bp, Artificial Sequence
  chemically synthesized
ggaagagggctgctgaagct

SEQ ID NO: 58462 - DNA, 20 bp, Artificial Sequence
  chemically synthesized
gagggctgctgaagctcagc

SEQ ID NO: 58463 - DNA, 20 bp, Artificial Sequence
  chemically synthesized
agggctgctgaagctcagcc

SEQ ID NO: 58464 - DNA, 20 bp, Artificial Sequence
  chemically synthesized
gaagctcagccaggtgtcct

SEQ ID NO: 58465 - DNA, 20 bp, Artificial Sequence
  chemically synthesized
aagctcagccaggtgtccta

SEQ ID NO: 58466 - DNA, 20 bp, Artificial Sequence
  chemically synthesized
gctcagccaggtgtcctaag

SEQ ID NO: 58467 - DNA, 20 bp, Artificial Sequence
  chemically synthesized
ccaggtgtcctaaggagcct

SEQ ID NO: 58468 - DNA, 20 bp, Artificial Sequence
  chemically synthesized
caggtgtcctaaggagcctc

SEQ ID NO: 58469 - DNA, 20 bp, Artificial Sequence
  chemically synthesized
tgtcctaaggagcctcagga

SEQ ID NO: 58470 - DNA, 20 bp, Artificial Sequence
  chemically synthesized
gtcctaaggagcctcaggac

SEQ ID NO: 58471 - DNA, 20 bp, Artificial Sequence
  chemically synthesized
tcctaaggagcctcaggaca

SEQ ID NO: 58472 - DNA, 20 bp, Artificial Sequence
  chemically synthesized
cctaaggagcctcaggacag

SEQ ID NO: 58473 - DNA, 20 bp, Artificial Sequence
  chemically synthesized
gcctcaggacaggggatgct

SEQ ID NO: 58474 - DNA, 20 bp, Artificial Sequence
  chemically synthesized
tcaggacaggggatgctcag

SEQ ID NO: 58475 - DNA, 20 bp, Artificial Sequence
  chemically synthesized
gatgctcagtagccttgcaa

SEQ ID NO: 58476 - DNA, 20 bp, Artificial Sequence
  chemically synthesized
atgctcagtagccttgcaat

SEQ ID NO: 58477 - DNA, 20 bp, Artificial Sequence
  chemically synthesized
gtagccttgcaatgggaaca

SEQ ID NO: 58478 - DNA, 20 bp, Artificial Sequence
  chemically synthesized
cttgcaatgggaacacagct

SEQ ID NO: 58479 - DNA, 20 bp, Artificial Sequence
  chemically synthesized
gaacacagctgagccccact

SEQ ID NO: 58480 - DNA, 20 bp, Artificial Sequence
  chemically synthesized
tggccaccctttgccacaac

SEQ ID NO: 58481 - DNA, 20 bp, Artificial Sequence
  chemically synthesized
ggccaccctttgccacaacc

SEQ ID NO: 58482 - DNA, 20 bp, Artificial Sequence
  chemically synthesized
caccctttgccacaaccagg

SEQ ID NO: 58483 - DNA, 20 bp, Artificial Sequence
  chemically synthesized
ctttgccacaaccaggcaga

SEQ ID NO: 58484 - DNA, 20 bp, Artificial Sequence
  chemically synthesized
tgccacaaccaggcagaaag

SEQ ID NO: 58485 - DNA, 20 bp, Artificial Sequence
  chemically synthesized
ggcagaaagcagcttttgaa

SEQ ID NO: 58486 - DNA, 20 bp, Artificial Sequence
  chemically synthesized
tttgaacagatttgttgcct

SEQ ID NO: 58487 - DNA, 20 bp, Artificial Sequence
  chemically synthesized
ttgcctcagatttgatctca

SEQ ID NO: 58488 - DNA, 20 bp, Artificial Sequence
  chemically synthesized
ttgatctcaaagaaaaatcg

SEQ ID NO: 58489 - DNA, 20 bp, Artificial Sequence
  chemically synthesized
tgatctcaaagaaaaatcgt

SEQ ID NO: 58490 - DNA, 20 bp, Artificial Sequence
  chemically synthesized
tctcaaagaaaaatcgtggg

SEQ ID NO: 58491 - DNA, 20 bp, Artificial Sequence
  chemically synthesized
agaaaaatcgtgggcagtat

SEQ ID NO: 58492 - DNA, 20 bp, Artificial Sequence
  chemically synthesized
atcgtgggcagtattggtcc

SEQ ID NO: 58493 - DNA, 20 bp, Artificial Sequence
  chemically synthesized
tcgtgggcagtattggtccc

SEQ ID NO: 58494 - DNA, 20 bp, Artificial Sequence
  chemically synthesized
ttacaatttcctctgaaatc

SEQ ID NO: 58495 - DNA, 20 bp, Artificial Sequence
  chemically synthesized
ctggatgcctatcaacacct

SEQ ID NO: 58496 - DNA, 20 bp, Artificial Sequence
  chemically synthesized
actgaattctccccaactaa

SEQ ID NO: 58497 - DNA, 20 bp, Artificial Sequence
  chemically synthesized
gaattctccccaactaatag

SEQ ID NO: 58498 - DNA, 20 bp, Artificial Sequence
  chemically synthesized
ctaatagtggtgtgtcactg

SEQ ID NO: 58499 - DNA, 20 bp, Artificial Sequence
  chemically synthesized
tagtggtgtgtcactgtagt

SEQ ID NO: 58500 - DNA, 20 bp, Artificial Sequence
  chemically synthesized
gtgtgtcactgtagtaagcc

SEQ ID NO: 58501 - DNA, 20 bp, Artificial Sequence
  chemically synthesized
tagtaagcctagtacaaaaa

SEQ ID NO: 58502 - DNA, 20 bp, Artificial Sequence
  chemically synthesized
tacaaaaatggccttctttg

SEQ ID NO: 58503 - DNA, 20 bp, Artificial Sequence
  chemically synthesized
caaaaatggccttctttgtg

SEQ ID NO: 58504 - DNA, 20 bp, Artificial Sequence
  chemically synthesized
aaaaatggccttctttgtgg

SEQ ID NO: 58505 - DNA, 20 bp, Artificial Sequence
  chemically synthesized
aaatggccttctttgtggag

SEQ ID NO: 58506 - DNA, 20 bp, Artificial Sequence
  chemically synthesized
tttttgcttaatttttgccc

SEQ ID NO: 58507 - DNA, 20 bp, Artificial Sequence
  chemically synthesized
gcttaatttttgcccaagat

SEQ ID NO: 58508 - DNA, 20 bp, Artificial Sequence
  chemically synthesized
cccaagatgagaacataatt

SEQ ID NO: 58509 - DNA, 20 bp, Artificial Sequence
  chemically synthesized
caccaacatttttgtaacta

SEQ ID NO: 58510 - DNA, 20 bp, Artificial Sequence
  chemically synthesized
accaacatttttgtaactaa

SEQ ID NO: 58511 - DNA, 20 bp, Artificial Sequence
  chemically synthesized
caacatttttgtaactaaag

SEQ ID NO: 58512 - DNA, 20 bp, Artificial Sequence
  chemically synthesized
aacatttttgtaactaaagg

SEQ ID NO: 58513 - DNA, 20 bp, Artificial Sequence
  chemically synthesized
acatttttgtaactaaagga

SEQ ID NO: 58514 - DNA, 20 bp, Artificial Sequence
  chemically synthesized
taactaaaggagggaccatt

SEQ ID NO: 58515 - DNA, 20 bp, Artificial Sequence
  chemically synthesized
ctaaaggagggaccattcag

SEQ ID NO: 58516 - DNA, 20 bp, Artificial Sequence
  chemically synthesized
aagatgcttatcaactgtca

SEQ ID NO: 58517 - DNA, 20 bp, Artificial Sequence
  chemically synthesized
cttatcaactgtcaaagtga

SEQ ID NO: 58518 - DNA, 20 bp, Artificial Sequence
  chemically synthesized
acaaccaatgcacatattgt

SEQ ID NO: 58519 - DNA, 20 bp, Artificial Sequence
  chemically synthesized
tattgtaagaaatcaaacaa

SEQ ID NO: 58520 - DNA, 20 bp, Artificial Sequence
  chemically synthesized
gaaatcaaacaatggcctcc

SEQ ID NO: 58521 - DNA, 20 bp, Artificial Sequence
  chemically synthesized
aaatcaaacaatggcctcca

SEQ ID NO: 58522 - DNA, 20 bp, Artificial Sequence
  chemically synthesized
ctccaaggttcatttctaca

SEQ ID NO: 58523 - DNA, 20 bp, Artificial Sequence
  chemically synthesized
tccaaggttcatttctacac

SEQ ID NO: 58524 - DNA, 20 bp, Artificial Sequence
  chemically synthesized
ccaaggttcatttctacaca

SEQ ID NO: 58525 - DNA, 20 bp, Artificial Sequence
  chemically synthesized
gttcatttctacacagggat

SEQ ID NO: 58526 - DNA, 20 bp, Artificial Sequence
  chemically synthesized
catttctacacagggattag

SEQ ID NO: 58527 - DNA, 20 bp, Artificial Sequence
  chemically synthesized
tagcagatcaacatcaatct

SEQ ID NO: 58528 - DNA, 20 bp, Artificial Sequence
  chemically synthesized
caacatcaatcttggcaaca

SEQ ID NO: 58529 - DNA, 20 bp, Artificial Sequence
  chemically synthesized
ggcaacacagttgccactga

SEQ ID NO: 58530 - DNA, 20 bp, Artificial Sequence
  chemically synthesized
ttattttttttatcatgaca

SEQ ID NO: 58531 - DNA, 20 bp, Artificial Sequence
  chemically synthesized
tttatcatgacatggcaatc

SEQ ID NO: 58532 - DNA, 20 bp, Artificial Sequence
  chemically synthesized
tatcatgacatggcaatcaa

SEQ ID NO: 58533 - DNA, 20 bp, Artificial Sequence
  chemically synthesized
aacatgatttattcttattt

SEQ ID NO: 58534 - DNA, 20 bp, Artificial Sequence
  chemically synthesized
tattcttatttaagatttta

SEQ ID NO: 58535 - DNA, 20 bp, Artificial Sequence
  chemically synthesized
cttatttaagattttatggt

SEQ ID NO: 58536 - DNA, 20 bp, Artificial Sequence
  chemically synthesized
ttaagattttatggttagac

SEQ ID NO: 58537 - DNA, 20 bp, Artificial Sequence
  chemically synthesized
taagattttatggttagact

SEQ ID NO: 58538 - DNA, 20 bp, Artificial Sequence
  chemically synthesized
gattttatggttagactagg

SEQ ID NO: 58539 - DNA, 20 bp, Artificial Sequence
  chemically synthesized
ttatggttagactaggcaga

SEQ ID NO: 58540 - DNA, 20 bp, Artificial Sequence
  chemically synthesized
ggttagactaggcagatagc

SEQ ID NO: 58541 - DNA, 20 bp, Artificial Sequence
  chemically synthesized
ctaggcagatagctagatat

SEQ ID NO: 58542 - DNA, 20 bp, Artificial Sequence
  chemically synthesized
ggcagatagctagatatgag

SEQ ID NO: 58543 - DNA, 20 bp, Artificial Sequence
  chemically synthesized
gcagatagctagatatgagc

SEQ ID NO: 58544 - DNA, 20 bp, Artificial Sequence
  chemically synthesized
agatagctagatatgagcag

SEQ ID NO: 58545 - DNA, 20 bp, Artificial Sequence
  chemically synthesized
gatagctagatatgagcagg

SEQ ID NO: 58546 - DNA, 20 bp, Artificial Sequence
  chemically synthesized
agctagatatgagcaggagg

SEQ ID NO: 58547 - DNA, 20 bp, Artificial Sequence
  chemically synthesized
tagatatgagcaggaggtgg

SEQ ID NO: 58548 - DNA, 20 bp, Artificial Sequence
  chemically synthesized
agcaggaggtggaagcccct

SEQ ID NO: 58549 - DNA, 20 bp, Artificial Sequence
  chemically synthesized
caggaggtggaagcccctga

SEQ ID NO: 58550 - DNA, 20 bp, Artificial Sequence
  chemically synthesized
ggtggaagcccctgagagaa

SEQ ID NO: 58551 - DNA, 20 bp, Artificial Sequence
  chemically synthesized
tggaagcccctgagagaatg

SEQ ID NO: 58552 - DNA, 20 bp, Artificial Sequence
  chemically synthesized
ggaagcccctgagagaatgg

SEQ ID NO: 58553 - DNA, 20 bp, Artificial Sequence
  chemically synthesized
cccctgagagaatggaggtc

SEQ ID NO: 58554 - DNA, 20 bp, Artificial Sequence
  chemically synthesized
cctgagagaatggaggtctg

SEQ ID NO: 58555 - DNA, 20 bp, Artificial Sequence
  chemically synthesized
gtctggagaatctgaaaccc

SEQ ID NO: 58556 - DNA, 20 bp, Artificial Sequence
  chemically synthesized
ctggagaatctgaaacccca

SEQ ID NO: 58557 - DNA, 20 bp, Artificial Sequence
  chemically synthesized
tgaaaccccagagattaccc

SEQ ID NO: 58558 - DNA, 20 bp, Artificial Sequence
  chemically synthesized
attacccaagtcctgcatgc

SEQ ID NO: 58559 - DNA, 20 bp, Artificial Sequence
  chemically synthesized
aagtcctgcatgctagacat

SEQ ID NO: 58560 - DNA, 20 bp, Artificial Sequence
  chemically synthesized
tcctgcatgctagacatgag

SEQ ID NO: 58561 - DNA, 20 bp, Artificial Sequence
  chemically synthesized
ctgcatgctagacatgagtg

SEQ ID NO: 58562 - DNA, 20 bp, Artificial Sequence
  chemically synthesized
tgcatgctagacatgagtgg

SEQ ID NO: 58563 - DNA, 20 bp, Artificial Sequence
  chemically synthesized
catgctagacatgagtggag

SEQ ID NO: 58564 - DNA, 20 bp, Artificial Sequence
  chemically synthesized
atgctagacatgagtggagg

SEQ ID NO: 58565 - DNA, 20 bp, Artificial Sequence
  chemically synthesized
tgctagacatgagtggagga

SEQ ID NO: 58566 - DNA, 20 bp, Artificial Sequence
  chemically synthesized
gctagacatgagtggaggag

SEQ ID NO: 58567 - DNA, 20 bp, Artificial Sequence
  chemically synthesized
ctagacatgagtggaggagg

SEQ ID NO: 58568 - DNA, 20 bp, Artificial Sequence
  chemically synthesized
agtggaggagggggaatacc

SEQ ID NO: 58569 - DNA, 20 bp, Artificial Sequence
  chemically synthesized
gtggaggagggggaatacct

SEQ ID NO: 58570 - DNA, 20 bp, Artificial Sequence
  chemically synthesized
gaggagggggaatacctagg

SEQ ID NO: 58571 - DNA, 20 bp, Artificial Sequence
  chemically synthesized
gggggaatacctaggtagaa

SEQ ID NO: 58572 - DNA, 20 bp, Artificial Sequence
  chemically synthesized
ggtagaaaagaatgcccctt

SEQ ID NO: 58573 - DNA, 20 bp, Artificial Sequence
  chemically synthesized
agaatgccccttaagatgcc

SEQ ID NO: 58574 - DNA, 20 bp, Artificial Sequence
  chemically synthesized
atgccccttaagatgcccag

SEQ ID NO: 58575 - DNA, 20 bp, Artificial Sequence
  chemically synthesized
cccagcagtcgctcactgtg

SEQ ID NO: 58576 - DNA, 20 bp, Artificial Sequence
  chemically synthesized
tcactgtgcagttaactttt

SEQ ID NO: 58577 - DNA, 20 bp, Artificial Sequence
  chemically synthesized
ttaacttttcagaatgctgc

SEQ ID NO: 58578 - DNA, 20 bp, Artificial Sequence
  chemically synthesized
tgctgctagatacatgctga

SEQ ID NO: 58579 - DNA, 20 bp, Artificial Sequence
  chemically synthesized
gctgctagatacatgctgat

SEQ ID NO: 58580 - DNA, 20 bp, Artificial Sequence
  chemically synthesized
ctgctagatacatgctgata

SEQ ID NO: 58581 - DNA, 20 bp, Artificial Sequence
  chemically synthesized
gctagatacatgctgatagg

SEQ ID NO: 58582 - DNA, 20 bp, Artificial Sequence
  chemically synthesized
ctagatacatgctgataggg

SEQ ID NO: 58583 - DNA, 20 bp, Artificial Sequence
  chemically synthesized
tagatacatgctgataggga

SEQ ID NO: 58584 - DNA, 20 bp, Artificial Sequence
  chemically synthesized
atacatgctgatagggaggg

SEQ ID NO: 58585 - DNA, 20 bp, Artificial Sequence
  chemically synthesized
acatgctgatagggagggaa

SEQ ID NO: 58586 - DNA, 20 bp, Artificial Sequence
  chemically synthesized
catgctgatagggagggaag

SEQ ID NO: 58587 - DNA, 20 bp, Artificial Sequence
  chemically synthesized
atgctgatagggagggaaga

SEQ ID NO: 58588 - DNA, 20 bp, Artificial Sequence
  chemically synthesized
gatagggagggaagagggca

SEQ ID NO: 58589 - DNA, 20 bp, Artificial Sequence
  chemically synthesized
atagggagggaagagggcaa

SEQ ID NO: 58590 - DNA, 20 bp, Artificial Sequence
  chemically synthesized
agggagggaagagggcaaag

SEQ ID NO: 58591 - DNA, 20 bp, Artificial Sequence
  chemically synthesized
agggcaaaggagaaattcct

SEQ ID NO: 58592 - DNA, 20 bp, Artificial Sequence
  chemically synthesized
ggcaaaggagaaattcctaa

SEQ ID NO: 58593 - DNA, 20 bp, Artificial Sequence
  chemically synthesized
agaaattcctaagagataca

SEQ ID NO: 58594 - DNA, 20 bp, Artificial Sequence
  chemically synthesized
tcctaagagatacacggttg

SEQ ID NO: 58595 - DNA, 20 bp, Artificial Sequence
  chemically synthesized
aagagatacacggttgcagt

SEQ ID NO: 58596 - DNA, 20 bp, Artificial Sequence
  chemically synthesized
gttgcagttagtatacatct

SEQ ID NO: 58597 - DNA, 20 bp, Artificial Sequence
  chemically synthesized
gagtgctatacaaccttctt

SEQ ID NO: 58598 - DNA, 20 bp, Artificial Sequence
  chemically synthesized
agtgctatacaaccttcttt

SEQ ID NO: 58599 - DNA, 20 bp, Artificial Sequence
  chemically synthesized
gctatacaaccttctttggg

SEQ ID NO: 58600 - DNA, 20 bp, Artificial Sequence
  chemically synthesized
atacaaccttctttgggtgg

SEQ ID NO: 58601 - DNA, 20 bp, Artificial Sequence
  chemically synthesized
aaccttctttgggtggtggc

SEQ ID NO: 58602 - DNA, 20 bp, Artificial Sequence
  chemically synthesized
cttctttgggtggtggcaag

SEQ ID NO: 58603 - DNA, 20 bp, Artificial Sequence
  chemically synthesized
ggtggtggcaagaagcaatg

SEQ ID NO: 58604 - DNA, 20 bp, Artificial Sequence
  chemically synthesized
gaagcaatgcagccattacg

SEQ ID NO: 58605 - DNA, 20 bp, Artificial Sequence
  chemically synthesized
catatcaaacacctgtatca

SEQ ID NO: 58606 - DNA, 20 bp, Artificial Sequence
  chemically synthesized
atatcaaacacctgtatcac

SEQ ID NO: 58607 - DNA, 20 bp, Artificial Sequence
  chemically synthesized
cacctgtatcacaggtgtta

SEQ ID NO: 58608 - DNA, 20 bp, Artificial Sequence
  chemically synthesized
atcacaggtgttaaagaaac

SEQ ID NO: 58609 - DNA, 20 bp, Artificial Sequence
  chemically synthesized
atgatttgcaatattgtctt

SEQ ID NO: 58610 - DNA, 20 bp, Artificial Sequence
  chemically synthesized
ctataaatatgatttttaaa

SEQ ID NO: 58611 - DNA, 20 bp, Artificial Sequence
  chemically synthesized
atttttaaaaagtatttctt

SEQ ID NO: 58612 - DNA, 20 bp, Artificial Sequence
  chemically synthesized
tttttaaaaagtatttcttt

SEQ ID NO: 58613 - DNA, 20 bp, Artificial Sequence
  chemically synthesized
taaaaagtatttctttaggt

SEQ ID NO: 58614 - DNA, 20 bp, Artificial Sequence
  chemically synthesized
tacgcattgacttatcttcc

SEQ ID NO: 58615 - DNA, 20 bp, Artificial Sequence
  chemically synthesized
acgcattgacttatcttcct

SEQ ID NO: 58616 - DNA, 20 bp, Artificial Sequence
  chemically synthesized
cttatcttcctgggtttcat

SEQ ID NO: 58617 - DNA, 20 bp, Artificial Sequence
  chemically synthesized
actgtttatctcaaactctt

SEQ ID NO: 58618 - DNA, 20 bp, Artificial Sequence
  chemically synthesized
atctcaaactcttgagatta

SEQ ID NO: 58619 - DNA, 20 bp, Artificial Sequence
  chemically synthesized
aaactcttgagattaaagta

SEQ ID NO: 58620 - DNA, 20 bp, Artificial Sequence
  chemically synthesized
aactcttgagattaaagtat

SEQ ID NO: 58621 - DNA, 20 bp, Artificial Sequence
  chemically synthesized
ttgagattaaagtatgggct

SEQ ID NO: 58622 - DNA, 20 bp, Artificial Sequence
  chemically synthesized
tgagattaaagtatgggctc

SEQ ID NO: 58623 - DNA, 20 bp, Artificial Sequence
  chemically synthesized
agattaaagtatgggctcag

SEQ ID NO: 58624 - DNA, 20 bp, Artificial Sequence
  chemically synthesized
gattaaagtatgggctcagg

SEQ ID NO: 58625 - DNA, 20 bp, Artificial Sequence
  chemically synthesized
attaaagtatgggctcagga

SEQ ID NO: 58626 - DNA, 20 bp, Artificial Sequence
  chemically synthesized
taaagtatgggctcaggagg

SEQ ID NO: 58627 - DNA, 20 bp, Artificial Sequence
  chemically synthesized
gtatgggctcaggagggagc

SEQ ID NO: 58628 - DNA, 20 bp, Artificial Sequence
  chemically synthesized
tatgggctcaggagggagcg

SEQ ID NO: 58629 - DNA, 20 bp, Artificial Sequence
  chemically synthesized
tgggctcaggagggagcgag

SEQ ID NO: 58630 - DNA, 20 bp, Artificial Sequence
  chemically synthesized
caggagggagcgaggagctt

SEQ ID NO: 58631 - DNA, 20 bp, Artificial Sequence
  chemically synthesized
aggagggagcgaggagcttc

SEQ ID NO: 58632 - DNA, 20 bp, Artificial Sequence
  chemically synthesized
gaggagcttcaggactctca

SEQ ID NO: 58633 - DNA, 20 bp, Artificial Sequence
  chemically synthesized
tcaggactctcacggacctc

SEQ ID NO: 58634 - DNA, 20 bp, Artificial Sequence
  chemically synthesized
actctcacggacctccagca

SEQ ID NO: 58635 - DNA, 20 bp, Artificial Sequence
  chemically synthesized
cacggacctccagcacagtg

SEQ ID NO: 58636 - DNA, 20 bp, Artificial Sequence
  chemically synthesized
agcacagtgtagctgcctta

SEQ ID NO: 58637 - DNA, 20 bp, Artificial Sequence
  chemically synthesized
agtgtagctgccttatggaa

SEQ ID NO: 58638 - DNA, 20 bp, Artificial Sequence
  chemically synthesized
gtagctgccttatggaaaag

SEQ ID NO: 58639 - DNA, 20 bp, Artificial Sequence
  chemically synthesized
ggccacactgttttctgcac

SEQ ID NO: 58640 - DNA, 20 bp, Artificial Sequence
  chemically synthesized
ctgcccctactattcctcac

SEQ ID NO: 58641 - DNA, 20 bp, Artificial Sequence
  chemically synthesized
tgcccctactattcctcact

SEQ ID NO: 58642 - DNA, 20 bp, Artificial Sequence
  chemically synthesized
ccctactattcctcactggg

SEQ ID NO: 58643 - DNA, 20 bp, Artificial Sequence
  chemically synthesized
ctactattcctcactgggca

SEQ ID NO: 58644 - DNA, 20 bp, Artificial Sequence
  chemically synthesized
attcctcactgggcagagca

SEQ ID NO: 58645 - DNA, 20 bp, Artificial Sequence
  chemically synthesized
tgggcagagcacagccaccc

SEQ ID NO: 58646 - DNA, 20 bp, Artificial Sequence
  chemically synthesized
ctggccctgcctgaacattt

SEQ ID NO: 58647 - DNA, 20 bp, Artificial Sequence
  chemically synthesized
ccctgcctgaacattttagt

SEQ ID NO: 58648 - DNA, 20 bp, Artificial Sequence
  chemically synthesized
ctgaacattttagtcagtgt

SEQ ID NO: 58649 - DNA, 20 bp, Artificial Sequence
  chemically synthesized
gtgttggctctgtgcttctc

SEQ ID NO: 58650 - DNA, 20 bp, Artificial Sequence
  chemically synthesized
tgttggctctgtgcttctct

SEQ ID NO: 58651 - DNA, 20 bp, Artificial Sequence
  chemically synthesized
gttggctctgtgcttctctg

SEQ ID NO: 58652 - DNA, 20 bp, Artificial Sequence
  chemically synthesized
tggctctgtgcttctctggg

SEQ ID NO: 58653 - DNA, 20 bp, Artificial Sequence
  chemically synthesized
ggctctgtgcttctctgggg

SEQ ID NO: 58654 - DNA, 20 bp, Artificial Sequence
  chemically synthesized
cttctctggggaggaaatcc

SEQ ID NO: 58655 - DNA, 20 bp, Artificial Sequence
  chemically synthesized
tctctggggaggaaatccaa

SEQ ID NO: 58656 - DNA, 20 bp, Artificial Sequence
  chemically synthesized
gaaatccaagagacaaccca

SEQ ID NO: 58657 - DNA, 20 bp, Artificial Sequence
  chemically synthesized
ccacagcccctctgccattt

SEQ ID NO: 58658 - DNA, 20 bp, Artificial Sequence
  chemically synthesized
cccctctgccatttcagctg

SEQ ID NO: 58659 - DNA, 20 bp, Artificial Sequence
  chemically synthesized
ctctgccatttcagctgcag

SEQ ID NO: 58660 - DNA, 20 bp, Artificial Sequence
  chemically synthesized
agtaccaccgttaatgccct

SEQ ID NO: 58661 - DNA, 20 bp, Artificial Sequence
  chemically synthesized
gtaccaccgttaatgccctt

SEQ ID NO: 58662 - DNA, 20 bp, Artificial Sequence
  chemically synthesized
ccgttaatgcccttgggctt

SEQ ID NO: 58663 - DNA, 20 bp, Artificial Sequence
  chemically synthesized
taatgcccttgggcttgaga

SEQ ID NO: 58664 - DNA, 20 bp, Artificial Sequence
  chemically synthesized
tgcccttgggcttgagaaag

SEQ ID NO: 58665 - DNA, 20 bp, Artificial Sequence
  chemically synthesized
gcccttgggcttgagaaaga

SEQ ID NO: 58666 - DNA, 20 bp, Artificial Sequence
  chemically synthesized
cccttgggcttgagaaagaa

SEQ ID NO: 58667 - DNA, 20 bp, Artificial Sequence
  chemically synthesized
ggcttgagaaagaagggacc

SEQ ID NO: 58668 - DNA, 20 bp, Artificial Sequence
  chemically synthesized
ggccacttccctgacacctc

SEQ ID NO: 58669 - DNA, 20 bp, Artificial Sequence
  chemically synthesized
tccctgacacctccagcaca

SEQ ID NO: 58670 - DNA, 20 bp, Artificial Sequence
  chemically synthesized
ctgacacctccagcacacag

SEQ ID NO: 58671 - DNA, 20 bp, Artificial Sequence
  chemically synthesized
tgacacctccagcacacagc

SEQ ID NO: 58672 - DNA, 20 bp, Artificial Sequence
  chemically synthesized
gacacctccagcacacagca

SEQ ID NO: 58673 - DNA, 20 bp, Artificial Sequence
  chemically synthesized
cctccagcacacagcaggga

SEQ ID NO: 58674 - DNA, 20 bp, Artificial Sequence
  chemically synthesized
acacagcagggaaagaattc

SEQ ID NO: 58675 - DNA, 20 bp, Artificial Sequence
  chemically synthesized
ttccagtttctctttcttgt

SEQ ID NO: 58676 - DNA, 20 bp, Artificial Sequence
  chemically synthesized
tttcacctgctactcttcac

SEQ ID NO: 58677 - DNA, 20 bp, Artificial Sequence
  chemically synthesized
ttcacctgctactcttcacc

SEQ ID NO: 58678 - DNA, 20 bp, Artificial Sequence
  chemically synthesized
cctgctactcttcaccaggc

SEQ ID NO: 58679 - DNA, 20 bp, Artificial Sequence
  chemically synthesized
ctgctactcttcaccaggca

SEQ ID NO: 58680 - DNA, 20 bp, Artificial Sequence
  chemically synthesized
tcttcaccaggcaaggctcc

SEQ ID NO: 58681 - DNA, 20 bp, Artificial Sequence
  chemically synthesized
accaggcaaggctcctggct

SEQ ID NO: 58682 - DNA, 20 bp, Artificial Sequence
  chemically synthesized
ccaggcaaggctcctggctt

SEQ ID NO: 58683 - DNA, 20 bp, Artificial Sequence
  chemically synthesized
aggctcctggcttgggccca

SEQ ID NO: 58684 - DNA, 20 bp, Artificial Sequence
  chemically synthesized
cctggcttgggcccacagtg

SEQ ID NO: 58685 - DNA, 20 bp, Artificial Sequence
  chemically synthesized
ctggcttgggcccacagtgc

SEQ ID NO: 58686 - DNA, 20 bp, Artificial Sequence
  chemically synthesized
cagtgcaggcacctcgaact

SEQ ID NO: 58687 - DNA, 20 bp, Artificial Sequence
  chemically synthesized
actcagttgaacatttccac

SEQ ID NO: 58688 - DNA, 20 bp, Artificial Sequence
  chemically synthesized
ggctgcactctgtgtttttg

SEQ ID NO: 58689 - DNA, 20 bp, Artificial Sequence
  chemically synthesized
gctgcactctgtgtttttgt

SEQ ID NO: 58690 - DNA, 20 bp, Artificial Sequence
  chemically synthesized
ctgcactctgtgtttttgtg

SEQ ID NO: 58691 - DNA, 20 bp, Artificial Sequence
  chemically synthesized
ctctgtgtttttgtggggtg

SEQ ID NO: 58692 - DNA, 20 bp, Artificial Sequence
  chemically synthesized
tttttgtggggtgaagctcc

SEQ ID NO: 58693 - DNA, 20 bp, Artificial Sequence
  chemically synthesized
tttgtggggtgaagctccca

SEQ ID NO: 58694 - DNA, 20 bp, Artificial Sequence
  chemically synthesized
ttgtggggtgaagctcccag

SEQ ID NO: 58695 - DNA, 20 bp, Artificial Sequence
  chemically synthesized
aagctcccagaggtgactga

SEQ ID NO: 58696 - DNA, 20 bp, Artificial Sequence
  chemically synthesized
tccttctgccactaacactg

SEQ ID NO: 58697 - DNA, 20 bp, Artificial Sequence
  chemically synthesized
catactgcccttgctgtact

SEQ ID NO: 58698 - DNA, 20 bp, Artificial Sequence
  chemically synthesized
tgcccttgctgtacttggac

SEQ ID NO: 58699 - DNA, 20 bp, Artificial Sequence
  chemically synthesized
gcccttgctgtacttggact

SEQ ID NO: 58700 - DNA, 20 bp, Artificial Sequence
  chemically synthesized
cccttgctgtacttggacta

SEQ ID NO: 58701 - DNA, 20 bp, Artificial Sequence
  chemically synthesized
ttgctgtacttggactaggg

SEQ ID NO: 58702 - DNA, 20 bp, Artificial Sequence
  chemically synthesized
tgctgtacttggactaggga

SEQ ID NO: 58703 - DNA, 20 bp, Artificial Sequence
  chemically synthesized
cttggactagggaaggaaaa

SEQ ID NO: 58704 - DNA, 20 bp, Artificial Sequence
  chemically synthesized
agggaaggaaaaaagatcct

SEQ ID NO: 58705 - DNA, 20 bp, Artificial Sequence
  chemically synthesized
tgagtgctttactcacaccc

SEQ ID NO: 58706 - DNA, 20 bp, Artificial Sequence
  chemically synthesized
actcacaccccagtgtgccc

SEQ ID NO: 58707 - DNA, 20 bp, Artificial Sequence
  chemically synthesized
agtgtgccccagccacccta

SEQ ID NO: 58708 - DNA, 20 bp, Artificial Sequence
  chemically synthesized
gccccagccaccctatggaa

SEQ ID NO: 58709 - DNA, 20 bp, Artificial Sequence
  chemically synthesized
cccagccaccctatggaaaa

SEQ ID NO: 58710 - DNA, 20 bp, Artificial Sequence
  chemically synthesized
ccagccaccctatggaaaag

SEQ ID NO: 58711 - DNA, 20 bp, Artificial Sequence
  chemically synthesized
ccaccctatggaaaagaggc

SEQ ID NO: 58712 - DNA, 20 bp, Artificial Sequence
  chemically synthesized
ggccagtgtgtcatccctgc

SEQ ID NO: 58713 - DNA, 20 bp, Artificial Sequence
  chemically synthesized
gtcatccctgcaagcaccct

SEQ ID NO: 58714 - DNA, 20 bp, Artificial Sequence
  chemically synthesized
tcatccctgcaagcaccctg

SEQ ID NO: 58715 - DNA, 20 bp, Artificial Sequence
  chemically synthesized
cccctgcccctgctgccccc

SEQ ID NO: 58716 - DNA, 20 bp, Artificial Sequence
  chemically synthesized
cccctgctgcccccaagctg

SEQ ID NO: 58717 - DNA, 20 bp, Artificial Sequence
  chemically synthesized
cctgctgcccccaagctgta

SEQ ID NO: 58718 - DNA, 20 bp, Artificial Sequence
  chemically synthesized
ctgcccccaagctgtagagc

SEQ ID NO: 58719 - DNA, 20 bp, Artificial Sequence
  chemically synthesized
agctgtagagccagaatata

SEQ ID NO: 58720 - DNA, 20 bp, Artificial Sequence
  chemically synthesized
gtagagccagaatataaagc

SEQ ID NO: 58721 - DNA, 20 bp, Artificial Sequence
  chemically synthesized
gagccagaatataaagctgg

SEQ ID NO: 58722 - DNA, 20 bp, Artificial Sequence
  chemically synthesized
agctggcagaaaaatgtaaa

SEQ ID NO: 58723 - DNA, 20 bp, Artificial Sequence
  chemically synthesized
gctggcagaaaaatgtaaaa

SEQ ID NO: 58724 - DNA, 20 bp, Artificial Sequence
  chemically synthesized
gcagaaaaatgtaaaaaggc

SEQ ID NO: 58725 - DNA, 20 bp, Artificial Sequence
  chemically synthesized
aaaatgtaaaaaggctagac

SEQ ID NO: 58726 - DNA, 20 bp, Artificial Sequence
  chemically synthesized
gtaaaaaggctagactggct

SEQ ID NO: 58727 - DNA, 20 bp, Artificial Sequence
  chemically synthesized
gctagactggcttagcctcc

SEQ ID NO: 58728 - DNA, 20 bp, Artificial Sequence
  chemically synthesized
cctacatctttctcctgtgc

SEQ ID NO: 58729 - DNA, 20 bp, Artificial Sequence
  chemically synthesized
tccttcctgctcttgaacat

SEQ ID NO: 58730 - DNA, 20 bp, Artificial Sequence
  chemically synthesized
gctcttgaacatcggactcc

SEQ ID NO: 58731 - DNA, 20 bp, Artificial Sequence
  chemically synthesized
acatcggactccaagttctt

SEQ ID NO: 58732 - DNA, 20 bp, Artificial Sequence
  chemically synthesized
gactccaagttcttcagctg

SEQ ID NO: 58733 - DNA, 20 bp, Artificial Sequence
  chemically synthesized
actccaagttcttcagctgt

SEQ ID NO: 58734 - DNA, 20 bp, Artificial Sequence
  chemically synthesized
agttcttcagctgtgggact

SEQ ID NO: 58735 - DNA, 20 bp, Artificial Sequence
  chemically synthesized
ggactgtcttccttgctcct

SEQ ID NO: 58736 - DNA, 20 bp, Artificial Sequence
  chemically synthesized
cttccttgctcctcagattg

SEQ ID NO: 58737 - DNA, 20 bp, Artificial Sequence
  chemically synthesized
ttccttgctcctcagattgc

SEQ ID NO: 58738 - DNA, 20 bp, Artificial Sequence
  chemically synthesized
cttgctcctcagattgcagg

SEQ ID NO: 58739 - DNA, 20 bp, Artificial Sequence
  chemically synthesized
agattgcaggtggcctatta

SEQ ID NO: 58740 - DNA, 20 bp, Artificial Sequence
  chemically synthesized
gattgcaggtggcctattat

SEQ ID NO: 58741 - DNA, 20 bp, Artificial Sequence
  chemically synthesized
atgggaccttgtaatcttgt

SEQ ID NO: 58742 - DNA, 20 bp, Artificial Sequence
  chemically synthesized
gtgagttaataccacttaat

SEQ ID NO: 58743 - DNA, 20 bp, Artificial Sequence
  chemically synthesized
taataagctcccctttgtgt

SEQ ID NO: 58744 - DNA, 20 bp, Artificial Sequence
  chemically synthesized
tgtgagtatatctatatcta

SEQ ID NO: 58745 - DNA, 20 bp, Artificial Sequence
  chemically synthesized
agtatatctatatctataga

SEQ ID NO: 58746 - DNA, 20 bp, Artificial Sequence
  chemically synthesized
tctatatctatagatagata

SEQ ID NO: 58747 - DNA, 20 bp, Artificial Sequence
  chemically synthesized
ctatatctatagatagatat

SEQ ID NO: 58748 - DNA, 20 bp, Artificial Sequence
  chemically synthesized
atatatatataatctcctat

SEQ ID NO: 58749 - DNA, 20 bp, Artificial Sequence
  chemically synthesized
tcctattagttctgtccctc

SEQ ID NO: 58750 - DNA, 20 bp, Artificial Sequence
  chemically synthesized
ctattagttctgtccctcta

SEQ ID NO: 58751 - DNA, 20 bp, Artificial Sequence
  chemically synthesized
ctagagaaccccgactaata

SEQ ID NO: 58752 - DNA, 20 bp, Artificial Sequence
  chemically synthesized
actaatacagattttcatac

SEQ ID NO: 58753 - DNA, 20 bp, Artificial Sequence
  chemically synthesized
aatacagattttcataccag

SEQ ID NO: 58754 - DNA, 20 bp, Artificial Sequence
  chemically synthesized
acagattttcataccagaag

SEQ ID NO: 58755 - DNA, 20 bp, Artificial Sequence
  chemically synthesized
tcataccagaagtggttctt

SEQ ID NO: 58756 - DNA, 20 bp, Artificial Sequence
  chemically synthesized
cataccagaagtggttcttg

SEQ ID NO: 58757 - DNA, 20 bp, Artificial Sequence
  chemically synthesized
cagaagtggttcttgaggaa

SEQ ID NO: 58758 - DNA, 20 bp, Artificial Sequence
  chemically synthesized
ttcttgaggaacagaatatt

SEQ ID NO: 58759 - DNA, 20 bp, Artificial Sequence
  chemically synthesized
tcttgaggaacagaatatta

SEQ ID NO: 58760 - DNA, 20 bp, Artificial Sequence
  chemically synthesized
gaggaacagaatattaagga

SEQ ID NO: 58761 - DNA, 20 bp, Artificial Sequence
  chemically synthesized
taaggatggaattctttcat

SEQ ID NO: 58762 - DNA, 20 bp, Artificial Sequence
  chemically synthesized
tggaattctttcattggttt

SEQ ID NO: 58763 - DNA, 20 bp, Artificial Sequence
  chemically synthesized
ggaattctttcattggtttt

SEQ ID NO: 58764 - DNA, 20 bp, Artificial Sequence
  chemically synthesized
ttcattggttttgggacttc

SEQ ID NO: 58765 - DNA, 20 bp, Artificial Sequence
  chemically synthesized
ggttttgggacttctggtgt

SEQ ID NO: 58766 - DNA, 20 bp, Artificial Sequence
  chemically synthesized
tgttggctgattaatatgat

SEQ ID NO: 58767 - DNA, 20 bp, Artificial Sequence
  chemically synthesized
tgattagaccaaaaaatgct

SEQ ID NO: 58768 - DNA, 20 bp, Artificial Sequence
  chemically synthesized
gattagaccaaaaaatgcta

SEQ ID NO: 58769 - DNA, 20 bp, Artificial Sequence
  chemically synthesized
gctaaggactctacttctaa

SEQ ID NO: 58770 - DNA, 20 bp, Artificial Sequence
  chemically synthesized
ggactctacttctaatagta

SEQ ID NO: 58771 - DNA, 20 bp, Artificial Sequence
  chemically synthesized
actctacttctaatagtatg

SEQ ID NO: 58772 - DNA, 20 bp, Artificial Sequence
  chemically synthesized
aatagtatggagaacactga

SEQ ID NO: 58773 - DNA, 20 bp, Artificial Sequence
  chemically synthesized
tggagaacactgatagtact

SEQ ID NO: 58774 - DNA, 20 bp, Artificial Sequence
  chemically synthesized
agtacttggcctgaattgtt

SEQ ID NO: 58775 - DNA, 20 bp, Artificial Sequence
  chemically synthesized
tacttggcctgaattgttta

SEQ ID NO: 58776 - DNA, 20 bp, Artificial Sequence
  chemically synthesized
cttggcctgaattgtttaga

SEQ ID NO: 58777 - DNA, 20 bp, Artificial Sequence
  chemically synthesized
actactgattcatcacttat

SEQ ID NO: 58778 - DNA, 20 bp, Artificial Sequence
  chemically synthesized
tactgattcatcacttatga

SEQ ID NO: 58779 - DNA, 20 bp, Artificial Sequence
  chemically synthesized
actgattcatcacttatgag

SEQ ID NO: 58780 - DNA, 20 bp, Artificial Sequence
  chemically synthesized
attcatcacttatgagaggc

SEQ ID NO: 58781 - DNA, 20 bp, Artificial Sequence
  chemically synthesized
ttcatcacttatgagaggca

SEQ ID NO: 58782 - DNA, 20 bp, Artificial Sequence
  chemically synthesized
catcacttatgagaggcaag

SEQ ID NO: 58783 - DNA, 20 bp, Artificial Sequence
  chemically synthesized
cttatgagaggcaaggagtt

SEQ ID NO: 58784 - DNA, 20 bp, Artificial Sequence
  chemically synthesized
ataatacctttgactatatg

SEQ ID NO: 58785 - DNA, 20 bp, Artificial Sequence
  chemically synthesized
aatacctttgactatatgtg

SEQ ID NO: 58786 - DNA, 20 bp, Artificial Sequence
  chemically synthesized
ttgactatatgtggagaacc

SEQ ID NO: 58787 - DNA, 20 bp, Artificial Sequence
  chemically synthesized
tgactatatgtggagaacca

SEQ ID NO: 58788 - DNA, 20 bp, Artificial Sequence
  chemically synthesized
gagaaccaaggaacataatg

SEQ ID NO: 58789 - DNA, 20 bp, Artificial Sequence
  chemically synthesized
accaaggaacataatgaagt

SEQ ID NO: 58790 - DNA, 20 bp, Artificial Sequence
  chemically synthesized
gaagttggttgattgctcct

SEQ ID NO: 58791 - DNA, 20 bp, Artificial Sequence
  chemically synthesized
ttgattgctcctaagttctc

SEQ ID NO: 58792 - DNA, 20 bp, Artificial Sequence
  chemically synthesized
gattgctcctaagttctctg

SEQ ID NO: 58793 - DNA, 20 bp, Artificial Sequence
  chemically synthesized
gctcctaagttctctggaga

SEQ ID NO: 58794 - DNA, 20 bp, Artificial Sequence
  chemically synthesized
tcctaagttctctggagaaa

SEQ ID NO: 58795 - DNA, 20 bp, Artificial Sequence
  chemically synthesized
ttctctggagaaagagatga

SEQ ID NO: 58796 - DNA, 20 bp, Artificial Sequence
  chemically synthesized
atgaaagaaaatgatgatct

SEQ ID NO: 58797 - DNA, 20 bp, Artificial Sequence
  chemically synthesized
tgaaagaaaatgatgatctc

SEQ ID NO: 58798 - DNA, 20 bp, Artificial Sequence
  chemically synthesized
gaaagaaaatgatgatctca

SEQ ID NO: 58799 - DNA, 20 bp, Artificial Sequence
  chemically synthesized
aaagaaaatgatgatctcag

SEQ ID NO: 58800 - DNA, 20 bp, Artificial Sequence
  chemically synthesized
ggggatctgtctcccacctt

SEQ ID NO: 58801 - DNA, 20 bp, Artificial Sequence
  chemically synthesized
gatctgtctcccaccttcag

SEQ ID NO: 58802 - DNA, 20 bp, Artificial Sequence
  chemically synthesized
ctgtctcccaccttcagaag

SEQ ID NO: 58803 - DNA, 20 bp, Artificial Sequence
  chemically synthesized
caccttcagaagcagatact

SEQ ID NO: 58804 - DNA, 20 bp, Artificial Sequence
  chemically synthesized
tactgagccacaaatctgct

SEQ ID NO: 58805 - DNA, 20 bp, Artificial Sequence
  chemically synthesized
ctgctaagattgccctgaat

SEQ ID NO: 58806 - DNA, 20 bp, Artificial Sequence
  chemically synthesized
gctaagattgccctgaatga

SEQ ID NO: 58807 - DNA, 20 bp, Artificial Sequence
  chemically synthesized
aatgagagttttaactcctg

SEQ ID NO: 58808 - DNA, 20 bp, Artificial Sequence
  chemically synthesized
tgagagttttaactcctgta

SEQ ID NO: 58809 - DNA, 20 bp, Artificial Sequence
  chemically synthesized
agttttaactcctgtagaga

SEQ ID NO: 58810 - DNA, 20 bp, Artificial Sequence
  chemically synthesized
ttttaactcctgtagagaaa

SEQ ID NO: 58811 - DNA, 20 bp, Artificial Sequence
  chemically synthesized
gagttgaaattgtgaaaaaa

SEQ ID NO: 58812 - DNA, 20 bp, Artificial Sequence
  chemically synthesized
gttgaaattgtgaaaaaaca

SEQ ID NO: 58813 - DNA, 20 bp, Artificial Sequence
  chemically synthesized
aattgtgaaaaaacagagac

SEQ ID NO: 58814 - DNA, 20 bp, Artificial Sequence
  chemically synthesized
gagacaagctgttatcatgc

SEQ ID NO: 58815 - DNA, 20 bp, Artificial Sequence
  chemically synthesized
acaagctgttatcatgcgag

SEQ ID NO: 58816 - DNA, 20 bp, Artificial Sequence
  chemically synthesized
gcgagtagctgatctgcaac

SEQ ID NO: 58817 - DNA, 20 bp, Artificial Sequence
  chemically synthesized
gagtagctgatctgcaacaa

SEQ ID NO: 58818 - DNA, 20 bp, Artificial Sequence
  chemically synthesized
agtagctgatctgcaacaag

SEQ ID NO: 58819 - DNA, 20 bp, Artificial Sequence
  chemically synthesized
tgcaacaagaggtgcatgca

SEQ ID NO: 58820 - DNA, 20 bp, Artificial Sequence
  chemically synthesized
aggtgcatgcacagccttgc

SEQ ID NO: 58821 - DNA, 20 bp, Artificial Sequence
  chemically synthesized
ggtgcatgcacagccttgcc

SEQ ID NO: 58822 - DNA, 20 bp, Artificial Sequence
  chemically synthesized
ttgccaggtgtttactgtta

SEQ ID NO: 58823 - DNA, 20 bp, Artificial Sequence
  chemically synthesized
caggtgtttactgttaaagt

SEQ ID NO: 58824 - DNA, 20 bp, Artificial Sequence
  chemically synthesized
aggtgtttactgttaaagtg

SEQ ID NO: 58825 - DNA, 20 bp, Artificial Sequence
  chemically synthesized
ggtgtttactgttaaagtga

SEQ ID NO: 58826 - DNA, 20 bp, Artificial Sequence
  chemically synthesized
gttaaagtgagggcattgac

SEQ ID NO: 58827 - DNA, 20 bp, Artificial Sequence
  chemically synthesized
gggcattgactggaaaaaaa

SEQ ID NO: 58828 - DNA, 20 bp, Artificial Sequence
  chemically synthesized
ggcattgactggaaaaaaat

SEQ ID NO: 58829 - DNA, 20 bp, Artificial Sequence
  chemically synthesized
actggaaaaaaatgggaccc

SEQ ID NO: 58830 - DNA, 20 bp, Artificial Sequence
  chemically synthesized
aaaaatgggaccctggaact

SEQ ID NO: 58831 - DNA, 20 bp, Artificial Sequence
  chemically synthesized
aaatgggaccctggaacttg

SEQ ID NO: 58832 - DNA, 20 bp, Artificial Sequence
  chemically synthesized
tgggaccctggaacttggag

SEQ ID NO: 58833 - DNA, 20 bp, Artificial Sequence
  chemically synthesized
gggaccctggaacttggagt

SEQ ID NO: 58834 - DNA, 20 bp, Artificial Sequence
  chemically synthesized
ggaccctggaacttggagtg

SEQ ID NO: 58835 - DNA, 20 bp, Artificial Sequence
  chemically synthesized
gaacttggagtggggatgtg

SEQ ID NO: 58836 - DNA, 20 bp, Artificial Sequence
  chemically synthesized
aacttggagtggggatgtgt

SEQ ID NO: 58837 - DNA, 20 bp, Artificial Sequence
  chemically synthesized
cttggagtggggatgtgtgg

SEQ ID NO: 58838 - DNA, 20 bp, Artificial Sequence
  chemically synthesized
tgtgtgggagaaccctgatg

SEQ ID NO: 58839 - DNA, 20 bp, Artificial Sequence
  chemically synthesized
gggagaaccctgatgaagct

SEQ ID NO: 58840 - DNA, 20 bp, Artificial Sequence
  chemically synthesized
ggagaaccctgatgaagctg

SEQ ID NO: 58841 - DNA, 20 bp, Artificial Sequence
  chemically synthesized
ctgatgaagctgaggacact

SEQ ID NO: 58842 - DNA, 20 bp, Artificial Sequence
  chemically synthesized
ctctgatgaaacttttttgc

SEQ ID NO: 58843 - DNA, 20 bp, Artificial Sequence
  chemically synthesized
tgatgaaacttttttgccag

SEQ ID NO: 58844 - DNA, 20 bp, Artificial Sequence
  chemically synthesized
aacttttttgccagaagaaa

SEQ ID NO: 58845 - DNA, 20 bp, Artificial Sequence
  chemically synthesized
agaaacagtttccccatccc

SEQ ID NO: 58846 - DNA, 20 bp, Artificial Sequence
  chemically synthesized
aacagtttccccatccccag

SEQ ID NO: 58847 - DNA, 20 bp, Artificial Sequence
  chemically synthesized
agtttccccatccccagtag

SEQ ID NO: 58848 - DNA, 20 bp, Artificial Sequence
  chemically synthesized
tccctgacccgtgctgccat

SEQ ID NO: 58849 - DNA, 20 bp, Artificial Sequence
  chemically synthesized
tagcctttccacctttgtct

SEQ ID NO: 58850 - DNA, 20 bp, Artificial Sequence
  chemically synthesized
agcctttccacctttgtctg

SEQ ID NO: 58851 - DNA, 20 bp, Artificial Sequence
  chemically synthesized
atgtaaaccctgcactgctt

SEQ ID NO: 58852 - DNA, 20 bp, Artificial Sequence
  chemically synthesized
tgtaaaccctgcactgcttg

SEQ ID NO: 58853 - DNA, 20 bp, Artificial Sequence
  chemically synthesized
ccctgcactgcttgaggcaa

SEQ ID NO: 58854 - DNA, 20 bp, Artificial Sequence
  chemically synthesized
actgcttgaggcaacagtga

SEQ ID NO: 58855 - DNA, 20 bp, Artificial Sequence
  chemically synthesized
caacagtgatggccttccct

SEQ ID NO: 58856 - DNA, 20 bp, Artificial Sequence
  chemically synthesized
aacagtgatggccttccctg

SEQ ID NO: 58857 - DNA, 20 bp, Artificial Sequence
  chemically synthesized
agtgatggccttccctgagg

SEQ ID NO: 58858 - DNA, 20 bp, Artificial Sequence
  chemically synthesized
gccttccctgaggcagctgc

SEQ ID NO: 58859 - DNA, 20 bp, Artificial Sequence
  chemically synthesized
ccttccctgaggcagctgcc

SEQ ID NO: 58860 - DNA, 20 bp, Artificial Sequence
  chemically synthesized
ccctgaggcagctgccaggc

SEQ ID NO: 58861 - DNA, 20 bp, Artificial Sequence
  chemically synthesized
agataatgttgattctcctc

SEQ ID NO: 58862 - DNA, 20 bp, Artificial Sequence
  chemically synthesized
ataatgttgattctcctcaa

SEQ ID NO: 58863 - DNA, 20 bp, Artificial Sequence
  chemically synthesized
taatgttgattctcctcaag

SEQ ID NO: 58864 - DNA, 20 bp, Artificial Sequence
  chemically synthesized
ctaatgcccctgaatgcttc

SEQ ID NO: 58865 - DNA, 20 bp, Artificial Sequence
  chemically synthesized
aatgcttctagacctataac

SEQ ID NO: 58866 - DNA, 20 bp, Artificial Sequence
  chemically synthesized
atgcttctagacctataact

SEQ ID NO: 58867 - DNA, 20 bp, Artificial Sequence
  chemically synthesized
taactaggctaaattccttg

SEQ ID NO: 58868 - DNA, 20 bp, Artificial Sequence
  chemically synthesized
aactaggctaaattccttgc

SEQ ID NO: 58869 - DNA, 20 bp, Artificial Sequence
  chemically synthesized
gctaaattccttgcgggccc

SEQ ID NO: 58870 - DNA, 20 bp, Artificial Sequence
  chemically synthesized
taaattccttgcgggcccca

SEQ ID NO: 58871 - DNA, 20 bp, Artificial Sequence
  chemically synthesized
aaattccttgcgggccccag

SEQ ID NO: 58872 - DNA, 20 bp, Artificial Sequence
  chemically synthesized
tccttgcgggccccagaggt

SEQ ID NO: 58873 - DNA, 20 bp, Artificial Sequence
  chemically synthesized
ccttgcgggccccagaggtg

SEQ ID NO: 58874 - DNA, 20 bp, Artificial Sequence
  chemically synthesized
cgggccccagaggtgaggtt

SEQ ID NO: 58875 - DNA, 20 bp, Artificial Sequence
  chemically synthesized
ggccccagaggtgaggttca

SEQ ID NO: 58876 - DNA, 20 bp, Artificial Sequence
  chemically synthesized
aggttcagagtgtgacccat

SEQ ID NO: 58877 - DNA, 20 bp, Artificial Sequence
  chemically synthesized
ggttcagagtgtgacccatg

SEQ ID NO: 58878 - DNA, 20 bp, Artificial Sequence
  chemically synthesized
ttcagagtgtgacccatgag

SEQ ID NO: 58879 - DNA, 20 bp, Artificial Sequence
  chemically synthesized
tcagagtgtgacccatgagg

SEQ ID NO: 58880 - DNA, 20 bp, Artificial Sequence
  chemically synthesized
ggaggtgcattatactctaa

SEQ ID NO: 58881 - DNA, 20 bp, Artificial Sequence
  chemically synthesized
atactctaaaagaactgctt

SEQ ID NO: 58882 - DNA, 20 bp, Artificial Sequence
  chemically synthesized
ttaagctttctaatttatat

SEQ ID NO: 58883 - DNA, 20 bp, Artificial Sequence
  chemically synthesized
agctttctaatttatattgg

SEQ ID NO: 58884 - DNA, 20 bp, Artificial Sequence
  chemically synthesized
aatttatattggcagaaatc

SEQ ID NO: 58885 - DNA, 20 bp, Artificial Sequence
  chemically synthesized
tttatattggcagaaatctg

SEQ ID NO: 58886 - DNA, 20 bp, Artificial Sequence
  chemically synthesized
attggcagaaatctggagaa

SEQ ID NO: 58887 - DNA, 20 bp, Artificial Sequence
  chemically synthesized
ttggcagaaatctggagaac

SEQ ID NO: 58888 - DNA, 20 bp, Artificial Sequence
  chemically synthesized
agaaatctggagaacaggca

SEQ ID NO: 58889 - DNA, 20 bp, Artificial Sequence
  chemically synthesized
gaaatctggagaacaggcat

SEQ ID NO: 58890 - DNA, 20 bp, Artificial Sequence
  chemically synthesized
ctggagaacaggcatgggaa

SEQ ID NO: 58891 - DNA, 20 bp, Artificial Sequence
  chemically synthesized
caggcatgggaatggatatt

SEQ ID NO: 58892 - DNA, 20 bp, Artificial Sequence
  chemically synthesized
aggcatgggaatggatatta

SEQ ID NO: 58893 - DNA, 20 bp, Artificial Sequence
  chemically synthesized
ggcatgggaatggatattaa

SEQ ID NO: 58894 - DNA, 20 bp, Artificial Sequence
  chemically synthesized
tgggaatggatattaagggt

SEQ ID NO: 58895 - DNA, 20 bp, Artificial Sequence
  chemically synthesized
gggaatggatattaagggta

SEQ ID NO: 58896 - DNA, 20 bp, Artificial Sequence
  chemically synthesized
ggaatggatattaagggtaa

SEQ ID NO: 58897 - DNA, 20 bp, Artificial Sequence
  chemically synthesized
atattaagggtaagggataa

SEQ ID NO: 58898 - DNA, 20 bp, Artificial Sequence
  chemically synthesized
ttaagggtaagggataatgg

SEQ ID NO: 58899 - DNA, 20 bp, Artificial Sequence
  chemically synthesized
agggtaagggataatggtgg

SEQ ID NO: 58900 - DNA, 20 bp, Artificial Sequence
  chemically synthesized
gggtaagggataatggtgga

SEQ ID NO: 58901 - DNA, 20 bp, Artificial Sequence
  chemically synthesized
ggtaagggataatggtggaa

SEQ ID NO: 58902 - DNA, 20 bp, Artificial Sequence
  chemically synthesized
ggataatggtggaagggaca

SEQ ID NO: 58903 - DNA, 20 bp, Artificial Sequence
  chemically synthesized
ataatggtggaagggacata

SEQ ID NO: 58904 - DNA, 20 bp, Artificial Sequence
  chemically synthesized
tggtggaagggacatagagt

SEQ ID NO: 58905 - DNA, 20 bp, Artificial Sequence
  chemically synthesized
aagggacatagagttggatc

SEQ ID NO: 58906 - DNA, 20 bp, Artificial Sequence
  chemically synthesized
ttggatcaagctgaatttat

SEQ ID NO: 58907 - DNA, 20 bp, Artificial Sequence
  chemically synthesized
tcaagctgaatttattggtt

SEQ ID NO: 58908 - DNA, 20 bp, Artificial Sequence
  chemically synthesized
tttattggtttggccctact

SEQ ID NO: 58909 - DNA, 20 bp, Artificial Sequence
  chemically synthesized
attggtttggccctactaag

SEQ ID NO: 58910 - DNA, 20 bp, Artificial Sequence
  chemically synthesized
ttggtttggccctactaagt

SEQ ID NO: 58911 - DNA, 20 bp, Artificial Sequence
  chemically synthesized
tggtttggccctactaagta

SEQ ID NO: 58912 - DNA, 20 bp, Artificial Sequence
  chemically synthesized
ggattctgcatttaatgttg

SEQ ID NO: 58913 - DNA, 20 bp, Artificial Sequence
  chemically synthesized
ctgcatttaatgttgcagct

SEQ ID NO: 58914 - DNA, 20 bp, Artificial Sequence
  chemically synthesized
tgcatttaatgttgcagctc

SEQ ID NO: 58915 - DNA, 20 bp, Artificial Sequence
  chemically synthesized
gcatttaatgttgcagctcg

SEQ ID NO: 58916 - DNA, 20 bp, Artificial Sequence
  chemically synthesized
aatgttgcagctcggggact

SEQ ID NO: 58917 - DNA, 20 bp, Artificial Sequence
  chemically synthesized
tgcagctcggggacttagaa

SEQ ID NO: 58918 - DNA, 20 bp, Artificial Sequence
  chemically synthesized
gcagctcggggacttagaaa

SEQ ID NO: 58919 - DNA, 20 bp, Artificial Sequence
  chemically synthesized
ggacttagaaaaggttctga

SEQ ID NO: 58920 - DNA, 20 bp, Artificial Sequence
  chemically synthesized
gacttagaaaaggttctgat

SEQ ID NO: 58921 - DNA, 20 bp, Artificial Sequence
  chemically synthesized
acttagaaaaggttctgata

SEQ ID NO: 58922 - DNA, 20 bp, Artificial Sequence
  chemically synthesized
agaaaaggttctgatagggc

SEQ ID NO: 58923 - DNA, 20 bp, Artificial Sequence
  chemically synthesized
gaaaaggttctgatagggcc

SEQ ID NO: 58924 - DNA, 20 bp, Artificial Sequence
  chemically synthesized
aaaggttctgatagggccgg

SEQ ID NO: 58925 - DNA, 20 bp, Artificial Sequence
  chemically synthesized
ggttctgatagggccgggag

SEQ ID NO: 58926 - DNA, 20 bp, Artificial Sequence
  chemically synthesized
tctgatagggccgggagcag

SEQ ID NO: 58927 - DNA, 20 bp, Artificial Sequence
  chemically synthesized
gtggctcacgcctgtaatcc

SEQ ID NO: 58928 - DNA, 20 bp, Artificial Sequence
  chemically synthesized
cgcctgtaatcccagcacct

SEQ ID NO: 58929 - DNA, 20 bp, Artificial Sequence
  chemically synthesized
gcctgtaatcccagcacctt

SEQ ID NO: 58930 - DNA, 20 bp, Artificial Sequence
  chemically synthesized
ctgtaatcccagcaccttgg

SEQ ID NO: 58931 - DNA, 20 bp, Artificial Sequence
  chemically synthesized
tgtaatcccagcaccttggg

SEQ ID NO: 58932 - DNA, 20 bp, Artificial Sequence
  chemically synthesized
aatcccagcaccttgggagg

SEQ ID NO: 58933 - DNA, 20 bp, Artificial Sequence
  chemically synthesized
atcccagcaccttgggaggc

SEQ ID NO: 58934 - DNA, 20 bp, Artificial Sequence
  chemically synthesized
tcccagcaccttgggaggcg

SEQ ID NO: 58935 - DNA, 20 bp, Artificial Sequence
  chemically synthesized
cccagcaccttgggaggcgg

SEQ ID NO: 58936 - DNA, 20 bp, Artificial Sequence
  chemically synthesized
agcaccttgggaggcggggg

SEQ ID NO: 58937 - DNA, 20 bp, Artificial Sequence
  chemically synthesized
gcaccttgggaggcgggggc

SEQ ID NO: 58938 - DNA, 20 bp, Artificial Sequence
  chemically synthesized
ccttgggaggcgggggcggg

SEQ ID NO: 58939 - DNA, 20 bp, Artificial Sequence
  chemically synthesized
ggcgggggcgggcagatcac

SEQ ID NO: 58940 - DNA, 20 bp, Artificial Sequence
  chemically synthesized
gggcgggcagatcacgagat

SEQ ID NO: 58941 - DNA, 20 bp, Artificial Sequence
  chemically synthesized
ggcgggcagatcacgagatc

SEQ ID NO: 58942 - DNA, 20 bp, Artificial Sequence
  chemically synthesized
cgggcagatcacgagatcag

SEQ ID NO: 58943 - DNA, 20 bp, Artificial Sequence
  chemically synthesized
gatcacgagatcaggagatt

SEQ ID NO: 58944 - DNA, 20 bp, Artificial Sequence
  chemically synthesized
tcaggagattgagacaattc

SEQ ID NO: 58945 - DNA, 20 bp, Artificial Sequence
  chemically synthesized
tgagacaattctggctaaaa

SEQ ID NO: 58946 - DNA, 20 bp, Artificial Sequence
  chemically synthesized
tctgctaaaaatacaaaaat

SEQ ID NO: 58947 - DNA, 20 bp, Artificial Sequence
  chemically synthesized
ctaaaaatacaaaaattagc

SEQ ID NO: 58948 - DNA, 20 bp, Artificial Sequence
  chemically synthesized
taaaaatacaaaaattagct

SEQ ID NO: 58949 - DNA, 20 bp, Artificial Sequence
  chemically synthesized
atacaaaaattagctgggca

SEQ ID NO: 58950 - DNA, 20 bp, Artificial Sequence
  chemically synthesized
taactgtaatctcatctact

SEQ ID NO: 58951 - DNA, 20 bp, Artificial Sequence
  chemically synthesized
aactgtaatctcatctactt

SEQ ID NO: 58952 - DNA, 20 bp, Artificial Sequence
  chemically synthesized
ctgtaatctcatctacttgg

SEQ ID NO: 58953 - DNA, 20 bp, Artificial Sequence
  chemically synthesized
tgtaatctcatctacttggg

SEQ ID NO: 58954 - DNA, 20 bp, Artificial Sequence
  chemically synthesized
tctcatctacttgggaggct

SEQ ID NO: 58955 - DNA, 20 bp, Artificial Sequence
  chemically synthesized
ctcatctacttgggaggctg

SEQ ID NO: 58956 - DNA, 20 bp, Artificial Sequence
  chemically synthesized
tctacttgggaggctgaggc

SEQ ID NO: 58957 - DNA, 20 bp, Artificial Sequence
  chemically synthesized
tacttgggaggctgaggcaa

SEQ ID NO: 58958 - DNA, 20 bp, Artificial Sequence
  chemically synthesized
agagaactgcttgaacctgt

SEQ ID NO: 58959 - DNA, 20 bp, Artificial Sequence
  chemically synthesized
gagaactgcttgaacctgtg

SEQ ID NO: 58960 - DNA, 20 bp, Artificial Sequence
  chemically synthesized
aactgcttgaacctgtgagg

SEQ ID NO: 58961 - DNA, 20 bp, Artificial Sequence
  chemically synthesized
ctgcttgaacctgtgaggca

SEQ ID NO: 58962 - DNA, 20 bp, Artificial Sequence
  chemically synthesized
aacctgtgaggcagagattg

SEQ ID NO: 58963 - DNA, 20 bp, Artificial Sequence
  chemically synthesized
tgtgaggcagagattgcagt

SEQ ID NO: 58964 - DNA, 20 bp, Artificial Sequence
  chemically synthesized
ggcagagattgcagtgagcc

SEQ ID NO: 58965 - DNA, 20 bp, Artificial Sequence
  chemically synthesized
aagatcgccccactgcattc

SEQ ID NO: 58966 - DNA, 20 bp, Artificial Sequence
  chemically synthesized
cgccccactgcattccagcc

SEQ ID NO: 58967 - DNA, 20 bp, Artificial Sequence
  chemically synthesized
actgcattccagcctggtaa

SEQ ID NO: 58968 - DNA, 20 bp, Artificial Sequence
  chemically synthesized
tgcattccagcctggtaaca

SEQ ID NO: 58969 - DNA, 20 bp, Artificial Sequence
  chemically synthesized
ttccagcctggtaacagagc

SEQ ID NO: 58970 - DNA, 20 bp, Artificial Sequence
  chemically synthesized
ttccaaaaaaaaaaaaaaaa

SEQ ID NO: 58971 - DNA, 20 bp, Artificial Sequence
  chemically synthesized
aaaaaaaaaaaaagttataa

SEQ ID NO: 58972 - DNA, 20 bp, Artificial Sequence
  chemically synthesized
gttataatagtttatttgct

SEQ ID NO: 58973 - DNA, 20 bp, Artificial Sequence
  chemically synthesized
taatagtttatttgcttggt

SEQ ID NO: 58974 - DNA, 20 bp, Artificial Sequence
  chemically synthesized
ttgcttggttagctgaaata

SEQ ID NO: 58975 - DNA, 20 bp, Artificial Sequence
  chemically synthesized
ttagctgaaatatggattaa

SEQ ID NO: 58976 - DNA, 20 bp, Artificial Sequence
  chemically synthesized
ctgaaatatggattaaaaga

SEQ ID NO: 58977 - DNA, 20 bp, Artificial Sequence
  chemically synthesized
attaaaagatggtccaatgt

SEQ ID NO: 58978 - DNA, 20 bp, Artificial Sequence
  chemically synthesized
aaagatggtccaatgttagt

SEQ ID NO: 58979 - DNA, 20 bp, Artificial Sequence
  chemically synthesized
atggtccaatgttagtgagc

SEQ ID NO: 58980 - DNA, 20 bp, Artificial Sequence
  chemically synthesized
ttagtgagctggaaatgcct

SEQ ID NO: 58981 - DNA, 20 bp, Artificial Sequence
  chemically synthesized
ggaaatgccttggtttaatg

SEQ ID NO: 58982 - DNA, 20 bp, Artificial Sequence
  chemically synthesized
aaatgccttggtttaatgta

SEQ ID NO: 58983 - DNA, 20 bp, Artificial Sequence
  chemically synthesized
aatgccttggtttaatgtag

SEQ ID NO: 58984 - DNA, 20 bp, Artificial Sequence
  chemically synthesized
gccttggtttaatgtagagg

SEQ ID NO: 58985 - DNA, 20 bp, Artificial Sequence
  chemically synthesized
aatgtagaggaagtgatcca

SEQ ID NO: 58986 - DNA, 20 bp, Artificial Sequence
  chemically synthesized
atgtagaggaagtgatccaa

SEQ ID NO: 58987 - DNA, 20 bp, Artificial Sequence
  chemically synthesized
gaggaagtgatccaaaggct

SEQ ID NO: 58988 - DNA, 20 bp, Artificial Sequence
  chemically synthesized
aggaagtgatccaaaggctt

SEQ ID NO: 58989 - DNA, 20 bp, Artificial Sequence
  chemically synthesized
ggaagtgatccaaaggctta

SEQ ID NO: 58990 - DNA, 20 bp, Artificial Sequence
  chemically synthesized
aagtgatccaaaggcttagg

SEQ ID NO: 58991 - DNA, 20 bp, Artificial Sequence
  chemically synthesized
atccaaaggcttagggagat

SEQ ID NO: 58992 - DNA, 20 bp, Artificial Sequence
  chemically synthesized
tccaaaggcttagggagatt

SEQ ID NO: 58993 - DNA, 20 bp, Artificial Sequence
  chemically synthesized
aaggcttagggagattagga

SEQ ID NO: 58994 - DNA, 20 bp, Artificial Sequence
  chemically synthesized
gcttagggagattaggatgg

SEQ ID NO: 58995 - DNA, 20 bp, Artificial Sequence
  chemically synthesized
ttagggagattaggatggtg

SEQ ID NO: 58996 - DNA, 20 bp, Artificial Sequence
  chemically synthesized
gggagattaggatggtggag

SEQ ID NO: 58997 - DNA, 20 bp, Artificial Sequence
  chemically synthesized
attaggatggtggagtggat

SEQ ID NO: 58998 - DNA, 20 bp, Artificial Sequence
  chemically synthesized
gtggagtggattagtcactt

SEQ ID NO: 58999 - DNA, 20 bp, Artificial Sequence
  chemically synthesized
cactttagacctactcatcc

SEQ ID NO: 59000 - DNA, 20 bp, Artificial Sequence
  chemically synthesized
ttagacctactcatcccagc

SEQ ID NO: 59001 - DNA, 20 bp, Artificial Sequence
  chemically synthesized
tagacctactcatcccagct

SEQ ID NO: 59002 - DNA, 20 bp, Artificial Sequence
  chemically synthesized
gacctactcatcccagctgg

SEQ ID NO: 59003 - DNA, 20 bp, Artificial Sequence
  chemically synthesized
acctactcatcccagctggg

SEQ ID NO: 59004 - DNA, 20 bp, Artificial Sequence
  chemically synthesized
cctactcatcccagctggga

SEQ ID NO: 59005 - DNA, 20 bp, Artificial Sequence
  chemically synthesized
tcatcccagctgggagggtc

SEQ ID NO: 59006 - DNA, 20 bp, Artificial Sequence
  chemically synthesized
tcccagctgggagggtccag

SEQ ID NO: 59007 - DNA, 20 bp, Artificial Sequence
  chemically synthesized
gggtccagaagatacaccct

SEQ ID NO: 59008 - DNA, 20 bp, Artificial Sequence
  chemically synthesized
agaagatacacccttggccg

SEQ ID NO: 59009 - DNA, 20 bp, Artificial Sequence
  chemically synthesized
ttggccgaagctttgtgaaa

SEQ ID NO: 59010 - DNA, 20 bp, Artificial Sequence
  chemically synthesized
gctttgtgaaatagatttgt

SEQ ID NO: 59011 - DNA, 20 bp, Artificial Sequence
  chemically synthesized
tttgtgaaatagatttgtga

SEQ ID NO: 59012 - DNA, 20 bp, Artificial Sequence
  chemically synthesized
gtgaaatagatttgtgagag

SEQ ID NO: 59013 - DNA, 20 bp, Artificial Sequence
  chemically synthesized
gagcagcacctgtatttttg

SEQ ID NO: 59014 - DNA, 20 bp, Artificial Sequence
  chemically synthesized
gcagcacctgtatttttgaa

SEQ ID NO: 59015 - DNA, 20 bp, Artificial Sequence
  chemically synthesized
aattgctcttctctgtatgt

SEQ ID NO: 59016 - DNA, 20 bp, Artificial Sequence
  chemically synthesized
tctctgtatgtcagatctaa

SEQ ID NO: 59017 - DNA, 20 bp, Artificial Sequence
  chemically synthesized
ctgtatgtcagatctaacag

SEQ ID NO: 59018 - DNA, 20 bp, Artificial Sequence
  chemically synthesized
tgtatgtcagatctaacagt

SEQ ID NO: 59019 - DNA, 20 bp, Artificial Sequence
  chemically synthesized
agatctaacagtaggaacca

SEQ ID NO: 59020 - DNA, 20 bp, Artificial Sequence
  chemically synthesized
actacaaaatttaaatacaa

SEQ ID NO: 59021 - DNA, 20 bp, Artificial Sequence
  chemically synthesized
ctacaaaatttaaatacaat

SEQ ID NO: 59022 - DNA, 20 bp, Artificial Sequence
  chemically synthesized
ttaaatacaatgggaataat

SEQ ID NO: 59023 - DNA, 20 bp, Artificial Sequence
  chemically synthesized
aatgggaataattggatcct

SEQ ID NO: 59024 - DNA, 20 bp, Artificial Sequence
  chemically synthesized
atgggaataattggatcctg

SEQ ID NO: 59025 - DNA, 20 bp, Artificial Sequence
  chemically synthesized
ggaataattggatcctgagg

SEQ ID NO: 59026 - DNA, 20 bp, Artificial Sequence
  chemically synthesized
ataattggatcctgaggtgg

SEQ ID NO: 59027 - DNA, 20 bp, Artificial Sequence
  chemically synthesized
taattggatcctgaggtggc

SEQ ID NO: 59028 - DNA, 20 bp, Artificial Sequence
  chemically synthesized
aattggatcctgaggtggca

SEQ ID NO: 59029 - DNA, 20 bp, Artificial Sequence
  chemically synthesized
attggatcctgaggtggcag

SEQ ID NO: 59030 - DNA, 20 bp, Artificial Sequence
  chemically synthesized
atcctgaggtggcaggggcc

SEQ ID NO: 59031 - DNA, 20 bp, Artificial Sequence
  chemically synthesized
aggtggcaggggccaagtgt

SEQ ID NO: 59032 - DNA, 20 bp, Artificial Sequence
  chemically synthesized
gtgttggcactgaaccatca

SEQ ID NO: 59033 - DNA, 20 bp, Artificial Sequence
  chemically synthesized
tgttggcactgaaccatcaa

SEQ ID NO: 59034 - DNA, 20 bp, Artificial Sequence
  chemically synthesized
ggcactgaaccatcaaaggc

SEQ ID NO: 59035 - DNA, 20 bp, Artificial Sequence
  chemically synthesized
gcactgaaccatcaaaggca

SEQ ID NO: 59036 - DNA, 20 bp, Artificial Sequence
  chemically synthesized
ctgaaccatcaaaggcaagg

SEQ ID NO: 59037 - DNA, 20 bp, Artificial Sequence
  chemically synthesized
tgaaccatcaaaggcaaggt

SEQ ID NO: 59038 - DNA, 20 bp, Artificial Sequence
  chemically synthesized
ggtgggcataactaccataa

SEQ ID NO: 59039 - DNA, 20 bp, Artificial Sequence
  chemically synthesized
ggcataactaccataataga

SEQ ID NO: 59040 - DNA, 20 bp, Artificial Sequence
  chemically synthesized
ataactaccataatagacag

SEQ ID NO: 59041 - DNA, 20 bp, Artificial Sequence
  chemically synthesized
aactaccataatagacagca

SEQ ID NO: 59042 - DNA, 20 bp, Artificial Sequence
  chemically synthesized
actaccataatagacagcag

SEQ ID NO: 59043 - DNA, 20 bp, Artificial Sequence
  chemically synthesized
cataatagacagcagaggca

SEQ ID NO: 59044 - DNA, 20 bp, Artificial Sequence
  chemically synthesized
aatagacagcagaggcaaag

SEQ ID NO: 59045 - DNA, 20 bp, Artificial Sequence
  chemically synthesized
agcagaggcaaagcagccat

SEQ ID NO: 59046 - DNA, 20 bp, Artificial Sequence
  chemically synthesized
aggcaaagcagccatcagaa

SEQ ID NO: 59047 - DNA, 20 bp, Artificial Sequence
  chemically synthesized
tcagaatagtctgactcatg

SEQ ID NO: 59048 - DNA, 20 bp, Artificial Sequence
  chemically synthesized
agaatagtctgactcatgta

SEQ ID NO: 59049 - DNA, 20 bp, Artificial Sequence
  chemically synthesized
gtctgactcatgtagagctc

SEQ ID NO: 59050 - DNA, 20 bp, Artificial Sequence
  chemically synthesized
ctcatgtagagctctggcat

SEQ ID NO: 59051 - DNA, 20 bp, Artificial Sequence
  chemically synthesized
tggcattggctaattaatca

SEQ ID NO: 59052 - DNA, 20 bp, Artificial Sequence
  chemically synthesized
ctaattaatcatggtgttcc

SEQ ID NO: 59053 - DNA, 20 bp, Artificial Sequence
  chemically synthesized
attaatcatggtgttcctag

SEQ ID NO: 59054 - DNA, 20 bp, Artificial Sequence
  chemically synthesized
gttcctagaagtgaaattga

SEQ ID NO: 59055 - DNA, 20 bp, Artificial Sequence
  chemically synthesized
ttcctagaagtgaaattgat

SEQ ID NO: 59056 - DNA, 20 bp, Artificial Sequence
  chemically synthesized
ttatataaacaaaaaactgc

SEQ ID NO: 59057 - DNA, 20 bp, Artificial Sequence
  chemically synthesized
tatataaacaaaaaactgcc

SEQ ID NO: 59058 - DNA, 20 bp, Artificial Sequence
  chemically synthesized
ataaacaaaaaactgccagg

SEQ ID NO: 59059 - DNA, 20 bp, Artificial Sequence
  chemically synthesized
caaaaaactgccaggtagaa

SEQ ID NO: 59060 - DNA, 20 bp, Artificial Sequence
  chemically synthesized
ctgccaggtagaatggacta

SEQ ID NO: 59061 - DNA, 20 bp, Artificial Sequence
  chemically synthesized
actaatctgaattataaaaa

SEQ ID NO: 59062 - DNA, 20 bp, Artificial Sequence
  chemically synthesized
taatctgaattataaaaaca

SEQ ID NO: 59063 - DNA, 20 bp, Artificial Sequence
  chemically synthesized
attataaaaacagagaatca

SEQ ID NO: 59064 - DNA, 20 bp, Artificial Sequence
  chemically synthesized
ttataaaaacagagaatcat

SEQ ID NO: 59065 - DNA, 20 bp, Artificial Sequence
  chemically synthesized
atgggccctcaatcaatttc

SEQ ID NO: 59066 - DNA, 20 bp, Artificial Sequence
  chemically synthesized
ttccagactcgaacctgtta

SEQ ID NO: 59067 - DNA, 20 bp, Artificial Sequence
  chemically synthesized
actcgaacctgttacagttc

SEQ ID NO: 59068 - DNA, 20 bp, Artificial Sequence
  chemically synthesized
gttccagaacccactgaatg

SEQ ID NO: 59069 - DNA, 20 bp, Artificial Sequence
  chemically synthesized
ttccagaacccactgaatga

SEQ ID NO: 59070 - DNA, 20 bp, Artificial Sequence
  chemically synthesized
tccagaacccactgaatgaa

SEQ ID NO: 59071 - DNA, 20 bp, Artificial Sequence
  chemically synthesized
ccagaacccactgaatgaag

SEQ ID NO: 59072 - DNA, 20 bp, Artificial Sequence
  chemically synthesized
agaacccactgaatgaaggg

SEQ ID NO: 59073 - DNA, 20 bp, Artificial Sequence
  chemically synthesized
gaacccactgaatgaagggg

SEQ ID NO: 59074 - DNA, 20 bp, Artificial Sequence
  chemically synthesized
ccactgaatgaaggggaggc

SEQ ID NO: 59075 - DNA, 20 bp, Artificial Sequence
  chemically synthesized
aggggaggctggatcccctt

SEQ ID NO: 59076 - DNA, 20 bp, Artificial Sequence
  chemically synthesized
ggggaggctggatccccttg

SEQ ID NO: 59077 - DNA, 20 bp, Artificial Sequence
  chemically synthesized
gaggctggatccccttgagg

SEQ ID NO: 59078 - DNA, 20 bp, Artificial Sequence
  chemically synthesized
aggctggatccccttgagga

SEQ ID NO: 59079 - DNA, 20 bp, Artificial Sequence
  chemically synthesized
cccttgaggaaggacaccac

SEQ ID NO: 59080 - DNA, 20 bp, Artificial Sequence
  chemically synthesized
ccttgaggaaggacaccact

SEQ ID NO: 59081 - DNA, 20 bp, Artificial Sequence
  chemically synthesized
tctttctcccatccttccct

SEQ ID NO: 59082 - DNA, 20 bp, Artificial Sequence
  chemically synthesized
ctttctcccatccttcccta

SEQ ID NO: 59083 - DNA, 20 bp, Artificial Sequence
  chemically synthesized
ttctcccatccttccctaag

SEQ ID NO: 59084 - DNA, 20 bp, Artificial Sequence
  chemically synthesized
tccttccctaaggagacctc

SEQ ID NO: 59085 - DNA, 20 bp, Artificial Sequence
  chemically synthesized
ggagacctctggccttttac

SEQ ID NO: 59086 - DNA, 20 bp, Artificial Sequence
  chemically synthesized
gagacctctggccttttacc

SEQ ID NO: 59087 - DNA, 20 bp, Artificial Sequence
  chemically synthesized
agacctctggccttttacca

SEQ ID NO: 59088 - DNA, 20 bp, Artificial Sequence
  chemically synthesized
accagggtaactgtgtgtac

SEQ ID NO: 59089 - DNA, 20 bp, Artificial Sequence
  chemically synthesized
cagggtaactgtgtgtactg

SEQ ID NO: 59090 - DNA, 20 bp, Artificial Sequence
  chemically synthesized
gtaactgtgtgtactggaga

SEQ ID NO: 59091 - DNA, 20 bp, Artificial Sequence
  chemically synthesized
taactgtgtgtactggagaa

SEQ ID NO: 59092 - DNA, 20 bp, Artificial Sequence
  chemically synthesized
aactgtgtgtactggagaaa

SEQ ID NO: 59093 - DNA, 20 bp, Artificial Sequence
  chemically synthesized
tgtgtgtactggagaaaggg

SEQ ID NO: 59094 - DNA, 20 bp, Artificial Sequence
  chemically synthesized
actggagaaagggaagtaat

SEQ ID NO: 59095 - DNA, 20 bp, Artificial Sequence
  chemically synthesized
agggaagtaatgagacattt

SEQ ID NO: 59096 - DNA, 20 bp, Artificial Sequence
  chemically synthesized
aagtaatgagacatttcaga

SEQ ID NO: 59097 - DNA, 20 bp, Artificial Sequence
  chemically synthesized
tgagacatttcagaaagtac

SEQ ID NO: 59098 - DNA, 20 bp, Artificial Sequence
  chemically synthesized
tttcagaaagtactggacac

SEQ ID NO: 59099 - DNA, 20 bp, Artificial Sequence
  chemically synthesized
aagtactggacactggctct

SEQ ID NO: 59100 - DNA, 20 bp, Artificial Sequence
  chemically synthesized
ctctgagctgacgttgattc

SEQ ID NO: 59101 - DNA, 20 bp, Artificial Sequence
  chemically synthesized
tctgagctgacgttgattcc

SEQ ID NO: 59102 - DNA, 20 bp, Artificial Sequence
  chemically synthesized
ctgagctgacgttgattcca

SEQ ID NO: 59103 - DNA, 20 bp, Artificial Sequence
  chemically synthesized
gggtacccaaaacgttattg

SEQ ID NO: 59104 - DNA, 20 bp, Artificial Sequence
  chemically synthesized
aaaacgttattgtggttccc

SEQ ID NO: 59105 - DNA, 20 bp, Artificial Sequence
  chemically synthesized
ttattgtggttccccagtta

SEQ ID NO: 59106 - DNA, 20 bp, Artificial Sequence
  chemically synthesized
ttgtggttccccagttaaag

SEQ ID NO: 59107 - DNA, 20 bp, Artificial Sequence
  chemically synthesized
tgtggttccccagttaaagt

SEQ ID NO: 59108 - DNA, 20 bp, Artificial Sequence
  chemically synthesized
gtggttccccagttaaagta

SEQ ID NO: 59109 - DNA, 20 bp, Artificial Sequence
  chemically synthesized
tggttccccagttaaagtag

SEQ ID NO: 59110 - DNA, 20 bp, Artificial Sequence
  chemically synthesized
ccagttaaagtaggggctta

SEQ ID NO: 59111 - DNA, 20 bp, Artificial Sequence
  chemically synthesized
agttaaagtaggggcttatg

SEQ ID NO: 59112 - DNA, 20 bp, Artificial Sequence
  chemically synthesized
gttaaagtaggggcttatgg

SEQ ID NO: 59113 - DNA, 20 bp, Artificial Sequence
  chemically synthesized
aagtaggggcttatggaggt

SEQ ID NO: 59114 - DNA, 20 bp, Artificial Sequence
  chemically synthesized
agtaggggcttatggaggtt

SEQ ID NO: 59115 - DNA, 20 bp, Artificial Sequence
  chemically synthesized
tatggaggttaggtaattaa

SEQ ID NO: 59116 - DNA, 20 bp, Artificial Sequence
  chemically synthesized
tggaggttaggtaattaatg

SEQ ID NO: 59117 - DNA, 20 bp, Artificial Sequence
  chemically synthesized
ttaggtaattaatggagttt

SEQ ID NO: 59118 - DNA, 20 bp, Artificial Sequence
  chemically synthesized
tttagctcatttctgactta

SEQ ID NO: 59119 - DNA, 20 bp, Artificial Sequence
  chemically synthesized
agctcatttctgacttacag

SEQ ID NO: 59120 - DNA, 20 bp, Artificial Sequence
  chemically synthesized
tttctgacttacagtggttc

SEQ ID NO: 59121 - DNA, 20 bp, Artificial Sequence
  chemically synthesized
ctgacttacagtggttccag

SEQ ID NO: 59122 - DNA, 20 bp, Artificial Sequence
  chemically synthesized
tgacttacagtggttccagt

SEQ ID NO: 59123 - DNA, 20 bp, Artificial Sequence
  chemically synthesized
cagtggttccagtgggtccc

SEQ ID NO: 59124 - DNA, 20 bp, Artificial Sequence
  chemically synthesized
gggtccctggacttatcctc

SEQ ID NO: 59125 - DNA, 20 bp, Artificial Sequence
  chemically synthesized
ttatcctctggtcattttcc

SEQ ID NO: 59126 - DNA, 20 bp, Artificial Sequence
  chemically synthesized
gccaaaatgcataatttgta

SEQ ID NO: 59127 - DNA, 20 bp, Artificial Sequence
  chemically synthesized
atttgtatagacatacttat

SEQ ID NO: 59128 - DNA, 20 bp, Artificial Sequence
  chemically synthesized
gtatagacatacttattagc

SEQ ID NO: 59129 - DNA, 20 bp, Artificial Sequence
  chemically synthesized
tagacatacttattagctgg

SEQ ID NO: 59130 - DNA, 20 bp, Artificial Sequence
  chemically synthesized
agctggcagaaatgccacat

SEQ ID NO: 59131 - DNA, 20 bp, Artificial Sequence
  chemically synthesized
tgccacattggctccctgac

SEQ ID NO: 59132 - DNA, 20 bp, Artificial Sequence
  chemically synthesized
cacattggctccctgactgg

SEQ ID NO: 59133 - DNA, 20 bp, Artificial Sequence
  chemically synthesized
acattggctccctgactggt

SEQ ID NO: 59134 - DNA, 20 bp, Artificial Sequence
  chemically synthesized
ggctccctgactggtaggat

SEQ ID NO: 59135 - DNA, 20 bp, Artificial Sequence
  chemically synthesized
gctccctgactggtaggatg

SEQ ID NO: 59136 - DNA, 20 bp, Artificial Sequence
  chemically synthesized
ctccctgactggtaggatga

SEQ ID NO: 59137 - DNA, 20 bp, Artificial Sequence
  chemically synthesized
tggtaggatgagggctatta

SEQ ID NO: 59138 - DNA, 20 bp, Artificial Sequence
  chemically synthesized
taggatgagggctattatgg

SEQ ID NO: 59139 - DNA, 20 bp, Artificial Sequence
  chemically synthesized
aggatgagggctattatggt

SEQ ID NO: 59140 - DNA, 20 bp, Artificial Sequence
  chemically synthesized
tgagggctattatggtggga

SEQ ID NO: 59141 - DNA, 20 bp, Artificial Sequence
  chemically synthesized
gagggctattatggtgggaa

SEQ ID NO: 59142 - DNA, 20 bp, Artificial Sequence
  chemically synthesized
ttatggtgggaaaggccaaa

SEQ ID NO: 59143 - DNA, 20 bp, Artificial Sequence
  chemically synthesized
tggtgggaaaggccaaacag

SEQ ID NO: 59144 - DNA, 20 bp, Artificial Sequence
  chemically synthesized
aaaggccaaacagaagccat

SEQ ID NO: 59145 - DNA, 20 bp, Artificial Sequence
  chemically synthesized
aggccaaacagaagccatta

SEQ ID NO: 59146 - DNA, 20 bp, Artificial Sequence
  chemically synthesized
ccattagagctgtctctacc

SEQ ID NO: 59147 - DNA, 20 bp, Artificial Sequence
  chemically synthesized
caaaaacaatatcccatccc

SEQ ID NO: 59148 - DNA, 20 bp, Artificial Sequence
  chemically synthesized
aaaacaatatcccatccctg

SEQ ID NO: 59149 - DNA, 20 bp, Artificial Sequence
  chemically synthesized
aaacaatatcccatccctgg

SEQ ID NO: 59150 - DNA, 20 bp, Artificial Sequence
  chemically synthesized
aacaatatcccatccctgga

SEQ ID NO: 59151 - DNA, 20 bp, Artificial Sequence
  chemically synthesized
tcccatccctggagggactg

SEQ ID NO: 59152 - DNA, 20 bp, Artificial Sequence
  chemically synthesized
cctggagggactgaagtgat

SEQ ID NO: 59153 - DNA, 20 bp, Artificial Sequence
  chemically synthesized
aagtgattagtgtcaccatc

SEQ ID NO: 59154 - DNA, 20 bp, Artificial Sequence
  chemically synthesized
agtgattagtgtcaccatca

SEQ ID NO: 59155 - DNA, 20 bp, Artificial Sequence
  chemically synthesized
tgtcaccatcaaggacttga

SEQ ID NO: 59156 - DNA, 20 bp, Artificial Sequence
  chemically synthesized
catcaaggacttgaaagacg

SEQ ID NO: 59157 - DNA, 20 bp, Artificial Sequence
  chemically synthesized
atcaaggacttgaaagacgc

SEQ ID NO: 59158 - DNA, 20 bp, Artificial Sequence
  chemically synthesized
tcaaggacttgaaagacgca

SEQ ID NO: 59159 - DNA, 20 bp, Artificial Sequence
  chemically synthesized
caaggacttgaaagacgcag

SEQ ID NO: 59160 - DNA, 20 bp, Artificial Sequence
  chemically synthesized
ggacttgaaagacgcagggg

SEQ ID NO: 59161 - DNA, 20 bp, Artificial Sequence
  chemically synthesized
actctcccatttgacctgtg

SEQ ID NO: 59162 - DNA, 20 bp, Artificial Sequence
  chemically synthesized
tctcccatttgacctgtgca

SEQ ID NO: 59163 - DNA, 20 bp, Artificial Sequence
  chemically synthesized
ctcccatttgacctgtgcag

SEQ ID NO: 59164 - DNA, 20 bp, Artificial Sequence
  chemically synthesized
catttgacctgtgcagagga

SEQ ID NO: 59165 - DNA, 20 bp, Artificial Sequence
  chemically synthesized
tgacctgtgcagaggacaga

SEQ ID NO: 59166 - DNA, 20 bp, Artificial Sequence
  chemically synthesized
tgcagaggacagatggatct

SEQ ID NO: 59167 - DNA, 20 bp, Artificial Sequence
  chemically synthesized
agatggatcttggaaaatga

SEQ ID NO: 59168 - DNA, 20 bp, Artificial Sequence
  chemically synthesized
tggatcttggaaaatgatgg

SEQ ID NO: 59169 - DNA, 20 bp, Artificial Sequence
  chemically synthesized
aaatgatggtggattatttt

SEQ ID NO: 59170 - DNA, 20 bp, Artificial Sequence
  chemically synthesized
ggattattttaagcttaacc

SEQ ID NO: 59171 - DNA, 20 bp, Artificial Sequence
  chemically synthesized
ttattttaagcttaaccaag

SEQ ID NO: 59172 - DNA, 20 bp, Artificial Sequence
  chemically synthesized
ccaagtggtgactccaattg

SEQ ID NO: 59173 - DNA, 20 bp, Artificial Sequence
  chemically synthesized
tccaattgcagctgctctac

SEQ ID NO: 59174 - DNA, 20 bp, Artificial Sequence
  chemically synthesized
tgcagctgctctaccagttg

SEQ ID NO: 59175 - DNA, 20 bp, Artificial Sequence
  chemically synthesized
cagttgtggttttgttgctt

SEQ ID NO: 59176 - DNA, 20 bp, Artificial Sequence
  chemically synthesized
gagcaaattaacacatctcc

SEQ ID NO: 59177 - DNA, 20 bp, Artificial Sequence
  chemically synthesized
ttaacacatctcctggtgcc

SEQ ID NO: 59178 - DNA, 20 bp, Artificial Sequence
  chemically synthesized
atctcctggtgcctggtatg

SEQ ID NO: 59179 - DNA, 20 bp, Artificial Sequence
  chemically synthesized
ggtgcctggtatgcagccat

SEQ ID NO: 59180 - DNA, 20 bp, Artificial Sequence
  chemically synthesized
ctggtatgcagccattggct

SEQ ID NO: 59181 - DNA, 20 bp, Artificial Sequence
  chemically synthesized
tatgcagccattggcttggc

SEQ ID NO: 59182 - DNA, 20 bp, Artificial Sequence
  chemically synthesized
gcagccattggcttggcaag

SEQ ID NO: 59183 - DNA, 20 bp, Artificial Sequence
  chemically synthesized
ttttctccattcctgtccat

SEQ ID NO: 59184 - DNA, 20 bp, Artificial Sequence
  chemically synthesized
ttcctgtccataagacccac

SEQ ID NO: 59185 - DNA, 20 bp, Artificial Sequence
  chemically synthesized
ctgtccataagacccaccag

SEQ ID NO: 59186 - DNA, 20 bp, Artificial Sequence
  chemically synthesized
caccagaagcaatttgcctt

SEQ ID NO: 59187 - DNA, 20 bp, Artificial Sequence
  chemically synthesized
gcaatttgccttcagctgac

SEQ ID NO: 59188 - DNA, 20 bp, Artificial Sequence
  chemically synthesized
caatttgccttcagctgaca

SEQ ID NO: 59189 - DNA, 20 bp, Artificial Sequence
  chemically synthesized
ttgccttcagctgacaaggc

SEQ ID NO: 59190 - DNA, 20 bp, Artificial Sequence
  chemically synthesized
atacctttaccaccctacct

SEQ ID NO: 59191 - DNA, 20 bp, Artificial Sequence
  chemically synthesized
tacctttaccaccctacctc

SEQ ID NO: 59192 - DNA, 20 bp, Artificial Sequence
  chemically synthesized
acctttaccaccctacctca

SEQ ID NO: 59193 - DNA, 20 bp, Artificial Sequence
  chemically synthesized
cctttaccaccctacctcag

SEQ ID NO: 59194 - DNA, 20 bp, Artificial Sequence
  chemically synthesized
tcaggggtgtatcaactctc

SEQ ID NO: 59195 - DNA, 20 bp, Artificial Sequence
  chemically synthesized
ctttgtgtcataatcttatt

SEQ ID NO: 59196 - DNA, 20 bp, Artificial Sequence
  chemically synthesized
ttgtgtcataatcttatttg

SEQ ID NO: 59197 - DNA, 20 bp, Artificial Sequence
  chemically synthesized
gtgtcataatcttatttgga

SEQ ID NO: 59198 - DNA, 20 bp, Artificial Sequence
  chemically synthesized
tgctcgcttttcacttccac

SEQ ID NO: 59199 - DNA, 20 bp, Artificial Sequence
  chemically synthesized
acttccacgagatataacac

SEQ ID NO: 59200 - DNA, 20 bp, Artificial Sequence
  chemically synthesized
attcatgacattatgatgat

SEQ ID NO: 59201 - DNA, 20 bp, Artificial Sequence
  chemically synthesized
gacattatgatgattggata

SEQ ID NO: 59202 - DNA, 20 bp, Artificial Sequence
  chemically synthesized
ttatgatgattggatacagt

SEQ ID NO: 59203 - DNA, 20 bp, Artificial Sequence
  chemically synthesized
gatgattggatacagtgagc

SEQ ID NO: 59204 - DNA, 20 bp, Artificial Sequence
  chemically synthesized
gattggatacagtgagcaag

SEQ ID NO: 59205 - DNA, 20 bp, Artificial Sequence
  chemically synthesized
tggatacagtgagcaagaag

SEQ ID NO: 59206 - DNA, 20 bp, Artificial Sequence
  chemically synthesized
agcaaacacactgaacttat

SEQ ID NO: 59207 - DNA, 20 bp, Artificial Sequence
  chemically synthesized
aacacactgaacttattggt

SEQ ID NO: 59208 - DNA, 20 bp, Artificial Sequence
  chemically synthesized
ttggtgagacatttgtatgc

SEQ ID NO: 59209 - DNA, 20 bp, Artificial Sequence
  chemically synthesized
ggtgagacatttgtatgcca

SEQ ID NO: 59210 - DNA, 20 bp, Artificial Sequence
  chemically synthesized
gtgagacatttgtatgccag

SEQ ID NO: 59211 - DNA, 20 bp, Artificial Sequence
  chemically synthesized
gacatttgtatgccagagga

SEQ ID NO: 59212 - DNA, 20 bp, Artificial Sequence
  chemically synthesized
acatttgtatgccagaggat

SEQ ID NO: 59213 - DNA, 20 bp, Artificial Sequence
  chemically synthesized
cagaggatgggaaataaatc

SEQ ID NO: 59214 - DNA, 20 bp, Artificial Sequence
  chemically synthesized
aaataaatccagctaaaatt

SEQ ID NO: 59215 - DNA, 20 bp, Artificial Sequence
  chemically synthesized
aataaatccagctaaaattt

SEQ ID NO: 59216 - DNA, 20 bp, Artificial Sequence
  chemically synthesized
ataaatccagctaaaattta

SEQ ID NO: 59217 - DNA, 20 bp, Artificial Sequence
  chemically synthesized
aatttagggactttctacct

SEQ ID NO: 59218 - DNA, 20 bp, Artificial Sequence
  chemically synthesized
ttctacctcggtaaaatttc

SEQ ID NO: 59219 - DNA, 20 bp, Artificial Sequence
  chemically synthesized
tctacctcggtaaaatttct

SEQ ID NO: 59220 - DNA, 20 bp, Artificial Sequence
  chemically synthesized
ctacctcggtaaaatttcta

SEQ ID NO: 59221 - DNA, 20 bp, Artificial Sequence
  chemically synthesized
cggtaaaatttctagggttc

SEQ ID NO: 59222 - DNA, 20 bp, Artificial Sequence
  chemically synthesized
taaaatttctagggttccag

SEQ ID NO: 59223 - DNA, 20 bp, Artificial Sequence
  chemically synthesized
ttctagggttccagtggcat

SEQ ID NO: 59224 - DNA, 20 bp, Artificial Sequence
  chemically synthesized
ttccagtggcatgagaccta

SEQ ID NO: 59225 - DNA, 20 bp, Artificial Sequence
  chemically synthesized
ccagtggcatgagacctatg

SEQ ID NO: 59226 - DNA, 20 bp, Artificial Sequence
  chemically synthesized
cctatggagatattccttct

SEQ ID NO: 59227 - DNA, 20 bp, Artificial Sequence
  chemically synthesized
ctatggagatattccttcta

SEQ ID NO: 59228 - DNA, 20 bp, Artificial Sequence
  chemically synthesized
gagatattccttctaaggtg

SEQ ID NO: 59229 - DNA, 20 bp, Artificial Sequence
  chemically synthesized
gaagcataacttgctgcgtt

SEQ ID NO: 59230 - DNA, 20 bp, Artificial Sequence
  chemically synthesized
gtttggcccctcttacaacc

SEQ ID NO: 59231 - DNA, 20 bp, Artificial Sequence
  chemically synthesized
ggcccctcttacaaccaaga

SEQ ID NO: 59232 - DNA, 20 bp, Artificial Sequence
  chemically synthesized
cccctcttacaaccaagaaa

SEQ ID NO: 59233 - DNA, 20 bp, Artificial Sequence
  chemically synthesized
ccctcttacaaccaagaaag

SEQ ID NO: 59234 - DNA, 20 bp, Artificial Sequence
  chemically synthesized
caagaaagaggcacaatgcc

SEQ ID NO: 59235 - DNA, 20 bp, Artificial Sequence
  chemically synthesized
gaaagaggcacaatgcctgg

SEQ ID NO: 59236 - DNA, 20 bp, Artificial Sequence
  chemically synthesized
aaagaggcacaatgcctggt

SEQ ID NO: 59237 - DNA, 20 bp, Artificial Sequence
  chemically synthesized
caatgcctggtgggcctatt

SEQ ID NO: 59238 - DNA, 20 bp, Artificial Sequence
  chemically synthesized
tggtgggcctatttggattt

SEQ ID NO: 59239 - DNA, 20 bp, Artificial Sequence
  chemically synthesized
gtgggcctatttggattttg

SEQ ID NO: 59240 - DNA, 20 bp, Artificial Sequence
  chemically synthesized
tgggcctatttggattttgg

SEQ ID NO: 59241 - DNA, 20 bp, Artificial Sequence
  chemically synthesized
gaggcaacacattcctcgtt

SEQ ID NO: 59242 - DNA, 20 bp, Artificial Sequence
  chemically synthesized
aggcaacacattcctcgttt

SEQ ID NO: 59243 - DNA, 20 bp, Artificial Sequence
  chemically synthesized
ctcgtttgggtgtgttactc

SEQ ID NO: 59244 - DNA, 20 bp, Artificial Sequence
  chemically synthesized
gttactctggcccatttatc

SEQ ID NO: 59245 - DNA, 20 bp, Artificial Sequence
  chemically synthesized
ccatttatcgagtgacctga

SEQ ID NO: 59246 - DNA, 20 bp, Artificial Sequence
  chemically synthesized
catttatcgagtgacctgaa

SEQ ID NO: 59247 - DNA, 20 bp, Artificial Sequence
  chemically synthesized
cgagtgacctgaaaggctgc

SEQ ID NO: 59248 - DNA, 20 bp, Artificial Sequence
  chemically synthesized
cctgaaaggctgccagattt

SEQ ID NO: 59249 - DNA, 20 bp, Artificial Sequence
  chemically synthesized
aaggctgccagatttaagtg

SEQ ID NO: 59250 - DNA, 20 bp, Artificial Sequence
  chemically synthesized
tgccagatttaagtgcagtc

SEQ ID NO: 59251 - DNA, 20 bp, Artificial Sequence
  chemically synthesized
ttaagtgcagtctagaacaa

SEQ ID NO: 59252 - DNA, 20 bp, Artificial Sequence
  chemically synthesized
agtgcagtctagaacaaaag

SEQ ID NO: 59253 - DNA, 20 bp, Artificial Sequence
  chemically synthesized
gtgcagtctagaacaaaaga

SEQ ID NO: 59254 - DNA, 20 bp, Artificial Sequence
  chemically synthesized
aacaaaagaaggctctgaaa

SEQ ID NO: 59255 - DNA, 20 bp, Artificial Sequence
  chemically synthesized
acaaaagaaggctctgaaac

SEQ ID NO: 59256 - DNA, 20 bp, Artificial Sequence
  chemically synthesized
agaaggctctgaaacaggtc

SEQ ID NO: 59257 - DNA, 20 bp, Artificial Sequence
  chemically synthesized
gaaggctctgaaacaggtcc

SEQ ID NO: 59258 - DNA, 20 bp, Artificial Sequence
  chemically synthesized
acaggtccaggctgctgtga

SEQ ID NO: 59259 - DNA, 20 bp, Artificial Sequence
  chemically synthesized
gtgaaagctgctctgccatt

SEQ ID NO: 59260 - DNA, 20 bp, Artificial Sequence
  chemically synthesized
tgaaagctgctctgccattt

SEQ ID NO: 59261 - DNA, 20 bp, Artificial Sequence
  chemically synthesized
atttgggccacatgaccccg

SEQ ID NO: 59262 - DNA, 20 bp, Artificial Sequence
  chemically synthesized
acatgaccccgcagatccaa

SEQ ID NO: 59263 - DNA, 20 bp, Artificial Sequence
  chemically synthesized
ccgcagatccaatggtgctt

SEQ ID NO: 59264 - DNA, 20 bp, Artificial Sequence
  chemically synthesized
cgcagatccaatggtgcttg

SEQ ID NO: 59265 - DNA, 20 bp, Artificial Sequence
  chemically synthesized
tccaatggtgcttgaggtgt

SEQ ID NO: 59266 - DNA, 20 bp, Artificial Sequence
  chemically synthesized
aatggtgcttgaggtgtcag

SEQ ID NO: 59267 - DNA, 20 bp, Artificial Sequence
  chemically synthesized
ggtgcttgaggtgtcagtgg

SEQ ID NO: 59268 - DNA, 20 bp, Artificial Sequence
  chemically synthesized
cttgaggtgtcagtggcaga

SEQ ID NO: 59269 - DNA, 20 bp, Artificial Sequence
  chemically synthesized
ttgaggtgtcagtggcagat

SEQ ID NO: 59270 - DNA, 20 bp, Artificial Sequence
  chemically synthesized
tgaggtgtcagtggcagata

SEQ ID NO: 59271 - DNA, 20 bp, Artificial Sequence
  chemically synthesized
tggcagatagggatgctgtt

SEQ ID NO: 59272 - DNA, 20 bp, Artificial Sequence
  chemically synthesized
gcagatagggatgctgtttg

SEQ ID NO: 59273 - DNA, 20 bp, Artificial Sequence
  chemically synthesized
gggatgctgtttggagcctt

SEQ ID NO: 59274 - DNA, 20 bp, Artificial Sequence
  chemically synthesized
atgctgtttggagcctttgg

SEQ ID NO: 59275 - DNA, 20 bp, Artificial Sequence
  chemically synthesized
tgctgtttggagcctttggc

SEQ ID NO: 59276 - DNA, 20 bp, Artificial Sequence
  chemically synthesized
gagcctttggcaggccccca

SEQ ID NO: 59277 - DNA, 20 bp, Artificial Sequence
  chemically synthesized
agcctttggcaggcccccat

SEQ ID NO: 59278 - DNA, 20 bp, Artificial Sequence
  chemically synthesized
aggcccccataggtgaatca

SEQ ID NO: 59279 - DNA, 20 bp, Artificial Sequence
  chemically synthesized
cccccataggtgaatcacag

SEQ ID NO: 59280 - DNA, 20 bp, Artificial Sequence
  chemically synthesized
cccataggtgaatcacagtg

SEQ ID NO: 59281 - DNA, 20 bp, Artificial Sequence
  chemically synthesized
tgaatcacagtggagacctc

SEQ ID NO: 59282 - DNA, 20 bp, Artificial Sequence
  chemically synthesized
gaatcacagtggagacctct

SEQ ID NO: 59283 - DNA, 20 bp, Artificial Sequence
  chemically synthesized
agtggagacctctaggattt

SEQ ID NO: 59284 - DNA, 20 bp, Artificial Sequence
  chemically synthesized
tggagacctctaggattttg

SEQ ID NO: 59285 - DNA, 20 bp, Artificial Sequence
  chemically synthesized
gacctctaggattttggagc

SEQ ID NO: 59286 - DNA, 20 bp, Artificial Sequence
  chemically synthesized
acctctaggattttggagca

SEQ ID NO: 59287 - DNA, 20 bp, Artificial Sequence
  chemically synthesized
gcaaggccctgccacttctg

SEQ ID NO: 59288 - DNA, 20 bp, Artificial Sequence
  chemically synthesized
cagataactactctcctttt

SEQ ID NO: 59289 - DNA, 20 bp, Artificial Sequence
  chemically synthesized
gataactactctccttttga

SEQ ID NO: 59290 - DNA, 20 bp, Artificial Sequence
  chemically synthesized
actactctccttttgagaga

SEQ ID NO: 59291 - DNA, 20 bp, Artificial Sequence
  chemically synthesized
tccttttgagagacagctat

SEQ ID NO: 59292 - DNA, 20 bp, Artificial Sequence
  chemically synthesized
gacagctattggtctgttat

SEQ ID NO: 59293 - DNA, 20 bp, Artificial Sequence
  chemically synthesized
acagctattggtctgttatt

SEQ ID NO: 59294 - DNA, 20 bp, Artificial Sequence
  chemically synthesized
attggtctgttattgggctt

SEQ ID NO: 59295 - DNA, 20 bp, Artificial Sequence
  chemically synthesized
ggtctgttattgggctttgg

SEQ ID NO: 59296 - DNA, 20 bp, Artificial Sequence
  chemically synthesized
ggtaactgaacgtttgactg

SEQ ID NO: 59297 - DNA, 20 bp, Artificial Sequence
  chemically synthesized
gtaactgaacgtttgactgt

SEQ ID NO: 59298 - DNA, 20 bp, Artificial Sequence
  chemically synthesized
acgtttgactgtgggtcata

SEQ ID NO: 59299 - DNA, 20 bp, Artificial Sequence
  chemically synthesized
tgaacctgcctatcatgaac

SEQ ID NO: 59300 - DNA, 20 bp, Artificial Sequence
  chemically synthesized
tggttgctttctgacccatc

SEQ ID NO: 59301 - DNA, 20 bp, Artificial Sequence
  chemically synthesized
ttctgacccatctagccatg

SEQ ID NO: 59302 - DNA, 20 bp, Artificial Sequence
  chemically synthesized
tgacccatctagccatgaag

SEQ ID NO: 59303 - DNA, 20 bp, Artificial Sequence
  chemically synthesized
gacccatctagccatgaagt

SEQ ID NO: 59304 - DNA, 20 bp, Artificial Sequence
  chemically synthesized
catctagccatgaagtgggt

SEQ ID NO: 59305 - DNA, 20 bp, Artificial Sequence
  chemically synthesized
agccatgaagtgggtcagca

SEQ ID NO: 59306 - DNA, 20 bp, Artificial Sequence
  chemically synthesized
catgaagtgggtcagcacag

SEQ ID NO: 59307 - DNA, 20 bp, Artificial Sequence
  chemically synthesized
ggcatttcatcatcaaattg

SEQ ID NO: 59308 - DNA, 20 bp, Artificial Sequence
  chemically synthesized
atttcatcatcaaattgaag

SEQ ID NO: 59309 - DNA, 20 bp, Artificial Sequence
  chemically synthesized
tgaagtggtgtgtatgtgat

SEQ ID NO: 59310 - DNA, 20 bp, Artificial Sequence
  chemically synthesized
gaagtggtgtgtatgtgatc

SEQ ID NO: 59311 - DNA, 20 bp, Artificial Sequence
  chemically synthesized
gtgtgtatgtgatcgggctt

SEQ ID NO: 59312 - DNA, 20 bp, Artificial Sequence
  chemically synthesized
tgtatgtgatcgggcttgag

SEQ ID NO: 59313 - DNA, 20 bp, Artificial Sequence
  chemically synthesized
gtatgtgatcgggcttgagc

SEQ ID NO: 59314 - DNA, 20 bp, Artificial Sequence
  chemically synthesized
tcgggcttgagcaggtcctg

SEQ ID NO: 59315 - DNA, 20 bp, Artificial Sequence
  chemically synthesized
cgggcttgagcaggtcctga

SEQ ID NO: 59316 - DNA, 20 bp, Artificial Sequence
  chemically synthesized
tgagcaggtcctgaaggcac

SEQ ID NO: 59317 - DNA, 20 bp, Artificial Sequence
  chemically synthesized
caggtcctgaaggcacaagt

SEQ ID NO: 59318 - DNA, 20 bp, Artificial Sequence
  chemically synthesized
aaggcacaagtaagttacat

SEQ ID NO: 59319 - DNA, 20 bp, Artificial Sequence
  chemically synthesized
aggcacaagtaagttacata

SEQ ID NO: 59320 - DNA, 20 bp, Artificial Sequence
  chemically synthesized
cacaagtaagttacataagg

SEQ ID NO: 59321 - DNA, 20 bp, Artificial Sequence
  chemically synthesized
aagtaagttacataaggaag

SEQ ID NO: 59322 - DNA, 20 bp, Artificial Sequence
  chemically synthesized
ccaccctgccttccctcccc

SEQ ID NO: 59323 - DNA, 20 bp, Artificial Sequence
  chemically synthesized
cctcccccagcctgcaccaa

SEQ ID NO: 59324 - DNA, 20 bp, Artificial Sequence
  chemically synthesized
agcctgcaccaatggcctca

SEQ ID NO: 59325 - DNA, 20 bp, Artificial Sequence
  chemically synthesized
gcctgcaccaatggcctcat

SEQ ID NO: 59326 - DNA, 20 bp, Artificial Sequence
  chemically synthesized
cctgcaccaatggcctcatg

SEQ ID NO: 59327 - DNA, 20 bp, Artificial Sequence
  chemically synthesized
tgcaccaatggcctcatggg

SEQ ID NO: 59328 - DNA, 20 bp, Artificial Sequence
  chemically synthesized
catggggagttccctatgat

SEQ ID NO: 59329 - DNA, 20 bp, Artificial Sequence
  chemically synthesized
agttccctatgatcagttga

SEQ ID NO: 59330 - DNA, 20 bp, Artificial Sequence
  chemically synthesized
ttccctatgatcagttgaca

SEQ ID NO: 59331 - DNA, 20 bp, Artificial Sequence
  chemically synthesized
tccctatgatcagttgacag

SEQ ID NO: 59332 - DNA, 20 bp, Artificial Sequence
  chemically synthesized
ctatgatcagttgacagagg

SEQ ID NO: 59333 - DNA, 20 bp, Artificial Sequence
  chemically synthesized
tatgatcagttgacagagga

SEQ ID NO: 59334 - DNA, 20 bp, Artificial Sequence
  chemically synthesized
atgatcagttgacagaggaa

SEQ ID NO: 59335 - DNA, 20 bp, Artificial Sequence
  chemically synthesized
atcagttgacagaggaaggg

SEQ ID NO: 59336 - DNA, 20 bp, Artificial Sequence
  chemically synthesized
tgacagaggaagggaagact

SEQ ID NO: 59337 - DNA, 20 bp, Artificial Sequence
  chemically synthesized
gacagaggaagggaagacta

SEQ ID NO: 59338 - DNA, 20 bp, Artificial Sequence
  chemically synthesized
aggaagggaagactaaggac

SEQ ID NO: 59339 - DNA, 20 bp, Artificial Sequence
  chemically synthesized
gaagactaaggactggttca

SEQ ID NO: 59340 - DNA, 20 bp, Artificial Sequence
  chemically synthesized
actaaggactggttcataga

SEQ ID NO: 59341 - DNA, 20 bp, Artificial Sequence
  chemically synthesized
agatggttctgcacgatatg

SEQ ID NO: 59342 - DNA, 20 bp, Artificial Sequence
  chemically synthesized
gatggttctgcacgatatgc

SEQ ID NO: 59343 - DNA, 20 bp, Artificial Sequence
  chemically synthesized
gatatgcaggcaccacccga

SEQ ID NO: 59344 - DNA, 20 bp, Artificial Sequence
  chemically synthesized
atgcaggcaccacccgaaag

SEQ ID NO: 59345 - DNA, 20 bp, Artificial Sequence
  chemically synthesized
aggcaccacccgaaagtgga

SEQ ID NO: 59346 - DNA, 20 bp, Artificial Sequence
  chemically synthesized
cacccgaaagtggacagctg

SEQ ID NO: 59347 - DNA, 20 bp, Artificial Sequence
  chemically synthesized
tgcatgtgtacacttgtgct

SEQ ID NO: 59348 - DNA, 20 bp, Artificial Sequence
  chemically synthesized
tttcctttatcatgtgacct

SEQ ID NO: 59349 - DNA, 20 bp, Artificial Sequence
  chemically synthesized
atcatgtgaccttagattta

SEQ ID NO: 59350 - DNA, 20 bp, Artificial Sequence
  chemically synthesized
tagatttatggacttcacat

SEQ ID NO: 59351 - DNA, 20 bp, Artificial Sequence
  chemically synthesized
tggacttcacatcagcattt

SEQ ID NO: 59352 - DNA, 20 bp, Artificial Sequence
  chemically synthesized
acatcagcatttaagcattt

SEQ ID NO: 59353 - DNA, 20 bp, Artificial Sequence
  chemically synthesized
catttaagtgttgttcatat

SEQ ID NO: 59354 - DNA, 20 bp, Artificial Sequence
  chemically synthesized
taaccttatgtaataacttt

SEQ ID NO: 59355 - DNA, 20 bp, Artificial Sequence
  chemically synthesized
ttatgtaataacttttggtt

SEQ ID NO: 59356 - DNA, 20 bp, Artificial Sequence
  chemically synthesized
tatgtaataacttttggttt

SEQ ID NO: 59357 - DNA, 20 bp, Artificial Sequence
  chemically synthesized
atgtaataacttttggtttg

SEQ ID NO: 59358 - DNA, 20 bp, Artificial Sequence
  chemically synthesized
ataacttttggtttggggat

SEQ ID NO: 59359 - DNA, 20 bp, Artificial Sequence
  chemically synthesized
tttggggattggtgcgtttc

SEQ ID NO: 59360 - DNA, 20 bp, Artificial Sequence
  chemically synthesized
tggtgcgtttctggttgtat

SEQ ID NO: 59361 - DNA, 20 bp, Artificial Sequence
  chemically synthesized
ggtgcgtttctggttgtatg

SEQ ID NO: 59362 - DNA, 20 bp, Artificial Sequence
  chemically synthesized
cgtttctggttgtatgagga

SEQ ID NO: 59363 - DNA, 20 bp, Artificial Sequence
  chemically synthesized
tgaggatagttgtattatat

SEQ ID NO: 59364 - DNA, 20 bp, Artificial Sequence
  chemically synthesized
gaggatagttgtattatatt

SEQ ID NO: 59365 - DNA, 20 bp, Artificial Sequence
  chemically synthesized
cttattattgtctttatttg

SEQ ID NO: 59366 - DNA, 20 bp, Artificial Sequence
  chemically synthesized
ttgaagattatgtatgattt

SEQ ID NO: 59367 - DNA, 20 bp, Artificial Sequence
  chemically synthesized
tgaagattatgtatgatttc

SEQ ID NO: 59368 - DNA, 20 bp, Artificial Sequence
  chemically synthesized
atgatttcaggatgtgtgta

SEQ ID NO: 59369 - DNA, 20 bp, Artificial Sequence
  chemically synthesized
tgatttcaggatgtgtgtat

SEQ ID NO: 59370 - DNA, 20 bp, Artificial Sequence
  chemically synthesized
caggatgtgtgtatgggttc

SEQ ID NO: 59371 - DNA, 20 bp, Artificial Sequence
  chemically synthesized
gtgtatgggttcaagttgac

SEQ ID NO: 59372 - DNA, 20 bp, Artificial Sequence
  chemically synthesized
tgtatgggttcaagttgaca

SEQ ID NO: 59373 - DNA, 20 bp, Artificial Sequence
  chemically synthesized
tatgggttcaagttgacaag

SEQ ID NO: 59374 - DNA, 20 bp, Artificial Sequence
  chemically synthesized
ggttcaagttgacaaggagt

SEQ ID NO: 59375 - DNA, 20 bp, Artificial Sequence
  chemically synthesized
acaaggagttggacttgtga

SEQ ID NO: 59376 - DNA, 20 bp, Artificial Sequence
  chemically synthesized
gttaatactgtcaacttgat

SEQ ID NO: 59377 - DNA, 20 bp, Artificial Sequence
  chemically synthesized
tgtcaacttgattggattga

SEQ ID NO: 59378 - DNA, 20 bp, Artificial Sequence
  chemically synthesized
tgattggattgaaagatgca

SEQ ID NO: 59379 - DNA, 20 bp, Artificial Sequence
  chemically synthesized
aagatgcaaagtattaatct

SEQ ID NO: 59380 - DNA, 20 bp, Artificial Sequence
  chemically synthesized
ttaatctcggttatgtctgt

SEQ ID NO: 59381 - DNA, 20 bp, Artificial Sequence
  chemically synthesized
taatctcggttatgtctgtg

SEQ ID NO: 59382 - DNA, 20 bp, Artificial Sequence
  chemically synthesized
aatctcggttatgtctgtga

SEQ ID NO: 59383 - DNA, 20 bp, Artificial Sequence
  chemically synthesized
cggttatgtctgtgagggtg

SEQ ID NO: 59384 - DNA, 20 bp, Artificial Sequence
  chemically synthesized
tgtctgtgagggtgtggcaa

SEQ ID NO: 59385 - DNA, 20 bp, Artificial Sequence
  chemically synthesized
gtctgtgagggtgtggcaaa

SEQ ID NO: 59386 - DNA, 20 bp, Artificial Sequence
  chemically synthesized
ctgtgagggtgtggcaaaag

SEQ ID NO: 59387 - DNA, 20 bp, Artificial Sequence
  chemically synthesized
gcaaaaggagattaacattt

SEQ ID NO: 59388 - DNA, 20 bp, Artificial Sequence
  chemically synthesized
aaggagattaacatttgagt

SEQ ID NO: 59389 - DNA, 20 bp, Artificial Sequence
  chemically synthesized
gagattaacatttgagtcag

SEQ ID NO: 59390 - DNA, 20 bp, Artificial Sequence
  chemically synthesized
agattaacatttgagtcagt

SEQ ID NO: 59391 - DNA, 20 bp, Artificial Sequence
  chemically synthesized
taacatttgagtcagtgggc

SEQ ID NO: 59392 - DNA, 20 bp, Artificial Sequence
  chemically synthesized
aacatttgagtcagtgggct

SEQ ID NO: 59393 - DNA, 20 bp, Artificial Sequence
  chemically synthesized
tgtacacatgcatttagaaa

SEQ ID NO: 59394 - DNA, 20 bp, Artificial Sequence
  chemically synthesized
agtgctgcagctgtccactt

SEQ ID NO: 59395 - DNA, 20 bp, Artificial Sequence
  chemically synthesized
gcaggctgggggagggaagg

SEQ ID NO: 59396 - DNA, 20 bp, Artificial Sequence
  chemically synthesized
gggagggaaggcagggtggc

SEQ ID NO: 59397 - DNA, 20 bp, Artificial Sequence
  chemically synthesized
ctgacccacttcatggctag

SEQ ID NO: 59398 - DNA, 20 bp, Artificial Sequence
  chemically synthesized
caatagctgtctctcaaaag

SEQ ID NO: 59399 - DNA, 20 bp, Artificial Sequence
  chemically synthesized
cactgacacctcaagcacca

SEQ ID NO: 59400 - DNA, 20 bp, Artificial Sequence
  chemically synthesized
ctcaagcaccattggatctg

SEQ ID NO: 59401 - DNA, 20 bp, Artificial Sequence
  chemically synthesized
aggtcactcgataaatgggc

SEQ ID NO: 59402 - DNA, 20 bp, Artificial Sequence
  chemically synthesized
cagagtaacacacccaaacg

SEQ ID NO: 59403 - DNA, 20 bp, Artificial Sequence
  chemically synthesized
aagttatgcttcaccttaga

SEQ ID NO: 59404 - DNA, 20 bp, Artificial Sequence
  chemically synthesized
agaaagtccctaaattttag

SEQ ID NO: 59405 - DNA, 20 bp, Artificial Sequence
  chemically synthesized
tatccaatcatcataatgtc

SEQ ID NO: 59406 - DNA, 20 bp, Artificial Sequence
  chemically synthesized
aagattatgacacaaagctg

SEQ ID NO: 59407 - DNA, 20 bp, Artificial Sequence
  chemically synthesized
gagttgatacacccctgagg

SEQ ID NO: 59408 - DNA, 20 bp, Artificial Sequence
  chemically synthesized
ctgaaggcaaattgcttctg

SEQ ID NO: 59409 - DNA, 20 bp, Artificial Sequence
  chemically synthesized
ttctggtgggtcttatggac

SEQ ID NO: 59410 - DNA, 20 bp, Artificial Sequence
  chemically synthesized
actggtagagcagctgcaat

SEQ ID NO: 59411 - DNA, 20 bp, Artificial Sequence
  chemically synthesized
cctctgcacaggtcaaatgg

SEQ ID NO: 59412 - DNA, 20 bp, Artificial Sequence
  chemically synthesized
gtcaaatgggagagttgaac

SEQ ID NO: 59413 - DNA, 20 bp, Artificial Sequence
  chemically synthesized
gagttgaacagggatgtggt

SEQ ID NO: 59414 - DNA, 20 bp, Artificial Sequence
  chemically synthesized
ctaatcacttcagtccctcc

SEQ ID NO: 59415 - DNA, 20 bp, Artificial Sequence
  chemically synthesized
cacttcagtccctccaggga

SEQ ID NO: 59416 - DNA, 20 bp, Artificial Sequence
  chemically synthesized
tggcactgggaaaatgacca

SEQ ID NO: 59417 - DNA, 20 bp, Artificial Sequence
  chemically synthesized
tggggaaccacaataacgtt

SEQ ID NO: 59418 - DNA, 20 bp, Artificial Sequence
  chemically synthesized
caataacgttttgggtaccc

SEQ ID NO: 59419 - DNA, 20 bp, Artificial Sequence
  chemically synthesized
ggccagaggtctccttaggg

SEQ ID NO: 59420 - DNA, 20 bp, Artificial Sequence
  chemically synthesized
ccttagggaaggatgggaga

SEQ ID NO: 59421 - DNA, 20 bp, Artificial Sequence
  chemically synthesized
ctagtggtgtccttcctcaa

SEQ ID NO: 59422 - DNA, 20 bp, Artificial Sequence
  chemically synthesized
tccagcctccccttcattca

SEQ ID NO: 59423 - DNA, 20 bp, Artificial Sequence
  chemically synthesized
gttctggaactgtaacaggt

SEQ ID NO: 59424 - DNA, 20 bp, Artificial Sequence
  chemically synthesized
tttgtttatataaatcaagt

SEQ ID NO: 59425 - DNA, 20 bp, Artificial Sequence
  chemically synthesized
agccaatgccagagctctac

SEQ ID NO: 59426 - DNA, 20 bp, Artificial Sequence
  chemically synthesized
acacttggcccctgccacct

SEQ ID NO: 59427 - DNA, 20 bp, Artificial Sequence
  chemically synthesized
attgtatttaaattttgtag

SEQ ID NO: 59428 - DNA, 20 bp, Artificial Sequence
  chemically synthesized
tatttcacaaagcttcggcc

SEQ ID NO: 59429 - DNA, 20 bp, Artificial Sequence
  chemically synthesized
atcttctggaccctcccagc

SEQ ID NO: 59430 - DNA, 20 bp, Artificial Sequence
  chemically synthesized
tctggaccctcccagctggg

SEQ ID NO: 59431 - DNA, 20 bp, Artificial Sequence
  chemically synthesized
atcctaatctccctaagcct

SEQ ID NO: 59432 - DNA, 20 bp, Artificial Sequence
  chemically synthesized
tttttttttttttttggaaa

SEQ ID NO: 59433 - DNA, 20 bp, Artificial Sequence
  chemically synthesized
gtcttgctctgttaccaggc

SEQ ID NO: 59434 - DNA, 20 bp, Artificial Sequence
  chemically synthesized
ttttgtatttttagcagaga

SEQ ID NO: 59435 - DNA, 20 bp, Artificial Sequence
  chemically synthesized
tggggtttcaccattttagc

SEQ ID NO: 59436 - DNA, 20 bp, Artificial Sequence
  chemically synthesized
gcccccgcctcccaaggtgc

SEQ ID NO: 59437 - DNA, 20 bp, Artificial Sequence
  chemically synthesized
ccgagctgcaacattaaatg

SEQ ID NO: 59438 - DNA, 20 bp, Artificial Sequence
  chemically synthesized
gaaagcttaagcagttcttt

SEQ ID NO: 59439 - DNA, 20 bp, Artificial Sequence
  chemically synthesized
agagtataatgcacctcctc

SEQ ID NO: 59440 - DNA, 20 bp, Artificial Sequence
  chemically synthesized
cctcacctctggggcccgca

SEQ ID NO: 59441 - DNA, 20 bp, Artificial Sequence
  chemically synthesized
tagaagcattcaggggcatt

SEQ ID NO: 59442 - DNA, 20 bp, Artificial Sequence
  chemically synthesized
cattaggggtgcctcttgag

SEQ ID NO: 59443 - DNA, 20 bp, Artificial Sequence
  chemically synthesized
cactgttgcctcaagcagtg

SEQ ID NO: 59444 - DNA, 20 bp, Artificial Sequence
  chemically synthesized
gtggaaaggctaatggcagc

SEQ ID NO: 59445 - DNA, 20 bp, Artificial Sequence
  chemically synthesized
atggcagcacgggtcaggga

SEQ ID NO: 59446 - DNA, 20 bp, Artificial Sequence
  chemically synthesized
gaggggatgttaccactact

SEQ ID NO: 59447 - DNA, 20 bp, Artificial Sequence
  chemically synthesized
ttctggcaaaaaagtttcat

SEQ ID NO: 59448 - DNA, 20 bp, Artificial Sequence
  chemically synthesized
ctcagtgtcctcagcttcat

SEQ ID NO: 59449 - DNA, 20 bp, Artificial Sequence
  chemically synthesized
cacatccccactccaagttc

SEQ ID NO: 59450 - DNA, 20 bp, Artificial Sequence
  chemically synthesized
aatttcaactctttctctac

SEQ ID NO: 59451 - DNA, 20 bp, Artificial Sequence
  chemically synthesized
atagtcaaaggtattatgta

SEQ ID NO: 59452 - DNA, 20 bp, Artificial Sequence
  chemically synthesized
ctccttgcctctcataagtg

SEQ ID NO: 59453 - DNA, 20 bp, Artificial Sequence
  chemically synthesized
gttctccatactattagaag

SEQ ID NO: 59454 - DNA, 20 bp, Artificial Sequence
  chemically synthesized
agaagtcccaaaaccaatga

SEQ ID NO: 59455 - DNA, 20 bp, Artificial Sequence
  chemically synthesized
gtatgaaaatctgtattagt

SEQ ID NO: 59456 - DNA, 20 bp, Artificial Sequence
  chemically synthesized
atatatgagagagagagaga

SEQ ID NO: 59457 - DNA, 20 bp, Artificial Sequence
  chemically synthesized
tgtatatatgtgtatatata

SEQ ID NO: 59458 - DNA, 20 bp, Artificial Sequence
  chemically synthesized
agtcccacagctgaagaact

SEQ ID NO: 59459 - DNA, 20 bp, Artificial Sequence
  chemically synthesized
gtccgatgttcaagagcagg

SEQ ID NO: 59460 - DNA, 20 bp, Artificial Sequence
  chemically synthesized
ggcagcaggggcaggggcct

SEQ ID NO: 59461 - DNA, 20 bp, Artificial Sequence
  chemically synthesized
aggggcctcagggtgcttgc

SEQ ID NO: 59462 - DNA, 20 bp, Artificial Sequence
  chemically synthesized
acacactggcctcttttcca

SEQ ID NO: 59463 - DNA, 20 bp, Artificial Sequence
  chemically synthesized
atagggtggctggggcacac

SEQ ID NO: 59464 - DNA, 20 bp, Artificial Sequence
  chemically synthesized
tggctggggcacactggggt

SEQ ID NO: 59465 - DNA, 20 bp, Artificial Sequence
  chemically synthesized
tggggtgtgagtaaagcact

SEQ ID NO: 59466 - DNA, 20 bp, Artificial Sequence
  chemically synthesized
agcttcaccccacaaaaaca

SEQ ID NO: 59467 - DNA, 20 bp, Artificial Sequence
  chemically synthesized
cagccagtggaaatgttcaa

SEQ ID NO: 59468 - DNA, 20 bp, Artificial Sequence
  chemically synthesized
gccaggagccttgcctggtg

SEQ ID NO: 59469 - DNA, 20 bp, Artificial Sequence
  chemically synthesized
agctcacaagaaagagaaac

SEQ ID NO: 59470 - DNA, 20 bp, Artificial Sequence
  chemically synthesized
gctgaaatggcagaggggct

SEQ ID NO: 59471 - DNA, 20 bp, Artificial Sequence
  chemically synthesized
gaggggctgtgggttgtctc

SEQ ID NO: 59472 - DNA, 20 bp, Artificial Sequence
  chemically synthesized
ctaaaatgttcaggcagggc

SEQ ID NO: 59473 - DNA, 20 bp, Artificial Sequence
  chemically synthesized
tggctgtgctctgcccagtg

SEQ ID NO: 59474 - DNA, 20 bp, Artificial Sequence
  chemically synthesized
acactgtgctggaggtccgt

SEQ ID NO: 59475 - DNA, 20 bp, Artificial Sequence
  chemically synthesized
tgagcccatactttaatctc

SEQ ID NO: 59476 - DNA, 20 bp, Artificial Sequence
  chemically synthesized
gtggtaaggaagaaagtaca

SEQ ID NO: 59477 - DNA, 20 bp, Artificial Sequence
  chemically synthesized
caatattgcaaatcattatt

SEQ ID NO: 59478 - DNA, 20 bp, Artificial Sequence
  chemically synthesized
ctgtgatacaggtgtttgat

SEQ ID NO: 59479 - DNA, 20 bp, Artificial Sequence
  chemically synthesized
actgcaaccgtgtatctctt

SEQ ID NO: 59480 - DNA, 20 bp, Artificial Sequence
  chemically synthesized
tcatgtctagcatgcaggac

SEQ ID NO: 59481 - DNA, 20 bp, Artificial Sequence
  chemically synthesized
tgcaggacttgggtaatctc

SEQ ID NO: 59482 - DNA, 20 bp, Artificial Sequence
  chemically synthesized
ctaaccataaaatcttaaat

SEQ ID NO: 59483 - DNA, 20 bp, Artificial Sequence
  chemically synthesized
tgacagttgataagcatctt

SEQ ID NO: 59484 - DNA, 20 bp, Artificial Sequence
  chemically synthesized
agttacaaaaatgttggtgc

SEQ ID NO: 59485 - DNA, 20 bp, Artificial Sequence
  chemically synthesized
gttggtgcatggatgatgtt

SEQ ID NO: 59486 - DNA, 20 bp, Artificial Sequence
  chemically synthesized
aattaagcaaaaaaaaaatg

SEQ ID NO: 59487 - DNA, 20 bp, Artificial Sequence
  chemically synthesized
acacaccactattagttggg

SEQ ID NO: 59488 - DNA, 20 bp, Artificial Sequence
  chemically synthesized
ctttctgcctggttgtggca

SEQ ID NO: 59489 - DNA, 20 bp, Artificial Sequence
  chemically synthesized
acaaaatgtagtgattttca

SEQ ID NO: 59490 - DNA, 20 bp, Artificial Sequence
  chemically synthesized
tgaagatagccaagcttcca

SEQ ID NO: 59491 - DNA, 20 bp, Artificial Sequence
  chemically synthesized
ggacaaccttgaccactttg

SEQ ID NO: 59492 - DNA, 20 bp, Artificial Sequence
  chemically synthesized
tggtgggggccacatgcaga

SEQ ID NO: 59493 - DNA, 20 bp, Artificial Sequence
  chemically synthesized
gggggccacatgcagatgga

SEQ ID NO: 59494 - DNA, 20 bp, Artificial Sequence
  chemically synthesized
catgcagatggagtgggtta

SEQ ID NO: 59495 - DNA, 20 bp, Artificial Sequence
  chemically synthesized
agagtgactagaagagcagt

SEQ ID NO: 59496 - DNA, 20 bp, Artificial Sequence
  chemically synthesized
tgaaagcagcgagacttcta

SEQ ID NO: 59497 - DNA, 20 bp, Artificial Sequence
  chemically synthesized
agcgagacttctagggaata

SEQ ID NO: 59498 - DNA, 20 bp, Artificial Sequence
  chemically synthesized
aaggcctgtcctgacctcct

SEQ ID NO: 59499 - DNA, 20 bp, Artificial Sequence
  chemically synthesized
catgagggcagggcaaggag

SEQ ID NO: 59500 - DNA, 20 bp, Artificial Sequence
  chemically synthesized
atatgctctatgctggaaaa

SEQ ID NO: 59501 - DNA, 20 bp, Artificial Sequence
  chemically synthesized
tttgaactctcttttccagg

SEQ ID NO: 59502 - DNA, 20 bp, Artificial Sequence
  chemically synthesized
ttttccaggaagagttgtgc

SEQ ID NO: 59503 - DNA, 20 bp, Artificial Sequence
  chemically synthesized
ttaataaggtgcttcctaca

SEQ ID NO: 59504 - DNA, 20 bp, Artificial Sequence
  chemically synthesized
gagttcagttaaacattttg

SEQ ID NO: 59505 - DNA, 20 bp, Artificial Sequence
  chemically synthesized
tgctaggaaatatcccaaaa

SEQ ID NO: 59506 - DNA, 20 bp, Artificial Sequence
  chemically synthesized
tccagggctcatatggcaat

SEQ ID NO: 59507 - DNA, 20 bp, Artificial Sequence
  chemically synthesized
atatggcaatggggatttaa

SEQ ID NO: 59508 - DNA, 20 bp, Artificial Sequence
  chemically synthesized
atgtattttattaatggtgt

SEQ ID NO: 59509 - DNA, 20 bp, Artificial Sequence
  chemically synthesized
tttcttcctcactgtggtgt

SEQ ID NO: 59510 - DNA, 20 bp, Artificial Sequence
  chemically synthesized
tgtaaaagacttagcaattt

SEQ ID NO: 59511 - DNA, 20 bp, Artificial Sequence
  chemically synthesized
ctttccaaaagagcttatca

SEQ ID NO: 59512 - DNA, 20 bp, Artificial Sequence
  chemically synthesized
agagaagtttgttctagcct

SEQ ID NO: 59513 - DNA, 20 bp, Artificial Sequence
  chemically synthesized
tagcctttgggtgtagcctg

SEQ ID NO: 59514 - DNA, 20 bp, Artificial Sequence
  chemically synthesized
ctagtttccatgggctgaaa

SEQ ID NO: 59515 - DNA, 20 bp, Artificial Sequence
  chemically synthesized
gtattttctttgatattttc

SEQ ID NO: 59516 - DNA, 20 bp, Artificial Sequence
  chemically synthesized
tgtgcttcaagatggaactc

SEQ ID NO: 59517 - DNA, 20 bp, Artificial Sequence
  chemically synthesized
ggcaactgctcaactacctg

SEQ ID NO: 59518 - DNA, 20 bp, Artificial Sequence
  chemically synthesized
gcccaagctagcatggaccc

SEQ ID NO: 59519 - DNA, 20 bp, Artificial Sequence
  chemically synthesized
ccagacttctctcttcttaa

SEQ ID NO: 59520 - DNA, 20 bp, Artificial Sequence
  chemically synthesized
aacctgctcttcagttacat

SEQ ID NO: 59521 - DNA, 20 bp, Artificial Sequence
  chemically synthesized
tttctttatttccttgattt

SEQ ID NO: 59522 - DNA, 20 bp, Artificial Sequence
  chemically synthesized
gatttctttgtttataaaat

SEQ ID NO: 59523 - DNA, 20 bp, Artificial Sequence
  chemically synthesized
taacccactcaacaaatacc

SEQ ID NO: 59524 - DNA, 20 bp, Artificial Sequence
  chemically synthesized
acaaataccctgagtatttg

SEQ ID NO: 59525 - DNA, 20 bp, Artificial Sequence
  chemically synthesized
atgcgtatatcatctggcaa

SEQ ID NO: 59526 - DNA, 20 bp, Artificial Sequence
  chemically synthesized
tggatgtgtataatttctcc

SEQ ID NO: 59527 - DNA, 20 bp, Artificial Sequence
  chemically synthesized
ccataacaaagagagaaatg

SEQ ID NO: 59528 - DNA, 20 bp, Artificial Sequence
  chemically synthesized
caaggaaccaaacatattca

SEQ ID NO: 59529 - DNA, 20 bp, Artificial Sequence
  chemically synthesized
gaaattaaacttattttttt

SEQ ID NO: 59530 - DNA, 20 bp, Artificial Sequence
  chemically synthesized
catatacaagattttgaact

SEQ ID NO: 59531 - DNA, 20 bp, Artificial Sequence
  chemically synthesized
gattttgaactgggaatttc

SEQ ID NO: 59532 - DNA, 20 bp, Artificial Sequence
  chemically synthesized
tttcatgaatcaaaaattaa

SEQ ID NO: 59533 - DNA, 20 bp, Artificial Sequence
  chemically synthesized
aggacattgttgacttacat

SEQ ID NO: 59534 - DNA, 20 bp, Artificial Sequence
  chemically synthesized
gacccatgccactggctcag

SEQ ID NO: 59535 - DNA, 20 bp, Artificial Sequence
  chemically synthesized
agcagggttcaaacattacc

SEQ ID NO: 59536 - DNA, 20 bp, Artificial Sequence
  chemically synthesized
ttcaaacattaccttgaata

SEQ ID NO: 59537 - DNA, 20 bp, Artificial Sequence
  chemically synthesized
tagagtcttataaaatattt

SEQ ID NO: 59538 - DNA, 20 bp, Artificial Sequence
  chemically synthesized
cttctttcattctctttctt

SEQ ID NO: 59539 - DNA, 20 bp, Artificial Sequence
  chemically synthesized
ccgaggttgtgtcgctaccc

SEQ ID NO: 59540 - DNA, 20 bp, Artificial Sequence
  chemically synthesized
agatatcaatccttccagga

SEQ ID NO: 59541 - DNA, 20 bp, Artificial Sequence
  chemically synthesized
attttgggaggccacggcag

SEQ ID NO: 59542 - DNA, 20 bp, Artificial Sequence
  chemically synthesized
cagatggatcacctgaggcc

SEQ ID NO: 59543 - DNA, 20 bp, Artificial Sequence
  chemically synthesized
acaaaaaatacaaaaattag

SEQ ID NO: 59544 - DNA, 20 bp, Artificial Sequence
  chemically synthesized
tactaagtaggctgaggcac

SEQ ID NO: 59545 - DNA, 20 bp, Artificial Sequence
  chemically synthesized
gatggaggttgcagtgagcc

SEQ ID NO: 59546 - DNA, 20 bp, Artificial Sequence
  chemically synthesized
atgtgccactgcactccagc

SEQ ID NO: 59547 - DNA, 20 bp, Artificial Sequence
  chemically synthesized
tccagcctgggtgacagagc

SEQ ID NO: 59548 - DNA, 20 bp, Artificial Sequence
  chemically synthesized
atatttttaaaaataaaaca

SEQ ID NO: 59549 - DNA, 20 bp, Artificial Sequence
  chemically synthesized
tttaaaaataaaacataggg

SEQ ID NO: 59550 - DNA, 20 bp, Artificial Sequence
  chemically synthesized
actttgggaggccaagacag

SEQ ID NO: 59551 - DNA, 20 bp, Artificial Sequence
  chemically synthesized
gacaggtggatcacaaggtc

SEQ ID NO: 59552 - DNA, 20 bp, Artificial Sequence
  chemically synthesized
atcccagctactagggaggc

SEQ ID NO: 59553 - DNA, 20 bp, Artificial Sequence
  chemically synthesized
tcacgtcagtgcacttcaac

SEQ ID NO: 59554 - DNA, 20 bp, Artificial Sequence
  chemically synthesized
cagtgcacttcaaccggggt

SEQ ID NO: 59555 - DNA, 20 bp, Artificial Sequence
  chemically synthesized
tagtatcaatctttccgcaa

SEQ ID NO: 59556 - DNA, 20 bp, Artificial Sequence
  chemically synthesized
tcgttctcatgaagtaaagc

SEQ ID NO: 59557 - DNA, 20 bp, Artificial Sequence
  chemically synthesized
atgaagtaaagcaagagtgg

SEQ ID NO: 59558 - DNA, 20 bp, Artificial Sequence
  chemically synthesized
gagtggtagaattaagtgga

SEQ ID NO: 59559 - DNA, 20 bp, Artificial Sequence
  chemically synthesized
tggccaccgggacaccccag

SEQ ID NO: 59560 - DNA, 20 bp, Artificial Sequence
  chemically synthesized
caccgggacaccccaggagg

SEQ ID NO: 59561 - DNA, 20 bp, Artificial Sequence
  chemically synthesized
tcaagccccaagaagtcccc

SEQ ID NO: 59562 - DNA, 20 bp, Artificial Sequence
  chemically synthesized
aagaagtccccttggatgat

SEQ ID NO: 59563 - DNA, 20 bp, Artificial Sequence
  chemically synthesized
atacatttgggacagatcta

SEQ ID NO: 59564 - DNA, 20 bp, Artificial Sequence
  chemically synthesized
tttctgagcaacacttagac

SEQ ID NO: 59565 - DNA, 20 bp, Artificial Sequence
  chemically synthesized
ttccattgattaaatcctac

SEQ ID NO: 59566 - DNA, 20 bp, Artificial Sequence
  chemically synthesized
aatgcccagcacagagctca

SEQ ID NO: 59567 - DNA, 20 bp, Artificial Sequence
  chemically synthesized
gccagactctctgaaccctg

SEQ ID NO: 59568 - DNA, 20 bp, Artificial Sequence
  chemically synthesized
ggagagtgtaaacgtcatat

SEQ ID NO: 59569 - DNA, 20 bp, Artificial Sequence
  chemically synthesized
agagtctatgttccaaaaac

SEQ ID NO: 59570 - DNA, 20 bp, Artificial Sequence
  chemically synthesized
tctttgcttttaaaaccata

SEQ ID NO: 59571 - DNA, 20 bp, Artificial Sequence
  chemically synthesized
taaagaataatgtttaaatg

SEQ ID NO: 59572 - DNA, 20 bp, Artificial Sequence
  chemically synthesized
ttttcactcaacattacata

SEQ ID NO: 59573 - DNA, 20 bp, Artificial Sequence
  chemically synthesized
atgagcatgaggtttccttt

SEQ ID NO: 59574 - DNA, 20 bp, Artificial Sequence
  chemically synthesized
gatgatggttgcacaccact

SEQ ID NO: 59575 - DNA, 20 bp, Artificial Sequence
  chemically synthesized
tacattttattgcaataaaa

SEQ ID NO: 59576 - DNA, 20 bp, Artificial Sequence
  chemically synthesized
ttgtctagttcaacctgagc

SEQ ID NO: 59577 - DNA, 20 bp, Artificial Sequence
  chemically synthesized
tcaacctgagcctgggtctg

SEQ ID NO: 59578 - DNA, 20 bp, Artificial Sequence
  chemically synthesized
aatcacttcaccacacttgt

SEQ ID NO: 59579 - DNA, 20 bp, Artificial Sequence
  chemically synthesized
atacttctttgacaatttgg

SEQ ID NO: 59580 - DNA, 20 bp, Artificial Sequence
  chemically synthesized
ttttccagatggacacaccc

SEQ ID NO: 59581 - DNA, 20 bp, Artificial Sequence
  chemically synthesized
tttgcaagcccagctttcat

SEQ ID NO: 59582 - DNA, 20 bp, Artificial Sequence
  chemically synthesized
ttcagaaacctgactgcatc

SEQ ID NO: 59583 - DNA, 20 bp, Artificial Sequence
  chemically synthesized
tgactaccaagcatcgggca

SEQ ID NO: 59584 - DNA, 20 bp, Artificial Sequence
  chemically synthesized
tgtgagggagcaccgttctc

SEQ ID NO: 59585 - DNA, 20 bp, Artificial Sequence
  chemically synthesized
caggaaagttgatgtggtct

SEQ ID NO: 59586 - DNA, 20 bp, Artificial Sequence
  chemically synthesized
aggtaggccacaggtgacaa

SEQ ID NO: 59587 - DNA, 20 bp, Artificial Sequence
  chemically synthesized
gggccttggggagagggcag

SEQ ID NO: 59588 - DNA, 20 bp, Artificial Sequence
  chemically synthesized
cagcagggtaagtccagcgg

SEQ ID NO: 59589 - DNA, 20 bp, Artificial Sequence
  chemically synthesized
gcaggatcagtccattgatt

SEQ ID NO: 59590 - DNA, 20 bp, Artificial Sequence
  chemically synthesized
tagaaaattgatgaacaggc

SEQ ID NO: 59591 - DNA, 20 bp, Artificial Sequence
  chemically synthesized
catggtctagttagtgttct

SEQ ID NO: 59592 - DNA, 20 bp, Artificial Sequence
  chemically synthesized
ggcgaggcagaagcctagtg

SEQ ID NO: 59593 - DNA, 20 bp, Artificial Sequence
  chemically synthesized
gggatggtggttagaaatgt

SEQ ID NO: 59594 - DNA, 20 bp, Artificial Sequence
  chemically synthesized
ggtaataattgtgatggtgg

SEQ ID NO: 59595 - DNA, 20 bp, Artificial Sequence
  chemically synthesized
gaatgatgatgatggtggtg

SEQ ID NO: 59596 - DNA, 20 bp, Artificial Sequence
  chemically synthesized
gatgataatggtgatggtgg

SEQ ID NO: 59597 - DNA, 20 bp, Artificial Sequence
  chemically synthesized
atggtggtggtgatgatgtt

SEQ ID NO: 59598 - DNA, 20 bp, Artificial Sequence
  chemically synthesized
ggtaatgataatggtgatgg

SEQ ID NO: 59599 - DNA, 20 bp, Artificial Sequence
  chemically synthesized
tggaatgatggtgatggtgg

SEQ ID NO: 59600 - DNA, 20 bp, Artificial Sequence
  chemically synthesized
gtggaatgatgatggtggtg

SEQ ID NO: 59601 - DNA, 20 bp, Artificial Sequence
  chemically synthesized
gtgatgatggtgatgatgtt

SEQ ID NO: 59602 - DNA, 20 bp, Artificial Sequence
  chemically synthesized
gtttccaggtgttccctgac

SEQ ID NO: 59603 - DNA, 20 bp, Artificial Sequence
  chemically synthesized
tccctgacttggatcaaatg

SEQ ID NO: 59604 - DNA, 20 bp, Artificial Sequence
  chemically synthesized
tttggaggtgttgaggccaa

SEQ ID NO: 59605 - DNA, 20 bp, Artificial Sequence
  chemically synthesized
tgacatctctatgtcggcca

SEQ ID NO: 59606 - DNA, 20 bp, Artificial Sequence
  chemically synthesized
cggtaggttttcaccattat

SEQ ID NO: 59607 - DNA, 20 bp, Artificial Sequence
  chemically synthesized
gattgagctgagctggcctc

SEQ ID NO: 59608 - DNA, 20 bp, Artificial Sequence
  chemically synthesized
aggctctgggggaagaaaga

SEQ ID NO: 59609 - DNA, 20 bp, Artificial Sequence
  chemically synthesized
ctgtgccatgctcgcaaagc

SEQ ID NO: 59610 - DNA, 20 bp, Artificial Sequence
  chemically synthesized
gggcttgcaaaattagaaaa

SEQ ID NO: 59611 - DNA, 20 bp, Artificial Sequence
  chemically synthesized
gtgagaacactgaaacatcc

SEQ ID NO: 59612 - DNA, 20 bp, Artificial Sequence
  chemically synthesized
caattttgcaaccgttctat

SEQ ID NO: 59613 - DNA, 20 bp, Artificial Sequence
  chemically synthesized
aataaagcagtttttcacaa

SEQ ID NO: 59614 - DNA, 20 bp, Artificial Sequence
  chemically synthesized
aaaagaataaacacaaccag

SEQ ID NO: 59615 - DNA, 20 bp, Artificial Sequence
  chemically synthesized
aaagaagtataaattagaaa

SEQ ID NO: 59616 - DNA, 20 bp, Artificial Sequence
  chemically synthesized
cttaggctcagaaaatatta

SEQ ID NO: 59617 - DNA, 20 bp, Artificial Sequence
  chemically synthesized
ctcagaaaatattaaggaat

SEQ ID NO: 59618 - DNA, 20 bp, Artificial Sequence
  chemically synthesized
actttatgaacaaagatgtg

SEQ ID NO: 59619 - DNA, 20 bp, Artificial Sequence
  chemically synthesized
agtttccttaactgtagagc

SEQ ID NO: 59620 - DNA, 20 bp, Artificial Sequence
  chemically synthesized
ctgtttcataggactgttgt

SEQ ID NO: 59621 - DNA, 20 bp, Artificial Sequence
  chemically synthesized
attataagcttgtgcctgga

SEQ ID NO: 59622 - DNA, 20 bp, Artificial Sequence
  chemically synthesized
caataaaatgtacacagcgt

SEQ ID NO: 59623 - DNA, 20 bp, Artificial Sequence
  chemically synthesized
tactattttaaccatttttg

SEQ ID NO: 59624 - DNA, 20 bp, Artificial Sequence
  chemically synthesized
tgcaaccatcatcatatttc

SEQ ID NO: 59625 - DNA, 20 bp, Artificial Sequence
  chemically synthesized
acaaaactcattatgtaatg

SEQ ID NO: 59626 - DNA, 20 bp, Artificial Sequence
  chemically synthesized
gtaatgttgagtgaaaaaat

SEQ ID NO: 59627 - DNA, 20 bp, Artificial Sequence
  chemically synthesized
tatatgacgtttacactctc

SEQ ID NO: 59628 - DNA, 20 bp, Artificial Sequence
  chemically synthesized
tttacactctccagggttca

SEQ ID NO: 59629 - DNA, 20 bp, Artificial Sequence
  chemically synthesized
tcaccactgctctgttcttc

SEQ ID NO: 59630 - DNA, 20 bp, Artificial Sequence
  chemically synthesized
aagcccagctccctgtgatt

SEQ ID NO: 59631 - DNA, 20 bp, Artificial Sequence
  chemically synthesized
gaatgaagtgtgcaatcgct

SEQ ID NO: 59632 - DNA, 20 bp, Artificial Sequence
  chemically synthesized
tgtgcaatcgctatgagttt

SEQ ID NO: 59633 - DNA, 20 bp, Artificial Sequence
  chemically synthesized
cgctatgagtttctgaatgg

SEQ ID NO: 59634 - DNA, 20 bp, Artificial Sequence
  chemically synthesized
tcagtctcagtcccttagac

SEQ ID NO: 59635 - DNA, 20 bp, Artificial Sequence
  chemically synthesized
tagacttgagtcccaaagta

SEQ ID NO: 59636 - DNA, 20 bp, Artificial Sequence
  chemically synthesized
cccaaagtagcgaattcaag

SEQ ID NO: 59637 - DNA, 20 bp, Artificial Sequence
  chemically synthesized
ccaaggggacttcttggggc

SEQ ID NO: 59638 - DNA, 20 bp, Artificial Sequence
  chemically synthesized
cctcagaccactcaccctcc

SEQ ID NO: 59639 - DNA, 20 bp, Artificial Sequence
  chemically synthesized
ttctggtagggaaggaggta

SEQ ID NO: 59640 - DNA, 20 bp, Artificial Sequence
  chemically synthesized
gctcagatattgctgatgat

SEQ ID NO: 59641 - DNA, 20 bp, Artificial Sequence
  chemically synthesized
aattgatttacaactggggc

SEQ ID NO: 59642 - DNA, 20 bp, Artificial Sequence
  chemically synthesized
cgaaaatgtaagattgcacc

SEQ ID NO: 59643 - DNA, 20 bp, Artificial Sequence
  chemically synthesized
ctcactgcaacttccacctc

SEQ ID NO: 59644 - DNA, 20 bp, Artificial Sequence
  chemically synthesized
cttccacctcctgggttcaa

SEQ ID NO: 59645 - DNA, 20 bp, Artificial Sequence
  chemically synthesized
actccagcctccctagtagc

SEQ ID NO: 59646 - DNA, 20 bp, Artificial Sequence
  chemically synthesized
ttttgtatttttagtagaga

SEQ ID NO: 59647 - DNA, 20 bp, Artificial Sequence
  chemically synthesized
gtcttggcctcccaaagtgc

SEQ ID NO: 59648 - DNA, 20 bp, Artificial Sequence
  chemically synthesized
ctcccaaagtgctgggatta

SEQ ID NO: 59649 - DNA, 20 bp, Artificial Sequence
  chemically synthesized
tttatttaagccacaactac

SEQ ID NO: 59650 - DNA, 20 bp, Artificial Sequence
  chemically synthesized
gccacaactactagaatagg

SEQ ID NO: 59651 - DNA, 20 bp, Artificial Sequence
  chemically synthesized
tcttgctctgtcacccaggc

SEQ ID NO: 59652 - DNA, 20 bp, Artificial Sequence
  chemically synthesized
gcctcagcctacttagtagc

SEQ ID NO: 59653 - DNA, 20 bp, Artificial Sequence
  chemically synthesized
ttttgtattttttgtagaga

SEQ ID NO: 59654 - DNA, 20 bp, Artificial Sequence
  chemically synthesized
gccgtggcctcccaaaatgc

SEQ ID NO: 59655 - DNA, 20 bp, Artificial Sequence
  chemically synthesized
gagccaccaccccctcctgg

SEQ ID NO: 59656 - DNA, 20 bp, Artificial Sequence
  chemically synthesized
tttataattacagaaaacat

SEQ ID NO: 59657 - DNA, 20 bp, Artificial Sequence
  chemically synthesized
agaaaacatgtgagttcact

SEQ ID NO: 59658 - DNA, 20 bp, Artificial Sequence
  chemically synthesized
catttcggcacagtttggta

SEQ ID NO: 59659 - DNA, 20 bp, Artificial Sequence
  chemically synthesized
gctcgtaaactaagacctga

SEQ ID NO: 59660 - DNA, 20 bp, Artificial Sequence
  chemically synthesized
tgtgtctatcagctgcaccc

SEQ ID NO: 59661 - DNA, 20 bp, Artificial Sequence
  chemically synthesized
tggaaagcttgagggaggct

SEQ ID NO: 59662 - DNA, 20 bp, Artificial Sequence
  chemically synthesized
tggatgtgcagcacttggca

SEQ ID NO: 59663 - DNA, 20 bp, Artificial Sequence
  chemically synthesized
tttattttatccaaaagaaa

SEQ ID NO: 59664 - DNA, 20 bp, Artificial Sequence
  chemically synthesized
atcaggaaagatgaaggtct

SEQ ID NO: 59665 - DNA, 20 bp, Artificial Sequence
  chemically synthesized
gaaggtctaggggtgaggga

SEQ ID NO: 59666 - DNA, 20 bp, Artificial Sequence
  chemically synthesized
aaccctgctgagccagtggc

SEQ ID NO: 59667 - DNA, 20 bp, Artificial Sequence
  chemically synthesized
ccagtggcatgggtctctga

SEQ ID NO: 59668 - DNA, 20 bp, Artificial Sequence
  chemically synthesized
ttaatttgactatctggttt

SEQ ID NO: 59669 - DNA, 20 bp, Artificial Sequence
  chemically synthesized
catgtaagtcaacaatgtcc

SEQ ID NO: 59670 - DNA, 20 bp, Artificial Sequence
  chemically synthesized
acatagtttttttaaattat

SEQ ID NO: 59671 - DNA, 20 bp, Artificial Sequence
  chemically synthesized
cgtgaagactgtcacggtgc

SEQ ID NO: 59672 - DNA, 20 bp, Artificial Sequence
  chemically synthesized
aagactgtcacggtgctgga

SEQ ID NO: 59673 - DNA, 20 bp, Artificial Sequence
  chemically synthesized
ggttgatttttctaatctaa

SEQ ID NO: 59674 - DNA, 20 bp, Artificial Sequence
  chemically synthesized
ccattgtagctaactatgca

SEQ ID NO: 59675 - DNA, 20 bp, Artificial Sequence
  chemically synthesized
tgaaacaatgaaataactct

SEQ ID NO: 59676 - DNA, 20 bp, Artificial Sequence
  chemically synthesized
ttggttccttgacctgttca

SEQ ID NO: 59677 - DNA, 20 bp, Artificial Sequence
  chemically synthesized
atttctctctttgttatggc

SEQ ID NO: 59678 - DNA, 20 bp, Artificial Sequence
  chemically synthesized
ataatgattcaacaaatact

SEQ ID NO: 59679 - DNA, 20 bp, Artificial Sequence
  chemically synthesized
acaaatactcagggtatttg

SEQ ID NO: 59680 - DNA, 20 bp, Artificial Sequence
  chemically synthesized
atactcagggtatttgttga

SEQ ID NO: 59681 - DNA, 20 bp, Artificial Sequence
  chemically synthesized
catacacaccgtgtgtgatt

SEQ ID NO: 59682 - DNA, 20 bp, Artificial Sequence
  chemically synthesized
tatttagctcatggtatagg

SEQ ID NO: 59683 - DNA, 20 bp, Artificial Sequence
  chemically synthesized
aatcaaggaaataaagaaac

SEQ ID NO: 59684 - DNA, 20 bp, Artificial Sequence
  chemically synthesized
ggttaattgtttgccacttg

SEQ ID NO: 59685 - DNA, 20 bp, Artificial Sequence
  chemically synthesized
aggcaacagaggaggcgagc

SEQ ID NO: 59686 - DNA, 20 bp, Artificial Sequence
  chemically synthesized
gaggaggcgagcaaggattc

SEQ ID NO: 59687 - DNA, 20 bp, Artificial Sequence
  chemically synthesized
cctgctggtgcctttgtgag

SEQ ID NO: 59688 - DNA, 20 bp, Artificial Sequence
  chemically synthesized
tcccttgaggcaaatctctg

SEQ ID NO: 59689 - DNA, 20 bp, Artificial Sequence
  chemically synthesized
gaggcaaatctctggagggt

SEQ ID NO: 59690 - DNA, 20 bp, Artificial Sequence
  chemically synthesized
tataaatcacctgtgaactc

SEQ ID NO: 59691 - DNA, 20 bp, Artificial Sequence
  chemically synthesized
agatgaacttgccctgcagg

SEQ ID NO: 59692 - DNA, 20 bp, Artificial Sequence
  chemically synthesized
gactttaaagtcaaacacat

SEQ ID NO: 59693 - DNA, 20 bp, Artificial Sequence
  chemically synthesized
gagcaggagaagattaagca

SEQ ID NO: 59694 - DNA, 20 bp, Artificial Sequence
  chemically synthesized
tgtctatgtctgtgtgtgta

SEQ ID NO: 59695 - DNA, 20 bp, Artificial Sequence
  chemically synthesized
ctgtgtgtgtagggagtgca

SEQ ID NO: 59696 - DNA, 20 bp, Artificial Sequence
  chemically synthesized
gtgtagggagtgcaggggat

SEQ ID NO: 59697 - DNA, 20 bp, Artificial Sequence
  chemically synthesized
ctatttcagcccatggaaac

SEQ ID NO: 59698 - DNA, 20 bp, Artificial Sequence
  chemically synthesized
tagaacaaacttctctgcca

SEQ ID NO: 59699 - DNA, 20 bp, Artificial Sequence
  chemically synthesized
gttatctttccaatgtgtgc

SEQ ID NO: 59700 - DNA, 20 bp, Artificial Sequence
  chemically synthesized
ttgccatatgagccctggag

SEQ ID NO: 59701 - DNA, 20 bp, Artificial Sequence
  chemically synthesized
gaggtgaatcagagaaacaa

SEQ ID NO: 59702 - DNA, 20 bp, Artificial Sequence
  chemically synthesized
aagaaaaattgattctgttt

SEQ ID NO: 59703 - DNA, 20 bp, Artificial Sequence
  chemically synthesized
ctagcaacatgagctgggga

SEQ ID NO: 59704 - DNA, 20 bp, Artificial Sequence
  chemically synthesized
taaatggaagtttcctcttt

SEQ ID NO: 59705 - DNA, 20 bp, Artificial Sequence
  chemically synthesized
tgaagtcacactgtgagcta

SEQ ID NO: 59706 - DNA, 20 bp, Artificial Sequence
  chemically synthesized
gcacaactcttcctggaaaa

SEQ ID NO: 59707 - DNA, 20 bp, Artificial Sequence
  chemically synthesized
agttcaaatgagaaacagtg

SEQ ID NO: 59708 - DNA, 20 bp, Artificial Sequence
  chemically synthesized
aaacagtgcggggtgaagac

SEQ ID NO: 59709 - DNA, 20 bp, Artificial Sequence
  chemically synthesized
tatctatcaagtgcttttta

SEQ ID NO: 59710 - DNA, 20 bp, Artificial Sequence
  chemically synthesized
gctttttagtggattaggtt

SEQ ID NO: 59711 - DNA, 20 bp, Artificial Sequence
  chemically synthesized
aggtcaggacaggcctttct

SEQ ID NO: 59712 - DNA, 20 bp, Artificial Sequence
  chemically synthesized
ggacaggcctttctgagaat

SEQ ID NO: 59713 - DNA, 20 bp, Artificial Sequence
  chemically synthesized
tctgttcatctgcctttcta

SEQ ID NO: 59714 - DNA, 20 bp, Artificial Sequence
  chemically synthesized
tcctaaggagcctcaggaca

SEQ ID NO: 59715 - DNA, 20 bp, Artificial Sequence
  chemically synthesized
tttacaatttcctctgaaat

SEQ ID NO: 59716 - DNA, 20 bp, Artificial Sequence
  chemically synthesized
ctatcaacaccttggaaaaa

SEQ ID NO: 59717 - DNA, 20 bp, Artificial Sequence
  chemically synthesized
tccaaggttcatttctacac

SEQ ID NO: 59718 - DNA, 20 bp, Artificial Sequence
  chemically synthesized
caggaggtggaagcccctga

SEQ ID NO: 59719 - DNA, 20 bp, Artificial Sequence
  chemically synthesized
cctgagagaatggaggtctg

SEQ ID NO: 59720 - DNA, 20 bp, Artificial Sequence
  chemically synthesized
ccaagtcctgcatgctagac

SEQ ID NO: 59721 - DNA, 20 bp, Artificial Sequence
  chemically synthesized
ctagacatgagtggaggagg

SEQ ID NO: 59722 - DNA, 20 bp, Artificial Sequence
  chemically synthesized
gggggaatacctaggtagaa

SEQ ID NO: 59723 - DNA, 20 bp, Artificial Sequence
  chemically synthesized
tcactgtgcagttaactttt

SEQ ID NO: 59724 - DNA, 20 bp, Artificial Sequence
  chemically synthesized
cggttgcagttagtatacat

SEQ ID NO: 59725 - DNA, 20 bp, Artificial Sequence
  chemically synthesized
tgagtgctatacaaccttct

SEQ ID NO: 59726 - DNA, 20 bp, Artificial Sequence
  chemically synthesized
gaagcaatgcagccattacg

SEQ ID NO: 59727 - DNA, 20 bp, Artificial Sequence
  chemically synthesized
taaaaagtatttctttaggt

SEQ ID NO: 59728 - DNA, 20 bp, Artificial Sequence
  chemically synthesized
ctacgcattgacttatcttc

SEQ ID NO: 59729 - DNA, 20 bp, Artificial Sequence
  chemically synthesized
cctccagcacacagcaggga

SEQ ID NO: 59730 - DNA, 20 bp, Artificial Sequence
  chemically synthesized
ggctgcactctgtgtttttg

SEQ ID NO: 59731 - DNA, 20 bp, Artificial Sequence
  chemically synthesized
ctagggaaggaaaaaagatc

SEQ ID NO: 59732 - DNA, 20 bp, Artificial Sequence
  chemically synthesized
ctgcccccaagctgtagagc

SEQ ID NO: 59733 - DNA, 20 bp, Artificial Sequence
  chemically synthesized
gcctacatctttctcctgtg

SEQ ID NO: 59734 - DNA, 20 bp, Artificial Sequence
  chemically synthesized
ttatgggaccttgtaatctt

SEQ ID NO: 59735 - DNA, 20 bp, Artificial Sequence
  chemically synthesized
cttaataagctcccctttgt

SEQ ID NO: 59736 - DNA, 20 bp, Artificial Sequence
  chemically synthesized
cagaagtggttcttgaggaa

SEQ ID NO: 59737 - DNA, 20 bp, Artificial Sequence
  chemically synthesized
ttcttgaggaacagaatatt

SEQ ID NO: 59738 - DNA, 20 bp, Artificial Sequence
  chemically synthesized
gaggaacagaatattaagga

SEQ ID NO: 59739 - DNA, 20 bp, Artificial Sequence
  chemically synthesized
gaacactgatagtacttggc

SEQ ID NO: 59740 - DNA, 20 bp, Artificial Sequence
  chemically synthesized
tacttggcctgaattgttta

SEQ ID NO: 59741 - DNA, 20 bp, Artificial Sequence
  chemically synthesized
ttcatcacttatgagaggca

SEQ ID NO: 59742 - DNA, 20 bp, Artificial Sequence
  chemically synthesized
gaaagaaaatgatgatctca

SEQ ID NO: 59743 - DNA, 20 bp, Artificial Sequence
  chemically synthesized
acaaatctgctaagattgcc

SEQ ID NO: 59744 - DNA, 20 bp, Artificial Sequence
  chemically synthesized
ctgctaagattgccctgaat

SEQ ID NO: 59745 - DNA, 20 bp, Artificial Sequence
  chemically synthesized
agttttaactcctgtagaga

SEQ ID NO: 59746 - DNA, 20 bp, Artificial Sequence
  chemically synthesized
cagagacaagctgttatcat

SEQ ID NO: 59747 - DNA, 20 bp, Artificial Sequence
  chemically synthesized
aaaaatgggaccctggaact

SEQ ID NO: 59748 - DNA, 20 bp, Artificial Sequence
  chemically synthesized
gggaccctggaacttggagt

SEQ ID NO: 59749 - DNA, 20 bp, Artificial Sequence
  chemically synthesized
ccctgatgaagctgaggaca

SEQ ID NO: 59750 - DNA, 20 bp, Artificial Sequence
  chemically synthesized
tagcctttccacctttgtct

SEQ ID NO: 59751 - DNA, 20 bp, Artificial Sequence
  chemically synthesized
aagaggcacccctaatgccc

SEQ ID NO: 59752 - DNA, 20 bp, Artificial Sequence
  chemically synthesized
cgggccccagaggtgaggtt

SEQ ID NO: 59753 - DNA, 20 bp, Artificial Sequence
  chemically synthesized
gaaatctggagaacaggcat

SEQ ID NO: 59754 - DNA, 20 bp, Artificial Sequence
  chemically synthesized
tctggagaacaggcatggga

SEQ ID NO: 59755 - DNA, 20 bp, Artificial Sequence
  chemically synthesized
caggcatgggaatggatatt

SEQ ID NO: 59756 - DNA, 20 bp, Artificial Sequence
  chemically synthesized
gggaatggatattaagggta

SEQ ID NO: 59757 - DNA, 20 bp, Artificial Sequence
  chemically synthesized
ggataatggtggaagggaca

SEQ ID NO: 59758 - DNA, 20 bp, Artificial Sequence
  chemically synthesized
atggtggaagggacatagag

SEQ ID NO: 59759 - DNA, 20 bp, Artificial Sequence
  chemically synthesized
ggacatagagttggatcaag

SEQ ID NO: 59760 - DNA, 20 bp, Artificial Sequence
  chemically synthesized
ttggtttggccctactaagt

SEQ ID NO: 59761 - DNA, 20 bp, Artificial Sequence
  chemically synthesized
tttgcttggttagctgaaat

SEQ ID NO: 59762 - DNA, 20 bp, Artificial Sequence
  chemically synthesized
atccaaaggcttagggagat

SEQ ID NO: 59763 - DNA, 20 bp, Artificial Sequence
  chemically synthesized
gcttagggagattaggatgg

SEQ ID NO: 59764 - DNA, 20 bp, Artificial Sequence
  chemically synthesized
agggagattaggatggtgga

SEQ ID NO: 59765 - DNA, 20 bp, Artificial Sequence
  chemically synthesized
gacctactcatcccagctgg

SEQ ID NO: 59766 - DNA, 20 bp, Artificial Sequence
  chemically synthesized
ctacaaaatttaaatacaat

SEQ ID NO: 59767 - DNA, 20 bp, Artificial Sequence
  chemically synthesized
tttaaatacaatgggaataa

SEQ ID NO: 59768 - DNA, 20 bp, Artificial Sequence
  chemically synthesized
agcagaggcaaagcagccat

SEQ ID NO: 59769 - DNA, 20 bp, Artificial Sequence
  chemically synthesized
ataaacaaaaaactgccagg

SEQ ID NO: 59770 - DNA, 20 bp, Artificial Sequence
  chemically synthesized
agaatggactaaagactaat

SEQ ID NO: 59771 - DNA, 20 bp, Artificial Sequence
  chemically synthesized
taatctgaattataaaaaca

SEQ ID NO: 59772 - DNA, 20 bp, Artificial Sequence
  chemically synthesized
tgttacagttccagaaccca

SEQ ID NO: 59773 - DNA, 20 bp, Artificial Sequence
  chemically synthesized
cccactgaatgaaggggagg

SEQ ID NO: 59774 - DNA, 20 bp, Artificial Sequence
  chemically synthesized
ggagacctctggccttttac

SEQ ID NO: 59775 - DNA, 20 bp, Artificial Sequence
  chemically synthesized
ctctgagctgacgttgattc

SEQ ID NO: 59776 - DNA, 20 bp, Artificial Sequence
  chemically synthesized
tatggaggttaggtaattaa

SEQ ID NO: 59777 - DNA, 20 bp, Artificial Sequence
  chemically synthesized
tctgacttacagtggttcca

SEQ ID NO: 59778 - DNA, 20 bp, Artificial Sequence
  chemically synthesized
cacattggctccctgactgg

SEQ ID NO: 59779 - DNA, 20 bp, Artificial Sequence
  chemically synthesized
atcaaggacttgaaagacgc

SEQ ID NO: 59780 - DNA, 20 bp, Artificial Sequence
  chemically synthesized
ttgacctgtgcagaggacag

SEQ ID NO: 59781 - DNA, 20 bp, Artificial Sequence
  chemically synthesized
atggatcttggaaaatgatg

SEQ ID NO: 59782 - DNA, 20 bp, Artificial Sequence
  chemically synthesized
tacctttaccaccctacctc

SEQ ID NO: 59783 - DNA, 20 bp, Artificial Sequence
  chemically synthesized
cattcatgacattatgatga

SEQ ID NO: 59784 - DNA, 20 bp, Artificial Sequence
  chemically synthesized
ggtgagacatttgtatgcca

SEQ ID NO: 59785 - DNA, 20 bp, Artificial Sequence
  chemically synthesized
ttctacctcggtaaaatttc

SEQ ID NO: 59786 - DNA, 20 bp, Artificial Sequence
  chemically synthesized
acaatgcctggtgggcctat

SEQ ID NO: 59787 - DNA, 20 bp, Artificial Sequence
  chemically synthesized
ggaggcaacacattcctcgt

SEQ ID NO: 59788 - DNA, 20 bp, Artificial Sequence
  chemically synthesized
gtgttactctggcccattta

SEQ ID NO: 59789 - DNA, 20 bp, Artificial Sequence
  chemically synthesized
ttgaggtgtcagtggcagat

SEQ ID NO: 59790 - DNA, 20 bp, Artificial Sequence
  chemically synthesized
cctttggcaggcccccatag

SEQ ID NO: 59791 - DNA, 20 bp, Artificial Sequence
  chemically synthesized
tgaatcacagtggagacctc

SEQ ID NO: 59792 - DNA, 20 bp, Artificial Sequence
  chemically synthesized
tggtaactgaacgtttgact

SEQ ID NO: 59793 - DNA, 20 bp, Artificial Sequence
  chemically synthesized
ctgacccatctagccatgaa

SEQ ID NO: 59794 - DNA, 20 bp, Artificial Sequence
  chemically synthesized
cctgcaccaatggcctcatg

SEQ ID NO: 59795 - DNA, 20 bp, Artificial Sequence
  chemically synthesized
tatgtaataacttttggttt

SEQ ID NO: 59796 - DNA, 20 bp, Artificial Sequence
  chemically synthesized
tggtgcgtttctggttgtat

SEQ ID NO: 59797 - DNA, 20 bp, Artificial Sequence
  chemically synthesized
ttgaagattatgtatgattt

SEQ ID NO: 59798 - DNA, 20 bp, Artificial Sequence
  chemically synthesized
tatgatttcaggatgtgtgt

SEQ ID NO: 59799 - DNA, 20 bp, Artificial Sequence
  chemically synthesized
tgtatgggttcaagttgaca

SEQ ID NO: 59800 - DNA, 20 bp, Artificial Sequence
  chemically synthesized
ggttaatactgtcaacttga

SEQ ID NO: 59801 - DNA, 20 bp, Artificial Sequence
  chemically synthesized
ttaatctcggttatgtctgt

SEQ ID NO: 59802 - DNA, 20 bp, Artificial Sequence
  chemically synthesized
tggcaaaaggagattaacat

SEQ ID NO: 59803 - DNA, 20 bp, Artificial Sequence
  chemically synthesized
atacaactatcctcatacaa

SEQ ID NO: 59804 - DNA, 20 bp, Artificial Sequence
  chemically synthesized
gcacaagtgtacacatgcat

SEQ ID NO: 59805 - DNA, 20 bp, Artificial Sequence
  chemically synthesized
ccacttcatggctagatggg

SEQ ID NO: 59806 - DNA, 20 bp, Artificial Sequence
  chemically synthesized
ggtctcatgccactggaacc

SEQ ID NO: 59807 - DNA, 20 bp, Artificial Sequence
  chemically synthesized
accctagaaattttaccgag

SEQ ID NO: 59808 - DNA, 20 bp, Artificial Sequence
  chemically synthesized
tgggtcttatggacaggaat

SEQ ID NO: 59809 - DNA, 20 bp, Artificial Sequence
  chemically synthesized
cccactggaaccactgtaag

SEQ ID NO: 59810 - DNA, 20 bp, Artificial Sequence
  chemically synthesized
ggtctccttagggaaggatg

SEQ ID NO: 59811 - DNA, 20 bp, Artificial Sequence
  chemically synthesized
atggggtttcaccattttag

SEQ ID NO: 59812 - DNA, 20 bp, Artificial Sequence
  chemically synthesized
cccgagctgcaacattaaat

SEQ ID NO: 59813 - DNA, 20 bp, Artificial Sequence
  chemically synthesized
cagatttctgccaatataaa

SEQ ID NO: 59814 - DNA, 20 bp, Artificial Sequence
  chemically synthesized
gcattaggggtgcctcttga

SEQ ID NO: 59815 - DNA, 20 bp, Artificial Sequence
  chemically synthesized
cagaagtcccaaaaccaatg

SEQ ID NO: 59816 - DNA, 20 bp, Artificial Sequence
  chemically synthesized
agcaggaaggatccagcaca

SEQ ID NO: 59817 - DNA, 20 bp, Artificial Sequence
  chemically synthesized
gagtagcaggtgaaagctca

SEQ ID NO: 59818 - DNA, 20 bp, Artificial Sequence
  chemically synthesized
caggtgaaagctcacaagaa

SEQ ID NO: 59819 - DNA, 20 bp, Artificial Sequence
  chemically synthesized
tagtaggggcagggaccagt

SEQ ID NO: 59820 - DNA, 20 bp, Artificial Sequence
  chemically synthesized
ttgagataaacagtggtaag

SEQ ID NO: 59821 - DNA, 20 bp, Artificial Sequence
  chemically synthesized
cgtagaagtaattccaacct

SEQ ID NO: 59822 - DNA, 20 bp, Artificial Sequence
  chemically synthesized
acaatattgcaaatcattat

SEQ ID NO: 59823 - DNA, 20 bp, Artificial Sequence
  chemically synthesized
tctaaccataaaatcttaaa

SEQ ID NO: 59824 - DNA, 20 bp, Artificial Sequence
  chemically synthesized
gttgatctgctaatccctgt

SEQ ID NO: 59825 - DNA, 20 bp, Artificial Sequence
  chemically synthesized
gacacaccactattagttgg

SEQ ID NO: 59826 - DNA, 20 bp, Artificial Sequence
  chemically synthesized
atgccgatgacaagtatcca

SEQ ID NO: 59827 - DNA, 20 bp, Artificial Sequence
  chemically synthesized
agatgaacagattctcattc

SEQ ID NO: 59828 - DNA, 20 bp, Artificial Sequence
  chemically synthesized
tagatatatcaaaatatcat

SEQ ID NO: 59829 - DNA, 20 bp, Artificial Sequence
  chemically synthesized
ttgctaggaaatatcccaaa

SEQ ID NO: 59830 - DNA, 20 bp, Artificial Sequence
  chemically synthesized
aatagggtttatttgttggt

SEQ ID NO: 59831 - DNA, 20 bp, Artificial Sequence
  chemically synthesized
aatgtattttattaatggtg

SEQ ID NO: 59832 - DNA, 20 bp, Artificial Sequence
  chemically synthesized
tctcactgagcatggctgta

SEQ ID NO: 59833 - DNA, 20 bp, Artificial Sequence
  chemically synthesized
attggaaagataacacgtcc

SEQ ID NO: 59834 - DNA, 20 bp, Artificial Sequence
  chemically synthesized
gctttccaaaagagcttatc

SEQ ID NO: 59835 - DNA, 20 bp, Artificial Sequence
  chemically synthesized
cctagtttccatgggctgaa

SEQ ID NO: 59836 - DNA, 20 bp, Artificial Sequence
  chemically synthesized
ttactcaggccataacaaag

SEQ ID NO: 59837 - DNA, 20 bp, Artificial Sequence
  chemically synthesized
tgtaggcacactcttttaga

SEQ ID NO: 59838 - DNA, 20 bp, Artificial Sequence
  chemically synthesized
ggaaattaaacttatttttt

SEQ ID NO: 59839 - DNA, 20 bp, Artificial Sequence
  chemically synthesized
tgtatttttactacattgtg

SEQ ID NO: 59840 - DNA, 20 bp, Artificial Sequence
  chemically synthesized
aaactatgtcttacctgatt

SEQ ID NO: 59841 - DNA, 20 bp, Artificial Sequence
  chemically synthesized
ttgggactggccagcagtgc

SEQ ID NO: 59842 - DNA, 20 bp, Artificial Sequence
  chemically synthesized
ctactaagtaggctgaggca

SEQ ID NO: 59843 - DNA, 20 bp, Artificial Sequence
  chemically synthesized
agatggaggttgcagtgagc

SEQ ID NO: 59844 - DNA, 20 bp, Artificial Sequence
  chemically synthesized
ctccagcctgggtgacagag

SEQ ID NO: 59845 - DNA, 20 bp, Artificial Sequence
  chemically synthesized
cagagcaagaatgtctcagg

SEQ ID NO: 59846 - DNA, 20 bp, Artificial Sequence
  chemically synthesized
catgaagtaaagcaagagtg

SEQ ID NO: 59847 - DNA, 20 bp, Artificial Sequence
  chemically synthesized
accctctacctccttcccta

SEQ ID NO: 59848 - DNA, 20 bp, Artificial Sequence
  chemically synthesized
agtggatttgactcttccat

SEQ ID NO: 59849 - DNA, 20 bp, Artificial Sequence
  chemically synthesized
cacagggagctgggcttcct

SEQ ID NO: 59850 - DNA, 20 bp, Artificial Sequence
  chemically synthesized
tacctgtgtttaaaaagatg

SEQ ID NO: 59851 - DNA, 20 bp, Artificial Sequence
  chemically synthesized
ttctttgcttttaaaaccat

SEQ ID NO: 59852 - DNA, 20 bp, Artificial Sequence
  chemically synthesized
taatgtttaaatgtagagtc

SEQ ID NO: 59853 - DNA, 20 bp, Artificial Sequence
  chemically synthesized
gtacattttattgcaataaa

SEQ ID NO: 59854 - DNA, 20 bp, Artificial Sequence
  chemically synthesized
tatgacagtgtaaaatgtca

SEQ ID NO: 59855 - DNA, 20 bp, Artificial Sequence
  chemically synthesized
ttttgcaagcccagctttca

SEQ ID NO: 59856 - DNA, 20 bp, Artificial Sequence
  chemically synthesized
cttagatcattgactttggt

SEQ ID NO: 59857 - DNA, 20 bp, Artificial Sequence
  chemically synthesized
gtgtgagggagcaccgttct

SEQ ID NO: 59858 - DNA, 20 bp, Artificial Sequence
  chemically synthesized
cctgatgtcattattgacat

SEQ ID NO: 59859 - DNA, 20 bp, Artificial Sequence
  chemically synthesized
tcatggtctagttagtgttc

SEQ ID NO: 59860 - DNA, 20 bp, Artificial Sequence
  chemically synthesized
agcctagtgggggatggtgg

SEQ ID NO: 59861 - DNA, 20 bp, Artificial Sequence
  chemically synthesized
gtgtggatggttgtggggca

SEQ ID NO: 59862 - DNA, 20 bp, Artificial Sequence
  chemically synthesized
tgatgataatggtgatggtg

SEQ ID NO: 59863 - DNA, 20 bp, Artificial Sequence
  chemically synthesized
ggtctcacctgcaggtccac

SEQ ID NO: 59864 - DNA, 20 bp, Artificial Sequence
  chemically synthesized
ctctgcccgatgcttggtag

SEQ ID NO: 59865 - DNA, 20 bp, Artificial Sequence
  chemically synthesized
tgcagtcaaaggctctgggg

SEQ ID NO: 59866 - DNA, 20 bp, Artificial Sequence
  chemically synthesized
tgaaagctgggcttgcaaaa

SEQ ID NO: 59867 - DNA, 20 bp, Artificial Sequence
  chemically synthesized
ccgttctatttgaatttggc

SEQ ID NO: 59868 - DNA, 20 bp, Artificial Sequence
  chemically synthesized
aaataaagcagtttttcaca

SEQ ID NO: 59869 - DNA, 20 bp, Artificial Sequence
  chemically synthesized
caaaagaataaacacaacca

SEQ ID NO: 59870 - DNA, 20 bp, Artificial Sequence
  chemically synthesized
aattgtcaaagaagtataaa

SEQ ID NO: 59871 - DNA, 20 bp, Artificial Sequence
  chemically synthesized
ttttacactgtcataacctt

SEQ ID NO: 59872 - DNA, 20 bp, Artificial Sequence
  chemically synthesized
attggcagtgttattgggag

SEQ ID NO: 59873 - DNA, 20 bp, Artificial Sequence
  chemically synthesized
taatttatgggaacttaggc

SEQ ID NO: 59874 - DNA, 20 bp, Artificial Sequence
  chemically synthesized
gctcagaaaatattaaggaa

SEQ ID NO: 59875 - DNA, 20 bp, Artificial Sequence
  chemically synthesized
gtgcaaccatcatcatattt

SEQ ID NO: 59876 - DNA, 20 bp, Artificial Sequence
  chemically synthesized
ttctttatggttttaaaagc

SEQ ID NO: 59877 - DNA, 20 bp, Artificial Sequence
  chemically synthesized
ttaaaagcaaagaaaaaggt

SEQ ID NO: 59878 - DNA, 20 bp, Artificial Sequence
  chemically synthesized
gaagcccagctccctgtgat

SEQ ID NO: 59879 - DNA, 20 bp, Artificial Sequence
  chemically synthesized
aggcattgacagttgcaagg

SEQ ID NO: 59880 - DNA, 20 bp, Artificial Sequence
  chemically synthesized
gaccccagtctaagtgttgc

SEQ ID NO: 59881 - DNA, 20 bp, Artificial Sequence
  chemically synthesized
atttatttaagccacaacta

SEQ ID NO: 59882 - DNA, 20 bp, Artificial Sequence
  chemically synthesized
ttataacataatttataatt

SEQ ID NO: 59883 - DNA, 20 bp, Artificial Sequence
  chemically synthesized
ttatgattttattttatcca

SEQ ID NO: 59884 - DNA, 20 bp, Artificial Sequence
  chemically synthesized
ttttattttatccaaaagaa

SEQ ID NO: 59885 - DNA, 20 bp, Artificial Sequence
  chemically synthesized
gccagtggcatgggtctctg

SEQ ID NO: 59886 - DNA, 20 bp, Artificial Sequence
  chemically synthesized
gacatagtttttttaaatta

SEQ ID NO: 59887 - DNA, 20 bp, Artificial Sequence
  chemically synthesized
cacggtgctggaatgaatgg

SEQ ID NO: 59888 - DNA, 20 bp, Artificial Sequence
  chemically synthesized
tacatttgcttcttatccct

SEQ ID NO: 59889 - DNA, 20 bp, Artificial Sequence
  chemically synthesized
gtcatccccattttataaac

SEQ ID NO: 59890 - DNA, 20 bp, Artificial Sequence
  chemically synthesized
aattcccaaatcaaggaaat

SEQ ID NO: 59891 - DNA, 20 bp, Artificial Sequence
  chemically synthesized
ctggatttaagccagatttc

SEQ ID NO: 59892 - DNA, 20 bp, Artificial Sequence
  chemically synthesized
aggttaattgtttgccactt

SEQ ID NO: 59893 - DNA, 20 bp, Artificial Sequence
  chemically synthesized
agaagagagaagtctggtat

SEQ ID NO: 59894 - DNA, 20 bp, Artificial Sequence
  chemically synthesized
cttccaaagctagcttaggg

SEQ ID NO: 59895 - DNA, 20 bp, Artificial Sequence
  chemically synthesized
cgtactacttcactttagga

SEQ ID NO: 59896 - DNA, 20 bp, Artificial Sequence
  chemically synthesized
tgaatttagtggaagccatt

SEQ ID NO: 59897 - DNA, 20 bp, Artificial Sequence
  chemically synthesized
aagccattcaagaaaatatc

SEQ ID NO: 59898 - DNA, 20 bp, Artificial Sequence
  chemically synthesized
agccatgctcagtgagaagc

SEQ ID NO: 59899 - DNA, 20 bp, Artificial Sequence
  chemically synthesized
cattcacacaccacagtgag

SEQ ID NO: 59900 - DNA, 20 bp, Artificial Sequence
  chemically synthesized
atgagccctggaggtgaatc

SEQ ID NO: 59901 - DNA, 20 bp, Artificial Sequence
  chemically synthesized
gaaaaatcatcaggttaaaa

SEQ ID NO: 59902 - DNA, 20 bp, Artificial Sequence
  chemically synthesized
ttgaagtcacactgtgagct

SEQ ID NO: 59903 - DNA, 20 bp, Artificial Sequence
  chemically synthesized
cctggaaaagagagttcaaa

SEQ ID NO: 59904 - DNA, 20 bp, Artificial Sequence
  chemically synthesized
tgctttttagtggattaggt

SEQ ID NO: 59905 - DNA, 20 bp, Artificial Sequence
  chemically synthesized
gaggtcaggacaggcctttc

SEQ ID NO: 59906 - DNA, 20 bp, Artificial Sequence
  chemically synthesized
aggacaggcctttctgagaa

SEQ ID NO: 59907 - DNA, 20 bp, Artificial Sequence
  chemically synthesized
ccaccctttgccacaaccag

SEQ ID NO: 59908 - DNA, 20 bp, Artificial Sequence
  chemically synthesized
gttgcctcagatttgatctc

SEQ ID NO: 59909 - DNA, 20 bp, Artificial Sequence
  chemically synthesized
tacaaccaatgcacatattg

SEQ ID NO: 59910 - DNA, 20 bp, Artificial Sequence
  chemically synthesized
gcaggaggtggaagcccctg

SEQ ID NO: 59911 - DNA, 20 bp, Artificial Sequence
  chemically synthesized
ccctgagagaatggaggtct

SEQ ID NO: 59912 - DNA, 20 bp, Artificial Sequence
  chemically synthesized
ggaggagggggaatacctag

SEQ ID NO: 59913 - DNA, 20 bp, Artificial Sequence
  chemically synthesized
agggggaatacctaggtaga

SEQ ID NO: 59914 - DNA, 20 bp, Artificial Sequence
  chemically synthesized
ctcactgtgcagttaacttt

SEQ ID NO: 59915 - DNA, 20 bp, Artificial Sequence
  chemically synthesized
tagggagggaagagggcaaa

SEQ ID NO: 59916 - DNA, 20 bp, Artificial Sequence
  chemically synthesized
agaagcaatgcagccattac

SEQ ID NO: 59917 - DNA, 20 bp, Artificial Sequence
  chemically synthesized
acacctgtatcacaggtgtt

SEQ ID NO: 59918 - DNA, 20 bp, Artificial Sequence
  chemically synthesized
tatcacaggtgttaaagaaa

SEQ ID NO: 59919 - DNA, 20 bp, Artificial Sequence
  chemically synthesized
accgttaatgcccttgggct

SEQ ID NO: 59920 - DNA, 20 bp, Artificial Sequence
  chemically synthesized
acctccagcacacagcaggg

SEQ ID NO: 59921 - DNA, 20 bp, Artificial Sequence
  chemically synthesized
gctgcccccaagctgtagag

SEQ ID NO: 59922 - DNA, 20 bp, Artificial Sequence
  chemically synthesized
agagccagaatataaagctg

SEQ ID NO: 59923 - DNA, 20 bp, Artificial Sequence
  chemically synthesized
ccagaagtggttcttgagga

SEQ ID NO: 59924 - DNA, 20 bp, Artificial Sequence
  chemically synthesized
tgattgctcctaagttctct

SEQ ID NO: 59925 - DNA, 20 bp, Artificial Sequence
  chemically synthesized
gttctctggagaaagagatg

SEQ ID NO: 59926 - DNA, 20 bp, Artificial Sequence
  chemically synthesized
atgagagttttaactcctgt

SEQ ID NO: 59927 - DNA, 20 bp, Artificial Sequence
  chemically synthesized
ctgatgaaacttttttgcca

SEQ ID NO: 59928 - DNA, 20 bp, Artificial Sequence
  chemically synthesized
aagctttctaatttatattg

SEQ ID NO: 59929 - DNA, 20 bp, Artificial Sequence
  chemically synthesized
taatgttgcagctcggggac

SEQ ID NO: 59930 - DNA, 20 bp, Artificial Sequence
  chemically synthesized
cagcagaggcaaagcagcca

SEQ ID NO: 59931 - DNA, 20 bp, Artificial Sequence
  chemically synthesized
tataaacaaaaaactgccag

SEQ ID NO: 59932 - DNA, 20 bp, Artificial Sequence
  chemically synthesized
ctaatctgaattataaaaac

SEQ ID NO: 59933 - DNA, 20 bp, Artificial Sequence
  chemically synthesized
ccagggtaactgtgtgtact

SEQ ID NO: 59934 - DNA, 20 bp, Artificial Sequence
  chemically synthesized
aagggaagtaatgagacatt

SEQ ID NO: 59935 - DNA, 20 bp, Artificial Sequence
  chemically synthesized
atagacatacttattagctg

SEQ ID NO: 59936 - DNA, 20 bp, Artificial Sequence
  chemically synthesized
gccattagagctgtctctac

SEQ ID NO: 59937 - DNA, 20 bp, Artificial Sequence
  chemically synthesized
cgtttggcccctcttacaac

SEQ ID NO: 59938 - DNA, 20 bp, Artificial Sequence
  chemically synthesized
atgcatgtgtacacttgtgc

SEQ ID NO: 59939 - DNA, 20 bp, Artificial Sequence
  chemically synthesized
gtgttaatttgctcaagcaa

SEQ ID NO: 59940 - DNA, 20 bp, Artificial Sequence
  chemically synthesized
actgtaagtcagaaatgagc

SEQ ID NO: 59941 - DNA, 20 bp, Artificial Sequence
  chemically synthesized
aactctttctctacaggagt

SEQ ID NO: 59942 - DNA, 20 bp, Artificial Sequence
  chemically synthesized
tcagccaacaccagaagtcc

SEQ ID NO: 59943 - DNA, 20 bp, Artificial Sequence
  chemically synthesized
ctctgggagcttcaccccac

SEQ ID NO: 59944 - DNA, 20 bp, Artificial Sequence
  chemically synthesized
taggggcagggaccagtgca

SEQ ID NO: 59945 - DNA, 20 bp, Artificial Sequence
  chemically synthesized
atttaatatgctctatgctg

SEQ ID NO: 59946 - DNA, 20 bp, Artificial Sequence
  chemically synthesized
tatagctcacagtgtgactt

SEQ ID NO: 59947 - DNA, 20 bp, Artificial Sequence
  chemically synthesized
catgttgctaggaaatatcc

SEQ ID NO: 59948 - DNA, 20 bp, Artificial Sequence
  chemically synthesized
aatgtgccccccaggtcgat

SEQ ID NO: 59949 - DNA, 20 bp, Artificial Sequence
  chemically synthesized
catagacaccaatttcccca

SEQ ID NO: 59950 - DNA, 20 bp, Artificial Sequence
  chemically synthesized
aaaccaaagcatgcccacta

SEQ ID NO: 59951 - DNA, 20 bp, Artificial Sequence
  chemically synthesized
aaataattcttataatttaa

SEQ ID NO: 59952 - DNA, 20 bp, Artificial Sequence
  chemically synthesized
gacaagcctgggcaacatgc

SEQ ID NO: 59953 - DNA, 20 bp, Artificial Sequence
  chemically synthesized
taaataaatatttttaaaaa

SEQ ID NO: 59954 - DNA, 20 bp, Artificial Sequence
  chemically synthesized
gttaggaggctcctcccgtt

SEQ ID NO: 59955 - DNA, 20 bp, Artificial Sequence
  chemically synthesized
catataagagtctatgttcc

SEQ ID NO: 59956 - DNA, 20 bp, Artificial Sequence
  chemically synthesized
tttacctttttctttgcttt

SEQ ID NO: 59957 - DNA, 20 bp, Artificial Sequence
  chemically synthesized
gacagtgtaaaatgtcacta

SEQ ID NO: 59958 - DNA, 20 bp, Artificial Sequence
  chemically synthesized
gttgtgtttattcttttgtg

SEQ ID NO: 59959 - DNA, 20 bp, Artificial Sequence
  chemically synthesized
gcaaacatcctgataatggt

SEQ ID NO: 59960 - DNA, 20 bp, Artificial Sequence
  chemically synthesized
aaacatgaaggggagagcag

SEQ ID NO: 59961 - DNA, 20 bp, Artificial Sequence
  chemically synthesized
aactagaccatgaggtgcca

SEQ ID NO: 59962 - DNA, 20 bp, Artificial Sequence
  chemically synthesized
aagctgggcttgcaaaatta

SEQ ID NO: 59963 - DNA, 20 bp, Artificial Sequence
  chemically synthesized
ccctgggtgtgtccatctgg

SEQ ID NO: 59964 - DNA, 20 bp, Artificial Sequence
  chemically synthesized
atgaagatcatagcactata

SEQ ID NO: 59965 - DNA, 20 bp, Artificial Sequence
  chemically synthesized
tacaaaaagtctgaaaatat

SEQ ID NO: 59966 - DNA, 20 bp, Artificial Sequence
  chemically synthesized
taacataatttataattaca

SEQ ID NO: 59967 - DNA, 20 bp, Artificial Sequence
  chemically synthesized
agcctgctctgctacatttc

SEQ ID NO: 59968 - DNA, 20 bp, Artificial Sequence
  chemically synthesized
gatgcctatcaacaccttgg

SEQ ID NO: 59969 - DNA, 20 bp, Artificial Sequence
  chemically synthesized
agaaagagttgaaattgtga

SEQ ID NO: 59970 - DNA, 20 bp, Artificial Sequence
  chemically synthesized
ctacttgatttatataaaca

SEQ ID NO: 59971 - DNA, 20 bp, Artificial Sequence
  chemically synthesized
taaagactaatctgaattat

SEQ ID NO: 59972 - DNA, 20 bp, Artificial Sequence
  chemically synthesized
gacgttgattccagggtacc

SEQ ID NO: 59973 - DNA, 20 bp, Artificial Sequence
  chemically synthesized
cctagaaaaataaaaaaatc

SEQ ID NO: 59974 - DNA, 20 bp, Artificial Sequence
  chemically synthesized
ccacaccctcacagacataa

SEQ ID NO: 59975 - DNA, 20 bp, Artificial Sequence
  chemically synthesized
tgctgatatgaacaacactt

SEQ ID NO: 59976 - DNA, 20 bp, Artificial Sequence
  chemically synthesized
caaaatcctagaggtctcca

SEQ ID NO: 59977 - DNA, 20 bp, Artificial Sequence
  chemically synthesized
tcatgtggcccaaatggcag

SEQ ID NO: 59978 - DNA, 20 bp, Artificial Sequence
  chemically synthesized
cagctttcacagcagcctgg

SEQ ID NO: 59979 - DNA, 20 bp, Artificial Sequence
  chemically synthesized
gaggggccaaacgcagcaag

SEQ ID NO: 59980 - DNA, 20 bp, Artificial Sequence
  chemically synthesized
tagaaagtccctaaatttta

SEQ ID NO: 59981 - DNA, 20 bp, Artificial Sequence
  chemically synthesized
atgtctcaccaataagttca

SEQ ID NO: 59982 - DNA, 20 bp, Artificial Sequence
  chemically synthesized
agcgagcaaggtctctccaa

SEQ ID NO: 59983 - DNA, 20 bp, Artificial Sequence
  chemically synthesized
ggccttgtcagctgaaggca

SEQ ID NO: 59984 - DNA, 20 bp, Artificial Sequence
  chemically synthesized
caattggagtcaccacttgg

SEQ ID NO: 59985 - DNA, 20 bp, Artificial Sequence
  chemically synthesized
cagtccctccagggatggga

SEQ ID NO: 59986 - DNA, 20 bp, Artificial Sequence
  chemically synthesized
ctccagggatgggatattgt

SEQ ID NO: 59987 - DNA, 20 bp, Artificial Sequence
  chemically synthesized
ttctaggtagagacagctct

SEQ ID NO: 59988 - DNA, 20 bp, Artificial Sequence
  chemically synthesized
gtagagacagctctaatggc

SEQ ID NO: 59989 - DNA, 20 bp, Artificial Sequence
  chemically synthesized
ctttaactggggaaccacaa

SEQ ID NO: 59990 - DNA, 20 bp, Artificial Sequence
  chemically synthesized
gtaacaggttcgagtctgga

SEQ ID NO: 59991 - DNA, 20 bp, Artificial Sequence
  chemically synthesized
tctggaaattgattgagggc

SEQ ID NO: 59992 - DNA, 20 bp, Artificial Sequence
  chemically synthesized
ttgattgagggcccatgatt

SEQ ID NO: 59993 - DNA, 20 bp, Artificial Sequence
  chemically synthesized
atgattctctgtttttataa

SEQ ID NO: 59994 - DNA, 20 bp, Artificial Sequence
  chemically synthesized
gtctttagtccattctacct

SEQ ID NO: 59995 - DNA, 20 bp, Artificial Sequence
  chemically synthesized
gtccattctacctggcagtt

SEQ ID NO: 59996 - DNA, 20 bp, Artificial Sequence
  chemically synthesized
ataaatcaagtaggaataca

SEQ ID NO: 59997 - DNA, 20 bp, Artificial Sequence
  chemically synthesized
caatttcacttctaggaaca

SEQ ID NO: 59998 - DNA, 20 bp, Artificial Sequence
  chemically synthesized
atgagtcagactattctgat

SEQ ID NO: 59999 - DNA, 20 bp, Artificial Sequence
  chemically synthesized
gctctcacaaatctatttca

SEQ ID NO: 60000 - DNA, 20 bp, Artificial Sequence
  chemically synthesized
tgcctcagcctcccaagtag

SEQ ID NO: 60001 - DNA, 20 bp, Artificial Sequence
  chemically synthesized
ttttgtatttttagcagaga

SEQ ID NO: 60002 - DNA, 20 bp, Artificial Sequence
  chemically synthesized
cgcccccgcctcccaaggtg

SEQ ID NO: 60003 - DNA, 20 bp, Artificial Sequence
  chemically synthesized
agtagggccaaaccaataaa

SEQ ID NO: 60004 - DNA, 20 bp, Artificial Sequence
  chemically synthesized
atccattcccatgcctgttc

SEQ ID NO: 60005 - DNA, 20 bp, Artificial Sequence
  chemically synthesized
atttctgccaatataaatta

SEQ ID NO: 60006 - DNA, 20 bp, Artificial Sequence
  chemically synthesized
cactgttgcctcaagcagtg

SEQ ID NO: 60007 - DNA, 20 bp, Artificial Sequence
  chemically synthesized
accactactggggatgggga

SEQ ID NO: 60008 - DNA, 20 bp, Artificial Sequence
  chemically synthesized
gaaactgtttcttctggcaa

SEQ ID NO: 60009 - DNA, 20 bp, Artificial Sequence
  chemically synthesized
gagttcacaaactcagtgtc

SEQ ID NO: 60010 - DNA, 20 bp, Artificial Sequence
  chemically synthesized
agatcagctactcgcatgat

SEQ ID NO: 60011 - DNA, 20 bp, Artificial Sequence
  chemically synthesized
ctcgcatgataacagcttgt

SEQ ID NO: 60012 - DNA, 20 bp, Artificial Sequence
  chemically synthesized
ctctcattcagggcaatctt

SEQ ID NO: 60013 - DNA, 20 bp, Artificial Sequence
  chemically synthesized
tagcagatttgtggctcagt

SEQ ID NO: 60014 - DNA, 20 bp, Artificial Sequence
  chemically synthesized
tctagagggacagaactaat

SEQ ID NO: 60015 - DNA, 20 bp, Artificial Sequence
  chemically synthesized
atagatatactcacacaaag

SEQ ID NO: 60016 - DNA, 20 bp, Artificial Sequence
  chemically synthesized
ttattaagtggtattaactc

SEQ ID NO: 60017 - DNA, 20 bp, Artificial Sequence
  chemically synthesized
tagcctttttacatttttct

SEQ ID NO: 60018 - DNA, 20 bp, Artificial Sequence
  chemically synthesized
ccagctttatattctggctc

SEQ ID NO: 60019 - DNA, 20 bp, Artificial Sequence
  chemically synthesized
cagcaggggcaggggcctca

SEQ ID NO: 60020 - DNA, 20 bp, Artificial Sequence
  chemically synthesized
aaggactttcagtcacctct

SEQ ID NO: 60021 - DNA, 20 bp, Artificial Sequence
  chemically synthesized
agaggggctgtgggttgtct

SEQ ID NO: 60022 - DNA, 20 bp, Artificial Sequence
  chemically synthesized
tgagcccatactttaatctc

SEQ ID NO: 60023 - DNA, 20 bp, Artificial Sequence
  chemically synthesized
tttttaaaaatcatatttat

SEQ ID NO: 60024 - DNA, 20 bp, Artificial Sequence
  chemically synthesized
tattaagaatacaagaagta

SEQ ID NO: 60025 - DNA, 20 bp, Artificial Sequence
  chemically synthesized
aatacaagaagtacaatgtt

SEQ ID NO: 60026 - DNA, 20 bp, Artificial Sequence
  chemically synthesized
ttctttaacacctgtgatac

SEQ ID NO: 60027 - DNA, 20 bp, Artificial Sequence
  chemically synthesized
tgaattctacgtaatggctg

SEQ ID NO: 60028 - DNA, 20 bp, Artificial Sequence
  chemically synthesized
tgcaggacttgggtaatctc

SEQ ID NO: 60029 - DNA, 20 bp, Artificial Sequence
  chemically synthesized
acttgggtaatctctggggt

SEQ ID NO: 60030 - DNA, 20 bp, Artificial Sequence
  chemically synthesized
ctccagacctccattctctc

SEQ ID NO: 60031 - DNA, 20 bp, Artificial Sequence
  chemically synthesized
aaatcttaaataagaataaa

SEQ ID NO: 60032 - DNA, 20 bp, Artificial Sequence
  chemically synthesized
taagaataaatcatgtttgc

SEQ ID NO: 60033 - DNA, 20 bp, Artificial Sequence
  chemically synthesized
catcagtggcaactgtgttg

SEQ ID NO: 60034 - DNA, 20 bp, Artificial Sequence
  chemically synthesized
tagaaatgaaccttggaggc

SEQ ID NO: 60035 - DNA, 20 bp, Artificial Sequence
  chemically synthesized
aatgaaccttggaggccatt

SEQ ID NO: 60036 - DNA, 20 bp, Artificial Sequence
  chemically synthesized
caaagaaggccatttttgta

SEQ ID NO: 60037 - DNA, 20 bp, Artificial Sequence
  chemically synthesized
ccactattagttggggagaa

SEQ ID NO: 60038 - DNA, 20 bp, Artificial Sequence
  chemically synthesized
ttccaaggtgttgataggca

SEQ ID NO: 60039 - DNA, 20 bp, Artificial Sequence
  chemically synthesized
gaacctgggaccaatactgc

SEQ ID NO: 60040 - DNA, 20 bp, Artificial Sequence
  chemically synthesized
aggcaacaaatctgttcaaa

SEQ ID NO: 60041 - DNA, 20 bp, Artificial Sequence
  chemically synthesized
aggctccttaggacacctgg

SEQ ID NO: 60042 - DNA, 20 bp, Artificial Sequence
  chemically synthesized
tccatctctggcacaaaatg

SEQ ID NO: 60043 - DNA, 20 bp, Artificial Sequence
  chemically synthesized
ggctaataaaatgaagatag

SEQ ID NO: 60044 - DNA, 20 bp, Artificial Sequence
  chemically synthesized
gatgacacactgcagagaac

SEQ ID NO: 60045 - DNA, 20 bp, Artificial Sequence
  chemically synthesized
atccagtagaaaggcagatg

SEQ ID NO: 60046 - DNA, 20 bp, Artificial Sequence
  chemically synthesized
caaggaggaggatgcacgct

SEQ ID NO: 60047 - DNA, 20 bp, Artificial Sequence
  chemically synthesized
aatatgctctatgctggaaa

SEQ ID NO: 60048 - DNA, 20 bp, Artificial Sequence
  chemically synthesized
atatccatgtcttcaccccg

SEQ ID NO: 60049 - DNA, 20 bp, Artificial Sequence
  chemically synthesized
actctcttttccaggaagag

SEQ ID NO: 60050 - DNA, 20 bp, Artificial Sequence
  chemically synthesized
aaacacacaataaattaata

SEQ ID NO: 60051 - DNA, 20 bp, Artificial Sequence
  chemically synthesized
gttcagttaaacattttgaa

SEQ ID NO: 60052 - DNA, 20 bp, Artificial Sequence
  chemically synthesized
cctgtaactgtgtcatttta

SEQ ID NO: 60053 - DNA, 20 bp, Artificial Sequence
  chemically synthesized
caatttttctttttttaacc

SEQ ID NO: 60054 - DNA, 20 bp, Artificial Sequence
  chemically synthesized
tgatgatttttccacaatcc

SEQ ID NO: 60055 - DNA, 20 bp, Artificial Sequence
  chemically synthesized
tttccacaatccttttgttt

SEQ ID NO: 60056 - DNA, 20 bp, Artificial Sequence
  chemically synthesized
ctccagggctcatatggcaa

SEQ ID NO: 60057 - DNA, 20 bp, Artificial Sequence
  chemically synthesized
atatggcaatggggatttaa

SEQ ID NO: 60058 - DNA, 20 bp, Artificial Sequence
  chemically synthesized
cttagcaatttgtgaataga

SEQ ID NO: 60059 - DNA, 20 bp, Artificial Sequence
  chemically synthesized
tttgtgaatagaagatgttt

SEQ ID NO: 60060 - DNA, 20 bp, Artificial Sequence
  chemically synthesized
gataacacgtccacagaaag

SEQ ID NO: 60061 - DNA, 20 bp, Artificial Sequence
  chemically synthesized
cagaaagcctggctttccaa

SEQ ID NO: 60062 - DNA, 20 bp, Artificial Sequence
  chemically synthesized
atcagagaatgtgcccccca

SEQ ID NO: 60063 - DNA, 20 bp, Artificial Sequence
  chemically synthesized
atatgttaatcctgtggcag

SEQ ID NO: 60064 - DNA, 20 bp, Artificial Sequence
  chemically synthesized
aagttcacagtgatctacat

SEQ ID NO: 60065 - DNA, 20 bp, Artificial Sequence
  chemically synthesized
accaatttccccaaaaaact

SEQ ID NO: 60066 - DNA, 20 bp, Artificial Sequence
  chemically synthesized
ttttctttgatattttcttg

SEQ ID NO: 60067 - DNA, 20 bp, Artificial Sequence
  chemically synthesized
atggcttccactaaattcaa

SEQ ID NO: 60068 - DNA, 20 bp, Artificial Sequence
  chemically synthesized
taaaattttatctggtaatt

SEQ ID NO: 60069 - DNA, 20 bp, Artificial Sequence
  chemically synthesized
gcaagttcatctaactatgt

SEQ ID NO: 60070 - DNA, 20 bp, Artificial Sequence
  chemically synthesized
gatggaactcctgagttcac

SEQ ID NO: 60071 - DNA, 20 bp, Artificial Sequence
  chemically synthesized
actacaaaactctcaccctc

SEQ ID NO: 60072 - DNA, 20 bp, Artificial Sequence
  chemically synthesized
tgctgcatttcttcccctaa

SEQ ID NO: 60073 - DNA, 20 bp, Artificial Sequence
  chemically synthesized
accagacttctctcttctta

SEQ ID NO: 60074 - DNA, 20 bp, Artificial Sequence
  chemically synthesized
tgctcttcagttacattgga

SEQ ID NO: 60075 - DNA, 20 bp, Artificial Sequence
  chemically synthesized
ttcagttacattggaatgtg

SEQ ID NO: 60076 - DNA, 20 bp, Artificial Sequence
  chemically synthesized
gatgaaaaagtgagaagagc

SEQ ID NO: 60077 - DNA, 20 bp, Artificial Sequence
  chemically synthesized
cctagattttttcttggaaa

SEQ ID NO: 60078 - DNA, 20 bp, Artificial Sequence
  chemically synthesized
cttggaaatctggcttaaat

SEQ ID NO: 60079 - DNA, 20 bp, Artificial Sequence
  chemically synthesized
aaatccaggtttctttattt

SEQ ID NO: 60080 - DNA, 20 bp, Artificial Sequence
  chemically synthesized
atttggtcacgagacaaata

SEQ ID NO: 60081 - DNA, 20 bp, Artificial Sequence
  chemically synthesized
aataacatgattttcctaag

SEQ ID NO: 60082 - DNA, 20 bp, Artificial Sequence
  chemically synthesized
attttcctaagtctagattt

SEQ ID NO: 60083 - DNA, 20 bp, Artificial Sequence
  chemically synthesized
acatattcaaagagttattt

SEQ ID NO: 60084 - DNA, 20 bp, Artificial Sequence
  chemically synthesized
atgaaactgagaaccaagcg

SEQ ID NO: 60085 - DNA, 20 bp, Artificial Sequence
  chemically synthesized
ccatcatgtaggcacactct

SEQ ID NO: 60086 - DNA, 20 bp, Artificial Sequence
  chemically synthesized
taagaatttttcaatcatat

SEQ ID NO: 60087 - DNA, 20 bp, Artificial Sequence
  chemically synthesized
atttaaaaaaactatgtctt

SEQ ID NO: 60088 - DNA, 20 bp, Artificial Sequence
  chemically synthesized
accagatagtcaaattaagt

SEQ ID NO: 60089 - DNA, 20 bp, Artificial Sequence
  chemically synthesized
cacccctagaccttcatctt

SEQ ID NO: 60090 - DNA, 20 bp, Artificial Sequence
  chemically synthesized
ccttcatctttcctgattag

SEQ ID NO: 60091 - DNA, 20 bp, Artificial Sequence
  chemically synthesized
ctgcacatccatagcctccc

SEQ ID NO: 60092 - DNA, 20 bp, Artificial Sequence
  chemically synthesized
tagacacaaccctttcaggt

SEQ ID NO: 60093 - DNA, 20 bp, Artificial Sequence
  chemically synthesized
tatttattcctagtgaactc

SEQ ID NO: 60094 - DNA, 20 bp, Artificial Sequence
  chemically synthesized
cagatggatcacctgaggcc

SEQ ID NO: 60095 - DNA, 20 bp, Artificial Sequence
  chemically synthesized
taagtaggctgaggcactag

SEQ ID NO: 60096 - DNA, 20 bp, Artificial Sequence
  chemically synthesized
atccttcctattctagtagt

SEQ ID NO: 60097 - DNA, 20 bp, Artificial Sequence
  chemically synthesized
gacaggtggatcacaaggtc

SEQ ID NO: 60098 - DNA, 20 bp, Artificial Sequence
  chemically synthesized
caagatggttaggaggctcc

SEQ ID NO: 60099 - DNA, 20 bp, Artificial Sequence
  chemically synthesized
atacatttgggacagatcta

SEQ ID NO: 60100 - DNA, 20 bp, Artificial Sequence
  chemically synthesized
acacttagactggggtcttc

SEQ ID NO: 60101 - DNA, 20 bp, Artificial Sequence
  chemically synthesized
aaatgcccagcacagagctc

SEQ ID NO: 60102 - DNA, 20 bp, Artificial Sequence
  chemically synthesized
ctcttccattcagaaactca

SEQ ID NO: 60103 - DNA, 20 bp, Artificial Sequence
  chemically synthesized
tcattctcaatcacagggag

SEQ ID NO: 60104 - DNA, 20 bp, Artificial Sequence
  chemically synthesized
aaagccagccccaaaggtac

SEQ ID NO: 60105 - DNA, 20 bp, Artificial Sequence
  chemically synthesized
aagagtctatgttccaaaaa

SEQ ID NO: 60106 - DNA, 20 bp, Artificial Sequence
  chemically synthesized
aaaaacctggatttaacaat

SEQ ID NO: 60107 - DNA, 20 bp, Artificial Sequence
  chemically synthesized
taacaatctgagctttgtca

SEQ ID NO: 60108 - DNA, 20 bp, Artificial Sequence
  chemically synthesized
catggtgctttgcggttggt

SEQ ID NO: 60109 - DNA, 20 bp, Artificial Sequence
  chemically synthesized
tgttgtttctttaccttttt

SEQ ID NO: 60110 - DNA, 20 bp, Artificial Sequence
  chemically synthesized
gcttttaaaaccataaagaa

SEQ ID NO: 60111 - DNA, 20 bp, Artificial Sequence
  chemically synthesized
agtctgagaaatgcaattgc

SEQ ID NO: 60112 - DNA, 20 bp, Artificial Sequence
  chemically synthesized
tttatattttcagacttttt

SEQ ID NO: 60113 - DNA, 20 bp, Artificial Sequence
  chemically synthesized
tcatatcacaaaatttcaca

SEQ ID NO: 60114 - DNA, 20 bp, Artificial Sequence
  chemically synthesized
ttttcactcaacattacata

SEQ ID NO: 60115 - DNA, 20 bp, Artificial Sequence
  chemically synthesized
ctaatattttaaaggagagc

SEQ ID NO: 60116 - DNA, 20 bp, Artificial Sequence
  chemically synthesized
gagctactgattaatgagca

SEQ ID NO: 60117 - DNA, 20 bp, Artificial Sequence
  chemically synthesized
aagcattatcctttccaggc

SEQ ID NO: 60118 - DNA, 20 bp, Artificial Sequence
  chemically synthesized
ggtctgcggagtcactgccc

SEQ ID NO: 60119 - DNA, 20 bp, Artificial Sequence
  chemically synthesized
cccgtgcgcgttggcccccc

SEQ ID NO: 60120 - DNA, 20 bp, Artificial Sequence
  chemically synthesized
aatctaacaggttgaaattg

SEQ ID NO: 60121 - DNA, 20 bp, Artificial Sequence
  chemically synthesized
tctttgacaatttgggagag

SEQ ID NO: 60122 - DNA, 20 bp, Artificial Sequence
  chemically synthesized
gagagtgaagattctcctgg

SEQ ID NO: 60123 - DNA, 20 bp, Artificial Sequence
  chemically synthesized
gtgtttattcttttgtgaaa

SEQ ID NO: 60124 - DNA, 20 bp, Artificial Sequence
  chemically synthesized
tgcaaaattgccagaggaaa

SEQ ID NO: 60125 - DNA, 20 bp, Artificial Sequence
  chemically synthesized
ttccagatggacacacccag

SEQ ID NO: 60126 - DNA, 20 bp, Artificial Sequence
  chemically synthesized
ttcagtgttctcacaaataa

SEQ ID NO: 60127 - DNA, 20 bp, Artificial Sequence
  chemically synthesized
cagttttctaattttgcaag

SEQ ID NO: 60128 - DNA, 20 bp, Artificial Sequence
  chemically synthesized
cattagaattttgcaaaaat

SEQ ID NO: 60129 - DNA, 20 bp, Artificial Sequence
  chemically synthesized
gttgacatgagcagcatgga

SEQ ID NO: 60130 - DNA, 20 bp, Artificial Sequence
  chemically synthesized
tctgggcagagctgcatgat

SEQ ID NO: 60131 - DNA, 20 bp, Artificial Sequence
  chemically synthesized
caggtaggccacaggtgaca

SEQ ID NO: 60132 - DNA, 20 bp, Artificial Sequence
  chemically synthesized
gtccagcggcaggatcagtc

SEQ ID NO: 60133 - DNA, 20 bp, Artificial Sequence
  chemically synthesized
aattgatgaacaggcctgag

SEQ ID NO: 60134 - DNA, 20 bp, Artificial Sequence
  chemically synthesized
gctaatggtggtggtaatga

SEQ ID NO: 60135 - DNA, 20 bp, Artificial Sequence
  chemically synthesized
tcatcagtagacatcatata

SEQ ID NO: 60136 - DNA, 20 bp, Artificial Sequence
  chemically synthesized
tagctggcccagagcctact

SEQ ID NO: 60137 - DNA, 20 bp, Artificial Sequence
  chemically synthesized
tttctaaccaccatccccca

SEQ ID NO: 60138 - DNA, 20 bp, Artificial Sequence
  chemically synthesized
cacctgcaggtccactgaga

SEQ ID NO: 60139 - DNA, 20 bp, Artificial Sequence
  chemically synthesized
tcagcctctgagagggaggt

SEQ ID NO: 60140 - DNA, 20 bp, Artificial Sequence
  chemically synthesized
aagttttcctgctctcccct

SEQ ID NO: 60141 - DNA, 20 bp, Artificial Sequence
  chemically synthesized
tccctgacttggatcaaatg

SEQ ID NO: 60142 - DNA, 20 bp, Artificial Sequence
  chemically synthesized
gtttggaggtgttgaggcca

SEQ ID NO: 60143 - DNA, 20 bp, Artificial Sequence
  chemically synthesized
ctccccaaggccccatcagg

SEQ ID NO: 60144 - DNA, 20 bp, Artificial Sequence
  chemically synthesized
aactttcctggcaacttgcg

SEQ ID NO: 60145 - DNA, 20 bp, Artificial Sequence
  chemically synthesized
gtaggttttcaccattatca

SEQ ID NO: 60146 - DNA, 20 bp, Artificial Sequence
  chemically synthesized
gatgtttgccttgctcaaat

SEQ ID NO: 60147 - DNA, 20 bp, Artificial Sequence
  chemically synthesized
caggtgatgcaccctctgcc

SEQ ID NO: 60148 - DNA, 20 bp, Artificial Sequence
  chemically synthesized
acttccatcatgcagctctg

SEQ ID NO: 60149 - DNA, 20 bp, Artificial Sequence
  chemically synthesized
catgtcaactccagatgcag

SEQ ID NO: 60150 - DNA, 20 bp, Artificial Sequence
  chemically synthesized
cctgtgccatgctcgcaaag

SEQ ID NO: 60151 - DNA, 20 bp, Artificial Sequence
  chemically synthesized
ttgcaaaattctaatgaaag

SEQ ID NO: 60152 - DNA, 20 bp, Artificial Sequence
  chemically synthesized
tgggcttgcaaaattagaaa

SEQ ID NO: 60153 - DNA, 20 bp, Artificial Sequence
  chemically synthesized
gaatttggcaaagaaaataa

SEQ ID NO: 60154 - DNA, 20 bp, Artificial Sequence
  chemically synthesized
aatcaggacaatttcaacct

SEQ ID NO: 60155 - DNA, 20 bp, Artificial Sequence
  chemically synthesized
acactcatacaagtgtggtg

SEQ ID NO: 60156 - DNA, 20 bp, Artificial Sequence
  chemically synthesized
tcatacaagtgtggtgaagt

SEQ ID NO: 60157 - DNA, 20 bp, Artificial Sequence
  chemically synthesized
actagacaacctccttacac

SEQ ID NO: 60158 - DNA, 20 bp, Artificial Sequence
  chemically synthesized
agagcaggagtgatggaact

SEQ ID NO: 60159 - DNA, 20 bp, Artificial Sequence
  chemically synthesized
gaagtgagatacaccacatt

SEQ ID NO: 60160 - DNA, 20 bp, Artificial Sequence
  chemically synthesized
aagcttgtgcctggaaagga

SEQ ID NO: 60161 - DNA, 20 bp, Artificial Sequence
  chemically synthesized
tacatttaaacattattctt

SEQ ID NO: 60162 - DNA, 20 bp, Artificial Sequence
  chemically synthesized
cgcaaagcaccatgacaaag

SEQ ID NO: 60163 - DNA, 20 bp, Artificial Sequence
  chemically synthesized
caaagctcagattgttaaat

SEQ ID NO: 60164 - DNA, 20 bp, Artificial Sequence
  chemically synthesized
ttggaacatagactcttata

SEQ ID NO: 60165 - DNA, 20 bp, Artificial Sequence
  chemically synthesized
tcaccactgctctgttcttc

SEQ ID NO: 60166 - DNA, 20 bp, Artificial Sequence
  chemically synthesized
taaacacaggtacctttggg

SEQ ID NO: 60167 - DNA, 20 bp, Artificial Sequence
  chemically synthesized
tctcaaggaagcccagctcc

SEQ ID NO: 60168 - DNA, 20 bp, Artificial Sequence
  chemically synthesized
gaatgaagtgtgcaatcgct

SEQ ID NO: 60169 - DNA, 20 bp, Artificial Sequence
  chemically synthesized
tcccaaagtagcgaattcaa

SEQ ID NO: 60170 - DNA, 20 bp, Artificial Sequence
  chemically synthesized
gatcatccaaggggacttct

SEQ ID NO: 60171 - DNA, 20 bp, Artificial Sequence
  chemically synthesized
ccggtggccagggactaaag

SEQ ID NO: 60172 - DNA, 20 bp, Artificial Sequence
  chemically synthesized
cagagttggcgtgtctcccc

SEQ ID NO: 60173 - DNA, 20 bp, Artificial Sequence
  chemically synthesized
ctccccaattgatttacaac

SEQ ID NO: 60174 - DNA, 20 bp, Artificial Sequence
  chemically synthesized
atttacaactggggcttgga

SEQ ID NO: 60175 - DNA, 20 bp, Artificial Sequence
  chemically synthesized
tttccacttaattctaccac

SEQ ID NO: 60176 - DNA, 20 bp, Artificial Sequence
  chemically synthesized
tacttcatgagaacgaaaat

SEQ ID NO: 60177 - DNA, 20 bp, Artificial Sequence
  chemically synthesized
gcaccatgaattcatttgcg

SEQ ID NO: 60178 - DNA, 20 bp, Artificial Sequence
  chemically synthesized
catttgcggaaagattgata

SEQ ID NO: 60179 - DNA, 20 bp, Artificial Sequence
  chemically synthesized
accccggttgaagtgcactg

SEQ ID NO: 60180 - DNA, 20 bp, Artificial Sequence
  chemically synthesized
tactccagcctccctagtag

SEQ ID NO: 60181 - DNA, 20 bp, Artificial Sequence
  chemically synthesized
ttttgtatttttagtagaga

SEQ ID NO: 60182 - DNA, 20 bp, Artificial Sequence
  chemically synthesized
tgtcttggcctcccaaagtg

SEQ ID NO: 60183 - DNA, 20 bp, Artificial Sequence
  chemically synthesized
ttgagccaccgcactcgacc

SEQ ID NO: 60184 - DNA, 20 bp, Artificial Sequence
  chemically synthesized
agccacaactactagaatag

SEQ ID NO: 60185 - DNA, 20 bp, Artificial Sequence
  chemically synthesized
ttttgtattttttgtagaga

SEQ ID NO: 60186 - DNA, 20 bp, Artificial Sequence
  chemically synthesized
acagggttttggcatgttgc

SEQ ID NO: 60187 - DNA, 20 bp, Artificial Sequence
  chemically synthesized
tgccgtggcctcccaaaatg

SEQ ID NO: 60188 - DNA, 20 bp, Artificial Sequence
  chemically synthesized
tgagccaccaccccctcctg

SEQ ID NO: 60189 - DNA, 20 bp, Artificial Sequence
  chemically synthesized
aaataaattttgaagataat

SEQ ID NO: 60190 - DNA, 20 bp, Artificial Sequence
  chemically synthesized
cacttatgttgtcatttcgg

SEQ ID NO: 60191 - DNA, 20 bp, Artificial Sequence
  chemically synthesized
tggagatgttaacatttata

SEQ ID NO: 60192 - DNA, 20 bp, Artificial Sequence
  chemically synthesized
tcgtacagcactgcctgttg

SEQ ID NO: 60193 - DNA, 20 bp, Artificial Sequence
  chemically synthesized
ccagcaaatatgagctactt

SEQ ID NO: 60194 - DNA, 20 bp, Artificial Sequence
  chemically synthesized
gtggagcagctgagggggga

SEQ ID NO: 60195 - DNA, 20 bp, Artificial Sequence
  chemically synthesized
ataagactctatattcaagg

SEQ ID NO: 60196 - DNA, 20 bp, Artificial Sequence
  chemically synthesized
tcattaacttaatttgacta

SEQ ID NO: 60197 - DNA, 20 bp, Artificial Sequence
  chemically synthesized
tttgactatctggtttgtgg

SEQ ID NO: 60198 - DNA, 20 bp, Artificial Sequence
  chemically synthesized
tcatgtaagtcaacaatgtc

SEQ ID NO: 60199 - DNA, 20 bp, Artificial Sequence
  chemically synthesized
atttctgaaatcaggtaaga

SEQ ID NO: 60200 - DNA, 20 bp, Artificial Sequence
  chemically synthesized
tgtagtaaaaatacatatgc

SEQ ID NO: 60201 - DNA, 20 bp, Artificial Sequence
  chemically synthesized
ttatgtgcaattcatttaat

SEQ ID NO: 60202 - DNA, 20 bp, Artificial Sequence
  chemically synthesized
ttcccagttcaaaatcttgt

SEQ ID NO: 60203 - DNA, 20 bp, Artificial Sequence
  chemically synthesized
attgaaaaattcttaaaaaa

SEQ ID NO: 60204 - DNA, 20 bp, Artificial Sequence
  chemically synthesized
gaatgggcagaaaaaataat

SEQ ID NO: 60205 - DNA, 20 bp, Artificial Sequence
  chemically synthesized
atgcaaaggatggctaagct

SEQ ID NO: 60206 - DNA, 20 bp, Artificial Sequence
  chemically synthesized
gctaagctcttcgcttggtt

SEQ ID NO: 60207 - DNA, 20 bp, Artificial Sequence
  chemically synthesized
acaatgaaataactctttga

SEQ ID NO: 60208 - DNA, 20 bp, Artificial Sequence
  chemically synthesized
tctctttgttatggcctgag

SEQ ID NO: 60209 - DNA, 20 bp, Artificial Sequence
  chemically synthesized
aaggctttccatcggtatac

SEQ ID NO: 60210 - DNA, 20 bp, Artificial Sequence
  chemically synthesized
tgccagatgatatacgcata

SEQ ID NO: 60211 - DNA, 20 bp, Artificial Sequence
  chemically synthesized
catacacacatacacaccgt

SEQ ID NO: 60212 - DNA, 20 bp, Artificial Sequence
  chemically synthesized
agtgtgtgtcctttacaaat

SEQ ID NO: 60213 - DNA, 20 bp, Artificial Sequence
  chemically synthesized
aaatcaaggaaataaagaaa

SEQ ID NO: 60214 - DNA, 20 bp, Artificial Sequence
  chemically synthesized
ataaagaaacctggatttaa

SEQ ID NO: 60215 - DNA, 20 bp, Artificial Sequence
  chemically synthesized
atgtaactgaagagcaggtt

SEQ ID NO: 60216 - DNA, 20 bp, Artificial Sequence
  chemically synthesized
agagaagtctggtataaaga

SEQ ID NO: 60217 - DNA, 20 bp, Artificial Sequence
  chemically synthesized
agtctggtataaagaaagtg

SEQ ID NO: 60218 - DNA, 20 bp, Artificial Sequence
  chemically synthesized
gaaagtgatttgcttccaaa

SEQ ID NO: 60219 - DNA, 20 bp, Artificial Sequence
  chemically synthesized
aaggcaacagaggaggcgag

SEQ ID NO: 60220 - DNA, 20 bp, Artificial Sequence
  chemically synthesized
gcaaggattcaggggtccat

SEQ ID NO: 60221 - DNA, 20 bp, Artificial Sequence
  chemically synthesized
gaggcaaatctctggagggt

SEQ ID NO: 60222 - DNA, 20 bp, Artificial Sequence
  chemically synthesized
gggtgagagttttgtagtgg

SEQ ID NO: 60223 - DNA, 20 bp, Artificial Sequence
  chemically synthesized
gagttttgtagtgggcatgc

SEQ ID NO: 60224 - DNA, 20 bp, Artificial Sequence
  chemically synthesized
gagtctgatgaaagggaggt

SEQ ID NO: 60225 - DNA, 20 bp, Artificial Sequence
  chemically synthesized
caaagaaaatacagagcagg

SEQ ID NO: 60226 - DNA, 20 bp, Artificial Sequence
  chemically synthesized
gagcaggagaagattaagca

SEQ ID NO: 60227 - DNA, 20 bp, Artificial Sequence
  chemically synthesized
ctagaacaaacttctctgcc

SEQ ID NO: 60228 - DNA, 20 bp, Artificial Sequence
  chemically synthesized
ttctctgccacaggattaac

SEQ ID NO: 60229 - DNA, 20 bp, Artificial Sequence
  chemically synthesized
tgataagctcttttggaaag

SEQ ID NO: 60230 - DNA, 20 bp, Artificial Sequence
  chemically synthesized
tggaatgcccggggagagga

SEQ ID NO: 60231 - DNA, 20 bp, Artificial Sequence
  chemically synthesized
ataaaagtatttttcctatt

SEQ ID NO: 60232 - DNA, 20 bp, Artificial Sequence
  chemically synthesized
agtatttttcctattaaaag

SEQ ID NO: 60233 - DNA, 20 bp, Artificial Sequence
  chemically synthesized
ttcctattaaaagatttgtt

SEQ ID NO: 60234 - DNA, 20 bp, Artificial Sequence
  chemically synthesized
ggaggtgaatcagagaaaca

SEQ ID NO: 60235 - DNA, 20 bp, Artificial Sequence
  chemically synthesized
catcaggttaaaaaaagaaa

SEQ ID NO: 60236 - DNA, 20 bp, Artificial Sequence
  chemically synthesized
gttaaaaaaagaaaaattga

SEQ ID NO: 60237 - DNA, 20 bp, Artificial Sequence
  chemically synthesized
agttaaagggggaaataaat

SEQ ID NO: 60238 - DNA, 20 bp, Artificial Sequence
  chemically synthesized
catttcaaaaacactcttca

SEQ ID NO: 60239 - DNA, 20 bp, Artificial Sequence
  chemically synthesized
aagcaccttattaatttatt

SEQ ID NO: 60240 - DNA, 20 bp, Artificial Sequence
  chemically synthesized
gatattttgatatatctatc

SEQ ID NO: 60241 - DNA, 20 bp, Artificial Sequence
  chemically synthesized
atatctatcaagtgcttttt

SEQ ID NO: 60242 - DNA, 20 bp, Artificial Sequence
  chemically synthesized
agccaatgcctgttcaataa

SEQ ID NO: 60243 - DNA, 20 bp, Artificial Sequence
  chemically synthesized
cctgtattccctagaagtct

SEQ ID NO: 60244 - DNA, 20 bp, Artificial Sequence
  chemically synthesized
aagtctcgctgctttcagag

SEQ ID NO: 60245 - DNA, 20 bp, Artificial Sequence
  chemically synthesized
caaagtggtcaaggttgtcc

SEQ ID NO: 60246 - DNA, 20 bp, Artificial Sequence
  chemically synthesized
gtcctgttgcttaattccat

SEQ ID NO: 60247 - DNA, 20 bp, Artificial Sequence
  chemically synthesized
cagagatggagctggcatct

SEQ ID NO: 60248 - DNA, 20 bp, Artificial Sequence
  chemically synthesized
tttgccacaaccaggcagaa

SEQ ID NO: 60249 - DNA, 20 bp, Artificial Sequence
  chemically synthesized
caggcagaaagcagcttttg

SEQ ID NO: 60250 - DNA, 20 bp, Artificial Sequence
  chemically synthesized
cttttgaacagatttgttgc

SEQ ID NO: 60251 - DNA, 20 bp, Artificial Sequence
  chemically synthesized
tgggcagtattggtcccagg

SEQ ID NO: 60252 - DNA, 20 bp, Artificial Sequence
  chemically synthesized
aaaaatggccttctttgtgg

SEQ ID NO: 60253 - DNA, 20 bp, Artificial Sequence
  chemically synthesized
cttcatatcctccatttttt

SEQ ID NO: 60254 - DNA, 20 bp, Artificial Sequence
  chemically synthesized
taaaggagggaccattcaga

SEQ ID NO: 60255 - DNA, 20 bp, Artificial Sequence
  chemically synthesized
ctccaaggttcatttctaca

SEQ ID NO: 60256 - DNA, 20 bp, Artificial Sequence
  chemically synthesized
gacatggcaatcaagagcaa

SEQ ID NO: 60257 - DNA, 20 bp, Artificial Sequence
  chemically synthesized
caaacatgatttattcttat

SEQ ID NO: 60258 - DNA, 20 bp, Artificial Sequence
  chemically synthesized
gtctggagaatctgaaaccc

SEQ ID NO: 60259 - DNA, 20 bp, Artificial Sequence
  chemically synthesized
tgtacttcttgtattcttaa

SEQ ID NO: 60260 - DNA, 20 bp, Artificial Sequence
  chemically synthesized
atcactgcaaacctctataa

SEQ ID NO: 60261 - DNA, 20 bp, Artificial Sequence
  chemically synthesized
ctacgcattgacttatcttc

SEQ ID NO: 60262 - DNA, 20 bp, Artificial Sequence
  chemically synthesized
cgttgtactttcttccttac

SEQ ID NO: 60263 - DNA, 20 bp, Artificial Sequence
  chemically synthesized
ccactgtttatctcaaactc

SEQ ID NO: 60264 - DNA, 20 bp, Artificial Sequence
  chemically synthesized
tatgggctcaggagggagcg

SEQ ID NO: 60265 - DNA, 20 bp, Artificial Sequence
  chemically synthesized
gccttatggaaaagtggcca

SEQ ID NO: 60266 - DNA, 20 bp, Artificial Sequence
  chemically synthesized
cattttagtcagtgttggct

SEQ ID NO: 60267 - DNA, 20 bp, Artificial Sequence
  chemically synthesized
cagtaccaccgttaatgccc

SEQ ID NO: 60268 - DNA, 20 bp, Artificial Sequence
  chemically synthesized
gcacacagcagggaaagaat

SEQ ID NO: 60269 - DNA, 20 bp, Artificial Sequence
  chemically synthesized
aattccagtttctctttctt

SEQ ID NO: 60270 - DNA, 20 bp, Artificial Sequence
  chemically synthesized
actcttcaccaggcaaggct

SEQ ID NO: 60271 - DNA, 20 bp, Artificial Sequence
  chemically synthesized
acatttccactggctgcact

SEQ ID NO: 60272 - DNA, 20 bp, Artificial Sequence
  chemically synthesized
agggaaggaaaaaagatcct

SEQ ID NO: 60273 - DNA, 20 bp, Artificial Sequence
  chemically synthesized
gaaaaatgtaaaaaggctag

SEQ ID NO: 60274 - DNA, 20 bp, Artificial Sequence
  chemically synthesized
ttggactgtcttccttgctc

SEQ ID NO: 60275 - DNA, 20 bp, Artificial Sequence
  chemically synthesized
ctctagagaaccccgactaa

SEQ ID NO: 60276 - DNA, 20 bp, Artificial Sequence
  chemically synthesized
attaaggatggaattctttc

SEQ ID NO: 60277 - DNA, 20 bp, Artificial Sequence
  chemically synthesized
gttttgggacttctggtgtt

SEQ ID NO: 60278 - DNA, 20 bp, Artificial Sequence
  chemically synthesized
cttctggtgttggctgatta

SEQ ID NO: 60279 - DNA, 20 bp, Artificial Sequence
  chemically synthesized
cactgatagtacttggcctg

SEQ ID NO: 60280 - DNA, 20 bp, Artificial Sequence
  chemically synthesized
aaaataaatgcatttgacac

SEQ ID NO: 60281 - DNA, 20 bp, Artificial Sequence
  chemically synthesized
ttcatcacttatgagaggca

SEQ ID NO: 60282 - DNA, 20 bp, Artificial Sequence
  chemically synthesized
ccaaggaacataatgaagtt

SEQ ID NO: 60283 - DNA, 20 bp, Artificial Sequence
  chemically synthesized
gatactgagccacaaatctg

SEQ ID NO: 60284 - DNA, 20 bp, Artificial Sequence
  chemically synthesized
ctgctaagattgccctgaat

SEQ ID NO: 60285 - DNA, 20 bp, Artificial Sequence
  chemically synthesized
ggtgcatgcacagccttgcc

SEQ ID NO: 60286 - DNA, 20 bp, Artificial Sequence
  chemically synthesized
ccctgatgaagctgaggaca

SEQ ID NO: 60287 - DNA, 20 bp, Artificial Sequence
  chemically synthesized
gaaacttttttgccagaaga

SEQ ID NO: 60288 - DNA, 20 bp, Artificial Sequence
  chemically synthesized
gtctgaggatgtaaaccctg

SEQ ID NO: 60289 - DNA, 20 bp, Artificial Sequence
  chemically synthesized
gcagctgccaggcaagataa

SEQ ID NO: 60290 - DNA, 20 bp, Artificial Sequence
  chemically synthesized
gaggcacccctaatgcccct

SEQ ID NO: 60291 - DNA, 20 bp, Artificial Sequence
  chemically synthesized
ggtgcattatactctaaaag

SEQ ID NO: 60292 - DNA, 20 bp, Artificial Sequence
  chemically synthesized
ttatactctaaaagaactgc

SEQ ID NO: 60293 - DNA, 20 bp, Artificial Sequence
  chemically synthesized
agttggatcaagctgaattt

SEQ ID NO: 60294 - DNA, 20 bp, Artificial Sequence
  chemically synthesized
attggtttggccctactaag

SEQ ID NO: 60295 - DNA, 20 bp, Artificial Sequence
  chemically synthesized
ggcgggcagatcacgagatc

SEQ ID NO: 60296 - DNA, 20 bp, Artificial Sequence
  chemically synthesized
ttgggaggctgaggcaagag

SEQ ID NO: 60297 - DNA, 20 bp, Artificial Sequence
  chemically synthesized
aactgcttgaacctgtgagg

SEQ ID NO: 60298 - DNA, 20 bp, Artificial Sequence
  chemically synthesized
aaaaaaaaaaaaaaagttat

SEQ ID NO: 60299 - DNA, 20 bp, Artificial Sequence
  chemically synthesized
aaaaaaagttataatagttt

SEQ ID NO: 60300 - DNA, 20 bp, Artificial Sequence
  chemically synthesized
atttgcttggttagctgaaa

SEQ ID NO: 60301 - DNA, 20 bp, Artificial Sequence
  chemically synthesized
tgttagtgagctggaaatgc

SEQ ID NO: 60302 - DNA, 20 bp, Artificial Sequence
  chemically synthesized
taatgtagaggaagtgatcc

SEQ ID NO: 60303 - DNA, 20 bp, Artificial Sequence
  chemically synthesized
ggaagtgatccaaaggctta

SEQ ID NO: 60304 - DNA, 20 bp, Artificial Sequence
  chemically synthesized
tagggagattaggatggtgg

SEQ ID NO: 60305 - DNA, 20 bp, Artificial Sequence
  chemically synthesized
ccagaagatacacccttggc

SEQ ID NO: 60306 - DNA, 20 bp, Artificial Sequence
  chemically synthesized
ccttggccgaagctttgtga

SEQ ID NO: 60307 - DNA, 20 bp, Artificial Sequence
  chemically synthesized
gggaaacctactgtattcct

SEQ ID NO: 60308 - DNA, 20 bp, Artificial Sequence
  chemically synthesized
ggacactggctctgagctga

SEQ ID NO: 60309 - DNA, 20 bp, Artificial Sequence
  chemically synthesized
tgtggttccccagttaaagt

SEQ ID NO: 60310 - DNA, 20 bp, Artificial Sequence
  chemically synthesized
tatggaggttaggtaattaa

SEQ ID NO: 60311 - DNA, 20 bp, Artificial Sequence
  chemically synthesized
tcccatccctggagggactg

SEQ ID NO: 60312 - DNA, 20 bp, Artificial Sequence
  chemically synthesized
ggacttgaaagacgcagggg

SEQ ID NO: 60313 - DNA, 20 bp, Artificial Sequence
  chemically synthesized
gatggatcttggaaaatgat

SEQ ID NO: 60314 - DNA, 20 bp, Artificial Sequence
  chemically synthesized
gaaaatgatggtggattatt

SEQ ID NO: 60315 - DNA, 20 bp, Artificial Sequence
  chemically synthesized
attgcagctgctctaccagt

SEQ ID NO: 60316 - DNA, 20 bp, Artificial Sequence
  chemically synthesized
tgctctaccagttgtggttt

SEQ ID NO: 60317 - DNA, 20 bp, Artificial Sequence
  chemically synthesized
ctggtgcctggtatgcagcc

SEQ ID NO: 60318 - DNA, 20 bp, Artificial Sequence
  chemically synthesized
atgcagccattggcttggca

SEQ ID NO: 60319 - DNA, 20 bp, Artificial Sequence
  chemically synthesized
cctcaggggtgtatcaactc

SEQ ID NO: 60320 - DNA, 20 bp, Artificial Sequence
  chemically synthesized
atcttatttggagagacctt

SEQ ID NO: 60321 - DNA, 20 bp, Artificial Sequence
  chemically synthesized
ccattacattcatgacatta

SEQ ID NO: 60322 - DNA, 20 bp, Artificial Sequence
  chemically synthesized
ctaaggtgaagcataacttg

SEQ ID NO: 60323 - DNA, 20 bp, Artificial Sequence
  chemically synthesized
cacaatgcctggtgggccta

SEQ ID NO: 60324 - DNA, 20 bp, Artificial Sequence
  chemically synthesized
gattttggaggcaacacatt

SEQ ID NO: 60325 - DNA, 20 bp, Artificial Sequence
  chemically synthesized
atcgagtgacctgaaaggct

SEQ ID NO: 60326 - DNA, 20 bp, Artificial Sequence
  chemically synthesized
acatgaccccgcagatccaa

SEQ ID NO: 60327 - DNA, 20 bp, Artificial Sequence
  chemically synthesized
gtgtcagtggcagataggga

SEQ ID NO: 60328 - DNA, 20 bp, Artificial Sequence
  chemically synthesized
gtgaatcacagtggagacct

SEQ ID NO: 60329 - DNA, 20 bp, Artificial Sequence
  chemically synthesized
agacagctattggtctgtta

SEQ ID NO: 60330 - DNA, 20 bp, Artificial Sequence
  chemically synthesized
attgggctttggtggtaact

SEQ ID NO: 60331 - DNA, 20 bp, Artificial Sequence
  chemically synthesized
gaacctgcctatcatgaact

SEQ ID NO: 60332 - DNA, 20 bp, Artificial Sequence
  chemically synthesized
ttgaagtggtgtgtatgtga

SEQ ID NO: 60333 - DNA, 20 bp, Artificial Sequence
  chemically synthesized
tttttcctttatcatgtgac

SEQ ID NO: 60334 - DNA, 20 bp, Artificial Sequence
  chemically synthesized
gttaaccttatgtaataact

SEQ ID NO: 60335 - DNA, 20 bp, Artificial Sequence
  chemically synthesized
ttatgtaataacttttggtt

SEQ ID NO: 60336 - DNA, 20 bp, Artificial Sequence
  chemically synthesized
aacttttggtttggggattg

SEQ ID NO: 60337 - DNA, 20 bp, Artificial Sequence
  chemically synthesized
accttattattgtctttatt

SEQ ID NO: 60338 - DNA, 20 bp, Artificial Sequence
  chemically synthesized
tgtctttatttgaagattat

SEQ ID NO: 60339 - DNA, 20 bp, Artificial Sequence
  chemically synthesized
tgtgatggttaatactgtca

SEQ ID NO: 60340 - DNA, 20 bp, Artificial Sequence
  chemically synthesized
tggttaatactgtcaacttg

SEQ ID NO: 60341 - DNA, 20 bp, Artificial Sequence
  chemically synthesized
gtctgtgagggtgtggcaaa

SEQ ID NO: 60342 - DNA, 22 bp, Artificial Sequence
  chemically synthesized
ccagcccactgactcaaatgtt

SEQ ID NO: 60343 - DNA, 22 bp, Artificial Sequence
  chemically synthesized
actcaaatgttaatctcctttt

SEQ ID NO: 60344 - DNA, 22 bp, Artificial Sequence
  chemically synthesized
aaatgttaatctccttttgcca

SEQ ID NO: 60345 - DNA, 22 bp, Artificial Sequence
  chemically synthesized
atctccttttgccacaccctca

SEQ ID NO: 60346 - DNA, 22 bp, Artificial Sequence
  chemically synthesized
cttttgccacaccctcacagac

SEQ ID NO: 60347 - DNA, 22 bp, Artificial Sequence
  chemically synthesized
ttgccacaccctcacagacata

SEQ ID NO: 60348 - DNA, 22 bp, Artificial Sequence
  chemically synthesized
tgccacaccctcacagacataa

SEQ ID NO: 60349 - DNA, 22 bp, Artificial Sequence
  chemically synthesized
gccacaccctcacagacataac

SEQ ID NO: 60350 - DNA, 22 bp, Artificial Sequence
  chemically synthesized
ccacaccctcacagacataacc

SEQ ID NO: 60351 - DNA, 22 bp, Artificial Sequence
  chemically synthesized
acagacataaccgagattaata

SEQ ID NO: 60352 - DNA, 22 bp, Artificial Sequence
  chemically synthesized
atactttgcatctttcaatcca

SEQ ID NO: 60353 - DNA, 22 bp, Artificial Sequence
  chemically synthesized
tgcatctttcaatccaatcaag

SEQ ID NO: 60354 - DNA, 22 bp, Artificial Sequence
  chemically synthesized
gcatctttcaatccaatcaagt

SEQ ID NO: 60355 - DNA, 22 bp, Artificial Sequence
  chemically synthesized
catctttcaatccaatcaagtt

SEQ ID NO: 60356 - DNA, 22 bp, Artificial Sequence
  chemically synthesized
tcaatccaatcaagttgacagt

SEQ ID NO: 60357 - DNA, 22 bp, Artificial Sequence
  chemically synthesized
caatccaatcaagttgacagta

SEQ ID NO: 60358 - DNA, 22 bp, Artificial Sequence
  chemically synthesized
aatccaatcaagttgacagtat

SEQ ID NO: 60359 - DNA, 22 bp, Artificial Sequence
  chemically synthesized
acagtattaaccatcacaagtc

SEQ ID NO: 60360 - DNA, 22 bp, Artificial Sequence
  chemically synthesized
accatcacaagtccaactcctt

SEQ ID NO: 60361 - DNA, 22 bp, Artificial Sequence
  chemically synthesized
cttgtcaacttgaacccataca

SEQ ID NO: 60362 - DNA, 22 bp, Artificial Sequence
  chemically synthesized
gtcaacttgaacccatacacac

SEQ ID NO: 60363 - DNA, 22 bp, Artificial Sequence
  chemically synthesized
tcaacttgaacccatacacaca

SEQ ID NO: 60364 - DNA, 22 bp, Artificial Sequence
  chemically synthesized
gaacccatacacacatcctgaa

SEQ ID NO: 60365 - DNA, 22 bp, Artificial Sequence
  chemically synthesized
aacccatacacacatcctgaaa

SEQ ID NO: 60366 - DNA, 22 bp, Artificial Sequence
  chemically synthesized
aaatcatacataatcttcaaat

SEQ ID NO: 60367 - DNA, 22 bp, Artificial Sequence
  chemically synthesized
caaataaagacaataataaggt

SEQ ID NO: 60368 - DNA, 22 bp, Artificial Sequence
  chemically synthesized
aaataaagacaataataaggtc

SEQ ID NO: 60369 - DNA, 22 bp, Artificial Sequence
  chemically synthesized
tgcctaatataatacaactatc

SEQ ID NO: 60370 - DNA, 22 bp, Artificial Sequence
  chemically synthesized
atataatacaactatcctcata

SEQ ID NO: 60371 - DNA, 22 bp, Artificial Sequence
  chemically synthesized
tcctcatacaaccagaaacgca

SEQ ID NO: 60372 - DNA, 22 bp, Artificial Sequence
  chemically synthesized
atacaaccagaaacgcaccaat

SEQ ID NO: 60373 - DNA, 22 bp, Artificial Sequence
  chemically synthesized
ttacataaggttaacaatattt

SEQ ID NO: 60374 - DNA, 22 bp, Artificial Sequence
  chemically synthesized
cataaggttaacaatatttaaa

SEQ ID NO: 60375 - DNA, 22 bp, Artificial Sequence
  chemically synthesized
acaatatttaaatgctgatatg

SEQ ID NO: 60376 - DNA, 22 bp, Artificial Sequence
  chemically synthesized
aaatgctgatatgaacaacact

SEQ ID NO: 60377 - DNA, 22 bp, Artificial Sequence
  chemically synthesized
aatgctgatatgaacaacactt

SEQ ID NO: 60378 - DNA, 22 bp, Artificial Sequence
  chemically synthesized
atatgaacaacacttaaatgct

SEQ ID NO: 60379 - DNA, 22 bp, Artificial Sequence
  chemically synthesized
aaatgcttaaatgctgatgtga

SEQ ID NO: 60380 - DNA, 22 bp, Artificial Sequence
  chemically synthesized
aatgcttaaatgctgatgtgaa

SEQ ID NO: 60381 - DNA, 22 bp, Artificial Sequence
  chemically synthesized
aaatgctgatgtgaagtccata

SEQ ID NO: 60382 - DNA, 22 bp, Artificial Sequence
  chemically synthesized
aatgctgatgtgaagtccataa

SEQ ID NO: 60383 - DNA, 22 bp, Artificial Sequence
  chemically synthesized
atgtgaagtccataaatctaag

SEQ ID NO: 60384 - DNA, 22 bp, Artificial Sequence
  chemically synthesized
aggtcacatgataaaggaaaaa

SEQ ID NO: 60385 - DNA, 22 bp, Artificial Sequence
  chemically synthesized
tcttagcacaagtgtacacatg

SEQ ID NO: 60386 - DNA, 22 bp, Artificial Sequence
  chemically synthesized
cttagcacaagtgtacacatgc

SEQ ID NO: 60387 - DNA, 22 bp, Artificial Sequence
  chemically synthesized
ttagcacaagtgtacacatgca

SEQ ID NO: 60388 - DNA, 22 bp, Artificial Sequence
  chemically synthesized
agcacaagtgtacacatgcatt

SEQ ID NO: 60389 - DNA, 22 bp, Artificial Sequence
  chemically synthesized
gcacaagtgtacacatgcattt

SEQ ID NO: 60390 - DNA, 22 bp, Artificial Sequence
  chemically synthesized
agaaagtggatatagtgctgca

SEQ ID NO: 60391 - DNA, 22 bp, Artificial Sequence
  chemically synthesized
gaaagtggatatagtgctgcag

SEQ ID NO: 60392 - DNA, 22 bp, Artificial Sequence
  chemically synthesized
cagctgtccactttcgggtggt

SEQ ID NO: 60393 - DNA, 22 bp, Artificial Sequence
  chemically synthesized
tccactttcgggtggtgcctgc

SEQ ID NO: 60394 - DNA, 22 bp, Artificial Sequence
  chemically synthesized
tcgggtggtgcctgcatatcgt

SEQ ID NO: 60395 - DNA, 22 bp, Artificial Sequence
  chemically synthesized
cgggtggtgcctgcatatcgtg

SEQ ID NO: 60396 - DNA, 22 bp, Artificial Sequence
  chemically synthesized
gggtggtgcctgcatatcgtgc

SEQ ID NO: 60397 - DNA, 22 bp, Artificial Sequence
  chemically synthesized
catatcgtgcagaaccatctat

SEQ ID NO: 60398 - DNA, 22 bp, Artificial Sequence
  chemically synthesized
tgaaccagtccttagtcttccc

SEQ ID NO: 60399 - DNA, 22 bp, Artificial Sequence
  chemically synthesized
agtcttcccttcctctgtcaac

SEQ ID NO: 60400 - DNA, 22 bp, Artificial Sequence
  chemically synthesized
gtcttcccttcctctgtcaact

SEQ ID NO: 60401 - DNA, 22 bp, Artificial Sequence
  chemically synthesized
cccttcctctgtcaactgatca

SEQ ID NO: 60402 - DNA, 22 bp, Artificial Sequence
  chemically synthesized
ccttcctctgtcaactgatcat

SEQ ID NO: 60403 - DNA, 22 bp, Artificial Sequence
  chemically synthesized
cctctgtcaactgatcataggg

SEQ ID NO: 60404 - DNA, 22 bp, Artificial Sequence
  chemically synthesized
ctctgtcaactgatcataggga

SEQ ID NO: 60405 - DNA, 22 bp, Artificial Sequence
  chemically synthesized
tgtcaactgatcatagggaact

SEQ ID NO: 60406 - DNA, 22 bp, Artificial Sequence
  chemically synthesized
tcaactgatcatagggaactcc

SEQ ID NO: 60407 - DNA, 22 bp, Artificial Sequence
  chemically synthesized
atcatagggaactccccatgag

SEQ ID NO: 60408 - DNA, 22 bp, Artificial Sequence
  chemically synthesized
cccatgaggccattggtgcagg

SEQ ID NO: 60409 - DNA, 22 bp, Artificial Sequence
  chemically synthesized
gtgcaggctgggggagggaagg

SEQ ID NO: 60410 - DNA, 22 bp, Artificial Sequence
  chemically synthesized
ggggagggaaggcagggtggca

SEQ ID NO: 60411 - DNA, 22 bp, Artificial Sequence
  chemically synthesized
gagccacttccttatgtaactt

SEQ ID NO: 60412 - DNA, 22 bp, Artificial Sequence
  chemically synthesized
agccacttccttatgtaactta

SEQ ID NO: 60413 - DNA, 22 bp, Artificial Sequence
  chemically synthesized
ccttatgtaacttacttgtgcc

SEQ ID NO: 60414 - DNA, 22 bp, Artificial Sequence
  chemically synthesized
cttatgtaacttacttgtgcct

SEQ ID NO: 60415 - DNA, 22 bp, Artificial Sequence
  chemically synthesized
atgtaacttacttgtgccttca

SEQ ID NO: 60416 - DNA, 22 bp, Artificial Sequence
  chemically synthesized
tgtaacttacttgtgccttcag

SEQ ID NO: 60417 - DNA, 22 bp, Artificial Sequence
  chemically synthesized
acttgtgccttcaggacctgct

SEQ ID NO: 60418 - DNA, 22 bp, Artificial Sequence
  chemically synthesized
cttgtgccttcaggacctgctc

SEQ ID NO: 60419 - DNA, 22 bp, Artificial Sequence
  chemically synthesized
gtgccttcaggacctgctcaag

SEQ ID NO: 60420 - DNA, 22 bp, Artificial Sequence
  chemically synthesized
tgccttcaggacctgctcaagc

SEQ ID NO: 60421 - DNA, 22 bp, Artificial Sequence
  chemically synthesized
caggacctgctcaagcccgatc

SEQ ID NO: 60422 - DNA, 22 bp, Artificial Sequence
  chemically synthesized
aggacctgctcaagcccgatca

SEQ ID NO: 60423 - DNA, 22 bp, Artificial Sequence
  chemically synthesized
ctcaagcccgatcacatacaca

SEQ ID NO: 60424 - DNA, 22 bp, Artificial Sequence
  chemically synthesized
aagcccgatcacatacacacca

SEQ ID NO: 60425 - DNA, 22 bp, Artificial Sequence
  chemically synthesized
caatttgatgatgaaatgccgc

SEQ ID NO: 60426 - DNA, 22 bp, Artificial Sequence
  chemically synthesized
aatttgatgatgaaatgccgct

SEQ ID NO: 60427 - DNA, 22 bp, Artificial Sequence
  chemically synthesized
gatgatgaaatgccgctgtgct

SEQ ID NO: 60428 - DNA, 22 bp, Artificial Sequence
  chemically synthesized
atgatgaaatgccgctgtgctg

SEQ ID NO: 60429 - DNA, 22 bp, Artificial Sequence
  chemically synthesized
tgctgacccacttcatggctag

SEQ ID NO: 60430 - DNA, 22 bp, Artificial Sequence
  chemically synthesized
acccacttcatggctagatggg

SEQ ID NO: 60431 - DNA, 22 bp, Artificial Sequence
  chemically synthesized
catggctagatgggtcagaaag

SEQ ID NO: 60432 - DNA, 22 bp, Artificial Sequence
  chemically synthesized
atggctagatgggtcagaaagc

SEQ ID NO: 60433 - DNA, 22 bp, Artificial Sequence
  chemically synthesized
gatgggtcagaaagcaaccagt

SEQ ID NO: 60434 - DNA, 22 bp, Artificial Sequence
  chemically synthesized
atgataggcaggttcaggtagc

SEQ ID NO: 60435 - DNA, 22 bp, Artificial Sequence
  chemically synthesized
aggtagcatggtgactttatga

SEQ ID NO: 60436 - DNA, 22 bp, Artificial Sequence
  chemically synthesized
tatgacccacagtcaaacgttc

SEQ ID NO: 60437 - DNA, 22 bp, Artificial Sequence
  chemically synthesized
atgacccacagtcaaacgttca

SEQ ID NO: 60438 - DNA, 22 bp, Artificial Sequence
  chemically synthesized
tgacccacagtcaaacgttcag

SEQ ID NO: 60439 - DNA, 22 bp, Artificial Sequence
  chemically synthesized
agttaccaccaaagcccaataa

SEQ ID NO: 60440 - DNA, 22 bp, Artificial Sequence
  chemically synthesized
ccaccaaagcccaataacagac

SEQ ID NO: 60441 - DNA, 22 bp, Artificial Sequence
  chemically synthesized
tctctcaaaaggagagtagtta

SEQ ID NO: 60442 - DNA, 22 bp, Artificial Sequence
  chemically synthesized
tcaaaaggagagtagttatctg

SEQ ID NO: 60443 - DNA, 22 bp, Artificial Sequence
  chemically synthesized
aaaaggagagtagttatctgca

SEQ ID NO: 60444 - DNA, 22 bp, Artificial Sequence
  chemically synthesized
tctgcagaagtggcagggcctt

SEQ ID NO: 60445 - DNA, 22 bp, Artificial Sequence
  chemically synthesized
cagaagtggcagggccttgctc

SEQ ID NO: 60446 - DNA, 22 bp, Artificial Sequence
  chemically synthesized
gctccaaaatcctagaggtctc

SEQ ID NO: 60447 - DNA, 22 bp, Artificial Sequence
  chemically synthesized
ctccaaaatcctagaggtctcc

SEQ ID NO: 60448 - DNA, 22 bp, Artificial Sequence
  chemically synthesized
caaaatcctagaggtctccact

SEQ ID NO: 60449 - DNA, 22 bp, Artificial Sequence
  chemically synthesized
gaggtctccactgtgattcacc

SEQ ID NO: 60450 - DNA, 22 bp, Artificial Sequence
  chemically synthesized
cactgtgattcacctatggggg

SEQ ID NO: 60451 - DNA, 22 bp, Artificial Sequence
  chemically synthesized
tgattcacctatgggggcctgc

SEQ ID NO: 60452 - DNA, 22 bp, Artificial Sequence
  chemically synthesized
acctatgggggcctgccaaagg

SEQ ID NO: 60453 - DNA, 22 bp, Artificial Sequence
  chemically synthesized
tgggggcctgccaaaggctcca

SEQ ID NO: 60454 - DNA, 22 bp, Artificial Sequence
  chemically synthesized
ccaaaggctccaaacagcatcc

SEQ ID NO: 60455 - DNA, 22 bp, Artificial Sequence
  chemically synthesized
caaacagcatccctatctgcca

SEQ ID NO: 60456 - DNA, 22 bp, Artificial Sequence
  chemically synthesized
tctgccactgacacctcaagca

SEQ ID NO: 60457 - DNA, 22 bp, Artificial Sequence
  chemically synthesized
ccactgacacctcaagcaccat

SEQ ID NO: 60458 - DNA, 22 bp, Artificial Sequence
  chemically synthesized
acacctcaagcaccattggatc

SEQ ID NO: 60459 - DNA, 22 bp, Artificial Sequence
  chemically synthesized
aagcaccattggatctgcgggg

SEQ ID NO: 60460 - DNA, 22 bp, Artificial Sequence
  chemically synthesized
gatctgcggggtcatgtggccc

SEQ ID NO: 60461 - DNA, 22 bp, Artificial Sequence
  chemically synthesized
cggggtcatgtggcccaaatgg

SEQ ID NO: 60462 - DNA, 22 bp, Artificial Sequence
  chemically synthesized
tcacagcagcctggacctgttt

SEQ ID NO: 60463 - DNA, 22 bp, Artificial Sequence
  chemically synthesized
cacagcagcctggacctgtttc

SEQ ID NO: 60464 - DNA, 22 bp, Artificial Sequence
  chemically synthesized
acagcagcctggacctgtttca

SEQ ID NO: 60465 - DNA, 22 bp, Artificial Sequence
  chemically synthesized
gacctgtttcagagccttcttt

SEQ ID NO: 60466 - DNA, 22 bp, Artificial Sequence
  chemically synthesized
tttcagagccttcttttgttct

SEQ ID NO: 60467 - DNA, 22 bp, Artificial Sequence
  chemically synthesized
cagagccttcttttgttctaga

SEQ ID NO: 60468 - DNA, 22 bp, Artificial Sequence
  chemically synthesized
agagccttcttttgttctagac

SEQ ID NO: 60469 - DNA, 22 bp, Artificial Sequence
  chemically synthesized
cttttgttctagactgcactta

SEQ ID NO: 60470 - DNA, 22 bp, Artificial Sequence
  chemically synthesized
ttttgttctagactgcacttaa

SEQ ID NO: 60471 - DNA, 22 bp, Artificial Sequence
  chemically synthesized
ttgttctagactgcacttaaat

SEQ ID NO: 60472 - DNA, 22 bp, Artificial Sequence
  chemically synthesized
tgttctagactgcacttaaatc

SEQ ID NO: 60473 - DNA, 22 bp, Artificial Sequence
  chemically synthesized
gttctagactgcacttaaatct

SEQ ID NO: 60474 - DNA, 22 bp, Artificial Sequence
  chemically synthesized
ttctagactgcacttaaatctg

SEQ ID NO: 60475 - DNA, 22 bp, Artificial Sequence
  chemically synthesized
tagactgcacttaaatctggca

SEQ ID NO: 60476 - DNA, 22 bp, Artificial Sequence
  chemically synthesized
gactgcacttaaatctggcagc

SEQ ID NO: 60477 - DNA, 22 bp, Artificial Sequence
  chemically synthesized
cacttaaatctggcagcctttc

SEQ ID NO: 60478 - DNA, 22 bp, Artificial Sequence
  chemically synthesized
aaatctggcagcctttcaggtc

SEQ ID NO: 60479 - DNA, 22 bp, Artificial Sequence
  chemically synthesized
aatctggcagcctttcaggtca

SEQ ID NO: 60480 - DNA, 22 bp, Artificial Sequence
  chemically synthesized
gcagcctttcaggtcactcgat

SEQ ID NO: 60481 - DNA, 22 bp, Artificial Sequence
  chemically synthesized
tcaggtcactcgataaatgggc

SEQ ID NO: 60482 - DNA, 22 bp, Artificial Sequence
  chemically synthesized
caggtcactcgataaatgggcc

SEQ ID NO: 60483 - DNA, 22 bp, Artificial Sequence
  chemically synthesized
aggtcactcgataaatgggcca

SEQ ID NO: 60484 - DNA, 22 bp, Artificial Sequence
  chemically synthesized
gataaatgggccagagtaacac

SEQ ID NO: 60485 - DNA, 22 bp, Artificial Sequence
  chemically synthesized
cctccaaaatccaaataggccc

SEQ ID NO: 60486 - DNA, 22 bp, Artificial Sequence
  chemically synthesized
caaaatccaaataggcccacca

SEQ ID NO: 60487 - DNA, 22 bp, Artificial Sequence
  chemically synthesized
tgcctctttcttggttgtaaga

SEQ ID NO: 60488 - DNA, 22 bp, Artificial Sequence
  chemically synthesized
tttcttggttgtaagaggggcc

SEQ ID NO: 60489 - DNA, 22 bp, Artificial Sequence
  chemically synthesized
tcttggttgtaagaggggccaa

SEQ ID NO: 60490 - DNA, 22 bp, Artificial Sequence
  chemically synthesized
cttggttgtaagaggggccaaa

SEQ ID NO: 60491 - DNA, 22 bp, Artificial Sequence
  chemically synthesized
ttggttgtaagaggggccaaac

SEQ ID NO: 60492 - DNA, 22 bp, Artificial Sequence
  chemically synthesized
ggttgtaagaggggccaaacgc

SEQ ID NO: 60493 - DNA, 22 bp, Artificial Sequence
  chemically synthesized
gttgtaagaggggccaaacgca

SEQ ID NO: 60494 - DNA, 22 bp, Artificial Sequence
  chemically synthesized
taagaggggccaaacgcagcaa

SEQ ID NO: 60495 - DNA, 22 bp, Artificial Sequence
  chemically synthesized
tgcttcaccttagaaggaatat

SEQ ID NO: 60496 - DNA, 22 bp, Artificial Sequence
  chemically synthesized
caccttagaaggaatatctcca

SEQ ID NO: 60497 - DNA, 22 bp, Artificial Sequence
  chemically synthesized
accttagaaggaatatctccat

SEQ ID NO: 60498 - DNA, 22 bp, Artificial Sequence
  chemically synthesized
agaaggaatatctccataggtc

SEQ ID NO: 60499 - DNA, 22 bp, Artificial Sequence
  chemically synthesized
gaaggaatatctccataggtct

SEQ ID NO: 60500 - DNA, 22 bp, Artificial Sequence
  chemically synthesized
cataggtctcatgccactggaa

SEQ ID NO: 60501 - DNA, 22 bp, Artificial Sequence
  chemically synthesized
atgccactggaaccctagaaat

SEQ ID NO: 60502 - DNA, 22 bp, Artificial Sequence
  chemically synthesized
gaaccctagaaattttaccgag

SEQ ID NO: 60503 - DNA, 22 bp, Artificial Sequence
  chemically synthesized
gaaattttaccgaggtagaaag

SEQ ID NO: 60504 - DNA, 22 bp, Artificial Sequence
  chemically synthesized
taccgaggtagaaagtccctaa

SEQ ID NO: 60505 - DNA, 22 bp, Artificial Sequence
  chemically synthesized
accgaggtagaaagtccctaaa

SEQ ID NO: 60506 - DNA, 22 bp, Artificial Sequence
  chemically synthesized
ccgaggtagaaagtccctaaat

SEQ ID NO: 60507 - DNA, 22 bp, Artificial Sequence
  chemically synthesized
aattttagctggatttatttcc

SEQ ID NO: 60508 - DNA, 22 bp, Artificial Sequence
  chemically synthesized
tagctggatttatttcccatcc

SEQ ID NO: 60509 - DNA, 22 bp, Artificial Sequence
  chemically synthesized
agctggatttatttcccatcct

SEQ ID NO: 60510 - DNA, 22 bp, Artificial Sequence
  chemically synthesized
gctggatttatttcccatcctc

SEQ ID NO: 60511 - DNA, 22 bp, Artificial Sequence
  chemically synthesized
gatttatttcccatcctctggc

SEQ ID NO: 60512 - DNA, 22 bp, Artificial Sequence
  chemically synthesized
atttcccatcctctggcataca

SEQ ID NO: 60513 - DNA, 22 bp, Artificial Sequence
  chemically synthesized
tttcccatcctctggcatacaa

SEQ ID NO: 60514 - DNA, 22 bp, Artificial Sequence
  chemically synthesized
cccatcctctggcatacaaatg

SEQ ID NO: 60515 - DNA, 22 bp, Artificial Sequence
  chemically synthesized
ccatcctctggcatacaaatgt

SEQ ID NO: 60516 - DNA, 22 bp, Artificial Sequence
  chemically synthesized
tggcatacaaatgtctcaccaa

SEQ ID NO: 60517 - DNA, 22 bp, Artificial Sequence
  chemically synthesized
gcatacaaatgtctcaccaata

SEQ ID NO: 60518 - DNA, 22 bp, Artificial Sequence
  chemically synthesized
accaataagttcagtgtgtttg

SEQ ID NO: 60519 - DNA, 22 bp, Artificial Sequence
  chemically synthesized
agtgtgtttgctacttcttgct

SEQ ID NO: 60520 - DNA, 22 bp, Artificial Sequence
  chemically synthesized
gctacttcttgctcactgtatc

SEQ ID NO: 60521 - DNA, 22 bp, Artificial Sequence
  chemically synthesized
ctacttcttgctcactgtatcc

SEQ ID NO: 60522 - DNA, 22 bp, Artificial Sequence
  chemically synthesized
cttcttgctcactgtatccaat

SEQ ID NO: 60523 - DNA, 22 bp, Artificial Sequence
  chemically synthesized
cttgctcactgtatccaatcat

SEQ ID NO: 60524 - DNA, 22 bp, Artificial Sequence
  chemically synthesized
ttgctcactgtatccaatcatc

SEQ ID NO: 60525 - DNA, 22 bp, Artificial Sequence
  chemically synthesized
gctcactgtatccaatcatcat

SEQ ID NO: 60526 - DNA, 22 bp, Artificial Sequence
  chemically synthesized
ctcactgtatccaatcatcata

SEQ ID NO: 60527 - DNA, 22 bp, Artificial Sequence
  chemically synthesized
actgtatccaatcatcataatg

SEQ ID NO: 60528 - DNA, 22 bp, Artificial Sequence
  chemically synthesized
tatccaatcatcataatgtcat

SEQ ID NO: 60529 - DNA, 22 bp, Artificial Sequence
  chemically synthesized
tatctcgtggaagtgaaaagcg

SEQ ID NO: 60530 - DNA, 22 bp, Artificial Sequence
  chemically synthesized
gtggaagtgaaaagcgagcaag

SEQ ID NO: 60531 - DNA, 22 bp, Artificial Sequence
  chemically synthesized
tccaaataagattatgacacaa

SEQ ID NO: 60532 - DNA, 22 bp, Artificial Sequence
  chemically synthesized
caaataagattatgacacaaag

SEQ ID NO: 60533 - DNA, 22 bp, Artificial Sequence
  chemically synthesized
tgacacaaagctggagagttga

SEQ ID NO: 60534 - DNA, 22 bp, Artificial Sequence
  chemically synthesized
gagagttgatacacccctgagg

SEQ ID NO: 60535 - DNA, 22 bp, Artificial Sequence
  chemically synthesized
atacacccctgaggtagggtgg

SEQ ID NO: 60536 - DNA, 22 bp, Artificial Sequence
  chemically synthesized
aggtagggtggtaaaggtataa

SEQ ID NO: 60537 - DNA, 22 bp, Artificial Sequence
  chemically synthesized
gccttgtcagctgaaggcaaat

SEQ ID NO: 60538 - DNA, 22 bp, Artificial Sequence
  chemically synthesized
gtcagctgaaggcaaattgctt

SEQ ID NO: 60539 - DNA, 22 bp, Artificial Sequence
  chemically synthesized
tcagctgaaggcaaattgcttc

SEQ ID NO: 60540 - DNA, 22 bp, Artificial Sequence
  chemically synthesized
aaggcaaattgcttctggtggg

SEQ ID NO: 60541 - DNA, 22 bp, Artificial Sequence
  chemically synthesized
cttctggtgggtcttatggaca

SEQ ID NO: 60542 - DNA, 22 bp, Artificial Sequence
  chemically synthesized
ctggtgggtcttatggacagga

SEQ ID NO: 60543 - DNA, 22 bp, Artificial Sequence
  chemically synthesized
tggtgggtcttatggacaggaa

SEQ ID NO: 60544 - DNA, 22 bp, Artificial Sequence
  chemically synthesized
gtgggtcttatggacaggaatg

SEQ ID NO: 60545 - DNA, 22 bp, Artificial Sequence
  chemically synthesized
atggacaggaatggagaaaaag

SEQ ID NO: 60546 - DNA, 22 bp, Artificial Sequence
  chemically synthesized
tggacaggaatggagaaaaagc

SEQ ID NO: 60547 - DNA, 22 bp, Artificial Sequence
  chemically synthesized
gccaagccaatggctgcatacc

SEQ ID NO: 60548 - DNA, 22 bp, Artificial Sequence
  chemically synthesized
ccaagccaatggctgcatacca

SEQ ID NO: 60549 - DNA, 22 bp, Artificial Sequence
  chemically synthesized
cataccaggcaccaggagatgt

SEQ ID NO: 60550 - DNA, 22 bp, Artificial Sequence
  chemically synthesized
atttgctcaagcaacaaaacca

SEQ ID NO: 60551 - DNA, 22 bp, Artificial Sequence
  chemically synthesized
gctcaagcaacaaaaccacaac

SEQ ID NO: 60552 - DNA, 22 bp, Artificial Sequence
  chemically synthesized
ctcaagcaacaaaaccacaact

SEQ ID NO: 60553 - DNA, 22 bp, Artificial Sequence
  chemically synthesized
aagcaacaaaaccacaactggt

SEQ ID NO: 60554 - DNA, 22 bp, Artificial Sequence
  chemically synthesized
gtagagcagctgcaattggagt

SEQ ID NO: 60555 - DNA, 22 bp, Artificial Sequence
  chemically synthesized
caattggagtcaccacttggtt

SEQ ID NO: 60556 - DNA, 22 bp, Artificial Sequence
  chemically synthesized
gagtcaccacttggttaagctt

SEQ ID NO: 60557 - DNA, 22 bp, Artificial Sequence
  chemically synthesized
ggttaagcttaaaataatccac

SEQ ID NO: 60558 - DNA, 22 bp, Artificial Sequence
  chemically synthesized
gttaagcttaaaataatccacc

SEQ ID NO: 60559 - DNA, 22 bp, Artificial Sequence
  chemically synthesized
agcttaaaataatccaccatca

SEQ ID NO: 60560 - DNA, 22 bp, Artificial Sequence
  chemically synthesized
aaaataatccaccatcattttc

SEQ ID NO: 60561 - DNA, 22 bp, Artificial Sequence
  chemically synthesized
aaataatccaccatcattttcc

SEQ ID NO: 60562 - DNA, 22 bp, Artificial Sequence
  chemically synthesized
tccaagatccatctgtcctctg

SEQ ID NO: 60563 - DNA, 22 bp, Artificial Sequence
  chemically synthesized
ccaagatccatctgtcctctgc

SEQ ID NO: 60564 - DNA, 22 bp, Artificial Sequence
  chemically synthesized
caagatccatctgtcctctgca

SEQ ID NO: 60565 - DNA, 22 bp, Artificial Sequence
  chemically synthesized
tcctctgcacaggtcaaatggg

SEQ ID NO: 60566 - DNA, 22 bp, Artificial Sequence
  chemically synthesized
tgcacaggtcaaatgggagagt

SEQ ID NO: 60567 - DNA, 22 bp, Artificial Sequence
  chemically synthesized
cacaggtcaaatgggagagttg

SEQ ID NO: 60568 - DNA, 22 bp, Artificial Sequence
  chemically synthesized
aacagggatgtggtgggaatca

SEQ ID NO: 60569 - DNA, 22 bp, Artificial Sequence
  chemically synthesized
cgtctttcaagtccttgatggt

SEQ ID NO: 60570 - DNA, 22 bp, Artificial Sequence
  chemically synthesized
tcaagtccttgatggtgacact

SEQ ID NO: 60571 - DNA, 22 bp, Artificial Sequence
  chemically synthesized
caagtccttgatggtgacacta

SEQ ID NO: 60572 - DNA, 22 bp, Artificial Sequence
  chemically synthesized
aagtccttgatggtgacactaa

SEQ ID NO: 60573 - DNA, 22 bp, Artificial Sequence
  chemically synthesized
gatggtgacactaatcacttca

SEQ ID NO: 60574 - DNA, 22 bp, Artificial Sequence
  chemically synthesized
atggtgacactaatcacttcag

SEQ ID NO: 60575 - DNA, 22 bp, Artificial Sequence
  chemically synthesized
atcacttcagtccctccaggga

SEQ ID NO: 60576 - DNA, 22 bp, Artificial Sequence
  chemically synthesized
cagtccctccagggatgggata

SEQ ID NO: 60577 - DNA, 22 bp, Artificial Sequence
  chemically synthesized
agtccctccagggatgggatat

SEQ ID NO: 60578 - DNA, 22 bp, Artificial Sequence
  chemically synthesized
cagggatgggatattgtttttg

SEQ ID NO: 60579 - DNA, 22 bp, Artificial Sequence
  chemically synthesized
tttttgatttttttatttttct

SEQ ID NO: 60580 - DNA, 22 bp, Artificial Sequence
  chemically synthesized
ttgatttttttatttttctagg

SEQ ID NO: 60581 - DNA, 22 bp, Artificial Sequence
  chemically synthesized
tgatttttttatttttctaggt

SEQ ID NO: 60582 - DNA, 22 bp, Artificial Sequence
  chemically synthesized
gatttttttatttttctaggta

SEQ ID NO: 60583 - DNA, 22 bp, Artificial Sequence
  chemically synthesized
atttttttatttttctaggtag

SEQ ID NO: 60584 - DNA, 22 bp, Artificial Sequence
  chemically synthesized
ttttatttttctaggtagagac

SEQ ID NO: 60585 - DNA, 22 bp, Artificial Sequence
  chemically synthesized
tttatttttctaggtagagaca

SEQ ID NO: 60586 - DNA, 22 bp, Artificial Sequence
  chemically synthesized
ttatttttctaggtagagacag

SEQ ID NO: 60587 - DNA, 22 bp, Artificial Sequence
  chemically synthesized
tatttttctaggtagagacagc

SEQ ID NO: 60588 - DNA, 22 bp, Artificial Sequence
  chemically synthesized
atttttctaggtagagacagct

SEQ ID NO: 60589 - DNA, 22 bp, Artificial Sequence
  chemically synthesized
tttttctaggtagagacagctc

SEQ ID NO: 60590 - DNA, 22 bp, Artificial Sequence
  chemically synthesized
ttctaggtagagacagctctaa

SEQ ID NO: 60591 - DNA, 22 bp, Artificial Sequence
  chemically synthesized
tctaggtagagacagctctaat

SEQ ID NO: 60592 - DNA, 22 bp, Artificial Sequence
  chemically synthesized
ctaggtagagacagctctaatg

SEQ ID NO: 60593 - DNA, 22 bp, Artificial Sequence
  chemically synthesized
taggtagagacagctctaatgg

SEQ ID NO: 60594 - DNA, 22 bp, Artificial Sequence
  chemically synthesized
ggtagagacagctctaatggct

SEQ ID NO: 60595 - DNA, 22 bp, Artificial Sequence
  chemically synthesized
taatggcttctgtttggccttt

SEQ ID NO: 60596 - DNA, 22 bp, Artificial Sequence
  chemically synthesized
atggcttctgtttggcctttcc

SEQ ID NO: 60597 - DNA, 22 bp, Artificial Sequence
  chemically synthesized
ctgtttggcctttcccaccata

SEQ ID NO: 60598 - DNA, 22 bp, Artificial Sequence
  chemically synthesized
tgtttggcctttcccaccataa

SEQ ID NO: 60599 - DNA, 22 bp, Artificial Sequence
  chemically synthesized
tttggcctttcccaccataata

SEQ ID NO: 60600 - DNA, 22 bp, Artificial Sequence
  chemically synthesized
ggcctttcccaccataatagcc

SEQ ID NO: 60601 - DNA, 22 bp, Artificial Sequence
  chemically synthesized
gcctttcccaccataatagccc

SEQ ID NO: 60602 - DNA, 22 bp, Artificial Sequence
  chemically synthesized
tcccaccataatagccctcatc

SEQ ID NO: 60603 - DNA, 22 bp, Artificial Sequence
  chemically synthesized
cccaccataatagccctcatcc

SEQ ID NO: 60604 - DNA, 22 bp, Artificial Sequence
  chemically synthesized
ccaccataatagccctcatcct

SEQ ID NO: 60605 - DNA, 22 bp, Artificial Sequence
  chemically synthesized
atcctaccagtcagggagccaa

SEQ ID NO: 60606 - DNA, 22 bp, Artificial Sequence
  chemically synthesized
ccagtcagggagccaatgtggc

SEQ ID NO: 60607 - DNA, 22 bp, Artificial Sequence
  chemically synthesized
ctgccagctaataagtatgtct

SEQ ID NO: 60608 - DNA, 22 bp, Artificial Sequence
  chemically synthesized
tgccagctaataagtatgtcta

SEQ ID NO: 60609 - DNA, 22 bp, Artificial Sequence
  chemically synthesized
ccagctaataagtatgtctata

SEQ ID NO: 60610 - DNA, 22 bp, Artificial Sequence
  chemically synthesized
ataagtatgtctatacaaatta

SEQ ID NO: 60611 - DNA, 22 bp, Artificial Sequence
  chemically synthesized
tacaaattatgcattttggcac

SEQ ID NO: 60612 - DNA, 22 bp, Artificial Sequence
  chemically synthesized
tgcattttggcactgggaaaat

SEQ ID NO: 60613 - DNA, 22 bp, Artificial Sequence
  chemically synthesized
tggcactgggaaaatgaccaga

SEQ ID NO: 60614 - DNA, 22 bp, Artificial Sequence
  chemically synthesized
ggcactgggaaaatgaccagag

SEQ ID NO: 60615 - DNA, 22 bp, Artificial Sequence
  chemically synthesized
gcactgggaaaatgaccagagg

SEQ ID NO: 60616 - DNA, 22 bp, Artificial Sequence
  chemically synthesized
ggaaaatgaccagaggataagt

SEQ ID NO: 60617 - DNA, 22 bp, Artificial Sequence
  chemically synthesized
gaaccactgtaagtcagaaatg

SEQ ID NO: 60618 - DNA, 22 bp, Artificial Sequence
  chemically synthesized
taagtcagaaatgagctaaaac

SEQ ID NO: 60619 - DNA, 22 bp, Artificial Sequence
  chemically synthesized
aaactccattaattacctaacc

SEQ ID NO: 60620 - DNA, 22 bp, Artificial Sequence
  chemically synthesized
cattaattacctaacctccata

SEQ ID NO: 60621 - DNA, 22 bp, Artificial Sequence
  chemically synthesized
attacctaacctccataagccc

SEQ ID NO: 60622 - DNA, 22 bp, Artificial Sequence
  chemically synthesized
cctaacctccataagcccctac

SEQ ID NO: 60623 - DNA, 22 bp, Artificial Sequence
  chemically synthesized
acctccataagcccctacttta

SEQ ID NO: 60624 - DNA, 22 bp, Artificial Sequence
  chemically synthesized
cataagcccctactttaactgg

SEQ ID NO: 60625 - DNA, 22 bp, Artificial Sequence
  chemically synthesized
ctttaactggggaaccacaata

SEQ ID NO: 60626 - DNA, 22 bp, Artificial Sequence
  chemically synthesized
taactggggaaccacaataacg

SEQ ID NO: 60627 - DNA, 22 bp, Artificial Sequence
  chemically synthesized
aactggggaaccacaataacgt

SEQ ID NO: 60628 - DNA, 22 bp, Artificial Sequence
  chemically synthesized
actggggaaccacaataacgtt

SEQ ID NO: 60629 - DNA, 22 bp, Artificial Sequence
  chemically synthesized
gggaaccacaataacgttttgg

SEQ ID NO: 60630 - DNA, 22 bp, Artificial Sequence
  chemically synthesized
tgggtaccctggaatcaacgtc

SEQ ID NO: 60631 - DNA, 22 bp, Artificial Sequence
  chemically synthesized
gggtaccctggaatcaacgtca

SEQ ID NO: 60632 - DNA, 22 bp, Artificial Sequence
  chemically synthesized
ggtaccctggaatcaacgtcag

SEQ ID NO: 60633 - DNA, 22 bp, Artificial Sequence
  chemically synthesized
gaatcaacgtcagctcagagcc

SEQ ID NO: 60634 - DNA, 22 bp, Artificial Sequence
  chemically synthesized
agagccagtgtccagtactttc

SEQ ID NO: 60635 - DNA, 22 bp, Artificial Sequence
  chemically synthesized
tctgaaatgtctcattacttcc

SEQ ID NO: 60636 - DNA, 22 bp, Artificial Sequence
  chemically synthesized
ctgaaatgtctcattacttccc

SEQ ID NO: 60637 - DNA, 22 bp, Artificial Sequence
  chemically synthesized
tgaaatgtctcattacttccct

SEQ ID NO: 60638 - DNA, 22 bp, Artificial Sequence
  chemically synthesized
aaatgtctcattacttcccttt

SEQ ID NO: 60639 - DNA, 22 bp, Artificial Sequence
  chemically synthesized
attacttccctttctccagtac

SEQ ID NO: 60640 - DNA, 22 bp, Artificial Sequence
  chemically synthesized
cttccctttctccagtacacac

SEQ ID NO: 60641 - DNA, 22 bp, Artificial Sequence
  chemically synthesized
ccctttctccagtacacacagt

SEQ ID NO: 60642 - DNA, 22 bp, Artificial Sequence
  chemically synthesized
cctttctccagtacacacagtt

SEQ ID NO: 60643 - DNA, 22 bp, Artificial Sequence
  chemically synthesized
tctccagtacacacagttaccc

SEQ ID NO: 60644 - DNA, 22 bp, Artificial Sequence
  chemically synthesized
ctccagtacacacagttaccct

SEQ ID NO: 60645 - DNA, 22 bp, Artificial Sequence
  chemically synthesized
tccagtacacacagttaccctg

SEQ ID NO: 60646 - DNA, 22 bp, Artificial Sequence
  chemically synthesized
cagtacacacagttaccctggt

SEQ ID NO: 60647 - DNA, 22 bp, Artificial Sequence
  chemically synthesized
ccctggtaaaaggccagaggtc

SEQ ID NO: 60648 - DNA, 22 bp, Artificial Sequence
  chemically synthesized
gtaaaaggccagaggtctcctt

SEQ ID NO: 60649 - DNA, 22 bp, Artificial Sequence
  chemically synthesized
cttagggaaggatgggagaaag

SEQ ID NO: 60650 - DNA, 22 bp, Artificial Sequence
  chemically synthesized
agggaaggatgggagaaagagt

SEQ ID NO: 60651 - DNA, 22 bp, Artificial Sequence
  chemically synthesized
gggaaggatgggagaaagagta

SEQ ID NO: 60652 - DNA, 22 bp, Artificial Sequence
  chemically synthesized
tcagtagcctagtggtgtcctt

SEQ ID NO: 60653 - DNA, 22 bp, Artificial Sequence
  chemically synthesized
gtggtgtccttcctcaagggga

SEQ ID NO: 60654 - DNA, 22 bp, Artificial Sequence
  chemically synthesized
cctcaaggggatccagcctccc

SEQ ID NO: 60655 - DNA, 22 bp, Artificial Sequence
  chemically synthesized
ctcaaggggatccagcctcccc

SEQ ID NO: 60656 - DNA, 22 bp, Artificial Sequence
  chemically synthesized
aaggggatccagcctccccttc

SEQ ID NO: 60657 - DNA, 22 bp, Artificial Sequence
  chemically synthesized
cccttcattcagtgggttctgg

SEQ ID NO: 60658 - DNA, 22 bp, Artificial Sequence
  chemically synthesized
cattcagtgggttctggaactg

SEQ ID NO: 60659 - DNA, 22 bp, Artificial Sequence
  chemically synthesized
attcagtgggttctggaactgt

SEQ ID NO: 60660 - DNA, 22 bp, Artificial Sequence
  chemically synthesized
agtgggttctggaactgtaaca

SEQ ID NO: 60661 - DNA, 22 bp, Artificial Sequence
  chemically synthesized
tggaactgtaacaggttcgagt

SEQ ID NO: 60662 - DNA, 22 bp, Artificial Sequence
  chemically synthesized
gaactgtaacaggttcgagtct

SEQ ID NO: 60663 - DNA, 22 bp, Artificial Sequence
  chemically synthesized
taacaggttcgagtctggaaat

SEQ ID NO: 60664 - DNA, 22 bp, Artificial Sequence
  chemically synthesized
gagtctggaaattgattgaggg

SEQ ID NO: 60665 - DNA, 22 bp, Artificial Sequence
  chemically synthesized
gaaattgattgagggcccatga

SEQ ID NO: 60666 - DNA, 22 bp, Artificial Sequence
  chemically synthesized
attgagggcccatgattctctg

SEQ ID NO: 60667 - DNA, 22 bp, Artificial Sequence
  chemically synthesized
agggcccatgattctctgtttt

SEQ ID NO: 60668 - DNA, 22 bp, Artificial Sequence
  chemically synthesized
tctgtttttataattcagatta

SEQ ID NO: 60669 - DNA, 22 bp, Artificial Sequence
  chemically synthesized
tgtttttataattcagattagt

SEQ ID NO: 60670 - DNA, 22 bp, Artificial Sequence
  chemically synthesized
tttttataattcagattagtct

SEQ ID NO: 60671 - DNA, 22 bp, Artificial Sequence
  chemically synthesized
ttataattcagattagtcttta

SEQ ID NO: 60672 - DNA, 22 bp, Artificial Sequence
  chemically synthesized
tataattcagattagtctttag

SEQ ID NO: 60673 - DNA, 22 bp, Artificial Sequence
  chemically synthesized
ataattcagattagtctttagt

SEQ ID NO: 60674 - DNA, 22 bp, Artificial Sequence
  chemically synthesized
taattcagattagtctttagtc

SEQ ID NO: 60675 - DNA, 22 bp, Artificial Sequence
  chemically synthesized
agattagtctttagtccattct

SEQ ID NO: 60676 - DNA, 22 bp, Artificial Sequence
  chemically synthesized
gtctttagtccattctacctgg

SEQ ID NO: 60677 - DNA, 22 bp, Artificial Sequence
  chemically synthesized
tagtccattctacctggcagtt

SEQ ID NO: 60678 - DNA, 22 bp, Artificial Sequence
  chemically synthesized
agtccattctacctggcagttt

SEQ ID NO: 60679 - DNA, 22 bp, Artificial Sequence
  chemically synthesized
gtccattctacctggcagtttt

SEQ ID NO: 60680 - DNA, 22 bp, Artificial Sequence
  chemically synthesized
tacctggcagttttttgtttat

SEQ ID NO: 60681 - DNA, 22 bp, Artificial Sequence
  chemically synthesized
cctggcagttttttgtttatat

SEQ ID NO: 60682 - DNA, 22 bp, Artificial Sequence
  chemically synthesized
gcagttttttgtttatataaat

SEQ ID NO: 60683 - DNA, 22 bp, Artificial Sequence
  chemically synthesized
tttgtttatataaatcaagtag

SEQ ID NO: 60684 - DNA, 22 bp, Artificial Sequence
  chemically synthesized
ttgtttatataaatcaagtagg

SEQ ID NO: 60685 - DNA, 22 bp, Artificial Sequence
  chemically synthesized
tgtttatataaatcaagtagga

SEQ ID NO: 60686 - DNA, 22 bp, Artificial Sequence
  chemically synthesized
gtttatataaatcaagtaggaa

SEQ ID NO: 60687 - DNA, 22 bp, Artificial Sequence
  chemically synthesized
tttatataaatcaagtaggaat

SEQ ID NO: 60688 - DNA, 22 bp, Artificial Sequence
  chemically synthesized
atataaatcaagtaggaataca

SEQ ID NO: 60689 - DNA, 22 bp, Artificial Sequence
  chemically synthesized
tataaatcaagtaggaatacag

SEQ ID NO: 60690 - DNA, 22 bp, Artificial Sequence
  chemically synthesized
cccatcaatttcacttctagga

SEQ ID NO: 60691 - DNA, 22 bp, Artificial Sequence
  chemically synthesized
ccatcaatttcacttctaggaa

SEQ ID NO: 60692 - DNA, 22 bp, Artificial Sequence
  chemically synthesized
cacttctaggaacaccatgatt

SEQ ID NO: 60693 - DNA, 22 bp, Artificial Sequence
  chemically synthesized
acttctaggaacaccatgatta

SEQ ID NO: 60694 - DNA, 22 bp, Artificial Sequence
  chemically synthesized
ctaggaacaccatgattaatta

SEQ ID NO: 60695 - DNA, 22 bp, Artificial Sequence
  chemically synthesized
taggaacaccatgattaattag

SEQ ID NO: 60696 - DNA, 22 bp, Artificial Sequence
  chemically synthesized
ggaacaccatgattaattagcc

SEQ ID NO: 60697 - DNA, 22 bp, Artificial Sequence
  chemically synthesized
attagccaatgccagagctcta

SEQ ID NO: 60698 - DNA, 22 bp, Artificial Sequence
  chemically synthesized
gccaatgccagagctctacatg

SEQ ID NO: 60699 - DNA, 22 bp, Artificial Sequence
  chemically synthesized
tacatgagtcagactattctga

SEQ ID NO: 60700 - DNA, 22 bp, Artificial Sequence
  chemically synthesized
catgagtcagactattctgatg

SEQ ID NO: 60701 - DNA, 22 bp, Artificial Sequence
  chemically synthesized
ttctgatggctgctttgcctct

SEQ ID NO: 60702 - DNA, 22 bp, Artificial Sequence
  chemically synthesized
tgatggctgctttgcctctgct

SEQ ID NO: 60703 - DNA, 22 bp, Artificial Sequence
  chemically synthesized
atggctgctttgcctctgctgt

SEQ ID NO: 60704 - DNA, 22 bp, Artificial Sequence
  chemically synthesized
ctttgcctctgctgtctattat

SEQ ID NO: 60705 - DNA, 22 bp, Artificial Sequence
  chemically synthesized
tgcctctgctgtctattatggt

SEQ ID NO: 60706 - DNA, 22 bp, Artificial Sequence
  chemically synthesized
gcctctgctgtctattatggta

SEQ ID NO: 60707 - DNA, 22 bp, Artificial Sequence
  chemically synthesized
cctctgctgtctattatggtag

SEQ ID NO: 60708 - DNA, 22 bp, Artificial Sequence
  chemically synthesized
tgctgtctattatggtagttat

SEQ ID NO: 60709 - DNA, 22 bp, Artificial Sequence
  chemically synthesized
ctgtctattatggtagttatgc

SEQ ID NO: 60710 - DNA, 22 bp, Artificial Sequence
  chemically synthesized
tctattatggtagttatgccca

SEQ ID NO: 60711 - DNA, 22 bp, Artificial Sequence
  chemically synthesized
ttatggtagttatgcccacctt

SEQ ID NO: 60712 - DNA, 22 bp, Artificial Sequence
  chemically synthesized
tggtagttatgcccaccttgcc

SEQ ID NO: 60713 - DNA, 22 bp, Artificial Sequence
  chemically synthesized
tgcccaccttgcctttgatggt

SEQ ID NO: 60714 - DNA, 22 bp, Artificial Sequence
  chemically synthesized
gcctttgatggttcagtgccaa

SEQ ID NO: 60715 - DNA, 22 bp, Artificial Sequence
  chemically synthesized
cctttgatggttcagtgccaac

SEQ ID NO: 60716 - DNA, 22 bp, Artificial Sequence
  chemically synthesized
tgatggttcagtgccaacactt

SEQ ID NO: 60717 - DNA, 22 bp, Artificial Sequence
  chemically synthesized
gatggttcagtgccaacacttg

SEQ ID NO: 60718 - DNA, 22 bp, Artificial Sequence
  chemically synthesized
atggttcagtgccaacacttgg

SEQ ID NO: 60719 - DNA, 22 bp, Artificial Sequence
  chemically synthesized
agtgccaacacttggcccctgc

SEQ ID NO: 60720 - DNA, 22 bp, Artificial Sequence
  chemically synthesized
ggcccctgccacctcaggatcc

SEQ ID NO: 60721 - DNA, 22 bp, Artificial Sequence
  chemically synthesized
gcccctgccacctcaggatcca

SEQ ID NO: 60722 - DNA, 22 bp, Artificial Sequence
  chemically synthesized
ccacctcaggatccaattattc

SEQ ID NO: 60723 - DNA, 22 bp, Artificial Sequence
  chemically synthesized
aggatccaattattcccattgt

SEQ ID NO: 60724 - DNA, 22 bp, Artificial Sequence
  chemically synthesized
ttcccattgtatttaaattttg

SEQ ID NO: 60725 - DNA, 22 bp, Artificial Sequence
  chemically synthesized
ccattgtatttaaattttgtag

SEQ ID NO: 60726 - DNA, 22 bp, Artificial Sequence
  chemically synthesized
tatttaaattttgtagttgagt

SEQ ID NO: 60727 - DNA, 22 bp, Artificial Sequence
  chemically synthesized
aaattttgtagttgagtgactg

SEQ ID NO: 60728 - DNA, 22 bp, Artificial Sequence
  chemically synthesized
aattttgtagttgagtgactgt

SEQ ID NO: 60729 - DNA, 22 bp, Artificial Sequence
  chemically synthesized
tgtagttgagtgactgtggttc

SEQ ID NO: 60730 - DNA, 22 bp, Artificial Sequence
  chemically synthesized
gtagttgagtgactgtggttcc

SEQ ID NO: 60731 - DNA, 22 bp, Artificial Sequence
  chemically synthesized
tagttgagtgactgtggttcct

SEQ ID NO: 60732 - DNA, 22 bp, Artificial Sequence
  chemically synthesized
agtgactgtggttcctactgtt

SEQ ID NO: 60733 - DNA, 22 bp, Artificial Sequence
  chemically synthesized
tggttcctactgttagatctga

SEQ ID NO: 60734 - DNA, 22 bp, Artificial Sequence
  chemically synthesized
ctactgttagatctgacataca

SEQ ID NO: 60735 - DNA, 22 bp, Artificial Sequence
  chemically synthesized
ctgttagatctgacatacagag

SEQ ID NO: 60736 - DNA, 22 bp, Artificial Sequence
  chemically synthesized
ttagatctgacatacagagaag

SEQ ID NO: 60737 - DNA, 22 bp, Artificial Sequence
  chemically synthesized
gatctgacatacagagaagagc

SEQ ID NO: 60738 - DNA, 22 bp, Artificial Sequence
  chemically synthesized
acatacagagaagagcaattac

SEQ ID NO: 60739 - DNA, 22 bp, Artificial Sequence
  chemically synthesized
cgggctcttcaaaaatacaggt

SEQ ID NO: 60740 - DNA, 22 bp, Artificial Sequence
  chemically synthesized
ttcaaaaatacaggtgctgctc

SEQ ID NO: 60741 - DNA, 22 bp, Artificial Sequence
  chemically synthesized
caaaaatacaggtgctgctctc

SEQ ID NO: 60742 - DNA, 22 bp, Artificial Sequence
  chemically synthesized
aaaaatacaggtgctgctctca

SEQ ID NO: 60743 - DNA, 22 bp, Artificial Sequence
  chemically synthesized
ctctcacaaatctatttcacaa

SEQ ID NO: 60744 - DNA, 22 bp, Artificial Sequence
  chemically synthesized
tcacaaatctatttcacaaagc

SEQ ID NO: 60745 - DNA, 22 bp, Artificial Sequence
  chemically synthesized
acaaatctatttcacaaagctt

SEQ ID NO: 60746 - DNA, 22 bp, Artificial Sequence
  chemically synthesized
tttcacaaagcttcggccaagg

SEQ ID NO: 60747 - DNA, 22 bp, Artificial Sequence
  chemically synthesized
cacaaagcttcggccaagggtg

SEQ ID NO: 60748 - DNA, 22 bp, Artificial Sequence
  chemically synthesized
acaaagcttcggccaagggtgt

SEQ ID NO: 60749 - DNA, 22 bp, Artificial Sequence
  chemically synthesized
cggccaagggtgtatcttctgg

SEQ ID NO: 60750 - DNA, 22 bp, Artificial Sequence
  chemically synthesized
ggccaagggtgtatcttctgga

SEQ ID NO: 60751 - DNA, 22 bp, Artificial Sequence
  chemically synthesized
ctggaccctcccagctgggatg

SEQ ID NO: 60752 - DNA, 22 bp, Artificial Sequence
  chemically synthesized
tggaccctcccagctgggatga

SEQ ID NO: 60753 - DNA, 22 bp, Artificial Sequence
  chemically synthesized
gaccctcccagctgggatgagt

SEQ ID NO: 60754 - DNA, 22 bp, Artificial Sequence
  chemically synthesized
ccagctgggatgagtaggtcta

SEQ ID NO: 60755 - DNA, 22 bp, Artificial Sequence
  chemically synthesized
ggatgagtaggtctaaagtgac

SEQ ID NO: 60756 - DNA, 22 bp, Artificial Sequence
  chemically synthesized
aagtgactaatccactccacca

SEQ ID NO: 60757 - DNA, 22 bp, Artificial Sequence
  chemically synthesized
atccactccaccatcctaatct

SEQ ID NO: 60758 - DNA, 22 bp, Artificial Sequence
  chemically synthesized
caccatcctaatctccctaagc

SEQ ID NO: 60759 - DNA, 22 bp, Artificial Sequence
  chemically synthesized
atctccctaagcctttggatca

SEQ ID NO: 60760 - DNA, 22 bp, Artificial Sequence
  chemically synthesized
cctaagcctttggatcacttcc

SEQ ID NO: 60761 - DNA, 22 bp, Artificial Sequence
  chemically synthesized
agcctttggatcacttcctcta

SEQ ID NO: 60762 - DNA, 22 bp, Artificial Sequence
  chemically synthesized
tggatcacttcctctacattaa

SEQ ID NO: 60763 - DNA, 22 bp, Artificial Sequence
  chemically synthesized
ggatcacttcctctacattaaa

SEQ ID NO: 60764 - DNA, 22 bp, Artificial Sequence
  chemically synthesized
gatcacttcctctacattaaac

SEQ ID NO: 60765 - DNA, 22 bp, Artificial Sequence
  chemically synthesized
cctctacattaaaccaaggcat

SEQ ID NO: 60766 - DNA, 22 bp, Artificial Sequence
  chemically synthesized
ctctacattaaaccaaggcatt

SEQ ID NO: 60767 - DNA, 22 bp, Artificial Sequence
  chemically synthesized
tacattaaaccaaggcatttcc

SEQ ID NO: 60768 - DNA, 22 bp, Artificial Sequence
  chemically synthesized
cattaaaccaaggcatttccag

SEQ ID NO: 60769 - DNA, 22 bp, Artificial Sequence
  chemically synthesized
aaccaaggcatttccagctcac

SEQ ID NO: 60770 - DNA, 22 bp, Artificial Sequence
  chemically synthesized
ccagctcactaacattggacca

SEQ ID NO: 60771 - DNA, 22 bp, Artificial Sequence
  chemically synthesized
cagctcactaacattggaccat

SEQ ID NO: 60772 - DNA, 22 bp, Artificial Sequence
  chemically synthesized
actaacattggaccatctttta

SEQ ID NO: 60773 - DNA, 22 bp, Artificial Sequence
  chemically synthesized
acattggaccatcttttaatcc

SEQ ID NO: 60774 - DNA, 22 bp, Artificial Sequence
  chemically synthesized
gaccatcttttaatccatattt

SEQ ID NO: 60775 - DNA, 22 bp, Artificial Sequence
  chemically synthesized
ttaatccatatttcagctaacc

SEQ ID NO: 60776 - DNA, 22 bp, Artificial Sequence
  chemically synthesized
taatccatatttcagctaacca

SEQ ID NO: 60777 - DNA, 22 bp, Artificial Sequence
  chemically synthesized
aatccatatttcagctaaccaa

SEQ ID NO: 60778 - DNA, 22 bp, Artificial Sequence
  chemically synthesized
atccatatttcagctaaccaag

SEQ ID NO: 60779 - DNA, 22 bp, Artificial Sequence
  chemically synthesized
cagctaaccaagcaaataaact

SEQ ID NO: 60780 - DNA, 22 bp, Artificial Sequence
  chemically synthesized
agctaaccaagcaaataaacta

SEQ ID NO: 60781 - DNA, 22 bp, Artificial Sequence
  chemically synthesized
accaagcaaataaactattata

SEQ ID NO: 60782 - DNA, 22 bp, Artificial Sequence
  chemically synthesized
ttataacttttttttttttttt

SEQ ID NO: 60783 - DNA, 22 bp, Artificial Sequence
  chemically synthesized
taactttttttttttttttttt

SEQ ID NO: 60784 - DNA, 22 bp, Artificial Sequence
  chemically synthesized
ttttttttttttttttggaaat

SEQ ID NO: 60785 - DNA, 22 bp, Artificial Sequence
  chemically synthesized
tttttttttttttttggaaatg

SEQ ID NO: 60786 - DNA, 22 bp, Artificial Sequence
  chemically synthesized
ttttttttttttttggaaatgg

SEQ ID NO: 60787 - DNA, 22 bp, Artificial Sequence
  chemically synthesized
tttttttttttttggaaatgga

SEQ ID NO: 60788 - DNA, 22 bp, Artificial Sequence
  chemically synthesized
ttttttttttttggaaatggag

SEQ ID NO: 60789 - DNA, 22 bp, Artificial Sequence
  chemically synthesized
tttttttttttggaaatggagt

SEQ ID NO: 60790 - DNA, 22 bp, Artificial Sequence
  chemically synthesized
ttttttttttggaaatggagtc

SEQ ID NO: 60791 - DNA, 22 bp, Artificial Sequence
  chemically synthesized
tttttttttggaaatggagtct

SEQ ID NO: 60792 - DNA, 22 bp, Artificial Sequence
  chemically synthesized
ttttttttggaaatggagtctt

SEQ ID NO: 60793 - DNA, 22 bp, Artificial Sequence
  chemically synthesized
tttttttggaaatggagtcttg

SEQ ID NO: 60794 - DNA, 22 bp, Artificial Sequence
  chemically synthesized
ttttttggaaatggagtcttgc

SEQ ID NO: 60795 - DNA, 22 bp, Artificial Sequence
  chemically synthesized
tttttggaaatggagtcttgct

SEQ ID NO: 60796 - DNA, 22 bp, Artificial Sequence
  chemically synthesized
ttttggaaatggagtcttgctc

SEQ ID NO: 60797 - DNA, 22 bp, Artificial Sequence
  chemically synthesized
tttggaaatggagtcttgctct

SEQ ID NO: 60798 - DNA, 22 bp, Artificial Sequence
  chemically synthesized
ttggaaatggagtcttgctctg

SEQ ID NO: 60799 - DNA, 22 bp, Artificial Sequence
  chemically synthesized
tggaaatggagtcttgctctgt

SEQ ID NO: 60800 - DNA, 22 bp, Artificial Sequence
  chemically synthesized
ggaaatggagtcttgctctgtt

SEQ ID NO: 60801 - DNA, 22 bp, Artificial Sequence
  chemically synthesized
gaaatggagtcttgctctgtta

SEQ ID NO: 60802 - DNA, 22 bp, Artificial Sequence
  chemically synthesized
gctctgttaccaggctggaatg

SEQ ID NO: 60803 - DNA, 22 bp, Artificial Sequence
  chemically synthesized
ctctgttaccaggctggaatgc

SEQ ID NO: 60804 - DNA, 22 bp, Artificial Sequence
  chemically synthesized
tgttaccaggctggaatgcagt

SEQ ID NO: 60805 - DNA, 22 bp, Artificial Sequence
  chemically synthesized
ttaccaggctggaatgcagtgg

SEQ ID NO: 60806 - DNA, 22 bp, Artificial Sequence
  chemically synthesized
ccaggctggaatgcagtggggc

SEQ ID NO: 60807 - DNA, 22 bp, Artificial Sequence
  chemically synthesized
gaatgcagtggggcgatcttgg

SEQ ID NO: 60808 - DNA, 22 bp, Artificial Sequence
  chemically synthesized
ggctcactgcaatctctgcctc

SEQ ID NO: 60809 - DNA, 22 bp, Artificial Sequence
  chemically synthesized
gctcactgcaatctctgcctca

SEQ ID NO: 60810 - DNA, 22 bp, Artificial Sequence
  chemically synthesized
actgcaatctctgcctcacagg

SEQ ID NO: 60811 - DNA, 22 bp, Artificial Sequence
  chemically synthesized
caatctctgcctcacaggttca

SEQ ID NO: 60812 - DNA, 22 bp, Artificial Sequence
  chemically synthesized
tgcctcacaggttcaagcagtt

SEQ ID NO: 60813 - DNA, 22 bp, Artificial Sequence
  chemically synthesized
cctcacaggttcaagcagttct

SEQ ID NO: 60814 - DNA, 22 bp, Artificial Sequence
  chemically synthesized
acaggttcaagcagttctcttg

SEQ ID NO: 60815 - DNA, 22 bp, Artificial Sequence
  chemically synthesized
aagcagttctcttgcctcagcc

SEQ ID NO: 60816 - DNA, 22 bp, Artificial Sequence
  chemically synthesized
tcttgcctcagcctcccaagta

SEQ ID NO: 60817 - DNA, 22 bp, Artificial Sequence
  chemically synthesized
ttgcctcagcctcccaagtaga

SEQ ID NO: 60818 - DNA, 22 bp, Artificial Sequence
  chemically synthesized
gcctcagcctcccaagtagatg

SEQ ID NO: 60819 - DNA, 22 bp, Artificial Sequence
  chemically synthesized
cctcagcctcccaagtagatga

SEQ ID NO: 60820 - DNA, 22 bp, Artificial Sequence
  chemically synthesized
agcctcccaagtagatgagatt

SEQ ID NO: 60821 - DNA, 22 bp, Artificial Sequence
  chemically synthesized
ccaagtagatgagattacagtt

SEQ ID NO: 60822 - DNA, 22 bp, Artificial Sequence
  chemically synthesized
cagttacgcatcaccatgccca

SEQ ID NO: 60823 - DNA, 22 bp, Artificial Sequence
  chemically synthesized
cgcatcaccatgcccagctaat

SEQ ID NO: 60824 - DNA, 22 bp, Artificial Sequence
  chemically synthesized
atttttgtatttttagcagaga

SEQ ID NO: 60825 - DNA, 22 bp, Artificial Sequence
  chemically synthesized
ttgtatttttagcagagatggg

SEQ ID NO: 60826 - DNA, 22 bp, Artificial Sequence
  chemically synthesized
tgtatttttagcagagatgggg

SEQ ID NO: 60827 - DNA, 22 bp, Artificial Sequence
  chemically synthesized
gtatttttagcagagatggggt

SEQ ID NO: 60828 - DNA, 22 bp, Artificial Sequence
  chemically synthesized
tatttttagcagagatggggtt

SEQ ID NO: 60829 - DNA, 22 bp, Artificial Sequence
  chemically synthesized
ttagcagagatggggtttcacc

SEQ ID NO: 60830 - DNA, 22 bp, Artificial Sequence
  chemically synthesized
tagcagagatggggtttcacca

SEQ ID NO: 60831 - DNA, 22 bp, Artificial Sequence
  chemically synthesized
agcagagatggggtttcaccat

SEQ ID NO: 60832 - DNA, 22 bp, Artificial Sequence
  chemically synthesized
gcagagatggggtttcaccatt

SEQ ID NO: 60833 - DNA, 22 bp, Artificial Sequence
  chemically synthesized
caccattttagccagaattgtc

SEQ ID NO: 60834 - DNA, 22 bp, Artificial Sequence
  chemically synthesized
accattttagccagaattgtct

SEQ ID NO: 60835 - DNA, 22 bp, Artificial Sequence
  chemically synthesized
tagccagaattgtctcaatctc

SEQ ID NO: 60836 - DNA, 22 bp, Artificial Sequence
  chemically synthesized
agccagaattgtctcaatctcc

SEQ ID NO: 60837 - DNA, 22 bp, Artificial Sequence
  chemically synthesized
gccagaattgtctcaatctcct

SEQ ID NO: 60838 - DNA, 22 bp, Artificial Sequence
  chemically synthesized
tctcaatctcctgatctcgtga

SEQ ID NO: 60839 - DNA, 22 bp, Artificial Sequence
  chemically synthesized
aatctcctgatctcgtgatctg

SEQ ID NO: 60840 - DNA, 22 bp, Artificial Sequence
  chemically synthesized
ctgatctcgtgatctgcccgcc

SEQ ID NO: 60841 - DNA, 22 bp, Artificial Sequence
  chemically synthesized
atctcgtgatctgcccgccccc

SEQ ID NO: 60842 - DNA, 22 bp, Artificial Sequence
  chemically synthesized
gtgatctgcccgcccccgcctc

SEQ ID NO: 60843 - DNA, 22 bp, Artificial Sequence
  chemically synthesized
cccgcccccgcctcccaaggtg

SEQ ID NO: 60844 - DNA, 22 bp, Artificial Sequence
  chemically synthesized
ccaaggtgctgggattacaggc

SEQ ID NO: 60845 - DNA, 22 bp, Artificial Sequence
  chemically synthesized
ggattacaggcgtgagccactg

SEQ ID NO: 60846 - DNA, 22 bp, Artificial Sequence
  chemically synthesized
caggcgtgagccactgctcccg

SEQ ID NO: 60847 - DNA, 22 bp, Artificial Sequence
  chemically synthesized
ctcccggccctatcagaacctt

SEQ ID NO: 60848 - DNA, 22 bp, Artificial Sequence
  chemically synthesized
ccggccctatcagaaccttttc

SEQ ID NO: 60849 - DNA, 22 bp, Artificial Sequence
  chemically synthesized
tcagaaccttttctaagtcccc

SEQ ID NO: 60850 - DNA, 22 bp, Artificial Sequence
  chemically synthesized
ttctaagtccccgagctgcaac

SEQ ID NO: 60851 - DNA, 22 bp, Artificial Sequence
  chemically synthesized
tctaagtccccgagctgcaaca

SEQ ID NO: 60852 - DNA, 22 bp, Artificial Sequence
  chemically synthesized
ctaagtccccgagctgcaacat

SEQ ID NO: 60853 - DNA, 22 bp, Artificial Sequence
  chemically synthesized
taagtccccgagctgcaacatt

SEQ ID NO: 60854 - DNA, 22 bp, Artificial Sequence
  chemically synthesized
agtccccgagctgcaacattaa

SEQ ID NO: 60855 - DNA, 22 bp, Artificial Sequence
  chemically synthesized
caacattaaatgcagaatccct

SEQ ID NO: 60856 - DNA, 22 bp, Artificial Sequence
  chemically synthesized
aatgcagaatccctacttagta

SEQ ID NO: 60857 - DNA, 22 bp, Artificial Sequence
  chemically synthesized
cttagtagggccaaaccaataa

SEQ ID NO: 60858 - DNA, 22 bp, Artificial Sequence
  chemically synthesized
agtagggccaaaccaataaatt

SEQ ID NO: 60859 - DNA, 22 bp, Artificial Sequence
  chemically synthesized
gtagggccaaaccaataaattc

SEQ ID NO: 60860 - DNA, 22 bp, Artificial Sequence
  chemically synthesized
agcttgatccaactctatgtcc

SEQ ID NO: 60861 - DNA, 22 bp, Artificial Sequence
  chemically synthesized
gatccaactctatgtcccttcc

SEQ ID NO: 60862 - DNA, 22 bp, Artificial Sequence
  chemically synthesized
atccaactctatgtcccttcca

SEQ ID NO: 60863 - DNA, 22 bp, Artificial Sequence
  chemically synthesized
tatgtcccttccaccattatcc

SEQ ID NO: 60864 - DNA, 22 bp, Artificial Sequence
  chemically synthesized
tgtcccttccaccattatccct

SEQ ID NO: 60865 - DNA, 22 bp, Artificial Sequence
  chemically synthesized
ccaccattatcccttaccctta

SEQ ID NO: 60866 - DNA, 22 bp, Artificial Sequence
  chemically synthesized
caccattatcccttacccttaa

SEQ ID NO: 60867 - DNA, 22 bp, Artificial Sequence
  chemically synthesized
tcccttacccttaatatccatt

SEQ ID NO: 60868 - DNA, 22 bp, Artificial Sequence
  chemically synthesized
acccttaatatccattcccatg

SEQ ID NO: 60869 - DNA, 22 bp, Artificial Sequence
  chemically synthesized
cccttaatatccattcccatgc

SEQ ID NO: 60870 - DNA, 22 bp, Artificial Sequence
  chemically synthesized
aatatccattcccatgcctgtt

SEQ ID NO: 60871 - DNA, 22 bp, Artificial Sequence
  chemically synthesized
atatccattcccatgcctgttc

SEQ ID NO: 60872 - DNA, 22 bp, Artificial Sequence
  chemically synthesized
ccatgcctgttctccagatttc

SEQ ID NO: 60873 - DNA, 22 bp, Artificial Sequence
  chemically synthesized
ttctccagatttctgccaatat

SEQ ID NO: 60874 - DNA, 22 bp, Artificial Sequence
  chemically synthesized
tccagatttctgccaatataaa

SEQ ID NO: 60875 - DNA, 22 bp, Artificial Sequence
  chemically synthesized
cagatttctgccaatataaatt

SEQ ID NO: 60876 - DNA, 22 bp, Artificial Sequence
  chemically synthesized
ctgccaatataaattagaaagc

SEQ ID NO: 60877 - DNA, 22 bp, Artificial Sequence
  chemically synthesized
tgccaatataaattagaaagct

SEQ ID NO: 60878 - DNA, 22 bp, Artificial Sequence
  chemically synthesized
ccaatataaattagaaagctta

SEQ ID NO: 60879 - DNA, 22 bp, Artificial Sequence
  chemically synthesized
gaaagcttaagcagttctttta

SEQ ID NO: 60880 - DNA, 22 bp, Artificial Sequence
  chemically synthesized
aagcagttcttttagagtataa

SEQ ID NO: 60881 - DNA, 22 bp, Artificial Sequence
  chemically synthesized
agcagttcttttagagtataat

SEQ ID NO: 60882 - DNA, 22 bp, Artificial Sequence
  chemically synthesized
ttttagagtataatgcacctcc

SEQ ID NO: 60883 - DNA, 22 bp, Artificial Sequence
  chemically synthesized
ttagagtataatgcacctcctc

SEQ ID NO: 60884 - DNA, 22 bp, Artificial Sequence
  chemically synthesized
tagagtataatgcacctcctca

SEQ ID NO: 60885 - DNA, 22 bp, Artificial Sequence
  chemically synthesized
agagtataatgcacctcctcat

SEQ ID NO: 60886 - DNA, 22 bp, Artificial Sequence
  chemically synthesized
gagtataatgcacctcctcatg

SEQ ID NO: 60887 - DNA, 22 bp, Artificial Sequence
  chemically synthesized
ctcatgggtcacactctgaacc

SEQ ID NO: 60888 - DNA, 22 bp, Artificial Sequence
  chemically synthesized
atgggtcacactctgaacctca

SEQ ID NO: 60889 - DNA, 22 bp, Artificial Sequence
  chemically synthesized
tgaacctcacctctggggcccg

SEQ ID NO: 60890 - DNA, 22 bp, Artificial Sequence
  chemically synthesized
aacctcacctctggggcccgca

SEQ ID NO: 60891 - DNA, 22 bp, Artificial Sequence
  chemically synthesized
acctctggggcccgcaaggaat

SEQ ID NO: 60892 - DNA, 22 bp, Artificial Sequence
  chemically synthesized
tggggcccgcaaggaatttagc

SEQ ID NO: 60893 - DNA, 22 bp, Artificial Sequence
  chemically synthesized
gggcccgcaaggaatttagcct

SEQ ID NO: 60894 - DNA, 22 bp, Artificial Sequence
  chemically synthesized
agcctagttataggtctagaag

SEQ ID NO: 60895 - DNA, 22 bp, Artificial Sequence
  chemically synthesized
gcctagttataggtctagaagc

SEQ ID NO: 60896 - DNA, 22 bp, Artificial Sequence
  chemically synthesized
gttataggtctagaagcattca

SEQ ID NO: 60897 - DNA, 22 bp, Artificial Sequence
  chemically synthesized
taggtctagaagcattcagggg

SEQ ID NO: 60898 - DNA, 22 bp, Artificial Sequence
  chemically synthesized
gaagcattcaggggcattaggg

SEQ ID NO: 60899 - DNA, 22 bp, Artificial Sequence
  chemically synthesized
aggggcattaggggtgcctctt

SEQ ID NO: 60900 - DNA, 22 bp, Artificial Sequence
  chemically synthesized
ggggtgcctcttgaggagaatc

SEQ ID NO: 60901 - DNA, 22 bp, Artificial Sequence
  chemically synthesized
ttgaggagaatcaacattatct

SEQ ID NO: 60902 - DNA, 22 bp, Artificial Sequence
  chemically synthesized
gaggagaatcaacattatcttg

SEQ ID NO: 60903 - DNA, 22 bp, Artificial Sequence
  chemically synthesized
aggagaatcaacattatcttgc

SEQ ID NO: 60904 - DNA, 22 bp, Artificial Sequence
  chemically synthesized
tcttgcctggcagctgcctcag

SEQ ID NO: 60905 - DNA, 22 bp, Artificial Sequence
  chemically synthesized
gcctggcagctgcctcagggaa

SEQ ID NO: 60906 - DNA, 22 bp, Artificial Sequence
  chemically synthesized
cctggcagctgcctcagggaag

SEQ ID NO: 60907 - DNA, 22 bp, Artificial Sequence
  chemically synthesized
gcagctgcctcagggaaggcca

SEQ ID NO: 60908 - DNA, 22 bp, Artificial Sequence
  chemically synthesized
cctcagggaaggccatcactgt

SEQ ID NO: 60909 - DNA, 22 bp, Artificial Sequence
  chemically synthesized
agggaaggccatcactgttgcc

SEQ ID NO: 60910 - DNA, 22 bp, Artificial Sequence
  chemically synthesized
ttgcctcaagcagtgcagggtt

SEQ ID NO: 60911 - DNA, 22 bp, Artificial Sequence
  chemically synthesized
cctcaagcagtgcagggtttac

SEQ ID NO: 60912 - DNA, 22 bp, Artificial Sequence
  chemically synthesized
aagcagtgcagggtttacatcc

SEQ ID NO: 60913 - DNA, 22 bp, Artificial Sequence
  chemically synthesized
acatcctcagacaaaggtggaa

SEQ ID NO: 60914 - DNA, 22 bp, Artificial Sequence
  chemically synthesized
catcctcagacaaaggtggaaa

SEQ ID NO: 60915 - DNA, 22 bp, Artificial Sequence
  chemically synthesized
agacaaaggtggaaaggctaat

SEQ ID NO: 60916 - DNA, 22 bp, Artificial Sequence
  chemically synthesized
atggcagcacgggtcagggagg

SEQ ID NO: 60917 - DNA, 22 bp, Artificial Sequence
  chemically synthesized
ccactactggggatggggaaac

SEQ ID NO: 60918 - DNA, 22 bp, Artificial Sequence
  chemically synthesized
ctggggatggggaaactgtttc

SEQ ID NO: 60919 - DNA, 22 bp, Artificial Sequence
  chemically synthesized
gggatggggaaactgtttcttc

SEQ ID NO: 60920 - DNA, 22 bp, Artificial Sequence
  chemically synthesized
tttcttctggcaaaaaagtttc

SEQ ID NO: 60921 - DNA, 22 bp, Artificial Sequence
  chemically synthesized
cttctggcaaaaaagtttcatc

SEQ ID NO: 60922 - DNA, 22 bp, Artificial Sequence
  chemically synthesized
ttctggcaaaaaagtttcatca

SEQ ID NO: 60923 - DNA, 22 bp, Artificial Sequence
  chemically synthesized
ctggcaaaaaagtttcatcaga

SEQ ID NO: 60924 - DNA, 22 bp, Artificial Sequence
  chemically synthesized
tggcaaaaaagtttcatcagag

SEQ ID NO: 60925 - DNA, 22 bp, Artificial Sequence
  chemically synthesized
gcaaaaaagtttcatcagagtt

SEQ ID NO: 60926 - DNA, 22 bp, Artificial Sequence
  chemically synthesized
catcagagttcacaaactcagt

SEQ ID NO: 60927 - DNA, 22 bp, Artificial Sequence
  chemically synthesized
atcagagttcacaaactcagtg

SEQ ID NO: 60928 - DNA, 22 bp, Artificial Sequence
  chemically synthesized
acaaactcagtgtcctcagctt

SEQ ID NO: 60929 - DNA, 22 bp, Artificial Sequence
  chemically synthesized
agtgtcctcagcttcatcaggg

SEQ ID NO: 60930 - DNA, 22 bp, Artificial Sequence
  chemically synthesized
agcttcatcagggttctcccac

SEQ ID NO: 60931 - DNA, 22 bp, Artificial Sequence
  chemically synthesized
catcagggttctcccacacatc

SEQ ID NO: 60932 - DNA, 22 bp, Artificial Sequence
  chemically synthesized
atcagggttctcccacacatcc

SEQ ID NO: 60933 - DNA, 22 bp, Artificial Sequence
  chemically synthesized
tcccacacatccccactccaag

SEQ ID NO: 60934 - DNA, 22 bp, Artificial Sequence
  chemically synthesized
ccacacatccccactccaagtt

SEQ ID NO: 60935 - DNA, 22 bp, Artificial Sequence
  chemically synthesized
caagttccagggtcccattttt

SEQ ID NO: 60936 - DNA, 22 bp, Artificial Sequence
  chemically synthesized
cagggtcccatttttttccagt

SEQ ID NO: 60937 - DNA, 22 bp, Artificial Sequence
  chemically synthesized
ttttccagtcaatgccctcact

SEQ ID NO: 60938 - DNA, 22 bp, Artificial Sequence
  chemically synthesized
tttccagtcaatgccctcactt

SEQ ID NO: 60939 - DNA, 22 bp, Artificial Sequence
  chemically synthesized
ttccagtcaatgccctcacttt

SEQ ID NO: 60940 - DNA, 22 bp, Artificial Sequence
  chemically synthesized
tccagtcaatgccctcacttta

SEQ ID NO: 60941 - DNA, 22 bp, Artificial Sequence
  chemically synthesized
ccagtcaatgccctcactttaa

SEQ ID NO: 60942 - DNA, 22 bp, Artificial Sequence
  chemically synthesized
cagtcaatgccctcactttaac

SEQ ID NO: 60943 - DNA, 22 bp, Artificial Sequence
  chemically synthesized
actttaacagtaaacacctggc

SEQ ID NO: 60944 - DNA, 22 bp, Artificial Sequence
  chemically synthesized
taacagtaaacacctggcaagg

SEQ ID NO: 60945 - DNA, 22 bp, Artificial Sequence
  chemically synthesized
aacagtaaacacctggcaaggc

SEQ ID NO: 60946 - DNA, 22 bp, Artificial Sequence
  chemically synthesized
acagtaaacacctggcaaggct

SEQ ID NO: 60947 - DNA, 22 bp, Artificial Sequence
  chemically synthesized
gcaaggctgtgcatgcacctct

SEQ ID NO: 60948 - DNA, 22 bp, Artificial Sequence
  chemically synthesized
tgcatgcacctcttgttgcaga

SEQ ID NO: 60949 - DNA, 22 bp, Artificial Sequence
  chemically synthesized
ttgttgcagatcagctactcgc

SEQ ID NO: 60950 - DNA, 22 bp, Artificial Sequence
  chemically synthesized
gttgcagatcagctactcgcat

SEQ ID NO: 60951 - DNA, 22 bp, Artificial Sequence
  chemically synthesized
ttgcagatcagctactcgcatg

SEQ ID NO: 60952 - DNA, 22 bp, Artificial Sequence
  chemically synthesized
cagatcagctactcgcatgata

SEQ ID NO: 60953 - DNA, 22 bp, Artificial Sequence
  chemically synthesized
ctcgcatgataacagcttgtct

SEQ ID NO: 60954 - DNA, 22 bp, Artificial Sequence
  chemically synthesized
gcatgataacagcttgtctctg

SEQ ID NO: 60955 - DNA, 22 bp, Artificial Sequence
  chemically synthesized
gtctctgttttttcacaatttc

SEQ ID NO: 60956 - DNA, 22 bp, Artificial Sequence
  chemically synthesized
tctctgttttttcacaatttca

SEQ ID NO: 60957 - DNA, 22 bp, Artificial Sequence
  chemically synthesized
tgttttttcacaatttcaactc

SEQ ID NO: 60958 - DNA, 22 bp, Artificial Sequence
  chemically synthesized
ttttttcacaatttcaactctt

SEQ ID NO: 60959 - DNA, 22 bp, Artificial Sequence
  chemically synthesized
tttcacaatttcaactctttct

SEQ ID NO: 60960 - DNA, 22 bp, Artificial Sequence
  chemically synthesized
ttcacaatttcaactctttctc

SEQ ID NO: 60961 - DNA, 22 bp, Artificial Sequence
  chemically synthesized
tcacaatttcaactctttctct

SEQ ID NO: 60962 - DNA, 22 bp, Artificial Sequence
  chemically synthesized
cacaatttcaactctttctcta

SEQ ID NO: 60963 - DNA, 22 bp, Artificial Sequence
  chemically synthesized
acaatttcaactctttctctac

SEQ ID NO: 60964 - DNA, 22 bp, Artificial Sequence
  chemically synthesized
caactctttctctacaggagtt

SEQ ID NO: 60965 - DNA, 22 bp, Artificial Sequence
  chemically synthesized
aactctttctctacaggagtta

SEQ ID NO: 60966 - DNA, 22 bp, Artificial Sequence
  chemically synthesized
tttctctacaggagttaaaact

SEQ ID NO: 60967 - DNA, 22 bp, Artificial Sequence
  chemically synthesized
tctctacaggagttaaaactct

SEQ ID NO: 60968 - DNA, 22 bp, Artificial Sequence
  chemically synthesized
ctctacaggagttaaaactctc

SEQ ID NO: 60969 - DNA, 22 bp, Artificial Sequence
  chemically synthesized
tctacaggagttaaaactctca

SEQ ID NO: 60970 - DNA, 22 bp, Artificial Sequence
  chemically synthesized
tacaggagttaaaactctcatt

SEQ ID NO: 60971 - DNA, 22 bp, Artificial Sequence
  chemically synthesized
caggagttaaaactctcattca

SEQ ID NO: 60972 - DNA, 22 bp, Artificial Sequence
  chemically synthesized
aaactctcattcagggcaatct

SEQ ID NO: 60973 - DNA, 22 bp, Artificial Sequence
  chemically synthesized
tcattcagggcaatcttagcag

SEQ ID NO: 60974 - DNA, 22 bp, Artificial Sequence
  chemically synthesized
attcagggcaatcttagcagat

SEQ ID NO: 60975 - DNA, 22 bp, Artificial Sequence
  chemically synthesized
agggcaatcttagcagatttgt

SEQ ID NO: 60976 - DNA, 22 bp, Artificial Sequence
  chemically synthesized
agcagatttgtggctcagtatc

SEQ ID NO: 60977 - DNA, 22 bp, Artificial Sequence
  chemically synthesized
gcagatttgtggctcagtatct

SEQ ID NO: 60978 - DNA, 22 bp, Artificial Sequence
  chemically synthesized
gtggctcagtatctgcttctga

SEQ ID NO: 60979 - DNA, 22 bp, Artificial Sequence
  chemically synthesized
tggctcagtatctgcttctgaa

SEQ ID NO: 60980 - DNA, 22 bp, Artificial Sequence
  chemically synthesized
agtatctgcttctgaaggtggg

SEQ ID NO: 60981 - DNA, 22 bp, Artificial Sequence
  chemically synthesized
cttctgaaggtgggagacagat

SEQ ID NO: 60982 - DNA, 22 bp, Artificial Sequence
  chemically synthesized
ctgaaggtgggagacagatccc

SEQ ID NO: 60983 - DNA, 22 bp, Artificial Sequence
  chemically synthesized
tgaaggtgggagacagatcccc

SEQ ID NO: 60984 - DNA, 22 bp, Artificial Sequence
  chemically synthesized
aaggtgggagacagatcccctg

SEQ ID NO: 60985 - DNA, 22 bp, Artificial Sequence
  chemically synthesized
agatcatcattttctttcatct

SEQ ID NO: 60986 - DNA, 22 bp, Artificial Sequence
  chemically synthesized
tctttcatctctttctccagag

SEQ ID NO: 60987 - DNA, 22 bp, Artificial Sequence
  chemically synthesized
ctttcatctctttctccagaga

SEQ ID NO: 60988 - DNA, 22 bp, Artificial Sequence
  chemically synthesized
tttcatctctttctccagagaa

SEQ ID NO: 60989 - DNA, 22 bp, Artificial Sequence
  chemically synthesized
tcatctctttctccagagaact

SEQ ID NO: 60990 - DNA, 22 bp, Artificial Sequence
  chemically synthesized
catctctttctccagagaactt

SEQ ID NO: 60991 - DNA, 22 bp, Artificial Sequence
  chemically synthesized
atctctttctccagagaactta

SEQ ID NO: 60992 - DNA, 22 bp, Artificial Sequence
  chemically synthesized
tttctccagagaacttaggagc

SEQ ID NO: 60993 - DNA, 22 bp, Artificial Sequence
  chemically synthesized
tctccagagaacttaggagcaa

SEQ ID NO: 60994 - DNA, 22 bp, Artificial Sequence
  chemically synthesized
ctccagagaacttaggagcaat

SEQ ID NO: 60995 - DNA, 22 bp, Artificial Sequence
  chemically synthesized
tccagagaacttaggagcaatc

SEQ ID NO: 60996 - DNA, 22 bp, Artificial Sequence
  chemically synthesized
cagagaacttaggagcaatcaa

SEQ ID NO: 60997 - DNA, 22 bp, Artificial Sequence
  chemically synthesized
aggagcaatcaaccaacttcat

SEQ ID NO: 60998 - DNA, 22 bp, Artificial Sequence
  chemically synthesized
ggagcaatcaaccaacttcatt

SEQ ID NO: 60999 - DNA, 22 bp, Artificial Sequence
  chemically synthesized
cattatgttccttggttctcca

SEQ ID NO: 61000 - DNA, 22 bp, Artificial Sequence
  chemically synthesized
attatgttccttggttctccac

SEQ ID NO: 61001 - DNA, 22 bp, Artificial Sequence
  chemically synthesized
tgttccttggttctccacatat

SEQ ID NO: 61002 - DNA, 22 bp, Artificial Sequence
  chemically synthesized
cttggttctccacatatagtca

SEQ ID NO: 61003 - DNA, 22 bp, Artificial Sequence
  chemically synthesized
ggttctccacatatagtcaaag

SEQ ID NO: 61004 - DNA, 22 bp, Artificial Sequence
  chemically synthesized
gttctccacatatagtcaaagg

SEQ ID NO: 61005 - DNA, 22 bp, Artificial Sequence
  chemically synthesized
tccacatatagtcaaaggtatt

SEQ ID NO: 61006 - DNA, 22 bp, Artificial Sequence
  chemically synthesized
cacatatagtcaaaggtattat

SEQ ID NO: 61007 - DNA, 22 bp, Artificial Sequence
  chemically synthesized
tgtatagagtcactaaactcct

SEQ ID NO: 61008 - DNA, 22 bp, Artificial Sequence
  chemically synthesized
aactccttgcctctcataagtg

SEQ ID NO: 61009 - DNA, 22 bp, Artificial Sequence
  chemically synthesized
cttgcctctcataagtgatgaa

SEQ ID NO: 61010 - DNA, 22 bp, Artificial Sequence
  chemically synthesized
gcctctcataagtgatgaatca

SEQ ID NO: 61011 - DNA, 22 bp, Artificial Sequence
  chemically synthesized
cctctcataagtgatgaatcag

SEQ ID NO: 61012 - DNA, 22 bp, Artificial Sequence
  chemically synthesized
tcataagtgatgaatcagtagt

SEQ ID NO: 61013 - DNA, 22 bp, Artificial Sequence
  chemically synthesized
ataagtgatgaatcagtagtgt

SEQ ID NO: 61014 - DNA, 22 bp, Artificial Sequence
  chemically synthesized
attttgcataactctctaaaca

SEQ ID NO: 61015 - DNA, 22 bp, Artificial Sequence
  chemically synthesized
ttttgcataactctctaaacaa

SEQ ID NO: 61016 - DNA, 22 bp, Artificial Sequence
  chemically synthesized
tgcataactctctaaacaattc

SEQ ID NO: 61017 - DNA, 22 bp, Artificial Sequence
  chemically synthesized
gcataactctctaaacaattca

SEQ ID NO: 61018 - DNA, 22 bp, Artificial Sequence
  chemically synthesized
cataactctctaaacaattcag

SEQ ID NO: 61019 - DNA, 22 bp, Artificial Sequence
  chemically synthesized
tctaaacaattcaggccaagta

SEQ ID NO: 61020 - DNA, 22 bp, Artificial Sequence
  chemically synthesized
taaacaattcaggccaagtact

SEQ ID NO: 61021 - DNA, 22 bp, Artificial Sequence
  chemically synthesized
aacaattcaggccaagtactat

SEQ ID NO: 61022 - DNA, 22 bp, Artificial Sequence
  chemically synthesized
aggccaagtactatcagtgttc

SEQ ID NO: 61023 - DNA, 22 bp, Artificial Sequence
  chemically synthesized
tcagtgttctccatactattag

SEQ ID NO: 61024 - DNA, 22 bp, Artificial Sequence
  chemically synthesized
tccatactattagaagtagagt

SEQ ID NO: 61025 - DNA, 22 bp, Artificial Sequence
  chemically synthesized
catactattagaagtagagtcc

SEQ ID NO: 61026 - DNA, 22 bp, Artificial Sequence
  chemically synthesized
ttagaagtagagtccttagcat

SEQ ID NO: 61027 - DNA, 22 bp, Artificial Sequence
  chemically synthesized
gaagtagagtccttagcatttt

SEQ ID NO: 61028 - DNA, 22 bp, Artificial Sequence
  chemically synthesized
agcattttttggtctaatcata

SEQ ID NO: 61029 - DNA, 22 bp, Artificial Sequence
  chemically synthesized
gcattttttggtctaatcatat

SEQ ID NO: 61030 - DNA, 22 bp, Artificial Sequence
  chemically synthesized
tttggtctaatcatattaatca

SEQ ID NO: 61031 - DNA, 22 bp, Artificial Sequence
  chemically synthesized
ttggtctaatcatattaatcag

SEQ ID NO: 61032 - DNA, 22 bp, Artificial Sequence
  chemically synthesized
tggtctaatcatattaatcagc

SEQ ID NO: 61033 - DNA, 22 bp, Artificial Sequence
  chemically synthesized
ggtctaatcatattaatcagcc

SEQ ID NO: 61034 - DNA, 22 bp, Artificial Sequence
  chemically synthesized
gtctaatcatattaatcagcca

SEQ ID NO: 61035 - DNA, 22 bp, Artificial Sequence
  chemically synthesized
atcatattaatcagccaacacc

SEQ ID NO: 61036 - DNA, 22 bp, Artificial Sequence
  chemically synthesized
atcagccaacaccagaagtccc

SEQ ID NO: 61037 - DNA, 22 bp, Artificial Sequence
  chemically synthesized
catccttaatattctgttcctc

SEQ ID NO: 61038 - DNA, 22 bp, Artificial Sequence
  chemically synthesized
aatattctgttcctcaagaacc

SEQ ID NO: 61039 - DNA, 22 bp, Artificial Sequence
  chemically synthesized
atattctgttcctcaagaacca

SEQ ID NO: 61040 - DNA, 22 bp, Artificial Sequence
  chemically synthesized
tgttcctcaagaaccacttctg

SEQ ID NO: 61041 - DNA, 22 bp, Artificial Sequence
  chemically synthesized
ttcctcaagaaccacttctggt

SEQ ID NO: 61042 - DNA, 22 bp, Artificial Sequence
  chemically synthesized
ctcaagaaccacttctggtatg

SEQ ID NO: 61043 - DNA, 22 bp, Artificial Sequence
  chemically synthesized
aagaaccacttctggtatgaaa

SEQ ID NO: 61044 - DNA, 22 bp, Artificial Sequence
  chemically synthesized
ctggtatgaaaatctgtattag

SEQ ID NO: 61045 - DNA, 22 bp, Artificial Sequence
  chemically synthesized
tggtatgaaaatctgtattagt

SEQ ID NO: 61046 - DNA, 22 bp, Artificial Sequence
  chemically synthesized
gtatgaaaatctgtattagtcg

SEQ ID NO: 61047 - DNA, 22 bp, Artificial Sequence
  chemically synthesized
tattagtcggggttctctagag

SEQ ID NO: 61048 - DNA, 22 bp, Artificial Sequence
  chemically synthesized
gtcggggttctctagagggaca

SEQ ID NO: 61049 - DNA, 22 bp, Artificial Sequence
  chemically synthesized
tctagagggacagaactaatag

SEQ ID NO: 61050 - DNA, 22 bp, Artificial Sequence
  chemically synthesized
tagagggacagaactaatagga

SEQ ID NO: 61051 - DNA, 22 bp, Artificial Sequence
  chemically synthesized
gagggacagaactaataggaga

SEQ ID NO: 61052 - DNA, 22 bp, Artificial Sequence
  chemically synthesized
ataggagattatatatatatat

SEQ ID NO: 61053 - DNA, 22 bp, Artificial Sequence
  chemically synthesized
tatatatatatatatgagagag

SEQ ID NO: 61054 - DNA, 22 bp, Artificial Sequence
  chemically synthesized
tatctatctatagatatagata

SEQ ID NO: 61055 - DNA, 22 bp, Artificial Sequence
  chemically synthesized
tctatagatatagatatactca

SEQ ID NO: 61056 - DNA, 22 bp, Artificial Sequence
  chemically synthesized
tagatatagatatactcacaca

SEQ ID NO: 61057 - DNA, 22 bp, Artificial Sequence
  chemically synthesized
acacaaaggggagcttattaag

SEQ ID NO: 61058 - DNA, 22 bp, Artificial Sequence
  chemically synthesized
attaagtggtattaactcacaa

SEQ ID NO: 61059 - DNA, 22 bp, Artificial Sequence
  chemically synthesized
ttaagtggtattaactcacaag

SEQ ID NO: 61060 - DNA, 22 bp, Artificial Sequence
  chemically synthesized
agtggtattaactcacaagatt

SEQ ID NO: 61061 - DNA, 22 bp, Artificial Sequence
  chemically synthesized
actcacaagattacaaggtccc

SEQ ID NO: 61062 - DNA, 22 bp, Artificial Sequence
  chemically synthesized
acaagattacaaggtcccataa

SEQ ID NO: 61063 - DNA, 22 bp, Artificial Sequence
  chemically synthesized
caaggtcccataataggccacc

SEQ ID NO: 61064 - DNA, 22 bp, Artificial Sequence
  chemically synthesized
caatctgaggagcaaggaagac

SEQ ID NO: 61065 - DNA, 22 bp, Artificial Sequence
  chemically synthesized
aggagcaaggaagacagtccaa

SEQ ID NO: 61066 - DNA, 22 bp, Artificial Sequence
  chemically synthesized
aagaacttggagtccgatgttc

SEQ ID NO: 61067 - DNA, 22 bp, Artificial Sequence
  chemically synthesized
ggagtccgatgttcaagagcag

SEQ ID NO: 61068 - DNA, 22 bp, Artificial Sequence
  chemically synthesized
gagtccgatgttcaagagcagg

SEQ ID NO: 61069 - DNA, 22 bp, Artificial Sequence
  chemically synthesized
aagagcaggaaggatccagcac

SEQ ID NO: 61070 - DNA, 22 bp, Artificial Sequence
  chemically synthesized
ggaggctaagccagtctagcct

SEQ ID NO: 61071 - DNA, 22 bp, Artificial Sequence
  chemically synthesized
agccagtctagcctttttacat

SEQ ID NO: 61072 - DNA, 22 bp, Artificial Sequence
  chemically synthesized
gcctttttacatttttctgcca

SEQ ID NO: 61073 - DNA, 22 bp, Artificial Sequence
  chemically synthesized
tttacatttttctgccagcttt

SEQ ID NO: 61074 - DNA, 22 bp, Artificial Sequence
  chemically synthesized
ttacatttttctgccagcttta

SEQ ID NO: 61075 - DNA, 22 bp, Artificial Sequence
  chemically synthesized
tacatttttctgccagctttat

SEQ ID NO: 61076 - DNA, 22 bp, Artificial Sequence
  chemically synthesized
acatttttctgccagctttata

SEQ ID NO: 61077 - DNA, 22 bp, Artificial Sequence
  chemically synthesized
catttttctgccagctttatat

SEQ ID NO: 61078 - DNA, 22 bp, Artificial Sequence
  chemically synthesized
ttctgccagctttatattctgg

SEQ ID NO: 61079 - DNA, 22 bp, Artificial Sequence
  chemically synthesized
tctgccagctttatattctggc

SEQ ID NO: 61080 - DNA, 22 bp, Artificial Sequence
  chemically synthesized
ctgccagctttatattctggct

SEQ ID NO: 61081 - DNA, 22 bp, Artificial Sequence
  chemically synthesized
tgccagctttatattctggctc

SEQ ID NO: 61082 - DNA, 22 bp, Artificial Sequence
  chemically synthesized
ccagctttatattctggctcta

SEQ ID NO: 61083 - DNA, 22 bp, Artificial Sequence
  chemically synthesized
tatattctggctctacagcttg

SEQ ID NO: 61084 - DNA, 22 bp, Artificial Sequence
  chemically synthesized
atattctggctctacagcttgg

SEQ ID NO: 61085 - DNA, 22 bp, Artificial Sequence
  chemically synthesized
tattctggctctacagcttggg

SEQ ID NO: 61086 - DNA, 22 bp, Artificial Sequence
  chemically synthesized
tggctctacagcttgggggcag

SEQ ID NO: 61087 - DNA, 22 bp, Artificial Sequence
  chemically synthesized
gctctacagcttgggggcagca

SEQ ID NO: 61088 - DNA, 22 bp, Artificial Sequence
  chemically synthesized
tacagcttgggggcagcagggg

SEQ ID NO: 61089 - DNA, 22 bp, Artificial Sequence
  chemically synthesized
cagcttgggggcagcaggggca

SEQ ID NO: 61090 - DNA, 22 bp, Artificial Sequence
  chemically synthesized
gggggcagcaggggcaggggcc

SEQ ID NO: 61091 - DNA, 22 bp, Artificial Sequence
  chemically synthesized
ggggcagcaggggcaggggcct

SEQ ID NO: 61092 - DNA, 22 bp, Artificial Sequence
  chemically synthesized
agggtgcttgcagggatgacac

SEQ ID NO: 61093 - DNA, 22 bp, Artificial Sequence
  chemically synthesized
gcagggatgacacactggcctc

SEQ ID NO: 61094 - DNA, 22 bp, Artificial Sequence
  chemically synthesized
cagggatgacacactggcctct

SEQ ID NO: 61095 - DNA, 22 bp, Artificial Sequence
  chemically synthesized
gcctcttttccatagggtggct

SEQ ID NO: 61096 - DNA, 22 bp, Artificial Sequence
  chemically synthesized
ttttccatagggtggctggggc

SEQ ID NO: 61097 - DNA, 22 bp, Artificial Sequence
  chemically synthesized
ttccatagggtggctggggcac

SEQ ID NO: 61098 - DNA, 22 bp, Artificial Sequence
  chemically synthesized
tccatagggtggctggggcaca

SEQ ID NO: 61099 - DNA, 22 bp, Artificial Sequence
  chemically synthesized
ccatagggtggctggggcacac

SEQ ID NO: 61100 - DNA, 22 bp, Artificial Sequence
  chemically synthesized
catagggtggctggggcacact

SEQ ID NO: 61101 - DNA, 22 bp, Artificial Sequence
  chemically synthesized
gggcacactggggtgtgagtaa

SEQ ID NO: 61102 - DNA, 22 bp, Artificial Sequence
  chemically synthesized
gggtgtgagtaaagcactcagg

SEQ ID NO: 61103 - DNA, 22 bp, Artificial Sequence
  chemically synthesized
aggatcttttttccttccctag

SEQ ID NO: 61104 - DNA, 22 bp, Artificial Sequence
  chemically synthesized
ttttccttccctagtccaagta

SEQ ID NO: 61105 - DNA, 22 bp, Artificial Sequence
  chemically synthesized
tttccttccctagtccaagtac

SEQ ID NO: 61106 - DNA, 22 bp, Artificial Sequence
  chemically synthesized
ttccttccctagtccaagtaca

SEQ ID NO: 61107 - DNA, 22 bp, Artificial Sequence
  chemically synthesized
tccttccctagtccaagtacag

SEQ ID NO: 61108 - DNA, 22 bp, Artificial Sequence
  chemically synthesized
ccttccctagtccaagtacagc

SEQ ID NO: 61109 - DNA, 22 bp, Artificial Sequence
  chemically synthesized
cttccctagtccaagtacagca

SEQ ID NO: 61110 - DNA, 22 bp, Artificial Sequence
  chemically synthesized
ccctagtccaagtacagcaagg

SEQ ID NO: 61111 - DNA, 22 bp, Artificial Sequence
  chemically synthesized
cctagtccaagtacagcaaggg

SEQ ID NO: 61112 - DNA, 22 bp, Artificial Sequence
  chemically synthesized
gtccaagtacagcaagggcagt

SEQ ID NO: 61113 - DNA, 22 bp, Artificial Sequence
  chemically synthesized
cagtgttagtggcagaaggact

SEQ ID NO: 61114 - DNA, 22 bp, Artificial Sequence
  chemically synthesized
gtggcagaaggactttcagtca

SEQ ID NO: 61115 - DNA, 22 bp, Artificial Sequence
  chemically synthesized
tcagtcacctctgggagcttca

SEQ ID NO: 61116 - DNA, 22 bp, Artificial Sequence
  chemically synthesized
cagtcacctctgggagcttcac

SEQ ID NO: 61117 - DNA, 22 bp, Artificial Sequence
  chemically synthesized
agtcacctctgggagcttcacc

SEQ ID NO: 61118 - DNA, 22 bp, Artificial Sequence
  chemically synthesized
tgggagcttcaccccacaaaaa

SEQ ID NO: 61119 - DNA, 22 bp, Artificial Sequence
  chemically synthesized
ggagcttcaccccacaaaaaca

SEQ ID NO: 61120 - DNA, 22 bp, Artificial Sequence
  chemically synthesized
caccccacaaaaacacagagtg

SEQ ID NO: 61121 - DNA, 22 bp, Artificial Sequence
  chemically synthesized
accccacaaaaacacagagtgc

SEQ ID NO: 61122 - DNA, 22 bp, Artificial Sequence
  chemically synthesized
aactgagttcgaggtgcctgca

SEQ ID NO: 61123 - DNA, 22 bp, Artificial Sequence
  chemically synthesized
agttcgaggtgcctgcactgtg

SEQ ID NO: 61124 - DNA, 22 bp, Artificial Sequence
  chemically synthesized
gaggtgcctgcactgtgggccc

SEQ ID NO: 61125 - DNA, 22 bp, Artificial Sequence
  chemically synthesized
cactgtgggcccaagccaggag

SEQ ID NO: 61126 - DNA, 22 bp, Artificial Sequence
  chemically synthesized
tgggcccaagccaggagccttg

SEQ ID NO: 61127 - DNA, 22 bp, Artificial Sequence
  chemically synthesized
gcctggtgaagagtagcaggtg

SEQ ID NO: 61128 - DNA, 22 bp, Artificial Sequence
  chemically synthesized
cctggtgaagagtagcaggtga

SEQ ID NO: 61129 - DNA, 22 bp, Artificial Sequence
  chemically synthesized
gtgaagagtagcaggtgaaagc

SEQ ID NO: 61130 - DNA, 22 bp, Artificial Sequence
  chemically synthesized
acaagaaagagaaactggaatt

SEQ ID NO: 61131 - DNA, 22 bp, Artificial Sequence
  chemically synthesized
gaattctttccctgctgtgtgc

SEQ ID NO: 61132 - DNA, 22 bp, Artificial Sequence
  chemically synthesized
tttccctgctgtgtgctggagg

SEQ ID NO: 61133 - DNA, 22 bp, Artificial Sequence
  chemically synthesized
tccctgctgtgtgctggaggtg

SEQ ID NO: 61134 - DNA, 22 bp, Artificial Sequence
  chemically synthesized
ccctgctgtgtgctggaggtgt

SEQ ID NO: 61135 - DNA, 22 bp, Artificial Sequence
  chemically synthesized
cctgctgtgtgctggaggtgtc

SEQ ID NO: 61136 - DNA, 22 bp, Artificial Sequence
  chemically synthesized
ctgtgtgctggaggtgtcaggg

SEQ ID NO: 61137 - DNA, 22 bp, Artificial Sequence
  chemically synthesized
tgtgctggaggtgtcagggaag

SEQ ID NO: 61138 - DNA, 22 bp, Artificial Sequence
  chemically synthesized
gaggtgtcagggaagtggccag

SEQ ID NO: 61139 - DNA, 22 bp, Artificial Sequence
  chemically synthesized
ctttctcaagcccaagggcatt

SEQ ID NO: 61140 - DNA, 22 bp, Artificial Sequence
  chemically synthesized
tttctcaagcccaagggcatta

SEQ ID NO: 61141 - DNA, 22 bp, Artificial Sequence
  chemically synthesized
tctcaagcccaagggcattaac

SEQ ID NO: 61142 - DNA, 22 bp, Artificial Sequence
  chemically synthesized
ctcaagcccaagggcattaacg

SEQ ID NO: 61143 - DNA, 22 bp, Artificial Sequence
  chemically synthesized
tcaagcccaagggcattaacgg

SEQ ID NO: 61144 - DNA, 22 bp, Artificial Sequence
  chemically synthesized
aagcccaagggcattaacggtg

SEQ ID NO: 61145 - DNA, 22 bp, Artificial Sequence
  chemically synthesized
acggtggtactgctgcagctga

SEQ ID NO: 61146 - DNA, 22 bp, Artificial Sequence
  chemically synthesized
ctgcagctgaaatggcagaggg

SEQ ID NO: 61147 - DNA, 22 bp, Artificial Sequence
  chemically synthesized
cagctgaaatggcagaggggct

SEQ ID NO: 61148 - DNA, 22 bp, Artificial Sequence
  chemically synthesized
aaatggcagaggggctgtgggt

SEQ ID NO: 61149 - DNA, 22 bp, Artificial Sequence
  chemically synthesized
tgggttgtctcttggatttcct

SEQ ID NO: 61150 - DNA, 22 bp, Artificial Sequence
  chemically synthesized
tctcttggatttcctccccaga

SEQ ID NO: 61151 - DNA, 22 bp, Artificial Sequence
  chemically synthesized
ttggatttcctccccagagaag

SEQ ID NO: 61152 - DNA, 22 bp, Artificial Sequence
  chemically synthesized
ggatttcctccccagagaagca

SEQ ID NO: 61153 - DNA, 22 bp, Artificial Sequence
  chemically synthesized
gatttcctccccagagaagcac

SEQ ID NO: 61154 - DNA, 22 bp, Artificial Sequence
  chemically synthesized
cctccccagagaagcacagagc

SEQ ID NO: 61155 - DNA, 22 bp, Artificial Sequence
  chemically synthesized
ctccccagagaagcacagagcc

SEQ ID NO: 61156 - DNA, 22 bp, Artificial Sequence
  chemically synthesized
cccagagaagcacagagccaac

SEQ ID NO: 61157 - DNA, 22 bp, Artificial Sequence
  chemically synthesized
actaaaatgttcaggcagggcc

SEQ ID NO: 61158 - DNA, 22 bp, Artificial Sequence
  chemically synthesized
aaatgttcaggcagggccaggg

SEQ ID NO: 61159 - DNA, 22 bp, Artificial Sequence
  chemically synthesized
aggcagggccagggtggctgtg

SEQ ID NO: 61160 - DNA, 22 bp, Artificial Sequence
  chemically synthesized
tgctctgcccagtgaggaatag

SEQ ID NO: 61161 - DNA, 22 bp, Artificial Sequence
  chemically synthesized
tgcccagtgaggaatagtaggg

SEQ ID NO: 61162 - DNA, 22 bp, Artificial Sequence
  chemically synthesized
cccagtgaggaatagtaggggc

SEQ ID NO: 61163 - DNA, 22 bp, Artificial Sequence
  chemically synthesized
ttccataaggcagctacactgt

SEQ ID NO: 61164 - DNA, 22 bp, Artificial Sequence
  chemically synthesized
tccataaggcagctacactgtg

SEQ ID NO: 61165 - DNA, 22 bp, Artificial Sequence
  chemically synthesized
ccataaggcagctacactgtgc

SEQ ID NO: 61166 - DNA, 22 bp, Artificial Sequence
  chemically synthesized
cataaggcagctacactgtgct

SEQ ID NO: 61167 - DNA, 22 bp, Artificial Sequence
  chemically synthesized
cactgtgctggaggtccgtgag

SEQ ID NO: 61168 - DNA, 22 bp, Artificial Sequence
  chemically synthesized
tgctggaggtccgtgagagtcc

SEQ ID NO: 61169 - DNA, 22 bp, Artificial Sequence
  chemically synthesized
gaggtccgtgagagtcctgaag

SEQ ID NO: 61170 - DNA, 22 bp, Artificial Sequence
  chemically synthesized
aagctcctcgctccctcctgag

SEQ ID NO: 61171 - DNA, 22 bp, Artificial Sequence
  chemically synthesized
ctcgctccctcctgagcccata

SEQ ID NO: 61172 - DNA, 22 bp, Artificial Sequence
  chemically synthesized
gctccctcctgagcccatactt

SEQ ID NO: 61173 - DNA, 22 bp, Artificial Sequence
  chemically synthesized
cctcctgagcccatactttaat

SEQ ID NO: 61174 - DNA, 22 bp, Artificial Sequence
  chemically synthesized
ctgagcccatactttaatctca

SEQ ID NO: 61175 - DNA, 22 bp, Artificial Sequence
  chemically synthesized
agcccatactttaatctcaaga

SEQ ID NO: 61176 - DNA, 22 bp, Artificial Sequence
  chemically synthesized
taatctcaagagtttgagataa

SEQ ID NO: 61177 - DNA, 22 bp, Artificial Sequence
  chemically synthesized
aatctcaagagtttgagataaa

SEQ ID NO: 61178 - DNA, 22 bp, Artificial Sequence
  chemically synthesized
atctcaagagtttgagataaac

SEQ ID NO: 61179 - DNA, 22 bp, Artificial Sequence
  chemically synthesized
aagagtttgagataaacagtgg

SEQ ID NO: 61180 - DNA, 22 bp, Artificial Sequence
  chemically synthesized
gagataaacagtggtaaggaag

SEQ ID NO: 61181 - DNA, 22 bp, Artificial Sequence
  chemically synthesized
agataaacagtggtaaggaaga

SEQ ID NO: 61182 - DNA, 22 bp, Artificial Sequence
  chemically synthesized
atgaaacccaggaagataagtc

SEQ ID NO: 61183 - DNA, 22 bp, Artificial Sequence
  chemically synthesized
caacctaaagaaatacttttta

SEQ ID NO: 61184 - DNA, 22 bp, Artificial Sequence
  chemically synthesized
aagaaatactttttaaaaatca

SEQ ID NO: 61185 - DNA, 22 bp, Artificial Sequence
  chemically synthesized
tttaaaaatcatatttatagag

SEQ ID NO: 61186 - DNA, 22 bp, Artificial Sequence
  chemically synthesized
ttaaaaatcatatttatagagg

SEQ ID NO: 61187 - DNA, 22 bp, Artificial Sequence
  chemically synthesized
taaaaatcatatttatagaggt

SEQ ID NO: 61188 - DNA, 22 bp, Artificial Sequence
  chemically synthesized
aaaaatcatatttatagaggtt

SEQ ID NO: 61189 - DNA, 22 bp, Artificial Sequence
  chemically synthesized
aaaatcatatttatagaggttt

SEQ ID NO: 61190 - DNA, 22 bp, Artificial Sequence
  chemically synthesized
atagaggtttgcagtgatacta

SEQ ID NO: 61191 - DNA, 22 bp, Artificial Sequence
  chemically synthesized
tagaggtttgcagtgatactaa

SEQ ID NO: 61192 - DNA, 22 bp, Artificial Sequence
  chemically synthesized
gcagtgatactaaagacaatat

SEQ ID NO: 61193 - DNA, 22 bp, Artificial Sequence
  chemically synthesized
cagtgatactaaagacaatatt

SEQ ID NO: 61194 - DNA, 22 bp, Artificial Sequence
  chemically synthesized
aagacaatattgcaaatcatta

SEQ ID NO: 61195 - DNA, 22 bp, Artificial Sequence
  chemically synthesized
caaatcattattaagaatacaa

SEQ ID NO: 61196 - DNA, 22 bp, Artificial Sequence
  chemically synthesized
ttaagaatacaagaagtacaat

SEQ ID NO: 61197 - DNA, 22 bp, Artificial Sequence
  chemically synthesized
agaatacaagaagtacaatgtt

SEQ ID NO: 61198 - DNA, 22 bp, Artificial Sequence
  chemically synthesized
cttgtttctttaacacctgtga

SEQ ID NO: 61199 - DNA, 22 bp, Artificial Sequence
  chemically synthesized
ttgtttctttaacacctgtgat

SEQ ID NO: 61200 - DNA, 22 bp, Artificial Sequence
  chemically synthesized
gtttctttaacacctgtgatac

SEQ ID NO: 61201 - DNA, 22 bp, Artificial Sequence
  chemically synthesized
tttctttaacacctgtgataca

SEQ ID NO: 61202 - DNA, 22 bp, Artificial Sequence
  chemically synthesized
ctttaacacctgtgatacaggt

SEQ ID NO: 61203 - DNA, 22 bp, Artificial Sequence
  chemically synthesized
tttaacacctgtgatacaggtg

SEQ ID NO: 61204 - DNA, 22 bp, Artificial Sequence
  chemically synthesized
taacacctgtgatacaggtgtt

SEQ ID NO: 61205 - DNA, 22 bp, Artificial Sequence
  chemically synthesized
aacacctgtgatacaggtgttt

SEQ ID NO: 61206 - DNA, 22 bp, Artificial Sequence
  chemically synthesized
acacctgtgatacaggtgtttg

SEQ ID NO: 61207 - DNA, 22 bp, Artificial Sequence
  chemically synthesized
tgatacaggtgtttgatatgaa

SEQ ID NO: 61208 - DNA, 22 bp, Artificial Sequence
  chemically synthesized
gatatgaattctacgtaatggc

SEQ ID NO: 61209 - DNA, 22 bp, Artificial Sequence
  chemically synthesized
atatgaattctacgtaatggct

SEQ ID NO: 61210 - DNA, 22 bp, Artificial Sequence
  chemically synthesized
tacgtaatggctgcattgcttc

SEQ ID NO: 61211 - DNA, 22 bp, Artificial Sequence
  chemically synthesized
cgtaatggctgcattgcttctt

SEQ ID NO: 61212 - DNA, 22 bp, Artificial Sequence
  chemically synthesized
cattgcttcttgccaccaccca

SEQ ID NO: 61213 - DNA, 22 bp, Artificial Sequence
  chemically synthesized
cttcttgccaccacccaaagaa

SEQ ID NO: 61214 - DNA, 22 bp, Artificial Sequence
  chemically synthesized
cttgccaccacccaaagaaggt

SEQ ID NO: 61215 - DNA, 22 bp, Artificial Sequence
  chemically synthesized
ttgccaccacccaaagaaggtt

SEQ ID NO: 61216 - DNA, 22 bp, Artificial Sequence
  chemically synthesized
gccaccacccaaagaaggttgt

SEQ ID NO: 61217 - DNA, 22 bp, Artificial Sequence
  chemically synthesized
ccaccacccaaagaaggttgta

SEQ ID NO: 61218 - DNA, 22 bp, Artificial Sequence
  chemically synthesized
tatagcactcagatgtatacta

SEQ ID NO: 61219 - DNA, 22 bp, Artificial Sequence
  chemically synthesized
agatgtatactaactgcaaccg

SEQ ID NO: 61220 - DNA, 22 bp, Artificial Sequence
  chemically synthesized
actgcaaccgtgtatctcttag

SEQ ID NO: 61221 - DNA, 22 bp, Artificial Sequence
  chemically synthesized
caaccgtgtatctcttaggaat

SEQ ID NO: 61222 - DNA, 22 bp, Artificial Sequence
  chemically synthesized
ttaggaatttctcctttgccct

SEQ ID NO: 61223 - DNA, 22 bp, Artificial Sequence
  chemically synthesized
aggaatttctcctttgccctct

SEQ ID NO: 61224 - DNA, 22 bp, Artificial Sequence
  chemically synthesized
ggaatttctcctttgccctctt

SEQ ID NO: 61225 - DNA, 22 bp, Artificial Sequence
  chemically synthesized
ctcctttgccctcttccctccc

SEQ ID NO: 61226 - DNA, 22 bp, Artificial Sequence
  chemically synthesized
tcctttgccctcttccctccct

SEQ ID NO: 61227 - DNA, 22 bp, Artificial Sequence
  chemically synthesized
ctttgccctcttccctccctat

SEQ ID NO: 61228 - DNA, 22 bp, Artificial Sequence
  chemically synthesized
tgccctcttccctccctatcag

SEQ ID NO: 61229 - DNA, 22 bp, Artificial Sequence
  chemically synthesized
gccctcttccctccctatcagc

SEQ ID NO: 61230 - DNA, 22 bp, Artificial Sequence
  chemically synthesized
ccctcttccctccctatcagca

SEQ ID NO: 61231 - DNA, 22 bp, Artificial Sequence
  chemically synthesized
ttccctccctatcagcatgtat

SEQ ID NO: 61232 - DNA, 22 bp, Artificial Sequence
  chemically synthesized
ccctccctatcagcatgtatct

SEQ ID NO: 61233 - DNA, 22 bp, Artificial Sequence
  chemically synthesized
cctccctatcagcatgtatcta

SEQ ID NO: 61234 - DNA, 22 bp, Artificial Sequence
  chemically synthesized
cctatcagcatgtatctagcag

SEQ ID NO: 61235 - DNA, 22 bp, Artificial Sequence
  chemically synthesized
tcagcatgtatctagcagcatt

SEQ ID NO: 61236 - DNA, 22 bp, Artificial Sequence
  chemically synthesized
gcagcattctgaaaagttaact

SEQ ID NO: 61237 - DNA, 22 bp, Artificial Sequence
  chemically synthesized
tgaaaagttaactgcacagtga

SEQ ID NO: 61238 - DNA, 22 bp, Artificial Sequence
  chemically synthesized
aaaagttaactgcacagtgagc

SEQ ID NO: 61239 - DNA, 22 bp, Artificial Sequence
  chemically synthesized
actgcacagtgagcgactgctg

SEQ ID NO: 61240 - DNA, 22 bp, Artificial Sequence
  chemically synthesized
cacagtgagcgactgctgggca

SEQ ID NO: 61241 - DNA, 22 bp, Artificial Sequence
  chemically synthesized
ctgggcatcttaaggggcattc

SEQ ID NO: 61242 - DNA, 22 bp, Artificial Sequence
  chemically synthesized
ggcatcttaaggggcattcttt

SEQ ID NO: 61243 - DNA, 22 bp, Artificial Sequence
  chemically synthesized
aaggggcattcttttctaccta

SEQ ID NO: 61244 - DNA, 22 bp, Artificial Sequence
  chemically synthesized
aggggcattcttttctacctag

SEQ ID NO: 61245 - DNA, 22 bp, Artificial Sequence
  chemically synthesized
ttttctacctaggtattccccc

SEQ ID NO: 61246 - DNA, 22 bp, Artificial Sequence
  chemically synthesized
ttctacctaggtattccccctc

SEQ ID NO: 61247 - DNA, 22 bp, Artificial Sequence
  chemically synthesized
tctacctaggtattccccctcc

SEQ ID NO: 61248 - DNA, 22 bp, Artificial Sequence
  chemically synthesized
ctacctaggtattccccctcct

SEQ ID NO: 61249 - DNA, 22 bp, Artificial Sequence
  chemically synthesized
tacctaggtattccccctcctc

SEQ ID NO: 61250 - DNA, 22 bp, Artificial Sequence
  chemically synthesized
cctaggtattccccctcctcca

SEQ ID NO: 61251 - DNA, 22 bp, Artificial Sequence
  chemically synthesized
ggtattccccctcctccactca

SEQ ID NO: 61252 - DNA, 22 bp, Artificial Sequence
  chemically synthesized
cccctcctccactcatgtctag

SEQ ID NO: 61253 - DNA, 22 bp, Artificial Sequence
  chemically synthesized
ctccactcatgtctagcatgca

SEQ ID NO: 61254 - DNA, 22 bp, Artificial Sequence
  chemically synthesized
cactcatgtctagcatgcagga

SEQ ID NO: 61255 - DNA, 22 bp, Artificial Sequence
  chemically synthesized
atgtctagcatgcaggacttgg

SEQ ID NO: 61256 - DNA, 22 bp, Artificial Sequence
  chemically synthesized
gcatgcaggacttgggtaatct

SEQ ID NO: 61257 - DNA, 22 bp, Artificial Sequence
  chemically synthesized
gggtaatctctggggtttcaga

SEQ ID NO: 61258 - DNA, 22 bp, Artificial Sequence
  chemically synthesized
ggtaatctctggggtttcagat

SEQ ID NO: 61259 - DNA, 22 bp, Artificial Sequence
  chemically synthesized
tggggtttcagattctccagac

SEQ ID NO: 61260 - DNA, 22 bp, Artificial Sequence
  chemically synthesized
gggtttcagattctccagacct

SEQ ID NO: 61261 - DNA, 22 bp, Artificial Sequence
  chemically synthesized
cagattctccagacctccattc

SEQ ID NO: 61262 - DNA, 22 bp, Artificial Sequence
  chemically synthesized
agattctccagacctccattct

SEQ ID NO: 61263 - DNA, 22 bp, Artificial Sequence
  chemically synthesized
tccagacctccattctctcagg

SEQ ID NO: 61264 - DNA, 22 bp, Artificial Sequence
  chemically synthesized
cagacctccattctctcagggg

SEQ ID NO: 61265 - DNA, 22 bp, Artificial Sequence
  chemically synthesized
cattctctcaggggcttccacc

SEQ ID NO: 61266 - DNA, 22 bp, Artificial Sequence
  chemically synthesized
tctcaggggcttccacctcctg

SEQ ID NO: 61267 - DNA, 22 bp, Artificial Sequence
  chemically synthesized
tcaggggcttccacctcctgct

SEQ ID NO: 61268 - DNA, 22 bp, Artificial Sequence
  chemically synthesized
aggggcttccacctcctgctca

SEQ ID NO: 61269 - DNA, 22 bp, Artificial Sequence
  chemically synthesized
ccacctcctgctcatatctagc

SEQ ID NO: 61270 - DNA, 22 bp, Artificial Sequence
  chemically synthesized
cacctcctgctcatatctagct

SEQ ID NO: 61271 - DNA, 22 bp, Artificial Sequence
  chemically synthesized
ctgctcatatctagctatctgc

SEQ ID NO: 61272 - DNA, 22 bp, Artificial Sequence
  chemically synthesized
ctcatatctagctatctgccta

SEQ ID NO: 61273 - DNA, 22 bp, Artificial Sequence
  chemically synthesized
atatctagctatctgcctagtc

SEQ ID NO: 61274 - DNA, 22 bp, Artificial Sequence
  chemically synthesized
gctatctgcctagtctaaccat

SEQ ID NO: 61275 - DNA, 22 bp, Artificial Sequence
  chemically synthesized
tctgcctagtctaaccataaaa

SEQ ID NO: 61276 - DNA, 22 bp, Artificial Sequence
  chemically synthesized
cctagtctaaccataaaatctt

SEQ ID NO: 61277 - DNA, 22 bp, Artificial Sequence
  chemically synthesized
gtctaaccataaaatcttaaat

SEQ ID NO: 61278 - DNA, 22 bp, Artificial Sequence
  chemically synthesized
accataaaatcttaaataagaa

SEQ ID NO: 61279 - DNA, 22 bp, Artificial Sequence
  chemically synthesized
aaataagaataaatcatgtttg

SEQ ID NO: 61280 - DNA, 22 bp, Artificial Sequence
  chemically synthesized
aataagaataaatcatgtttgc

SEQ ID NO: 61281 - DNA, 22 bp, Artificial Sequence
  chemically synthesized
gctcttgattgccatgtcatga

SEQ ID NO: 61282 - DNA, 22 bp, Artificial Sequence
  chemically synthesized
ctcttgattgccatgtcatgat

SEQ ID NO: 61283 - DNA, 22 bp, Artificial Sequence
  chemically synthesized
ttgattgccatgtcatgataaa

SEQ ID NO: 61284 - DNA, 22 bp, Artificial Sequence
  chemically synthesized
gattgccatgtcatgataaaaa

SEQ ID NO: 61285 - DNA, 22 bp, Artificial Sequence
  chemically synthesized
attgccatgtcatgataaaaaa

SEQ ID NO: 61286 - DNA, 22 bp, Artificial Sequence
  chemically synthesized
ccatgtcatgataaaaaaaata

SEQ ID NO: 61287 - DNA, 22 bp, Artificial Sequence
  chemically synthesized
tgttgccaagattgatgttgat

SEQ ID NO: 61288 - DNA, 22 bp, Artificial Sequence
  chemically synthesized
ccaagattgatgttgatctgct

SEQ ID NO: 61289 - DNA, 22 bp, Artificial Sequence
  chemically synthesized
atgttgatctgctaatccctgt

SEQ ID NO: 61290 - DNA, 22 bp, Artificial Sequence
  chemically synthesized
atctgctaatccctgtgtagaa

SEQ ID NO: 61291 - DNA, 22 bp, Artificial Sequence
  chemically synthesized
ctaatccctgtgtagaaatgaa

SEQ ID NO: 61292 - DNA, 22 bp, Artificial Sequence
  chemically synthesized
atccctgtgtagaaatgaacct

SEQ ID NO: 61293 - DNA, 22 bp, Artificial Sequence
  chemically synthesized
tgtagaaatgaaccttggaggc

SEQ ID NO: 61294 - DNA, 22 bp, Artificial Sequence
  chemically synthesized
ggaggccattgtttgatttctt

SEQ ID NO: 61295 - DNA, 22 bp, Artificial Sequence
  chemically synthesized
gaggccattgtttgatttctta

SEQ ID NO: 61296 - DNA, 22 bp, Artificial Sequence
  chemically synthesized
tttgatttcttacaatatgtgc

SEQ ID NO: 61297 - DNA, 22 bp, Artificial Sequence
  chemically synthesized
gatttcttacaatatgtgcatt

SEQ ID NO: 61298 - DNA, 22 bp, Artificial Sequence
  chemically synthesized
atttcttacaatatgtgcattg

SEQ ID NO: 61299 - DNA, 22 bp, Artificial Sequence
  chemically synthesized
cttacaatatgtgcattggttg

SEQ ID NO: 61300 - DNA, 22 bp, Artificial Sequence
  chemically synthesized
ttacaatatgtgcattggttgt

SEQ ID NO: 61301 - DNA, 22 bp, Artificial Sequence
  chemically synthesized
acaatatgtgcattggttgtaa

SEQ ID NO: 61302 - DNA, 22 bp, Artificial Sequence
  chemically synthesized
caatatgtgcattggttgtaac

SEQ ID NO: 61303 - DNA, 22 bp, Artificial Sequence
  chemically synthesized
gttgtaacactgtcactttgac

SEQ ID NO: 61304 - DNA, 22 bp, Artificial Sequence
  chemically synthesized
taacactgtcactttgacagtt

SEQ ID NO: 61305 - DNA, 22 bp, Artificial Sequence
  chemically synthesized
tcactttgacagttgataagca

SEQ ID NO: 61306 - DNA, 22 bp, Artificial Sequence
  chemically synthesized
tgacagttgataagcatcttct

SEQ ID NO: 61307 - DNA, 22 bp, Artificial Sequence
  chemically synthesized
gacagttgataagcatcttctg

SEQ ID NO: 61308 - DNA, 22 bp, Artificial Sequence
  chemically synthesized
acagttgataagcatcttctga

SEQ ID NO: 61309 - DNA, 22 bp, Artificial Sequence
  chemically synthesized
ataagcatcttctgaatggtcc

SEQ ID NO: 61310 - DNA, 22 bp, Artificial Sequence
  chemically synthesized
ctgaatggtccctcctttagtt

SEQ ID NO: 61311 - DNA, 22 bp, Artificial Sequence
  chemically synthesized
tgaatggtccctcctttagtta

SEQ ID NO: 61312 - DNA, 22 bp, Artificial Sequence
  chemically synthesized
aatggtccctcctttagttaca

SEQ ID NO: 61313 - DNA, 22 bp, Artificial Sequence
  chemically synthesized
ctttagttacaaaaatgttggt

SEQ ID NO: 61314 - DNA, 22 bp, Artificial Sequence
  chemically synthesized
tagttacaaaaatgttggtgca

SEQ ID NO: 61315 - DNA, 22 bp, Artificial Sequence
  chemically synthesized
agttacaaaaatgttggtgcat

SEQ ID NO: 61316 - DNA, 22 bp, Artificial Sequence
  chemically synthesized
gttacaaaaatgttggtgcatg

SEQ ID NO: 61317 - DNA, 22 bp, Artificial Sequence
  chemically synthesized
caaaaatgttggtgcatggatg

SEQ ID NO: 61318 - DNA, 22 bp, Artificial Sequence
  chemically synthesized
gtgcatggatgatgttgggaat

SEQ ID NO: 61319 - DNA, 22 bp, Artificial Sequence
  chemically synthesized
ggaataaataaaaagtgaacta

SEQ ID NO: 61320 - DNA, 22 bp, Artificial Sequence
  chemically synthesized
aattatgttctcatcttgggca

SEQ ID NO: 61321 - DNA, 22 bp, Artificial Sequence
  chemically synthesized
tgttctcatcttgggcaaaaat

SEQ ID NO: 61322 - DNA, 22 bp, Artificial Sequence
  chemically synthesized
tcatcttgggcaaaaattaagc

SEQ ID NO: 61323 - DNA, 22 bp, Artificial Sequence
  chemically synthesized
atcttgggcaaaaattaagcaa

SEQ ID NO: 61324 - DNA, 22 bp, Artificial Sequence
  chemically synthesized
gggcaaaaattaagcaaaaaaa

SEQ ID NO: 61325 - DNA, 22 bp, Artificial Sequence
  chemically synthesized
ggcaaaaattaagcaaaaaaaa

SEQ ID NO: 61326 - DNA, 22 bp, Artificial Sequence
  chemically synthesized
agcaaaaaaaaaatggaggata

SEQ ID NO: 61327 - DNA, 22 bp, Artificial Sequence
  chemically synthesized
ctccacaaagaaggccattttt

SEQ ID NO: 61328 - DNA, 22 bp, Artificial Sequence
  chemically synthesized
cacaaagaaggccatttttgta

SEQ ID NO: 61329 - DNA, 22 bp, Artificial Sequence
  chemically synthesized
ttgtactaggcttactacagtg

SEQ ID NO: 61330 - DNA, 22 bp, Artificial Sequence
  chemically synthesized
tgtactaggcttactacagtga

SEQ ID NO: 61331 - DNA, 22 bp, Artificial Sequence
  chemically synthesized
gtactaggcttactacagtgac

SEQ ID NO: 61332 - DNA, 22 bp, Artificial Sequence
  chemically synthesized
tactaggcttactacagtgaca

SEQ ID NO: 61333 - DNA, 22 bp, Artificial Sequence
  chemically synthesized
ggcttactacagtgacacacca

SEQ ID NO: 61334 - DNA, 22 bp, Artificial Sequence
  chemically synthesized
actacagtgacacaccactatt

SEQ ID NO: 61335 - DNA, 22 bp, Artificial Sequence
  chemically synthesized
ctacagtgacacaccactatta

SEQ ID NO: 61336 - DNA, 22 bp, Artificial Sequence
  chemically synthesized
cagtgacacaccactattagtt

SEQ ID NO: 61337 - DNA, 22 bp, Artificial Sequence
  chemically synthesized
ttagttggggagaattcagttt

SEQ ID NO: 61338 - DNA, 22 bp, Artificial Sequence
  chemically synthesized
gttggggagaattcagtttttc

SEQ ID NO: 61339 - DNA, 22 bp, Artificial Sequence
  chemically synthesized
gggagaattcagtttttccaag

SEQ ID NO: 61340 - DNA, 22 bp, Artificial Sequence
  chemically synthesized
agtttttccaaggtgttgatag

SEQ ID NO: 61341 - DNA, 22 bp, Artificial Sequence
  chemically synthesized
ttccaaggtgttgataggcatc

SEQ ID NO: 61342 - DNA, 22 bp, Artificial Sequence
  chemically synthesized
tccaaggtgttgataggcatcc

SEQ ID NO: 61343 - DNA, 22 bp, Artificial Sequence
  chemically synthesized
ccaaggtgttgataggcatcca

SEQ ID NO: 61344 - DNA, 22 bp, Artificial Sequence
  chemically synthesized
caaggtgttgataggcatccag

SEQ ID NO: 61345 - DNA, 22 bp, Artificial Sequence
  chemically synthesized
ataggcatccagatttcagagg

SEQ ID NO: 61346 - DNA, 22 bp, Artificial Sequence
  chemically synthesized
cagaggaaattgtaaaaaagca

SEQ ID NO: 61347 - DNA, 22 bp, Artificial Sequence
  chemically synthesized
agaggaaattgtaaaaaagcag

SEQ ID NO: 61348 - DNA, 22 bp, Artificial Sequence
  chemically synthesized
taaaaaagcagaacctgggacc

SEQ ID NO: 61349 - DNA, 22 bp, Artificial Sequence
  chemically synthesized
ggaccaatactgcccacgattt

SEQ ID NO: 61350 - DNA, 22 bp, Artificial Sequence
  chemically synthesized
cccacgatttttctttgagatc

SEQ ID NO: 61351 - DNA, 22 bp, Artificial Sequence
  chemically synthesized
ttctttgagatcaaatctgagg

SEQ ID NO: 61352 - DNA, 22 bp, Artificial Sequence
  chemically synthesized
tctttgagatcaaatctgaggc

SEQ ID NO: 61353 - DNA, 22 bp, Artificial Sequence
  chemically synthesized
ctttgagatcaaatctgaggca

SEQ ID NO: 61354 - DNA, 22 bp, Artificial Sequence
  chemically synthesized
tttgagatcaaatctgaggcaa

SEQ ID NO: 61355 - DNA, 22 bp, Artificial Sequence
  chemically synthesized
tgagatcaaatctgaggcaaca

SEQ ID NO: 61356 - DNA, 22 bp, Artificial Sequence
  chemically synthesized
gagatcaaatctgaggcaacaa

SEQ ID NO: 61357 - DNA, 22 bp, Artificial Sequence
  chemically synthesized
agatcaaatctgaggcaacaaa

SEQ ID NO: 61358 - DNA, 22 bp, Artificial Sequence
  chemically synthesized
aggcaacaaatctgttcaaaag

SEQ ID NO: 61359 - DNA, 22 bp, Artificial Sequence
  chemically synthesized
ttcaaaagctgctttctgcctg

SEQ ID NO: 61360 - DNA, 22 bp, Artificial Sequence
  chemically synthesized
aaaagctgctttctgcctggtt

SEQ ID NO: 61361 - DNA, 22 bp, Artificial Sequence
  chemically synthesized
ctttctgcctggttgtggcaaa

SEQ ID NO: 61362 - DNA, 22 bp, Artificial Sequence
  chemically synthesized
tctgcctggttgtggcaaaggg

SEQ ID NO: 61363 - DNA, 22 bp, Artificial Sequence
  chemically synthesized
ctgcctggttgtggcaaagggt

SEQ ID NO: 61364 - DNA, 22 bp, Artificial Sequence
  chemically synthesized
tgcctggttgtggcaaagggtg

SEQ ID NO: 61365 - DNA, 22 bp, Artificial Sequence
  chemically synthesized
cctggttgtggcaaagggtggc

SEQ ID NO: 61366 - DNA, 22 bp, Artificial Sequence
  chemically synthesized
gttgtggcaaagggtggccaag

SEQ ID NO: 61367 - DNA, 22 bp, Artificial Sequence
  chemically synthesized
tggcaaagggtggccaagtggg

SEQ ID NO: 61368 - DNA, 22 bp, Artificial Sequence
  chemically synthesized
agctgtgttcccattgcaaggc

SEQ ID NO: 61369 - DNA, 22 bp, Artificial Sequence
  chemically synthesized
tgttcccattgcaaggctactg

SEQ ID NO: 61370 - DNA, 22 bp, Artificial Sequence
  chemically synthesized
ccattgcaaggctactgagcat

SEQ ID NO: 61371 - DNA, 22 bp, Artificial Sequence
  chemically synthesized
caaggctactgagcatcccctg

SEQ ID NO: 61372 - DNA, 22 bp, Artificial Sequence
  chemically synthesized
ctgagcatcccctgtcctgagg

SEQ ID NO: 61373 - DNA, 22 bp, Artificial Sequence
  chemically synthesized
agcatcccctgtcctgaggctc

SEQ ID NO: 61374 - DNA, 22 bp, Artificial Sequence
  chemically synthesized
tcctgaggctccttaggacacc

SEQ ID NO: 61375 - DNA, 22 bp, Artificial Sequence
  chemically synthesized
aggctccttaggacacctggct

SEQ ID NO: 61376 - DNA, 22 bp, Artificial Sequence
  chemically synthesized
cttaggacacctggctgagctt

SEQ ID NO: 61377 - DNA, 22 bp, Artificial Sequence
  chemically synthesized
aggacacctggctgagcttcag

SEQ ID NO: 61378 - DNA, 22 bp, Artificial Sequence
  chemically synthesized
ggacacctggctgagcttcagc

SEQ ID NO: 61379 - DNA, 22 bp, Artificial Sequence
  chemically synthesized
gctgagcttcagcagccctctt

SEQ ID NO: 61380 - DNA, 22 bp, Artificial Sequence
  chemically synthesized
agcttcagcagccctcttccaa

SEQ ID NO: 61381 - DNA, 22 bp, Artificial Sequence
  chemically synthesized
cagcagccctcttccaagcctg

SEQ ID NO: 61382 - DNA, 22 bp, Artificial Sequence
  chemically synthesized
agcagccctcttccaagcctgg

SEQ ID NO: 61383 - DNA, 22 bp, Artificial Sequence
  chemically synthesized
ttccaagcctggagatgccagc

SEQ ID NO: 61384 - DNA, 22 bp, Artificial Sequence
  chemically synthesized
ccaagcctggagatgccagctc

SEQ ID NO: 61385 - DNA, 22 bp, Artificial Sequence
  chemically synthesized
caagcctggagatgccagctcc

SEQ ID NO: 61386 - DNA, 22 bp, Artificial Sequence
  chemically synthesized
gagatgccagctccatctctgg

SEQ ID NO: 61387 - DNA, 22 bp, Artificial Sequence
  chemically synthesized
catctctggcacaaaatgtagt

SEQ ID NO: 61388 - DNA, 22 bp, Artificial Sequence
  chemically synthesized
tggcacaaaatgtagtgatttt

SEQ ID NO: 61389 - DNA, 22 bp, Artificial Sequence
  chemically synthesized
gcacaaaatgtagtgattttca

SEQ ID NO: 61390 - DNA, 22 bp, Artificial Sequence
  chemically synthesized
tcacagggtgagaggccaaaag

SEQ ID NO: 61391 - DNA, 22 bp, Artificial Sequence
  chemically synthesized
cacagggtgagaggccaaaaga

SEQ ID NO: 61392 - DNA, 22 bp, Artificial Sequence
  chemically synthesized
acagggtgagaggccaaaagag

SEQ ID NO: 61393 - DNA, 22 bp, Artificial Sequence
  chemically synthesized
ataaaatgaagatagccaagct

SEQ ID NO: 61394 - DNA, 22 bp, Artificial Sequence
  chemically synthesized
ccatggaattaagcaacaggac

SEQ ID NO: 61395 - DNA, 22 bp, Artificial Sequence
  chemically synthesized
catggaattaagcaacaggaca

SEQ ID NO: 61396 - DNA, 22 bp, Artificial Sequence
  chemically synthesized
agcaacaggacaaccttgacca

SEQ ID NO: 61397 - DNA, 22 bp, Artificial Sequence
  chemically synthesized
gaccactttgaggggtgtggtg

SEQ ID NO: 61398 - DNA, 22 bp, Artificial Sequence
  chemically synthesized
accactttgaggggtgtggtgg

SEQ ID NO: 61399 - DNA, 22 bp, Artificial Sequence
  chemically synthesized
tgaggggtgtggtgggggccac

SEQ ID NO: 61400 - DNA, 22 bp, Artificial Sequence
  chemically synthesized
gaggggtgtggtgggggccaca

SEQ ID NO: 61401 - DNA, 22 bp, Artificial Sequence
  chemically synthesized
aggggtgtggtgggggccacat

SEQ ID NO: 61402 - DNA, 22 bp, Artificial Sequence
  chemically synthesized
aagagtgactagaagagcagtg

SEQ ID NO: 61403 - DNA, 22 bp, Artificial Sequence
  chemically synthesized
gaagagcagtgggggtggcagc

SEQ ID NO: 61404 - DNA, 22 bp, Artificial Sequence
  chemically synthesized
gctctgaaagcagcgagacttc

SEQ ID NO: 61405 - DNA, 22 bp, Artificial Sequence
  chemically synthesized
tgaaagcagcgagacttctagg

SEQ ID NO: 61406 - DNA, 22 bp, Artificial Sequence
  chemically synthesized
aaagcagcgagacttctaggga

SEQ ID NO: 61407 - DNA, 22 bp, Artificial Sequence
  chemically synthesized
ctagggaatacagggtcagggg

SEQ ID NO: 61408 - DNA, 22 bp, Artificial Sequence
  chemically synthesized
tagggaatacagggtcagggga

SEQ ID NO: 61409 - DNA, 22 bp, Artificial Sequence
  chemically synthesized
gggaatacagggtcaggggagg

SEQ ID NO: 61410 - DNA, 22 bp, Artificial Sequence
  chemically synthesized
tgaaagatgacacactgcagag

SEQ ID NO: 61411 - DNA, 22 bp, Artificial Sequence
  chemically synthesized
aaagatgacacactgcagagaa

SEQ ID NO: 61412 - DNA, 22 bp, Artificial Sequence
  chemically synthesized
cagagaacatgtgtttgtatgc

SEQ ID NO: 61413 - DNA, 22 bp, Artificial Sequence
  chemically synthesized
gtatgccgatgacaagtatcca

SEQ ID NO: 61414 - DNA, 22 bp, Artificial Sequence
  chemically synthesized
tatgccgatgacaagtatccag

SEQ ID NO: 61415 - DNA, 22 bp, Artificial Sequence
  chemically synthesized
tcattctcagaaaggcctgtcc

SEQ ID NO: 61416 - DNA, 22 bp, Artificial Sequence
  chemically synthesized
attctcagaaaggcctgtcctg

SEQ ID NO: 61417 - DNA, 22 bp, Artificial Sequence
  chemically synthesized
tcagaaaggcctgtcctgacct

SEQ ID NO: 61418 - DNA, 22 bp, Artificial Sequence
  chemically synthesized
agaaaggcctgtcctgacctcc

SEQ ID NO: 61419 - DNA, 22 bp, Artificial Sequence
  chemically synthesized
tcctgacctcctgagagtacac

SEQ ID NO: 61420 - DNA, 22 bp, Artificial Sequence
  chemically synthesized
acctcctgagagtacacagacc

SEQ ID NO: 61421 - DNA, 22 bp, Artificial Sequence
  chemically synthesized
ctgagagtacacagaccatgag

SEQ ID NO: 61422 - DNA, 22 bp, Artificial Sequence
  chemically synthesized
agagtacacagaccatgagggc

SEQ ID NO: 61423 - DNA, 22 bp, Artificial Sequence
  chemically synthesized
actgtttcatgcaaagtccttg

SEQ ID NO: 61424 - DNA, 22 bp, Artificial Sequence
  chemically synthesized
tttcatgcaaagtccttggcca

SEQ ID NO: 61425 - DNA, 22 bp, Artificial Sequence
  chemically synthesized
catgcaaagtccttggccacag

SEQ ID NO: 61426 - DNA, 22 bp, Artificial Sequence
  chemically synthesized
atgcaaagtccttggccacagt

SEQ ID NO: 61427 - DNA, 22 bp, Artificial Sequence
  chemically synthesized
ggccacagtccacctgctcccc

SEQ ID NO: 61428 - DNA, 22 bp, Artificial Sequence
  chemically synthesized
gccacagtccacctgctcccca

SEQ ID NO: 61429 - DNA, 22 bp, Artificial Sequence
  chemically synthesized
ctccccacctctgtgactttgt

SEQ ID NO: 61430 - DNA, 22 bp, Artificial Sequence
  chemically synthesized
cccacctctgtgactttgtcct

SEQ ID NO: 61431 - DNA, 22 bp, Artificial Sequence
  chemically synthesized
tgtgactttgtccttcctcaat

SEQ ID NO: 61432 - DNA, 22 bp, Artificial Sequence
  chemically synthesized
tgactttgtccttcctcaattt

SEQ ID NO: 61433 - DNA, 22 bp, Artificial Sequence
  chemically synthesized
tgtccttcctcaatttaatatg

SEQ ID NO: 61434 - DNA, 22 bp, Artificial Sequence
  chemically synthesized
gtccttcctcaatttaatatgc

SEQ ID NO: 61435 - DNA, 22 bp, Artificial Sequence
  chemically synthesized
tccttcctcaatttaatatgct

SEQ ID NO: 61436 - DNA, 22 bp, Artificial Sequence
  chemically synthesized
cctcaatttaatatgctctatg

SEQ ID NO: 61437 - DNA, 22 bp, Artificial Sequence
  chemically synthesized
ctcaatttaatatgctctatgc

SEQ ID NO: 61438 - DNA, 22 bp, Artificial Sequence
  chemically synthesized
aatttaatatgctctatgctgg

SEQ ID NO: 61439 - DNA, 22 bp, Artificial Sequence
  chemically synthesized
aatatgctctatgctggaaaac

SEQ ID NO: 61440 - DNA, 22 bp, Artificial Sequence
  chemically synthesized
atatgctctatgctggaaaact

SEQ ID NO: 61441 - DNA, 22 bp, Artificial Sequence
  chemically synthesized
tatgctggaaaactggattatt

SEQ ID NO: 61442 - DNA, 22 bp, Artificial Sequence
  chemically synthesized
tgctggaaaactggattattga

SEQ ID NO: 61443 - DNA, 22 bp, Artificial Sequence
  chemically synthesized
gaaaactggattattgaacagg

SEQ ID NO: 61444 - DNA, 22 bp, Artificial Sequence
  chemically synthesized
gattattgaacaggcattggct

SEQ ID NO: 61445 - DNA, 22 bp, Artificial Sequence
  chemically synthesized
ttgaacaggcattggctgatgc

SEQ ID NO: 61446 - DNA, 22 bp, Artificial Sequence
  chemically synthesized
aacaggcattggctgatgcatt

SEQ ID NO: 61447 - DNA, 22 bp, Artificial Sequence
  chemically synthesized
gctgatgcattctgaacctaat

SEQ ID NO: 61448 - DNA, 22 bp, Artificial Sequence
  chemically synthesized
atgcattctgaacctaatccac

SEQ ID NO: 61449 - DNA, 22 bp, Artificial Sequence
  chemically synthesized
tgaacctaatccactaaaaagc

SEQ ID NO: 61450 - DNA, 22 bp, Artificial Sequence
  chemically synthesized
aacctaatccactaaaaagcac

SEQ ID NO: 61451 - DNA, 22 bp, Artificial Sequence
  chemically synthesized
atccactaaaaagcacttgata

SEQ ID NO: 61452 - DNA, 22 bp, Artificial Sequence
  chemically synthesized
aaaagcacttgatagatatatc

SEQ ID NO: 61453 - DNA, 22 bp, Artificial Sequence
  chemically synthesized
gatagatatatcaaaatatcat

SEQ ID NO: 61454 - DNA, 22 bp, Artificial Sequence
  chemically synthesized
atagatatatcaaaatatcatt

SEQ ID NO: 61455 - DNA, 22 bp, Artificial Sequence
  chemically synthesized
agaaatagatattttaggccca

SEQ ID NO: 61456 - DNA, 22 bp, Artificial Sequence
  chemically synthesized
taggcccatatccatgtcttca

SEQ ID NO: 61457 - DNA, 22 bp, Artificial Sequence
  chemically synthesized
aggcccatatccatgtcttcac

SEQ ID NO: 61458 - DNA, 22 bp, Artificial Sequence
  chemically synthesized
ggcccatatccatgtcttcacc

SEQ ID NO: 61459 - DNA, 22 bp, Artificial Sequence
  chemically synthesized
caccccgcactgtttctcattt

SEQ ID NO: 61460 - DNA, 22 bp, Artificial Sequence
  chemically synthesized
accccgcactgtttctcatttg

SEQ ID NO: 61461 - DNA, 22 bp, Artificial Sequence
  chemically synthesized
tttctcatttgaactctctttt

SEQ ID NO: 61462 - DNA, 22 bp, Artificial Sequence
  chemically synthesized
ctcatttgaactctcttttcca

SEQ ID NO: 61463 - DNA, 22 bp, Artificial Sequence
  chemically synthesized
tcatttgaactctcttttccag

SEQ ID NO: 61464 - DNA, 22 bp, Artificial Sequence
  chemically synthesized
atttgaactctcttttccagga

SEQ ID NO: 61465 - DNA, 22 bp, Artificial Sequence
  chemically synthesized
gaactctcttttccaggaagag

SEQ ID NO: 61466 - DNA, 22 bp, Artificial Sequence
  chemically synthesized
aactctcttttccaggaagagt

SEQ ID NO: 61467 - DNA, 22 bp, Artificial Sequence
  chemically synthesized
tcttttccaggaagagttgtgc

SEQ ID NO: 61468 - DNA, 22 bp, Artificial Sequence
  chemically synthesized
ttttccaggaagagttgtgctt

SEQ ID NO: 61469 - DNA, 22 bp, Artificial Sequence
  chemically synthesized
ttccaggaagagttgtgcttgg

SEQ ID NO: 61470 - DNA, 22 bp, Artificial Sequence
  chemically synthesized
tccaggaagagttgtgcttggg

SEQ ID NO: 61471 - DNA, 22 bp, Artificial Sequence
  chemically synthesized
ccaggaagagttgtgcttgggt

SEQ ID NO: 61472 - DNA, 22 bp, Artificial Sequence
  chemically synthesized
caggaagagttgtgcttgggta

SEQ ID NO: 61473 - DNA, 22 bp, Artificial Sequence
  chemically synthesized
tgcttgggtaaattctatagct

SEQ ID NO: 61474 - DNA, 22 bp, Artificial Sequence
  chemically synthesized
gggtaaattctatagctcacag

SEQ ID NO: 61475 - DNA, 22 bp, Artificial Sequence
  chemically synthesized
ggtaaattctatagctcacagt

SEQ ID NO: 61476 - DNA, 22 bp, Artificial Sequence
  chemically synthesized
tatagctcacagtgtgacttca

SEQ ID NO: 61477 - DNA, 22 bp, Artificial Sequence
  chemically synthesized
tagctcacagtgtgacttcaaa

SEQ ID NO: 61478 - DNA, 22 bp, Artificial Sequence
  chemically synthesized
acagtgtgacttcaaaacacac

SEQ ID NO: 61479 - DNA, 22 bp, Artificial Sequence
  chemically synthesized
caaaacacacaataaattaata

SEQ ID NO: 61480 - DNA, 22 bp, Artificial Sequence
  chemically synthesized
aaaacacacaataaattaataa

SEQ ID NO: 61481 - DNA, 22 bp, Artificial Sequence
  chemically synthesized
ataaggtgcttcctacagtgag

SEQ ID NO: 61482 - DNA, 22 bp, Artificial Sequence
  chemically synthesized
cctacagtgagttcagttaaac

SEQ ID NO: 61483 - DNA, 22 bp, Artificial Sequence
  chemically synthesized
ctacagtgagttcagttaaaca

SEQ ID NO: 61484 - DNA, 22 bp, Artificial Sequence
  chemically synthesized
cagtgagttcagttaaacattt

SEQ ID NO: 61485 - DNA, 22 bp, Artificial Sequence
  chemically synthesized
agttaaacattttgaagagtgt

SEQ ID NO: 61486 - DNA, 22 bp, Artificial Sequence
  chemically synthesized
aacattttgaagagtgtttttg

SEQ ID NO: 61487 - DNA, 22 bp, Artificial Sequence
  chemically synthesized
tgaagagtgtttttgaaatgta

SEQ ID NO: 61488 - DNA, 22 bp, Artificial Sequence
  chemically synthesized
gaagagtgtttttgaaatgtag

SEQ ID NO: 61489 - DNA, 22 bp, Artificial Sequence
  chemically synthesized
aagagtgtttttgaaatgtagc

SEQ ID NO: 61490 - DNA, 22 bp, Artificial Sequence
  chemically synthesized
ttgaaatgtagcagagcaggct

SEQ ID NO: 61491 - DNA, 22 bp, Artificial Sequence
  chemically synthesized
tgaaatgtagcagagcaggcta

SEQ ID NO: 61492 - DNA, 22 bp, Artificial Sequence
  chemically synthesized
gaaatgtagcagagcaggctac

SEQ ID NO: 61493 - DNA, 22 bp, Artificial Sequence
  chemically synthesized
aaatgtagcagagcaggctaca

SEQ ID NO: 61494 - DNA, 22 bp, Artificial Sequence
  chemically synthesized
caattgatattcaaaaagagga

SEQ ID NO: 61495 - DNA, 22 bp, Artificial Sequence
  chemically synthesized
atattcaaaaagaggaaacttc

SEQ ID NO: 61496 - DNA, 22 bp, Artificial Sequence
  chemically synthesized
aaaaagaggaaacttccattta

SEQ ID NO: 61497 - DNA, 22 bp, Artificial Sequence
  chemically synthesized
ccatttatttccccctttaact

SEQ ID NO: 61498 - DNA, 22 bp, Artificial Sequence
  chemically synthesized
catttatttccccctttaacta

SEQ ID NO: 61499 - DNA, 22 bp, Artificial Sequence
  chemically synthesized
atttccccctttaactaagtta

SEQ ID NO: 61500 - DNA, 22 bp, Artificial Sequence
  chemically synthesized
tttccccctttaactaagttac

SEQ ID NO: 61501 - DNA, 22 bp, Artificial Sequence
  chemically synthesized
ccccctttaactaagttacctg

SEQ ID NO: 61502 - DNA, 22 bp, Artificial Sequence
  chemically synthesized
cccctttaactaagttacctgt

SEQ ID NO: 61503 - DNA, 22 bp, Artificial Sequence
  chemically synthesized
taactaagttacctgtaactgt

SEQ ID NO: 61504 - DNA, 22 bp, Artificial Sequence
  chemically synthesized
aactaagttacctgtaactgtg

SEQ ID NO: 61505 - DNA, 22 bp, Artificial Sequence
  chemically synthesized
actaagttacctgtaactgtgt

SEQ ID NO: 61506 - DNA, 22 bp, Artificial Sequence
  chemically synthesized
agttacctgtaactgtgtcatt

SEQ ID NO: 61507 - DNA, 22 bp, Artificial Sequence
  chemically synthesized
cctgtaactgtgtcattttatt

SEQ ID NO: 61508 - DNA, 22 bp, Artificial Sequence
  chemically synthesized
taactgtgtcattttattatgc

SEQ ID NO: 61509 - DNA, 22 bp, Artificial Sequence
  chemically synthesized
tgtcattttattatgcttcata

SEQ ID NO: 61510 - DNA, 22 bp, Artificial Sequence
  chemically synthesized
tattatgcttcatagagcatca

SEQ ID NO: 61511 - DNA, 22 bp, Artificial Sequence
  chemically synthesized
attatgcttcatagagcatcac

SEQ ID NO: 61512 - DNA, 22 bp, Artificial Sequence
  chemically synthesized
ttatgcttcatagagcatcact

SEQ ID NO: 61513 - DNA, 22 bp, Artificial Sequence
  chemically synthesized
tgcttcatagagcatcactgct

SEQ ID NO: 61514 - DNA, 22 bp, Artificial Sequence
  chemically synthesized
catagagcatcactgctgagat

SEQ ID NO: 61515 - DNA, 22 bp, Artificial Sequence
  chemically synthesized
atagagcatcactgctgagatc

SEQ ID NO: 61516 - DNA, 22 bp, Artificial Sequence
  chemically synthesized
ctgagatcccctccccagctca

SEQ ID NO: 61517 - DNA, 22 bp, Artificial Sequence
  chemically synthesized
agatcccctccccagctcatgt

SEQ ID NO: 61518 - DNA, 22 bp, Artificial Sequence
  chemically synthesized
cccagctcatgttgctaggaaa

SEQ ID NO: 61519 - DNA, 22 bp, Artificial Sequence
  chemically synthesized
atgttgctaggaaatatcccaa

SEQ ID NO: 61520 - DNA, 22 bp, Artificial Sequence
  chemically synthesized
ctaggaaatatcccaaaacaga

SEQ ID NO: 61521 - DNA, 22 bp, Artificial Sequence
  chemically synthesized
ggaaatatcccaaaacagaatc

SEQ ID NO: 61522 - DNA, 22 bp, Artificial Sequence
  chemically synthesized
ttctttttttaacctgatgatt

SEQ ID NO: 61523 - DNA, 22 bp, Artificial Sequence
  chemically synthesized
tctttttttaacctgatgattt

SEQ ID NO: 61524 - DNA, 22 bp, Artificial Sequence
  chemically synthesized
ctttttttaacctgatgatttt

SEQ ID NO: 61525 - DNA, 22 bp, Artificial Sequence
  chemically synthesized
tttttttaacctgatgattttt

SEQ ID NO: 61526 - DNA, 22 bp, Artificial Sequence
  chemically synthesized
tttttaacctgatgatttttcc

SEQ ID NO: 61527 - DNA, 22 bp, Artificial Sequence
  chemically synthesized
ttttaacctgatgatttttcca

SEQ ID NO: 61528 - DNA, 22 bp, Artificial Sequence
  chemically synthesized
tttaacctgatgatttttccac

SEQ ID NO: 61529 - DNA, 22 bp, Artificial Sequence
  chemically synthesized
ttaacctgatgatttttccaca

SEQ ID NO: 61530 - DNA, 22 bp, Artificial Sequence
  chemically synthesized
taacctgatgatttttccacaa

SEQ ID NO: 61531 - DNA, 22 bp, Artificial Sequence
  chemically synthesized
aacctgatgatttttccacaat

SEQ ID NO: 61532 - DNA, 22 bp, Artificial Sequence
  chemically synthesized
acctgatgatttttccacaatc

SEQ ID NO: 61533 - DNA, 22 bp, Artificial Sequence
  chemically synthesized
atgatttttccacaatcctttt

SEQ ID NO: 61534 - DNA, 22 bp, Artificial Sequence
  chemically synthesized
ttccacaatccttttgtttctc

SEQ ID NO: 61535 - DNA, 22 bp, Artificial Sequence
  chemically synthesized
tccacaatccttttgtttctct

SEQ ID NO: 61536 - DNA, 22 bp, Artificial Sequence
  chemically synthesized
ccacaatccttttgtttctctg

SEQ ID NO: 61537 - DNA, 22 bp, Artificial Sequence
  chemically synthesized
cacaatccttttgtttctctga

SEQ ID NO: 61538 - DNA, 22 bp, Artificial Sequence
  chemically synthesized
ttgtttctctgattcacctcca

SEQ ID NO: 61539 - DNA, 22 bp, Artificial Sequence
  chemically synthesized
tgtttctctgattcacctccag

SEQ ID NO: 61540 - DNA, 22 bp, Artificial Sequence
  chemically synthesized
gtttctctgattcacctccagg

SEQ ID NO: 61541 - DNA, 22 bp, Artificial Sequence
  chemically synthesized
tttctctgattcacctccaggg

SEQ ID NO: 61542 - DNA, 22 bp, Artificial Sequence
  chemically synthesized
ctctgattcacctccagggctc

SEQ ID NO: 61543 - DNA, 22 bp, Artificial Sequence
  chemically synthesized
tctgattcacctccagggctca

SEQ ID NO: 61544 - DNA, 22 bp, Artificial Sequence
  chemically synthesized
tgattcacctccagggctcata

SEQ ID NO: 61545 - DNA, 22 bp, Artificial Sequence
  chemically synthesized
attcacctccagggctcatatg

SEQ ID NO: 61546 - DNA, 22 bp, Artificial Sequence
  chemically synthesized
acctccagggctcatatggcaa

SEQ ID NO: 61547 - DNA, 22 bp, Artificial Sequence
  chemically synthesized
cagggctcatatggcaatgggg

SEQ ID NO: 61548 - DNA, 22 bp, Artificial Sequence
  chemically synthesized
atatggcaatggggatttaata

SEQ ID NO: 61549 - DNA, 22 bp, Artificial Sequence
  chemically synthesized
aatagggtttatttgttggtga

SEQ ID NO: 61550 - DNA, 22 bp, Artificial Sequence
  chemically synthesized
atagggtttatttgttggtgaa

SEQ ID NO: 61551 - DNA, 22 bp, Artificial Sequence
  chemically synthesized
atttgttggtgaagaaacatta

SEQ ID NO: 61552 - DNA, 22 bp, Artificial Sequence
  chemically synthesized
tttgttggtgaagaaacattaa

SEQ ID NO: 61553 - DNA, 22 bp, Artificial Sequence
  chemically synthesized
gttggtgaagaaacattaaaca

SEQ ID NO: 61554 - DNA, 22 bp, Artificial Sequence
  chemically synthesized
ttggtgaagaaacattaaacaa

SEQ ID NO: 61555 - DNA, 22 bp, Artificial Sequence
  chemically synthesized
gtgaagaaacattaaacaaatc

SEQ ID NO: 61556 - DNA, 22 bp, Artificial Sequence
  chemically synthesized
aacaaatcttttaataggaaaa

SEQ ID NO: 61557 - DNA, 22 bp, Artificial Sequence
  chemically synthesized
ttaataggaaaaatacttttat

SEQ ID NO: 61558 - DNA, 22 bp, Artificial Sequence
  chemically synthesized
taataggaaaaatacttttata

SEQ ID NO: 61559 - DNA, 22 bp, Artificial Sequence
  chemically synthesized
aataggaaaaatacttttatat

SEQ ID NO: 61560 - DNA, 22 bp, Artificial Sequence
  chemically synthesized
ataggaaaaatacttttatatt

SEQ ID NO: 61561 - DNA, 22 bp, Artificial Sequence
  chemically synthesized
ttatattataggcaaaatgtag

SEQ ID NO: 61562 - DNA, 22 bp, Artificial Sequence
  chemically synthesized
tatattataggcaaaatgtaga

SEQ ID NO: 61563 - DNA, 22 bp, Artificial Sequence
  chemically synthesized
atattataggcaaaatgtagat

SEQ ID NO: 61564 - DNA, 22 bp, Artificial Sequence
  chemically synthesized
tattataggcaaaatgtagatg

SEQ ID NO: 61565 - DNA, 22 bp, Artificial Sequence
  chemically synthesized
taggcaaaatgtagatgtatat

SEQ ID NO: 61566 - DNA, 22 bp, Artificial Sequence
  chemically synthesized
ctactgaagtaaatgtatttta

SEQ ID NO: 61567 - DNA, 22 bp, Artificial Sequence
  chemically synthesized
ctgaagtaaatgtattttatta

SEQ ID NO: 61568 - DNA, 22 bp, Artificial Sequence
  chemically synthesized
aagtaaatgtattttattaatg

SEQ ID NO: 61569 - DNA, 22 bp, Artificial Sequence
  chemically synthesized
tattaatggtgtgagaatttct

SEQ ID NO: 61570 - DNA, 22 bp, Artificial Sequence
  chemically synthesized
attaatggtgtgagaatttctt

SEQ ID NO: 61571 - DNA, 22 bp, Artificial Sequence
  chemically synthesized
ttaatggtgtgagaatttcttc

SEQ ID NO: 61572 - DNA, 22 bp, Artificial Sequence
  chemically synthesized
atggtgtgagaatttcttcctc

SEQ ID NO: 61573 - DNA, 22 bp, Artificial Sequence
  chemically synthesized
cttcctcactgtggtgtgtgaa

SEQ ID NO: 61574 - DNA, 22 bp, Artificial Sequence
  chemically synthesized
ttcctcactgtggtgtgtgaat

SEQ ID NO: 61575 - DNA, 22 bp, Artificial Sequence
  chemically synthesized
cctcactgtggtgtgtgaatgt

SEQ ID NO: 61576 - DNA, 22 bp, Artificial Sequence
  chemically synthesized
ctcactgtggtgtgtgaatgtg

SEQ ID NO: 61577 - DNA, 22 bp, Artificial Sequence
  chemically synthesized
actgtggtgtgtgaatgtgtat

SEQ ID NO: 61578 - DNA, 22 bp, Artificial Sequence
  chemically synthesized
tggtgtgtgaatgtgtatgcat

SEQ ID NO: 61579 - DNA, 22 bp, Artificial Sequence
  chemically synthesized
gcatgtgtaaaagacttagcaa

SEQ ID NO: 61580 - DNA, 22 bp, Artificial Sequence
  chemically synthesized
catgtgtaaaagacttagcaat

SEQ ID NO: 61581 - DNA, 22 bp, Artificial Sequence
  chemically synthesized
agcaatttgtgaatagaagatg

SEQ ID NO: 61582 - DNA, 22 bp, Artificial Sequence
  chemically synthesized
gcaatttgtgaatagaagatgt

SEQ ID NO: 61583 - DNA, 22 bp, Artificial Sequence
  chemically synthesized
gtgaatagaagatgtttctccg

SEQ ID NO: 61584 - DNA, 22 bp, Artificial Sequence
  chemically synthesized
tgaatagaagatgtttctccgc

SEQ ID NO: 61585 - DNA, 22 bp, Artificial Sequence
  chemically synthesized
ctccgcttctcactgagcatgg

SEQ ID NO: 61586 - DNA, 22 bp, Artificial Sequence
  chemically synthesized
tccgcttctcactgagcatggc

SEQ ID NO: 61587 - DNA, 22 bp, Artificial Sequence
  chemically synthesized
cgcttctcactgagcatggctg

SEQ ID NO: 61588 - DNA, 22 bp, Artificial Sequence
  chemically synthesized
ctcactgagcatggctgtaaaa

SEQ ID NO: 61589 - DNA, 22 bp, Artificial Sequence
  chemically synthesized
tcactgagcatggctgtaaaag

SEQ ID NO: 61590 - DNA, 22 bp, Artificial Sequence
  chemically synthesized
actgagcatggctgtaaaagaa

SEQ ID NO: 61591 - DNA, 22 bp, Artificial Sequence
  chemically synthesized
agcatggctgtaaaagaaactt

SEQ ID NO: 61592 - DNA, 22 bp, Artificial Sequence
  chemically synthesized
taaaagaaactttttcctctcc

SEQ ID NO: 61593 - DNA, 22 bp, Artificial Sequence
  chemically synthesized
tttcctctccccgggcattcca

SEQ ID NO: 61594 - DNA, 22 bp, Artificial Sequence
  chemically synthesized
ttcctctccccgggcattccag

SEQ ID NO: 61595 - DNA, 22 bp, Artificial Sequence
  chemically synthesized
tcctctccccgggcattccagc

SEQ ID NO: 61596 - DNA, 22 bp, Artificial Sequence
  chemically synthesized
cctctccccgggcattccagca

SEQ ID NO: 61597 - DNA, 22 bp, Artificial Sequence
  chemically synthesized
ctctccccgggcattccagcac

SEQ ID NO: 61598 - DNA, 22 bp, Artificial Sequence
  chemically synthesized
tccccgggcattccagcacaca

SEQ ID NO: 61599 - DNA, 22 bp, Artificial Sequence
  chemically synthesized
cccgggcattccagcacacatt

SEQ ID NO: 61600 - DNA, 22 bp, Artificial Sequence
  chemically synthesized
cagcacacattggaaagataac

SEQ ID NO: 61601 - DNA, 22 bp, Artificial Sequence
  chemically synthesized
gaaagataacacgtccacagaa

SEQ ID NO: 61602 - DNA, 22 bp, Artificial Sequence
  chemically synthesized
gctttccaaaagagcttatcag

SEQ ID NO: 61603 - DNA, 22 bp, Artificial Sequence
  chemically synthesized
tccaaaagagcttatcagagaa

SEQ ID NO: 61604 - DNA, 22 bp, Artificial Sequence
  chemically synthesized
ccaaaagagcttatcagagaat

SEQ ID NO: 61605 - DNA, 22 bp, Artificial Sequence
  chemically synthesized
caaaagagcttatcagagaatg

SEQ ID NO: 61606 - DNA, 22 bp, Artificial Sequence
  chemically synthesized
atcagagaatgtgccccccagg

SEQ ID NO: 61607 - DNA, 22 bp, Artificial Sequence
  chemically synthesized
tcagagaatgtgccccccaggt

SEQ ID NO: 61608 - DNA, 22 bp, Artificial Sequence
  chemically synthesized
aaacatatgttaatcctgtggc

SEQ ID NO: 61609 - DNA, 22 bp, Artificial Sequence
  chemically synthesized
atcctgtggcagagaagtttgt

SEQ ID NO: 61610 - DNA, 22 bp, Artificial Sequence
  chemically synthesized
tggcagagaagtttgttctagc

SEQ ID NO: 61611 - DNA, 22 bp, Artificial Sequence
  chemically synthesized
gttctagcctttgggtgtagcc

SEQ ID NO: 61612 - DNA, 22 bp, Artificial Sequence
  chemically synthesized
ttctagcctttgggtgtagcct

SEQ ID NO: 61613 - DNA, 22 bp, Artificial Sequence
  chemically synthesized
tagcctttgggtgtagcctgct

SEQ ID NO: 61614 - DNA, 22 bp, Artificial Sequence
  chemically synthesized
gcctttgggtgtagcctgctga

SEQ ID NO: 61615 - DNA, 22 bp, Artificial Sequence
  chemically synthesized
tgggtgtagcctgctgaataag

SEQ ID NO: 61616 - DNA, 22 bp, Artificial Sequence
  chemically synthesized
gggtgtagcctgctgaataagt

SEQ ID NO: 61617 - DNA, 22 bp, Artificial Sequence
  chemically synthesized
ggtgtagcctgctgaataagtt

SEQ ID NO: 61618 - DNA, 22 bp, Artificial Sequence
  chemically synthesized
ctgaataagttcacagtgatct

SEQ ID NO: 61619 - DNA, 22 bp, Artificial Sequence
  chemically synthesized
aataagttcacagtgatctaca

SEQ ID NO: 61620 - DNA, 22 bp, Artificial Sequence
  chemically synthesized
acagtgatctacatcctagttt

SEQ ID NO: 61621 - DNA, 22 bp, Artificial Sequence
  chemically synthesized
catcctagtttccatgggctga

SEQ ID NO: 61622 - DNA, 22 bp, Artificial Sequence
  chemically synthesized
gtttccatgggctgaaatagaa

SEQ ID NO: 61623 - DNA, 22 bp, Artificial Sequence
  chemically synthesized
ccatgggctgaaatagaatatt

SEQ ID NO: 61624 - DNA, 22 bp, Artificial Sequence
  chemically synthesized
catgggctgaaatagaatattc

SEQ ID NO: 61625 - DNA, 22 bp, Artificial Sequence
  chemically synthesized
aaatagaatattcatatcccct

SEQ ID NO: 61626 - DNA, 22 bp, Artificial Sequence
  chemically synthesized
atatcccctgcactccctacac

SEQ ID NO: 61627 - DNA, 22 bp, Artificial Sequence
  chemically synthesized
cactccctacacacacagacat

SEQ ID NO: 61628 - DNA, 22 bp, Artificial Sequence
  chemically synthesized
cctacacacacagacatagaca

SEQ ID NO: 61629 - DNA, 22 bp, Artificial Sequence
  chemically synthesized
cacacacagacatagacaccaa

SEQ ID NO: 61630 - DNA, 22 bp, Artificial Sequence
  chemically synthesized
ccccaaaaaactctttgcttaa

SEQ ID NO: 61631 - DNA, 22 bp, Artificial Sequence
  chemically synthesized
cccaaaaaactctttgcttaat

SEQ ID NO: 61632 - DNA, 22 bp, Artificial Sequence
  chemically synthesized
tttgcttaatcttctcctgctc

SEQ ID NO: 61633 - DNA, 22 bp, Artificial Sequence
  chemically synthesized
tgcttaatcttctcctgctctg

SEQ ID NO: 61634 - DNA, 22 bp, Artificial Sequence
  chemically synthesized
gcttaatcttctcctgctctgt

SEQ ID NO: 61635 - DNA, 22 bp, Artificial Sequence
  chemically synthesized
cttaatcttctcctgctctgta

SEQ ID NO: 61636 - DNA, 22 bp, Artificial Sequence
  chemically synthesized
aatcttctcctgctctgtattt

SEQ ID NO: 61637 - DNA, 22 bp, Artificial Sequence
  chemically synthesized
atcttctcctgctctgtatttt

SEQ ID NO: 61638 - DNA, 22 bp, Artificial Sequence
  chemically synthesized
ctcctgctctgtattttctttg

SEQ ID NO: 61639 - DNA, 22 bp, Artificial Sequence
  chemically synthesized
tcctgctctgtattttctttga

SEQ ID NO: 61640 - DNA, 22 bp, Artificial Sequence
  chemically synthesized
ctgctctgtattttctttgata

SEQ ID NO: 61641 - DNA, 22 bp, Artificial Sequence
  chemically synthesized
ctctgtattttctttgatattt

SEQ ID NO: 61642 - DNA, 22 bp, Artificial Sequence
  chemically synthesized
tgtattttctttgatattttct

SEQ ID NO: 61643 - DNA, 22 bp, Artificial Sequence
  chemically synthesized
tattttctttgatattttcttg

SEQ ID NO: 61644 - DNA, 22 bp, Artificial Sequence
  chemically synthesized
tctttgatattttcttgaatgg

SEQ ID NO: 61645 - DNA, 22 bp, Artificial Sequence
  chemically synthesized
ctttgatattttcttgaatggc

SEQ ID NO: 61646 - DNA, 22 bp, Artificial Sequence
  chemically synthesized
tttgatattttcttgaatggct

SEQ ID NO: 61647 - DNA, 22 bp, Artificial Sequence
  chemically synthesized
tgatattttcttgaatggcttc

SEQ ID NO: 61648 - DNA, 22 bp, Artificial Sequence
  chemically synthesized
gatattttcttgaatggcttcc

SEQ ID NO: 61649 - DNA, 22 bp, Artificial Sequence
  chemically synthesized
atattttcttgaatggcttcca

SEQ ID NO: 61650 - DNA, 22 bp, Artificial Sequence
  chemically synthesized
tcttgaatggcttccactaaat

SEQ ID NO: 61651 - DNA, 22 bp, Artificial Sequence
  chemically synthesized
cttgaatggcttccactaaatt

SEQ ID NO: 61652 - DNA, 22 bp, Artificial Sequence
  chemically synthesized
ttgaatggcttccactaaattc

SEQ ID NO: 61653 - DNA, 22 bp, Artificial Sequence
  chemically synthesized
gaatggcttccactaaattcaa

SEQ ID NO: 61654 - DNA, 22 bp, Artificial Sequence
  chemically synthesized
aatggcttccactaaattcaaa

SEQ ID NO: 61655 - DNA, 22 bp, Artificial Sequence
  chemically synthesized
ccactaaattcaaatgtgtttg

SEQ ID NO: 61656 - DNA, 22 bp, Artificial Sequence
  chemically synthesized
cactaaattcaaatgtgtttga

SEQ ID NO: 61657 - DNA, 22 bp, Artificial Sequence
  chemically synthesized
aattcaaatgtgtttgacttta

SEQ ID NO: 61658 - DNA, 22 bp, Artificial Sequence
  chemically synthesized
aaatgtgtttgactttaaagtc

SEQ ID NO: 61659 - DNA, 22 bp, Artificial Sequence
  chemically synthesized
gactttaaagtcaacttgtaaa

SEQ ID NO: 61660 - DNA, 22 bp, Artificial Sequence
  chemically synthesized
actttaaagtcaacttgtaaaa

SEQ ID NO: 61661 - DNA, 22 bp, Artificial Sequence
  chemically synthesized
taaagtcaacttgtaaaatttt

SEQ ID NO: 61662 - DNA, 22 bp, Artificial Sequence
  chemically synthesized
aaagtcaacttgtaaaatttta

SEQ ID NO: 61663 - DNA, 22 bp, Artificial Sequence
  chemically synthesized
aagtcaacttgtaaaattttat

SEQ ID NO: 61664 - DNA, 22 bp, Artificial Sequence
  chemically synthesized
gtaaaattttatctggtaattt

SEQ ID NO: 61665 - DNA, 22 bp, Artificial Sequence
  chemically synthesized
taaaattttatctggtaattta

SEQ ID NO: 61666 - DNA, 22 bp, Artificial Sequence
  chemically synthesized
tatctggtaatttatagattaa

SEQ ID NO: 61667 - DNA, 22 bp, Artificial Sequence
  chemically synthesized
atctggtaatttatagattaaa

SEQ ID NO: 61668 - DNA, 22 bp, Artificial Sequence
  chemically synthesized
tctggtaatttatagattaaat

SEQ ID NO: 61669 - DNA, 22 bp, Artificial Sequence
  chemically synthesized
gtaatttatagattaaattgca

SEQ ID NO: 61670 - DNA, 22 bp, Artificial Sequence
  chemically synthesized
atagattaaattgcaagcatct

SEQ ID NO: 61671 - DNA, 22 bp, Artificial Sequence
  chemically synthesized
tagattaaattgcaagcatcta

SEQ ID NO: 61672 - DNA, 22 bp, Artificial Sequence
  chemically synthesized
aattgcaagcatctacctccct

SEQ ID NO: 61673 - DNA, 22 bp, Artificial Sequence
  chemically synthesized
caagcatctacctccctttcat

SEQ ID NO: 61674 - DNA, 22 bp, Artificial Sequence
  chemically synthesized
cctccctttcatcagactctcc

SEQ ID NO: 61675 - DNA, 22 bp, Artificial Sequence
  chemically synthesized
cctttcatcagactctccctgc

SEQ ID NO: 61676 - DNA, 22 bp, Artificial Sequence
  chemically synthesized
tcatcagactctccctgcaggg

SEQ ID NO: 61677 - DNA, 22 bp, Artificial Sequence
  chemically synthesized
catcagactctccctgcagggc

SEQ ID NO: 61678 - DNA, 22 bp, Artificial Sequence
  chemically synthesized
atcagactctccctgcagggca

SEQ ID NO: 61679 - DNA, 22 bp, Artificial Sequence
  chemically synthesized
tccctgcagggcaagttcatct

SEQ ID NO: 61680 - DNA, 22 bp, Artificial Sequence
  chemically synthesized
cctgcagggcaagttcatctaa

SEQ ID NO: 61681 - DNA, 22 bp, Artificial Sequence
  chemically synthesized
cagggcaagttcatctaactat

SEQ ID NO: 61682 - DNA, 22 bp, Artificial Sequence
  chemically synthesized
atctaactatgtatgtgcttca

SEQ ID NO: 61683 - DNA, 22 bp, Artificial Sequence
  chemically synthesized
actatgtatgtgcttcaagatg

SEQ ID NO: 61684 - DNA, 22 bp, Artificial Sequence
  chemically synthesized
tgtatgtgcttcaagatggaac

SEQ ID NO: 61685 - DNA, 22 bp, Artificial Sequence
  chemically synthesized
caagatggaactcctgagttca

SEQ ID NO: 61686 - DNA, 22 bp, Artificial Sequence
  chemically synthesized
aagatggaactcctgagttcac

SEQ ID NO: 61687 - DNA, 22 bp, Artificial Sequence
  chemically synthesized
ctgagttcacaggtgatttata

SEQ ID NO: 61688 - DNA, 22 bp, Artificial Sequence
  chemically synthesized
agttcacaggtgatttataaac

SEQ ID NO: 61689 - DNA, 22 bp, Artificial Sequence
  chemically synthesized
acaggtgatttataaaccaaag

SEQ ID NO: 61690 - DNA, 22 bp, Artificial Sequence
  chemically synthesized
ataaaccaaagcatgcccacta

SEQ ID NO: 61691 - DNA, 22 bp, Artificial Sequence
  chemically synthesized
taaaccaaagcatgcccactac

SEQ ID NO: 61692 - DNA, 22 bp, Artificial Sequence
  chemically synthesized
caaaactctcaccctccagaga

SEQ ID NO: 61693 - DNA, 22 bp, Artificial Sequence
  chemically synthesized
tcaccctccagagatttgcctc

SEQ ID NO: 61694 - DNA, 22 bp, Artificial Sequence
  chemically synthesized
accctccagagatttgcctcaa

SEQ ID NO: 61695 - DNA, 22 bp, Artificial Sequence
  chemically synthesized
cagagatttgcctcaagggaca

SEQ ID NO: 61696 - DNA, 22 bp, Artificial Sequence
  chemically synthesized
gcctcaagggacaacaccctgc

SEQ ID NO: 61697 - DNA, 22 bp, Artificial Sequence
  chemically synthesized
cctcaagggacaacaccctgct

SEQ ID NO: 61698 - DNA, 22 bp, Artificial Sequence
  chemically synthesized
aagggacaacaccctgctcaca

SEQ ID NO: 61699 - DNA, 22 bp, Artificial Sequence
  chemically synthesized
ctcacaaaggcaccagcaggca

SEQ ID NO: 61700 - DNA, 22 bp, Artificial Sequence
  chemically synthesized
acaaaggcaccagcaggcaact

SEQ ID NO: 61701 - DNA, 22 bp, Artificial Sequence
  chemically synthesized
ctcaactacctggtggataagg

SEQ ID NO: 61702 - DNA, 22 bp, Artificial Sequence
  chemically synthesized
aactacctggtggataaggtgc

SEQ ID NO: 61703 - DNA, 22 bp, Artificial Sequence
  chemically synthesized
cctggtggataaggtgcccaag

SEQ ID NO: 61704 - DNA, 22 bp, Artificial Sequence
  chemically synthesized
gtggataaggtgcccaagctag

SEQ ID NO: 61705 - DNA, 22 bp, Artificial Sequence
  chemically synthesized
gcatggacccctgaatccttgc

SEQ ID NO: 61706 - DNA, 22 bp, Artificial Sequence
  chemically synthesized
aatccttgctcgcctcctctgt

SEQ ID NO: 61707 - DNA, 22 bp, Artificial Sequence
  chemically synthesized
gctcgcctcctctgttgccttt

SEQ ID NO: 61708 - DNA, 22 bp, Artificial Sequence
  chemically synthesized
ctcgcctcctctgttgcctttt

SEQ ID NO: 61709 - DNA, 22 bp, Artificial Sequence
  chemically synthesized
gcctcctctgttgccttttaaa

SEQ ID NO: 61710 - DNA, 22 bp, Artificial Sequence
  chemically synthesized
ctctgttgccttttaaaagtgc

SEQ ID NO: 61711 - DNA, 22 bp, Artificial Sequence
  chemically synthesized
tgttgccttttaaaagtgccac

SEQ ID NO: 61712 - DNA, 22 bp, Artificial Sequence
  chemically synthesized
ttgccttttaaaagtgccactt

SEQ ID NO: 61713 - DNA, 22 bp, Artificial Sequence
  chemically synthesized
ccttttaaaagtgccactttct

SEQ ID NO: 61714 - DNA, 22 bp, Artificial Sequence
  chemically synthesized
ttaaaagtgccactttctgctc

SEQ ID NO: 61715 - DNA, 22 bp, Artificial Sequence
  chemically synthesized
taaaagtgccactttctgctcc

SEQ ID NO: 61716 - DNA, 22 bp, Artificial Sequence
  chemically synthesized
aaaagtgccactttctgctcct

SEQ ID NO: 61717 - DNA, 22 bp, Artificial Sequence
  chemically synthesized
aaagtgccactttctgctccta

SEQ ID NO: 61718 - DNA, 22 bp, Artificial Sequence
  chemically synthesized
tctgctcctaaagtgaagtagt

SEQ ID NO: 61719 - DNA, 22 bp, Artificial Sequence
  chemically synthesized
ctgctcctaaagtgaagtagta

SEQ ID NO: 61720 - DNA, 22 bp, Artificial Sequence
  chemically synthesized
tgctcctaaagtgaagtagtac

SEQ ID NO: 61721 - DNA, 22 bp, Artificial Sequence
  chemically synthesized
ctcctaaagtgaagtagtacgg

SEQ ID NO: 61722 - DNA, 22 bp, Artificial Sequence
  chemically synthesized
ctaaagtgaagtagtacggcag

SEQ ID NO: 61723 - DNA, 22 bp, Artificial Sequence
  chemically synthesized
aagtgaagtagtacggcaggac

SEQ ID NO: 61724 - DNA, 22 bp, Artificial Sequence
  chemically synthesized
ctgcatttcttcccctaagcta

SEQ ID NO: 61725 - DNA, 22 bp, Artificial Sequence
  chemically synthesized
catttcttcccctaagctagct

SEQ ID NO: 61726 - DNA, 22 bp, Artificial Sequence
  chemically synthesized
cttcccctaagctagctttgga

SEQ ID NO: 61727 - DNA, 22 bp, Artificial Sequence
  chemically synthesized
ttcccctaagctagctttggaa

SEQ ID NO: 61728 - DNA, 22 bp, Artificial Sequence
  chemically synthesized
cccctaagctagctttggaagc

SEQ ID NO: 61729 - DNA, 22 bp, Artificial Sequence
  chemically synthesized
ccctaagctagctttggaagca

SEQ ID NO: 61730 - DNA, 22 bp, Artificial Sequence
  chemically synthesized
agctagctttggaagcaaatca

SEQ ID NO: 61731 - DNA, 22 bp, Artificial Sequence
  chemically synthesized
gctttggaagcaaatcactttc

SEQ ID NO: 61732 - DNA, 22 bp, Artificial Sequence
  chemically synthesized
tggaagcaaatcactttcttta

SEQ ID NO: 61733 - DNA, 22 bp, Artificial Sequence
  chemically synthesized
ggaagcaaatcactttctttat

SEQ ID NO: 61734 - DNA, 22 bp, Artificial Sequence
  chemically synthesized
gaagcaaatcactttctttata

SEQ ID NO: 61735 - DNA, 22 bp, Artificial Sequence
  chemically synthesized
tctttataccagacttctctct

SEQ ID NO: 61736 - DNA, 22 bp, Artificial Sequence
  chemically synthesized
ctttataccagacttctctctt

SEQ ID NO: 61737 - DNA, 22 bp, Artificial Sequence
  chemically synthesized
tttataccagacttctctcttc

SEQ ID NO: 61738 - DNA, 22 bp, Artificial Sequence
  chemically synthesized
tataccagacttctctcttctt

SEQ ID NO: 61739 - DNA, 22 bp, Artificial Sequence
  chemically synthesized
ataccagacttctctcttctta

SEQ ID NO: 61740 - DNA, 22 bp, Artificial Sequence
  chemically synthesized
taccagacttctctcttcttaa

SEQ ID NO: 61741 - DNA, 22 bp, Artificial Sequence
  chemically synthesized
ctctcttcttaattggattctg

SEQ ID NO: 61742 - DNA, 22 bp, Artificial Sequence
  chemically synthesized
tctcttcttaattggattctgc

SEQ ID NO: 61743 - DNA, 22 bp, Artificial Sequence
  chemically synthesized
tcttcttaattggattctgcaa

SEQ ID NO: 61744 - DNA, 22 bp, Artificial Sequence
  chemically synthesized
ttcttaattggattctgcaagt

SEQ ID NO: 61745 - DNA, 22 bp, Artificial Sequence
  chemically synthesized
cttaattggattctgcaagtgg

SEQ ID NO: 61746 - DNA, 22 bp, Artificial Sequence
  chemically synthesized
ttaattggattctgcaagtggc

SEQ ID NO: 61747 - DNA, 22 bp, Artificial Sequence
  chemically synthesized
aattggattctgcaagtggcaa

SEQ ID NO: 61748 - DNA, 22 bp, Artificial Sequence
  chemically synthesized
attggattctgcaagtggcaaa

SEQ ID NO: 61749 - DNA, 22 bp, Artificial Sequence
  chemically synthesized
gattctgcaagtggcaaacaat

SEQ ID NO: 61750 - DNA, 22 bp, Artificial Sequence
  chemically synthesized
tgcaagtggcaaacaattaacc

SEQ ID NO: 61751 - DNA, 22 bp, Artificial Sequence
  chemically synthesized
caagtggcaaacaattaacctg

SEQ ID NO: 61752 - DNA, 22 bp, Artificial Sequence
  chemically synthesized
acctgctcttcagttacattgg

SEQ ID NO: 61753 - DNA, 22 bp, Artificial Sequence
  chemically synthesized
ctcttcagttacattggaatgt

SEQ ID NO: 61754 - DNA, 22 bp, Artificial Sequence
  chemically synthesized
ttcagttacattggaatgtgtt

SEQ ID NO: 61755 - DNA, 22 bp, Artificial Sequence
  chemically synthesized
cagttacattggaatgtgttta

SEQ ID NO: 61756 - DNA, 22 bp, Artificial Sequence
  chemically synthesized
agttacattggaatgtgtttag

SEQ ID NO: 61757 - DNA, 22 bp, Artificial Sequence
  chemically synthesized
cattggaatgtgtttagattta

SEQ ID NO: 61758 - DNA, 22 bp, Artificial Sequence
  chemically synthesized
gaatgtgtttagatttattttt

SEQ ID NO: 61759 - DNA, 22 bp, Artificial Sequence
  chemically synthesized
agatttattttttcaaatgttg

SEQ ID NO: 61760 - DNA, 22 bp, Artificial Sequence
  chemically synthesized
gatttattttttcaaatgttgg

SEQ ID NO: 61761 - DNA, 22 bp, Artificial Sequence
  chemically synthesized
attttttcaaatgttggaacaa

SEQ ID NO: 61762 - DNA, 22 bp, Artificial Sequence
  chemically synthesized
ttttttcaaatgttggaacaaa

SEQ ID NO: 61763 - DNA, 22 bp, Artificial Sequence
  chemically synthesized
tttcaaatgttggaacaaagat

SEQ ID NO: 61764 - DNA, 22 bp, Artificial Sequence
  chemically synthesized
ttcaaatgttggaacaaagatg

SEQ ID NO: 61765 - DNA, 22 bp, Artificial Sequence
  chemically synthesized
tcaaatgttggaacaaagatga

SEQ ID NO: 61766 - DNA, 22 bp, Artificial Sequence
  chemically synthesized
caaatgttggaacaaagatgaa

SEQ ID NO: 61767 - DNA, 22 bp, Artificial Sequence
  chemically synthesized
aaatgttggaacaaagatgaaa

SEQ ID NO: 61768 - DNA, 22 bp, Artificial Sequence
  chemically synthesized
gaacaaagatgaaaaagtgaga

SEQ ID NO: 61769 - DNA, 22 bp, Artificial Sequence
  chemically synthesized
gattttttcttggaaatctggc

SEQ ID NO: 61770 - DNA, 22 bp, Artificial Sequence
  chemically synthesized
tttcttggaaatctggcttaaa

SEQ ID NO: 61771 - DNA, 22 bp, Artificial Sequence
  chemically synthesized
ttcttggaaatctggcttaaat

SEQ ID NO: 61772 - DNA, 22 bp, Artificial Sequence
  chemically synthesized
tcttggaaatctggcttaaatc

SEQ ID NO: 61773 - DNA, 22 bp, Artificial Sequence
  chemically synthesized
cttggaaatctggcttaaatcc

SEQ ID NO: 61774 - DNA, 22 bp, Artificial Sequence
  chemically synthesized
ttggaaatctggcttaaatcca

SEQ ID NO: 61775 - DNA, 22 bp, Artificial Sequence
  chemically synthesized
ggaaatctggcttaaatccagg

SEQ ID NO: 61776 - DNA, 22 bp, Artificial Sequence
  chemically synthesized
gaaatctggcttaaatccaggt

SEQ ID NO: 61777 - DNA, 22 bp, Artificial Sequence
  chemically synthesized
gcttaaatccaggtttctttat

SEQ ID NO: 61778 - DNA, 22 bp, Artificial Sequence
  chemically synthesized
aaatccaggtttctttatttcc

SEQ ID NO: 61779 - DNA, 22 bp, Artificial Sequence
  chemically synthesized
aatccaggtttctttatttcct

SEQ ID NO: 61780 - DNA, 22 bp, Artificial Sequence
  chemically synthesized
ctttatttccttgatttgggaa

SEQ ID NO: 61781 - DNA, 22 bp, Artificial Sequence
  chemically synthesized
tttatttccttgatttgggaat

SEQ ID NO: 61782 - DNA, 22 bp, Artificial Sequence
  chemically synthesized
tatttccttgatttgggaattt

SEQ ID NO: 61783 - DNA, 22 bp, Artificial Sequence
  chemically synthesized
atttccttgatttgggaatttg

SEQ ID NO: 61784 - DNA, 22 bp, Artificial Sequence
  chemically synthesized
tttccttgatttgggaatttgg

SEQ ID NO: 61785 - DNA, 22 bp, Artificial Sequence
  chemically synthesized
ccttgatttgggaatttggtca

SEQ ID NO: 61786 - DNA, 22 bp, Artificial Sequence
  chemically synthesized
cttgatttgggaatttggtcac

SEQ ID NO: 61787 - DNA, 22 bp, Artificial Sequence
  chemically synthesized
gatttgggaatttggtcacgag

SEQ ID NO: 61788 - DNA, 22 bp, Artificial Sequence
  chemically synthesized
atttgggaatttggtcacgaga

SEQ ID NO: 61789 - DNA, 22 bp, Artificial Sequence
  chemically synthesized
gggaatttggtcacgagacaaa

SEQ ID NO: 61790 - DNA, 22 bp, Artificial Sequence
  chemically synthesized
ggaatttggtcacgagacaaat

SEQ ID NO: 61791 - DNA, 22 bp, Artificial Sequence
  chemically synthesized
ggtcacgagacaaataacatga

SEQ ID NO: 61792 - DNA, 22 bp, Artificial Sequence
  chemically synthesized
gtcacgagacaaataacatgat

SEQ ID NO: 61793 - DNA, 22 bp, Artificial Sequence
  chemically synthesized
tcctaagtctagatttctttgt

SEQ ID NO: 61794 - DNA, 22 bp, Artificial Sequence
  chemically synthesized
cctaagtctagatttctttgtt

SEQ ID NO: 61795 - DNA, 22 bp, Artificial Sequence
  chemically synthesized
ctaagtctagatttctttgttt

SEQ ID NO: 61796 - DNA, 22 bp, Artificial Sequence
  chemically synthesized
agtctagatttctttgtttata

SEQ ID NO: 61797 - DNA, 22 bp, Artificial Sequence
  chemically synthesized
gatttctttgtttataaaatgg

SEQ ID NO: 61798 - DNA, 22 bp, Artificial Sequence
  chemically synthesized
ctttgtttataaaatggggatg

SEQ ID NO: 61799 - DNA, 22 bp, Artificial Sequence
  chemically synthesized
tttgtttataaaatggggatga

SEQ ID NO: 61800 - DNA, 22 bp, Artificial Sequence
  chemically synthesized
tgtttataaaatggggatgact

SEQ ID NO: 61801 - DNA, 22 bp, Artificial Sequence
  chemically synthesized
gtttataaaatggggatgacta

SEQ ID NO: 61802 - DNA, 22 bp, Artificial Sequence
  chemically synthesized
tttataaaatggggatgactat

SEQ ID NO: 61803 - DNA, 22 bp, Artificial Sequence
  chemically synthesized
ataaaatggggatgactatgct

SEQ ID NO: 61804 - DNA, 22 bp, Artificial Sequence
  chemically synthesized
taaaatggggatgactatgcta

SEQ ID NO: 61805 - DNA, 22 bp, Artificial Sequence
  chemically synthesized
tgctaccctacctataccatga

SEQ ID NO: 61806 - DNA, 22 bp, Artificial Sequence
  chemically synthesized
ccctacctataccatgagctaa

SEQ ID NO: 61807 - DNA, 22 bp, Artificial Sequence
  chemically synthesized
cctataccatgagctaaataag

SEQ ID NO: 61808 - DNA, 22 bp, Artificial Sequence
  chemically synthesized
taccatgagctaaataagctag

SEQ ID NO: 61809 - DNA, 22 bp, Artificial Sequence
  chemically synthesized
aataagctagtatttgtaaagg

SEQ ID NO: 61810 - DNA, 22 bp, Artificial Sequence
  chemically synthesized
gtatttgtaaaggacacacact

SEQ ID NO: 61811 - DNA, 22 bp, Artificial Sequence
  chemically synthesized
gtaaaggacacacacttacatt

SEQ ID NO: 61812 - DNA, 22 bp, Artificial Sequence
  chemically synthesized
taaaggacacacacttacattc

SEQ ID NO: 61813 - DNA, 22 bp, Artificial Sequence
  chemically synthesized
acattcacaatcacacacggtg

SEQ ID NO: 61814 - DNA, 22 bp, Artificial Sequence
  chemically synthesized
cattcacaatcacacacggtgt

SEQ ID NO: 61815 - DNA, 22 bp, Artificial Sequence
  chemically synthesized
acaatcacacacggtgtgtatg

SEQ ID NO: 61816 - DNA, 22 bp, Artificial Sequence
  chemically synthesized
acccactcaacaaataccctga

SEQ ID NO: 61817 - DNA, 22 bp, Artificial Sequence
  chemically synthesized
aacaaataccctgagtatttgt

SEQ ID NO: 61818 - DNA, 22 bp, Artificial Sequence
  chemically synthesized
agtatttgttgaatcattatat

SEQ ID NO: 61819 - DNA, 22 bp, Artificial Sequence
  chemically synthesized
gttgaatcattatatgcgtata

SEQ ID NO: 61820 - DNA, 22 bp, Artificial Sequence
  chemically synthesized
ttgaatcattatatgcgtatat

SEQ ID NO: 61821 - DNA, 22 bp, Artificial Sequence
  chemically synthesized
aatcattatatgcgtatatcat

SEQ ID NO: 61822 - DNA, 22 bp, Artificial Sequence
  chemically synthesized
tatgcgtatatcatctggcaaa

SEQ ID NO: 61823 - DNA, 22 bp, Artificial Sequence
  chemically synthesized
gcaaatggatgtgtataatttc

SEQ ID NO: 61824 - DNA, 22 bp, Artificial Sequence
  chemically synthesized
ctccagggataagaagcaaatg

SEQ ID NO: 61825 - DNA, 22 bp, Artificial Sequence
  chemically synthesized
tccagggataagaagcaaatgt

SEQ ID NO: 61826 - DNA, 22 bp, Artificial Sequence
  chemically synthesized
cagggataagaagcaaatgtat

SEQ ID NO: 61827 - DNA, 22 bp, Artificial Sequence
  chemically synthesized
actcaggccataacaaagagag

SEQ ID NO: 61828 - DNA, 22 bp, Artificial Sequence
  chemically synthesized
ctcaggccataacaaagagaga

SEQ ID NO: 61829 - DNA, 22 bp, Artificial Sequence
  chemically synthesized
aggccataacaaagagagaaat

SEQ ID NO: 61830 - DNA, 22 bp, Artificial Sequence
  chemically synthesized
agtcccactccatgaacaggtc

SEQ ID NO: 61831 - DNA, 22 bp, Artificial Sequence
  chemically synthesized
catgaacaggtcaaggaaccaa

SEQ ID NO: 61832 - DNA, 22 bp, Artificial Sequence
  chemically synthesized
aaagagttatttcattgtttca

SEQ ID NO: 61833 - DNA, 22 bp, Artificial Sequence
  chemically synthesized
tttcattgtttcaacttgctag

SEQ ID NO: 61834 - DNA, 22 bp, Artificial Sequence
  chemically synthesized
cattgtttcaacttgctagtga

SEQ ID NO: 61835 - DNA, 22 bp, Artificial Sequence
  chemically synthesized
attgtttcaacttgctagtgag

SEQ ID NO: 61836 - DNA, 22 bp, Artificial Sequence
  chemically synthesized
tttcaacttgctagtgagggga

SEQ ID NO: 61837 - DNA, 22 bp, Artificial Sequence
  chemically synthesized
caacttgctagtgaggggagca

SEQ ID NO: 61838 - DNA, 22 bp, Artificial Sequence
  chemically synthesized
aacttgctagtgaggggagcat

SEQ ID NO: 61839 - DNA, 22 bp, Artificial Sequence
  chemically synthesized
gctagtgaggggagcatggcac

SEQ ID NO: 61840 - DNA, 22 bp, Artificial Sequence
  chemically synthesized
ctagtgaggggagcatggcacc

SEQ ID NO: 61841 - DNA, 22 bp, Artificial Sequence
  chemically synthesized
gtgaggggagcatggcacctga

SEQ ID NO: 61842 - DNA, 22 bp, Artificial Sequence
  chemically synthesized
aacagagatgatataaattaat

SEQ ID NO: 61843 - DNA, 22 bp, Artificial Sequence
  chemically synthesized
atgaaactgagaaccaagcgaa

SEQ ID NO: 61844 - DNA, 22 bp, Artificial Sequence
  chemically synthesized
agaaccaagcgaagagcttagc

SEQ ID NO: 61845 - DNA, 22 bp, Artificial Sequence
  chemically synthesized
agccatcctttgcatagttagc

SEQ ID NO: 61846 - DNA, 22 bp, Artificial Sequence
  chemically synthesized
gccatcctttgcatagttagct

SEQ ID NO: 61847 - DNA, 22 bp, Artificial Sequence
  chemically synthesized
tgcatagttagctacaatggct

SEQ ID NO: 61848 - DNA, 22 bp, Artificial Sequence
  chemically synthesized
gcatagttagctacaatggcta

SEQ ID NO: 61849 - DNA, 22 bp, Artificial Sequence
  chemically synthesized
catagttagctacaatggctat

SEQ ID NO: 61850 - DNA, 22 bp, Artificial Sequence
  chemically synthesized
gctacaatggctatttattttt

SEQ ID NO: 61851 - DNA, 22 bp, Artificial Sequence
  chemically synthesized
caatggctatttatttttcagc

SEQ ID NO: 61852 - DNA, 22 bp, Artificial Sequence
  chemically synthesized
tttatttttcagccagactggc

SEQ ID NO: 61853 - DNA, 22 bp, Artificial Sequence
  chemically synthesized
atttttcagccagactggccat

SEQ ID NO: 61854 - DNA, 22 bp, Artificial Sequence
  chemically synthesized
tttttcagccagactggccatc

SEQ ID NO: 61855 - DNA, 22 bp, Artificial Sequence
  chemically synthesized
ttcagccagactggccatcatg

SEQ ID NO: 61856 - DNA, 22 bp, Artificial Sequence
  chemically synthesized
tcagccagactggccatcatgt

SEQ ID NO: 61857 - DNA, 22 bp, Artificial Sequence
  chemically synthesized
cagccagactggccatcatgta

SEQ ID NO: 61858 - DNA, 22 bp, Artificial Sequence
  chemically synthesized
agccagactggccatcatgtag

SEQ ID NO: 61859 - DNA, 22 bp, Artificial Sequence
  chemically synthesized
gccatcatgtaggcacactctt

SEQ ID NO: 61860 - DNA, 22 bp, Artificial Sequence
  chemically synthesized
ttttagattagaaaaatcaacc

SEQ ID NO: 61861 - DNA, 22 bp, Artificial Sequence
  chemically synthesized
ttagattagaaaaatcaaccat

SEQ ID NO: 61862 - DNA, 22 bp, Artificial Sequence
  chemically synthesized
tagattagaaaaatcaaccatt

SEQ ID NO: 61863 - DNA, 22 bp, Artificial Sequence
  chemically synthesized
agattagaaaaatcaaccatta

SEQ ID NO: 61864 - DNA, 22 bp, Artificial Sequence
  chemically synthesized
gattagaaaaatcaaccattat

SEQ ID NO: 61865 - DNA, 22 bp, Artificial Sequence
  chemically synthesized
gaaaaatcaaccattatttttt

SEQ ID NO: 61866 - DNA, 22 bp, Artificial Sequence
  chemically synthesized
ttttttctgcccattcattcca

SEQ ID NO: 61867 - DNA, 22 bp, Artificial Sequence
  chemically synthesized
tttctgcccattcattccagca

SEQ ID NO: 61868 - DNA, 22 bp, Artificial Sequence
  chemically synthesized
ttctgcccattcattccagcac

SEQ ID NO: 61869 - DNA, 22 bp, Artificial Sequence
  chemically synthesized
tctgcccattcattccagcacc

SEQ ID NO: 61870 - DNA, 22 bp, Artificial Sequence
  chemically synthesized
ctgcccattcattccagcaccg

SEQ ID NO: 61871 - DNA, 22 bp, Artificial Sequence
  chemically synthesized
tgcccattcattccagcaccgt

SEQ ID NO: 61872 - DNA, 22 bp, Artificial Sequence
  chemically synthesized
cccattcattccagcaccgtga

SEQ ID NO: 61873 - DNA, 22 bp, Artificial Sequence
  chemically synthesized
attccagcaccgtgacagtctt

SEQ ID NO: 61874 - DNA, 22 bp, Artificial Sequence
  chemically synthesized
cagcaccgtgacagtcttcacg

SEQ ID NO: 61875 - DNA, 22 bp, Artificial Sequence
  chemically synthesized
cacggggaaattaaacttattt

SEQ ID NO: 61876 - DNA, 22 bp, Artificial Sequence
  chemically synthesized
acggggaaattaaacttatttt

SEQ ID NO: 61877 - DNA, 22 bp, Artificial Sequence
  chemically synthesized
aacttatttttttaagaatttt

SEQ ID NO: 61878 - DNA, 22 bp, Artificial Sequence
  chemically synthesized
atttttttaagaatttttcaat

SEQ ID NO: 61879 - DNA, 22 bp, Artificial Sequence
  chemically synthesized
tttttttaagaatttttcaatc

SEQ ID NO: 61880 - DNA, 22 bp, Artificial Sequence
  chemically synthesized
ttttaagaatttttcaatcata

SEQ ID NO: 61881 - DNA, 22 bp, Artificial Sequence
  chemically synthesized
tttaagaatttttcaatcatat

SEQ ID NO: 61882 - DNA, 22 bp, Artificial Sequence
  chemically synthesized
ttaagaatttttcaatcatata

SEQ ID NO: 61883 - DNA, 22 bp, Artificial Sequence
  chemically synthesized
taagaatttttcaatcatatac

SEQ ID NO: 61884 - DNA, 22 bp, Artificial Sequence
  chemically synthesized
aagaatttttcaatcatataca

SEQ ID NO: 61885 - DNA, 22 bp, Artificial Sequence
  chemically synthesized
agaatttttcaatcatatacaa

SEQ ID NO: 61886 - DNA, 22 bp, Artificial Sequence
  chemically synthesized
ttcaatcatatacaagattttg

SEQ ID NO: 61887 - DNA, 22 bp, Artificial Sequence
  chemically synthesized
tcaatcatatacaagattttga

SEQ ID NO: 61888 - DNA, 22 bp, Artificial Sequence
  chemically synthesized
caatcatatacaagattttgaa

SEQ ID NO: 61889 - DNA, 22 bp, Artificial Sequence
  chemically synthesized
aatcatatacaagattttgaac

SEQ ID NO: 61890 - DNA, 22 bp, Artificial Sequence
  chemically synthesized
tgaactgggaatttcatgaatc

SEQ ID NO: 61891 - DNA, 22 bp, Artificial Sequence
  chemically synthesized
gaactgggaatttcatgaatca

SEQ ID NO: 61892 - DNA, 22 bp, Artificial Sequence
  chemically synthesized
aactgggaatttcatgaatcaa

SEQ ID NO: 61893 - DNA, 22 bp, Artificial Sequence
  chemically synthesized
ggaatttcatgaatcaaaaatt

SEQ ID NO: 61894 - DNA, 22 bp, Artificial Sequence
  chemically synthesized
catgaatcaaaaattaaatgaa

SEQ ID NO: 61895 - DNA, 22 bp, Artificial Sequence
  chemically synthesized
atgaatcaaaaattaaatgaat

SEQ ID NO: 61896 - DNA, 22 bp, Artificial Sequence
  chemically synthesized
aatgaattgcacataaagccat

SEQ ID NO: 61897 - DNA, 22 bp, Artificial Sequence
  chemically synthesized
cacataaagccatggcatatgt

SEQ ID NO: 61898 - DNA, 22 bp, Artificial Sequence
  chemically synthesized
ttactacattgtgggagaaaaa

SEQ ID NO: 61899 - DNA, 22 bp, Artificial Sequence
  chemically synthesized
tactacattgtgggagaaaaaa

SEQ ID NO: 61900 - DNA, 22 bp, Artificial Sequence
  chemically synthesized
actacattgtgggagaaaaaat

SEQ ID NO: 61901 - DNA, 22 bp, Artificial Sequence
  chemically synthesized
ctacattgtgggagaaaaaata

SEQ ID NO: 61902 - DNA, 22 bp, Artificial Sequence
  chemically synthesized
cattgtgggagaaaaaataatt

SEQ ID NO: 61903 - DNA, 22 bp, Artificial Sequence
  chemically synthesized
tgggagaaaaaataattcttat

SEQ ID NO: 61904 - DNA, 22 bp, Artificial Sequence
  chemically synthesized
ttataatttaaaaaaactatgt

SEQ ID NO: 61905 - DNA, 22 bp, Artificial Sequence
  chemically synthesized
ataatttaaaaaaactatgtct

SEQ ID NO: 61906 - DNA, 22 bp, Artificial Sequence
  chemically synthesized
taatttaaaaaaactatgtctt

SEQ ID NO: 61907 - DNA, 22 bp, Artificial Sequence
  chemically synthesized
aaaaaaactatgtcttacctga

SEQ ID NO: 61908 - DNA, 22 bp, Artificial Sequence
  chemically synthesized
aaaaaactatgtcttacctgat

SEQ ID NO: 61909 - DNA, 22 bp, Artificial Sequence
  chemically synthesized
tgtcttacctgatttcagaaat

SEQ ID NO: 61910 - DNA, 22 bp, Artificial Sequence
  chemically synthesized
acctgatttcagaaataaaaga

SEQ ID NO: 61911 - DNA, 22 bp, Artificial Sequence
  chemically synthesized
cctgatttcagaaataaaagaa

SEQ ID NO: 61912 - DNA, 22 bp, Artificial Sequence
  chemically synthesized
atttcagaaataaaagaagtag

SEQ ID NO: 61913 - DNA, 22 bp, Artificial Sequence
  chemically synthesized
cagaaataaaagaagtagaaga

SEQ ID NO: 61914 - DNA, 22 bp, Artificial Sequence
  chemically synthesized
agaaataaaagaagtagaagaa

SEQ ID NO: 61915 - DNA, 22 bp, Artificial Sequence
  chemically synthesized
ccttatgttccattttgggact

SEQ ID NO: 61916 - DNA, 22 bp, Artificial Sequence
  chemically synthesized
cttatgttccattttgggactg

SEQ ID NO: 61917 - DNA, 22 bp, Artificial Sequence
  chemically synthesized
atgttccattttgggactggcc

SEQ ID NO: 61918 - DNA, 22 bp, Artificial Sequence
  chemically synthesized
tgttccattttgggactggcca

SEQ ID NO: 61919 - DNA, 22 bp, Artificial Sequence
  chemically synthesized
cattttgggactggccagcagt

SEQ ID NO: 61920 - DNA, 22 bp, Artificial Sequence
  chemically synthesized
tgggactggccagcagtgccca

SEQ ID NO: 61921 - DNA, 22 bp, Artificial Sequence
  chemically synthesized
gggactggccagcagtgcccag

SEQ ID NO: 61922 - DNA, 22 bp, Artificial Sequence
  chemically synthesized
ggactggccagcagtgcccaga

SEQ ID NO: 61923 - DNA, 22 bp, Artificial Sequence
  chemically synthesized
gccagcagtgcccagaaagtgt

SEQ ID NO: 61924 - DNA, 22 bp, Artificial Sequence
  chemically synthesized
ttgacttacatgagagtaaacg

SEQ ID NO: 61925 - DNA, 22 bp, Artificial Sequence
  chemically synthesized
acttacatgagagtaaacgcac

SEQ ID NO: 61926 - DNA, 22 bp, Artificial Sequence
  chemically synthesized
acatgagagtaaacgcacccac

SEQ ID NO: 61927 - DNA, 22 bp, Artificial Sequence
  chemically synthesized
catgagagtaaacgcacccaca

SEQ ID NO: 61928 - DNA, 22 bp, Artificial Sequence
  chemically synthesized
agttaatgattctctcagagac

SEQ ID NO: 61929 - DNA, 22 bp, Artificial Sequence
  chemically synthesized
atgattctctcagagacccatg

SEQ ID NO: 61930 - DNA, 22 bp, Artificial Sequence
  chemically synthesized
tctcagagacccatgccactgg

SEQ ID NO: 61931 - DNA, 22 bp, Artificial Sequence
  chemically synthesized
tcagagacccatgccactggct

SEQ ID NO: 61932 - DNA, 22 bp, Artificial Sequence
  chemically synthesized
agagacccatgccactggctca

SEQ ID NO: 61933 - DNA, 22 bp, Artificial Sequence
  chemically synthesized
gctcagcagggttcaaacatta

SEQ ID NO: 61934 - DNA, 22 bp, Artificial Sequence
  chemically synthesized
agcagggttcaaacattacctt

SEQ ID NO: 61935 - DNA, 22 bp, Artificial Sequence
  chemically synthesized
aaacattaccttgaatatagag

SEQ ID NO: 61936 - DNA, 22 bp, Artificial Sequence
  chemically synthesized
ccttgaatatagagtcttataa

SEQ ID NO: 61937 - DNA, 22 bp, Artificial Sequence
  chemically synthesized
gaatatagagtcttataaaata

SEQ ID NO: 61938 - DNA, 22 bp, Artificial Sequence
  chemically synthesized
aatatagagtcttataaaatat

SEQ ID NO: 61939 - DNA, 22 bp, Artificial Sequence
  chemically synthesized
ataaaatatttgagagtgcaat

SEQ ID NO: 61940 - DNA, 22 bp, Artificial Sequence
  chemically synthesized
taaaatatttgagagtgcaatg

SEQ ID NO: 61941 - DNA, 22 bp, Artificial Sequence
  chemically synthesized
gagagtgcaatgtcaatagatg

SEQ ID NO: 61942 - DNA, 22 bp, Artificial Sequence
  chemically synthesized
agagtgcaatgtcaatagatgc

SEQ ID NO: 61943 - DNA, 22 bp, Artificial Sequence
  chemically synthesized
ggaagtggtgaaagccatttcc

SEQ ID NO: 61944 - DNA, 22 bp, Artificial Sequence
  chemically synthesized
cccccctcagctgctccacatt

SEQ ID NO: 61945 - DNA, 22 bp, Artificial Sequence
  chemically synthesized
ccccctcagctgctccacattg

SEQ ID NO: 61946 - DNA, 22 bp, Artificial Sequence
  chemically synthesized
agctgctccacattgcctttat

SEQ ID NO: 61947 - DNA, 22 bp, Artificial Sequence
  chemically synthesized
ctccacattgcctttatgtctc

SEQ ID NO: 61948 - DNA, 22 bp, Artificial Sequence
  chemically synthesized
cacattgcctttatgtctcctt

SEQ ID NO: 61949 - DNA, 22 bp, Artificial Sequence
  chemically synthesized
cctttatgtctccttactcctt

SEQ ID NO: 61950 - DNA, 22 bp, Artificial Sequence
  chemically synthesized
tatgtctccttactccttccct

SEQ ID NO: 61951 - DNA, 22 bp, Artificial Sequence
  chemically synthesized
atgtctccttactccttccctc

SEQ ID NO: 61952 - DNA, 22 bp, Artificial Sequence
  chemically synthesized
tgtctccttactccttccctca

SEQ ID NO: 61953 - DNA, 22 bp, Artificial Sequence
  chemically synthesized
cttactccttccctcaccccta

SEQ ID NO: 61954 - DNA, 22 bp, Artificial Sequence
  chemically synthesized
actccttccctcacccctagac

SEQ ID NO: 61955 - DNA, 22 bp, Artificial Sequence
  chemically synthesized
ctccttccctcacccctagacc

SEQ ID NO: 61956 - DNA, 22 bp, Artificial Sequence
  chemically synthesized
cttccctcacccctagaccttc

SEQ ID NO: 61957 - DNA, 22 bp, Artificial Sequence
  chemically synthesized
ccctcacccctagaccttcatc

SEQ ID NO: 61958 - DNA, 22 bp, Artificial Sequence
  chemically synthesized
cctcacccctagaccttcatct

SEQ ID NO: 61959 - DNA, 22 bp, Artificial Sequence
  chemically synthesized
acccctagaccttcatctttcc

SEQ ID NO: 61960 - DNA, 22 bp, Artificial Sequence
  chemically synthesized
gaccttcatctttcctgattag

SEQ ID NO: 61961 - DNA, 22 bp, Artificial Sequence
  chemically synthesized
catctttcctgattagtcttgt

SEQ ID NO: 61962 - DNA, 22 bp, Artificial Sequence
  chemically synthesized
atctttcctgattagtcttgtt

SEQ ID NO: 61963 - DNA, 22 bp, Artificial Sequence
  chemically synthesized
tcctgattagtcttgtttcctc

SEQ ID NO: 61964 - DNA, 22 bp, Artificial Sequence
  chemically synthesized
cctgattagtcttgtttcctcc

SEQ ID NO: 61965 - DNA, 22 bp, Artificial Sequence
  chemically synthesized
ctgattagtcttgtttcctccc

SEQ ID NO: 61966 - DNA, 22 bp, Artificial Sequence
  chemically synthesized
attagtcttgtttcctcccctc

SEQ ID NO: 61967 - DNA, 22 bp, Artificial Sequence
  chemically synthesized
gtcttgtttcctcccctcttct

SEQ ID NO: 61968 - DNA, 22 bp, Artificial Sequence
  chemically synthesized
gtttcctcccctcttctttcat

SEQ ID NO: 61969 - DNA, 22 bp, Artificial Sequence
  chemically synthesized
tttcctcccctcttctttcatt

SEQ ID NO: 61970 - DNA, 22 bp, Artificial Sequence
  chemically synthesized
cctcccctcttctttcattctc

SEQ ID NO: 61971 - DNA, 22 bp, Artificial Sequence
  chemically synthesized
ctcccctcttctttcattctct

SEQ ID NO: 61972 - DNA, 22 bp, Artificial Sequence
  chemically synthesized
ccctcttctttcattctctttc

SEQ ID NO: 61973 - DNA, 22 bp, Artificial Sequence
  chemically synthesized
ttctttcattctctttcttttg

SEQ ID NO: 61974 - DNA, 22 bp, Artificial Sequence
  chemically synthesized
ctttcattctctttcttttgga

SEQ ID NO: 61975 - DNA, 22 bp, Artificial Sequence
  chemically synthesized
tttcattctctttcttttggat

SEQ ID NO: 61976 - DNA, 22 bp, Artificial Sequence
  chemically synthesized
tcattctctttcttttggataa

SEQ ID NO: 61977 - DNA, 22 bp, Artificial Sequence
  chemically synthesized
cattctctttcttttggataaa

SEQ ID NO: 61978 - DNA, 22 bp, Artificial Sequence
  chemically synthesized
attctctttcttttggataaaa

SEQ ID NO: 61979 - DNA, 22 bp, Artificial Sequence
  chemically synthesized
tctttcttttggataaaataaa

SEQ ID NO: 61980 - DNA, 22 bp, Artificial Sequence
  chemically synthesized
tttcttttggataaaataaaat

SEQ ID NO: 61981 - DNA, 22 bp, Artificial Sequence
  chemically synthesized
tcttttggataaaataaaatca

SEQ ID NO: 61982 - DNA, 22 bp, Artificial Sequence
  chemically synthesized
cttttggataaaataaaatcat

SEQ ID NO: 61983 - DNA, 22 bp, Artificial Sequence
  chemically synthesized
ttttggataaaataaaatcata

SEQ ID NO: 61984 - DNA, 22 bp, Artificial Sequence
  chemically synthesized
ttggataaaataaaatcataaa

SEQ ID NO: 61985 - DNA, 22 bp, Artificial Sequence
  chemically synthesized
tggataaaataaaatcataaaa

SEQ ID NO: 61986 - DNA, 22 bp, Artificial Sequence
  chemically synthesized
ggataaaataaaatcataaaag

SEQ ID NO: 61987 - DNA, 22 bp, Artificial Sequence
  chemically synthesized
gataaaataaaatcataaaagt

SEQ ID NO: 61988 - DNA, 22 bp, Artificial Sequence
  chemically synthesized
atatttgctggtaacttccatg

SEQ ID NO: 61989 - DNA, 22 bp, Artificial Sequence
  chemically synthesized
gctggtaacttccatgaccaga

SEQ ID NO: 61990 - DNA, 22 bp, Artificial Sequence
  chemically synthesized
ctggtaacttccatgaccagac

SEQ ID NO: 61991 - DNA, 22 bp, Artificial Sequence
  chemically synthesized
gtaacttccatgaccagaccct

SEQ ID NO: 61992 - DNA, 22 bp, Artificial Sequence
  chemically synthesized
ccatgaccagaccctctgccaa

SEQ ID NO: 61993 - DNA, 22 bp, Artificial Sequence
  chemically synthesized
catgaccagaccctctgccaag

SEQ ID NO: 61994 - DNA, 22 bp, Artificial Sequence
  chemically synthesized
tgccaagtgctgcacatccata

SEQ ID NO: 61995 - DNA, 22 bp, Artificial Sequence
  chemically synthesized
ccaagtgctgcacatccatagc

SEQ ID NO: 61996 - DNA, 22 bp, Artificial Sequence
  chemically synthesized
cacatccatagcctccctcaag

SEQ ID NO: 61997 - DNA, 22 bp, Artificial Sequence
  chemically synthesized
cctcaagctttccaacaggcag

SEQ ID NO: 61998 - DNA, 22 bp, Artificial Sequence
  chemically synthesized
aagctttccaacaggcagtgct

SEQ ID NO: 61999 - DNA, 22 bp, Artificial Sequence
  chemically synthesized
tccaacaggcagtgctgtacga

SEQ ID NO: 62000 - DNA, 22 bp, Artificial Sequence
  chemically synthesized
ccaacaggcagtgctgtacgag

SEQ ID NO: 62001 - DNA, 22 bp, Artificial Sequence
  chemically synthesized
caacaggcagtgctgtacgagg

SEQ ID NO: 62002 - DNA, 22 bp, Artificial Sequence
  chemically synthesized
tacgaggagggggctgaggcct

SEQ ID NO: 62003 - DNA, 22 bp, Artificial Sequence
  chemically synthesized
aggccttcccgaggttgtgtcg

SEQ ID NO: 62004 - DNA, 22 bp, Artificial Sequence
  chemically synthesized
cccgaggttgtgtcgctaccca

SEQ ID NO: 62005 - DNA, 22 bp, Artificial Sequence
  chemically synthesized
ccgaggttgtgtcgctacccag

SEQ ID NO: 62006 - DNA, 22 bp, Artificial Sequence
  chemically synthesized
tgtcgctacccaggggtgcagc

SEQ ID NO: 62007 - DNA, 22 bp, Artificial Sequence
  chemically synthesized
cccaggggtgcagctgatagac

SEQ ID NO: 62008 - DNA, 22 bp, Artificial Sequence
  chemically synthesized
atagacacaaccctttcaggtc

SEQ ID NO: 62009 - DNA, 22 bp, Artificial Sequence
  chemically synthesized
tcaggtcttagtttacgagcaa

SEQ ID NO: 62010 - DNA, 22 bp, Artificial Sequence
  chemically synthesized
caggtcttagtttacgagcaag

SEQ ID NO: 62011 - DNA, 22 bp, Artificial Sequence
  chemically synthesized
aggtcttagtttacgagcaagc

SEQ ID NO: 62012 - DNA, 22 bp, Artificial Sequence
  chemically synthesized
agtttacgagcaagctaggtat

SEQ ID NO: 62013 - DNA, 22 bp, Artificial Sequence
  chemically synthesized
gtttacgagcaagctaggtata

SEQ ID NO: 62014 - DNA, 22 bp, Artificial Sequence
  chemically synthesized
acgagcaagctaggtataaatg

SEQ ID NO: 62015 - DNA, 22 bp, Artificial Sequence
  chemically synthesized
cgagcaagctaggtataaatgt

SEQ ID NO: 62016 - DNA, 22 bp, Artificial Sequence
  chemically synthesized
ggtataaatgttaacatctcca

SEQ ID NO: 62017 - DNA, 22 bp, Artificial Sequence
  chemically synthesized
acatctccacatcctataccaa

SEQ ID NO: 62018 - DNA, 22 bp, Artificial Sequence
  chemically synthesized
cacatcctataccaaactgtgc

SEQ ID NO: 62019 - DNA, 22 bp, Artificial Sequence
  chemically synthesized
taccaaactgtgccgaaatgac

SEQ ID NO: 62020 - DNA, 22 bp, Artificial Sequence
  chemically synthesized
tgccgaaatgacaacataagtg

SEQ ID NO: 62021 - DNA, 22 bp, Artificial Sequence
  chemically synthesized
ttattatcttcaaaatttattt

SEQ ID NO: 62022 - DNA, 22 bp, Artificial Sequence
  chemically synthesized
tattatcttcaaaatttattta

SEQ ID NO: 62023 - DNA, 22 bp, Artificial Sequence
  chemically synthesized
attatcttcaaaatttatttat

SEQ ID NO: 62024 - DNA, 22 bp, Artificial Sequence
  chemically synthesized
ttatcttcaaaatttatttatt

SEQ ID NO: 62025 - DNA, 22 bp, Artificial Sequence
  chemically synthesized
tcttcaaaatttatttattcct

SEQ ID NO: 62026 - DNA, 22 bp, Artificial Sequence
  chemically synthesized
caaaatttatttattcctagtg

SEQ ID NO: 62027 - DNA, 22 bp, Artificial Sequence
  chemically synthesized
aaaatttatttattcctagtga

SEQ ID NO: 62028 - DNA, 22 bp, Artificial Sequence
  chemically synthesized
atttattcctagtgaactcaca

SEQ ID NO: 62029 - DNA, 22 bp, Artificial Sequence
  chemically synthesized
tttattcctagtgaactcacat

SEQ ID NO: 62030 - DNA, 22 bp, Artificial Sequence
  chemically synthesized
attcctagtgaactcacatgtt

SEQ ID NO: 62031 - DNA, 22 bp, Artificial Sequence
  chemically synthesized
ttcctagtgaactcacatgttt

SEQ ID NO: 62032 - DNA, 22 bp, Artificial Sequence
  chemically synthesized
ctagtgaactcacatgttttct

SEQ ID NO: 62033 - DNA, 22 bp, Artificial Sequence
  chemically synthesized
gtgaactcacatgttttctgta

SEQ ID NO: 62034 - DNA, 22 bp, Artificial Sequence
  chemically synthesized
acatgttttctgtaattataaa

SEQ ID NO: 62035 - DNA, 22 bp, Artificial Sequence
  chemically synthesized
tctgtaattataaattatgtta

SEQ ID NO: 62036 - DNA, 22 bp, Artificial Sequence
  chemically synthesized
ctgtaattataaattatgttat

SEQ ID NO: 62037 - DNA, 22 bp, Artificial Sequence
  chemically synthesized
tgtaattataaattatgttata

SEQ ID NO: 62038 - DNA, 22 bp, Artificial Sequence
  chemically synthesized
taattataaattatgttataag

SEQ ID NO: 62039 - DNA, 22 bp, Artificial Sequence
  chemically synthesized
taaattatgttataagatatca

SEQ ID NO: 62040 - DNA, 22 bp, Artificial Sequence
  chemically synthesized
tgttataagatatcaatccttc

SEQ ID NO: 62041 - DNA, 22 bp, Artificial Sequence
  chemically synthesized
taagatatcaatccttccagga

SEQ ID NO: 62042 - DNA, 22 bp, Artificial Sequence
  chemically synthesized
ccaggagggggtggtggctcat

SEQ ID NO: 62043 - DNA, 22 bp, Artificial Sequence
  chemically synthesized
caggagggggtggtggctcatg

SEQ ID NO: 62044 - DNA, 22 bp, Artificial Sequence
  chemically synthesized
atgcctataatcccagcatttt

SEQ ID NO: 62045 - DNA, 22 bp, Artificial Sequence
  chemically synthesized
taatcccagcattttgggaggc

SEQ ID NO: 62046 - DNA, 22 bp, Artificial Sequence
  chemically synthesized
tgggaggccacggcagatggat

SEQ ID NO: 62047 - DNA, 22 bp, Artificial Sequence
  chemically synthesized
gggaggccacggcagatggatc

SEQ ID NO: 62048 - DNA, 22 bp, Artificial Sequence
  chemically synthesized
ggaggccacggcagatggatca

SEQ ID NO: 62049 - DNA, 22 bp, Artificial Sequence
  chemically synthesized
aggccaggagtttgagacaagc

SEQ ID NO: 62050 - DNA, 22 bp, Artificial Sequence
  chemically synthesized
gagacaagcctgggcaacatgc

SEQ ID NO: 62051 - DNA, 22 bp, Artificial Sequence
  chemically synthesized
agacaagcctgggcaacatgcc

SEQ ID NO: 62052 - DNA, 22 bp, Artificial Sequence
  chemically synthesized
ggcaacatgccaaaaccctgtc

SEQ ID NO: 62053 - DNA, 22 bp, Artificial Sequence
  chemically synthesized
tctctacaaaaaatacaaaaat

SEQ ID NO: 62054 - DNA, 22 bp, Artificial Sequence
  chemically synthesized
tacaaaaaatacaaaaattagc

SEQ ID NO: 62055 - DNA, 22 bp, Artificial Sequence
  chemically synthesized
caaaaaatacaaaaattagctg

SEQ ID NO: 62056 - DNA, 22 bp, Artificial Sequence
  chemically synthesized
gctgggtgtggaggcacatgcc

SEQ ID NO: 62057 - DNA, 22 bp, Artificial Sequence
  chemically synthesized
ggtgtggaggcacatgccagtc

SEQ ID NO: 62058 - DNA, 22 bp, Artificial Sequence
  chemically synthesized
ctaagtaggctgaggcactaga

SEQ ID NO: 62059 - DNA, 22 bp, Artificial Sequence
  chemically synthesized
agtaggctgaggcactagaatt

SEQ ID NO: 62060 - DNA, 22 bp, Artificial Sequence
  chemically synthesized
aggcactagaattgcttgaaca

SEQ ID NO: 62061 - DNA, 22 bp, Artificial Sequence
  chemically synthesized
gaattgcttgaacacaggagat

SEQ ID NO: 62062 - DNA, 22 bp, Artificial Sequence
  chemically synthesized
cttgaacacaggagatggaggt

SEQ ID NO: 62063 - DNA, 22 bp, Artificial Sequence
  chemically synthesized
gaacacaggagatggaggttgc

SEQ ID NO: 62064 - DNA, 22 bp, Artificial Sequence
  chemically synthesized
aacacaggagatggaggttgca

SEQ ID NO: 62065 - DNA, 22 bp, Artificial Sequence
  chemically synthesized
cagtgagccaagaatgtgccac

SEQ ID NO: 62066 - DNA, 22 bp, Artificial Sequence
  chemically synthesized
cactccagcctgggtgacagag

SEQ ID NO: 62067 - DNA, 22 bp, Artificial Sequence
  chemically synthesized
cagcctgggtgacagagcaaga

SEQ ID NO: 62068 - DNA, 22 bp, Artificial Sequence
  chemically synthesized
ggtgacagagcaagaatgtctc

SEQ ID NO: 62069 - DNA, 22 bp, Artificial Sequence
  chemically synthesized
aggaaagaaaaaaaaataataa

SEQ ID NO: 62070 - DNA, 22 bp, Artificial Sequence
  chemically synthesized
ataaaatatcaatccttcctat

SEQ ID NO: 62071 - DNA, 22 bp, Artificial Sequence
  chemically synthesized
cctattctagtagttgtggctt

SEQ ID NO: 62072 - DNA, 22 bp, Artificial Sequence
  chemically synthesized
ctattctagtagttgtggctta

SEQ ID NO: 62073 - DNA, 22 bp, Artificial Sequence
  chemically synthesized
ttctagtagttgtggcttaaat

SEQ ID NO: 62074 - DNA, 22 bp, Artificial Sequence
  chemically synthesized
tagtagttgtggcttaaataaa

SEQ ID NO: 62075 - DNA, 22 bp, Artificial Sequence
  chemically synthesized
gtagttgtggcttaaataaata

SEQ ID NO: 62076 - DNA, 22 bp, Artificial Sequence
  chemically synthesized
tggcttaaataaataaataaat

SEQ ID NO: 62077 - DNA, 22 bp, Artificial Sequence
  chemically synthesized
aaataaataaataaatattttt

SEQ ID NO: 62078 - DNA, 22 bp, Artificial Sequence
  chemically synthesized
aataaataaataaatattttta

SEQ ID NO: 62079 - DNA, 22 bp, Artificial Sequence
  chemically synthesized
ttaaaaataaaacatagggtcg

SEQ ID NO: 62080 - DNA, 22 bp, Artificial Sequence
  chemically synthesized
taaaaataaaacatagggtcga

SEQ ID NO: 62081 - DNA, 22 bp, Artificial Sequence
  chemically synthesized
aaaaataaaacatagggtcgag

SEQ ID NO: 62082 - DNA, 22 bp, Artificial Sequence
  chemically synthesized
aaaataaaacatagggtcgagt

SEQ ID NO: 62083 - DNA, 22 bp, Artificial Sequence
  chemically synthesized
aactctgtaatcccagcacttt

SEQ ID NO: 62084 - DNA, 22 bp, Artificial Sequence
  chemically synthesized
tgtaatcccagcactttgggag

SEQ ID NO: 62085 - DNA, 22 bp, Artificial Sequence
  chemically synthesized
taatcccagcactttgggaggc

SEQ ID NO: 62086 - DNA, 22 bp, Artificial Sequence
  chemically synthesized
tgggaggccaagacaggtggat

SEQ ID NO: 62087 - DNA, 22 bp, Artificial Sequence
  chemically synthesized
gggaggccaagacaggtggatc

SEQ ID NO: 62088 - DNA, 22 bp, Artificial Sequence
  chemically synthesized
ggaggccaagacaggtggatca

SEQ ID NO: 62089 - DNA, 22 bp, Artificial Sequence
  chemically synthesized
gagaccagccaggccaatgtgg

SEQ ID NO: 62090 - DNA, 22 bp, Artificial Sequence
  chemically synthesized
agaccagccaggccaatgtggt

SEQ ID NO: 62091 - DNA, 22 bp, Artificial Sequence
  chemically synthesized
tactaaaaatacaaaaattagc

SEQ ID NO: 62092 - DNA, 22 bp, Artificial Sequence
  chemically synthesized
ctaaaaatacaaaaattagcca

SEQ ID NO: 62093 - DNA, 22 bp, Artificial Sequence
  chemically synthesized
aaaatacaaaaattagccaggc

SEQ ID NO: 62094 - DNA, 22 bp, Artificial Sequence
  chemically synthesized
gccaggcgtggtggtgggcacc

SEQ ID NO: 62095 - DNA, 22 bp, Artificial Sequence
  chemically synthesized
taatcccagctactagggaggc

SEQ ID NO: 62096 - DNA, 22 bp, Artificial Sequence
  chemically synthesized
ctagggaggctggagtattcac

SEQ ID NO: 62097 - DNA, 22 bp, Artificial Sequence
  chemically synthesized
gggaggctggagtattcacttg

SEQ ID NO: 62098 - DNA, 22 bp, Artificial Sequence
  chemically synthesized
gagtattcacttgaacccagga

SEQ ID NO: 62099 - DNA, 22 bp, Artificial Sequence
  chemically synthesized
acttgaacccaggaggtggaag

SEQ ID NO: 62100 - DNA, 22 bp, Artificial Sequence
  chemically synthesized
gaacccaggaggtggaagttgc

SEQ ID NO: 62101 - DNA, 22 bp, Artificial Sequence
  chemically synthesized
aacccaggaggtggaagttgca

SEQ ID NO: 62102 - DNA, 22 bp, Artificial Sequence
  chemically synthesized
cagtgagccaaaatcacgtcag

SEQ ID NO: 62103 - DNA, 22 bp, Artificial Sequence
  chemically synthesized
caaccggggtgagagtctcaat

SEQ ID NO: 62104 - DNA, 22 bp, Artificial Sequence
  chemically synthesized
aaccggggtgagagtctcaata

SEQ ID NO: 62105 - DNA, 22 bp, Artificial Sequence
  chemically synthesized
aataaaataaaataaaataaaa

SEQ ID NO: 62106 - DNA, 22 bp, Artificial Sequence
  chemically synthesized
tccgcaaatgaattcatggtgc

SEQ ID NO: 62107 - DNA, 22 bp, Artificial Sequence
  chemically synthesized
ccgcaaatgaattcatggtgca

SEQ ID NO: 62108 - DNA, 22 bp, Artificial Sequence
  chemically synthesized
cgcaaatgaattcatggtgcaa

SEQ ID NO: 62109 - DNA, 22 bp, Artificial Sequence
  chemically synthesized
atggtgcaatcttacattttcg

SEQ ID NO: 62110 - DNA, 22 bp, Artificial Sequence
  chemically synthesized
acattttcgttctcatgaagta

SEQ ID NO: 62111 - DNA, 22 bp, Artificial Sequence
  chemically synthesized
cattttcgttctcatgaagtaa

SEQ ID NO: 62112 - DNA, 22 bp, Artificial Sequence
  chemically synthesized
tcgttctcatgaagtaaagcaa

SEQ ID NO: 62113 - DNA, 22 bp, Artificial Sequence
  chemically synthesized
cgttctcatgaagtaaagcaag

SEQ ID NO: 62114 - DNA, 22 bp, Artificial Sequence
  chemically synthesized
gttctcatgaagtaaagcaaga

SEQ ID NO: 62115 - DNA, 22 bp, Artificial Sequence
  chemically synthesized
tcatgaagtaaagcaagagtgg

SEQ ID NO: 62116 - DNA, 22 bp, Artificial Sequence
  chemically synthesized
atgaagtaaagcaagagtggta

SEQ ID NO: 62117 - DNA, 22 bp, Artificial Sequence
  chemically synthesized
agtggaaagagtctatctctag

SEQ ID NO: 62118 - DNA, 22 bp, Artificial Sequence
  chemically synthesized
tctctagtgtagtcacgtcagt

SEQ ID NO: 62119 - DNA, 22 bp, Artificial Sequence
  chemically synthesized
tagtgtagtcacgtcagtggtt

SEQ ID NO: 62120 - DNA, 22 bp, Artificial Sequence
  chemically synthesized
gtgtagtcacgtcagtggttgt

SEQ ID NO: 62121 - DNA, 22 bp, Artificial Sequence
  chemically synthesized
tgtcaagatggttaggaggctc

SEQ ID NO: 62122 - DNA, 22 bp, Artificial Sequence
  chemically synthesized
ggaggctcctcccgtttaaaac

SEQ ID NO: 62123 - DNA, 22 bp, Artificial Sequence
  chemically synthesized
ctcccgtttaaaacagtatcca

SEQ ID NO: 62124 - DNA, 22 bp, Artificial Sequence
  chemically synthesized
ccgtttaaaacagtatccaagc

SEQ ID NO: 62125 - DNA, 22 bp, Artificial Sequence
  chemically synthesized
aaaacagtatccaagccccagt

SEQ ID NO: 62126 - DNA, 22 bp, Artificial Sequence
  chemically synthesized
aaacagtatccaagccccagtt

SEQ ID NO: 62127 - DNA, 22 bp, Artificial Sequence
  chemically synthesized
taaatcaattggggagacacgc

SEQ ID NO: 62128 - DNA, 22 bp, Artificial Sequence
  chemically synthesized
gggagacacgccaactctgatc

SEQ ID NO: 62129 - DNA, 22 bp, Artificial Sequence
  chemically synthesized
tgatcatcagcaatatctgagc

SEQ ID NO: 62130 - DNA, 22 bp, Artificial Sequence
  chemically synthesized
atcatcagcaatatctgagctc

SEQ ID NO: 62131 - DNA, 22 bp, Artificial Sequence
  chemically synthesized
agctccagtctcagatattgtg

SEQ ID NO: 62132 - DNA, 22 bp, Artificial Sequence
  chemically synthesized
cagtctcagatattgtgtgcag

SEQ ID NO: 62133 - DNA, 22 bp, Artificial Sequence
  chemically synthesized
agatattgtgtgcagttagtct

SEQ ID NO: 62134 - DNA, 22 bp, Artificial Sequence
  chemically synthesized
tgtgcagttagtctctgtcctg

SEQ ID NO: 62135 - DNA, 22 bp, Artificial Sequence
  chemically synthesized
gtctctgtcctgtaccctctac

SEQ ID NO: 62136 - DNA, 22 bp, Artificial Sequence
  chemically synthesized
tgtcctgtaccctctacctcct

SEQ ID NO: 62137 - DNA, 22 bp, Artificial Sequence
  chemically synthesized
tcctgtaccctctacctccttc

SEQ ID NO: 62138 - DNA, 22 bp, Artificial Sequence
  chemically synthesized
taccctctacctccttccctac

SEQ ID NO: 62139 - DNA, 22 bp, Artificial Sequence
  chemically synthesized
tacctccttccctaccagaaaa

SEQ ID NO: 62140 - DNA, 22 bp, Artificial Sequence
  chemically synthesized
cctccttccctaccagaaaaat

SEQ ID NO: 62141 - DNA, 22 bp, Artificial Sequence
  chemically synthesized
cttccctaccagaaaaatcacc

SEQ ID NO: 62142 - DNA, 22 bp, Artificial Sequence
  chemically synthesized
ccctaccagaaaaatcaccact

SEQ ID NO: 62143 - DNA, 22 bp, Artificial Sequence
  chemically synthesized
cctaccagaaaaatcaccactt

SEQ ID NO: 62144 - DNA, 22 bp, Artificial Sequence
  chemically synthesized
ccagaaaaatcaccactttagt

SEQ ID NO: 62145 - DNA, 22 bp, Artificial Sequence
  chemically synthesized
tagtccctggccaccgggacac

SEQ ID NO: 62146 - DNA, 22 bp, Artificial Sequence
  chemically synthesized
agtccctggccaccgggacacc

SEQ ID NO: 62147 - DNA, 22 bp, Artificial Sequence
  chemically synthesized
gtccctggccaccgggacaccc

SEQ ID NO: 62148 - DNA, 22 bp, Artificial Sequence
  chemically synthesized
gccaccgggacaccccaggagg

SEQ ID NO: 62149 - DNA, 22 bp, Artificial Sequence
  chemically synthesized
aggtagttatggcacttatggc

SEQ ID NO: 62150 - DNA, 22 bp, Artificial Sequence
  chemically synthesized
tggcacttatggctcccttgct

SEQ ID NO: 62151 - DNA, 22 bp, Artificial Sequence
  chemically synthesized
atggctcccttgctgctgatct

SEQ ID NO: 62152 - DNA, 22 bp, Artificial Sequence
  chemically synthesized
tggctcccttgctgctgatctg

SEQ ID NO: 62153 - DNA, 22 bp, Artificial Sequence
  chemically synthesized
ccttgctgctgatctggaactc

SEQ ID NO: 62154 - DNA, 22 bp, Artificial Sequence
  chemically synthesized
gctgctgatctggaactcaagc

SEQ ID NO: 62155 - DNA, 22 bp, Artificial Sequence
  chemically synthesized
ctgctgatctggaactcaagcc

SEQ ID NO: 62156 - DNA, 22 bp, Artificial Sequence
  chemically synthesized
ctgatctggaactcaagcccca

SEQ ID NO: 62157 - DNA, 22 bp, Artificial Sequence
  chemically synthesized
atctggaactcaagccccaaga

SEQ ID NO: 62158 - DNA, 22 bp, Artificial Sequence
  chemically synthesized
gaactcaagccccaagaagtcc

SEQ ID NO: 62159 - DNA, 22 bp, Artificial Sequence
  chemically synthesized
aagccccaagaagtccccttgg

SEQ ID NO: 62160 - DNA, 22 bp, Artificial Sequence
  chemically synthesized
ggatgatctgaatatacatttg

SEQ ID NO: 62161 - DNA, 22 bp, Artificial Sequence
  chemically synthesized
gatgatctgaatatacatttgg

SEQ ID NO: 62162 - DNA, 22 bp, Artificial Sequence
  chemically synthesized
aatatacatttgggacagatct

SEQ ID NO: 62163 - DNA, 22 bp, Artificial Sequence
  chemically synthesized
gggacagatctagggagtttct

SEQ ID NO: 62164 - DNA, 22 bp, Artificial Sequence
  chemically synthesized
ggacagatctagggagtttctg

SEQ ID NO: 62165 - DNA, 22 bp, Artificial Sequence
  chemically synthesized
gggagtttctgagcaacactta

SEQ ID NO: 62166 - DNA, 22 bp, Artificial Sequence
  chemically synthesized
ctgagcaacacttagactgggg

SEQ ID NO: 62167 - DNA, 22 bp, Artificial Sequence
  chemically synthesized
tgagcaacacttagactggggt

SEQ ID NO: 62168 - DNA, 22 bp, Artificial Sequence
  chemically synthesized
agcaacacttagactggggtct

SEQ ID NO: 62169 - DNA, 22 bp, Artificial Sequence
  chemically synthesized
agactggggtcttccattgatt

SEQ ID NO: 62170 - DNA, 22 bp, Artificial Sequence
  chemically synthesized
gactggggtcttccattgatta

SEQ ID NO: 62171 - DNA, 22 bp, Artificial Sequence
  chemically synthesized
gggtcttccattgattaaatcc

SEQ ID NO: 62172 - DNA, 22 bp, Artificial Sequence
  chemically synthesized
ccattgattaaatcctacttga

SEQ ID NO: 62173 - DNA, 22 bp, Artificial Sequence
  chemically synthesized
cattgattaaatcctacttgaa

SEQ ID NO: 62174 - DNA, 22 bp, Artificial Sequence
  chemically synthesized
attaaatcctacttgaattcgc

SEQ ID NO: 62175 - DNA, 22 bp, Artificial Sequence
  chemically synthesized
aatcctacttgaattcgctact

SEQ ID NO: 62176 - DNA, 22 bp, Artificial Sequence
  chemically synthesized
cttgaattcgctactttgggac

SEQ ID NO: 62177 - DNA, 22 bp, Artificial Sequence
  chemically synthesized
gaattcgctactttgggactca

SEQ ID NO: 62178 - DNA, 22 bp, Artificial Sequence
  chemically synthesized
aattcgctactttgggactcaa

SEQ ID NO: 62179 - DNA, 22 bp, Artificial Sequence
  chemically synthesized
gctactttgggactcaagtcta

SEQ ID NO: 62180 - DNA, 22 bp, Artificial Sequence
  chemically synthesized
ctttgggactcaagtctaaggg

SEQ ID NO: 62181 - DNA, 22 bp, Artificial Sequence
  chemically synthesized
tgggactcaagtctaagggact

SEQ ID NO: 62182 - DNA, 22 bp, Artificial Sequence
  chemically synthesized
gggactcaagtctaagggactg

SEQ ID NO: 62183 - DNA, 22 bp, Artificial Sequence
  chemically synthesized
ggactcaagtctaagggactga

SEQ ID NO: 62184 - DNA, 22 bp, Artificial Sequence
  chemically synthesized
aagtctaagggactgagactga

SEQ ID NO: 62185 - DNA, 22 bp, Artificial Sequence
  chemically synthesized
agggactgagactgagacagga

SEQ ID NO: 62186 - DNA, 22 bp, Artificial Sequence
  chemically synthesized
agactgagacaggagagcacaa

SEQ ID NO: 62187 - DNA, 22 bp, Artificial Sequence
  chemically synthesized
agacaggagagcacaagactaa

SEQ ID NO: 62188 - DNA, 22 bp, Artificial Sequence
  chemically synthesized
actttggtctcttgatcttttc

SEQ ID NO: 62189 - DNA, 22 bp, Artificial Sequence
  chemically synthesized
tggtctcttgatcttttcttac

SEQ ID NO: 62190 - DNA, 22 bp, Artificial Sequence
  chemically synthesized
ggtctcttgatcttttcttacc

SEQ ID NO: 62191 - DNA, 22 bp, Artificial Sequence
  chemically synthesized
gtctcttgatcttttcttacct

SEQ ID NO: 62192 - DNA, 22 bp, Artificial Sequence
  chemically synthesized
ttgatcttttcttaccttgcaa

SEQ ID NO: 62193 - DNA, 22 bp, Artificial Sequence
  chemically synthesized
gatcttttcttaccttgcaact

SEQ ID NO: 62194 - DNA, 22 bp, Artificial Sequence
  chemically synthesized
atcttttcttaccttgcaactg

SEQ ID NO: 62195 - DNA, 22 bp, Artificial Sequence
  chemically synthesized
ttcttaccttgcaactgtcaat

SEQ ID NO: 62196 - DNA, 22 bp, Artificial Sequence
  chemically synthesized
tcttaccttgcaactgtcaatg

SEQ ID NO: 62197 - DNA, 22 bp, Artificial Sequence
  chemically synthesized
cttaccttgcaactgtcaatgc

SEQ ID NO: 62198 - DNA, 22 bp, Artificial Sequence
  chemically synthesized
ttaccttgcaactgtcaatgcc

SEQ ID NO: 62199 - DNA, 22 bp, Artificial Sequence
  chemically synthesized
accttgcaactgtcaatgcctc

SEQ ID NO: 62200 - DNA, 22 bp, Artificial Sequence
  chemically synthesized
ccttgcaactgtcaatgcctcc

SEQ ID NO: 62201 - DNA, 22 bp, Artificial Sequence
  chemically synthesized
gcaactgtcaatgcctccagcc

SEQ ID NO: 62202 - DNA, 22 bp, Artificial Sequence
  chemically synthesized
caactgtcaatgcctccagcca

SEQ ID NO: 62203 - DNA, 22 bp, Artificial Sequence
  chemically synthesized
tcaatgcctccagccaaatgcc

SEQ ID NO: 62204 - DNA, 22 bp, Artificial Sequence
  chemically synthesized
cagccaaatgcccagcacagag

SEQ ID NO: 62205 - DNA, 22 bp, Artificial Sequence
  chemically synthesized
agtggatttgactcttccattc

SEQ ID NO: 62206 - DNA, 22 bp, Artificial Sequence
  chemically synthesized
gactcttccattcagaaactca

SEQ ID NO: 62207 - DNA, 22 bp, Artificial Sequence
  chemically synthesized
actcttccattcagaaactcat

SEQ ID NO: 62208 - DNA, 22 bp, Artificial Sequence
  chemically synthesized
ttccattcagaaactcatagcg

SEQ ID NO: 62209 - DNA, 22 bp, Artificial Sequence
  chemically synthesized
ccattcagaaactcatagcgat

SEQ ID NO: 62210 - DNA, 22 bp, Artificial Sequence
  chemically synthesized
cattcagaaactcatagcgatt

SEQ ID NO: 62211 - DNA, 22 bp, Artificial Sequence
  chemically synthesized
agaaactcatagcgattgcaca

SEQ ID NO: 62212 - DNA, 22 bp, Artificial Sequence
  chemically synthesized
atagcgattgcacacttcattc

SEQ ID NO: 62213 - DNA, 22 bp, Artificial Sequence
  chemically synthesized
cacacttcattctcaatcacag

SEQ ID NO: 62214 - DNA, 22 bp, Artificial Sequence
  chemically synthesized
cattctcaatcacagggagctg

SEQ ID NO: 62215 - DNA, 22 bp, Artificial Sequence
  chemically synthesized
attctcaatcacagggagctgg

SEQ ID NO: 62216 - DNA, 22 bp, Artificial Sequence
  chemically synthesized
tcaatcacagggagctgggctt

SEQ ID NO: 62217 - DNA, 22 bp, Artificial Sequence
  chemically synthesized
aatcacagggagctgggcttcc

SEQ ID NO: 62218 - DNA, 22 bp, Artificial Sequence
  chemically synthesized
ggcttccttgagaaagccagcc

SEQ ID NO: 62219 - DNA, 22 bp, Artificial Sequence
  chemically synthesized
ccttgagaaagccagccccaaa

SEQ ID NO: 62220 - DNA, 22 bp, Artificial Sequence
  chemically synthesized
cttgagaaagccagccccaaag

SEQ ID NO: 62221 - DNA, 22 bp, Artificial Sequence
  chemically synthesized
gagaaagccagccccaaaggta

SEQ ID NO: 62222 - DNA, 22 bp, Artificial Sequence
  chemically synthesized
agaaagccagccccaaaggtac

SEQ ID NO: 62223 - DNA, 22 bp, Artificial Sequence
  chemically synthesized
tgtttaaaaagatgaaagaaat

SEQ ID NO: 62224 - DNA, 22 bp, Artificial Sequence
  chemically synthesized
aaaaagatgaaagaaatggtaa

SEQ ID NO: 62225 - DNA, 22 bp, Artificial Sequence
  chemically synthesized
aaaagatgaaagaaatggtaac

SEQ ID NO: 62226 - DNA, 22 bp, Artificial Sequence
  chemically synthesized
cgtccacaacatgttcacaagg

SEQ ID NO: 62227 - DNA, 22 bp, Artificial Sequence
  chemically synthesized
acaaggaaactccagaagaaca

SEQ ID NO: 62228 - DNA, 22 bp, Artificial Sequence
  chemically synthesized
cagaagaacagagcagtggtga

SEQ ID NO: 62229 - DNA, 22 bp, Artificial Sequence
  chemically synthesized
ctgtctgtccgtgaggctgtag

SEQ ID NO: 62230 - DNA, 22 bp, Artificial Sequence
  chemically synthesized
tctgtccgtgaggctgtagaac

SEQ ID NO: 62231 - DNA, 22 bp, Artificial Sequence
  chemically synthesized
tccgtgaggctgtagaacacaa

SEQ ID NO: 62232 - DNA, 22 bp, Artificial Sequence
  chemically synthesized
tagaacacaaggcagctcccaa

SEQ ID NO: 62233 - DNA, 22 bp, Artificial Sequence
  chemically synthesized
ccaatgctgccagactctctga

SEQ ID NO: 62234 - DNA, 22 bp, Artificial Sequence
  chemically synthesized
ccagactctctgaaccctggag

SEQ ID NO: 62235 - DNA, 22 bp, Artificial Sequence
  chemically synthesized
tctgaaccctggagagtgtaaa

SEQ ID NO: 62236 - DNA, 22 bp, Artificial Sequence
  chemically synthesized
tgaaccctggagagtgtaaacg

SEQ ID NO: 62237 - DNA, 22 bp, Artificial Sequence
  chemically synthesized
aaccctggagagtgtaaacgtc

SEQ ID NO: 62238 - DNA, 22 bp, Artificial Sequence
  chemically synthesized
gagagtgtaaacgtcatataag

SEQ ID NO: 62239 - DNA, 22 bp, Artificial Sequence
  chemically synthesized
tgttccaaaaacctggatttaa

SEQ ID NO: 62240 - DNA, 22 bp, Artificial Sequence
  chemically synthesized
caaaaacctggatttaacaatc

SEQ ID NO: 62241 - DNA, 22 bp, Artificial Sequence
  chemically synthesized
gatttaacaatctgagctttgt

SEQ ID NO: 62242 - DNA, 22 bp, Artificial Sequence
  chemically synthesized
aacaatctgagctttgtcatgg

SEQ ID NO: 62243 - DNA, 22 bp, Artificial Sequence
  chemically synthesized
acaatctgagctttgtcatggt

SEQ ID NO: 62244 - DNA, 22 bp, Artificial Sequence
  chemically synthesized
agctttgtcatggtgctttgcg

SEQ ID NO: 62245 - DNA, 22 bp, Artificial Sequence
  chemically synthesized
tgtcatggtgctttgcggttgg

SEQ ID NO: 62246 - DNA, 22 bp, Artificial Sequence
  chemically synthesized
gtcatggtgctttgcggttggt

SEQ ID NO: 62247 - DNA, 22 bp, Artificial Sequence
  chemically synthesized
tcatggtgctttgcggttggtt

SEQ ID NO: 62248 - DNA, 22 bp, Artificial Sequence
  chemically synthesized
tgcggttggttgttgtttcttt

SEQ ID NO: 62249 - DNA, 22 bp, Artificial Sequence
  chemically synthesized
gcggttggttgttgtttcttta

SEQ ID NO: 62250 - DNA, 22 bp, Artificial Sequence
  chemically synthesized
cggttggttgttgtttctttac

SEQ ID NO: 62251 - DNA, 22 bp, Artificial Sequence
  chemically synthesized
gttgttgtttctttaccttttt

SEQ ID NO: 62252 - DNA, 22 bp, Artificial Sequence
  chemically synthesized
ttgtttctttacctttttcttt

SEQ ID NO: 62253 - DNA, 22 bp, Artificial Sequence
  chemically synthesized
tttctttacctttttctttgct

SEQ ID NO: 62254 - DNA, 22 bp, Artificial Sequence
  chemically synthesized
ctttacctttttctttgctttt

SEQ ID NO: 62255 - DNA, 22 bp, Artificial Sequence
  chemically synthesized
tttacctttttctttgctttta

SEQ ID NO: 62256 - DNA, 22 bp, Artificial Sequence
  chemically synthesized
tacctttttctttgcttttaaa

SEQ ID NO: 62257 - DNA, 22 bp, Artificial Sequence
  chemically synthesized
acctttttctttgcttttaaaa

SEQ ID NO: 62258 - DNA, 22 bp, Artificial Sequence
  chemically synthesized
cctttttctttgcttttaaaac

SEQ ID NO: 62259 - DNA, 22 bp, Artificial Sequence
  chemically synthesized
tttctttgcttttaaaaccata

SEQ ID NO: 62260 - DNA, 22 bp, Artificial Sequence
  chemically synthesized
ttctttgcttttaaaaccataa

SEQ ID NO: 62261 - DNA, 22 bp, Artificial Sequence
  chemically synthesized
tctttgcttttaaaaccataaa

SEQ ID NO: 62262 - DNA, 22 bp, Artificial Sequence
  chemically synthesized
ctttgcttttaaaaccataaag

SEQ ID NO: 62263 - DNA, 22 bp, Artificial Sequence
  chemically synthesized
tttgcttttaaaaccataaaga

SEQ ID NO: 62264 - DNA, 22 bp, Artificial Sequence
  chemically synthesized
tgcttttaaaaccataaagaat

SEQ ID NO: 62265 - DNA, 22 bp, Artificial Sequence
  chemically synthesized
gcttttaaaaccataaagaata

SEQ ID NO: 62266 - DNA, 22 bp, Artificial Sequence
  chemically synthesized
cttttaaaaccataaagaataa

SEQ ID NO: 62267 - DNA, 22 bp, Artificial Sequence
  chemically synthesized
ttaaaaccataaagaataatgt

SEQ ID NO: 62268 - DNA, 22 bp, Artificial Sequence
  chemically synthesized
taaaaccataaagaataatgtt

SEQ ID NO: 62269 - DNA, 22 bp, Artificial Sequence
  chemically synthesized
aaaaccataaagaataatgttt

SEQ ID NO: 62270 - DNA, 22 bp, Artificial Sequence
  chemically synthesized
aaaccataaagaataatgttta

SEQ ID NO: 62271 - DNA, 22 bp, Artificial Sequence
  chemically synthesized
aaatgtagagtctgagaaatgc

SEQ ID NO: 62272 - DNA, 22 bp, Artificial Sequence
  chemically synthesized
aatgtagagtctgagaaatgca

SEQ ID NO: 62273 - DNA, 22 bp, Artificial Sequence
  chemically synthesized
agaaatgcaattgctattgttt

SEQ ID NO: 62274 - DNA, 22 bp, Artificial Sequence
  chemically synthesized
ctattgtttttatattttcaga

SEQ ID NO: 62275 - DNA, 22 bp, Artificial Sequence
  chemically synthesized
ttgtttttatattttcagactt

SEQ ID NO: 62276 - DNA, 22 bp, Artificial Sequence
  chemically synthesized
tttttatattttcagacttttt

SEQ ID NO: 62277 - DNA, 22 bp, Artificial Sequence
  chemically synthesized
ttatattttcagactttttgta

SEQ ID NO: 62278 - DNA, 22 bp, Artificial Sequence
  chemically synthesized
tatattttcagactttttgtat

SEQ ID NO: 62279 - DNA, 22 bp, Artificial Sequence
  chemically synthesized
atattttcagactttttgtatg

SEQ ID NO: 62280 - DNA, 22 bp, Artificial Sequence
  chemically synthesized
tattttcagactttttgtatgc

SEQ ID NO: 62281 - DNA, 22 bp, Artificial Sequence
  chemically synthesized
tcagactttttgtatgcttctt

SEQ ID NO: 62282 - DNA, 22 bp, Artificial Sequence
  chemically synthesized
cagactttttgtatgcttcttt

SEQ ID NO: 62283 - DNA, 22 bp, Artificial Sequence
  chemically synthesized
agactttttgtatgcttctttc

SEQ ID NO: 62284 - DNA, 22 bp, Artificial Sequence
  chemically synthesized
tttgtatgcttctttcactaat

SEQ ID NO: 62285 - DNA, 22 bp, Artificial Sequence
  chemically synthesized
ttgtatgcttctttcactaatt

SEQ ID NO: 62286 - DNA, 22 bp, Artificial Sequence
  chemically synthesized
tgtatgcttctttcactaatta

SEQ ID NO: 62287 - DNA, 22 bp, Artificial Sequence
  chemically synthesized
gtatgcttctttcactaattac

SEQ ID NO: 62288 - DNA, 22 bp, Artificial Sequence
  chemically synthesized
tatgcttctttcactaattaca

SEQ ID NO: 62289 - DNA, 22 bp, Artificial Sequence
  chemically synthesized
ctttcactaattacatcatatc

SEQ ID NO: 62290 - DNA, 22 bp, Artificial Sequence
  chemically synthesized
tttcactaattacatcatatca

SEQ ID NO: 62291 - DNA, 22 bp, Artificial Sequence
  chemically synthesized
tcactaattacatcatatcaca

SEQ ID NO: 62292 - DNA, 22 bp, Artificial Sequence
  chemically synthesized
cactaattacatcatatcacaa

SEQ ID NO: 62293 - DNA, 22 bp, Artificial Sequence
  chemically synthesized
actaattacatcatatcacaaa

SEQ ID NO: 62294 - DNA, 22 bp, Artificial Sequence
  chemically synthesized
attacatcatatcacaaaattt

SEQ ID NO: 62295 - DNA, 22 bp, Artificial Sequence
  chemically synthesized
catcatatcacaaaatttcaca

SEQ ID NO: 62296 - DNA, 22 bp, Artificial Sequence
  chemically synthesized
cacaccctgattttttcactca

SEQ ID NO: 62297 - DNA, 22 bp, Artificial Sequence
  chemically synthesized
acaccctgattttttcactcaa

SEQ ID NO: 62298 - DNA, 22 bp, Artificial Sequence
  chemically synthesized
attttttcactcaacattacat

SEQ ID NO: 62299 - DNA, 22 bp, Artificial Sequence
  chemically synthesized
tttcactcaacattacataatg

SEQ ID NO: 62300 - DNA, 22 bp, Artificial Sequence
  chemically synthesized
ttcactcaacattacataatga

SEQ ID NO: 62301 - DNA, 22 bp, Artificial Sequence
  chemically synthesized
tcactcaacattacataatgag

SEQ ID NO: 62302 - DNA, 22 bp, Artificial Sequence
  chemically synthesized
cactcaacattacataatgagt

SEQ ID NO: 62303 - DNA, 22 bp, Artificial Sequence
  chemically synthesized
actcaacattacataatgagtt

SEQ ID NO: 62304 - DNA, 22 bp, Artificial Sequence
  chemically synthesized
aacattacataatgagttttgt

SEQ ID NO: 62305 - DNA, 22 bp, Artificial Sequence
  chemically synthesized
cataatgagttttgtatagtgc

SEQ ID NO: 62306 - DNA, 22 bp, Artificial Sequence
  chemically synthesized
tgtatagtgctatgatcttcat

SEQ ID NO: 62307 - DNA, 22 bp, Artificial Sequence
  chemically synthesized
gtatagtgctatgatcttcata

SEQ ID NO: 62308 - DNA, 22 bp, Artificial Sequence
  chemically synthesized
tatagtgctatgatcttcataa

SEQ ID NO: 62309 - DNA, 22 bp, Artificial Sequence
  chemically synthesized
tgatcttcataactaatatttt

SEQ ID NO: 62310 - DNA, 22 bp, Artificial Sequence
  chemically synthesized
cataactaatattttaaaggag

SEQ ID NO: 62311 - DNA, 22 bp, Artificial Sequence
  chemically synthesized
ataactaatattttaaaggaga

SEQ ID NO: 62312 - DNA, 22 bp, Artificial Sequence
  chemically synthesized
atattttaaaggagagctactg

SEQ ID NO: 62313 - DNA, 22 bp, Artificial Sequence
  chemically synthesized
taaaggagagctactgattaat

SEQ ID NO: 62314 - DNA, 22 bp, Artificial Sequence
  chemically synthesized
aaaggagagctactgattaatg

SEQ ID NO: 62315 - DNA, 22 bp, Artificial Sequence
  chemically synthesized
aaggagagctactgattaatga

SEQ ID NO: 62316 - DNA, 22 bp, Artificial Sequence
  chemically synthesized
ctgattaatgagcatgaggttt

SEQ ID NO: 62317 - DNA, 22 bp, Artificial Sequence
  chemically synthesized
attaatgagcatgaggtttcct

SEQ ID NO: 62318 - DNA, 22 bp, Artificial Sequence
  chemically synthesized
atgagcatgaggtttcctttgg

SEQ ID NO: 62319 - DNA, 22 bp, Artificial Sequence
  chemically synthesized
cctttggggatgaggaaaatat

SEQ ID NO: 62320 - DNA, 22 bp, Artificial Sequence
  chemically synthesized
ctttggggatgaggaaaatatt

SEQ ID NO: 62321 - DNA, 22 bp, Artificial Sequence
  chemically synthesized
tggggatgaggaaaatattctg

SEQ ID NO: 62322 - DNA, 22 bp, Artificial Sequence
  chemically synthesized
ggggatgaggaaaatattctgg

SEQ ID NO: 62323 - DNA, 22 bp, Artificial Sequence
  chemically synthesized
gggatgaggaaaatattctgga

SEQ ID NO: 62324 - DNA, 22 bp, Artificial Sequence
  chemically synthesized
tggaaatatgatgatggttgca

SEQ ID NO: 62325 - DNA, 22 bp, Artificial Sequence
  chemically synthesized
gaaatatgatgatggttgcaca

SEQ ID NO: 62326 - DNA, 22 bp, Artificial Sequence
  chemically synthesized
cacaccactgtgaatgtactaa

SEQ ID NO: 62327 - DNA, 22 bp, Artificial Sequence
  chemically synthesized
tgaatgtactaaatgccacttg

SEQ ID NO: 62328 - DNA, 22 bp, Artificial Sequence
  chemically synthesized
aatgccacttggtggtaccctg

SEQ ID NO: 62329 - DNA, 22 bp, Artificial Sequence
  chemically synthesized
ggtggtaccctgcaaaaatggt

SEQ ID NO: 62330 - DNA, 22 bp, Artificial Sequence
  chemically synthesized
gtggtaccctgcaaaaatggtt

SEQ ID NO: 62331 - DNA, 22 bp, Artificial Sequence
  chemically synthesized
caaaaatggttaaaatagtaac

SEQ ID NO: 62332 - DNA, 22 bp, Artificial Sequence
  chemically synthesized
aaatagtaactcttacgctgtg

SEQ ID NO: 62333 - DNA, 22 bp, Artificial Sequence
  chemically synthesized
ttacgctgtgtacattttattg

SEQ ID NO: 62334 - DNA, 22 bp, Artificial Sequence
  chemically synthesized
acgctgtgtacattttattgca

SEQ ID NO: 62335 - DNA, 22 bp, Artificial Sequence
  chemically synthesized
cgctgtgtacattttattgcaa

SEQ ID NO: 62336 - DNA, 22 bp, Artificial Sequence
  chemically synthesized
tgtacattttattgcaataaaa

SEQ ID NO: 62337 - DNA, 22 bp, Artificial Sequence
  chemically synthesized
tattgcaataaaaaagaatagt

SEQ ID NO: 62338 - DNA, 22 bp, Artificial Sequence
  chemically synthesized
attgcaataaaaaagaatagtc

SEQ ID NO: 62339 - DNA, 22 bp, Artificial Sequence
  chemically synthesized
ttgcaataaaaaagaatagtca

SEQ ID NO: 62340 - DNA, 22 bp, Artificial Sequence
  chemically synthesized
caataaaaaagaatagtcatca

SEQ ID NO: 62341 - DNA, 22 bp, Artificial Sequence
  chemically synthesized
actaagcattatcctttccagg

SEQ ID NO: 62342 - DNA, 22 bp, Artificial Sequence
  chemically synthesized
ctaagcattatcctttccaggc

SEQ ID NO: 62343 - DNA, 22 bp, Artificial Sequence
  chemically synthesized
agcattatcctttccaggcaca

SEQ ID NO: 62344 - DNA, 22 bp, Artificial Sequence
  chemically synthesized
tcctttccaggcacaagcttat

SEQ ID NO: 62345 - DNA, 22 bp, Artificial Sequence
  chemically synthesized
tccaggcacaagcttataatgt

SEQ ID NO: 62346 - DNA, 22 bp, Artificial Sequence
  chemically synthesized
ccaggcacaagcttataatgtg

SEQ ID NO: 62347 - DNA, 22 bp, Artificial Sequence
  chemically synthesized
caggcacaagcttataatgtgg

SEQ ID NO: 62348 - DNA, 22 bp, Artificial Sequence
  chemically synthesized
ataatgtggtgtatctcacttc

SEQ ID NO: 62349 - DNA, 22 bp, Artificial Sequence
  chemically synthesized
taatgtggtgtatctcacttca

SEQ ID NO: 62350 - DNA, 22 bp, Artificial Sequence
  chemically synthesized
acttcatcctcacaacagtcct

SEQ ID NO: 62351 - DNA, 22 bp, Artificial Sequence
  chemically synthesized
catcctcacaacagtcctatga

SEQ ID NO: 62352 - DNA, 22 bp, Artificial Sequence
  chemically synthesized
atcctcacaacagtcctatgaa

SEQ ID NO: 62353 - DNA, 22 bp, Artificial Sequence
  chemically synthesized
acaacagtcctatgaaacaggc

SEQ ID NO: 62354 - DNA, 22 bp, Artificial Sequence
  chemically synthesized
tgaaacaggcagttccatcact

SEQ ID NO: 62355 - DNA, 22 bp, Artificial Sequence
  chemically synthesized
catcactcctgctctacagtta

SEQ ID NO: 62356 - DNA, 22 bp, Artificial Sequence
  chemically synthesized
ctgctctacagttaaggaaact

SEQ ID NO: 62357 - DNA, 22 bp, Artificial Sequence
  chemically synthesized
ctctacagttaaggaaactgag

SEQ ID NO: 62358 - DNA, 22 bp, Artificial Sequence
  chemically synthesized
tacagttaaggaaactgaggtg

SEQ ID NO: 62359 - DNA, 22 bp, Artificial Sequence
  chemically synthesized
cagttaaggaaactgaggtgta

SEQ ID NO: 62360 - DNA, 22 bp, Artificial Sequence
  chemically synthesized
aggaaactgaggtgtaaggagg

SEQ ID NO: 62361 - DNA, 22 bp, Artificial Sequence
  chemically synthesized
aggtgtaaggaggttgtctagt

SEQ ID NO: 62362 - DNA, 22 bp, Artificial Sequence
  chemically synthesized
tctagttcaacctgagcctggg

SEQ ID NO: 62363 - DNA, 22 bp, Artificial Sequence
  chemically synthesized
gttcaacctgagcctgggtctg

SEQ ID NO: 62364 - DNA, 22 bp, Artificial Sequence
  chemically synthesized
aacctgagcctgggtctgcgga

SEQ ID NO: 62365 - DNA, 22 bp, Artificial Sequence
  chemically synthesized
agcctgggtctgcggagtcact

SEQ ID NO: 62366 - DNA, 22 bp, Artificial Sequence
  chemically synthesized
ggtctgcggagtcactgcccaa

SEQ ID NO: 62367 - DNA, 22 bp, Artificial Sequence
  chemically synthesized
cggagtcactgcccaaatgctt

SEQ ID NO: 62368 - DNA, 22 bp, Artificial Sequence
  chemically synthesized
cccaaatgcttcctccccgtgc

SEQ ID NO: 62369 - DNA, 22 bp, Artificial Sequence
  chemically synthesized
cctccccgtgcgcgttggcccc

SEQ ID NO: 62370 - DNA, 22 bp, Artificial Sequence
  chemically synthesized
ctccccgtgcgcgttggccccc

SEQ ID NO: 62371 - DNA, 22 bp, Artificial Sequence
  chemically synthesized
cccgtgcgcgttggcccccctc

SEQ ID NO: 62372 - DNA, 22 bp, Artificial Sequence
  chemically synthesized
gcccccctcttgcttccaaccc

SEQ ID NO: 62373 - DNA, 22 bp, Artificial Sequence
  chemically synthesized
ttgcttccaaccctccacatct

SEQ ID NO: 62374 - DNA, 22 bp, Artificial Sequence
  chemically synthesized
gcttccaaccctccacatcttt

SEQ ID NO: 62375 - DNA, 22 bp, Artificial Sequence
  chemically synthesized
cttccaaccctccacatctttg

SEQ ID NO: 62376 - DNA, 22 bp, Artificial Sequence
  chemically synthesized
ccaaccctccacatctttgttc

SEQ ID NO: 62377 - DNA, 22 bp, Artificial Sequence
  chemically synthesized
caaccctccacatctttgttca

SEQ ID NO: 62378 - DNA, 22 bp, Artificial Sequence
  chemically synthesized
cacatctttgttcataaagttc

SEQ ID NO: 62379 - DNA, 22 bp, Artificial Sequence
  chemically synthesized
tgttcataaagttcattcttat

SEQ ID NO: 62380 - DNA, 22 bp, Artificial Sequence
  chemically synthesized
gttcataaagttcattcttatt

SEQ ID NO: 62381 - DNA, 22 bp, Artificial Sequence
  chemically synthesized
ttcataaagttcattcttattc

SEQ ID NO: 62382 - DNA, 22 bp, Artificial Sequence
  chemically synthesized
ataaagttcattcttattcctt

SEQ ID NO: 62383 - DNA, 22 bp, Artificial Sequence
  chemically synthesized
attcttattccttaatattttc

SEQ ID NO: 62384 - DNA, 22 bp, Artificial Sequence
  chemically synthesized
ttattccttaatattttctgag

SEQ ID NO: 62385 - DNA, 22 bp, Artificial Sequence
  chemically synthesized
attccttaatattttctgagcc

SEQ ID NO: 62386 - DNA, 22 bp, Artificial Sequence
  chemically synthesized
ttccttaatattttctgagcct

SEQ ID NO: 62387 - DNA, 22 bp, Artificial Sequence
  chemically synthesized
cttaatattttctgagcctaag

SEQ ID NO: 62388 - DNA, 22 bp, Artificial Sequence
  chemically synthesized
aatattttctgagcctaagttc

SEQ ID NO: 62389 - DNA, 22 bp, Artificial Sequence
  chemically synthesized
atattttctgagcctaagttcc

SEQ ID NO: 62390 - DNA, 22 bp, Artificial Sequence
  chemically synthesized
tctgagcctaagttcccataaa

SEQ ID NO: 62391 - DNA, 22 bp, Artificial Sequence
  chemically synthesized
ctgagcctaagttcccataaat

SEQ ID NO: 62392 - DNA, 22 bp, Artificial Sequence
  chemically synthesized
tgagcctaagttcccataaatt

SEQ ID NO: 62393 - DNA, 22 bp, Artificial Sequence
  chemically synthesized
agcctaagttcccataaattat

SEQ ID NO: 62394 - DNA, 22 bp, Artificial Sequence
  chemically synthesized
agttcccataaattatatagac

SEQ ID NO: 62395 - DNA, 22 bp, Artificial Sequence
  chemically synthesized
ccataaattatatagacatatt

SEQ ID NO: 62396 - DNA, 22 bp, Artificial Sequence
  chemically synthesized
tatagacatatttctgtctccc

SEQ ID NO: 62397 - DNA, 22 bp, Artificial Sequence
  chemically synthesized
ctgtctcccaataacactgcca

SEQ ID NO: 62398 - DNA, 22 bp, Artificial Sequence
  chemically synthesized
tgtctcccaataacactgccaa

SEQ ID NO: 62399 - DNA, 22 bp, Artificial Sequence
  chemically synthesized
tctcccaataacactgccaatt

SEQ ID NO: 62400 - DNA, 22 bp, Artificial Sequence
  chemically synthesized
ccaataacactgccaatttatt

SEQ ID NO: 62401 - DNA, 22 bp, Artificial Sequence
  chemically synthesized
ccaatttattttctagaaggtt

SEQ ID NO: 62402 - DNA, 22 bp, Artificial Sequence
  chemically synthesized
attttctagaaggttatgacag

SEQ ID NO: 62403 - DNA, 22 bp, Artificial Sequence
  chemically synthesized
ttttctagaaggttatgacagt

SEQ ID NO: 62404 - DNA, 22 bp, Artificial Sequence
  chemically synthesized
tctagaaggttatgacagtgta

SEQ ID NO: 62405 - DNA, 22 bp, Artificial Sequence
  chemically synthesized
ctagaaggttatgacagtgtaa

SEQ ID NO: 62406 - DNA, 22 bp, Artificial Sequence
  chemically synthesized
tagaaggttatgacagtgtaaa

SEQ ID NO: 62407 - DNA, 22 bp, Artificial Sequence
  chemically synthesized
gaaggttatgacagtgtaaaat

SEQ ID NO: 62408 - DNA, 22 bp, Artificial Sequence
  chemically synthesized
tgacagtgtaaaatgtcactag

SEQ ID NO: 62409 - DNA, 22 bp, Artificial Sequence
  chemically synthesized
gaaaacaatcacttcaccacac

SEQ ID NO: 62410 - DNA, 22 bp, Artificial Sequence
  chemically synthesized
caccacacttgtatgagtgttc

SEQ ID NO: 62411 - DNA, 22 bp, Artificial Sequence
  chemically synthesized
accacacttgtatgagtgttca

SEQ ID NO: 62412 - DNA, 22 bp, Artificial Sequence
  chemically synthesized
gtatgagtgttcaatttttaaa

SEQ ID NO: 62413 - DNA, 22 bp, Artificial Sequence
  chemically synthesized
tatgagtgttcaatttttaaat

SEQ ID NO: 62414 - DNA, 22 bp, Artificial Sequence
  chemically synthesized
aatttttaaatattagctaatc

SEQ ID NO: 62415 - DNA, 22 bp, Artificial Sequence
  chemically synthesized
ttaaatattagctaatctaaca

SEQ ID NO: 62416 - DNA, 22 bp, Artificial Sequence
  chemically synthesized
taaatattagctaatctaacag

SEQ ID NO: 62417 - DNA, 22 bp, Artificial Sequence
  chemically synthesized
aaatattagctaatctaacagg

SEQ ID NO: 62418 - DNA, 22 bp, Artificial Sequence
  chemically synthesized
aatattagctaatctaacaggt

SEQ ID NO: 62419 - DNA, 22 bp, Artificial Sequence
  chemically synthesized
gctaatctaacaggttgaaatt

SEQ ID NO: 62420 - DNA, 22 bp, Artificial Sequence
  chemically synthesized
atctaacaggttgaaattgtcc

SEQ ID NO: 62421 - DNA, 22 bp, Artificial Sequence
  chemically synthesized
acaggttgaaattgtcctgatt

SEQ ID NO: 62422 - DNA, 22 bp, Artificial Sequence
  chemically synthesized
aaattgtcctgattcattttct

SEQ ID NO: 62423 - DNA, 22 bp, Artificial Sequence
  chemically synthesized
tcctgattcattttctaattta

SEQ ID NO: 62424 - DNA, 22 bp, Artificial Sequence
  chemically synthesized
attcattttctaatttatactt

SEQ ID NO: 62425 - DNA, 22 bp, Artificial Sequence
  chemically synthesized
attttctaatttatacttcttt

SEQ ID NO: 62426 - DNA, 22 bp, Artificial Sequence
  chemically synthesized
tctaatttatacttctttgaca

SEQ ID NO: 62427 - DNA, 22 bp, Artificial Sequence
  chemically synthesized
ctaatttatacttctttgacaa

SEQ ID NO: 62428 - DNA, 22 bp, Artificial Sequence
  chemically synthesized
taatttatacttctttgacaat

SEQ ID NO: 62429 - DNA, 22 bp, Artificial Sequence
  chemically synthesized
atttatacttctttgacaattt

SEQ ID NO: 62430 - DNA, 22 bp, Artificial Sequence
  chemically synthesized
atacttctttgacaatttggga

SEQ ID NO: 62431 - DNA, 22 bp, Artificial Sequence
  chemically synthesized
tacttctttgacaatttgggag

SEQ ID NO: 62432 - DNA, 22 bp, Artificial Sequence
  chemically synthesized
ctttgacaatttgggagagtga

SEQ ID NO: 62433 - DNA, 22 bp, Artificial Sequence
  chemically synthesized
tttgacaatttgggagagtgaa

SEQ ID NO: 62434 - DNA, 22 bp, Artificial Sequence
  chemically synthesized
tgacaatttgggagagtgaaga

SEQ ID NO: 62435 - DNA, 22 bp, Artificial Sequence
  chemically synthesized
gacaatttgggagagtgaagat

SEQ ID NO: 62436 - DNA, 22 bp, Artificial Sequence
  chemically synthesized
acaatttgggagagtgaagatt

SEQ ID NO: 62437 - DNA, 22 bp, Artificial Sequence
  chemically synthesized
gggagagtgaagattctcctgg

SEQ ID NO: 62438 - DNA, 22 bp, Artificial Sequence
  chemically synthesized
ggagagtgaagattctcctggt

SEQ ID NO: 62439 - DNA, 22 bp, Artificial Sequence
  chemically synthesized
tcctggttgtgtttattctttt

SEQ ID NO: 62440 - DNA, 22 bp, Artificial Sequence
  chemically synthesized
ctggttgtgtttattcttttgt

SEQ ID NO: 62441 - DNA, 22 bp, Artificial Sequence
  chemically synthesized
gttgtgtttattcttttgtgaa

SEQ ID NO: 62442 - DNA, 22 bp, Artificial Sequence
  chemically synthesized
tgtttattcttttgtgaaaaac

SEQ ID NO: 62443 - DNA, 22 bp, Artificial Sequence
  chemically synthesized
attcttttgtgaaaaactgctt

SEQ ID NO: 62444 - DNA, 22 bp, Artificial Sequence
  chemically synthesized
ttcttttgtgaaaaactgcttt

SEQ ID NO: 62445 - DNA, 22 bp, Artificial Sequence
  chemically synthesized
ttttgtgaaaaactgctttatt

SEQ ID NO: 62446 - DNA, 22 bp, Artificial Sequence
  chemically synthesized
ttgtgaaaaactgctttatttt

SEQ ID NO: 62447 - DNA, 22 bp, Artificial Sequence
  chemically synthesized
tgtgaaaaactgctttattttc

SEQ ID NO: 62448 - DNA, 22 bp, Artificial Sequence
  chemically synthesized
gtgaaaaactgctttattttct

SEQ ID NO: 62449 - DNA, 22 bp, Artificial Sequence
  chemically synthesized
tgaaaaactgctttattttctt

SEQ ID NO: 62450 - DNA, 22 bp, Artificial Sequence
  chemically synthesized
ctttattttctttgccaaattc

SEQ ID NO: 62451 - DNA, 22 bp, Artificial Sequence
  chemically synthesized
tattttctttgccaaattcaaa

SEQ ID NO: 62452 - DNA, 22 bp, Artificial Sequence
  chemically synthesized
attttctttgccaaattcaaat

SEQ ID NO: 62453 - DNA, 22 bp, Artificial Sequence
  chemically synthesized
ttttctttgccaaattcaaata

SEQ ID NO: 62454 - DNA, 22 bp, Artificial Sequence
  chemically synthesized
tctttgccaaattcaaatagaa

SEQ ID NO: 62455 - DNA, 22 bp, Artificial Sequence
  chemically synthesized
ctttgccaaattcaaatagaac

SEQ ID NO: 62456 - DNA, 22 bp, Artificial Sequence
  chemically synthesized
tttgccaaattcaaatagaacg

SEQ ID NO: 62457 - DNA, 22 bp, Artificial Sequence
  chemically synthesized
tgccaaattcaaatagaacggt

SEQ ID NO: 62458 - DNA, 22 bp, Artificial Sequence
  chemically synthesized
gccaaattcaaatagaacggtt

SEQ ID NO: 62459 - DNA, 22 bp, Artificial Sequence
  chemically synthesized
ccaaattcaaatagaacggttg

SEQ ID NO: 62460 - DNA, 22 bp, Artificial Sequence
  chemically synthesized
aaatagaacggttgcaaaattg

SEQ ID NO: 62461 - DNA, 22 bp, Artificial Sequence
  chemically synthesized
caaaattgccagaggaaatgct

SEQ ID NO: 62462 - DNA, 22 bp, Artificial Sequence
  chemically synthesized
ccagaggaaatgctgtttttcc

SEQ ID NO: 62463 - DNA, 22 bp, Artificial Sequence
  chemically synthesized
tttttccagatggacacaccca

SEQ ID NO: 62464 - DNA, 22 bp, Artificial Sequence
  chemically synthesized
ttccagatggacacacccaggg

SEQ ID NO: 62465 - DNA, 22 bp, Artificial Sequence
  chemically synthesized
tccagatggacacacccaggga

SEQ ID NO: 62466 - DNA, 22 bp, Artificial Sequence
  chemically synthesized
ccagatggacacacccagggat

SEQ ID NO: 62467 - DNA, 22 bp, Artificial Sequence
  chemically synthesized
cagatggacacacccagggatg

SEQ ID NO: 62468 - DNA, 22 bp, Artificial Sequence
  chemically synthesized
cagtgttctcacaaataatcca

SEQ ID NO: 62469 - DNA, 22 bp, Artificial Sequence
  chemically synthesized
agtgttctcacaaataatccag

SEQ ID NO: 62470 - DNA, 22 bp, Artificial Sequence
  chemically synthesized
tcacaaataatccagttttcta

SEQ ID NO: 62471 - DNA, 22 bp, Artificial Sequence
  chemically synthesized
acaaataatccagttttctaat

SEQ ID NO: 62472 - DNA, 22 bp, Artificial Sequence
  chemically synthesized
tctaattttgcaagcccagctt

SEQ ID NO: 62473 - DNA, 22 bp, Artificial Sequence
  chemically synthesized
ctaattttgcaagcccagcttt

SEQ ID NO: 62474 - DNA, 22 bp, Artificial Sequence
  chemically synthesized
taattttgcaagcccagctttc

SEQ ID NO: 62475 - DNA, 22 bp, Artificial Sequence
  chemically synthesized
attttgcaagcccagctttcat

SEQ ID NO: 62476 - DNA, 22 bp, Artificial Sequence
  chemically synthesized
tgcaagcccagctttcattaga

SEQ ID NO: 62477 - DNA, 22 bp, Artificial Sequence
  chemically synthesized
gcaagcccagctttcattagaa

SEQ ID NO: 62478 - DNA, 22 bp, Artificial Sequence
  chemically synthesized
caagcccagctttcattagaat

SEQ ID NO: 62479 - DNA, 22 bp, Artificial Sequence
  chemically synthesized
tcattagaattttgcaaaaatc

SEQ ID NO: 62480 - DNA, 22 bp, Artificial Sequence
  chemically synthesized
cattagaattttgcaaaaatcc

SEQ ID NO: 62481 - DNA, 22 bp, Artificial Sequence
  chemically synthesized
attagaattttgcaaaaatcct

SEQ ID NO: 62482 - DNA, 22 bp, Artificial Sequence
  chemically synthesized
gaattttgcaaaaatccttgct

SEQ ID NO: 62483 - DNA, 22 bp, Artificial Sequence
  chemically synthesized
tgcaaaaatccttgctttgcga

SEQ ID NO: 62484 - DNA, 22 bp, Artificial Sequence
  chemically synthesized
gcaaaaatccttgctttgcgag

SEQ ID NO: 62485 - DNA, 22 bp, Artificial Sequence
  chemically synthesized
caaaaatccttgctttgcgagc

SEQ ID NO: 62486 - DNA, 22 bp, Artificial Sequence
  chemically synthesized
gctttgcgagcatggcacaggc

SEQ ID NO: 62487 - DNA, 22 bp, Artificial Sequence
  chemically synthesized
ctttgcgagcatggcacaggca

SEQ ID NO: 62488 - DNA, 22 bp, Artificial Sequence
  chemically synthesized
tgcgagcatggcacaggcaaga

SEQ ID NO: 62489 - DNA, 22 bp, Artificial Sequence
  chemically synthesized
gcgagcatggcacaggcaagag

SEQ ID NO: 62490 - DNA, 22 bp, Artificial Sequence
  chemically synthesized
cgagcatggcacaggcaagaga

SEQ ID NO: 62491 - DNA, 22 bp, Artificial Sequence
  chemically synthesized
tctctttcttcccccagagcct

SEQ ID NO: 62492 - DNA, 22 bp, Artificial Sequence
  chemically synthesized
tctttcttcccccagagccttt

SEQ ID NO: 62493 - DNA, 22 bp, Artificial Sequence
  chemically synthesized
tttcttcccccagagcctttga

SEQ ID NO: 62494 - DNA, 22 bp, Artificial Sequence
  chemically synthesized
tcttcccccagagcctttgact

SEQ ID NO: 62495 - DNA, 22 bp, Artificial Sequence
  chemically synthesized
cttcccccagagcctttgactg

SEQ ID NO: 62496 - DNA, 22 bp, Artificial Sequence
  chemically synthesized
ttcccccagagcctttgactgc

SEQ ID NO: 62497 - DNA, 22 bp, Artificial Sequence
  chemically synthesized
cccccagagcctttgactgcac

SEQ ID NO: 62498 - DNA, 22 bp, Artificial Sequence
  chemically synthesized
ccccagagcctttgactgcact

SEQ ID NO: 62499 - DNA, 22 bp, Artificial Sequence
  chemically synthesized
tgactgcacttagatcattgac

SEQ ID NO: 62500 - DNA, 22 bp, Artificial Sequence
  chemically synthesized
gactgcacttagatcattgact

SEQ ID NO: 62501 - DNA, 22 bp, Artificial Sequence
  chemically synthesized
actgcacttagatcattgactt

SEQ ID NO: 62502 - DNA, 22 bp, Artificial Sequence
  chemically synthesized
cacttagatcattgactttggt

SEQ ID NO: 62503 - DNA, 22 bp, Artificial Sequence
  chemically synthesized
agatcattgactttggttcaga

SEQ ID NO: 62504 - DNA, 22 bp, Artificial Sequence
  chemically synthesized
gatcattgactttggttcagaa

SEQ ID NO: 62505 - DNA, 22 bp, Artificial Sequence
  chemically synthesized
actttggttcagaaacctgact

SEQ ID NO: 62506 - DNA, 22 bp, Artificial Sequence
  chemically synthesized
tggttcagaaacctgactgcat

SEQ ID NO: 62507 - DNA, 22 bp, Artificial Sequence
  chemically synthesized
ggttcagaaacctgactgcatc

SEQ ID NO: 62508 - DNA, 22 bp, Artificial Sequence
  chemically synthesized
gttcagaaacctgactgcatct

SEQ ID NO: 62509 - DNA, 22 bp, Artificial Sequence
  chemically synthesized
agaaacctgactgcatctggag

SEQ ID NO: 62510 - DNA, 22 bp, Artificial Sequence
  chemically synthesized
actgcatctggagttgacatga

SEQ ID NO: 62511 - DNA, 22 bp, Artificial Sequence
  chemically synthesized
catctggagttgacatgagcag

SEQ ID NO: 62512 - DNA, 22 bp, Artificial Sequence
  chemically synthesized
gagttgacatgagcagcatgga

SEQ ID NO: 62513 - DNA, 22 bp, Artificial Sequence
  chemically synthesized
acatgagcagcatggaagatgt

SEQ ID NO: 62514 - DNA, 22 bp, Artificial Sequence
  chemically synthesized
gtcccagcacctcactccagag

SEQ ID NO: 62515 - DNA, 22 bp, Artificial Sequence
  chemically synthesized
tcccagcacctcactccagagg

SEQ ID NO: 62516 - DNA, 22 bp, Artificial Sequence
  chemically synthesized
actccagaggccagctcagctc

SEQ ID NO: 62517 - DNA, 22 bp, Artificial Sequence
  chemically synthesized
cagaggccagctcagctcaatc

SEQ ID NO: 62518 - DNA, 22 bp, Artificial Sequence
  chemically synthesized
agctcaatctgggcagagctgc

SEQ ID NO: 62519 - DNA, 22 bp, Artificial Sequence
  chemically synthesized
aatctgggcagagctgcatgat

SEQ ID NO: 62520 - DNA, 22 bp, Artificial Sequence
  chemically synthesized
ggcagagctgcatgatggaagt

SEQ ID NO: 62521 - DNA, 22 bp, Artificial Sequence
  chemically synthesized
catgatggaagtttctgactac

SEQ ID NO: 62522 - DNA, 22 bp, Artificial Sequence
  chemically synthesized
ctgactaccaagcatcgggcag

SEQ ID NO: 62523 - DNA, 22 bp, Artificial Sequence
  chemically synthesized
tgactaccaagcatcgggcaga

SEQ ID NO: 62524 - DNA, 22 bp, Artificial Sequence
  chemically synthesized
actaccaagcatcgggcagagg

SEQ ID NO: 62525 - DNA, 22 bp, Artificial Sequence
  chemically synthesized
ccaagcatcgggcagagggtgc

SEQ ID NO: 62526 - DNA, 22 bp, Artificial Sequence
  chemically synthesized
gactacatagttgtgtgaggga

SEQ ID NO: 62527 - DNA, 22 bp, Artificial Sequence
  chemically synthesized
catagttgtgtgagggagcacc

SEQ ID NO: 62528 - DNA, 22 bp, Artificial Sequence
  chemically synthesized
tgtgagggagcaccgttctcta

SEQ ID NO: 62529 - DNA, 22 bp, Artificial Sequence
  chemically synthesized
tctagaatctgctatttgagca

SEQ ID NO: 62530 - DNA, 22 bp, Artificial Sequence
  chemically synthesized
tagaatctgctatttgagcaag

SEQ ID NO: 62531 - DNA, 22 bp, Artificial Sequence
  chemically synthesized
gaatctgctatttgagcaaggc

SEQ ID NO: 62532 - DNA, 22 bp, Artificial Sequence
  chemically synthesized
ctatttgagcaaggcaaacatc

SEQ ID NO: 62533 - DNA, 22 bp, Artificial Sequence
  chemically synthesized
tttgagcaaggcaaacatcctg

SEQ ID NO: 62534 - DNA, 22 bp, Artificial Sequence
  chemically synthesized
gagcaaggcaaacatcctgata

SEQ ID NO: 62535 - DNA, 22 bp, Artificial Sequence
  chemically synthesized
agcaaggcaaacatcctgataa

SEQ ID NO: 62536 - DNA, 22 bp, Artificial Sequence
  chemically synthesized
ataatggtgaaaacctaccgca

SEQ ID NO: 62537 - DNA, 22 bp, Artificial Sequence
  chemically synthesized
ccgcaagttgccaggaaagttg

SEQ ID NO: 62538 - DNA, 22 bp, Artificial Sequence
  chemically synthesized
ccaggaaagttgatgtggtctg

SEQ ID NO: 62539 - DNA, 22 bp, Artificial Sequence
  chemically synthesized
atgtggtctgcgagtaggtgct

SEQ ID NO: 62540 - DNA, 22 bp, Artificial Sequence
  chemically synthesized
cgagtaggtgctgccatccagt

SEQ ID NO: 62541 - DNA, 22 bp, Artificial Sequence
  chemically synthesized
ccatccagtggccgacatagag

SEQ ID NO: 62542 - DNA, 22 bp, Artificial Sequence
  chemically synthesized
tgagggcaggtaggccacaggt

SEQ ID NO: 62543 - DNA, 22 bp, Artificial Sequence
  chemically synthesized
agggcaggtaggccacaggtga

SEQ ID NO: 62544 - DNA, 22 bp, Artificial Sequence
  chemically synthesized
aagccctccctgatggggcctt

SEQ ID NO: 62545 - DNA, 22 bp, Artificial Sequence
  chemically synthesized
cctgatggggccttggggagag

SEQ ID NO: 62546 - DNA, 22 bp, Artificial Sequence
  chemically synthesized
atggggccttggggagagggca

SEQ ID NO: 62547 - DNA, 22 bp, Artificial Sequence
  chemically synthesized
ggggagagggcagcagggtaag

SEQ ID NO: 62548 - DNA, 22 bp, Artificial Sequence
  chemically synthesized
gggagagggcagcagggtaagt

SEQ ID NO: 62549 - DNA, 22 bp, Artificial Sequence
  chemically synthesized
attgtggatgacgactgacctg

SEQ ID NO: 62550 - DNA, 22 bp, Artificial Sequence
  chemically synthesized
tggatgacgactgacctggaaa

SEQ ID NO: 62551 - DNA, 22 bp, Artificial Sequence
  chemically synthesized
acctggaaaatccccttggcct

SEQ ID NO: 62552 - DNA, 22 bp, Artificial Sequence
  chemically synthesized
gaaaatccccttggcctcaaca

SEQ ID NO: 62553 - DNA, 22 bp, Artificial Sequence
  chemically synthesized
ggcctcaacacctccaaactct

SEQ ID NO: 62554 - DNA, 22 bp, Artificial Sequence
  chemically synthesized
gcctcaacacctccaaactctg

SEQ ID NO: 62555 - DNA, 22 bp, Artificial Sequence
  chemically synthesized
aacacctccaaactctgcattt

SEQ ID NO: 62556 - DNA, 22 bp, Artificial Sequence
  chemically synthesized
caaactctgcatttgatccaag

SEQ ID NO: 62557 - DNA, 22 bp, Artificial Sequence
  chemically synthesized
tgcatttgatccaagtcaggga

SEQ ID NO: 62558 - DNA, 22 bp, Artificial Sequence
  chemically synthesized
catttgatccaagtcagggaac

SEQ ID NO: 62559 - DNA, 22 bp, Artificial Sequence
  chemically synthesized
gatccaagtcagggaacacctg

SEQ ID NO: 62560 - DNA, 22 bp, Artificial Sequence
  chemically synthesized
atccaagtcagggaacacctgg

SEQ ID NO: 62561 - DNA, 22 bp, Artificial Sequence
  chemically synthesized
gaaacatgaaggggagagcagg

SEQ ID NO: 62562 - DNA, 22 bp, Artificial Sequence
  chemically synthesized
tgacctccctctcagaggctga

SEQ ID NO: 62563 - DNA, 22 bp, Artificial Sequence
  chemically synthesized
gacctccctctcagaggctgag

SEQ ID NO: 62564 - DNA, 22 bp, Artificial Sequence
  chemically synthesized
acctccctctcagaggctgaga

SEQ ID NO: 62565 - DNA, 22 bp, Artificial Sequence
  chemically synthesized
cctctcagaggctgagaacgcc

SEQ ID NO: 62566 - DNA, 22 bp, Artificial Sequence
  chemically synthesized
tcagaggctgagaacgccaatt

SEQ ID NO: 62567 - DNA, 22 bp, Artificial Sequence
  chemically synthesized
agaggctgagaacgccaattga

SEQ ID NO: 62568 - DNA, 22 bp, Artificial Sequence
  chemically synthesized
agaacgccaattgacctgatgt

SEQ ID NO: 62569 - DNA, 22 bp, Artificial Sequence
  chemically synthesized
acctgatgtcattattgacatg

SEQ ID NO: 62570 - DNA, 22 bp, Artificial Sequence
  chemically synthesized
atgtcattattgacatgtagaa

SEQ ID NO: 62571 - DNA, 22 bp, Artificial Sequence
  chemically synthesized
ttgacatgtagaaaattgatga

SEQ ID NO: 62572 - DNA, 22 bp, Artificial Sequence
  chemically synthesized
acatgtagaaaattgatgaaca

SEQ ID NO: 62573 - DNA, 22 bp, Artificial Sequence
  chemically synthesized
atgaacaggcctgagttatgtt

SEQ ID NO: 62574 - DNA, 22 bp, Artificial Sequence
  chemically synthesized
agttatgttttgtggcacctca

SEQ ID NO: 62575 - DNA, 22 bp, Artificial Sequence
  chemically synthesized
tgttttgtggcacctcatggtc

SEQ ID NO: 62576 - DNA, 22 bp, Artificial Sequence
  chemically synthesized
tgtggcacctcatggtctagtt

SEQ ID NO: 62577 - DNA, 22 bp, Artificial Sequence
  chemically synthesized
gtggcacctcatggtctagtta

SEQ ID NO: 62578 - DNA, 22 bp, Artificial Sequence
  chemically synthesized
tggcacctcatggtctagttag

SEQ ID NO: 62579 - DNA, 22 bp, Artificial Sequence
  chemically synthesized
atggtctagttagtgttctgag

SEQ ID NO: 62580 - DNA, 22 bp, Artificial Sequence
  chemically synthesized
gttagtgttctgagaatcattt

SEQ ID NO: 62581 - DNA, 22 bp, Artificial Sequence
  chemically synthesized
gtgttctgagaatcattttctc

SEQ ID NO: 62582 - DNA, 22 bp, Artificial Sequence
  chemically synthesized
tgagaatcattttctcagtgga

SEQ ID NO: 62583 - DNA, 22 bp, Artificial Sequence
  chemically synthesized
agaatcattttctcagtggacc

SEQ ID NO: 62584 - DNA, 22 bp, Artificial Sequence
  chemically synthesized
tctcagtggacctgcaggtgag

SEQ ID NO: 62585 - DNA, 22 bp, Artificial Sequence
  chemically synthesized
ctcagtggacctgcaggtgaga

SEQ ID NO: 62586 - DNA, 22 bp, Artificial Sequence
  chemically synthesized
tcagtggacctgcaggtgagac

SEQ ID NO: 62587 - DNA, 22 bp, Artificial Sequence
  chemically synthesized
agtggacctgcaggtgagacca

SEQ ID NO: 62588 - DNA, 22 bp, Artificial Sequence
  chemically synthesized
caggtgagaccaggcgaggcag

SEQ ID NO: 62589 - DNA, 22 bp, Artificial Sequence
  chemically synthesized
gtgggggatggtggttagaaat

SEQ ID NO: 62590 - DNA, 22 bp, Artificial Sequence
  chemically synthesized
gaaatgtgtggatggttgtggg

SEQ ID NO: 62591 - DNA, 22 bp, Artificial Sequence
  chemically synthesized
tggggcagaagaaacagcaagt

SEQ ID NO: 62592 - DNA, 22 bp, Artificial Sequence
  chemically synthesized
tgggccagctacaaactggtta

SEQ ID NO: 62593 - DNA, 22 bp, Artificial Sequence
  chemically synthesized
ggccagctacaaactggttata

SEQ ID NO: 62594 - DNA, 22 bp, Artificial Sequence
  chemically synthesized
caaactggttatatgatgtcta

SEQ ID NO: 62595 - DNA, 22 bp, Artificial Sequence
  chemically synthesized
gttatatgatgtctactgatga

SEQ ID NO: 62596 - DNA, 22 bp, Artificial Sequence
  chemically synthesized
tatgatgtctactgatgatgat

SEQ ID NO: 62597 - DNA, 22 bp, Artificial Sequence
  chemically synthesized
ctgatgatgatagtgatggtgg

SEQ ID NO: 62598 - DNA, 22 bp, Artificial Sequence
  chemically synthesized
atgatgatagtgatggtggtgg

SEQ ID NO: 62599 - DNA, 22 bp, Artificial Sequence
  chemically synthesized
tgatggtggtggaatgatgatg

SEQ ID NO: 62600 - DNA, 22 bp, Artificial Sequence
  chemically synthesized
gtgatggtggtagtggtcgtgg

SEQ ID NO: 62601 - DNA, 22 bp, Artificial Sequence
  chemically synthesized
atggtggtggtaatgataatga

SEQ ID NO: 62602 - DNA, 22 bp, Artificial Sequence
  chemically synthesized
tcatgatgatagcggtggtgat

SEQ ID NO: 62603 - DNA, 22 bp, Artificial Sequence
  chemically synthesized
agggtgatgataatagtgacag

SEQ ID NO: 62604 - DNA, 22 bp, Artificial Sequence
  chemically synthesized
agtagtaatgatggtgatggtg

SEQ ID NO: 62605 - DNA, 22 bp, Artificial Sequence
  chemically synthesized
tggtgatgatggtggtggtagt

SEQ ID NO: 62606 - DNA, 22 bp, Artificial Sequence
  chemically synthesized
agggtgatgataatagtgatag

SEQ ID NO: 62607 - DNA, 22 bp, Artificial Sequence
  chemically synthesized
tcactattatcatcaccctcaa

SEQ ID NO: 62608 - DNA, 22 bp, Artificial Sequence
  chemically synthesized
ttatcatcaccctcaacatcat

SEQ ID NO: 62609 - DNA, 22 bp, Artificial Sequence
  chemically synthesized
tcatcaccctcaacatcatcac

SEQ ID NO: 62610 - DNA, 22 bp, Artificial Sequence
  chemically synthesized
aacatcatcaccatcatcacta

SEQ ID NO: 62611 - DNA, 22 bp, Artificial Sequence
  chemically synthesized
tcatcaccaccaccatcatcgt

SEQ ID NO: 62612 - DNA, 22 bp, Artificial Sequence
  chemically synthesized
ctaccactaccaccaccatcat

SEQ ID NO: 62613 - DNA, 22 bp, Artificial Sequence
  chemically synthesized
ccactaccaccaccatcatcac

SEQ ID NO: 62614 - DNA, 22 bp, Artificial Sequence
  chemically synthesized
ccaccaccatcatcaccacagc

SEQ ID NO: 62615 - DNA, 22 bp, Artificial Sequence
  chemically synthesized
ctactcagcaccaccatcatca

SEQ ID NO: 62616 - DNA, 22 bp, Artificial Sequence
  chemically synthesized
ctcagcaccaccatcatcattc

SEQ ID NO: 62617 - DNA, 22 bp, Artificial Sequence
  chemically synthesized
agcaccaccatcatcattccac

SEQ ID NO: 62618 - DNA, 22 bp, Artificial Sequence
  chemically synthesized
caccaccatcaccatcattcca

SEQ ID NO: 62619 - DNA, 22 bp, Artificial Sequence
  chemically synthesized
caccatcaccattatcattacc

SEQ ID NO: 62620 - DNA, 22 bp, Artificial Sequence
  chemically synthesized
tcattaccaccaccactgtcac

SEQ ID NO: 62621 - DNA, 22 bp, Artificial Sequence
  chemically synthesized
ccaccaccactgtcactattat

SEQ ID NO: 62622 - DNA, 22 bp, Artificial Sequence
  chemically synthesized
tcactattatcatcaccctcaa

SEQ ID NO: 62623 - DNA, 22 bp, Artificial Sequence
  chemically synthesized
ttatcatcaccctcaacatcat

SEQ ID NO: 62624 - DNA, 22 bp, Artificial Sequence
  chemically synthesized
tcatcaccctcaacatcatcac

SEQ ID NO: 62625 - DNA, 22 bp, Artificial Sequence
  chemically synthesized
aacatcatcaccaccaccatca

SEQ ID NO: 62626 - DNA, 22 bp, Artificial Sequence
  chemically synthesized
ctaccaccaccaccaccatcac

SEQ ID NO: 62627 - DNA, 22 bp, Artificial Sequence
  chemically synthesized
ccaccaccaccaccatcaccat

SEQ ID NO: 62628 - DNA, 22 bp, Artificial Sequence
  chemically synthesized
taccaccatcaccattatcatc

SEQ ID NO: 62629 - DNA, 22 bp, Artificial Sequence
  chemically synthesized
ccaccatcaccattatcatcac

SEQ ID NO: 62630 - DNA, 22 bp, Artificial Sequence
  chemically synthesized
tcatcaccatcaccatcaccac

SEQ ID NO: 62631 - DNA, 22 bp, Artificial Sequence
  chemically synthesized
tcatcatgataatcattatcat

SEQ ID NO: 62632 - DNA, 22 bp, Artificial Sequence
  chemically synthesized
tcattaccaccaccattagcat

SEQ ID NO: 62633 - DNA, 22 bp, Artificial Sequence
  chemically synthesized
ccaccaccattagcattatcat

SEQ ID NO: 62634 - DNA, 22 bp, Artificial Sequence
  chemically synthesized
gcattatcattaccaccaccat

SEQ ID NO: 62635 - DNA, 22 bp, Artificial Sequence
  chemically synthesized
tcattaccaccaccatcactat

SEQ ID NO: 62636 - DNA, 22 bp, Artificial Sequence
  chemically synthesized
ccaccaccatcactatcactat

SEQ ID NO: 62637 - DNA, 22 bp, Artificial Sequence
  chemically synthesized
tcactatcaccatcaccacgac

SEQ ID NO: 62638 - DNA, 22 bp, Artificial Sequence
  chemically synthesized
tcaccatcaccacgaccactac

SEQ ID NO: 62639 - DNA, 22 bp, Artificial Sequence
  chemically synthesized
ccaccatcaccaacaccatcat

SEQ ID NO: 62640 - DNA, 22 bp, Artificial Sequence
  chemically synthesized
ctacccaccaccaccatcatca

SEQ ID NO: 62641 - DNA, 22 bp, Artificial Sequence
  chemically synthesized
cccaccaccaccatcatcatca

SEQ ID NO: 62642 - DNA, 22 bp, Artificial Sequence
  chemically synthesized
caccaccatcacaattattacc

SEQ ID NO: 62643 - DNA, 22 bp, Artificial Sequence
  chemically synthesized
ttaccaccaccaccatcaccac

SEQ ID NO: 62644 - DNA, 22 bp, Artificial Sequence
  chemically synthesized
ccaccaccaccatcaccaccac

SEQ ID NO: 62645 - DNA, 22 bp, Artificial Sequence
  chemically synthesized
tcatcatcagtagacatcatat

SEQ ID NO: 62646 - DNA, 22 bp, Artificial Sequence
  chemically synthesized
gtagctggcccagagcctactt

SEQ ID NO: 62647 - DNA, 22 bp, Artificial Sequence
  chemically synthesized
tagctggcccagagcctacttg

SEQ ID NO: 62648 - DNA, 22 bp, Artificial Sequence
  chemically synthesized
gcccagagcctacttgctgttt

SEQ ID NO: 62649 - DNA, 22 bp, Artificial Sequence
  chemically synthesized
cttgctgtttcttctgccccac

SEQ ID NO: 62650 - DNA, 22 bp, Artificial Sequence
  chemically synthesized
gctgtttcttctgccccacaac

SEQ ID NO: 62651 - DNA, 22 bp, Artificial Sequence
  chemically synthesized
ctgtttcttctgccccacaacc

SEQ ID NO: 62652 - DNA, 22 bp, Artificial Sequence
  chemically synthesized
tttcttctgccccacaaccatc

SEQ ID NO: 62653 - DNA, 22 bp, Artificial Sequence
  chemically synthesized
cttctgccccacaaccatccac

SEQ ID NO: 62654 - DNA, 22 bp, Artificial Sequence
  chemically synthesized
ttctgccccacaaccatccaca

SEQ ID NO: 62655 - DNA, 22 bp, Artificial Sequence
  chemically synthesized
ctgccccacaaccatccacaca

SEQ ID NO: 62656 - DNA, 22 bp, Artificial Sequence
  chemically synthesized
tgccccacaaccatccacacat

SEQ ID NO: 62657 - DNA, 22 bp, Artificial Sequence
  chemically synthesized
ccccacaaccatccacacattt

SEQ ID NO: 62658 - DNA, 22 bp, Artificial Sequence
  chemically synthesized
ctaaccaccatcccccactagg

SEQ ID NO: 62659 - DNA, 22 bp, Artificial Sequence
  chemically synthesized
taaccaccatcccccactaggc

SEQ ID NO: 62660 - DNA, 22 bp, Artificial Sequence
  chemically synthesized
accaccatcccccactaggctt

SEQ ID NO: 62661 - DNA, 22 bp, Artificial Sequence
  chemically synthesized
ggcttctgcctcgcctggtctc

SEQ ID NO: 62662 - DNA, 22 bp, Artificial Sequence
  chemically synthesized
ctgcctcgcctggtctcacctg

SEQ ID NO: 62663 - DNA, 22 bp, Artificial Sequence
  chemically synthesized
tgcctcgcctggtctcacctgc

SEQ ID NO: 62664 - DNA, 22 bp, Artificial Sequence
  chemically synthesized
cctcgcctggtctcacctgcag

SEQ ID NO: 62665 - DNA, 22 bp, Artificial Sequence
  chemically synthesized
gcctggtctcacctgcaggtcc

SEQ ID NO: 62666 - DNA, 22 bp, Artificial Sequence
  chemically synthesized
gtctcacctgcaggtccactga

SEQ ID NO: 62667 - DNA, 22 bp, Artificial Sequence
  chemically synthesized
acctgcaggtccactgagaaaa

SEQ ID NO: 62668 - DNA, 22 bp, Artificial Sequence
  chemically synthesized
caggtccactgagaaaatgatt

SEQ ID NO: 62669 - DNA, 22 bp, Artificial Sequence
  chemically synthesized
agaaaatgattctcagaacact

SEQ ID NO: 62670 - DNA, 22 bp, Artificial Sequence
  chemically synthesized
tcagaacactaactagaccatg

SEQ ID NO: 62671 - DNA, 22 bp, Artificial Sequence
  chemically synthesized
agaacactaactagaccatgag

SEQ ID NO: 62672 - DNA, 22 bp, Artificial Sequence
  chemically synthesized
actagaccatgaggtgccacaa

SEQ ID NO: 62673 - DNA, 22 bp, Artificial Sequence
  chemically synthesized
gaccatgaggtgccacaaaaca

SEQ ID NO: 62674 - DNA, 22 bp, Artificial Sequence
  chemically synthesized
aggcctgttcatcaattttcta

SEQ ID NO: 62675 - DNA, 22 bp, Artificial Sequence
  chemically synthesized
ttcatcaattttctacatgtca

SEQ ID NO: 62676 - DNA, 22 bp, Artificial Sequence
  chemically synthesized
atcaattttctacatgtcaata

SEQ ID NO: 62677 - DNA, 22 bp, Artificial Sequence
  chemically synthesized
tctacatgtcaataatgacatc

SEQ ID NO: 62678 - DNA, 22 bp, Artificial Sequence
  chemically synthesized
ctacatgtcaataatgacatca

SEQ ID NO: 62679 - DNA, 22 bp, Artificial Sequence
  chemically synthesized
tacatgtcaataatgacatcag

SEQ ID NO: 62680 - DNA, 22 bp, Artificial Sequence
  chemically synthesized
catgtcaataatgacatcaggt

SEQ ID NO: 62681 - DNA, 22 bp, Artificial Sequence
  chemically synthesized
gcgttctcagcctctgagaggg

SEQ ID NO: 62682 - DNA, 22 bp, Artificial Sequence
  chemically synthesized
tcagcctctgagagggaggtca

SEQ ID NO: 62683 - DNA, 22 bp, Artificial Sequence
  chemically synthesized
agcctctgagagggaggtcaaa

SEQ ID NO: 62684 - DNA, 22 bp, Artificial Sequence
  chemically synthesized
tgagagggaggtcaaagttttc

SEQ ID NO: 62685 - DNA, 22 bp, Artificial Sequence
  chemically synthesized
agagggaggtcaaagttttcct

SEQ ID NO: 62686 - DNA, 22 bp, Artificial Sequence
  chemically synthesized
tcctgctctccccttcatgttt

SEQ ID NO: 62687 - DNA, 22 bp, Artificial Sequence
  chemically synthesized
cctgctctccccttcatgtttc

SEQ ID NO: 62688 - DNA, 22 bp, Artificial Sequence
  chemically synthesized
ctgctctccccttcatgtttcc

SEQ ID NO: 62689 - DNA, 22 bp, Artificial Sequence
  chemically synthesized
ctctccccttcatgtttccagg

SEQ ID NO: 62690 - DNA, 22 bp, Artificial Sequence
  chemically synthesized
tccccttcatgtttccaggtgt

SEQ ID NO: 62691 - DNA, 22 bp, Artificial Sequence
  chemically synthesized
cccttcatgtttccaggtgttc

SEQ ID NO: 62692 - DNA, 22 bp, Artificial Sequence
  chemically synthesized
catgtttccaggtgttccctga

SEQ ID NO: 62693 - DNA, 22 bp, Artificial Sequence
  chemically synthesized
atgtttccaggtgttccctgac

SEQ ID NO: 62694 - DNA, 22 bp, Artificial Sequence
  chemically synthesized
ccaggtgttccctgacttggat

SEQ ID NO: 62695 - DNA, 22 bp, Artificial Sequence
  chemically synthesized
caggtgttccctgacttggatc

SEQ ID NO: 62696 - DNA, 22 bp, Artificial Sequence
  chemically synthesized
cctgacttggatcaaatgcaga

SEQ ID NO: 62697 - DNA, 22 bp, Artificial Sequence
  chemically synthesized
acttggatcaaatgcagagttt

SEQ ID NO: 62698 - DNA, 22 bp, Artificial Sequence
  chemically synthesized
ggatcaaatgcagagtttggag

SEQ ID NO: 62699 - DNA, 22 bp, Artificial Sequence
  chemically synthesized
gatcaaatgcagagtttggagg

SEQ ID NO: 62700 - DNA, 22 bp, Artificial Sequence
  chemically synthesized
ggaggtgttgaggccaagggga

SEQ ID NO: 62701 - DNA, 22 bp, Artificial Sequence
  chemically synthesized
gaggtgttgaggccaaggggat

SEQ ID NO: 62702 - DNA, 22 bp, Artificial Sequence
  chemically synthesized
aggccaaggggattttccaggt

SEQ ID NO: 62703 - DNA, 22 bp, Artificial Sequence
  chemically synthesized
tccaggtcagtcgtcatccaca

SEQ ID NO: 62704 - DNA, 22 bp, Artificial Sequence
  chemically synthesized
ccaggtcagtcgtcatccacaa

SEQ ID NO: 62705 - DNA, 22 bp, Artificial Sequence
  chemically synthesized
caggtcagtcgtcatccacaat

SEQ ID NO: 62706 - DNA, 22 bp, Artificial Sequence
  chemically synthesized
atcctgccgctggacttaccct

SEQ ID NO: 62707 - DNA, 22 bp, Artificial Sequence
  chemically synthesized
ccgctggacttaccctgctgcc

SEQ ID NO: 62708 - DNA, 22 bp, Artificial Sequence
  chemically synthesized
gacttaccctgctgccctctcc

SEQ ID NO: 62709 - DNA, 22 bp, Artificial Sequence
  chemically synthesized
accctgctgccctctccccaag

SEQ ID NO: 62710 - DNA, 22 bp, Artificial Sequence
  chemically synthesized
ccctgctgccctctccccaagg

SEQ ID NO: 62711 - DNA, 22 bp, Artificial Sequence
  chemically synthesized
ctgccctctccccaaggcccca

SEQ ID NO: 62712 - DNA, 22 bp, Artificial Sequence
  chemically synthesized
ccctctccccaaggccccatca

SEQ ID NO: 62713 - DNA, 22 bp, Artificial Sequence
  chemically synthesized
tccccaaggccccatcagggag

SEQ ID NO: 62714 - DNA, 22 bp, Artificial Sequence
  chemically synthesized
cccaaggccccatcagggaggg

SEQ ID NO: 62715 - DNA, 22 bp, Artificial Sequence
  chemically synthesized
caatcctcttgtcacctgtggc

SEQ ID NO: 62716 - DNA, 22 bp, Artificial Sequence
  chemically synthesized
aatcctcttgtcacctgtggcc

SEQ ID NO: 62717 - DNA, 22 bp, Artificial Sequence
  chemically synthesized
ttgtcacctgtggcctacctgc

SEQ ID NO: 62718 - DNA, 22 bp, Artificial Sequence
  chemically synthesized
gtcacctgtggcctacctgccc

SEQ ID NO: 62719 - DNA, 22 bp, Artificial Sequence
  chemically synthesized
tcacctgtggcctacctgccct

SEQ ID NO: 62720 - DNA, 22 bp, Artificial Sequence
  chemically synthesized
tggcctacctgccctcagagat

SEQ ID NO: 62721 - DNA, 22 bp, Artificial Sequence
  chemically synthesized
cctgccctcagagatgacatct

SEQ ID NO: 62722 - DNA, 22 bp, Artificial Sequence
  chemically synthesized
ccctcagagatgacatctctat

SEQ ID NO: 62723 - DNA, 22 bp, Artificial Sequence
  chemically synthesized
agagatgacatctctatgtcgg

SEQ ID NO: 62724 - DNA, 22 bp, Artificial Sequence
  chemically synthesized
tatgtcggccactggatggcag

SEQ ID NO: 62725 - DNA, 22 bp, Artificial Sequence
  chemically synthesized
tgtcggccactggatggcagca

SEQ ID NO: 62726 - DNA, 22 bp, Artificial Sequence
  chemically synthesized
gatggcagcacctactcgcaga

SEQ ID NO: 62727 - DNA, 22 bp, Artificial Sequence
  chemically synthesized
ctcgcagaccacatcaactttc

SEQ ID NO: 62728 - DNA, 22 bp, Artificial Sequence
  chemically synthesized
gcagaccacatcaactttcctg

SEQ ID NO: 62729 - DNA, 22 bp, Artificial Sequence
  chemically synthesized
tcctggcaacttgcggtaggtt

SEQ ID NO: 62730 - DNA, 22 bp, Artificial Sequence
  chemically synthesized
cctggcaacttgcggtaggttt

SEQ ID NO: 62731 - DNA, 22 bp, Artificial Sequence
  chemically synthesized
ctggcaacttgcggtaggtttt

SEQ ID NO: 62732 - DNA, 22 bp, Artificial Sequence
  chemically synthesized
gcaacttgcggtaggttttcac

SEQ ID NO: 62733 - DNA, 22 bp, Artificial Sequence
  chemically synthesized
gcggtaggttttcaccattatc

SEQ ID NO: 62734 - DNA, 22 bp, Artificial Sequence
  chemically synthesized
cggtaggttttcaccattatca

SEQ ID NO: 62735 - DNA, 22 bp, Artificial Sequence
  chemically synthesized
tcaccattatcaggatgtttgc

SEQ ID NO: 62736 - DNA, 22 bp, Artificial Sequence
  chemically synthesized
caccattatcaggatgtttgcc

SEQ ID NO: 62737 - DNA, 22 bp, Artificial Sequence
  chemically synthesized
accattatcaggatgtttgcct

SEQ ID NO: 62738 - DNA, 22 bp, Artificial Sequence
  chemically synthesized
tcaggatgtttgccttgctcaa

SEQ ID NO: 62739 - DNA, 22 bp, Artificial Sequence
  chemically synthesized
gccttgctcaaatagcagattc

SEQ ID NO: 62740 - DNA, 22 bp, Artificial Sequence
  chemically synthesized
ccttgctcaaatagcagattct

SEQ ID NO: 62741 - DNA, 22 bp, Artificial Sequence
  chemically synthesized
gctcaaatagcagattctagag

SEQ ID NO: 62742 - DNA, 22 bp, Artificial Sequence
  chemically synthesized
ctcaaatagcagattctagaga

SEQ ID NO: 62743 - DNA, 22 bp, Artificial Sequence
  chemically synthesized
aaatagcagattctagagaacg

SEQ ID NO: 62744 - DNA, 22 bp, Artificial Sequence
  chemically synthesized
tagagaacggtgctccctcaca

SEQ ID NO: 62745 - DNA, 22 bp, Artificial Sequence
  chemically synthesized
gagaacggtgctccctcacaca

SEQ ID NO: 62746 - DNA, 22 bp, Artificial Sequence
  chemically synthesized
cctcacacaactatgtagtcca

SEQ ID NO: 62747 - DNA, 22 bp, Artificial Sequence
  chemically synthesized
acacaactatgtagtccaggtg

SEQ ID NO: 62748 - DNA, 22 bp, Artificial Sequence
  chemically synthesized
tgtagtccaggtgatgcaccct

SEQ ID NO: 62749 - DNA, 22 bp, Artificial Sequence
  chemically synthesized
tgcccgatgcttggtagtcaga

SEQ ID NO: 62750 - DNA, 22 bp, Artificial Sequence
  chemically synthesized
cccgatgcttggtagtcagaaa

SEQ ID NO: 62751 - DNA, 22 bp, Artificial Sequence
  chemically synthesized
ggtagtcagaaacttccatcat

SEQ ID NO: 62752 - DNA, 22 bp, Artificial Sequence
  chemically synthesized
gtagtcagaaacttccatcatg

SEQ ID NO: 62753 - DNA, 22 bp, Artificial Sequence
  chemically synthesized
ccatcatgcagctctgcccaga

SEQ ID NO: 62754 - DNA, 22 bp, Artificial Sequence
  chemically synthesized
catcatgcagctctgcccagat

SEQ ID NO: 62755 - DNA, 22 bp, Artificial Sequence
  chemically synthesized
tgcccagattgagctgagctgg

SEQ ID NO: 62756 - DNA, 22 bp, Artificial Sequence
  chemically synthesized
cccagattgagctgagctggcc

SEQ ID NO: 62757 - DNA, 22 bp, Artificial Sequence
  chemically synthesized
agctgagctggcctctggagtg

SEQ ID NO: 62758 - DNA, 22 bp, Artificial Sequence
  chemically synthesized
agctggcctctggagtgaggtg

SEQ ID NO: 62759 - DNA, 22 bp, Artificial Sequence
  chemically synthesized
gcctctggagtgaggtgctggg

SEQ ID NO: 62760 - DNA, 22 bp, Artificial Sequence
  chemically synthesized
tggagtgaggtgctgggacaaa

SEQ ID NO: 62761 - DNA, 22 bp, Artificial Sequence
  chemically synthesized
gagtgaggtgctgggacaaaca

SEQ ID NO: 62762 - DNA, 22 bp, Artificial Sequence
  chemically synthesized
ggacaaacatcttccatgctgc

SEQ ID NO: 62763 - DNA, 22 bp, Artificial Sequence
  chemically synthesized
ccatgctgctcatgtcaactcc

SEQ ID NO: 62764 - DNA, 22 bp, Artificial Sequence
  chemically synthesized
catgctgctcatgtcaactcca

SEQ ID NO: 62765 - DNA, 22 bp, Artificial Sequence
  chemically synthesized
ctcatgtcaactccagatgcag

SEQ ID NO: 62766 - DNA, 22 bp, Artificial Sequence
  chemically synthesized
atgtcaactccagatgcagtca

SEQ ID NO: 62767 - DNA, 22 bp, Artificial Sequence
  chemically synthesized
cagatgcagtcaggtttctgaa

SEQ ID NO: 62768 - DNA, 22 bp, Artificial Sequence
  chemically synthesized
ctgaaccaaagtcaatgatcta

SEQ ID NO: 62769 - DNA, 22 bp, Artificial Sequence
  chemically synthesized
tgaaccaaagtcaatgatctaa

SEQ ID NO: 62770 - DNA, 22 bp, Artificial Sequence
  chemically synthesized
aaccaaagtcaatgatctaagt

SEQ ID NO: 62771 - DNA, 22 bp, Artificial Sequence
  chemically synthesized
agtgcagtcaaaggctctgggg

SEQ ID NO: 62772 - DNA, 22 bp, Artificial Sequence
  chemically synthesized
tgggggaagaaagagagagtgc

SEQ ID NO: 62773 - DNA, 22 bp, Artificial Sequence
  chemically synthesized
ggggaagaaagagagagtgcct

SEQ ID NO: 62774 - DNA, 22 bp, Artificial Sequence
  chemically synthesized
atctcttgcctgtgccatgctc

SEQ ID NO: 62775 - DNA, 22 bp, Artificial Sequence
  chemically synthesized
ttgcctgtgccatgctcgcaaa

SEQ ID NO: 62776 - DNA, 22 bp, Artificial Sequence
  chemically synthesized
gcctgtgccatgctcgcaaagc

SEQ ID NO: 62777 - DNA, 22 bp, Artificial Sequence
  chemically synthesized
cctgtgccatgctcgcaaagca

SEQ ID NO: 62778 - DNA, 22 bp, Artificial Sequence
  chemically synthesized
tgccatgctcgcaaagcaagga

SEQ ID NO: 62779 - DNA, 22 bp, Artificial Sequence
  chemically synthesized
gcaaagcaaggatttttgcaaa

SEQ ID NO: 62780 - DNA, 22 bp, Artificial Sequence
  chemically synthesized
ttgcaaaattctaatgaaagct

SEQ ID NO: 62781 - DNA, 22 bp, Artificial Sequence
  chemically synthesized
tgcaaaattctaatgaaagctg

SEQ ID NO: 62782 - DNA, 22 bp, Artificial Sequence
  chemically synthesized
gcaaaattctaatgaaagctgg

SEQ ID NO: 62783 - DNA, 22 bp, Artificial Sequence
  chemically synthesized
caaaattctaatgaaagctggg

SEQ ID NO: 62784 - DNA, 22 bp, Artificial Sequence
  chemically synthesized
taatgaaagctgggcttgcaaa

SEQ ID NO: 62785 - DNA, 22 bp, Artificial Sequence
  chemically synthesized
atgaaagctgggcttgcaaaat

SEQ ID NO: 62786 - DNA, 22 bp, Artificial Sequence
  chemically synthesized
ggcttgcaaaattagaaaactg

SEQ ID NO: 62787 - DNA, 22 bp, Artificial Sequence
  chemically synthesized
gcaaaattagaaaactggatta

SEQ ID NO: 62788 - DNA, 22 bp, Artificial Sequence
  chemically synthesized
caaaattagaaaactggattat

SEQ ID NO: 62789 - DNA, 22 bp, Artificial Sequence
  chemically synthesized
gaaaactggattatttgtgaga

SEQ ID NO: 62790 - DNA, 22 bp, Artificial Sequence
  chemically synthesized
gattatttgtgagaacactgaa

SEQ ID NO: 62791 - DNA, 22 bp, Artificial Sequence
  chemically synthesized
tttgtgagaacactgaaacatc

SEQ ID NO: 62792 - DNA, 22 bp, Artificial Sequence
  chemically synthesized
gtgagaacactgaaacatccct

SEQ ID NO: 62793 - DNA, 22 bp, Artificial Sequence
  chemically synthesized
tgagaacactgaaacatccctg

SEQ ID NO: 62794 - DNA, 22 bp, Artificial Sequence
  chemically synthesized
aaacatccctgggtgtgtccat

SEQ ID NO: 62795 - DNA, 22 bp, Artificial Sequence
  chemically synthesized
ggtgtgtccatctggaaaaaca

SEQ ID NO: 62796 - DNA, 22 bp, Artificial Sequence
  chemically synthesized
gaaaaacagcatttcctctggc

SEQ ID NO: 62797 - DNA, 22 bp, Artificial Sequence
  chemically synthesized
cctctggcaattttgcaaccgt

SEQ ID NO: 62798 - DNA, 22 bp, Artificial Sequence
  chemically synthesized
ctctggcaattttgcaaccgtt

SEQ ID NO: 62799 - DNA, 22 bp, Artificial Sequence
  chemically synthesized
tggcaattttgcaaccgttcta

SEQ ID NO: 62800 - DNA, 22 bp, Artificial Sequence
  chemically synthesized
gcaattttgcaaccgttctatt

SEQ ID NO: 62801 - DNA, 22 bp, Artificial Sequence
  chemically synthesized
tgcaaccgttctatttgaattt

SEQ ID NO: 62802 - DNA, 22 bp, Artificial Sequence
  chemically synthesized
gcaaccgttctatttgaatttg

SEQ ID NO: 62803 - DNA, 22 bp, Artificial Sequence
  chemically synthesized
caaccgttctatttgaatttgg

SEQ ID NO: 62804 - DNA, 22 bp, Artificial Sequence
  chemically synthesized
tatttgaatttggcaaagaaaa

SEQ ID NO: 62805 - DNA, 22 bp, Artificial Sequence
  chemically synthesized
tttgaatttggcaaagaaaata

SEQ ID NO: 62806 - DNA, 22 bp, Artificial Sequence
  chemically synthesized
gaatttggcaaagaaaataaag

SEQ ID NO: 62807 - DNA, 22 bp, Artificial Sequence
  chemically synthesized
aatttggcaaagaaaataaagc

SEQ ID NO: 62808 - DNA, 22 bp, Artificial Sequence
  chemically synthesized
ggcaaagaaaataaagcagttt

SEQ ID NO: 62809 - DNA, 22 bp, Artificial Sequence
  chemically synthesized
gcaaagaaaataaagcagtttt

SEQ ID NO: 62810 - DNA, 22 bp, Artificial Sequence
  chemically synthesized
ttcacaaaagaataaacacaac

SEQ ID NO: 62811 - DNA, 22 bp, Artificial Sequence
  chemically synthesized
tcacaaaagaataaacacaacc

SEQ ID NO: 62812 - DNA, 22 bp, Artificial Sequence
  chemically synthesized
cacaaaagaataaacacaacca

SEQ ID NO: 62813 - DNA, 22 bp, Artificial Sequence
  chemically synthesized
acaaaagaataaacacaaccag

SEQ ID NO: 62814 - DNA, 22 bp, Artificial Sequence
  chemically synthesized
cactctcccaaattgtcaaaga

SEQ ID NO: 62815 - DNA, 22 bp, Artificial Sequence
  chemically synthesized
actctcccaaattgtcaaagaa

SEQ ID NO: 62816 - DNA, 22 bp, Artificial Sequence
  chemically synthesized
tcccaaattgtcaaagaagtat

SEQ ID NO: 62817 - DNA, 22 bp, Artificial Sequence
  chemically synthesized
ccaaattgtcaaagaagtataa

SEQ ID NO: 62818 - DNA, 22 bp, Artificial Sequence
  chemically synthesized
tcaaagaagtataaattagaaa

SEQ ID NO: 62819 - DNA, 22 bp, Artificial Sequence
  chemically synthesized
gaaaatgaatcaggacaatttc

SEQ ID NO: 62820 - DNA, 22 bp, Artificial Sequence
  chemically synthesized
caacctgttagattagctaata

SEQ ID NO: 62821 - DNA, 22 bp, Artificial Sequence
  chemically synthesized
aacctgttagattagctaatat

SEQ ID NO: 62822 - DNA, 22 bp, Artificial Sequence
  chemically synthesized
ttagattagctaatatttaaaa

SEQ ID NO: 62823 - DNA, 22 bp, Artificial Sequence
  chemically synthesized
gattagctaatatttaaaaatt

SEQ ID NO: 62824 - DNA, 22 bp, Artificial Sequence
  chemically synthesized
gctaatatttaaaaattgaaca

SEQ ID NO: 62825 - DNA, 22 bp, Artificial Sequence
  chemically synthesized
atatttaaaaattgaacactca

SEQ ID NO: 62826 - DNA, 22 bp, Artificial Sequence
  chemically synthesized
aaaaattgaacactcatacaag

SEQ ID NO: 62827 - DNA, 22 bp, Artificial Sequence
  chemically synthesized
aaaattgaacactcatacaagt

SEQ ID NO: 62828 - DNA, 22 bp, Artificial Sequence
  chemically synthesized
aacactcatacaagtgtggtga

SEQ ID NO: 62829 - DNA, 22 bp, Artificial Sequence
  chemically synthesized
atacaagtgtggtgaagtgatt

SEQ ID NO: 62830 - DNA, 22 bp, Artificial Sequence
  chemically synthesized
ttttctagtgacattttacact

SEQ ID NO: 62831 - DNA, 22 bp, Artificial Sequence
  chemically synthesized
tctagtgacattttacactgtc

SEQ ID NO: 62832 - DNA, 22 bp, Artificial Sequence
  chemically synthesized
ctagtgacattttacactgtca

SEQ ID NO: 62833 - DNA, 22 bp, Artificial Sequence
  chemically synthesized
tagtgacattttacactgtcat

SEQ ID NO: 62834 - DNA, 22 bp, Artificial Sequence
  chemically synthesized
gtgacattttacactgtcataa

SEQ ID NO: 62835 - DNA, 22 bp, Artificial Sequence
  chemically synthesized
tacactgtcataaccttctaga

SEQ ID NO: 62836 - DNA, 22 bp, Artificial Sequence
  chemically synthesized
acactgtcataaccttctagaa

SEQ ID NO: 62837 - DNA, 22 bp, Artificial Sequence
  chemically synthesized
cactgtcataaccttctagaaa

SEQ ID NO: 62838 - DNA, 22 bp, Artificial Sequence
  chemically synthesized
tcataaccttctagaaaataaa

SEQ ID NO: 62839 - DNA, 22 bp, Artificial Sequence
  chemically synthesized
ctagaaaataaattggcagtgt

SEQ ID NO: 62840 - DNA, 22 bp, Artificial Sequence
  chemically synthesized
tagaaaataaattggcagtgtt

SEQ ID NO: 62841 - DNA, 22 bp, Artificial Sequence
  chemically synthesized
gaaaataaattggcagtgttat

SEQ ID NO: 62842 - DNA, 22 bp, Artificial Sequence
  chemically synthesized
gcagtgttattgggagacagaa

SEQ ID NO: 62843 - DNA, 22 bp, Artificial Sequence
  chemically synthesized
ttgggagacagaaatatgtcta

SEQ ID NO: 62844 - DNA, 22 bp, Artificial Sequence
  chemically synthesized
ggagacagaaatatgtctatat

SEQ ID NO: 62845 - DNA, 22 bp, Artificial Sequence
  chemically synthesized
tataatttatgggaacttaggc

SEQ ID NO: 62846 - DNA, 22 bp, Artificial Sequence
  chemically synthesized
atgggaacttaggctcagaaaa

SEQ ID NO: 62847 - DNA, 22 bp, Artificial Sequence
  chemically synthesized
tgggaacttaggctcagaaaat

SEQ ID NO: 62848 - DNA, 22 bp, Artificial Sequence
  chemically synthesized
aggctcagaaaatattaaggaa

SEQ ID NO: 62849 - DNA, 22 bp, Artificial Sequence
  chemically synthesized
ggctcagaaaatattaaggaat

SEQ ID NO: 62850 - DNA, 22 bp, Artificial Sequence
  chemically synthesized
agaaaatattaaggaataagaa

SEQ ID NO: 62851 - DNA, 22 bp, Artificial Sequence
  chemically synthesized
aggaataagaatgaactttatg

SEQ ID NO: 62852 - DNA, 22 bp, Artificial Sequence
  chemically synthesized
tatgaacaaagatgtggagggt

SEQ ID NO: 62853 - DNA, 22 bp, Artificial Sequence
  chemically synthesized
atgaacaaagatgtggagggtt

SEQ ID NO: 62854 - DNA, 22 bp, Artificial Sequence
  chemically synthesized
tgaacaaagatgtggagggttg

SEQ ID NO: 62855 - DNA, 22 bp, Artificial Sequence
  chemically synthesized
gaagcaagaggggggccaacgc

SEQ ID NO: 62856 - DNA, 22 bp, Artificial Sequence
  chemically synthesized
gggcagtgactccgcagaccca

SEQ ID NO: 62857 - DNA, 22 bp, Artificial Sequence
  chemically synthesized
ggcagtgactccgcagacccag

SEQ ID NO: 62858 - DNA, 22 bp, Artificial Sequence
  chemically synthesized
cgcagacccaggctcaggttga

SEQ ID NO: 62859 - DNA, 22 bp, Artificial Sequence
  chemically synthesized
aggttgaactagacaacctcct

SEQ ID NO: 62860 - DNA, 22 bp, Artificial Sequence
  chemically synthesized
aactagacaacctccttacacc

SEQ ID NO: 62861 - DNA, 22 bp, Artificial Sequence
  chemically synthesized
gacaacctccttacacctcagt

SEQ ID NO: 62862 - DNA, 22 bp, Artificial Sequence
  chemically synthesized
cttacacctcagtttccttaac

SEQ ID NO: 62863 - DNA, 22 bp, Artificial Sequence
  chemically synthesized
acacctcagtttccttaactgt

SEQ ID NO: 62864 - DNA, 22 bp, Artificial Sequence
  chemically synthesized
cacctcagtttccttaactgta

SEQ ID NO: 62865 - DNA, 22 bp, Artificial Sequence
  chemically synthesized
agtttccttaactgtagagcag

SEQ ID NO: 62866 - DNA, 22 bp, Artificial Sequence
  chemically synthesized
ccttaactgtagagcaggagtg

SEQ ID NO: 62867 - DNA, 22 bp, Artificial Sequence
  chemically synthesized
cttaactgtagagcaggagtga

SEQ ID NO: 62868 - DNA, 22 bp, Artificial Sequence
  chemically synthesized
aactgtagagcaggagtgatgg

SEQ ID NO: 62869 - DNA, 22 bp, Artificial Sequence
  chemically synthesized
actgtagagcaggagtgatgga

SEQ ID NO: 62870 - DNA, 22 bp, Artificial Sequence
  chemically synthesized
tagagcaggagtgatggaactg

SEQ ID NO: 62871 - DNA, 22 bp, Artificial Sequence
  chemically synthesized
cctgtttcataggactgttgtg

SEQ ID NO: 62872 - DNA, 22 bp, Artificial Sequence
  chemically synthesized
tttcataggactgttgtgagga

SEQ ID NO: 62873 - DNA, 22 bp, Artificial Sequence
  chemically synthesized
cataggactgttgtgaggatga

SEQ ID NO: 62874 - DNA, 22 bp, Artificial Sequence
  chemically synthesized
ataggactgttgtgaggatgaa

SEQ ID NO: 62875 - DNA, 22 bp, Artificial Sequence
  chemically synthesized
ttgtgaggatgaagtgagatac

SEQ ID NO: 62876 - DNA, 22 bp, Artificial Sequence
  chemically synthesized
tgaggatgaagtgagatacacc

SEQ ID NO: 62877 - DNA, 22 bp, Artificial Sequence
  chemically synthesized
taagcttgtgcctggaaaggat

SEQ ID NO: 62878 - DNA, 22 bp, Artificial Sequence
  chemically synthesized
gtgcctggaaaggataatgctt

SEQ ID NO: 62879 - DNA, 22 bp, Artificial Sequence
  chemically synthesized
tgcctggaaaggataatgctta

SEQ ID NO: 62880 - DNA, 22 bp, Artificial Sequence
  chemically synthesized
gaaaggataatgcttagtaaat

SEQ ID NO: 62881 - DNA, 22 bp, Artificial Sequence
  chemically synthesized
agtaaatgatgactattctttt

SEQ ID NO: 62882 - DNA, 22 bp, Artificial Sequence
  chemically synthesized
gtaaatgatgactattcttttt

SEQ ID NO: 62883 - DNA, 22 bp, Artificial Sequence
  chemically synthesized
ttcttttttattgcaataaaat

SEQ ID NO: 62884 - DNA, 22 bp, Artificial Sequence
  chemically synthesized
ttttttattgcaataaaatgta

SEQ ID NO: 62885 - DNA, 22 bp, Artificial Sequence
  chemically synthesized
ttttattgcaataaaatgtaca

SEQ ID NO: 62886 - DNA, 22 bp, Artificial Sequence
  chemically synthesized
tttattgcaataaaatgtacac

SEQ ID NO: 62887 - DNA, 22 bp, Artificial Sequence
  chemically synthesized
ttattgcaataaaatgtacaca

SEQ ID NO: 62888 - DNA, 22 bp, Artificial Sequence
  chemically synthesized
tattgcaataaaatgtacacag

SEQ ID NO: 62889 - DNA, 22 bp, Artificial Sequence
  chemically synthesized
attgcaataaaatgtacacagc

SEQ ID NO: 62890 - DNA, 22 bp, Artificial Sequence
  chemically synthesized
ttgcaataaaatgtacacagcg

SEQ ID NO: 62891 - DNA, 22 bp, Artificial Sequence
  chemically synthesized
caataaaatgtacacagcgtaa

SEQ ID NO: 62892 - DNA, 22 bp, Artificial Sequence
  chemically synthesized
ctattttaaccatttttgcagg

SEQ ID NO: 62893 - DNA, 22 bp, Artificial Sequence
  chemically synthesized
ttttaaccatttttgcagggta

SEQ ID NO: 62894 - DNA, 22 bp, Artificial Sequence
  chemically synthesized
taaccatttttgcagggtacca

SEQ ID NO: 62895 - DNA, 22 bp, Artificial Sequence
  chemically synthesized
aaccatttttgcagggtaccac

SEQ ID NO: 62896 - DNA, 22 bp, Artificial Sequence
  chemically synthesized
accatttttgcagggtaccacc

SEQ ID NO: 62897 - DNA, 22 bp, Artificial Sequence
  chemically synthesized
ttgcagggtaccaccaagtggc

SEQ ID NO: 62898 - DNA, 22 bp, Artificial Sequence
  chemically synthesized
tgcagggtaccaccaagtggca

SEQ ID NO: 62899 - DNA, 22 bp, Artificial Sequence
  chemically synthesized
gcagggtaccaccaagtggcat

SEQ ID NO: 62900 - DNA, 22 bp, Artificial Sequence
  chemically synthesized
cagggtaccaccaagtggcatt

SEQ ID NO: 62901 - DNA, 22 bp, Artificial Sequence
  chemically synthesized
agtacattcacagtggtgtgca

SEQ ID NO: 62902 - DNA, 22 bp, Artificial Sequence
  chemically synthesized
gtacattcacagtggtgtgcaa

SEQ ID NO: 62903 - DNA, 22 bp, Artificial Sequence
  chemically synthesized
acagtggtgtgcaaccatcatc

SEQ ID NO: 62904 - DNA, 22 bp, Artificial Sequence
  chemically synthesized
ccagaatattttcctcatcccc

SEQ ID NO: 62905 - DNA, 22 bp, Artificial Sequence
  chemically synthesized
cagaatattttcctcatcccca

SEQ ID NO: 62906 - DNA, 22 bp, Artificial Sequence
  chemically synthesized
tcctcatccccaaaggaaacct

SEQ ID NO: 62907 - DNA, 22 bp, Artificial Sequence
  chemically synthesized
cctcatccccaaaggaaacctc

SEQ ID NO: 62908 - DNA, 22 bp, Artificial Sequence
  chemically synthesized
ctcatccccaaaggaaacctca

SEQ ID NO: 62909 - DNA, 22 bp, Artificial Sequence
  chemically synthesized
atccccaaaggaaacctcatgc

SEQ ID NO: 62910 - DNA, 22 bp, Artificial Sequence
  chemically synthesized
atgctcattaatcagtagctct

SEQ ID NO: 62911 - DNA, 22 bp, Artificial Sequence
  chemically synthesized
attaatcagtagctctccttta

SEQ ID NO: 62912 - DNA, 22 bp, Artificial Sequence
  chemically synthesized
atcagtagctctcctttaaaat

SEQ ID NO: 62913 - DNA, 22 bp, Artificial Sequence
  chemically synthesized
tcctttaaaatattagttatga

SEQ ID NO: 62914 - DNA, 22 bp, Artificial Sequence
  chemically synthesized
ctttaaaatattagttatgaag

SEQ ID NO: 62915 - DNA, 22 bp, Artificial Sequence
  chemically synthesized
taaaatattagttatgaagatc

SEQ ID NO: 62916 - DNA, 22 bp, Artificial Sequence
  chemically synthesized
aaaatattagttatgaagatca

SEQ ID NO: 62917 - DNA, 22 bp, Artificial Sequence
  chemically synthesized
aaatattagttatgaagatcat

SEQ ID NO: 62918 - DNA, 22 bp, Artificial Sequence
  chemically synthesized
gttatgaagatcatagcactat

SEQ ID NO: 62919 - DNA, 22 bp, Artificial Sequence
  chemically synthesized
tgaagatcatagcactatacaa

SEQ ID NO: 62920 - DNA, 22 bp, Artificial Sequence
  chemically synthesized
tacaaaactcattatgtaatgt

SEQ ID NO: 62921 - DNA, 22 bp, Artificial Sequence
  chemically synthesized
attatgtaatgttgagtgaaaa

SEQ ID NO: 62922 - DNA, 22 bp, Artificial Sequence
  chemically synthesized
tgtaatgttgagtgaaaaaatc

SEQ ID NO: 62923 - DNA, 22 bp, Artificial Sequence
  chemically synthesized
agtgaaaaaatcagggtgtgaa

SEQ ID NO: 62924 - DNA, 22 bp, Artificial Sequence
  chemically synthesized
tgtgatatgatgtaattagtga

SEQ ID NO: 62925 - DNA, 22 bp, Artificial Sequence
  chemically synthesized
gtgatatgatgtaattagtgaa

SEQ ID NO: 62926 - DNA, 22 bp, Artificial Sequence
  chemically synthesized
tgatatgatgtaattagtgaaa

SEQ ID NO: 62927 - DNA, 22 bp, Artificial Sequence
  chemically synthesized
gtgaaagaagcatacaaaaagt

SEQ ID NO: 62928 - DNA, 22 bp, Artificial Sequence
  chemically synthesized
aaaatataaaaacaatagcaat

SEQ ID NO: 62929 - DNA, 22 bp, Artificial Sequence
  chemically synthesized
catttctcagactctacattta

SEQ ID NO: 62930 - DNA, 22 bp, Artificial Sequence
  chemically synthesized
ctcagactctacatttaaacat

SEQ ID NO: 62931 - DNA, 22 bp, Artificial Sequence
  chemically synthesized
tcagactctacatttaaacatt

SEQ ID NO: 62932 - DNA, 22 bp, Artificial Sequence
  chemically synthesized
agactctacatttaaacattat

SEQ ID NO: 62933 - DNA, 22 bp, Artificial Sequence
  chemically synthesized
tacatttaaacattattcttta

SEQ ID NO: 62934 - DNA, 22 bp, Artificial Sequence
  chemically synthesized
catttaaacattattctttatg

SEQ ID NO: 62935 - DNA, 22 bp, Artificial Sequence
  chemically synthesized
aaacattattctttatggtttt

SEQ ID NO: 62936 - DNA, 22 bp, Artificial Sequence
  chemically synthesized
aacattattctttatggtttta

SEQ ID NO: 62937 - DNA, 22 bp, Artificial Sequence
  chemically synthesized
ttctttatggttttaaaagcaa

SEQ ID NO: 62938 - DNA, 22 bp, Artificial Sequence
  chemically synthesized
tttatggttttaaaagcaaaga

SEQ ID NO: 62939 - DNA, 22 bp, Artificial Sequence
  chemically synthesized
tatggttttaaaagcaaagaaa

SEQ ID NO: 62940 - DNA, 22 bp, Artificial Sequence
  chemically synthesized
atggttttaaaagcaaagaaaa

SEQ ID NO: 62941 - DNA, 22 bp, Artificial Sequence
  chemically synthesized
tggttttaaaagcaaagaaaaa

SEQ ID NO: 62942 - DNA, 22 bp, Artificial Sequence
  chemically synthesized
taaaagcaaagaaaaaggtaaa

SEQ ID NO: 62943 - DNA, 22 bp, Artificial Sequence
  chemically synthesized
aaaagcaaagaaaaaggtaaag

SEQ ID NO: 62944 - DNA, 22 bp, Artificial Sequence
  chemically synthesized
aaagcaaagaaaaaggtaaaga

SEQ ID NO: 62945 - DNA, 22 bp, Artificial Sequence
  chemically synthesized
agattgttaaatccaggttttt

SEQ ID NO: 62946 - DNA, 22 bp, Artificial Sequence
  chemically synthesized
ttaaatccaggtttttggaaca

SEQ ID NO: 62947 - DNA, 22 bp, Artificial Sequence
  chemically synthesized
aatccaggtttttggaacatag

SEQ ID NO: 62948 - DNA, 22 bp, Artificial Sequence
  chemically synthesized
ttggaacatagactcttatatg

SEQ ID NO: 62949 - DNA, 22 bp, Artificial Sequence
  chemically synthesized
tggaacatagactcttatatga

SEQ ID NO: 62950 - DNA, 22 bp, Artificial Sequence
  chemically synthesized
ggaacatagactcttatatgac

SEQ ID NO: 62951 - DNA, 22 bp, Artificial Sequence
  chemically synthesized
gaacatagactcttatatgacg

SEQ ID NO: 62952 - DNA, 22 bp, Artificial Sequence
  chemically synthesized
ttatatgacgtttacactctcc

SEQ ID NO: 62953 - DNA, 22 bp, Artificial Sequence
  chemically synthesized
atatgacgtttacactctccag

SEQ ID NO: 62954 - DNA, 22 bp, Artificial Sequence
  chemically synthesized
tatgacgtttacactctccagg

SEQ ID NO: 62955 - DNA, 22 bp, Artificial Sequence
  chemically synthesized
acactctccagggttcagagag

SEQ ID NO: 62956 - DNA, 22 bp, Artificial Sequence
  chemically synthesized
cactctccagggttcagagagt

SEQ ID NO: 62957 - DNA, 22 bp, Artificial Sequence
  chemically synthesized
tccagggttcagagagtctggc

SEQ ID NO: 62958 - DNA, 22 bp, Artificial Sequence
  chemically synthesized
cagggttcagagagtctggcag

SEQ ID NO: 62959 - DNA, 22 bp, Artificial Sequence
  chemically synthesized
agagagtctggcagcattggga

SEQ ID NO: 62960 - DNA, 22 bp, Artificial Sequence
  chemically synthesized
gcagcattgggagctgccttgt

SEQ ID NO: 62961 - DNA, 22 bp, Artificial Sequence
  chemically synthesized
ggagctgccttgtgttctacag

SEQ ID NO: 62962 - DNA, 22 bp, Artificial Sequence
  chemically synthesized
ccttgtgttctacagcctcacg

SEQ ID NO: 62963 - DNA, 22 bp, Artificial Sequence
  chemically synthesized
gtgttctacagcctcacggaca

SEQ ID NO: 62964 - DNA, 22 bp, Artificial Sequence
  chemically synthesized
tgttctacagcctcacggacag

SEQ ID NO: 62965 - DNA, 22 bp, Artificial Sequence
  chemically synthesized
tacagcctcacggacagacagg

SEQ ID NO: 62966 - DNA, 22 bp, Artificial Sequence
  chemically synthesized
cagcctcacggacagacaggag

SEQ ID NO: 62967 - DNA, 22 bp, Artificial Sequence
  chemically synthesized
acggacagacaggaggtccatc

SEQ ID NO: 62968 - DNA, 22 bp, Artificial Sequence
  chemically synthesized
ctctgttcttctggagtttcct

SEQ ID NO: 62969 - DNA, 22 bp, Artificial Sequence
  chemically synthesized
tgttcttctggagtttccttgt

SEQ ID NO: 62970 - DNA, 22 bp, Artificial Sequence
  chemically synthesized
ttcttctggagtttccttgtga

SEQ ID NO: 62971 - DNA, 22 bp, Artificial Sequence
  chemically synthesized
ttctggagtttccttgtgaaca

SEQ ID NO: 62972 - DNA, 22 bp, Artificial Sequence
  chemically synthesized
ctggagtttccttgtgaacatg

SEQ ID NO: 62973 - DNA, 22 bp, Artificial Sequence
  chemically synthesized
tggagtttccttgtgaacatgt

SEQ ID NO: 62974 - DNA, 22 bp, Artificial Sequence
  chemically synthesized
gagtttccttgtgaacatgttg

SEQ ID NO: 62975 - DNA, 22 bp, Artificial Sequence
  chemically synthesized
ccttgtgaacatgttgtggacg

SEQ ID NO: 62976 - DNA, 22 bp, Artificial Sequence
  chemically synthesized
cttgtgaacatgttgtggacgt

SEQ ID NO: 62977 - DNA, 22 bp, Artificial Sequence
  chemically synthesized
gtgaacatgttgtggacgtagt

SEQ ID NO: 62978 - DNA, 22 bp, Artificial Sequence
  chemically synthesized
tgaacatgttgtggacgtagtt

SEQ ID NO: 62979 - DNA, 22 bp, Artificial Sequence
  chemically synthesized
tggacgtagttaccatttcttt

SEQ ID NO: 62980 - DNA, 22 bp, Artificial Sequence
  chemically synthesized
ccatttctttcatctttttaaa

SEQ ID NO: 62981 - DNA, 22 bp, Artificial Sequence
  chemically synthesized
ctttcatctttttaaacacagg

SEQ ID NO: 62982 - DNA, 22 bp, Artificial Sequence
  chemically synthesized
tttcatctttttaaacacaggt

SEQ ID NO: 62983 - DNA, 22 bp, Artificial Sequence
  chemically synthesized
tcatctttttaaacacaggtac

SEQ ID NO: 62984 - DNA, 22 bp, Artificial Sequence
  chemically synthesized
catctttttaaacacaggtacc

SEQ ID NO: 62985 - DNA, 22 bp, Artificial Sequence
  chemically synthesized
atctttttaaacacaggtacct

SEQ ID NO: 62986 - DNA, 22 bp, Artificial Sequence
  chemically synthesized
tttaaacacaggtacctttggg

SEQ ID NO: 62987 - DNA, 22 bp, Artificial Sequence
  chemically synthesized
ttaaacacaggtacctttgggg

SEQ ID NO: 62988 - DNA, 22 bp, Artificial Sequence
  chemically synthesized
taaacacaggtacctttggggc

SEQ ID NO: 62989 - DNA, 22 bp, Artificial Sequence
  chemically synthesized
aaacacaggtacctttggggct

SEQ ID NO: 62990 - DNA, 22 bp, Artificial Sequence
  chemically synthesized
aacacaggtacctttggggctg

SEQ ID NO: 62991 - DNA, 22 bp, Artificial Sequence
  chemically synthesized
tggggctggctttctcaaggaa

SEQ ID NO: 62992 - DNA, 22 bp, Artificial Sequence
  chemically synthesized
ggggctggctttctcaaggaag

SEQ ID NO: 62993 - DNA, 22 bp, Artificial Sequence
  chemically synthesized
gggctggctttctcaaggaagc

SEQ ID NO: 62994 - DNA, 22 bp, Artificial Sequence
  chemically synthesized
gctttctcaaggaagcccagct

SEQ ID NO: 62995 - DNA, 22 bp, Artificial Sequence
  chemically synthesized
tctcaaggaagcccagctccct

SEQ ID NO: 62996 - DNA, 22 bp, Artificial Sequence
  chemically synthesized
ctcaaggaagcccagctccctg

SEQ ID NO: 62997 - DNA, 22 bp, Artificial Sequence
  chemically synthesized
tcaaggaagcccagctccctgt

SEQ ID NO: 62998 - DNA, 22 bp, Artificial Sequence
  chemically synthesized
aaggaagcccagctccctgtga

SEQ ID NO: 62999 - DNA, 22 bp, Artificial Sequence
  chemically synthesized
cctgtgattgagaatgaagtgt

SEQ ID NO: 63000 - DNA, 22 bp, Artificial Sequence
  chemically synthesized
tgattgagaatgaagtgtgcaa

SEQ ID NO: 63001 - DNA, 22 bp, Artificial Sequence
  chemically synthesized
agaatgaagtgtgcaatcgcta

SEQ ID NO: 63002 - DNA, 22 bp, Artificial Sequence
  chemically synthesized
tgagtttctgaatggaagagtc

SEQ ID NO: 63003 - DNA, 22 bp, Artificial Sequence
  chemically synthesized
ctgaatggaagagtcaaatcca

SEQ ID NO: 63004 - DNA, 22 bp, Artificial Sequence
  chemically synthesized
tgaatggaagagtcaaatccac

SEQ ID NO: 63005 - DNA, 22 bp, Artificial Sequence
  chemically synthesized
aatggaagagtcaaatccactg

SEQ ID NO: 63006 - DNA, 22 bp, Artificial Sequence
  chemically synthesized
agctctgtgctgggcatttggc

SEQ ID NO: 63007 - DNA, 22 bp, Artificial Sequence
  chemically synthesized
tgtgctgggcatttggctggag

SEQ ID NO: 63008 - DNA, 22 bp, Artificial Sequence
  chemically synthesized
tgctgggcatttggctggaggc

SEQ ID NO: 63009 - DNA, 22 bp, Artificial Sequence
  chemically synthesized
ggcatttggctggaggcattga

SEQ ID NO: 63010 - DNA, 22 bp, Artificial Sequence
  chemically synthesized
ggctggaggcattgacagttgc

SEQ ID NO: 63011 - DNA, 22 bp, Artificial Sequence
  chemically synthesized
gctggaggcattgacagttgca

SEQ ID NO: 63012 - DNA, 22 bp, Artificial Sequence
  chemically synthesized
gaggcattgacagttgcaaggt

SEQ ID NO: 63013 - DNA, 22 bp, Artificial Sequence
  chemically synthesized
acagttgcaaggtaagaaaaga

SEQ ID NO: 63014 - DNA, 22 bp, Artificial Sequence
  chemically synthesized
caaggtaagaaaagatcaagag

SEQ ID NO: 63015 - DNA, 22 bp, Artificial Sequence
  chemically synthesized
gtcttgtgctctcctgtctcag

SEQ ID NO: 63016 - DNA, 22 bp, Artificial Sequence
  chemically synthesized
gtgctctcctgtctcagtctca

SEQ ID NO: 63017 - DNA, 22 bp, Artificial Sequence
  chemically synthesized
tgctctcctgtctcagtctcag

SEQ ID NO: 63018 - DNA, 22 bp, Artificial Sequence
  chemically synthesized
tcctgtctcagtctcagtccct

SEQ ID NO: 63019 - DNA, 22 bp, Artificial Sequence
  chemically synthesized
ctgtctcagtctcagtccctta

SEQ ID NO: 63020 - DNA, 22 bp, Artificial Sequence
  chemically synthesized
tctcagtctcagtcccttagac

SEQ ID NO: 63021 - DNA, 22 bp, Artificial Sequence
  chemically synthesized
agtctcagtcccttagacttga

SEQ ID NO: 63022 - DNA, 22 bp, Artificial Sequence
  chemically synthesized
agtcccttagacttgagtccca

SEQ ID NO: 63023 - DNA, 22 bp, Artificial Sequence
  chemically synthesized
agacttgagtcccaaagtagcg

SEQ ID NO: 63024 - DNA, 22 bp, Artificial Sequence
  chemically synthesized
gacttgagtcccaaagtagcga

SEQ ID NO: 63025 - DNA, 22 bp, Artificial Sequence
  chemically synthesized
gagtcccaaagtagcgaattca

SEQ ID NO: 63026 - DNA, 22 bp, Artificial Sequence
  chemically synthesized
agtcccaaagtagcgaattcaa

SEQ ID NO: 63027 - DNA, 22 bp, Artificial Sequence
  chemically synthesized
aagtaggatttaatcaatggaa

SEQ ID NO: 63028 - DNA, 22 bp, Artificial Sequence
  chemically synthesized
aatcaatggaagaccccagtct

SEQ ID NO: 63029 - DNA, 22 bp, Artificial Sequence
  chemically synthesized
atcaatggaagaccccagtcta

SEQ ID NO: 63030 - DNA, 22 bp, Artificial Sequence
  chemically synthesized
agtgttgctcagaaactcccta

SEQ ID NO: 63031 - DNA, 22 bp, Artificial Sequence
  chemically synthesized
ctcagaaactccctagatctgt

SEQ ID NO: 63032 - DNA, 22 bp, Artificial Sequence
  chemically synthesized
agaaactccctagatctgtccc

SEQ ID NO: 63033 - DNA, 22 bp, Artificial Sequence
  chemically synthesized
cctagatctgtcccaaatgtat

SEQ ID NO: 63034 - DNA, 22 bp, Artificial Sequence
  chemically synthesized
gatctgtcccaaatgtatattc

SEQ ID NO: 63035 - DNA, 22 bp, Artificial Sequence
  chemically synthesized
tcccaaatgtatattcagatca

SEQ ID NO: 63036 - DNA, 22 bp, Artificial Sequence
  chemically synthesized
agatcatccaaggggacttctt

SEQ ID NO: 63037 - DNA, 22 bp, Artificial Sequence
  chemically synthesized
cttggggcttgagttccagatc

SEQ ID NO: 63038 - DNA, 22 bp, Artificial Sequence
  chemically synthesized
ttggggcttgagttccagatca

SEQ ID NO: 63039 - DNA, 22 bp, Artificial Sequence
  chemically synthesized
ggggcttgagttccagatcagc

SEQ ID NO: 63040 - DNA, 22 bp, Artificial Sequence
  chemically synthesized
gggcttgagttccagatcagca

SEQ ID NO: 63041 - DNA, 22 bp, Artificial Sequence
  chemically synthesized
gagttccagatcagcagcaagg

SEQ ID NO: 63042 - DNA, 22 bp, Artificial Sequence
  chemically synthesized
agttccagatcagcagcaaggg

SEQ ID NO: 63043 - DNA, 22 bp, Artificial Sequence
  chemically synthesized
cagatcagcagcaagggagcca

SEQ ID NO: 63044 - DNA, 22 bp, Artificial Sequence
  chemically synthesized
cctcagaccactcaccctcctg

SEQ ID NO: 63045 - DNA, 22 bp, Artificial Sequence
  chemically synthesized
agaccactcaccctcctggggt

SEQ ID NO: 63046 - DNA, 22 bp, Artificial Sequence
  chemically synthesized
accctcctggggtgtcccggtg

SEQ ID NO: 63047 - DNA, 22 bp, Artificial Sequence
  chemically synthesized
ctggggtgtcccggtggccagg

SEQ ID NO: 63048 - DNA, 22 bp, Artificial Sequence
  chemically synthesized
gggtgtcccggtggccagggac

SEQ ID NO: 63049 - DNA, 22 bp, Artificial Sequence
  chemically synthesized
aagtggtgatttttctggtagg

SEQ ID NO: 63050 - DNA, 22 bp, Artificial Sequence
  chemically synthesized
ttctggtagggaaggaggtaga

SEQ ID NO: 63051 - DNA, 22 bp, Artificial Sequence
  chemically synthesized
tctggtagggaaggaggtagag

SEQ ID NO: 63052 - DNA, 22 bp, Artificial Sequence
  chemically synthesized
ctggtagggaaggaggtagagg

SEQ ID NO: 63053 - DNA, 22 bp, Artificial Sequence
  chemically synthesized
tggtagggaaggaggtagaggg

SEQ ID NO: 63054 - DNA, 22 bp, Artificial Sequence
  chemically synthesized
gtagggaaggaggtagagggta

SEQ ID NO: 63055 - DNA, 22 bp, Artificial Sequence
  chemically synthesized
actgcacacaatatctgagact

SEQ ID NO: 63056 - DNA, 22 bp, Artificial Sequence
  chemically synthesized
cacacaatatctgagactggag

SEQ ID NO: 63057 - DNA, 22 bp, Artificial Sequence
  chemically synthesized
agactggagctcagatattgct

SEQ ID NO: 63058 - DNA, 22 bp, Artificial Sequence
  chemically synthesized
gagctcagatattgctgatgat

SEQ ID NO: 63059 - DNA, 22 bp, Artificial Sequence
  chemically synthesized
agatattgctgatgatcagagt

SEQ ID NO: 63060 - DNA, 22 bp, Artificial Sequence
  chemically synthesized
ctgatgatcagagttggcgtgt

SEQ ID NO: 63061 - DNA, 22 bp, Artificial Sequence
  chemically synthesized
atgatcagagttggcgtgtctc

SEQ ID NO: 63062 - DNA, 22 bp, Artificial Sequence
  chemically synthesized
gcgtgtctccccaattgattta

SEQ ID NO: 63063 - DNA, 22 bp, Artificial Sequence
  chemically synthesized
cccaattgatttacaactgggg

SEQ ID NO: 63064 - DNA, 22 bp, Artificial Sequence
  chemically synthesized
atttacaactggggcttggata

SEQ ID NO: 63065 - DNA, 22 bp, Artificial Sequence
  chemically synthesized
acaactggggcttggatactgt

SEQ ID NO: 63066 - DNA, 22 bp, Artificial Sequence
  chemically synthesized
caactggggcttggatactgtt

SEQ ID NO: 63067 - DNA, 22 bp, Artificial Sequence
  chemically synthesized
gggcttggatactgttttaaac

SEQ ID NO: 63068 - DNA, 22 bp, Artificial Sequence
  chemically synthesized
ggatactgttttaaacgggagg

SEQ ID NO: 63069 - DNA, 22 bp, Artificial Sequence
  chemically synthesized
gatactgttttaaacgggagga

SEQ ID NO: 63070 - DNA, 22 bp, Artificial Sequence
  chemically synthesized
ttttaaacgggaggagcctcct

SEQ ID NO: 63071 - DNA, 22 bp, Artificial Sequence
  chemically synthesized
taaacgggaggagcctcctaac

SEQ ID NO: 63072 - DNA, 22 bp, Artificial Sequence
  chemically synthesized
aaacgggaggagcctcctaacc

SEQ ID NO: 63073 - DNA, 22 bp, Artificial Sequence
  chemically synthesized
aacgggaggagcctcctaacca

SEQ ID NO: 63074 - DNA, 22 bp, Artificial Sequence
  chemically synthesized
ctaaccatcttgacacaaccac

SEQ ID NO: 63075 - DNA, 22 bp, Artificial Sequence
  chemically synthesized
accatcttgacacaaccactga

SEQ ID NO: 63076 - DNA, 22 bp, Artificial Sequence
  chemically synthesized
gacacaaccactgacgtgacta

SEQ ID NO: 63077 - DNA, 22 bp, Artificial Sequence
  chemically synthesized
acacaaccactgacgtgactac

SEQ ID NO: 63078 - DNA, 22 bp, Artificial Sequence
  chemically synthesized
acgtgactacactagagataga

SEQ ID NO: 63079 - DNA, 22 bp, Artificial Sequence
  chemically synthesized
cactagagatagactctttcca

SEQ ID NO: 63080 - DNA, 22 bp, Artificial Sequence
  chemically synthesized
gagatagactctttccacttaa

SEQ ID NO: 63081 - DNA, 22 bp, Artificial Sequence
  chemically synthesized
tttccacttaattctaccactc

SEQ ID NO: 63082 - DNA, 22 bp, Artificial Sequence
  chemically synthesized
tccacttaattctaccactctt

SEQ ID NO: 63083 - DNA, 22 bp, Artificial Sequence
  chemically synthesized
ccacttaattctaccactcttg

SEQ ID NO: 63084 - DNA, 22 bp, Artificial Sequence
  chemically synthesized
cacttaattctaccactcttgc

SEQ ID NO: 63085 - DNA, 22 bp, Artificial Sequence
  chemically synthesized
aattctaccactcttgctttac

SEQ ID NO: 63086 - DNA, 22 bp, Artificial Sequence
  chemically synthesized
attctaccactcttgctttact

SEQ ID NO: 63087 - DNA, 22 bp, Artificial Sequence
  chemically synthesized
taccactcttgctttacttcat

SEQ ID NO: 63088 - DNA, 22 bp, Artificial Sequence
  chemically synthesized
ccactcttgctttacttcatga

SEQ ID NO: 63089 - DNA, 22 bp, Artificial Sequence
  chemically synthesized
ttgctttacttcatgagaacga

SEQ ID NO: 63090 - DNA, 22 bp, Artificial Sequence
  chemically synthesized
gctttacttcatgagaacgaaa

SEQ ID NO: 63091 - DNA, 22 bp, Artificial Sequence
  chemically synthesized
ctttacttcatgagaacgaaaa

SEQ ID NO: 63092 - DNA, 22 bp, Artificial Sequence
  chemically synthesized
tacttcatgagaacgaaaatgt

SEQ ID NO: 63093 - DNA, 22 bp, Artificial Sequence
  chemically synthesized
acttcatgagaacgaaaatgta

SEQ ID NO: 63094 - DNA, 22 bp, Artificial Sequence
  chemically synthesized
cttcatgagaacgaaaatgtaa

SEQ ID NO: 63095 - DNA, 22 bp, Artificial Sequence
  chemically synthesized
catgagaacgaaaatgtaagat

SEQ ID NO: 63096 - DNA, 22 bp, Artificial Sequence
  chemically synthesized
atgagaacgaaaatgtaagatt

SEQ ID NO: 63097 - DNA, 22 bp, Artificial Sequence
  chemically synthesized
caccatgaattcatttgcggaa

SEQ ID NO: 63098 - DNA, 22 bp, Artificial Sequence
  chemically synthesized
atttgcggaaagattgatacta

SEQ ID NO: 63099 - DNA, 22 bp, Artificial Sequence
  chemically synthesized
gcggaaagattgatactatgct

SEQ ID NO: 63100 - DNA, 22 bp, Artificial Sequence
  chemically synthesized
cggaaagattgatactatgctt

SEQ ID NO: 63101 - DNA, 22 bp, Artificial Sequence
  chemically synthesized
atactatgcttttattttattt

SEQ ID NO: 63102 - DNA, 22 bp, Artificial Sequence
  chemically synthesized
tgcttttattttattttatttt

SEQ ID NO: 63103 - DNA, 22 bp, Artificial Sequence
  chemically synthesized
ttattttattttattttatttt

SEQ ID NO: 63104 - DNA, 22 bp, Artificial Sequence
  chemically synthesized
tattttattttattttatttta

SEQ ID NO: 63105 - DNA, 22 bp, Artificial Sequence
  chemically synthesized
attttattttattttattttat

SEQ ID NO: 63106 - DNA, 22 bp, Artificial Sequence
  chemically synthesized
ttttattttattttattttatt

SEQ ID NO: 63107 - DNA, 22 bp, Artificial Sequence
  chemically synthesized
tattttattttattttatttta

SEQ ID NO: 63108 - DNA, 22 bp, Artificial Sequence
  chemically synthesized
attttattttattttattttat

SEQ ID NO: 63109 - DNA, 22 bp, Artificial Sequence
  chemically synthesized
ttttattttattttattttatt

SEQ ID NO: 63110 - DNA, 22 bp, Artificial Sequence
  chemically synthesized
tattttattttattttatttta

SEQ ID NO: 63111 - DNA, 22 bp, Artificial Sequence
  chemically synthesized
attttattttattttattttat

SEQ ID NO: 63112 - DNA, 22 bp, Artificial Sequence
  chemically synthesized
ttttattttattttattttatt

SEQ ID NO: 63113 - DNA, 22 bp, Artificial Sequence
  chemically synthesized
tattttattttattttatttta

SEQ ID NO: 63114 - DNA, 22 bp, Artificial Sequence
  chemically synthesized
attttattttattttattttat

SEQ ID NO: 63115 - DNA, 22 bp, Artificial Sequence
  chemically synthesized
ttttattttattttattttatt

SEQ ID NO: 63116 - DNA, 22 bp, Artificial Sequence
  chemically synthesized
tattttattttattttatttta

SEQ ID NO: 63117 - DNA, 22 bp, Artificial Sequence
  chemically synthesized
attttattttattttattttat

SEQ ID NO: 63118 - DNA, 22 bp, Artificial Sequence
  chemically synthesized
ttttattttattttattttatt

SEQ ID NO: 63119 - DNA, 22 bp, Artificial Sequence
  chemically synthesized
tattttattttattttattgag

SEQ ID NO: 63120 - DNA, 22 bp, Artificial Sequence
  chemically synthesized
attttattttattttattgaga

SEQ ID NO: 63121 - DNA, 22 bp, Artificial Sequence
  chemically synthesized
ttttattttattttattgagac

SEQ ID NO: 63122 - DNA, 22 bp, Artificial Sequence
  chemically synthesized
tattttattttattgagactct

SEQ ID NO: 63123 - DNA, 22 bp, Artificial Sequence
  chemically synthesized
attttattttattgagactctc

SEQ ID NO: 63124 - DNA, 22 bp, Artificial Sequence
  chemically synthesized
ttttattttattgagactctca

SEQ ID NO: 63125 - DNA, 22 bp, Artificial Sequence
  chemically synthesized
tattttattgagactctcaccc

SEQ ID NO: 63126 - DNA, 22 bp, Artificial Sequence
  chemically synthesized
attttattgagactctcacccc

SEQ ID NO: 63127 - DNA, 22 bp, Artificial Sequence
  chemically synthesized
ttttattgagactctcaccccg

SEQ ID NO: 63128 - DNA, 22 bp, Artificial Sequence
  chemically synthesized
tattgagactctcaccccggtt

SEQ ID NO: 63129 - DNA, 22 bp, Artificial Sequence
  chemically synthesized
attgagactctcaccccggttg

SEQ ID NO: 63130 - DNA, 22 bp, Artificial Sequence
  chemically synthesized
ttgagactctcaccccggttga

SEQ ID NO: 63131 - DNA, 22 bp, Artificial Sequence
  chemically synthesized
agactctcaccccggttgaagt

SEQ ID NO: 63132 - DNA, 22 bp, Artificial Sequence
  chemically synthesized
tcaccccggttgaagtgcactg

SEQ ID NO: 63133 - DNA, 22 bp, Artificial Sequence
  chemically synthesized
accccggttgaagtgcactgac

SEQ ID NO: 63134 - DNA, 22 bp, Artificial Sequence
  chemically synthesized
aagtgcactgacgtgattttgg

SEQ ID NO: 63135 - DNA, 22 bp, Artificial Sequence
  chemically synthesized
acgtgattttggctcactgcaa

SEQ ID NO: 63136 - DNA, 22 bp, Artificial Sequence
  chemically synthesized
tggctcactgcaacttccacct

SEQ ID NO: 63137 - DNA, 22 bp, Artificial Sequence
  chemically synthesized
ggctcactgcaacttccacctc

SEQ ID NO: 63138 - DNA, 22 bp, Artificial Sequence
  chemically synthesized
gctcactgcaacttccacctcc

SEQ ID NO: 63139 - DNA, 22 bp, Artificial Sequence
  chemically synthesized
actgcaacttccacctcctggg

SEQ ID NO: 63140 - DNA, 22 bp, Artificial Sequence
  chemically synthesized
caacttccacctcctgggttca

SEQ ID NO: 63141 - DNA, 22 bp, Artificial Sequence
  chemically synthesized
ccacctcctgggttcaagtgaa

SEQ ID NO: 63142 - DNA, 22 bp, Artificial Sequence
  chemically synthesized
cacctcctgggttcaagtgaat

SEQ ID NO: 63143 - DNA, 22 bp, Artificial Sequence
  chemically synthesized
ctgggttcaagtgaatactcca

SEQ ID NO: 63144 - DNA, 22 bp, Artificial Sequence
  chemically synthesized
ggttcaagtgaatactccagcc

SEQ ID NO: 63145 - DNA, 22 bp, Artificial Sequence
  chemically synthesized
aagtgaatactccagcctccct

SEQ ID NO: 63146 - DNA, 22 bp, Artificial Sequence
  chemically synthesized
cagcctccctagtagctgggat

SEQ ID NO: 63147 - DNA, 22 bp, Artificial Sequence
  chemically synthesized
cctagtagctgggattacaggt

SEQ ID NO: 63148 - DNA, 22 bp, Artificial Sequence
  chemically synthesized
gtagctgggattacaggtgccc

SEQ ID NO: 63149 - DNA, 22 bp, Artificial Sequence
  chemically synthesized
ggattacaggtgcccaccacca

SEQ ID NO: 63150 - DNA, 22 bp, Artificial Sequence
  chemically synthesized
caggtgcccaccaccacgcctg

SEQ ID NO: 63151 - DNA, 22 bp, Artificial Sequence
  chemically synthesized
gctaatttttgtatttttagta

SEQ ID NO: 63152 - DNA, 22 bp, Artificial Sequence
  chemically synthesized
atttttgtatttttagtagaga

SEQ ID NO: 63153 - DNA, 22 bp, Artificial Sequence
  chemically synthesized
ttgtatttttagtagagatggg

SEQ ID NO: 63154 - DNA, 22 bp, Artificial Sequence
  chemically synthesized
tgtatttttagtagagatgggg

SEQ ID NO: 63155 - DNA, 22 bp, Artificial Sequence
  chemically synthesized
gtatttttagtagagatggggt

SEQ ID NO: 63156 - DNA, 22 bp, Artificial Sequence
  chemically synthesized
tatttttagtagagatggggtt

SEQ ID NO: 63157 - DNA, 22 bp, Artificial Sequence
  chemically synthesized
ttagtagagatggggtttcacc

SEQ ID NO: 63158 - DNA, 22 bp, Artificial Sequence
  chemically synthesized
tagtagagatggggtttcacca

SEQ ID NO: 63159 - DNA, 22 bp, Artificial Sequence
  chemically synthesized
agtagagatggggtttcaccac

SEQ ID NO: 63160 - DNA, 22 bp, Artificial Sequence
  chemically synthesized
gtagagatggggtttcaccaca

SEQ ID NO: 63161 - DNA, 22 bp, Artificial Sequence
  chemically synthesized
caccacattggcctggctggtc

SEQ ID NO: 63162 - DNA, 22 bp, Artificial Sequence
  chemically synthesized
accacattggcctggctggtct

SEQ ID NO: 63163 - DNA, 22 bp, Artificial Sequence
  chemically synthesized
gcctggctggtctcaaactcct

SEQ ID NO: 63164 - DNA, 22 bp, Artificial Sequence
  chemically synthesized
gctggtctcaaactcctgacct

SEQ ID NO: 63165 - DNA, 22 bp, Artificial Sequence
  chemically synthesized
gtctcaaactcctgaccttgtg

SEQ ID NO: 63166 - DNA, 22 bp, Artificial Sequence
  chemically synthesized
aaactcctgaccttgtgatcca

SEQ ID NO: 63167 - DNA, 22 bp, Artificial Sequence
  chemically synthesized
ctgaccttgtgatccacctgtc

SEQ ID NO: 63168 - DNA, 22 bp, Artificial Sequence
  chemically synthesized
accttgtgatccacctgtcttg

SEQ ID NO: 63169 - DNA, 22 bp, Artificial Sequence
  chemically synthesized
gtgatccacctgtcttggcctc

SEQ ID NO: 63170 - DNA, 22 bp, Artificial Sequence
  chemically synthesized
tgatccacctgtcttggcctcc

SEQ ID NO: 63171 - DNA, 22 bp, Artificial Sequence
  chemically synthesized
tcttggcctcccaaagtgctgg

SEQ ID NO: 63172 - DNA, 22 bp, Artificial Sequence
  chemically synthesized
ggcctcccaaagtgctgggatt

SEQ ID NO: 63173 - DNA, 22 bp, Artificial Sequence
  chemically synthesized
gcctcccaaagtgctgggatta

SEQ ID NO: 63174 - DNA, 22 bp, Artificial Sequence
  chemically synthesized
ccaaagtgctgggattacagag

SEQ ID NO: 63175 - DNA, 22 bp, Artificial Sequence
  chemically synthesized
ggattacagagttgagccaccg

SEQ ID NO: 63176 - DNA, 22 bp, Artificial Sequence
  chemically synthesized
cagagttgagccaccgcactcg

SEQ ID NO: 63177 - DNA, 22 bp, Artificial Sequence
  chemically synthesized
agccaccgcactcgaccctatg

SEQ ID NO: 63178 - DNA, 22 bp, Artificial Sequence
  chemically synthesized
gaccctatgttttatttttaaa

SEQ ID NO: 63179 - DNA, 22 bp, Artificial Sequence
  chemically synthesized
tgttttatttttaaaaatattt

SEQ ID NO: 63180 - DNA, 22 bp, Artificial Sequence
  chemically synthesized
tatttttaaaaatatttattta

SEQ ID NO: 63181 - DNA, 22 bp, Artificial Sequence
  chemically synthesized
atttttaaaaatatttatttat

SEQ ID NO: 63182 - DNA, 22 bp, Artificial Sequence
  chemically synthesized
tttttaaaaatatttatttatt

SEQ ID NO: 63183 - DNA, 22 bp, Artificial Sequence
  chemically synthesized
ttaaaaatatttatttatttat

SEQ ID NO: 63184 - DNA, 22 bp, Artificial Sequence
  chemically synthesized
taaaaatatttatttatttatt

SEQ ID NO: 63185 - DNA, 22 bp, Artificial Sequence
  chemically synthesized
aaaaatatttatttatttattt

SEQ ID NO: 63186 - DNA, 22 bp, Artificial Sequence
  chemically synthesized
aaaatatttatttatttattta

SEQ ID NO: 63187 - DNA, 22 bp, Artificial Sequence
  chemically synthesized
atttatttatttaagccacaac

SEQ ID NO: 63188 - DNA, 22 bp, Artificial Sequence
  chemically synthesized
tttatttatttaagccacaact

SEQ ID NO: 63189 - DNA, 22 bp, Artificial Sequence
  chemically synthesized
atttatttaagccacaactact

SEQ ID NO: 63190 - DNA, 22 bp, Artificial Sequence
  chemically synthesized
tttatttaagccacaactacta

SEQ ID NO: 63191 - DNA, 22 bp, Artificial Sequence
  chemically synthesized
atttaagccacaactactagaa

SEQ ID NO: 63192 - DNA, 22 bp, Artificial Sequence
  chemically synthesized
tttaagccacaactactagaat

SEQ ID NO: 63193 - DNA, 22 bp, Artificial Sequence
  chemically synthesized
aagccacaactactagaatagg

SEQ ID NO: 63194 - DNA, 22 bp, Artificial Sequence
  chemically synthesized
agccacaactactagaatagga

SEQ ID NO: 63195 - DNA, 22 bp, Artificial Sequence
  chemically synthesized
ctagaataggaaggattgatat

SEQ ID NO: 63196 - DNA, 22 bp, Artificial Sequence
  chemically synthesized
gaataggaaggattgatatttt

SEQ ID NO: 63197 - DNA, 22 bp, Artificial Sequence
  chemically synthesized
atattttattaattttatttgg

SEQ ID NO: 63198 - DNA, 22 bp, Artificial Sequence
  chemically synthesized
tattaattttatttggtattta

SEQ ID NO: 63199 - DNA, 22 bp, Artificial Sequence
  chemically synthesized
attaattttatttggtatttat

SEQ ID NO: 63200 - DNA, 22 bp, Artificial Sequence
  chemically synthesized
ttaattttatttggtatttatt

SEQ ID NO: 63201 - DNA, 22 bp, Artificial Sequence
  chemically synthesized
attttatttggtatttattatt

SEQ ID NO: 63202 - DNA, 22 bp, Artificial Sequence
  chemically synthesized
tatttggtatttattatttttt

SEQ ID NO: 63203 - DNA, 22 bp, Artificial Sequence
  chemically synthesized
atttggtatttattattttttt

SEQ ID NO: 63204 - DNA, 22 bp, Artificial Sequence
  chemically synthesized
tttggtatttattatttttttt

SEQ ID NO: 63205 - DNA, 22 bp, Artificial Sequence
  chemically synthesized
ggtatttattatttttttttct

SEQ ID NO: 63206 - DNA, 22 bp, Artificial Sequence
  chemically synthesized
gtatttattatttttttttctt

SEQ ID NO: 63207 - DNA, 22 bp, Artificial Sequence
  chemically synthesized
attatttttttttctttcctga

SEQ ID NO: 63208 - DNA, 22 bp, Artificial Sequence
  chemically synthesized
ttatttttttttctttcctgag

SEQ ID NO: 63209 - DNA, 22 bp, Artificial Sequence
  chemically synthesized
tttttttttctttcctgagaca

SEQ ID NO: 63210 - DNA, 22 bp, Artificial Sequence
  chemically synthesized
ttttttctttcctgagacattc

SEQ ID NO: 63211 - DNA, 22 bp, Artificial Sequence
  chemically synthesized
tttttctttcctgagacattct

SEQ ID NO: 63212 - DNA, 22 bp, Artificial Sequence
  chemically synthesized
ttttctttcctgagacattctt

SEQ ID NO: 63213 - DNA, 22 bp, Artificial Sequence
  chemically synthesized
tttctttcctgagacattcttg

SEQ ID NO: 63214 - DNA, 22 bp, Artificial Sequence
  chemically synthesized
ttctttcctgagacattcttgc

SEQ ID NO: 63215 - DNA, 22 bp, Artificial Sequence
  chemically synthesized
tctttcctgagacattcttgct

SEQ ID NO: 63216 - DNA, 22 bp, Artificial Sequence
  chemically synthesized
ctttcctgagacattcttgctc

SEQ ID NO: 63217 - DNA, 22 bp, Artificial Sequence
  chemically synthesized
tttcctgagacattcttgctct

SEQ ID NO: 63218 - DNA, 22 bp, Artificial Sequence
  chemically synthesized
tcctgagacattcttgctctgt

SEQ ID NO: 63219 - DNA, 22 bp, Artificial Sequence
  chemically synthesized
cctgagacattcttgctctgtc

SEQ ID NO: 63220 - DNA, 22 bp, Artificial Sequence
  chemically synthesized
ctgagacattcttgctctgtca

SEQ ID NO: 63221 - DNA, 22 bp, Artificial Sequence
  chemically synthesized
agacattcttgctctgtcaccc

SEQ ID NO: 63222 - DNA, 22 bp, Artificial Sequence
  chemically synthesized
ttgctctgtcacccaggctgga

SEQ ID NO: 63223 - DNA, 22 bp, Artificial Sequence
  chemically synthesized
gctctgtcacccaggctggagt

SEQ ID NO: 63224 - DNA, 22 bp, Artificial Sequence
  chemically synthesized
ctctgtcacccaggctggagtg

SEQ ID NO: 63225 - DNA, 22 bp, Artificial Sequence
  chemically synthesized
tgtcacccaggctggagtgcag

SEQ ID NO: 63226 - DNA, 22 bp, Artificial Sequence
  chemically synthesized
tcacccaggctggagtgcagtg

SEQ ID NO: 63227 - DNA, 22 bp, Artificial Sequence
  chemically synthesized
gagtgcagtggcacattcttgg

SEQ ID NO: 63228 - DNA, 22 bp, Artificial Sequence
  chemically synthesized
ttggctcactgcaacctccatc

SEQ ID NO: 63229 - DNA, 22 bp, Artificial Sequence
  chemically synthesized
ggctcactgcaacctccatctc

SEQ ID NO: 63230 - DNA, 22 bp, Artificial Sequence
  chemically synthesized
gctcactgcaacctccatctcc

SEQ ID NO: 63231 - DNA, 22 bp, Artificial Sequence
  chemically synthesized
actgcaacctccatctcctgtg

SEQ ID NO: 63232 - DNA, 22 bp, Artificial Sequence
  chemically synthesized
caacctccatctcctgtgttca

SEQ ID NO: 63233 - DNA, 22 bp, Artificial Sequence
  chemically synthesized
catctcctgtgttcaagcaatt

SEQ ID NO: 63234 - DNA, 22 bp, Artificial Sequence
  chemically synthesized
ctgtgttcaagcaattctagtg

SEQ ID NO: 63235 - DNA, 22 bp, Artificial Sequence
  chemically synthesized
tgttcaagcaattctagtgcct

SEQ ID NO: 63236 - DNA, 22 bp, Artificial Sequence
  chemically synthesized
aagcaattctagtgcctcagcc

SEQ ID NO: 63237 - DNA, 22 bp, Artificial Sequence
  chemically synthesized
tagtgcctcagcctacttagta

SEQ ID NO: 63238 - DNA, 22 bp, Artificial Sequence
  chemically synthesized
gtgcctcagcctacttagtagc

SEQ ID NO: 63239 - DNA, 22 bp, Artificial Sequence
  chemically synthesized
agcctacttagtagctgggatg

SEQ ID NO: 63240 - DNA, 22 bp, Artificial Sequence
  chemically synthesized
cttagtagctgggatgactggc

SEQ ID NO: 63241 - DNA, 22 bp, Artificial Sequence
  chemically synthesized
agtagctgggatgactggcatg

SEQ ID NO: 63242 - DNA, 22 bp, Artificial Sequence
  chemically synthesized
gtagctgggatgactggcatgt

SEQ ID NO: 63243 - DNA, 22 bp, Artificial Sequence
  chemically synthesized
ggatgactggcatgtgcctcca

SEQ ID NO: 63244 - DNA, 22 bp, Artificial Sequence
  chemically synthesized
gcatgtgcctccacacccagct

SEQ ID NO: 63245 - DNA, 22 bp, Artificial Sequence
  chemically synthesized
cacacccagctaatttttgtat

SEQ ID NO: 63246 - DNA, 22 bp, Artificial Sequence
  chemically synthesized
atttttgtattttttgtagaga

SEQ ID NO: 63247 - DNA, 22 bp, Artificial Sequence
  chemically synthesized
ttgtattttttgtagagacagg

SEQ ID NO: 63248 - DNA, 22 bp, Artificial Sequence
  chemically synthesized
tgtattttttgtagagacaggg

SEQ ID NO: 63249 - DNA, 22 bp, Artificial Sequence
  chemically synthesized
gtattttttgtagagacagggt

SEQ ID NO: 63250 - DNA, 22 bp, Artificial Sequence
  chemically synthesized
tattttttgtagagacagggtt

SEQ ID NO: 63251 - DNA, 22 bp, Artificial Sequence
  chemically synthesized
tttgtagagacagggttttggc

SEQ ID NO: 63252 - DNA, 22 bp, Artificial Sequence
  chemically synthesized
ttgtagagacagggttttggca

SEQ ID NO: 63253 - DNA, 22 bp, Artificial Sequence
  chemically synthesized
tgtagagacagggttttggcat

SEQ ID NO: 63254 - DNA, 22 bp, Artificial Sequence
  chemically synthesized
gtagagacagggttttggcatg

SEQ ID NO: 63255 - DNA, 22 bp, Artificial Sequence
  chemically synthesized
tagagacagggttttggcatgt

SEQ ID NO: 63256 - DNA, 22 bp, Artificial Sequence
  chemically synthesized
tggcatgttgcccaggcttgtc

SEQ ID NO: 63257 - DNA, 22 bp, Artificial Sequence
  chemically synthesized
ggcatgttgcccaggcttgtct

SEQ ID NO: 63258 - DNA, 22 bp, Artificial Sequence
  chemically synthesized
gcatgttgcccaggcttgtctc

SEQ ID NO: 63259 - DNA, 22 bp, Artificial Sequence
  chemically synthesized
cccaggcttgtctcaaactcct

SEQ ID NO: 63260 - DNA, 22 bp, Artificial Sequence
  chemically synthesized
gtctcaaactcctggcctcagg

SEQ ID NO: 63261 - DNA, 22 bp, Artificial Sequence
  chemically synthesized
tctcaaactcctggcctcaggt

SEQ ID NO: 63262 - DNA, 22 bp, Artificial Sequence
  chemically synthesized
aaactcctggcctcaggtgatc

SEQ ID NO: 63263 - DNA, 22 bp, Artificial Sequence
  chemically synthesized
ctggcctcaggtgatccatctg

SEQ ID NO: 63264 - DNA, 22 bp, Artificial Sequence
  chemically synthesized
gcctcaggtgatccatctgccg

SEQ ID NO: 63265 - DNA, 22 bp, Artificial Sequence
  chemically synthesized
aggtgatccatctgccgtggcc

SEQ ID NO: 63266 - DNA, 22 bp, Artificial Sequence
  chemically synthesized
ccgtggcctcccaaaatgctgg

SEQ ID NO: 63267 - DNA, 22 bp, Artificial Sequence
  chemically synthesized
ccaaaatgctgggattataggc

SEQ ID NO: 63268 - DNA, 22 bp, Artificial Sequence
  chemically synthesized
ggattataggcatgagccacca

SEQ ID NO: 63269 - DNA, 22 bp, Artificial Sequence
  chemically synthesized
taggcatgagccaccaccccct

SEQ ID NO: 63270 - DNA, 22 bp, Artificial Sequence
  chemically synthesized
ctggaaggattgatatcttata

SEQ ID NO: 63271 - DNA, 22 bp, Artificial Sequence
  chemically synthesized
gaaggattgatatcttataaca

SEQ ID NO: 63272 - DNA, 22 bp, Artificial Sequence
  chemically synthesized
atatcttataacataatttata

SEQ ID NO: 63273 - DNA, 22 bp, Artificial Sequence
  chemically synthesized
ataacataatttataattacag

SEQ ID NO: 63274 - DNA, 22 bp, Artificial Sequence
  chemically synthesized
taacataatttataattacaga

SEQ ID NO: 63275 - DNA, 22 bp, Artificial Sequence
  chemically synthesized
ataattacagaaaacatgtgag

SEQ ID NO: 63276 - DNA, 22 bp, Artificial Sequence
  chemically synthesized
taattacagaaaacatgtgagt

SEQ ID NO: 63277 - DNA, 22 bp, Artificial Sequence
  chemically synthesized
cagaaaacatgtgagttcacta

SEQ ID NO: 63278 - DNA, 22 bp, Artificial Sequence
  chemically synthesized
actaggaataaataaattttga

SEQ ID NO: 63279 - DNA, 22 bp, Artificial Sequence
  chemically synthesized
ggaataaataaattttgaagat

SEQ ID NO: 63280 - DNA, 22 bp, Artificial Sequence
  chemically synthesized
tgaagataataaaagattttca

SEQ ID NO: 63281 - DNA, 22 bp, Artificial Sequence
  chemically synthesized
gaagataataaaagattttcac

SEQ ID NO: 63282 - DNA, 22 bp, Artificial Sequence
  chemically synthesized
aagataataaaagattttcact

SEQ ID NO: 63283 - DNA, 22 bp, Artificial Sequence
  chemically synthesized
tcacttatgttgtcatttcggc

SEQ ID NO: 63284 - DNA, 22 bp, Artificial Sequence
  chemically synthesized
cacttatgttgtcatttcggca

SEQ ID NO: 63285 - DNA, 22 bp, Artificial Sequence
  chemically synthesized
acttatgttgtcatttcggcac

SEQ ID NO: 63286 - DNA, 22 bp, Artificial Sequence
  chemically synthesized
atgttgtcatttcggcacagtt

SEQ ID NO: 63287 - DNA, 22 bp, Artificial Sequence
  chemically synthesized
tgttgtcatttcggcacagttt

SEQ ID NO: 63288 - DNA, 22 bp, Artificial Sequence
  chemically synthesized
tcatttcggcacagtttggtat

SEQ ID NO: 63289 - DNA, 22 bp, Artificial Sequence
  chemically synthesized
cggcacagtttggtataggatg

SEQ ID NO: 63290 - DNA, 22 bp, Artificial Sequence
  chemically synthesized
ggcacagtttggtataggatgt

SEQ ID NO: 63291 - DNA, 22 bp, Artificial Sequence
  chemically synthesized
ggtataggatgtggagatgtta

SEQ ID NO: 63292 - DNA, 22 bp, Artificial Sequence
  chemically synthesized
gtataggatgtggagatgttaa

SEQ ID NO: 63293 - DNA, 22 bp, Artificial Sequence
  chemically synthesized
acatttatacctagcttgctcg

SEQ ID NO: 63294 - DNA, 22 bp, Artificial Sequence
  chemically synthesized
atacctagcttgctcgtaaact

SEQ ID NO: 63295 - DNA, 22 bp, Artificial Sequence
  chemically synthesized
tacctagcttgctcgtaaacta

SEQ ID NO: 63296 - DNA, 22 bp, Artificial Sequence
  chemically synthesized
gcttgctcgtaaactaagacct

SEQ ID NO: 63297 - DNA, 22 bp, Artificial Sequence
  chemically synthesized
gctcgtaaactaagacctgaaa

SEQ ID NO: 63298 - DNA, 22 bp, Artificial Sequence
  chemically synthesized
ctcgtaaactaagacctgaaag

SEQ ID NO: 63299 - DNA, 22 bp, Artificial Sequence
  chemically synthesized
gtaaactaagacctgaaagggt

SEQ ID NO: 63300 - DNA, 22 bp, Artificial Sequence
  chemically synthesized
agacctgaaagggttgtgtcta

SEQ ID NO: 63301 - DNA, 22 bp, Artificial Sequence
  chemically synthesized
aaagggttgtgtctatcagctg

SEQ ID NO: 63302 - DNA, 22 bp, Artificial Sequence
  chemically synthesized
tgtctatcagctgcacccctgg

SEQ ID NO: 63303 - DNA, 22 bp, Artificial Sequence
  chemically synthesized
tcagctgcacccctgggtagcg

SEQ ID NO: 63304 - DNA, 22 bp, Artificial Sequence
  chemically synthesized
cacccctgggtagcgacacaac

SEQ ID NO: 63305 - DNA, 22 bp, Artificial Sequence
  chemically synthesized
ggtagcgacacaacctcgggaa

SEQ ID NO: 63306 - DNA, 22 bp, Artificial Sequence
  chemically synthesized
gggaaggcctcagccccctcct

SEQ ID NO: 63307 - DNA, 22 bp, Artificial Sequence
  chemically synthesized
agccccctcctcgtacagcact

SEQ ID NO: 63308 - DNA, 22 bp, Artificial Sequence
  chemically synthesized
ctcgtacagcactgcctgttgg

SEQ ID NO: 63309 - DNA, 22 bp, Artificial Sequence
  chemically synthesized
gtacagcactgcctgttggaaa

SEQ ID NO: 63310 - DNA, 22 bp, Artificial Sequence
  chemically synthesized
cctgttggaaagcttgagggag

SEQ ID NO: 63311 - DNA, 22 bp, Artificial Sequence
  chemically synthesized
ttggaaagcttgagggaggcta

SEQ ID NO: 63312 - DNA, 22 bp, Artificial Sequence
  chemically synthesized
gaaagcttgagggaggctatgg

SEQ ID NO: 63313 - DNA, 22 bp, Artificial Sequence
  chemically synthesized
gagggaggctatggatgtgcag

SEQ ID NO: 63314 - DNA, 22 bp, Artificial Sequence
  chemically synthesized
agggaggctatggatgtgcagc

SEQ ID NO: 63315 - DNA, 22 bp, Artificial Sequence
  chemically synthesized
tggatgtgcagcacttggcaga

SEQ ID NO: 63316 - DNA, 22 bp, Artificial Sequence
  chemically synthesized
ggcagagggtctggtcatggaa

SEQ ID NO: 63317 - DNA, 22 bp, Artificial Sequence
  chemically synthesized
gcagagggtctggtcatggaag

SEQ ID NO: 63318 - DNA, 22 bp, Artificial Sequence
  chemically synthesized
gtcatggaagttaccagcaaat

SEQ ID NO: 63319 - DNA, 22 bp, Artificial Sequence
  chemically synthesized
ccagcaaatatgagctactttt

SEQ ID NO: 63320 - DNA, 22 bp, Artificial Sequence
  chemically synthesized
cttttatgattttattttatcc

SEQ ID NO: 63321 - DNA, 22 bp, Artificial Sequence
  chemically synthesized
ttatgattttattttatccaaa

SEQ ID NO: 63322 - DNA, 22 bp, Artificial Sequence
  chemically synthesized
tatgattttattttatccaaaa

SEQ ID NO: 63323 - DNA, 22 bp, Artificial Sequence
  chemically synthesized
atgattttattttatccaaaag

SEQ ID NO: 63324 - DNA, 22 bp, Artificial Sequence
  chemically synthesized
tgattttattttatccaaaaga

SEQ ID NO: 63325 - DNA, 22 bp, Artificial Sequence
  chemically synthesized
tattttatccaaaagaaagaga

SEQ ID NO: 63326 - DNA, 22 bp, Artificial Sequence
  chemically synthesized
attttatccaaaagaaagagaa

SEQ ID NO: 63327 - DNA, 22 bp, Artificial Sequence
  chemically synthesized
ttttatccaaaagaaagagaat

SEQ ID NO: 63328 - DNA, 22 bp, Artificial Sequence
  chemically synthesized
tatccaaaagaaagagaatgaa

SEQ ID NO: 63329 - DNA, 22 bp, Artificial Sequence
  chemically synthesized
atccaaaagaaagagaatgaaa

SEQ ID NO: 63330 - DNA, 22 bp, Artificial Sequence
  chemically synthesized
tccaaaagaaagagaatgaaag

SEQ ID NO: 63331 - DNA, 22 bp, Artificial Sequence
  chemically synthesized
atcaggaaagatgaaggtctag

SEQ ID NO: 63332 - DNA, 22 bp, Artificial Sequence
  chemically synthesized
ggggtgagggaaggagtaagga

SEQ ID NO: 63333 - DNA, 22 bp, Artificial Sequence
  chemically synthesized
aggggggaaatggctttcacca

SEQ ID NO: 63334 - DNA, 22 bp, Artificial Sequence
  chemically synthesized
tcaccacttcccagcatctatt

SEQ ID NO: 63335 - DNA, 22 bp, Artificial Sequence
  chemically synthesized
caccacttcccagcatctattg

SEQ ID NO: 63336 - DNA, 22 bp, Artificial Sequence
  chemically synthesized
accacttcccagcatctattga

SEQ ID NO: 63337 - DNA, 22 bp, Artificial Sequence
  chemically synthesized
cccagcatctattgacattgca

SEQ ID NO: 63338 - DNA, 22 bp, Artificial Sequence
  chemically synthesized
ccagcatctattgacattgcac

SEQ ID NO: 63339 - DNA, 22 bp, Artificial Sequence
  chemically synthesized
ttgacattgcactctcaaatat

SEQ ID NO: 63340 - DNA, 22 bp, Artificial Sequence
  chemically synthesized
acattgcactctcaaatatttt

SEQ ID NO: 63341 - DNA, 22 bp, Artificial Sequence
  chemically synthesized
cactctcaaatattttataaga

SEQ ID NO: 63342 - DNA, 22 bp, Artificial Sequence
  chemically synthesized
tcaaatattttataagactcta

SEQ ID NO: 63343 - DNA, 22 bp, Artificial Sequence
  chemically synthesized
aaatattttataagactctata

SEQ ID NO: 63344 - DNA, 22 bp, Artificial Sequence
  chemically synthesized
tataagactctatattcaaggt

SEQ ID NO: 63345 - DNA, 22 bp, Artificial Sequence
  chemically synthesized
ataagactctatattcaaggta

SEQ ID NO: 63346 - DNA, 22 bp, Artificial Sequence
  chemically synthesized
taagactctatattcaaggtaa

SEQ ID NO: 63347 - DNA, 22 bp, Artificial Sequence
  chemically synthesized
tatattcaaggtaatgtttgaa

SEQ ID NO: 63348 - DNA, 22 bp, Artificial Sequence
  chemically synthesized
tattcaaggtaatgtttgaacc

SEQ ID NO: 63349 - DNA, 22 bp, Artificial Sequence
  chemically synthesized
aaggtaatgtttgaaccctgct

SEQ ID NO: 63350 - DNA, 22 bp, Artificial Sequence
  chemically synthesized
gaaccctgctgagccagtggca

SEQ ID NO: 63351 - DNA, 22 bp, Artificial Sequence
  chemically synthesized
aaccctgctgagccagtggcat

SEQ ID NO: 63352 - DNA, 22 bp, Artificial Sequence
  chemically synthesized
ctgagccagtggcatgggtctc

SEQ ID NO: 63353 - DNA, 22 bp, Artificial Sequence
  chemically synthesized
agccagtggcatgggtctctga

SEQ ID NO: 63354 - DNA, 22 bp, Artificial Sequence
  chemically synthesized
tgagagaatcattaacttaatt

SEQ ID NO: 63355 - DNA, 22 bp, Artificial Sequence
  chemically synthesized
agagaatcattaacttaatttg

SEQ ID NO: 63356 - DNA, 22 bp, Artificial Sequence
  chemically synthesized
acttaatttgactatctggttt

SEQ ID NO: 63357 - DNA, 22 bp, Artificial Sequence
  chemically synthesized
aatttgactatctggtttgtgg

SEQ ID NO: 63358 - DNA, 22 bp, Artificial Sequence
  chemically synthesized
atttgactatctggtttgtggg

SEQ ID NO: 63359 - DNA, 22 bp, Artificial Sequence
  chemically synthesized
gactatctggtttgtgggtgcg

SEQ ID NO: 63360 - DNA, 22 bp, Artificial Sequence
  chemically synthesized
actatctggtttgtgggtgcgt

SEQ ID NO: 63361 - DNA, 22 bp, Artificial Sequence
  chemically synthesized
tctggtttgtgggtgcgtttac

SEQ ID NO: 63362 - DNA, 22 bp, Artificial Sequence
  chemically synthesized
gtttgtgggtgcgtttactctc

SEQ ID NO: 63363 - DNA, 22 bp, Artificial Sequence
  chemically synthesized
gtgggtgcgtttactctcatgt

SEQ ID NO: 63364 - DNA, 22 bp, Artificial Sequence
  chemically synthesized
tgggtgcgtttactctcatgta

SEQ ID NO: 63365 - DNA, 22 bp, Artificial Sequence
  chemically synthesized
actctcatgtaagtcaacaatg

SEQ ID NO: 63366 - DNA, 22 bp, Artificial Sequence
  chemically synthesized
ctctcatgtaagtcaacaatgt

SEQ ID NO: 63367 - DNA, 22 bp, Artificial Sequence
  chemically synthesized
tcatgtaagtcaacaatgtcct

SEQ ID NO: 63368 - DNA, 22 bp, Artificial Sequence
  chemically synthesized
atgtaagtcaacaatgtcctgg

SEQ ID NO: 63369 - DNA, 22 bp, Artificial Sequence
  chemically synthesized
ggattgggacacactttctggg

SEQ ID NO: 63370 - DNA, 22 bp, Artificial Sequence
  chemically synthesized
ggacacactttctgggcactgc

SEQ ID NO: 63371 - DNA, 22 bp, Artificial Sequence
  chemically synthesized
tctgggcactgctggccagtcc

SEQ ID NO: 63372 - DNA, 22 bp, Artificial Sequence
  chemically synthesized
ctgggcactgctggccagtccc

SEQ ID NO: 63373 - DNA, 22 bp, Artificial Sequence
  chemically synthesized
tgggcactgctggccagtccca

SEQ ID NO: 63374 - DNA, 22 bp, Artificial Sequence
  chemically synthesized
ggcactgctggccagtcccaaa

SEQ ID NO: 63375 - DNA, 22 bp, Artificial Sequence
  chemically synthesized
ctggccagtcccaaaatggaac

SEQ ID NO: 63376 - DNA, 22 bp, Artificial Sequence
  chemically synthesized
gccagtcccaaaatggaacata

SEQ ID NO: 63377 - DNA, 22 bp, Artificial Sequence
  chemically synthesized
ttctacttcttttatttctgaa

SEQ ID NO: 63378 - DNA, 22 bp, Artificial Sequence
  chemically synthesized
ctacttcttttatttctgaaat

SEQ ID NO: 63379 - DNA, 22 bp, Artificial Sequence
  chemically synthesized
tacttcttttatttctgaaatc

SEQ ID NO: 63380 - DNA, 22 bp, Artificial Sequence
  chemically synthesized
cttcttttatttctgaaatcag

SEQ ID NO: 63381 - DNA, 22 bp, Artificial Sequence
  chemically synthesized
cttttatttctgaaatcaggta

SEQ ID NO: 63382 - DNA, 22 bp, Artificial Sequence
  chemically synthesized
ttttatttctgaaatcaggtaa

SEQ ID NO: 63383 - DNA, 22 bp, Artificial Sequence
  chemically synthesized
ttatttctgaaatcaggtaaga

SEQ ID NO: 63384 - DNA, 22 bp, Artificial Sequence
  chemically synthesized
tatttctgaaatcaggtaagac

SEQ ID NO: 63385 - DNA, 22 bp, Artificial Sequence
  chemically synthesized
atttctgaaatcaggtaagaca

SEQ ID NO: 63386 - DNA, 22 bp, Artificial Sequence
  chemically synthesized
tttctgaaatcaggtaagacat

SEQ ID NO: 63387 - DNA, 22 bp, Artificial Sequence
  chemically synthesized
ctgaaatcaggtaagacatagt

SEQ ID NO: 63388 - DNA, 22 bp, Artificial Sequence
  chemically synthesized
tgaaatcaggtaagacatagtt

SEQ ID NO: 63389 - DNA, 22 bp, Artificial Sequence
  chemically synthesized
aaatcaggtaagacatagtttt

SEQ ID NO: 63390 - DNA, 22 bp, Artificial Sequence
  chemically synthesized
ttttaaattataagaattattt

SEQ ID NO: 63391 - DNA, 22 bp, Artificial Sequence
  chemically synthesized
tttaaattataagaattatttt

SEQ ID NO: 63392 - DNA, 22 bp, Artificial Sequence
  chemically synthesized
ttaaattataagaattattttt

SEQ ID NO: 63393 - DNA, 22 bp, Artificial Sequence
  chemically synthesized
taaattataagaattatttttt

SEQ ID NO: 63394 - DNA, 22 bp, Artificial Sequence
  chemically synthesized
aaattataagaattattttttc

SEQ ID NO: 63395 - DNA, 22 bp, Artificial Sequence
  chemically synthesized
aattataagaattattttttct

SEQ ID NO: 63396 - DNA, 22 bp, Artificial Sequence
  chemically synthesized
taagaattattttttctcccac

SEQ ID NO: 63397 - DNA, 22 bp, Artificial Sequence
  chemically synthesized
ttttttctcccacaatgtagta

SEQ ID NO: 63398 - DNA, 22 bp, Artificial Sequence
  chemically synthesized
tttctcccacaatgtagtaaaa

SEQ ID NO: 63399 - DNA, 22 bp, Artificial Sequence
  chemically synthesized
ttctcccacaatgtagtaaaaa

SEQ ID NO: 63400 - DNA, 22 bp, Artificial Sequence
  chemically synthesized
tctcccacaatgtagtaaaaat

SEQ ID NO: 63401 - DNA, 22 bp, Artificial Sequence
  chemically synthesized
ctcccacaatgtagtaaaaata

SEQ ID NO: 63402 - DNA, 22 bp, Artificial Sequence
  chemically synthesized
tcccacaatgtagtaaaaatac

SEQ ID NO: 63403 - DNA, 22 bp, Artificial Sequence
  chemically synthesized
ccacaatgtagtaaaaatacat

SEQ ID NO: 63404 - DNA, 22 bp, Artificial Sequence
  chemically synthesized
tatgtgcaattcatttaatttt

SEQ ID NO: 63405 - DNA, 22 bp, Artificial Sequence
  chemically synthesized
atgtgcaattcatttaattttt

SEQ ID NO: 63406 - DNA, 22 bp, Artificial Sequence
  chemically synthesized
tgtgcaattcatttaatttttg

SEQ ID NO: 63407 - DNA, 22 bp, Artificial Sequence
  chemically synthesized
atttaatttttgattcatgaaa

SEQ ID NO: 63408 - DNA, 22 bp, Artificial Sequence
  chemically synthesized
aatttttgattcatgaaattcc

SEQ ID NO: 63409 - DNA, 22 bp, Artificial Sequence
  chemically synthesized
atttttgattcatgaaattccc

SEQ ID NO: 63410 - DNA, 22 bp, Artificial Sequence
  chemically synthesized
ttgattcatgaaattcccagtt

SEQ ID NO: 63411 - DNA, 22 bp, Artificial Sequence
  chemically synthesized
tgattcatgaaattcccagttc

SEQ ID NO: 63412 - DNA, 22 bp, Artificial Sequence
  chemically synthesized
gattcatgaaattcccagttca

SEQ ID NO: 63413 - DNA, 22 bp, Artificial Sequence
  chemically synthesized
attcatgaaattcccagttcaa

SEQ ID NO: 63414 - DNA, 22 bp, Artificial Sequence
  chemically synthesized
atgaaattcccagttcaaaatc

SEQ ID NO: 63415 - DNA, 22 bp, Artificial Sequence
  chemically synthesized
ccagttcaaaatcttgtatatg

SEQ ID NO: 63416 - DNA, 22 bp, Artificial Sequence
  chemically synthesized
aaaatcttgtatatgattgaaa

SEQ ID NO: 63417 - DNA, 22 bp, Artificial Sequence
  chemically synthesized
gtatatgattgaaaaattctta

SEQ ID NO: 63418 - DNA, 22 bp, Artificial Sequence
  chemically synthesized
tatatgattgaaaaattcttaa

SEQ ID NO: 63419 - DNA, 22 bp, Artificial Sequence
  chemically synthesized
aaaaattcttaaaaaaataagt

SEQ ID NO: 63420 - DNA, 22 bp, Artificial Sequence
  chemically synthesized
ttaaaaaaataagtttaatttc

SEQ ID NO: 63421 - DNA, 22 bp, Artificial Sequence
  chemically synthesized
aaaaaaataagtttaatttccc

SEQ ID NO: 63422 - DNA, 22 bp, Artificial Sequence
  chemically synthesized
aaaaaataagtttaatttcccc

SEQ ID NO: 63423 - DNA, 22 bp, Artificial Sequence
  chemically synthesized
aatttccccgtgaagactgtca

SEQ ID NO: 63424 - DNA, 22 bp, Artificial Sequence
  chemically synthesized
atttccccgtgaagactgtcac

SEQ ID NO: 63425 - DNA, 22 bp, Artificial Sequence
  chemically synthesized
ccccgtgaagactgtcacggtg

SEQ ID NO: 63426 - DNA, 22 bp, Artificial Sequence
  chemically synthesized
cccgtgaagactgtcacggtgc

SEQ ID NO: 63427 - DNA, 22 bp, Artificial Sequence
  chemically synthesized
tcacggtgctggaatgaatggg

SEQ ID NO: 63428 - DNA, 22 bp, Artificial Sequence
  chemically synthesized
gaatgaatgggcagaaaaaata

SEQ ID NO: 63429 - DNA, 22 bp, Artificial Sequence
  chemically synthesized
atttttctaatctaaaagagtg

SEQ ID NO: 63430 - DNA, 22 bp, Artificial Sequence
  chemically synthesized
ttctaatctaaaagagtgtgcc

SEQ ID NO: 63431 - DNA, 22 bp, Artificial Sequence
  chemically synthesized
tctaatctaaaagagtgtgcct

SEQ ID NO: 63432 - DNA, 22 bp, Artificial Sequence
  chemically synthesized
ctaatctaaaagagtgtgccta

SEQ ID NO: 63433 - DNA, 22 bp, Artificial Sequence
  chemically synthesized
taatctaaaagagtgtgcctac

SEQ ID NO: 63434 - DNA, 22 bp, Artificial Sequence
  chemically synthesized
atctaaaagagtgtgcctacat

SEQ ID NO: 63435 - DNA, 22 bp, Artificial Sequence
  chemically synthesized
aaagagtgtgcctacatgatgg

SEQ ID NO: 63436 - DNA, 22 bp, Artificial Sequence
  chemically synthesized
catgatggccagtctggctgaa

SEQ ID NO: 63437 - DNA, 22 bp, Artificial Sequence
  chemically synthesized
gctgaaaaataaatagccattg

SEQ ID NO: 63438 - DNA, 22 bp, Artificial Sequence
  chemically synthesized
aaaaataaatagccattgtagc

SEQ ID NO: 63439 - DNA, 22 bp, Artificial Sequence
  chemically synthesized
tagctaactatgcaaaggatgg

SEQ ID NO: 63440 - DNA, 22 bp, Artificial Sequence
  chemically synthesized
actatgcaaaggatggctaagc

SEQ ID NO: 63441 - DNA, 22 bp, Artificial Sequence
  chemically synthesized
tgcaaaggatggctaagctctt

SEQ ID NO: 63442 - DNA, 22 bp, Artificial Sequence
  chemically synthesized
agctcttcgcttggttctcagt

SEQ ID NO: 63443 - DNA, 22 bp, Artificial Sequence
  chemically synthesized
ttcgcttggttctcagtttcat

SEQ ID NO: 63444 - DNA, 22 bp, Artificial Sequence
  chemically synthesized
cgcttggttctcagtttcatta

SEQ ID NO: 63445 - DNA, 22 bp, Artificial Sequence
  chemically synthesized
gcttggttctcagtttcattaa

SEQ ID NO: 63446 - DNA, 22 bp, Artificial Sequence
  chemically synthesized
ggttctcagtttcattaattta

SEQ ID NO: 63447 - DNA, 22 bp, Artificial Sequence
  chemically synthesized
gttctcagtttcattaatttat

SEQ ID NO: 63448 - DNA, 22 bp, Artificial Sequence
  chemically synthesized
tcagtttcattaatttatatca

SEQ ID NO: 63449 - DNA, 22 bp, Artificial Sequence
  chemically synthesized
agtttcattaatttatatcatc

SEQ ID NO: 63450 - DNA, 22 bp, Artificial Sequence
  chemically synthesized
cattaatttatatcatctctgt

SEQ ID NO: 63451 - DNA, 22 bp, Artificial Sequence
  chemically synthesized
attaatttatatcatctctgtt

SEQ ID NO: 63452 - DNA, 22 bp, Artificial Sequence
  chemically synthesized
atttatatcatctctgttcagg

SEQ ID NO: 63453 - DNA, 22 bp, Artificial Sequence
  chemically synthesized
atatcatctctgttcaggtgcc

SEQ ID NO: 63454 - DNA, 22 bp, Artificial Sequence
  chemically synthesized
tatcatctctgttcaggtgcca

SEQ ID NO: 63455 - DNA, 22 bp, Artificial Sequence
  chemically synthesized
tgttcaggtgccatgctcccct

SEQ ID NO: 63456 - DNA, 22 bp, Artificial Sequence
  chemically synthesized
ttcaggtgccatgctcccctca

SEQ ID NO: 63457 - DNA, 22 bp, Artificial Sequence
  chemically synthesized
aggtgccatgctcccctcacta

SEQ ID NO: 63458 - DNA, 22 bp, Artificial Sequence
  chemically synthesized
ccctcactagcaagttgaaaca

SEQ ID NO: 63459 - DNA, 22 bp, Artificial Sequence
  chemically synthesized
actagcaagttgaaacaatgaa

SEQ ID NO: 63460 - DNA, 22 bp, Artificial Sequence
  chemically synthesized
gcaagttgaaacaatgaaataa

SEQ ID NO: 63461 - DNA, 22 bp, Artificial Sequence
  chemically synthesized
aaacaatgaaataactctttga

SEQ ID NO: 63462 - DNA, 22 bp, Artificial Sequence
  chemically synthesized
tttgaatatgtttggttccttg

SEQ ID NO: 63463 - DNA, 22 bp, Artificial Sequence
  chemically synthesized
tgaatatgtttggttccttgac

SEQ ID NO: 63464 - DNA, 22 bp, Artificial Sequence
  chemically synthesized
gaatatgtttggttccttgacc

SEQ ID NO: 63465 - DNA, 22 bp, Artificial Sequence
  chemically synthesized
aatatgtttggttccttgacct

SEQ ID NO: 63466 - DNA, 22 bp, Artificial Sequence
  chemically synthesized
ggttccttgacctgttcatgga

SEQ ID NO: 63467 - DNA, 22 bp, Artificial Sequence
  chemically synthesized
gttccttgacctgttcatggag

SEQ ID NO: 63468 - DNA, 22 bp, Artificial Sequence
  chemically synthesized
cttgacctgttcatggagtggg

SEQ ID NO: 63469 - DNA, 22 bp, Artificial Sequence
  chemically synthesized
gacctgttcatggagtgggact

SEQ ID NO: 63470 - DNA, 22 bp, Artificial Sequence
  chemically synthesized
acctgttcatggagtgggactc

SEQ ID NO: 63471 - DNA, 22 bp, Artificial Sequence
  chemically synthesized
ttcatggagtgggactcagcat

SEQ ID NO: 63472 - DNA, 22 bp, Artificial Sequence
  chemically synthesized
atggagtgggactcagcatttc

SEQ ID NO: 63473 - DNA, 22 bp, Artificial Sequence
  chemically synthesized
agcatttctctctttgttatgg

SEQ ID NO: 63474 - DNA, 22 bp, Artificial Sequence
  chemically synthesized
ctctctttgttatggcctgagt

SEQ ID NO: 63475 - DNA, 22 bp, Artificial Sequence
  chemically synthesized
tctctttgttatggcctgagta

SEQ ID NO: 63476 - DNA, 22 bp, Artificial Sequence
  chemically synthesized
tctttgttatggcctgagtaag

SEQ ID NO: 63477 - DNA, 22 bp, Artificial Sequence
  chemically synthesized
tttgttatggcctgagtaaggc

SEQ ID NO: 63478 - DNA, 22 bp, Artificial Sequence
  chemically synthesized
tgttatggcctgagtaaggctt

SEQ ID NO: 63479 - DNA, 22 bp, Artificial Sequence
  chemically synthesized
gttatggcctgagtaaggcttt

SEQ ID NO: 63480 - DNA, 22 bp, Artificial Sequence
  chemically synthesized
ttatggcctgagtaaggctttc

SEQ ID NO: 63481 - DNA, 22 bp, Artificial Sequence
  chemically synthesized
tggcctgagtaaggctttccat

SEQ ID NO: 63482 - DNA, 22 bp, Artificial Sequence
  chemically synthesized
agtaaggctttccatcggtata

SEQ ID NO: 63483 - DNA, 22 bp, Artificial Sequence
  chemically synthesized
tccatcggtatacatttgcttc

SEQ ID NO: 63484 - DNA, 22 bp, Artificial Sequence
  chemically synthesized
ccatcggtatacatttgcttct

SEQ ID NO: 63485 - DNA, 22 bp, Artificial Sequence
  chemically synthesized
catcggtatacatttgcttctt

SEQ ID NO: 63486 - DNA, 22 bp, Artificial Sequence
  chemically synthesized
gcttcttatccctggagaaatt

SEQ ID NO: 63487 - DNA, 22 bp, Artificial Sequence
  chemically synthesized
cttcttatccctggagaaatta

SEQ ID NO: 63488 - DNA, 22 bp, Artificial Sequence
  chemically synthesized
cttatccctggagaaattatac

SEQ ID NO: 63489 - DNA, 22 bp, Artificial Sequence
  chemically synthesized
ttatccctggagaaattataca

SEQ ID NO: 63490 - DNA, 22 bp, Artificial Sequence
  chemically synthesized
atccctggagaaattatacaca

SEQ ID NO: 63491 - DNA, 22 bp, Artificial Sequence
  chemically synthesized
tccctggagaaattatacacat

SEQ ID NO: 63492 - DNA, 22 bp, Artificial Sequence
  chemically synthesized
gagaaattatacacatccattt

SEQ ID NO: 63493 - DNA, 22 bp, Artificial Sequence
  chemically synthesized
tacacatccatttgccagatga

SEQ ID NO: 63494 - DNA, 22 bp, Artificial Sequence
  chemically synthesized
gccagatgatatacgcatataa

SEQ ID NO: 63495 - DNA, 22 bp, Artificial Sequence
  chemically synthesized
ccagatgatatacgcatataat

SEQ ID NO: 63496 - DNA, 22 bp, Artificial Sequence
  chemically synthesized
aacaaatactcagggtatttgt

SEQ ID NO: 63497 - DNA, 22 bp, Artificial Sequence
  chemically synthesized
agggtatttgttgagtgggtta

SEQ ID NO: 63498 - DNA, 22 bp, Artificial Sequence
  chemically synthesized
gttgagtgggttaggtccccac

SEQ ID NO: 63499 - DNA, 22 bp, Artificial Sequence
  chemically synthesized
ttgagtgggttaggtccccaca

SEQ ID NO: 63500 - DNA, 22 bp, Artificial Sequence
  chemically synthesized
agtgggttaggtccccacattt

SEQ ID NO: 63501 - DNA, 22 bp, Artificial Sequence
  chemically synthesized
ggtccccacatttttatacata

SEQ ID NO: 63502 - DNA, 22 bp, Artificial Sequence
  chemically synthesized
ttatacatacatacacacatac

SEQ ID NO: 63503 - DNA, 22 bp, Artificial Sequence
  chemically synthesized
tatacatacatacacacataca

SEQ ID NO: 63504 - DNA, 22 bp, Artificial Sequence
  chemically synthesized
atacatacatacacacatacac

SEQ ID NO: 63505 - DNA, 22 bp, Artificial Sequence
  chemically synthesized
tacatacatacacacatacaca

SEQ ID NO: 63506 - DNA, 22 bp, Artificial Sequence
  chemically synthesized
tgaatgtaagtgtgtgtccttt

SEQ ID NO: 63507 - DNA, 22 bp, Artificial Sequence
  chemically synthesized
tacaaatactagcttatttagc

SEQ ID NO: 63508 - DNA, 22 bp, Artificial Sequence
  chemically synthesized
acaaatactagcttatttagct

SEQ ID NO: 63509 - DNA, 22 bp, Artificial Sequence
  chemically synthesized
caaatactagcttatttagctc

SEQ ID NO: 63510 - DNA, 22 bp, Artificial Sequence
  chemically synthesized
gcttatttagctcatggtatag

SEQ ID NO: 63511 - DNA, 22 bp, Artificial Sequence
  chemically synthesized
atttagctcatggtataggtag

SEQ ID NO: 63512 - DNA, 22 bp, Artificial Sequence
  chemically synthesized
tttagctcatggtataggtagg

SEQ ID NO: 63513 - DNA, 22 bp, Artificial Sequence
  chemically synthesized
agctcatggtataggtagggta

SEQ ID NO: 63514 - DNA, 22 bp, Artificial Sequence
  chemically synthesized
gctcatggtataggtagggtag

SEQ ID NO: 63515 - DNA, 22 bp, Artificial Sequence
  chemically synthesized
atggtataggtagggtagcata

SEQ ID NO: 63516 - DNA, 22 bp, Artificial Sequence
  chemically synthesized
tataaacaaagaaatctagact

SEQ ID NO: 63517 - DNA, 22 bp, Artificial Sequence
  chemically synthesized
ataaacaaagaaatctagactt

SEQ ID NO: 63518 - DNA, 22 bp, Artificial Sequence
  chemically synthesized
taaacaaagaaatctagactta

SEQ ID NO: 63519 - DNA, 22 bp, Artificial Sequence
  chemically synthesized
gacttaggaaaatcatgttatt

SEQ ID NO: 63520 - DNA, 22 bp, Artificial Sequence
  chemically synthesized
aggaaaatcatgttatttgtct

SEQ ID NO: 63521 - DNA, 22 bp, Artificial Sequence
  chemically synthesized
ggaaaatcatgttatttgtctc

SEQ ID NO: 63522 - DNA, 22 bp, Artificial Sequence
  chemically synthesized
tttgtctcgtgaccaaattccc

SEQ ID NO: 63523 - DNA, 22 bp, Artificial Sequence
  chemically synthesized
gtctcgtgaccaaattcccaaa

SEQ ID NO: 63524 - DNA, 22 bp, Artificial Sequence
  chemically synthesized
tctcgtgaccaaattcccaaat

SEQ ID NO: 63525 - DNA, 22 bp, Artificial Sequence
  chemically synthesized
gtgaccaaattcccaaatcaag

SEQ ID NO: 63526 - DNA, 22 bp, Artificial Sequence
  chemically synthesized
ccaaatcaaggaaataaagaaa

SEQ ID NO: 63527 - DNA, 22 bp, Artificial Sequence
  chemically synthesized
gatttaagccagatttccaaga

SEQ ID NO: 63528 - DNA, 22 bp, Artificial Sequence
  chemically synthesized
aagccagatttccaagaaaaaa

SEQ ID NO: 63529 - DNA, 22 bp, Artificial Sequence
  chemically synthesized
agccagatttccaagaaaaaat

SEQ ID NO: 63530 - DNA, 22 bp, Artificial Sequence
  chemically synthesized
ccaagaaaaaatctagggctct

SEQ ID NO: 63531 - DNA, 22 bp, Artificial Sequence
  chemically synthesized
caagaaaaaatctagggctctt

SEQ ID NO: 63532 - DNA, 22 bp, Artificial Sequence
  chemically synthesized
gggctcttctcactttttcatc

SEQ ID NO: 63533 - DNA, 22 bp, Artificial Sequence
  chemically synthesized
ttctcactttttcatctttgtt

SEQ ID NO: 63534 - DNA, 22 bp, Artificial Sequence
  chemically synthesized
ctcactttttcatctttgttcc

SEQ ID NO: 63535 - DNA, 22 bp, Artificial Sequence
  chemically synthesized
tcactttttcatctttgttcca

SEQ ID NO: 63536 - DNA, 22 bp, Artificial Sequence
  chemically synthesized
actttttcatctttgttccaac

SEQ ID NO: 63537 - DNA, 22 bp, Artificial Sequence
  chemically synthesized
tttcatctttgttccaacattt

SEQ ID NO: 63538 - DNA, 22 bp, Artificial Sequence
  chemically synthesized
ttcatctttgttccaacatttg

SEQ ID NO: 63539 - DNA, 22 bp, Artificial Sequence
  chemically synthesized
tcatctttgttccaacatttga

SEQ ID NO: 63540 - DNA, 22 bp, Artificial Sequence
  chemically synthesized
catctttgttccaacatttgaa

SEQ ID NO: 63541 - DNA, 22 bp, Artificial Sequence
  chemically synthesized
atctttgttccaacatttgaaa

SEQ ID NO: 63542 - DNA, 22 bp, Artificial Sequence
  chemically synthesized
tgttccaacatttgaaaaaata

SEQ ID NO: 63543 - DNA, 22 bp, Artificial Sequence
  chemically synthesized
gttccaacatttgaaaaaataa

SEQ ID NO: 63544 - DNA, 22 bp, Artificial Sequence
  chemically synthesized
ttccaacatttgaaaaaataaa

SEQ ID NO: 63545 - DNA, 22 bp, Artificial Sequence
  chemically synthesized
caacatttgaaaaaataaatct

SEQ ID NO: 63546 - DNA, 22 bp, Artificial Sequence
  chemically synthesized
gaaaaaataaatctaaacacat

SEQ ID NO: 63547 - DNA, 22 bp, Artificial Sequence
  chemically synthesized
aaaaaataaatctaaacacatt

SEQ ID NO: 63548 - DNA, 22 bp, Artificial Sequence
  chemically synthesized
aacacattccaatgtaactgaa

SEQ ID NO: 63549 - DNA, 22 bp, Artificial Sequence
  chemically synthesized
caatgtaactgaagagcaggtt

SEQ ID NO: 63550 - DNA, 22 bp, Artificial Sequence
  chemically synthesized
aagagcaggttaattgtttgcc

SEQ ID NO: 63551 - DNA, 22 bp, Artificial Sequence
  chemically synthesized
attgtttgccacttgcagaatc

SEQ ID NO: 63552 - DNA, 22 bp, Artificial Sequence
  chemically synthesized
tttgccacttgcagaatccaat

SEQ ID NO: 63553 - DNA, 22 bp, Artificial Sequence
  chemically synthesized
gccacttgcagaatccaattaa

SEQ ID NO: 63554 - DNA, 22 bp, Artificial Sequence
  chemically synthesized
ccacttgcagaatccaattaag

SEQ ID NO: 63555 - DNA, 22 bp, Artificial Sequence
  chemically synthesized
gcagaatccaattaagaagaga

SEQ ID NO: 63556 - DNA, 22 bp, Artificial Sequence
  chemically synthesized
cagaatccaattaagaagagag

SEQ ID NO: 63557 - DNA, 22 bp, Artificial Sequence
  chemically synthesized
agaagagagaagtctggtataa

SEQ ID NO: 63558 - DNA, 22 bp, Artificial Sequence
  chemically synthesized
gtataaagaaagtgatttgctt

SEQ ID NO: 63559 - DNA, 22 bp, Artificial Sequence
  chemically synthesized
gcttccaaagctagcttagggg

SEQ ID NO: 63560 - DNA, 22 bp, Artificial Sequence
  chemically synthesized
cttccaaagctagcttagggga

SEQ ID NO: 63561 - DNA, 22 bp, Artificial Sequence
  chemically synthesized
ccaaagctagcttaggggaaga

SEQ ID NO: 63562 - DNA, 22 bp, Artificial Sequence
  chemically synthesized
caaagctagcttaggggaagaa

SEQ ID NO: 63563 - DNA, 22 bp, Artificial Sequence
  chemically synthesized
gcttaggggaagaaatgcagca

SEQ ID NO: 63564 - DNA, 22 bp, Artificial Sequence
  chemically synthesized
aggggaagaaatgcagcagtcc

SEQ ID NO: 63565 - DNA, 22 bp, Artificial Sequence
  chemically synthesized
ggggaagaaatgcagcagtcct

SEQ ID NO: 63566 - DNA, 22 bp, Artificial Sequence
  chemically synthesized
ccgtactacttcactttaggag

SEQ ID NO: 63567 - DNA, 22 bp, Artificial Sequence
  chemically synthesized
cttcactttaggagcagaaagt

SEQ ID NO: 63568 - DNA, 22 bp, Artificial Sequence
  chemically synthesized
cactttaggagcagaaagtggc

SEQ ID NO: 63569 - DNA, 22 bp, Artificial Sequence
  chemically synthesized
actttaggagcagaaagtggca

SEQ ID NO: 63570 - DNA, 22 bp, Artificial Sequence
  chemically synthesized
taggagcagaaagtggcacttt

SEQ ID NO: 63571 - DNA, 22 bp, Artificial Sequence
  chemically synthesized
aggagcagaaagtggcactttt

SEQ ID NO: 63572 - DNA, 22 bp, Artificial Sequence
  chemically synthesized
ggagcagaaagtggcactttta

SEQ ID NO: 63573 - DNA, 22 bp, Artificial Sequence
  chemically synthesized
ttaaaaggcaacagaggaggcg

SEQ ID NO: 63574 - DNA, 22 bp, Artificial Sequence
  chemically synthesized
taaaaggcaacagaggaggcga

SEQ ID NO: 63575 - DNA, 22 bp, Artificial Sequence
  chemically synthesized
aaaaggcaacagaggaggcgag

SEQ ID NO: 63576 - DNA, 22 bp, Artificial Sequence
  chemically synthesized
aaaggcaacagaggaggcgagc

SEQ ID NO: 63577 - DNA, 22 bp, Artificial Sequence
  chemically synthesized
aggggtccatgctagcttgggc

SEQ ID NO: 63578 - DNA, 22 bp, Artificial Sequence
  chemically synthesized
gcttgggcaccttatccaccag

SEQ ID NO: 63579 - DNA, 22 bp, Artificial Sequence
  chemically synthesized
gggcaccttatccaccaggtag

SEQ ID NO: 63580 - DNA, 22 bp, Artificial Sequence
  chemically synthesized
ggcaccttatccaccaggtagt

SEQ ID NO: 63581 - DNA, 22 bp, Artificial Sequence
  chemically synthesized
atccaccaggtagttgagcagt

SEQ ID NO: 63582 - DNA, 22 bp, Artificial Sequence
  chemically synthesized
tccaccaggtagttgagcagtt

SEQ ID NO: 63583 - DNA, 22 bp, Artificial Sequence
  chemically synthesized
agcagttgcctgctggtgcctt

SEQ ID NO: 63584 - DNA, 22 bp, Artificial Sequence
  chemically synthesized
cctgctggtgcctttgtgagca

SEQ ID NO: 63585 - DNA, 22 bp, Artificial Sequence
  chemically synthesized
ctggtgcctttgtgagcagggt

SEQ ID NO: 63586 - DNA, 22 bp, Artificial Sequence
  chemically synthesized
gtgcctttgtgagcagggtgtt

SEQ ID NO: 63587 - DNA, 22 bp, Artificial Sequence
  chemically synthesized
tgtgagcagggtgttgtccctt

SEQ ID NO: 63588 - DNA, 22 bp, Artificial Sequence
  chemically synthesized
gtgagcagggtgttgtcccttg

SEQ ID NO: 63589 - DNA, 22 bp, Artificial Sequence
  chemically synthesized
tgagcagggtgttgtcccttga

SEQ ID NO: 63590 - DNA, 22 bp, Artificial Sequence
  chemically synthesized
tcccttgaggcaaatctctgga

SEQ ID NO: 63591 - DNA, 22 bp, Artificial Sequence
  chemically synthesized
gaggcaaatctctggagggtga

SEQ ID NO: 63592 - DNA, 22 bp, Artificial Sequence
  chemically synthesized
aggcaaatctctggagggtgag

SEQ ID NO: 63593 - DNA, 22 bp, Artificial Sequence
  chemically synthesized
tggagggtgagagttttgtagt

SEQ ID NO: 63594 - DNA, 22 bp, Artificial Sequence
  chemically synthesized
gagggtgagagttttgtagtgg

SEQ ID NO: 63595 - DNA, 22 bp, Artificial Sequence
  chemically synthesized
tgtagtgggcatgctttggttt

SEQ ID NO: 63596 - DNA, 22 bp, Artificial Sequence
  chemically synthesized
gtagtgggcatgctttggttta

SEQ ID NO: 63597 - DNA, 22 bp, Artificial Sequence
  chemically synthesized
tagtgggcatgctttggtttat

SEQ ID NO: 63598 - DNA, 22 bp, Artificial Sequence
  chemically synthesized
tggtttataaatcacctgtgaa

SEQ ID NO: 63599 - DNA, 22 bp, Artificial Sequence
  chemically synthesized
ggtttataaatcacctgtgaac

SEQ ID NO: 63600 - DNA, 22 bp, Artificial Sequence
  chemically synthesized
gtttataaatcacctgtgaact

SEQ ID NO: 63601 - DNA, 22 bp, Artificial Sequence
  chemically synthesized
ataaatcacctgtgaactcagg

SEQ ID NO: 63602 - DNA, 22 bp, Artificial Sequence
  chemically synthesized
taaatcacctgtgaactcagga

SEQ ID NO: 63603 - DNA, 22 bp, Artificial Sequence
  chemically synthesized
tgaactcaggagttccatcttg

SEQ ID NO: 63604 - DNA, 22 bp, Artificial Sequence
  chemically synthesized
aggagttccatcttgaagcaca

SEQ ID NO: 63605 - DNA, 22 bp, Artificial Sequence
  chemically synthesized
catcttgaagcacatacatagt

SEQ ID NO: 63606 - DNA, 22 bp, Artificial Sequence
  chemically synthesized
gaagcacatacatagttagatg

SEQ ID NO: 63607 - DNA, 22 bp, Artificial Sequence
  chemically synthesized
aagcacatacatagttagatga

SEQ ID NO: 63608 - DNA, 22 bp, Artificial Sequence
  chemically synthesized
gatgaacttgccctgcagggag

SEQ ID NO: 63609 - DNA, 22 bp, Artificial Sequence
  chemically synthesized
gccctgcagggagagtctgatg

SEQ ID NO: 63610 - DNA, 22 bp, Artificial Sequence
  chemically synthesized
ccctgcagggagagtctgatga

SEQ ID NO: 63611 - DNA, 22 bp, Artificial Sequence
  chemically synthesized
cagggagagtctgatgaaaggg

SEQ ID NO: 63612 - DNA, 22 bp, Artificial Sequence
  chemically synthesized
atgaaagggaggtagatgcttg

SEQ ID NO: 63613 - DNA, 22 bp, Artificial Sequence
  chemically synthesized
gcaatttaatctataaattacc

SEQ ID NO: 63614 - DNA, 22 bp, Artificial Sequence
  chemically synthesized
caatttaatctataaattacca

SEQ ID NO: 63615 - DNA, 22 bp, Artificial Sequence
  chemically synthesized
aatctataaattaccagataaa

SEQ ID NO: 63616 - DNA, 22 bp, Artificial Sequence
  chemically synthesized
atctataaattaccagataaaa

SEQ ID NO: 63617 - DNA, 22 bp, Artificial Sequence
  chemically synthesized
taaattaccagataaaatttta

SEQ ID NO: 63618 - DNA, 22 bp, Artificial Sequence
  chemically synthesized
ccagataaaattttacaagttg

SEQ ID NO: 63619 - DNA, 22 bp, Artificial Sequence
  chemically synthesized
tacaagttgactttaaagtcaa

SEQ ID NO: 63620 - DNA, 22 bp, Artificial Sequence
  chemically synthesized
acaagttgactttaaagtcaaa

SEQ ID NO: 63621 - DNA, 22 bp, Artificial Sequence
  chemically synthesized
caagttgactttaaagtcaaac

SEQ ID NO: 63622 - DNA, 22 bp, Artificial Sequence
  chemically synthesized
actttaaagtcaaacacatttg

SEQ ID NO: 63623 - DNA, 22 bp, Artificial Sequence
  chemically synthesized
taaagtcaaacacatttgaatt

SEQ ID NO: 63624 - DNA, 22 bp, Artificial Sequence
  chemically synthesized
aaagtcaaacacatttgaattt

SEQ ID NO: 63625 - DNA, 22 bp, Artificial Sequence
  chemically synthesized
aagtcaaacacatttgaattta

SEQ ID NO: 63626 - DNA, 22 bp, Artificial Sequence
  chemically synthesized
gaatttagtggaagccattcaa

SEQ ID NO: 63627 - DNA, 22 bp, Artificial Sequence
  chemically synthesized
aatttagtggaagccattcaag

SEQ ID NO: 63628 - DNA, 22 bp, Artificial Sequence
  chemically synthesized
agtggaagccattcaagaaaat

SEQ ID NO: 63629 - DNA, 22 bp, Artificial Sequence
  chemically synthesized
gtggaagccattcaagaaaata

SEQ ID NO: 63630 - DNA, 22 bp, Artificial Sequence
  chemically synthesized
aagaaaatatcaaagaaaatac

SEQ ID NO: 63631 - DNA, 22 bp, Artificial Sequence
  chemically synthesized
agcaaagagttttttggggaaa

SEQ ID NO: 63632 - DNA, 22 bp, Artificial Sequence
  chemically synthesized
tttggggaaattggtgtctatg

SEQ ID NO: 63633 - DNA, 22 bp, Artificial Sequence
  chemically synthesized
ttggggaaattggtgtctatgt

SEQ ID NO: 63634 - DNA, 22 bp, Artificial Sequence
  chemically synthesized
tggggaaattggtgtctatgtc

SEQ ID NO: 63635 - DNA, 22 bp, Artificial Sequence
  chemically synthesized
ggggaaattggtgtctatgtct

SEQ ID NO: 63636 - DNA, 22 bp, Artificial Sequence
  chemically synthesized
gggaaattggtgtctatgtctg

SEQ ID NO: 63637 - DNA, 22 bp, Artificial Sequence
  chemically synthesized
gtgtctatgtctgtgtgtgtag

SEQ ID NO: 63638 - DNA, 22 bp, Artificial Sequence
  chemically synthesized
tgtctgtgtgtgtagggagtgc

SEQ ID NO: 63639 - DNA, 22 bp, Artificial Sequence
  chemically synthesized
tgtgtgtagggagtgcagggga

SEQ ID NO: 63640 - DNA, 22 bp, Artificial Sequence
  chemically synthesized
tatttcagcccatggaaactag

SEQ ID NO: 63641 - DNA, 22 bp, Artificial Sequence
  chemically synthesized
tttcagcccatggaaactagga

SEQ ID NO: 63642 - DNA, 22 bp, Artificial Sequence
  chemically synthesized
cagcccatggaaactaggatgt

SEQ ID NO: 63643 - DNA, 22 bp, Artificial Sequence
  chemically synthesized
agcccatggaaactaggatgta

SEQ ID NO: 63644 - DNA, 22 bp, Artificial Sequence
  chemically synthesized
ggatgtagatcactgtgaactt

SEQ ID NO: 63645 - DNA, 22 bp, Artificial Sequence
  chemically synthesized
tgaacttattcagcaggctaca

SEQ ID NO: 63646 - DNA, 22 bp, Artificial Sequence
  chemically synthesized
attcagcaggctacacccaaag

SEQ ID NO: 63647 - DNA, 22 bp, Artificial Sequence
  chemically synthesized
ttcagcaggctacacccaaagg

SEQ ID NO: 63648 - DNA, 22 bp, Artificial Sequence
  chemically synthesized
agcaggctacacccaaaggcta

SEQ ID NO: 63649 - DNA, 22 bp, Artificial Sequence
  chemically synthesized
cacccaaaggctagaacaaact

SEQ ID NO: 63650 - DNA, 22 bp, Artificial Sequence
  chemically synthesized
gaacaaacttctctgccacagg

SEQ ID NO: 63651 - DNA, 22 bp, Artificial Sequence
  chemically synthesized
ctctgccacaggattaacatat

SEQ ID NO: 63652 - DNA, 22 bp, Artificial Sequence
  chemically synthesized
tctgccacaggattaacatatg

SEQ ID NO: 63653 - DNA, 22 bp, Artificial Sequence
  chemically synthesized
tgccacaggattaacatatgtt

SEQ ID NO: 63654 - DNA, 22 bp, Artificial Sequence
  chemically synthesized
ccacaggattaacatatgtttt

SEQ ID NO: 63655 - DNA, 22 bp, Artificial Sequence
  chemically synthesized
acatatgttttaatcgacctgg

SEQ ID NO: 63656 - DNA, 22 bp, Artificial Sequence
  chemically synthesized
taatcgacctggggggcacatt

SEQ ID NO: 63657 - DNA, 22 bp, Artificial Sequence
  chemically synthesized
aatcgacctggggggcacattc

SEQ ID NO: 63658 - DNA, 22 bp, Artificial Sequence
  chemically synthesized
atcgacctggggggcacattct

SEQ ID NO: 63659 - DNA, 22 bp, Artificial Sequence
  chemically synthesized
gggggcacattctctgataagc

SEQ ID NO: 63660 - DNA, 22 bp, Artificial Sequence
  chemically synthesized
tctgataagctcttttggaaag

SEQ ID NO: 63661 - DNA, 22 bp, Artificial Sequence
  chemically synthesized
tgataagctcttttggaaagcc

SEQ ID NO: 63662 - DNA, 22 bp, Artificial Sequence
  chemically synthesized
ataagctcttttggaaagccag

SEQ ID NO: 63663 - DNA, 22 bp, Artificial Sequence
  chemically synthesized
ttttggaaagccaggctttctg

SEQ ID NO: 63664 - DNA, 22 bp, Artificial Sequence
  chemically synthesized
ttggaaagccaggctttctgtg

SEQ ID NO: 63665 - DNA, 22 bp, Artificial Sequence
  chemically synthesized
tggaaagccaggctttctgtgg

SEQ ID NO: 63666 - DNA, 22 bp, Artificial Sequence
  chemically synthesized
ggaaagccaggctttctgtgga

SEQ ID NO: 63667 - DNA, 22 bp, Artificial Sequence
  chemically synthesized
gaaagccaggctttctgtggac

SEQ ID NO: 63668 - DNA, 22 bp, Artificial Sequence
  chemically synthesized
tctgtggacgtgttatctttcc

SEQ ID NO: 63669 - DNA, 22 bp, Artificial Sequence
  chemically synthesized
ctgtggacgtgttatctttcca

SEQ ID NO: 63670 - DNA, 22 bp, Artificial Sequence
  chemically synthesized
tgtggacgtgttatctttccaa

SEQ ID NO: 63671 - DNA, 22 bp, Artificial Sequence
  chemically synthesized
tggacgtgttatctttccaatg

SEQ ID NO: 63672 - DNA, 22 bp, Artificial Sequence
  chemically synthesized
tctttccaatgtgtgctggaat

SEQ ID NO: 63673 - DNA, 22 bp, Artificial Sequence
  chemically synthesized
tccaatgtgtgctggaatgccc

SEQ ID NO: 63674 - DNA, 22 bp, Artificial Sequence
  chemically synthesized
ccaatgtgtgctggaatgcccg

SEQ ID NO: 63675 - DNA, 22 bp, Artificial Sequence
  chemically synthesized
caatgtgtgctggaatgcccgg

SEQ ID NO: 63676 - DNA, 22 bp, Artificial Sequence
  chemically synthesized
gaatgcccggggagaggaaaaa

SEQ ID NO: 63677 - DNA, 22 bp, Artificial Sequence
  chemically synthesized
cttttacagccatgctcagtga

SEQ ID NO: 63678 - DNA, 22 bp, Artificial Sequence
  chemically synthesized
ttttacagccatgctcagtgag

SEQ ID NO: 63679 - DNA, 22 bp, Artificial Sequence
  chemically synthesized
ttacagccatgctcagtgagaa

SEQ ID NO: 63680 - DNA, 22 bp, Artificial Sequence
  chemically synthesized
tacagccatgctcagtgagaag

SEQ ID NO: 63681 - DNA, 22 bp, Artificial Sequence
  chemically synthesized
acagccatgctcagtgagaagc

SEQ ID NO: 63682 - DNA, 22 bp, Artificial Sequence
  chemically synthesized
cagccatgctcagtgagaagcg

SEQ ID NO: 63683 - DNA, 22 bp, Artificial Sequence
  chemically synthesized
agtgagaagcggagaaacatct

SEQ ID NO: 63684 - DNA, 22 bp, Artificial Sequence
  chemically synthesized
ctattcacaaattgctaagtct

SEQ ID NO: 63685 - DNA, 22 bp, Artificial Sequence
  chemically synthesized
tattcacaaattgctaagtctt

SEQ ID NO: 63686 - DNA, 22 bp, Artificial Sequence
  chemically synthesized
ttcacaaattgctaagtctttt

SEQ ID NO: 63687 - DNA, 22 bp, Artificial Sequence
  chemically synthesized
acaaattgctaagtcttttaca

SEQ ID NO: 63688 - DNA, 22 bp, Artificial Sequence
  chemically synthesized
ctaagtcttttacacatgcaaa

SEQ ID NO: 63689 - DNA, 22 bp, Artificial Sequence
  chemically synthesized
agtcttttacacatgcaaatat

SEQ ID NO: 63690 - DNA, 22 bp, Artificial Sequence
  chemically synthesized
ttacacatgcaaatatgcatac

SEQ ID NO: 63691 - DNA, 22 bp, Artificial Sequence
  chemically synthesized
tacacatgcaaatatgcataca

SEQ ID NO: 63692 - DNA, 22 bp, Artificial Sequence
  chemically synthesized
acacatgcaaatatgcatacac

SEQ ID NO: 63693 - DNA, 22 bp, Artificial Sequence
  chemically synthesized
cacatgcaaatatgcatacaca

SEQ ID NO: 63694 - DNA, 22 bp, Artificial Sequence
  chemically synthesized
acacaccacagtgaggaagaaa

SEQ ID NO: 63695 - DNA, 22 bp, Artificial Sequence
  chemically synthesized
tcacaccattaataaaatacat

SEQ ID NO: 63696 - DNA, 22 bp, Artificial Sequence
  chemically synthesized
acaccattaataaaatacattt

SEQ ID NO: 63697 - DNA, 22 bp, Artificial Sequence
  chemically synthesized
ataaaatacatttacttcagta

SEQ ID NO: 63698 - DNA, 22 bp, Artificial Sequence
  chemically synthesized
acttcagtagcaatatacatct

SEQ ID NO: 63699 - DNA, 22 bp, Artificial Sequence
  chemically synthesized
cttcagtagcaatatacatcta

SEQ ID NO: 63700 - DNA, 22 bp, Artificial Sequence
  chemically synthesized
cagtagcaatatacatctacat

SEQ ID NO: 63701 - DNA, 22 bp, Artificial Sequence
  chemically synthesized
agtagcaatatacatctacatt

SEQ ID NO: 63702 - DNA, 22 bp, Artificial Sequence
  chemically synthesized
cattttgcctataatataaaag

SEQ ID NO: 63703 - DNA, 22 bp, Artificial Sequence
  chemically synthesized
tgcctataatataaaagtattt

SEQ ID NO: 63704 - DNA, 22 bp, Artificial Sequence
  chemically synthesized
gcctataatataaaagtatttt

SEQ ID NO: 63705 - DNA, 22 bp, Artificial Sequence
  chemically synthesized
cctataatataaaagtattttt

SEQ ID NO: 63706 - DNA, 22 bp, Artificial Sequence
  chemically synthesized
taatataaaagtatttttccta

SEQ ID NO: 63707 - DNA, 22 bp, Artificial Sequence
  chemically synthesized
ttcctattaaaagatttgttta

SEQ ID NO: 63708 - DNA, 22 bp, Artificial Sequence
  chemically synthesized
tcctattaaaagatttgtttaa

SEQ ID NO: 63709 - DNA, 22 bp, Artificial Sequence
  chemically synthesized
cctattaaaagatttgtttaat

SEQ ID NO: 63710 - DNA, 22 bp, Artificial Sequence
  chemically synthesized
ctattaaaagatttgtttaatg

SEQ ID NO: 63711 - DNA, 22 bp, Artificial Sequence
  chemically synthesized
ttaaaagatttgtttaatgttt

SEQ ID NO: 63712 - DNA, 22 bp, Artificial Sequence
  chemically synthesized
aaagatttgtttaatgtttctt

SEQ ID NO: 63713 - DNA, 22 bp, Artificial Sequence
  chemically synthesized
gtttaatgtttcttcaccaaca

SEQ ID NO: 63714 - DNA, 22 bp, Artificial Sequence
  chemically synthesized
tttaatgtttcttcaccaacaa

SEQ ID NO: 63715 - DNA, 22 bp, Artificial Sequence
  chemically synthesized
aatgtttcttcaccaacaaata

SEQ ID NO: 63716 - DNA, 22 bp, Artificial Sequence
  chemically synthesized
atgtttcttcaccaacaaataa

SEQ ID NO: 63717 - DNA, 22 bp, Artificial Sequence
  chemically synthesized
cttcaccaacaaataaacccta

SEQ ID NO: 63718 - DNA, 22 bp, Artificial Sequence
  chemically synthesized
ttcaccaacaaataaaccctat

SEQ ID NO: 63719 - DNA, 22 bp, Artificial Sequence
  chemically synthesized
caccaacaaataaaccctatta

SEQ ID NO: 63720 - DNA, 22 bp, Artificial Sequence
  chemically synthesized
accaacaaataaaccctattaa

SEQ ID NO: 63721 - DNA, 22 bp, Artificial Sequence
  chemically synthesized
ttaaatccccattgccatatga

SEQ ID NO: 63722 - DNA, 22 bp, Artificial Sequence
  chemically synthesized
aatccccattgccatatgagcc

SEQ ID NO: 63723 - DNA, 22 bp, Artificial Sequence
  chemically synthesized
ccatatgagccctggaggtgaa

SEQ ID NO: 63724 - DNA, 22 bp, Artificial Sequence
  chemically synthesized
gaggtgaatcagagaaacaaaa

SEQ ID NO: 63725 - DNA, 22 bp, Artificial Sequence
  chemically synthesized
tggaaaaatcatcaggttaaaa

SEQ ID NO: 63726 - DNA, 22 bp, Artificial Sequence
  chemically synthesized
aaaaaagaaaaattgattctgt

SEQ ID NO: 63727 - DNA, 22 bp, Artificial Sequence
  chemically synthesized
attctgttttgggatatttcct

SEQ ID NO: 63728 - DNA, 22 bp, Artificial Sequence
  chemically synthesized
tgttttgggatatttcctagca

SEQ ID NO: 63729 - DNA, 22 bp, Artificial Sequence
  chemically synthesized
ttttgggatatttcctagcaac

SEQ ID NO: 63730 - DNA, 22 bp, Artificial Sequence
  chemically synthesized
tgggatatttcctagcaacatg

SEQ ID NO: 63731 - DNA, 22 bp, Artificial Sequence
  chemically synthesized
gggatatttcctagcaacatga

SEQ ID NO: 63732 - DNA, 22 bp, Artificial Sequence
  chemically synthesized
ggatatttcctagcaacatgag

SEQ ID NO: 63733 - DNA, 22 bp, Artificial Sequence
  chemically synthesized
cctagcaacatgagctggggag

SEQ ID NO: 63734 - DNA, 22 bp, Artificial Sequence
  chemically synthesized
ctagcaacatgagctggggagg

SEQ ID NO: 63735 - DNA, 22 bp, Artificial Sequence
  chemically synthesized
gcaacatgagctggggagggga

SEQ ID NO: 63736 - DNA, 22 bp, Artificial Sequence
  chemically synthesized
gggaggggatctcagcagtgat

SEQ ID NO: 63737 - DNA, 22 bp, Artificial Sequence
  chemically synthesized
agcagtgatgctctatgaagca

SEQ ID NO: 63738 - DNA, 22 bp, Artificial Sequence
  chemically synthesized
tatgaagcataataaaatgaca

SEQ ID NO: 63739 - DNA, 22 bp, Artificial Sequence
  chemically synthesized
tgaagcataataaaatgacaca

SEQ ID NO: 63740 - DNA, 22 bp, Artificial Sequence
  chemically synthesized
caggtaacttagttaaaggggg

SEQ ID NO: 63741 - DNA, 22 bp, Artificial Sequence
  chemically synthesized
agttaaagggggaaataaatgg

SEQ ID NO: 63742 - DNA, 22 bp, Artificial Sequence
  chemically synthesized
gttaaagggggaaataaatgga

SEQ ID NO: 63743 - DNA, 22 bp, Artificial Sequence
  chemically synthesized
aagggggaaataaatggaagtt

SEQ ID NO: 63744 - DNA, 22 bp, Artificial Sequence
  chemically synthesized
cctctttttgaatatcaattgt

SEQ ID NO: 63745 - DNA, 22 bp, Artificial Sequence
  chemically synthesized
ctctttttgaatatcaattgta

SEQ ID NO: 63746 - DNA, 22 bp, Artificial Sequence
  chemically synthesized
tttttgaatatcaattgtagcc

SEQ ID NO: 63747 - DNA, 22 bp, Artificial Sequence
  chemically synthesized
tttgaatatcaattgtagcctg

SEQ ID NO: 63748 - DNA, 22 bp, Artificial Sequence
  chemically synthesized
ttgaatatcaattgtagcctgc

SEQ ID NO: 63749 - DNA, 22 bp, Artificial Sequence
  chemically synthesized
tgaatatcaattgtagcctgct

SEQ ID NO: 63750 - DNA, 22 bp, Artificial Sequence
  chemically synthesized
gaatatcaattgtagcctgctc

SEQ ID NO: 63751 - DNA, 22 bp, Artificial Sequence
  chemically synthesized
aatatcaattgtagcctgctct

SEQ ID NO: 63752 - DNA, 22 bp, Artificial Sequence
  chemically synthesized
tagcctgctctgctacatttca

SEQ ID NO: 63753 - DNA, 22 bp, Artificial Sequence
  chemically synthesized
ctctgctacatttcaaaaacac

SEQ ID NO: 63754 - DNA, 22 bp, Artificial Sequence
  chemically synthesized
tgctacatttcaaaaacactct

SEQ ID NO: 63755 - DNA, 22 bp, Artificial Sequence
  chemically synthesized
ctacatttcaaaaacactcttc

SEQ ID NO: 63756 - DNA, 22 bp, Artificial Sequence
  chemically synthesized
catttcaaaaacactcttcaaa

SEQ ID NO: 63757 - DNA, 22 bp, Artificial Sequence
  chemically synthesized
caaaaacactcttcaaaatgtt

SEQ ID NO: 63758 - DNA, 22 bp, Artificial Sequence
  chemically synthesized
aaaaacactcttcaaaatgttt

SEQ ID NO: 63759 - DNA, 22 bp, Artificial Sequence
  chemically synthesized
ttcaaaatgtttaactgaactc

SEQ ID NO: 63760 - DNA, 22 bp, Artificial Sequence
  chemically synthesized
caaaatgtttaactgaactcac

SEQ ID NO: 63761 - DNA, 22 bp, Artificial Sequence
  chemically synthesized
aaaatgtttaactgaactcact

SEQ ID NO: 63762 - DNA, 22 bp, Artificial Sequence
  chemically synthesized
aactgaactcactgtaggaagc

SEQ ID NO: 63763 - DNA, 22 bp, Artificial Sequence
  chemically synthesized
actgaactcactgtaggaagca

SEQ ID NO: 63764 - DNA, 22 bp, Artificial Sequence
  chemically synthesized
aactcactgtaggaagcacctt

SEQ ID NO: 63765 - DNA, 22 bp, Artificial Sequence
  chemically synthesized
actgtaggaagcaccttattaa

SEQ ID NO: 63766 - DNA, 22 bp, Artificial Sequence
  chemically synthesized
taggaagcaccttattaattta

SEQ ID NO: 63767 - DNA, 22 bp, Artificial Sequence
  chemically synthesized
attaatttattgtgtgttttga

SEQ ID NO: 63768 - DNA, 22 bp, Artificial Sequence
  chemically synthesized
ttaatttattgtgtgttttgaa

SEQ ID NO: 63769 - DNA, 22 bp, Artificial Sequence
  chemically synthesized
atttattgtgtgttttgaagtc

SEQ ID NO: 63770 - DNA, 22 bp, Artificial Sequence
  chemically synthesized
attgtgtgttttgaagtcacac

SEQ ID NO: 63771 - DNA, 22 bp, Artificial Sequence
  chemically synthesized
ttgtgtgttttgaagtcacact

SEQ ID NO: 63772 - DNA, 22 bp, Artificial Sequence
  chemically synthesized
tgtgttttgaagtcacactgtg

SEQ ID NO: 63773 - DNA, 22 bp, Artificial Sequence
  chemically synthesized
tgaagtcacactgtgagctata

SEQ ID NO: 63774 - DNA, 22 bp, Artificial Sequence
  chemically synthesized
gaagtcacactgtgagctatag

SEQ ID NO: 63775 - DNA, 22 bp, Artificial Sequence
  chemically synthesized
aagtcacactgtgagctataga

SEQ ID NO: 63776 - DNA, 22 bp, Artificial Sequence
  chemically synthesized
tgagctatagaatttacccaag

SEQ ID NO: 63777 - DNA, 22 bp, Artificial Sequence
  chemically synthesized
tagaatttacccaagcacaact

SEQ ID NO: 63778 - DNA, 22 bp, Artificial Sequence
  chemically synthesized
acccaagcacaactcttcctgg

SEQ ID NO: 63779 - DNA, 22 bp, Artificial Sequence
  chemically synthesized
cccaagcacaactcttcctgga

SEQ ID NO: 63780 - DNA, 22 bp, Artificial Sequence
  chemically synthesized
ttcctggaaaagagagttcaaa

SEQ ID NO: 63781 - DNA, 22 bp, Artificial Sequence
  chemically synthesized
cctggaaaagagagttcaaatg

SEQ ID NO: 63782 - DNA, 22 bp, Artificial Sequence
  chemically synthesized
ctggaaaagagagttcaaatga

SEQ ID NO: 63783 - DNA, 22 bp, Artificial Sequence
  chemically synthesized
gaaaagagagttcaaatgagaa

SEQ ID NO: 63784 - DNA, 22 bp, Artificial Sequence
  chemically synthesized
aaatgagaaacagtgcggggtg

SEQ ID NO: 63785 - DNA, 22 bp, Artificial Sequence
  chemically synthesized
aaatatctatttctcaatgata

SEQ ID NO: 63786 - DNA, 22 bp, Artificial Sequence
  chemically synthesized
tttctcaatgatattttgatat

SEQ ID NO: 63787 - DNA, 22 bp, Artificial Sequence
  chemically synthesized
ctcaatgatattttgatatatc

SEQ ID NO: 63788 - DNA, 22 bp, Artificial Sequence
  chemically synthesized
tcaatgatattttgatatatct

SEQ ID NO: 63789 - DNA, 22 bp, Artificial Sequence
  chemically synthesized
aatgatattttgatatatctat

SEQ ID NO: 63790 - DNA, 22 bp, Artificial Sequence
  chemically synthesized
tgatatatctatcaagtgcttt

SEQ ID NO: 63791 - DNA, 22 bp, Artificial Sequence
  chemically synthesized
gatatatctatcaagtgctttt

SEQ ID NO: 63792 - DNA, 22 bp, Artificial Sequence
  chemically synthesized
atatatctatcaagtgcttttt

SEQ ID NO: 63793 - DNA, 22 bp, Artificial Sequence
  chemically synthesized
tcaagtgctttttagtggatta

SEQ ID NO: 63794 - DNA, 22 bp, Artificial Sequence
  chemically synthesized
tttagtggattaggttcagaat

SEQ ID NO: 63795 - DNA, 22 bp, Artificial Sequence
  chemically synthesized
ttagtggattaggttcagaatg

SEQ ID NO: 63796 - DNA, 22 bp, Artificial Sequence
  chemically synthesized
tagtggattaggttcagaatgc

SEQ ID NO: 63797 - DNA, 22 bp, Artificial Sequence
  chemically synthesized
agtggattaggttcagaatgca

SEQ ID NO: 63798 - DNA, 22 bp, Artificial Sequence
  chemically synthesized
gtggattaggttcagaatgcat

SEQ ID NO: 63799 - DNA, 22 bp, Artificial Sequence
  chemically synthesized
ggttcagaatgcatcagccaat

SEQ ID NO: 63800 - DNA, 22 bp, Artificial Sequence
  chemically synthesized
agaatgcatcagccaatgcctg

SEQ ID NO: 63801 - DNA, 22 bp, Artificial Sequence
  chemically synthesized
ttcaataatccagttttccagc

SEQ ID NO: 63802 - DNA, 22 bp, Artificial Sequence
  chemically synthesized
aataatccagttttccagcata

SEQ ID NO: 63803 - DNA, 22 bp, Artificial Sequence
  chemically synthesized
tccagcatagagcatattaaat

SEQ ID NO: 63804 - DNA, 22 bp, Artificial Sequence
  chemically synthesized
ccagcatagagcatattaaatt

SEQ ID NO: 63805 - DNA, 22 bp, Artificial Sequence
  chemically synthesized
cagcatagagcatattaaattg

SEQ ID NO: 63806 - DNA, 22 bp, Artificial Sequence
  chemically synthesized
aattgaggaaggacaaagtcac

SEQ ID NO: 63807 - DNA, 22 bp, Artificial Sequence
  chemically synthesized
aggaaggacaaagtcacagagg

SEQ ID NO: 63808 - DNA, 22 bp, Artificial Sequence
  chemically synthesized
tggccaaggactttgcatgaaa

SEQ ID NO: 63809 - DNA, 22 bp, Artificial Sequence
  chemically synthesized
tgcatgaaacagtgagcgtgca

SEQ ID NO: 63810 - DNA, 22 bp, Artificial Sequence
  chemically synthesized
gcatgaaacagtgagcgtgcat

SEQ ID NO: 63811 - DNA, 22 bp, Artificial Sequence
  chemically synthesized
catgaaacagtgagcgtgcatc

SEQ ID NO: 63812 - DNA, 22 bp, Artificial Sequence
  chemically synthesized
ctccttgccctgccctcatggt

SEQ ID NO: 63813 - DNA, 22 bp, Artificial Sequence
  chemically synthesized
cttgccctgccctcatggtctg

SEQ ID NO: 63814 - DNA, 22 bp, Artificial Sequence
  chemically synthesized
gccctgccctcatggtctgtgt

SEQ ID NO: 63815 - DNA, 22 bp, Artificial Sequence
  chemically synthesized
ccctgccctcatggtctgtgta

SEQ ID NO: 63816 - DNA, 22 bp, Artificial Sequence
  chemically synthesized
ccctcatggtctgtgtactctc

SEQ ID NO: 63817 - DNA, 22 bp, Artificial Sequence
  chemically synthesized
atggtctgtgtactctcaggag

SEQ ID NO: 63818 - DNA, 22 bp, Artificial Sequence
  chemically synthesized
tgtactctcaggaggtcaggac

SEQ ID NO: 63819 - DNA, 22 bp, Artificial Sequence
  chemically synthesized
tcaggaggtcaggacaggcctt

SEQ ID NO: 63820 - DNA, 22 bp, Artificial Sequence
  chemically synthesized
aggaggtcaggacaggcctttc

SEQ ID NO: 63821 - DNA, 22 bp, Artificial Sequence
  chemically synthesized
tctgagaatgagaatctgttca

SEQ ID NO: 63822 - DNA, 22 bp, Artificial Sequence
  chemically synthesized
ctgagaatgagaatctgttcat

SEQ ID NO: 63823 - DNA, 22 bp, Artificial Sequence
  chemically synthesized
tgagaatgagaatctgttcatc

SEQ ID NO: 63824 - DNA, 22 bp, Artificial Sequence
  chemically synthesized
agaatgagaatctgttcatctg

SEQ ID NO: 63825 - DNA, 22 bp, Artificial Sequence
  chemically synthesized
ttcatctgcctttctactggat

SEQ ID NO: 63826 - DNA, 22 bp, Artificial Sequence
  chemically synthesized
atctgcctttctactggatact

SEQ ID NO: 63827 - DNA, 22 bp, Artificial Sequence
  chemically synthesized
cctttctactggatacttgtca

SEQ ID NO: 63828 - DNA, 22 bp, Artificial Sequence
  chemically synthesized
tctactggatacttgtcatcgg

SEQ ID NO: 63829 - DNA, 22 bp, Artificial Sequence
  chemically synthesized
ctactggatacttgtcatcggc

SEQ ID NO: 63830 - DNA, 22 bp, Artificial Sequence
  chemically synthesized
tactggatacttgtcatcggca

SEQ ID NO: 63831 - DNA, 22 bp, Artificial Sequence
  chemically synthesized
ctggatacttgtcatcggcata

SEQ ID NO: 63832 - DNA, 22 bp, Artificial Sequence
  chemically synthesized
gatacttgtcatcggcatacaa

SEQ ID NO: 63833 - DNA, 22 bp, Artificial Sequence
  chemically synthesized
gtcatcggcatacaaacacatg

SEQ ID NO: 63834 - DNA, 22 bp, Artificial Sequence
  chemically synthesized
tcatcggcatacaaacacatgt

SEQ ID NO: 63835 - DNA, 22 bp, Artificial Sequence
  chemically synthesized
tctgcagtgtgtcatctttcag

SEQ ID NO: 63836 - DNA, 22 bp, Artificial Sequence
  chemically synthesized
tgcagtgtgtcatctttcagaa

SEQ ID NO: 63837 - DNA, 22 bp, Artificial Sequence
  chemically synthesized
cagtgtgtcatctttcagaacc

SEQ ID NO: 63838 - DNA, 22 bp, Artificial Sequence
  chemically synthesized
tcagaacctcccctgaccctgt

SEQ ID NO: 63839 - DNA, 22 bp, Artificial Sequence
  chemically synthesized
cagaacctcccctgaccctgta

SEQ ID NO: 63840 - DNA, 22 bp, Artificial Sequence
  chemically synthesized
agaacctcccctgaccctgtat

SEQ ID NO: 63841 - DNA, 22 bp, Artificial Sequence
  chemically synthesized
ccctgaccctgtattccctaga

SEQ ID NO: 63842 - DNA, 22 bp, Artificial Sequence
  chemically synthesized
accctgtattccctagaagtct

SEQ ID NO: 63843 - DNA, 22 bp, Artificial Sequence
  chemically synthesized
tattccctagaagtctcgctgc

SEQ ID NO: 63844 - DNA, 22 bp, Artificial Sequence
  chemically synthesized
cctagaagtctcgctgctttca

SEQ ID NO: 63845 - DNA, 22 bp, Artificial Sequence
  chemically synthesized
gaagtctcgctgctttcagagc

SEQ ID NO: 63846 - DNA, 22 bp, Artificial Sequence
  chemically synthesized
gctgctttcagagccaggcttc

SEQ ID NO: 63847 - DNA, 22 bp, Artificial Sequence
  chemically synthesized
ctttcagagccaggcttctctc

SEQ ID NO: 63848 - DNA, 22 bp, Artificial Sequence
  chemically synthesized
tcagagccaggcttctctcctg

SEQ ID NO: 63849 - DNA, 22 bp, Artificial Sequence
  chemically synthesized
cagagccaggcttctctcctgc

SEQ ID NO: 63850 - DNA, 22 bp, Artificial Sequence
  chemically synthesized
agagccaggcttctctcctgct

SEQ ID NO: 63851 - DNA, 22 bp, Artificial Sequence
  chemically synthesized
ctctcctgctgccacccccact

SEQ ID NO: 63852 - DNA, 22 bp, Artificial Sequence
  chemically synthesized
tctcctgctgccacccccactg

SEQ ID NO: 63853 - DNA, 22 bp, Artificial Sequence
  chemically synthesized
tcctgctgccacccccactgct

SEQ ID NO: 63854 - DNA, 22 bp, Artificial Sequence
  chemically synthesized
ctgctgccacccccactgctct

SEQ ID NO: 63855 - DNA, 22 bp, Artificial Sequence
  chemically synthesized
ctgccacccccactgctcttct

SEQ ID NO: 63856 - DNA, 22 bp, Artificial Sequence
  chemically synthesized
ccacccccactgctcttctagt

SEQ ID NO: 63857 - DNA, 22 bp, Artificial Sequence
  chemically synthesized
ctcttctagtcactctttaacc

SEQ ID NO: 63858 - DNA, 22 bp, Artificial Sequence
  chemically synthesized
ttctagtcactctttaacccac

SEQ ID NO: 63859 - DNA, 22 bp, Artificial Sequence
  chemically synthesized
ctagtcactctttaacccactc

SEQ ID NO: 63860 - DNA, 22 bp, Artificial Sequence
  chemically synthesized
tagtcactctttaacccactcc

SEQ ID NO: 63861 - DNA, 22 bp, Artificial Sequence
  chemically synthesized
gtcactctttaacccactccat

SEQ ID NO: 63862 - DNA, 22 bp, Artificial Sequence
  chemically synthesized
tttaacccactccatctgcatg

SEQ ID NO: 63863 - DNA, 22 bp, Artificial Sequence
  chemically synthesized
taacccactccatctgcatgtg

SEQ ID NO: 63864 - DNA, 22 bp, Artificial Sequence
  chemically synthesized
aacccactccatctgcatgtgg

SEQ ID NO: 63865 - DNA, 22 bp, Artificial Sequence
  chemically synthesized
acccactccatctgcatgtggc

SEQ ID NO: 63866 - DNA, 22 bp, Artificial Sequence
  chemically synthesized
catctgcatgtggcccccacca

SEQ ID NO: 63867 - DNA, 22 bp, Artificial Sequence
  chemically synthesized
catgtggcccccaccacacccc

SEQ ID NO: 63868 - DNA, 22 bp, Artificial Sequence
  chemically synthesized
aaagtggtcaaggttgtcctgt

SEQ ID NO: 63869 - DNA, 22 bp, Artificial Sequence
  chemically synthesized
tcctgttgcttaattccatgga

SEQ ID NO: 63870 - DNA, 22 bp, Artificial Sequence
  chemically synthesized
ttgcttaattccatggaagctt

SEQ ID NO: 63871 - DNA, 22 bp, Artificial Sequence
  chemically synthesized
cttaattccatggaagcttggc

SEQ ID NO: 63872 - DNA, 22 bp, Artificial Sequence
  chemically synthesized
aattccatggaagcttggctat

SEQ ID NO: 63873 - DNA, 22 bp, Artificial Sequence
  chemically synthesized
attccatggaagcttggctatc

SEQ ID NO: 63874 - DNA, 22 bp, Artificial Sequence
  chemically synthesized
catggaagcttggctatcttca

SEQ ID NO: 63875 - DNA, 22 bp, Artificial Sequence
  chemically synthesized
ggctatcttcattttattagcc

SEQ ID NO: 63876 - DNA, 22 bp, Artificial Sequence
  chemically synthesized
gctatcttcattttattagcct

SEQ ID NO: 63877 - DNA, 22 bp, Artificial Sequence
  chemically synthesized
tcttcattttattagcctcttt

SEQ ID NO: 63878 - DNA, 22 bp, Artificial Sequence
  chemically synthesized
cattttattagcctcttttggc

SEQ ID NO: 63879 - DNA, 22 bp, Artificial Sequence
  chemically synthesized
attttattagcctcttttggcc

SEQ ID NO: 63880 - DNA, 22 bp, Artificial Sequence
  chemically synthesized
tattagcctcttttggcctctc

SEQ ID NO: 63881 - DNA, 22 bp, Artificial Sequence
  chemically synthesized
attagcctcttttggcctctca

SEQ ID NO: 63882 - DNA, 22 bp, Artificial Sequence
  chemically synthesized
ttagcctcttttggcctctcac

SEQ ID NO: 63883 - DNA, 22 bp, Artificial Sequence
  chemically synthesized
gcctcttttggcctctcaccct

SEQ ID NO: 63884 - DNA, 22 bp, Artificial Sequence
  chemically synthesized
ttttggcctctcaccctgtgaa

SEQ ID NO: 63885 - DNA, 22 bp, Artificial Sequence
  chemically synthesized
ttggcctctcaccctgtgaaaa

SEQ ID NO: 63886 - DNA, 22 bp, Artificial Sequence
  chemically synthesized
tggcctctcaccctgtgaaaat

SEQ ID NO: 63887 - DNA, 22 bp, Artificial Sequence
  chemically synthesized
ggcctctcaccctgtgaaaatc

SEQ ID NO: 63888 - DNA, 22 bp, Artificial Sequence
  chemically synthesized
gcctctcaccctgtgaaaatca

SEQ ID NO: 63889 - DNA, 22 bp, Artificial Sequence
  chemically synthesized
tcaccctgtgaaaatcactaca

SEQ ID NO: 63890 - DNA, 22 bp, Artificial Sequence
  chemically synthesized
accctgtgaaaatcactacatt

SEQ ID NO: 63891 - DNA, 22 bp, Artificial Sequence
  chemically synthesized
tgaaaatcactacattttgtgc

SEQ ID NO: 63892 - DNA, 22 bp, Artificial Sequence
  chemically synthesized
cattttgtgccagagatggagc

SEQ ID NO: 63893 - DNA, 22 bp, Artificial Sequence
  chemically synthesized
tgtgccagagatggagctggca

SEQ ID NO: 63894 - DNA, 22 bp, Artificial Sequence
  chemically synthesized
gtgccagagatggagctggcat

SEQ ID NO: 63895 - DNA, 22 bp, Artificial Sequence
  chemically synthesized
tgccagagatggagctggcatc

SEQ ID NO: 63896 - DNA, 22 bp, Artificial Sequence
  chemically synthesized
gcatctccaggcttggaagagg

SEQ ID NO: 63897 - DNA, 22 bp, Artificial Sequence
  chemically synthesized
caggcttggaagagggctgctg

SEQ ID NO: 63898 - DNA, 22 bp, Artificial Sequence
  chemically synthesized
ggaagagggctgctgaagctca

SEQ ID NO: 63899 - DNA, 22 bp, Artificial Sequence
  chemically synthesized
gaagagggctgctgaagctcag

SEQ ID NO: 63900 - DNA, 22 bp, Artificial Sequence
  chemically synthesized
ctgaagctcagccaggtgtcct

SEQ ID NO: 63901 - DNA, 22 bp, Artificial Sequence
  chemically synthesized
aagctcagccaggtgtcctaag

SEQ ID NO: 63902 - DNA, 22 bp, Artificial Sequence
  chemically synthesized
agccaggtgtcctaaggagcct

SEQ ID NO: 63903 - DNA, 22 bp, Artificial Sequence
  chemically synthesized
aggagcctcaggacaggggatg

SEQ ID NO: 63904 - DNA, 22 bp, Artificial Sequence
  chemically synthesized
aggacaggggatgctcagtagc

SEQ ID NO: 63905 - DNA, 22 bp, Artificial Sequence
  chemically synthesized
agtagccttgcaatgggaacac

SEQ ID NO: 63906 - DNA, 22 bp, Artificial Sequence
  chemically synthesized
gcaatgggaacacagctgagcc

SEQ ID NO: 63907 - DNA, 22 bp, Artificial Sequence
  chemically synthesized
caatgggaacacagctgagccc

SEQ ID NO: 63908 - DNA, 22 bp, Artificial Sequence
  chemically synthesized
agccccacttggccaccctttg

SEQ ID NO: 63909 - DNA, 22 bp, Artificial Sequence
  chemically synthesized
ggccaccctttgccacaaccag

SEQ ID NO: 63910 - DNA, 22 bp, Artificial Sequence
  chemically synthesized
gccaccctttgccacaaccagg

SEQ ID NO: 63911 - DNA, 22 bp, Artificial Sequence
  chemically synthesized
tgccacaaccaggcagaaagca

SEQ ID NO: 63912 - DNA, 22 bp, Artificial Sequence
  chemically synthesized
gccacaaccaggcagaaagcag

SEQ ID NO: 63913 - DNA, 22 bp, Artificial Sequence
  chemically synthesized
ccacaaccaggcagaaagcagc

SEQ ID NO: 63914 - DNA, 22 bp, Artificial Sequence
  chemically synthesized
ttgaacagatttgttgcctcag

SEQ ID NO: 63915 - DNA, 22 bp, Artificial Sequence
  chemically synthesized
tgaacagatttgttgcctcaga

SEQ ID NO: 63916 - DNA, 22 bp, Artificial Sequence
  chemically synthesized
gaacagatttgttgcctcagat

SEQ ID NO: 63917 - DNA, 22 bp, Artificial Sequence
  chemically synthesized
aacagatttgttgcctcagatt

SEQ ID NO: 63918 - DNA, 22 bp, Artificial Sequence
  chemically synthesized
gttgcctcagatttgatctcaa

SEQ ID NO: 63919 - DNA, 22 bp, Artificial Sequence
  chemically synthesized
ttgcctcagatttgatctcaaa

SEQ ID NO: 63920 - DNA, 22 bp, Artificial Sequence
  chemically synthesized
cctcagatttgatctcaaagaa

SEQ ID NO: 63921 - DNA, 22 bp, Artificial Sequence
  chemically synthesized
agatttgatctcaaagaaaaat

SEQ ID NO: 63922 - DNA, 22 bp, Artificial Sequence
  chemically synthesized
gatctcaaagaaaaatcgtggg

SEQ ID NO: 63923 - DNA, 22 bp, Artificial Sequence
  chemically synthesized
atctcaaagaaaaatcgtgggc

SEQ ID NO: 63924 - DNA, 22 bp, Artificial Sequence
  chemically synthesized
aaagaaaaatcgtgggcagtat

SEQ ID NO: 63925 - DNA, 22 bp, Artificial Sequence
  chemically synthesized
gtcccaggttctgcttttttac

SEQ ID NO: 63926 - DNA, 22 bp, Artificial Sequence
  chemically synthesized
tgcttttttacaatttcctctg

SEQ ID NO: 63927 - DNA, 22 bp, Artificial Sequence
  chemically synthesized
cttttttacaatttcctctgaa

SEQ ID NO: 63928 - DNA, 22 bp, Artificial Sequence
  chemically synthesized
ttttacaatttcctctgaaatc

SEQ ID NO: 63929 - DNA, 22 bp, Artificial Sequence
  chemically synthesized
tttacaatttcctctgaaatct

SEQ ID NO: 63930 - DNA, 22 bp, Artificial Sequence
  chemically synthesized
ttacaatttcctctgaaatctg

SEQ ID NO: 63931 - DNA, 22 bp, Artificial Sequence
  chemically synthesized
tacaatttcctctgaaatctgg

SEQ ID NO: 63932 - DNA, 22 bp, Artificial Sequence
  chemically synthesized
acaatttcctctgaaatctgga

SEQ ID NO: 63933 - DNA, 22 bp, Artificial Sequence
  chemically synthesized
caatttcctctgaaatctggat

SEQ ID NO: 63934 - DNA, 22 bp, Artificial Sequence
  chemically synthesized
cctctgaaatctggatgcctat

SEQ ID NO: 63935 - DNA, 22 bp, Artificial Sequence
  chemically synthesized
ctctgaaatctggatgcctatc

SEQ ID NO: 63936 - DNA, 22 bp, Artificial Sequence
  chemically synthesized
tgaaatctggatgcctatcaac

SEQ ID NO: 63937 - DNA, 22 bp, Artificial Sequence
  chemically synthesized
aaatctggatgcctatcaacac

SEQ ID NO: 63938 - DNA, 22 bp, Artificial Sequence
  chemically synthesized
gatgcctatcaacaccttggaa

SEQ ID NO: 63939 - DNA, 22 bp, Artificial Sequence
  chemically synthesized
tcaacaccttggaaaaactgaa

SEQ ID NO: 63940 - DNA, 22 bp, Artificial Sequence
  chemically synthesized
ggaaaaactgaattctccccaa

SEQ ID NO: 63941 - DNA, 22 bp, Artificial Sequence
  chemically synthesized
gaaaaactgaattctccccaac

SEQ ID NO: 63942 - DNA, 22 bp, Artificial Sequence
  chemically synthesized
aattctccccaactaatagtgg

SEQ ID NO: 63943 - DNA, 22 bp, Artificial Sequence
  chemically synthesized
tccccaactaatagtggtgtgt

SEQ ID NO: 63944 - DNA, 22 bp, Artificial Sequence
  chemically synthesized
cccaactaatagtggtgtgtca

SEQ ID NO: 63945 - DNA, 22 bp, Artificial Sequence
  chemically synthesized
atagtggtgtgtcactgtagta

SEQ ID NO: 63946 - DNA, 22 bp, Artificial Sequence
  chemically synthesized
tagtaagcctagtacaaaaatg

SEQ ID NO: 63947 - DNA, 22 bp, Artificial Sequence
  chemically synthesized
gtacaaaaatggccttctttgt

SEQ ID NO: 63948 - DNA, 22 bp, Artificial Sequence
  chemically synthesized
ctttgtggaggagcttcatatc

SEQ ID NO: 63949 - DNA, 22 bp, Artificial Sequence
  chemically synthesized
tttgtggaggagcttcatatcc

SEQ ID NO: 63950 - DNA, 22 bp, Artificial Sequence
  chemically synthesized
tgtggaggagcttcatatcctc

SEQ ID NO: 63951 - DNA, 22 bp, Artificial Sequence
  chemically synthesized
gtggaggagcttcatatcctcc

SEQ ID NO: 63952 - DNA, 22 bp, Artificial Sequence
  chemically synthesized
tggaggagcttcatatcctcca

SEQ ID NO: 63953 - DNA, 22 bp, Artificial Sequence
  chemically synthesized
catatcctccattttttttttg

SEQ ID NO: 63954 - DNA, 22 bp, Artificial Sequence
  chemically synthesized
atatcctccattttttttttgc

SEQ ID NO: 63955 - DNA, 22 bp, Artificial Sequence
  chemically synthesized
cattttttttttgcttaatttt

SEQ ID NO: 63956 - DNA, 22 bp, Artificial Sequence
  chemically synthesized
tttttttgcttaatttttgccc

SEQ ID NO: 63957 - DNA, 22 bp, Artificial Sequence
  chemically synthesized
ttttttgcttaatttttgccca

SEQ ID NO: 63958 - DNA, 22 bp, Artificial Sequence
  chemically synthesized
tttttgcttaatttttgcccaa

SEQ ID NO: 63959 - DNA, 22 bp, Artificial Sequence
  chemically synthesized
ttttgcttaatttttgcccaag

SEQ ID NO: 63960 - DNA, 22 bp, Artificial Sequence
  chemically synthesized
tttgcttaatttttgcccaaga

SEQ ID NO: 63961 - DNA, 22 bp, Artificial Sequence
  chemically synthesized
ttgcttaatttttgcccaagat

SEQ ID NO: 63962 - DNA, 22 bp, Artificial Sequence
  chemically synthesized
tgcttaatttttgcccaagatg

SEQ ID NO: 63963 - DNA, 22 bp, Artificial Sequence
  chemically synthesized
gcttaatttttgcccaagatga

SEQ ID NO: 63964 - DNA, 22 bp, Artificial Sequence
  chemically synthesized
cttaatttttgcccaagatgag

SEQ ID NO: 63965 - DNA, 22 bp, Artificial Sequence
  chemically synthesized
aatttttgcccaagatgagaac

SEQ ID NO: 63966 - DNA, 22 bp, Artificial Sequence
  chemically synthesized
atttttgcccaagatgagaaca

SEQ ID NO: 63967 - DNA, 22 bp, Artificial Sequence
  chemically synthesized
ttgcccaagatgagaacataat

SEQ ID NO: 63968 - DNA, 22 bp, Artificial Sequence
  chemically synthesized
tgcccaagatgagaacataatt

SEQ ID NO: 63969 - DNA, 22 bp, Artificial Sequence
  chemically synthesized
gcccaagatgagaacataattt

SEQ ID NO: 63970 - DNA, 22 bp, Artificial Sequence
  chemically synthesized
cccaagatgagaacataattta

SEQ ID NO: 63971 - DNA, 22 bp, Artificial Sequence
  chemically synthesized
agttcactttttatttattccc

SEQ ID NO: 63972 - DNA, 22 bp, Artificial Sequence
  chemically synthesized
gttcactttttatttattccca

SEQ ID NO: 63973 - DNA, 22 bp, Artificial Sequence
  chemically synthesized
actttttatttattcccaacat

SEQ ID NO: 63974 - DNA, 22 bp, Artificial Sequence
  chemically synthesized
tttatttattcccaacatcatc

SEQ ID NO: 63975 - DNA, 22 bp, Artificial Sequence
  chemically synthesized
ttatttattcccaacatcatcc

SEQ ID NO: 63976 - DNA, 22 bp, Artificial Sequence
  chemically synthesized
tatttattcccaacatcatcca

SEQ ID NO: 63977 - DNA, 22 bp, Artificial Sequence
  chemically synthesized
atttattcccaacatcatccat

SEQ ID NO: 63978 - DNA, 22 bp, Artificial Sequence
  chemically synthesized
tttattcccaacatcatccatg

SEQ ID NO: 63979 - DNA, 22 bp, Artificial Sequence
  chemically synthesized
attcccaacatcatccatgcac

SEQ ID NO: 63980 - DNA, 22 bp, Artificial Sequence
  chemically synthesized
ttcccaacatcatccatgcacc

SEQ ID NO: 63981 - DNA, 22 bp, Artificial Sequence
  chemically synthesized
ccaacatcatccatgcaccaac

SEQ ID NO: 63982 - DNA, 22 bp, Artificial Sequence
  chemically synthesized
ttgtaactaaaggagggaccat

SEQ ID NO: 63983 - DNA, 22 bp, Artificial Sequence
  chemically synthesized
tgtaactaaaggagggaccatt

SEQ ID NO: 63984 - DNA, 22 bp, Artificial Sequence
  chemically synthesized
gtaactaaaggagggaccattc

SEQ ID NO: 63985 - DNA, 22 bp, Artificial Sequence
  chemically synthesized
taactaaaggagggaccattca

SEQ ID NO: 63986 - DNA, 22 bp, Artificial Sequence
  chemically synthesized
aaggagggaccattcagaagat

SEQ ID NO: 63987 - DNA, 22 bp, Artificial Sequence
  chemically synthesized
agaagatgcttatcaactgtca

SEQ ID NO: 63988 - DNA, 22 bp, Artificial Sequence
  chemically synthesized
atcaactgtcaaagtgacagtg

SEQ ID NO: 63989 - DNA, 22 bp, Artificial Sequence
  chemically synthesized
tcaactgtcaaagtgacagtgt

SEQ ID NO: 63990 - DNA, 22 bp, Artificial Sequence
  chemically synthesized
tcaaagtgacagtgttacaacc

SEQ ID NO: 63991 - DNA, 22 bp, Artificial Sequence
  chemically synthesized
caaccaatgcacatattgtaag

SEQ ID NO: 63992 - DNA, 22 bp, Artificial Sequence
  chemically synthesized
taagaaatcaaacaatggcctc

SEQ ID NO: 63993 - DNA, 22 bp, Artificial Sequence
  chemically synthesized
caaggttcatttctacacaggg

SEQ ID NO: 63994 - DNA, 22 bp, Artificial Sequence
  chemically synthesized
atttctacacagggattagcag

SEQ ID NO: 63995 - DNA, 22 bp, Artificial Sequence
  chemically synthesized
ctacacagggattagcagatca

SEQ ID NO: 63996 - DNA, 22 bp, Artificial Sequence
  chemically synthesized
tacacagggattagcagatcaa

SEQ ID NO: 63997 - DNA, 22 bp, Artificial Sequence
  chemically synthesized
cacagggattagcagatcaaca

SEQ ID NO: 63998 - DNA, 22 bp, Artificial Sequence
  chemically synthesized
gcagatcaacatcaatcttggc

SEQ ID NO: 63999 - DNA, 22 bp, Artificial Sequence
  chemically synthesized
ggcaacacagttgccactgatg

SEQ ID NO: 64000 - DNA, 22 bp, Artificial Sequence
  chemically synthesized
gcaacacagttgccactgatgg

SEQ ID NO: 64001 - DNA, 22 bp, Artificial Sequence
  chemically synthesized
ccactgatggtgtcttattttt

SEQ ID NO: 64002 - DNA, 22 bp, Artificial Sequence
  chemically synthesized
atggtgtcttattttttttatc

SEQ ID NO: 64003 - DNA, 22 bp, Artificial Sequence
  chemically synthesized
attttttttatcatgacatggc

SEQ ID NO: 64004 - DNA, 22 bp, Artificial Sequence
  chemically synthesized
ttttttttatcatgacatggca

SEQ ID NO: 64005 - DNA, 22 bp, Artificial Sequence
  chemically synthesized
tttttatcatgacatggcaatc

SEQ ID NO: 64006 - DNA, 22 bp, Artificial Sequence
  chemically synthesized
ttttatcatgacatggcaatca

SEQ ID NO: 64007 - DNA, 22 bp, Artificial Sequence
  chemically synthesized
tttatcatgacatggcaatcaa

SEQ ID NO: 64008 - DNA, 22 bp, Artificial Sequence
  chemically synthesized
ttatcatgacatggcaatcaag

SEQ ID NO: 64009 - DNA, 22 bp, Artificial Sequence
  chemically synthesized
tatcatgacatggcaatcaaga

SEQ ID NO: 64010 - DNA, 22 bp, Artificial Sequence
  chemically synthesized
atcatgacatggcaatcaagag

SEQ ID NO: 64011 - DNA, 22 bp, Artificial Sequence
  chemically synthesized
tcatgacatggcaatcaagagc

SEQ ID NO: 64012 - DNA, 22 bp, Artificial Sequence
  chemically synthesized
attcttatttaagattttatgg

SEQ ID NO: 64013 - DNA, 22 bp, Artificial Sequence
  chemically synthesized
ttcttatttaagattttatggt

SEQ ID NO: 64014 - DNA, 22 bp, Artificial Sequence
  chemically synthesized
ttatttaagattttatggttag

SEQ ID NO: 64015 - DNA, 22 bp, Artificial Sequence
  chemically synthesized
atttaagattttatggttagac

SEQ ID NO: 64016 - DNA, 22 bp, Artificial Sequence
  chemically synthesized
tttaagattttatggttagact

SEQ ID NO: 64017 - DNA, 22 bp, Artificial Sequence
  chemically synthesized
aagattttatggttagactagg

SEQ ID NO: 64018 - DNA, 22 bp, Artificial Sequence
  chemically synthesized
agattttatggttagactaggc

SEQ ID NO: 64019 - DNA, 22 bp, Artificial Sequence
  chemically synthesized
tatggttagactaggcagatag

SEQ ID NO: 64020 - DNA, 22 bp, Artificial Sequence
  chemically synthesized
atggttagactaggcagatagc

SEQ ID NO: 64021 - DNA, 22 bp, Artificial Sequence
  chemically synthesized
tggttagactaggcagatagct

SEQ ID NO: 64022 - DNA, 22 bp, Artificial Sequence
  chemically synthesized
gactaggcagatagctagatat

SEQ ID NO: 64023 - DNA, 22 bp, Artificial Sequence
  chemically synthesized
ggcagatagctagatatgagca

SEQ ID NO: 64024 - DNA, 22 bp, Artificial Sequence
  chemically synthesized
gatatgagcaggaggtggaagc

SEQ ID NO: 64025 - DNA, 22 bp, Artificial Sequence
  chemically synthesized
agagaatggaggtctggagaat

SEQ ID NO: 64026 - DNA, 22 bp, Artificial Sequence
  chemically synthesized
gagaatctgaaaccccagagat

SEQ ID NO: 64027 - DNA, 22 bp, Artificial Sequence
  chemically synthesized
aaaccccagagattacccaagt

SEQ ID NO: 64028 - DNA, 22 bp, Artificial Sequence
  chemically synthesized
cccaagtcctgcatgctagaca

SEQ ID NO: 64029 - DNA, 22 bp, Artificial Sequence
  chemically synthesized
catgctagacatgagtggagga

SEQ ID NO: 64030 - DNA, 22 bp, Artificial Sequence
  chemically synthesized
gacatgagtggaggagggggaa

SEQ ID NO: 64031 - DNA, 22 bp, Artificial Sequence
  chemically synthesized
ggtagaaaagaatgccccttaa

SEQ ID NO: 64032 - DNA, 22 bp, Artificial Sequence
  chemically synthesized
aagatgcccagcagtcgctcac

SEQ ID NO: 64033 - DNA, 22 bp, Artificial Sequence
  chemically synthesized
agatgcccagcagtcgctcact

SEQ ID NO: 64034 - DNA, 22 bp, Artificial Sequence
  chemically synthesized
actgtgcagttaacttttcaga

SEQ ID NO: 64035 - DNA, 22 bp, Artificial Sequence
  chemically synthesized
tgcagttaacttttcagaatgc

SEQ ID NO: 64036 - DNA, 22 bp, Artificial Sequence
  chemically synthesized
acttttcagaatgctgctagat

SEQ ID NO: 64037 - DNA, 22 bp, Artificial Sequence
  chemically synthesized
ttcagaatgctgctagatacat

SEQ ID NO: 64038 - DNA, 22 bp, Artificial Sequence
  chemically synthesized
tcagaatgctgctagatacatg

SEQ ID NO: 64039 - DNA, 22 bp, Artificial Sequence
  chemically synthesized
cagaatgctgctagatacatgc

SEQ ID NO: 64040 - DNA, 22 bp, Artificial Sequence
  chemically synthesized
agaatgctgctagatacatgct

SEQ ID NO: 64041 - DNA, 22 bp, Artificial Sequence
  chemically synthesized
ctagatacatgctgatagggag

SEQ ID NO: 64042 - DNA, 22 bp, Artificial Sequence
  chemically synthesized
gatacatgctgatagggaggga

SEQ ID NO: 64043 - DNA, 22 bp, Artificial Sequence
  chemically synthesized
atagggagggaagagggcaaag

SEQ ID NO: 64044 - DNA, 22 bp, Artificial Sequence
  chemically synthesized
ctaagagatacacggttgcagt

SEQ ID NO: 64045 - DNA, 22 bp, Artificial Sequence
  chemically synthesized
agagatacacggttgcagttag

SEQ ID NO: 64046 - DNA, 22 bp, Artificial Sequence
  chemically synthesized
cagttagtatacatctgagtgc

SEQ ID NO: 64047 - DNA, 22 bp, Artificial Sequence
  chemically synthesized
gtatacatctgagtgctataca

SEQ ID NO: 64048 - DNA, 22 bp, Artificial Sequence
  chemically synthesized
agtgctatacaaccttctttgg

SEQ ID NO: 64049 - DNA, 22 bp, Artificial Sequence
  chemically synthesized
tacaaccttctttgggtggtgg

SEQ ID NO: 64050 - DNA, 22 bp, Artificial Sequence
  chemically synthesized
ctttgggtggtggcaagaagca

SEQ ID NO: 64051 - DNA, 22 bp, Artificial Sequence
  chemically synthesized
tttgggtggtggcaagaagcaa

SEQ ID NO: 64052 - DNA, 22 bp, Artificial Sequence
  chemically synthesized
tgggtggtggcaagaagcaatg

SEQ ID NO: 64053 - DNA, 22 bp, Artificial Sequence
  chemically synthesized
gggtggtggcaagaagcaatgc

SEQ ID NO: 64054 - DNA, 22 bp, Artificial Sequence
  chemically synthesized
ggtggtggcaagaagcaatgca

SEQ ID NO: 64055 - DNA, 22 bp, Artificial Sequence
  chemically synthesized
cgtagaattcatatcaaacacc

SEQ ID NO: 64056 - DNA, 22 bp, Artificial Sequence
  chemically synthesized
atatcaaacacctgtatcacag

SEQ ID NO: 64057 - DNA, 22 bp, Artificial Sequence
  chemically synthesized
tatcacaggtgttaaagaaaca

SEQ ID NO: 64058 - DNA, 22 bp, Artificial Sequence
  chemically synthesized
aagaaacaagaaacattgtact

SEQ ID NO: 64059 - DNA, 22 bp, Artificial Sequence
  chemically synthesized
tacttcttgtattcttaataat

SEQ ID NO: 64060 - DNA, 22 bp, Artificial Sequence
  chemically synthesized
cttgtattcttaataatgattt

SEQ ID NO: 64061 - DNA, 22 bp, Artificial Sequence
  chemically synthesized
ttgtattcttaataatgatttg

SEQ ID NO: 64062 - DNA, 22 bp, Artificial Sequence
  chemically synthesized
gtattcttaataatgatttgca

SEQ ID NO: 64063 - DNA, 22 bp, Artificial Sequence
  chemically synthesized
tattcttaataatgatttgcaa

SEQ ID NO: 64064 - DNA, 22 bp, Artificial Sequence
  chemically synthesized
ttaataatgatttgcaatattg

SEQ ID NO: 64065 - DNA, 22 bp, Artificial Sequence
  chemically synthesized
aataatgatttgcaatattgtc

SEQ ID NO: 64066 - DNA, 22 bp, Artificial Sequence
  chemically synthesized
ataatgatttgcaatattgtct

SEQ ID NO: 64067 - DNA, 22 bp, Artificial Sequence
  chemically synthesized
gcaatattgtctttagtatcac

SEQ ID NO: 64068 - DNA, 22 bp, Artificial Sequence
  chemically synthesized
caatattgtctttagtatcact

SEQ ID NO: 64069 - DNA, 22 bp, Artificial Sequence
  chemically synthesized
tctttagtatcactgcaaacct

SEQ ID NO: 64070 - DNA, 22 bp, Artificial Sequence
  chemically synthesized
tagtatcactgcaaacctctat

SEQ ID NO: 64071 - DNA, 22 bp, Artificial Sequence
  chemically synthesized
agtatcactgcaaacctctata

SEQ ID NO: 64072 - DNA, 22 bp, Artificial Sequence
  chemically synthesized
gtatcactgcaaacctctataa

SEQ ID NO: 64073 - DNA, 22 bp, Artificial Sequence
  chemically synthesized
caaacctctataaatatgattt

SEQ ID NO: 64074 - DNA, 22 bp, Artificial Sequence
  chemically synthesized
tataaatatgatttttaaaaag

SEQ ID NO: 64075 - DNA, 22 bp, Artificial Sequence
  chemically synthesized
taaatatgatttttaaaaagta

SEQ ID NO: 64076 - DNA, 22 bp, Artificial Sequence
  chemically synthesized
ttaaaaagtatttctttaggtt

SEQ ID NO: 64077 - DNA, 22 bp, Artificial Sequence
  chemically synthesized
taaaaagtatttctttaggttg

SEQ ID NO: 64078 - DNA, 22 bp, Artificial Sequence
  chemically synthesized
aaaaagtatttctttaggttgg

SEQ ID NO: 64079 - DNA, 22 bp, Artificial Sequence
  chemically synthesized
aaaagtatttctttaggttgga

SEQ ID NO: 64080 - DNA, 22 bp, Artificial Sequence
  chemically synthesized
ctttaggttggaattacttcta

SEQ ID NO: 64081 - DNA, 22 bp, Artificial Sequence
  chemically synthesized
tttaggttggaattacttctac

SEQ ID NO: 64082 - DNA, 22 bp, Artificial Sequence
  chemically synthesized
taggttggaattacttctacgc

SEQ ID NO: 64083 - DNA, 22 bp, Artificial Sequence
  chemically synthesized
aggttggaattacttctacgca

SEQ ID NO: 64084 - DNA, 22 bp, Artificial Sequence
  chemically synthesized
ggttggaattacttctacgcat

SEQ ID NO: 64085 - DNA, 22 bp, Artificial Sequence
  chemically synthesized
gaattacttctacgcattgact

SEQ ID NO: 64086 - DNA, 22 bp, Artificial Sequence
  chemically synthesized
cttctacgcattgacttatctt

SEQ ID NO: 64087 - DNA, 22 bp, Artificial Sequence
  chemically synthesized
ctacgcattgacttatcttcct

SEQ ID NO: 64088 - DNA, 22 bp, Artificial Sequence
  chemically synthesized
tacgcattgacttatcttcctg

SEQ ID NO: 64089 - DNA, 22 bp, Artificial Sequence
  chemically synthesized
cgcattgacttatcttcctggg

SEQ ID NO: 64090 - DNA, 22 bp, Artificial Sequence
  chemically synthesized
acttatcttcctgggtttcatt

SEQ ID NO: 64091 - DNA, 22 bp, Artificial Sequence
  chemically synthesized
atcttcctgggtttcattagcc

SEQ ID NO: 64092 - DNA, 22 bp, Artificial Sequence
  chemically synthesized
tcttcctgggtttcattagccg

SEQ ID NO: 64093 - DNA, 22 bp, Artificial Sequence
  chemically synthesized
cctgggtttcattagccgtacc

SEQ ID NO: 64094 - DNA, 22 bp, Artificial Sequence
  chemically synthesized
ctgggtttcattagccgtaccc

SEQ ID NO: 64095 - DNA, 22 bp, Artificial Sequence
  chemically synthesized
ggtttcattagccgtacccgtt

SEQ ID NO: 64096 - DNA, 22 bp, Artificial Sequence
  chemically synthesized
cattagccgtacccgttgtact

SEQ ID NO: 64097 - DNA, 22 bp, Artificial Sequence
  chemically synthesized
attagccgtacccgttgtactt

SEQ ID NO: 64098 - DNA, 22 bp, Artificial Sequence
  chemically synthesized
gccgtacccgttgtactttctt

SEQ ID NO: 64099 - DNA, 22 bp, Artificial Sequence
  chemically synthesized
tactttcttccttaccactgtt

SEQ ID NO: 64100 - DNA, 22 bp, Artificial Sequence
  chemically synthesized
tcttccttaccactgtttatct

SEQ ID NO: 64101 - DNA, 22 bp, Artificial Sequence
  chemically synthesized
cttccttaccactgtttatctc

SEQ ID NO: 64102 - DNA, 22 bp, Artificial Sequence
  chemically synthesized
ttccttaccactgtttatctca

SEQ ID NO: 64103 - DNA, 22 bp, Artificial Sequence
  chemically synthesized
ccttaccactgtttatctcaaa

SEQ ID NO: 64104 - DNA, 22 bp, Artificial Sequence
  chemically synthesized
cttaccactgtttatctcaaac

SEQ ID NO: 64105 - DNA, 22 bp, Artificial Sequence
  chemically synthesized
accactgtttatctcaaactct

SEQ ID NO: 64106 - DNA, 22 bp, Artificial Sequence
  chemically synthesized
ccactgtttatctcaaactctt

SEQ ID NO: 64107 - DNA, 22 bp, Artificial Sequence
  chemically synthesized
tttatctcaaactcttgagatt

SEQ ID NO: 64108 - DNA, 22 bp, Artificial Sequence
  chemically synthesized
atctcaaactcttgagattaaa

SEQ ID NO: 64109 - DNA, 22 bp, Artificial Sequence
  chemically synthesized
tctcaaactcttgagattaaag

SEQ ID NO: 64110 - DNA, 22 bp, Artificial Sequence
  chemically synthesized
aaactcttgagattaaagtatg

SEQ ID NO: 64111 - DNA, 22 bp, Artificial Sequence
  chemically synthesized
ttgagattaaagtatgggctca

SEQ ID NO: 64112 - DNA, 22 bp, Artificial Sequence
  chemically synthesized
gagattaaagtatgggctcagg

SEQ ID NO: 64113 - DNA, 22 bp, Artificial Sequence
  chemically synthesized
agattaaagtatgggctcagga

SEQ ID NO: 64114 - DNA, 22 bp, Artificial Sequence
  chemically synthesized
aagtatgggctcaggagggagc

SEQ ID NO: 64115 - DNA, 22 bp, Artificial Sequence
  chemically synthesized
aggagggagcgaggagcttcag

SEQ ID NO: 64116 - DNA, 22 bp, Artificial Sequence
  chemically synthesized
caggactctcacggacctccag

SEQ ID NO: 64117 - DNA, 22 bp, Artificial Sequence
  chemically synthesized
aggactctcacggacctccagc

SEQ ID NO: 64118 - DNA, 22 bp, Artificial Sequence
  chemically synthesized
tcacggacctccagcacagtgt

SEQ ID NO: 64119 - DNA, 22 bp, Artificial Sequence
  chemically synthesized
acggacctccagcacagtgtag

SEQ ID NO: 64120 - DNA, 22 bp, Artificial Sequence
  chemically synthesized
cagcacagtgtagctgccttat

SEQ ID NO: 64121 - DNA, 22 bp, Artificial Sequence
  chemically synthesized
ccttatggaaaagtggccacac

SEQ ID NO: 64122 - DNA, 22 bp, Artificial Sequence
  chemically synthesized
atggaaaagtggccacactgtt

SEQ ID NO: 64123 - DNA, 22 bp, Artificial Sequence
  chemically synthesized
tggaaaagtggccacactgttt

SEQ ID NO: 64124 - DNA, 22 bp, Artificial Sequence
  chemically synthesized
ttttctgcactggtccctgccc

SEQ ID NO: 64125 - DNA, 22 bp, Artificial Sequence
  chemically synthesized
tctgcactggtccctgccccta

SEQ ID NO: 64126 - DNA, 22 bp, Artificial Sequence
  chemically synthesized
ctgcactggtccctgcccctac

SEQ ID NO: 64127 - DNA, 22 bp, Artificial Sequence
  chemically synthesized
tgcactggtccctgcccctact

SEQ ID NO: 64128 - DNA, 22 bp, Artificial Sequence
  chemically synthesized
cactggtccctgcccctactat

SEQ ID NO: 64129 - DNA, 22 bp, Artificial Sequence
  chemically synthesized
gtccctgcccctactattcctc

SEQ ID NO: 64130 - DNA, 22 bp, Artificial Sequence
  chemically synthesized
cccctactattcctcactgggc

SEQ ID NO: 64131 - DNA, 22 bp, Artificial Sequence
  chemically synthesized
ctattcctcactgggcagagca

SEQ ID NO: 64132 - DNA, 22 bp, Artificial Sequence
  chemically synthesized
ttcctcactgggcagagcacag

SEQ ID NO: 64133 - DNA, 22 bp, Artificial Sequence
  chemically synthesized
ctcactgggcagagcacagcca

SEQ ID NO: 64134 - DNA, 22 bp, Artificial Sequence
  chemically synthesized
actgggcagagcacagccaccc

SEQ ID NO: 64135 - DNA, 22 bp, Artificial Sequence
  chemically synthesized
ggcagagcacagccaccctggc

SEQ ID NO: 64136 - DNA, 22 bp, Artificial Sequence
  chemically synthesized
gccctgcctgaacattttagtc

SEQ ID NO: 64137 - DNA, 22 bp, Artificial Sequence
  chemically synthesized
cctgaacattttagtcagtgtt

SEQ ID NO: 64138 - DNA, 22 bp, Artificial Sequence
  chemically synthesized
aacattttagtcagtgttggct

SEQ ID NO: 64139 - DNA, 22 bp, Artificial Sequence
  chemically synthesized
tagtcagtgttggctctgtgct

SEQ ID NO: 64140 - DNA, 22 bp, Artificial Sequence
  chemically synthesized
agtcagtgttggctctgtgctt

SEQ ID NO: 64141 - DNA, 22 bp, Artificial Sequence
  chemically synthesized
gtcagtgttggctctgtgcttc

SEQ ID NO: 64142 - DNA, 22 bp, Artificial Sequence
  chemically synthesized
gctctgtgcttctctggggagg

SEQ ID NO: 64143 - DNA, 22 bp, Artificial Sequence
  chemically synthesized
tgtgcttctctggggaggaaat

SEQ ID NO: 64144 - DNA, 22 bp, Artificial Sequence
  chemically synthesized
tgcttctctggggaggaaatcc

SEQ ID NO: 64145 - DNA, 22 bp, Artificial Sequence
  chemically synthesized
ctctggggaggaaatccaagag

SEQ ID NO: 64146 - DNA, 22 bp, Artificial Sequence
  chemically synthesized
tctggggaggaaatccaagaga

SEQ ID NO: 64147 - DNA, 22 bp, Artificial Sequence
  chemically synthesized
tggggaggaaatccaagagaca

SEQ ID NO: 64148 - DNA, 22 bp, Artificial Sequence
  chemically synthesized
gggaggaaatccaagagacaac

SEQ ID NO: 64149 - DNA, 22 bp, Artificial Sequence
  chemically synthesized
tgccatttcagctgcagcagta

SEQ ID NO: 64150 - DNA, 22 bp, Artificial Sequence
  chemically synthesized
ccatttcagctgcagcagtacc

SEQ ID NO: 64151 - DNA, 22 bp, Artificial Sequence
  chemically synthesized
cagctgcagcagtaccaccgtt

SEQ ID NO: 64152 - DNA, 22 bp, Artificial Sequence
  chemically synthesized
agctgcagcagtaccaccgtta

SEQ ID NO: 64153 - DNA, 22 bp, Artificial Sequence
  chemically synthesized
cagcagtaccaccgttaatgcc

SEQ ID NO: 64154 - DNA, 22 bp, Artificial Sequence
  chemically synthesized
atgcccttgggcttgagaaaga

SEQ ID NO: 64155 - DNA, 22 bp, Artificial Sequence
  chemically synthesized
gggcttgagaaagaagggacct

SEQ ID NO: 64156 - DNA, 22 bp, Artificial Sequence
  chemically synthesized
ggcttgagaaagaagggacctg

SEQ ID NO: 64157 - DNA, 22 bp, Artificial Sequence
  chemically synthesized
gagaaagaagggacctggccac

SEQ ID NO: 64158 - DNA, 22 bp, Artificial Sequence
  chemically synthesized
agaaagaagggacctggccact

SEQ ID NO: 64159 - DNA, 22 bp, Artificial Sequence
  chemically synthesized
gccacttccctgacacctccag

SEQ ID NO: 64160 - DNA, 22 bp, Artificial Sequence
  chemically synthesized
ccctgacacctccagcacacag

SEQ ID NO: 64161 - DNA, 22 bp, Artificial Sequence
  chemically synthesized
cctgacacctccagcacacagc

SEQ ID NO: 64162 - DNA, 22 bp, Artificial Sequence
  chemically synthesized
acacctccagcacacagcaggg

SEQ ID NO: 64163 - DNA, 22 bp, Artificial Sequence
  chemically synthesized
cagcacacagcagggaaagaat

SEQ ID NO: 64164 - DNA, 22 bp, Artificial Sequence
  chemically synthesized
cagtttctctttcttgtgagct

SEQ ID NO: 64165 - DNA, 22 bp, Artificial Sequence
  chemically synthesized
ctctttcttgtgagctttcacc

SEQ ID NO: 64166 - DNA, 22 bp, Artificial Sequence
  chemically synthesized
tctttcttgtgagctttcacct

SEQ ID NO: 64167 - DNA, 22 bp, Artificial Sequence
  chemically synthesized
tttcttgtgagctttcacctgc

SEQ ID NO: 64168 - DNA, 22 bp, Artificial Sequence
  chemically synthesized
tcttgtgagctttcacctgcta

SEQ ID NO: 64169 - DNA, 22 bp, Artificial Sequence
  chemically synthesized
cttgtgagctttcacctgctac

SEQ ID NO: 64170 - DNA, 22 bp, Artificial Sequence
  chemically synthesized
ttgtgagctttcacctgctact

SEQ ID NO: 64171 - DNA, 22 bp, Artificial Sequence
  chemically synthesized
gtgagctttcacctgctactct

SEQ ID NO: 64172 - DNA, 22 bp, Artificial Sequence
  chemically synthesized
tgagctttcacctgctactctt

SEQ ID NO: 64173 - DNA, 22 bp, Artificial Sequence
  chemically synthesized
tcacctgctactcttcaccagg

SEQ ID NO: 64174 - DNA, 22 bp, Artificial Sequence
  chemically synthesized
cacctgctactcttcaccaggc

SEQ ID NO: 64175 - DNA, 22 bp, Artificial Sequence
  chemically synthesized
acctgctactcttcaccaggca

SEQ ID NO: 64176 - DNA, 22 bp, Artificial Sequence
  chemically synthesized
ctactcttcaccaggcaaggct

SEQ ID NO: 64177 - DNA, 22 bp, Artificial Sequence
  chemically synthesized
ctcttcaccaggcaaggctcct

SEQ ID NO: 64178 - DNA, 22 bp, Artificial Sequence
  chemically synthesized
ttcaccaggcaaggctcctggc

SEQ ID NO: 64179 - DNA, 22 bp, Artificial Sequence
  chemically synthesized
caccaggcaaggctcctggctt

SEQ ID NO: 64180 - DNA, 22 bp, Artificial Sequence
  chemically synthesized
accaggcaaggctcctggcttg

SEQ ID NO: 64181 - DNA, 22 bp, Artificial Sequence
  chemically synthesized
ctggcttgggcccacagtgcag

SEQ ID NO: 64182 - DNA, 22 bp, Artificial Sequence
  chemically synthesized
gcttgggcccacagtgcaggca

SEQ ID NO: 64183 - DNA, 22 bp, Artificial Sequence
  chemically synthesized
gggcccacagtgcaggcacctc

SEQ ID NO: 64184 - DNA, 22 bp, Artificial Sequence
  chemically synthesized
ggcccacagtgcaggcacctcg

SEQ ID NO: 64185 - DNA, 22 bp, Artificial Sequence
  chemically synthesized
gaactcagttgaacatttccac

SEQ ID NO: 64186 - DNA, 22 bp, Artificial Sequence
  chemically synthesized
agttgaacatttccactggctg

SEQ ID NO: 64187 - DNA, 22 bp, Artificial Sequence
  chemically synthesized
aacatttccactggctgcactc

SEQ ID NO: 64188 - DNA, 22 bp, Artificial Sequence
  chemically synthesized
ccactggctgcactctgtgttt

SEQ ID NO: 64189 - DNA, 22 bp, Artificial Sequence
  chemically synthesized
cactggctgcactctgtgtttt

SEQ ID NO: 64190 - DNA, 22 bp, Artificial Sequence
  chemically synthesized
gctgcactctgtgtttttgtgg

SEQ ID NO: 64191 - DNA, 22 bp, Artificial Sequence
  chemically synthesized
cactctgtgtttttgtggggtg

SEQ ID NO: 64192 - DNA, 22 bp, Artificial Sequence
  chemically synthesized
tgtgtttttgtggggtgaagct

SEQ ID NO: 64193 - DNA, 22 bp, Artificial Sequence
  chemically synthesized
tgtttttgtggggtgaagctcc

SEQ ID NO: 64194 - DNA, 22 bp, Artificial Sequence
  chemically synthesized
ttgtggggtgaagctcccagag

SEQ ID NO: 64195 - DNA, 22 bp, Artificial Sequence
  chemically synthesized
tgtggggtgaagctcccagagg

SEQ ID NO: 64196 - DNA, 22 bp, Artificial Sequence
  chemically synthesized
gtggggtgaagctcccagaggt

SEQ ID NO: 64197 - DNA, 22 bp, Artificial Sequence
  chemically synthesized
tggggtgaagctcccagaggtg

SEQ ID NO: 64198 - DNA, 22 bp, Artificial Sequence
  chemically synthesized
ccagaggtgactgaaagtcctt

SEQ ID NO: 64199 - DNA, 22 bp, Artificial Sequence
  chemically synthesized
aaagtccttctgccactaacac

SEQ ID NO: 64200 - DNA, 22 bp, Artificial Sequence
  chemically synthesized
ctgccactaacactgcagtcat

SEQ ID NO: 64201 - DNA, 22 bp, Artificial Sequence
  chemically synthesized
tgccactaacactgcagtcata

SEQ ID NO: 64202 - DNA, 22 bp, Artificial Sequence
  chemically synthesized
ccactaacactgcagtcatact

SEQ ID NO: 64203 - DNA, 22 bp, Artificial Sequence
  chemically synthesized
acactgcagtcatactgccctt

SEQ ID NO: 64204 - DNA, 22 bp, Artificial Sequence
  chemically synthesized
cagtcatactgcccttgctgta

SEQ ID NO: 64205 - DNA, 22 bp, Artificial Sequence
  chemically synthesized
cccttgctgtacttggactagg

SEQ ID NO: 64206 - DNA, 22 bp, Artificial Sequence
  chemically synthesized
gctgtacttggactagggaagg

SEQ ID NO: 64207 - DNA, 22 bp, Artificial Sequence
  chemically synthesized
ctgtacttggactagggaagga

SEQ ID NO: 64208 - DNA, 22 bp, Artificial Sequence
  chemically synthesized
tacttggactagggaaggaaaa

SEQ ID NO: 64209 - DNA, 22 bp, Artificial Sequence
  chemically synthesized
ggactagggaaggaaaaaagat

SEQ ID NO: 64210 - DNA, 22 bp, Artificial Sequence
  chemically synthesized
gactagggaaggaaaaaagatc

SEQ ID NO: 64211 - DNA, 22 bp, Artificial Sequence
  chemically synthesized
gggaaggaaaaaagatcctgag

SEQ ID NO: 64212 - DNA, 22 bp, Artificial Sequence
  chemically synthesized
agtgctttactcacaccccagt

SEQ ID NO: 64213 - DNA, 22 bp, Artificial Sequence
  chemically synthesized
tactcacaccccagtgtgcccc

SEQ ID NO: 64214 - DNA, 22 bp, Artificial Sequence
  chemically synthesized
actcacaccccagtgtgcccca

SEQ ID NO: 64215 - DNA, 22 bp, Artificial Sequence
  chemically synthesized
ctcacaccccagtgtgccccag

SEQ ID NO: 64216 - DNA, 22 bp, Artificial Sequence
  chemically synthesized
acaccccagtgtgccccagcca

SEQ ID NO: 64217 - DNA, 22 bp, Artificial Sequence
  chemically synthesized
tggaaaagaggccagtgtgtca

SEQ ID NO: 64218 - DNA, 22 bp, Artificial Sequence
  chemically synthesized
caagcaccctgaggcccctgcc

SEQ ID NO: 64219 - DNA, 22 bp, Artificial Sequence
  chemically synthesized
aggcccctgcccctgctgcccc

SEQ ID NO: 64220 - DNA, 22 bp, Artificial Sequence
  chemically synthesized
cccctgctgcccccaagctgta

SEQ ID NO: 64221 - DNA, 22 bp, Artificial Sequence
  chemically synthesized
ctgcccccaagctgtagagcca

SEQ ID NO: 64222 - DNA, 22 bp, Artificial Sequence
  chemically synthesized
cccccaagctgtagagccagaa

SEQ ID NO: 64223 - DNA, 22 bp, Artificial Sequence
  chemically synthesized
tagagccagaatataaagctgg

SEQ ID NO: 64224 - DNA, 22 bp, Artificial Sequence
  chemically synthesized
gcagaaaaatgtaaaaaggcta

SEQ ID NO: 64225 - DNA, 22 bp, Artificial Sequence
  chemically synthesized
gactggcttagcctcccagcct

SEQ ID NO: 64226 - DNA, 22 bp, Artificial Sequence
  chemically synthesized
gcttagcctcccagcctacatc

SEQ ID NO: 64227 - DNA, 22 bp, Artificial Sequence
  chemically synthesized
agcctcccagcctacatctttc

SEQ ID NO: 64228 - DNA, 22 bp, Artificial Sequence
  chemically synthesized
gcctcccagcctacatctttct

SEQ ID NO: 64229 - DNA, 22 bp, Artificial Sequence
  chemically synthesized
ccagcctacatctttctcctgt

SEQ ID NO: 64230 - DNA, 22 bp, Artificial Sequence
  chemically synthesized
catctttctcctgtgctggatc

SEQ ID NO: 64231 - DNA, 22 bp, Artificial Sequence
  chemically synthesized
tctcctgtgctggatccttcct

SEQ ID NO: 64232 - DNA, 22 bp, Artificial Sequence
  chemically synthesized
ctcctgtgctggatccttcctg

SEQ ID NO: 64233 - DNA, 22 bp, Artificial Sequence
  chemically synthesized
tcctgtgctggatccttcctgc

SEQ ID NO: 64234 - DNA, 22 bp, Artificial Sequence
  chemically synthesized
ctgtgctggatccttcctgctc

SEQ ID NO: 64235 - DNA, 22 bp, Artificial Sequence
  chemically synthesized
tgctggatccttcctgctcttg

SEQ ID NO: 64236 - DNA, 22 bp, Artificial Sequence
  chemically synthesized
gatccttcctgctcttgaacat

SEQ ID NO: 64237 - DNA, 22 bp, Artificial Sequence
  chemically synthesized
cctgctcttgaacatcggactc

SEQ ID NO: 64238 - DNA, 22 bp, Artificial Sequence
  chemically synthesized
ctgctcttgaacatcggactcc

SEQ ID NO: 64239 - DNA, 22 bp, Artificial Sequence
  chemically synthesized
ctcttgaacatcggactccaag

SEQ ID NO: 64240 - DNA, 22 bp, Artificial Sequence
  chemically synthesized
ttgaacatcggactccaagttc

SEQ ID NO: 64241 - DNA, 22 bp, Artificial Sequence
  chemically synthesized
gaacatcggactccaagttctt

SEQ ID NO: 64242 - DNA, 22 bp, Artificial Sequence
  chemically synthesized
aacatcggactccaagttcttc

SEQ ID NO: 64243 - DNA, 22 bp, Artificial Sequence
  chemically synthesized
caagttcttcagctgtgggact

SEQ ID NO: 64244 - DNA, 22 bp, Artificial Sequence
  chemically synthesized
ttcagctgtgggacttggactg

SEQ ID NO: 64245 - DNA, 22 bp, Artificial Sequence
  chemically synthesized
cagctgtgggacttggactgtc

SEQ ID NO: 64246 - DNA, 22 bp, Artificial Sequence
  chemically synthesized
agctgtgggacttggactgtct

SEQ ID NO: 64247 - DNA, 22 bp, Artificial Sequence
  chemically synthesized
tgggacttggactgtcttcctt

SEQ ID NO: 64248 - DNA, 22 bp, Artificial Sequence
  chemically synthesized
ggactgtcttccttgctcctca

SEQ ID NO: 64249 - DNA, 22 bp, Artificial Sequence
  chemically synthesized
gactgtcttccttgctcctcag

SEQ ID NO: 64250 - DNA, 22 bp, Artificial Sequence
  chemically synthesized
tcttccttgctcctcagattgc

SEQ ID NO: 64251 - DNA, 22 bp, Artificial Sequence
  chemically synthesized
ccttgctcctcagattgcaggt

SEQ ID NO: 64252 - DNA, 22 bp, Artificial Sequence
  chemically synthesized
cttgctcctcagattgcaggtg

SEQ ID NO: 64253 - DNA, 22 bp, Artificial Sequence
  chemically synthesized
gctcctcagattgcaggtggcc

SEQ ID NO: 64254 - DNA, 22 bp, Artificial Sequence
  chemically synthesized
ctcctcagattgcaggtggcct

SEQ ID NO: 64255 - DNA, 22 bp, Artificial Sequence
  chemically synthesized
ctcagattgcaggtggcctatt

SEQ ID NO: 64256 - DNA, 22 bp, Artificial Sequence
  chemically synthesized
agattgcaggtggcctattatg

SEQ ID NO: 64257 - DNA, 22 bp, Artificial Sequence
  chemically synthesized
caggtggcctattatgggacct

SEQ ID NO: 64258 - DNA, 22 bp, Artificial Sequence
  chemically synthesized
ttatgggaccttgtaatcttgt

SEQ ID NO: 64259 - DNA, 22 bp, Artificial Sequence
  chemically synthesized
tgggaccttgtaatcttgtgag

SEQ ID NO: 64260 - DNA, 22 bp, Artificial Sequence
  chemically synthesized
gtaatcttgtgagttaatacca

SEQ ID NO: 64261 - DNA, 22 bp, Artificial Sequence
  chemically synthesized
taatcttgtgagttaataccac

SEQ ID NO: 64262 - DNA, 22 bp, Artificial Sequence
  chemically synthesized
gtgagttaataccacttaataa

SEQ ID NO: 64263 - DNA, 22 bp, Artificial Sequence
  chemically synthesized
tgagttaataccacttaataag

SEQ ID NO: 64264 - DNA, 22 bp, Artificial Sequence
  chemically synthesized
ataccacttaataagctcccct

SEQ ID NO: 64265 - DNA, 22 bp, Artificial Sequence
  chemically synthesized
aataagctcccctttgtgtgag

SEQ ID NO: 64266 - DNA, 22 bp, Artificial Sequence
  chemically synthesized
ataagctcccctttgtgtgagt

SEQ ID NO: 64267 - DNA, 22 bp, Artificial Sequence
  chemically synthesized
ccctttgtgtgagtatatctat

SEQ ID NO: 64268 - DNA, 22 bp, Artificial Sequence
  chemically synthesized
tgtgtgagtatatctatatcta

SEQ ID NO: 64269 - DNA, 22 bp, Artificial Sequence
  chemically synthesized
gtgtgagtatatctatatctat

SEQ ID NO: 64270 - DNA, 22 bp, Artificial Sequence
  chemically synthesized
tgtgagtatatctatatctata

SEQ ID NO: 64271 - DNA, 22 bp, Artificial Sequence
  chemically synthesized
tatctatagatagatataggta

SEQ ID NO: 64272 - DNA, 22 bp, Artificial Sequence
  chemically synthesized
tagatagatataggtatactca

SEQ ID NO: 64273 - DNA, 22 bp, Artificial Sequence
  chemically synthesized
actatatatacacatatataca

SEQ ID NO: 64274 - DNA, 22 bp, Artificial Sequence
  chemically synthesized
tatatacacatatatacatata

SEQ ID NO: 64275 - DNA, 22 bp, Artificial Sequence
  chemically synthesized
tctctctctctctctcatatat

SEQ ID NO: 64276 - DNA, 22 bp, Artificial Sequence
  chemically synthesized
tctctctctctctcatatatat

SEQ ID NO: 64277 - DNA, 22 bp, Artificial Sequence
  chemically synthesized
tctctctctctcatatatatat

SEQ ID NO: 64278 - DNA, 22 bp, Artificial Sequence
  chemically synthesized
tctctctctcatatatatatat

SEQ ID NO: 64279 - DNA, 22 bp, Artificial Sequence
  chemically synthesized
tctctctcatatatatatatat

SEQ ID NO: 64280 - DNA, 22 bp, Artificial Sequence
  chemically synthesized
tctctcatatatatatatatat

SEQ ID NO: 64281 - DNA, 22 bp, Artificial Sequence
  chemically synthesized
tctcatatatatatatatataa

SEQ ID NO: 64282 - DNA, 22 bp, Artificial Sequence
  chemically synthesized
tcatatatatatatatataatc

SEQ ID NO: 64283 - DNA, 22 bp, Artificial Sequence
  chemically synthesized
atatatatatatatataatctc

SEQ ID NO: 64284 - DNA, 22 bp, Artificial Sequence
  chemically synthesized
ctattagttctgtccctctaga

SEQ ID NO: 64285 - DNA, 22 bp, Artificial Sequence
  chemically synthesized
ttagttctgtccctctagagaa

SEQ ID NO: 64286 - DNA, 22 bp, Artificial Sequence
  chemically synthesized
gttctgtccctctagagaaccc

SEQ ID NO: 64287 - DNA, 22 bp, Artificial Sequence
  chemically synthesized
tgtccctctagagaaccccgac

SEQ ID NO: 64288 - DNA, 22 bp, Artificial Sequence
  chemically synthesized
tccctctagagaaccccgacta

SEQ ID NO: 64289 - DNA, 22 bp, Artificial Sequence
  chemically synthesized
tagagaaccccgactaatacag

SEQ ID NO: 64290 - DNA, 22 bp, Artificial Sequence
  chemically synthesized
gagaaccccgactaatacagat

SEQ ID NO: 64291 - DNA, 22 bp, Artificial Sequence
  chemically synthesized
atacagattttcataccagaag

SEQ ID NO: 64292 - DNA, 22 bp, Artificial Sequence
  chemically synthesized
tcataccagaagtggttcttga

SEQ ID NO: 64293 - DNA, 22 bp, Artificial Sequence
  chemically synthesized
cataccagaagtggttcttgag

SEQ ID NO: 64294 - DNA, 22 bp, Artificial Sequence
  chemically synthesized
ataccagaagtggttcttgagg

SEQ ID NO: 64295 - DNA, 22 bp, Artificial Sequence
  chemically synthesized
ttgaggaacagaatattaagga

SEQ ID NO: 64296 - DNA, 22 bp, Artificial Sequence
  chemically synthesized
gaggaacagaatattaaggatg

SEQ ID NO: 64297 - DNA, 22 bp, Artificial Sequence
  chemically synthesized
aggaacagaatattaaggatgg

SEQ ID NO: 64298 - DNA, 22 bp, Artificial Sequence
  chemically synthesized
aggatggaattctttcattggt

SEQ ID NO: 64299 - DNA, 22 bp, Artificial Sequence
  chemically synthesized
tttcattggttttgggacttct

SEQ ID NO: 64300 - DNA, 22 bp, Artificial Sequence
  chemically synthesized
tcattggttttgggacttctgg

SEQ ID NO: 64301 - DNA, 22 bp, Artificial Sequence
  chemically synthesized
cattggttttgggacttctggt

SEQ ID NO: 64302 - DNA, 22 bp, Artificial Sequence
  chemically synthesized
attggttttgggacttctggtg

SEQ ID NO: 64303 - DNA, 22 bp, Artificial Sequence
  chemically synthesized
gttttgggacttctggtgttgg

SEQ ID NO: 64304 - DNA, 22 bp, Artificial Sequence
  chemically synthesized
tgggacttctggtgttggctga

SEQ ID NO: 64305 - DNA, 22 bp, Artificial Sequence
  chemically synthesized
gggacttctggtgttggctgat

SEQ ID NO: 64306 - DNA, 22 bp, Artificial Sequence
  chemically synthesized
ggacttctggtgttggctgatt

SEQ ID NO: 64307 - DNA, 22 bp, Artificial Sequence
  chemically synthesized
ctggtgttggctgattaatatg

SEQ ID NO: 64308 - DNA, 22 bp, Artificial Sequence
  chemically synthesized
tggtgttggctgattaatatga

SEQ ID NO: 64309 - DNA, 22 bp, Artificial Sequence
  chemically synthesized
gtgttggctgattaatatgatt

SEQ ID NO: 64310 - DNA, 22 bp, Artificial Sequence
  chemically synthesized
gctgattaatatgattagacca

SEQ ID NO: 64311 - DNA, 22 bp, Artificial Sequence
  chemically synthesized
attaatatgattagaccaaaaa

SEQ ID NO: 64312 - DNA, 22 bp, Artificial Sequence
  chemically synthesized
atatgattagaccaaaaaatgc

SEQ ID NO: 64313 - DNA, 22 bp, Artificial Sequence
  chemically synthesized
gaccaaaaaatgctaaggactc

SEQ ID NO: 64314 - DNA, 22 bp, Artificial Sequence
  chemically synthesized
aggactctacttctaatagtat

SEQ ID NO: 64315 - DNA, 22 bp, Artificial Sequence
  chemically synthesized
tacttctaatagtatggagaac

SEQ ID NO: 64316 - DNA, 22 bp, Artificial Sequence
  chemically synthesized
cttctaatagtatggagaacac

SEQ ID NO: 64317 - DNA, 22 bp, Artificial Sequence
  chemically synthesized
ctaatagtatggagaacactga

SEQ ID NO: 64318 - DNA, 22 bp, Artificial Sequence
  chemically synthesized
taatagtatggagaacactgat

SEQ ID NO: 64319 - DNA, 22 bp, Artificial Sequence
  chemically synthesized
atagtatggagaacactgatag

SEQ ID NO: 64320 - DNA, 22 bp, Artificial Sequence
  chemically synthesized
atagtacttggcctgaattgtt

SEQ ID NO: 64321 - DNA, 22 bp, Artificial Sequence
  chemically synthesized
ggcctgaattgtttagagagtt

SEQ ID NO: 64322 - DNA, 22 bp, Artificial Sequence
  chemically synthesized
gcctgaattgtttagagagtta

SEQ ID NO: 64323 - DNA, 22 bp, Artificial Sequence
  chemically synthesized
aattgtttagagagttatgcaa

SEQ ID NO: 64324 - DNA, 22 bp, Artificial Sequence
  chemically synthesized
tttagagagttatgcaaaataa

SEQ ID NO: 64325 - DNA, 22 bp, Artificial Sequence
  chemically synthesized
agagagttatgcaaaataaatg

SEQ ID NO: 64326 - DNA, 22 bp, Artificial Sequence
  chemically synthesized
gagagttatgcaaaataaatgc

SEQ ID NO: 64327 - DNA, 22 bp, Artificial Sequence
  chemically synthesized
tgcaaaataaatgcatttgaca

SEQ ID NO: 64328 - DNA, 22 bp, Artificial Sequence
  chemically synthesized
gacactactgattcatcactta

SEQ ID NO: 64329 - DNA, 22 bp, Artificial Sequence
  chemically synthesized
acactactgattcatcacttat

SEQ ID NO: 64330 - DNA, 22 bp, Artificial Sequence
  chemically synthesized
ctgattcatcacttatgagagg

SEQ ID NO: 64331 - DNA, 22 bp, Artificial Sequence
  chemically synthesized
attcatcacttatgagaggcaa

SEQ ID NO: 64332 - DNA, 22 bp, Artificial Sequence
  chemically synthesized
atcacttatgagaggcaaggag

SEQ ID NO: 64333 - DNA, 22 bp, Artificial Sequence
  chemically synthesized
atgagaggcaaggagtttagtg

SEQ ID NO: 64334 - DNA, 22 bp, Artificial Sequence
  chemically synthesized
tgagaggcaaggagtttagtga

SEQ ID NO: 64335 - DNA, 22 bp, Artificial Sequence
  chemically synthesized
agtgactctatacataatacct

SEQ ID NO: 64336 - DNA, 22 bp, Artificial Sequence
  chemically synthesized
gtgactctatacataatacctt

SEQ ID NO: 64337 - DNA, 22 bp, Artificial Sequence
  chemically synthesized
tatacataatacctttgactat

SEQ ID NO: 64338 - DNA, 22 bp, Artificial Sequence
  chemically synthesized
tacataatacctttgactatat

SEQ ID NO: 64339 - DNA, 22 bp, Artificial Sequence
  chemically synthesized
tgactatatgtggagaaccaag

SEQ ID NO: 64340 - DNA, 22 bp, Artificial Sequence
  chemically synthesized
gactatatgtggagaaccaagg

SEQ ID NO: 64341 - DNA, 22 bp, Artificial Sequence
  chemically synthesized
actatatgtggagaaccaagga

SEQ ID NO: 64342 - DNA, 22 bp, Artificial Sequence
  chemically synthesized
tatgtggagaaccaaggaacat

SEQ ID NO: 64343 - DNA, 22 bp, Artificial Sequence
  chemically synthesized
gttgattgctcctaagttctct

SEQ ID NO: 64344 - DNA, 22 bp, Artificial Sequence
  chemically synthesized
attgctcctaagttctctggag

SEQ ID NO: 64345 - DNA, 22 bp, Artificial Sequence
  chemically synthesized
ctcctaagttctctggagaaag

SEQ ID NO: 64346 - DNA, 22 bp, Artificial Sequence
  chemically synthesized
ctaagttctctggagaaagaga

SEQ ID NO: 64347 - DNA, 22 bp, Artificial Sequence
  chemically synthesized
agttctctggagaaagagatga

SEQ ID NO: 64348 - DNA, 22 bp, Artificial Sequence
  chemically synthesized
tctggagaaagagatgaaagaa

SEQ ID NO: 64349 - DNA, 22 bp, Artificial Sequence
  chemically synthesized
tggagaaagagatgaaagaaaa

SEQ ID NO: 64350 - DNA, 22 bp, Artificial Sequence
  chemically synthesized
gagaaagagatgaaagaaaatg

SEQ ID NO: 64351 - DNA, 22 bp, Artificial Sequence
  chemically synthesized
aggggatctgtctcccaccttc

SEQ ID NO: 64352 - DNA, 22 bp, Artificial Sequence
  chemically synthesized
tctcccaccttcagaagcagat

SEQ ID NO: 64353 - DNA, 22 bp, Artificial Sequence
  chemically synthesized
ccaccttcagaagcagatactg

SEQ ID NO: 64354 - DNA, 22 bp, Artificial Sequence
  chemically synthesized
cagaagcagatactgagccaca

SEQ ID NO: 64355 - DNA, 22 bp, Artificial Sequence
  chemically synthesized
agaagcagatactgagccacaa

SEQ ID NO: 64356 - DNA, 22 bp, Artificial Sequence
  chemically synthesized
agccacaaatctgctaagattg

SEQ ID NO: 64357 - DNA, 22 bp, Artificial Sequence
  chemically synthesized
ctaagattgccctgaatgagag

SEQ ID NO: 64358 - DNA, 22 bp, Artificial Sequence
  chemically synthesized
agattgccctgaatgagagttt

SEQ ID NO: 64359 - DNA, 22 bp, Artificial Sequence
  chemically synthesized
ccctgaatgagagttttaactc

SEQ ID NO: 64360 - DNA, 22 bp, Artificial Sequence
  chemically synthesized
aatgagagttttaactcctgta

SEQ ID NO: 64361 - DNA, 22 bp, Artificial Sequence
  chemically synthesized
taactcctgtagagaaagagtt

SEQ ID NO: 64362 - DNA, 22 bp, Artificial Sequence
  chemically synthesized
aactcctgtagagaaagagttg

SEQ ID NO: 64363 - DNA, 22 bp, Artificial Sequence
  chemically synthesized
actcctgtagagaaagagttga

SEQ ID NO: 64364 - DNA, 22 bp, Artificial Sequence
  chemically synthesized
ctgtagagaaagagttgaaatt

SEQ ID NO: 64365 - DNA, 22 bp, Artificial Sequence
  chemically synthesized
tagagaaagagttgaaattgtg

SEQ ID NO: 64366 - DNA, 22 bp, Artificial Sequence
  chemically synthesized
aaattgtgaaaaaacagagaca

SEQ ID NO: 64367 - DNA, 22 bp, Artificial Sequence
  chemically synthesized
tgaaaaaacagagacaagctgt

SEQ ID NO: 64368 - DNA, 22 bp, Artificial Sequence
  chemically synthesized
ttatcatgcgagtagctgatct

SEQ ID NO: 64369 - DNA, 22 bp, Artificial Sequence
  chemically synthesized
tcatgcgagtagctgatctgca

SEQ ID NO: 64370 - DNA, 22 bp, Artificial Sequence
  chemically synthesized
atctgcaacaagaggtgcatgc

SEQ ID NO: 64371 - DNA, 22 bp, Artificial Sequence
  chemically synthesized
caacaagaggtgcatgcacagc

SEQ ID NO: 64372 - DNA, 22 bp, Artificial Sequence
  chemically synthesized
gccaggtgtttactgttaaagt

SEQ ID NO: 64373 - DNA, 22 bp, Artificial Sequence
  chemically synthesized
ccaggtgtttactgttaaagtg

SEQ ID NO: 64374 - DNA, 22 bp, Artificial Sequence
  chemically synthesized
actgttaaagtgagggcattga

SEQ ID NO: 64375 - DNA, 22 bp, Artificial Sequence
  chemically synthesized
ctgttaaagtgagggcattgac

SEQ ID NO: 64376 - DNA, 22 bp, Artificial Sequence
  chemically synthesized
ttaaagtgagggcattgactgg

SEQ ID NO: 64377 - DNA, 22 bp, Artificial Sequence
  chemically synthesized
aagtgagggcattgactggaaa

SEQ ID NO: 64378 - DNA, 22 bp, Artificial Sequence
  chemically synthesized
actggaaaaaaatgggaccctg

SEQ ID NO: 64379 - DNA, 22 bp, Artificial Sequence
  chemically synthesized
gaaaaaaatgggaccctggaac

SEQ ID NO: 64380 - DNA, 22 bp, Artificial Sequence
  chemically synthesized
gaacttggagtggggatgtgtg

SEQ ID NO: 64381 - DNA, 22 bp, Artificial Sequence
  chemically synthesized
ggagtggggatgtgtgggagaa

SEQ ID NO: 64382 - DNA, 22 bp, Artificial Sequence
  chemically synthesized
gagtggggatgtgtgggagaac

SEQ ID NO: 64383 - DNA, 22 bp, Artificial Sequence
  chemically synthesized
atgaagctgaggacactgagtt

SEQ ID NO: 64384 - DNA, 22 bp, Artificial Sequence
  chemically synthesized
aggacactgagtttgtgaactc

SEQ ID NO: 64385 - DNA, 22 bp, Artificial Sequence
  chemically synthesized
agtttgtgaactctgatgaaac

SEQ ID NO: 64386 - DNA, 22 bp, Artificial Sequence
  chemically synthesized
gtgaactctgatgaaacttttt

SEQ ID NO: 64387 - DNA, 22 bp, Artificial Sequence
  chemically synthesized
tgaactctgatgaaactttttt

SEQ ID NO: 64388 - DNA, 22 bp, Artificial Sequence
  chemically synthesized
tgatgaaacttttttgccagaa

SEQ ID NO: 64389 - DNA, 22 bp, Artificial Sequence
  chemically synthesized
atgaaacttttttgccagaaga

SEQ ID NO: 64390 - DNA, 22 bp, Artificial Sequence
  chemically synthesized
ttttgccagaagaaacagtttc

SEQ ID NO: 64391 - DNA, 22 bp, Artificial Sequence
  chemically synthesized
tttgccagaagaaacagtttcc

SEQ ID NO: 64392 - DNA, 22 bp, Artificial Sequence
  chemically synthesized
ttgccagaagaaacagtttccc

SEQ ID NO: 64393 - DNA, 22 bp, Artificial Sequence
  chemically synthesized
tgccagaagaaacagtttcccc

SEQ ID NO: 64394 - DNA, 22 bp, Artificial Sequence
  chemically synthesized
gccagaagaaacagtttcccca

SEQ ID NO: 64395 - DNA, 22 bp, Artificial Sequence
  chemically synthesized
ccagaagaaacagtttccccat

SEQ ID NO: 64396 - DNA, 22 bp, Artificial Sequence
  chemically synthesized
ccccatccccagtagtggtaac

SEQ ID NO: 64397 - DNA, 22 bp, Artificial Sequence
  chemically synthesized
cccatccccagtagtggtaaca

SEQ ID NO: 64398 - DNA, 22 bp, Artificial Sequence
  chemically synthesized
cctgacccgtgctgccattagc

SEQ ID NO: 64399 - DNA, 22 bp, Artificial Sequence
  chemically synthesized
acccgtgctgccattagccttt

SEQ ID NO: 64400 - DNA, 22 bp, Artificial Sequence
  chemically synthesized
ccattagcctttccacctttgt

SEQ ID NO: 64401 - DNA, 22 bp, Artificial Sequence
  chemically synthesized
gcctttccacctttgtctgagg

SEQ ID NO: 64402 - DNA, 22 bp, Artificial Sequence
  chemically synthesized
tccacctttgtctgaggatgta

SEQ ID NO: 64403 - DNA, 22 bp, Artificial Sequence
  chemically synthesized
ccacctttgtctgaggatgtaa

SEQ ID NO: 64404 - DNA, 22 bp, Artificial Sequence
  chemically synthesized
cacctttgtctgaggatgtaaa

SEQ ID NO: 64405 - DNA, 22 bp, Artificial Sequence
  chemically synthesized
tgtctgaggatgtaaaccctgc

SEQ ID NO: 64406 - DNA, 22 bp, Artificial Sequence
  chemically synthesized
gtctgaggatgtaaaccctgca

SEQ ID NO: 64407 - DNA, 22 bp, Artificial Sequence
  chemically synthesized
tctgaggatgtaaaccctgcac

SEQ ID NO: 64408 - DNA, 22 bp, Artificial Sequence
  chemically synthesized
aggatgtaaaccctgcactgct

SEQ ID NO: 64409 - DNA, 22 bp, Artificial Sequence
  chemically synthesized
cactgcttgaggcaacagtgat

SEQ ID NO: 64410 - DNA, 22 bp, Artificial Sequence
  chemically synthesized
cttgaggcaacagtgatggcct

SEQ ID NO: 64411 - DNA, 22 bp, Artificial Sequence
  chemically synthesized
gaggcaacagtgatggccttcc

SEQ ID NO: 64412 - DNA, 22 bp, Artificial Sequence
  chemically synthesized
aggcaacagtgatggccttccc

SEQ ID NO: 64413 - DNA, 22 bp, Artificial Sequence
  chemically synthesized
ccctgaggcagctgccaggcaa

SEQ ID NO: 64414 - DNA, 22 bp, Artificial Sequence
  chemically synthesized
cctgaggcagctgccaggcaag

SEQ ID NO: 64415 - DNA, 22 bp, Artificial Sequence
  chemically synthesized
aggcagctgccaggcaagataa

SEQ ID NO: 64416 - DNA, 22 bp, Artificial Sequence
  chemically synthesized
ccaggcaagataatgttgattc

SEQ ID NO: 64417 - DNA, 22 bp, Artificial Sequence
  chemically synthesized
attctcctcaagaggcacccct

SEQ ID NO: 64418 - DNA, 22 bp, Artificial Sequence
  chemically synthesized
tcctcaagaggcacccctaatg

SEQ ID NO: 64419 - DNA, 22 bp, Artificial Sequence
  chemically synthesized
ctcaagaggcacccctaatgcc

SEQ ID NO: 64420 - DNA, 22 bp, Artificial Sequence
  chemically synthesized
aagaggcacccctaatgcccct

SEQ ID NO: 64421 - DNA, 22 bp, Artificial Sequence
  chemically synthesized
atgcccctgaatgcttctagac

SEQ ID NO: 64422 - DNA, 22 bp, Artificial Sequence
  chemically synthesized
aatgcttctagacctataacta

SEQ ID NO: 64423 - DNA, 22 bp, Artificial Sequence
  chemically synthesized
ctagacctataactaggctaaa

SEQ ID NO: 64424 - DNA, 22 bp, Artificial Sequence
  chemically synthesized
tagacctataactaggctaaat

SEQ ID NO: 64425 - DNA, 22 bp, Artificial Sequence
  chemically synthesized
gacctataactaggctaaattc

SEQ ID NO: 64426 - DNA, 22 bp, Artificial Sequence
  chemically synthesized
taactaggctaaattccttgcg

SEQ ID NO: 64427 - DNA, 22 bp, Artificial Sequence
  chemically synthesized
ggctaaattccttgcgggcccc

SEQ ID NO: 64428 - DNA, 22 bp, Artificial Sequence
  chemically synthesized
aattccttgcgggccccagagg

SEQ ID NO: 64429 - DNA, 22 bp, Artificial Sequence
  chemically synthesized
cttgcgggccccagaggtgagg

SEQ ID NO: 64430 - DNA, 22 bp, Artificial Sequence
  chemically synthesized
gcgggccccagaggtgaggttc

SEQ ID NO: 64431 - DNA, 22 bp, Artificial Sequence
  chemically synthesized
cgggccccagaggtgaggttca

SEQ ID NO: 64432 - DNA, 22 bp, Artificial Sequence
  chemically synthesized
agagtgtgacccatgaggaggt

SEQ ID NO: 64433 - DNA, 22 bp, Artificial Sequence
  chemically synthesized
tactctaaaagaactgcttaag

SEQ ID NO: 64434 - DNA, 22 bp, Artificial Sequence
  chemically synthesized
taaaagaactgcttaagctttc

SEQ ID NO: 64435 - DNA, 22 bp, Artificial Sequence
  chemically synthesized
aaagaactgcttaagctttcta

SEQ ID NO: 64436 - DNA, 22 bp, Artificial Sequence
  chemically synthesized
cttaagctttctaatttatatt

SEQ ID NO: 64437 - DNA, 22 bp, Artificial Sequence
  chemically synthesized
aagctttctaatttatattggc

SEQ ID NO: 64438 - DNA, 22 bp, Artificial Sequence
  chemically synthesized
agctttctaatttatattggca

SEQ ID NO: 64439 - DNA, 22 bp, Artificial Sequence
  chemically synthesized
tctaatttatattggcagaaat

SEQ ID NO: 64440 - DNA, 22 bp, Artificial Sequence
  chemically synthesized
ctaatttatattggcagaaatc

SEQ ID NO: 64441 - DNA, 22 bp, Artificial Sequence
  chemically synthesized
taatttatattggcagaaatct

SEQ ID NO: 64442 - DNA, 22 bp, Artificial Sequence
  chemically synthesized
atttatattggcagaaatctgg

SEQ ID NO: 64443 - DNA, 22 bp, Artificial Sequence
  chemically synthesized
atattggcagaaatctggagaa

SEQ ID NO: 64444 - DNA, 22 bp, Artificial Sequence
  chemically synthesized
tattggcagaaatctggagaac

SEQ ID NO: 64445 - DNA, 22 bp, Artificial Sequence
  chemically synthesized
gcagaaatctggagaacaggca

SEQ ID NO: 64446 - DNA, 22 bp, Artificial Sequence
  chemically synthesized
gagaacaggcatgggaatggat

SEQ ID NO: 64447 - DNA, 22 bp, Artificial Sequence
  chemically synthesized
agggtaagggataatggtggaa

SEQ ID NO: 64448 - DNA, 22 bp, Artificial Sequence
  chemically synthesized
gatcaagctgaatttattggtt

SEQ ID NO: 64449 - DNA, 22 bp, Artificial Sequence
  chemically synthesized
aatttattggtttggccctact

SEQ ID NO: 64450 - DNA, 22 bp, Artificial Sequence
  chemically synthesized
attggtttggccctactaagta

SEQ ID NO: 64451 - DNA, 22 bp, Artificial Sequence
  chemically synthesized
ttggtttggccctactaagtag

SEQ ID NO: 64452 - DNA, 22 bp, Artificial Sequence
  chemically synthesized
gtttggccctactaagtaggga

SEQ ID NO: 64453 - DNA, 22 bp, Artificial Sequence
  chemically synthesized
ggccctactaagtagggattct

SEQ ID NO: 64454 - DNA, 22 bp, Artificial Sequence
  chemically synthesized
gccctactaagtagggattctg

SEQ ID NO: 64455 - DNA, 22 bp, Artificial Sequence
  chemically synthesized
ctaagtagggattctgcattta

SEQ ID NO: 64456 - DNA, 22 bp, Artificial Sequence
  chemically synthesized
agtagggattctgcatttaatg

SEQ ID NO: 64457 - DNA, 22 bp, Artificial Sequence
  chemically synthesized
tgcatttaatgttgcagctcgg

SEQ ID NO: 64458 - DNA, 22 bp, Artificial Sequence
  chemically synthesized
catttaatgttgcagctcgggg

SEQ ID NO: 64459 - DNA, 22 bp, Artificial Sequence
  chemically synthesized
aatgttgcagctcggggactta

SEQ ID NO: 64460 - DNA, 22 bp, Artificial Sequence
  chemically synthesized
atgttgcagctcggggacttag

SEQ ID NO: 64461 - DNA, 22 bp, Artificial Sequence
  chemically synthesized
cagctcggggacttagaaaagg

SEQ ID NO: 64462 - DNA, 22 bp, Artificial Sequence
  chemically synthesized
ggggacttagaaaaggttctga

SEQ ID NO: 64463 - DNA, 22 bp, Artificial Sequence
  chemically synthesized
agaaaaggttctgatagggccg

SEQ ID NO: 64464 - DNA, 22 bp, Artificial Sequence
  chemically synthesized
gaaaaggttctgatagggccgg

SEQ ID NO: 64465 - DNA, 22 bp, Artificial Sequence
  chemically synthesized
tgatagggccgggagcagtggc

SEQ ID NO: 64466 - DNA, 22 bp, Artificial Sequence
  chemically synthesized
atagggccgggagcagtggctc

SEQ ID NO: 64467 - DNA, 22 bp, Artificial Sequence
  chemically synthesized
acgcctgtaatcccagcacctt

SEQ ID NO: 64468 - DNA, 22 bp, Artificial Sequence
  chemically synthesized
taatcccagcaccttgggaggc

SEQ ID NO: 64469 - DNA, 22 bp, Artificial Sequence
  chemically synthesized
gggaggcgggggcgggcagatc

SEQ ID NO: 64470 - DNA, 22 bp, Artificial Sequence
  chemically synthesized
ggaggcgggggcgggcagatca

SEQ ID NO: 64471 - DNA, 22 bp, Artificial Sequence
  chemically synthesized
agacaattctggctaaaatggt

SEQ ID NO: 64472 - DNA, 22 bp, Artificial Sequence
  chemically synthesized
tggctaaaatggtgaaacccca

SEQ ID NO: 64473 - DNA, 22 bp, Artificial Sequence
  chemically synthesized
gctaaaatggtgaaaccccatc

SEQ ID NO: 64474 - DNA, 22 bp, Artificial Sequence
  chemically synthesized
aaatggtgaaaccccatctctg

SEQ ID NO: 64475 - DNA, 22 bp, Artificial Sequence
  chemically synthesized
tgctaaaaatacaaaaattagc

SEQ ID NO: 64476 - DNA, 22 bp, Artificial Sequence
  chemically synthesized
ctaaaaatacaaaaattagctg

SEQ ID NO: 64477 - DNA, 22 bp, Artificial Sequence
  chemically synthesized
aaaatacaaaaattagctgggc

SEQ ID NO: 64478 - DNA, 22 bp, Artificial Sequence
  chemically synthesized
gctgggcatggtgatgcgtaac

SEQ ID NO: 64479 - DNA, 22 bp, Artificial Sequence
  chemically synthesized
ggcatggtgatgcgtaactgta

SEQ ID NO: 64480 - DNA, 22 bp, Artificial Sequence
  chemically synthesized
taatctcatctacttgggaggc

SEQ ID NO: 64481 - DNA, 22 bp, Artificial Sequence
  chemically synthesized
atctacttgggaggctgaggca

SEQ ID NO: 64482 - DNA, 22 bp, Artificial Sequence
  chemically synthesized
cttgggaggctgaggcaagaga

SEQ ID NO: 64483 - DNA, 22 bp, Artificial Sequence
  chemically synthesized
gggaggctgaggcaagagaact

SEQ ID NO: 64484 - DNA, 22 bp, Artificial Sequence
  chemically synthesized
ggaggctgaggcaagagaactg

SEQ ID NO: 64485 - DNA, 22 bp, Artificial Sequence
  chemically synthesized
aggcaagagaactgcttgaacc

SEQ ID NO: 64486 - DNA, 22 bp, Artificial Sequence
  chemically synthesized
cttgaacctgtgaggcagagat

SEQ ID NO: 64487 - DNA, 22 bp, Artificial Sequence
  chemically synthesized
gaacctgtgaggcagagattgc

SEQ ID NO: 64488 - DNA, 22 bp, Artificial Sequence
  chemically synthesized
aacctgtgaggcagagattgca

SEQ ID NO: 64489 - DNA, 22 bp, Artificial Sequence
  chemically synthesized
tgaggcagagattgcagtgagc

SEQ ID NO: 64490 - DNA, 22 bp, Artificial Sequence
  chemically synthesized
cagtgagccaagatcgccccac

SEQ ID NO: 64491 - DNA, 22 bp, Artificial Sequence
  chemically synthesized
cattccagcctggtaacagagc

SEQ ID NO: 64492 - DNA, 22 bp, Artificial Sequence
  chemically synthesized
cagcctggtaacagagcaagac

SEQ ID NO: 64493 - DNA, 22 bp, Artificial Sequence
  chemically synthesized
gtaacagagcaagactccattt

SEQ ID NO: 64494 - DNA, 22 bp, Artificial Sequence
  chemically synthesized
catttccaaaaaaaaaaaaaaa

SEQ ID NO: 64495 - DNA, 22 bp, Artificial Sequence
  chemically synthesized
ccaaaaaaaaaaaaaaaaaagt

SEQ ID NO: 64496 - DNA, 22 bp, Artificial Sequence
  chemically synthesized
caaaaaaaaaaaaaaaaaagtt

SEQ ID NO: 64497 - DNA, 22 bp, Artificial Sequence
  chemically synthesized
taatagtttatttgcttggtta

SEQ ID NO: 64498 - DNA, 22 bp, Artificial Sequence
  chemically synthesized
atttgcttggttagctgaaata

SEQ ID NO: 64499 - DNA, 22 bp, Artificial Sequence
  chemically synthesized
tttgcttggttagctgaaatat

SEQ ID NO: 64500 - DNA, 22 bp, Artificial Sequence
  chemically synthesized
gcttggttagctgaaatatgga

SEQ ID NO: 64501 - DNA, 22 bp, Artificial Sequence
  chemically synthesized
cttggttagctgaaatatggat

SEQ ID NO: 64502 - DNA, 22 bp, Artificial Sequence
  chemically synthesized
ggttagctgaaatatggattaa

SEQ ID NO: 64503 - DNA, 22 bp, Artificial Sequence
  chemically synthesized
gttagctgaaatatggattaaa

SEQ ID NO: 64504 - DNA, 22 bp, Artificial Sequence
  chemically synthesized
gctgaaatatggattaaaagat

SEQ ID NO: 64505 - DNA, 22 bp, Artificial Sequence
  chemically synthesized
aaatatggattaaaagatggtc

SEQ ID NO: 64506 - DNA, 22 bp, Artificial Sequence
  chemically synthesized
aaagatggtccaatgttagtga

SEQ ID NO: 64507 - DNA, 22 bp, Artificial Sequence
  chemically synthesized
gtgagctggaaatgccttggtt

SEQ ID NO: 64508 - DNA, 22 bp, Artificial Sequence
  chemically synthesized
gaaatgccttggtttaatgtag

SEQ ID NO: 64509 - DNA, 22 bp, Artificial Sequence
  chemically synthesized
ggtttaatgtagaggaagtgat

SEQ ID NO: 64510 - DNA, 22 bp, Artificial Sequence
  chemically synthesized
gtttaatgtagaggaagtgatc

SEQ ID NO: 64511 - DNA, 22 bp, Artificial Sequence
  chemically synthesized
aatgtagaggaagtgatccaaa

SEQ ID NO: 64512 - DNA, 22 bp, Artificial Sequence
  chemically synthesized
atgtagaggaagtgatccaaag

SEQ ID NO: 64513 - DNA, 22 bp, Artificial Sequence
  chemically synthesized
agggagattaggatggtggagt

SEQ ID NO: 64514 - DNA, 22 bp, Artificial Sequence
  chemically synthesized
gggagattaggatggtggagtg

SEQ ID NO: 64515 - DNA, 22 bp, Artificial Sequence
  chemically synthesized
ggatggtggagtggattagtca

SEQ ID NO: 64516 - DNA, 22 bp, Artificial Sequence
  chemically synthesized
gtcactttagacctactcatcc

SEQ ID NO: 64517 - DNA, 22 bp, Artificial Sequence
  chemically synthesized
tagacctactcatcccagctgg

SEQ ID NO: 64518 - DNA, 22 bp, Artificial Sequence
  chemically synthesized
agacctactcatcccagctggg

SEQ ID NO: 64519 - DNA, 22 bp, Artificial Sequence
  chemically synthesized
gacctactcatcccagctggga

SEQ ID NO: 64520 - DNA, 22 bp, Artificial Sequence
  chemically synthesized
ctcatcccagctgggagggtcc

SEQ ID NO: 64521 - DNA, 22 bp, Artificial Sequence
  chemically synthesized
atcccagctgggagggtccaga

SEQ ID NO: 64522 - DNA, 22 bp, Artificial Sequence
  chemically synthesized
ggagggtccagaagatacaccc

SEQ ID NO: 64523 - DNA, 22 bp, Artificial Sequence
  chemically synthesized
ggccgaagctttgtgaaataga

SEQ ID NO: 64524 - DNA, 22 bp, Artificial Sequence
  chemically synthesized
gccgaagctttgtgaaatagat

SEQ ID NO: 64525 - DNA, 22 bp, Artificial Sequence
  chemically synthesized
tgtgaaatagatttgtgagagc

SEQ ID NO: 64526 - DNA, 22 bp, Artificial Sequence
  chemically synthesized
gtgaaatagatttgtgagagca

SEQ ID NO: 64527 - DNA, 22 bp, Artificial Sequence
  chemically synthesized
tgaaatagatttgtgagagcag

SEQ ID NO: 64528 - DNA, 22 bp, Artificial Sequence
  chemically synthesized
gtgagagcagcacctgtatttt

SEQ ID NO: 64529 - DNA, 22 bp, Artificial Sequence
  chemically synthesized
tgagagcagcacctgtattttt

SEQ ID NO: 64530 - DNA, 22 bp, Artificial Sequence
  chemically synthesized
tatttttgaagagcccgtaatt

SEQ ID NO: 64531 - DNA, 22 bp, Artificial Sequence
  chemically synthesized
ttgaagagcccgtaattgctct

SEQ ID NO: 64532 - DNA, 22 bp, Artificial Sequence
  chemically synthesized
tgaagagcccgtaattgctctt

SEQ ID NO: 64533 - DNA, 22 bp, Artificial Sequence
  chemically synthesized
gaagagcccgtaattgctcttc

SEQ ID NO: 64534 - DNA, 22 bp, Artificial Sequence
  chemically synthesized
aagagcccgtaattgctcttct

SEQ ID NO: 64535 - DNA, 22 bp, Artificial Sequence
  chemically synthesized
ctcttctctgtatgtcagatct

SEQ ID NO: 64536 - DNA, 22 bp, Artificial Sequence
  chemically synthesized
ttctctgtatgtcagatctaac

SEQ ID NO: 64537 - DNA, 22 bp, Artificial Sequence
  chemically synthesized
ctctgtatgtcagatctaacag

SEQ ID NO: 64538 - DNA, 22 bp, Artificial Sequence
  chemically synthesized
tctgtatgtcagatctaacagt

SEQ ID NO: 64539 - DNA, 22 bp, Artificial Sequence
  chemically synthesized
tgtatgtcagatctaacagtag

SEQ ID NO: 64540 - DNA, 22 bp, Artificial Sequence
  chemically synthesized
tatgtcagatctaacagtagga

SEQ ID NO: 64541 - DNA, 22 bp, Artificial Sequence
  chemically synthesized
acagtaggaaccacagtcactc

SEQ ID NO: 64542 - DNA, 22 bp, Artificial Sequence
  chemically synthesized
aactacaaaatttaaatacaat

SEQ ID NO: 64543 - DNA, 22 bp, Artificial Sequence
  chemically synthesized
caaaatttaaatacaatgggaa

SEQ ID NO: 64544 - DNA, 22 bp, Artificial Sequence
  chemically synthesized
aaatacaatgggaataattgga

SEQ ID NO: 64545 - DNA, 22 bp, Artificial Sequence
  chemically synthesized
aatacaatgggaataattggat

SEQ ID NO: 64546 - DNA, 22 bp, Artificial Sequence
  chemically synthesized
gatcctgaggtggcaggggcca

SEQ ID NO: 64547 - DNA, 22 bp, Artificial Sequence
  chemically synthesized
aggtggcaggggccaagtgttg

SEQ ID NO: 64548 - DNA, 22 bp, Artificial Sequence
  chemically synthesized
gcactgaaccatcaaaggcaag

SEQ ID NO: 64549 - DNA, 22 bp, Artificial Sequence
  chemically synthesized
aaccatcaaaggcaaggtgggc

SEQ ID NO: 64550 - DNA, 22 bp, Artificial Sequence
  chemically synthesized
ccataatagacagcagaggcaa

SEQ ID NO: 64551 - DNA, 22 bp, Artificial Sequence
  chemically synthesized
actcatgtagagctctggcatt

SEQ ID NO: 64552 - DNA, 22 bp, Artificial Sequence
  chemically synthesized
atgtagagctctggcattggct

SEQ ID NO: 64553 - DNA, 22 bp, Artificial Sequence
  chemically synthesized
tggcattggctaattaatcatg

SEQ ID NO: 64554 - DNA, 22 bp, Artificial Sequence
  chemically synthesized
gcattggctaattaatcatggt

SEQ ID NO: 64555 - DNA, 22 bp, Artificial Sequence
  chemically synthesized
gctaattaatcatggtgttcct

SEQ ID NO: 64556 - DNA, 22 bp, Artificial Sequence
  chemically synthesized
attaatcatggtgttcctagaa

SEQ ID NO: 64557 - DNA, 22 bp, Artificial Sequence
  chemically synthesized
atcatggtgttcctagaagtga

SEQ ID NO: 64558 - DNA, 22 bp, Artificial Sequence
  chemically synthesized
ctagaagtgaaattgatgggaa

SEQ ID NO: 64559 - DNA, 22 bp, Artificial Sequence
  chemically synthesized
gaagtgaaattgatgggaaacc

SEQ ID NO: 64560 - DNA, 22 bp, Artificial Sequence
  chemically synthesized
atgggaaacctactgtattcct

SEQ ID NO: 64561 - DNA, 22 bp, Artificial Sequence
  chemically synthesized
ctgtattcctacttgatttata

SEQ ID NO: 64562 - DNA, 22 bp, Artificial Sequence
  chemically synthesized
tattcctacttgatttatataa

SEQ ID NO: 64563 - DNA, 22 bp, Artificial Sequence
  chemically synthesized
ctacttgatttatataaacaaa

SEQ ID NO: 64564 - DNA, 22 bp, Artificial Sequence
  chemically synthesized
cttgatttatataaacaaaaaa

SEQ ID NO: 64565 - DNA, 22 bp, Artificial Sequence
  chemically synthesized
gatttatataaacaaaaaactg

SEQ ID NO: 64566 - DNA, 22 bp, Artificial Sequence
  chemically synthesized
atttatataaacaaaaaactgc

SEQ ID NO: 64567 - DNA, 22 bp, Artificial Sequence
  chemically synthesized
atataaacaaaaaactgccagg

SEQ ID NO: 64568 - DNA, 22 bp, Artificial Sequence
  chemically synthesized
tataaacaaaaaactgccaggt

SEQ ID NO: 64569 - DNA, 22 bp, Artificial Sequence
  chemically synthesized
ccaggtagaatggactaaagac

SEQ ID NO: 64570 - DNA, 22 bp, Artificial Sequence
  chemically synthesized
aagactaatctgaattataaaa

SEQ ID NO: 64571 - DNA, 22 bp, Artificial Sequence
  chemically synthesized
atctgaattataaaaacagaga

SEQ ID NO: 64572 - DNA, 22 bp, Artificial Sequence
  chemically synthesized
aattataaaaacagagaatcat

SEQ ID NO: 64573 - DNA, 22 bp, Artificial Sequence
  chemically synthesized
taaaaacagagaatcatgggcc

SEQ ID NO: 64574 - DNA, 22 bp, Artificial Sequence
  chemically synthesized
aatcaatttccagactcgaacc

SEQ ID NO: 64575 - DNA, 22 bp, Artificial Sequence
  chemically synthesized
ccagactcgaacctgttacagt

SEQ ID NO: 64576 - DNA, 22 bp, Artificial Sequence
  chemically synthesized
cagactcgaacctgttacagtt

SEQ ID NO: 64577 - DNA, 22 bp, Artificial Sequence
  chemically synthesized
gaacctgttacagttccagaac

SEQ ID NO: 64578 - DNA, 22 bp, Artificial Sequence
  chemically synthesized
ttacagttccagaacccactga

SEQ ID NO: 64579 - DNA, 22 bp, Artificial Sequence
  chemically synthesized
cagttccagaacccactgaatg

SEQ ID NO: 64580 - DNA, 22 bp, Artificial Sequence
  chemically synthesized
cagaacccactgaatgaagggg

SEQ ID NO: 64581 - DNA, 22 bp, Artificial Sequence
  chemically synthesized
aatgaaggggaggctggatccc

SEQ ID NO: 64582 - DNA, 22 bp, Artificial Sequence
  chemically synthesized
gatccccttgaggaaggacacc

SEQ ID NO: 64583 - DNA, 22 bp, Artificial Sequence
  chemically synthesized
gaggaaggacaccactaggcta

SEQ ID NO: 64584 - DNA, 22 bp, Artificial Sequence
  chemically synthesized
aggaaggacaccactaggctac

SEQ ID NO: 64585 - DNA, 22 bp, Artificial Sequence
  chemically synthesized
ggctactgacaacttatgctgt

SEQ ID NO: 64586 - DNA, 22 bp, Artificial Sequence
  chemically synthesized
ctgacaacttatgctgttactc

SEQ ID NO: 64587 - DNA, 22 bp, Artificial Sequence
  chemically synthesized
acaacttatgctgttactcttt

SEQ ID NO: 64588 - DNA, 22 bp, Artificial Sequence
  chemically synthesized
atgctgttactctttctcccat

SEQ ID NO: 64589 - DNA, 22 bp, Artificial Sequence
  chemically synthesized
tgctgttactctttctcccatc

SEQ ID NO: 64590 - DNA, 22 bp, Artificial Sequence
  chemically synthesized
ttactctttctcccatccttcc

SEQ ID NO: 64591 - DNA, 22 bp, Artificial Sequence
  chemically synthesized
ctctttctcccatccttcccta

SEQ ID NO: 64592 - DNA, 22 bp, Artificial Sequence
  chemically synthesized
tttctcccatccttccctaagg

SEQ ID NO: 64593 - DNA, 22 bp, Artificial Sequence
  chemically synthesized
tctcccatccttccctaaggag

SEQ ID NO: 64594 - DNA, 22 bp, Artificial Sequence
  chemically synthesized
ctcccatccttccctaaggaga

SEQ ID NO: 64595 - DNA, 22 bp, Artificial Sequence
  chemically synthesized
tcccatccttccctaaggagac

SEQ ID NO: 64596 - DNA, 22 bp, Artificial Sequence
  chemically synthesized
ccatccttccctaaggagacct

SEQ ID NO: 64597 - DNA, 22 bp, Artificial Sequence
  chemically synthesized
ccctaaggagacctctggcctt

SEQ ID NO: 64598 - DNA, 22 bp, Artificial Sequence
  chemically synthesized
cctaaggagacctctggccttt

SEQ ID NO: 64599 - DNA, 22 bp, Artificial Sequence
  chemically synthesized
aggagacctctggccttttacc

SEQ ID NO: 64600 - DNA, 22 bp, Artificial Sequence
  chemically synthesized
tggccttttaccagggtaactg

SEQ ID NO: 64601 - DNA, 22 bp, Artificial Sequence
  chemically synthesized
gccttttaccagggtaactgtg

SEQ ID NO: 64602 - DNA, 22 bp, Artificial Sequence
  chemically synthesized
ttaccagggtaactgtgtgtac

SEQ ID NO: 64603 - DNA, 22 bp, Artificial Sequence
  chemically synthesized
taccagggtaactgtgtgtact

SEQ ID NO: 64604 - DNA, 22 bp, Artificial Sequence
  chemically synthesized
accagggtaactgtgtgtactg

SEQ ID NO: 64605 - DNA, 22 bp, Artificial Sequence
  chemically synthesized
ccagggtaactgtgtgtactgg

SEQ ID NO: 64606 - DNA, 22 bp, Artificial Sequence
  chemically synthesized
tgtgtactggagaaagggaagt

SEQ ID NO: 64607 - DNA, 22 bp, Artificial Sequence
  chemically synthesized
gagaaagggaagtaatgagaca

SEQ ID NO: 64608 - DNA, 22 bp, Artificial Sequence
  chemically synthesized
cagaaagtactggacactggct

SEQ ID NO: 64609 - DNA, 22 bp, Artificial Sequence
  chemically synthesized
agaaagtactggacactggctc

SEQ ID NO: 64610 - DNA, 22 bp, Artificial Sequence
  chemically synthesized
gacactggctctgagctgacgt

SEQ ID NO: 64611 - DNA, 22 bp, Artificial Sequence
  chemically synthesized
gctctgagctgacgttgattcc

SEQ ID NO: 64612 - DNA, 22 bp, Artificial Sequence
  chemically synthesized
tgagctgacgttgattccaggg

SEQ ID NO: 64613 - DNA, 22 bp, Artificial Sequence
  chemically synthesized
agctgacgttgattccagggta

SEQ ID NO: 64614 - DNA, 22 bp, Artificial Sequence
  chemically synthesized
acgttgattccagggtacccaa

SEQ ID NO: 64615 - DNA, 22 bp, Artificial Sequence
  chemically synthesized
attccagggtacccaaaacgtt

SEQ ID NO: 64616 - DNA, 22 bp, Artificial Sequence
  chemically synthesized
cagggtacccaaaacgttattg

SEQ ID NO: 64617 - DNA, 22 bp, Artificial Sequence
  chemically synthesized
ttgtggttccccagttaaagta

SEQ ID NO: 64618 - DNA, 22 bp, Artificial Sequence
  chemically synthesized
tggttccccagttaaagtaggg

SEQ ID NO: 64619 - DNA, 22 bp, Artificial Sequence
  chemically synthesized
cccagttaaagtaggggcttat

SEQ ID NO: 64620 - DNA, 22 bp, Artificial Sequence
  chemically synthesized
aagtaggggcttatggaggtta

SEQ ID NO: 64621 - DNA, 22 bp, Artificial Sequence
  chemically synthesized
atggaggttaggtaattaatgg

SEQ ID NO: 64622 - DNA, 22 bp, Artificial Sequence
  chemically synthesized
tggaggttaggtaattaatgga

SEQ ID NO: 64623 - DNA, 22 bp, Artificial Sequence
  chemically synthesized
ggtaattaatggagttttagct

SEQ ID NO: 64624 - DNA, 22 bp, Artificial Sequence
  chemically synthesized
atggagttttagctcatttctg

SEQ ID NO: 64625 - DNA, 22 bp, Artificial Sequence
  chemically synthesized
tagctcatttctgacttacagt

SEQ ID NO: 64626 - DNA, 22 bp, Artificial Sequence
  chemically synthesized
agctcatttctgacttacagtg

SEQ ID NO: 64627 - DNA, 22 bp, Artificial Sequence
  chemically synthesized
gctcatttctgacttacagtgg

SEQ ID NO: 64628 - DNA, 22 bp, Artificial Sequence
  chemically synthesized
atttctgacttacagtggttcc

SEQ ID NO: 64629 - DNA, 22 bp, Artificial Sequence
  chemically synthesized
ctgacttacagtggttccagtg

SEQ ID NO: 64630 - DNA, 22 bp, Artificial Sequence
  chemically synthesized
tgacttacagtggttccagtgg

SEQ ID NO: 64631 - DNA, 22 bp, Artificial Sequence
  chemically synthesized
acttacagtggttccagtgggt

SEQ ID NO: 64632 - DNA, 22 bp, Artificial Sequence
  chemically synthesized
acagtggttccagtgggtccct

SEQ ID NO: 64633 - DNA, 22 bp, Artificial Sequence
  chemically synthesized
cagtggttccagtgggtccctg

SEQ ID NO: 64634 - DNA, 22 bp, Artificial Sequence
  chemically synthesized
cagtgggtccctggacttatcc

SEQ ID NO: 64635 - DNA, 22 bp, Artificial Sequence
  chemically synthesized
gacttatcctctggtcattttc

SEQ ID NO: 64636 - DNA, 22 bp, Artificial Sequence
  chemically synthesized
atcctctggtcattttcccagt

SEQ ID NO: 64637 - DNA, 22 bp, Artificial Sequence
  chemically synthesized
tcctctggtcattttcccagtg

SEQ ID NO: 64638 - DNA, 22 bp, Artificial Sequence
  chemically synthesized
tggtcattttcccagtgccaaa

SEQ ID NO: 64639 - DNA, 22 bp, Artificial Sequence
  chemically synthesized
gtcattttcccagtgccaaaat

SEQ ID NO: 64640 - DNA, 22 bp, Artificial Sequence
  chemically synthesized
tcccagtgccaaaatgcataat

SEQ ID NO: 64641 - DNA, 22 bp, Artificial Sequence
  chemically synthesized
cccagtgccaaaatgcataatt

SEQ ID NO: 64642 - DNA, 22 bp, Artificial Sequence
  chemically synthesized
ccagtgccaaaatgcataattt

SEQ ID NO: 64643 - DNA, 22 bp, Artificial Sequence
  chemically synthesized
gtatagacatacttattagctg

SEQ ID NO: 64644 - DNA, 22 bp, Artificial Sequence
  chemically synthesized
tatagacatacttattagctgg

SEQ ID NO: 64645 - DNA, 22 bp, Artificial Sequence
  chemically synthesized
attagctggcagaaatgccaca

SEQ ID NO: 64646 - DNA, 22 bp, Artificial Sequence
  chemically synthesized
ttagctggcagaaatgccacat

SEQ ID NO: 64647 - DNA, 22 bp, Artificial Sequence
  chemically synthesized
gctggcagaaatgccacattgg

SEQ ID NO: 64648 - DNA, 22 bp, Artificial Sequence
  chemically synthesized
gcagaaatgccacattggctcc

SEQ ID NO: 64649 - DNA, 22 bp, Artificial Sequence
  chemically synthesized
gctccctgactggtaggatgag

SEQ ID NO: 64650 - DNA, 22 bp, Artificial Sequence
  chemically synthesized
cctgactggtaggatgagggct

SEQ ID NO: 64651 - DNA, 22 bp, Artificial Sequence
  chemically synthesized
actggtaggatgagggctatta

SEQ ID NO: 64652 - DNA, 22 bp, Artificial Sequence
  chemically synthesized
gtaggatgagggctattatggt

SEQ ID NO: 64653 - DNA, 22 bp, Artificial Sequence
  chemically synthesized
ttatggtgggaaaggccaaaca

SEQ ID NO: 64654 - DNA, 22 bp, Artificial Sequence
  chemically synthesized
tggtgggaaaggccaaacagaa

SEQ ID NO: 64655 - DNA, 22 bp, Artificial Sequence
  chemically synthesized
gagctgtctctacctagaaaaa

SEQ ID NO: 64656 - DNA, 22 bp, Artificial Sequence
  chemically synthesized
tctctacctagaaaaataaaaa

SEQ ID NO: 64657 - DNA, 22 bp, Artificial Sequence
  chemically synthesized
tacctagaaaaataaaaaaatc

SEQ ID NO: 64658 - DNA, 22 bp, Artificial Sequence
  chemically synthesized
cctagaaaaataaaaaaatcaa

SEQ ID NO: 64659 - DNA, 22 bp, Artificial Sequence
  chemically synthesized
gaaaaataaaaaaatcaaaaac

SEQ ID NO: 64660 - DNA, 22 bp, Artificial Sequence
  chemically synthesized
gagggactgaagtgattagtgt

SEQ ID NO: 64661 - DNA, 22 bp, Artificial Sequence
  chemically synthesized
aagtgattagtgtcaccatcaa

SEQ ID NO: 64662 - DNA, 22 bp, Artificial Sequence
  chemically synthesized
gtgtcaccatcaaggacttgaa

SEQ ID NO: 64663 - DNA, 22 bp, Artificial Sequence
  chemically synthesized
gaaagacgcaggggtggtgatt

SEQ ID NO: 64664 - DNA, 22 bp, Artificial Sequence
  chemically synthesized
aaagacgcaggggtggtgattc

SEQ ID NO: 64665 - DNA, 22 bp, Artificial Sequence
  chemically synthesized
ccaccacatccctgttcaactc

SEQ ID NO: 64666 - DNA, 22 bp, Artificial Sequence
  chemically synthesized
ttcaactctcccatttgacctg

SEQ ID NO: 64667 - DNA, 22 bp, Artificial Sequence
  chemically synthesized
aactctcccatttgacctgtgc

SEQ ID NO: 64668 - DNA, 22 bp, Artificial Sequence
  chemically synthesized
tcccatttgacctgtgcagagg

SEQ ID NO: 64669 - DNA, 22 bp, Artificial Sequence
  chemically synthesized
ccatttgacctgtgcagaggac

SEQ ID NO: 64670 - DNA, 22 bp, Artificial Sequence
  chemically synthesized
gacctgtgcagaggacagatgg

SEQ ID NO: 64671 - DNA, 22 bp, Artificial Sequence
  chemically synthesized
acctgtgcagaggacagatgga

SEQ ID NO: 64672 - DNA, 22 bp, Artificial Sequence
  chemically synthesized
tgcagaggacagatggatcttg

SEQ ID NO: 64673 - DNA, 22 bp, Artificial Sequence
  chemically synthesized
ggaaaatgatggtggattattt

SEQ ID NO: 64674 - DNA, 22 bp, Artificial Sequence
  chemically synthesized
gaaaatgatggtggattatttt

SEQ ID NO: 64675 - DNA, 22 bp, Artificial Sequence
  chemically synthesized
ttttaagcttaaccaagtggtg

SEQ ID NO: 64676 - DNA, 22 bp, Artificial Sequence
  chemically synthesized
taagcttaaccaagtggtgact

SEQ ID NO: 64677 - DNA, 22 bp, Artificial Sequence
  chemically synthesized
aagcttaaccaagtggtgactc

SEQ ID NO: 64678 - DNA, 22 bp, Artificial Sequence
  chemically synthesized
agcttaaccaagtggtgactcc

SEQ ID NO: 64679 - DNA, 22 bp, Artificial Sequence
  chemically synthesized
aaccaagtggtgactccaattg

SEQ ID NO: 64680 - DNA, 22 bp, Artificial Sequence
  chemically synthesized
accaagtggtgactccaattgc

SEQ ID NO: 64681 - DNA, 22 bp, Artificial Sequence
  chemically synthesized
caattgcagctgctctaccagt

SEQ ID NO: 64682 - DNA, 22 bp, Artificial Sequence
  chemically synthesized
cagctgctctaccagttgtggt

SEQ ID NO: 64683 - DNA, 22 bp, Artificial Sequence
  chemically synthesized
ctctaccagttgtggttttgtt

SEQ ID NO: 64684 - DNA, 22 bp, Artificial Sequence
  chemically synthesized
taccagttgtggttttgttgct

SEQ ID NO: 64685 - DNA, 22 bp, Artificial Sequence
  chemically synthesized
ccagttgtggttttgttgcttg

SEQ ID NO: 64686 - DNA, 22 bp, Artificial Sequence
  chemically synthesized
tggttttgttgcttgagcaaat

SEQ ID NO: 64687 - DNA, 22 bp, Artificial Sequence
  chemically synthesized
tgttgcttgagcaaattaacac

SEQ ID NO: 64688 - DNA, 22 bp, Artificial Sequence
  chemically synthesized
gttgcttgagcaaattaacaca

SEQ ID NO: 64689 - DNA, 22 bp, Artificial Sequence
  chemically synthesized
ttgcttgagcaaattaacacat

SEQ ID NO: 64690 - DNA, 22 bp, Artificial Sequence
  chemically synthesized
cttgagcaaattaacacatctc

SEQ ID NO: 64691 - DNA, 22 bp, Artificial Sequence
  chemically synthesized
gagcaaattaacacatctcctg

SEQ ID NO: 64692 - DNA, 22 bp, Artificial Sequence
  chemically synthesized
agcaaattaacacatctcctgg

SEQ ID NO: 64693 - DNA, 22 bp, Artificial Sequence
  chemically synthesized
acacatctcctggtgcctggta

SEQ ID NO: 64694 - DNA, 22 bp, Artificial Sequence
  chemically synthesized
ctggtgcctggtatgcagccat

SEQ ID NO: 64695 - DNA, 22 bp, Artificial Sequence
  chemically synthesized
gtgcctggtatgcagccattgg

SEQ ID NO: 64696 - DNA, 22 bp, Artificial Sequence
  chemically synthesized
gtatgcagccattggcttggca

SEQ ID NO: 64697 - DNA, 22 bp, Artificial Sequence
  chemically synthesized
gcttggcaagtggctttttctc

SEQ ID NO: 64698 - DNA, 22 bp, Artificial Sequence
  chemically synthesized
ggcaagtggctttttctccatt

SEQ ID NO: 64699 - DNA, 22 bp, Artificial Sequence
  chemically synthesized
gcaagtggctttttctccattc

SEQ ID NO: 64700 - DNA, 22 bp, Artificial Sequence
  chemically synthesized
tttctccattcctgtccataag

SEQ ID NO: 64701 - DNA, 22 bp, Artificial Sequence
  chemically synthesized
ttctccattcctgtccataaga

SEQ ID NO: 64702 - DNA, 22 bp, Artificial Sequence
  chemically synthesized
tctccattcctgtccataagac

SEQ ID NO: 64703 - DNA, 22 bp, Artificial Sequence
  chemically synthesized
ctccattcctgtccataagacc

SEQ ID NO: 64704 - DNA, 22 bp, Artificial Sequence
  chemically synthesized
tccattcctgtccataagaccc

SEQ ID NO: 64705 - DNA, 22 bp, Artificial Sequence
  chemically synthesized
cattcctgtccataagacccac

SEQ ID NO: 64706 - DNA, 22 bp, Artificial Sequence
  chemically synthesized
ctgtccataagacccaccagaa

SEQ ID NO: 64707 - DNA, 22 bp, Artificial Sequence
  chemically synthesized
tccataagacccaccagaagca

SEQ ID NO: 64708 - DNA, 22 bp, Artificial Sequence
  chemically synthesized
gccttcagctgacaaggccagc

SEQ ID NO: 64709 - DNA, 22 bp, Artificial Sequence
  chemically synthesized
ccttcagctgacaaggccagca

SEQ ID NO: 64710 - DNA, 22 bp, Artificial Sequence
  chemically synthesized
cagctgacaaggccagcattat

SEQ ID NO: 64711 - DNA, 22 bp, Artificial Sequence
  chemically synthesized
agctgacaaggccagcattata

SEQ ID NO: 64712 - DNA, 22 bp, Artificial Sequence
  chemically synthesized
acaaggccagcattataccttt

SEQ ID NO: 64713 - DNA, 22 bp, Artificial Sequence
  chemically synthesized
tacctttaccaccctacctcag

SEQ ID NO: 64714 - DNA, 22 bp, Artificial Sequence
  chemically synthesized
taccaccctacctcaggggtgt

SEQ ID NO: 64715 - DNA, 22 bp, Artificial Sequence
  chemically synthesized
accaccctacctcaggggtgta

SEQ ID NO: 64716 - DNA, 22 bp, Artificial Sequence
  chemically synthesized
ccaccctacctcaggggtgtat

SEQ ID NO: 64717 - DNA, 22 bp, Artificial Sequence
  chemically synthesized
cctcaggggtgtatcaactctc

SEQ ID NO: 64718 - DNA, 22 bp, Artificial Sequence
  chemically synthesized
aggggtgtatcaactctccagc

SEQ ID NO: 64719 - DNA, 22 bp, Artificial Sequence
  chemically synthesized
tccagctttgtgtcataatctt

SEQ ID NO: 64720 - DNA, 22 bp, Artificial Sequence
  chemically synthesized
cagctttgtgtcataatcttat

SEQ ID NO: 64721 - DNA, 22 bp, Artificial Sequence
  chemically synthesized
tgtgtcataatcttatttggag

SEQ ID NO: 64722 - DNA, 22 bp, Artificial Sequence
  chemically synthesized
gtgtcataatcttatttggaga

SEQ ID NO: 64723 - DNA, 22 bp, Artificial Sequence
  chemically synthesized
tgtcataatcttatttggagag

SEQ ID NO: 64724 - DNA, 22 bp, Artificial Sequence
  chemically synthesized
atttggagagaccttgctcgct

SEQ ID NO: 64725 - DNA, 22 bp, Artificial Sequence
  chemically synthesized
tttggagagaccttgctcgctt

SEQ ID NO: 64726 - DNA, 22 bp, Artificial Sequence
  chemically synthesized
ggagagaccttgctcgcttttc

SEQ ID NO: 64727 - DNA, 22 bp, Artificial Sequence
  chemically synthesized
gagagaccttgctcgcttttca

SEQ ID NO: 64728 - DNA, 22 bp, Artificial Sequence
  chemically synthesized
gctcgcttttcacttccacgag

SEQ ID NO: 64729 - DNA, 22 bp, Artificial Sequence
  chemically synthesized
ctcgcttttcacttccacgaga

SEQ ID NO: 64730 - DNA, 22 bp, Artificial Sequence
  chemically synthesized
gcttttcacttccacgagatat

SEQ ID NO: 64731 - DNA, 22 bp, Artificial Sequence
  chemically synthesized
ttcacttccacgagatataaca

SEQ ID NO: 64732 - DNA, 22 bp, Artificial Sequence
  chemically synthesized
tcacttccacgagatataacac

SEQ ID NO: 64733 - DNA, 22 bp, Artificial Sequence
  chemically synthesized
cacttccacgagatataacact

SEQ ID NO: 64734 - DNA, 22 bp, Artificial Sequence
  chemically synthesized
acttccacgagatataacactg

SEQ ID NO: 64735 - DNA, 22 bp, Artificial Sequence
  chemically synthesized
ccacgagatataacactggtcc

SEQ ID NO: 64736 - DNA, 22 bp, Artificial Sequence
  chemically synthesized
cacgagatataacactggtcca

SEQ ID NO: 64737 - DNA, 22 bp, Artificial Sequence
  chemically synthesized
gtccattacattcatgacatta

SEQ ID NO: 64738 - DNA, 22 bp, Artificial Sequence
  chemically synthesized
cattcatgacattatgatgatt

SEQ ID NO: 64739 - DNA, 22 bp, Artificial Sequence
  chemically synthesized
atgacattatgatgattggata

SEQ ID NO: 64740 - DNA, 22 bp, Artificial Sequence
  chemically synthesized
tgatgattggatacagtgagca

SEQ ID NO: 64741 - DNA, 22 bp, Artificial Sequence
  chemically synthesized
gatacagtgagcaagaagtagc

SEQ ID NO: 64742 - DNA, 22 bp, Artificial Sequence
  chemically synthesized
aacttattggtgagacatttgt

SEQ ID NO: 64743 - DNA, 22 bp, Artificial Sequence
  chemically synthesized
attggtgagacatttgtatgcc

SEQ ID NO: 64744 - DNA, 22 bp, Artificial Sequence
  chemically synthesized
ttggtgagacatttgtatgcca

SEQ ID NO: 64745 - DNA, 22 bp, Artificial Sequence
  chemically synthesized
gtgagacatttgtatgccagag

SEQ ID NO: 64746 - DNA, 22 bp, Artificial Sequence
  chemically synthesized
gtatgccagaggatgggaaata

SEQ ID NO: 64747 - DNA, 22 bp, Artificial Sequence
  chemically synthesized
tatgccagaggatgggaaataa

SEQ ID NO: 64748 - DNA, 22 bp, Artificial Sequence
  chemically synthesized
aaatttagggactttctacctc

SEQ ID NO: 64749 - DNA, 22 bp, Artificial Sequence
  chemically synthesized
agggactttctacctcggtaaa

SEQ ID NO: 64750 - DNA, 22 bp, Artificial Sequence
  chemically synthesized
gggactttctacctcggtaaaa

SEQ ID NO: 64751 - DNA, 22 bp, Artificial Sequence
  chemically synthesized
tctacctcggtaaaatttctag

SEQ ID NO: 64752 - DNA, 22 bp, Artificial Sequence
  chemically synthesized
ctacctcggtaaaatttctagg

SEQ ID NO: 64753 - DNA, 22 bp, Artificial Sequence
  chemically synthesized
tacctcggtaaaatttctaggg

SEQ ID NO: 64754 - DNA, 22 bp, Artificial Sequence
  chemically synthesized
cctcggtaaaatttctagggtt

SEQ ID NO: 64755 - DNA, 22 bp, Artificial Sequence
  chemically synthesized
ggtaaaatttctagggttccag

SEQ ID NO: 64756 - DNA, 22 bp, Artificial Sequence
  chemically synthesized
ctagggttccagtggcatgaga

SEQ ID NO: 64757 - DNA, 22 bp, Artificial Sequence
  chemically synthesized
tagggttccagtggcatgagac

SEQ ID NO: 64758 - DNA, 22 bp, Artificial Sequence
  chemically synthesized
gggttccagtggcatgagacct

SEQ ID NO: 64759 - DNA, 22 bp, Artificial Sequence
  chemically synthesized
cagtggcatgagacctatggag

SEQ ID NO: 64760 - DNA, 22 bp, Artificial Sequence
  chemically synthesized
tggagatattccttctaaggtg

SEQ ID NO: 64761 - DNA, 22 bp, Artificial Sequence
  chemically synthesized
cttctaaggtgaagcataactt

SEQ ID NO: 64762 - DNA, 22 bp, Artificial Sequence
  chemically synthesized
ctaaggtgaagcataacttgct

SEQ ID NO: 64763 - DNA, 22 bp, Artificial Sequence
  chemically synthesized
taaggtgaagcataacttgctg

SEQ ID NO: 64764 - DNA, 22 bp, Artificial Sequence
  chemically synthesized
aggtgaagcataacttgctgcg

SEQ ID NO: 64765 - DNA, 22 bp, Artificial Sequence
  chemically synthesized
gctgcgtttggcccctcttaca

SEQ ID NO: 64766 - DNA, 22 bp, Artificial Sequence
  chemically synthesized
ctgcgtttggcccctcttacaa

SEQ ID NO: 64767 - DNA, 22 bp, Artificial Sequence
  chemically synthesized
cgtttggcccctcttacaacca

SEQ ID NO: 64768 - DNA, 22 bp, Artificial Sequence
  chemically synthesized
ggcccctcttacaaccaagaaa

SEQ ID NO: 64769 - DNA, 22 bp, Artificial Sequence
  chemically synthesized
gcccctcttacaaccaagaaag

SEQ ID NO: 64770 - DNA, 22 bp, Artificial Sequence
  chemically synthesized
ttacaaccaagaaagaggcaca

SEQ ID NO: 64771 - DNA, 22 bp, Artificial Sequence
  chemically synthesized
acaaccaagaaagaggcacaat

SEQ ID NO: 64772 - DNA, 22 bp, Artificial Sequence
  chemically synthesized
caaccaagaaagaggcacaatg

SEQ ID NO: 64773 - DNA, 22 bp, Artificial Sequence
  chemically synthesized
gtgggcctatttggattttgga

SEQ ID NO: 64774 - DNA, 22 bp, Artificial Sequence
  chemically synthesized
tttggattttggaggcaacaca

SEQ ID NO: 64775 - DNA, 22 bp, Artificial Sequence
  chemically synthesized
ggattttggaggcaacacattc

SEQ ID NO: 64776 - DNA, 22 bp, Artificial Sequence
  chemically synthesized
gattttggaggcaacacattcc

SEQ ID NO: 64777 - DNA, 22 bp, Artificial Sequence
  chemically synthesized
tggaggcaacacattcctcgtt

SEQ ID NO: 64778 - DNA, 22 bp, Artificial Sequence
  chemically synthesized
ggaggcaacacattcctcgttt

SEQ ID NO: 64779 - DNA, 22 bp, Artificial Sequence
  chemically synthesized
gaggcaacacattcctcgtttg

SEQ ID NO: 64780 - DNA, 22 bp, Artificial Sequence
  chemically synthesized
ctcgtttgggtgtgttactctg

SEQ ID NO: 64781 - DNA, 22 bp, Artificial Sequence
  chemically synthesized
gtttgggtgtgttactctggcc

SEQ ID NO: 64782 - DNA, 22 bp, Artificial Sequence
  chemically synthesized
gggtgtgttactctggcccatt

SEQ ID NO: 64783 - DNA, 22 bp, Artificial Sequence
  chemically synthesized
ggtgtgttactctggcccattt

SEQ ID NO: 64784 - DNA, 22 bp, Artificial Sequence
  chemically synthesized
ctctggcccatttatcgagtga

SEQ ID NO: 64785 - DNA, 22 bp, Artificial Sequence
  chemically synthesized
tggcccatttatcgagtgacct

SEQ ID NO: 64786 - DNA, 22 bp, Artificial Sequence
  chemically synthesized
gcccatttatcgagtgacctga

SEQ ID NO: 64787 - DNA, 22 bp, Artificial Sequence
  chemically synthesized
atcgagtgacctgaaaggctgc

SEQ ID NO: 64788 - DNA, 22 bp, Artificial Sequence
  chemically synthesized
tcgagtgacctgaaaggctgcc

SEQ ID NO: 64789 - DNA, 22 bp, Artificial Sequence
  chemically synthesized
aaaggctgccagatttaagtgc

SEQ ID NO: 64790 - DNA, 22 bp, Artificial Sequence
  chemically synthesized
ccagatttaagtgcagtctaga

SEQ ID NO: 64791 - DNA, 22 bp, Artificial Sequence
  chemically synthesized
aagtgcagtctagaacaaaaga

SEQ ID NO: 64792 - DNA, 22 bp, Artificial Sequence
  chemically synthesized
agtgcagtctagaacaaaagaa

SEQ ID NO: 64793 - DNA, 22 bp, Artificial Sequence
  chemically synthesized
gaacaaaagaaggctctgaaac

SEQ ID NO: 64794 - DNA, 22 bp, Artificial Sequence
  chemically synthesized
tgaaacaggtccaggctgctgt

SEQ ID NO: 64795 - DNA, 22 bp, Artificial Sequence
  chemically synthesized
aaacaggtccaggctgctgtga

SEQ ID NO: 64796 - DNA, 22 bp, Artificial Sequence
  chemically synthesized
ctgtgaaagctgctctgccatt

SEQ ID NO: 64797 - DNA, 22 bp, Artificial Sequence
  chemically synthesized
tgaaagctgctctgccatttgg

SEQ ID NO: 64798 - DNA, 22 bp, Artificial Sequence
  chemically synthesized
ctctgccatttgggccacatga

SEQ ID NO: 64799 - DNA, 22 bp, Artificial Sequence
  chemically synthesized
tgccatttgggccacatgaccc

SEQ ID NO: 64800 - DNA, 22 bp, Artificial Sequence
  chemically synthesized
ccatttgggccacatgaccccg

SEQ ID NO: 64801 - DNA, 22 bp, Artificial Sequence
  chemically synthesized
gggccacatgaccccgcagatc

SEQ ID NO: 64802 - DNA, 22 bp, Artificial Sequence
  chemically synthesized
ggccacatgaccccgcagatcc

SEQ ID NO: 64803 - DNA, 22 bp, Artificial Sequence
  chemically synthesized
gaggtgtcagtggcagataggg

SEQ ID NO: 64804 - DNA, 22 bp, Artificial Sequence
  chemically synthesized
aggtgtcagtggcagataggga

SEQ ID NO: 64805 - DNA, 22 bp, Artificial Sequence
  chemically synthesized
tttggagcctttggcaggcccc

SEQ ID NO: 64806 - DNA, 22 bp, Artificial Sequence
  chemically synthesized
ggagcctttggcaggcccccat

SEQ ID NO: 64807 - DNA, 22 bp, Artificial Sequence
  chemically synthesized
gagcctttggcaggcccccata

SEQ ID NO: 64808 - DNA, 22 bp, Artificial Sequence
  chemically synthesized
tggcaggcccccataggtgaat

SEQ ID NO: 64809 - DNA, 22 bp, Artificial Sequence
  chemically synthesized
ggcaggcccccataggtgaatc

SEQ ID NO: 64810 - DNA, 22 bp, Artificial Sequence
  chemically synthesized
gcaggcccccataggtgaatca

SEQ ID NO: 64811 - DNA, 22 bp, Artificial Sequence
  chemically synthesized
taggattttggagcaaggccct

SEQ ID NO: 64812 - DNA, 22 bp, Artificial Sequence
  chemically synthesized
ggattttggagcaaggccctgc

SEQ ID NO: 64813 - DNA, 22 bp, Artificial Sequence
  chemically synthesized
tggagcaaggccctgccacttc

SEQ ID NO: 64814 - DNA, 22 bp, Artificial Sequence
  chemically synthesized
ggagcaaggccctgccacttct

SEQ ID NO: 64815 - DNA, 22 bp, Artificial Sequence
  chemically synthesized
gagcaaggccctgccacttctg

SEQ ID NO: 64816 - DNA, 22 bp, Artificial Sequence
  chemically synthesized
ccacttctgcagataactactc

SEQ ID NO: 64817 - DNA, 22 bp, Artificial Sequence
  chemically synthesized
ctgcagataactactctccttt

SEQ ID NO: 64818 - DNA, 22 bp, Artificial Sequence
  chemically synthesized
tgcagataactactctcctttt

SEQ ID NO: 64819 - DNA, 22 bp, Artificial Sequence
  chemically synthesized
cagataactactctccttttga

SEQ ID NO: 64820 - DNA, 22 bp, Artificial Sequence
  chemically synthesized
ctctccttttgagagacagcta

SEQ ID NO: 64821 - DNA, 22 bp, Artificial Sequence
  chemically synthesized
tccttttgagagacagctattg

SEQ ID NO: 64822 - DNA, 22 bp, Artificial Sequence
  chemically synthesized
cttttgagagacagctattggt

SEQ ID NO: 64823 - DNA, 22 bp, Artificial Sequence
  chemically synthesized
ttgagagacagctattggtctg

SEQ ID NO: 64824 - DNA, 22 bp, Artificial Sequence
  chemically synthesized
tgagagacagctattggtctgt

SEQ ID NO: 64825 - DNA, 22 bp, Artificial Sequence
  chemically synthesized
gagagacagctattggtctgtt

SEQ ID NO: 64826 - DNA, 22 bp, Artificial Sequence
  chemically synthesized
agagacagctattggtctgtta

SEQ ID NO: 64827 - DNA, 22 bp, Artificial Sequence
  chemically synthesized
ttggtctgttattgggctttgg

SEQ ID NO: 64828 - DNA, 22 bp, Artificial Sequence
  chemically synthesized
gtctgttattgggctttggtgg

SEQ ID NO: 64829 - DNA, 22 bp, Artificial Sequence
  chemically synthesized
ttattgggctttggtggtaact

SEQ ID NO: 64830 - DNA, 22 bp, Artificial Sequence
  chemically synthesized
ttgggctttggtggtaactgaa

SEQ ID NO: 64831 - DNA, 22 bp, Artificial Sequence
  chemically synthesized
ggctttggtggtaactgaacgt

SEQ ID NO: 64832 - DNA, 22 bp, Artificial Sequence
  chemically synthesized
tggtggtaactgaacgtttgac

SEQ ID NO: 64833 - DNA, 22 bp, Artificial Sequence
  chemically synthesized
ggtggtaactgaacgtttgact

SEQ ID NO: 64834 - DNA, 22 bp, Artificial Sequence
  chemically synthesized
gtggtaactgaacgtttgactg

SEQ ID NO: 64835 - DNA, 22 bp, Artificial Sequence
  chemically synthesized
aacgtttgactgtgggtcataa

SEQ ID NO: 64836 - DNA, 22 bp, Artificial Sequence
  chemically synthesized
gactgtgggtcataaagtcacc

SEQ ID NO: 64837 - DNA, 22 bp, Artificial Sequence
  chemically synthesized
actgtgggtcataaagtcacca

SEQ ID NO: 64838 - DNA, 22 bp, Artificial Sequence
  chemically synthesized
tgggtcataaagtcaccatgct

SEQ ID NO: 64839 - DNA, 22 bp, Artificial Sequence
  chemically synthesized
cctgaacctgcctatcatgaac

SEQ ID NO: 64840 - DNA, 22 bp, Artificial Sequence
  chemically synthesized
aacctgcctatcatgaactggt

SEQ ID NO: 64841 - DNA, 22 bp, Artificial Sequence
  chemically synthesized
cctatcatgaactggttgcttt

SEQ ID NO: 64842 - DNA, 22 bp, Artificial Sequence
  chemically synthesized
tcatgaactggttgctttctga

SEQ ID NO: 64843 - DNA, 22 bp, Artificial Sequence
  chemically synthesized
gttgctttctgacccatctagc

SEQ ID NO: 64844 - DNA, 22 bp, Artificial Sequence
  chemically synthesized
ctttctgacccatctagccatg

SEQ ID NO: 64845 - DNA, 22 bp, Artificial Sequence
  chemically synthesized
tctgacccatctagccatgaag

SEQ ID NO: 64846 - DNA, 22 bp, Artificial Sequence
  chemically synthesized
ctgacccatctagccatgaagt

SEQ ID NO: 64847 - DNA, 22 bp, Artificial Sequence
  chemically synthesized
tgacccatctagccatgaagtg

SEQ ID NO: 64848 - DNA, 22 bp, Artificial Sequence
  chemically synthesized
acccatctagccatgaagtggg

SEQ ID NO: 64849 - DNA, 22 bp, Artificial Sequence
  chemically synthesized
gccatgaagtgggtcagcacag

SEQ ID NO: 64850 - DNA, 22 bp, Artificial Sequence
  chemically synthesized
catcatcaaattgaagtggtgt

SEQ ID NO: 64851 - DNA, 22 bp, Artificial Sequence
  chemically synthesized
atcatcaaattgaagtggtgtg

SEQ ID NO: 64852 - DNA, 22 bp, Artificial Sequence
  chemically synthesized
aagtggtgtgtatgtgatcggg

SEQ ID NO: 64853 - DNA, 22 bp, Artificial Sequence
  chemically synthesized
gagcaggtcctgaaggcacaag

SEQ ID NO: 64854 - DNA, 22 bp, Artificial Sequence
  chemically synthesized
agcaggtcctgaaggcacaagt

SEQ ID NO: 64855 - DNA, 22 bp, Artificial Sequence
  chemically synthesized
aaggcacaagtaagttacataa

SEQ ID NO: 64856 - DNA, 22 bp, Artificial Sequence
  chemically synthesized
cataaggaagtggctcaaatgc

SEQ ID NO: 64857 - DNA, 22 bp, Artificial Sequence
  chemically synthesized
aaatgcccatgttctccactca

SEQ ID NO: 64858 - DNA, 22 bp, Artificial Sequence
  chemically synthesized
tccactcatgccaccctgcctt

SEQ ID NO: 64859 - DNA, 22 bp, Artificial Sequence
  chemically synthesized
cactcatgccaccctgccttcc

SEQ ID NO: 64860 - DNA, 22 bp, Artificial Sequence
  chemically synthesized
atgccaccctgccttccctccc

SEQ ID NO: 64861 - DNA, 22 bp, Artificial Sequence
  chemically synthesized
ccttccctcccccagcctgcac

SEQ ID NO: 64862 - DNA, 22 bp, Artificial Sequence
  chemically synthesized
ccctcccccagcctgcaccaat

SEQ ID NO: 64863 - DNA, 22 bp, Artificial Sequence
  chemically synthesized
cctcccccagcctgcaccaatg

SEQ ID NO: 64864 - DNA, 22 bp, Artificial Sequence
  chemically synthesized
ccccagcctgcaccaatggcct

SEQ ID NO: 64865 - DNA, 22 bp, Artificial Sequence
  chemically synthesized
caccaatggcctcatggggagt

SEQ ID NO: 64866 - DNA, 22 bp, Artificial Sequence
  chemically synthesized
atggggagttccctatgatcag

SEQ ID NO: 64867 - DNA, 22 bp, Artificial Sequence
  chemically synthesized
cctatgatcagttgacagagga

SEQ ID NO: 64868 - DNA, 22 bp, Artificial Sequence
  chemically synthesized
tgatcagttgacagaggaaggg

SEQ ID NO: 64869 - DNA, 22 bp, Artificial Sequence
  chemically synthesized
acagaggaagggaagactaagg

SEQ ID NO: 64870 - DNA, 22 bp, Artificial Sequence
  chemically synthesized
aggactggttcatagatggttc

SEQ ID NO: 64871 - DNA, 22 bp, Artificial Sequence
  chemically synthesized
gttcatagatggttctgcacga

SEQ ID NO: 64872 - DNA, 22 bp, Artificial Sequence
  chemically synthesized
atagatggttctgcacgatatg

SEQ ID NO: 64873 - DNA, 22 bp, Artificial Sequence
  chemically synthesized
tgcacgatatgcaggcaccacc

SEQ ID NO: 64874 - DNA, 22 bp, Artificial Sequence
  chemically synthesized
cacgatatgcaggcaccacccg

SEQ ID NO: 64875 - DNA, 22 bp, Artificial Sequence
  chemically synthesized
cagcactatatccactttctaa

SEQ ID NO: 64876 - DNA, 22 bp, Artificial Sequence
  chemically synthesized
tatccactttctaaatgcatgt

SEQ ID NO: 64877 - DNA, 22 bp, Artificial Sequence
  chemically synthesized
tctaaatgcatgtgtacacttg

SEQ ID NO: 64878 - DNA, 22 bp, Artificial Sequence
  chemically synthesized
ctaaatgcatgtgtacacttgt

SEQ ID NO: 64879 - DNA, 22 bp, Artificial Sequence
  chemically synthesized
taaatgcatgtgtacacttgtg

SEQ ID NO: 64880 - DNA, 22 bp, Artificial Sequence
  chemically synthesized
aatgcatgtgtacacttgtgct

SEQ ID NO: 64881 - DNA, 22 bp, Artificial Sequence
  chemically synthesized
gtgctaagaaaatatctttatt

SEQ ID NO: 64882 - DNA, 22 bp, Artificial Sequence
  chemically synthesized
tgctaagaaaatatctttattt

SEQ ID NO: 64883 - DNA, 22 bp, Artificial Sequence
  chemically synthesized
agaaaatatctttattttattt

SEQ ID NO: 64884 - DNA, 22 bp, Artificial Sequence
  chemically synthesized
tattttatttcctttatttttc

SEQ ID NO: 64885 - DNA, 22 bp, Artificial Sequence
  chemically synthesized
attttatttcctttatttttcc

SEQ ID NO: 64886 - DNA, 22 bp, Artificial Sequence
  chemically synthesized
ttttatttcctttatttttcct

SEQ ID NO: 64887 - DNA, 22 bp, Artificial Sequence
  chemically synthesized
tatttcctttatttttccttta

SEQ ID NO: 64888 - DNA, 22 bp, Artificial Sequence
  chemically synthesized
atttcctttatttttcctttat

SEQ ID NO: 64889 - DNA, 22 bp, Artificial Sequence
  chemically synthesized
tttcctttatttttcctttatc

SEQ ID NO: 64890 - DNA, 22 bp, Artificial Sequence
  chemically synthesized
cctttatttttcctttatcatg

SEQ ID NO: 64891 - DNA, 22 bp, Artificial Sequence
  chemically synthesized
ctttatttttcctttatcatgt

SEQ ID NO: 64892 - DNA, 22 bp, Artificial Sequence
  chemically synthesized
tatttttcctttatcatgtgac

SEQ ID NO: 64893 - DNA, 22 bp, Artificial Sequence
  chemically synthesized
atttttcctttatcatgtgacc

SEQ ID NO: 64894 - DNA, 22 bp, Artificial Sequence
  chemically synthesized
tttttcctttatcatgtgacct

SEQ ID NO: 64895 - DNA, 22 bp, Artificial Sequence
  chemically synthesized
ttcctttatcatgtgaccttag

SEQ ID NO: 64896 - DNA, 22 bp, Artificial Sequence
  chemically synthesized
tcctttatcatgtgaccttaga

SEQ ID NO: 64897 - DNA, 22 bp, Artificial Sequence
  chemically synthesized
cctttatcatgtgaccttagat

SEQ ID NO: 64898 - DNA, 22 bp, Artificial Sequence
  chemically synthesized
ctttatcatgtgaccttagatt

SEQ ID NO: 64899 - DNA, 22 bp, Artificial Sequence
  chemically synthesized
tatcatgtgaccttagatttat

SEQ ID NO: 64900 - DNA, 22 bp, Artificial Sequence
  chemically synthesized
atcatgtgaccttagatttatg

SEQ ID NO: 64901 - DNA, 22 bp, Artificial Sequence
  chemically synthesized
tcatgtgaccttagatttatgg

SEQ ID NO: 64902 - DNA, 22 bp, Artificial Sequence
  chemically synthesized
agatttatggacttcacatcag

SEQ ID NO: 64903 - DNA, 22 bp, Artificial Sequence
  chemically synthesized
gatttatggacttcacatcagc

SEQ ID NO: 64904 - DNA, 22 bp, Artificial Sequence
  chemically synthesized
atggacttcacatcagcattta

SEQ ID NO: 64905 - DNA, 22 bp, Artificial Sequence
  chemically synthesized
tggacttcacatcagcatttaa

SEQ ID NO: 64906 - DNA, 22 bp, Artificial Sequence
  chemically synthesized
cacatcagcatttaagcattta

SEQ ID NO: 64907 - DNA, 22 bp, Artificial Sequence
  chemically synthesized
acatcagcatttaagcatttaa

SEQ ID NO: 64908 - DNA, 22 bp, Artificial Sequence
  chemically synthesized
aagcatttaagtgttgttcata

SEQ ID NO: 64909 - DNA, 22 bp, Artificial Sequence
  chemically synthesized
agcatttaagtgttgttcatat

SEQ ID NO: 64910 - DNA, 22 bp, Artificial Sequence
  chemically synthesized
aagtgttgttcatatcagcatt

SEQ ID NO: 64911 - DNA, 22 bp, Artificial Sequence
  chemically synthesized
agtgttgttcatatcagcattt

SEQ ID NO: 64912 - DNA, 22 bp, Artificial Sequence
  chemically synthesized
ttcatatcagcatttaaatatt

SEQ ID NO: 64913 - DNA, 22 bp, Artificial Sequence
  chemically synthesized
atatcagcatttaaatattgtt

SEQ ID NO: 64914 - DNA, 22 bp, Artificial Sequence
  chemically synthesized
aaatattgttaaccttatgtaa

SEQ ID NO: 64915 - DNA, 22 bp, Artificial Sequence
  chemically synthesized
aatattgttaaccttatgtaat

SEQ ID NO: 64916 - DNA, 22 bp, Artificial Sequence
  chemically synthesized
ttaaccttatgtaataactttt

SEQ ID NO: 64917 - DNA, 22 bp, Artificial Sequence
  chemically synthesized
accttatgtaataacttttggt

SEQ ID NO: 64918 - DNA, 22 bp, Artificial Sequence
  chemically synthesized
atgtaataacttttggtttggg

SEQ ID NO: 64919 - DNA, 22 bp, Artificial Sequence
  chemically synthesized
tgtaataacttttggtttgggg

SEQ ID NO: 64920 - DNA, 22 bp, Artificial Sequence
  chemically synthesized
ttggtttggggattggtgcgtt

SEQ ID NO: 64921 - DNA, 22 bp, Artificial Sequence
  chemically synthesized
tggtttggggattggtgcgttt

SEQ ID NO: 64922 - DNA, 22 bp, Artificial Sequence
  chemically synthesized
ggtttggggattggtgcgtttc

SEQ ID NO: 64923 - DNA, 22 bp, Artificial Sequence
  chemically synthesized
gtttggggattggtgcgtttct

SEQ ID NO: 64924 - DNA, 22 bp, Artificial Sequence
  chemically synthesized
ggggattggtgcgtttctggtt

SEQ ID NO: 64925 - DNA, 22 bp, Artificial Sequence
  chemically synthesized
gggattggtgcgtttctggttg

SEQ ID NO: 64926 - DNA, 22 bp, Artificial Sequence
  chemically synthesized
gtgcgtttctggttgtatgagg

SEQ ID NO: 64927 - DNA, 22 bp, Artificial Sequence
  chemically synthesized
ctggttgtatgaggatagttgt

SEQ ID NO: 64928 - DNA, 22 bp, Artificial Sequence
  chemically synthesized
tggttgtatgaggatagttgta

SEQ ID NO: 64929 - DNA, 22 bp, Artificial Sequence
  chemically synthesized
gttgtatgaggatagttgtatt

SEQ ID NO: 64930 - DNA, 22 bp, Artificial Sequence
  chemically synthesized
tatgaggatagttgtattatat

SEQ ID NO: 64931 - DNA, 22 bp, Artificial Sequence
  chemically synthesized
tattatattaggcataattatg

SEQ ID NO: 64932 - DNA, 22 bp, Artificial Sequence
  chemically synthesized
tattaggcataattatgacctt

SEQ ID NO: 64933 - DNA, 22 bp, Artificial Sequence
  chemically synthesized
ggcataattatgaccttattat

SEQ ID NO: 64934 - DNA, 22 bp, Artificial Sequence
  chemically synthesized
tgaccttattattgtctttatt

SEQ ID NO: 64935 - DNA, 22 bp, Artificial Sequence
  chemically synthesized
attattgtctttatttgaagat

SEQ ID NO: 64936 - DNA, 22 bp, Artificial Sequence
  chemically synthesized
ttattgtctttatttgaagatt

SEQ ID NO: 64937 - DNA, 22 bp, Artificial Sequence
  chemically synthesized
ttgtctttatttgaagattatg

SEQ ID NO: 64938 - DNA, 22 bp, Artificial Sequence
  chemically synthesized
tctttatttgaagattatgtat

SEQ ID NO: 64939 - DNA, 22 bp, Artificial Sequence
  chemically synthesized
tatttgaagattatgtatgatt

SEQ ID NO: 64940 - DNA, 22 bp, Artificial Sequence
  chemically synthesized
atttgaagattatgtatgattt

SEQ ID NO: 64941 - DNA, 22 bp, Artificial Sequence
  chemically synthesized
tttgaagattatgtatgatttc

SEQ ID NO: 64942 - DNA, 22 bp, Artificial Sequence
  chemically synthesized
gaagattatgtatgatttcagg

SEQ ID NO: 64943 - DNA, 22 bp, Artificial Sequence
  chemically synthesized
aagattatgtatgatttcagga

SEQ ID NO: 64944 - DNA, 22 bp, Artificial Sequence
  chemically synthesized
tgtatgatttcaggatgtgtgt

SEQ ID NO: 64945 - DNA, 22 bp, Artificial Sequence
  chemically synthesized
caggatgtgtgtatgggttcaa

SEQ ID NO: 64946 - DNA, 22 bp, Artificial Sequence
  chemically synthesized
aggatgtgtgtatgggttcaag

SEQ ID NO: 64947 - DNA, 22 bp, Artificial Sequence
  chemically synthesized
aagttgacaaggagttggactt

SEQ ID NO: 64948 - DNA, 22 bp, Artificial Sequence
  chemically synthesized
acaaggagttggacttgtgatg

SEQ ID NO: 64949 - DNA, 22 bp, Artificial Sequence
  chemically synthesized
gacttgtgatggttaatactgt

SEQ ID NO: 64950 - DNA, 22 bp, Artificial Sequence
  chemically synthesized
gtgatggttaatactgtcaact

SEQ ID NO: 64951 - DNA, 22 bp, Artificial Sequence
  chemically synthesized
tgatggttaatactgtcaactt

SEQ ID NO: 64952 - DNA, 22 bp, Artificial Sequence
  chemically synthesized
atactgtcaacttgattggatt

SEQ ID NO: 64953 - DNA, 22 bp, Artificial Sequence
  chemically synthesized
tcaacttgattggattgaaaga

SEQ ID NO: 64954 - DNA, 22 bp, Artificial Sequence
  chemically synthesized
gattggattgaaagatgcaaag

SEQ ID NO: 64955 - DNA, 22 bp, Artificial Sequence
  chemically synthesized
attggattgaaagatgcaaagt

SEQ ID NO: 64956 - DNA, 22 bp, Artificial Sequence
  chemically synthesized
gattgaaagatgcaaagtatta

SEQ ID NO: 64957 - DNA, 22 bp, Artificial Sequence
  chemically synthesized
aaagatgcaaagtattaatctc

SEQ ID NO: 64958 - DNA, 22 bp, Artificial Sequence
  chemically synthesized
atctcggttatgtctgtgaggg

SEQ ID NO: 64959 - DNA, 22 bp, Artificial Sequence
  chemically synthesized
ggttatgtctgtgagggtgtgg

SEQ ID NO: 64960 - DNA, 22 bp, Artificial Sequence
  chemically synthesized
tgtctgtgagggtgtggcaaaa

SEQ ID NO: 64961 - DNA, 22 bp, Artificial Sequence
  chemically synthesized
tgagggtgtggcaaaaggagat

SEQ ID NO: 64962 - DNA, 22 bp, Artificial Sequence
  chemically synthesized
acatttgagtcagtgggctggg

SEQ ID NO: 64963 - DNA, 20 bp, Artificial Sequence
  chemically synthesized
taacgaccccggtaggtgag

SEQ ID NO: 64964 - DNA, 20 bp, Artificial Sequence
  chemically synthesized
accccggtaggtgagaggcc

SEQ ID NO: 64965 - DNA, 20 bp, Artificial Sequence
  chemically synthesized
ccccggtaggtgagaggcca

SEQ ID NO: 64966 - DNA, 20 bp, Artificial Sequence
  chemically synthesized
ggtgagaggccaaggtccca

SEQ ID NO: 64967 - DNA, 20 bp, Artificial Sequence
  chemically synthesized
gtgagaggccaaggtcccaa

SEQ ID NO: 64968 - DNA, 20 bp, Artificial Sequence
  chemically synthesized
tgagaggccaaggtcccaaa

SEQ ID NO: 64969 - DNA, 20 bp, Artificial Sequence
  chemically synthesized
gagaggccaaggtcccaaag

SEQ ID NO: 64970 - DNA, 20 bp, Artificial Sequence
  chemically synthesized
gaggccaaggtcccaaaggg

SEQ ID NO: 64971 - DNA, 20 bp, Artificial Sequence
  chemically synthesized
gccaaggtcccaaaggggag

SEQ ID NO: 64972 - DNA, 20 bp, Artificial Sequence
  chemically synthesized
aaggtcccaaaggggagcag

SEQ ID NO: 64973 - DNA, 20 bp, Artificial Sequence
  chemically synthesized
aggtcccaaaggggagcagc

SEQ ID NO: 64974 - DNA, 20 bp, Artificial Sequence
  chemically synthesized
ggtcccaaaggggagcagca

SEQ ID NO: 64975 - DNA, 20 bp, Artificial Sequence
  chemically synthesized
ccaaaggggagcagcaggga

SEQ ID NO: 64976 - DNA, 20 bp, Artificial Sequence
  chemically synthesized
aggggagcagcagggaaagt

SEQ ID NO: 64977 - DNA, 20 bp, Artificial Sequence
  chemically synthesized
gctcccatctattcttgctc

SEQ ID NO: 64978 - DNA, 20 bp, Artificial Sequence
  chemically synthesized
ctcccatctattcttgctcc

SEQ ID NO: 64979 - DNA, 20 bp, Artificial Sequence
  chemically synthesized
tcccatctattcttgctcca

SEQ ID NO: 64980 - DNA, 20 bp, Artificial Sequence
  chemically synthesized
cccatctattcttgctccag

SEQ ID NO: 64981 - DNA, 20 bp, Artificial Sequence
  chemically synthesized
catctattcttgctccaggg

SEQ ID NO: 64982 - DNA, 20 bp, Artificial Sequence
  chemically synthesized
atctattcttgctccagggg

SEQ ID NO: 64983 - DNA, 20 bp, Artificial Sequence
  chemically synthesized
ctccaggggaggcctttgat

SEQ ID NO: 64984 - DNA, 20 bp, Artificial Sequence
  chemically synthesized
tccaggggaggcctttgatg

SEQ ID NO: 64985 - DNA, 20 bp, Artificial Sequence
  chemically synthesized
aggggaggcctttgatgagg

SEQ ID NO: 64986 - DNA, 20 bp, Artificial Sequence
  chemically synthesized
tttgatgaggaagctgccaa

SEQ ID NO: 64987 - DNA, 20 bp, Artificial Sequence
  chemically synthesized
tgcaaatacaattccaatta

SEQ ID NO: 64988 - DNA, 20 bp, Artificial Sequence
  chemically synthesized
gcaaatacaattccaattac

SEQ ID NO: 64989 - DNA, 20 bp, Artificial Sequence
  chemically synthesized
acaattccaattacaggcaa

SEQ ID NO: 64990 - DNA, 20 bp, Artificial Sequence
  chemically synthesized
caattccaattacaggcaac

SEQ ID NO: 64991 - DNA, 20 bp, Artificial Sequence
  chemically synthesized
ttccaattacaggcaacagg

SEQ ID NO: 64992 - DNA, 20 bp, Artificial Sequence
  chemically synthesized
tccaattacaggcaacagga

SEQ ID NO: 64993 - DNA, 20 bp, Artificial Sequence
  chemically synthesized
caattacaggcaacaggaag

SEQ ID NO: 64994 - DNA, 20 bp, Artificial Sequence
  chemically synthesized
accacctctgccacctctgt

SEQ ID NO: 64995 - DNA, 20 bp, Artificial Sequence
  chemically synthesized
cacctctgtcagcaaaccat

SEQ ID NO: 64996 - DNA, 20 bp, Artificial Sequence
  chemically synthesized
gctcctactctgtgctgcga

SEQ ID NO: 64997 - DNA, 20 bp, Artificial Sequence
  chemically synthesized
cctactctgtgctgcgatgg

SEQ ID NO: 64998 - DNA, 20 bp, Artificial Sequence
  chemically synthesized
ctactctgtgctgcgatggc

SEQ ID NO: 64999 - DNA, 20 bp, Artificial Sequence
  chemically synthesized
tgctgcgatggcgggctcga

SEQ ID NO: 65000 - DNA, 20 bp, Artificial Sequence
  chemically synthesized
gctgcgatggcgggctcgat

SEQ ID NO: 65001 - DNA, 20 bp, Artificial Sequence
  chemically synthesized
ctgcgatggcgggctcgatg

SEQ ID NO: 65002 - DNA, 20 bp, Artificial Sequence
  chemically synthesized
ataactctgaccttacctca

SEQ ID NO: 65003 - DNA, 20 bp, Artificial Sequence
  chemically synthesized
aactctgaccttacctcatg

SEQ ID NO: 65004 - DNA, 20 bp, Artificial Sequence
  chemically synthesized
tggagtcactgtcaacccac

SEQ ID NO: 65005 - DNA, 20 bp, Artificial Sequence
  chemically synthesized
gttgcactgtctttgtgcac

SEQ ID NO: 65006 - DNA, 20 bp, Artificial Sequence
  chemically synthesized
gtctttgtgcactggctctc

SEQ ID NO: 65007 - DNA, 20 bp, Artificial Sequence
  chemically synthesized
ctttgtgcactggctctctg

SEQ ID NO: 65008 - DNA, 20 bp, Artificial Sequence
  chemically synthesized
gtgcactggctctctggagt

SEQ ID NO: 65009 - DNA, 20 bp, Artificial Sequence
  chemically synthesized
tgcactggctctctggagtg

SEQ ID NO: 65010 - DNA, 20 bp, Artificial Sequence
  chemically synthesized
gagtgaggtctttgcaaaca

SEQ ID NO: 65011 - DNA, 20 bp, Artificial Sequence
  chemically synthesized
tgaggtctttgcaaacaaag

SEQ ID NO: 65012 - DNA, 20 bp, Artificial Sequence
  chemically synthesized
gtctttgcaaacaaagtgga

SEQ ID NO: 65013 - DNA, 20 bp, Artificial Sequence
  chemically synthesized
ctttgcaaacaaagtggaaa

SEQ ID NO: 65014 - DNA, 20 bp, Artificial Sequence
  chemically synthesized
agtggaaagagcatcaactt

SEQ ID NO: 65015 - DNA, 20 bp, Artificial Sequence
  chemically synthesized
agagcatcaactttggactc

SEQ ID NO: 65016 - DNA, 20 bp, Artificial Sequence
  chemically synthesized
caactttggactccagcacc

SEQ ID NO: 65017 - DNA, 20 bp, Artificial Sequence
  chemically synthesized
tggactccagcacctagatt

SEQ ID NO: 65018 - DNA, 20 bp, Artificial Sequence
  chemically synthesized
gactccagcacctagattca

SEQ ID NO: 65019 - DNA, 20 bp, Artificial Sequence
  chemically synthesized
tccagcacctagattcagag

SEQ ID NO: 65020 - DNA, 20 bp, Artificial Sequence
  chemically synthesized
ccagcacctagattcagagc

SEQ ID NO: 65021 - DNA, 20 bp, Artificial Sequence
  chemically synthesized
tcagagcaggccatttcact

SEQ ID NO: 65022 - DNA, 20 bp, Artificial Sequence
  chemically synthesized
ggaatctgctgtgcatctgc

SEQ ID NO: 65023 - DNA, 20 bp, Artificial Sequence
  chemically synthesized
gaatctgctgtgcatctgca

SEQ ID NO: 65024 - DNA, 20 bp, Artificial Sequence
  chemically synthesized
aatctgctgtgcatctgcaa

SEQ ID NO: 65025 - DNA, 20 bp, Artificial Sequence
  chemically synthesized
tctgctgtgcatctgcaagg

SEQ ID NO: 65026 - DNA, 20 bp, Artificial Sequence
  chemically synthesized
ctgctgtgcatctgcaaggg

SEQ ID NO: 65027 - DNA, 20 bp, Artificial Sequence
  chemically synthesized
aattcgcctttgtttcttcc

SEQ ID NO: 65028 - DNA, 20 bp, Artificial Sequence
  chemically synthesized
ttgtttcttcccagtatcga

SEQ ID NO: 65029 - DNA, 20 bp, Artificial Sequence
  chemically synthesized
cccagtatcgacagcccttc

SEQ ID NO: 65030 - DNA, 20 bp, Artificial Sequence
  chemically synthesized
gtatcgacagcccttccaga

SEQ ID NO: 65031 - DNA, 20 bp, Artificial Sequence
  chemically synthesized
atcgacagcccttccagaaa

SEQ ID NO: 65032 - DNA, 20 bp, Artificial Sequence
  chemically synthesized
acagcccttccagaaagagc

SEQ ID NO: 65033 - DNA, 20 bp, Artificial Sequence
  chemically synthesized
tcatgccacatgtacaatct

SEQ ID NO: 65034 - DNA, 20 bp, Artificial Sequence
  chemically synthesized
catgccacatgtacaatctg

SEQ ID NO: 65035 - DNA, 20 bp, Artificial Sequence
  chemically synthesized
ccacatgtacaatctgaggc

SEQ ID NO: 65036 - DNA, 20 bp, Artificial Sequence
  chemically synthesized
cacatgtacaatctgaggcc

SEQ ID NO: 65037 - DNA, 20 bp, Artificial Sequence
  chemically synthesized
catgtacaatctgaggccag

SEQ ID NO: 65038 - DNA, 20 bp, Artificial Sequence
  chemically synthesized
ccccttttcatcctcctgcc

SEQ ID NO: 65039 - DNA, 20 bp, Artificial Sequence
  chemically synthesized
tcctcctgcctggtacacaa

SEQ ID NO: 65040 - DNA, 20 bp, Artificial Sequence
  chemically synthesized
cctcctgcctggtacacaat

SEQ ID NO: 65041 - DNA, 20 bp, Artificial Sequence
  chemically synthesized
ggtacacaataggtgtttac

SEQ ID NO: 65042 - DNA, 20 bp, Artificial Sequence
  chemically synthesized
gtgtttactggatgcttgtc

SEQ ID NO: 65043 - DNA, 20 bp, Artificial Sequence
  chemically synthesized
tccagttgatttcttgaaca

SEQ ID NO: 65044 - DNA, 20 bp, Artificial Sequence
  chemically synthesized
ttcttgaacatggtgtgtaa

SEQ ID NO: 65045 - DNA, 20 bp, Artificial Sequence
  chemically synthesized
tcttgaacatggtgtgtaaa

SEQ ID NO: 65046 - DNA, 20 bp, Artificial Sequence
  chemically synthesized
tctttgcaaattgaatcttc

SEQ ID NO: 65047 - DNA, 20 bp, Artificial Sequence
  chemically synthesized
tgcaaattgaatcttctgga

SEQ ID NO: 65048 - DNA, 20 bp, Artificial Sequence
  chemically synthesized
attgaatcttctggaaagct

SEQ ID NO: 65049 - DNA, 20 bp, Artificial Sequence
  chemically synthesized
agctgagcttgtgcctacca

SEQ ID NO: 65050 - DNA, 20 bp, Artificial Sequence
  chemically synthesized
acttaaaacctgaatctttg

SEQ ID NO: 65051 - DNA, 20 bp, Artificial Sequence
  chemically synthesized
taaatcccttgaaatgcatg

SEQ ID NO: 65052 - DNA, 20 bp, Artificial Sequence
  chemically synthesized
aaatcccttgaaatgcatgt

SEQ ID NO: 65053 - DNA, 20 bp, Artificial Sequence
  chemically synthesized
cccttgaaatgcatgtaggc

SEQ ID NO: 65054 - DNA, 20 bp, Artificial Sequence
  chemically synthesized
gcatgtaggctggacatcaa

SEQ ID NO: 65055 - DNA, 20 bp, Artificial Sequence
  chemically synthesized
gtaggctggacatcaaaagc

SEQ ID NO: 65056 - DNA, 20 bp, Artificial Sequence
  chemically synthesized
caaaagcaagcaatctcttc

SEQ ID NO: 65057 - DNA, 20 bp, Artificial Sequence
  chemically synthesized
aaaagcaagcaatctcttca

SEQ ID NO: 65058 - DNA, 20 bp, Artificial Sequence
  chemically synthesized
aagcaagcaatctcttcaag

SEQ ID NO: 65059 - DNA, 20 bp, Artificial Sequence
  chemically synthesized
caagcaatctcttcaaggag

SEQ ID NO: 65060 - DNA, 20 bp, Artificial Sequence
  chemically synthesized
caatctcttcaaggagcagc

SEQ ID NO: 65061 - DNA, 20 bp, Artificial Sequence
  chemically synthesized
ctcttcaaggagcagctagt

SEQ ID NO: 65062 - DNA, 20 bp, Artificial Sequence
  chemically synthesized
tcaaggagcagctagttggt

SEQ ID NO: 65063 - DNA, 20 bp, Artificial Sequence
  chemically synthesized
caaggagcagctagttggta

SEQ ID NO: 65064 - DNA, 20 bp, Artificial Sequence
  chemically synthesized
gagcagctagttggtaaggt

SEQ ID NO: 65065 - DNA, 20 bp, Artificial Sequence
  chemically synthesized
tagttggtaaggtcagtgtg

SEQ ID NO: 65066 - DNA, 20 bp, Artificial Sequence
  chemically synthesized
agttggtaaggtcagtgtgc

SEQ ID NO: 65067 - DNA, 20 bp, Artificial Sequence
  chemically synthesized
gttggtaaggtcagtgtgca

SEQ ID NO: 65068 - DNA, 20 bp, Artificial Sequence
  chemically synthesized
gtcagtgtgcagggtgcata

SEQ ID NO: 65069 - DNA, 20 bp, Artificial Sequence
  chemically synthesized
tcagtgtgcagggtgcataa

SEQ ID NO: 65070 - DNA, 20 bp, Artificial Sequence
  chemically synthesized
cagtgtgcagggtgcataaa

SEQ ID NO: 65071 - DNA, 20 bp, Artificial Sequence
  chemically synthesized
tgtgcagggtgcataaaggg

SEQ ID NO: 65072 - DNA, 20 bp, Artificial Sequence
  chemically synthesized
tgcagggtgcataaagggca

SEQ ID NO: 65073 - DNA, 20 bp, Artificial Sequence
  chemically synthesized
gcagggtgcataaagggcag

SEQ ID NO: 65074 - DNA, 20 bp, Artificial Sequence
  chemically synthesized
ggtgcataaagggcagaggc

SEQ ID NO: 65075 - DNA, 20 bp, Artificial Sequence
  chemically synthesized
tgcataaagggcagaggccg

SEQ ID NO: 65076 - DNA, 20 bp, Artificial Sequence
  chemically synthesized
gcataaagggcagaggccgg

SEQ ID NO: 65077 - DNA, 20 bp, Artificial Sequence
  chemically synthesized
cataaagggcagaggccgga

SEQ ID NO: 65078 - DNA, 20 bp, Artificial Sequence
  chemically synthesized
ataaagggcagaggccggag

SEQ ID NO: 65079 - DNA, 20 bp, Artificial Sequence
  chemically synthesized
taaagggcagaggccggagg

SEQ ID NO: 65080 - DNA, 20 bp, Artificial Sequence
  chemically synthesized
ggcagaggccggagggggtc

SEQ ID NO: 65081 - DNA, 20 bp, Artificial Sequence
  chemically synthesized
gcagaggccggagggggtcc

SEQ ID NO: 65082 - DNA, 20 bp, Artificial Sequence
  chemically synthesized
ggccggagggggtccaggct

SEQ ID NO: 65083 - DNA, 20 bp, Artificial Sequence
  chemically synthesized
gagggggtccaggctaagtt

SEQ ID NO: 65084 - DNA, 20 bp, Artificial Sequence
  chemically synthesized
ggggtccaggctaagtttag

SEQ ID NO: 65085 - DNA, 20 bp, Artificial Sequence
  chemically synthesized
gggtccaggctaagtttaga

SEQ ID NO: 65086 - DNA, 20 bp, Artificial Sequence
  chemically synthesized
ggctaagtttagaaggctgc

SEQ ID NO: 65087 - DNA, 20 bp, Artificial Sequence
  chemically synthesized
gctaagtttagaaggctgcc

SEQ ID NO: 65088 - DNA, 20 bp, Artificial Sequence
  chemically synthesized
gtttagaaggctgccaggtt

SEQ ID NO: 65089 - DNA, 20 bp, Artificial Sequence
  chemically synthesized
tttagaaggctgccaggtta

SEQ ID NO: 65090 - DNA, 20 bp, Artificial Sequence
  chemically synthesized
gaaggctgccaggttaaggc

SEQ ID NO: 65091 - DNA, 20 bp, Artificial Sequence
  chemically synthesized
ggctgccaggttaaggccag

SEQ ID NO: 65092 - DNA, 20 bp, Artificial Sequence
  chemically synthesized
gccaggttaaggccagtgga

SEQ ID NO: 65093 - DNA, 20 bp, Artificial Sequence
  chemically synthesized
taaggccagtggaaagaatt

SEQ ID NO: 65094 - DNA, 20 bp, Artificial Sequence
  chemically synthesized
ggccagtggaaagaattcgg

SEQ ID NO: 65095 - DNA, 20 bp, Artificial Sequence
  chemically synthesized
gccagtggaaagaattcggt

SEQ ID NO: 65096 - DNA, 20 bp, Artificial Sequence
  chemically synthesized
agtggaaagaattcggtggg

SEQ ID NO: 65097 - DNA, 20 bp, Artificial Sequence
  chemically synthesized
gaaagaattcggtgggcagc

SEQ ID NO: 65098 - DNA, 20 bp, Artificial Sequence
  chemically synthesized
aaagaattcggtgggcagcg

SEQ ID NO: 65099 - DNA, 20 bp, Artificial Sequence
  chemically synthesized
agaattcggtgggcagcgag

SEQ ID NO: 65100 - DNA, 20 bp, Artificial Sequence
  chemically synthesized
ggtgggcagcgaggagtcca

SEQ ID NO: 65101 - DNA, 20 bp, Artificial Sequence
  chemically synthesized
gggcagcgaggagtccacag

SEQ ID NO: 65102 - DNA, 20 bp, Artificial Sequence
  chemically synthesized
ggcagcgaggagtccacagt

SEQ ID NO: 65103 - DNA, 20 bp, Artificial Sequence
  chemically synthesized
agtccacagtaggattgatt

SEQ ID NO: 65104 - DNA, 20 bp, Artificial Sequence
  chemically synthesized
ccacagtaggattgattcag

SEQ ID NO: 65105 - DNA, 20 bp, Artificial Sequence
  chemically synthesized
gattgattcagaagtctcac

SEQ ID NO: 65106 - DNA, 20 bp, Artificial Sequence
  chemically synthesized
gattcagaagtctcactggt

SEQ ID NO: 65107 - DNA, 20 bp, Artificial Sequence
  chemically synthesized
tcagaagtctcactggtcag

SEQ ID NO: 65108 - DNA, 20 bp, Artificial Sequence
  chemically synthesized
cagaagtctcactggtcagc

SEQ ID NO: 65109 - DNA, 20 bp, Artificial Sequence
  chemically synthesized
gaagtctcactggtcagcag

SEQ ID NO: 65110 - DNA, 20 bp, Artificial Sequence
  chemically synthesized
ctcactggtcagcaggagac

SEQ ID NO: 65111 - DNA, 20 bp, Artificial Sequence
  chemically synthesized
tcactggtcagcaggagaca

SEQ ID NO: 65112 - DNA, 20 bp, Artificial Sequence
  chemically synthesized
ctggtcagcaggagacaagg

SEQ ID NO: 65113 - DNA, 20 bp, Artificial Sequence
  chemically synthesized
agcaggagacaaggtggacc

SEQ ID NO: 65114 - DNA, 20 bp, Artificial Sequence
  chemically synthesized
gcaggagacaaggtggaccc

SEQ ID NO: 65115 - DNA, 20 bp, Artificial Sequence
  chemically synthesized
tggacccaggaaacactgaa

SEQ ID NO: 65116 - DNA, 20 bp, Artificial Sequence
  chemically synthesized
ggacccaggaaacactgaaa

SEQ ID NO: 65117 - DNA, 20 bp, Artificial Sequence
  chemically synthesized
cccaggaaacactgaaaagg

SEQ ID NO: 65118 - DNA, 20 bp, Artificial Sequence
  chemically synthesized
ccaggaaacactgaaaaggt

SEQ ID NO: 65119 - DNA, 20 bp, Artificial Sequence
  chemically synthesized
aaacactgaaaaggtgggcc

SEQ ID NO: 65120 - DNA, 20 bp, Artificial Sequence
  chemically synthesized
cactgaaaaggtgggcccgg

SEQ ID NO: 65121 - DNA, 20 bp, Artificial Sequence
  chemically synthesized
aaggtgggcccggcagaact

SEQ ID NO: 65122 - DNA, 20 bp, Artificial Sequence
  chemically synthesized
ggtgggcccggcagaacttg

SEQ ID NO: 65123 - DNA, 20 bp, Artificial Sequence
  chemically synthesized
gcccggcagaacttggagtc

SEQ ID NO: 65124 - DNA, 20 bp, Artificial Sequence
  chemically synthesized
ttggagtctggcatcccacg

SEQ ID NO: 65125 - DNA, 20 bp, Artificial Sequence
  chemically synthesized
tggagtctggcatcccacgc

SEQ ID NO: 65126 - DNA, 20 bp, Artificial Sequence
  chemically synthesized
ggagtctggcatcccacgca

SEQ ID NO: 65127 - DNA, 20 bp, Artificial Sequence
  chemically synthesized
tctggcatcccacgcagggt

SEQ ID NO: 65128 - DNA, 20 bp, Artificial Sequence
  chemically synthesized
tggcatcccacgcagggtga

SEQ ID NO: 65129 - DNA, 20 bp, Artificial Sequence
  chemically synthesized
ggcatcccacgcagggtgag

SEQ ID NO: 65130 - DNA, 20 bp, Artificial Sequence
  chemically synthesized
atcccacgcagggtgagagg

SEQ ID NO: 65131 - DNA, 20 bp, Artificial Sequence
  chemically synthesized
tcccacgcagggtgagaggc

SEQ ID NO: 65132 - DNA, 20 bp, Artificial Sequence
  chemically synthesized
ccacgcagggtgagaggcgg

SEQ ID NO: 65133 - DNA, 20 bp, Artificial Sequence
  chemically synthesized
acgcagggtgagaggcggga

SEQ ID NO: 65134 - DNA, 20 bp, Artificial Sequence
  chemically synthesized
cgcagggtgagaggcgggag

SEQ ID NO: 65135 - DNA, 20 bp, Artificial Sequence
  chemically synthesized
cagggtgagaggcgggagag

SEQ ID NO: 65136 - DNA, 20 bp, Artificial Sequence
  chemically synthesized
agggtgagaggcgggagagg

SEQ ID NO: 65137 - DNA, 20 bp, Artificial Sequence
  chemically synthesized
ggtgagaggcgggagaggag

SEQ ID NO: 65138 - DNA, 20 bp, Artificial Sequence
  chemically synthesized
ggcgggagaggaggagcccc

SEQ ID NO: 65139 - DNA, 20 bp, Artificial Sequence
  chemically synthesized
gcgggagaggaggagcccct

SEQ ID NO: 65140 - DNA, 20 bp, Artificial Sequence
  chemically synthesized
cgggagaggaggagccccta

SEQ ID NO: 65141 - DNA, 20 bp, Artificial Sequence
  chemically synthesized
aggaggagcccctagggcgc

SEQ ID NO: 65142 - DNA, 20 bp, Artificial Sequence
  chemically synthesized
tagggcgccggcctgccttc

SEQ ID NO: 65143 - DNA, 20 bp, Artificial Sequence
  chemically synthesized
cgccggcctgccttccagcc

SEQ ID NO: 65144 - DNA, 20 bp, Artificial Sequence
  chemically synthesized
ggcctgccttccagcccagt

SEQ ID NO: 65145 - DNA, 20 bp, Artificial Sequence
  chemically synthesized
gcctgccttccagcccagtt

SEQ ID NO: 65146 - DNA, 20 bp, Artificial Sequence
  chemically synthesized
cttccagcccagttaggatt

SEQ ID NO: 65147 - DNA, 20 bp, Artificial Sequence
  chemically synthesized
ttccagcccagttaggattt

SEQ ID NO: 65148 - DNA, 20 bp, Artificial Sequence
  chemically synthesized
ccagcccagttaggatttgg

SEQ ID NO: 65149 - DNA, 20 bp, Artificial Sequence
  chemically synthesized
gcgcgtaatctgacgctgtt

SEQ ID NO: 65150 - DNA, 20 bp, Artificial Sequence
  chemically synthesized
cgcgtaatctgacgctgttt

SEQ ID NO: 65151 - DNA, 20 bp, Artificial Sequence
  chemically synthesized
gcgtaatctgacgctgtttg

SEQ ID NO: 65152 - DNA, 20 bp, Artificial Sequence
  chemically synthesized
gtaatctgacgctgtttggg

SEQ ID NO: 65153 - DNA, 20 bp, Artificial Sequence
  chemically synthesized
taatctgacgctgtttgggg

SEQ ID NO: 65154 - DNA, 20 bp, Artificial Sequence
  chemically synthesized
aatctgacgctgtttgggga

SEQ ID NO: 65155 - DNA, 20 bp, Artificial Sequence
  chemically synthesized
tgacgctgtttggggagggc

SEQ ID NO: 65156 - DNA, 20 bp, Artificial Sequence
  chemically synthesized
gacgctgtttggggagggcg

SEQ ID NO: 65157 - DNA, 20 bp, Artificial Sequence
  chemically synthesized
gaggccgaaacctgatcctc

SEQ ID NO: 65158 - DNA, 20 bp, Artificial Sequence
  chemically synthesized
cgaaacctgatcctccagtc

SEQ ID NO: 65159 - DNA, 20 bp, Artificial Sequence
  chemically synthesized
gaaacctgatcctccagtcc

SEQ ID NO: 65160 - DNA, 20 bp, Artificial Sequence
  chemically synthesized
aaacctgatcctccagtccg

SEQ ID NO: 65161 - DNA, 20 bp, Artificial Sequence
  chemically synthesized
aacctgatcctccagtccgg

SEQ ID NO: 65162 - DNA, 20 bp, Artificial Sequence
  chemically synthesized
gggttccgttaatgtttaat

SEQ ID NO: 65163 - DNA, 20 bp, Artificial Sequence
  chemically synthesized
tccgttaatgtttaatcaga

SEQ ID NO: 65164 - DNA, 20 bp, Artificial Sequence
  chemically synthesized
ccgttaatgtttaatcagat

SEQ ID NO: 65165 - DNA, 20 bp, Artificial Sequence
  chemically synthesized
aatcagataggatcgtccga

SEQ ID NO: 65166 - DNA, 20 bp, Artificial Sequence
  chemically synthesized
atcagataggatcgtccgat

SEQ ID NO: 65167 - DNA, 20 bp, Artificial Sequence
  chemically synthesized
tcagataggatcgtccgatg

SEQ ID NO: 65168 - DNA, 20 bp, Artificial Sequence
  chemically synthesized
aggatcgtccgatggggctc

SEQ ID NO: 65169 - DNA, 20 bp, Artificial Sequence
  chemically synthesized
atcgtccgatggggctctgg

SEQ ID NO: 65170 - DNA, 20 bp, Artificial Sequence
  chemically synthesized
gtggcgtgatctgcgcgccc

SEQ ID NO: 65171 - DNA, 20 bp, Artificial Sequence
  chemically synthesized
tggcgtgatctgcgcgcccc

SEQ ID NO: 65172 - DNA, 20 bp, Artificial Sequence
  chemically synthesized
atctgcgcgccccaggcgtc

SEQ ID NO: 65173 - DNA, 20 bp, Artificial Sequence
  chemically synthesized
ggcgtcaagcacccacaccc

SEQ ID NO: 65174 - DNA, 20 bp, Artificial Sequence
  chemically synthesized
gtcaagcacccacaccctag

SEQ ID NO: 65175 - DNA, 20 bp, Artificial Sequence
  chemically synthesized
tcaagcacccacaccctaga

SEQ ID NO: 65176 - DNA, 20 bp, Artificial Sequence
  chemically synthesized
cacaccctagaaggtttccg

SEQ ID NO: 65177 - DNA, 20 bp, Artificial Sequence
  chemically synthesized
aaggtttccgcagcgacgtc

SEQ ID NO: 65178 - DNA, 20 bp, Artificial Sequence
  chemically synthesized
aggtttccgcagcgacgtcg

SEQ ID NO: 65179 - DNA, 20 bp, Artificial Sequence
  chemically synthesized
cagcgacgtcgaggcgctca

SEQ ID NO: 65180 - DNA, 20 bp, Artificial Sequence
  chemically synthesized
cgtcgaggcgctcatggttg

SEQ ID NO: 65181 - DNA, 20 bp, Artificial Sequence
  chemically synthesized
gtcgaggcgctcatggttgc

SEQ ID NO: 65182 - DNA, 20 bp, Artificial Sequence
  chemically synthesized
gaggcgctcatggttgcagg

SEQ ID NO: 65183 - DNA, 20 bp, Artificial Sequence
  chemically synthesized
aggcgctcatggttgcaggc

SEQ ID NO: 65184 - DNA, 20 bp, Artificial Sequence
  chemically synthesized
tgcaggcgggcgccgccgtt

SEQ ID NO: 65185 - DNA, 20 bp, Artificial Sequence
  chemically synthesized
gcgggcgccgccgttcagtt

SEQ ID NO: 65186 - DNA, 20 bp, Artificial Sequence
  chemically synthesized
cgggcgccgccgttcagttc

SEQ ID NO: 65187 - DNA, 20 bp, Artificial Sequence
  chemically synthesized
gggcgccgccgttcagttca

SEQ ID NO: 65188 - DNA, 20 bp, Artificial Sequence
  chemically synthesized
cgccgttcagttcagggtct

SEQ ID NO: 65189 - DNA, 20 bp, Artificial Sequence
  chemically synthesized
ttcagttcagggtctgagcc

SEQ ID NO: 65190 - DNA, 20 bp, Artificial Sequence
  chemically synthesized
cagttcagggtctgagcctg

SEQ ID NO: 65191 - DNA, 20 bp, Artificial Sequence
  chemically synthesized
agttcagggtctgagcctgg

SEQ ID NO: 65192 - DNA, 20 bp, Artificial Sequence
  chemically synthesized
ttcagggtctgagcctggag

SEQ ID NO: 65193 - DNA, 20 bp, Artificial Sequence
  chemically synthesized
gggtctgagcctggaggagt

SEQ ID NO: 65194 - DNA, 20 bp, Artificial Sequence
  chemically synthesized
ctgagcctggaggagtgagc

SEQ ID NO: 65195 - DNA, 20 bp, Artificial Sequence
  chemically synthesized
tgagcctggaggagtgagcc

SEQ ID NO: 65196 - DNA, 20 bp, Artificial Sequence
  chemically synthesized
gcctggaggagtgagccagg

SEQ ID NO: 65197 - DNA, 20 bp, Artificial Sequence
  chemically synthesized
ggaggagtgagccaggcagt

SEQ ID NO: 65198 - DNA, 20 bp, Artificial Sequence
  chemically synthesized
agtgagccaggcagtgagac

SEQ ID NO: 65199 - DNA, 20 bp, Artificial Sequence
  chemically synthesized
gccaggcagtgagactggct

SEQ ID NO: 65200 - DNA, 20 bp, Artificial Sequence
  chemically synthesized
ccaggcagtgagactggctc

SEQ ID NO: 65201 - DNA, 20 bp, Artificial Sequence
  chemically synthesized
ggcagtgagactggctcggg

SEQ ID NO: 65202 - DNA, 20 bp, Artificial Sequence
  chemically synthesized
gcagtgagactggctcgggc

SEQ ID NO: 65203 - DNA, 20 bp, Artificial Sequence
  chemically synthesized
tgagactggctcgggcgggc

SEQ ID NO: 65204 - DNA, 20 bp, Artificial Sequence
  chemically synthesized
gagactggctcgggcgggcc

SEQ ID NO: 65205 - DNA, 20 bp, Artificial Sequence
  chemically synthesized
cgggccgggacgcgtcgttg

SEQ ID NO: 65206 - DNA, 20 bp, Artificial Sequence
  chemically synthesized
gccgggacgcgtcgttgcag

SEQ ID NO: 65207 - DNA, 20 bp, Artificial Sequence
  chemically synthesized
gggacgcgtcgttgcagcag

SEQ ID NO: 65208 - DNA, 20 bp, Artificial Sequence
  chemically synthesized
gtcgttgcagcagcggctcc

SEQ ID NO: 65209 - DNA, 20 bp, Artificial Sequence
  chemically synthesized
cagcagcggctcccagctcc

SEQ ID NO: 65210 - DNA, 20 bp, Artificial Sequence
  chemically synthesized
agcggctcccagctcccagc

SEQ ID NO: 65211 - DNA, 20 bp, Artificial Sequence
  chemically synthesized
gcggctcccagctcccagcc

SEQ ID NO: 65212 - DNA, 20 bp, Artificial Sequence
  chemically synthesized
cgcgccctgctcctgaactt

SEQ ID NO: 65213 - DNA, 20 bp, Artificial Sequence
  chemically synthesized
cctgaacttcagctcctgca

SEQ ID NO: 65214 - DNA, 20 bp, Artificial Sequence
  chemically synthesized
tgcacagtcctccccaccgc

SEQ ID NO: 65215 - DNA, 20 bp, Artificial Sequence
  chemically synthesized
gcacagtcctccccaccgca

SEQ ID NO: 65216 - DNA, 20 bp, Artificial Sequence
  chemically synthesized
tcctccccaccgcaaggctc

SEQ ID NO: 65217 - DNA, 20 bp, Artificial Sequence
  chemically synthesized
cctccccaccgcaaggctca

SEQ ID NO: 65218 - DNA, 20 bp, Artificial Sequence
  chemically synthesized
cgcaaggctcaaggcgccgc

SEQ ID NO: 65219 - DNA, 20 bp, Artificial Sequence
  chemically synthesized
ggctcaaggcgccgccggcg

SEQ ID NO: 65220 - DNA, 20 bp, Artificial Sequence
  chemically synthesized
ccgccggcgtggaccgcgca

SEQ ID NO: 65221 - DNA, 20 bp, Artificial Sequence
  chemically synthesized
cgtggaccgcgcacggcctc

SEQ ID NO: 65222 - DNA, 20 bp, Artificial Sequence
  chemically synthesized
gtggaccgcgcacggcctct

SEQ ID NO: 65223 - DNA, 20 bp, Artificial Sequence
  chemically synthesized
cggcctctaggtctcctcgc

SEQ ID NO: 65224 - DNA, 20 bp, Artificial Sequence
  chemically synthesized
ggcctctaggtctcctcgcc

SEQ ID NO: 65225 - DNA, 20 bp, Artificial Sequence
  chemically synthesized
tctaggtctcctcgccagga

SEQ ID NO: 65226 - DNA, 20 bp, Artificial Sequence
  chemically synthesized
caggacagcaacctctcccc

SEQ ID NO: 65227 - DNA, 20 bp, Artificial Sequence
  chemically synthesized
aacctctcccctggccctca

SEQ ID NO: 65228 - DNA, 20 bp, Artificial Sequence
  chemically synthesized
acctctcccctggccctcat

SEQ ID NO: 65229 - DNA, 20 bp, Artificial Sequence
  chemically synthesized
ctggccctcatgggcaccgt

SEQ ID NO: 65230 - DNA, 20 bp, Artificial Sequence
  chemically synthesized
ctcatgggcaccgtcagctc

SEQ ID NO: 65231 - DNA, 20 bp, Artificial Sequence
  chemically synthesized
tcatgggcaccgtcagctcc

SEQ ID NO: 65232 - DNA, 20 bp, Artificial Sequence
  chemically synthesized
tgggcaccgtcagctccagg

SEQ ID NO: 65233 - DNA, 20 bp, Artificial Sequence
  chemically synthesized
ccgtcagctccaggcggtcc

SEQ ID NO: 65234 - DNA, 20 bp, Artificial Sequence
  chemically synthesized
tcagctccaggcggtcctgg

SEQ ID NO: 65235 - DNA, 20 bp, Artificial Sequence
  chemically synthesized
gctgctgctgctgctgctcc

SEQ ID NO: 65236 - DNA, 20 bp, Artificial Sequence
  chemically synthesized
ctgctgctgctgctgctcct

SEQ ID NO: 65237 - DNA, 20 bp, Artificial Sequence
  chemically synthesized
gctgctgctcctgggtcccg

SEQ ID NO: 65238 - DNA, 20 bp, Artificial Sequence
  chemically synthesized
ctgctgctcctgggtcccgc

SEQ ID NO: 65239 - DNA, 20 bp, Artificial Sequence
  chemically synthesized
gtcccgcgggcgcccgtgcg

SEQ ID NO: 65240 - DNA, 20 bp, Artificial Sequence
  chemically synthesized
tcccgcgggcgcccgtgcgc

SEQ ID NO: 65241 - DNA, 20 bp, Artificial Sequence
  chemically synthesized
ccgcgggcgcccgtgcgcag

SEQ ID NO: 65242 - DNA, 20 bp, Artificial Sequence
  chemically synthesized
cgcgggcgcccgtgcgcagg

SEQ ID NO: 65243 - DNA, 20 bp, Artificial Sequence
  chemically synthesized
gcgcccgtgcgcaggaggac

SEQ ID NO: 65244 - DNA, 20 bp, Artificial Sequence
  chemically synthesized
cgcccgtgcgcaggaggacg

SEQ ID NO: 65245 - DNA, 20 bp, Artificial Sequence
  chemically synthesized
cgtgcgcaggaggacgagga

SEQ ID NO: 65246 - DNA, 20 bp, Artificial Sequence
  chemically synthesized
aggacgaggacggcgactac

SEQ ID NO: 65247 - DNA, 20 bp, Artificial Sequence
  chemically synthesized
ggacgaggacggcgactacg

SEQ ID NO: 65248 - DNA, 20 bp, Artificial Sequence
  chemically synthesized
acgaggacggcgactacgag

SEQ ID NO: 65249 - DNA, 20 bp, Artificial Sequence
  chemically synthesized
ggacggcgactacgaggagc

SEQ ID NO: 65250 - DNA, 20 bp, Artificial Sequence
  chemically synthesized
cgactacgaggagctggtgc

SEQ ID NO: 65251 - DNA, 20 bp, Artificial Sequence
  chemically synthesized
tggtgctagccttgcgttcc

SEQ ID NO: 65252 - DNA, 20 bp, Artificial Sequence
  chemically synthesized
ggtgctagccttgcgttccg

SEQ ID NO: 65253 - DNA, 20 bp, Artificial Sequence
  chemically synthesized
tgctagccttgcgttccgag

SEQ ID NO: 65254 - DNA, 20 bp, Artificial Sequence
  chemically synthesized
gctagccttgcgttccgagg

SEQ ID NO: 65255 - DNA, 20 bp, Artificial Sequence
  chemically synthesized
gccttgcgttccgaggagga

SEQ ID NO: 65256 - DNA, 20 bp, Artificial Sequence
  chemically synthesized
gcgttccgaggaggacggcc

SEQ ID NO: 65257 - DNA, 20 bp, Artificial Sequence
  chemically synthesized
cgaggaggacggcctggccg

SEQ ID NO: 65258 - DNA, 20 bp, Artificial Sequence
  chemically synthesized
acggcctggccgaagcaccc

SEQ ID NO: 65259 - DNA, 20 bp, Artificial Sequence
  chemically synthesized
ctggccgaagcacccgagca

SEQ ID NO: 65260 - DNA, 20 bp, Artificial Sequence
  chemically synthesized
agcacccgagcacggaacca

SEQ ID NO: 65261 - DNA, 20 bp, Artificial Sequence
  chemically synthesized
ccaccttccaccgctgcgcc

SEQ ID NO: 65262 - DNA, 20 bp, Artificial Sequence
  chemically synthesized
caccttccaccgctgcgcca

SEQ ID NO: 65263 - DNA, 20 bp, Artificial Sequence
  chemically synthesized
tccaccgctgcgccaaggtg

SEQ ID NO: 65264 - DNA, 20 bp, Artificial Sequence
  chemically synthesized
ccaccgctgcgccaaggtgc

SEQ ID NO: 65265 - DNA, 20 bp, Artificial Sequence
  chemically synthesized
gctgcgccaaggtgcgggtg

SEQ ID NO: 65266 - DNA, 20 bp, Artificial Sequence
  chemically synthesized
ctgcgccaaggtgcgggtgt

SEQ ID NO: 65267 - DNA, 20 bp, Artificial Sequence
  chemically synthesized
tgcgccaaggtgcgggtgta

SEQ ID NO: 65268 - DNA, 20 bp, Artificial Sequence
  chemically synthesized
ccaaggtgcgggtgtaggga

SEQ ID NO: 65269 - DNA, 20 bp, Artificial Sequence
  chemically synthesized
caaggtgcgggtgtagggat

SEQ ID NO: 65270 - DNA, 20 bp, Artificial Sequence
  chemically synthesized
aggtgcgggtgtagggatgg

SEQ ID NO: 65271 - DNA, 20 bp, Artificial Sequence
  chemically synthesized
ggtgcgggtgtagggatggg

SEQ ID NO: 65272 - DNA, 20 bp, Artificial Sequence
  chemically synthesized
cgggtgtagggatgggaggc

SEQ ID NO: 65273 - DNA, 20 bp, Artificial Sequence
  chemically synthesized
gggtgtagggatgggaggcc

SEQ ID NO: 65274 - DNA, 20 bp, Artificial Sequence
  chemically synthesized
ggtgtagggatgggaggccg

SEQ ID NO: 65275 - DNA, 20 bp, Artificial Sequence
  chemically synthesized
gggaggccggggcgaacccg

SEQ ID NO: 65276 - DNA, 20 bp, Artificial Sequence
  chemically synthesized
ggccggggcgaacccgcagc

SEQ ID NO: 65277 - DNA, 20 bp, Artificial Sequence
  chemically synthesized
gccggggcgaacccgcagcc

SEQ ID NO: 65278 - DNA, 20 bp, Artificial Sequence
  chemically synthesized
gggcgaacccgcagccggga

SEQ ID NO: 65279 - DNA, 20 bp, Artificial Sequence
  chemically synthesized
aacccgcagccgggacggtg

SEQ ID NO: 65280 - DNA, 20 bp, Artificial Sequence
  chemically synthesized
ggtgcggtgctgtttcctct

SEQ ID NO: 65281 - DNA, 20 bp, Artificial Sequence
  chemically synthesized
gtgcggtgctgtttcctctc

SEQ ID NO: 65282 - DNA, 20 bp, Artificial Sequence
  chemically synthesized
tgctgtttcctctcgggcct

SEQ ID NO: 65283 - DNA, 20 bp, Artificial Sequence
  chemically synthesized
gcctcagtttccccccatgt

SEQ ID NO: 65284 - DNA, 20 bp, Artificial Sequence
  chemically synthesized
ctcagtttccccccatgtaa

SEQ ID NO: 65285 - DNA, 20 bp, Artificial Sequence
  chemically synthesized
cagtttccccccatgtaaga

SEQ ID NO: 65286 - DNA, 20 bp, Artificial Sequence
  chemically synthesized
agtttccccccatgtaagag

SEQ ID NO: 65287 - DNA, 20 bp, Artificial Sequence
  chemically synthesized
ttccccccatgtaagagagg

SEQ ID NO: 65288 - DNA, 20 bp, Artificial Sequence
  chemically synthesized
cccccatgtaagagaggaag

SEQ ID NO: 65289 - DNA, 20 bp, Artificial Sequence
  chemically synthesized
cccatgtaagagaggaagtg

SEQ ID NO: 65290 - DNA, 20 bp, Artificial Sequence
  chemically synthesized
gtaagagaggaagtggagtg

SEQ ID NO: 65291 - DNA, 20 bp, Artificial Sequence
  chemically synthesized
taagagaggaagtggagtgc

SEQ ID NO: 65292 - DNA, 20 bp, Artificial Sequence
  chemically synthesized
gaagtggagtgcaggtcgcc

SEQ ID NO: 65293 - DNA, 20 bp, Artificial Sequence
  chemically synthesized
aagtggagtgcaggtcgccg

SEQ ID NO: 65294 - DNA, 20 bp, Artificial Sequence
  chemically synthesized
agtggagtgcaggtcgccga

SEQ ID NO: 65295 - DNA, 20 bp, Artificial Sequence
  chemically synthesized
gtcgccgagggctcttcgct

SEQ ID NO: 65296 - DNA, 20 bp, Artificial Sequence
  chemically synthesized
ctcttcgcttggcacgatct

SEQ ID NO: 65297 - DNA, 20 bp, Artificial Sequence
  chemically synthesized
tcttcgcttggcacgatctt

SEQ ID NO: 65298 - DNA, 20 bp, Artificial Sequence
  chemically synthesized
cttcgcttggcacgatcttg

SEQ ID NO: 65299 - DNA, 20 bp, Artificial Sequence
  chemically synthesized
tggcacgatcttggggactg

SEQ ID NO: 65300 - DNA, 20 bp, Artificial Sequence
  chemically synthesized
ggcacgatcttggggactgc

SEQ ID NO: 65301 - DNA, 20 bp, Artificial Sequence
  chemically synthesized
cgatcttggggactgcaggc

SEQ ID NO: 65302 - DNA, 20 bp, Artificial Sequence
  chemically synthesized
gatcttggggactgcaggca

SEQ ID NO: 65303 - DNA, 20 bp, Artificial Sequence
  chemically synthesized
cttggggactgcaggcaagg

SEQ ID NO: 65304 - DNA, 20 bp, Artificial Sequence
  chemically synthesized
ggggactgcaggcaaggcgg

SEQ ID NO: 65305 - DNA, 20 bp, Artificial Sequence
  chemically synthesized
gggactgcaggcaaggcggc

SEQ ID NO: 65306 - DNA, 20 bp, Artificial Sequence
  chemically synthesized
ggactgcaggcaaggcggcg

SEQ ID NO: 65307 - DNA, 20 bp, Artificial Sequence
  chemically synthesized
gactgcaggcaaggcggcgg

SEQ ID NO: 65308 - DNA, 20 bp, Artificial Sequence
  chemically synthesized
ctgcaggcaaggcggcgggg

SEQ ID NO: 65309 - DNA, 20 bp, Artificial Sequence
  chemically synthesized
tgcaggcaaggcggcggggg

SEQ ID NO: 65310 - DNA, 20 bp, Artificial Sequence
  chemically synthesized
ggcaaggcggcgggggagga

SEQ ID NO: 65311 - DNA, 20 bp, Artificial Sequence
  chemically synthesized
gcaaggcggcgggggaggac

SEQ ID NO: 65312 - DNA, 20 bp, Artificial Sequence
  chemically synthesized
aggcggcgggggaggacggg

SEQ ID NO: 65313 - DNA, 20 bp, Artificial Sequence
  chemically synthesized
cggcgggggaggacgggtag

SEQ ID NO: 65314 - DNA, 20 bp, Artificial Sequence
  chemically synthesized
ggcgggggaggacgggtagt

SEQ ID NO: 65315 - DNA, 20 bp, Artificial Sequence
  chemically synthesized
gcgggggaggacgggtagtg

SEQ ID NO: 65316 - DNA, 20 bp, Artificial Sequence
  chemically synthesized
gggggaggacgggtagtggg

SEQ ID NO: 65317 - DNA, 20 bp, Artificial Sequence
  chemically synthesized
aggacgggtagtggggagca

SEQ ID NO: 65318 - DNA, 20 bp, Artificial Sequence
  chemically synthesized
acgggtagtggggagcacgg

SEQ ID NO: 65319 - DNA, 20 bp, Artificial Sequence
  chemically synthesized
gggtagtggggagcacggtg

SEQ ID NO: 65320 - DNA, 20 bp, Artificial Sequence
  chemically synthesized
gtagtggggagcacggtgga

SEQ ID NO: 65321 - DNA, 20 bp, Artificial Sequence
  chemically synthesized
gtggggagcacggtggagag

SEQ ID NO: 65322 - DNA, 20 bp, Artificial Sequence
  chemically synthesized
tggggagcacggtggagagc

SEQ ID NO: 65323 - DNA, 20 bp, Artificial Sequence
  chemically synthesized
ggggagcacggtggagagcg

SEQ ID NO: 65324 - DNA, 20 bp, Artificial Sequence
  chemically synthesized
agcacggtggagagcgggga

SEQ ID NO: 65325 - DNA, 20 bp, Artificial Sequence
  chemically synthesized
cggtggagagcggggacggc

SEQ ID NO: 65326 - DNA, 20 bp, Artificial Sequence
  chemically synthesized
agcggggacggccggctctt

SEQ ID NO: 65327 - DNA, 20 bp, Artificial Sequence
  chemically synthesized
gcggggacggccggctcttt

SEQ ID NO: 65328 - DNA, 20 bp, Artificial Sequence
  chemically synthesized
cggggacggccggctctttg

SEQ ID NO: 65329 - DNA, 20 bp, Artificial Sequence
  chemically synthesized
ccggctctttggggacttgc

SEQ ID NO: 65330 - DNA, 20 bp, Artificial Sequence
  chemically synthesized
cggctctttggggacttgct

SEQ ID NO: 65331 - DNA, 20 bp, Artificial Sequence
  chemically synthesized
ggctctttggggacttgctg

SEQ ID NO: 65332 - DNA, 20 bp, Artificial Sequence
  chemically synthesized
tggggacttgctggggcgtg

SEQ ID NO: 65333 - DNA, 20 bp, Artificial Sequence
  chemically synthesized
gggcgtgcggctgcgctatt

SEQ ID NO: 65334 - DNA, 20 bp, Artificial Sequence
  chemically synthesized
cgtgcggctgcgctattcag

SEQ ID NO: 65335 - DNA, 20 bp, Artificial Sequence
  chemically synthesized
gtgcggctgcgctattcagt

SEQ ID NO: 65336 - DNA, 20 bp, Artificial Sequence
  chemically synthesized
cggctgcgctattcagtggg

SEQ ID NO: 65337 - DNA, 20 bp, Artificial Sequence
  chemically synthesized
ggctgcgctattcagtggga

SEQ ID NO: 65338 - DNA, 20 bp, Artificial Sequence
  chemically synthesized
ctattcagtgggaaggttcg

SEQ ID NO: 65339 - DNA, 20 bp, Artificial Sequence
  chemically synthesized
tattcagtgggaaggttcgc

SEQ ID NO: 65340 - DNA, 20 bp, Artificial Sequence
  chemically synthesized
attcagtgggaaggttcgcg

SEQ ID NO: 65341 - DNA, 20 bp, Artificial Sequence
  chemically synthesized
agtgggaaggttcgcggggt

SEQ ID NO: 65342 - DNA, 20 bp, Artificial Sequence
  chemically synthesized
gtgggaaggttcgcggggtt

SEQ ID NO: 65343 - DNA, 20 bp, Artificial Sequence
  chemically synthesized
gggaaggttcgcggggttgg

SEQ ID NO: 65344 - DNA, 20 bp, Artificial Sequence
  chemically synthesized
gttcgcggggttgggagacc

SEQ ID NO: 65345 - DNA, 20 bp, Artificial Sequence
  chemically synthesized
tcgcggggttgggagacccg

SEQ ID NO: 65346 - DNA, 20 bp, Artificial Sequence
  chemically synthesized
cgcggggttgggagacccgg

SEQ ID NO: 65347 - DNA, 20 bp, Artificial Sequence
  chemically synthesized
ggttgggagacccggaggcc

SEQ ID NO: 65348 - DNA, 20 bp, Artificial Sequence
  chemically synthesized
gttgggagacccggaggccg

SEQ ID NO: 65349 - DNA, 20 bp, Artificial Sequence
  chemically synthesized
gggagacccggaggccgagg

SEQ ID NO: 65350 - DNA, 20 bp, Artificial Sequence
  chemically synthesized
ggagacccggaggccgagga

SEQ ID NO: 65351 - DNA, 20 bp, Artificial Sequence
  chemically synthesized
gagacccggaggccgaggaa

SEQ ID NO: 65352 - DNA, 20 bp, Artificial Sequence
  chemically synthesized
cccggaggccgaggaagggc

SEQ ID NO: 65353 - DNA, 20 bp, Artificial Sequence
  chemically synthesized
ggaggccgaggaagggcgag

SEQ ID NO: 65354 - DNA, 20 bp, Artificial Sequence
  chemically synthesized
aggccgaggaagggcgagca

SEQ ID NO: 65355 - DNA, 20 bp, Artificial Sequence
  chemically synthesized
aagggcgagcagagcactgc

SEQ ID NO: 65356 - DNA, 20 bp, Artificial Sequence
  chemically synthesized
agggcgagcagagcactgcc

SEQ ID NO: 65357 - DNA, 20 bp, Artificial Sequence
  chemically synthesized
cactgccaggatatcctgcc

SEQ ID NO: 65358 - DNA, 20 bp, Artificial Sequence
  chemically synthesized
gatatcctgcccagatttcc

SEQ ID NO: 65359 - DNA, 20 bp, Artificial Sequence
  chemically synthesized
tcccagtttctgcctcgccg

SEQ ID NO: 65360 - DNA, 20 bp, Artificial Sequence
  chemically synthesized
gtttctgcctcgccgcggca

SEQ ID NO: 65361 - DNA, 20 bp, Artificial Sequence
  chemically synthesized
tttctgcctcgccgcggcac

SEQ ID NO: 65362 - DNA, 20 bp, Artificial Sequence
  chemically synthesized
ctgcctcgccgcggcacagg

SEQ ID NO: 65363 - DNA, 20 bp, Artificial Sequence
  chemically synthesized
tgcctcgccgcggcacaggt

SEQ ID NO: 65364 - DNA, 20 bp, Artificial Sequence
  chemically synthesized
cgccgcggcacaggtgggtg

SEQ ID NO: 65365 - DNA, 20 bp, Artificial Sequence
  chemically synthesized
gccgcggcacaggtgggtga

SEQ ID NO: 65366 - DNA, 20 bp, Artificial Sequence
  chemically synthesized
cgcggcacaggtgggtgaag

SEQ ID NO: 65367 - DNA, 20 bp, Artificial Sequence
  chemically synthesized
tgggtgaaggagtgaatgcc

SEQ ID NO: 65368 - DNA, 20 bp, Artificial Sequence
  chemically synthesized
agtgaatgcctggaacgtac

SEQ ID NO: 65369 - DNA, 20 bp, Artificial Sequence
  chemically synthesized
gtgaatgcctggaacgtact

SEQ ID NO: 65370 - DNA, 20 bp, Artificial Sequence
  chemically synthesized
gaacgtactgggaactgcac

SEQ ID NO: 65371 - DNA, 20 bp, Artificial Sequence
  chemically synthesized
aacgtactgggaactgcacc

SEQ ID NO: 65372 - DNA, 20 bp, Artificial Sequence
  chemically synthesized
actgggaactgcaccaggca

SEQ ID NO: 65373 - DNA, 20 bp, Artificial Sequence
  chemically synthesized
tgggaactgcaccaggcaca

SEQ ID NO: 65374 - DNA, 20 bp, Artificial Sequence
  chemically synthesized
aactgcaccaggcacagaga

SEQ ID NO: 65375 - DNA, 20 bp, Artificial Sequence
  chemically synthesized
tgcaccaggcacagagaaag

SEQ ID NO: 65376 - DNA, 20 bp, Artificial Sequence
  chemically synthesized
gcaccaggcacagagaaagc

SEQ ID NO: 65377 - DNA, 20 bp, Artificial Sequence
  chemically synthesized
agaaagcgggcttgccatta

SEQ ID NO: 65378 - DNA, 20 bp, Artificial Sequence
  chemically synthesized
aagcgggcttgccattatag

SEQ ID NO: 65379 - DNA, 20 bp, Artificial Sequence
  chemically synthesized
agcgggcttgccattatagt

SEQ ID NO: 65380 - DNA, 20 bp, Artificial Sequence
  chemically synthesized
cattatagtgggttccgatt

SEQ ID NO: 65381 - DNA, 20 bp, Artificial Sequence
  chemically synthesized
tagtgggttccgatttggtt

SEQ ID NO: 65382 - DNA, 20 bp, Artificial Sequence
  chemically synthesized
ccgatttggtttggaaaaca

SEQ ID NO: 65383 - DNA, 20 bp, Artificial Sequence
  chemically synthesized
cgatttggtttggaaaacat

SEQ ID NO: 65384 - DNA, 20 bp, Artificial Sequence
  chemically synthesized
tttggtttggaaaacatggg

SEQ ID NO: 65385 - DNA, 20 bp, Artificial Sequence
  chemically synthesized
ggtttggaaaacatgggcag

SEQ ID NO: 65386 - DNA, 20 bp, Artificial Sequence
  chemically synthesized
tttggaaaacatgggcagcg

SEQ ID NO: 65387 - DNA, 20 bp, Artificial Sequence
  chemically synthesized
ttggaaaacatgggcagcgg

SEQ ID NO: 65388 - DNA, 20 bp, Artificial Sequence
  chemically synthesized
tggaaaacatgggcagcgga

SEQ ID NO: 65389 - DNA, 20 bp, Artificial Sequence
  chemically synthesized
aaaacatgggcagcggaggg

SEQ ID NO: 65390 - DNA, 20 bp, Artificial Sequence
  chemically synthesized
aacatgggcagcggagggtg

SEQ ID NO: 65391 - DNA, 20 bp, Artificial Sequence
  chemically synthesized
acatgggcagcggagggtgg

SEQ ID NO: 65392 - DNA, 20 bp, Artificial Sequence
  chemically synthesized
catgggcagcggagggtgga

SEQ ID NO: 65393 - DNA, 20 bp, Artificial Sequence
  chemically synthesized
gcagcggagggtggagggcc

SEQ ID NO: 65394 - DNA, 20 bp, Artificial Sequence
  chemically synthesized
agcggagggtggagggcctg

SEQ ID NO: 65395 - DNA, 20 bp, Artificial Sequence
  chemically synthesized
cggagggtggagggcctgga

SEQ ID NO: 65396 - DNA, 20 bp, Artificial Sequence
  chemically synthesized
agggtggagggcctggagag

SEQ ID NO: 65397 - DNA, 20 bp, Artificial Sequence
  chemically synthesized
gggtggagggcctggagaga

SEQ ID NO: 65398 - DNA, 20 bp, Artificial Sequence
  chemically synthesized
ctggagagaaggccctaccc

SEQ ID NO: 65399 - DNA, 20 bp, Artificial Sequence
  chemically synthesized
agagaaggccctacccgaga

SEQ ID NO: 65400 - DNA, 20 bp, Artificial Sequence
  chemically synthesized
gagaaggccctacccgagac

SEQ ID NO: 65401 - DNA, 20 bp, Artificial Sequence
  chemically synthesized
agaaggccctacccgagaca

SEQ ID NO: 65402 - DNA, 20 bp, Artificial Sequence
  chemically synthesized
gaaggccctacccgagacag

SEQ ID NO: 65403 - DNA, 20 bp, Artificial Sequence
  chemically synthesized
ggccctacccgagacagggg

SEQ ID NO: 65404 - DNA, 20 bp, Artificial Sequence
  chemically synthesized
gccctacccgagacaggggc

SEQ ID NO: 65405 - DNA, 20 bp, Artificial Sequence
  chemically synthesized
ccctacccgagacaggggcg

SEQ ID NO: 65406 - DNA, 20 bp, Artificial Sequence
  chemically synthesized
tacccgagacaggggcgggg

SEQ ID NO: 65407 - DNA, 20 bp, Artificial Sequence
  chemically synthesized
acccgagacaggggcggggt

SEQ ID NO: 65408 - DNA, 20 bp, Artificial Sequence
  chemically synthesized
cgagacaggggcggggtggg

SEQ ID NO: 65409 - DNA, 20 bp, Artificial Sequence
  chemically synthesized
gagacaggggcggggtggga

SEQ ID NO: 65410 - DNA, 20 bp, Artificial Sequence
  chemically synthesized
caggggcggggtgggaagga

SEQ ID NO: 65411 - DNA, 20 bp, Artificial Sequence
  chemically synthesized
gggcggggtgggaaggacgg

SEQ ID NO: 65412 - DNA, 20 bp, Artificial Sequence
  chemically synthesized
gtgggaaggacggcagatgc

SEQ ID NO: 65413 - DNA, 20 bp, Artificial Sequence
  chemically synthesized
tgggaaggacggcagatgct

SEQ ID NO: 65414 - DNA, 20 bp, Artificial Sequence
  chemically synthesized
ggaaggacggcagatgctgg

SEQ ID NO: 65415 - DNA, 20 bp, Artificial Sequence
  chemically synthesized
acggcagatgctgggagcac

SEQ ID NO: 65416 - DNA, 20 bp, Artificial Sequence
  chemically synthesized
cggcagatgctgggagcacg

SEQ ID NO: 65417 - DNA, 20 bp, Artificial Sequence
  chemically synthesized
gaggcaatttctttatgaca

SEQ ID NO: 65418 - DNA, 20 bp, Artificial Sequence
  chemically synthesized
atgacacagaactcatgctc

SEQ ID NO: 65419 - DNA, 20 bp, Artificial Sequence
  chemically synthesized
ctctagtattccatctgttt

SEQ ID NO: 65420 - DNA, 20 bp, Artificial Sequence
  chemically synthesized
tattccatctgtttcagccg

SEQ ID NO: 65421 - DNA, 20 bp, Artificial Sequence
  chemically synthesized
catctgtttcagccgaagaa

SEQ ID NO: 65422 - DNA, 20 bp, Artificial Sequence
  chemically synthesized
tttcagccgaagaaaagaac

SEQ ID NO: 65423 - DNA, 20 bp, Artificial Sequence
  chemically synthesized
ccgaagaaaagaaccagctg

SEQ ID NO: 65424 - DNA, 20 bp, Artificial Sequence
  chemically synthesized
cgaagaaaagaaccagctga

SEQ ID NO: 65425 - DNA, 20 bp, Artificial Sequence
  chemically synthesized
gaagaaaagaaccagctgaa

SEQ ID NO: 65426 - DNA, 20 bp, Artificial Sequence
  chemically synthesized
aagaaaagaaccagctgaag

SEQ ID NO: 65427 - DNA, 20 bp, Artificial Sequence
  chemically synthesized
aaaagaaccagctgaagggg

SEQ ID NO: 65428 - DNA, 20 bp, Artificial Sequence
  chemically synthesized
aaagaaccagctgaaggggc

SEQ ID NO: 65429 - DNA, 20 bp, Artificial Sequence
  chemically synthesized
aagaaccagctgaaggggca

SEQ ID NO: 65430 - DNA, 20 bp, Artificial Sequence
  chemically synthesized
agaaccagctgaaggggcag

SEQ ID NO: 65431 - DNA, 20 bp, Artificial Sequence
  chemically synthesized
aaccagctgaaggggcaggg

SEQ ID NO: 65432 - DNA, 20 bp, Artificial Sequence
  chemically synthesized
cagctgaaggggcaggggag

SEQ ID NO: 65433 - DNA, 20 bp, Artificial Sequence
  chemically synthesized
agctgaaggggcaggggaga

SEQ ID NO: 65434 - DNA, 20 bp, Artificial Sequence
  chemically synthesized
gctgaaggggcaggggagaa

SEQ ID NO: 65435 - DNA, 20 bp, Artificial Sequence
  chemically synthesized
ctgaaggggcaggggagaag

SEQ ID NO: 65436 - DNA, 20 bp, Artificial Sequence
  chemically synthesized
aaggggcaggggagaagggg

SEQ ID NO: 65437 - DNA, 20 bp, Artificial Sequence
  chemically synthesized
ggggcaggggagaaggggcg

SEQ ID NO: 65438 - DNA, 20 bp, Artificial Sequence
  chemically synthesized
gggcaggggagaaggggcgg

SEQ ID NO: 65439 - DNA, 20 bp, Artificial Sequence
  chemically synthesized
gaaggggcggaggtattctc

SEQ ID NO: 65440 - DNA, 20 bp, Artificial Sequence
  chemically synthesized
aaggggcggaggtattctcg

SEQ ID NO: 65441 - DNA, 20 bp, Artificial Sequence
  chemically synthesized
gaggtattctcgaggcccat

SEQ ID NO: 65442 - DNA, 20 bp, Artificial Sequence
  chemically synthesized
cgaggcccattggcgtcctt

SEQ ID NO: 65443 - DNA, 20 bp, Artificial Sequence
  chemically synthesized
gaggcccattggcgtccttt

SEQ ID NO: 65444 - DNA, 20 bp, Artificial Sequence
  chemically synthesized
cattggcgtcctttaggact

SEQ ID NO: 65445 - DNA, 20 bp, Artificial Sequence
  chemically synthesized
attggcgtcctttaggactc

SEQ ID NO: 65446 - DNA, 20 bp, Artificial Sequence
  chemically synthesized
ggcgtcctttaggactcagg

SEQ ID NO: 65447 - DNA, 20 bp, Artificial Sequence
  chemically synthesized
gcgtcctttaggactcaggc

SEQ ID NO: 65448 - DNA, 20 bp, Artificial Sequence
  chemically synthesized
cgtcctttaggactcaggca

SEQ ID NO: 65449 - DNA, 20 bp, Artificial Sequence
  chemically synthesized
cctttaggactcaggcaggg

SEQ ID NO: 65450 - DNA, 20 bp, Artificial Sequence
  chemically synthesized
ctttaggactcaggcaggga

SEQ ID NO: 65451 - DNA, 20 bp, Artificial Sequence
  chemically synthesized
tttaggactcaggcagggaa

SEQ ID NO: 65452 - DNA, 20 bp, Artificial Sequence
  chemically synthesized
ctcaggcagggaagggccct

SEQ ID NO: 65453 - DNA, 20 bp, Artificial Sequence
  chemically synthesized
gggaagggcccttggtgctc

SEQ ID NO: 65454 - DNA, 20 bp, Artificial Sequence
  chemically synthesized
gaagggcccttggtgctctg

SEQ ID NO: 65455 - DNA, 20 bp, Artificial Sequence
  chemically synthesized
ggcccttggtgctctggagc

SEQ ID NO: 65456 - DNA, 20 bp, Artificial Sequence
  chemically synthesized
cccttggtgctctggagccg

SEQ ID NO: 65457 - DNA, 20 bp, Artificial Sequence
  chemically synthesized
ccttggtgctctggagccgg

SEQ ID NO: 65458 - DNA, 20 bp, Artificial Sequence
  chemically synthesized
tggtgctctggagccggagg

SEQ ID NO: 65459 - DNA, 20 bp, Artificial Sequence
  chemically synthesized
ggagccggaggtggtgcgcc

SEQ ID NO: 65460 - DNA, 20 bp, Artificial Sequence
  chemically synthesized
ggaggtggtgcgcctggtac

SEQ ID NO: 65461 - DNA, 20 bp, Artificial Sequence
  chemically synthesized
gaggtggtgcgcctggtact

SEQ ID NO: 65462 - DNA, 20 bp, Artificial Sequence
  chemically synthesized
tgcgcctggtactgggaccc

SEQ ID NO: 65463 - DNA, 20 bp, Artificial Sequence
  chemically synthesized
cgcctggtactgggaccccg

SEQ ID NO: 65464 - DNA, 20 bp, Artificial Sequence
  chemically synthesized
ggtactgggaccccggagct

SEQ ID NO: 65465 - DNA, 20 bp, Artificial Sequence
  chemically synthesized
tgggaccccggagctgagcc

SEQ ID NO: 65466 - DNA, 20 bp, Artificial Sequence
  chemically synthesized
cggagctgagcccggcgcct

SEQ ID NO: 65467 - DNA, 20 bp, Artificial Sequence
  chemically synthesized
gcccggcgcctcagcccacc

SEQ ID NO: 65468 - DNA, 20 bp, Artificial Sequence
  chemically synthesized
ggctgtctgccgaccgtgtg

SEQ ID NO: 65469 - DNA, 20 bp, Artificial Sequence
  chemically synthesized
gctgtctgccgaccgtgtgc

SEQ ID NO: 65470 - DNA, 20 bp, Artificial Sequence
  chemically synthesized
ctgtctgccgaccgtgtgcg

SEQ ID NO: 65471 - DNA, 20 bp, Artificial Sequence
  chemically synthesized
ctgccgaccgtgtgcggggc

SEQ ID NO: 65472 - DNA, 20 bp, Artificial Sequence
  chemically synthesized
agtttgctcaacaactctgc

SEQ ID NO: 65473 - DNA, 20 bp, Artificial Sequence
  chemically synthesized
tcaacaactctgccagcttc

SEQ ID NO: 65474 - DNA, 20 bp, Artificial Sequence
  chemically synthesized
ctctgccagcttctggccct

SEQ ID NO: 65475 - DNA, 20 bp, Artificial Sequence
  chemically synthesized
tctgccagcttctggccctc

SEQ ID NO: 65476 - DNA, 20 bp, Artificial Sequence
  chemically synthesized
agcttctggccctcaggctg

SEQ ID NO: 65477 - DNA, 20 bp, Artificial Sequence
  chemically synthesized
gcttctggccctcaggctgt

SEQ ID NO: 65478 - DNA, 20 bp, Artificial Sequence
  chemically synthesized
tctggccctcaggctgtggg

SEQ ID NO: 65479 - DNA, 20 bp, Artificial Sequence
  chemically synthesized
ggctgtgggaagcttcttcc

SEQ ID NO: 65480 - DNA, 20 bp, Artificial Sequence
  chemically synthesized
gctgtgggaagcttcttccc

SEQ ID NO: 65481 - DNA, 20 bp, Artificial Sequence
  chemically synthesized
ctgtgggaagcttcttcccg

SEQ ID NO: 65482 - DNA, 20 bp, Artificial Sequence
  chemically synthesized
gggaagcttcttcccggggc

SEQ ID NO: 65483 - DNA, 20 bp, Artificial Sequence
  chemically synthesized
tcttcccggggcgagaccac

SEQ ID NO: 65484 - DNA, 20 bp, Artificial Sequence
  chemically synthesized
cgagaccactagctttttct

SEQ ID NO: 65485 - DNA, 20 bp, Artificial Sequence
  chemically synthesized
tagctttttctaagtattac

SEQ ID NO: 65486 - DNA, 20 bp, Artificial Sequence
  chemically synthesized
ttttctaagtattaccagcc

SEQ ID NO: 65487 - DNA, 20 bp, Artificial Sequence
  chemically synthesized
tttctaagtattaccagccc

SEQ ID NO: 65488 - DNA, 20 bp, Artificial Sequence
  chemically synthesized
agtattaccagcccaggact

SEQ ID NO: 65489 - DNA, 20 bp, Artificial Sequence
  chemically synthesized
taccagcccaggacttggct

SEQ ID NO: 65490 - DNA, 20 bp, Artificial Sequence
  chemically synthesized
accagcccaggacttggctg

SEQ ID NO: 65491 - DNA, 20 bp, Artificial Sequence
  chemically synthesized
ggctgaggttctgtgtcccc

SEQ ID NO: 65492 - DNA, 20 bp, Artificial Sequence
  chemically synthesized
aggttctgtgtcccccagct

SEQ ID NO: 65493 - DNA, 20 bp, Artificial Sequence
  chemically synthesized
gttctgtgtcccccagcttg

SEQ ID NO: 65494 - DNA, 20 bp, Artificial Sequence
  chemically synthesized
tgtgtcccccagcttggagt

SEQ ID NO: 65495 - DNA, 20 bp, Artificial Sequence
  chemically synthesized
ccccagcttggagtcagatg

SEQ ID NO: 65496 - DNA, 20 bp, Artificial Sequence
  chemically synthesized
cccagcttggagtcagatgt

SEQ ID NO: 65497 - DNA, 20 bp, Artificial Sequence
  chemically synthesized
ccagcttggagtcagatgtg

SEQ ID NO: 65498 - DNA, 20 bp, Artificial Sequence
  chemically synthesized
tcagatgtggggttgaatct

SEQ ID NO: 65499 - DNA, 20 bp, Artificial Sequence
  chemically synthesized
gaatcttggcttcctctcac

SEQ ID NO: 65500 - DNA, 20 bp, Artificial Sequence
  chemically synthesized
tggcttcctctcactagctg

SEQ ID NO: 65501 - DNA, 20 bp, Artificial Sequence
  chemically synthesized
cactagctgtggtgcttgac

SEQ ID NO: 65502 - DNA, 20 bp, Artificial Sequence
  chemically synthesized
ttgacaagtcacttatcctt

SEQ ID NO: 65503 - DNA, 20 bp, Artificial Sequence
  chemically synthesized
ctccattgcctaatctttaa

SEQ ID NO: 65504 - DNA, 20 bp, Artificial Sequence
  chemically synthesized
tccattgcctaatctttaaa

SEQ ID NO: 65505 - DNA, 20 bp, Artificial Sequence
  chemically synthesized
ccattgcctaatctttaaaa

SEQ ID NO: 65506 - DNA, 20 bp, Artificial Sequence
  chemically synthesized
attgcctaatctttaaaagg

SEQ ID NO: 65507 - DNA, 20 bp, Artificial Sequence
  chemically synthesized
ttgcctaatctttaaaaggg

SEQ ID NO: 65508 - DNA, 20 bp, Artificial Sequence
  chemically synthesized
ggaggtgacaatcgtcccta

SEQ ID NO: 65509 - DNA, 20 bp, Artificial Sequence
  chemically synthesized
tgacaatcgtccctacggct

SEQ ID NO: 65510 - DNA, 20 bp, Artificial Sequence
  chemically synthesized
caatcgtccctacggctcag

SEQ ID NO: 65511 - DNA, 20 bp, Artificial Sequence
  chemically synthesized
tcgtccctacggctcagtgg

SEQ ID NO: 65512 - DNA, 20 bp, Artificial Sequence
  chemically synthesized
tccctacggctcagtggcag

SEQ ID NO: 65513 - DNA, 20 bp, Artificial Sequence
  chemically synthesized
tacggctcagtggcagcaga

SEQ ID NO: 65514 - DNA, 20 bp, Artificial Sequence
  chemically synthesized
acggctcagtggcagcagat

SEQ ID NO: 65515 - DNA, 20 bp, Artificial Sequence
  chemically synthesized
cggctcagtggcagcagatg

SEQ ID NO: 65516 - DNA, 20 bp, Artificial Sequence
  chemically synthesized
gctcagtggcagcagatggg

SEQ ID NO: 65517 - DNA, 20 bp, Artificial Sequence
  chemically synthesized
tggcagcagatggggagatg

SEQ ID NO: 65518 - DNA, 20 bp, Artificial Sequence
  chemically synthesized
ggcagcagatggggagatga

SEQ ID NO: 65519 - DNA, 20 bp, Artificial Sequence
  chemically synthesized
gcagcagatggggagatgaa

SEQ ID NO: 65520 - DNA, 20 bp, Artificial Sequence
  chemically synthesized
cagatggggagatgaaggga

SEQ ID NO: 65521 - DNA, 20 bp, Artificial Sequence
  chemically synthesized
gggaaagttctgttgaccat

SEQ ID NO: 65522 - DNA, 20 bp, Artificial Sequence
  chemically synthesized
catgagtgaacttacaatgc

SEQ ID NO: 65523 - DNA, 20 bp, Artificial Sequence
  chemically synthesized
tgaacttacaatgcaagccc

SEQ ID NO: 65524 - DNA, 20 bp, Artificial Sequence
  chemically synthesized
gaacttacaatgcaagcccc

SEQ ID NO: 65525 - DNA, 20 bp, Artificial Sequence
  chemically synthesized
aacttacaatgcaagccccg

SEQ ID NO: 65526 - DNA, 20 bp, Artificial Sequence
  chemically synthesized
acttacaatgcaagccccgg

SEQ ID NO: 65527 - DNA, 20 bp, Artificial Sequence
  chemically synthesized
cttacaatgcaagccccggg

SEQ ID NO: 65528 - DNA, 20 bp, Artificial Sequence
  chemically synthesized
agccccggggggatcacttg

SEQ ID NO: 65529 - DNA, 20 bp, Artificial Sequence
  chemically synthesized
tgcagttttgtccctgtctg

SEQ ID NO: 65530 - DNA, 20 bp, Artificial Sequence
  chemically synthesized
ctgtctgcagtgtgacctgt

SEQ ID NO: 65531 - DNA, 20 bp, Artificial Sequence
  chemically synthesized
attgtctttgctccaaacca

SEQ ID NO: 65532 - DNA, 20 bp, Artificial Sequence
  chemically synthesized
ttgctccaaaccacagctcc

SEQ ID NO: 65533 - DNA, 20 bp, Artificial Sequence
  chemically synthesized
tgctccaaaccacagctcct

SEQ ID NO: 65534 - DNA, 20 bp, Artificial Sequence
  chemically synthesized
gctccaaaccacagctcctg

SEQ ID NO: 65535 - DNA, 20 bp, Artificial Sequence
  chemically synthesized
ccaaaccacagctcctgggg

SEQ ID NO: 65536 - DNA, 20 bp, Artificial Sequence
  chemically synthesized
aaaccacagctcctggggca

SEQ ID NO: 65537 - DNA, 20 bp, Artificial Sequence
  chemically synthesized
aaccacagctcctggggcag

SEQ ID NO: 65538 - DNA, 20 bp, Artificial Sequence
  chemically synthesized
accacagctcctggggcaga

SEQ ID NO: 65539 - DNA, 20 bp, Artificial Sequence
  chemically synthesized
ccacagctcctggggcagag

SEQ ID NO: 65540 - DNA, 20 bp, Artificial Sequence
  chemically synthesized
ggggaaaattctgccactca

SEQ ID NO: 65541 - DNA, 20 bp, Artificial Sequence
  chemically synthesized
gcctgcccacgcttctgtct

SEQ ID NO: 65542 - DNA, 20 bp, Artificial Sequence
  chemically synthesized
acgcttctgtctgagtgtgc

SEQ ID NO: 65543 - DNA, 20 bp, Artificial Sequence
  chemically synthesized
cgcttctgtctgagtgtgct

SEQ ID NO: 65544 - DNA, 20 bp, Artificial Sequence
  chemically synthesized
ttctgtctgagtgtgctggg

SEQ ID NO: 65545 - DNA, 20 bp, Artificial Sequence
  chemically synthesized
tgtctgagtgtgctgggtgg

SEQ ID NO: 65546 - DNA, 20 bp, Artificial Sequence
  chemically synthesized
gtctgagtgtgctgggtggc

SEQ ID NO: 65547 - DNA, 20 bp, Artificial Sequence
  chemically synthesized
gagtgtgctgggtggcagga

SEQ ID NO: 65548 - DNA, 20 bp, Artificial Sequence
  chemically synthesized
gtgctgggtggcaggatggc

SEQ ID NO: 65549 - DNA, 20 bp, Artificial Sequence
  chemically synthesized
caggatggcaagtccttact

SEQ ID NO: 65550 - DNA, 20 bp, Artificial Sequence
  chemically synthesized
tggcaagtccttactcagct

SEQ ID NO: 65551 - DNA, 20 bp, Artificial Sequence
  chemically synthesized
agtccttactcagctcagta

SEQ ID NO: 65552 - DNA, 20 bp, Artificial Sequence
  chemically synthesized
agccctcttccttgttccct

SEQ ID NO: 65553 - DNA, 20 bp, Artificial Sequence
  chemically synthesized
cctgagcctttgactttctc

SEQ ID NO: 65554 - DNA, 20 bp, Artificial Sequence
  chemically synthesized
ctgagcctttgactttctcg

SEQ ID NO: 65555 - DNA, 20 bp, Artificial Sequence
  chemically synthesized
tgagcctttgactttctcga

SEQ ID NO: 65556 - DNA, 20 bp, Artificial Sequence
  chemically synthesized
gactttctcgagggatgttg

SEQ ID NO: 65557 - DNA, 20 bp, Artificial Sequence
  chemically synthesized
actttctcgagggatgttgt

SEQ ID NO: 65558 - DNA, 20 bp, Artificial Sequence
  chemically synthesized
ctttctcgagggatgttgtg

SEQ ID NO: 65559 - DNA, 20 bp, Artificial Sequence
  chemically synthesized
cgagggatgttgtggggttg

SEQ ID NO: 65560 - DNA, 20 bp, Artificial Sequence
  chemically synthesized
ggatgttgtggggttgtggc

SEQ ID NO: 65561 - DNA, 20 bp, Artificial Sequence
  chemically synthesized
gatgttgtggggttgtggcc

SEQ ID NO: 65562 - DNA, 20 bp, Artificial Sequence
  chemically synthesized
tgtggggttgtggccaggat

SEQ ID NO: 65563 - DNA, 20 bp, Artificial Sequence
  chemically synthesized
gggttgtggccaggataaga

SEQ ID NO: 65564 - DNA, 20 bp, Artificial Sequence
  chemically synthesized
ggttgtggccaggataagaa

SEQ ID NO: 65565 - DNA, 20 bp, Artificial Sequence
  chemically synthesized
gttgtggccaggataagaaa

SEQ ID NO: 65566 - DNA, 20 bp, Artificial Sequence
  chemically synthesized
aggataagaaagggcatttc

SEQ ID NO: 65567 - DNA, 20 bp, Artificial Sequence
  chemically synthesized
ctgctccaaaacaactgttc

SEQ ID NO: 65568 - DNA, 20 bp, Artificial Sequence
  chemically synthesized
caaaacaactgttctggaaa

SEQ ID NO: 65569 - DNA, 20 bp, Artificial Sequence
  chemically synthesized
acaactgttctggaaatagt

SEQ ID NO: 65570 - DNA, 20 bp, Artificial Sequence
  chemically synthesized
aatagtgagtaccccatcct

SEQ ID NO: 65571 - DNA, 20 bp, Artificial Sequence
  chemically synthesized
tagtgagtaccccatcctga

SEQ ID NO: 65572 - DNA, 20 bp, Artificial Sequence
  chemically synthesized
agtgagtaccccatcctgag

SEQ ID NO: 65573 - DNA, 20 bp, Artificial Sequence
  chemically synthesized
agtaccccatcctgagaggt

SEQ ID NO: 65574 - DNA, 20 bp, Artificial Sequence
  chemically synthesized
ccccatcctgagaggtgagt

SEQ ID NO: 65575 - DNA, 20 bp, Artificial Sequence
  chemically synthesized
catcctgagaggtgagtaag

SEQ ID NO: 65576 - DNA, 20 bp, Artificial Sequence
  chemically synthesized
tcctgagaggtgagtaagca

SEQ ID NO: 65577 - DNA, 20 bp, Artificial Sequence
  chemically synthesized
cctgagaggtgagtaagcag

SEQ ID NO: 65578 - DNA, 20 bp, Artificial Sequence
  chemically synthesized
gctgtatgaccacctgaacc

SEQ ID NO: 65579 - DNA, 20 bp, Artificial Sequence
  chemically synthesized
accacctgaaccaagccctt

SEQ ID NO: 65580 - DNA, 20 bp, Artificial Sequence
  chemically synthesized
ccacctgaaccaagcccttg

SEQ ID NO: 65581 - DNA, 20 bp, Artificial Sequence
  chemically synthesized
ccttgaggatgtttcttctc

SEQ ID NO: 65582 - DNA, 20 bp, Artificial Sequence
  chemically synthesized
tgaggatgtttcttctctgg

SEQ ID NO: 65583 - DNA, 20 bp, Artificial Sequence
  chemically synthesized
ggatgtttcttctctggtgg

SEQ ID NO: 65584 - DNA, 20 bp, Artificial Sequence
  chemically synthesized
tttcttctctggtggaagtt

SEQ ID NO: 65585 - DNA, 20 bp, Artificial Sequence
  chemically synthesized
tctctggtggaagtttggaa

SEQ ID NO: 65586 - DNA, 20 bp, Artificial Sequence
  chemically synthesized
ctctggtggaagtttggaac

SEQ ID NO: 65587 - DNA, 20 bp, Artificial Sequence
  chemically synthesized
ctggtggaagtttggaacag

SEQ ID NO: 65588 - DNA, 20 bp, Artificial Sequence
  chemically synthesized
tttggaacaggagcctcctc

SEQ ID NO: 65589 - DNA, 20 bp, Artificial Sequence
  chemically synthesized
tcatttattcattcattcaa

SEQ ID NO: 65590 - DNA, 20 bp, Artificial Sequence
  chemically synthesized
ttcattcaatggttattttg

SEQ ID NO: 65591 - DNA, 20 bp, Artificial Sequence
  chemically synthesized
tcattcaatggttattttgt

SEQ ID NO: 65592 - DNA, 20 bp, Artificial Sequence
  chemically synthesized
tattttgtgggaatcgaatt

SEQ ID NO: 65593 - DNA, 20 bp, Artificial Sequence
  chemically synthesized
tttagaatgaaaatattttt

SEQ ID NO: 65594 - DNA, 20 bp, Artificial Sequence
  chemically synthesized
gaatgaaaatattttttggc

SEQ ID NO: 65595 - DNA, 20 bp, Artificial Sequence
  chemically synthesized
tgaaaatattttttggcaag

SEQ ID NO: 65596 - DNA, 20 bp, Artificial Sequence
  chemically synthesized
ggcaagcagaaaataatttt

SEQ ID NO: 65597 - DNA, 20 bp, Artificial Sequence
  chemically synthesized
ttagaccaatccttttcttt

SEQ ID NO: 65598 - DNA, 20 bp, Artificial Sequence
  chemically synthesized
aatccttttcttttagtcat

SEQ ID NO: 65599 - DNA, 20 bp, Artificial Sequence
  chemically synthesized
tcttttagtcatgagaaact

SEQ ID NO: 65600 - DNA, 20 bp, Artificial Sequence
  chemically synthesized
cttttagtcatgagaaactg

SEQ ID NO: 65601 - DNA, 20 bp, Artificial Sequence
  chemically synthesized
agtcatgagaaactgaggcc

SEQ ID NO: 65602 - DNA, 20 bp, Artificial Sequence
  chemically synthesized
tcatgagaaactgaggccca

SEQ ID NO: 65603 - DNA, 20 bp, Artificial Sequence
  chemically synthesized
atgagaaactgaggcccaga

SEQ ID NO: 65604 - DNA, 20 bp, Artificial Sequence
  chemically synthesized
gagaaactgaggcccagaga

SEQ ID NO: 65605 - DNA, 20 bp, Artificial Sequence
  chemically synthesized
agaaactgaggcccagagag

SEQ ID NO: 65606 - DNA, 20 bp, Artificial Sequence
  chemically synthesized
aaactgaggcccagagagag

SEQ ID NO: 65607 - DNA, 20 bp, Artificial Sequence
  chemically synthesized
aactgaggcccagagagagg

SEQ ID NO: 65608 - DNA, 20 bp, Artificial Sequence
  chemically synthesized
ccagagagaggaggtcaccc

SEQ ID NO: 65609 - DNA, 20 bp, Artificial Sequence
  chemically synthesized
cagagagaggaggtcacccc

SEQ ID NO: 65610 - DNA, 20 bp, Artificial Sequence
  chemically synthesized
ggaggtcaccccaggtgcat

SEQ ID NO: 65611 - DNA, 20 bp, Artificial Sequence
  chemically synthesized
caccccaggtgcattagaac

SEQ ID NO: 65612 - DNA, 20 bp, Artificial Sequence
  chemically synthesized
accccaggtgcattagaact

SEQ ID NO: 65613 - DNA, 20 bp, Artificial Sequence
  chemically synthesized
gtgcattagaactgggtttc

SEQ ID NO: 65614 - DNA, 20 bp, Artificial Sequence
  chemically synthesized
agaactgacactccactgca

SEQ ID NO: 65615 - DNA, 20 bp, Artificial Sequence
  chemically synthesized
aactgacactccactgcaca

SEQ ID NO: 65616 - DNA, 20 bp, Artificial Sequence
  chemically synthesized
caattcattcaatttttatt

SEQ ID NO: 65617 - DNA, 20 bp, Artificial Sequence
  chemically synthesized
ttcattcaatttttatttag

SEQ ID NO: 65618 - DNA, 20 bp, Artificial Sequence
  chemically synthesized
attcaatttttatttagcgg

SEQ ID NO: 65619 - DNA, 20 bp, Artificial Sequence
  chemically synthesized
ttcaatttttatttagcgga

SEQ ID NO: 65620 - DNA, 20 bp, Artificial Sequence
  chemically synthesized
tatttagcggaaggcatttt

SEQ ID NO: 65621 - DNA, 20 bp, Artificial Sequence
  chemically synthesized
tagcggaaggcattttcaga

SEQ ID NO: 65622 - DNA, 20 bp, Artificial Sequence
  chemically synthesized
agcggaaggcattttcagat

SEQ ID NO: 65623 - DNA, 20 bp, Artificial Sequence
  chemically synthesized
cattttcagatgggtctttg

SEQ ID NO: 65624 - DNA, 20 bp, Artificial Sequence
  chemically synthesized
cagatgggtctttgaagcat

SEQ ID NO: 65625 - DNA, 20 bp, Artificial Sequence
  chemically synthesized
atgggtctttgaagcattag

SEQ ID NO: 65626 - DNA, 20 bp, Artificial Sequence
  chemically synthesized
tgggtctttgaagcattagt
